United States Patent Application Publication US 2005/0287570 A1 - sequence listing, part 6

SEQ ID NO: 56970 - DNA, 25 bp, Artificial
  Probe
taataaccactggatcactacacta

SEQ ID NO: 56971 - DNA, 25 bp, Artificial
  Probe
acattattacattccttctgctgtt

SEQ ID NO: 56972 - DNA, 25 bp, Artificial
  Probe
tctgctgttcatattaaccttgtat

SEQ ID NO: 56973 - DNA, 25 bp, Artificial
  Probe
acattccttctgctgttcatattaa

SEQ ID NO: 56974 - DNA, 25 bp, Artificial
  Probe
ttacattccttctgctgttcatatt

SEQ ID NO: 56975 - DNA, 25 bp, Artificial
  Probe
ttattacattccttctgctgttcat

SEQ ID NO: 56976 - DNA, 25 bp, Artificial
  Probe
attattacattccttctgctgttca

SEQ ID NO: 56977 - DNA, 25 bp, Artificial
  Probe
taggcagcaattctgactatacgat

SEQ ID NO: 56978 - DNA, 25 bp, Artificial
  Probe
attacattccttctgctgttcatat

SEQ ID NO: 56979 - DNA, 25 bp, Artificial
  Probe
cattattacattccttctgctgttc

SEQ ID NO: 56980 - DNA, 25 bp, Artificial
  Probe
ggagtaggcagcaattctgactata

SEQ ID NO: 56981 - DNA, 25 bp, Artificial
  Probe
tacattccttctgctgttcatatta

SEQ ID NO: 56982 - DNA, 25 bp, Artificial
  Probe
tattacattccttctgctgttcata

SEQ ID NO: 56983 - DNA, 25 bp, Artificial
  Probe
aggcagcaattctgactatacgatt

SEQ ID NO: 56984 - DNA, 25 bp, Artificial
  Probe
tataaattcatcagccacacaacca

SEQ ID NO: 56985 - DNA, 25 bp, Artificial
  Probe
gtaggcagcaattctgactatacga

SEQ ID NO: 56986 - DNA, 25 bp, Artificial
  Probe
agtaggcagcaattctgactatacg

SEQ ID NO: 56987 - DNA, 25 bp, Artificial
  Probe
tcttcacattattacattccttctg

SEQ ID NO: 56988 - DNA, 25 bp, Artificial
  Probe
cagccacacaaccaaatagattcta

SEQ ID NO: 56989 - DNA, 25 bp, Artificial
  Probe
aattcatcagccacacaaccaaata

SEQ ID NO: 56990 - DNA, 25 bp, Artificial
  Probe
ataaattcatcagccacacaaccaa

SEQ ID NO: 56991 - DNA, 25 bp, Artificial
  Probe
tcgtacacagtcctttaataaccac

SEQ ID NO: 56992 - DNA, 25 bp, Artificial
  Probe
gtcgtacacagtcctttaataacca

SEQ ID NO: 56993 - DNA, 25 bp, Artificial
  Probe
atcagccacacaaccaaatagattc

SEQ ID NO: 56994 - DNA, 25 bp, Artificial
  Probe
ataaccactggatcactacactaaa

SEQ ID NO: 56995 - DNA, 25 bp, Artificial
  Probe
attcatcagccacacaaccaaatag

SEQ ID NO: 56996 - DNA, 25 bp, Artificial
  Probe
taaattcatcagccacacaaccaaa

SEQ ID NO: 56997 - DNA, 25 bp, Artificial
  Probe
catcagccacacaaccaaatagatt

SEQ ID NO: 56998 - DNA, 25 bp, Artificial
  Probe
cctttaataaccactggatcactac

SEQ ID NO: 56999 - DNA, 25 bp, Artificial
  Probe
ctcttcacattattacattccttct

SEQ ID NO: 57000 - DNA, 25 bp, Artificial
  Probe
ttataaattcatcagccacacaacc

SEQ ID NO: 57001 - DNA, 25 bp, Artificial
  Probe
tattaactctgttctctgcttcagc

SEQ ID NO: 57002 - DNA, 25 bp, Artificial
  Probe
atattaactctgttctctgcttcag

SEQ ID NO: 57003 - DNA, 25 bp, Artificial
  Probe
aatattaacctcttagacctgcacc

SEQ ID NO: 57004 - DNA, 25 bp, Artificial
  Probe
atattaacctcttagacctgcacct

SEQ ID NO: 57005 - DNA, 25 bp, Artificial
  Probe
tattaacctcttagacctgcacctt

SEQ ID NO: 57006 - DNA, 25 bp, Artificial
  Probe
attaacctcttagacctgcaccttc

SEQ ID NO: 57007 - DNA, 25 bp, Artificial
  Probe
taacctcttagacctgcaccttctt

SEQ ID NO: 57008 - DNA, 25 bp, Artificial
  Probe
ttaacctcttagacctgcaccttct

SEQ ID NO: 57009 - DNA, 25 bp, Artificial
  Probe
aaatattaacctcttagacctgcac

SEQ ID NO: 57010 - DNA, 25 bp, Artificial
  Probe
ttatcctagtaactgtgtctttcac

SEQ ID NO: 57011 - DNA, 25 bp, Artificial
  Probe
gttatcctagtaactgtgtctttca

SEQ ID NO: 57012 - DNA, 25 bp, Artificial
  Probe
ttcttacaccaacttttcacctctc

SEQ ID NO: 57013 - DNA, 25 bp, Artificial
  Probe
cttcttacaccaacttttcacctct

SEQ ID NO: 57014 - DNA, 25 bp, Artificial
  Probe
cttacaccaacttttcacctctctg

SEQ ID NO: 57015 - DNA, 25 bp, Artificial
  Probe
tcttacaccaacttttcacctctct

SEQ ID NO: 57016 - DNA, 25 bp, Artificial
  Probe
ctcttagacctgcaccttcttcttt

SEQ ID NO: 57017 - DNA, 25 bp, Artificial
  Probe
attaactctgttctctgcttcagca

SEQ ID NO: 57018 - DNA, 25 bp, Artificial
  Probe
aagaaacaaaatgggaccctttaac

SEQ ID NO: 57019 - DNA, 25 bp, Artificial
  Probe
tcttagacctgcaccttcttctttg

SEQ ID NO: 57020 - DNA, 25 bp, Artificial
  Probe
cctcttagacctgcaccttcttctt

SEQ ID NO: 57021 - DNA, 25 bp, Artificial
  Probe
ttaactctgttctctgcttcagcaa

SEQ ID NO: 57022 - DNA, 25 bp, Artificial
  Probe
aatttaggcaaaacttggtacacag

SEQ ID NO: 57023 - DNA, 25 bp, Artificial
  Probe
caatttaggcaaaacttggtacaca

SEQ ID NO: 57024 - DNA, 25 bp, Artificial
  Probe
acaatttaggcaaaacttggtacac

SEQ ID NO: 57025 - DNA, 25 bp, Artificial
  Probe
cacaatttaggcaaaacttggtaca

SEQ ID NO: 57026 - DNA, 25 bp, Artificial
  Probe
cttagacctgcaccttcttctttgt

SEQ ID NO: 57027 - DNA, 25 bp, Artificial
  Probe
taaatattaacctcttagacctgca

SEQ ID NO: 57028 - DNA, 25 bp, Artificial
  Probe
atttaggcaaaacttggtacacaga

SEQ ID NO: 57029 - DNA, 25 bp, Artificial
  Probe
gcttcttacaccaacttttcacctc

SEQ ID NO: 57030 - DNA, 25 bp, Artificial
  Probe
taggcaaaacttggtacacagaaaa

SEQ ID NO: 57031 - DNA, 25 bp, Artificial
  Probe
ttaggcaaaacttggtacacagaaa

SEQ ID NO: 57032 - DNA, 25 bp, Artificial
  Probe
tttaggcaaaacttggtacacagaa

SEQ ID NO: 57033 - DNA, 25 bp, Artificial
  Probe
ctgcaccttcttctttgtccacata

SEQ ID NO: 57034 - DNA, 25 bp, Artificial
  Probe
aacctcttagacctgcaccttcttc

SEQ ID NO: 57035 - DNA, 25 bp, Artificial
  Probe
agaaacaaaatgggaccctttaacc

SEQ ID NO: 57036 - DNA, 25 bp, Artificial
  Probe
taactctgttctctgcttcagcaag

SEQ ID NO: 57037 - DNA, 25 bp, Artificial
  Probe
ttcaaagaaacaaaatgggaccctt

SEQ ID NO: 57038 - DNA, 25 bp, Artificial
  Probe
gcacaatttaggcaaaacttggtac

SEQ ID NO: 57039 - DNA, 25 bp, Artificial
  Probe
ttagacctgcaccttcttctttgtc

SEQ ID NO: 57040 - DNA, 25 bp, Artificial
  Probe
tgcaccttcttctttgtccacatac

SEQ ID NO: 57041 - DNA, 25 bp, Artificial
  Probe
ttacaccaacttttcacctctctgt

SEQ ID NO: 57042 - DNA, 25 bp, Artificial
  Probe
ataaatattaacctcttagacctgc

SEQ ID NO: 57043 - DNA, 25 bp, Artificial
  Probe
caaagaaacaaaatgggacccttta

SEQ ID NO: 57044 - DNA, 25 bp, Artificial
  Probe
aaagaaacaaaatgggaccctttaa

SEQ ID NO: 57045 - DNA, 25 bp, Artificial
  Probe
ggcttcttacaccaacttttcacct

SEQ ID NO: 57046 - DNA, 25 bp, Artificial
  Probe
tgttatgtagttcggatagcttagt

SEQ ID NO: 57047 - DNA, 25 bp, Artificial
  Probe
ctgttatgtagttcggatagcttag

SEQ ID NO: 57048 - DNA, 25 bp, Artificial
  Probe
actgttatgtagttcggatagctta

SEQ ID NO: 57049 - DNA, 25 bp, Artificial
  Probe
gttatgtagttcggatagcttagtt

SEQ ID NO: 57050 - DNA, 25 bp, Artificial
  Probe
acccattcttatttcaatttctcct

SEQ ID NO: 57051 - DNA, 25 bp, Artificial
  Probe
gacccattcttatttcaatttctcc

SEQ ID NO: 57052 - DNA, 25 bp, Artificial
  Probe
cccattcttatttcaatttctcctt

SEQ ID NO: 57053 - DNA, 25 bp, Artificial
  Probe
aactgttatgtagttcggatagctt

SEQ ID NO: 57054 - DNA, 25 bp, Artificial
  Probe
aagtgtttccttctggttcttggtt

SEQ ID NO: 57055 - DNA, 25 bp, Artificial
  Probe
tgacccattcttatttcaatttctc

SEQ ID NO: 57056 - DNA, 25 bp, Artificial
  Probe
ataactgttatgtagttcggatagc

SEQ ID NO: 57057 - DNA, 25 bp, Artificial
  Probe
taactgttatgtagttcggatagct

SEQ ID NO: 57058 - DNA, 25 bp, Artificial
  Probe
caagtctttagaatagcttcgcctc

SEQ ID NO: 57059 - DNA, 25 bp, Artificial
  Probe
agtgtttccttctggttcttggttc

SEQ ID NO: 57060 - DNA, 25 bp, Artificial
  Probe
ggtgaccaagtctttagaatagctt

SEQ ID NO: 57061 - DNA, 25 bp, Artificial
  Probe
tgaccaagtctttagaatagcttcg

SEQ ID NO: 57062 - DNA, 25 bp, Artificial
  Probe
gtgaccaagtctttagaatagcttc

SEQ ID NO: 57063 - DNA, 25 bp, Artificial
  Probe
ctgtttaaagtctttgtagcgttta

SEQ ID NO: 57064 - DNA, 25 bp, Artificial
  Probe
ttatgtagttcggatagcttagttt

SEQ ID NO: 57065 - DNA, 25 bp, Artificial
  Probe
ttgttctttaattttgtgccactgt

SEQ ID NO: 57066 - DNA, 25 bp, Artificial
  Probe
cttgttctttaattttgtgccactg

SEQ ID NO: 57067 - DNA, 25 bp, Artificial
  Probe
tcttgttctttaattttgtgccact

SEQ ID NO: 57068 - DNA, 25 bp, Artificial
  Probe
gaccaagtctttagaatagcttcgc

SEQ ID NO: 57069 - DNA, 25 bp, Artificial
  Probe
aagtctttagaatagcttcgcctcc

SEQ ID NO: 57070 - DNA, 25 bp, Artificial
  Probe
ttcttgttctttaattttgtgccac

SEQ ID NO: 57071 - DNA, 25 bp, Artificial
  Probe
tgttctttaattttgtgccactgtg

SEQ ID NO: 57072 - DNA, 25 bp, Artificial
  Probe
ccaagtctttagaatagcttcgcct

SEQ ID NO: 57073 - DNA, 25 bp, Artificial
  Probe
tttcttgttctttaattttgtgcca

SEQ ID NO: 57074 - DNA, 25 bp, Artificial
  Probe
ccctgcttgattgaagtgtttcctt

SEQ ID NO: 57075 - DNA, 25 bp, Artificial
  Probe
gtctttagaatagcttcgcctcctc

SEQ ID NO: 57076 - DNA, 25 bp, Artificial
  Probe
attgaagtgtttccttctggttctt

SEQ ID NO: 57077 - DNA, 25 bp, Artificial
  Probe
accaagtctttagaatagcttcgcc

SEQ ID NO: 57078 - DNA, 25 bp, Artificial
  Probe
gctgtttaaagtctttgtagcgttt

SEQ ID NO: 57079 - DNA, 25 bp, Artificial
  Probe
ttgattgaagtgtttccttctggtt

SEQ ID NO: 57080 - DNA, 25 bp, Artificial
  Probe
gattgaagtgtttccttctggttct

SEQ ID NO: 57081 - DNA, 25 bp, Artificial
  Probe
agtctttagaatagcttcgcctcct

SEQ ID NO: 57082 - DNA, 25 bp, Artificial
  Probe
agctgtttaaagtctttgtagcgtt

SEQ ID NO: 57083 - DNA, 25 bp, Artificial
  Probe
tgattgaagtgtttccttctggttc

SEQ ID NO: 57084 - DNA, 25 bp, Artificial
  Probe
cttgattgaagtgtttccttctggt

SEQ ID NO: 57085 - DNA, 25 bp, Artificial
  Probe
ttgaagtgtttccttctggttcttg

SEQ ID NO: 57086 - DNA, 25 bp, Artificial
  Probe
ccattcttatttcaatttctccttt

SEQ ID NO: 57087 - DNA, 25 bp, Artificial
  Probe
ctgcttgattgaagtgtttccttct

SEQ ID NO: 57088 - DNA, 25 bp, Artificial
  Probe
ttttcttgttctttaattttgtgcc

SEQ ID NO: 57089 - DNA, 25 bp, Artificial
  Probe
tgcttgattgaagtgtttccttctg

SEQ ID NO: 57090 - DNA, 25 bp, Artificial
  Probe
gtgtttccttctggttcttggttcg

SEQ ID NO: 57091 - DNA, 25 bp, Artificial
  Probe
tggactaattcatgcttcataatgg

SEQ ID NO: 57092 - DNA, 25 bp, Artificial
  Probe
ggactaattcatgcttcataatgga

SEQ ID NO: 57093 - DNA, 25 bp, Artificial
  Probe
tgttggactaattcatgcttcataa

SEQ ID NO: 57094 - DNA, 25 bp, Artificial
  Probe
atgttggactaattcatgcttcata

SEQ ID NO: 57095 - DNA, 25 bp, Artificial
  Probe
tcttgaccatgttggactaattcat

SEQ ID NO: 57096 - DNA, 25 bp, Artificial
  Probe
cttcttgaccatgttggactaattc

SEQ ID NO: 57097 - DNA, 25 bp, Artificial
  Probe
ttcttgaccatgttggactaattca

SEQ ID NO: 57098 - DNA, 25 bp, Artificial
  Probe
acttcttgaccatgttggactaatt

SEQ ID NO: 57099 - DNA, 25 bp, Artificial
  Probe
ggaacggataagggattattaccaa

SEQ ID NO: 57100 - DNA, 25 bp, Artificial
  Probe
ttggactaattcatgcttcataatg

SEQ ID NO: 57101 - DNA, 25 bp, Artificial
  Probe
gttggactaattcatgcttcataat

SEQ ID NO: 57102 - DNA, 25 bp, Artificial
  Probe
cacttcttgaccatgttggactaat

SEQ ID NO: 57103 - DNA, 25 bp, Artificial
  Probe
gactaattcatgcttcataatggaa

SEQ ID NO: 57104 - DNA, 25 bp, Artificial
  Probe
tacacttcttgaccatgttggacta

SEQ ID NO: 57105 - DNA, 25 bp, Artificial
  Probe
gaacggataagggattattaccaaa

SEQ ID NO: 57106 - DNA, 25 bp, Artificial
  Probe
gactaagaaagtatctcgcttggag

SEQ ID NO: 57107 - DNA, 25 bp, Artificial
  Probe
ctaagaaagtatctcgcttggagtg

SEQ ID NO: 57108 - DNA, 25 bp, Artificial
  Probe
gggaacggataagggattattacca

SEQ ID NO: 57109 - DNA, 25 bp, Artificial
  Probe
actaagaaagtatctcgcttggagt

SEQ ID NO: 57110 - DNA, 25 bp, Artificial
  Probe
cctgtcaaacgactaagaaagtatc

SEQ ID NO: 57111 - DNA, 25 bp, Artificial
  Probe
acacttcttgaccatgttggactaa

SEQ ID NO: 57112 - DNA, 25 bp, Artificial
  Probe
gcctgtcaaacgactaagaaagtat

SEQ ID NO: 57113 - DNA, 25 bp, Artificial
  Probe
tgtcaaacgactaagaaagtatctc

SEQ ID NO: 57114 - DNA, 25 bp, Artificial
  Probe
ctgtcaaacgactaagaaagtatct

SEQ ID NO: 57115 - DNA, 25 bp, Artificial
  Probe
gtacacttcttgaccatgttggact

SEQ ID NO: 57116 - DNA, 25 bp, Artificial
  Probe
tgcctgtcaaacgactaagaaagta

SEQ ID NO: 57117 - DNA, 25 bp, Artificial
  Probe
catgttggactaattcatgcttcat

SEQ ID NO: 57118 - DNA, 25 bp, Artificial
  Probe
cttgaccatgttggactaattcatg

SEQ ID NO: 57119 - DNA, 25 bp, Artificial
  Probe
taagaaagtatctcgcttggagtgc

SEQ ID NO: 57120 - DNA, 25 bp, Artificial
  Probe
aaacgactaagaaagtatctcgctt

SEQ ID NO: 57121 - DNA, 25 bp, Artificial
  Probe
gtcaaacgactaagaaagtatctcg

SEQ ID NO: 57122 - DNA, 25 bp, Artificial
  Probe
agatggatcttcatttgtggacgag

SEQ ID NO: 57123 - DNA, 25 bp, Artificial
  Probe
aacgactaagaaagtatctcgcttg

SEQ ID NO: 57124 - DNA, 25 bp, Artificial
  Probe
caaacgactaagaaagtatctcgct

SEQ ID NO: 57125 - DNA, 25 bp, Artificial
  Probe
tcaaacgactaagaaagtatctcgc

SEQ ID NO: 57126 - DNA, 25 bp, Artificial
  Probe
taagggattattaccaaaagcagca

SEQ ID NO: 57127 - DNA, 25 bp, Artificial
  Probe
cagatggatcttcatttgtggacga

SEQ ID NO: 57128 - DNA, 25 bp, Artificial
  Probe
ctattgtgaatgcagcagtggattc

SEQ ID NO: 57129 - DNA, 25 bp, Artificial
  Probe
ccatgttggactaattcatgcttca

SEQ ID NO: 57130 - DNA, 25 bp, Artificial
  Probe
accatgttggactaattcatgcttc

SEQ ID NO: 57131 - DNA, 25 bp, Artificial
  Probe
gaccatgttggactaattcatgctt

SEQ ID NO: 57132 - DNA, 25 bp, Artificial
  Probe
ttgaccatgttggactaattcatgc

SEQ ID NO: 57133 - DNA, 25 bp, Artificial
  Probe
cggataagggattattaccaaaagc

SEQ ID NO: 57134 - DNA, 25 bp, Artificial
  Probe
ataagggattattaccaaaagcagc

SEQ ID NO: 57135 - DNA, 25 bp, Artificial
  Probe
cctattgtgaatgcagcagtggatt

SEQ ID NO: 57136 - DNA, 25 bp, Artificial
  Probe
gaatgtccttctgatgaatgtggtg

SEQ ID NO: 57137 - DNA, 25 bp, Artificial
  Probe
ctgtgctgaaatactataaggtgga

SEQ ID NO: 57138 - DNA, 25 bp, Artificial
  Probe
gttggctgtgctgaaatactataag

SEQ ID NO: 57139 - DNA, 25 bp, Artificial
  Probe
agcataagagaaagaaggtcaagtt

SEQ ID NO: 57140 - DNA, 25 bp, Artificial
  Probe
aagcataagagaaagaaggtcaagt

SEQ ID NO: 57141 - DNA, 25 bp, Artificial
  Probe
caagcataagagaaagaaggtcaag

SEQ ID NO: 57142 - DNA, 25 bp, Artificial
  Probe
gaacaagcataagagaaagaaggtc

SEQ ID NO: 57143 - DNA, 25 bp, Artificial
  Probe
agaacaagcataagagaaagaaggt

SEQ ID NO: 57144 - DNA, 25 bp, Artificial
  Probe
acaagcataagagaaagaaggtcaa

SEQ ID NO: 57145 - DNA, 25 bp, Artificial
  Probe
aacaagcataagagaaagaaggtca

SEQ ID NO: 57146 - DNA, 25 bp, Artificial
  Probe
tgtgctgaaatactataaggtggat

SEQ ID NO: 57147 - DNA, 25 bp, Artificial
  Probe
ccaaagaagaacaagcataagagaa

SEQ ID NO: 57148 - DNA, 25 bp, Artificial
  Probe
caagatccaggataaggaaggaatt

SEQ ID NO: 57149 - DNA, 25 bp, Artificial
  Probe
gcataagagaaagaaggtcaagttg

SEQ ID NO: 57150 - DNA, 25 bp, Artificial
  Probe
tgctgaaatactataaggtggatga

SEQ ID NO: 57151 - DNA, 25 bp, Artificial
  Probe
gtgctgaaatactataaggtggatg

SEQ ID NO: 57152 - DNA, 25 bp, Artificial
  Probe
cataagagaaagaaggtcaagttgg

SEQ ID NO: 57153 - DNA, 25 bp, Artificial
  Probe
aagaacaagcataagagaaagaagg

SEQ ID NO: 57154 - DNA, 25 bp, Artificial
  Probe
ttggctgtgctgaaatactataagg

SEQ ID NO: 57155 - DNA, 25 bp, Artificial
  Probe
cccaaagaagaacaagcataagaga

SEQ ID NO: 57156 - DNA, 25 bp, Artificial
  Probe
ataagagaaagaaggtcaagttggc

SEQ ID NO: 57157 - DNA, 25 bp, Artificial
  Probe
gctgtgctgaaatactataaggtgg

SEQ ID NO: 57158 - DNA, 25 bp, Artificial
  Probe
ggctgtgctgaaatactataaggtg

SEQ ID NO: 57159 - DNA, 25 bp, Artificial
  Probe
ccaagatccaggataaggaaggaat

SEQ ID NO: 57160 - DNA, 25 bp, Artificial
  Probe
gctgaaatactataaggtggatgaa

SEQ ID NO: 57161 - DNA, 25 bp, Artificial
  Probe
agaagaacaagcataagagaaagaa

SEQ ID NO: 57162 - DNA, 25 bp, Artificial
  Probe
aagaagaacaagcataagagaaaga

SEQ ID NO: 57163 - DNA, 25 bp, Artificial
  Probe
tggctgtgctgaaatactataaggt

SEQ ID NO: 57164 - DNA, 25 bp, Artificial
  Probe
gaagaacaagcataagagaaagaag

SEQ ID NO: 57165 - DNA, 25 bp, Artificial
  Probe
taagagaaagaaggtcaagttggct

SEQ ID NO: 57166 - DNA, 25 bp, Artificial
  Probe
caaagaagaacaagcataagagaaa

SEQ ID NO: 57167 - DNA, 25 bp, Artificial
  Probe
aaagaagaacaagcataagagaaag

SEQ ID NO: 57168 - DNA, 25 bp, Artificial
  Probe
aatgtccttctgatgaatgtggtgc

SEQ ID NO: 57169 - DNA, 25 bp, Artificial
  Probe
ggaatgtccttctgatgaatgtggt

SEQ ID NO: 57170 - DNA, 25 bp, Artificial
  Probe
aaggaagaagaagtcttacaccacc

SEQ ID NO: 57171 - DNA, 25 bp, Artificial
  Probe
aagatccaggataaggaaggaattc

SEQ ID NO: 57172 - DNA, 25 bp, Artificial
  Probe
aagagaaagaaggtcaagttggctg

SEQ ID NO: 57173 - DNA, 25 bp, Artificial
  Probe
aaaggaagaagaagtcttacaccac

SEQ ID NO: 57174 - DNA, 25 bp, Artificial
  Probe
atgtccttctgatgaatgtggtgct

SEQ ID NO: 57175 - DNA, 25 bp, Artificial
  Probe
ataaggtggatgaaaatggcaaaat

SEQ ID NO: 57176 - DNA, 25 bp, Artificial
  Probe
tactataaggtggatgaaaatggca

SEQ ID NO: 57177 - DNA, 25 bp, Artificial
  Probe
ctataaggtggatgaaaatggcaaa

SEQ ID NO: 57178 - DNA, 25 bp, Artificial
  Probe
actataaggtggatgaaaatggcaa

SEQ ID NO: 57179 - DNA, 25 bp, Artificial
  Probe
gttgaaccctcggacactatagaaa

SEQ ID NO: 57180 - DNA, 25 bp, Artificial
  Probe
taaggtggatgaaaatggcaaaatc

SEQ ID NO: 57181 - DNA, 25 bp, Artificial
  Probe
tgtgaatctctgaactgctctactt

SEQ ID NO: 57182 - DNA, 25 bp, Artificial
  Probe
ttgtgaatctctgaactgctctact

SEQ ID NO: 57183 - DNA, 25 bp, Artificial
  Probe
gaccagattggagtaatcagaatga

SEQ ID NO: 57184 - DNA, 25 bp, Artificial
  Probe
gatgaccagattggagtaatcagaa

SEQ ID NO: 57185 - DNA, 25 bp, Artificial
  Probe
aagatgaccagattggagtaatcag

SEQ ID NO: 57186 - DNA, 25 bp, Artificial
  Probe
accagattggagtaatcagaatgaa

SEQ ID NO: 57187 - DNA, 25 bp, Artificial
  Probe
tgaccagattggagtaatcagaatg

SEQ ID NO: 57188 - DNA, 25 bp, Artificial
  Probe
caagatgaccagattggagtaatca

SEQ ID NO: 57189 - DNA, 25 bp, Artificial
  Probe
acaagatgaccagattggagtaatc

SEQ ID NO: 57190 - DNA, 25 bp, Artificial
  Probe
gacaagatgaccagattggagtaat

SEQ ID NO: 57191 - DNA, 25 bp, Artificial
  Probe
cagattggagtaatcagaatgaacc

SEQ ID NO: 57192 - DNA, 25 bp, Artificial
  Probe
ccagattggagtaatcagaatgaac

SEQ ID NO: 57193 - DNA, 25 bp, Artificial
  Probe
atgaccagattggagtaatcagaat

SEQ ID NO: 57194 - DNA, 25 bp, Artificial
  Probe
agatgaccagattggagtaatcaga

SEQ ID NO: 57195 - DNA, 25 bp, Artificial
  Probe
ttgaagaagtttgtgtggtagagaa

SEQ ID NO: 57196 - DNA, 25 bp, Artificial
  Probe
gaatctctgaactgctctactttga

SEQ ID NO: 57197 - DNA, 25 bp, Artificial
  Probe
aatctctgaactgctctactttgac

SEQ ID NO: 57198 - DNA, 25 bp, Artificial
  Probe
tgaatctctgaactgctctactttg

SEQ ID NO: 57199 - DNA, 25 bp, Artificial
  Probe
gtgaatctctgaactgctctacttt

SEQ ID NO: 57200 - DNA, 25 bp, Artificial
  Probe
ctttgtgaatctctgaactgctcta

SEQ ID NO: 57201 - DNA, 25 bp, Artificial
  Probe
tgaagaagtttgtgtggtagagaag

SEQ ID NO: 57202 - DNA, 25 bp, Artificial
  Probe
tttgtgaatctctgaactgctctac

SEQ ID NO: 57203 - DNA, 25 bp, Artificial
  Probe
aagtttgtgtggtagagaaggaaag

SEQ ID NO: 57204 - DNA, 25 bp, Artificial
  Probe
gaagtttgtgtggtagagaaggaaa

SEQ ID NO: 57205 - DNA, 25 bp, Artificial
  Probe
tgacaagatgaccagattggagtaa

SEQ ID NO: 57206 - DNA, 25 bp, Artificial
  Probe
ttgacaagatgaccagattggagta

SEQ ID NO: 57207 - DNA, 25 bp, Artificial
  Probe
cttgaagaagtttgtgtggtagaga

SEQ ID NO: 57208 - DNA, 25 bp, Artificial
  Probe
ctctactttgacaagatgaccagat

SEQ ID NO: 57209 - DNA, 25 bp, Artificial
  Probe
gaagaagtttgtgtggtagagaagg

SEQ ID NO: 57210 - DNA, 25 bp, Artificial
  Probe
tctactttgacaagatgaccagatt

SEQ ID NO: 57211 - DNA, 25 bp, Artificial
  Probe
ctactttgacaagatgaccagattg

SEQ ID NO: 57212 - DNA, 25 bp, Artificial
  Probe
gtatgtataggagacagcagcagtg

SEQ ID NO: 57213 - DNA, 25 bp, Artificial
  Probe
gaactgctctactttgacaagatga

SEQ ID NO: 57214 - DNA, 25 bp, Artificial
  Probe
ctgaactgctctactttgacaagat

SEQ ID NO: 57215 - DNA, 25 bp, Artificial
  Probe
atctctgaactgctctactttgaca

SEQ ID NO: 57216 - DNA, 25 bp, Artificial
  Probe
agaagtttgtgtggtagagaaggaa

SEQ ID NO: 57217 - DNA, 25 bp, Artificial
  Probe
aagaagtttgtgtggtagagaagga

SEQ ID NO: 57218 - DNA, 25 bp, Artificial
  Probe
aactgctctactttgacaagatgac

SEQ ID NO: 57219 - DNA, 25 bp, Artificial
  Probe
tgaactgctctactttgacaagatg

SEQ ID NO: 57220 - DNA, 25 bp, Artificial
  Probe
tatgtataggagacagcagcagtga

SEQ ID NO: 57221 - DNA, 25 bp, Artificial
  Probe
tatactttgtagtctcagtcggtgt

SEQ ID NO: 57222 - DNA, 25 bp, Artificial
  Probe
ctctgaactgctctactttgacaag

SEQ ID NO: 57223 - DNA, 25 bp, Artificial
  Probe
tctctgaactgctctactttgacaa

SEQ ID NO: 57224 - DNA, 25 bp, Artificial
  Probe
gtggactttgtgaatctctgaactg

SEQ ID NO: 57225 - DNA, 25 bp, Artificial
  Probe
tcttgaagaagtttgtgtggtagag

SEQ ID NO: 57226 - DNA, 25 bp, Artificial
  Probe
cgtaggctctgttatattattaggt

SEQ ID NO: 57227 - DNA, 25 bp, Artificial
  Probe
aataagggactgatgttctgtttct

SEQ ID NO: 57228 - DNA, 25 bp, Artificial
  Probe
aggctctgttatattattaggtgtt

SEQ ID NO: 57229 - DNA, 25 bp, Artificial
  Probe
caaataagggactgatgttctgttt

SEQ ID NO: 57230 - DNA, 25 bp, Artificial
  Probe
aaataagggactgatgttctgtttc

SEQ ID NO: 57231 - DNA, 25 bp, Artificial
  Probe
gctcgtgaacctaattgtaaacttt

SEQ ID NO: 57232 - DNA, 25 bp, Artificial
  Probe
ataagggactgatgttctgtttctt

SEQ ID NO: 57233 - DNA, 25 bp, Artificial
  Probe
tttggctcgtgaacctaattgtaaa

SEQ ID NO: 57234 - DNA, 25 bp, Artificial
  Probe
ggctcgtgaacctaattgtaaactt

SEQ ID NO: 57235 - DNA, 25 bp, Artificial
  Probe
ctttggctcgtgaacctaattgtaa

SEQ ID NO: 57236 - DNA, 25 bp, Artificial
  Probe
acaaataagggactgatgttctgtt

SEQ ID NO: 57237 - DNA, 25 bp, Artificial
  Probe
tacaaataagggactgatgttctgt

SEQ ID NO: 57238 - DNA, 25 bp, Artificial
  Probe
ctcgtgaacctaattgtaaactttc

SEQ ID NO: 57239 - DNA, 25 bp, Artificial
  Probe
ttggctcgtgaacctaattgtaaac

SEQ ID NO: 57240 - DNA, 25 bp, Artificial
  Probe
taggctctgttatattattaggtgt

SEQ ID NO: 57241 - DNA, 25 bp, Artificial
  Probe
gtaggctctgttatattattaggtg

SEQ ID NO: 57242 - DNA, 25 bp, Artificial
  Probe
tctttggctcgtgaacctaattgta

SEQ ID NO: 57243 - DNA, 25 bp, Artificial
  Probe
acgtaggctctgttatattattagg

SEQ ID NO: 57244 - DNA, 25 bp, Artificial
  Probe
gtacaaataagggactgatgttctg

SEQ ID NO: 57245 - DNA, 25 bp, Artificial
  Probe
tggctcgtgaacctaattgtaaact

SEQ ID NO: 57246 - DNA, 25 bp, Artificial
  Probe
gctttgcttcactctgtgctatata

SEQ ID NO: 57247 - DNA, 25 bp, Artificial
  Probe
gaatgcagagggtgttaattgatag

SEQ ID NO: 57248 - DNA, 25 bp, Artificial
  Probe
ggaatgcagagggtgttaattgata

SEQ ID NO: 57249 - DNA, 25 bp, Artificial
  Probe
ctctttggctcgtgaacctaattgt

SEQ ID NO: 57250 - DNA, 25 bp, Artificial
  Probe
tgctttgcttcactctgtgctatat

SEQ ID NO: 57251 - DNA, 25 bp, Artificial
  Probe
tcgtgaacctaattgtaaactttca

SEQ ID NO: 57252 - DNA, 25 bp, Artificial
  Probe
cgtgaacctaattgtaaactttcag

SEQ ID NO: 57253 - DNA, 25 bp, Artificial
  Probe
gtgaacctaattgtaaactttcagg

SEQ ID NO: 57254 - DNA, 25 bp, Artificial
  Probe
gtgctttgcttcactctgtgctata

SEQ ID NO: 57255 - DNA, 25 bp, Artificial
  Probe
tgagaaggaaaatgccaaatgcttt

SEQ ID NO: 57256 - DNA, 25 bp, Artificial
  Probe
gggaatgcagagggtgttaattgat

SEQ ID NO: 57257 - DNA, 25 bp, Artificial
  Probe
ttgagaaggaaaatgccaaatgctt

SEQ ID NO: 57258 - DNA, 25 bp, Artificial
  Probe
tgtacaaataagggactgatgttct

SEQ ID NO: 57259 - DNA, 25 bp, Artificial
  Probe
tatatagctctttggctcgtgaacc

SEQ ID NO: 57260 - DNA, 25 bp, Artificial
  Probe
gctctttggctcgtgaacctaattg

SEQ ID NO: 57261 - DNA, 25 bp, Artificial
  Probe
gttgagaaggaaaatgccaaatgct

SEQ ID NO: 57262 - DNA, 25 bp, Artificial
  Probe
ctttgcttcactctgtgctatatag

SEQ ID NO: 57263 - DNA, 25 bp, Artificial
  Probe
cagggaatgcagagggtgttaattg

SEQ ID NO: 57264 - DNA, 25 bp, Artificial
  Probe
agggaatgcagagggtgttaattga

SEQ ID NO: 57265 - DNA, 25 bp, Artificial
  Probe
tcagggaatgcagagggtgttaatt

SEQ ID NO: 57266 - DNA, 25 bp, Artificial
  Probe
tatagctctttggctcgtgaaccta

SEQ ID NO: 57267 - DNA, 25 bp, Artificial
  Probe
ttcagggaatgcagagggtgttaat

SEQ ID NO: 57268 - DNA, 25 bp, Artificial
  Probe
tttcagggaatgcagagggtgttaa

SEQ ID NO: 57269 - DNA, 25 bp, Artificial
  Probe
cctaattgtaaactttcaggtattt

SEQ ID NO: 57270 - DNA, 25 bp, Artificial
  Probe
ctatatagctctttggctcgtgaac

SEQ ID NO: 57271 - DNA, 25 bp, Artificial
  Probe
aactgaatagcttccgtgaatccaa

SEQ ID NO: 57272 - DNA, 25 bp, Artificial
  Probe
aatagcttccgtgaatccaacagtt

SEQ ID NO: 57273 - DNA, 25 bp, Artificial
  Probe
gaatagcttccgtgaatccaacagt

SEQ ID NO: 57274 - DNA, 25 bp, Artificial
  Probe
tgaatagcttccgtgaatccaacag

SEQ ID NO: 57275 - DNA, 25 bp, Artificial
  Probe
ctgaatagcttccgtgaatccaaca

SEQ ID NO: 57276 - DNA, 25 bp, Artificial
  Probe
actgaatagcttccgtgaatccaac

SEQ ID NO: 57277 - DNA, 25 bp, Artificial
  Probe
gaaactgaatagcttccgtgaatcc

SEQ ID NO: 57278 - DNA, 25 bp, Artificial
  Probe
aaactgaatagcttccgtgaatcca

SEQ ID NO: 57279 - DNA, 25 bp, Artificial
  Probe
atagcttccgtgaatccaacagttt

SEQ ID NO: 57280 - DNA, 25 bp, Artificial
  Probe
taaataaaggtacaatgtcattcca

SEQ ID NO: 57281 - DNA, 25 bp, Artificial
  Probe
ttaaataaaggtacaatgtcattcc

SEQ ID NO: 57282 - DNA, 25 bp, Artificial
  Probe
ctccaggtcagaggaaactgaatag

SEQ ID NO: 57283 - DNA, 25 bp, Artificial
  Probe
aagtcctggaaaagagcttgctaaa

SEQ ID NO: 57284 - DNA, 25 bp, Artificial
  Probe
aggtcagaggaaactgaatagcttc

SEQ ID NO: 57285 - DNA, 25 bp, Artificial
  Probe
caggtcagaggaaactgaatagctt

SEQ ID NO: 57286 - DNA, 25 bp, Artificial
  Probe
tagcttccgtgaatccaacagtttt

SEQ ID NO: 57287 - DNA, 25 bp, Artificial
  Probe
ggaaactgaatagcttccgtgaatc

SEQ ID NO: 57288 - DNA, 25 bp, Artificial
  Probe
gaagtcctggaaaagagcttgctaa

SEQ ID NO: 57289 - DNA, 25 bp, Artificial
  Probe
caggactacaatctgaggtggtcag

SEQ ID NO: 57290 - DNA, 25 bp, Artificial
  Probe
aggaaactgaatagcttccgtgaat

SEQ ID NO: 57291 - DNA, 25 bp, Artificial
  Probe
agtcctggaaaagagcttgctaaac

SEQ ID NO: 57292 - DNA, 25 bp, Artificial
  Probe
gaggaaactgaatagcttccgtgaa

SEQ ID NO: 57293 - DNA, 25 bp, Artificial
  Probe
ggtcagaggaaactgaatagcttcc

SEQ ID NO: 57294 - DNA, 25 bp, Artificial
  Probe
gtcagaggaaactgaatagcttccg

SEQ ID NO: 57295 - DNA, 25 bp, Artificial
  Probe
tgaagtcctggaaaagagcttgcta

SEQ ID NO: 57296 - DNA, 25 bp, Artificial
  Probe
tccaggtcagaggaaactgaatagc

SEQ ID NO: 57297 - DNA, 25 bp, Artificial
  Probe
gctccaggtcagaggaaactgaata

SEQ ID NO: 57298 - DNA, 25 bp, Artificial
  Probe
ctggaaaagagcttgctaaacgtca

SEQ ID NO: 57299 - DNA, 25 bp, Artificial
  Probe
agaggaaactgaatagcttccgtga

SEQ ID NO: 57300 - DNA, 25 bp, Artificial
  Probe
cagaggaaactgaatagcttccgtg

SEQ ID NO: 57301 - DNA, 25 bp, Artificial
  Probe
tcagaggaaactgaatagcttccgt

SEQ ID NO: 57302 - DNA, 25 bp, Artificial
  Probe
gtcggtggaaaacttcattgctgag

SEQ ID NO: 57303 - DNA, 25 bp, Artificial
  Probe
tggaaaagagcttgctaaacgtcac

SEQ ID NO: 57304 - DNA, 25 bp, Artificial
  Probe
ccaggtcagaggaaactgaatagct

SEQ ID NO: 57305 - DNA, 25 bp, Artificial
  Probe
aggactacaatctgaggtggtcagg

SEQ ID NO: 57306 - DNA, 25 bp, Artificial
  Probe
gtcctggaaaagagcttgctaaacg

SEQ ID NO: 57307 - DNA, 25 bp, Artificial
  Probe
gtgtcggtggaaaacttcattgctg

SEQ ID NO: 57308 - DNA, 25 bp, Artificial
  Probe
cctggaaaagagcttgctaaacgtc

SEQ ID NO: 57309 - DNA, 25 bp, Artificial
  Probe
gaaaagagcttgctaaacgtcaccc

SEQ ID NO: 57310 - DNA, 25 bp, Artificial
  Probe
ggaaaagagcttgctaaacgtcacc

SEQ ID NO: 57311 - DNA, 25 bp, Artificial
  Probe
tgactccccaggactacaatctgag

SEQ ID NO: 57312 - DNA, 25 bp, Artificial
  Probe
ctgactccccaggactacaatctga

SEQ ID NO: 57313 - DNA, 25 bp, Artificial
  Probe
tcctggaaaagagcttgctaaacgt

SEQ ID NO: 57314 - DNA, 25 bp, Artificial
  Probe
ggtggaaaacttcattgctgagctc

SEQ ID NO: 57315 - DNA, 25 bp, Artificial
  Probe
ggaaaacttcattgctgagctcctg

SEQ ID NO: 57316 - DNA, 25 bp, Artificial
  Probe
tggaatggattcgtaaggtaatctt

SEQ ID NO: 57317 - DNA, 25 bp, Artificial
  Probe
gtggaatggattcgtaaggtaatct

SEQ ID NO: 57318 - DNA, 25 bp, Artificial
  Probe
tagataaacctcaagcaacgattca

SEQ ID NO: 57319 - DNA, 25 bp, Artificial
  Probe
agataaacctcaagcaacgattcat

SEQ ID NO: 57320 - DNA, 25 bp, Artificial
  Probe
tcaccatgaagcacaatgtatatat

SEQ ID NO: 57321 - DNA, 25 bp, Artificial
  Probe
ctagataaacctcaagcaacgattc

SEQ ID NO: 57322 - DNA, 25 bp, Artificial
  Probe
cgtggaatggattcgtaaggtaatc

SEQ ID NO: 57323 - DNA, 25 bp, Artificial
  Probe
ccgtggaatggattcgtaaggtaat

SEQ ID NO: 57324 - DNA, 25 bp, Artificial
  Probe
caccatgaagcacaatgtatatatt

SEQ ID NO: 57325 - DNA, 25 bp, Artificial
  Probe
acgattcatgttgtaacagcttcat

SEQ ID NO: 57326 - DNA, 25 bp, Artificial
  Probe
aacgattcatgttgtaacagcttca

SEQ ID NO: 57327 - DNA, 25 bp, Artificial
  Probe
gataaacctcaagcaacgattcatg

SEQ ID NO: 57328 - DNA, 25 bp, Artificial
  Probe
ataaacctcaagcaacgattcatgt

SEQ ID NO: 57329 - DNA, 25 bp, Artificial
  Probe
ctacattcttcattgctttaaacgc

SEQ ID NO: 57330 - DNA, 25 bp, Artificial
  Probe
gctacattcttcattgctttaaacg

SEQ ID NO: 57331 - DNA, 25 bp, Artificial
  Probe
taaacctcaagcaacgattcatgtt

SEQ ID NO: 57332 - DNA, 25 bp, Artificial
  Probe
tgttgagctacattcttcattgctt

SEQ ID NO: 57333 - DNA, 25 bp, Artificial
  Probe
ttgttgagctacattcttcattgct

SEQ ID NO: 57334 - DNA, 25 bp, Artificial
  Probe
ggaatggattcgtaaggtaatcttt

SEQ ID NO: 57335 - DNA, 25 bp, Artificial
  Probe
ttcaccatgaagcacaatgtatata

SEQ ID NO: 57336 - DNA, 25 bp, Artificial
  Probe
gtaacagcttcatgtggtttagttt

SEQ ID NO: 57337 - DNA, 25 bp, Artificial
  Probe
tttgttgagctacattcttcattgc

SEQ ID NO: 57338 - DNA, 25 bp, Artificial
  Probe
tgtttgttgagctacattcttcatt

SEQ ID NO: 57339 - DNA, 25 bp, Artificial
  Probe
gttgtaacagcttcatgtggtttag

SEQ ID NO: 57340 - DNA, 25 bp, Artificial
  Probe
gtttgttgagctacattcttcattg

SEQ ID NO: 57341 - DNA, 25 bp, Artificial
  Probe
tgtaacagcttcatgtggtttagtt

SEQ ID NO: 57342 - DNA, 25 bp, Artificial
  Probe
ttgtaacagcttcatgtggtttagt

SEQ ID NO: 57343 - DNA, 25 bp, Artificial
  Probe
ttgtaagtacccgtggaatggattc

SEQ ID NO: 57344 - DNA, 25 bp, Artificial
  Probe
tgttgtaacagcttcatgtggttta

SEQ ID NO: 57345 - DNA, 25 bp, Artificial
  Probe
gttgtaagtacccgtggaatggatt

SEQ ID NO: 57346 - DNA, 25 bp, Artificial
  Probe
aatggattcgtaaggtaatctttct

SEQ ID NO: 57347 - DNA, 25 bp, Artificial
  Probe
atgttgtaacagcttcatgtggttt

SEQ ID NO: 57348 - DNA, 25 bp, Artificial
  Probe
gaatggattcgtaaggtaatctttc

SEQ ID NO: 57349 - DNA, 25 bp, Artificial
  Probe
tggattcgtaaggtaatctttctag

SEQ ID NO: 57350 - DNA, 25 bp, Artificial
  Probe
gattcatgttgtaacagcttcatgt

SEQ ID NO: 57351 - DNA, 25 bp, Artificial
  Probe
attcatgttgtaacagcttcatgtg

SEQ ID NO: 57352 - DNA, 25 bp, Artificial
  Probe
tctagataaacctcaagcaacgatt

SEQ ID NO: 57353 - DNA, 25 bp, Artificial
  Probe
ttctagataaacctcaagcaacgat

SEQ ID NO: 57354 - DNA, 25 bp, Artificial
  Probe
tttctagataaacctcaagcaacga

SEQ ID NO: 57355 - DNA, 25 bp, Artificial
  Probe
aacgcaataaagtaataatctcact

SEQ ID NO: 57356 - DNA, 25 bp, Artificial
  Probe
ctcaagcaacgattcatgttgtaac

SEQ ID NO: 57357 - DNA, 25 bp, Artificial
  Probe
taagtacccgtggaatggattcgta

SEQ ID NO: 57358 - DNA, 25 bp, Artificial
  Probe
ctttctagataaacctcaagcaacg

SEQ ID NO: 57359 - DNA, 25 bp, Artificial
  Probe
cgattcatgttgtaacagcttcatg

SEQ ID NO: 57360 - DNA, 25 bp, Artificial
  Probe
caagcaacgattcatgttgtaacag

SEQ ID NO: 57361 - DNA, 25 bp, Artificial
  Probe
ctacaatgtcacctacactgtcaag

SEQ ID NO: 57362 - DNA, 25 bp, Artificial
  Probe
gagactacatcctcattgtcaagtg

SEQ ID NO: 57363 - DNA, 25 bp, Artificial
  Probe
tctacaatgtcacctacactgtcaa

SEQ ID NO: 57364 - DNA, 25 bp, Artificial
  Probe
gtctacaatgtcacctacactgtca

SEQ ID NO: 57365 - DNA, 25 bp, Artificial
  Probe
agactacatcctcattgtcaagtgg

SEQ ID NO: 57366 - DNA, 25 bp, Artificial
  Probe
ggagactacatcctcattgtcaagt

SEQ ID NO: 57367 - DNA, 25 bp, Artificial
  Probe
tacaatgtcacctacactgtcaagg

SEQ ID NO: 57368 - DNA, 25 bp, Artificial
  Probe
ggtctacaatgtcacctacactgtc

SEQ ID NO: 57369 - DNA, 25 bp, Artificial
  Probe
caatgtcacctacactgtcaaggag

SEQ ID NO: 57370 - DNA, 25 bp, Artificial
  Probe
tgtcaaggagaaaggagactacatc

SEQ ID NO: 57371 - DNA, 25 bp, Artificial
  Probe
ctgtcaaggagaaaggagactacat

SEQ ID NO: 57372 - DNA, 25 bp, Artificial
  Probe
atgtcacctacactgtcaaggagaa

SEQ ID NO: 57373 - DNA, 25 bp, Artificial
  Probe
aatgtcacctacactgtcaaggaga

SEQ ID NO: 57374 - DNA, 25 bp, Artificial
  Probe
acaatgtcacctacactgtcaagga

SEQ ID NO: 57375 - DNA, 25 bp, Artificial
  Probe
cactgtcaaggagaaaggagactac

SEQ ID NO: 57376 - DNA, 25 bp, Artificial
  Probe
ctacactgtcaaggagaaaggagac

SEQ ID NO: 57377 - DNA, 25 bp, Artificial
  Probe
gtcaaggagaaaggagactacatcc

SEQ ID NO: 57378 - DNA, 25 bp, Artificial
  Probe
actgtcaaggagaaaggagactaca

SEQ ID NO: 57379 - DNA, 25 bp, Artificial
  Probe
acactgtcaaggagaaaggagacta

SEQ ID NO: 57380 - DNA, 25 bp, Artificial
  Probe
tacactgtcaaggagaaaggagact

SEQ ID NO: 57381 - DNA, 25 bp, Artificial
  Probe
gactacatcctcattgtcaagtggg

SEQ ID NO: 57382 - DNA, 25 bp, Artificial
  Probe
gtcacctacactgtcaaggagaaag

SEQ ID NO: 57383 - DNA, 25 bp, Artificial
  Probe
cctacactgtcaaggagaaaggaga

SEQ ID NO: 57384 - DNA, 25 bp, Artificial
  Probe
aaggagactacatcctcattgtcaa

SEQ ID NO: 57385 - DNA, 25 bp, Artificial
  Probe
tgtcacctacactgtcaaggagaaa

SEQ ID NO: 57386 - DNA, 25 bp, Artificial
  Probe
aggagactacatcctcattgtcaag

SEQ ID NO: 57387 - DNA, 25 bp, Artificial
  Probe
acctacactgtcaaggagaaaggag

SEQ ID NO: 57388 - DNA, 25 bp, Artificial
  Probe
ccttcacgaaacatccacagttctg

SEQ ID NO: 57389 - DNA, 25 bp, Artificial
  Probe
cacctacactgtcaaggagaaagga

SEQ ID NO: 57390 - DNA, 25 bp, Artificial
  Probe
tcacctacactgtcaaggagaaagg

SEQ ID NO: 57391 - DNA, 25 bp, Artificial
  Probe
cctttgtgggtcagaagaactcctt

SEQ ID NO: 57392 - DNA, 25 bp, Artificial
  Probe
gggtctacaatgtcacctacactgt

SEQ ID NO: 57393 - DNA, 25 bp, Artificial
  Probe
agttctggtggagactgtgacaaag

SEQ ID NO: 57394 - DNA, 25 bp, Artificial
  Probe
gagaaaggagactacatcctcattg

SEQ ID NO: 57395 - DNA, 25 bp, Artificial
  Probe
gaaaggagactacatcctcattgtc

SEQ ID NO: 57396 - DNA, 25 bp, Artificial
  Probe
agaaaggagactacatcctcattgt

SEQ ID NO: 57397 - DNA, 25 bp, Artificial
  Probe
gttctggtggagactgtgacaaagt

SEQ ID NO: 57398 - DNA, 25 bp, Artificial
  Probe
aaaggagactacatcctcattgtca

SEQ ID NO: 57399 - DNA, 25 bp, Artificial
  Probe
cttcacgaaacatccacagttctgg

SEQ ID NO: 57400 - DNA, 25 bp, Artificial
  Probe
ggagaaaggagactacatcctcatt

SEQ ID NO: 57401 - DNA, 25 bp, Artificial
  Probe
ctttgtgggtcagaagaactccttc

SEQ ID NO: 57402 - DNA, 25 bp, Artificial
  Probe
attgtcaagtggggtgatgaaagtg

SEQ ID NO: 57403 - DNA, 25 bp, Artificial
  Probe
cattgtcaagtggggtgatgaaagt

SEQ ID NO: 57404 - DNA, 25 bp, Artificial
  Probe
caaggagaaaggagactacatcctc

SEQ ID NO: 57405 - DNA, 25 bp, Artificial
  Probe
aggagaaaggagactacatcctcat

SEQ ID NO: 57406 - DNA, 25 bp, Artificial
  Probe
ctgtctgtaaaggttgtaaactcca

SEQ ID NO: 57407 - DNA, 25 bp, Artificial
  Probe
tgtctgtaaaggttgtaaactccac

SEQ ID NO: 57408 - DNA, 25 bp, Artificial
  Probe
cctgtctgtaaaggttgtaaactcc

SEQ ID NO: 57409 - DNA, 25 bp, Artificial
  Probe
gcctgtctgtaaaggttgtaaactc

SEQ ID NO: 57410 - DNA, 25 bp, Artificial
  Probe
ggtgttcttctcggacatgaaatac

SEQ ID NO: 57411 - DNA, 25 bp, Artificial
  Probe
gtctgtaaaggttgtaaactccacc

SEQ ID NO: 57412 - DNA, 25 bp, Artificial
  Probe
tggtgttcttctcggacatgaaata

SEQ ID NO: 57413 - DNA, 25 bp, Artificial
  Probe
gtaaaggttgtaaactccaccactg

SEQ ID NO: 57414 - DNA, 25 bp, Artificial
  Probe
ctgtaaaggttgtaaactccaccac

SEQ ID NO: 57415 - DNA, 25 bp, Artificial
  Probe
tctgtaaaggttgtaaactccacca

SEQ ID NO: 57416 - DNA, 25 bp, Artificial
  Probe
gtgttcttctcggacatgaaatacg

SEQ ID NO: 57417 - DNA, 25 bp, Artificial
  Probe
gtcttctctcaagaaatggtgttct

SEQ ID NO: 57418 - DNA, 25 bp, Artificial
  Probe
tgactcaggacccatctatgacaaa

SEQ ID NO: 57419 - DNA, 25 bp, Artificial
  Probe
tgtaaaggttgtaaactccaccact

SEQ ID NO: 57420 - DNA, 25 bp, Artificial
  Probe
atggtgttcttctcggacatgaaat

SEQ ID NO: 57421 - DNA, 25 bp, Artificial
  Probe
ctgttcgtcttctctcaagaaatgg

SEQ ID NO: 57422 - DNA, 25 bp, Artificial
  Probe
cctgttcgtcttctctcaagaaatg

SEQ ID NO: 57423 - DNA, 25 bp, Artificial
  Probe
aatggtgttcttctcggacatgaaa

SEQ ID NO: 57424 - DNA, 25 bp, Artificial
  Probe
aaatggtgttcttctcggacatgaa

SEQ ID NO: 57425 - DNA, 25 bp, Artificial
  Probe
taaaggttgtaaactccaccactgg

SEQ ID NO: 57426 - DNA, 25 bp, Artificial
  Probe
cgtcttctctcaagaaatggtgttc

SEQ ID NO: 57427 - DNA, 25 bp, Artificial
  Probe
gttcgtcttctctcaagaaatggtg

SEQ ID NO: 57428 - DNA, 25 bp, Artificial
  Probe
tcgtcttctctcaagaaatggtgtt

SEQ ID NO: 57429 - DNA, 25 bp, Artificial
  Probe
ttcgtcttctctcaagaaatggtgt

SEQ ID NO: 57430 - DNA, 25 bp, Artificial
  Probe
tgttcgtcttctctcaagaaatggt

SEQ ID NO: 57431 - DNA, 25 bp, Artificial
  Probe
gaaatggtgttcttctcggacatga

SEQ ID NO: 57432 - DNA, 25 bp, Artificial
  Probe
tgttcttctcggacatgaaatacga

SEQ ID NO: 57433 - DNA, 25 bp, Artificial
  Probe
cttcttgcatagtgtgggcttctag

SEQ ID NO: 57434 - DNA, 25 bp, Artificial
  Probe
gactcaggacccatctatgacaaaa

SEQ ID NO: 57435 - DNA, 25 bp, Artificial
  Probe
tagagtctgtgacctgcctcaagaa

SEQ ID NO: 57436 - DNA, 25 bp, Artificial
  Probe
ctgactcaggacccatctatgacaa

SEQ ID NO: 57437 - DNA, 25 bp, Artificial
  Probe
actcaggacccatctatgacaaaac

SEQ ID NO: 57438 - DNA, 25 bp, Artificial
  Probe
gacatgaaatacgagtgccgagaac

SEQ ID NO: 57439 - DNA, 25 bp, Artificial
  Probe
aggacccatctatgacaaaacctac

SEQ ID NO: 57440 - DNA, 25 bp, Artificial
  Probe
caggacccatctatgacaaaaccta

SEQ ID NO: 57441 - DNA, 25 bp, Artificial
  Probe
tcttcttgcatagtgtgggcttcta

SEQ ID NO: 57442 - DNA, 25 bp, Artificial
  Probe
gcctgttcgtcttctctcaagaaat

SEQ ID NO: 57443 - DNA, 25 bp, Artificial
  Probe
ggacccatctatgacaaaacctacg

SEQ ID NO: 57444 - DNA, 25 bp, Artificial
  Probe
agaaatggtgttcttctcggacatg

SEQ ID NO: 57445 - DNA, 25 bp, Artificial
  Probe
ctcaggacccatctatgacaaaacc

SEQ ID NO: 57446 - DNA, 25 bp, Artificial
  Probe
ctagagtctgtgacctgcctcaaga

SEQ ID NO: 57447 - DNA, 25 bp, Artificial
  Probe
aatacgagtgccgagaactcctaat

SEQ ID NO: 57448 - DNA, 25 bp, Artificial
  Probe
cttccgaaaccaagggctagagaaa

SEQ ID NO: 57449 - DNA, 25 bp, Artificial
  Probe
gaaagaaaatcatggctgactcagg

SEQ ID NO: 57450 - DNA, 25 bp, Artificial
  Probe
ggaaagaaaatcatggctgactcag

SEQ ID NO: 57451 - DNA, 25 bp, Artificial
  Probe
attctatggcttctctgagttctac

SEQ ID NO: 57452 - DNA, 25 bp, Artificial
  Probe
aattctatggcttctctgagttcta

SEQ ID NO: 57453 - DNA, 25 bp, Artificial
  Probe
atggcttctctgagttctactattg

SEQ ID NO: 57454 - DNA, 25 bp, Artificial
  Probe
tctatggcttctctgagttctacta

SEQ ID NO: 57455 - DNA, 25 bp, Artificial
  Probe
ttctatggcttctctgagttctact

SEQ ID NO: 57456 - DNA, 25 bp, Artificial
  Probe
ctatggcttctctgagttctactat

SEQ ID NO: 57457 - DNA, 25 bp, Artificial
  Probe
tatggcttctctgagttctactatt

SEQ ID NO: 57458 - DNA, 25 bp, Artificial
  Probe
tggcttctctgagttctactattgc

SEQ ID NO: 57459 - DNA, 25 bp, Artificial
  Probe
ctactattgcaccgaagatgtctta

SEQ ID NO: 57460 - DNA, 25 bp, Artificial
  Probe
tactattgcaccgaagatgtcttac

SEQ ID NO: 57461 - DNA, 25 bp, Artificial
  Probe
cttctctgagttctactattgcacc

SEQ ID NO: 57462 - DNA, 25 bp, Artificial
  Probe
agacacagacttctctcaatggagt

SEQ ID NO: 57463 - DNA, 25 bp, Artificial
  Probe
gcttctctgagttctactattgcac

SEQ ID NO: 57464 - DNA, 25 bp, Artificial
  Probe
tctactattgcaccgaagatgtctt

SEQ ID NO: 57465 - DNA, 25 bp, Artificial
  Probe
ttctactattgcaccgaagatgtct

SEQ ID NO: 57466 - DNA, 25 bp, Artificial
  Probe
gttctactattgcaccgaagatgtc

SEQ ID NO: 57467 - DNA, 25 bp, Artificial
  Probe
gagttctactattgcaccgaagatg

SEQ ID NO: 57468 - DNA, 25 bp, Artificial
  Probe
gaccttaaagatgagatccagcaaa

SEQ ID NO: 57469 - DNA, 25 bp, Artificial
  Probe
tgagttctactattgcaccgaagat

SEQ ID NO: 57470 - DNA, 25 bp, Artificial
  Probe
gaattctatggcttctctgagttct

SEQ ID NO: 57471 - DNA, 25 bp, Artificial
  Probe
tgaattctatggcttctctgagttc

SEQ ID NO: 57472 - DNA, 25 bp, Artificial
  Probe
agttctactattgcaccgaagatgt

SEQ ID NO: 57473 - DNA, 25 bp, Artificial
  Probe
gtgaattctatggcttctctgagtt

SEQ ID NO: 57474 - DNA, 25 bp, Artificial
  Probe
gaacagtgaattctatggcttctct

SEQ ID NO: 57475 - DNA, 25 bp, Artificial
  Probe
tattgcaccgaagatgtcttacgaa

SEQ ID NO: 57476 - DNA, 25 bp, Artificial
  Probe
ctgagttctactattgcaccgaaga

SEQ ID NO: 57477 - DNA, 25 bp, Artificial
  Probe
tctgagttctactattgcaccgaag

SEQ ID NO: 57478 - DNA, 25 bp, Artificial
  Probe
ctctgagttctactattgcaccgaa

SEQ ID NO: 57479 - DNA, 25 bp, Artificial
  Probe
ttctctgagttctactattgcaccg

SEQ ID NO: 57480 - DNA, 25 bp, Artificial
  Probe
ggcttctctgagttctactattgca

SEQ ID NO: 57481 - DNA, 25 bp, Artificial
  Probe
agtgaattctatggcttctctgagt

SEQ ID NO: 57482 - DNA, 25 bp, Artificial
  Probe
actctcagtatccgtgttccaaatc

SEQ ID NO: 57483 - DNA, 25 bp, Artificial
  Probe
gactctcagtatccgtgttccaaat

SEQ ID NO: 57484 - DNA, 25 bp, Artificial
  Probe
ctattgcaccgaagatgtcttacga

SEQ ID NO: 57485 - DNA, 25 bp, Artificial
  Probe
aacagtgaattctatggcttctctg

SEQ ID NO: 57486 - DNA, 25 bp, Artificial
  Probe
attgcaccgaagatgtcttacgaat

SEQ ID NO: 57487 - DNA, 25 bp, Artificial
  Probe
cagtgaattctatggcttctctgag

SEQ ID NO: 57488 - DNA, 25 bp, Artificial
  Probe
ctctcagtatccgtgttccaaatcc

SEQ ID NO: 57489 - DNA, 25 bp, Artificial
  Probe
gggagactacaatgctgctaaattt

SEQ ID NO: 57490 - DNA, 25 bp, Artificial
  Probe
actattgcaccgaagatgtcttacg

SEQ ID NO: 57491 - DNA, 25 bp, Artificial
  Probe
tctctgagttctactattgcaccga

SEQ ID NO: 57492 - DNA, 25 bp, Artificial
  Probe
acagtgaattctatggcttctctga

SEQ ID NO: 57493 - DNA, 25 bp, Artificial
  Probe
gcctctggaccttaaagatgagatc

SEQ ID NO: 57494 - DNA, 25 bp, Artificial
  Probe
cttgcctctggaccttaaagatgag

SEQ ID NO: 57495 - DNA, 25 bp, Artificial
  Probe
cctctggaccttaaagatgagatcc

SEQ ID NO: 57496 - DNA, 25 bp, Artificial
  Probe
gattgaccaagataagtatgctgtg

SEQ ID NO: 57497 - DNA, 25 bp, Artificial
  Probe
agattgaccaagataagtatgctgt

SEQ ID NO: 57498 - DNA, 25 bp, Artificial
  Probe
attgaccaagataagtatgctgtgc

SEQ ID NO: 57499 - DNA, 25 bp, Artificial
  Probe
tgtcaagttcaatggtactcacatc

SEQ ID NO: 57500 - DNA, 25 bp, Artificial
  Probe
gatgtcaagttcaatggtactcaca

SEQ ID NO: 57501 - DNA, 25 bp, Artificial
  Probe
gtcaagttcaatggtactcacatcc

SEQ ID NO: 57502 - DNA, 25 bp, Artificial
  Probe
cgatgtcaagttcaatggtactcac

SEQ ID NO: 57503 - DNA, 25 bp, Artificial
  Probe
gctacctcatctccatcaaagtatg

SEQ ID NO: 57504 - DNA, 25 bp, Artificial
  Probe
aagataagtatgctgtgcgtttcat

SEQ ID NO: 57505 - DNA, 25 bp, Artificial
  Probe
agataagtatgctgtgcgtttcatc

SEQ ID NO: 57506 - DNA, 25 bp, Artificial
  Probe
caagataagtatgctgtgcgtttca

SEQ ID NO: 57507 - DNA, 25 bp, Artificial
  Probe
gaccaagataagtatgctgtgcgtt

SEQ ID NO: 57508 - DNA, 25 bp, Artificial
  Probe
ttgaccaagataagtatgctgtgcg

SEQ ID NO: 57509 - DNA, 25 bp, Artificial
  Probe
tcgatgtcaagttcaatggtactca

SEQ ID NO: 57510 - DNA, 25 bp, Artificial
  Probe
atgtcaagttcaatggtactcacat

SEQ ID NO: 57511 - DNA, 25 bp, Artificial
  Probe
gataagtatgctgtgcgtttcatcc

SEQ ID NO: 57512 - DNA, 25 bp, Artificial
  Probe
ccaagataagtatgctgtgcgtttc

SEQ ID NO: 57513 - DNA, 25 bp, Artificial
  Probe
agctacctcatctccatcaaagtat

SEQ ID NO: 57514 - DNA, 25 bp, Artificial
  Probe
cagctacctcatctccatcaaagta

SEQ ID NO: 57515 - DNA, 25 bp, Artificial
  Probe
accaagataagtatgctgtgcgttt

SEQ ID NO: 57516 - DNA, 25 bp, Artificial
  Probe
aagttcaatggtactcacatccctg

SEQ ID NO: 57517 - DNA, 25 bp, Artificial
  Probe
caagttcaatggtactcacatccct

SEQ ID NO: 57518 - DNA, 25 bp, Artificial
  Probe
tcaagttcaatggtactcacatccc

SEQ ID NO: 57519 - DNA, 25 bp, Artificial
  Probe
tgaccaagataagtatgctgtgcgt

SEQ ID NO: 57520 - DNA, 25 bp, Artificial
  Probe
atcgatgtcaagttcaatggtactc

SEQ ID NO: 57521 - DNA, 25 bp, Artificial
  Probe
gatcgatgtcaagttcaatggtact

SEQ ID NO: 57522 - DNA, 25 bp, Artificial
  Probe
tgatcgatgtcaagttcaatggtac

SEQ ID NO: 57523 - DNA, 25 bp, Artificial
  Probe
ataagtatgctgtgcgtttcatccc

SEQ ID NO: 57524 - DNA, 25 bp, Artificial
  Probe
gcagtcagcctaaatagagccaaag

SEQ ID NO: 57525 - DNA, 25 bp, Artificial
  Probe
cagtcagcctaaatagagccaaagg

SEQ ID NO: 57526 - DNA, 25 bp, Artificial
  Probe
ttcaatggtactcacatccctggaa

SEQ ID NO: 57527 - DNA, 25 bp, Artificial
  Probe
tcaatggtactcacatccctggaag

SEQ ID NO: 57528 - DNA, 25 bp, Artificial
  Probe
aatggtactcacatccctggaagtc

SEQ ID NO: 57529 - DNA, 25 bp, Artificial
  Probe
gttcaatggtactcacatccctgga

SEQ ID NO: 57530 - DNA, 25 bp, Artificial
  Probe
ttgatcgatgtcaagttcaatggta

SEQ ID NO: 57531 - DNA, 25 bp, Artificial
  Probe
caatggtactcacatccctggaagt

SEQ ID NO: 57532 - DNA, 25 bp, Artificial
  Probe
agttcaatggtactcacatccctgg

SEQ ID NO: 57533 - DNA, 25 bp, Artificial
  Probe
ctacctcatctccatcaaagtatgg

SEQ ID NO: 57534 - DNA, 25 bp, Artificial
  Probe
tcttttgcagtcagcctaaatagag

SEQ ID NO: 57535 - DNA, 25 bp, Artificial
  Probe
tacctcatctccatcaaagtatggt

SEQ ID NO: 57536 - DNA, 25 bp, Artificial
  Probe
agtcagcctaaatagagccaaaggg

SEQ ID NO: 57537 - DNA, 25 bp, Artificial
  Probe
taagtatgctgtgcgtttcatccca

SEQ ID NO: 57538 - DNA, 25 bp, Artificial
  Probe
cttttgcagtcagcctaaatagagc

SEQ ID NO: 57539 - DNA, 25 bp, Artificial
  Probe
acctcatctccatcaaagtatggtg

SEQ ID NO: 57540 - DNA, 25 bp, Artificial
  Probe
gcagctacctcatctccatcaaagt

SEQ ID NO: 57541 - DNA, 25 bp, Artificial
  Probe
gaacttcaagagtgcctccagaatt

SEQ ID NO: 57542 - DNA, 25 bp, Artificial
  Probe
aacttcaagagtgcctccagaattg

SEQ ID NO: 57543 - DNA, 25 bp, Artificial
  Probe
ctgagaagaacttcaagagtgcctc

SEQ ID NO: 57544 - DNA, 25 bp, Artificial
  Probe
ctccagaattgtgtttgagaggaaa

SEQ ID NO: 57545 - DNA, 25 bp, Artificial
  Probe
agaacttcaagagtgcctccagaat

SEQ ID NO: 57546 - DNA, 25 bp, Artificial
  Probe
aagaacttcaagagtgcctccagaa

SEQ ID NO: 57547 - DNA, 25 bp, Artificial
  Probe
cttcaagagtgcctccagaattgtg

SEQ ID NO: 57548 - DNA, 25 bp, Artificial
  Probe
agaattgtgtttgagaggaaacttc

SEQ ID NO: 57549 - DNA, 25 bp, Artificial
  Probe
cagaattgtgtttgagaggaaactt

SEQ ID NO: 57550 - DNA, 25 bp, Artificial
  Probe
gaattgtgtttgagaggaaacttcg

SEQ ID NO: 57551 - DNA, 25 bp, Artificial
  Probe
acttcaagagtgcctccagaattgt

SEQ ID NO: 57552 - DNA, 25 bp, Artificial
  Probe
ccagaattgtgtttgagaggaaact

SEQ ID NO: 57553 - DNA, 25 bp, Artificial
  Probe
tccagaattgtgtttgagaggaaac

SEQ ID NO: 57554 - DNA, 25 bp, Artificial
  Probe
gatcaacaatcctgacatccacagc

SEQ ID NO: 57555 - DNA, 25 bp, Artificial
  Probe
cctgagaagaacttcaagagtgcct

SEQ ID NO: 57556 - DNA, 25 bp, Artificial
  Probe
tcaagagtgcctccagaattgtgtt

SEQ ID NO: 57557 - DNA, 25 bp, Artificial
  Probe
ttcaagagtgcctccagaattgtgt

SEQ ID NO: 57558 - DNA, 25 bp, Artificial
  Probe
gaagaacttcaagagtgcctccaga

SEQ ID NO: 57559 - DNA, 25 bp, Artificial
  Probe
agaagaacttcaagagtgcctccag

SEQ ID NO: 57560 - DNA, 25 bp, Artificial
  Probe
gagaagaacttcaagagtgcctcca

SEQ ID NO: 57561 - DNA, 25 bp, Artificial
  Probe
tgagaagaacttcaagagtgcctcc

SEQ ID NO: 57562 - DNA, 25 bp, Artificial
  Probe
aattgtgtttgagaggaaacttcga

SEQ ID NO: 57563 - DNA, 25 bp, Artificial
  Probe
atcaacaatcctgacatccacagca

SEQ ID NO: 57564 - DNA, 25 bp, Artificial
  Probe
aagagtgcctccagaattgtgtttg

SEQ ID NO: 57565 - DNA, 25 bp, Artificial
  Probe
caagagtgcctccagaattgtgttt

SEQ ID NO: 57566 - DNA, 25 bp, Artificial
  Probe
gtgtttgagaggaaacttcgagaaa

SEQ ID NO: 57567 - DNA, 25 bp, Artificial
  Probe
attgtgtttgagaggaaacttcgag

SEQ ID NO: 57568 - DNA, 25 bp, Artificial
  Probe
tttgagaggaaacttcgagaaaatc

SEQ ID NO: 57569 - DNA, 25 bp, Artificial
  Probe
ttccaacttcggctacgatctctac

SEQ ID NO: 57570 - DNA, 25 bp, Artificial
  Probe
tgatcaacaatcctgacatccacag

SEQ ID NO: 57571 - DNA, 25 bp, Artificial
  Probe
gtgcctccagaattgtgtttgagag

SEQ ID NO: 57572 - DNA, 25 bp, Artificial
  Probe
gagtgcctccagaattgtgtttgag

SEQ ID NO: 57573 - DNA, 25 bp, Artificial
  Probe
ttgagaggaaacttcgagaaaatca

SEQ ID NO: 57574 - DNA, 25 bp, Artificial
  Probe
tgtgtttgagaggaaacttcgagaa

SEQ ID NO: 57575 - DNA, 25 bp, Artificial
  Probe
ttgtgtttgagaggaaacttcgaga

SEQ ID NO: 57576 - DNA, 25 bp, Artificial
  Probe
gagaggaaacttcgagaaaatcagt

SEQ ID NO: 57577 - DNA, 25 bp, Artificial
  Probe
tgagaggaaacttcgagaaaatcag

SEQ ID NO: 57578 - DNA, 25 bp, Artificial
  Probe
agtgcctccagaattgtgtttgaga

SEQ ID NO: 57579 - DNA, 25 bp, Artificial
  Probe
agagtgcctccagaattgtgtttga

SEQ ID NO: 57580 - DNA, 25 bp, Artificial
  Probe
tttccaacttcggctacgatctcta

SEQ ID NO: 57581 - DNA, 25 bp, Artificial
  Probe
gtttgagaggaaacttcgagaaaat

SEQ ID NO: 57582 - DNA, 25 bp, Artificial
  Probe
tgtttgagaggaaacttcgagaaaa

SEQ ID NO: 57583 - DNA, 25 bp, Artificial
  Probe
agaggaaacttcgagaaaatcagtt

SEQ ID NO: 57584 - DNA, 25 bp, Artificial
  Probe
ttactgcccctgagaagaacttcaa

SEQ ID NO: 57585 - DNA, 25 bp, Artificial
  Probe
ccctgagaagaacttcaagagtgcc

SEQ ID NO: 57586 - DNA, 25 bp, Artificial
  Probe
gaggcgtctactactttgcttacca

SEQ ID NO: 57587 - DNA, 25 bp, Artificial
  Probe
aggcgtctactactttgcttaccac

SEQ ID NO: 57588 - DNA, 25 bp, Artificial
  Probe
ggaggcgtctactactttgcttacc

SEQ ID NO: 57589 - DNA, 25 bp, Artificial
  Probe
gggaggcgtctactactttgcttac

SEQ ID NO: 57590 - DNA, 25 bp, Artificial
  Probe
tgggaggcgtctactactttgctta

SEQ ID NO: 57591 - DNA, 25 bp, Artificial
  Probe
taggtttgaccggactctctacaat

SEQ ID NO: 57592 - DNA, 25 bp, Artificial
  Probe
ttaggtttgaccggactctctacaa

SEQ ID NO: 57593 - DNA, 25 bp, Artificial
  Probe
agttaggtttgaccggactctctac

SEQ ID NO: 57594 - DNA, 25 bp, Artificial
  Probe
cagttaggtttgaccggactctcta

SEQ ID NO: 57595 - DNA, 25 bp, Artificial
  Probe
gttaggtttgaccggactctctaca

SEQ ID NO: 57596 - DNA, 25 bp, Artificial
  Probe
aggtttgaccggactctctacaatg

SEQ ID NO: 57597 - DNA, 25 bp, Artificial
  Probe
gcgtctactactttgcttaccacgt

SEQ ID NO: 57598 - DNA, 25 bp, Artificial
  Probe
ggtttgaccggactctctacaatgg

SEQ ID NO: 57599 - DNA, 25 bp, Artificial
  Probe
ctacaacccagccactggtatcttc

SEQ ID NO: 57600 - DNA, 25 bp, Artificial
  Probe
aggccatagcatacttagacatgaa

SEQ ID NO: 57601 - DNA, 25 bp, Artificial
  Probe
gaggccatagcatacttagacatga

SEQ ID NO: 57602 - DNA, 25 bp, Artificial
  Probe
aggaggccatagcatacttagacat

SEQ ID NO: 57603 - DNA, 25 bp, Artificial
  Probe
ggaggccatagcatacttagacatg

SEQ ID NO: 57604 - DNA, 25 bp, Artificial
  Probe
aaattcctcacccttgtcttttctg

SEQ ID NO: 57605 - DNA, 25 bp, Artificial
  Probe
ggccatagcatacttagacatgaaa

SEQ ID NO: 57606 - DNA, 25 bp, Artificial
  Probe
gaggaggccatagcatacttagaca

SEQ ID NO: 57607 - DNA, 25 bp, Artificial
  Probe
gccatagcatacttagacatgaaaa

SEQ ID NO: 57608 - DNA, 25 bp, Artificial
  Probe
gttatcttcaagaccaaaagggcat

SEQ ID NO: 57609 - DNA, 25 bp, Artificial
  Probe
aaaattcctcacccttgtcttttct

SEQ ID NO: 57610 - DNA, 25 bp, Artificial
  Probe
caaaattcctcacccttgtcttttc

SEQ ID NO: 57611 - DNA, 25 bp, Artificial
  Probe
aattcctcacccttgtcttttctga

SEQ ID NO: 57612 - DNA, 25 bp, Artificial
  Probe
ttatcttcaagaccaaaagggcatg

SEQ ID NO: 57613 - DNA, 25 bp, Artificial
  Probe
ctgttatcttcaagaccaaaagggc

SEQ ID NO: 57614 - DNA, 25 bp, Artificial
  Probe
gctgttatcttcaagaccaaaaggg

SEQ ID NO: 57615 - DNA, 25 bp, Artificial
  Probe
aagctgttatcttcaagaccaaaag

SEQ ID NO: 57616 - DNA, 25 bp, Artificial
  Probe
ggaagctgttatcttcaagaccaaa

SEQ ID NO: 57617 - DNA, 25 bp, Artificial
  Probe
cttgtcttttctgagaactgtgctg

SEQ ID NO: 57618 - DNA, 25 bp, Artificial
  Probe
agctgttatcttcaagaccaaaagg

SEQ ID NO: 57619 - DNA, 25 bp, Artificial
  Probe
tgtcttttctgagaactgtgctgaa

SEQ ID NO: 57620 - DNA, 25 bp, Artificial
  Probe
ttgtcttttctgagaactgtgctga

SEQ ID NO: 57621 - DNA, 25 bp, Artificial
  Probe
cttttctgagaactgtgctgaaatg

SEQ ID NO: 57622 - DNA, 25 bp, Artificial
  Probe
tcttttctgagaactgtgctgaaat

SEQ ID NO: 57623 - DNA, 25 bp, Artificial
  Probe
tgttatcttcaagaccaaaagggca

SEQ ID NO: 57624 - DNA, 25 bp, Artificial
  Probe
cgaggaggccatagcatacttagac

SEQ ID NO: 57625 - DNA, 25 bp, Artificial
  Probe
gtcgaggaggccatagcatacttag

SEQ ID NO: 57626 - DNA, 25 bp, Artificial
  Probe
tcacccttgtcttttctgagaactg

SEQ ID NO: 57627 - DNA, 25 bp, Artificial
  Probe
gcaaaattcctcacccttgtctttt

SEQ ID NO: 57628 - DNA, 25 bp, Artificial
  Probe
acccttgtcttttctgagaactgtg

SEQ ID NO: 57629 - DNA, 25 bp, Artificial
  Probe
cacccttgtcttttctgagaactgt

SEQ ID NO: 57630 - DNA, 25 bp, Artificial
  Probe
tcgaggaggccatagcatacttaga

SEQ ID NO: 57631 - DNA, 25 bp, Artificial
  Probe
agcaaaattcctcacccttgtcttt

SEQ ID NO: 57632 - DNA, 25 bp, Artificial
  Probe
aagcaaaattcctcacccttgtctt

SEQ ID NO: 57633 - DNA, 25 bp, Artificial
  Probe
gtcttttctgagaactgtgctgaaa

SEQ ID NO: 57634 - DNA, 25 bp, Artificial
  Probe
ccttgtcttttctgagaactgtgct

SEQ ID NO: 57635 - DNA, 25 bp, Artificial
  Probe
ttttctgagaactgtgctgaaatgg

SEQ ID NO: 57636 - DNA, 25 bp, Artificial
  Probe
gggaagctgttatcttcaagaccaa

SEQ ID NO: 57637 - DNA, 25 bp, Artificial
  Probe
gaagcaaaattcctcacccttgtct

SEQ ID NO: 57638 - DNA, 25 bp, Artificial
  Probe
ctgggaagctgttatcttcaagacc

SEQ ID NO: 57639 - DNA, 25 bp, Artificial
  Probe
cctgggaagctgttatcttcaagac

SEQ ID NO: 57640 - DNA, 25 bp, Artificial
  Probe
cagatgggaccaattcatccacttg

SEQ ID NO: 57641 - DNA, 25 bp, Artificial
  Probe
gaagctgttatcttcaagaccaaaa

SEQ ID NO: 57642 - DNA, 25 bp, Artificial
  Probe
tatcttcaagaccaaaagggcatgg

SEQ ID NO: 57643 - DNA, 25 bp, Artificial
  Probe
cccttgtcttttctgagaactgtgc

SEQ ID NO: 57644 - DNA, 25 bp, Artificial
  Probe
tgggaagctgttatcttcaagacca

SEQ ID NO: 57645 - DNA, 25 bp, Artificial
  Probe
tacttatcgctaactccctgactga

SEQ ID NO: 57646 - DNA, 25 bp, Artificial
  Probe
gtacttatcgctaactccctgactg

SEQ ID NO: 57647 - DNA, 25 bp, Artificial
  Probe
agacatggctgacatcaagaacaac

SEQ ID NO: 57648 - DNA, 25 bp, Artificial
  Probe
cagacatggctgacatcaagaacaa

SEQ ID NO: 57649 - DNA, 25 bp, Artificial
  Probe
gacatggctgacatcaagaacaacc

SEQ ID NO: 57650 - DNA, 25 bp, Artificial
  Probe
tgacatcaagaacaaccccgaatat

SEQ ID NO: 57651 - DNA, 25 bp, Artificial
  Probe
gacatcaagaacaaccccgaatatt

SEQ ID NO: 57652 - DNA, 25 bp, Artificial
  Probe
atcaccctctacaggagttttcttc

SEQ ID NO: 57653 - DNA, 25 bp, Artificial
  Probe
ctgacatcaagaacaaccccgaata

SEQ ID NO: 57654 - DNA, 25 bp, Artificial
  Probe
catcaccctctacaggagttttctt

SEQ ID NO: 57655 - DNA, 25 bp, Artificial
  Probe
agtacttatcgctaactccctgact

SEQ ID NO: 57656 - DNA, 25 bp, Artificial
  Probe
accctctacaggagttttcttcaac

SEQ ID NO: 57657 - DNA, 25 bp, Artificial
  Probe
caccctctacaggagttttcttcaa

SEQ ID NO: 57658 - DNA, 25 bp, Artificial
  Probe
cagtacttatcgctaactccctgac

SEQ ID NO: 57659 - DNA, 25 bp, Artificial
  Probe
aatcttctttcgtctgctcgctctc

SEQ ID NO: 57660 - DNA, 25 bp, Artificial
  Probe
tcaccctctacaggagttttcttca

SEQ ID NO: 57661 - DNA, 25 bp, Artificial
  Probe
gaatcttctttcgtctgctcgctct

SEQ ID NO: 57662 - DNA, 25 bp, Artificial
  Probe
ctctacaggagttttcttcaactgg

SEQ ID NO: 57663 - DNA, 25 bp, Artificial
  Probe
cctctacaggagttttcttcaactg

SEQ ID NO: 57664 - DNA, 25 bp, Artificial
  Probe
agaatcttctttcgtctgctcgctc

SEQ ID NO: 57665 - DNA, 25 bp, Artificial
  Probe
ccctctacaggagttttcttcaact

SEQ ID NO: 57666 - DNA, 25 bp, Artificial
  Probe
ttgcagacatggctgacatcaagaa

SEQ ID NO: 57667 - DNA, 25 bp, Artificial
  Probe
gagaatcttctttcgtctgctcgct

SEQ ID NO: 57668 - DNA, 25 bp, Artificial
  Probe
tctacaggagttttcttcaactggg

SEQ ID NO: 57669 - DNA, 25 bp, Artificial
  Probe
ctacaggagttttcttcaactgggt

SEQ ID NO: 57670 - DNA, 25 bp, Artificial
  Probe
gcagtacttatcgctaactccctga

SEQ ID NO: 57671 - DNA, 25 bp, Artificial
  Probe
tacaggagttttcttcaactgggtg

SEQ ID NO: 57672 - DNA, 25 bp, Artificial
  Probe
tgcagtacttatcgctaactccctg

SEQ ID NO: 57673 - DNA, 25 bp, Artificial
  Probe
gcatcaccctctacaggagttttct

SEQ ID NO: 57674 - DNA, 25 bp, Artificial
  Probe
ctggtatttagagcgcagtcttgac

SEQ ID NO: 57675 - DNA, 25 bp, Artificial
  Probe
tggtatttagagcgcagtcttgact

SEQ ID NO: 57676 - DNA, 25 bp, Artificial
  Probe
acatcaagaacaaccccgaatattc

SEQ ID NO: 57677 - DNA, 25 bp, Artificial
  Probe
ggcatcaccctctacaggagttttc

SEQ ID NO: 57678 - DNA, 25 bp, Artificial
  Probe
catcaagaacaaccccgaatattct

SEQ ID NO: 57679 - DNA, 25 bp, Artificial
  Probe
gtatttagagcgcagtcttgactgg

SEQ ID NO: 57680 - DNA, 25 bp, Artificial
  Probe
ggtatttagagcgcagtcttgactg

SEQ ID NO: 57681 - DNA, 25 bp, Artificial
  Probe
gctggtatttagagcgcagtcttga

SEQ ID NO: 57682 - DNA, 25 bp, Artificial
  Probe
atcaagaacaaccccgaatattctt

SEQ ID NO: 57683 - DNA, 25 bp, Artificial
  Probe
tcaagaacaaccccgaatattcttc

SEQ ID NO: 57684 - DNA, 25 bp, Artificial
  Probe
aacaaccccgaatattcttcgtttt

SEQ ID NO: 57685 - DNA, 25 bp, Artificial
  Probe
gaacaaccccgaatattcttcgttt

SEQ ID NO: 57686 - DNA, 25 bp, Artificial
  Probe
tatttagagcgcagtcttgactggc

SEQ ID NO: 57687 - DNA, 25 bp, Artificial
  Probe
caagaacaaccccgaatattcttcg

SEQ ID NO: 57688 - DNA, 25 bp, Artificial
  Probe
agaacaaccccgaatattcttcgtt

SEQ ID NO: 57689 - DNA, 25 bp, Artificial
  Probe
aagaacaaccccgaatattcttcgt

SEQ ID NO: 57690 - DNA, 25 bp, Artificial
  Probe
gaaggaagcatctcagaagacaaat

SEQ ID NO: 57691 - DNA, 25 bp, Artificial
  Probe
aaggaagcatctcagaagacaaatg

SEQ ID NO: 57692 - DNA, 25 bp, Artificial
  Probe
ggaagcatctcagaagacaaatgtg

SEQ ID NO: 57693 - DNA, 25 bp, Artificial
  Probe
aggaagcatctcagaagacaaatgt

SEQ ID NO: 57694 - DNA, 25 bp, Artificial
  Probe
ggaaggaagcatctcagaagacaaa

SEQ ID NO: 57695 - DNA, 25 bp, Artificial
  Probe
catcaagtggagcagaggaaacatc

SEQ ID NO: 57696 - DNA, 25 bp, Artificial
  Probe
tgtgtgaccctaaccatttgaaaag

SEQ ID NO: 57697 - DNA, 25 bp, Artificial
  Probe
atcaagtggagcagaggaaacatca

SEQ ID NO: 57698 - DNA, 25 bp, Artificial
  Probe
tcatcaagtggagcagaggaaacat

SEQ ID NO: 57699 - DNA, 25 bp, Artificial
  Probe
tgtctatcattgatggggaaggaag

SEQ ID NO: 57700 - DNA, 25 bp, Artificial
  Probe
gtgtctatcattgatggggaaggaa

SEQ ID NO: 57701 - DNA, 25 bp, Artificial
  Probe
aggtgttggtccctgaagactattc

SEQ ID NO: 57702 - DNA, 25 bp, Artificial
  Probe
gggaaggaagcatctcagaagacaa

SEQ ID NO: 57703 - DNA, 25 bp, Artificial
  Probe
gaagcatctcagaagacaaatgtgc

SEQ ID NO: 57704 - DNA, 25 bp, Artificial
  Probe
tcaagtggagcagaggaaacatcag

SEQ ID NO: 57705 - DNA, 25 bp, Artificial
  Probe
ctatcattgatggggaaggaagcat

SEQ ID NO: 57706 - DNA, 25 bp, Artificial
  Probe
gtgtgaccctaaccatttgaaaagg

SEQ ID NO: 57707 - DNA, 25 bp, Artificial
  Probe
ggtccctgaagactattcacacatg

SEQ ID NO: 57708 - DNA, 25 bp, Artificial
  Probe
gttggtccctgaagactattcacac

SEQ ID NO: 57709 - DNA, 25 bp, Artificial
  Probe
gtgttggtccctgaagactattcac

SEQ ID NO: 57710 - DNA, 25 bp, Artificial
  Probe
gtctatcattgatggggaaggaagc

SEQ ID NO: 57711 - DNA, 25 bp, Artificial
  Probe
tggtccctgaagactattcacacat

SEQ ID NO: 57712 - DNA, 25 bp, Artificial
  Probe
gtcatcaagtggagcagaggaaaca

SEQ ID NO: 57713 - DNA, 25 bp, Artificial
  Probe
taaccatttgaaaaggggcggaaaa

SEQ ID NO: 57714 - DNA, 25 bp, Artificial
  Probe
ttggtccctgaagactattcacaca

SEQ ID NO: 57715 - DNA, 25 bp, Artificial
  Probe
tgttggtccctgaagactattcaca

SEQ ID NO: 57716 - DNA, 25 bp, Artificial
  Probe
ctgctgttgagaagaagtttgccag

SEQ ID NO: 57717 - DNA, 25 bp, Artificial
  Probe
tctatcattgatggggaaggaagca

SEQ ID NO: 57718 - DNA, 25 bp, Artificial
  Probe
gtccctgaagactattcacacatgc

SEQ ID NO: 57719 - DNA, 25 bp, Artificial
  Probe
ctaaccatttgaaaaggggcggaaa

SEQ ID NO: 57720 - DNA, 25 bp, Artificial
  Probe
aagcatctcagaagacaaatgtgcc

SEQ ID NO: 57721 - DNA, 25 bp, Artificial
  Probe
catatgacagagactttctggtaaa

SEQ ID NO: 57722 - DNA, 25 bp, Artificial
  Probe
ggtgttggtccctgaagactattca

SEQ ID NO: 57723 - DNA, 25 bp, Artificial
  Probe
atctcagaagacaaatgtgcccctt

SEQ ID NO: 57724 - DNA, 25 bp, Artificial
  Probe
atttgaaaaggggcggaaaaggaac

SEQ ID NO: 57725 - DNA, 25 bp, Artificial
  Probe
catttgaaaaggggcggaaaaggaa

SEQ ID NO: 57726 - DNA, 25 bp, Artificial
  Probe
tatcattgatggggaaggaagcatc

SEQ ID NO: 57727 - DNA, 25 bp, Artificial
  Probe
aaccatttgaaaaggggcggaaaag

SEQ ID NO: 57728 - DNA, 25 bp, Artificial
  Probe
tatgacagagactttctggtaaaag

SEQ ID NO: 57729 - DNA, 25 bp, Artificial
  Probe
catctcagaagacaaatgtgcccct

SEQ ID NO: 57730 - DNA, 25 bp, Artificial
  Probe
atatgacagagactttctggtaaaa

SEQ ID NO: 57731 - DNA, 25 bp, Artificial
  Probe
atggggaaggaagcatctcagaaga

SEQ ID NO: 57732 - DNA, 25 bp, Artificial
  Probe
tctcagaagacaaatgtgccccttg

SEQ ID NO: 57733 - DNA, 25 bp, Artificial
  Probe
atcattgatggggaaggaagcatct

SEQ ID NO: 57734 - DNA, 25 bp, Artificial
  Probe
tgacagagactttctggtaaaagtt

SEQ ID NO: 57735 - DNA, 25 bp, Artificial
  Probe
ctgtctgtgaatgtccatatagtgt

SEQ ID NO: 57736 - DNA, 25 bp, Artificial
  Probe
cctgtctgtgaatgtccatatagtg

SEQ ID NO: 57737 - DNA, 25 bp, Artificial
  Probe
tcctgtctgtgaatgtccatatagt

SEQ ID NO: 57738 - DNA, 25 bp, Artificial
  Probe
ggaagtcttgaagtgtagcagttaa

SEQ ID NO: 57739 - DNA, 25 bp, Artificial
  Probe
ttcctgtctgtgaatgtccatatag

SEQ ID NO: 57740 - DNA, 25 bp, Artificial
  Probe
cttcctgtctgtgaatgtccatata

SEQ ID NO: 57741 - DNA, 25 bp, Artificial
  Probe
tgtctgtgaatgtccatatagtgta

SEQ ID NO: 57742 - DNA, 25 bp, Artificial
  Probe
tgaatgtccatatagtgtactgtgt

SEQ ID NO: 57743 - DNA, 25 bp, Artificial
  Probe
tgtgaatgtccatatagtgtactgt

SEQ ID NO: 57744 - DNA, 25 bp, Artificial
  Probe
gtgaatgtccatatagtgtactgtg

SEQ ID NO: 57745 - DNA, 25 bp, Artificial
  Probe
ctgtccttagaagtgaagagtccaa

SEQ ID NO: 57746 - DNA, 25 bp, Artificial
  Probe
ctgtgaatgtccatatagtgtactg

SEQ ID NO: 57747 - DNA, 25 bp, Artificial
  Probe
tctgtgaatgtccatatagtgtact

SEQ ID NO: 57748 - DNA, 25 bp, Artificial
  Probe
gtctgtgaatgtccatatagtgtac

SEQ ID NO: 57749 - DNA, 25 bp, Artificial
  Probe
tgtccttagaagtgaagagtccaac

SEQ ID NO: 57750 - DNA, 25 bp, Artificial
  Probe
gaatgtccatatagtgtactgtgtt

SEQ ID NO: 57751 - DNA, 25 bp, Artificial
  Probe
ggtactctgccatatctcttgtagg

SEQ ID NO: 57752 - DNA, 25 bp, Artificial
  Probe
gatgttgaccacttgctagagagaa

SEQ ID NO: 57753 - DNA, 25 bp, Artificial
  Probe
atgatgttgaccacttgctagagag

SEQ ID NO: 57754 - DNA, 25 bp, Artificial
  Probe
atgttgaccacttgctagagagaag

SEQ ID NO: 57755 - DNA, 25 bp, Artificial
  Probe
ttagctgtccttagaagtgaagagt

SEQ ID NO: 57756 - DNA, 25 bp, Artificial
  Probe
gcttcctgtctgtgaatgtccatat

SEQ ID NO: 57757 - DNA, 25 bp, Artificial
  Probe
gcggtgttaataactataggtctgt

SEQ ID NO: 57758 - DNA, 25 bp, Artificial
  Probe
agtgtagcagttaaaccatcttgta

SEQ ID NO: 57759 - DNA, 25 bp, Artificial
  Probe
cttgaagtgtagcagttaaaccatc

SEQ ID NO: 57760 - DNA, 25 bp, Artificial
  Probe
tatccatttgagattgcttgtgttg

SEQ ID NO: 57761 - DNA, 25 bp, Artificial
  Probe
gtatccatttgagattgcttgtgtt

SEQ ID NO: 57762 - DNA, 25 bp, Artificial
  Probe
gagtgtatccatttgagattgcttg

SEQ ID NO: 57763 - DNA, 25 bp, Artificial
  Probe
agagtgtatccatttgagattgctt

SEQ ID NO: 57764 - DNA, 25 bp, Artificial
  Probe
aagagtgtatccatttgagattgct

SEQ ID NO: 57765 - DNA, 25 bp, Artificial
  Probe
gtgtagcagttaaaccatcttgtag

SEQ ID NO: 57766 - DNA, 25 bp, Artificial
  Probe
tagctgtccttagaagtgaagagtc

SEQ ID NO: 57767 - DNA, 25 bp, Artificial
  Probe
ttgaagtgtagcagttaaaccatct

SEQ ID NO: 57768 - DNA, 25 bp, Artificial
  Probe
tcttgaagtgtagcagttaaaccat

SEQ ID NO: 57769 - DNA, 25 bp, Artificial
  Probe
aagtcttgaagtgtagcagttaaac

SEQ ID NO: 57770 - DNA, 25 bp, Artificial
  Probe
gtgtatccatttgagattgcttgtg

SEQ ID NO: 57771 - DNA, 25 bp, Artificial
  Probe
agtgtatccatttgagattgcttgt

SEQ ID NO: 57772 - DNA, 25 bp, Artificial
  Probe
gaagtcttgaagtgtagcagttaaa

SEQ ID NO: 57773 - DNA, 25 bp, Artificial
  Probe
gtccttagaagtgaagagtccaacg

SEQ ID NO: 57774 - DNA, 25 bp, Artificial
  Probe
tttccatataagagttctgtgtgcc

SEQ ID NO: 57775 - DNA, 25 bp, Artificial
  Probe
ggcggtgttaataactataggtctg

SEQ ID NO: 57776 - DNA, 25 bp, Artificial
  Probe
aggcggtgttaataactataggtct

SEQ ID NO: 57777 - DNA, 25 bp, Artificial
  Probe
gaagtgtagcagttaaaccatcttg

SEQ ID NO: 57778 - DNA, 25 bp, Artificial
  Probe
gctaataggcagtttacaaggaatt

SEQ ID NO: 57779 - DNA, 25 bp, Artificial
  Probe
ctttccatataagagttctgtgtgc

SEQ ID NO: 57780 - DNA, 25 bp, Artificial
  Probe
gttgcttgatcttctgttgacctaa

SEQ ID NO: 57781 - DNA, 25 bp, Artificial
  Probe
ttgcttgatcttctgttgacctaag

SEQ ID NO: 57782 - DNA, 25 bp, Artificial
  Probe
gtacatagctgccaattagttcctt

SEQ ID NO: 57783 - DNA, 25 bp, Artificial
  Probe
gttcaacctcaaataaatgcttcct

SEQ ID NO: 57784 - DNA, 25 bp, Artificial
  Probe
tgttcaacctcaaataaatgcttcc

SEQ ID NO: 57785 - DNA, 25 bp, Artificial
  Probe
ttcaacctcaaataaatgcttcctt

SEQ ID NO: 57786 - DNA, 25 bp, Artificial
  Probe
gctgccaattagttcctttgttaat

SEQ ID NO: 57787 - DNA, 25 bp, Artificial
  Probe
atgttcaacctcaaataaatgcttc

SEQ ID NO: 57788 - DNA, 25 bp, Artificial
  Probe
cttccctgtgttatgactcaatgtg

SEQ ID NO: 57789 - DNA, 25 bp, Artificial
  Probe
ttccttccctgtgttatgactcaat

SEQ ID NO: 57790 - DNA, 25 bp, Artificial
  Probe
tgccaattagttcctttgttaatct

SEQ ID NO: 57791 - DNA, 25 bp, Artificial
  Probe
gccaattagttcctttgttaatctg

SEQ ID NO: 57792 - DNA, 25 bp, Artificial
  Probe
ctgccaattagttcctttgttaatc

SEQ ID NO: 57793 - DNA, 25 bp, Artificial
  Probe
aactggaaccaaggatttaataact

SEQ ID NO: 57794 - DNA, 25 bp, Artificial
  Probe
tcatgttcaacctcaaataaatgct

SEQ ID NO: 57795 - DNA, 25 bp, Artificial
  Probe
cttctgttgacctaagatgattatt

SEQ ID NO: 57796 - DNA, 25 bp, Artificial
  Probe
tccttccctgtgttatgactcaatg

SEQ ID NO: 57797 - DNA, 25 bp, Artificial
  Probe
tgcttgatcttctgttgacctaaga

SEQ ID NO: 57798 - DNA, 25 bp, Artificial
  Probe
catgttcaacctcaaataaatgctt

SEQ ID NO: 57799 - DNA, 25 bp, Artificial
  Probe
ttcatgttcaacctcaaataaatgc

SEQ ID NO: 57800 - DNA, 25 bp, Artificial
  Probe
tacatagctgccaattagttccttt

SEQ ID NO: 57801 - DNA, 25 bp, Artificial
  Probe
taactatgggagctatggatatgga

SEQ ID NO: 57802 - DNA, 25 bp, Artificial
  Probe
gttccttccctgtgttatgactcaa

SEQ ID NO: 57803 - DNA, 25 bp, Artificial
  Probe
gggtataactatgggagctatggat

SEQ ID NO: 57804 - DNA, 25 bp, Artificial
  Probe
ccctgtgttatgactcaatgtggat

SEQ ID NO: 57805 - DNA, 25 bp, Artificial
  Probe
ccttccctgtgttatgactcaatgt

SEQ ID NO: 57806 - DNA, 25 bp, Artificial
  Probe
aaactggaaccaaggatttaataac

SEQ ID NO: 57807 - DNA, 25 bp, Artificial
  Probe
ataactatgggagctatggatatgg

SEQ ID NO: 57808 - DNA, 25 bp, Artificial
  Probe
actggaaccaaggatttaataacta

SEQ ID NO: 57809 - DNA, 25 bp, Artificial
  Probe
tagctgccaattagttcctttgtta

SEQ ID NO: 57810 - DNA, 25 bp, Artificial
  Probe
aactatgggagctatggatatggac

SEQ ID NO: 57811 - DNA, 25 bp, Artificial
  Probe
ggttgcttgatcttctgttgaccta

SEQ ID NO: 57812 - DNA, 25 bp, Artificial
  Probe
ttccctgtgttatgactcaatgtgg

SEQ ID NO: 57813 - DNA, 25 bp, Artificial
  Probe
atagctgccaattagttcctttgtt

SEQ ID NO: 57814 - DNA, 25 bp, Artificial
  Probe
ggtataactatgggagctatggata

SEQ ID NO: 57815 - DNA, 25 bp, Artificial
  Probe
ccaattagttcctttgttaatctgt

SEQ ID NO: 57816 - DNA, 25 bp, Artificial
  Probe
agctgccaattagttcctttgttaa

SEQ ID NO: 57817 - DNA, 25 bp, Artificial
  Probe
catagctgccaattagttcctttgt

SEQ ID NO: 57818 - DNA, 25 bp, Artificial
  Probe
acatagctgccaattagttcctttg

SEQ ID NO: 57819 - DNA, 25 bp, Artificial
  Probe
ctgtacatagctgccaattagttcc

SEQ ID NO: 57820 - DNA, 25 bp, Artificial
  Probe
actgtacatagctgccaattagttc

SEQ ID NO: 57821 - DNA, 25 bp, Artificial
  Probe
tcttctgttgacctaagatgattat

SEQ ID NO: 57822 - DNA, 25 bp, Artificial
  Probe
tgtacatagctgccaattagttcct

SEQ ID NO: 57823 - DNA, 25 bp, Artificial
  Probe
cactgtacatagctgccaattagtt

SEQ ID NO: 57824 - DNA, 25 bp, Artificial
  Probe
tgttccttccctgtgttatgactca

SEQ ID NO: 57825 - DNA, 25 bp, Artificial
  Probe
taccctctatttattagccaactcg

SEQ ID NO: 57826 - DNA, 25 bp, Artificial
  Probe
acctaccctctatttattagccaac

SEQ ID NO: 57827 - DNA, 25 bp, Artificial
  Probe
atatttattaccgtcaccctctcag

SEQ ID NO: 57828 - DNA, 25 bp, Artificial
  Probe
cctaccctctatttattagccaact

SEQ ID NO: 57829 - DNA, 25 bp, Artificial
  Probe
tatttattaccgtcaccctctcaga

SEQ ID NO: 57830 - DNA, 25 bp, Artificial
  Probe
ctctatttattagccaactcgtccc

SEQ ID NO: 57831 - DNA, 25 bp, Artificial
  Probe
cctctatttattagccaactcgtcc

SEQ ID NO: 57832 - DNA, 25 bp, Artificial
  Probe
ccctctatttattagccaactcgtc

SEQ ID NO: 57833 - DNA, 25 bp, Artificial
  Probe
ctatttattagccaactcgtccctg

SEQ ID NO: 57834 - DNA, 25 bp, Artificial
  Probe
tctatttattagccaactcgtccct

SEQ ID NO: 57835 - DNA, 25 bp, Artificial
  Probe
accctctatttattagccaactcgt

SEQ ID NO: 57836 - DNA, 25 bp, Artificial
  Probe
atttattaccgtcaccctctcagaa

SEQ ID NO: 57837 - DNA, 25 bp, Artificial
  Probe
tatatttattaccgtcaccctctca

SEQ ID NO: 57838 - DNA, 25 bp, Artificial
  Probe
ctaccctctatttattagccaactc

SEQ ID NO: 57839 - DNA, 25 bp, Artificial
  Probe
tacctaccctctatttattagccaa

SEQ ID NO: 57840 - DNA, 25 bp, Artificial
  Probe
gctcatatatttattaccgtcaccc

SEQ ID NO: 57841 - DNA, 25 bp, Artificial
  Probe
gtacctaccctctatttattagcca

SEQ ID NO: 57842 - DNA, 25 bp, Artificial
  Probe
tttattaccgtcaccctctcagaac

SEQ ID NO: 57843 - DNA, 25 bp, Artificial
  Probe
cccacacccagctcatatatttatt

SEQ ID NO: 57844 - DNA, 25 bp, Artificial
  Probe
acccagctcatatatttattaccgt

SEQ ID NO: 57845 - DNA, 25 bp, Artificial
  Probe
cacccagctcatatatttattaccg

SEQ ID NO: 57846 - DNA, 25 bp, Artificial
  Probe
cccagctcatatatttattaccgtc

SEQ ID NO: 57847 - DNA, 25 bp, Artificial
  Probe
tatttattagccaactcgtccctgc

SEQ ID NO: 57848 - DNA, 25 bp, Artificial
  Probe
acccacacccagctcatatatttat

SEQ ID NO: 57849 - DNA, 25 bp, Artificial
  Probe
catatatttattaccgtcaccctct

SEQ ID NO: 57850 - DNA, 25 bp, Artificial
  Probe
tcatatatttattaccgtcaccctc

SEQ ID NO: 57851 - DNA, 25 bp, Artificial
  Probe
ctcatatatttattaccgtcaccct

SEQ ID NO: 57852 - DNA, 25 bp, Artificial
  Probe
agctcatatatttattaccgtcacc

SEQ ID NO: 57853 - DNA, 25 bp, Artificial
  Probe
ccagctcatatatttattaccgtca

SEQ ID NO: 57854 - DNA, 25 bp, Artificial
  Probe
atatatttattaccgtcaccctctc

SEQ ID NO: 57855 - DNA, 25 bp, Artificial
  Probe
acacccagctcatatatttattacc

SEQ ID NO: 57856 - DNA, 25 bp, Artificial
  Probe
ccacacccagctcatatatttatta

SEQ ID NO: 57857 - DNA, 25 bp, Artificial
  Probe
gacccacacccagctcatatattta

SEQ ID NO: 57858 - DNA, 25 bp, Artificial
  Probe
aacagaacgtgagagaaaggaagaa

SEQ ID NO: 57859 - DNA, 25 bp, Artificial
  Probe
aaacagaacgtgagagaaaggaaga

SEQ ID NO: 57860 - DNA, 25 bp, Artificial
  Probe
cagctcatatatttattaccgtcac

SEQ ID NO: 57861 - DNA, 25 bp, Artificial
  Probe
ttattaccgtcaccctctcagaacc

SEQ ID NO: 57862 - DNA, 25 bp, Artificial
  Probe
cacacccagctcatatatttattac

SEQ ID NO: 57863 - DNA, 25 bp, Artificial
  Probe
acagaacgtgagagaaaggaagaag

SEQ ID NO: 57864 - DNA, 25 bp, Artificial
  Probe
agacccacacccagctcatatattt

SEQ ID NO: 57865 - DNA, 25 bp, Artificial
  Probe
taaaacagaacgtgagagaaaggaa

SEQ ID NO: 57866 - DNA, 25 bp, Artificial
  Probe
ttaaaacagaacgtgagagaaagga

SEQ ID NO: 57867 - DNA, 25 bp, Artificial
  Probe
cttaaaacagaacgtgagagaaagg

SEQ ID NO: 57868 - DNA, 25 bp, Artificial
  Probe
ccttaaaacagaacgtgagagaaag

SEQ ID NO: 57869 - DNA, 25 bp, Artificial
  Probe
cagaacgtgagagaaaggaagaagc

SEQ ID NO: 57870 - DNA, 25 bp, Artificial
  Probe
aaatactaaggtccgaatgtttggc

SEQ ID NO: 57871 - DNA, 25 bp, Artificial
  Probe
ttatgatgattcttgacattgactt

SEQ ID NO: 57872 - DNA, 25 bp, Artificial
  Probe
atactaaggtccgaatgtttggcat

SEQ ID NO: 57873 - DNA, 25 bp, Artificial
  Probe
aatactaaggtccgaatgtttggca

SEQ ID NO: 57874 - DNA, 25 bp, Artificial
  Probe
gtcttctcaaggttcctgtgtcaga

SEQ ID NO: 57875 - DNA, 25 bp, Artificial
  Probe
gttgccagactccatgacaattcaa

SEQ ID NO: 57876 - DNA, 25 bp, Artificial
  Probe
tatgatgattcttgacattgacttt

SEQ ID NO: 57877 - DNA, 25 bp, Artificial
  Probe
tttatgatgattcttgacattgact

SEQ ID NO: 57878 - DNA, 25 bp, Artificial
  Probe
aaaatactaaggtccgaatgtttgg

SEQ ID NO: 57879 - DNA, 25 bp, Artificial
  Probe
gacaattcaaaaggtaaagggactg

SEQ ID NO: 57880 - DNA, 25 bp, Artificial
  Probe
tcttctcaaggttcctgtgtcagaa

SEQ ID NO: 57881 - DNA, 25 bp, Artificial
  Probe
cagttgccagactccatgacaattc

SEQ ID NO: 57882 - DNA, 25 bp, Artificial
  Probe
atgacaattcaaaaggtaaagggac

SEQ ID NO: 57883 - DNA, 25 bp, Artificial
  Probe
tactaaggtccgaatgtttggcatg

SEQ ID NO: 57884 - DNA, 25 bp, Artificial
  Probe
tgacaattcaaaaggtaaagggact

SEQ ID NO: 57885 - DNA, 25 bp, Artificial
  Probe
aattcaaaaggtaaagggactgctg

SEQ ID NO: 57886 - DNA, 25 bp, Artificial
  Probe
caattcaaaaggtaaagggactgct

SEQ ID NO: 57887 - DNA, 25 bp, Artificial
  Probe
ttgccagactccatgacaattcaaa

SEQ ID NO: 57888 - DNA, 25 bp, Artificial
  Probe
acaattcaaaaggtaaagggactgc

SEQ ID NO: 57889 - DNA, 25 bp, Artificial
  Probe
catgacaattcaaaaggtaaaggga

SEQ ID NO: 57890 - DNA, 25 bp, Artificial
  Probe
tccatgacaattcaaaaggtaaagg

SEQ ID NO: 57891 - DNA, 25 bp, Artificial
  Probe
agactccatgacaattcaaaaggta

SEQ ID NO: 57892 - DNA, 25 bp, Artificial
  Probe
ccatgacaattcaaaaggtaaaggg

SEQ ID NO: 57893 - DNA, 25 bp, Artificial
  Probe
gactccatgacaattcaaaaggtaa

SEQ ID NO: 57894 - DNA, 25 bp, Artificial
  Probe
tattagaaaagcagttgccagactc

SEQ ID NO: 57895 - DNA, 25 bp, Artificial
  Probe
agttgccagactccatgacaattca

SEQ ID NO: 57896 - DNA, 25 bp, Artificial
  Probe
atttatgatgattcttgacattgac

SEQ ID NO: 57897 - DNA, 25 bp, Artificial
  Probe
actccatgacaattcaaaaggtaaa

SEQ ID NO: 57898 - DNA, 25 bp, Artificial
  Probe
attcaaaaggtaaagggactgctgt

SEQ ID NO: 57899 - DNA, 25 bp, Artificial
  Probe
ggcagagaaatcgaactagaaaatg

SEQ ID NO: 57900 - DNA, 25 bp, Artificial
  Probe
gaaatcgaactagaaaatgacctgc

SEQ ID NO: 57901 - DNA, 25 bp, Artificial
  Probe
gcagagaaatcgaactagaaaatga

SEQ ID NO: 57902 - DNA, 25 bp, Artificial
  Probe
atgatgattcttgacattgactttt

SEQ ID NO: 57903 - DNA, 25 bp, Artificial
  Probe
agaaatcgaactagaaaatgacctg

SEQ ID NO: 57904 - DNA, 25 bp, Artificial
  Probe
ctccatgacaattcaaaaggtaaag

SEQ ID NO: 57905 - DNA, 25 bp, Artificial
  Probe
cagactccatgacaattcaaaaggt

SEQ ID NO: 57906 - DNA, 25 bp, Artificial
  Probe
gagaaatcgaactagaaaatgacct

SEQ ID NO: 57907 - DNA, 25 bp, Artificial
  Probe
agagaaatcgaactagaaaatgacc

SEQ ID NO: 57908 - DNA, 25 bp, Artificial
  Probe
gggcagagaaatcgaactagaaaat

SEQ ID NO: 57909 - DNA, 25 bp, Artificial
  Probe
ctcaaggttcctgtgtcagaacttc

SEQ ID NO: 57910 - DNA, 25 bp, Artificial
  Probe
cttctcaaggttcctgtgtcagaac

SEQ ID NO: 57911 - DNA, 25 bp, Artificial
  Probe
aaatcgaactagaaaatgacctgca

SEQ ID NO: 57912 - DNA, 25 bp, Artificial
  Probe
ccagactccatgacaattcaaaagg

SEQ ID NO: 57913 - DNA, 25 bp, Artificial
  Probe
cgtcttctcaaggttcctgtgtcag

SEQ ID NO: 57914 - DNA, 25 bp, Artificial
  Probe
tgatgattcttgacattgactttta

SEQ ID NO: 57915 - DNA, 25 bp, Artificial
  Probe
tgtggatcggatattcattcctcat

SEQ ID NO: 57916 - DNA, 25 bp, Artificial
  Probe
gtccacagccaagatgtctctatac

SEQ ID NO: 57917 - DNA, 25 bp, Artificial
  Probe
gtggatcggatattcattcctcatg

SEQ ID NO: 57918 - DNA, 25 bp, Artificial
  Probe
ttgtggatcggatattcattcctca

SEQ ID NO: 57919 - DNA, 25 bp, Artificial
  Probe
gagtttgtggatcggatattcattc

SEQ ID NO: 57920 - DNA, 25 bp, Artificial
  Probe
tgtccacagccaagatgtctctata

SEQ ID NO: 57921 - DNA, 25 bp, Artificial
  Probe
ggagtttgtggatcggatattcatt

SEQ ID NO: 57922 - DNA, 25 bp, Artificial
  Probe
caagtgtgcatgaagaatctgtgag

SEQ ID NO: 57923 - DNA, 25 bp, Artificial
  Probe
aaggaggaaatcaaaccctaacatc

SEQ ID NO: 57924 - DNA, 25 bp, Artificial
  Probe
gaaggaggaaatcaaaccctaacat

SEQ ID NO: 57925 - DNA, 25 bp, Artificial
  Probe
tggatcggatattcattcctcatgc

SEQ ID NO: 57926 - DNA, 25 bp, Artificial
  Probe
tccacagccaagatgtctctatacc

SEQ ID NO: 57927 - DNA, 25 bp, Artificial
  Probe
ggaggaaatcaaaccctaacatcag

SEQ ID NO: 57928 - DNA, 25 bp, Artificial
  Probe
ctgaaggaggaaatcaaaccctaac

SEQ ID NO: 57929 - DNA, 25 bp, Artificial
  Probe
caattcctgagcagaacttccagag

SEQ ID NO: 57930 - DNA, 25 bp, Artificial
  Probe
gatcggatattcattcctcatgcac

SEQ ID NO: 57931 - DNA, 25 bp, Artificial
  Probe
aggaggaaatcaaaccctaacatca

SEQ ID NO: 57932 - DNA, 25 bp, Artificial
  Probe
ggatattcattcctcatgcacactg

SEQ ID NO: 57933 - DNA, 25 bp, Artificial
  Probe
tttgtggatcggatattcattcctc

SEQ ID NO: 57934 - DNA, 25 bp, Artificial
  Probe
gtttgtggatcggatattcattcct

SEQ ID NO: 57935 - DNA, 25 bp, Artificial
  Probe
agtttgtggatcggatattcattcc

SEQ ID NO: 57936 - DNA, 25 bp, Artificial
  Probe
gaccacaattcctgagcagaacttc

SEQ ID NO: 57937 - DNA, 25 bp, Artificial
  Probe
gacctgccattacttcgctaacaag

SEQ ID NO: 57938 - DNA, 25 bp, Artificial
  Probe
tgaaggaggaaatcaaaccctaaca

SEQ ID NO: 57939 - DNA, 25 bp, Artificial
  Probe
gaggaaatcaaaccctaacatcagc

SEQ ID NO: 57940 - DNA, 25 bp, Artificial
  Probe
atcggatattcattcctcatgcaca

SEQ ID NO: 57941 - DNA, 25 bp, Artificial
  Probe
cggagtttgtggatcggatattcat

SEQ ID NO: 57942 - DNA, 25 bp, Artificial
  Probe
ggatcggatattcattcctcatgca

SEQ ID NO: 57943 - DNA, 25 bp, Artificial
  Probe
acaattcctgagcagaacttccaga

SEQ ID NO: 57944 - DNA, 25 bp, Artificial
  Probe
cacaattcctgagcagaacttccag

SEQ ID NO: 57945 - DNA, 25 bp, Artificial
  Probe
tggtgcttatccttttgtatttgtt

SEQ ID NO: 57946 - DNA, 25 bp, Artificial
  Probe
ttggtgcttatccttttgtatttgt

SEQ ID NO: 57947 - DNA, 25 bp, Artificial
  Probe
actttggtgcttatccttttgtatt

SEQ ID NO: 57948 - DNA, 25 bp, Artificial
  Probe
ccaagtgtgcatgaagaatctgtga

SEQ ID NO: 57949 - DNA, 25 bp, Artificial
  Probe
tgaccacaattcctgagcagaactt

SEQ ID NO: 57950 - DNA, 25 bp, Artificial
  Probe
gctgaaggaggaaatcaaaccctaa

SEQ ID NO: 57951 - DNA, 25 bp, Artificial
  Probe
cggatattcattcctcatgcacact

SEQ ID NO: 57952 - DNA, 25 bp, Artificial
  Probe
tcggatattcattcctcatgcacac

SEQ ID NO: 57953 - DNA, 25 bp, Artificial
  Probe
ggtgcttatccttttgtatttgttt

SEQ ID NO: 57954 - DNA, 25 bp, Artificial
  Probe
tttggtgcttatccttttgtatttg

SEQ ID NO: 57955 - DNA, 25 bp, Artificial
  Probe
ctttggtgcttatccttttgtattt

SEQ ID NO: 57956 - DNA, 25 bp, Artificial
  Probe
aggaaatcaaaccctaacatcagcc

SEQ ID NO: 57957 - DNA, 25 bp, Artificial
  Probe
aagtgtgcatgaagaatctgtgagc

SEQ ID NO: 57958 - DNA, 25 bp, Artificial
  Probe
ctgtccacagccaagatgtctctat

SEQ ID NO: 57959 - DNA, 25 bp, Artificial
  Probe
gatattcattcctcatgcacactgc

SEQ ID NO: 57960 - DNA, 25 bp, Artificial
  Probe
tttacttcccaggtttgactatttg

SEQ ID NO: 57961 - DNA, 25 bp, Artificial
  Probe
ctgcctgtagagttagtatttctgt

SEQ ID NO: 57962 - DNA, 25 bp, Artificial
  Probe
ttacttcccaggtttgactatttgc

SEQ ID NO: 57963 - DNA, 25 bp, Artificial
  Probe
tgcctgtagagttagtatttctgtt

SEQ ID NO: 57964 - DNA, 25 bp, Artificial
  Probe
actgcctgtagagttagtatttctg

SEQ ID NO: 57965 - DNA, 25 bp, Artificial
  Probe
attacctcatttgttgtgtgactga

SEQ ID NO: 57966 - DNA, 25 bp, Artificial
  Probe
tattacctcatttgttgtgtgactg

SEQ ID NO: 57967 - DNA, 25 bp, Artificial
  Probe
atatgttgcacactgaattgaagaa

SEQ ID NO: 57968 - DNA, 25 bp, Artificial
  Probe
gcagagaatgatcccaatacagaaa

SEQ ID NO: 57969 - DNA, 25 bp, Artificial
  Probe
gcctgtagagttagtatttctgttt

SEQ ID NO: 57970 - DNA, 25 bp, Artificial
  Probe
tcaagaagaaagagtttaagtgtca

SEQ ID NO: 57971 - DNA, 25 bp, Artificial
  Probe
tatatgttgcacactgaattgaaga

SEQ ID NO: 57972 - DNA, 25 bp, Artificial
  Probe
agaatgatcccaatacagaaatagc

SEQ ID NO: 57973 - DNA, 25 bp, Artificial
  Probe
cagagaatgatcccaatacagaaat

SEQ ID NO: 57974 - DNA, 25 bp, Artificial
  Probe
atattacctcatttgttgtgtgact

SEQ ID NO: 57975 - DNA, 25 bp, Artificial
  Probe
aggaaatactgcctgtagagttagt

SEQ ID NO: 57976 - DNA, 25 bp, Artificial
  Probe
caagaagaaagagtttaagtgtcaa

SEQ ID NO: 57977 - DNA, 25 bp, Artificial
  Probe
aaagagacaaaggtggaacttatat

SEQ ID NO: 57978 - DNA, 25 bp, Artificial
  Probe
ttatatgttgcacactgaattgaag

SEQ ID NO: 57979 - DNA, 25 bp, Artificial
  Probe
acattctaaagcagtgtaacttgta

SEQ ID NO: 57980 - DNA, 25 bp, Artificial
  Probe
gcacactgaattgaagaaatgttgg

SEQ ID NO: 57981 - DNA, 25 bp, Artificial
  Probe
gagacaaaggtggaacttatataca

SEQ ID NO: 57982 - DNA, 25 bp, Artificial
  Probe
tacttcccaggtttgactatttgcc

SEQ ID NO: 57983 - DNA, 25 bp, Artificial
  Probe
ggaaatactgcctgtagagttagta

SEQ ID NO: 57984 - DNA, 25 bp, Artificial
  Probe
ctcattgccattggaatagagatct

SEQ ID NO: 57985 - DNA, 25 bp, Artificial
  Probe
tctatcatcttgtacaccattgctt

SEQ ID NO: 57986 - DNA, 25 bp, Artificial
  Probe
ttctatcatcttgtacaccattgct

SEQ ID NO: 57987 - DNA, 25 bp, Artificial
  Probe
gttctatcatcttgtacaccattgc

SEQ ID NO: 57988 - DNA, 25 bp, Artificial
  Probe
gaatgatcccaatacagaaatagct

SEQ ID NO: 57989 - DNA, 25 bp, Artificial
  Probe
atcaagaagaaagagtttaagtgtc

SEQ ID NO: 57990 - DNA, 25 bp, Artificial
  Probe
agagacaaaggtggaacttatatac

SEQ ID NO: 57991 - DNA, 25 bp, Artificial
  Probe
tctcagactatgtagatatgctatt

SEQ ID NO: 57992 - DNA, 25 bp, Artificial
  Probe
tgatcccaatacagaaatagctttg

SEQ ID NO: 57993 - DNA, 25 bp, Artificial
  Probe
gatcccaatacagaaatagctttga

SEQ ID NO: 57994 - DNA, 25 bp, Artificial
  Probe
gatctcagactatgtagatatgcta

SEQ ID NO: 57995 - DNA, 25 bp, Artificial
  Probe
atgatcccaatacagaaatagcttt

SEQ ID NO: 57996 - DNA, 25 bp, Artificial
  Probe
aatgatcccaatacagaaatagctt

SEQ ID NO: 57997 - DNA, 25 bp, Artificial
  Probe
agacaaaggtggaacttatatacaa

SEQ ID NO: 57998 - DNA, 25 bp, Artificial
  Probe
cattctaaagcagtgtaacttgtat

SEQ ID NO: 57999 - DNA, 25 bp, Artificial
  Probe
tactgcctgtagagttagtatttct

SEQ ID NO: 58000 - DNA, 25 bp, Artificial
  Probe
ttctcattgccattggaatagagat

SEQ ID NO: 58001 - DNA, 25 bp, Artificial
  Probe
tctcattgccattggaatagagatc

SEQ ID NO: 58002 - DNA, 25 bp, Artificial
  Probe
tcccaatacagaaatagctttgaaa

SEQ ID NO: 58003 - DNA, 25 bp, Artificial
  Probe
atcccaatacagaaatagctttgaa

SEQ ID NO: 58004 - DNA, 25 bp, Artificial
  Probe
ttcccaggtttgactatttgccaat

SEQ ID NO: 58005 - DNA, 25 bp, Artificial
  Probe
ctctatcttgctctgtaatctcgtt

SEQ ID NO: 58006 - DNA, 25 bp, Artificial
  Probe
atgctctatcttgctctgtaatctc

SEQ ID NO: 58007 - DNA, 25 bp, Artificial
  Probe
gatatgcttagtaatgctgtgtgac

SEQ ID NO: 58008 - DNA, 25 bp, Artificial
  Probe
gatgctctatcttgctctgtaatct

SEQ ID NO: 58009 - DNA, 25 bp, Artificial
  Probe
ggatatgcttagtaatgctgtgtga

SEQ ID NO: 58010 - DNA, 25 bp, Artificial
  Probe
aatctcacatcttaacacacgctaa

SEQ ID NO: 58011 - DNA, 25 bp, Artificial
  Probe
gtgctcagttgtagaatgtattgta

SEQ ID NO: 58012 - DNA, 25 bp, Artificial
  Probe
ggtgctcagttgtagaatgtattgt

SEQ ID NO: 58013 - DNA, 25 bp, Artificial
  Probe
tggtgctcagttgtagaatgtattg

SEQ ID NO: 58014 - DNA, 25 bp, Artificial
  Probe
gtggtgctcagttgtagaatgtatt

SEQ ID NO: 58015 - DNA, 25 bp, Artificial
  Probe
aagatgacattgctaagatgctcta

SEQ ID NO: 58016 - DNA, 25 bp, Artificial
  Probe
taagatgacattgctaagatgctct

SEQ ID NO: 58017 - DNA, 25 bp, Artificial
  Probe
agatgacattgctaagatgctctat

SEQ ID NO: 58018 - DNA, 25 bp, Artificial
  Probe
gatgacattgctaagatgctctatc

SEQ ID NO: 58019 - DNA, 25 bp, Artificial
  Probe
ataagatgacattgctaagatgctc

SEQ ID NO: 58020 - DNA, 25 bp, Artificial
  Probe
atatgcttagtaatgctgtgtgact

SEQ ID NO: 58021 - DNA, 25 bp, Artificial
  Probe
tatgcttagtaatgctgtgtgactt

SEQ ID NO: 58022 - DNA, 25 bp, Artificial
  Probe
aataagatgacattgctaagatgct

SEQ ID NO: 58023 - DNA, 25 bp, Artificial
  Probe
agtggtgctcagttgtagaatgtat

SEQ ID NO: 58024 - DNA, 25 bp, Artificial
  Probe
aagtggtgctcagttgtagaatgta

SEQ ID NO: 58025 - DNA, 25 bp, Artificial
  Probe
gctctatcttgctctgtaatctcgt

SEQ ID NO: 58026 - DNA, 25 bp, Artificial
  Probe
tgctctatcttgctctgtaatctcg

SEQ ID NO: 58027 - DNA, 25 bp, Artificial
  Probe
gaatacttacaattcttgagcctcc

SEQ ID NO: 58028 - DNA, 25 bp, Artificial
  Probe
tatcttgctctgtaatctcgtttca

SEQ ID NO: 58029 - DNA, 25 bp, Artificial
  Probe
tgtgattgggaataaatatgcctct

SEQ ID NO: 58030 - DNA, 25 bp, Artificial
  Probe
gtgtgattgggaataaatatgcctc

SEQ ID NO: 58031 - DNA, 25 bp, Artificial
  Probe
gagtgtgattgggaataaatatgcc

SEQ ID NO: 58032 - DNA, 25 bp, Artificial
  Probe
ggagtgtgattgggaataaatatgc

SEQ ID NO: 58033 - DNA, 25 bp, Artificial
  Probe
tctatcttgctctgtaatctcgttt

SEQ ID NO: 58034 - DNA, 25 bp, Artificial
  Probe
agtgtgattgggaataaatatgcct

SEQ ID NO: 58035 - DNA, 25 bp, Artificial
  Probe
gtgattgggaataaatatgcctctc

SEQ ID NO: 58036 - DNA, 25 bp, Artificial
  Probe
ctatcttgctctgtaatctcgtttc

SEQ ID NO: 58037 - DNA, 25 bp, Artificial
  Probe
taataagatgacattgctaagatgc

SEQ ID NO: 58038 - DNA, 25 bp, Artificial
  Probe
atctcacatcttaacacacgctaaa

SEQ ID NO: 58039 - DNA, 25 bp, Artificial
  Probe
aaatctcacatcttaacacacgcta

SEQ ID NO: 58040 - DNA, 25 bp, Artificial
  Probe
agatgctctatcttgctctgtaatc

SEQ ID NO: 58041 - DNA, 25 bp, Artificial
  Probe
atgacattgctaagatgctctatct

SEQ ID NO: 58042 - DNA, 25 bp, Artificial
  Probe
atcttgctctgtaatctcgtttcaa

SEQ ID NO: 58043 - DNA, 25 bp, Artificial
  Probe
atcgtatagctgtattgaatcatgt

SEQ ID NO: 58044 - DNA, 25 bp, Artificial
  Probe
aggagtgtgattgggaataaatatg

SEQ ID NO: 58045 - DNA, 25 bp, Artificial
  Probe
caggagtgtgattgggaataaatat

SEQ ID NO: 58046 - DNA, 25 bp, Artificial
  Probe
cttagtaatgctgtgtgactttctg

SEQ ID NO: 58047 - DNA, 25 bp, Artificial
  Probe
tcttgctctgtaatctcgtttcaaa

SEQ ID NO: 58048 - DNA, 25 bp, Artificial
  Probe
ttcaggagtgtgattgggaataaat

SEQ ID NO: 58049 - DNA, 25 bp, Artificial
  Probe
tctcacatcttaacacacgctaaag

SEQ ID NO: 58050 - DNA, 25 bp, Artificial
  Probe
cactaagacggacaagctagagaag

SEQ ID NO: 58051 - DNA, 25 bp, Artificial
  Probe
gcactaagacggacaagctagagaa

SEQ ID NO: 58052 - DNA, 25 bp, Artificial
  Probe
tgtatgaacagcactatcgggagag

SEQ ID NO: 58053 - DNA, 25 bp, Artificial
  Probe
ctacctgtatgaacagcactatcgg

SEQ ID NO: 58054 - DNA, 25 bp, Artificial
  Probe
actaagacggacaagctagagaagc

SEQ ID NO: 58055 - DNA, 25 bp, Artificial
  Probe
ctagagaagctcatgatccgcattg

SEQ ID NO: 58056 - DNA, 25 bp, Artificial
  Probe
gtatgaacagcactatcgggagagc

SEQ ID NO: 58057 - DNA, 25 bp, Artificial
  Probe
gctacctgtatgaacagcactatcg

SEQ ID NO: 58058 - DNA, 25 bp, Artificial
  Probe
tagagaagctcatgatccgcattgg

SEQ ID NO: 58059 - DNA, 25 bp, Artificial
  Probe
taagacggacaagctagagaagctc

SEQ ID NO: 58060 - DNA, 25 bp, Artificial
  Probe
ctaagacggacaagctagagaagct

SEQ ID NO: 58061 - DNA, 25 bp, Artificial
  Probe
ctgtatgaacagcactatcgggaga

SEQ ID NO: 58062 - DNA, 25 bp, Artificial
  Probe
tacctgtatgaacagcactatcggg

SEQ ID NO: 58063 - DNA, 25 bp, Artificial
  Probe
tatgaacagcactatcgggagagct

SEQ ID NO: 58064 - DNA, 25 bp, Artificial
  Probe
gctagagaagctcatgatccgcatt

SEQ ID NO: 58065 - DNA, 25 bp, Artificial
  Probe
gacaagctagagaagctcatgatcc

SEQ ID NO: 58066 - DNA, 25 bp, Artificial
  Probe
ggacaagctagagaagctcatgatc

SEQ ID NO: 58067 - DNA, 25 bp, Artificial
  Probe
tatgtgggcaaccaaaacctgaact

SEQ ID NO: 58068 - DNA, 25 bp, Artificial
  Probe
cctgtatgaacagcactatcgggag

SEQ ID NO: 58069 - DNA, 25 bp, Artificial
  Probe
gacggacaagctagagaagctcatg

SEQ ID NO: 58070 - DNA, 25 bp, Artificial
  Probe
agacggacaagctagagaagctcat

SEQ ID NO: 58071 - DNA, 25 bp, Artificial
  Probe
acctgtatgaacagcactatcggga

SEQ ID NO: 58072 - DNA, 25 bp, Artificial
  Probe
acaagctagagaagctcatgatccg

SEQ ID NO: 58073 - DNA, 25 bp, Artificial
  Probe
cggacaagctagagaagctcatgat

SEQ ID NO: 58074 - DNA, 25 bp, Artificial
  Probe
tattcagagattaacaggacacgga

SEQ ID NO: 58075 - DNA, 25 bp, Artificial
  Probe
gtattcagagattaacaggacacgg

SEQ ID NO: 58076 - DNA, 25 bp, Artificial
  Probe
ggtattcagagattaacaggacacg

SEQ ID NO: 58077 - DNA, 25 bp, Artificial
  Probe
attcagagattaacaggacacggag

SEQ ID NO: 58078 - DNA, 25 bp, Artificial
  Probe
gtgctgaataaatgcttgtgaaatg

SEQ ID NO: 58079 - DNA, 25 bp, Artificial
  Probe
tgtgctgaataaatgcttgtgaaat

SEQ ID NO: 58080 - DNA, 25 bp, Artificial
  Probe
atgtgctgaataaatgcttgtgaaa

SEQ ID NO: 58081 - DNA, 25 bp, Artificial
  Probe
aatgtgctgaataaatgcttgtgaa

SEQ ID NO: 58082 - DNA, 25 bp, Artificial
  Probe
gagagggtattcagagattaacagg

SEQ ID NO: 58083 - DNA, 25 bp, Artificial
  Probe
ccagagagggtattcagagattaac

SEQ ID NO: 58084 - DNA, 25 bp, Artificial
  Probe
gagggtattcagagattaacaggac

SEQ ID NO: 58085 - DNA, 25 bp, Artificial
  Probe
agagggtattcagagattaacagga

SEQ ID NO: 58086 - DNA, 25 bp, Artificial
  Probe
gggtattcagagattaacaggacac

SEQ ID NO: 58087 - DNA, 25 bp, Artificial
  Probe
agggtattcagagattaacaggaca

SEQ ID NO: 58088 - DNA, 25 bp, Artificial
  Probe
cagagagggtattcagagattaaca

SEQ ID NO: 58089 - DNA, 25 bp, Artificial
  Probe
agagagggtattcagagattaacag

SEQ ID NO: 58090 - DNA, 25 bp, Artificial
  Probe
tgctgaataaatgcttgtgaaatgc

SEQ ID NO: 58091 - DNA, 25 bp, Artificial
  Probe
gccagagagggtattcagagattaa

SEQ ID NO: 58092 - DNA, 25 bp, Artificial
  Probe
atcccaatgtgctgaataaatgctt

SEQ ID NO: 58093 - DNA, 25 bp, Artificial
  Probe
caatgtgctgaataaatgcttgtga

SEQ ID NO: 58094 - DNA, 25 bp, Artificial
  Probe
gggcaattactgagttgagttattt

SEQ ID NO: 58095 - DNA, 25 bp, Artificial
  Probe
aaactcagacaaatacttccatgct

SEQ ID NO: 58096 - DNA, 25 bp, Artificial
  Probe
aactcagacaaatacttccatgctc

SEQ ID NO: 58097 - DNA, 25 bp, Artificial
  Probe
ccaatgtgctgaataaatgcttgtg

SEQ ID NO: 58098 - DNA, 25 bp, Artificial
  Probe
gcaattactgagttgagttatttcc

SEQ ID NO: 58099 - DNA, 25 bp, Artificial
  Probe
ggcaattactgagttgagttatttc

SEQ ID NO: 58100 - DNA, 25 bp, Artificial
  Probe
tgccagagagggtattcagagatta

SEQ ID NO: 58101 - DNA, 25 bp, Artificial
  Probe
catcccaatgtgctgaataaatgct

SEQ ID NO: 58102 - DNA, 25 bp, Artificial
  Probe
tcccaatgtgctgaataaatgcttg

SEQ ID NO: 58103 - DNA, 25 bp, Artificial
  Probe
atgccagagagggtattcagagatt

SEQ ID NO: 58104 - DNA, 25 bp, Artificial
  Probe
cccaatgtgctgaataaatgcttgt

SEQ ID NO: 58105 - DNA, 25 bp, Artificial
  Probe
gatgccagagagggtattcagagat

SEQ ID NO: 58106 - DNA, 25 bp, Artificial
  Probe
acaagcaggatgaagtcttccattg

SEQ ID NO: 58107 - DNA, 25 bp, Artificial
  Probe
cacaagcaggatgaagtcttccatt

SEQ ID NO: 58108 - DNA, 25 bp, Artificial
  Probe
aaagacggttccagtttatgaagga

SEQ ID NO: 58109 - DNA, 25 bp, Artificial
  Probe
ttcagagattaacaggacacggagc

SEQ ID NO: 58110 - DNA, 25 bp, Artificial
  Probe
actcagacaaatacttccatgctcg

SEQ ID NO: 58111 - DNA, 25 bp, Artificial
  Probe
caattactgagttgagttatttcct

SEQ ID NO: 58112 - DNA, 25 bp, Artificial
  Probe
caaaagacggttccagtttatgaag

SEQ ID NO: 58113 - DNA, 25 bp, Artificial
  Probe
aacatcccaatgtgctgaataaatg

SEQ ID NO: 58114 - DNA, 25 bp, Artificial
  Probe
aaacatcccaatgtgctgaataaat

SEQ ID NO: 58115 - DNA, 25 bp, Artificial
  Probe
ctaaacatcccaatgtgctgaataa

SEQ ID NO: 58116 - DNA, 25 bp, Artificial
  Probe
taaacatcccaatgtgctgaataaa

SEQ ID NO: 58117 - DNA, 25 bp, Artificial
  Probe
ggtctgcccaggaaatactgaattt

SEQ ID NO: 58118 - DNA, 25 bp, Artificial
  Probe
agttgagttatttcctaaaacctgg

SEQ ID NO: 58119 - DNA, 25 bp, Artificial
  Probe
aactatgaggtgccagaatcagatt

SEQ ID NO: 58120 - DNA, 25 bp, Artificial
  Probe
caactatgaggtgccagaatcagat

SEQ ID NO: 58121 - DNA, 25 bp, Artificial
  Probe
ttcagtggactcctaaataatcagc

SEQ ID NO: 58122 - DNA, 25 bp, Artificial
  Probe
acttcagtggactcctaaataatca

SEQ ID NO: 58123 - DNA, 25 bp, Artificial
  Probe
ttcagtgaggagacagaacagaagt

SEQ ID NO: 58124 - DNA, 25 bp, Artificial
  Probe
tcagtgaggagacagaacagaagtt

SEQ ID NO: 58125 - DNA, 25 bp, Artificial
  Probe
cttcagtggactcctaaataatcag

SEQ ID NO: 58126 - DNA, 25 bp, Artificial
  Probe
ctatgaggtgccagaatcagatttc

SEQ ID NO: 58127 - DNA, 25 bp, Artificial
  Probe
tggactcctaaataatcagctctct

SEQ ID NO: 58128 - DNA, 25 bp, Artificial
  Probe
gtggactcctaaataatcagctctc

SEQ ID NO: 58129 - DNA, 25 bp, Artificial
  Probe
actatgaggtgccagaatcagattt

SEQ ID NO: 58130 - DNA, 25 bp, Artificial
  Probe
agtggactcctaaataatcagctct

SEQ ID NO: 58131 - DNA, 25 bp, Artificial
  Probe
cagtggactcctaaataatcagctc

SEQ ID NO: 58132 - DNA, 25 bp, Artificial
  Probe
tcagtggactcctaaataatcagct

SEQ ID NO: 58133 - DNA, 25 bp, Artificial
  Probe
gaacacttcagtggactcctaaata

SEQ ID NO: 58134 - DNA, 25 bp, Artificial
  Probe
aacacttcagtggactcctaaataa

SEQ ID NO: 58135 - DNA, 25 bp, Artificial
  Probe
cattgactgccagtggatagacatc

SEQ ID NO: 58136 - DNA, 25 bp, Artificial
  Probe
acacttcagtggactcctaaataat

SEQ ID NO: 58137 - DNA, 25 bp, Artificial
  Probe
tctctaacaacatcatgaagtgcag

SEQ ID NO: 58138 - DNA, 25 bp, Artificial
  Probe
ttctctaacaacatcatgaagtgca

SEQ ID NO: 58139 - DNA, 25 bp, Artificial
  Probe
actcctaaataatcagctctctgtg

SEQ ID NO: 58140 - DNA, 25 bp, Artificial
  Probe
ggactcctaaataatcagctctctg

SEQ ID NO: 58141 - DNA, 25 bp, Artificial
  Probe
gactcctaaataatcagctctctgt

SEQ ID NO: 58142 - DNA, 25 bp, Artificial
  Probe
cacttcagtggactcctaaataatc

SEQ ID NO: 58143 - DNA, 25 bp, Artificial
  Probe
catgacattgactgccagtggatag

SEQ ID NO: 58144 - DNA, 25 bp, Artificial
  Probe
gccagaatcagatttctctaacaac

SEQ ID NO: 58145 - DNA, 25 bp, Artificial
  Probe
tgccagaatcagatttctctaacaa

SEQ ID NO: 58146 - DNA, 25 bp, Artificial
  Probe
ctcctaaataatcagctctctgtgc

SEQ ID NO: 58147 - DNA, 25 bp, Artificial
  Probe
ccttcagtgaggagacagaacagaa

SEQ ID NO: 58148 - DNA, 25 bp, Artificial
  Probe
ccaactatgaggtgccagaatcaga

SEQ ID NO: 58149 - DNA, 25 bp, Artificial
  Probe
attgactgccagtggatagacatca

SEQ ID NO: 58150 - DNA, 25 bp, Artificial
  Probe
atgacattgactgccagtggataga

SEQ ID NO: 58151 - DNA, 25 bp, Artificial
  Probe
gtgccagaatcagatttctctaaca

SEQ ID NO: 58152 - DNA, 25 bp, Artificial
  Probe
gaatcagatttctctaacaacatca

SEQ ID NO: 58153 - DNA, 25 bp, Artificial
  Probe
aataatcagctctctgtgcagtaaa

SEQ ID NO: 58154 - DNA, 25 bp, Artificial
  Probe
aaataatcagctctctgtgcagtaa

SEQ ID NO: 58155 - DNA, 25 bp, Artificial
  Probe
taaataatcagctctctgtgcagta

SEQ ID NO: 58156 - DNA, 25 bp, Artificial
  Probe
ctaacaacatcatgaagtgcaggag

SEQ ID NO: 58157 - DNA, 25 bp, Artificial
  Probe
ctctaacaacatcatgaagtgcagg

SEQ ID NO: 58158 - DNA, 25 bp, Artificial
  Probe
ataatcagctctctgtgcagtaaag

SEQ ID NO: 58159 - DNA, 25 bp, Artificial
  Probe
ctaaataatcagctctctgtgcagt

SEQ ID NO: 58160 - DNA, 25 bp, Artificial
  Probe
ccagaatcagatttctctaacaaca

SEQ ID NO: 58161 - DNA, 25 bp, Artificial
  Probe
ggtgccagaatcagatttctctaac

SEQ ID NO: 58162 - DNA, 25 bp, Artificial
  Probe
aggtgccagaatcagatttctctaa

SEQ ID NO: 58163 - DNA, 25 bp, Artificial
  Probe
acattgactgccagtggatagacat

SEQ ID NO: 58164 - DNA, 25 bp, Artificial
  Probe
cagatagcgttgagtatgagaatga

SEQ ID NO: 58165 - DNA, 25 bp, Artificial
  Probe
agatagcgttgagtatgagaatgat

SEQ ID NO: 58166 - DNA, 25 bp, Artificial
  Probe
gcagatagcgttgagtatgagaatg

SEQ ID NO: 58167 - DNA, 25 bp, Artificial
  Probe
tcctcctgtactgatataatcctgt

SEQ ID NO: 58168 - DNA, 25 bp, Artificial
  Probe
tgtcctcctgtactgatataatcct

SEQ ID NO: 58169 - DNA, 25 bp, Artificial
  Probe
gtcctcctgtactgatataatcctg

SEQ ID NO: 58170 - DNA, 25 bp, Artificial
  Probe
gatagcgttgagtatgagaatgatc

SEQ ID NO: 58171 - DNA, 25 bp, Artificial
  Probe
cctcctgtactgatataatcctgtt

SEQ ID NO: 58172 - DNA, 25 bp, Artificial
  Probe
atgtcctcctgtactgatataatcc

SEQ ID NO: 58173 - DNA, 25 bp, Artificial
  Probe
ggcagatagcgttgagtatgagaat

SEQ ID NO: 58174 - DNA, 25 bp, Artificial
  Probe
gatgtcctcctgtactgatataatc

SEQ ID NO: 58175 - DNA, 25 bp, Artificial
  Probe
tggatgtcctcctgtactgatataa

SEQ ID NO: 58176 - DNA, 25 bp, Artificial
  Probe
atggatgtcctcctgtactgatata

SEQ ID NO: 58177 - DNA, 25 bp, Artificial
  Probe
gatggatgtcctcctgtactgatat

SEQ ID NO: 58178 - DNA, 25 bp, Artificial
  Probe
tatgtcagggcaagaaatctaatcc

SEQ ID NO: 58179 - DNA, 25 bp, Artificial
  Probe
tgtttaatgggtttgttcaggtcta

SEQ ID NO: 58180 - DNA, 25 bp, Artificial
  Probe
ggatgtcctcctgtactgatataat

SEQ ID NO: 58181 - DNA, 25 bp, Artificial
  Probe
ctatgtcagggcaagaaatctaatc

SEQ ID NO: 58182 - DNA, 25 bp, Artificial
  Probe
ttaatgggtttgttcaggtctatgg

SEQ ID NO: 58183 - DNA, 25 bp, Artificial
  Probe
catagtgagacagtagtaatgggtg

SEQ ID NO: 58184 - DNA, 25 bp, Artificial
  Probe
tttaatgggtttgttcaggtctatg

SEQ ID NO: 58185 - DNA, 25 bp, Artificial
  Probe
gtttaatgggtttgttcaggtctat

SEQ ID NO: 58186 - DNA, 25 bp, Artificial
  Probe
gctatgtcagggcaagaaatctaat

SEQ ID NO: 58187 - DNA, 25 bp, Artificial
  Probe
gtgtttaatgggtttgttcaggtct

SEQ ID NO: 58188 - DNA, 25 bp, Artificial
  Probe
tgtactgatataatcctgtttgccc

SEQ ID NO: 58189 - DNA, 25 bp, Artificial
  Probe
aggcagatagcgttgagtatgagaa

SEQ ID NO: 58190 - DNA, 25 bp, Artificial
  Probe
ctgtactgatataatcctgtttgcc

SEQ ID NO: 58191 - DNA, 25 bp, Artificial
  Probe
cctgtactgatataatcctgtttgc

SEQ ID NO: 58192 - DNA, 25 bp, Artificial
  Probe
ctgcatagtgagacagtagtaatgg

SEQ ID NO: 58193 - DNA, 25 bp, Artificial
  Probe
tgatggatgtcctcctgtactgata

SEQ ID NO: 58194 - DNA, 25 bp, Artificial
  Probe
tagtgagacagtagtaatgggtgta

SEQ ID NO: 58195 - DNA, 25 bp, Artificial
  Probe
gcatagtgagacagtagtaatgggt

SEQ ID NO: 58196 - DNA, 25 bp, Artificial
  Probe
atatagaaagtcctgctgctatgtc

SEQ ID NO: 58197 - DNA, 25 bp, Artificial
  Probe
gatatagaaagtcctgctgctatgt

SEQ ID NO: 58198 - DNA, 25 bp, Artificial
  Probe
atagtgagacagtagtaatgggtgt

SEQ ID NO: 58199 - DNA, 25 bp, Artificial
  Probe
tgagacagtagtaatgggtgtagac

SEQ ID NO: 58200 - DNA, 25 bp, Artificial
  Probe
gtgagacagtagtaatgggtgtaga

SEQ ID NO: 58201 - DNA, 25 bp, Artificial
  Probe
agtgagacagtagtaatgggtgtag

SEQ ID NO: 58202 - DNA, 25 bp, Artificial
  Probe
tatagaaagtcctgctgctatgtca

SEQ ID NO: 58203 - DNA, 25 bp, Artificial
  Probe
taatgggtttgttcaggtctatggg

SEQ ID NO: 58204 - DNA, 25 bp, Artificial
  Probe
atgatggatgtcctcctgtactgat

SEQ ID NO: 58205 - DNA, 25 bp, Artificial
  Probe
gaggcagatagcgttgagtatgaga

SEQ ID NO: 58206 - DNA, 25 bp, Artificial
  Probe
ggatatagaaagtcctgctgctatg

SEQ ID NO: 58207 - DNA, 25 bp, Artificial
  Probe
gactgtggtccttatgaaagcattt

SEQ ID NO: 58208 - DNA, 25 bp, Artificial
  Probe
caacttggagactgtggtccttatg

SEQ ID NO: 58209 - DNA, 25 bp, Artificial
  Probe
aaccttattcttgtaacgagtgtgg

SEQ ID NO: 58210 - DNA, 25 bp, Artificial
  Probe
cagaactcatcttgtccaatagcaa

SEQ ID NO: 58211 - DNA, 25 bp, Artificial
  Probe
tcacagaactcatcttgtccaatag

SEQ ID NO: 58212 - DNA, 25 bp, Artificial
  Probe
atcacagaactcatcttgtccaata

SEQ ID NO: 58213 - DNA, 25 bp, Artificial
  Probe
catcacagaactcatcttgtccaat

SEQ ID NO: 58214 - DNA, 25 bp, Artificial
  Probe
cacagaactcatcttgtccaatagc

SEQ ID NO: 58215 - DNA, 25 bp, Artificial
  Probe
ttgccttattgtccaccagagaatt

SEQ ID NO: 58216 - DNA, 25 bp, Artificial
  Probe
acagaactcatcttgtccaatagca

SEQ ID NO: 58217 - DNA, 25 bp, Artificial
  Probe
cttgccttattgtccaccagagaat

SEQ ID NO: 58218 - DNA, 25 bp, Artificial
  Probe
tatgtatgtaatgagtgtgggaagg

SEQ ID NO: 58219 - DNA, 25 bp, Artificial
  Probe
ccttatgtatgtaatgagtgtggga

SEQ ID NO: 58220 - DNA, 25 bp, Artificial
  Probe
tcccttatgtatgtaatgagtgtgg

SEQ ID NO: 58221 - DNA, 25 bp, Artificial
  Probe
acatcacagaactcatcttgtccaa

SEQ ID NO: 58222 - DNA, 25 bp, Artificial
  Probe
aaaccttattcttgtaacgagtgtg

SEQ ID NO: 58223 - DNA, 25 bp, Artificial
  Probe
tagctcatacctactgattcatcaa

SEQ ID NO: 58224 - DNA, 25 bp, Artificial
  Probe
ttattcttgtaacgagtgtgggaag

SEQ ID NO: 58225 - DNA, 25 bp, Artificial
  Probe
cttattcttgtaacgagtgtgggaa

SEQ ID NO: 58226 - DNA, 25 bp, Artificial
  Probe
ttatgtatgtaatgagtgtgggaag

SEQ ID NO: 58227 - DNA, 25 bp, Artificial
  Probe
cttatgtatgtaatgagtgtgggaa

SEQ ID NO: 58228 - DNA, 25 bp, Artificial
  Probe
tttatttctaactcacacctcatgc

SEQ ID NO: 58229 - DNA, 25 bp, Artificial
  Probe
ccttattgtccaccagagaattcat

SEQ ID NO: 58230 - DNA, 25 bp, Artificial
  Probe
ctcccttatgtatgtaatgagtgtg

SEQ ID NO: 58231 - DNA, 25 bp, Artificial
  Probe
cttcagtcagctctcttgccttatt

SEQ ID NO: 58232 - DNA, 25 bp, Artificial
  Probe
ttatttctaactcacacctcatgcg

SEQ ID NO: 58233 - DNA, 25 bp, Artificial
  Probe
gctcatacctactgattcatcaaag

SEQ ID NO: 58234 - DNA, 25 bp, Artificial
  Probe
ccttattcttgtaacgagtgtggga

SEQ ID NO: 58235 - DNA, 25 bp, Artificial
  Probe
atgcgacatcacagaactcatcttg

SEQ ID NO: 58236 - DNA, 25 bp, Artificial
  Probe
aaccttgctcttggtcataacctac

SEQ ID NO: 58237 - DNA, 25 bp, Artificial
  Probe
tattcttgtaacgagtgtgggaagg

SEQ ID NO: 58238 - DNA, 25 bp, Artificial
  Probe
ttcagtcagctctcttgccttattg

SEQ ID NO: 58239 - DNA, 25 bp, Artificial
  Probe
cacttgtagctcatacctactgatt

SEQ ID NO: 58240 - DNA, 25 bp, Artificial
  Probe
accttattcttgtaacgagtgtggg

SEQ ID NO: 58241 - DNA, 25 bp, Artificial
  Probe
cttgtagctcatacctactgattca

SEQ ID NO: 58242 - DNA, 25 bp, Artificial
  Probe
acttgtagctcatacctactgattc

SEQ ID NO: 58243 - DNA, 25 bp, Artificial
  Probe
taatagcaggcacctctgttcttta

SEQ ID NO: 58244 - DNA, 25 bp, Artificial
  Probe
gtagctcatacctactgattcatca

SEQ ID NO: 58245 - DNA, 25 bp, Artificial
  Probe
tgtagctcatacctactgattcatc

SEQ ID NO: 58246 - DNA, 25 bp, Artificial
  Probe
tcacttgtagctcatacctactgat

SEQ ID NO: 58247 - DNA, 25 bp, Artificial
  Probe
cttcacttgtagctcatacctactg

SEQ ID NO: 58248 - DNA, 25 bp, Artificial
  Probe
tcttgccttattgtccaccagagaa

SEQ ID NO: 58249 - DNA, 25 bp, Artificial
  Probe
tatttctaactcacacctcatgcga

SEQ ID NO: 58250 - DNA, 25 bp, Artificial
  Probe
ttcacttgtagctcatacctactga

SEQ ID NO: 58251 - DNA, 25 bp, Artificial
  Probe
atgtatgtaatgagtgtgggaaggc

SEQ ID NO: 58252 - DNA, 25 bp, Artificial
  Probe
cttattgtccaccagagaattcata

SEQ ID NO: 58253 - DNA, 25 bp, Artificial
  Probe
ccttgctcttggtcataacctactg

SEQ ID NO: 58254 - DNA, 25 bp, Artificial
  Probe
tcttgtcactgctgtatataactcc

SEQ ID NO: 58255 - DNA, 25 bp, Artificial
  Probe
catcttgtcactgctgtatataact

SEQ ID NO: 58256 - DNA, 25 bp, Artificial
  Probe
atcttgtcactgctgtatataactc

SEQ ID NO: 58257 - DNA, 25 bp, Artificial
  Probe
ctgctgtatataactcccatctgtc

SEQ ID NO: 58258 - DNA, 25 bp, Artificial
  Probe
cactgctgtatataactcccatctg

SEQ ID NO: 58259 - DNA, 25 bp, Artificial
  Probe
tcactgctgtatataactcccatct

SEQ ID NO: 58260 - DNA, 25 bp, Artificial
  Probe
gtcactgctgtatataactcccatc

SEQ ID NO: 58261 - DNA, 25 bp, Artificial
  Probe
cttgtcactgctgtatataactccc

SEQ ID NO: 58262 - DNA, 25 bp, Artificial
  Probe
tgctgtatataactcccatctgtca

SEQ ID NO: 58263 - DNA, 25 bp, Artificial
  Probe
actgctgtatataactcccatctgt

SEQ ID NO: 58264 - DNA, 25 bp, Artificial
  Probe
tgtcactgctgtatataactcccat

SEQ ID NO: 58265 - DNA, 25 bp, Artificial
  Probe
ttgtcactgctgtatataactccca

SEQ ID NO: 58266 - DNA, 25 bp, Artificial
  Probe
gtcctactttgtgtctgactatgac

SEQ ID NO: 58267 - DNA, 25 bp, Artificial
  Probe
gcatcttgtcactgctgtatataac

SEQ ID NO: 58268 - DNA, 25 bp, Artificial
  Probe
ggcatcttgtcactgctgtatataa

SEQ ID NO: 58269 - DNA, 25 bp, Artificial
  Probe
gctgtatataactcccatctgtcag

SEQ ID NO: 58270 - DNA, 25 bp, Artificial
  Probe
atccagttcatccagtcctactttg

SEQ ID NO: 58271 - DNA, 25 bp, Artificial
  Probe
catccagttcatccagtcctacttt

SEQ ID NO: 58272 - DNA, 25 bp, Artificial
  Probe
ctgtatataactcccatctgtcagt

SEQ ID NO: 58273 - DNA, 25 bp, Artificial
  Probe
tcctactttgtgtctgactatgacc

SEQ ID NO: 58274 - DNA, 25 bp, Artificial
  Probe
ccatccagttcatccagtcctactt

SEQ ID NO: 58275 - DNA, 25 bp, Artificial
  Probe
gttcatccagtcctactttgtgtct

SEQ ID NO: 58276 - DNA, 25 bp, Artificial
  Probe
agttcatccagtcctactttgtgtc

SEQ ID NO: 58277 - DNA, 25 bp, Artificial
  Probe
cagttcatccagtcctactttgtgt

SEQ ID NO: 58278 - DNA, 25 bp, Artificial
  Probe
tgtatataactcccatctgtcagta

SEQ ID NO: 58279 - DNA, 25 bp, Artificial
  Probe
cattgaggattcctacacaaagatc

SEQ ID NO: 58280 - DNA, 25 bp, Artificial
  Probe
ccattgaggattcctacacaaagat

SEQ ID NO: 58281 - DNA, 25 bp, Artificial
  Probe
caggcagagtttcattgaagtaagc

SEQ ID NO: 58282 - DNA, 25 bp, Artificial
  Probe
ttcatccagtcctactttgtgtctg

SEQ ID NO: 58283 - DNA, 25 bp, Artificial
  Probe
cctactttgtgtctgactatgaccc

SEQ ID NO: 58284 - DNA, 25 bp, Artificial
  Probe
ttcccaccatatgacttactttgag

SEQ ID NO: 58285 - DNA, 25 bp, Artificial
  Probe
cttcccaccatatgacttactttga

SEQ ID NO: 58286 - DNA, 25 bp, Artificial
  Probe
aactcccatctgtcagtataataaa

SEQ ID NO: 58287 - DNA, 25 bp, Artificial
  Probe
accattgaggattcctacacaaaga

SEQ ID NO: 58288 - DNA, 25 bp, Artificial
  Probe
caccattgaggattcctacacaaag

SEQ ID NO: 58289 - DNA, 25 bp, Artificial
  Probe
ccagttcatccagtcctactttgtg

SEQ ID NO: 58290 - DNA, 25 bp, Artificial
  Probe
actcccatctgtcagtataataaat

SEQ ID NO: 58291 - DNA, 25 bp, Artificial
  Probe
tccagttcatccagtcctactttgt

SEQ ID NO: 58292 - DNA, 25 bp, Artificial
  Probe
catccagtcctactttgtgtctgac

SEQ ID NO: 58293 - DNA, 25 bp, Artificial
  Probe
tcatccagtcctactttgtgtctga

SEQ ID NO: 58294 - DNA, 25 bp, Artificial
  Probe
caaactgcgtctaaatgtcgatgag

SEQ ID NO: 58295 - DNA, 25 bp, Artificial
  Probe
gcttcccaccatatgacttactttg

SEQ ID NO: 58296 - DNA, 25 bp, Artificial
  Probe
tcccaccatatgacttactttgagg

SEQ ID NO: 58297 - DNA, 25 bp, Artificial
  Probe
gtatataactcccatctgtcagtat

SEQ ID NO: 58298 - DNA, 25 bp, Artificial
  Probe
gaccatccagttcatccagtcctac

SEQ ID NO: 58299 - DNA, 25 bp, Artificial
  Probe
tttacctgtcaataaagcagaagac

SEQ ID NO: 58300 - DNA, 25 bp, Artificial
  Probe
ttacctgtcaataaagcagaagacg

SEQ ID NO: 58301 - DNA, 25 bp, Artificial
  Probe
acaatttacctgtcaataaagcaga

SEQ ID NO: 58302 - DNA, 25 bp, Artificial
  Probe
gaacaatttacctgtcaataaagca

SEQ ID NO: 58303 - DNA, 25 bp, Artificial
  Probe
tgaacaatttacctgtcaataaagc

SEQ ID NO: 58304 - DNA, 25 bp, Artificial
  Probe
atttacctgtcaataaagcagaaga

SEQ ID NO: 58305 - DNA, 25 bp, Artificial
  Probe
aacaatttacctgtcaataaagcag

SEQ ID NO: 58306 - DNA, 25 bp, Artificial
  Probe
caatttacctgtcaataaagcagaa

SEQ ID NO: 58307 - DNA, 25 bp, Artificial
  Probe
aatttacctgtcaataaagcagaag

SEQ ID NO: 58308 - DNA, 25 bp, Artificial
  Probe
tacctgtcaataaagcagaagacgg

SEQ ID NO: 58309 - DNA, 25 bp, Artificial
  Probe
aatgtaagtctgagtctttgtaatt

SEQ ID NO: 58310 - DNA, 25 bp, Artificial
  Probe
ttaatgtaagtctgagtctttgtaa

SEQ ID NO: 58311 - DNA, 25 bp, Artificial
  Probe
tttaatgtaagtctgagtctttgta

SEQ ID NO: 58312 - DNA, 25 bp, Artificial
  Probe
agtctgagtctttgtaattattgaa

SEQ ID NO: 58313 - DNA, 25 bp, Artificial
  Probe
ttgtaattattgaattgtgagaaca

SEQ ID NO: 58314 - DNA, 25 bp, Artificial
  Probe
aagtctgagtctttgtaattattga

SEQ ID NO: 58315 - DNA, 25 bp, Artificial
  Probe
taatgtaagtctgagtctttgtaat

SEQ ID NO: 58316 - DNA, 25 bp, Artificial
  Probe
tgtaattattgaattgtgagaacat

SEQ ID NO: 58317 - DNA, 25 bp, Artificial
  Probe
tgtaagtctgagtctttgtaattat

SEQ ID NO: 58318 - DNA, 25 bp, Artificial
  Probe
atgtaagtctgagtctttgtaatta

SEQ ID NO: 58319 - DNA, 25 bp, Artificial
  Probe
ttttaatgtaagtctgagtctttgt

SEQ ID NO: 58320 - DNA, 25 bp, Artificial
  Probe
gtctgagtctttgtaattattgaat

SEQ ID NO: 58321 - DNA, 25 bp, Artificial
  Probe
ttgaacaatttacctgtcaataaag

SEQ ID NO: 58322 - DNA, 25 bp, Artificial
  Probe
tttgaacaatttacctgtcaataaa

SEQ ID NO: 58323 - DNA, 25 bp, Artificial
  Probe
agtctttgtaattattgaattgtga

SEQ ID NO: 58324 - DNA, 25 bp, Artificial
  Probe
tgagtctttgtaattattgaattgt

SEQ ID NO: 58325 - DNA, 25 bp, Artificial
  Probe
gtctttgtaattattgaattgtgag

SEQ ID NO: 58326 - DNA, 25 bp, Artificial
  Probe
gagtctttgtaattattgaattgtg

SEQ ID NO: 58327 - DNA, 25 bp, Artificial
  Probe
tctttgtaattattgaattgtgaga

SEQ ID NO: 58328 - DNA, 25 bp, Artificial
  Probe
ttttgaacaatttacctgtcaataa

SEQ ID NO: 58329 - DNA, 25 bp, Artificial
  Probe
ccacagtagtaatagactcaacaga

SEQ ID NO: 58330 - DNA, 25 bp, Artificial
  Probe
tccacagtagtaatagactcaacag

SEQ ID NO: 58331 - DNA, 25 bp, Artificial
  Probe
tagtaatagactcaacagacagacc

SEQ ID NO: 58332 - DNA, 25 bp, Artificial
  Probe
ttccacagtagtaatagactcaaca

SEQ ID NO: 58333 - DNA, 25 bp, Artificial
  Probe
cattggagaatacagttcacttgtg

SEQ ID NO: 58334 - DNA, 25 bp, Artificial
  Probe
acagtagtaatagactcaacagaca

SEQ ID NO: 58335 - DNA, 25 bp, Artificial
  Probe
attggagaatacagttcacttgtgt

SEQ ID NO: 58336 - DNA, 25 bp, Artificial
  Probe
cacagtagtaatagactcaacagac

SEQ ID NO: 58337 - DNA, 25 bp, Artificial
  Probe
ccattggagaatacagttcacttgt

SEQ ID NO: 58338 - DNA, 25 bp, Artificial
  Probe
gtagtaatagactcaacagacagac

SEQ ID NO: 58339 - DNA, 25 bp, Artificial
  Probe
agccttcagaattgagatcaacttc

SEQ ID NO: 58340 - DNA, 25 bp, Artificial
  Probe
gagccttcagaattgagatcaactt

SEQ ID NO: 58341 - DNA, 25 bp, Artificial
  Probe
agtagtaatagactcaacagacaga

SEQ ID NO: 58342 - DNA, 25 bp, Artificial
  Probe
cagtagtaatagactcaacagacag

SEQ ID NO: 58343 - DNA, 25 bp, Artificial
  Probe
ttggagaatacagttcacttgtgtg

SEQ ID NO: 58344 - DNA, 25 bp, Artificial
  Probe
gccattggagaatacagttcacttg

SEQ ID NO: 58345 - DNA, 25 bp, Artificial
  Probe
tgccattggagaatacagttcactt

SEQ ID NO: 58346 - DNA, 25 bp, Artificial
  Probe
aagggtttccacagtagtaatagac

SEQ ID NO: 58347 - DNA, 25 bp, Artificial
  Probe
gccttcagaattgagatcaacttcc

SEQ ID NO: 58348 - DNA, 25 bp, Artificial
  Probe
gcaaagggtttccacagtagtaata

SEQ ID NO: 58349 - DNA, 25 bp, Artificial
  Probe
aaagggtttccacagtagtaataga

SEQ ID NO: 58350 - DNA, 25 bp, Artificial
  Probe
caaagggtttccacagtagtaatag

SEQ ID NO: 58351 - DNA, 25 bp, Artificial
  Probe
ccgtggataatgaatagctcaagtc

SEQ ID NO: 58352 - DNA, 25 bp, Artificial
  Probe
gggtttccacagtagtaatagactc

SEQ ID NO: 58353 - DNA, 25 bp, Artificial
  Probe
agggtttccacagtagtaatagact

SEQ ID NO: 58354 - DNA, 25 bp, Artificial
  Probe
ggtttccacagtagtaatagactca

SEQ ID NO: 58355 - DNA, 25 bp, Artificial
  Probe
tagcaaagggtttccacagtagtaa

SEQ ID NO: 58356 - DNA, 25 bp, Artificial
  Probe
ttagcaaagggtttccacagtagta

SEQ ID NO: 58357 - DNA, 25 bp, Artificial
  Probe
ggagccttcagaattgagatcaact

SEQ ID NO: 58358 - DNA, 25 bp, Artificial
  Probe
ttcttgcccagatttactcaaagtt

SEQ ID NO: 58359 - DNA, 25 bp, Artificial
  Probe
tttcttgcccagatttactcaaagt

SEQ ID NO: 58360 - DNA, 25 bp, Artificial
  Probe
agtaatagactcaacagacagaccc

SEQ ID NO: 58361 - DNA, 25 bp, Artificial
  Probe
aaatcttagcaaagggtttccacag

SEQ ID NO: 58362 - DNA, 25 bp, Artificial
  Probe
atcttagcaaagggtttccacagta

SEQ ID NO: 58363 - DNA, 25 bp, Artificial
  Probe
tcttgcccagatttactcaaagttg

SEQ ID NO: 58364 - DNA, 25 bp, Artificial
  Probe
cgtggataatgaatagctcaagtcc

SEQ ID NO: 58365 - DNA, 25 bp, Artificial
  Probe
agcaaagggtttccacagtagtaat

SEQ ID NO: 58366 - DNA, 25 bp, Artificial
  Probe
ctgccattggagaatacagttcact

SEQ ID NO: 58367 - DNA, 25 bp, Artificial
  Probe
tctgccattggagaatacagttcac

SEQ ID NO: 58368 - DNA, 25 bp, Artificial
  Probe
gtctgccattggagaatacagttca

SEQ ID NO: 58369 - DNA, 25 bp, Artificial
  Probe
aatcactgctttagtctacttcaaa

SEQ ID NO: 58370 - DNA, 25 bp, Artificial
  Probe
aaatcactgctttagtctacttcaa

SEQ ID NO: 58371 - DNA, 25 bp, Artificial
  Probe
ttcagaattgagatcaacttcccag

SEQ ID NO: 58372 - DNA, 25 bp, Artificial
  Probe
cttcagaattgagatcaacttccca

SEQ ID NO: 58373 - DNA, 25 bp, Artificial
  Probe
aaagataaaggttgtggtttcctct

SEQ ID NO: 58374 - DNA, 25 bp, Artificial
  Probe
ttgaacgaaacataaagagaccatc

SEQ ID NO: 58375 - DNA, 25 bp, Artificial
  Probe
gttgaacgaaacataaagagaccat

SEQ ID NO: 58376 - DNA, 25 bp, Artificial
  Probe
tacacaggagagaaaccatcagaaa

SEQ ID NO: 58377 - DNA, 25 bp, Artificial
  Probe
agtaaggcagtcttcactttaatgt

SEQ ID NO: 58378 - DNA, 25 bp, Artificial
  Probe
taaggcagtcttcactttaatgttg

SEQ ID NO: 58379 - DNA, 25 bp, Artificial
  Probe
gtaaggcagtcttcactttaatgtt

SEQ ID NO: 58380 - DNA, 25 bp, Artificial
  Probe
aaggcagtcttcactttaatgttgt

SEQ ID NO: 58381 - DNA, 25 bp, Artificial
  Probe
tagtaaggcagtcttcactttaatg

SEQ ID NO: 58382 - DNA, 25 bp, Artificial
  Probe
aatcagacaacagatatgggctcaa

SEQ ID NO: 58383 - DNA, 25 bp, Artificial
  Probe
aaatcagacaacagatatgggctca

SEQ ID NO: 58384 - DNA, 25 bp, Artificial
  Probe
cctgctttcaaattatcatcgtatt

SEQ ID NO: 58385 - DNA, 25 bp, Artificial
  Probe
atcagacaacagatatgggctcaag

SEQ ID NO: 58386 - DNA, 25 bp, Artificial
  Probe
gtacacaggagagaaaccatcagaa

SEQ ID NO: 58387 - DNA, 25 bp, Artificial
  Probe
aatagtaaggcagtcttcactttaa

SEQ ID NO: 58388 - DNA, 25 bp, Artificial
  Probe
ttaatagtaaggcagtcttcacttt

SEQ ID NO: 58389 - DNA, 25 bp, Artificial
  Probe
tttaatagtaaggcagtcttcactt

SEQ ID NO: 58390 - DNA, 25 bp, Artificial
  Probe
atagtaaggcagtcttcactttaat

SEQ ID NO: 58391 - DNA, 25 bp, Artificial
  Probe
atttaatagtaaggcagtcttcact

SEQ ID NO: 58392 - DNA, 25 bp, Artificial
  Probe
tgaggtaatttgaagactgtatcat

SEQ ID NO: 58393 - DNA, 25 bp, Artificial
  Probe
atgaggtaatttgaagactgtatca

SEQ ID NO: 58394 - DNA, 25 bp, Artificial
  Probe
aatttaatagtaaggcagtcttcac

SEQ ID NO: 58395 - DNA, 25 bp, Artificial
  Probe
taatagtaaggcagtcttcacttta

SEQ ID NO: 58396 - DNA, 25 bp, Artificial
  Probe
aatgaggtaatttgaagactgtatc

SEQ ID NO: 58397 - DNA, 25 bp, Artificial
  Probe
tcagacaacagatatgggctcaaga

SEQ ID NO: 58398 - DNA, 25 bp, Artificial
  Probe
taaaatcagacaacagatatgggct

SEQ ID NO: 58399 - DNA, 25 bp, Artificial
  Probe
ctaaaatcagacaacagatatgggc

SEQ ID NO: 58400 - DNA, 25 bp, Artificial
  Probe
gaggtaatttgaagactgtatcatg

SEQ ID NO: 58401 - DNA, 25 bp, Artificial
  Probe
tgaacgaaacataaagagaccatcg

SEQ ID NO: 58402 - DNA, 25 bp, Artificial
  Probe
aaaatcagacaacagatatgggctc

SEQ ID NO: 58403 - DNA, 25 bp, Artificial
  Probe
aggagagaaaccatcagaaaaggat

SEQ ID NO: 58404 - DNA, 25 bp, Artificial
  Probe
cacaggagagaaaccatcagaaaag

SEQ ID NO: 58405 - DNA, 25 bp, Artificial
  Probe
agagaaaccatcagaaaaggatcag

SEQ ID NO: 58406 - DNA, 25 bp, Artificial
  Probe
gagagaaaccatcagaaaaggatca

SEQ ID NO: 58407 - DNA, 25 bp, Artificial
  Probe
cttccatcgagactgtggtactgta

SEQ ID NO: 58408 - DNA, 25 bp, Artificial
  Probe
ggagagaaaccatcagaaaaggatc

SEQ ID NO: 58409 - DNA, 25 bp, Artificial
  Probe
acacaggagagaaaccatcagaaaa

SEQ ID NO: 58410 - DNA, 25 bp, Artificial
  Probe
ttaaatgaggtaatttgaagactgt

SEQ ID NO: 58411 - DNA, 25 bp, Artificial
  Probe
ctgctttcaaattatcatcgtattt

SEQ ID NO: 58412 - DNA, 25 bp, Artificial
  Probe
ttgttgaacgaaacataaagagacc

SEQ ID NO: 58413 - DNA, 25 bp, Artificial
  Probe
caagaggattgttgaacgaaacata

SEQ ID NO: 58414 - DNA, 25 bp, Artificial
  Probe
gagaaaccatcagaaaaggatcagg

SEQ ID NO: 58415 - DNA, 25 bp, Artificial
  Probe
caggagagaaaccatcagaaaagga

SEQ ID NO: 58416 - DNA, 25 bp, Artificial
  Probe
aggattgttgaacgaaacataaaga

SEQ ID NO: 58417 - DNA, 25 bp, Artificial
  Probe
agaggattgttgaacgaaacataaa

SEQ ID NO: 58418 - DNA, 25 bp, Artificial
  Probe
aagaggattgttgaacgaaacataa

SEQ ID NO: 58419 - DNA, 25 bp, Artificial
  Probe
gtgccttatcagaactactacgacc

SEQ ID NO: 58420 - DNA, 25 bp, Artificial
  Probe
atatcaatggcttcatccagtccaa

SEQ ID NO: 58421 - DNA, 25 bp, Artificial
  Probe
ctctgagcagaaagaattggtctat

SEQ ID NO: 58422 - DNA, 25 bp, Artificial
  Probe
tctgagcagaaagaattggtctatg

SEQ ID NO: 58423 - DNA, 25 bp, Artificial
  Probe
tgccttatcagaactactacgaccg

SEQ ID NO: 58424 - DNA, 25 bp, Artificial
  Probe
tatcaatggcttcatccagtccaag

SEQ ID NO: 58425 - DNA, 25 bp, Artificial
  Probe
aattctgatgagctggacatttctg

SEQ ID NO: 58426 - DNA, 25 bp, Artificial
  Probe
cctctgagcagaaagaattggtcta

SEQ ID NO: 58427 - DNA, 25 bp, Artificial
  Probe
ctcccgtgccttatcagaactacta

SEQ ID NO: 58428 - DNA, 25 bp, Artificial
  Probe
tcccgtgccttatcagaactactac

SEQ ID NO: 58429 - DNA, 25 bp, Artificial
  Probe
gatatcaatggcttcatccagtcca

SEQ ID NO: 58430 - DNA, 25 bp, Artificial
  Probe
cgtgccttatcagaactactacgac

SEQ ID NO: 58431 - DNA, 25 bp, Artificial
  Probe
cctgtggtgtgataaagaggttctc

SEQ ID NO: 58432 - DNA, 25 bp, Artificial
  Probe
ctcctgtggtgtgataaagaggttc

SEQ ID NO: 58433 - DNA, 25 bp, Artificial
  Probe
gaattctgatgagctggacatttct

SEQ ID NO: 58434 - DNA, 25 bp, Artificial
  Probe
atcaatggcttcatccagtccaaga

SEQ ID NO: 58435 - DNA, 25 bp, Artificial
  Probe
tcctgtggtgtgataaagaggttct

SEQ ID NO: 58436 - DNA, 25 bp, Artificial
  Probe
ctgagcagaaagaattggtctatgc

SEQ ID NO: 58437 - DNA, 25 bp, Artificial
  Probe
attctgatgagctggacatttctgc

SEQ ID NO: 58438 - DNA, 25 bp, Artificial
  Probe
ccgtgccttatcagaactactacga

SEQ ID NO: 58439 - DNA, 25 bp, Artificial
  Probe
agacctcctgtggtgtgataaagag

SEQ ID NO: 58440 - DNA, 25 bp, Artificial
  Probe
ctgtggtgtgataaagaggttctct

SEQ ID NO: 58441 - DNA, 25 bp, Artificial
  Probe
tcaatggcttcatccagtccaagag

SEQ ID NO: 58442 - DNA, 25 bp, Artificial
  Probe
tgtggtgtgataaagaggttctctg

SEQ ID NO: 58443 - DNA, 25 bp, Artificial
  Probe
cagacctcctgtggtgtgataaaga

SEQ ID NO: 58444 - DNA, 25 bp, Artificial
  Probe
ttatcagaactactacgaccgggag

SEQ ID NO: 58445 - DNA, 25 bp, Artificial
  Probe
cttatcagaactactacgaccggga

SEQ ID NO: 58446 - DNA, 25 bp, Artificial
  Probe
cacctctgagcagaaagaattggtc

SEQ ID NO: 58447 - DNA, 25 bp, Artificial
  Probe
acctctgagcagaaagaattggtct

SEQ ID NO: 58448 - DNA, 25 bp, Artificial
  Probe
gccttatcagaactactacgaccgg

SEQ ID NO: 58449 - DNA, 25 bp, Artificial
  Probe
gtggtgtgataaagaggttctctgg

SEQ ID NO: 58450 - DNA, 25 bp, Artificial
  Probe
ctcccacctctgagcagaaagaatt

SEQ ID NO: 58451 - DNA, 25 bp, Artificial
  Probe
tgagcagaaagaattggtctatgca

SEQ ID NO: 58452 - DNA, 25 bp, Artificial
  Probe
tcccacctctgagcagaaagaattg

SEQ ID NO: 58453 - DNA, 25 bp, Artificial
  Probe
agaaagaattggtctatgcatccat

SEQ ID NO: 58454 - DNA, 25 bp, Artificial
  Probe
cagaaagaattggtctatgcatcca

SEQ ID NO: 58455 - DNA, 25 bp, Artificial
  Probe
ccttatcagaactactacgaccggg

SEQ ID NO: 58456 - DNA, 25 bp, Artificial
  Probe
ccagacctcctgtggtgtgataaag

SEQ ID NO: 58457 - DNA, 25 bp, Artificial
  Probe
gataaagaggttctctgggctgcta

SEQ ID NO: 58458 - DNA, 25 bp, Artificial
  Probe
tggtgtgataaagaggttctctggg

SEQ ID NO: 58459 - DNA, 25 bp, Artificial
  Probe
ataaagaggttctctgggctgctac

SEQ ID NO: 58460 - DNA, 25 bp, Artificial
  Probe
tccagacctcctgtggtgtgataaa

SEQ ID NO: 58461 - DNA, 25 bp, Artificial
  Probe
ccacctctgagcagaaagaattggt

SEQ ID NO: 58462 - DNA, 25 bp, Artificial
  Probe
agcagaaagaattggtctatgcatc

SEQ ID NO: 58463 - DNA, 25 bp, Artificial
  Probe
gagcagaaagaattggtctatgcat

SEQ ID NO: 58464 - DNA, 25 bp, Artificial
  Probe
ctttgtgttgaaacccagatttgta

SEQ ID NO: 58465 - DNA, 25 bp, Artificial
  Probe
tttgtgttgaaacccagatttgtac

SEQ ID NO: 58466 - DNA, 25 bp, Artificial
  Probe
agttctgtttatcttctcatgggtg

SEQ ID NO: 58467 - DNA, 25 bp, Artificial
  Probe
catacagtctgctttgtgttgaaac

SEQ ID NO: 58468 - DNA, 25 bp, Artificial
  Probe
tctgtttatcttctcatgggtgatt

SEQ ID NO: 58469 - DNA, 25 bp, Artificial
  Probe
ttctgtttatcttctcatgggtgat

SEQ ID NO: 58470 - DNA, 25 bp, Artificial
  Probe
acatacagtctgctttgtgttgaaa

SEQ ID NO: 58471 - DNA, 25 bp, Artificial
  Probe
tatcttctcatgggtgattatctcg

SEQ ID NO: 58472 - DNA, 25 bp, Artificial
  Probe
gttctgtttatcttctcatgggtga

SEQ ID NO: 58473 - DNA, 25 bp, Artificial
  Probe
gagttctgtttatcttctcatgggt

SEQ ID NO: 58474 - DNA, 25 bp, Artificial
  Probe
ttgtgttgaaacccagatttgtacc

SEQ ID NO: 58475 - DNA, 25 bp, Artificial
  Probe
cgagttctgtttatcttctcatggg

SEQ ID NO: 58476 - DNA, 25 bp, Artificial
  Probe
gacatacagtctgctttgtgttgaa

SEQ ID NO: 58477 - DNA, 25 bp, Artificial
  Probe
atacagtctgctttgtgttgaaacc

SEQ ID NO: 58478 - DNA, 25 bp, Artificial
  Probe
atcttctcatgggtgattatctcgg

SEQ ID NO: 58479 - DNA, 25 bp, Artificial
  Probe
ctgtttatcttctcatgggtgatta

SEQ ID NO: 58480 - DNA, 25 bp, Artificial
  Probe
gctttgtgttgaaacccagatttgt

SEQ ID NO: 58481 - DNA, 25 bp, Artificial
  Probe
tgctttgtgttgaaacccagatttg

SEQ ID NO: 58482 - DNA, 25 bp, Artificial
  Probe
tccatcgagttctgtttatcttctc

SEQ ID NO: 58483 - DNA, 25 bp, Artificial
  Probe
ctccatcgagttctgtttatcttct

SEQ ID NO: 58484 - DNA, 25 bp, Artificial
  Probe
tctccatcgagttctgtttatcttc

SEQ ID NO: 58485 - DNA, 25 bp, Artificial
  Probe
ctctccatcgagttctgtttatctt

SEQ ID NO: 58486 - DNA, 25 bp, Artificial
  Probe
tcgagttctgtttatcttctcatgg

SEQ ID NO: 58487 - DNA, 25 bp, Artificial
  Probe
ccatcgagttctgtttatcttctca

SEQ ID NO: 58488 - DNA, 25 bp, Artificial
  Probe
atcgagttctgtttatcttctcatg

SEQ ID NO: 58489 - DNA, 25 bp, Artificial
  Probe
catcgagttctgtttatcttctcat

SEQ ID NO: 58490 - DNA, 25 bp, Artificial
  Probe
ttatcttctcatgggtgattatctc

SEQ ID NO: 58491 - DNA, 25 bp, Artificial
  Probe
tgtttatcttctcatgggtgattat

SEQ ID NO: 58492 - DNA, 25 bp, Artificial
  Probe
ctgctttgtgttgaaacccagattt

SEQ ID NO: 58493 - DNA, 25 bp, Artificial
  Probe
cctctccatcgagttctgtttatct

SEQ ID NO: 58494 - DNA, 25 bp, Artificial
  Probe
ataatgtgaaaatggtccaggagaa

SEQ ID NO: 58495 - DNA, 25 bp, Artificial
  Probe
gtttatcttctcatgggtgattatc

SEQ ID NO: 58496 - DNA, 25 bp, Artificial
  Probe
gataatgtgaaaatggtccaggaga

SEQ ID NO: 58497 - DNA, 25 bp, Artificial
  Probe
agataatgtgaaaatggtccaggag

SEQ ID NO: 58498 - DNA, 25 bp, Artificial
  Probe
taatgtgaaaatggtccaggagaag

SEQ ID NO: 58499 - DNA, 25 bp, Artificial
  Probe
cagataatgtgaaaatggtccagga

SEQ ID NO: 58500 - DNA, 25 bp, Artificial
  Probe
tttatcttctcatgggtgattatct

SEQ ID NO: 58501 - DNA, 25 bp, Artificial
  Probe
tacagtctgctttgtgttgaaaccc

SEQ ID NO: 58502 - DNA, 25 bp, Artificial
  Probe
gcctctccatcgagttctgtttatc

SEQ ID NO: 58503 - DNA, 25 bp, Artificial
  Probe
ccagataatgtgaaaatggtccagg

SEQ ID NO: 58504 - DNA, 25 bp, Artificial
  Probe
cccagataatgtgaaaatggtccag

SEQ ID NO: 58505 - DNA, 25 bp, Artificial
  Probe
tcttctcatgggtgattatctcggc

SEQ ID NO: 58506 - DNA, 25 bp, Artificial
  Probe
aatgtgaaaatggtccaggagaagg

SEQ ID NO: 58507 - DNA, 25 bp, Artificial
  Probe
tcccagataatgtgaaaatggtcca

SEQ ID NO: 58508 - DNA, 25 bp, Artificial
  Probe
gagacatacagtctgctttgtgttg

SEQ ID NO: 58509 - DNA, 25 bp, Artificial
  Probe
aatgcggtattaatctaaagctgct

SEQ ID NO: 58510 - DNA, 25 bp, Artificial
  Probe
taatgcggtattaatctaaagctgc

SEQ ID NO: 58511 - DNA, 25 bp, Artificial
  Probe
atgcggtattaatctaaagctgctt

SEQ ID NO: 58512 - DNA, 25 bp, Artificial
  Probe
ctaatgcggtattaatctaaagctg

SEQ ID NO: 58513 - DNA, 25 bp, Artificial
  Probe
ctactcaagatggcagactgtggag

SEQ ID NO: 58514 - DNA, 25 bp, Artificial
  Probe
gctaatgcggtattaatctaaagct

SEQ ID NO: 58515 - DNA, 25 bp, Artificial
  Probe
tgcggtattaatctaaagctgcttt

SEQ ID NO: 58516 - DNA, 25 bp, Artificial
  Probe
cctacgctaatgcggtattaatcta

SEQ ID NO: 58517 - DNA, 25 bp, Artificial
  Probe
ctacgctaatgcggtattaatctaa

SEQ ID NO: 58518 - DNA, 25 bp, Artificial
  Probe
ctaagcagtctgcatcagtcatcct

SEQ ID NO: 58519 - DNA, 25 bp, Artificial
  Probe
cgctaatgcggtattaatctaaagc

SEQ ID NO: 58520 - DNA, 25 bp, Artificial
  Probe
acgctaatgcggtattaatctaaag

SEQ ID NO: 58521 - DNA, 25 bp, Artificial
  Probe
gcggtattaatctaaagctgctttt

SEQ ID NO: 58522 - DNA, 25 bp, Artificial
  Probe
taagcagtctgcatcagtcatcctg

SEQ ID NO: 58523 - DNA, 25 bp, Artificial
  Probe
cggtattaatctaaagctgcttttg

SEQ ID NO: 58524 - DNA, 25 bp, Artificial
  Probe
tacgctaatgcggtattaatctaaa

SEQ ID NO: 58525 - DNA, 25 bp, Artificial
  Probe
ccctacgctaatgcggtattaatct

SEQ ID NO: 58526 - DNA, 25 bp, Artificial
  Probe
ggtattaatctaaagctgcttttgt

SEQ ID NO: 58527 - DNA, 25 bp, Artificial
  Probe
tgctaagcagtctgcatcagtcatc

SEQ ID NO: 58528 - DNA, 25 bp, Artificial
  Probe
accctacgctaatgcggtattaatc

SEQ ID NO: 58529 - DNA, 25 bp, Artificial
  Probe
caccctacgctaatgcggtattaat

SEQ ID NO: 58530 - DNA, 25 bp, Artificial
  Probe
ttaatctaaagctgcttttgtaaga

SEQ ID NO: 58531 - DNA, 25 bp, Artificial
  Probe
attaatctaaagctgcttttgtaag

SEQ ID NO: 58532 - DNA, 25 bp, Artificial
  Probe
ccaccctacgctaatgcggtattaa

SEQ ID NO: 58533 - DNA, 25 bp, Artificial
  Probe
gtattaatctaaagctgcttttgta

SEQ ID NO: 58534 - DNA, 25 bp, Artificial
  Probe
tattaatctaaagctgcttttgtaa

SEQ ID NO: 58535 - DNA, 25 bp, Artificial
  Probe
tgagtaacagataccattgaattgc

SEQ ID NO: 58536 - DNA, 25 bp, Artificial
  Probe
gagtaacagataccattgaattgct

SEQ ID NO: 58537 - DNA, 25 bp, Artificial
  Probe
agtaacagataccattgaattgctg

SEQ ID NO: 58538 - DNA, 25 bp, Artificial
  Probe
tcctgagtaacagataccattgaat

SEQ ID NO: 58539 - DNA, 25 bp, Artificial
  Probe
atcctgagtaacagataccattgaa

SEQ ID NO: 58540 - DNA, 25 bp, Artificial
  Probe
gatcctgagtaacagataccattga

SEQ ID NO: 58541 - DNA, 25 bp, Artificial
  Probe
cctgagtaacagataccattgaatt

SEQ ID NO: 58542 - DNA, 25 bp, Artificial
  Probe
ctgagtaacagataccattgaattg

SEQ ID NO: 58543 - DNA, 25 bp, Artificial
  Probe
gtaaatattgtgaacaggacttcca

SEQ ID NO: 58544 - DNA, 25 bp, Artificial
  Probe
taaatattgtgaacaggacttccag

SEQ ID NO: 58545 - DNA, 25 bp, Artificial
  Probe
aaatattgtgaacaggacttccagc

SEQ ID NO: 58546 - DNA, 25 bp, Artificial
  Probe
cgttgtaaatattgtgaacaggact

SEQ ID NO: 58547 - DNA, 25 bp, Artificial
  Probe
tcgttgtaaatattgtgaacaggac

SEQ ID NO: 58548 - DNA, 25 bp, Artificial
  Probe
ctcgttgtaaatattgtgaacagga

SEQ ID NO: 58549 - DNA, 25 bp, Artificial
  Probe
tctcgttgtaaatattgtgaacagg

SEQ ID NO: 58550 - DNA, 25 bp, Artificial
  Probe
gtaagttacatcatgagcagtggaa

SEQ ID NO: 58551 - DNA, 25 bp, Artificial
  Probe
aatattgtgaacaggacttccagcg

SEQ ID NO: 58552 - DNA, 25 bp, Artificial
  Probe
tgtaaatattgtgaacaggacttcc

SEQ ID NO: 58553 - DNA, 25 bp, Artificial
  Probe
ccagagaatttatctttaaccagac

SEQ ID NO: 58554 - DNA, 25 bp, Artificial
  Probe
tccagagaatttatctttaaccaga

SEQ ID NO: 58555 - DNA, 25 bp, Artificial
  Probe
cacacccttcctagacaactaacac

SEQ ID NO: 58556 - DNA, 25 bp, Artificial
  Probe
gaatttatctttaaccagacagtgt

SEQ ID NO: 58557 - DNA, 25 bp, Artificial
  Probe
ctccagagaatttatctttaaccag

SEQ ID NO: 58558 - DNA, 25 bp, Artificial
  Probe
agaatttatctttaaccagacagtg

SEQ ID NO: 58559 - DNA, 25 bp, Artificial
  Probe
tcttctcgttgtaaatattgtgaac

SEQ ID NO: 58560 - DNA, 25 bp, Artificial
  Probe
tctccagagaatttatctttaacca

SEQ ID NO: 58561 - DNA, 25 bp, Artificial
  Probe
aatttatctttaaccagacagtgtt

SEQ ID NO: 58562 - DNA, 25 bp, Artificial
  Probe
attgctgtaaaagtagggtgatgag

SEQ ID NO: 58563 - DNA, 25 bp, Artificial
  Probe
gaattgctgtaaaagtagggtgatg

SEQ ID NO: 58564 - DNA, 25 bp, Artificial
  Probe
attgaattgctgtaaaagtagggtg

SEQ ID NO: 58565 - DNA, 25 bp, Artificial
  Probe
cattgaattgctgtaaaagtagggt

SEQ ID NO: 58566 - DNA, 25 bp, Artificial
  Probe
accattgaattgctgtaaaagtagg

SEQ ID NO: 58567 - DNA, 25 bp, Artificial
  Probe
aattgctgtaaaagtagggtgatga

SEQ ID NO: 58568 - DNA, 25 bp, Artificial
  Probe
tgaattgctgtaaaagtagggtgat

SEQ ID NO: 58569 - DNA, 25 bp, Artificial
  Probe
ccattgaattgctgtaaaagtaggg

SEQ ID NO: 58570 - DNA, 25 bp, Artificial
  Probe
ttctcgttgtaaatattgtgaacag

SEQ ID NO: 58571 - DNA, 25 bp, Artificial
  Probe
cttctcgttgtaaatattgtgaaca

SEQ ID NO: 58572 - DNA, 25 bp, Artificial
  Probe
gagaatttatctttaaccagacagt

SEQ ID NO: 58573 - DNA, 25 bp, Artificial
  Probe
cagagaatttatctttaaccagaca

SEQ ID NO: 58574 - DNA, 25 bp, Artificial
  Probe
ttgaattgctgtaaaagtagggtga

SEQ ID NO: 58575 - DNA, 25 bp, Artificial
  Probe
gtctccagagaatttatctttaacc

SEQ ID NO: 58576 - DNA, 25 bp, Artificial
  Probe
gttgtaaatattgtgaacaggactt

SEQ ID NO: 58577 - DNA, 25 bp, Artificial
  Probe
agagaatttatctttaaccagacag

SEQ ID NO: 58578 - DNA, 25 bp, Artificial
  Probe
ttgtaaatattgtgaacaggacttc

SEQ ID NO: 58579 - DNA, 25 bp, Artificial
  Probe
tttcttctcgttgtaaatattgtga

SEQ ID NO: 58580 - DNA, 25 bp, Artificial
  Probe
tctgaataatcttcggttacctctg

SEQ ID NO: 58581 - DNA, 25 bp, Artificial
  Probe
ttcattcattattcactgacttgcc

SEQ ID NO: 58582 - DNA, 25 bp, Artificial
  Probe
ctgaataatcttcggttacctctgg

SEQ ID NO: 58583 - DNA, 25 bp, Artificial
  Probe
ttctgaataatcttcggttacctct

SEQ ID NO: 58584 - DNA, 25 bp, Artificial
  Probe
attcattcattattcactgacttgc

SEQ ID NO: 58585 - DNA, 25 bp, Artificial
  Probe
aataatcttcggttacctctggttc

SEQ ID NO: 58586 - DNA, 25 bp, Artificial
  Probe
gaataatcttcggttacctctggtt

SEQ ID NO: 58587 - DNA, 25 bp, Artificial
  Probe
taatcttcggttacctctggttcta

SEQ ID NO: 58588 - DNA, 25 bp, Artificial
  Probe
ataatcttcggttacctctggttct

SEQ ID NO: 58589 - DNA, 25 bp, Artificial
  Probe
tgaataatcttcggttacctctggt

SEQ ID NO: 58590 - DNA, 25 bp, Artificial
  Probe
ccctcctaataagtggttgacaaat

SEQ ID NO: 58591 - DNA, 25 bp, Artificial
  Probe
cctctggttctacaaatgacacttt

SEQ ID NO: 58592 - DNA, 25 bp, Artificial
  Probe
ctctggttctacaaatgacacttta

SEQ ID NO: 58593 - DNA, 25 bp, Artificial
  Probe
aatcttcggttacctctggttctac

SEQ ID NO: 58594 - DNA, 25 bp, Artificial
  Probe
cctcctaataagtggttgacaaata

SEQ ID NO: 58595 - DNA, 25 bp, Artificial
  Probe
gtgaattaaataaccatgtcctccg

SEQ ID NO: 58596 - DNA, 25 bp, Artificial
  Probe
tcattcattattcactgacttgccc

SEQ ID NO: 58597 - DNA, 25 bp, Artificial
  Probe
tttctgaataatcttcggttacctc

SEQ ID NO: 58598 - DNA, 25 bp, Artificial
  Probe
tgtgaattaaataaccatgtcctcc

SEQ ID NO: 58599 - DNA, 25 bp, Artificial
  Probe
atcttcggttacctctggttctaca

SEQ ID NO: 58600 - DNA, 25 bp, Artificial
  Probe
tcttcggttacctctggttctacaa

SEQ ID NO: 58601 - DNA, 25 bp, Artificial
  Probe
ttacctctggttctacaaatgacac

SEQ ID NO: 58602 - DNA, 25 bp, Artificial
  Probe
gttacctctggttctacaaatgaca

SEQ ID NO: 58603 - DNA, 25 bp, Artificial
  Probe
tacctctggttctacaaatgacact

SEQ ID NO: 58604 - DNA, 25 bp, Artificial
  Probe
ggttacctctggttctacaaatgac

SEQ ID NO: 58605 - DNA, 25 bp, Artificial
  Probe
tgtattcattcattattcactgact

SEQ ID NO: 58606 - DNA, 25 bp, Artificial
  Probe
ttcattattcactgacttgcccgat

SEQ ID NO: 58607 - DNA, 25 bp, Artificial
  Probe
attcattattcactgacttgcccga

SEQ ID NO: 58608 - DNA, 25 bp, Artificial
  Probe
cattcattattcactgacttgcccg

SEQ ID NO: 58609 - DNA, 25 bp, Artificial
  Probe
tcccacgttgtattcagaataatgt

SEQ ID NO: 58610 - DNA, 25 bp, Artificial
  Probe
cccacgttgtattcagaataatgtt

SEQ ID NO: 58611 - DNA, 25 bp, Artificial
  Probe
atcccacgttgtattcagaataatg

SEQ ID NO: 58612 - DNA, 25 bp, Artificial
  Probe
catcccacgttgtattcagaataat

SEQ ID NO: 58613 - DNA, 25 bp, Artificial
  Probe
ttcggttacctctggttctacaaat

SEQ ID NO: 58614 - DNA, 25 bp, Artificial
  Probe
ccatcccacgttgtattcagaataa

SEQ ID NO: 58615 - DNA, 25 bp, Artificial
  Probe
attattcactgacttgcccgatcat

SEQ ID NO: 58616 - DNA, 25 bp, Artificial
  Probe
acctctggttctacaaatgacactt

SEQ ID NO: 58617 - DNA, 25 bp, Artificial
  Probe
atgtgaattaaataaccatgtcctc

SEQ ID NO: 58618 - DNA, 25 bp, Artificial
  Probe
attcctgttttcccctcctaataag

SEQ ID NO: 58619 - DNA, 25 bp, Artificial
  Probe
cattcctgttttcccctcctaataa

SEQ ID NO: 58620 - DNA, 25 bp, Artificial
  Probe
gtagagcagaggaacggatagcaag

SEQ ID NO: 58621 - DNA, 25 bp, Artificial
  Probe
cggttacctctggttctacaaatga

SEQ ID NO: 58622 - DNA, 25 bp, Artificial
  Probe
tcggttacctctggttctacaaatg

SEQ ID NO: 58623 - DNA, 25 bp, Artificial
  Probe
cttcggttacctctggttctacaaa

SEQ ID NO: 58624 - DNA, 25 bp, Artificial
  Probe
gccccaaatgtgaattaaataacca

SEQ ID NO: 58625 - DNA, 25 bp, Artificial
  Probe
ctcttcttttggtagggaactcttg

SEQ ID NO: 58626 - DNA, 25 bp, Artificial
  Probe
cttcttttggtagggaactcttgag

SEQ ID NO: 58627 - DNA, 25 bp, Artificial
  Probe
tcttcttttggtagggaactcttga

SEQ ID NO: 58628 - DNA, 25 bp, Artificial
  Probe
ttcttttggtagggaactcttgaga

SEQ ID NO: 58629 - DNA, 25 bp, Artificial
  Probe
tcttttggtagggaactcttgagac

SEQ ID NO: 58630 - DNA, 25 bp, Artificial
  Probe
gctcttcttttggtagggaactctt

SEQ ID NO: 58631 - DNA, 25 bp, Artificial
  Probe
gatagtcggctcttcttttggtagg

SEQ ID NO: 58632 - DNA, 25 bp, Artificial
  Probe
gaactcttgagaccctgcttccatc

SEQ ID NO: 58633 - DNA, 25 bp, Artificial
  Probe
cttttggtagggaactcttgagacc

SEQ ID NO: 58634 - DNA, 25 bp, Artificial
  Probe
atagtcggctcttcttttggtaggg

SEQ ID NO: 58635 - DNA, 25 bp, Artificial
  Probe
ggctcttcttttggtagggaactct

SEQ ID NO: 58636 - DNA, 25 bp, Artificial
  Probe
cgatagtcggctcttcttttggtag

SEQ ID NO: 58637 - DNA, 25 bp, Artificial
  Probe
gtacgatagtcggctcttcttttgg

SEQ ID NO: 58638 - DNA, 25 bp, Artificial
  Probe
tagtcggctcttcttttggtaggga

SEQ ID NO: 58639 - DNA, 25 bp, Artificial
  Probe
acgatagtcggctcttcttttggta

SEQ ID NO: 58640 - DNA, 25 bp, Artificial
  Probe
tacgatagtcggctcttcttttggt

SEQ ID NO: 58641 - DNA, 25 bp, Artificial
  Probe
cggctcttcttttggtagggaactc

SEQ ID NO: 58642 - DNA, 25 bp, Artificial
  Probe
ttttggtagggaactcttgagaccc

SEQ ID NO: 58643 - DNA, 25 bp, Artificial
  Probe
acagaacaacaagtacatggctacc

SEQ ID NO: 58644 - DNA, 25 bp, Artificial
  Probe
catgggagactcatagcaattacag

SEQ ID NO: 58645 - DNA, 25 bp, Artificial
  Probe
atgggagactcatagcaattacagc

SEQ ID NO: 58646 - DNA, 25 bp, Artificial
  Probe
aagcatgggagactcatagcaatta

SEQ ID NO: 58647 - DNA, 25 bp, Artificial
  Probe
agaacaacaagtacatggctaccag

SEQ ID NO: 58648 - DNA, 25 bp, Artificial
  Probe
agtgatgataaacttcgaggtactc

SEQ ID NO: 58649 - DNA, 25 bp, Artificial
  Probe
cagaacaacaagtacatggctacca

SEQ ID NO: 58650 - DNA, 25 bp, Artificial
  Probe
tagtgatgataaacttcgaggtact

SEQ ID NO: 58651 - DNA, 25 bp, Artificial
  Probe
agcatgggagactcatagcaattac

SEQ ID NO: 58652 - DNA, 25 bp, Artificial
  Probe
aaagcatgggagactcatagcaatt

SEQ ID NO: 58653 - DNA, 25 bp, Artificial
  Probe
gcatgggagactcatagcaattaca

SEQ ID NO: 58654 - DNA, 25 bp, Artificial
  Probe
atagtgatgataaacttcgaggtac

SEQ ID NO: 58655 - DNA, 25 bp, Artificial
  Probe
atatagtgatgataaacttcgaggt

SEQ ID NO: 58656 - DNA, 25 bp, Artificial
  Probe
catatagtgatgataaacttcgagg

SEQ ID NO: 58657 - DNA, 25 bp, Artificial
  Probe
caacaagtacatggctaccagctac

SEQ ID NO: 58658 - DNA, 25 bp, Artificial
  Probe
caacatatagtgatgataaacttcg

SEQ ID NO: 58659 - DNA, 25 bp, Artificial
  Probe
gaacaacaagtacatggctaccagc

SEQ ID NO: 58660 - DNA, 25 bp, Artificial
  Probe
tatagtgatgataaacttcgaggta

SEQ ID NO: 58661 - DNA, 25 bp, Artificial
  Probe
acaacaagtacatggctaccagcta

SEQ ID NO: 58662 - DNA, 25 bp, Artificial
  Probe
acatatagtgatgataaacttcgag

SEQ ID NO: 58663 - DNA, 25 bp, Artificial
  Probe
aaaagcatgggagactcatagcaat

SEQ ID NO: 58664 - DNA, 25 bp, Artificial
  Probe
actcaacatatagtgatgataaact

SEQ ID NO: 58665 - DNA, 25 bp, Artificial
  Probe
aacaagtacatggctaccagctacc

SEQ ID NO: 58666 - DNA, 25 bp, Artificial
  Probe
tgggagactcatagcaattacagct

SEQ ID NO: 58667 - DNA, 25 bp, Artificial
  Probe
aacatatagtgatgataaacttcga

SEQ ID NO: 58668 - DNA, 25 bp, Artificial
  Probe
aacaacaagtacatggctaccagct

SEQ ID NO: 58669 - DNA, 25 bp, Artificial
  Probe
caaaagcatgggagactcatagcaa

SEQ ID NO: 58670 - DNA, 25 bp, Artificial
  Probe
caagtacatggctaccagctacctg

SEQ ID NO: 58671 - DNA, 25 bp, Artificial
  Probe
cagcaaaagcatgggagactcatag

SEQ ID NO: 58672 - DNA, 25 bp, Artificial
  Probe
acaagtacatggctaccagctacct

SEQ ID NO: 58673 - DNA, 25 bp, Artificial
  Probe
acagcaaaagcatgggagactcata

SEQ ID NO: 58674 - DNA, 25 bp, Artificial
  Probe
cactcaacatatagtgatgataaac

SEQ ID NO: 58675 - DNA, 25 bp, Artificial
  Probe
tttgacagcaaaagcatgggagact

SEQ ID NO: 58676 - DNA, 25 bp, Artificial
  Probe
ttttgacagcaaaagcatgggagac

SEQ ID NO: 58677 - DNA, 25 bp, Artificial
  Probe
atttgtgagagaagatactggttcg

SEQ ID NO: 58678 - DNA, 25 bp, Artificial
  Probe
tactgagatttgctgtgtgaacttg

SEQ ID NO: 58679 - DNA, 25 bp, Artificial
  Probe
tatgtactgagatttgctgtgtgaa

SEQ ID NO: 58680 - DNA, 25 bp, Artificial
  Probe
ttatgtactgagatttgctgtgtga

SEQ ID NO: 58681 - DNA, 25 bp, Artificial
  Probe
tttatgtactgagatttgctgtgtg

SEQ ID NO: 58682 - DNA, 25 bp, Artificial
  Probe
tcaaaggaacagatttcagaaagaa

SEQ ID NO: 58683 - DNA, 25 bp, Artificial
  Probe
ttcaaaggaacagatttcagaaaga

SEQ ID NO: 58684 - DNA, 25 bp, Artificial
  Probe
tatttgtgagagaagatactggttc

SEQ ID NO: 58685 - DNA, 25 bp, Artificial
  Probe
agaaatgaaattggcatggacaaat

SEQ ID NO: 58686 - DNA, 25 bp, Artificial
  Probe
gtactgagatttgctgtgtgaactt

SEQ ID NO: 58687 - DNA, 25 bp, Artificial
  Probe
atgtactgagatttgctgtgtgaac

SEQ ID NO: 58688 - DNA, 25 bp, Artificial
  Probe
aagaaatgaaattggcatggacaaa

SEQ ID NO: 58689 - DNA, 25 bp, Artificial
  Probe
aaagaaatgaaattggcatggacaa

SEQ ID NO: 58690 - DNA, 25 bp, Artificial
  Probe
acccaataattgtgatgtgtttaca

SEQ ID NO: 58691 - DNA, 25 bp, Artificial
  Probe
gaaagaaagaaaccagaggcacttc

SEQ ID NO: 58692 - DNA, 25 bp, Artificial
  Probe
atatttgtgagagaagatactggtt

SEQ ID NO: 58693 - DNA, 25 bp, Artificial
  Probe
gaaatgaaattggcatggacaaatt

SEQ ID NO: 58694 - DNA, 25 bp, Artificial
  Probe
agaaagaaagaaaccagaggcactt

SEQ ID NO: 58695 - DNA, 25 bp, Artificial
  Probe
ttcagaaagaaagaaaccagaggca

SEQ ID NO: 58696 - DNA, 25 bp, Artificial
  Probe
gtgtgaacttgccttcataacctag

SEQ ID NO: 58697 - DNA, 25 bp, Artificial
  Probe
aagaaaccagaggcacttcaagaaa

SEQ ID NO: 58698 - DNA, 25 bp, Artificial
  Probe
aaagaaaccagaggcacttcaagaa

SEQ ID NO: 58699 - DNA, 25 bp, Artificial
  Probe
aagaaagaaaccagaggcacttcaa

SEQ ID NO: 58700 - DNA, 25 bp, Artificial
  Probe
aaagaaagaaaccagaggcacttca

SEQ ID NO: 58701 - DNA, 25 bp, Artificial
  Probe
tgtactgagatttgctgtgtgaact

SEQ ID NO: 58702 - DNA, 25 bp, Artificial
  Probe
tttgtgagagaagatactggttcga

SEQ ID NO: 58703 - DNA, 25 bp, Artificial
  Probe
tacccaataattgtgatgtgtttac

SEQ ID NO: 58704 - DNA, 25 bp, Artificial
  Probe
tgtgtgaacttgccttcataaccta

SEQ ID NO: 58705 - DNA, 25 bp, Artificial
  Probe
atttcagaaagaaagaaaccagagg

SEQ ID NO: 58706 - DNA, 25 bp, Artificial
  Probe
cagaaagaaagaaaccagaggcact

SEQ ID NO: 58707 - DNA, 25 bp, Artificial
  Probe
tcagaaagaaagaaaccagaggcac

SEQ ID NO: 58708 - DNA, 25 bp, Artificial
  Probe
acagatttcagaaagaaagaaacca

SEQ ID NO: 58709 - DNA, 25 bp, Artificial
  Probe
agaaaccagaggcacttcaagaaag

SEQ ID NO: 58710 - DNA, 25 bp, Artificial
  Probe
gaaagaaaccagaggcacttcaaga

SEQ ID NO: 58711 - DNA, 25 bp, Artificial
  Probe
agaaagaaaccagaggcacttcaag

SEQ ID NO: 58712 - DNA, 25 bp, Artificial
  Probe
cagatttcagaaagaaagaaaccag

SEQ ID NO: 58713 - DNA, 25 bp, Artificial
  Probe
tatatttgtgagagaagatactggt

SEQ ID NO: 58714 - DNA, 25 bp, Artificial
  Probe
agatttcagaaagaaagaaaccaga

SEQ ID NO: 58715 - DNA, 25 bp, Artificial
  Probe
aggaacagatttcagaaagaaagaa

SEQ ID NO: 58716 - DNA, 25 bp, Artificial
  Probe
aaggaacagatttcagaaagaaaga

SEQ ID NO: 58717 - DNA, 25 bp, Artificial
  Probe
tttcagaaagaaagaaaccagaggc

SEQ ID NO: 58718 - DNA, 25 bp, Artificial
  Probe
gatttcagaaagaaagaaaccagag

SEQ ID NO: 58719 - DNA, 25 bp, Artificial
  Probe
aacagatttcagaaagaaagaaacc

SEQ ID NO: 58720 - DNA, 25 bp, Artificial
  Probe
caaaggaacagatttcagaaagaaa

SEQ ID NO: 58721 - DNA, 25 bp, Artificial
  Probe
tttcaaaggaacagatttcagaaag

SEQ ID NO: 58722 - DNA, 25 bp, Artificial
  Probe
atgtgctcctatgctaatcagtaat

SEQ ID NO: 58723 - DNA, 25 bp, Artificial
  Probe
tgtgctcctatgctaatcagtaatg

SEQ ID NO: 58724 - DNA, 25 bp, Artificial
  Probe
gtgctcctatgctaatcagtaatga

SEQ ID NO: 58725 - DNA, 25 bp, Artificial
  Probe
tgctcctatgctaatcagtaatgaa

SEQ ID NO: 58726 - DNA, 25 bp, Artificial
  Probe
cagaacattgctctctacctagatt

SEQ ID NO: 58727 - DNA, 25 bp, Artificial
  Probe
tcagaacattgctctctacctagat

SEQ ID NO: 58728 - DNA, 25 bp, Artificial
  Probe
ttcagaacattgctctctacctaga

SEQ ID NO: 58729 - DNA, 25 bp, Artificial
  Probe
catgtgctcctatgctaatcagtaa

SEQ ID NO: 58730 - DNA, 25 bp, Artificial
  Probe
gctcctatgctaatcagtaatgaat

SEQ ID NO: 58731 - DNA, 25 bp, Artificial
  Probe
tgtctattataaccgttgttggact

SEQ ID NO: 58732 - DNA, 25 bp, Artificial
  Probe
aatgtctattataaccgttgttgga

SEQ ID NO: 58733 - DNA, 25 bp, Artificial
  Probe
atgtctattataaccgttgttggac

SEQ ID NO: 58734 - DNA, 25 bp, Artificial
  Probe
ctttcagaacattgctctctaccta

SEQ ID NO: 58735 - DNA, 25 bp, Artificial
  Probe
taaccgttgttggactatttgaatc

SEQ ID NO: 58736 - DNA, 25 bp, Artificial
  Probe
atgggcttatgtaacttacctatgt

SEQ ID NO: 58737 - DNA, 25 bp, Artificial
  Probe
ataaccgttgttggactatttgaat

SEQ ID NO: 58738 - DNA, 25 bp, Artificial
  Probe
atgtaacttacctatgtatgtgcag

SEQ ID NO: 58739 - DNA, 25 bp, Artificial
  Probe
tttcagaacattgctctctacctag

SEQ ID NO: 58740 - DNA, 25 bp, Artificial
  Probe
ctgatggaaggaagggaacatttac

SEQ ID NO: 58741 - DNA, 25 bp, Artificial
  Probe
gtctattataaccgttgttggacta

SEQ ID NO: 58742 - DNA, 25 bp, Artificial
  Probe
tgggcttatgtaacttacctatgta

SEQ ID NO: 58743 - DNA, 25 bp, Artificial
  Probe
ggcttatgtaacttacctatgtatg

SEQ ID NO: 58744 - DNA, 25 bp, Artificial
  Probe
agaacattgctctctacctagattt

SEQ ID NO: 58745 - DNA, 25 bp, Artificial
  Probe
actgatggaaggaagggaacattta

SEQ ID NO: 58746 - DNA, 25 bp, Artificial
  Probe
tataaccgttgttggactatttgaa

SEQ ID NO: 58747 - DNA, 25 bp, Artificial
  Probe
tgtaacttacctatgtatgtgcagg

SEQ ID NO: 58748 - DNA, 25 bp, Artificial
  Probe
tgctttaatcatctcttcatggcta

SEQ ID NO: 58749 - DNA, 25 bp, Artificial
  Probe
cattatgggcttatgtaacttacct

SEQ ID NO: 58750 - DNA, 25 bp, Artificial
  Probe
tctattataaccgttgttggactat

SEQ ID NO: 58751 - DNA, 25 bp, Artificial
  Probe
tctcttcatggctatataactatcc

SEQ ID NO: 58752 - DNA, 25 bp, Artificial
  Probe
gctttaatcatctcttcatggctat

SEQ ID NO: 58753 - DNA, 25 bp, Artificial
  Probe
tagtaggctttagattccctttctg

SEQ ID NO: 58754 - DNA, 25 bp, Artificial
  Probe
cttcatggctatataactatccagc

SEQ ID NO: 58755 - DNA, 25 bp, Artificial
  Probe
ctgctttaatcatctcttcatggct

SEQ ID NO: 58756 - DNA, 25 bp, Artificial
  Probe
aagtaataaatctggcatgaggaaa

SEQ ID NO: 58757 - DNA, 25 bp, Artificial
  Probe
ttatgtaacttacctatgtatgtgc

SEQ ID NO: 58758 - DNA, 25 bp, Artificial
  Probe
atcatctcttcatggctatataact

SEQ ID NO: 58759 - DNA, 25 bp, Artificial
  Probe
cctttcagaacattgctctctacct

SEQ ID NO: 58760 - DNA, 25 bp, Artificial
  Probe
gtacaggtgtgagatgagggattag

SEQ ID NO: 58761 - DNA, 25 bp, Artificial
  Probe
gggcttatgtaacttacctatgtat

SEQ ID NO: 58762 - DNA, 25 bp, Artificial
  Probe
tatgggcttatgtaacttacctatg

SEQ ID NO: 58763 - DNA, 25 bp, Artificial
  Probe
tgatggaaggaagggaacatttacc

SEQ ID NO: 58764 - DNA, 25 bp, Artificial
  Probe
atagtaggctttagattccctttct

SEQ ID NO: 58765 - DNA, 25 bp, Artificial
  Probe
gaacattgctctctacctagattta

SEQ ID NO: 58766 - DNA, 25 bp, Artificial
  Probe
tatgtaacttacctatgtatgtgca

SEQ ID NO: 58767 - DNA, 25 bp, Artificial
  Probe
caagaaggtggatgaggaagataca

SEQ ID NO: 58768 - DNA, 25 bp, Artificial
  Probe
gaagatacacacaggagcagaagaa

SEQ ID NO: 58769 - DNA, 25 bp, Artificial
  Probe
aagaaggtggatgaggaagatacac

SEQ ID NO: 58770 - DNA, 25 bp, Artificial
  Probe
taggtaaagttaagaaatcggcaag

SEQ ID NO: 58771 - DNA, 25 bp, Artificial
  Probe
aggtaaagttaagaaatcggcaagg

SEQ ID NO: 58772 - DNA, 25 bp, Artificial
  Probe
ataggtaaagttaagaaatcggcaa

SEQ ID NO: 58773 - DNA, 25 bp, Artificial
  Probe
aataggtaaagttaagaaatcggca

SEQ ID NO: 58774 - DNA, 25 bp, Artificial
  Probe
tggatgaggaagatacacacaggag

SEQ ID NO: 58775 - DNA, 25 bp, Artificial
  Probe
caataggtaaagttaagaaatcggc

SEQ ID NO: 58776 - DNA, 25 bp, Artificial
  Probe
gccaataggtaaagttaagaaatcg

SEQ ID NO: 58777 - DNA, 25 bp, Artificial
  Probe
aagatacacacaggagcagaagaaa

SEQ ID NO: 58778 - DNA, 25 bp, Artificial
  Probe
gaaggtggatgaggaagatacacac

SEQ ID NO: 58779 - DNA, 25 bp, Artificial
  Probe
agaaggtggatgaggaagatacaca

SEQ ID NO: 58780 - DNA, 25 bp, Artificial
  Probe
ccaagaaggtggatgaggaagatac

SEQ ID NO: 58781 - DNA, 25 bp, Artificial
  Probe
ccaataggtaaagttaagaaatcgg

SEQ ID NO: 58782 - DNA, 25 bp, Artificial
  Probe
ggaagatacacacaggagcagaaga

SEQ ID NO: 58783 - DNA, 25 bp, Artificial
  Probe
aggaagatacacacaggagcagaag

SEQ ID NO: 58784 - DNA, 25 bp, Artificial
  Probe
gaggaagatacacacaggagcagaa

SEQ ID NO: 58785 - DNA, 25 bp, Artificial
  Probe
atgaggaagatacacacaggagcag

SEQ ID NO: 58786 - DNA, 25 bp, Artificial
  Probe
gatgaggaagatacacacaggagca

SEQ ID NO: 58787 - DNA, 25 bp, Artificial
  Probe
aaggtggatgaggaagatacacaca

SEQ ID NO: 58788 - DNA, 25 bp, Artificial
  Probe
ggtaaagttaagaaatcggcaaggc

SEQ ID NO: 58789 - DNA, 25 bp, Artificial
  Probe
gtggatgaggaagatacacacagga

SEQ ID NO: 58790 - DNA, 25 bp, Artificial
  Probe
aggtggatgaggaagatacacacag

SEQ ID NO: 58791 - DNA, 25 bp, Artificial
  Probe
ggatgaggaagatacacacaggagc

SEQ ID NO: 58792 - DNA, 25 bp, Artificial
  Probe
gggttaataataattgggagagggg

SEQ ID NO: 58793 - DNA, 25 bp, Artificial
  Probe
ggggttaataataattgggagaggg

SEQ ID NO: 58794 - DNA, 25 bp, Artificial
  Probe
ggttaataataattgggagagggga

SEQ ID NO: 58795 - DNA, 25 bp, Artificial
  Probe
aggggttaataataattgggagagg

SEQ ID NO: 58796 - DNA, 25 bp, Artificial
  Probe
tacgagtaaaagggcatttcttctt

SEQ ID NO: 58797 - DNA, 25 bp, Artificial
  Probe
catcctgatcctttgtgagttcctg

SEQ ID NO: 58798 - DNA, 25 bp, Artificial
  Probe
taataataattgggagaggggacag

SEQ ID NO: 58799 - DNA, 25 bp, Artificial
  Probe
ttaataataattgggagaggggaca

SEQ ID NO: 58800 - DNA, 25 bp, Artificial
  Probe
ttacgagtaaaagggcatttcttct

SEQ ID NO: 58801 - DNA, 25 bp, Artificial
  Probe
tgaggaagatacacacaggagcaga

SEQ ID NO: 58802 - DNA, 25 bp, Artificial
  Probe
gttaataataattgggagaggggac

SEQ ID NO: 58803 - DNA, 25 bp, Artificial
  Probe
tttatgccattgtcaaggaagccag

SEQ ID NO: 58804 - DNA, 25 bp, Artificial
  Probe
cctgaatagctagtcctttgtacat

SEQ ID NO: 58805 - DNA, 25 bp, Artificial
  Probe
aaggggttaataataattgggagag

SEQ ID NO: 58806 - DNA, 25 bp, Artificial
  Probe
ggtggatgaggaagatacacacagg

SEQ ID NO: 58807 - DNA, 25 bp, Artificial
  Probe
aataataattgggagaggggacagc

SEQ ID NO: 58808 - DNA, 25 bp, Artificial
  Probe
tttacgagtaaaagggcatttcttc

SEQ ID NO: 58809 - DNA, 25 bp, Artificial
  Probe
ctgaatagctagtcctttgtacatc

SEQ ID NO: 58810 - DNA, 25 bp, Artificial
  Probe
ggccaataggtaaagttaagaaatc

SEQ ID NO: 58811 - DNA, 25 bp, Artificial
  Probe
ccctgaatagctagtcctttgtaca

SEQ ID NO: 58812 - DNA, 25 bp, Artificial
  Probe
aactatcgccagaaccatcaatgag

SEQ ID NO: 58813 - DNA, 25 bp, Artificial
  Probe
caactatcgccagaaccatcaatga

SEQ ID NO: 58814 - DNA, 25 bp, Artificial
  Probe
cacaactatcgccagaaccatcaat

SEQ ID NO: 58815 - DNA, 25 bp, Artificial
  Probe
acaactatcgccagaaccatcaatg

SEQ ID NO: 58816 - DNA, 25 bp, Artificial
  Probe
cttacatcttggcagaggaacttcg

SEQ ID NO: 58817 - DNA, 25 bp, Artificial
  Probe
gaatgagttcagagcctccttcaac

SEQ ID NO: 58818 - DNA, 25 bp, Artificial
  Probe
ccttacatcttggcagaggaacttc

SEQ ID NO: 58819 - DNA, 25 bp, Artificial
  Probe
cattgacttcatgactagagagacc

SEQ ID NO: 58820 - DNA, 25 bp, Artificial
  Probe
ttacatcttggcagaggaacttcgt

SEQ ID NO: 58821 - DNA, 25 bp, Artificial
  Probe
aaccactttgacaggaggaagaatg

SEQ ID NO: 58822 - DNA, 25 bp, Artificial
  Probe
tcacaactatcgccagaaccatcaa

SEQ ID NO: 58823 - DNA, 25 bp, Artificial
  Probe
attgacttcatgactagagagaccg

SEQ ID NO: 58824 - DNA, 25 bp, Artificial
  Probe
caaccactttgacaggaggaagaat

SEQ ID NO: 58825 - DNA, 25 bp, Artificial
  Probe
tacatcttggcagaggaacttcgtc

SEQ ID NO: 58826 - DNA, 25 bp, Artificial
  Probe
actatcgccagaaccatcaatgagg

SEQ ID NO: 58827 - DNA, 25 bp, Artificial
  Probe
ctcacaactatcgccagaaccatca

SEQ ID NO: 58828 - DNA, 25 bp, Artificial
  Probe
gatgaatgagttcagagcctccttc

SEQ ID NO: 58829 - DNA, 25 bp, Artificial
  Probe
caggagcagatgaatgagttcagag

SEQ ID NO: 58830 - DNA, 25 bp, Artificial
  Probe
aatgagttcagagcctccttcaacc

SEQ ID NO: 58831 - DNA, 25 bp, Artificial
  Probe
agatgaatgagttcagagcctcctt

SEQ ID NO: 58832 - DNA, 25 bp, Artificial
  Probe
atgaatgagttcagagcctccttca

SEQ ID NO: 58833 - DNA, 25 bp, Artificial
  Probe
ccttcattgacttcatgactagaga

SEQ ID NO: 58834 - DNA, 25 bp, Artificial
  Probe
tccttcattgacttcatgactagag

SEQ ID NO: 58835 - DNA, 25 bp, Artificial
  Probe
gtccttcattgacttcatgactaga

SEQ ID NO: 58836 - DNA, 25 bp, Artificial
  Probe
tcattgacttcatgactagagagac

SEQ ID NO: 58837 - DNA, 25 bp, Artificial
  Probe
acaacaagcacaccaactacaccat

SEQ ID NO: 58838 - DNA, 25 bp, Artificial
  Probe
tgataagccttacatcttggcagag

SEQ ID NO: 58839 - DNA, 25 bp, Artificial
  Probe
ttcattgacttcatgactagagaga

SEQ ID NO: 58840 - DNA, 25 bp, Artificial
  Probe
caacaagcacaccaactacaccatg

SEQ ID NO: 58841 - DNA, 25 bp, Artificial
  Probe
tgaatgagttcagagcctccttcaa

SEQ ID NO: 58842 - DNA, 25 bp, Artificial
  Probe
cttcattgacttcatgactagagag

SEQ ID NO: 58843 - DNA, 25 bp, Artificial
  Probe
ctatcgccagaaccatcaatgaggt

SEQ ID NO: 58844 - DNA, 25 bp, Artificial
  Probe
cttcgacaacaagcacaccaactac

SEQ ID NO: 58845 - DNA, 25 bp, Artificial
  Probe
cagatgaatgagttcagagcctcct

SEQ ID NO: 58846 - DNA, 25 bp, Artificial
  Probe
tcttcgacaacaagcacaccaacta

SEQ ID NO: 58847 - DNA, 25 bp, Artificial
  Probe
tatcgccagaaccatcaatgaggtg

SEQ ID NO: 58848 - DNA, 25 bp, Artificial
  Probe
gagacccagatcctgacaagagatg

SEQ ID NO: 58849 - DNA, 25 bp, Artificial
  Probe
gataagccttacatcttggcagagg

SEQ ID NO: 58850 - DNA, 25 bp, Artificial
  Probe
ccaggagcagatgaatgagttcaga

SEQ ID NO: 58851 - DNA, 25 bp, Artificial
  Probe
ccagatcctgacaagagatgccaag

SEQ ID NO: 58852 - DNA, 25 bp, Artificial
  Probe
cagatcctgacaagagatgccaagg

SEQ ID NO: 58853 - DNA, 25 bp, Artificial
  Probe
ttgacttcatgactagagagaccgc

SEQ ID NO: 58854 - DNA, 25 bp, Artificial
  Probe
cagaaccatcaatgaggtggagacc

SEQ ID NO: 58855 - DNA, 25 bp, Artificial
  Probe
ccagaaccatcaatgaggtggagac

SEQ ID NO: 58856 - DNA, 25 bp, Artificial
  Probe
agtccttcattgacttcatgactag

SEQ ID NO: 58857 - DNA, 25 bp, Artificial
  Probe
tgtccttatctcccaataaacttga

SEQ ID NO: 58858 - DNA, 25 bp, Artificial
  Probe
tccttatctcccaataaacttgact

SEQ ID NO: 58859 - DNA, 25 bp, Artificial
  Probe
tacatccaggaatgaaccattgaga

SEQ ID NO: 58860 - DNA, 25 bp, Artificial
  Probe
ccttatctcccaataaacttgactt

SEQ ID NO: 58861 - DNA, 25 bp, Artificial
  Probe
atgtccttatctcccaataaacttg

SEQ ID NO: 58862 - DNA, 25 bp, Artificial
  Probe
gtccttatctcccaataaacttgac

SEQ ID NO: 58863 - DNA, 25 bp, Artificial
  Probe
catgtccttatctcccaataaactt

SEQ ID NO: 58864 - DNA, 25 bp, Artificial
  Probe
caagtaaaggaagacatggtgatgg

SEQ ID NO: 58865 - DNA, 25 bp, Artificial
  Probe
acatccaggaatgaaccattgagag

SEQ ID NO: 58866 - DNA, 25 bp, Artificial
  Probe
aagtaaaggaagacatggtgatggt

SEQ ID NO: 58867 - DNA, 25 bp, Artificial
  Probe
aggtgatccaagtaaaggaagacat

SEQ ID NO: 58868 - DNA, 25 bp, Artificial
  Probe
ggtgatccaagtaaaggaagacatg

SEQ ID NO: 58869 - DNA, 25 bp, Artificial
  Probe
gaaccattgagagggcattgagaaa

SEQ ID NO: 58870 - DNA, 25 bp, Artificial
  Probe
agtaaaggaagacatggtgatggtg

SEQ ID NO: 58871 - DNA, 25 bp, Artificial
  Probe
gatccaagtaaaggaagacatggtg

SEQ ID NO: 58872 - DNA, 25 bp, Artificial
  Probe
gtgatccaagtaaaggaagacatgg

SEQ ID NO: 58873 - DNA, 25 bp, Artificial
  Probe
taaaggaagacatggtgatggtgtt

SEQ ID NO: 58874 - DNA, 25 bp, Artificial
  Probe
cttatctcccaataaacttgacttt

SEQ ID NO: 58875 - DNA, 25 bp, Artificial
  Probe
catccaggaatgaaccattgagagg

SEQ ID NO: 58876 - DNA, 25 bp, Artificial
  Probe
ccaagtaaaggaagacatggtgatg

SEQ ID NO: 58877 - DNA, 25 bp, Artificial
  Probe
tccaagtaaaggaagacatggtgat

SEQ ID NO: 58878 - DNA, 25 bp, Artificial
  Probe
atccaagtaaaggaagacatggtga

SEQ ID NO: 58879 - DNA, 25 bp, Artificial
  Probe
tgatccaagtaaaggaagacatggt

SEQ ID NO: 58880 - DNA, 25 bp, Artificial
  Probe
aaccattgagagggcattgagaaac

SEQ ID NO: 58881 - DNA, 25 bp, Artificial
  Probe
caggtgatccaagtaaaggaagaca

SEQ ID NO: 58882 - DNA, 25 bp, Artificial
  Probe
gaagacatggtgatggtgttgatgg

SEQ ID NO: 58883 - DNA, 25 bp, Artificial
  Probe
ggaagacatggtgatggtgttgatg

SEQ ID NO: 58884 - DNA, 25 bp, Artificial
  Probe
ctagtggtcacaacatgtccttatc

SEQ ID NO: 58885 - DNA, 25 bp, Artificial
  Probe
gtaaaggaagacatggtgatggtgt

SEQ ID NO: 58886 - DNA, 25 bp, Artificial
  Probe
tagtggtcacaacatgtccttatct

SEQ ID NO: 58887 - DNA, 25 bp, Artificial
  Probe
gacatggtgatggtgttgatggatg

SEQ ID NO: 58888 - DNA, 25 bp, Artificial
  Probe
agacatggtgatggtgttgatggat

SEQ ID NO: 58889 - DNA, 25 bp, Artificial
  Probe
aggaagacatggtgatggtgttgat

SEQ ID NO: 58890 - DNA, 25 bp, Artificial
  Probe
actagtggtcacaacatgtccttat

SEQ ID NO: 58891 - DNA, 25 bp, Artificial
  Probe
aagacatggtgatggtgttgatgga

SEQ ID NO: 58892 - DNA, 25 bp, Artificial
  Probe
aaggaagacatggtgatggtgttga

SEQ ID NO: 58893 - DNA, 25 bp, Artificial
  Probe
atgaaccattgagagggcattgaga

SEQ ID NO: 58894 - DNA, 25 bp, Artificial
  Probe
tgaaccattgagagggcattgagaa

SEQ ID NO: 58895 - DNA, 25 bp, Artificial
  Probe
agtggtcacaacatgtccttatctc

SEQ ID NO: 58896 - DNA, 25 bp, Artificial
  Probe
aaaggaagacatggtgatggtgttg

SEQ ID NO: 58897 - DNA, 25 bp, Artificial
  Probe
gcaggtgatccaagtaaaggaagac

SEQ ID NO: 58898 - DNA, 25 bp, Artificial
  Probe
ttatctcccaataaacttgacttta

SEQ ID NO: 58899 - DNA, 25 bp, Artificial
  Probe
acatgtccttatctcccaataaact

SEQ ID NO: 58900 - DNA, 25 bp, Artificial
  Probe
aacatgtccttatctcccaataaac

SEQ ID NO: 58901 - DNA, 25 bp, Artificial
  Probe
caacatgtccttatctcccaataaa

SEQ ID NO: 58902 - DNA, 25 bp, Artificial
  Probe
cacaaatctctacaagtgcctgttc

SEQ ID NO: 58903 - DNA, 25 bp, Artificial
  Probe
aatctctacaagtgcctgttcccta

SEQ ID NO: 58904 - DNA, 25 bp, Artificial
  Probe
acaaatctctacaagtgcctgttcc

SEQ ID NO: 58905 - DNA, 25 bp, Artificial
  Probe
ctgctggagaatgtattcaaaacaa

SEQ ID NO: 58906 - DNA, 25 bp, Artificial
  Probe
ccacaaatctctacaagtgcctgtt

SEQ ID NO: 58907 - DNA, 25 bp, Artificial
  Probe
tgctggagaatgtattcaaaacaat

SEQ ID NO: 58908 - DNA, 25 bp, Artificial
  Probe
atctctacaagtgcctgttccctac

SEQ ID NO: 58909 - DNA, 25 bp, Artificial
  Probe
caaatctctacaagtgcctgttccc

SEQ ID NO: 58910 - DNA, 25 bp, Artificial
  Probe
aaatctctacaagtgcctgttccct

SEQ ID NO: 58911 - DNA, 25 bp, Artificial
  Probe
ctatgggccacaaatctctacaagt

SEQ ID NO: 58912 - DNA, 25 bp, Artificial
  Probe
gctgctggagaatgtattcaaaaca

SEQ ID NO: 58913 - DNA, 25 bp, Artificial
  Probe
gctggagaatgtattcaaaacaata

SEQ ID NO: 58914 - DNA, 25 bp, Artificial
  Probe
ggctgctggagaatgtattcaaaac

SEQ ID NO: 58915 - DNA, 25 bp, Artificial
  Probe
cctatgggccacaaatctctacaag

SEQ ID NO: 58916 - DNA, 25 bp, Artificial
  Probe
tatgggccacaaatctctacaagtg

SEQ ID NO: 58917 - DNA, 25 bp, Artificial
  Probe
tctctacaagtgcctgttccctaca

SEQ ID NO: 58918 - DNA, 25 bp, Artificial
  Probe
gggctgctggagaatgtattcaaaa

SEQ ID NO: 58919 - DNA, 25 bp, Artificial
  Probe
ctctacaagtgcctgttccctacac

SEQ ID NO: 58920 - DNA, 25 bp, Artificial
  Probe
tcaaaacaataaaactttggacctt

SEQ ID NO: 58921 - DNA, 25 bp, Artificial
  Probe
ttcaaaacaataaaactttggacct

SEQ ID NO: 58922 - DNA, 25 bp, Artificial
  Probe
cagtactagtccagtcccttcacac

SEQ ID NO: 58923 - DNA, 25 bp, Artificial
  Probe
caaaacaataaaactttggaccttt

SEQ ID NO: 58924 - DNA, 25 bp, Artificial
  Probe
attcaaaacaataaaactttggacc

SEQ ID NO: 58925 - DNA, 25 bp, Artificial
  Probe
ctggagaatgtattcaaaacaataa

SEQ ID NO: 58926 - DNA, 25 bp, Artificial
  Probe
tggagggttttggtcaagccttatt

SEQ ID NO: 58927 - DNA, 25 bp, Artificial
  Probe
agtactagtccagtcccttcacacc

SEQ ID NO: 58928 - DNA, 25 bp, Artificial
  Probe
ccagtactagtccagtcccttcaca

SEQ ID NO: 58929 - DNA, 25 bp, Artificial
  Probe
tggagaatgtattcaaaacaataaa

SEQ ID NO: 58930 - DNA, 25 bp, Artificial
  Probe
ctggagggttttggtcaagccttat

SEQ ID NO: 58931 - DNA, 25 bp, Artificial
  Probe
ggggctgctggagaatgtattcaaa

SEQ ID NO: 58932 - DNA, 25 bp, Artificial
  Probe
ttggccttaaaacccaggaactttt

SEQ ID NO: 58933 - DNA, 25 bp, Artificial
  Probe
tttggccttaaaacccaggaacttt

SEQ ID NO: 58934 - DNA, 25 bp, Artificial
  Probe
ctttggccttaaaacccaggaactt

SEQ ID NO: 58935 - DNA, 25 bp, Artificial
  Probe
tgtattcaaaacaataaaactttgg

SEQ ID NO: 58936 - DNA, 25 bp, Artificial
  Probe
tattcaaaacaataaaactttggac

SEQ ID NO: 58937 - DNA, 25 bp, Artificial
  Probe
gtattcaaaacaataaaactttgga

SEQ ID NO: 58938 - DNA, 25 bp, Artificial
  Probe
ctacaccaccccagtactagtccag

SEQ ID NO: 58939 - DNA, 25 bp, Artificial
  Probe
gcctatgggccacaaatctctacaa

SEQ ID NO: 58940 - DNA, 25 bp, Artificial
  Probe
gaactctaagccgtgtttacagaat

SEQ ID NO: 58941 - DNA, 25 bp, Artificial
  Probe
aactctaagccgtgtttacagaatg

SEQ ID NO: 58942 - DNA, 25 bp, Artificial
  Probe
tagaactctaagccgtgtttacaga

SEQ ID NO: 58943 - DNA, 25 bp, Artificial
  Probe
gtagaactctaagccgtgtttacag

SEQ ID NO: 58944 - DNA, 25 bp, Artificial
  Probe
ctaagccgtgtttacagaatgtttg

SEQ ID NO: 58945 - DNA, 25 bp, Artificial
  Probe
tctaagccgtgtttacagaatgttt

SEQ ID NO: 58946 - DNA, 25 bp, Artificial
  Probe
ctctaagccgtgtttacagaatgtt

SEQ ID NO: 58947 - DNA, 25 bp, Artificial
  Probe
agaactctaagccgtgtttacagaa

SEQ ID NO: 58948 - DNA, 25 bp, Artificial
  Probe
taagccgtgtttacagaatgtttgt

SEQ ID NO: 58949 - DNA, 25 bp, Artificial
  Probe
ggtagaactctaagccgtgtttaca

SEQ ID NO: 58950 - DNA, 25 bp, Artificial
  Probe
actctaagccgtgtttacagaatgt

SEQ ID NO: 58951 - DNA, 25 bp, Artificial
  Probe
gggtagaactctaagccgtgtttac

SEQ ID NO: 58952 - DNA, 25 bp, Artificial
  Probe
agggtagaactctaagccgtgttta

SEQ ID NO: 58953 - DNA, 25 bp, Artificial
  Probe
aagccgtgtttacagaatgtttgtg

SEQ ID NO: 58954 - DNA, 25 bp, Artificial
  Probe
ctttgaacttttggagagggtagaa

SEQ ID NO: 58955 - DNA, 25 bp, Artificial
  Probe
tttgaacttttggagagggtagaac

SEQ ID NO: 58956 - DNA, 25 bp, Artificial
  Probe
gtttacagaatgtttgtgcagcttc

SEQ ID NO: 58957 - DNA, 25 bp, Artificial
  Probe
ttgaacttttggagagggtagaact

SEQ ID NO: 58958 - DNA, 25 bp, Artificial
  Probe
tgtttacagaatgtttgtgcagctt

SEQ ID NO: 58959 - DNA, 25 bp, Artificial
  Probe
tgaacttttggagagggtagaactc

SEQ ID NO: 58960 - DNA, 25 bp, Artificial
  Probe
gtgtttacagaatgtttgtgcagct

SEQ ID NO: 58961 - DNA, 25 bp, Artificial
  Probe
tttacagaatgtttgtgcagcttcg

SEQ ID NO: 58962 - DNA, 25 bp, Artificial
  Probe
gagggtagaactctaagccgtgttt

SEQ ID NO: 58963 - DNA, 25 bp, Artificial
  Probe
cctttgaacttttggagagggtaga

SEQ ID NO: 58964 - DNA, 25 bp, Artificial
  Probe
ccgtgtttacagaatgtttgtgcag

SEQ ID NO: 58965 - DNA, 25 bp, Artificial
  Probe
tcctttgaacttttggagagggtag

SEQ ID NO: 58966 - DNA, 25 bp, Artificial
  Probe
cgtgtttacagaatgtttgtgcagc

SEQ ID NO: 58967 - DNA, 25 bp, Artificial
  Probe
agccgtgtttacagaatgtttgtgc

SEQ ID NO: 58968 - DNA, 25 bp, Artificial
  Probe
tttggagagggtagaactctaagcc

SEQ ID NO: 58969 - DNA, 25 bp, Artificial
  Probe
cttttggagagggtagaactctaag

SEQ ID NO: 58970 - DNA, 25 bp, Artificial
  Probe
acttttggagagggtagaactctaa

SEQ ID NO: 58971 - DNA, 25 bp, Artificial
  Probe
aacttttggagagggtagaactcta

SEQ ID NO: 58972 - DNA, 25 bp, Artificial
  Probe
gaacttttggagagggtagaactct

SEQ ID NO: 58973 - DNA, 25 bp, Artificial
  Probe
ttttggagagggtagaactctaagc

SEQ ID NO: 58974 - DNA, 25 bp, Artificial
  Probe
ttacagaatgtttgtgcagcttcgc

SEQ ID NO: 58975 - DNA, 25 bp, Artificial
  Probe
gccgtgtttacagaatgtttgtgca

SEQ ID NO: 58976 - DNA, 25 bp, Artificial
  Probe
agagggtagaactctaagccgtgtt

SEQ ID NO: 58977 - DNA, 25 bp, Artificial
  Probe
gagagggtagaactctaagccgtgt

SEQ ID NO: 58978 - DNA, 25 bp, Artificial
  Probe
ttggagagggtagaactctaagccg

SEQ ID NO: 58979 - DNA, 25 bp, Artificial
  Probe
ctcctttgaacttttggagagggta

SEQ ID NO: 58980 - DNA, 25 bp, Artificial
  Probe
cgctctctcctttgaacttttggag

SEQ ID NO: 58981 - DNA, 25 bp, Artificial
  Probe
tcagaggttcagtctattatcatca

SEQ ID NO: 58982 - DNA, 25 bp, Artificial
  Probe
gttcagtctattatcatcatggtgg

SEQ ID NO: 58983 - DNA, 25 bp, Artificial
  Probe
ggttcagtctattatcatcatggtg

SEQ ID NO: 58984 - DNA, 25 bp, Artificial
  Probe
aggttcagtctattatcatcatggt

SEQ ID NO: 58985 - DNA, 25 bp, Artificial
  Probe
gaggttcagtctattatcatcatgg

SEQ ID NO: 58986 - DNA, 25 bp, Artificial
  Probe
cagaggttcagtctattatcatcat

SEQ ID NO: 58987 - DNA, 25 bp, Artificial
  Probe
ttcagaggttcagtctattatcatc

SEQ ID NO: 58988 - DNA, 25 bp, Artificial
  Probe
cttacagtttcagaggttcagtcta

SEQ ID NO: 58989 - DNA, 25 bp, Artificial
  Probe
agaggttcagtctattatcatcatg

SEQ ID NO: 58990 - DNA, 25 bp, Artificial
  Probe
acagtttcagaggttcagtctatta

SEQ ID NO: 58991 - DNA, 25 bp, Artificial
  Probe
tacagtttcagaggttcagtctatt

SEQ ID NO: 58992 - DNA, 25 bp, Artificial
  Probe
ttacagtttcagaggttcagtctat

SEQ ID NO: 58993 - DNA, 25 bp, Artificial
  Probe
ttcagtctattatcatcatggtggg

SEQ ID NO: 58994 - DNA, 25 bp, Artificial
  Probe
cagtctattatcatcatggtgggag

SEQ ID NO: 58995 - DNA, 25 bp, Artificial
  Probe
tcagtctattatcatcatggtggga

SEQ ID NO: 58996 - DNA, 25 bp, Artificial
  Probe
ctgatgtaaatgttatccatgtggc

SEQ ID NO: 58997 - DNA, 25 bp, Artificial
  Probe
cctgatgtaaatgttatccatgtgg

SEQ ID NO: 58998 - DNA, 25 bp, Artificial
  Probe
gcctgatgtaaatgttatccatgtg

SEQ ID NO: 58999 - DNA, 25 bp, Artificial
  Probe
gtttcagaggttcagtctattatca

SEQ ID NO: 59000 - DNA, 25 bp, Artificial
  Probe
cagtttcagaggttcagtctattat

SEQ ID NO: 59001 - DNA, 25 bp, Artificial
  Probe
atggtgttggagaggtaactgagag

SEQ ID NO: 59002 - DNA, 25 bp, Artificial
  Probe
ctaccatcagtcacatcaacaaggc

SEQ ID NO: 59003 - DNA, 25 bp, Artificial
  Probe
tctattatcatcatggtgggagcat

SEQ ID NO: 59004 - DNA, 25 bp, Artificial
  Probe
ctaccctaccatcagtcacatcaac

SEQ ID NO: 59005 - DNA, 25 bp, Artificial
  Probe
agtttcagaggttcagtctattatc

SEQ ID NO: 59006 - DNA, 25 bp, Artificial
  Probe
agtctattatcatcatggtgggagc

SEQ ID NO: 59007 - DNA, 25 bp, Artificial
  Probe
gagaggtaactgagagttcacatct

SEQ ID NO: 59008 - DNA, 25 bp, Artificial
  Probe
cctaccatcagtcacatcaacaagg

SEQ ID NO: 59009 - DNA, 25 bp, Artificial
  Probe
agaggtaactgagagttcacatctg

SEQ ID NO: 59010 - DNA, 25 bp, Artificial
  Probe
gtctattatcatcatggtgggagca

SEQ ID NO: 59011 - DNA, 25 bp, Artificial
  Probe
gcttacagtttcagaggttcagtct

SEQ ID NO: 59012 - DNA, 25 bp, Artificial
  Probe
taccctaccatcagtcacatcaaca

SEQ ID NO: 59013 - DNA, 25 bp, Artificial
  Probe
taccatcagtcacatcaacaaggca

SEQ ID NO: 59014 - DNA, 25 bp, Artificial
  Probe
ggagaggtaactgagagttcacatc

SEQ ID NO: 59015 - DNA, 25 bp, Artificial
  Probe
tttcagaggttcagtctattatcat

SEQ ID NO: 59016 - DNA, 25 bp, Artificial
  Probe
ccctaccatcagtcacatcaacaag

SEQ ID NO: 59017 - DNA, 25 bp, Artificial
  Probe
ggaagtacctgtgtaggagatgagg

SEQ ID NO: 59018 - DNA, 25 bp, Artificial
  Probe
gaggtaactgagagttcacatctgg

SEQ ID NO: 59019 - DNA, 25 bp, Artificial
  Probe
catggtgttggagaggtaactgaga

SEQ ID NO: 59020 - DNA, 25 bp, Artificial
  Probe
ggcttacagtttcagaggttcagtc

SEQ ID NO: 59021 - DNA, 25 bp, Artificial
  Probe
ttactgctgtgaagagacaccaaga

SEQ ID NO: 59022 - DNA, 25 bp, Artificial
  Probe
cctaccctaccatcagtcacatcaa

SEQ ID NO: 59023 - DNA, 25 bp, Artificial
  Probe
gttggagaggtaactgagagttcac

SEQ ID NO: 59024 - DNA, 25 bp, Artificial
  Probe
gtgttggagaggtaactgagagttc

SEQ ID NO: 59025 - DNA, 25 bp, Artificial
  Probe
aggtaactgagagttcacatctgga

SEQ ID NO: 59026 - DNA, 25 bp, Artificial
  Probe
gcacagactaatgtcatctattgag

SEQ ID NO: 59027 - DNA, 25 bp, Artificial
  Probe
cacagactaatgtcatctattgagg

SEQ ID NO: 59028 - DNA, 25 bp, Artificial
  Probe
cattcacttgattactttggtctgg

SEQ ID NO: 59029 - DNA, 25 bp, Artificial
  Probe
attcacttgattactttggtctggt

SEQ ID NO: 59030 - DNA, 25 bp, Artificial
  Probe
ttcacttgattactttggtctggtt

SEQ ID NO: 59031 - DNA, 25 bp, Artificial
  Probe
tcacttgattactttggtctggttg

SEQ ID NO: 59032 - DNA, 25 bp, Artificial
  Probe
ctaatgtcatctattgagggtggag

SEQ ID NO: 59033 - DNA, 25 bp, Artificial
  Probe
taatgtcatctattgagggtggaga

SEQ ID NO: 59034 - DNA, 25 bp, Artificial
  Probe
tcattcacttgattactttggtctg

SEQ ID NO: 59035 - DNA, 25 bp, Artificial
  Probe
actaatgtcatctattgagggtgga

SEQ ID NO: 59036 - DNA, 25 bp, Artificial
  Probe
tgcacagactaatgtcatctattga

SEQ ID NO: 59037 - DNA, 25 bp, Artificial
  Probe
atgtcatctattgagggtggagaat

SEQ ID NO: 59038 - DNA, 25 bp, Artificial
  Probe
aatgtcatctattgagggtggagaa

SEQ ID NO: 59039 - DNA, 25 bp, Artificial
  Probe
gcatgtttaataaattgacttcccg

SEQ ID NO: 59040 - DNA, 25 bp, Artificial
  Probe
ttcattcacttgattactttggtct

SEQ ID NO: 59041 - DNA, 25 bp, Artificial
  Probe
gcagtgatttataattagggcatgt

SEQ ID NO: 59042 - DNA, 25 bp, Artificial
  Probe
ggcatgtttaataaattgacttccc

SEQ ID NO: 59043 - DNA, 25 bp, Artificial
  Probe
gggcatgtttaataaattgacttcc

SEQ ID NO: 59044 - DNA, 25 bp, Artificial
  Probe
agactaatgtcatctattgagggtg

SEQ ID NO: 59045 - DNA, 25 bp, Artificial
  Probe
cagactaatgtcatctattgagggt

SEQ ID NO: 59046 - DNA, 25 bp, Artificial
  Probe
acagactaatgtcatctattgaggg

SEQ ID NO: 59047 - DNA, 25 bp, Artificial
  Probe
gactaatgtcatctattgagggtgg

SEQ ID NO: 59048 - DNA, 25 bp, Artificial
  Probe
tgtcatctattgagggtggagaatg

SEQ ID NO: 59049 - DNA, 25 bp, Artificial
  Probe
cacttgattactttggtctggttgc

SEQ ID NO: 59050 - DNA, 25 bp, Artificial
  Probe
atgtttaataaattgacttcccgtt

SEQ ID NO: 59051 - DNA, 25 bp, Artificial
  Probe
catgtttaataaattgacttcccgt

SEQ ID NO: 59052 - DNA, 25 bp, Artificial
  Probe
agggcatgtttaataaattgacttc

SEQ ID NO: 59053 - DNA, 25 bp, Artificial
  Probe
attcattcacttgattactttggtc

SEQ ID NO: 59054 - DNA, 25 bp, Artificial
  Probe
aattcattcacttgattactttggt

SEQ ID NO: 59055 - DNA, 25 bp, Artificial
  Probe
tgtttaataaattgacttcccgtta

SEQ ID NO: 59056 - DNA, 25 bp, Artificial
  Probe
ttcattgtccttattgcagtgattt

SEQ ID NO: 59057 - DNA, 25 bp, Artificial
  Probe
tttcattgtccttattgcagtgatt

SEQ ID NO: 59058 - DNA, 25 bp, Artificial
  Probe
caattcattcacttgattactttgg

SEQ ID NO: 59059 - DNA, 25 bp, Artificial
  Probe
cagtgatttataattagggcatgtt

SEQ ID NO: 59060 - DNA, 25 bp, Artificial
  Probe
tcattgtccttattgcagtgattta

SEQ ID NO: 59061 - DNA, 25 bp, Artificial
  Probe
aataaattgacttcccgttaaccag

SEQ ID NO: 59062 - DNA, 25 bp, Artificial
  Probe
cattgtccttattgcagtgatttat

SEQ ID NO: 59063 - DNA, 25 bp, Artificial
  Probe
tattgagggtggagaatgacctgta

SEQ ID NO: 59064 - DNA, 25 bp, Artificial
  Probe
atctattgagggtggagaatgacct

SEQ ID NO: 59065 - DNA, 25 bp, Artificial
  Probe
catctattgagggtggagaatgacc

SEQ ID NO: 59066 - DNA, 25 bp, Artificial
  Probe
tagggcatgtttaataaattgactt

SEQ ID NO: 59067 - DNA, 25 bp, Artificial
  Probe
ttagggcatgtttaataaattgact

SEQ ID NO: 59068 - DNA, 25 bp, Artificial
  Probe
ataaattgacttcccgttaaccagt

SEQ ID NO: 59069 - DNA, 25 bp, Artificial
  Probe
tcatctattgagggtggagaatgac

SEQ ID NO: 59070 - DNA, 25 bp, Artificial
  Probe
gtcatctattgagggtggagaatga

SEQ ID NO: 59071 - DNA, 25 bp, Artificial
  Probe
tggataaggagatcaagaacagctt

SEQ ID NO: 59072 - DNA, 25 bp, Artificial
  Probe
gagctggataaggagatcaagaaca

SEQ ID NO: 59073 - DNA, 25 bp, Artificial
  Probe
ctttaacctttaccactgccacttt

SEQ ID NO: 59074 - DNA, 25 bp, Artificial
  Probe
tgagctggataaggagatcaagaac

SEQ ID NO: 59075 - DNA, 25 bp, Artificial
  Probe
gtgagctggataaggagatcaagaa

SEQ ID NO: 59076 - DNA, 25 bp, Artificial
  Probe
tagatgacagtaatgagaacgggtg

SEQ ID NO: 59077 - DNA, 25 bp, Artificial
  Probe
gtagatgacagtaatgagaacgggt

SEQ ID NO: 59078 - DNA, 25 bp, Artificial
  Probe
ctggataaggagatcaagaacagct

SEQ ID NO: 59079 - DNA, 25 bp, Artificial
  Probe
agctggataaggagatcaagaacag

SEQ ID NO: 59080 - DNA, 25 bp, Artificial
  Probe
ctcttcctcaatgcactctctgtac

SEQ ID NO: 59081 - DNA, 25 bp, Artificial
  Probe
ggataaggagatcaagaacagcttt

SEQ ID NO: 59082 - DNA, 25 bp, Artificial
  Probe
tctcttcctcaatgcactctctgta

SEQ ID NO: 59083 - DNA, 25 bp, Artificial
  Probe
tgtgagctggataaggagatcaaga

SEQ ID NO: 59084 - DNA, 25 bp, Artificial
  Probe
gtgtgagctggataaggagatcaag

SEQ ID NO: 59085 - DNA, 25 bp, Artificial
  Probe
aaggagatcaagaacagctttaacc

SEQ ID NO: 59086 - DNA, 25 bp, Artificial
  Probe
taaggagatcaagaacagctttaac

SEQ ID NO: 59087 - DNA, 25 bp, Artificial
  Probe
gtacgtagatgacagtaatgagaac

SEQ ID NO: 59088 - DNA, 25 bp, Artificial
  Probe
catctcttcctcaatgcactctctg

SEQ ID NO: 59089 - DNA, 25 bp, Artificial
  Probe
gataaggagatcaagaacagcttta

SEQ ID NO: 59090 - DNA, 25 bp, Artificial
  Probe
atctcttcctcaatgcactctctgt

SEQ ID NO: 59091 - DNA, 25 bp, Artificial
  Probe
cctttaacctttaccactgccactt

SEQ ID NO: 59092 - DNA, 25 bp, Artificial
  Probe
tgtacgtagatgacagtaatgagaa

SEQ ID NO: 59093 - DNA, 25 bp, Artificial
  Probe
gaatgtcaatgtgaacgacctcctg

SEQ ID NO: 59094 - DNA, 25 bp, Artificial
  Probe
ataaggagatcaagaacagctttaa

SEQ ID NO: 59095 - DNA, 25 bp, Artificial
  Probe
gatcaagaacagctttaaccctgag

SEQ ID NO: 59096 - DNA, 25 bp, Artificial
  Probe
gagatcaagaacagctttaaccctg

SEQ ID NO: 59097 - DNA, 25 bp, Artificial
  Probe
gtgaatgtcaatgtgaacgacctcc

SEQ ID NO: 59098 - DNA, 25 bp, Artificial
  Probe
tttaacctttaccactgccactttt

SEQ ID NO: 59099 - DNA, 25 bp, Artificial
  Probe
agatcaagaacagctttaaccctga

SEQ ID NO: 59100 - DNA, 25 bp, Artificial
  Probe
ggagatcaagaacagctttaaccct

SEQ ID NO: 59101 - DNA, 25 bp, Artificial
  Probe
aggagatcaagaacagctttaaccc

SEQ ID NO: 59102 - DNA, 25 bp, Artificial
  Probe
atgtcaatgtgaacgacctcctgaa

SEQ ID NO: 59103 - DNA, 25 bp, Artificial
  Probe
aatgtcaatgtgaacgacctcctga

SEQ ID NO: 59104 - DNA, 25 bp, Artificial
  Probe
tgaatgtcaatgtgaacgacctcct

SEQ ID NO: 59105 - DNA, 25 bp, Artificial
  Probe
ggtgtgagctggataaggagatcaa

SEQ ID NO: 59106 - DNA, 25 bp, Artificial
  Probe
caaagagagtggtctggacattgac

SEQ ID NO: 59107 - DNA, 25 bp, Artificial
  Probe
ttaacctttaccactgccacttttg

SEQ ID NO: 59108 - DNA, 25 bp, Artificial
  Probe
acgtagatgacagtaatgagaacgg

SEQ ID NO: 59109 - DNA, 25 bp, Artificial
  Probe
ccatctcttcctcaatgcactctct

SEQ ID NO: 59110 - DNA, 25 bp, Artificial
  Probe
gatgacagtaatgagaacgggtgtg

SEQ ID NO: 59111 - DNA, 25 bp, Artificial
  Probe
agatgacagtaatgagaacgggtgt

SEQ ID NO: 59112 - DNA, 25 bp, Artificial
  Probe
tcttcctcaatgcactctctgtacg

SEQ ID NO: 59113 - DNA, 25 bp, Artificial
  Probe
cagaaagccatctcttcctcaatgc

SEQ ID NO: 59114 - DNA, 25 bp, Artificial
  Probe
gcagaaagccatctcttcctcaatg

SEQ ID NO: 59115 - DNA, 25 bp, Artificial
  Probe
agcagaaagccatctcttcctcaat

SEQ ID NO: 59116 - DNA, 25 bp, Artificial
  Probe
taaggacactaagcaatggtatctg

SEQ ID NO: 59117 - DNA, 25 bp, Artificial
  Probe
actaaggacactaagcaatggtatc

SEQ ID NO: 59118 - DNA, 25 bp, Artificial
  Probe
gactaaggacactaagcaatggtat

SEQ ID NO: 59119 - DNA, 25 bp, Artificial
  Probe
tgaatgactaaggacactaagcaat

SEQ ID NO: 59120 - DNA, 25 bp, Artificial
  Probe
ctaaggacactaagcaatggtatct

SEQ ID NO: 59121 - DNA, 25 bp, Artificial
  Probe
gaatgactaaggacactaagcaatg

SEQ ID NO: 59122 - DNA, 25 bp, Artificial
  Probe
aatgactaaggacactaagcaatgg

SEQ ID NO: 59123 - DNA, 25 bp, Artificial
  Probe
tgactaaggacactaagcaatggta

SEQ ID NO: 59124 - DNA, 25 bp, Artificial
  Probe
actaagcaatggtatctgtcttgta

SEQ ID NO: 59125 - DNA, 25 bp, Artificial
  Probe
cactaagcaatggtatctgtcttgt

SEQ ID NO: 59126 - DNA, 25 bp, Artificial
  Probe
atgactaaggacactaagcaatggt

SEQ ID NO: 59127 - DNA, 25 bp, Artificial
  Probe
tactaccttactgagtgatgcctac

SEQ ID NO: 59128 - DNA, 25 bp, Artificial
  Probe
taagcaatggtatctgtcttgtact

SEQ ID NO: 59129 - DNA, 25 bp, Artificial
  Probe
acactaagcaatggtatctgtcttg

SEQ ID NO: 59130 - DNA, 25 bp, Artificial
  Probe
aagcaatggtatctgtcttgtactc

SEQ ID NO: 59131 - DNA, 25 bp, Artificial
  Probe
ctaagcaatggtatctgtcttgtac

SEQ ID NO: 59132 - DNA, 25 bp, Artificial
  Probe
gtactaccttactgagtgatgccta

SEQ ID NO: 59133 - DNA, 25 bp, Artificial
  Probe
atgtgaatgactaaggacactaagc

SEQ ID NO: 59134 - DNA, 25 bp, Artificial
  Probe
caatggtatctgtcttgtactcaca

SEQ ID NO: 59135 - DNA, 25 bp, Artificial
  Probe
gtgaatgactaaggacactaagcaa

SEQ ID NO: 59136 - DNA, 25 bp, Artificial
  Probe
gcaatggtatctgtcttgtactcac

SEQ ID NO: 59137 - DNA, 25 bp, Artificial
  Probe
agcaatggtatctgtcttgtactca

SEQ ID NO: 59138 - DNA, 25 bp, Artificial
  Probe
aaggacactaagcaatggtatctgt

SEQ ID NO: 59139 - DNA, 25 bp, Artificial
  Probe
ccttcctgttctaaccaataggtaa

SEQ ID NO: 59140 - DNA, 25 bp, Artificial
  Probe
ttgtactcacaggatagaagacctt

SEQ ID NO: 59141 - DNA, 25 bp, Artificial
  Probe
aatgtgaatgactaaggacactaag

SEQ ID NO: 59142 - DNA, 25 bp, Artificial
  Probe
actaccttactgagtgatgcctact

SEQ ID NO: 59143 - DNA, 25 bp, Artificial
  Probe
cttgtactcacaggatagaagacct

SEQ ID NO: 59144 - DNA, 25 bp, Artificial
  Probe
tgtgaatgactaaggacactaagca

SEQ ID NO: 59145 - DNA, 25 bp, Artificial
  Probe
tgtactcacaggatagaagaccttg

SEQ ID NO: 59146 - DNA, 25 bp, Artificial
  Probe
aatcacatccatcaccagtttaagt

SEQ ID NO: 59147 - DNA, 25 bp, Artificial
  Probe
tagattgccttcctgttctaaccaa

SEQ ID NO: 59148 - DNA, 25 bp, Artificial
  Probe
aaatcacatccatcaccagtttaag

SEQ ID NO: 59149 - DNA, 25 bp, Artificial
  Probe
tactcacaggatagaagaccttgga

SEQ ID NO: 59150 - DNA, 25 bp, Artificial
  Probe
catcaccctcctcatcgtatttaag

SEQ ID NO: 59151 - DNA, 25 bp, Artificial
  Probe
atagaagaccttggagttgtggtag

SEQ ID NO: 59152 - DNA, 25 bp, Artificial
  Probe
gatagaagaccttggagttgtggta

SEQ ID NO: 59153 - DNA, 25 bp, Artificial
  Probe
attgccttcctgttctaaccaatag

SEQ ID NO: 59154 - DNA, 25 bp, Artificial
  Probe
gattgccttcctgttctaaccaata

SEQ ID NO: 59155 - DNA, 25 bp, Artificial
  Probe
gccttcctgttctaaccaataggta

SEQ ID NO: 59156 - DNA, 25 bp, Artificial
  Probe
gtactcacaggatagaagaccttgg

SEQ ID NO: 59157 - DNA, 25 bp, Artificial
  Probe
ctcatcgtatttaagcctctgaagt

SEQ ID NO: 59158 - DNA, 25 bp, Artificial
  Probe
tcatcgtatttaagcctctgaagta

SEQ ID NO: 59159 - DNA, 25 bp, Artificial
  Probe
gtagattgccttcctgttctaacca

SEQ ID NO: 59160 - DNA, 25 bp, Artificial
  Probe
tggtagattgccttcctgttctaac

SEQ ID NO: 59161 - DNA, 25 bp, Artificial
  Probe
tctaagttaatgccacctgaaagaa

SEQ ID NO: 59162 - DNA, 25 bp, Artificial
  Probe
ttctaagttaatgccacctgaaaga

SEQ ID NO: 59163 - DNA, 25 bp, Artificial
  Probe
atgactaggctggctttatttctaa

SEQ ID NO: 59164 - DNA, 25 bp, Artificial
  Probe
aatgactaggctggctttatttcta

SEQ ID NO: 59165 - DNA, 25 bp, Artificial
  Probe
gctggctttatttctaagttaatgc

SEQ ID NO: 59166 - DNA, 25 bp, Artificial
  Probe
tgactaggctggctttatttctaag

SEQ ID NO: 59167 - DNA, 25 bp, Artificial
  Probe
gctttatttctaagttaatgccacc

SEQ ID NO: 59168 - DNA, 25 bp, Artificial
  Probe
caatgactaggctggctttatttct

SEQ ID NO: 59169 - DNA, 25 bp, Artificial
  Probe
ggctggctttatttctaagttaatg

SEQ ID NO: 59170 - DNA, 25 bp, Artificial
  Probe
actaggctggctttatttctaagtt

SEQ ID NO: 59171 - DNA, 25 bp, Artificial
  Probe
gactaggctggctttatttctaagt

SEQ ID NO: 59172 - DNA, 25 bp, Artificial
  Probe
ttatttctaagttaatgccacctga

SEQ ID NO: 59173 - DNA, 25 bp, Artificial
  Probe
aggctggctttatttctaagttaat

SEQ ID NO: 59174 - DNA, 25 bp, Artificial
  Probe
tatttctaagttaatgccacctgaa

SEQ ID NO: 59175 - DNA, 25 bp, Artificial
  Probe
ctaggctggctttatttctaagtta

SEQ ID NO: 59176 - DNA, 25 bp, Artificial
  Probe
taggctggctttatttctaagttaa

SEQ ID NO: 59177 - DNA, 25 bp, Artificial
  Probe
tttatttctaagttaatgccacctg

SEQ ID NO: 59178 - DNA, 25 bp, Artificial
  Probe
ctttatttctaagttaatgccacct

SEQ ID NO: 59179 - DNA, 25 bp, Artificial
  Probe
ggcgtctttgaataaaggaaattct

SEQ ID NO: 59180 - DNA, 25 bp, Artificial
  Probe
tttctaagttaatgccacctgaaag

SEQ ID NO: 59181 - DNA, 25 bp, Artificial
  Probe
gcgtctttgaataaaggaaattctg

SEQ ID NO: 59182 - DNA, 25 bp, Artificial
  Probe
gggcgtctttgaataaaggaaattc

SEQ ID NO: 59183 - DNA, 25 bp, Artificial
  Probe
atttctaagttaatgccacctgaaa

SEQ ID NO: 59184 - DNA, 25 bp, Artificial
  Probe
ccaatgactaggctggctttatttc

SEQ ID NO: 59185 - DNA, 25 bp, Artificial
  Probe
ccctccatacatttgttgattttga

SEQ ID NO: 59186 - DNA, 25 bp, Artificial
  Probe
cccctccatacatttgttgattttg

SEQ ID NO: 59187 - DNA, 25 bp, Artificial
  Probe
tcccctccatacatttgttgatttt

SEQ ID NO: 59188 - DNA, 25 bp, Artificial
  Probe
ttcccctccatacatttgttgattt

SEQ ID NO: 59189 - DNA, 25 bp, Artificial
  Probe
tttcccctccatacatttgttgatt

SEQ ID NO: 59190 - DNA, 25 bp, Artificial
  Probe
ttttcccctccatacatttgttgat

SEQ ID NO: 59191 - DNA, 25 bp, Artificial
  Probe
gggctattaactgatttcaagttca

SEQ ID NO: 59192 - DNA, 25 bp, Artificial
  Probe
cgtctttgaataaaggaaattctga

SEQ ID NO: 59193 - DNA, 25 bp, Artificial
  Probe
agggctattaactgatttcaagttc

SEQ ID NO: 59194 - DNA, 25 bp, Artificial
  Probe
gttttcccctccatacatttgttga

SEQ ID NO: 59195 - DNA, 25 bp, Artificial
  Probe
cgggcgtctttgaataaaggaaatt

SEQ ID NO: 59196 - DNA, 25 bp, Artificial
  Probe
ccatacatttgttgattttgaggaa

SEQ ID NO: 59197 - DNA, 25 bp, Artificial
  Probe
ctccatacatttgttgattttgagg

SEQ ID NO: 59198 - DNA, 25 bp, Artificial
  Probe
cctccatacatttgttgattttgag

SEQ ID NO: 59199 - DNA, 25 bp, Artificial
  Probe
cccaatgactaggctggctttattt

SEQ ID NO: 59200 - DNA, 25 bp, Artificial
  Probe
tgtagtcataaacatattactggtg

SEQ ID NO: 59201 - DNA, 25 bp, Artificial
  Probe
gtagtcataaacatattactggtga

SEQ ID NO: 59202 - DNA, 25 bp, Artificial
  Probe
acgggtagtgttttcagtaattaaa

SEQ ID NO: 59203 - DNA, 25 bp, Artificial
  Probe
tgttttcccctccatacatttgttg

SEQ ID NO: 59204 - DNA, 25 bp, Artificial
  Probe
gtgttttcccctccatacatttgtt

SEQ ID NO: 59205 - DNA, 25 bp, Artificial
  Probe
tccatacatttgttgattttgagga

SEQ ID NO: 59206 - DNA, 25 bp, Artificial
  Probe
aaggcgaagtgtcattgtattataa

SEQ ID NO: 59207 - DNA, 25 bp, Artificial
  Probe
aaaggcgaagtgtcattgtattata

SEQ ID NO: 59208 - DNA, 25 bp, Artificial
  Probe
taaatgttactccatcgtgttgtac

SEQ ID NO: 59209 - DNA, 25 bp, Artificial
  Probe
aggcgaagtgtcattgtattataaa

SEQ ID NO: 59210 - DNA, 25 bp, Artificial
  Probe
aaaaggcgaagtgtcattgtattat

SEQ ID NO: 59211 - DNA, 25 bp, Artificial
  Probe
atcattgactttccttttggggttt

SEQ ID NO: 59212 - DNA, 25 bp, Artificial
  Probe
aatcattgactttccttttggggtt

SEQ ID NO: 59213 - DNA, 25 bp, Artificial
  Probe
aaatcattgactttccttttggggt

SEQ ID NO: 59214 - DNA, 25 bp, Artificial
  Probe
tcattgactttccttttggggtttt

SEQ ID NO: 59215 - DNA, 25 bp, Artificial
  Probe
ctctacccaatcctggactctacaa

SEQ ID NO: 59216 - DNA, 25 bp, Artificial
  Probe
tgggagggaaattctttgtacatat

SEQ ID NO: 59217 - DNA, 25 bp, Artificial
  Probe
gtgggagggaaattctttgtacata

SEQ ID NO: 59218 - DNA, 25 bp, Artificial
  Probe
tctacccaatcctggactctacaac

SEQ ID NO: 59219 - DNA, 25 bp, Artificial
  Probe
aaaagcaattcagtagatttagagc

SEQ ID NO: 59220 - DNA, 25 bp, Artificial
  Probe
aataactttccgtacaggtaaaact

SEQ ID NO: 59221 - DNA, 25 bp, Artificial
  Probe
aaagcaattcagtagatttagagct

SEQ ID NO: 59222 - DNA, 25 bp, Artificial
  Probe
aaaatcattgactttccttttgggg

SEQ ID NO: 59223 - DNA, 25 bp, Artificial
  Probe
gggagggaaattctttgtacatatt

SEQ ID NO: 59224 - DNA, 25 bp, Artificial
  Probe
gaataactttccgtacaggtaaaac

SEQ ID NO: 59225 - DNA, 25 bp, Artificial
  Probe
ataactttccgtacaggtaaaactg

SEQ ID NO: 59226 - DNA, 25 bp, Artificial
  Probe
aaatgttactccatcgtgttgtaca

SEQ ID NO: 59227 - DNA, 25 bp, Artificial
  Probe
ggcgaagtgtcattgtattataaaa

SEQ ID NO: 59228 - DNA, 25 bp, Artificial
  Probe
gggaataactttccgtacaggtaaa

SEQ ID NO: 59229 - DNA, 25 bp, Artificial
  Probe
ctacccaatcctggactctacaacc

SEQ ID NO: 59230 - DNA, 25 bp, Artificial
  Probe
tgggaataactttccgtacaggtaa

SEQ ID NO: 59231 - DNA, 25 bp, Artificial
  Probe
gaaggttcactctccgcagttttat

SEQ ID NO: 59232 - DNA, 25 bp, Artificial
  Probe
ggtgggagggaaattctttgtacat

SEQ ID NO: 59233 - DNA, 25 bp, Artificial
  Probe
ctgggaataactttccgtacaggta

SEQ ID NO: 59234 - DNA, 25 bp, Artificial
  Probe
gcgaagtgtcattgtattataaaag

SEQ ID NO: 59235 - DNA, 25 bp, Artificial
  Probe
cctctacccaatcctggactctaca

SEQ ID NO: 59236 - DNA, 25 bp, Artificial
  Probe
ggagggaaattctttgtacatattt

SEQ ID NO: 59237 - DNA, 25 bp, Artificial
  Probe
ttactccatcgtgttgtacacaatt

SEQ ID NO: 59238 - DNA, 25 bp, Artificial
  Probe
tttgaaggttcactctccgcagttt

SEQ ID NO: 59239 - DNA, 25 bp, Artificial
  Probe
agggaaattctttgtacatatttgt

SEQ ID NO: 59240 - DNA, 25 bp, Artificial
  Probe
gttactccatcgtgttgtacacaat

SEQ ID NO: 59241 - DNA, 25 bp, Artificial
  Probe
aatgttactccatcgtgttgtacac

SEQ ID NO: 59242 - DNA, 25 bp, Artificial
  Probe
ccctctacccaatcctggactctac

SEQ ID NO: 59243 - DNA, 25 bp, Artificial
  Probe
gagggaaattctttgtacatatttg

SEQ ID NO: 59244 - DNA, 25 bp, Artificial
  Probe
tacccaatcctggactctacaaccc

SEQ ID NO: 59245 - DNA, 25 bp, Artificial
  Probe
tccctctacccaatcctggactcta

SEQ ID NO: 59246 - DNA, 25 bp, Artificial
  Probe
atgttactccatcgtgttgtacaca

SEQ ID NO: 59247 - DNA, 25 bp, Artificial
  Probe
tgttactccatcgtgttgtacacaa

SEQ ID NO: 59248 - DNA, 25 bp, Artificial
  Probe
tgaaggttcactctccgcagtttta

SEQ ID NO: 59249 - DNA, 25 bp, Artificial
  Probe
ggaataactttccgtacaggtaaaa

SEQ ID NO: 59250 - DNA, 25 bp, Artificial
  Probe
cgaagtgtcattgtattataaaagt

SEQ ID NO: 59251 - DNA, 25 bp, Artificial
  Probe
gctatgtctatggctacaattctct

SEQ ID NO: 59252 - DNA, 25 bp, Artificial
  Probe
ctaatggctatgtctatggctacaa

SEQ ID NO: 59253 - DNA, 25 bp, Artificial
  Probe
tatgtctatggctacaattctctgc

SEQ ID NO: 59254 - DNA, 25 bp, Artificial
  Probe
aatggctatgtctatggctacaatt

SEQ ID NO: 59255 - DNA, 25 bp, Artificial
  Probe
atggctatgtctatggctacaattc

SEQ ID NO: 59256 - DNA, 25 bp, Artificial
  Probe
taatggctatgtctatggctacaat

SEQ ID NO: 59257 - DNA, 25 bp, Artificial
  Probe
ggctatgtctatggctacaattctc

SEQ ID NO: 59258 - DNA, 25 bp, Artificial
  Probe
tggctatgtctatggctacaattct

SEQ ID NO: 59259 - DNA, 25 bp, Artificial
  Probe
ctatgtctatggctacaattctctg

SEQ ID NO: 59260 - DNA, 25 bp, Artificial
  Probe
cctaatggctatgtctatggctaca

SEQ ID NO: 59261 - DNA, 25 bp, Artificial
  Probe
atgtctatggctacaattctctgct

SEQ ID NO: 59262 - DNA, 25 bp, Artificial
  Probe
ttccagacatgaaccattgtaattc

SEQ ID NO: 59263 - DNA, 25 bp, Artificial
  Probe
tgtctatggctacaattctctgctt

SEQ ID NO: 59264 - DNA, 25 bp, Artificial
  Probe
aatgaactgtaaatgtaaagcgtgt

SEQ ID NO: 59265 - DNA, 25 bp, Artificial
  Probe
gctacaattctctgctttctattcg

SEQ ID NO: 59266 - DNA, 25 bp, Artificial
  Probe
ggctacaattctctgctttctattc

SEQ ID NO: 59267 - DNA, 25 bp, Artificial
  Probe
tggctacaattctctgctttctatt

SEQ ID NO: 59268 - DNA, 25 bp, Artificial
  Probe
atggctacaattctctgctttctat

SEQ ID NO: 59269 - DNA, 25 bp, Artificial
  Probe
caattctctgctttctattcgtcaa

SEQ ID NO: 59270 - DNA, 25 bp, Artificial
  Probe
acaattctctgctttctattcgtca

SEQ ID NO: 59271 - DNA, 25 bp, Artificial
  Probe
tatggctacaattctctgctttcta

SEQ ID NO: 59272 - DNA, 25 bp, Artificial
  Probe
ctatggctacaattctctgctttct

SEQ ID NO: 59273 - DNA, 25 bp, Artificial
  Probe
tctatggctacaattctctgctttc

SEQ ID NO: 59274 - DNA, 25 bp, Artificial
  Probe
atgaactgtaaatgtaaagcgtgtt

SEQ ID NO: 59275 - DNA, 25 bp, Artificial
  Probe
ttctctgctttctattcgtcaagat

SEQ ID NO: 59276 - DNA, 25 bp, Artificial
  Probe
attctctgctttctattcgtcaaga

SEQ ID NO: 59277 - DNA, 25 bp, Artificial
  Probe
gtctatggctacaattctctgcttt

SEQ ID NO: 59278 - DNA, 25 bp, Artificial
  Probe
tgagatttactaagtctgtgcttga

SEQ ID NO: 59279 - DNA, 25 bp, Artificial
  Probe
gtgagatttactaagtctgtgcttg

SEQ ID NO: 59280 - DNA, 25 bp, Artificial
  Probe
gatgataaagttgtttgcccaagaa

SEQ ID NO: 59281 - DNA, 25 bp, Artificial
  Probe
aagatgataaagttgtttgcccaag

SEQ ID NO: 59282 - DNA, 25 bp, Artificial
  Probe
tctctgctttctattcgtcaagatg

SEQ ID NO: 59283 - DNA, 25 bp, Artificial
  Probe
aattctctgctttctattcgtcaag

SEQ ID NO: 59284 - DNA, 25 bp, Artificial
  Probe
tacaattctctgctttctattcgtc

SEQ ID NO: 59285 - DNA, 25 bp, Artificial
  Probe
ctacaattctctgctttctattcgt

SEQ ID NO: 59286 - DNA, 25 bp, Artificial
  Probe
agatttactaagtctgtgcttgaga

SEQ ID NO: 59287 - DNA, 25 bp, Artificial
  Probe
tgaactgtaaatgtaaagcgtgtta

SEQ ID NO: 59288 - DNA, 25 bp, Artificial
  Probe
atgataaagttgtttgcccaagaac

SEQ ID NO: 59289 - DNA, 25 bp, Artificial
  Probe
caagatgataaagttgtttgcccaa

SEQ ID NO: 59290 - DNA, 25 bp, Artificial
  Probe
gagatttactaagtctgtgcttgag

SEQ ID NO: 59291 - DNA, 25 bp, Artificial
  Probe
tctgctttctattcgtcaagatgat

SEQ ID NO: 59292 - DNA, 25 bp, Artificial
  Probe
atttactaagtctgtgcttgagaac

SEQ ID NO: 59293 - DNA, 25 bp, Artificial
  Probe
agtgagatttactaagtctgtgctt

SEQ ID NO: 59294 - DNA, 25 bp, Artificial
  Probe
aagtgagatttactaagtctgtgct

SEQ ID NO: 59295 - DNA, 25 bp, Artificial
  Probe
tcgtcaagatgataaagttgtttgc

SEQ ID NO: 59296 - DNA, 25 bp, Artificial
  Probe
gctgactataatctgactatctcgg

SEQ ID NO: 59297 - DNA, 25 bp, Artificial
  Probe
ctactaccaagaactgaagaggaac

SEQ ID NO: 59298 - DNA, 25 bp, Artificial
  Probe
ctaccaagaactgaagaggaacatt

SEQ ID NO: 59299 - DNA, 25 bp, Artificial
  Probe
tactaccaagaactgaagaggaaca

SEQ ID NO: 59300 - DNA, 25 bp, Artificial
  Probe
actaccaagaactgaagaggaacat

SEQ ID NO: 59301 - DNA, 25 bp, Artificial
  Probe
ctgactataatctgactatctcgga

SEQ ID NO: 59302 - DNA, 25 bp, Artificial
  Probe
gctactaccaagaactgaagaggaa

SEQ ID NO: 59303 - DNA, 25 bp, Artificial
  Probe
tgactataatctgactatctcggaa

SEQ ID NO: 59304 - DNA, 25 bp, Artificial
  Probe
acacctaccatcctatgagtgaata

SEQ ID NO: 59305 - DNA, 25 bp, Artificial
  Probe
gactataatctgactatctcggaag

SEQ ID NO: 59306 - DNA, 25 bp, Artificial
  Probe
cacctaccatcctatgagtgaatat

SEQ ID NO: 59307 - DNA, 25 bp, Artificial
  Probe
actataatctgactatctcggaagt

SEQ ID NO: 59308 - DNA, 25 bp, Artificial
  Probe
gacacctaccatcctatgagtgaat

SEQ ID NO: 59309 - DNA, 25 bp, Artificial
  Probe
agctgactataatctgactatctcg

SEQ ID NO: 59310 - DNA, 25 bp, Artificial
  Probe
taccaagaactgaagaggaacattt

SEQ ID NO: 59311 - DNA, 25 bp, Artificial
  Probe
accaagaactgaagaggaacatttc

SEQ ID NO: 59312 - DNA, 25 bp, Artificial
  Probe
attcggaaccacccatttaattctt

SEQ ID NO: 59313 - DNA, 25 bp, Artificial
  Probe
ttcggaaccacccatttaattcttc

SEQ ID NO: 59314 - DNA, 25 bp, Artificial
  Probe
cattcggaaccacccatttaattct

SEQ ID NO: 59315 - DNA, 25 bp, Artificial
  Probe
cgctactaccaagaactgaagagga

SEQ ID NO: 59316 - DNA, 25 bp, Artificial
  Probe
gaaccacccatttaattcttccctg

SEQ ID NO: 59317 - DNA, 25 bp, Artificial
  Probe
acattcggaaccacccatttaattc

SEQ ID NO: 59318 - DNA, 25 bp, Artificial
  Probe
ggacacctaccatcctatgagtgaa

SEQ ID NO: 59319 - DNA, 25 bp, Artificial
  Probe
gtgaagtcacagctcgtacaacata

SEQ ID NO: 59320 - DNA, 25 bp, Artificial
  Probe
ccgctactaccaagaactgaagagg

SEQ ID NO: 59321 - DNA, 25 bp, Artificial
  Probe
gtggtggtagcatcgactatgattt

SEQ ID NO: 59322 - DNA, 25 bp, Artificial
  Probe
ctatgaagaggtttcgacaggcaat

SEQ ID NO: 59323 - DNA, 25 bp, Artificial
  Probe
aaccacccatttaattcttccctgg

SEQ ID NO: 59324 - DNA, 25 bp, Artificial
  Probe
ggtggtggtagcatcgactatgatt

SEQ ID NO: 59325 - DNA, 25 bp, Artificial
  Probe
caatggcagtagcggtctctcttac

SEQ ID NO: 59326 - DNA, 25 bp, Artificial
  Probe
gaagtgaagtcacagctcgtacaac

SEQ ID NO: 59327 - DNA, 25 bp, Artificial
  Probe
tatgaagaggtttcgacaggcaatg

SEQ ID NO: 59328 - DNA, 25 bp, Artificial
  Probe
ccacccatttaattcttccctggaa

SEQ ID NO: 59329 - DNA, 25 bp, Artificial
  Probe
ctctgaagtgaagtcacagctcgta

SEQ ID NO: 59330 - DNA, 25 bp, Artificial
  Probe
cccgctactaccaagaactgaagag

SEQ ID NO: 59331 - DNA, 25 bp, Artificial
  Probe
ctcccgctactaccaagaactgaag

SEQ ID NO: 59332 - DNA, 25 bp, Artificial
  Probe
agtgaagtcacagctcgtacaacat

SEQ ID NO: 59333 - DNA, 25 bp, Artificial
  Probe
tgaagtgaagtcacagctcgtacaa

SEQ ID NO: 59334 - DNA, 25 bp, Artificial
  Probe
cagtagcggtctctcttacaccaac

SEQ ID NO: 59335 - DNA, 25 bp, Artificial
  Probe
tctgaagtgaagtcacagctcgtac

SEQ ID NO: 59336 - DNA, 25 bp, Artificial
  Probe
accacccatttaattcttccctgga

SEQ ID NO: 59337 - DNA, 25 bp, Artificial
  Probe
aagtgaagtcacagctcgtacaaca

SEQ ID NO: 59338 - DNA, 25 bp, Artificial
  Probe
gtggtagcatcgactatgattttcc

SEQ ID NO: 59339 - DNA, 25 bp, Artificial
  Probe
ggtggtagcatcgactatgattttc

SEQ ID NO: 59340 - DNA, 25 bp, Artificial
  Probe
tcccgctactaccaagaactgaaga

SEQ ID NO: 59341 - DNA, 25 bp, Artificial
  Probe
actaccagtatagatcagagtcact

SEQ ID NO: 59342 - DNA, 25 bp, Artificial
  Probe
tatagatcagagtcactggagaagg

SEQ ID NO: 59343 - DNA, 25 bp, Artificial
  Probe
agtatagatcagagtcactggagaa

SEQ ID NO: 59344 - DNA, 25 bp, Artificial
  Probe
gtatagatcagagtcactggagaag

SEQ ID NO: 59345 - DNA, 25 bp, Artificial
  Probe
ggaggaactgcttatacactggatg

SEQ ID NO: 59346 - DNA, 25 bp, Artificial
  Probe
gattgggtattgtagagatgtggaa

SEQ ID NO: 59347 - DNA, 25 bp, Artificial
  Probe
atgattgggtattgtagagatgtgg

SEQ ID NO: 59348 - DNA, 25 bp, Artificial
  Probe
gaggaactgcttatacactggatgt

SEQ ID NO: 59349 - DNA, 25 bp, Artificial
  Probe
attgggtattgtagagatgtggaaa

SEQ ID NO: 59350 - DNA, 25 bp, Artificial
  Probe
ggctactaccagtatagatcagagt

SEQ ID NO: 59351 - DNA, 25 bp, Artificial
  Probe
gcctttgagataactatgattgggt

SEQ ID NO: 59352 - DNA, 25 bp, Artificial
  Probe
tggaggaactgcttatacactggat

SEQ ID NO: 59353 - DNA, 25 bp, Artificial
  Probe
tgattgggtattgtagagatgtgga

SEQ ID NO: 59354 - DNA, 25 bp, Artificial
  Probe
atagatcagagtcactggagaagga

SEQ ID NO: 59355 - DNA, 25 bp, Artificial
  Probe
gctactaccagtatagatcagagtc

SEQ ID NO: 59356 - DNA, 25 bp, Artificial
  Probe
aggaactgcttatacactggatgtg

SEQ ID NO: 59357 - DNA, 25 bp, Artificial
  Probe
tactaccagtatagatcagagtcac

SEQ ID NO: 59358 - DNA, 25 bp, Artificial
  Probe
tagatcagagtcactggagaaggac

SEQ ID NO: 59359 - DNA, 25 bp, Artificial
  Probe
tatgattgggtattgtagagatgtg

SEQ ID NO: 59360 - DNA, 25 bp, Artificial
  Probe
ctggaggaactgcttatacactgga

SEQ ID NO: 59361 - DNA, 25 bp, Artificial
  Probe
ctggagaaggactcatggattcaag

SEQ ID NO: 59362 - DNA, 25 bp, Artificial
  Probe
ctactaccagtatagatcagagtca

SEQ ID NO: 59363 - DNA, 25 bp, Artificial
  Probe
cctttgagataactatgattgggta

SEQ ID NO: 59364 - DNA, 25 bp, Artificial
  Probe
ctatgattgggtattgtagagatgt

SEQ ID NO: 59365 - DNA, 25 bp, Artificial
  Probe
actatgattgggtattgtagagatg

SEQ ID NO: 59366 - DNA, 25 bp, Artificial
  Probe
gagtcacctggaggaactgcttata

SEQ ID NO: 59367 - DNA, 25 bp, Artificial
  Probe
ggaactgcttatacactggatgtgg

SEQ ID NO: 59368 - DNA, 25 bp, Artificial
  Probe
acctggaggaactgcttatacactg

SEQ ID NO: 59369 - DNA, 25 bp, Artificial
  Probe
cacctggaggaactgcttatacact

SEQ ID NO: 59370 - DNA, 25 bp, Artificial
  Probe
tcacctggaggaactgcttatacac

SEQ ID NO: 59371 - DNA, 25 bp, Artificial
  Probe
gtcacctggaggaactgcttataca

SEQ ID NO: 59372 - DNA, 25 bp, Artificial
  Probe
aacaacagcaacagcagatcctaag

SEQ ID NO: 59373 - DNA, 25 bp, Artificial
  Probe
caacatatttggacgctactgagtc

SEQ ID NO: 59374 - DNA, 25 bp, Artificial
  Probe
agtcacctggaggaactgcttatac

SEQ ID NO: 59375 - DNA, 25 bp, Artificial
  Probe
actggagaaggactcatggattcaa

SEQ ID NO: 59376 - DNA, 25 bp, Artificial
  Probe
tgagataactatgattgggtattgt

SEQ ID NO: 59377 - DNA, 25 bp, Artificial
  Probe
aacatatttggacgctactgagtca

SEQ ID NO: 59378 - DNA, 25 bp, Artificial
  Probe
caacaacagcaacagcagatcctaa

SEQ ID NO: 59379 - DNA, 25 bp, Artificial
  Probe
gggctactaccagtatagatcagag

SEQ ID NO: 59380 - DNA, 25 bp, Artificial
  Probe
aactatgattgggtattgtagagat

SEQ ID NO: 59381 - DNA, 25 bp, Artificial
  Probe
tgggctactaccagtatagatcaga

SEQ ID NO: 59382 - DNA, 25 bp, Artificial
  Probe
gtgggctactaccagtatagatcag

SEQ ID NO: 59383 - DNA, 25 bp, Artificial
  Probe
gagaaggactcatggattcaagctg

SEQ ID NO: 59384 - DNA, 25 bp, Artificial
  Probe
tcactggagaaggactcatggattc

SEQ ID NO: 59385 - DNA, 25 bp, Artificial
  Probe
gaactgcttatacactggatgtggc

SEQ ID NO: 59386 - DNA, 25 bp, Artificial
  Probe
ttcagttactaccttccttgcttaa

SEQ ID NO: 59387 - DNA, 25 bp, Artificial
  Probe
ctccttgtcctactgatgatcttgt

SEQ ID NO: 59388 - DNA, 25 bp, Artificial
  Probe
cctccttgtcctactgatgatcttg

SEQ ID NO: 59389 - DNA, 25 bp, Artificial
  Probe
ataaatgctttggagatacagtgct

SEQ ID NO: 59390 - DNA, 25 bp, Artificial
  Probe
taaatgctttggagatacagtgctt

SEQ ID NO: 59391 - DNA, 25 bp, Artificial
  Probe
tcagttactaccttccttgcttaaa

SEQ ID NO: 59392 - DNA, 25 bp, Artificial
  Probe
tttcagttactaccttccttgctta

SEQ ID NO: 59393 - DNA, 25 bp, Artificial
  Probe
tataaatgctttggagatacagtgc

SEQ ID NO: 59394 - DNA, 25 bp, Artificial
  Probe
tgctgtgaacctaaataattgtcct

SEQ ID NO: 59395 - DNA, 25 bp, Artificial
  Probe
atgctgtgaacctaaataattgtcc

SEQ ID NO: 59396 - DNA, 25 bp, Artificial
  Probe
ctttcagttactaccttccttgctt

SEQ ID NO: 59397 - DNA, 25 bp, Artificial
  Probe
gctgtgaacctaaataattgtcctt

SEQ ID NO: 59398 - DNA, 25 bp, Artificial
  Probe
tccagggaagtgaactaaattaaca

SEQ ID NO: 59399 - DNA, 25 bp, Artificial
  Probe
ctccagggaagtgaactaaattaac

SEQ ID NO: 59400 - DNA, 25 bp, Artificial
  Probe
gctccagggaagtgaactaaattaa

SEQ ID NO: 59401 - DNA, 25 bp, Artificial
  Probe
ccagggaagtgaactaaattaacat

SEQ ID NO: 59402 - DNA, 25 bp, Artificial
  Probe
aaatgctttggagatacagtgcttt

SEQ ID NO: 59403 - DNA, 25 bp, Artificial
  Probe
actgttaatttgtttgaagggttct

SEQ ID NO: 59404 - DNA, 25 bp, Artificial
  Probe
tttgcctttatcaagacataaccat

SEQ ID NO: 59405 - DNA, 25 bp, Artificial
  Probe
atttgcctttatcaagacataacca

SEQ ID NO: 59406 - DNA, 25 bp, Artificial
  Probe
aactgttaatttgtttgaagggttc

SEQ ID NO: 59407 - DNA, 25 bp, Artificial
  Probe
tgctccagggaagtgaactaaatta

SEQ ID NO: 59408 - DNA, 25 bp, Artificial
  Probe
ctgttaatttgtttgaagggttctt

SEQ ID NO: 59409 - DNA, 25 bp, Artificial
  Probe
actttcagttactaccttccttgct

SEQ ID NO: 59410 - DNA, 25 bp, Artificial
  Probe
ttgcctttatcaagacataaccatg

SEQ ID NO: 59411 - DNA, 25 bp, Artificial
  Probe
tgttaatttgtttgaagggttcttt

SEQ ID NO: 59412 - DNA, 25 bp, Artificial
  Probe
caagacataaccatgttgataacca

SEQ ID NO: 59413 - DNA, 25 bp, Artificial
  Probe
tcaagacataaccatgttgataacc

SEQ ID NO: 59414 - DNA, 25 bp, Artificial
  Probe
gcctccttgtcctactgatgatctt

SEQ ID NO: 59415 - DNA, 25 bp, Artificial
  Probe
tatgctgtgaacctaaataattgtc

SEQ ID NO: 59416 - DNA, 25 bp, Artificial
  Probe
aagacataaccatgttgataaccat

SEQ ID NO: 59417 - DNA, 25 bp, Artificial
  Probe
tatttgcctttatcaagacataacc

SEQ ID NO: 59418 - DNA, 25 bp, Artificial
  Probe
gtactgaatacttatgtaggtaacc

SEQ ID NO: 59419 - DNA, 25 bp, Artificial
  Probe
ctgaatacttatgtaggtaacctca

SEQ ID NO: 59420 - DNA, 25 bp, Artificial
  Probe
actgaatacttatgtaggtaacctc

SEQ ID NO: 59421 - DNA, 25 bp, Artificial
  Probe
aatgttatttgcctttatcaagaca

SEQ ID NO: 59422 - DNA, 25 bp, Artificial
  Probe
gaacctaaataattgtccttaacca

SEQ ID NO: 59423 - DNA, 25 bp, Artificial
  Probe
tgaacctaaataattgtccttaacc

SEQ ID NO: 59424 - DNA, 25 bp, Artificial
  Probe
atttctgaaatgacctcaagatggc

SEQ ID NO: 59425 - DNA, 25 bp, Artificial
  Probe
agacataaccatgttgataaccata

SEQ ID NO: 59426 - DNA, 25 bp, Artificial
  Probe
ctgtgaacctaaataattgtcctta

SEQ ID NO: 59427 - DNA, 25 bp, Artificial
  Probe
atatgctgtgaacctaaataattgt

SEQ ID NO: 59428 - DNA, 25 bp, Artificial
  Probe
tgttccatatactgtcatttcattt

SEQ ID NO: 59429 - DNA, 25 bp, Artificial
  Probe
ctgctccagggaagtgaactaaatt

SEQ ID NO: 59430 - DNA, 25 bp, Artificial
  Probe
ttataaatgctttggagatacagtg

SEQ ID NO: 59431 - DNA, 25 bp, Artificial
  Probe
tgtgtgtgatattgacatcttcagg

SEQ ID NO: 59432 - DNA, 25 bp, Artificial
  Probe
caactagatgtgtgtgatattgaca

SEQ ID NO: 59433 - DNA, 25 bp, Artificial
  Probe
acaactagatgtgtgtgatattgac

SEQ ID NO: 59434 - DNA, 25 bp, Artificial
  Probe
ccacttcgtagctgaattatatgtt

SEQ ID NO: 59435 - DNA, 25 bp, Artificial
  Probe
gaaacttcacttactactctgcttt

SEQ ID NO: 59436 - DNA, 25 bp, Artificial
  Probe
cacttcgtagctgaattatatgttc

SEQ ID NO: 59437 - DNA, 25 bp, Artificial
  Probe
acttcgtagctgaattatatgttct

SEQ ID NO: 59438 - DNA, 25 bp, Artificial
  Probe
tacactctgattctgtaatatgtgc

SEQ ID NO: 59439 - DNA, 25 bp, Artificial
  Probe
ctgtgtgtttctcctttatgtagcg

SEQ ID NO: 59440 - DNA, 25 bp, Artificial
  Probe
acactctgattctgtaatatgtgca

SEQ ID NO: 59441 - DNA, 25 bp, Artificial
  Probe
tgaaacttcacttactactctgctt

SEQ ID NO: 59442 - DNA, 25 bp, Artificial
  Probe
ttgaaacttcacttactactctgct

SEQ ID NO: 59443 - DNA, 25 bp, Artificial
  Probe
aaacttcacttactactctgcttta

SEQ ID NO: 59444 - DNA, 25 bp, Artificial
  Probe
aacttcacttactactctgctttaa

SEQ ID NO: 59445 - DNA, 25 bp, Artificial
  Probe
tttgaaacttcacttactactctgc

SEQ ID NO: 59446 - DNA, 25 bp, Artificial
  Probe
gtgatattgacatcttcagggtctg

SEQ ID NO: 59447 - DNA, 25 bp, Artificial
  Probe
atgtgtgtgatattgacatcttcag

SEQ ID NO: 59448 - DNA, 25 bp, Artificial
  Probe
gtgtgtgatattgacatcttcaggg

SEQ ID NO: 59449 - DNA, 25 bp, Artificial
  Probe
tgtgatattgacatcttcagggtct

SEQ ID NO: 59450 - DNA, 25 bp, Artificial
  Probe
gtgtgatattgacatcttcagggtc

SEQ ID NO: 59451 - DNA, 25 bp, Artificial
  Probe
tgtgtgatattgacatcttcagggt

SEQ ID NO: 59452 - DNA, 25 bp, Artificial
  Probe
gacccacttcgtagctgaattatat

SEQ ID NO: 59453 - DNA, 25 bp, Artificial
  Probe
cccacttcgtagctgaattatatgt

SEQ ID NO: 59454 - DNA, 25 bp, Artificial
  Probe
acccacttcgtagctgaattatatg

SEQ ID NO: 59455 - DNA, 25 bp, Artificial
  Probe
acttcacttactactctgctttaag

SEQ ID NO: 59456 - DNA, 25 bp, Artificial
  Probe
cttcgtagctgaattatatgttctt

SEQ ID NO: 59457 - DNA, 25 bp, Artificial
  Probe
agacccacttcgtagctgaattata

SEQ ID NO: 59458 - DNA, 25 bp, Artificial
  Probe
cttcacttactactctgctttaaga

SEQ ID NO: 59459 - DNA, 25 bp, Artificial
  Probe
aaggaaggatgaagctcactctgta

SEQ ID NO: 59460 - DNA, 25 bp, Artificial
  Probe
aactagatgtgtgtgatattgacat

SEQ ID NO: 59461 - DNA, 25 bp, Artificial
  Probe
tactactctgctttaagaaagaccc

SEQ ID NO: 59462 - DNA, 25 bp, Artificial
  Probe
aaggatgaagctcactctgtaggtt

SEQ ID NO: 59463 - DNA, 25 bp, Artificial
  Probe
tgatattgacatcttcagggtctgc

SEQ ID NO: 59464 - DNA, 25 bp, Artificial
  Probe
aagacccacttcgtagctgaattat

SEQ ID NO: 59465 - DNA, 25 bp, Artificial
  Probe
tcacttactactctgctttaagaaa

SEQ ID NO: 59466 - DNA, 25 bp, Artificial
  Probe
ttcacttactactctgctttaagaa

SEQ ID NO: 59467 - DNA, 25 bp, Artificial
  Probe
ctactctgctttaagaaagacccac

SEQ ID NO: 59468 - DNA, 25 bp, Artificial
  Probe
aaagacccacttcgtagctgaatta

SEQ ID NO: 59469 - DNA, 25 bp, Artificial
  Probe
tttaagaaagacccacttcgtagct

SEQ ID NO: 59470 - DNA, 25 bp, Artificial
  Probe
gtacactctgattctgtaatatgtg

SEQ ID NO: 59471 - DNA, 25 bp, Artificial
  Probe
aaggactatctatagttgttgaagg

SEQ ID NO: 59472 - DNA, 25 bp, Artificial
  Probe
tactctgctttaagaaagacccact

SEQ ID NO: 59473 - DNA, 25 bp, Artificial
  Probe
actactctgctttaagaaagaccca

SEQ ID NO: 59474 - DNA, 25 bp, Artificial
  Probe
aggaaggatgaagctcactctgtag

SEQ ID NO: 59475 - DNA, 25 bp, Artificial
  Probe
tagaaaggaaggatgaagctcactc

SEQ ID NO: 59476 - DNA, 25 bp, Artificial
  Probe
cacacacacacacatagtagttaga

SEQ ID NO: 59477 - DNA, 25 bp, Artificial
  Probe
acacacacacacatagtagttagaa

SEQ ID NO: 59478 - DNA, 25 bp, Artificial
  Probe
acacacacacacacatagtagttag

SEQ ID NO: 59479 - DNA, 25 bp, Artificial
  Probe
cacacacacacacacatagtagtta

SEQ ID NO: 59480 - DNA, 25 bp, Artificial
  Probe
acacaattccttacagagcacttat

SEQ ID NO: 59481 - DNA, 25 bp, Artificial
  Probe
cacaattccttacagagcacttatt

SEQ ID NO: 59482 - DNA, 25 bp, Artificial
  Probe
cacacaattccttacagagcactta

SEQ ID NO: 59483 - DNA, 25 bp, Artificial
  Probe
cacacacacacacacacatagtagt

SEQ ID NO: 59484 - DNA, 25 bp, Artificial
  Probe
acacacacacacacacacatagtag

SEQ ID NO: 59485 - DNA, 25 bp, Artificial
  Probe
ttctccttaggtcctcacacaattc

SEQ ID NO: 59486 - DNA, 25 bp, Artificial
  Probe
acaattccttacagagcacttatta

SEQ ID NO: 59487 - DNA, 25 bp, Artificial
  Probe
cacacacacacacacacacatagta

SEQ ID NO: 59488 - DNA, 25 bp, Artificial
  Probe
acacacacacacacacatagtagtt

SEQ ID NO: 59489 - DNA, 25 bp, Artificial
  Probe
cttaggtcctcacacaattccttac

SEQ ID NO: 59490 - DNA, 25 bp, Artificial
  Probe
tcacacaattccttacagagcactt

SEQ ID NO: 59491 - DNA, 25 bp, Artificial
  Probe
atggtccatcatattaactgtcagt

SEQ ID NO: 59492 - DNA, 25 bp, Artificial
  Probe
ttaggtcctcacacaattccttaca

SEQ ID NO: 59493 - DNA, 25 bp, Artificial
  Probe
aatggtccatcatattaactgtcag

SEQ ID NO: 59494 - DNA, 25 bp, Artificial
  Probe
tggtccatcatattaactgtcagta

SEQ ID NO: 59495 - DNA, 25 bp, Artificial
  Probe
taggtcctcacacaattccttacag

SEQ ID NO: 59496 - DNA, 25 bp, Artificial
  Probe
ccttaggtcctcacacaattcctta

SEQ ID NO: 59497 - DNA, 25 bp, Artificial
  Probe
cctaatggtccatcatattaactgt

SEQ ID NO: 59498 - DNA, 25 bp, Artificial
  Probe
caattccttacagagcacttattaa

SEQ ID NO: 59499 - DNA, 25 bp, Artificial
  Probe
cacacacacacatagtagttagaaa

SEQ ID NO: 59500 - DNA, 25 bp, Artificial
  Probe
tctcaatctttctccttaggtcctc

SEQ ID NO: 59501 - DNA, 25 bp, Artificial
  Probe
ttgtctcaatctttctccttaggtc

SEQ ID NO: 59502 - DNA, 25 bp, Artificial
  Probe
cttgtctcaatctttctccttaggt

SEQ ID NO: 59503 - DNA, 25 bp, Artificial
  Probe
acttgtctcaatctttctccttagg

SEQ ID NO: 59504 - DNA, 25 bp, Artificial
  Probe
ctcacacaattccttacagagcact

SEQ ID NO: 59505 - DNA, 25 bp, Artificial
  Probe
ctcaatctttctccttaggtcctca

SEQ ID NO: 59506 - DNA, 25 bp, Artificial
  Probe
gtctcaatctttctccttaggtcct

SEQ ID NO: 59507 - DNA, 25 bp, Artificial
  Probe
ggtccatcatattaactgtcagtat

SEQ ID NO: 59508 - DNA, 25 bp, Artificial
  Probe
tgatacttgtctcaatctttctcct

SEQ ID NO: 59509 - DNA, 25 bp, Artificial
  Probe
ggtcctcacacaattccttacagag

SEQ ID NO: 59510 - DNA, 25 bp, Artificial
  Probe
tttctccttaggtcctcacacaatt

SEQ ID NO: 59511 - DNA, 25 bp, Artificial
  Probe
tcaatctttctccttaggtcctcac

SEQ ID NO: 59512 - DNA, 25 bp, Artificial
  Probe
tgtctcaatctttctccttaggtcc

SEQ ID NO: 59513 - DNA, 25 bp, Artificial
  Probe
aaatgtctcttaaactttctgggat

SEQ ID NO: 59514 - DNA, 25 bp, Artificial
  Probe
tttgtgctgtttgatacttgtctca

SEQ ID NO: 59515 - DNA, 25 bp, Artificial
  Probe
taatggtccatcatattaactgtca

SEQ ID NO: 59516 - DNA, 25 bp, Artificial
  Probe
aatctttctccttaggtcctcacac

SEQ ID NO: 59517 - DNA, 25 bp, Artificial
  Probe
caatctttctccttaggtcctcaca

SEQ ID NO: 59518 - DNA, 25 bp, Artificial
  Probe
aatgtctcttaaactttctgggatc

SEQ ID NO: 59519 - DNA, 25 bp, Artificial
  Probe
acacacacacatagtagttagaaat

SEQ ID NO: 59520 - DNA, 25 bp, Artificial
  Probe
gatacttgtctcaatctttctcctt

SEQ ID NO: 59521 - DNA, 25 bp, Artificial
  Probe
aaggtaacagtcatgtaaggtcttc

SEQ ID NO: 59522 - DNA, 25 bp, Artificial
  Probe
gaaggtaacagtcatgtaaggtctt

SEQ ID NO: 59523 - DNA, 25 bp, Artificial
  Probe
gagggagatggagataataaactgg

SEQ ID NO: 59524 - DNA, 25 bp, Artificial
  Probe
agggagatggagataataaactggt

SEQ ID NO: 59525 - DNA, 25 bp, Artificial
  Probe
gcagagggagatggagataataaac

SEQ ID NO: 59526 - DNA, 25 bp, Artificial
  Probe
gagataataaactggtaagagcacg

SEQ ID NO: 59527 - DNA, 25 bp, Artificial
  Probe
tggagataataaactggtaagagca

SEQ ID NO: 59528 - DNA, 25 bp, Artificial
  Probe
gggagatggagataataaactggta

SEQ ID NO: 59529 - DNA, 25 bp, Artificial
  Probe
agagggagatggagataataaactg

SEQ ID NO: 59530 - DNA, 25 bp, Artificial
  Probe
cagagggagatggagataataaact

SEQ ID NO: 59531 - DNA, 25 bp, Artificial
  Probe
tagttccctaattggttcttgatgt

SEQ ID NO: 59532 - DNA, 25 bp, Artificial
  Probe
agataataaactggtaagagcacgc

SEQ ID NO: 59533 - DNA, 25 bp, Artificial
  Probe
ggagataataaactggtaagagcac

SEQ ID NO: 59534 - DNA, 25 bp, Artificial
  Probe
ttcttctctgaaaggtgttagtgac

SEQ ID NO: 59535 - DNA, 25 bp, Artificial
  Probe
gttcttctctgaaaggtgttagtga

SEQ ID NO: 59536 - DNA, 25 bp, Artificial
  Probe
aggtaacagtcatgtaaggtcttcc

SEQ ID NO: 59537 - DNA, 25 bp, Artificial
  Probe
ggaaggtaacagtcatgtaaggtct

SEQ ID NO: 59538 - DNA, 25 bp, Artificial
  Probe
agttccctaattggttcttgatgtg

SEQ ID NO: 59539 - DNA, 25 bp, Artificial
  Probe
gtctagttccctaattggttcttga

SEQ ID NO: 59540 - DNA, 25 bp, Artificial
  Probe
ttccctaattggttcttgatgtgtc

SEQ ID NO: 59541 - DNA, 25 bp, Artificial
  Probe
cttctctgaaaggtgttagtgactc

SEQ ID NO: 59542 - DNA, 25 bp, Artificial
  Probe
ggcagagggagatggagataataaa

SEQ ID NO: 59543 - DNA, 25 bp, Artificial
  Probe
gttccctaattggttcttgatgtgt

SEQ ID NO: 59544 - DNA, 25 bp, Artificial
  Probe
tcttctctgaaaggtgttagtgact

SEQ ID NO: 59545 - DNA, 25 bp, Artificial
  Probe
gctggctgatacaagtcactaagtt

SEQ ID NO: 59546 - DNA, 25 bp, Artificial
  Probe
ggtctagttccctaattggttcttg

SEQ ID NO: 59547 - DNA, 25 bp, Artificial
  Probe
tggctgatacaagtcactaagttta

SEQ ID NO: 59548 - DNA, 25 bp, Artificial
  Probe
ctagttccctaattggttcttgatg

SEQ ID NO: 59549 - DNA, 25 bp, Artificial
  Probe
tctagttccctaattggttcttgat

SEQ ID NO: 59550 - DNA, 25 bp, Artificial
  Probe
ctggctgatacaagtcactaagttt

SEQ ID NO: 59551 - DNA, 25 bp, Artificial
  Probe
gataataaactggtaagagcacgcc

SEQ ID NO: 59552 - DNA, 25 bp, Artificial
  Probe
atggagataataaactggtaagagc

SEQ ID NO: 59553 - DNA, 25 bp, Artificial
  Probe
cgttcttctctgaaaggtgttagtg

SEQ ID NO: 59554 - DNA, 25 bp, Artificial
  Probe
ataataaactggtaagagcacgcct

SEQ ID NO: 59555 - DNA, 25 bp, Artificial
  Probe
ttctctgaaaggtgttagtgactcc

SEQ ID NO: 59556 - DNA, 25 bp, Artificial
  Probe
cctaattggttcttgatgtgtcaat

SEQ ID NO: 59557 - DNA, 25 bp, Artificial
  Probe
taataaactggtaagagcacgcctt

SEQ ID NO: 59558 - DNA, 25 bp, Artificial
  Probe
tccctaattggttcttgatgtgtca

SEQ ID NO: 59559 - DNA, 25 bp, Artificial
  Probe
tccgttcttctctgaaaggtgttag

SEQ ID NO: 59560 - DNA, 25 bp, Artificial
  Probe
ctccgttcttctctgaaaggtgtta

SEQ ID NO: 59561 - DNA, 25 bp, Artificial
  Probe
ggagatggagataataaactggtaa

SEQ ID NO: 59562 - DNA, 25 bp, Artificial
  Probe
ggtaacagtcatgtaaggtcttccg

SEQ ID NO: 59563 - DNA, 25 bp, Artificial
  Probe
cggaaggtaacagtcatgtaaggtc

SEQ ID NO: 59564 - DNA, 25 bp, Artificial
  Probe
aggtctagttccctaattggttctt

SEQ ID NO: 59565 - DNA, 25 bp, Artificial
  Probe
ccgttcttctctgaaaggtgttagt

SEQ ID NO: 59566 - DNA, 25 bp, Artificial
  Probe
ctatgttgctactatcagactggtt

SEQ ID NO: 59567 - DNA, 25 bp, Artificial
  Probe
tctatgttgctactatcagactggt

SEQ ID NO: 59568 - DNA, 25 bp, Artificial
  Probe
atctatgttgctactatcagactgg

SEQ ID NO: 59569 - DNA, 25 bp, Artificial
  Probe
ttatgagatggattggtacacgact

SEQ ID NO: 59570 - DNA, 25 bp, Artificial
  Probe
caatctatgttgctactatcagact

SEQ ID NO: 59571 - DNA, 25 bp, Artificial
  Probe
aatctatgttgctactatcagactg

SEQ ID NO: 59572 - DNA, 25 bp, Artificial
  Probe
tatgagatggattggtacacgactg

SEQ ID NO: 59573 - DNA, 25 bp, Artificial
  Probe
acaatctatgttgctactatcagac

SEQ ID NO: 59574 - DNA, 25 bp, Artificial
  Probe
ttatcttatttagccctggagcatc

SEQ ID NO: 59575 - DNA, 25 bp, Artificial
  Probe
tttatcttatttagccctggagcat

SEQ ID NO: 59576 - DNA, 25 bp, Artificial
  Probe
gcttatttagtgccttacctcaatg

SEQ ID NO: 59577 - DNA, 25 bp, Artificial
  Probe
ttatttagtgccttacctcaatgga

SEQ ID NO: 59578 - DNA, 25 bp, Artificial
  Probe
cttatttagtgccttacctcaatgg

SEQ ID NO: 59579 - DNA, 25 bp, Artificial
  Probe
aacataatgtcacagtacaccttaa

SEQ ID NO: 59580 - DNA, 25 bp, Artificial
  Probe
ttaacataatgtcacagtacacctt

SEQ ID NO: 59581 - DNA, 25 bp, Artificial
  Probe
ggctactgacctttgaattaacttg

SEQ ID NO: 59582 - DNA, 25 bp, Artificial
  Probe
tttgggctactgacctttgaattaa

SEQ ID NO: 59583 - DNA, 25 bp, Artificial
  Probe
tatgttgctactatcagactggttt

SEQ ID NO: 59584 - DNA, 25 bp, Artificial
  Probe
gctactgacctttgaattaacttgc

SEQ ID NO: 59585 - DNA, 25 bp, Artificial
  Probe
tatcttatttagccctggagcatca

SEQ ID NO: 59586 - DNA, 25 bp, Artificial
  Probe
atgttgctactatcagactggtttg

SEQ ID NO: 59587 - DNA, 25 bp, Artificial
  Probe
aatgggaaggcttagaattgcttat

SEQ ID NO: 59588 - DNA, 25 bp, Artificial
  Probe
gggctactgacctttgaattaactt

SEQ ID NO: 59589 - DNA, 25 bp, Artificial
  Probe
ctttgggctactgacctttgaatta

SEQ ID NO: 59590 - DNA, 25 bp, Artificial
  Probe
ttaagaaagatgtccttggatttgc

SEQ ID NO: 59591 - DNA, 25 bp, Artificial
  Probe
ctactatcagactggtttggttgtg

SEQ ID NO: 59592 - DNA, 25 bp, Artificial
  Probe
ttgggctactgacctttgaattaac

SEQ ID NO: 59593 - DNA, 25 bp, Artificial
  Probe
ggaaggcttagaattgcttatcaaa

SEQ ID NO: 59594 - DNA, 25 bp, Artificial
  Probe
atgggaaggcttagaattgcttatc

SEQ ID NO: 59595 - DNA, 25 bp, Artificial
  Probe
gaatgggaaggcttagaattgctta

SEQ ID NO: 59596 - DNA, 25 bp, Artificial
  Probe
tatttagtgccttacctcaatggag

SEQ ID NO: 59597 - DNA, 25 bp, Artificial
  Probe
tttatgagatggattggtacacgac

SEQ ID NO: 59598 - DNA, 25 bp, Artificial
  Probe
gggaaggcttagaattgcttatcaa

SEQ ID NO: 59599 - DNA, 25 bp, Artificial
  Probe
atcaaatatctcagagcatgggaag

SEQ ID NO: 59600 - DNA, 25 bp, Artificial
  Probe
tgtgaaacaaggacaatcatcattt

SEQ ID NO: 59601 - DNA, 25 bp, Artificial
  Probe
cttatttagccctggagcatcacta

SEQ ID NO: 59602 - DNA, 25 bp, Artificial
  Probe
tatcaaatatctcagagcatgggaa

SEQ ID NO: 59603 - DNA, 25 bp, Artificial
  Probe
ttatcaaatatctcagagcatggga

SEQ ID NO: 59604 - DNA, 25 bp, Artificial
  Probe
tgggctactgacctttgaattaact

SEQ ID NO: 59605 - DNA, 25 bp, Artificial
  Probe
aagaggaatgggaaggcttagaatt

SEQ ID NO: 59606 - DNA, 25 bp, Artificial
  Probe
ccttactaccattgtccaaagtttg

SEQ ID NO: 59607 - DNA, 25 bp, Artificial
  Probe
taacataatgtcacagtacacctta

SEQ ID NO: 59608 - DNA, 25 bp, Artificial
  Probe
cttatcaaatatctcagagcatggg

SEQ ID NO: 59609 - DNA, 25 bp, Artificial
  Probe
gccttactaccattgtccaaagttt

SEQ ID NO: 59610 - DNA, 25 bp, Artificial
  Probe
tactatcagactggtttggttgtga

SEQ ID NO: 59611 - DNA, 25 bp, Artificial
  Probe
aagacttgaccacttacttggataa

SEQ ID NO: 59612 - DNA, 25 bp, Artificial
  Probe
cggacagacagagaaactaaactta

SEQ ID NO: 59613 - DNA, 25 bp, Artificial
  Probe
agacagagaaactaaacttacgcta

SEQ ID NO: 59614 - DNA, 25 bp, Artificial
  Probe
gacagacagagaaactaaacttacg

SEQ ID NO: 59615 - DNA, 25 bp, Artificial
  Probe
cagacagagaaactaaacttacgct

SEQ ID NO: 59616 - DNA, 25 bp, Artificial
  Probe
ggacagacagagaaactaaacttac

SEQ ID NO: 59617 - DNA, 25 bp, Artificial
  Probe
acagacagagaaactaaacttacgc

SEQ ID NO: 59618 - DNA, 25 bp, Artificial
  Probe
gacagagaaactaaacttacgctag

SEQ ID NO: 59619 - DNA, 25 bp, Artificial
  Probe
acggacagacagagaaactaaactt

SEQ ID NO: 59620 - DNA, 25 bp, Artificial
  Probe
ccacagagaccataaaggatatgat

SEQ ID NO: 59621 - DNA, 25 bp, Artificial
  Probe
accataaaggatatgatgtttcagc

SEQ ID NO: 59622 - DNA, 25 bp, Artificial
  Probe
cacggacagacagagaaactaaact

SEQ ID NO: 59623 - DNA, 25 bp, Artificial
  Probe
tcacggacagacagagaaactaaac

SEQ ID NO: 59624 - DNA, 25 bp, Artificial
  Probe
acagagaccataaaggatatgatgt

SEQ ID NO: 59625 - DNA, 25 bp, Artificial
  Probe
cacagagaccataaaggatatgatg

SEQ ID NO: 59626 - DNA, 25 bp, Artificial
  Probe
cccacagagaccataaaggatatga

SEQ ID NO: 59627 - DNA, 25 bp, Artificial
  Probe
agacttgaccacttacttggataaa

SEQ ID NO: 59628 - DNA, 25 bp, Artificial
  Probe
gacttgaccacttacttggataaag

SEQ ID NO: 59629 - DNA, 25 bp, Artificial
  Probe
agagaaactaaacttacgctagtgt

SEQ ID NO: 59630 - DNA, 25 bp, Artificial
  Probe
acagagaaactaaacttacgctagt

SEQ ID NO: 59631 - DNA, 25 bp, Artificial
  Probe
cagagaaactaaacttacgctagtg

SEQ ID NO: 59632 - DNA, 25 bp, Artificial
  Probe
gagaaactaaacttacgctagtgtt

SEQ ID NO: 59633 - DNA, 25 bp, Artificial
  Probe
aaaggatatgatgtttcagcttctc

SEQ ID NO: 59634 - DNA, 25 bp, Artificial
  Probe
cagagaccataaaggatatgatgtt

SEQ ID NO: 59635 - DNA, 25 bp, Artificial
  Probe
caagacttgaccacttacttggata

SEQ ID NO: 59636 - DNA, 25 bp, Artificial
  Probe
tgcccacagagaccataaaggatat

SEQ ID NO: 59637 - DNA, 25 bp, Artificial
  Probe
gatatgatgtttcagcttctccgag

SEQ ID NO: 59638 - DNA, 25 bp, Artificial
  Probe
gtcacggacagacagagaaactaaa

SEQ ID NO: 59639 - DNA, 25 bp, Artificial
  Probe
agaccataaaggatatgatgtttca

SEQ ID NO: 59640 - DNA, 25 bp, Artificial
  Probe
aactaaacttacgctagtgtttgag

SEQ ID NO: 59641 - DNA, 25 bp, Artificial
  Probe
taaacttacgctagtgtttgagcat

SEQ ID NO: 59642 - DNA, 25 bp, Artificial
  Probe
gaccataaaggatatgatgtttcag

SEQ ID NO: 59643 - DNA, 25 bp, Artificial
  Probe
aaggatatgatgtttcagcttctcc

SEQ ID NO: 59644 - DNA, 25 bp, Artificial
  Probe
ccataaaggatatgatgtttcagct

SEQ ID NO: 59645 - DNA, 25 bp, Artificial
  Probe
agagaccataaaggatatgatgttt

SEQ ID NO: 59646 - DNA, 25 bp, Artificial
  Probe
aaactaaacttacgctagtgtttga

SEQ ID NO: 59647 - DNA, 25 bp, Artificial
  Probe
gaaactaaacttacgctagtgtttg

SEQ ID NO: 59648 - DNA, 25 bp, Artificial
  Probe
taaaggatatgatgtttcagcttct

SEQ ID NO: 59649 - DNA, 25 bp, Artificial
  Probe
ctaaacttacgctagtgtttgagca

SEQ ID NO: 59650 - DNA, 25 bp, Artificial
  Probe
actaaacttacgctagtgtttgagc

SEQ ID NO: 59651 - DNA, 25 bp, Artificial
  Probe
agaaactaaacttacgctagtgttt

SEQ ID NO: 59652 - DNA, 25 bp, Artificial
  Probe
gagaccataaaggatatgatgtttc

SEQ ID NO: 59653 - DNA, 25 bp, Artificial
  Probe
gcccacagagaccataaaggatatg

SEQ ID NO: 59654 - DNA, 25 bp, Artificial
  Probe
acttgaccacttacttggataaagt

SEQ ID NO: 59655 - DNA, 25 bp, Artificial
  Probe
tgaccacttacttggataaagttcc

SEQ ID NO: 59656 - DNA, 25 bp, Artificial
  Probe
gattgagaccatcttgagcgataag

SEQ ID NO: 59657 - DNA, 25 bp, Artificial
  Probe
ttatcaacaagtacgatgtggtcat

SEQ ID NO: 59658 - DNA, 25 bp, Artificial
  Probe
gttatcaacaagtacgatgtggtca

SEQ ID NO: 59659 - DNA, 25 bp, Artificial
  Probe
ggattgagaccatcttgagcgataa

SEQ ID NO: 59660 - DNA, 25 bp, Artificial
  Probe
gtggtcatcagattaaacaatgctc

SEQ ID NO: 59661 - DNA, 25 bp, Artificial
  Probe
ggtcatcagattaaacaatgctcct

SEQ ID NO: 59662 - DNA, 25 bp, Artificial
  Probe
tggtcatcagattaaacaatgctcc

SEQ ID NO: 59663 - DNA, 25 bp, Artificial
  Probe
atgtggtcatcagattaaacaatgc

SEQ ID NO: 59664 - DNA, 25 bp, Artificial
  Probe
gtcatcagattaaacaatgctcctg

SEQ ID NO: 59665 - DNA, 25 bp, Artificial
  Probe
ccatacgtctcttctatcctgagtc

SEQ ID NO: 59666 - DNA, 25 bp, Artificial
  Probe
tcatcagattaaacaatgctcctgt

SEQ ID NO: 59667 - DNA, 25 bp, Artificial
  Probe
tgtggtcatcagattaaacaatgct

SEQ ID NO: 59668 - DNA, 25 bp, Artificial
  Probe
tttgggactaaaggaagtgaagatc

SEQ ID NO: 59669 - DNA, 25 bp, Artificial
  Probe
attgagaccatcttgagcgataaga

SEQ ID NO: 59670 - DNA, 25 bp, Artificial
  Probe
catcagattaaacaatgctcctgta

SEQ ID NO: 59671 - DNA, 25 bp, Artificial
  Probe
caccatacgtctcttctatcctgag

SEQ ID NO: 59672 - DNA, 25 bp, Artificial
  Probe
ttgagaccatcttgagcgataagaa

SEQ ID NO: 59673 - DNA, 25 bp, Artificial
  Probe
atcagattaaacaatgctcctgtag

SEQ ID NO: 59674 - DNA, 25 bp, Artificial
  Probe
catacgtctcttctatcctgagtcg

SEQ ID NO: 59675 - DNA, 25 bp, Artificial
  Probe
accatacgtctcttctatcctgagt

SEQ ID NO: 59676 - DNA, 25 bp, Artificial
  Probe
aagtacgatgtggtcatcagattaa

SEQ ID NO: 59677 - DNA, 25 bp, Artificial
  Probe
caagtacgatgtggtcatcagatta

SEQ ID NO: 59678 - DNA, 25 bp, Artificial
  Probe
tgagaccatcttgagcgataagaag

SEQ ID NO: 59679 - DNA, 25 bp, Artificial
  Probe
tatcaacaagtacgatgtggtcatc

SEQ ID NO: 59680 - DNA, 25 bp, Artificial
  Probe
ccaccatacgtctcttctatcctga

SEQ ID NO: 59681 - DNA, 25 bp, Artificial
  Probe
cttgagcgataagaagcgttgacaa

SEQ ID NO: 59682 - DNA, 25 bp, Artificial
  Probe
gaggtgttatcaacaagtacgatgt

SEQ ID NO: 59683 - DNA, 25 bp, Artificial
  Probe
tgttatcaacaagtacgatgtggtc

SEQ ID NO: 59684 - DNA, 25 bp, Artificial
  Probe
aggtgttatcaacaagtacgatgtg

SEQ ID NO: 59685 - DNA, 25 bp, Artificial
  Probe
ctttgggactaaaggaagtgaagat

SEQ ID NO: 59686 - DNA, 25 bp, Artificial
  Probe
gtgttatcaacaagtacgatgtggt

SEQ ID NO: 59687 - DNA, 25 bp, Artificial
  Probe
atacgtctcttctatcctgagtcgg

SEQ ID NO: 59688 - DNA, 25 bp, Artificial
  Probe
accaccatacgtctcttctatcctg

SEQ ID NO: 59689 - DNA, 25 bp, Artificial
  Probe
ggaggtgttatcaacaagtacgatg

SEQ ID NO: 59690 - DNA, 25 bp, Artificial
  Probe
tggattgagaccatcttgagcgata

SEQ ID NO: 59691 - DNA, 25 bp, Artificial
  Probe
acaagtacgatgtggtcatcagatt

SEQ ID NO: 59692 - DNA, 25 bp, Artificial
  Probe
aacaagtacgatgtggtcatcagat

SEQ ID NO: 59693 - DNA, 25 bp, Artificial
  Probe
atcaacaagtacgatgtggtcatca

SEQ ID NO: 59694 - DNA, 25 bp, Artificial
  Probe
cctaagatagaaaacaacccagaca

SEQ ID NO: 59695 - DNA, 25 bp, Artificial
  Probe
ggtgttatcaacaagtacgatgtgg

SEQ ID NO: 59696 - DNA, 25 bp, Artificial
  Probe
ctaagatagaaaacaacccagacac

SEQ ID NO: 59697 - DNA, 25 bp, Artificial
  Probe
tcagattaaacaatgctcctgtagc

SEQ ID NO: 59698 - DNA, 25 bp, Artificial
  Probe
gaccaccatacgtctcttctatcct

SEQ ID NO: 59699 - DNA, 25 bp, Artificial
  Probe
taagatagaaaacaacccagacacg

SEQ ID NO: 59700 - DNA, 25 bp, Artificial
  Probe
ccctaagatagaaaacaacccagac

SEQ ID NO: 59701 - DNA, 25 bp, Artificial
  Probe
cttcatcttcctcattcactgtctg

SEQ ID NO: 59702 - DNA, 25 bp, Artificial
  Probe
gtcatctatgccttccacttctaag

SEQ ID NO: 59703 - DNA, 25 bp, Artificial
  Probe
tgtcatctatgccttccacttctaa

SEQ ID NO: 59704 - DNA, 25 bp, Artificial
  Probe
catctatgccttccacttctaagac

SEQ ID NO: 59705 - DNA, 25 bp, Artificial
  Probe
tcatctatgccttccacttctaaga

SEQ ID NO: 59706 - DNA, 25 bp, Artificial
  Probe
ttactgtcatctatgccttccactt

SEQ ID NO: 59707 - DNA, 25 bp, Artificial
  Probe
ctgtcatctatgccttccacttcta

SEQ ID NO: 59708 - DNA, 25 bp, Artificial
  Probe
tatcaagtagtgagcacagaatagc

SEQ ID NO: 59709 - DNA, 25 bp, Artificial
  Probe
cctatcaagtagtgagcacagaata

SEQ ID NO: 59710 - DNA, 25 bp, Artificial
  Probe
tactgtcatctatgccttccacttc

SEQ ID NO: 59711 - DNA, 25 bp, Artificial
  Probe
ccttcatcttcctcattcactgtct

SEQ ID NO: 59712 - DNA, 25 bp, Artificial
  Probe
gccaggtacgagatgaatataggaa

SEQ ID NO: 59713 - DNA, 25 bp, Artificial
  Probe
atctatgccttccacttctaagacg

SEQ ID NO: 59714 - DNA, 25 bp, Artificial
  Probe
ctatcaagtagtgagcacagaatag

SEQ ID NO: 59715 - DNA, 25 bp, Artificial
  Probe
ttaattgcctgtaggagttgagaca

SEQ ID NO: 59716 - DNA, 25 bp, Artificial
  Probe
caagcataatggcatacctgttcac

SEQ ID NO: 59717 - DNA, 25 bp, Artificial
  Probe
ttcatcttcctcattcactgtctgc

SEQ ID NO: 59718 - DNA, 25 bp, Artificial
  Probe
taatggcatacctgttcaccactat

SEQ ID NO: 59719 - DNA, 25 bp, Artificial
  Probe
ataatggcatacctgttcaccacta

SEQ ID NO: 59720 - DNA, 25 bp, Artificial
  Probe
aaatgaactcaaatgtcttctgtgc

SEQ ID NO: 59721 - DNA, 25 bp, Artificial
  Probe
tttaattgcctgtaggagttgagac

SEQ ID NO: 59722 - DNA, 25 bp, Artificial
  Probe
attatggagcaacatttgaggattg

SEQ ID NO: 59723 - DNA, 25 bp, Artificial
  Probe
catcttcctcattcactgtctgctc

SEQ ID NO: 59724 - DNA, 25 bp, Artificial
  Probe
caaatgaactcaaatgtcttctgtg

SEQ ID NO: 59725 - DNA, 25 bp, Artificial
  Probe
tcaaatgaactcaaatgtcttctgt

SEQ ID NO: 59726 - DNA, 25 bp, Artificial
  Probe
tttactgtcatctatgccttccact

SEQ ID NO: 59727 - DNA, 25 bp, Artificial
  Probe
actcaaatgaactcaaatgtcttct

SEQ ID NO: 59728 - DNA, 25 bp, Artificial
  Probe
gcaccaaggagaaacataagttact

SEQ ID NO: 59729 - DNA, 25 bp, Artificial
  Probe
aatttaaggtatcgttagttggcgg

SEQ ID NO: 59730 - DNA, 25 bp, Artificial
  Probe
actgtcatctatgccttccacttct

SEQ ID NO: 59731 - DNA, 25 bp, Artificial
  Probe
aatattatcttccaggttgctgacc

SEQ ID NO: 59732 - DNA, 25 bp, Artificial
  Probe
ctcaaatgaactcaaatgtcttctg

SEQ ID NO: 59733 - DNA, 25 bp, Artificial
  Probe
ccaggtacgagatgaatataggaaa

SEQ ID NO: 59734 - DNA, 25 bp, Artificial
  Probe
aagcataatggcatacctgttcacc

SEQ ID NO: 59735 - DNA, 25 bp, Artificial
  Probe
aacatttgaggattgtaagtgcttc

SEQ ID NO: 59736 - DNA, 25 bp, Artificial
  Probe
caacatttgaggattgtaagtgctt

SEQ ID NO: 59737 - DNA, 25 bp, Artificial
  Probe
tatggagcaacatttgaggattgta

SEQ ID NO: 59738 - DNA, 25 bp, Artificial
  Probe
atcttcctcattcactgtctgctca

SEQ ID NO: 59739 - DNA, 25 bp, Artificial
  Probe
tcatcttcctcattcactgtctgct

SEQ ID NO: 59740 - DNA, 25 bp, Artificial
  Probe
gccttcatcttcctcattcactgtc

SEQ ID NO: 59741 - DNA, 25 bp, Artificial
  Probe
gagcaacatttgaggattgtaagtg

SEQ ID NO: 59742 - DNA, 25 bp, Artificial
  Probe
tattatggagcaacatttgaggatt

SEQ ID NO: 59743 - DNA, 25 bp, Artificial
  Probe
acatttgaggattgtaagtgcttca

SEQ ID NO: 59744 - DNA, 25 bp, Artificial
  Probe
atggagcaacatttgaggattgtaa

SEQ ID NO: 59745 - DNA, 25 bp, Artificial
  Probe
ttatggagcaacatttgaggattgt

SEQ ID NO: 59746 - DNA, 25 bp, Artificial
  Probe
ttacttccttacttgtctgatgcct

SEQ ID NO: 59747 - DNA, 25 bp, Artificial
  Probe
tacttccttacttgtctgatgcctg

SEQ ID NO: 59748 - DNA, 25 bp, Artificial
  Probe
tagccatgcctatattcaaccagaa

SEQ ID NO: 59749 - DNA, 25 bp, Artificial
  Probe
gtttacttccttacttgtctgatgc

SEQ ID NO: 59750 - DNA, 25 bp, Artificial
  Probe
atagccatgcctatattcaaccaga

SEQ ID NO: 59751 - DNA, 25 bp, Artificial
  Probe
tttacttccttacttgtctgatgcc

SEQ ID NO: 59752 - DNA, 25 bp, Artificial
  Probe
tatagccatgcctatattcaaccag

SEQ ID NO: 59753 - DNA, 25 bp, Artificial
  Probe
ttatagccatgcctatattcaacca

SEQ ID NO: 59754 - DNA, 25 bp, Artificial
  Probe
cttacttgtctgatgcctggttgtc

SEQ ID NO: 59755 - DNA, 25 bp, Artificial
  Probe
agtttacttccttacttgtctgatg

SEQ ID NO: 59756 - DNA, 25 bp, Artificial
  Probe
agccatgcctatattcaaccagaat

SEQ ID NO: 59757 - DNA, 25 bp, Artificial
  Probe
ttctgtagttgatgaattgatgtaa

SEQ ID NO: 59758 - DNA, 25 bp, Artificial
  Probe
ttccttacttgtctgatgcctggtt

SEQ ID NO: 59759 - DNA, 25 bp, Artificial
  Probe
ccatgcctatattcaaccagaatac

SEQ ID NO: 59760 - DNA, 25 bp, Artificial
  Probe
gccatgcctatattcaaccagaata

SEQ ID NO: 59761 - DNA, 25 bp, Artificial
  Probe
cttccttacttgtctgatgcctggt

SEQ ID NO: 59762 - DNA, 25 bp, Artificial
  Probe
acttccttacttgtctgatgcctgg

SEQ ID NO: 59763 - DNA, 25 bp, Artificial
  Probe
catgcctatattcaaccagaatact

SEQ ID NO: 59764 - DNA, 25 bp, Artificial
  Probe
tgtggtttatagccatgcctatatt

SEQ ID NO: 59765 - DNA, 25 bp, Artificial
  Probe
tggtttatagccatgcctatattca

SEQ ID NO: 59766 - DNA, 25 bp, Artificial
  Probe
gtgtggtttatagccatgcctatat

SEQ ID NO: 59767 - DNA, 25 bp, Artificial
  Probe
gtggtttatagccatgcctatattc

SEQ ID NO: 59768 - DNA, 25 bp, Artificial
  Probe
tctgtataaaagtgaggtgtggttt

SEQ ID NO: 59769 - DNA, 25 bp, Artificial
  Probe
aaagtgaggtgtggtttatagccat

SEQ ID NO: 59770 - DNA, 25 bp, Artificial
  Probe
ttacttgtctgatgcctggttgtca

SEQ ID NO: 59771 - DNA, 25 bp, Artificial
  Probe
tccttacttgtctgatgcctggttg

SEQ ID NO: 59772 - DNA, 25 bp, Artificial
  Probe
ctccaagtgcctgttttaatgaatt

SEQ ID NO: 59773 - DNA, 25 bp, Artificial
  Probe
tttatagccatgcctatattcaacc

SEQ ID NO: 59774 - DNA, 25 bp, Artificial
  Probe
ggtttatagccatgcctatattcaa

SEQ ID NO: 59775 - DNA, 25 bp, Artificial
  Probe
atgcctatattcaaccagaatactt

SEQ ID NO: 59776 - DNA, 25 bp, Artificial
  Probe
attctgtagttgatgaattgatgta

SEQ ID NO: 59777 - DNA, 25 bp, Artificial
  Probe
tctgtagttgatgaattgatgtaaa

SEQ ID NO: 59778 - DNA, 25 bp, Artificial
  Probe
taaaagtgaggtgtggtttatagcc

SEQ ID NO: 59779 - DNA, 25 bp, Artificial
  Probe
ccttacttgtctgatgcctggttgt

SEQ ID NO: 59780 - DNA, 25 bp, Artificial
  Probe
ctctgtataaaagtgaggtgtggtt

SEQ ID NO: 59781 - DNA, 25 bp, Artificial
  Probe
cctccaagtgcctgttttaatgaat

SEQ ID NO: 59782 - DNA, 25 bp, Artificial
  Probe
ctgtataaaagtgaggtgtggttta

SEQ ID NO: 59783 - DNA, 25 bp, Artificial
  Probe
gtttatagccatgcctatattcaac

SEQ ID NO: 59784 - DNA, 25 bp, Artificial
  Probe
ggtgtggtttatagccatgcctata

SEQ ID NO: 59785 - DNA, 25 bp, Artificial
  Probe
gtactccaagtttacttccttactt

SEQ ID NO: 59786 - DNA, 25 bp, Artificial
  Probe
aagtgaggtgtggtttatagccatg

SEQ ID NO: 59787 - DNA, 25 bp, Artificial
  Probe
agaacacaagagaatgtattaaagt

SEQ ID NO: 59788 - DNA, 25 bp, Artificial
  Probe
tacttgtctgatgcctggttgtcac

SEQ ID NO: 59789 - DNA, 25 bp, Artificial
  Probe
tgtactcagacttttgaaacttcat

SEQ ID NO: 59790 - DNA, 25 bp, Artificial
  Probe
atgtactcagacttttgaaacttca

SEQ ID NO: 59791 - DNA, 25 bp, Artificial
  Probe
ctaggagataacagtggaattggac

SEQ ID NO: 59792 - DNA, 25 bp, Artificial
  Probe
ttctaggagataacagtggaattgg

SEQ ID NO: 59793 - DNA, 25 bp, Artificial
  Probe
gaggttcttctaggagataacagtg

SEQ ID NO: 59794 - DNA, 25 bp, Artificial
  Probe
tctaggagataacagtggaattgga

SEQ ID NO: 59795 - DNA, 25 bp, Artificial
  Probe
taggagataacagtggaattggact

SEQ ID NO: 59796 - DNA, 25 bp, Artificial
  Probe
gttcttctaggagataacagtggaa

SEQ ID NO: 59797 - DNA, 25 bp, Artificial
  Probe
ggaggttcttctaggagataacagt

SEQ ID NO: 59798 - DNA, 25 bp, Artificial
  Probe
tggaggttcttctaggagataacag

SEQ ID NO: 59799 - DNA, 25 bp, Artificial
  Probe
agtggaggttcttctaggagataac

SEQ ID NO: 59800 - DNA, 25 bp, Artificial
  Probe
cagtggaggttcttctaggagataa

SEQ ID NO: 59801 - DNA, 25 bp, Artificial
  Probe
ggttcttctaggagataacagtgga

SEQ ID NO: 59802 - DNA, 25 bp, Artificial
  Probe
aggttcttctaggagataacagtgg

SEQ ID NO: 59803 - DNA, 25 bp, Artificial
  Probe
gtggaggttcttctaggagataaca

SEQ ID NO: 59804 - DNA, 25 bp, Artificial
  Probe
ctaatgaagcaacaggtgacagatg

SEQ ID NO: 59805 - DNA, 25 bp, Artificial
  Probe
cttctaggagataacagtggaattg

SEQ ID NO: 59806 - DNA, 25 bp, Artificial
  Probe
tcttctaggagataacagtggaatt

SEQ ID NO: 59807 - DNA, 25 bp, Artificial
  Probe
ttcttctaggagataacagtggaat

SEQ ID NO: 59808 - DNA, 25 bp, Artificial
  Probe
aggagataacagtggaattggactc

SEQ ID NO: 59809 - DNA, 25 bp, Artificial
  Probe
ccagtggaggttcttctaggagata

SEQ ID NO: 59810 - DNA, 25 bp, Artificial
  Probe
gcaacacttaatgaaagactgaact

SEQ ID NO: 59811 - DNA, 25 bp, Artificial
  Probe
taatgaagcaacaggtgacagatgg

SEQ ID NO: 59812 - DNA, 25 bp, Artificial
  Probe
aacacttaatgaaagactgaactgg

SEQ ID NO: 59813 - DNA, 25 bp, Artificial
  Probe
ggcaacacttaatgaaagactgaac

SEQ ID NO: 59814 - DNA, 25 bp, Artificial
  Probe
acacttaatgaaagactgaactggg

SEQ ID NO: 59815 - DNA, 25 bp, Artificial
  Probe
aagactttgagtagaggttgagaga

SEQ ID NO: 59816 - DNA, 25 bp, Artificial
  Probe
caagactttgagtagaggttgagag

SEQ ID NO: 59817 - DNA, 25 bp, Artificial
  Probe
ggtagcaagtgtgagagatgaaatg

SEQ ID NO: 59818 - DNA, 25 bp, Artificial
  Probe
caacacttaatgaaagactgaactg

SEQ ID NO: 59819 - DNA, 25 bp, Artificial
  Probe
agactttgagtagaggttgagagag

SEQ ID NO: 59820 - DNA, 25 bp, Artificial
  Probe
atccaagactttgagtagaggttga

SEQ ID NO: 59821 - DNA, 25 bp, Artificial
  Probe
catccaagactttgagtagaggttg

SEQ ID NO: 59822 - DNA, 25 bp, Artificial
  Probe
cctaatgaagcaacaggtgacagat

SEQ ID NO: 59823 - DNA, 25 bp, Artificial
  Probe
ccaagactttgagtagaggttgaga

SEQ ID NO: 59824 - DNA, 25 bp, Artificial
  Probe
tccaagactttgagtagaggttgag

SEQ ID NO: 59825 - DNA, 25 bp, Artificial
  Probe
cggcaacacttaatgaaagactgaa

SEQ ID NO: 59826 - DNA, 25 bp, Artificial
  Probe
gactttgagtagaggttgagagagg

SEQ ID NO: 59827 - DNA, 25 bp, Artificial
  Probe
cacttaatgaaagactgaactgggc

SEQ ID NO: 59828 - DNA, 25 bp, Artificial
  Probe
ccatccaagactttgagtagaggtt

SEQ ID NO: 59829 - DNA, 25 bp, Artificial
  Probe
gggtagcaagtgtgagagatgaaat

SEQ ID NO: 59830 - DNA, 25 bp, Artificial
  Probe
gaccatccaagactttgagtagagg

SEQ ID NO: 59831 - DNA, 25 bp, Artificial
  Probe
aagtgtgagagatgaaatgcgtgat

SEQ ID NO: 59832 - DNA, 25 bp, Artificial
  Probe
tcggcaacacttaatgaaagactga

SEQ ID NO: 59833 - DNA, 25 bp, Artificial
  Probe
actttgagtagaggttgagagaggg

SEQ ID NO: 59834 - DNA, 25 bp, Artificial
  Probe
gtcggcaacacttaatgaaagactg

SEQ ID NO: 59835 - DNA, 25 bp, Artificial
  Probe
ggaccatccaagactttgagtagag

SEQ ID NO: 59836 - DNA, 25 bp, Artificial
  Probe
taattgtctaatgttgatagcgtgc

SEQ ID NO: 59837 - DNA, 25 bp, Artificial
  Probe
gtcagcctggtatagtaagtgaatt

SEQ ID NO: 59838 - DNA, 25 bp, Artificial
  Probe
agtcagcctggtatagtaagtgaat

SEQ ID NO: 59839 - DNA, 25 bp, Artificial
  Probe
aagtcagcctggtatagtaagtgaa

SEQ ID NO: 59840 - DNA, 25 bp, Artificial
  Probe
aattgtctaatgttgatagcgtgcc

SEQ ID NO: 59841 - DNA, 25 bp, Artificial
  Probe
ttaattgtctaatgttgatagcgtg

SEQ ID NO: 59842 - DNA, 25 bp, Artificial
  Probe
caatcggaactgttctctaagatgc

SEQ ID NO: 59843 - DNA, 25 bp, Artificial
  Probe
gcaatcggaactgttctctaagatg

SEQ ID NO: 59844 - DNA, 25 bp, Artificial
  Probe
agcaatcggaactgttctctaagat

SEQ ID NO: 59845 - DNA, 25 bp, Artificial
  Probe
caagcaatcggaactgttctctaag

SEQ ID NO: 59846 - DNA, 25 bp, Artificial
  Probe
aagcaatcggaactgttctctaaga

SEQ ID NO: 59847 - DNA, 25 bp, Artificial
  Probe
ttcaaagtcagcctggtatagtaag

SEQ ID NO: 59848 - DNA, 25 bp, Artificial
  Probe
gttcaaagtcagcctggtatagtaa

SEQ ID NO: 59849 - DNA, 25 bp, Artificial
  Probe
caaagtcagcctggtatagtaagtg

SEQ ID NO: 59850 - DNA, 25 bp, Artificial
  Probe
tcaaagtcagcctggtatagtaagt

SEQ ID NO: 59851 - DNA, 25 bp, Artificial
  Probe
agttcaaagtcagcctggtatagta

SEQ ID NO: 59852 - DNA, 25 bp, Artificial
  Probe
aaagtcagcctggtatagtaagtga

SEQ ID NO: 59853 - DNA, 25 bp, Artificial
  Probe
tatagtaagtgaattccaggacagc

SEQ ID NO: 59854 - DNA, 25 bp, Artificial
  Probe
ggtatagtaagtgaattccaggaca

SEQ ID NO: 59855 - DNA, 25 bp, Artificial
  Probe
tggtttctctgtagtttaattgtct

SEQ ID NO: 59856 - DNA, 25 bp, Artificial
  Probe
cagcctggtatagtaagtgaattcc

SEQ ID NO: 59857 - DNA, 25 bp, Artificial
  Probe
tgtatatgtgtgtgggtgctgatag

SEQ ID NO: 59858 - DNA, 25 bp, Artificial
  Probe
aatcggaactgttctctaagatgca

SEQ ID NO: 59859 - DNA, 25 bp, Artificial
  Probe
gagttcaaagtcagcctggtatagt

SEQ ID NO: 59860 - DNA, 25 bp, Artificial
  Probe
ttcattgaaattgctgtactcacat

SEQ ID NO: 59861 - DNA, 25 bp, Artificial
  Probe
tcagcctggtatagtaagtgaattc

SEQ ID NO: 59862 - DNA, 25 bp, Artificial
  Probe
gtatagtaagtgaattccaggacag

SEQ ID NO: 59863 - DNA, 25 bp, Artificial
  Probe
taatgttgatagcgtgccctttgta

SEQ ID NO: 59864 - DNA, 25 bp, Artificial
  Probe
tgagttcaaagtcagcctggtatag

SEQ ID NO: 59865 - DNA, 25 bp, Artificial
  Probe
tcattgaaattgctgtactcacata

SEQ ID NO: 59866 - DNA, 25 bp, Artificial
  Probe
gatgactgcaatcaactgtgagaac

SEQ ID NO: 59867 - DNA, 25 bp, Artificial
  Probe
atagtaagtgaattccaggacagcc

SEQ ID NO: 59868 - DNA, 25 bp, Artificial
  Probe
atgactgcaatcaactgtgagaact

SEQ ID NO: 59869 - DNA, 25 bp, Artificial
  Probe
gcaagcaatcggaactgttctctaa

SEQ ID NO: 59870 - DNA, 25 bp, Artificial
  Probe
ttgatagcgtgccctttgtatgtag

SEQ ID NO: 59871 - DNA, 25 bp, Artificial
  Probe
cattgaaattgctgtactcacataa

SEQ ID NO: 59872 - DNA, 25 bp, Artificial
  Probe
aatgttgatagcgtgccctttgtat

SEQ ID NO: 59873 - DNA, 25 bp, Artificial
  Probe
tttaattgtctaatgttgatagcgt

SEQ ID NO: 59874 - DNA, 25 bp, Artificial
  Probe
tggtatagtaagtgaattccaggac

SEQ ID NO: 59875 - DNA, 25 bp, Artificial
  Probe
gttgatagcgtgccctttgtatgta

SEQ ID NO: 59876 - DNA, 25 bp, Artificial
  Probe
gtttaattgtctaatgttgatagcg

SEQ ID NO: 59877 - DNA, 25 bp, Artificial
  Probe
agcctggtatagtaagtgaattcca

SEQ ID NO: 59878 - DNA, 25 bp, Artificial
  Probe
ctgatagcgtgccctttgtatgtag

SEQ ID NO: 59879 - DNA, 25 bp, Artificial
  Probe
gtctaatgttgatagcgtgcccttt

SEQ ID NO: 59880 - DNA, 25 bp, Artificial
  Probe
ttgaaattgctgtactcacataatt

SEQ ID NO: 59881 - DNA, 25 bp, Artificial
  Probe
ctaaccatgccatagtccatactct

SEQ ID NO: 59882 - DNA, 25 bp, Artificial
  Probe
taaccatgccatagtccatactctg

SEQ ID NO: 59883 - DNA, 25 bp, Artificial
  Probe
tatattctctttcggatgccttacc

SEQ ID NO: 59884 - DNA, 25 bp, Artificial
  Probe
ataataccagtgaacagaaacaagc

SEQ ID NO: 59885 - DNA, 25 bp, Artificial
  Probe
tggacgttctagtgataacaatgaa

SEQ ID NO: 59886 - DNA, 25 bp, Artificial
  Probe
ctggacgttctagtgataacaatga

SEQ ID NO: 59887 - DNA, 25 bp, Artificial
  Probe
ctgggtcatttcatctctatgtatg

SEQ ID NO: 59888 - DNA, 25 bp, Artificial
  Probe
tctgggtcatttcatctctatgtat

SEQ ID NO: 59889 - DNA, 25 bp, Artificial
  Probe
atctgggtcatttcatctctatgta

SEQ ID NO: 59890 - DNA, 25 bp, Artificial
  Probe
tagctggacgttctagtgataacaa

SEQ ID NO: 59891 - DNA, 25 bp, Artificial
  Probe
atattctctttcggatgccttacca

SEQ ID NO: 59892 - DNA, 25 bp, Artificial
  Probe
tgatatattctctttcggatgcctt

SEQ ID NO: 59893 - DNA, 25 bp, Artificial
  Probe
atgatatattctctttcggatgcct

SEQ ID NO: 59894 - DNA, 25 bp, Artificial
  Probe
tagtccatactctggtacacctgat

SEQ ID NO: 59895 - DNA, 25 bp, Artificial
  Probe
atagtccatactctggtacacctga

SEQ ID NO: 59896 - DNA, 25 bp, Artificial
  Probe
catagtccatactctggtacacctg

SEQ ID NO: 59897 - DNA, 25 bp, Artificial
  Probe
tggatcatagcaccagaaggatatg

SEQ ID NO: 59898 - DNA, 25 bp, Artificial
  Probe
gatctgggtcatttcatctctatgt

SEQ ID NO: 59899 - DNA, 25 bp, Artificial
  Probe
tttattgcgatggagaatgttcttt

SEQ ID NO: 59900 - DNA, 25 bp, Artificial
  Probe
actaaccatgccatagtccatactc

SEQ ID NO: 59901 - DNA, 25 bp, Artificial
  Probe
gctggacgttctagtgataacaatg

SEQ ID NO: 59902 - DNA, 25 bp, Artificial
  Probe
agctggacgttctagtgataacaat

SEQ ID NO: 59903 - DNA, 25 bp, Artificial
  Probe
cgatctgggtcatttcatctctatg

SEQ ID NO: 59904 - DNA, 25 bp, Artificial
  Probe
aatgatatattctctttcggatgcc

SEQ ID NO: 59905 - DNA, 25 bp, Artificial
  Probe
tattctctttcggatgccttaccag

SEQ ID NO: 59906 - DNA, 25 bp, Artificial
  Probe
ctccaaccaaactaaatgccatctc

SEQ ID NO: 59907 - DNA, 25 bp, Artificial
  Probe
cactaaccatgccatagtccatact

SEQ ID NO: 59908 - DNA, 25 bp, Artificial
  Probe
cgttctagtgataacaatgaaacag

SEQ ID NO: 59909 - DNA, 25 bp, Artificial
  Probe
atatattctctttcggatgccttac

SEQ ID NO: 59910 - DNA, 25 bp, Artificial
  Probe
atgaatgccactaaccatgccatag

SEQ ID NO: 59911 - DNA, 25 bp, Artificial
  Probe
taataccagtgaacagaaacaagct

SEQ ID NO: 59912 - DNA, 25 bp, Artificial
  Probe
catactctggtacacctgatgtttc

SEQ ID NO: 59913 - DNA, 25 bp, Artificial
  Probe
catgccatagtccatactctggtac

SEQ ID NO: 59914 - DNA, 25 bp, Artificial
  Probe
gatatattctctttcggatgcctta

SEQ ID NO: 59915 - DNA, 25 bp, Artificial
  Probe
ccatagtccatactctggtacacct

SEQ ID NO: 59916 - DNA, 25 bp, Artificial
  Probe
atgccatagtccatactctggtaca

SEQ ID NO: 59917 - DNA, 25 bp, Artificial
  Probe
gtgttatggtttatgaccgcaataa

SEQ ID NO: 59918 - DNA, 25 bp, Artificial
  Probe
tcgatctgggtcatttcatctctat

SEQ ID NO: 59919 - DNA, 25 bp, Artificial
  Probe
ctctttcggatgccttaccagtaaa

SEQ ID NO: 59920 - DNA, 25 bp, Artificial
  Probe
tgtgttatggtttatgaccgcaata

SEQ ID NO: 59921 - DNA, 25 bp, Artificial
  Probe
tccatactctggtacacctgatgtt

SEQ ID NO: 59922 - DNA, 25 bp, Artificial
  Probe
ccactaaccatgccatagtccatac

SEQ ID NO: 59923 - DNA, 25 bp, Artificial
  Probe
ctagctggacgttctagtgataaca

SEQ ID NO: 59924 - DNA, 25 bp, Artificial
  Probe
atactctggtacacctgatgtttcc

SEQ ID NO: 59925 - DNA, 25 bp, Artificial
  Probe
ctttgatgacagctccaatgtaatt

SEQ ID NO: 59926 - DNA, 25 bp, Artificial
  Probe
caggctctcccactccatatatata

SEQ ID NO: 59927 - DNA, 25 bp, Artificial
  Probe
aggctctcccactccatatatataa

SEQ ID NO: 59928 - DNA, 25 bp, Artificial
  Probe
ggctctcccactccatatatataat

SEQ ID NO: 59929 - DNA, 25 bp, Artificial
  Probe
tccaggctctcccactccatatata

SEQ ID NO: 59930 - DNA, 25 bp, Artificial
  Probe
ccaggctctcccactccatatatat

SEQ ID NO: 59931 - DNA, 25 bp, Artificial
  Probe
tgtataattaaagcatgtttgagtc

SEQ ID NO: 59932 - DNA, 25 bp, Artificial
  Probe
gctctcccactccatatatataata

SEQ ID NO: 59933 - DNA, 25 bp, Artificial
  Probe
ctccaggctctcccactccatatat

SEQ ID NO: 59934 - DNA, 25 bp, Artificial
  Probe
gtataattaaagcatgtttgagtct

SEQ ID NO: 59935 - DNA, 25 bp, Artificial
  Probe
ctccatgccagtaacccacctttaa

SEQ ID NO: 59936 - DNA, 25 bp, Artificial
  Probe
gtacacaactacccaagggagtagg

SEQ ID NO: 59937 - DNA, 25 bp, Artificial
  Probe
ttgtataattaaagcatgtttgagt

SEQ ID NO: 59938 - DNA, 25 bp, Artificial
  Probe
tccatgccagtaacccacctttaac

SEQ ID NO: 59939 - DNA, 25 bp, Artificial
  Probe
ccatgccagtaacccacctttaact

SEQ ID NO: 59940 - DNA, 25 bp, Artificial
  Probe
cagccctttcagttcagaaccctag

SEQ ID NO: 59941 - DNA, 25 bp, Artificial
  Probe
ccactccatatatataatacttccc

SEQ ID NO: 59942 - DNA, 25 bp, Artificial
  Probe
cccactccatatatataatacttcc

SEQ ID NO: 59943 - DNA, 25 bp, Artificial
  Probe
ggtacacaactacccaagggagtag

SEQ ID NO: 59944 - DNA, 25 bp, Artificial
  Probe
cgcaattttgtataattaaagcatg

SEQ ID NO: 59945 - DNA, 25 bp, Artificial
  Probe
ataattaaagcatgtttgagtcttt

SEQ ID NO: 59946 - DNA, 25 bp, Artificial
  Probe
tataattaaagcatgtttgagtctt

SEQ ID NO: 59947 - DNA, 25 bp, Artificial
  Probe
tctcccactccatatatataatact

SEQ ID NO: 59948 - DNA, 25 bp, Artificial
  Probe
catgactaccccgactacaagtacc

SEQ ID NO: 59949 - DNA, 25 bp, Artificial
  Probe
ctctcccactccatatatataatac

SEQ ID NO: 59950 - DNA, 25 bp, Artificial
  Probe
tacacaactacccaagggagtaggg

SEQ ID NO: 59951 - DNA, 25 bp, Artificial
  Probe
catgccagtaacccacctttaactg

SEQ ID NO: 59952 - DNA, 25 bp, Artificial
  Probe
gcgcaattttgtataattaaagcat

SEQ ID NO: 59953 - DNA, 25 bp, Artificial
  Probe
ccctttcagttcagaaccctaggaa

SEQ ID NO: 59954 - DNA, 25 bp, Artificial
  Probe
ttcagaaccctaggaaccagaatgc

SEQ ID NO: 59955 - DNA, 25 bp, Artificial
  Probe
gcaattttgtataattaaagcatgt

SEQ ID NO: 59956 - DNA, 25 bp, Artificial
  Probe
ctttcagttcagaaccctaggaacc

SEQ ID NO: 59957 - DNA, 25 bp, Artificial
  Probe
cctttcagttcagaaccctaggaac

SEQ ID NO: 59958 - DNA, 25 bp, Artificial
  Probe
taattaaagcatgtttgagtcttta

SEQ ID NO: 59959 - DNA, 25 bp, Artificial
  Probe
gttcagaaccctaggaaccagaatg

SEQ ID NO: 59960 - DNA, 25 bp, Artificial
  Probe
agttcagaaccctaggaaccagaat

SEQ ID NO: 59961 - DNA, 25 bp, Artificial
  Probe
ccccaactattcgacagcctacatg

SEQ ID NO: 59962 - DNA, 25 bp, Artificial
  Probe
tttcagttcagaaccctaggaacca

SEQ ID NO: 59963 - DNA, 25 bp, Artificial
  Probe
cagttcagaaccctaggaaccagaa

SEQ ID NO: 59964 - DNA, 25 bp, Artificial
  Probe
ttcagttcagaaccctaggaaccag

SEQ ID NO: 59965 - DNA, 25 bp, Artificial
  Probe
tcagttcagaaccctaggaaccaga

SEQ ID NO: 59966 - DNA, 25 bp, Artificial
  Probe
tagatgtgtaagccgtgacttgtta

SEQ ID NO: 59967 - DNA, 25 bp, Artificial
  Probe
aatgttagatgtgtaagccgtgact

SEQ ID NO: 59968 - DNA, 25 bp, Artificial
  Probe
atgttagatgtgtaagccgtgactt

SEQ ID NO: 59969 - DNA, 25 bp, Artificial
  Probe
ttagatgtgtaagccgtgacttgtt

SEQ ID NO: 59970 - DNA, 25 bp, Artificial
  Probe
tcttccacaaacatttagccatcta

SEQ ID NO: 59971 - DNA, 25 bp, Artificial
  Probe
atcttccacaaacatttagccatct

SEQ ID NO: 59972 - DNA, 25 bp, Artificial
  Probe
caagcaaatgttagatgtgtaagcc

SEQ ID NO: 59973 - DNA, 25 bp, Artificial
  Probe
gagtaagaccatttaagtgtgtgtt

SEQ ID NO: 59974 - DNA, 25 bp, Artificial
  Probe
cgagtaagaccatttaagtgtgtgt

SEQ ID NO: 59975 - DNA, 25 bp, Artificial
  Probe
cttccacaaacatttagccatctag

SEQ ID NO: 59976 - DNA, 25 bp, Artificial
  Probe
atgtgtaagccgtgacttgttacta

SEQ ID NO: 59977 - DNA, 25 bp, Artificial
  Probe
gttagatgtgtaagccgtgacttgt

SEQ ID NO: 59978 - DNA, 25 bp, Artificial
  Probe
tgttagatgtgtaagccgtgacttg

SEQ ID NO: 59979 - DNA, 25 bp, Artificial
  Probe
aaatgttagatgtgtaagccgtgac

SEQ ID NO: 59980 - DNA, 25 bp, Artificial
  Probe
caaatgttagatgtgtaagccgtga

SEQ ID NO: 59981 - DNA, 25 bp, Artificial
  Probe
ccgagtaagaccatttaagtgtgtg

SEQ ID NO: 59982 - DNA, 25 bp, Artificial
  Probe
gatcttccacaaacatttagccatc

SEQ ID NO: 59983 - DNA, 25 bp, Artificial
  Probe
acaagcaaatgttagatgtgtaagc

SEQ ID NO: 59984 - DNA, 25 bp, Artificial
  Probe
aggcatgtactatttacccagaaac

SEQ ID NO: 59985 - DNA, 25 bp, Artificial
  Probe
agtaagaccatttaagtgtgtgtta

SEQ ID NO: 59986 - DNA, 25 bp, Artificial
  Probe
taggcatgtactatttacccagaaa

SEQ ID NO: 59987 - DNA, 25 bp, Artificial
  Probe
aagcaaatgttagatgtgtaagccg

SEQ ID NO: 59988 - DNA, 25 bp, Artificial
  Probe
tgtgtaagccgtgacttgttactag

SEQ ID NO: 59989 - DNA, 25 bp, Artificial
  Probe
gcatgtactatttacccagaaaccc

SEQ ID NO: 59990 - DNA, 25 bp, Artificial
  Probe
ggcatgtactatttacccagaaacc

SEQ ID NO: 59991 - DNA, 25 bp, Artificial
  Probe
cccgagtaagaccatttaagtgtgt

SEQ ID NO: 59992 - DNA, 25 bp, Artificial
  Probe
gatgtgtaagccgtgacttgttact

SEQ ID NO: 59993 - DNA, 25 bp, Artificial
  Probe
agatgtgtaagccgtgacttgttac

SEQ ID NO: 59994 - DNA, 25 bp, Artificial
  Probe
atttgctattatgagttgctttcaa

SEQ ID NO: 59995 - DNA, 25 bp, Artificial
  Probe
gtaagaccatttaagtgtgtgttaa

SEQ ID NO: 59996 - DNA, 25 bp, Artificial
  Probe
gcaaatgttagatgtgtaagccgtg

SEQ ID NO: 59997 - DNA, 25 bp, Artificial
  Probe
agcaaatgttagatgtgtaagccgt

SEQ ID NO: 59998 - DNA, 25 bp, Artificial
  Probe
tagatgtcctttggtctccattgag

SEQ ID NO: 59999 - DNA, 25 bp, Artificial
  Probe
ctagatgtcctttggtctccattga

SEQ ID NO: 60000 - DNA, 25 bp, Artificial
  Probe
ccgtgacttgttactagtgttgtaa

SEQ ID NO: 60001 - DNA, 25 bp, Artificial
  Probe
taagccgtgacttgttactagtgtt

SEQ ID NO: 60002 - DNA, 25 bp, Artificial
  Probe
cgtgacttgttactagtgttgtaat

SEQ ID NO: 60003 - DNA, 25 bp, Artificial
  Probe
tatttgctattatgagttgctttca

SEQ ID NO: 60004 - DNA, 25 bp, Artificial
  Probe
attttgcttttctgacctttccttg

SEQ ID NO: 60005 - DNA, 25 bp, Artificial
  Probe
tattttgcttttctgacctttcctt

SEQ ID NO: 60006 - DNA, 25 bp, Artificial
  Probe
catattttgcttttctgacctttcc

SEQ ID NO: 60007 - DNA, 25 bp, Artificial
  Probe
ccatattttgcttttctgacctttc

SEQ ID NO: 60008 - DNA, 25 bp, Artificial
  Probe
gccatattttgcttttctgaccttt

SEQ ID NO: 60009 - DNA, 25 bp, Artificial
  Probe
ttccacaaacatttagccatctaga

SEQ ID NO: 60010 - DNA, 25 bp, Artificial
  Probe
atattttgcttttctgacctttcct

SEQ ID NO: 60011 - DNA, 25 bp, Artificial
  Probe
aacttagcctagaatcggatacatt

SEQ ID NO: 60012 - DNA, 25 bp, Artificial
  Probe
agaagagactcactgaaattgtagc

SEQ ID NO: 60013 - DNA, 25 bp, Artificial
  Probe
ggaagaagagactcactgaaattgt

SEQ ID NO: 60014 - DNA, 25 bp, Artificial
  Probe
gaaacttagcctagaatcggataca

SEQ ID NO: 60015 - DNA, 25 bp, Artificial
  Probe
ggaaacttagcctagaatcggatac

SEQ ID NO: 60016 - DNA, 25 bp, Artificial
  Probe
acttagcctagaatcggatacattt

SEQ ID NO: 60017 - DNA, 25 bp, Artificial
  Probe
aaacttagcctagaatcggatacat

SEQ ID NO: 60018 - DNA, 25 bp, Artificial
  Probe
tggaaacttagcctagaatcggata

SEQ ID NO: 60019 - DNA, 25 bp, Artificial
  Probe
gaagagactcactgaaattgtagcc

SEQ ID NO: 60020 - DNA, 25 bp, Artificial
  Probe
gattcctccacctggattgaatatt

SEQ ID NO: 60021 - DNA, 25 bp, Artificial
  Probe
atagtaaagcgtaagttgaagagtt

SEQ ID NO: 60022 - DNA, 25 bp, Artificial
  Probe
tagattcctccacctggattgaata

SEQ ID NO: 60023 - DNA, 25 bp, Artificial
  Probe
aagaagagactcactgaaattgtag

SEQ ID NO: 60024 - DNA, 25 bp, Artificial
  Probe
gaagaagagactcactgaaattgta

SEQ ID NO: 60025 - DNA, 25 bp, Artificial
  Probe
ctgaagacatctttctaaatggctg

SEQ ID NO: 60026 - DNA, 25 bp, Artificial
  Probe
attcctccacctggattgaatattg

SEQ ID NO: 60027 - DNA, 25 bp, Artificial
  Probe
ttcgctgaagacatctttctaaatg

SEQ ID NO: 60028 - DNA, 25 bp, Artificial
  Probe
gttcgctgaagacatctttctaaat

SEQ ID NO: 60029 - DNA, 25 bp, Artificial
  Probe
cggaagaagagactcactgaaattg

SEQ ID NO: 60030 - DNA, 25 bp, Artificial
  Probe
agttcgctgaagacatctttctaaa

SEQ ID NO: 60031 - DNA, 25 bp, Artificial
  Probe
agacatctttctaaatggctgtgaa

SEQ ID NO: 60032 - DNA, 25 bp, Artificial
  Probe
agattcctccacctggattgaatat

SEQ ID NO: 60033 - DNA, 25 bp, Artificial
  Probe
ttggaaacttagcctagaatcggat

SEQ ID NO: 60034 - DNA, 25 bp, Artificial
  Probe
gagttcgctgaagacatctttctaa

SEQ ID NO: 60035 - DNA, 25 bp, Artificial
  Probe
tcgctgaagacatctttctaaatgg

SEQ ID NO: 60036 - DNA, 25 bp, Artificial
  Probe
agttgaagagttactttgtgaaaca

SEQ ID NO: 60037 - DNA, 25 bp, Artificial
  Probe
gctgaagacatctttctaaatggct

SEQ ID NO: 60038 - DNA, 25 bp, Artificial
  Probe
tagtaaagcgtaagttgaagagtta

SEQ ID NO: 60039 - DNA, 25 bp, Artificial
  Probe
gaagacatctttctaaatggctgtg

SEQ ID NO: 60040 - DNA, 25 bp, Artificial
  Probe
aagacatctttctaaatggctgtga

SEQ ID NO: 60041 - DNA, 25 bp, Artificial
  Probe
tgaagacatctttctaaatggctgt

SEQ ID NO: 60042 - DNA, 25 bp, Artificial
  Probe
ctagattcctccacctggattgaat

SEQ ID NO: 60043 - DNA, 25 bp, Artificial
  Probe
tatagtaaagcgtaagttgaagagt

SEQ ID NO: 60044 - DNA, 25 bp, Artificial
  Probe
cttggaaacttagcctagaatcgga

SEQ ID NO: 60045 - DNA, 25 bp, Artificial
  Probe
gtaaagcgtaagttgaagagttact

SEQ ID NO: 60046 - DNA, 25 bp, Artificial
  Probe
agtaaagcgtaagttgaagagttac

SEQ ID NO: 60047 - DNA, 25 bp, Artificial
  Probe
aagagactcactgaaattgtagccc

SEQ ID NO: 60048 - DNA, 25 bp, Artificial
  Probe
ttcctccacctggattgaatattgg

SEQ ID NO: 60049 - DNA, 25 bp, Artificial
  Probe
gacatctttctaaatggctgtgaaa

SEQ ID NO: 60050 - DNA, 25 bp, Artificial
  Probe
cgctgaagacatctttctaaatggc

SEQ ID NO: 60051 - DNA, 25 bp, Artificial
  Probe
cgagttcgctgaagacatctttcta

SEQ ID NO: 60052 - DNA, 25 bp, Artificial
  Probe
ttatagtaaagcgtaagttgaagag

SEQ ID NO: 60053 - DNA, 25 bp, Artificial
  Probe
gcagatcaaacacaatttcagtttc

SEQ ID NO: 60054 - DNA, 25 bp, Artificial
  Probe
ataccaaggacagaaaatgccataa

SEQ ID NO: 60055 - DNA, 25 bp, Artificial
  Probe
aataccaaggacagaaaatgccata

SEQ ID NO: 60056 - DNA, 25 bp, Artificial
  Probe
gtttcagggacaatcattctctagg

SEQ ID NO: 60057 - DNA, 25 bp, Artificial
  Probe
gtgtttcagggacaatcattctcta

SEQ ID NO: 60058 - DNA, 25 bp, Artificial
  Probe
tgtttcagggacaatcattctctag

SEQ ID NO: 60059 - DNA, 25 bp, Artificial
  Probe
gacaatcattctctaggcgttggtt

SEQ ID NO: 60060 - DNA, 25 bp, Artificial
  Probe
acaatcattctctaggcgttggttg

SEQ ID NO: 60061 - DNA, 25 bp, Artificial
  Probe
tttcagggacaatcattctctaggc

SEQ ID NO: 60062 - DNA, 25 bp, Artificial
  Probe
tgtgtttcagggacaatcattctct

SEQ ID NO: 60063 - DNA, 25 bp, Artificial
  Probe
ggcaacaatggataaaggcattaaa

SEQ ID NO: 60064 - DNA, 25 bp, Artificial
  Probe
gcaacaatggataaaggcattaaat

SEQ ID NO: 60065 - DNA, 25 bp, Artificial
  Probe
caatcattctctaggcgttggttgg

SEQ ID NO: 60066 - DNA, 25 bp, Artificial
  Probe
aatcattctctaggcgttggttggt

SEQ ID NO: 60067 - DNA, 25 bp, Artificial
  Probe
cggcaacaatggataaaggcattaa

SEQ ID NO: 60068 - DNA, 25 bp, Artificial
  Probe
ggacaatcattctctaggcgttggt

SEQ ID NO: 60069 - DNA, 25 bp, Artificial
  Probe
atcattctctaggcgttggttggtg

SEQ ID NO: 60070 - DNA, 25 bp, Artificial
  Probe
tcggcaacaatggataaaggcatta

SEQ ID NO: 60071 - DNA, 25 bp, Artificial
  Probe
gataaaggcattaaataaaaccacg

SEQ ID NO: 60072 - DNA, 25 bp, Artificial
  Probe
ttcagggacaatcattctctaggcg

SEQ ID NO: 60073 - DNA, 25 bp, Artificial
  Probe
cagggacaatcattctctaggcgtt

SEQ ID NO: 60074 - DNA, 25 bp, Artificial
  Probe
ggataaaggcattaaataaaaccac

SEQ ID NO: 60075 - DNA, 25 bp, Artificial
  Probe
agggacaatcattctctaggcgttg

SEQ ID NO: 60076 - DNA, 25 bp, Artificial
  Probe
ataaaggcattaaataaaaccacgt

SEQ ID NO: 60077 - DNA, 25 bp, Artificial
  Probe
caacaatggataaaggcattaaata

SEQ ID NO: 60078 - DNA, 25 bp, Artificial
  Probe
taaaggcattaaataaaaccacgtt

SEQ ID NO: 60079 - DNA, 25 bp, Artificial
  Probe
tggataaaggcattaaataaaacca

SEQ ID NO: 60080 - DNA, 25 bp, Artificial
  Probe
ctcggcaacaatggataaaggcatt

SEQ ID NO: 60081 - DNA, 25 bp, Artificial
  Probe
tcagggacaatcattctctaggcgt

SEQ ID NO: 60082 - DNA, 25 bp, Artificial
  Probe
atggataaaggcattaaataaaacc

SEQ ID NO: 60083 - DNA, 25 bp, Artificial
  Probe
ggcattaaataaaaccacgtttaca

SEQ ID NO: 60084 - DNA, 25 bp, Artificial
  Probe
aaaggcattaaataaaaccacgttt

SEQ ID NO: 60085 - DNA, 25 bp, Artificial
  Probe
aggcattaaataaaaccacgtttac

SEQ ID NO: 60086 - DNA, 25 bp, Artificial
  Probe
acaatggataaaggcattaaataaa

SEQ ID NO: 60087 - DNA, 25 bp, Artificial
  Probe
aacaatggataaaggcattaaataa

SEQ ID NO: 60088 - DNA, 25 bp, Artificial
  Probe
aaggcattaaataaaaccacgttta

SEQ ID NO: 60089 - DNA, 25 bp, Artificial
  Probe
ctaaactgcctgtggggtagtgaat

SEQ ID NO: 60090 - DNA, 25 bp, Artificial
  Probe
taaactgcctgtggggtagtgaatg

SEQ ID NO: 60091 - DNA, 25 bp, Artificial
  Probe
gcattaaataaaaccacgtttacat

SEQ ID NO: 60092 - DNA, 25 bp, Artificial
  Probe
gttctaaactgcctgtggggtagtg

SEQ ID NO: 60093 - DNA, 25 bp, Artificial
  Probe
tctaaactgcctgtggggtagtgaa

SEQ ID NO: 60094 - DNA, 25 bp, Artificial
  Probe
ttctaaactgcctgtggggtagtga

SEQ ID NO: 60095 - DNA, 25 bp, Artificial
  Probe
tggtgtggtttggggttctaaactg

SEQ ID NO: 60096 - DNA, 25 bp, Artificial
  Probe
cattaaataaaaccacgtttacatt

SEQ ID NO: 60097 - DNA, 25 bp, Artificial
  Probe
ctctgtctcccatccgagtatttaa

SEQ ID NO: 60098 - DNA, 25 bp, Artificial
  Probe
ccatccgagtatttaaacatccatc

SEQ ID NO: 60099 - DNA, 25 bp, Artificial
  Probe
cccatccgagtatttaaacatccat

SEQ ID NO: 60100 - DNA, 25 bp, Artificial
  Probe
tctctgtctcccatccgagtattta

SEQ ID NO: 60101 - DNA, 25 bp, Artificial
  Probe
catccgagtatttaaacatccatct

SEQ ID NO: 60102 - DNA, 25 bp, Artificial
  Probe
gctgaagatgattcaagagcaactt

SEQ ID NO: 60103 - DNA, 25 bp, Artificial
  Probe
agtatttaaacatccatctcccttg

SEQ ID NO: 60104 - DNA, 25 bp, Artificial
  Probe
cgagtatttaaacatccatctccct

SEQ ID NO: 60105 - DNA, 25 bp, Artificial
  Probe
tcccatccgagtatttaaacatcca

SEQ ID NO: 60106 - DNA, 25 bp, Artificial
  Probe
tccgagtatttaaacatccatctcc

SEQ ID NO: 60107 - DNA, 25 bp, Artificial
  Probe
tctcccatccgagtatttaaacatc

SEQ ID NO: 60108 - DNA, 25 bp, Artificial
  Probe
gtctcccatccgagtatttaaacat

SEQ ID NO: 60109 - DNA, 25 bp, Artificial
  Probe
gtggatgtggtgctgaagatgattc

SEQ ID NO: 60110 - DNA, 25 bp, Artificial
  Probe
ccgagtatttaaacatccatctccc

SEQ ID NO: 60111 - DNA, 25 bp, Artificial
  Probe
ctcccatccgagtatttaaacatcc

SEQ ID NO: 60112 - DNA, 25 bp, Artificial
  Probe
ctgtctcccatccgagtatttaaac

SEQ ID NO: 60113 - DNA, 25 bp, Artificial
  Probe
tctgtctcccatccgagtatttaaa

SEQ ID NO: 60114 - DNA, 25 bp, Artificial
  Probe
ctgaagatgattcaagagcaacttg

SEQ ID NO: 60115 - DNA, 25 bp, Artificial
  Probe
gatgtggtgctgaagatgattcaag

SEQ ID NO: 60116 - DNA, 25 bp, Artificial
  Probe
gtatttaaacatccatctcccttgt

SEQ ID NO: 60117 - DNA, 25 bp, Artificial
  Probe
atccgagtatttaaacatccatctc

SEQ ID NO: 60118 - DNA, 25 bp, Artificial
  Probe
atgtggtgctgaagatgattcaaga

SEQ ID NO: 60119 - DNA, 25 bp, Artificial
  Probe
tgtctcccatccgagtatttaaaca

SEQ ID NO: 60120 - DNA, 25 bp, Artificial
  Probe
gagtatttaaacatccatctccctt

SEQ ID NO: 60121 - DNA, 25 bp, Artificial
  Probe
tgtggatgtggtgctgaagatgatt

SEQ ID NO: 60122 - DNA, 25 bp, Artificial
  Probe
ttgtggatgtggtgctgaagatgat

SEQ ID NO: 60123 - DNA, 25 bp, Artificial
  Probe
attgtggatgtggtgctgaagatga

SEQ ID NO: 60124 - DNA, 25 bp, Artificial
  Probe
cattgtggatgtggtgctgaagatg

SEQ ID NO: 60125 - DNA, 25 bp, Artificial
  Probe
ctctctgtctcccatccgagtattt

SEQ ID NO: 60126 - DNA, 25 bp, Artificial
  Probe
tgtggtgctgaagatgattcaagag

SEQ ID NO: 60127 - DNA, 25 bp, Artificial
  Probe
tgtgtaaataaaagttcccaagttg

SEQ ID NO: 60128 - DNA, 25 bp, Artificial
  Probe
ggatgtggtgctgaagatgattcaa

SEQ ID NO: 60129 - DNA, 25 bp, Artificial
  Probe
tgaagatgattcaagagcaacttgc

SEQ ID NO: 60130 - DNA, 25 bp, Artificial
  Probe
aagatgattcaagagcaacttgcag

SEQ ID NO: 60131 - DNA, 25 bp, Artificial
  Probe
gaagatgattcaagagcaacttgca

SEQ ID NO: 60132 - DNA, 25 bp, Artificial
  Probe
ttgtgtaaataaaagttcccaagtt

SEQ ID NO: 60133 - DNA, 25 bp, Artificial
  Probe
tttgtgtaaataaaagttcccaagt

SEQ ID NO: 60134 - DNA, 25 bp, Artificial
  Probe
gatgattcaagagcaacttgcagag

SEQ ID NO: 60135 - DNA, 25 bp, Artificial
  Probe
gcctttgtgtaaataaaagttccca

SEQ ID NO: 60136 - DNA, 25 bp, Artificial
  Probe
agatgattcaagagcaacttgcaga

SEQ ID NO: 60137 - DNA, 25 bp, Artificial
  Probe
gtggtgctgaagatgattcaagagc

SEQ ID NO: 60138 - DNA, 25 bp, Artificial
  Probe
tatttaaacatccatctcccttgtt

SEQ ID NO: 60139 - DNA, 25 bp, Artificial
  Probe
tgtaaataaaagttcccaagttggt

SEQ ID NO: 60140 - DNA, 25 bp, Artificial
  Probe
gtgtaaataaaagttcccaagttgg

SEQ ID NO: 60141 - DNA, 25 bp, Artificial
  Probe
attcaagagcaacttgcagaggtag

SEQ ID NO: 60142 - DNA, 25 bp, Artificial
  Probe
gcaactgaaataaatgacacacaca

SEQ ID NO: 60143 - DNA, 25 bp, Artificial
  Probe
ggttaagtgttgagaaattggtgtt

SEQ ID NO: 60144 - DNA, 25 bp, Artificial
  Probe
gtgttgagaaattggtgtttagagt

SEQ ID NO: 60145 - DNA, 25 bp, Artificial
  Probe
agtgttgagaaattggtgtttagag

SEQ ID NO: 60146 - DNA, 25 bp, Artificial
  Probe
caactgaaataaatgacacacacaa

SEQ ID NO: 60147 - DNA, 25 bp, Artificial
  Probe
atatgtatttaactagggaccgtcg

SEQ ID NO: 60148 - DNA, 25 bp, Artificial
  Probe
tgttgagaaattggtgtttagagtt

SEQ ID NO: 60149 - DNA, 25 bp, Artificial
  Probe
aagtgttgagaaattggtgtttaga

SEQ ID NO: 60150 - DNA, 25 bp, Artificial
  Probe
gagggttaagtgttgagaaattggt

SEQ ID NO: 60151 - DNA, 25 bp, Artificial
  Probe
aactgaaataaatgacacacacaag

SEQ ID NO: 60152 - DNA, 25 bp, Artificial
  Probe
gttaagtgttgagaaattggtgttt

SEQ ID NO: 60153 - DNA, 25 bp, Artificial
  Probe
actgaaataaatgacacacacaagt

SEQ ID NO: 60154 - DNA, 25 bp, Artificial
  Probe
agggttaagtgttgagaaattggtg

SEQ ID NO: 60155 - DNA, 25 bp, Artificial
  Probe
cgcaactgaaataaatgacacacac

SEQ ID NO: 60156 - DNA, 25 bp, Artificial
  Probe
tagagttagttctatccatcgagga

SEQ ID NO: 60157 - DNA, 25 bp, Artificial
  Probe
gggttaagtgttgagaaattggtgt

SEQ ID NO: 60158 - DNA, 25 bp, Artificial
  Probe
agagttagttctatccatcgaggag

SEQ ID NO: 60159 - DNA, 25 bp, Artificial
  Probe
ggagggttaagtgttgagaaattgg

SEQ ID NO: 60160 - DNA, 25 bp, Artificial
  Probe
gggagggttaagtgttgagaaattg

SEQ ID NO: 60161 - DNA, 25 bp, Artificial
  Probe
tgagaaattggtgtttagagttagt

SEQ ID NO: 60162 - DNA, 25 bp, Artificial
  Probe
ttagagttagttctatccatcgagg

SEQ ID NO: 60163 - DNA, 25 bp, Artificial
  Probe
ttgggagggttaagtgttgagaaat

SEQ ID NO: 60164 - DNA, 25 bp, Artificial
  Probe
tgggagggttaagtgttgagaaatt

SEQ ID NO: 60165 - DNA, 25 bp, Artificial
  Probe
caatatgtatttaactagggaccgt

SEQ ID NO: 60166 - DNA, 25 bp, Artificial
  Probe
gttagttctatccatcgaggaggag

SEQ ID NO: 60167 - DNA, 25 bp, Artificial
  Probe
gagttagttctatccatcgaggagg

SEQ ID NO: 60168 - DNA, 25 bp, Artificial
  Probe
ctgaaataaatgacacacacaagtg

SEQ ID NO: 60169 - DNA, 25 bp, Artificial
  Probe
tatgtatttaactagggaccgtcgg

SEQ ID NO: 60170 - DNA, 25 bp, Artificial
  Probe
tcaatatgtatttaactagggaccg

SEQ ID NO: 60171 - DNA, 25 bp, Artificial
  Probe
aatatgtatttaactagggaccgtc

SEQ ID NO: 60172 - DNA, 25 bp, Artificial
  Probe
taagtgttgagaaattggtgtttag

SEQ ID NO: 60173 - DNA, 25 bp, Artificial
  Probe
agttagttctatccatcgaggagga

SEQ ID NO: 60174 - DNA, 25 bp, Artificial
  Probe
gttgagaaattggtgtttagagtta

SEQ ID NO: 60175 - DNA, 25 bp, Artificial
  Probe
tggtgtttagagttagttctatcca

SEQ ID NO: 60176 - DNA, 25 bp, Artificial
  Probe
ttaagtgttgagaaattggtgttta

SEQ ID NO: 60177 - DNA, 25 bp, Artificial
  Probe
gttgggagggttaagtgttgagaaa

SEQ ID NO: 60178 - DNA, 25 bp, Artificial
  Probe
gagaaattggtgtttagagttagtt

SEQ ID NO: 60179 - DNA, 25 bp, Artificial
  Probe
ttgagaaattggtgtttagagttag

SEQ ID NO: 60180 - DNA, 25 bp, Artificial
  Probe
ttagttctatccatcgaggaggagg

SEQ ID NO: 60181 - DNA, 25 bp, Artificial
  Probe
agaaattggtgtttagagttagttc

SEQ ID NO: 60182 - DNA, 25 bp, Artificial
  Probe
gaaattggtgtttagagttagttct

SEQ ID NO: 60183 - DNA, 25 bp, Artificial
  Probe
tgtttagagttagttctatccatcg

SEQ ID NO: 60184 - DNA, 25 bp, Artificial
  Probe
ttggtgtttagagttagttctatcc

SEQ ID NO: 60185 - DNA, 25 bp, Artificial
  Probe
gatgttgggagggttaagtgttgag

SEQ ID NO: 60186 - DNA, 25 bp, Artificial
  Probe
ggtgtttagagttagttctatccat

SEQ ID NO: 60187 - DNA, 25 bp, Artificial
  Probe
tagtaacctcgcctctcttcttgaa

SEQ ID NO: 60188 - DNA, 25 bp, Artificial
  Probe
agtaacctcgcctctcttcttgaac

SEQ ID NO: 60189 - DNA, 25 bp, Artificial
  Probe
aacaaacaaacaaaaggaaaccaac

SEQ ID NO: 60190 - DNA, 25 bp, Artificial
  Probe
caaacaaacaaacaaaaggaaacca

SEQ ID NO: 60191 - DNA, 25 bp, Artificial
  Probe
acaaacaaacaaacaaaaggaaacc

SEQ ID NO: 60192 - DNA, 25 bp, Artificial
  Probe
aaacaaacaaacaaaaggaaaccaa

SEQ ID NO: 60193 - DNA, 25 bp, Artificial
  Probe
acaaacaaacaaacaaacaaaagga

SEQ ID NO: 60194 - DNA, 25 bp, Artificial
  Probe
aacaaaaggaaaccaaccaacaaaa

SEQ ID NO: 60195 - DNA, 25 bp, Artificial
  Probe
aaacaaaaggaaaccaaccaacaaa

SEQ ID NO: 60196 - DNA, 25 bp, Artificial
  Probe
aaacaaacaaaaggaaaccaaccaa

SEQ ID NO: 60197 - DNA, 25 bp, Artificial
  Probe
aacaaacaaacaaacaaacaaaagg

SEQ ID NO: 60198 - DNA, 25 bp, Artificial
  Probe
caaacaaaaggaaaccaaccaacaa

SEQ ID NO: 60199 - DNA, 25 bp, Artificial
  Probe
aacaaacaaaaggaaaccaaccaac

SEQ ID NO: 60200 - DNA, 25 bp, Artificial
  Probe
caaacaaacaaaaggaaaccaacca

SEQ ID NO: 60201 - DNA, 25 bp, Artificial
  Probe
acaaacaaacaaaaggaaaccaacc

SEQ ID NO: 60202 - DNA, 25 bp, Artificial
  Probe
aacaaacaaacaaacaaaaggaaac

SEQ ID NO: 60203 - DNA, 25 bp, Artificial
  Probe
caaacaaacaaacaaacaaaaggaa

SEQ ID NO: 60204 - DNA, 25 bp, Artificial
  Probe
aaacaaacaaacaaacaaaaggaaa

SEQ ID NO: 60205 - DNA, 25 bp, Artificial
  Probe
gtaacctcgcctctcttcttgaacc

SEQ ID NO: 60206 - DNA, 25 bp, Artificial
  Probe
acaaacaaaaggaaaccaaccaaca

SEQ ID NO: 60207 - DNA, 25 bp, Artificial
  Probe
aaacaaacaaacaaacaaacaaaag

SEQ ID NO: 60208 - DNA, 25 bp, Artificial
  Probe
gtgacgaaggaggaaaagaccaaaa

SEQ ID NO: 60209 - DNA, 25 bp, Artificial
  Probe
agtgacgaaggaggaaaagaccaaa

SEQ ID NO: 60210 - DNA, 25 bp, Artificial
  Probe
gagtgacgaaggaggaaaagaccaa

SEQ ID NO: 60211 - DNA, 25 bp, Artificial
  Probe
caggagtgacgaaggaggaaaagac

SEQ ID NO: 60212 - DNA, 25 bp, Artificial
  Probe
tacatcaagacatccattacggtgc

SEQ ID NO: 60213 - DNA, 25 bp, Artificial
  Probe
ggagaatgagaacaagattcactgc

SEQ ID NO: 60214 - DNA, 25 bp, Artificial
  Probe
ttccctatgacaatgttgtagtacc

SEQ ID NO: 60215 - DNA, 25 bp, Artificial
  Probe
ctatgacaatgttgtagtaccctcc

SEQ ID NO: 60216 - DNA, 25 bp, Artificial
  Probe
cctatgacaatgttgtagtaccctc

SEQ ID NO: 60217 - DNA, 25 bp, Artificial
  Probe
gagaatgagaacaagattcactgca

SEQ ID NO: 60218 - DNA, 25 bp, Artificial
  Probe
ccaacgatgagctaatcctgacatt

SEQ ID NO: 60219 - DNA, 25 bp, Artificial
  Probe
agaatgagaacaagattcactgcac

SEQ ID NO: 60220 - DNA, 25 bp, Artificial
  Probe
ttgggagaatgagaacaagattcac

SEQ ID NO: 60221 - DNA, 25 bp, Artificial
  Probe
tatgacaatgttgtagtaccctccc

SEQ ID NO: 60222 - DNA, 25 bp, Artificial
  Probe
ccctatgacaatgttgtagtaccct

SEQ ID NO: 60223 - DNA, 25 bp, Artificial
  Probe
tccctatgacaatgttgtagtaccc

SEQ ID NO: 60224 - DNA, 25 bp, Artificial
  Probe
tttccctatgacaatgttgtagtac

SEQ ID NO: 60225 - DNA, 25 bp, Artificial
  Probe
aacgatgagctaatcctgacatttg

SEQ ID NO: 60226 - DNA, 25 bp, Artificial
  Probe
caacgatgagctaatcctgacattt

SEQ ID NO: 60227 - DNA, 25 bp, Artificial
  Probe
atctgcatgattgtaccagtcatta

SEQ ID NO: 60228 - DNA, 25 bp, Artificial
  Probe
gggagaatgagaacaagattcactg

SEQ ID NO: 60229 - DNA, 25 bp, Artificial
  Probe
tctgcatgattgtaccagtcattaa

SEQ ID NO: 60230 - DNA, 25 bp, Artificial
  Probe
tgggagaatgagaacaagattcact

SEQ ID NO: 60231 - DNA, 25 bp, Artificial
  Probe
catctgcatgattgtaccagtcatt

SEQ ID NO: 60232 - DNA, 25 bp, Artificial
  Probe
gcatgattgtaccagtcattaaact

SEQ ID NO: 60233 - DNA, 25 bp, Artificial
  Probe
gaatgagaacaagattcactgcacg

SEQ ID NO: 60234 - DNA, 25 bp, Artificial
  Probe
caagaatttatgtccgggagtaaag

SEQ ID NO: 60235 - DNA, 25 bp, Artificial
  Probe
aagaatttatgtccgggagtaaagg

SEQ ID NO: 60236 - DNA, 25 bp, Artificial
  Probe
acgatgagctaatcctgacatttgg

SEQ ID NO: 60237 - DNA, 25 bp, Artificial
  Probe
acaagaatttatgtccgggagtaaa

SEQ ID NO: 60238 - DNA, 25 bp, Artificial
  Probe
gaatttatgtccgggagtaaaggtg

SEQ ID NO: 60239 - DNA, 25 bp, Artificial
  Probe
agaatttatgtccgggagtaaaggt

SEQ ID NO: 60240 - DNA, 25 bp, Artificial
  Probe
cacaagaatttatgtccgggagtaa

SEQ ID NO: 60241 - DNA, 25 bp, Artificial
  Probe
tgcatgattgtaccagtcattaaac

SEQ ID NO: 60242 - DNA, 25 bp, Artificial
  Probe
ctgcatgattgtaccagtcattaaa

SEQ ID NO: 60243 - DNA, 25 bp, Artificial
  Probe
cttgggagaatgagaacaagattca

SEQ ID NO: 60244 - DNA, 25 bp, Artificial
  Probe
acttgggagaatgagaacaagattc

SEQ ID NO: 60245 - DNA, 25 bp, Artificial
  Probe
cacttgggagaatgagaacaagatt

SEQ ID NO: 60246 - DNA, 25 bp, Artificial
  Probe
attttccctatgacaatgttgtagt

SEQ ID NO: 60247 - DNA, 25 bp, Artificial
  Probe
aatttatgtccgggagtaaaggtgg

SEQ ID NO: 60248 - DNA, 25 bp, Artificial
  Probe
aatgagaacaagattcactgcacgc

SEQ ID NO: 60249 - DNA, 25 bp, Artificial
  Probe
gcatctgcatgattgtaccagtcat

SEQ ID NO: 60250 - DNA, 25 bp, Artificial
  Probe
ctttcatggcaggatacaagttccc

SEQ ID NO: 60251 - DNA, 25 bp, Artificial
  Probe
ttttccctatgacaatgttgtagta

SEQ ID NO: 60252 - DNA, 25 bp, Artificial
  Probe
ccattttccctatgacaatgttgta

SEQ ID NO: 60253 - DNA, 25 bp, Artificial
  Probe
ttgtaccagtcattaaactgtttgg

SEQ ID NO: 60254 - DNA, 25 bp, Artificial
  Probe
gatgagctaatcctgacatttggcg

SEQ ID NO: 60255 - DNA, 25 bp, Artificial
  Probe
cgatgagctaatcctgacatttggc

SEQ ID NO: 60256 - DNA, 25 bp, Artificial
  Probe
ccacttgggagaatgagaacaagat

SEQ ID NO: 60257 - DNA, 25 bp, Artificial
  Probe
catctagtcctgctaacactcatag

SEQ ID NO: 60258 - DNA, 25 bp, Artificial
  Probe
acatctagtcctgctaacactcata

SEQ ID NO: 60259 - DNA, 25 bp, Artificial
  Probe
tagtcctgctaacactcatagacag

SEQ ID NO: 60260 - DNA, 25 bp, Artificial
  Probe
cttggttcacatctagtcctgctaa

SEQ ID NO: 60261 - DNA, 25 bp, Artificial
  Probe
ctagtcctgctaacactcatagaca

SEQ ID NO: 60262 - DNA, 25 bp, Artificial
  Probe
atctagtcctgctaacactcataga

SEQ ID NO: 60263 - DNA, 25 bp, Artificial
  Probe
cacatctagtcctgctaacactcat

SEQ ID NO: 60264 - DNA, 25 bp, Artificial
  Probe
ttcacatctagtcctgctaacactc

SEQ ID NO: 60265 - DNA, 25 bp, Artificial
  Probe
tctagtcctgctaacactcatagac

SEQ ID NO: 60266 - DNA, 25 bp, Artificial
  Probe
gttcacatctagtcctgctaacact

SEQ ID NO: 60267 - DNA, 25 bp, Artificial
  Probe
ttggttcacatctagtcctgctaac

SEQ ID NO: 60268 - DNA, 25 bp, Artificial
  Probe
ctgctaacactcatagacaggaagt

SEQ ID NO: 60269 - DNA, 25 bp, Artificial
  Probe
cagtttgtaaaggtttgaaagagca

SEQ ID NO: 60270 - DNA, 25 bp, Artificial
  Probe
cccagtttgtaaaggtttgaaagag

SEQ ID NO: 60271 - DNA, 25 bp, Artificial
  Probe
ccagtttgtaaaggtttgaaagagc

SEQ ID NO: 60272 - DNA, 25 bp, Artificial
  Probe
tttgtaaaggtttgaaagagcaagt

SEQ ID NO: 60273 - DNA, 25 bp, Artificial
  Probe
agtttgtaaaggtttgaaagagcaa

SEQ ID NO: 60274 - DNA, 25 bp, Artificial
  Probe
gtttgtaaaggtttgaaagagcaag

SEQ ID NO: 60275 - DNA, 25 bp, Artificial
  Probe
aaaggtttgaaagagcaagtaagaa

SEQ ID NO: 60276 - DNA, 25 bp, Artificial
  Probe
aaggtttgaaagagcaagtaagaat

SEQ ID NO: 60277 - DNA, 25 bp, Artificial
  Probe
tgtaaaggtttgaaagagcaagtaa

SEQ ID NO: 60278 - DNA, 25 bp, Artificial
  Probe
ttgtaaaggtttgaaagagcaagta

SEQ ID NO: 60279 - DNA, 25 bp, Artificial
  Probe
ggttcacatctagtcctgctaacac

SEQ ID NO: 60280 - DNA, 25 bp, Artificial
  Probe
tcacatctagtcctgctaacactca

SEQ ID NO: 60281 - DNA, 25 bp, Artificial
  Probe
aggtttgaaagagcaagtaagaatt

SEQ ID NO: 60282 - DNA, 25 bp, Artificial
  Probe
aaagtctgtttggttctgagtgttg

SEQ ID NO: 60283 - DNA, 25 bp, Artificial
  Probe
gaaagtctgtttggttctgagtgtt

SEQ ID NO: 60284 - DNA, 25 bp, Artificial
  Probe
taaaggtttgaaagagcaagtaaga

SEQ ID NO: 60285 - DNA, 25 bp, Artificial
  Probe
gtaaaggtttgaaagagcaagtaag

SEQ ID NO: 60286 - DNA, 25 bp, Artificial
  Probe
gtctgtttggttctgagtgttgttt

SEQ ID NO: 60287 - DNA, 25 bp, Artificial
  Probe
tggttcacatctagtcctgctaaca

SEQ ID NO: 60288 - DNA, 25 bp, Artificial
  Probe
taagtatgtgaagacccttagagga

SEQ ID NO: 60289 - DNA, 25 bp, Artificial
  Probe
ttacttcagtctagtgtgttgggaa

SEQ ID NO: 60290 - DNA, 25 bp, Artificial
  Probe
tttacttcagtctagtgtgttggga

SEQ ID NO: 60291 - DNA, 25 bp, Artificial
  Probe
aagtatgtgaagacccttagaggag

SEQ ID NO: 60292 - DNA, 25 bp, Artificial
  Probe
ccttggttcacatctagtcctgcta

SEQ ID NO: 60293 - DNA, 25 bp, Artificial
  Probe
ctagtgtgttgggaagctaagtatg

SEQ ID NO: 60294 - DNA, 25 bp, Artificial
  Probe
tctagtgtgttgggaagctaagtat

SEQ ID NO: 60295 - DNA, 25 bp, Artificial
  Probe
agtctgtttggttctgagtgttgtt

SEQ ID NO: 60296 - DNA, 25 bp, Artificial
  Probe
aagtctgtttggttctgagtgttgt

SEQ ID NO: 60297 - DNA, 25 bp, Artificial
  Probe
taatttgaggacagcctggtctaaa

SEQ ID NO: 60298 - DNA, 25 bp, Artificial
  Probe
ttaatttgaggacagcctggtctaa

SEQ ID NO: 60299 - DNA, 25 bp, Artificial
  Probe
gttgggaagctaagtatgtgaagac

SEQ ID NO: 60300 - DNA, 25 bp, Artificial
  Probe
tagtgtgttgggaagctaagtatgt

SEQ ID NO: 60301 - DNA, 25 bp, Artificial
  Probe
tgttgggaagctaagtatgtgaaga

SEQ ID NO: 60302 - DNA, 25 bp, Artificial
  Probe
atagtgctggattctgtgaagttag

SEQ ID NO: 60303 - DNA, 25 bp, Artificial
  Probe
catagtgctggattctgtgaagtta

SEQ ID NO: 60304 - DNA, 25 bp, Artificial
  Probe
tagtgctggattctgtgaagttaga

SEQ ID NO: 60305 - DNA, 25 bp, Artificial
  Probe
atacacattagtcctgtcatccaac

SEQ ID NO: 60306 - DNA, 25 bp, Artificial
  Probe
aatacacattagtcctgtcatccaa

SEQ ID NO: 60307 - DNA, 25 bp, Artificial
  Probe
agtgctggattctgtgaagttagag

SEQ ID NO: 60308 - DNA, 25 bp, Artificial
  Probe
cattagtcctgtcatccaacgagtc

SEQ ID NO: 60309 - DNA, 25 bp, Artificial
  Probe
tacacattagtcctgtcatccaacg

SEQ ID NO: 60310 - DNA, 25 bp, Artificial
  Probe
aacgagtctcacaagtgttctcatt

SEQ ID NO: 60311 - DNA, 25 bp, Artificial
  Probe
attagtcctgtcatccaacgagtct

SEQ ID NO: 60312 - DNA, 25 bp, Artificial
  Probe
gggtccattctacaattcgtcattt

SEQ ID NO: 60313 - DNA, 25 bp, Artificial
  Probe
gtgctggattctgtgaagttagagg

SEQ ID NO: 60314 - DNA, 25 bp, Artificial
  Probe
taactgtactttccatttcctctgc

SEQ ID NO: 60315 - DNA, 25 bp, Artificial
  Probe
aaatacacattagtcctgtcatcca

SEQ ID NO: 60316 - DNA, 25 bp, Artificial
  Probe
gttagaggctgcttacactgatctc

SEQ ID NO: 60317 - DNA, 25 bp, Artificial
  Probe
acgagtctcacaagtgttctcattg

SEQ ID NO: 60318 - DNA, 25 bp, Artificial
  Probe
caacgagtctcacaagtgttctcat

SEQ ID NO: 60319 - DNA, 25 bp, Artificial
  Probe
ataactgtactttccatttcctctg

SEQ ID NO: 60320 - DNA, 25 bp, Artificial
  Probe
cataactgtactttccatttcctct

SEQ ID NO: 60321 - DNA, 25 bp, Artificial
  Probe
ttagtcctgtcatccaacgagtctc

SEQ ID NO: 60322 - DNA, 25 bp, Artificial
  Probe
gccactgctgtgtttaataatatga

SEQ ID NO: 60323 - DNA, 25 bp, Artificial
  Probe
cacattagtcctgtcatccaacgag

SEQ ID NO: 60324 - DNA, 25 bp, Artificial
  Probe
acataactgtactttccatttcctc

SEQ ID NO: 60325 - DNA, 25 bp, Artificial
  Probe
gaagaagctgaggagtacaaagaag

SEQ ID NO: 60326 - DNA, 25 bp, Artificial
  Probe
taaatacacattagtcctgtcatcc

SEQ ID NO: 60327 - DNA, 25 bp, Artificial
  Probe
acattagtcctgtcatccaacgagt

SEQ ID NO: 60328 - DNA, 25 bp, Artificial
  Probe
ctttccatttcctctgcatcattag

SEQ ID NO: 60329 - DNA, 25 bp, Artificial
  Probe
tttccatttcctctgcatcattagt

SEQ ID NO: 60330 - DNA, 25 bp, Artificial
  Probe
actttccatttcctctgcatcatta

SEQ ID NO: 60331 - DNA, 25 bp, Artificial
  Probe
tactttccatttcctctgcatcatt

SEQ ID NO: 60332 - DNA, 25 bp, Artificial
  Probe
ttccatttcctctgcatcattagtc

SEQ ID NO: 60333 - DNA, 25 bp, Artificial
  Probe
aacataactgtactttccatttcct

SEQ ID NO: 60334 - DNA, 25 bp, Artificial
  Probe
ccatttcctctgcatcattagtcat

SEQ ID NO: 60335 - DNA, 25 bp, Artificial
  Probe
atccaacgagtctcacaagtgttct

SEQ ID NO: 60336 - DNA, 25 bp, Artificial
  Probe
catccaacgagtctcacaagtgttc

SEQ ID NO: 60337 - DNA, 25 bp, Artificial
  Probe
gtactttccatttcctctgcatcat

SEQ ID NO: 60338 - DNA, 25 bp, Artificial
  Probe
catttcctctgcatcattagtcata

SEQ ID NO: 60339 - DNA, 25 bp, Artificial
  Probe
acacattagtcctgtcatccaacga

SEQ ID NO: 60340 - DNA, 25 bp, Artificial
  Probe
ttagaggctgcttacactgatctcc

SEQ ID NO: 60341 - DNA, 25 bp, Artificial
  Probe
ggttagaggctgcttacactgatct

SEQ ID NO: 60342 - DNA, 25 bp, Artificial
  Probe
ctgtactttccatttcctctgcatc

SEQ ID NO: 60343 - DNA, 25 bp, Artificial
  Probe
ccactgctgtgtttaataatatgaa

SEQ ID NO: 60344 - DNA, 25 bp, Artificial
  Probe
tccatttcctctgcatcattagtca

SEQ ID NO: 60345 - DNA, 25 bp, Artificial
  Probe
ggaagaagctgaggagtacaaagaa

SEQ ID NO: 60346 - DNA, 25 bp, Artificial
  Probe
acttggaagaagctgaggagtacaa

SEQ ID NO: 60347 - DNA, 25 bp, Artificial
  Probe
gtataaggcgtctgtgaagtatagt

SEQ ID NO: 60348 - DNA, 25 bp, Artificial
  Probe
ggtataaggcgtctgtgaagtatag

SEQ ID NO: 60349 - DNA, 25 bp, Artificial
  Probe
taggtataaggcgtctgtgaagtat

SEQ ID NO: 60350 - DNA, 25 bp, Artificial
  Probe
aggtataaggcgtctgtgaagtata

SEQ ID NO: 60351 - DNA, 25 bp, Artificial
  Probe
aaggcgtctgtgaagtatagtaatt

SEQ ID NO: 60352 - DNA, 25 bp, Artificial
  Probe
taaggcgtctgtgaagtatagtaat

SEQ ID NO: 60353 - DNA, 25 bp, Artificial
  Probe
ataaggcgtctgtgaagtatagtaa

SEQ ID NO: 60354 - DNA, 25 bp, Artificial
  Probe
gtaggtataaggcgtctgtgaagta

SEQ ID NO: 60355 - DNA, 25 bp, Artificial
  Probe
ttcaataacaagtaagcctgctaca

SEQ ID NO: 60356 - DNA, 25 bp, Artificial
  Probe
tataaggcgtctgtgaagtatagta

SEQ ID NO: 60357 - DNA, 25 bp, Artificial
  Probe
cttcaataacaagtaagcctgctac

SEQ ID NO: 60358 - DNA, 25 bp, Artificial
  Probe
tcaataacaagtaagcctgctacac

SEQ ID NO: 60359 - DNA, 25 bp, Artificial
  Probe
cagtaagttgatccatccagatgag

SEQ ID NO: 60360 - DNA, 25 bp, Artificial
  Probe
gagtaggtataaggcgtctgtgaag

SEQ ID NO: 60361 - DNA, 25 bp, Artificial
  Probe
aataacaagtaagcctgctacactg

SEQ ID NO: 60362 - DNA, 25 bp, Artificial
  Probe
caataacaagtaagcctgctacact

SEQ ID NO: 60363 - DNA, 25 bp, Artificial
  Probe
aaccagtaagttgatccatccagat

SEQ ID NO: 60364 - DNA, 25 bp, Artificial
  Probe
ttatacacagtctacagcttcaacc

SEQ ID NO: 60365 - DNA, 25 bp, Artificial
  Probe
agtaagttgatccatccagatgagg

SEQ ID NO: 60366 - DNA, 25 bp, Artificial
  Probe
cttatacacagtctacagcttcaac

SEQ ID NO: 60367 - DNA, 25 bp, Artificial
  Probe
ataacaagtaagcctgctacactga

SEQ ID NO: 60368 - DNA, 25 bp, Artificial
  Probe
ccagtaagttgatccatccagatga

SEQ ID NO: 60369 - DNA, 25 bp, Artificial
  Probe
tatacacagtctacagcttcaacca

SEQ ID NO: 60370 - DNA, 25 bp, Artificial
  Probe
agtaggtataaggcgtctgtgaagt

SEQ ID NO: 60371 - DNA, 25 bp, Artificial
  Probe
accagtaagttgatccatccagatg

SEQ ID NO: 60372 - DNA, 25 bp, Artificial
  Probe
agagtaggtataaggcgtctgtgaa

SEQ ID NO: 60373 - DNA, 25 bp, Artificial
  Probe
aaccagcagcttcaataacaagtaa

SEQ ID NO: 60374 - DNA, 25 bp, Artificial
  Probe
aggcgtctgtgaagtatagtaattt

SEQ ID NO: 60375 - DNA, 25 bp, Artificial
  Probe
accagcagcttcaataacaagtaag

SEQ ID NO: 60376 - DNA, 25 bp, Artificial
  Probe
ggcgtctgtgaagtatagtaatttc

SEQ ID NO: 60377 - DNA, 25 bp, Artificial
  Probe
gagagtaggtataaggcgtctgtga

SEQ ID NO: 60378 - DNA, 25 bp, Artificial
  Probe
gtaagttgatccatccagatgagga

SEQ ID NO: 60379 - DNA, 25 bp, Artificial
  Probe
taacaagtaagcctgctacactgac

SEQ ID NO: 60380 - DNA, 25 bp, Artificial
  Probe
tgctaaacattggatattgacatct

SEQ ID NO: 60381 - DNA, 25 bp, Artificial
  Probe
ttggagagtaggtataaggcgtctg

SEQ ID NO: 60382 - DNA, 25 bp, Artificial
  Probe
tcactggtaagttgtttgtagattt

SEQ ID NO: 60383 - DNA, 25 bp, Artificial
  Probe
atacacagtctacagcttcaaccac

SEQ ID NO: 60384 - DNA, 25 bp, Artificial
  Probe
cattccctgcttatacacagtctac

SEQ ID NO: 60385 - DNA, 25 bp, Artificial
  Probe
ctacattccctgcttatacacagtc

SEQ ID NO: 60386 - DNA, 25 bp, Artificial
  Probe
gttgttactttacaggctcaggtag

SEQ ID NO: 60387 - DNA, 25 bp, Artificial
  Probe
atcactggtaagttgtttgtagatt

SEQ ID NO: 60388 - DNA, 25 bp, Artificial
  Probe
atagtaatttcagccgagtatcttt

SEQ ID NO: 60389 - DNA, 25 bp, Artificial
  Probe
attccctgcttatacacagtctaca

SEQ ID NO: 60390 - DNA, 25 bp, Artificial
  Probe
acattccctgcttatacacagtcta

SEQ ID NO: 60391 - DNA, 25 bp, Artificial
  Probe
tacattccctgcttatacacagtct

SEQ ID NO: 60392 - DNA, 25 bp, Artificial
  Probe
gacatcttctctctcaagtaccgac

SEQ ID NO: 60393 - DNA, 25 bp, Artificial
  Probe
cagaccgtgatgttgactacttgag

SEQ ID NO: 60394 - DNA, 25 bp, Artificial
  Probe
acatcttctctctcaagtaccgact

SEQ ID NO: 60395 - DNA, 25 bp, Artificial
  Probe
gatcttctttctccttccatcagtg

SEQ ID NO: 60396 - DNA, 25 bp, Artificial
  Probe
ggacatcttctctctcaagtaccga

SEQ ID NO: 60397 - DNA, 25 bp, Artificial
  Probe
atatcagaccgtgatgttgactact

SEQ ID NO: 60398 - DNA, 25 bp, Artificial
  Probe
tatcagaccgtgatgttgactactt

SEQ ID NO: 60399 - DNA, 25 bp, Artificial
  Probe
gggactttgtgaactttaaatgtga

SEQ ID NO: 60400 - DNA, 25 bp, Artificial
  Probe
tcagaccgtgatgttgactacttga

SEQ ID NO: 60401 - DNA, 25 bp, Artificial
  Probe
atcttctttctccttccatcagtgc

SEQ ID NO: 60402 - DNA, 25 bp, Artificial
  Probe
atcttctctctcaagtaccgacttc

SEQ ID NO: 60403 - DNA, 25 bp, Artificial
  Probe
cgggactttgtgaactttaaatgtg

SEQ ID NO: 60404 - DNA, 25 bp, Artificial
  Probe
catcttctctctcaagtaccgactt

SEQ ID NO: 60405 - DNA, 25 bp, Artificial
  Probe
aactgtagggatcttctttctcctt

SEQ ID NO: 60406 - DNA, 25 bp, Artificial
  Probe
aaactgtagggatcttctttctcct

SEQ ID NO: 60407 - DNA, 25 bp, Artificial
  Probe
tagggatcttctttctccttccatc

SEQ ID NO: 60408 - DNA, 25 bp, Artificial
  Probe
agaccgtgatgttgactacttgagg

SEQ ID NO: 60409 - DNA, 25 bp, Artificial
  Probe
gtagggatcttctttctccttccat

SEQ ID NO: 60410 - DNA, 25 bp, Artificial
  Probe
actgtagggatcttctttctccttc

SEQ ID NO: 60411 - DNA, 25 bp, Artificial
  Probe
ggactttgtgaactttaaatgtgat

SEQ ID NO: 60412 - DNA, 25 bp, Artificial
  Probe
gaattctgacttcgcatgtactgtg

SEQ ID NO: 60413 - DNA, 25 bp, Artificial
  Probe
ggatcttctttctccttccatcagt

SEQ ID NO: 60414 - DNA, 25 bp, Artificial
  Probe
atcagaccgtgatgttgactacttg

SEQ ID NO: 60415 - DNA, 25 bp, Artificial
  Probe
gatatcagaccgtgatgttgactac

SEQ ID NO: 60416 - DNA, 25 bp, Artificial
  Probe
ctgtagggatcttctttctccttcc

SEQ ID NO: 60417 - DNA, 25 bp, Artificial
  Probe
gcgggactttgtgaactttaaatgt

SEQ ID NO: 60418 - DNA, 25 bp, Artificial
  Probe
tgcgggactttgtgaactttaaatg

SEQ ID NO: 60419 - DNA, 25 bp, Artificial
  Probe
gtgcgggactttgtgaactttaaat

SEQ ID NO: 60420 - DNA, 25 bp, Artificial
  Probe
gggatcttctttctccttccatcag

SEQ ID NO: 60421 - DNA, 25 bp, Artificial
  Probe
tgtagggatcttctttctccttcca

SEQ ID NO: 60422 - DNA, 25 bp, Artificial
  Probe
ccaaaactgtagggatcttctttct

SEQ ID NO: 60423 - DNA, 25 bp, Artificial
  Probe
agggatcttctttctccttccatca

SEQ ID NO: 60424 - DNA, 25 bp, Artificial
  Probe
caaaactgtagggatcttctttctc

SEQ ID NO: 60425 - DNA, 25 bp, Artificial
  Probe
tccagaccttaatttccaaaactgt

SEQ ID NO: 60426 - DNA, 25 bp, Artificial
  Probe
tcttctctctcaagtaccgacttcg

SEQ ID NO: 60427 - DNA, 25 bp, Artificial
  Probe
ccagaccttaatttccaaaactgta

SEQ ID NO: 60428 - DNA, 25 bp, Artificial
  Probe
gaccttaatttccaaaactgtaggg

SEQ ID NO: 60429 - DNA, 25 bp, Artificial
  Probe
gactttgtgaactttaaatgtgatt

SEQ ID NO: 60430 - DNA, 25 bp, Artificial
  Probe
accttaatttccaaaactgtaggga

SEQ ID NO: 60431 - DNA, 25 bp, Artificial
  Probe
agaccttaatttccaaaactgtagg

SEQ ID NO: 60432 - DNA, 25 bp, Artificial
  Probe
cagtgcgggactttgtgaactttaa

SEQ ID NO: 60433 - DNA, 25 bp, Artificial
  Probe
ccttaatttccaaaactgtagggat

SEQ ID NO: 60434 - DNA, 25 bp, Artificial
  Probe
aaaactgtagggatcttctttctcc

SEQ ID NO: 60435 - DNA, 25 bp, Artificial
  Probe
ttccaaaactgtagggatcttcttt

SEQ ID NO: 60436 - DNA, 25 bp, Artificial
  Probe
tttccaaaactgtagggatcttctt

SEQ ID NO: 60437 - DNA, 25 bp, Artificial
  Probe
gggagagtatttattgcttgtgttc

SEQ ID NO: 60438 - DNA, 25 bp, Artificial
  Probe
gagtatttattgcttgtgttccaga

SEQ ID NO: 60439 - DNA, 25 bp, Artificial
  Probe
agagtatttattgcttgtgttccag

SEQ ID NO: 60440 - DNA, 25 bp, Artificial
  Probe
gagagtatttattgcttgtgttcca

SEQ ID NO: 60441 - DNA, 25 bp, Artificial
  Probe
atcgggagagtatttattgcttgtg

SEQ ID NO: 60442 - DNA, 25 bp, Artificial
  Probe
cacaagtcaacagttgcttatggaa

SEQ ID NO: 60443 - DNA, 25 bp, Artificial
  Probe
agtatttattgcttgtgttccagat

SEQ ID NO: 60444 - DNA, 25 bp, Artificial
  Probe
cgggagagtatttattgcttgtgtt

SEQ ID NO: 60445 - DNA, 25 bp, Artificial
  Probe
ttctcttctgctggtttctgtctta

SEQ ID NO: 60446 - DNA, 25 bp, Artificial
  Probe
gatcgggagagtatttattgcttgt

SEQ ID NO: 60447 - DNA, 25 bp, Artificial
  Probe
tcgggagagtatttattgcttgtgt

SEQ ID NO: 60448 - DNA, 25 bp, Artificial
  Probe
ttctgctggtttctgtcttacattt

SEQ ID NO: 60449 - DNA, 25 bp, Artificial
  Probe
ggatcgggagagtatttattgcttg

SEQ ID NO: 60450 - DNA, 25 bp, Artificial
  Probe
ctaaacactggaactgagagatgtc

SEQ ID NO: 60451 - DNA, 25 bp, Artificial
  Probe
attctcttctgctggtttctgtctt

SEQ ID NO: 60452 - DNA, 25 bp, Artificial
  Probe
taaacactggaactgagagatgtct

SEQ ID NO: 60453 - DNA, 25 bp, Artificial
  Probe
tctcttctgctggtttctgtcttac

SEQ ID NO: 60454 - DNA, 25 bp, Artificial
  Probe
cttctgctggtttctgtcttacatt

SEQ ID NO: 60455 - DNA, 25 bp, Artificial
  Probe
agatatgtcttaccctctgtaggag

SEQ ID NO: 60456 - DNA, 25 bp, Artificial
  Probe
gtacttcagatatgtcttaccctct

SEQ ID NO: 60457 - DNA, 25 bp, Artificial
  Probe
tggatcgggagagtatttattgctt

SEQ ID NO: 60458 - DNA, 25 bp, Artificial
  Probe
aattaagagacggtttctgggacat

SEQ ID NO: 60459 - DNA, 25 bp, Artificial
  Probe
ggagagtatttattgcttgtgttcc

SEQ ID NO: 60460 - DNA, 25 bp, Artificial
  Probe
ctggatcgggagagtatttattgct

SEQ ID NO: 60461 - DNA, 25 bp, Artificial
  Probe
gattctcttctgctggtttctgtct

SEQ ID NO: 60462 - DNA, 25 bp, Artificial
  Probe
aacactggaactgagagatgtctgt

SEQ ID NO: 60463 - DNA, 25 bp, Artificial
  Probe
attaagagacggtttctgggacatc

SEQ ID NO: 60464 - DNA, 25 bp, Artificial
  Probe
acaagtcaacagttgcttatggaaa

SEQ ID NO: 60465 - DNA, 25 bp, Artificial
  Probe
gtatttattgcttgtgttccagata

SEQ ID NO: 60466 - DNA, 25 bp, Artificial
  Probe
taattaagagacggtttctgggaca

SEQ ID NO: 60467 - DNA, 25 bp, Artificial
  Probe
tcttctgctggtttctgtcttacat

SEQ ID NO: 60468 - DNA, 25 bp, Artificial
  Probe
tatgcctggatcgggagagtattta

SEQ ID NO: 60469 - DNA, 25 bp, Artificial
  Probe
tatttatgcctggatcgggagagta

SEQ ID NO: 60470 - DNA, 25 bp, Artificial
  Probe
ctcttctgctggtttctgtcttaca

SEQ ID NO: 60471 - DNA, 25 bp, Artificial
  Probe
gagagatgtctgtggtgtggtctag

SEQ ID NO: 60472 - DNA, 25 bp, Artificial
  Probe
aaacactggaactgagagatgtctg

SEQ ID NO: 60473 - DNA, 25 bp, Artificial
  Probe
gctaaacactggaactgagagatgt

SEQ ID NO: 60474 - DNA, 25 bp, Artificial
  Probe
ctagacgctaaacactggaactgag

SEQ ID NO: 60475 - DNA, 25 bp, Artificial
  Probe
tagacgctaaacactggaactgaga

SEQ ID NO: 60476 - DNA, 25 bp, Artificial
  Probe
cctggatcgggagagtatttattgc

SEQ ID NO: 60477 - DNA, 25 bp, Artificial
  Probe
gcctggatcgggagagtatttattg

SEQ ID NO: 60478 - DNA, 25 bp, Artificial
  Probe
atgcctggatcgggagagtatttat

SEQ ID NO: 60479 - DNA, 25 bp, Artificial
  Probe
atttatgcctggatcgggagagtat

SEQ ID NO: 60480 - DNA, 25 bp, Artificial
  Probe
ggattctcttctgctggtttctgtc

SEQ ID NO: 60481 - DNA, 25 bp, Artificial
  Probe
gatgggattctcttctgctggtttc

SEQ ID NO: 60482 - DNA, 25 bp, Artificial
  Probe
agttaaacctctcctgtcattccta

SEQ ID NO: 60483 - DNA, 25 bp, Artificial
  Probe
gaagaagttcaacctggagagatgg

SEQ ID NO: 60484 - DNA, 25 bp, Artificial
  Probe
gttaaacctctcctgtcattcctag

SEQ ID NO: 60485 - DNA, 25 bp, Artificial
  Probe
aagaagttcaacctggagagatgga

SEQ ID NO: 60486 - DNA, 25 bp, Artificial
  Probe
agaagttcaacctggagagatggaa

SEQ ID NO: 60487 - DNA, 25 bp, Artificial
  Probe
atcagttaaacctctcctgtcattc

SEQ ID NO: 60488 - DNA, 25 bp, Artificial
  Probe
catcagttaaacctctcctgtcatt

SEQ ID NO: 60489 - DNA, 25 bp, Artificial
  Probe
taatgaagaagttcaacctggagag

SEQ ID NO: 60490 - DNA, 25 bp, Artificial
  Probe
ctaatgaagaagttcaacctggaga

SEQ ID NO: 60491 - DNA, 25 bp, Artificial
  Probe
ttaaacctctcctgtcattcctagc

SEQ ID NO: 60492 - DNA, 25 bp, Artificial
  Probe
cctaatgaagaagttcaacctggag

SEQ ID NO: 60493 - DNA, 25 bp, Artificial
  Probe
tgatagtgagggtataaagtgtaac

SEQ ID NO: 60494 - DNA, 25 bp, Artificial
  Probe
agtgtaaccatcagttaaacctctc

SEQ ID NO: 60495 - DNA, 25 bp, Artificial
  Probe
aagtgtaaccatcagttaaacctct

SEQ ID NO: 60496 - DNA, 25 bp, Artificial
  Probe
gtaaccatcagttaaacctctcctg

SEQ ID NO: 60497 - DNA, 25 bp, Artificial
  Probe
aaagtgtaaccatcagttaaacctc

SEQ ID NO: 60498 - DNA, 25 bp, Artificial
  Probe
gaagttcaacctggagagatggaaa

SEQ ID NO: 60499 - DNA, 25 bp, Artificial
  Probe
atgaagaagttcaacctggagagat

SEQ ID NO: 60500 - DNA, 25 bp, Artificial
  Probe
gtgagggtataaagtgtaaccatca

SEQ ID NO: 60501 - DNA, 25 bp, Artificial
  Probe
gagggtataaagtgtaaccatcagt

SEQ ID NO: 60502 - DNA, 25 bp, Artificial
  Probe
tgagggtataaagtgtaaccatcag

SEQ ID NO: 60503 - DNA, 25 bp, Artificial
  Probe
agtgagggtataaagtgtaaccatc

SEQ ID NO: 60504 - DNA, 25 bp, Artificial
  Probe
taaccatcagttaaacctctcctgt

SEQ ID NO: 60505 - DNA, 25 bp, Artificial
  Probe
tgtaaccatcagttaaacctctcct

SEQ ID NO: 60506 - DNA, 25 bp, Artificial
  Probe
gtgtaaccatcagttaaacctctcc

SEQ ID NO: 60507 - DNA, 25 bp, Artificial
  Probe
agggtataaagtgtaaccatcagtt

SEQ ID NO: 60508 - DNA, 25 bp, Artificial
  Probe
aatgaagaagttcaacctggagaga

SEQ ID NO: 60509 - DNA, 25 bp, Artificial
  Probe
aattgatagtgagggtataaagtgt

SEQ ID NO: 60510 - DNA, 25 bp, Artificial
  Probe
gcctccttaaactagctgttatgtt

SEQ ID NO: 60511 - DNA, 25 bp, Artificial
  Probe
cagttaaacctctcctgtcattcct

SEQ ID NO: 60512 - DNA, 25 bp, Artificial
  Probe
tcagttaaacctctcctgtcattcc

SEQ ID NO: 60513 - DNA, 25 bp, Artificial
  Probe
ccatcagttaaacctctcctgtcat

SEQ ID NO: 60514 - DNA, 25 bp, Artificial
  Probe
tagtgagggtataaagtgtaaccat

SEQ ID NO: 60515 - DNA, 25 bp, Artificial
  Probe
atagtgagggtataaagtgtaacca

SEQ ID NO: 60516 - DNA, 25 bp, Artificial
  Probe
ctctcctgtcattcctagcttcctt

SEQ ID NO: 60517 - DNA, 25 bp, Artificial
  Probe
aaccatcagttaaacctctcctgtc

SEQ ID NO: 60518 - DNA, 25 bp, Artificial
  Probe
taaagtgtaaccatcagttaaacct

SEQ ID NO: 60519 - DNA, 25 bp, Artificial
  Probe
ttgatagtgagggtataaagtgtaa

SEQ ID NO: 60520 - DNA, 25 bp, Artificial
  Probe
tgaagaagttcaacctggagagatg

SEQ ID NO: 60521 - DNA, 25 bp, Artificial
  Probe
ctagcttccttgcttcagaattgaa

SEQ ID NO: 60522 - DNA, 25 bp, Artificial
  Probe
gaattgatagtgagggtataaagtg

SEQ ID NO: 60523 - DNA, 25 bp, Artificial
  Probe
attcctagcttccttgcttcagaat

SEQ ID NO: 60524 - DNA, 25 bp, Artificial
  Probe
gatagtgagggtataaagtgtaacc

SEQ ID NO: 60525 - DNA, 25 bp, Artificial
  Probe
tctcctgtcattcctagcttccttg

SEQ ID NO: 60526 - DNA, 25 bp, Artificial
  Probe
aacctctcctgtcattcctagcttc

SEQ ID NO: 60527 - DNA, 25 bp, Artificial
  Probe
tggtttgttcgtctcatttattgtt

SEQ ID NO: 60528 - DNA, 25 bp, Artificial
  Probe
ggtttgttcgtctcatttattgttc

SEQ ID NO: 60529 - DNA, 25 bp, Artificial
  Probe
atggtttgttcgtctcatttattgt

SEQ ID NO: 60530 - DNA, 25 bp, Artificial
  Probe
tgttcgtctcatttattgttctctt

SEQ ID NO: 60531 - DNA, 25 bp, Artificial
  Probe
ttgttcgtctcatttattgttctct

SEQ ID NO: 60532 - DNA, 25 bp, Artificial
  Probe
ttcgtctcatttattgttctcttca

SEQ ID NO: 60533 - DNA, 25 bp, Artificial
  Probe
atctacaaagggactacgaagtaac

SEQ ID NO: 60534 - DNA, 25 bp, Artificial
  Probe
gtttgttcgtctcatttattgttct

SEQ ID NO: 60535 - DNA, 25 bp, Artificial
  Probe
tcgtctcatttattgttctcttcat

SEQ ID NO: 60536 - DNA, 25 bp, Artificial
  Probe
gttcgtctcatttattgttctcttc

SEQ ID NO: 60537 - DNA, 25 bp, Artificial
  Probe
tttgttcgtctcatttattgttctc

SEQ ID NO: 60538 - DNA, 25 bp, Artificial
  Probe
gatctacaaagggactacgaagtaa

SEQ ID NO: 60539 - DNA, 25 bp, Artificial
  Probe
attggaagaatggtttgttcgtctc

SEQ ID NO: 60540 - DNA, 25 bp, Artificial
  Probe
cgtctcatttattgttctcttcatt

SEQ ID NO: 60541 - DNA, 25 bp, Artificial
  Probe
tctacaaagggactacgaagtaacg

SEQ ID NO: 60542 - DNA, 25 bp, Artificial
  Probe
cgatctacaaagggactacgaagta

SEQ ID NO: 60543 - DNA, 25 bp, Artificial
  Probe
tggaagaatggtttgttcgtctcat

SEQ ID NO: 60544 - DNA, 25 bp, Artificial
  Probe
tgacaatcattggaagaatggtttg

SEQ ID NO: 60545 - DNA, 25 bp, Artificial
  Probe
attgttctcttcattctgtgagact

SEQ ID NO: 60546 - DNA, 25 bp, Artificial
  Probe
ttggaagaatggtttgttcgtctca

SEQ ID NO: 60547 - DNA, 25 bp, Artificial
  Probe
aatcattggaagaatggtttgttcg

SEQ ID NO: 60548 - DNA, 25 bp, Artificial
  Probe
caatcattggaagaatggtttgttc

SEQ ID NO: 60549 - DNA, 25 bp, Artificial
  Probe
tgttctcttcattctgtgagactaa

SEQ ID NO: 60550 - DNA, 25 bp, Artificial
  Probe
ttgttctcttcattctgtgagacta

SEQ ID NO: 60551 - DNA, 25 bp, Artificial
  Probe
aagaatggtttgttcgtctcattta

SEQ ID NO: 60552 - DNA, 25 bp, Artificial
  Probe
agaatggtttgttcgtctcatttat

SEQ ID NO: 60553 - DNA, 25 bp, Artificial
  Probe
tttattgttctcttcattctgtgag

SEQ ID NO: 60554 - DNA, 25 bp, Artificial
  Probe
catttattgttctcttcattctgtg

SEQ ID NO: 60555 - DNA, 25 bp, Artificial
  Probe
gctacagcaattatggcttaagatc

SEQ ID NO: 60556 - DNA, 25 bp, Artificial
  Probe
agctacagcaattatggcttaagat

SEQ ID NO: 60557 - DNA, 25 bp, Artificial
  Probe
tcatttattgttctcttcattctgt

SEQ ID NO: 60558 - DNA, 25 bp, Artificial
  Probe
aatggtttgttcgtctcatttattg

SEQ ID NO: 60559 - DNA, 25 bp, Artificial
  Probe
atcattggaagaatggtttgttcgt

SEQ ID NO: 60560 - DNA, 25 bp, Artificial
  Probe
tattgttctcttcattctgtgagac

SEQ ID NO: 60561 - DNA, 25 bp, Artificial
  Probe
gaatggtttgttcgtctcatttatt

SEQ ID NO: 60562 - DNA, 25 bp, Artificial
  Probe
cagctacagcaattatggcttaaga

SEQ ID NO: 60563 - DNA, 25 bp, Artificial
  Probe
ttctcttcattctgtgagactaatg

SEQ ID NO: 60564 - DNA, 25 bp, Artificial
  Probe
gttctcttcattctgtgagactaat

SEQ ID NO: 60565 - DNA, 25 bp, Artificial
  Probe
ggaagaatggtttgttcgtctcatt

SEQ ID NO: 60566 - DNA, 25 bp, Artificial
  Probe
aaccgatctacaaagggactacgaa

SEQ ID NO: 60567 - DNA, 25 bp, Artificial
  Probe
cattggaagaatggtttgttcgtct

SEQ ID NO: 60568 - DNA, 25 bp, Artificial
  Probe
tcattggaagaatggtttgttcgtc

SEQ ID NO: 60569 - DNA, 25 bp, Artificial
  Probe
atttattgttctcttcattctgtga

SEQ ID NO: 60570 - DNA, 25 bp, Artificial
  Probe
ttattgttctcttcattctgtgaga

SEQ ID NO: 60571 - DNA, 25 bp, Artificial
  Probe
ctcatttattgttctcttcattctg

SEQ ID NO: 60572 - DNA, 25 bp, Artificial
  Probe
tcttagcaacatcttcagaatcaga

SEQ ID NO: 60573 - DNA, 25 bp, Artificial
  Probe
cttagcaacatcttcagaatcagaa

SEQ ID NO: 60574 - DNA, 25 bp, Artificial
  Probe
tcagaatcagaagtcagtctatcaa

SEQ ID NO: 60575 - DNA, 25 bp, Artificial
  Probe
ttcagaatcagaagtcagtctatca

SEQ ID NO: 60576 - DNA, 25 bp, Artificial
  Probe
gaatcagaagtcagtctatcaaagc

SEQ ID NO: 60577 - DNA, 25 bp, Artificial
  Probe
aatcagaagtcagtctatcaaagcc

SEQ ID NO: 60578 - DNA, 25 bp, Artificial
  Probe
ttcttagcaacatcttcagaatcag

SEQ ID NO: 60579 - DNA, 25 bp, Artificial
  Probe
cagaatcagaagtcagtctatcaaa

SEQ ID NO: 60580 - DNA, 25 bp, Artificial
  Probe
atatcatggagacggaagttctgga

SEQ ID NO: 60581 - DNA, 25 bp, Artificial
  Probe
agaatcagaagtcagtctatcaaag

SEQ ID NO: 60582 - DNA, 25 bp, Artificial
  Probe
atggatatcatggagacggaagttc

SEQ ID NO: 60583 - DNA, 25 bp, Artificial
  Probe
gatggatatcatggagacggaagtt

SEQ ID NO: 60584 - DNA, 25 bp, Artificial
  Probe
agaatttcttagcaacatcttcaga

SEQ ID NO: 60585 - DNA, 25 bp, Artificial
  Probe
agagaatttcttagcaacatcttca

SEQ ID NO: 60586 - DNA, 25 bp, Artificial
  Probe
gagaatttcttagcaacatcttcag

SEQ ID NO: 60587 - DNA, 25 bp, Artificial
  Probe
catcttcagaatcagaagtcagtct

SEQ ID NO: 60588 - DNA, 25 bp, Artificial
  Probe
aacatcttcagaatcagaagtcagt

SEQ ID NO: 60589 - DNA, 25 bp, Artificial
  Probe
tagcaacatcttcagaatcagaagt

SEQ ID NO: 60590 - DNA, 25 bp, Artificial
  Probe
acatcttcagaatcagaagtcagtc

SEQ ID NO: 60591 - DNA, 25 bp, Artificial
  Probe
caacatcttcagaatcagaagtcag

SEQ ID NO: 60592 - DNA, 25 bp, Artificial
  Probe
ttagcaacatcttcagaatcagaag

SEQ ID NO: 60593 - DNA, 25 bp, Artificial
  Probe
atcagaagtcagtctatcaaagccg

SEQ ID NO: 60594 - DNA, 25 bp, Artificial
  Probe
agcaacatcttcagaatcagaagtc

SEQ ID NO: 60595 - DNA, 25 bp, Artificial
  Probe
tcttcagaatcagaagtcagtctat

SEQ ID NO: 60596 - DNA, 25 bp, Artificial
  Probe
atcttcagaatcagaagtcagtcta

SEQ ID NO: 60597 - DNA, 25 bp, Artificial
  Probe
gcaacatcttcagaatcagaagtca

SEQ ID NO: 60598 - DNA, 25 bp, Artificial
  Probe
gatatcatggagacggaagttctgg

SEQ ID NO: 60599 - DNA, 25 bp, Artificial
  Probe
ggatatcatggagacggaagttctg

SEQ ID NO: 60600 - DNA, 25 bp, Artificial
  Probe
cttcagaatcagaagtcagtctatc

SEQ ID NO: 60601 - DNA, 25 bp, Artificial
  Probe
aacccatctgcatgaaatttgaatc

SEQ ID NO: 60602 - DNA, 25 bp, Artificial
  Probe
gaacccatctgcatgaaatttgaat

SEQ ID NO: 60603 - DNA, 25 bp, Artificial
  Probe
tatcatggagacggaagttctggac

SEQ ID NO: 60604 - DNA, 25 bp, Artificial
  Probe
tggatatcatggagacggaagttct

SEQ ID NO: 60605 - DNA, 25 bp, Artificial
  Probe
cgaagagaatttcttagcaacatct

SEQ ID NO: 60606 - DNA, 25 bp, Artificial
  Probe
acccatctgcatgaaatttgaatca

SEQ ID NO: 60607 - DNA, 25 bp, Artificial
  Probe
gaagttctggacatcctcaagaaag

SEQ ID NO: 60608 - DNA, 25 bp, Artificial
  Probe
tttcttagcaacatcttcagaatca

SEQ ID NO: 60609 - DNA, 25 bp, Artificial
  Probe
atcctcaagaaagccctcagtagtc

SEQ ID NO: 60610 - DNA, 25 bp, Artificial
  Probe
ctactggatagagcagcagaacagg

SEQ ID NO: 60611 - DNA, 25 bp, Artificial
  Probe
cctactggatagagcagcagaacag

SEQ ID NO: 60612 - DNA, 25 bp, Artificial
  Probe
catcctcaagaaagccctcagtagt

SEQ ID NO: 60613 - DNA, 25 bp, Artificial
  Probe
acatcctcaagaaagccctcagtag

SEQ ID NO: 60614 - DNA, 25 bp, Artificial
  Probe
gacatcctcaagaaagccctcagta

SEQ ID NO: 60615 - DNA, 25 bp, Artificial
  Probe
gaagtcagtctatcaaagccgcatc

SEQ ID NO: 60616 - DNA, 25 bp, Artificial
  Probe
tgagatcgaagagaatttcttagca

SEQ ID NO: 60617 - DNA, 25 bp, Artificial
  Probe
gagggaatatctatttgagcactga

SEQ ID NO: 60618 - DNA, 25 bp, Artificial
  Probe
tgagggaatatctatttgagcactg

SEQ ID NO: 60619 - DNA, 25 bp, Artificial
  Probe
ttgagggaatatctatttgagcact

SEQ ID NO: 60620 - DNA, 25 bp, Artificial
  Probe
acgcatttgagggaatatctatttg

SEQ ID NO: 60621 - DNA, 25 bp, Artificial
  Probe
cgcatttgagggaatatctatttga

SEQ ID NO: 60622 - DNA, 25 bp, Artificial
  Probe
gacgcatttgagggaatatctattt

SEQ ID NO: 60623 - DNA, 25 bp, Artificial
  Probe
ggacgcatttgagggaatatctatt

SEQ ID NO: 60624 - DNA, 25 bp, Artificial
  Probe
agggaatatctatttgagcactgat

SEQ ID NO: 60625 - DNA, 25 bp, Artificial
  Probe
tttgagggaatatctatttgagcac

SEQ ID NO: 60626 - DNA, 25 bp, Artificial
  Probe
aggacgcatttgagggaatatctat

SEQ ID NO: 60627 - DNA, 25 bp, Artificial
  Probe
gggaatatctatttgagcactgatt

SEQ ID NO: 60628 - DNA, 25 bp, Artificial
  Probe
aaggacgcatttgagggaatatcta

SEQ ID NO: 60629 - DNA, 25 bp, Artificial
  Probe
tagaaaggacgcatttgagggaata

SEQ ID NO: 60630 - DNA, 25 bp, Artificial
  Probe
aaatctctctgtcctaaactaatgg

SEQ ID NO: 60631 - DNA, 25 bp, Artificial
  Probe
ctatttgagcactgatttactctgt

SEQ ID NO: 60632 - DNA, 25 bp, Artificial
  Probe
gaaaggacgcatttgagggaatatc

SEQ ID NO: 60633 - DNA, 25 bp, Artificial
  Probe
atttgagggaatatctatttgagca

SEQ ID NO: 60634 - DNA, 25 bp, Artificial
  Probe
tctatttgagcactgatttactctg

SEQ ID NO: 60635 - DNA, 25 bp, Artificial
  Probe
catttgagggaatatctatttgagc

SEQ ID NO: 60636 - DNA, 25 bp, Artificial
  Probe
gcatttgagggaatatctatttgag

SEQ ID NO: 60637 - DNA, 25 bp, Artificial
  Probe
aaaggacgcatttgagggaatatct

SEQ ID NO: 60638 - DNA, 25 bp, Artificial
  Probe
agaaaggacgcatttgagggaatat

SEQ ID NO: 60639 - DNA, 25 bp, Artificial
  Probe
ctctgtcctaaactaatggaagtga

SEQ ID NO: 60640 - DNA, 25 bp, Artificial
  Probe
tctctgtcctaaactaatggaagtg

SEQ ID NO: 60641 - DNA, 25 bp, Artificial
  Probe
ctctctgtcctaaactaatggaagt

SEQ ID NO: 60642 - DNA, 25 bp, Artificial
  Probe
tctctctgtcctaaactaatggaag

SEQ ID NO: 60643 - DNA, 25 bp, Artificial
  Probe
tctgtcctaaactaatggaagtgat

SEQ ID NO: 60644 - DNA, 25 bp, Artificial
  Probe
tatttgagcactgatttactctgta

SEQ ID NO: 60645 - DNA, 25 bp, Artificial
  Probe
atctatttgagcactgatttactct

SEQ ID NO: 60646 - DNA, 25 bp, Artificial
  Probe
atctctctgtcctaaactaatggaa

SEQ ID NO: 60647 - DNA, 25 bp, Artificial
  Probe
aatctctctgtcctaaactaatgga

SEQ ID NO: 60648 - DNA, 25 bp, Artificial
  Probe
ctgtcctaaactaatggaagtgatt

SEQ ID NO: 60649 - DNA, 25 bp, Artificial
  Probe
atttgagcactgatttactctgtaa

SEQ ID NO: 60650 - DNA, 25 bp, Artificial
  Probe
ggaatatctatttgagcactgattt

SEQ ID NO: 60651 - DNA, 25 bp, Artificial
  Probe
gtagaaaggacgcatttgagggaat

SEQ ID NO: 60652 - DNA, 25 bp, Artificial
  Probe
tgtcctaaactaatggaagtgattt

SEQ ID NO: 60653 - DNA, 25 bp, Artificial
  Probe
ggcaaaatctctctgtcctaaacta

SEQ ID NO: 60654 - DNA, 25 bp, Artificial
  Probe
gcaaaatctctctgtcctaaactaa

SEQ ID NO: 60655 - DNA, 25 bp, Artificial
  Probe
gggctgttcagaatgtagaaaggac

SEQ ID NO: 60656 - DNA, 25 bp, Artificial
  Probe
ctcgggctgttcagaatgtagaaag

SEQ ID NO: 60657 - DNA, 25 bp, Artificial
  Probe
ggctgttcagaatgtagaaaggacg

SEQ ID NO: 60658 - DNA, 25 bp, Artificial
  Probe
tatctatttgagcactgatttactc

SEQ ID NO: 60659 - DNA, 25 bp, Artificial
  Probe
actcgggctgttcagaatgtagaaa

SEQ ID NO: 60660 - DNA, 25 bp, Artificial
  Probe
gggcaaaatctctctgtcctaaact

SEQ ID NO: 60661 - DNA, 25 bp, Artificial
  Probe
atatctatttgagcactgatttact

SEQ ID NO: 60662 - DNA, 25 bp, Artificial
  Probe
atgtggacgatgacaactatgtgaa

SEQ ID NO: 60663 - DNA, 25 bp, Artificial
  Probe
tgtggacgatgacaactatgtgaac

SEQ ID NO: 60664 - DNA, 25 bp, Artificial
  Probe
catgtggacgatgacaactatgtga

SEQ ID NO: 60665 - DNA, 25 bp, Artificial
  Probe
gtggacgatgacaactatgtgaacc

SEQ ID NO: 60666 - DNA, 25 bp, Artificial
  Probe
ccatgtggacgatgacaactatgtg

SEQ ID NO: 60667 - DNA, 25 bp, Artificial
  Probe
tttcatggacacatctgctctcatc

SEQ ID NO: 60668 - DNA, 25 bp, Artificial
  Probe
catgggctatatcattgagtgcaag

SEQ ID NO: 60669 - DNA, 25 bp, Artificial
  Probe
acgatgacaactatgtgaacccaag

SEQ ID NO: 60670 - DNA, 25 bp, Artificial
  Probe
gacgatgacaactatgtgaacccaa

SEQ ID NO: 60671 - DNA, 25 bp, Artificial
  Probe
gtttcatggacacatctgctctcat

SEQ ID NO: 60672 - DNA, 25 bp, Artificial
  Probe
gatgacaactatgtgaacccaaggg

SEQ ID NO: 60673 - DNA, 25 bp, Artificial
  Probe
cgatgacaactatgtgaacccaagg

SEQ ID NO: 60674 - DNA, 25 bp, Artificial
  Probe
ttcatggacacatctgctctcatcc

SEQ ID NO: 60675 - DNA, 25 bp, Artificial
  Probe
ggctatatcattgagtgcaagctgg

SEQ ID NO: 60676 - DNA, 25 bp, Artificial
  Probe
ctatatcattgagtgcaagctgggc

SEQ ID NO: 60677 - DNA, 25 bp, Artificial
  Probe
ggacgatgacaactatgtgaaccca

SEQ ID NO: 60678 - DNA, 25 bp, Artificial
  Probe
tggacgatgacaactatgtgaaccc

SEQ ID NO: 60679 - DNA, 25 bp, Artificial
  Probe
caatcgcaaactggctttgaagatg

SEQ ID NO: 60680 - DNA, 25 bp, Artificial
  Probe
catcaatcgcaaactggctttgaag

SEQ ID NO: 60681 - DNA, 25 bp, Artificial
  Probe
atgggctatatcattgagtgcaagc

SEQ ID NO: 60682 - DNA, 25 bp, Artificial
  Probe
tcaatcgcaaactggctttgaagat

SEQ ID NO: 60683 - DNA, 25 bp, Artificial
  Probe
atcaatcgcaaactggctttgaaga

SEQ ID NO: 60684 - DNA, 25 bp, Artificial
  Probe
cgtttcatggacacatctgctctca

SEQ ID NO: 60685 - DNA, 25 bp, Artificial
  Probe
atgacaactatgtgaacccaagggc

SEQ ID NO: 60686 - DNA, 25 bp, Artificial
  Probe
gctatatcattgagtgcaagctggg

SEQ ID NO: 60687 - DNA, 25 bp, Artificial
  Probe
gggctatatcattgagtgcaagctg

SEQ ID NO: 60688 - DNA, 25 bp, Artificial
  Probe
aatcgcaaactggctttgaagatgg

SEQ ID NO: 60689 - DNA, 25 bp, Artificial
  Probe
tgggctatatcattgagtgcaagct

SEQ ID NO: 60690 - DNA, 25 bp, Artificial
  Probe
ccatgggctatatcattgagtgcaa

SEQ ID NO: 60691 - DNA, 25 bp, Artificial
  Probe
ctgcaccatgggctatatcattgag

SEQ ID NO: 60692 - DNA, 25 bp, Artificial
  Probe
gactgcaccatgggctatatcattg

SEQ ID NO: 60693 - DNA, 25 bp, Artificial
  Probe
accatgggctatatcattgagtgca

SEQ ID NO: 60694 - DNA, 25 bp, Artificial
  Probe
tgcaccatgggctatatcattgagt

SEQ ID NO: 60695 - DNA, 25 bp, Artificial
  Probe
actgcaccatgggctatatcattga

SEQ ID NO: 60696 - DNA, 25 bp, Artificial
  Probe
caccatgggctatatcattgagtgc

SEQ ID NO: 60697 - DNA, 25 bp, Artificial
  Probe
gcaccatgggctatatcattgagtg

SEQ ID NO: 60698 - DNA, 25 bp, Artificial
  Probe
tgactgcaccatgggctatatcatt

SEQ ID NO: 60699 - DNA, 25 bp, Artificial
  Probe
tgatgactgcaccatgggctatatc

SEQ ID NO: 60700 - DNA, 25 bp, Artificial
  Probe
ctgatgactgcaccatgggctatat

SEQ ID NO: 60701 - DNA, 25 bp, Artificial
  Probe
gatgactgcaccatgggctatatca

SEQ ID NO: 60702 - DNA, 25 bp, Artificial
  Probe
atgactgcaccatgggctatatcat

SEQ ID NO: 60703 - DNA, 25 bp, Artificial
  Probe
aattcatcaggtaagaaatccgagg

SEQ ID NO: 60704 - DNA, 25 bp, Artificial
  Probe
attcatcaggtaagaaatccgaggg

SEQ ID NO: 60705 - DNA, 25 bp, Artificial
  Probe
gtacttacggtcctttcccattctc

SEQ ID NO: 60706 - DNA, 25 bp, Artificial
  Probe
gtcctttcccattctcgttcttcag

SEQ ID NO: 60707 - DNA, 25 bp, Artificial
  Probe
cctttcccattctcgttcttcagtg

SEQ ID NO: 60708 - DNA, 25 bp, Artificial
  Probe
agaattcatcaggtaagaaatccga

SEQ ID NO: 60709 - DNA, 25 bp, Artificial
  Probe
cagaattcatcaggtaagaaatccg

SEQ ID NO: 60710 - DNA, 25 bp, Artificial
  Probe
gaattcatcaggtaagaaatccgag

SEQ ID NO: 60711 - DNA, 25 bp, Artificial
  Probe
tcctttcccattctcgttcttcagt

SEQ ID NO: 60712 - DNA, 25 bp, Artificial
  Probe
tcagaattcatcaggtaagaaatcc

SEQ ID NO: 60713 - DNA, 25 bp, Artificial
  Probe
tacttacggtcctttcccattctcg

SEQ ID NO: 60714 - DNA, 25 bp, Artificial
  Probe
ctttcccattctcgttcttcagtgc

SEQ ID NO: 60715 - DNA, 25 bp, Artificial
  Probe
ctcactgtagccttcctcagaacac

SEQ ID NO: 60716 - DNA, 25 bp, Artificial
  Probe
cctcagaattcatcaggtaagaaat

SEQ ID NO: 60717 - DNA, 25 bp, Artificial
  Probe
ctcagaattcatcaggtaagaaatc

SEQ ID NO: 60718 - DNA, 25 bp, Artificial
  Probe
atccagtgaccaaaacctcagaatt

SEQ ID NO: 60719 - DNA, 25 bp, Artificial
  Probe
tttcccattctcgttcttcagtgct

SEQ ID NO: 60720 - DNA, 25 bp, Artificial
  Probe
ggtcctttcccattctcgttcttca

SEQ ID NO: 60721 - DNA, 25 bp, Artificial
  Probe
cactgtagccttcctcagaacacac

SEQ ID NO: 60722 - DNA, 25 bp, Artificial
  Probe
tcactgtagccttcctcagaacaca

SEQ ID NO: 60723 - DNA, 25 bp, Artificial
  Probe
catccagtgaccaaaacctcagaat

SEQ ID NO: 60724 - DNA, 25 bp, Artificial
  Probe
ttcccattctcgttcttcagtgctc

SEQ ID NO: 60725 - DNA, 25 bp, Artificial
  Probe
aacctcagaattcatcaggtaagaa

SEQ ID NO: 60726 - DNA, 25 bp, Artificial
  Probe
tgaccaaaacctcagaattcatcag

SEQ ID NO: 60727 - DNA, 25 bp, Artificial
  Probe
agtgaccaaaacctcagaattcatc

SEQ ID NO: 60728 - DNA, 25 bp, Artificial
  Probe
ttcatcaggtaagaaatccgagggg

SEQ ID NO: 60729 - DNA, 25 bp, Artificial
  Probe
gtgaccaaaacctcagaattcatca

SEQ ID NO: 60730 - DNA, 25 bp, Artificial
  Probe
cagtgaccaaaacctcagaattcat

SEQ ID NO: 60731 - DNA, 25 bp, Artificial
  Probe
ttccacggcactactatgcaaattt

SEQ ID NO: 60732 - DNA, 25 bp, Artificial
  Probe
acatccagtgaccaaaacctcagaa

SEQ ID NO: 60733 - DNA, 25 bp, Artificial
  Probe
gaccaaaacctcagaattcatcagg

SEQ ID NO: 60734 - DNA, 25 bp, Artificial
  Probe
cgtacttacggtcctttcccattct

SEQ ID NO: 60735 - DNA, 25 bp, Artificial
  Probe
gttccacggcactactatgcaaatt

SEQ ID NO: 60736 - DNA, 25 bp, Artificial
  Probe
acctcagaattcatcaggtaagaaa

SEQ ID NO: 60737 - DNA, 25 bp, Artificial
  Probe
aaacctcagaattcatcaggtaaga

SEQ ID NO: 60738 - DNA, 25 bp, Artificial
  Probe
tggttttgtggttaataaattatca

SEQ ID NO: 60739 - DNA, 25 bp, Artificial
  Probe
ttacggtcctttcccattctcgttc

SEQ ID NO: 60740 - DNA, 25 bp, Artificial
  Probe
cttacggtcctttcccattctcgtt

SEQ ID NO: 60741 - DNA, 25 bp, Artificial
  Probe
tccagtgaccaaaacctcagaattc

SEQ ID NO: 60742 - DNA, 25 bp, Artificial
  Probe
ccagtgaccaaaacctcagaattca

SEQ ID NO: 60743 - DNA, 25 bp, Artificial
  Probe
cacatccagtgaccaaaacctcaga

SEQ ID NO: 60744 - DNA, 25 bp, Artificial
  Probe
ggttttgtggttaataaattatcac

SEQ ID NO: 60745 - DNA, 25 bp, Artificial
  Probe
tgttccacggcactactatgcaaat

SEQ ID NO: 60746 - DNA, 25 bp, Artificial
  Probe
ccaaaacctcagaattcatcaggta

SEQ ID NO: 60747 - DNA, 25 bp, Artificial
  Probe
caaaacctcagaattcatcaggtaa

SEQ ID NO: 60748 - DNA, 25 bp, Artificial
  Probe
gagccaactatcccaaatatacctg

SEQ ID NO: 60749 - DNA, 25 bp, Artificial
  Probe
attgctacagttgtgattggaggag

SEQ ID NO: 60750 - DNA, 25 bp, Artificial
  Probe
gattgctacagttgtgattggagga

SEQ ID NO: 60751 - DNA, 25 bp, Artificial
  Probe
aggattgctacagttgtgattggag

SEQ ID NO: 60752 - DNA, 25 bp, Artificial
  Probe
ctacagttgtgattggaggagttgt

SEQ ID NO: 60753 - DNA, 25 bp, Artificial
  Probe
caggattgctacagttgtgattgga

SEQ ID NO: 60754 - DNA, 25 bp, Artificial
  Probe
tacagttgtgattggaggagttgtg

SEQ ID NO: 60755 - DNA, 25 bp, Artificial
  Probe
gctacagttgtgattggaggagttg

SEQ ID NO: 60756 - DNA, 25 bp, Artificial
  Probe
ggattgctacagttgtgattggagg

SEQ ID NO: 60757 - DNA, 25 bp, Artificial
  Probe
gaggagccaactatcccaaatatac

SEQ ID NO: 60758 - DNA, 25 bp, Artificial
  Probe
tgctacagttgtgattggaggagtt

SEQ ID NO: 60759 - DNA, 25 bp, Artificial
  Probe
ttgctacagttgtgattggaggagt

SEQ ID NO: 60760 - DNA, 25 bp, Artificial
  Probe
ggagccaactatcccaaatatacct

SEQ ID NO: 60761 - DNA, 25 bp, Artificial
  Probe
aggagccaactatcccaaatatacc

SEQ ID NO: 60762 - DNA, 25 bp, Artificial
  Probe
cgaggagccaactatcccaaatata

SEQ ID NO: 60763 - DNA, 25 bp, Artificial
  Probe
aaatataccaaattctgcatctcca

SEQ ID NO: 60764 - DNA, 25 bp, Artificial
  Probe
agccaactatcccaaatatacctgg

SEQ ID NO: 60765 - DNA, 25 bp, Artificial
  Probe
gccaggattgctacagttgtgattg

SEQ ID NO: 60766 - DNA, 25 bp, Artificial
  Probe
gaaatataccaaattctgcatctcc

SEQ ID NO: 60767 - DNA, 25 bp, Artificial
  Probe
aatataccaaattctgcatctccag

SEQ ID NO: 60768 - DNA, 25 bp, Artificial
  Probe
gggtgaaatataccaaattctgcat

SEQ ID NO: 60769 - DNA, 25 bp, Artificial
  Probe
ccaggattgctacagttgtgattgg

SEQ ID NO: 60770 - DNA, 25 bp, Artificial
  Probe
gtgaaatataccaaattctgcatct

SEQ ID NO: 60771 - DNA, 25 bp, Artificial
  Probe
tgaaatataccaaattctgcatctc

SEQ ID NO: 60772 - DNA, 25 bp, Artificial
  Probe
ggtgaaatataccaaattctgcatc

SEQ ID NO: 60773 - DNA, 25 bp, Artificial
  Probe
ctccatagcagccaagatgatgtcc

SEQ ID NO: 60774 - DNA, 25 bp, Artificial
  Probe
cctccatagcagccaagatgatgtc

SEQ ID NO: 60775 - DNA, 25 bp, Artificial
  Probe
gtcctccatagcagccaagatgatg

SEQ ID NO: 60776 - DNA, 25 bp, Artificial
  Probe
gcatctccagaggaaaataagaaat

SEQ ID NO: 60777 - DNA, 25 bp, Artificial
  Probe
ctggggtgaaatataccaaattctg

SEQ ID NO: 60778 - DNA, 25 bp, Artificial
  Probe
tacctggggtgaaatataccaaatt

SEQ ID NO: 60779 - DNA, 25 bp, Artificial
  Probe
cctggggtgaaatataccaaattct

SEQ ID NO: 60780 - DNA, 25 bp, Artificial
  Probe
atacctggggtgaaatataccaaat

SEQ ID NO: 60781 - DNA, 25 bp, Artificial
  Probe
acctggggtgaaatataccaaattc

SEQ ID NO: 60782 - DNA, 25 bp, Artificial
  Probe
acagttgtgattggaggagttgtgg

SEQ ID NO: 60783 - DNA, 25 bp, Artificial
  Probe
tatacctggggtgaaatataccaaa

SEQ ID NO: 60784 - DNA, 25 bp, Artificial
  Probe
tggggtgaaatataccaaattctgc

SEQ ID NO: 60785 - DNA, 25 bp, Artificial
  Probe
atatacctggggtgaaatataccaa

SEQ ID NO: 60786 - DNA, 25 bp, Artificial
  Probe
aatatacctggggtgaaatatacca

SEQ ID NO: 60787 - DNA, 25 bp, Artificial
  Probe
tataccaaattctgcatctccagag

SEQ ID NO: 60788 - DNA, 25 bp, Artificial
  Probe
atataccaaattctgcatctccaga

SEQ ID NO: 60789 - DNA, 25 bp, Artificial
  Probe
aaatatacctggggtgaaatatacc

SEQ ID NO: 60790 - DNA, 25 bp, Artificial
  Probe
ccaaatatacctggggtgaaatata

SEQ ID NO: 60791 - DNA, 25 bp, Artificial
  Probe
tgcatctccagaggaaaataagaaa

SEQ ID NO: 60792 - DNA, 25 bp, Artificial
  Probe
ctgcatctccagaggaaaataagaa

SEQ ID NO: 60793 - DNA, 25 bp, Artificial
  Probe
cttacgtcaaggagttcagagatgg

SEQ ID NO: 60794 - DNA, 25 bp, Artificial
  Probe
ttacgtcaaggagttcagagatggc

SEQ ID NO: 60795 - DNA, 25 bp, Artificial
  Probe
caaggagttcagagatggctgtcag

SEQ ID NO: 60796 - DNA, 25 bp, Artificial
  Probe
gtcaaggagttcagagatggctgtc

SEQ ID NO: 60797 - DNA, 25 bp, Artificial
  Probe
ttatttaaaacacttccctgtcacc

SEQ ID NO: 60798 - DNA, 25 bp, Artificial
  Probe
tatttaaaacacttccctgtcaccc

SEQ ID NO: 60799 - DNA, 25 bp, Artificial
  Probe
aaggagttcagagatggctgtcaga

SEQ ID NO: 60800 - DNA, 25 bp, Artificial
  Probe
ccttacgtcaaggagttcagagatg

SEQ ID NO: 60801 - DNA, 25 bp, Artificial
  Probe
tacgtcaaggagttcagagatggct

SEQ ID NO: 60802 - DNA, 25 bp, Artificial
  Probe
tttatttaaaacacttccctgtcac

SEQ ID NO: 60803 - DNA, 25 bp, Artificial
  Probe
ctttatttaaaacacttccctgtca

SEQ ID NO: 60804 - DNA, 25 bp, Artificial
  Probe
cccttacgtcaaggagttcagagat

SEQ ID NO: 60805 - DNA, 25 bp, Artificial
  Probe
gagctaaaggagaagattgaccgtc

SEQ ID NO: 60806 - DNA, 25 bp, Artificial
  Probe
ctaaaggagaagattgaccgtcgct

SEQ ID NO: 60807 - DNA, 25 bp, Artificial
  Probe
taaaggagaagattgaccgtcgctc

SEQ ID NO: 60808 - DNA, 25 bp, Artificial
  Probe
cattgttgagatggtcccaggaaaa

SEQ ID NO: 60809 - DNA, 25 bp, Artificial
  Probe
attgttgagatggtcccaggaaaac

SEQ ID NO: 60810 - DNA, 25 bp, Artificial
  Probe
agctaaaggagaagattgaccgtcg

SEQ ID NO: 60811 - DNA, 25 bp, Artificial
  Probe
cgagctaaaggagaagattgaccgt

SEQ ID NO: 60812 - DNA, 25 bp, Artificial
  Probe
gacaatcccaagtccctgaagtctg

SEQ ID NO: 60813 - DNA, 25 bp, Artificial
  Probe
ccgagctaaaggagaagattgaccg

SEQ ID NO: 60814 - DNA, 25 bp, Artificial
  Probe
ttgttgagatggtcccaggaaaacc

SEQ ID NO: 60815 - DNA, 25 bp, Artificial
  Probe
ccattgttgagatggtcccaggaaa

SEQ ID NO: 60816 - DNA, 25 bp, Artificial
  Probe
actagatcagttcctggtatacaga

SEQ ID NO: 60817 - DNA, 25 bp, Artificial
  Probe
ttcaggaagaatacccagagttgtc

SEQ ID NO: 60818 - DNA, 25 bp, Artificial
  Probe
aactgcttaggagagacacagatga

SEQ ID NO: 60819 - DNA, 25 bp, Artificial
  Probe
taaactgcttaggagagacacagat

SEQ ID NO: 60820 - DNA, 25 bp, Artificial
  Probe
ttaaactgcttaggagagacacaga

SEQ ID NO: 60821 - DNA, 25 bp, Artificial
  Probe
tagatcagttcctggtatacagaag

SEQ ID NO: 60822 - DNA, 25 bp, Artificial
  Probe
ctagatcagttcctggtatacagaa

SEQ ID NO: 60823 - DNA, 25 bp, Artificial
  Probe
agatcagttcctggtatacagaagg

SEQ ID NO: 60824 - DNA, 25 bp, Artificial
  Probe
atttaaactgcttaggagagacaca

SEQ ID NO: 60825 - DNA, 25 bp, Artificial
  Probe
catttaaactgcttaggagagacac

SEQ ID NO: 60826 - DNA, 25 bp, Artificial
  Probe
ccatttaaactgcttaggagagaca

SEQ ID NO: 60827 - DNA, 25 bp, Artificial
  Probe
cttcaggaagaatacccagagttgt

SEQ ID NO: 60828 - DNA, 25 bp, Artificial
  Probe
ctgcttaggagagacacagatgagt

SEQ ID NO: 60829 - DNA, 25 bp, Artificial
  Probe
actgcttaggagagacacagatgag

SEQ ID NO: 60830 - DNA, 25 bp, Artificial
  Probe
ctggtatacagaaggcactcagtag

SEQ ID NO: 60831 - DNA, 25 bp, Artificial
  Probe
aaactgcttaggagagacacagatg

SEQ ID NO: 60832 - DNA, 25 bp, Artificial
  Probe
tgcttaggagagacacagatgagtg

SEQ ID NO: 60833 - DNA, 25 bp, Artificial
  Probe
tttaaactgcttaggagagacacag

SEQ ID NO: 60834 - DNA, 25 bp, Artificial
  Probe
gtatacagaaggcactcagtagctg

SEQ ID NO: 60835 - DNA, 25 bp, Artificial
  Probe
gatcagttcctggtatacagaaggc

SEQ ID NO: 60836 - DNA, 25 bp, Artificial
  Probe
tttaccctttccttcctgtgtaacc

SEQ ID NO: 60837 - DNA, 25 bp, Artificial
  Probe
taccctttccttcctgtgtaacctc

SEQ ID NO: 60838 - DNA, 25 bp, Artificial
  Probe
aattttaccctttccttcctgtgta

SEQ ID NO: 60839 - DNA, 25 bp, Artificial
  Probe
catacatatgcattcacacaggaag

SEQ ID NO: 60840 - DNA, 25 bp, Artificial
  Probe
ggtatacagaaggcactcagtagct

SEQ ID NO: 60841 - DNA, 25 bp, Artificial
  Probe
acatacatatgcattcacacaggaa

SEQ ID NO: 60842 - DNA, 25 bp, Artificial
  Probe
atatgtaggactgccaattttaccc

SEQ ID NO: 60843 - DNA, 25 bp, Artificial
  Probe
gcttcaggaagaatacccagagttg

SEQ ID NO: 60844 - DNA, 25 bp, Artificial
  Probe
cacatacatatgcattcacacagga

SEQ ID NO: 60845 - DNA, 25 bp, Artificial
  Probe
atcagttcctggtatacagaaggca

SEQ ID NO: 60846 - DNA, 25 bp, Artificial
  Probe
tgtgtaacctcaggaaaatgtcttg

SEQ ID NO: 60847 - DNA, 25 bp, Artificial
  Probe
caattttaccctttccttcctgtgt

SEQ ID NO: 60848 - DNA, 25 bp, Artificial
  Probe
cctggtatacagaaggcactcagta

SEQ ID NO: 60849 - DNA, 25 bp, Artificial
  Probe
tggtatacagaaggcactcagtagc

SEQ ID NO: 60850 - DNA, 25 bp, Artificial
  Probe
tgtaacctcaggaaaatgtcttgac

SEQ ID NO: 60851 - DNA, 25 bp, Artificial
  Probe
gtgtaacctcaggaaaatgtcttga

SEQ ID NO: 60852 - DNA, 25 bp, Artificial
  Probe
ttaccctttccttcctgtgtaacct

SEQ ID NO: 60853 - DNA, 25 bp, Artificial
  Probe
tgcttcaggaagaatacccagagtt

SEQ ID NO: 60854 - DNA, 25 bp, Artificial
  Probe
ccaattttaccctttccttcctgtg

SEQ ID NO: 60855 - DNA, 25 bp, Artificial
  Probe
gtaacctcaggaaaatgtcttgacc

SEQ ID NO: 60856 - DNA, 25 bp, Artificial
  Probe
ctgtgtaacctcaggaaaatgtctt

SEQ ID NO: 60857 - DNA, 25 bp, Artificial
  Probe
attttaccctttccttcctgtgtaa

SEQ ID NO: 60858 - DNA, 25 bp, Artificial
  Probe
aagaagcctagtccattcagtggtg

SEQ ID NO: 60859 - DNA, 25 bp, Artificial
  Probe
caagaagcctagtccattcagtggt

SEQ ID NO: 60860 - DNA, 25 bp, Artificial
  Probe
gactgccaattttaccctttccttc

SEQ ID NO: 60861 - DNA, 25 bp, Artificial
  Probe
aagatgaagagcttggatgtgaatc

SEQ ID NO: 60862 - DNA, 25 bp, Artificial
  Probe
gaagatgaagagcttggatgtgaat

SEQ ID NO: 60863 - DNA, 25 bp, Artificial
  Probe
caaggaaatcaggaagaagaaagac

SEQ ID NO: 60864 - DNA, 25 bp, Artificial
  Probe
gatgagaagatgaagagcttggatg

SEQ ID NO: 60865 - DNA, 25 bp, Artificial
  Probe
aaggaaatcaggaagaagaaagacc

SEQ ID NO: 60866 - DNA, 25 bp, Artificial
  Probe
ccaaggaaatcaggaagaagaaaga

SEQ ID NO: 60867 - DNA, 25 bp, Artificial
  Probe
cttgatgagaagatgaagagcttgg

SEQ ID NO: 60868 - DNA, 25 bp, Artificial
  Probe
tgatgagaagatgaagagcttggat

SEQ ID NO: 60869 - DNA, 25 bp, Artificial
  Probe
atgagaagatgaagagcttggatgt

SEQ ID NO: 60870 - DNA, 25 bp, Artificial
  Probe
ttgatgagaagatgaagagcttgga

SEQ ID NO: 60871 - DNA, 25 bp, Artificial
  Probe
agaagatgaagagcttggatgtgaa

SEQ ID NO: 60872 - DNA, 25 bp, Artificial
  Probe
gatgaagagcttggatgtgaatcag

SEQ ID NO: 60873 - DNA, 25 bp, Artificial
  Probe
agatgaagagcttggatgtgaatca

SEQ ID NO: 60874 - DNA, 25 bp, Artificial
  Probe
gccaaggaaatcaggaagaagaaag

SEQ ID NO: 60875 - DNA, 25 bp, Artificial
  Probe
gagaagatgaagagcttggatgtga

SEQ ID NO: 60876 - DNA, 25 bp, Artificial
  Probe
tgagaagatgaagagcttggatgtg

SEQ ID NO: 60877 - DNA, 25 bp, Artificial
  Probe
tcttgatgagaagatgaagagcttg

SEQ ID NO: 60878 - DNA, 25 bp, Artificial
  Probe
aggaaatcaggaagaagaaagacct

SEQ ID NO: 60879 - DNA, 25 bp, Artificial
  Probe
tcaagttcaatgagtactggagatt

SEQ ID NO: 60880 - DNA, 25 bp, Artificial
  Probe
atgaagagcttggatgtgaatcagg

SEQ ID NO: 60881 - DNA, 25 bp, Artificial
  Probe
aggaagaagaaagacctgaagatca

SEQ ID NO: 60882 - DNA, 25 bp, Artificial
  Probe
gaagagcttggatgtgaatcaggac

SEQ ID NO: 60883 - DNA, 25 bp, Artificial
  Probe
tgaagatcaggaagaagtaaagccg

SEQ ID NO: 60884 - DNA, 25 bp, Artificial
  Probe
agaaccgcactcttcccaaataaag

SEQ ID NO: 60885 - DNA, 25 bp, Artificial
  Probe
aagagcttggatgtgaatcaggact

SEQ ID NO: 60886 - DNA, 25 bp, Artificial
  Probe
caagttcaatgagtactggagattg

SEQ ID NO: 60887 - DNA, 25 bp, Artificial
  Probe
ggctctcttgatgagaagatgaaga

SEQ ID NO: 60888 - DNA, 25 bp, Artificial
  Probe
acagagctagaggagtccattgaga

SEQ ID NO: 60889 - DNA, 25 bp, Artificial
  Probe
cagaaccgcactcttcccaaataaa

SEQ ID NO: 60890 - DNA, 25 bp, Artificial
  Probe
tgaagagcttggatgtgaatcagga

SEQ ID NO: 60891 - DNA, 25 bp, Artificial
  Probe
cttggatgtgaatcaggactcggag

SEQ ID NO: 60892 - DNA, 25 bp, Artificial
  Probe
cagagctagaggagtccattgagac

SEQ ID NO: 60893 - DNA, 25 bp, Artificial
  Probe
gacagagctagaggagtccattgag

SEQ ID NO: 60894 - DNA, 25 bp, Artificial
  Probe
gaagatcaggaagaagtaaagccgc

SEQ ID NO: 60895 - DNA, 25 bp, Artificial
  Probe
agagcttggatgtgaatcaggactc

SEQ ID NO: 60896 - DNA, 25 bp, Artificial
  Probe
ctgacagagctagaggagtccattg

SEQ ID NO: 60897 - DNA, 25 bp, Artificial
  Probe
tcaacgagttcaaagagctggttac

SEQ ID NO: 60898 - DNA, 25 bp, Artificial
  Probe
gtcaacgagttcaaagagctggtta

SEQ ID NO: 60899 - DNA, 25 bp, Artificial
  Probe
ggaagaagaaagacctgaagatcag

SEQ ID NO: 60900 - DNA, 25 bp, Artificial
  Probe
tgacagagctagaggagtccattga

SEQ ID NO: 60901 - DNA, 25 bp, Artificial
  Probe
actgacagagctagaggagtccatt

SEQ ID NO: 60902 - DNA, 25 bp, Artificial
  Probe
ctgaagatcaggaagaagtaaagcc

SEQ ID NO: 60903 - DNA, 25 bp, Artificial
  Probe
ctcaagttcaatgagtactggagat

SEQ ID NO: 60904 - DNA, 25 bp, Artificial
  Probe
agaaccactgacagagctagaggag

SEQ ID NO: 60905 - DNA, 25 bp, Artificial
  Probe
gaaccgcactcttcccaaataaagc

SEQ ID NO: 60906 - DNA, 25 bp, Artificial
  Probe
gacctgaaggatttggagttgattc

SEQ ID NO: 60907 - DNA, 25 bp, Artificial
  Probe
ggacctgaaggatttggagttgatt

SEQ ID NO: 60908 - DNA, 25 bp, Artificial
  Probe
gaaggacctgaaggatttggagttg

SEQ ID NO: 60909 - DNA, 25 bp, Artificial
  Probe
ggatttggagttgattcaaacaaga

SEQ ID NO: 60910 - DNA, 25 bp, Artificial
  Probe
aggatttggagttgattcaaacaag

SEQ ID NO: 60911 - DNA, 25 bp, Artificial
  Probe
gaaggatttggagttgattcaaaca

SEQ ID NO: 60912 - DNA, 25 bp, Artificial
  Probe
aaggatttggagttgattcaaacaa

SEQ ID NO: 60913 - DNA, 25 bp, Artificial
  Probe
aggacctgaaggatttggagttgat

SEQ ID NO: 60914 - DNA, 25 bp, Artificial
  Probe
tgaaggatttggagttgattcaaac

SEQ ID NO: 60915 - DNA, 25 bp, Artificial
  Probe
ctgaaggatttggagttgattcaaa

SEQ ID NO: 60916 - DNA, 25 bp, Artificial
  Probe
aaggacctgaaggatttggagttga

SEQ ID NO: 60917 - DNA, 25 bp, Artificial
  Probe
cctgaaggatttggagttgattcaa

SEQ ID NO: 60918 - DNA, 25 bp, Artificial
  Probe
atttggagttgattcaaacaagatc

SEQ ID NO: 60919 - DNA, 25 bp, Artificial
  Probe
gatttggagttgattcaaacaagat

SEQ ID NO: 60920 - DNA, 25 bp, Artificial
  Probe
gagttgattcaaacaagatctctgg

SEQ ID NO: 60921 - DNA, 25 bp, Artificial
  Probe
ggagttgattcaaacaagatctctg

SEQ ID NO: 60922 - DNA, 25 bp, Artificial
  Probe
tggagttgattcaaacaagatctct

SEQ ID NO: 60923 - DNA, 25 bp, Artificial
  Probe
gttgattcaaacaagatctctggga

SEQ ID NO: 60924 - DNA, 25 bp, Artificial
  Probe
agttgattcaaacaagatctctggg

SEQ ID NO: 60925 - DNA, 25 bp, Artificial
  Probe
ttggagttgattcaaacaagatctc

SEQ ID NO: 60926 - DNA, 25 bp, Artificial
  Probe
ttgattcaaacaagatctctgggag

SEQ ID NO: 60927 - DNA, 25 bp, Artificial
  Probe
gattcaaacaagatctctgggagtc

SEQ ID NO: 60928 - DNA, 25 bp, Artificial
  Probe
aagatgcttccccaggctataaatt

SEQ ID NO: 60929 - DNA, 25 bp, Artificial
  Probe
acctgaaggatttggagttgattca

SEQ ID NO: 60930 - DNA, 25 bp, Artificial
  Probe
attcaaacaagatctctgggagtct

SEQ ID NO: 60931 - DNA, 25 bp, Artificial
  Probe
tgattcaaacaagatctctgggagt

SEQ ID NO: 60932 - DNA, 25 bp, Artificial
  Probe
ggaaggacctgaaggatttggagtt

SEQ ID NO: 60933 - DNA, 25 bp, Artificial
  Probe
ttcaaacaagatctctgggagtctc

SEQ ID NO: 60934 - DNA, 25 bp, Artificial
  Probe
gatgcttccccaggctataaatttg

SEQ ID NO: 60935 - DNA, 25 bp, Artificial
  Probe
agatgcttccccaggctataaattt

SEQ ID NO: 60936 - DNA, 25 bp, Artificial
  Probe
tttggagttgattcaaacaagatct

SEQ ID NO: 60937 - DNA, 25 bp, Artificial
  Probe
atgcttccccaggctataaatttgt

SEQ ID NO: 60938 - DNA, 25 bp, Artificial
  Probe
tgcttccccaggctataaatttgtt

SEQ ID NO: 60939 - DNA, 25 bp, Artificial
  Probe
tcaaacaagatctctgggagtctcc

SEQ ID NO: 60940 - DNA, 25 bp, Artificial
  Probe
gaagatgcttccccaggctataaat

SEQ ID NO: 60941 - DNA, 25 bp, Artificial
  Probe
caaacaagatctctgggagtctcca

SEQ ID NO: 60942 - DNA, 25 bp, Artificial
  Probe
aaacaagatctctgggagtctccag

SEQ ID NO: 60943 - DNA, 25 bp, Artificial
  Probe
caggtagcctgtgtgtttgacaaac

SEQ ID NO: 60944 - DNA, 25 bp, Artificial
  Probe
aattcactggacagcattagtaact

SEQ ID NO: 60945 - DNA, 25 bp, Artificial
  Probe
taattcactggacagcattagtaac

SEQ ID NO: 60946 - DNA, 25 bp, Artificial
  Probe
attcactggacagcattagtaactg

SEQ ID NO: 60947 - DNA, 25 bp, Artificial
  Probe
ataattcactggacagcattagtaa

SEQ ID NO: 60948 - DNA, 25 bp, Artificial
  Probe
atataattcactggacagcattagt

SEQ ID NO: 60949 - DNA, 25 bp, Artificial
  Probe
agaaatcaaaggttcccaaatcaaa

SEQ ID NO: 60950 - DNA, 25 bp, Artificial
  Probe
aatcaaaggttcccaaatcaaactt

SEQ ID NO: 60951 - DNA, 25 bp, Artificial
  Probe
aaatcaaaggttcccaaatcaaact

SEQ ID NO: 60952 - DNA, 25 bp, Artificial
  Probe
gaaatcaaaggttcccaaatcaaac

SEQ ID NO: 60953 - DNA, 25 bp, Artificial
  Probe
tataattcactggacagcattagta

SEQ ID NO: 60954 - DNA, 25 bp, Artificial
  Probe
tagaaatcaaaggttcccaaatcaa

SEQ ID NO: 60955 - DNA, 25 bp, Artificial
  Probe
gctagaaatcaaaggttcccaaatc

SEQ ID NO: 60956 - DNA, 25 bp, Artificial
  Probe
ctagaaatcaaaggttcccaaatca

SEQ ID NO: 60957 - DNA, 25 bp, Artificial
  Probe
tgctagaaatcaaaggttcccaaat

SEQ ID NO: 60958 - DNA, 25 bp, Artificial
  Probe
ctgctagaaatcaaaggttcccaaa

SEQ ID NO: 60959 - DNA, 25 bp, Artificial
  Probe
tttcctcttgtctttaactggactc

SEQ ID NO: 60960 - DNA, 25 bp, Artificial
  Probe
ctttcctcttgtctttaactggact

SEQ ID NO: 60961 - DNA, 25 bp, Artificial
  Probe
gactttcctcttgtctttaactgga

SEQ ID NO: 60962 - DNA, 25 bp, Artificial
  Probe
actttcctcttgtctttaactggac

SEQ ID NO: 60963 - DNA, 25 bp, Artificial
  Probe
atggaggacaaattagtggatcgtt

SEQ ID NO: 60964 - DNA, 25 bp, Artificial
  Probe
ggactttcctcttgtctttaactgg

SEQ ID NO: 60965 - DNA, 25 bp, Artificial
  Probe
ttcctcttgtctttaactggactca

SEQ ID NO: 60966 - DNA, 25 bp, Artificial
  Probe
gcatagctcagacaagactttatat

SEQ ID NO: 60967 - DNA, 25 bp, Artificial
  Probe
aattagtggatcgttcctggaatcg

SEQ ID NO: 60968 - DNA, 25 bp, Artificial
  Probe
tcctcttgtctttaactggactcag

SEQ ID NO: 60969 - DNA, 25 bp, Artificial
  Probe
tggaggacaaattagtggatcgttc

SEQ ID NO: 60970 - DNA, 25 bp, Artificial
  Probe
atcaaaggttcccaaatcaaacttt

SEQ ID NO: 60971 - DNA, 25 bp, Artificial
  Probe
tatataattcactggacagcattag

SEQ ID NO: 60972 - DNA, 25 bp, Artificial
  Probe
tcaaaggttcccaaatcaaacttta

SEQ ID NO: 60973 - DNA, 25 bp, Artificial
  Probe
aaattagtggatcgttcctggaatc

SEQ ID NO: 60974 - DNA, 25 bp, Artificial
  Probe
caaattagtggatcgttcctggaat

SEQ ID NO: 60975 - DNA, 25 bp, Artificial
  Probe
catggaggacaaattagtggatcgt

SEQ ID NO: 60976 - DNA, 25 bp, Artificial
  Probe
aggttcccaaatcaaactttatatt

SEQ ID NO: 60977 - DNA, 25 bp, Artificial
  Probe
aaggttcccaaatcaaactttatat

SEQ ID NO: 60978 - DNA, 25 bp, Artificial
  Probe
caaaggttcccaaatcaaactttat

SEQ ID NO: 60979 - DNA, 25 bp, Artificial
  Probe
gacaaattagtggatcgttcctgga

SEQ ID NO: 60980 - DNA, 25 bp, Artificial
  Probe
acaaattagtggatcgttcctggaa

SEQ ID NO: 60981 - DNA, 25 bp, Artificial
  Probe
ctttggactcttccttgtgaaacct

SEQ ID NO: 60982 - DNA, 25 bp, Artificial
  Probe
gctgctagaaatcaaaggttcccaa

SEQ ID NO: 60983 - DNA, 25 bp, Artificial
  Probe
ttcactggacagcattagtaactgc

SEQ ID NO: 60984 - DNA, 25 bp, Artificial
  Probe
attagtggatcgttcctggaatcgt

SEQ ID NO: 60985 - DNA, 25 bp, Artificial
  Probe
agcatagctcagacaagactttata

SEQ ID NO: 60986 - DNA, 25 bp, Artificial
  Probe
tttggactcttccttgtgaaacctg

SEQ ID NO: 60987 - DNA, 25 bp, Artificial
  Probe
actttatataattcactggacagca

SEQ ID NO: 60988 - DNA, 25 bp, Artificial
  Probe
ggaggacaaattagtggatcgttcc

SEQ ID NO: 60989 - DNA, 25 bp, Artificial
  Probe
accattatgtcgattctatcagtca

SEQ ID NO: 60990 - DNA, 25 bp, Artificial
  Probe
cattatgtcgattctatcagtcacc

SEQ ID NO: 60991 - DNA, 25 bp, Artificial
  Probe
ccattatgtcgattctatcagtcac

SEQ ID NO: 60992 - DNA, 25 bp, Artificial
  Probe
caccattatgtcgattctatcagtc

SEQ ID NO: 60993 - DNA, 25 bp, Artificial
  Probe
gcaccattatgtcgattctatcagt

SEQ ID NO: 60994 - DNA, 25 bp, Artificial
  Probe
gaggcaccattatgtcgattctatc

SEQ ID NO: 60995 - DNA, 25 bp, Artificial
  Probe
atacaaaggacaatgacaaccagaa

SEQ ID NO: 60996 - DNA, 25 bp, Artificial
  Probe
cataatgggagatacagacagcaaa

SEQ ID NO: 60997 - DNA, 25 bp, Artificial
  Probe
ggcaccattatgtcgattctatcag

SEQ ID NO: 60998 - DNA, 25 bp, Artificial
  Probe
tacaaaggacaatgacaaccagaaa

SEQ ID NO: 60999 - DNA, 25 bp, Artificial
  Probe
tgaggcaccattatgtcgattctat

SEQ ID NO: 61000 - DNA, 25 bp, Artificial
  Probe
aggcaccattatgtcgattctatca

SEQ ID NO: 61001 - DNA, 25 bp, Artificial
  Probe
atgaggcaccattatgtcgattcta

SEQ ID NO: 61002 - DNA, 25 bp, Artificial
  Probe
catacaaaggacaatgacaaccaga

SEQ ID NO: 61003 - DNA, 25 bp, Artificial
  Probe
caagtgaaagaagcaagacaaactc

SEQ ID NO: 61004 - DNA, 25 bp, Artificial
  Probe
cgattctatcagtcacccattgtac

SEQ ID NO: 61005 - DNA, 25 bp, Artificial
  Probe
aagtgaaagaagcaagacaaactcc

SEQ ID NO: 61006 - DNA, 25 bp, Artificial
  Probe
gtacaaatgtagctcaaagatggtg

SEQ ID NO: 61007 - DNA, 25 bp, Artificial
  Probe
gtgaaagaagcaagacaaactcctg

SEQ ID NO: 61008 - DNA, 25 bp, Artificial
  Probe
attatgtcgattctatcagtcaccc

SEQ ID NO: 61009 - DNA, 25 bp, Artificial
  Probe
catgaggcaccattatgtcgattct

SEQ ID NO: 61010 - DNA, 25 bp, Artificial
  Probe
gcatacaaaggacaatgacaaccag

SEQ ID NO: 61011 - DNA, 25 bp, Artificial
  Probe
tcgattctatcagtcacccattgta

SEQ ID NO: 61012 - DNA, 25 bp, Artificial
  Probe
ttatgtcgattctatcagtcaccca

SEQ ID NO: 61013 - DNA, 25 bp, Artificial
  Probe
tatgtcgattctatcagtcacccat

SEQ ID NO: 61014 - DNA, 25 bp, Artificial
  Probe
atgtactagctgcatccatttctat

SEQ ID NO: 61015 - DNA, 25 bp, Artificial
  Probe
agtgaaagaagcaagacaaactcct

SEQ ID NO: 61016 - DNA, 25 bp, Artificial
  Probe
tacaaatgtagctcaaagatggtgc

SEQ ID NO: 61017 - DNA, 25 bp, Artificial
  Probe
tgtactagctgcatccatttctatg

SEQ ID NO: 61018 - DNA, 25 bp, Artificial
  Probe
catgtactagctgcatccatttcta

SEQ ID NO: 61019 - DNA, 25 bp, Artificial
  Probe
aatcatgtactagctgcatccattt

SEQ ID NO: 61020 - DNA, 25 bp, Artificial
  Probe
aaatcatgtactagctgcatccatt

SEQ ID NO: 61021 - DNA, 25 bp, Artificial
  Probe
gcaagtgaaagaagcaagacaaact

SEQ ID NO: 61022 - DNA, 25 bp, Artificial
  Probe
atcatgtactagctgcatccatttc

SEQ ID NO: 61023 - DNA, 25 bp, Artificial
  Probe
gaaatcatgtactagctgcatccat

SEQ ID NO: 61024 - DNA, 25 bp, Artificial
  Probe
atgtcgattctatcagtcacccatt

SEQ ID NO: 61025 - DNA, 25 bp, Artificial
  Probe
tgagaaatcatgtactagctgcatc

SEQ ID NO: 61026 - DNA, 25 bp, Artificial
  Probe
gagaaatcatgtactagctgcatcc

SEQ ID NO: 61027 - DNA, 25 bp, Artificial
  Probe
ataatgggagatacagacagcaaaa

SEQ ID NO: 61028 - DNA, 25 bp, Artificial
  Probe
tcatgtactagctgcatccatttct

SEQ ID NO: 61029 - DNA, 25 bp, Artificial
  Probe
agaaatcatgtactagctgcatcca

SEQ ID NO: 61030 - DNA, 25 bp, Artificial
  Probe
taatgggagatacagacagcaaaac

SEQ ID NO: 61031 - DNA, 25 bp, Artificial
  Probe
gtcgattctatcagtcacccattgt

SEQ ID NO: 61032 - DNA, 25 bp, Artificial
  Probe
tgtcgattctatcagtcacccattg

SEQ ID NO: 61033 - DNA, 25 bp, Artificial
  Probe
aagtttccccttacaacaatgagaa

SEQ ID NO: 61034 - DNA, 25 bp, Artificial
  Probe
cttgtagaagataccatgaggtgtt

SEQ ID NO: 61035 - DNA, 25 bp, Artificial
  Probe
ttgtagaagataccatgaggtgttg

SEQ ID NO: 61036 - DNA, 25 bp, Artificial
  Probe
gtagaagataccatgaggtgttgtg

SEQ ID NO: 61037 - DNA, 25 bp, Artificial
  Probe
tagaagataccatgaggtgttgtgt

SEQ ID NO: 61038 - DNA, 25 bp, Artificial
  Probe
tgtagaagataccatgaggtgttgt

SEQ ID NO: 61039 - DNA, 25 bp, Artificial
  Probe
ccttgtagaagataccatgaggtgt

SEQ ID NO: 61040 - DNA, 25 bp, Artificial
  Probe
caaaccttgtagaagataccatgag

SEQ ID NO: 61041 - DNA, 25 bp, Artificial
  Probe
gcaaaccttgtagaagataccatga

SEQ ID NO: 61042 - DNA, 25 bp, Artificial
  Probe
caagtccaatcacacagcttcaatg

SEQ ID NO: 61043 - DNA, 25 bp, Artificial
  Probe
agaagataccatgaggtgttgtgtg

SEQ ID NO: 61044 - DNA, 25 bp, Artificial
  Probe
aaaccttgtagaagataccatgagg

SEQ ID NO: 61045 - DNA, 25 bp, Artificial
  Probe
gaagataccatgaggtgttgtgtgt

SEQ ID NO: 61046 - DNA, 25 bp, Artificial
  Probe
aagataccatgaggtgttgtgtgtg

SEQ ID NO: 61047 - DNA, 25 bp, Artificial
  Probe
ctgtcagttgtatagcatctgccac

SEQ ID NO: 61048 - DNA, 25 bp, Artificial
  Probe
tgcaaaccttgtagaagataccatg

SEQ ID NO: 61049 - DNA, 25 bp, Artificial
  Probe
agttgtatagcatctgccacctttg

SEQ ID NO: 61050 - DNA, 25 bp, Artificial
  Probe
tcagttgtatagcatctgccacctt

SEQ ID NO: 61051 - DNA, 25 bp, Artificial
  Probe
ttgtatagcatctgccacctttgtc

SEQ ID NO: 61052 - DNA, 25 bp, Artificial
  Probe
aatcagtgagatgcttgggttccta

SEQ ID NO: 61053 - DNA, 25 bp, Artificial
  Probe
aaagaacttcactagccagggagaa

SEQ ID NO: 61054 - DNA, 25 bp, Artificial
  Probe
gttgtatagcatctgccacctttgt

SEQ ID NO: 61055 - DNA, 25 bp, Artificial
  Probe
cagaatcagtgagatgcttgggttc

SEQ ID NO: 61056 - DNA, 25 bp, Artificial
  Probe
ctcagaaaagaacttcactagccag

SEQ ID NO: 61057 - DNA, 25 bp, Artificial
  Probe
cagttgtatagcatctgccaccttt

SEQ ID NO: 61058 - DNA, 25 bp, Artificial
  Probe
atgtgctcagaaaagaacttcacta

SEQ ID NO: 61059 - DNA, 25 bp, Artificial
  Probe
tatagcatctgccacctttgtcctt

SEQ ID NO: 61060 - DNA, 25 bp, Artificial
  Probe
atcagtgagatgcttgggttcctag

SEQ ID NO: 61061 - DNA, 25 bp, Artificial
  Probe
gcaagtccaatcacacagcttcaat

SEQ ID NO: 61062 - DNA, 25 bp, Artificial
  Probe
gtcagttgtatagcatctgccacct

SEQ ID NO: 61063 - DNA, 25 bp, Artificial
  Probe
cctgtcagttgtatagcatctgcca

SEQ ID NO: 61064 - DNA, 25 bp, Artificial
  Probe
gaaagttccccagaatcagtgagat

SEQ ID NO: 61065 - DNA, 25 bp, Artificial
  Probe
aagtccaatcacacagcttcaatgg

SEQ ID NO: 61066 - DNA, 25 bp, Artificial
  Probe
aagaacttcactagccagggagaac

SEQ ID NO: 61067 - DNA, 25 bp, Artificial
  Probe
tgtgctcagaaaagaacttcactag

SEQ ID NO: 61068 - DNA, 25 bp, Artificial
  Probe
aaagttccccagaatcagtgagatg

SEQ ID NO: 61069 - DNA, 25 bp, Artificial
  Probe
gcccatcttggtttcttaaaataga

SEQ ID NO: 61070 - DNA, 25 bp, Artificial
  Probe
tgtcagttgtatagcatctgccacc

SEQ ID NO: 61071 - DNA, 25 bp, Artificial
  Probe
aaccttgtagaagataccatgaggt

SEQ ID NO: 61072 - DNA, 25 bp, Artificial
  Probe
tcagaaaagaacttcactagccagg

SEQ ID NO: 61073 - DNA, 25 bp, Artificial
  Probe
accttgtagaagataccatgaggtg

SEQ ID NO: 61074 - DNA, 25 bp, Artificial
  Probe
gtatagcatctgccacctttgtcct

SEQ ID NO: 61075 - DNA, 25 bp, Artificial
  Probe
catgtgctcagaaaagaacttcact

SEQ ID NO: 61076 - DNA, 25 bp, Artificial
  Probe
gaatcagtgagatgcttgggttcct

SEQ ID NO: 61077 - DNA, 25 bp, Artificial
  Probe
agaatcagtgagatgcttgggttcc

SEQ ID NO: 61078 - DNA, 25 bp, Artificial
  Probe
gaaaagaacttcactagccagggag

SEQ ID NO: 61079 - DNA, 25 bp, Artificial
  Probe
tgcctaagatccaagacagaataat

SEQ ID NO: 61080 - DNA, 25 bp, Artificial
  Probe
gcctaagatccaagacagaataatg

SEQ ID NO: 61081 - DNA, 25 bp, Artificial
  Probe
caagacagaataatgaatggactca

SEQ ID NO: 61082 - DNA, 25 bp, Artificial
  Probe
ttgcctaagatccaagacagaataa

SEQ ID NO: 61083 - DNA, 25 bp, Artificial
  Probe
aagacagaataatgaatggactcaa

SEQ ID NO: 61084 - DNA, 25 bp, Artificial
  Probe
cctaagatccaagacagaataatga

SEQ ID NO: 61085 - DNA, 25 bp, Artificial
  Probe
ccaagacagaataatgaatggactc

SEQ ID NO: 61086 - DNA, 25 bp, Artificial
  Probe
agatccaagacagaataatgaatgg

SEQ ID NO: 61087 - DNA, 25 bp, Artificial
  Probe
agaataatgaatggactcaaactgc

SEQ ID NO: 61088 - DNA, 25 bp, Artificial
  Probe
gaataatgaatggactcaaactgcc

SEQ ID NO: 61089 - DNA, 25 bp, Artificial
  Probe
ataatgaatggactcaaactgcctt

SEQ ID NO: 61090 - DNA, 25 bp, Artificial
  Probe
aataatgaatggactcaaactgcct

SEQ ID NO: 61091 - DNA, 25 bp, Artificial
  Probe
aagatccaagacagaataatgaatg

SEQ ID NO: 61092 - DNA, 25 bp, Artificial
  Probe
tttgcctaagatccaagacagaata

SEQ ID NO: 61093 - DNA, 25 bp, Artificial
  Probe
taatgaatggactcaaactgccttg

SEQ ID NO: 61094 - DNA, 25 bp, Artificial
  Probe
ctttgcctaagatccaagacagaat

SEQ ID NO: 61095 - DNA, 25 bp, Artificial
  Probe
acagaataatgaatggactcaaact

SEQ ID NO: 61096 - DNA, 25 bp, Artificial
  Probe
gacagaataatgaatggactcaaac

SEQ ID NO: 61097 - DNA, 25 bp, Artificial
  Probe
agacagaataatgaatggactcaaa

SEQ ID NO: 61098 - DNA, 25 bp, Artificial
  Probe
cagaataatgaatggactcaaactg

SEQ ID NO: 61099 - DNA, 25 bp, Artificial
  Probe
ctaagatccaagacagaataatgaa

SEQ ID NO: 61100 - DNA, 25 bp, Artificial
  Probe
ctttgccccacctttattaaaatct

SEQ ID NO: 61101 - DNA, 25 bp, Artificial
  Probe
cctttgccccacctttattaaaatc

SEQ ID NO: 61102 - DNA, 25 bp, Artificial
  Probe
tttgccccacctttattaaaatctt

SEQ ID NO: 61103 - DNA, 25 bp, Artificial
  Probe
gctttgcctaagatccaagacagaa

SEQ ID NO: 61104 - DNA, 25 bp, Artificial
  Probe
taagatccaagacagaataatgaat

SEQ ID NO: 61105 - DNA, 25 bp, Artificial
  Probe
ccctttgccccacctttattaaaat

SEQ ID NO: 61106 - DNA, 25 bp, Artificial
  Probe
aatgaatggactcaaactgccttgg

SEQ ID NO: 61107 - DNA, 25 bp, Artificial
  Probe
tccaagacagaataatgaatggact

SEQ ID NO: 61108 - DNA, 25 bp, Artificial
  Probe
atccaagacagaataatgaatggac

SEQ ID NO: 61109 - DNA, 25 bp, Artificial
  Probe
accctttgccccacctttattaaaa

SEQ ID NO: 61110 - DNA, 25 bp, Artificial
  Probe
aaccctttgccccacctttattaaa

SEQ ID NO: 61111 - DNA, 25 bp, Artificial
  Probe
gatccaagacagaataatgaatgga

SEQ ID NO: 61112 - DNA, 25 bp, Artificial
  Probe
gataacctgacactggacgggaatc

SEQ ID NO: 61113 - DNA, 25 bp, Artificial
  Probe
gacttttcgaccaattcaacccttt

SEQ ID NO: 61114 - DNA, 25 bp, Artificial
  Probe
caaccctttgccccacctttattaa

SEQ ID NO: 61115 - DNA, 25 bp, Artificial
  Probe
acttttcgaccaattcaaccctttg

SEQ ID NO: 61116 - DNA, 25 bp, Artificial
  Probe
tcaaccctttgccccacctttatta

SEQ ID NO: 61117 - DNA, 25 bp, Artificial
  Probe
ggacttttcgaccaattcaaccctt

SEQ ID NO: 61118 - DNA, 25 bp, Artificial
  Probe
tgaggacttttcgaccaattcaacc

SEQ ID NO: 61119 - DNA, 25 bp, Artificial
  Probe
cttttcgaccaattcaaccctttgc

SEQ ID NO: 61120 - DNA, 25 bp, Artificial
  Probe
ttgaggacttttcgaccaattcaac

SEQ ID NO: 61121 - DNA, 25 bp, Artificial
  Probe
gttgaggacttttcgaccaattcaa

SEQ ID NO: 61122 - DNA, 25 bp, Artificial
  Probe
cgttgaggacttttcgaccaattca

SEQ ID NO: 61123 - DNA, 25 bp, Artificial
  Probe
gaggacttttcgaccaattcaaccc

SEQ ID NO: 61124 - DNA, 25 bp, Artificial
  Probe
atttcttgattgtgatactgtggtc

SEQ ID NO: 61125 - DNA, 25 bp, Artificial
  Probe
aatttcttgattgtgatactgtggt

SEQ ID NO: 61126 - DNA, 25 bp, Artificial
  Probe
tttcttgattgtgatactgtggtca

SEQ ID NO: 61127 - DNA, 25 bp, Artificial
  Probe
gaaagtgggtgactattctctgaaa

SEQ ID NO: 61128 - DNA, 25 bp, Artificial
  Probe
ctagcataaagggtgagtgaaagtg

SEQ ID NO: 61129 - DNA, 25 bp, Artificial
  Probe
tgaaagtgggtgactattctctgaa

SEQ ID NO: 61130 - DNA, 25 bp, Artificial
  Probe
gagtgaaagtgggtgactattctct

SEQ ID NO: 61131 - DNA, 25 bp, Artificial
  Probe
gtgaaagtgggtgactattctctga

SEQ ID NO: 61132 - DNA, 25 bp, Artificial
  Probe
agtgaaagtgggtgactattctctg

SEQ ID NO: 61133 - DNA, 25 bp, Artificial
  Probe
tagcataaagggtgagtgaaagtgg

SEQ ID NO: 61134 - DNA, 25 bp, Artificial
  Probe
tgagtgaaagtgggtgactattctc

SEQ ID NO: 61135 - DNA, 25 bp, Artificial
  Probe
gtgagtgaaagtgggtgactattct

SEQ ID NO: 61136 - DNA, 25 bp, Artificial
  Probe
aaatttcttgattgtgatactgtgg

SEQ ID NO: 61137 - DNA, 25 bp, Artificial
  Probe
aaagtcacaagccaagaaaagaaaa

SEQ ID NO: 61138 - DNA, 25 bp, Artificial
  Probe
aaaagtcacaagccaagaaaagaaa

SEQ ID NO: 61139 - DNA, 25 bp, Artificial
  Probe
ggtgagtgaaagtgggtgactattc

SEQ ID NO: 61140 - DNA, 25 bp, Artificial
  Probe
gaaaagtcacaagccaagaaaagaa

SEQ ID NO: 61141 - DNA, 25 bp, Artificial
  Probe
ataaagggtgagtgaaagtgggtga

SEQ ID NO: 61142 - DNA, 25 bp, Artificial
  Probe
cataaagggtgagtgaaagtgggtg

SEQ ID NO: 61143 - DNA, 25 bp, Artificial
  Probe
ccgaaggagacaaaattaaggattg

SEQ ID NO: 61144 - DNA, 25 bp, Artificial
  Probe
gaaggagacaaaattaaggattgcc

SEQ ID NO: 61145 - DNA, 25 bp, Artificial
  Probe
aaagtgggtgactattctctgaaaa

SEQ ID NO: 61146 - DNA, 25 bp, Artificial
  Probe
aagtgggtgactattctctgaaaag

SEQ ID NO: 61147 - DNA, 25 bp, Artificial
  Probe
cgaaggagacaaaattaaggattgc

SEQ ID NO: 61148 - DNA, 25 bp, Artificial
  Probe
tattctctgaaaagtcacaagccaa

SEQ ID NO: 61149 - DNA, 25 bp, Artificial
  Probe
ctattctctgaaaagtcacaagcca

SEQ ID NO: 61150 - DNA, 25 bp, Artificial
  Probe
actattctctgaaaagtcacaagcc

SEQ ID NO: 61151 - DNA, 25 bp, Artificial
  Probe
ctgaaaagtcacaagccaagaaaag

SEQ ID NO: 61152 - DNA, 25 bp, Artificial
  Probe
agtgggtgactattctctgaaaagt

SEQ ID NO: 61153 - DNA, 25 bp, Artificial
  Probe
tgaaaagtcacaagccaagaaaaga

SEQ ID NO: 61154 - DNA, 25 bp, Artificial
  Probe
tctgaaaagtcacaagccaagaaaa

SEQ ID NO: 61155 - DNA, 25 bp, Artificial
  Probe
attctctgaaaagtcacaagccaag

SEQ ID NO: 61156 - DNA, 25 bp, Artificial
  Probe
aaggagacaaaattaaggattgcct

SEQ ID NO: 61157 - DNA, 25 bp, Artificial
  Probe
tccgaaggagacaaaattaaggatt

SEQ ID NO: 61158 - DNA, 25 bp, Artificial
  Probe
aatccgaaggagacaaaattaagga

SEQ ID NO: 61159 - DNA, 25 bp, Artificial
  Probe
gaatccgaaggagacaaaattaagg

SEQ ID NO: 61160 - DNA, 25 bp, Artificial
  Probe
ctctgaaaagtcacaagccaagaaa

SEQ ID NO: 61161 - DNA, 25 bp, Artificial
  Probe
aattgaatccgaaggagacaaaatt

SEQ ID NO: 61162 - DNA, 25 bp, Artificial
  Probe
tgaatccgaaggagacaaaattaag

SEQ ID NO: 61163 - DNA, 25 bp, Artificial
  Probe
ttgaatccgaaggagacaaaattaa

SEQ ID NO: 61164 - DNA, 25 bp, Artificial
  Probe
attgaatccgaaggagacaaaatta

SEQ ID NO: 61165 - DNA, 25 bp, Artificial
  Probe
taaagggtgagtgaaagtgggtgac

SEQ ID NO: 61166 - DNA, 25 bp, Artificial
  Probe
gggtgagtgaaagtgggtgactatt

SEQ ID NO: 61167 - DNA, 25 bp, Artificial
  Probe
tctctgaaaagtcacaagccaagaa

SEQ ID NO: 61168 - DNA, 25 bp, Artificial
  Probe
ttctctgaaaagtcacaagccaaga

SEQ ID NO: 61169 - DNA, 25 bp, Artificial
  Probe
aagcataatctacgaagcctatctc

SEQ ID NO: 61170 - DNA, 25 bp, Artificial
  Probe
agcataatctacgaagcctatctct

SEQ ID NO: 61171 - DNA, 25 bp, Artificial
  Probe
gcataatctacgaagcctatctctt

SEQ ID NO: 61172 - DNA, 25 bp, Artificial
  Probe
taagcataatctacgaagcctatct

SEQ ID NO: 61173 - DNA, 25 bp, Artificial
  Probe
ttaagcataatctacgaagcctatc

SEQ ID NO: 61174 - DNA, 25 bp, Artificial
  Probe
atccagaatgacgacaacttcttaa

SEQ ID NO: 61175 - DNA, 25 bp, Artificial
  Probe
catccagaatgacgacaacttctta

SEQ ID NO: 61176 - DNA, 25 bp, Artificial
  Probe
ttcttaagcataatctacgaagcct

SEQ ID NO: 61177 - DNA, 25 bp, Artificial
  Probe
tgacgacaacttcttaagcataatc

SEQ ID NO: 61178 - DNA, 25 bp, Artificial
  Probe
gaatgacgacaacttcttaagcata

SEQ ID NO: 61179 - DNA, 25 bp, Artificial
  Probe
tcttaagcataatctacgaagccta

SEQ ID NO: 61180 - DNA, 25 bp, Artificial
  Probe
gacgacaacttcttaagcataatct

SEQ ID NO: 61181 - DNA, 25 bp, Artificial
  Probe
aatgacgacaacttcttaagcataa

SEQ ID NO: 61182 - DNA, 25 bp, Artificial
  Probe
atgacgacaacttcttaagcataat

SEQ ID NO: 61183 - DNA, 25 bp, Artificial
  Probe
cttaagcataatctacgaagcctat

SEQ ID NO: 61184 - DNA, 25 bp, Artificial
  Probe
acaacttcttaagcataatctacga

SEQ ID NO: 61185 - DNA, 25 bp, Artificial
  Probe
acgacaacttcttaagcataatcta

SEQ ID NO: 61186 - DNA, 25 bp, Artificial
  Probe
taatctacgaagcctatctcttcag

SEQ ID NO: 61187 - DNA, 25 bp, Artificial
  Probe
ctacctgagagcaaagactgagaac

SEQ ID NO: 61188 - DNA, 25 bp, Artificial
  Probe
cctgagagcaaagactgagaactag

SEQ ID NO: 61189 - DNA, 25 bp, Artificial
  Probe
gacaacttcttaagcataatctacg

SEQ ID NO: 61190 - DNA, 25 bp, Artificial
  Probe
cgacaacttcttaagcataatctac

SEQ ID NO: 61191 - DNA, 25 bp, Artificial
  Probe
ataatctacgaagcctatctcttca

SEQ ID NO: 61192 - DNA, 25 bp, Artificial
  Probe
acctgagagcaaagactgagaacta

SEQ ID NO: 61193 - DNA, 25 bp, Artificial
  Probe
tacctgagagcaaagactgagaact

SEQ ID NO: 61194 - DNA, 25 bp, Artificial
  Probe
tcatccagaatgacgacaacttctt

SEQ ID NO: 61195 - DNA, 25 bp, Artificial
  Probe
cataatctacgaagcctatctcttc

SEQ ID NO: 61196 - DNA, 25 bp, Artificial
  Probe
aatctacgaagcctatctcttcagc

SEQ ID NO: 61197 - DNA, 25 bp, Artificial
  Probe
caacttcttaagcataatctacgaa

SEQ ID NO: 61198 - DNA, 25 bp, Artificial
  Probe
ctcatccagaatgacgacaacttct

SEQ ID NO: 61199 - DNA, 25 bp, Artificial
  Probe
agaatgacgacaacttcttaagcat

SEQ ID NO: 61200 - DNA, 25 bp, Artificial
  Probe
tccagaatgacgacaacttcttaag

SEQ ID NO: 61201 - DNA, 25 bp, Artificial
  Probe
acaaagtatagtgatgcagagtaaa

SEQ ID NO: 61202 - DNA, 25 bp, Artificial
  Probe
aacaaagtatagtgatgcagagtaa

SEQ ID NO: 61203 - DNA, 25 bp, Artificial
  Probe
ttaacaaagtatagtgatgcagagt

SEQ ID NO: 61204 - DNA, 25 bp, Artificial
  Probe
cagaatgacgacaacttcttaagca

SEQ ID NO: 61205 - DNA, 25 bp, Artificial
  Probe
cttcttaagcataatctacgaagcc

SEQ ID NO: 61206 - DNA, 25 bp, Artificial
  Probe
acttcttaagcataatctacgaagc

SEQ ID NO: 61207 - DNA, 25 bp, Artificial
  Probe
attgtgaacatgcctttcctctctg

SEQ ID NO: 61208 - DNA, 25 bp, Artificial
  Probe
cattgtgaacatgcctttcctctct

SEQ ID NO: 61209 - DNA, 25 bp, Artificial
  Probe
ctgagtatcccactaccaccattgt

SEQ ID NO: 61210 - DNA, 25 bp, Artificial
  Probe
ccagaatgacgacaacttcttaagc

SEQ ID NO: 61211 - DNA, 25 bp, Artificial
  Probe
gtatcccactaccaccattgtgaac

SEQ ID NO: 61212 - DNA, 25 bp, Artificial
  Probe
agtatcccactaccaccattgtgaa

SEQ ID NO: 61213 - DNA, 25 bp, Artificial
  Probe
taacaaagtatagtgatgcagagta

SEQ ID NO: 61214 - DNA, 25 bp, Artificial
  Probe
agataacctacatcaacagagacac

SEQ ID NO: 61215 - DNA, 25 bp, Artificial
  Probe
ggagataacctacatcaacagagac

SEQ ID NO: 61216 - DNA, 25 bp, Artificial
  Probe
gagataacctacatcaacagagaca

SEQ ID NO: 61217 - DNA, 25 bp, Artificial
  Probe
gataacctacatcaacagagacacc

SEQ ID NO: 61218 - DNA, 25 bp, Artificial
  Probe
ataacctacatcaacagagacacca

SEQ ID NO: 61219 - DNA, 25 bp, Artificial
  Probe
taacctacatcaacagagacaccaa

SEQ ID NO: 61220 - DNA, 25 bp, Artificial
  Probe
gtgaaggagataacctacatcaaca

SEQ ID NO: 61221 - DNA, 25 bp, Artificial
  Probe
aggagataacctacatcaacagaga

SEQ ID NO: 61222 - DNA, 25 bp, Artificial
  Probe
tgaaggagataacctacatcaacag

SEQ ID NO: 61223 - DNA, 25 bp, Artificial
  Probe
gaaggagataacctacatcaacaga

SEQ ID NO: 61224 - DNA, 25 bp, Artificial
  Probe
aaggagataacctacatcaacagag

SEQ ID NO: 61225 - DNA, 25 bp, Artificial
  Probe
ggtgaaggagataacctacatcaac

SEQ ID NO: 61226 - DNA, 25 bp, Artificial
  Probe
gacaaagagcaagaccatttacaag

SEQ ID NO: 61227 - DNA, 25 bp, Artificial
  Probe
agacaaagagcaagaccatttacaa

SEQ ID NO: 61228 - DNA, 25 bp, Artificial
  Probe
gagacaaagagcaagaccatttaca

SEQ ID NO: 61229 - DNA, 25 bp, Artificial
  Probe
ggagacaaagagcaagaccatttac

SEQ ID NO: 61230 - DNA, 25 bp, Artificial
  Probe
aacctacatcaacagagacaccaaa

SEQ ID NO: 61231 - DNA, 25 bp, Artificial
  Probe
atcctaacgtgtcctgagttataag

SEQ ID NO: 61232 - DNA, 25 bp, Artificial
  Probe
acaaagagcaagaccatttacaagc

SEQ ID NO: 61233 - DNA, 25 bp, Artificial
  Probe
gtatcctaacgtgtcctgagttata

SEQ ID NO: 61234 - DNA, 25 bp, Artificial
  Probe
tgtatcctaacgtgtcctgagttat

SEQ ID NO: 61235 - DNA, 25 bp, Artificial
  Probe
tcctaacgtgtcctgagttataagg

SEQ ID NO: 61236 - DNA, 25 bp, Artificial
  Probe
tatcctaacgtgtcctgagttataa

SEQ ID NO: 61237 - DNA, 25 bp, Artificial
  Probe
aaatcatcctggagacaaagagcaa

SEQ ID NO: 61238 - DNA, 25 bp, Artificial
  Probe
gtgtatcctaacgtgtcctgagtta

SEQ ID NO: 61239 - DNA, 25 bp, Artificial
  Probe
aatcatcctggagacaaagagcaag

SEQ ID NO: 61240 - DNA, 25 bp, Artificial
  Probe
gggtgaaggagataacctacatcaa

SEQ ID NO: 61241 - DNA, 25 bp, Artificial
  Probe
catgtgtgtatcctaacgtgtcctg

SEQ ID NO: 61242 - DNA, 25 bp, Artificial
  Probe
gagggtgaaggagataacctacatc

SEQ ID NO: 61243 - DNA, 25 bp, Artificial
  Probe
atgtgtgtatcctaacgtgtcctga

SEQ ID NO: 61244 - DNA, 25 bp, Artificial
  Probe
tgtgtatcctaacgtgtcctgagtt

SEQ ID NO: 61245 - DNA, 25 bp, Artificial
  Probe
ttgcatgtgtgtatcctaacgtgtc

SEQ ID NO: 61246 - DNA, 25 bp, Artificial
  Probe
ctacatcaacagagacaccaaaatc

SEQ ID NO: 61247 - DNA, 25 bp, Artificial
  Probe
catcaacagagacaccaaaatcatc

SEQ ID NO: 61248 - DNA, 25 bp, Artificial
  Probe
tacatcaacagagacaccaaaatca

SEQ ID NO: 61249 - DNA, 25 bp, Artificial
  Probe
tggagacaaagagcaagaccattta

SEQ ID NO: 61250 - DNA, 25 bp, Artificial
  Probe
cctaacgtgtcctgagttataaggc

SEQ ID NO: 61251 - DNA, 25 bp, Artificial
  Probe
agggtgaaggagataacctacatca

SEQ ID NO: 61252 - DNA, 25 bp, Artificial
  Probe
cgaaaagtccattctgatgttgtag

SEQ ID NO: 61253 - DNA, 25 bp, Artificial
  Probe
ataaagcgaaaagtccattctgatg

SEQ ID NO: 61254 - DNA, 25 bp, Artificial
  Probe
cataaagcgaaaagtccattctgat

SEQ ID NO: 61255 - DNA, 25 bp, Artificial
  Probe
acatcaacagagacaccaaaatcat

SEQ ID NO: 61256 - DNA, 25 bp, Artificial
  Probe
cctacatcaacagagacaccaaaat

SEQ ID NO: 61257 - DNA, 25 bp, Artificial
  Probe
aaagtccattctgatgttgtagaaa

SEQ ID NO: 61258 - DNA, 25 bp, Artificial
  Probe
ttcacataaagcgaaaagtccattc

SEQ ID NO: 61259 - DNA, 25 bp, Artificial
  Probe
ctctatacctttacagaatttcgca

SEQ ID NO: 61260 - DNA, 25 bp, Artificial
  Probe
actctatacctttacagaatttcgc

SEQ ID NO: 61261 - DNA, 25 bp, Artificial
  Probe
tctatacctttacagaatttcgcat

SEQ ID NO: 61262 - DNA, 25 bp, Artificial
  Probe
gggtcactctatacctttacagaat

SEQ ID NO: 61263 - DNA, 25 bp, Artificial
  Probe
cactctatacctttacagaatttcg

SEQ ID NO: 61264 - DNA, 25 bp, Artificial
  Probe
atacctttacagaatttcgcataaa

SEQ ID NO: 61265 - DNA, 25 bp, Artificial
  Probe
ctatacctttacagaatttcgcata

SEQ ID NO: 61266 - DNA, 25 bp, Artificial
  Probe
ggtcactctatacctttacagaatt

SEQ ID NO: 61267 - DNA, 25 bp, Artificial
  Probe
tatacctttacagaatttcgcataa

SEQ ID NO: 61268 - DNA, 25 bp, Artificial
  Probe
aatttcgcataaaagtttaacctgt

SEQ ID NO: 61269 - DNA, 25 bp, Artificial
  Probe
gtcactctatacctttacagaattt

SEQ ID NO: 61270 - DNA, 25 bp, Artificial
  Probe
cttcaaggaggagatggctgctaac

SEQ ID NO: 61271 - DNA, 25 bp, Artificial
  Probe
gaatttcgcataaaagtttaacctg

SEQ ID NO: 61272 - DNA, 25 bp, Artificial
  Probe
cagaatttcgcataaaagtttaacc

SEQ ID NO: 61273 - DNA, 25 bp, Artificial
  Probe
agaatttcgcataaaagtttaacct

SEQ ID NO: 61274 - DNA, 25 bp, Artificial
  Probe
tcactctatacctttacagaatttc

SEQ ID NO: 61275 - DNA, 25 bp, Artificial
  Probe
ggggtcactctatacctttacagaa

SEQ ID NO: 61276 - DNA, 25 bp, Artificial
  Probe
acagaatttcgcataaaagtttaac

SEQ ID NO: 61277 - DNA, 25 bp, Artificial
  Probe
tacctttacagaatttcgcataaaa

SEQ ID NO: 61278 - DNA, 25 bp, Artificial
  Probe
ctggggtcactctatacctttacag

SEQ ID NO: 61279 - DNA, 25 bp, Artificial
  Probe
tggggtcactctatacctttacaga

SEQ ID NO: 61280 - DNA, 25 bp, Artificial
  Probe
cctttacagaatttcgcataaaagt

SEQ ID NO: 61281 - DNA, 25 bp, Artificial
  Probe
acctttacagaatttcgcataaaag

SEQ ID NO: 61282 - DNA, 25 bp, Artificial
  Probe
cctggggtcactctatacctttaca

SEQ ID NO: 61283 - DNA, 25 bp, Artificial
  Probe
tttacagaatttcgcataaaagttt

SEQ ID NO: 61284 - DNA, 25 bp, Artificial
  Probe
ctttacagaatttcgcataaaagtt

SEQ ID NO: 61285 - DNA, 25 bp, Artificial
  Probe
tacagaatttcgcataaaagtttaa

SEQ ID NO: 61286 - DNA, 25 bp, Artificial
  Probe
ttacagaatttcgcataaaagttta

SEQ ID NO: 61287 - DNA, 25 bp, Artificial
  Probe
ccctggggtcactctatacctttac

SEQ ID NO: 61288 - DNA, 25 bp, Artificial
  Probe
tccctggggtcactctataccttta

SEQ ID NO: 61289 - DNA, 25 bp, Artificial
  Probe
ctccctggggtcactctataccttt

SEQ ID NO: 61290 - DNA, 25 bp, Artificial
  Probe
cttactgacttaggcaatacaccaa

SEQ ID NO: 61291 - DNA, 25 bp, Artificial
  Probe
ttactgacttaggcaatacaccaag

SEQ ID NO: 61292 - DNA, 25 bp, Artificial
  Probe
tactgacttaggcaatacaccaagg

SEQ ID NO: 61293 - DNA, 25 bp, Artificial
  Probe
gcttactgacttaggcaatacacca

SEQ ID NO: 61294 - DNA, 25 bp, Artificial
  Probe
ctgtttcttggagcatcactaatgg

SEQ ID NO: 61295 - DNA, 25 bp, Artificial
  Probe
ttctgcttactgacttaggcaatac

SEQ ID NO: 61296 - DNA, 25 bp, Artificial
  Probe
aaggtgctttctgcttactgactta

SEQ ID NO: 61297 - DNA, 25 bp, Artificial
  Probe
tttgtttacagcaattcgtggactt

SEQ ID NO: 61298 - DNA, 25 bp, Artificial
  Probe
aggtgctttctgcttactgacttag

SEQ ID NO: 61299 - DNA, 25 bp, Artificial
  Probe
ctgcttactgacttaggcaatacac

SEQ ID NO: 61300 - DNA, 25 bp, Artificial
  Probe
tctgcttactgacttaggcaataca

SEQ ID NO: 61301 - DNA, 25 bp, Artificial
  Probe
ttgtttacagcaattcgtggacttg

SEQ ID NO: 61302 - DNA, 25 bp, Artificial
  Probe
gtttgtttacagcaattcgtggact

SEQ ID NO: 61303 - DNA, 25 bp, Artificial
  Probe
caatgaagagacactttgacatttc

SEQ ID NO: 61304 - DNA, 25 bp, Artificial
  Probe
ggtgctttctgcttactgacttagg

SEQ ID NO: 61305 - DNA, 25 bp, Artificial
  Probe
tgcttactgacttaggcaatacacc

SEQ ID NO: 61306 - DNA, 25 bp, Artificial
  Probe
gaaggtgctttctgcttactgactt

SEQ ID NO: 61307 - DNA, 25 bp, Artificial
  Probe
caatacaccaagggcaagattttaa

SEQ ID NO: 61308 - DNA, 25 bp, Artificial
  Probe
tttctgcttactgacttaggcaata

SEQ ID NO: 61309 - DNA, 25 bp, Artificial
  Probe
ggtttgtttacagcaattcgtggac

SEQ ID NO: 61310 - DNA, 25 bp, Artificial
  Probe
tgtttcttggagcatcactaatggc

SEQ ID NO: 61311 - DNA, 25 bp, Artificial
  Probe
ctttctgcttactgacttaggcaat

SEQ ID NO: 61312 - DNA, 25 bp, Artificial
  Probe
gtgctttctgcttactgacttaggc

SEQ ID NO: 61313 - DNA, 25 bp, Artificial
  Probe
gcaatacaccaagggcaagatttta

SEQ ID NO: 61314 - DNA, 25 bp, Artificial
  Probe
gctgtttcttggagcatcactaatg

SEQ ID NO: 61315 - DNA, 25 bp, Artificial
  Probe
aatacaccaagggcaagattttaaa

SEQ ID NO: 61316 - DNA, 25 bp, Artificial
  Probe
tgtttacagcaattcgtggacttgg

SEQ ID NO: 61317 - DNA, 25 bp, Artificial
  Probe
taggcaatacaccaagggcaagatt

SEQ ID NO: 61318 - DNA, 25 bp, Artificial
  Probe
ttaggcaatacaccaagggcaagat

SEQ ID NO: 61319 - DNA, 25 bp, Artificial
  Probe
actgacttaggcaatacaccaaggg

SEQ ID NO: 61320 - DNA, 25 bp, Artificial
  Probe
gaagaaggtgctttctgcttactga

SEQ ID NO: 61321 - DNA, 25 bp, Artificial
  Probe
gggtttgtttacagcaattcgtgga

SEQ ID NO: 61322 - DNA, 25 bp, Artificial
  Probe
aagaaggtgctttctgcttactgac

SEQ ID NO: 61323 - DNA, 25 bp, Artificial
  Probe
ggctgtttcttggagcatcactaat

SEQ ID NO: 61324 - DNA, 25 bp, Artificial
  Probe
tgggtttgtttacagcaattcgtgg

SEQ ID NO: 61325 - DNA, 25 bp, Artificial
  Probe
gtttacagcaattcgtggacttggg

SEQ ID NO: 61326 - DNA, 25 bp, Artificial
  Probe
gctttctgcttactgacttaggcaa

SEQ ID NO: 61327 - DNA, 25 bp, Artificial
  Probe
cttaggcaatacaccaagggcaaga

SEQ ID NO: 61328 - DNA, 25 bp, Artificial
  Probe
aggcaatacaccaagggcaagattt

SEQ ID NO: 61329 - DNA, 25 bp, Artificial
  Probe
tttggtctgggagggtttgtttgtt

SEQ ID NO: 61330 - DNA, 25 bp, Artificial
  Probe
agaaggtgctttctgcttactgact

SEQ ID NO: 61331 - DNA, 25 bp, Artificial
  Probe
ggaagaaggtgctttctgcttactg

SEQ ID NO: 61332 - DNA, 25 bp, Artificial
  Probe
aggaagaaggtgctttctgcttact

SEQ ID NO: 61333 - DNA, 25 bp, Artificial
  Probe
caggaagaaggtgctttctgcttac

SEQ ID NO: 61334 - DNA, 25 bp, Artificial
  Probe
acttaggcaatacaccaagggcaag

SEQ ID NO: 61335 - DNA, 25 bp, Artificial
  Probe
ctgctgttgttgctgttcttattta

SEQ ID NO: 61336 - DNA, 25 bp, Artificial
  Probe
tcttaccgaacaaacattccaagtt

SEQ ID NO: 61337 - DNA, 25 bp, Artificial
  Probe
tcctttatcagtggtgtacgaaatc

SEQ ID NO: 61338 - DNA, 25 bp, Artificial
  Probe
cttaccgaacaaacattccaagttg

SEQ ID NO: 61339 - DNA, 25 bp, Artificial
  Probe
agtcttaccgaacaaacattccaag

SEQ ID NO: 61340 - DNA, 25 bp, Artificial
  Probe
gagtcttaccgaacaaacattccaa

SEQ ID NO: 61341 - DNA, 25 bp, Artificial
  Probe
ttcctttatcagtggtgtacgaaat

SEQ ID NO: 61342 - DNA, 25 bp, Artificial
  Probe
gtcttaccgaacaaacattccaagt

SEQ ID NO: 61343 - DNA, 25 bp, Artificial
  Probe
gttcctttatcagtggtgtacgaaa

SEQ ID NO: 61344 - DNA, 25 bp, Artificial
  Probe
ctttatcagtggtgtacgaaatccc

SEQ ID NO: 61345 - DNA, 25 bp, Artificial
  Probe
cctttatcagtggtgtacgaaatcc

SEQ ID NO: 61346 - DNA, 25 bp, Artificial
  Probe
tttatcagtggtgtacgaaatccct

SEQ ID NO: 61347 - DNA, 25 bp, Artificial
  Probe
tgagtcttaccgaacaaacattcca

SEQ ID NO: 61348 - DNA, 25 bp, Artificial
  Probe
gatttgtttgcccgtactgaagaaa

SEQ ID NO: 61349 - DNA, 25 bp, Artificial
  Probe
ctgtttgagcatgttatattcttgt

SEQ ID NO: 61350 - DNA, 25 bp, Artificial
  Probe
tctgtttgagcatgttatattcttg

SEQ ID NO: 61351 - DNA, 25 bp, Artificial
  Probe
gctgctgttgttgctgttcttattt

SEQ ID NO: 61352 - DNA, 25 bp, Artificial
  Probe
ggttcctttatcagtggtgtacgaa

SEQ ID NO: 61353 - DNA, 25 bp, Artificial
  Probe
ttatcagtggtgtacgaaatccctg

SEQ ID NO: 61354 - DNA, 25 bp, Artificial
  Probe
tgatttgtttgcccgtactgaagaa

SEQ ID NO: 61355 - DNA, 25 bp, Artificial
  Probe
ttctgtttgagcatgttatattctt

SEQ ID NO: 61356 - DNA, 25 bp, Artificial
  Probe
tttctgtttgagcatgttatattct

SEQ ID NO: 61357 - DNA, 25 bp, Artificial
  Probe
tgtttgagcatgttatattcttgta

SEQ ID NO: 61358 - DNA, 25 bp, Artificial
  Probe
ctgggttcctttatcagtggtgtac

SEQ ID NO: 61359 - DNA, 25 bp, Artificial
  Probe
ttaccgaacaaacattccaagttgg

SEQ ID NO: 61360 - DNA, 25 bp, Artificial
  Probe
ggactccccactgtgttaatattta

SEQ ID NO: 61361 - DNA, 25 bp, Artificial
  Probe
tatcagtggtgtacgaaatccctgt

SEQ ID NO: 61362 - DNA, 25 bp, Artificial
  Probe
gtgatttgtttgcccgtactgaaga

SEQ ID NO: 61363 - DNA, 25 bp, Artificial
  Probe
atttgtttgcccgtactgaagaaac

SEQ ID NO: 61364 - DNA, 25 bp, Artificial
  Probe
tttgcccgtactgaagaaactcaac

SEQ ID NO: 61365 - DNA, 25 bp, Artificial
  Probe
tgtgatttgtttgcccgtactgaag

SEQ ID NO: 61366 - DNA, 25 bp, Artificial
  Probe
gggttcctttatcagtggtgtacga

SEQ ID NO: 61367 - DNA, 25 bp, Artificial
  Probe
gactccccactgtgttaatatttat

SEQ ID NO: 61368 - DNA, 25 bp, Artificial
  Probe
aacaaacattccaagttgggacttc

SEQ ID NO: 61369 - DNA, 25 bp, Artificial
  Probe
gaacaaacattccaagttgggactt

SEQ ID NO: 61370 - DNA, 25 bp, Artificial
  Probe
agctgctgttgttgctgttcttatt

SEQ ID NO: 61371 - DNA, 25 bp, Artificial
  Probe
gtttgagcatgttatattcttgtaa

SEQ ID NO: 61372 - DNA, 25 bp, Artificial
  Probe
actccccactgtgttaatatttatt

SEQ ID NO: 61373 - DNA, 25 bp, Artificial
  Probe
tgggttcctttatcagtggtgtacg

SEQ ID NO: 61374 - DNA, 25 bp, Artificial
  Probe
atcagtggtgtacgaaatccctgtt

SEQ ID NO: 61375 - DNA, 25 bp, Artificial
  Probe
tttgtttgcccgtactgaagaaact

SEQ ID NO: 61376 - DNA, 25 bp, Artificial
  Probe
gctgggttcctttatcagtggtgta

SEQ ID NO: 61377 - DNA, 25 bp, Artificial
  Probe
tcagtggtgtacgaaatccctgttt

SEQ ID NO: 61378 - DNA, 25 bp, Artificial
  Probe
taccgaacaaacattccaagttggg

SEQ ID NO: 61379 - DNA, 25 bp, Artificial
  Probe
gtttgcccgtactgaagaaactcaa

SEQ ID NO: 61380 - DNA, 25 bp, Artificial
  Probe
tcagtatatcattcctgtggcaatt

SEQ ID NO: 61381 - DNA, 25 bp, Artificial
  Probe
aatcagtatatcattcctgtggcaa

SEQ ID NO: 61382 - DNA, 25 bp, Artificial
  Probe
gacctaattccagcagtctgtatag

SEQ ID NO: 61383 - DNA, 25 bp, Artificial
  Probe
atcagtatatcattcctgtggcaat

SEQ ID NO: 61384 - DNA, 25 bp, Artificial
  Probe
acctaattccagcagtctgtataga

SEQ ID NO: 61385 - DNA, 25 bp, Artificial
  Probe
cctaattccagcagtctgtatagat

SEQ ID NO: 61386 - DNA, 25 bp, Artificial
  Probe
caatcagtatatcattcctgtggca

SEQ ID NO: 61387 - DNA, 25 bp, Artificial
  Probe
attccagcagtctgtatagataact

SEQ ID NO: 61388 - DNA, 25 bp, Artificial
  Probe
tccagcagtctgtatagataactaa

SEQ ID NO: 61389 - DNA, 25 bp, Artificial
  Probe
ttccagcagtctgtatagataacta

SEQ ID NO: 61390 - DNA, 25 bp, Artificial
  Probe
aattccagcagtctgtatagataac

SEQ ID NO: 61391 - DNA, 25 bp, Artificial
  Probe
gcaatcagtatatcattcctgtggc

SEQ ID NO: 61392 - DNA, 25 bp, Artificial
  Probe
ggacctaattccagcagtctgtata

SEQ ID NO: 61393 - DNA, 25 bp, Artificial
  Probe
tcttctaagtaaatctgtgggtgac

SEQ ID NO: 61394 - DNA, 25 bp, Artificial
  Probe
ttctgcaccttcatcttctaagtaa

SEQ ID NO: 61395 - DNA, 25 bp, Artificial
  Probe
catcttctaagtaaatctgtgggtg

SEQ ID NO: 61396 - DNA, 25 bp, Artificial
  Probe
atcttctaagtaaatctgtgggtga

SEQ ID NO: 61397 - DNA, 25 bp, Artificial
  Probe
tcatcttctaagtaaatctgtgggt

SEQ ID NO: 61398 - DNA, 25 bp, Artificial
  Probe
atatcattcctgtggcaatttctgt

SEQ ID NO: 61399 - DNA, 25 bp, Artificial
  Probe
tatatcattcctgtggcaatttctg

SEQ ID NO: 61400 - DNA, 25 bp, Artificial
  Probe
gtatatcattcctgtggcaatttct

SEQ ID NO: 61401 - DNA, 25 bp, Artificial
  Probe
agtatatcattcctgtggcaatttc

SEQ ID NO: 61402 - DNA, 25 bp, Artificial
  Probe
cttctaagtaaatctgtgggtgact

SEQ ID NO: 61403 - DNA, 25 bp, Artificial
  Probe
tatcattcctgtggcaatttctgtc

SEQ ID NO: 61404 - DNA, 25 bp, Artificial
  Probe
gcaccttcatcttctaagtaaatct

SEQ ID NO: 61405 - DNA, 25 bp, Artificial
  Probe
ttcatcttctaagtaaatctgtggg

SEQ ID NO: 61406 - DNA, 25 bp, Artificial
  Probe
taatttcaggttactatgccatgct

SEQ ID NO: 61407 - DNA, 25 bp, Artificial
  Probe
ttaatttcaggttactatgccatgc

SEQ ID NO: 61408 - DNA, 25 bp, Artificial
  Probe
tgcaatcagtatatcattcctgtgg

SEQ ID NO: 61409 - DNA, 25 bp, Artificial
  Probe
gcagtctgtatagataactaaagcc

SEQ ID NO: 61410 - DNA, 25 bp, Artificial
  Probe
ctaattccagcagtctgtatagata

SEQ ID NO: 61411 - DNA, 25 bp, Artificial
  Probe
aatttcaggttactatgccatgctt

SEQ ID NO: 61412 - DNA, 25 bp, Artificial
  Probe
agtctgtatagataactaaagccca

SEQ ID NO: 61413 - DNA, 25 bp, Artificial
  Probe
cagtatatcattcctgtggcaattt

SEQ ID NO: 61414 - DNA, 25 bp, Artificial
  Probe
cagtctgtatagataactaaagccc

SEQ ID NO: 61415 - DNA, 25 bp, Artificial
  Probe
attccctattcagttacattacgaa

SEQ ID NO: 61416 - DNA, 25 bp, Artificial
  Probe
atttcaggttactatgccatgcttg

SEQ ID NO: 61417 - DNA, 25 bp, Artificial
  Probe
tctgtatagataactaaagcccagt

SEQ ID NO: 61418 - DNA, 25 bp, Artificial
  Probe
agcagtctgtatagataactaaagc

SEQ ID NO: 61419 - DNA, 25 bp, Artificial
  Probe
taattccagcagtctgtatagataa

SEQ ID NO: 61420 - DNA, 25 bp, Artificial
  Probe
ctctttgaactatatggtattccct

SEQ ID NO: 61421 - DNA, 25 bp, Artificial
  Probe
tctctttgaactatatggtattccc

SEQ ID NO: 61422 - DNA, 25 bp, Artificial
  Probe
gtctgtatagataactaaagcccag

SEQ ID NO: 61423 - DNA, 25 bp, Artificial
  Probe
accttcatcttctaagtaaatctgt

SEQ ID NO: 61424 - DNA, 25 bp, Artificial
  Probe
atggtattccctattcagttacatt

SEQ ID NO: 61425 - DNA, 25 bp, Artificial
  Probe
ccgtggtcactactgtatgtaatat

SEQ ID NO: 61426 - DNA, 25 bp, Artificial
  Probe
gtgacatcagcatagtgttcttgag

SEQ ID NO: 61427 - DNA, 25 bp, Artificial
  Probe
cgtggtcactactgtatgtaatatt

SEQ ID NO: 61428 - DNA, 25 bp, Artificial
  Probe
gtgtgacatcagcatagtgttcttg

SEQ ID NO: 61429 - DNA, 25 bp, Artificial
  Probe
tgtgacatcagcatagtgttcttga

SEQ ID NO: 61430 - DNA, 25 bp, Artificial
  Probe
gacagtgttgacaaggttaaagaag

SEQ ID NO: 61431 - DNA, 25 bp, Artificial
  Probe
tgacagtgttgacaaggttaaagaa

SEQ ID NO: 61432 - DNA, 25 bp, Artificial
  Probe
agtgacagtgttgacaaggttaaag

SEQ ID NO: 61433 - DNA, 25 bp, Artificial
  Probe
cgagtgacagtgttgacaaggttaa

SEQ ID NO: 61434 - DNA, 25 bp, Artificial
  Probe
gtgacagtgttgacaaggttaaaga

SEQ ID NO: 61435 - DNA, 25 bp, Artificial
  Probe
gagtgacagtgttgacaaggttaaa

SEQ ID NO: 61436 - DNA, 25 bp, Artificial
  Probe
cccgtggtcactactgtatgtaata

SEQ ID NO: 61437 - DNA, 25 bp, Artificial
  Probe
acagtgttgacaaggttaaagaagc

SEQ ID NO: 61438 - DNA, 25 bp, Artificial
  Probe
tgacatcagcatagtgttcttgagc

SEQ ID NO: 61439 - DNA, 25 bp, Artificial
  Probe
tggtcactactgtatgtaatattca

SEQ ID NO: 61440 - DNA, 25 bp, Artificial
  Probe
ttaaccttccaagactgaagactac

SEQ ID NO: 61441 - DNA, 25 bp, Artificial
  Probe
aagactgaagactacacggtgacaa

SEQ ID NO: 61442 - DNA, 25 bp, Artificial
  Probe
cttaaccttccaagactgaagacta

SEQ ID NO: 61443 - DNA, 25 bp, Artificial
  Probe
cgtgtgacatcagcatagtgttctt

SEQ ID NO: 61444 - DNA, 25 bp, Artificial
  Probe
ggtcactactgtatgtaatattcac

SEQ ID NO: 61445 - DNA, 25 bp, Artificial
  Probe
gtggtcactactgtatgtaatattc

SEQ ID NO: 61446 - DNA, 25 bp, Artificial
  Probe
taaccttccaagactgaagactaca

SEQ ID NO: 61447 - DNA, 25 bp, Artificial
  Probe
ctcttaaccttccaagactgaagac

SEQ ID NO: 61448 - DNA, 25 bp, Artificial
  Probe
tcttaaccttccaagactgaagact

SEQ ID NO: 61449 - DNA, 25 bp, Artificial
  Probe
agtgttgacaaggttaaagaagctg

SEQ ID NO: 61450 - DNA, 25 bp, Artificial
  Probe
cagtgttgacaaggttaaagaagct

SEQ ID NO: 61451 - DNA, 25 bp, Artificial
  Probe
agactgaagactacacggtgacaag

SEQ ID NO: 61452 - DNA, 25 bp, Artificial
  Probe
tcccgtggtcactactgtatgtaat

SEQ ID NO: 61453 - DNA, 25 bp, Artificial
  Probe
atcccgtggtcactactgtatgtaa

SEQ ID NO: 61454 - DNA, 25 bp, Artificial
  Probe
aatcccgtggtcactactgtatgta

SEQ ID NO: 61455 - DNA, 25 bp, Artificial
  Probe
cctcttaaccttccaagactgaaga

SEQ ID NO: 61456 - DNA, 25 bp, Artificial
  Probe
aaggttaaagaagctgcatgttaag

SEQ ID NO: 61457 - DNA, 25 bp, Artificial
  Probe
caaggttaaagaagctgcatgttaa

SEQ ID NO: 61458 - DNA, 25 bp, Artificial
  Probe
ggttaaagaagctgcatgttaagtg

SEQ ID NO: 61459 - DNA, 25 bp, Artificial
  Probe
aggttaaagaagctgcatgttaagt

SEQ ID NO: 61460 - DNA, 25 bp, Artificial
  Probe
caagactgaagactacacggtgaca

SEQ ID NO: 61461 - DNA, 25 bp, Artificial
  Probe
aaccttccaagactgaagactacac

SEQ ID NO: 61462 - DNA, 25 bp, Artificial
  Probe
ttccaagactgaagactacacggtg

SEQ ID NO: 61463 - DNA, 25 bp, Artificial
  Probe
acaaggttaaagaagctgcatgtta

SEQ ID NO: 61464 - DNA, 25 bp, Artificial
  Probe
tgggttcagaagaaaatgtagtgtt

SEQ ID NO: 61465 - DNA, 25 bp, Artificial
  Probe
acatcagcatagtgttcttgagctt

SEQ ID NO: 61466 - DNA, 25 bp, Artificial
  Probe
ttgacaaggttaaagaagctgcatg

SEQ ID NO: 61467 - DNA, 25 bp, Artificial
  Probe
gttgacaaggttaaagaagctgcat

SEQ ID NO: 61468 - DNA, 25 bp, Artificial
  Probe
gcaaaggttcataagtgaaactgaa

SEQ ID NO: 61469 - DNA, 25 bp, Artificial
  Probe
gggttcagaagaaaatgtagtgtta

SEQ ID NO: 61470 - DNA, 25 bp, Artificial
  Probe
agcaagatcctgacacatatagcaa

SEQ ID NO: 61471 - DNA, 25 bp, Artificial
  Probe
aagatcctgacacatatagcaaaca

SEQ ID NO: 61472 - DNA, 25 bp, Artificial
  Probe
caagatcctgacacatatagcaaac

SEQ ID NO: 61473 - DNA, 25 bp, Artificial
  Probe
agatcctgacacatatagcaaacac

SEQ ID NO: 61474 - DNA, 25 bp, Artificial
  Probe
atcctgacacatatagcaaacacct

SEQ ID NO: 61475 - DNA, 25 bp, Artificial
  Probe
cagcaagatcctgacacatatagca

SEQ ID NO: 61476 - DNA, 25 bp, Artificial
  Probe
gcaagatcctgacacatatagcaaa

SEQ ID NO: 61477 - DNA, 25 bp, Artificial
  Probe
gatcctgacacatatagcaaacacc

SEQ ID NO: 61478 - DNA, 25 bp, Artificial
  Probe
catgatgtgaaacctttctctcaaa

SEQ ID NO: 61479 - DNA, 25 bp, Artificial
  Probe
tcctgacacatatagcaaacacctg

SEQ ID NO: 61480 - DNA, 25 bp, Artificial
  Probe
ccatgatgtgaaacctttctctcaa

SEQ ID NO: 61481 - DNA, 25 bp, Artificial
  Probe
ccagcaagatcctgacacatatagc

SEQ ID NO: 61482 - DNA, 25 bp, Artificial
  Probe
gccagcaagatcctgacacatatag

SEQ ID NO: 61483 - DNA, 25 bp, Artificial
  Probe
tgacacatatagcaaacacctgttc

SEQ ID NO: 61484 - DNA, 25 bp, Artificial
  Probe
ctgacacatatagcaaacacctgtt

SEQ ID NO: 61485 - DNA, 25 bp, Artificial
  Probe
ctcccatgatgtgaaacctttctct

SEQ ID NO: 61486 - DNA, 25 bp, Artificial
  Probe
tcccatgatgtgaaacctttctctc

SEQ ID NO: 61487 - DNA, 25 bp, Artificial
  Probe
gacacatatagcaaacacctgttcg

SEQ ID NO: 61488 - DNA, 25 bp, Artificial
  Probe
cctgacacatatagcaaacacctgt

SEQ ID NO: 61489 - DNA, 25 bp, Artificial
  Probe
cccatgatgtgaaacctttctctca

SEQ ID NO: 61490 - DNA, 25 bp, Artificial
  Probe
cacatatagcaaacacctgttcgtg

SEQ ID NO: 61491 - DNA, 25 bp, Artificial
  Probe
aaacctttctctcaaaacacctacg

SEQ ID NO: 61492 - DNA, 25 bp, Artificial
  Probe
acacatatagcaaacacctgttcgt

SEQ ID NO: 61493 - DNA, 25 bp, Artificial
  Probe
gaaacctttctctcaaaacacctac

SEQ ID NO: 61494 - DNA, 25 bp, Artificial
  Probe
ctacatcaagctcagaacagggaag

SEQ ID NO: 61495 - DNA, 25 bp, Artificial
  Probe
tgaaacctttctctcaaaacaccta

SEQ ID NO: 61496 - DNA, 25 bp, Artificial
  Probe
tgatgtgaaacctttctctcaaaac

SEQ ID NO: 61497 - DNA, 25 bp, Artificial
  Probe
cctcccatgatgtgaaacctttctc

SEQ ID NO: 61498 - DNA, 25 bp, Artificial
  Probe
atgatgtgaaacctttctctcaaaa

SEQ ID NO: 61499 - DNA, 25 bp, Artificial
  Probe
gatgtgaaacctttctctcaaaaca

SEQ ID NO: 61500 - DNA, 25 bp, Artificial
  Probe
tacatcaagctcagaacagggaaga

SEQ ID NO: 61501 - DNA, 25 bp, Artificial
  Probe
atgtgaaacctttctctcaaaacac

SEQ ID NO: 61502 - DNA, 25 bp, Artificial
  Probe
cgccagcaagatcctgacacatata

SEQ ID NO: 61503 - DNA, 25 bp, Artificial
  Probe
gtgaaacctttctctcaaaacacct

SEQ ID NO: 61504 - DNA, 25 bp, Artificial
  Probe
tgtgaaacctttctctcaaaacacc

SEQ ID NO: 61505 - DNA, 25 bp, Artificial
  Probe
gacatccgccagatctatgacaagt

SEQ ID NO: 61506 - DNA, 25 bp, Artificial
  Probe
aacctttctctcaaaacacctacgc

SEQ ID NO: 61507 - DNA, 25 bp, Artificial
  Probe
ccctcccatgatgtgaaacctttct

SEQ ID NO: 61508 - DNA, 25 bp, Artificial
  Probe
aaccttccacagtaaaatggctctt

SEQ ID NO: 61509 - DNA, 25 bp, Artificial
  Probe
tcagaacagggaagacacgtacaag

SEQ ID NO: 61510 - DNA, 25 bp, Artificial
  Probe
ctcagaacagggaagacacgtacaa

SEQ ID NO: 61511 - DNA, 25 bp, Artificial
  Probe
gaccctcccatgatgtgaaaccttt

SEQ ID NO: 61512 - DNA, 25 bp, Artificial
  Probe
tttctctcaaaacacctacgctgtc

SEQ ID NO: 61513 - DNA, 25 bp, Artificial
  Probe
ctttctctcaaaacacctacgctgt

SEQ ID NO: 61514 - DNA, 25 bp, Artificial
  Probe
accctcccatgatgtgaaacctttc

SEQ ID NO: 61515 - DNA, 25 bp, Artificial
  Probe
actttgtcttcatatttcccacttg

SEQ ID NO: 61516 - DNA, 25 bp, Artificial
  Probe
cactttgtcttcatatttcccactt

SEQ ID NO: 61517 - DNA, 25 bp, Artificial
  Probe
ctttgtcttcatatttcccacttgc

SEQ ID NO: 61518 - DNA, 25 bp, Artificial
  Probe
tttgtcttcatatttcccacttgcc

SEQ ID NO: 61519 - DNA, 25 bp, Artificial
  Probe
acactttgtcttcatatttcccact

SEQ ID NO: 61520 - DNA, 25 bp, Artificial
  Probe
aacactttgtcttcatatttcccac

SEQ ID NO: 61521 - DNA, 25 bp, Artificial
  Probe
gattcattcgcatggtctttgtaac

SEQ ID NO: 61522 - DNA, 25 bp, Artificial
  Probe
cctgctgttgactattcaagaatct

SEQ ID NO: 61523 - DNA, 25 bp, Artificial
  Probe
ctagactccctgctgttgactattc

SEQ ID NO: 61524 - DNA, 25 bp, Artificial
  Probe
taacactttgtcttcatatttccca

SEQ ID NO: 61525 - DNA, 25 bp, Artificial
  Probe
tagtcataatgctggacctagctta

SEQ ID NO: 61526 - DNA, 25 bp, Artificial
  Probe
ctgctgttgactattcaagaatcta

SEQ ID NO: 61527 - DNA, 25 bp, Artificial
  Probe
cataatgctggacctagcttatcag

SEQ ID NO: 61528 - DNA, 25 bp, Artificial
  Probe
gtcataatgctggacctagcttatc

SEQ ID NO: 61529 - DNA, 25 bp, Artificial
  Probe
tcataatgctggacctagcttatca

SEQ ID NO: 61530 - DNA, 25 bp, Artificial
  Probe
agtcataatgctggacctagcttat

SEQ ID NO: 61531 - DNA, 25 bp, Artificial
  Probe
ggattcattcgcatggtctttgtaa

SEQ ID NO: 61532 - DNA, 25 bp, Artificial
  Probe
ctaacactttgtcttcatatttccc

SEQ ID NO: 61533 - DNA, 25 bp, Artificial
  Probe
tgctgttgactattcaagaatctaa

SEQ ID NO: 61534 - DNA, 25 bp, Artificial
  Probe
gctgttgactattcaagaatctaac

SEQ ID NO: 61535 - DNA, 25 bp, Artificial
  Probe
cagtagtcataatgctggacctagc

SEQ ID NO: 61536 - DNA, 25 bp, Artificial
  Probe
ataatgctggacctagcttatcagg

SEQ ID NO: 61537 - DNA, 25 bp, Artificial
  Probe
caccctaccctactttagactccag

SEQ ID NO: 61538 - DNA, 25 bp, Artificial
  Probe
tagactccctgctgttgactattca

SEQ ID NO: 61539 - DNA, 25 bp, Artificial
  Probe
gtagtcataatgctggacctagctt

SEQ ID NO: 61540 - DNA, 25 bp, Artificial
  Probe
ccctaccctactttagactccagta

SEQ ID NO: 61541 - DNA, 25 bp, Artificial
  Probe
ttgtcttcatatttcccacttgccc

SEQ ID NO: 61542 - DNA, 25 bp, Artificial
  Probe
ttgtaacccattcgtaggtctcaaa

SEQ ID NO: 61543 - DNA, 25 bp, Artificial
  Probe
tttgtaacccattcgtaggtctcaa

SEQ ID NO: 61544 - DNA, 25 bp, Artificial
  Probe
ttagactccagtagtcataatgctg

SEQ ID NO: 61545 - DNA, 25 bp, Artificial
  Probe
tctttgtaacccattcgtaggtctc

SEQ ID NO: 61546 - DNA, 25 bp, Artificial
  Probe
ctttgtaacccattcgtaggtctca

SEQ ID NO: 61547 - DNA, 25 bp, Artificial
  Probe
gtctttgtaacccattcgtaggtct

SEQ ID NO: 61548 - DNA, 25 bp, Artificial
  Probe
ccattcgtaggtctcaaaactgtta

SEQ ID NO: 61549 - DNA, 25 bp, Artificial
  Probe
tctaacactttgtcttcatatttcc

SEQ ID NO: 61550 - DNA, 25 bp, Artificial
  Probe
cattcgtaggtctcaaaactgttat

SEQ ID NO: 61551 - DNA, 25 bp, Artificial
  Probe
agtagtcataatgctggacctagct

SEQ ID NO: 61552 - DNA, 25 bp, Artificial
  Probe
cctagactccctgctgttgactatt

SEQ ID NO: 61553 - DNA, 25 bp, Artificial
  Probe
tcaagaatctaacactttgtcttca

SEQ ID NO: 61554 - DNA, 25 bp, Artificial
  Probe
gtcttcatatttcccacttgccctg

SEQ ID NO: 61555 - DNA, 25 bp, Artificial
  Probe
accctaccctactttagactccagt

SEQ ID NO: 61556 - DNA, 25 bp, Artificial
  Probe
attcattcgcatggtctttgtaacc

SEQ ID NO: 61557 - DNA, 25 bp, Artificial
  Probe
gttgactattcaagaatctaacact

SEQ ID NO: 61558 - DNA, 25 bp, Artificial
  Probe
ccctgctgttgactattcaagaatc

SEQ ID NO: 61559 - DNA, 25 bp, Artificial
  Probe
tgtcttcatatttcccacttgccct

SEQ ID NO: 61560 - DNA, 25 bp, Artificial
  Probe
aaagccgtatctgagtatttgaaca

SEQ ID NO: 61561 - DNA, 25 bp, Artificial
  Probe
gctttaacatattggattggctttg

SEQ ID NO: 61562 - DNA, 25 bp, Artificial
  Probe
catattggattggctttggaagaat

SEQ ID NO: 61563 - DNA, 25 bp, Artificial
  Probe
ttaacatattggattggctttggaa

SEQ ID NO: 61564 - DNA, 25 bp, Artificial
  Probe
tttaacatattggattggctttgga

SEQ ID NO: 61565 - DNA, 25 bp, Artificial
  Probe
taacatattggattggctttggaag

SEQ ID NO: 61566 - DNA, 25 bp, Artificial
  Probe
taaagccgtatctgagtatttgaac

SEQ ID NO: 61567 - DNA, 25 bp, Artificial
  Probe
gttcttgaacaacaccactaacagg

SEQ ID NO: 61568 - DNA, 25 bp, Artificial
  Probe
ctttaacatattggattggctttgg

SEQ ID NO: 61569 - DNA, 25 bp, Artificial
  Probe
acatattggattggctttggaagaa

SEQ ID NO: 61570 - DNA, 25 bp, Artificial
  Probe
aacatattggattggctttggaaga

SEQ ID NO: 61571 - DNA, 25 bp, Artificial
  Probe
ctaaagccgtatctgagtatttgaa

SEQ ID NO: 61572 - DNA, 25 bp, Artificial
  Probe
attggattggctttggaagaattat

SEQ ID NO: 61573 - DNA, 25 bp, Artificial
  Probe
atattggattggctttggaagaatt

SEQ ID NO: 61574 - DNA, 25 bp, Artificial
  Probe
gctaaagccgtatctgagtatttga

SEQ ID NO: 61575 - DNA, 25 bp, Artificial
  Probe
ctgctaaagccgtatctgagtattt

SEQ ID NO: 61576 - DNA, 25 bp, Artificial
  Probe
tgctaaagccgtatctgagtatttg

SEQ ID NO: 61577 - DNA, 25 bp, Artificial
  Probe
ttggattggctttggaagaattata

SEQ ID NO: 61578 - DNA, 25 bp, Artificial
  Probe
tattggattggctttggaagaatta

SEQ ID NO: 61579 - DNA, 25 bp, Artificial
  Probe
tggattggctttggaagaattatat

SEQ ID NO: 61580 - DNA, 25 bp, Artificial
  Probe
ccaccaagcaactttgtaaagaatt

SEQ ID NO: 61581 - DNA, 25 bp, Artificial
  Probe
ggtatatttgtgaaacagagttccc

SEQ ID NO: 61582 - DNA, 25 bp, Artificial
  Probe
gggtatatttgtgaaacagagttcc

SEQ ID NO: 61583 - DNA, 25 bp, Artificial
  Probe
caccaagcaactttgtaaagaattt

SEQ ID NO: 61584 - DNA, 25 bp, Artificial
  Probe
aggaggagaaacacaggaaatgaaa

SEQ ID NO: 61585 - DNA, 25 bp, Artificial
  Probe
aaggaggagaaacacaggaaatgaa

SEQ ID NO: 61586 - DNA, 25 bp, Artificial
  Probe
tgggtatatttgtgaaacagagttc

SEQ ID NO: 61587 - DNA, 25 bp, Artificial
  Probe
gtatatttgtgaaacagagttccct

SEQ ID NO: 61588 - DNA, 25 bp, Artificial
  Probe
aagccgtatctgagtatttgaacag

SEQ ID NO: 61589 - DNA, 25 bp, Artificial
  Probe
ttgggtatatttgtgaaacagagtt

SEQ ID NO: 61590 - DNA, 25 bp, Artificial
  Probe
tttgggtatatttgtgaaacagagt

SEQ ID NO: 61591 - DNA, 25 bp, Artificial
  Probe
ttcttgaacaacaccactaacaggc

SEQ ID NO: 61592 - DNA, 25 bp, Artificial
  Probe
tatatttgtgaaacagagttccctg

SEQ ID NO: 61593 - DNA, 25 bp, Artificial
  Probe
tggctttggaagaattatattaggt

SEQ ID NO: 61594 - DNA, 25 bp, Artificial
  Probe
atatttgtgaaacagagttccctgc

SEQ ID NO: 61595 - DNA, 25 bp, Artificial
  Probe
caaggaggagaaacacaggaaatga

SEQ ID NO: 61596 - DNA, 25 bp, Artificial
  Probe
gacaaggaggagaaacacaggaaat

SEQ ID NO: 61597 - DNA, 25 bp, Artificial
  Probe
cctgctaaagccgtatctgagtatt

SEQ ID NO: 61598 - DNA, 25 bp, Artificial
  Probe
ggattggctttggaagaattatatt

SEQ ID NO: 61599 - DNA, 25 bp, Artificial
  Probe
accaagcaactttgtaaagaattta

SEQ ID NO: 61600 - DNA, 25 bp, Artificial
  Probe
acaaggaggagaaacacaggaaatg

SEQ ID NO: 61601 - DNA, 25 bp, Artificial
  Probe
ctgagtatttgaacagacagcacac

SEQ ID NO: 61602 - DNA, 25 bp, Artificial
  Probe
tttagctttaacatattggattggc

SEQ ID NO: 61603 - DNA, 25 bp, Artificial
  Probe
taaagaatttacggatctgctggct

SEQ ID NO: 61604 - DNA, 25 bp, Artificial
  Probe
atttgtgaaacagagttccctgcta

SEQ ID NO: 61605 - DNA, 25 bp, Artificial
  Probe
gagagaaggcaatagagatacgctc

SEQ ID NO: 61606 - DNA, 25 bp, Artificial
  Probe
agtttattcccattctctcctcctc

SEQ ID NO: 61607 - DNA, 25 bp, Artificial
  Probe
cagtttattcccattctctcctcct

SEQ ID NO: 61608 - DNA, 25 bp, Artificial
  Probe
tttctgccagtttattcccattctc

SEQ ID NO: 61609 - DNA, 25 bp, Artificial
  Probe
ctttctgccagtttattcccattct

SEQ ID NO: 61610 - DNA, 25 bp, Artificial
  Probe
cattctctcctcctcctttctcaaa

SEQ ID NO: 61611 - DNA, 25 bp, Artificial
  Probe
tcctacactttctgccagtttattc

SEQ ID NO: 61612 - DNA, 25 bp, Artificial
  Probe
ctcctacactttctgccagtttatt

SEQ ID NO: 61613 - DNA, 25 bp, Artificial
  Probe
ggagagaaggcaatagagatacgct

SEQ ID NO: 61614 - DNA, 25 bp, Artificial
  Probe
gtaatgacaaggtgttctttgcttc

SEQ ID NO: 61615 - DNA, 25 bp, Artificial
  Probe
tattcccattctctcctcctccttt

SEQ ID NO: 61616 - DNA, 25 bp, Artificial
  Probe
ttattcccattctctcctcctcctt

SEQ ID NO: 61617 - DNA, 25 bp, Artificial
  Probe
tttattcccattctctcctcctcct

SEQ ID NO: 61618 - DNA, 25 bp, Artificial
  Probe
gtttattcccattctctcctcctcc

SEQ ID NO: 61619 - DNA, 25 bp, Artificial
  Probe
ttctgccagtttattcccattctct

SEQ ID NO: 61620 - DNA, 25 bp, Artificial
  Probe
actttctgccagtttattcccattc

SEQ ID NO: 61621 - DNA, 25 bp, Artificial
  Probe
ctacactttctgccagtttattccc

SEQ ID NO: 61622 - DNA, 25 bp, Artificial
  Probe
cctacactttctgccagtttattcc

SEQ ID NO: 61623 - DNA, 25 bp, Artificial
  Probe
ccagtttattcccattctctcctcc

SEQ ID NO: 61624 - DNA, 25 bp, Artificial
  Probe
cactttctgccagtttattcccatt

SEQ ID NO: 61625 - DNA, 25 bp, Artificial
  Probe
tcagagactaaagttcctgtgtgaa

SEQ ID NO: 61626 - DNA, 25 bp, Artificial
  Probe
tctgccagtttattcccattctctc

SEQ ID NO: 61627 - DNA, 25 bp, Artificial
  Probe
taatgacaaggtgttctttgcttcc

SEQ ID NO: 61628 - DNA, 25 bp, Artificial
  Probe
tacactttctgccagtttattccca

SEQ ID NO: 61629 - DNA, 25 bp, Artificial
  Probe
ctcagagactaaagttcctgtgtga

SEQ ID NO: 61630 - DNA, 25 bp, Artificial
  Probe
cgtaatgacaaggtgttctttgctt

SEQ ID NO: 61631 - DNA, 25 bp, Artificial
  Probe
gccagtttattcccattctctcctc

SEQ ID NO: 61632 - DNA, 25 bp, Artificial
  Probe
acactttctgccagtttattcccat

SEQ ID NO: 61633 - DNA, 25 bp, Artificial
  Probe
ccattctctcctcctcctttctcaa

SEQ ID NO: 61634 - DNA, 25 bp, Artificial
  Probe
attcccattctctcctcctcctttc

SEQ ID NO: 61635 - DNA, 25 bp, Artificial
  Probe
ctgccagtttattcccattctctcc

SEQ ID NO: 61636 - DNA, 25 bp, Artificial
  Probe
tgccagtttattcccattctctcct

SEQ ID NO: 61637 - DNA, 25 bp, Artificial
  Probe
tgtgtgaacgtaatgacaaggtgtt

SEQ ID NO: 61638 - DNA, 25 bp, Artificial
  Probe
attctctcctcctcctttctcaaaa

SEQ ID NO: 61639 - DNA, 25 bp, Artificial
  Probe
ctacgaagatgaaggggtttatgtg

SEQ ID NO: 61640 - DNA, 25 bp, Artificial
  Probe
cgaagatgaaggggtttatgtgaaa

SEQ ID NO: 61641 - DNA, 25 bp, Artificial
  Probe
tacgaagatgaaggggtttatgtga

SEQ ID NO: 61642 - DNA, 25 bp, Artificial
  Probe
gctcagagactaaagttcctgtgtg

SEQ ID NO: 61643 - DNA, 25 bp, Artificial
  Probe
ttctggtgtgctacgaagatgaagg

SEQ ID NO: 61644 - DNA, 25 bp, Artificial
  Probe
caaaagggctcagagactaaagttc

SEQ ID NO: 61645 - DNA, 25 bp, Artificial
  Probe
ttcctgtgtgaacgtaatgacaagg

SEQ ID NO: 61646 - DNA, 25 bp, Artificial
  Probe
ctgtgtgaacgtaatgacaaggtgt

SEQ ID NO: 61647 - DNA, 25 bp, Artificial
  Probe
gagaaggcaatagagatacgctctg

SEQ ID NO: 61648 - DNA, 25 bp, Artificial
  Probe
agagaaggcaatagagatacgctct

SEQ ID NO: 61649 - DNA, 25 bp, Artificial
  Probe
aaagggctcagagactaaagttcct

SEQ ID NO: 61650 - DNA, 25 bp, Artificial
  Probe
ttgtggaggttcttatggatgattc

SEQ ID NO: 61651 - DNA, 25 bp, Artificial
  Probe
tgtggaggttcttatggatgattca

SEQ ID NO: 61652 - DNA, 25 bp, Artificial
  Probe
gtggaggttcttatggatgattcat

SEQ ID NO: 61653 - DNA, 25 bp, Artificial
  Probe
ttcttatggatgattcatgttgctg

SEQ ID NO: 61654 - DNA, 25 bp, Artificial
  Probe
gttcttatggatgattcatgttgct

SEQ ID NO: 61655 - DNA, 25 bp, Artificial
  Probe
ggaggttcttatggatgattcatgt

SEQ ID NO: 61656 - DNA, 25 bp, Artificial
  Probe
tggaggttcttatggatgattcatg

SEQ ID NO: 61657 - DNA, 25 bp, Artificial
  Probe
cttatggatgattcatgttgctgtg

SEQ ID NO: 61658 - DNA, 25 bp, Artificial
  Probe
tcttatggatgattcatgttgctgt

SEQ ID NO: 61659 - DNA, 25 bp, Artificial
  Probe
ggttcttatggatgattcatgttgc

SEQ ID NO: 61660 - DNA, 25 bp, Artificial
  Probe
aggttcttatggatgattcatgttg

SEQ ID NO: 61661 - DNA, 25 bp, Artificial
  Probe
gaggttcttatggatgattcatgtt

SEQ ID NO: 61662 - DNA, 25 bp, Artificial
  Probe
ttatggatgattcatgttgctgtga

SEQ ID NO: 61663 - DNA, 25 bp, Artificial
  Probe
tatggatgattcatgttgctgtgag

SEQ ID NO: 61664 - DNA, 25 bp, Artificial
  Probe
tgtgtttggagggtgatttctaata

SEQ ID NO: 61665 - DNA, 25 bp, Artificial
  Probe
tttgtggaggttcttatggatgatt

SEQ ID NO: 61666 - DNA, 25 bp, Artificial
  Probe
atttgtggaggttcttatggatgat

SEQ ID NO: 61667 - DNA, 25 bp, Artificial
  Probe
gtgtttggagggtgatttctaataa

SEQ ID NO: 61668 - DNA, 25 bp, Artificial
  Probe
gtgtgtttggagggtgatttctaat

SEQ ID NO: 61669 - DNA, 25 bp, Artificial
  Probe
catttgtggaggttcttatggatga

SEQ ID NO: 61670 - DNA, 25 bp, Artificial
  Probe
tgtttggagggtgatttctaataaa

SEQ ID NO: 61671 - DNA, 25 bp, Artificial
  Probe
gcatttgtggaggttcttatggatg

SEQ ID NO: 61672 - DNA, 25 bp, Artificial
  Probe
atttaagtgtagtgcagatgtgtgt

SEQ ID NO: 61673 - DNA, 25 bp, Artificial
  Probe
atggatgattcatgttgctgtgagg

SEQ ID NO: 61674 - DNA, 25 bp, Artificial
  Probe
tatttaagtgtagtgcagatgtgtg

SEQ ID NO: 61675 - DNA, 25 bp, Artificial
  Probe
ggtgtgtttggagggtgatttctaa

SEQ ID NO: 61676 - DNA, 25 bp, Artificial
  Probe
tttaagtgtagtgcagatgtgtgtg

SEQ ID NO: 61677 - DNA, 25 bp, Artificial
  Probe
ttatttaagtgtagtgcagatgtgt

SEQ ID NO: 61678 - DNA, 25 bp, Artificial
  Probe
gtgttgcatttgtggaggttcttat

SEQ ID NO: 61679 - DNA, 25 bp, Artificial
  Probe
tgttgcatttgtggaggttcttatg

SEQ ID NO: 61680 - DNA, 25 bp, Artificial
  Probe
gtcagttctaggcaatggactcact

SEQ ID NO: 61681 - DNA, 25 bp, Artificial
  Probe
atggtcagttctaggcaatggactc

SEQ ID NO: 61682 - DNA, 25 bp, Artificial
  Probe
tggagggtgatttctaataaaagtc

SEQ ID NO: 61683 - DNA, 25 bp, Artificial
  Probe
tgcatttgtggaggttcttatggat

SEQ ID NO: 61684 - DNA, 25 bp, Artificial
  Probe
ggagggtgatttctaataaaagtct

SEQ ID NO: 61685 - DNA, 25 bp, Artificial
  Probe
ctctggtgtttcttgtgttgcattt

SEQ ID NO: 61686 - DNA, 25 bp, Artificial
  Probe
attatttaagtgtagtgcagatgtg

SEQ ID NO: 61687 - DNA, 25 bp, Artificial
  Probe
tggtgtgtttggagggtgatttcta

SEQ ID NO: 61688 - DNA, 25 bp, Artificial
  Probe
ttggagggtgatttctaataaaagt

SEQ ID NO: 61689 - DNA, 25 bp, Artificial
  Probe
ttgcatttgtggaggttcttatgga

SEQ ID NO: 61690 - DNA, 25 bp, Artificial
  Probe
gttgcatttgtggaggttcttatgg

SEQ ID NO: 61691 - DNA, 25 bp, Artificial
  Probe
gatcttgataccccaatactgtgac

SEQ ID NO: 61692 - DNA, 25 bp, Artificial
  Probe
tgtttcttgtgttgcatttgtggag

SEQ ID NO: 61693 - DNA, 25 bp, Artificial
  Probe
tctggtgtttcttgtgttgcatttg

SEQ ID NO: 61694 - DNA, 25 bp, Artificial
  Probe
atcttgataccccaatactgtgacc

SEQ ID NO: 61695 - DNA, 25 bp, Artificial
  Probe
ctcaactggatgaagaaactgtctc

SEQ ID NO: 61696 - DNA, 25 bp, Artificial
  Probe
cctcaactggatgaagaaactgtct

SEQ ID NO: 61697 - DNA, 25 bp, Artificial
  Probe
ccattcctgtttgctgtgtatgatc

SEQ ID NO: 61698 - DNA, 25 bp, Artificial
  Probe
agagtctacccaacagcttaacaag

SEQ ID NO: 61699 - DNA, 25 bp, Artificial
  Probe
cagagtctacccaacagcttaacaa

SEQ ID NO: 61700 - DNA, 25 bp, Artificial
  Probe
tcaactggatgaagaaactgtctcc

SEQ ID NO: 61701 - DNA, 25 bp, Artificial
  Probe
cccattcctgtttgctgtgtatgat

SEQ ID NO: 61702 - DNA, 25 bp, Artificial
  Probe
ccctcaactggatgaagaaactgtc

SEQ ID NO: 61703 - DNA, 25 bp, Artificial
  Probe
cacagagtctacccaacagcttaac

SEQ ID NO: 61704 - DNA, 25 bp, Artificial
  Probe
ctccctcaactggatgaagaaactg

SEQ ID NO: 61705 - DNA, 25 bp, Artificial
  Probe
caactggatgaagaaactgtctccc

SEQ ID NO: 61706 - DNA, 25 bp, Artificial
  Probe
acagagtctacccaacagcttaaca

SEQ ID NO: 61707 - DNA, 25 bp, Artificial
  Probe
caactggtgctgcaaggatcttatg

SEQ ID NO: 61708 - DNA, 25 bp, Artificial
  Probe
attcctgtttgctgtgtatgatcaa

SEQ ID NO: 61709 - DNA, 25 bp, Artificial
  Probe
aactggtgctgcaaggatcttatga

SEQ ID NO: 61710 - DNA, 25 bp, Artificial
  Probe
tccctcaactggatgaagaaactgt

SEQ ID NO: 61711 - DNA, 25 bp, Artificial
  Probe
cattcctgtttgctgtgtatgatca

SEQ ID NO: 61712 - DNA, 25 bp, Artificial
  Probe
gatgagagagagcccacagagtcta

SEQ ID NO: 61713 - DNA, 25 bp, Artificial
  Probe
ccacagagtctacccaacagcttaa

SEQ ID NO: 61714 - DNA, 25 bp, Artificial
  Probe
atgagagagagcccacagagtctac

SEQ ID NO: 61715 - DNA, 25 bp, Artificial
  Probe
actggtgctgcaaggatcttatgac

SEQ ID NO: 61716 - DNA, 25 bp, Artificial
  Probe
gctccctcaactggatgaagaaact

SEQ ID NO: 61717 - DNA, 25 bp, Artificial
  Probe
ccaactggtgctgcaaggatcttat

SEQ ID NO: 61718 - DNA, 25 bp, Artificial
  Probe
ttcctgtttgctgtgtatgatcaaa

SEQ ID NO: 61719 - DNA, 25 bp, Artificial
  Probe
tcctgtttgctgtgtatgatcaaag

SEQ ID NO: 61720 - DNA, 25 bp, Artificial
  Probe
cttaacaagcctgaggtcttggagg

SEQ ID NO: 61721 - DNA, 25 bp, Artificial
  Probe
cctgtttgctgtgtatgatcaaagc

SEQ ID NO: 61722 - DNA, 25 bp, Artificial
  Probe
aactggatgaagaaactgtctcccc

SEQ ID NO: 61723 - DNA, 25 bp, Artificial
  Probe
ctgtttgctgtgtatgatcaaagcg

SEQ ID NO: 61724 - DNA, 25 bp, Artificial
  Probe
aaaattgagcaatgaccgcatcagg

SEQ ID NO: 61725 - DNA, 25 bp, Artificial
  Probe
tttgagcttgaagcggatgagagag

SEQ ID NO: 61726 - DNA, 25 bp, Artificial
  Probe
aacagcttaacaagcctgaggtctt

SEQ ID NO: 61727 - DNA, 25 bp, Artificial
  Probe
gagtctacccaacagcttaacaagc

SEQ ID NO: 61728 - DNA, 25 bp, Artificial
  Probe
acagcttaacaagcctgaggtcttg

SEQ ID NO: 61729 - DNA, 25 bp, Artificial
  Probe
caacagcttaacaagcctgaggtct

SEQ ID NO: 61730 - DNA, 25 bp, Artificial
  Probe
ttttgagcttgaagcggatgagaga

SEQ ID NO: 61731 - DNA, 25 bp, Artificial
  Probe
tacccaacagcttaacaagcctgag

SEQ ID NO: 61732 - DNA, 25 bp, Artificial
  Probe
ctacccaacagcttaacaagcctga

SEQ ID NO: 61733 - DNA, 25 bp, Artificial
  Probe
tctacccaacagcttaacaagcctg

SEQ ID NO: 61734 - DNA, 25 bp, Artificial
  Probe
gtctacccaacagcttaacaagcct

SEQ ID NO: 61735 - DNA, 25 bp, Artificial
  Probe
agtctacccaacagcttaacaagcc

SEQ ID NO: 61736 - DNA, 25 bp, Artificial
  Probe
tgtttgctgtgtatgatcaaagcgc

SEQ ID NO: 61737 - DNA, 25 bp, Artificial
  Probe
gctctctcggttctactctgaatac

SEQ ID NO: 61738 - DNA, 25 bp, Artificial
  Probe
ctctgactggatcattggacttagt

SEQ ID NO: 61739 - DNA, 25 bp, Artificial
  Probe
ctctcggttctactctgaataccaa

SEQ ID NO: 61740 - DNA, 25 bp, Artificial
  Probe
cctctgactggatcattggacttag

SEQ ID NO: 61741 - DNA, 25 bp, Artificial
  Probe
ctctctcggttctactctgaatacc

SEQ ID NO: 61742 - DNA, 25 bp, Artificial
  Probe
agaatggctcatctgaagacacttg

SEQ ID NO: 61743 - DNA, 25 bp, Artificial
  Probe
ggctctctcggttctactctgaata

SEQ ID NO: 61744 - DNA, 25 bp, Artificial
  Probe
actggatcattggacttagtctcag

SEQ ID NO: 61745 - DNA, 25 bp, Artificial
  Probe
tctcggttctactctgaataccaac

SEQ ID NO: 61746 - DNA, 25 bp, Artificial
  Probe
cctctcaccttcacacacattatgg

SEQ ID NO: 61747 - DNA, 25 bp, Artificial
  Probe
tcggttctactctgaataccaacag

SEQ ID NO: 61748 - DNA, 25 bp, Artificial
  Probe
ctcggttctactctgaataccaaca

SEQ ID NO: 61749 - DNA, 25 bp, Artificial
  Probe
gatcattggacttagtctcagcttc

SEQ ID NO: 61750 - DNA, 25 bp, Artificial
  Probe
tctctcggttctactctgaatacca

SEQ ID NO: 61751 - DNA, 25 bp, Artificial
  Probe
acctctgactggatcattggactta

SEQ ID NO: 61752 - DNA, 25 bp, Artificial
  Probe
tcaactaaatcacctctgactggat

SEQ ID NO: 61753 - DNA, 25 bp, Artificial
  Probe
gattactatctaggatgtttgaggc

SEQ ID NO: 61754 - DNA, 25 bp, Artificial
  Probe
ctaaatcacctctgactggatcatt

SEQ ID NO: 61755 - DNA, 25 bp, Artificial
  Probe
taaatcacctctgactggatcattg

SEQ ID NO: 61756 - DNA, 25 bp, Artificial
  Probe
tcgtcctatcaatttgagtcaacta

SEQ ID NO: 61757 - DNA, 25 bp, Artificial
  Probe
tttgagtcaactaaatcacctctga

SEQ ID NO: 61758 - DNA, 25 bp, Artificial
  Probe
aaactgaataatgtggaaactttgt

SEQ ID NO: 61759 - DNA, 25 bp, Artificial
  Probe
caactaaatcacctctgactggatc

SEQ ID NO: 61760 - DNA, 25 bp, Artificial
  Probe
gaaagacctgtcaaagattctgtgg

SEQ ID NO: 61761 - DNA, 25 bp, Artificial
  Probe
ctcgtcctatcaatttgagtcaact

SEQ ID NO: 61762 - DNA, 25 bp, Artificial
  Probe
actaaatcacctctgactggatcat

SEQ ID NO: 61763 - DNA, 25 bp, Artificial
  Probe
ctctcaccttcacacacattatggc

SEQ ID NO: 61764 - DNA, 25 bp, Artificial
  Probe
aactaaatcacctctgactggatca

SEQ ID NO: 61765 - DNA, 25 bp, Artificial
  Probe
cgtcctatcaatttgagtcaactaa

SEQ ID NO: 61766 - DNA, 25 bp, Artificial
  Probe
gggtcacctttgattactatctagg

SEQ ID NO: 61767 - DNA, 25 bp, Artificial
  Probe
ggatcattggacttagtctcagctt

SEQ ID NO: 61768 - DNA, 25 bp, Artificial
  Probe
aaagacctgtcaaagattctgtgga

SEQ ID NO: 61769 - DNA, 25 bp, Artificial
  Probe
aactgaataatgtggaaactttgtt

SEQ ID NO: 61770 - DNA, 25 bp, Artificial
  Probe
atttgagtcaactaaatcacctctg

SEQ ID NO: 61771 - DNA, 25 bp, Artificial
  Probe
ggtcacctttgattactatctagga

SEQ ID NO: 61772 - DNA, 25 bp, Artificial
  Probe
ctggatcattggacttagtctcagc

SEQ ID NO: 61773 - DNA, 25 bp, Artificial
  Probe
gattgatgaggctctctcggttcta

SEQ ID NO: 61774 - DNA, 25 bp, Artificial
  Probe
aatcacctctgactggatcattgga

SEQ ID NO: 61775 - DNA, 25 bp, Artificial
  Probe
atcattggacttagtctcagcttcc

SEQ ID NO: 61776 - DNA, 25 bp, Artificial
  Probe
tcaatttgagtcaactaaatcacct

SEQ ID NO: 61777 - DNA, 25 bp, Artificial
  Probe
aatttgagtcaactaaatcacctct

SEQ ID NO: 61778 - DNA, 25 bp, Artificial
  Probe
caatttgagtcaactaaatcacctc

SEQ ID NO: 61779 - DNA, 25 bp, Artificial
  Probe
attgatgaggctctctcggttctac

SEQ ID NO: 61780 - DNA, 25 bp, Artificial
  Probe
taaagctcgtcctatcaatttgagt

SEQ ID NO: 61781 - DNA, 25 bp, Artificial
  Probe
ctaaagctcgtcctatcaatttgag

SEQ ID NO: 61782 - DNA, 25 bp, Artificial
  Probe
tgttctcggcaccttaaattattag

SEQ ID NO: 61783 - DNA, 25 bp, Artificial
  Probe
ctgttctcggcaccttaaattatta

SEQ ID NO: 61784 - DNA, 25 bp, Artificial
  Probe
tctcggcaccttaaattattagacc

SEQ ID NO: 61785 - DNA, 25 bp, Artificial
  Probe
ctcggcaccttaaattattagaccc

SEQ ID NO: 61786 - DNA, 25 bp, Artificial
  Probe
cctgttctcggcaccttaaattatt

SEQ ID NO: 61787 - DNA, 25 bp, Artificial
  Probe
ttctcggcaccttaaattattagac

SEQ ID NO: 61788 - DNA, 25 bp, Artificial
  Probe
gttctcggcaccttaaattattaga

SEQ ID NO: 61789 - DNA, 25 bp, Artificial
  Probe
acctgttctcggcaccttaaattat

SEQ ID NO: 61790 - DNA, 25 bp, Artificial
  Probe
gacctgttctcggcaccttaaatta

SEQ ID NO: 61791 - DNA, 25 bp, Artificial
  Probe
ccttattgagagcgggatgaagtac

SEQ ID NO: 61792 - DNA, 25 bp, Artificial
  Probe
cttattgagagcgggatgaagtacg

SEQ ID NO: 61793 - DNA, 25 bp, Artificial
  Probe
ttattgagagcgggatgaagtacga

SEQ ID NO: 61794 - DNA, 25 bp, Artificial
  Probe
tattgagagcgggatgaagtacgag

SEQ ID NO: 61795 - DNA, 25 bp, Artificial
  Probe
tcggcaccttaaattattagacccc

SEQ ID NO: 61796 - DNA, 25 bp, Artificial
  Probe
tgacctgttctcggcaccttaaatt

SEQ ID NO: 61797 - DNA, 25 bp, Artificial
  Probe
ttgcgttatgtagctcaggaccttg

SEQ ID NO: 61798 - DNA, 25 bp, Artificial
  Probe
gttgcgttatgtagctcaggacctt

SEQ ID NO: 61799 - DNA, 25 bp, Artificial
  Probe
ctgacctgttctcggcaccttaaat

SEQ ID NO: 61800 - DNA, 25 bp, Artificial
  Probe
ctggtctcctctagcctgtttgttg

SEQ ID NO: 61801 - DNA, 25 bp, Artificial
  Probe
cccttattgagagcgggatgaagta

SEQ ID NO: 61802 - DNA, 25 bp, Artificial
  Probe
gtctcctctagcctgtttgttgtgg

SEQ ID NO: 61803 - DNA, 25 bp, Artificial
  Probe
ggtctcctctagcctgtttgttgtg

SEQ ID NO: 61804 - DNA, 25 bp, Artificial
  Probe
ggggtatattttgtaaccactgggc

SEQ ID NO: 61805 - DNA, 25 bp, Artificial
  Probe
gttatgtagctcaggaccttggctg

SEQ ID NO: 61806 - DNA, 25 bp, Artificial
  Probe
ggcaccttaaattattagaccccgg

SEQ ID NO: 61807 - DNA, 25 bp, Artificial
  Probe
gggtatattttgtaaccactgggcc

SEQ ID NO: 61808 - DNA, 25 bp, Artificial
  Probe
cggcaccttaaattattagaccccg

SEQ ID NO: 61809 - DNA, 25 bp, Artificial
  Probe
ggcaataaaacaggagccgtgaaaa

SEQ ID NO: 61810 - DNA, 25 bp, Artificial
  Probe
tacttggagaaataccggcccaaac

SEQ ID NO: 61811 - DNA, 25 bp, Artificial
  Probe
ttaggcaatgattaagttaggcaat

SEQ ID NO: 61812 - DNA, 25 bp, Artificial
  Probe
taggcaatgattaagttaggcaatt

SEQ ID NO: 61813 - DNA, 25 bp, Artificial
  Probe
gcctgtgtatggagagattcaagaa

SEQ ID NO: 61814 - DNA, 25 bp, Artificial
  Probe
ttgcctgtgtatggagagattcaag

SEQ ID NO: 61815 - DNA, 25 bp, Artificial
  Probe
cctgtgtatggagagattcaagaaa

SEQ ID NO: 61816 - DNA, 25 bp, Artificial
  Probe
aggcaatgattaagttaggcaattt

SEQ ID NO: 61817 - DNA, 25 bp, Artificial
  Probe
gcaatgattaagttaggcaatttcc

SEQ ID NO: 61818 - DNA, 25 bp, Artificial
  Probe
ggcaatgattaagttaggcaatttc

SEQ ID NO: 61819 - DNA, 25 bp, Artificial
  Probe
tttaggcaatgattaagttaggcaa

SEQ ID NO: 61820 - DNA, 25 bp, Artificial
  Probe
ctttaggcaatgattaagttaggca

SEQ ID NO: 61821 - DNA, 25 bp, Artificial
  Probe
tctttaggcaatgattaagttaggc

SEQ ID NO: 61822 - DNA, 25 bp, Artificial
  Probe
ctgtgtatggagagattcaagaaat

SEQ ID NO: 61823 - DNA, 25 bp, Artificial
  Probe
atgattaagttaggcaatttccagt

SEQ ID NO: 61824 - DNA, 25 bp, Artificial
  Probe
tgcctgtgtatggagagattcaaga

SEQ ID NO: 61825 - DNA, 25 bp, Artificial
  Probe
aggcaatttccagtatgttaagtaa

SEQ ID NO: 61826 - DNA, 25 bp, Artificial
  Probe
ttaggcaatttccagtatgttaagt

SEQ ID NO: 61827 - DNA, 25 bp, Artificial
  Probe
agttaggcaatttccagtatgttaa

SEQ ID NO: 61828 - DNA, 25 bp, Artificial
  Probe
aagttaggcaatttccagtatgtta

SEQ ID NO: 61829 - DNA, 25 bp, Artificial
  Probe
taagttaggcaatttccagtatgtt

SEQ ID NO: 61830 - DNA, 25 bp, Artificial
  Probe
ttaagttaggcaatttccagtatgt

SEQ ID NO: 61831 - DNA, 25 bp, Artificial
  Probe
tatcgaatggtggtgaatgaaggtt

SEQ ID NO: 61832 - DNA, 25 bp, Artificial
  Probe
gttaggcaatttccagtatgttaag

SEQ ID NO: 61833 - DNA, 25 bp, Artificial
  Probe
tgattaagttaggcaatttccagta

SEQ ID NO: 61834 - DNA, 25 bp, Artificial
  Probe
caatgattaagttaggcaatttcca

SEQ ID NO: 61835 - DNA, 25 bp, Artificial
  Probe
ggcaatttccagtatgttaagtaac

SEQ ID NO: 61836 - DNA, 25 bp, Artificial
  Probe
tctcttctttaggcaatgattaagt

SEQ ID NO: 61837 - DNA, 25 bp, Artificial
  Probe
aatgattaagttaggcaatttccag

SEQ ID NO: 61838 - DNA, 25 bp, Artificial
  Probe
taggcaatttccagtatgttaagta

SEQ ID NO: 61839 - DNA, 25 bp, Artificial
  Probe
tgtgtatggagagattcaagaaata

SEQ ID NO: 61840 - DNA, 25 bp, Artificial
  Probe
tttgcctgtgtatggagagattcaa

SEQ ID NO: 61841 - DNA, 25 bp, Artificial
  Probe
attaagttaggcaatttccagtatg

SEQ ID NO: 61842 - DNA, 25 bp, Artificial
  Probe
ctcttctttaggcaatgattaagtt

SEQ ID NO: 61843 - DNA, 25 bp, Artificial
  Probe
gattaagttaggcaatttccagtat

SEQ ID NO: 61844 - DNA, 25 bp, Artificial
  Probe
ttctttaggcaatgattaagttagg

SEQ ID NO: 61845 - DNA, 25 bp, Artificial
  Probe
ttctcttctttaggcaatgattaag

SEQ ID NO: 61846 - DNA, 25 bp, Artificial
  Probe
atcgaatggtggtgaatgaaggttc

SEQ ID NO: 61847 - DNA, 25 bp, Artificial
  Probe
tgatgaaattgctaaagctcaggtc

SEQ ID NO: 61848 - DNA, 25 bp, Artificial
  Probe
aatggtggtgaatgaaggttcagat

SEQ ID NO: 61849 - DNA, 25 bp, Artificial
  Probe
aagatgatgatgaaagtcttcttgg

SEQ ID NO: 61850 - DNA, 25 bp, Artificial
  Probe
tttctcttctttaggcaatgattaa

SEQ ID NO: 61851 - DNA, 25 bp, Artificial
  Probe
gtgtatggagagattcaagaaataa

SEQ ID NO: 61852 - DNA, 25 bp, Artificial
  Probe
cgttttggggataattttctcttct

SEQ ID NO: 61853 - DNA, 25 bp, Artificial
  Probe
ggggataattttctcttctttaggc

SEQ ID NO: 61854 - DNA, 25 bp, Artificial
  Probe
gggataattttctcttctttaggca

SEQ ID NO: 61855 - DNA, 25 bp, Artificial
  Probe
ttccagtatgttaagtaacacactt

SEQ ID NO: 61856 - DNA, 25 bp, Artificial
  Probe
gaagtgtctctgagtggcttgaatc

SEQ ID NO: 61857 - DNA, 25 bp, Artificial
  Probe
gtctctgagtggcttgaatccatac

SEQ ID NO: 61858 - DNA, 25 bp, Artificial
  Probe
gctaacacaagcatctgactcaatg

SEQ ID NO: 61859 - DNA, 25 bp, Artificial
  Probe
tagactcacagcctccttctctctt

SEQ ID NO: 61860 - DNA, 25 bp, Artificial
  Probe
tgtctctgagtggcttgaatccata

SEQ ID NO: 61861 - DNA, 25 bp, Artificial
  Probe
atttaaggactgagcatccactgaa

SEQ ID NO: 61862 - DNA, 25 bp, Artificial
  Probe
tttaaggactgagcatccactgaaa

SEQ ID NO: 61863 - DNA, 25 bp, Artificial
  Probe
ttatcgaagtgtctctgagtggctt

SEQ ID NO: 61864 - DNA, 25 bp, Artificial
  Probe
gatcccttatcgaagtgtctctgag

SEQ ID NO: 61865 - DNA, 25 bp, Artificial
  Probe
gatttaaggactgagcatccactga

SEQ ID NO: 61866 - DNA, 25 bp, Artificial
  Probe
agtttatgtgcagagcctagatgag

SEQ ID NO: 61867 - DNA, 25 bp, Artificial
  Probe
agctaacacaagcatctgactcaat

SEQ ID NO: 61868 - DNA, 25 bp, Artificial
  Probe
ctagactcacagcctccttctctct

SEQ ID NO: 61869 - DNA, 25 bp, Artificial
  Probe
aagtgtctctgagtggcttgaatcc

SEQ ID NO: 61870 - DNA, 25 bp, Artificial
  Probe
atcccttatcgaagtgtctctgagt

SEQ ID NO: 61871 - DNA, 25 bp, Artificial
  Probe
cagagcctagatgagctaacacaag

SEQ ID NO: 61872 - DNA, 25 bp, Artificial
  Probe
cagtttatgtgcagagcctagatga

SEQ ID NO: 61873 - DNA, 25 bp, Artificial
  Probe
cttatcgaagtgtctctgagtggct

SEQ ID NO: 61874 - DNA, 25 bp, Artificial
  Probe
atgagctaacacaagcatctgactc

SEQ ID NO: 61875 - DNA, 25 bp, Artificial
  Probe
gagctaacacaagcatctgactcaa

SEQ ID NO: 61876 - DNA, 25 bp, Artificial
  Probe
tatcgaagtgtctctgagtggcttg

SEQ ID NO: 61877 - DNA, 25 bp, Artificial
  Probe
cgaagtgtctctgagtggcttgaat

SEQ ID NO: 61878 - DNA, 25 bp, Artificial
  Probe
tatgtgcagagcctagatgagctaa

SEQ ID NO: 61879 - DNA, 25 bp, Artificial
  Probe
ttatgtgcagagcctagatgagcta

SEQ ID NO: 61880 - DNA, 25 bp, Artificial
  Probe
tctctgagtggcttgaatccatacg

SEQ ID NO: 61881 - DNA, 25 bp, Artificial
  Probe
gatgagctaacacaagcatctgact

SEQ ID NO: 61882 - DNA, 25 bp, Artificial
  Probe
agactcacagcctccttctctcttc

SEQ ID NO: 61883 - DNA, 25 bp, Artificial
  Probe
cttctagactcacagcctccttctc

SEQ ID NO: 61884 - DNA, 25 bp, Artificial
  Probe
tcccttatcgaagtgtctctgagtg

SEQ ID NO: 61885 - DNA, 25 bp, Artificial
  Probe
ccagtttatgtgcagagcctagatg

SEQ ID NO: 61886 - DNA, 25 bp, Artificial
  Probe
gtgtctctgagtggcttgaatccat

SEQ ID NO: 61887 - DNA, 25 bp, Artificial
  Probe
gaacttcaggggtacaaacatgatg

SEQ ID NO: 61888 - DNA, 25 bp, Artificial
  Probe
gtttatgtgcagagcctagatgagc

SEQ ID NO: 61889 - DNA, 25 bp, Artificial
  Probe
atgatgttgtttcccatagggtgac

SEQ ID NO: 61890 - DNA, 25 bp, Artificial
  Probe
ttctagactcacagcctccttctct

SEQ ID NO: 61891 - DNA, 25 bp, Artificial
  Probe
ccttatcgaagtgtctctgagtggc

SEQ ID NO: 61892 - DNA, 25 bp, Artificial
  Probe
tgaacttcaggggtacaaacatgat

SEQ ID NO: 61893 - DNA, 25 bp, Artificial
  Probe
agcctagatgagctaacacaagcat

SEQ ID NO: 61894 - DNA, 25 bp, Artificial
  Probe
catgatgttgtttcccatagggtga

SEQ ID NO: 61895 - DNA, 25 bp, Artificial
  Probe
gcctagatgagctaacacaagcatc

SEQ ID NO: 61896 - DNA, 25 bp, Artificial
  Probe
acatgatgttgtttcccatagggtg

SEQ ID NO: 61897 - DNA, 25 bp, Artificial
  Probe
aacttcaggggtacaaacatgatgt

SEQ ID NO: 61898 - DNA, 25 bp, Artificial
  Probe
tctagactcacagcctccttctctc

SEQ ID NO: 61899 - DNA, 25 bp, Artificial
  Probe
agagcctagatgagctaacacaagc

SEQ ID NO: 61900 - DNA, 25 bp, Artificial
  Probe
cccttatcgaagtgtctctgagtgg

SEQ ID NO: 61901 - DNA, 25 bp, Artificial
  Probe
ataaggaatccagtcttgtcatcac

SEQ ID NO: 61902 - DNA, 25 bp, Artificial
  Probe
cataaggaatccagtcttgtcatca

SEQ ID NO: 61903 - DNA, 25 bp, Artificial
  Probe
ccataaggaatccagtcttgtcatc

SEQ ID NO: 61904 - DNA, 25 bp, Artificial
  Probe
tgacatcctagaacatctcactgat

SEQ ID NO: 61905 - DNA, 25 bp, Artificial
  Probe
ggaatccagtcttgtcatcacataa

SEQ ID NO: 61906 - DNA, 25 bp, Artificial
  Probe
ctgacatcctagaacatctcactga

SEQ ID NO: 61907 - DNA, 25 bp, Artificial
  Probe
tctgacatcctagaacatctcactg

SEQ ID NO: 61908 - DNA, 25 bp, Artificial
  Probe
aggaatccagtcttgtcatcacata

SEQ ID NO: 61909 - DNA, 25 bp, Artificial
  Probe
taaggaatccagtcttgtcatcaca

SEQ ID NO: 61910 - DNA, 25 bp, Artificial
  Probe
gagtacctgtaccaagtcttaggaa

SEQ ID NO: 61911 - DNA, 25 bp, Artificial
  Probe
aaggagtacctgtaccaagtcttag

SEQ ID NO: 61912 - DNA, 25 bp, Artificial
  Probe
cttatgcctggtacacacaacatat

SEQ ID NO: 61913 - DNA, 25 bp, Artificial
  Probe
aaggaatccagtcttgtcatcacat

SEQ ID NO: 61914 - DNA, 25 bp, Artificial
  Probe
atattgatgtccattgctgctgtga

SEQ ID NO: 61915 - DNA, 25 bp, Artificial
  Probe
catattgatgtccattgctgctgtg

SEQ ID NO: 61916 - DNA, 25 bp, Artificial
  Probe
attgagtgcatattgatgtccattg

SEQ ID NO: 61917 - DNA, 25 bp, Artificial
  Probe
gccataaggaatccagtcttgtcat

SEQ ID NO: 61918 - DNA, 25 bp, Artificial
  Probe
cgtggtaaaggtgtcagaaatagtt

SEQ ID NO: 61919 - DNA, 25 bp, Artificial
  Probe
ccacacttgtccacactaatgctaa

SEQ ID NO: 61920 - DNA, 25 bp, Artificial
  Probe
tctgaagataatgtggtttagagcc

SEQ ID NO: 61921 - DNA, 25 bp, Artificial
  Probe
tattgatgtccattgctgctgtgaa

SEQ ID NO: 61922 - DNA, 25 bp, Artificial
  Probe
aggaactggataatttctgtaaccc

SEQ ID NO: 61923 - DNA, 25 bp, Artificial
  Probe
gtcaaaggaactggataatttctgt

SEQ ID NO: 61924 - DNA, 25 bp, Artificial
  Probe
gtggtaaaggtgtcagaaatagtta

SEQ ID NO: 61925 - DNA, 25 bp, Artificial
  Probe
tattgagtgcatattgatgtccatt

SEQ ID NO: 61926 - DNA, 25 bp, Artificial
  Probe
ttgaaactgttgatctacttgtcca

SEQ ID NO: 61927 - DNA, 25 bp, Artificial
  Probe
gacagtgtggtttgagttggaataa

SEQ ID NO: 61928 - DNA, 25 bp, Artificial
  Probe
ttctgacatcctagaacatctcact

SEQ ID NO: 61929 - DNA, 25 bp, Artificial
  Probe
tttgaaactgttgatctacttgtcc

SEQ ID NO: 61930 - DNA, 25 bp, Artificial
  Probe
acacttgtccacactaatgctaaag

SEQ ID NO: 61931 - DNA, 25 bp, Artificial
  Probe
cacacttgtccacactaatgctaaa

SEQ ID NO: 61932 - DNA, 25 bp, Artificial
  Probe
atattgagtgcatattgatgtccat

SEQ ID NO: 61933 - DNA, 25 bp, Artificial
  Probe
aaggaactggataatttctgtaacc

SEQ ID NO: 61934 - DNA, 25 bp, Artificial
  Probe
gttacaaagtcaaaggaactggata

SEQ ID NO: 61935 - DNA, 25 bp, Artificial
  Probe
tgttagtagcatggatttgtgtttc

SEQ ID NO: 61936 - DNA, 25 bp, Artificial
  Probe
ctctccttacatactttgtgtcagt

SEQ ID NO: 61937 - DNA, 25 bp, Artificial
  Probe
agtcaaaggaactggataatttctg

SEQ ID NO: 61938 - DNA, 25 bp, Artificial
  Probe
ttgttagtagcatggatttgtgttt

SEQ ID NO: 61939 - DNA, 25 bp, Artificial
  Probe
tttgttagtagcatggatttgtgtt

SEQ ID NO: 61940 - DNA, 25 bp, Artificial
  Probe
tgtaccaagtcttaggaaataatgc

SEQ ID NO: 61941 - DNA, 25 bp, Artificial
  Probe
tgaaactgttgatctacttgtccaa

SEQ ID NO: 61942 - DNA, 25 bp, Artificial
  Probe
acaaagtcaaaggaactggataatt

SEQ ID NO: 61943 - DNA, 25 bp, Artificial
  Probe
gaaactgttgatctacttgtccaaa

SEQ ID NO: 61944 - DNA, 25 bp, Artificial
  Probe
acagtgtggtttgagttggaataac

SEQ ID NO: 61945 - DNA, 25 bp, Artificial
  Probe
atccagtcttgtcatcacataaatg

SEQ ID NO: 61946 - DNA, 25 bp, Artificial
  Probe
ttatgaggaaagagagaagcaaaca

SEQ ID NO: 61947 - DNA, 25 bp, Artificial
  Probe
ttacgaagacgaacactactcattt

SEQ ID NO: 61948 - DNA, 25 bp, Artificial
  Probe
tttacgaagacgaacactactcatt

SEQ ID NO: 61949 - DNA, 25 bp, Artificial
  Probe
ttcttctacttgtatccatttcccg

SEQ ID NO: 61950 - DNA, 25 bp, Artificial
  Probe
gacccattcatactctccatacttg

SEQ ID NO: 61951 - DNA, 25 bp, Artificial
  Probe
attgagggttatgaggaaagagaga

SEQ ID NO: 61952 - DNA, 25 bp, Artificial
  Probe
ggttatgaggaaagagagaagcaaa

SEQ ID NO: 61953 - DNA, 25 bp, Artificial
  Probe
gtgaaacctgaagaagatgtaatcc

SEQ ID NO: 61954 - DNA, 25 bp, Artificial
  Probe
tgaaacctgaagaagatgtaatccc

SEQ ID NO: 61955 - DNA, 25 bp, Artificial
  Probe
tgaggaaagagagaagcaaacatac

SEQ ID NO: 61956 - DNA, 25 bp, Artificial
  Probe
ttgagggttatgaggaaagagagaa

SEQ ID NO: 61957 - DNA, 25 bp, Artificial
  Probe
aattgagggttatgaggaaagagag

SEQ ID NO: 61958 - DNA, 25 bp, Artificial
  Probe
atgaggaaagagagaagcaaacata

SEQ ID NO: 61959 - DNA, 25 bp, Artificial
  Probe
tatgaggaaagagagaagcaaacat

SEQ ID NO: 61960 - DNA, 25 bp, Artificial
  Probe
aaattgagggttatgaggaaagaga

SEQ ID NO: 61961 - DNA, 25 bp, Artificial
  Probe
ctgtgaaacctgaagaagatgtaat

SEQ ID NO: 61962 - DNA, 25 bp, Artificial
  Probe
gttatgaggaaagagagaagcaaac

SEQ ID NO: 61963 - DNA, 25 bp, Artificial
  Probe
tctgtgaaacctgaagaagatgtaa

SEQ ID NO: 61964 - DNA, 25 bp, Artificial
  Probe
ctttacgaagacgaacactactcat

SEQ ID NO: 61965 - DNA, 25 bp, Artificial
  Probe
tgtgaaacctgaagaagatgtaatc

SEQ ID NO: 61966 - DNA, 25 bp, Artificial
  Probe
tgagggttatgaggaaagagagaag

SEQ ID NO: 61967 - DNA, 25 bp, Artificial
  Probe
atgtatctgtgaaacctgaagaaga

SEQ ID NO: 61968 - DNA, 25 bp, Artificial
  Probe
cttctacttgtatccatttcccgtg

SEQ ID NO: 61969 - DNA, 25 bp, Artificial
  Probe
tcttctacttgtatccatttcccgt

SEQ ID NO: 61970 - DNA, 25 bp, Artificial
  Probe
ccgtgtggtaaagttgtttagaatt

SEQ ID NO: 61971 - DNA, 25 bp, Artificial
  Probe
gaaacctgaagaagatgtaatcccg

SEQ ID NO: 61972 - DNA, 25 bp, Artificial
  Probe
tttcttctacttgtatccatttccc

SEQ ID NO: 61973 - DNA, 25 bp, Artificial
  Probe
gaggaaagagagaagcaaacatacg

SEQ ID NO: 61974 - DNA, 25 bp, Artificial
  Probe
tttgcctcgtcgcttaatttcttta

SEQ ID NO: 61975 - DNA, 25 bp, Artificial
  Probe
acttgtcttccaataaattgagggt

SEQ ID NO: 61976 - DNA, 25 bp, Artificial
  Probe
cttgtcttccaataaattgagggtt

SEQ ID NO: 61977 - DNA, 25 bp, Artificial
  Probe
aacttgtcttccaataaattgaggg

SEQ ID NO: 61978 - DNA, 25 bp, Artificial
  Probe
taaattgagggttatgaggaaagag

SEQ ID NO: 61979 - DNA, 25 bp, Artificial
  Probe
tatgtatctgtgaaacctgaagaag

SEQ ID NO: 61980 - DNA, 25 bp, Artificial
  Probe
tgaatatgtatctgtgaaacctgaa

SEQ ID NO: 61981 - DNA, 25 bp, Artificial
  Probe
ttgaatatgtatctgtgaaacctga

SEQ ID NO: 61982 - DNA, 25 bp, Artificial
  Probe
tcattaataacgattaggtctgtga

SEQ ID NO: 61983 - DNA, 25 bp, Artificial
  Probe
gccagtcctcttctgtaataaacat

SEQ ID NO: 61984 - DNA, 25 bp, Artificial
  Probe
ccaataaattgagggttatgaggaa

SEQ ID NO: 61985 - DNA, 25 bp, Artificial
  Probe
ttccaataaattgagggttatgagg

SEQ ID NO: 61986 - DNA, 25 bp, Artificial
  Probe
atgtgaatccggtataactgttgag

SEQ ID NO: 61987 - DNA, 25 bp, Artificial
  Probe
gggttatgaggaaagagagaagcaa

SEQ ID NO: 61988 - DNA, 25 bp, Artificial
  Probe
gagccagtcctcttctgtaataaac

SEQ ID NO: 61989 - DNA, 25 bp, Artificial
  Probe
cttgaatatgtatctgtgaaacctg

SEQ ID NO: 61990 - DNA, 25 bp, Artificial
  Probe
ttgcctcgtcgcttaatttctttac

SEQ ID NO: 61991 - DNA, 25 bp, Artificial
  Probe
ctgagttccattgtcttttctttcc

SEQ ID NO: 61992 - DNA, 25 bp, Artificial
  Probe
ttttgctgagttccattgtcttttc

SEQ ID NO: 61993 - DNA, 25 bp, Artificial
  Probe
gctgagttccattgtcttttctttc

SEQ ID NO: 61994 - DNA, 25 bp, Artificial
  Probe
tgctgagttccattgtcttttcttt

SEQ ID NO: 61995 - DNA, 25 bp, Artificial
  Probe
ttgctgagttccattgtcttttctt

SEQ ID NO: 61996 - DNA, 25 bp, Artificial
  Probe
tttgctgagttccattgtcttttct

SEQ ID NO: 61997 - DNA, 25 bp, Artificial
  Probe
ctgtctgggataatttggggatttt

SEQ ID NO: 61998 - DNA, 25 bp, Artificial
  Probe
agttccattgtcttttctttccgag

SEQ ID NO: 61999 - DNA, 25 bp, Artificial
  Probe
gagttccattgtcttttctttccga

SEQ ID NO: 62000 - DNA, 25 bp, Artificial
  Probe
tgagttccattgtcttttctttccg

SEQ ID NO: 62001 - DNA, 25 bp, Artificial
  Probe
ttgtcttttctttccgagccttgta

SEQ ID NO: 62002 - DNA, 25 bp, Artificial
  Probe
tttctttccgagccttgtaggtgta

SEQ ID NO: 62003 - DNA, 25 bp, Artificial
  Probe
cctgtctgggataatttggggattt

SEQ ID NO: 62004 - DNA, 25 bp, Artificial
  Probe
aaagctgcctgtctgggataatttg

SEQ ID NO: 62005 - DNA, 25 bp, Artificial
  Probe
caaagctgcctgtctgggataattt

SEQ ID NO: 62006 - DNA, 25 bp, Artificial
  Probe
cattgtcttttctttccgagccttg

SEQ ID NO: 62007 - DNA, 25 bp, Artificial
  Probe
gttccattgtcttttctttccgagc

SEQ ID NO: 62008 - DNA, 25 bp, Artificial
  Probe
tgtcttttctttccgagccttgtag

SEQ ID NO: 62009 - DNA, 25 bp, Artificial
  Probe
caattcttttgcatgaccctctaaa

SEQ ID NO: 62010 - DNA, 25 bp, Artificial
  Probe
gataccacctttgatccacactgtg

SEQ ID NO: 62011 - DNA, 25 bp, Artificial
  Probe
attgtcttttctttccgagccttgt

SEQ ID NO: 62012 - DNA, 25 bp, Artificial
  Probe
acaattcttttgcatgaccctctaa

SEQ ID NO: 62013 - DNA, 25 bp, Artificial
  Probe
gacaattcttttgcatgaccctcta

SEQ ID NO: 62014 - DNA, 25 bp, Artificial
  Probe
ttctttccgagccttgtaggtgtac

SEQ ID NO: 62015 - DNA, 25 bp, Artificial
  Probe
ccattgtcttttctttccgagcctt

SEQ ID NO: 62016 - DNA, 25 bp, Artificial
  Probe
ttccattgtcttttctttccgagcc

SEQ ID NO: 62017 - DNA, 25 bp, Artificial
  Probe
aattcttttgcatgaccctctaaag

SEQ ID NO: 62018 - DNA, 25 bp, Artificial
  Probe
catgaccctctaaagagcaggacac

SEQ ID NO: 62019 - DNA, 25 bp, Artificial
  Probe
acaaagctgcctgtctgggataatt

SEQ ID NO: 62020 - DNA, 25 bp, Artificial
  Probe
gtcttttctttccgagccttgtagg

SEQ ID NO: 62021 - DNA, 25 bp, Artificial
  Probe
tccattgtcttttctttccgagcct

SEQ ID NO: 62022 - DNA, 25 bp, Artificial
  Probe
cttttctttccgagccttgtaggtg

SEQ ID NO: 62023 - DNA, 25 bp, Artificial
  Probe
tcttttctttccgagccttgtaggt

SEQ ID NO: 62024 - DNA, 25 bp, Artificial
  Probe
ttatctccacaaagctgcctgtctg

SEQ ID NO: 62025 - DNA, 25 bp, Artificial
  Probe
aagctgcctgtctgggataatttgg

SEQ ID NO: 62026 - DNA, 25 bp, Artificial
  Probe
ggacaattcttttgcatgaccctct

SEQ ID NO: 62027 - DNA, 25 bp, Artificial
  Probe
gcctgtctgggataatttggggatt

SEQ ID NO: 62028 - DNA, 25 bp, Artificial
  Probe
ataccacctttgatccacactgtgc

SEQ ID NO: 62029 - DNA, 25 bp, Artificial
  Probe
cacaaagctgcctgtctgggataat

SEQ ID NO: 62030 - DNA, 25 bp, Artificial
  Probe
gatcctaaactccaaggggactgtc

SEQ ID NO: 62031 - DNA, 25 bp, Artificial
  Probe
ttttctttccgagccttgtaggtgt

SEQ ID NO: 62032 - DNA, 25 bp, Artificial
  Probe
ggataccacctttgatccacactgt

SEQ ID NO: 62033 - DNA, 25 bp, Artificial
  Probe
ttttgcatgaccctctaaagagcag

SEQ ID NO: 62034 - DNA, 25 bp, Artificial
  Probe
cttttgcatgaccctctaaagagca

SEQ ID NO: 62035 - DNA, 25 bp, Artificial
  Probe
tttgcatgaccctctaaagagcagg

SEQ ID NO: 62036 - DNA, 25 bp, Artificial
  Probe
caggctggagtattcttagttctac

SEQ ID NO: 62037 - DNA, 25 bp, Artificial
  Probe
acaggctggagtattcttagttcta

SEQ ID NO: 62038 - DNA, 25 bp, Artificial
  Probe
cacaggctggagtattcttagttct

SEQ ID NO: 62039 - DNA, 25 bp, Artificial
  Probe
gctggagtattcttagttctactgg

SEQ ID NO: 62040 - DNA, 25 bp, Artificial
  Probe
ggctggagtattcttagttctactg

SEQ ID NO: 62041 - DNA, 25 bp, Artificial
  Probe
aggctggagtattcttagttctact

SEQ ID NO: 62042 - DNA, 25 bp, Artificial
  Probe
ctggagtattcttagttctactggt

SEQ ID NO: 62043 - DNA, 25 bp, Artificial
  Probe
tggagtattcttagttctactggtt

SEQ ID NO: 62044 - DNA, 25 bp, Artificial
  Probe
atgactttcaaggatggttcttagg

SEQ ID NO: 62045 - DNA, 25 bp, Artificial
  Probe
gcacaggctggagtattcttagttc

SEQ ID NO: 62046 - DNA, 25 bp, Artificial
  Probe
catgactttcaaggatggttcttag

SEQ ID NO: 62047 - DNA, 25 bp, Artificial
  Probe
tgactttcaaggatggttcttaggg

SEQ ID NO: 62048 - DNA, 25 bp, Artificial
  Probe
gcatgactttcaaggatggttctta

SEQ ID NO: 62049 - DNA, 25 bp, Artificial
  Probe
gatctgtaaagcatgactttcaagg

SEQ ID NO: 62050 - DNA, 25 bp, Artificial
  Probe
ctgtaaagcatgactttcaaggatg

SEQ ID NO: 62051 - DNA, 25 bp, Artificial
  Probe
tctgtaaagcatgactttcaaggat

SEQ ID NO: 62052 - DNA, 25 bp, Artificial
  Probe
atctgtaaagcatgactttcaagga

SEQ ID NO: 62053 - DNA, 25 bp, Artificial
  Probe
ggcacaggctggagtattcttagtt

SEQ ID NO: 62054 - DNA, 25 bp, Artificial
  Probe
taaagcatgactttcaaggatggtt

SEQ ID NO: 62055 - DNA, 25 bp, Artificial
  Probe
atttgctcagatgccacccaataaa

SEQ ID NO: 62056 - DNA, 25 bp, Artificial
  Probe
agcatgactttcaaggatggttctt

SEQ ID NO: 62057 - DNA, 25 bp, Artificial
  Probe
aagcatgactttcaaggatggttct

SEQ ID NO: 62058 - DNA, 25 bp, Artificial
  Probe
gtaaagcatgactttcaaggatggt

SEQ ID NO: 62059 - DNA, 25 bp, Artificial
  Probe
tgtaaagcatgactttcaaggatgg

SEQ ID NO: 62060 - DNA, 25 bp, Artificial
  Probe
aaagcatgactttcaaggatggttc

SEQ ID NO: 62061 - DNA, 25 bp, Artificial
  Probe
gatttgctcagatgccacccaataa

SEQ ID NO: 62062 - DNA, 25 bp, Artificial
  Probe
ctttcaaggatggttcttaggggac

SEQ ID NO: 62063 - DNA, 25 bp, Artificial
  Probe
gactttcaaggatggttcttagggg

SEQ ID NO: 62064 - DNA, 25 bp, Artificial
  Probe
gatggttcttaggggactgtgaaag

SEQ ID NO: 62065 - DNA, 25 bp, Artificial
  Probe
ttcttaggggactgtgaaagtgttg

SEQ ID NO: 62066 - DNA, 25 bp, Artificial
  Probe
gttcttaggggactgtgaaagtgtt

SEQ ID NO: 62067 - DNA, 25 bp, Artificial
  Probe
agagatctgtaaagcatgactttca

SEQ ID NO: 62068 - DNA, 25 bp, Artificial
  Probe
cagagatctgtaaagcatgactttc

SEQ ID NO: 62069 - DNA, 25 bp, Artificial
  Probe
tcagagatctgtaaagcatgacttt

SEQ ID NO: 62070 - DNA, 25 bp, Artificial
  Probe
gagatctgtaaagcatgactttcaa

SEQ ID NO: 62071 - DNA, 25 bp, Artificial
  Probe
agatctgtaaagcatgactttcaag

SEQ ID NO: 62072 - DNA, 25 bp, Artificial
  Probe
gagtggtcagagatctgtaaagcat

SEQ ID NO: 62073 - DNA, 25 bp, Artificial
  Probe
tttcaaggatggttcttaggggact

SEQ ID NO: 62074 - DNA, 25 bp, Artificial
  Probe
actttcaaggatggttcttagggga

SEQ ID NO: 62075 - DNA, 25 bp, Artificial
  Probe
atgccacccaataaaatgcctgtta

SEQ ID NO: 62076 - DNA, 25 bp, Artificial
  Probe
gtggtcagagatctgtaaagcatga

SEQ ID NO: 62077 - DNA, 25 bp, Artificial
  Probe
agtggtcagagatctgtaaagcatg

SEQ ID NO: 62078 - DNA, 25 bp, Artificial
  Probe
actgtgaaagtgttgggtcttcctc

SEQ ID NO: 62079 - DNA, 25 bp, Artificial
  Probe
ttgctcagatgccacccaataaaat

SEQ ID NO: 62080 - DNA, 25 bp, Artificial
  Probe
atggttcttaggggactgtgaaagt

SEQ ID NO: 62081 - DNA, 25 bp, Artificial
  Probe
taccacaattaaagactatgctccc

SEQ ID NO: 62082 - DNA, 25 bp, Artificial
  Probe
cctacaataactccactgaggactc

SEQ ID NO: 62083 - DNA, 25 bp, Artificial
  Probe
ctacaataactccactgaggactca

SEQ ID NO: 62084 - DNA, 25 bp, Artificial
  Probe
gtaccacaattaaagactatgctcc

SEQ ID NO: 62085 - DNA, 25 bp, Artificial
  Probe
tacaataactccactgaggactcac

SEQ ID NO: 62086 - DNA, 25 bp, Artificial
  Probe
gtaatctttcctctgtttgctgtcc

SEQ ID NO: 62087 - DNA, 25 bp, Artificial
  Probe
ggtaatctttcctctgtttgctgtc

SEQ ID NO: 62088 - DNA, 25 bp, Artificial
  Probe
cagtgtttgattacaaggaatggag

SEQ ID NO: 62089 - DNA, 25 bp, Artificial
  Probe
ctcagtgtttgattacaaggaatgg

SEQ ID NO: 62090 - DNA, 25 bp, Artificial
  Probe
tcagtgtttgattacaaggaatgga

SEQ ID NO: 62091 - DNA, 25 bp, Artificial
  Probe
aatctttcctctgtttgctgtccta

SEQ ID NO: 62092 - DNA, 25 bp, Artificial
  Probe
taatctttcctctgtttgctgtcct

SEQ ID NO: 62093 - DNA, 25 bp, Artificial
  Probe
gctttcctacaataactccactgag

SEQ ID NO: 62094 - DNA, 25 bp, Artificial
  Probe
agtgtttgattacaaggaatggagg

SEQ ID NO: 62095 - DNA, 25 bp, Artificial
  Probe
cagcattgcagatgtcttagttaca

SEQ ID NO: 62096 - DNA, 25 bp, Artificial
  Probe
ccagcattgcagatgtcttagttac

SEQ ID NO: 62097 - DNA, 25 bp, Artificial
  Probe
ggctttcctacaataactccactga

SEQ ID NO: 62098 - DNA, 25 bp, Artificial
  Probe
cctcagtgtttgattacaaggaatg

SEQ ID NO: 62099 - DNA, 25 bp, Artificial
  Probe
tagaagggctttcctacaataactc

SEQ ID NO: 62100 - DNA, 25 bp, Artificial
  Probe
ctttcctacaataactccactgagg

SEQ ID NO: 62101 - DNA, 25 bp, Artificial
  Probe
tctgtttgctgtcctacttgcttaa

SEQ ID NO: 62102 - DNA, 25 bp, Artificial
  Probe
ctagaagggctttcctacaataact

SEQ ID NO: 62103 - DNA, 25 bp, Artificial
  Probe
actagaagggctttcctacaataac

SEQ ID NO: 62104 - DNA, 25 bp, Artificial
  Probe
gactagaagggctttcctacaataa

SEQ ID NO: 62105 - DNA, 25 bp, Artificial
  Probe
aatactgactagaagggctttccta

SEQ ID NO: 62106 - DNA, 25 bp, Artificial
  Probe
ccctcagtgtttgattacaaggaat

SEQ ID NO: 62107 - DNA, 25 bp, Artificial
  Probe
tgactagaagggctttcctacaata

SEQ ID NO: 62108 - DNA, 25 bp, Artificial
  Probe
agtaccacaattaaagactatgctc

SEQ ID NO: 62109 - DNA, 25 bp, Artificial
  Probe
atctttcctctgtttgctgtcctac

SEQ ID NO: 62110 - DNA, 25 bp, Artificial
  Probe
atactgactagaagggctttcctac

SEQ ID NO: 62111 - DNA, 25 bp, Artificial
  Probe
gtgtttgattacaaggaatggaggg

SEQ ID NO: 62112 - DNA, 25 bp, Artificial
  Probe
ctttcctctgtttgctgtcctactt

SEQ ID NO: 62113 - DNA, 25 bp, Artificial
  Probe
ctctgtttgctgtcctacttgctta

SEQ ID NO: 62114 - DNA, 25 bp, Artificial
  Probe
aagtaccacaattaaagactatgct

SEQ ID NO: 62115 - DNA, 25 bp, Artificial
  Probe
cgatggaaataatgctcctcttgag

SEQ ID NO: 62116 - DNA, 25 bp, Artificial
  Probe
tttcctctgtttgctgtcctacttg

SEQ ID NO: 62117 - DNA, 25 bp, Artificial
  Probe
ctgactagaagggctttcctacaat

SEQ ID NO: 62118 - DNA, 25 bp, Artificial
  Probe
caatactgactagaagggctttcct

SEQ ID NO: 62119 - DNA, 25 bp, Artificial
  Probe
gggctttcctacaataactccactg

SEQ ID NO: 62120 - DNA, 25 bp, Artificial
  Probe
agaagggctttcctacaataactcc

SEQ ID NO: 62121 - DNA, 25 bp, Artificial
  Probe
aggtaatctttcctctgtttgctgt

SEQ ID NO: 62122 - DNA, 25 bp, Artificial
  Probe
gaagggctttcctacaataactcca

SEQ ID NO: 62123 - DNA, 25 bp, Artificial
  Probe
tcatacttacgaaagggattgtaaa

SEQ ID NO: 62124 - DNA, 25 bp, Artificial
  Probe
ttcatacttacgaaagggattgtaa

SEQ ID NO: 62125 - DNA, 25 bp, Artificial
  Probe
tactgactagaagggctttcctaca

SEQ ID NO: 62126 - DNA, 25 bp, Artificial
  Probe
agatgtcttagatgtcttgatgtca

SEQ ID NO: 62127 - DNA, 25 bp, Artificial
  Probe
agagatgtcttagatgtcttgatgt

SEQ ID NO: 62128 - DNA, 25 bp, Artificial
  Probe
gagatgtcttagatgtcttgatgtc

SEQ ID NO: 62129 - DNA, 25 bp, Artificial
  Probe
ctcacctctccttgaatgaagatga

SEQ ID NO: 62130 - DNA, 25 bp, Artificial
  Probe
gatgtcttagatgtcttgatgtcaa

SEQ ID NO: 62131 - DNA, 25 bp, Artificial
  Probe
cctcacctctccttgaatgaagatg

SEQ ID NO: 62132 - DNA, 25 bp, Artificial
  Probe
tcctcacctctccttgaatgaagat

SEQ ID NO: 62133 - DNA, 25 bp, Artificial
  Probe
ttcctcacctctccttgaatgaaga

SEQ ID NO: 62134 - DNA, 25 bp, Artificial
  Probe
gaatgagttctatgagtttgccctg

SEQ ID NO: 62135 - DNA, 25 bp, Artificial
  Probe
gtgagaaagatggagacctctacat

SEQ ID NO: 62136 - DNA, 25 bp, Artificial
  Probe
aagagatgtcttagatgtcttgatg

SEQ ID NO: 62137 - DNA, 25 bp, Artificial
  Probe
tttcctcacctctccttgaatgaag

SEQ ID NO: 62138 - DNA, 25 bp, Artificial
  Probe
ctttcctcacctctccttgaatgaa

SEQ ID NO: 62139 - DNA, 25 bp, Artificial
  Probe
aatgagttctatgagtttgccctgg

SEQ ID NO: 62140 - DNA, 25 bp, Artificial
  Probe
atgagttctatgagtttgccctgga

SEQ ID NO: 62141 - DNA, 25 bp, Artificial
  Probe
gagaatgagttctatgagtttgccc

SEQ ID NO: 62142 - DNA, 25 bp, Artificial
  Probe
agaatgagttctatgagtttgccct

SEQ ID NO: 62143 - DNA, 25 bp, Artificial
  Probe
cgtgagaaagatggagacctctaca

SEQ ID NO: 62144 - DNA, 25 bp, Artificial
  Probe
tgagaaagatggagacctctacatc

SEQ ID NO: 62145 - DNA, 25 bp, Artificial
  Probe
atgtcttagatgtcttgatgtcaag

SEQ ID NO: 62146 - DNA, 25 bp, Artificial
  Probe
tgagttctatgagtttgccctggag

SEQ ID NO: 62147 - DNA, 25 bp, Artificial
  Probe
gaaggcgagtaccattccagaagag

SEQ ID NO: 62148 - DNA, 25 bp, Artificial
  Probe
gagaaagatggagacctctacatcc

SEQ ID NO: 62149 - DNA, 25 bp, Artificial
  Probe
gaaagatggagacctctacatcctg

SEQ ID NO: 62150 - DNA, 25 bp, Artificial
  Probe
agaaagatggagacctctacatcct

SEQ ID NO: 62151 - DNA, 25 bp, Artificial
  Probe
ccgtgagaaagatggagacctctac

SEQ ID NO: 62152 - DNA, 25 bp, Artificial
  Probe
gctttcctcacctctccttgaatga

SEQ ID NO: 62153 - DNA, 25 bp, Artificial
  Probe
tccgtgagaaagatggagacctcta

SEQ ID NO: 62154 - DNA, 25 bp, Artificial
  Probe
cttgatgtcaagagaggagatgctg

SEQ ID NO: 62155 - DNA, 25 bp, Artificial
  Probe
taagagatgtcttagatgtcttgat

SEQ ID NO: 62156 - DNA, 25 bp, Artificial
  Probe
gttagagggaaggcgagtaccattc

SEQ ID NO: 62157 - DNA, 25 bp, Artificial
  Probe
aaagatggagacctctacatcctgg

SEQ ID NO: 62158 - DNA, 25 bp, Artificial
  Probe
ggctttcctcacctctccttgaatg

SEQ ID NO: 62159 - DNA, 25 bp, Artificial
  Probe
gagtaccattccagaagaggctctg

SEQ ID NO: 62160 - DNA, 25 bp, Artificial
  Probe
ctcttgcttttgatgaggctttcct

SEQ ID NO: 62161 - DNA, 25 bp, Artificial
  Probe
aagatggagacctctacatcctggc

SEQ ID NO: 62162 - DNA, 25 bp, Artificial
  Probe
tgctcttgcttttgatgaggctttc

SEQ ID NO: 62163 - DNA, 25 bp, Artificial
  Probe
ctgctcttgcttttgatgaggcttt

SEQ ID NO: 62164 - DNA, 25 bp, Artificial
  Probe
ctctgctgctcttgcttttgatgag

SEQ ID NO: 62165 - DNA, 25 bp, Artificial
  Probe
gctcttgcttttgatgaggctttcc

SEQ ID NO: 62166 - DNA, 25 bp, Artificial
  Probe
ctctacatcctggcccagaactttt

SEQ ID NO: 62167 - DNA, 25 bp, Artificial
  Probe
tcttgcttttgatgaggctttcctc

SEQ ID NO: 62168 - DNA, 25 bp, Artificial
  Probe
gagatgaacaaggacctagaggaag

SEQ ID NO: 62169 - DNA, 25 bp, Artificial
  Probe
gatgaacaaggacctagaggaagtg

SEQ ID NO: 62170 - DNA, 25 bp, Artificial
  Probe
agatgaacaaggacctagaggaagt

SEQ ID NO: 62171 - DNA, 25 bp, Artificial
  Probe
ggctttcttacaataaacctttcca

SEQ ID NO: 62172 - DNA, 25 bp, Artificial
  Probe
tggctttcttacaataaacctttcc

SEQ ID NO: 62173 - DNA, 25 bp, Artificial
  Probe
atgaacaaggacctagaggaagtga

SEQ ID NO: 62174 - DNA, 25 bp, Artificial
  Probe
tgaacaaggacctagaggaagtgaa

SEQ ID NO: 62175 - DNA, 25 bp, Artificial
  Probe
gaagaaatggaaagaggatgtggag

SEQ ID NO: 62176 - DNA, 25 bp, Artificial
  Probe
gagaaagaaacagattgggtgagac

SEQ ID NO: 62177 - DNA, 25 bp, Artificial
  Probe
agaagaaatggaaagaggatgtgga

SEQ ID NO: 62178 - DNA, 25 bp, Artificial
  Probe
cagaagaaatggaaagaggatgtgg

SEQ ID NO: 62179 - DNA, 25 bp, Artificial
  Probe
ggagatgaacaaggacctagaggaa

SEQ ID NO: 62180 - DNA, 25 bp, Artificial
  Probe
gctttcttacaataaacctttccaa

SEQ ID NO: 62181 - DNA, 25 bp, Artificial
  Probe
gaaagaaacagattgggtgagacag

SEQ ID NO: 62182 - DNA, 25 bp, Artificial
  Probe
agaaagaaacagattgggtgagaca

SEQ ID NO: 62183 - DNA, 25 bp, Artificial
  Probe
ggataacctggagaaagaaacagat

SEQ ID NO: 62184 - DNA, 25 bp, Artificial
  Probe
ctgggataacctggagaaagaaaca

SEQ ID NO: 62185 - DNA, 25 bp, Artificial
  Probe
taacctggagaaagaaacagattgg

SEQ ID NO: 62186 - DNA, 25 bp, Artificial
  Probe
ttggctttcttacaataaacctttc

SEQ ID NO: 62187 - DNA, 25 bp, Artificial
  Probe
tctgggataacctggagaaagaaac

SEQ ID NO: 62188 - DNA, 25 bp, Artificial
  Probe
gaacaaggacctagaggaagtgaaa

SEQ ID NO: 62189 - DNA, 25 bp, Artificial
  Probe
ataacctggagaaagaaacagattg

SEQ ID NO: 62190 - DNA, 25 bp, Artificial
  Probe
gataacctggagaaagaaacagatt

SEQ ID NO: 62191 - DNA, 25 bp, Artificial
  Probe
ggagaaagaaacagattgggtgaga

SEQ ID NO: 62192 - DNA, 25 bp, Artificial
  Probe
aacaaggacctagaggaagtgaaac

SEQ ID NO: 62193 - DNA, 25 bp, Artificial
  Probe
gagacaggagatgaacaaggaccta

SEQ ID NO: 62194 - DNA, 25 bp, Artificial
  Probe
ggacctagaggaagtgaaacagaag

SEQ ID NO: 62195 - DNA, 25 bp, Artificial
  Probe
acaggagatgaacaaggacctagag

SEQ ID NO: 62196 - DNA, 25 bp, Artificial
  Probe
gacaggagatgaacaaggacctaga

SEQ ID NO: 62197 - DNA, 25 bp, Artificial
  Probe
agacaggagatgaacaaggacctag

SEQ ID NO: 62198 - DNA, 25 bp, Artificial
  Probe
tggagaaagaaacagattgggtgag

SEQ ID NO: 62199 - DNA, 25 bp, Artificial
  Probe
aggacctagaggaagtgaaacagaa

SEQ ID NO: 62200 - DNA, 25 bp, Artificial
  Probe
aaggacctagaggaagtgaaacaga

SEQ ID NO: 62201 - DNA, 25 bp, Artificial
  Probe
caaggacctagaggaagtgaaacag

SEQ ID NO: 62202 - DNA, 25 bp, Artificial
  Probe
gggataacctggagaaagaaacaga

SEQ ID NO: 62203 - DNA, 25 bp, Artificial
  Probe
aaagaaacagattgggtgagacagg

SEQ ID NO: 62204 - DNA, 25 bp, Artificial
  Probe
tgggataacctggagaaagaaacag

SEQ ID NO: 62205 - DNA, 25 bp, Artificial
  Probe
gcattggctttcttacaataaacct

SEQ ID NO: 62206 - DNA, 25 bp, Artificial
  Probe
aagaaatggaaagaggatgtggagc

SEQ ID NO: 62207 - DNA, 25 bp, Artificial
  Probe
ccagaagaaatggaaagaggatgtg

SEQ ID NO: 62208 - DNA, 25 bp, Artificial
  Probe
gacctagaggaagtgaaacagaagg

SEQ ID NO: 62209 - DNA, 25 bp, Artificial
  Probe
ctagaggaagtgaaacagaaggtgc

SEQ ID NO: 62210 - DNA, 25 bp, Artificial
  Probe
acaaggacctagaggaagtgaaaca

SEQ ID NO: 62211 - DNA, 25 bp, Artificial
  Probe
aggagatgaacaaggacctagagga

SEQ ID NO: 62212 - DNA, 25 bp, Artificial
  Probe
caggagatgaacaaggacctagagg

SEQ ID NO: 62213 - DNA, 25 bp, Artificial
  Probe
agagacttgattcttacaccattca

SEQ ID NO: 62214 - DNA, 25 bp, Artificial
  Probe
gagacttgattcttacaccattcat

SEQ ID NO: 62215 - DNA, 25 bp, Artificial
  Probe
acttgattcttacaccattcattga

SEQ ID NO: 62216 - DNA, 25 bp, Artificial
  Probe
gacttgattcttacaccattcattg

SEQ ID NO: 62217 - DNA, 25 bp, Artificial
  Probe
agacttgattcttacaccattcatt

SEQ ID NO: 62218 - DNA, 25 bp, Artificial
  Probe
aatccttcaatcctccttgctcttc

SEQ ID NO: 62219 - DNA, 25 bp, Artificial
  Probe
cttgattcttacaccattcattgat

SEQ ID NO: 62220 - DNA, 25 bp, Artificial
  Probe
accaaccttacaagtatcaacaaac

SEQ ID NO: 62221 - DNA, 25 bp, Artificial
  Probe
ataccaaccttacaagtatcaacaa

SEQ ID NO: 62222 - DNA, 25 bp, Artificial
  Probe
ccacaaagataccaaccttacaagt

SEQ ID NO: 62223 - DNA, 25 bp, Artificial
  Probe
aaagattcataggtcaagtaatggc

SEQ ID NO: 62224 - DNA, 25 bp, Artificial
  Probe
cacaaagataccaaccttacaagta

SEQ ID NO: 62225 - DNA, 25 bp, Artificial
  Probe
ccaaccttacaagtatcaacaaact

SEQ ID NO: 62226 - DNA, 25 bp, Artificial
  Probe
aactgattgtgccttaaagattcat

SEQ ID NO: 62227 - DNA, 25 bp, Artificial
  Probe
cccacaaagataccaaccttacaag

SEQ ID NO: 62228 - DNA, 25 bp, Artificial
  Probe
taccaaccttacaagtatcaacaaa

SEQ ID NO: 62229 - DNA, 25 bp, Artificial
  Probe
ccatcactcaagcgatctttatatg

SEQ ID NO: 62230 - DNA, 25 bp, Artificial
  Probe
agataactgattgtgccttaaagat

SEQ ID NO: 62231 - DNA, 25 bp, Artificial
  Probe
aagataactgattgtgccttaaaga

SEQ ID NO: 62232 - DNA, 25 bp, Artificial
  Probe
aagagacttgattcttacaccattc

SEQ ID NO: 62233 - DNA, 25 bp, Artificial
  Probe
taactgattgtgccttaaagattca

SEQ ID NO: 62234 - DNA, 25 bp, Artificial
  Probe
catcactcaagcgatctttatatgt

SEQ ID NO: 62235 - DNA, 25 bp, Artificial
  Probe
gccatcactcaagcgatctttatat

SEQ ID NO: 62236 - DNA, 25 bp, Artificial
  Probe
actgattgtgccttaaagattcata

SEQ ID NO: 62237 - DNA, 25 bp, Artificial
  Probe
tgccttaaagattcataggtcaagt

SEQ ID NO: 62238 - DNA, 25 bp, Artificial
  Probe
gtgccttaaagattcataggtcaag

SEQ ID NO: 62239 - DNA, 25 bp, Artificial
  Probe
tgtgccttaaagattcataggtcaa

SEQ ID NO: 62240 - DNA, 25 bp, Artificial
  Probe
ttgtgccttaaagattcataggtca

SEQ ID NO: 62241 - DNA, 25 bp, Artificial
  Probe
atccttcaatcctccttgctcttca

SEQ ID NO: 62242 - DNA, 25 bp, Artificial
  Probe
attgtgccttaaagattcataggtc

SEQ ID NO: 62243 - DNA, 25 bp, Artificial
  Probe
gattgtgccttaaagattcataggt

SEQ ID NO: 62244 - DNA, 25 bp, Artificial
  Probe
tgattgtgccttaaagattcatagg

SEQ ID NO: 62245 - DNA, 25 bp, Artificial
  Probe
ctgattgtgccttaaagattcatag

SEQ ID NO: 62246 - DNA, 25 bp, Artificial
  Probe
aaagataactgattgtgccttaaag

SEQ ID NO: 62247 - DNA, 25 bp, Artificial
  Probe
aagattcataggtcaagtaatggcc

SEQ ID NO: 62248 - DNA, 25 bp, Artificial
  Probe
aaatccttcaatcctccttgctctt

SEQ ID NO: 62249 - DNA, 25 bp, Artificial
  Probe
ataactgattgtgccttaaagattc

SEQ ID NO: 62250 - DNA, 25 bp, Artificial
  Probe
gataactgattgtgccttaaagatt

SEQ ID NO: 62251 - DNA, 25 bp, Artificial
  Probe
tgattcttacaccattcattgataa

SEQ ID NO: 62252 - DNA, 25 bp, Artificial
  Probe
ttgattcttacaccattcattgata

SEQ ID NO: 62253 - DNA, 25 bp, Artificial
  Probe
tccttcaatcctccttgctcttcaa

SEQ ID NO: 62254 - DNA, 25 bp, Artificial
  Probe
gccttaaagattcataggtcaagta

SEQ ID NO: 62255 - DNA, 25 bp, Artificial
  Probe
tcactcaagcgatctttatatgtaa

SEQ ID NO: 62256 - DNA, 25 bp, Artificial
  Probe
atcactcaagcgatctttatatgta

SEQ ID NO: 62257 - DNA, 25 bp, Artificial
  Probe
acaagagacttgattcttacaccat

SEQ ID NO: 62258 - DNA, 25 bp, Artificial
  Probe
tggaatgtgaagcgttatagaagat

SEQ ID NO: 62259 - DNA, 25 bp, Artificial
  Probe
ctggaatgtgaagcgttatagaaga

SEQ ID NO: 62260 - DNA, 25 bp, Artificial
  Probe
atctggaatgtgaagcgttatagaa

SEQ ID NO: 62261 - DNA, 25 bp, Artificial
  Probe
ttctcatacttaactggttggttgt

SEQ ID NO: 62262 - DNA, 25 bp, Artificial
  Probe
tctggaatgtgaagcgttatagaag

SEQ ID NO: 62263 - DNA, 25 bp, Artificial
  Probe
tctcatacttaactggttggttgtg

SEQ ID NO: 62264 - DNA, 25 bp, Artificial
  Probe
ctcatacttaactggttggttgtgt

SEQ ID NO: 62265 - DNA, 25 bp, Artificial
  Probe
ggaatgtgaagcgttatagaagata

SEQ ID NO: 62266 - DNA, 25 bp, Artificial
  Probe
attctcatacttaactggttggttg

SEQ ID NO: 62267 - DNA, 25 bp, Artificial
  Probe
tcatacttaactggttggttgtgtg

SEQ ID NO: 62268 - DNA, 25 bp, Artificial
  Probe
gatctggaatgtgaagcgttataga

SEQ ID NO: 62269 - DNA, 25 bp, Artificial
  Probe
taaggagtaagtctgccagcattat

SEQ ID NO: 62270 - DNA, 25 bp, Artificial
  Probe
ttaaggagtaagtctgccagcatta

SEQ ID NO: 62271 - DNA, 25 bp, Artificial
  Probe
aattctcatacttaactggttggtt

SEQ ID NO: 62272 - DNA, 25 bp, Artificial
  Probe
atacttaactggttggttgtgtgga

SEQ ID NO: 62273 - DNA, 25 bp, Artificial
  Probe
catacttaactggttggttgtgtgg

SEQ ID NO: 62274 - DNA, 25 bp, Artificial
  Probe
attcgtcaagcctctggttctaatt

SEQ ID NO: 62275 - DNA, 25 bp, Artificial
  Probe
aattcgtcaagcctctggttctaat

SEQ ID NO: 62276 - DNA, 25 bp, Artificial
  Probe
tacttaactggttggttgtgtggaa

SEQ ID NO: 62277 - DNA, 25 bp, Artificial
  Probe
attaaggagtaagtctgccagcatt

SEQ ID NO: 62278 - DNA, 25 bp, Artificial
  Probe
aattaaggagtaagtctgccagcat

SEQ ID NO: 62279 - DNA, 25 bp, Artificial
  Probe
gcactaaatgacaccactaaagaaa

SEQ ID NO: 62280 - DNA, 25 bp, Artificial
  Probe
agcactaaatgacaccactaaagaa

SEQ ID NO: 62281 - DNA, 25 bp, Artificial
  Probe
actaaatgacaccactaaagaaacg

SEQ ID NO: 62282 - DNA, 25 bp, Artificial
  Probe
ctaaatgacaccactaaagaaacga

SEQ ID NO: 62283 - DNA, 25 bp, Artificial
  Probe
cctctggttctaatttctcatttgc

SEQ ID NO: 62284 - DNA, 25 bp, Artificial
  Probe
gcctctggttctaatttctcatttg

SEQ ID NO: 62285 - DNA, 25 bp, Artificial
  Probe
agcctctggttctaatttctcattt

SEQ ID NO: 62286 - DNA, 25 bp, Artificial
  Probe
aagcctctggttctaatttctcatt

SEQ ID NO: 62287 - DNA, 25 bp, Artificial
  Probe
ttaactggttggttgtgtggaagaa

SEQ ID NO: 62288 - DNA, 25 bp, Artificial
  Probe
gccagcattatgaaagtgaatctta

SEQ ID NO: 62289 - DNA, 25 bp, Artificial
  Probe
cagcactaaatgacaccactaaaga

SEQ ID NO: 62290 - DNA, 25 bp, Artificial
  Probe
taaattaaggagtaagtctgccagc

SEQ ID NO: 62291 - DNA, 25 bp, Artificial
  Probe
caagcctctggttctaatttctcat

SEQ ID NO: 62292 - DNA, 25 bp, Artificial
  Probe
ggagtaagtctgccagcattatgaa

SEQ ID NO: 62293 - DNA, 25 bp, Artificial
  Probe
aaggagtaagtctgccagcattatg

SEQ ID NO: 62294 - DNA, 25 bp, Artificial
  Probe
taaatgacaccactaaagaaacgat

SEQ ID NO: 62295 - DNA, 25 bp, Artificial
  Probe
gaatgtgaagcgttatagaagataa

SEQ ID NO: 62296 - DNA, 25 bp, Artificial
  Probe
aaatgacaccactaaagaaacgatc

SEQ ID NO: 62297 - DNA, 25 bp, Artificial
  Probe
cactaaatgacaccactaaagaaac

SEQ ID NO: 62298 - DNA, 25 bp, Artificial
  Probe
cttaactggttggttgtgtggaaga

SEQ ID NO: 62299 - DNA, 25 bp, Artificial
  Probe
gtcaagcctctggttctaatttctc

SEQ ID NO: 62300 - DNA, 25 bp, Artificial
  Probe
ccactaaagaaacgatcagacagat

SEQ ID NO: 62301 - DNA, 25 bp, Artificial
  Probe
ttaaattaaggagtaagtctgccag

SEQ ID NO: 62302 - DNA, 25 bp, Artificial
  Probe
tcaagcctctggttctaatttctca

SEQ ID NO: 62303 - DNA, 25 bp, Artificial
  Probe
taatataagtccacaagacggtagc

SEQ ID NO: 62304 - DNA, 25 bp, Artificial
  Probe
tgataatataagtccacaagacggt

SEQ ID NO: 62305 - DNA, 25 bp, Artificial
  Probe
gtgataatataagtccacaagacgg

SEQ ID NO: 62306 - DNA, 25 bp, Artificial
  Probe
ggtgataatataagtccacaagacg

SEQ ID NO: 62307 - DNA, 25 bp, Artificial
  Probe
tcaacagacctaagaaatagcatca

SEQ ID NO: 62308 - DNA, 25 bp, Artificial
  Probe
caacagacctaagaaatagcatcaa

SEQ ID NO: 62309 - DNA, 25 bp, Artificial
  Probe
gataatataagtccacaagacggta

SEQ ID NO: 62310 - DNA, 25 bp, Artificial
  Probe
acagacctaagaaatagcatcaatg

SEQ ID NO: 62311 - DNA, 25 bp, Artificial
  Probe
atcaacagacctaagaaatagcatc

SEQ ID NO: 62312 - DNA, 25 bp, Artificial
  Probe
ataatataagtccacaagacggtag

SEQ ID NO: 62313 - DNA, 25 bp, Artificial
  Probe
gagcccagtggtgataatataagtc

SEQ ID NO: 62314 - DNA, 25 bp, Artificial
  Probe
gtgagcccagtggtgataatataag

SEQ ID NO: 62315 - DNA, 25 bp, Artificial
  Probe
tgagcccagtggtgataatataagt

SEQ ID NO: 62316 - DNA, 25 bp, Artificial
  Probe
tggtgataatataagtccacaagac

SEQ ID NO: 62317 - DNA, 25 bp, Artificial
  Probe
agatcaacagacctaagaaatagca

SEQ ID NO: 62318 - DNA, 25 bp, Artificial
  Probe
cagatcaacagacctaagaaatagc

SEQ ID NO: 62319 - DNA, 25 bp, Artificial
  Probe
gcagatcaacagacctaagaaatag

SEQ ID NO: 62320 - DNA, 25 bp, Artificial
  Probe
cgcagatcaacagacctaagaaata

SEQ ID NO: 62321 - DNA, 25 bp, Artificial
  Probe
gacatctttgaagaaggctttgaaa

SEQ ID NO: 62322 - DNA, 25 bp, Artificial
  Probe
aatataagtccacaagacggtagct

SEQ ID NO: 62323 - DNA, 25 bp, Artificial
  Probe
aacagacctaagaaatagcatcaat

SEQ ID NO: 62324 - DNA, 25 bp, Artificial
  Probe
atgacatctttgaagaaggctttga

SEQ ID NO: 62325 - DNA, 25 bp, Artificial
  Probe
agcccagtggtgataatataagtcc

SEQ ID NO: 62326 - DNA, 25 bp, Artificial
  Probe
gatgacatctttgaagaaggctttg

SEQ ID NO: 62327 - DNA, 25 bp, Artificial
  Probe
gatcaacagacctaagaaatagcat

SEQ ID NO: 62328 - DNA, 25 bp, Artificial
  Probe
tgacatctttgaagaaggctttgaa

SEQ ID NO: 62329 - DNA, 25 bp, Artificial
  Probe
ggtgagcccagtggtgataatataa

SEQ ID NO: 62330 - DNA, 25 bp, Artificial
  Probe
atataagtccacaagacggtagcta

SEQ ID NO: 62331 - DNA, 25 bp, Artificial
  Probe
atctttgaagaaggctttgaaagtc

SEQ ID NO: 62332 - DNA, 25 bp, Artificial
  Probe
catctttgaagaaggctttgaaagt

SEQ ID NO: 62333 - DNA, 25 bp, Artificial
  Probe
acatctttgaagaaggctttgaaag

SEQ ID NO: 62334 - DNA, 25 bp, Artificial
  Probe
tataagtccacaagacggtagctag

SEQ ID NO: 62335 - DNA, 25 bp, Artificial
  Probe
ccagcaagagtgaagaacaagaagc

SEQ ID NO: 62336 - DNA, 25 bp, Artificial
  Probe
ctcacttcacctcatccacacagaa

SEQ ID NO: 62337 - DNA, 25 bp, Artificial
  Probe
gcccagtggtgataatataagtcca

SEQ ID NO: 62338 - DNA, 25 bp, Artificial
  Probe
tttgaagaaggctttgaaagtccca

SEQ ID NO: 62339 - DNA, 25 bp, Artificial
  Probe
tctttgaagaaggctttgaaagtcc

SEQ ID NO: 62340 - DNA, 25 bp, Artificial
  Probe
ctctcacttcacctcatccacacag

SEQ ID NO: 62341 - DNA, 25 bp, Artificial
  Probe
tttgaaagtcccagcaagagtgaag

SEQ ID NO: 62342 - DNA, 25 bp, Artificial
  Probe
cagacgactgtgatgactttgacat

SEQ ID NO: 62343 - DNA, 25 bp, Artificial
  Probe
ttgaagaaggctttgaaagtcccag

SEQ ID NO: 62344 - DNA, 25 bp, Artificial
  Probe
cccagcaagagtgaagaacaagaag

SEQ ID NO: 62345 - DNA, 25 bp, Artificial
  Probe
gaaagtcccagcaagagtgaagaac

SEQ ID NO: 62346 - DNA, 25 bp, Artificial
  Probe
ctttgaaagtcccagcaagagtgaa

SEQ ID NO: 62347 - DNA, 25 bp, Artificial
  Probe
aagtccacaagacggtagctagata

SEQ ID NO: 62348 - DNA, 25 bp, Artificial
  Probe
tttcaatgctgacaaattcctggag

SEQ ID NO: 62349 - DNA, 25 bp, Artificial
  Probe
gtgagttcaatcgactgaggacaac

SEQ ID NO: 62350 - DNA, 25 bp, Artificial
  Probe
ttttcaatgctgacaaattcctgga

SEQ ID NO: 62351 - DNA, 25 bp, Artificial
  Probe
tgagttcaatcgactgaggacaacc

SEQ ID NO: 62352 - DNA, 25 bp, Artificial
  Probe
ggtgagttcaatcgactgaggacaa

SEQ ID NO: 62353 - DNA, 25 bp, Artificial
  Probe
gagttcaatcgactgaggacaacct

SEQ ID NO: 62354 - DNA, 25 bp, Artificial
  Probe
gacttcgcagatgacaccctagatc

SEQ ID NO: 62355 - DNA, 25 bp, Artificial
  Probe
ttcaatgctgacaaattcctggagc

SEQ ID NO: 62356 - DNA, 25 bp, Artificial
  Probe
agttcaatcgactgaggacaacctc

SEQ ID NO: 62357 - DNA, 25 bp, Artificial
  Probe
tttgaataaagagttcaacgttaaa

SEQ ID NO: 62358 - DNA, 25 bp, Artificial
  Probe
ttgaataaagagttcaacgttaaaa

SEQ ID NO: 62359 - DNA, 25 bp, Artificial
  Probe
ttttgaataaagagttcaacgttaa

SEQ ID NO: 62360 - DNA, 25 bp, Artificial
  Probe
agttctgctccaatgtcttatatga

SEQ ID NO: 62361 - DNA, 25 bp, Artificial
  Probe
aagttctgctccaatgtcttatatg

SEQ ID NO: 62362 - DNA, 25 bp, Artificial
  Probe
gtcttatatgaggcacaactcttct

SEQ ID NO: 62363 - DNA, 25 bp, Artificial
  Probe
ttctgctccaatgtcttatatgagg

SEQ ID NO: 62364 - DNA, 25 bp, Artificial
  Probe
gttctgctccaatgtcttatatgag

SEQ ID NO: 62365 - DNA, 25 bp, Artificial
  Probe
atgtcttatatgaggcacaactctt

SEQ ID NO: 62366 - DNA, 25 bp, Artificial
  Probe
aatgtcttatatgaggcacaactct

SEQ ID NO: 62367 - DNA, 25 bp, Artificial
  Probe
caatgtcttatatgaggcacaactc

SEQ ID NO: 62368 - DNA, 25 bp, Artificial
  Probe
tgtcttatatgaggcacaactcttc

SEQ ID NO: 62369 - DNA, 25 bp, Artificial
  Probe
ctccaatgtcttatatgaggcacaa

SEQ ID NO: 62370 - DNA, 25 bp, Artificial
  Probe
ccaatgtcttatatgaggcacaact

SEQ ID NO: 62371 - DNA, 25 bp, Artificial
  Probe
tcttatatgaggcacaactcttcta

SEQ ID NO: 62372 - DNA, 25 bp, Artificial
  Probe
tccaatgtcttatatgaggcacaac

SEQ ID NO: 62373 - DNA, 25 bp, Artificial
  Probe
tgtcatagtctccacttaggtgatt

SEQ ID NO: 62374 - DNA, 25 bp, Artificial
  Probe
cttatatgaggcacaactcttctaa

SEQ ID NO: 62375 - DNA, 25 bp, Artificial
  Probe
gtgtcatagtctccacttaggtgat

SEQ ID NO: 62376 - DNA, 25 bp, Artificial
  Probe
cttgtgtcatagtctccacttaggt

SEQ ID NO: 62377 - DNA, 25 bp, Artificial
  Probe
tctgctccaatgtcttatatgaggc

SEQ ID NO: 62378 - DNA, 25 bp, Artificial
  Probe
ttctaaagtttctcctaccgttctg

SEQ ID NO: 62379 - DNA, 25 bp, Artificial
  Probe
ttgtgtcatagtctccacttaggtg

SEQ ID NO: 62380 - DNA, 25 bp, Artificial
  Probe
tttctaaagtttctcctaccgttct

SEQ ID NO: 62381 - DNA, 25 bp, Artificial
  Probe
gtttctaaagtttctcctaccgttc

SEQ ID NO: 62382 - DNA, 25 bp, Artificial
  Probe
agtaaagttctgctccaatgtctta

SEQ ID NO: 62383 - DNA, 25 bp, Artificial
  Probe
cgtttctaaagtttctcctaccgtt

SEQ ID NO: 62384 - DNA, 25 bp, Artificial
  Probe
gtaaagttctgctccaatgtcttat

SEQ ID NO: 62385 - DNA, 25 bp, Artificial
  Probe
gctccaatgtcttatatgaggcaca

SEQ ID NO: 62386 - DNA, 25 bp, Artificial
  Probe
tctaaagtttctcctaccgttctgg

SEQ ID NO: 62387 - DNA, 25 bp, Artificial
  Probe
tgtgtcatagtctccacttaggtga

SEQ ID NO: 62388 - DNA, 25 bp, Artificial
  Probe
gcttgtgtcatagtctccacttagg

SEQ ID NO: 62389 - DNA, 25 bp, Artificial
  Probe
aaagttctgctccaatgtcttatat

SEQ ID NO: 62390 - DNA, 25 bp, Artificial
  Probe
cgattcttctgaaagtacaagcatg

SEQ ID NO: 62391 - DNA, 25 bp, Artificial
  Probe
tacagtaaagttctgctccaatgtc

SEQ ID NO: 62392 - DNA, 25 bp, Artificial
  Probe
tcatagtctccacttaggtgatttg

SEQ ID NO: 62393 - DNA, 25 bp, Artificial
  Probe
gtcatagtctccacttaggtgattt

SEQ ID NO: 62394 - DNA, 25 bp, Artificial
  Probe
cagtaaagttctgctccaatgtctt

SEQ ID NO: 62395 - DNA, 25 bp, Artificial
  Probe
cgcttgtgtcatagtctccacttag

SEQ ID NO: 62396 - DNA, 25 bp, Artificial
  Probe
taaagttctgctccaatgtcttata

SEQ ID NO: 62397 - DNA, 25 bp, Artificial
  Probe
gagtacagtaaagttctgctccaat

SEQ ID NO: 62398 - DNA, 25 bp, Artificial
  Probe
ctgctcactgctcaataaactctct

SEQ ID NO: 62399 - DNA, 25 bp, Artificial
  Probe
atagtctccacttaggtgatttgct

SEQ ID NO: 62400 - DNA, 25 bp, Artificial
  Probe
catagtctccacttaggtgatttgc

SEQ ID NO: 62401 - DNA, 25 bp, Artificial
  Probe
agtacagtaaagttctgctccaatg

SEQ ID NO: 62402 - DNA, 25 bp, Artificial
  Probe
tgctcactgctcaataaactctctc

SEQ ID NO: 62403 - DNA, 25 bp, Artificial
  Probe
gcgattcttctgaaagtacaagcat

SEQ ID NO: 62404 - DNA, 25 bp, Artificial
  Probe
gtacagtaaagttctgctccaatgt

SEQ ID NO: 62405 - DNA, 25 bp, Artificial
  Probe
ctcctagcatgttcactctgtatgt

SEQ ID NO: 62406 - DNA, 25 bp, Artificial
  Probe
ctactttgataacctggctatgact

SEQ ID NO: 62407 - DNA, 25 bp, Artificial
  Probe
ccctctaccttctcctactttgata

SEQ ID NO: 62408 - DNA, 25 bp, Artificial
  Probe
ctcctactttgataacctggctatg

SEQ ID NO: 62409 - DNA, 25 bp, Artificial
  Probe
tctcctactttgataacctggctat

SEQ ID NO: 62410 - DNA, 25 bp, Artificial
  Probe
cctactttgataacctggctatgac

SEQ ID NO: 62411 - DNA, 25 bp, Artificial
  Probe
tcctactttgataacctggctatga

SEQ ID NO: 62412 - DNA, 25 bp, Artificial
  Probe
ttctcctactttgataacctggcta

SEQ ID NO: 62413 - DNA, 25 bp, Artificial
  Probe
taccttctcctactttgataacctg

SEQ ID NO: 62414 - DNA, 25 bp, Artificial
  Probe
ctacagaatcctcctagcatgttca

SEQ ID NO: 62415 - DNA, 25 bp, Artificial
  Probe
ctaccttctcctactttgataacct

SEQ ID NO: 62416 - DNA, 25 bp, Artificial
  Probe
tctaccttctcctactttgataacc

SEQ ID NO: 62417 - DNA, 25 bp, Artificial
  Probe
ctatgactagcagaagtacagccag

SEQ ID NO: 62418 - DNA, 25 bp, Artificial
  Probe
cctctaccttctcctactttgataa

SEQ ID NO: 62419 - DNA, 25 bp, Artificial
  Probe
tacagaatcctcctagcatgttcac

SEQ ID NO: 62420 - DNA, 25 bp, Artificial
  Probe
actttgataacctggctatgactag

SEQ ID NO: 62421 - DNA, 25 bp, Artificial
  Probe
tactttgataacctggctatgacta

SEQ ID NO: 62422 - DNA, 25 bp, Artificial
  Probe
tcctcctagcatgttcactctgtat

SEQ ID NO: 62423 - DNA, 25 bp, Artificial
  Probe
atcctcctagcatgttcactctgta

SEQ ID NO: 62424 - DNA, 25 bp, Artificial
  Probe
cctcctagcatgttcactctgtatg

SEQ ID NO: 62425 - DNA, 25 bp, Artificial
  Probe
accttctcctactttgataacctgg

SEQ ID NO: 62426 - DNA, 25 bp, Artificial
  Probe
tccctctaccttctcctactttgat

SEQ ID NO: 62427 - DNA, 25 bp, Artificial
  Probe
cttctcctactttgataacctggct

SEQ ID NO: 62428 - DNA, 25 bp, Artificial
  Probe
catggtggagtatgaagtaaggtgg

SEQ ID NO: 62429 - DNA, 25 bp, Artificial
  Probe
cctacagaatcctcctagcatgttc

SEQ ID NO: 62430 - DNA, 25 bp, Artificial
  Probe
gaatcctcctagcatgttcactctg

SEQ ID NO: 62431 - DNA, 25 bp, Artificial
  Probe
cagaatcctcctagcatgttcactc

SEQ ID NO: 62432 - DNA, 25 bp, Artificial
  Probe
aaagacatgggtaaaggaactacag

SEQ ID NO: 62433 - DNA, 25 bp, Artificial
  Probe
agaatcctcctagcatgttcactct

SEQ ID NO: 62434 - DNA, 25 bp, Artificial
  Probe
tcctagcatgttcactctgtatgtg

SEQ ID NO: 62435 - DNA, 25 bp, Artificial
  Probe
caaagacatgggtaaaggaactaca

SEQ ID NO: 62436 - DNA, 25 bp, Artificial
  Probe
ctctaccttctcctactttgataac

SEQ ID NO: 62437 - DNA, 25 bp, Artificial
  Probe
ctccctctaccttctcctactttga

SEQ ID NO: 62438 - DNA, 25 bp, Artificial
  Probe
aatcctcctagcatgttcactctgt

SEQ ID NO: 62439 - DNA, 25 bp, Artificial
  Probe
gcatggtggagtatgaagtaaggtg

SEQ ID NO: 62440 - DNA, 25 bp, Artificial
  Probe
gcaaagacatgggtaaaggaactac

SEQ ID NO: 62441 - DNA, 25 bp, Artificial
  Probe
caaacagtctcctgagaatttcaaa

SEQ ID NO: 62442 - DNA, 25 bp, Artificial
  Probe
ccttctcctactttgataacctggc

SEQ ID NO: 62443 - DNA, 25 bp, Artificial
  Probe
tatgactagcagaagtacagccagg

SEQ ID NO: 62444 - DNA, 25 bp, Artificial
  Probe
ccaaacagtctcctgagaatttcaa

SEQ ID NO: 62445 - DNA, 25 bp, Artificial
  Probe
cctagcatgttcactctgtatgtgg

SEQ ID NO: 62446 - DNA, 25 bp, Artificial
  Probe
aaatatgccagttcaaattggtcct

SEQ ID NO: 62447 - DNA, 25 bp, Artificial
  Probe
atggtggagtatgaagtaaggtggc

SEQ ID NO: 62448 - DNA, 25 bp, Artificial
  Probe
acagaatcctcctagcatgttcact

SEQ ID NO: 62449 - DNA, 25 bp, Artificial
  Probe
cctccctctaccttctcctactttg

SEQ ID NO: 62450 - DNA, 25 bp, Artificial
  Probe
tgagaatgagagatgttgttaatgg

SEQ ID NO: 62451 - DNA, 25 bp, Artificial
  Probe
gagaatgagagatgttgttaatgga

SEQ ID NO: 62452 - DNA, 25 bp, Artificial
  Probe
aagccagagactccataattcagaa

SEQ ID NO: 62453 - DNA, 25 bp, Artificial
  Probe
atgagagatgttgttaatggaagaa

SEQ ID NO: 62454 - DNA, 25 bp, Artificial
  Probe
aatgagagatgttgttaatggaaga

SEQ ID NO: 62455 - DNA, 25 bp, Artificial
  Probe
agaatgagagatgttgttaatggaa

SEQ ID NO: 62456 - DNA, 25 bp, Artificial
  Probe
gaatgagagatgttgttaatggaag

SEQ ID NO: 62457 - DNA, 25 bp, Artificial
  Probe
gaagccagagactccataattcaga

SEQ ID NO: 62458 - DNA, 25 bp, Artificial
  Probe
ttgagaatgagagatgttgttaatg

SEQ ID NO: 62459 - DNA, 25 bp, Artificial
  Probe
ggtttcatagtatggttggcagata

SEQ ID NO: 62460 - DNA, 25 bp, Artificial
  Probe
aatccatagagaatattaccacagg

SEQ ID NO: 62461 - DNA, 25 bp, Artificial
  Probe
tgagagatgttgttaatggaagaaa

SEQ ID NO: 62462 - DNA, 25 bp, Artificial
  Probe
tccatagagaatattaccacaggtt

SEQ ID NO: 62463 - DNA, 25 bp, Artificial
  Probe
aggtttcatagtatggttggcagat

SEQ ID NO: 62464 - DNA, 25 bp, Artificial
  Probe
atccatagagaatattaccacaggt

SEQ ID NO: 62465 - DNA, 25 bp, Artificial
  Probe
ggaagccagagactccataattcag

SEQ ID NO: 62466 - DNA, 25 bp, Artificial
  Probe
attgagaatgagagatgttgttaat

SEQ ID NO: 62467 - DNA, 25 bp, Artificial
  Probe
gtttcatagtatggttggcagatac

SEQ ID NO: 62468 - DNA, 25 bp, Artificial
  Probe
tgaatccatagagaatattaccaca

SEQ ID NO: 62469 - DNA, 25 bp, Artificial
  Probe
ataattggaggttacccacaaattc

SEQ ID NO: 62470 - DNA, 25 bp, Artificial
  Probe
gaataattggaggttacccacaaat

SEQ ID NO: 62471 - DNA, 25 bp, Artificial
  Probe
gagagatgttgttaatggaagaaat

SEQ ID NO: 62472 - DNA, 25 bp, Artificial
  Probe
taattggaggttacccacaaattcc

SEQ ID NO: 62473 - DNA, 25 bp, Artificial
  Probe
ggaataattggaggttacccacaaa

SEQ ID NO: 62474 - DNA, 25 bp, Artificial
  Probe
caggtttcatagtatggttggcaga

SEQ ID NO: 62475 - DNA, 25 bp, Artificial
  Probe
ttattgagaatgagagatgttgtta

SEQ ID NO: 62476 - DNA, 25 bp, Artificial
  Probe
aataattggaggttacccacaaatt

SEQ ID NO: 62477 - DNA, 25 bp, Artificial
  Probe
gaatccatagagaatattaccacag

SEQ ID NO: 62478 - DNA, 25 bp, Artificial
  Probe
tattgagaatgagagatgttgttaa

SEQ ID NO: 62479 - DNA, 25 bp, Artificial
  Probe
gaggttacccacaaattccagaatt

SEQ ID NO: 62480 - DNA, 25 bp, Artificial
  Probe
acaggtttcatagtatggttggcag

SEQ ID NO: 62481 - DNA, 25 bp, Artificial
  Probe
cacaggtttcatagtatggttggca

SEQ ID NO: 62482 - DNA, 25 bp, Artificial
  Probe
ttgaatccatagagaatattaccac

SEQ ID NO: 62483 - DNA, 25 bp, Artificial
  Probe
tattaccacaggtttcatagtatgg

SEQ ID NO: 62484 - DNA, 25 bp, Artificial
  Probe
ttttcattttcaactgctcttggat

SEQ ID NO: 62485 - DNA, 25 bp, Artificial
  Probe
attttcattttcaactgctcttgga

SEQ ID NO: 62486 - DNA, 25 bp, Artificial
  Probe
tttcattttcaactgctcttggatg

SEQ ID NO: 62487 - DNA, 25 bp, Artificial
  Probe
ggaggttacccacaaattccagaat

SEQ ID NO: 62488 - DNA, 25 bp, Artificial
  Probe
aattttcattttcaactgctcttgg

SEQ ID NO: 62489 - DNA, 25 bp, Artificial
  Probe
ccatagagaatattaccacaggttt

SEQ ID NO: 62490 - DNA, 25 bp, Artificial
  Probe
aagggaagccagagactccataatt

SEQ ID NO: 62491 - DNA, 25 bp, Artificial
  Probe
agaatattaccacaggtttcatagt

SEQ ID NO: 62492 - DNA, 25 bp, Artificial
  Probe
agagaatattaccacaggtttcata

SEQ ID NO: 62493 - DNA, 25 bp, Artificial
  Probe
tagagaatattaccacaggtttcat

SEQ ID NO: 62494 - DNA, 25 bp, Artificial
  Probe
atagagaatattaccacaggtttca

SEQ ID NO: 62495 - DNA, 25 bp, Artificial
  Probe
ttatctggagacaactaacttgctt

SEQ ID NO: 62496 - DNA, 25 bp, Artificial
  Probe
tatctggagacaactaacttgctta

SEQ ID NO: 62497 - DNA, 25 bp, Artificial
  Probe
taacttgcttagtcatcctggagaa

SEQ ID NO: 62498 - DNA, 25 bp, Artificial
  Probe
atctggagacaactaacttgcttag

SEQ ID NO: 62499 - DNA, 25 bp, Artificial
  Probe
ctaacttgcttagtcatcctggaga

SEQ ID NO: 62500 - DNA, 25 bp, Artificial
  Probe
gatcttggtgctgctcattatgttg

SEQ ID NO: 62501 - DNA, 25 bp, Artificial
  Probe
tgaactgtaaatggaacccttgaag

SEQ ID NO: 62502 - DNA, 25 bp, Artificial
  Probe
tttatctggagacaactaacttgct

SEQ ID NO: 62503 - DNA, 25 bp, Artificial
  Probe
ctccttgatcctcagaacaccaatt

SEQ ID NO: 62504 - DNA, 25 bp, Artificial
  Probe
tccttgatcctcagaacaccaattc

SEQ ID NO: 62505 - DNA, 25 bp, Artificial
  Probe
tgatcttggtgctgctcattatgtt

SEQ ID NO: 62506 - DNA, 25 bp, Artificial
  Probe
gactgatcttggtgctgctcattat

SEQ ID NO: 62507 - DNA, 25 bp, Artificial
  Probe
atcttggtgctgctcattatgttgg

SEQ ID NO: 62508 - DNA, 25 bp, Artificial
  Probe
tgcttagtcatcctggagaaacaaa

SEQ ID NO: 62509 - DNA, 25 bp, Artificial
  Probe
ctctctgtaagctcctacatattca

SEQ ID NO: 62510 - DNA, 25 bp, Artificial
  Probe
ctgatcttggtgctgctcattatgt

SEQ ID NO: 62511 - DNA, 25 bp, Artificial
  Probe
actgatcttggtgctgctcattatg

SEQ ID NO: 62512 - DNA, 25 bp, Artificial
  Probe
gctctctgtaagctcctacatattc

SEQ ID NO: 62513 - DNA, 25 bp, Artificial
  Probe
ctcaggacaaggaaacagataccag

SEQ ID NO: 62514 - DNA, 25 bp, Artificial
  Probe
aacttgcttagtcatcctggagaaa

SEQ ID NO: 62515 - DNA, 25 bp, Artificial
  Probe
tgctctctgtaagctcctacatatt

SEQ ID NO: 62516 - DNA, 25 bp, Artificial
  Probe
cttgggtatttcttctgaaggatta

SEQ ID NO: 62517 - DNA, 25 bp, Artificial
  Probe
ttgcttagtcatcctggagaaacaa

SEQ ID NO: 62518 - DNA, 25 bp, Artificial
  Probe
tctctgtaagctcctacatattcat

SEQ ID NO: 62519 - DNA, 25 bp, Artificial
  Probe
ccttgatcctcagaacaccaattcc

SEQ ID NO: 62520 - DNA, 25 bp, Artificial
  Probe
cttgcttagtcatcctggagaaaca

SEQ ID NO: 62521 - DNA, 25 bp, Artificial
  Probe
aaggattatttgcacagactctaca

SEQ ID NO: 62522 - DNA, 25 bp, Artificial
  Probe
aggattatttgcacagactctacag

SEQ ID NO: 62523 - DNA, 25 bp, Artificial
  Probe
tgaaggattatttgcacagactcta

SEQ ID NO: 62524 - DNA, 25 bp, Artificial
  Probe
gaaggattatttgcacagactctac

SEQ ID NO: 62525 - DNA, 25 bp, Artificial
  Probe
gtgctctctgtaagctcctacatat

SEQ ID NO: 62526 - DNA, 25 bp, Artificial
  Probe
actccttgatcctcagaacaccaat

SEQ ID NO: 62527 - DNA, 25 bp, Artificial
  Probe
tttcttctgaaggattatttgcaca

SEQ ID NO: 62528 - DNA, 25 bp, Artificial
  Probe
tgggtatttcttctgaaggattatt

SEQ ID NO: 62529 - DNA, 25 bp, Artificial
  Probe
ttgggtatttcttctgaaggattat

SEQ ID NO: 62530 - DNA, 25 bp, Artificial
  Probe
acttgcttagtcatcctggagaaac

SEQ ID NO: 62531 - DNA, 25 bp, Artificial
  Probe
cttctccagactccttgatcctcag

SEQ ID NO: 62532 - DNA, 25 bp, Artificial
  Probe
ctctgtaagctcctacatattcatt

SEQ ID NO: 62533 - DNA, 25 bp, Artificial
  Probe
ggattatttgcacagactctacagt

SEQ ID NO: 62534 - DNA, 25 bp, Artificial
  Probe
aaagagaaccttgggtatttcttct

SEQ ID NO: 62535 - DNA, 25 bp, Artificial
  Probe
gagaaccttgggtatttcttctgaa

SEQ ID NO: 62536 - DNA, 25 bp, Artificial
  Probe
aagagaaccttgggtatttcttctg

SEQ ID NO: 62537 - DNA, 25 bp, Artificial
  Probe
gaatgctgcgaagtgagaacaagag

SEQ ID NO: 62538 - DNA, 25 bp, Artificial
  Probe
ctccagactccttgatcctcagaac

SEQ ID NO: 62539 - DNA, 25 bp, Artificial
  Probe
caactgactgaaataaaagcactgt

SEQ ID NO: 62540 - DNA, 25 bp, Artificial
  Probe
tagaagccttaatggagaggatgaa

SEQ ID NO: 62541 - DNA, 25 bp, Artificial
  Probe
ctagaagccttaatggagaggatga

SEQ ID NO: 62542 - DNA, 25 bp, Artificial
  Probe
agacaccagtgttcctacctaataa

SEQ ID NO: 62543 - DNA, 25 bp, Artificial
  Probe
gaagacagggaagatgaagagacta

SEQ ID NO: 62544 - DNA, 25 bp, Artificial
  Probe
cagacaccagtgttcctacctaata

SEQ ID NO: 62545 - DNA, 25 bp, Artificial
  Probe
aagacagggaagatgaagagactac

SEQ ID NO: 62546 - DNA, 25 bp, Artificial
  Probe
tttgtttatggtagtggcatcaatc

SEQ ID NO: 62547 - DNA, 25 bp, Artificial
  Probe
ctttgtttatggtagtggcatcaat

SEQ ID NO: 62548 - DNA, 25 bp, Artificial
  Probe
caatggcttggaatatgtaccacaa

SEQ ID NO: 62549 - DNA, 25 bp, Artificial
  Probe
ctcaatggcttggaatatgtaccac

SEQ ID NO: 62550 - DNA, 25 bp, Artificial
  Probe
ttgtttatggtagtggcatcaatcc

SEQ ID NO: 62551 - DNA, 25 bp, Artificial
  Probe
ttatggtagtggcatcaatccagag

SEQ ID NO: 62552 - DNA, 25 bp, Artificial
  Probe
gtggctcaatggcttggaatatgta

SEQ ID NO: 62553 - DNA, 25 bp, Artificial
  Probe
agacagggaagatgaagagactact

SEQ ID NO: 62554 - DNA, 25 bp, Artificial
  Probe
gaaagagcacattcagaaacttgtc

SEQ ID NO: 62555 - DNA, 25 bp, Artificial
  Probe
aataattggtccttgcctgagctag

SEQ ID NO: 62556 - DNA, 25 bp, Artificial
  Probe
tcaatggcttggaatatgtaccaca

SEQ ID NO: 62557 - DNA, 25 bp, Artificial
  Probe
aactttgggattgtggactctctag

SEQ ID NO: 62558 - DNA, 25 bp, Artificial
  Probe
agagcacattcagaaacttgtcaaa

SEQ ID NO: 62559 - DNA, 25 bp, Artificial
  Probe
aagagcacattcagaaacttgtcaa

SEQ ID NO: 62560 - DNA, 25 bp, Artificial
  Probe
aaagagcacattcagaaacttgtca

SEQ ID NO: 62561 - DNA, 25 bp, Artificial
  Probe
atcacgaaagagcacattcagaaac

SEQ ID NO: 62562 - DNA, 25 bp, Artificial
  Probe
ggaatatgtaccacaaagactgaga

SEQ ID NO: 62563 - DNA, 25 bp, Artificial
  Probe
gacagggaagatgaagagactactc

SEQ ID NO: 62564 - DNA, 25 bp, Artificial
  Probe
atgtaccacaaagactgagaaatct

SEQ ID NO: 62565 - DNA, 25 bp, Artificial
  Probe
gctttgtttatggtagtggcatcaa

SEQ ID NO: 62566 - DNA, 25 bp, Artificial
  Probe
acgaaagagcacattcagaaacttg

SEQ ID NO: 62567 - DNA, 25 bp, Artificial
  Probe
cacgaaagagcacattcagaaactt

SEQ ID NO: 62568 - DNA, 25 bp, Artificial
  Probe
tggctcaatggcttggaatatgtac

SEQ ID NO: 62569 - DNA, 25 bp, Artificial
  Probe
gatcacgaaagagcacattcagaaa

SEQ ID NO: 62570 - DNA, 25 bp, Artificial
  Probe
caactttgggattgtggactctcta

SEQ ID NO: 62571 - DNA, 25 bp, Artificial
  Probe
tatggtagtggcatcaatccagaga

SEQ ID NO: 62572 - DNA, 25 bp, Artificial
  Probe
agaagccttaatggagaggatgaaa

SEQ ID NO: 62573 - DNA, 25 bp, Artificial
  Probe
tatgtaccacaaagactgagaaatc

SEQ ID NO: 62574 - DNA, 25 bp, Artificial
  Probe
gaatatgtaccacaaagactgagaa

SEQ ID NO: 62575 - DNA, 25 bp, Artificial
  Probe
acaccagtgttcctacctaataaac

SEQ ID NO: 62576 - DNA, 25 bp, Artificial
  Probe
gacaccagtgttcctacctaataaa

SEQ ID NO: 62577 - DNA, 25 bp, Artificial
  Probe
ttggaatatgtaccacaaagactga

SEQ ID NO: 62578 - DNA, 25 bp, Artificial
  Probe
gattgtggactctctaggtgagcta

SEQ ID NO: 62579 - DNA, 25 bp, Artificial
  Probe
tggaatatgtaccacaaagactgag

SEQ ID NO: 62580 - DNA, 25 bp, Artificial
  Probe
cttggaatatgtaccacaaagactg

SEQ ID NO: 62581 - DNA, 25 bp, Artificial
  Probe
cgaaagagcacattcagaaacttgt

SEQ ID NO: 62582 - DNA, 25 bp, Artificial
  Probe
gctagaagccttaatggagaggatg

SEQ ID NO: 62583 - DNA, 25 bp, Artificial
  Probe
aatggcttggaatatgtaccacaaa

SEQ ID NO: 62584 - DNA, 25 bp, Artificial
  Probe
aatatgtaccacaaagactgagaaa

SEQ ID NO: 62585 - DNA, 25 bp, Artificial
  Probe
gtggagaactaccttatacagatgg

SEQ ID NO: 62586 - DNA, 25 bp, Artificial
  Probe
ggagaactaccttatacagatggca

SEQ ID NO: 62587 - DNA, 25 bp, Artificial
  Probe
tggagaactaccttatacagatggc

SEQ ID NO: 62588 - DNA, 25 bp, Artificial
  Probe
agtggagaactaccttatacagatg

SEQ ID NO: 62589 - DNA, 25 bp, Artificial
  Probe
cagtggagaactaccttatacagat

SEQ ID NO: 62590 - DNA, 25 bp, Artificial
  Probe
aagcagtggagaactaccttataca

SEQ ID NO: 62591 - DNA, 25 bp, Artificial
  Probe
gcagtggagaactaccttatacaga

SEQ ID NO: 62592 - DNA, 25 bp, Artificial
  Probe
agcagtggagaactaccttatacag

SEQ ID NO: 62593 - DNA, 25 bp, Artificial
  Probe
ggaagcagaaatgagaaacagtatc

SEQ ID NO: 62594 - DNA, 25 bp, Artificial
  Probe
gggaagcagaaatgagaaacagtat

SEQ ID NO: 62595 - DNA, 25 bp, Artificial
  Probe
taacttagcacttgtgaagcctgag

SEQ ID NO: 62596 - DNA, 25 bp, Artificial
  Probe
aatgagaaacagtatcttagcccaa

SEQ ID NO: 62597 - DNA, 25 bp, Artificial
  Probe
aaatgagaaacagtatcttagccca

SEQ ID NO: 62598 - DNA, 25 bp, Artificial
  Probe
atgagaaacagtatcttagcccaag

SEQ ID NO: 62599 - DNA, 25 bp, Artificial
  Probe
gaaacagtatcttagcccaagttct

SEQ ID NO: 62600 - DNA, 25 bp, Artificial
  Probe
agaaacagtatcttagcccaagttc

SEQ ID NO: 62601 - DNA, 25 bp, Artificial
  Probe
gagaaacagtatcttagcccaagtt

SEQ ID NO: 62602 - DNA, 25 bp, Artificial
  Probe
gaaatgagaaacagtatcttagccc

SEQ ID NO: 62603 - DNA, 25 bp, Artificial
  Probe
aacaaagggaagcagaaatgagaaa

SEQ ID NO: 62604 - DNA, 25 bp, Artificial
  Probe
aaacaaagggaagcagaaatgagaa

SEQ ID NO: 62605 - DNA, 25 bp, Artificial
  Probe
gaagcagaaatgagaaacagtatct

SEQ ID NO: 62606 - DNA, 25 bp, Artificial
  Probe
aaagcagtggagaactaccttatac

SEQ ID NO: 62607 - DNA, 25 bp, Artificial
  Probe
gaaagcagtggagaactaccttata

SEQ ID NO: 62608 - DNA, 25 bp, Artificial
  Probe
gtaacttagcacttgtgaagcctga

SEQ ID NO: 62609 - DNA, 25 bp, Artificial
  Probe
aaagggaagcagaaatgagaaacag

SEQ ID NO: 62610 - DNA, 25 bp, Artificial
  Probe
aagcagaaatgagaaacagtatctt

SEQ ID NO: 62611 - DNA, 25 bp, Artificial
  Probe
tgagaaacagtatcttagcccaagt

SEQ ID NO: 62612 - DNA, 25 bp, Artificial
  Probe
agaaatgagaaacagtatcttagcc

SEQ ID NO: 62613 - DNA, 25 bp, Artificial
  Probe
agtaacttagcacttgtgaagcctg

SEQ ID NO: 62614 - DNA, 25 bp, Artificial
  Probe
agggaagcagaaatgagaaacagta

SEQ ID NO: 62615 - DNA, 25 bp, Artificial
  Probe
caaagggaagcagaaatgagaaaca

SEQ ID NO: 62616 - DNA, 25 bp, Artificial
  Probe
acaaagggaagcagaaatgagaaac

SEQ ID NO: 62617 - DNA, 25 bp, Artificial
  Probe
aaacagtatcttagcccaagttctg

SEQ ID NO: 62618 - DNA, 25 bp, Artificial
  Probe
agcagaaatgagaaacagtatctta

SEQ ID NO: 62619 - DNA, 25 bp, Artificial
  Probe
cagaaatgagaaacagtatcttagc

SEQ ID NO: 62620 - DNA, 25 bp, Artificial
  Probe
gcagaaatgagaaacagtatcttag

SEQ ID NO: 62621 - DNA, 25 bp, Artificial
  Probe
aggttaagtaacttagcacttgtga

SEQ ID NO: 62622 - DNA, 25 bp, Artificial
  Probe
caggttaagtaacttagcacttgtg

SEQ ID NO: 62623 - DNA, 25 bp, Artificial
  Probe
ttaagtaacttagcacttgtgaagc

SEQ ID NO: 62624 - DNA, 25 bp, Artificial
  Probe
aagggaagcagaaatgagaaacagt

SEQ ID NO: 62625 - DNA, 25 bp, Artificial
  Probe
ccaggttaagtaacttagcacttgt

SEQ ID NO: 62626 - DNA, 25 bp, Artificial
  Probe
ggttaagtaacttagcacttgtgaa

SEQ ID NO: 62627 - DNA, 25 bp, Artificial
  Probe
cgaaagcagtggagaactaccttat

SEQ ID NO: 62628 - DNA, 25 bp, Artificial
  Probe
taagtaacttagcacttgtgaagcc

SEQ ID NO: 62629 - DNA, 25 bp, Artificial
  Probe
cagttaccacctgtaaatgtttact

SEQ ID NO: 62630 - DNA, 25 bp, Artificial
  Probe
ccattgtcacctaactctgaagatc

SEQ ID NO: 62631 - DNA, 25 bp, Artificial
  Probe
aaatcaaatcccattgtcacctaac

SEQ ID NO: 62632 - DNA, 25 bp, Artificial
  Probe
aatcaaatcccattgtcacctaact

SEQ ID NO: 62633 - DNA, 25 bp, Artificial
  Probe
gaaatcaaatcccattgtcacctaa

SEQ ID NO: 62634 - DNA, 25 bp, Artificial
  Probe
atcaaatcccattgtcacctaactc

SEQ ID NO: 62635 - DNA, 25 bp, Artificial
  Probe
cactctatactagggactggatctc

SEQ ID NO: 62636 - DNA, 25 bp, Artificial
  Probe
atctaaatagcccttggatcagtac

SEQ ID NO: 62637 - DNA, 25 bp, Artificial
  Probe
actctatactagggactggatctca

SEQ ID NO: 62638 - DNA, 25 bp, Artificial
  Probe
attcttggaagaggttgagaagact

SEQ ID NO: 62639 - DNA, 25 bp, Artificial
  Probe
cattcttggaagaggttgagaagac

SEQ ID NO: 62640 - DNA, 25 bp, Artificial
  Probe
caaatcccattgtcacctaactctg

SEQ ID NO: 62641 - DNA, 25 bp, Artificial
  Probe
tcaaatcccattgtcacctaactct

SEQ ID NO: 62642 - DNA, 25 bp, Artificial
  Probe
aatcccattgtcacctaactctgaa

SEQ ID NO: 62643 - DNA, 25 bp, Artificial
  Probe
aaatcccattgtcacctaactctga

SEQ ID NO: 62644 - DNA, 25 bp, Artificial
  Probe
tctaaatagcccttggatcagtacg

SEQ ID NO: 62645 - DNA, 25 bp, Artificial
  Probe
ctctatactagggactggatctcag

SEQ ID NO: 62646 - DNA, 25 bp, Artificial
  Probe
ttcttggaagaggttgagaagactc

SEQ ID NO: 62647 - DNA, 25 bp, Artificial
  Probe
taaggaaatcaaatcccattgtcac

SEQ ID NO: 62648 - DNA, 25 bp, Artificial
  Probe
cccattgtcacctaactctgaagat

SEQ ID NO: 62649 - DNA, 25 bp, Artificial
  Probe
atcccattgtcacctaactctgaag

SEQ ID NO: 62650 - DNA, 25 bp, Artificial
  Probe
tgactgtaaacatagatagtgcttt

SEQ ID NO: 62651 - DNA, 25 bp, Artificial
  Probe
cattgtcacctaactctgaagatct

SEQ ID NO: 62652 - DNA, 25 bp, Artificial
  Probe
ggaaatcaaatcccattgtcaccta

SEQ ID NO: 62653 - DNA, 25 bp, Artificial
  Probe
ccattcttggaagaggttgagaaga

SEQ ID NO: 62654 - DNA, 25 bp, Artificial
  Probe
atgactgtaaacatagatagtgctt

SEQ ID NO: 62655 - DNA, 25 bp, Artificial
  Probe
ttgtcacctaactctgaagatctaa

SEQ ID NO: 62656 - DNA, 25 bp, Artificial
  Probe
attgtcacctaactctgaagatcta

SEQ ID NO: 62657 - DNA, 25 bp, Artificial
  Probe
ctaaatagcccttggatcagtacgg

SEQ ID NO: 62658 - DNA, 25 bp, Artificial
  Probe
aaggaaatcaaatcccattgtcacc

SEQ ID NO: 62659 - DNA, 25 bp, Artificial
  Probe
tctatactagggactggatctcagc

SEQ ID NO: 62660 - DNA, 25 bp, Artificial
  Probe
cttggaagaggttgagaagactcct

SEQ ID NO: 62661 - DNA, 25 bp, Artificial
  Probe
tcccattgtcacctaactctgaaga

SEQ ID NO: 62662 - DNA, 25 bp, Artificial
  Probe
ccactctatactagggactggatct

SEQ ID NO: 62663 - DNA, 25 bp, Artificial
  Probe
ttggaagaggttgagaagactcctg

SEQ ID NO: 62664 - DNA, 25 bp, Artificial
  Probe
aggaaatcaaatcccattgtcacct

SEQ ID NO: 62665 - DNA, 25 bp, Artificial
  Probe
gatctaaatagcccttggatcagta

SEQ ID NO: 62666 - DNA, 25 bp, Artificial
  Probe
ctatactagggactggatctcagcc

SEQ ID NO: 62667 - DNA, 25 bp, Artificial
  Probe
tatgactgtaaacatagatagtgct

SEQ ID NO: 62668 - DNA, 25 bp, Artificial
  Probe
ctgaagatctaaatagcccttggat

SEQ ID NO: 62669 - DNA, 25 bp, Artificial
  Probe
actctgaagatctaaatagcccttg

SEQ ID NO: 62670 - DNA, 25 bp, Artificial
  Probe
ctctgaagatctaaatagcccttgg

SEQ ID NO: 62671 - DNA, 25 bp, Artificial
  Probe
tcttggaagaggttgagaagactcc

SEQ ID NO: 62672 - DNA, 25 bp, Artificial
  Probe
tctgaagatctaaatagcccttgga

SEQ ID NO: 62673 - DNA, 25 bp, Artificial
  Probe
aactctgaagatctaaatagccctt

SEQ ID NO: 62674 - DNA, 25 bp, Artificial
  Probe
gactgtaaacatagatagtgcttta

SEQ ID NO: 62675 - DNA, 25 bp, Artificial
  Probe
ggttgtttgttcagttttcccaata

SEQ ID NO: 62676 - DNA, 25 bp, Artificial
  Probe
cttctcaggacagaatctcagagat

SEQ ID NO: 62677 - DNA, 25 bp, Artificial
  Probe
gttgtttgttcagttttcccaataa

SEQ ID NO: 62678 - DNA, 25 bp, Artificial
  Probe
taggttgtttgttcagttttcccaa

SEQ ID NO: 62679 - DNA, 25 bp, Artificial
  Probe
gtaggttgtttgttcagttttccca

SEQ ID NO: 62680 - DNA, 25 bp, Artificial
  Probe
aggttgtttgttcagttttcccaat

SEQ ID NO: 62681 - DNA, 25 bp, Artificial
  Probe
ttgtttgttcagttttcccaataaa

SEQ ID NO: 62682 - DNA, 25 bp, Artificial
  Probe
ccttctcaggacagaatctcagaga

SEQ ID NO: 62683 - DNA, 25 bp, Artificial
  Probe
ggtaggttgtttgttcagttttccc

SEQ ID NO: 62684 - DNA, 25 bp, Artificial
  Probe
gggtaggttgtttgttcagttttcc

SEQ ID NO: 62685 - DNA, 25 bp, Artificial
  Probe
ggggtaggttgtttgttcagttttc

SEQ ID NO: 62686 - DNA, 25 bp, Artificial
  Probe
tgtttgttcagttttcccaataaaa

SEQ ID NO: 62687 - DNA, 25 bp, Artificial
  Probe
catgttccctaaccagtaccgagag

SEQ ID NO: 62688 - DNA, 25 bp, Artificial
  Probe
gtacataggggatagggagcagatc

SEQ ID NO: 62689 - DNA, 25 bp, Artificial
  Probe
cccttctcaggacagaatctcagag

SEQ ID NO: 62690 - DNA, 25 bp, Artificial
  Probe
caggacagaatctcagagattgtac

SEQ ID NO: 62691 - DNA, 25 bp, Artificial
  Probe
tcaggacagaatctcagagattgta

SEQ ID NO: 62692 - DNA, 25 bp, Artificial
  Probe
ttctcaggacagaatctcagagatt

SEQ ID NO: 62693 - DNA, 25 bp, Artificial
  Probe
tctcaggacagaatctcagagattg

SEQ ID NO: 62694 - DNA, 25 bp, Artificial
  Probe
tcagagattgtacataggggatagg

SEQ ID NO: 62695 - DNA, 25 bp, Artificial
  Probe
ctcagagattgtacataggggatag

SEQ ID NO: 62696 - DNA, 25 bp, Artificial
  Probe
ctcaggacagaatctcagagattgt

SEQ ID NO: 62697 - DNA, 25 bp, Artificial
  Probe
gagattgtacataggggatagggag

SEQ ID NO: 62698 - DNA, 25 bp, Artificial
  Probe
tctcagagattgtacataggggata

SEQ ID NO: 62699 - DNA, 25 bp, Artificial
  Probe
agagattgtacataggggataggga

SEQ ID NO: 62700 - DNA, 25 bp, Artificial
  Probe
cagagattgtacataggggataggg

SEQ ID NO: 62701 - DNA, 25 bp, Artificial
  Probe
ggacagaatctcagagattgtacat

SEQ ID NO: 62702 - DNA, 25 bp, Artificial
  Probe
aggacagaatctcagagattgtaca

SEQ ID NO: 62703 - DNA, 25 bp, Artificial
  Probe
cagaatctcagagattgtacatagg

SEQ ID NO: 62704 - DNA, 25 bp, Artificial
  Probe
atgttccctaaccagtaccgagagg

SEQ ID NO: 62705 - DNA, 25 bp, Artificial
  Probe
agattgtacataggggatagggagc

SEQ ID NO: 62706 - DNA, 25 bp, Artificial
  Probe
acagaatctcagagattgtacatag

SEQ ID NO: 62707 - DNA, 25 bp, Artificial
  Probe
gacagaatctcagagattgtacata

SEQ ID NO: 62708 - DNA, 25 bp, Artificial
  Probe
atctcagagattgtacataggggat

SEQ ID NO: 62709 - DNA, 25 bp, Artificial
  Probe
attgtacataggggatagggagcag

SEQ ID NO: 62710 - DNA, 25 bp, Artificial
  Probe
gattgtacataggggatagggagca

SEQ ID NO: 62711 - DNA, 25 bp, Artificial
  Probe
agaatctcagagattgtacataggg

SEQ ID NO: 62712 - DNA, 25 bp, Artificial
  Probe
tgtacataggggatagggagcagat

SEQ ID NO: 62713 - DNA, 25 bp, Artificial
  Probe
acatgttccctaaccagtaccgaga

SEQ ID NO: 62714 - DNA, 25 bp, Artificial
  Probe
ttgtacataggggatagggagcaga

SEQ ID NO: 62715 - DNA, 25 bp, Artificial
  Probe
tacataggggatagggagcagatcc

SEQ ID NO: 62716 - DNA, 25 bp, Artificial
  Probe
ccccttctcaggacagaatctcaga

SEQ ID NO: 62717 - DNA, 25 bp, Artificial
  Probe
accccttctcaggacagaatctcag

SEQ ID NO: 62718 - DNA, 25 bp, Artificial
  Probe
gaccccttctcaggacagaatctca

SEQ ID NO: 62719 - DNA, 25 bp, Artificial
  Probe
aatctcagagattgtacatagggga

SEQ ID NO: 62720 - DNA, 25 bp, Artificial
  Probe
gaatctcagagattgtacatagggg

SEQ ID NO: 62721 - DNA, 25 bp, Artificial
  Probe
gtcttctggatgacctgatacagtc

SEQ ID NO: 62722 - DNA, 25 bp, Artificial
  Probe
gactgtcttctggatgacctgatac

SEQ ID NO: 62723 - DNA, 25 bp, Artificial
  Probe
tagggtcacagatcacagaataaac

SEQ ID NO: 62724 - DNA, 25 bp, Artificial
  Probe
aatcactacatgaccttgagagctt

SEQ ID NO: 62725 - DNA, 25 bp, Artificial
  Probe
ggtcacagatcacagaataaacaaa

SEQ ID NO: 62726 - DNA, 25 bp, Artificial
  Probe
atagggtcacagatcacagaataaa

SEQ ID NO: 62727 - DNA, 25 bp, Artificial
  Probe
aatagggtcacagatcacagaataa

SEQ ID NO: 62728 - DNA, 25 bp, Artificial
  Probe
aaatagggtcacagatcacagaata

SEQ ID NO: 62729 - DNA, 25 bp, Artificial
  Probe
gggtcacagatcacagaataaacaa

SEQ ID NO: 62730 - DNA, 25 bp, Artificial
  Probe
tgtcttctggatgacctgatacagt

SEQ ID NO: 62731 - DNA, 25 bp, Artificial
  Probe
actgtcttctggatgacctgataca

SEQ ID NO: 62732 - DNA, 25 bp, Artificial
  Probe
agactgtcttctggatgacctgata

SEQ ID NO: 62733 - DNA, 25 bp, Artificial
  Probe
atcactacatgaccttgagagcttc

SEQ ID NO: 62734 - DNA, 25 bp, Artificial
  Probe
agggtcacagatcacagaataaaca

SEQ ID NO: 62735 - DNA, 25 bp, Artificial
  Probe
aacaaatcactacatgaccttgaga

SEQ ID NO: 62736 - DNA, 25 bp, Artificial
  Probe
acaaatcactacatgaccttgagag

SEQ ID NO: 62737 - DNA, 25 bp, Artificial
  Probe
aaacaaatcactacatgaccttgag

SEQ ID NO: 62738 - DNA, 25 bp, Artificial
  Probe
gtattatttctgaatgccagcaaga

SEQ ID NO: 62739 - DNA, 25 bp, Artificial
  Probe
ggtattatttctgaatgccagcaag

SEQ ID NO: 62740 - DNA, 25 bp, Artificial
  Probe
aggtattatttctgaatgccagcaa

SEQ ID NO: 62741 - DNA, 25 bp, Artificial
  Probe
gtcacagatcacagaataaacaaat

SEQ ID NO: 62742 - DNA, 25 bp, Artificial
  Probe
acagatcacagaataaacaaatcac

SEQ ID NO: 62743 - DNA, 25 bp, Artificial
  Probe
cacagatcacagaataaacaaatca

SEQ ID NO: 62744 - DNA, 25 bp, Artificial
  Probe
taaacaaatcactacatgaccttga

SEQ ID NO: 62745 - DNA, 25 bp, Artificial
  Probe
caggtattatttctgaatgccagca

SEQ ID NO: 62746 - DNA, 25 bp, Artificial
  Probe
caaatcactacatgaccttgagagc

SEQ ID NO: 62747 - DNA, 25 bp, Artificial
  Probe
cagatcacagaataaacaaatcact

SEQ ID NO: 62748 - DNA, 25 bp, Artificial
  Probe
tcacagatcacagaataaacaaatc

SEQ ID NO: 62749 - DNA, 25 bp, Artificial
  Probe
aaagtcttctcttcgattctcattt

SEQ ID NO: 62750 - DNA, 25 bp, Artificial
  Probe
ataagaacatacaactttccacaaa

SEQ ID NO: 62751 - DNA, 25 bp, Artificial
  Probe
aataagaacatacaactttccacaa

SEQ ID NO: 62752 - DNA, 25 bp, Artificial
  Probe
aaataagaacatacaactttccaca

SEQ ID NO: 62753 - DNA, 25 bp, Artificial
  Probe
tcactacatgaccttgagagcttca

SEQ ID NO: 62754 - DNA, 25 bp, Artificial
  Probe
gagactgtcttctggatgacctgat

SEQ ID NO: 62755 - DNA, 25 bp, Artificial
  Probe
aaatcactacatgaccttgagagct

SEQ ID NO: 62756 - DNA, 25 bp, Artificial
  Probe
aaagttacgtgcaaggttatacagc

SEQ ID NO: 62757 - DNA, 25 bp, Artificial
  Probe
ataaacaaatcactacatgaccttg

SEQ ID NO: 62758 - DNA, 25 bp, Artificial
  Probe
tcacagaataaacaaatcactacat

SEQ ID NO: 62759 - DNA, 25 bp, Artificial
  Probe
atcacagaataaacaaatcactaca

SEQ ID NO: 62760 - DNA, 25 bp, Artificial
  Probe
tacaactttccacaaaatagggtca

SEQ ID NO: 62761 - DNA, 25 bp, Artificial
  Probe
catacaactttccacaaaatagggt

SEQ ID NO: 62762 - DNA, 25 bp, Artificial
  Probe
acatacaactttccacaaaataggg

SEQ ID NO: 62763 - DNA, 25 bp, Artificial
  Probe
gatacagtcactgaaggactattca

SEQ ID NO: 62764 - DNA, 25 bp, Artificial
  Probe
tgatacagtcactgaaggactattc

SEQ ID NO: 62765 - DNA, 25 bp, Artificial
  Probe
ctgatacagtcactgaaggactatt

SEQ ID NO: 62766 - DNA, 25 bp, Artificial
  Probe
ggtatctaatcttggatattgctga

SEQ ID NO: 62767 - DNA, 25 bp, Artificial
  Probe
aggtatctaatcttggatattgctg

SEQ ID NO: 62768 - DNA, 25 bp, Artificial
  Probe
gacttaccctatgagacgagagatg

SEQ ID NO: 62769 - DNA, 25 bp, Artificial
  Probe
gcagaaacatggcataactcatata

SEQ ID NO: 62770 - DNA, 25 bp, Artificial
  Probe
ggacttaccctatgagacgagagat

SEQ ID NO: 62771 - DNA, 25 bp, Artificial
  Probe
taggtatctaatcttggatattgct

SEQ ID NO: 62772 - DNA, 25 bp, Artificial
  Probe
gactaaagagtttattgatggtagc

SEQ ID NO: 62773 - DNA, 25 bp, Artificial
  Probe
tgaagcaaactttattaaaccaaac

SEQ ID NO: 62774 - DNA, 25 bp, Artificial
  Probe
tatgagacgagagatgcaggaagtt

SEQ ID NO: 62775 - DNA, 25 bp, Artificial
  Probe
gtatctaatcttggatattgctgat

SEQ ID NO: 62776 - DNA, 25 bp, Artificial
  Probe
gaagcaaactttattaaaccaaact

SEQ ID NO: 62777 - DNA, 25 bp, Artificial
  Probe
ggatattgctgataatccagttgaa

SEQ ID NO: 62778 - DNA, 25 bp, Artificial
  Probe
acttaccctatgagacgagagatgc

SEQ ID NO: 62779 - DNA, 25 bp, Artificial
  Probe
aagagtttattgatggtagcttaca

SEQ ID NO: 62780 - DNA, 25 bp, Artificial
  Probe
gatattgctgataatccagttgaaa

SEQ ID NO: 62781 - DNA, 25 bp, Artificial
  Probe
agagtttattgatggtagcttacaa

SEQ ID NO: 62782 - DNA, 25 bp, Artificial
  Probe
ctatgagacgagagatgcaggaagt

SEQ ID NO: 62783 - DNA, 25 bp, Artificial
  Probe
gtggacttaccctatgagacgagag

SEQ ID NO: 62784 - DNA, 25 bp, Artificial
  Probe
gcttacaaaatggaggaaaagttct

SEQ ID NO: 62785 - DNA, 25 bp, Artificial
  Probe
tccctatgactaaagagtttattga

SEQ ID NO: 62786 - DNA, 25 bp, Artificial
  Probe
tctaatcttggatattgctgataat

SEQ ID NO: 62787 - DNA, 25 bp, Artificial
  Probe
atctaatcttggatattgctgataa

SEQ ID NO: 62788 - DNA, 25 bp, Artificial
  Probe
agcaaactttattaaaccaaacttt

SEQ ID NO: 62789 - DNA, 25 bp, Artificial
  Probe
cagaaacatggcataactcatataa

SEQ ID NO: 62790 - DNA, 25 bp, Artificial
  Probe
gagtggacttaccctatgagacgag

SEQ ID NO: 62791 - DNA, 25 bp, Artificial
  Probe
gaagttttgcctggattgttcttag

SEQ ID NO: 62792 - DNA, 25 bp, Artificial
  Probe
tggacttaccctatgagacgagaga

SEQ ID NO: 62793 - DNA, 25 bp, Artificial
  Probe
ttaggtatctaatcttggatattgc

SEQ ID NO: 62794 - DNA, 25 bp, Artificial
  Probe
aagcaaactttattaaaccaaactt

SEQ ID NO: 62795 - DNA, 25 bp, Artificial
  Probe
ctaatcttggatattgctgataatc

SEQ ID NO: 62796 - DNA, 25 bp, Artificial
  Probe
ataactcatataatttgcatacggc

SEQ ID NO: 62797 - DNA, 25 bp, Artificial
  Probe
actaaagagtttattgatggtagct

SEQ ID NO: 62798 - DNA, 25 bp, Artificial
  Probe
ccaaactttcaacaattatttaggt

SEQ ID NO: 62799 - DNA, 25 bp, Artificial
  Probe
accaaactttcaacaattatttagg

SEQ ID NO: 62800 - DNA, 25 bp, Artificial
  Probe
ttgaagcaaactttattaaaccaaa

SEQ ID NO: 62801 - DNA, 25 bp, Artificial
  Probe
gcaaactttattaaaccaaactttc

SEQ ID NO: 62802 - DNA, 25 bp, Artificial
  Probe
ttacaaaatggaggaaaagttctcg

SEQ ID NO: 62803 - DNA, 25 bp, Artificial
  Probe
gagtttattgatggtagcttacaaa

SEQ ID NO: 62804 - DNA, 25 bp, Artificial
  Probe
tacaaaatggaggaaaagttctcgt

SEQ ID NO: 62805 - DNA, 25 bp, Artificial
  Probe
agtggacttaccctatgagacgaga

SEQ ID NO: 62806 - DNA, 25 bp, Artificial
  Probe
attgaagcaaactttattaaaccaa

SEQ ID NO: 62807 - DNA, 25 bp, Artificial
  Probe
gaggagtggacttaccctatgagac

SEQ ID NO: 62808 - DNA, 25 bp, Artificial
  Probe
ggaagttttgcctggattgttctta

SEQ ID NO: 62809 - DNA, 25 bp, Artificial
  Probe
aaagagtttattgatggtagcttac

SEQ ID NO: 62810 - DNA, 25 bp, Artificial
  Probe
ttgctgataatccagttgaaaacat

SEQ ID NO: 62811 - DNA, 25 bp, Artificial
  Probe
gattgttgtgtagtcaagtcaccat

SEQ ID NO: 62812 - DNA, 25 bp, Artificial
  Probe
actgattcctttatgatgactgctt

SEQ ID NO: 62813 - DNA, 25 bp, Artificial
  Probe
tagtcaagtcaccatgctgaatgta

SEQ ID NO: 62814 - DNA, 25 bp, Artificial
  Probe
tcctttatgatgactgcttaactcc

SEQ ID NO: 62815 - DNA, 25 bp, Artificial
  Probe
cactgattcctttatgatgactgct

SEQ ID NO: 62816 - DNA, 25 bp, Artificial
  Probe
acactgattcctttatgatgactgc

SEQ ID NO: 62817 - DNA, 25 bp, Artificial
  Probe
agaacaaactctgaaagacctatga

SEQ ID NO: 62818 - DNA, 25 bp, Artificial
  Probe
agtggttagaagcatgtctctcttg

SEQ ID NO: 62819 - DNA, 25 bp, Artificial
  Probe
cagtggttagaagcatgtctctctt

SEQ ID NO: 62820 - DNA, 25 bp, Artificial
  Probe
ttcctttatgatgactgcttaactc

SEQ ID NO: 62821 - DNA, 25 bp, Artificial
  Probe
ctgattcctttatgatgactgctta

SEQ ID NO: 62822 - DNA, 25 bp, Artificial
  Probe
atttcattgtcttagtcaaagcagg

SEQ ID NO: 62823 - DNA, 25 bp, Artificial
  Probe
ttccaatgtagctcagtaattcctg

SEQ ID NO: 62824 - DNA, 25 bp, Artificial
  Probe
cctttatgatgactgcttaactccc

SEQ ID NO: 62825 - DNA, 25 bp, Artificial
  Probe
attgttgtgtagtcaagtcaccatg

SEQ ID NO: 62826 - DNA, 25 bp, Artificial
  Probe
tggttagaagcatgtctctcttgag

SEQ ID NO: 62827 - DNA, 25 bp, Artificial
  Probe
gtggttagaagcatgtctctcttga

SEQ ID NO: 62828 - DNA, 25 bp, Artificial
  Probe
tcattgtcttagtcaaagcaggatt

SEQ ID NO: 62829 - DNA, 25 bp, Artificial
  Probe
ttcattgtcttagtcaaagcaggat

SEQ ID NO: 62830 - DNA, 25 bp, Artificial
  Probe
tttcattgtcttagtcaaagcagga

SEQ ID NO: 62831 - DNA, 25 bp, Artificial
  Probe
ccaatgtagctcagtaattcctgtt

SEQ ID NO: 62832 - DNA, 25 bp, Artificial
  Probe
catgtctctcttgagctacagtaga

SEQ ID NO: 62833 - DNA, 25 bp, Artificial
  Probe
aagaacaaactctgaaagacctatg

SEQ ID NO: 62834 - DNA, 25 bp, Artificial
  Probe
cattgtcttagtcaaagcaggatta

SEQ ID NO: 62835 - DNA, 25 bp, Artificial
  Probe
tacactgattcctttatgatgactg

SEQ ID NO: 62836 - DNA, 25 bp, Artificial
  Probe
catttcattgtcttagtcaaagcag

SEQ ID NO: 62837 - DNA, 25 bp, Artificial
  Probe
aactctgaaagacctatgagcaaat

SEQ ID NO: 62838 - DNA, 25 bp, Artificial
  Probe
aaactctgaaagacctatgagcaaa

SEQ ID NO: 62839 - DNA, 25 bp, Artificial
  Probe
gaacaaactctgaaagacctatgag

SEQ ID NO: 62840 - DNA, 25 bp, Artificial
  Probe
tgattcctttatgatgactgcttaa

SEQ ID NO: 62841 - DNA, 25 bp, Artificial
  Probe
ctcagtggttagaagcatgtctctc

SEQ ID NO: 62842 - DNA, 25 bp, Artificial
  Probe
caatgtagctcagtaattcctgtta

SEQ ID NO: 62843 - DNA, 25 bp, Artificial
  Probe
tccaatgtagctcagtaattcctgt

SEQ ID NO: 62844 - DNA, 25 bp, Artificial
  Probe
aaagccacatttcattgtcttagtc

SEQ ID NO: 62845 - DNA, 25 bp, Artificial
  Probe
actctgaaagacctatgagcaaatg

SEQ ID NO: 62846 - DNA, 25 bp, Artificial
  Probe
gccacatttcattgtcttagtcaaa

SEQ ID NO: 62847 - DNA, 25 bp, Artificial
  Probe
tttaagaacaaactctgaaagacct

SEQ ID NO: 62848 - DNA, 25 bp, Artificial
  Probe
tccagaaactttaagaacaaactct

SEQ ID NO: 62849 - DNA, 25 bp, Artificial
  Probe
attcctttatgatgactgcttaact

SEQ ID NO: 62850 - DNA, 25 bp, Artificial
  Probe
caaactctgaaagacctatgagcaa

SEQ ID NO: 62851 - DNA, 25 bp, Artificial
  Probe
aacaaactctgaaagacctatgagc

SEQ ID NO: 62852 - DNA, 25 bp, Artificial
  Probe
acatttcattgtcttagtcaaagca

SEQ ID NO: 62853 - DNA, 25 bp, Artificial
  Probe
gattcctttatgatgactgcttaac

SEQ ID NO: 62854 - DNA, 25 bp, Artificial
  Probe
gaagggattgttgtgtagtcaagtc

SEQ ID NO: 62855 - DNA, 25 bp, Artificial
  Probe
cacatttcattgtcttagtcaaagc

SEQ ID NO: 62856 - DNA, 25 bp, Artificial
  Probe
cttccatagacctgtgcttcccatc

SEQ ID NO: 62857 - DNA, 25 bp, Artificial
  Probe
ctcctaccccttccatagacctgtg

SEQ ID NO: 62858 - DNA, 25 bp, Artificial
  Probe
ctccatcttcattcataggtctgcg

SEQ ID NO: 62859 - DNA, 25 bp, Artificial
  Probe
tagataccagcacaagtcggttaat

SEQ ID NO: 62860 - DNA, 25 bp, Artificial
  Probe
ctagataccagcacaagtcggttaa

SEQ ID NO: 62861 - DNA, 25 bp, Artificial
  Probe
cctccatcttcattcataggtctgc

SEQ ID NO: 62862 - DNA, 25 bp, Artificial
  Probe
gctctccctccatcttcattcatag

SEQ ID NO: 62863 - DNA, 25 bp, Artificial
  Probe
agataccagcacaagtcggttaatc

SEQ ID NO: 62864 - DNA, 25 bp, Artificial
  Probe
ttccacgactagaaccttaggcatt

SEQ ID NO: 62865 - DNA, 25 bp, Artificial
  Probe
ctctccctccatcttcattcatagg

SEQ ID NO: 62866 - DNA, 25 bp, Artificial
  Probe
taacccttccacgactagaacctta

SEQ ID NO: 62867 - DNA, 25 bp, Artificial
  Probe
ctccctccatcttcattcataggtc

SEQ ID NO: 62868 - DNA, 25 bp, Artificial
  Probe
cttccacgactagaaccttaggcat

SEQ ID NO: 62869 - DNA, 25 bp, Artificial
  Probe
tccacgactagaaccttaggcattg

SEQ ID NO: 62870 - DNA, 25 bp, Artificial
  Probe
ccctccatcttcattcataggtctg

SEQ ID NO: 62871 - DNA, 25 bp, Artificial
  Probe
tccctccatcttcattcataggtct

SEQ ID NO: 62872 - DNA, 25 bp, Artificial
  Probe
tctccctccatcttcattcataggt

SEQ ID NO: 62873 - DNA, 25 bp, Artificial
  Probe
gataccagcacaagtcggttaatcc

SEQ ID NO: 62874 - DNA, 25 bp, Artificial
  Probe
aagcacctagataccagcacaagtc

SEQ ID NO: 62875 - DNA, 25 bp, Artificial
  Probe
atttcccttccagcaaactcaactc

SEQ ID NO: 62876 - DNA, 25 bp, Artificial
  Probe
agctctccctccatcttcattcata

SEQ ID NO: 62877 - DNA, 25 bp, Artificial
  Probe
cctagataccagcacaagtcggtta

SEQ ID NO: 62878 - DNA, 25 bp, Artificial
  Probe
aatccaagcacctagataccagcac

SEQ ID NO: 62879 - DNA, 25 bp, Artificial
  Probe
caatccaagcacctagataccagca

SEQ ID NO: 62880 - DNA, 25 bp, Artificial
  Probe
catttcccttccagcaaactcaact

SEQ ID NO: 62881 - DNA, 25 bp, Artificial
  Probe
cttaggcattggggagttttagatg

SEQ ID NO: 62882 - DNA, 25 bp, Artificial
  Probe
aacccttccacgactagaaccttag

SEQ ID NO: 62883 - DNA, 25 bp, Artificial
  Probe
ctaacccttccacgactagaacctt

SEQ ID NO: 62884 - DNA, 25 bp, Artificial
  Probe
caagcacctagataccagcacaagt

SEQ ID NO: 62885 - DNA, 25 bp, Artificial
  Probe
cattggggagttttagatggactaa

SEQ ID NO: 62886 - DNA, 25 bp, Artificial
  Probe
tggggagttttagatggactaattt

SEQ ID NO: 62887 - DNA, 25 bp, Artificial
  Probe
ttggggagttttagatggactaatt

SEQ ID NO: 62888 - DNA, 25 bp, Artificial
  Probe
attggggagttttagatggactaat

SEQ ID NO: 62889 - DNA, 25 bp, Artificial
  Probe
aagcacttggtaacaggcacatctt

SEQ ID NO: 62890 - DNA, 25 bp, Artificial
  Probe
acttggtaacaggcacatcttcctc

SEQ ID NO: 62891 - DNA, 25 bp, Artificial
  Probe
ggggagttttagatggactaatttt

SEQ ID NO: 62892 - DNA, 25 bp, Artificial
  Probe
ccttaggcattggggagttttagat

SEQ ID NO: 62893 - DNA, 25 bp, Artificial
  Probe
ttaggcattggggagttttagatgg

SEQ ID NO: 62894 - DNA, 25 bp, Artificial
  Probe
ggcaatccaagcacctagataccag

SEQ ID NO: 62895 - DNA, 25 bp, Artificial
  Probe
ctcggcaatccaagcacctagatac

SEQ ID NO: 62896 - DNA, 25 bp, Artificial
  Probe
cacttggtaacaggcacatcttcct

SEQ ID NO: 62897 - DNA, 25 bp, Artificial
  Probe
gcattggggagttttagatggacta

SEQ ID NO: 62898 - DNA, 25 bp, Artificial
  Probe
atcagctctccctccatcttcattc

SEQ ID NO: 62899 - DNA, 25 bp, Artificial
  Probe
ccatttcccttccagcaaactcaac

SEQ ID NO: 62900 - DNA, 25 bp, Artificial
  Probe
aaccttaggcattggggagttttag

SEQ ID NO: 62901 - DNA, 25 bp, Artificial
  Probe
gaaccttaggcattggggagtttta

SEQ ID NO: 62902 - DNA, 25 bp, Artificial
  Probe
cagctctccctccatcttcattcat

SEQ ID NO: 62903 - DNA, 25 bp, Artificial
  Probe
atgattcggttagagatgaggagat

SEQ ID NO: 62904 - DNA, 25 bp, Artificial
  Probe
aatgattcggttagagatgaggaga

SEQ ID NO: 62905 - DNA, 25 bp, Artificial
  Probe
tgattcggttagagatgaggagatc

SEQ ID NO: 62906 - DNA, 25 bp, Artificial
  Probe
gattcggttagagatgaggagatcc

SEQ ID NO: 62907 - DNA, 25 bp, Artificial
  Probe
tggaagctgatgaagtaagttctta

SEQ ID NO: 62908 - DNA, 25 bp, Artificial
  Probe
ttggaagctgatgaagtaagttctt

SEQ ID NO: 62909 - DNA, 25 bp, Artificial
  Probe
gagttggaagctgatgaagtaagtt

SEQ ID NO: 62910 - DNA, 25 bp, Artificial
  Probe
gaagctgatgaagtaagttcttagg

SEQ ID NO: 62911 - DNA, 25 bp, Artificial
  Probe
ggaagctgatgaagtaagttcttag

SEQ ID NO: 62912 - DNA, 25 bp, Artificial
  Probe
gttggaagctgatgaagtaagttct

SEQ ID NO: 62913 - DNA, 25 bp, Artificial
  Probe
agttggaagctgatgaagtaagttc

SEQ ID NO: 62914 - DNA, 25 bp, Artificial
  Probe
gacttaggaggaaaccatcaaatct

SEQ ID NO: 62915 - DNA, 25 bp, Artificial
  Probe
aaatgattcggttagagatgaggag

SEQ ID NO: 62916 - DNA, 25 bp, Artificial
  Probe
gctgatgaagtaagttcttagggat

SEQ ID NO: 62917 - DNA, 25 bp, Artificial
  Probe
tgaagtaagttcttagggattgtgt

SEQ ID NO: 62918 - DNA, 25 bp, Artificial
  Probe
aggcaccaataaaggacaatttaag

SEQ ID NO: 62919 - DNA, 25 bp, Artificial
  Probe
gaagtaagttcttagggattgtgtc

SEQ ID NO: 62920 - DNA, 25 bp, Artificial
  Probe
gcaccaataaaggacaatttaaggg

SEQ ID NO: 62921 - DNA, 25 bp, Artificial
  Probe
ggcaccaataaaggacaatttaagg

SEQ ID NO: 62922 - DNA, 25 bp, Artificial
  Probe
tgacttaggaggaaaccatcaaatc

SEQ ID NO: 62923 - DNA, 25 bp, Artificial
  Probe
ctgacttaggaggaaaccatcaaat

SEQ ID NO: 62924 - DNA, 25 bp, Artificial
  Probe
cttaggaggaaaccatcaaatctct

SEQ ID NO: 62925 - DNA, 25 bp, Artificial
  Probe
ggaggaaaccatcaaatctcttact

SEQ ID NO: 62926 - DNA, 25 bp, Artificial
  Probe
aggaggaaaccatcaaatctcttac

SEQ ID NO: 62927 - DNA, 25 bp, Artificial
  Probe
acttaggaggaaaccatcaaatctc

SEQ ID NO: 62928 - DNA, 25 bp, Artificial
  Probe
ttaggaggaaaccatcaaatctctt

SEQ ID NO: 62929 - DNA, 25 bp, Artificial
  Probe
tataggcaccaataaaggacaattt

SEQ ID NO: 62930 - DNA, 25 bp, Artificial
  Probe
gaggaaaccatcaaatctcttactc

SEQ ID NO: 62931 - DNA, 25 bp, Artificial
  Probe
atgaagtaagttcttagggattgtg

SEQ ID NO: 62932 - DNA, 25 bp, Artificial
  Probe
taggcaccaataaaggacaatttaa

SEQ ID NO: 62933 - DNA, 25 bp, Artificial
  Probe
gaaaccatcaaatctcttactccta

SEQ ID NO: 62934 - DNA, 25 bp, Artificial
  Probe
taggaggaaaccatcaaatctctta

SEQ ID NO: 62935 - DNA, 25 bp, Artificial
  Probe
gatgaagtaagttcttagggattgt

SEQ ID NO: 62936 - DNA, 25 bp, Artificial
  Probe
tgatgaagtaagttcttagggattg

SEQ ID NO: 62937 - DNA, 25 bp, Artificial
  Probe
ataggcaccaataaaggacaattta

SEQ ID NO: 62938 - DNA, 25 bp, Artificial
  Probe
attcggttagagatgaggagatcct

SEQ ID NO: 62939 - DNA, 25 bp, Artificial
  Probe
ctctctggacaagcatttgatgaag

SEQ ID NO: 62940 - DNA, 25 bp, Artificial
  Probe
ctgatgaagtaagttcttagggatt

SEQ ID NO: 62941 - DNA, 25 bp, Artificial
  Probe
atctctctggacaagcatttgatga

SEQ ID NO: 62942 - DNA, 25 bp, Artificial
  Probe
cgagttggaagctgatgaagtaagt

SEQ ID NO: 62943 - DNA, 25 bp, Artificial
  Probe
ggaaaccatcaaatctcttactcct

SEQ ID NO: 62944 - DNA, 25 bp, Artificial
  Probe
aggaaaccatcaaatctcttactcc

SEQ ID NO: 62945 - DNA, 25 bp, Artificial
  Probe
tctctctggacaagcatttgatgaa

SEQ ID NO: 62946 - DNA, 25 bp, Artificial
  Probe
aagctgatgaagtaagttcttaggg

SEQ ID NO: 62947 - DNA, 25 bp, Artificial
  Probe
cagagaatgtcgtagtggtgctaaa

SEQ ID NO: 62948 - DNA, 25 bp, Artificial
  Probe
ttaaagatagagagagccaacaacc

SEQ ID NO: 62949 - DNA, 25 bp, Artificial
  Probe
atttacagtagtcaaagggctatct

SEQ ID NO: 62950 - DNA, 25 bp, Artificial
  Probe
catttacagtagtcaaagggctatc

SEQ ID NO: 62951 - DNA, 25 bp, Artificial
  Probe
taaagatagagagagccaacaacct

SEQ ID NO: 62952 - DNA, 25 bp, Artificial
  Probe
tacagtagtcaaagggctatctatg

SEQ ID NO: 62953 - DNA, 25 bp, Artificial
  Probe
gcatttacagtagtcaaagggctat

SEQ ID NO: 62954 - DNA, 25 bp, Artificial
  Probe
cttaaagatagagagagccaacaac

SEQ ID NO: 62955 - DNA, 25 bp, Artificial
  Probe
tttacagtagtcaaagggctatcta

SEQ ID NO: 62956 - DNA, 25 bp, Artificial
  Probe
tcttggaattgggcatttacagtag

SEQ ID NO: 62957 - DNA, 25 bp, Artificial
  Probe
ctcttggaattgggcatttacagta

SEQ ID NO: 62958 - DNA, 25 bp, Artificial
  Probe
aattgggcatttacagtagtcaaag

SEQ ID NO: 62959 - DNA, 25 bp, Artificial
  Probe
gaattgggcatttacagtagtcaaa

SEQ ID NO: 62960 - DNA, 25 bp, Artificial
  Probe
cttggaattgggcatttacagtagt

SEQ ID NO: 62961 - DNA, 25 bp, Artificial
  Probe
ttacagtagtcaaagggctatctat

SEQ ID NO: 62962 - DNA, 25 bp, Artificial
  Probe
ttggaattgggcatttacagtagtc

SEQ ID NO: 62963 - DNA, 25 bp, Artificial
  Probe
attgggcatttacagtagtcaaagg

SEQ ID NO: 62964 - DNA, 25 bp, Artificial
  Probe
acagtagtcaaagggctatctatgc

SEQ ID NO: 62965 - DNA, 25 bp, Artificial
  Probe
atgtctcttggaattgggcatttac

SEQ ID NO: 62966 - DNA, 25 bp, Artificial
  Probe
ggaattgggcatttacagtagtcaa

SEQ ID NO: 62967 - DNA, 25 bp, Artificial
  Probe
aaagatagagagagccaacaacctg

SEQ ID NO: 62968 - DNA, 25 bp, Artificial
  Probe
tggaattgggcatttacagtagtca

SEQ ID NO: 62969 - DNA, 25 bp, Artificial
  Probe
gtctcttggaattgggcatttacag

SEQ ID NO: 62970 - DNA, 25 bp, Artificial
  Probe
aagatagagagagccaacaacctgt

SEQ ID NO: 62971 - DNA, 25 bp, Artificial
  Probe
ttaaggagagatgtatctttcaagc

SEQ ID NO: 62972 - DNA, 25 bp, Artificial
  Probe
aactgtttgactcatgttgacttaa

SEQ ID NO: 62973 - DNA, 25 bp, Artificial
  Probe
ttaactgtttgactcatgttgactt

SEQ ID NO: 62974 - DNA, 25 bp, Artificial
  Probe
taacttatccgaagatctgttctcc

SEQ ID NO: 62975 - DNA, 25 bp, Artificial
  Probe
actgtttgactcatgttgacttaat

SEQ ID NO: 62976 - DNA, 25 bp, Artificial
  Probe
ggcatttacagtagtcaaagggcta

SEQ ID NO: 62977 - DNA, 25 bp, Artificial
  Probe
tctcttggaattgggcatttacagt

SEQ ID NO: 62978 - DNA, 25 bp, Artificial
  Probe
tagaaaggatttgtaatcagccctg

SEQ ID NO: 62979 - DNA, 25 bp, Artificial
  Probe
gtagaaaggatttgtaatcagccct

SEQ ID NO: 62980 - DNA, 25 bp, Artificial
  Probe
aaaggaaattgacggttataagaga

SEQ ID NO: 62981 - DNA, 25 bp, Artificial
  Probe
tggtagaaaggatttgtaatcagcc

SEQ ID NO: 62982 - DNA, 25 bp, Artificial
  Probe
aacttatccgaagatctgttctcca

SEQ ID NO: 62983 - DNA, 25 bp, Artificial
  Probe
atggtagaaaggatttgtaatcagc

SEQ ID NO: 62984 - DNA, 25 bp, Artificial
  Probe
taactgtttgactcatgttgactta

SEQ ID NO: 62985 - DNA, 25 bp, Artificial
  Probe
taaggagagatgtatctttcaagct

SEQ ID NO: 62986 - DNA, 25 bp, Artificial
  Probe
aaggaaattgacggttataagagat

SEQ ID NO: 62987 - DNA, 25 bp, Artificial
  Probe
acaacctgttagcaattatttcaat

SEQ ID NO: 62988 - DNA, 25 bp, Artificial
  Probe
ggtagaaaggatttgtaatcagccc

SEQ ID NO: 62989 - DNA, 25 bp, Artificial
  Probe
gaagtgagaatgtctcttggaattg

SEQ ID NO: 62990 - DNA, 25 bp, Artificial
  Probe
ctgtttgactcatgttgacttaatt

SEQ ID NO: 62991 - DNA, 25 bp, Artificial
  Probe
acttatccgaagatctgttctccac

SEQ ID NO: 62992 - DNA, 25 bp, Artificial
  Probe
ttaacttatccgaagatctgttctc

SEQ ID NO: 62993 - DNA, 25 bp, Artificial
  Probe
tagagaatgtgtgtagatacgatgc

SEQ ID NO: 62994 - DNA, 25 bp, Artificial
  Probe
acatcagagagaatcgttcagaatc

SEQ ID NO: 62995 - DNA, 25 bp, Artificial
  Probe
gacatcagagagaatcgttcagaat

SEQ ID NO: 62996 - DNA, 25 bp, Artificial
  Probe
catcagagagaatcgttcagaatcc

SEQ ID NO: 62997 - DNA, 25 bp, Artificial
  Probe
tcttaatgacatcagagagaatcgt

SEQ ID NO: 62998 - DNA, 25 bp, Artificial
  Probe
cttaatgacatcagagagaatcgtt

SEQ ID NO: 62999 - DNA, 25 bp, Artificial
  Probe
taatgacatcagagagaatcgttca

SEQ ID NO: 63000 - DNA, 25 bp, Artificial
  Probe
aatgacatcagagagaatcgttcag

SEQ ID NO: 63001 - DNA, 25 bp, Artificial
  Probe
ttaatgacatcagagagaatcgttc

SEQ ID NO: 63002 - DNA, 25 bp, Artificial
  Probe
atgacatcagagagaatcgttcaga

SEQ ID NO: 63003 - DNA, 25 bp, Artificial
  Probe
ttagagaatgtgtgtagatacgatg

SEQ ID NO: 63004 - DNA, 25 bp, Artificial
  Probe
tgacatcagagagaatcgttcagaa

SEQ ID NO: 63005 - DNA, 25 bp, Artificial
  Probe
agagaatgtgtgtagatacgatgcc

SEQ ID NO: 63006 - DNA, 25 bp, Artificial
  Probe
gtccctttagagaatgtgtgtagat

SEQ ID NO: 63007 - DNA, 25 bp, Artificial
  Probe
ttgtccctttagagaatgtgtgtag

SEQ ID NO: 63008 - DNA, 25 bp, Artificial
  Probe
cttgtccctttagagaatgtgtgta

SEQ ID NO: 63009 - DNA, 25 bp, Artificial
  Probe
cagggctctttattctcaattcatc

SEQ ID NO: 63010 - DNA, 25 bp, Artificial
  Probe
tgtccctttagagaatgtgtgtaga

SEQ ID NO: 63011 - DNA, 25 bp, Artificial
  Probe
ccagggctctttattctcaattcat

SEQ ID NO: 63012 - DNA, 25 bp, Artificial
  Probe
agggctctttattctcaattcatcg

SEQ ID NO: 63013 - DNA, 25 bp, Artificial
  Probe
cctttagagaatgtgtgtagatacg

SEQ ID NO: 63014 - DNA, 25 bp, Artificial
  Probe
ccctttagagaatgtgtgtagatac

SEQ ID NO: 63015 - DNA, 25 bp, Artificial
  Probe
tccctttagagaatgtgtgtagata

SEQ ID NO: 63016 - DNA, 25 bp, Artificial
  Probe
tgaacacagagatatgactttcttg

SEQ ID NO: 63017 - DNA, 25 bp, Artificial
  Probe
gagaatgtgtgtagatacgatgccg

SEQ ID NO: 63018 - DNA, 25 bp, Artificial
  Probe
tcttgtccctttagagaatgtgtgt

SEQ ID NO: 63019 - DNA, 25 bp, Artificial
  Probe
ggctctttattctcaattcatcggg

SEQ ID NO: 63020 - DNA, 25 bp, Artificial
  Probe
gggctctttattctcaattcatcgg

SEQ ID NO: 63021 - DNA, 25 bp, Artificial
  Probe
ctttagagaatgtgtgtagatacga

SEQ ID NO: 63022 - DNA, 25 bp, Artificial
  Probe
cagagatatgactttcttgtccctt

SEQ ID NO: 63023 - DNA, 25 bp, Artificial
  Probe
acacagagatatgactttcttgtcc

SEQ ID NO: 63024 - DNA, 25 bp, Artificial
  Probe
ggaaactgaacacagagatatgact

SEQ ID NO: 63025 - DNA, 25 bp, Artificial
  Probe
aggaaactgaacacagagatatgac

SEQ ID NO: 63026 - DNA, 25 bp, Artificial
  Probe
caggaaactgaacacagagatatga

SEQ ID NO: 63027 - DNA, 25 bp, Artificial
  Probe
atcagagagaatcgttcagaatccc

SEQ ID NO: 63028 - DNA, 25 bp, Artificial
  Probe
ttcttaatgacatcagagagaatcg

SEQ ID NO: 63029 - DNA, 25 bp, Artificial
  Probe
agagatatgactttcttgtcccttt

SEQ ID NO: 63030 - DNA, 25 bp, Artificial
  Probe
actgaacacagagatatgactttct

SEQ ID NO: 63031 - DNA, 25 bp, Artificial
  Probe
gagaatcgttcagaatcccaacaag

SEQ ID NO: 63032 - DNA, 25 bp, Artificial
  Probe
gaacacagagatatgactttcttgt

SEQ ID NO: 63033 - DNA, 25 bp, Artificial
  Probe
acagagatatgactttcttgtccct

SEQ ID NO: 63034 - DNA, 25 bp, Artificial
  Probe
cacagagatatgactttcttgtccc

SEQ ID NO: 63035 - DNA, 25 bp, Artificial
  Probe
ccaggaaactgaacacagagatatg

SEQ ID NO: 63036 - DNA, 25 bp, Artificial
  Probe
tatgactttcttgtccctttagaga

SEQ ID NO: 63037 - DNA, 25 bp, Artificial
  Probe
aacacagagatatgactttcttgtc

SEQ ID NO: 63038 - DNA, 25 bp, Artificial
  Probe
tagagaatcagaagaaggcgaggaa

SEQ ID NO: 63039 - DNA, 25 bp, Artificial
  Probe
ctagagaatcagaagaaggcgagga

SEQ ID NO: 63040 - DNA, 25 bp, Artificial
  Probe
agagaatcagaagaaggcgaggaag

SEQ ID NO: 63041 - DNA, 25 bp, Artificial
  Probe
gctagagaatcagaagaaggcgagg

SEQ ID NO: 63042 - DNA, 25 bp, Artificial
  Probe
gagaatcagaagaaggcgaggaagg

SEQ ID NO: 63043 - DNA, 25 bp, Artificial
  Probe
catccgtgaactccatgagatcttc

SEQ ID NO: 63044 - DNA, 25 bp, Artificial
  Probe
gagaaacagagacccagcatttgtg

SEQ ID NO: 63045 - DNA, 25 bp, Artificial
  Probe
cgtatcgaaaagaacattctgagct

SEQ ID NO: 63046 - DNA, 25 bp, Artificial
  Probe
gagatgcagggagagatgatcaatc

SEQ ID NO: 63047 - DNA, 25 bp, Artificial
  Probe
gcagggagagatgatcaatcgtatc

SEQ ID NO: 63048 - DNA, 25 bp, Artificial
  Probe
gatcttcacttttctagctaccgag

SEQ ID NO: 63049 - DNA, 25 bp, Artificial
  Probe
tgcagggagagatgatcaatcgtat

SEQ ID NO: 63050 - DNA, 25 bp, Artificial
  Probe
atgcagggagagatgatcaatcgta

SEQ ID NO: 63051 - DNA, 25 bp, Artificial
  Probe
gagatcttcacttttctagctaccg

SEQ ID NO: 63052 - DNA, 25 bp, Artificial
  Probe
tgagatcttcacttttctagctacc

SEQ ID NO: 63053 - DNA, 25 bp, Artificial
  Probe
atcgtatcgaaaagaacattctgag

SEQ ID NO: 63054 - DNA, 25 bp, Artificial
  Probe
ccatgagatcttcacttttctagct

SEQ ID NO: 63055 - DNA, 25 bp, Artificial
  Probe
tccatgagatcttcacttttctagc

SEQ ID NO: 63056 - DNA, 25 bp, Artificial
  Probe
agatcttcacttttctagctaccga

SEQ ID NO: 63057 - DNA, 25 bp, Artificial
  Probe
atccgtgaactccatgagatcttca

SEQ ID NO: 63058 - DNA, 25 bp, Artificial
  Probe
aactccatgagatcttcacttttct

SEQ ID NO: 63059 - DNA, 25 bp, Artificial
  Probe
gaactccatgagatcttcacttttc

SEQ ID NO: 63060 - DNA, 25 bp, Artificial
  Probe
aatcgtatcgaaaagaacattctga

SEQ ID NO: 63061 - DNA, 25 bp, Artificial
  Probe
caatcgtatcgaaaagaacattctg

SEQ ID NO: 63062 - DNA, 25 bp, Artificial
  Probe
tcaatcgtatcgaaaagaacattct

SEQ ID NO: 63063 - DNA, 25 bp, Artificial
  Probe
actccatgagatcttcacttttcta

SEQ ID NO: 63064 - DNA, 25 bp, Artificial
  Probe
atcttcacttttctagctaccgagg

SEQ ID NO: 63065 - DNA, 25 bp, Artificial
  Probe
ggagaaacagagacccagcatttgt

SEQ ID NO: 63066 - DNA, 25 bp, Artificial
  Probe
tcgtatcgaaaagaacattctgagc

SEQ ID NO: 63067 - DNA, 25 bp, Artificial
  Probe
ctccatgagatcttcacttttctag

SEQ ID NO: 63068 - DNA, 25 bp, Artificial
  Probe
gcatccgtgaactccatgagatctt

SEQ ID NO: 63069 - DNA, 25 bp, Artificial
  Probe
atcaatcgtatcgaaaagaacattc

SEQ ID NO: 63070 - DNA, 25 bp, Artificial
  Probe
gatcaatcgtatcgaaaagaacatt

SEQ ID NO: 63071 - DNA, 25 bp, Artificial
  Probe
atgagatcttcacttttctagctac

SEQ ID NO: 63072 - DNA, 25 bp, Artificial
  Probe
catgagatcttcacttttctagcta

SEQ ID NO: 63073 - DNA, 25 bp, Artificial
  Probe
ggagatgcagggagagatgatcaat

SEQ ID NO: 63074 - DNA, 25 bp, Artificial
  Probe
agatgcagggagagatgatcaatcg

SEQ ID NO: 63075 - DNA, 25 bp, Artificial
  Probe
tcttcacttttctagctaccgaggt

SEQ ID NO: 63076 - DNA, 25 bp, Artificial
  Probe
cgtgggcaagaacatgtcaagatag

SEQ ID NO: 63077 - DNA, 25 bp, Artificial
  Probe
gatgcagggagagatgatcaatcgt

SEQ ID NO: 63078 - DNA, 25 bp, Artificial
  Probe
tgaactccatgagatcttcactttt

SEQ ID NO: 63079 - DNA, 25 bp, Artificial
  Probe
gtgggcaagaacatgtcaagatagc

SEQ ID NO: 63080 - DNA, 25 bp, Artificial
  Probe
tgatcaatcgtatcgaaaagaacat

SEQ ID NO: 63081 - DNA, 25 bp, Artificial
  Probe
atgatcaatcgtatcgaaaagaaca

SEQ ID NO: 63082 - DNA, 25 bp, Artificial
  Probe
cttttctagctaccgaggtggagat

SEQ ID NO: 63083 - DNA, 25 bp, Artificial
  Probe
catgcgagcaaggacataaattaaa

SEQ ID NO: 63084 - DNA, 25 bp, Artificial
  Probe
gccatctaatgctactcactggatt

SEQ ID NO: 63085 - DNA, 25 bp, Artificial
  Probe
ctagacacgccatctaatgctactc

SEQ ID NO: 63086 - DNA, 25 bp, Artificial
  Probe
ccatctaatgctactcactggattt

SEQ ID NO: 63087 - DNA, 25 bp, Artificial
  Probe
cactagacacgccatctaatgctac

SEQ ID NO: 63088 - DNA, 25 bp, Artificial
  Probe
ccatgcgagcaaggacataaattaa

SEQ ID NO: 63089 - DNA, 25 bp, Artificial
  Probe
tagacacgccatctaatgctactca

SEQ ID NO: 63090 - DNA, 25 bp, Artificial
  Probe
actagacacgccatctaatgctact

SEQ ID NO: 63091 - DNA, 25 bp, Artificial
  Probe
tgacgatgaaggaatccaggagaag

SEQ ID NO: 63092 - DNA, 25 bp, Artificial
  Probe
acactagacacgccatctaatgcta

SEQ ID NO: 63093 - DNA, 25 bp, Artificial
  Probe
gtgacgatgaaggaatccaggagaa

SEQ ID NO: 63094 - DNA, 25 bp, Artificial
  Probe
gtcggtgcttaggtatgagaaggag

SEQ ID NO: 63095 - DNA, 25 bp, Artificial
  Probe
gcgagcaaggacataaattaaaaga

SEQ ID NO: 63096 - DNA, 25 bp, Artificial
  Probe
tctaatgctactcactggattttgc

SEQ ID NO: 63097 - DNA, 25 bp, Artificial
  Probe
atctaatgctactcactggattttg

SEQ ID NO: 63098 - DNA, 25 bp, Artificial
  Probe
gacacgccatctaatgctactcact

SEQ ID NO: 63099 - DNA, 25 bp, Artificial
  Probe
cttaggtatgagaaggagcgacagc

SEQ ID NO: 63100 - DNA, 25 bp, Artificial
  Probe
cagtcggtgcttaggtatgagaagg

SEQ ID NO: 63101 - DNA, 25 bp, Artificial
  Probe
agacacgccatctaatgctactcac

SEQ ID NO: 63102 - DNA, 25 bp, Artificial
  Probe
catctaatgctactcactggatttt

SEQ ID NO: 63103 - DNA, 25 bp, Artificial
  Probe
agtcggtgcttaggtatgagaagga

SEQ ID NO: 63104 - DNA, 25 bp, Artificial
  Probe
tgcgagcaaggacataaattaaaag

SEQ ID NO: 63105 - DNA, 25 bp, Artificial
  Probe
atgcgagcaaggacataaattaaaa

SEQ ID NO: 63106 - DNA, 25 bp, Artificial
  Probe
acacgccatctaatgctactcactg

SEQ ID NO: 63107 - DNA, 25 bp, Artificial
  Probe
tccatgcgagcaaggacataaatta

SEQ ID NO: 63108 - DNA, 25 bp, Artificial
  Probe
gctcaatgtccctattttgtacttc

SEQ ID NO: 63109 - DNA, 25 bp, Artificial
  Probe
ctcaatgtccctattttgtacttcg

SEQ ID NO: 63110 - DNA, 25 bp, Artificial
  Probe
aatgtccctattttgtacttcgctg

SEQ ID NO: 63111 - DNA, 25 bp, Artificial
  Probe
cgagcaaggacataaattaaaagat

SEQ ID NO: 63112 - DNA, 25 bp, Artificial
  Probe
caatgtccctattttgtacttcgct

SEQ ID NO: 63113 - DNA, 25 bp, Artificial
  Probe
cgccatctaatgctactcactggat

SEQ ID NO: 63114 - DNA, 25 bp, Artificial
  Probe
tcaatgtccctattttgtacttcgc

SEQ ID NO: 63115 - DNA, 25 bp, Artificial
  Probe
ctaaagttccctccataccacccac

SEQ ID NO: 63116 - DNA, 25 bp, Artificial
  Probe
gacgatgaaggaatccaggagaagc

SEQ ID NO: 63117 - DNA, 25 bp, Artificial
  Probe
agctcaatgtccctattttgtactt

SEQ ID NO: 63118 - DNA, 25 bp, Artificial
  Probe
gattttgcagattttcttgtccatg

SEQ ID NO: 63119 - DNA, 25 bp, Artificial
  Probe
cacactagacacgccatctaatgct

SEQ ID NO: 63120 - DNA, 25 bp, Artificial
  Probe
cagagccctaaagttccctccatac

SEQ ID NO: 63121 - DNA, 25 bp, Artificial
  Probe
atgtccctattttgtacttcgctgg

SEQ ID NO: 63122 - DNA, 25 bp, Artificial
  Probe
gcttaggtatgagaaggagcgacag

SEQ ID NO: 63123 - DNA, 25 bp, Artificial
  Probe
ctcactggattttgcagattttctt

SEQ ID NO: 63124 - DNA, 25 bp, Artificial
  Probe
tactcactggattttgcagattttc

SEQ ID NO: 63125 - DNA, 25 bp, Artificial
  Probe
ctactcactggattttgcagatttt

SEQ ID NO: 63126 - DNA, 25 bp, Artificial
  Probe
actggattttgcagattttcttgtc

SEQ ID NO: 63127 - DNA, 25 bp, Artificial
  Probe
tcactggattttgcagattttcttg

SEQ ID NO: 63128 - DNA, 25 bp, Artificial
  Probe
ctcttctattagcttcctctctgtg

SEQ ID NO: 63129 - DNA, 25 bp, Artificial
  Probe
cctcttctattagcttcctctctgt

SEQ ID NO: 63130 - DNA, 25 bp, Artificial
  Probe
cttctatctagcctcttctattagc

SEQ ID NO: 63131 - DNA, 25 bp, Artificial
  Probe
gctcttacctttgctcttctatcta

SEQ ID NO: 63132 - DNA, 25 bp, Artificial
  Probe
atgctcttacctttgctcttctatc

SEQ ID NO: 63133 - DNA, 25 bp, Artificial
  Probe
tcttctattagcttcctctctgtgc

SEQ ID NO: 63134 - DNA, 25 bp, Artificial
  Probe
tctattagcttcctctctgtgcatt

SEQ ID NO: 63135 - DNA, 25 bp, Artificial
  Probe
ttctattagcttcctctctgtgcat

SEQ ID NO: 63136 - DNA, 25 bp, Artificial
  Probe
tgctcttacctttgctcttctatct

SEQ ID NO: 63137 - DNA, 25 bp, Artificial
  Probe
gcctcttctattagcttcctctctg

SEQ ID NO: 63138 - DNA, 25 bp, Artificial
  Probe
ttgctcttctatctagcctcttcta

SEQ ID NO: 63139 - DNA, 25 bp, Artificial
  Probe
tgctcttctatctagcctcttctat

SEQ ID NO: 63140 - DNA, 25 bp, Artificial
  Probe
cttctattagcttcctctctgtgca

SEQ ID NO: 63141 - DNA, 25 bp, Artificial
  Probe
gctcttctatctagcctcttctatt

SEQ ID NO: 63142 - DNA, 25 bp, Artificial
  Probe
catgctcttacctttgctcttctat

SEQ ID NO: 63143 - DNA, 25 bp, Artificial
  Probe
ctcttacctttgctcttctatctag

SEQ ID NO: 63144 - DNA, 25 bp, Artificial
  Probe
atctagcctcttctattagcttcct

SEQ ID NO: 63145 - DNA, 25 bp, Artificial
  Probe
tagcctcttctattagcttcctctc

SEQ ID NO: 63146 - DNA, 25 bp, Artificial
  Probe
ctagcctcttctattagcttcctct

SEQ ID NO: 63147 - DNA, 25 bp, Artificial
  Probe
tctagcctcttctattagcttcctc

SEQ ID NO: 63148 - DNA, 25 bp, Artificial
  Probe
tatctagcctcttctattagcttcc

SEQ ID NO: 63149 - DNA, 25 bp, Artificial
  Probe
ctattagcttcctctctgtgcattt

SEQ ID NO: 63150 - DNA, 25 bp, Artificial
  Probe
tcttctatctagcctcttctattag

SEQ ID NO: 63151 - DNA, 25 bp, Artificial
  Probe
ctcttctatctagcctcttctatta

SEQ ID NO: 63152 - DNA, 25 bp, Artificial
  Probe
agcctcttctattagcttcctctct

SEQ ID NO: 63153 - DNA, 25 bp, Artificial
  Probe
tcttacctttgctcttctatctagc

SEQ ID NO: 63154 - DNA, 25 bp, Artificial
  Probe
ctttgctcttctatctagcctcttc

SEQ ID NO: 63155 - DNA, 25 bp, Artificial
  Probe
cttacctttgctcttctatctagcc

SEQ ID NO: 63156 - DNA, 25 bp, Artificial
  Probe
tttgctcttctatctagcctcttct

SEQ ID NO: 63157 - DNA, 25 bp, Artificial
  Probe
ttacctttgctcttctatctagcct

SEQ ID NO: 63158 - DNA, 25 bp, Artificial
  Probe
tctatctagcctcttctattagctt

SEQ ID NO: 63159 - DNA, 25 bp, Artificial
  Probe
ttctatctagcctcttctattagct

SEQ ID NO: 63160 - DNA, 25 bp, Artificial
  Probe
tacctttgctcttctatctagcctc

SEQ ID NO: 63161 - DNA, 25 bp, Artificial
  Probe
ctatctagcctcttctattagcttc

SEQ ID NO: 63162 - DNA, 25 bp, Artificial
  Probe
cctttgctcttctatctagcctctt

SEQ ID NO: 63163 - DNA, 25 bp, Artificial
  Probe
acctttgctcttctatctagcctct

SEQ ID NO: 63164 - DNA, 25 bp, Artificial
  Probe
tattagcttcctctctgtgcatttt

SEQ ID NO: 63165 - DNA, 25 bp, Artificial
  Probe
ttcctctctgtgcattttcctaaag

SEQ ID NO: 63166 - DNA, 25 bp, Artificial
  Probe
cttcctctctgtgcattttcctaaa

SEQ ID NO: 63167 - DNA, 25 bp, Artificial
  Probe
attagcttcctctctgtgcattttc

SEQ ID NO: 63168 - DNA, 25 bp, Artificial
  Probe
aaatgggtgtcttcttctctgggac

SEQ ID NO: 63169 - DNA, 25 bp, Artificial
  Probe
taaggagaaaatgggtgtcttcttc

SEQ ID NO: 63170 - DNA, 25 bp, Artificial
  Probe
gggtaaggagaaaatgggtgtcttc

SEQ ID NO: 63171 - DNA, 25 bp, Artificial
  Probe
gtaaggagaaaatgggtgtcttctt

SEQ ID NO: 63172 - DNA, 25 bp, Artificial
  Probe
gaaaatgggtgtcttcttctctggg

SEQ ID NO: 63173 - DNA, 25 bp, Artificial
  Probe
ccttcacctaagtctccctttattt

SEQ ID NO: 63174 - DNA, 25 bp, Artificial
  Probe
ctgttcaagtttctttcatctccaa

SEQ ID NO: 63175 - DNA, 25 bp, Artificial
  Probe
cttccctgttcaagtttctttcatc

SEQ ID NO: 63176 - DNA, 25 bp, Artificial
  Probe
cttcttccctgttcaagtttctttc

SEQ ID NO: 63177 - DNA, 25 bp, Artificial
  Probe
ttccctgttcaagtttctttcatct

SEQ ID NO: 63178 - DNA, 25 bp, Artificial
  Probe
tcttccctgttcaagtttctttcat

SEQ ID NO: 63179 - DNA, 25 bp, Artificial
  Probe
tgttcaagtttctttcatctccaaa

SEQ ID NO: 63180 - DNA, 25 bp, Artificial
  Probe
ttcttccctgttcaagtttctttca

SEQ ID NO: 63181 - DNA, 25 bp, Artificial
  Probe
tccctgttcaagtttctttcatctc

SEQ ID NO: 63182 - DNA, 25 bp, Artificial
  Probe
cctgttcaagtttctttcatctcca

SEQ ID NO: 63183 - DNA, 25 bp, Artificial
  Probe
tgaaatcctgtagtaccaagaagag

SEQ ID NO: 63184 - DNA, 25 bp, Artificial
  Probe
atcctgtagtaccaagaagagaaag

SEQ ID NO: 63185 - DNA, 25 bp, Artificial
  Probe
gaaatcctgtagtaccaagaagaga

SEQ ID NO: 63186 - DNA, 25 bp, Artificial
  Probe
aatagctcttctgccttcacctaag

SEQ ID NO: 63187 - DNA, 25 bp, Artificial
  Probe
gaattactgcaacatacaggttacc

SEQ ID NO: 63188 - DNA, 25 bp, Artificial
  Probe
aatcctgtagtaccaagaagagaaa

SEQ ID NO: 63189 - DNA, 25 bp, Artificial
  Probe
aaatcctgtagtaccaagaagagaa

SEQ ID NO: 63190 - DNA, 25 bp, Artificial
  Probe
atgaaatcctgtagtaccaagaaga

SEQ ID NO: 63191 - DNA, 25 bp, Artificial
  Probe
attactgcaacatacaggttaccaa

SEQ ID NO: 63192 - DNA, 25 bp, Artificial
  Probe
aattactgcaacatacaggttacca

SEQ ID NO: 63193 - DNA, 25 bp, Artificial
  Probe
ccctgttcaagtttctttcatctcc

SEQ ID NO: 63194 - DNA, 25 bp, Artificial
  Probe
agaattactgcaacatacaggttac

SEQ ID NO: 63195 - DNA, 25 bp, Artificial
  Probe
tttccacagagaccactttcttagt

SEQ ID NO: 63196 - DNA, 25 bp, Artificial
  Probe
gccttcacctaagtctccctttatt

SEQ ID NO: 63197 - DNA, 25 bp, Artificial
  Probe
tcctgtagtaccaagaagagaaagc

SEQ ID NO: 63198 - DNA, 25 bp, Artificial
  Probe
aagaattactgcaacatacaggtta

SEQ ID NO: 63199 - DNA, 25 bp, Artificial
  Probe
gtagtaccaagaagagaaagctgaa

SEQ ID NO: 63200 - DNA, 25 bp, Artificial
  Probe
tagtaccaagaagagaaagctgaaa

SEQ ID NO: 63201 - DNA, 25 bp, Artificial
  Probe
ctgtagtaccaagaagagaaagctg

SEQ ID NO: 63202 - DNA, 25 bp, Artificial
  Probe
taaatagctcttctgccttcaccta

SEQ ID NO: 63203 - DNA, 25 bp, Artificial
  Probe
tgtagtaccaagaagagaaagctga

SEQ ID NO: 63204 - DNA, 25 bp, Artificial
  Probe
atagctcttctgccttcacctaagt

SEQ ID NO: 63205 - DNA, 25 bp, Artificial
  Probe
acaaagacatgacgctgacataaag

SEQ ID NO: 63206 - DNA, 25 bp, Artificial
  Probe
gacaaagacatgacgctgacataaa

SEQ ID NO: 63207 - DNA, 25 bp, Artificial
  Probe
tatgaaatcctgtagtaccaagaag

SEQ ID NO: 63208 - DNA, 25 bp, Artificial
  Probe
gtggacaaatatgaaatcctgtagt

SEQ ID NO: 63209 - DNA, 25 bp, Artificial
  Probe
agtggacaaatatgaaatcctgtag

SEQ ID NO: 63210 - DNA, 25 bp, Artificial
  Probe
acataaagggaaaggctgctgattt

SEQ ID NO: 63211 - DNA, 25 bp, Artificial
  Probe
aaatagctcttctgccttcacctaa

SEQ ID NO: 63212 - DNA, 25 bp, Artificial
  Probe
cctgtagtaccaagaagagaaagct

SEQ ID NO: 63213 - DNA, 25 bp, Artificial
  Probe
caaatttacaagccattggagatcc

SEQ ID NO: 63214 - DNA, 25 bp, Artificial
  Probe
ctcttctgccttcacctaagtctcc

SEQ ID NO: 63215 - DNA, 25 bp, Artificial
  Probe
ttagtggacaaatatgaaatcctgt

SEQ ID NO: 63216 - DNA, 25 bp, Artificial
  Probe
tgccttcacctaagtctccctttat

SEQ ID NO: 63217 - DNA, 25 bp, Artificial
  Probe
caaagacatgacgctgacataaagg

SEQ ID NO: 63218 - DNA, 25 bp, Artificial
  Probe
ttattctcaacttgtgtgctattcg

SEQ ID NO: 63219 - DNA, 25 bp, Artificial
  Probe
attctcaacttgtgtgctattcgta

SEQ ID NO: 63220 - DNA, 25 bp, Artificial
  Probe
tattctcaacttgtgtgctattcgt

SEQ ID NO: 63221 - DNA, 25 bp, Artificial
  Probe
ccaacacagcaattattctcaactt

SEQ ID NO: 63222 - DNA, 25 bp, Artificial
  Probe
ttctcaacttgtgtgctattcgtaa

SEQ ID NO: 63223 - DNA, 25 bp, Artificial
  Probe
tctcaacttgtgtgctattcgtaag

SEQ ID NO: 63224 - DNA, 25 bp, Artificial
  Probe
caacacagcaattattctcaacttg

SEQ ID NO: 63225 - DNA, 25 bp, Artificial
  Probe
acagcaattattctcaacttgtgtg

SEQ ID NO: 63226 - DNA, 25 bp, Artificial
  Probe
aacacagcaattattctcaacttgt

SEQ ID NO: 63227 - DNA, 25 bp, Artificial
  Probe
attattctcaacttgtgtgctattc

SEQ ID NO: 63228 - DNA, 25 bp, Artificial
  Probe
caattattctcaacttgtgtgctat

SEQ ID NO: 63229 - DNA, 25 bp, Artificial
  Probe
aattattctcaacttgtgtgctatt

SEQ ID NO: 63230 - DNA, 25 bp, Artificial
  Probe
tacccaacacagcaattattctcaa

SEQ ID NO: 63231 - DNA, 25 bp, Artificial
  Probe
tcttatgtcatcaagtagtagtacg

SEQ ID NO: 63232 - DNA, 25 bp, Artificial
  Probe
tagtacccaacacagcaattattct

SEQ ID NO: 63233 - DNA, 25 bp, Artificial
  Probe
atagtacccaacacagcaattattc

SEQ ID NO: 63234 - DNA, 25 bp, Artificial
  Probe
cgtggtgaatttactgtcaaatcat

SEQ ID NO: 63235 - DNA, 25 bp, Artificial
  Probe
agtacccaacacagcaattattctc

SEQ ID NO: 63236 - DNA, 25 bp, Artificial
  Probe
cccaacacagcaattattctcaact

SEQ ID NO: 63237 - DNA, 25 bp, Artificial
  Probe
gagttcctaaagcactagcaataag

SEQ ID NO: 63238 - DNA, 25 bp, Artificial
  Probe
ggagttcctaaagcactagcaataa

SEQ ID NO: 63239 - DNA, 25 bp, Artificial
  Probe
cttgtgtgctattcgtaagttccgt

SEQ ID NO: 63240 - DNA, 25 bp, Artificial
  Probe
gtacccaacacagcaattattctca

SEQ ID NO: 63241 - DNA, 25 bp, Artificial
  Probe
ttgtgtgctattcgtaagttccgtg

SEQ ID NO: 63242 - DNA, 25 bp, Artificial
  Probe
cgtaatagtacccaacacagcaatt

SEQ ID NO: 63243 - DNA, 25 bp, Artificial
  Probe
gcaattattctcaacttgtgtgcta

SEQ ID NO: 63244 - DNA, 25 bp, Artificial
  Probe
acccaacacagcaattattctcaac

SEQ ID NO: 63245 - DNA, 25 bp, Artificial
  Probe
gtaatagtacccaacacagcaatta

SEQ ID NO: 63246 - DNA, 25 bp, Artificial
  Probe
aatagtacccaacacagcaattatt

SEQ ID NO: 63247 - DNA, 25 bp, Artificial
  Probe
cttatgtcatcaagtagtagtacgt

SEQ ID NO: 63248 - DNA, 25 bp, Artificial
  Probe
tggagttcctaaagcactagcaata

SEQ ID NO: 63249 - DNA, 25 bp, Artificial
  Probe
gtggtgaatttactgtcaaatcatt

SEQ ID NO: 63250 - DNA, 25 bp, Artificial
  Probe
ctcaacttgtgtgctattcgtaagt

SEQ ID NO: 63251 - DNA, 25 bp, Artificial
  Probe
cagcaattattctcaacttgtgtgc

SEQ ID NO: 63252 - DNA, 25 bp, Artificial
  Probe
atggagttcctaaagcactagcaat

SEQ ID NO: 63253 - DNA, 25 bp, Artificial
  Probe
taatagtacccaacacagcaattat

SEQ ID NO: 63254 - DNA, 25 bp, Artificial
  Probe
cgtgcagtttggtatgaagtatatc

SEQ ID NO: 63255 - DNA, 25 bp, Artificial
  Probe
tggaaataaatcttacagttcagtg

SEQ ID NO: 63256 - DNA, 25 bp, Artificial
  Probe
acagttcagtgttaaatctacaaac

SEQ ID NO: 63257 - DNA, 25 bp, Artificial
  Probe
ccgtgcagtttggtatgaagtatat

SEQ ID NO: 63258 - DNA, 25 bp, Artificial
  Probe
ttcctcctttgtcaaacggtacttt

SEQ ID NO: 63259 - DNA, 25 bp, Artificial
  Probe
tttcctcctttgtcaaacggtactt

SEQ ID NO: 63260 - DNA, 25 bp, Artificial
  Probe
gacaactgtaaacgtggtgaattta

SEQ ID NO: 63261 - DNA, 25 bp, Artificial
  Probe
tggtgaatttactgtcaaatcattt

SEQ ID NO: 63262 - DNA, 25 bp, Artificial
  Probe
gtgcagtttggtatgaagtatatct

SEQ ID NO: 63263 - DNA, 25 bp, Artificial
  Probe
gaactgaacaaatcaaatcttgctg

SEQ ID NO: 63264 - DNA, 25 bp, Artificial
  Probe
agaactgaacaaatcaaatcttgct

SEQ ID NO: 63265 - DNA, 25 bp, Artificial
  Probe
tttaccagcgaatttaagaaagtct

SEQ ID NO: 63266 - DNA, 25 bp, Artificial
  Probe
cagaactgaacaaatcaaatcttgc

SEQ ID NO: 63267 - DNA, 25 bp, Artificial
  Probe
ccagaactgaacaaatcaaatcttg

SEQ ID NO: 63268 - DNA, 25 bp, Artificial
  Probe
tccagaactgaacaaatcaaatctt

SEQ ID NO: 63269 - DNA, 25 bp, Artificial
  Probe
atccagaactgaacaaatcaaatct

SEQ ID NO: 63270 - DNA, 25 bp, Artificial
  Probe
aactgaacaaatcaaatcttgctgc

SEQ ID NO: 63271 - DNA, 25 bp, Artificial
  Probe
ccagcgaatttaagaaagtctgttt

SEQ ID NO: 63272 - DNA, 25 bp, Artificial
  Probe
ttaccagcgaatttaagaaagtctg

SEQ ID NO: 63273 - DNA, 25 bp, Artificial
  Probe
taccagcgaatttaagaaagtctgt

SEQ ID NO: 63274 - DNA, 25 bp, Artificial
  Probe
tgagatccagaactgaacaaatcaa

SEQ ID NO: 63275 - DNA, 25 bp, Artificial
  Probe
gagatccagaactgaacaaatcaaa

SEQ ID NO: 63276 - DNA, 25 bp, Artificial
  Probe
agcgaatttaagaaagtctgtttac

SEQ ID NO: 63277 - DNA, 25 bp, Artificial
  Probe
agatccagaactgaacaaatcaaat

SEQ ID NO: 63278 - DNA, 25 bp, Artificial
  Probe
accagcgaatttaagaaagtctgtt

SEQ ID NO: 63279 - DNA, 25 bp, Artificial
  Probe
gcgaatttaagaaagtctgtttact

SEQ ID NO: 63280 - DNA, 25 bp, Artificial
  Probe
gatccagaactgaacaaatcaaatc

SEQ ID NO: 63281 - DNA, 25 bp, Artificial
  Probe
ctgagatccagaactgaacaaatca

SEQ ID NO: 63282 - DNA, 25 bp, Artificial
  Probe
gaacaaatcaaatcttgctgcgatc

SEQ ID NO: 63283 - DNA, 25 bp, Artificial
  Probe
cagcgaatttaagaaagtctgttta

SEQ ID NO: 63284 - DNA, 25 bp, Artificial
  Probe
tgaacaaatcaaatcttgctgcgat

SEQ ID NO: 63285 - DNA, 25 bp, Artificial
  Probe
aacaaatcaaatcttgctgcgatca

SEQ ID NO: 63286 - DNA, 25 bp, Artificial
  Probe
gctgagatccagaactgaacaaatc

SEQ ID NO: 63287 - DNA, 25 bp, Artificial
  Probe
ctgaacaaatcaaatcttgctgcga

SEQ ID NO: 63288 - DNA, 25 bp, Artificial
  Probe
aaatcaaatcttgctgcgatcagag

SEQ ID NO: 63289 - DNA, 25 bp, Artificial
  Probe
actgaacaaatcaaatcttgctgcg

SEQ ID NO: 63290 - DNA, 25 bp, Artificial
  Probe
caaatcaaatcttgctgcgatcaga

SEQ ID NO: 63291 - DNA, 25 bp, Artificial
  Probe
acaaatcaaatcttgctgcgatcag

SEQ ID NO: 63292 - DNA, 25 bp, Artificial
  Probe
ttgtgtttaactcccaactacctgg

SEQ ID NO: 63293 - DNA, 25 bp, Artificial
  Probe
ttttaccagcgaatttaagaaagtc

SEQ ID NO: 63294 - DNA, 25 bp, Artificial
  Probe
ggctgagatccagaactgaacaaat

SEQ ID NO: 63295 - DNA, 25 bp, Artificial
  Probe
actacctggagttttacaatgtcag

SEQ ID NO: 63296 - DNA, 25 bp, Artificial
  Probe
gacctcttcgggcaagatagaattt

SEQ ID NO: 63297 - DNA, 25 bp, Artificial
  Probe
tgtgtttaactcccaactacctgga

SEQ ID NO: 63298 - DNA, 25 bp, Artificial
  Probe
gagttttacaatgtcagctaggaaa

SEQ ID NO: 63299 - DNA, 25 bp, Artificial
  Probe
ggagttttacaatgtcagctaggaa

SEQ ID NO: 63300 - DNA, 25 bp, Artificial
  Probe
ctacctggagttttacaatgtcagc

SEQ ID NO: 63301 - DNA, 25 bp, Artificial
  Probe
tggagttttacaatgtcagctagga

SEQ ID NO: 63302 - DNA, 25 bp, Artificial
  Probe
gttgtgtttaactcccaactacctg

SEQ ID NO: 63303 - DNA, 25 bp, Artificial
  Probe
ctggagttttacaatgtcagctagg

SEQ ID NO: 63304 - DNA, 25 bp, Artificial
  Probe
cctggagttttacaatgtcagctag

SEQ ID NO: 63305 - DNA, 25 bp, Artificial
  Probe
aactacctggagttttacaatgtca

SEQ ID NO: 63306 - DNA, 25 bp, Artificial
  Probe
caactacctggagttttacaatgtc

SEQ ID NO: 63307 - DNA, 25 bp, Artificial
  Probe
acctggagttttacaatgtcagcta

SEQ ID NO: 63308 - DNA, 25 bp, Artificial
  Probe
gtctagtatcgccgacctggttttc

SEQ ID NO: 63309 - DNA, 25 bp, Artificial
  Probe
aaccagctcctttaacagtaccgtg

SEQ ID NO: 63310 - DNA, 25 bp, Artificial
  Probe
caaccagctcctttaacagtaccgt

SEQ ID NO: 63311 - DNA, 25 bp, Artificial
  Probe
cccaaccagctcctttaacagtacc

SEQ ID NO: 63312 - DNA, 25 bp, Artificial
  Probe
cagctcctttaacagtaccgtgttc

SEQ ID NO: 63313 - DNA, 25 bp, Artificial
  Probe
ctcctttaacagtaccgtgttcgga

SEQ ID NO: 63314 - DNA, 25 bp, Artificial
  Probe
tcctttaacagtaccgtgttcggac

SEQ ID NO: 63315 - DNA, 25 bp, Artificial
  Probe
agctcctttaacagtaccgtgttcg

SEQ ID NO: 63316 - DNA, 25 bp, Artificial
  Probe
ccagctcctttaacagtaccgtgtt

SEQ ID NO: 63317 - DNA, 25 bp, Artificial
  Probe
ccccaaccagctcctttaacagtac

SEQ ID NO: 63318 - DNA, 25 bp, Artificial
  Probe
tccccaaccagctcctttaacagta

SEQ ID NO: 63319 - DNA, 25 bp, Artificial
  Probe
agaacagaccagccaccttttcttc

SEQ ID NO: 63320 - DNA, 25 bp, Artificial
  Probe
gagaacagaccagccaccttttctt

SEQ ID NO: 63321 - DNA, 25 bp, Artificial
  Probe
gatgtcatgatgacccagtcagacc

SEQ ID NO: 63322 - DNA, 25 bp, Artificial
  Probe
cgatgtcatgatgacccagtcagac

SEQ ID NO: 63323 - DNA, 25 bp, Artificial
  Probe
atgtagatggagaaggattggagta

SEQ ID NO: 63324 - DNA, 25 bp, Artificial
  Probe
tgtagatggagaaggattggagtaa

SEQ ID NO: 63325 - DNA, 25 bp, Artificial
  Probe
gtagatggagaaggattggagtaat

SEQ ID NO: 63326 - DNA, 25 bp, Artificial
  Probe
gctgaactattactgctaactctgc

SEQ ID NO: 63327 - DNA, 25 bp, Artificial
  Probe
ttcatgtagatggagaaggattgga

SEQ ID NO: 63328 - DNA, 25 bp, Artificial
  Probe
tcatgtagatggagaaggattggag

SEQ ID NO: 63329 - DNA, 25 bp, Artificial
  Probe
catgtagatggagaaggattggagt

SEQ ID NO: 63330 - DNA, 25 bp, Artificial
  Probe
tagatggagaaggattggagtaatc

SEQ ID NO: 63331 - DNA, 25 bp, Artificial
  Probe
ggatgagtttgatgggaaagttaca

SEQ ID NO: 63332 - DNA, 25 bp, Artificial
  Probe
tggatgagtttgatgggaaagttac

SEQ ID NO: 63333 - DNA, 25 bp, Artificial
  Probe
gtggatgagtttgatgggaaagtta

SEQ ID NO: 63334 - DNA, 25 bp, Artificial
  Probe
gcaaacacaaatcttaggagttctt

SEQ ID NO: 63335 - DNA, 25 bp, Artificial
  Probe
gatgagtttgatgggaaagttacat

SEQ ID NO: 63336 - DNA, 25 bp, Artificial
  Probe
agatggagaaggattggagtaatcg

SEQ ID NO: 63337 - DNA, 25 bp, Artificial
  Probe
gttgagccagatataaaggttccag

SEQ ID NO: 63338 - DNA, 25 bp, Artificial
  Probe
caggttgagccagatataaaggttc

SEQ ID NO: 63339 - DNA, 25 bp, Artificial
  Probe
tctgtagtcttaacttaacgtggtg

SEQ ID NO: 63340 - DNA, 25 bp, Artificial
  Probe
gtctgtagtcttaacttaacgtggt

SEQ ID NO: 63341 - DNA, 25 bp, Artificial
  Probe
ttgagccagatataaaggttccagt

SEQ ID NO: 63342 - DNA, 25 bp, Artificial
  Probe
atttcccaggttgagccagatataa

SEQ ID NO: 63343 - DNA, 25 bp, Artificial
  Probe
ctgtagtcttaacttaacgtggtgg

SEQ ID NO: 63344 - DNA, 25 bp, Artificial
  Probe
tttcccaggttgagccagatataaa

SEQ ID NO: 63345 - DNA, 25 bp, Artificial
  Probe
aaacacaaatcttaggagttcttca

SEQ ID NO: 63346 - DNA, 25 bp, Artificial
  Probe
ggcaaacacaaatcttaggagttct

SEQ ID NO: 63347 - DNA, 25 bp, Artificial
  Probe
gtagtcttaacttaacgtggtggtg

SEQ ID NO: 63348 - DNA, 25 bp, Artificial
  Probe
aacacaaatcttaggagttcttcat

SEQ ID NO: 63349 - DNA, 25 bp, Artificial
  Probe
caaacacaaatcttaggagttcttc

SEQ ID NO: 63350 - DNA, 25 bp, Artificial
  Probe
tgtagtcttaacttaacgtggtggt

SEQ ID NO: 63351 - DNA, 25 bp, Artificial
  Probe
tttcatgtagatggagaaggattgg

SEQ ID NO: 63352 - DNA, 25 bp, Artificial
  Probe
ctgatttcatgtagatggagaagga

SEQ ID NO: 63353 - DNA, 25 bp, Artificial
  Probe
tgagtttgatgggaaagttacatat

SEQ ID NO: 63354 - DNA, 25 bp, Artificial
  Probe
atgagtttgatgggaaagttacata

SEQ ID NO: 63355 - DNA, 25 bp, Artificial
  Probe
tgagccagatataaaggttccagtg

SEQ ID NO: 63356 - DNA, 25 bp, Artificial
  Probe
aggttgagccagatataaaggttcc

SEQ ID NO: 63357 - DNA, 25 bp, Artificial
  Probe
ttcccaggttgagccagatataaag

SEQ ID NO: 63358 - DNA, 25 bp, Artificial
  Probe
tctgatttcatgtagatggagaagg

SEQ ID NO: 63359 - DNA, 25 bp, Artificial
  Probe
ccttctgatttcatgtagatggaga

SEQ ID NO: 63360 - DNA, 25 bp, Artificial
  Probe
accttctgatttcatgtagatggag

SEQ ID NO: 63361 - DNA, 25 bp, Artificial
  Probe
aaccttctgatttcatgtagatgga

SEQ ID NO: 63362 - DNA, 25 bp, Artificial
  Probe
catttcccaggttgagccagatata

SEQ ID NO: 63363 - DNA, 25 bp, Artificial
  Probe
gaaccttctgatttcatgtagatgg

SEQ ID NO: 63364 - DNA, 25 bp, Artificial
  Probe
tgatttcatgtagatggagaaggat

SEQ ID NO: 63365 - DNA, 25 bp, Artificial
  Probe
agtggatgagtttgatgggaaagtt

SEQ ID NO: 63366 - DNA, 25 bp, Artificial
  Probe
ggttgagccagatataaaggttcca

SEQ ID NO: 63367 - DNA, 25 bp, Artificial
  Probe
ccaggttgagccagatataaaggtt

SEQ ID NO: 63368 - DNA, 25 bp, Artificial
  Probe
taatcagaaggaaacccagaagaag

SEQ ID NO: 63369 - DNA, 25 bp, Artificial
  Probe
ataatcagaaggaaacccagaagaa

SEQ ID NO: 63370 - DNA, 25 bp, Artificial
  Probe
aataatcagaaggaaacccagaaga

SEQ ID NO: 63371 - DNA, 25 bp, Artificial
  Probe
aaataatcagaaggaaacccagaag

SEQ ID NO: 63372 - DNA, 25 bp, Artificial
  Probe
aatcagaaggaaacccagaagaaga

SEQ ID NO: 63373 - DNA, 25 bp, Artificial
  Probe
atcagaaggaaacccagaagaagag

SEQ ID NO: 63374 - DNA, 25 bp, Artificial
  Probe
taaataatcagaaggaaacccagaa

SEQ ID NO: 63375 - DNA, 25 bp, Artificial
  Probe
ttaaataatcagaaggaaacccaga

SEQ ID NO: 63376 - DNA, 25 bp, Artificial
  Probe
gctttacttggttagacgaaattaa

SEQ ID NO: 63377 - DNA, 25 bp, Artificial
  Probe
cagctttacttggttagacgaaatt

SEQ ID NO: 63378 - DNA, 25 bp, Artificial
  Probe
tcagctttacttggttagacgaaat

SEQ ID NO: 63379 - DNA, 25 bp, Artificial
  Probe
atcagctttacttggttagacgaaa

SEQ ID NO: 63380 - DNA, 25 bp, Artificial
  Probe
gatcagctttacttggttagacgaa

SEQ ID NO: 63381 - DNA, 25 bp, Artificial
  Probe
aatattgtgctggacagtgaggatg

SEQ ID NO: 63382 - DNA, 25 bp, Artificial
  Probe
agctttacttggttagacgaaatta

SEQ ID NO: 63383 - DNA, 25 bp, Artificial
  Probe
attaaataatcagaaggaaacccag

SEQ ID NO: 63384 - DNA, 25 bp, Artificial
  Probe
ctctggatcagctttacttggttag

SEQ ID NO: 63385 - DNA, 25 bp, Artificial
  Probe
ctggatcagctttacttggttagac

SEQ ID NO: 63386 - DNA, 25 bp, Artificial
  Probe
tctggatcagctttacttggttaga

SEQ ID NO: 63387 - DNA, 25 bp, Artificial
  Probe
tctctggatcagctttacttggtta

SEQ ID NO: 63388 - DNA, 25 bp, Artificial
  Probe
ggatcagctttacttggttagacga

SEQ ID NO: 63389 - DNA, 25 bp, Artificial
  Probe
tggatcagctttacttggttagacg

SEQ ID NO: 63390 - DNA, 25 bp, Artificial
  Probe
aattaaataatcagaaggaaaccca

SEQ ID NO: 63391 - DNA, 25 bp, Artificial
  Probe
tcagaaggaaacccagaagaagagg

SEQ ID NO: 63392 - DNA, 25 bp, Artificial
  Probe
ctctctggatcagctttacttggtt

SEQ ID NO: 63393 - DNA, 25 bp, Artificial
  Probe
atattgtgctggacagtgaggatgg

SEQ ID NO: 63394 - DNA, 25 bp, Artificial
  Probe
agacgaaattaaataatcagaagga

SEQ ID NO: 63395 - DNA, 25 bp, Artificial
  Probe
ctctctctggatcagctttacttgg

SEQ ID NO: 63396 - DNA, 25 bp, Artificial
  Probe
attcacaggtttgaagtattaaagc

SEQ ID NO: 63397 - DNA, 25 bp, Artificial
  Probe
ttcacaggtttgaagtattaaagct

SEQ ID NO: 63398 - DNA, 25 bp, Artificial
  Probe
tctctctggatcagctttacttggt

SEQ ID NO: 63399 - DNA, 25 bp, Artificial
  Probe
aaattaaataatcagaaggaaaccc

SEQ ID NO: 63400 - DNA, 25 bp, Artificial
  Probe
acaggtttgaagtattaaagcttgg

SEQ ID NO: 63401 - DNA, 25 bp, Artificial
  Probe
ctttacttggttagacgaaattaaa

SEQ ID NO: 63402 - DNA, 25 bp, Artificial
  Probe
gacgaaattaaataatcagaaggaa

SEQ ID NO: 63403 - DNA, 25 bp, Artificial
  Probe
caggtttgaagtattaaagcttggc

SEQ ID NO: 63404 - DNA, 25 bp, Artificial
  Probe
cacaggtttgaagtattaaagcttg

SEQ ID NO: 63405 - DNA, 25 bp, Artificial
  Probe
tggttagacgaaattaaataatcag

SEQ ID NO: 63406 - DNA, 25 bp, Artificial
  Probe
tcacaggtttgaagtattaaagctt

SEQ ID NO: 63407 - DNA, 25 bp, Artificial
  Probe
acactgtattcacaggtttgaagta

SEQ ID NO: 63408 - DNA, 25 bp, Artificial
  Probe
gctctctctggatcagctttacttg

SEQ ID NO: 63409 - DNA, 25 bp, Artificial
  Probe
ttgacactgtattcacaggtttgaa

SEQ ID NO: 63410 - DNA, 25 bp, Artificial
  Probe
tttgacactgtattcacaggtttga

SEQ ID NO: 63411 - DNA, 25 bp, Artificial
  Probe
cactgtattcacaggtttgaagtat

SEQ ID NO: 63412 - DNA, 25 bp, Artificial
  Probe
acgaaattaaataatcagaaggaaa

SEQ ID NO: 63413 - DNA, 25 bp, Artificial
  Probe
tcctatctcaatctgttgtacggtt

SEQ ID NO: 63414 - DNA, 25 bp, Artificial
  Probe
ctcctatctcaatctgttgtacggt

SEQ ID NO: 63415 - DNA, 25 bp, Artificial
  Probe
aggctcctatctcaatctgttgtac

SEQ ID NO: 63416 - DNA, 25 bp, Artificial
  Probe
caggctcctatctcaatctgttgta

SEQ ID NO: 63417 - DNA, 25 bp, Artificial
  Probe
gtcactcctgcctctctatttattt

SEQ ID NO: 63418 - DNA, 25 bp, Artificial
  Probe
tactcttgttcaagcctgtgatctt

SEQ ID NO: 63419 - DNA, 25 bp, Artificial
  Probe
ttactcttgttcaagcctgtgatct

SEQ ID NO: 63420 - DNA, 25 bp, Artificial
  Probe
tcatttatcaaactcggaacttcaa

SEQ ID NO: 63421 - DNA, 25 bp, Artificial
  Probe
cacttatttgggtttgctcatttag

SEQ ID NO: 63422 - DNA, 25 bp, Artificial
  Probe
tcactcctgcctctctatttattta

SEQ ID NO: 63423 - DNA, 25 bp, Artificial
  Probe
ttcatttatcaaactcggaacttca

SEQ ID NO: 63424 - DNA, 25 bp, Artificial
  Probe
gttgtacggtttggatgctatttaa

SEQ ID NO: 63425 - DNA, 25 bp, Artificial
  Probe
ggtcactcctgcctctctatttatt

SEQ ID NO: 63426 - DNA, 25 bp, Artificial
  Probe
catttatcaaactcggaacttcaaa

SEQ ID NO: 63427 - DNA, 25 bp, Artificial
  Probe
tgttgtacggtttggatgctattta

SEQ ID NO: 63428 - DNA, 25 bp, Artificial
  Probe
gctcctatctcaatctgttgtacgg

SEQ ID NO: 63429 - DNA, 25 bp, Artificial
  Probe
ggctcctatctcaatctgttgtacg

SEQ ID NO: 63430 - DNA, 25 bp, Artificial
  Probe
ttcctatagttaagagccgcagttc

SEQ ID NO: 63431 - DNA, 25 bp, Artificial
  Probe
atttatcaaactcggaacttcaaag

SEQ ID NO: 63432 - DNA, 25 bp, Artificial
  Probe
agtaatctgcattcttgttcactta

SEQ ID NO: 63433 - DNA, 25 bp, Artificial
  Probe
ctatctcaatctgttgtacggtttg

SEQ ID NO: 63434 - DNA, 25 bp, Artificial
  Probe
gtaatctgcattcttgttcacttaa

SEQ ID NO: 63435 - DNA, 25 bp, Artificial
  Probe
cctatctcaatctgttgtacggttt

SEQ ID NO: 63436 - DNA, 25 bp, Artificial
  Probe
ttatcaaactcggaacttcaaagtg

SEQ ID NO: 63437 - DNA, 25 bp, Artificial
  Probe
ctctctttctgctcttgagtaattt

SEQ ID NO: 63438 - DNA, 25 bp, Artificial
  Probe
ctcatttagcacactaaggtcgtat

SEQ ID NO: 63439 - DNA, 25 bp, Artificial
  Probe
cactcctgcctctctatttatttat

SEQ ID NO: 63440 - DNA, 25 bp, Artificial
  Probe
tatctcaatctgttgtacggtttgg

SEQ ID NO: 63441 - DNA, 25 bp, Artificial
  Probe
tcatttagcacactaaggtcgtata

SEQ ID NO: 63442 - DNA, 25 bp, Artificial
  Probe
tttatcaaactcggaacttcaaagt

SEQ ID NO: 63443 - DNA, 25 bp, Artificial
  Probe
ttagcacactaaggtcgtatactgt

SEQ ID NO: 63444 - DNA, 25 bp, Artificial
  Probe
tttgtctttactcttgttcaagcct

SEQ ID NO: 63445 - DNA, 25 bp, Artificial
  Probe
agtggttcaaactgtttcagaaatt

SEQ ID NO: 63446 - DNA, 25 bp, Artificial
  Probe
ctgttgtacggtttggatgctattt

SEQ ID NO: 63447 - DNA, 25 bp, Artificial
  Probe
tggtcactcctgcctctctatttat

SEQ ID NO: 63448 - DNA, 25 bp, Artificial
  Probe
ttcagttacttgtgctgtgtttcaa

SEQ ID NO: 63449 - DNA, 25 bp, Artificial
  Probe
ttgtacggtttggatgctatttaaa

SEQ ID NO: 63450 - DNA, 25 bp, Artificial
  Probe
tttactcttgttcaagcctgtgatc

SEQ ID NO: 63451 - DNA, 25 bp, Artificial
  Probe
ctttactcttgttcaagcctgtgat

SEQ ID NO: 63452 - DNA, 25 bp, Artificial
  Probe
ttgtctttactcttgttcaagcctg

SEQ ID NO: 63453 - DNA, 25 bp, Artificial
  Probe
ccacttatttgggtttgctcattta

SEQ ID NO: 63454 - DNA, 25 bp, Artificial
  Probe
tctgctcttgagtaatttaatgttc

SEQ ID NO: 63455 - DNA, 25 bp, Artificial
  Probe
tatcaaactcggaacttcaaagtgc

SEQ ID NO: 63456 - DNA, 25 bp, Artificial
  Probe
ctgtgtttcaagtaatctgcattct

SEQ ID NO: 63457 - DNA, 25 bp, Artificial
  Probe
cctatagttaagagccgcagttctg

SEQ ID NO: 63458 - DNA, 25 bp, Artificial
  Probe
attctaactgggtcacttctgtatg

SEQ ID NO: 63459 - DNA, 25 bp, Artificial
  Probe
gattctaactgggtcacttctgtat

SEQ ID NO: 63460 - DNA, 25 bp, Artificial
  Probe
ttctaactgggtcacttctgtatgg

SEQ ID NO: 63461 - DNA, 25 bp, Artificial
  Probe
tgattctaactgggtcacttctgta

SEQ ID NO: 63462 - DNA, 25 bp, Artificial
  Probe
gacaaagtctcctgattctaactgg

SEQ ID NO: 63463 - DNA, 25 bp, Artificial
  Probe
aaagtctcctgattctaactgggtc

SEQ ID NO: 63464 - DNA, 25 bp, Artificial
  Probe
ctgattctaactgggtcacttctgt

SEQ ID NO: 63465 - DNA, 25 bp, Artificial
  Probe
caaagtctcctgattctaactgggt

SEQ ID NO: 63466 - DNA, 25 bp, Artificial
  Probe
acaaagtctcctgattctaactggg

SEQ ID NO: 63467 - DNA, 25 bp, Artificial
  Probe
ggacaaagtctcctgattctaactg

SEQ ID NO: 63468 - DNA, 25 bp, Artificial
  Probe
ctggacaaagtctcctgattctaac

SEQ ID NO: 63469 - DNA, 25 bp, Artificial
  Probe
tctggacaaagtctcctgattctaa

SEQ ID NO: 63470 - DNA, 25 bp, Artificial
  Probe
tggacaaagtctcctgattctaact

SEQ ID NO: 63471 - DNA, 25 bp, Artificial
  Probe
ctcctgattctaactgggtcacttc

SEQ ID NO: 63472 - DNA, 25 bp, Artificial
  Probe
ctgaccaactgagagcataaaccat

SEQ ID NO: 63473 - DNA, 25 bp, Artificial
  Probe
gtctggacaaagtctcctgattcta

SEQ ID NO: 63474 - DNA, 25 bp, Artificial
  Probe
cctgattctaactgggtcacttctg

SEQ ID NO: 63475 - DNA, 25 bp, Artificial
  Probe
tcctgattctaactgggtcacttct

SEQ ID NO: 63476 - DNA, 25 bp, Artificial
  Probe
tctcctgattctaactgggtcactt

SEQ ID NO: 63477 - DNA, 25 bp, Artificial
  Probe
aagtctcctgattctaactgggtca

SEQ ID NO: 63478 - DNA, 25 bp, Artificial
  Probe
ctaactgggtcacttctgtatggga

SEQ ID NO: 63479 - DNA, 25 bp, Artificial
  Probe
tctaactgggtcacttctgtatggg

SEQ ID NO: 63480 - DNA, 25 bp, Artificial
  Probe
gagtctggacaaagtctcctgattc

SEQ ID NO: 63481 - DNA, 25 bp, Artificial
  Probe
gtctcctgattctaactgggtcact

SEQ ID NO: 63482 - DNA, 25 bp, Artificial
  Probe
agtctcctgattctaactgggtcac

SEQ ID NO: 63483 - DNA, 25 bp, Artificial
  Probe
ttccctgaccaactgagagcataaa

SEQ ID NO: 63484 - DNA, 25 bp, Artificial
  Probe
gaccaactgagagcataaaccatgt

SEQ ID NO: 63485 - DNA, 25 bp, Artificial
  Probe
tgaccaactgagagcataaaccatg

SEQ ID NO: 63486 - DNA, 25 bp, Artificial
  Probe
cttatgcactaccactggactcctt

SEQ ID NO: 63487 - DNA, 25 bp, Artificial
  Probe
agtctggacaaagtctcctgattct

SEQ ID NO: 63488 - DNA, 25 bp, Artificial
  Probe
ccaactgagagcataaaccatgtgt

SEQ ID NO: 63489 - DNA, 25 bp, Artificial
  Probe
accaactgagagcataaaccatgtg

SEQ ID NO: 63490 - DNA, 25 bp, Artificial
  Probe
acagtttagctctctccatacttgg

SEQ ID NO: 63491 - DNA, 25 bp, Artificial
  Probe
cttcaatatcatctgctccagggag

SEQ ID NO: 63492 - DNA, 25 bp, Artificial
  Probe
taaaacttccctgaccaactgagag

SEQ ID NO: 63493 - DNA, 25 bp, Artificial
  Probe
ctaaaacttccctgaccaactgaga

SEQ ID NO: 63494 - DNA, 25 bp, Artificial
  Probe
tgagtctggacaaagtctcctgatt

SEQ ID NO: 63495 - DNA, 25 bp, Artificial
  Probe
ttatgcactaccactggactccttg

SEQ ID NO: 63496 - DNA, 25 bp, Artificial
  Probe
taactgggtcacttctgtatgggac

SEQ ID NO: 63497 - DNA, 25 bp, Artificial
  Probe
cttccctgaccaactgagagcataa

SEQ ID NO: 63498 - DNA, 25 bp, Artificial
  Probe
agttatgtgctgggtgtctgctaaa

SEQ ID NO: 63499 - DNA, 25 bp, Artificial
  Probe
ctgagtctggacaaagtctcctgat

SEQ ID NO: 63500 - DNA, 25 bp, Artificial
  Probe
tccctgaccaactgagagcataaac

SEQ ID NO: 63501 - DNA, 25 bp, Artificial
  Probe
ccttcaatatcatctgctccaggga

SEQ ID NO: 63502 - DNA, 25 bp, Artificial
  Probe
cctgaccaactgagagcataaacca

SEQ ID NO: 63503 - DNA, 25 bp, Artificial
  Probe
gtttgtagagggcagagtgataatg

SEQ ID NO: 63504 - DNA, 25 bp, Artificial
  Probe
catttatgtctgtcaggagtcgttg

SEQ ID NO: 63505 - DNA, 25 bp, Artificial
  Probe
tttgtagagggcagagtgataatgg

SEQ ID NO: 63506 - DNA, 25 bp, Artificial
  Probe
ggtttgtagagggcagagtgataat

SEQ ID NO: 63507 - DNA, 25 bp, Artificial
  Probe
ccatttatgtctgtcaggagtcgtt

SEQ ID NO: 63508 - DNA, 25 bp, Artificial
  Probe
atttatgtctgtcaggagtcgttgc

SEQ ID NO: 63509 - DNA, 25 bp, Artificial
  Probe
ttgtagagggcagagtgataatggg

SEQ ID NO: 63510 - DNA, 25 bp, Artificial
  Probe
aacatctgtcttcataaaaccaagc

SEQ ID NO: 63511 - DNA, 25 bp, Artificial
  Probe
accatttatgtctgtcaggagtcgt

SEQ ID NO: 63512 - DNA, 25 bp, Artificial
  Probe
gaccatttatgtctgtcaggagtcg

SEQ ID NO: 63513 - DNA, 25 bp, Artificial
  Probe
gtagagggcagagtgataatgggag

SEQ ID NO: 63514 - DNA, 25 bp, Artificial
  Probe
gggtttgtagagggcagagtgataa

SEQ ID NO: 63515 - DNA, 25 bp, Artificial
  Probe
gaacatctgtcttcataaaaccaag

SEQ ID NO: 63516 - DNA, 25 bp, Artificial
  Probe
tagagggcagagtgataatgggagt

SEQ ID NO: 63517 - DNA, 25 bp, Artificial
  Probe
ccaaggctgaccatttatgtctgtc

SEQ ID NO: 63518 - DNA, 25 bp, Artificial
  Probe
gtccaaggctgaccatttatgtctg

SEQ ID NO: 63519 - DNA, 25 bp, Artificial
  Probe
tgtagagggcagagtgataatggga

SEQ ID NO: 63520 - DNA, 25 bp, Artificial
  Probe
acatctgtcttcataaaaccaagct

SEQ ID NO: 63521 - DNA, 25 bp, Artificial
  Probe
tcctaacataaaagtgaacatctgt

SEQ ID NO: 63522 - DNA, 25 bp, Artificial
  Probe
catctgtcttcataaaaccaagcta

SEQ ID NO: 63523 - DNA, 25 bp, Artificial
  Probe
cctaacataaaagtgaacatctgtc

SEQ ID NO: 63524 - DNA, 25 bp, Artificial
  Probe
tgtcttcataaaaccaagctatctc

SEQ ID NO: 63525 - DNA, 25 bp, Artificial
  Probe
tctgtcttcataaaaccaagctatc

SEQ ID NO: 63526 - DNA, 25 bp, Artificial
  Probe
ctgtcttcataaaaccaagctatct

SEQ ID NO: 63527 - DNA, 25 bp, Artificial
  Probe
ttcctaacataaaagtgaacatctg

SEQ ID NO: 63528 - DNA, 25 bp, Artificial
  Probe
aacataaaagtgaacatctgtcttc

SEQ ID NO: 63529 - DNA, 25 bp, Artificial
  Probe
gtcttcataaaaccaagctatctct

SEQ ID NO: 63530 - DNA, 25 bp, Artificial
  Probe
agctctgacattttcctaacataaa

SEQ ID NO: 63531 - DNA, 25 bp, Artificial
  Probe
tccaaggctgaccatttatgtctgt

SEQ ID NO: 63532 - DNA, 25 bp, Artificial
  Probe
tctggaaagaagtttaattttgtga

SEQ ID NO: 63533 - DNA, 25 bp, Artificial
  Probe
atctgtcttcataaaaccaagctat

SEQ ID NO: 63534 - DNA, 25 bp, Artificial
  Probe
gctctgacattttcctaacataaaa

SEQ ID NO: 63535 - DNA, 25 bp, Artificial
  Probe
tcttcataaaaccaagctatctctt

SEQ ID NO: 63536 - DNA, 25 bp, Artificial
  Probe
ctaacataaaagtgaacatctgtct

SEQ ID NO: 63537 - DNA, 25 bp, Artificial
  Probe
tttcctaacataaaagtgaacatct

SEQ ID NO: 63538 - DNA, 25 bp, Artificial
  Probe
ttatgtctgtcaggagtcgttgcag

SEQ ID NO: 63539 - DNA, 25 bp, Artificial
  Probe
gtgaacatctgtcttcataaaacca

SEQ ID NO: 63540 - DNA, 25 bp, Artificial
  Probe
agtgaacatctgtcttcataaaacc

SEQ ID NO: 63541 - DNA, 25 bp, Artificial
  Probe
ctggaaagaagtttaattttgtgat

SEQ ID NO: 63542 - DNA, 25 bp, Artificial
  Probe
ataatgggagtcgtgcgatgtcttc

SEQ ID NO: 63543 - DNA, 25 bp, Artificial
  Probe
gataatgggagtcgtgcgatgtctt

SEQ ID NO: 63544 - DNA, 25 bp, Artificial
  Probe
caggggcagacttactgaaactaac

SEQ ID NO: 63545 - DNA, 25 bp, Artificial
  Probe
tttatgtctgtcaggagtcgttgca

SEQ ID NO: 63546 - DNA, 25 bp, Artificial
  Probe
cttcataaaaccaagctatctcttt

SEQ ID NO: 63547 - DNA, 25 bp, Artificial
  Probe
tgaacatctgtcttcataaaaccaa

SEQ ID NO: 63548 - DNA, 25 bp, Artificial
  Probe
cagatatatgaccccaagtattgcc

SEQ ID NO: 63549 - DNA, 25 bp, Artificial
  Probe
ggcagatatatgaccccaagtattg

SEQ ID NO: 63550 - DNA, 25 bp, Artificial
  Probe
cggcagatatatgaccccaagtatt

SEQ ID NO: 63551 - DNA, 25 bp, Artificial
  Probe
agatatatgaccccaagtattgccc

SEQ ID NO: 63552 - DNA, 25 bp, Artificial
  Probe
gatatatgaccccaagtattgccca

SEQ ID NO: 63553 - DNA, 25 bp, Artificial
  Probe
atatatgaccccaagtattgcccac

SEQ ID NO: 63554 - DNA, 25 bp, Artificial
  Probe
tatatgaccccaagtattgcccaca

SEQ ID NO: 63555 - DNA, 25 bp, Artificial
  Probe
gcagatatatgaccccaagtattgc

SEQ ID NO: 63556 - DNA, 25 bp, Artificial
  Probe
gcggcagatatatgaccccaagtat

SEQ ID NO: 63557 - DNA, 25 bp, Artificial
  Probe
atatgaccccaagtattgcccacag

SEQ ID NO: 63558 - DNA, 25 bp, Artificial
  Probe
atctctacgaccccaagaaccacat

SEQ ID NO: 63559 - DNA, 25 bp, Artificial
  Probe
tgaatacctgtcctactgccaggag

SEQ ID NO: 63560 - DNA, 25 bp, Artificial
  Probe
ctgaatacctgtcctactgccagga

SEQ ID NO: 63561 - DNA, 25 bp, Artificial
  Probe
gaatgaaggtgaacacatctgtatg

SEQ ID NO: 63562 - DNA, 25 bp, Artificial
  Probe
ggaatgaaggtgaacacatctgtat

SEQ ID NO: 63563 - DNA, 25 bp, Artificial
  Probe
cagtttatttattgggagagaggga

SEQ ID NO: 63564 - DNA, 25 bp, Artificial
  Probe
agcagtttatttattgggagagagg

SEQ ID NO: 63565 - DNA, 25 bp, Artificial
  Probe
ttatttattgggagagagggagaca

SEQ ID NO: 63566 - DNA, 25 bp, Artificial
  Probe
tttatttattgggagagagggagac

SEQ ID NO: 63567 - DNA, 25 bp, Artificial
  Probe
gtttatttattgggagagagggaga

SEQ ID NO: 63568 - DNA, 25 bp, Artificial
  Probe
agtttatttattgggagagagggag

SEQ ID NO: 63569 - DNA, 25 bp, Artificial
  Probe
tatttattgggagagagggagacag

SEQ ID NO: 63570 - DNA, 25 bp, Artificial
  Probe
gtgtgtgtttatgtgtgtgtatgtg

SEQ ID NO: 63571 - DNA, 25 bp, Artificial
  Probe
gtgtgtgtgtttatgtgtgtgtatg

SEQ ID NO: 63572 - DNA, 25 bp, Artificial
  Probe
gcagtttatttattgggagagaggg

SEQ ID NO: 63573 - DNA, 25 bp, Artificial
  Probe
tgtgtgtgtttatgtgtgtgtatgt

SEQ ID NO: 63574 - DNA, 25 bp, Artificial
  Probe
tgtgtgtgtgtttatgtgtgtgtat

SEQ ID NO: 63575 - DNA, 25 bp, Artificial
  Probe
aagcagtttatttattgggagagag

SEQ ID NO: 63576 - DNA, 25 bp, Artificial
  Probe
caagcagtttatttattgggagaga

SEQ ID NO: 63577 - DNA, 25 bp, Artificial
  Probe
gtgtgtgtgtgtttatgtgtgtgta

SEQ ID NO: 63578 - DNA, 25 bp, Artificial
  Probe
atttattgggagagagggagacaga

SEQ ID NO: 63579 - DNA, 25 bp, Artificial
  Probe
aatgaaggtgaacacatctgtatgt

SEQ ID NO: 63580 - DNA, 25 bp, Artificial
  Probe
tttattgggagagagggagacagac

SEQ ID NO: 63581 - DNA, 25 bp, Artificial
  Probe
gggaatgaaggtgaacacatctgta

SEQ ID NO: 63582 - DNA, 25 bp, Artificial
  Probe
ttattgggagagagggagacagact

SEQ ID NO: 63583 - DNA, 25 bp, Artificial
  Probe
ccaaatccctgttctctgaagcaag

SEQ ID NO: 63584 - DNA, 25 bp, Artificial
  Probe
ggatgttgtacagtgtatgtgcatg

SEQ ID NO: 63585 - DNA, 25 bp, Artificial
  Probe
ggtgtgtgtgtgtttatgtgtgtgt

SEQ ID NO: 63586 - DNA, 25 bp, Artificial
  Probe
tgaggcccaagcagtttatttattg

SEQ ID NO: 63587 - DNA, 25 bp, Artificial
  Probe
tattgggagagagggagacagactg

SEQ ID NO: 63588 - DNA, 25 bp, Artificial
  Probe
ctgaggcccaagcagtttatttatt

SEQ ID NO: 63589 - DNA, 25 bp, Artificial
  Probe
caaatccctgttctctgaagcaagg

SEQ ID NO: 63590 - DNA, 25 bp, Artificial
  Probe
gggtgtgtgtgtgtttatgtgtgtg

SEQ ID NO: 63591 - DNA, 25 bp, Artificial
  Probe
ataccccaaatccctgttctctgaa

SEQ ID NO: 63592 - DNA, 25 bp, Artificial
  Probe
ccaagcagtttatttattgggagag

SEQ ID NO: 63593 - DNA, 25 bp, Artificial
  Probe
gataccccaaatccctgttctctga

SEQ ID NO: 63594 - DNA, 25 bp, Artificial
  Probe
cccaaatccctgttctctgaagcaa

SEQ ID NO: 63595 - DNA, 25 bp, Artificial
  Probe
taccccaaatccctgttctctgaag

SEQ ID NO: 63596 - DNA, 25 bp, Artificial
  Probe
ctctaacagcacttttggtgtcctt

SEQ ID NO: 63597 - DNA, 25 bp, Artificial
  Probe
ggagggatgttgtacagtgtatgtg

SEQ ID NO: 63598 - DNA, 25 bp, Artificial
  Probe
tctaacagcacttttggtgtccttg

SEQ ID NO: 63599 - DNA, 25 bp, Artificial
  Probe
gggatgttgtacagtgtatgtgcat

SEQ ID NO: 63600 - DNA, 25 bp, Artificial
  Probe
ataagcaaagagtggggagatgtgg

SEQ ID NO: 63601 - DNA, 25 bp, Artificial
  Probe
gagggatgttgtacagtgtatgtgc

SEQ ID NO: 63602 - DNA, 25 bp, Artificial
  Probe
gggagggatgttgtacagtgtatgt

SEQ ID NO: 63603 - DNA, 25 bp, Artificial
  Probe
cgataccccaaatccctgttctctg

SEQ ID NO: 63604 - DNA, 25 bp, Artificial
  Probe
caagagcactgcttaaaggttttcc

SEQ ID NO: 63605 - DNA, 25 bp, Artificial
  Probe
agggatgttgtacagtgtatgtgca

SEQ ID NO: 63606 - DNA, 25 bp, Artificial
  Probe
tgttgtatatgaaggagatgagagc

SEQ ID NO: 63607 - DNA, 25 bp, Artificial
  Probe
gtatatgaaggagatgagagcgaag

SEQ ID NO: 63608 - DNA, 25 bp, Artificial
  Probe
tgtatatgaaggagatgagagcgaa

SEQ ID NO: 63609 - DNA, 25 bp, Artificial
  Probe
ttgtatatgaaggagatgagagcga

SEQ ID NO: 63610 - DNA, 25 bp, Artificial
  Probe
gttgtatatgaaggagatgagagcg

SEQ ID NO: 63611 - DNA, 25 bp, Artificial
  Probe
tatatgaaggagatgagagcgaagg

SEQ ID NO: 63612 - DNA, 25 bp, Artificial
  Probe
atgttgtatatgaaggagatgagag

SEQ ID NO: 63613 - DNA, 25 bp, Artificial
  Probe
atatgaaggagatgagagcgaaggt

SEQ ID NO: 63614 - DNA, 25 bp, Artificial
  Probe
catgttgtatatgaaggagatgaga

SEQ ID NO: 63615 - DNA, 25 bp, Artificial
  Probe
atatctctccatattacccgctgtc

SEQ ID NO: 63616 - DNA, 25 bp, Artificial
  Probe
tatgaaggagatgagagcgaaggtg

SEQ ID NO: 63617 - DNA, 25 bp, Artificial
  Probe
tcatgttgtatatgaaggagatgag

SEQ ID NO: 63618 - DNA, 25 bp, Artificial
  Probe
gatatctctccatattacccgctgt

SEQ ID NO: 63619 - DNA, 25 bp, Artificial
  Probe
tatctctccatattacccgctgtcg

SEQ ID NO: 63620 - DNA, 25 bp, Artificial
  Probe
aatcacgacaggaggattcagacac

SEQ ID NO: 63621 - DNA, 25 bp, Artificial
  Probe
caatcacgacaggaggattcagaca

SEQ ID NO: 63622 - DNA, 25 bp, Artificial
  Probe
cctccagatatctctccatattacc

SEQ ID NO: 63623 - DNA, 25 bp, Artificial
  Probe
gaacaggcaaagtactacgagctag

SEQ ID NO: 63624 - DNA, 25 bp, Artificial
  Probe
cagggaagaacaggcaaagtactac

SEQ ID NO: 63625 - DNA, 25 bp, Artificial
  Probe
ccaatcacgacaggaggattcagac

SEQ ID NO: 63626 - DNA, 25 bp, Artificial
  Probe
gcattcatgttgtatatgaaggaga

SEQ ID NO: 63627 - DNA, 25 bp, Artificial
  Probe
ggaagaacaggcaaagtactacgag

SEQ ID NO: 63628 - DNA, 25 bp, Artificial
  Probe
ccccacataaagaagccccttaatg

SEQ ID NO: 63629 - DNA, 25 bp, Artificial
  Probe
agaacaggcaaagtactacgagcta

SEQ ID NO: 63630 - DNA, 25 bp, Artificial
  Probe
tgcattcatgttgtatatgaaggag

SEQ ID NO: 63631 - DNA, 25 bp, Artificial
  Probe
ctcactccatagctcaaagcatcag

SEQ ID NO: 63632 - DNA, 25 bp, Artificial
  Probe
gaagaacaggcaaagtactacgagc

SEQ ID NO: 63633 - DNA, 25 bp, Artificial
  Probe
ggtctgcacgggataactatggaaa

SEQ ID NO: 63634 - DNA, 25 bp, Artificial
  Probe
tccagatatctctccatattacccg

SEQ ID NO: 63635 - DNA, 25 bp, Artificial
  Probe
gtctgcacgggataactatggaaaa

SEQ ID NO: 63636 - DNA, 25 bp, Artificial
  Probe
caccctccagatatctctccatatt

SEQ ID NO: 63637 - DNA, 25 bp, Artificial
  Probe
cccacataaagaagccccttaatgc

SEQ ID NO: 63638 - DNA, 25 bp, Artificial
  Probe
accctccagatatctctccatatta

SEQ ID NO: 63639 - DNA, 25 bp, Artificial
  Probe
ctccagatatctctccatattaccc

SEQ ID NO: 63640 - DNA, 25 bp, Artificial
  Probe
ccctccagatatctctccatattac

SEQ ID NO: 63641 - DNA, 25 bp, Artificial
  Probe
agatatctctccatattacccgctg

SEQ ID NO: 63642 - DNA, 25 bp, Artificial
  Probe
cagatatctctccatattacccgct

SEQ ID NO: 63643 - DNA, 25 bp, Artificial
  Probe
ttcatgttgtatatgaaggagatga

SEQ ID NO: 63644 - DNA, 25 bp, Artificial
  Probe
aagaacaggcaaagtactacgagct

SEQ ID NO: 63645 - DNA, 25 bp, Artificial
  Probe
ccagggaagaacaggcaaagtacta

SEQ ID NO: 63646 - DNA, 25 bp, Artificial
  Probe
gtacccaatcacgacaggaggattc

SEQ ID NO: 63647 - DNA, 25 bp, Artificial
  Probe
ccagatatctctccatattacccgc

SEQ ID NO: 63648 - DNA, 25 bp, Artificial
  Probe
cacattgaaagagagtgcagccatc

SEQ ID NO: 63649 - DNA, 25 bp, Artificial
  Probe
ccacataaagaagccccttaatgca

SEQ ID NO: 63650 - DNA, 25 bp, Artificial
  Probe
gggaagaacaggcaaagtactacga

SEQ ID NO: 63651 - DNA, 25 bp, Artificial
  Probe
caactaacttgtctctggaattgtt

SEQ ID NO: 63652 - DNA, 25 bp, Artificial
  Probe
gtatatattgtactgaggtgcctgg

SEQ ID NO: 63653 - DNA, 25 bp, Artificial
  Probe
tgtatatattgtactgaggtgcctg

SEQ ID NO: 63654 - DNA, 25 bp, Artificial
  Probe
atgtatatattgtactgaggtgcct

SEQ ID NO: 63655 - DNA, 25 bp, Artificial
  Probe
aatgtatatattgtactgaggtgcc

SEQ ID NO: 63656 - DNA, 25 bp, Artificial
  Probe
tatatattgtactgaggtgcctggc

SEQ ID NO: 63657 - DNA, 25 bp, Artificial
  Probe
aacttgtctctggaattgtttcaaa

SEQ ID NO: 63658 - DNA, 25 bp, Artificial
  Probe
ctaacttgtctctggaattgtttca

SEQ ID NO: 63659 - DNA, 25 bp, Artificial
  Probe
actaacttgtctctggaattgtttc

SEQ ID NO: 63660 - DNA, 25 bp, Artificial
  Probe
cttgtgttgtagtgagaaactgttg

SEQ ID NO: 63661 - DNA, 25 bp, Artificial
  Probe
acttgtctctggaattgtttcaaat

SEQ ID NO: 63662 - DNA, 25 bp, Artificial
  Probe
aactaacttgtctctggaattgttt

SEQ ID NO: 63663 - DNA, 25 bp, Artificial
  Probe
ttgtgttgtagtgagaaactgttgt

SEQ ID NO: 63664 - DNA, 25 bp, Artificial
  Probe
cttggtttatgtgtttgtccctctc

SEQ ID NO: 63665 - DNA, 25 bp, Artificial
  Probe
taacttgtctctggaattgtttcaa

SEQ ID NO: 63666 - DNA, 25 bp, Artificial
  Probe
ccttgtgttgtagtgagaaactgtt

SEQ ID NO: 63667 - DNA, 25 bp, Artificial
  Probe
gtgttgtagtgagaaactgttgtca

SEQ ID NO: 63668 - DNA, 25 bp, Artificial
  Probe
tgtgttgtagtgagaaactgttgtc

SEQ ID NO: 63669 - DNA, 25 bp, Artificial
  Probe
tacccttgtgttgtagtgagaaact

SEQ ID NO: 63670 - DNA, 25 bp, Artificial
  Probe
ttggtttatgtgtttgtccctctca

SEQ ID NO: 63671 - DNA, 25 bp, Artificial
  Probe
tggtttatgtgtttgtccctctcag

SEQ ID NO: 63672 - DNA, 25 bp, Artificial
  Probe
cttgtctctggaattgtttcaaata

SEQ ID NO: 63673 - DNA, 25 bp, Artificial
  Probe
cacaactaacttgtctctggaattg

SEQ ID NO: 63674 - DNA, 25 bp, Artificial
  Probe
tcacaactaacttgtctctggaatt

SEQ ID NO: 63675 - DNA, 25 bp, Artificial
  Probe
acaactaacttgtctctggaattgt

SEQ ID NO: 63676 - DNA, 25 bp, Artificial
  Probe
gtcacaactaacttgtctctggaat

SEQ ID NO: 63677 - DNA, 25 bp, Artificial
  Probe
ccttggtttatgtgtttgtccctct

SEQ ID NO: 63678 - DNA, 25 bp, Artificial
  Probe
tgtctctggaattgtttcaaataaa

SEQ ID NO: 63679 - DNA, 25 bp, Artificial
  Probe
ttgtctctggaattgtttcaaataa

SEQ ID NO: 63680 - DNA, 25 bp, Artificial
  Probe
cccttgtgttgtagtgagaaactgt

SEQ ID NO: 63681 - DNA, 25 bp, Artificial
  Probe
acccttgtgttgtagtgagaaactg

SEQ ID NO: 63682 - DNA, 25 bp, Artificial
  Probe
tctggaattgtttcaaataaagagt

SEQ ID NO: 63683 - DNA, 25 bp, Artificial
  Probe
aaatgaccttctcacttggattggg

SEQ ID NO: 63684 - DNA, 25 bp, Artificial
  Probe
tgtcacaactaacttgtctctggaa

SEQ ID NO: 63685 - DNA, 25 bp, Artificial
  Probe
ttgtcacaactaacttgtctctgga

SEQ ID NO: 63686 - DNA, 25 bp, Artificial
  Probe
tctctggaattgtttcaaataaaga

SEQ ID NO: 63687 - DNA, 25 bp, Artificial
  Probe
gtctctggaattgtttcaaataaag

SEQ ID NO: 63688 - DNA, 25 bp, Artificial
  Probe
ctacccttgtgttgtagtgagaaac

SEQ ID NO: 63689 - DNA, 25 bp, Artificial
  Probe
aaatgtatatattgtactgaggtgc

SEQ ID NO: 63690 - DNA, 25 bp, Artificial
  Probe
gtttatgtgtttgtccctctcagcc

SEQ ID NO: 63691 - DNA, 25 bp, Artificial
  Probe
ggtttatgtgtttgtccctctcagc

SEQ ID NO: 63692 - DNA, 25 bp, Artificial
  Probe
cccttggtttatgtgtttgtccctc

SEQ ID NO: 63693 - DNA, 25 bp, Artificial
  Probe
ctggaattgtttcaaataaagagtt

SEQ ID NO: 63694 - DNA, 25 bp, Artificial
  Probe
cctacccttgtgttgtagtgagaaa

SEQ ID NO: 63695 - DNA, 25 bp, Artificial
  Probe
ctgtaactgcctccctttagttcta

SEQ ID NO: 63696 - DNA, 25 bp, Artificial
  Probe
aaacatagacactgtgccaaagaca

SEQ ID NO: 63697 - DNA, 25 bp, Artificial
  Probe
ttccttggtcaagagaaaagaactg

SEQ ID NO: 63698 - DNA, 25 bp, Artificial
  Probe
ctgttccttggtcaagagaaaagaa

SEQ ID NO: 63699 - DNA, 25 bp, Artificial
  Probe
aaaacatagacactgtgccaaagac

SEQ ID NO: 63700 - DNA, 25 bp, Artificial
  Probe
caaaacatagacactgtgccaaaga

SEQ ID NO: 63701 - DNA, 25 bp, Artificial
  Probe
tccttggtcaagagaaaagaactgg

SEQ ID NO: 63702 - DNA, 25 bp, Artificial
  Probe
caaagacagagggcataggcttagg

SEQ ID NO: 63703 - DNA, 25 bp, Artificial
  Probe
ccaaagacagagggcataggcttag

SEQ ID NO: 63704 - DNA, 25 bp, Artificial
  Probe
ttggtcaagagaaaagaactggctg

SEQ ID NO: 63705 - DNA, 25 bp, Artificial
  Probe
gactcacacgcaaaacatagacact

SEQ ID NO: 63706 - DNA, 25 bp, Artificial
  Probe
actcacacgcaaaacatagacactg

SEQ ID NO: 63707 - DNA, 25 bp, Artificial
  Probe
cttggtcaagagaaaagaactggct

SEQ ID NO: 63708 - DNA, 25 bp, Artificial
  Probe
gctgttccttggtcaagagaaaaga

SEQ ID NO: 63709 - DNA, 25 bp, Artificial
  Probe
aagagaaaagaactggctgggagaa

SEQ ID NO: 63710 - DNA, 25 bp, Artificial
  Probe
agctgttccttggtcaagagaaaag

SEQ ID NO: 63711 - DNA, 25 bp, Artificial
  Probe
ctcacacgcaaaacatagacactgt

SEQ ID NO: 63712 - DNA, 25 bp, Artificial
  Probe
gttccttggtcaagagaaaagaact

SEQ ID NO: 63713 - DNA, 25 bp, Artificial
  Probe
ggactcacacgcaaaacatagacac

SEQ ID NO: 63714 - DNA, 25 bp, Artificial
  Probe
tgttccttggtcaagagaaaagaac

SEQ ID NO: 63715 - DNA, 25 bp, Artificial
  Probe
agagaaaagaactggctgggagaac

SEQ ID NO: 63716 - DNA, 25 bp, Artificial
  Probe
caagagaaaagaactggctgggaga

SEQ ID NO: 63717 - DNA, 25 bp, Artificial
  Probe
tcaagagaaaagaactggctgggag

SEQ ID NO: 63718 - DNA, 25 bp, Artificial
  Probe
ccttggtcaagagaaaagaactggc

SEQ ID NO: 63719 - DNA, 25 bp, Artificial
  Probe
catcttcttatgggcaatcggggat

SEQ ID NO: 63720 - DNA, 25 bp, Artificial
  Probe
atcttcttatgggcaatcggggatc

SEQ ID NO: 63721 - DNA, 25 bp, Artificial
  Probe
aacatagacactgtgccaaagacag

SEQ ID NO: 63722 - DNA, 25 bp, Artificial
  Probe
gtcaagagaaaagaactggctggga

SEQ ID NO: 63723 - DNA, 25 bp, Artificial
  Probe
catagacactgtgccaaagacagag

SEQ ID NO: 63724 - DNA, 25 bp, Artificial
  Probe
cttatgggcaatcggggatctcaat

SEQ ID NO: 63725 - DNA, 25 bp, Artificial
  Probe
tggtcaagagaaaagaactggctgg

SEQ ID NO: 63726 - DNA, 25 bp, Artificial
  Probe
gcaaaacatagacactgtgccaaag

SEQ ID NO: 63727 - DNA, 25 bp, Artificial
  Probe
ctgggactcacacgcaaaacataga

SEQ ID NO: 63728 - DNA, 25 bp, Artificial
  Probe
ttatgggcaatcggggatctcaatg

SEQ ID NO: 63729 - DNA, 25 bp, Artificial
  Probe
caaccatcttcttatgggcaatcgg

SEQ ID NO: 63730 - DNA, 25 bp, Artificial
  Probe
cttcttatgggcaatcggggatctc

SEQ ID NO: 63731 - DNA, 25 bp, Artificial
  Probe
acatagacactgtgccaaagacaga

SEQ ID NO: 63732 - DNA, 25 bp, Artificial
  Probe
tgcaaccatcttcttatgggcaatc

SEQ ID NO: 63733 - DNA, 25 bp, Artificial
  Probe
ctgcaaccatcttcttatgggcaat

SEQ ID NO: 63734 - DNA, 25 bp, Artificial
  Probe
tcttcttatgggcaatcggggatct

SEQ ID NO: 63735 - DNA, 25 bp, Artificial
  Probe
atagacactgtgccaaagacagagg

SEQ ID NO: 63736 - DNA, 25 bp, Artificial
  Probe
gcaaccatcttcttatgggcaatcg

SEQ ID NO: 63737 - DNA, 25 bp, Artificial
  Probe
ggatattcgggctctgtgatacagg

SEQ ID NO: 63738 - DNA, 25 bp, Artificial
  Probe
gggatattcgggctctgtgatacag

SEQ ID NO: 63739 - DNA, 25 bp, Artificial
  Probe
cccctcctgcaaccatcttcttatg

SEQ ID NO: 63740 - DNA, 25 bp, Artificial
  Probe
aaccatcttcttatgggcaatcggg

SEQ ID NO: 63741 - DNA, 25 bp, Artificial
  Probe
tatgagtgactgctggatatacaag

SEQ ID NO: 63742 - DNA, 25 bp, Artificial
  Probe
cttatgagtgactgctggatataca

SEQ ID NO: 63743 - DNA, 25 bp, Artificial
  Probe
ttatgagtgactgctggatatacaa

SEQ ID NO: 63744 - DNA, 25 bp, Artificial
  Probe
caacgaatgaggacctattactaca

SEQ ID NO: 63745 - DNA, 25 bp, Artificial
  Probe
acaacgaatgaggacctattactac

SEQ ID NO: 63746 - DNA, 25 bp, Artificial
  Probe
aacgaatgaggacctattactacag

SEQ ID NO: 63747 - DNA, 25 bp, Artificial
  Probe
gaacaacgaatgaggacctattact

SEQ ID NO: 63748 - DNA, 25 bp, Artificial
  Probe
gcttatgagtgactgctggatatac

SEQ ID NO: 63749 - DNA, 25 bp, Artificial
  Probe
aacaacgaatgaggacctattacta

SEQ ID NO: 63750 - DNA, 25 bp, Artificial
  Probe
gaatgaggacctattactacagcat

SEQ ID NO: 63751 - DNA, 25 bp, Artificial
  Probe
ggaacaacgaatgaggacctattac

SEQ ID NO: 63752 - DNA, 25 bp, Artificial
  Probe
tggaacaacgaatgaggacctatta

SEQ ID NO: 63753 - DNA, 25 bp, Artificial
  Probe
cgaatgaggacctattactacagca

SEQ ID NO: 63754 - DNA, 25 bp, Artificial
  Probe
acgaatgaggacctattactacagc

SEQ ID NO: 63755 - DNA, 25 bp, Artificial
  Probe
atgagtgactgctggatatacaagt

SEQ ID NO: 63756 - DNA, 25 bp, Artificial
  Probe
aatgaggacctattactacagcatg

SEQ ID NO: 63757 - DNA, 25 bp, Artificial
  Probe
cgcttatgagtgactgctggatata

SEQ ID NO: 63758 - DNA, 25 bp, Artificial
  Probe
atgaggacctattactacagcatgg

SEQ ID NO: 63759 - DNA, 25 bp, Artificial
  Probe
tgagtgactgctggatatacaagtg

SEQ ID NO: 63760 - DNA, 25 bp, Artificial
  Probe
gtggaacaacgaatgaggacctatt

SEQ ID NO: 63761 - DNA, 25 bp, Artificial
  Probe
gagtgactgctggatatacaagtgg

SEQ ID NO: 63762 - DNA, 25 bp, Artificial
  Probe
gtgtatgtgctcccaaatctacttc

SEQ ID NO: 63763 - DNA, 25 bp, Artificial
  Probe
cttgcttagttagccttactctctc

SEQ ID NO: 63764 - DNA, 25 bp, Artificial
  Probe
ttgcttagttagccttactctctct

SEQ ID NO: 63765 - DNA, 25 bp, Artificial
  Probe
cttagttagccttactctctctgca

SEQ ID NO: 63766 - DNA, 25 bp, Artificial
  Probe
atttcatcaagcagggtaagaggat

SEQ ID NO: 63767 - DNA, 25 bp, Artificial
  Probe
caaatctacttccgctatttctgtg

SEQ ID NO: 63768 - DNA, 25 bp, Artificial
  Probe
tgcttagttagccttactctctctg

SEQ ID NO: 63769 - DNA, 25 bp, Artificial
  Probe
ttagttagccttactctctctgcac

SEQ ID NO: 63770 - DNA, 25 bp, Artificial
  Probe
aaatctacttccgctatttctgtgg

SEQ ID NO: 63771 - DNA, 25 bp, Artificial
  Probe
ccaaatctacttccgctatttctgt

SEQ ID NO: 63772 - DNA, 25 bp, Artificial
  Probe
ccttgcttagttagccttactctct

SEQ ID NO: 63773 - DNA, 25 bp, Artificial
  Probe
ctcccaaatctacttccgctatttc

SEQ ID NO: 63774 - DNA, 25 bp, Artificial
  Probe
agtgtatgtgctcccaaatctactt

SEQ ID NO: 63775 - DNA, 25 bp, Artificial
  Probe
tgtatgtgctcccaaatctacttcc

SEQ ID NO: 63776 - DNA, 25 bp, Artificial
  Probe
gatttcatcaagcagggtaagagga

SEQ ID NO: 63777 - DNA, 25 bp, Artificial
  Probe
cccaaatctacttccgctatttctg

SEQ ID NO: 63778 - DNA, 25 bp, Artificial
  Probe
tcccaaatctacttccgctatttct

SEQ ID NO: 63779 - DNA, 25 bp, Artificial
  Probe
aatctacttccgctatttctgtggg

SEQ ID NO: 63780 - DNA, 25 bp, Artificial
  Probe
atcggaataaactccacttctcttt

SEQ ID NO: 63781 - DNA, 25 bp, Artificial
  Probe
gagagtgtatgtgctcccaaatcta

SEQ ID NO: 63782 - DNA, 25 bp, Artificial
  Probe
tcggaataaactccacttctcttta

SEQ ID NO: 63783 - DNA, 25 bp, Artificial
  Probe
catcggaataaactccacttctctt

SEQ ID NO: 63784 - DNA, 25 bp, Artificial
  Probe
ttcatcggaataaactccacttctc

SEQ ID NO: 63785 - DNA, 25 bp, Artificial
  Probe
tggatttcatcaagcagggtaagag

SEQ ID NO: 63786 - DNA, 25 bp, Artificial
  Probe
ctggagattgtgcctactttaagtt

SEQ ID NO: 63787 - DNA, 25 bp, Artificial
  Probe
gagattgtgcctactttaagttggt

SEQ ID NO: 63788 - DNA, 25 bp, Artificial
  Probe
tggagattgtgcctactttaagttg

SEQ ID NO: 63789 - DNA, 25 bp, Artificial
  Probe
agattgtgcctactttaagttggtg

SEQ ID NO: 63790 - DNA, 25 bp, Artificial
  Probe
ggagattgtgcctactttaagttgg

SEQ ID NO: 63791 - DNA, 25 bp, Artificial
  Probe
gattgtgcctactttaagttggtgg

SEQ ID NO: 63792 - DNA, 25 bp, Artificial
  Probe
acaaagagtggagagttttaaggtc

SEQ ID NO: 63793 - DNA, 25 bp, Artificial
  Probe
gctggagattgtgcctactttaagt

SEQ ID NO: 63794 - DNA, 25 bp, Artificial
  Probe
ctactttaagttggtggcaagggtc

SEQ ID NO: 63795 - DNA, 25 bp, Artificial
  Probe
cacaaagagtggagagttttaaggt

SEQ ID NO: 63796 - DNA, 25 bp, Artificial
  Probe
caaagagtggagagttttaaggtcc

SEQ ID NO: 63797 - DNA, 25 bp, Artificial
  Probe
caaagaaagaattcgactgttctcc

SEQ ID NO: 63798 - DNA, 25 bp, Artificial
  Probe
ccaaagaaagaattcgactgttctc

SEQ ID NO: 63799 - DNA, 25 bp, Artificial
  Probe
gaaagaattcgactgttctccctac

SEQ ID NO: 63800 - DNA, 25 bp, Artificial
  Probe
agaaagaattcgactgttctcccta

SEQ ID NO: 63801 - DNA, 25 bp, Artificial
  Probe
aaagaaagaattcgactgttctccc

SEQ ID NO: 63802 - DNA, 25 bp, Artificial
  Probe
aaagagtggagagttttaaggtccc

SEQ ID NO: 63803 - DNA, 25 bp, Artificial
  Probe
ggccaaagaaagaattcgactgttc

SEQ ID NO: 63804 - DNA, 25 bp, Artificial
  Probe
aattcgactgttctccctacccaag

SEQ ID NO: 63805 - DNA, 25 bp, Artificial
  Probe
aagaaagaattcgactgttctccct

SEQ ID NO: 63806 - DNA, 25 bp, Artificial
  Probe
gccaaagaaagaattcgactgttct

SEQ ID NO: 63807 - DNA, 25 bp, Artificial
  Probe
aaagaattcgactgttctccctacc

SEQ ID NO: 63808 - DNA, 25 bp, Artificial
  Probe
aagagtggagagttttaaggtccct

SEQ ID NO: 63809 - DNA, 25 bp, Artificial
  Probe
tgtgaagtgttcagtggaactgttc

SEQ ID NO: 63810 - DNA, 25 bp, Artificial
  Probe
ctgtgaagtgttcagtggaactgtt

SEQ ID NO: 63811 - DNA, 25 bp, Artificial
  Probe
gtaaggacaagctgcacttaggagg

SEQ ID NO: 63812 - DNA, 25 bp, Artificial
  Probe
ctttggggttcatgccttttctctt

SEQ ID NO: 63813 - DNA, 25 bp, Artificial
  Probe
cctactttaagttggtggcaagggt

SEQ ID NO: 63814 - DNA, 25 bp, Artificial
  Probe
tactttaagttggtggcaagggtcg

SEQ ID NO: 63815 - DNA, 25 bp, Artificial
  Probe
gaattcgactgttctccctacccaa

SEQ ID NO: 63816 - DNA, 25 bp, Artificial
  Probe
agagtggagagttttaaggtccctg

SEQ ID NO: 63817 - DNA, 25 bp, Artificial
  Probe
aaataaaatgtttactacggtttgt

SEQ ID NO: 63818 - DNA, 25 bp, Artificial
  Probe
tttggggttcatgccttttctcttg

SEQ ID NO: 63819 - DNA, 25 bp, Artificial
  Probe
gttccgcttgcaggtttatacactg

SEQ ID NO: 63820 - DNA, 25 bp, Artificial
  Probe
ctctttggggttcatgccttttctc

SEQ ID NO: 63821 - DNA, 25 bp, Artificial
  Probe
atgtttactacggtttgtaaaaggc

SEQ ID NO: 63822 - DNA, 25 bp, Artificial
  Probe
ggctggagattgtgcctactttaag

SEQ ID NO: 63823 - DNA, 25 bp, Artificial
  Probe
actgtgaagtgttcagtggaactgt

SEQ ID NO: 63824 - DNA, 25 bp, Artificial
  Probe
gaagtgttcagtggaactgttcctc

SEQ ID NO: 63825 - DNA, 25 bp, Artificial
  Probe
tctttggggttcatgccttttctct

SEQ ID NO: 63826 - DNA, 25 bp, Artificial
  Probe
ttgcaggtttatacactggaccgag

SEQ ID NO: 63827 - DNA, 25 bp, Artificial
  Probe
cttgcaggtttatacactggaccga

SEQ ID NO: 63828 - DNA, 25 bp, Artificial
  Probe
aagaattcgactgttctccctaccc

SEQ ID NO: 63829 - DNA, 25 bp, Artificial
  Probe
attgtgcctactttaagttggtggc

SEQ ID NO: 63830 - DNA, 25 bp, Artificial
  Probe
gagtggagagttttaaggtccctgg

SEQ ID NO: 63831 - DNA, 25 bp, Artificial
  Probe
aagtagtcgtgagttgtattggaat

SEQ ID NO: 63832 - DNA, 25 bp, Artificial
  Probe
gaagtagtcgtgagttgtattggaa

SEQ ID NO: 63833 - DNA, 25 bp, Artificial
  Probe
agtagtcgtgagttgtattggaatt

SEQ ID NO: 63834 - DNA, 25 bp, Artificial
  Probe
tagcagaagtagtcgtgagttgtat

SEQ ID NO: 63835 - DNA, 25 bp, Artificial
  Probe
aatacagtagcagaagtagtcgtga

SEQ ID NO: 63836 - DNA, 25 bp, Artificial
  Probe
agaagtagtcgtgagttgtattgga

SEQ ID NO: 63837 - DNA, 25 bp, Artificial
  Probe
cagaagtagtcgtgagttgtattgg

SEQ ID NO: 63838 - DNA, 25 bp, Artificial
  Probe
atacagtagcagaagtagtcgtgag

SEQ ID NO: 63839 - DNA, 25 bp, Artificial
  Probe
gcagaagtagtcgtgagttgtattg

SEQ ID NO: 63840 - DNA, 25 bp, Artificial
  Probe
agcagaagtagtcgtgagttgtatt

SEQ ID NO: 63841 - DNA, 25 bp, Artificial
  Probe
gtaaccagtcttgtcttctctcaga

SEQ ID NO: 63842 - DNA, 25 bp, Artificial
  Probe
gtagcagaagtagtcgtgagttgta

SEQ ID NO: 63843 - DNA, 25 bp, Artificial
  Probe
ttagaattggtggagaggacagaag

SEQ ID NO: 63844 - DNA, 25 bp, Artificial
  Probe
cttagaattggtggagaggacagaa

SEQ ID NO: 63845 - DNA, 25 bp, Artificial
  Probe
tacagtagcagaagtagtcgtgagt

SEQ ID NO: 63846 - DNA, 25 bp, Artificial
  Probe
tagaattggtggagaggacagaaga

SEQ ID NO: 63847 - DNA, 25 bp, Artificial
  Probe
ggtaaccagtcttgtcttctctcag

SEQ ID NO: 63848 - DNA, 25 bp, Artificial
  Probe
taaccagtcttgtcttctctcagag

SEQ ID NO: 63849 - DNA, 25 bp, Artificial
  Probe
cagtcttgtcttctctcagagtctt

SEQ ID NO: 63850 - DNA, 25 bp, Artificial
  Probe
aaatacagtagcagaagtagtcgtg

SEQ ID NO: 63851 - DNA, 25 bp, Artificial
  Probe
caaatacagtagcagaagtagtcgt

SEQ ID NO: 63852 - DNA, 25 bp, Artificial
  Probe
acaaatacagtagcagaagtagtcg

SEQ ID NO: 63853 - DNA, 25 bp, Artificial
  Probe
tgacaaatacagtagcagaagtagt

SEQ ID NO: 63854 - DNA, 25 bp, Artificial
  Probe
cagtagcagaagtagtcgtgagttg

SEQ ID NO: 63855 - DNA, 25 bp, Artificial
  Probe
gtagtcgtgagttgtattggaattt

SEQ ID NO: 63856 - DNA, 25 bp, Artificial
  Probe
agagagaagtaacacatctgacaaa

SEQ ID NO: 63857 - DNA, 25 bp, Artificial
  Probe
agtagcagaagtagtcgtgagttgt

SEQ ID NO: 63858 - DNA, 25 bp, Artificial
  Probe
acagtagcagaagtagtcgtgagtt

SEQ ID NO: 63859 - DNA, 25 bp, Artificial
  Probe
gagagaagtaacacatctgacaaat

SEQ ID NO: 63860 - DNA, 25 bp, Artificial
  Probe
gtagatgctagggttacaaacacat

SEQ ID NO: 63861 - DNA, 25 bp, Artificial
  Probe
gaacggtaaccagtcttgtcttctc

SEQ ID NO: 63862 - DNA, 25 bp, Artificial
  Probe
aacggtaaccagtcttgtcttctct

SEQ ID NO: 63863 - DNA, 25 bp, Artificial
  Probe
aacacatctgacaaatacagtagca

SEQ ID NO: 63864 - DNA, 25 bp, Artificial
  Probe
agaagtaacacatctgacaaataca

SEQ ID NO: 63865 - DNA, 25 bp, Artificial
  Probe
agaattggtggagaggacagaagag

SEQ ID NO: 63866 - DNA, 25 bp, Artificial
  Probe
tagatgctagggttacaaacacatg

SEQ ID NO: 63867 - DNA, 25 bp, Artificial
  Probe
acacatctgacaaatacagtagcag

SEQ ID NO: 63868 - DNA, 25 bp, Artificial
  Probe
aagtctacacaaactgagtgaagag

SEQ ID NO: 63869 - DNA, 25 bp, Artificial
  Probe
gaagtctacacaaactgagtgaaga

SEQ ID NO: 63870 - DNA, 25 bp, Artificial
  Probe
gacaaatacagtagcagaagtagtc

SEQ ID NO: 63871 - DNA, 25 bp, Artificial
  Probe
ctgacaaatacagtagcagaagtag

SEQ ID NO: 63872 - DNA, 25 bp, Artificial
  Probe
ttgtcttctctcagagtctttcttc

SEQ ID NO: 63873 - DNA, 25 bp, Artificial
  Probe
cttgtcttctctcagagtctttctt

SEQ ID NO: 63874 - DNA, 25 bp, Artificial
  Probe
aaccagtcttgtcttctctcagagt

SEQ ID NO: 63875 - DNA, 25 bp, Artificial
  Probe
gtcttctctcagagtctttcttcag

SEQ ID NO: 63876 - DNA, 25 bp, Artificial
  Probe
agccttatatgaagaaccagagaag

SEQ ID NO: 63877 - DNA, 25 bp, Artificial
  Probe
gtagccttatatgaagaaccagaga

SEQ ID NO: 63878 - DNA, 25 bp, Artificial
  Probe
agtgttggtagccttatatgaagaa

SEQ ID NO: 63879 - DNA, 25 bp, Artificial
  Probe
aagtgttggtagccttatatgaaga

SEQ ID NO: 63880 - DNA, 25 bp, Artificial
  Probe
ccttatatgaagaaccagagaagcc

SEQ ID NO: 63881 - DNA, 25 bp, Artificial
  Probe
gtgttggtagccttatatgaagaac

SEQ ID NO: 63882 - DNA, 25 bp, Artificial
  Probe
gccttatatgaagaaccagagaagc

SEQ ID NO: 63883 - DNA, 25 bp, Artificial
  Probe
tagccttatatgaagaaccagagaa

SEQ ID NO: 63884 - DNA, 25 bp, Artificial
  Probe
ggtagccttatatgaagaaccagag

SEQ ID NO: 63885 - DNA, 25 bp, Artificial
  Probe
tgttggtagccttatatgaagaacc

SEQ ID NO: 63886 - DNA, 25 bp, Artificial
  Probe
agaattggcagaaatgaaagagaaa

SEQ ID NO: 63887 - DNA, 25 bp, Artificial
  Probe
cttatatgaagaaccagagaagccc

SEQ ID NO: 63888 - DNA, 25 bp, Artificial
  Probe
cgaaagtgttggtagccttatatga

SEQ ID NO: 63889 - DNA, 25 bp, Artificial
  Probe
gacgaaagtgttggtagccttatat

SEQ ID NO: 63890 - DNA, 25 bp, Artificial
  Probe
cctagaattggcagaaatgaaagag

SEQ ID NO: 63891 - DNA, 25 bp, Artificial
  Probe
ttatatgaagaaccagagaagccca

SEQ ID NO: 63892 - DNA, 25 bp, Artificial
  Probe
acgaaagtgttggtagccttatatg

SEQ ID NO: 63893 - DNA, 25 bp, Artificial
  Probe
tggcagaaatgaaagagaaatatga

SEQ ID NO: 63894 - DNA, 25 bp, Artificial
  Probe
aaagtgttggtagccttatatgaag

SEQ ID NO: 63895 - DNA, 25 bp, Artificial
  Probe
gaaagtgttggtagccttatatgaa

SEQ ID NO: 63896 - DNA, 25 bp, Artificial
  Probe
tagaattggcagaaatgaaagagaa

SEQ ID NO: 63897 - DNA, 25 bp, Artificial
  Probe
ctagaattggcagaaatgaaagaga

SEQ ID NO: 63898 - DNA, 25 bp, Artificial
  Probe
gaattggcagaaatgaaagagaaat

SEQ ID NO: 63899 - DNA, 25 bp, Artificial
  Probe
tatatgaagaaccagagaagcccac

SEQ ID NO: 63900 - DNA, 25 bp, Artificial
  Probe
ttggcagaaatgaaagagaaatatg

SEQ ID NO: 63901 - DNA, 25 bp, Artificial
  Probe
tgacgaaagtgttggtagccttata

SEQ ID NO: 63902 - DNA, 25 bp, Artificial
  Probe
ggcagaaatgaaagagaaatatgaa

SEQ ID NO: 63903 - DNA, 25 bp, Artificial
  Probe
aattggcagaaatgaaagagaaata

SEQ ID NO: 63904 - DNA, 25 bp, Artificial
  Probe
aacacatatacatagaatcaccaat

SEQ ID NO: 63905 - DNA, 25 bp, Artificial
  Probe
aatagagctgcttcgcctagaattg

SEQ ID NO: 63906 - DNA, 25 bp, Artificial
  Probe
attggcagaaatgaaagagaaatat

SEQ ID NO: 63907 - DNA, 25 bp, Artificial
  Probe
aagcgtgctgaataggattcttctc

SEQ ID NO: 63908 - DNA, 25 bp, Artificial
  Probe
ctgacgaaagtgttggtagccttat

SEQ ID NO: 63909 - DNA, 25 bp, Artificial
  Probe
tgaaagagaaatatgaagctactgt

SEQ ID NO: 63910 - DNA, 25 bp, Artificial
  Probe
cagaaatgaaagagaaatatgaagc

SEQ ID NO: 63911 - DNA, 25 bp, Artificial
  Probe
gcagaaatgaaagagaaatatgaag

SEQ ID NO: 63912 - DNA, 25 bp, Artificial
  Probe
gagaagcgtgctgaataggattctt

SEQ ID NO: 63913 - DNA, 25 bp, Artificial
  Probe
gctgaataggattcttctcagttga

SEQ ID NO: 63914 - DNA, 25 bp, Artificial
  Probe
tgctgaataggattcttctcagttg

SEQ ID NO: 63915 - DNA, 25 bp, Artificial
  Probe
gtgctgaataggattcttctcagtt

SEQ ID NO: 63916 - DNA, 25 bp, Artificial
  Probe
tgaataggattcttctcagttgaaa

SEQ ID NO: 63917 - DNA, 25 bp, Artificial
  Probe
actggttttgtatcacttgaatagc

SEQ ID NO: 63918 - DNA, 25 bp, Artificial
  Probe
tgtatcacttgaatagcttgtatag

SEQ ID NO: 63919 - DNA, 25 bp, Artificial
  Probe
aaatagagctgcttcgcctagaatt

SEQ ID NO: 63920 - DNA, 25 bp, Artificial
  Probe
gttgaaaagacactgaaaactggtt

SEQ ID NO: 63921 - DNA, 25 bp, Artificial
  Probe
tgagcagagtcattattagagattt

SEQ ID NO: 63922 - DNA, 25 bp, Artificial
  Probe
accggcttattgggattctttaatt

SEQ ID NO: 63923 - DNA, 25 bp, Artificial
  Probe
caccggcttattgggattctttaat

SEQ ID NO: 63924 - DNA, 25 bp, Artificial
  Probe
cccaaaggtcctctgagactagaac

SEQ ID NO: 63925 - DNA, 25 bp, Artificial
  Probe
ctaggaagcatccagaagcacatga

SEQ ID NO: 63926 - DNA, 25 bp, Artificial
  Probe
taggaagcatccagaagcacatgac

SEQ ID NO: 63927 - DNA, 25 bp, Artificial
  Probe
caaaggtcctctgagactagaaccc

SEQ ID NO: 63928 - DNA, 25 bp, Artificial
  Probe
ccaaaggtcctctgagactagaacc

SEQ ID NO: 63929 - DNA, 25 bp, Artificial
  Probe
aaaggtcctctgagactagaaccct

SEQ ID NO: 63930 - DNA, 25 bp, Artificial
  Probe
gagcagagtcattattagagatttt

SEQ ID NO: 63931 - DNA, 25 bp, Artificial
  Probe
gattctacaaggggaaagactgctg

SEQ ID NO: 63932 - DNA, 25 bp, Artificial
  Probe
cacgattctacaaggggaaagactg

SEQ ID NO: 63933 - DNA, 25 bp, Artificial
  Probe
gaaccacgattctacaaggggaaag

SEQ ID NO: 63934 - DNA, 25 bp, Artificial
  Probe
aggtcctctgagactagaacccttc

SEQ ID NO: 63935 - DNA, 25 bp, Artificial
  Probe
aaccacgattctacaaggggaaaga

SEQ ID NO: 63936 - DNA, 25 bp, Artificial
  Probe
ccaccggcttattgggattctttaa

SEQ ID NO: 63937 - DNA, 25 bp, Artificial
  Probe
ccacgattctacaaggggaaagact

SEQ ID NO: 63938 - DNA, 25 bp, Artificial
  Probe
attctacaaggggaaagactgctgg

SEQ ID NO: 63939 - DNA, 25 bp, Artificial
  Probe
cgattctacaaggggaaagactgct

SEQ ID NO: 63940 - DNA, 25 bp, Artificial
  Probe
accacgattctacaaggggaaagac

SEQ ID NO: 63941 - DNA, 25 bp, Artificial
  Probe
gtcctctgagactagaacccttccc

SEQ ID NO: 63942 - DNA, 25 bp, Artificial
  Probe
tcttttcttctgtacaaaacaccac

SEQ ID NO: 63943 - DNA, 25 bp, Artificial
  Probe
ctcttttcttctgtacaaaacacca

SEQ ID NO: 63944 - DNA, 25 bp, Artificial
  Probe
actcttttcttctgtacaaaacacc

SEQ ID NO: 63945 - DNA, 25 bp, Artificial
  Probe
cttttcttctgtacaaaacaccacc

SEQ ID NO: 63946 - DNA, 25 bp, Artificial
  Probe
ggaaccacgattctacaaggggaaa

SEQ ID NO: 63947 - DNA, 25 bp, Artificial
  Probe
gaactcctgccctgttttcttttgg

SEQ ID NO: 63948 - DNA, 25 bp, Artificial
  Probe
ggtcctctgagactagaacccttcc

SEQ ID NO: 63949 - DNA, 25 bp, Artificial
  Probe
acgattctacaaggggaaagactgc

SEQ ID NO: 63950 - DNA, 25 bp, Artificial
  Probe
accaccggcttattgggattcttta

SEQ ID NO: 63951 - DNA, 25 bp, Artificial
  Probe
aactcttttcttctgtacaaaacac

SEQ ID NO: 63952 - DNA, 25 bp, Artificial
  Probe
cactaagggttccctcacaccattc

SEQ ID NO: 63953 - DNA, 25 bp, Artificial
  Probe
cgaactcctgccctgttttcttttg

SEQ ID NO: 63954 - DNA, 25 bp, Artificial
  Probe
aaggtcctctgagactagaaccctt

SEQ ID NO: 63955 - DNA, 25 bp, Artificial
  Probe
ttttcttctgtacaaaacaccaccg

SEQ ID NO: 63956 - DNA, 25 bp, Artificial
  Probe
taactcttttcttctgtacaaaaca

SEQ ID NO: 63957 - DNA, 25 bp, Artificial
  Probe
tttcttctgtacaaaacaccaccgg

SEQ ID NO: 63958 - DNA, 25 bp, Artificial
  Probe
ctgtacaaaacaccaccggcttatt

SEQ ID NO: 63959 - DNA, 25 bp, Artificial
  Probe
tgtacaaaacaccaccggcttattg

SEQ ID NO: 63960 - DNA, 25 bp, Artificial
  Probe
ttaactcttttcttctgtacaaaac

SEQ ID NO: 63961 - DNA, 25 bp, Artificial
  Probe
tctgtacaaaacaccaccggcttat

SEQ ID NO: 63962 - DNA, 25 bp, Artificial
  Probe
gtacaaaacaccaccggcttattgg

SEQ ID NO: 63963 - DNA, 25 bp, Artificial
  Probe
ttctgtacaaaacaccaccggctta

SEQ ID NO: 63964 - DNA, 25 bp, Artificial
  Probe
gagaaagaagctcaacgctcctagg

SEQ ID NO: 63965 - DNA, 25 bp, Artificial
  Probe
ggagaaagaagctcaacgctcctag

SEQ ID NO: 63966 - DNA, 25 bp, Artificial
  Probe
attaaggaccgttacagacaaggaa

SEQ ID NO: 63967 - DNA, 25 bp, Artificial
  Probe
aattaaggaccgttacagacaagga

SEQ ID NO: 63968 - DNA, 25 bp, Artificial
  Probe
gctgccgagaatccatgtatatatt

SEQ ID NO: 63969 - DNA, 25 bp, Artificial
  Probe
ttaaggaccgttacagacaaggaag

SEQ ID NO: 63970 - DNA, 25 bp, Artificial
  Probe
gaccgttacagacaaggaaggaatt

SEQ ID NO: 63971 - DNA, 25 bp, Artificial
  Probe
ggctgccgagaatccatgtatatat

SEQ ID NO: 63972 - DNA, 25 bp, Artificial
  Probe
atgcaggttgatatcgttggtaatt

SEQ ID NO: 63973 - DNA, 25 bp, Artificial
  Probe
ccgttacagacaaggaaggaattta

SEQ ID NO: 63974 - DNA, 25 bp, Artificial
  Probe
cgttacagacaaggaaggaatttat

SEQ ID NO: 63975 - DNA, 25 bp, Artificial
  Probe
aaattaaggaccgttacagacaagg

SEQ ID NO: 63976 - DNA, 25 bp, Artificial
  Probe
agacaaggaaggaatttattcggat

SEQ ID NO: 63977 - DNA, 25 bp, Artificial
  Probe
taaattaaggaccgttacagacaag

SEQ ID NO: 63978 - DNA, 25 bp, Artificial
  Probe
gacaaggaaggaatttattcggatt

SEQ ID NO: 63979 - DNA, 25 bp, Artificial
  Probe
cagacaaggaaggaatttattcgga

SEQ ID NO: 63980 - DNA, 25 bp, Artificial
  Probe
gaaggaatttattcggatttgaacg

SEQ ID NO: 63981 - DNA, 25 bp, Artificial
  Probe
catgcaggttgatatcgttggtaat

SEQ ID NO: 63982 - DNA, 25 bp, Artificial
  Probe
acagacaaggaaggaatttattcgg

SEQ ID NO: 63983 - DNA, 25 bp, Artificial
  Probe
acaaggaaggaatttattcggattt

SEQ ID NO: 63984 - DNA, 25 bp, Artificial
  Probe
tacagacaaggaaggaatttattcg

SEQ ID NO: 63985 - DNA, 25 bp, Artificial
  Probe
ttaaattaaggaccgttacagacaa

SEQ ID NO: 63986 - DNA, 25 bp, Artificial
  Probe
ggaaggaatttattcggatttgaac

SEQ ID NO: 63987 - DNA, 25 bp, Artificial
  Probe
aggaaggaatttattcggatttgaa

SEQ ID NO: 63988 - DNA, 25 bp, Artificial
  Probe
aaggaaggaatttattcggatttga

SEQ ID NO: 63989 - DNA, 25 bp, Artificial
  Probe
caaggaaggaatttattcggatttg

SEQ ID NO: 63990 - DNA, 25 bp, Artificial
  Probe
tgccgagaatccatgtatatatttg

SEQ ID NO: 63991 - DNA, 25 bp, Artificial
  Probe
aggctgccgagaatccatgtatata

SEQ ID NO: 63992 - DNA, 25 bp, Artificial
  Probe
gccgagaatccatgtatatatttga

SEQ ID NO: 63993 - DNA, 25 bp, Artificial
  Probe
ctgccgagaatccatgtatatattt

SEQ ID NO: 63994 - DNA, 25 bp, Artificial
  Probe
aataccatccttataacagttacgt

SEQ ID NO: 63995 - DNA, 25 bp, Artificial
  Probe
taaggaccgttacagacaaggaagg

SEQ ID NO: 63996 - DNA, 25 bp, Artificial
  Probe
accgttacagacaaggaaggaattt

SEQ ID NO: 63997 - DNA, 25 bp, Artificial
  Probe
ataccatccttataacagttacgtt

SEQ ID NO: 63998 - DNA, 25 bp, Artificial
  Probe
gcttaaattaaggaccgttacagac

SEQ ID NO: 63999 - DNA, 25 bp, Artificial
  Probe
aagattcggctgttattggaaccag

SEQ ID NO: 64000 - DNA, 25 bp, Artificial
  Probe
gttacagacaaggaaggaatttatt

SEQ ID NO: 64001 - DNA, 25 bp, Artificial
  Probe
cttaaattaaggaccgttacagaca

SEQ ID NO: 64002 - DNA, 25 bp, Artificial
  Probe
aatgtccatgcaggttgatatcgtt

SEQ ID NO: 64003 - DNA, 25 bp, Artificial
  Probe
aaggaatttattcggatttgaacgt

SEQ ID NO: 64004 - DNA, 25 bp, Artificial
  Probe
gcaggttgatatcgttggtaattta

SEQ ID NO: 64005 - DNA, 25 bp, Artificial
  Probe
ccatccttataacagttacgtttcc

SEQ ID NO: 64006 - DNA, 25 bp, Artificial
  Probe
agcttaaattaaggaccgttacaga

SEQ ID NO: 64007 - DNA, 25 bp, Artificial
  Probe
cagcttaaattaaggaccgttacag

SEQ ID NO: 64008 - DNA, 25 bp, Artificial
  Probe
tccttataacagttacgtttccaac

SEQ ID NO: 64009 - DNA, 25 bp, Artificial
  Probe
tgcaggttgatatcgttggtaattt

SEQ ID NO: 64010 - DNA, 25 bp, Artificial
  Probe
actccattatgcacagtttgagata

SEQ ID NO: 64011 - DNA, 25 bp, Artificial
  Probe
atatactgcttgctgtctccaataa

SEQ ID NO: 64012 - DNA, 25 bp, Artificial
  Probe
aatatactgcttgctgtctccaata

SEQ ID NO: 64013 - DNA, 25 bp, Artificial
  Probe
caatatactgcttgctgtctccaat

SEQ ID NO: 64014 - DNA, 25 bp, Artificial
  Probe
tcaatatactgcttgctgtctccaa

SEQ ID NO: 64015 - DNA, 25 bp, Artificial
  Probe
ttcaatatactgcttgctgtctcca

SEQ ID NO: 64016 - DNA, 25 bp, Artificial
  Probe
gaagatgtctcaaacttaaccctct

SEQ ID NO: 64017 - DNA, 25 bp, Artificial
  Probe
aagatgtctcaaacttaaccctctg

SEQ ID NO: 64018 - DNA, 25 bp, Artificial
  Probe
tatactgcttgctgtctccaataaa

SEQ ID NO: 64019 - DNA, 25 bp, Artificial
  Probe
ctttcaatatactgcttgctgtctc

SEQ ID NO: 64020 - DNA, 25 bp, Artificial
  Probe
tttcagttgggtcagattgttcttt

SEQ ID NO: 64021 - DNA, 25 bp, Artificial
  Probe
ggaagatgtctcaaacttaaccctc

SEQ ID NO: 64022 - DNA, 25 bp, Artificial
  Probe
caggaagatgtctcaaacttaaccc

SEQ ID NO: 64023 - DNA, 25 bp, Artificial
  Probe
ccaggaagatgtctcaaacttaacc

SEQ ID NO: 64024 - DNA, 25 bp, Artificial
  Probe
atactgcttgctgtctccaataaag

SEQ ID NO: 64025 - DNA, 25 bp, Artificial
  Probe
tttcaatatactgcttgctgtctcc

SEQ ID NO: 64026 - DNA, 25 bp, Artificial
  Probe
cctttcaatatactgcttgctgtct

SEQ ID NO: 64027 - DNA, 25 bp, Artificial
  Probe
ctctccctttcaatatactgcttgc

SEQ ID NO: 64028 - DNA, 25 bp, Artificial
  Probe
gctctccctttcaatatactgcttg

SEQ ID NO: 64029 - DNA, 25 bp, Artificial
  Probe
taaggaactctggagggaaattgtt

SEQ ID NO: 64030 - DNA, 25 bp, Artificial
  Probe
gccaggaagatgtctcaaacttaac

SEQ ID NO: 64031 - DNA, 25 bp, Artificial
  Probe
ctccctttcaatatactgcttgctg

SEQ ID NO: 64032 - DNA, 25 bp, Artificial
  Probe
tctccctttcaatatactgcttgct

SEQ ID NO: 64033 - DNA, 25 bp, Artificial
  Probe
agccaggaagatgtctcaaacttaa

SEQ ID NO: 64034 - DNA, 25 bp, Artificial
  Probe
ccctttcaatatactgcttgctgtc

SEQ ID NO: 64035 - DNA, 25 bp, Artificial
  Probe
ggctctccctttcaatatactgctt

SEQ ID NO: 64036 - DNA, 25 bp, Artificial
  Probe
ctgcttgctgtctccaataaagttt

SEQ ID NO: 64037 - DNA, 25 bp, Artificial
  Probe
cctggctctccctttcaatatactg

SEQ ID NO: 64038 - DNA, 25 bp, Artificial
  Probe
tccctttcaatatactgcttgctgt

SEQ ID NO: 64039 - DNA, 25 bp, Artificial
  Probe
aaggaactctggagggaaattgttt

SEQ ID NO: 64040 - DNA, 25 bp, Artificial
  Probe
aggaagatgtctcaaacttaaccct

SEQ ID NO: 64041 - DNA, 25 bp, Artificial
  Probe
tactgcttgctgtctccaataaagt

SEQ ID NO: 64042 - DNA, 25 bp, Artificial
  Probe
cagccaggaagatgtctcaaactta

SEQ ID NO: 64043 - DNA, 25 bp, Artificial
  Probe
agatgtctcaaacttaaccctctgc

SEQ ID NO: 64044 - DNA, 25 bp, Artificial
  Probe
ctggctctccctttcaatatactgc

SEQ ID NO: 64045 - DNA, 25 bp, Artificial
  Probe
tggctctccctttcaatatactgct

SEQ ID NO: 64046 - DNA, 25 bp, Artificial
  Probe
actgcttgctgtctccaataaagtt

SEQ ID NO: 64047 - DNA, 25 bp, Artificial
  Probe
aaattgttttcagttgggtcagatt

SEQ ID NO: 64048 - DNA, 25 bp, Artificial
  Probe
aattgttttcagttgggtcagattg

SEQ ID NO: 64049 - DNA, 25 bp, Artificial
  Probe
agacaagaatcccttcaaagaaaag

SEQ ID NO: 64050 - DNA, 25 bp, Artificial
  Probe
gttgggtcagattgttcttttgttt

SEQ ID NO: 64051 - DNA, 25 bp, Artificial
  Probe
caaagaagtgaagttgcagagacaa

SEQ ID NO: 64052 - DNA, 25 bp, Artificial
  Probe
attgttttcagttgggtcagattgt

SEQ ID NO: 64053 - DNA, 25 bp, Artificial
  Probe
tgggtcagattgttcttttgtttaa

SEQ ID NO: 64054 - DNA, 25 bp, Artificial
  Probe
ttgggtcagattgttcttttgttta

SEQ ID NO: 64055 - DNA, 25 bp, Artificial
  Probe
aagacaagaatcccttcaaagaaaa

SEQ ID NO: 64056 - DNA, 25 bp, Artificial
  Probe
ctggagaaacaaatatggtatcacg

SEQ ID NO: 64057 - DNA, 25 bp, Artificial
  Probe
gagaaacaaatatggtatcacggag

SEQ ID NO: 64058 - DNA, 25 bp, Artificial
  Probe
ggagaaacaaatatggtatcacgga

SEQ ID NO: 64059 - DNA, 25 bp, Artificial
  Probe
tggagaaacaaatatggtatcacgg

SEQ ID NO: 64060 - DNA, 25 bp, Artificial
  Probe
agaaacaaatatggtatcacggagc

SEQ ID NO: 64061 - DNA, 25 bp, Artificial
  Probe
actggagaaacaaatatggtatcac

SEQ ID NO: 64062 - DNA, 25 bp, Artificial
  Probe
cactggagaaacaaatatggtatca

SEQ ID NO: 64063 - DNA, 25 bp, Artificial
  Probe
caagaccaaagacaagtatgttctg

SEQ ID NO: 64064 - DNA, 25 bp, Artificial
  Probe
gaaacaaatatggtatcacggagcc

SEQ ID NO: 64065 - DNA, 25 bp, Artificial
  Probe
ccaagaccaaagacaagtatgttct

SEQ ID NO: 64066 - DNA, 25 bp, Artificial
  Probe
aagtcatccactactacaccaccag

SEQ ID NO: 64067 - DNA, 25 bp, Artificial
  Probe
gaagtcatccactactacaccacca

SEQ ID NO: 64068 - DNA, 25 bp, Artificial
  Probe
caaagacaagtatgttctgggtcag

SEQ ID NO: 64069 - DNA, 25 bp, Artificial
  Probe
cccactggagaaacaaatatggtat

SEQ ID NO: 64070 - DNA, 25 bp, Artificial
  Probe
ccactggagaaacaaatatggtatc

SEQ ID NO: 64071 - DNA, 25 bp, Artificial
  Probe
aagaccaaagacaagtatgttctgg

SEQ ID NO: 64072 - DNA, 25 bp, Artificial
  Probe
gccaagaccaaagacaagtatgttc

SEQ ID NO: 64073 - DNA, 25 bp, Artificial
  Probe
tcccactggagaaacaaatatggta

SEQ ID NO: 64074 - DNA, 25 bp, Artificial
  Probe
catcccactggagaaacaaatatgg

SEQ ID NO: 64075 - DNA, 25 bp, Artificial
  Probe
ccatcccactggagaaacaaatatg

SEQ ID NO: 64076 - DNA, 25 bp, Artificial
  Probe
atcccactggagaaacaaatatggt

SEQ ID NO: 64077 - DNA, 25 bp, Artificial
  Probe
accatcccactggagaaacaaatat

SEQ ID NO: 64078 - DNA, 25 bp, Artificial
  Probe
agaccaaagacaagtatgttctggg

SEQ ID NO: 64079 - DNA, 25 bp, Artificial
  Probe
aaacaaatatggtatcacggagcca

SEQ ID NO: 64080 - DNA, 25 bp, Artificial
  Probe
ccaaagacaagtatgttctgggtca

SEQ ID NO: 64081 - DNA, 25 bp, Artificial
  Probe
accaaagacaagtatgttctgggtc

SEQ ID NO: 64082 - DNA, 25 bp, Artificial
  Probe
gaccaaagacaagtatgttctgggt

SEQ ID NO: 64083 - DNA, 25 bp, Artificial
  Probe
cactactacaccaccaggaagctac

SEQ ID NO: 64084 - DNA, 25 bp, Artificial
  Probe
catccactactacaccaccaggaag

SEQ ID NO: 64085 - DNA, 25 bp, Artificial
  Probe
ggaagtcatccactactacaccacc

SEQ ID NO: 64086 - DNA, 25 bp, Artificial
  Probe
caccatcccactggagaaacaaata

SEQ ID NO: 64087 - DNA, 25 bp, Artificial
  Probe
gtgtgtgtcgtgtgtatggtacaag

SEQ ID NO: 64088 - DNA, 25 bp, Artificial
  Probe
tcatccactactacaccaccaggaa

SEQ ID NO: 64089 - DNA, 25 bp, Artificial
  Probe
cggaagtcatccactactacaccac

SEQ ID NO: 64090 - DNA, 25 bp, Artificial
  Probe
agtcatccactactacaccaccagg

SEQ ID NO: 64091 - DNA, 25 bp, Artificial
  Probe
agtgtgtgtcgtgtgtatggtacaa

SEQ ID NO: 64092 - DNA, 25 bp, Artificial
  Probe
cgagaaccttctgcgactctgtaag

SEQ ID NO: 64093 - DNA, 25 bp, Artificial
  Probe
aaagacaagtatgttctgggtcaga

SEQ ID NO: 64094 - DNA, 25 bp, Artificial
  Probe
actactacaccaccaggaagctacc

SEQ ID NO: 64095 - DNA, 25 bp, Artificial
  Probe
ccactactacaccaccaggaagcta

SEQ ID NO: 64096 - DNA, 25 bp, Artificial
  Probe
gtcatccactactacaccaccagga

SEQ ID NO: 64097 - DNA, 25 bp, Artificial
  Probe
cagtgtgtgtcgtgtgtatggtaca

SEQ ID NO: 64098 - DNA, 25 bp, Artificial
  Probe
aacaaatatggtatcacggagccat

SEQ ID NO: 64099 - DNA, 25 bp, Artificial
  Probe
aaatatggtatcacggagccatcag

SEQ ID NO: 64100 - DNA, 25 bp, Artificial
  Probe
ggccaagaccaaagacaagtatgtt

SEQ ID NO: 64101 - DNA, 25 bp, Artificial
  Probe
ctaggcttatagttctatggctgag

SEQ ID NO: 64102 - DNA, 25 bp, Artificial
  Probe
taggcttatagttctatggctgaga

SEQ ID NO: 64103 - DNA, 25 bp, Artificial
  Probe
gggttgttaaagattctattcagcc

SEQ ID NO: 64104 - DNA, 25 bp, Artificial
  Probe
tgttgtttgggttgttaaagattct

SEQ ID NO: 64105 - DNA, 25 bp, Artificial
  Probe
tgggttgttaaagattctattcagc

SEQ ID NO: 64106 - DNA, 25 bp, Artificial
  Probe
ctgttgtttgggttgttaaagattc

SEQ ID NO: 64107 - DNA, 25 bp, Artificial
  Probe
ggttgttaaagattctattcagcct

SEQ ID NO: 64108 - DNA, 25 bp, Artificial
  Probe
tctgttgtttgggttgttaaagatt

SEQ ID NO: 64109 - DNA, 25 bp, Artificial
  Probe
aagtatatctgttgtttgggttgtt

SEQ ID NO: 64110 - DNA, 25 bp, Artificial
  Probe
aaagtatatctgttgtttgggttgt

SEQ ID NO: 64111 - DNA, 25 bp, Artificial
  Probe
ggcttatagttctatggctgagaat

SEQ ID NO: 64112 - DNA, 25 bp, Artificial
  Probe
atagttctatggctgagaatggatt

SEQ ID NO: 64113 - DNA, 25 bp, Artificial
  Probe
tatctgttgtttgggttgttaaaga

SEQ ID NO: 64114 - DNA, 25 bp, Artificial
  Probe
tctatggctgagaatggatttactc

SEQ ID NO: 64115 - DNA, 25 bp, Artificial
  Probe
aggcttatagttctatggctgagaa

SEQ ID NO: 64116 - DNA, 25 bp, Artificial
  Probe
gcttatagttctatggctgagaatg

SEQ ID NO: 64117 - DNA, 25 bp, Artificial
  Probe
ttatagttctatggctgagaatgga

SEQ ID NO: 64118 - DNA, 25 bp, Artificial
  Probe
agtatatctgttgtttgggttgtta

SEQ ID NO: 64119 - DNA, 25 bp, Artificial
  Probe
tatagttctatggctgagaatggat

SEQ ID NO: 64120 - DNA, 25 bp, Artificial
  Probe
cttatagttctatggctgagaatgg

SEQ ID NO: 64121 - DNA, 25 bp, Artificial
  Probe
atatctgttgtttgggttgttaaag

SEQ ID NO: 64122 - DNA, 25 bp, Artificial
  Probe
gttgtttgggttgttaaagattcta

SEQ ID NO: 64123 - DNA, 25 bp, Artificial
  Probe
gactatgttgtgaatttcaggctaa

SEQ ID NO: 64124 - DNA, 25 bp, Artificial
  Probe
ggactatgttgtgaatttcaggcta

SEQ ID NO: 64125 - DNA, 25 bp, Artificial
  Probe
tgttaaagattctattcagccttct

SEQ ID NO: 64126 - DNA, 25 bp, Artificial
  Probe
atgttgtgaatttcaggctaatctg

SEQ ID NO: 64127 - DNA, 25 bp, Artificial
  Probe
actatgttgtgaatttcaggctaat

SEQ ID NO: 64128 - DNA, 25 bp, Artificial
  Probe
ctatggctgagaatggatttactcc

SEQ ID NO: 64129 - DNA, 25 bp, Artificial
  Probe
tatgttgtgaatttcaggctaatct

SEQ ID NO: 64130 - DNA, 25 bp, Artificial
  Probe
gtatatctgttgtttgggttgttaa

SEQ ID NO: 64131 - DNA, 25 bp, Artificial
  Probe
gttgttaaagattctattcagcctt

SEQ ID NO: 64132 - DNA, 25 bp, Artificial
  Probe
actgggttagtgagttatgtaaatt

SEQ ID NO: 64133 - DNA, 25 bp, Artificial
  Probe
ctatgttgtgaatttcaggctaatc

SEQ ID NO: 64134 - DNA, 25 bp, Artificial
  Probe
gaggcatacataaatttgagactgg

SEQ ID NO: 64135 - DNA, 25 bp, Artificial
  Probe
ggaggcatacataaatttgagactg

SEQ ID NO: 64136 - DNA, 25 bp, Artificial
  Probe
caggaggcatacataaatttgagac

SEQ ID NO: 64137 - DNA, 25 bp, Artificial
  Probe
aggaggcatacataaatttgagact

SEQ ID NO: 64138 - DNA, 25 bp, Artificial
  Probe
ttgggttgttaaagattctattcag

SEQ ID NO: 64139 - DNA, 25 bp, Artificial
  Probe
ttgttaaagattctattcagccttc

SEQ ID NO: 64140 - DNA, 25 bp, Artificial
  Probe
gcaggaggcatacataaatttgaga

SEQ ID NO: 64141 - DNA, 25 bp, Artificial
  Probe
tgtttgggttgttaaagattctatt

SEQ ID NO: 64142 - DNA, 25 bp, Artificial
  Probe
ttgtttgggttgttaaagattctat

SEQ ID NO: 64143 - DNA, 25 bp, Artificial
  Probe
ttattgactttgaatacagcagttt

SEQ ID NO: 64144 - DNA, 25 bp, Artificial
  Probe
gttaaagattctattcagccttctg

SEQ ID NO: 64145 - DNA, 25 bp, Artificial
  Probe
aggcatacataaatttgagactggc

SEQ ID NO: 64146 - DNA, 25 bp, Artificial
  Probe
accaagcagaagtaatatagtccat

SEQ ID NO: 64147 - DNA, 25 bp, Artificial
  Probe
gcagaagaccaagcagaagtaatat

SEQ ID NO: 64148 - DNA, 25 bp, Artificial
  Probe
agcagaagaccaagcagaagtaata

SEQ ID NO: 64149 - DNA, 25 bp, Artificial
  Probe
gaagaccaagcagaagtaatatagt

SEQ ID NO: 64150 - DNA, 25 bp, Artificial
  Probe
cagaagaccaagcagaagtaatata

SEQ ID NO: 64151 - DNA, 25 bp, Artificial
  Probe
gaccaagcagaagtaatatagtcca

SEQ ID NO: 64152 - DNA, 25 bp, Artificial
  Probe
agaccaagcagaagtaatatagtcc

SEQ ID NO: 64153 - DNA, 25 bp, Artificial
  Probe
ttaagcagaccatcttagttccttg

SEQ ID NO: 64154 - DNA, 25 bp, Artificial
  Probe
gttaagcagaccatcttagttcctt

SEQ ID NO: 64155 - DNA, 25 bp, Artificial
  Probe
agaagaccaagcagaagtaatatag

SEQ ID NO: 64156 - DNA, 25 bp, Artificial
  Probe
aagcagaccatcttagttccttgaa

SEQ ID NO: 64157 - DNA, 25 bp, Artificial
  Probe
gagttaagcagaccatcttagttcc

SEQ ID NO: 64158 - DNA, 25 bp, Artificial
  Probe
taagcagaccatcttagttccttga

SEQ ID NO: 64159 - DNA, 25 bp, Artificial
  Probe
agttaagcagaccatcttagttcct

SEQ ID NO: 64160 - DNA, 25 bp, Artificial
  Probe
ccaagcagaagtaatatagtccata

SEQ ID NO: 64161 - DNA, 25 bp, Artificial
  Probe
tactggaagttcatctgaagtggaa

SEQ ID NO: 64162 - DNA, 25 bp, Artificial
  Probe
aagaccaagcagaagtaatatagtc

SEQ ID NO: 64163 - DNA, 25 bp, Artificial
  Probe
gtactggaagttcatctgaagtgga

SEQ ID NO: 64164 - DNA, 25 bp, Artificial
  Probe
cagcagaagaccaagcagaagtaat

SEQ ID NO: 64165 - DNA, 25 bp, Artificial
  Probe
agtaatatagtccatatgcagccag

SEQ ID NO: 64166 - DNA, 25 bp, Artificial
  Probe
atctgaagtggaactctatgggatt

SEQ ID NO: 64167 - DNA, 25 bp, Artificial
  Probe
gtaatatagtccatatgcagccagg

SEQ ID NO: 64168 - DNA, 25 bp, Artificial
  Probe
aagtaatatagtccatatgcagcca

SEQ ID NO: 64169 - DNA, 25 bp, Artificial
  Probe
tctgaagtggaactctatgggattt

SEQ ID NO: 64170 - DNA, 25 bp, Artificial
  Probe
gaagtaatatagtccatatgcagcc

SEQ ID NO: 64171 - DNA, 25 bp, Artificial
  Probe
ggtactggaagttcatctgaagtgg

SEQ ID NO: 64172 - DNA, 25 bp, Artificial
  Probe
ttcagagccatgttctaccaatgtc

SEQ ID NO: 64173 - DNA, 25 bp, Artificial
  Probe
catctgaagtggaactctatgggat

SEQ ID NO: 64174 - DNA, 25 bp, Artificial
  Probe
gttcagagccatgttctaccaatgt

SEQ ID NO: 64175 - DNA, 25 bp, Artificial
  Probe
agaagtaatatagtccatatgcagc

SEQ ID NO: 64176 - DNA, 25 bp, Artificial
  Probe
tcagcagaagaccaagcagaagtaa

SEQ ID NO: 64177 - DNA, 25 bp, Artificial
  Probe
taatatagtccatatgcagccaggc

SEQ ID NO: 64178 - DNA, 25 bp, Artificial
  Probe
ttaggtcttctccataccctctaaa

SEQ ID NO: 64179 - DNA, 25 bp, Artificial
  Probe
gttaggtcttctccataccctctaa

SEQ ID NO: 64180 - DNA, 25 bp, Artificial
  Probe
ttcatctgaagtggaactctatggg

SEQ ID NO: 64181 - DNA, 25 bp, Artificial
  Probe
tttgggtactggaagttcatctgaa

SEQ ID NO: 64182 - DNA, 25 bp, Artificial
  Probe
ctctttgggtactggaagttcatct

SEQ ID NO: 64183 - DNA, 25 bp, Artificial
  Probe
tcatctgaagtggaactctatggga

SEQ ID NO: 64184 - DNA, 25 bp, Artificial
  Probe
catgctgttaggtcttctccatacc

SEQ ID NO: 64185 - DNA, 25 bp, Artificial
  Probe
tgttaggtcttctccataccctcta

SEQ ID NO: 64186 - DNA, 25 bp, Artificial
  Probe
caagcagaagtaatatagtccatat

SEQ ID NO: 64187 - DNA, 25 bp, Artificial
  Probe
ttgggtactggaagttcatctgaag

SEQ ID NO: 64188 - DNA, 25 bp, Artificial
  Probe
ctttgggtactggaagttcatctga

SEQ ID NO: 64189 - DNA, 25 bp, Artificial
  Probe
tctttgggtactggaagttcatctg

SEQ ID NO: 64190 - DNA, 25 bp, Artificial
  Probe
actctttgggtactggaagttcatc

SEQ ID NO: 64191 - DNA, 25 bp, Artificial
  Probe
tttcacacagaatttcccagttatg

SEQ ID NO: 64192 - DNA, 25 bp, Artificial
  Probe
ctttcacacagaatttcccagttat

SEQ ID NO: 64193 - DNA, 25 bp, Artificial
  Probe
ttcacacagaatttcccagttatga

SEQ ID NO: 64194 - DNA, 25 bp, Artificial
  Probe
gctttcacacagaatttcccagtta

SEQ ID NO: 64195 - DNA, 25 bp, Artificial
  Probe
gtaaagaccatgagacagaacttct

SEQ ID NO: 64196 - DNA, 25 bp, Artificial
  Probe
gttcttgctcccaggtacataaatc

SEQ ID NO: 64197 - DNA, 25 bp, Artificial
  Probe
tgtaaagaccatgagacagaacttc

SEQ ID NO: 64198 - DNA, 25 bp, Artificial
  Probe
tttgctttcacacagaatttcccag

SEQ ID NO: 64199 - DNA, 25 bp, Artificial
  Probe
ttcttgctcccaggtacataaatcc

SEQ ID NO: 64200 - DNA, 25 bp, Artificial
  Probe
tgttcttgctcccaggtacataaat

SEQ ID NO: 64201 - DNA, 25 bp, Artificial
  Probe
ctcggagttctacgctgatgacatt

SEQ ID NO: 64202 - DNA, 25 bp, Artificial
  Probe
tgctttcacacagaatttcccagtt

SEQ ID NO: 64203 - DNA, 25 bp, Artificial
  Probe
ttgctttcacacagaatttcccagt

SEQ ID NO: 64204 - DNA, 25 bp, Artificial
  Probe
gtgttcttgctcccaggtacataaa

SEQ ID NO: 64205 - DNA, 25 bp, Artificial
  Probe
tccttttgctttcacacagaatttc

SEQ ID NO: 64206 - DNA, 25 bp, Artificial
  Probe
ctccttttgctttcacacagaattt

SEQ ID NO: 64207 - DNA, 25 bp, Artificial
  Probe
tcggagttctacgctgatgacattg

SEQ ID NO: 64208 - DNA, 25 bp, Artificial
  Probe
cttttgctttcacacagaatttccc

SEQ ID NO: 64209 - DNA, 25 bp, Artificial
  Probe
ccttttgctttcacacagaatttcc

SEQ ID NO: 64210 - DNA, 25 bp, Artificial
  Probe
tcttgctcccaggtacataaatcct

SEQ ID NO: 64211 - DNA, 25 bp, Artificial
  Probe
ttttgctttcacacagaatttccca

SEQ ID NO: 64212 - DNA, 25 bp, Artificial
  Probe
agtgttcttgctcccaggtacataa

SEQ ID NO: 64213 - DNA, 25 bp, Artificial
  Probe
gagtgttcttgctcccaggtacata

SEQ ID NO: 64214 - DNA, 25 bp, Artificial
  Probe
gctccttttgctttcacacagaatt

SEQ ID NO: 64215 - DNA, 25 bp, Artificial
  Probe
tgtctcagagagtgaaaatgtccag

SEQ ID NO: 64216 - DNA, 25 bp, Artificial
  Probe
ctgtaaagaccatgagacagaactt

SEQ ID NO: 64217 - DNA, 25 bp, Artificial
  Probe
tacctgtaaagaccatgagacagaa

SEQ ID NO: 64218 - DNA, 25 bp, Artificial
  Probe
ctgtctcagagagtgaaaatgtcca

SEQ ID NO: 64219 - DNA, 25 bp, Artificial
  Probe
taaagaccatgagacagaacttctg

SEQ ID NO: 64220 - DNA, 25 bp, Artificial
  Probe
gaagctgtctcagagagtgaaaatg

SEQ ID NO: 64221 - DNA, 25 bp, Artificial
  Probe
tgaagctgtctcagagagtgaaaat

SEQ ID NO: 64222 - DNA, 25 bp, Artificial
  Probe
aagctgtctcagagagtgaaaatgt

SEQ ID NO: 64223 - DNA, 25 bp, Artificial
  Probe
tgctccttttgctttcacacagaat

SEQ ID NO: 64224 - DNA, 25 bp, Artificial
  Probe
cctgtaaagaccatgagacagaact

SEQ ID NO: 64225 - DNA, 25 bp, Artificial
  Probe
agctgtctcagagagtgaaaatgtc

SEQ ID NO: 64226 - DNA, 25 bp, Artificial
  Probe
acctgtaaagaccatgagacagaac

SEQ ID NO: 64227 - DNA, 25 bp, Artificial
  Probe
gtctcagagagtgaaaatgtccagc

SEQ ID NO: 64228 - DNA, 25 bp, Artificial
  Probe
catctcggagttctacgctgatgac

SEQ ID NO: 64229 - DNA, 25 bp, Artificial
  Probe
gctgtctcagagagtgaaaatgtcc

SEQ ID NO: 64230 - DNA, 25 bp, Artificial
  Probe
ctcagagagtgaaaatgtccagcca

SEQ ID NO: 64231 - DNA, 25 bp, Artificial
  Probe
tctcagagagtgaaaatgtccagcc

SEQ ID NO: 64232 - DNA, 25 bp, Artificial
  Probe
gtgctccttttgctttcacacagaa

SEQ ID NO: 64233 - DNA, 25 bp, Artificial
  Probe
ctgaagctgtctcagagagtgaaaa

SEQ ID NO: 64234 - DNA, 25 bp, Artificial
  Probe
cttgctcccaggtacataaatcctg

SEQ ID NO: 64235 - DNA, 25 bp, Artificial
  Probe
tcagagagtgaaaatgtccagccac

SEQ ID NO: 64236 - DNA, 25 bp, Artificial
  Probe
gctgaagctgtctcagagagtgaaa

SEQ ID NO: 64237 - DNA, 25 bp, Artificial
  Probe
aagagtcacagaattaggaaggttg

SEQ ID NO: 64238 - DNA, 25 bp, Artificial
  Probe
gtcacagaattaggaaggttgagag

SEQ ID NO: 64239 - DNA, 25 bp, Artificial
  Probe
gagtcacagaattaggaaggttgag

SEQ ID NO: 64240 - DNA, 25 bp, Artificial
  Probe
agtcacagaattaggaaggttgaga

SEQ ID NO: 64241 - DNA, 25 bp, Artificial
  Probe
agagtcacagaattaggaaggttga

SEQ ID NO: 64242 - DNA, 25 bp, Artificial
  Probe
cagtggtctgaactaatatcctgtt

SEQ ID NO: 64243 - DNA, 25 bp, Artificial
  Probe
catcgctgagattaatgtatgaagg

SEQ ID NO: 64244 - DNA, 25 bp, Artificial
  Probe
ccagtggtctgaactaatatcctgt

SEQ ID NO: 64245 - DNA, 25 bp, Artificial
  Probe
ttgtcatcgctgagattaatgtatg

SEQ ID NO: 64246 - DNA, 25 bp, Artificial
  Probe
tcacagaattaggaaggttgagagc

SEQ ID NO: 64247 - DNA, 25 bp, Artificial
  Probe
tgaaatcccaaactgagatgtatga

SEQ ID NO: 64248 - DNA, 25 bp, Artificial
  Probe
tgatgaaatcccaaactgagatgta

SEQ ID NO: 64249 - DNA, 25 bp, Artificial
  Probe
aaagagtcacagaattaggaaggtt

SEQ ID NO: 64250 - DNA, 25 bp, Artificial
  Probe
gaaagagtcacagaattaggaaggt

SEQ ID NO: 64251 - DNA, 25 bp, Artificial
  Probe
ttggagagcacagatgtttatatca

SEQ ID NO: 64252 - DNA, 25 bp, Artificial
  Probe
tggagagcacagatgtttatatcac

SEQ ID NO: 64253 - DNA, 25 bp, Artificial
  Probe
gaaatcccaaactgagatgtatgaa

SEQ ID NO: 64254 - DNA, 25 bp, Artificial
  Probe
atgaaatcccaaactgagatgtatg

SEQ ID NO: 64255 - DNA, 25 bp, Artificial
  Probe
ctgatgaaatcccaaactgagatgt

SEQ ID NO: 64256 - DNA, 25 bp, Artificial
  Probe
gatgaaatcccaaactgagatgtat

SEQ ID NO: 64257 - DNA, 25 bp, Artificial
  Probe
aaatcccaaactgagatgtatgaaa

SEQ ID NO: 64258 - DNA, 25 bp, Artificial
  Probe
aaacctgatgaaatcccaaactgag

SEQ ID NO: 64259 - DNA, 25 bp, Artificial
  Probe
cattggagagcacagatgtttatat

SEQ ID NO: 64260 - DNA, 25 bp, Artificial
  Probe
gaattaggaaggttgagagccactg

SEQ ID NO: 64261 - DNA, 25 bp, Artificial
  Probe
agaattaggaaggttgagagccact

SEQ ID NO: 64262 - DNA, 25 bp, Artificial
  Probe
cagaattaggaaggttgagagccac

SEQ ID NO: 64263 - DNA, 25 bp, Artificial
  Probe
cacagaattaggaaggttgagagcc

SEQ ID NO: 64264 - DNA, 25 bp, Artificial
  Probe
ccattggagagcacagatgtttata

SEQ ID NO: 64265 - DNA, 25 bp, Artificial
  Probe
tgaaagagtcacagaattaggaagg

SEQ ID NO: 64266 - DNA, 25 bp, Artificial
  Probe
agtggtctgaactaatatcctgttt

SEQ ID NO: 64267 - DNA, 25 bp, Artificial
  Probe
ggttgaaagagtcacagaattagga

SEQ ID NO: 64268 - DNA, 25 bp, Artificial
  Probe
attggagagcacagatgtttatatc

SEQ ID NO: 64269 - DNA, 25 bp, Artificial
  Probe
cctgatgaaatcccaaactgagatg

SEQ ID NO: 64270 - DNA, 25 bp, Artificial
  Probe
tggttgaaagagtcacagaattagg

SEQ ID NO: 64271 - DNA, 25 bp, Artificial
  Probe
atcaccagtggtctgaactaatatc

SEQ ID NO: 64272 - DNA, 25 bp, Artificial
  Probe
gttgaaagagtcacagaattaggaa

SEQ ID NO: 64273 - DNA, 25 bp, Artificial
  Probe
atggttgaaagagtcacagaattag

SEQ ID NO: 64274 - DNA, 25 bp, Artificial
  Probe
agagcacagatgtttatatcacagt

SEQ ID NO: 64275 - DNA, 25 bp, Artificial
  Probe
ggagagcacagatgtttatatcaca

SEQ ID NO: 64276 - DNA, 25 bp, Artificial
  Probe
attaggaaggttgagagccactgaa

SEQ ID NO: 64277 - DNA, 25 bp, Artificial
  Probe
gagagcacagatgtttatatcacag

SEQ ID NO: 64278 - DNA, 25 bp, Artificial
  Probe
acctgatgaaatcccaaactgagat

SEQ ID NO: 64279 - DNA, 25 bp, Artificial
  Probe
ttgaaagagtcacagaattaggaag

SEQ ID NO: 64280 - DNA, 25 bp, Artificial
  Probe
gagcacagatgtttatatcacagtt

SEQ ID NO: 64281 - DNA, 25 bp, Artificial
  Probe
tttatggttgaaagagtcacagaat

SEQ ID NO: 64282 - DNA, 25 bp, Artificial
  Probe
gaaggatgtctgtgttgtacctaac

SEQ ID NO: 64283 - DNA, 25 bp, Artificial
  Probe
aggatgtctgtgttgtacctaactt

SEQ ID NO: 64284 - DNA, 25 bp, Artificial
  Probe
aaggatgtctgtgttgtacctaact

SEQ ID NO: 64285 - DNA, 25 bp, Artificial
  Probe
tgaaggatgtctgtgttgtacctaa

SEQ ID NO: 64286 - DNA, 25 bp, Artificial
  Probe
ttgaaggatgtctgtgttgtaccta

SEQ ID NO: 64287 - DNA, 25 bp, Artificial
  Probe
gtgtcattgaatttcctgctgttaa

SEQ ID NO: 64288 - DNA, 25 bp, Artificial
  Probe
aagctagtcagatgtgaattgtatc

SEQ ID NO: 64289 - DNA, 25 bp, Artificial
  Probe
tgtgtcattgaatttcctgctgtta

SEQ ID NO: 64290 - DNA, 25 bp, Artificial
  Probe
taatcaatgctgaggtggctaaata

SEQ ID NO: 64291 - DNA, 25 bp, Artificial
  Probe
gtttgtgtcattgaatttcctgctg

SEQ ID NO: 64292 - DNA, 25 bp, Artificial
  Probe
agtttgtgtcattgaatttcctgct

SEQ ID NO: 64293 - DNA, 25 bp, Artificial
  Probe
aacagtttgtgtcattgaatttcct

SEQ ID NO: 64294 - DNA, 25 bp, Artificial
  Probe
ttgtgtcattgaatttcctgctgtt

SEQ ID NO: 64295 - DNA, 25 bp, Artificial
  Probe
tttgtgtcattgaatttcctgctgt

SEQ ID NO: 64296 - DNA, 25 bp, Artificial
  Probe
ggatgtctgtgttgtacctaacttt

SEQ ID NO: 64297 - DNA, 25 bp, Artificial
  Probe
aatcaatgctgaggtggctaaatac

SEQ ID NO: 64298 - DNA, 25 bp, Artificial
  Probe
acagtttgtgtcattgaatttcctg

SEQ ID NO: 64299 - DNA, 25 bp, Artificial
  Probe
aaacagtttgtgtcattgaatttcc

SEQ ID NO: 64300 - DNA, 25 bp, Artificial
  Probe
agctagtcagatgtgaattgtatct

SEQ ID NO: 64301 - DNA, 25 bp, Artificial
  Probe
aaaggagaaacaaagctagtcagat

SEQ ID NO: 64302 - DNA, 25 bp, Artificial
  Probe
gaaaggagaaacaaagctagtcaga

SEQ ID NO: 64303 - DNA, 25 bp, Artificial
  Probe
aaggagaaacaaagctagtcagatg

SEQ ID NO: 64304 - DNA, 25 bp, Artificial
  Probe
cagtttgtgtcattgaatttcctgc

SEQ ID NO: 64305 - DNA, 25 bp, Artificial
  Probe
ttaacagaaacaacaggaaagctca

SEQ ID NO: 64306 - DNA, 25 bp, Artificial
  Probe
aagtgtgctggaagtacattgactg

SEQ ID NO: 64307 - DNA, 25 bp, Artificial
  Probe
caagtgtgctggaagtacattgact

SEQ ID NO: 64308 - DNA, 25 bp, Artificial
  Probe
taacagaaacaacaggaaagctcag

SEQ ID NO: 64309 - DNA, 25 bp, Artificial
  Probe
ggaaaggagaaacaaagctagtcag

SEQ ID NO: 64310 - DNA, 25 bp, Artificial
  Probe
gatttcttgtagatgtatcttcacg

SEQ ID NO: 64311 - DNA, 25 bp, Artificial
  Probe
caaagctagtcagatgtgaattgta

SEQ ID NO: 64312 - DNA, 25 bp, Artificial
  Probe
gtctggtgctgactgttgttcttag

SEQ ID NO: 64313 - DNA, 25 bp, Artificial
  Probe
aacaaagctagtcagatgtgaattg

SEQ ID NO: 64314 - DNA, 25 bp, Artificial
  Probe
gagcataacccacgtttgtataaat

SEQ ID NO: 64315 - DNA, 25 bp, Artificial
  Probe
gaaacaaagctagtcagatgtgaat

SEQ ID NO: 64316 - DNA, 25 bp, Artificial
  Probe
agaaacaaagctagtcagatgtgaa

SEQ ID NO: 64317 - DNA, 25 bp, Artificial
  Probe
attgagcataacccacgtttgtata

SEQ ID NO: 64318 - DNA, 25 bp, Artificial
  Probe
agcataacccacgtttgtataaatt

SEQ ID NO: 64319 - DNA, 25 bp, Artificial
  Probe
tgagcataacccacgtttgtataaa

SEQ ID NO: 64320 - DNA, 25 bp, Artificial
  Probe
ttgagcataacccacgtttgtataa

SEQ ID NO: 64321 - DNA, 25 bp, Artificial
  Probe
aaacaaagctagtcagatgtgaatt

SEQ ID NO: 64322 - DNA, 25 bp, Artificial
  Probe
gagaaacaaagctagtcagatgtga

SEQ ID NO: 64323 - DNA, 25 bp, Artificial
  Probe
ttaagctgggcaaatgaaatgacaa

SEQ ID NO: 64324 - DNA, 25 bp, Artificial
  Probe
ctgactgttgttcttagcatcacaa

SEQ ID NO: 64325 - DNA, 25 bp, Artificial
  Probe
tcggtcagtacatattagaatttga

SEQ ID NO: 64326 - DNA, 25 bp, Artificial
  Probe
tttgaaggatgtctgtgttgtacct

SEQ ID NO: 64327 - DNA, 25 bp, Artificial
  Probe
aaaagatacaagggaattgggaggg

SEQ ID NO: 64328 - DNA, 25 bp, Artificial
  Probe
ggtgcaaaagaggagagtaagaaaa

SEQ ID NO: 64329 - DNA, 25 bp, Artificial
  Probe
gggtgcaaaagaggagagtaagaaa

SEQ ID NO: 64330 - DNA, 25 bp, Artificial
  Probe
cgaactggagaaggggagagatttt

SEQ ID NO: 64331 - DNA, 25 bp, Artificial
  Probe
aaagatacaagggaattgggagggg

SEQ ID NO: 64332 - DNA, 25 bp, Artificial
  Probe
ggggtgcaaaagaggagagtaagaa

SEQ ID NO: 64333 - DNA, 25 bp, Artificial
  Probe
aagatacaagggaattgggaggggt

SEQ ID NO: 64334 - DNA, 25 bp, Artificial
  Probe
gaggggtgcaaaagaggagagtaag

SEQ ID NO: 64335 - DNA, 25 bp, Artificial
  Probe
aggggtgcaaaagaggagagtaaga

SEQ ID NO: 64336 - DNA, 25 bp, Artificial
  Probe
acttaacttgttaatgcagaagaag

SEQ ID NO: 64337 - DNA, 25 bp, Artificial
  Probe
aacttaacttgttaatgcagaagaa

SEQ ID NO: 64338 - DNA, 25 bp, Artificial
  Probe
taaacctgaacgaaacacccttctc

SEQ ID NO: 64339 - DNA, 25 bp, Artificial
  Probe
ccaacatcagaatgagaactgagaa

SEQ ID NO: 64340 - DNA, 25 bp, Artificial
  Probe
tatctgatccagcaaactcttggtt

SEQ ID NO: 64341 - DNA, 25 bp, Artificial
  Probe
cgctccaacatcagaatgagaactg

SEQ ID NO: 64342 - DNA, 25 bp, Artificial
  Probe
ctccaacatcagaatgagaactgag

SEQ ID NO: 64343 - DNA, 25 bp, Artificial
  Probe
tccaacatcagaatgagaactgaga

SEQ ID NO: 64344 - DNA, 25 bp, Artificial
  Probe
aagccctgtgttgaattttgagaat

SEQ ID NO: 64345 - DNA, 25 bp, Artificial
  Probe
gtatctgatccagcaaactcttggt

SEQ ID NO: 64346 - DNA, 25 bp, Artificial
  Probe
aaacttaacttgttaatgcagaaga

SEQ ID NO: 64347 - DNA, 25 bp, Artificial
  Probe
cggtatctgatccagcaaactcttg

SEQ ID NO: 64348 - DNA, 25 bp, Artificial
  Probe
ggtatctgatccagcaaactcttgg

SEQ ID NO: 64349 - DNA, 25 bp, Artificial
  Probe
atctgatccagcaaactcttggttg

SEQ ID NO: 64350 - DNA, 25 bp, Artificial
  Probe
gctccaacatcagaatgagaactga

SEQ ID NO: 64351 - DNA, 25 bp, Artificial
  Probe
ctggtgctgcttttaaaggtatagg

SEQ ID NO: 64352 - DNA, 25 bp, Artificial
  Probe
gaaacactttggaaaggcgacagag

SEQ ID NO: 64353 - DNA, 25 bp, Artificial
  Probe
ttgatagttccgtttgtccctggtg

SEQ ID NO: 64354 - DNA, 25 bp, Artificial
  Probe
cctggtgctgcttttaaaggtatag

SEQ ID NO: 64355 - DNA, 25 bp, Artificial
  Probe
tggtgctgcttttaaaggtataggg

SEQ ID NO: 64356 - DNA, 25 bp, Artificial
  Probe
cctctatgtatgatgtcatactgca

SEQ ID NO: 64357 - DNA, 25 bp, Artificial
  Probe
ttttccctctatgtatgatgtcata

SEQ ID NO: 64358 - DNA, 25 bp, Artificial
  Probe
ccctggtgctgcttttaaaggtata

SEQ ID NO: 64359 - DNA, 25 bp, Artificial
  Probe
aaaacttaacttgttaatgcagaag

SEQ ID NO: 64360 - DNA, 25 bp, Artificial
  Probe
aaagctctgtaaagcccgtaaggaa

SEQ ID NO: 64361 - DNA, 25 bp, Artificial
  Probe
tctgatccagcaaactcttggttgg

SEQ ID NO: 64362 - DNA, 25 bp, Artificial
  Probe
aaacacccttctccggtatctgatc

SEQ ID NO: 64363 - DNA, 25 bp, Artificial
  Probe
gaaacacccttctccggtatctgat

SEQ ID NO: 64364 - DNA, 25 bp, Artificial
  Probe
cttctccggtatctgatccagcaaa

SEQ ID NO: 64365 - DNA, 25 bp, Artificial
  Probe
ggtgctgcttttaaaggtatagggc

SEQ ID NO: 64366 - DNA, 25 bp, Artificial
  Probe
ttttctcagttctcattctgaagat

SEQ ID NO: 64367 - DNA, 25 bp, Artificial
  Probe
attttctcagttctcattctgaaga

SEQ ID NO: 64368 - DNA, 25 bp, Artificial
  Probe
gattttctcagttctcattctgaag

SEQ ID NO: 64369 - DNA, 25 bp, Artificial
  Probe
ccggtatctgatccagcaaactctt

SEQ ID NO: 64370 - DNA, 25 bp, Artificial
  Probe
ttctccggtatctgatccagcaaac

SEQ ID NO: 64371 - DNA, 25 bp, Artificial
  Probe
gaaagctctgtaaagcccgtaagga

SEQ ID NO: 64372 - DNA, 25 bp, Artificial
  Probe
tttgtccctggtgctgcttttaaag

SEQ ID NO: 64373 - DNA, 25 bp, Artificial
  Probe
ccctctatgtatgatgtcatactgc

SEQ ID NO: 64374 - DNA, 25 bp, Artificial
  Probe
gtttgtccctggtgctgcttttaaa

SEQ ID NO: 64375 - DNA, 25 bp, Artificial
  Probe
tccctctatgtatgatgtcatactg

SEQ ID NO: 64376 - DNA, 25 bp, Artificial
  Probe
tggaaagctctgtaaagcccgtaag

SEQ ID NO: 64377 - DNA, 25 bp, Artificial
  Probe
ctggaaagctctgtaaagcccgtaa

SEQ ID NO: 64378 - DNA, 25 bp, Artificial
  Probe
tccctggtgctgcttttaaaggtat

SEQ ID NO: 64379 - DNA, 25 bp, Artificial
  Probe
ctccggtatctgatccagcaaactc

SEQ ID NO: 64380 - DNA, 25 bp, Artificial
  Probe
ttccctctatgtatgatgtcatact

SEQ ID NO: 64381 - DNA, 25 bp, Artificial
  Probe
aacattctccatataattgctccta

SEQ ID NO: 64382 - DNA, 25 bp, Artificial
  Probe
taacattctccatataattgctcct

SEQ ID NO: 64383 - DNA, 25 bp, Artificial
  Probe
ttgtcggaggaagttatgttactgg

SEQ ID NO: 64384 - DNA, 25 bp, Artificial
  Probe
cattacctgcctctctagtgtagaa

SEQ ID NO: 64385 - DNA, 25 bp, Artificial
  Probe
acattctccatataattgctcctat

SEQ ID NO: 64386 - DNA, 25 bp, Artificial
  Probe
ttaaagaaggtaggaactgaagtgg

SEQ ID NO: 64387 - DNA, 25 bp, Artificial
  Probe
tctttgtcggaggaagttatgttac

SEQ ID NO: 64388 - DNA, 25 bp, Artificial
  Probe
gtctttgtcggaggaagttatgtta

SEQ ID NO: 64389 - DNA, 25 bp, Artificial
  Probe
gcttaaagaaggtaggaactgaagt

SEQ ID NO: 64390 - DNA, 25 bp, Artificial
  Probe
cagtatgtgctaatttctccagagg

SEQ ID NO: 64391 - DNA, 25 bp, Artificial
  Probe
ccagtatgtgctaatttctccagag

SEQ ID NO: 64392 - DNA, 25 bp, Artificial
  Probe
ctagtgtagaaagggtgtagttagc

SEQ ID NO: 64393 - DNA, 25 bp, Artificial
  Probe
taatttctccagaggcaagttcaag

SEQ ID NO: 64394 - DNA, 25 bp, Artificial
  Probe
ctaatttctccagaggcaagttcaa

SEQ ID NO: 64395 - DNA, 25 bp, Artificial
  Probe
ttaacattctccatataattgctcc

SEQ ID NO: 64396 - DNA, 25 bp, Artificial
  Probe
cttaaagaaggtaggaactgaagtg

SEQ ID NO: 64397 - DNA, 25 bp, Artificial
  Probe
ctttgtcggaggaagttatgttact

SEQ ID NO: 64398 - DNA, 25 bp, Artificial
  Probe
tttgtcggaggaagttatgttactg

SEQ ID NO: 64399 - DNA, 25 bp, Artificial
  Probe
taaagaaggtaggaactgaagtggg

SEQ ID NO: 64400 - DNA, 25 bp, Artificial
  Probe
tgtagttagctcttaacattctcca

SEQ ID NO: 64401 - DNA, 25 bp, Artificial
  Probe
gtgtagttagctcttaacattctcc

SEQ ID NO: 64402 - DNA, 25 bp, Artificial
  Probe
ggtgtagttagctcttaacattctc

SEQ ID NO: 64403 - DNA, 25 bp, Artificial
  Probe
cccagtatgtgctaatttctccaga

SEQ ID NO: 64404 - DNA, 25 bp, Artificial
  Probe
gtctcttcagcaagtcatctccatg

SEQ ID NO: 64405 - DNA, 25 bp, Artificial
  Probe
tagtgtagaaagggtgtagttagct

SEQ ID NO: 64406 - DNA, 25 bp, Artificial
  Probe
agtatgtgctaatttctccagaggc

SEQ ID NO: 64407 - DNA, 25 bp, Artificial
  Probe
tctctagtgtagaaagggtgtagtt

SEQ ID NO: 64408 - DNA, 25 bp, Artificial
  Probe
gtagttagctcttaacattctccat

SEQ ID NO: 64409 - DNA, 25 bp, Artificial
  Probe
attacctgcctctctagtgtagaaa

SEQ ID NO: 64410 - DNA, 25 bp, Artificial
  Probe
ctctctagtgtagaaagggtgtagt

SEQ ID NO: 64411 - DNA, 25 bp, Artificial
  Probe
agcttaaagaaggtaggaactgaag

SEQ ID NO: 64412 - DNA, 25 bp, Artificial
  Probe
ttgaagatgtcatctcctaatcagc

SEQ ID NO: 64413 - DNA, 25 bp, Artificial
  Probe
ttacctgcctctctagtgtagaaag

SEQ ID NO: 64414 - DNA, 25 bp, Artificial
  Probe
ctcagattgaagatgtcatctccta

SEQ ID NO: 64415 - DNA, 25 bp, Artificial
  Probe
tagcttaaagaaggtaggaactgaa

SEQ ID NO: 64416 - DNA, 25 bp, Artificial
  Probe
ttagcttaaagaaggtaggaactga

SEQ ID NO: 64417 - DNA, 25 bp, Artificial
  Probe
gctggtcctatttggatcttaaatg

SEQ ID NO: 64418 - DNA, 25 bp, Artificial
  Probe
gtagaaagggtgtagttagctctta

SEQ ID NO: 64419 - DNA, 25 bp, Artificial
  Probe
cctctctagtgtagaaagggtgtag

SEQ ID NO: 64420 - DNA, 25 bp, Artificial
  Probe
ggctggtcctatttggatcttaaat

SEQ ID NO: 64421 - DNA, 25 bp, Artificial
  Probe
tgtagaaagggtgtagttagctctt

SEQ ID NO: 64422 - DNA, 25 bp, Artificial
  Probe
cttagcttaaagaaggtaggaactg

SEQ ID NO: 64423 - DNA, 25 bp, Artificial
  Probe
tcagattgaagatgtcatctcctaa

SEQ ID NO: 64424 - DNA, 25 bp, Artificial
  Probe
tctagtgtagaaagggtgtagttag

SEQ ID NO: 64425 - DNA, 25 bp, Artificial
  Probe
ctctagtgtagaaagggtgtagtta

SEQ ID NO: 64426 - DNA, 25 bp, Artificial
  Probe
gtggctttatcctgagagttgtaac

SEQ ID NO: 64427 - DNA, 25 bp, Artificial
  Probe
tctgtacttctcttgaaatgatgga

SEQ ID NO: 64428 - DNA, 25 bp, Artificial
  Probe
gtctgtacttctcttgaaatgatgg

SEQ ID NO: 64429 - DNA, 25 bp, Artificial
  Probe
gctttatcctgagagttgtaacctc

SEQ ID NO: 64430 - DNA, 25 bp, Artificial
  Probe
tgtacttctcttgaaatgatggaac

SEQ ID NO: 64431 - DNA, 25 bp, Artificial
  Probe
ggctttatcctgagagttgtaacct

SEQ ID NO: 64432 - DNA, 25 bp, Artificial
  Probe
gtacttctcttgaaatgatggaact

SEQ ID NO: 64433 - DNA, 25 bp, Artificial
  Probe
ctgtacttctcttgaaatgatggaa

SEQ ID NO: 64434 - DNA, 25 bp, Artificial
  Probe
ggtggctttatcctgagagttgtaa

SEQ ID NO: 64435 - DNA, 25 bp, Artificial
  Probe
tggctttatcctgagagttgtaacc

SEQ ID NO: 64436 - DNA, 25 bp, Artificial
  Probe
acttctcttgaaatgatggaactat

SEQ ID NO: 64437 - DNA, 25 bp, Artificial
  Probe
aatactccgtgtcaatcaagcagtg

SEQ ID NO: 64438 - DNA, 25 bp, Artificial
  Probe
caaatactccgtgtcaatcaagcag

SEQ ID NO: 64439 - DNA, 25 bp, Artificial
  Probe
agtctgtacttctcttgaaatgatg

SEQ ID NO: 64440 - DNA, 25 bp, Artificial
  Probe
tacttctcttgaaatgatggaacta

SEQ ID NO: 64441 - DNA, 25 bp, Artificial
  Probe
cttctcttgaaatgatggaactatt

SEQ ID NO: 64442 - DNA, 25 bp, Artificial
  Probe
aaatactccgtgtcaatcaagcagt

SEQ ID NO: 64443 - DNA, 25 bp, Artificial
  Probe
atgcaaatactccgtgtcaatcaag

SEQ ID NO: 64444 - DNA, 25 bp, Artificial
  Probe
gatgcaaatactccgtgtcaatcaa

SEQ ID NO: 64445 - DNA, 25 bp, Artificial
  Probe
tccaaagtctgtacttctcttgaaa

SEQ ID NO: 64446 - DNA, 25 bp, Artificial
  Probe
ttccaaagtctgtacttctcttgaa

SEQ ID NO: 64447 - DNA, 25 bp, Artificial
  Probe
gttccaaagtctgtacttctcttga

SEQ ID NO: 64448 - DNA, 25 bp, Artificial
  Probe
ccaaagtctgtacttctcttgaaat

SEQ ID NO: 64449 - DNA, 25 bp, Artificial
  Probe
gggtggctttatcctgagagttgta

SEQ ID NO: 64450 - DNA, 25 bp, Artificial
  Probe
ggttccaaagtctgtacttctcttg

SEQ ID NO: 64451 - DNA, 25 bp, Artificial
  Probe
aggttccaaagtctgtacttctctt

SEQ ID NO: 64452 - DNA, 25 bp, Artificial
  Probe
ttctcttgaaatgatggaactattt

SEQ ID NO: 64453 - DNA, 25 bp, Artificial
  Probe
gggttttccacaaattcctcatttt

SEQ ID NO: 64454 - DNA, 25 bp, Artificial
  Probe
gtgatgcaaatactccgtgtcaatc

SEQ ID NO: 64455 - DNA, 25 bp, Artificial
  Probe
caaagtctgtacttctcttgaaatg

SEQ ID NO: 64456 - DNA, 25 bp, Artificial
  Probe
gcaaatactccgtgtcaatcaagca

SEQ ID NO: 64457 - DNA, 25 bp, Artificial
  Probe
aaagtctgtacttctcttgaaatga

SEQ ID NO: 64458 - DNA, 25 bp, Artificial
  Probe
caggttccaaagtctgtacttctct

SEQ ID NO: 64459 - DNA, 25 bp, Artificial
  Probe
tcaggttccaaagtctgtacttctc

SEQ ID NO: 64460 - DNA, 25 bp, Artificial
  Probe
ctcaggttccaaagtctgtacttct

SEQ ID NO: 64461 - DNA, 25 bp, Artificial
  Probe
aagtctgtacttctcttgaaatgat

SEQ ID NO: 64462 - DNA, 25 bp, Artificial
  Probe
caaggacagaatttaaaactagggg

SEQ ID NO: 64463 - DNA, 25 bp, Artificial
  Probe
aaggacagaatttaaaactaggggc

SEQ ID NO: 64464 - DNA, 25 bp, Artificial
  Probe
tcaaggacagaatttaaaactaggg

SEQ ID NO: 64465 - DNA, 25 bp, Artificial
  Probe
ctttatcctgagagttgtaacctca

SEQ ID NO: 64466 - DNA, 25 bp, Artificial
  Probe
aggacagaatttaaaactaggggct

SEQ ID NO: 64467 - DNA, 25 bp, Artificial
  Probe
ttcctctccctgtctctctcttgtc

SEQ ID NO: 64468 - DNA, 25 bp, Artificial
  Probe
cttcctctccctgtctctctcttgt

SEQ ID NO: 64469 - DNA, 25 bp, Artificial
  Probe
cctcaggttccaaagtctgtacttc

SEQ ID NO: 64470 - DNA, 25 bp, Artificial
  Probe
tgggttttccacaaattcctcattt

SEQ ID NO: 64471 - DNA, 25 bp, Artificial
  Probe
cactaacataattcttgccttctcc

SEQ ID NO: 64472 - DNA, 25 bp, Artificial
  Probe
tcactaacataattcttgccttctc

SEQ ID NO: 64473 - DNA, 25 bp, Artificial
  Probe
atcactaacataattcttgccttct

SEQ ID NO: 64474 - DNA, 25 bp, Artificial
  Probe
aatcactaacataattcttgccttc

SEQ ID NO: 64475 - DNA, 25 bp, Artificial
  Probe
caatcactaacataattcttgcctt

SEQ ID NO: 64476 - DNA, 25 bp, Artificial
  Probe
acataattcttgccttctccctaaa

SEQ ID NO: 64477 - DNA, 25 bp, Artificial
  Probe
aacataattcttgccttctccctaa

SEQ ID NO: 64478 - DNA, 25 bp, Artificial
  Probe
ctaacataattcttgccttctccct

SEQ ID NO: 64479 - DNA, 25 bp, Artificial
  Probe
actaacataattcttgccttctccc

SEQ ID NO: 64480 - DNA, 25 bp, Artificial
  Probe
taacataattcttgccttctcccta

SEQ ID NO: 64481 - DNA, 25 bp, Artificial
  Probe
tttcctgtgtgaatttccatattgc

SEQ ID NO: 64482 - DNA, 25 bp, Artificial
  Probe
ccatatttcctgtgtgaatttccat

SEQ ID NO: 64483 - DNA, 25 bp, Artificial
  Probe
acaatcaattctttagtcgtttcct

SEQ ID NO: 64484 - DNA, 25 bp, Artificial
  Probe
cacgaggagaatgtatttcatcttt

SEQ ID NO: 64485 - DNA, 25 bp, Artificial
  Probe
attgttctgggtccactgaattatt

SEQ ID NO: 64486 - DNA, 25 bp, Artificial
  Probe
ttcctgtgtgaatttccatattgct

SEQ ID NO: 64487 - DNA, 25 bp, Artificial
  Probe
cccatatttcctgtgtgaatttcca

SEQ ID NO: 64488 - DNA, 25 bp, Artificial
  Probe
acccatatttcctgtgtgaatttcc

SEQ ID NO: 64489 - DNA, 25 bp, Artificial
  Probe
ttgttctgggtccactgaattattc

SEQ ID NO: 64490 - DNA, 25 bp, Artificial
  Probe
tcctgtgtgaatttccatattgctg

SEQ ID NO: 64491 - DNA, 25 bp, Artificial
  Probe
tcaattctttagtcgtttccttaca

SEQ ID NO: 64492 - DNA, 25 bp, Artificial
  Probe
aattgttctgggtccactgaattat

SEQ ID NO: 64493 - DNA, 25 bp, Artificial
  Probe
caatcaattctttagtcgtttcctt

SEQ ID NO: 64494 - DNA, 25 bp, Artificial
  Probe
aaattgttctgggtccactgaatta

SEQ ID NO: 64495 - DNA, 25 bp, Artificial
  Probe
aacaatcaattctttagtcgtttcc

SEQ ID NO: 64496 - DNA, 25 bp, Artificial
  Probe
atttcctgtgtgaatttccatattg

SEQ ID NO: 64497 - DNA, 25 bp, Artificial
  Probe
cacccatatttcctgtgtgaatttc

SEQ ID NO: 64498 - DNA, 25 bp, Artificial
  Probe
caattctttagtcgtttccttacaa

SEQ ID NO: 64499 - DNA, 25 bp, Artificial
  Probe
atctatttgtagcttcctcagactg

SEQ ID NO: 64500 - DNA, 25 bp, Artificial
  Probe
gatctatttgtagcttcctcagact

SEQ ID NO: 64501 - DNA, 25 bp, Artificial
  Probe
gaaattgttctgggtccactgaatt

SEQ ID NO: 64502 - DNA, 25 bp, Artificial
  Probe
ccacccatatttcctgtgtgaattt

SEQ ID NO: 64503 - DNA, 25 bp, Artificial
  Probe
atcaattctttagtcgtttccttac

SEQ ID NO: 64504 - DNA, 25 bp, Artificial
  Probe
tatttgtagcttcctcagactgatc

SEQ ID NO: 64505 - DNA, 25 bp, Artificial
  Probe
ctatttgtagcttcctcagactgat

SEQ ID NO: 64506 - DNA, 25 bp, Artificial
  Probe
tctatttgtagcttcctcagactga

SEQ ID NO: 64507 - DNA, 25 bp, Artificial
  Probe
catatttcctgtgtgaatttccata

SEQ ID NO: 64508 - DNA, 25 bp, Artificial
  Probe
aattctttagtcgtttccttacaaa

SEQ ID NO: 64509 - DNA, 25 bp, Artificial
  Probe
atcaatgtgtgggtagaaattgttc

SEQ ID NO: 64510 - DNA, 25 bp, Artificial
  Probe
aactgcttattaaaggatctttggc

SEQ ID NO: 64511 - DNA, 25 bp, Artificial
  Probe
gatcaatgtgtgggtagaaattgtt

SEQ ID NO: 64512 - DNA, 25 bp, Artificial
  Probe
caatgtgtgggtagaaattgttctg

SEQ ID NO: 64513 - DNA, 25 bp, Artificial
  Probe
tcaatgtgtgggtagaaattgttct

SEQ ID NO: 64514 - DNA, 25 bp, Artificial
  Probe
attaatgccacccatatttcctgtg

SEQ ID NO: 64515 - DNA, 25 bp, Artificial
  Probe
ggatctatttgtagcttcctcagac

SEQ ID NO: 64516 - DNA, 25 bp, Artificial
  Probe
taatctgtgcagagagagacccttt

SEQ ID NO: 64517 - DNA, 25 bp, Artificial
  Probe
aatgaaagtggattggaggaggtgg

SEQ ID NO: 64518 - DNA, 25 bp, Artificial
  Probe
ctaatctgtgcagagagagaccctt

SEQ ID NO: 64519 - DNA, 25 bp, Artificial
  Probe
gagcggtgtacatctcagttctaga

SEQ ID NO: 64520 - DNA, 25 bp, Artificial
  Probe
caatgaaagtggattggaggaggtg

SEQ ID NO: 64521 - DNA, 25 bp, Artificial
  Probe
tatccacctcatcagccactgtcat

SEQ ID NO: 64522 - DNA, 25 bp, Artificial
  Probe
tctagaaggccaatgaaagtggatt

SEQ ID NO: 64523 - DNA, 25 bp, Artificial
  Probe
ctagaaggccaatgaaagtggattg

SEQ ID NO: 64524 - DNA, 25 bp, Artificial
  Probe
aaagtggattggaggaggtggagat

SEQ ID NO: 64525 - DNA, 25 bp, Artificial
  Probe
cttgcctaatctgtgcagagagaga

SEQ ID NO: 64526 - DNA, 25 bp, Artificial
  Probe
ttgcctaatctgtgcagagagagac

SEQ ID NO: 64527 - DNA, 25 bp, Artificial
  Probe
tcagcggtagattgcttgcctaatc

SEQ ID NO: 64528 - DNA, 25 bp, Artificial
  Probe
ctcagcggtagattgcttgcctaat

SEQ ID NO: 64529 - DNA, 25 bp, Artificial
  Probe
gattgcttgcctaatctgtgcagag

SEQ ID NO: 64530 - DNA, 25 bp, Artificial
  Probe
cgagcggtgtacatctcagttctag

SEQ ID NO: 64531 - DNA, 25 bp, Artificial
  Probe
tagattgcttgcctaatctgtgcag

SEQ ID NO: 64532 - DNA, 25 bp, Artificial
  Probe
attgcttgcctaatctgtgcagaga

SEQ ID NO: 64533 - DNA, 25 bp, Artificial
  Probe
gtagattgcttgcctaatctgtgca

SEQ ID NO: 64534 - DNA, 25 bp, Artificial
  Probe
taaggggcacaataaacgggagaag

SEQ ID NO: 64535 - DNA, 25 bp, Artificial
  Probe
cggtagattgcttgcctaatctgtg

SEQ ID NO: 64536 - DNA, 25 bp, Artificial
  Probe
cctaatctgtgcagagagagaccct

SEQ ID NO: 64537 - DNA, 25 bp, Artificial
  Probe
aatctgtgcagagagagaccctttt

SEQ ID NO: 64538 - DNA, 25 bp, Artificial
  Probe
ggtagattgcttgcctaatctgtgc

SEQ ID NO: 64539 - DNA, 25 bp, Artificial
  Probe
ttgcttgcctaatctgtgcagagag

SEQ ID NO: 64540 - DNA, 25 bp, Artificial
  Probe
agattgcttgcctaatctgtgcaga

SEQ ID NO: 64541 - DNA, 25 bp, Artificial
  Probe
agcggtagattgcttgcctaatctg

SEQ ID NO: 64542 - DNA, 25 bp, Artificial
  Probe
cagcggtagattgcttgcctaatct

SEQ ID NO: 64543 - DNA, 25 bp, Artificial
  Probe
tttgagctgggagtatccacctcat

SEQ ID NO: 64544 - DNA, 25 bp, Artificial
  Probe
cagaagctttgagctgggagtatcc

SEQ ID NO: 64545 - DNA, 25 bp, Artificial
  Probe
ctccagttcagcaacatatggggag

SEQ ID NO: 64546 - DNA, 25 bp, Artificial
  Probe
atgtgcatatcttcgtctctgagta

SEQ ID NO: 64547 - DNA, 25 bp, Artificial
  Probe
caatgtgcatatcttcgtctctgag

SEQ ID NO: 64548 - DNA, 25 bp, Artificial
  Probe
aatgtgcatatcttcgtctctgagt

SEQ ID NO: 64549 - DNA, 25 bp, Artificial
  Probe
gtcaatgtgcatatcttcgtctctg

SEQ ID NO: 64550 - DNA, 25 bp, Artificial
  Probe
tgtgcatatcttcgtctctgagtac

SEQ ID NO: 64551 - DNA, 25 bp, Artificial
  Probe
ttggtgtttcatgttggtttgtaag

SEQ ID NO: 64552 - DNA, 25 bp, Artificial
  Probe
gaggatcatcttcgacatcacagaa

SEQ ID NO: 64553 - DNA, 25 bp, Artificial
  Probe
tcaatgtgcatatcttcgtctctga

SEQ ID NO: 64554 - DNA, 25 bp, Artificial
  Probe
atatcttcgtctctgagtactggtt

SEQ ID NO: 64555 - DNA, 25 bp, Artificial
  Probe
catatcttcgtctctgagtactggt

SEQ ID NO: 64556 - DNA, 25 bp, Artificial
  Probe
gtaaggccacatacattaagctgag

SEQ ID NO: 64557 - DNA, 25 bp, Artificial
  Probe
tggtgtttcatgttggtttgtaagg

SEQ ID NO: 64558 - DNA, 25 bp, Artificial
  Probe
tgcatatcttcgtctctgagtactg

SEQ ID NO: 64559 - DNA, 25 bp, Artificial
  Probe
gtgcatatcttcgtctctgagtact

SEQ ID NO: 64560 - DNA, 25 bp, Artificial
  Probe
atacattaagctgagccacgtcatt

SEQ ID NO: 64561 - DNA, 25 bp, Artificial
  Probe
gaaccttcgagactcctttgatatc

SEQ ID NO: 64562 - DNA, 25 bp, Artificial
  Probe
gcatatcttcgtctctgagtactgg

SEQ ID NO: 64563 - DNA, 25 bp, Artificial
  Probe
catacattaagctgagccacgtcat

SEQ ID NO: 64564 - DNA, 25 bp, Artificial
  Probe
attaagctgagccacgtcatttaag

SEQ ID NO: 64565 - DNA, 25 bp, Artificial
  Probe
cattaagctgagccacgtcatttaa

SEQ ID NO: 64566 - DNA, 25 bp, Artificial
  Probe
taaggccacatacattaagctgagc

SEQ ID NO: 64567 - DNA, 25 bp, Artificial
  Probe
ggtgtttcatgttggtttgtaaggc

SEQ ID NO: 64568 - DNA, 25 bp, Artificial
  Probe
gaagctggagatgaactacgtgttg

SEQ ID NO: 64569 - DNA, 25 bp, Artificial
  Probe
taaacattgctcagtcatgtggtta

SEQ ID NO: 64570 - DNA, 25 bp, Artificial
  Probe
ttgtaaggccacatacattaagctg

SEQ ID NO: 64571 - DNA, 25 bp, Artificial
  Probe
aggatcatcttcgacatcacagaag

SEQ ID NO: 64572 - DNA, 25 bp, Artificial
  Probe
ggaaccttcgagactcctttgatat

SEQ ID NO: 64573 - DNA, 25 bp, Artificial
  Probe
cacatacattaagctgagccacgtc

SEQ ID NO: 64574 - DNA, 25 bp, Artificial
  Probe
aacattgctcagtcatgtggttaaa

SEQ ID NO: 64575 - DNA, 25 bp, Artificial
  Probe
aaacattgctcagtcatgtggttaa

SEQ ID NO: 64576 - DNA, 25 bp, Artificial
  Probe
ttaaacattgctcagtcatgtggtt

SEQ ID NO: 64577 - DNA, 25 bp, Artificial
  Probe
tgaagctggagatgaactacgtgtt

SEQ ID NO: 64578 - DNA, 25 bp, Artificial
  Probe
tgtaaggccacatacattaagctga

SEQ ID NO: 64579 - DNA, 25 bp, Artificial
  Probe
ttaagctgagccacgtcatttaagt

SEQ ID NO: 64580 - DNA, 25 bp, Artificial
  Probe
acattaagctgagccacgtcattta

SEQ ID NO: 64581 - DNA, 25 bp, Artificial
  Probe
tacattaagctgagccacgtcattt

SEQ ID NO: 64582 - DNA, 25 bp, Artificial
  Probe
tttaaacattgctcagtcatgtggt

SEQ ID NO: 64583 - DNA, 25 bp, Artificial
  Probe
ctgaagctggagatgaactacgtgt

SEQ ID NO: 64584 - DNA, 25 bp, Artificial
  Probe
ggatcatcttcgacatcacagaagg

SEQ ID NO: 64585 - DNA, 25 bp, Artificial
  Probe
taagctgagccacgtcatttaagtc

SEQ ID NO: 64586 - DNA, 25 bp, Artificial
  Probe
acatacattaagctgagccacgtca

SEQ ID NO: 64587 - DNA, 25 bp, Artificial
  Probe
ggtttgtaaggccacatacattaag

SEQ ID NO: 64588 - DNA, 25 bp, Artificial
  Probe
tggtttgtaaggccacatacattaa

SEQ ID NO: 64589 - DNA, 25 bp, Artificial
  Probe
ttggtttgtaaggccacatacatta

SEQ ID NO: 64590 - DNA, 25 bp, Artificial
  Probe
tttgtaaggccacatacattaagct

SEQ ID NO: 64591 - DNA, 25 bp, Artificial
  Probe
cagacctatcctctaagcaagatta

SEQ ID NO: 64592 - DNA, 25 bp, Artificial
  Probe
tattgtcattggtgcctctgtcata

SEQ ID NO: 64593 - DNA, 25 bp, Artificial
  Probe
gcagacctatcctctaagcaagatt

SEQ ID NO: 64594 - DNA, 25 bp, Artificial
  Probe
agacctatcctctaagcaagattag

SEQ ID NO: 64595 - DNA, 25 bp, Artificial
  Probe
attgtcattggtgcctctgtcatat

SEQ ID NO: 64596 - DNA, 25 bp, Artificial
  Probe
aatatggagcagacctatcctctaa

SEQ ID NO: 64597 - DNA, 25 bp, Artificial
  Probe
atatggagcagacctatcctctaag

SEQ ID NO: 64598 - DNA, 25 bp, Artificial
  Probe
aagttgtattgtcattggtgcctct

SEQ ID NO: 64599 - DNA, 25 bp, Artificial
  Probe
agcagacctatcctctaagcaagat

SEQ ID NO: 64600 - DNA, 25 bp, Artificial
  Probe
gcttatgtagtcctgccttactgtt

SEQ ID NO: 64601 - DNA, 25 bp, Artificial
  Probe
ttgcttatgtagtcctgccttactg

SEQ ID NO: 64602 - DNA, 25 bp, Artificial
  Probe
tttatttatggcagaatgtatggcg

SEQ ID NO: 64603 - DNA, 25 bp, Artificial
  Probe
gttctcagtttgcttatgtagtcct

SEQ ID NO: 64604 - DNA, 25 bp, Artificial
  Probe
ttatttatggcagaatgtatggcga

SEQ ID NO: 64605 - DNA, 25 bp, Artificial
  Probe
ttgttctcagtttgcttatgtagtc

SEQ ID NO: 64606 - DNA, 25 bp, Artificial
  Probe
tgttctcagtttgcttatgtagtcc

SEQ ID NO: 64607 - DNA, 25 bp, Artificial
  Probe
tttgttctcagtttgcttatgtagt

SEQ ID NO: 64608 - DNA, 25 bp, Artificial
  Probe
gtattgtcattggtgcctctgtcat

SEQ ID NO: 64609 - DNA, 25 bp, Artificial
  Probe
aaactggatggctttatgattgtaa

SEQ ID NO: 64610 - DNA, 25 bp, Artificial
  Probe
tatttatggcagaatgtatggcgac

SEQ ID NO: 64611 - DNA, 25 bp, Artificial
  Probe
cttatgtagtcctgccttactgttt

SEQ ID NO: 64612 - DNA, 25 bp, Artificial
  Probe
ttatgtagtcctgccttactgtttg

SEQ ID NO: 64613 - DNA, 25 bp, Artificial
  Probe
ttgtattgtcattggtgcctctgtc

SEQ ID NO: 64614 - DNA, 25 bp, Artificial
  Probe
agttgtattgtcattggtgcctctg

SEQ ID NO: 64615 - DNA, 25 bp, Artificial
  Probe
agtttgcttatgtagtcctgcctta

SEQ ID NO: 64616 - DNA, 25 bp, Artificial
  Probe
aactggatggctttatgattgtaaa

SEQ ID NO: 64617 - DNA, 25 bp, Artificial
  Probe
gtttgcttatgtagtcctgccttac

SEQ ID NO: 64618 - DNA, 25 bp, Artificial
  Probe
aaagttgtattgtcattggtgcctc

SEQ ID NO: 64619 - DNA, 25 bp, Artificial
  Probe
tatgtagtcctgccttactgtttgt

SEQ ID NO: 64620 - DNA, 25 bp, Artificial
  Probe
atttgttctcagtttgcttatgtag

SEQ ID NO: 64621 - DNA, 25 bp, Artificial
  Probe
ttctcagtttgcttatgtagtcctg

SEQ ID NO: 64622 - DNA, 25 bp, Artificial
  Probe
catttgttctcagtttgcttatgta

SEQ ID NO: 64623 - DNA, 25 bp, Artificial
  Probe
gttgtattgtcattggtgcctctgt

SEQ ID NO: 64624 - DNA, 25 bp, Artificial
  Probe
tgcttatgtagtcctgccttactgt

SEQ ID NO: 64625 - DNA, 25 bp, Artificial
  Probe
gagcagacctatcctctaagcaaga

SEQ ID NO: 64626 - DNA, 25 bp, Artificial
  Probe
gacctatcctctaagcaagattagg

SEQ ID NO: 64627 - DNA, 25 bp, Artificial
  Probe
tttgcttatgtagtcctgccttact

SEQ ID NO: 64628 - DNA, 25 bp, Artificial
  Probe
cctatcctctaagcaagattaggtt

SEQ ID NO: 64629 - DNA, 25 bp, Artificial
  Probe
tatggagcagacctatcctctaagc

SEQ ID NO: 64630 - DNA, 25 bp, Artificial
  Probe
aacatttgttctcagtttgcttatg

SEQ ID NO: 64631 - DNA, 25 bp, Artificial
  Probe
aaatatggagcagacctatcctcta

SEQ ID NO: 64632 - DNA, 25 bp, Artificial
  Probe
taaatatggagcagacctatcctct

SEQ ID NO: 64633 - DNA, 25 bp, Artificial
  Probe
ttaaatatggagcagacctatcctc

SEQ ID NO: 64634 - DNA, 25 bp, Artificial
  Probe
caaagttgtattgtcattggtgcct

SEQ ID NO: 64635 - DNA, 25 bp, Artificial
  Probe
atgtagtcctgccttactgtttgtt

SEQ ID NO: 64636 - DNA, 25 bp, Artificial
  Probe
tggcatagttaaggttaagtaggtc

SEQ ID NO: 64637 - DNA, 25 bp, Artificial
  Probe
ttaaggttaagtaggtctccagttg

SEQ ID NO: 64638 - DNA, 25 bp, Artificial
  Probe
gttaaggttaagtaggtctccagtt

SEQ ID NO: 64639 - DNA, 25 bp, Artificial
  Probe
agttaaggttaagtaggtctccagt

SEQ ID NO: 64640 - DNA, 25 bp, Artificial
  Probe
ggcatagttaaggttaagtaggtct

SEQ ID NO: 64641 - DNA, 25 bp, Artificial
  Probe
ttggcatagttaaggttaagtaggt

SEQ ID NO: 64642 - DNA, 25 bp, Artificial
  Probe
cagttggctaccgttacatataatg

SEQ ID NO: 64643 - DNA, 25 bp, Artificial
  Probe
agttggctaccgttacatataatgg

SEQ ID NO: 64644 - DNA, 25 bp, Artificial
  Probe
ctaccgttacatataatggcacttc

SEQ ID NO: 64645 - DNA, 25 bp, Artificial
  Probe
taccgttacatataatggcacttcg

SEQ ID NO: 64646 - DNA, 25 bp, Artificial
  Probe
ccagttggctaccgttacatataat

SEQ ID NO: 64647 - DNA, 25 bp, Artificial
  Probe
gctaccgttacatataatggcactt

SEQ ID NO: 64648 - DNA, 25 bp, Artificial
  Probe
tagttaaggttaagtaggtctccag

SEQ ID NO: 64649 - DNA, 25 bp, Artificial
  Probe
cttggcatagttaaggttaagtagg

SEQ ID NO: 64650 - DNA, 25 bp, Artificial
  Probe
gcatagttaaggttaagtaggtctc

SEQ ID NO: 64651 - DNA, 25 bp, Artificial
  Probe
taaggttaagtaggtctccagttgg

SEQ ID NO: 64652 - DNA, 25 bp, Artificial
  Probe
tccagttggctaccgttacatataa

SEQ ID NO: 64653 - DNA, 25 bp, Artificial
  Probe
ccgttacatataatggcacttcgtt

SEQ ID NO: 64654 - DNA, 25 bp, Artificial
  Probe
atagttaaggttaagtaggtctcca

SEQ ID NO: 64655 - DNA, 25 bp, Artificial
  Probe
gttggctaccgttacatataatggc

SEQ ID NO: 64656 - DNA, 25 bp, Artificial
  Probe
ctccagttggctaccgttacatata

SEQ ID NO: 64657 - DNA, 25 bp, Artificial
  Probe
cgtgtacttggcatagttaaggtta

SEQ ID NO: 64658 - DNA, 25 bp, Artificial
  Probe
catagttaaggttaagtaggtctcc

SEQ ID NO: 64659 - DNA, 25 bp, Artificial
  Probe
ttggctaccgttacatataatggca

SEQ ID NO: 64660 - DNA, 25 bp, Artificial
  Probe
gtgtacttggcatagttaaggttaa

SEQ ID NO: 64661 - DNA, 25 bp, Artificial
  Probe
tgtacttggcatagttaaggttaag

SEQ ID NO: 64662 - DNA, 25 bp, Artificial
  Probe
accgttacatataatggcacttcgt

SEQ ID NO: 64663 - DNA, 25 bp, Artificial
  Probe
ggctaccgttacatataatggcact

SEQ ID NO: 64664 - DNA, 25 bp, Artificial
  Probe
tggctaccgttacatataatggcac

SEQ ID NO: 64665 - DNA, 25 bp, Artificial
  Probe
cgttacatataatggcacttcgttt

SEQ ID NO: 64666 - DNA, 25 bp, Artificial
  Probe
taatcggaaatcctgggaatgttaa

SEQ ID NO: 64667 - DNA, 25 bp, Artificial
  Probe
tatctaatcggaaatcctgggaatg

SEQ ID NO: 64668 - DNA, 25 bp, Artificial
  Probe
aaactatctaatcggaaatcctggg

SEQ ID NO: 64669 - DNA, 25 bp, Artificial
  Probe
ctatctaatcggaaatcctgggaat

SEQ ID NO: 64670 - DNA, 25 bp, Artificial
  Probe
ggaaatcctgggaatgttaaatgtg

SEQ ID NO: 64671 - DNA, 25 bp, Artificial
  Probe
ctaatcggaaatcctgggaatgtta

SEQ ID NO: 64672 - DNA, 25 bp, Artificial
  Probe
atcggaaatcctgggaatgttaaat

SEQ ID NO: 64673 - DNA, 25 bp, Artificial
  Probe
aatcggaaatcctgggaatgttaaa

SEQ ID NO: 64674 - DNA, 25 bp, Artificial
  Probe
actatctaatcggaaatcctgggaa

SEQ ID NO: 64675 - DNA, 25 bp, Artificial
  Probe
aactatctaatcggaaatcctggga

SEQ ID NO: 64676 - DNA, 25 bp, Artificial
  Probe
tttggagagggaggttctttactaa

SEQ ID NO: 64677 - DNA, 25 bp, Artificial
  Probe
ttggagagggaggttctttactaaa

SEQ ID NO: 64678 - DNA, 25 bp, Artificial
  Probe
gaaatcctgggaatgttaaatgtgc

SEQ ID NO: 64679 - DNA, 25 bp, Artificial
  Probe
gttacatataatggcacttcgtttg

SEQ ID NO: 64680 - DNA, 25 bp, Artificial
  Probe
aaatcctgggaatgttaaatgtgct

SEQ ID NO: 64681 - DNA, 25 bp, Artificial
  Probe
aatgtaagacacttagcacggtata

SEQ ID NO: 64682 - DNA, 25 bp, Artificial
  Probe
gaatgtaagacacttagcacggtat

SEQ ID NO: 64683 - DNA, 25 bp, Artificial
  Probe
tgaatgtaagacacttagcacggta

SEQ ID NO: 64684 - DNA, 25 bp, Artificial
  Probe
ttgaaatgggagagtgaatgtaaga

SEQ ID NO: 64685 - DNA, 25 bp, Artificial
  Probe
tgaaatgggagagtgaatgtaagac

SEQ ID NO: 64686 - DNA, 25 bp, Artificial
  Probe
ggattgaaatgggagagtgaatgta

SEQ ID NO: 64687 - DNA, 25 bp, Artificial
  Probe
gattgaaatgggagagtgaatgtaa

SEQ ID NO: 64688 - DNA, 25 bp, Artificial
  Probe
attgaaatgggagagtgaatgtaag

SEQ ID NO: 64689 - DNA, 25 bp, Artificial
  Probe
gtgttcttgtctgtaaatggtgata

SEQ ID NO: 64690 - DNA, 25 bp, Artificial
  Probe
gaggattgaaatgggagagtgaatg

SEQ ID NO: 64691 - DNA, 25 bp, Artificial
  Probe
tttgctcaaggcttatttagatggg

SEQ ID NO: 64692 - DNA, 25 bp, Artificial
  Probe
cgtgttcttgtctgtaaatggtgat

SEQ ID NO: 64693 - DNA, 25 bp, Artificial
  Probe
tgctcaaggcttatttagatgggta

SEQ ID NO: 64694 - DNA, 25 bp, Artificial
  Probe
tgaggattgaaatgggagagtgaat

SEQ ID NO: 64695 - DNA, 25 bp, Artificial
  Probe
tgttcttgtctgtaaatggtgataa

SEQ ID NO: 64696 - DNA, 25 bp, Artificial
  Probe
ctcaaggcttatttagatgggtaca

SEQ ID NO: 64697 - DNA, 25 bp, Artificial
  Probe
aaatcagcaaagaagaacgagagtc

SEQ ID NO: 64698 - DNA, 25 bp, Artificial
  Probe
tcaaggcttatttagatgggtacaa

SEQ ID NO: 64699 - DNA, 25 bp, Artificial
  Probe
aggattgaaatgggagagtgaatgt

SEQ ID NO: 64700 - DNA, 25 bp, Artificial
  Probe
gaaatgggagagtgaatgtaagaca

SEQ ID NO: 64701 - DNA, 25 bp, Artificial
  Probe
caaggcttatttagatgggtacaat

SEQ ID NO: 64702 - DNA, 25 bp, Artificial
  Probe
gctcaaggcttatttagatgggtac

SEQ ID NO: 64703 - DNA, 25 bp, Artificial
  Probe
atgtaagacacttagcacggtatac

SEQ ID NO: 64704 - DNA, 25 bp, Artificial
  Probe
aagaagaacgagagtcaggtgatct

SEQ ID NO: 64705 - DNA, 25 bp, Artificial
  Probe
gtaagacacttagcacggtatacaa

SEQ ID NO: 64706 - DNA, 25 bp, Artificial
  Probe
ctgagttgagcaatgaaattatctt

SEQ ID NO: 64707 - DNA, 25 bp, Artificial
  Probe
ttgctcaaggcttatttagatgggt

SEQ ID NO: 64708 - DNA, 25 bp, Artificial
  Probe
ttgttgtgaggattgaaatgggaga

SEQ ID NO: 64709 - DNA, 25 bp, Artificial
  Probe
gttgttgtgaggattgaaatgggag

SEQ ID NO: 64710 - DNA, 25 bp, Artificial
  Probe
aaatgggagagtgaatgtaagacac

SEQ ID NO: 64711 - DNA, 25 bp, Artificial
  Probe
aatgtgctcaaacctcttagagaaa

SEQ ID NO: 64712 - DNA, 25 bp, Artificial
  Probe
aaatgtgctcaaacctcttagagaa

SEQ ID NO: 64713 - DNA, 25 bp, Artificial
  Probe
aatcagcaaagaagaacgagagtca

SEQ ID NO: 64714 - DNA, 25 bp, Artificial
  Probe
gtgaatgtaagacacttagcacggt

SEQ ID NO: 64715 - DNA, 25 bp, Artificial
  Probe
gtgaggattgaaatgggagagtgaa

SEQ ID NO: 64716 - DNA, 25 bp, Artificial
  Probe
caaagaagaacgagagtcaggtgat

SEQ ID NO: 64717 - DNA, 25 bp, Artificial
  Probe
gttcttgtctgtaaatggtgataat

SEQ ID NO: 64718 - DNA, 25 bp, Artificial
  Probe
tgagttgagcaatgaaattatcttt

SEQ ID NO: 64719 - DNA, 25 bp, Artificial
  Probe
ttgtgaggattgaaatgggagagtg

SEQ ID NO: 64720 - DNA, 25 bp, Artificial
  Probe
gttgtgaggattgaaatgggagagt

SEQ ID NO: 64721 - DNA, 25 bp, Artificial
  Probe
tgttgtgaggattgaaatgggagag

SEQ ID NO: 64722 - DNA, 25 bp, Artificial
  Probe
atgagccgtgttcttgtctgtaaat

SEQ ID NO: 64723 - DNA, 25 bp, Artificial
  Probe
aaagaagaacgagagtcaggtgatc

SEQ ID NO: 64724 - DNA, 25 bp, Artificial
  Probe
atcagcaaagaagaacgagagtcag

SEQ ID NO: 64725 - DNA, 25 bp, Artificial
  Probe
tgtaagacacttagcacggtataca

SEQ ID NO: 64726 - DNA, 25 bp, Artificial
  Probe
attcacaagtagaccaatgcttatg

SEQ ID NO: 64727 - DNA, 25 bp, Artificial
  Probe
gactatggaacacaaggaagaagac

SEQ ID NO: 64728 - DNA, 25 bp, Artificial
  Probe
tcacaagtagaccaatgcttatgaa

SEQ ID NO: 64729 - DNA, 25 bp, Artificial
  Probe
ttcacaagtagaccaatgcttatga

SEQ ID NO: 64730 - DNA, 25 bp, Artificial
  Probe
ggactatggaacacaaggaagaaga

SEQ ID NO: 64731 - DNA, 25 bp, Artificial
  Probe
actatggaacacaaggaagaagacc

SEQ ID NO: 64732 - DNA, 25 bp, Artificial
  Probe
cagtagctccatcctattaacagac

SEQ ID NO: 64733 - DNA, 25 bp, Artificial
  Probe
tagctccatcctattaacagacctt

SEQ ID NO: 64734 - DNA, 25 bp, Artificial
  Probe
gtagctccatcctattaacagacct

SEQ ID NO: 64735 - DNA, 25 bp, Artificial
  Probe
agtagctccatcctattaacagacc

SEQ ID NO: 64736 - DNA, 25 bp, Artificial
  Probe
gaataactcccatcttgtcccataa

SEQ ID NO: 64737 - DNA, 25 bp, Artificial
  Probe
aaatctctgtagtgtgtttcaagga

SEQ ID NO: 64738 - DNA, 25 bp, Artificial
  Probe
aataactcccatcttgtcccataac

SEQ ID NO: 64739 - DNA, 25 bp, Artificial
  Probe
caaagatgagaagatggctatgaag

SEQ ID NO: 64740 - DNA, 25 bp, Artificial
  Probe
ctaaagcattcacaagtagaccaat

SEQ ID NO: 64741 - DNA, 25 bp, Artificial
  Probe
tgtagagcagatttcaaagtgttac

SEQ ID NO: 64742 - DNA, 25 bp, Artificial
  Probe
aatctctgtagtgtgtttcaaggaa

SEQ ID NO: 64743 - DNA, 25 bp, Artificial
  Probe
cctattaacagacctttgcctcatt

SEQ ID NO: 64744 - DNA, 25 bp, Artificial
  Probe
gcagtagctccatcctattaacaga

SEQ ID NO: 64745 - DNA, 25 bp, Artificial
  Probe
cacaagtagaccaatgcttatgaaa

SEQ ID NO: 64746 - DNA, 25 bp, Artificial
  Probe
cctaaagcattcacaagtagaccaa

SEQ ID NO: 64747 - DNA, 25 bp, Artificial
  Probe
agcagatttcaaagtgttacaaaga

SEQ ID NO: 64748 - DNA, 25 bp, Artificial
  Probe
agagcagatttcaaagtgttacaaa

SEQ ID NO: 64749 - DNA, 25 bp, Artificial
  Probe
atctctgtagtgtgtttcaaggaag

SEQ ID NO: 64750 - DNA, 25 bp, Artificial
  Probe
ctcctaaagcattcacaagtagacc

SEQ ID NO: 64751 - DNA, 25 bp, Artificial
  Probe
gagcagatttcaaagtgttacaaag

SEQ ID NO: 64752 - DNA, 25 bp, Artificial
  Probe
gtagagcagatttcaaagtgttaca

SEQ ID NO: 64753 - DNA, 25 bp, Artificial
  Probe
cattcacaagtagaccaatgcttat

SEQ ID NO: 64754 - DNA, 25 bp, Artificial
  Probe
ctctgtagtgtgtttcaaggaagaa

SEQ ID NO: 64755 - DNA, 25 bp, Artificial
  Probe
ttaacagacctttgcctcattattt

SEQ ID NO: 64756 - DNA, 25 bp, Artificial
  Probe
catcctattaacagacctttgcctc

SEQ ID NO: 64757 - DNA, 25 bp, Artificial
  Probe
ctccatcctattaacagacctttgc

SEQ ID NO: 64758 - DNA, 25 bp, Artificial
  Probe
gctccatcctattaacagacctttg

SEQ ID NO: 64759 - DNA, 25 bp, Artificial
  Probe
ttgcagtagctccatcctattaaca

SEQ ID NO: 64760 - DNA, 25 bp, Artificial
  Probe
attaacagacctttgcctcattatt

SEQ ID NO: 64761 - DNA, 25 bp, Artificial
  Probe
aactcctaaagcattcacaagtaga

SEQ ID NO: 64762 - DNA, 25 bp, Artificial
  Probe
ctattaacagacctttgcctcatta

SEQ ID NO: 64763 - DNA, 25 bp, Artificial
  Probe
tcctattaacagacctttgcctcat

SEQ ID NO: 64764 - DNA, 25 bp, Artificial
  Probe
atcctattaacagacctttgcctca

SEQ ID NO: 64765 - DNA, 25 bp, Artificial
  Probe
tcaaagatgagaagatggctatgaa

SEQ ID NO: 64766 - DNA, 25 bp, Artificial
  Probe
tagagcagatttcaaagtgttacaa

SEQ ID NO: 64767 - DNA, 25 bp, Artificial
  Probe
atcaaagatgagaagatggctatga

SEQ ID NO: 64768 - DNA, 25 bp, Artificial
  Probe
actgactggaaatcacatcaaagat

SEQ ID NO: 64769 - DNA, 25 bp, Artificial
  Probe
actcctaaagcattcacaagtagac

SEQ ID NO: 64770 - DNA, 25 bp, Artificial
  Probe
tcctaaagcattcacaagtagacca

SEQ ID NO: 64771 - DNA, 25 bp, Artificial
  Probe
tatcaggtgttactggatgttaagg

SEQ ID NO: 64772 - DNA, 25 bp, Artificial
  Probe
tgaatatcaggtgttactggatgtt

SEQ ID NO: 64773 - DNA, 25 bp, Artificial
  Probe
atgaatatcaggtgttactggatgt

SEQ ID NO: 64774 - DNA, 25 bp, Artificial
  Probe
cttgagtcagagattgctacctacc

SEQ ID NO: 64775 - DNA, 25 bp, Artificial
  Probe
catgaatatcaggtgttactggatg

SEQ ID NO: 64776 - DNA, 25 bp, Artificial
  Probe
gcttgagtcagagattgctacctac

SEQ ID NO: 64777 - DNA, 25 bp, Artificial
  Probe
atatcaggtgttactggatgttaag

SEQ ID NO: 64778 - DNA, 25 bp, Artificial
  Probe
gaatatcaggtgttactggatgtta

SEQ ID NO: 64779 - DNA, 25 bp, Artificial
  Probe
ccatgaatatcaggtgttactggat

SEQ ID NO: 64780 - DNA, 25 bp, Artificial
  Probe
aaccatgaatatcaggtgttactgg

SEQ ID NO: 64781 - DNA, 25 bp, Artificial
  Probe
gaaccatgaatatcaggtgttactg

SEQ ID NO: 64782 - DNA, 25 bp, Artificial
  Probe
cagaaccatgaatatcaggtgttac

SEQ ID NO: 64783 - DNA, 25 bp, Artificial
  Probe
aataaagtgttctcttggcatagca

SEQ ID NO: 64784 - DNA, 25 bp, Artificial
  Probe
agaaccatgaatatcaggtgttact

SEQ ID NO: 64785 - DNA, 25 bp, Artificial
  Probe
aatatcaggtgttactggatgttaa

SEQ ID NO: 64786 - DNA, 25 bp, Artificial
  Probe
gcagaaccatgaatatcaggtgtta

SEQ ID NO: 64787 - DNA, 25 bp, Artificial
  Probe
caataaagtgttctcttggcatagc

SEQ ID NO: 64788 - DNA, 25 bp, Artificial
  Probe
ataaagtgttctcttggcatagcaa

SEQ ID NO: 64789 - DNA, 25 bp, Artificial
  Probe
accatgaatatcaggtgttactgga

SEQ ID NO: 64790 - DNA, 25 bp, Artificial
  Probe
taaagtgttctcttggcatagcaaa

SEQ ID NO: 64791 - DNA, 25 bp, Artificial
  Probe
atcaggtgttactggatgttaaggc

SEQ ID NO: 64792 - DNA, 25 bp, Artificial
  Probe
gctaaatgatctcacacttccctag

SEQ ID NO: 64793 - DNA, 25 bp, Artificial
  Probe
taagagttcctttcgtcccttctac

SEQ ID NO: 64794 - DNA, 25 bp, Artificial
  Probe
gtaagagttcctttcgtcccttcta

SEQ ID NO: 64795 - DNA, 25 bp, Artificial
  Probe
aattctctggaatctaccttggctg

SEQ ID NO: 64796 - DNA, 25 bp, Artificial
  Probe
ttgagtcagagattgctacctaccg

SEQ ID NO: 64797 - DNA, 25 bp, Artificial
  Probe
ggcttgagtcagagattgctaccta

SEQ ID NO: 64798 - DNA, 25 bp, Artificial
  Probe
tcaacatagcatgaggaattctctg

SEQ ID NO: 64799 - DNA, 25 bp, Artificial
  Probe
gagttcctttcgtcccttctacatc

SEQ ID NO: 64800 - DNA, 25 bp, Artificial
  Probe
agctaaatgatctcacacttcccta

SEQ ID NO: 64801 - DNA, 25 bp, Artificial
  Probe
ttctctggaatctaccttggctgag

SEQ ID NO: 64802 - DNA, 25 bp, Artificial
  Probe
attctctggaatctaccttggctga

SEQ ID NO: 64803 - DNA, 25 bp, Artificial
  Probe
acatagcatgaggaattctctggaa

SEQ ID NO: 64804 - DNA, 25 bp, Artificial
  Probe
aacatagcatgaggaattctctgga

SEQ ID NO: 64805 - DNA, 25 bp, Artificial
  Probe
caacatagcatgaggaattctctgg

SEQ ID NO: 64806 - DNA, 25 bp, Artificial
  Probe
ctgtaagagttcctttcgtcccttc

SEQ ID NO: 64807 - DNA, 25 bp, Artificial
  Probe
atagcatgaggaattctctggaatc

SEQ ID NO: 64808 - DNA, 25 bp, Artificial
  Probe
gaggaattctctggaatctaccttg

SEQ ID NO: 64809 - DNA, 25 bp, Artificial
  Probe
atgaggaattctctggaatctacct

SEQ ID NO: 64810 - DNA, 25 bp, Artificial
  Probe
catgaggaattctctggaatctacc

SEQ ID NO: 64811 - DNA, 25 bp, Artificial
  Probe
catagcatgaggaattctctggaat

SEQ ID NO: 64812 - DNA, 25 bp, Artificial
  Probe
agagttcctttcgtcccttctacat

SEQ ID NO: 64813 - DNA, 25 bp, Artificial
  Probe
tgaggaattctctggaatctacctt

SEQ ID NO: 64814 - DNA, 25 bp, Artificial
  Probe
ggcagaaccatgaatatcaggtgtt

SEQ ID NO: 64815 - DNA, 25 bp, Artificial
  Probe
atattcccaataaagtgttctcttg

SEQ ID NO: 64816 - DNA, 25 bp, Artificial
  Probe
gttcctaactgtgatgatgaagcat

SEQ ID NO: 64817 - DNA, 25 bp, Artificial
  Probe
ttcggttcctaactgtgatgatgaa

SEQ ID NO: 64818 - DNA, 25 bp, Artificial
  Probe
ggttgaacaagtgtggagttataag

SEQ ID NO: 64819 - DNA, 25 bp, Artificial
  Probe
gttgaacaagtgtggagttataagc

SEQ ID NO: 64820 - DNA, 25 bp, Artificial
  Probe
ttcctaactgtgatgatgaagcatg

SEQ ID NO: 64821 - DNA, 25 bp, Artificial
  Probe
ttgaacaagtgtggagttataagcc

SEQ ID NO: 64822 - DNA, 25 bp, Artificial
  Probe
tcggttcctaactgtgatgatgaag

SEQ ID NO: 64823 - DNA, 25 bp, Artificial
  Probe
gttcggttcctaactgtgatgatga

SEQ ID NO: 64824 - DNA, 25 bp, Artificial
  Probe
ggttcctaactgtgatgatgaagca

SEQ ID NO: 64825 - DNA, 25 bp, Artificial
  Probe
tcctaactgtgatgatgaagcatgg

SEQ ID NO: 64826 - DNA, 25 bp, Artificial
  Probe
gatgttcaactcaaagacctagaga

SEQ ID NO: 64827 - DNA, 25 bp, Artificial
  Probe
ttcaactcaaagacctagagaagtg

SEQ ID NO: 64828 - DNA, 25 bp, Artificial
  Probe
gttcaactcaaagacctagagaagt

SEQ ID NO: 64829 - DNA, 25 bp, Artificial
  Probe
tgttcaactcaaagacctagagaag

SEQ ID NO: 64830 - DNA, 25 bp, Artificial
  Probe
tgatgttcaactcaaagacctagag

SEQ ID NO: 64831 - DNA, 25 bp, Artificial
  Probe
atgttcaactcaaagacctagagaa

SEQ ID NO: 64832 - DNA, 25 bp, Artificial
  Probe
cggttcctaactgtgatgatgaagc

SEQ ID NO: 64833 - DNA, 25 bp, Artificial
  Probe
tcaactcaaagacctagagaagtgg

SEQ ID NO: 64834 - DNA, 25 bp, Artificial
  Probe
cgttcggttcctaactgtgatgatg

SEQ ID NO: 64835 - DNA, 25 bp, Artificial
  Probe
tcgttcggttcctaactgtgatgat

SEQ ID NO: 64836 - DNA, 25 bp, Artificial
  Probe
atcgttcggttcctaactgtgatga

SEQ ID NO: 64837 - DNA, 25 bp, Artificial
  Probe
aatgaatgttctggcagatgctctc

SEQ ID NO: 64838 - DNA, 25 bp, Artificial
  Probe
gaatgaatgttctggcagatgctct

SEQ ID NO: 64839 - DNA, 25 bp, Artificial
  Probe
caaagacctagagaagtggcagaac

SEQ ID NO: 64840 - DNA, 25 bp, Artificial
  Probe
tcaaagacctagagaagtggcagaa

SEQ ID NO: 64841 - DNA, 25 bp, Artificial
  Probe
gaatgttctggcagatgctctcaag

SEQ ID NO: 64842 - DNA, 25 bp, Artificial
  Probe
ttgatgttcaactcaaagacctaga

SEQ ID NO: 64843 - DNA, 25 bp, Artificial
  Probe
caactcaaagacctagagaagtggc

SEQ ID NO: 64844 - DNA, 25 bp, Artificial
  Probe
aatgttctggcagatgctctcaaga

SEQ ID NO: 64845 - DNA, 25 bp, Artificial
  Probe
aactcaaagacctagagaagtggca

SEQ ID NO: 64846 - DNA, 25 bp, Artificial
  Probe
atgaatgttctggcagatgctctca

SEQ ID NO: 64847 - DNA, 25 bp, Artificial
  Probe
ctcaaagacctagagaagtggcaga

SEQ ID NO: 64848 - DNA, 25 bp, Artificial
  Probe
cgaatgaatgttctggcagatgctc

SEQ ID NO: 64849 - DNA, 25 bp, Artificial
  Probe
tgaatgttctggcagatgctctcaa

SEQ ID NO: 64850 - DNA, 25 bp, Artificial
  Probe
actcaaagacctagagaagtggcag

SEQ ID NO: 64851 - DNA, 25 bp, Artificial
  Probe
atgttctggcagatgctctcaagag

SEQ ID NO: 64852 - DNA, 25 bp, Artificial
  Probe
catcgttcggttcctaactgtgatg

SEQ ID NO: 64853 - DNA, 25 bp, Artificial
  Probe
gatcacagagctgggaagattgttg

SEQ ID NO: 64854 - DNA, 25 bp, Artificial
  Probe
cagagctgggaagattgttgtgaac

SEQ ID NO: 64855 - DNA, 25 bp, Artificial
  Probe
atcacagagctgggaagattgttgt

SEQ ID NO: 64856 - DNA, 25 bp, Artificial
  Probe
gatgatcacagagctgggaagattg

SEQ ID NO: 64857 - DNA, 25 bp, Artificial
  Probe
acagagctgggaagattgttgtgaa

SEQ ID NO: 64858 - DNA, 25 bp, Artificial
  Probe
cacgaggtgttccttaagatccgag

SEQ ID NO: 64859 - DNA, 25 bp, Artificial
  Probe
cattgatgatcacagagctgggaag

SEQ ID NO: 64860 - DNA, 25 bp, Artificial
  Probe
tgatgatcacagagctgggaagatt

SEQ ID NO: 64861 - DNA, 25 bp, Artificial
  Probe
cgaggtgggcttgaaggttagttaa

SEQ ID NO: 64862 - DNA, 25 bp, Artificial
  Probe
gaggtgggcttgaaggttagttaac

SEQ ID NO: 64863 - DNA, 25 bp, Artificial
  Probe
caccttccaccttccagaaatctcg

SEQ ID NO: 64864 - DNA, 25 bp, Artificial
  Probe
cttgaaggttagttaaccaccacca

SEQ ID NO: 64865 - DNA, 25 bp, Artificial
  Probe
ttgaaggttagttaaccaccaccac

SEQ ID NO: 64866 - DNA, 25 bp, Artificial
  Probe
gcttgaaggttagttaaccaccacc

SEQ ID NO: 64867 - DNA, 25 bp, Artificial
  Probe
ggcttgaaggttagttaaccaccac

SEQ ID NO: 64868 - DNA, 25 bp, Artificial
  Probe
agaaatctcggccctttgctatgac

SEQ ID NO: 64869 - DNA, 25 bp, Artificial
  Probe
cagaaatctcggccctttgctatga

SEQ ID NO: 64870 - DNA, 25 bp, Artificial
  Probe
gaaggttagttaaccaccaccacca

SEQ ID NO: 64871 - DNA, 25 bp, Artificial
  Probe
tgaaggttagttaaccaccaccacc

SEQ ID NO: 64872 - DNA, 25 bp, Artificial
  Probe
aaggttagttaaccaccaccaccac

SEQ ID NO: 64873 - DNA, 25 bp, Artificial
  Probe
aggtgggcttgaaggttagttaacc

SEQ ID NO: 64874 - DNA, 25 bp, Artificial
  Probe
gggcttgaaggttagttaaccacca

SEQ ID NO: 64875 - DNA, 25 bp, Artificial
  Probe
tgggcttgaaggttagttaaccacc

SEQ ID NO: 64876 - DNA, 25 bp, Artificial
  Probe
ggtgggcttgaaggttagttaacca

SEQ ID NO: 64877 - DNA, 25 bp, Artificial
  Probe
taatgacgacatctgtaatgacgac

SEQ ID NO: 64878 - DNA, 25 bp, Artificial
  Probe
gtaatgacgacatctgtaatgacga

SEQ ID NO: 64879 - DNA, 25 bp, Artificial
  Probe
cgacatctgtaatgacgacatattg

SEQ ID NO: 64880 - DNA, 25 bp, Artificial
  Probe
acgacatctgtaatgacgacatatt

SEQ ID NO: 64881 - DNA, 25 bp, Artificial
  Probe
ctgtaatgacgacatctgtaatgac

SEQ ID NO: 64882 - DNA, 25 bp, Artificial
  Probe
tctgtaatgacgacatctgtaatga

SEQ ID NO: 64883 - DNA, 25 bp, Artificial
  Probe
gacgacatctgtaatgacgacatat

SEQ ID NO: 64884 - DNA, 25 bp, Artificial
  Probe
aatcagatcaacatcaggatggttc

SEQ ID NO: 64885 - DNA, 25 bp, Artificial
  Probe
gacatctgtaatgacgacatattgt

SEQ ID NO: 64886 - DNA, 25 bp, Artificial
  Probe
tgtaatgacgacatctgtaatgacg

SEQ ID NO: 64887 - DNA, 25 bp, Artificial
  Probe
atctgtaatgacgacatctgtaatg

SEQ ID NO: 64888 - DNA, 25 bp, Artificial
  Probe
gctactggaatactgctagaataat

SEQ ID NO: 64889 - DNA, 25 bp, Artificial
  Probe
tgacgacatctgtaatgacgacata

SEQ ID NO: 64890 - DNA, 25 bp, Artificial
  Probe
atcagatcaacatcaggatggttct

SEQ ID NO: 64891 - DNA, 25 bp, Artificial
  Probe
aagcattactgagtccttacctctg

SEQ ID NO: 64892 - DNA, 25 bp, Artificial
  Probe
caagcattactgagtccttacctct

SEQ ID NO: 64893 - DNA, 25 bp, Artificial
  Probe
attccttaatggagagcactctaac

SEQ ID NO: 64894 - DNA, 25 bp, Artificial
  Probe
gattccttaatggagagcactctaa

SEQ ID NO: 64895 - DNA, 25 bp, Artificial
  Probe
atctccacatcttctaagcaaacat

SEQ ID NO: 64896 - DNA, 25 bp, Artificial
  Probe
tctccacatcttctaagcaaacatt

SEQ ID NO: 64897 - DNA, 25 bp, Artificial
  Probe
tcagatcaacatcaggatggttctc

SEQ ID NO: 64898 - DNA, 25 bp, Artificial
  Probe
atgacgacatctgtaatgacgacat

SEQ ID NO: 64899 - DNA, 25 bp, Artificial
  Probe
aatgacgacatctgtaatgacgaca

SEQ ID NO: 64900 - DNA, 25 bp, Artificial
  Probe
ggattccttaatggagagcactcta

SEQ ID NO: 64901 - DNA, 25 bp, Artificial
  Probe
ccacatcttctaagcaaacattgaa

SEQ ID NO: 64902 - DNA, 25 bp, Artificial
  Probe
ccaagcattactgagtccttacctc

SEQ ID NO: 64903 - DNA, 25 bp, Artificial
  Probe
ctccacatcttctaagcaaacattg

SEQ ID NO: 64904 - DNA, 25 bp, Artificial
  Probe
tccacatcttctaagcaaacattga

SEQ ID NO: 64905 - DNA, 25 bp, Artificial
  Probe
aaagtttcacaaggagcaagagttt

SEQ ID NO: 64906 - DNA, 25 bp, Artificial
  Probe
atattgtcaatgaagagggaagcag

SEQ ID NO: 64907 - DNA, 25 bp, Artificial
  Probe
tatctgtaatgacgacatctgtaat

SEQ ID NO: 64908 - DNA, 25 bp, Artificial
  Probe
atatctgtaatgacgacatctgtaa

SEQ ID NO: 64909 - DNA, 25 bp, Artificial
  Probe
aatatctgtaatgacgacatctgta

SEQ ID NO: 64910 - DNA, 25 bp, Artificial
  Probe
taatatctgtaatgacgacatctgt

SEQ ID NO: 64911 - DNA, 25 bp, Artificial
  Probe
acaaggagcaagagtttgaagattt

SEQ ID NO: 64912 - DNA, 25 bp, Artificial
  Probe
ttccttaatggagagcactctaacc

SEQ ID NO: 64913 - DNA, 25 bp, Artificial
  Probe
gatctccacatcttctaagcaaaca

SEQ ID NO: 64914 - DNA, 25 bp, Artificial
  Probe
catattgtcaatgaagagggaagca

SEQ ID NO: 64915 - DNA, 25 bp, Artificial
  Probe
aagtcccaaatcagatcaacatcag

SEQ ID NO: 64916 - DNA, 25 bp, Artificial
  Probe
gaagtcccaaatcagatcaacatca

SEQ ID NO: 64917 - DNA, 25 bp, Artificial
  Probe
aaatcagatcaacatcaggatggtt

SEQ ID NO: 64918 - DNA, 25 bp, Artificial
  Probe
aacccatgaaaccttcctctattag

SEQ ID NO: 64919 - DNA, 25 bp, Artificial
  Probe
caacccatgaaaccttcctctatta

SEQ ID NO: 64920 - DNA, 25 bp, Artificial
  Probe
ctttcttgctgacgaggactgtata

SEQ ID NO: 64921 - DNA, 25 bp, Artificial
  Probe
cacaaggagcaagagtttgaagatt

SEQ ID NO: 64922 - DNA, 25 bp, Artificial
  Probe
ccatgtgacactttgagtttatcag

SEQ ID NO: 64923 - DNA, 25 bp, Artificial
  Probe
aaccatgtgacactttgagtttatc

SEQ ID NO: 64924 - DNA, 25 bp, Artificial
  Probe
catgtgacactttgagtttatcagt

SEQ ID NO: 64925 - DNA, 25 bp, Artificial
  Probe
accatgtgacactttgagtttatca

SEQ ID NO: 64926 - DNA, 25 bp, Artificial
  Probe
ctaaccatgtgacactttgagttta

SEQ ID NO: 64927 - DNA, 25 bp, Artificial
  Probe
aactacctggagactgttcgtaacc

SEQ ID NO: 64928 - DNA, 25 bp, Artificial
  Probe
taaccatgtgacactttgagtttat

SEQ ID NO: 64929 - DNA, 25 bp, Artificial
  Probe
ctttgagtttatcagtgagcctgtg

SEQ ID NO: 64930 - DNA, 25 bp, Artificial
  Probe
actttgagtttatcagtgagcctgt

SEQ ID NO: 64931 - DNA, 25 bp, Artificial
  Probe
gctaaccatgtgacactttgagttt

SEQ ID NO: 64932 - DNA, 25 bp, Artificial
  Probe
gagactgttcgtaaccatgtccaac

SEQ ID NO: 64933 - DNA, 25 bp, Artificial
  Probe
ctacctggagactgttcgtaaccat

SEQ ID NO: 64934 - DNA, 25 bp, Artificial
  Probe
agagaggaactacctggagactgtt

SEQ ID NO: 64935 - DNA, 25 bp, Artificial
  Probe
agagaaggtgtgatgtgtggctaac

SEQ ID NO: 64936 - DNA, 25 bp, Artificial
  Probe
cagagaaggtgtgatgtgtggctaa

SEQ ID NO: 64937 - DNA, 25 bp, Artificial
  Probe
ctgagagaggaactacctggagact

SEQ ID NO: 64938 - DNA, 25 bp, Artificial
  Probe
tttgagtttatcagtgagcctgtgg

SEQ ID NO: 64939 - DNA, 25 bp, Artificial
  Probe
tacctggagactgttcgtaaccatg

SEQ ID NO: 64940 - DNA, 25 bp, Artificial
  Probe
gagagaggaactacctggagactgt

SEQ ID NO: 64941 - DNA, 25 bp, Artificial
  Probe
tgagagaggaactacctggagactg

SEQ ID NO: 64942 - DNA, 25 bp, Artificial
  Probe
gaactacctggagactgttcgtaac

SEQ ID NO: 64943 - DNA, 25 bp, Artificial
  Probe
ggctaaccatgtgacactttgagtt

SEQ ID NO: 64944 - DNA, 25 bp, Artificial
  Probe
tgttcgtaaccatgtccaacaacat

SEQ ID NO: 64945 - DNA, 25 bp, Artificial
  Probe
gactgttcgtaaccatgtccaacaa

SEQ ID NO: 64946 - DNA, 25 bp, Artificial
  Probe
ggagactgttcgtaaccatgtccaa

SEQ ID NO: 64947 - DNA, 25 bp, Artificial
  Probe
actacctggagactgttcgtaacca

SEQ ID NO: 64948 - DNA, 25 bp, Artificial
  Probe
cctgagagaggaactacctggagac

SEQ ID NO: 64949 - DNA, 25 bp, Artificial
  Probe
gacctgagagaggaactacctggag

SEQ ID NO: 64950 - DNA, 25 bp, Artificial
  Probe
ggaactacctggagactgttcgtaa

SEQ ID NO: 64951 - DNA, 25 bp, Artificial
  Probe
ctgttcgtaaccatgtccaacaaca

SEQ ID NO: 64952 - DNA, 25 bp, Artificial
  Probe
actgttcgtaaccatgtccaacaac

SEQ ID NO: 64953 - DNA, 25 bp, Artificial
  Probe
gagaggaactacctggagactgttc

SEQ ID NO: 64954 - DNA, 25 bp, Artificial
  Probe
gtgacactttgagtttatcagtgag

SEQ ID NO: 64955 - DNA, 25 bp, Artificial
  Probe
tgtgacactttgagtttatcagtga

SEQ ID NO: 64956 - DNA, 25 bp, Artificial
  Probe
atgtgacactttgagtttatcagtg

SEQ ID NO: 64957 - DNA, 25 bp, Artificial
  Probe
gaaggtgtgatgtgtggctaaccat

SEQ ID NO: 64958 - DNA, 25 bp, Artificial
  Probe
tgacactttgagtttatcagtgagc

SEQ ID NO: 64959 - DNA, 25 bp, Artificial
  Probe
ttgagtttatcagtgagcctgtggg

SEQ ID NO: 64960 - DNA, 25 bp, Artificial
  Probe
ctggagactgttcgtaaccatgtcc

SEQ ID NO: 64961 - DNA, 25 bp, Artificial
  Probe
cctggagactgttcgtaaccatgtc

SEQ ID NO: 64962 - DNA, 25 bp, Artificial
  Probe
agactgttcgtaaccatgtccaaca

SEQ ID NO: 64963 - DNA, 25 bp, Artificial
  Probe
gtggctaaccatgtgacactttgag

SEQ ID NO: 64964 - DNA, 25 bp, Artificial
  Probe
cactttgagtttatcagtgagcctg

SEQ ID NO: 64965 - DNA, 25 bp, Artificial
  Probe
gacactttgagtttatcagtgagcc

SEQ ID NO: 64966 - DNA, 25 bp, Artificial
  Probe
aggaactacctggagactgttcgta

SEQ ID NO: 64967 - DNA, 25 bp, Artificial
  Probe
cagtgtatggaagttggctataaga

SEQ ID NO: 64968 - DNA, 25 bp, Artificial
  Probe
aagatcaacagaccaagtcatcaag

SEQ ID NO: 64969 - DNA, 25 bp, Artificial
  Probe
ccagtgtatggaagttggctataag

SEQ ID NO: 64970 - DNA, 25 bp, Artificial
  Probe
gctcttaaagttcctccatattcca

SEQ ID NO: 64971 - DNA, 25 bp, Artificial
  Probe
acgctcttaaagttcctccatattc

SEQ ID NO: 64972 - DNA, 25 bp, Artificial
  Probe
gacgctcttaaagttcctccatatt

SEQ ID NO: 64973 - DNA, 25 bp, Artificial
  Probe
accagtgtatggaagttggctataa

SEQ ID NO: 64974 - DNA, 25 bp, Artificial
  Probe
aaccagtgtatggaagttggctata

SEQ ID NO: 64975 - DNA, 25 bp, Artificial
  Probe
cgctcttaaagttcctccatattcc

SEQ ID NO: 64976 - DNA, 25 bp, Artificial
  Probe
ctcttaaagttcctccatattccat

SEQ ID NO: 64977 - DNA, 25 bp, Artificial
  Probe
aaagatcaacagaccaagtcatcaa

SEQ ID NO: 64978 - DNA, 25 bp, Artificial
  Probe
gaaagatcaacagaccaagtcatca

SEQ ID NO: 64979 - DNA, 25 bp, Artificial
  Probe
tcttaaagttcctccatattccatg

SEQ ID NO: 64980 - DNA, 25 bp, Artificial
  Probe
agatcaacagaccaagtcatcaagc

SEQ ID NO: 64981 - DNA, 25 bp, Artificial
  Probe
ggaaagatcaacagaccaagtcatc

SEQ ID NO: 64982 - DNA, 25 bp, Artificial
  Probe
aaagtggaaagatcaacagaccaag

SEQ ID NO: 64983 - DNA, 25 bp, Artificial
  Probe
ggacgctcttaaagttcctccatat

SEQ ID NO: 64984 - DNA, 25 bp, Artificial
  Probe
cataaaggagagtttcagctacctg

SEQ ID NO: 64985 - DNA, 25 bp, Artificial
  Probe
gagggtccataaaggagagtttcag

SEQ ID NO: 64986 - DNA, 25 bp, Artificial
  Probe
gtccataaaggagagtttcagctac

SEQ ID NO: 64987 - DNA, 25 bp, Artificial
  Probe
attcagttttacaccacgaagagat

SEQ ID NO: 64988 - DNA, 25 bp, Artificial
  Probe
cagttttacaccacgaagagatgat

SEQ ID NO: 64989 - DNA, 25 bp, Artificial
  Probe
tggaaagatcaacagaccaagtcat

SEQ ID NO: 64990 - DNA, 25 bp, Artificial
  Probe
gatcaacagaccaagtcatcaagcc

SEQ ID NO: 64991 - DNA, 25 bp, Artificial
  Probe
ccataaaggagagtttcagctacct

SEQ ID NO: 64992 - DNA, 25 bp, Artificial
  Probe
aagtggaaagatcaacagaccaagt

SEQ ID NO: 64993 - DNA, 25 bp, Artificial
  Probe
ttcagttttacaccacgaagagatg

SEQ ID NO: 64994 - DNA, 25 bp, Artificial
  Probe
cattcagttttacaccacgaagaga

SEQ ID NO: 64995 - DNA, 25 bp, Artificial
  Probe
tccataaaggagagtttcagctacc

SEQ ID NO: 64996 - DNA, 25 bp, Artificial
  Probe
ggtccataaaggagagtttcagcta

SEQ ID NO: 64997 - DNA, 25 bp, Artificial
  Probe
agttttacaccacgaagagatgatc

SEQ ID NO: 64998 - DNA, 25 bp, Artificial
  Probe
catagagaccatgtacaaccagtgt

SEQ ID NO: 64999 - DNA, 25 bp, Artificial
  Probe
gtggatgaggacgctcttaaagttc

SEQ ID NO: 65000 - DNA, 25 bp, Artificial
  Probe
ctctgtcaaaagtggaaagatcaac

SEQ ID NO: 65001 - DNA, 25 bp, Artificial
  Probe
tctctgtcaaaagtggaaagatcaa

SEQ ID NO: 65002 - DNA, 25 bp, Artificial
  Probe
ttctctgtcaaaagtggaaagatca

SEQ ID NO: 65003 - DNA, 25 bp, Artificial
  Probe
agtggaaagatcaacagaccaagtc

SEQ ID NO: 65004 - DNA, 25 bp, Artificial
  Probe
ctatcgaagtgggttgggaagatac

SEQ ID NO: 65005 - DNA, 25 bp, Artificial
  Probe
ccatagagaccatgtacaaccagtg

SEQ ID NO: 65006 - DNA, 25 bp, Artificial
  Probe
tagagaccatgtacaaccagtgtat

SEQ ID NO: 65007 - DNA, 25 bp, Artificial
  Probe
atagagaccatgtacaaccagtgta

SEQ ID NO: 65008 - DNA, 25 bp, Artificial
  Probe
tcaaaagtggaaagatcaacagacc

SEQ ID NO: 65009 - DNA, 25 bp, Artificial
  Probe
catgtacaaccagtgtatggaagtt

SEQ ID NO: 65010 - DNA, 25 bp, Artificial
  Probe
aaccattcagttttacaccacgaag

SEQ ID NO: 65011 - DNA, 25 bp, Artificial
  Probe
gaaccattcagttttacaccacgaa

SEQ ID NO: 65012 - DNA, 25 bp, Artificial
  Probe
ggcattaaacctttggataacagat

SEQ ID NO: 65013 - DNA, 25 bp, Artificial
  Probe
aaagttgttaggtagagcagatttc

SEQ ID NO: 65014 - DNA, 25 bp, Artificial
  Probe
aagttgttaggtagagcagatttct

SEQ ID NO: 65015 - DNA, 25 bp, Artificial
  Probe
gggcattaaacctttggataacaga

SEQ ID NO: 65016 - DNA, 25 bp, Artificial
  Probe
aagaatcactgggcattaaaccttt

SEQ ID NO: 65017 - DNA, 25 bp, Artificial
  Probe
tgggcattaaacctttggataacag

SEQ ID NO: 65018 - DNA, 25 bp, Artificial
  Probe
ctgggcattaaacctttggataaca

SEQ ID NO: 65019 - DNA, 25 bp, Artificial
  Probe
actgggcattaaacctttggataac

SEQ ID NO: 65020 - DNA, 25 bp, Artificial
  Probe
cactgggcattaaacctttggataa

SEQ ID NO: 65021 - DNA, 25 bp, Artificial
  Probe
gcattaaacctttggataacagatg

SEQ ID NO: 65022 - DNA, 25 bp, Artificial
  Probe
gttaagagtgctaactactacttga

SEQ ID NO: 65023 - DNA, 25 bp, Artificial
  Probe
agaatcactgggcattaaacctttg

SEQ ID NO: 65024 - DNA, 25 bp, Artificial
  Probe
gaagaatcactgggcattaaacctt

SEQ ID NO: 65025 - DNA, 25 bp, Artificial
  Probe
acctttggataacagatgtgtcttt

SEQ ID NO: 65026 - DNA, 25 bp, Artificial
  Probe
aacctttggataacagatgtgtctt

SEQ ID NO: 65027 - DNA, 25 bp, Artificial
  Probe
aaacctttggataacagatgtgtct

SEQ ID NO: 65028 - DNA, 25 bp, Artificial
  Probe
taaacctttggataacagatgtgtc

SEQ ID NO: 65029 - DNA, 25 bp, Artificial
  Probe
taaagttgttaggtagagcagattt

SEQ ID NO: 65030 - DNA, 25 bp, Artificial
  Probe
cttgaaactgcccattaggttactg

SEQ ID NO: 65031 - DNA, 25 bp, Artificial
  Probe
tcactgggcattaaacctttggata

SEQ ID NO: 65032 - DNA, 25 bp, Artificial
  Probe
ttaaacctttggataacagatgtgt

SEQ ID NO: 65033 - DNA, 25 bp, Artificial
  Probe
tttacacattagtgatgggctgatg

SEQ ID NO: 65034 - DNA, 25 bp, Artificial
  Probe
gtttacacattagtgatgggctgat

SEQ ID NO: 65035 - DNA, 25 bp, Artificial
  Probe
agagtatttcagagctgtaatccat

SEQ ID NO: 65036 - DNA, 25 bp, Artificial
  Probe
attaaacctttggataacagatgtg

SEQ ID NO: 65037 - DNA, 25 bp, Artificial
  Probe
gaatcactgggcattaaacctttgg

SEQ ID NO: 65038 - DNA, 25 bp, Artificial
  Probe
ctgaagaatcactgggcattaaacc

SEQ ID NO: 65039 - DNA, 25 bp, Artificial
  Probe
cctgaagaatcactgggcattaaac

SEQ ID NO: 65040 - DNA, 25 bp, Artificial
  Probe
ttccctagtagttaagagtgctaac

SEQ ID NO: 65041 - DNA, 25 bp, Artificial
  Probe
ctcagtcagtacctgctcttcctta

SEQ ID NO: 65042 - DNA, 25 bp, Artificial
  Probe
ctaaagttgttaggtagagcagatt

SEQ ID NO: 65043 - DNA, 25 bp, Artificial
  Probe
tccatttctattaacctcttcttca

SEQ ID NO: 65044 - DNA, 25 bp, Artificial
  Probe
gctgtaatccatttctattaacctc

SEQ ID NO: 65045 - DNA, 25 bp, Artificial
  Probe
cattaaacctttggataacagatgt

SEQ ID NO: 65046 - DNA, 25 bp, Artificial
  Probe
ttgttaggtagagcagatttctgtc

SEQ ID NO: 65047 - DNA, 25 bp, Artificial
  Probe
agttgttaggtagagcagatttctg

SEQ ID NO: 65048 - DNA, 25 bp, Artificial
  Probe
caatctatgtgggttgtttagcttt

SEQ ID NO: 65049 - DNA, 25 bp, Artificial
  Probe
tagagtatttcagagctgtaatcca

SEQ ID NO: 65050 - DNA, 25 bp, Artificial
  Probe
atcactgggcattaaacctttggat

SEQ ID NO: 65051 - DNA, 25 bp, Artificial
  Probe
gttgttaggtagagcagatttctgt

SEQ ID NO: 65052 - DNA, 25 bp, Artificial
  Probe
gagtatttcagagctgtaatccatt

SEQ ID NO: 65053 - DNA, 25 bp, Artificial
  Probe
tgaagaatcactgggcattaaacct

SEQ ID NO: 65054 - DNA, 25 bp, Artificial
  Probe
ttaggtagagcagatttctgtccat

SEQ ID NO: 65055 - DNA, 25 bp, Artificial
  Probe
aatcactgggcattaaacctttgga

SEQ ID NO: 65056 - DNA, 25 bp, Artificial
  Probe
tcagtcagtacctgctcttccttac

SEQ ID NO: 65057 - DNA, 25 bp, Artificial
  Probe
attgtgagaggagataatgtagcag

SEQ ID NO: 65058 - DNA, 25 bp, Artificial
  Probe
ttgtgagaggagataatgtagcagt

SEQ ID NO: 65059 - DNA, 25 bp, Artificial
  Probe
ttgaccagaccattaacttgattct

SEQ ID NO: 65060 - DNA, 25 bp, Artificial
  Probe
tgtgagaggagataatgtagcagtc

SEQ ID NO: 65061 - DNA, 25 bp, Artificial
  Probe
cttcttatgctcagagtgatgtcta

SEQ ID NO: 65062 - DNA, 25 bp, Artificial
  Probe
tgagaggagataatgtagcagtcat

SEQ ID NO: 65063 - DNA, 25 bp, Artificial
  Probe
tacagagacttcttatgctcagagt

SEQ ID NO: 65064 - DNA, 25 bp, Artificial
  Probe
agagacttcttatgctcagagtgat

SEQ ID NO: 65065 - DNA, 25 bp, Artificial
  Probe
ttcttatgctcagagtgatgtctag

SEQ ID NO: 65066 - DNA, 25 bp, Artificial
  Probe
gagacttcttatgctcagagtgatg

SEQ ID NO: 65067 - DNA, 25 bp, Artificial
  Probe
acttcttatgctcagagtgatgtct

SEQ ID NO: 65068 - DNA, 25 bp, Artificial
  Probe
agacttcttatgctcagagtgatgt

SEQ ID NO: 65069 - DNA, 25 bp, Artificial
  Probe
gtgagaggagataatgtagcagtca

SEQ ID NO: 65070 - DNA, 25 bp, Artificial
  Probe
gtacagagacttcttatgctcagag

SEQ ID NO: 65071 - DNA, 25 bp, Artificial
  Probe
gacttcttatgctcagagtgatgtc

SEQ ID NO: 65072 - DNA, 25 bp, Artificial
  Probe
cagagacttcttatgctcagagtga

SEQ ID NO: 65073 - DNA, 25 bp, Artificial
  Probe
acagagacttcttatgctcagagtg

SEQ ID NO: 65074 - DNA, 25 bp, Artificial
  Probe
cttggagaactacatcaaccgaact

SEQ ID NO: 65075 - DNA, 25 bp, Artificial
  Probe
tttgaccagaccattaacttgattc

SEQ ID NO: 65076 - DNA, 25 bp, Artificial
  Probe
agaggagataatgtagcagtcattg

SEQ ID NO: 65077 - DNA, 25 bp, Artificial
  Probe
cattgtgagaggagataatgtagca

SEQ ID NO: 65078 - DNA, 25 bp, Artificial
  Probe
gagaggagataatgtagcagtcatt

SEQ ID NO: 65079 - DNA, 25 bp, Artificial
  Probe
ttggagaactacatcaaccgaactg

SEQ ID NO: 65080 - DNA, 25 bp, Artificial
  Probe
gaggagataatgtagcagtcattgg

SEQ ID NO: 65081 - DNA, 25 bp, Artificial
  Probe
ggagaactacatcaaccgaactgtt

SEQ ID NO: 65082 - DNA, 25 bp, Artificial
  Probe
ctgttgcagtaataacttctgatgg

SEQ ID NO: 65083 - DNA, 25 bp, Artificial
  Probe
tgagtgtgtaattgtggatatttga

SEQ ID NO: 65084 - DNA, 25 bp, Artificial
  Probe
ttgtggatatttgacttcatgttgg

SEQ ID NO: 65085 - DNA, 25 bp, Artificial
  Probe
gagtgtgtaattgtggatatttgac

SEQ ID NO: 65086 - DNA, 25 bp, Artificial
  Probe
tgtggatatttgacttcatgttggt

SEQ ID NO: 65087 - DNA, 25 bp, Artificial
  Probe
gactgttattgtaacttagacatgc

SEQ ID NO: 65088 - DNA, 25 bp, Artificial
  Probe
tggatatttgacttcatgttggtac

SEQ ID NO: 65089 - DNA, 25 bp, Artificial
  Probe
gtggatatttgacttcatgttggta

SEQ ID NO: 65090 - DNA, 25 bp, Artificial
  Probe
ccttggagaactacatcaaccgaac

SEQ ID NO: 65091 - DNA, 25 bp, Artificial
  Probe
gtctgccttggagaactacatcaac

SEQ ID NO: 65092 - DNA, 25 bp, Artificial
  Probe
agtgtgtaattgtggatatttgact

SEQ ID NO: 65093 - DNA, 25 bp, Artificial
  Probe
gtgtgtaattgtggatatttgactt

SEQ ID NO: 65094 - DNA, 25 bp, Artificial
  Probe
tcttatgctcagagtgatgtctaga

SEQ ID NO: 65095 - DNA, 25 bp, Artificial
  Probe
tgttgcagtaataacttctgatggc

SEQ ID NO: 65096 - DNA, 25 bp, Artificial
  Probe
cttatgctcagagtgatgtctagat

SEQ ID NO: 65097 - DNA, 25 bp, Artificial
  Probe
ttatgctcagagtgatgtctagatt

SEQ ID NO: 65098 - DNA, 25 bp, Artificial
  Probe
gtgtaattgtggatatttgacttca

SEQ ID NO: 65099 - DNA, 25 bp, Artificial
  Probe
tgtgtaattgtggatatttgacttc

SEQ ID NO: 65100 - DNA, 25 bp, Artificial
  Probe
atgagtgtgtaattgtggatatttg

SEQ ID NO: 65101 - DNA, 25 bp, Artificial
  Probe
ttatgagtgtgtaattgtggatatt

SEQ ID NO: 65102 - DNA, 25 bp, Artificial
  Probe
cctggagtaactcatggaatcatct

SEQ ID NO: 65103 - DNA, 25 bp, Artificial
  Probe
aactgaaaataaagcaagactgtgg

SEQ ID NO: 65104 - DNA, 25 bp, Artificial
  Probe
ccctggagtaactcatggaatcatc

SEQ ID NO: 65105 - DNA, 25 bp, Artificial
  Probe
tccctggagtaactcatggaatcat

SEQ ID NO: 65106 - DNA, 25 bp, Artificial
  Probe
actgaaaataaagcaagactgtggc

SEQ ID NO: 65107 - DNA, 25 bp, Artificial
  Probe
tccaacataatgagtatacttcgcc

SEQ ID NO: 65108 - DNA, 25 bp, Artificial
  Probe
ttccaacataatgagtatacttcgc

SEQ ID NO: 65109 - DNA, 25 bp, Artificial
  Probe
ctccctggagtaactcatggaatca

SEQ ID NO: 65110 - DNA, 25 bp, Artificial
  Probe
cctccctggagtaactcatggaatc

SEQ ID NO: 65111 - DNA, 25 bp, Artificial
  Probe
ctgaaaataaagcaagactgtggct

SEQ ID NO: 65112 - DNA, 25 bp, Artificial
  Probe
ccaacataatgagtatacttcgccc

SEQ ID NO: 65113 - DNA, 25 bp, Artificial
  Probe
attccaacataatgagtatacttcg

SEQ ID NO: 65114 - DNA, 25 bp, Artificial
  Probe
caacataatgagtatacttcgcccg

SEQ ID NO: 65115 - DNA, 25 bp, Artificial
  Probe
tcctccctggagtaactcatggaat

SEQ ID NO: 65116 - DNA, 25 bp, Artificial
  Probe
aacataatgagtatacttcgcccgg

SEQ ID NO: 65117 - DNA, 25 bp, Artificial
  Probe
cccatgctctgcttttgctcatttt

SEQ ID NO: 65118 - DNA, 25 bp, Artificial
  Probe
gaaaataaagcaagactgtggctta

SEQ ID NO: 65119 - DNA, 25 bp, Artificial
  Probe
tgaaaataaagcaagactgtggctt

SEQ ID NO: 65120 - DNA, 25 bp, Artificial
  Probe
acataatgagtatacttcgcccggc

SEQ ID NO: 65121 - DNA, 25 bp, Artificial
  Probe
tctagagtgttgggattccctcacc

SEQ ID NO: 65122 - DNA, 25 bp, Artificial
  Probe
ctcctccctggagtaactcatggaa

SEQ ID NO: 65123 - DNA, 25 bp, Artificial
  Probe
gcttgaatcttacggttgtagactt

SEQ ID NO: 65124 - DNA, 25 bp, Artificial
  Probe
ttgaatcttacggttgtagactttg

SEQ ID NO: 65125 - DNA, 25 bp, Artificial
  Probe
tgaatcttacggttgtagactttgg

SEQ ID NO: 65126 - DNA, 25 bp, Artificial
  Probe
agcttgaatcttacggttgtagact

SEQ ID NO: 65127 - DNA, 25 bp, Artificial
  Probe
cagcttgaatcttacggttgtagac

SEQ ID NO: 65128 - DNA, 25 bp, Artificial
  Probe
cttgaatcttacggttgtagacttt

SEQ ID NO: 65129 - DNA, 25 bp, Artificial
  Probe
gaatcttacggttgtagactttggc

SEQ ID NO: 65130 - DNA, 25 bp, Artificial
  Probe
tgacaacctcagaagtgtaaagact

SEQ ID NO: 65131 - DNA, 25 bp, Artificial
  Probe
gtgacaacctcagaagtgtaaagac

SEQ ID NO: 65132 - DNA, 25 bp, Artificial
  Probe
gacaacctcagaagtgtaaagactg

SEQ ID NO: 65133 - DNA, 25 bp, Artificial
  Probe
cccagaagtaaagtttggaaagttc

SEQ ID NO: 65134 - DNA, 25 bp, Artificial
  Probe
cagactttagatcctttggaacctg

SEQ ID NO: 65135 - DNA, 25 bp, Artificial
  Probe
gcagcttgaatcttacggttgtaga

SEQ ID NO: 65136 - DNA, 25 bp, Artificial
  Probe
attaatcttagaggattcactggtt

SEQ ID NO: 65137 - DNA, 25 bp, Artificial
  Probe
gggttataatacacgaggtgacaac

SEQ ID NO: 65138 - DNA, 25 bp, Artificial
  Probe
cagaagtgtaaagactgaattgaat

SEQ ID NO: 65139 - DNA, 25 bp, Artificial
  Probe
gcccagaagtaaagtttggaaagtt

SEQ ID NO: 65140 - DNA, 25 bp, Artificial
  Probe
ccagaagtaaagtttggaaagttct

SEQ ID NO: 65141 - DNA, 25 bp, Artificial
  Probe
tgcagcttgaatcttacggttgtag

SEQ ID NO: 65142 - DNA, 25 bp, Artificial
  Probe
taatcttagaggattcactggtttc

SEQ ID NO: 65143 - DNA, 25 bp, Artificial
  Probe
ccagactttagatcctttggaacct

SEQ ID NO: 65144 - DNA, 25 bp, Artificial
  Probe
agaagtaaagtttggaaagttctgt

SEQ ID NO: 65145 - DNA, 25 bp, Artificial
  Probe
gtgcagcttgaatcttacggttgta

SEQ ID NO: 65146 - DNA, 25 bp, Artificial
  Probe
agaagtgtaaagactgaattgaatt

SEQ ID NO: 65147 - DNA, 25 bp, Artificial
  Probe
ggtgacaacctcagaagtgtaaaga

SEQ ID NO: 65148 - DNA, 25 bp, Artificial
  Probe
ttaatcttagaggattcactggttt

SEQ ID NO: 65149 - DNA, 25 bp, Artificial
  Probe
tattaatcttagaggattcactggt

SEQ ID NO: 65150 - DNA, 25 bp, Artificial
  Probe
gactttagatcctttggaacctgct

SEQ ID NO: 65151 - DNA, 25 bp, Artificial
  Probe
agactttagatcctttggaacctgc

SEQ ID NO: 65152 - DNA, 25 bp, Artificial
  Probe
tttagatcctttggaacctgctgtc

SEQ ID NO: 65153 - DNA, 25 bp, Artificial
  Probe
ctttagatcctttggaacctgctgt

SEQ ID NO: 65154 - DNA, 25 bp, Artificial
  Probe
actttagatcctttggaacctgctg

SEQ ID NO: 65155 - DNA, 25 bp, Artificial
  Probe
ggttataatacacgaggtgacaacc

SEQ ID NO: 65156 - DNA, 25 bp, Artificial
  Probe
gttataatacacgaggtgacaacct

SEQ ID NO: 65157 - DNA, 25 bp, Artificial
  Probe
acctcagaagtgtaaagactgaatt

SEQ ID NO: 65158 - DNA, 25 bp, Artificial
  Probe
aacctcagaagtgtaaagactgaat

SEQ ID NO: 65159 - DNA, 25 bp, Artificial
  Probe
cctcagaagtgtaaagactgaattg

SEQ ID NO: 65160 - DNA, 25 bp, Artificial
  Probe
caacctcagaagtgtaaagactgaa

SEQ ID NO: 65161 - DNA, 25 bp, Artificial
  Probe
gccagactttagatcctttggaacc

SEQ ID NO: 65162 - DNA, 25 bp, Artificial
  Probe
ttattaatcttagaggattcactgg

SEQ ID NO: 65163 - DNA, 25 bp, Artificial
  Probe
ctcagaagtgtaaagactgaattga

SEQ ID NO: 65164 - DNA, 25 bp, Artificial
  Probe
acaacctcagaagtgtaaagactga

SEQ ID NO: 65165 - DNA, 25 bp, Artificial
  Probe
cagtgcagcttgaatcttacggttg

SEQ ID NO: 65166 - DNA, 25 bp, Artificial
  Probe
tcagaagtgtaaagactgaattgaa

SEQ ID NO: 65167 - DNA, 25 bp, Artificial
  Probe
aatcttacggttgtagactttggcc

SEQ ID NO: 65168 - DNA, 25 bp, Artificial
  Probe
gcagtattagtagcaaatcaggaga

SEQ ID NO: 65169 - DNA, 25 bp, Artificial
  Probe
agcagtattagtagcaaatcaggag

SEQ ID NO: 65170 - DNA, 25 bp, Artificial
  Probe
aagcagtattagtagcaaatcagga

SEQ ID NO: 65171 - DNA, 25 bp, Artificial
  Probe
tattagtagcaaatcaggagatggg

SEQ ID NO: 65172 - DNA, 25 bp, Artificial
  Probe
aaagcagtattagtagcaaatcagg

SEQ ID NO: 65173 - DNA, 25 bp, Artificial
  Probe
acattggactgctgtagttacactt

SEQ ID NO: 65174 - DNA, 25 bp, Artificial
  Probe
taaacatctggctctggttatcttc

SEQ ID NO: 65175 - DNA, 25 bp, Artificial
  Probe
attagtagcaaatcaggagatggga

SEQ ID NO: 65176 - DNA, 25 bp, Artificial
  Probe
gtaaacatctggctctggttatctt

SEQ ID NO: 65177 - DNA, 25 bp, Artificial
  Probe
aacatctggctctggttatcttcag

SEQ ID NO: 65178 - DNA, 25 bp, Artificial
  Probe
ttagtagcaaatcaggagatgggaa

SEQ ID NO: 65179 - DNA, 25 bp, Artificial
  Probe
gtattagtagcaaatcaggagatgg

SEQ ID NO: 65180 - DNA, 25 bp, Artificial
  Probe
ctggatttaatcttggttgggctta

SEQ ID NO: 65181 - DNA, 25 bp, Artificial
  Probe
agtaaacatctggctctggttatct

SEQ ID NO: 65182 - DNA, 25 bp, Artificial
  Probe
tagtagcaaatcaggagatgggaag

SEQ ID NO: 65183 - DNA, 25 bp, Artificial
  Probe
tacattggactgctgtagttacact

SEQ ID NO: 65184 - DNA, 25 bp, Artificial
  Probe
tggatttaatcttggttgggcttaa

SEQ ID NO: 65185 - DNA, 25 bp, Artificial
  Probe
gtacattggactgctgtagttacac

SEQ ID NO: 65186 - DNA, 25 bp, Artificial
  Probe
gagtaaacatctggctctggttatc

SEQ ID NO: 65187 - DNA, 25 bp, Artificial
  Probe
agtattagtagcaaatcaggagatg

SEQ ID NO: 65188 - DNA, 25 bp, Artificial
  Probe
cagtattagtagcaaatcaggagat

SEQ ID NO: 65189 - DNA, 25 bp, Artificial
  Probe
tgagtaaacatctggctctggttat

SEQ ID NO: 65190 - DNA, 25 bp, Artificial
  Probe
aaacatctggctctggttatcttca

SEQ ID NO: 65191 - DNA, 25 bp, Artificial
  Probe
ttgagtaaacatctggctctggtta

SEQ ID NO: 65192 - DNA, 25 bp, Artificial
  Probe
aactctaagctgtgtcttccagatc

SEQ ID NO: 65193 - DNA, 25 bp, Artificial
  Probe
gaactctaagctgtgtcttccagat

SEQ ID NO: 65194 - DNA, 25 bp, Artificial
  Probe
cattggactgctgtagttacacttt

SEQ ID NO: 65195 - DNA, 25 bp, Artificial
  Probe
attgagtaaacatctggctctggtt

SEQ ID NO: 65196 - DNA, 25 bp, Artificial
  Probe
tctggatttaatcttggttgggctt

SEQ ID NO: 65197 - DNA, 25 bp, Artificial
  Probe
gtagcaaatcaggagatgggaagac

SEQ ID NO: 65198 - DNA, 25 bp, Artificial
  Probe
agtagcaaatcaggagatgggaaga

SEQ ID NO: 65199 - DNA, 25 bp, Artificial
  Probe
ctccgtctggatttaatcttggttg

SEQ ID NO: 65200 - DNA, 25 bp, Artificial
  Probe
caggcacaggttctcagcaataatg

SEQ ID NO: 65201 - DNA, 25 bp, Artificial
  Probe
agaactctaagctgtgtcttccaga

SEQ ID NO: 65202 - DNA, 25 bp, Artificial
  Probe
cagaactctaagctgtgtcttccag

SEQ ID NO: 65203 - DNA, 25 bp, Artificial
  Probe
caataatgcagttgcagaactctaa

SEQ ID NO: 65204 - DNA, 25 bp, Artificial
  Probe
aataatgcagttgcagaactctaag

SEQ ID NO: 65205 - DNA, 25 bp, Artificial
  Probe
gtctggatttaatcttggttgggct

SEQ ID NO: 65206 - DNA, 25 bp, Artificial
  Probe
cattgagtaaacatctggctctggt

SEQ ID NO: 65207 - DNA, 25 bp, Artificial
  Probe
acatctggctctggttatcttcagg

SEQ ID NO: 65208 - DNA, 25 bp, Artificial
  Probe
ccaacaaaagcagtattagtagcaa

SEQ ID NO: 65209 - DNA, 25 bp, Artificial
  Probe
gtccaacaaaagcagtattagtagc

SEQ ID NO: 65210 - DNA, 25 bp, Artificial
  Probe
ggtccaacaaaagcagtattagtag

SEQ ID NO: 65211 - DNA, 25 bp, Artificial
  Probe
tccaacaaaagcagtattagtagca

SEQ ID NO: 65212 - DNA, 25 bp, Artificial
  Probe
ggatttaatcttggttgggcttaaa

SEQ ID NO: 65213 - DNA, 25 bp, Artificial
  Probe
cacttaccatattctgccttgtatt

SEQ ID NO: 65214 - DNA, 25 bp, Artificial
  Probe
gtcaatccagaagagttgtcagtat

SEQ ID NO: 65215 - DNA, 25 bp, Artificial
  Probe
tcaatccagaagagttgtcagtatt

SEQ ID NO: 65216 - DNA, 25 bp, Artificial
  Probe
accatattctgccttgtattatagc

SEQ ID NO: 65217 - DNA, 25 bp, Artificial
  Probe
cacttgtcctatgtctgttcgtaga

SEQ ID NO: 65218 - DNA, 25 bp, Artificial
  Probe
ggtcaatccagaagagttgtcagta

SEQ ID NO: 65219 - DNA, 25 bp, Artificial
  Probe
acttaccatattctgccttgtatta

SEQ ID NO: 65220 - DNA, 25 bp, Artificial
  Probe
ttctcacggcacttaccatattctg

SEQ ID NO: 65221 - DNA, 25 bp, Artificial
  Probe
aatccagaagagttgtcagtattgg

SEQ ID NO: 65222 - DNA, 25 bp, Artificial
  Probe
tctttatcctgacattacacccaat

SEQ ID NO: 65223 - DNA, 25 bp, Artificial
  Probe
ctttatcctgacattacacccaatc

SEQ ID NO: 65224 - DNA, 25 bp, Artificial
  Probe
ccatattctgccttgtattatagct

SEQ ID NO: 65225 - DNA, 25 bp, Artificial
  Probe
agcactttatttctccctttctcac

SEQ ID NO: 65226 - DNA, 25 bp, Artificial
  Probe
cagcactttatttctccctttctca

SEQ ID NO: 65227 - DNA, 25 bp, Artificial
  Probe
acagcactttatttctccctttctc

SEQ ID NO: 65228 - DNA, 25 bp, Artificial
  Probe
caatccagaagagttgtcagtattg

SEQ ID NO: 65229 - DNA, 25 bp, Artificial
  Probe
cacagcactttatttctccctttct

SEQ ID NO: 65230 - DNA, 25 bp, Artificial
  Probe
caatggtcaatccagaagagttgtc

SEQ ID NO: 65231 - DNA, 25 bp, Artificial
  Probe
tttatcctgacattacacccaatca

SEQ ID NO: 65232 - DNA, 25 bp, Artificial
  Probe
gcacttgtcctatgtctgttcgtag

SEQ ID NO: 65233 - DNA, 25 bp, Artificial
  Probe
cactttatttctccctttctcacgg

SEQ ID NO: 65234 - DNA, 25 bp, Artificial
  Probe
ctttctcacggcacttaccatattc

SEQ ID NO: 65235 - DNA, 25 bp, Artificial
  Probe
tatgtaactccagctcttcgtgaac

SEQ ID NO: 65236 - DNA, 25 bp, Artificial
  Probe
gtatgtaactccagctcttcgtgaa

SEQ ID NO: 65237 - DNA, 25 bp, Artificial
  Probe
catgctcaatggtatgtaactccag

SEQ ID NO: 65238 - DNA, 25 bp, Artificial
  Probe
aatggtcaatccagaagagttgtca

SEQ ID NO: 65239 - DNA, 25 bp, Artificial
  Probe
ccacagcactttatttctccctttc

SEQ ID NO: 65240 - DNA, 25 bp, Artificial
  Probe
tttctcacggcacttaccatattct

SEQ ID NO: 65241 - DNA, 25 bp, Artificial
  Probe
gcactttatttctccctttctcacg

SEQ ID NO: 65242 - DNA, 25 bp, Artificial
  Probe
gtctttatcctgacattacacccaa

SEQ ID NO: 65243 - DNA, 25 bp, Artificial
  Probe
cttaccatattctgccttgtattat

SEQ ID NO: 65244 - DNA, 25 bp, Artificial
  Probe
caatggtatgtaactccagctcttc

SEQ ID NO: 65245 - DNA, 25 bp, Artificial
  Probe
atggtcaatccagaagagttgtcag

SEQ ID NO: 65246 - DNA, 25 bp, Artificial
  Probe
tcaatggtatgtaactccagctctt

SEQ ID NO: 65247 - DNA, 25 bp, Artificial
  Probe
gcacttaccatattctgccttgtat

SEQ ID NO: 65248 - DNA, 25 bp, Artificial
  Probe
ctgccttgtattatagctacttgtg

SEQ ID NO: 65249 - DNA, 25 bp, Artificial
  Probe
tctgccttgtattatagctacttgt

SEQ ID NO: 65250 - DNA, 25 bp, Artificial
  Probe
gccttgtattatagctacttgtgca

SEQ ID NO: 65251 - DNA, 25 bp, Artificial
  Probe
tgccttgtattatagctacttgtgc

SEQ ID NO: 65252 - DNA, 25 bp, Artificial
  Probe
accacagcactttatttctcccttt

SEQ ID NO: 65253 - DNA, 25 bp, Artificial
  Probe
ctcaatggtatgtaactccagctct

SEQ ID NO: 65254 - DNA, 25 bp, Artificial
  Probe
ttctgccttgtattatagctacttg

SEQ ID NO: 65255 - DNA, 25 bp, Artificial
  Probe
cctttctcacggcacttaccatatt

SEQ ID NO: 65256 - DNA, 25 bp, Artificial
  Probe
ctttatttctccctttctcacggca

SEQ ID NO: 65257 - DNA, 25 bp, Artificial
  Probe
actttatttctccctttctcacggc

SEQ ID NO: 65258 - DNA, 25 bp, Artificial
  Probe
atgaagaggactgatgttcttgttc

SEQ ID NO: 65259 - DNA, 25 bp, Artificial
  Probe
gatgaagaggactgatgttcttgtt

SEQ ID NO: 65260 - DNA, 25 bp, Artificial
  Probe
gaggaggatgaagaggactgatgtt

SEQ ID NO: 65261 - DNA, 25 bp, Artificial
  Probe
aggaggatgaagaggactgatgttc

SEQ ID NO: 65262 - DNA, 25 bp, Artificial
  Probe
ggaggatgaagaggactgatgttct

SEQ ID NO: 65263 - DNA, 25 bp, Artificial
  Probe
ctgaggaggatgaagaggactgatg

SEQ ID NO: 65264 - DNA, 25 bp, Artificial
  Probe
gaggatgaagaggactgatgttctt

SEQ ID NO: 65265 - DNA, 25 bp, Artificial
  Probe
aggatgaagaggactgatgttcttg

SEQ ID NO: 65266 - DNA, 25 bp, Artificial
  Probe
atgttcttgttcccaggactgattt

SEQ ID NO: 65267 - DNA, 25 bp, Artificial
  Probe
ggatgaagaggactgatgttcttgt

SEQ ID NO: 65268 - DNA, 25 bp, Artificial
  Probe
tgaagaggactgatgttcttgttcc

SEQ ID NO: 65269 - DNA, 25 bp, Artificial
  Probe
gatgttcttgttcccaggactgatt

SEQ ID NO: 65270 - DNA, 25 bp, Artificial
  Probe
tgaggaggatgaagaggactgatgt

SEQ ID NO: 65271 - DNA, 25 bp, Artificial
  Probe
gggtgctatcctcagaataaaattg

SEQ ID NO: 65272 - DNA, 25 bp, Artificial
  Probe
ggggtgctatcctcagaataaaatt

SEQ ID NO: 65273 - DNA, 25 bp, Artificial
  Probe
ggtgctatcctcagaataaaattgt

SEQ ID NO: 65274 - DNA, 25 bp, Artificial
  Probe
tggggtgctatcctcagaataaaat

SEQ ID NO: 65275 - DNA, 25 bp, Artificial
  Probe
atggggtgctatcctcagaataaaa

SEQ ID NO: 65276 - DNA, 25 bp, Artificial
  Probe
aatggggtgctatcctcagaataaa

SEQ ID NO: 65277 - DNA, 25 bp, Artificial
  Probe
aaatggggtgctatcctcagaataa

SEQ ID NO: 65278 - DNA, 25 bp, Artificial
  Probe
aaaatggggtgctatcctcagaata

SEQ ID NO: 65279 - DNA, 25 bp, Artificial
  Probe
acccacatcctcaacctctactttc

SEQ ID NO: 65280 - DNA, 25 bp, Artificial
  Probe
tgatgttcttgttcccaggactgat

SEQ ID NO: 65281 - DNA, 25 bp, Artificial
  Probe
cacccacatcctcaacctctacttt

SEQ ID NO: 65282 - DNA, 25 bp, Artificial
  Probe
gctgaggaggatgaagaggactgat

SEQ ID NO: 65283 - DNA, 25 bp, Artificial
  Probe
gtgctatcctcagaataaaattgtt

SEQ ID NO: 65284 - DNA, 25 bp, Artificial
  Probe
ccacatcctcaacctctactttccc

SEQ ID NO: 65285 - DNA, 25 bp, Artificial
  Probe
cccacatcctcaacctctactttcc

SEQ ID NO: 65286 - DNA, 25 bp, Artificial
  Probe
tgttcttgttcccaggactgatttt

SEQ ID NO: 65287 - DNA, 25 bp, Artificial
  Probe
gaagaggactgatgttcttgttccc

SEQ ID NO: 65288 - DNA, 25 bp, Artificial
  Probe
tgctatcctcagaataaaattgttt

SEQ ID NO: 65289 - DNA, 25 bp, Artificial
  Probe
agaggactgatgttcttgttcccag

SEQ ID NO: 65290 - DNA, 25 bp, Artificial
  Probe
ctgatgttcttgttcccaggactga

SEQ ID NO: 65291 - DNA, 25 bp, Artificial
  Probe
gactgatgttcttgttcccaggact

SEQ ID NO: 65292 - DNA, 25 bp, Artificial
  Probe
aagaggactgatgttcttgttccca

SEQ ID NO: 65293 - DNA, 25 bp, Artificial
  Probe
actgatgttcttgttcccaggactg

SEQ ID NO: 65294 - DNA, 25 bp, Artificial
  Probe
tcctcagaataaaattgtttacact

SEQ ID NO: 65295 - DNA, 25 bp, Artificial
  Probe
gaggactgatgttcttgttcccagg

SEQ ID NO: 65296 - DNA, 25 bp, Artificial
  Probe
cacatcctcaacctctactttcccc

SEQ ID NO: 65297 - DNA, 25 bp, Artificial
  Probe
ggactgatgttcttgttcccaggac

SEQ ID NO: 65298 - DNA, 25 bp, Artificial
  Probe
atcctcagaataaaattgtttacac

SEQ ID NO: 65299 - DNA, 25 bp, Artificial
  Probe
aggactgatgttcttgttcccagga

SEQ ID NO: 65300 - DNA, 25 bp, Artificial
  Probe
gctatcctcagaataaaattgttta

SEQ ID NO: 65301 - DNA, 25 bp, Artificial
  Probe
cctcagaataaaattgtttacacta

SEQ ID NO: 65302 - DNA, 25 bp, Artificial
  Probe
cttgctcagtggcattgtttccatc

SEQ ID NO: 65303 - DNA, 25 bp, Artificial
  Probe
ttcaccaagacaagtatatcaagtt

SEQ ID NO: 65304 - DNA, 25 bp, Artificial
  Probe
attcaccaagacaagtatatcaagt

SEQ ID NO: 65305 - DNA, 25 bp, Artificial
  Probe
tcaccaagacaagtatatcaagtta

SEQ ID NO: 65306 - DNA, 25 bp, Artificial
  Probe
aattcaccaagacaagtatatcaag

SEQ ID NO: 65307 - DNA, 25 bp, Artificial
  Probe
ataaagtcactgccaagaagatcaa

SEQ ID NO: 65308 - DNA, 25 bp, Artificial
  Probe
caccaagacaagtatatcaagttaa

SEQ ID NO: 65309 - DNA, 25 bp, Artificial
  Probe
taaagtcactgccaagaagatcaaa

SEQ ID NO: 65310 - DNA, 25 bp, Artificial
  Probe
ctgtatcatgcccaactacctaata

SEQ ID NO: 65311 - DNA, 25 bp, Artificial
  Probe
cataaagtcactgccaagaagatca

SEQ ID NO: 65312 - DNA, 25 bp, Artificial
  Probe
tgcccaactacctaataaagataag

SEQ ID NO: 65313 - DNA, 25 bp, Artificial
  Probe
tcatgcccaactacctaataaagat

SEQ ID NO: 65314 - DNA, 25 bp, Artificial
  Probe
atcatgcccaactacctaataaaga

SEQ ID NO: 65315 - DNA, 25 bp, Artificial
  Probe
tgtatcatgcccaactacctaataa

SEQ ID NO: 65316 - DNA, 25 bp, Artificial
  Probe
ggagaagaattcaccaagacaagta

SEQ ID NO: 65317 - DNA, 25 bp, Artificial
  Probe
gcccaactacctaataaagataagt

SEQ ID NO: 65318 - DNA, 25 bp, Artificial
  Probe
gagaagaattcaccaagacaagtat

SEQ ID NO: 65319 - DNA, 25 bp, Artificial
  Probe
gtatcatgcccaactacctaataaa

SEQ ID NO: 65320 - DNA, 25 bp, Artificial
  Probe
atgcccaactacctaataaagataa

SEQ ID NO: 65321 - DNA, 25 bp, Artificial
  Probe
catgcccaactacctaataaagata

SEQ ID NO: 65322 - DNA, 25 bp, Artificial
  Probe
tatcatgcccaactacctaataaag

SEQ ID NO: 65323 - DNA, 25 bp, Artificial
  Probe
cctgtatcatgcccaactacctaat

SEQ ID NO: 65324 - DNA, 25 bp, Artificial
  Probe
tttaactcaagttctctttcaagct

SEQ ID NO: 65325 - DNA, 25 bp, Artificial
  Probe
agaattcaccaagacaagtatatca

SEQ ID NO: 65326 - DNA, 25 bp, Artificial
  Probe
aagttaaacagtatacactcccacc

SEQ ID NO: 65327 - DNA, 25 bp, Artificial
  Probe
agaagaattcaccaagacaagtata

SEQ ID NO: 65328 - DNA, 25 bp, Artificial
  Probe
gttaaacagtatacactcccaccat

SEQ ID NO: 65329 - DNA, 25 bp, Artificial
  Probe
aaacagtatacactcccaccatatt

SEQ ID NO: 65330 - DNA, 25 bp, Artificial
  Probe
caagttaaacagtatacactcccac

SEQ ID NO: 65331 - DNA, 25 bp, Artificial
  Probe
tcaagttaaacagtatacactccca

SEQ ID NO: 65332 - DNA, 25 bp, Artificial
  Probe
acctaataaagataagttcaatccg

SEQ ID NO: 65333 - DNA, 25 bp, Artificial
  Probe
ttcaacctgtatcatgcccaactac

SEQ ID NO: 65334 - DNA, 25 bp, Artificial
  Probe
ttaaacagtatacactcccaccata

SEQ ID NO: 65335 - DNA, 25 bp, Artificial
  Probe
agttaaacagtatacactcccacca

SEQ ID NO: 65336 - DNA, 25 bp, Artificial
  Probe
acctgtatcatgcccaactacctaa

SEQ ID NO: 65337 - DNA, 25 bp, Artificial
  Probe
aacctgtatcatgcccaactaccta

SEQ ID NO: 65338 - DNA, 25 bp, Artificial
  Probe
acagtatacactcccaccatattaa

SEQ ID NO: 65339 - DNA, 25 bp, Artificial
  Probe
aacagtatacactcccaccatatta

SEQ ID NO: 65340 - DNA, 25 bp, Artificial
  Probe
taaacagtatacactcccaccatat

SEQ ID NO: 65341 - DNA, 25 bp, Artificial
  Probe
gaattcaccaagacaagtatatcaa

SEQ ID NO: 65342 - DNA, 25 bp, Artificial
  Probe
cggagaagaattcaccaagacaagt

SEQ ID NO: 65343 - DNA, 25 bp, Artificial
  Probe
atcaagttaaacagtatacactccc

SEQ ID NO: 65344 - DNA, 25 bp, Artificial
  Probe
aagaattcaccaagacaagtatatc

SEQ ID NO: 65345 - DNA, 25 bp, Artificial
  Probe
ctccacatcagcagatacaaacgac

SEQ ID NO: 65346 - DNA, 25 bp, Artificial
  Probe
gaagaattcaccaagacaagtatat

SEQ ID NO: 65347 - DNA, 25 bp, Artificial
  Probe
aaagtcactgccaagaagatcaaaa

SEQ ID NO: 65348 - DNA, 25 bp, Artificial
  Probe
tactgtatgtgatgaactgtgttgg

SEQ ID NO: 65349 - DNA, 25 bp, Artificial
  Probe
accagtgaggaatataagtacagag

SEQ ID NO: 65350 - DNA, 25 bp, Artificial
  Probe
gtactgtatgtgatgaactgtgttg

SEQ ID NO: 65351 - DNA, 25 bp, Artificial
  Probe
tgtggtgacaatagtgtgtgtatat

SEQ ID NO: 65352 - DNA, 25 bp, Artificial
  Probe
gtgtggtgacaatagtgtgtgtata

SEQ ID NO: 65353 - DNA, 25 bp, Artificial
  Probe
ccagtgaggaatataagtacagaga

SEQ ID NO: 65354 - DNA, 25 bp, Artificial
  Probe
aaccagtgaggaatataagtacaga

SEQ ID NO: 65355 - DNA, 25 bp, Artificial
  Probe
cgtactgtatgtgatgaactgtgtt

SEQ ID NO: 65356 - DNA, 25 bp, Artificial
  Probe
gtcgtactgtatgtgatgaactgtg

SEQ ID NO: 65357 - DNA, 25 bp, Artificial
  Probe
gtgtcgtactgtatgtgatgaactg

SEQ ID NO: 65358 - DNA, 25 bp, Artificial
  Probe
tcgtactgtatgtgatgaactgtgt

SEQ ID NO: 65359 - DNA, 25 bp, Artificial
  Probe
tgtcgtactgtatgtgatgaactgt

SEQ ID NO: 65360 - DNA, 25 bp, Artificial
  Probe
aattccgttctcatactccacatcc

SEQ ID NO: 65361 - DNA, 25 bp, Artificial
  Probe
actgtatgtgatgaactgtgttggt

SEQ ID NO: 65362 - DNA, 25 bp, Artificial
  Probe
agtgtcgtactgtatgtgatgaact

SEQ ID NO: 65363 - DNA, 25 bp, Artificial
  Probe
agtgtggtgacaatagtgtgtgtat

SEQ ID NO: 65364 - DNA, 25 bp, Artificial
  Probe
cagtgaggaatataagtacagagag

SEQ ID NO: 65365 - DNA, 25 bp, Artificial
  Probe
agtgaggaatataagtacagagaga

SEQ ID NO: 65366 - DNA, 25 bp, Artificial
  Probe
agtaagaaagggagagagattgcta

SEQ ID NO: 65367 - DNA, 25 bp, Artificial
  Probe
gtaagaaagggagagagattgctac

SEQ ID NO: 65368 - DNA, 25 bp, Artificial
  Probe
gtggtgacaatagtgtgtgtatata

SEQ ID NO: 65369 - DNA, 25 bp, Artificial
  Probe
aatagcagcatcccaagaacaatat

SEQ ID NO: 65370 - DNA, 25 bp, Artificial
  Probe
aaatagcagcatcccaagaacaata

SEQ ID NO: 65371 - DNA, 25 bp, Artificial
  Probe
taagaaagggagagagattgctaca

SEQ ID NO: 65372 - DNA, 25 bp, Artificial
  Probe
atagcagcatcccaagaacaatatc

SEQ ID NO: 65373 - DNA, 25 bp, Artificial
  Probe
ttctcatactccacatcccatcttt

SEQ ID NO: 65374 - DNA, 25 bp, Artificial
  Probe
gagtaagaaagggagagagattgct

SEQ ID NO: 65375 - DNA, 25 bp, Artificial
  Probe
cagtgtggtgacaatagtgtgtgta

SEQ ID NO: 65376 - DNA, 25 bp, Artificial
  Probe
gaaatagcagcatcccaagaacaat

SEQ ID NO: 65377 - DNA, 25 bp, Artificial
  Probe
gttctcatactccacatcccatctt

SEQ ID NO: 65378 - DNA, 25 bp, Artificial
  Probe
aagaaagggagagagattgctacag

SEQ ID NO: 65379 - DNA, 25 bp, Artificial
  Probe
gggagtaagaaagggagagagattg

SEQ ID NO: 65380 - DNA, 25 bp, Artificial
  Probe
cgtccttcaagaataatccatgttt

SEQ ID NO: 65381 - DNA, 25 bp, Artificial
  Probe
gtgaggaatataagtacagagagat

SEQ ID NO: 65382 - DNA, 25 bp, Artificial
  Probe
tagcagcatcccaagaacaatatct

SEQ ID NO: 65383 - DNA, 25 bp, Artificial
  Probe
cagcatcccaagaacaatatctgta

SEQ ID NO: 65384 - DNA, 25 bp, Artificial
  Probe
tggtgacaatagtgtgtgtatatat

SEQ ID NO: 65385 - DNA, 25 bp, Artificial
  Probe
agcatcccaagaacaatatctgtac

SEQ ID NO: 65386 - DNA, 25 bp, Artificial
  Probe
gaaagggagagagattgctacagtc

SEQ ID NO: 65387 - DNA, 25 bp, Artificial
  Probe
ggagtaagaaagggagagagattgc

SEQ ID NO: 65388 - DNA, 25 bp, Artificial
  Probe
gaattccgttctcatactccacatc

SEQ ID NO: 65389 - DNA, 25 bp, Artificial
  Probe
aaaccagtgaggaatataagtacag

SEQ ID NO: 65390 - DNA, 25 bp, Artificial
  Probe
agaaatagcagcatcccaagaacaa

SEQ ID NO: 65391 - DNA, 25 bp, Artificial
  Probe
agaaagggagagagattgctacagt

SEQ ID NO: 65392 - DNA, 25 bp, Artificial
  Probe
atgtttatttgtggtggcaagtgac

SEQ ID NO: 65393 - DNA, 25 bp, Artificial
  Probe
ctaatgtcagttgtagatgtcacct

SEQ ID NO: 65394 - DNA, 25 bp, Artificial
  Probe
taatgtcagttgtagatgtcacctt

SEQ ID NO: 65395 - DNA, 25 bp, Artificial
  Probe
aatgtcagttgtagatgtcaccttc

SEQ ID NO: 65396 - DNA, 25 bp, Artificial
  Probe
actaatgtcagttgtagatgtcacc

SEQ ID NO: 65397 - DNA, 25 bp, Artificial
  Probe
atgtcagttgtagatgtcaccttca

SEQ ID NO: 65398 - DNA, 25 bp, Artificial
  Probe
aagtatcttccttccttggtagcag

SEQ ID NO: 65399 - DNA, 25 bp, Artificial
  Probe
tgtcagttgtagatgtcaccttcaa

SEQ ID NO: 65400 - DNA, 25 bp, Artificial
  Probe
aactatattgtgaacagacacttct

SEQ ID NO: 65401 - DNA, 25 bp, Artificial
  Probe
ctgtctggcaaactatattgtgaac

SEQ ID NO: 65402 - DNA, 25 bp, Artificial
  Probe
gcttactgtctggcaaactatattg

SEQ ID NO: 65403 - DNA, 25 bp, Artificial
  Probe
tactgtctggcaaactatattgtga

SEQ ID NO: 65404 - DNA, 25 bp, Artificial
  Probe
actgtctggcaaactatattgtgaa

SEQ ID NO: 65405 - DNA, 25 bp, Artificial
  Probe
ttactgtctggcaaactatattgtg

SEQ ID NO: 65406 - DNA, 25 bp, Artificial
  Probe
cttactgtctggcaaactatattgt

SEQ ID NO: 65407 - DNA, 25 bp, Artificial
  Probe
agaataaacaacttgctgtgtgaaa

SEQ ID NO: 65408 - DNA, 25 bp, Artificial
  Probe
aagaataaacaacttgctgtgtgaa

SEQ ID NO: 65409 - DNA, 25 bp, Artificial
  Probe
aaagaataaacaacttgctgtgtga

SEQ ID NO: 65410 - DNA, 25 bp, Artificial
  Probe
tggcaaactatattgtgaacagaca

SEQ ID NO: 65411 - DNA, 25 bp, Artificial
  Probe
tgtctggcaaactatattgtgaaca

SEQ ID NO: 65412 - DNA, 25 bp, Artificial
  Probe
ctggcaaactatattgtgaacagac

SEQ ID NO: 65413 - DNA, 25 bp, Artificial
  Probe
gtctggcaaactatattgtgaacag

SEQ ID NO: 65414 - DNA, 25 bp, Artificial
  Probe
gcaaactatattgtgaacagacact

SEQ ID NO: 65415 - DNA, 25 bp, Artificial
  Probe
ggcaaactatattgtgaacagacac

SEQ ID NO: 65416 - DNA, 25 bp, Artificial
  Probe
agcttactgtctggcaaactatatt

SEQ ID NO: 65417 - DNA, 25 bp, Artificial
  Probe
ccattcttgaagtatcttccttcct

SEQ ID NO: 65418 - DNA, 25 bp, Artificial
  Probe
aactaatgtcagttgtagatgtcac

SEQ ID NO: 65419 - DNA, 25 bp, Artificial
  Probe
ttgaagtatcttccttccttggtag

SEQ ID NO: 65420 - DNA, 25 bp, Artificial
  Probe
cttgaagtatcttccttccttggta

SEQ ID NO: 65421 - DNA, 25 bp, Artificial
  Probe
ttcttgaagtatcttccttccttgg

SEQ ID NO: 65422 - DNA, 25 bp, Artificial
  Probe
tatcttccttccttggtagcagcag

SEQ ID NO: 65423 - DNA, 25 bp, Artificial
  Probe
agtatcttccttccttggtagcagc

SEQ ID NO: 65424 - DNA, 25 bp, Artificial
  Probe
gaaatacgaagagatatacccgccc

SEQ ID NO: 65425 - DNA, 25 bp, Artificial
  Probe
tcttgaagtatcttccttccttggt

SEQ ID NO: 65426 - DNA, 25 bp, Artificial
  Probe
atgagtttgtctacatcaccaacga

SEQ ID NO: 65427 - DNA, 25 bp, Artificial
  Probe
aaccagttcctccttcagtacttaa

SEQ ID NO: 65428 - DNA, 25 bp, Artificial
  Probe
gtatcttccttccttggtagcagca

SEQ ID NO: 65429 - DNA, 25 bp, Artificial
  Probe
attcttgaagtatcttccttccttg

SEQ ID NO: 65430 - DNA, 25 bp, Artificial
  Probe
cattcttgaagtatcttccttcctt

SEQ ID NO: 65431 - DNA, 25 bp, Artificial
  Probe
gaagctgacccattcttgaagtatc

SEQ ID NO: 65432 - DNA, 25 bp, Artificial
  Probe
cgaaatacgaagagatatacccgcc

SEQ ID NO: 65433 - DNA, 25 bp, Artificial
  Probe
accagttcctccttcagtacttaag

SEQ ID NO: 65434 - DNA, 25 bp, Artificial
  Probe
gaagtatcttccttccttggtagca

SEQ ID NO: 65435 - DNA, 25 bp, Artificial
  Probe
tgaagtatcttccttccttggtagc

SEQ ID NO: 65436 - DNA, 25 bp, Artificial
  Probe
agctgacccattcttgaagtatctt

SEQ ID NO: 65437 - DNA, 25 bp, Artificial
  Probe
aagctgacccattcttgaagtatct

SEQ ID NO: 65438 - DNA, 25 bp, Artificial
  Probe
aattggtgatggaaggttacaagtg

SEQ ID NO: 65439 - DNA, 25 bp, Artificial
  Probe
ggttctatgatgagtgcttacggaa

SEQ ID NO: 65440 - DNA, 25 bp, Artificial
  Probe
tatgggttctatgatgagtgcttac

SEQ ID NO: 65441 - DNA, 25 bp, Artificial
  Probe
ctatgggttctatgatgagtgctta

SEQ ID NO: 65442 - DNA, 25 bp, Artificial
  Probe
tctatgatgagtgcttacggaaata

SEQ ID NO: 65443 - DNA, 25 bp, Artificial
  Probe
ttctatgatgagtgcttacggaaat

SEQ ID NO: 65444 - DNA, 25 bp, Artificial
  Probe
tctatgggttctatgatgagtgctt

SEQ ID NO: 65445 - DNA, 25 bp, Artificial
  Probe
atgatgagtgcttacggaaatatgg

SEQ ID NO: 65446 - DNA, 25 bp, Artificial
  Probe
aggtctatgggttctatgatgagtg

SEQ ID NO: 65447 - DNA, 25 bp, Artificial
  Probe
caggtctatgggttctatgatgagt

SEQ ID NO: 65448 - DNA, 25 bp, Artificial
  Probe
cttacggaaatatggttcagtgact

SEQ ID NO: 65449 - DNA, 25 bp, Artificial
  Probe
gatgagtgcttacggaaatatggtt

SEQ ID NO: 65450 - DNA, 25 bp, Artificial
  Probe
tatgatgagtgcttacggaaatatg

SEQ ID NO: 65451 - DNA, 25 bp, Artificial
  Probe
gttctatgatgagtgcttacggaaa

SEQ ID NO: 65452 - DNA, 25 bp, Artificial
  Probe
ctatgatgagtgcttacggaaatat

SEQ ID NO: 65453 - DNA, 25 bp, Artificial
  Probe
attggtgatggaaggttacaagtgg

SEQ ID NO: 65454 - DNA, 25 bp, Artificial
  Probe
atgagtgcttacggaaatatggttc

SEQ ID NO: 65455 - DNA, 25 bp, Artificial
  Probe
cagccaacgacattgatatgatctg

SEQ ID NO: 65456 - DNA, 25 bp, Artificial
  Probe
gtctatgggttctatgatgagtgct

SEQ ID NO: 65457 - DNA, 25 bp, Artificial
  Probe
aattctatgacctcaaggagctgtt

SEQ ID NO: 65458 - DNA, 25 bp, Artificial
  Probe
gagtgcttacggaaatatggttcag

SEQ ID NO: 65459 - DNA, 25 bp, Artificial
  Probe
tgatgagtgcttacggaaatatggt

SEQ ID NO: 65460 - DNA, 25 bp, Artificial
  Probe
attctatgacctcaaggagctgttc

SEQ ID NO: 65461 - DNA, 25 bp, Artificial
  Probe
gcttacggaaatatggttcagtgac

SEQ ID NO: 65462 - DNA, 25 bp, Artificial
  Probe
caattctatgacctcaaggagctgt

SEQ ID NO: 65463 - DNA, 25 bp, Artificial
  Probe
gtgcttacggaaatatggttcagtg

SEQ ID NO: 65464 - DNA, 25 bp, Artificial
  Probe
agtgcttacggaaatatggttcagt

SEQ ID NO: 65465 - DNA, 25 bp, Artificial
  Probe
atgggttctatgatgagtgcttacg

SEQ ID NO: 65466 - DNA, 25 bp, Artificial
  Probe
tgcttacggaaatatggttcagtga

SEQ ID NO: 65467 - DNA, 25 bp, Artificial
  Probe
ggtctatgggttctatgatgagtgc

SEQ ID NO: 65468 - DNA, 25 bp, Artificial
  Probe
cttcaatgagacggtgcttactgtg

SEQ ID NO: 65469 - DNA, 25 bp, Artificial
  Probe
tgagtgcttacggaaatatggttca

SEQ ID NO: 65470 - DNA, 25 bp, Artificial
  Probe
gaaatatggttcagtgactgtatgg

SEQ ID NO: 65471 - DNA, 25 bp, Artificial
  Probe
ggaaatatggttcagtgactgtatg

SEQ ID NO: 65472 - DNA, 25 bp, Artificial
  Probe
cggaaatatggttcagtgactgtat

SEQ ID NO: 65473 - DNA, 25 bp, Artificial
  Probe
agccaacgacattgatatgatctgc

SEQ ID NO: 65474 - DNA, 25 bp, Artificial
  Probe
gcagccaacgacattgatatgatct

SEQ ID NO: 65475 - DNA, 25 bp, Artificial
  Probe
aatatggttcagtgactgtatggcg

SEQ ID NO: 65476 - DNA, 25 bp, Artificial
  Probe
ttacggaaatatggttcagtgactg

SEQ ID NO: 65477 - DNA, 25 bp, Artificial
  Probe
caattggtgatggaaggttacaagt

SEQ ID NO: 65478 - DNA, 25 bp, Artificial
  Probe
aaatatggttcagtgactgtatggc

SEQ ID NO: 65479 - DNA, 25 bp, Artificial
  Probe
aactacctcttcatgggagactttg

SEQ ID NO: 65480 - DNA, 25 bp, Artificial
  Probe
caactacctcttcatgggagacttt

SEQ ID NO: 65481 - DNA, 25 bp, Artificial
  Probe
acttcaatgagacggtgcttactgt

SEQ ID NO: 65482 - DNA, 25 bp, Artificial
  Probe
ccaggtctatgggttctatgatgag

SEQ ID NO: 65483 - DNA, 25 bp, Artificial
  Probe
tccagagtgacttctataagaccaa

SEQ ID NO: 65484 - DNA, 25 bp, Artificial
  Probe
ctccagagtgacttctataagacca

SEQ ID NO: 65485 - DNA, 25 bp, Artificial
  Probe
actccagagtgacttctataagacc

SEQ ID NO: 65486 - DNA, 25 bp, Artificial
  Probe
ccattactccagagtgacttctata

SEQ ID NO: 65487 - DNA, 25 bp, Artificial
  Probe
tactccagagtgacttctataagac

SEQ ID NO: 65488 - DNA, 25 bp, Artificial
  Probe
gccattactccagagtgacttctat

SEQ ID NO: 65489 - DNA, 25 bp, Artificial
  Probe
agagtgacttctataagaccaaacc

SEQ ID NO: 65490 - DNA, 25 bp, Artificial
  Probe
ccagagtgacttctataagaccaaa

SEQ ID NO: 65491 - DNA, 25 bp, Artificial
  Probe
ttactccagagtgacttctataaga

SEQ ID NO: 65492 - DNA, 25 bp, Artificial
  Probe
gagtgacttctataagaccaaaccg

SEQ ID NO: 65493 - DNA, 25 bp, Artificial
  Probe
cagagtgacttctataagaccaaac

SEQ ID NO: 65494 - DNA, 25 bp, Artificial
  Probe
gagaagactcacagagaaagaagtt

SEQ ID NO: 65495 - DNA, 25 bp, Artificial
  Probe
aagactcacagagaaagaagttagt

SEQ ID NO: 65496 - DNA, 25 bp, Artificial
  Probe
agaagactcacagagaaagaagtta

SEQ ID NO: 65497 - DNA, 25 bp, Artificial
  Probe
gaagactcacagagaaagaagttag

SEQ ID NO: 65498 - DNA, 25 bp, Artificial
  Probe
cattactccagagtgacttctataa

SEQ ID NO: 65499 - DNA, 25 bp, Artificial
  Probe
aggagaagactcacagagaaagaag

SEQ ID NO: 65500 - DNA, 25 bp, Artificial
  Probe
tgccattactccagagtgacttcta

SEQ ID NO: 65501 - DNA, 25 bp, Artificial
  Probe
agactcacagagaaagaagttagtg

SEQ ID NO: 65502 - DNA, 25 bp, Artificial
  Probe
ggagaagactcacagagaaagaagt

SEQ ID NO: 65503 - DNA, 25 bp, Artificial
  Probe
caggagaagactcacagagaaagaa

SEQ ID NO: 65504 - DNA, 25 bp, Artificial
  Probe
ttcaggagaagactcacagagaaag

SEQ ID NO: 65505 - DNA, 25 bp, Artificial
  Probe
attactccagagtgacttctataag

SEQ ID NO: 65506 - DNA, 25 bp, Artificial
  Probe
gttcaggagaagactcacagagaaa

SEQ ID NO: 65507 - DNA, 25 bp, Artificial
  Probe
tgacttctataagaccaaaccgctc

SEQ ID NO: 65508 - DNA, 25 bp, Artificial
  Probe
ggttcaggagaagactcacagagaa

SEQ ID NO: 65509 - DNA, 25 bp, Artificial
  Probe
gtgacttctataagaccaaaccgct

SEQ ID NO: 65510 - DNA, 25 bp, Artificial
  Probe
agtgacttctataagaccaaaccgc

SEQ ID NO: 65511 - DNA, 25 bp, Artificial
  Probe
tcaggagaagactcacagagaaaga

SEQ ID NO: 65512 - DNA, 25 bp, Artificial
  Probe
gacttctataagaccaaaccgctcc

SEQ ID NO: 65513 - DNA, 25 bp, Artificial
  Probe
caggttcaggagaagactcacagag

SEQ ID NO: 65514 - DNA, 25 bp, Artificial
  Probe
acttctataagaccaaaccgctcct

SEQ ID NO: 65515 - DNA, 25 bp, Artificial
  Probe
aggttcaggagaagactcacagaga

SEQ ID NO: 65516 - DNA, 25 bp, Artificial
  Probe
ctgccattactccagagtgacttct

SEQ ID NO: 65517 - DNA, 25 bp, Artificial
  Probe
tggacggaaataaactttctactat

SEQ ID NO: 65518 - DNA, 25 bp, Artificial
  Probe
atggacggaaataaactttctacta

SEQ ID NO: 65519 - DNA, 25 bp, Artificial
  Probe
tatggacggaaataaactttctact

SEQ ID NO: 65520 - DNA, 25 bp, Artificial
  Probe
cacaggttcaggagaagactcacag

SEQ ID NO: 65521 - DNA, 25 bp, Artificial
  Probe
cagaagcagcgatgtatcagaacat

SEQ ID NO: 65522 - DNA, 25 bp, Artificial
  Probe
acaggttcaggagaagactcacaga

SEQ ID NO: 65523 - DNA, 25 bp, Artificial
  Probe
agaagcagcgatgtatcagaacatg

SEQ ID NO: 65524 - DNA, 25 bp, Artificial
  Probe
ttatggacggaaataaactttctac

SEQ ID NO: 65525 - DNA, 25 bp, Artificial
  Probe
gcttagtgatatattttatggacgg

SEQ ID NO: 65526 - DNA, 25 bp, Artificial
  Probe
ctgtagatcgcagagccaaggttag

SEQ ID NO: 65527 - DNA, 25 bp, Artificial
  Probe
catcaccacaggttcaggagaagac

SEQ ID NO: 65528 - DNA, 25 bp, Artificial
  Probe
ctagatagagactcatgccagtgtg

SEQ ID NO: 65529 - DNA, 25 bp, Artificial
  Probe
tagatagagactcatgccagtgtgt

SEQ ID NO: 65530 - DNA, 25 bp, Artificial
  Probe
aagttgtttgaaattacagtgcctc

SEQ ID NO: 65531 - DNA, 25 bp, Artificial
  Probe
caagttgtttgaaattacagtgcct

SEQ ID NO: 65532 - DNA, 25 bp, Artificial
  Probe
agttgtttgaaattacagtgcctct

SEQ ID NO: 65533 - DNA, 25 bp, Artificial
  Probe
aagagctagatagagactcatgcca

SEQ ID NO: 65534 - DNA, 25 bp, Artificial
  Probe
agagctagatagagactcatgccag

SEQ ID NO: 65535 - DNA, 25 bp, Artificial
  Probe
caaagagctagatagagactcatgc

SEQ ID NO: 65536 - DNA, 25 bp, Artificial
  Probe
acaaagagctagatagagactcatg

SEQ ID NO: 65537 - DNA, 25 bp, Artificial
  Probe
cacaaagagctagatagagactcat

SEQ ID NO: 65538 - DNA, 25 bp, Artificial
  Probe
gagctagatagagactcatgccagt

SEQ ID NO: 65539 - DNA, 25 bp, Artificial
  Probe
gctagatagagactcatgccagtgt

SEQ ID NO: 65540 - DNA, 25 bp, Artificial
  Probe
ccacaaagagctagatagagactca

SEQ ID NO: 65541 - DNA, 25 bp, Artificial
  Probe
agctagatagagactcatgccagtg

SEQ ID NO: 65542 - DNA, 25 bp, Artificial
  Probe
aaagagctagatagagactcatgcc

SEQ ID NO: 65543 - DNA, 25 bp, Artificial
  Probe
cccacaaagagctagatagagactc

SEQ ID NO: 65544 - DNA, 25 bp, Artificial
  Probe
aacaaggagttggatgaagacacct

SEQ ID NO: 65545 - DNA, 25 bp, Artificial
  Probe
agatagagactcatgccagtgtgtc

SEQ ID NO: 65546 - DNA, 25 bp, Artificial
  Probe
gtcaagttgtttgaaattacagtgc

SEQ ID NO: 65547 - DNA, 25 bp, Artificial
  Probe
cgaggtcaagttgtttgaaattaca

SEQ ID NO: 65548 - DNA, 25 bp, Artificial
  Probe
tcaagttgtttgaaattacagtgcc

SEQ ID NO: 65549 - DNA, 25 bp, Artificial
  Probe
ggtcaagttgtttgaaattacagtg

SEQ ID NO: 65550 - DNA, 25 bp, Artificial
  Probe
aggtcaagttgtttgaaattacagt

SEQ ID NO: 65551 - DNA, 25 bp, Artificial
  Probe
gaggtcaagttgtttgaaattacag

SEQ ID NO: 65552 - DNA, 25 bp, Artificial
  Probe
gcgaggtcaagttgtttgaaattac

SEQ ID NO: 65553 - DNA, 25 bp, Artificial
  Probe
acaaggagttggatgaagacacctg

SEQ ID NO: 65554 - DNA, 25 bp, Artificial
  Probe
ggcgaggtcaagttgtttgaaatta

SEQ ID NO: 65555 - DNA, 25 bp, Artificial
  Probe
gatagagactcatgccagtgtgtct

SEQ ID NO: 65556 - DNA, 25 bp, Artificial
  Probe
caacaaggagttggatgaagacacc

SEQ ID NO: 65557 - DNA, 25 bp, Artificial
  Probe
ccccacaaagagctagatagagact

SEQ ID NO: 65558 - DNA, 25 bp, Artificial
  Probe
gaccccacaaagagctagatagaga

SEQ ID NO: 65559 - DNA, 25 bp, Artificial
  Probe
atagagactcatgccagtgtgtctg

SEQ ID NO: 65560 - DNA, 25 bp, Artificial
  Probe
accccacaaagagctagatagagac

SEQ ID NO: 65561 - DNA, 25 bp, Artificial
  Probe
gactcatgccagtgtgtctgtaaaa

SEQ ID NO: 65562 - DNA, 25 bp, Artificial
  Probe
gagactcatgccagtgtgtctgtaa

SEQ ID NO: 65563 - DNA, 25 bp, Artificial
  Probe
ggaccccacaaagagctagatagag

SEQ ID NO: 65564 - DNA, 25 bp, Artificial
  Probe
gggcgaggtcaagttgtttgaaatt

SEQ ID NO: 65565 - DNA, 25 bp, Artificial
  Probe
agactcatgccagtgtgtctgtaaa

SEQ ID NO: 65566 - DNA, 25 bp, Artificial
  Probe
agagactcatgccagtgtgtctgta

SEQ ID NO: 65567 - DNA, 25 bp, Artificial
  Probe
tagagactcatgccagtgtgtctgt

SEQ ID NO: 65568 - DNA, 25 bp, Artificial
  Probe
tggaccccacaaagagctagataga

SEQ ID NO: 65569 - DNA, 25 bp, Artificial
  Probe
gattccatgatgtctgtggacccaa

SEQ ID NO: 65570 - DNA, 25 bp, Artificial
  Probe
attccatgatgtctgtggacccaac

SEQ ID NO: 65571 - DNA, 25 bp, Artificial
  Probe
catatcatcgtatgtcctcttggtt

SEQ ID NO: 65572 - DNA, 25 bp, Artificial
  Probe
ctcatatcatcgtatgtcctcttgg

SEQ ID NO: 65573 - DNA, 25 bp, Artificial
  Probe
cctcatatcatcgtatgtcctcttg

SEQ ID NO: 65574 - DNA, 25 bp, Artificial
  Probe
tcatatcatcgtatgtcctcttggt

SEQ ID NO: 65575 - DNA, 25 bp, Artificial
  Probe
atatcatcgtatgtcctcttggttt

SEQ ID NO: 65576 - DNA, 25 bp, Artificial
  Probe
atcatcgtatgtcctcttggtttaa

SEQ ID NO: 65577 - DNA, 25 bp, Artificial
  Probe
tgaattacacaagaatgtatcacgc

SEQ ID NO: 65578 - DNA, 25 bp, Artificial
  Probe
gaattacacaagaatgtatcacgcc

SEQ ID NO: 65579 - DNA, 25 bp, Artificial
  Probe
tatcatcgtatgtcctcttggttta

SEQ ID NO: 65580 - DNA, 25 bp, Artificial
  Probe
ctgaattacacaagaatgtatcacg

SEQ ID NO: 65581 - DNA, 25 bp, Artificial
  Probe
tgttcctgaattacacaagaatgta

SEQ ID NO: 65582 - DNA, 25 bp, Artificial
  Probe
aacagtgagggacaagatatggaac

SEQ ID NO: 65583 - DNA, 25 bp, Artificial
  Probe
caacagtgagggacaagatatggaa

SEQ ID NO: 65584 - DNA, 25 bp, Artificial
  Probe
aattacacaagaatgtatcacgccg

SEQ ID NO: 65585 - DNA, 25 bp, Artificial
  Probe
cctgaattacacaagaatgtatcac

SEQ ID NO: 65586 - DNA, 25 bp, Artificial
  Probe
tcctgaattacacaagaatgtatca

SEQ ID NO: 65587 - DNA, 25 bp, Artificial
  Probe
ccctcatatcatcgtatgtcctctt

SEQ ID NO: 65588 - DNA, 25 bp, Artificial
  Probe
tcatcgtatgtcctcttggtttaaa

SEQ ID NO: 65589 - DNA, 25 bp, Artificial
  Probe
gtgagggacaagatatggaaccaaa

SEQ ID NO: 65590 - DNA, 25 bp, Artificial
  Probe
gttcctgaattacacaagaatgtat

SEQ ID NO: 65591 - DNA, 25 bp, Artificial
  Probe
ttgttcctgaattacacaagaatgt

SEQ ID NO: 65592 - DNA, 25 bp, Artificial
  Probe
aaagaactgtgagattgggtccatc

SEQ ID NO: 65593 - DNA, 25 bp, Artificial
  Probe
ttcctgaattacacaagaatgtatc

SEQ ID NO: 65594 - DNA, 25 bp, Artificial
  Probe
agtgagggacaagatatggaaccaa

SEQ ID NO: 65595 - DNA, 25 bp, Artificial
  Probe
acagtgagggacaagatatggaacc

SEQ ID NO: 65596 - DNA, 25 bp, Artificial
  Probe
cttgtgcccttgttcctgaattaca

SEQ ID NO: 65597 - DNA, 25 bp, Artificial
  Probe
cagtgagggacaagatatggaacca

SEQ ID NO: 65598 - DNA, 25 bp, Artificial
  Probe
tgagggacaagatatggaaccaaaa

SEQ ID NO: 65599 - DNA, 25 bp, Artificial
  Probe
ccttgtgcccttgttcctgaattac

SEQ ID NO: 65600 - DNA, 25 bp, Artificial
  Probe
aaaagaactgtgagattgggtccat

SEQ ID NO: 65601 - DNA, 25 bp, Artificial
  Probe
gcaacagtgagggacaagatatgga

SEQ ID NO: 65602 - DNA, 25 bp, Artificial
  Probe
catcgtatgtcctcttggtttaaaa

SEQ ID NO: 65603 - DNA, 25 bp, Artificial
  Probe
ttgtgcccttgttcctgaattacac

SEQ ID NO: 65604 - DNA, 25 bp, Artificial
  Probe
aagaactgtgagattgggtccatcc

SEQ ID NO: 65605 - DNA, 25 bp, Artificial
  Probe
attacacaagaatgtatcacgccgg

SEQ ID NO: 65606 - DNA, 25 bp, Artificial
  Probe
cccctcatatcatcgtatgtcctct

SEQ ID NO: 65607 - DNA, 25 bp, Artificial
  Probe
ctccaagcccctcatatcatcgtat

SEQ ID NO: 65608 - DNA, 25 bp, Artificial
  Probe
caagcccctcatatcatcgtatgtc

SEQ ID NO: 65609 - DNA, 25 bp, Artificial
  Probe
cccttgtgcccttgttcctgaatta

SEQ ID NO: 65610 - DNA, 25 bp, Artificial
  Probe
gtgcccttgttcctgaattacacaa

SEQ ID NO: 65611 - DNA, 25 bp, Artificial
  Probe
aagcccctcatatcatcgtatgtcc

SEQ ID NO: 65612 - DNA, 25 bp, Artificial
  Probe
tccaagcccctcatatcatcgtatg

SEQ ID NO: 65613 - DNA, 25 bp, Artificial
  Probe
ggaagaaaagtgacagtgccaacag

SEQ ID NO: 65614 - DNA, 25 bp, Artificial
  Probe
caggaagaaaagtgacagtgccaac

SEQ ID NO: 65615 - DNA, 25 bp, Artificial
  Probe
ccaagcccctcatatcatcgtatgt

SEQ ID NO: 65616 - DNA, 25 bp, Artificial
  Probe
accgtagttgacattcctatctgat

SEQ ID NO: 65617 - DNA, 25 bp, Artificial
  Probe
tagttgacattcctatctgatctgc

SEQ ID NO: 65618 - DNA, 25 bp, Artificial
  Probe
cgtagttgacattcctatctgatct

SEQ ID NO: 65619 - DNA, 25 bp, Artificial
  Probe
ccgtagttgacattcctatctgatc

SEQ ID NO: 65620 - DNA, 25 bp, Artificial
  Probe
caccgtagttgacattcctatctga

SEQ ID NO: 65621 - DNA, 25 bp, Artificial
  Probe
gacaccgtagttgacattcctatct

SEQ ID NO: 65622 - DNA, 25 bp, Artificial
  Probe
acaccgtagttgacattcctatctg

SEQ ID NO: 65623 - DNA, 25 bp, Artificial
  Probe
gtagttgacattcctatctgatctg

SEQ ID NO: 65624 - DNA, 25 bp, Artificial
  Probe
agttgacattcctatctgatctgcc

SEQ ID NO: 65625 - DNA, 25 bp, Artificial
  Probe
tgactcaaagacagtacacaaagta

SEQ ID NO: 65626 - DNA, 25 bp, Artificial
  Probe
actgttgaaatgtactcatgtctga

SEQ ID NO: 65627 - DNA, 25 bp, Artificial
  Probe
ggacaccgtagttgacattcctatc

SEQ ID NO: 65628 - DNA, 25 bp, Artificial
  Probe
aaacaaggtgactcaaagacagtac

SEQ ID NO: 65629 - DNA, 25 bp, Artificial
  Probe
ctgttgaaatgtactcatgtctgaa

SEQ ID NO: 65630 - DNA, 25 bp, Artificial
  Probe
aaagactgttgaaatgtactcatgt

SEQ ID NO: 65631 - DNA, 25 bp, Artificial
  Probe
gactgttgaaatgtactcatgtctg

SEQ ID NO: 65632 - DNA, 25 bp, Artificial
  Probe
tgttgaaatgtactcatgtctgaat

SEQ ID NO: 65633 - DNA, 25 bp, Artificial
  Probe
aagactgttgaaatgtactcatgtc

SEQ ID NO: 65634 - DNA, 25 bp, Artificial
  Probe
gtgactcaaagacagtacacaaagt

SEQ ID NO: 65635 - DNA, 25 bp, Artificial
  Probe
aacaaggtgactcaaagacagtaca

SEQ ID NO: 65636 - DNA, 25 bp, Artificial
  Probe
tggacaccgtagttgacattcctat

SEQ ID NO: 65637 - DNA, 25 bp, Artificial
  Probe
tgttggtcttcacatcagagatgat

SEQ ID NO: 65638 - DNA, 25 bp, Artificial
  Probe
ggtgactcaaagacagtacacaaag

SEQ ID NO: 65639 - DNA, 25 bp, Artificial
  Probe
ttggacaccgtagttgacattccta

SEQ ID NO: 65640 - DNA, 25 bp, Artificial
  Probe
aggtgactcaaagacagtacacaaa

SEQ ID NO: 65641 - DNA, 25 bp, Artificial
  Probe
aaggtgactcaaagacagtacacaa

SEQ ID NO: 65642 - DNA, 25 bp, Artificial
  Probe
gttgacattcctatctgatctgccc

SEQ ID NO: 65643 - DNA, 25 bp, Artificial
  Probe
gtgttggtcttcacatcagagatga

SEQ ID NO: 65644 - DNA, 25 bp, Artificial
  Probe
actcaaagacagtacacaaagtaca

SEQ ID NO: 65645 - DNA, 25 bp, Artificial
  Probe
gactcaaagacagtacacaaagtac

SEQ ID NO: 65646 - DNA, 25 bp, Artificial
  Probe
gttgaaatgtactcatgtctgaata

SEQ ID NO: 65647 - DNA, 25 bp, Artificial
  Probe
caaggtgactcaaagacagtacaca

SEQ ID NO: 65648 - DNA, 25 bp, Artificial
  Probe
acaaggtgactcaaagacagtacac

SEQ ID NO: 65649 - DNA, 25 bp, Artificial
  Probe
aaaacaaggtgactcaaagacagta

SEQ ID NO: 65650 - DNA, 25 bp, Artificial
  Probe
ctcaaagacagtacacaaagtacat

SEQ ID NO: 65651 - DNA, 25 bp, Artificial
  Probe
gcaaaagactgttgaaatgtactca

SEQ ID NO: 65652 - DNA, 25 bp, Artificial
  Probe
aatgtactcatgtctgaatataaca

SEQ ID NO: 65653 - DNA, 25 bp, Artificial
  Probe
tcaaagacagtacacaaagtacata

SEQ ID NO: 65654 - DNA, 25 bp, Artificial
  Probe
ggtgttggtcttcacatcagagatg

SEQ ID NO: 65655 - DNA, 25 bp, Artificial
  Probe
cttggacaccgtagttgacattcct

SEQ ID NO: 65656 - DNA, 25 bp, Artificial
  Probe
cggtgttggtcttcacatcagagat

SEQ ID NO: 65657 - DNA, 25 bp, Artificial
  Probe
agactgttgaaatgtactcatgtct

SEQ ID NO: 65658 - DNA, 25 bp, Artificial
  Probe
ttgaaatgtactcatgtctgaatat

SEQ ID NO: 65659 - DNA, 25 bp, Artificial
  Probe
caaaagactgttgaaatgtactcat

SEQ ID NO: 65660 - DNA, 25 bp, Artificial
  Probe
tgcaaaagactgttgaaatgtactc

SEQ ID NO: 65661 - DNA, 25 bp, Artificial
  Probe
ccaccttgtgcttctgtgtatataa

SEQ ID NO: 65662 - DNA, 25 bp, Artificial
  Probe
cttgtgcttctgtgtatataaaggc

SEQ ID NO: 65663 - DNA, 25 bp, Artificial
  Probe
accttgtgcttctgtgtatataaag

SEQ ID NO: 65664 - DNA, 25 bp, Artificial
  Probe
gccaccttgtgcttctgtgtatata

SEQ ID NO: 65665 - DNA, 25 bp, Artificial
  Probe
caccttgtgcttctgtgtatataaa

SEQ ID NO: 65666 - DNA, 25 bp, Artificial
  Probe
gatgtcaagcacacagtcctgtatc

SEQ ID NO: 65667 - DNA, 25 bp, Artificial
  Probe
ctcatcatcggcaagaagttcaagc

SEQ ID NO: 65668 - DNA, 25 bp, Artificial
  Probe
gctcatcatcggcaagaagttcaag

SEQ ID NO: 65669 - DNA, 25 bp, Artificial
  Probe
ttgtgcttctgtgtatataaaggcc

SEQ ID NO: 65670 - DNA, 25 bp, Artificial
  Probe
tgccaccttgtgcttctgtgtatat

SEQ ID NO: 65671 - DNA, 25 bp, Artificial
  Probe
catcatcggcaagaagttcaagctg

SEQ ID NO: 65672 - DNA, 25 bp, Artificial
  Probe
ctgccaccttgtgcttctgtgtata

SEQ ID NO: 65673 - DNA, 25 bp, Artificial
  Probe
atgtcaagcacacagtcctgtatcc

SEQ ID NO: 65674 - DNA, 25 bp, Artificial
  Probe
tcatcatcggcaagaagttcaagct

SEQ ID NO: 65675 - DNA, 25 bp, Artificial
  Probe
agctcatcatcggcaagaagttcaa

SEQ ID NO: 65676 - DNA, 25 bp, Artificial
  Probe
ccttgtgcttctgtgtatataaagg

SEQ ID NO: 65677 - DNA, 25 bp, Artificial
  Probe
tttcccactaacaggacctcagttc

SEQ ID NO: 65678 - DNA, 25 bp, Artificial
  Probe
gtcaagcacacagtcctgtatcctc

SEQ ID NO: 65679 - DNA, 25 bp, Artificial
  Probe
cgatgtcaagcacacagtcctgtat

SEQ ID NO: 65680 - DNA, 25 bp, Artificial
  Probe
caagcacacagtcctgtatcctctg

SEQ ID NO: 65681 - DNA, 25 bp, Artificial
  Probe
tcaagcacacagtcctgtatcctct

SEQ ID NO: 65682 - DNA, 25 bp, Artificial
  Probe
catcttttcccactaacaggacctc

SEQ ID NO: 65683 - DNA, 25 bp, Artificial
  Probe
cattgctgtggaattgctcaaatgc

SEQ ID NO: 65684 - DNA, 25 bp, Artificial
  Probe
ttcccactaacaggacctcagttct

SEQ ID NO: 65685 - DNA, 25 bp, Artificial
  Probe
atcttttcccactaacaggacctca

SEQ ID NO: 65686 - DNA, 25 bp, Artificial
  Probe
atcttccacatcgagatgctgaagg

SEQ ID NO: 65687 - DNA, 25 bp, Artificial
  Probe
ttttcccactaacaggacctcagtt

SEQ ID NO: 65688 - DNA, 25 bp, Artificial
  Probe
gcattgctgtggaattgctcaaatg

SEQ ID NO: 65689 - DNA, 25 bp, Artificial
  Probe
tcttttcccactaacaggacctcag

SEQ ID NO: 65690 - DNA, 25 bp, Artificial
  Probe
cttttcccactaacaggacctcagt

SEQ ID NO: 65691 - DNA, 25 bp, Artificial
  Probe
gcatcttttcccactaacaggacct

SEQ ID NO: 65692 - DNA, 25 bp, Artificial
  Probe
attgctgtggaattgctcaaatgca

SEQ ID NO: 65693 - DNA, 25 bp, Artificial
  Probe
ggcattgctgtggaattgctcaaat

SEQ ID NO: 65694 - DNA, 25 bp, Artificial
  Probe
ctgtggaattgctcaaatgcatgag

SEQ ID NO: 65695 - DNA, 25 bp, Artificial
  Probe
ttgctgtggaattgctcaaatgcat

SEQ ID NO: 65696 - DNA, 25 bp, Artificial
  Probe
aacccctcatcttccacatcgagat

SEQ ID NO: 65697 - DNA, 25 bp, Artificial
  Probe
gctgtggaattgctcaaatgcatga

SEQ ID NO: 65698 - DNA, 25 bp, Artificial
  Probe
tgctgtggaattgctcaaatgcatg

SEQ ID NO: 65699 - DNA, 25 bp, Artificial
  Probe
ccagttcagttaatccaatgtcatt

SEQ ID NO: 65700 - DNA, 25 bp, Artificial
  Probe
gccagttcagttaatccaatgtcat

SEQ ID NO: 65701 - DNA, 25 bp, Artificial
  Probe
ttctgagttctcatgtaagcactag

SEQ ID NO: 65702 - DNA, 25 bp, Artificial
  Probe
gttctgagttctcatgtaagcacta

SEQ ID NO: 65703 - DNA, 25 bp, Artificial
  Probe
tgttcacaagccattggagagatat

SEQ ID NO: 65704 - DNA, 25 bp, Artificial
  Probe
tgccagttcagttaatccaatgtca

SEQ ID NO: 65705 - DNA, 25 bp, Artificial
  Probe
atatcacaggataatcagcagcctt

SEQ ID NO: 65706 - DNA, 25 bp, Artificial
  Probe
ctgccagttcagttaatccaatgtc

SEQ ID NO: 65707 - DNA, 25 bp, Artificial
  Probe
ctgtccagtgttagtaaatgtgttt

SEQ ID NO: 65708 - DNA, 25 bp, Artificial
  Probe
ctgttcacaagccattggagagata

SEQ ID NO: 65709 - DNA, 25 bp, Artificial
  Probe
cttgatgacacaactaccgaaggaa

SEQ ID NO: 65710 - DNA, 25 bp, Artificial
  Probe
ttccttgatgacacaactaccgaag

SEQ ID NO: 65711 - DNA, 25 bp, Artificial
  Probe
gagacggtttaacagtgctttctat

SEQ ID NO: 65712 - DNA, 25 bp, Artificial
  Probe
gttccttgatgacacaactaccgaa

SEQ ID NO: 65713 - DNA, 25 bp, Artificial
  Probe
tatcacaggataatcagcagccttg

SEQ ID NO: 65714 - DNA, 25 bp, Artificial
  Probe
agacggtttaacagtgctttctatg

SEQ ID NO: 65715 - DNA, 25 bp, Artificial
  Probe
ggagagatatcacaggataatcagc

SEQ ID NO: 65716 - DNA, 25 bp, Artificial
  Probe
gagtctcctggcaaagaataaatat

SEQ ID NO: 65717 - DNA, 25 bp, Artificial
  Probe
agagatatcacaggataatcagcag

SEQ ID NO: 65718 - DNA, 25 bp, Artificial
  Probe
gagagatatcacaggataatcagca

SEQ ID NO: 65719 - DNA, 25 bp, Artificial
  Probe
ccattggagagatatcacaggataa

SEQ ID NO: 65720 - DNA, 25 bp, Artificial
  Probe
gagatatcacaggataatcagcagc

SEQ ID NO: 65721 - DNA, 25 bp, Artificial
  Probe
gttcacaagccattggagagatatc

SEQ ID NO: 65722 - DNA, 25 bp, Artificial
  Probe
attgagacggtttaacagtgctttc

SEQ ID NO: 65723 - DNA, 25 bp, Artificial
  Probe
tgtccagtgttagtaaatgtgttta

SEQ ID NO: 65724 - DNA, 25 bp, Artificial
  Probe
tggagagatatcacaggataatcag

SEQ ID NO: 65725 - DNA, 25 bp, Artificial
  Probe
ttcacaagccattggagagatatca

SEQ ID NO: 65726 - DNA, 25 bp, Artificial
  Probe
cattgagacggtttaacagtgcttt

SEQ ID NO: 65727 - DNA, 25 bp, Artificial
  Probe
gacggtttaacagtgctttctatgt

SEQ ID NO: 65728 - DNA, 25 bp, Artificial
  Probe
ttggagagatatcacaggataatca

SEQ ID NO: 65729 - DNA, 25 bp, Artificial
  Probe
gccattggagagatatcacaggata

SEQ ID NO: 65730 - DNA, 25 bp, Artificial
  Probe
tgagacggtttaacagtgctttcta

SEQ ID NO: 65731 - DNA, 25 bp, Artificial
  Probe
tacattgagacggtttaacagtgct

SEQ ID NO: 65732 - DNA, 25 bp, Artificial
  Probe
actgtccagtgttagtaaatgtgtt

SEQ ID NO: 65733 - DNA, 25 bp, Artificial
  Probe
acaagccattggagagatatcacag

SEQ ID NO: 65734 - DNA, 25 bp, Artificial
  Probe
tcacaagccattggagagatatcac

SEQ ID NO: 65735 - DNA, 25 bp, Artificial
  Probe
ttgatgacacaactaccgaaggaaa

SEQ ID NO: 65736 - DNA, 25 bp, Artificial
  Probe
agtctcctggcaaagaataaatata

SEQ ID NO: 65737 - DNA, 25 bp, Artificial
  Probe
agatatcacaggataatcagcagcc

SEQ ID NO: 65738 - DNA, 25 bp, Artificial
  Probe
agtgctttctatgttcatatactgt

SEQ ID NO: 65739 - DNA, 25 bp, Artificial
  Probe
tctgagttctcatgtaagcactagt

SEQ ID NO: 65740 - DNA, 25 bp, Artificial
  Probe
tcagttaatccaatgtcattgttca

SEQ ID NO: 65741 - DNA, 25 bp, Artificial
  Probe
agttcagttaatccaatgtcattgt

SEQ ID NO: 65742 - DNA, 25 bp, Artificial
  Probe
gtacattgagacggtttaacagtgc

SEQ ID NO: 65743 - DNA, 25 bp, Artificial
  Probe
cagttcagttaatccaatgtcattg

SEQ ID NO: 65744 - DNA, 25 bp, Artificial
  Probe
aataagagtgctaaactgtggactt

SEQ ID NO: 65745 - DNA, 25 bp, Artificial
  Probe
aaataagagtgctaaactgtggact

SEQ ID NO: 65746 - DNA, 25 bp, Artificial
  Probe
caaataagagtgctaaactgtggac

SEQ ID NO: 65747 - DNA, 25 bp, Artificial
  Probe
aagagtgctaaactgtggacttaaa

SEQ ID NO: 65748 - DNA, 25 bp, Artificial
  Probe
gccatacaaataagagtgctaaact

SEQ ID NO: 65749 - DNA, 25 bp, Artificial
  Probe
aacatctctggttctttcaaagttt

SEQ ID NO: 65750 - DNA, 25 bp, Artificial
  Probe
aaacatctctggttctttcaaagtt

SEQ ID NO: 65751 - DNA, 25 bp, Artificial
  Probe
acaaataagagtgctaaactgtgga

SEQ ID NO: 65752 - DNA, 25 bp, Artificial
  Probe
tctggttctttcaaagtttgtgttt

SEQ ID NO: 65753 - DNA, 25 bp, Artificial
  Probe
atctctggttctttcaaagtttgtg

SEQ ID NO: 65754 - DNA, 25 bp, Artificial
  Probe
catctctggttctttcaaagtttgt

SEQ ID NO: 65755 - DNA, 25 bp, Artificial
  Probe
acatctctggttctttcaaagtttg

SEQ ID NO: 65756 - DNA, 25 bp, Artificial
  Probe
ctctggttctttcaaagtttgtgtt

SEQ ID NO: 65757 - DNA, 25 bp, Artificial
  Probe
taagagtgctaaactgtggacttaa

SEQ ID NO: 65758 - DNA, 25 bp, Artificial
  Probe
tacaaataagagtgctaaactgtgg

SEQ ID NO: 65759 - DNA, 25 bp, Artificial
  Probe
ataagagtgctaaactgtggactta

SEQ ID NO: 65760 - DNA, 25 bp, Artificial
  Probe
tctctggttctttcaaagtttgtgt

SEQ ID NO: 65761 - DNA, 25 bp, Artificial
  Probe
ccatacaaataagagtgctaaactg

SEQ ID NO: 65762 - DNA, 25 bp, Artificial
  Probe
ttcatttccatctgtggtaaacttt

SEQ ID NO: 65763 - DNA, 25 bp, Artificial
  Probe
attcatttccatctgtggtaaactt

SEQ ID NO: 65764 - DNA, 25 bp, Artificial
  Probe
aattcatttccatctgtggtaaact

SEQ ID NO: 65765 - DNA, 25 bp, Artificial
  Probe
tcatttccatctgtggtaaacttta

SEQ ID NO: 65766 - DNA, 25 bp, Artificial
  Probe
tttaaagccatacaaataagagtgc

SEQ ID NO: 65767 - DNA, 25 bp, Artificial
  Probe
aaattcatttccatctgtggtaaac

SEQ ID NO: 65768 - DNA, 25 bp, Artificial
  Probe
atacaaataagagtgctaaactgtg

SEQ ID NO: 65769 - DNA, 25 bp, Artificial
  Probe
catacaaataagagtgctaaactgt

SEQ ID NO: 65770 - DNA, 25 bp, Artificial
  Probe
agccatacaaataagagtgctaaac

SEQ ID NO: 65771 - DNA, 25 bp, Artificial
  Probe
aagccatacaaataagagtgctaaa

SEQ ID NO: 65772 - DNA, 25 bp, Artificial
  Probe
aaagccatacaaataagagtgctaa

SEQ ID NO: 65773 - DNA, 25 bp, Artificial
  Probe
ttaaagccatacaaataagagtgct

SEQ ID NO: 65774 - DNA, 25 bp, Artificial
  Probe
taaagtgctctggtacttggtattt

SEQ ID NO: 65775 - DNA, 25 bp, Artificial
  Probe
catttccatctgtggtaaactttat

SEQ ID NO: 65776 - DNA, 25 bp, Artificial
  Probe
ataaagtgctctggtacttggtatt

SEQ ID NO: 65777 - DNA, 25 bp, Artificial
  Probe
cataaagtgctctggtacttggtat

SEQ ID NO: 65778 - DNA, 25 bp, Artificial
  Probe
gagtgctaaactgtggacttaaaag

SEQ ID NO: 65779 - DNA, 25 bp, Artificial
  Probe
agagtgctaaactgtggacttaaaa

SEQ ID NO: 65780 - DNA, 25 bp, Artificial
  Probe
tatatcaggctttgttttgagtgga

SEQ ID NO: 65781 - DNA, 25 bp, Artificial
  Probe
taaagccatacaaataagagtgcta

SEQ ID NO: 65782 - DNA, 25 bp, Artificial
  Probe
aaaacatctctggttctttcaaagt

SEQ ID NO: 65783 - DNA, 25 bp, Artificial
  Probe
aataaagtacagaggaaacgtatgt

SEQ ID NO: 65784 - DNA, 25 bp, Artificial
  Probe
ctggttctttcaaagtttgtgtttt

SEQ ID NO: 65785 - DNA, 25 bp, Artificial
  Probe
actgtggacttaaaagtagttgtgt

SEQ ID NO: 65786 - DNA, 25 bp, Artificial
  Probe
tttccatctgtggtaaactttattt

SEQ ID NO: 65787 - DNA, 25 bp, Artificial
  Probe
atatcaggctttgttttgagtggac

SEQ ID NO: 65788 - DNA, 25 bp, Artificial
  Probe
agtgctaaactgtggacttaaaagt

SEQ ID NO: 65789 - DNA, 25 bp, Artificial
  Probe
ggagataatgtcagcagtaagagaa

SEQ ID NO: 65790 - DNA, 25 bp, Artificial
  Probe
ttggagataatgtcagcagtaagag

SEQ ID NO: 65791 - DNA, 25 bp, Artificial
  Probe
aatgtcagcagtaagagaagaagat

SEQ ID NO: 65792 - DNA, 25 bp, Artificial
  Probe
attggagataatgtcagcagtaaga

SEQ ID NO: 65793 - DNA, 25 bp, Artificial
  Probe
tggagataatgtcagcagtaagaga

SEQ ID NO: 65794 - DNA, 25 bp, Artificial
  Probe
taatgtcagcagtaagagaagaaga

SEQ ID NO: 65795 - DNA, 25 bp, Artificial
  Probe
agataatgtcagcagtaagagaaga

SEQ ID NO: 65796 - DNA, 25 bp, Artificial
  Probe
gagataatgtcagcagtaagagaag

SEQ ID NO: 65797 - DNA, 25 bp, Artificial
  Probe
gttcaagttcgtggatattggaatc

SEQ ID NO: 65798 - DNA, 25 bp, Artificial
  Probe
caagttcgtggatattggaatcaac

SEQ ID NO: 65799 - DNA, 25 bp, Artificial
  Probe
tcaagttcgtggatattggaatcaa

SEQ ID NO: 65800 - DNA, 25 bp, Artificial
  Probe
ttcaagttcgtggatattggaatca

SEQ ID NO: 65801 - DNA, 25 bp, Artificial
  Probe
caacacgctatataacaacaccatt

SEQ ID NO: 65802 - DNA, 25 bp, Artificial
  Probe
atgtcagcagtaagagaagaagatc

SEQ ID NO: 65803 - DNA, 25 bp, Artificial
  Probe
ataatgtcagcagtaagagaagaag

SEQ ID NO: 65804 - DNA, 25 bp, Artificial
  Probe
gataatgtcagcagtaagagaagaa

SEQ ID NO: 65805 - DNA, 25 bp, Artificial
  Probe
ggatattggaatcaacctgacagat

SEQ ID NO: 65806 - DNA, 25 bp, Artificial
  Probe
tattggagataatgtcagcagtaag

SEQ ID NO: 65807 - DNA, 25 bp, Artificial
  Probe
aagttcgtggatattggaatcaacc

SEQ ID NO: 65808 - DNA, 25 bp, Artificial
  Probe
ggttcaagttcgtggatattggaat

SEQ ID NO: 65809 - DNA, 25 bp, Artificial
  Probe
acacgctatataacaacaccattaa

SEQ ID NO: 65810 - DNA, 25 bp, Artificial
  Probe
aacacgctatataacaacaccatta

SEQ ID NO: 65811 - DNA, 25 bp, Artificial
  Probe
ccaacacgctatataacaacaccat

SEQ ID NO: 65812 - DNA, 25 bp, Artificial
  Probe
agaagcatcaagatgacttacaaga

SEQ ID NO: 65813 - DNA, 25 bp, Artificial
  Probe
cagaagcatcaagatgacttacaag

SEQ ID NO: 65814 - DNA, 25 bp, Artificial
  Probe
tggatattggaatcaacctgacaga

SEQ ID NO: 65815 - DNA, 25 bp, Artificial
  Probe
gtggatattggaatcaacctgacag

SEQ ID NO: 65816 - DNA, 25 bp, Artificial
  Probe
gatattggaatcaacctgacagatc

SEQ ID NO: 65817 - DNA, 25 bp, Artificial
  Probe
gaagcatcaagatgacttacaagat

SEQ ID NO: 65818 - DNA, 25 bp, Artificial
  Probe
gttcgtggatattggaatcaacctg

SEQ ID NO: 65819 - DNA, 25 bp, Artificial
  Probe
aatcaacctgacagatcctatgttc

SEQ ID NO: 65820 - DNA, 25 bp, Artificial
  Probe
gaatcaacctgacagatcctatgtt

SEQ ID NO: 65821 - DNA, 25 bp, Artificial
  Probe
agttcgtggatattggaatcaacct

SEQ ID NO: 65822 - DNA, 25 bp, Artificial
  Probe
tcagcagtaagagaagaagatccac

SEQ ID NO: 65823 - DNA, 25 bp, Artificial
  Probe
gtcagcagtaagagaagaagatcca

SEQ ID NO: 65824 - DNA, 25 bp, Artificial
  Probe
tgtcagcagtaagagaagaagatcc

SEQ ID NO: 65825 - DNA, 25 bp, Artificial
  Probe
atattggagataatgtcagcagtaa

SEQ ID NO: 65826 - DNA, 25 bp, Artificial
  Probe
ttcgtggatattggaatcaacctga

SEQ ID NO: 65827 - DNA, 25 bp, Artificial
  Probe
aggttcaagttcgtggatattggaa

SEQ ID NO: 65828 - DNA, 25 bp, Artificial
  Probe
atcaacctgacagatcctatgttca

SEQ ID NO: 65829 - DNA, 25 bp, Artificial
  Probe
gcagaagcatcaagatgacttacaa

SEQ ID NO: 65830 - DNA, 25 bp, Artificial
  Probe
atattggaatcaacctgacagatcc

SEQ ID NO: 65831 - DNA, 25 bp, Artificial
  Probe
cagcagtaagagaagaagatccact

SEQ ID NO: 65832 - DNA, 25 bp, Artificial
  Probe
gaggttcaagttcgtggatattgga

SEQ ID NO: 65833 - DNA, 25 bp, Artificial
  Probe
ctaatgattgagacagatgcacctt

SEQ ID NO: 65834 - DNA, 25 bp, Artificial
  Probe
ctctgaagaagacatgattgagtgg

SEQ ID NO: 65835 - DNA, 25 bp, Artificial
  Probe
cctctgaagaagacatgattgagtg

SEQ ID NO: 65836 - DNA, 25 bp, Artificial
  Probe
ctaaatcagcaggaacaagaagact

SEQ ID NO: 65837 - DNA, 25 bp, Artificial
  Probe
gactaaatcagcaggaacaagaaga

SEQ ID NO: 65838 - DNA, 25 bp, Artificial
  Probe
agactaaatcagcaggaacaagaag

SEQ ID NO: 65839 - DNA, 25 bp, Artificial
  Probe
taaatcagcaggaacaagaagactt

SEQ ID NO: 65840 - DNA, 25 bp, Artificial
  Probe
actaaatcagcaggaacaagaagac

SEQ ID NO: 65841 - DNA, 25 bp, Artificial
  Probe
cagactaaatcagcaggaacaagaa

SEQ ID NO: 65842 - DNA, 25 bp, Artificial
  Probe
ttaccatgtgcatccaactacctat

SEQ ID NO: 65843 - DNA, 25 bp, Artificial
  Probe
gatctcagaagcatgaagagtcctc

SEQ ID NO: 65844 - DNA, 25 bp, Artificial
  Probe
ctacctatgagcatgggatacaaag

SEQ ID NO: 65845 - DNA, 25 bp, Artificial
  Probe
ctatgagcatgggatacaaaggttt

SEQ ID NO: 65846 - DNA, 25 bp, Artificial
  Probe
actacctatgagcatgggatacaaa

SEQ ID NO: 65847 - DNA, 25 bp, Artificial
  Probe
aactacctatgagcatgggatacaa

SEQ ID NO: 65848 - DNA, 25 bp, Artificial
  Probe
tatccctctgaagaagacatgattg

SEQ ID NO: 65849 - DNA, 25 bp, Artificial
  Probe
gtatccctctgaagaagacatgatt

SEQ ID NO: 65850 - DNA, 25 bp, Artificial
  Probe
tcctgtaaatgtgacaagtctagtt

SEQ ID NO: 65851 - DNA, 25 bp, Artificial
  Probe
ttcctgtaaatgtgacaagtctagt

SEQ ID NO: 65852 - DNA, 25 bp, Artificial
  Probe
cgattcctgtaaatgtgacaagtct

SEQ ID NO: 65853 - DNA, 25 bp, Artificial
  Probe
taccatgtgcatccaactacctatg

SEQ ID NO: 65854 - DNA, 25 bp, Artificial
  Probe
atctcagaagcatgaagagtcctct

SEQ ID NO: 65855 - DNA, 25 bp, Artificial
  Probe
cctgtaaatgtgacaagtctagttt

SEQ ID NO: 65856 - DNA, 25 bp, Artificial
  Probe
gattcctgtaaatgtgacaagtcta

SEQ ID NO: 65857 - DNA, 25 bp, Artificial
  Probe
atccctctgaagaagacatgattga

SEQ ID NO: 65858 - DNA, 25 bp, Artificial
  Probe
taccctaattaaacagctttgccta

SEQ ID NO: 65859 - DNA, 25 bp, Artificial
  Probe
tatgagcatgggatacaaaggtttg

SEQ ID NO: 65860 - DNA, 25 bp, Artificial
  Probe
caactacctatgagcatgggataca

SEQ ID NO: 65861 - DNA, 25 bp, Artificial
  Probe
cagtaccctaattaaacagctttgc

SEQ ID NO: 65862 - DNA, 25 bp, Artificial
  Probe
gcagtaccctaattaaacagctttg

SEQ ID NO: 65863 - DNA, 25 bp, Artificial
  Probe
ccagactaaatcagcaggaacaaga

SEQ ID NO: 65864 - DNA, 25 bp, Artificial
  Probe
cctaattaaacagctttgcctagaa

SEQ ID NO: 65865 - DNA, 25 bp, Artificial
  Probe
attcctgtaaatgtgacaagtctag

SEQ ID NO: 65866 - DNA, 25 bp, Artificial
  Probe
tttgcgattcctgtaaatgtgacaa

SEQ ID NO: 65867 - DNA, 25 bp, Artificial
  Probe
ccctaattaaacagctttgcctaga

SEQ ID NO: 65868 - DNA, 25 bp, Artificial
  Probe
tgtatccctctgaagaagacatgat

SEQ ID NO: 65869 - DNA, 25 bp, Artificial
  Probe
accctaattaaacagctttgcctag

SEQ ID NO: 65870 - DNA, 25 bp, Artificial
  Probe
gtaccctaattaaacagctttgcct

SEQ ID NO: 65871 - DNA, 25 bp, Artificial
  Probe
agtaccctaattaaacagctttgcc

SEQ ID NO: 65872 - DNA, 25 bp, Artificial
  Probe
ctgtaaatgtgacaagtctagtttg

SEQ ID NO: 65873 - DNA, 25 bp, Artificial
  Probe
ctgtatccctctgaagaagacatga

SEQ ID NO: 65874 - DNA, 25 bp, Artificial
  Probe
ttgcgattcctgtaaatgtgacaag

SEQ ID NO: 65875 - DNA, 25 bp, Artificial
  Probe
aaaggtttgcgattcctgtaaatgt

SEQ ID NO: 65876 - DNA, 25 bp, Artificial
  Probe
caaaggtttgcgattcctgtaaatg

SEQ ID NO: 65877 - DNA, 25 bp, Artificial
  Probe
ggtttgcgattcctgtaaatgtgac

SEQ ID NO: 65878 - DNA, 25 bp, Artificial
  Probe
gtttgcgattcctgtaaatgtgaca

SEQ ID NO: 65879 - DNA, 25 bp, Artificial
  Probe
ggttagcgttatctctccataatga

SEQ ID NO: 65880 - DNA, 25 bp, Artificial
  Probe
gttagcgttatctctccataatgac

SEQ ID NO: 65881 - DNA, 25 bp, Artificial
  Probe
tagcgttatctctccataatgactt

SEQ ID NO: 65882 - DNA, 25 bp, Artificial
  Probe
ttagcgttatctctccataatgact

SEQ ID NO: 65883 - DNA, 25 bp, Artificial
  Probe
tatgtcttcaggttgatattgtcgt

SEQ ID NO: 65884 - DNA, 25 bp, Artificial
  Probe
tgttgcttatgtcttcaggttgata

SEQ ID NO: 65885 - DNA, 25 bp, Artificial
  Probe
ggtactccaggaagattagatgatt

SEQ ID NO: 65886 - DNA, 25 bp, Artificial
  Probe
atgtcttcaggttgatattgtcgtc

SEQ ID NO: 65887 - DNA, 25 bp, Artificial
  Probe
gcttatgtcttcaggttgatattgt

SEQ ID NO: 65888 - DNA, 25 bp, Artificial
  Probe
tgcttatgtcttcaggttgatattg

SEQ ID NO: 65889 - DNA, 25 bp, Artificial
  Probe
gttgcttatgtcttcaggttgatat

SEQ ID NO: 65890 - DNA, 25 bp, Artificial
  Probe
ttatgtcttcaggttgatattgtcg

SEQ ID NO: 65891 - DNA, 25 bp, Artificial
  Probe
cggtactccaggaagattagatgat

SEQ ID NO: 65892 - DNA, 25 bp, Artificial
  Probe
ttgcttatgtcttcaggttgatatt

SEQ ID NO: 65893 - DNA, 25 bp, Artificial
  Probe
gtgttgcttatgtcttcaggttgat

SEQ ID NO: 65894 - DNA, 25 bp, Artificial
  Probe
atgtgatggttagcgttatctctcc

SEQ ID NO: 65895 - DNA, 25 bp, Artificial
  Probe
ttgtctcaagttagattcctggtcc

SEQ ID NO: 65896 - DNA, 25 bp, Artificial
  Probe
catgtgatggttagcgttatctctc

SEQ ID NO: 65897 - DNA, 25 bp, Artificial
  Probe
gtctcaagttagattcctggtcctg

SEQ ID NO: 65898 - DNA, 25 bp, Artificial
  Probe
tcggtactccaggaagattagatga

SEQ ID NO: 65899 - DNA, 25 bp, Artificial
  Probe
gtcggtactccaggaagattagatg

SEQ ID NO: 65900 - DNA, 25 bp, Artificial
  Probe
tggttagcgttatctctccataatg

SEQ ID NO: 65901 - DNA, 25 bp, Artificial
  Probe
tgtctcaagttagattcctggtcct

SEQ ID NO: 65902 - DNA, 25 bp, Artificial
  Probe
cttcaggttgatattgtcgtcggta

SEQ ID NO: 65903 - DNA, 25 bp, Artificial
  Probe
caggaagattagatgatttggtgtc

SEQ ID NO: 65904 - DNA, 25 bp, Artificial
  Probe
cttatgtcttcaggttgatattgtc

SEQ ID NO: 65905 - DNA, 25 bp, Artificial
  Probe
agcgttatctctccataatgacttt

SEQ ID NO: 65906 - DNA, 25 bp, Artificial
  Probe
gattagatgatttggtgtcaactgg

SEQ ID NO: 65907 - DNA, 25 bp, Artificial
  Probe
tagatgatttggtgtcaactggaaa

SEQ ID NO: 65908 - DNA, 25 bp, Artificial
  Probe
ttagatgatttggtgtcaactggaa

SEQ ID NO: 65909 - DNA, 25 bp, Artificial
  Probe
attagatgatttggtgtcaactgga

SEQ ID NO: 65910 - DNA, 25 bp, Artificial
  Probe
aggaagattagatgatttggtgtca

SEQ ID NO: 65911 - DNA, 25 bp, Artificial
  Probe
tgtcttcaggttgatattgtcgtcg

SEQ ID NO: 65912 - DNA, 25 bp, Artificial
  Probe
agattagatgatttggtgtcaactg

SEQ ID NO: 65913 - DNA, 25 bp, Artificial
  Probe
ggaagattagatgatttggtgtcaa

SEQ ID NO: 65914 - DNA, 25 bp, Artificial
  Probe
ttcaggttgatattgtcgtcggtac

SEQ ID NO: 65915 - DNA, 25 bp, Artificial
  Probe
gttagattcctggtcctggatgaag

SEQ ID NO: 65916 - DNA, 25 bp, Artificial
  Probe
gcgttatctctccataatgacttta

SEQ ID NO: 65917 - DNA, 25 bp, Artificial
  Probe
tctcaagttagattcctggtcctgg

SEQ ID NO: 65918 - DNA, 25 bp, Artificial
  Probe
gttgatattgtcgtcggtactccag

SEQ ID NO: 65919 - DNA, 25 bp, Artificial
  Probe
caggttgatattgtcgtcggtactc

SEQ ID NO: 65920 - DNA, 25 bp, Artificial
  Probe
agatgatttggtgtcaactggaaag

SEQ ID NO: 65921 - DNA, 25 bp, Artificial
  Probe
ggtgttgcttatgtcttcaggttga

SEQ ID NO: 65922 - DNA, 25 bp, Artificial
  Probe
agttagattcctggtcctggatgaa

SEQ ID NO: 65923 - DNA, 25 bp, Artificial
  Probe
aagttagattcctggtcctggatga

SEQ ID NO: 65924 - DNA, 25 bp, Artificial
  Probe
ttatgttgttgttcttactgtgtgt

SEQ ID NO: 65925 - DNA, 25 bp, Artificial
  Probe
atgttgttgttcttactgtgtgtat

SEQ ID NO: 65926 - DNA, 25 bp, Artificial
  Probe
acttatgttgttgttcttactgtgt

SEQ ID NO: 65927 - DNA, 25 bp, Artificial
  Probe
cttatgttgttgttcttactgtgtg

SEQ ID NO: 65928 - DNA, 25 bp, Artificial
  Probe
tgttgttgttcttactgtgtgtata

SEQ ID NO: 65929 - DNA, 25 bp, Artificial
  Probe
tatgttgttgttcttactgtgtgta

SEQ ID NO: 65930 - DNA, 25 bp, Artificial
  Probe
gctacttatgttgttgttcttactg

SEQ ID NO: 65931 - DNA, 25 bp, Artificial
  Probe
cacaagtattccatccaactgctac

SEQ ID NO: 65932 - DNA, 25 bp, Artificial
  Probe
caactgaccacacaagtattccatc

SEQ ID NO: 65933 - DNA, 25 bp, Artificial
  Probe
acaagtattccatccaactgctaca

SEQ ID NO: 65934 - DNA, 25 bp, Artificial
  Probe
acacaagtattccatccaactgcta

SEQ ID NO: 65935 - DNA, 25 bp, Artificial
  Probe
caagtattccatccaactgctacag

SEQ ID NO: 65936 - DNA, 25 bp, Artificial
  Probe
gttgttgttcttactgtgtgtataa

SEQ ID NO: 65937 - DNA, 25 bp, Artificial
  Probe
tacttatgttgttgttcttactgtg

SEQ ID NO: 65938 - DNA, 25 bp, Artificial
  Probe
ctgaccacacaagtattccatccaa

SEQ ID NO: 65939 - DNA, 25 bp, Artificial
  Probe
ctacttatgttgttgttcttactgt

SEQ ID NO: 65940 - DNA, 25 bp, Artificial
  Probe
tgaccacacaagtattccatccaac

SEQ ID NO: 65941 - DNA, 25 bp, Artificial
  Probe
agctacttatgttgttgttcttact

SEQ ID NO: 65942 - DNA, 25 bp, Artificial
  Probe
cagctacttatgttgttgttcttac

SEQ ID NO: 65943 - DNA, 25 bp, Artificial
  Probe
gaccacacaagtattccatccaact

SEQ ID NO: 65944 - DNA, 25 bp, Artificial
  Probe
aactgaccacacaagtattccatcc

SEQ ID NO: 65945 - DNA, 25 bp, Artificial
  Probe
cgcatagtatgtcagcaagaaataa

SEQ ID NO: 65946 - DNA, 25 bp, Artificial
  Probe
gcatttccaagattcagaatagtca

SEQ ID NO: 65947 - DNA, 25 bp, Artificial
  Probe
ccgcatagtatgtcagcaagaaata

SEQ ID NO: 65948 - DNA, 25 bp, Artificial
  Probe
accacacaagtattccatccaactg

SEQ ID NO: 65949 - DNA, 25 bp, Artificial
  Probe
ccaactgaccacacaagtattccat

SEQ ID NO: 65950 - DNA, 25 bp, Artificial
  Probe
acagctacttatgttgttgttctta

SEQ ID NO: 65951 - DNA, 25 bp, Artificial
  Probe
aactaactccacatgaaacttgaaa

SEQ ID NO: 65952 - DNA, 25 bp, Artificial
  Probe
cacacaagtattccatccaactgct

SEQ ID NO: 65953 - DNA, 25 bp, Artificial
  Probe
gacataactaactccacatgaaact

SEQ ID NO: 65954 - DNA, 25 bp, Artificial
  Probe
atgggaaacctaacagctacttatg

SEQ ID NO: 65955 - DNA, 25 bp, Artificial
  Probe
catgggaaacctaacagctacttat

SEQ ID NO: 65956 - DNA, 25 bp, Artificial
  Probe
taactaactccacatgaaacttgaa

SEQ ID NO: 65957 - DNA, 25 bp, Artificial
  Probe
gcatagtatgtcagcaagaaataaa

SEQ ID NO: 65958 - DNA, 25 bp, Artificial
  Probe
acataactaactccacatgaaactt

SEQ ID NO: 65959 - DNA, 25 bp, Artificial
  Probe
taaccaaacagtgggacataactaa

SEQ ID NO: 65960 - DNA, 25 bp, Artificial
  Probe
ataactaactccacatgaaacttga

SEQ ID NO: 65961 - DNA, 25 bp, Artificial
  Probe
gtaaccaaacagtgggacataacta

SEQ ID NO: 65962 - DNA, 25 bp, Artificial
  Probe
aaagtaaccaaacagtgggacataa

SEQ ID NO: 65963 - DNA, 25 bp, Artificial
  Probe
actgaccacacaagtattccatcca

SEQ ID NO: 65964 - DNA, 25 bp, Artificial
  Probe
cataactaactccacatgaaacttg

SEQ ID NO: 65965 - DNA, 25 bp, Artificial
  Probe
tgttgttcttactgtgtgtataaac

SEQ ID NO: 65966 - DNA, 25 bp, Artificial
  Probe
caaacagtgggacataactaactcc

SEQ ID NO: 65967 - DNA, 25 bp, Artificial
  Probe
aaccaaacagtgggacataactaac

SEQ ID NO: 65968 - DNA, 25 bp, Artificial
  Probe
aagtaaccaaacagtgggacataac

SEQ ID NO: 65969 - DNA, 25 bp, Artificial
  Probe
tttaagaagtgagaaatgtgagcgg

SEQ ID NO: 65970 - DNA, 25 bp, Artificial
  Probe
ttaagaagtgagaaatgtgagcggt

SEQ ID NO: 65971 - DNA, 25 bp, Artificial
  Probe
taagaagtgagaaatgtgagcggtg

SEQ ID NO: 65972 - DNA, 25 bp, Artificial
  Probe
ttttaagaagtgagaaatgtgagcg

SEQ ID NO: 65973 - DNA, 25 bp, Artificial
  Probe
gaagtgagaaatgtgagcggtgaag

SEQ ID NO: 65974 - DNA, 25 bp, Artificial
  Probe
agaagtgagaaatgtgagcggtgaa

SEQ ID NO: 65975 - DNA, 25 bp, Artificial
  Probe
aagaagtgagaaatgtgagcggtga

SEQ ID NO: 65976 - DNA, 25 bp, Artificial
  Probe
cctacatcattcgaggtatggcacc

SEQ ID NO: 65977 - DNA, 25 bp, Artificial
  Probe
ggaaaactttgtacagtggagaaaa

SEQ ID NO: 65978 - DNA, 25 bp, Artificial
  Probe
gggaaaactttgtacagtggagaaa

SEQ ID NO: 65979 - DNA, 25 bp, Artificial
  Probe
gaaaactttgtacagtggagaaaat

SEQ ID NO: 65980 - DNA, 25 bp, Artificial
  Probe
ccctacatcattcgaggtatggcac

SEQ ID NO: 65981 - DNA, 25 bp, Artificial
  Probe
tgggaaaactttgtacagtggagaa

SEQ ID NO: 65982 - DNA, 25 bp, Artificial
  Probe
ctacatcattcgaggtatggcaccc

SEQ ID NO: 65983 - DNA, 25 bp, Artificial
  Probe
aaaactttgtacagtggagaaaata

SEQ ID NO: 65984 - DNA, 25 bp, Artificial
  Probe
ctgggaaaactttgtacagtggaga

SEQ ID NO: 65985 - DNA, 25 bp, Artificial
  Probe
ctcgctgcctccctgtaaatatttt

SEQ ID NO: 65986 - DNA, 25 bp, Artificial
  Probe
cctcgctgcctccctgtaaatattt

SEQ ID NO: 65987 - DNA, 25 bp, Artificial
  Probe
aactttgtacagtggagaaaatatt

SEQ ID NO: 65988 - DNA, 25 bp, Artificial
  Probe
aaactttgtacagtggagaaaatat

SEQ ID NO: 65989 - DNA, 25 bp, Artificial
  Probe
actttgtacagtggagaaaatattt

SEQ ID NO: 65990 - DNA, 25 bp, Artificial
  Probe
gaagaccagcaagtactacctgcac

SEQ ID NO: 65991 - DNA, 25 bp, Artificial
  Probe
gctgggaaaactttgtacagtggag

SEQ ID NO: 65992 - DNA, 25 bp, Artificial
  Probe
ctggaagaccagcaagtactacctg

SEQ ID NO: 65993 - DNA, 25 bp, Artificial
  Probe
ctttgtacagtggagaaaatattta

SEQ ID NO: 65994 - DNA, 25 bp, Artificial
  Probe
ctccctgtacaacatggacatgttt

SEQ ID NO: 65995 - DNA, 25 bp, Artificial
  Probe
cctgtacaacatggacatgttttat

SEQ ID NO: 65996 - DNA, 25 bp, Artificial
  Probe
ccctgtacaacatggacatgtttta

SEQ ID NO: 65997 - DNA, 25 bp, Artificial
  Probe
tgtacaacatggacatgttttattc

SEQ ID NO: 65998 - DNA, 25 bp, Artificial
  Probe
ctgtacaacatggacatgttttatt

SEQ ID NO: 65999 - DNA, 25 bp, Artificial
  Probe
tccctgtacaacatggacatgtttt

SEQ ID NO: 66000 - DNA, 25 bp, Artificial
  Probe
cctccctgtacaacatggacatgtt

SEQ ID NO: 66001 - DNA, 25 bp, Artificial
  Probe
ggaggattggtgttattgaagagtt

SEQ ID NO: 66002 - DNA, 25 bp, Artificial
  Probe
ctatgacagactaccaataaagcga

SEQ ID NO: 66003 - DNA, 25 bp, Artificial
  Probe
agcctatgacagactaccaataaag

SEQ ID NO: 66004 - DNA, 25 bp, Artificial
  Probe
tatgacagactaccaataaagcgat

SEQ ID NO: 66005 - DNA, 25 bp, Artificial
  Probe
aagcctatgacagactaccaataaa

SEQ ID NO: 66006 - DNA, 25 bp, Artificial
  Probe
aaagcctatgacagactaccaataa

SEQ ID NO: 66007 - DNA, 25 bp, Artificial
  Probe
ataaagcctatgacagactaccaat

SEQ ID NO: 66008 - DNA, 25 bp, Artificial
  Probe
aactaaagtaggaaatgacagagca

SEQ ID NO: 66009 - DNA, 25 bp, Artificial
  Probe
gaggattggtgttattgaagagttt

SEQ ID NO: 66010 - DNA, 25 bp, Artificial
  Probe
actaaagtaggaaatgacagagcac

SEQ ID NO: 66011 - DNA, 25 bp, Artificial
  Probe
gaactaaagtaggaaatgacagagc

SEQ ID NO: 66012 - DNA, 25 bp, Artificial
  Probe
gcaagaactaaagtaggaaatgaca

SEQ ID NO: 66013 - DNA, 25 bp, Artificial
  Probe
cctatgacagactaccaataaagcg

SEQ ID NO: 66014 - DNA, 25 bp, Artificial
  Probe
gcctatgacagactaccaataaagc

SEQ ID NO: 66015 - DNA, 25 bp, Artificial
  Probe
agcaagaactaaagtaggaaatgac

SEQ ID NO: 66016 - DNA, 25 bp, Artificial
  Probe
taaagcctatgacagactaccaata

SEQ ID NO: 66017 - DNA, 25 bp, Artificial
  Probe
tataaagcctatgacagactaccaa

SEQ ID NO: 66018 - DNA, 25 bp, Artificial
  Probe
ctaaagtaggaaatgacagagcact

SEQ ID NO: 66019 - DNA, 25 bp, Artificial
  Probe
atataaagcctatgacagactacca

SEQ ID NO: 66020 - DNA, 25 bp, Artificial
  Probe
cagaccttagggatggagactttaa

SEQ ID NO: 66021 - DNA, 25 bp, Artificial
  Probe
taaagtaggaaatgacagagcactc

SEQ ID NO: 66022 - DNA, 25 bp, Artificial
  Probe
atctgggaggattggtgttattgaa

SEQ ID NO: 66023 - DNA, 25 bp, Artificial
  Probe
atgacagactaccaataaagcgatc

SEQ ID NO: 66024 - DNA, 25 bp, Artificial
  Probe
aagcaagaactaaagtaggaaatga

SEQ ID NO: 66025 - DNA, 25 bp, Artificial
  Probe
agcatacctcagacacagaccttag

SEQ ID NO: 66026 - DNA, 25 bp, Artificial
  Probe
ataaagcgatcttctaacccttcaa

SEQ ID NO: 66027 - DNA, 25 bp, Artificial
  Probe
aataaagcgatcttctaacccttca

SEQ ID NO: 66028 - DNA, 25 bp, Artificial
  Probe
taaagcgatcttctaacccttcaaa

SEQ ID NO: 66029 - DNA, 25 bp, Artificial
  Probe
caataaagcgatcttctaacccttc

SEQ ID NO: 66030 - DNA, 25 bp, Artificial
  Probe
taccaataaagcgatcttctaaccc

SEQ ID NO: 66031 - DNA, 25 bp, Artificial
  Probe
ctaccaataaagcgatcttctaacc

SEQ ID NO: 66032 - DNA, 25 bp, Artificial
  Probe
cagactaccaataaagcgatcttct

SEQ ID NO: 66033 - DNA, 25 bp, Artificial
  Probe
ccaataaagcgatcttctaaccctt

SEQ ID NO: 66034 - DNA, 25 bp, Artificial
  Probe
acagactaccaataaagcgatcttc

SEQ ID NO: 66035 - DNA, 25 bp, Artificial
  Probe
gacagactaccaataaagcgatctt

SEQ ID NO: 66036 - DNA, 25 bp, Artificial
  Probe
ctcataagcaagaactaaagtagga

SEQ ID NO: 66037 - DNA, 25 bp, Artificial
  Probe
agactaccaataaagcgatcttcta

SEQ ID NO: 66038 - DNA, 25 bp, Artificial
  Probe
cagcatacctcagacacagacctta

SEQ ID NO: 66039 - DNA, 25 bp, Artificial
  Probe
agaactaaagtaggaaatgacagag

SEQ ID NO: 66040 - DNA, 25 bp, Artificial
  Probe
gggaggattggtgttattgaagagt

SEQ ID NO: 66041 - DNA, 25 bp, Artificial
  Probe
tgggaggattggtgttattgaagag

SEQ ID NO: 66042 - DNA, 25 bp, Artificial
  Probe
ctgggaggattggtgttattgaaga

SEQ ID NO: 66043 - DNA, 25 bp, Artificial
  Probe
tctgggaggattggtgttattgaag

SEQ ID NO: 66044 - DNA, 25 bp, Artificial
  Probe
actaccaataaagcgatcttctaac

SEQ ID NO: 66045 - DNA, 25 bp, Artificial
  Probe
gactaccaataaagcgatcttctaa

SEQ ID NO: 66046 - DNA, 25 bp, Artificial
  Probe
gctccatcacacattattccattag

SEQ ID NO: 66047 - DNA, 25 bp, Artificial
  Probe
tgctccatcacacattattccatta

SEQ ID NO: 66048 - DNA, 25 bp, Artificial
  Probe
ccatcacacattattccattagtca

SEQ ID NO: 66049 - DNA, 25 bp, Artificial
  Probe
tccatcacacattattccattagtc

SEQ ID NO: 66050 - DNA, 25 bp, Artificial
  Probe
ctccatcacacattattccattagt

SEQ ID NO: 66051 - DNA, 25 bp, Artificial
  Probe
ctgctccatcacacattattccatt

SEQ ID NO: 66052 - DNA, 25 bp, Artificial
  Probe
atctagttctaagaagaggtctgct

SEQ ID NO: 66053 - DNA, 25 bp, Artificial
  Probe
catctagttctaagaagaggtctgc

SEQ ID NO: 66054 - DNA, 25 bp, Artificial
  Probe
gcatctagttctaagaagaggtctg

SEQ ID NO: 66055 - DNA, 25 bp, Artificial
  Probe
agcatctagttctaagaagaggtct

SEQ ID NO: 66056 - DNA, 25 bp, Artificial
  Probe
cagcatctagttctaagaagaggtc

SEQ ID NO: 66057 - DNA, 25 bp, Artificial
  Probe
tctagttctaagaagaggtctgctt

SEQ ID NO: 66058 - DNA, 25 bp, Artificial
  Probe
tcagcatctagttctaagaagaggt

SEQ ID NO: 66059 - DNA, 25 bp, Artificial
  Probe
cagactcagcatctagttctaagaa

SEQ ID NO: 66060 - DNA, 25 bp, Artificial
  Probe
tatatgtctgtgttcatgtgtgtgt

SEQ ID NO: 66061 - DNA, 25 bp, Artificial
  Probe
gtatatgtctgtgttcatgtgtgtg

SEQ ID NO: 66062 - DNA, 25 bp, Artificial
  Probe
tgtatatgtctgtgttcatgtgtgt

SEQ ID NO: 66063 - DNA, 25 bp, Artificial
  Probe
acacattattccattagtcagaaca

SEQ ID NO: 66064 - DNA, 25 bp, Artificial
  Probe
gactcagcatctagttctaagaaga

SEQ ID NO: 66065 - DNA, 25 bp, Artificial
  Probe
agactcagcatctagttctaagaag

SEQ ID NO: 66066 - DNA, 25 bp, Artificial
  Probe
ctcagcatctagttctaagaagagg

SEQ ID NO: 66067 - DNA, 25 bp, Artificial
  Probe
ttgtatatgtctgtgttcatgtgtg

SEQ ID NO: 66068 - DNA, 25 bp, Artificial
  Probe
actcagcatctagttctaagaagag

SEQ ID NO: 66069 - DNA, 25 bp, Artificial
  Probe
cacacattattccattagtcagaac

SEQ ID NO: 66070 - DNA, 25 bp, Artificial
  Probe
tcacacattattccattagtcagaa

SEQ ID NO: 66071 - DNA, 25 bp, Artificial
  Probe
atcacacattattccattagtcaga

SEQ ID NO: 66072 - DNA, 25 bp, Artificial
  Probe
catcacacattattccattagtcag

SEQ ID NO: 66073 - DNA, 25 bp, Artificial
  Probe
atatgtctgtgttcatgtgtgtgtc

SEQ ID NO: 66074 - DNA, 25 bp, Artificial
  Probe
gcagactcagcatctagttctaaga

SEQ ID NO: 66075 - DNA, 25 bp, Artificial
  Probe
cccttgttctttgattaccctactt

SEQ ID NO: 66076 - DNA, 25 bp, Artificial
  Probe
ggtttgactacttcttccttctttc

SEQ ID NO: 66077 - DNA, 25 bp, Artificial
  Probe
atcccttgttctttgattaccctac

SEQ ID NO: 66078 - DNA, 25 bp, Artificial
  Probe
gtatcccttgttctttgattaccct

SEQ ID NO: 66079 - DNA, 25 bp, Artificial
  Probe
agtatcccttgttctttgattaccc

SEQ ID NO: 66080 - DNA, 25 bp, Artificial
  Probe
ccttgttctttgattaccctacttc

SEQ ID NO: 66081 - DNA, 25 bp, Artificial
  Probe
tgactacttcttccttctttcttga

SEQ ID NO: 66082 - DNA, 25 bp, Artificial
  Probe
cctgctccatcacacattattccat

SEQ ID NO: 66083 - DNA, 25 bp, Artificial
  Probe
cacattattccattagtcagaacat

SEQ ID NO: 66084 - DNA, 25 bp, Artificial
  Probe
tcccttgttctttgattaccctact

SEQ ID NO: 66085 - DNA, 25 bp, Artificial
  Probe
tatcccttgttctttgattacccta

SEQ ID NO: 66086 - DNA, 25 bp, Artificial
  Probe
ttgactacttcttccttctttcttg

SEQ ID NO: 66087 - DNA, 25 bp, Artificial
  Probe
gtttgactacttcttccttctttct

SEQ ID NO: 66088 - DNA, 25 bp, Artificial
  Probe
aactcatctttccatatttctcctg

SEQ ID NO: 66089 - DNA, 25 bp, Artificial
  Probe
acttcttccttctttcttgaatgtt

SEQ ID NO: 66090 - DNA, 25 bp, Artificial
  Probe
ctagttctaagaagaggtctgcttt

SEQ ID NO: 66091 - DNA, 25 bp, Artificial
  Probe
agaacccagtggacatcctcatcat

SEQ ID NO: 66092 - DNA, 25 bp, Artificial
  Probe
gaacccagtggacatcctcatcatg

SEQ ID NO: 66093 - DNA, 25 bp, Artificial
  Probe
cagtcatgagaacccagtggacatc

SEQ ID NO: 66094 - DNA, 25 bp, Artificial
  Probe
tacatctgcactgagtgtggcaaaa

SEQ ID NO: 66095 - DNA, 25 bp, Artificial
  Probe
gaatagattctggtatctcagcctc

SEQ ID NO: 66096 - DNA, 25 bp, Artificial
  Probe
aatagattctggtatctcagcctct

SEQ ID NO: 66097 - DNA, 25 bp, Artificial
  Probe
atagattctggtatctcagcctctc

SEQ ID NO: 66098 - DNA, 25 bp, Artificial
  Probe
ggaatagattctggtatctcagcct

SEQ ID NO: 66099 - DNA, 25 bp, Artificial
  Probe
tagattctggtatctcagcctctca

SEQ ID NO: 66100 - DNA, 25 bp, Artificial
  Probe
tgatgacataagcccttggaagaaa

SEQ ID NO: 66101 - DNA, 25 bp, Artificial
  Probe
ttgatgacataagcccttggaagaa

SEQ ID NO: 66102 - DNA, 25 bp, Artificial
  Probe
tgagacaatcctgaatggagaattt

SEQ ID NO: 66103 - DNA, 25 bp, Artificial
  Probe
aatttacaagggaatagattctggt

SEQ ID NO: 66104 - DNA, 25 bp, Artificial
  Probe
gttgatgacataagcccttggaaga

SEQ ID NO: 66105 - DNA, 25 bp, Artificial
  Probe
ttacaagggaatagattctggtatc

SEQ ID NO: 66106 - DNA, 25 bp, Artificial
  Probe
cctccttggttccttctgaatgttt

SEQ ID NO: 66107 - DNA, 25 bp, Artificial
  Probe
agattctggtatctcagcctctcag

SEQ ID NO: 66108 - DNA, 25 bp, Artificial
  Probe
caagggaatagattctggtatctca

SEQ ID NO: 66109 - DNA, 25 bp, Artificial
  Probe
acaagggaatagattctggtatctc

SEQ ID NO: 66110 - DNA, 25 bp, Artificial
  Probe
ttaaagaggcaactcccaaatttac

SEQ ID NO: 66111 - DNA, 25 bp, Artificial
  Probe
aagggaatagattctggtatctcag

SEQ ID NO: 66112 - DNA, 25 bp, Artificial
  Probe
taaagaggcaactcccaaatttaca

SEQ ID NO: 66113 - DNA, 25 bp, Artificial
  Probe
agggaatagattctggtatctcagc

SEQ ID NO: 66114 - DNA, 25 bp, Artificial
  Probe
tttaaagaggcaactcccaaattta

SEQ ID NO: 66115 - DNA, 25 bp, Artificial
  Probe
tttacaagggaatagattctggtat

SEQ ID NO: 66116 - DNA, 25 bp, Artificial
  Probe
atttacaagggaatagattctggta

SEQ ID NO: 66117 - DNA, 25 bp, Artificial
  Probe
cttcctgttgatgacataagccctt

SEQ ID NO: 66118 - DNA, 25 bp, Artificial
  Probe
tacctgaaaagcaaaagaaatgtgt

SEQ ID NO: 66119 - DNA, 25 bp, Artificial
  Probe
aaagaggcaactcccaaatttacaa

SEQ ID NO: 66120 - DNA, 25 bp, Artificial
  Probe
aaaagcaaaagaaatgtgtcaagtc

SEQ ID NO: 66121 - DNA, 25 bp, Artificial
  Probe
gaaaagcaaaagaaatgtgtcaagt

SEQ ID NO: 66122 - DNA, 25 bp, Artificial
  Probe
aaagcaaaagaaatgtgtcaagtcc

SEQ ID NO: 66123 - DNA, 25 bp, Artificial
  Probe
acctgaaaagcaaaagaaatgtgtc

SEQ ID NO: 66124 - DNA, 25 bp, Artificial
  Probe
tacaagggaatagattctggtatct

SEQ ID NO: 66125 - DNA, 25 bp, Artificial
  Probe
aagaggcaactcccaaatttacaag

SEQ ID NO: 66126 - DNA, 25 bp, Artificial
  Probe
gatgacataagcccttggaagaaaa

SEQ ID NO: 66127 - DNA, 25 bp, Artificial
  Probe
tgttgatgacataagcccttggaag

SEQ ID NO: 66128 - DNA, 25 bp, Artificial
  Probe
ctgttgatgacataagcccttggaa

SEQ ID NO: 66129 - DNA, 25 bp, Artificial
  Probe
ttcctgttgatgacataagcccttg

SEQ ID NO: 66130 - DNA, 25 bp, Artificial
  Probe
ataagcccttggaagaaaagagaac

SEQ ID NO: 66131 - DNA, 25 bp, Artificial
  Probe
cataagcccttggaagaaaagagaa

SEQ ID NO: 66132 - DNA, 25 bp, Artificial
  Probe
gggaatagattctggtatctcagcc

SEQ ID NO: 66133 - DNA, 25 bp, Artificial
  Probe
atgacataagcccttggaagaaaag

SEQ ID NO: 66134 - DNA, 25 bp, Artificial
  Probe
tgaaaagcaaaagaaatgtgtcaag

SEQ ID NO: 66135 - DNA, 25 bp, Artificial
  Probe
ctgaaaagcaaaagaaatgtgtcaa

SEQ ID NO: 66136 - DNA, 25 bp, Artificial
  Probe
tgtacctgaaaagcaaaagaaatgt

SEQ ID NO: 66137 - DNA, 25 bp, Artificial
  Probe
cctgtacctgaaaagcaaaagaaat

SEQ ID NO: 66138 - DNA, 25 bp, Artificial
  Probe
gtacctgaaaagcaaaagaaatgtg

SEQ ID NO: 66139 - DNA, 25 bp, Artificial
  Probe
ggagaattttcacacacccctttaa

SEQ ID NO: 66140 - DNA, 25 bp, Artificial
  Probe
aatagtgtatctcgtggaatcagtg

SEQ ID NO: 66141 - DNA, 25 bp, Artificial
  Probe
atagtgtatctcgtggaatcagtgg

SEQ ID NO: 66142 - DNA, 25 bp, Artificial
  Probe
tgtatctcgtggaatcagtggttag

SEQ ID NO: 66143 - DNA, 25 bp, Artificial
  Probe
gtgtatctcgtggaatcagtggtta

SEQ ID NO: 66144 - DNA, 25 bp, Artificial
  Probe
tagtgtatctcgtggaatcagtggt

SEQ ID NO: 66145 - DNA, 25 bp, Artificial
  Probe
aaatagtgtatctcgtggaatcagt

SEQ ID NO: 66146 - DNA, 25 bp, Artificial
  Probe
caaatagtgtatctcgtggaatcag

SEQ ID NO: 66147 - DNA, 25 bp, Artificial
  Probe
gtatctcgtggaatcagtggttagc

SEQ ID NO: 66148 - DNA, 25 bp, Artificial
  Probe
tttctgtcaaactgtaagagtagga

SEQ ID NO: 66149 - DNA, 25 bp, Artificial
  Probe
tatctcgtggaatcagtggttagca

SEQ ID NO: 66150 - DNA, 25 bp, Artificial
  Probe
ttaatttctttcaccatgctgtctc

SEQ ID NO: 66151 - DNA, 25 bp, Artificial
  Probe
gttaatttctttcaccatgctgtct

SEQ ID NO: 66152 - DNA, 25 bp, Artificial
  Probe
tgttaatttctttcaccatgctgtc

SEQ ID NO: 66153 - DNA, 25 bp, Artificial
  Probe
ttgacaaatagtgtatctcgtggaa

SEQ ID NO: 66154 - DNA, 25 bp, Artificial
  Probe
acaaatagtgtatctcgtggaatca

SEQ ID NO: 66155 - DNA, 25 bp, Artificial
  Probe
tgacaaatagtgtatctcgtggaat

SEQ ID NO: 66156 - DNA, 25 bp, Artificial
  Probe
agtgtatctcgtggaatcagtggtt

SEQ ID NO: 66157 - DNA, 25 bp, Artificial
  Probe
taatttctttcaccatgctgtctca

SEQ ID NO: 66158 - DNA, 25 bp, Artificial
  Probe
gacaaatagtgtatctcgtggaatc

SEQ ID NO: 66159 - DNA, 25 bp, Artificial
  Probe
atgttaatttctttcaccatgctgt

SEQ ID NO: 66160 - DNA, 25 bp, Artificial
  Probe
ttctgtcaaactgtaagagtaggac

SEQ ID NO: 66161 - DNA, 25 bp, Artificial
  Probe
ttcatttctgtcaaactgtaagagt

SEQ ID NO: 66162 - DNA, 25 bp, Artificial
  Probe
atttctgtcaaactgtaagagtagg

SEQ ID NO: 66163 - DNA, 25 bp, Artificial
  Probe
tctgtcaaactgtaagagtaggact

SEQ ID NO: 66164 - DNA, 25 bp, Artificial
  Probe
tttgacaaatagtgtatctcgtgga

SEQ ID NO: 66165 - DNA, 25 bp, Artificial
  Probe
catgtcacaagtctcagatcattta

SEQ ID NO: 66166 - DNA, 25 bp, Artificial
  Probe
gcatgtcacaagtctcagatcattt

SEQ ID NO: 66167 - DNA, 25 bp, Artificial
  Probe
tcatttctgtcaaactgtaagagta

SEQ ID NO: 66168 - DNA, 25 bp, Artificial
  Probe
tgcatgtcacaagtctcagatcatt

SEQ ID NO: 66169 - DNA, 25 bp, Artificial
  Probe
attcatttctgtcaaactgtaagag

SEQ ID NO: 66170 - DNA, 25 bp, Artificial
  Probe
atgtcacaagtctcagatcatttat

SEQ ID NO: 66171 - DNA, 25 bp, Artificial
  Probe
ttgcatgtcacaagtctcagatcat

SEQ ID NO: 66172 - DNA, 25 bp, Artificial
  Probe
catttctgtcaaactgtaagagtag

SEQ ID NO: 66173 - DNA, 25 bp, Artificial
  Probe
tatgttaatttctttcaccatgctg

SEQ ID NO: 66174 - DNA, 25 bp, Artificial
  Probe
cgaggtttactgtgcaatttacttt

SEQ ID NO: 66175 - DNA, 25 bp, Artificial
  Probe
cgatactctgtagctgtgtaagttt

SEQ ID NO: 66176 - DNA, 25 bp, Artificial
  Probe
tttggacattgagaacttgaaatta

SEQ ID NO: 66177 - DNA, 25 bp, Artificial
  Probe
ctatgttaatttctttcaccatgct

SEQ ID NO: 66178 - DNA, 25 bp, Artificial
  Probe
tctatgttaatttctttcaccatgc

SEQ ID NO: 66179 - DNA, 25 bp, Artificial
  Probe
tggacattgagaacttgaaattatt

SEQ ID NO: 66180 - DNA, 25 bp, Artificial
  Probe
ttggacattgagaacttgaaattat

SEQ ID NO: 66181 - DNA, 25 bp, Artificial
  Probe
tgtcacaagtctcagatcatttata

SEQ ID NO: 66182 - DNA, 25 bp, Artificial
  Probe
acgaggtttactgtgcaatttactt

SEQ ID NO: 66183 - DNA, 25 bp, Artificial
  Probe
aatttctttcaccatgctgtctcag

SEQ ID NO: 66184 - DNA, 25 bp, Artificial
  Probe
aattcatttctgtcaaactgtaaga

SEQ ID NO: 66185 - DNA, 25 bp, Artificial
  Probe
attcctcttgtgacttacttccatt

SEQ ID NO: 66186 - DNA, 25 bp, Artificial
  Probe
cattcctcttgtgacttacttccat

SEQ ID NO: 66187 - DNA, 25 bp, Artificial
  Probe
aatagatgaaccaagcactccttac

SEQ ID NO: 66188 - DNA, 25 bp, Artificial
  Probe
tcattcctcttgtgacttacttcca

SEQ ID NO: 66189 - DNA, 25 bp, Artificial
  Probe
caagacctctacgacttcctctatg

SEQ ID NO: 66190 - DNA, 25 bp, Artificial
  Probe
ttgaagaacaagacctctacgactt

SEQ ID NO: 66191 - DNA, 25 bp, Artificial
  Probe
atagatgaaccaagcactccttacc

SEQ ID NO: 66192 - DNA, 25 bp, Artificial
  Probe
acaagacctctacgacttcctctat

SEQ ID NO: 66193 - DNA, 25 bp, Artificial
  Probe
aacaagacctctacgacttcctcta

SEQ ID NO: 66194 - DNA, 25 bp, Artificial
  Probe
atgaaccaagcactccttaccatag

SEQ ID NO: 66195 - DNA, 25 bp, Artificial
  Probe
gatgaaccaagcactccttaccata

SEQ ID NO: 66196 - DNA, 25 bp, Artificial
  Probe
ttcctcttgtgacttacttccattt

SEQ ID NO: 66197 - DNA, 25 bp, Artificial
  Probe
gtatcatccagcagacaaagactat

SEQ ID NO: 66198 - DNA, 25 bp, Artificial
  Probe
aagacctctacgacttcctctatgg

SEQ ID NO: 66199 - DNA, 25 bp, Artificial
  Probe
aaatagatgaaccaagcactcctta

SEQ ID NO: 66200 - DNA, 25 bp, Artificial
  Probe
gcagacaaagactatggtttaatga

SEQ ID NO: 66201 - DNA, 25 bp, Artificial
  Probe
agcagacaaagactatggtttaatg

SEQ ID NO: 66202 - DNA, 25 bp, Artificial
  Probe
cagcagacaaagactatggtttaat

SEQ ID NO: 66203 - DNA, 25 bp, Artificial
  Probe
tatcatccagcagacaaagactatg

SEQ ID NO: 66204 - DNA, 25 bp, Artificial
  Probe
attgtagatttgttattggagcact

SEQ ID NO: 66205 - DNA, 25 bp, Artificial
  Probe
tagatgaaccaagcactccttacca

SEQ ID NO: 66206 - DNA, 25 bp, Artificial
  Probe
ttgtagatttgttattggagcacta

SEQ ID NO: 66207 - DNA, 25 bp, Artificial
  Probe
tgtagatttgttattggagcactag

SEQ ID NO: 66208 - DNA, 25 bp, Artificial
  Probe
gaacaagacctctacgacttcctct

SEQ ID NO: 66209 - DNA, 25 bp, Artificial
  Probe
agtgaagtcagtaacaaatctacaa

SEQ ID NO: 66210 - DNA, 25 bp, Artificial
  Probe
tatgaacgtctggataacagcctat

SEQ ID NO: 66211 - DNA, 25 bp, Artificial
  Probe
atatgaacgtctggataacagccta

SEQ ID NO: 66212 - DNA, 25 bp, Artificial
  Probe
tggataacagcctatttgaatttgt

SEQ ID NO: 66213 - DNA, 25 bp, Artificial
  Probe
cgtatcatccagcagacaaagacta

SEQ ID NO: 66214 - DNA, 25 bp, Artificial
  Probe
gtctggataacagcctatttgaatt

SEQ ID NO: 66215 - DNA, 25 bp, Artificial
  Probe
cgtctggataacagcctatttgaat

SEQ ID NO: 66216 - DNA, 25 bp, Artificial
  Probe
agatgaaccaagcactccttaccat

SEQ ID NO: 66217 - DNA, 25 bp, Artificial
  Probe
atgaacgtctggataacagcctatt

SEQ ID NO: 66218 - DNA, 25 bp, Artificial
  Probe
ctggataacagcctatttgaatttg

SEQ ID NO: 66219 - DNA, 25 bp, Artificial
  Probe
tctggataacagcctatttgaattt

SEQ ID NO: 66220 - DNA, 25 bp, Artificial
  Probe
tattgtagatttgttattggagcac

SEQ ID NO: 66221 - DNA, 25 bp, Artificial
  Probe
tagtgaagtcagtaacaaatctaca

SEQ ID NO: 66222 - DNA, 25 bp, Artificial
  Probe
cagacaaagactatggtttaatgaa

SEQ ID NO: 66223 - DNA, 25 bp, Artificial
  Probe
ccagcagacaaagactatggtttaa

SEQ ID NO: 66224 - DNA, 25 bp, Artificial
  Probe
gtgaagtcagtaacaaatctacaat

SEQ ID NO: 66225 - DNA, 25 bp, Artificial
  Probe
tccagcagacaaagactatggttta

SEQ ID NO: 66226 - DNA, 25 bp, Artificial
  Probe
gacctctacgacttcctctatggtg

SEQ ID NO: 66227 - DNA, 25 bp, Artificial
  Probe
ctagtgaagtcagtaacaaatctac

SEQ ID NO: 66228 - DNA, 25 bp, Artificial
  Probe
ttattgtagatttgttattggagca

SEQ ID NO: 66229 - DNA, 25 bp, Artificial
  Probe
cctcttgtgacttacttccattttg

SEQ ID NO: 66230 - DNA, 25 bp, Artificial
  Probe
ctctctctgtgactcttatcctgaa

SEQ ID NO: 66231 - DNA, 25 bp, Artificial
  Probe
tctctgtgactcttatcctgaactc

SEQ ID NO: 66232 - DNA, 25 bp, Artificial
  Probe
ctctctgtgactcttatcctgaact

SEQ ID NO: 66233 - DNA, 25 bp, Artificial
  Probe
tctctctgtgactcttatcctgaac

SEQ ID NO: 66234 - DNA, 25 bp, Artificial
  Probe
ctctgtgactcttatcctgaactca

SEQ ID NO: 66235 - DNA, 25 bp, Artificial
  Probe
tatcctgaactcactggagaagata

SEQ ID NO: 66236 - DNA, 25 bp, Artificial
  Probe
atcctgaactcactggagaagatat

SEQ ID NO: 66237 - DNA, 25 bp, Artificial
  Probe
ttatcctgaactcactggagaagat

SEQ ID NO: 66238 - DNA, 25 bp, Artificial
  Probe
cttatcctgaactcactggagaaga

SEQ ID NO: 66239 - DNA, 25 bp, Artificial
  Probe
tcttatcctgaactcactggagaag

SEQ ID NO: 66240 - DNA, 25 bp, Artificial
  Probe
ctcttatcctgaactcactggagaa

SEQ ID NO: 66241 - DNA, 25 bp, Artificial
  Probe
gctctctctgtgactcttatcctga

SEQ ID NO: 66242 - DNA, 25 bp, Artificial
  Probe
gactcttatcctgaactcactggag

SEQ ID NO: 66243 - DNA, 25 bp, Artificial
  Probe
actcttatcctgaactcactggaga

SEQ ID NO: 66244 - DNA, 25 bp, Artificial
  Probe
ctgaactcactggagaagatatcaa

SEQ ID NO: 66245 - DNA, 25 bp, Artificial
  Probe
tgaactcactggagaagatatcaat

SEQ ID NO: 66246 - DNA, 25 bp, Artificial
  Probe
tgactcttatcctgaactcactgga

SEQ ID NO: 66247 - DNA, 25 bp, Artificial
  Probe
cctgaactcactggagaagatatca

SEQ ID NO: 66248 - DNA, 25 bp, Artificial
  Probe
actcactggagaagatatcaattcc

SEQ ID NO: 66249 - DNA, 25 bp, Artificial
  Probe
aactcactggagaagatatcaattc

SEQ ID NO: 66250 - DNA, 25 bp, Artificial
  Probe
gaactcactggagaagatatcaatt

SEQ ID NO: 66251 - DNA, 25 bp, Artificial
  Probe
agctctctctgtgactcttatcctg

SEQ ID NO: 66252 - DNA, 25 bp, Artificial
  Probe
tcctgaactcactggagaagatatc

SEQ ID NO: 66253 - DNA, 25 bp, Artificial
  Probe
aatgaaagctcaacatctgtggatt

SEQ ID NO: 66254 - DNA, 25 bp, Artificial
  Probe
aaatgaaagctcaacatctgtggat

SEQ ID NO: 66255 - DNA, 25 bp, Artificial
  Probe
aaatactgactcacctagatatggt

SEQ ID NO: 66256 - DNA, 25 bp, Artificial
  Probe
agaagatatcaattccctcaatccc

SEQ ID NO: 66257 - DNA, 25 bp, Artificial
  Probe
cagctctctctgtgactcttatcct

SEQ ID NO: 66258 - DNA, 25 bp, Artificial
  Probe
gatatcaattccctcaatcccgaaa

SEQ ID NO: 66259 - DNA, 25 bp, Artificial
  Probe
atgaaagctcaacatctgtggattc

SEQ ID NO: 66260 - DNA, 25 bp, Artificial
  Probe
gaagatatcaattccctcaatcccg

SEQ ID NO: 66261 - DNA, 25 bp, Artificial
  Probe
aagatatcaattccctcaatcccga

SEQ ID NO: 66262 - DNA, 25 bp, Artificial
  Probe
aagctcaacatctgtggattccaat

SEQ ID NO: 66263 - DNA, 25 bp, Artificial
  Probe
agatatcaattccctcaatcccgaa

SEQ ID NO: 66264 - DNA, 25 bp, Artificial
  Probe
ctcaacatctgtggattccaatggt

SEQ ID NO: 66265 - DNA, 25 bp, Artificial
  Probe
gagaagatatcaattccctcaatcc

SEQ ID NO: 66266 - DNA, 25 bp, Artificial
  Probe
tatcaattccctcaatcccgaaaat

SEQ ID NO: 66267 - DNA, 25 bp, Artificial
  Probe
atatcaattccctcaatcccgaaaa

SEQ ID NO: 66268 - DNA, 25 bp, Artificial
  Probe
tcaacatctgtggattccaatggtg

SEQ ID NO: 66269 - DNA, 25 bp, Artificial
  Probe
ctggagaagatatcaattccctcaa

SEQ ID NO: 66270 - DNA, 25 bp, Artificial
  Probe
cactggagaagatatcaattccctc

SEQ ID NO: 66271 - DNA, 25 bp, Artificial
  Probe
ctcactggagaagatatcaattccc

SEQ ID NO: 66272 - DNA, 25 bp, Artificial
  Probe
actggagaagatatcaattccctca

SEQ ID NO: 66273 - DNA, 25 bp, Artificial
  Probe
tcactggagaagatatcaattccct

SEQ ID NO: 66274 - DNA, 25 bp, Artificial
  Probe
tggagaagatatcaattccctcaat

SEQ ID NO: 66275 - DNA, 25 bp, Artificial
  Probe
gtggagaactttactgctaggattt

SEQ ID NO: 66276 - DNA, 25 bp, Artificial
  Probe
agaactttactgctaggatttccaa

SEQ ID NO: 66277 - DNA, 25 bp, Artificial
  Probe
gagaactttactgctaggatttcca

SEQ ID NO: 66278 - DNA, 25 bp, Artificial
  Probe
tggagaactttactgctaggatttc

SEQ ID NO: 66279 - DNA, 25 bp, Artificial
  Probe
ggctgagagggtcaatctatttatg

SEQ ID NO: 66280 - DNA, 25 bp, Artificial
  Probe
gaactttactgctaggatttccaat

SEQ ID NO: 66281 - DNA, 25 bp, Artificial
  Probe
tggctgagagggtcaatctatttat

SEQ ID NO: 66282 - DNA, 25 bp, Artificial
  Probe
aactttactgctaggatttccaatt

SEQ ID NO: 66283 - DNA, 25 bp, Artificial
  Probe
tgtggagaactttactgctaggatt

SEQ ID NO: 66284 - DNA, 25 bp, Artificial
  Probe
ttggctgagagggtcaatctattta

SEQ ID NO: 66285 - DNA, 25 bp, Artificial
  Probe
gctgagagggtcaatctatttatgc

SEQ ID NO: 66286 - DNA, 25 bp, Artificial
  Probe
tttggctgagagggtcaatctattt

SEQ ID NO: 66287 - DNA, 25 bp, Artificial
  Probe
ggagaactttactgctaggatttcc

SEQ ID NO: 66288 - DNA, 25 bp, Artificial
  Probe
gtttggctgagagggtcaatctatt

SEQ ID NO: 66289 - DNA, 25 bp, Artificial
  Probe
ctgagagggtcaatctatttatgca

SEQ ID NO: 66290 - DNA, 25 bp, Artificial
  Probe
tgagagggtcaatctatttatgcaa

SEQ ID NO: 66291 - DNA, 25 bp, Artificial
  Probe
gagagggtcaatctatttatgcaaa

SEQ ID NO: 66292 - DNA, 25 bp, Artificial
  Probe
agtttggctgagagggtcaatctat

SEQ ID NO: 66293 - DNA, 25 bp, Artificial
  Probe
actgctaggatttccaattgttaga

SEQ ID NO: 66294 - DNA, 25 bp, Artificial
  Probe
ctttactgctaggatttccaattgt

SEQ ID NO: 66295 - DNA, 25 bp, Artificial
  Probe
actttactgctaggatttccaattg

SEQ ID NO: 66296 - DNA, 25 bp, Artificial
  Probe
tttactgctaggatttccaattgtt

SEQ ID NO: 66297 - DNA, 25 bp, Artificial
  Probe
ctgctaggatttccaattgttagaa

SEQ ID NO: 66298 - DNA, 25 bp, Artificial
  Probe
tactgctaggatttccaattgttag

SEQ ID NO: 66299 - DNA, 25 bp, Artificial
  Probe
ttactgctaggatttccaattgtta

SEQ ID NO: 66300 - DNA, 25 bp, Artificial
  Probe
ttccaattgttagaaacgccgttag

SEQ ID NO: 66301 - DNA, 25 bp, Artificial
  Probe
cagtttggctgagagggtcaatcta

SEQ ID NO: 66302 - DNA, 25 bp, Artificial
  Probe
taggatttccaattgttagaaacgc

SEQ ID NO: 66303 - DNA, 25 bp, Artificial
  Probe
tctatttatgcaaaatcgccctatg

SEQ ID NO: 66304 - DNA, 25 bp, Artificial
  Probe
caatctatttatgcaaaatcgccct

SEQ ID NO: 66305 - DNA, 25 bp, Artificial
  Probe
tcaatctatttatgcaaaatcgccc

SEQ ID NO: 66306 - DNA, 25 bp, Artificial
  Probe
gtcaatctatttatgcaaaatcgcc

SEQ ID NO: 66307 - DNA, 25 bp, Artificial
  Probe
ggtcaatctatttatgcaaaatcgc

SEQ ID NO: 66308 - DNA, 25 bp, Artificial
  Probe
agagggtcaatctatttatgcaaaa

SEQ ID NO: 66309 - DNA, 25 bp, Artificial
  Probe
aatctatttatgcaaaatcgcccta

SEQ ID NO: 66310 - DNA, 25 bp, Artificial
  Probe
gggtcaatctatttatgcaaaatcg

SEQ ID NO: 66311 - DNA, 25 bp, Artificial
  Probe
tgctaggatttccaattgttagaaa

SEQ ID NO: 66312 - DNA, 25 bp, Artificial
  Probe
gctaggatttccaattgttagaaac

SEQ ID NO: 66313 - DNA, 25 bp, Artificial
  Probe
atctatttatgcaaaatcgccctat

SEQ ID NO: 66314 - DNA, 25 bp, Artificial
  Probe
tttccaattgttagaaacgccgtta

SEQ ID NO: 66315 - DNA, 25 bp, Artificial
  Probe
ctaggatttccaattgttagaaacg

SEQ ID NO: 66316 - DNA, 25 bp, Artificial
  Probe
aggatttccaattgttagaaacgcc

SEQ ID NO: 66317 - DNA, 25 bp, Artificial
  Probe
atttccaattgttagaaacgccgtt

SEQ ID NO: 66318 - DNA, 25 bp, Artificial
  Probe
agggtcaatctatttatgcaaaatc

SEQ ID NO: 66319 - DNA, 25 bp, Artificial
  Probe
gagggtcaatctatttatgcaaaat

SEQ ID NO: 66320 - DNA, 25 bp, Artificial
  Probe
aacacaggaataaagatttctcaaa

SEQ ID NO: 66321 - DNA, 25 bp, Artificial
  Probe
aaacacaggaataaagatttctcaa

SEQ ID NO: 66322 - DNA, 25 bp, Artificial
  Probe
ccgacttacaaaacacaggaataaa

SEQ ID NO: 66323 - DNA, 25 bp, Artificial
  Probe
atgttgttattgcctgtgaaaatgg

SEQ ID NO: 66324 - DNA, 25 bp, Artificial
  Probe
cccgacttacaaaacacaggaataa

SEQ ID NO: 66325 - DNA, 25 bp, Artificial
  Probe
gtcttttatcagtctctagtcagca

SEQ ID NO: 66326 - DNA, 25 bp, Artificial
  Probe
cttttatcagtctctagtcagcagg

SEQ ID NO: 66327 - DNA, 25 bp, Artificial
  Probe
tcttttatcagtctctagtcagcag

SEQ ID NO: 66328 - DNA, 25 bp, Artificial
  Probe
agtcttttatcagtctctagtcagc

SEQ ID NO: 66329 - DNA, 25 bp, Artificial
  Probe
aggaataaagatttctcaaaagcca

SEQ ID NO: 66330 - DNA, 25 bp, Artificial
  Probe
cgacttacaaaacacaggaataaag

SEQ ID NO: 66331 - DNA, 25 bp, Artificial
  Probe
caggaataaagatttctcaaaagcc

SEQ ID NO: 66332 - DNA, 25 bp, Artificial
  Probe
cctgtccactttgatgagtctttta

SEQ ID NO: 66333 - DNA, 25 bp, Artificial
  Probe
tgtccactttgatgagtcttttatc

SEQ ID NO: 66334 - DNA, 25 bp, Artificial
  Probe
ctgtccactttgatgagtcttttat

SEQ ID NO: 66335 - DNA, 25 bp, Artificial
  Probe
ggaataaagatttctcaaaagccaa

SEQ ID NO: 66336 - DNA, 25 bp, Artificial
  Probe
catgttgttattgcctgtgaaaatg

SEQ ID NO: 66337 - DNA, 25 bp, Artificial
  Probe
acaggaataaagatttctcaaaagc

SEQ ID NO: 66338 - DNA, 25 bp, Artificial
  Probe
atatgtctcccgacttacaaaacac

SEQ ID NO: 66339 - DNA, 25 bp, Artificial
  Probe
ttttatcagtctctagtcagcaggc

SEQ ID NO: 66340 - DNA, 25 bp, Artificial
  Probe
cagacatgttgttattgcctgtgaa

SEQ ID NO: 66341 - DNA, 25 bp, Artificial
  Probe
ttcagacatgttgttattgcctgtg

SEQ ID NO: 66342 - DNA, 25 bp, Artificial
  Probe
gttcagacatgttgttattgcctgt

SEQ ID NO: 66343 - DNA, 25 bp, Artificial
  Probe
atccattgtcaggggctagaaaatt

SEQ ID NO: 66344 - DNA, 25 bp, Artificial
  Probe
tgagtcttttatcagtctctagtca

SEQ ID NO: 66345 - DNA, 25 bp, Artificial
  Probe
gacttacaaaacacaggaataaaga

SEQ ID NO: 66346 - DNA, 25 bp, Artificial
  Probe
attgtcaggggctagaaaatttact

SEQ ID NO: 66347 - DNA, 25 bp, Artificial
  Probe
cattgtcaggggctagaaaatttac

SEQ ID NO: 66348 - DNA, 25 bp, Artificial
  Probe
ttgtcaggggctagaaaatttacta

SEQ ID NO: 66349 - DNA, 25 bp, Artificial
  Probe
tgtcaggggctagaaaatttactat

SEQ ID NO: 66350 - DNA, 25 bp, Artificial
  Probe
tatgtctcccgacttacaaaacaca

SEQ ID NO: 66351 - DNA, 25 bp, Artificial
  Probe
gagtcttttatcagtctctagtcag

SEQ ID NO: 66352 - DNA, 25 bp, Artificial
  Probe
gtcaggggctagaaaatttactatc

SEQ ID NO: 66353 - DNA, 25 bp, Artificial
  Probe
ccattgtcaggggctagaaaattta

SEQ ID NO: 66354 - DNA, 25 bp, Artificial
  Probe
acaaaacacaggaataaagatttct

SEQ ID NO: 66355 - DNA, 25 bp, Artificial
  Probe
ggaagcccttacggagaaaacttaa

SEQ ID NO: 66356 - DNA, 25 bp, Artificial
  Probe
tcagacatgttgttattgcctgtga

SEQ ID NO: 66357 - DNA, 25 bp, Artificial
  Probe
ggttcagacatgttgttattgcctg

SEQ ID NO: 66358 - DNA, 25 bp, Artificial
  Probe
ttttatctcctctcaccccagaaca

SEQ ID NO: 66359 - DNA, 25 bp, Artificial
  Probe
acacaggaataaagatttctcaaaa

SEQ ID NO: 66360 - DNA, 25 bp, Artificial
  Probe
aaaacacaggaataaagatttctca

SEQ ID NO: 66361 - DNA, 25 bp, Artificial
  Probe
catccattgtcaggggctagaaaat

SEQ ID NO: 66362 - DNA, 25 bp, Artificial
  Probe
tcccgacttacaaaacacaggaata

SEQ ID NO: 66363 - DNA, 25 bp, Artificial
  Probe
tgcctgtccactttgatgagtcttt

SEQ ID NO: 66364 - DNA, 25 bp, Artificial
  Probe
ttgcctgtccactttgatgagtctt

SEQ ID NO: 66365 - DNA, 25 bp, Artificial
  Probe
ctctcctatattagccagaaggttg

SEQ ID NO: 66366 - DNA, 25 bp, Artificial
  Probe
actctcctatattagccagaaggtt

SEQ ID NO: 66367 - DNA, 25 bp, Artificial
  Probe
agactctcctatattagccagaagg

SEQ ID NO: 66368 - DNA, 25 bp, Artificial
  Probe
gactctcctatattagccagaaggt

SEQ ID NO: 66369 - DNA, 25 bp, Artificial
  Probe
tgaagagactctcctatattagcca

SEQ ID NO: 66370 - DNA, 25 bp, Artificial
  Probe
agagactctcctatattagccagaa

SEQ ID NO: 66371 - DNA, 25 bp, Artificial
  Probe
aagagactctcctatattagccaga

SEQ ID NO: 66372 - DNA, 25 bp, Artificial
  Probe
gagactctcctatattagccagaag

SEQ ID NO: 66373 - DNA, 25 bp, Artificial
  Probe
gaagagactctcctatattagccag

SEQ ID NO: 66374 - DNA, 25 bp, Artificial
  Probe
gccatgaagagactctcctatatta

SEQ ID NO: 66375 - DNA, 25 bp, Artificial
  Probe
atgaagagactctcctatattagcc

SEQ ID NO: 66376 - DNA, 25 bp, Artificial
  Probe
tctcctatattagccagaaggttgc

SEQ ID NO: 66377 - DNA, 25 bp, Artificial
  Probe
ctatattagccagaaggttgcagat

SEQ ID NO: 66378 - DNA, 25 bp, Artificial
  Probe
tatattagccagaaggttgcagatg

SEQ ID NO: 66379 - DNA, 25 bp, Artificial
  Probe
atcctgtaaatatgtcatctgggct

SEQ ID NO: 66380 - DNA, 25 bp, Artificial
  Probe
catgaagagactctcctatattagc

SEQ ID NO: 66381 - DNA, 25 bp, Artificial
  Probe
catcctgtaaatatgtcatctgggc

SEQ ID NO: 66382 - DNA, 25 bp, Artificial
  Probe
gcatcctgtaaatatgtcatctggg

SEQ ID NO: 66383 - DNA, 25 bp, Artificial
  Probe
ctccgcatcctgtaaatatgtcatc

SEQ ID NO: 66384 - DNA, 25 bp, Artificial
  Probe
cgcatcctgtaaatatgtcatctgg

SEQ ID NO: 66385 - DNA, 25 bp, Artificial
  Probe
ccgcatcctgtaaatatgtcatctg

SEQ ID NO: 66386 - DNA, 25 bp, Artificial
  Probe
tccgcatcctgtaaatatgtcatct

SEQ ID NO: 66387 - DNA, 25 bp, Artificial
  Probe
gcccacattaaagattaaagatacg

SEQ ID NO: 66388 - DNA, 25 bp, Artificial
  Probe
tcctgtaaatatgtcatctgggctg

SEQ ID NO: 66389 - DNA, 25 bp, Artificial
  Probe
ccatgaagagactctcctatattag

SEQ ID NO: 66390 - DNA, 25 bp, Artificial
  Probe
gagatagggagtctgaacttggaag

SEQ ID NO: 66391 - DNA, 25 bp, Artificial
  Probe
gagatagagcaggagatagggagtc

SEQ ID NO: 66392 - DNA, 25 bp, Artificial
  Probe
cctccgcatcctgtaaatatgtcat

SEQ ID NO: 66393 - DNA, 25 bp, Artificial
  Probe
cctatattagccagaaggttgcaga

SEQ ID NO: 66394 - DNA, 25 bp, Artificial
  Probe
tcctatattagccagaaggttgcag

SEQ ID NO: 66395 - DNA, 25 bp, Artificial
  Probe
ctcctatattagccagaaggttgca

SEQ ID NO: 66396 - DNA, 25 bp, Artificial
  Probe
ggccatgaagagactctcctatatt

SEQ ID NO: 66397 - DNA, 25 bp, Artificial
  Probe
ctgtaaatatgtcatctgggctggg

SEQ ID NO: 66398 - DNA, 25 bp, Artificial
  Probe
cctgtaaatatgtcatctgggctgg

SEQ ID NO: 66399 - DNA, 25 bp, Artificial
  Probe
aagattaaagatacgttctgggctt

SEQ ID NO: 66400 - DNA, 25 bp, Artificial
  Probe
aaagattaaagatacgttctgggct

SEQ ID NO: 66401 - DNA, 25 bp, Artificial
  Probe
agattaaagatacgttctgggcttc

SEQ ID NO: 66402 - DNA, 25 bp, Artificial
  Probe
agatagagcaggagatagggagtct

SEQ ID NO: 66403 - DNA, 25 bp, Artificial
  Probe
taaagattaaagatacgttctgggc

SEQ ID NO: 66404 - DNA, 25 bp, Artificial
  Probe
atattagccagaaggttgcagatgc

SEQ ID NO: 66405 - DNA, 25 bp, Artificial
  Probe
gattaaagatacgttctgggcttcc

SEQ ID NO: 66406 - DNA, 25 bp, Artificial
  Probe
ggagatagggagtctgaacttggaa

SEQ ID NO: 66407 - DNA, 25 bp, Artificial
  Probe
gatagagcaggagatagggagtctg

SEQ ID NO: 66408 - DNA, 25 bp, Artificial
  Probe
cttgagttccacacggataaagact

SEQ ID NO: 66409 - DNA, 25 bp, Artificial
  Probe
aggccatgaagagactctcctatat

SEQ ID NO: 66410 - DNA, 25 bp, Artificial
  Probe
gagttagaatggagaataaagccct

SEQ ID NO: 66411 - DNA, 25 bp, Artificial
  Probe
agagttagaatggagaataaagccc

SEQ ID NO: 66412 - DNA, 25 bp, Artificial
  Probe
cagggaaagagttagaatggagaat

SEQ ID NO: 66413 - DNA, 25 bp, Artificial
  Probe
aatggagaataaagccctacagaag

SEQ ID NO: 66414 - DNA, 25 bp, Artificial
  Probe
gaatggagaataaagccctacagaa

SEQ ID NO: 66415 - DNA, 25 bp, Artificial
  Probe
tagaatggagaataaagccctacag

SEQ ID NO: 66416 - DNA, 25 bp, Artificial
  Probe
ttagaatggagaataaagccctaca

SEQ ID NO: 66417 - DNA, 25 bp, Artificial
  Probe
agaatggagaataaagccctacaga

SEQ ID NO: 66418 - DNA, 25 bp, Artificial
  Probe
gttagaatggagaataaagccctac

SEQ ID NO: 66419 - DNA, 25 bp, Artificial
  Probe
agttagaatggagaataaagcccta

SEQ ID NO: 66420 - DNA, 25 bp, Artificial
  Probe
gaataaagccctacagaagcagttt

SEQ ID NO: 66421 - DNA, 25 bp, Artificial
  Probe
aagagttagaatggagaataaagcc

SEQ ID NO: 66422 - DNA, 25 bp, Artificial
  Probe
agggaaagagttagaatggagaata

SEQ ID NO: 66423 - DNA, 25 bp, Artificial
  Probe
aataaagccctacagaagcagtttc

SEQ ID NO: 66424 - DNA, 25 bp, Artificial
  Probe
agaataaagccctacagaagcagtt

SEQ ID NO: 66425 - DNA, 25 bp, Artificial
  Probe
tttactggcatggtatcattcctag

SEQ ID NO: 66426 - DNA, 25 bp, Artificial
  Probe
gtcttgagtacaaatgtgaatggtg

SEQ ID NO: 66427 - DNA, 25 bp, Artificial
  Probe
gggaaagagttagaatggagaataa

SEQ ID NO: 66428 - DNA, 25 bp, Artificial
  Probe
ctacagaagcagtttcccaatgaag

SEQ ID NO: 66429 - DNA, 25 bp, Artificial
  Probe
gtttactggcatggtatcattccta

SEQ ID NO: 66430 - DNA, 25 bp, Artificial
  Probe
gcagggaaagagttagaatggagaa

SEQ ID NO: 66431 - DNA, 25 bp, Artificial
  Probe
tacaaatgtgaatggtggactgact

SEQ ID NO: 66432 - DNA, 25 bp, Artificial
  Probe
aaagaagggatgcttgactcaattt

SEQ ID NO: 66433 - DNA, 25 bp, Artificial
  Probe
gagaataaagccctacagaagcagt

SEQ ID NO: 66434 - DNA, 25 bp, Artificial
  Probe
atggagaataaagccctacagaagc

SEQ ID NO: 66435 - DNA, 25 bp, Artificial
  Probe
cttgagtacaaatgtgaatggtgga

SEQ ID NO: 66436 - DNA, 25 bp, Artificial
  Probe
tcttgagtacaaatgtgaatggtgg

SEQ ID NO: 66437 - DNA, 25 bp, Artificial
  Probe
ctgtcttgagtacaaatgtgaatgg

SEQ ID NO: 66438 - DNA, 25 bp, Artificial
  Probe
tgtcttgagtacaaatgtgaatggt

SEQ ID NO: 66439 - DNA, 25 bp, Artificial
  Probe
ttgagtacaaatgtgaatggtggac

SEQ ID NO: 66440 - DNA, 25 bp, Artificial
  Probe
aagaagggatgcttgactcaatttc

SEQ ID NO: 66441 - DNA, 25 bp, Artificial
  Probe
caaagaagggatgcttgactcaatt

SEQ ID NO: 66442 - DNA, 25 bp, Artificial
  Probe
gtacaaatgtgaatggtggactgac

SEQ ID NO: 66443 - DNA, 25 bp, Artificial
  Probe
tacaggtaaatttcaaggcacaatc

SEQ ID NO: 66444 - DNA, 25 bp, Artificial
  Probe
ggtaaatttcaaggcacaatcagtt

SEQ ID NO: 66445 - DNA, 25 bp, Artificial
  Probe
gagtacaaatgtgaatggtggactg

SEQ ID NO: 66446 - DNA, 25 bp, Artificial
  Probe
ttacaggtaaatttcaaggcacaat

SEQ ID NO: 66447 - DNA, 25 bp, Artificial
  Probe
caggtaaatttcaaggcacaatcag

SEQ ID NO: 66448 - DNA, 25 bp, Artificial
  Probe
ataaagccctacagaagcagtttcc

SEQ ID NO: 66449 - DNA, 25 bp, Artificial
  Probe
aggtaaatttcaaggcacaatcagt

SEQ ID NO: 66450 - DNA, 25 bp, Artificial
  Probe
ggagaataaagccctacagaagcag

SEQ ID NO: 66451 - DNA, 25 bp, Artificial
  Probe
aaagagttagaatggagaataaagc

SEQ ID NO: 66452 - DNA, 25 bp, Artificial
  Probe
tttacaggtaaatttcaaggcacaa

SEQ ID NO: 66453 - DNA, 25 bp, Artificial
  Probe
agtacaaatgtgaatggtggactga

SEQ ID NO: 66454 - DNA, 25 bp, Artificial
  Probe
tgagtacaaatgtgaatggtggact

SEQ ID NO: 66455 - DNA, 25 bp, Artificial
  Probe
ggtggacgaagttattgatgtaatg

SEQ ID NO: 66456 - DNA, 25 bp, Artificial
  Probe
aggtggacgaagttattgatgtaat

SEQ ID NO: 66457 - DNA, 25 bp, Artificial
  Probe
gtggacgaagttattgatgtaatgc

SEQ ID NO: 66458 - DNA, 25 bp, Artificial
  Probe
caggtggacgaagttattgatgtaa

SEQ ID NO: 66459 - DNA, 25 bp, Artificial
  Probe
cagaatcaggtggacgaagttattg

SEQ ID NO: 66460 - DNA, 25 bp, Artificial
  Probe
tcagaatcaggtggacgaagttatt

SEQ ID NO: 66461 - DNA, 25 bp, Artificial
  Probe
gatgattcagatgaagaagaggact

SEQ ID NO: 66462 - DNA, 25 bp, Artificial
  Probe
agatgattcagatgaagaagaggac

SEQ ID NO: 66463 - DNA, 25 bp, Artificial
  Probe
aattaagcatgttcagaatcaggtg

SEQ ID NO: 66464 - DNA, 25 bp, Artificial
  Probe
tggaagatgattcagatgaagaaga

SEQ ID NO: 66465 - DNA, 25 bp, Artificial
  Probe
atgattcagatgaagaagaggactt

SEQ ID NO: 66466 - DNA, 25 bp, Artificial
  Probe
ttcagaatcaggtggacgaagttat

SEQ ID NO: 66467 - DNA, 25 bp, Artificial
  Probe
aagaggagagaggctagatgaacta

SEQ ID NO: 66468 - DNA, 25 bp, Artificial
  Probe
aagatgattcagatgaagaagagga

SEQ ID NO: 66469 - DNA, 25 bp, Artificial
  Probe
aggtggtggatacttattctgttgg

SEQ ID NO: 66470 - DNA, 25 bp, Artificial
  Probe
gaagatgattcagatgaagaagagg

SEQ ID NO: 66471 - DNA, 25 bp, Artificial
  Probe
ggaagatgattcagatgaagaagag

SEQ ID NO: 66472 - DNA, 25 bp, Artificial
  Probe
tcaggtggacgaagttattgatgta

SEQ ID NO: 66473 - DNA, 25 bp, Artificial
  Probe
ttggaagatgattcagatgaagaag

SEQ ID NO: 66474 - DNA, 25 bp, Artificial
  Probe
attaagcatgttcagaatcaggtgg

SEQ ID NO: 66475 - DNA, 25 bp, Artificial
  Probe
agaatcaggtggacgaagttattga

SEQ ID NO: 66476 - DNA, 25 bp, Artificial
  Probe
caggtggtggatacttattctgttg

SEQ ID NO: 66477 - DNA, 25 bp, Artificial
  Probe
tcaggtggtggatacttattctgtt

SEQ ID NO: 66478 - DNA, 25 bp, Artificial
  Probe
agaggagagaggctagatgaactac

SEQ ID NO: 66479 - DNA, 25 bp, Artificial
  Probe
ctcaggtggtggatacttattctgt

SEQ ID NO: 66480 - DNA, 25 bp, Artificial
  Probe
gagagaggctagatgaactacagga

SEQ ID NO: 66481 - DNA, 25 bp, Artificial
  Probe
aggagagaggctagatgaactacag

SEQ ID NO: 66482 - DNA, 25 bp, Artificial
  Probe
gaggagagaggctagatgaactaca

SEQ ID NO: 66483 - DNA, 25 bp, Artificial
  Probe
gttcagaatcaggtggacgaagtta

SEQ ID NO: 66484 - DNA, 25 bp, Artificial
  Probe
agaggctagatgaactacaggacaa

SEQ ID NO: 66485 - DNA, 25 bp, Artificial
  Probe
tggacgaagttattgatgtaatgca

SEQ ID NO: 66486 - DNA, 25 bp, Artificial
  Probe
ttaagcatgttcagaatcaggtgga

SEQ ID NO: 66487 - DNA, 25 bp, Artificial
  Probe
agagaggctagatgaactacaggac

SEQ ID NO: 66488 - DNA, 25 bp, Artificial
  Probe
cctcaggtggtggatacttattctg

SEQ ID NO: 66489 - DNA, 25 bp, Artificial
  Probe
ggacgaagttattgatgtaatgcaa

SEQ ID NO: 66490 - DNA, 25 bp, Artificial
  Probe
ggtggatacttattctgttgggaaa

SEQ ID NO: 66491 - DNA, 25 bp, Artificial
  Probe
agagtatttgtgagcagaaagtatg

SEQ ID NO: 66492 - DNA, 25 bp, Artificial
  Probe
gagaggctagatgaactacaggaca

SEQ ID NO: 66493 - DNA, 25 bp, Artificial
  Probe
taattgaaagaggagagaggctaga

SEQ ID NO: 66494 - DNA, 25 bp, Artificial
  Probe
gtaattgaaagaggagagaggctag

SEQ ID NO: 66495 - DNA, 25 bp, Artificial
  Probe
acgaagttattgatgtaatgcaaga

SEQ ID NO: 66496 - DNA, 25 bp, Artificial
  Probe
aattgaaagaggagagaggctagat

SEQ ID NO: 66497 - DNA, 25 bp, Artificial
  Probe
gacgaagttattgatgtaatgcaag

SEQ ID NO: 66498 - DNA, 25 bp, Artificial
  Probe
gtggatacttattctgttgggaaat

SEQ ID NO: 66499 - DNA, 25 bp, Artificial
  Probe
agatgaactacaggacaaatcagaa

SEQ ID NO: 66500 - DNA, 25 bp, Artificial
  Probe
atctcataagctaacctcactcctc

SEQ ID NO: 66501 - DNA, 25 bp, Artificial
  Probe
gatctcataagctaacctcactcct

SEQ ID NO: 66502 - DNA, 25 bp, Artificial
  Probe
ctcataagctaacctcactcctctg

SEQ ID NO: 66503 - DNA, 25 bp, Artificial
  Probe
tctcataagctaacctcactcctct

SEQ ID NO: 66504 - DNA, 25 bp, Artificial
  Probe
taccaccgtcctgttcttcaactta

SEQ ID NO: 66505 - DNA, 25 bp, Artificial
  Probe
cagatctcataagctaacctcactc

SEQ ID NO: 66506 - DNA, 25 bp, Artificial
  Probe
agatctcataagctaacctcactcc

SEQ ID NO: 66507 - DNA, 25 bp, Artificial
  Probe
tcataagctaacctcactcctctgg

SEQ ID NO: 66508 - DNA, 25 bp, Artificial
  Probe
gttctatgtgtttggtaacctccat

SEQ ID NO: 66509 - DNA, 25 bp, Artificial
  Probe
gcagatctcataagctaacctcact

SEQ ID NO: 66510 - DNA, 25 bp, Artificial
  Probe
ctttctgtgggaggaattaaggaaa

SEQ ID NO: 66511 - DNA, 25 bp, Artificial
  Probe
ttctatgtgtttggtaacctccatg

SEQ ID NO: 66512 - DNA, 25 bp, Artificial
  Probe
ttaccaccgtcctgttcttcaactt

SEQ ID NO: 66513 - DNA, 25 bp, Artificial
  Probe
tgcagatctcataagctaacctcac

SEQ ID NO: 66514 - DNA, 25 bp, Artificial
  Probe
ctatgtgtttggtaacctccatgtc

SEQ ID NO: 66515 - DNA, 25 bp, Artificial
  Probe
tctatgtgtttggtaacctccatgt

SEQ ID NO: 66516 - DNA, 25 bp, Artificial
  Probe
caactagaattgctgttggaacaac

SEQ ID NO: 66517 - DNA, 25 bp, Artificial
  Probe
ttctgtgggaggaattaaggaaaag

SEQ ID NO: 66518 - DNA, 25 bp, Artificial
  Probe
accaccgtcctgttcttcaacttag

SEQ ID NO: 66519 - DNA, 25 bp, Artificial
  Probe
taatggatatcagcaactagaattg

SEQ ID NO: 66520 - DNA, 25 bp, Artificial
  Probe
tatgtgtttggtaacctccatgtcc

SEQ ID NO: 66521 - DNA, 25 bp, Artificial
  Probe
aactagaattgctgttggaacaacg

SEQ ID NO: 66522 - DNA, 25 bp, Artificial
  Probe
atctccgagatcagggaataagaac

SEQ ID NO: 66523 - DNA, 25 bp, Artificial
  Probe
catctccgagatcagggaataagaa

SEQ ID NO: 66524 - DNA, 25 bp, Artificial
  Probe
ttaatggatatcagcaactagaatt

SEQ ID NO: 66525 - DNA, 25 bp, Artificial
  Probe
tcctgttcttcaacttagccctctg

SEQ ID NO: 66526 - DNA, 25 bp, Artificial
  Probe
gtcctgttcttcaacttagccctct

SEQ ID NO: 66527 - DNA, 25 bp, Artificial
  Probe
ccaggctccatgaactctgagaatt

SEQ ID NO: 66528 - DNA, 25 bp, Artificial
  Probe
caggctccatgaactctgagaattc

SEQ ID NO: 66529 - DNA, 25 bp, Artificial
  Probe
tgggaggaattaaggaaaagctatg

SEQ ID NO: 66530 - DNA, 25 bp, Artificial
  Probe
gtgggaggaattaaggaaaagctat

SEQ ID NO: 66531 - DNA, 25 bp, Artificial
  Probe
tttaccaccgtcctgttcttcaact

SEQ ID NO: 66532 - DNA, 25 bp, Artificial
  Probe
cataagctaacctcactcctctggc

SEQ ID NO: 66533 - DNA, 25 bp, Artificial
  Probe
tctccgagatcagggaataagaacc

SEQ ID NO: 66534 - DNA, 25 bp, Artificial
  Probe
aaccctttctgtgggaggaattaag

SEQ ID NO: 66535 - DNA, 25 bp, Artificial
  Probe
gaaccctttctgtgggaggaattaa

SEQ ID NO: 66536 - DNA, 25 bp, Artificial
  Probe
attaatggatatcagcaactagaat

SEQ ID NO: 66537 - DNA, 25 bp, Artificial
  Probe
ggaattaaggaaaagctatgcactc

SEQ ID NO: 66538 - DNA, 25 bp, Artificial
  Probe
gaggaattaaggaaaagctatgcac

SEQ ID NO: 66539 - DNA, 25 bp, Artificial
  Probe
aggaattaaggaaaagctatgcact

SEQ ID NO: 66540 - DNA, 25 bp, Artificial
  Probe
cacactgctgaagctaaaggagatg

SEQ ID NO: 66541 - DNA, 25 bp, Artificial
  Probe
gaattaaggaaaagctatgcactcg

SEQ ID NO: 66542 - DNA, 25 bp, Artificial
  Probe
tctgtgggaggaattaaggaaaagc

SEQ ID NO: 66543 - DNA, 25 bp, Artificial
  Probe
tgtgggaggaattaaggaaaagcta

SEQ ID NO: 66544 - DNA, 25 bp, Artificial
  Probe
gggaggaattaaggaaaagctatgc

SEQ ID NO: 66545 - DNA, 25 bp, Artificial
  Probe
tctgtccgattctacattgtcttac

SEQ ID NO: 66546 - DNA, 25 bp, Artificial
  Probe
ccgattctacattgtcttacactga

SEQ ID NO: 66547 - DNA, 25 bp, Artificial
  Probe
tccgattctacattgtcttacactg

SEQ ID NO: 66548 - DNA, 25 bp, Artificial
  Probe
gtccgattctacattgtcttacact

SEQ ID NO: 66549 - DNA, 25 bp, Artificial
  Probe
ctgtccgattctacattgtcttaca

SEQ ID NO: 66550 - DNA, 25 bp, Artificial
  Probe
tgtccgattctacattgtcttacac

SEQ ID NO: 66551 - DNA, 25 bp, Artificial
  Probe
atctgtccgattctacattgtctta

SEQ ID NO: 66552 - DNA, 25 bp, Artificial
  Probe
cgattctacattgtcttacactgaa

SEQ ID NO: 66553 - DNA, 25 bp, Artificial
  Probe
gatctgtccgattctacattgtctt

SEQ ID NO: 66554 - DNA, 25 bp, Artificial
  Probe
ggatctgtccgattctacattgtct

SEQ ID NO: 66555 - DNA, 25 bp, Artificial
  Probe
tggatctgtccgattctacattgtc

SEQ ID NO: 66556 - DNA, 25 bp, Artificial
  Probe
ctggatctgtccgattctacattgt

SEQ ID NO: 66557 - DNA, 25 bp, Artificial
  Probe
actggatctgtccgattctacattg

SEQ ID NO: 66558 - DNA, 25 bp, Artificial
  Probe
cactggatctgtccgattctacatt

SEQ ID NO: 66559 - DNA, 25 bp, Artificial
  Probe
tacattgtcttacactgaaaccgag

SEQ ID NO: 66560 - DNA, 25 bp, Artificial
  Probe
ctacattgtcttacactgaaaccga

SEQ ID NO: 66561 - DNA, 25 bp, Artificial
  Probe
tctacattgtcttacactgaaaccg

SEQ ID NO: 66562 - DNA, 25 bp, Artificial
  Probe
ttctacattgtcttacactgaaacc

SEQ ID NO: 66563 - DNA, 25 bp, Artificial
  Probe
cagcatcttctacgacctacctcag

SEQ ID NO: 66564 - DNA, 25 bp, Artificial
  Probe
tcagcatcttctacgacctacctca

SEQ ID NO: 66565 - DNA, 25 bp, Artificial
  Probe
attctacattgtcttacactgaaac

SEQ ID NO: 66566 - DNA, 25 bp, Artificial
  Probe
gtcagcatcttctacgacctacctc

SEQ ID NO: 66567 - DNA, 25 bp, Artificial
  Probe
acattgtcttacactgaaaccgagg

SEQ ID NO: 66568 - DNA, 25 bp, Artificial
  Probe
gattctacattgtcttacactgaaa

SEQ ID NO: 66569 - DNA, 25 bp, Artificial
  Probe
ccactggatctgtccgattctacat

SEQ ID NO: 66570 - DNA, 25 bp, Artificial
  Probe
ctactccatcaaggtgttcgacttt

SEQ ID NO: 66571 - DNA, 25 bp, Artificial
  Probe
ctgtcagcatcttctacgacctacc

SEQ ID NO: 66572 - DNA, 25 bp, Artificial
  Probe
tactccatcaaggtgttcgactttg

SEQ ID NO: 66573 - DNA, 25 bp, Artificial
  Probe
tgtcagcatcttctacgacctacct

SEQ ID NO: 66574 - DNA, 25 bp, Artificial
  Probe
gaattctcagatgccagcatgtctc

SEQ ID NO: 66575 - DNA, 25 bp, Artificial
  Probe
gctactccatcaaggtgttcgactt

SEQ ID NO: 66576 - DNA, 25 bp, Artificial
  Probe
cattgtcttacactgaaaccgaggc

SEQ ID NO: 66577 - DNA, 25 bp, Artificial
  Probe
agcatcttctacgacctacctcagg

SEQ ID NO: 66578 - DNA, 25 bp, Artificial
  Probe
aattctcagatgccagcatgtctcc

SEQ ID NO: 66579 - DNA, 25 bp, Artificial
  Probe
tgaattctcagatgccagcatgtct

SEQ ID NO: 66580 - DNA, 25 bp, Artificial
  Probe
gtgaattctcagatgccagcatgtc

SEQ ID NO: 66581 - DNA, 25 bp, Artificial
  Probe
aagccactggatctgtccgattcta

SEQ ID NO: 66582 - DNA, 25 bp, Artificial
  Probe
ctccatcaaggtgttcgactttgag

SEQ ID NO: 66583 - DNA, 25 bp, Artificial
  Probe
gctgtcagcatcttctacgacctac

SEQ ID NO: 66584 - DNA, 25 bp, Artificial
  Probe
actccatcaaggtgttcgactttga

SEQ ID NO: 66585 - DNA, 25 bp, Artificial
  Probe
attgtcttacactgaaaccgaggcc

SEQ ID NO: 66586 - DNA, 25 bp, Artificial
  Probe
ttctatgtgcttctatgactgttcc

SEQ ID NO: 66587 - DNA, 25 bp, Artificial
  Probe
agaagatgctacggtatattacagt

SEQ ID NO: 66588 - DNA, 25 bp, Artificial
  Probe
ccaagaagatgctacggtatattac

SEQ ID NO: 66589 - DNA, 25 bp, Artificial
  Probe
gaagatgctacggtatattacagtt

SEQ ID NO: 66590 - DNA, 25 bp, Artificial
  Probe
caagaagatgctacggtatattaca

SEQ ID NO: 66591 - DNA, 25 bp, Artificial
  Probe
tgtgatgacattatctgtaagtgct

SEQ ID NO: 66592 - DNA, 25 bp, Artificial
  Probe
gtgatgacattatctgtaagtgctg

SEQ ID NO: 66593 - DNA, 25 bp, Artificial
  Probe
ctgtgatgacattatctgtaagtgc

SEQ ID NO: 66594 - DNA, 25 bp, Artificial
  Probe
tgatgacattatctgtaagtgctgg

SEQ ID NO: 66595 - DNA, 25 bp, Artificial
  Probe
gcactgtgatgacattatctgtaag

SEQ ID NO: 66596 - DNA, 25 bp, Artificial
  Probe
aagaagatgctacggtatattacag

SEQ ID NO: 66597 - DNA, 25 bp, Artificial
  Probe
ttctaggcactgtgatgacattatc

SEQ ID NO: 66598 - DNA, 25 bp, Artificial
  Probe
ggcactgtgatgacattatctgtaa

SEQ ID NO: 66599 - DNA, 25 bp, Artificial
  Probe
aattagccagaaggactcgtaagac

SEQ ID NO: 66600 - DNA, 25 bp, Artificial
  Probe
ctaggcactgtgatgacattatctg

SEQ ID NO: 66601 - DNA, 25 bp, Artificial
  Probe
tctaggcactgtgatgacattatct

SEQ ID NO: 66602 - DNA, 25 bp, Artificial
  Probe
actgtgatgacattatctgtaagtg

SEQ ID NO: 66603 - DNA, 25 bp, Artificial
  Probe
cactgtgatgacattatctgtaagt

SEQ ID NO: 66604 - DNA, 25 bp, Artificial
  Probe
aggcactgtgatgacattatctgta

SEQ ID NO: 66605 - DNA, 25 bp, Artificial
  Probe
taggcactgtgatgacattatctgt

SEQ ID NO: 66606 - DNA, 25 bp, Artificial
  Probe
gatgacattatctgtaagtgctggc

SEQ ID NO: 66607 - DNA, 25 bp, Artificial
  Probe
caccaagaagatgctacggtatatt

SEQ ID NO: 66608 - DNA, 25 bp, Artificial
  Probe
gacattatctgtaagtgctggcatt

SEQ ID NO: 66609 - DNA, 25 bp, Artificial
  Probe
accaagaagatgctacggtatatta

SEQ ID NO: 66610 - DNA, 25 bp, Artificial
  Probe
ttggtttctatgtgcttctatgact

SEQ ID NO: 66611 - DNA, 25 bp, Artificial
  Probe
ttccttggtttctatgtgcttctat

SEQ ID NO: 66612 - DNA, 25 bp, Artificial
  Probe
cttggtttctatgtgcttctatgac

SEQ ID NO: 66613 - DNA, 25 bp, Artificial
  Probe
cttccttggtttctatgtgcttcta

SEQ ID NO: 66614 - DNA, 25 bp, Artificial
  Probe
ggtttctatgtgcttctatgactgt

SEQ ID NO: 66615 - DNA, 25 bp, Artificial
  Probe
tggtttctatgtgcttctatgactg

SEQ ID NO: 66616 - DNA, 25 bp, Artificial
  Probe
ccttggtttctatgtgcttctatga

SEQ ID NO: 66617 - DNA, 25 bp, Artificial
  Probe
tccttggtttctatgtgcttctatg

SEQ ID NO: 66618 - DNA, 25 bp, Artificial
  Probe
tgctacggtatattacagtttgagt

SEQ ID NO: 66619 - DNA, 25 bp, Artificial
  Probe
tctttagtgtttgttatacctgggc

SEQ ID NO: 66620 - DNA, 25 bp, Artificial
  Probe
tttcttccttggtttctatgtgctt

SEQ ID NO: 66621 - DNA, 25 bp, Artificial
  Probe
acaccaagaagatgctacggtatat

SEQ ID NO: 66622 - DNA, 25 bp, Artificial
  Probe
gtttctatgtgcttctatgactgtt

SEQ ID NO: 66623 - DNA, 25 bp, Artificial
  Probe
ctctttagtgtttgttatacctggg

SEQ ID NO: 66624 - DNA, 25 bp, Artificial
  Probe
cctctttagtgtttgttatacctgg

SEQ ID NO: 66625 - DNA, 25 bp, Artificial
  Probe
ccctctttagtgtttgttatacctg

SEQ ID NO: 66626 - DNA, 25 bp, Artificial
  Probe
ccattgtgatatgatagggtagtcc

SEQ ID NO: 66627 - DNA, 25 bp, Artificial
  Probe
ctttagtgtttgttatacctgggca

SEQ ID NO: 66628 - DNA, 25 bp, Artificial
  Probe
tttctatgtgcttctatgactgttc

SEQ ID NO: 66629 - DNA, 25 bp, Artificial
  Probe
tagccagaaggactcgtaagacaat

SEQ ID NO: 66630 - DNA, 25 bp, Artificial
  Probe
attagccagaaggactcgtaagaca

SEQ ID NO: 66631 - DNA, 25 bp, Artificial
  Probe
atgctgaatatgtcatctacagagg

SEQ ID NO: 66632 - DNA, 25 bp, Artificial
  Probe
gcgtatgctgaatatgtcatctaca

SEQ ID NO: 66633 - DNA, 25 bp, Artificial
  Probe
ggcgtatgctgaatatgtcatctac

SEQ ID NO: 66634 - DNA, 25 bp, Artificial
  Probe
cgtatgctgaatatgtcatctacag

SEQ ID NO: 66635 - DNA, 25 bp, Artificial
  Probe
tggcgtatgctgaatatgtcatcta

SEQ ID NO: 66636 - DNA, 25 bp, Artificial
  Probe
gtatgctgaatatgtcatctacaga

SEQ ID NO: 66637 - DNA, 25 bp, Artificial
  Probe
gtatgtttatggaattggaggagga

SEQ ID NO: 66638 - DNA, 25 bp, Artificial
  Probe
agtatgtttatggaattggaggagg

SEQ ID NO: 66639 - DNA, 25 bp, Artificial
  Probe
tacctagccgtctactgaacagatt

SEQ ID NO: 66640 - DNA, 25 bp, Artificial
  Probe
ttacctagccgtctactgaacagat

SEQ ID NO: 66641 - DNA, 25 bp, Artificial
  Probe
tatgtttatggaattggaggaggaa

SEQ ID NO: 66642 - DNA, 25 bp, Artificial
  Probe
tcagtatgtttatggaattggagga

SEQ ID NO: 66643 - DNA, 25 bp, Artificial
  Probe
aagtttctcttgttcttctacctca

SEQ ID NO: 66644 - DNA, 25 bp, Artificial
  Probe
tatgctgaatatgtcatctacagag

SEQ ID NO: 66645 - DNA, 25 bp, Artificial
  Probe
cagtatgtttatggaattggaggag

SEQ ID NO: 66646 - DNA, 25 bp, Artificial
  Probe
ctggcgtatgctgaatatgtcatct

SEQ ID NO: 66647 - DNA, 25 bp, Artificial
  Probe
atgtttatggaattggaggaggaac

SEQ ID NO: 66648 - DNA, 25 bp, Artificial
  Probe
cagattctgtactctcctaccaacc

SEQ ID NO: 66649 - DNA, 25 bp, Artificial
  Probe
aaagtttctcttgttcttctacctc

SEQ ID NO: 66650 - DNA, 25 bp, Artificial
  Probe
atcagtatgtttatggaattggagg

SEQ ID NO: 66651 - DNA, 25 bp, Artificial
  Probe
gtttatggaattggaggaggaacag

SEQ ID NO: 66652 - DNA, 25 bp, Artificial
  Probe
cagacctctgtgcttatctctaacc

SEQ ID NO: 66653 - DNA, 25 bp, Artificial
  Probe
agattctgtactctcctaccaaccg

SEQ ID NO: 66654 - DNA, 25 bp, Artificial
  Probe
ctagccgtctactgaacagattctg

SEQ ID NO: 66655 - DNA, 25 bp, Artificial
  Probe
tttatggaattggaggaggaacagg

SEQ ID NO: 66656 - DNA, 25 bp, Artificial
  Probe
cctagccgtctactgaacagattct

SEQ ID NO: 66657 - DNA, 25 bp, Artificial
  Probe
attctgtactctcctaccaaccgtc

SEQ ID NO: 66658 - DNA, 25 bp, Artificial
  Probe
gattctgtactctcctaccaaccgt

SEQ ID NO: 66659 - DNA, 25 bp, Artificial
  Probe
cacacacaaagataggtcatgttac

SEQ ID NO: 66660 - DNA, 25 bp, Artificial
  Probe
ccacacacaaagataggtcatgtta

SEQ ID NO: 66661 - DNA, 25 bp, Artificial
  Probe
tgctgaatatgtcatctacagaggg

SEQ ID NO: 66662 - DNA, 25 bp, Artificial
  Probe
acacacaaagataggtcatgttacg

SEQ ID NO: 66663 - DNA, 25 bp, Artificial
  Probe
aaagcaatcagtatgtttatggaat

SEQ ID NO: 66664 - DNA, 25 bp, Artificial
  Probe
agataggtcatgttacgtatgtcac

SEQ ID NO: 66665 - DNA, 25 bp, Artificial
  Probe
acctagccgtctactgaacagattc

SEQ ID NO: 66666 - DNA, 25 bp, Artificial
  Probe
aagcaatcagtatgtttatggaatt

SEQ ID NO: 66667 - DNA, 25 bp, Artificial
  Probe
aagataggtcatgttacgtatgtca

SEQ ID NO: 66668 - DNA, 25 bp, Artificial
  Probe
gtcatcggtagaccaagtgtcaatg

SEQ ID NO: 66669 - DNA, 25 bp, Artificial
  Probe
agtcatcggtagaccaagtgtcaat

SEQ ID NO: 66670 - DNA, 25 bp, Artificial
  Probe
aatcagtatgtttatggaattggag

SEQ ID NO: 66671 - DNA, 25 bp, Artificial
  Probe
gtagagtgacccttggaaagtcttt

SEQ ID NO: 66672 - DNA, 25 bp, Artificial
  Probe
ataggtcatgttacgtatgtcacag

SEQ ID NO: 66673 - DNA, 25 bp, Artificial
  Probe
gataggtcatgttacgtatgtcaca

SEQ ID NO: 66674 - DNA, 25 bp, Artificial
  Probe
tttacctagccgtctactgaacaga

SEQ ID NO: 66675 - DNA, 25 bp, Artificial
  Probe
atcactcagtcatcggtagaccaag

SEQ ID NO: 66676 - DNA, 25 bp, Artificial
  Probe
ctgtgaggagtttatcaaggtcatg

SEQ ID NO: 66677 - DNA, 25 bp, Artificial
  Probe
gctgtgaggagtttatcaaggtcat

SEQ ID NO: 66678 - DNA, 25 bp, Artificial
  Probe
gtgaggagtttatcaaggtcatgga

SEQ ID NO: 66679 - DNA, 25 bp, Artificial
  Probe
ggagtttatcaaggtcatggacaac

SEQ ID NO: 66680 - DNA, 25 bp, Artificial
  Probe
aggagtttatcaaggtcatggacaa

SEQ ID NO: 66681 - DNA, 25 bp, Artificial
  Probe
tgtgaggagtttatcaaggtcatgg

SEQ ID NO: 66682 - DNA, 25 bp, Artificial
  Probe
gaggagtttatcaaggtcatggaca

SEQ ID NO: 66683 - DNA, 25 bp, Artificial
  Probe
tgaggagtttatcaaggtcatggac

SEQ ID NO: 66684 - DNA, 25 bp, Artificial
  Probe
gagtttatcaaggtcatggacaacc

SEQ ID NO: 66685 - DNA, 25 bp, Artificial
  Probe
agctgtgaggagtttatcaaggtca

SEQ ID NO: 66686 - DNA, 25 bp, Artificial
  Probe
ttatcaaggtcatggacaacctgaa

SEQ ID NO: 66687 - DNA, 25 bp, Artificial
  Probe
tcacctttgtcctgaatgaccagag

SEQ ID NO: 66688 - DNA, 25 bp, Artificial
  Probe
ctttgtcctgaatgaccagagcatg

SEQ ID NO: 66689 - DNA, 25 bp, Artificial
  Probe
gatcttcacacttccaggcaactgt

SEQ ID NO: 66690 - DNA, 25 bp, Artificial
  Probe
tatcaaggtcatggacaacctgaac

SEQ ID NO: 66691 - DNA, 25 bp, Artificial
  Probe
cctttgtcctgaatgaccagagcat

SEQ ID NO: 66692 - DNA, 25 bp, Artificial
  Probe
gacgaacagacttccaacaaggttg

SEQ ID NO: 66693 - DNA, 25 bp, Artificial
  Probe
tttatcaaggtcatggacaacctga

SEQ ID NO: 66694 - DNA, 25 bp, Artificial
  Probe
gtttatcaaggtcatggacaacctg

SEQ ID NO: 66695 - DNA, 25 bp, Artificial
  Probe
agtttatcaaggtcatggacaacct

SEQ ID NO: 66696 - DNA, 25 bp, Artificial
  Probe
gatttgcatatcggggaaggtgatt

SEQ ID NO: 66697 - DNA, 25 bp, Artificial
  Probe
atttgcatatcggggaaggtgattc

SEQ ID NO: 66698 - DNA, 25 bp, Artificial
  Probe
agatcttcacacttccaggcaactg

SEQ ID NO: 66699 - DNA, 25 bp, Artificial
  Probe
atcaaggtcatggacaacctgaact

SEQ ID NO: 66700 - DNA, 25 bp, Artificial
  Probe
caaggtcatggacaacctgaacttg

SEQ ID NO: 66701 - DNA, 25 bp, Artificial
  Probe
tttgtcctgaatgaccagagcatgg

SEQ ID NO: 66702 - DNA, 25 bp, Artificial
  Probe
tcaaggtcatggacaacctgaactt

SEQ ID NO: 66703 - DNA, 25 bp, Artificial
  Probe
ctgtgtcacctttgtcctgaatgac

SEQ ID NO: 66704 - DNA, 25 bp, Artificial
  Probe
cgaagactttgtaccactcagtgca

SEQ ID NO: 66705 - DNA, 25 bp, Artificial
  Probe
tgatttgcatatcggggaaggtgat

SEQ ID NO: 66706 - DNA, 25 bp, Artificial
  Probe
ctgatttgcatatcggggaaggtga

SEQ ID NO: 66707 - DNA, 25 bp, Artificial
  Probe
gtcacctttgtcctgaatgaccaga

SEQ ID NO: 66708 - DNA, 25 bp, Artificial
  Probe
tgtcacctttgtcctgaatgaccag

SEQ ID NO: 66709 - DNA, 25 bp, Artificial
  Probe
gtgtcacctttgtcctgaatgacca

SEQ ID NO: 66710 - DNA, 25 bp, Artificial
  Probe
tgtgtcacctttgtcctgaatgacc

SEQ ID NO: 66711 - DNA, 25 bp, Artificial
  Probe
catatcggggaaggtgattccatcc

SEQ ID NO: 66712 - DNA, 25 bp, Artificial
  Probe
gcatatcggggaaggtgattccatc

SEQ ID NO: 66713 - DNA, 25 bp, Artificial
  Probe
tttgcatatcggggaaggtgattcc

SEQ ID NO: 66714 - DNA, 25 bp, Artificial
  Probe
gaaggtgattccatcccctttggac

SEQ ID NO: 66715 - DNA, 25 bp, Artificial
  Probe
agaacttataggagacattgagagc

SEQ ID NO: 66716 - DNA, 25 bp, Artificial
  Probe
gaacttataggagacattgagagcc

SEQ ID NO: 66717 - DNA, 25 bp, Artificial
  Probe
aacttataggagacattgagagccg

SEQ ID NO: 66718 - DNA, 25 bp, Artificial
  Probe
aagaacttataggagacattgagag

SEQ ID NO: 66719 - DNA, 25 bp, Artificial
  Probe
cttataggagacattgagagccgtg

SEQ ID NO: 66720 - DNA, 25 bp, Artificial
  Probe
acttataggagacattgagagccgt

SEQ ID NO: 66721 - DNA, 25 bp, Artificial
  Probe
gaaagattgagttatttggacgacc

SEQ ID NO: 66722 - DNA, 25 bp, Artificial
  Probe
cgaaagattgagttatttggacgac

SEQ ID NO: 66723 - DNA, 25 bp, Artificial
  Probe
acccgaaagattgagttatttggac

SEQ ID NO: 66724 - DNA, 25 bp, Artificial
  Probe
cacccgaaagattgagttatttgga

SEQ ID NO: 66725 - DNA, 25 bp, Artificial
  Probe
ccgaaagattgagttatttggacga

SEQ ID NO: 66726 - DNA, 25 bp, Artificial
  Probe
accagtcacaaaccagatgaaatat

SEQ ID NO: 66727 - DNA, 25 bp, Artificial
  Probe
ccagtcacaaaccagatgaaatata

SEQ ID NO: 66728 - DNA, 25 bp, Artificial
  Probe
caccagtcacaaaccagatgaaata

SEQ ID NO: 66729 - DNA, 25 bp, Artificial
  Probe
gtgtcatctctaaacctaagaactt

SEQ ID NO: 66730 - DNA, 25 bp, Artificial
  Probe
cccgaaagattgagttatttggacg

SEQ ID NO: 66731 - DNA, 25 bp, Artificial
  Probe
ttataggagacattgagagccgtgg

SEQ ID NO: 66732 - DNA, 25 bp, Artificial
  Probe
taagaacttataggagacattgaga

SEQ ID NO: 66733 - DNA, 25 bp, Artificial
  Probe
ctaagaacttataggagacattgag

SEQ ID NO: 66734 - DNA, 25 bp, Artificial
  Probe
tggtgtcatctctaaacctaagaac

SEQ ID NO: 66735 - DNA, 25 bp, Artificial
  Probe
gcacccgaaagattgagttatttgg

SEQ ID NO: 66736 - DNA, 25 bp, Artificial
  Probe
ggcacccgaaagattgagttatttg

SEQ ID NO: 66737 - DNA, 25 bp, Artificial
  Probe
ggtgtcatctctaaacctaagaact

SEQ ID NO: 66738 - DNA, 25 bp, Artificial
  Probe
aaagattgagttatttggacgacca

SEQ ID NO: 66739 - DNA, 25 bp, Artificial
  Probe
atggtgtcatctctaaacctaagaa

SEQ ID NO: 66740 - DNA, 25 bp, Artificial
  Probe
gtttaagcacaggtatccagatggt

SEQ ID NO: 66741 - DNA, 25 bp, Artificial
  Probe
atgtgattgtagctgaggttcgttc

SEQ ID NO: 66742 - DNA, 25 bp, Artificial
  Probe
gatgtgattgtagctgaggttcgtt

SEQ ID NO: 66743 - DNA, 25 bp, Artificial
  Probe
tgaaatatatggcatgattgagaga

SEQ ID NO: 66744 - DNA, 25 bp, Artificial
  Probe
cacaaaccagatgaaatatatggca

SEQ ID NO: 66745 - DNA, 25 bp, Artificial
  Probe
aagattgagttatttggacgaccac

SEQ ID NO: 66746 - DNA, 25 bp, Artificial
  Probe
tggcacccgaaagattgagttattt

SEQ ID NO: 66747 - DNA, 25 bp, Artificial
  Probe
tcacaaaccagatgaaatatatggc

SEQ ID NO: 66748 - DNA, 25 bp, Artificial
  Probe
gaaatatatggcatgattgagagac

SEQ ID NO: 66749 - DNA, 25 bp, Artificial
  Probe
ttaagcacaggtatccagatggtgt

SEQ ID NO: 66750 - DNA, 25 bp, Artificial
  Probe
acaaaccagatgaaatatatggcat

SEQ ID NO: 66751 - DNA, 25 bp, Artificial
  Probe
acctaagaacttataggagacattg

SEQ ID NO: 66752 - DNA, 25 bp, Artificial
  Probe
aaaccagatgaaatatatggcatga

SEQ ID NO: 66753 - DNA, 25 bp, Artificial
  Probe
caaaccagatgaaatatatggcatg

SEQ ID NO: 66754 - DNA, 25 bp, Artificial
  Probe
ctggcacccgaaagattgagttatt

SEQ ID NO: 66755 - DNA, 25 bp, Artificial
  Probe
ggtttaagcacaggtatccagatgg

SEQ ID NO: 66756 - DNA, 25 bp, Artificial
  Probe
gattgagttatttggacgaccacac

SEQ ID NO: 66757 - DNA, 25 bp, Artificial
  Probe
cagatgaaatatatggcatgattga

SEQ ID NO: 66758 - DNA, 25 bp, Artificial
  Probe
accagatgaaatatatggcatgatt

SEQ ID NO: 66759 - DNA, 25 bp, Artificial
  Probe
aaccagatgaaatatatggcatgat

SEQ ID NO: 66760 - DNA, 25 bp, Artificial
  Probe
gccttgtatatcctatctgagccat

SEQ ID NO: 66761 - DNA, 25 bp, Artificial
  Probe
ccttgtatatcctatctgagccatg

SEQ ID NO: 66762 - DNA, 25 bp, Artificial
  Probe
ttgtatatcctatctgagccatgtc

SEQ ID NO: 66763 - DNA, 25 bp, Artificial
  Probe
cttgtatatcctatctgagccatgt

SEQ ID NO: 66764 - DNA, 25 bp, Artificial
  Probe
tgtatatcctatctgagccatgtcg

SEQ ID NO: 66765 - DNA, 25 bp, Artificial
  Probe
gtatatcctatctgagccatgtcgg

SEQ ID NO: 66766 - DNA, 25 bp, Artificial
  Probe
cgtctccgttgtgtttaatttattt

SEQ ID NO: 66767 - DNA, 25 bp, Artificial
  Probe
gtaaacaggagacacaaggacaaac

SEQ ID NO: 66768 - DNA, 25 bp, Artificial
  Probe
tatatcctatctgagccatgtcgga

SEQ ID NO: 66769 - DNA, 25 bp, Artificial
  Probe
taaacaggagacacaaggacaaaca

SEQ ID NO: 66770 - DNA, 25 bp, Artificial
  Probe
ttcctggccttgtatatcctatctg

SEQ ID NO: 66771 - DNA, 25 bp, Artificial
  Probe
aaaggtaaacaggagacacaaggac

SEQ ID NO: 66772 - DNA, 25 bp, Artificial
  Probe
caaaggtaaacaggagacacaagga

SEQ ID NO: 66773 - DNA, 25 bp, Artificial
  Probe
tctccgttgtgtttaatttatttca

SEQ ID NO: 66774 - DNA, 25 bp, Artificial
  Probe
cctggccttgtatatcctatctgag

SEQ ID NO: 66775 - DNA, 25 bp, Artificial
  Probe
atatcctatctgagccatgtcggaa

SEQ ID NO: 66776 - DNA, 25 bp, Artificial
  Probe
ggtaaacaggagacacaaggacaaa

SEQ ID NO: 66777 - DNA, 25 bp, Artificial
  Probe
gtctccgttgtgtttaatttatttc

SEQ ID NO: 66778 - DNA, 25 bp, Artificial
  Probe
tcctggccttgtatatcctatctga

SEQ ID NO: 66779 - DNA, 25 bp, Artificial
  Probe
ctggccttgtatatcctatctgagc

SEQ ID NO: 66780 - DNA, 25 bp, Artificial
  Probe
ctgcggtttaaccttcttattgtta

SEQ ID NO: 66781 - DNA, 25 bp, Artificial
  Probe
tatcctatctgagccatgtcggaag

SEQ ID NO: 66782 - DNA, 25 bp, Artificial
  Probe
tgcggtttaaccttcttattgttat

SEQ ID NO: 66783 - DNA, 25 bp, Artificial
  Probe
actgcggtttaaccttcttattgtt

SEQ ID NO: 66784 - DNA, 25 bp, Artificial
  Probe
aacactgcggtttaaccttcttatt

SEQ ID NO: 66785 - DNA, 25 bp, Artificial
  Probe
ccaaaggtaaacaggagacacaagg

SEQ ID NO: 66786 - DNA, 25 bp, Artificial
  Probe
cccaaaggtaaacaggagacacaag

SEQ ID NO: 66787 - DNA, 25 bp, Artificial
  Probe
ctccgttgtgtttaatttatttcaa

SEQ ID NO: 66788 - DNA, 25 bp, Artificial
  Probe
aaacaggagacacaaggacaaacac

SEQ ID NO: 66789 - DNA, 25 bp, Artificial
  Probe
aggtaaacaggagacacaaggacaa

SEQ ID NO: 66790 - DNA, 25 bp, Artificial
  Probe
aaggtaaacaggagacacaaggaca

SEQ ID NO: 66791 - DNA, 25 bp, Artificial
  Probe
tgtttgtttgtttctattttggctt

SEQ ID NO: 66792 - DNA, 25 bp, Artificial
  Probe
ttgtttgtttgtttctattttggct

SEQ ID NO: 66793 - DNA, 25 bp, Artificial
  Probe
ctttcctggccttgtatatcctatc

SEQ ID NO: 66794 - DNA, 25 bp, Artificial
  Probe
cactgcggtttaaccttcttattgt

SEQ ID NO: 66795 - DNA, 25 bp, Artificial
  Probe
acactgcggtttaaccttcttattg

SEQ ID NO: 66796 - DNA, 25 bp, Artificial
  Probe
tttcctggccttgtatatcctatct

SEQ ID NO: 66797 - DNA, 25 bp, Artificial
  Probe
tctttcctggccttgtatatcctat

SEQ ID NO: 66798 - DNA, 25 bp, Artificial
  Probe
gcggtttaaccttcttattgttatt

SEQ ID NO: 66799 - DNA, 25 bp, Artificial
  Probe
aaacactgcggtttaaccttcttat

SEQ ID NO: 66800 - DNA, 25 bp, Artificial
  Probe
tgacatttaaacaatctcagtcttg

SEQ ID NO: 66801 - DNA, 25 bp, Artificial
  Probe
tttgtttgtttgtttctattttggc

SEQ ID NO: 66802 - DNA, 25 bp, Artificial
  Probe
gtctttcctggccttgtatatccta

SEQ ID NO: 66803 - DNA, 25 bp, Artificial
  Probe
ccgttgtgtttaatttatttcaatg

SEQ ID NO: 66804 - DNA, 25 bp, Artificial
  Probe
gtttgtttgtttctattttggcttt

SEQ ID NO: 66805 - DNA, 25 bp, Artificial
  Probe
agccagctctgactttataaaacat

SEQ ID NO: 66806 - DNA, 25 bp, Artificial
  Probe
gccagctctgactttataaaacata

SEQ ID NO: 66807 - DNA, 25 bp, Artificial
  Probe
ctttggaccctggactcagtatacc

SEQ ID NO: 66808 - DNA, 25 bp, Artificial
  Probe
cctttggaccctggactcagtatac

SEQ ID NO: 66809 - DNA, 25 bp, Artificial
  Probe
ccctttggaccctggactcagtata

SEQ ID NO: 66810 - DNA, 25 bp, Artificial
  Probe
ttgtgtcctgggcaagatcatgtac

SEQ ID NO: 66811 - DNA, 25 bp, Artificial
  Probe
tttggaccctggactcagtatacct

SEQ ID NO: 66812 - DNA, 25 bp, Artificial
  Probe
cagccagctctgactttataaaaca

SEQ ID NO: 66813 - DNA, 25 bp, Artificial
  Probe
ccagctctgactttataaaacataa

SEQ ID NO: 66814 - DNA, 25 bp, Artificial
  Probe
cttgtgtcctgggcaagatcatgta

SEQ ID NO: 66815 - DNA, 25 bp, Artificial
  Probe
gctcagccagctctgactttataaa

SEQ ID NO: 66816 - DNA, 25 bp, Artificial
  Probe
ctcagccagctctgactttataaaa

SEQ ID NO: 66817 - DNA, 25 bp, Artificial
  Probe
agctcagccagctctgactttataa

SEQ ID NO: 66818 - DNA, 25 bp, Artificial
  Probe
aagctcagccagctctgactttata

SEQ ID NO: 66819 - DNA, 25 bp, Artificial
  Probe
tcagccagctctgactttataaaac

SEQ ID NO: 66820 - DNA, 25 bp, Artificial
  Probe
gaagctcagccagctctgactttat

SEQ ID NO: 66821 - DNA, 25 bp, Artificial
  Probe
cagctctgactttataaaacataaa

SEQ ID NO: 66822 - DNA, 25 bp, Artificial
  Probe
tacagtggcaataacattgaattgg

SEQ ID NO: 66823 - DNA, 25 bp, Artificial
  Probe
tggtgagaagtaaacaagaaagttc

SEQ ID NO: 66824 - DNA, 25 bp, Artificial
  Probe
ctggtgagaagtaaacaagaaagtt

SEQ ID NO: 66825 - DNA, 25 bp, Artificial
  Probe
actacagtggcaataacattgaatt

SEQ ID NO: 66826 - DNA, 25 bp, Artificial
  Probe
ctacagtggcaataacattgaattg

SEQ ID NO: 66827 - DNA, 25 bp, Artificial
  Probe
agactggtgagaagtaaacaagaaa

SEQ ID NO: 66828 - DNA, 25 bp, Artificial
  Probe
actggtgagaagtaaacaagaaagt

SEQ ID NO: 66829 - DNA, 25 bp, Artificial
  Probe
gactggtgagaagtaaacaagaaag

SEQ ID NO: 66830 - DNA, 25 bp, Artificial
  Probe
cagactggtgagaagtaaacaagaa

SEQ ID NO: 66831 - DNA, 25 bp, Artificial
  Probe
aacagactggtgagaagtaaacaag

SEQ ID NO: 66832 - DNA, 25 bp, Artificial
  Probe
gaacagactggtgagaagtaaacaa

SEQ ID NO: 66833 - DNA, 25 bp, Artificial
  Probe
cactacagtggcaataacattgaat

SEQ ID NO: 66834 - DNA, 25 bp, Artificial
  Probe
ccatcactacagtggcaataacatt

SEQ ID NO: 66835 - DNA, 25 bp, Artificial
  Probe
atcactacagtggcaataacattga

SEQ ID NO: 66836 - DNA, 25 bp, Artificial
  Probe
catcactacagtggcaataacattg

SEQ ID NO: 66837 - DNA, 25 bp, Artificial
  Probe
tcactacagtggcaataacattgaa

SEQ ID NO: 66838 - DNA, 25 bp, Artificial
  Probe
acagactggtgagaagtaaacaaga

SEQ ID NO: 66839 - DNA, 25 bp, Artificial
  Probe
agaacagactggtgagaagtaaaca

SEQ ID NO: 66840 - DNA, 25 bp, Artificial
  Probe
cagaacagactggtgagaagtaaac

SEQ ID NO: 66841 - DNA, 25 bp, Artificial
  Probe
tccatcactacagtggcaataacat

SEQ ID NO: 66842 - DNA, 25 bp, Artificial
  Probe
gctttgaggaaatctgaaatagaat

SEQ ID NO: 66843 - DNA, 25 bp, Artificial
  Probe
ggtacaaacagactctgaagatgat

SEQ ID NO: 66844 - DNA, 25 bp, Artificial
  Probe
atacgactcactatagggaatttgg

SEQ ID NO: 66845 - DNA, 25 bp, Artificial
  Probe
gtacaaacagactctgaagatgatc

SEQ ID NO: 66846 - DNA, 25 bp, Artificial
  Probe
ccagctttgaggaaatctgaaatag

SEQ ID NO: 66847 - DNA, 25 bp, Artificial
  Probe
agctttgaggaaatctgaaatagaa

SEQ ID NO: 66848 - DNA, 25 bp, Artificial
  Probe
gtccatcactacagtggcaataaca

SEQ ID NO: 66849 - DNA, 25 bp, Artificial
  Probe
tgtccatcactacagtggcaataac

SEQ ID NO: 66850 - DNA, 25 bp, Artificial
  Probe
gtgtccatcactacagtggcaataa

SEQ ID NO: 66851 - DNA, 25 bp, Artificial
  Probe
cagctttgaggaaatctgaaataga

SEQ ID NO: 66852 - DNA, 25 bp, Artificial
  Probe
aatacgactcactatagggaatttg

SEQ ID NO: 66853 - DNA, 25 bp, Artificial
  Probe
tccagctttgaggaaatctgaaata

SEQ ID NO: 66854 - DNA, 25 bp, Artificial
  Probe
ggtgagaagtaaacaagaaagttct

SEQ ID NO: 66855 - DNA, 25 bp, Artificial
  Probe
gggtacaaacagactctgaagatga

SEQ ID NO: 66856 - DNA, 25 bp, Artificial
  Probe
tctgaaatagaatactatgccatgt

SEQ ID NO: 66857 - DNA, 25 bp, Artificial
  Probe
gtccagctttgaggaaatctgaaat

SEQ ID NO: 66858 - DNA, 25 bp, Artificial
  Probe
agaagtaaacaagaaagttctcctt

SEQ ID NO: 66859 - DNA, 25 bp, Artificial
  Probe
gaaatagaatactatgccatgttgg

SEQ ID NO: 66860 - DNA, 25 bp, Artificial
  Probe
acagtggcaataacattgaattggg

SEQ ID NO: 66861 - DNA, 25 bp, Artificial
  Probe
tgaaatagaatactatgccatgttg

SEQ ID NO: 66862 - DNA, 25 bp, Artificial
  Probe
gaagtaaacaagaaagttctccttt

SEQ ID NO: 66863 - DNA, 25 bp, Artificial
  Probe
ctgaaatagaatactatgccatgtt

SEQ ID NO: 66864 - DNA, 25 bp, Artificial
  Probe
aataacattgaattgggcacagcgt

SEQ ID NO: 66865 - DNA, 25 bp, Artificial
  Probe
tgtccagctttgaggaaatctgaaa

SEQ ID NO: 66866 - DNA, 25 bp, Artificial
  Probe
taatacgactcactatagggaattt

SEQ ID NO: 66867 - DNA, 25 bp, Artificial
  Probe
ttcgtgtgacaagaactaggattag

SEQ ID NO: 66868 - DNA, 25 bp, Artificial
  Probe
cttcgtgtgacaagaactaggatta

SEQ ID NO: 66869 - DNA, 25 bp, Artificial
  Probe
aatatacctgacgagtacctctcaa

SEQ ID NO: 66870 - DNA, 25 bp, Artificial
  Probe
atatacctgacgagtacctctcaag

SEQ ID NO: 66871 - DNA, 25 bp, Artificial
  Probe
gaatatacctgacgagtacctctca

SEQ ID NO: 66872 - DNA, 25 bp, Artificial
  Probe
acttcgtgtgacaagaactaggatt

SEQ ID NO: 66873 - DNA, 25 bp, Artificial
  Probe
aacttcgtgtgacaagaactaggat

SEQ ID NO: 66874 - DNA, 25 bp, Artificial
  Probe
ggaatatacctgacgagtacctctc

SEQ ID NO: 66875 - DNA, 25 bp, Artificial
  Probe
tgtgacaagaactaggattagtagc

SEQ ID NO: 66876 - DNA, 25 bp, Artificial
  Probe
cgtgtgacaagaactaggattagta

SEQ ID NO: 66877 - DNA, 25 bp, Artificial
  Probe
gacaacttcgtgtgacaagaactag

SEQ ID NO: 66878 - DNA, 25 bp, Artificial
  Probe
tgtttgtgatactggttgatttgtt

SEQ ID NO: 66879 - DNA, 25 bp, Artificial
  Probe
ttgtttgtgatactggttgatttgt

SEQ ID NO: 66880 - DNA, 25 bp, Artificial
  Probe
aatgacaacttcgtgtgacaagaac

SEQ ID NO: 66881 - DNA, 25 bp, Artificial
  Probe
caatgacaacttcgtgtgacaagaa

SEQ ID NO: 66882 - DNA, 25 bp, Artificial
  Probe
tcgtgtgacaagaactaggattagt

SEQ ID NO: 66883 - DNA, 25 bp, Artificial
  Probe
tgacaacttcgtgtgacaagaacta

SEQ ID NO: 66884 - DNA, 25 bp, Artificial
  Probe
aggaatatacctgacgagtacctct

SEQ ID NO: 66885 - DNA, 25 bp, Artificial
  Probe
ttagataaactgtaggtagggcttt

SEQ ID NO: 66886 - DNA, 25 bp, Artificial
  Probe
ttccctttcattacagatgtcaaga

SEQ ID NO: 66887 - DNA, 25 bp, Artificial
  Probe
gtgtgacaagaactaggattagtag

SEQ ID NO: 66888 - DNA, 25 bp, Artificial
  Probe
ccctttcattacagatgtcaagatg

SEQ ID NO: 66889 - DNA, 25 bp, Artificial
  Probe
tccctttcattacagatgtcaagat

SEQ ID NO: 66890 - DNA, 25 bp, Artificial
  Probe
tcacgaggaatatacctgacgagta

SEQ ID NO: 66891 - DNA, 25 bp, Artificial
  Probe
gtttgtgatactggttgatttgttt

SEQ ID NO: 66892 - DNA, 25 bp, Artificial
  Probe
tttgtttgtgatactggttgatttg

SEQ ID NO: 66893 - DNA, 25 bp, Artificial
  Probe
attagataaactgtaggtagggctt

SEQ ID NO: 66894 - DNA, 25 bp, Artificial
  Probe
caacttcgtgtgacaagaactagga

SEQ ID NO: 66895 - DNA, 25 bp, Artificial
  Probe
tttccctttcattacagatgtcaag

SEQ ID NO: 66896 - DNA, 25 bp, Artificial
  Probe
aattagataaactgtaggtagggct

SEQ ID NO: 66897 - DNA, 25 bp, Artificial
  Probe
cacgaggaatatacctgacgagtac

SEQ ID NO: 66898 - DNA, 25 bp, Artificial
  Probe
atgacaacttcgtgtgacaagaact

SEQ ID NO: 66899 - DNA, 25 bp, Artificial
  Probe
gtgacaagaactaggattagtagct

SEQ ID NO: 66900 - DNA, 25 bp, Artificial
  Probe
cctttcattacagatgtcaagatgt

SEQ ID NO: 66901 - DNA, 25 bp, Artificial
  Probe
aaattagataaactgtaggtagggc

SEQ ID NO: 66902 - DNA, 25 bp, Artificial
  Probe
tgacaagaactaggattagtagctt

SEQ ID NO: 66903 - DNA, 25 bp, Artificial
  Probe
acaacttcgtgtgacaagaactagg

SEQ ID NO: 66904 - DNA, 25 bp, Artificial
  Probe
tagataaactgtaggtagggcttta

SEQ ID NO: 66905 - DNA, 25 bp, Artificial
  Probe
ttcacgaggaatatacctgacgagt

SEQ ID NO: 66906 - DNA, 25 bp, Artificial
  Probe
tatttcacgaggaatatacctgacg

SEQ ID NO: 66907 - DNA, 25 bp, Artificial
  Probe
tatacctgacgagtacctctcaagc

SEQ ID NO: 66908 - DNA, 25 bp, Artificial
  Probe
cgaggaatatacctgacgagtacct

SEQ ID NO: 66909 - DNA, 25 bp, Artificial
  Probe
tttgtgatactggttgatttgttta

SEQ ID NO: 66910 - DNA, 25 bp, Artificial
  Probe
acccattctttcagctagataacat

SEQ ID NO: 66911 - DNA, 25 bp, Artificial
  Probe
atttcacgaggaatatacctgacga

SEQ ID NO: 66912 - DNA, 25 bp, Artificial
  Probe
cgtctccatatcgtaatactctctg

SEQ ID NO: 66913 - DNA, 25 bp, Artificial
  Probe
gtctccatatcgtaatactctctgt

SEQ ID NO: 66914 - DNA, 25 bp, Artificial
  Probe
ccatatcgtaatactctctgtaacc

SEQ ID NO: 66915 - DNA, 25 bp, Artificial
  Probe
tctccatatcgtaatactctctgta

SEQ ID NO: 66916 - DNA, 25 bp, Artificial
  Probe
tccatatcgtaatactctctgtaac

SEQ ID NO: 66917 - DNA, 25 bp, Artificial
  Probe
ttctaatcgtggtgtgtctatttgt

SEQ ID NO: 66918 - DNA, 25 bp, Artificial
  Probe
taatcgtggtgtgtctatttgtagg

SEQ ID NO: 66919 - DNA, 25 bp, Artificial
  Probe
tctaatcgtggtgtgtctatttgta

SEQ ID NO: 66920 - DNA, 25 bp, Artificial
  Probe
tttctaatcgtggtgtgtctatttg

SEQ ID NO: 66921 - DNA, 25 bp, Artificial
  Probe
ctaatcgtggtgtgtctatttgtag

SEQ ID NO: 66922 - DNA, 25 bp, Artificial
  Probe
ctccatatcgtaatactctctgtaa

SEQ ID NO: 66923 - DNA, 25 bp, Artificial
  Probe
tttatggtccctttctttgatggtg

SEQ ID NO: 66924 - DNA, 25 bp, Artificial
  Probe
aatcgtggtgtgtctatttgtagga

SEQ ID NO: 66925 - DNA, 25 bp, Artificial
  Probe
catatcgtaatactctctgtaaccc

SEQ ID NO: 66926 - DNA, 25 bp, Artificial
  Probe
cttccgatttccattggttatgctt

SEQ ID NO: 66927 - DNA, 25 bp, Artificial
  Probe
ttccgatttccattggttatgcttc

SEQ ID NO: 66928 - DNA, 25 bp, Artificial
  Probe
ccagttaaagggtttcaacatcacg

SEQ ID NO: 66929 - DNA, 25 bp, Artificial
  Probe
accagttaaagggtttcaacatcac

SEQ ID NO: 66930 - DNA, 25 bp, Artificial
  Probe
acgtctccatatcgtaatactctct

SEQ ID NO: 66931 - DNA, 25 bp, Artificial
  Probe
gttaaagggtttcaacatcacgttc

SEQ ID NO: 66932 - DNA, 25 bp, Artificial
  Probe
ttatggtccctttctttgatggtgc

SEQ ID NO: 66933 - DNA, 25 bp, Artificial
  Probe
agttaaagggtttcaacatcacgtt

SEQ ID NO: 66934 - DNA, 25 bp, Artificial
  Probe
tctattttctaatcgtggtgtgtct

SEQ ID NO: 66935 - DNA, 25 bp, Artificial
  Probe
tatcgtaatactctctgtaacccca

SEQ ID NO: 66936 - DNA, 25 bp, Artificial
  Probe
ttttatggtccctttctttgatggt

SEQ ID NO: 66937 - DNA, 25 bp, Artificial
  Probe
attttatggtccctttctttgatgg

SEQ ID NO: 66938 - DNA, 25 bp, Artificial
  Probe
ttctattttctaatcgtggtgtgtc

SEQ ID NO: 66939 - DNA, 25 bp, Artificial
  Probe
atatcgtaatactctctgtaacccc

SEQ ID NO: 66940 - DNA, 25 bp, Artificial
  Probe
ttaaagggtttcaacatcacgttcc

SEQ ID NO: 66941 - DNA, 25 bp, Artificial
  Probe
cagttaaagggtttcaacatcacgt

SEQ ID NO: 66942 - DNA, 25 bp, Artificial
  Probe
ttttctaatcgtggtgtgtctattt

SEQ ID NO: 66943 - DNA, 25 bp, Artificial
  Probe
tggagaactagggaaaacaaaactt

SEQ ID NO: 66944 - DNA, 25 bp, Artificial
  Probe
gatttccattggttatgcttcccac

SEQ ID NO: 66945 - DNA, 25 bp, Artificial
  Probe
ggagaactagggaaaacaaaacttt

SEQ ID NO: 66946 - DNA, 25 bp, Artificial
  Probe
tccgatttccattggttatgcttcc

SEQ ID NO: 66947 - DNA, 25 bp, Artificial
  Probe
ccttccgatttccattggttatgct

SEQ ID NO: 66948 - DNA, 25 bp, Artificial
  Probe
attttctaatcgtggtgtgtctatt

SEQ ID NO: 66949 - DNA, 25 bp, Artificial
  Probe
attctattttctaatcgtggtgtgt

SEQ ID NO: 66950 - DNA, 25 bp, Artificial
  Probe
ctattttctaatcgtggtgtgtcta

SEQ ID NO: 66951 - DNA, 25 bp, Artificial
  Probe
gtggagaactagggaaaacaaaact

SEQ ID NO: 66952 - DNA, 25 bp, Artificial
  Probe
tgaattttatggtccctttctttga

SEQ ID NO: 66953 - DNA, 25 bp, Artificial
  Probe
gttcccaaaccttccgatttccatt

SEQ ID NO: 66954 - DNA, 25 bp, Artificial
  Probe
tatggtccctttctttgatggtgct

SEQ ID NO: 66955 - DNA, 25 bp, Artificial
  Probe
ctctgtaaccccagtgtaaaatgta

SEQ ID NO: 66956 - DNA, 25 bp, Artificial
  Probe
taatactctctgtaaccccagtgta

SEQ ID NO: 66957 - DNA, 25 bp, Artificial
  Probe
catgttgttagcagtagagacgttc

SEQ ID NO: 66958 - DNA, 25 bp, Artificial
  Probe
atgttgttagcagtagagacgttct

SEQ ID NO: 66959 - DNA, 25 bp, Artificial
  Probe
ccatgttgttagcagtagagacgtt

SEQ ID NO: 66960 - DNA, 25 bp, Artificial
  Probe
tatgggaatgaagatgtcatgggat

SEQ ID NO: 66961 - DNA, 25 bp, Artificial
  Probe
gttatgggaatgaagatgtcatggg

SEQ ID NO: 66962 - DNA, 25 bp, Artificial
  Probe
ggttatgggaatgaagatgtcatgg

SEQ ID NO: 66963 - DNA, 25 bp, Artificial
  Probe
gggttatgggaatgaagatgtcatg

SEQ ID NO: 66964 - DNA, 25 bp, Artificial
  Probe
ggaatgaagatgtcatgggatgatg

SEQ ID NO: 66965 - DNA, 25 bp, Artificial
  Probe
ttatgggaatgaagatgtcatggga

SEQ ID NO: 66966 - DNA, 25 bp, Artificial
  Probe
gtcatgggatgatgccaatgttaaa

SEQ ID NO: 66967 - DNA, 25 bp, Artificial
  Probe
aaggggttatgggaatgaagatgtc

SEQ ID NO: 66968 - DNA, 25 bp, Artificial
  Probe
gaaggggttatgggaatgaagatgt

SEQ ID NO: 66969 - DNA, 25 bp, Artificial
  Probe
gaatgaagatgtcatgggatgatgc

SEQ ID NO: 66970 - DNA, 25 bp, Artificial
  Probe
ttgttagcagtagagacgttctcag

SEQ ID NO: 66971 - DNA, 25 bp, Artificial
  Probe
gttagcagtagagacgttctcagag

SEQ ID NO: 66972 - DNA, 25 bp, Artificial
  Probe
gggaatgaagatgtcatgggatgat

SEQ ID NO: 66973 - DNA, 25 bp, Artificial
  Probe
gttgttagcagtagagacgttctca

SEQ ID NO: 66974 - DNA, 25 bp, Artificial
  Probe
tgttgttagcagtagagacgttctc

SEQ ID NO: 66975 - DNA, 25 bp, Artificial
  Probe
atgtcatgggatgatgccaatgtta

SEQ ID NO: 66976 - DNA, 25 bp, Artificial
  Probe
ggaaggggttatgggaatgaagatg

SEQ ID NO: 66977 - DNA, 25 bp, Artificial
  Probe
atgggaatgaagatgtcatgggatg

SEQ ID NO: 66978 - DNA, 25 bp, Artificial
  Probe
tgtcatgggatgatgccaatgttaa

SEQ ID NO: 66979 - DNA, 25 bp, Artificial
  Probe
tgttagcagtagagacgttctcaga

SEQ ID NO: 66980 - DNA, 25 bp, Artificial
  Probe
gaagatgtcatgggatgatgccaat

SEQ ID NO: 66981 - DNA, 25 bp, Artificial
  Probe
aatgaagatgtcatgggatgatgcc

SEQ ID NO: 66982 - DNA, 25 bp, Artificial
  Probe
gccatgttgttagcagtagagacgt

SEQ ID NO: 66983 - DNA, 25 bp, Artificial
  Probe
aggggttatgggaatgaagatgtca

SEQ ID NO: 66984 - DNA, 25 bp, Artificial
  Probe
aagatgtcatgggatgatgccaatg

SEQ ID NO: 66985 - DNA, 25 bp, Artificial
  Probe
tgggaatgaagatgtcatgggatga

SEQ ID NO: 66986 - DNA, 25 bp, Artificial
  Probe
tcatgggatgatgccaatgttaaaa

SEQ ID NO: 66987 - DNA, 25 bp, Artificial
  Probe
gatgtcatgggatgatgccaatgtt

SEQ ID NO: 66988 - DNA, 25 bp, Artificial
  Probe
gggaaggggttatgggaatgaagat

SEQ ID NO: 66989 - DNA, 25 bp, Artificial
  Probe
ttagcagtagagacgttctcagagc

SEQ ID NO: 66990 - DNA, 25 bp, Artificial
  Probe
gtttgcacttcttggttacttgctc

SEQ ID NO: 66991 - DNA, 25 bp, Artificial
  Probe
ggggttatgggaatgaagatgtcat

SEQ ID NO: 66992 - DNA, 25 bp, Artificial
  Probe
cagtttgcacttcttggttacttgc

SEQ ID NO: 66993 - DNA, 25 bp, Artificial
  Probe
gcagtttgcacttcttggttacttg

SEQ ID NO: 66994 - DNA, 25 bp, Artificial
  Probe
ctgatgcaagtaaggtgacagcaac

SEQ ID NO: 66995 - DNA, 25 bp, Artificial
  Probe
agtttgcacttcttggttacttgct

SEQ ID NO: 66996 - DNA, 25 bp, Artificial
  Probe
atgaagatgtcatgggatgatgcca

SEQ ID NO: 66997 - DNA, 25 bp, Artificial
  Probe
aagtaaggtgacagcaacccagttc

SEQ ID NO: 66998 - DNA, 25 bp, Artificial
  Probe
tgaagatgtcatgggatgatgccaa

SEQ ID NO: 66999 - DNA, 25 bp, Artificial
  Probe
ttgcacttcttggttacttgctcct

SEQ ID NO: 67000 - DNA, 25 bp, Artificial
  Probe
tagcagtagagacgttctcagagct

SEQ ID NO: 67001 - DNA, 25 bp, Artificial
  Probe
agatgtcatgggatgatgccaatgt

SEQ ID NO: 67002 - DNA, 25 bp, Artificial
  Probe
ttcagcaagacaaccaagactttag

SEQ ID NO: 67003 - DNA, 25 bp, Artificial
  Probe
cttcagcaagacaaccaagacttta

SEQ ID NO: 67004 - DNA, 25 bp, Artificial
  Probe
aatcatgctcaacaatttcgacaag

SEQ ID NO: 67005 - DNA, 25 bp, Artificial
  Probe
aaatcatgctcaacaatttcgacaa

SEQ ID NO: 67006 - DNA, 25 bp, Artificial
  Probe
tgacggaaatcatgctcaacaattt

SEQ ID NO: 67007 - DNA, 25 bp, Artificial
  Probe
atcatgctcaacaatttcgacaagg

SEQ ID NO: 67008 - DNA, 25 bp, Artificial
  Probe
gtgacggaaatcatgctcaacaatt

SEQ ID NO: 67009 - DNA, 25 bp, Artificial
  Probe
tcagcaagacaaccaagactttagc

SEQ ID NO: 67010 - DNA, 25 bp, Artificial
  Probe
ccttcagcaagacaaccaagacttt

SEQ ID NO: 67011 - DNA, 25 bp, Artificial
  Probe
gaatcctggtgtttgcttccatcta

SEQ ID NO: 67012 - DNA, 25 bp, Artificial
  Probe
aatcctggtgtttgcttccatctag

SEQ ID NO: 67013 - DNA, 25 bp, Artificial
  Probe
caagacaaccaagactttagcccag

SEQ ID NO: 67014 - DNA, 25 bp, Artificial
  Probe
agtgacggaaatcatgctcaacaat

SEQ ID NO: 67015 - DNA, 25 bp, Artificial
  Probe
aagtgacggaaatcatgctcaacaa

SEQ ID NO: 67016 - DNA, 25 bp, Artificial
  Probe
tcatgctcaacaatttcgacaaggt

SEQ ID NO: 67017 - DNA, 25 bp, Artificial
  Probe
cagcaagacaaccaagactttagcc

SEQ ID NO: 67018 - DNA, 25 bp, Artificial
  Probe
catgctcaacaatttcgacaaggtc

SEQ ID NO: 67019 - DNA, 25 bp, Artificial
  Probe
ttcttccgagtggagaggacagtag

SEQ ID NO: 67020 - DNA, 25 bp, Artificial
  Probe
caagtgacggaaatcatgctcaaca

SEQ ID NO: 67021 - DNA, 25 bp, Artificial
  Probe
aacaatttcgacaaggtcctggaac

SEQ ID NO: 67022 - DNA, 25 bp, Artificial
  Probe
caacaatttcgacaaggtcctggaa

SEQ ID NO: 67023 - DNA, 25 bp, Artificial
  Probe
agaatcctggtgtttgcttccatct

SEQ ID NO: 67024 - DNA, 25 bp, Artificial
  Probe
atcctggtgtttgcttccatctagg

SEQ ID NO: 67025 - DNA, 25 bp, Artificial
  Probe
aaccaagactttagcccagcagaag

SEQ ID NO: 67026 - DNA, 25 bp, Artificial
  Probe
tttcttccgagtggagaggacagta

SEQ ID NO: 67027 - DNA, 25 bp, Artificial
  Probe
ctcaacaatttcgacaaggtcctgg

SEQ ID NO: 67028 - DNA, 25 bp, Artificial
  Probe
atgctcaacaatttcgacaaggtcc

SEQ ID NO: 67029 - DNA, 25 bp, Artificial
  Probe
gacggaaatcatgctcaacaatttc

SEQ ID NO: 67030 - DNA, 25 bp, Artificial
  Probe
atgagttctgccttcagcaagacaa

SEQ ID NO: 67031 - DNA, 25 bp, Artificial
  Probe
gaaatcatgctcaacaatttcgaca

SEQ ID NO: 67032 - DNA, 25 bp, Artificial
  Probe
ctggtgtttgcttccatctaggaca

SEQ ID NO: 67033 - DNA, 25 bp, Artificial
  Probe
ccaagtgacggaaatcatgctcaac

SEQ ID NO: 67034 - DNA, 25 bp, Artificial
  Probe
atctttcttccgagtggagaggaca

SEQ ID NO: 67035 - DNA, 25 bp, Artificial
  Probe
ggaaatcatgctcaacaatttcgac

SEQ ID NO: 67036 - DNA, 25 bp, Artificial
  Probe
tcaacaatttcgacaaggtcctgga

SEQ ID NO: 67037 - DNA, 25 bp, Artificial
  Probe
accaagtgacggaaatcatgctcaa

SEQ ID NO: 67038 - DNA, 25 bp, Artificial
  Probe
gacatgagttctgccttcagcaaga

SEQ ID NO: 67039 - DNA, 25 bp, Artificial
  Probe
gctcaacaatttcgacaaggtcctg

SEQ ID NO: 67040 - DNA, 25 bp, Artificial
  Probe
agaccaagtgacggaaatcatgctc

SEQ ID NO: 67041 - DNA, 25 bp, Artificial
  Probe
cggaaatcatgctcaacaatttcga

SEQ ID NO: 67042 - DNA, 25 bp, Artificial
  Probe
acggaaatcatgctcaacaatttcg

SEQ ID NO: 67043 - DNA, 25 bp, Artificial
  Probe
cctggtgtttgcttccatctaggac

SEQ ID NO: 67044 - DNA, 25 bp, Artificial
  Probe
tgctcaacaatttcgacaaggtcct

SEQ ID NO: 67045 - DNA, 25 bp, Artificial
  Probe
tggtgtttgcttccatctaggacac

SEQ ID NO: 67046 - DNA, 25 bp, Artificial
  Probe
tcaccatacttccactattgttaca

SEQ ID NO: 67047 - DNA, 25 bp, Artificial
  Probe
atcaccatacttccactattgttac

SEQ ID NO: 67048 - DNA, 25 bp, Artificial
  Probe
caccatacttccactattgttacat

SEQ ID NO: 67049 - DNA, 25 bp, Artificial
  Probe
ttatcaccatacttccactattgtt

SEQ ID NO: 67050 - DNA, 25 bp, Artificial
  Probe
accatacttccactattgttacatg

SEQ ID NO: 67051 - DNA, 25 bp, Artificial
  Probe
ccatacttccactattgttacatga

SEQ ID NO: 67052 - DNA, 25 bp, Artificial
  Probe
atacttccactattgttacatgagg

SEQ ID NO: 67053 - DNA, 25 bp, Artificial
  Probe
acacatttatcaccatacttccact

SEQ ID NO: 67054 - DNA, 25 bp, Artificial
  Probe
aacacatttatcaccatacttccac

SEQ ID NO: 67055 - DNA, 25 bp, Artificial
  Probe
tatcaccatacttccactattgtta

SEQ ID NO: 67056 - DNA, 25 bp, Artificial
  Probe
gaacacatttatcaccatacttcca

SEQ ID NO: 67057 - DNA, 25 bp, Artificial
  Probe
cacatttatcaccatacttccacta

SEQ ID NO: 67058 - DNA, 25 bp, Artificial
  Probe
tgaacacatttatcaccatacttcc

SEQ ID NO: 67059 - DNA, 25 bp, Artificial
  Probe
tacttccactattgttacatgaggg

SEQ ID NO: 67060 - DNA, 25 bp, Artificial
  Probe
acagactatgagtgttcaaattcca

SEQ ID NO: 67061 - DNA, 25 bp, Artificial
  Probe
cttccactattgttacatgagggta

SEQ ID NO: 67062 - DNA, 25 bp, Artificial
  Probe
catacttccactattgttacatgag

SEQ ID NO: 67063 - DNA, 25 bp, Artificial
  Probe
gacagactatgagtgttcaaattcc

SEQ ID NO: 67064 - DNA, 25 bp, Artificial
  Probe
tgagacagactatgagtgttcaaat

SEQ ID NO: 67065 - DNA, 25 bp, Artificial
  Probe
agacagactatgagtgttcaaattc

SEQ ID NO: 67066 - DNA, 25 bp, Artificial
  Probe
gagacagactatgagtgttcaaatt

SEQ ID NO: 67067 - DNA, 25 bp, Artificial
  Probe
cagactatgagtgttcaaattccac

SEQ ID NO: 67068 - DNA, 25 bp, Artificial
  Probe
tttatcaccatacttccactattgt

SEQ ID NO: 67069 - DNA, 25 bp, Artificial
  Probe
acttccactattgttacatgagggt

SEQ ID NO: 67070 - DNA, 25 bp, Artificial
  Probe
agactatgagtgttcaaattccacc

SEQ ID NO: 67071 - DNA, 25 bp, Artificial
  Probe
gactatgagtgttcaaattccacca

SEQ ID NO: 67072 - DNA, 25 bp, Artificial
  Probe
acatttatcaccatacttccactat

SEQ ID NO: 67073 - DNA, 25 bp, Artificial
  Probe
actatgagtgttcaaattccaccac

SEQ ID NO: 67074 - DNA, 25 bp, Artificial
  Probe
gtcttgctgattggagttggctatg

SEQ ID NO: 67075 - DNA, 25 bp, Artificial
  Probe
ctatgagtgttcaaattccaccacc

SEQ ID NO: 67076 - DNA, 25 bp, Artificial
  Probe
ttccactattgttacatgagggtaa

SEQ ID NO: 67077 - DNA, 25 bp, Artificial
  Probe
atgaacacatttatcaccatacttc

SEQ ID NO: 67078 - DNA, 25 bp, Artificial
  Probe
cttgctgattggagttggctatgtg

SEQ ID NO: 67079 - DNA, 25 bp, Artificial
  Probe
tatgagtgttcaaattccaccacct

SEQ ID NO: 67080 - DNA, 25 bp, Artificial
  Probe
tcttgctgattggagttggctatgt

SEQ ID NO: 67081 - DNA, 25 bp, Artificial
  Probe
atttatcaccatacttccactattg

SEQ ID NO: 67082 - DNA, 25 bp, Artificial
  Probe
catttatcaccatacttccactatt

SEQ ID NO: 67083 - DNA, 25 bp, Artificial
  Probe
atgagtgttcaaattccaccacctg

SEQ ID NO: 67084 - DNA, 25 bp, Artificial
  Probe
tatgaacacatttatcaccatactt

SEQ ID NO: 67085 - DNA, 25 bp, Artificial
  Probe
cggatggctctttgtacatttagtg

SEQ ID NO: 67086 - DNA, 25 bp, Artificial
  Probe
atatgaacacatttatcaccatact

SEQ ID NO: 67087 - DNA, 25 bp, Artificial
  Probe
ggtaaaataaagaaatggaacactg

SEQ ID NO: 67088 - DNA, 25 bp, Artificial
  Probe
aggtaaaataaagaaatggaacact

SEQ ID NO: 67089 - DNA, 25 bp, Artificial
  Probe
ttcagctttggtggtctgggaatat

SEQ ID NO: 67090 - DNA, 25 bp, Artificial
  Probe
aatatgaacacatttatcaccatac

SEQ ID NO: 67091 - DNA, 25 bp, Artificial
  Probe
gagacacactggttacgtcattgaa

SEQ ID NO: 67092 - DNA, 25 bp, Artificial
  Probe
acacactggttacgtcattgaactg

SEQ ID NO: 67093 - DNA, 25 bp, Artificial
  Probe
gacacactggttacgtcattgaact

SEQ ID NO: 67094 - DNA, 25 bp, Artificial
  Probe
agacacactggttacgtcattgaac

SEQ ID NO: 67095 - DNA, 25 bp, Artificial
  Probe
caccccacactccatttcaataaag

SEQ ID NO: 67096 - DNA, 25 bp, Artificial
  Probe
accccacactccatttcaataaaga

SEQ ID NO: 67097 - DNA, 25 bp, Artificial
  Probe
ctgagacacactggttacgtcattg

SEQ ID NO: 67098 - DNA, 25 bp, Artificial
  Probe
ccccacactccatttcaataaagag

SEQ ID NO: 67099 - DNA, 25 bp, Artificial
  Probe
ggtgtgtgagattcgcctctatgag

SEQ ID NO: 67100 - DNA, 25 bp, Artificial
  Probe
tgagacacactggttacgtcattga

SEQ ID NO: 67101 - DNA, 25 bp, Artificial
  Probe
cccacactccatttcaataaagagt

SEQ ID NO: 67102 - DNA, 25 bp, Artificial
  Probe
ccacactccatttcaataaagagta

SEQ ID NO: 67103 - DNA, 25 bp, Artificial
  Probe
ccaccccacactccatttcaataaa

SEQ ID NO: 67104 - DNA, 25 bp, Artificial
  Probe
cacactggttacgtcattgaactgc

SEQ ID NO: 67105 - DNA, 25 bp, Artificial
  Probe
cctgagacacactggttacgtcatt

SEQ ID NO: 67106 - DNA, 25 bp, Artificial
  Probe
acactggttacgtcattgaactgca

SEQ ID NO: 67107 - DNA, 25 bp, Artificial
  Probe
accaccccacactccatttcaataa

SEQ ID NO: 67108 - DNA, 25 bp, Artificial
  Probe
caccaccccacactccatttcaata

SEQ ID NO: 67109 - DNA, 25 bp, Artificial
  Probe
ttgatgtaatagtgtgaacctcctt

SEQ ID NO: 67110 - DNA, 25 bp, Artificial
  Probe
gttgatgtaatagtgtgaacctcct

SEQ ID NO: 67111 - DNA, 25 bp, Artificial
  Probe
tgttgatgtaatagtgtgaacctcc

SEQ ID NO: 67112 - DNA, 25 bp, Artificial
  Probe
ctgttgatgtaatagtgtgaacctc

SEQ ID NO: 67113 - DNA, 25 bp, Artificial
  Probe
actgttgatgtaatagtgtgaacct

SEQ ID NO: 67114 - DNA, 25 bp, Artificial
  Probe
cttagtgaacttctgttgtcctcca

SEQ ID NO: 67115 - DNA, 25 bp, Artificial
  Probe
tgatgtaatagtgtgaacctccttt

SEQ ID NO: 67116 - DNA, 25 bp, Artificial
  Probe
ttagtgaacttctgttgtcctccag

SEQ ID NO: 67117 - DNA, 25 bp, Artificial
  Probe
ccttagtgaacttctgttgtcctcc

SEQ ID NO: 67118 - DNA, 25 bp, Artificial
  Probe
ttgtaaattatggtgctcagtttgc

SEQ ID NO: 67119 - DNA, 25 bp, Artificial
  Probe
gatgtaatagtgtgaacctcctttc

SEQ ID NO: 67120 - DNA, 25 bp, Artificial
  Probe
tttgtaaattatggtgctcagtttg

SEQ ID NO: 67121 - DNA, 25 bp, Artificial
  Probe
taaattatggtgctcagtttgcctc

SEQ ID NO: 67122 - DNA, 25 bp, Artificial
  Probe
gtaaattatggtgctcagtttgcct

SEQ ID NO: 67123 - DNA, 25 bp, Artificial
  Probe
tgtaaattatggtgctcagtttgcc

SEQ ID NO: 67124 - DNA, 25 bp, Artificial
  Probe
atttgtaaattatggtgctcagttt

SEQ ID NO: 67125 - DNA, 25 bp, Artificial
  Probe
catgaatgacctggtgtctgagtac

SEQ ID NO: 67126 - DNA, 25 bp, Artificial
  Probe
ctatttgtaaattatggtgctcagt

SEQ ID NO: 67127 - DNA, 25 bp, Artificial
  Probe
cagcatggtctttctatttgtaaat

SEQ ID NO: 67128 - DNA, 25 bp, Artificial
  Probe
tctatttgtaaattatggtgctcag

SEQ ID NO: 67129 - DNA, 25 bp, Artificial
  Probe
acatgaatgacctggtgtctgagta

SEQ ID NO: 67130 - DNA, 25 bp, Artificial
  Probe
cccttagtgaacttctgttgtcctc

SEQ ID NO: 67131 - DNA, 25 bp, Artificial
  Probe
tccagcatggtctttctatttgtaa

SEQ ID NO: 67132 - DNA, 25 bp, Artificial
  Probe
ccagcatggtctttctatttgtaaa

SEQ ID NO: 67133 - DNA, 25 bp, Artificial
  Probe
aaattatggtgctcagtttgcctct

SEQ ID NO: 67134 - DNA, 25 bp, Artificial
  Probe
ctccagcatggtctttctatttgta

SEQ ID NO: 67135 - DNA, 25 bp, Artificial
  Probe
tatttgtaaattatggtgctcagtt

SEQ ID NO: 67136 - DNA, 25 bp, Artificial
  Probe
agcatggtctttctatttgtaaatt

SEQ ID NO: 67137 - DNA, 25 bp, Artificial
  Probe
caacatgaatgacctggtgtctgag

SEQ ID NO: 67138 - DNA, 25 bp, Artificial
  Probe
ttctatttgtaaattatggtgctca

SEQ ID NO: 67139 - DNA, 25 bp, Artificial
  Probe
acccttagtgaacttctgttgtcct

SEQ ID NO: 67140 - DNA, 25 bp, Artificial
  Probe
aatagtgtgaacctcctttcaagat

SEQ ID NO: 67141 - DNA, 25 bp, Artificial
  Probe
tgtaatagtgtgaacctcctttcaa

SEQ ID NO: 67142 - DNA, 25 bp, Artificial
  Probe
atgtaatagtgtgaacctcctttca

SEQ ID NO: 67143 - DNA, 25 bp, Artificial
  Probe
gtaatagtgtgaacctcctttcaag

SEQ ID NO: 67144 - DNA, 25 bp, Artificial
  Probe
taatagtgtgaacctcctttcaaga

SEQ ID NO: 67145 - DNA, 25 bp, Artificial
  Probe
tagtgaacttctgttgtcctccagc

SEQ ID NO: 67146 - DNA, 25 bp, Artificial
  Probe
aacatgaatgacctggtgtctgagt

SEQ ID NO: 67147 - DNA, 25 bp, Artificial
  Probe
cactgttgatgtaatagtgtgaacc

SEQ ID NO: 67148 - DNA, 25 bp, Artificial
  Probe
atgaatgacctggtgtctgagtacc

SEQ ID NO: 67149 - DNA, 25 bp, Artificial
  Probe
tcactgttgatgtaatagtgtgaac

SEQ ID NO: 67150 - DNA, 25 bp, Artificial
  Probe
tcctccagcatggtctttctatttg

SEQ ID NO: 67151 - DNA, 25 bp, Artificial
  Probe
gtcctccagcatggtctttctattt

SEQ ID NO: 67152 - DNA, 25 bp, Artificial
  Probe
cacccttagtgaacttctgttgtcc

SEQ ID NO: 67153 - DNA, 25 bp, Artificial
  Probe
cctccagcatggtctttctatttgt

SEQ ID NO: 67154 - DNA, 25 bp, Artificial
  Probe
actctctccaacaccatctatctaa

SEQ ID NO: 67155 - DNA, 25 bp, Artificial
  Probe
aactctctccaacaccatctatcta

SEQ ID NO: 67156 - DNA, 25 bp, Artificial
  Probe
taactctctccaacaccatctatct

SEQ ID NO: 67157 - DNA, 25 bp, Artificial
  Probe
gtaactctctccaacaccatctatc

SEQ ID NO: 67158 - DNA, 25 bp, Artificial
  Probe
agtaactctctccaacaccatctat

SEQ ID NO: 67159 - DNA, 25 bp, Artificial
  Probe
aagtaactctctccaacaccatcta

SEQ ID NO: 67160 - DNA, 25 bp, Artificial
  Probe
aacaggttcacatatactcagcaag

SEQ ID NO: 67161 - DNA, 25 bp, Artificial
  Probe
ttcacatatactcagcaagcacatc

SEQ ID NO: 67162 - DNA, 25 bp, Artificial
  Probe
cacatatactcagcaagcacatcaa

SEQ ID NO: 67163 - DNA, 25 bp, Artificial
  Probe
gttcacatatactcagcaagcacat

SEQ ID NO: 67164 - DNA, 25 bp, Artificial
  Probe
tcacatatactcagcaagcacatca

SEQ ID NO: 67165 - DNA, 25 bp, Artificial
  Probe
gaacaggttcacatatactcagcaa

SEQ ID NO: 67166 - DNA, 25 bp, Artificial
  Probe
aggttcacatatactcagcaagcac

SEQ ID NO: 67167 - DNA, 25 bp, Artificial
  Probe
caggttcacatatactcagcaagca

SEQ ID NO: 67168 - DNA, 25 bp, Artificial
  Probe
acaggttcacatatactcagcaagc

SEQ ID NO: 67169 - DNA, 25 bp, Artificial
  Probe
tccaacaccatctatctaaacccta

SEQ ID NO: 67170 - DNA, 25 bp, Artificial
  Probe
ctctccaacaccatctatctaaacc

SEQ ID NO: 67171 - DNA, 25 bp, Artificial
  Probe
tctctccaacaccatctatctaaac

SEQ ID NO: 67172 - DNA, 25 bp, Artificial
  Probe
catatactcagcaagcacatcaaac

SEQ ID NO: 67173 - DNA, 25 bp, Artificial
  Probe
ctctctccaacaccatctatctaaa

SEQ ID NO: 67174 - DNA, 25 bp, Artificial
  Probe
atatactcagcaagcacatcaaaca

SEQ ID NO: 67175 - DNA, 25 bp, Artificial
  Probe
acatatactcagcaagcacatcaaa

SEQ ID NO: 67176 - DNA, 25 bp, Artificial
  Probe
accctagagtaaagaagacattgtg

SEQ ID NO: 67177 - DNA, 25 bp, Artificial
  Probe
ccaacaccatctatctaaaccctag

SEQ ID NO: 67178 - DNA, 25 bp, Artificial
  Probe
cctagagtaaagaagacattgtgga

SEQ ID NO: 67179 - DNA, 25 bp, Artificial
  Probe
gaaagtaactctctccaacaccatc

SEQ ID NO: 67180 - DNA, 25 bp, Artificial
  Probe
ggttcacatatactcagcaagcaca

SEQ ID NO: 67181 - DNA, 25 bp, Artificial
  Probe
ccctagagtaaagaagacattgtgg

SEQ ID NO: 67182 - DNA, 25 bp, Artificial
  Probe
aaccctagagtaaagaagacattgt

SEQ ID NO: 67183 - DNA, 25 bp, Artificial
  Probe
aaagtaactctctccaacaccatct

SEQ ID NO: 67184 - DNA, 25 bp, Artificial
  Probe
gtaaagaagacattgtggactagca

SEQ ID NO: 67185 - DNA, 25 bp, Artificial
  Probe
ctccaacaccatctatctaaaccct

SEQ ID NO: 67186 - DNA, 25 bp, Artificial
  Probe
tctccaacaccatctatctaaaccc

SEQ ID NO: 67187 - DNA, 25 bp, Artificial
  Probe
tatactcagcaagcacatcaaacac

SEQ ID NO: 67188 - DNA, 25 bp, Artificial
  Probe
ctagagtaaagaagacattgtggac

SEQ ID NO: 67189 - DNA, 25 bp, Artificial
  Probe
taaagaagacattgtggactagcaa

SEQ ID NO: 67190 - DNA, 25 bp, Artificial
  Probe
agagtaaagaagacattgtggacta

SEQ ID NO: 67191 - DNA, 25 bp, Artificial
  Probe
tagagtaaagaagacattgtggact

SEQ ID NO: 67192 - DNA, 25 bp, Artificial
  Probe
agtaaagaagacattgtggactagc

SEQ ID NO: 67193 - DNA, 25 bp, Artificial
  Probe
aaaccctagagtaaagaagacattg

SEQ ID NO: 67194 - DNA, 25 bp, Artificial
  Probe
agatccctgttgagtgtaaacttag

SEQ ID NO: 67195 - DNA, 25 bp, Artificial
  Probe
aagatccctgttgagtgtaaactta

SEQ ID NO: 67196 - DNA, 25 bp, Artificial
  Probe
taagatccctgttgagtgtaaactt

SEQ ID NO: 67197 - DNA, 25 bp, Artificial
  Probe
ttaagatccctgttgagtgtaaact

SEQ ID NO: 67198 - DNA, 25 bp, Artificial
  Probe
gagtaaagaagacattgtggactag

SEQ ID NO: 67199 - DNA, 25 bp, Artificial
  Probe
attatgagatgaggactgtgtcaac

SEQ ID NO: 67200 - DNA, 25 bp, Artificial
  Probe
tattatgagatgaggactgtgtcaa

SEQ ID NO: 67201 - DNA, 25 bp, Artificial
  Probe
tatgagatgaggactgtgtcaacat

SEQ ID NO: 67202 - DNA, 25 bp, Artificial
  Probe
atattatgagatgaggactgtgtca

SEQ ID NO: 67203 - DNA, 25 bp, Artificial
  Probe
ttatgagatgaggactgtgtcaaca

SEQ ID NO: 67204 - DNA, 25 bp, Artificial
  Probe
atgtgaacctttgtctctctttgaa

SEQ ID NO: 67205 - DNA, 25 bp, Artificial
  Probe
tgtgaacctttgtctctctttgaaa

SEQ ID NO: 67206 - DNA, 25 bp, Artificial
  Probe
taccagactgccagattatcagaca

SEQ ID NO: 67207 - DNA, 25 bp, Artificial
  Probe
gtaccagactgccagattatcagac

SEQ ID NO: 67208 - DNA, 25 bp, Artificial
  Probe
aatattatgagatgaggactgtgtc

SEQ ID NO: 67209 - DNA, 25 bp, Artificial
  Probe
catgtgaacctttgtctctctttga

SEQ ID NO: 67210 - DNA, 25 bp, Artificial
  Probe
accagactgccagattatcagacat

SEQ ID NO: 67211 - DNA, 25 bp, Artificial
  Probe
ccagactgccagattatcagacatg

SEQ ID NO: 67212 - DNA, 25 bp, Artificial
  Probe
attacactaagatatccctaaggcg

SEQ ID NO: 67213 - DNA, 25 bp, Artificial
  Probe
gtgaacctttgtctctctttgaaaa

SEQ ID NO: 67214 - DNA, 25 bp, Artificial
  Probe
ccagattatcagacatgtgaacctt

SEQ ID NO: 67215 - DNA, 25 bp, Artificial
  Probe
taatattatgagatgaggactgtgt

SEQ ID NO: 67216 - DNA, 25 bp, Artificial
  Probe
actgtttacttttagcccatagttt

SEQ ID NO: 67217 - DNA, 25 bp, Artificial
  Probe
aaaagaaagcaccactaaattgtac

SEQ ID NO: 67218 - DNA, 25 bp, Artificial
  Probe
aaagaaagcaccactaaattgtaca

SEQ ID NO: 67219 - DNA, 25 bp, Artificial
  Probe
ctgccagattatcagacatgtgaac

SEQ ID NO: 67220 - DNA, 25 bp, Artificial
  Probe
aagaaagcaccactaaattgtacat

SEQ ID NO: 67221 - DNA, 25 bp, Artificial
  Probe
actgccagattatcagacatgtgaa

SEQ ID NO: 67222 - DNA, 25 bp, Artificial
  Probe
tactgtttacttttagcccatagtt

SEQ ID NO: 67223 - DNA, 25 bp, Artificial
  Probe
agaaagcaccactaaattgtacata

SEQ ID NO: 67224 - DNA, 25 bp, Artificial
  Probe
gccagattatcagacatgtgaacct

SEQ ID NO: 67225 - DNA, 25 bp, Artificial
  Probe
tattacactaagatatccctaaggc

SEQ ID NO: 67226 - DNA, 25 bp, Artificial
  Probe
ctaatttgtttcagtttgttttggt

SEQ ID NO: 67227 - DNA, 25 bp, Artificial
  Probe
atactgtttacttttagcccatagt

SEQ ID NO: 67228 - DNA, 25 bp, Artificial
  Probe
gactgccagattatcagacatgtga

SEQ ID NO: 67229 - DNA, 25 bp, Artificial
  Probe
agactgccagattatcagacatgtg

SEQ ID NO: 67230 - DNA, 25 bp, Artificial
  Probe
cagactgccagattatcagacatgt

SEQ ID NO: 67231 - DNA, 25 bp, Artificial
  Probe
taagatatccctaaggcgctttatg

SEQ ID NO: 67232 - DNA, 25 bp, Artificial
  Probe
ctaagatatccctaaggcgctttat

SEQ ID NO: 67233 - DNA, 25 bp, Artificial
  Probe
tttgtttcagtttgttttggttaaa

SEQ ID NO: 67234 - DNA, 25 bp, Artificial
  Probe
tgccagattatcagacatgtgaacc

SEQ ID NO: 67235 - DNA, 25 bp, Artificial
  Probe
ttaatattatgagatgaggactgtg

SEQ ID NO: 67236 - DNA, 25 bp, Artificial
  Probe
cctaaacttctattttcttatggca

SEQ ID NO: 67237 - DNA, 25 bp, Artificial
  Probe
acctaaacttctattttcttatggc

SEQ ID NO: 67238 - DNA, 25 bp, Artificial
  Probe
actaagatatccctaaggcgcttta

SEQ ID NO: 67239 - DNA, 25 bp, Artificial
  Probe
aaagcaccactaaattgtacatatg

SEQ ID NO: 67240 - DNA, 25 bp, Artificial
  Probe
gatatccctaaggcgctttatgttt

SEQ ID NO: 67241 - DNA, 25 bp, Artificial
  Probe
agattatcagacatgtgaacctttg

SEQ ID NO: 67242 - DNA, 25 bp, Artificial
  Probe
cagattatcagacatgtgaaccttt

SEQ ID NO: 67243 - DNA, 25 bp, Artificial
  Probe
actaatttgtttcagtttgttttgg

SEQ ID NO: 67244 - DNA, 25 bp, Artificial
  Probe
ctgttcttatgatgcttgtgattct

SEQ ID NO: 67245 - DNA, 25 bp, Artificial
  Probe
tctgttcttatgatgcttgtgattc

SEQ ID NO: 67246 - DNA, 25 bp, Artificial
  Probe
tgttcttatgatgcttgtgattctt

SEQ ID NO: 67247 - DNA, 25 bp, Artificial
  Probe
ttctgttcttatgatgcttgtgatt

SEQ ID NO: 67248 - DNA, 25 bp, Artificial
  Probe
acacagcaggcatctatatcatcaa

SEQ ID NO: 67249 - DNA, 25 bp, Artificial
  Probe
gacacagcaggcatctatatcatca

SEQ ID NO: 67250 - DNA, 25 bp, Artificial
  Probe
agacacagcaggcatctatatcatc

SEQ ID NO: 67251 - DNA, 25 bp, Artificial
  Probe
cagacacagcaggcatctatatcat

SEQ ID NO: 67252 - DNA, 25 bp, Artificial
  Probe
gttcttatgatgcttgtgattctta

SEQ ID NO: 67253 - DNA, 25 bp, Artificial
  Probe
acagcaggcatctatatcatcaaat

SEQ ID NO: 67254 - DNA, 25 bp, Artificial
  Probe
cagcaggcatctatatcatcaaatg

SEQ ID NO: 67255 - DNA, 25 bp, Artificial
  Probe
tttctgttcttatgatgcttgtgat

SEQ ID NO: 67256 - DNA, 25 bp, Artificial
  Probe
cacagcaggcatctatatcatcaaa

SEQ ID NO: 67257 - DNA, 25 bp, Artificial
  Probe
aggcatctatatcatcaaatggtct

SEQ ID NO: 67258 - DNA, 25 bp, Artificial
  Probe
caggcatctatatcatcaaatggtc

SEQ ID NO: 67259 - DNA, 25 bp, Artificial
  Probe
agcaggcatctatatcatcaaatgg

SEQ ID NO: 67260 - DNA, 25 bp, Artificial
  Probe
gcaggcatctatatcatcaaatggt

SEQ ID NO: 67261 - DNA, 25 bp, Artificial
  Probe
ggcatctatatcatcaaatggtctt

SEQ ID NO: 67262 - DNA, 25 bp, Artificial
  Probe
cactagacagttaaagactcaggag

SEQ ID NO: 67263 - DNA, 25 bp, Artificial
  Probe
cccacataggtcttagagattgttt

SEQ ID NO: 67264 - DNA, 25 bp, Artificial
  Probe
ttcttatgatgcttgtgattcttat

SEQ ID NO: 67265 - DNA, 25 bp, Artificial
  Probe
ccactagacagttaaagactcagga

SEQ ID NO: 67266 - DNA, 25 bp, Artificial
  Probe
tagacagttaaagactcaggagttg

SEQ ID NO: 67267 - DNA, 25 bp, Artificial
  Probe
actagacagttaaagactcaggagt

SEQ ID NO: 67268 - DNA, 25 bp, Artificial
  Probe
ctagacagttaaagactcaggagtt

SEQ ID NO: 67269 - DNA, 25 bp, Artificial
  Probe
agacagttaaagactcaggagttga

SEQ ID NO: 67270 - DNA, 25 bp, Artificial
  Probe
tcttatgatgcttgtgattcttata

SEQ ID NO: 67271 - DNA, 25 bp, Artificial
  Probe
gccactagacagttaaagactcagg

SEQ ID NO: 67272 - DNA, 25 bp, Artificial
  Probe
catcaaatggtcttagacgttgttt

SEQ ID NO: 67273 - DNA, 25 bp, Artificial
  Probe
atcaaatggtcttagacgttgtttc

SEQ ID NO: 67274 - DNA, 25 bp, Artificial
  Probe
atcatcaaatggtcttagacgttgt

SEQ ID NO: 67275 - DNA, 25 bp, Artificial
  Probe
caaatggtcttagacgttgtttctg

SEQ ID NO: 67276 - DNA, 25 bp, Artificial
  Probe
tcaaatggtcttagacgttgtttct

SEQ ID NO: 67277 - DNA, 25 bp, Artificial
  Probe
tcatcaaatggtcttagacgttgtt

SEQ ID NO: 67278 - DNA, 25 bp, Artificial
  Probe
ttttctgttcttatgatgcttgtga

SEQ ID NO: 67279 - DNA, 25 bp, Artificial
  Probe
tatcatcaaatggtcttagacgttg

SEQ ID NO: 67280 - DNA, 25 bp, Artificial
  Probe
gcatctatatcatcaaatggtctta

SEQ ID NO: 67281 - DNA, 25 bp, Artificial
  Probe
gcagacacagcaggcatctatatca

SEQ ID NO: 67282 - DNA, 25 bp, Artificial
  Probe
atatcatcaaatggtcttagacgtt

SEQ ID NO: 67283 - DNA, 25 bp, Artificial
  Probe
gtcttagacgttgtttctgctttgt

SEQ ID NO: 67284 - DNA, 25 bp, Artificial
  Probe
aaatggtcttagacgttgtttctgc

SEQ ID NO: 67285 - DNA, 25 bp, Artificial
  Probe
ctatatcatcaaatggtcttagacg

SEQ ID NO: 67286 - DNA, 25 bp, Artificial
  Probe
ccacataggtcttagagattgtttt

SEQ ID NO: 67287 - DNA, 25 bp, Artificial
  Probe
ccccacataggtcttagagattgtt

SEQ ID NO: 67288 - DNA, 25 bp, Artificial
  Probe
ggtcttagacgttgtttctgctttg

SEQ ID NO: 67289 - DNA, 25 bp, Artificial
  Probe
agacttctgttgttatcactgtagc

SEQ ID NO: 67290 - DNA, 25 bp, Artificial
  Probe
gctagacttctgttgttatcactgt

SEQ ID NO: 67291 - DNA, 25 bp, Artificial
  Probe
tagacttctgttgttatcactgtag

SEQ ID NO: 67292 - DNA, 25 bp, Artificial
  Probe
cttctgttgttatcactgtagctct

SEQ ID NO: 67293 - DNA, 25 bp, Artificial
  Probe
agctagacttctgttgttatcactg

SEQ ID NO: 67294 - DNA, 25 bp, Artificial
  Probe
ttctgttgttatcactgtagctctg

SEQ ID NO: 67295 - DNA, 25 bp, Artificial
  Probe
acttctgttgttatcactgtagctc

SEQ ID NO: 67296 - DNA, 25 bp, Artificial
  Probe
gacttctgttgttatcactgtagct

SEQ ID NO: 67297 - DNA, 25 bp, Artificial
  Probe
ctagacttctgttgttatcactgta

SEQ ID NO: 67298 - DNA, 25 bp, Artificial
  Probe
tatccttgaagccttgtgtttgtat

SEQ ID NO: 67299 - DNA, 25 bp, Artificial
  Probe
ctatccttgaagccttgtgtttgta

SEQ ID NO: 67300 - DNA, 25 bp, Artificial
  Probe
cagctagacttctgttgttatcact

SEQ ID NO: 67301 - DNA, 25 bp, Artificial
  Probe
tagaatggcagattgaaatcagaca

SEQ ID NO: 67302 - DNA, 25 bp, Artificial
  Probe
gtagaatggcagattgaaatcagac

SEQ ID NO: 67303 - DNA, 25 bp, Artificial
  Probe
aaggtagaatggcagattgaaatca

SEQ ID NO: 67304 - DNA, 25 bp, Artificial
  Probe
aaaggtagaatggcagattgaaatc

SEQ ID NO: 67305 - DNA, 25 bp, Artificial
  Probe
ggtagaatggcagattgaaatcaga

SEQ ID NO: 67306 - DNA, 25 bp, Artificial
  Probe
aggtagaatggcagattgaaatcag

SEQ ID NO: 67307 - DNA, 25 bp, Artificial
  Probe
taaaggtagaatggcagattgaaat

SEQ ID NO: 67308 - DNA, 25 bp, Artificial
  Probe
ataaaggtagaatggcagattgaaa

SEQ ID NO: 67309 - DNA, 25 bp, Artificial
  Probe
atccttgaagccttgtgtttgtatg

SEQ ID NO: 67310 - DNA, 25 bp, Artificial
  Probe
gaatggcagattgaaatcagacact

SEQ ID NO: 67311 - DNA, 25 bp, Artificial
  Probe
agaatggcagattgaaatcagacac

SEQ ID NO: 67312 - DNA, 25 bp, Artificial
  Probe
ataaatagtgttaggagccaagaaa

SEQ ID NO: 67313 - DNA, 25 bp, Artificial
  Probe
aataaatagtgttaggagccaagaa

SEQ ID NO: 67314 - DNA, 25 bp, Artificial
  Probe
aaataaatagtgttaggagccaaga

SEQ ID NO: 67315 - DNA, 25 bp, Artificial
  Probe
tctgttgttatcactgtagctctgc

SEQ ID NO: 67316 - DNA, 25 bp, Artificial
  Probe
ctcatgctgtgaaagttctaaatgt

SEQ ID NO: 67317 - DNA, 25 bp, Artificial
  Probe
tataaaggtagaatggcagattgaa

SEQ ID NO: 67318 - DNA, 25 bp, Artificial
  Probe
cctcatgctgtgaaagttctaaatg

SEQ ID NO: 67319 - DNA, 25 bp, Artificial
  Probe
catgctgtgaaagttctaaatgttt

SEQ ID NO: 67320 - DNA, 25 bp, Artificial
  Probe
tcatgctgtgaaagttctaaatgtt

SEQ ID NO: 67321 - DNA, 25 bp, Artificial
  Probe
tctaaataaagctcattgttggacg

SEQ ID NO: 67322 - DNA, 25 bp, Artificial
  Probe
ctaaataaagctcattgttggacgc

SEQ ID NO: 67323 - DNA, 25 bp, Artificial
  Probe
ccctcatgctgtgaaagttctaaat

SEQ ID NO: 67324 - DNA, 25 bp, Artificial
  Probe
tgctgtgaaagttctaaatgtttat

SEQ ID NO: 67325 - DNA, 25 bp, Artificial
  Probe
atgctgtgaaagttctaaatgttta

SEQ ID NO: 67326 - DNA, 25 bp, Artificial
  Probe
gcagtatttgatgtaaagagagaat

SEQ ID NO: 67327 - DNA, 25 bp, Artificial
  Probe
aatggcagattgaaatcagacactg

SEQ ID NO: 67328 - DNA, 25 bp, Artificial
  Probe
cgattgagatgcagtatttgatgta

SEQ ID NO: 67329 - DNA, 25 bp, Artificial
  Probe
gttgttatcactgtagctctgcttc

SEQ ID NO: 67330 - DNA, 25 bp, Artificial
  Probe
ccttctaaataaagctcattgttgg

SEQ ID NO: 67331 - DNA, 25 bp, Artificial
  Probe
ttataaaggtagaatggcagattga

SEQ ID NO: 67332 - DNA, 25 bp, Artificial
  Probe
tccctcatgctgtgaaagttctaaa

SEQ ID NO: 67333 - DNA, 25 bp, Artificial
  Probe
ttccctcatgctgtgaaagttctaa

SEQ ID NO: 67334 - DNA, 25 bp, Artificial
  Probe
gaggaagagatacagaaagagacag

SEQ ID NO: 67335 - DNA, 25 bp, Artificial
  Probe
aggaggaagagatacagaaagagac

SEQ ID NO: 67336 - DNA, 25 bp, Artificial
  Probe
caggaggaagagatacagaaagaga

SEQ ID NO: 67337 - DNA, 25 bp, Artificial
  Probe
ggaggaagagatacagaaagagaca

SEQ ID NO: 67338 - DNA, 25 bp, Artificial
  Probe
aggaagagatacagaaagagacagc

SEQ ID NO: 67339 - DNA, 25 bp, Artificial
  Probe
gagtgtgttagtttgaagtgggaag

SEQ ID NO: 67340 - DNA, 25 bp, Artificial
  Probe
tgtgttagtttgaagtgggaaggat

SEQ ID NO: 67341 - DNA, 25 bp, Artificial
  Probe
gcaggaggaagagatacagaaagag

SEQ ID NO: 67342 - DNA, 25 bp, Artificial
  Probe
cttgagtgtgttagtttgaagtggg

SEQ ID NO: 67343 - DNA, 25 bp, Artificial
  Probe
gtgttagtttgaagtgggaaggatc

SEQ ID NO: 67344 - DNA, 25 bp, Artificial
  Probe
tgagtgtgttagtttgaagtgggaa

SEQ ID NO: 67345 - DNA, 25 bp, Artificial
  Probe
ttgagtgtgttagtttgaagtggga

SEQ ID NO: 67346 - DNA, 25 bp, Artificial
  Probe
gaagagatacagaaagagacagccc

SEQ ID NO: 67347 - DNA, 25 bp, Artificial
  Probe
ggaagagatacagaaagagacagcc

SEQ ID NO: 67348 - DNA, 25 bp, Artificial
  Probe
gatacagaaagagacagcccaacat

SEQ ID NO: 67349 - DNA, 25 bp, Artificial
  Probe
agaaatgggcttaggagagactgat

SEQ ID NO: 67350 - DNA, 25 bp, Artificial
  Probe
gtgtgttagtttgaagtgggaagga

SEQ ID NO: 67351 - DNA, 25 bp, Artificial
  Probe
agtgtgttagtttgaagtgggaagg

SEQ ID NO: 67352 - DNA, 25 bp, Artificial
  Probe
gagatacagaaagagacagcccaac

SEQ ID NO: 67353 - DNA, 25 bp, Artificial
  Probe
gaaatgggcttaggagagactgatc

SEQ ID NO: 67354 - DNA, 25 bp, Artificial
  Probe
agagatacagaaagagacagcccaa

SEQ ID NO: 67355 - DNA, 25 bp, Artificial
  Probe
aagagatacagaaagagacagccca

SEQ ID NO: 67356 - DNA, 25 bp, Artificial
  Probe
gagaaatgggcttaggagagactga

SEQ ID NO: 67357 - DNA, 25 bp, Artificial
  Probe
ggcaggaggaagagatacagaaaga

SEQ ID NO: 67358 - DNA, 25 bp, Artificial
  Probe
atacagaaagagacagcccaacatg

SEQ ID NO: 67359 - DNA, 25 bp, Artificial
  Probe
gtcttcacccttagcaaaatgtatt

SEQ ID NO: 67360 - DNA, 25 bp, Artificial
  Probe
agatacagaaagagacagcccaaca

SEQ ID NO: 67361 - DNA, 25 bp, Artificial
  Probe
cgtcttcacccttagcaaaatgtat

SEQ ID NO: 67362 - DNA, 25 bp, Artificial
  Probe
acttgagtgtgttagtttgaagtgg

SEQ ID NO: 67363 - DNA, 25 bp, Artificial
  Probe
tcttcacccttagcaaaatgtatta

SEQ ID NO: 67364 - DNA, 25 bp, Artificial
  Probe
gagaaagggcaggaggaagagatac

SEQ ID NO: 67365 - DNA, 25 bp, Artificial
  Probe
ggcacttgagtgtgttagtttgaag

SEQ ID NO: 67366 - DNA, 25 bp, Artificial
  Probe
atccaagtgaccagatacccaactc

SEQ ID NO: 67367 - DNA, 25 bp, Artificial
  Probe
ctcacagaggacaaaatggagaaag

SEQ ID NO: 67368 - DNA, 25 bp, Artificial
  Probe
ggagaaatgggcttaggagagactg

SEQ ID NO: 67369 - DNA, 25 bp, Artificial
  Probe
caggagaaatgggcttaggagagac

SEQ ID NO: 67370 - DNA, 25 bp, Artificial
  Probe
gggcaggaggaagagatacagaaag

SEQ ID NO: 67371 - DNA, 25 bp, Artificial
  Probe
gaaagggcaggaggaagagatacag

SEQ ID NO: 67372 - DNA, 25 bp, Artificial
  Probe
cttcacccttagcaaaatgtattaa

SEQ ID NO: 67373 - DNA, 25 bp, Artificial
  Probe
catccaagtgaccagatacccaact

SEQ ID NO: 67374 - DNA, 25 bp, Artificial
  Probe
aggagaaatgggcttaggagagact

SEQ ID NO: 67375 - DNA, 25 bp, Artificial
  Probe
tcacagaggacaaaatggagaaagg

SEQ ID NO: 67376 - DNA, 25 bp, Artificial
  Probe
gcacttgagtgtgttagtttgaagt

SEQ ID NO: 67377 - DNA, 25 bp, Artificial
  Probe
ttcaaattagtaaaggcgctcaatc

SEQ ID NO: 67378 - DNA, 25 bp, Artificial
  Probe
gttcaaattagtaaaggcgctcaat

SEQ ID NO: 67379 - DNA, 25 bp, Artificial
  Probe
aattctgctcctctcttacgatgac

SEQ ID NO: 67380 - DNA, 25 bp, Artificial
  Probe
acagatgatccatgattctaagtct

SEQ ID NO: 67381 - DNA, 25 bp, Artificial
  Probe
atccatgattctaagtcttctatgc

SEQ ID NO: 67382 - DNA, 25 bp, Artificial
  Probe
cagatgatccatgattctaagtctt

SEQ ID NO: 67383 - DNA, 25 bp, Artificial
  Probe
attctgctcctctcttacgatgact

SEQ ID NO: 67384 - DNA, 25 bp, Artificial
  Probe
ggacagatgatccatgattctaagt

SEQ ID NO: 67385 - DNA, 25 bp, Artificial
  Probe
gacagatgatccatgattctaagtc

SEQ ID NO: 67386 - DNA, 25 bp, Artificial
  Probe
gatgatccatgattctaagtcttct

SEQ ID NO: 67387 - DNA, 25 bp, Artificial
  Probe
tccatgattctaagtcttctatgca

SEQ ID NO: 67388 - DNA, 25 bp, Artificial
  Probe
agatgatccatgattctaagtcttc

SEQ ID NO: 67389 - DNA, 25 bp, Artificial
  Probe
ttctgctcctctcttacgatgactt

SEQ ID NO: 67390 - DNA, 25 bp, Artificial
  Probe
tctgctcctctcttacgatgacttc

SEQ ID NO: 67391 - DNA, 25 bp, Artificial
  Probe
gggagaaaggaaataaacaatgaat

SEQ ID NO: 67392 - DNA, 25 bp, Artificial
  Probe
cagtacatgaaggatctggacagtg

SEQ ID NO: 67393 - DNA, 25 bp, Artificial
  Probe
tgatccatgattctaagtcttctat

SEQ ID NO: 67394 - DNA, 25 bp, Artificial
  Probe
catgtgctcagatgaatgctcatat

SEQ ID NO: 67395 - DNA, 25 bp, Artificial
  Probe
ctaactcccttctgttactgtctag

SEQ ID NO: 67396 - DNA, 25 bp, Artificial
  Probe
atgatccatgattctaagtcttcta

SEQ ID NO: 67397 - DNA, 25 bp, Artificial
  Probe
gctaactcccttctgttactgtcta

SEQ ID NO: 67398 - DNA, 25 bp, Artificial
  Probe
gaattctgctcctctcttacgatga

SEQ ID NO: 67399 - DNA, 25 bp, Artificial
  Probe
gatccatgattctaagtcttctatg

SEQ ID NO: 67400 - DNA, 25 bp, Artificial
  Probe
gggacagatgatccatgattctaag

SEQ ID NO: 67401 - DNA, 25 bp, Artificial
  Probe
tcatgtgctcagatgaatgctcata

SEQ ID NO: 67402 - DNA, 25 bp, Artificial
  Probe
ctgctcctctcttacgatgacttcc

SEQ ID NO: 67403 - DNA, 25 bp, Artificial
  Probe
agcagcagtcatatccaaaccattt

SEQ ID NO: 67404 - DNA, 25 bp, Artificial
  Probe
agcttcctactgcacaacagatatg

SEQ ID NO: 67405 - DNA, 25 bp, Artificial
  Probe
cagcttcctactgcacaacagatat

SEQ ID NO: 67406 - DNA, 25 bp, Artificial
  Probe
ggagaaaggaaataaacaatgaatc

SEQ ID NO: 67407 - DNA, 25 bp, Artificial
  Probe
cctactgcacaacagatatgctatc

SEQ ID NO: 67408 - DNA, 25 bp, Artificial
  Probe
ggggagaaaggaaataaacaatgaa

SEQ ID NO: 67409 - DNA, 25 bp, Artificial
  Probe
tcctactgcacaacagatatgctat

SEQ ID NO: 67410 - DNA, 25 bp, Artificial
  Probe
tctaagtcttctatgcattctccaa

SEQ ID NO: 67411 - DNA, 25 bp, Artificial
  Probe
ttctaagtcttctatgcattctcca

SEQ ID NO: 67412 - DNA, 25 bp, Artificial
  Probe
agtacatgaaggatctggacagtgc

SEQ ID NO: 67413 - DNA, 25 bp, Artificial
  Probe
ctatctttgcagctaactcccttct

SEQ ID NO: 67414 - DNA, 25 bp, Artificial
  Probe
ttcctactgcacaacagatatgcta

SEQ ID NO: 67415 - DNA, 25 bp, Artificial
  Probe
ctaagtcttctatgcattctccaag

SEQ ID NO: 67416 - DNA, 25 bp, Artificial
  Probe
atgtgctcagatgaatgctcatatg

SEQ ID NO: 67417 - DNA, 25 bp, Artificial
  Probe
cagcagcagtcatatccaaaccatt

SEQ ID NO: 67418 - DNA, 25 bp, Artificial
  Probe
tactgcacaacagatatgctatctt

SEQ ID NO: 67419 - DNA, 25 bp, Artificial
  Probe
ctactgcacaacagatatgctatct

SEQ ID NO: 67420 - DNA, 25 bp, Artificial
  Probe
tcatcttttacatcctggagaacat

SEQ ID NO: 67421 - DNA, 25 bp, Artificial
  Probe
catcttttacatcctggagaacatc

SEQ ID NO: 67422 - DNA, 25 bp, Artificial
  Probe
atcttttacatcctggagaacatcg

SEQ ID NO: 67423 - DNA, 25 bp, Artificial
  Probe
ccatgattctaagtcttctatgcat

SEQ ID NO: 67424 - DNA, 25 bp, Artificial
  Probe
agtattgttcgttctgatatgtgat

SEQ ID NO: 67425 - DNA, 25 bp, Artificial
  Probe
gcagtattgttcgttctgatatgtg

SEQ ID NO: 67426 - DNA, 25 bp, Artificial
  Probe
agcagtattgttcgttctgatatgt

SEQ ID NO: 67427 - DNA, 25 bp, Artificial
  Probe
cagtattgttcgttctgatatgtga

SEQ ID NO: 67428 - DNA, 25 bp, Artificial
  Probe
tagcagtattgttcgttctgatatg

SEQ ID NO: 67429 - DNA, 25 bp, Artificial
  Probe
gtattgttcgttctgatatgtgatt

SEQ ID NO: 67430 - DNA, 25 bp, Artificial
  Probe
ttagcagtattgttcgttctgatat

SEQ ID NO: 67431 - DNA, 25 bp, Artificial
  Probe
agacgaagagtgcattgtgtatatt

SEQ ID NO: 67432 - DNA, 25 bp, Artificial
  Probe
aagacgaagagtgcattgtgtatat

SEQ ID NO: 67433 - DNA, 25 bp, Artificial
  Probe
tgtgtttcctcatcaatggttctaa

SEQ ID NO: 67434 - DNA, 25 bp, Artificial
  Probe
acgaagagtgcattgtgtatattac

SEQ ID NO: 67435 - DNA, 25 bp, Artificial
  Probe
gtgtttcctcatcaatggttctaaa

SEQ ID NO: 67436 - DNA, 25 bp, Artificial
  Probe
gacgaagagtgcattgtgtatatta

SEQ ID NO: 67437 - DNA, 25 bp, Artificial
  Probe
cgttctgatatgtgatttgtttgtg

SEQ ID NO: 67438 - DNA, 25 bp, Artificial
  Probe
tcgttctgatatgtgatttgtttgt

SEQ ID NO: 67439 - DNA, 25 bp, Artificial
  Probe
tgttcgttctgatatgtgatttgtt

SEQ ID NO: 67440 - DNA, 25 bp, Artificial
  Probe
ttgttcgttctgatatgtgatttgt

SEQ ID NO: 67441 - DNA, 25 bp, Artificial
  Probe
ctgtgtttcctcatcaatggttcta

SEQ ID NO: 67442 - DNA, 25 bp, Artificial
  Probe
attacagattaaagacgaagagtgc

SEQ ID NO: 67443 - DNA, 25 bp, Artificial
  Probe
gttctgatatgtgatttgtttgtgg

SEQ ID NO: 67444 - DNA, 25 bp, Artificial
  Probe
tgtttcctcatcaatggttctaaat

SEQ ID NO: 67445 - DNA, 25 bp, Artificial
  Probe
tgtatattacaccaatgccactgtg

SEQ ID NO: 67446 - DNA, 25 bp, Artificial
  Probe
ttcgttctgatatgtgatttgtttg

SEQ ID NO: 67447 - DNA, 25 bp, Artificial
  Probe
gttcgttctgatatgtgatttgttt

SEQ ID NO: 67448 - DNA, 25 bp, Artificial
  Probe
attgttcgttctgatatgtgatttg

SEQ ID NO: 67449 - DNA, 25 bp, Artificial
  Probe
acattacagattaaagacgaagagt

SEQ ID NO: 67450 - DNA, 25 bp, Artificial
  Probe
cattacagattaaagacgaagagtg

SEQ ID NO: 67451 - DNA, 25 bp, Artificial
  Probe
atttagcagtattgttcgttctgat

SEQ ID NO: 67452 - DNA, 25 bp, Artificial
  Probe
actgtgtttcctcatcaatggttct

SEQ ID NO: 67453 - DNA, 25 bp, Artificial
  Probe
cactgtgtttcctcatcaatggttc

SEQ ID NO: 67454 - DNA, 25 bp, Artificial
  Probe
tttagcagtattgttcgttctgata

SEQ ID NO: 67455 - DNA, 25 bp, Artificial
  Probe
tatttagcagtattgttcgttctga

SEQ ID NO: 67456 - DNA, 25 bp, Artificial
  Probe
cgaagagtgcattgtgtatattaca

SEQ ID NO: 67457 - DNA, 25 bp, Artificial
  Probe
tacagattaaagacgaagagtgcat

SEQ ID NO: 67458 - DNA, 25 bp, Artificial
  Probe
ttacagattaaagacgaagagtgca

SEQ ID NO: 67459 - DNA, 25 bp, Artificial
  Probe
aaagacgaagagtgcattgtgtata

SEQ ID NO: 67460 - DNA, 25 bp, Artificial
  Probe
taaagacgaagagtgcattgtgtat

SEQ ID NO: 67461 - DNA, 25 bp, Artificial
  Probe
cagattaaagacgaagagtgcattg

SEQ ID NO: 67462 - DNA, 25 bp, Artificial
  Probe
ttaaagacgaagagtgcattgtgta

SEQ ID NO: 67463 - DNA, 25 bp, Artificial
  Probe
gattaaagacgaagagtgcattgtg

SEQ ID NO: 67464 - DNA, 25 bp, Artificial
  Probe
agattaaagacgaagagtgcattgt

SEQ ID NO: 67465 - DNA, 25 bp, Artificial
  Probe
acagattaaagacgaagagtgcatt

SEQ ID NO: 67466 - DNA, 25 bp, Artificial
  Probe
aggaatatttagcagtattgttcgt

SEQ ID NO: 67467 - DNA, 25 bp, Artificial
  Probe
gtttcctcatcaatggttctaaata

SEQ ID NO: 67468 - DNA, 25 bp, Artificial
  Probe
attaaagacgaagagtgcattgtgt

SEQ ID NO: 67469 - DNA, 25 bp, Artificial
  Probe
atgtgtcccaaacgaataaaatgta

SEQ ID NO: 67470 - DNA, 25 bp, Artificial
  Probe
tgtgtcccaaacgaataaaatgtac

SEQ ID NO: 67471 - DNA, 25 bp, Artificial
  Probe
gtcccaaacgaataaaatgtacaaa

SEQ ID NO: 67472 - DNA, 25 bp, Artificial
  Probe
gtgtcccaaacgaataaaatgtaca

SEQ ID NO: 67473 - DNA, 25 bp, Artificial
  Probe
tgtcccaaacgaataaaatgtacaa

SEQ ID NO: 67474 - DNA, 25 bp, Artificial
  Probe
tcccaaacgaataaaatgtacaaaa

SEQ ID NO: 67475 - DNA, 25 bp, Artificial
  Probe
cccaaacgaataaaatgtacaaaat

SEQ ID NO: 67476 - DNA, 25 bp, Artificial
  Probe
ccaaacgaataaaatgtacaaaatc

SEQ ID NO: 67477 - DNA, 25 bp, Artificial
  Probe
caaacgaataaaatgtacaaaatct

SEQ ID NO: 67478 - DNA, 25 bp, Artificial
  Probe
gtggaaacagactaggcgaagttct

SEQ ID NO: 67479 - DNA, 25 bp, Artificial
  Probe
gttggtgggcaataaagacctcttg

SEQ ID NO: 67480 - DNA, 25 bp, Artificial
  Probe
actaggcgaagttctgctttgagag

SEQ ID NO: 67481 - DNA, 25 bp, Artificial
  Probe
gactaggcgaagttctgctttgaga

SEQ ID NO: 67482 - DNA, 25 bp, Artificial
  Probe
agactaggcgaagttctgctttgag

SEQ ID NO: 67483 - DNA, 25 bp, Artificial
  Probe
ttggtgggcaataaagacctcttgg

SEQ ID NO: 67484 - DNA, 25 bp, Artificial
  Probe
ggttggtgggcaataaagacctctt

SEQ ID NO: 67485 - DNA, 25 bp, Artificial
  Probe
aacagactaggcgaagttctgcttt

SEQ ID NO: 67486 - DNA, 25 bp, Artificial
  Probe
aaacagactaggcgaagttctgctt

SEQ ID NO: 67487 - DNA, 25 bp, Artificial
  Probe
tggaaacagactaggcgaagttctg

SEQ ID NO: 67488 - DNA, 25 bp, Artificial
  Probe
cagactaggcgaagttctgctttga

SEQ ID NO: 67489 - DNA, 25 bp, Artificial
  Probe
gaaacagactaggcgaagttctgct

SEQ ID NO: 67490 - DNA, 25 bp, Artificial
  Probe
acagactaggcgaagttctgctttg

SEQ ID NO: 67491 - DNA, 25 bp, Artificial
  Probe
aatactatgattgagcacggtgaca

SEQ ID NO: 67492 - DNA, 25 bp, Artificial
  Probe
atactatgattgagcacggtgacac

SEQ ID NO: 67493 - DNA, 25 bp, Artificial
  Probe
caatactatgattgagcacggtgac

SEQ ID NO: 67494 - DNA, 25 bp, Artificial
  Probe
ctatgattgagcacggtgacacatt

SEQ ID NO: 67495 - DNA, 25 bp, Artificial
  Probe
atgaggaagaggaaggaaccatgaa

SEQ ID NO: 67496 - DNA, 25 bp, Artificial
  Probe
atgagaactcagaggaggatgaaat

SEQ ID NO: 67497 - DNA, 25 bp, Artificial
  Probe
tatgattgagcacggtgacacattg

SEQ ID NO: 67498 - DNA, 25 bp, Artificial
  Probe
tactatgattgagcacggtgacaca

SEQ ID NO: 67499 - DNA, 25 bp, Artificial
  Probe
catactgcgagacttaattaacgag

SEQ ID NO: 67500 - DNA, 25 bp, Artificial
  Probe
atactgcgagacttaattaacgagg

SEQ ID NO: 67501 - DNA, 25 bp, Artificial
  Probe
ccatactgcgagacttaattaacga

SEQ ID NO: 67502 - DNA, 25 bp, Artificial
  Probe
gatgagaactcagaggaggatgaaa

SEQ ID NO: 67503 - DNA, 25 bp, Artificial
  Probe
ccaatactatgattgagcacggtga

SEQ ID NO: 67504 - DNA, 25 bp, Artificial
  Probe
gatgaggaagaggaaggaaccatga

SEQ ID NO: 67505 - DNA, 25 bp, Artificial
  Probe
gagaactcagaggaggatgaaatgg

SEQ ID NO: 67506 - DNA, 25 bp, Artificial
  Probe
cgatgagaactcagaggaggatgaa

SEQ ID NO: 67507 - DNA, 25 bp, Artificial
  Probe
tgagaactcagaggaggatgaaatg

SEQ ID NO: 67508 - DNA, 25 bp, Artificial
  Probe
gaactcagaggaggatgaaatggac

SEQ ID NO: 67509 - DNA, 25 bp, Artificial
  Probe
agaactcagaggaggatgaaatgga

SEQ ID NO: 67510 - DNA, 25 bp, Artificial
  Probe
ggccatactgcgagacttaattaac

SEQ ID NO: 67511 - DNA, 25 bp, Artificial
  Probe
aactcagaggaggatgaaatggact

SEQ ID NO: 67512 - DNA, 25 bp, Artificial
  Probe
gccatactgcgagacttaattaacg

SEQ ID NO: 67513 - DNA, 25 bp, Artificial
  Probe
aaccgtcttttcttgaatactttga

SEQ ID NO: 67514 - DNA, 25 bp, Artificial
  Probe
aggatgaggaagaggaaggaaccat

SEQ ID NO: 67515 - DNA, 25 bp, Artificial
  Probe
actatgattgagcacggtgacacat

SEQ ID NO: 67516 - DNA, 25 bp, Artificial
  Probe
accgtcttttcttgaatactttgaa

SEQ ID NO: 67517 - DNA, 25 bp, Artificial
  Probe
atttcgtgaagcagtgtctggtaaa

SEQ ID NO: 67518 - DNA, 25 bp, Artificial
  Probe
ccgtcttttcttgaatactttgaac

SEQ ID NO: 67519 - DNA, 25 bp, Artificial
  Probe
aaaccgtcttttcttgaatactttg

SEQ ID NO: 67520 - DNA, 25 bp, Artificial
  Probe
gagccaatactatgattgagcacgg

SEQ ID NO: 67521 - DNA, 25 bp, Artificial
  Probe
ggagccaatactatgattgagcacg

SEQ ID NO: 67522 - DNA, 25 bp, Artificial
  Probe
cggagccaatactatgattgagcac

SEQ ID NO: 67523 - DNA, 25 bp, Artificial
  Probe
gacgatgagaactcagaggaggatg

SEQ ID NO: 67524 - DNA, 25 bp, Artificial
  Probe
actcagaggaggatgaaatggactc

SEQ ID NO: 67525 - DNA, 25 bp, Artificial
  Probe
tactgcgagacttaattaacgaggc

SEQ ID NO: 67526 - DNA, 25 bp, Artificial
  Probe
tgaggaagaggaaggaaccatgaaa

SEQ ID NO: 67527 - DNA, 25 bp, Artificial
  Probe
gatttcgtgaagcagtgtctggtaa

SEQ ID NO: 67528 - DNA, 25 bp, Artificial
  Probe
cgtcttttcttgaatactttgaaca

SEQ ID NO: 67529 - DNA, 25 bp, Artificial
  Probe
ggatgaggaagaggaaggaaccatg

SEQ ID NO: 67530 - DNA, 25 bp, Artificial
  Probe
acgatgagaactcagaggaggatga

SEQ ID NO: 67531 - DNA, 25 bp, Artificial
  Probe
gatcaacacggaggatgaggaagag

SEQ ID NO: 67532 - DNA, 25 bp, Artificial
  Probe
cggccatactgcgagacttaattaa

SEQ ID NO: 67533 - DNA, 25 bp, Artificial
  Probe
gcaaaaccgtcttttcttgaatact

SEQ ID NO: 67534 - DNA, 25 bp, Artificial
  Probe
gaaccatgaaaaggagagatgagac

SEQ ID NO: 67535 - DNA, 25 bp, Artificial
  Probe
gaggatgaggaagaggaaggaacca

SEQ ID NO: 67536 - DNA, 25 bp, Artificial
  Probe
catcagagttggtggtatggtgtaa

SEQ ID NO: 67537 - DNA, 25 bp, Artificial
  Probe
agttggtggtatggtgtaaatagag

SEQ ID NO: 67538 - DNA, 25 bp, Artificial
  Probe
gagttggtggtatggtgtaaataga

SEQ ID NO: 67539 - DNA, 25 bp, Artificial
  Probe
agagttggtggtatggtgtaaatag

SEQ ID NO: 67540 - DNA, 25 bp, Artificial
  Probe
cagagttggtggtatggtgtaaata

SEQ ID NO: 67541 - DNA, 25 bp, Artificial
  Probe
gtgaagaaagccaagaaaccataag

SEQ ID NO: 67542 - DNA, 25 bp, Artificial
  Probe
atatgttcaatgagttgcggagtga

SEQ ID NO: 67543 - DNA, 25 bp, Artificial
  Probe
tgtgaagaaagccaagaaaccataa

SEQ ID NO: 67544 - DNA, 25 bp, Artificial
  Probe
gttggtggtatggtgtaaatagagc

SEQ ID NO: 67545 - DNA, 25 bp, Artificial
  Probe
tgaagaaagccaagaaaccataagg

SEQ ID NO: 67546 - DNA, 25 bp, Artificial
  Probe
ctgtgaagaaagccaagaaaccata

SEQ ID NO: 67547 - DNA, 25 bp, Artificial
  Probe
tcagagttggtggtatggtgtaaat

SEQ ID NO: 67548 - DNA, 25 bp, Artificial
  Probe
atcagagttggtggtatggtgtaaa

SEQ ID NO: 67549 - DNA, 25 bp, Artificial
  Probe
gaagaaagccaagaaaccataaggg

SEQ ID NO: 67550 - DNA, 25 bp, Artificial
  Probe
tatgttcaatgagttgcggagtgac

SEQ ID NO: 67551 - DNA, 25 bp, Artificial
  Probe
gtctgaatctggacttggtcttgac

SEQ ID NO: 67552 - DNA, 25 bp, Artificial
  Probe
ggtgtaaatagagctgttaagttgg

SEQ ID NO: 67553 - DNA, 25 bp, Artificial
  Probe
gtggtatggtgtaaatagagctgtt

SEQ ID NO: 67554 - DNA, 25 bp, Artificial
  Probe
tggtatggtgtaaatagagctgtta

SEQ ID NO: 67555 - DNA, 25 bp, Artificial
  Probe
gtgtctgaatctggacttggtcttg

SEQ ID NO: 67556 - DNA, 25 bp, Artificial
  Probe
tggtgtaaatagagctgttaagttg

SEQ ID NO: 67557 - DNA, 25 bp, Artificial
  Probe
tgtctgaatctggacttggtcttga

SEQ ID NO: 67558 - DNA, 25 bp, Artificial
  Probe
agtgtctgaatctggacttggtctt

SEQ ID NO: 67559 - DNA, 25 bp, Artificial
  Probe
ttggtggtatggtgtaaatagagct

SEQ ID NO: 67560 - DNA, 25 bp, Artificial
  Probe
ggtatggtgtaaatagagctgttaa

SEQ ID NO: 67561 - DNA, 25 bp, Artificial
  Probe
caacagtgtctgaatctggacttgg

SEQ ID NO: 67562 - DNA, 25 bp, Artificial
  Probe
atggtgtaaatagagctgttaagtt

SEQ ID NO: 67563 - DNA, 25 bp, Artificial
  Probe
tctgtgaagaaagccaagaaaccat

SEQ ID NO: 67564 - DNA, 25 bp, Artificial
  Probe
ggtggtatggtgtaaatagagctgt

SEQ ID NO: 67565 - DNA, 25 bp, Artificial
  Probe
catatgttcaatgagttgcggagtg

SEQ ID NO: 67566 - DNA, 25 bp, Artificial
  Probe
tggtggtatggtgtaaatagagctg

SEQ ID NO: 67567 - DNA, 25 bp, Artificial
  Probe
aacagtgtctgaatctggacttggt

SEQ ID NO: 67568 - DNA, 25 bp, Artificial
  Probe
ccaacagtgtctgaatctggacttg

SEQ ID NO: 67569 - DNA, 25 bp, Artificial
  Probe
cagtgtctgaatctggacttggtct

SEQ ID NO: 67570 - DNA, 25 bp, Artificial
  Probe
tatggtgtaaatagagctgttaagt

SEQ ID NO: 67571 - DNA, 25 bp, Artificial
  Probe
gtatggtgtaaatagagctgttaag

SEQ ID NO: 67572 - DNA, 25 bp, Artificial
  Probe
acagtgtctgaatctggacttggtc

SEQ ID NO: 67573 - DNA, 25 bp, Artificial
  Probe
ctgtgccaactgtgaatatgagctg

SEQ ID NO: 67574 - DNA, 25 bp, Artificial
  Probe
ttctgtgaagaaagccaagaaacca

SEQ ID NO: 67575 - DNA, 25 bp, Artificial
  Probe
tctgaatctggacttggtcttgacc

SEQ ID NO: 67576 - DNA, 25 bp, Artificial
  Probe
ctagcaaggacaccatcattgatgt

SEQ ID NO: 67577 - DNA, 25 bp, Artificial
  Probe
cttctgtgaagaaagccaagaaacc

SEQ ID NO: 67578 - DNA, 25 bp, Artificial
  Probe
aagaaagccaagaaaccataagggg

SEQ ID NO: 67579 - DNA, 25 bp, Artificial
  Probe
gccaacagtgtctgaatctggactt

SEQ ID NO: 67580 - DNA, 25 bp, Artificial
  Probe
cctgtgccaactgtgaatatgagct

SEQ ID NO: 67581 - DNA, 25 bp, Artificial
  Probe
agtgtctaatccttgtgtgaactaa

SEQ ID NO: 67582 - DNA, 25 bp, Artificial
  Probe
ggaagtcgcactgaacactattata

SEQ ID NO: 67583 - DNA, 25 bp, Artificial
  Probe
agtcgcactgaacactattatattc

SEQ ID NO: 67584 - DNA, 25 bp, Artificial
  Probe
gaagtcgcactgaacactattatat

SEQ ID NO: 67585 - DNA, 25 bp, Artificial
  Probe
aagtcgcactgaacactattatatt

SEQ ID NO: 67586 - DNA, 25 bp, Artificial
  Probe
gtgtctaatccttgtgtgaactaaa

SEQ ID NO: 67587 - DNA, 25 bp, Artificial
  Probe
ataaatatgactgccacctcacaaa

SEQ ID NO: 67588 - DNA, 25 bp, Artificial
  Probe
aataaatatgactgccacctcacaa

SEQ ID NO: 67589 - DNA, 25 bp, Artificial
  Probe
aaataaatatgactgccacctcaca

SEQ ID NO: 67590 - DNA, 25 bp, Artificial
  Probe
tttcttgaggtaaatgaggaaggca

SEQ ID NO: 67591 - DNA, 25 bp, Artificial
  Probe
gtcgcactgaacactattatattca

SEQ ID NO: 67592 - DNA, 25 bp, Artificial
  Probe
ttcttgaggtaaatgaggaaggcag

SEQ ID NO: 67593 - DNA, 25 bp, Artificial
  Probe
tcgcactgaacactattatattcat

SEQ ID NO: 67594 - DNA, 25 bp, Artificial
  Probe
cgcactgaacactattatattcatg

SEQ ID NO: 67595 - DNA, 25 bp, Artificial
  Probe
gggaagtcgcactgaacactattat

SEQ ID NO: 67596 - DNA, 25 bp, Artificial
  Probe
gaggtaaatgaggaaggcagtgaag

SEQ ID NO: 67597 - DNA, 25 bp, Artificial
  Probe
gcactgaacactattatattcatgg

SEQ ID NO: 67598 - DNA, 25 bp, Artificial
  Probe
cttgaggtaaatgaggaaggcagtg

SEQ ID NO: 67599 - DNA, 25 bp, Artificial
  Probe
tcttgaggtaaatgaggaaggcagt

SEQ ID NO: 67600 - DNA, 25 bp, Artificial
  Probe
tgaggtaaatgaggaaggcagtgaa

SEQ ID NO: 67601 - DNA, 25 bp, Artificial
  Probe
ttgaggtaaatgaggaaggcagtga

SEQ ID NO: 67602 - DNA, 25 bp, Artificial
  Probe
aaaataaatatgactgccacctcac

SEQ ID NO: 67603 - DNA, 25 bp, Artificial
  Probe
taaatatgactgccacctcacaaaa

SEQ ID NO: 67604 - DNA, 25 bp, Artificial
  Probe
ttataagggaagtcgcactgaacac

SEQ ID NO: 67605 - DNA, 25 bp, Artificial
  Probe
agggaagtcgcactgaacactatta

SEQ ID NO: 67606 - DNA, 25 bp, Artificial
  Probe
taagggaagtcgcactgaacactat

SEQ ID NO: 67607 - DNA, 25 bp, Artificial
  Probe
ataagggaagtcgcactgaacacta

SEQ ID NO: 67608 - DNA, 25 bp, Artificial
  Probe
tataagggaagtcgcactgaacact

SEQ ID NO: 67609 - DNA, 25 bp, Artificial
  Probe
tgtctaatccttgtgtgaactaaaa

SEQ ID NO: 67610 - DNA, 25 bp, Artificial
  Probe
gtaaatgaggaaggcagtgaagcag

SEQ ID NO: 67611 - DNA, 25 bp, Artificial
  Probe
gtctaatccttgtgtgaactaaaat

SEQ ID NO: 67612 - DNA, 25 bp, Artificial
  Probe
gagtacttctgtcgtgattactggc

SEQ ID NO: 67613 - DNA, 25 bp, Artificial
  Probe
aagggaagtcgcactgaacactatt

SEQ ID NO: 67614 - DNA, 25 bp, Artificial
  Probe
attcttaatctttgcaccttttcct

SEQ ID NO: 67615 - DNA, 25 bp, Artificial
  Probe
taatctttgcaccttttcctatctc

SEQ ID NO: 67616 - DNA, 25 bp, Artificial
  Probe
cgagtacttctgtcgtgattactgg

SEQ ID NO: 67617 - DNA, 25 bp, Artificial
  Probe
ttcttaatctttgcaccttttccta

SEQ ID NO: 67618 - DNA, 25 bp, Artificial
  Probe
cactgaacactattatattcatggg

SEQ ID NO: 67619 - DNA, 25 bp, Artificial
  Probe
ttaatctttgcaccttttcctatct

SEQ ID NO: 67620 - DNA, 25 bp, Artificial
  Probe
tcttaatctttgcaccttttcctat

SEQ ID NO: 67621 - DNA, 25 bp, Artificial
  Probe
cttaatctttgcaccttttcctatc

SEQ ID NO: 67622 - DNA, 25 bp, Artificial
  Probe
aggtaaatgaggaaggcagtgaagc

SEQ ID NO: 67623 - DNA, 25 bp, Artificial
  Probe
tattcttaatctttgcaccttttcc

SEQ ID NO: 67624 - DNA, 25 bp, Artificial
  Probe
gcgagtacttctgtcgtgattactg

SEQ ID NO: 67625 - DNA, 25 bp, Artificial
  Probe
cagcgagtacttctgtcgtgattac

SEQ ID NO: 67626 - DNA, 25 bp, Artificial
  Probe
ataggaatgaatcaacaatggtacg

SEQ ID NO: 67627 - DNA, 25 bp, Artificial
  Probe
taggaatgaatcaacaatggtacgg

SEQ ID NO: 67628 - DNA, 25 bp, Artificial
  Probe
taagaagaatttaagtgaccaggca

SEQ ID NO: 67629 - DNA, 25 bp, Artificial
  Probe
aagaagaatttaagtgaccaggcag

SEQ ID NO: 67630 - DNA, 25 bp, Artificial
  Probe
gaattatactaccctgtctgtccta

SEQ ID NO: 67631 - DNA, 25 bp, Artificial
  Probe
ttaagaagaatttaagtgaccaggc

SEQ ID NO: 67632 - DNA, 25 bp, Artificial
  Probe
gggcatctgcgaatattaactttaa

SEQ ID NO: 67633 - DNA, 25 bp, Artificial
  Probe
agggcatctgcgaatattaacttta

SEQ ID NO: 67634 - DNA, 25 bp, Artificial
  Probe
aattatactaccctgtctgtcctat

SEQ ID NO: 67635 - DNA, 25 bp, Artificial
  Probe
tataggaatgaatcaacaatggtac

SEQ ID NO: 67636 - DNA, 25 bp, Artificial
  Probe
attgttcttcaaaggtctcattggc

SEQ ID NO: 67637 - DNA, 25 bp, Artificial
  Probe
gatgacacttaagactctctcctcc

SEQ ID NO: 67638 - DNA, 25 bp, Artificial
  Probe
ggcatctgcgaatattaactttaag

SEQ ID NO: 67639 - DNA, 25 bp, Artificial
  Probe
ggaattatactaccctgtctgtcct

SEQ ID NO: 67640 - DNA, 25 bp, Artificial
  Probe
aggaattatactaccctgtctgtcc

SEQ ID NO: 67641 - DNA, 25 bp, Artificial
  Probe
atgacacttaagactctctcctcct

SEQ ID NO: 67642 - DNA, 25 bp, Artificial
  Probe
ggaggatgacacttaagactctctc

SEQ ID NO: 67643 - DNA, 25 bp, Artificial
  Probe
attatactaccctgtctgtcctata

SEQ ID NO: 67644 - DNA, 25 bp, Artificial
  Probe
agaagaatttaagtgaccaggcagg

SEQ ID NO: 67645 - DNA, 25 bp, Artificial
  Probe
ttctcggaacacatgaaaccaaatc

SEQ ID NO: 67646 - DNA, 25 bp, Artificial
  Probe
cttctcggaacacatgaaaccaaat

SEQ ID NO: 67647 - DNA, 25 bp, Artificial
  Probe
gaacacatgaaaccaaatcgaactg

SEQ ID NO: 67648 - DNA, 25 bp, Artificial
  Probe
cttaagactctctcctcctgactgt

SEQ ID NO: 67649 - DNA, 25 bp, Artificial
  Probe
acttaagactctctcctcctgactg

SEQ ID NO: 67650 - DNA, 25 bp, Artificial
  Probe
cacttaagactctctcctcctgact

SEQ ID NO: 67651 - DNA, 25 bp, Artificial
  Probe
gttcttcaaaggtctcattggcaac

SEQ ID NO: 67652 - DNA, 25 bp, Artificial
  Probe
gacacttaagactctctcctcctga

SEQ ID NO: 67653 - DNA, 25 bp, Artificial
  Probe
ggatgacacttaagactctctcctc

SEQ ID NO: 67654 - DNA, 25 bp, Artificial
  Probe
gaggatgacacttaagactctctcc

SEQ ID NO: 67655 - DNA, 25 bp, Artificial
  Probe
gcatctgcgaatattaactttaaga

SEQ ID NO: 67656 - DNA, 25 bp, Artificial
  Probe
acacttaagactctctcctcctgac

SEQ ID NO: 67657 - DNA, 25 bp, Artificial
  Probe
tgacacttaagactctctcctcctg

SEQ ID NO: 67658 - DNA, 25 bp, Artificial
  Probe
tgttcttcaaaggtctcattggcaa

SEQ ID NO: 67659 - DNA, 25 bp, Artificial
  Probe
ttgttcttcaaaggtctcattggca

SEQ ID NO: 67660 - DNA, 25 bp, Artificial
  Probe
cagggcatctgcgaatattaacttt

SEQ ID NO: 67661 - DNA, 25 bp, Artificial
  Probe
ggaacacatgaaaccaaatcgaact

SEQ ID NO: 67662 - DNA, 25 bp, Artificial
  Probe
aggaatgaatcaacaatggtacggg

SEQ ID NO: 67663 - DNA, 25 bp, Artificial
  Probe
ttatactaccctgtctgtcctatag

SEQ ID NO: 67664 - DNA, 25 bp, Artificial
  Probe
gcagattacaactctcaaataattg

SEQ ID NO: 67665 - DNA, 25 bp, Artificial
  Probe
ctataggaatgaatcaacaatggta

SEQ ID NO: 67666 - DNA, 25 bp, Artificial
  Probe
acacatgaaaccaaatcgaactgtt

SEQ ID NO: 67667 - DNA, 25 bp, Artificial
  Probe
aacacatgaaaccaaatcgaactgt

SEQ ID NO: 67668 - DNA, 25 bp, Artificial
  Probe
gaagaatttaagtgaccaggcaggg

SEQ ID NO: 67669 - DNA, 25 bp, Artificial
  Probe
aaccaaatcgaactgtttcttccag

SEQ ID NO: 67670 - DNA, 25 bp, Artificial
  Probe
caggctaagtttaccgttccttctc

SEQ ID NO: 67671 - DNA, 25 bp, Artificial
  Probe
ttccagcaacttcagtgtcaatgtt

SEQ ID NO: 67672 - DNA, 25 bp, Artificial
  Probe
tttcctggtggatgagactttctta

SEQ ID NO: 67673 - DNA, 25 bp, Artificial
  Probe
ttcctggtggatgagactttcttag

SEQ ID NO: 67674 - DNA, 25 bp, Artificial
  Probe
gtttccagcaacttcagtgtcaatg

SEQ ID NO: 67675 - DNA, 25 bp, Artificial
  Probe
tttccagcaacttcagtgtcaatgt

SEQ ID NO: 67676 - DNA, 25 bp, Artificial
  Probe
ctttcctggtggatgagactttctt

SEQ ID NO: 67677 - DNA, 25 bp, Artificial
  Probe
tccagcaacttcagtgtcaatgttt

SEQ ID NO: 67678 - DNA, 25 bp, Artificial
  Probe
tgtttccagcaacttcagtgtcaat

SEQ ID NO: 67679 - DNA, 25 bp, Artificial
  Probe
aaagtgtgtttggaaaagttcttgg

SEQ ID NO: 67680 - DNA, 25 bp, Artificial
  Probe
gtgtgtttggaaaagttcttggttt

SEQ ID NO: 67681 - DNA, 25 bp, Artificial
  Probe
agtgtgtttggaaaagttcttggtt

SEQ ID NO: 67682 - DNA, 25 bp, Artificial
  Probe
aagtgtgtttggaaaagttcttggt

SEQ ID NO: 67683 - DNA, 25 bp, Artificial
  Probe
tgtgtttggaaaagttcttggtttt

SEQ ID NO: 67684 - DNA, 25 bp, Artificial
  Probe
gtgtttggaaaagttcttggtttta

SEQ ID NO: 67685 - DNA, 25 bp, Artificial
  Probe
ctgtttccagcaacttcagtgtcaa

SEQ ID NO: 67686 - DNA, 25 bp, Artificial
  Probe
ccagcaacttcagtgtcaatgtttt

SEQ ID NO: 67687 - DNA, 25 bp, Artificial
  Probe
gtacagacctgtttccagcaacttc

SEQ ID NO: 67688 - DNA, 25 bp, Artificial
  Probe
caaagtgtgtttggaaaagttcttg

SEQ ID NO: 67689 - DNA, 25 bp, Artificial
  Probe
tacagacctgtttccagcaacttca

SEQ ID NO: 67690 - DNA, 25 bp, Artificial
  Probe
gcaaagtgtgtttggaaaagttctt

SEQ ID NO: 67691 - DNA, 25 bp, Artificial
  Probe
gctttcctggtggatgagactttct

SEQ ID NO: 67692 - DNA, 25 bp, Artificial
  Probe
tgctttcctggtggatgagactttc

SEQ ID NO: 67693 - DNA, 25 bp, Artificial
  Probe
ctgctttcctggtggatgagacttt

SEQ ID NO: 67694 - DNA, 25 bp, Artificial
  Probe
tgcaaagtgtgtttggaaaagttct

SEQ ID NO: 67695 - DNA, 25 bp, Artificial
  Probe
tgtacagacctgtttccagcaactt

SEQ ID NO: 67696 - DNA, 25 bp, Artificial
  Probe
ttgcaaagtgtgtttggaaaagttc

SEQ ID NO: 67697 - DNA, 25 bp, Artificial
  Probe
gttgcaaagtgtgtttggaaaagtt

SEQ ID NO: 67698 - DNA, 25 bp, Artificial
  Probe
cagttgcaaagtgtgtttggaaaag

SEQ ID NO: 67699 - DNA, 25 bp, Artificial
  Probe
agttgcaaagtgtgtttggaaaagt

SEQ ID NO: 67700 - DNA, 25 bp, Artificial
  Probe
ccagttgcaaagtgtgtttggaaaa

SEQ ID NO: 67701 - DNA, 25 bp, Artificial
  Probe
atccagttgcaaagtgtgtttggaa

SEQ ID NO: 67702 - DNA, 25 bp, Artificial
  Probe
ggatccagttgcaaagtgtgtttgg

SEQ ID NO: 67703 - DNA, 25 bp, Artificial
  Probe
tccagttgcaaagtgtgtttggaaa

SEQ ID NO: 67704 - DNA, 25 bp, Artificial
  Probe
gatccagttgcaaagtgtgtttgga

SEQ ID NO: 67705 - DNA, 25 bp, Artificial
  Probe
gaatgctatgaatgctgctgagatc

SEQ ID NO: 67706 - DNA, 25 bp, Artificial
  Probe
gagacactacttccagaatacccaa

SEQ ID NO: 67707 - DNA, 25 bp, Artificial
  Probe
agacactacttccagaatacccaag

SEQ ID NO: 67708 - DNA, 25 bp, Artificial
  Probe
aatgctatgaatgctgctgagatca

SEQ ID NO: 67709 - DNA, 25 bp, Artificial
  Probe
cttgatatttgtggttgacagcaat

SEQ ID NO: 67710 - DNA, 25 bp, Artificial
  Probe
ctatgaatgctgctgagatcacaga

SEQ ID NO: 67711 - DNA, 25 bp, Artificial
  Probe
ttgatatttgtggttgacagcaatg

SEQ ID NO: 67712 - DNA, 25 bp, Artificial
  Probe
gatatttgtggttgacagcaatgac

SEQ ID NO: 67713 - DNA, 25 bp, Artificial
  Probe
cgaatgctatgaatgctgctgagat

SEQ ID NO: 67714 - DNA, 25 bp, Artificial
  Probe
gaatacccaaggcttgatatttgtg

SEQ ID NO: 67715 - DNA, 25 bp, Artificial
  Probe
agaatacccaaggcttgatatttgt

SEQ ID NO: 67716 - DNA, 25 bp, Artificial
  Probe
cagaatacccaaggcttgatatttg

SEQ ID NO: 67717 - DNA, 25 bp, Artificial
  Probe
tgatatttgtggttgacagcaatga

SEQ ID NO: 67718 - DNA, 25 bp, Artificial
  Probe
tatgaatgctgctgagatcacagac

SEQ ID NO: 67719 - DNA, 25 bp, Artificial
  Probe
ccagaatacccaaggcttgatattt

SEQ ID NO: 67720 - DNA, 25 bp, Artificial
  Probe
gacactacttccagaatacccaagg

SEQ ID NO: 67721 - DNA, 25 bp, Artificial
  Probe
aaggcttgatatttgtggttgacag

SEQ ID NO: 67722 - DNA, 25 bp, Artificial
  Probe
atgctatgaatgctgctgagatcac

SEQ ID NO: 67723 - DNA, 25 bp, Artificial
  Probe
tccagaatacccaaggcttgatatt

SEQ ID NO: 67724 - DNA, 25 bp, Artificial
  Probe
ttccagaatacccaaggcttgatat

SEQ ID NO: 67725 - DNA, 25 bp, Artificial
  Probe
caggatttgccgaatgctatgaatg

SEQ ID NO: 67726 - DNA, 25 bp, Artificial
  Probe
cttccagaatacccaaggcttgata

SEQ ID NO: 67727 - DNA, 25 bp, Artificial
  Probe
acaggatttgccgaatgctatgaat

SEQ ID NO: 67728 - DNA, 25 bp, Artificial
  Probe
caaggcttgatatttgtggttgaca

SEQ ID NO: 67729 - DNA, 25 bp, Artificial
  Probe
aatacccaaggcttgatatttgtgg

SEQ ID NO: 67730 - DNA, 25 bp, Artificial
  Probe
actacttccagaatacccaaggctt

SEQ ID NO: 67731 - DNA, 25 bp, Artificial
  Probe
atatttgtggttgacagcaatgacc

SEQ ID NO: 67732 - DNA, 25 bp, Artificial
  Probe
gatttgccgaatgctatgaatgctg

SEQ ID NO: 67733 - DNA, 25 bp, Artificial
  Probe
aacaggatttgccgaatgctatgaa

SEQ ID NO: 67734 - DNA, 25 bp, Artificial
  Probe
aaacaggatttgccgaatgctatga

SEQ ID NO: 67735 - DNA, 25 bp, Artificial
  Probe
gctatgaatgctgctgagatcacag

SEQ ID NO: 67736 - DNA, 25 bp, Artificial
  Probe
ctacttccagaatacccaaggcttg

SEQ ID NO: 67737 - DNA, 25 bp, Artificial
  Probe
gaatgctgctgagatcacagacaag

SEQ ID NO: 67738 - DNA, 25 bp, Artificial
  Probe
atacccaaggcttgatatttgtggt

SEQ ID NO: 67739 - DNA, 25 bp, Artificial
  Probe
tacttccagaatacccaaggcttga

SEQ ID NO: 67740 - DNA, 25 bp, Artificial
  Probe
cactacttccagaatacccaaggct

SEQ ID NO: 67741 - DNA, 25 bp, Artificial
  Probe
tacccaaggcttgatatttgtggtt

SEQ ID NO: 67742 - DNA, 25 bp, Artificial
  Probe
ggagacactacttccagaataccca

SEQ ID NO: 67743 - DNA, 25 bp, Artificial
  Probe
tgctatgaatgctgctgagatcaca

SEQ ID NO: 67744 - DNA, 25 bp, Artificial
  Probe
ccaaggcttgatatttgtggttgac

SEQ ID NO: 67745 - DNA, 25 bp, Artificial
  Probe
atgaatgctgctgagatcacagaca

SEQ ID NO: 67746 - DNA, 25 bp, Artificial
  Probe
gcttgatatttgtggttgacagcaa

SEQ ID NO: 67747 - DNA, 25 bp, Artificial
  Probe
acactacttccagaatacccaaggc

SEQ ID NO: 67748 - DNA, 25 bp, Artificial
  Probe
tgaatgctgctgagatcacagacaa

SEQ ID NO: 67749 - DNA, 25 bp, Artificial
  Probe
ggatttgccgaatgctatgaatgct

SEQ ID NO: 67750 - DNA, 25 bp, Artificial
  Probe
ctcttaatctctgagtcctctctcc

SEQ ID NO: 67751 - DNA, 25 bp, Artificial
  Probe
tcttaatctctgagtcctctctcca

SEQ ID NO: 67752 - DNA, 25 bp, Artificial
  Probe
gctcttaatctctgagtcctctctc

SEQ ID NO: 67753 - DNA, 25 bp, Artificial
  Probe
cttaatctctgagtcctctctccag

SEQ ID NO: 67754 - DNA, 25 bp, Artificial
  Probe
aatggctcttaatctctgagtcctc

SEQ ID NO: 67755 - DNA, 25 bp, Artificial
  Probe
gaatggctcttaatctctgagtcct

SEQ ID NO: 67756 - DNA, 25 bp, Artificial
  Probe
agaatggctcttaatctctgagtcc

SEQ ID NO: 67757 - DNA, 25 bp, Artificial
  Probe
atggctcttaatctctgagtcctct

SEQ ID NO: 67758 - DNA, 25 bp, Artificial
  Probe
attgtcagcccagataagaagattt

SEQ ID NO: 67759 - DNA, 25 bp, Artificial
  Probe
ttagtaagtgatggtttgtggttct

SEQ ID NO: 67760 - DNA, 25 bp, Artificial
  Probe
tagtaagtgatggtttgtggttctc

SEQ ID NO: 67761 - DNA, 25 bp, Artificial
  Probe
tttagtaagtgatggtttgtggttc

SEQ ID NO: 67762 - DNA, 25 bp, Artificial
  Probe
cattgtcagcccagataagaagatt

SEQ ID NO: 67763 - DNA, 25 bp, Artificial
  Probe
tgttaatttacctccatcctcttcc

SEQ ID NO: 67764 - DNA, 25 bp, Artificial
  Probe
atttagtaagtgatggtttgtggtt

SEQ ID NO: 67765 - DNA, 25 bp, Artificial
  Probe
gtaatactttcttggagccgtgtag

SEQ ID NO: 67766 - DNA, 25 bp, Artificial
  Probe
ggctcttaatctctgagtcctctct

SEQ ID NO: 67767 - DNA, 25 bp, Artificial
  Probe
aatttagtaagtgatggtttgtggt

SEQ ID NO: 67768 - DNA, 25 bp, Artificial
  Probe
tcattgtcagcccagataagaagat

SEQ ID NO: 67769 - DNA, 25 bp, Artificial
  Probe
gtaagtgatggtttgtggttctctc

SEQ ID NO: 67770 - DNA, 25 bp, Artificial
  Probe
atcattgtcagcccagataagaaga

SEQ ID NO: 67771 - DNA, 25 bp, Artificial
  Probe
ttgttaggtgatctttgactcttga

SEQ ID NO: 67772 - DNA, 25 bp, Artificial
  Probe
cccacttctttcctttcatactagc

SEQ ID NO: 67773 - DNA, 25 bp, Artificial
  Probe
tggctcttaatctctgagtcctctc

SEQ ID NO: 67774 - DNA, 25 bp, Artificial
  Probe
ttgttaatttacctccatcctcttc

SEQ ID NO: 67775 - DNA, 25 bp, Artificial
  Probe
tgttaggtgatctttgactcttgat

SEQ ID NO: 67776 - DNA, 25 bp, Artificial
  Probe
tttgttaggtgatctttgactcttg

SEQ ID NO: 67777 - DNA, 25 bp, Artificial
  Probe
agtaagtgatggtttgtggttctct

SEQ ID NO: 67778 - DNA, 25 bp, Artificial
  Probe
gatcattgtcagcccagataagaag

SEQ ID NO: 67779 - DNA, 25 bp, Artificial
  Probe
ttaatctctgagtcctctctccagc

SEQ ID NO: 67780 - DNA, 25 bp, Artificial
  Probe
attgttaatttacctccatcctctt

SEQ ID NO: 67781 - DNA, 25 bp, Artificial
  Probe
taagtgatggtttgtggttctctca

SEQ ID NO: 67782 - DNA, 25 bp, Artificial
  Probe
agtaatactttcttggagccgtgta

SEQ ID NO: 67783 - DNA, 25 bp, Artificial
  Probe
ctaacagttactgcaccagatcaac

SEQ ID NO: 67784 - DNA, 25 bp, Artificial
  Probe
acttctttcctttcatactagctgt

SEQ ID NO: 67785 - DNA, 25 bp, Artificial
  Probe
ccacttctttcctttcatactagct

SEQ ID NO: 67786 - DNA, 25 bp, Artificial
  Probe
ccattgctacaccctaacagttact

SEQ ID NO: 67787 - DNA, 25 bp, Artificial
  Probe
cttctttcctttcatactagctgtg

SEQ ID NO: 67788 - DNA, 25 bp, Artificial
  Probe
cacttctttcctttcatactagctg

SEQ ID NO: 67789 - DNA, 25 bp, Artificial
  Probe
gctaatttagtaagtgatggtttgt

SEQ ID NO: 67790 - DNA, 25 bp, Artificial
  Probe
tgctaatttagtaagtgatggtttg

SEQ ID NO: 67791 - DNA, 25 bp, Artificial
  Probe
taatactttcttggagccgtgtagc

SEQ ID NO: 67792 - DNA, 25 bp, Artificial
  Probe
ttctttcctttcatactagctgtgc

SEQ ID NO: 67793 - DNA, 25 bp, Artificial
  Probe
ccttattgttaatttacctccatcc

SEQ ID NO: 67794 - DNA, 25 bp, Artificial
  Probe
taacagttactgcaccagatcaaca

SEQ ID NO: 67795 - DNA, 25 bp, Artificial
  Probe
taggaccagttgtagtgaattgcta

SEQ ID NO: 67796 - DNA, 25 bp, Artificial
  Probe
gtagagatgttgttcaccttgactg

SEQ ID NO: 67797 - DNA, 25 bp, Artificial
  Probe
ttaggaccagttgtagtgaattgct

SEQ ID NO: 67798 - DNA, 25 bp, Artificial
  Probe
tagagatgttgttcaccttgactgt

SEQ ID NO: 67799 - DNA, 25 bp, Artificial
  Probe
atgttgttcaccttgactgtgttat

SEQ ID NO: 67800 - DNA, 25 bp, Artificial
  Probe
ccttgtgatgtgaattgacctgatc

SEQ ID NO: 67801 - DNA, 25 bp, Artificial
  Probe
accttgtgatgtgaattgacctgat

SEQ ID NO: 67802 - DNA, 25 bp, Artificial
  Probe
gttgaccttgtgatgtgaattgacc

SEQ ID NO: 67803 - DNA, 25 bp, Artificial
  Probe
gatgttgttcaccttgactgtgtta

SEQ ID NO: 67804 - DNA, 25 bp, Artificial
  Probe
ttgaccttgtgatgtgaattgacct

SEQ ID NO: 67805 - DNA, 25 bp, Artificial
  Probe
tgttgttcaccttgactgtgttatg

SEQ ID NO: 67806 - DNA, 25 bp, Artificial
  Probe
ggttgaccttgtgatgtgaattgac

SEQ ID NO: 67807 - DNA, 25 bp, Artificial
  Probe
gcagtcacacattagggttagtatt

SEQ ID NO: 67808 - DNA, 25 bp, Artificial
  Probe
gaccttgtgatgtgaattgacctga

SEQ ID NO: 67809 - DNA, 25 bp, Artificial
  Probe
gctagttgtttgaagtctatggaag

SEQ ID NO: 67810 - DNA, 25 bp, Artificial
  Probe
ggctagttgtttgaagtctatggaa

SEQ ID NO: 67811 - DNA, 25 bp, Artificial
  Probe
tttaggaccagttgtagtgaattgc

SEQ ID NO: 67812 - DNA, 25 bp, Artificial
  Probe
cttggctagttgtttgaagtctatg

SEQ ID NO: 67813 - DNA, 25 bp, Artificial
  Probe
ttggctagttgtttgaagtctatgg

SEQ ID NO: 67814 - DNA, 25 bp, Artificial
  Probe
cccaaattccagttcttacttgatt

SEQ ID NO: 67815 - DNA, 25 bp, Artificial
  Probe
tgaccttgtgatgtgaattgacctg

SEQ ID NO: 67816 - DNA, 25 bp, Artificial
  Probe
agttgtttgaagtctatggaagaaa

SEQ ID NO: 67817 - DNA, 25 bp, Artificial
  Probe
gttcaccttgactgtgttatgcttg

SEQ ID NO: 67818 - DNA, 25 bp, Artificial
  Probe
gtgtaccataattaacttggctagt

SEQ ID NO: 67819 - DNA, 25 bp, Artificial
  Probe
ttcaccttgactgtgttatgcttga

SEQ ID NO: 67820 - DNA, 25 bp, Artificial
  Probe
tggctagttgtttgaagtctatgga

SEQ ID NO: 67821 - DNA, 25 bp, Artificial
  Probe
agatgttgttcaccttgactgtgtt

SEQ ID NO: 67822 - DNA, 25 bp, Artificial
  Probe
cagtcacacattagggttagtatta

SEQ ID NO: 67823 - DNA, 25 bp, Artificial
  Probe
tgttcaccttgactgtgttatgctt

SEQ ID NO: 67824 - DNA, 25 bp, Artificial
  Probe
ttgttcaccttgactgtgttatgct

SEQ ID NO: 67825 - DNA, 25 bp, Artificial
  Probe
gttgttcaccttgactgtgttatgc

SEQ ID NO: 67826 - DNA, 25 bp, Artificial
  Probe
ctagttgtttgaagtctatggaaga

SEQ ID NO: 67827 - DNA, 25 bp, Artificial
  Probe
tcaccttgactgtgttatgcttgag

SEQ ID NO: 67828 - DNA, 25 bp, Artificial
  Probe
agagatgttgttcaccttgactgtg

SEQ ID NO: 67829 - DNA, 25 bp, Artificial
  Probe
cgcagtcacacattagggttagtat

SEQ ID NO: 67830 - DNA, 25 bp, Artificial
  Probe
gttgtttgaagtctatggaagaaat

SEQ ID NO: 67831 - DNA, 25 bp, Artificial
  Probe
tagttgtttgaagtctatggaagaa

SEQ ID NO: 67832 - DNA, 25 bp, Artificial
  Probe
gagatgttgttcaccttgactgtgt

SEQ ID NO: 67833 - DNA, 25 bp, Artificial
  Probe
caggttgaccttgtgatgtgaattg

SEQ ID NO: 67834 - DNA, 25 bp, Artificial
  Probe
ccaaattccagttcttacttgattt

SEQ ID NO: 67835 - DNA, 25 bp, Artificial
  Probe
aggttgaccttgtgatgtgaattga

SEQ ID NO: 67836 - DNA, 25 bp, Artificial
  Probe
accataattaacttggctagttgtt

SEQ ID NO: 67837 - DNA, 25 bp, Artificial
  Probe
ggaccagttgtagtgaattgctact

SEQ ID NO: 67838 - DNA, 25 bp, Artificial
  Probe
aggaccagttgtagtgaattgctac

SEQ ID NO: 67839 - DNA, 25 bp, Artificial
  Probe
agtcacacattagggttagtattaa

SEQ ID NO: 67840 - DNA, 25 bp, Artificial
  Probe
ctcatcacctgttaagtcatcagaa

SEQ ID NO: 67841 - DNA, 25 bp, Artificial
  Probe
tcatcacctgttaagtcatcagaac

SEQ ID NO: 67842 - DNA, 25 bp, Artificial
  Probe
atcacctgttaagtcatcagaacct

SEQ ID NO: 67843 - DNA, 25 bp, Artificial
  Probe
catcacctgttaagtcatcagaacc

SEQ ID NO: 67844 - DNA, 25 bp, Artificial
  Probe
ctgttaagtcatcagaacctggaca

SEQ ID NO: 67845 - DNA, 25 bp, Artificial
  Probe
tcacctgttaagtcatcagaacctg

SEQ ID NO: 67846 - DNA, 25 bp, Artificial
  Probe
gctcatcacctgttaagtcatcaga

SEQ ID NO: 67847 - DNA, 25 bp, Artificial
  Probe
tgttaagtcatcagaacctggacac

SEQ ID NO: 67848 - DNA, 25 bp, Artificial
  Probe
cctgttaagtcatcagaacctggac

SEQ ID NO: 67849 - DNA, 25 bp, Artificial
  Probe
gttaagtcatcagaacctggacacc

SEQ ID NO: 67850 - DNA, 25 bp, Artificial
  Probe
cacctgttaagtcatcagaacctgg

SEQ ID NO: 67851 - DNA, 25 bp, Artificial
  Probe
acctgttaagtcatcagaacctgga

SEQ ID NO: 67852 - DNA, 25 bp, Artificial
  Probe
agctcatcacctgttaagtcatcag

SEQ ID NO: 67853 - DNA, 25 bp, Artificial
  Probe
cagctcatcacctgttaagtcatca

SEQ ID NO: 67854 - DNA, 25 bp, Artificial
  Probe
ttaagtcatcagaacctggacacca

SEQ ID NO: 67855 - DNA, 25 bp, Artificial
  Probe
tcattgtgataaagtactgttgctc

SEQ ID NO: 67856 - DNA, 25 bp, Artificial
  Probe
atcctcaagacaggaatcaccttaa

SEQ ID NO: 67857 - DNA, 25 bp, Artificial
  Probe
ctcaagacaggaatcaccttaaaac

SEQ ID NO: 67858 - DNA, 25 bp, Artificial
  Probe
gatcctcaagacaggaatcacctta

SEQ ID NO: 67859 - DNA, 25 bp, Artificial
  Probe
cctcaagacaggaatcaccttaaaa

SEQ ID NO: 67860 - DNA, 25 bp, Artificial
  Probe
tcaagacaggaatcaccttaaaacc

SEQ ID NO: 67861 - DNA, 25 bp, Artificial
  Probe
caagacaggaatcaccttaaaaccc

SEQ ID NO: 67862 - DNA, 25 bp, Artificial
  Probe
agacaggaatcaccttaaaacccat

SEQ ID NO: 67863 - DNA, 25 bp, Artificial
  Probe
gtgtctgacctcattgtgggtaatg

SEQ ID NO: 67864 - DNA, 25 bp, Artificial
  Probe
aagacaggaatcaccttaaaaccca

SEQ ID NO: 67865 - DNA, 25 bp, Artificial
  Probe
gacaggaatcaccttaaaacccatg

SEQ ID NO: 67866 - DNA, 25 bp, Artificial
  Probe
acagctcatcacctgttaagtcatc

SEQ ID NO: 67867 - DNA, 25 bp, Artificial
  Probe
gacagctcatcacctgttaagtcat

SEQ ID NO: 67868 - DNA, 25 bp, Artificial
  Probe
ggagatccacgaagatcccaaattc

SEQ ID NO: 67869 - DNA, 25 bp, Artificial
  Probe
atcattgtgataaagtactgttgct

SEQ ID NO: 67870 - DNA, 25 bp, Artificial
  Probe
tcctcaagacaggaatcaccttaaa

SEQ ID NO: 67871 - DNA, 25 bp, Artificial
  Probe
gatcattgtgataaagtactgttgc

SEQ ID NO: 67872 - DNA, 25 bp, Artificial
  Probe
ggtgtctgacctcattgtgggtaat

SEQ ID NO: 67873 - DNA, 25 bp, Artificial
  Probe
ctgtacggtgtctgacctcattgtg

SEQ ID NO: 67874 - DNA, 25 bp, Artificial
  Probe
gtgacagctcatcacctgttaagtc

SEQ ID NO: 67875 - DNA, 25 bp, Artificial
  Probe
cagtgacagctcatcacctgttaag

SEQ ID NO: 67876 - DNA, 25 bp, Artificial
  Probe
atggagatccacgaagatcccaaat

SEQ ID NO: 67877 - DNA, 25 bp, Artificial
  Probe
tgacagctcatcacctgttaagtca

SEQ ID NO: 67878 - DNA, 25 bp, Artificial
  Probe
agtgacagctcatcacctgttaagt

SEQ ID NO: 67879 - DNA, 25 bp, Artificial
  Probe
tggagatccacgaagatcccaaatt

SEQ ID NO: 67880 - DNA, 25 bp, Artificial
  Probe
tgatcattgtgataaagtactgttg

SEQ ID NO: 67881 - DNA, 25 bp, Artificial
  Probe
gatggagatccacgaagatcccaaa

SEQ ID NO: 67882 - DNA, 25 bp, Artificial
  Probe
taagtcatcagaacctggacaccag

SEQ ID NO: 67883 - DNA, 25 bp, Artificial
  Probe
tgtctgacctcattgtgggtaatga

SEQ ID NO: 67884 - DNA, 25 bp, Artificial
  Probe
ggatcctcaagacaggaatcacctt

SEQ ID NO: 67885 - DNA, 25 bp, Artificial
  Probe
agttaattgtgttattccttcagca

SEQ ID NO: 67886 - DNA, 25 bp, Artificial
  Probe
cagttaattgtgttattccttcagc

SEQ ID NO: 67887 - DNA, 25 bp, Artificial
  Probe
gttaattgtgttattccttcagcaa

SEQ ID NO: 67888 - DNA, 25 bp, Artificial
  Probe
gtgttcagttaattgtgttattcct

SEQ ID NO: 67889 - DNA, 25 bp, Artificial
  Probe
agtgttcagttaattgtgttattcc

SEQ ID NO: 67890 - DNA, 25 bp, Artificial
  Probe
aggaacaaacagtatgaagaagtga

SEQ ID NO: 67891 - DNA, 25 bp, Artificial
  Probe
tcagttaattgtgttattccttcag

SEQ ID NO: 67892 - DNA, 25 bp, Artificial
  Probe
ggaacaaacagtatgaagaagtgaa

SEQ ID NO: 67893 - DNA, 25 bp, Artificial
  Probe
aaggaacaaacagtatgaagaagtg

SEQ ID NO: 67894 - DNA, 25 bp, Artificial
  Probe
ccattaaagcagaagttacaaggtt

SEQ ID NO: 67895 - DNA, 25 bp, Artificial
  Probe
tgttcagttaattgtgttattcctt

SEQ ID NO: 67896 - DNA, 25 bp, Artificial
  Probe
aaaggaacaaacagtatgaagaagt

SEQ ID NO: 67897 - DNA, 25 bp, Artificial
  Probe
cattaaagcagaagttacaaggttg

SEQ ID NO: 67898 - DNA, 25 bp, Artificial
  Probe
gaacaaacagtatgaagaagtgaac

SEQ ID NO: 67899 - DNA, 25 bp, Artificial
  Probe
ttcagttaattgtgttattccttca

SEQ ID NO: 67900 - DNA, 25 bp, Artificial
  Probe
gccattaaagcagaagttacaaggt

SEQ ID NO: 67901 - DNA, 25 bp, Artificial
  Probe
aacaaacagtatgaagaagtgaact

SEQ ID NO: 67902 - DNA, 25 bp, Artificial
  Probe
gttcagttaattgtgttattccttc

SEQ ID NO: 67903 - DNA, 25 bp, Artificial
  Probe
aagtgttcagttaattgtgttattc

SEQ ID NO: 67904 - DNA, 25 bp, Artificial
  Probe
ttaattgtgttattccttcagcaaa

SEQ ID NO: 67905 - DNA, 25 bp, Artificial
  Probe
taaaggaacaaacagtatgaagaag

SEQ ID NO: 67906 - DNA, 25 bp, Artificial
  Probe
aattgtgttattccttcagcaaata

SEQ ID NO: 67907 - DNA, 25 bp, Artificial
  Probe
taattgtgttattccttcagcaaat

SEQ ID NO: 67908 - DNA, 25 bp, Artificial
  Probe
attgtgttattccttcagcaaatat

SEQ ID NO: 67909 - DNA, 25 bp, Artificial
  Probe
tcattatgcagaagtaacatatcct

SEQ ID NO: 67910 - DNA, 25 bp, Artificial
  Probe
cagccagcctgtagttatctgtgta

SEQ ID NO: 67911 - DNA, 25 bp, Artificial
  Probe
ataaaggaacaaacagtatgaagaa

SEQ ID NO: 67912 - DNA, 25 bp, Artificial
  Probe
atgcagaagtaacatatccttcatg

SEQ ID NO: 67913 - DNA, 25 bp, Artificial
  Probe
ttgtgttattccttcagcaaatatt

SEQ ID NO: 67914 - DNA, 25 bp, Artificial
  Probe
gattgccattaaagcagaagttaca

SEQ ID NO: 67915 - DNA, 25 bp, Artificial
  Probe
tgattgccattaaagcagaagttac

SEQ ID NO: 67916 - DNA, 25 bp, Artificial
  Probe
agccagcctgtagttatctgtgtac

SEQ ID NO: 67917 - DNA, 25 bp, Artificial
  Probe
attaaagcagaagttacaaggttgc

SEQ ID NO: 67918 - DNA, 25 bp, Artificial
  Probe
ttgccattaaagcagaagttacaag

SEQ ID NO: 67919 - DNA, 25 bp, Artificial
  Probe
attgccattaaagcagaagttacaa

SEQ ID NO: 67920 - DNA, 25 bp, Artificial
  Probe
aaacttgattgccattaaagcagaa

SEQ ID NO: 67921 - DNA, 25 bp, Artificial
  Probe
cattatgcagaagtaacatatcctt

SEQ ID NO: 67922 - DNA, 25 bp, Artificial
  Probe
ttgattgccattaaagcagaagtta

SEQ ID NO: 67923 - DNA, 25 bp, Artificial
  Probe
cttgattgccattaaagcagaagtt

SEQ ID NO: 67924 - DNA, 25 bp, Artificial
  Probe
aacttgattgccattaaagcagaag

SEQ ID NO: 67925 - DNA, 25 bp, Artificial
  Probe
taaacttgattgccattaaagcaga

SEQ ID NO: 67926 - DNA, 25 bp, Artificial
  Probe
agtatgaagaagtgaactgtacatt

SEQ ID NO: 67927 - DNA, 25 bp, Artificial
  Probe
ttaaacttgattgccattaaagcag

SEQ ID NO: 67928 - DNA, 25 bp, Artificial
  Probe
acttgattgccattaaagcagaagt

SEQ ID NO: 67929 - DNA, 25 bp, Artificial
  Probe
cagaaaagtgttcagttaattgtgt

SEQ ID NO: 67930 - DNA, 25 bp, Artificial
  Probe
tccttcctctgataattgtacttgg

SEQ ID NO: 67931 - DNA, 25 bp, Artificial
  Probe
ttgtactccttcctctgataattgt

SEQ ID NO: 67932 - DNA, 25 bp, Artificial
  Probe
actccttcctctgataattgtactt

SEQ ID NO: 67933 - DNA, 25 bp, Artificial
  Probe
ctccttcctctgataattgtacttg

SEQ ID NO: 67934 - DNA, 25 bp, Artificial
  Probe
tgtactccttcctctgataattgta

SEQ ID NO: 67935 - DNA, 25 bp, Artificial
  Probe
tactccttcctctgataattgtact

SEQ ID NO: 67936 - DNA, 25 bp, Artificial
  Probe
ccttcctctgataattgtacttgga

SEQ ID NO: 67937 - DNA, 25 bp, Artificial
  Probe
aatttactatcacagattgcctacg

SEQ ID NO: 67938 - DNA, 25 bp, Artificial
  Probe
gcatttgtactccttcctctgataa

SEQ ID NO: 67939 - DNA, 25 bp, Artificial
  Probe
cctctgataattgtacttggaaacc

SEQ ID NO: 67940 - DNA, 25 bp, Artificial
  Probe
gtctgttaagcatttgtactccttc

SEQ ID NO: 67941 - DNA, 25 bp, Artificial
  Probe
ttaagcatttgtactccttcctctg

SEQ ID NO: 67942 - DNA, 25 bp, Artificial
  Probe
gttaagcatttgtactccttcctct

SEQ ID NO: 67943 - DNA, 25 bp, Artificial
  Probe
agcatttgtactccttcctctgata

SEQ ID NO: 67944 - DNA, 25 bp, Artificial
  Probe
tgttaagcatttgtactccttcctc

SEQ ID NO: 67945 - DNA, 25 bp, Artificial
  Probe
ctgttaagcatttgtactccttcct

SEQ ID NO: 67946 - DNA, 25 bp, Artificial
  Probe
tctgttaagcatttgtactccttcc

SEQ ID NO: 67947 - DNA, 25 bp, Artificial
  Probe
taagcatttgtactccttcctctga

SEQ ID NO: 67948 - DNA, 25 bp, Artificial
  Probe
tttgtactccttcctctgataattg

SEQ ID NO: 67949 - DNA, 25 bp, Artificial
  Probe
aagcatttgtactccttcctctgat

SEQ ID NO: 67950 - DNA, 25 bp, Artificial
  Probe
catttgtactccttcctctgataat

SEQ ID NO: 67951 - DNA, 25 bp, Artificial
  Probe
gattgcctacgtggaaataagaaat

SEQ ID NO: 67952 - DNA, 25 bp, Artificial
  Probe
agattgcctacgtggaaataagaaa

SEQ ID NO: 67953 - DNA, 25 bp, Artificial
  Probe
atttactatcacagattgcctacgt

SEQ ID NO: 67954 - DNA, 25 bp, Artificial
  Probe
gtactccttcctctgataattgtac

SEQ ID NO: 67955 - DNA, 25 bp, Artificial
  Probe
ttactatcacagattgcctacgtgg

SEQ ID NO: 67956 - DNA, 25 bp, Artificial
  Probe
cagattgcctacgtggaaataagaa

SEQ ID NO: 67957 - DNA, 25 bp, Artificial
  Probe
ggacaatttactatcacagattgcc

SEQ ID NO: 67958 - DNA, 25 bp, Artificial
  Probe
gggacaatttactatcacagattgc

SEQ ID NO: 67959 - DNA, 25 bp, Artificial
  Probe
tgcctacgtggaaataagaaataaa

SEQ ID NO: 67960 - DNA, 25 bp, Artificial
  Probe
ttgcctacgtggaaataagaaataa

SEQ ID NO: 67961 - DNA, 25 bp, Artificial
  Probe
atttgtactccttcctctgataatt

SEQ ID NO: 67962 - DNA, 25 bp, Artificial
  Probe
ctctgataattgtacttggaaacca

SEQ ID NO: 67963 - DNA, 25 bp, Artificial
  Probe
tcctctgataattgtacttggaaac

SEQ ID NO: 67964 - DNA, 25 bp, Artificial
  Probe
attgcctacgtggaaataagaaata

SEQ ID NO: 67965 - DNA, 25 bp, Artificial
  Probe
gacaatttactatcacagattgcct

SEQ ID NO: 67966 - DNA, 25 bp, Artificial
  Probe
aattcgccctatagtgagtcgtatc

SEQ ID NO: 67967 - DNA, 25 bp, Artificial
  Probe
acagattgcctacgtggaaataaga

SEQ ID NO: 67968 - DNA, 25 bp, Artificial
  Probe
tactatcacagattgcctacgtgga

SEQ ID NO: 67969 - DNA, 25 bp, Artificial
  Probe
caggggacaatttactatcacagat

SEQ ID NO: 67970 - DNA, 25 bp, Artificial
  Probe
tttactatcacagattgcctacgtg

SEQ ID NO: 67971 - DNA, 25 bp, Artificial
  Probe
aggggacaatttactatcacagatt

SEQ ID NO: 67972 - DNA, 25 bp, Artificial
  Probe
acaatttactatcacagattgccta

SEQ ID NO: 67973 - DNA, 25 bp, Artificial
  Probe
caatttactatcacagattgcctac

SEQ ID NO: 67974 - DNA, 25 bp, Artificial
  Probe
atagtgagtcgtatcacaattcacg

SEQ ID NO: 67975 - DNA, 25 bp, Artificial
  Probe
ttgctggtttacattatgtgctgtc

SEQ ID NO: 67976 - DNA, 25 bp, Artificial
  Probe
ctgttgctggtttacattatgtgct

SEQ ID NO: 67977 - DNA, 25 bp, Artificial
  Probe
gttgctggtttacattatgtgctgt

SEQ ID NO: 67978 - DNA, 25 bp, Artificial
  Probe
tgttgctggtttacattatgtgctg

SEQ ID NO: 67979 - DNA, 25 bp, Artificial
  Probe
ccctgttgctggtttacattatgtg

SEQ ID NO: 67980 - DNA, 25 bp, Artificial
  Probe
caccctgttgctggtttacattatg

SEQ ID NO: 67981 - DNA, 25 bp, Artificial
  Probe
tcaccctgttgctggtttacattat

SEQ ID NO: 67982 - DNA, 25 bp, Artificial
  Probe
cctgttgctggtttacattatgtgc

SEQ ID NO: 67983 - DNA, 25 bp, Artificial
  Probe
accctgttgctggtttacattatgt

SEQ ID NO: 67984 - DNA, 25 bp, Artificial
  Probe
ctcaccctgttgctggtttacatta

SEQ ID NO: 67985 - DNA, 25 bp, Artificial
  Probe
acctgtgaacatagctacgactgat

SEQ ID NO: 67986 - DNA, 25 bp, Artificial
  Probe
gacctgtgaacatagctacgactga

SEQ ID NO: 67987 - DNA, 25 bp, Artificial
  Probe
ctgacctgtgaacatagctacgact

SEQ ID NO: 67988 - DNA, 25 bp, Artificial
  Probe
tgctggtttacattatgtgctgtcg

SEQ ID NO: 67989 - DNA, 25 bp, Artificial
  Probe
tgacctgtgaacatagctacgactg

SEQ ID NO: 67990 - DNA, 25 bp, Artificial
  Probe
ttacattatgtgctgtcggcgtgaa

SEQ ID NO: 67991 - DNA, 25 bp, Artificial
  Probe
ctggtttacattatgtgctgtcggc

SEQ ID NO: 67992 - DNA, 25 bp, Artificial
  Probe
gctggtttacattatgtgctgtcgg

SEQ ID NO: 67993 - DNA, 25 bp, Artificial
  Probe
tctatccaccttgcccatgttcaac

SEQ ID NO: 67994 - DNA, 25 bp, Artificial
  Probe
gtttacattatgtgctgtcggcgtg

SEQ ID NO: 67995 - DNA, 25 bp, Artificial
  Probe
ctgacatccagatgtttcaccactg

SEQ ID NO: 67996 - DNA, 25 bp, Artificial
  Probe
tttacattatgtgctgtcggcgtga

SEQ ID NO: 67997 - DNA, 25 bp, Artificial
  Probe
tctgacatccagatgtttcaccact

SEQ ID NO: 67998 - DNA, 25 bp, Artificial
  Probe
acatccagatgtttcaccactgctc

SEQ ID NO: 67999 - DNA, 25 bp, Artificial
  Probe
gacatccagatgtttcaccactgct

SEQ ID NO: 68000 - DNA, 25 bp, Artificial
  Probe
ctccaaacaggcagatggatggtag

SEQ ID NO: 68001 - DNA, 25 bp, Artificial
  Probe
ttccttgggtaagtgtgtttccttc

SEQ ID NO: 68002 - DNA, 25 bp, Artificial
  Probe
gttccttgggtaagtgtgtttcctt

SEQ ID NO: 68003 - DNA, 25 bp, Artificial
  Probe
cttgggtaagtgtgtttccttcctg

SEQ ID NO: 68004 - DNA, 25 bp, Artificial
  Probe
cagttccttgggtaagtgtgtttcc

SEQ ID NO: 68005 - DNA, 25 bp, Artificial
  Probe
agttccttgggtaagtgtgtttcct

SEQ ID NO: 68006 - DNA, 25 bp, Artificial
  Probe
gaccgccttgtttcttgttctcttt

SEQ ID NO: 68007 - DNA, 25 bp, Artificial
  Probe
ttgggtaagtgtgtttccttcctgt

SEQ ID NO: 68008 - DNA, 25 bp, Artificial
  Probe
ccttgggtaagtgtgtttccttcct

SEQ ID NO: 68009 - DNA, 25 bp, Artificial
  Probe
tccttgggtaagtgtgtttccttcc

SEQ ID NO: 68010 - DNA, 25 bp, Artificial
  Probe
ccagttccttgggtaagtgtgtttc

SEQ ID NO: 68011 - DNA, 25 bp, Artificial
  Probe
tccagttccttgggtaagtgtgttt

SEQ ID NO: 68012 - DNA, 25 bp, Artificial
  Probe
aaaatactgaagctcgggacatttg

SEQ ID NO: 68013 - DNA, 25 bp, Artificial
  Probe
catttgctcttcagttcgtgtgctc

SEQ ID NO: 68014 - DNA, 25 bp, Artificial
  Probe
aaatactgaagctcgggacatttgc

SEQ ID NO: 68015 - DNA, 25 bp, Artificial
  Probe
accgccttgtttcttgttctctttt

SEQ ID NO: 68016 - DNA, 25 bp, Artificial
  Probe
ggacatttgctcttcagttcgtgtg

SEQ ID NO: 68017 - DNA, 25 bp, Artificial
  Probe
atttgctcttcagttcgtgtgctct

SEQ ID NO: 68018 - DNA, 25 bp, Artificial
  Probe
ctccagttccttgggtaagtgtgtt

SEQ ID NO: 68019 - DNA, 25 bp, Artificial
  Probe
gacatttgctcttcagttcgtgtgc

SEQ ID NO: 68020 - DNA, 25 bp, Artificial
  Probe
aatactgaagctcgggacatttgct

SEQ ID NO: 68021 - DNA, 25 bp, Artificial
  Probe
atactgaagctcgggacatttgctc

SEQ ID NO: 68022 - DNA, 25 bp, Artificial
  Probe
aagttccagagctacagagattctt

SEQ ID NO: 68023 - DNA, 25 bp, Artificial
  Probe
agttccagagctacagagattcttc

SEQ ID NO: 68024 - DNA, 25 bp, Artificial
  Probe
tgactatgctgggaagaataaagtt

SEQ ID NO: 68025 - DNA, 25 bp, Artificial
  Probe
atgactatgctgggaagaataaagt

SEQ ID NO: 68026 - DNA, 25 bp, Artificial
  Probe
gactatgctgggaagaataaagttc

SEQ ID NO: 68027 - DNA, 25 bp, Artificial
  Probe
tatgactatgctgggaagaataaag

SEQ ID NO: 68028 - DNA, 25 bp, Artificial
  Probe
gttccagagctacagagattcttcc

SEQ ID NO: 68029 - DNA, 25 bp, Artificial
  Probe
taaagttccagagctacagagattc

SEQ ID NO: 68030 - DNA, 25 bp, Artificial
  Probe
ttccagagctacagagattcttcca

SEQ ID NO: 68031 - DNA, 25 bp, Artificial
  Probe
atatgactatgctgggaagaataaa

SEQ ID NO: 68032 - DNA, 25 bp, Artificial
  Probe
ataaagttccagagctacagagatt

SEQ ID NO: 68033 - DNA, 25 bp, Artificial
  Probe
aataaagttccagagctacagagat

SEQ ID NO: 68034 - DNA, 25 bp, Artificial
  Probe
gaataaagttccagagctacagaga

SEQ ID NO: 68035 - DNA, 25 bp, Artificial
  Probe
agaataaagttccagagctacagag

SEQ ID NO: 68036 - DNA, 25 bp, Artificial
  Probe
aagaataaagttccagagctacaga

SEQ ID NO: 68037 - DNA, 25 bp, Artificial
  Probe
gaagaataaagttccagagctacag

SEQ ID NO: 68038 - DNA, 25 bp, Artificial
  Probe
ctccagtgtgacagcatatgactat

SEQ ID NO: 68039 - DNA, 25 bp, Artificial
  Probe
agagctacagagattcttccagaag

SEQ ID NO: 68040 - DNA, 25 bp, Artificial
  Probe
ccagagctacagagattcttccaga

SEQ ID NO: 68041 - DNA, 25 bp, Artificial
  Probe
tccagagctacagagattcttccag

SEQ ID NO: 68042 - DNA, 25 bp, Artificial
  Probe
aaagttccagagctacagagattct

SEQ ID NO: 68043 - DNA, 25 bp, Artificial
  Probe
cagagctacagagattcttccagaa

SEQ ID NO: 68044 - DNA, 25 bp, Artificial
  Probe
ctacagagattcttccagaaggctg

SEQ ID NO: 68045 - DNA, 25 bp, Artificial
  Probe
tacagagattcttccagaaggctga

SEQ ID NO: 68046 - DNA, 25 bp, Artificial
  Probe
gagctacagagattcttccagaagg

SEQ ID NO: 68047 - DNA, 25 bp, Artificial
  Probe
tccagtgtgacagcatatgactatg

SEQ ID NO: 68048 - DNA, 25 bp, Artificial
  Probe
ctatcatatttgccacaccgaccaa

SEQ ID NO: 68049 - DNA, 25 bp, Artificial
  Probe
cctccagtgtgacagcatatgacta

SEQ ID NO: 68050 - DNA, 25 bp, Artificial
  Probe
catatgactatgctgggaagaataa

SEQ ID NO: 68051 - DNA, 25 bp, Artificial
  Probe
gctacagagattcttccagaaggct

SEQ ID NO: 68052 - DNA, 25 bp, Artificial
  Probe
atcatgggaaagaacacctgtcagt

SEQ ID NO: 68053 - DNA, 25 bp, Artificial
  Probe
tatcatatttgccacaccgaccaaa

SEQ ID NO: 68054 - DNA, 25 bp, Artificial
  Probe
acagagattcttccagaaggctgac

SEQ ID NO: 68055 - DNA, 25 bp, Artificial
  Probe
ctatgctgggaagaataaagttcca

SEQ ID NO: 68056 - DNA, 25 bp, Artificial
  Probe
actatgctgggaagaataaagttcc

SEQ ID NO: 68057 - DNA, 25 bp, Artificial
  Probe
agctacagagattcttccagaaggc

SEQ ID NO: 68058 - DNA, 25 bp, Artificial
  Probe
cctatcatatttgccacaccgacca

SEQ ID NO: 68059 - DNA, 25 bp, Artificial
  Probe
ggaagaataaagttccagagctaca

SEQ ID NO: 68060 - DNA, 25 bp, Artificial
  Probe
gggaagaataaagttccagagctac

SEQ ID NO: 68061 - DNA, 25 bp, Artificial
  Probe
tgggaagaataaagttccagagcta

SEQ ID NO: 68062 - DNA, 25 bp, Artificial
  Probe
gacctccagtgtgacagcatatgac

SEQ ID NO: 68063 - DNA, 25 bp, Artificial
  Probe
cagagattcttccagaaggctgacg

SEQ ID NO: 68064 - DNA, 25 bp, Artificial
  Probe
atcatatttgccacaccgaccaaac

SEQ ID NO: 68065 - DNA, 25 bp, Artificial
  Probe
tcatgggaaagaacacctgtcagtg

SEQ ID NO: 68066 - DNA, 25 bp, Artificial
  Probe
ctgacctccagtgtgacagcatatg

SEQ ID NO: 68067 - DNA, 25 bp, Artificial
  Probe
ctacattgaaacatcagccaagacc

SEQ ID NO: 68068 - DNA, 25 bp, Artificial
  Probe
cctacattgaaacatcagccaagac

SEQ ID NO: 68069 - DNA, 25 bp, Artificial
  Probe
ttgaacagactgtcatgaactatcc

SEQ ID NO: 68070 - DNA, 25 bp, Artificial
  Probe
ccctacattgaaacatcagccaaga

SEQ ID NO: 68071 - DNA, 25 bp, Artificial
  Probe
tacattgaaacatcagccaagaccc

SEQ ID NO: 68072 - DNA, 25 bp, Artificial
  Probe
tagtacgtgagattcggcagcataa

SEQ ID NO: 68073 - DNA, 25 bp, Artificial
  Probe
cttcgcatggacaatttgaacagac

SEQ ID NO: 68074 - DNA, 25 bp, Artificial
  Probe
ttcgcatggacaatttgaacagact

SEQ ID NO: 68075 - DNA, 25 bp, Artificial
  Probe
tatggcatcccctacattgaaacat

SEQ ID NO: 68076 - DNA, 25 bp, Artificial
  Probe
caatttgaacagactgtcatgaact

SEQ ID NO: 68077 - DNA, 25 bp, Artificial
  Probe
acaatttgaacagactgtcatgaac

SEQ ID NO: 68078 - DNA, 25 bp, Artificial
  Probe
ctatggcatcccctacattgaaaca

SEQ ID NO: 68079 - DNA, 25 bp, Artificial
  Probe
tttgaacagactgtcatgaactatc

SEQ ID NO: 68080 - DNA, 25 bp, Artificial
  Probe
tcgcatggacaatttgaacagactg

SEQ ID NO: 68081 - DNA, 25 bp, Artificial
  Probe
ggaaagaggagggaaggaaggaaac

SEQ ID NO: 68082 - DNA, 25 bp, Artificial
  Probe
aatttgaacagactgtcatgaacta

SEQ ID NO: 68083 - DNA, 25 bp, Artificial
  Probe
ccttcgcatggacaatttgaacaga

SEQ ID NO: 68084 - DNA, 25 bp, Artificial
  Probe
aggaaagaggagggaaggaaggaaa

SEQ ID NO: 68085 - DNA, 25 bp, Artificial
  Probe
aaggaaagaggagggaaggaaggaa

SEQ ID NO: 68086 - DNA, 25 bp, Artificial
  Probe
aaggaaggaaagaggagggaaggaa

SEQ ID NO: 68087 - DNA, 25 bp, Artificial
  Probe
atttgaacagactgtcatgaactat

SEQ ID NO: 68088 - DNA, 25 bp, Artificial
  Probe
ggcacatgttgaatcacagtaaatt

SEQ ID NO: 68089 - DNA, 25 bp, Artificial
  Probe
gaacagactgtcatgaactatccct

SEQ ID NO: 68090 - DNA, 25 bp, Artificial
  Probe
atggcatcccctacattgaaacatc

SEQ ID NO: 68091 - DNA, 25 bp, Artificial
  Probe
accttcgcatggacaatttgaacag

SEQ ID NO: 68092 - DNA, 25 bp, Artificial
  Probe
gaccttcgcatggacaatttgaaca

SEQ ID NO: 68093 - DNA, 25 bp, Artificial
  Probe
tgaacagactgtcatgaactatccc

SEQ ID NO: 68094 - DNA, 25 bp, Artificial
  Probe
gaaagaggagggaaggaaggaaacg

SEQ ID NO: 68095 - DNA, 25 bp, Artificial
  Probe
atggacaatttgaacagactgtcat

SEQ ID NO: 68096 - DNA, 25 bp, Artificial
  Probe
gcacatgttgaatcacagtaaatta

SEQ ID NO: 68097 - DNA, 25 bp, Artificial
  Probe
aacagactgtcatgaactatccctg

SEQ ID NO: 68098 - DNA, 25 bp, Artificial
  Probe
tgttgaatcacagtaaattatttga

SEQ ID NO: 68099 - DNA, 25 bp, Artificial
  Probe
aagaggagggaaggaaggaaacgat

SEQ ID NO: 68100 - DNA, 25 bp, Artificial
  Probe
gaaggaaagaggagggaaggaagga

SEQ ID NO: 68101 - DNA, 25 bp, Artificial
  Probe
aggaaggaaagaggagggaaggaag

SEQ ID NO: 68102 - DNA, 25 bp, Artificial
  Probe
gaaggaaggaaagaggagggaagga

SEQ ID NO: 68103 - DNA, 25 bp, Artificial
  Probe
gggcacatgttgaatcacagtaaat

SEQ ID NO: 68104 - DNA, 25 bp, Artificial
  Probe
tggacaatttgaacagactgtcatg

SEQ ID NO: 68105 - DNA, 25 bp, Artificial
  Probe
catggacaatttgaacagactgtca

SEQ ID NO: 68106 - DNA, 25 bp, Artificial
  Probe
cgcatggacaatttgaacagactgt

SEQ ID NO: 68107 - DNA, 25 bp, Artificial
  Probe
aaagaggagggaaggaaggaaacga

SEQ ID NO: 68108 - DNA, 25 bp, Artificial
  Probe
gtacgtgagattcggcagcataaac

SEQ ID NO: 68109 - DNA, 25 bp, Artificial
  Probe
gctatggcatcccctacattgaaac

SEQ ID NO: 68110 - DNA, 25 bp, Artificial
  Probe
tacgtgagattcggcagcataaact

SEQ ID NO: 68111 - DNA, 25 bp, Artificial
  Probe
agtacgtgagattcggcagcataaa

SEQ ID NO: 68112 - DNA, 25 bp, Artificial
  Probe
ctctctcctcctctctctccttcct

SEQ ID NO: 68113 - DNA, 25 bp, Artificial
  Probe
cagtgcctttcgaagagagatattt

SEQ ID NO: 68114 - DNA, 25 bp, Artificial
  Probe
ccagtgcctttcgaagagagatatt

SEQ ID NO: 68115 - DNA, 25 bp, Artificial
  Probe
ggaagaggagcctttctgttcactc

SEQ ID NO: 68116 - DNA, 25 bp, Artificial
  Probe
gaggaagaggagcctttctgttcac

SEQ ID NO: 68117 - DNA, 25 bp, Artificial
  Probe
aggaagaggagcctttctgttcact

SEQ ID NO: 68118 - DNA, 25 bp, Artificial
  Probe
accagtgcctttcgaagagagatat

SEQ ID NO: 68119 - DNA, 25 bp, Artificial
  Probe
aagaggagcctttctgttcactctc

SEQ ID NO: 68120 - DNA, 25 bp, Artificial
  Probe
gaagaggagcctttctgttcactct

SEQ ID NO: 68121 - DNA, 25 bp, Artificial
  Probe
gcctttcgaagagagatattttgtg

SEQ ID NO: 68122 - DNA, 25 bp, Artificial
  Probe
gtgcctttcgaagagagatattttg

SEQ ID NO: 68123 - DNA, 25 bp, Artificial
  Probe
agtgcctttcgaagagagatatttt

SEQ ID NO: 68124 - DNA, 25 bp, Artificial
  Probe
tgcctttcgaagagagatattttgt

SEQ ID NO: 68125 - DNA, 25 bp, Artificial
  Probe
cctttcgaagagagatattttgtgt

SEQ ID NO: 68126 - DNA, 25 bp, Artificial
  Probe
ttcgaagagagatattttgtgtaca

SEQ ID NO: 68127 - DNA, 25 bp, Artificial
  Probe
caccagtgcctttcgaagagagata

SEQ ID NO: 68128 - DNA, 25 bp, Artificial
  Probe
tttcgaagagagatattttgtgtac

SEQ ID NO: 68129 - DNA, 25 bp, Artificial
  Probe
ctttcgaagagagatattttgtgta

SEQ ID NO: 68130 - DNA, 25 bp, Artificial
  Probe
cagagtgtaagtgagttcagcaaac

SEQ ID NO: 68131 - DNA, 25 bp, Artificial
  Probe
gtaagtgagttcagcaaacagcatt

SEQ ID NO: 68132 - DNA, 25 bp, Artificial
  Probe
taagtgagttcagcaaacagcattg

SEQ ID NO: 68133 - DNA, 25 bp, Artificial
  Probe
gagtgtaagtgagttcagcaaacag

SEQ ID NO: 68134 - DNA, 25 bp, Artificial
  Probe
agagtgtaagtgagttcagcaaaca

SEQ ID NO: 68135 - DNA, 25 bp, Artificial
  Probe
ccagagtgtaagtgagttcagcaaa

SEQ ID NO: 68136 - DNA, 25 bp, Artificial
  Probe
gcctctccattgattatatcgatga

SEQ ID NO: 68137 - DNA, 25 bp, Artificial
  Probe
ggcctctccattgattatatcgatg

SEQ ID NO: 68138 - DNA, 25 bp, Artificial
  Probe
attgtggcctctccattgattatat

SEQ ID NO: 68139 - DNA, 25 bp, Artificial
  Probe
ttgtggcctctccattgattatatc

SEQ ID NO: 68140 - DNA, 25 bp, Artificial
  Probe
cattgtggcctctccattgattata

SEQ ID NO: 68141 - DNA, 25 bp, Artificial
  Probe
cctctccattgattatatcgatgac

SEQ ID NO: 68142 - DNA, 25 bp, Artificial
  Probe
tccattgattatatcgatgacagac

SEQ ID NO: 68143 - DNA, 25 bp, Artificial
  Probe
ccattgattatatcgatgacagact

SEQ ID NO: 68144 - DNA, 25 bp, Artificial
  Probe
tgtaagtgagttcagcaaacagcat

SEQ ID NO: 68145 - DNA, 25 bp, Artificial
  Probe
ctccattgattatatcgatgacaga

SEQ ID NO: 68146 - DNA, 25 bp, Artificial
  Probe
tctccattgattatatcgatgacag

SEQ ID NO: 68147 - DNA, 25 bp, Artificial
  Probe
ctctccattgattatatcgatgaca

SEQ ID NO: 68148 - DNA, 25 bp, Artificial
  Probe
gtggcctctccattgattatatcga

SEQ ID NO: 68149 - DNA, 25 bp, Artificial
  Probe
tgtggcctctccattgattatatcg

SEQ ID NO: 68150 - DNA, 25 bp, Artificial
  Probe
tggcctctccattgattatatcgat

SEQ ID NO: 68151 - DNA, 25 bp, Artificial
  Probe
agtgtaagtgagttcagcaaacagc

SEQ ID NO: 68152 - DNA, 25 bp, Artificial
  Probe
gccagagtgtaagtgagttcagcaa

SEQ ID NO: 68153 - DNA, 25 bp, Artificial
  Probe
cattgattatatcgatgacagactc

SEQ ID NO: 68154 - DNA, 25 bp, Artificial
  Probe
attgattatatcgatgacagactca

SEQ ID NO: 68155 - DNA, 25 bp, Artificial
  Probe
aagtgagttcagcaaacagcattgt

SEQ ID NO: 68156 - DNA, 25 bp, Artificial
  Probe
gtgtaagtgagttcagcaaacagca

SEQ ID NO: 68157 - DNA, 25 bp, Artificial
  Probe
ttgacgtactctaaaatgagcttca

SEQ ID NO: 68158 - DNA, 25 bp, Artificial
  Probe
cttgacgtactctaaaatgagcttc

SEQ ID NO: 68159 - DNA, 25 bp, Artificial
  Probe
ccttgacgtactctaaaatgagctt

SEQ ID NO: 68160 - DNA, 25 bp, Artificial
  Probe
gacgtactctaaaatgagcttcaca

SEQ ID NO: 68161 - DNA, 25 bp, Artificial
  Probe
tgacgtactctaaaatgagcttcac

SEQ ID NO: 68162 - DNA, 25 bp, Artificial
  Probe
gcattgtggcctctccattgattat

SEQ ID NO: 68163 - DNA, 25 bp, Artificial
  Probe
acgtactctaaaatgagcttcacac

SEQ ID NO: 68164 - DNA, 25 bp, Artificial
  Probe
agtgagttcagcaaacagcattgtg

SEQ ID NO: 68165 - DNA, 25 bp, Artificial
  Probe
tgattatatcgatgacagactcaaa

SEQ ID NO: 68166 - DNA, 25 bp, Artificial
  Probe
ttgattatatcgatgacagactcaa

SEQ ID NO: 68167 - DNA, 25 bp, Artificial
  Probe
agcattgtggcctctccattgatta

SEQ ID NO: 68168 - DNA, 25 bp, Artificial
  Probe
gccttgacgtactctaaaatgagct

SEQ ID NO: 68169 - DNA, 25 bp, Artificial
  Probe
gacgttgaacttgttcacaaactgg

SEQ ID NO: 68170 - DNA, 25 bp, Artificial
  Probe
ggacgttgaacttgttcacaaactg

SEQ ID NO: 68171 - DNA, 25 bp, Artificial
  Probe
aggacgttgaacttgttcacaaact

SEQ ID NO: 68172 - DNA, 25 bp, Artificial
  Probe
caggacgttgaacttgttcacaaac

SEQ ID NO: 68173 - DNA, 25 bp, Artificial
  Probe
acaggacgttgaacttgttcacaaa

SEQ ID NO: 68174 - DNA, 25 bp, Artificial
  Probe
gattatatcgatgacagactcaaaa

SEQ ID NO: 68175 - DNA, 25 bp, Artificial
  Probe
ggccttgacgtactctaaaatgagc

SEQ ID NO: 68176 - DNA, 25 bp, Artificial
  Probe
gagacccactttattcagttctgta

SEQ ID NO: 68177 - DNA, 25 bp, Artificial
  Probe
tcagagacccactttattcagttct

SEQ ID NO: 68178 - DNA, 25 bp, Artificial
  Probe
gagagtgaggatgaagatgaggagg

SEQ ID NO: 68179 - DNA, 25 bp, Artificial
  Probe
ggagagtgaggatgaagatgaggag

SEQ ID NO: 68180 - DNA, 25 bp, Artificial
  Probe
agacccactttattcagttctgtac

SEQ ID NO: 68181 - DNA, 25 bp, Artificial
  Probe
agagacccactttattcagttctgt

SEQ ID NO: 68182 - DNA, 25 bp, Artificial
  Probe
caatcaagaccctgaacaagaagag

SEQ ID NO: 68183 - DNA, 25 bp, Artificial
  Probe
ctcaatcaagaccctgaacaagaag

SEQ ID NO: 68184 - DNA, 25 bp, Artificial
  Probe
tcaatcaagaccctgaacaagaaga

SEQ ID NO: 68185 - DNA, 25 bp, Artificial
  Probe
tggagagtgaggatgaagatgagga

SEQ ID NO: 68186 - DNA, 25 bp, Artificial
  Probe
aatcaagaccctgaacaagaagagg

SEQ ID NO: 68187 - DNA, 25 bp, Artificial
  Probe
acccactttattcagttctgtacat

SEQ ID NO: 68188 - DNA, 25 bp, Artificial
  Probe
gacccactttattcagttctgtaca

SEQ ID NO: 68189 - DNA, 25 bp, Artificial
  Probe
atcaagaccctgaacaagaagaggt

SEQ ID NO: 68190 - DNA, 25 bp, Artificial
  Probe
cagagacccactttattcagttctg

SEQ ID NO: 68191 - DNA, 25 bp, Artificial
  Probe
cccactttattcagttctgtacata

SEQ ID NO: 68192 - DNA, 25 bp, Artificial
  Probe
agtgaggatgaagatgaggagggag

SEQ ID NO: 68193 - DNA, 25 bp, Artificial
  Probe
gagtgaggatgaagatgaggaggga

SEQ ID NO: 68194 - DNA, 25 bp, Artificial
  Probe
agagtgaggatgaagatgaggaggg

SEQ ID NO: 68195 - DNA, 25 bp, Artificial
  Probe
cctgaacaagaagaggtggaactgg

SEQ ID NO: 68196 - DNA, 25 bp, Artificial
  Probe
ctttattcagttctgtacatatggg

SEQ ID NO: 68197 - DNA, 25 bp, Artificial
  Probe
tcaagaccctgaacaagaagaggtg

SEQ ID NO: 68198 - DNA, 25 bp, Artificial
  Probe
tattcagttctgtacatatggggac

SEQ ID NO: 68199 - DNA, 25 bp, Artificial
  Probe
ttattcagttctgtacatatgggga

SEQ ID NO: 68200 - DNA, 25 bp, Artificial
  Probe
tggaagtgaccactcagagagctag

SEQ ID NO: 68201 - DNA, 25 bp, Artificial
  Probe
ctggaagtgaccactcagagagcta

SEQ ID NO: 68202 - DNA, 25 bp, Artificial
  Probe
actttattcagttctgtacatatgg

SEQ ID NO: 68203 - DNA, 25 bp, Artificial
  Probe
ccactttattcagttctgtacatat

SEQ ID NO: 68204 - DNA, 25 bp, Artificial
  Probe
ccctgaacaagaagaggtggaactg

SEQ ID NO: 68205 - DNA, 25 bp, Artificial
  Probe
tttattcagttctgtacatatgggg

SEQ ID NO: 68206 - DNA, 25 bp, Artificial
  Probe
cagttctgtacatatggggacattg

SEQ ID NO: 68207 - DNA, 25 bp, Artificial
  Probe
tcagttctgtacatatggggacatt

SEQ ID NO: 68208 - DNA, 25 bp, Artificial
  Probe
ttcagttctgtacatatggggacat

SEQ ID NO: 68209 - DNA, 25 bp, Artificial
  Probe
attcagttctgtacatatggggaca

SEQ ID NO: 68210 - DNA, 25 bp, Artificial
  Probe
gaccctgaacaagaagaggtggaac

SEQ ID NO: 68211 - DNA, 25 bp, Artificial
  Probe
caagaccctgaacaagaagaggtgg

SEQ ID NO: 68212 - DNA, 25 bp, Artificial
  Probe
agaccctgaacaagaagaggtggaa

SEQ ID NO: 68213 - DNA, 25 bp, Artificial
  Probe
aagaccctgaacaagaagaggtgga

SEQ ID NO: 68214 - DNA, 25 bp, Artificial
  Probe
agttctgtacatatggggacattgg

SEQ ID NO: 68215 - DNA, 25 bp, Artificial
  Probe
cactttattcagttctgtacatatg

SEQ ID NO: 68216 - DNA, 25 bp, Artificial
  Probe
gttctgtacatatggggacattggc

SEQ ID NO: 68217 - DNA, 25 bp, Artificial
  Probe
ttctgtacatatggggacattggcc

SEQ ID NO: 68218 - DNA, 25 bp, Artificial
  Probe
gacttccacatcaatctcttccagg

SEQ ID NO: 68219 - DNA, 25 bp, Artificial
  Probe
acttccacatcaatctcttccaggt

SEQ ID NO: 68220 - DNA, 25 bp, Artificial
  Probe
aaagaaagccagttgtgagagagat

SEQ ID NO: 68221 - DNA, 25 bp, Artificial
  Probe
ggacttccacatcaatctcttccag

SEQ ID NO: 68222 - DNA, 25 bp, Artificial
  Probe
agacgaggacttgggtttcttataa

SEQ ID NO: 68223 - DNA, 25 bp, Artificial
  Probe
cttccacatcaatctcttccaggtg

SEQ ID NO: 68224 - DNA, 25 bp, Artificial
  Probe
aagaaagccagttgtgagagagatg

SEQ ID NO: 68225 - DNA, 25 bp, Artificial
  Probe
ctatgagaaggtcaaagttgcctct

SEQ ID NO: 68226 - DNA, 25 bp, Artificial
  Probe
tatgagaaggtcaaagttgcctctg

SEQ ID NO: 68227 - DNA, 25 bp, Artificial
  Probe
aagacgaggacttgggtttcttata

SEQ ID NO: 68228 - DNA, 25 bp, Artificial
  Probe
tacatcaagaatggggaaaagaaag

SEQ ID NO: 68229 - DNA, 25 bp, Artificial
  Probe
aaagacgaggacttgggtttcttat

SEQ ID NO: 68230 - DNA, 25 bp, Artificial
  Probe
gtttgtatccgaggaagggaagaag

SEQ ID NO: 68231 - DNA, 25 bp, Artificial
  Probe
caaggaagagttgctccctatgaag

SEQ ID NO: 68232 - DNA, 25 bp, Artificial
  Probe
gtacatcaagaatggggaaaagaaa

SEQ ID NO: 68233 - DNA, 25 bp, Artificial
  Probe
gaaaagaaagccagttgtgagagag

SEQ ID NO: 68234 - DNA, 25 bp, Artificial
  Probe
acatcaagaatggggaaaagaaagc

SEQ ID NO: 68235 - DNA, 25 bp, Artificial
  Probe
aaagctctgtttgtatccgaggaag

SEQ ID NO: 68236 - DNA, 25 bp, Artificial
  Probe
cttcattcaagttggtgtgatcagc

SEQ ID NO: 68237 - DNA, 25 bp, Artificial
  Probe
gcttcattcaagttggtgtgatcag

SEQ ID NO: 68238 - DNA, 25 bp, Artificial
  Probe
ggaaggaggtgtacatcaagaatgg

SEQ ID NO: 68239 - DNA, 25 bp, Artificial
  Probe
aaaagaaagccagttgtgagagaga

SEQ ID NO: 68240 - DNA, 25 bp, Artificial
  Probe
ctaaaggagaagctcaaagacgagg

SEQ ID NO: 68241 - DNA, 25 bp, Artificial
  Probe
cagttgtgagagagatgctacaaag

SEQ ID NO: 68242 - DNA, 25 bp, Artificial
  Probe
caaagacgaggacttgggtttctta

SEQ ID NO: 68243 - DNA, 25 bp, Artificial
  Probe
tgtttgtatccgaggaagggaagaa

SEQ ID NO: 68244 - DNA, 25 bp, Artificial
  Probe
acaaggaagagttgctccctatgaa

SEQ ID NO: 68245 - DNA, 25 bp, Artificial
  Probe
ccgcttcattcaagttggtgtgatc

SEQ ID NO: 68246 - DNA, 25 bp, Artificial
  Probe
taaaggagaagctcaaagacgagga

SEQ ID NO: 68247 - DNA, 25 bp, Artificial
  Probe
ttcattcaagttggtgtgatcagct

SEQ ID NO: 68248 - DNA, 25 bp, Artificial
  Probe
cggaaggaggtgtacatcaagaatg

SEQ ID NO: 68249 - DNA, 25 bp, Artificial
  Probe
gctatgagaaggtcaaagttgcctc

SEQ ID NO: 68250 - DNA, 25 bp, Artificial
  Probe
catcaagaatggggaaaagaaagcc

SEQ ID NO: 68251 - DNA, 25 bp, Artificial
  Probe
ttccacatcaatctcttccaggtgc

SEQ ID NO: 68252 - DNA, 25 bp, Artificial
  Probe
atgagaaggtcaaagttgcctctga

SEQ ID NO: 68253 - DNA, 25 bp, Artificial
  Probe
ctgtttgtatccgaggaagggaaga

SEQ ID NO: 68254 - DNA, 25 bp, Artificial
  Probe
tctgtttgtatccgaggaagggaag

SEQ ID NO: 68255 - DNA, 25 bp, Artificial
  Probe
ctctgtttgtatccgaggaagggaa

SEQ ID NO: 68256 - DNA, 25 bp, Artificial
  Probe
aaggaagagttgctccctatgaagg

SEQ ID NO: 68257 - DNA, 25 bp, Artificial
  Probe
agttgtgagagagatgctacaaagg

SEQ ID NO: 68258 - DNA, 25 bp, Artificial
  Probe
ggaaaagaaagccagttgtgagaga

SEQ ID NO: 68259 - DNA, 25 bp, Artificial
  Probe
aagccagttgtgagagagatgctac

SEQ ID NO: 68260 - DNA, 25 bp, Artificial
  Probe
gaggacttgggtttcttataaggag

SEQ ID NO: 68261 - DNA, 25 bp, Artificial
  Probe
gggacttccacatcaatctcttcca

SEQ ID NO: 68262 - DNA, 25 bp, Artificial
  Probe
acttgggtttcttataaggagcttc

SEQ ID NO: 68263 - DNA, 25 bp, Artificial
  Probe
taccaaaggtgataagggagacatt

SEQ ID NO: 68264 - DNA, 25 bp, Artificial
  Probe
gtaccaaaggtgataagggagacat

SEQ ID NO: 68265 - DNA, 25 bp, Artificial
  Probe
gggtttcccaggaatgagaggattg

SEQ ID NO: 68266 - DNA, 25 bp, Artificial
  Probe
agggtttcccaggaatgagaggatt

SEQ ID NO: 68267 - DNA, 25 bp, Artificial
  Probe
ggtaccaaaggtgataagggagaca

SEQ ID NO: 68268 - DNA, 25 bp, Artificial
  Probe
caggaatgagaggattgcctggtac

SEQ ID NO: 68269 - DNA, 25 bp, Artificial
  Probe
tatatgtgtgactgtggagtatgtg

SEQ ID NO: 68270 - DNA, 25 bp, Artificial
  Probe
cctgtgtctgagtgaatatatgtgt

SEQ ID NO: 68271 - DNA, 25 bp, Artificial
  Probe
tgtgtctgagtgaatatatgtgtga

SEQ ID NO: 68272 - DNA, 25 bp, Artificial
  Probe
ctgtgtctgagtgaatatatgtgtg

SEQ ID NO: 68273 - DNA, 25 bp, Artificial
  Probe
atatgtgtgactgtggagtatgtgt

SEQ ID NO: 68274 - DNA, 25 bp, Artificial
  Probe
gcctgtgtctgagtgaatatatgtg

SEQ ID NO: 68275 - DNA, 25 bp, Artificial
  Probe
gtgcctgtgtctgagtgaatatatg

SEQ ID NO: 68276 - DNA, 25 bp, Artificial
  Probe
agtgaatatatgtgtgactgtggag

SEQ ID NO: 68277 - DNA, 25 bp, Artificial
  Probe
gagtgaatatatgtgtgactgtgga

SEQ ID NO: 68278 - DNA, 25 bp, Artificial
  Probe
gtgaatatatgtgtgactgtggagt

SEQ ID NO: 68279 - DNA, 25 bp, Artificial
  Probe
tgagtgaatatatgtgtgactgtgg

SEQ ID NO: 68280 - DNA, 25 bp, Artificial
  Probe
tgcctgtgtctgagtgaatatatgt

SEQ ID NO: 68281 - DNA, 25 bp, Artificial
  Probe
tgtgcctgtgtctgagtgaatatat

SEQ ID NO: 68282 - DNA, 25 bp, Artificial
  Probe
ctgagtgaatatatgtgtgactgtg

SEQ ID NO: 68283 - DNA, 25 bp, Artificial
  Probe
tctgagtgaatatatgtgtgactgt

SEQ ID NO: 68284 - DNA, 25 bp, Artificial
  Probe
gtgtgcctgtgtctgagtgaatata

SEQ ID NO: 68285 - DNA, 25 bp, Artificial
  Probe
atatatgtgtgactgtggagtatgt

SEQ ID NO: 68286 - DNA, 25 bp, Artificial
  Probe
tgaatatatgtgtgactgtggagta

SEQ ID NO: 68287 - DNA, 25 bp, Artificial
  Probe
tgtctgagtgaatatatgtgtgact

SEQ ID NO: 68288 - DNA, 25 bp, Artificial
  Probe
gtgtctgagtgaatatatgtgtgac

SEQ ID NO: 68289 - DNA, 25 bp, Artificial
  Probe
gtctgagtgaatatatgtgtgactg

SEQ ID NO: 68290 - DNA, 25 bp, Artificial
  Probe
tatgtgtgactgtggagtatgtgtg

SEQ ID NO: 68291 - DNA, 25 bp, Artificial
  Probe
aatatatgtgtgactgtggagtatg

SEQ ID NO: 68292 - DNA, 25 bp, Artificial
  Probe
gaatatatgtgtgactgtggagtat

SEQ ID NO: 68293 - DNA, 25 bp, Artificial
  Probe
tgactgtggagtatgtgtggaaata

SEQ ID NO: 68294 - DNA, 25 bp, Artificial
  Probe
gaatagtggacatggtcacatcctc

SEQ ID NO: 68295 - DNA, 25 bp, Artificial
  Probe
tgtgtgcctgtgtctgagtgaatat

SEQ ID NO: 68296 - DNA, 25 bp, Artificial
  Probe
caggaatagtggacatggtcacatc

SEQ ID NO: 68297 - DNA, 25 bp, Artificial
  Probe
aatagtggacatggtcacatcctct

SEQ ID NO: 68298 - DNA, 25 bp, Artificial
  Probe
gtgactgtggagtatgtgtggaaat

SEQ ID NO: 68299 - DNA, 25 bp, Artificial
  Probe
atagtggacatggtcacatcctctg

SEQ ID NO: 68300 - DNA, 25 bp, Artificial
  Probe
tggtttctacttctcctgggatgtc

SEQ ID NO: 68301 - DNA, 25 bp, Artificial
  Probe
ttgattcctcctcacaaaagataga

SEQ ID NO: 68302 - DNA, 25 bp, Artificial
  Probe
gttgattcctcctcacaaaagatag

SEQ ID NO: 68303 - DNA, 25 bp, Artificial
  Probe
gtgtgactgtggagtatgtgtggaa

SEQ ID NO: 68304 - DNA, 25 bp, Artificial
  Probe
atgtgtgactgtggagtatgtgtgg

SEQ ID NO: 68305 - DNA, 25 bp, Artificial
  Probe
tgattcctcctcacaaaagatagag

SEQ ID NO: 68306 - DNA, 25 bp, Artificial
  Probe
gtgtgtgcctgtgtctgagtgaata

SEQ ID NO: 68307 - DNA, 25 bp, Artificial
  Probe
tgttgattcctcctcacaaaagata

SEQ ID NO: 68308 - DNA, 25 bp, Artificial
  Probe
gattcctcctcacaaaagatagagc

SEQ ID NO: 68309 - DNA, 25 bp, Artificial
  Probe
ggaatagtggacatggtcacatcct

SEQ ID NO: 68310 - DNA, 25 bp, Artificial
  Probe
aggaatagtggacatggtcacatcc

SEQ ID NO: 68311 - DNA, 25 bp, Artificial
  Probe
gtggtttctacttctcctgggatgt

SEQ ID NO: 68312 - DNA, 25 bp, Artificial
  Probe
tgtgactgtggagtatgtgtggaaa

SEQ ID NO: 68313 - DNA, 25 bp, Artificial
  Probe
ccaggaatagtggacatggtcacat

SEQ ID NO: 68314 - DNA, 25 bp, Artificial
  Probe
ctattaagagcttggacagtcagtg

SEQ ID NO: 68315 - DNA, 25 bp, Artificial
  Probe
gtgtgtttgctcataatctactgtg

SEQ ID NO: 68316 - DNA, 25 bp, Artificial
  Probe
acctgtaatgagttataagccatac

SEQ ID NO: 68317 - DNA, 25 bp, Artificial
  Probe
accagtgtgtttgctcataatctac

SEQ ID NO: 68318 - DNA, 25 bp, Artificial
  Probe
agtgtgtttgctcataatctactgt

SEQ ID NO: 68319 - DNA, 25 bp, Artificial
  Probe
tgtgtttgctcataatctactgtgc

SEQ ID NO: 68320 - DNA, 25 bp, Artificial
  Probe
ccagtgtgtttgctcataatctact

SEQ ID NO: 68321 - DNA, 25 bp, Artificial
  Probe
aacctgtaatgagttataagccata

SEQ ID NO: 68322 - DNA, 25 bp, Artificial
  Probe
gaacattggcaaggaagggtaaatt

SEQ ID NO: 68323 - DNA, 25 bp, Artificial
  Probe
caaacctgtaatgagttataagcca

SEQ ID NO: 68324 - DNA, 25 bp, Artificial
  Probe
gtgtttgctcataatctactgtgcg

SEQ ID NO: 68325 - DNA, 25 bp, Artificial
  Probe
caccagtgtgtttgctcataatcta

SEQ ID NO: 68326 - DNA, 25 bp, Artificial
  Probe
cctgtaatgagttataagccataca

SEQ ID NO: 68327 - DNA, 25 bp, Artificial
  Probe
aacattggcaaggaagggtaaattg

SEQ ID NO: 68328 - DNA, 25 bp, Artificial
  Probe
tcaaacctgtaatgagttataagcc

SEQ ID NO: 68329 - DNA, 25 bp, Artificial
  Probe
aaacctgtaatgagttataagccat

SEQ ID NO: 68330 - DNA, 25 bp, Artificial
  Probe
ctcataatctactgtgcgggtaacc

SEQ ID NO: 68331 - DNA, 25 bp, Artificial
  Probe
ctatggaagactagtgaacagagcc

SEQ ID NO: 68332 - DNA, 25 bp, Artificial
  Probe
ctagcatgtggaggatctgaggaag

SEQ ID NO: 68333 - DNA, 25 bp, Artificial
  Probe
gctcataatctactgtgcgggtaac

SEQ ID NO: 68334 - DNA, 25 bp, Artificial
  Probe
catcaaaagtttacacaaaagcctg

SEQ ID NO: 68335 - DNA, 25 bp, Artificial
  Probe
agcatagcatcaaaagtttacacaa

SEQ ID NO: 68336 - DNA, 25 bp, Artificial
  Probe
gtcgtagcatagcatcaaaagttta

SEQ ID NO: 68337 - DNA, 25 bp, Artificial
  Probe
cgtagcatagcatcaaaagtttaca

SEQ ID NO: 68338 - DNA, 25 bp, Artificial
  Probe
tcgtagcatagcatcaaaagtttac

SEQ ID NO: 68339 - DNA, 25 bp, Artificial
  Probe
gctattaagagcttggacagtcagt

SEQ ID NO: 68340 - DNA, 25 bp, Artificial
  Probe
tgtttgctcataatctactgtgcgg

SEQ ID NO: 68341 - DNA, 25 bp, Artificial
  Probe
tagcatcaaaagtttacacaaaagc

SEQ ID NO: 68342 - DNA, 25 bp, Artificial
  Probe
gcatagcatcaaaagtttacacaaa

SEQ ID NO: 68343 - DNA, 25 bp, Artificial
  Probe
tgctaggtgacaagtttccactatg

SEQ ID NO: 68344 - DNA, 25 bp, Artificial
  Probe
gtgctaggtgacaagtttccactat

SEQ ID NO: 68345 - DNA, 25 bp, Artificial
  Probe
tagcatagcatcaaaagtttacaca

SEQ ID NO: 68346 - DNA, 25 bp, Artificial
  Probe
ggaacattggcaaggaagggtaaat

SEQ ID NO: 68347 - DNA, 25 bp, Artificial
  Probe
tcataatctactgtgcgggtaacca

SEQ ID NO: 68348 - DNA, 25 bp, Artificial
  Probe
gcatcaaaagtttacacaaaagcct

SEQ ID NO: 68349 - DNA, 25 bp, Artificial
  Probe
agcatcaaaagtttacacaaaagcc

SEQ ID NO: 68350 - DNA, 25 bp, Artificial
  Probe
catgtggaggatctgaggaaggaag

SEQ ID NO: 68351 - DNA, 25 bp, Artificial
  Probe
gtagcatagcatcaaaagtttacac

SEQ ID NO: 68352 - DNA, 25 bp, Artificial
  Probe
ggtaaccacctcaaacctgtaatga

SEQ ID NO: 68353 - DNA, 25 bp, Artificial
  Probe
actatggaagactagtgaacagagc

SEQ ID NO: 68354 - DNA, 25 bp, Artificial
  Probe
tgctcataatctactgtgcgggtaa

SEQ ID NO: 68355 - DNA, 25 bp, Artificial
  Probe
ttgctcataatctactgtgcgggta

SEQ ID NO: 68356 - DNA, 25 bp, Artificial
  Probe
caaggaagggtaaattggtctgtgg

SEQ ID NO: 68357 - DNA, 25 bp, Artificial
  Probe
attggcaaggaagggtaaattggtc

SEQ ID NO: 68358 - DNA, 25 bp, Artificial
  Probe
ctgtaatgagttataagccatacaa

SEQ ID NO: 68359 - DNA, 25 bp, Artificial
  Probe
gttgacctctgatttacaaacaagt

SEQ ID NO: 68360 - DNA, 25 bp, Artificial
  Probe
caagttgacctctgatttacaaaca

SEQ ID NO: 68361 - DNA, 25 bp, Artificial
  Probe
agttgacctctgatttacaaacaag

SEQ ID NO: 68362 - DNA, 25 bp, Artificial
  Probe
gcaagttgacctctgatttacaaac

SEQ ID NO: 68363 - DNA, 25 bp, Artificial
  Probe
acctctgatttacaaacaagtcaca

SEQ ID NO: 68364 - DNA, 25 bp, Artificial
  Probe
aagttgacctctgatttacaaacaa

SEQ ID NO: 68365 - DNA, 25 bp, Artificial
  Probe
ctctgatttacaaacaagtcacagg

SEQ ID NO: 68366 - DNA, 25 bp, Artificial
  Probe
cctctgatttacaaacaagtcacag

SEQ ID NO: 68367 - DNA, 25 bp, Artificial
  Probe
gacctctgatttacaaacaagtcac

SEQ ID NO: 68368 - DNA, 25 bp, Artificial
  Probe
ttgacctctgatttacaaacaagtc

SEQ ID NO: 68369 - DNA, 25 bp, Artificial
  Probe
tctgatttacaaacaagtcacaggc

SEQ ID NO: 68370 - DNA, 25 bp, Artificial
  Probe
tgcaagttgacctctgatttacaaa

SEQ ID NO: 68371 - DNA, 25 bp, Artificial
  Probe
ctgcaagttgacctctgatttacaa

SEQ ID NO: 68372 - DNA, 25 bp, Artificial
  Probe
caaacaagtcacaggccataaatta

SEQ ID NO: 68373 - DNA, 25 bp, Artificial
  Probe
aaacaagtcacaggccataaattaa

SEQ ID NO: 68374 - DNA, 25 bp, Artificial
  Probe
aacaagtcacaggccataaattaat

SEQ ID NO: 68375 - DNA, 25 bp, Artificial
  Probe
tacaaacaagtcacaggccataaat

SEQ ID NO: 68376 - DNA, 25 bp, Artificial
  Probe
atttacaaacaagtcacaggccata

SEQ ID NO: 68377 - DNA, 25 bp, Artificial
  Probe
ttacaaacaagtcacaggccataaa

SEQ ID NO: 68378 - DNA, 25 bp, Artificial
  Probe
tttacaaacaagtcacaggccataa

SEQ ID NO: 68379 - DNA, 25 bp, Artificial
  Probe
aagctgcaagttgacctctgattta

SEQ ID NO: 68380 - DNA, 25 bp, Artificial
  Probe
acaagtcacaggccataaattaata

SEQ ID NO: 68381 - DNA, 25 bp, Artificial
  Probe
acaaacaagtcacaggccataaatt

SEQ ID NO: 68382 - DNA, 25 bp, Artificial
  Probe
gatttacaaacaagtcacaggccat

SEQ ID NO: 68383 - DNA, 25 bp, Artificial
  Probe
agctgcaagttgacctctgatttac

SEQ ID NO: 68384 - DNA, 25 bp, Artificial
  Probe
aaagctgcaagttgacctctgattt

SEQ ID NO: 68385 - DNA, 25 bp, Artificial
  Probe
caagtcacaggccataaattaataa

SEQ ID NO: 68386 - DNA, 25 bp, Artificial
  Probe
gctgcaagttgacctctgatttaca

SEQ ID NO: 68387 - DNA, 25 bp, Artificial
  Probe
gaaagctgcaagttgacctctgatt

SEQ ID NO: 68388 - DNA, 25 bp, Artificial
  Probe
tgacctctgatttacaaacaagtca

SEQ ID NO: 68389 - DNA, 25 bp, Artificial
  Probe
aagtcacaggccataaattaataaa

SEQ ID NO: 68390 - DNA, 25 bp, Artificial
  Probe
ctgatttacaaacaagtcacaggcc

SEQ ID NO: 68391 - DNA, 25 bp, Artificial
  Probe
tgatttacaaacaagtcacaggcca

SEQ ID NO: 68392 - DNA, 25 bp, Artificial
  Probe
agtcacaggccataaattaataaat

SEQ ID NO: 68393 - DNA, 25 bp, Artificial
  Probe
tgaaagctgcaagttgacctctgat

SEQ ID NO: 68394 - DNA, 25 bp, Artificial
  Probe
gtcacaggccataaattaataaata

SEQ ID NO: 68395 - DNA, 25 bp, Artificial
  Probe
ccagcacatagtaagtattcagtac

SEQ ID NO: 68396 - DNA, 25 bp, Artificial
  Probe
gtatgaaatgccaaataaagggaca

SEQ ID NO: 68397 - DNA, 25 bp, Artificial
  Probe
tgtatgaaatgccaaataaagggac

SEQ ID NO: 68398 - DNA, 25 bp, Artificial
  Probe
atgaaatgccaaataaagggacaag

SEQ ID NO: 68399 - DNA, 25 bp, Artificial
  Probe
cccagcacatagtaagtattcagta

SEQ ID NO: 68400 - DNA, 25 bp, Artificial
  Probe
gaaatgccaaataaagggacaagtt

SEQ ID NO: 68401 - DNA, 25 bp, Artificial
  Probe
tatgaaatgccaaataaagggacaa

SEQ ID NO: 68402 - DNA, 25 bp, Artificial
  Probe
aaagcccagcacatagtaagtattc

SEQ ID NO: 68403 - DNA, 25 bp, Artificial
  Probe
ccatgagaatgaacatagaagtgta

SEQ ID NO: 68404 - DNA, 25 bp, Artificial
  Probe
atgtatgaaatgccaaataaaggga

SEQ ID NO: 68405 - DNA, 25 bp, Artificial
  Probe
caaagcccagcacatagtaagtatt

SEQ ID NO: 68406 - DNA, 25 bp, Artificial
  Probe
ttctgtaactatacctggctgctca

SEQ ID NO: 68407 - DNA, 25 bp, Artificial
  Probe
ttatcttggagtttaagtgattgcc

SEQ ID NO: 68408 - DNA, 25 bp, Artificial
  Probe
tgaaatgccaaataaagggacaagt

SEQ ID NO: 68409 - DNA, 25 bp, Artificial
  Probe
tatcttggagtttaagtgattgccc

SEQ ID NO: 68410 - DNA, 25 bp, Artificial
  Probe
aaatgccaaataaagggacaagttg

SEQ ID NO: 68411 - DNA, 25 bp, Artificial
  Probe
tgagaatgaacatagaagtgtactt

SEQ ID NO: 68412 - DNA, 25 bp, Artificial
  Probe
aagcccagcacatagtaagtattca

SEQ ID NO: 68413 - DNA, 25 bp, Artificial
  Probe
tcaaagcccagcacatagtaagtat

SEQ ID NO: 68414 - DNA, 25 bp, Artificial
  Probe
gcatgtagcagtatttatcttaggc

SEQ ID NO: 68415 - DNA, 25 bp, Artificial
  Probe
atgagaatgaacatagaagtgtact

SEQ ID NO: 68416 - DNA, 25 bp, Artificial
  Probe
catgagaatgaacatagaagtgtac

SEQ ID NO: 68417 - DNA, 25 bp, Artificial
  Probe
gcagcatgtagcagtatttatctta

SEQ ID NO: 68418 - DNA, 25 bp, Artificial
  Probe
agcccagcacatagtaagtattcag

SEQ ID NO: 68419 - DNA, 25 bp, Artificial
  Probe
tttctgtaactatacctggctgctc

SEQ ID NO: 68420 - DNA, 25 bp, Artificial
  Probe
ggcagcatgtagcagtatttatctt

SEQ ID NO: 68421 - DNA, 25 bp, Artificial
  Probe
gaagtgtactttctgtctctccatg

SEQ ID NO: 68422 - DNA, 25 bp, Artificial
  Probe
ctcaaagcccagcacatagtaagta

SEQ ID NO: 68423 - DNA, 25 bp, Artificial
  Probe
ctgtaactatacctggctgctcact

SEQ ID NO: 68424 - DNA, 25 bp, Artificial
  Probe
tctgtaactatacctggctgctcac

SEQ ID NO: 68425 - DNA, 25 bp, Artificial
  Probe
atcttggagtttaagtgattgccct

SEQ ID NO: 68426 - DNA, 25 bp, Artificial
  Probe
gcagtatttatcttaggctgtcttt

SEQ ID NO: 68427 - DNA, 25 bp, Artificial
  Probe
tatgtatgaaatgccaaataaaggg

SEQ ID NO: 68428 - DNA, 25 bp, Artificial
  Probe
gcccagcacatagtaagtattcagt

SEQ ID NO: 68429 - DNA, 25 bp, Artificial
  Probe
agcatgtagcagtatttatcttagg

SEQ ID NO: 68430 - DNA, 25 bp, Artificial
  Probe
attatcttggagtttaagtgattgc

SEQ ID NO: 68431 - DNA, 25 bp, Artificial
  Probe
tgtaactatacctggctgctcactg

SEQ ID NO: 68432 - DNA, 25 bp, Artificial
  Probe
tatcctcaaagcccagcacatagta

SEQ ID NO: 68433 - DNA, 25 bp, Artificial
  Probe
gtactttctgtctctccatgctgaa

SEQ ID NO: 68434 - DNA, 25 bp, Artificial
  Probe
tcttggagtttaagtgattgccctg

SEQ ID NO: 68435 - DNA, 25 bp, Artificial
  Probe
cagcatgtagcagtatttatcttag

SEQ ID NO: 68436 - DNA, 25 bp, Artificial
  Probe
ggagtttaagtgattgccctggaaa

SEQ ID NO: 68437 - DNA, 25 bp, Artificial
  Probe
agcagtatttatcttaggctgtctt

SEQ ID NO: 68438 - DNA, 25 bp, Artificial
  Probe
aagtgtactttctgtctctccatgc

SEQ ID NO: 68439 - DNA, 25 bp, Artificial
  Probe
tgtagcagtatttatcttaggctgt

SEQ ID NO: 68440 - DNA, 25 bp, Artificial
  Probe
agtattatgaagacctgtccacatg

SEQ ID NO: 68441 - DNA, 25 bp, Artificial
  Probe
cagtattatgaagacctgtccacat

SEQ ID NO: 68442 - DNA, 25 bp, Artificial
  Probe
gtattatgaagacctgtccacatgg

SEQ ID NO: 68443 - DNA, 25 bp, Artificial
  Probe
gaccagtattatgaagacctgtcca

SEQ ID NO: 68444 - DNA, 25 bp, Artificial
  Probe
ccagtattatgaagacctgtccaca

SEQ ID NO: 68445 - DNA, 25 bp, Artificial
  Probe
accagtattatgaagacctgtccac

SEQ ID NO: 68446 - DNA, 25 bp, Artificial
  Probe
ttgcggtcactctttatctaagttt

SEQ ID NO: 68447 - DNA, 25 bp, Artificial
  Probe
gacggatatgagaaatcttcggaac

SEQ ID NO: 68448 - DNA, 25 bp, Artificial
  Probe
tattatgaagacctgtccacatgga

SEQ ID NO: 68449 - DNA, 25 bp, Artificial
  Probe
cttgcggtcactctttatctaagtt

SEQ ID NO: 68450 - DNA, 25 bp, Artificial
  Probe
tatgtcacactgggaaccctttata

SEQ ID NO: 68451 - DNA, 25 bp, Artificial
  Probe
gcggtcactctttatctaagtttgt

SEQ ID NO: 68452 - DNA, 25 bp, Artificial
  Probe
tgcggtcactctttatctaagtttg

SEQ ID NO: 68453 - DNA, 25 bp, Artificial
  Probe
tgacggatatgagaaatcttcggaa

SEQ ID NO: 68454 - DNA, 25 bp, Artificial
  Probe
gtgctgacggatatgagaaatcttc

SEQ ID NO: 68455 - DNA, 25 bp, Artificial
  Probe
agtgctgacggatatgagaaatctt

SEQ ID NO: 68456 - DNA, 25 bp, Artificial
  Probe
cggtcactctttatctaagtttgta

SEQ ID NO: 68457 - DNA, 25 bp, Artificial
  Probe
ctgacggatatgagaaatcttcgga

SEQ ID NO: 68458 - DNA, 25 bp, Artificial
  Probe
ttatgtcacactgggaaccctttat

SEQ ID NO: 68459 - DNA, 25 bp, Artificial
  Probe
tatagggctcttctgtctacctttc

SEQ ID NO: 68460 - DNA, 25 bp, Artificial
  Probe
ggtcttgagttgacagctacagtaa

SEQ ID NO: 68461 - DNA, 25 bp, Artificial
  Probe
atgtcacactgggaaccctttatag

SEQ ID NO: 68462 - DNA, 25 bp, Artificial
  Probe
cagtgctgacggatatgagaaatct

SEQ ID NO: 68463 - DNA, 25 bp, Artificial
  Probe
cttatgtcacactgggaacccttta

SEQ ID NO: 68464 - DNA, 25 bp, Artificial
  Probe
tcttgagttgacagctacagtaaac

SEQ ID NO: 68465 - DNA, 25 bp, Artificial
  Probe
ccttgcggtcactctttatctaagt

SEQ ID NO: 68466 - DNA, 25 bp, Artificial
  Probe
acggatatgagaaatcttcggaacg

SEQ ID NO: 68467 - DNA, 25 bp, Artificial
  Probe
tgctgacggatatgagaaatcttcg

SEQ ID NO: 68468 - DNA, 25 bp, Artificial
  Probe
gggaccagtattatgaagacctgtc

SEQ ID NO: 68469 - DNA, 25 bp, Artificial
  Probe
catctatagggctcttctgtctacc

SEQ ID NO: 68470 - DNA, 25 bp, Artificial
  Probe
gtcttgagttgacagctacagtaaa

SEQ ID NO: 68471 - DNA, 25 bp, Artificial
  Probe
aaccttgcggtcactctttatctaa

SEQ ID NO: 68472 - DNA, 25 bp, Artificial
  Probe
tgtcacactgggaaccctttataga

SEQ ID NO: 68473 - DNA, 25 bp, Artificial
  Probe
gcatctatagggctcttctgtctac

SEQ ID NO: 68474 - DNA, 25 bp, Artificial
  Probe
cttgagttgacagctacagtaaacg

SEQ ID NO: 68475 - DNA, 25 bp, Artificial
  Probe
atagggctcttctgtctacctttca

SEQ ID NO: 68476 - DNA, 25 bp, Artificial
  Probe
ggtcactctttatctaagtttgtag

SEQ ID NO: 68477 - DNA, 25 bp, Artificial
  Probe
tcagtgctgacggatatgagaaatc

SEQ ID NO: 68478 - DNA, 25 bp, Artificial
  Probe
gatatgagaaatcttcggaacgagg

SEQ ID NO: 68479 - DNA, 25 bp, Artificial
  Probe
ggatatgagaaatcttcggaacgag

SEQ ID NO: 68480 - DNA, 25 bp, Artificial
  Probe
ctaggacagatgtttgggaatcagc

SEQ ID NO: 68481 - DNA, 25 bp, Artificial
  Probe
ccttacccttagcacatcagcattc

SEQ ID NO: 68482 - DNA, 25 bp, Artificial
  Probe
ttgagttgacagctacagtaaacga

SEQ ID NO: 68483 - DNA, 25 bp, Artificial
  Probe
ctatagggctcttctgtctaccttt

SEQ ID NO: 68484 - DNA, 25 bp, Artificial
  Probe
gctgacggatatgagaaatcttcgg

SEQ ID NO: 68485 - DNA, 25 bp, Artificial
  Probe
gtcggaaacacaaagagaatgtaaa

SEQ ID NO: 68486 - DNA, 25 bp, Artificial
  Probe
ggtcggaaacacaaagagaatgtaa

SEQ ID NO: 68487 - DNA, 25 bp, Artificial
  Probe
attaccagaaatggatggaagaaca

SEQ ID NO: 68488 - DNA, 25 bp, Artificial
  Probe
ttaccagaaatggatggaagaacag

SEQ ID NO: 68489 - DNA, 25 bp, Artificial
  Probe
actattaccagaaatggatggaaga

SEQ ID NO: 68490 - DNA, 25 bp, Artificial
  Probe
agactattaccagaaatggatggaa

SEQ ID NO: 68491 - DNA, 25 bp, Artificial
  Probe
aagactattaccagaaatggatgga

SEQ ID NO: 68492 - DNA, 25 bp, Artificial
  Probe
gactattaccagaaatggatggaag

SEQ ID NO: 68493 - DNA, 25 bp, Artificial
  Probe
tattaccagaaatggatggaagaac

SEQ ID NO: 68494 - DNA, 25 bp, Artificial
  Probe
aaagactattaccagaaatggatgg

SEQ ID NO: 68495 - DNA, 25 bp, Artificial
  Probe
tggtcggaaacacaaagagaatgta

SEQ ID NO: 68496 - DNA, 25 bp, Artificial
  Probe
ctattaccagaaatggatggaagaa

SEQ ID NO: 68497 - DNA, 25 bp, Artificial
  Probe
taccagaaatggatggaagaacagg

SEQ ID NO: 68498 - DNA, 25 bp, Artificial
  Probe
cccaagttttattgtgactactgtg

SEQ ID NO: 68499 - DNA, 25 bp, Artificial
  Probe
atgcccaagttttattgtgactact

SEQ ID NO: 68500 - DNA, 25 bp, Artificial
  Probe
ccaagttttattgtgactactgtga

SEQ ID NO: 68501 - DNA, 25 bp, Artificial
  Probe
gttttattgtgactactgtgatacg

SEQ ID NO: 68502 - DNA, 25 bp, Artificial
  Probe
tcggaaacacaaagagaatgtaaaa

SEQ ID NO: 68503 - DNA, 25 bp, Artificial
  Probe
cggaaacacaaagagaatgtaaaag

SEQ ID NO: 68504 - DNA, 25 bp, Artificial
  Probe
gcccaagttttattgtgactactgt

SEQ ID NO: 68505 - DNA, 25 bp, Artificial
  Probe
tgcccaagttttattgtgactactg

SEQ ID NO: 68506 - DNA, 25 bp, Artificial
  Probe
catgcccaagttttattgtgactac

SEQ ID NO: 68507 - DNA, 25 bp, Artificial
  Probe
agtggtcggaaacacaaagagaatg

SEQ ID NO: 68508 - DNA, 25 bp, Artificial
  Probe
gtggtcggaaacacaaagagaatgt

SEQ ID NO: 68509 - DNA, 25 bp, Artificial
  Probe
acatgcccaagttttattgtgacta

SEQ ID NO: 68510 - DNA, 25 bp, Artificial
  Probe
ttaaaagaaggtccaaccaagagac

SEQ ID NO: 68511 - DNA, 25 bp, Artificial
  Probe
ggaaacacaaagagaatgtaaaaga

SEQ ID NO: 68512 - DNA, 25 bp, Artificial
  Probe
caagttttattgtgactactgtgat

SEQ ID NO: 68513 - DNA, 25 bp, Artificial
  Probe
aacatgcccaagttttattgtgact

SEQ ID NO: 68514 - DNA, 25 bp, Artificial
  Probe
caacatgcccaagttttattgtgac

SEQ ID NO: 68515 - DNA, 25 bp, Artificial
  Probe
tttattgtgactactgtgatacgta

SEQ ID NO: 68516 - DNA, 25 bp, Artificial
  Probe
ttttattgtgactactgtgatacgt

SEQ ID NO: 68517 - DNA, 25 bp, Artificial
  Probe
aaacacaaagagaatgtaaaagact

SEQ ID NO: 68518 - DNA, 25 bp, Artificial
  Probe
tttaaaagaaggtccaaccaagaga

SEQ ID NO: 68519 - DNA, 25 bp, Artificial
  Probe
gaaacacaaagagaatgtaaaagac

SEQ ID NO: 68520 - DNA, 25 bp, Artificial
  Probe
atttaaaagaaggtccaaccaagag

SEQ ID NO: 68521 - DNA, 25 bp, Artificial
  Probe
agttttattgtgactactgtgatac

SEQ ID NO: 68522 - DNA, 25 bp, Artificial
  Probe
tatcttacccacgattctccgtctg

SEQ ID NO: 68523 - DNA, 25 bp, Artificial
  Probe
gtatcttacccacgattctccgtct

SEQ ID NO: 68524 - DNA, 25 bp, Artificial
  Probe
tatttaaaagaaggtccaaccaaga

SEQ ID NO: 68525 - DNA, 25 bp, Artificial
  Probe
aacacaaagagaatgtaaaagacta

SEQ ID NO: 68526 - DNA, 25 bp, Artificial
  Probe
aaaagactattaccagaaatggatg

SEQ ID NO: 68527 - DNA, 25 bp, Artificial
  Probe
acacaaagagaatgtaaaagactat

SEQ ID NO: 68528 - DNA, 25 bp, Artificial
  Probe
ttatttaaaagaaggtccaaccaag

SEQ ID NO: 68529 - DNA, 25 bp, Artificial
  Probe
aagttttattgtgactactgtgata

SEQ ID NO: 68530 - DNA, 25 bp, Artificial
  Probe
cctatagtgagtcgattaccattca

SEQ ID NO: 68531 - DNA, 25 bp, Artificial
  Probe
gtaattggaccctatatacctgtgc

SEQ ID NO: 68532 - DNA, 25 bp, Artificial
  Probe
ttaccacattatctcctttgggaaa

SEQ ID NO: 68533 - DNA, 25 bp, Artificial
  Probe
taccacattatctcctttgggaaat

SEQ ID NO: 68534 - DNA, 25 bp, Artificial
  Probe
gttaccacattatctcctttgggaa

SEQ ID NO: 68535 - DNA, 25 bp, Artificial
  Probe
ccctatagtgagtcgattaccattc

SEQ ID NO: 68536 - DNA, 25 bp, Artificial
  Probe
accacattatctcctttgggaaatc

SEQ ID NO: 68537 - DNA, 25 bp, Artificial
  Probe
taattggaccctatatacctgtgca

SEQ ID NO: 68538 - DNA, 25 bp, Artificial
  Probe
ccacattatctcctttgggaaatcc

SEQ ID NO: 68539 - DNA, 25 bp, Artificial
  Probe
aattggaccctatatacctgtgcat

SEQ ID NO: 68540 - DNA, 25 bp, Artificial
  Probe
gccctatagtgagtcgattaccatt

SEQ ID NO: 68541 - DNA, 25 bp, Artificial
  Probe
cctatatacctgtgcatggaccttt

SEQ ID NO: 68542 - DNA, 25 bp, Artificial
  Probe
attggaccctatatacctgtgcatg

SEQ ID NO: 68543 - DNA, 25 bp, Artificial
  Probe
cgttaccacattatctcctttggga

SEQ ID NO: 68544 - DNA, 25 bp, Artificial
  Probe
ctggcgttaccacattatctccttt

SEQ ID NO: 68545 - DNA, 25 bp, Artificial
  Probe
ggtaattggaccctatatacctgtg

SEQ ID NO: 68546 - DNA, 25 bp, Artificial
  Probe
tggcgttaccacattatctcctttg

SEQ ID NO: 68547 - DNA, 25 bp, Artificial
  Probe
aaacctggcgttaccacattatctc

SEQ ID NO: 68548 - DNA, 25 bp, Artificial
  Probe
cggtaattggaccctatatacctgt

SEQ ID NO: 68549 - DNA, 25 bp, Artificial
  Probe
attatctcctttgggaaatcccttt

SEQ ID NO: 68550 - DNA, 25 bp, Artificial
  Probe
cattatctcctttgggaaatccctt

SEQ ID NO: 68551 - DNA, 25 bp, Artificial
  Probe
cctggcgttaccacattatctcctt

SEQ ID NO: 68552 - DNA, 25 bp, Artificial
  Probe
caaacctggcgttaccacattatct

SEQ ID NO: 68553 - DNA, 25 bp, Artificial
  Probe
ctatagtgagtcgattaccattcac

SEQ ID NO: 68554 - DNA, 25 bp, Artificial
  Probe
attcgccctatagtgagtcgattac

SEQ ID NO: 68555 - DNA, 25 bp, Artificial
  Probe
cattcgccctatagtgagtcgatta

SEQ ID NO: 68556 - DNA, 25 bp, Artificial
  Probe
ctatatacctgtgcatggacctttt

SEQ ID NO: 68557 - DNA, 25 bp, Artificial
  Probe
ccctatatacctgtgcatggacctt

SEQ ID NO: 68558 - DNA, 25 bp, Artificial
  Probe
acattatctcctttgggaaatccct

SEQ ID NO: 68559 - DNA, 25 bp, Artificial
  Probe
cacattatctcctttgggaaatccc

SEQ ID NO: 68560 - DNA, 25 bp, Artificial
  Probe
aacctggcgttaccacattatctcc

SEQ ID NO: 68561 - DNA, 25 bp, Artificial
  Probe
cgccctatagtgagtcgattaccat

SEQ ID NO: 68562 - DNA, 25 bp, Artificial
  Probe
gcgttaccacattatctcctttggg

SEQ ID NO: 68563 - DNA, 25 bp, Artificial
  Probe
ggcgttaccacattatctcctttgg

SEQ ID NO: 68564 - DNA, 25 bp, Artificial
  Probe
ttggaccctatatacctgtgcatgg

SEQ ID NO: 68565 - DNA, 25 bp, Artificial
  Probe
cttttgccagtgggatatacgagag

SEQ ID NO: 68566 - DNA, 25 bp, Artificial
  Probe
gtacccattcgccctatagtgagtc

SEQ ID NO: 68567 - DNA, 25 bp, Artificial
  Probe
gaccctatatacctgtgcatggacc

SEQ ID NO: 68568 - DNA, 25 bp, Artificial
  Probe
ggaccctatatacctgtgcatggac

SEQ ID NO: 68569 - DNA, 25 bp, Artificial
  Probe
accctatatacctgtgcatggacct

SEQ ID NO: 68570 - DNA, 25 bp, Artificial
  Probe
tggaccctatatacctgtgcatgga

SEQ ID NO: 68571 - DNA, 25 bp, Artificial
  Probe
ttcgccctatagtgagtcgattacc

SEQ ID NO: 68572 - DNA, 25 bp, Artificial
  Probe
ccggtaattggaccctatatacctg

SEQ ID NO: 68573 - DNA, 25 bp, Artificial
  Probe
ttatctcctttgggaaatccctttt

SEQ ID NO: 68574 - DNA, 25 bp, Artificial
  Probe
gcaaacctggcgttaccacattatc

SEQ ID NO: 68575 - DNA, 25 bp, Artificial
  Probe
gaggagcaaggaggaagaagaatag

SEQ ID NO: 68576 - DNA, 25 bp, Artificial
  Probe
ggagcaaggaggaagaagaatagtc

SEQ ID NO: 68577 - DNA, 25 bp, Artificial
  Probe
atgtgtctattgtcgtgctatgagg

SEQ ID NO: 68578 - DNA, 25 bp, Artificial
  Probe
catgtgtctattgtcgtgctatgag

SEQ ID NO: 68579 - DNA, 25 bp, Artificial
  Probe
ctcatgtgtctattgtcgtgctatg

SEQ ID NO: 68580 - DNA, 25 bp, Artificial
  Probe
actcatgtgtctattgtcgtgctat

SEQ ID NO: 68581 - DNA, 25 bp, Artificial
  Probe
aggagcaaggaggaagaagaatagt

SEQ ID NO: 68582 - DNA, 25 bp, Artificial
  Probe
tgaggagcaaggaggaagaagaata

SEQ ID NO: 68583 - DNA, 25 bp, Artificial
  Probe
tatgaggagcaaggaggaagaagaa

SEQ ID NO: 68584 - DNA, 25 bp, Artificial
  Probe
gtgtctattgtcgtgctatgaggag

SEQ ID NO: 68585 - DNA, 25 bp, Artificial
  Probe
tgggtagaagtaaacaaagacatca

SEQ ID NO: 68586 - DNA, 25 bp, Artificial
  Probe
gggtagaagtaaacaaagacatcaa

SEQ ID NO: 68587 - DNA, 25 bp, Artificial
  Probe
aagatgtttcccaatacccaagatg

SEQ ID NO: 68588 - DNA, 25 bp, Artificial
  Probe
caagatgtttcccaatacccaagat

SEQ ID NO: 68589 - DNA, 25 bp, Artificial
  Probe
ctatgaggagcaaggaggaagaaga

SEQ ID NO: 68590 - DNA, 25 bp, Artificial
  Probe
aagtaaacaaagacatcaaacatcg

SEQ ID NO: 68591 - DNA, 25 bp, Artificial
  Probe
tcttgaatgttgggtagaagtaaac

SEQ ID NO: 68592 - DNA, 25 bp, Artificial
  Probe
gttgggtagaagtaaacaaagacat

SEQ ID NO: 68593 - DNA, 25 bp, Artificial
  Probe
atgaggagcaaggaggaagaagaat

SEQ ID NO: 68594 - DNA, 25 bp, Artificial
  Probe
aatgagtgaaatgaacttggacttt

SEQ ID NO: 68595 - DNA, 25 bp, Artificial
  Probe
ttgggtagaagtaaacaaagacatc

SEQ ID NO: 68596 - DNA, 25 bp, Artificial
  Probe
tgtgtctattgtcgtgctatgagga

SEQ ID NO: 68597 - DNA, 25 bp, Artificial
  Probe
gagcaaggaggaagaagaatagtcc

SEQ ID NO: 68598 - DNA, 25 bp, Artificial
  Probe
gcagtgctaactttagttgagaatg

SEQ ID NO: 68599 - DNA, 25 bp, Artificial
  Probe
gactcatgtgtctattgtcgtgcta

SEQ ID NO: 68600 - DNA, 25 bp, Artificial
  Probe
ttagttgagaatgagttcttgacaa

SEQ ID NO: 68601 - DNA, 25 bp, Artificial
  Probe
tagttgagaatgagttcttgacaag

SEQ ID NO: 68602 - DNA, 25 bp, Artificial
  Probe
gtgctaactttagttgagaatgagt

SEQ ID NO: 68603 - DNA, 25 bp, Artificial
  Probe
cagtgctaactttagttgagaatga

SEQ ID NO: 68604 - DNA, 25 bp, Artificial
  Probe
agtgctaactttagttgagaatgag

SEQ ID NO: 68605 - DNA, 25 bp, Artificial
  Probe
aaacaaagacatcaaacatcgaagt

SEQ ID NO: 68606 - DNA, 25 bp, Artificial
  Probe
ggtagaagtaaacaaagacatcaaa

SEQ ID NO: 68607 - DNA, 25 bp, Artificial
  Probe
aacaaagacatcaaacatcgaagtg

SEQ ID NO: 68608 - DNA, 25 bp, Artificial
  Probe
gacaagatgtttcccaatacccaag

SEQ ID NO: 68609 - DNA, 25 bp, Artificial
  Probe
agaagtaaacaaagacatcaaacat

SEQ ID NO: 68610 - DNA, 25 bp, Artificial
  Probe
agtaaacaaagacatcaaacatcga

SEQ ID NO: 68611 - DNA, 25 bp, Artificial
  Probe
aaataagtaggtggagagccagtta

SEQ ID NO: 68612 - DNA, 25 bp, Artificial
  Probe
gccctaacgtaactagcaaatttat

SEQ ID NO: 68613 - DNA, 25 bp, Artificial
  Probe
gaagtaaacaaagacatcaaacatc

SEQ ID NO: 68614 - DNA, 25 bp, Artificial
  Probe
acaagatgtttcccaatacccaaga

SEQ ID NO: 68615 - DNA, 25 bp, Artificial
  Probe
aagacatcaaacatcgaagtgaatc

SEQ ID NO: 68616 - DNA, 25 bp, Artificial
  Probe
caaagacatcaaacatcgaagtgaa

SEQ ID NO: 68617 - DNA, 25 bp, Artificial
  Probe
tcatgtgtctattgtcgtgctatga

SEQ ID NO: 68618 - DNA, 25 bp, Artificial
  Probe
gtaaacaaagacatcaaacatcgaa

SEQ ID NO: 68619 - DNA, 25 bp, Artificial
  Probe
aaagacatcaaacatcgaagtgaat

SEQ ID NO: 68620 - DNA, 25 bp, Artificial
  Probe
aataacttgccttctctatccttgc

SEQ ID NO: 68621 - DNA, 25 bp, Artificial
  Probe
agatgctagttccagataagttgtg

SEQ ID NO: 68622 - DNA, 25 bp, Artificial
  Probe
atgctagttccagataagttgtgta

SEQ ID NO: 68623 - DNA, 25 bp, Artificial
  Probe
gatgctagttccagataagttgtgt

SEQ ID NO: 68624 - DNA, 25 bp, Artificial
  Probe
ataacttgccttctctatccttgct

SEQ ID NO: 68625 - DNA, 25 bp, Artificial
  Probe
tgctagttccagataagttgtgtac

SEQ ID NO: 68626 - DNA, 25 bp, Artificial
  Probe
tagatgctagttccagataagttgt

SEQ ID NO: 68627 - DNA, 25 bp, Artificial
  Probe
tcctacttagatgctagttccagat

SEQ ID NO: 68628 - DNA, 25 bp, Artificial
  Probe
ttcctacttagatgctagttccaga

SEQ ID NO: 68629 - DNA, 25 bp, Artificial
  Probe
taataacttgccttctctatccttg

SEQ ID NO: 68630 - DNA, 25 bp, Artificial
  Probe
taacttgccttctctatccttgctc

SEQ ID NO: 68631 - DNA, 25 bp, Artificial
  Probe
cctacttagatgctagttccagata

SEQ ID NO: 68632 - DNA, 25 bp, Artificial
  Probe
ttagatgctagttccagataagttg

SEQ ID NO: 68633 - DNA, 25 bp, Artificial
  Probe
ttaataacttgccttctctatcctt

SEQ ID NO: 68634 - DNA, 25 bp, Artificial
  Probe
tctgacctttcctacttagatgcta

SEQ ID NO: 68635 - DNA, 25 bp, Artificial
  Probe
gctttctgacctttcctacttagat

SEQ ID NO: 68636 - DNA, 25 bp, Artificial
  Probe
tttctgacctttcctacttagatgc

SEQ ID NO: 68637 - DNA, 25 bp, Artificial
  Probe
cttagatgctagttccagataagtt

SEQ ID NO: 68638 - DNA, 25 bp, Artificial
  Probe
ctgacctttcctacttagatgctag

SEQ ID NO: 68639 - DNA, 25 bp, Artificial
  Probe
ttctgacctttcctacttagatgct

SEQ ID NO: 68640 - DNA, 25 bp, Artificial
  Probe
ccctggttggaaattaaacttgttt

SEQ ID NO: 68641 - DNA, 25 bp, Artificial
  Probe
ctttctgacctttcctacttagatg

SEQ ID NO: 68642 - DNA, 25 bp, Artificial
  Probe
ctacttagatgctagttccagataa

SEQ ID NO: 68643 - DNA, 25 bp, Artificial
  Probe
cctttcctacttagatgctagttcc

SEQ ID NO: 68644 - DNA, 25 bp, Artificial
  Probe
tttcctacttagatgctagttccag

SEQ ID NO: 68645 - DNA, 25 bp, Artificial
  Probe
ctttcctacttagatgctagttcca

SEQ ID NO: 68646 - DNA, 25 bp, Artificial
  Probe
acctttcctacttagatgctagttc

SEQ ID NO: 68647 - DNA, 25 bp, Artificial
  Probe
gacctttcctacttagatgctagtt

SEQ ID NO: 68648 - DNA, 25 bp, Artificial
  Probe
tgacctttcctacttagatgctagt

SEQ ID NO: 68649 - DNA, 25 bp, Artificial
  Probe
accctggttggaaattaaacttgtt

SEQ ID NO: 68650 - DNA, 25 bp, Artificial
  Probe
gaccctggttggaaattaaacttgt

SEQ ID NO: 68651 - DNA, 25 bp, Artificial
  Probe
tgaccctggttggaaattaaacttg

SEQ ID NO: 68652 - DNA, 25 bp, Artificial
  Probe
gtgaccctggttggaaattaaactt

SEQ ID NO: 68653 - DNA, 25 bp, Artificial
  Probe
tacttagatgctagttccagataag

SEQ ID NO: 68654 - DNA, 25 bp, Artificial
  Probe
cgctttctgacctttcctacttaga

SEQ ID NO: 68655 - DNA, 25 bp, Artificial
  Probe
acgctttctgacctttcctacttag

SEQ ID NO: 68656 - DNA, 25 bp, Artificial
  Probe
tctctatccttgctcagaaatgtgg

SEQ ID NO: 68657 - DNA, 25 bp, Artificial
  Probe
ccttgctcagaaatgtggataatgc

SEQ ID NO: 68658 - DNA, 25 bp, Artificial
  Probe
aacttgccttctctatccttgctca

SEQ ID NO: 68659 - DNA, 25 bp, Artificial
  Probe
cacgctttctgacctttcctactta

SEQ ID NO: 68660 - DNA, 25 bp, Artificial
  Probe
tccttgctcagaaatgtggataatg

SEQ ID NO: 68661 - DNA, 25 bp, Artificial
  Probe
ctgtgaccctggttggaaattaaac

SEQ ID NO: 68662 - DNA, 25 bp, Artificial
  Probe
cagataagttgtgtacattgcagac

SEQ ID NO: 68663 - DNA, 25 bp, Artificial
  Probe
gctagttccagataagttgtgtaca

SEQ ID NO: 68664 - DNA, 25 bp, Artificial
  Probe
gttccagataagttgtgtacattgc

SEQ ID NO: 68665 - DNA, 25 bp, Artificial
  Probe
cttattctttactaccactccctcc

SEQ ID NO: 68666 - DNA, 25 bp, Artificial
  Probe
aattacactagacaccatactgaat

SEQ ID NO: 68667 - DNA, 25 bp, Artificial
  Probe
tattctttactaccactccctccaa

SEQ ID NO: 68668 - DNA, 25 bp, Artificial
  Probe
ttattctttactaccactccctcca

SEQ ID NO: 68669 - DNA, 25 bp, Artificial
  Probe
acaccatactgaataaactttccct

SEQ ID NO: 68670 - DNA, 25 bp, Artificial
  Probe
tcttattctttactaccactccctc

SEQ ID NO: 68671 - DNA, 25 bp, Artificial
  Probe
gacaccatactgaataaactttccc

SEQ ID NO: 68672 - DNA, 25 bp, Artificial
  Probe
aagatgtaggtgtctgctgaatgtg

SEQ ID NO: 68673 - DNA, 25 bp, Artificial
  Probe
accatactgaataaactttccctcg

SEQ ID NO: 68674 - DNA, 25 bp, Artificial
  Probe
caccatactgaataaactttccctc

SEQ ID NO: 68675 - DNA, 25 bp, Artificial
  Probe
gactgagaaattacactagacacca

SEQ ID NO: 68676 - DNA, 25 bp, Artificial
  Probe
agactgagaaattacactagacacc

SEQ ID NO: 68677 - DNA, 25 bp, Artificial
  Probe
ccagactgagaaattacactagaca

SEQ ID NO: 68678 - DNA, 25 bp, Artificial
  Probe
tccagactgagaaattacactagac

SEQ ID NO: 68679 - DNA, 25 bp, Artificial
  Probe
actgagaaattacactagacaccat

SEQ ID NO: 68680 - DNA, 25 bp, Artificial
  Probe
ttcttattctttactaccactccct

SEQ ID NO: 68681 - DNA, 25 bp, Artificial
  Probe
atattacatggcttccacttaccta

SEQ ID NO: 68682 - DNA, 25 bp, Artificial
  Probe
tatattacatggcttccacttacct

SEQ ID NO: 68683 - DNA, 25 bp, Artificial
  Probe
agacaccatactgaataaactttcc

SEQ ID NO: 68684 - DNA, 25 bp, Artificial
  Probe
ctccaagttgtttcaaattgttgtt

SEQ ID NO: 68685 - DNA, 25 bp, Artificial
  Probe
tgaatgtggttgccctgtattaaag

SEQ ID NO: 68686 - DNA, 25 bp, Artificial
  Probe
ctgaatgtggttgccctgtattaaa

SEQ ID NO: 68687 - DNA, 25 bp, Artificial
  Probe
tcatagtttgtttccagactgagaa

SEQ ID NO: 68688 - DNA, 25 bp, Artificial
  Probe
cctccaagttgtttcaaattgttgt

SEQ ID NO: 68689 - DNA, 25 bp, Artificial
  Probe
ttacactagacaccatactgaataa

SEQ ID NO: 68690 - DNA, 25 bp, Artificial
  Probe
cagactgagaaattacactagacac

SEQ ID NO: 68691 - DNA, 25 bp, Artificial
  Probe
atcatagtttgtttccagactgaga

SEQ ID NO: 68692 - DNA, 25 bp, Artificial
  Probe
attctttactaccactccctccaag

SEQ ID NO: 68693 - DNA, 25 bp, Artificial
  Probe
agttgtttcaaattgttgtttccaa

SEQ ID NO: 68694 - DNA, 25 bp, Artificial
  Probe
aagttgtttcaaattgttgtttcca

SEQ ID NO: 68695 - DNA, 25 bp, Artificial
  Probe
tccaagttgtttcaaattgttgttt

SEQ ID NO: 68696 - DNA, 25 bp, Artificial
  Probe
ttccagactgagaaattacactaga

SEQ ID NO: 68697 - DNA, 25 bp, Artificial
  Probe
caagttgtttcaaattgttgtttcc

SEQ ID NO: 68698 - DNA, 25 bp, Artificial
  Probe
ccaagttgtttcaaattgttgtttc

SEQ ID NO: 68699 - DNA, 25 bp, Artificial
  Probe
ttatattacatggcttccacttacc

SEQ ID NO: 68700 - DNA, 25 bp, Artificial
  Probe
aatcatagtttgtttccagactgag

SEQ ID NO: 68701 - DNA, 25 bp, Artificial
  Probe
tgtttcaaattgttgtttccaaaga

SEQ ID NO: 68702 - DNA, 25 bp, Artificial
  Probe
catactgaataaactttccctcgcc

SEQ ID NO: 68703 - DNA, 25 bp, Artificial
  Probe
ccatactgaataaactttccctcgc

SEQ ID NO: 68704 - DNA, 25 bp, Artificial
  Probe
attacactagacaccatactgaata

SEQ ID NO: 68705 - DNA, 25 bp, Artificial
  Probe
ccctccaagttgtttcaaattgttg

SEQ ID NO: 68706 - DNA, 25 bp, Artificial
  Probe
tccctccaagttgtttcaaattgtt

SEQ ID NO: 68707 - DNA, 25 bp, Artificial
  Probe
tttcttattctttactaccactccc

SEQ ID NO: 68708 - DNA, 25 bp, Artificial
  Probe
gaaagatgtaggtgtctgctgaatg

SEQ ID NO: 68709 - DNA, 25 bp, Artificial
  Probe
gtgggttgttatttggtgggataag

SEQ ID NO: 68710 - DNA, 25 bp, Artificial
  Probe
gaatctgaacaaggcgaactacaac

SEQ ID NO: 68711 - DNA, 25 bp, Artificial
  Probe
agaatctgaacaaggcgaactacaa

SEQ ID NO: 68712 - DNA, 25 bp, Artificial
  Probe
tcttctctctcctcagcttattgtc

SEQ ID NO: 68713 - DNA, 25 bp, Artificial
  Probe
ctcttctctctcctcagcttattgt

SEQ ID NO: 68714 - DNA, 25 bp, Artificial
  Probe
ttctctctcctcagcttattgtcag

SEQ ID NO: 68715 - DNA, 25 bp, Artificial
  Probe
cttctctctcctcagcttattgtca

SEQ ID NO: 68716 - DNA, 25 bp, Artificial
  Probe
aatctgaacaaggcgaactacaacc

SEQ ID NO: 68717 - DNA, 25 bp, Artificial
  Probe
cataaacagaccgtccctgataaag

SEQ ID NO: 68718 - DNA, 25 bp, Artificial
  Probe
attcataaacagaccgtccctgata

SEQ ID NO: 68719 - DNA, 25 bp, Artificial
  Probe
ataaacagaccgtccctgataaagt

SEQ ID NO: 68720 - DNA, 25 bp, Artificial
  Probe
tcataaacagaccgtccctgataaa

SEQ ID NO: 68721 - DNA, 25 bp, Artificial
  Probe
ttcataaacagaccgtccctgataa

SEQ ID NO: 68722 - DNA, 25 bp, Artificial
  Probe
caagttcgagattcataaacagacc

SEQ ID NO: 68723 - DNA, 25 bp, Artificial
  Probe
cccttcaagttcgagattcataaac

SEQ ID NO: 68724 - DNA, 25 bp, Artificial
  Probe
ccttcaagttcgagattcataaaca

SEQ ID NO: 68725 - DNA, 25 bp, Artificial
  Probe
tcaagttcgagattcataaacagac

SEQ ID NO: 68726 - DNA, 25 bp, Artificial
  Probe
taaacagaccgtccctgataaagtc

SEQ ID NO: 68727 - DNA, 25 bp, Artificial
  Probe
cagaatctgaacaaggcgaactaca

SEQ ID NO: 68728 - DNA, 25 bp, Artificial
  Probe
aagttcgagattcataaacagaccg

SEQ ID NO: 68729 - DNA, 25 bp, Artificial
  Probe
ttcaagttcgagattcataaacaga

SEQ ID NO: 68730 - DNA, 25 bp, Artificial
  Probe
gattcataaacagaccgtccctgat

SEQ ID NO: 68731 - DNA, 25 bp, Artificial
  Probe
cttcaagttcgagattcataaacag

SEQ ID NO: 68732 - DNA, 25 bp, Artificial
  Probe
gttcgagattcataaacagaccgtc

SEQ ID NO: 68733 - DNA, 25 bp, Artificial
  Probe
tcagcttattgtcaggtctgtgaga

SEQ ID NO: 68734 - DNA, 25 bp, Artificial
  Probe
tctctctcctcagcttattgtcagg

SEQ ID NO: 68735 - DNA, 25 bp, Artificial
  Probe
agttcgagattcataaacagaccgt

SEQ ID NO: 68736 - DNA, 25 bp, Artificial
  Probe
gctcttctctctcctcagcttattg

SEQ ID NO: 68737 - DNA, 25 bp, Artificial
  Probe
gagattcataaacagaccgtccctg

SEQ ID NO: 68738 - DNA, 25 bp, Artificial
  Probe
ctctcctcagcttattgtcaggtct

SEQ ID NO: 68739 - DNA, 25 bp, Artificial
  Probe
tctctcctcagcttattgtcaggtc

SEQ ID NO: 68740 - DNA, 25 bp, Artificial
  Probe
ctctctcctcagcttattgtcaggt

SEQ ID NO: 68741 - DNA, 25 bp, Artificial
  Probe
cgtccctgataaagtctggaagatc

SEQ ID NO: 68742 - DNA, 25 bp, Artificial
  Probe
ttcgagattcataaacagaccgtcc

SEQ ID NO: 68743 - DNA, 25 bp, Artificial
  Probe
tgctcttctctctcctcagcttatt

SEQ ID NO: 68744 - DNA, 25 bp, Artificial
  Probe
atctgaacaaggcgaactacaacct

SEQ ID NO: 68745 - DNA, 25 bp, Artificial
  Probe
tctcctcagcttattgtcaggtctg

SEQ ID NO: 68746 - DNA, 25 bp, Artificial
  Probe
agattcataaacagaccgtccctga

SEQ ID NO: 68747 - DNA, 25 bp, Artificial
  Probe
ctcctcagcttattgtcaggtctgt

SEQ ID NO: 68748 - DNA, 25 bp, Artificial
  Probe
ctgctcttctctctcctcagcttat

SEQ ID NO: 68749 - DNA, 25 bp, Artificial
  Probe
cgagattcataaacagaccgtccct

SEQ ID NO: 68750 - DNA, 25 bp, Artificial
  Probe
ccccttcaagttcgagattcataaa

SEQ ID NO: 68751 - DNA, 25 bp, Artificial
  Probe
cctcagcttattgtcaggtctgtga

SEQ ID NO: 68752 - DNA, 25 bp, Artificial
  Probe
tcctcagcttattgtcaggtctgtg

SEQ ID NO: 68753 - DNA, 25 bp, Artificial
  Probe
ccgtccctgataaagtctggaagat

SEQ ID NO: 68754 - DNA, 25 bp, Artificial
  Probe
tccctgataaagtctggaagatctc

SEQ ID NO: 68755 - DNA, 25 bp, Artificial
  Probe
atcgacggacattacaaggattatt

SEQ ID NO: 68756 - DNA, 25 bp, Artificial
  Probe
catcgacggacattacaaggattat

SEQ ID NO: 68757 - DNA, 25 bp, Artificial
  Probe
gacggacattacaaggattatttcg

SEQ ID NO: 68758 - DNA, 25 bp, Artificial
  Probe
cgacggacattacaaggattatttc

SEQ ID NO: 68759 - DNA, 25 bp, Artificial
  Probe
gcagaaagactacaggaccaatata

SEQ ID NO: 68760 - DNA, 25 bp, Artificial
  Probe
cggacattacaaggattatttcgtg

SEQ ID NO: 68761 - DNA, 25 bp, Artificial
  Probe
gacattacaaggattatttcgtgcc

SEQ ID NO: 68762 - DNA, 25 bp, Artificial
  Probe
ggacattacaaggattatttcgtgc

SEQ ID NO: 68763 - DNA, 25 bp, Artificial
  Probe
tggaagtgaaaggacataagttgac

SEQ ID NO: 68764 - DNA, 25 bp, Artificial
  Probe
atggaagtgaaaggacataagttga

SEQ ID NO: 68765 - DNA, 25 bp, Artificial
  Probe
tcatcgacggacattacaaggatta

SEQ ID NO: 68766 - DNA, 25 bp, Artificial
  Probe
gaagtgaaaggacataagttgactg

SEQ ID NO: 68767 - DNA, 25 bp, Artificial
  Probe
ggaagtgaaaggacataagttgact

SEQ ID NO: 68768 - DNA, 25 bp, Artificial
  Probe
aagtgaaaggacataagttgactgt

SEQ ID NO: 68769 - DNA, 25 bp, Artificial
  Probe
ttcatcgacggacattacaaggatt

SEQ ID NO: 68770 - DNA, 25 bp, Artificial
  Probe
catggaagtgaaaggacataagttg

SEQ ID NO: 68771 - DNA, 25 bp, Artificial
  Probe
cattacaaggattatttcgtgcctc

SEQ ID NO: 68772 - DNA, 25 bp, Artificial
  Probe
gacagacaagttctcacctagtgtg

SEQ ID NO: 68773 - DNA, 25 bp, Artificial
  Probe
tagtgtgcatggactgttagttcat

SEQ ID NO: 68774 - DNA, 25 bp, Artificial
  Probe
attacaaggattatttcgtgcctca

SEQ ID NO: 68775 - DNA, 25 bp, Artificial
  Probe
acattacaaggattatttcgtgcct

SEQ ID NO: 68776 - DNA, 25 bp, Artificial
  Probe
tcagtaacttgaaataaacccagat

SEQ ID NO: 68777 - DNA, 25 bp, Artificial
  Probe
ttacaaggattatttcgtgcctcag

SEQ ID NO: 68778 - DNA, 25 bp, Artificial
  Probe
tcgacggacattacaaggattattt

SEQ ID NO: 68779 - DNA, 25 bp, Artificial
  Probe
gcatggaagtgaaaggacataagtt

SEQ ID NO: 68780 - DNA, 25 bp, Artificial
  Probe
gagcatggaagtgaaaggacataag

SEQ ID NO: 68781 - DNA, 25 bp, Artificial
  Probe
gcagttagtcctcagtttcagtaac

SEQ ID NO: 68782 - DNA, 25 bp, Artificial
  Probe
ctagtgtgcatggactgttagttca

SEQ ID NO: 68783 - DNA, 25 bp, Artificial
  Probe
agcatggaagtgaaaggacataagt

SEQ ID NO: 68784 - DNA, 25 bp, Artificial
  Probe
tgcagaaagactacaggaccaatat

SEQ ID NO: 68785 - DNA, 25 bp, Artificial
  Probe
atgcagaaagactacaggaccaata

SEQ ID NO: 68786 - DNA, 25 bp, Artificial
  Probe
tgcagttagtcctcagtttcagtaa

SEQ ID NO: 68787 - DNA, 25 bp, Artificial
  Probe
cagtaacttgaaataaacccagata

SEQ ID NO: 68788 - DNA, 25 bp, Artificial
  Probe
cctagtgtgcatggactgttagttc

SEQ ID NO: 68789 - DNA, 25 bp, Artificial
  Probe
tttcatcgacggacattacaaggat

SEQ ID NO: 68790 - DNA, 25 bp, Artificial
  Probe
acggacattacaaggattatttcgt

SEQ ID NO: 68791 - DNA, 25 bp, Artificial
  Probe
cgacagacaagttctcacctagtgt

SEQ ID NO: 68792 - DNA, 25 bp, Artificial
  Probe
tagtcctcagtttcagtaacttgaa

SEQ ID NO: 68793 - DNA, 25 bp, Artificial
  Probe
ttagtcctcagtttcagtaacttga

SEQ ID NO: 68794 - DNA, 25 bp, Artificial
  Probe
gttagtcctcagtttcagtaacttg

SEQ ID NO: 68795 - DNA, 25 bp, Artificial
  Probe
acttgaaataaacccagatattagg

SEQ ID NO: 68796 - DNA, 25 bp, Artificial
  Probe
ataagttgactgtcaccagaggcat

SEQ ID NO: 68797 - DNA, 25 bp, Artificial
  Probe
cgagcatggaagtgaaaggacataa

SEQ ID NO: 68798 - DNA, 25 bp, Artificial
  Probe
acctagtgtgcatggactgttagtt

SEQ ID NO: 68799 - DNA, 25 bp, Artificial
  Probe
tacaaggattatttcgtgcctcagc

SEQ ID NO: 68800 - DNA, 25 bp, Artificial
  Probe
atggagatagaaaggaagaagctac

SEQ ID NO: 68801 - DNA, 25 bp, Artificial
  Probe
catggagatagaaaggaagaagcta

SEQ ID NO: 68802 - DNA, 25 bp, Artificial
  Probe
ggcttatttcacacactcaaacctg

SEQ ID NO: 68803 - DNA, 25 bp, Artificial
  Probe
tggagatagaaaggaagaagctacc

SEQ ID NO: 68804 - DNA, 25 bp, Artificial
  Probe
tgtggtggacaataaacaggagatt

SEQ ID NO: 68805 - DNA, 25 bp, Artificial
  Probe
tttgtgcatggagatagaaaggaag

SEQ ID NO: 68806 - DNA, 25 bp, Artificial
  Probe
cctcaacctcttcttcaagctcaag

SEQ ID NO: 68807 - DNA, 25 bp, Artificial
  Probe
gcttatttcacacactcaaacctgc

SEQ ID NO: 68808 - DNA, 25 bp, Artificial
  Probe
gtgcatggagatagaaaggaagaag

SEQ ID NO: 68809 - DNA, 25 bp, Artificial
  Probe
gtttgaagacgctgtggagaaattc

SEQ ID NO: 68810 - DNA, 25 bp, Artificial
  Probe
gtttgtgcatggagatagaaaggaa

SEQ ID NO: 68811 - DNA, 25 bp, Artificial
  Probe
aagtttgaagacgctgtggagaaat

SEQ ID NO: 68812 - DNA, 25 bp, Artificial
  Probe
tagaaaggaagaagctacctaagga

SEQ ID NO: 68813 - DNA, 25 bp, Artificial
  Probe
atagaaaggaagaagctacctaagg

SEQ ID NO: 68814 - DNA, 25 bp, Artificial
  Probe
agtttgaagacgctgtggagaaatt

SEQ ID NO: 68815 - DNA, 25 bp, Artificial
  Probe
tgtgcatggagatagaaaggaagaa

SEQ ID NO: 68816 - DNA, 25 bp, Artificial
  Probe
ttgtgcatggagatagaaaggaaga

SEQ ID NO: 68817 - DNA, 25 bp, Artificial
  Probe
ggagatagaaaggaagaagctacct

SEQ ID NO: 68818 - DNA, 25 bp, Artificial
  Probe
aaggaagaagctacctaaggagacc

SEQ ID NO: 68819 - DNA, 25 bp, Artificial
  Probe
gcatggagatagaaaggaagaagct

SEQ ID NO: 68820 - DNA, 25 bp, Artificial
  Probe
cttatttcacacactcaaacctgca

SEQ ID NO: 68821 - DNA, 25 bp, Artificial
  Probe
gaaaggaagaagctacctaaggaga

SEQ ID NO: 68822 - DNA, 25 bp, Artificial
  Probe
agaaaggaagaagctacctaaggag

SEQ ID NO: 68823 - DNA, 25 bp, Artificial
  Probe
gagatagaaaggaagaagctaccta

SEQ ID NO: 68824 - DNA, 25 bp, Artificial
  Probe
aaaggaagaagctacctaaggagac

SEQ ID NO: 68825 - DNA, 25 bp, Artificial
  Probe
gtggtggacaataaacaggagattg

SEQ ID NO: 68826 - DNA, 25 bp, Artificial
  Probe
agatagaaaggaagaagctacctaa

SEQ ID NO: 68827 - DNA, 25 bp, Artificial
  Probe
gatagaaaggaagaagctacctaag

SEQ ID NO: 68828 - DNA, 25 bp, Artificial
  Probe
atgtatagctaccctaatcgcaatt

SEQ ID NO: 68829 - DNA, 25 bp, Artificial
  Probe
catgtatagctaccctaatcgcaat

SEQ ID NO: 68830 - DNA, 25 bp, Artificial
  Probe
cggcttatttcacacactcaaacct

SEQ ID NO: 68831 - DNA, 25 bp, Artificial
  Probe
tgtatagctaccctaatcgcaattg

SEQ ID NO: 68832 - DNA, 25 bp, Artificial
  Probe
tgcatggagatagaaaggaagaagc

SEQ ID NO: 68833 - DNA, 25 bp, Artificial
  Probe
ccctccatgtatagctaccctaatc

SEQ ID NO: 68834 - DNA, 25 bp, Artificial
  Probe
aagaagctacctaaggagaccctag

SEQ ID NO: 68835 - DNA, 25 bp, Artificial
  Probe
gaagaagctacctaaggagacccta

SEQ ID NO: 68836 - DNA, 25 bp, Artificial
  Probe
gtatagctaccctaatcgcaattgg

SEQ ID NO: 68837 - DNA, 25 bp, Artificial
  Probe
ggtttgtgcatggagatagaaagga

SEQ ID NO: 68838 - DNA, 25 bp, Artificial
  Probe
tatagctaccctaatcgcaattgga

SEQ ID NO: 68839 - DNA, 25 bp, Artificial
  Probe
agaaattccgctccatcctactcag

SEQ ID NO: 68840 - DNA, 25 bp, Artificial
  Probe
cctccatgtatagctaccctaatcg

SEQ ID NO: 68841 - DNA, 25 bp, Artificial
  Probe
caagtttgaagacgctgtggagaaa

SEQ ID NO: 68842 - DNA, 25 bp, Artificial
  Probe
ccatgtatagctaccctaatcgcaa

SEQ ID NO: 68843 - DNA, 25 bp, Artificial
  Probe
atagctaccctaatcgcaattggaa

SEQ ID NO: 68844 - DNA, 25 bp, Artificial
  Probe
gacaataaacaggagattgcagagg

SEQ ID NO: 68845 - DNA, 25 bp, Artificial
  Probe
ttgagaagattgaacagttcgtgta

SEQ ID NO: 68846 - DNA, 25 bp, Artificial
  Probe
aagattgaacagttcgtgtactcat

SEQ ID NO: 68847 - DNA, 25 bp, Artificial
  Probe
attgtgaatattgtctcaggctctt

SEQ ID NO: 68848 - DNA, 25 bp, Artificial
  Probe
agaagattgaacagttcgtgtactc

SEQ ID NO: 68849 - DNA, 25 bp, Artificial
  Probe
gagaagattgaacagttcgtgtact

SEQ ID NO: 68850 - DNA, 25 bp, Artificial
  Probe
agattgaacagttcgtgtactcatc

SEQ ID NO: 68851 - DNA, 25 bp, Artificial
  Probe
gaagattgaacagttcgtgtactca

SEQ ID NO: 68852 - DNA, 25 bp, Artificial
  Probe
tgagaagattgaacagttcgtgtac

SEQ ID NO: 68853 - DNA, 25 bp, Artificial
  Probe
cattgtgaatattgtctcaggctct

SEQ ID NO: 68854 - DNA, 25 bp, Artificial
  Probe
gattgaacagttcgtgtactcatca

SEQ ID NO: 68855 - DNA, 25 bp, Artificial
  Probe
acattgtgaatattgtctcaggctc

SEQ ID NO: 68856 - DNA, 25 bp, Artificial
  Probe
attgaacagttcgtgtactcatcac

SEQ ID NO: 68857 - DNA, 25 bp, Artificial
  Probe
gaaataacctccgttctctacacag

SEQ ID NO: 68858 - DNA, 25 bp, Artificial
  Probe
ccttaccacattgtgaatattgtct

SEQ ID NO: 68859 - DNA, 25 bp, Artificial
  Probe
tattgtctcaggctctttgaatcat

SEQ ID NO: 68860 - DNA, 25 bp, Artificial
  Probe
atattgtctcaggctctttgaatca

SEQ ID NO: 68861 - DNA, 25 bp, Artificial
  Probe
accacattgtgaatattgtctcagg

SEQ ID NO: 68862 - DNA, 25 bp, Artificial
  Probe
ccatcagtttgagaagattgaacag

SEQ ID NO: 68863 - DNA, 25 bp, Artificial
  Probe
gtccatcagtttgagaagattgaac

SEQ ID NO: 68864 - DNA, 25 bp, Artificial
  Probe
agtccatcagtttgagaagattgaa

SEQ ID NO: 68865 - DNA, 25 bp, Artificial
  Probe
tccatcagtttgagaagattgaaca

SEQ ID NO: 68866 - DNA, 25 bp, Artificial
  Probe
taccacattgtgaatattgtctcag

SEQ ID NO: 68867 - DNA, 25 bp, Artificial
  Probe
catcagtttgagaagattgaacagt

SEQ ID NO: 68868 - DNA, 25 bp, Artificial
  Probe
gagtccatcagtttgagaagattga

SEQ ID NO: 68869 - DNA, 25 bp, Artificial
  Probe
aaataacctccgttctctacacaga

SEQ ID NO: 68870 - DNA, 25 bp, Artificial
  Probe
cacattgtgaatattgtctcaggct

SEQ ID NO: 68871 - DNA, 25 bp, Artificial
  Probe
atgggagatgtttgatgagatgatc

SEQ ID NO: 68872 - DNA, 25 bp, Artificial
  Probe
atcagtttgagaagattgaacagtt

SEQ ID NO: 68873 - DNA, 25 bp, Artificial
  Probe
aataacctccgttctctacacagaa

SEQ ID NO: 68874 - DNA, 25 bp, Artificial
  Probe
ttaccacattgtgaatattgtctca

SEQ ID NO: 68875 - DNA, 25 bp, Artificial
  Probe
catgggagatgtttgatgagatgat

SEQ ID NO: 68876 - DNA, 25 bp, Artificial
  Probe
cagtttgagaagattgaacagttcg

SEQ ID NO: 68877 - DNA, 25 bp, Artificial
  Probe
cgagtccatcagtttgagaagattg

SEQ ID NO: 68878 - DNA, 25 bp, Artificial
  Probe
gtttgagaagattgaacagttcgtg

SEQ ID NO: 68879 - DNA, 25 bp, Artificial
  Probe
agtttgagaagattgaacagttcgt

SEQ ID NO: 68880 - DNA, 25 bp, Artificial
  Probe
cttaccacattgtgaatattgtctc

SEQ ID NO: 68881 - DNA, 25 bp, Artificial
  Probe
tcagtttgagaagattgaacagttc

SEQ ID NO: 68882 - DNA, 25 bp, Artificial
  Probe
ccacattgtgaatattgtctcaggc

SEQ ID NO: 68883 - DNA, 25 bp, Artificial
  Probe
tgaatattgtctcaggctctttgaa

SEQ ID NO: 68884 - DNA, 25 bp, Artificial
  Probe
ttgtgaatattgtctcaggctcttt

SEQ ID NO: 68885 - DNA, 25 bp, Artificial
  Probe
attgtctcaggctctttgaatcatg

SEQ ID NO: 68886 - DNA, 25 bp, Artificial
  Probe
atgacagctcctatgacgagaagta

SEQ ID NO: 68887 - DNA, 25 bp, Artificial
  Probe
gtgaatattgtctcaggctctttga

SEQ ID NO: 68888 - DNA, 25 bp, Artificial
  Probe
aatattgtctcaggctctttgaatc

SEQ ID NO: 68889 - DNA, 25 bp, Artificial
  Probe
gaatattgtctcaggctctttgaat

SEQ ID NO: 68890 - DNA, 25 bp, Artificial
  Probe
gcagatacggtattcagtgtgatat

SEQ ID NO: 68891 - DNA, 25 bp, Artificial
  Probe
taaagggtgaagatgaaagggaaat

SEQ ID NO: 68892 - DNA, 25 bp, Artificial
  Probe
ataaagggtgaagatgaaagggaaa

SEQ ID NO: 68893 - DNA, 25 bp, Artificial
  Probe
aataaagggtgaagatgaaagggaa

SEQ ID NO: 68894 - DNA, 25 bp, Artificial
  Probe
agatgaaagggaaatgataactgga

SEQ ID NO: 68895 - DNA, 25 bp, Artificial
  Probe
atgaaagggaaatgataactggagg

SEQ ID NO: 68896 - DNA, 25 bp, Artificial
  Probe
gggtgaagatgaaagggaaatgata

SEQ ID NO: 68897 - DNA, 25 bp, Artificial
  Probe
gatgaaagggaaatgataactggag

SEQ ID NO: 68898 - DNA, 25 bp, Artificial
  Probe
gtaataaagggtgaagatgaaaggg

SEQ ID NO: 68899 - DNA, 25 bp, Artificial
  Probe
agcatagtgtaataaagggtgaaga

SEQ ID NO: 68900 - DNA, 25 bp, Artificial
  Probe
taataaagggtgaagatgaaaggga

SEQ ID NO: 68901 - DNA, 25 bp, Artificial
  Probe
cgaagcatagtgtaataaagggtga

SEQ ID NO: 68902 - DNA, 25 bp, Artificial
  Probe
cagatacggtattcagtgtgatata

SEQ ID NO: 68903 - DNA, 25 bp, Artificial
  Probe
aagatgaaagggaaatgataactgg

SEQ ID NO: 68904 - DNA, 25 bp, Artificial
  Probe
ggtgaagatgaaagggaaatgataa

SEQ ID NO: 68905 - DNA, 25 bp, Artificial
  Probe
aagcatagtgtaataaagggtgaag

SEQ ID NO: 68906 - DNA, 25 bp, Artificial
  Probe
gaagcatagtgtaataaagggtgaa

SEQ ID NO: 68907 - DNA, 25 bp, Artificial
  Probe
tgtaataaagggtgaagatgaaagg

SEQ ID NO: 68908 - DNA, 25 bp, Artificial
  Probe
aaagggtgaagatgaaagggaaatg

SEQ ID NO: 68909 - DNA, 25 bp, Artificial
  Probe
gcatagtgtaataaagggtgaagat

SEQ ID NO: 68910 - DNA, 25 bp, Artificial
  Probe
gtgaagatgaaagggaaatgataac

SEQ ID NO: 68911 - DNA, 25 bp, Artificial
  Probe
tgcagatacggtattcagtgtgata

SEQ ID NO: 68912 - DNA, 25 bp, Artificial
  Probe
tgaagatgaaagggaaatgataact

SEQ ID NO: 68913 - DNA, 25 bp, Artificial
  Probe
agggtgaagatgaaagggaaatgat

SEQ ID NO: 68914 - DNA, 25 bp, Artificial
  Probe
agtgtaataaagggtgaagatgaaa

SEQ ID NO: 68915 - DNA, 25 bp, Artificial
  Probe
ttacagtgtgaaacttgtcattctc

SEQ ID NO: 68916 - DNA, 25 bp, Artificial
  Probe
cttacagtgtgaaacttgtcattct

SEQ ID NO: 68917 - DNA, 25 bp, Artificial
  Probe
tcttacagtgtgaaacttgtcattc

SEQ ID NO: 68918 - DNA, 25 bp, Artificial
  Probe
gaagatgaaagggaaatgataactg

SEQ ID NO: 68919 - DNA, 25 bp, Artificial
  Probe
gcgaagcatagtgtaataaagggtg

SEQ ID NO: 68920 - DNA, 25 bp, Artificial
  Probe
ttcttacagtgtgaaacttgtcatt

SEQ ID NO: 68921 - DNA, 25 bp, Artificial
  Probe
aagggtgaagatgaaagggaaatga

SEQ ID NO: 68922 - DNA, 25 bp, Artificial
  Probe
gtgtaataaagggtgaagatgaaag

SEQ ID NO: 68923 - DNA, 25 bp, Artificial
  Probe
tgaaagggaaatgataactggaggg

SEQ ID NO: 68924 - DNA, 25 bp, Artificial
  Probe
gctaactaatttgctaatcaccatt

SEQ ID NO: 68925 - DNA, 25 bp, Artificial
  Probe
tacagtgtgaaacttgtcattctcg

SEQ ID NO: 68926 - DNA, 25 bp, Artificial
  Probe
atatatcgtgctacttacaattgcg

SEQ ID NO: 68927 - DNA, 25 bp, Artificial
  Probe
ttgcagatacggtattcagtgtgat

SEQ ID NO: 68928 - DNA, 25 bp, Artificial
  Probe
tagtgtaataaagggtgaagatgaa

SEQ ID NO: 68929 - DNA, 25 bp, Artificial
  Probe
tatatcgtgctacttacaattgcgg

SEQ ID NO: 68930 - DNA, 25 bp, Artificial
  Probe
tcttgcagatacggtattcagtgtg

SEQ ID NO: 68931 - DNA, 25 bp, Artificial
  Probe
agatacggtattcagtgtgatatat

SEQ ID NO: 68932 - DNA, 25 bp, Artificial
  Probe
atagtgtaataaagggtgaagatga

SEQ ID NO: 68933 - DNA, 25 bp, Artificial
  Probe
aatcttgcagatacggtattcagtg

SEQ ID NO: 68934 - DNA, 25 bp, Artificial
  Probe
catagtgtaataaagggtgaagatg

SEQ ID NO: 68935 - DNA, 25 bp, Artificial
  Probe
ttatgaactttgttacagattgggc

SEQ ID NO: 68936 - DNA, 25 bp, Artificial
  Probe
ttaaccaaagcaaatgtgagatcag

SEQ ID NO: 68937 - DNA, 25 bp, Artificial
  Probe
ttgttacagattgggcgtactaaat

SEQ ID NO: 68938 - DNA, 25 bp, Artificial
  Probe
tttgttacagattgggcgtactaaa

SEQ ID NO: 68939 - DNA, 25 bp, Artificial
  Probe
tgttacagattgggcgtactaaatg

SEQ ID NO: 68940 - DNA, 25 bp, Artificial
  Probe
ctttgttacagattgggcgtactaa

SEQ ID NO: 68941 - DNA, 25 bp, Artificial
  Probe
atatattgaaatgccaacggagttc

SEQ ID NO: 68942 - DNA, 25 bp, Artificial
  Probe
tatgaactttgttacagattgggcg

SEQ ID NO: 68943 - DNA, 25 bp, Artificial
  Probe
gtcagttcgactatgctgttagtag

SEQ ID NO: 68944 - DNA, 25 bp, Artificial
  Probe
tatattgaaatgccaacggagttcg

SEQ ID NO: 68945 - DNA, 25 bp, Artificial
  Probe
actttgttacagattgggcgtacta

SEQ ID NO: 68946 - DNA, 25 bp, Artificial
  Probe
tcagttcgactatgctgttagtagg

SEQ ID NO: 68947 - DNA, 25 bp, Artificial
  Probe
taaccaaagcaaatgtgagatcagc

SEQ ID NO: 68948 - DNA, 25 bp, Artificial
  Probe
attatgaactttgttacagattggg

SEQ ID NO: 68949 - DNA, 25 bp, Artificial
  Probe
ttaggatgtgtacagttgtagaagg

SEQ ID NO: 68950 - DNA, 25 bp, Artificial
  Probe
ttacagattgggcgtactaaatgct

SEQ ID NO: 68951 - DNA, 25 bp, Artificial
  Probe
gttacagattgggcgtactaaatgc

SEQ ID NO: 68952 - DNA, 25 bp, Artificial
  Probe
taggatgtgtacagttgtagaaggt

SEQ ID NO: 68953 - DNA, 25 bp, Artificial
  Probe
tgaactttgttacagattgggcgta

SEQ ID NO: 68954 - DNA, 25 bp, Artificial
  Probe
cgtcagttcgactatgctgttagta

SEQ ID NO: 68955 - DNA, 25 bp, Artificial
  Probe
gaactttgttacagattgggcgtac

SEQ ID NO: 68956 - DNA, 25 bp, Artificial
  Probe
agattgggcgtactaaatgctcttt

SEQ ID NO: 68957 - DNA, 25 bp, Artificial
  Probe
tacagattgggcgtactaaatgctc

SEQ ID NO: 68958 - DNA, 25 bp, Artificial
  Probe
aactttgttacagattgggcgtact

SEQ ID NO: 68959 - DNA, 25 bp, Artificial
  Probe
aatgctcttttgactgtttccttag

SEQ ID NO: 68960 - DNA, 25 bp, Artificial
  Probe
actaaatgctcttttgactgtttcc

SEQ ID NO: 68961 - DNA, 25 bp, Artificial
  Probe
ctaaatgctcttttgactgtttcct

SEQ ID NO: 68962 - DNA, 25 bp, Artificial
  Probe
aggatgtgtacagttgtagaaggtg

SEQ ID NO: 68963 - DNA, 25 bp, Artificial
  Probe
aaatgctcttttgactgtttcctta

SEQ ID NO: 68964 - DNA, 25 bp, Artificial
  Probe
taaatgctcttttgactgtttcctt

SEQ ID NO: 68965 - DNA, 25 bp, Artificial
  Probe
gttaaccaaagcaaatgtgagatca

SEQ ID NO: 68966 - DNA, 25 bp, Artificial
  Probe
tgttaaccaaagcaaatgtgagatc

SEQ ID NO: 68967 - DNA, 25 bp, Artificial
  Probe
gtgttaaccaaagcaaatgtgagat

SEQ ID NO: 68968 - DNA, 25 bp, Artificial
  Probe
atgaactttgttacagattgggcgt

SEQ ID NO: 68969 - DNA, 25 bp, Artificial
  Probe
cagattgggcgtactaaatgctctt

SEQ ID NO: 68970 - DNA, 25 bp, Artificial
  Probe
ctgtgttaaccaaagcaaatgtgag

SEQ ID NO: 68971 - DNA, 25 bp, Artificial
  Probe
atgctcttttgactgtttccttagg

SEQ ID NO: 68972 - DNA, 25 bp, Artificial
  Probe
cgtactaaatgctcttttgactgtt

SEQ ID NO: 68973 - DNA, 25 bp, Artificial
  Probe
gaatatattgaaatgccaacggagt

SEQ ID NO: 68974 - DNA, 25 bp, Artificial
  Probe
ggaatatattgaaatgccaacggag

SEQ ID NO: 68975 - DNA, 25 bp, Artificial
  Probe
aggaatatattgaaatgccaacgga

SEQ ID NO: 68976 - DNA, 25 bp, Artificial
  Probe
aatatattgaaatgccaacggagtt

SEQ ID NO: 68977 - DNA, 25 bp, Artificial
  Probe
tgtgttaaccaaagcaaatgtgaga

SEQ ID NO: 68978 - DNA, 25 bp, Artificial
  Probe
gaaatgccaacggagttcggattat

SEQ ID NO: 68979 - DNA, 25 bp, Artificial
  Probe
taggaatatattgaaatgccaacgg

SEQ ID NO: 68980 - DNA, 25 bp, Artificial
  Probe
gcttgccttacactctctattctat

SEQ ID NO: 68981 - DNA, 25 bp, Artificial
  Probe
tgcttgccttacactctctattcta

SEQ ID NO: 68982 - DNA, 25 bp, Artificial
  Probe
ttgcttgccttacactctctattct

SEQ ID NO: 68983 - DNA, 25 bp, Artificial
  Probe
cttgccttacactctctattctata

SEQ ID NO: 68984 - DNA, 25 bp, Artificial
  Probe
aagttacaggcaagcatgagtaatt

SEQ ID NO: 68985 - DNA, 25 bp, Artificial
  Probe
tttgcttgccttacactctctattc

SEQ ID NO: 68986 - DNA, 25 bp, Artificial
  Probe
gtttgcttgccttacactctctatt

SEQ ID NO: 68987 - DNA, 25 bp, Artificial
  Probe
tgccttacactctctattctatatt

SEQ ID NO: 68988 - DNA, 25 bp, Artificial
  Probe
ttgccttacactctctattctatat

SEQ ID NO: 68989 - DNA, 25 bp, Artificial
  Probe
gtaagtgtgcttaaatagtggtgtg

SEQ ID NO: 68990 - DNA, 25 bp, Artificial
  Probe
agtaagtgtgcttaaatagtggtgt

SEQ ID NO: 68991 - DNA, 25 bp, Artificial
  Probe
aagtaagtgtgcttaaatagtggtg

SEQ ID NO: 68992 - DNA, 25 bp, Artificial
  Probe
gccttacactctctattctatattg

SEQ ID NO: 68993 - DNA, 25 bp, Artificial
  Probe
tttacaaagttacaggcaagcatga

SEQ ID NO: 68994 - DNA, 25 bp, Artificial
  Probe
aaagtaagtgtgcttaaatagtggt

SEQ ID NO: 68995 - DNA, 25 bp, Artificial
  Probe
taagtgtgcttaaatagtggtgtgc

SEQ ID NO: 68996 - DNA, 25 bp, Artificial
  Probe
ttacaaagttacaggcaagcatgag

SEQ ID NO: 68997 - DNA, 25 bp, Artificial
  Probe
tccatttaacactgggagagtttaa

SEQ ID NO: 68998 - DNA, 25 bp, Artificial
  Probe
ttccatttaacactgggagagttta

SEQ ID NO: 68999 - DNA, 25 bp, Artificial
  Probe
gaaagtaagtgtgcttaaatagtgg

SEQ ID NO: 69000 - DNA, 25 bp, Artificial
  Probe
cttccatttaacactgggagagttt

SEQ ID NO: 69001 - DNA, 25 bp, Artificial
  Probe
agttacaggcaagcatgagtaattt

SEQ ID NO: 69002 - DNA, 25 bp, Artificial
  Probe
aaagttacaggcaagcatgagtaat

SEQ ID NO: 69003 - DNA, 25 bp, Artificial
  Probe
taacacctttaatctcacttggttt

SEQ ID NO: 69004 - DNA, 25 bp, Artificial
  Probe
ttaacacctttaatctcacttggtt

SEQ ID NO: 69005 - DNA, 25 bp, Artificial
  Probe
ttgtaagtgttctctcatcaacatt

SEQ ID NO: 69006 - DNA, 25 bp, Artificial
  Probe
tacaaagttacaggcaagcatgagt

SEQ ID NO: 69007 - DNA, 25 bp, Artificial
  Probe
ctatttgagccactttgcttcttta

SEQ ID NO: 69008 - DNA, 25 bp, Artificial
  Probe
acaaagttacaggcaagcatgagta

SEQ ID NO: 69009 - DNA, 25 bp, Artificial
  Probe
tatttgagccactttgcttctttaa

SEQ ID NO: 69010 - DNA, 25 bp, Artificial
  Probe
attttacaaagttacaggcaagcat

SEQ ID NO: 69011 - DNA, 25 bp, Artificial
  Probe
caaagttacaggcaagcatgagtaa

SEQ ID NO: 69012 - DNA, 25 bp, Artificial
  Probe
cattttacaaagttacaggcaagca

SEQ ID NO: 69013 - DNA, 25 bp, Artificial
  Probe
acattttacaaagttacaggcaagc

SEQ ID NO: 69014 - DNA, 25 bp, Artificial
  Probe
agaaagtaagtgtgcttaaatagtg

SEQ ID NO: 69015 - DNA, 25 bp, Artificial
  Probe
acactctctattctatattgtctct

SEQ ID NO: 69016 - DNA, 25 bp, Artificial
  Probe
cttggttcctatttgagccactttg

SEQ ID NO: 69017 - DNA, 25 bp, Artificial
  Probe
tcaacattttacaaagttacaggca

SEQ ID NO: 69018 - DNA, 25 bp, Artificial
  Probe
gagaaagtaagtgtgcttaaatagt

SEQ ID NO: 69019 - DNA, 25 bp, Artificial
  Probe
aaagagaaagtaagtgtgcttaaat

SEQ ID NO: 69020 - DNA, 25 bp, Artificial
  Probe
ccttccatttaacactgggagagtt

SEQ ID NO: 69021 - DNA, 25 bp, Artificial
  Probe
caacattttacaaagttacaggcaa

SEQ ID NO: 69022 - DNA, 25 bp, Artificial
  Probe
ctgggatgttatcaaatacaactaa

SEQ ID NO: 69023 - DNA, 25 bp, Artificial
  Probe
agagaaagtaagtgtgcttaaatag

SEQ ID NO: 69024 - DNA, 25 bp, Artificial
  Probe
aacattttacaaagttacaggcaag

SEQ ID NO: 69025 - DNA, 25 bp, Artificial
  Probe
taacatccaagtctgattagaaccg

SEQ ID NO: 69026 - DNA, 25 bp, Artificial
  Probe
ataacatccaagtctgattagaacc

SEQ ID NO: 69027 - DNA, 25 bp, Artificial
  Probe
aacatccaagtctgattagaaccgc

SEQ ID NO: 69028 - DNA, 25 bp, Artificial
  Probe
aataacatccaagtctgattagaac

SEQ ID NO: 69029 - DNA, 25 bp, Artificial
  Probe
cttcagaaagaccaggaaatcaagg

SEQ ID NO: 69030 - DNA, 25 bp, Artificial
  Probe
ttcagaaagaccaggaaatcaagga

SEQ ID NO: 69031 - DNA, 25 bp, Artificial
  Probe
tgtgggactgtatatgttgtcattt

SEQ ID NO: 69032 - DNA, 25 bp, Artificial
  Probe
ttgtgggactgtatatgttgtcatt

SEQ ID NO: 69033 - DNA, 25 bp, Artificial
  Probe
tttgtgggactgtatatgttgtcat

SEQ ID NO: 69034 - DNA, 25 bp, Artificial
  Probe
tcagaaagaccaggaaatcaaggac

SEQ ID NO: 69035 - DNA, 25 bp, Artificial
  Probe
aagaccaggaaatcaaggacctaaa

SEQ ID NO: 69036 - DNA, 25 bp, Artificial
  Probe
aaagaccaggaaatcaaggacctaa

SEQ ID NO: 69037 - DNA, 25 bp, Artificial
  Probe
ccttcagaaagaccaggaaatcaag

SEQ ID NO: 69038 - DNA, 25 bp, Artificial
  Probe
gggaaataacatccaagtctgatta

SEQ ID NO: 69039 - DNA, 25 bp, Artificial
  Probe
gaaagaccaggaaatcaaggaccta

SEQ ID NO: 69040 - DNA, 25 bp, Artificial
  Probe
aacagaagatagctgaagtcatggc

SEQ ID NO: 69041 - DNA, 25 bp, Artificial
  Probe
aaacagaagatagctgaagtcatgg

SEQ ID NO: 69042 - DNA, 25 bp, Artificial
  Probe
cagaaagaccaggaaatcaaggacc

SEQ ID NO: 69043 - DNA, 25 bp, Artificial
  Probe
aagttgatattgtgttttgtgggac

SEQ ID NO: 69044 - DNA, 25 bp, Artificial
  Probe
gtgttttgtgggactgtatatgttg

SEQ ID NO: 69045 - DNA, 25 bp, Artificial
  Probe
tgatattgtgttttgtgggactgta

SEQ ID NO: 69046 - DNA, 25 bp, Artificial
  Probe
attgtgttttgtgggactgtatatg

SEQ ID NO: 69047 - DNA, 25 bp, Artificial
  Probe
aaagttgatattgtgttttgtggga

SEQ ID NO: 69048 - DNA, 25 bp, Artificial
  Probe
tgttttgtgggactgtatatgttgt

SEQ ID NO: 69049 - DNA, 25 bp, Artificial
  Probe
tgtgttttgtgggactgtatatgtt

SEQ ID NO: 69050 - DNA, 25 bp, Artificial
  Probe
ttgtgttttgtgggactgtatatgt

SEQ ID NO: 69051 - DNA, 25 bp, Artificial
  Probe
gatattgtgttttgtgggactgtat

SEQ ID NO: 69052 - DNA, 25 bp, Artificial
  Probe
gttgatattgtgttttgtgggactg

SEQ ID NO: 69053 - DNA, 25 bp, Artificial
  Probe
tttagaagacctcacaggactttgc

SEQ ID NO: 69054 - DNA, 25 bp, Artificial
  Probe
tcaaggacctaaaacagaagatagc

SEQ ID NO: 69055 - DNA, 25 bp, Artificial
  Probe
ggaaatcaaggacctaaaacagaag

SEQ ID NO: 69056 - DNA, 25 bp, Artificial
  Probe
ggaaataacatccaagtctgattag

SEQ ID NO: 69057 - DNA, 25 bp, Artificial
  Probe
ttgatattgtgttttgtgggactgt

SEQ ID NO: 69058 - DNA, 25 bp, Artificial
  Probe
gaaataacatccaagtctgattaga

SEQ ID NO: 69059 - DNA, 25 bp, Artificial
  Probe
gaaatcaaggacctaaaacagaaga

SEQ ID NO: 69060 - DNA, 25 bp, Artificial
  Probe
acatccaagtctgattagaaccgcc

SEQ ID NO: 69061 - DNA, 25 bp, Artificial
  Probe
agttgatattgtgttttgtgggact

SEQ ID NO: 69062 - DNA, 25 bp, Artificial
  Probe
tattgtgttttgtgggactgtatat

SEQ ID NO: 69063 - DNA, 25 bp, Artificial
  Probe
atattgtgttttgtgggactgtata

SEQ ID NO: 69064 - DNA, 25 bp, Artificial
  Probe
cctcacaggactttgcagtttattt

SEQ ID NO: 69065 - DNA, 25 bp, Artificial
  Probe
aaatcaaggacctaaaacagaagat

SEQ ID NO: 69066 - DNA, 25 bp, Artificial
  Probe
gttttgtgggactgtatatgttgtc

SEQ ID NO: 69067 - DNA, 25 bp, Artificial
  Probe
ttttgtgggactgtatatgttgtca

SEQ ID NO: 69068 - DNA, 25 bp, Artificial
  Probe
gtgggactgtatatgttgtcatttt

SEQ ID NO: 69069 - DNA, 25 bp, Artificial
  Probe
aaataacatccaagtctgattagaa

SEQ ID NO: 69070 - DNA, 25 bp, Artificial
  Probe
aacttaatcgctttggagaacattc

SEQ ID NO: 69071 - DNA, 25 bp, Artificial
  Probe
cttatagtgggcggtttacaattac

SEQ ID NO: 69072 - DNA, 25 bp, Artificial
  Probe
ccttatagtgggcggtttacaatta

SEQ ID NO: 69073 - DNA, 25 bp, Artificial
  Probe
atgaatagtttgaacccttccttgt

SEQ ID NO: 69074 - DNA, 25 bp, Artificial
  Probe
tgaatagtttgaacccttccttgtc

SEQ ID NO: 69075 - DNA, 25 bp, Artificial
  Probe
caacttaatcgctttggagaacatt

SEQ ID NO: 69076 - DNA, 25 bp, Artificial
  Probe
tatagtgggcggtttacaattactt

SEQ ID NO: 69077 - DNA, 25 bp, Artificial
  Probe
ttatagtgggcggtttacaattact

SEQ ID NO: 69078 - DNA, 25 bp, Artificial
  Probe
gaatagtttgaacccttccttgtca

SEQ ID NO: 69079 - DNA, 25 bp, Artificial
  Probe
catgaatagtttgaacccttccttg

SEQ ID NO: 69080 - DNA, 25 bp, Artificial
  Probe
atagtgggcggtttacaattacttg

SEQ ID NO: 69081 - DNA, 25 bp, Artificial
  Probe
atcccatgaatagtttgaacccttc

SEQ ID NO: 69082 - DNA, 25 bp, Artificial
  Probe
ccatgaatagtttgaacccttcctt

SEQ ID NO: 69083 - DNA, 25 bp, Artificial
  Probe
catcccatgaatagtttgaaccctt

SEQ ID NO: 69084 - DNA, 25 bp, Artificial
  Probe
cagttgcgacacttgattggaattg

SEQ ID NO: 69085 - DNA, 25 bp, Artificial
  Probe
ttgcgacacttgattggaattggaa

SEQ ID NO: 69086 - DNA, 25 bp, Artificial
  Probe
atgtaaccatgagagagccagagag

SEQ ID NO: 69087 - DNA, 25 bp, Artificial
  Probe
aacagttgcgacacttgattggaat

SEQ ID NO: 69088 - DNA, 25 bp, Artificial
  Probe
cccaatcccactaataataaacaaa

SEQ ID NO: 69089 - DNA, 25 bp, Artificial
  Probe
acagttgcgacacttgattggaatt

SEQ ID NO: 69090 - DNA, 25 bp, Artificial
  Probe
acttaatcgctttggagaacattcc

SEQ ID NO: 69091 - DNA, 25 bp, Artificial
  Probe
cccatgaatagtttgaacccttcct

SEQ ID NO: 69092 - DNA, 25 bp, Artificial
  Probe
tcccatgaatagtttgaacccttcc

SEQ ID NO: 69093 - DNA, 25 bp, Artificial
  Probe
gttgcgacacttgattggaattgga

SEQ ID NO: 69094 - DNA, 25 bp, Artificial
  Probe
cttaatcgctttggagaacattccc

SEQ ID NO: 69095 - DNA, 25 bp, Artificial
  Probe
ccaccccaatcccactaataataaa

SEQ ID NO: 69096 - DNA, 25 bp, Artificial
  Probe
accccaatcccactaataataaaca

SEQ ID NO: 69097 - DNA, 25 bp, Artificial
  Probe
caccccaatcccactaataataaac

SEQ ID NO: 69098 - DNA, 25 bp, Artificial
  Probe
taatcgctttggagaacattccctt

SEQ ID NO: 69099 - DNA, 25 bp, Artificial
  Probe
ttaatcgctttggagaacattccct

SEQ ID NO: 69100 - DNA, 25 bp, Artificial
  Probe
cacttgattggaattggaaaatgga

SEQ ID NO: 69101 - DNA, 25 bp, Artificial
  Probe
acttgattggaattggaaaatggaa

SEQ ID NO: 69102 - DNA, 25 bp, Artificial
  Probe
acacttgattggaattggaaaatgg

SEQ ID NO: 69103 - DNA, 25 bp, Artificial
  Probe
aaatggaagcgtaaatttcgttaaa

SEQ ID NO: 69104 - DNA, 25 bp, Artificial
  Probe
ggaattggaaaatggaagcgtaaat

SEQ ID NO: 69105 - DNA, 25 bp, Artificial
  Probe
gacacttgattggaattggaaaatg

SEQ ID NO: 69106 - DNA, 25 bp, Artificial
  Probe
cgacacttgattggaattggaaaat

SEQ ID NO: 69107 - DNA, 25 bp, Artificial
  Probe
ttgattggaattggaaaatggaagc

SEQ ID NO: 69108 - DNA, 25 bp, Artificial
  Probe
agttgcgacacttgattggaattgg

SEQ ID NO: 69109 - DNA, 25 bp, Artificial
  Probe
ccccaatcccactaataataaacaa

SEQ ID NO: 69110 - DNA, 25 bp, Artificial
  Probe
atagtttgaacccttccttgtcaat

SEQ ID NO: 69111 - DNA, 25 bp, Artificial
  Probe
aatagtttgaacccttccttgtcaa

SEQ ID NO: 69112 - DNA, 25 bp, Artificial
  Probe
gcatcccatgaatagtttgaaccct

SEQ ID NO: 69113 - DNA, 25 bp, Artificial
  Probe
cttgattggaattggaaaatggaag

SEQ ID NO: 69114 - DNA, 25 bp, Artificial
  Probe
ataataaacaaaatacactcggggt

SEQ ID NO: 69115 - DNA, 25 bp, Artificial
  Probe
ttggattcgtgctgttctacaataa

SEQ ID NO: 69116 - DNA, 25 bp, Artificial
  Probe
cttggattcgtgctgttctacaata

SEQ ID NO: 69117 - DNA, 25 bp, Artificial
  Probe
tggattcgtgctgttctacaataac

SEQ ID NO: 69118 - DNA, 25 bp, Artificial
  Probe
tcttggattcgtgctgttctacaat

SEQ ID NO: 69119 - DNA, 25 bp, Artificial
  Probe
gattaggaagaaagaccaggtgaac

SEQ ID NO: 69120 - DNA, 25 bp, Artificial
  Probe
tgattaggaagaaagaccaggtgaa

SEQ ID NO: 69121 - DNA, 25 bp, Artificial
  Probe
gttctacaataacacacaaatcctg

SEQ ID NO: 69122 - DNA, 25 bp, Artificial
  Probe
ctgtgaggctgattaggaagaaaga

SEQ ID NO: 69123 - DNA, 25 bp, Artificial
  Probe
tgtgaggctgattaggaagaaagac

SEQ ID NO: 69124 - DNA, 25 bp, Artificial
  Probe
ttctacaataacacacaaatcctgt

SEQ ID NO: 69125 - DNA, 25 bp, Artificial
  Probe
attaggaagaaagaccaggtgaacc

SEQ ID NO: 69126 - DNA, 25 bp, Artificial
  Probe
ctgattaggaagaaagaccaggtga

SEQ ID NO: 69127 - DNA, 25 bp, Artificial
  Probe
gattcgtgctgttctacaataacac

SEQ ID NO: 69128 - DNA, 25 bp, Artificial
  Probe
gtgaggctgattaggaagaaagacc

SEQ ID NO: 69129 - DNA, 25 bp, Artificial
  Probe
attcgtgctgttctacaataacaca

SEQ ID NO: 69130 - DNA, 25 bp, Artificial
  Probe
ggattcgtgctgttctacaataaca

SEQ ID NO: 69131 - DNA, 25 bp, Artificial
  Probe
tgaggctgattaggaagaaagacca

SEQ ID NO: 69132 - DNA, 25 bp, Artificial
  Probe
ttcgtgctgttctacaataacacac

SEQ ID NO: 69133 - DNA, 25 bp, Artificial
  Probe
gaggctgattaggaagaaagaccag

SEQ ID NO: 69134 - DNA, 25 bp, Artificial
  Probe
cgtgctgttctacaataacacacaa

SEQ ID NO: 69135 - DNA, 25 bp, Artificial
  Probe
cctgtgaggctgattaggaagaaag

SEQ ID NO: 69136 - DNA, 25 bp, Artificial
  Probe
tgcagtatttatgtgtatatggagt

SEQ ID NO: 69137 - DNA, 25 bp, Artificial
  Probe
gctgattaggaagaaagaccaggtg

SEQ ID NO: 69138 - DNA, 25 bp, Artificial
  Probe
tcgtgctgttctacaataacacaca

SEQ ID NO: 69139 - DNA, 25 bp, Artificial
  Probe
gtgctgttctacaataacacacaaa

SEQ ID NO: 69140 - DNA, 25 bp, Artificial
  Probe
tgctgttctacaataacacacaaat

SEQ ID NO: 69141 - DNA, 25 bp, Artificial
  Probe
ttaggaagaaagaccaggtgaaccc

SEQ ID NO: 69142 - DNA, 25 bp, Artificial
  Probe
gctgttctacaataacacacaaatc

SEQ ID NO: 69143 - DNA, 25 bp, Artificial
  Probe
tgttctacaataacacacaaatcct

SEQ ID NO: 69144 - DNA, 25 bp, Artificial
  Probe
ttgcagtatttatgtgtatatggag

SEQ ID NO: 69145 - DNA, 25 bp, Artificial
  Probe
cttgcagtatttatgtgtatatgga

SEQ ID NO: 69146 - DNA, 25 bp, Artificial
  Probe
aggctgattaggaagaaagaccagg

SEQ ID NO: 69147 - DNA, 25 bp, Artificial
  Probe
ctgttctacaataacacacaaatcc

SEQ ID NO: 69148 - DNA, 25 bp, Artificial
  Probe
acttgcagtatttatgtgtatatgg

SEQ ID NO: 69149 - DNA, 25 bp, Artificial
  Probe
ggctgattaggaagaaagaccaggt

SEQ ID NO: 69150 - DNA, 25 bp, Artificial
  Probe
aagaatgacgtttacatggaaaatg

SEQ ID NO: 69151 - DNA, 25 bp, Artificial
  Probe
atcctgtgaggctgattaggaagaa

SEQ ID NO: 69152 - DNA, 25 bp, Artificial
  Probe
aatcctgtgaggctgattaggaaga

SEQ ID NO: 69153 - DNA, 25 bp, Artificial
  Probe
aaaagaatgacgtttacatggaaaa

SEQ ID NO: 69154 - DNA, 25 bp, Artificial
  Probe
aaagaatgacgtttacatggaaaat

SEQ ID NO: 69155 - DNA, 25 bp, Artificial
  Probe
tacaataacacacaaatcctgtgag

SEQ ID NO: 69156 - DNA, 25 bp, Artificial
  Probe
ctacaataacacacaaatcctgtga

SEQ ID NO: 69157 - DNA, 25 bp, Artificial
  Probe
tctacaataacacacaaatcctgtg

SEQ ID NO: 69158 - DNA, 25 bp, Artificial
  Probe
aaatcctgtgaggctgattaggaag

SEQ ID NO: 69159 - DNA, 25 bp, Artificial
  Probe
acaataacacacaaatcctgtgagg

SEQ ID NO: 69160 - DNA, 25 bp, Artificial
  Probe
ggacggtttagccatctataattct

SEQ ID NO: 69161 - DNA, 25 bp, Artificial
  Probe
atgaccttgaagtttctgagtgatg

SEQ ID NO: 69162 - DNA, 25 bp, Artificial
  Probe
taggaagatactgcggtgatgaact

SEQ ID NO: 69163 - DNA, 25 bp, Artificial
  Probe
gtaggaagatactgcggtgatgaac

SEQ ID NO: 69164 - DNA, 25 bp, Artificial
  Probe
gctgtttggctgactatgtagaaat

SEQ ID NO: 69165 - DNA, 25 bp, Artificial
  Probe
ctgtttggctgactatgtagaaata

SEQ ID NO: 69166 - DNA, 25 bp, Artificial
  Probe
tttggacctcatttgttctcaattt

SEQ ID NO: 69167 - DNA, 25 bp, Artificial
  Probe
gacggtttagccatctataattctt

SEQ ID NO: 69168 - DNA, 25 bp, Artificial
  Probe
tgtaggaagatactgcggtgatgaa

SEQ ID NO: 69169 - DNA, 25 bp, Artificial
  Probe
ttgtaggaagatactgcggtgatga

SEQ ID NO: 69170 - DNA, 25 bp, Artificial
  Probe
cttcccaaatgagtatgacgacaac

SEQ ID NO: 69171 - DNA, 25 bp, Artificial
  Probe
tgtttggctgactatgtagaaatat

SEQ ID NO: 69172 - DNA, 25 bp, Artificial
  Probe
catgaccttgaagtttctgagtgat

SEQ ID NO: 69173 - DNA, 25 bp, Artificial
  Probe
tttggactttgaccttgaacatgat

SEQ ID NO: 69174 - DNA, 25 bp, Artificial
  Probe
ttggactttgaccttgaacatgatc

SEQ ID NO: 69175 - DNA, 25 bp, Artificial
  Probe
acggtttagccatctataattctta

SEQ ID NO: 69176 - DNA, 25 bp, Artificial
  Probe
tttacagacccgaagcgaatcttta

SEQ ID NO: 69177 - DNA, 25 bp, Artificial
  Probe
ctttgtaggaagatactgcggtgat

SEQ ID NO: 69178 - DNA, 25 bp, Artificial
  Probe
gactttgaccttgaacatgatccag

SEQ ID NO: 69179 - DNA, 25 bp, Artificial
  Probe
ttacagacccgaagcgaatctttaa

SEQ ID NO: 69180 - DNA, 25 bp, Artificial
  Probe
aggaagatactgcggtgatgaactt

SEQ ID NO: 69181 - DNA, 25 bp, Artificial
  Probe
tttgtaggaagatactgcggtgatg

SEQ ID NO: 69182 - DNA, 25 bp, Artificial
  Probe
ctggacggtttagccatctataatt

SEQ ID NO: 69183 - DNA, 25 bp, Artificial
  Probe
tggacggtttagccatctataattc

SEQ ID NO: 69184 - DNA, 25 bp, Artificial
  Probe
cttccagattaaatacgtcacagtg

SEQ ID NO: 69185 - DNA, 25 bp, Artificial
  Probe
gcttccagattaaatacgtcacagt

SEQ ID NO: 69186 - DNA, 25 bp, Artificial
  Probe
aagatactgcggtgatgaacttcca

SEQ ID NO: 69187 - DNA, 25 bp, Artificial
  Probe
ggctgtttggctgactatgtagaaa

SEQ ID NO: 69188 - DNA, 25 bp, Artificial
  Probe
ttcccaaatgagtatgacgacaacc

SEQ ID NO: 69189 - DNA, 25 bp, Artificial
  Probe
tgaccttgaagtttctgagtgatgc

SEQ ID NO: 69190 - DNA, 25 bp, Artificial
  Probe
caaatgagtatgacgacaaccaggt

SEQ ID NO: 69191 - DNA, 25 bp, Artificial
  Probe
ggcttccagattaaatacgtcacag

SEQ ID NO: 69192 - DNA, 25 bp, Artificial
  Probe
gcttcccaaatgagtatgacgacaa

SEQ ID NO: 69193 - DNA, 25 bp, Artificial
  Probe
aatgagtatgacgacaaccaggttt

SEQ ID NO: 69194 - DNA, 25 bp, Artificial
  Probe
aaatgagtatgacgacaaccaggtt

SEQ ID NO: 69195 - DNA, 25 bp, Artificial
  Probe
cagacccgaagcgaatctttaaatc

SEQ ID NO: 69196 - DNA, 25 bp, Artificial
  Probe
tacagacccgaagcgaatctttaaa

SEQ ID NO: 69197 - DNA, 25 bp, Artificial
  Probe
ctttacagacccgaagcgaatcttt

SEQ ID NO: 69198 - DNA, 25 bp, Artificial
  Probe
atactgcggtgatgaacttccagaa

SEQ ID NO: 69199 - DNA, 25 bp, Artificial
  Probe
tggctgactatgtagaaatatatga

SEQ ID NO: 69200 - DNA, 25 bp, Artificial
  Probe
gtttggctgactatgtagaaatata

SEQ ID NO: 69201 - DNA, 25 bp, Artificial
  Probe
cttttggacctcatttgttctcaat

SEQ ID NO: 69202 - DNA, 25 bp, Artificial
  Probe
ccaaatgagtatgacgacaaccagg

SEQ ID NO: 69203 - DNA, 25 bp, Artificial
  Probe
cccaaatgagtatgacgacaaccag

SEQ ID NO: 69204 - DNA, 25 bp, Artificial
  Probe
ggacctcatttgttctcaattttgt

SEQ ID NO: 69205 - DNA, 25 bp, Artificial
  Probe
gtgagattattactgtcagcgatgg

SEQ ID NO: 69206 - DNA, 25 bp, Artificial
  Probe
ggtgagattattactgtcagcgatg

SEQ ID NO: 69207 - DNA, 25 bp, Artificial
  Probe
gattgtattagaagaactgaggaga

SEQ ID NO: 69208 - DNA, 25 bp, Artificial
  Probe
agattgtattagaagaactgaggag

SEQ ID NO: 69209 - DNA, 25 bp, Artificial
  Probe
tgtggagtcgattcagattgtatta

SEQ ID NO: 69210 - DNA, 25 bp, Artificial
  Probe
tggagtcgattcagattgtattaga

SEQ ID NO: 69211 - DNA, 25 bp, Artificial
  Probe
gtggagtcgattcagattgtattag

SEQ ID NO: 69212 - DNA, 25 bp, Artificial
  Probe
attgtattagaagaactgaggagaa

SEQ ID NO: 69213 - DNA, 25 bp, Artificial
  Probe
attagaagaactgaggagaaaggga

SEQ ID NO: 69214 - DNA, 25 bp, Artificial
  Probe
ttagaagaactgaggagaaagggaa

SEQ ID NO: 69215 - DNA, 25 bp, Artificial
  Probe
tattagaagaactgaggagaaaggg

SEQ ID NO: 69216 - DNA, 25 bp, Artificial
  Probe
cagattgtattagaagaactgagga

SEQ ID NO: 69217 - DNA, 25 bp, Artificial
  Probe
cagaggtcaaattaagggaaggttt

SEQ ID NO: 69218 - DNA, 25 bp, Artificial
  Probe
agaggtcaaattaagggaaggtttc

SEQ ID NO: 69219 - DNA, 25 bp, Artificial
  Probe
tagaagaactgaggagaaagggaac

SEQ ID NO: 69220 - DNA, 25 bp, Artificial
  Probe
agacacacgaggagaagagattcat

SEQ ID NO: 69221 - DNA, 25 bp, Artificial
  Probe
ctgtggagtcgattcagattgtatt

SEQ ID NO: 69222 - DNA, 25 bp, Artificial
  Probe
ggagtcgattcagattgtattagaa

SEQ ID NO: 69223 - DNA, 25 bp, Artificial
  Probe
gtattagaagaactgaggagaaagg

SEQ ID NO: 69224 - DNA, 25 bp, Artificial
  Probe
tcagaggtcaaattaagggaaggtt

SEQ ID NO: 69225 - DNA, 25 bp, Artificial
  Probe
cgattcagattgtattagaagaact

SEQ ID NO: 69226 - DNA, 25 bp, Artificial
  Probe
acaagggtgagattattactgtcag

SEQ ID NO: 69227 - DNA, 25 bp, Artificial
  Probe
caagggtgagattattactgtcagc

SEQ ID NO: 69228 - DNA, 25 bp, Artificial
  Probe
ctcagaggtcaaattaagggaaggt

SEQ ID NO: 69229 - DNA, 25 bp, Artificial
  Probe
gacacacgaggagaagagattcatg

SEQ ID NO: 69230 - DNA, 25 bp, Artificial
  Probe
tgtattagaagaactgaggagaaag

SEQ ID NO: 69231 - DNA, 25 bp, Artificial
  Probe
cacaagggtgagattattactgtca

SEQ ID NO: 69232 - DNA, 25 bp, Artificial
  Probe
gagacacacgaggagaagagattca

SEQ ID NO: 69233 - DNA, 25 bp, Artificial
  Probe
gtcaaagctcagaggtcaaattaag

SEQ ID NO: 69234 - DNA, 25 bp, Artificial
  Probe
agtcgattcagattgtattagaaga

SEQ ID NO: 69235 - DNA, 25 bp, Artificial
  Probe
gagcacaagggtgagattattactg

SEQ ID NO: 69236 - DNA, 25 bp, Artificial
  Probe
ttgtattagaagaactgaggagaaa

SEQ ID NO: 69237 - DNA, 25 bp, Artificial
  Probe
tcaaagctcagaggtcaaattaagg

SEQ ID NO: 69238 - DNA, 25 bp, Artificial
  Probe
gcacaagggtgagattattactgtc

SEQ ID NO: 69239 - DNA, 25 bp, Artificial
  Probe
gagtcgattcagattgtattagaag

SEQ ID NO: 69240 - DNA, 25 bp, Artificial
  Probe
ggtcaaagctcagaggtcaaattaa

SEQ ID NO: 69241 - DNA, 25 bp, Artificial
  Probe
tgagattattactgtcagcgatggg

SEQ ID NO: 69242 - DNA, 25 bp, Artificial
  Probe
gggtgagattattactgtcagcgat

SEQ ID NO: 69243 - DNA, 25 bp, Artificial
  Probe
agcacaagggtgagattattactgt

SEQ ID NO: 69244 - DNA, 25 bp, Artificial
  Probe
aagggtgagattattactgtcagcg

SEQ ID NO: 69245 - DNA, 25 bp, Artificial
  Probe
aagctcagaggtcaaattaagggaa

SEQ ID NO: 69246 - DNA, 25 bp, Artificial
  Probe
aaagctcagaggtcaaattaaggga

SEQ ID NO: 69247 - DNA, 25 bp, Artificial
  Probe
caaagctcagaggtcaaattaaggg

SEQ ID NO: 69248 - DNA, 25 bp, Artificial
  Probe
tcgattcagattgtattagaagaac

SEQ ID NO: 69249 - DNA, 25 bp, Artificial
  Probe
gtcgattcagattgtattagaagaa

SEQ ID NO: 69250 - DNA, 25 bp, Artificial
  Probe
caacaaacataactacaaactccga

SEQ ID NO: 69251 - DNA, 25 bp, Artificial
  Probe
acaacaaacataactacaaactccg

SEQ ID NO: 69252 - DNA, 25 bp, Artificial
  Probe
acaacacacaacaaacataactaca

SEQ ID NO: 69253 - DNA, 25 bp, Artificial
  Probe
acacaacacacaacaaacataacta

SEQ ID NO: 69254 - DNA, 25 bp, Artificial
  Probe
cacaacacacaacaaacataactac

SEQ ID NO: 69255 - DNA, 25 bp, Artificial
  Probe
aacaaacataactacaaactccgag

SEQ ID NO: 69256 - DNA, 25 bp, Artificial
  Probe
cacaacaaacataactacaaactcc

SEQ ID NO: 69257 - DNA, 25 bp, Artificial
  Probe
acaaacataactacaaactccgagg

SEQ ID NO: 69258 - DNA, 25 bp, Artificial
  Probe
acacacaacaaacataactacaaac

SEQ ID NO: 69259 - DNA, 25 bp, Artificial
  Probe
caacacacaacaaacataactacaa

SEQ ID NO: 69260 - DNA, 25 bp, Artificial
  Probe
aaagtgttgtgggagaagatttgag

SEQ ID NO: 69261 - DNA, 25 bp, Artificial
  Probe
ccaagattgctagaggaaggatgtg

SEQ ID NO: 69262 - DNA, 25 bp, Artificial
  Probe
cacacaacaaacataactacaaact

SEQ ID NO: 69263 - DNA, 25 bp, Artificial
  Probe
caaacataactacaaactccgaggg

SEQ ID NO: 69264 - DNA, 25 bp, Artificial
  Probe
acacaacaaacataactacaaactc

SEQ ID NO: 69265 - DNA, 25 bp, Artificial
  Probe
aacacacaacaaacataactacaaa

SEQ ID NO: 69266 - DNA, 25 bp, Artificial
  Probe
ctccaagattgctagaggaaggatg

SEQ ID NO: 69267 - DNA, 25 bp, Artificial
  Probe
caagattgctagaggaaggatgtgc

SEQ ID NO: 69268 - DNA, 25 bp, Artificial
  Probe
tccaagattgctagaggaaggatgt

SEQ ID NO: 69269 - DNA, 25 bp, Artificial
  Probe
aagtgttgtgggagaagatttgagg

SEQ ID NO: 69270 - DNA, 25 bp, Artificial
  Probe
ttgtgggagaagatttgaggctttc

SEQ ID NO: 69271 - DNA, 25 bp, Artificial
  Probe
aattcgctaaagagccgataatcag

SEQ ID NO: 69272 - DNA, 25 bp, Artificial
  Probe
aagattgctagaggaaggatgtgcc

SEQ ID NO: 69273 - DNA, 25 bp, Artificial
  Probe
gttgtgggagaagatttgaggcttt

SEQ ID NO: 69274 - DNA, 25 bp, Artificial
  Probe
caattcgctaaagagccgataatca

SEQ ID NO: 69275 - DNA, 25 bp, Artificial
  Probe
gctccaagattgctagaggaaggat

SEQ ID NO: 69276 - DNA, 25 bp, Artificial
  Probe
ccaattcgctaaagagccgataatc

SEQ ID NO: 69277 - DNA, 25 bp, Artificial
  Probe
tccaattcgctaaagagccgataat

SEQ ID NO: 69278 - DNA, 25 bp, Artificial
  Probe
accatttccttccttgtacataaac

SEQ ID NO: 69279 - DNA, 25 bp, Artificial
  Probe
aaacataactacaaactccgagggg

SEQ ID NO: 69280 - DNA, 25 bp, Artificial
  Probe
gattgctagaggaaggatgtgccag

SEQ ID NO: 69281 - DNA, 25 bp, Artificial
  Probe
attcgctaaagagccgataatcagg

SEQ ID NO: 69282 - DNA, 25 bp, Artificial
  Probe
actgtctgtaccagctccaagattg

SEQ ID NO: 69283 - DNA, 25 bp, Artificial
  Probe
cactgtctgtaccagctccaagatt

SEQ ID NO: 69284 - DNA, 25 bp, Artificial
  Probe
tgtgggagaagatttgaggctttca

SEQ ID NO: 69285 - DNA, 25 bp, Artificial
  Probe
tgttgtgggagaagatttgaggctt

SEQ ID NO: 69286 - DNA, 25 bp, Artificial
  Probe
gtccaattcgctaaagagccgataa

SEQ ID NO: 69287 - DNA, 25 bp, Artificial
  Probe
taccatttccttccttgtacataaa

SEQ ID NO: 69288 - DNA, 25 bp, Artificial
  Probe
tgtaccagctccaagattgctagag

SEQ ID NO: 69289 - DNA, 25 bp, Artificial
  Probe
ctgtaccagctccaagattgctaga

SEQ ID NO: 69290 - DNA, 25 bp, Artificial
  Probe
tctgtaccagctccaagattgctag

SEQ ID NO: 69291 - DNA, 25 bp, Artificial
  Probe
cctcacagactgactgctcaattcc

SEQ ID NO: 69292 - DNA, 25 bp, Artificial
  Probe
gtctgtaccagctccaagattgcta

SEQ ID NO: 69293 - DNA, 25 bp, Artificial
  Probe
gtgggagaagatttgaggctttcaa

SEQ ID NO: 69294 - DNA, 25 bp, Artificial
  Probe
gtgttgtgggagaagatttgaggct

SEQ ID NO: 69295 - DNA, 25 bp, Artificial
  Probe
aatgtgaagattccttacctgactt

SEQ ID NO: 69296 - DNA, 25 bp, Artificial
  Probe
caatgtgaagattccttacctgact

SEQ ID NO: 69297 - DNA, 25 bp, Artificial
  Probe
aacaatgtgaagattccttacctga

SEQ ID NO: 69298 - DNA, 25 bp, Artificial
  Probe
tgtgaagattccttacctgacttaa

SEQ ID NO: 69299 - DNA, 25 bp, Artificial
  Probe
atgtgaagattccttacctgactta

SEQ ID NO: 69300 - DNA, 25 bp, Artificial
  Probe
acaatgtgaagattccttacctgac

SEQ ID NO: 69301 - DNA, 25 bp, Artificial
  Probe
taacaatgtgaagattccttacctg

SEQ ID NO: 69302 - DNA, 25 bp, Artificial
  Probe
gtgaagattccttacctgacttaat

SEQ ID NO: 69303 - DNA, 25 bp, Artificial
  Probe
ttaacaatgtgaagattccttacct

SEQ ID NO: 69304 - DNA, 25 bp, Artificial
  Probe
ctttgggacttgctaacctatactc

SEQ ID NO: 69305 - DNA, 25 bp, Artificial
  Probe
tctttgggacttgctaacctatact

SEQ ID NO: 69306 - DNA, 25 bp, Artificial
  Probe
tttgggacttgctaacctatactca

SEQ ID NO: 69307 - DNA, 25 bp, Artificial
  Probe
ttgggacttgctaacctatactcag

SEQ ID NO: 69308 - DNA, 25 bp, Artificial
  Probe
tgaagattccttacctgacttaata

SEQ ID NO: 69309 - DNA, 25 bp, Artificial
  Probe
ttgctaacctatactcagccatctt

SEQ ID NO: 69310 - DNA, 25 bp, Artificial
  Probe
aattcgcatgacctttactgtgtta

SEQ ID NO: 69311 - DNA, 25 bp, Artificial
  Probe
cttgctaacctatactcagccatct

SEQ ID NO: 69312 - DNA, 25 bp, Artificial
  Probe
attcgcatgacctttactgtgttag

SEQ ID NO: 69313 - DNA, 25 bp, Artificial
  Probe
tggtgtttaacaatgtgaagattcc

SEQ ID NO: 69314 - DNA, 25 bp, Artificial
  Probe
acttgctaacctatactcagccatc

SEQ ID NO: 69315 - DNA, 25 bp, Artificial
  Probe
gacttgctaacctatactcagccat

SEQ ID NO: 69316 - DNA, 25 bp, Artificial
  Probe
ggtgtttaacaatgtgaagattcct

SEQ ID NO: 69317 - DNA, 25 bp, Artificial
  Probe
gctggtgtttaacaatgtgaagatt

SEQ ID NO: 69318 - DNA, 25 bp, Artificial
  Probe
gagcaagatcaaattaacaaagact

SEQ ID NO: 69319 - DNA, 25 bp, Artificial
  Probe
ctggtgtttaacaatgtgaagattc

SEQ ID NO: 69320 - DNA, 25 bp, Artificial
  Probe
tgagcaagatcaaattaacaaagac

SEQ ID NO: 69321 - DNA, 25 bp, Artificial
  Probe
tttaacaatgtgaagattccttacc

SEQ ID NO: 69322 - DNA, 25 bp, Artificial
  Probe
gaagattccttacctgacttaataa

SEQ ID NO: 69323 - DNA, 25 bp, Artificial
  Probe
gtgtttaacaatgtgaagattcctt

SEQ ID NO: 69324 - DNA, 25 bp, Artificial
  Probe
gcatgacctttactgtgttagcttt

SEQ ID NO: 69325 - DNA, 25 bp, Artificial
  Probe
agctggtgtttaacaatgtgaagat

SEQ ID NO: 69326 - DNA, 25 bp, Artificial
  Probe
atgagcaagatcaaattaacaaaga

SEQ ID NO: 69327 - DNA, 25 bp, Artificial
  Probe
tcactatggtggctataaattatgt

SEQ ID NO: 69328 - DNA, 25 bp, Artificial
  Probe
agcaagatcaaattaacaaagacta

SEQ ID NO: 69329 - DNA, 25 bp, Artificial
  Probe
gtttaacaatgtgaagattccttac

SEQ ID NO: 69330 - DNA, 25 bp, Artificial
  Probe
gcaagatcaaattaacaaagactag

SEQ ID NO: 69331 - DNA, 25 bp, Artificial
  Probe
tagaattcgcatgacctttactgtg

SEQ ID NO: 69332 - DNA, 25 bp, Artificial
  Probe
catccaccagattattttcagtctt

SEQ ID NO: 69333 - DNA, 25 bp, Artificial
  Probe
atatcttgaacataagaatagagcg

SEQ ID NO: 69334 - DNA, 25 bp, Artificial
  Probe
aatgagcaagatcaaattaacaaag

SEQ ID NO: 69335 - DNA, 25 bp, Artificial
  Probe
ggacttgctaacctatactcagcca

SEQ ID NO: 69336 - DNA, 25 bp, Artificial
  Probe
tgtttaacaatgtgaagattcctta

SEQ ID NO: 69337 - DNA, 25 bp, Artificial
  Probe
ttcgcatgacctttactgtgttagc

SEQ ID NO: 69338 - DNA, 25 bp, Artificial
  Probe
gaattcgcatgacctttactgtgtt

SEQ ID NO: 69339 - DNA, 25 bp, Artificial
  Probe
gacctttactgtgttagcttttgaa

SEQ ID NO: 69340 - DNA, 25 bp, Artificial
  Probe
attgaagaatcacagacttgttcct

SEQ ID NO: 69341 - DNA, 25 bp, Artificial
  Probe
ccatattgaagaatcacagacttgt

SEQ ID NO: 69342 - DNA, 25 bp, Artificial
  Probe
tattgaagaatcacagacttgttcc

SEQ ID NO: 69343 - DNA, 25 bp, Artificial
  Probe
ttgaagaatcacagacttgttcctg

SEQ ID NO: 69344 - DNA, 25 bp, Artificial
  Probe
catattgaagaatcacagacttgtt

SEQ ID NO: 69345 - DNA, 25 bp, Artificial
  Probe
cccatattgaagaatcacagacttg

SEQ ID NO: 69346 - DNA, 25 bp, Artificial
  Probe
atattgaagaatcacagacttgttc

SEQ ID NO: 69347 - DNA, 25 bp, Artificial
  Probe
cttcctcctctcagacatagtgctt

SEQ ID NO: 69348 - DNA, 25 bp, Artificial
  Probe
tgaagaatcacagacttgttcctgc

SEQ ID NO: 69349 - DNA, 25 bp, Artificial
  Probe
ttcctcctctcagacatagtgcttt

SEQ ID NO: 69350 - DNA, 25 bp, Artificial
  Probe
acacacacagacacacacgtataag

SEQ ID NO: 69351 - DNA, 25 bp, Artificial
  Probe
cacacacacagacacacacgtataa

SEQ ID NO: 69352 - DNA, 25 bp, Artificial
  Probe
tgaggaaaccccatattgaagaatc

SEQ ID NO: 69353 - DNA, 25 bp, Artificial
  Probe
gtgaggaaaccccatattgaagaat

SEQ ID NO: 69354 - DNA, 25 bp, Artificial
  Probe
acacacacacagacacacacgtata

SEQ ID NO: 69355 - DNA, 25 bp, Artificial
  Probe
tcctcctctcagacatagtgctttg

SEQ ID NO: 69356 - DNA, 25 bp, Artificial
  Probe
cgtgttttcagatgttacttcagta

SEQ ID NO: 69357 - DNA, 25 bp, Artificial
  Probe
aaaccccatattgaagaatcacaga

SEQ ID NO: 69358 - DNA, 25 bp, Artificial
  Probe
gaaaccccatattgaagaatcacag

SEQ ID NO: 69359 - DNA, 25 bp, Artificial
  Probe
cagcttcctcctctcagacatagtg

SEQ ID NO: 69360 - DNA, 25 bp, Artificial
  Probe
gaagaatcacagacttgttcctgca

SEQ ID NO: 69361 - DNA, 25 bp, Artificial
  Probe
ccccatattgaagaatcacagactt

SEQ ID NO: 69362 - DNA, 25 bp, Artificial
  Probe
gaggaaaccccatattgaagaatca

SEQ ID NO: 69363 - DNA, 25 bp, Artificial
  Probe
aggaaaccccatattgaagaatcac

SEQ ID NO: 69364 - DNA, 25 bp, Artificial
  Probe
aaccccatattgaagaatcacagac

SEQ ID NO: 69365 - DNA, 25 bp, Artificial
  Probe
cacacagacacacacgtataagcag

SEQ ID NO: 69366 - DNA, 25 bp, Artificial
  Probe
ggaaaccccatattgaagaatcaca

SEQ ID NO: 69367 - DNA, 25 bp, Artificial
  Probe
aagaatcacagacttgttcctgcac

SEQ ID NO: 69368 - DNA, 25 bp, Artificial
  Probe
agatgttacttcagtaagcttccaa

SEQ ID NO: 69369 - DNA, 25 bp, Artificial
  Probe
tcagatgttacttcagtaagcttcc

SEQ ID NO: 69370 - DNA, 25 bp, Artificial
  Probe
cagatgttacttcagtaagcttcca

SEQ ID NO: 69371 - DNA, 25 bp, Artificial
  Probe
accccatattgaagaatcacagact

SEQ ID NO: 69372 - DNA, 25 bp, Artificial
  Probe
gatgttacttcagtaagcttccaat

SEQ ID NO: 69373 - DNA, 25 bp, Artificial
  Probe
ttcagatgttacttcagtaagcttc

SEQ ID NO: 69374 - DNA, 25 bp, Artificial
  Probe
cacacacagacacacacgtataagc

SEQ ID NO: 69375 - DNA, 25 bp, Artificial
  Probe
cctcctctcagacatagtgctttgt

SEQ ID NO: 69376 - DNA, 25 bp, Artificial
  Probe
tgttacttcagtaagcttccaataa

SEQ ID NO: 69377 - DNA, 25 bp, Artificial
  Probe
gagacgtgttttcagatgttacttc

SEQ ID NO: 69378 - DNA, 25 bp, Artificial
  Probe
gacgtgttttcagatgttacttcag

SEQ ID NO: 69379 - DNA, 25 bp, Artificial
  Probe
atgttacttcagtaagcttccaata

SEQ ID NO: 69380 - DNA, 25 bp, Artificial
  Probe
agacgtgttttcagatgttacttca

SEQ ID NO: 69381 - DNA, 25 bp, Artificial
  Probe
acacacagacacacacgtataagca

SEQ ID NO: 69382 - DNA, 25 bp, Artificial
  Probe
acgtgttttcagatgttacttcagt

SEQ ID NO: 69383 - DNA, 25 bp, Artificial
  Probe
cgagacgtgttttcagatgttactt

SEQ ID NO: 69384 - DNA, 25 bp, Artificial
  Probe
ccagcttcctcctctcagacatagt

SEQ ID NO: 69385 - DNA, 25 bp, Artificial
  Probe
gcagagacatacaatatctacctat

SEQ ID NO: 69386 - DNA, 25 bp, Artificial
  Probe
gtgcagagacatacaatatctacct

SEQ ID NO: 69387 - DNA, 25 bp, Artificial
  Probe
cgtgcagagacatacaatatctacc

SEQ ID NO: 69388 - DNA, 25 bp, Artificial
  Probe
ccgtgcagagacatacaatatctac

SEQ ID NO: 69389 - DNA, 25 bp, Artificial
  Probe
tgcagagacatacaatatctaccta

SEQ ID NO: 69390 - DNA, 25 bp, Artificial
  Probe
tcgatatttgacctatagtttgcct

SEQ ID NO: 69391 - DNA, 25 bp, Artificial
  Probe
cgatatttgacctatagtttgcctc

SEQ ID NO: 69392 - DNA, 25 bp, Artificial
  Probe
gcctgcacaaattacaatactaagt

SEQ ID NO: 69393 - DNA, 25 bp, Artificial
  Probe
cgcctgcacaaattacaatactaag

SEQ ID NO: 69394 - DNA, 25 bp, Artificial
  Probe
tttgacctatagtttgcctctactc

SEQ ID NO: 69395 - DNA, 25 bp, Artificial
  Probe
cccgcaacatcgctatcttactaaa

SEQ ID NO: 69396 - DNA, 25 bp, Artificial
  Probe
atttgacctatagtttgcctctact

SEQ ID NO: 69397 - DNA, 25 bp, Artificial
  Probe
taacccgtgcagagacatacaatat

SEQ ID NO: 69398 - DNA, 25 bp, Artificial
  Probe
gatatttgacctatagtttgcctct

SEQ ID NO: 69399 - DNA, 25 bp, Artificial
  Probe
gacatacaatatctacctatctctg

SEQ ID NO: 69400 - DNA, 25 bp, Artificial
  Probe
acatacaatatctacctatctctgt

SEQ ID NO: 69401 - DNA, 25 bp, Artificial
  Probe
ttgtgtatatgtttcgctcttttcc

SEQ ID NO: 69402 - DNA, 25 bp, Artificial
  Probe
ccgcctgcacaaattacaatactaa

SEQ ID NO: 69403 - DNA, 25 bp, Artificial
  Probe
gtgtatatgtttcgctcttttcctt

SEQ ID NO: 69404 - DNA, 25 bp, Artificial
  Probe
tgtgtatatgtttcgctcttttcct

SEQ ID NO: 69405 - DNA, 25 bp, Artificial
  Probe
tgtatatgtttcgctcttttccttc

SEQ ID NO: 69406 - DNA, 25 bp, Artificial
  Probe
cccgtgcagagacatacaatatcta

SEQ ID NO: 69407 - DNA, 25 bp, Artificial
  Probe
ttgacctatagtttgcctctactcg

SEQ ID NO: 69408 - DNA, 25 bp, Artificial
  Probe
tatttgacctatagtttgcctctac

SEQ ID NO: 69409 - DNA, 25 bp, Artificial
  Probe
gtatatgtttcgctcttttccttct

SEQ ID NO: 69410 - DNA, 25 bp, Artificial
  Probe
cagagacatacaatatctacctatc

SEQ ID NO: 69411 - DNA, 25 bp, Artificial
  Probe
cgcaacatcgctatcttactaaaag

SEQ ID NO: 69412 - DNA, 25 bp, Artificial
  Probe
ttccttctaaccatcgttatctaaa

SEQ ID NO: 69413 - DNA, 25 bp, Artificial
  Probe
tttccttctaaccatcgttatctaa

SEQ ID NO: 69414 - DNA, 25 bp, Artificial
  Probe
tatgtttcgctcttttccttctaac

SEQ ID NO: 69415 - DNA, 25 bp, Artificial
  Probe
tttcgctcttttccttctaaccatc

SEQ ID NO: 69416 - DNA, 25 bp, Artificial
  Probe
gacctatagtttgcctctactcgac

SEQ ID NO: 69417 - DNA, 25 bp, Artificial
  Probe
ccgcaacatcgctatcttactaaaa

SEQ ID NO: 69418 - DNA, 25 bp, Artificial
  Probe
atatgtttcgctcttttccttctaa

SEQ ID NO: 69419 - DNA, 25 bp, Artificial
  Probe
gtaacccgtgcagagacatacaata

SEQ ID NO: 69420 - DNA, 25 bp, Artificial
  Probe
agacatacaatatctacctatctct

SEQ ID NO: 69421 - DNA, 25 bp, Artificial
  Probe
agagacatacaatatctacctatct

SEQ ID NO: 69422 - DNA, 25 bp, Artificial
  Probe
attgtgtatatgtttcgctcttttc

SEQ ID NO: 69423 - DNA, 25 bp, Artificial
  Probe
gattgtgtatatgtttcgctctttt

SEQ ID NO: 69424 - DNA, 25 bp, Artificial
  Probe
tgacctatagtttgcctctactcga

SEQ ID NO: 69425 - DNA, 25 bp, Artificial
  Probe
gtttcgctcttttccttctaaccat

SEQ ID NO: 69426 - DNA, 25 bp, Artificial
  Probe
atgtttcgctcttttccttctaacc

SEQ ID NO: 69427 - DNA, 25 bp, Artificial
  Probe
aacccgtgcagagacatacaatatc

SEQ ID NO: 69428 - DNA, 25 bp, Artificial
  Probe
acccgcaacatcgctatcttactaa

SEQ ID NO: 69429 - DNA, 25 bp, Artificial
  Probe
aaatttatatttatcgcccgcctgc

SEQ ID NO: 69430 - DNA, 25 bp, Artificial
  Probe
gtggtatctgtgaatgtgtaagagt

SEQ ID NO: 69431 - DNA, 25 bp, Artificial
  Probe
ttcgtggtatctgtgaatgtgtaag

SEQ ID NO: 69432 - DNA, 25 bp, Artificial
  Probe
tggtatctgtgaatgtgtaagagta

SEQ ID NO: 69433 - DNA, 25 bp, Artificial
  Probe
cgtggtatctgtgaatgtgtaagag

SEQ ID NO: 69434 - DNA, 25 bp, Artificial
  Probe
tcgtggtatctgtgaatgtgtaaga

SEQ ID NO: 69435 - DNA, 25 bp, Artificial
  Probe
ggtatctgtgaatgtgtaagagtaa

SEQ ID NO: 69436 - DNA, 25 bp, Artificial
  Probe
ctgaggaagcccacatattctatta

SEQ ID NO: 69437 - DNA, 25 bp, Artificial
  Probe
tttcgtggtatctgtgaatgtgtaa

SEQ ID NO: 69438 - DNA, 25 bp, Artificial
  Probe
aagacttgaaagttctgacgaattg

SEQ ID NO: 69439 - DNA, 25 bp, Artificial
  Probe
caagacttgaaagttctgacgaatt

SEQ ID NO: 69440 - DNA, 25 bp, Artificial
  Probe
agacttgaaagttctgacgaattgc

SEQ ID NO: 69441 - DNA, 25 bp, Artificial
  Probe
aaaggcaagacttgaaagttctgac

SEQ ID NO: 69442 - DNA, 25 bp, Artificial
  Probe
gcaagacttgaaagttctgacgaat

SEQ ID NO: 69443 - DNA, 25 bp, Artificial
  Probe
caaagaggatggtgctgtgtttaaa

SEQ ID NO: 69444 - DNA, 25 bp, Artificial
  Probe
acaaagaggatggtgctgtgtttaa

SEQ ID NO: 69445 - DNA, 25 bp, Artificial
  Probe
ttttcgtggtatctgtgaatgtgta

SEQ ID NO: 69446 - DNA, 25 bp, Artificial
  Probe
gacttgaaagttctgacgaattgcc

SEQ ID NO: 69447 - DNA, 25 bp, Artificial
  Probe
aattttcgtggtatctgtgaatgtg

SEQ ID NO: 69448 - DNA, 25 bp, Artificial
  Probe
ataaaacgagttccagtaacccaaa

SEQ ID NO: 69449 - DNA, 25 bp, Artificial
  Probe
gtatctgtgaatgtgtaagagtaaa

SEQ ID NO: 69450 - DNA, 25 bp, Artificial
  Probe
attttcgtggtatctgtgaatgtgt

SEQ ID NO: 69451 - DNA, 25 bp, Artificial
  Probe
gataaaacgagttccagtaacccaa

SEQ ID NO: 69452 - DNA, 25 bp, Artificial
  Probe
atctgtgaatgtgtaagagtaaatt

SEQ ID NO: 69453 - DNA, 25 bp, Artificial
  Probe
cttttgtgtcagccgaggttatatg

SEQ ID NO: 69454 - DNA, 25 bp, Artificial
  Probe
tgataaaacgagttccagtaaccca

SEQ ID NO: 69455 - DNA, 25 bp, Artificial
  Probe
gctgaggaagcccacatattctatt

SEQ ID NO: 69456 - DNA, 25 bp, Artificial
  Probe
acttttgtgtcagccgaggttatat

SEQ ID NO: 69457 - DNA, 25 bp, Artificial
  Probe
gaaaaggcaagacttgaaagttctg

SEQ ID NO: 69458 - DNA, 25 bp, Artificial
  Probe
cagaaaaggcaagacttgaaagttc

SEQ ID NO: 69459 - DNA, 25 bp, Artificial
  Probe
ttttgtgtcagccgaggttatatgt

SEQ ID NO: 69460 - DNA, 25 bp, Artificial
  Probe
taagaagtagacttttgtgtcagcc

SEQ ID NO: 69461 - DNA, 25 bp, Artificial
  Probe
ttaagaagtagacttttgtgtcagc

SEQ ID NO: 69462 - DNA, 25 bp, Artificial
  Probe
aaaaggcaagacttgaaagttctga

SEQ ID NO: 69463 - DNA, 25 bp, Artificial
  Probe
tcagaaaaggcaagacttgaaagtt

SEQ ID NO: 69464 - DNA, 25 bp, Artificial
  Probe
ggcaagacttgaaagttctgacgaa

SEQ ID NO: 69465 - DNA, 25 bp, Artificial
  Probe
aaggcaagacttgaaagttctgacg

SEQ ID NO: 69466 - DNA, 25 bp, Artificial
  Probe
ctcagaaaaggcaagacttgaaagt

SEQ ID NO: 69467 - DNA, 25 bp, Artificial
  Probe
tatctgtgaatgtgtaagagtaaat

SEQ ID NO: 69468 - DNA, 25 bp, Artificial
  Probe
tctgtgaatgtgtaagagtaaattt

SEQ ID NO: 69469 - DNA, 25 bp, Artificial
  Probe
gacttttgtgtcagccgaggttata

SEQ ID NO: 69470 - DNA, 25 bp, Artificial
  Probe
cctcagaaaaggcaagacttgaaag

SEQ ID NO: 69471 - DNA, 25 bp, Artificial
  Probe
agaaaaggcaagacttgaaagttct

SEQ ID NO: 69472 - DNA, 25 bp, Artificial
  Probe
agctgaggaagcccacatattctat

SEQ ID NO: 69473 - DNA, 25 bp, Artificial
  Probe
aggcaagacttgaaagttctgacga

SEQ ID NO: 69474 - DNA, 25 bp, Artificial
  Probe
aagctgaggaagcccacatattcta

SEQ ID NO: 69475 - DNA, 25 bp, Artificial
  Probe
tacaccctcttcaatctaattcctg

SEQ ID NO: 69476 - DNA, 25 bp, Artificial
  Probe
actacaccctcttcaatctaattcc

SEQ ID NO: 69477 - DNA, 25 bp, Artificial
  Probe
cgactacaccctcttcaatctaatt

SEQ ID NO: 69478 - DNA, 25 bp, Artificial
  Probe
ctacaccctcttcaatctaattcct

SEQ ID NO: 69479 - DNA, 25 bp, Artificial
  Probe
gactacaccctcttcaatctaattc

SEQ ID NO: 69480 - DNA, 25 bp, Artificial
  Probe
gttattcagccagcagggatatttc

SEQ ID NO: 69481 - DNA, 25 bp, Artificial
  Probe
gcgactacaccctcttcaatctaat

SEQ ID NO: 69482 - DNA, 25 bp, Artificial
  Probe
accctcttcaatctaattcctgtgg

SEQ ID NO: 69483 - DNA, 25 bp, Artificial
  Probe
acaccctcttcaatctaattcctgt

SEQ ID NO: 69484 - DNA, 25 bp, Artificial
  Probe
caccctcttcaatctaattcctgtg

SEQ ID NO: 69485 - DNA, 25 bp, Artificial
  Probe
ctcttcaatctaattcctgtgggac

SEQ ID NO: 69486 - DNA, 25 bp, Artificial
  Probe
cttcaatctaattcctgtgggactg

SEQ ID NO: 69487 - DNA, 25 bp, Artificial
  Probe
tcttcaatctaattcctgtgggact

SEQ ID NO: 69488 - DNA, 25 bp, Artificial
  Probe
ggttattcagccagcagggatattt

SEQ ID NO: 69489 - DNA, 25 bp, Artificial
  Probe
cctcttcaatctaattcctgtggga

SEQ ID NO: 69490 - DNA, 25 bp, Artificial
  Probe
agcgactacaccctcttcaatctaa

SEQ ID NO: 69491 - DNA, 25 bp, Artificial
  Probe
gaaggctatctctacagctcagatg

SEQ ID NO: 69492 - DNA, 25 bp, Artificial
  Probe
tttgtgtttctttctccctcctttt

SEQ ID NO: 69493 - DNA, 25 bp, Artificial
  Probe
ttttgtgtttctttctccctccttt

SEQ ID NO: 69494 - DNA, 25 bp, Artificial
  Probe
aggctatctctacagctcagatgtt

SEQ ID NO: 69495 - DNA, 25 bp, Artificial
  Probe
aaggctatctctacagctcagatgt

SEQ ID NO: 69496 - DNA, 25 bp, Artificial
  Probe
aggttattcagccagcagggatatt

SEQ ID NO: 69497 - DNA, 25 bp, Artificial
  Probe
aaggttattcagccagcagggatat

SEQ ID NO: 69498 - DNA, 25 bp, Artificial
  Probe
ttattcagccagcagggatatttcc

SEQ ID NO: 69499 - DNA, 25 bp, Artificial
  Probe
cagcgactacaccctcttcaatcta

SEQ ID NO: 69500 - DNA, 25 bp, Artificial
  Probe
ttcaatctaattcctgtgggactgc

SEQ ID NO: 69501 - DNA, 25 bp, Artificial
  Probe
tattcagccagcagggatatttcct

SEQ ID NO: 69502 - DNA, 25 bp, Artificial
  Probe
ggctatctctacagctcagatgttt

SEQ ID NO: 69503 - DNA, 25 bp, Artificial
  Probe
caaggttattcagccagcagggata

SEQ ID NO: 69504 - DNA, 25 bp, Artificial
  Probe
ccctcttcaatctaattcctgtggg

SEQ ID NO: 69505 - DNA, 25 bp, Artificial
  Probe
aacagcgactacaccctcttcaatc

SEQ ID NO: 69506 - DNA, 25 bp, Artificial
  Probe
gctatctctacagctcagatgtttt

SEQ ID NO: 69507 - DNA, 25 bp, Artificial
  Probe
tcaatctaattcctgtgggactgcg

SEQ ID NO: 69508 - DNA, 25 bp, Artificial
  Probe
aatctaattcctgtgggactgcgtg

SEQ ID NO: 69509 - DNA, 25 bp, Artificial
  Probe
caatctaattcctgtgggactgcgt

SEQ ID NO: 69510 - DNA, 25 bp, Artificial
  Probe
ttttccttcttttcccggttttcca

SEQ ID NO: 69511 - DNA, 25 bp, Artificial
  Probe
tttccttcttttcccggttttccag

SEQ ID NO: 69512 - DNA, 25 bp, Artificial
  Probe
caaggtgtgaaagccagcctttatg

SEQ ID NO: 69513 - DNA, 25 bp, Artificial
  Probe
aaggtgtgaaagccagcctttatgt

SEQ ID NO: 69514 - DNA, 25 bp, Artificial
  Probe
attcagccagcagggatatttcctg

SEQ ID NO: 69515 - DNA, 25 bp, Artificial
  Probe
ttcttttcccggttttccaggaatc

SEQ ID NO: 69516 - DNA, 25 bp, Artificial
  Probe
cttcttttcccggttttccaggaat

SEQ ID NO: 69517 - DNA, 25 bp, Artificial
  Probe
ttccttcttttcccggttttccagg

SEQ ID NO: 69518 - DNA, 25 bp, Artificial
  Probe
tcttttcccggttttccaggaatcc

SEQ ID NO: 69519 - DNA, 25 bp, Artificial
  Probe
ccttcttttcccggttttccaggaa

SEQ ID NO: 69520 - DNA, 25 bp, Artificial
  Probe
gaatgagaattgtccttcaagtacc

SEQ ID NO: 69521 - DNA, 25 bp, Artificial
  Probe
ggaatgagaattgtccttcaagtac

SEQ ID NO: 69522 - DNA, 25 bp, Artificial
  Probe
ccttcaagtaccctctgataagatg

SEQ ID NO: 69523 - DNA, 25 bp, Artificial
  Probe
tccttcaagtaccctctgataagat

SEQ ID NO: 69524 - DNA, 25 bp, Artificial
  Probe
ttcaagtaccctctgataagatgtc

SEQ ID NO: 69525 - DNA, 25 bp, Artificial
  Probe
cttcaagtaccctctgataagatgt

SEQ ID NO: 69526 - DNA, 25 bp, Artificial
  Probe
attgtccttcaagtaccctctgata

SEQ ID NO: 69527 - DNA, 25 bp, Artificial
  Probe
aatgagaattgtccttcaagtaccc

SEQ ID NO: 69528 - DNA, 25 bp, Artificial
  Probe
ttgtccttcaagtaccctctgataa

SEQ ID NO: 69529 - DNA, 25 bp, Artificial
  Probe
gtccttcaagtaccctctgataaga

SEQ ID NO: 69530 - DNA, 25 bp, Artificial
  Probe
tgtccttcaagtaccctctgataag

SEQ ID NO: 69531 - DNA, 25 bp, Artificial
  Probe
gggaatgagaattgtccttcaagta

SEQ ID NO: 69532 - DNA, 25 bp, Artificial
  Probe
tcaagtaccctctgataagatgtcg

SEQ ID NO: 69533 - DNA, 25 bp, Artificial
  Probe
aattgtccttcaagtaccctctgat

SEQ ID NO: 69534 - DNA, 25 bp, Artificial
  Probe
atgagaattgtccttcaagtaccct

SEQ ID NO: 69535 - DNA, 25 bp, Artificial
  Probe
agaattgtccttcaagtaccctctg

SEQ ID NO: 69536 - DNA, 25 bp, Artificial
  Probe
gagaattgtccttcaagtaccctct

SEQ ID NO: 69537 - DNA, 25 bp, Artificial
  Probe
gaattgtccttcaagtaccctctga

SEQ ID NO: 69538 - DNA, 25 bp, Artificial
  Probe
tgagaattgtccttcaagtaccctc

SEQ ID NO: 69539 - DNA, 25 bp, Artificial
  Probe
ctgggaatgagaattgtccttcaag

SEQ ID NO: 69540 - DNA, 25 bp, Artificial
  Probe
tgggaatgagaattgtccttcaagt

SEQ ID NO: 69541 - DNA, 25 bp, Artificial
  Probe
caagtaccctctgataagatgtcgc

SEQ ID NO: 69542 - DNA, 25 bp, Artificial
  Probe
atcctgggaatgagaattgtccttc

SEQ ID NO: 69543 - DNA, 25 bp, Artificial
  Probe
cctgggaatgagaattgtccttcaa

SEQ ID NO: 69544 - DNA, 25 bp, Artificial
  Probe
gattggtgtcacttcttttctgcta

SEQ ID NO: 69545 - DNA, 25 bp, Artificial
  Probe
ctctgataagatgtcgccctgtgta

SEQ ID NO: 69546 - DNA, 25 bp, Artificial
  Probe
attggtgtcacttcttttctgctac

SEQ ID NO: 69547 - DNA, 25 bp, Artificial
  Probe
aagtaccctctgataagatgtcgcc

SEQ ID NO: 69548 - DNA, 25 bp, Artificial
  Probe
tcctgggaatgagaattgtccttca

SEQ ID NO: 69549 - DNA, 25 bp, Artificial
  Probe
gagattggtgtcacttcttttctgc

SEQ ID NO: 69550 - DNA, 25 bp, Artificial
  Probe
agattggtgtcacttcttttctgct

SEQ ID NO: 69551 - DNA, 25 bp, Artificial
  Probe
atgagaatgaaagcttgattccatg

SEQ ID NO: 69552 - DNA, 25 bp, Artificial
  Probe
catgagaatgaaagcttgattccat

SEQ ID NO: 69553 - DNA, 25 bp, Artificial
  Probe
tgagaatgaaagcttgattccatgt

SEQ ID NO: 69554 - DNA, 25 bp, Artificial
  Probe
gggctgtgcatgtttaaagaactgt

SEQ ID NO: 69555 - DNA, 25 bp, Artificial
  Probe
ttggtgtcacttcttttctgctacc

SEQ ID NO: 69556 - DNA, 25 bp, Artificial
  Probe
tcatgagaatgaaagcttgattcca

SEQ ID NO: 69557 - DNA, 25 bp, Artificial
  Probe
aagttcttctgcgccatcctttaag

SEQ ID NO: 69558 - DNA, 25 bp, Artificial
  Probe
gaagttcttctgcgccatcctttaa

SEQ ID NO: 69559 - DNA, 25 bp, Artificial
  Probe
catcgacaggataaaggtgtccaag

SEQ ID NO: 69560 - DNA, 25 bp, Artificial
  Probe
cgggctgtgcatgtttaaagaactg

SEQ ID NO: 69561 - DNA, 25 bp, Artificial
  Probe
gttcttctgcgccatcctttaagtc

SEQ ID NO: 69562 - DNA, 25 bp, Artificial
  Probe
ttcttctgcgccatcctttaagtct

SEQ ID NO: 69563 - DNA, 25 bp, Artificial
  Probe
agttcttctgcgccatcctttaagt

SEQ ID NO: 69564 - DNA, 25 bp, Artificial
  Probe
tggtgtcacttcttttctgctaccc

SEQ ID NO: 69565 - DNA, 25 bp, Artificial
  Probe
gctgtcactttcttatcttctgttg

SEQ ID NO: 69566 - DNA, 25 bp, Artificial
  Probe
cctttgctgtcactttcttatcttc

SEQ ID NO: 69567 - DNA, 25 bp, Artificial
  Probe
tacctttgctgtcactttcttatct

SEQ ID NO: 69568 - DNA, 25 bp, Artificial
  Probe
catacatctttgcttgaggaaactt

SEQ ID NO: 69569 - DNA, 25 bp, Artificial
  Probe
ctgccctctttggaaatactatgta

SEQ ID NO: 69570 - DNA, 25 bp, Artificial
  Probe
ctgtcactttcttatcttctgttgg

SEQ ID NO: 69571 - DNA, 25 bp, Artificial
  Probe
tgctgtcactttcttatcttctgtt

SEQ ID NO: 69572 - DNA, 25 bp, Artificial
  Probe
ttgctgtcactttcttatcttctgt

SEQ ID NO: 69573 - DNA, 25 bp, Artificial
  Probe
tgccctctttggaaatactatgtaa

SEQ ID NO: 69574 - DNA, 25 bp, Artificial
  Probe
tttgctgtcactttcttatcttctg

SEQ ID NO: 69575 - DNA, 25 bp, Artificial
  Probe
gttacctttgctgtcactttcttat

SEQ ID NO: 69576 - DNA, 25 bp, Artificial
  Probe
acctttgctgtcactttcttatctt

SEQ ID NO: 69577 - DNA, 25 bp, Artificial
  Probe
ctttgctgtcactttcttatcttct

SEQ ID NO: 69578 - DNA, 25 bp, Artificial
  Probe
ttacctttgctgtcactttcttatc

SEQ ID NO: 69579 - DNA, 25 bp, Artificial
  Probe
atacatctttgcttgaggaaacttt

SEQ ID NO: 69580 - DNA, 25 bp, Artificial
  Probe
tcactttcttatcttctgttggctg

SEQ ID NO: 69581 - DNA, 25 bp, Artificial
  Probe
gtcactttcttatcttctgttggct

SEQ ID NO: 69582 - DNA, 25 bp, Artificial
  Probe
cttatcttctgttggctgctcactt

SEQ ID NO: 69583 - DNA, 25 bp, Artificial
  Probe
ttcttatcttctgttggctgctcac

SEQ ID NO: 69584 - DNA, 25 bp, Artificial
  Probe
tgtcactttcttatcttctgttggc

SEQ ID NO: 69585 - DNA, 25 bp, Artificial
  Probe
gccctctttggaaatactatgtaaa

SEQ ID NO: 69586 - DNA, 25 bp, Artificial
  Probe
ccatacatctttgcttgaggaaact

SEQ ID NO: 69587 - DNA, 25 bp, Artificial
  Probe
cactgccctctttggaaatactatg

SEQ ID NO: 69588 - DNA, 25 bp, Artificial
  Probe
agttacctttgctgtcactttctta

SEQ ID NO: 69589 - DNA, 25 bp, Artificial
  Probe
actgccctctttggaaatactatgt

SEQ ID NO: 69590 - DNA, 25 bp, Artificial
  Probe
tatcttctgttggctgctcacttta

SEQ ID NO: 69591 - DNA, 25 bp, Artificial
  Probe
ctttcttatcttctgttggctgctc

SEQ ID NO: 69592 - DNA, 25 bp, Artificial
  Probe
cccatacatctttgcttgaggaaac

SEQ ID NO: 69593 - DNA, 25 bp, Artificial
  Probe
tttcttatcttctgttggctgctca

SEQ ID NO: 69594 - DNA, 25 bp, Artificial
  Probe
actttcttatcttctgttggctgct

SEQ ID NO: 69595 - DNA, 25 bp, Artificial
  Probe
cactttcttatcttctgttggctgc

SEQ ID NO: 69596 - DNA, 25 bp, Artificial
  Probe
tcttatcttctgttggctgctcact

SEQ ID NO: 69597 - DNA, 25 bp, Artificial
  Probe
ttatcttctgttggctgctcacttt

SEQ ID NO: 69598 - DNA, 25 bp, Artificial
  Probe
cagttacctttgctgtcactttctt

SEQ ID NO: 69599 - DNA, 25 bp, Artificial
  Probe
atcttctgttggctgctcactttaa

SEQ ID NO: 69600 - DNA, 25 bp, Artificial
  Probe
ttaagcactgccctctttggaaata

SEQ ID NO: 69601 - DNA, 25 bp, Artificial
  Probe
gcactgccctctttggaaatactat

SEQ ID NO: 69602 - DNA, 25 bp, Artificial
  Probe
tcttctgttggctgctcactttaag

SEQ ID NO: 69603 - DNA, 25 bp, Artificial
  Probe
acatctttgcttgaggaaactttta

SEQ ID NO: 69604 - DNA, 25 bp, Artificial
  Probe
tacatctttgcttgaggaaactttt

SEQ ID NO: 69605 - DNA, 25 bp, Artificial
  Probe
taagcactgccctctttggaaatac

SEQ ID NO: 69606 - DNA, 25 bp, Artificial
  Probe
catctttgcttgaggaaacttttag

SEQ ID NO: 69607 - DNA, 25 bp, Artificial
  Probe
tttaagcactgccctctttggaaat

SEQ ID NO: 69608 - DNA, 25 bp, Artificial
  Probe
ccagttacctttgctgtcactttct

SEQ ID NO: 69609 - DNA, 25 bp, Artificial
  Probe
atctttgcttgaggaaacttttagt

SEQ ID NO: 69610 - DNA, 25 bp, Artificial
  Probe
ttattccttccttaactaccgcctt

SEQ ID NO: 69611 - DNA, 25 bp, Artificial
  Probe
atttattccttccttaactaccgcc

SEQ ID NO: 69612 - DNA, 25 bp, Artificial
  Probe
tattccttccttaactaccgccttt

SEQ ID NO: 69613 - DNA, 25 bp, Artificial
  Probe
tttattccttccttaactaccgcct

SEQ ID NO: 69614 - DNA, 25 bp, Artificial
  Probe
tatttattccttccttaactaccgc

SEQ ID NO: 69615 - DNA, 25 bp, Artificial
  Probe
tacagtgacagagattggcaaagat

SEQ ID NO: 69616 - DNA, 25 bp, Artificial
  Probe
tggttaatcacacactgttctttaa

SEQ ID NO: 69617 - DNA, 25 bp, Artificial
  Probe
caaagatgtgattggtctgaggatc

SEQ ID NO: 69618 - DNA, 25 bp, Artificial
  Probe
gacagagattggcaaagatgtgatt

SEQ ID NO: 69619 - DNA, 25 bp, Artificial
  Probe
atcagtcctcttcagtttcgctaag

SEQ ID NO: 69620 - DNA, 25 bp, Artificial
  Probe
ctacagtgacagagattggcaaaga

SEQ ID NO: 69621 - DNA, 25 bp, Artificial
  Probe
acagagattggcaaagatgtgattg

SEQ ID NO: 69622 - DNA, 25 bp, Artificial
  Probe
gagattggcaaagatgtgattggtc

SEQ ID NO: 69623 - DNA, 25 bp, Artificial
  Probe
cagagattggcaaagatgtgattgg

SEQ ID NO: 69624 - DNA, 25 bp, Artificial
  Probe
actacagtgacagagattggcaaag

SEQ ID NO: 69625 - DNA, 25 bp, Artificial
  Probe
gatcagtcctcttcagtttcgctaa

SEQ ID NO: 69626 - DNA, 25 bp, Artificial
  Probe
attccttccttaactaccgcctttg

SEQ ID NO: 69627 - DNA, 25 bp, Artificial
  Probe
gattggcaaagatgtgattggtctg

SEQ ID NO: 69628 - DNA, 25 bp, Artificial
  Probe
gattcgacttgttgaggttggttct

SEQ ID NO: 69629 - DNA, 25 bp, Artificial
  Probe
gtatttattccttccttaactaccg

SEQ ID NO: 69630 - DNA, 25 bp, Artificial
  Probe
agattggcaaagatgtgattggtct

SEQ ID NO: 69631 - DNA, 25 bp, Artificial
  Probe
agagattggcaaagatgtgattggt

SEQ ID NO: 69632 - DNA, 25 bp, Artificial
  Probe
tgacagagattggcaaagatgtgat

SEQ ID NO: 69633 - DNA, 25 bp, Artificial
  Probe
ctttgacatttgtgctgcatcttac

SEQ ID NO: 69634 - DNA, 25 bp, Artificial
  Probe
cagctcaattatgacatgcacaacc

SEQ ID NO: 69635 - DNA, 25 bp, Artificial
  Probe
ccagctcaattatgacatgcacaac

SEQ ID NO: 69636 - DNA, 25 bp, Artificial
  Probe
attggcaaagatgtgattggtctga

SEQ ID NO: 69637 - DNA, 25 bp, Artificial
  Probe
ctcttcagtttcgctaaggttctcc

SEQ ID NO: 69638 - DNA, 25 bp, Artificial
  Probe
acagtgacagagattggcaaagatg

SEQ ID NO: 69639 - DNA, 25 bp, Artificial
  Probe
gcaaagatgtgattggtctgaggat

SEQ ID NO: 69640 - DNA, 25 bp, Artificial
  Probe
attcgacttgttgaggttggttctc

SEQ ID NO: 69641 - DNA, 25 bp, Artificial
  Probe
tttaaagtctctagctgcaaaccct

SEQ ID NO: 69642 - DNA, 25 bp, Artificial
  Probe
ggttaatcacacactgttctttaaa

SEQ ID NO: 69643 - DNA, 25 bp, Artificial
  Probe
cctttgacatttgtgctgcatctta

SEQ ID NO: 69644 - DNA, 25 bp, Artificial
  Probe
gtgacagagattggcaaagatgtga

SEQ ID NO: 69645 - DNA, 25 bp, Artificial
  Probe
agtgacagagattggcaaagatgtg

SEQ ID NO: 69646 - DNA, 25 bp, Artificial
  Probe
cagtgacagagattggcaaagatgt

SEQ ID NO: 69647 - DNA, 25 bp, Artificial
  Probe
ttaaagtctctagctgcaaaccctc

SEQ ID NO: 69648 - DNA, 25 bp, Artificial
  Probe
tttgacatttgtgctgcatcttacc

SEQ ID NO: 69649 - DNA, 25 bp, Artificial
  Probe
aaaatcttgtctgcctgtgagaaaa

SEQ ID NO: 69650 - DNA, 25 bp, Artificial
  Probe
ttggcaaagatgtgattggtctgag

SEQ ID NO: 69651 - DNA, 25 bp, Artificial
  Probe
aaagatgtgattggtctgaggatca

SEQ ID NO: 69652 - DNA, 25 bp, Artificial
  Probe
aagatgtgattggtctgaggatcag

SEQ ID NO: 69653 - DNA, 25 bp, Artificial
  Probe
cctcttcagtttcgctaaggttctc

SEQ ID NO: 69654 - DNA, 25 bp, Artificial
  Probe
gaaaatcttgtctgcctgtgagaaa

SEQ ID NO: 69655 - DNA, 25 bp, Artificial
  Probe
tggattacttgaacaatatggtggt

SEQ ID NO: 69656 - DNA, 25 bp, Artificial
  Probe
tcttagaattgtgtgccgattagtt

SEQ ID NO: 69657 - DNA, 25 bp, Artificial
  Probe
atggattacttgaacaatatggtgg

SEQ ID NO: 69658 - DNA, 25 bp, Artificial
  Probe
cttagaattgtgtgccgattagtta

SEQ ID NO: 69659 - DNA, 25 bp, Artificial
  Probe
ttgtcttagaattgtgtgccgatta

SEQ ID NO: 69660 - DNA, 25 bp, Artificial
  Probe
gataagcaacctactgaacttgatg

SEQ ID NO: 69661 - DNA, 25 bp, Artificial
  Probe
gtcttagaattgtgtgccgattagt

SEQ ID NO: 69662 - DNA, 25 bp, Artificial
  Probe
tgtcttagaattgtgtgccgattag

SEQ ID NO: 69663 - DNA, 25 bp, Artificial
  Probe
ggattacttgaacaatatggtggta

SEQ ID NO: 69664 - DNA, 25 bp, Artificial
  Probe
cgataagcaacctactgaacttgat

SEQ ID NO: 69665 - DNA, 25 bp, Artificial
  Probe
tagaattgtgtgccgattagttatt

SEQ ID NO: 69666 - DNA, 25 bp, Artificial
  Probe
ttagaattgtgtgccgattagttat

SEQ ID NO: 69667 - DNA, 25 bp, Artificial
  Probe
tacttgaacaatatggtggtagttg

SEQ ID NO: 69668 - DNA, 25 bp, Artificial
  Probe
acttgaacaatatggtggtagttgc

SEQ ID NO: 69669 - DNA, 25 bp, Artificial
  Probe
gttgtcttagaattgtgtgccgatt

SEQ ID NO: 69670 - DNA, 25 bp, Artificial
  Probe
ttacttgaacaatatggtggtagtt

SEQ ID NO: 69671 - DNA, 25 bp, Artificial
  Probe
attacttgaacaatatggtggtagt

SEQ ID NO: 69672 - DNA, 25 bp, Artificial
  Probe
gattacttgaacaatatggtggtag

SEQ ID NO: 69673 - DNA, 25 bp, Artificial
  Probe
aaggcaggttgtcttagaattgtgt

SEQ ID NO: 69674 - DNA, 25 bp, Artificial
  Probe
ttcgataagcaacctactgaacttg

SEQ ID NO: 69675 - DNA, 25 bp, Artificial
  Probe
agaattgtgtgccgattagttattt

SEQ ID NO: 69676 - DNA, 25 bp, Artificial
  Probe
gtaaaggcaggttgtcttagaattg

SEQ ID NO: 69677 - DNA, 25 bp, Artificial
  Probe
taaaggcaggttgtcttagaattgt

SEQ ID NO: 69678 - DNA, 25 bp, Artificial
  Probe
tatggattacttgaacaatatggtg

SEQ ID NO: 69679 - DNA, 25 bp, Artificial
  Probe
ggtaaaggcaggttgtcttagaatt

SEQ ID NO: 69680 - DNA, 25 bp, Artificial
  Probe
tcgataagcaacctactgaacttga

SEQ ID NO: 69681 - DNA, 25 bp, Artificial
  Probe
aggcaggttgtcttagaattgtgtg

SEQ ID NO: 69682 - DNA, 25 bp, Artificial
  Probe
ttgaacaatatggtggtagttgcag

SEQ ID NO: 69683 - DNA, 25 bp, Artificial
  Probe
cttgaacaatatggtggtagttgca

SEQ ID NO: 69684 - DNA, 25 bp, Artificial
  Probe
aatatggtggtagttgcaggatctc

SEQ ID NO: 69685 - DNA, 25 bp, Artificial
  Probe
aaaggcaggttgtcttagaattgtg

SEQ ID NO: 69686 - DNA, 25 bp, Artificial
  Probe
caacctactgaacttgatgctctgg

SEQ ID NO: 69687 - DNA, 25 bp, Artificial
  Probe
ggttgtcttagaattgtgtgccgat

SEQ ID NO: 69688 - DNA, 25 bp, Artificial
  Probe
aaagactgggaacacaaccttactt

SEQ ID NO: 69689 - DNA, 25 bp, Artificial
  Probe
aacaatatggtggtagttgcaggat

SEQ ID NO: 69690 - DNA, 25 bp, Artificial
  Probe
caatatggtggtagttgcaggatct

SEQ ID NO: 69691 - DNA, 25 bp, Artificial
  Probe
ataagcaacctactgaacttgatgc

SEQ ID NO: 69692 - DNA, 25 bp, Artificial
  Probe
gggtaaaggcaggttgtcttagaat

SEQ ID NO: 69693 - DNA, 25 bp, Artificial
  Probe
acaatatggtggtagttgcaggatc

SEQ ID NO: 69694 - DNA, 25 bp, Artificial
  Probe
tggaatatggattacttgaacaata

SEQ ID NO: 69695 - DNA, 25 bp, Artificial
  Probe
cctactgaacttgatgctctggttt

SEQ ID NO: 69696 - DNA, 25 bp, Artificial
  Probe
atatggtggtagttgcaggatctca

SEQ ID NO: 69697 - DNA, 25 bp, Artificial
  Probe
caaagactgggaacacaaccttact

SEQ ID NO: 69698 - DNA, 25 bp, Artificial
  Probe
gaacaatatggtggtagttgcagga

SEQ ID NO: 69699 - DNA, 25 bp, Artificial
  Probe
atatggattacttgaacaatatggt

SEQ ID NO: 69700 - DNA, 25 bp, Artificial
  Probe
gagacaacactacagtaagagaagg

SEQ ID NO: 69701 - DNA, 25 bp, Artificial
  Probe
ggagacaacactacagtaagagaag

SEQ ID NO: 69702 - DNA, 25 bp, Artificial
  Probe
gacaacactacagtaagagaaggac

SEQ ID NO: 69703 - DNA, 25 bp, Artificial
  Probe
agacaacactacagtaagagaagga

SEQ ID NO: 69704 - DNA, 25 bp, Artificial
  Probe
atggagacaacactacagtaagaga

SEQ ID NO: 69705 - DNA, 25 bp, Artificial
  Probe
tggagacaacactacagtaagagaa

SEQ ID NO: 69706 - DNA, 25 bp, Artificial
  Probe
aacactacagtaagagaaggaccac

SEQ ID NO: 69707 - DNA, 25 bp, Artificial
  Probe
caacactacagtaagagaaggacca

SEQ ID NO: 69708 - DNA, 25 bp, Artificial
  Probe
acaacactacagtaagagaaggacc

SEQ ID NO: 69709 - DNA, 25 bp, Artificial
  Probe
catggagacaacactacagtaagag

SEQ ID NO: 69710 - DNA, 25 bp, Artificial
  Probe
cactacagtaagagaaggaccacag

SEQ ID NO: 69711 - DNA, 25 bp, Artificial
  Probe
acactacagtaagagaaggaccaca

SEQ ID NO: 69712 - DNA, 25 bp, Artificial
  Probe
actgctttccttctctacatttcat

SEQ ID NO: 69713 - DNA, 25 bp, Artificial
  Probe
aaacctcggatggaaacactatatt

SEQ ID NO: 69714 - DNA, 25 bp, Artificial
  Probe
ctgctttccttctctacatttcatt

SEQ ID NO: 69715 - DNA, 25 bp, Artificial
  Probe
aacctcggatggaaacactatattg

SEQ ID NO: 69716 - DNA, 25 bp, Artificial
  Probe
gactgctttccttctctacatttca

SEQ ID NO: 69717 - DNA, 25 bp, Artificial
  Probe
gcatggagacaacactacagtaaga

SEQ ID NO: 69718 - DNA, 25 bp, Artificial
  Probe
agcatggagacaacactacagtaag

SEQ ID NO: 69719 - DNA, 25 bp, Artificial
  Probe
ctcggatggaaacactatattgctt

SEQ ID NO: 69720 - DNA, 25 bp, Artificial
  Probe
tgctttccttctctacatttcattt

SEQ ID NO: 69721 - DNA, 25 bp, Artificial
  Probe
tcccaacccataaactttctttcag

SEQ ID NO: 69722 - DNA, 25 bp, Artificial
  Probe
tcggatggaaacactatattgcttg

SEQ ID NO: 69723 - DNA, 25 bp, Artificial
  Probe
gctttccttctctacatttcatttg

SEQ ID NO: 69724 - DNA, 25 bp, Artificial
  Probe
cagcatggagacaacactacagtaa

SEQ ID NO: 69725 - DNA, 25 bp, Artificial
  Probe
gtcccaacccataaactttctttca

SEQ ID NO: 69726 - DNA, 25 bp, Artificial
  Probe
tagtcccaacccataaactttcttt

SEQ ID NO: 69727 - DNA, 25 bp, Artificial
  Probe
cccaacccataaactttctttcaga

SEQ ID NO: 69728 - DNA, 25 bp, Artificial
  Probe
gcctagaactttcttatgagagaca

SEQ ID NO: 69729 - DNA, 25 bp, Artificial
  Probe
agcctagaactttcttatgagagac

SEQ ID NO: 69730 - DNA, 25 bp, Artificial
  Probe
agtcccaacccataaactttctttc

SEQ ID NO: 69731 - DNA, 25 bp, Artificial
  Probe
ctagtcccaacccataaactttctt

SEQ ID NO: 69732 - DNA, 25 bp, Artificial
  Probe
agtaagagaaggaccacagcgttaa

SEQ ID NO: 69733 - DNA, 25 bp, Artificial
  Probe
actacagtaagagaaggaccacagc

SEQ ID NO: 69734 - DNA, 25 bp, Artificial
  Probe
tgaaagtagacaatcagatcaccag

SEQ ID NO: 69735 - DNA, 25 bp, Artificial
  Probe
gaaagtagacaatcagatcaccagc

SEQ ID NO: 69736 - DNA, 25 bp, Artificial
  Probe
cttatgagagacagtacagtcatgg

SEQ ID NO: 69737 - DNA, 25 bp, Artificial
  Probe
tcttatgagagacagtacagtcatg

SEQ ID NO: 69738 - DNA, 25 bp, Artificial
  Probe
ttcttatgagagacagtacagtcat

SEQ ID NO: 69739 - DNA, 25 bp, Artificial
  Probe
actttcttatgagagacagtacagt

SEQ ID NO: 69740 - DNA, 25 bp, Artificial
  Probe
cttcttggtgctgatttcattcctg

SEQ ID NO: 69741 - DNA, 25 bp, Artificial
  Probe
gtagacaatcagatcaccagcgatg

SEQ ID NO: 69742 - DNA, 25 bp, Artificial
  Probe
agtagacaatcagatcaccagcgat

SEQ ID NO: 69743 - DNA, 25 bp, Artificial
  Probe
cctcggatggaaacactatattgct

SEQ ID NO: 69744 - DNA, 25 bp, Artificial
  Probe
cctagaactttcttatgagagacag

SEQ ID NO: 69745 - DNA, 25 bp, Artificial
  Probe
aaccaagcctgttatgagcattcta

SEQ ID NO: 69746 - DNA, 25 bp, Artificial
  Probe
attctagcttaacctcaagtcacag

SEQ ID NO: 69747 - DNA, 25 bp, Artificial
  Probe
cattctagcttaacctcaagtcaca

SEQ ID NO: 69748 - DNA, 25 bp, Artificial
  Probe
ctagcttaacctcaagtcacagatg

SEQ ID NO: 69749 - DNA, 25 bp, Artificial
  Probe
tctagcttaacctcaagtcacagat

SEQ ID NO: 69750 - DNA, 25 bp, Artificial
  Probe
ttctagcttaacctcaagtcacaga

SEQ ID NO: 69751 - DNA, 25 bp, Artificial
  Probe
ggtagttagtcattctaagacagag

SEQ ID NO: 69752 - DNA, 25 bp, Artificial
  Probe
accaagcctgttatgagcattctag

SEQ ID NO: 69753 - DNA, 25 bp, Artificial
  Probe
ctgtttccctctgtgtgtattaagt

SEQ ID NO: 69754 - DNA, 25 bp, Artificial
  Probe
actgtttccctctgtgtgtattaag

SEQ ID NO: 69755 - DNA, 25 bp, Artificial
  Probe
tagcttaacctcaagtcacagatgt

SEQ ID NO: 69756 - DNA, 25 bp, Artificial
  Probe
tgtttccctctgtgtgtattaagtg

SEQ ID NO: 69757 - DNA, 25 bp, Artificial
  Probe
tactgtttccctctgtgtgtattaa

SEQ ID NO: 69758 - DNA, 25 bp, Artificial
  Probe
ataagatactgtttccctctgtgtg

SEQ ID NO: 69759 - DNA, 25 bp, Artificial
  Probe
cataagatactgtttccctctgtgt

SEQ ID NO: 69760 - DNA, 25 bp, Artificial
  Probe
tcataagatactgtttccctctgtg

SEQ ID NO: 69761 - DNA, 25 bp, Artificial
  Probe
gcattctagcttaacctcaagtcac

SEQ ID NO: 69762 - DNA, 25 bp, Artificial
  Probe
gtttccctctgtgtgtattaagtgg

SEQ ID NO: 69763 - DNA, 25 bp, Artificial
  Probe
ttcataagatactgtttccctctgt

SEQ ID NO: 69764 - DNA, 25 bp, Artificial
  Probe
gtcattctaagacagagaagtggaa

SEQ ID NO: 69765 - DNA, 25 bp, Artificial
  Probe
aagatactgtttccctctgtgtgta

SEQ ID NO: 69766 - DNA, 25 bp, Artificial
  Probe
taagatactgtttccctctgtgtgt

SEQ ID NO: 69767 - DNA, 25 bp, Artificial
  Probe
agtcattctaagacagagaagtgga

SEQ ID NO: 69768 - DNA, 25 bp, Artificial
  Probe
tagtcattctaagacagagaagtgg

SEQ ID NO: 69769 - DNA, 25 bp, Artificial
  Probe
tcattctaagacagagaagtggaat

SEQ ID NO: 69770 - DNA, 25 bp, Artificial
  Probe
aattagtagaccagaagatagctgt

SEQ ID NO: 69771 - DNA, 25 bp, Artificial
  Probe
tttcataagatactgtttccctctg

SEQ ID NO: 69772 - DNA, 25 bp, Artificial
  Probe
atgtgtgttgtgggtgatttcattt

SEQ ID NO: 69773 - DNA, 25 bp, Artificial
  Probe
ttagtagaccagaagatagctgtaa

SEQ ID NO: 69774 - DNA, 25 bp, Artificial
  Probe
gtagttagtcattctaagacagaga

SEQ ID NO: 69775 - DNA, 25 bp, Artificial
  Probe
gatactgtttccctctgtgtgtatt

SEQ ID NO: 69776 - DNA, 25 bp, Artificial
  Probe
gggtagttagtcattctaagacaga

SEQ ID NO: 69777 - DNA, 25 bp, Artificial
  Probe
attagtagaccagaagatagctgta

SEQ ID NO: 69778 - DNA, 25 bp, Artificial
  Probe
atactgtttccctctgtgtgtatta

SEQ ID NO: 69779 - DNA, 25 bp, Artificial
  Probe
caaccaagcctgttatgagcattct

SEQ ID NO: 69780 - DNA, 25 bp, Artificial
  Probe
agatactgtttccctctgtgtgtat

SEQ ID NO: 69781 - DNA, 25 bp, Artificial
  Probe
gatgtgtgttgtgggtgatttcatt

SEQ ID NO: 69782 - DNA, 25 bp, Artificial
  Probe
tgttatgagcattctagcttaacct

SEQ ID NO: 69783 - DNA, 25 bp, Artificial
  Probe
tgttatatttagtcgatggtgtgct

SEQ ID NO: 69784 - DNA, 25 bp, Artificial
  Probe
gtgttatatttagtcgatggtgtgc

SEQ ID NO: 69785 - DNA, 25 bp, Artificial
  Probe
ctgttatgagcattctagcttaacc

SEQ ID NO: 69786 - DNA, 25 bp, Artificial
  Probe
cctgttatgagcattctagcttaac

SEQ ID NO: 69787 - DNA, 25 bp, Artificial
  Probe
atatttagtcgatggtgtgctttca

SEQ ID NO: 69788 - DNA, 25 bp, Artificial
  Probe
gttatgagcattctagcttaacctc

SEQ ID NO: 69789 - DNA, 25 bp, Artificial
  Probe
gttatatttagtcgatggtgtgctt

SEQ ID NO: 69790 - DNA, 25 bp, Artificial
  Probe
caccataagaatcacatcaacacag

SEQ ID NO: 69791 - DNA, 25 bp, Artificial
  Probe
aacacaccataagaatcacatcaac

SEQ ID NO: 69792 - DNA, 25 bp, Artificial
  Probe
caacacaccataagaatcacatcaa

SEQ ID NO: 69793 - DNA, 25 bp, Artificial
  Probe
cacaccataagaatcacatcaacac

SEQ ID NO: 69794 - DNA, 25 bp, Artificial
  Probe
acaccataagaatcacatcaacaca

SEQ ID NO: 69795 - DNA, 25 bp, Artificial
  Probe
acacaccataagaatcacatcaaca

SEQ ID NO: 69796 - DNA, 25 bp, Artificial
  Probe
aaccaacacaccataagaatcacat

SEQ ID NO: 69797 - DNA, 25 bp, Artificial
  Probe
accataagaatcacatcaacacagg

SEQ ID NO: 69798 - DNA, 25 bp, Artificial
  Probe
cactgatacgcaatatgagacacaa

SEQ ID NO: 69799 - DNA, 25 bp, Artificial
  Probe
ccaacacaccataagaatcacatca

SEQ ID NO: 69800 - DNA, 25 bp, Artificial
  Probe
accaacacaccataagaatcacatc

SEQ ID NO: 69801 - DNA, 25 bp, Artificial
  Probe
ccataagaatcacatcaacacaggc

SEQ ID NO: 69802 - DNA, 25 bp, Artificial
  Probe
tccactgatacgcaatatgagacac

SEQ ID NO: 69803 - DNA, 25 bp, Artificial
  Probe
ataagaatcacatcaacacaggcga

SEQ ID NO: 69804 - DNA, 25 bp, Artificial
  Probe
cataagaatcacatcaacacaggcg

SEQ ID NO: 69805 - DNA, 25 bp, Artificial
  Probe
taagaatcacatcaacacaggcgaa

SEQ ID NO: 69806 - DNA, 25 bp, Artificial
  Probe
ccactgatacgcaatatgagacaca

SEQ ID NO: 69807 - DNA, 25 bp, Artificial
  Probe
tcagaaataacagatacagaccacg

SEQ ID NO: 69808 - DNA, 25 bp, Artificial
  Probe
ctgatacgcaatatgagacacaaat

SEQ ID NO: 69809 - DNA, 25 bp, Artificial
  Probe
tacgcaatatgagacacaaatacac

SEQ ID NO: 69810 - DNA, 25 bp, Artificial
  Probe
gaaaccaacacaccataagaatcac

SEQ ID NO: 69811 - DNA, 25 bp, Artificial
  Probe
actgatacgcaatatgagacacaaa

SEQ ID NO: 69812 - DNA, 25 bp, Artificial
  Probe
aaaccaacacaccataagaatcaca

SEQ ID NO: 69813 - DNA, 25 bp, Artificial
  Probe
agtccactgatacgcaatatgagac

SEQ ID NO: 69814 - DNA, 25 bp, Artificial
  Probe
aatacaaacacaaacaacacgcaaa

SEQ ID NO: 69815 - DNA, 25 bp, Artificial
  Probe
aaatacaaacacaaacaacacgcaa

SEQ ID NO: 69816 - DNA, 25 bp, Artificial
  Probe
atacgcaatatgagacacaaataca

SEQ ID NO: 69817 - DNA, 25 bp, Artificial
  Probe
ggaaaccaacacaccataagaatca

SEQ ID NO: 69818 - DNA, 25 bp, Artificial
  Probe
gtccactgatacgcaatatgagaca

SEQ ID NO: 69819 - DNA, 25 bp, Artificial
  Probe
tgatacgcaatatgagacacaaata

SEQ ID NO: 69820 - DNA, 25 bp, Artificial
  Probe
cagaaataacagatacagaccacgc

SEQ ID NO: 69821 - DNA, 25 bp, Artificial
  Probe
atcagaaataacagatacagaccac

SEQ ID NO: 69822 - DNA, 25 bp, Artificial
  Probe
gatacgcaatatgagacacaaatac

SEQ ID NO: 69823 - DNA, 25 bp, Artificial
  Probe
tgtaaatgttccctgacaatgtttg

SEQ ID NO: 69824 - DNA, 25 bp, Artificial
  Probe
acgcaatatgagacacaaatacacg

SEQ ID NO: 69825 - DNA, 25 bp, Artificial
  Probe
cagtccactgatacgcaatatgaga

SEQ ID NO: 69826 - DNA, 25 bp, Artificial
  Probe
ataggaataggacacgacacacgag

SEQ ID NO: 69827 - DNA, 25 bp, Artificial
  Probe
gataggaataggacacgacacacga

SEQ ID NO: 69828 - DNA, 25 bp, Artificial
  Probe
cggaaaccaacacaccataagaatc

SEQ ID NO: 69829 - DNA, 25 bp, Artificial
  Probe
ttattcttgtaaatgttccctgaca

SEQ ID NO: 69830 - DNA, 25 bp, Artificial
  Probe
ataaccgtagaactcccttcaagtg

SEQ ID NO: 69831 - DNA, 25 bp, Artificial
  Probe
cataaccgtagaactcccttcaagt

SEQ ID NO: 69832 - DNA, 25 bp, Artificial
  Probe
gatcagaaataacagatacagacca

SEQ ID NO: 69833 - DNA, 25 bp, Artificial
  Probe
ccataaccgtagaactcccttcaag

SEQ ID NO: 69834 - DNA, 25 bp, Artificial
  Probe
tttattcttgtaaatgttccctgac

SEQ ID NO: 69835 - DNA, 25 bp, Artificial
  Probe
ctacaagcagatgaagcaactgaag

SEQ ID NO: 69836 - DNA, 25 bp, Artificial
  Probe
tacaagcagatgaagcaactgaaga

SEQ ID NO: 69837 - DNA, 25 bp, Artificial
  Probe
tctacaagcagatgaagcaactgaa

SEQ ID NO: 69838 - DNA, 25 bp, Artificial
  Probe
ctctacaagcagatgaagcaactga

SEQ ID NO: 69839 - DNA, 25 bp, Artificial
  Probe
acaagcagatgaagcaactgaagac

SEQ ID NO: 69840 - DNA, 25 bp, Artificial
  Probe
gtcgtcagcatacctgataatcaag

SEQ ID NO: 69841 - DNA, 25 bp, Artificial
  Probe
caagcagatgaagcaactgaagacc

SEQ ID NO: 69842 - DNA, 25 bp, Artificial
  Probe
tcgtcagcatacctgataatcaagg

SEQ ID NO: 69843 - DNA, 25 bp, Artificial
  Probe
tacctgataatcaaggtcacattga

SEQ ID NO: 69844 - DNA, 25 bp, Artificial
  Probe
cgtcgtcagcatacctgataatcaa

SEQ ID NO: 69845 - DNA, 25 bp, Artificial
  Probe
gcatacctgataatcaaggtcacat

SEQ ID NO: 69846 - DNA, 25 bp, Artificial
  Probe
acctgataatcaaggtcacattgac

SEQ ID NO: 69847 - DNA, 25 bp, Artificial
  Probe
gtcagcatacctgataatcaaggtc

SEQ ID NO: 69848 - DNA, 25 bp, Artificial
  Probe
cagcatacctgataatcaaggtcac

SEQ ID NO: 69849 - DNA, 25 bp, Artificial
  Probe
gctctacaagcagatgaagcaactg

SEQ ID NO: 69850 - DNA, 25 bp, Artificial
  Probe
tcagcatacctgataatcaaggtca

SEQ ID NO: 69851 - DNA, 25 bp, Artificial
  Probe
atacctgataatcaaggtcacattg

SEQ ID NO: 69852 - DNA, 25 bp, Artificial
  Probe
catacctgataatcaaggtcacatt

SEQ ID NO: 69853 - DNA, 25 bp, Artificial
  Probe
agcatacctgataatcaaggtcaca

SEQ ID NO: 69854 - DNA, 25 bp, Artificial
  Probe
gaaaaggattatctgctctacaagc

SEQ ID NO: 69855 - DNA, 25 bp, Artificial
  Probe
gtgtttagcacagagcactacaacc

SEQ ID NO: 69856 - DNA, 25 bp, Artificial
  Probe
ggtgtttagcacagagcactacaac

SEQ ID NO: 69857 - DNA, 25 bp, Artificial
  Probe
cgtcagcatacctgataatcaaggt

SEQ ID NO: 69858 - DNA, 25 bp, Artificial
  Probe
tggtgtttagcacagagcactacaa

SEQ ID NO: 69859 - DNA, 25 bp, Artificial
  Probe
ctggtgtttagcacagagcactaca

SEQ ID NO: 69860 - DNA, 25 bp, Artificial
  Probe
acgtcgtcagcatacctgataatca

SEQ ID NO: 69861 - DNA, 25 bp, Artificial
  Probe
tgtttagcacagagcactacaaccc

SEQ ID NO: 69862 - DNA, 25 bp, Artificial
  Probe
gtcacattgacccttcactgagacc

SEQ ID NO: 69863 - DNA, 25 bp, Artificial
  Probe
gagaggaacgtttgggcaaatgttc

SEQ ID NO: 69864 - DNA, 25 bp, Artificial
  Probe
tttcaagaatgaaaagcccagaccg

SEQ ID NO: 69865 - DNA, 25 bp, Artificial
  Probe
gaggaacgtttgggcaaatgttctg

SEQ ID NO: 69866 - DNA, 25 bp, Artificial
  Probe
aattaaacttccgcctttgtgtatg

SEQ ID NO: 69867 - DNA, 25 bp, Artificial
  Probe
aaattaaacttccgcctttgtgtat

SEQ ID NO: 69868 - DNA, 25 bp, Artificial
  Probe
caactttcacttctaggaatgcttt

SEQ ID NO: 69869 - DNA, 25 bp, Artificial
  Probe
acaactttcacttctaggaatgctt

SEQ ID NO: 69870 - DNA, 25 bp, Artificial
  Probe
attaaacttccgcctttgtgtatgg

SEQ ID NO: 69871 - DNA, 25 bp, Artificial
  Probe
ctacccaaattaaacttccgccttt

SEQ ID NO: 69872 - DNA, 25 bp, Artificial
  Probe
cacaactttcacttctaggaatgct

SEQ ID NO: 69873 - DNA, 25 bp, Artificial
  Probe
actttcacttctaggaatgctttaa

SEQ ID NO: 69874 - DNA, 25 bp, Artificial
  Probe
aactttcacttctaggaatgcttta

SEQ ID NO: 69875 - DNA, 25 bp, Artificial
  Probe
gtacctacccaaattaaacttccgc

SEQ ID NO: 69876 - DNA, 25 bp, Artificial
  Probe
ccacaactttcacttctaggaatgc

SEQ ID NO: 69877 - DNA, 25 bp, Artificial
  Probe
gccacaactttcacttctaggaatg

SEQ ID NO: 69878 - DNA, 25 bp, Artificial
  Probe
tacctacccaaattaaacttccgcc

SEQ ID NO: 69879 - DNA, 25 bp, Artificial
  Probe
ttaaacttccgcctttgtgtatggt

SEQ ID NO: 69880 - DNA, 25 bp, Artificial
  Probe
taaacttccgcctttgtgtatggtc

SEQ ID NO: 69881 - DNA, 25 bp, Artificial
  Probe
cctacccaaattaaacttccgcctt

SEQ ID NO: 69882 - DNA, 25 bp, Artificial
  Probe
caaattaaacttccgcctttgtgta

SEQ ID NO: 69883 - DNA, 25 bp, Artificial
  Probe
tacccaaattaaacttccgcctttg

SEQ ID NO: 69884 - DNA, 25 bp, Artificial
  Probe
acctacccaaattaaacttccgcct

SEQ ID NO: 69885 - DNA, 25 bp, Artificial
  Probe
gatacaacaggaaaagcatgtgatg

SEQ ID NO: 69886 - DNA, 25 bp, Artificial
  Probe
ccaaattaaacttccgcctttgtgt

SEQ ID NO: 69887 - DNA, 25 bp, Artificial
  Probe
atacaacaggaaaagcatgtgatgt

SEQ ID NO: 69888 - DNA, 25 bp, Artificial
  Probe
gtgaggatacaacaggaaaagcatg

SEQ ID NO: 69889 - DNA, 25 bp, Artificial
  Probe
ggatacaacaggaaaagcatgtgat

SEQ ID NO: 69890 - DNA, 25 bp, Artificial
  Probe
tgtgaggatacaacaggaaaagcat

SEQ ID NO: 69891 - DNA, 25 bp, Artificial
  Probe
cccaaattaaacttccgcctttgtg

SEQ ID NO: 69892 - DNA, 25 bp, Artificial
  Probe
gaggatacaacaggaaaagcatgtg

SEQ ID NO: 69893 - DNA, 25 bp, Artificial
  Probe
ggccacaactttcacttctaggaat

SEQ ID NO: 69894 - DNA, 25 bp, Artificial
  Probe
aggatacaacaggaaaagcatgtga

SEQ ID NO: 69895 - DNA, 25 bp, Artificial
  Probe
tgaggatacaacaggaaaagcatgt

SEQ ID NO: 69896 - DNA, 25 bp, Artificial
  Probe
acccaaattaaacttccgcctttgt

SEQ ID NO: 69897 - DNA, 25 bp, Artificial
  Probe
tgagagagcacccgatacaaaagag

SEQ ID NO: 69898 - DNA, 25 bp, Artificial
  Probe
acaggaaaagcatgtgatgttaggg

SEQ ID NO: 69899 - DNA, 25 bp, Artificial
  Probe
caacaggaaaagcatgtgatgttag

SEQ ID NO: 69900 - DNA, 25 bp, Artificial
  Probe
aggccacaactttcacttctaggaa

SEQ ID NO: 69901 - DNA, 25 bp, Artificial
  Probe
acaacaggaaaagcatgtgatgtta

SEQ ID NO: 69902 - DNA, 25 bp, Artificial
  Probe
tacaacaggaaaagcatgtgatgtt

SEQ ID NO: 69903 - DNA, 25 bp, Artificial
  Probe
caggaaaagcatgtgatgttagggg

SEQ ID NO: 69904 - DNA, 25 bp, Artificial
  Probe
aacaggaaaagcatgtgatgttagg

SEQ ID NO: 69905 - DNA, 25 bp, Artificial
  Probe
ggtacctacccaaattaaacttccg

SEQ ID NO: 69906 - DNA, 25 bp, Artificial
  Probe
gtctgaatgaaacctttctggggtc

SEQ ID NO: 69907 - DNA, 25 bp, Artificial
  Probe
gagagagcacccgatacaaaagagg

SEQ ID NO: 69908 - DNA, 25 bp, Artificial
  Probe
caggccacaactttcacttctagga

SEQ ID NO: 69909 - DNA, 25 bp, Artificial
  Probe
tctgaatgaaacctttctggggtca

SEQ ID NO: 69910 - DNA, 25 bp, Artificial
  Probe
tttgcaataaaggaagtgagggtgg

SEQ ID NO: 69911 - DNA, 25 bp, Artificial
  Probe
cactgtatggctggatattcttaga

SEQ ID NO: 69912 - DNA, 25 bp, Artificial
  Probe
gcactgtatggctggatattcttag

SEQ ID NO: 69913 - DNA, 25 bp, Artificial
  Probe
actgtatggctggatattcttagat

SEQ ID NO: 69914 - DNA, 25 bp, Artificial
  Probe
tagatggtacagttactcagtggtt

SEQ ID NO: 69915 - DNA, 25 bp, Artificial
  Probe
accatattcctgacaataactccta

SEQ ID NO: 69916 - DNA, 25 bp, Artificial
  Probe
taccatattcctgacaataactcct

SEQ ID NO: 69917 - DNA, 25 bp, Artificial
  Probe
cataatcttcatgctagttgctgtt

SEQ ID NO: 69918 - DNA, 25 bp, Artificial
  Probe
tcataatcttcatgctagttgctgt

SEQ ID NO: 69919 - DNA, 25 bp, Artificial
  Probe
atcataatcttcatgctagttgctg

SEQ ID NO: 69920 - DNA, 25 bp, Artificial
  Probe
catcataatcttcatgctagttgct

SEQ ID NO: 69921 - DNA, 25 bp, Artificial
  Probe
ccatattcctgacaataactcctaa

SEQ ID NO: 69922 - DNA, 25 bp, Artificial
  Probe
tgcactgtatggctggatattctta

SEQ ID NO: 69923 - DNA, 25 bp, Artificial
  Probe
catattcctgacaataactcctaac

SEQ ID NO: 69924 - DNA, 25 bp, Artificial
  Probe
atattcctgacaataactcctaact

SEQ ID NO: 69925 - DNA, 25 bp, Artificial
  Probe
agatggtacagttactcagtggttt

SEQ ID NO: 69926 - DNA, 25 bp, Artificial
  Probe
ataatcttcatgctagttgctgttt

SEQ ID NO: 69927 - DNA, 25 bp, Artificial
  Probe
ttgcactgtatggctggatattctt

SEQ ID NO: 69928 - DNA, 25 bp, Artificial
  Probe
taatcttcatgctagttgctgtttt

SEQ ID NO: 69929 - DNA, 25 bp, Artificial
  Probe
agagctatgcatcataatcttcatg

SEQ ID NO: 69930 - DNA, 25 bp, Artificial
  Probe
tttaacgtctgaatggaaacctggg

SEQ ID NO: 69931 - DNA, 25 bp, Artificial
  Probe
gcatcataatcttcatgctagttgc

SEQ ID NO: 69932 - DNA, 25 bp, Artificial
  Probe
tcatctttgaagagctatgcatcat

SEQ ID NO: 69933 - DNA, 25 bp, Artificial
  Probe
gtttaacgtctgaatggaaacctgg

SEQ ID NO: 69934 - DNA, 25 bp, Artificial
  Probe
ttgaagagctatgcatcataatctt

SEQ ID NO: 69935 - DNA, 25 bp, Artificial
  Probe
tgcatcataatcttcatgctagttg

SEQ ID NO: 69936 - DNA, 25 bp, Artificial
  Probe
aagagctatgcatcataatcttcat

SEQ ID NO: 69937 - DNA, 25 bp, Artificial
  Probe
catctttgaagagctatgcatcata

SEQ ID NO: 69938 - DNA, 25 bp, Artificial
  Probe
ttaacgtctgaatggaaacctgggt

SEQ ID NO: 69939 - DNA, 25 bp, Artificial
  Probe
cgtttaacgtctgaatggaaacctg

SEQ ID NO: 69940 - DNA, 25 bp, Artificial
  Probe
taacgtctgaatggaaacctgggtt

SEQ ID NO: 69941 - DNA, 25 bp, Artificial
  Probe
tttgaagagctatgcatcataatct

SEQ ID NO: 69942 - DNA, 25 bp, Artificial
  Probe
tctttgaagagctatgcatcataat

SEQ ID NO: 69943 - DNA, 25 bp, Artificial
  Probe
atctttgaagagctatgcatcataa

SEQ ID NO: 69944 - DNA, 25 bp, Artificial
  Probe
ctttgaagagctatgcatcataatc

SEQ ID NO: 69945 - DNA, 25 bp, Artificial
  Probe
gagctatgcatcataatcttcatgc

SEQ ID NO: 69946 - DNA, 25 bp, Artificial
  Probe
agctatgcatcataatcttcatgct

SEQ ID NO: 69947 - DNA, 25 bp, Artificial
  Probe
gctatgcatcataatcttcatgcta

SEQ ID NO: 69948 - DNA, 25 bp, Artificial
  Probe
gcgtttaacgtctgaatggaaacct

SEQ ID NO: 69949 - DNA, 25 bp, Artificial
  Probe
atgcatcataatcttcatgctagtt

SEQ ID NO: 69950 - DNA, 25 bp, Artificial
  Probe
tatgcatcataatcttcatgctagt

SEQ ID NO: 69951 - DNA, 25 bp, Artificial
  Probe
ctatgcatcataatcttcatgctag

SEQ ID NO: 69952 - DNA, 25 bp, Artificial
  Probe
ccatagtgatggttacagtcacggg

SEQ ID NO: 69953 - DNA, 25 bp, Artificial
  Probe
agagccacctggatagagttagtaa

SEQ ID NO: 69954 - DNA, 25 bp, Artificial
  Probe
gagagccacctggatagagttagta

SEQ ID NO: 69955 - DNA, 25 bp, Artificial
  Probe
cacctggatagagttagtaaacctc

SEQ ID NO: 69956 - DNA, 25 bp, Artificial
  Probe
gagccacctggatagagttagtaaa

SEQ ID NO: 69957 - DNA, 25 bp, Artificial
  Probe
ccacctggatagagttagtaaacct

SEQ ID NO: 69958 - DNA, 25 bp, Artificial
  Probe
gttagtaaacctctgtcttatctgg

SEQ ID NO: 69959 - DNA, 25 bp, Artificial
  Probe
agccacctggatagagttagtaaac

SEQ ID NO: 69960 - DNA, 25 bp, Artificial
  Probe
agttagtaaacctctgtcttatctg

SEQ ID NO: 69961 - DNA, 25 bp, Artificial
  Probe
gccacctggatagagttagtaaacc

SEQ ID NO: 69962 - DNA, 25 bp, Artificial
  Probe
gagttagtaaacctctgtcttatct

SEQ ID NO: 69963 - DNA, 25 bp, Artificial
  Probe
ggagagccacctggatagagttagt

SEQ ID NO: 69964 - DNA, 25 bp, Artificial
  Probe
acctggatagagttagtaaacctct

SEQ ID NO: 69965 - DNA, 25 bp, Artificial
  Probe
cctggatagagttagtaaacctctg

SEQ ID NO: 69966 - DNA, 25 bp, Artificial
  Probe
tggatagagttagtaaacctctgtc

SEQ ID NO: 69967 - DNA, 25 bp, Artificial
  Probe
ctggatagagttagtaaacctctgt

SEQ ID NO: 69968 - DNA, 25 bp, Artificial
  Probe
ggatagagttagtaaacctctgtct

SEQ ID NO: 69969 - DNA, 25 bp, Artificial
  Probe
tggagagccacctggatagagttag

SEQ ID NO: 69970 - DNA, 25 bp, Artificial
  Probe
ctggagagccacctggatagagtta

SEQ ID NO: 69971 - DNA, 25 bp, Artificial
  Probe
agagttagtaaacctctgtcttatc

SEQ ID NO: 69972 - DNA, 25 bp, Artificial
  Probe
gatagagttagtaaacctctgtctt

SEQ ID NO: 69973 - DNA, 25 bp, Artificial
  Probe
gacagacttttacccacaaccctct

SEQ ID NO: 69974 - DNA, 25 bp, Artificial
  Probe
tagagttagtaaacctctgtcttat

SEQ ID NO: 69975 - DNA, 25 bp, Artificial
  Probe
atagagttagtaaacctctgtctta

SEQ ID NO: 69976 - DNA, 25 bp, Artificial
  Probe
acagacttttacccacaaccctctg

SEQ ID NO: 69977 - DNA, 25 bp, Artificial
  Probe
tcagacaagaaggaggagtaaagac

SEQ ID NO: 69978 - DNA, 25 bp, Artificial
  Probe
agacaagaaggaggagtaaagactt

SEQ ID NO: 69979 - DNA, 25 bp, Artificial
  Probe
ccttaccaaagaatatgaccgtctg

SEQ ID NO: 69980 - DNA, 25 bp, Artificial
  Probe
taccaaagaatatgaccgtctgcta

SEQ ID NO: 69981 - DNA, 25 bp, Artificial
  Probe
cagacaagaaggaggagtaaagact

SEQ ID NO: 69982 - DNA, 25 bp, Artificial
  Probe
ctcagacaagaaggaggagtaaaga

SEQ ID NO: 69983 - DNA, 25 bp, Artificial
  Probe
cttaccaaagaatatgaccgtctgc

SEQ ID NO: 69984 - DNA, 25 bp, Artificial
  Probe
ttaccaaagaatatgaccgtctgct

SEQ ID NO: 69985 - DNA, 25 bp, Artificial
  Probe
gccttaccaaagaatatgaccgtct

SEQ ID NO: 69986 - DNA, 25 bp, Artificial
  Probe
gacaagaaggaggagtaaagacttg

SEQ ID NO: 69987 - DNA, 25 bp, Artificial
  Probe
ggccttaccaaagaatatgaccgtc

SEQ ID NO: 69988 - DNA, 25 bp, Artificial
  Probe
cctcagacaagaaggaggagtaaag

SEQ ID NO: 69989 - DNA, 25 bp, Artificial
  Probe
agggccttaccaaagaatatgaccg

SEQ ID NO: 69990 - DNA, 25 bp, Artificial
  Probe
gggccttaccaaagaatatgaccgt

SEQ ID NO: 69991 - DNA, 25 bp, Artificial
  Probe
ccctcagacaagaaggaggagtaaa

SEQ ID NO: 69992 - DNA, 25 bp, Artificial
  Probe
tccctcagacaagaaggaggagtaa

SEQ ID NO: 69993 - DNA, 25 bp, Artificial
  Probe
gtccctcagacaagaaggaggagta

SEQ ID NO: 69994 - DNA, 25 bp, Artificial
  Probe
tagagagatacaagcagaagaagga

SEQ ID NO: 69995 - DNA, 25 bp, Artificial
  Probe
tagaagagatagagagcattgacca

SEQ ID NO: 69996 - DNA, 25 bp, Artificial
  Probe
ttagaagagatagagagcattgacc

SEQ ID NO: 69997 - DNA, 25 bp, Artificial
  Probe
atagagagatacaagcagaagaagg

SEQ ID NO: 69998 - DNA, 25 bp, Artificial
  Probe
taagagccacgaggaatacaagtaa

SEQ ID NO: 69999 - DNA, 25 bp, Artificial
  Probe
agagagatacaagcagaagaaggag

SEQ ID NO: 70000 - DNA, 25 bp, Artificial
  Probe
ttaagagccacgaggaatacaagta

SEQ ID NO: 70001 - DNA, 25 bp, Artificial
  Probe
agaagagatagagagcattgaccag

SEQ ID NO: 70002 - DNA, 25 bp, Artificial
  Probe
gattaagagccacgaggaatacaag

SEQ ID NO: 70003 - DNA, 25 bp, Artificial
  Probe
attaagagccacgaggaatacaagt

SEQ ID NO: 70004 - DNA, 25 bp, Artificial
  Probe
gagagatacaagcagaagaaggagg

SEQ ID NO: 70005 - DNA, 25 bp, Artificial
  Probe
aatagagagatacaagcagaagaag

SEQ ID NO: 70006 - DNA, 25 bp, Artificial
  Probe
gaagagatagagagcattgaccagg

SEQ ID NO: 70007 - DNA, 25 bp, Artificial
  Probe
ggattaagagccacgaggaatacaa

SEQ ID NO: 70008 - DNA, 25 bp, Artificial
  Probe
agagatagagagcattgaccaggaa

SEQ ID NO: 70009 - DNA, 25 bp, Artificial
  Probe
aagagatagagagcattgaccagga

SEQ ID NO: 70010 - DNA, 25 bp, Artificial
  Probe
gagatacaagcagaagaaggaggtg

SEQ ID NO: 70011 - DNA, 25 bp, Artificial
  Probe
agagatacaagcagaagaaggaggt

SEQ ID NO: 70012 - DNA, 25 bp, Artificial
  Probe
atagagagcattgaccaggaaatac

SEQ ID NO: 70013 - DNA, 25 bp, Artificial
  Probe
gatagagagcattgaccaggaaata

SEQ ID NO: 70014 - DNA, 25 bp, Artificial
  Probe
tagagagcattgaccaggaaataca

SEQ ID NO: 70015 - DNA, 25 bp, Artificial
  Probe
agatagagagcattgaccaggaaat

SEQ ID NO: 70016 - DNA, 25 bp, Artificial
  Probe
gcttagaagagatagagagcattga

SEQ ID NO: 70017 - DNA, 25 bp, Artificial
  Probe
tggtatcagcttagaagagatagag

SEQ ID NO: 70018 - DNA, 25 bp, Artificial
  Probe
gagatagagagcattgaccaggaaa

SEQ ID NO: 70019 - DNA, 25 bp, Artificial
  Probe
ggtatcagcttagaagagatagaga

SEQ ID NO: 70020 - DNA, 25 bp, Artificial
  Probe
aagagccacgaggaatacaagtaaa

SEQ ID NO: 70021 - DNA, 25 bp, Artificial
  Probe
ttggtatcagcttagaagagataga

SEQ ID NO: 70022 - DNA, 25 bp, Artificial
  Probe
gaaatacagtcctgaaagaccaaga

SEQ ID NO: 70023 - DNA, 25 bp, Artificial
  Probe
tgacagataaagacgggctacaatt

SEQ ID NO: 70024 - DNA, 25 bp, Artificial
  Probe
aaatacagtcctgaaagaccaagac

SEQ ID NO: 70025 - DNA, 25 bp, Artificial
  Probe
agagagcattgaccaggaaatacag

SEQ ID NO: 70026 - DNA, 25 bp, Artificial
  Probe
atacaagcagaagaaggaggtggag

SEQ ID NO: 70027 - DNA, 25 bp, Artificial
  Probe
gatacaagcagaagaaggaggtgga

SEQ ID NO: 70028 - DNA, 25 bp, Artificial
  Probe
agatacaagcagaagaaggaggtgg

SEQ ID NO: 70029 - DNA, 25 bp, Artificial
  Probe
agcttagaagagatagagagcattg

SEQ ID NO: 70030 - DNA, 25 bp, Artificial
  Probe
cagcttagaagagatagagagcatt

SEQ ID NO: 70031 - DNA, 25 bp, Artificial
  Probe
tcagcttagaagagatagagagcat

SEQ ID NO: 70032 - DNA, 25 bp, Artificial
  Probe
atcagcttagaagagatagagagca

SEQ ID NO: 70033 - DNA, 25 bp, Artificial
  Probe
gagagcattgaccaggaaatacagt

SEQ ID NO: 70034 - DNA, 25 bp, Artificial
  Probe
ctgacagataaagacgggctacaat

SEQ ID NO: 70035 - DNA, 25 bp, Artificial
  Probe
attggtatcagcttagaagagatag

SEQ ID NO: 70036 - DNA, 25 bp, Artificial
  Probe
gattggtatcagcttagaagagata

SEQ ID NO: 70037 - DNA, 25 bp, Artificial
  Probe
tatcagcttagaagagatagagagc

SEQ ID NO: 70038 - DNA, 25 bp, Artificial
  Probe
ggaaatacagtcctgaaagaccaag

SEQ ID NO: 70039 - DNA, 25 bp, Artificial
  Probe
agcctgttatgagatgatgttactt

SEQ ID NO: 70040 - DNA, 25 bp, Artificial
  Probe
gagcctgttatgagatgatgttact

SEQ ID NO: 70041 - DNA, 25 bp, Artificial
  Probe
ggagcctgttatgagatgatgttac

SEQ ID NO: 70042 - DNA, 25 bp, Artificial
  Probe
aggagcctgttatgagatgatgtta

SEQ ID NO: 70043 - DNA, 25 bp, Artificial
  Probe
aaccttcactcagagaacagttatg

SEQ ID NO: 70044 - DNA, 25 bp, Artificial
  Probe
accttcactcagagaacagttatgt

SEQ ID NO: 70045 - DNA, 25 bp, Artificial
  Probe
gcctgttatgagatgatgttacttt

SEQ ID NO: 70046 - DNA, 25 bp, Artificial
  Probe
aacataaaccttcactcagagaaca

SEQ ID NO: 70047 - DNA, 25 bp, Artificial
  Probe
acataaaccttcactcagagaacag

SEQ ID NO: 70048 - DNA, 25 bp, Artificial
  Probe
aaaccttcactcagagaacagttat

SEQ ID NO: 70049 - DNA, 25 bp, Artificial
  Probe
ataaaccttcactcagagaacagtt

SEQ ID NO: 70050 - DNA, 25 bp, Artificial
  Probe
cataaaccttcactcagagaacagt

SEQ ID NO: 70051 - DNA, 25 bp, Artificial
  Probe
acttaacataaaccttcactcagag

SEQ ID NO: 70052 - DNA, 25 bp, Artificial
  Probe
taaaccttcactcagagaacagtta

SEQ ID NO: 70053 - DNA, 25 bp, Artificial
  Probe
attcaggagcctgttatgagatgat

SEQ ID NO: 70054 - DNA, 25 bp, Artificial
  Probe
cttaacataaaccttcactcagaga

SEQ ID NO: 70055 - DNA, 25 bp, Artificial
  Probe
taacataaaccttcactcagagaac

SEQ ID NO: 70056 - DNA, 25 bp, Artificial
  Probe
aattcaggagcctgttatgagatga

SEQ ID NO: 70057 - DNA, 25 bp, Artificial
  Probe
aacttaacataaaccttcactcaga

SEQ ID NO: 70058 - DNA, 25 bp, Artificial
  Probe
ttcaggagcctgttatgagatgatg

SEQ ID NO: 70059 - DNA, 25 bp, Artificial
  Probe
ttaacataaaccttcactcagagaa

SEQ ID NO: 70060 - DNA, 25 bp, Artificial
  Probe
cactgtatgaaatgtgtgctatact

SEQ ID NO: 70061 - DNA, 25 bp, Artificial
  Probe
tttctaaatgacctgctgtacttat

SEQ ID NO: 70062 - DNA, 25 bp, Artificial
  Probe
aaacttaacataaaccttcactcag

SEQ ID NO: 70063 - DNA, 25 bp, Artificial
  Probe
caggagcctgttatgagatgatgtt

SEQ ID NO: 70064 - DNA, 25 bp, Artificial
  Probe
ttcactcagagaacagttatgttgt

SEQ ID NO: 70065 - DNA, 25 bp, Artificial
  Probe
cttcactcagagaacagttatgttg

SEQ ID NO: 70066 - DNA, 25 bp, Artificial
  Probe
ccttcactcagagaacagttatgtt

SEQ ID NO: 70067 - DNA, 25 bp, Artificial
  Probe
aatgtttggaatatacactactggt

SEQ ID NO: 70068 - DNA, 25 bp, Artificial
  Probe
aggaagaatgtttggaatatacact

SEQ ID NO: 70069 - DNA, 25 bp, Artificial
  Probe
tcactcagagaacagttatgttgta

SEQ ID NO: 70070 - DNA, 25 bp, Artificial
  Probe
ctaagttgcttctaaagtgtttaca

SEQ ID NO: 70071 - DNA, 25 bp, Artificial
  Probe
actaagttgcttctaaagtgtttac

SEQ ID NO: 70072 - DNA, 25 bp, Artificial
  Probe
gttgcttctaaagtgtttacacctt

SEQ ID NO: 70073 - DNA, 25 bp, Artificial
  Probe
aagttgcttctaaagtgtttacacc

SEQ ID NO: 70074 - DNA, 25 bp, Artificial
  Probe
agttgcttctaaagtgtttacacct

SEQ ID NO: 70075 - DNA, 25 bp, Artificial
  Probe
cactcagagaacagttatgttgtat

SEQ ID NO: 70076 - DNA, 25 bp, Artificial
  Probe
tgtttggaatatacactactggtag

SEQ ID NO: 70077 - DNA, 25 bp, Artificial
  Probe
gaatgtttggaatatacactactgg

SEQ ID NO: 70078 - DNA, 25 bp, Artificial
  Probe
aaattcaggagcctgttatgagatg

SEQ ID NO: 70079 - DNA, 25 bp, Artificial
  Probe
ctcagagaacagttatgttgtatca

SEQ ID NO: 70080 - DNA, 25 bp, Artificial
  Probe
actcagagaacagttatgttgtatc

SEQ ID NO: 70081 - DNA, 25 bp, Artificial
  Probe
tcaggagcctgttatgagatgatgt

SEQ ID NO: 70082 - DNA, 25 bp, Artificial
  Probe
acaccttaaacttaacataaacctt

SEQ ID NO: 70083 - DNA, 25 bp, Artificial
  Probe
tgcttctaaagtgtttacaccttaa

SEQ ID NO: 70084 - DNA, 25 bp, Artificial
  Probe
aaggagattgagattgacatcgaac

SEQ ID NO: 70085 - DNA, 25 bp, Artificial
  Probe
ttccctctcttatggctatatcctt

SEQ ID NO: 70086 - DNA, 25 bp, Artificial
  Probe
cttccctctcttatggctatatcct

SEQ ID NO: 70087 - DNA, 25 bp, Artificial
  Probe
ctggaaaggagattgagattgacat

SEQ ID NO: 70088 - DNA, 25 bp, Artificial
  Probe
cttcctgtctttatctcaatgtcgt

SEQ ID NO: 70089 - DNA, 25 bp, Artificial
  Probe
tccctctcttatggctatatccttg

SEQ ID NO: 70090 - DNA, 25 bp, Artificial
  Probe
tggaaaggagattgagattgacatc

SEQ ID NO: 70091 - DNA, 25 bp, Artificial
  Probe
ttcctgtctttatctcaatgtcgtg

SEQ ID NO: 70092 - DNA, 25 bp, Artificial
  Probe
gactggaaaggagattgagattgac

SEQ ID NO: 70093 - DNA, 25 bp, Artificial
  Probe
ctgactggaaaggagattgagattg

SEQ ID NO: 70094 - DNA, 25 bp, Artificial
  Probe
tgcttccctctcttatggctatatc

SEQ ID NO: 70095 - DNA, 25 bp, Artificial
  Probe
tgactggaaaggagattgagattga

SEQ ID NO: 70096 - DNA, 25 bp, Artificial
  Probe
gtgcttccctctcttatggctatat

SEQ ID NO: 70097 - DNA, 25 bp, Artificial
  Probe
ccctctcttatggctatatccttgg

SEQ ID NO: 70098 - DNA, 25 bp, Artificial
  Probe
ggaaaggagattgagattgacatcg

SEQ ID NO: 70099 - DNA, 25 bp, Artificial
  Probe
actggaaaggagattgagattgaca

SEQ ID NO: 70100 - DNA, 25 bp, Artificial
  Probe
gcttcctgtctttatctcaatgtcg

SEQ ID NO: 70101 - DNA, 25 bp, Artificial
  Probe
cgcttcctgtctttatctcaatgtc

SEQ ID NO: 70102 - DNA, 25 bp, Artificial
  Probe
ctgtctttatctcaatgtcgtgctc

SEQ ID NO: 70103 - DNA, 25 bp, Artificial
  Probe
gcttccctctcttatggctatatcc

SEQ ID NO: 70104 - DNA, 25 bp, Artificial
  Probe
aagatgctaattaaagtgaagacgc

SEQ ID NO: 70105 - DNA, 25 bp, Artificial
  Probe
gggaggaagatgctaattaaagtga

SEQ ID NO: 70106 - DNA, 25 bp, Artificial
  Probe
ctgggaggaagatgctaattaaagt

SEQ ID NO: 70107 - DNA, 25 bp, Artificial
  Probe
tgggaggaagatgctaattaaagtg

SEQ ID NO: 70108 - DNA, 25 bp, Artificial
  Probe
gatgctaattaaagtgaagacgctg

SEQ ID NO: 70109 - DNA, 25 bp, Artificial
  Probe
agatgctaattaaagtgaagacgct

SEQ ID NO: 70110 - DNA, 25 bp, Artificial
  Probe
aggagattgagattgacatcgaacc

SEQ ID NO: 70111 - DNA, 25 bp, Artificial
  Probe
atgctaattaaagtgaagacgctga

SEQ ID NO: 70112 - DNA, 25 bp, Artificial
  Probe
ggaggaagatgctaattaaagtgaa

SEQ ID NO: 70113 - DNA, 25 bp, Artificial
  Probe
ctaattaaagtgaagacgctgactg

SEQ ID NO: 70114 - DNA, 25 bp, Artificial
  Probe
tgtgcttccctctcttatggctata

SEQ ID NO: 70115 - DNA, 25 bp, Artificial
  Probe
gctgactggaaaggagattgagatt

SEQ ID NO: 70116 - DNA, 25 bp, Artificial
  Probe
aaaggagattgagattgacatcgaa

SEQ ID NO: 70117 - DNA, 25 bp, Artificial
  Probe
tgctaattaaagtgaagacgctgac

SEQ ID NO: 70118 - DNA, 25 bp, Artificial
  Probe
gaagatgctaattaaagtgaagacg

SEQ ID NO: 70119 - DNA, 25 bp, Artificial
  Probe
tctttatctcaatgtcgtgctccag

SEQ ID NO: 70120 - DNA, 25 bp, Artificial
  Probe
gaaaggagattgagattgacatcga

SEQ ID NO: 70121 - DNA, 25 bp, Artificial
  Probe
taattaaagtgaagacgctgactgg

SEQ ID NO: 70122 - DNA, 25 bp, Artificial
  Probe
gctaattaaagtgaagacgctgact

SEQ ID NO: 70123 - DNA, 25 bp, Artificial
  Probe
gtctttatctcaatgtcgtgctcca

SEQ ID NO: 70124 - DNA, 25 bp, Artificial
  Probe
tgtctttatctcaatgtcgtgctcc

SEQ ID NO: 70125 - DNA, 25 bp, Artificial
  Probe
cctgtctttatctcaatgtcgtgct

SEQ ID NO: 70126 - DNA, 25 bp, Artificial
  Probe
tcctgtctttatctcaatgtcgtgc

SEQ ID NO: 70127 - DNA, 25 bp, Artificial
  Probe
attaaagtgaagacgctgactggaa

SEQ ID NO: 70128 - DNA, 25 bp, Artificial
  Probe
ggaagatgctaattaaagtgaagac

SEQ ID NO: 70129 - DNA, 25 bp, Artificial
  Probe
gcatttactataaaggagttggtgg

SEQ ID NO: 70130 - DNA, 25 bp, Artificial
  Probe
ggcatttactataaaggagttggtg

SEQ ID NO: 70131 - DNA, 25 bp, Artificial
  Probe
gtcggcatttactataaaggagttg

SEQ ID NO: 70132 - DNA, 25 bp, Artificial
  Probe
tcggcatttactataaaggagttgg

SEQ ID NO: 70133 - DNA, 25 bp, Artificial
  Probe
cggcatttactataaaggagttggt

SEQ ID NO: 70134 - DNA, 25 bp, Artificial
  Probe
cgtcggcatttactataaaggagtt

SEQ ID NO: 70135 - DNA, 25 bp, Artificial
  Probe
catttactataaaggagttggtgga

SEQ ID NO: 70136 - DNA, 25 bp, Artificial
  Probe
gtgaacgtcggcatttactataaag

SEQ ID NO: 70137 - DNA, 25 bp, Artificial
  Probe
aacgtcggcatttactataaaggag

SEQ ID NO: 70138 - DNA, 25 bp, Artificial
  Probe
gaacgtcggcatttactataaagga

SEQ ID NO: 70139 - DNA, 25 bp, Artificial
  Probe
tgaacgtcggcatttactataaagg

SEQ ID NO: 70140 - DNA, 25 bp, Artificial
  Probe
ggtgaacgtcggcatttactataaa

SEQ ID NO: 70141 - DNA, 25 bp, Artificial
  Probe
acgtcggcatttactataaaggagt

SEQ ID NO: 70142 - DNA, 25 bp, Artificial
  Probe
tcgtaagcatgtgtgtaatacgtta

SEQ ID NO: 70143 - DNA, 25 bp, Artificial
  Probe
cggtgaacgtcggcatttactataa

SEQ ID NO: 70144 - DNA, 25 bp, Artificial
  Probe
atcgtaagcatgtgtgtaatacgtt

SEQ ID NO: 70145 - DNA, 25 bp, Artificial
  Probe
catcgtaagcatgtgtgtaatacgt

SEQ ID NO: 70146 - DNA, 25 bp, Artificial
  Probe
atgaactgataacattaattctctg

SEQ ID NO: 70147 - DNA, 25 bp, Artificial
  Probe
gcatcgtaagcatgtgtgtaatacg

SEQ ID NO: 70148 - DNA, 25 bp, Artificial
  Probe
tcggtgaacgtcggcatttactata

SEQ ID NO: 70149 - DNA, 25 bp, Artificial
  Probe
gcattgcaaatatatgacattgtga

SEQ ID NO: 70150 - DNA, 25 bp, Artificial
  Probe
agcattgcaaatatatgacattgtg

SEQ ID NO: 70151 - DNA, 25 bp, Artificial
  Probe
aagcattgcaaatatatgacattgt

SEQ ID NO: 70152 - DNA, 25 bp, Artificial
  Probe
ttgaaagcattgcaaatatatgaca

SEQ ID NO: 70153 - DNA, 25 bp, Artificial
  Probe
tgaaagcattgcaaatatatgacat

SEQ ID NO: 70154 - DNA, 25 bp, Artificial
  Probe
cattgcaaatatatgacattgtgac

SEQ ID NO: 70155 - DNA, 25 bp, Artificial
  Probe
aaagcattgcaaatatatgacattg

SEQ ID NO: 70156 - DNA, 25 bp, Artificial
  Probe
gaaagcattgcaaatatatgacatt

SEQ ID NO: 70157 - DNA, 25 bp, Artificial
  Probe
ctcggtgaacgtcggcatttactat

SEQ ID NO: 70158 - DNA, 25 bp, Artificial
  Probe
gtcttggaattaagatttctaaaga

SEQ ID NO: 70159 - DNA, 25 bp, Artificial
  Probe
agtcttggaattaagatttctaaag

SEQ ID NO: 70160 - DNA, 25 bp, Artificial
  Probe
tttgaaagcattgcaaatatatgac

SEQ ID NO: 70161 - DNA, 25 bp, Artificial
  Probe
ctttgaaagcattgcaaatatatga

SEQ ID NO: 70162 - DNA, 25 bp, Artificial
  Probe
ggctttgaaagcattgcaaatatat

SEQ ID NO: 70163 - DNA, 25 bp, Artificial
  Probe
gggctttgaaagcattgcaaatata

SEQ ID NO: 70164 - DNA, 25 bp, Artificial
  Probe
gctttgaaagcattgcaaatatatg

SEQ ID NO: 70165 - DNA, 25 bp, Artificial
  Probe
atcactgttgggctttgaaagcatt

SEQ ID NO: 70166 - DNA, 25 bp, Artificial
  Probe
aatcactgttgggctttgaaagcat

SEQ ID NO: 70167 - DNA, 25 bp, Artificial
  Probe
aagatttctaaagaaaatgaactga

SEQ ID NO: 70168 - DNA, 25 bp, Artificial
  Probe
aaatcactgttgggctttgaaagca

SEQ ID NO: 70169 - DNA, 25 bp, Artificial
  Probe
tgggctttgaaagcattgcaaatat

SEQ ID NO: 70170 - DNA, 25 bp, Artificial
  Probe
ttgggctttgaaagcattgcaaata

SEQ ID NO: 70171 - DNA, 25 bp, Artificial
  Probe
aaaatcactgttgggctttgaaagc

SEQ ID NO: 70172 - DNA, 25 bp, Artificial
  Probe
tcactgttgggctttgaaagcattg

SEQ ID NO: 70173 - DNA, 25 bp, Artificial
  Probe
gttgggctttgaaagcattgcaaat

SEQ ID NO: 70174 - DNA, 25 bp, Artificial
  Probe
tgttgggctttgaaagcattgcaaa

SEQ ID NO: 70175 - DNA, 25 bp, Artificial
  Probe
gccagaaggagaaacaacagatata

SEQ ID NO: 70176 - DNA, 25 bp, Artificial
  Probe
ccagaaggagaaacaacagatataa

SEQ ID NO: 70177 - DNA, 25 bp, Artificial
  Probe
tcctctacgccctttctctgttata

SEQ ID NO: 70178 - DNA, 25 bp, Artificial
  Probe
cctctacgccctttctctgttataa

SEQ ID NO: 70179 - DNA, 25 bp, Artificial
  Probe
cgccagaaggagaaacaacagatat

SEQ ID NO: 70180 - DNA, 25 bp, Artificial
  Probe
ttcctctacgccctttctctgttat

SEQ ID NO: 70181 - DNA, 25 bp, Artificial
  Probe
attcctctacgccctttctctgtta

SEQ ID NO: 70182 - DNA, 25 bp, Artificial
  Probe
cgttaaatatatctcctgaacacac

SEQ ID NO: 70183 - DNA, 25 bp, Artificial
  Probe
gtgaacgtcggcatttactataaag

SEQ ID NO: 70184 - DNA, 25 bp, Artificial
  Probe
gtcggcatttactataaaggagctg

SEQ ID NO: 70185 - DNA, 25 bp, Artificial
  Probe
aacgtcggcatttactataaaggag

SEQ ID NO: 70186 - DNA, 25 bp, Artificial
  Probe
gaacgtcggcatttactataaagga

SEQ ID NO: 70187 - DNA, 25 bp, Artificial
  Probe
tgaacgtcggcatttactataaagg

SEQ ID NO: 70188 - DNA, 25 bp, Artificial
  Probe
ggtgaacgtcggcatttactataaa

SEQ ID NO: 70189 - DNA, 25 bp, Artificial
  Probe
cagaaggagaaacaacagatataat

SEQ ID NO: 70190 - DNA, 25 bp, Artificial
  Probe
gtaagcatgtgtgtaatacgttaaa

SEQ ID NO: 70191 - DNA, 25 bp, Artificial
  Probe
gaagggaatcattctccagtatccg

SEQ ID NO: 70192 - DNA, 25 bp, Artificial
  Probe
cgaagggaatcattctccagtatcc

SEQ ID NO: 70193 - DNA, 25 bp, Artificial
  Probe
tgcatcgtaagcatgtgtgtaatac

SEQ ID NO: 70194 - DNA, 25 bp, Artificial
  Probe
gcatcttttgttttccattttccta

SEQ ID NO: 70195 - DNA, 25 bp, Artificial
  Probe
atttactataaaggagctggcggac

SEQ ID NO: 70196 - DNA, 25 bp, Artificial
  Probe
catttactataaaggagctggcgga

SEQ ID NO: 70197 - DNA, 25 bp, Artificial
  Probe
tcggcatttactataaaggagctgg

SEQ ID NO: 70198 - DNA, 25 bp, Artificial
  Probe
acgttaaatatatctcctgaacaca

SEQ ID NO: 70199 - DNA, 25 bp, Artificial
  Probe
tcttttgttttccattttcctatgc

SEQ ID NO: 70200 - DNA, 25 bp, Artificial
  Probe
ctcgaagggaatcattctccagtat

SEQ ID NO: 70201 - DNA, 25 bp, Artificial
  Probe
tcgaagggaatcattctccagtatc

SEQ ID NO: 70202 - DNA, 25 bp, Artificial
  Probe
aattcctctacgccctttctctgtt

SEQ ID NO: 70203 - DNA, 25 bp, Artificial
  Probe
cgtcggcatttactataaaggagct

SEQ ID NO: 70204 - DNA, 25 bp, Artificial
  Probe
gttaaatatatctcctgaacacaca

SEQ ID NO: 70205 - DNA, 25 bp, Artificial
  Probe
acgccagaaggagaaacaacagata

SEQ ID NO: 70206 - DNA, 25 bp, Artificial
  Probe
aagcatgtgtgtaatacgttaaata

SEQ ID NO: 70207 - DNA, 25 bp, Artificial
  Probe
taagcatgtgtgtaatacgttaaat

SEQ ID NO: 70208 - DNA, 25 bp, Artificial
  Probe
ccccttggattgaaaactgaatttt

SEQ ID NO: 70209 - DNA, 25 bp, Artificial
  Probe
agcatgtgtgtaatacgttaaatat

SEQ ID NO: 70210 - DNA, 25 bp, Artificial
  Probe
gctaagctcgaagggaatcattctc

SEQ ID NO: 70211 - DNA, 25 bp, Artificial
  Probe
cgtaagcatgtgtgtaatacgttaa

SEQ ID NO: 70212 - DNA, 25 bp, Artificial
  Probe
tcgtaagcatgtgtgtaatacgtta

SEQ ID NO: 70213 - DNA, 25 bp, Artificial
  Probe
ttactataaaggagctggcggactt

SEQ ID NO: 70214 - DNA, 25 bp, Artificial
  Probe
cggtgaacgtcggcatttactataa

SEQ ID NO: 70215 - DNA, 25 bp, Artificial
  Probe
tccccttggattgaaaactgaattt

SEQ ID NO: 70216 - DNA, 25 bp, Artificial
  Probe
acgtcggcatttactataaaggagc

SEQ ID NO: 70217 - DNA, 25 bp, Artificial
  Probe
atcgtaagcatgtgtgtaatacgtt

SEQ ID NO: 70218 - DNA, 25 bp, Artificial
  Probe
tttactataaaggagctggcggact

SEQ ID NO: 70219 - DNA, 25 bp, Artificial
  Probe
ctaagctcgaagggaatcattctcc

SEQ ID NO: 70220 - DNA, 25 bp, Artificial
  Probe
ggaaggaaccttatcaaatacgagt

SEQ ID NO: 70221 - DNA, 25 bp, Artificial
  Probe
aggaaccttatcaaatacgagtggg

SEQ ID NO: 70222 - DNA, 25 bp, Artificial
  Probe
gaaggaaccttatcaaatacgagtg

SEQ ID NO: 70223 - DNA, 25 bp, Artificial
  Probe
aaggaaccttatcaaatacgagtgg

SEQ ID NO: 70224 - DNA, 25 bp, Artificial
  Probe
gggaaggaaccttatcaaatacgag

SEQ ID NO: 70225 - DNA, 25 bp, Artificial
  Probe
tagggaaggaaccttatcaaatacg

SEQ ID NO: 70226 - DNA, 25 bp, Artificial
  Probe
gaaccttatcaaatacgagtgggtg

SEQ ID NO: 70227 - DNA, 25 bp, Artificial
  Probe
agggaaggaaccttatcaaatacga

SEQ ID NO: 70228 - DNA, 25 bp, Artificial
  Probe
ctagggaaggaaccttatcaaatac

SEQ ID NO: 70229 - DNA, 25 bp, Artificial
  Probe
agtatgtctggtttataatctgacg

SEQ ID NO: 70230 - DNA, 25 bp, Artificial
  Probe
cttatcaaatacgagtgggtgcctg

SEQ ID NO: 70231 - DNA, 25 bp, Artificial
  Probe
cattttgtatgtatgtatggcgtgt

SEQ ID NO: 70232 - DNA, 25 bp, Artificial
  Probe
tcattttgtatgtatgtatggcgtg

SEQ ID NO: 70233 - DNA, 25 bp, Artificial
  Probe
ggaaccttatcaaatacgagtgggt

SEQ ID NO: 70234 - DNA, 25 bp, Artificial
  Probe
ctcattttgtatgtatgtatggcgt

SEQ ID NO: 70235 - DNA, 25 bp, Artificial
  Probe
tctcattttgtatgtatgtatggcg

SEQ ID NO: 70236 - DNA, 25 bp, Artificial
  Probe
gtgagtatgtctggtttataatctg

SEQ ID NO: 70237 - DNA, 25 bp, Artificial
  Probe
tgagtatgtctggtttataatctga

SEQ ID NO: 70238 - DNA, 25 bp, Artificial
  Probe
gtctcattttgtatgtatgtatggc

SEQ ID NO: 70239 - DNA, 25 bp, Artificial
  Probe
aaccttatcaaatacgagtgggtgc

SEQ ID NO: 70240 - DNA, 25 bp, Artificial
  Probe
gagtatgtctggtttataatctgac

SEQ ID NO: 70241 - DNA, 25 bp, Artificial
  Probe
ccttatcaaatacgagtgggtgcct

SEQ ID NO: 70242 - DNA, 25 bp, Artificial
  Probe
tgtctcattttgtatgtatgtatgg

SEQ ID NO: 70243 - DNA, 25 bp, Artificial
  Probe
gtttacctagggaaggaaccttatc

SEQ ID NO: 70244 - DNA, 25 bp, Artificial
  Probe
tacctagggaaggaaccttatcaaa

SEQ ID NO: 70245 - DNA, 25 bp, Artificial
  Probe
ttacctagggaaggaaccttatcaa

SEQ ID NO: 70246 - DNA, 25 bp, Artificial
  Probe
tttacctagggaaggaaccttatca

SEQ ID NO: 70247 - DNA, 25 bp, Artificial
  Probe
cctagggaaggaaccttatcaaata

SEQ ID NO: 70248 - DNA, 25 bp, Artificial
  Probe
acctagggaaggaaccttatcaaat

SEQ ID NO: 70249 - DNA, 25 bp, Artificial
  Probe
cgtttacctagggaaggaaccttat

SEQ ID NO: 70250 - DNA, 25 bp, Artificial
  Probe
gatagcgagtcgatccaatcactgg

SEQ ID NO: 70251 - DNA, 25 bp, Artificial
  Probe
accttatcaaatacgagtgggtgcc

SEQ ID NO: 70252 - DNA, 25 bp, Artificial
  Probe
gtactcggaacaggcgtttacctag

SEQ ID NO: 70253 - DNA, 25 bp, Artificial
  Probe
ttgtctcattttgtatgtatgtatg

SEQ ID NO: 70254 - DNA, 25 bp, Artificial
  Probe
gcgtttacctagggaaggaacctta

SEQ ID NO: 70255 - DNA, 25 bp, Artificial
  Probe
gaagaagaatactgagactgctctg

SEQ ID NO: 70256 - DNA, 25 bp, Artificial
  Probe
aagaagaatactgagactgctctgg

SEQ ID NO: 70257 - DNA, 25 bp, Artificial
  Probe
cgaagaagaatactgagactgctct

SEQ ID NO: 70258 - DNA, 25 bp, Artificial
  Probe
taggactcgaagaagaatactgaga

SEQ ID NO: 70259 - DNA, 25 bp, Artificial
  Probe
acagagatataggactcgaagaaga

SEQ ID NO: 70260 - DNA, 25 bp, Artificial
  Probe
gacagagatataggactcgaagaag

SEQ ID NO: 70261 - DNA, 25 bp, Artificial
  Probe
gactcgaagaagaatactgagactg

SEQ ID NO: 70262 - DNA, 25 bp, Artificial
  Probe
ataggactcgaagaagaatactgag

SEQ ID NO: 70263 - DNA, 25 bp, Artificial
  Probe
cagagatataggactcgaagaagaa

SEQ ID NO: 70264 - DNA, 25 bp, Artificial
  Probe
tataggactcgaagaagaatactga

SEQ ID NO: 70265 - DNA, 25 bp, Artificial
  Probe
ggactcgaagaagaatactgagact

SEQ ID NO: 70266 - DNA, 25 bp, Artificial
  Probe
aggactcgaagaagaatactgagac

SEQ ID NO: 70267 - DNA, 25 bp, Artificial
  Probe
tttcgtagatttgtgctgtcattcc

SEQ ID NO: 70268 - DNA, 25 bp, Artificial
  Probe
tgattcctgtttcatatttcccagt

SEQ ID NO: 70269 - DNA, 25 bp, Artificial
  Probe
tcgaagaagaatactgagactgctc

SEQ ID NO: 70270 - DNA, 25 bp, Artificial
  Probe
ctcgaagaagaatactgagactgct

SEQ ID NO: 70271 - DNA, 25 bp, Artificial
  Probe
agagatataggactcgaagaagaat

SEQ ID NO: 70272 - DNA, 25 bp, Artificial
  Probe
attcctgtttcatatttcccagttg

SEQ ID NO: 70273 - DNA, 25 bp, Artificial
  Probe
ttcctgtttcatatttcccagttgt

SEQ ID NO: 70274 - DNA, 25 bp, Artificial
  Probe
gattcctgtttcatatttcccagtt

SEQ ID NO: 70275 - DNA, 25 bp, Artificial
  Probe
actcgaagaagaatactgagactgc

SEQ ID NO: 70276 - DNA, 25 bp, Artificial
  Probe
acagaattggaaacctgaagaactc

SEQ ID NO: 70277 - DNA, 25 bp, Artificial
  Probe
gacagaattggaaacctgaagaact

SEQ ID NO: 70278 - DNA, 25 bp, Artificial
  Probe
agacagaattggaaacctgaagaac

SEQ ID NO: 70279 - DNA, 25 bp, Artificial
  Probe
cagacagaattggaaacctgaagaa

SEQ ID NO: 70280 - DNA, 25 bp, Artificial
  Probe
atataggactcgaagaagaatactg

SEQ ID NO: 70281 - DNA, 25 bp, Artificial
  Probe
atggtgaggacagacagaattggaa

SEQ ID NO: 70282 - DNA, 25 bp, Artificial
  Probe
gatataggactcgaagaagaatact

SEQ ID NO: 70283 - DNA, 25 bp, Artificial
  Probe
agatataggactcgaagaagaatac

SEQ ID NO: 70284 - DNA, 25 bp, Artificial
  Probe
gacagacagaattggaaacctgaag

SEQ ID NO: 70285 - DNA, 25 bp, Artificial
  Probe
cgacagagatataggactcgaagaa

SEQ ID NO: 70286 - DNA, 25 bp, Artificial
  Probe
acagacagaattggaaacctgaaga

SEQ ID NO: 70287 - DNA, 25 bp, Artificial
  Probe
cagaattggaaacctgaagaactcc

SEQ ID NO: 70288 - DNA, 25 bp, Artificial
  Probe
gagatataggactcgaagaagaata

SEQ ID NO: 70289 - DNA, 25 bp, Artificial
  Probe
ttcgtagatttgtgctgtcattccc

SEQ ID NO: 70290 - DNA, 25 bp, Artificial
  Probe
ttttcgtagatttgtgctgtcattc

SEQ ID NO: 70291 - DNA, 25 bp, Artificial
  Probe
aaaagcaaagaaagaaaggaaaagc

SEQ ID NO: 70292 - DNA, 25 bp, Artificial
  Probe
gaaacctgaagaactcccagatttc

SEQ ID NO: 70293 - DNA, 25 bp, Artificial
  Probe
agataggacggaaaacaaactcaag

SEQ ID NO: 70294 - DNA, 25 bp, Artificial
  Probe
aaagcaaagaaagaaaggaaaagcc

SEQ ID NO: 70295 - DNA, 25 bp, Artificial
  Probe
atgattcctgtttcatatttcccag

SEQ ID NO: 70296 - DNA, 25 bp, Artificial
  Probe
cagataggacggaaaacaaactcaa

SEQ ID NO: 70297 - DNA, 25 bp, Artificial
  Probe
gaaagaaaagcaaagaaagaaagga

SEQ ID NO: 70298 - DNA, 25 bp, Artificial
  Probe
ggaaacctgaagaactcccagattt

SEQ ID NO: 70299 - DNA, 25 bp, Artificial
  Probe
agaattggaaacctgaagaactccc

SEQ ID NO: 70300 - DNA, 25 bp, Artificial
  Probe
taacttcgggaacaacgccatataa

SEQ ID NO: 70301 - DNA, 25 bp, Artificial
  Probe
ggaacaacgccatataaccagtagc

SEQ ID NO: 70302 - DNA, 25 bp, Artificial
  Probe
ctaacttcgggaacaacgccatata

SEQ ID NO: 70303 - DNA, 25 bp, Artificial
  Probe
gaagcctttaccaagactaacgaca

SEQ ID NO: 70304 - DNA, 25 bp, Artificial
  Probe
aagcctttaccaagactaacgacac

SEQ ID NO: 70305 - DNA, 25 bp, Artificial
  Probe
gggaacaacgccatataaccagtag

SEQ ID NO: 70306 - DNA, 25 bp, Artificial
  Probe
gactggaagcctttaccaagactaa

SEQ ID NO: 70307 - DNA, 25 bp, Artificial
  Probe
ggaagcctttaccaagactaacgac

SEQ ID NO: 70308 - DNA, 25 bp, Artificial
  Probe
actggaagcctttaccaagactaac

SEQ ID NO: 70309 - DNA, 25 bp, Artificial
  Probe
aacttcgggaacaacgccatataac

SEQ ID NO: 70310 - DNA, 25 bp, Artificial
  Probe
agactggaagcctttaccaagacta

SEQ ID NO: 70311 - DNA, 25 bp, Artificial
  Probe
ttaccaagactaacgacacggtgag

SEQ ID NO: 70312 - DNA, 25 bp, Artificial
  Probe
ctggaagcctttaccaagactaacg

SEQ ID NO: 70313 - DNA, 25 bp, Artificial
  Probe
ctttaccaagactaacgacacggtg

SEQ ID NO: 70314 - DNA, 25 bp, Artificial
  Probe
tggaagcctttaccaagactaacga

SEQ ID NO: 70315 - DNA, 25 bp, Artificial
  Probe
cgggaacaacgccatataaccagta

SEQ ID NO: 70316 - DNA, 25 bp, Artificial
  Probe
tattacaattcactggccgtcgttt

SEQ ID NO: 70317 - DNA, 25 bp, Artificial
  Probe
tttaccaagactaacgacacggtga

SEQ ID NO: 70318 - DNA, 25 bp, Artificial
  Probe
gagactggaagcctttaccaagact

SEQ ID NO: 70319 - DNA, 25 bp, Artificial
  Probe
agcctttaccaagactaacgacacg

SEQ ID NO: 70320 - DNA, 25 bp, Artificial
  Probe
cctttaccaagactaacgacacggt

SEQ ID NO: 70321 - DNA, 25 bp, Artificial
  Probe
cgagactggaagcctttaccaagac

SEQ ID NO: 70322 - DNA, 25 bp, Artificial
  Probe
aaaccctggcgtacccaacttaatc

SEQ ID NO: 70323 - DNA, 25 bp, Artificial
  Probe
ttacaattcactggccgtcgtttta

SEQ ID NO: 70324 - DNA, 25 bp, Artificial
  Probe
gaacaacgccatataaccagtagcg

SEQ ID NO: 70325 - DNA, 25 bp, Artificial
  Probe
attacaattcactggccgtcgtttt

SEQ ID NO: 70326 - DNA, 25 bp, Artificial
  Probe
aacaacgccatataaccagtagcga

SEQ ID NO: 70327 - DNA, 25 bp, Artificial
  Probe
tacaattcactggccgtcgttttac

SEQ ID NO: 70328 - DNA, 25 bp, Artificial
  Probe
aacgccatataaccagtagcgagac

SEQ ID NO: 70329 - DNA, 25 bp, Artificial
  Probe
caacgccatataaccagtagcgaga

SEQ ID NO: 70330 - DNA, 25 bp, Artificial
  Probe
aaaaccctggcgtacccaacttaat

SEQ ID NO: 70331 - DNA, 25 bp, Artificial
  Probe
acaacgccatataaccagtagcgag

SEQ ID NO: 70332 - DNA, 25 bp, Artificial
  Probe
cgccatataaccagtagcgagactg

SEQ ID NO: 70333 - DNA, 25 bp, Artificial
  Probe
caattcactggccgtcgttttacaa

SEQ ID NO: 70334 - DNA, 25 bp, Artificial
  Probe
aattcactggccgtcgttttacaac

SEQ ID NO: 70335 - DNA, 25 bp, Artificial
  Probe
cagtagcgagactggaagcctttac

SEQ ID NO: 70336 - DNA, 25 bp, Artificial
  Probe
tggatgagttaggcttatcacataa

SEQ ID NO: 70337 - DNA, 25 bp, Artificial
  Probe
ttggatgagttaggcttatcacata

SEQ ID NO: 70338 - DNA, 25 bp, Artificial
  Probe
caatgccttaggagagatcaatacc

SEQ ID NO: 70339 - DNA, 25 bp, Artificial
  Probe
ccaatgccttaggagagatcaatac

SEQ ID NO: 70340 - DNA, 25 bp, Artificial
  Probe
tcacactaccgttgagatcctataa

SEQ ID NO: 70341 - DNA, 25 bp, Artificial
  Probe
gtcacactaccgttgagatcctata

SEQ ID NO: 70342 - DNA, 25 bp, Artificial
  Probe
gaacctacgaggattatgttgaagg

SEQ ID NO: 70343 - DNA, 25 bp, Artificial
  Probe
ggaacctacgaggattatgttgaag

SEQ ID NO: 70344 - DNA, 25 bp, Artificial
  Probe
aatgccttaggagagatcaataccg

SEQ ID NO: 70345 - DNA, 25 bp, Artificial
  Probe
tccaatgccttaggagagatcaata

SEQ ID NO: 70346 - DNA, 25 bp, Artificial
  Probe
tatgataaacgaattgacgaaggag

SEQ ID NO: 70347 - DNA, 25 bp, Artificial
  Probe
tttggatgagttaggcttatcacat

SEQ ID NO: 70348 - DNA, 25 bp, Artificial
  Probe
cacactaccgttgagatcctataaa

SEQ ID NO: 70349 - DNA, 25 bp, Artificial
  Probe
acactaccgttgagatcctataaag

SEQ ID NO: 70350 - DNA, 25 bp, Artificial
  Probe
ctttggatgagttaggcttatcaca

SEQ ID NO: 70351 - DNA, 25 bp, Artificial
  Probe
actttggatgagttaggcttatcac

SEQ ID NO: 70352 - DNA, 25 bp, Artificial
  Probe
atatgataaacgaattgacgaagga

SEQ ID NO: 70353 - DNA, 25 bp, Artificial
  Probe
atgataaacgaattgacgaaggagc

SEQ ID NO: 70354 - DNA, 25 bp, Artificial
  Probe
tgtcacactaccgttgagatcctat

SEQ ID NO: 70355 - DNA, 25 bp, Artificial
  Probe
gtccaatgccttaggagagatcaat

SEQ ID NO: 70356 - DNA, 25 bp, Artificial
  Probe
aacctacgaggattatgttgaaggc

SEQ ID NO: 70357 - DNA, 25 bp, Artificial
  Probe
ttaggcttatcacataaacatggct

SEQ ID NO: 70358 - DNA, 25 bp, Artificial
  Probe
gttaggcttatcacataaacatggc

SEQ ID NO: 70359 - DNA, 25 bp, Artificial
  Probe
taggcttatcacataaacatggctc

SEQ ID NO: 70360 - DNA, 25 bp, Artificial
  Probe
ggatgagttaggcttatcacataaa

SEQ ID NO: 70361 - DNA, 25 bp, Artificial
  Probe
agttaggcttatcacataaacatgg

SEQ ID NO: 70362 - DNA, 25 bp, Artificial
  Probe
tgagttaggcttatcacataaacat

SEQ ID NO: 70363 - DNA, 25 bp, Artificial
  Probe
atgagttaggcttatcacataaaca

SEQ ID NO: 70364 - DNA, 25 bp, Artificial
  Probe
aactatgaagcatatgtgaggcata

SEQ ID NO: 70365 - DNA, 25 bp, Artificial
  Probe
taactatgaagcatatgtgaggcat

SEQ ID NO: 70366 - DNA, 25 bp, Artificial
  Probe
ttaactatgaagcatatgtgaggca

SEQ ID NO: 70367 - DNA, 25 bp, Artificial
  Probe
cactaccgttgagatcctataaagg

SEQ ID NO: 70368 - DNA, 25 bp, Artificial
  Probe
attaactatgaagcatatgtgaggc

SEQ ID NO: 70369 - DNA, 25 bp, Artificial
  Probe
gatgagttaggcttatcacataaac

SEQ ID NO: 70370 - DNA, 25 bp, Artificial
  Probe
gcttatcacataaacatggctctgt

SEQ ID NO: 70371 - DNA, 25 bp, Artificial
  Probe
gatgacagaggaagaagtcgagatg

SEQ ID NO: 70372 - DNA, 25 bp, Artificial
  Probe
agatgacagaggaagaagtcgagat

SEQ ID NO: 70373 - DNA, 25 bp, Artificial
  Probe
ggcttatcacataaacatggctctg

SEQ ID NO: 70374 - DNA, 25 bp, Artificial
  Probe
aggcttatcacataaacatggctct

SEQ ID NO: 70375 - DNA, 25 bp, Artificial
  Probe
gagcttcaacaaagataacacgttt

SEQ ID NO: 70376 - DNA, 25 bp, Artificial
  Probe
cctataaaggaagaagagcgaatat

SEQ ID NO: 70377 - DNA, 25 bp, Artificial
  Probe
gagttaggcttatcacataaacatg

SEQ ID NO: 70378 - DNA, 25 bp, Artificial
  Probe
agaggaagaagtcgagatgctagtg

SEQ ID NO: 70379 - DNA, 25 bp, Artificial
  Probe
cagaggaagaagtcgagatgctagt

SEQ ID NO: 70380 - DNA, 25 bp, Artificial
  Probe
acagaggaagaagtcgagatgctag

SEQ ID NO: 70381 - DNA, 25 bp, Artificial
  Probe
taaccagcatctcaacattcctaat

SEQ ID NO: 70382 - DNA, 25 bp, Artificial
  Probe
ataaccagcatctcaacattcctaa

SEQ ID NO: 70383 - DNA, 25 bp, Artificial
  Probe
gaagtcagtgtggctatacctaatg

SEQ ID NO: 70384 - DNA, 25 bp, Artificial
  Probe
gataaccagcatctcaacattccta

SEQ ID NO: 70385 - DNA, 25 bp, Artificial
  Probe
aagtcagtgtggctatacctaatgt

SEQ ID NO: 70386 - DNA, 25 bp, Artificial
  Probe
tgaagtcagtgtggctatacctaat

SEQ ID NO: 70387 - DNA, 25 bp, Artificial
  Probe
agaagaatgccagagaacttgaatt

SEQ ID NO: 70388 - DNA, 25 bp, Artificial
  Probe
ttgaagtcagtgtggctatacctaa

SEQ ID NO: 70389 - DNA, 25 bp, Artificial
  Probe
actgactgactcaatatgactccta

SEQ ID NO: 70390 - DNA, 25 bp, Artificial
  Probe
tactgactgactcaatatgactcct

SEQ ID NO: 70391 - DNA, 25 bp, Artificial
  Probe
ttactgactgactcaatatgactcc

SEQ ID NO: 70392 - DNA, 25 bp, Artificial
  Probe
ccttactgactgactcaatatgact

SEQ ID NO: 70393 - DNA, 25 bp, Artificial
  Probe
tccttactgactgactcaatatgac

SEQ ID NO: 70394 - DNA, 25 bp, Artificial
  Probe
cagaagaatgccagagaacttgaat

SEQ ID NO: 70395 - DNA, 25 bp, Artificial
  Probe
ctccttactgactgactcaatatga

SEQ ID NO: 70396 - DNA, 25 bp, Artificial
  Probe
gctccttactgactgactcaatatg

SEQ ID NO: 70397 - DNA, 25 bp, Artificial
  Probe
tgctccttactgactgactcaatat

SEQ ID NO: 70398 - DNA, 25 bp, Artificial
  Probe
agtcagtgtggctatacctaatgtg

SEQ ID NO: 70399 - DNA, 25 bp, Artificial
  Probe
tatacatgatcttgcctagactcct

SEQ ID NO: 70400 - DNA, 25 bp, Artificial
  Probe
cttactgactgactcaatatgactc

SEQ ID NO: 70401 - DNA, 25 bp, Artificial
  Probe
ctgctccttactgactgactcaata

SEQ ID NO: 70402 - DNA, 25 bp, Artificial
  Probe
tgataaccagcatctcaacattcct

SEQ ID NO: 70403 - DNA, 25 bp, Artificial
  Probe
atacatgatcttgcctagactcctg

SEQ ID NO: 70404 - DNA, 25 bp, Artificial
  Probe
cttgaatgatggctctttgctatac

SEQ ID NO: 70405 - DNA, 25 bp, Artificial
  Probe
tcttgaatgatggctctttgctata

SEQ ID NO: 70406 - DNA, 25 bp, Artificial
  Probe
ttgaatgatggctctttgctataca

SEQ ID NO: 70407 - DNA, 25 bp, Artificial
  Probe
tgttgttaagaagtcgatctactga

SEQ ID NO: 70408 - DNA, 25 bp, Artificial
  Probe
actgttgttaagaagtcgatctact

SEQ ID NO: 70409 - DNA, 25 bp, Artificial
  Probe
atcttgaatgatggctctttgctat

SEQ ID NO: 70410 - DNA, 25 bp, Artificial
  Probe
ctgttgttaagaagtcgatctactg

SEQ ID NO: 70411 - DNA, 25 bp, Artificial
  Probe
tctactgttgttaagaagtcgatct

SEQ ID NO: 70412 - DNA, 25 bp, Artificial
  Probe
ccaagtgtttccagtcagagtaaat

SEQ ID NO: 70413 - DNA, 25 bp, Artificial
  Probe
taggcgttcttctctacagtttaag

SEQ ID NO: 70414 - DNA, 25 bp, Artificial
  Probe
tgaatgatggctctttgctatacat

SEQ ID NO: 70415 - DNA, 25 bp, Artificial
  Probe
aaatatgactaccattaccctgctg

SEQ ID NO: 70416 - DNA, 25 bp, Artificial
  Probe
ggcgttcttctctacagtttaagta

SEQ ID NO: 70417 - DNA, 25 bp, Artificial
  Probe
atatgactaccattaccctgctgta

SEQ ID NO: 70418 - DNA, 25 bp, Artificial
  Probe
tctcaacattcctaatggtcttctc

SEQ ID NO: 70419 - DNA, 25 bp, Artificial
  Probe
tactgctccttactgactgactcaa

SEQ ID NO: 70420 - DNA, 25 bp, Artificial
  Probe
catctcaacattcctaatggtcttc

SEQ ID NO: 70421 - DNA, 25 bp, Artificial
  Probe
tacatgatcttgcctagactcctga

SEQ ID NO: 70422 - DNA, 25 bp, Artificial
  Probe
atctcaacattcctaatggtcttct

SEQ ID NO: 70423 - DNA, 25 bp, Artificial
  Probe
atgatcttgcctagactcctgagta

SEQ ID NO: 70424 - DNA, 25 bp, Artificial
  Probe
gtatacatgatcttgcctagactcc

SEQ ID NO: 70425 - DNA, 25 bp, Artificial
  Probe
caagtgtttccagtcagagtaaata

SEQ ID NO: 70426 - DNA, 25 bp, Artificial
  Probe
gagcaggtagaggtcttcactatct

SEQ ID NO: 70427 - DNA, 25 bp, Artificial
  Probe
tccatttatgaggtagcagttactt

SEQ ID NO: 70428 - DNA, 25 bp, Artificial
  Probe
agcaggtagaggtcttcactatctc

SEQ ID NO: 70429 - DNA, 25 bp, Artificial
  Probe
ccatttatgaggtagcagttacttt

SEQ ID NO: 70430 - DNA, 25 bp, Artificial
  Probe
ctccatttatgaggtagcagttact

SEQ ID NO: 70431 - DNA, 25 bp, Artificial
  Probe
tctccatttatgaggtagcagttac

SEQ ID NO: 70432 - DNA, 25 bp, Artificial
  Probe
ctctccatttatgaggtagcagtta

SEQ ID NO: 70433 - DNA, 25 bp, Artificial
  Probe
ataatcttgacatggaatccctagc

SEQ ID NO: 70434 - DNA, 25 bp, Artificial
  Probe
cttgaaggtcctctccatttatgag

SEQ ID NO: 70435 - DNA, 25 bp, Artificial
  Probe
aggtcttcactatctctctgccaag

SEQ ID NO: 70436 - DNA, 25 bp, Artificial
  Probe
gaggtcttcactatctctctgccaa

SEQ ID NO: 70437 - DNA, 25 bp, Artificial
  Probe
gcttgaaggtcctctccatttatga

SEQ ID NO: 70438 - DNA, 25 bp, Artificial
  Probe
taatcttgacatggaatccctagct

SEQ ID NO: 70439 - DNA, 25 bp, Artificial
  Probe
ggtagaggtcttcactatctctctg

SEQ ID NO: 70440 - DNA, 25 bp, Artificial
  Probe
aggtagaggtcttcactatctctct

SEQ ID NO: 70441 - DNA, 25 bp, Artificial
  Probe
caggtagaggtcttcactatctctc

SEQ ID NO: 70442 - DNA, 25 bp, Artificial
  Probe
gacatggaatccctagctctctaag

SEQ ID NO: 70443 - DNA, 25 bp, Artificial
  Probe
tttataatcttgacatggaatccct

SEQ ID NO: 70444 - DNA, 25 bp, Artificial
  Probe
gtagaggtcttcactatctctctgc

SEQ ID NO: 70445 - DNA, 25 bp, Artificial
  Probe
ggtcttcactatctctctgccaagg

SEQ ID NO: 70446 - DNA, 25 bp, Artificial
  Probe
tataatcttgacatggaatccctag

SEQ ID NO: 70447 - DNA, 25 bp, Artificial
  Probe
aatcttgacatggaatccctagctc

SEQ ID NO: 70448 - DNA, 25 bp, Artificial
  Probe
ctttataatcttgacatggaatccc

SEQ ID NO: 70449 - DNA, 25 bp, Artificial
  Probe
ggcttgaaggtcctctccatttatg

SEQ ID NO: 70450 - DNA, 25 bp, Artificial
  Probe
tgacatggaatccctagctctctaa

SEQ ID NO: 70451 - DNA, 25 bp, Artificial
  Probe
ttgacatggaatccctagctctcta

SEQ ID NO: 70452 - DNA, 25 bp, Artificial
  Probe
catttatgaggtagcagttacttta

SEQ ID NO: 70453 - DNA, 25 bp, Artificial
  Probe
tagaggtcttcactatctctctgcc

SEQ ID NO: 70454 - DNA, 25 bp, Artificial
  Probe
ttataatcttgacatggaatcccta

SEQ ID NO: 70455 - DNA, 25 bp, Artificial
  Probe
tgaggtagcagttactttataatct

SEQ ID NO: 70456 - DNA, 25 bp, Artificial
  Probe
atcttgacatggaatccctagctct

SEQ ID NO: 70457 - DNA, 25 bp, Artificial
  Probe
actttataatcttgacatggaatcc

SEQ ID NO: 70458 - DNA, 25 bp, Artificial
  Probe
gcaggtagaggtcttcactatctct

SEQ ID NO: 70459 - DNA, 25 bp, Artificial
  Probe
cttgacatggaatccctagctctct

SEQ ID NO: 70460 - DNA, 25 bp, Artificial
  Probe
tcttgacatggaatccctagctctc

SEQ ID NO: 70461 - DNA, 25 bp, Artificial
  Probe
gcagttactttataatcttgacatg

SEQ ID NO: 70462 - DNA, 25 bp, Artificial
  Probe
ggtagcagttactttataatcttga

SEQ ID NO: 70463 - DNA, 25 bp, Artificial
  Probe
aggtagcagttactttataatcttg

SEQ ID NO: 70464 - DNA, 25 bp, Artificial
  Probe
gggcttgaaggtcctctccatttat

SEQ ID NO: 70465 - DNA, 25 bp, Artificial
  Probe
cttcactatctctctgccaagggag

SEQ ID NO: 70466 - DNA, 25 bp, Artificial
  Probe
tagctctctaagcacacacaaagaa

SEQ ID NO: 70467 - DNA, 25 bp, Artificial
  Probe
agcagttactttataatcttgacat

SEQ ID NO: 70468 - DNA, 25 bp, Artificial
  Probe
gtcttcactatctctctgccaaggg

SEQ ID NO: 70469 - DNA, 25 bp, Artificial
  Probe
atttatgaggtagcagttactttat

SEQ ID NO: 70470 - DNA, 25 bp, Artificial
  Probe
tcttcactatctctctgccaaggga

SEQ ID NO: 70471 - DNA, 25 bp, Artificial
  Probe
aatccatccgatagttctctcagtt

SEQ ID NO: 70472 - DNA, 25 bp, Artificial
  Probe
tggtaatgttatccgaatatggttc

SEQ ID NO: 70473 - DNA, 25 bp, Artificial
  Probe
atccatccgatagttctctcagttg

SEQ ID NO: 70474 - DNA, 25 bp, Artificial
  Probe
atggtaatgttatccgaatatggtt

SEQ ID NO: 70475 - DNA, 25 bp, Artificial
  Probe
ccatccgatagttctctcagttgaa

SEQ ID NO: 70476 - DNA, 25 bp, Artificial
  Probe
tccatccgatagttctctcagttga

SEQ ID NO: 70477 - DNA, 25 bp, Artificial
  Probe
tatggtaatgttatccgaatatggt

SEQ ID NO: 70478 - DNA, 25 bp, Artificial
  Probe
tgacttcactagaacctggtgttaa

SEQ ID NO: 70479 - DNA, 25 bp, Artificial
  Probe
ttatgagaagctattgccttggttc

SEQ ID NO: 70480 - DNA, 25 bp, Artificial
  Probe
gctcaccataaatctttcaaatcca

SEQ ID NO: 70481 - DNA, 25 bp, Artificial
  Probe
tgctcaccataaatctttcaaatcc

SEQ ID NO: 70482 - DNA, 25 bp, Artificial
  Probe
gcttgccactttatttatacccttt

SEQ ID NO: 70483 - DNA, 25 bp, Artificial
  Probe
tttgcttgccactttatttataccc

SEQ ID NO: 70484 - DNA, 25 bp, Artificial
  Probe
accataaatctttcaaatccatccg

SEQ ID NO: 70485 - DNA, 25 bp, Artificial
  Probe
ttcaaatccatccgatagttctctc

SEQ ID NO: 70486 - DNA, 25 bp, Artificial
  Probe
tttcaaatccatccgatagttctct

SEQ ID NO: 70487 - DNA, 25 bp, Artificial
  Probe
tctttcaaatccatccgatagttct

SEQ ID NO: 70488 - DNA, 25 bp, Artificial
  Probe
ccataaatctttcaaatccatccga

SEQ ID NO: 70489 - DNA, 25 bp, Artificial
  Probe
gttatgagaagctattgccttggtt

SEQ ID NO: 70490 - DNA, 25 bp, Artificial
  Probe
ctttcaaatccatccgatagttctc

SEQ ID NO: 70491 - DNA, 25 bp, Artificial
  Probe
tgcttgccactttatttataccctt

SEQ ID NO: 70492 - DNA, 25 bp, Artificial
  Probe
ttgcttgccactttatttataccct

SEQ ID NO: 70493 - DNA, 25 bp, Artificial
  Probe
caaatccatccgatagttctctcag

SEQ ID NO: 70494 - DNA, 25 bp, Artificial
  Probe
attcttgctcaccataaatctttca

SEQ ID NO: 70495 - DNA, 25 bp, Artificial
  Probe
tgccactttatttataccctttcag

SEQ ID NO: 70496 - DNA, 25 bp, Artificial
  Probe
ctctctgtctataaaggctatgcta

SEQ ID NO: 70497 - DNA, 25 bp, Artificial
  Probe
catccgatagttctctcagttgaaa

SEQ ID NO: 70498 - DNA, 25 bp, Artificial
  Probe
aaatccatccgatagttctctcagt

SEQ ID NO: 70499 - DNA, 25 bp, Artificial
  Probe
tcaaatccatccgatagttctctca

SEQ ID NO: 70500 - DNA, 25 bp, Artificial
  Probe
atctttcaaatccatccgatagttc

SEQ ID NO: 70501 - DNA, 25 bp, Artificial
  Probe
cattcttgctcaccataaatctttc

SEQ ID NO: 70502 - DNA, 25 bp, Artificial
  Probe
tctgtctataaaggctatgctaagt

SEQ ID NO: 70503 - DNA, 25 bp, Artificial
  Probe
tattgccttggttcaactttatctg

SEQ ID NO: 70504 - DNA, 25 bp, Artificial
  Probe
ttgccactttatttataccctttca

SEQ ID NO: 70505 - DNA, 25 bp, Artificial
  Probe
tctctgtctataaaggctatgctaa

SEQ ID NO: 70506 - DNA, 25 bp, Artificial
  Probe
ctattgccttggttcaactttatct

SEQ ID NO: 70507 - DNA, 25 bp, Artificial
  Probe
gctattgccttggttcaactttatc

SEQ ID NO: 70508 - DNA, 25 bp, Artificial
  Probe
caccataaatctttcaaatccatcc

SEQ ID NO: 70509 - DNA, 25 bp, Artificial
  Probe
gtgttatgagaagctattgccttgg

SEQ ID NO: 70510 - DNA, 25 bp, Artificial
  Probe
ggtgttatgagaagctattgccttg

SEQ ID NO: 70511 - DNA, 25 bp, Artificial
  Probe
tcttgctcaccataaatctttcaaa

SEQ ID NO: 70512 - DNA, 25 bp, Artificial
  Probe
ttcttgctcaccataaatctttcaa

SEQ ID NO: 70513 - DNA, 25 bp, Artificial
  Probe
tctgatatggtaatgttatccgaat

SEQ ID NO: 70514 - DNA, 25 bp, Artificial
  Probe
atctgatatggtaatgttatccgaa

SEQ ID NO: 70515 - DNA, 25 bp, Artificial
  Probe
aatctttcaaatccatccgatagtt

SEQ ID NO: 70516 - DNA, 25 bp, Artificial
  Probe
ctggactctgatgatgtaattgact

SEQ ID NO: 70517 - DNA, 25 bp, Artificial
  Probe
tggactctgatgatgtaattgactg

SEQ ID NO: 70518 - DNA, 25 bp, Artificial
  Probe
actggactctgatgatgtaattgac

SEQ ID NO: 70519 - DNA, 25 bp, Artificial
  Probe
aactggactctgatgatgtaattga

SEQ ID NO: 70520 - DNA, 25 bp, Artificial
  Probe
ggactctgatgatgtaattgactgg

SEQ ID NO: 70521 - DNA, 25 bp, Artificial
  Probe
ggaaggactgaatagttacaccaat

SEQ ID NO: 70522 - DNA, 25 bp, Artificial
  Probe
aggactgaatagttacaccaatagg

SEQ ID NO: 70523 - DNA, 25 bp, Artificial
  Probe
taactggactctgatgatgtaattg

SEQ ID NO: 70524 - DNA, 25 bp, Artificial
  Probe
aagaacatcgtgtctggttatagtt

SEQ ID NO: 70525 - DNA, 25 bp, Artificial
  Probe
aacatcgtgtctggttatagttact

SEQ ID NO: 70526 - DNA, 25 bp, Artificial
  Probe
gaacatcgtgtctggttatagttac

SEQ ID NO: 70527 - DNA, 25 bp, Artificial
  Probe
agaacatcgtgtctggttatagtta

SEQ ID NO: 70528 - DNA, 25 bp, Artificial
  Probe
taagaacatcgtgtctggttatagt

SEQ ID NO: 70529 - DNA, 25 bp, Artificial
  Probe
aactatataaggttctgagcaacgc

SEQ ID NO: 70530 - DNA, 25 bp, Artificial
  Probe
acatcgtgtctggttatagttacta

SEQ ID NO: 70531 - DNA, 25 bp, Artificial
  Probe
gaaggactgaatagttacaccaata

SEQ ID NO: 70532 - DNA, 25 bp, Artificial
  Probe
ttaactggactctgatgatgtaatt

SEQ ID NO: 70533 - DNA, 25 bp, Artificial
  Probe
ttaagaacatcgtgtctggttatag

SEQ ID NO: 70534 - DNA, 25 bp, Artificial
  Probe
aaggactgaatagttacaccaatag

SEQ ID NO: 70535 - DNA, 25 bp, Artificial
  Probe
tagaattgatctgaccaagtctctt

SEQ ID NO: 70536 - DNA, 25 bp, Artificial
  Probe
ttagaattgatctgaccaagtctct

SEQ ID NO: 70537 - DNA, 25 bp, Artificial
  Probe
acaccaataggtagaagttatgtgg

SEQ ID NO: 70538 - DNA, 25 bp, Artificial
  Probe
ggactgaatagttacaccaataggt

SEQ ID NO: 70539 - DNA, 25 bp, Artificial
  Probe
ggtagaagttatgtgggaaggttat

SEQ ID NO: 70540 - DNA, 25 bp, Artificial
  Probe
ataggtagaagttatgtgggaaggt

SEQ ID NO: 70541 - DNA, 25 bp, Artificial
  Probe
agaagttatgtgggaaggttatgtg

SEQ ID NO: 70542 - DNA, 25 bp, Artificial
  Probe
aataggtagaagttatgtgggaagg

SEQ ID NO: 70543 - DNA, 25 bp, Artificial
  Probe
aggtagaagttatgtgggaaggtta

SEQ ID NO: 70544 - DNA, 25 bp, Artificial
  Probe
taggtagaagttatgtgggaaggtt

SEQ ID NO: 70545 - DNA, 25 bp, Artificial
  Probe
tagaagttatgtgggaaggttatgt

SEQ ID NO: 70546 - DNA, 25 bp, Artificial
  Probe
gtagaagttatgtgggaaggttatg

SEQ ID NO: 70547 - DNA, 25 bp, Artificial
  Probe
gaagttatgtgggaaggttatgtgg

SEQ ID NO: 70548 - DNA, 25 bp, Artificial
  Probe
caataggtagaagttatgtgggaag

SEQ ID NO: 70549 - DNA, 25 bp, Artificial
  Probe
acaatttctgggaaggactgaatag

SEQ ID NO: 70550 - DNA, 25 bp, Artificial
  Probe
cacaatttctgggaaggactgaata

SEQ ID NO: 70551 - DNA, 25 bp, Artificial
  Probe
tttctgggaaggactgaatagttac

SEQ ID NO: 70552 - DNA, 25 bp, Artificial
  Probe
aagttatgtgggaaggttatgtgga

SEQ ID NO: 70553 - DNA, 25 bp, Artificial
  Probe
aatttctgggaaggactgaatagtt

SEQ ID NO: 70554 - DNA, 25 bp, Artificial
  Probe
caatttctgggaaggactgaatagt

SEQ ID NO: 70555 - DNA, 25 bp, Artificial
  Probe
ttctgggaaggactgaatagttaca

SEQ ID NO: 70556 - DNA, 25 bp, Artificial
  Probe
ctatataaggttctgagcaacgctt

SEQ ID NO: 70557 - DNA, 25 bp, Artificial
  Probe
atttctgggaaggactgaatagtta

SEQ ID NO: 70558 - DNA, 25 bp, Artificial
  Probe
ggcaaactatataaggttctgagca

SEQ ID NO: 70559 - DNA, 25 bp, Artificial
  Probe
catcgtgtctggttatagttactat

SEQ ID NO: 70560 - DNA, 25 bp, Artificial
  Probe
tacaccaataggtagaagttatgtg

SEQ ID NO: 70561 - DNA, 25 bp, Artificial
  Probe
gtgtgattcagtgatgacttgttct

SEQ ID NO: 70562 - DNA, 25 bp, Artificial
  Probe
tgtgtgattcagtgatgacttgttc

SEQ ID NO: 70563 - DNA, 25 bp, Artificial
  Probe
tgtgattcagtgatgacttgttctg

SEQ ID NO: 70564 - DNA, 25 bp, Artificial
  Probe
ctgtgtgattcagtgatgacttgtt

SEQ ID NO: 70565 - DNA, 25 bp, Artificial
  Probe
ccatgtctgaagaactgtgtgattc

SEQ ID NO: 70566 - DNA, 25 bp, Artificial
  Probe
cgattgaaactatttatggctggtt

SEQ ID NO: 70567 - DNA, 25 bp, Artificial
  Probe
acagtatcaacgtgaatatccaatt

SEQ ID NO: 70568 - DNA, 25 bp, Artificial
  Probe
caacgtgaatatccaattctgctaa

SEQ ID NO: 70569 - DNA, 25 bp, Artificial
  Probe
tcaacgtgaatatccaattctgcta

SEQ ID NO: 70570 - DNA, 25 bp, Artificial
  Probe
tatcaacgtgaatatccaattctgc

SEQ ID NO: 70571 - DNA, 25 bp, Artificial
  Probe
atcaacgtgaatatccaattctgct

SEQ ID NO: 70572 - DNA, 25 bp, Artificial
  Probe
gtcgattgaaactatttatggctgg

SEQ ID NO: 70573 - DNA, 25 bp, Artificial
  Probe
tcgattgaaactatttatggctggt

SEQ ID NO: 70574 - DNA, 25 bp, Artificial
  Probe
catgtctgaagaactgtgtgattca

SEQ ID NO: 70575 - DNA, 25 bp, Artificial
  Probe
ccagtttacaggatgtttattggaa

SEQ ID NO: 70576 - DNA, 25 bp, Artificial
  Probe
cggtgtaagtcgattgaaactattt

SEQ ID NO: 70577 - DNA, 25 bp, Artificial
  Probe
agtcgattgaaactatttatggctg

SEQ ID NO: 70578 - DNA, 25 bp, Artificial
  Probe
acggtgtaagtcgattgaaactatt

SEQ ID NO: 70579 - DNA, 25 bp, Artificial
  Probe
gtatcaacgtgaatatccaattctg

SEQ ID NO: 70580 - DNA, 25 bp, Artificial
  Probe
cagtatcaacgtgaatatccaattc

SEQ ID NO: 70581 - DNA, 25 bp, Artificial
  Probe
cagtttacaggatgtttattggaaa

SEQ ID NO: 70582 - DNA, 25 bp, Artificial
  Probe
agtatcaacgtgaatatccaattct

SEQ ID NO: 70583 - DNA, 25 bp, Artificial
  Probe
aagttgatggtgatccagtttacag

SEQ ID NO: 70584 - DNA, 25 bp, Artificial
  Probe
gaagttgatggtgatccagtttaca

SEQ ID NO: 70585 - DNA, 25 bp, Artificial
  Probe
aagtcgattgaaactatttatggct

SEQ ID NO: 70586 - DNA, 25 bp, Artificial
  Probe
tatccaattctgctaaatttcctgc

SEQ ID NO: 70587 - DNA, 25 bp, Artificial
  Probe
gacggtgtaagtcgattgaaactat

SEQ ID NO: 70588 - DNA, 25 bp, Artificial
  Probe
ggaagttgatggtgatccagtttac

SEQ ID NO: 70589 - DNA, 25 bp, Artificial
  Probe
aggaagttgatggtgatccagttta

SEQ ID NO: 70590 - DNA, 25 bp, Artificial
  Probe
cgtgaatatccaattctgctaaatt

SEQ ID NO: 70591 - DNA, 25 bp, Artificial
  Probe
gctaaatttcctgcactgtattaaa

SEQ ID NO: 70592 - DNA, 25 bp, Artificial
  Probe
actatttatggctggttttaaggga

SEQ ID NO: 70593 - DNA, 25 bp, Artificial
  Probe
tgattcagtgatgacttgttctgac

SEQ ID NO: 70594 - DNA, 25 bp, Artificial
  Probe
gtgattcagtgatgacttgttctga

SEQ ID NO: 70595 - DNA, 25 bp, Artificial
  Probe
ctatttatggctggttttaagggaa

SEQ ID NO: 70596 - DNA, 25 bp, Artificial
  Probe
aatttcctgcactgtattaaacatg

SEQ ID NO: 70597 - DNA, 25 bp, Artificial
  Probe
aactatttatggctggttttaaggg

SEQ ID NO: 70598 - DNA, 25 bp, Artificial
  Probe
tatttatggctggttttaagggaaa

SEQ ID NO: 70599 - DNA, 25 bp, Artificial
  Probe
gaaacaggcagggagatatgtgatc

SEQ ID NO: 70600 - DNA, 25 bp, Artificial
  Probe
gattgaaactatttatggctggttt

SEQ ID NO: 70601 - DNA, 25 bp, Artificial
  Probe
tgacggtgtaagtcgattgaaacta

SEQ ID NO: 70602 - DNA, 25 bp, Artificial
  Probe
tttgacggtgtaagtcgattgaaac

SEQ ID NO: 70603 - DNA, 25 bp, Artificial
  Probe
aacgtgaatatccaattctgctaaa

SEQ ID NO: 70604 - DNA, 25 bp, Artificial
  Probe
acgtgaatatccaattctgctaaat

SEQ ID NO: 70605 - DNA, 25 bp, Artificial
  Probe
gttgatggtgatccagtttacagga

SEQ ID NO: 70606 - DNA, 25 bp, Artificial
  Probe
atgctgatgtgtctctaatgttgta

SEQ ID NO: 70607 - DNA, 25 bp, Artificial
  Probe
tgctgatgtgtctctaatgttgtaa

SEQ ID NO: 70608 - DNA, 25 bp, Artificial
  Probe
gaatgctgatgtgtctctaatgttg

SEQ ID NO: 70609 - DNA, 25 bp, Artificial
  Probe
gctgatgtgtctctaatgttgtaac

SEQ ID NO: 70610 - DNA, 25 bp, Artificial
  Probe
aatgctgatgtgtctctaatgttgt

SEQ ID NO: 70611 - DNA, 25 bp, Artificial
  Probe
agaatgctgatgtgtctctaatgtt

SEQ ID NO: 70612 - DNA, 25 bp, Artificial
  Probe
aactcatcctattgacaacagaatt

SEQ ID NO: 70613 - DNA, 25 bp, Artificial
  Probe
tagaatgctgatgtgtctctaatgt

SEQ ID NO: 70614 - DNA, 25 bp, Artificial
  Probe
ctgatgtgtctctaatgttgtaaca

SEQ ID NO: 70615 - DNA, 25 bp, Artificial
  Probe
atagaatgctgatgtgtctctaatg

SEQ ID NO: 70616 - DNA, 25 bp, Artificial
  Probe
tgatgtgtctctaatgttgtaacaa

SEQ ID NO: 70617 - DNA, 25 bp, Artificial
  Probe
ggaactatgaaatcaactgacaaga

SEQ ID NO: 70618 - DNA, 25 bp, Artificial
  Probe
aggaactatgaaatcaactgacaag

SEQ ID NO: 70619 - DNA, 25 bp, Artificial
  Probe
atgaaatggatgactctattgctca

SEQ ID NO: 70620 - DNA, 25 bp, Artificial
  Probe
tatgaaatggatgactctattgctc

SEQ ID NO: 70621 - DNA, 25 bp, Artificial
  Probe
aaggaactatgaaatcaactgacaa

SEQ ID NO: 70622 - DNA, 25 bp, Artificial
  Probe
aaaggaactatgaaatcaactgaca

SEQ ID NO: 70623 - DNA, 25 bp, Artificial
  Probe
actgctagaatacttcttgtcaatc

SEQ ID NO: 70624 - DNA, 25 bp, Artificial
  Probe
gaccatttgactgttcactgaattt

SEQ ID NO: 70625 - DNA, 25 bp, Artificial
  Probe
atatgaaatggatgactctattgct

SEQ ID NO: 70626 - DNA, 25 bp, Artificial
  Probe
ctgctagaatacttcttgtcaatct

SEQ ID NO: 70627 - DNA, 25 bp, Artificial
  Probe
aaactcatcctattgacaacagaat

SEQ ID NO: 70628 - DNA, 25 bp, Artificial
  Probe
accatttgactgttcactgaattta

SEQ ID NO: 70629 - DNA, 25 bp, Artificial
  Probe
atgaccatttgactgttcactgaat

SEQ ID NO: 70630 - DNA, 25 bp, Artificial
  Probe
actcatcctattgacaacagaattt

SEQ ID NO: 70631 - DNA, 25 bp, Artificial
  Probe
aactgctagaatacttcttgtcaat

SEQ ID NO: 70632 - DNA, 25 bp, Artificial
  Probe
tgaccatttgactgttcactgaatt

SEQ ID NO: 70633 - DNA, 25 bp, Artificial
  Probe
tgtctctaatgttgtaacaaactgc

SEQ ID NO: 70634 - DNA, 25 bp, Artificial
  Probe
ttgttggaattgtcaaagactgtac

SEQ ID NO: 70635 - DNA, 25 bp, Artificial
  Probe
ttgacaacagaatttaactggatcg

SEQ ID NO: 70636 - DNA, 25 bp, Artificial
  Probe
gtctctaatgttgtaacaaactgct

SEQ ID NO: 70637 - DNA, 25 bp, Artificial
  Probe
tgttggaattgtcaaagactgtact

SEQ ID NO: 70638 - DNA, 25 bp, Artificial
  Probe
gaactatgaaatcaactgacaagaa

SEQ ID NO: 70639 - DNA, 25 bp, Artificial
  Probe
cctattgacaacagaatttaactgg

SEQ ID NO: 70640 - DNA, 25 bp, Artificial
  Probe
tgtgtctctaatgttgtaacaaact

SEQ ID NO: 70641 - DNA, 25 bp, Artificial
  Probe
ccatttgactgttcactgaatttat

SEQ ID NO: 70642 - DNA, 25 bp, Artificial
  Probe
catgaccatttgactgttcactgaa

SEQ ID NO: 70643 - DNA, 25 bp, Artificial
  Probe
tgttgtaacaaactgctagaatact

SEQ ID NO: 70644 - DNA, 25 bp, Artificial
  Probe
gtgtctctaatgttgtaacaaactg

SEQ ID NO: 70645 - DNA, 25 bp, Artificial
  Probe
aacagaatttaactggatcgcagac

SEQ ID NO: 70646 - DNA, 25 bp, Artificial
  Probe
caacagaatttaactggatcgcaga

SEQ ID NO: 70647 - DNA, 25 bp, Artificial
  Probe
aactatgaaatcaactgacaagaaa

SEQ ID NO: 70648 - DNA, 25 bp, Artificial
  Probe
tctctaatgttgtaacaaactgcta

SEQ ID NO: 70649 - DNA, 25 bp, Artificial
  Probe
acaacagaatttaactggatcgcag

SEQ ID NO: 70650 - DNA, 25 bp, Artificial
  Probe
gacaacagaatttaactggatcgca

SEQ ID NO: 70651 - DNA, 25 bp, Artificial
  Probe
atctgtatctgcatttgctccaatt

SEQ ID NO: 70652 - DNA, 25 bp, Artificial
  Probe
ctgtatctgcatttgctccaatttg

SEQ ID NO: 70653 - DNA, 25 bp, Artificial
  Probe
tctgtatctgcatttgctccaattt

SEQ ID NO: 70654 - DNA, 25 bp, Artificial
  Probe
gatctgtatctgcatttgctccaat

SEQ ID NO: 70655 - DNA, 25 bp, Artificial
  Probe
aagtacctgaatgcatgaagagctt

SEQ ID NO: 70656 - DNA, 25 bp, Artificial
  Probe
agtacctgaatgcatgaagagcttc

SEQ ID NO: 70657 - DNA, 25 bp, Artificial
  Probe
caagtacctgaatgcatgaagagct

SEQ ID NO: 70658 - DNA, 25 bp, Artificial
  Probe
gatttcctctgaaaagatcatgctc

SEQ ID NO: 70659 - DNA, 25 bp, Artificial
  Probe
ttggatttcctctgaaaagatcatg

SEQ ID NO: 70660 - DNA, 25 bp, Artificial
  Probe
ttttggatttcctctgaaaagatca

SEQ ID NO: 70661 - DNA, 25 bp, Artificial
  Probe
ttcctctgaaaagatcatgctcctg

SEQ ID NO: 70662 - DNA, 25 bp, Artificial
  Probe
tttggatttcctctgaaaagatcat

SEQ ID NO: 70663 - DNA, 25 bp, Artificial
  Probe
atttcctctgaaaagatcatgctcc

SEQ ID NO: 70664 - DNA, 25 bp, Artificial
  Probe
ggatttcctctgaaaagatcatgct

SEQ ID NO: 70665 - DNA, 25 bp, Artificial
  Probe
tggatttcctctgaaaagatcatgc

SEQ ID NO: 70666 - DNA, 25 bp, Artificial
  Probe
tttcctctgaaaagatcatgctcct

SEQ ID NO: 70667 - DNA, 25 bp, Artificial
  Probe
agatctgtatctgcatttgctccaa

SEQ ID NO: 70668 - DNA, 25 bp, Artificial
  Probe
attttggatttcctctgaaaagatc

SEQ ID NO: 70669 - DNA, 25 bp, Artificial
  Probe
tgtatctgcatttgctccaatttgc

SEQ ID NO: 70670 - DNA, 25 bp, Artificial
  Probe
ccaagtacctgaatgcatgaagagc

SEQ ID NO: 70671 - DNA, 25 bp, Artificial
  Probe
gccaagtacctgaatgcatgaagag

SEQ ID NO: 70672 - DNA, 25 bp, Artificial
  Probe
gtacctgaatgcatgaagagcttca

SEQ ID NO: 70673 - DNA, 25 bp, Artificial
  Probe
tcctctgaaaagatcatgctcctgc

SEQ ID NO: 70674 - DNA, 25 bp, Artificial
  Probe
tgccaagtacctgaatgcatgaaga

SEQ ID NO: 70675 - DNA, 25 bp, Artificial
  Probe
atgccaagtacctgaatgcatgaag

SEQ ID NO: 70676 - DNA, 25 bp, Artificial
  Probe
catcatgccaagtacctgaatgcat

SEQ ID NO: 70677 - DNA, 25 bp, Artificial
  Probe
cctctgaaaagatcatgctcctgca

SEQ ID NO: 70678 - DNA, 25 bp, Artificial
  Probe
ggagctctgatttgcgctttgaaaa

SEQ ID NO: 70679 - DNA, 25 bp, Artificial
  Probe
atttgctccaatttgcaaccctgtg

SEQ ID NO: 70680 - DNA, 25 bp, Artificial
  Probe
catttgctccaatttgcaaccctgt

SEQ ID NO: 70681 - DNA, 25 bp, Artificial
  Probe
ggatcactcaaccagaattagaaga

SEQ ID NO: 70682 - DNA, 25 bp, Artificial
  Probe
atcactcaaccagaattagaagagc

SEQ ID NO: 70683 - DNA, 25 bp, Artificial
  Probe
cggatcactcaaccagaattagaag

SEQ ID NO: 70684 - DNA, 25 bp, Artificial
  Probe
gatcactcaaccagaattagaagag

SEQ ID NO: 70685 - DNA, 25 bp, Artificial
  Probe
accagaattagaagagcttgttaca

SEQ ID NO: 70686 - DNA, 25 bp, Artificial
  Probe
ccagaattagaagagcttgttacac

SEQ ID NO: 70687 - DNA, 25 bp, Artificial
  Probe
tcaaccagaattagaagagcttgtt

SEQ ID NO: 70688 - DNA, 25 bp, Artificial
  Probe
aaccagaattagaagagcttgttac

SEQ ID NO: 70689 - DNA, 25 bp, Artificial
  Probe
caaccagaattagaagagcttgtta

SEQ ID NO: 70690 - DNA, 25 bp, Artificial
  Probe
ctcagcctctcttctttatcaactc

SEQ ID NO: 70691 - DNA, 25 bp, Artificial
  Probe
tcagcctctcttctttatcaactct

SEQ ID NO: 70692 - DNA, 25 bp, Artificial
  Probe
ctcaaccagaattagaagagcttgt

SEQ ID NO: 70693 - DNA, 25 bp, Artificial
  Probe
actcaaccagaattagaagagcttg

SEQ ID NO: 70694 - DNA, 25 bp, Artificial
  Probe
cactcaaccagaattagaagagctt

SEQ ID NO: 70695 - DNA, 25 bp, Artificial
  Probe
ttcctcagcctctcttctttatcaa

SEQ ID NO: 70696 - DNA, 25 bp, Artificial
  Probe
attagaagagcttgttacacagttg

SEQ ID NO: 70697 - DNA, 25 bp, Artificial
  Probe
gaattagaagagcttgttacacagt

SEQ ID NO: 70698 - DNA, 25 bp, Artificial
  Probe
cagaattagaagagcttgttacaca

SEQ ID NO: 70699 - DNA, 25 bp, Artificial
  Probe
tcttctttatcaactctgccgaatt

SEQ ID NO: 70700 - DNA, 25 bp, Artificial
  Probe
ctcttctttatcaactctgccgaat

SEQ ID NO: 70701 - DNA, 25 bp, Artificial
  Probe
agaattagaagagcttgttacacag

SEQ ID NO: 70702 - DNA, 25 bp, Artificial
  Probe
tcactcaaccagaattagaagagct

SEQ ID NO: 70703 - DNA, 25 bp, Artificial
  Probe
agttcctcagcctctcttctttatc

SEQ ID NO: 70704 - DNA, 25 bp, Artificial
  Probe
aattagaagagcttgttacacagtt

SEQ ID NO: 70705 - DNA, 25 bp, Artificial
  Probe
ttagaagagcttgttacacagttgc

SEQ ID NO: 70706 - DNA, 25 bp, Artificial
  Probe
cctcagcctctcttctttatcaact

SEQ ID NO: 70707 - DNA, 25 bp, Artificial
  Probe
tcctcagcctctcttctttatcaac

SEQ ID NO: 70708 - DNA, 25 bp, Artificial
  Probe
gttcctcagcctctcttctttatca

SEQ ID NO: 70709 - DNA, 25 bp, Artificial
  Probe
tctcttctttatcaactctgccgaa

SEQ ID NO: 70710 - DNA, 25 bp, Artificial
  Probe
ctctcttctttatcaactctgccga

SEQ ID NO: 70711 - DNA, 25 bp, Artificial
  Probe
taagtgaagaccagagattcagatg

SEQ ID NO: 70712 - DNA, 25 bp, Artificial
  Probe
cagcctctcttctttatcaactctg

SEQ ID NO: 70713 - DNA, 25 bp, Artificial
  Probe
gagttcctcagcctctcttctttat

SEQ ID NO: 70714 - DNA, 25 bp, Artificial
  Probe
agcctctcttctttatcaactctgc

SEQ ID NO: 70715 - DNA, 25 bp, Artificial
  Probe
ttaagtgaagaccagagattcagat

SEQ ID NO: 70716 - DNA, 25 bp, Artificial
  Probe
aagccttaagtgaagaccagagatt

SEQ ID NO: 70717 - DNA, 25 bp, Artificial
  Probe
aagtgaagaccagagattcagatgt

SEQ ID NO: 70718 - DNA, 25 bp, Artificial
  Probe
agccttaagtgaagaccagagattc

SEQ ID NO: 70719 - DNA, 25 bp, Artificial
  Probe
taccggatcactcaaccagaattag

SEQ ID NO: 70720 - DNA, 25 bp, Artificial
  Probe
ctaccggatcactcaaccagaatta

SEQ ID NO: 70721 - DNA, 25 bp, Artificial
  Probe
caagccttaagtgaagaccagagat

SEQ ID NO: 70722 - DNA, 25 bp, Artificial
  Probe
cctctcttctttatcaactctgccg

SEQ ID NO: 70723 - DNA, 25 bp, Artificial
  Probe
agtgaagaccagagattcagatgtg

SEQ ID NO: 70724 - DNA, 25 bp, Artificial
  Probe
aatcagagtgacgttgagagagaga

SEQ ID NO: 70725 - DNA, 25 bp, Artificial
  Probe
tagaagagcttgttacacagttgcc

SEQ ID NO: 70726 - DNA, 25 bp, Artificial
  Probe
ctgagaagtttctgctttcatttgg

SEQ ID NO: 70727 - DNA, 25 bp, Artificial
  Probe
ctcatactaataatccaaactgctg

SEQ ID NO: 70728 - DNA, 25 bp, Artificial
  Probe
gctgagaagtttctgctttcatttg

SEQ ID NO: 70729 - DNA, 25 bp, Artificial
  Probe
tctcatactaataatccaaactgct

SEQ ID NO: 70730 - DNA, 25 bp, Artificial
  Probe
tcccagaagaaaggaagagatttaa

SEQ ID NO: 70731 - DNA, 25 bp, Artificial
  Probe
actaataatccaaactgctgataga

SEQ ID NO: 70732 - DNA, 25 bp, Artificial
  Probe
atcccagaagaaaggaagagattta

SEQ ID NO: 70733 - DNA, 25 bp, Artificial
  Probe
aatcccagaagaaaggaagagattt

SEQ ID NO: 70734 - DNA, 25 bp, Artificial
  Probe
aaatcccagaagaaaggaagagatt

SEQ ID NO: 70735 - DNA, 25 bp, Artificial
  Probe
tcatactaataatccaaactgctga

SEQ ID NO: 70736 - DNA, 25 bp, Artificial
  Probe
tgagaagtttctgctttcatttggg

SEQ ID NO: 70737 - DNA, 25 bp, Artificial
  Probe
cccagaagaaaggaagagatttaaa

SEQ ID NO: 70738 - DNA, 25 bp, Artificial
  Probe
catactaataatccaaactgctgat

SEQ ID NO: 70739 - DNA, 25 bp, Artificial
  Probe
ccttggagaacatgaagttgttgaa

SEQ ID NO: 70740 - DNA, 25 bp, Artificial
  Probe
atctcatactaataatccaaactgc

SEQ ID NO: 70741 - DNA, 25 bp, Artificial
  Probe
ccagaagaaaggaagagatttaaag

SEQ ID NO: 70742 - DNA, 25 bp, Artificial
  Probe
aatcacctaaaatcccagaagaaag

SEQ ID NO: 70743 - DNA, 25 bp, Artificial
  Probe
ctcccaccctgttcgtttcaaatag

SEQ ID NO: 70744 - DNA, 25 bp, Artificial
  Probe
ctaataatccaaactgctgatagat

SEQ ID NO: 70745 - DNA, 25 bp, Artificial
  Probe
aaatcacctaaaatcccagaagaaa

SEQ ID NO: 70746 - DNA, 25 bp, Artificial
  Probe
aaaatcacctaaaatcccagaagaa

SEQ ID NO: 70747 - DNA, 25 bp, Artificial
  Probe
tactaataatccaaactgctgatag

SEQ ID NO: 70748 - DNA, 25 bp, Artificial
  Probe
accctgttcgtttcaaataggtctg

SEQ ID NO: 70749 - DNA, 25 bp, Artificial
  Probe
caccctgttcgtttcaaataggtct

SEQ ID NO: 70750 - DNA, 25 bp, Artificial
  Probe
cttggagaacatgaagttgttgaaa

SEQ ID NO: 70751 - DNA, 25 bp, Artificial
  Probe
aaagcagaagtgtttccctgttgtt

SEQ ID NO: 70752 - DNA, 25 bp, Artificial
  Probe
agctgagaagtttctgctttcattt

SEQ ID NO: 70753 - DNA, 25 bp, Artificial
  Probe
atcacctaaaatcccagaagaaagg

SEQ ID NO: 70754 - DNA, 25 bp, Artificial
  Probe
cagaagaaaggaagagatttaaaga

SEQ ID NO: 70755 - DNA, 25 bp, Artificial
  Probe
aaaatcccagaagaaaggaagagat

SEQ ID NO: 70756 - DNA, 25 bp, Artificial
  Probe
cctaaaatcccagaagaaaggaaga

SEQ ID NO: 70757 - DNA, 25 bp, Artificial
  Probe
aagttgttgaaaagctgagaagttt

SEQ ID NO: 70758 - DNA, 25 bp, Artificial
  Probe
atgaagttgttgaaaagctgagaag

SEQ ID NO: 70759 - DNA, 25 bp, Artificial
  Probe
acctaaaatcccagaagaaaggaag

SEQ ID NO: 70760 - DNA, 25 bp, Artificial
  Probe
gaagttgttgaaaagctgagaagtt

SEQ ID NO: 70761 - DNA, 25 bp, Artificial
  Probe
aataatccaaactgctgatagattt

SEQ ID NO: 70762 - DNA, 25 bp, Artificial
  Probe
catgaagttgttgaaaagctgagaa

SEQ ID NO: 70763 - DNA, 25 bp, Artificial
  Probe
cacctaaaatcccagaagaaaggaa

SEQ ID NO: 70764 - DNA, 25 bp, Artificial
  Probe
taaaatcccagaagaaaggaagaga

SEQ ID NO: 70765 - DNA, 25 bp, Artificial
  Probe
ctaaaatcccagaagaaaggaagag

SEQ ID NO: 70766 - DNA, 25 bp, Artificial
  Probe
tcacctaaaatcccagaagaaagga

SEQ ID NO: 70767 - DNA, 25 bp, Artificial
  Probe
tgaagttgttgaaaagctgagaagt

SEQ ID NO: 70768 - DNA, 25 bp, Artificial
  Probe
atactaataatccaaactgctgata

SEQ ID NO: 70769 - DNA, 25 bp, Artificial
  Probe
gagaagtttctgctttcatttgggg

SEQ ID NO: 70770 - DNA, 25 bp, Artificial
  Probe
ccctgttcgtttcaaataggtctgc

SEQ ID NO: 70771 - DNA, 25 bp, Artificial
  Probe
gcaagactgtggctaatatgattaa

SEQ ID NO: 70772 - DNA, 25 bp, Artificial
  Probe
tgcaagactgtggctaatatgatta

SEQ ID NO: 70773 - DNA, 25 bp, Artificial
  Probe
ctgcaagactgtggctaatatgatt

SEQ ID NO: 70774 - DNA, 25 bp, Artificial
  Probe
gcaaactacttagacatcaaaggtt

SEQ ID NO: 70775 - DNA, 25 bp, Artificial
  Probe
actacttagacatcaaaggtttgct

SEQ ID NO: 70776 - DNA, 25 bp, Artificial
  Probe
tacttagacatcaaaggtttgcttg

SEQ ID NO: 70777 - DNA, 25 bp, Artificial
  Probe
aactacttagacatcaaaggtttgc

SEQ ID NO: 70778 - DNA, 25 bp, Artificial
  Probe
ctacttagacatcaaaggtttgctt

SEQ ID NO: 70779 - DNA, 25 bp, Artificial
  Probe
cctgcaagactgtggctaatatgat

SEQ ID NO: 70780 - DNA, 25 bp, Artificial
  Probe
acttattctggctgcaaactactta

SEQ ID NO: 70781 - DNA, 25 bp, Artificial
  Probe
cttattctggctgcaaactacttag

SEQ ID NO: 70782 - DNA, 25 bp, Artificial
  Probe
ctgcaaactacttagacatcaaagg

SEQ ID NO: 70783 - DNA, 25 bp, Artificial
  Probe
aacttattctggctgcaaactactt

SEQ ID NO: 70784 - DNA, 25 bp, Artificial
  Probe
tgcaaactacttagacatcaaaggt

SEQ ID NO: 70785 - DNA, 25 bp, Artificial
  Probe
gctgcaaactacttagacatcaaag

SEQ ID NO: 70786 - DNA, 25 bp, Artificial
  Probe
ttattctggctgcaaactacttaga

SEQ ID NO: 70787 - DNA, 25 bp, Artificial
  Probe
tattctggctgcaaactacttagac

SEQ ID NO: 70788 - DNA, 25 bp, Artificial
  Probe
ttgaacttattctggctgcaaacta

SEQ ID NO: 70789 - DNA, 25 bp, Artificial
  Probe
ggctgcaaactacttagacatcaaa

SEQ ID NO: 70790 - DNA, 25 bp, Artificial
  Probe
gaacttattctggctgcaaactact

SEQ ID NO: 70791 - DNA, 25 bp, Artificial
  Probe
tgaacttattctggctgcaaactac

SEQ ID NO: 70792 - DNA, 25 bp, Artificial
  Probe
tgtgcctgtcactgtaacactagaa

SEQ ID NO: 70793 - DNA, 25 bp, Artificial
  Probe
aactgtgcctgtcactgtaacacta

SEQ ID NO: 70794 - DNA, 25 bp, Artificial
  Probe
ctgtgcctgtcactgtaacactaga

SEQ ID NO: 70795 - DNA, 25 bp, Artificial
  Probe
acttagacatcaaaggtttgcttga

SEQ ID NO: 70796 - DNA, 25 bp, Artificial
  Probe
tggctgcaaactacttagacatcaa

SEQ ID NO: 70797 - DNA, 25 bp, Artificial
  Probe
acctgcaagactgtggctaatatga

SEQ ID NO: 70798 - DNA, 25 bp, Artificial
  Probe
ttctggctgcaaactacttagacat

SEQ ID NO: 70799 - DNA, 25 bp, Artificial
  Probe
attctggctgcaaactacttagaca

SEQ ID NO: 70800 - DNA, 25 bp, Artificial
  Probe
actgtgcctgtcactgtaacactag

SEQ ID NO: 70801 - DNA, 25 bp, Artificial
  Probe
tctggctgcaaactacttagacatc

SEQ ID NO: 70802 - DNA, 25 bp, Artificial
  Probe
ctggctgcaaactacttagacatca

SEQ ID NO: 70803 - DNA, 25 bp, Artificial
  Probe
tgaggagattcgtaaaaccttcaat

SEQ ID NO: 70804 - DNA, 25 bp, Artificial
  Probe
caaactacttagacatcaaaggttt

SEQ ID NO: 70805 - DNA, 25 bp, Artificial
  Probe
ctgaggagattcgtaaaaccttcaa

SEQ ID NO: 70806 - DNA, 25 bp, Artificial
  Probe
aaactacttagacatcaaaggtttg

SEQ ID NO: 70807 - DNA, 25 bp, Artificial
  Probe
cacctgcaagactgtggctaatatg

SEQ ID NO: 70808 - DNA, 25 bp, Artificial
  Probe
tcacctgcaagactgtggctaatat

SEQ ID NO: 70809 - DNA, 25 bp, Artificial
  Probe
tttgaacttattctggctgcaaact

SEQ ID NO: 70810 - DNA, 25 bp, Artificial
  Probe
gaactgtgcctgtcactgtaacact

SEQ ID NO: 70811 - DNA, 25 bp, Artificial
  Probe
cctgaggagattcgtaaaaccttca

SEQ ID NO: 70812 - DNA, 25 bp, Artificial
  Probe
cctgaaagttgaccaaggaacactt

SEQ ID NO: 70813 - DNA, 25 bp, Artificial
  Probe
gtcacctgcaagactgtggctaata

SEQ ID NO: 70814 - DNA, 25 bp, Artificial
  Probe
gcctgaggagattcgtaaaaccttc

SEQ ID NO: 70815 - DNA, 25 bp, Artificial
  Probe
ttttgaacttattctggctgcaaac

SEQ ID NO: 70816 - DNA, 25 bp, Artificial
  Probe
gtaggctggattatcattctctctg

SEQ ID NO: 70817 - DNA, 25 bp, Artificial
  Probe
agtaggctggattatcattctctct

SEQ ID NO: 70818 - DNA, 25 bp, Artificial
  Probe
attcatacctgtcatcgtgtaagtc

SEQ ID NO: 70819 - DNA, 25 bp, Artificial
  Probe
gattcatacctgtcatcgtgtaagt

SEQ ID NO: 70820 - DNA, 25 bp, Artificial
  Probe
tagtaggctggattatcattctctc

SEQ ID NO: 70821 - DNA, 25 bp, Artificial
  Probe
ggattcatacctgtcatcgtgtaag

SEQ ID NO: 70822 - DNA, 25 bp, Artificial
  Probe
tctctctctagtaggctggattatc

SEQ ID NO: 70823 - DNA, 25 bp, Artificial
  Probe
ctctctctagtaggctggattatca

SEQ ID NO: 70824 - DNA, 25 bp, Artificial
  Probe
tctctctagtaggctggattatcat

SEQ ID NO: 70825 - DNA, 25 bp, Artificial
  Probe
catctctctctagtaggctggatta

SEQ ID NO: 70826 - DNA, 25 bp, Artificial
  Probe
atctctctctagtaggctggattat

SEQ ID NO: 70827 - DNA, 25 bp, Artificial
  Probe
ttcatacctgtcatcgtgtaagtca

SEQ ID NO: 70828 - DNA, 25 bp, Artificial
  Probe
tggattcatacctgtcatcgtgtaa

SEQ ID NO: 70829 - DNA, 25 bp, Artificial
  Probe
tctagtaggctggattatcattctc

SEQ ID NO: 70830 - DNA, 25 bp, Artificial
  Probe
tctctagtaggctggattatcattc

SEQ ID NO: 70831 - DNA, 25 bp, Artificial
  Probe
atctgatccgatctccatatcttct

SEQ ID NO: 70832 - DNA, 25 bp, Artificial
  Probe
ctagtaggctggattatcattctct

SEQ ID NO: 70833 - DNA, 25 bp, Artificial
  Probe
ctctagtaggctggattatcattct

SEQ ID NO: 70834 - DNA, 25 bp, Artificial
  Probe
ctctctagtaggctggattatcatt

SEQ ID NO: 70835 - DNA, 25 bp, Artificial
  Probe
taggctggattatcattctctctgc

SEQ ID NO: 70836 - DNA, 25 bp, Artificial
  Probe
gtggattcatacctgtcatcgtgta

SEQ ID NO: 70837 - DNA, 25 bp, Artificial
  Probe
atacctgtcatcgtgtaagtcagag

SEQ ID NO: 70838 - DNA, 25 bp, Artificial
  Probe
catacctgtcatcgtgtaagtcaga

SEQ ID NO: 70839 - DNA, 25 bp, Artificial
  Probe
tcatacctgtcatcgtgtaagtcag

SEQ ID NO: 70840 - DNA, 25 bp, Artificial
  Probe
tatctgacgagactctttaattccc

SEQ ID NO: 70841 - DNA, 25 bp, Artificial
  Probe
tggattatcattctctctgcccttt

SEQ ID NO: 70842 - DNA, 25 bp, Artificial
  Probe
gcatctctctctagtaggctggatt

SEQ ID NO: 70843 - DNA, 25 bp, Artificial
  Probe
ctgacgagactctttaattcccaac

SEQ ID NO: 70844 - DNA, 25 bp, Artificial
  Probe
gagactctttaattcccaactccat

SEQ ID NO: 70845 - DNA, 25 bp, Artificial
  Probe
atctgacgagactctttaattccca

SEQ ID NO: 70846 - DNA, 25 bp, Artificial
  Probe
gtatctgacgagactctttaattcc

SEQ ID NO: 70847 - DNA, 25 bp, Artificial
  Probe
tgacgagactctttaattcccaact

SEQ ID NO: 70848 - DNA, 25 bp, Artificial
  Probe
agactctttaattcccaactccatg

SEQ ID NO: 70849 - DNA, 25 bp, Artificial
  Probe
tctgacgagactctttaattcccaa

SEQ ID NO: 70850 - DNA, 25 bp, Artificial
  Probe
ctggattatcattctctctgccctt

SEQ ID NO: 70851 - DNA, 25 bp, Artificial
  Probe
gactctttaattcccaactccatgt

SEQ ID NO: 70852 - DNA, 25 bp, Artificial
  Probe
ctctttaattcccaactccatgtgt

SEQ ID NO: 70853 - DNA, 25 bp, Artificial
  Probe
actctttaattcccaactccatgtg

SEQ ID NO: 70854 - DNA, 25 bp, Artificial
  Probe
gacgagactctttaattcccaactc

SEQ ID NO: 70855 - DNA, 25 bp, Artificial
  Probe
gatctgatccgatctccatatcttc

SEQ ID NO: 70856 - DNA, 25 bp, Artificial
  Probe
cttgatctgatccgatctccatatc

SEQ ID NO: 70857 - DNA, 25 bp, Artificial
  Probe
tctttaattcccaactccatgtgtg

SEQ ID NO: 70858 - DNA, 25 bp, Artificial
  Probe
tgatctgatccgatctccatatctt

SEQ ID NO: 70859 - DNA, 25 bp, Artificial
  Probe
ttgatctgatccgatctccatatct

SEQ ID NO: 70860 - DNA, 25 bp, Artificial
  Probe
ctttaattcccaactccatgtgtgt

SEQ ID NO: 70861 - DNA, 25 bp, Artificial
  Probe
ttcctggtgtgtatcaacattactc

SEQ ID NO: 70862 - DNA, 25 bp, Artificial
  Probe
cttcctggtgtgtatcaacattact

SEQ ID NO: 70863 - DNA, 25 bp, Artificial
  Probe
tgtgtatcaacattactcactgtct

SEQ ID NO: 70864 - DNA, 25 bp, Artificial
  Probe
gtgtgtatcaacattactcactgtc

SEQ ID NO: 70865 - DNA, 25 bp, Artificial
  Probe
ccttcctggtgtgtatcaacattac

SEQ ID NO: 70866 - DNA, 25 bp, Artificial
  Probe
ctggtgtgtatcaacattactcact

SEQ ID NO: 70867 - DNA, 25 bp, Artificial
  Probe
tgtatcaacattactcactgtcttc

SEQ ID NO: 70868 - DNA, 25 bp, Artificial
  Probe
tcctggtgtgtatcaacattactca

SEQ ID NO: 70869 - DNA, 25 bp, Artificial
  Probe
ggtgtgtatcaacattactcactgt

SEQ ID NO: 70870 - DNA, 25 bp, Artificial
  Probe
tggtgtgtatcaacattactcactg

SEQ ID NO: 70871 - DNA, 25 bp, Artificial
  Probe
gtatcaacattactcactgtcttct

SEQ ID NO: 70872 - DNA, 25 bp, Artificial
  Probe
gtgtatcaacattactcactgtctt

SEQ ID NO: 70873 - DNA, 25 bp, Artificial
  Probe
ttaacggagaagaatcacagccaat

SEQ ID NO: 70874 - DNA, 25 bp, Artificial
  Probe
cctggtgtgtatcaacattactcac

SEQ ID NO: 70875 - DNA, 25 bp, Artificial
  Probe
taacggagaagaatcacagccaatt

SEQ ID NO: 70876 - DNA, 25 bp, Artificial
  Probe
cagttgtgggtctttatttcttgtg

SEQ ID NO: 70877 - DNA, 25 bp, Artificial
  Probe
acattactcactgtcttctaattca

SEQ ID NO: 70878 - DNA, 25 bp, Artificial
  Probe
tcaacattactcactgtcttctaat

SEQ ID NO: 70879 - DNA, 25 bp, Artificial
  Probe
atcaacattactcactgtcttctaa

SEQ ID NO: 70880 - DNA, 25 bp, Artificial
  Probe
agttgtgggtctttatttcttgtgg

SEQ ID NO: 70881 - DNA, 25 bp, Artificial
  Probe
ttgtgggtctttatttcttgtggtg

SEQ ID NO: 70882 - DNA, 25 bp, Artificial
  Probe
gttgtgggtctttatttcttgtggt

SEQ ID NO: 70883 - DNA, 25 bp, Artificial
  Probe
gtgggtctttatttcttgtggtgaa

SEQ ID NO: 70884 - DNA, 25 bp, Artificial
  Probe
cattactcactgtcttctaattcag

SEQ ID NO: 70885 - DNA, 25 bp, Artificial
  Probe
caacattactcactgtcttctaatt

SEQ ID NO: 70886 - DNA, 25 bp, Artificial
  Probe
tatcaacattactcactgtcttcta

SEQ ID NO: 70887 - DNA, 25 bp, Artificial
  Probe
gtactatatgggaggtcctatcaat

SEQ ID NO: 70888 - DNA, 25 bp, Artificial
  Probe
aacattactcactgtcttctaattc

SEQ ID NO: 70889 - DNA, 25 bp, Artificial
  Probe
tgtgggtctttatttcttgtggtga

SEQ ID NO: 70890 - DNA, 25 bp, Artificial
  Probe
tcttaccaaatcctaaatctgtctt

SEQ ID NO: 70891 - DNA, 25 bp, Artificial
  Probe
ttcttaccaaatcctaaatctgtct

SEQ ID NO: 70892 - DNA, 25 bp, Artificial
  Probe
tttaacggagaagaatcacagccaa

SEQ ID NO: 70893 - DNA, 25 bp, Artificial
  Probe
ctccagttgtgggtctttatttctt

SEQ ID NO: 70894 - DNA, 25 bp, Artificial
  Probe
actatatgggaggtcctatcaatat

SEQ ID NO: 70895 - DNA, 25 bp, Artificial
  Probe
tccagttgtgggtctttatttcttg

SEQ ID NO: 70896 - DNA, 25 bp, Artificial
  Probe
cccttcctggtgtgtatcaacatta

SEQ ID NO: 70897 - DNA, 25 bp, Artificial
  Probe
ccagttgtgggtctttatttcttgt

SEQ ID NO: 70898 - DNA, 25 bp, Artificial
  Probe
cttaccaaatcctaaatctgtcttt

SEQ ID NO: 70899 - DNA, 25 bp, Artificial
  Probe
tttcttaccaaatcctaaatctgtc

SEQ ID NO: 70900 - DNA, 25 bp, Artificial
  Probe
ctttcttaccaaatcctaaatctgt

SEQ ID NO: 70901 - DNA, 25 bp, Artificial
  Probe
actttcttaccaaatcctaaatctg

SEQ ID NO: 70902 - DNA, 25 bp, Artificial
  Probe
tgggtctttatttcttgtggtgaaa

SEQ ID NO: 70903 - DNA, 25 bp, Artificial
  Probe
tactatatgggaggtcctatcaata

SEQ ID NO: 70904 - DNA, 25 bp, Artificial
  Probe
tcttgtggtgaaatgatgtgccttt

SEQ ID NO: 70905 - DNA, 25 bp, Artificial
  Probe
aacggagaagaatcacagccaattc

SEQ ID NO: 70906 - DNA, 25 bp, Artificial
  Probe
gtatccttgagtttggtatctttgg

SEQ ID NO: 70907 - DNA, 25 bp, Artificial
  Probe
tcgcttatgatttgtatccttgagt

SEQ ID NO: 70908 - DNA, 25 bp, Artificial
  Probe
cgcttatgatttgtatccttgagtt

SEQ ID NO: 70909 - DNA, 25 bp, Artificial
  Probe
tatccttgagtttggtatctttggc

SEQ ID NO: 70910 - DNA, 25 bp, Artificial
  Probe
gtgcccacctgtgtttaataaatat

SEQ ID NO: 70911 - DNA, 25 bp, Artificial
  Probe
tgtgcccacctgtgtttaataaata

SEQ ID NO: 70912 - DNA, 25 bp, Artificial
  Probe
tgtatccttgagtttggtatctttg

SEQ ID NO: 70913 - DNA, 25 bp, Artificial
  Probe
gctcgcttatgatttgtatccttga

SEQ ID NO: 70914 - DNA, 25 bp, Artificial
  Probe
ctaaagaagtaaacactgctccaac

SEQ ID NO: 70915 - DNA, 25 bp, Artificial
  Probe
gaactaaagaagtaaacactgctcc

SEQ ID NO: 70916 - DNA, 25 bp, Artificial
  Probe
ggaactaaagaagtaaacactgctc

SEQ ID NO: 70917 - DNA, 25 bp, Artificial
  Probe
actaaagaagtaaacactgctccaa

SEQ ID NO: 70918 - DNA, 25 bp, Artificial
  Probe
aactaaagaagtaaacactgctcca

SEQ ID NO: 70919 - DNA, 25 bp, Artificial
  Probe
tggaactaaagaagtaaacactgct

SEQ ID NO: 70920 - DNA, 25 bp, Artificial
  Probe
ctcgcttatgatttgtatccttgag

SEQ ID NO: 70921 - DNA, 25 bp, Artificial
  Probe
tggtgtggaactaaagaagtaaaca

SEQ ID NO: 70922 - DNA, 25 bp, Artificial
  Probe
tgatttgtatccttgagtttggtat

SEQ ID NO: 70923 - DNA, 25 bp, Artificial
  Probe
atgatttgtatccttgagtttggta

SEQ ID NO: 70924 - DNA, 25 bp, Artificial
  Probe
tatgatttgtatccttgagtttggt

SEQ ID NO: 70925 - DNA, 25 bp, Artificial
  Probe
gttaatttcaggctgttctcatgtc

SEQ ID NO: 70926 - DNA, 25 bp, Artificial
  Probe
ttgtatccttgagtttggtatcttt

SEQ ID NO: 70927 - DNA, 25 bp, Artificial
  Probe
tttgtatccttgagtttggtatctt

SEQ ID NO: 70928 - DNA, 25 bp, Artificial
  Probe
agttaatttcaggctgttctcatgt

SEQ ID NO: 70929 - DNA, 25 bp, Artificial
  Probe
taatttcaggctgttctcatgtcaa

SEQ ID NO: 70930 - DNA, 25 bp, Artificial
  Probe
ttaatttcaggctgttctcatgtca

SEQ ID NO: 70931 - DNA, 25 bp, Artificial
  Probe
ctgtgcccacctgtgtttaataaat

SEQ ID NO: 70932 - DNA, 25 bp, Artificial
  Probe
atttgtatccttgagtttggtatct

SEQ ID NO: 70933 - DNA, 25 bp, Artificial
  Probe
taaagaagtaaacactgctccaacg

SEQ ID NO: 70934 - DNA, 25 bp, Artificial
  Probe
gtggaactaaagaagtaaacactgc

SEQ ID NO: 70935 - DNA, 25 bp, Artificial
  Probe
ctaagcagcacccagttaatttcag

SEQ ID NO: 70936 - DNA, 25 bp, Artificial
  Probe
tgtggaactaaagaagtaaacactg

SEQ ID NO: 70937 - DNA, 25 bp, Artificial
  Probe
gatttgtatccttgagtttggtatc

SEQ ID NO: 70938 - DNA, 25 bp, Artificial
  Probe
ccagttaatttcaggctgttctcat

SEQ ID NO: 70939 - DNA, 25 bp, Artificial
  Probe
tgcccacctgtgtttaataaatatt

SEQ ID NO: 70940 - DNA, 25 bp, Artificial
  Probe
gcttatgatttgtatccttgagttt

SEQ ID NO: 70941 - DNA, 25 bp, Artificial
  Probe
aatttcaggctgttctcatgtcaag

SEQ ID NO: 70942 - DNA, 25 bp, Artificial
  Probe
cagttaatttcaggctgttctcatg

SEQ ID NO: 70943 - DNA, 25 bp, Artificial
  Probe
agctcgcttatgatttgtatccttg

SEQ ID NO: 70944 - DNA, 25 bp, Artificial
  Probe
cagctcgcttatgatttgtatcctt

SEQ ID NO: 70945 - DNA, 25 bp, Artificial
  Probe
ttatgatttgtatccttgagtttgg

SEQ ID NO: 70946 - DNA, 25 bp, Artificial
  Probe
ggaggtactaaaccgacatattctc

SEQ ID NO: 70947 - DNA, 25 bp, Artificial
  Probe
ctggaggtactaaaccgacatattc

SEQ ID NO: 70948 - DNA, 25 bp, Artificial
  Probe
gaggtactaaaccgacatattctct

SEQ ID NO: 70949 - DNA, 25 bp, Artificial
  Probe
tggaggtactaaaccgacatattct

SEQ ID NO: 70950 - DNA, 25 bp, Artificial
  Probe
tctggaggtactaaaccgacatatt

SEQ ID NO: 70951 - DNA, 25 bp, Artificial
  Probe
cttgctgccagtgtatatgtatatg

SEQ ID NO: 70952 - DNA, 25 bp, Artificial
  Probe
gcttgctgccagtgtatatgtatat

SEQ ID NO: 70953 - DNA, 25 bp, Artificial
  Probe
ttgctgccagtgtatatgtatatgc

SEQ ID NO: 70954 - DNA, 25 bp, Artificial
  Probe
agaggtgaagtgtctgagaagttag

SEQ ID NO: 70955 - DNA, 25 bp, Artificial
  Probe
gtgaagtgtctgagaagttagcatg

SEQ ID NO: 70956 - DNA, 25 bp, Artificial
  Probe
ggtgaagtgtctgagaagttagcat

SEQ ID NO: 70957 - DNA, 25 bp, Artificial
  Probe
cacctcctctttacccatttatcat

SEQ ID NO: 70958 - DNA, 25 bp, Artificial
  Probe
gaggtgaagtgtctgagaagttagc

SEQ ID NO: 70959 - DNA, 25 bp, Artificial
  Probe
agcttgctgccagtgtatatgtata

SEQ ID NO: 70960 - DNA, 25 bp, Artificial
  Probe
tagcttgctgccagtgtatatgtat

SEQ ID NO: 70961 - DNA, 25 bp, Artificial
  Probe
agcaagaatagttgggaagtagtag

SEQ ID NO: 70962 - DNA, 25 bp, Artificial
  Probe
tgaagtgtctgagaagttagcatgg

SEQ ID NO: 70963 - DNA, 25 bp, Artificial
  Probe
gaagcaagaatagttgggaagtagt

SEQ ID NO: 70964 - DNA, 25 bp, Artificial
  Probe
aagcaagaatagttgggaagtagta

SEQ ID NO: 70965 - DNA, 25 bp, Artificial
  Probe
tagtagcttgctgccagtgtatatg

SEQ ID NO: 70966 - DNA, 25 bp, Artificial
  Probe
gtagtagcttgctgccagtgtatat

SEQ ID NO: 70967 - DNA, 25 bp, Artificial
  Probe
ggaagcaagaatagttgggaagtag

SEQ ID NO: 70968 - DNA, 25 bp, Artificial
  Probe
gcaagaatagttgggaagtagtagc

SEQ ID NO: 70969 - DNA, 25 bp, Artificial
  Probe
aggtgaagtgtctgagaagttagca

SEQ ID NO: 70970 - DNA, 25 bp, Artificial
  Probe
gtagcttgctgccagtgtatatgta

SEQ ID NO: 70971 - DNA, 25 bp, Artificial
  Probe
cctcctctttacccatttatcatgt

SEQ ID NO: 70972 - DNA, 25 bp, Artificial
  Probe
acctcctctttacccatttatcatg

SEQ ID NO: 70973 - DNA, 25 bp, Artificial
  Probe
agcacctcctctttacccatttatc

SEQ ID NO: 70974 - DNA, 25 bp, Artificial
  Probe
tcctctttacccatttatcatgtgc

SEQ ID NO: 70975 - DNA, 25 bp, Artificial
  Probe
ctcctctttacccatttatcatgtg

SEQ ID NO: 70976 - DNA, 25 bp, Artificial
  Probe
gcacctcctctttacccatttatca

SEQ ID NO: 70977 - DNA, 25 bp, Artificial
  Probe
cagcacctcctctttacccatttat

SEQ ID NO: 70978 - DNA, 25 bp, Artificial
  Probe
agaaaggcatttgtgtccaagaaag

SEQ ID NO: 70979 - DNA, 25 bp, Artificial
  Probe
gagaaaggcatttgtgtccaagaaa

SEQ ID NO: 70980 - DNA, 25 bp, Artificial
  Probe
gggaagcaagaatagttgggaagta

SEQ ID NO: 70981 - DNA, 25 bp, Artificial
  Probe
agaatagttgggaagtagtagcttg

SEQ ID NO: 70982 - DNA, 25 bp, Artificial
  Probe
tgtttaaagaccaacttcaaatccc

SEQ ID NO: 70983 - DNA, 25 bp, Artificial
  Probe
gtttaaagaccaacttcaaatccct

SEQ ID NO: 70984 - DNA, 25 bp, Artificial
  Probe
ctctttacccatttatcatgtgccc

SEQ ID NO: 70985 - DNA, 25 bp, Artificial
  Probe
cctctttacccatttatcatgtgcc

SEQ ID NO: 70986 - DNA, 25 bp, Artificial
  Probe
agtagtagcttgctgccagtgtata

SEQ ID NO: 70987 - DNA, 25 bp, Artificial
  Probe
caagaatagttgggaagtagtagct

SEQ ID NO: 70988 - DNA, 25 bp, Artificial
  Probe
aagaatagttgggaagtagtagctt

SEQ ID NO: 70989 - DNA, 25 bp, Artificial
  Probe
tttaaagaccaacttcaaatccctt

SEQ ID NO: 70990 - DNA, 25 bp, Artificial
  Probe
ctttacccatttatcatgtgccctg

SEQ ID NO: 70991 - DNA, 25 bp, Artificial
  Probe
tctttacccatttatcatgtgccct

SEQ ID NO: 70992 - DNA, 25 bp, Artificial
  Probe
gaatagttgggaagtagtagcttgc

SEQ ID NO: 70993 - DNA, 25 bp, Artificial
  Probe
gaagagaaaggcatttgtgtccaag

SEQ ID NO: 70994 - DNA, 25 bp, Artificial
  Probe
ctgtttaaagaccaacttcaaatcc

SEQ ID NO: 70995 - DNA, 25 bp, Artificial
  Probe
aatagttgggaagtagtagcttgct

SEQ ID NO: 70996 - DNA, 25 bp, Artificial
  Probe
tattcagttgtgtactcgtgtagtg

SEQ ID NO: 70997 - DNA, 25 bp, Artificial
  Probe
gtattcagttgtgtactcgtgtagt

SEQ ID NO: 70998 - DNA, 25 bp, Artificial
  Probe
caacaagagaatcagcgacactaac

SEQ ID NO: 70999 - DNA, 25 bp, Artificial
  Probe
aacaagagaatcagcgacactaaca

SEQ ID NO: 71000 - DNA, 25 bp, Artificial
  Probe
acaagagaatcagcgacactaacag

SEQ ID NO: 71001 - DNA, 25 bp, Artificial
  Probe
attcagttgtgtactcgtgtagtgt

SEQ ID NO: 71002 - DNA, 25 bp, Artificial
  Probe
ttaacacacacgactgacagagaag

SEQ ID NO: 71003 - DNA, 25 bp, Artificial
  Probe
cttaacacacacgactgacagagaa

SEQ ID NO: 71004 - DNA, 25 bp, Artificial
  Probe
ttcagttgtgtactcgtgtagtgtt

SEQ ID NO: 71005 - DNA, 25 bp, Artificial
  Probe
gtgctgtgctaaacttgtgaaatac

SEQ ID NO: 71006 - DNA, 25 bp, Artificial
  Probe
tgtgctgtgctaaacttgtgaaata

SEQ ID NO: 71007 - DNA, 25 bp, Artificial
  Probe
gagagttagcaggacttaacacaca

SEQ ID NO: 71008 - DNA, 25 bp, Artificial
  Probe
tgtgctaaacttgtgaaatacatcg

SEQ ID NO: 71009 - DNA, 25 bp, Artificial
  Probe
gctgtgctaaacttgtgaaatacat

SEQ ID NO: 71010 - DNA, 25 bp, Artificial
  Probe
atgtgctgtgctaaacttgtgaaat

SEQ ID NO: 71011 - DNA, 25 bp, Artificial
  Probe
agagttagcaggacttaacacacac

SEQ ID NO: 71012 - DNA, 25 bp, Artificial
  Probe
gacttaacacacacgactgacagag

SEQ ID NO: 71013 - DNA, 25 bp, Artificial
  Probe
agttgtgtactcgtgtagtgtttaa

SEQ ID NO: 71014 - DNA, 25 bp, Artificial
  Probe
gcaacaagagaatcagcgacactaa

SEQ ID NO: 71015 - DNA, 25 bp, Artificial
  Probe
ctggagagttagcaggacttaacac

SEQ ID NO: 71016 - DNA, 25 bp, Artificial
  Probe
ctgtgctaaacttgtgaaatacatc

SEQ ID NO: 71017 - DNA, 25 bp, Artificial
  Probe
cagttgtgtactcgtgtagtgttta

SEQ ID NO: 71018 - DNA, 25 bp, Artificial
  Probe
tgctgtgctaaacttgtgaaataca

SEQ ID NO: 71019 - DNA, 25 bp, Artificial
  Probe
ggagagttagcaggacttaacacac

SEQ ID NO: 71020 - DNA, 25 bp, Artificial
  Probe
acttaacacacacgactgacagaga

SEQ ID NO: 71021 - DNA, 25 bp, Artificial
  Probe
gatgtgctgtgctaaacttgtgaaa

SEQ ID NO: 71022 - DNA, 25 bp, Artificial
  Probe
ttcacttctgtgctttcttggattt

SEQ ID NO: 71023 - DNA, 25 bp, Artificial
  Probe
tttcacttctgtgctttcttggatt

SEQ ID NO: 71024 - DNA, 25 bp, Artificial
  Probe
gtactttcacttctgtgctttcttg

SEQ ID NO: 71025 - DNA, 25 bp, Artificial
  Probe
tactttcacttctgtgctttcttgg

SEQ ID NO: 71026 - DNA, 25 bp, Artificial
  Probe
caagagaatcagcgacactaacagc

SEQ ID NO: 71027 - DNA, 25 bp, Artificial
  Probe
acagcaacagcaacaagagaatcag

SEQ ID NO: 71028 - DNA, 25 bp, Artificial
  Probe
gacagcaacagcaacaagagaatca

SEQ ID NO: 71029 - DNA, 25 bp, Artificial
  Probe
ttagcaggacttaacacacacgact

SEQ ID NO: 71030 - DNA, 25 bp, Artificial
  Probe
tggagagttagcaggacttaacaca

SEQ ID NO: 71031 - DNA, 25 bp, Artificial
  Probe
ctttcacttctgtgctttcttggat

SEQ ID NO: 71032 - DNA, 25 bp, Artificial
  Probe
gttgtgtactcgtgtagtgtttaaa

SEQ ID NO: 71033 - DNA, 25 bp, Artificial
  Probe
tacaagagatgtgctgtgctaaact

SEQ ID NO: 71034 - DNA, 25 bp, Artificial
  Probe
ggtactttcacttctgtgctttctt

SEQ ID NO: 71035 - DNA, 25 bp, Artificial
  Probe
tcagttgtgtactcgtgtagtgttt

SEQ ID NO: 71036 - DNA, 25 bp, Artificial
  Probe
caaagcacacagagagagagaagac

SEQ ID NO: 71037 - DNA, 25 bp, Artificial
  Probe
gtgctaaacttgtgaaatacatcga

SEQ ID NO: 71038 - DNA, 25 bp, Artificial
  Probe
gctaaacttgtgaaatacatcgagg

SEQ ID NO: 71039 - DNA, 25 bp, Artificial
  Probe
tgctaaacttgtgaaatacatcgag

SEQ ID NO: 71040 - DNA, 25 bp, Artificial
  Probe
aagagatgtgctgtgctaaacttgt

SEQ ID NO: 71041 - DNA, 25 bp, Artificial
  Probe
agagggagtttgaaatcctgacttc

SEQ ID NO: 71042 - DNA, 25 bp, Artificial
  Probe
gagtttgaaatcctgacttcagaag

SEQ ID NO: 71043 - DNA, 25 bp, Artificial
  Probe
ggagtttgaaatcctgacttcagaa

SEQ ID NO: 71044 - DNA, 25 bp, Artificial
  Probe
tttgaaatcctgacttcagaagcag

SEQ ID NO: 71045 - DNA, 25 bp, Artificial
  Probe
agtttgaaatcctgacttcagaagc

SEQ ID NO: 71046 - DNA, 25 bp, Artificial
  Probe
gtttgaaatcctgacttcagaagca

SEQ ID NO: 71047 - DNA, 25 bp, Artificial
  Probe
gagggagtttgaaatcctgacttca

SEQ ID NO: 71048 - DNA, 25 bp, Artificial
  Probe
gggagtttgaaatcctgacttcaga

SEQ ID NO: 71049 - DNA, 25 bp, Artificial
  Probe
agggagtttgaaatcctgacttcag

SEQ ID NO: 71050 - DNA, 25 bp, Artificial
  Probe
gacttccacttccgtctcaacatcc

SEQ ID NO: 71051 - DNA, 25 bp, Artificial
  Probe
ctctttaggaggacttccacttccg

SEQ ID NO: 71052 - DNA, 25 bp, Artificial
  Probe
ttaggaggacttccacttccgtctc

SEQ ID NO: 71053 - DNA, 25 bp, Artificial
  Probe
ggacttccacttccgtctcaacatc

SEQ ID NO: 71054 - DNA, 25 bp, Artificial
  Probe
ctttaggaggacttccacttccgtc

SEQ ID NO: 71055 - DNA, 25 bp, Artificial
  Probe
tttaggaggacttccacttccgtct

SEQ ID NO: 71056 - DNA, 25 bp, Artificial
  Probe
tctttaggaggacttccacttccgt

SEQ ID NO: 71057 - DNA, 25 bp, Artificial
  Probe
ttgaaatcctgacttcagaagcagg

SEQ ID NO: 71058 - DNA, 25 bp, Artificial
  Probe
tgaaatcctgacttcagaagcaggg

SEQ ID NO: 71059 - DNA, 25 bp, Artificial
  Probe
aactctgtattcattctcgatcatg

SEQ ID NO: 71060 - DNA, 25 bp, Artificial
  Probe
ttaacttctgctgctgaatgctgag

SEQ ID NO: 71061 - DNA, 25 bp, Artificial
  Probe
acattagactggttaacttctgctg

SEQ ID NO: 71062 - DNA, 25 bp, Artificial
  Probe
cacattagactggttaacttctgct

SEQ ID NO: 71063 - DNA, 25 bp, Artificial
  Probe
tcacattagactggttaacttctgc

SEQ ID NO: 71064 - DNA, 25 bp, Artificial
  Probe
attgagaaacttgccaagaacaaac

SEQ ID NO: 71065 - DNA, 25 bp, Artificial
  Probe
gcaaactctgtattcattctcgatc

SEQ ID NO: 71066 - DNA, 25 bp, Artificial
  Probe
agcaaactctgtattcattctcgat

SEQ ID NO: 71067 - DNA, 25 bp, Artificial
  Probe
cctattactccagagactgctgaaa

SEQ ID NO: 71068 - DNA, 25 bp, Artificial
  Probe
atcacattagactggttaacttctg

SEQ ID NO: 71069 - DNA, 25 bp, Artificial
  Probe
caaactctgtattcattctcgatca

SEQ ID NO: 71070 - DNA, 25 bp, Artificial
  Probe
attagactggttaacttctgctgct

SEQ ID NO: 71071 - DNA, 25 bp, Artificial
  Probe
cattagactggttaacttctgctgc

SEQ ID NO: 71072 - DNA, 25 bp, Artificial
  Probe
tctcgatcatgaatgcaactagaat

SEQ ID NO: 71073 - DNA, 25 bp, Artificial
  Probe
ctcgatcatgaatgcaactagaata

SEQ ID NO: 71074 - DNA, 25 bp, Artificial
  Probe
ttgagaaacttgccaagaacaaaca

SEQ ID NO: 71075 - DNA, 25 bp, Artificial
  Probe
aatcacattagactggttaacttct

SEQ ID NO: 71076 - DNA, 25 bp, Artificial
  Probe
gagcaaactctgtattcattctcga

SEQ ID NO: 71077 - DNA, 25 bp, Artificial
  Probe
gcctattactccagagactgctgaa

SEQ ID NO: 71078 - DNA, 25 bp, Artificial
  Probe
aaactctgtattcattctcgatcat

SEQ ID NO: 71079 - DNA, 25 bp, Artificial
  Probe
tgagaaacttgccaagaacaaacag

SEQ ID NO: 71080 - DNA, 25 bp, Artificial
  Probe
tcgatcatgaatgcaactagaatat

SEQ ID NO: 71081 - DNA, 25 bp, Artificial
  Probe
gcctctgtgcttcggaatatcattt

SEQ ID NO: 71082 - DNA, 25 bp, Artificial
  Probe
ctctgtgcttcggaatatcattttc

SEQ ID NO: 71083 - DNA, 25 bp, Artificial
  Probe
ttagactggttaacttctgctgctg

SEQ ID NO: 71084 - DNA, 25 bp, Artificial
  Probe
agtaatcacattagactggttaact

SEQ ID NO: 71085 - DNA, 25 bp, Artificial
  Probe
cgatcatgaatgcaactagaatatt

SEQ ID NO: 71086 - DNA, 25 bp, Artificial
  Probe
cctctgtgcttcggaatatcatttt

SEQ ID NO: 71087 - DNA, 25 bp, Artificial
  Probe
attctcgatcatgaatgcaactaga

SEQ ID NO: 71088 - DNA, 25 bp, Artificial
  Probe
gactggttaacttctgctgctgaat

SEQ ID NO: 71089 - DNA, 25 bp, Artificial
  Probe
gtaatcacattagactggttaactt

SEQ ID NO: 71090 - DNA, 25 bp, Artificial
  Probe
tattactccagagactgctgaaaag

SEQ ID NO: 71091 - DNA, 25 bp, Artificial
  Probe
ctattactccagagactgctgaaaa

SEQ ID NO: 71092 - DNA, 25 bp, Artificial
  Probe
accttagagcaaactctgtattcat

SEQ ID NO: 71093 - DNA, 25 bp, Artificial
  Probe
aacaccttagagcaaactctgtatt

SEQ ID NO: 71094 - DNA, 25 bp, Artificial
  Probe
caccttagagcaaactctgtattca

SEQ ID NO: 71095 - DNA, 25 bp, Artificial
  Probe
acaccttagagcaaactctgtattc

SEQ ID NO: 71096 - DNA, 25 bp, Artificial
  Probe
ttctcgatcatgaatgcaactagaa

SEQ ID NO: 71097 - DNA, 25 bp, Artificial
  Probe
caacaccttagagcaaactctgtat

SEQ ID NO: 71098 - DNA, 25 bp, Artificial
  Probe
agagcaaactctgtattcattctcg

SEQ ID NO: 71099 - DNA, 25 bp, Artificial
  Probe
tagactggttaacttctgctgctga

SEQ ID NO: 71100 - DNA, 25 bp, Artificial
  Probe
taatcacattagactggttaacttc

SEQ ID NO: 71101 - DNA, 25 bp, Artificial
  Probe
gatcagtaatcacattagactggtt

SEQ ID NO: 71102 - DNA, 25 bp, Artificial
  Probe
actggttaacttctgctgctgaatg

SEQ ID NO: 71103 - DNA, 25 bp, Artificial
  Probe
ccttagagcaaactctgtattcatt

SEQ ID NO: 71104 - DNA, 25 bp, Artificial
  Probe
ttaagccactgagcattattagaat

SEQ ID NO: 71105 - DNA, 25 bp, Artificial
  Probe
aagccactgagcattattagaatta

SEQ ID NO: 71106 - DNA, 25 bp, Artificial
  Probe
taagccactgagcattattagaatt

SEQ ID NO: 71107 - DNA, 25 bp, Artificial
  Probe
agccactgagcattattagaattat

SEQ ID NO: 71108 - DNA, 25 bp, Artificial
  Probe
gccactgagcattattagaattatg

SEQ ID NO: 71109 - DNA, 25 bp, Artificial
  Probe
cctggaatgtaagcgtaaatgaata

SEQ ID NO: 71110 - DNA, 25 bp, Artificial
  Probe
aattaaggaagtttcacaagccaaa

SEQ ID NO: 71111 - DNA, 25 bp, Artificial
  Probe
aaatcctggaatgtaagcgtaaatg

SEQ ID NO: 71112 - DNA, 25 bp, Artificial
  Probe
caaatcctggaatgtaagcgtaaat

SEQ ID NO: 71113 - DNA, 25 bp, Artificial
  Probe
tcctggaatgtaagcgtaaatgaat

SEQ ID NO: 71114 - DNA, 25 bp, Artificial
  Probe
atcctggaatgtaagcgtaaatgaa

SEQ ID NO: 71115 - DNA, 25 bp, Artificial
  Probe
aatcctggaatgtaagcgtaaatga

SEQ ID NO: 71116 - DNA, 25 bp, Artificial
  Probe
cctgatatagcaaatcctggaatgt

SEQ ID NO: 71117 - DNA, 25 bp, Artificial
  Probe
acctgatatagcaaatcctggaatg

SEQ ID NO: 71118 - DNA, 25 bp, Artificial
  Probe
tatagcaaatcctggaatgtaagcg

SEQ ID NO: 71119 - DNA, 25 bp, Artificial
  Probe
atatagcaaatcctggaatgtaagc

SEQ ID NO: 71120 - DNA, 25 bp, Artificial
  Probe
tgatcttaagccactgagcattatt

SEQ ID NO: 71121 - DNA, 25 bp, Artificial
  Probe
tacctgatatagcaaatcctggaat

SEQ ID NO: 71122 - DNA, 25 bp, Artificial
  Probe
atacctgatatagcaaatcctggaa

SEQ ID NO: 71123 - DNA, 25 bp, Artificial
  Probe
ctgatcttaagccactgagcattat

SEQ ID NO: 71124 - DNA, 25 bp, Artificial
  Probe
cttaagccactgagcattattagaa

SEQ ID NO: 71125 - DNA, 25 bp, Artificial
  Probe
tcttaagccactgagcattattaga

SEQ ID NO: 71126 - DNA, 25 bp, Artificial
  Probe
atcttaagccactgagcattattag

SEQ ID NO: 71127 - DNA, 25 bp, Artificial
  Probe
gatcttaagccactgagcattatta

SEQ ID NO: 71128 - DNA, 25 bp, Artificial
  Probe
tatacctgatatagcaaatcctgga

SEQ ID NO: 71129 - DNA, 25 bp, Artificial
  Probe
tctgatcttaagccactgagcatta

SEQ ID NO: 71130 - DNA, 25 bp, Artificial
  Probe
ctgatatagcaaatcctggaatgta

SEQ ID NO: 71131 - DNA, 25 bp, Artificial
  Probe
tgtttataacttagccgaaccttga

SEQ ID NO: 71132 - DNA, 25 bp, Artificial
  Probe
atgtttataacttagccgaaccttg

SEQ ID NO: 71133 - DNA, 25 bp, Artificial
  Probe
catgtttataacttagccgaacctt

SEQ ID NO: 71134 - DNA, 25 bp, Artificial
  Probe
gtttataacttagccgaaccttgat

SEQ ID NO: 71135 - DNA, 25 bp, Artificial
  Probe
gcaaatcctggaatgtaagcgtaaa

SEQ ID NO: 71136 - DNA, 25 bp, Artificial
  Probe
tagcaaatcctggaatgtaagcgta

SEQ ID NO: 71137 - DNA, 25 bp, Artificial
  Probe
ttatacctgatatagcaaatcctgg

SEQ ID NO: 71138 - DNA, 25 bp, Artificial
  Probe
ctggaatgtaagcgtaaatgaatat

SEQ ID NO: 71139 - DNA, 25 bp, Artificial
  Probe
ttataacttagccgaaccttgattt

SEQ ID NO: 71140 - DNA, 25 bp, Artificial
  Probe
tttataacttagccgaaccttgatt

SEQ ID NO: 71141 - DNA, 25 bp, Artificial
  Probe
tgatatagcaaatcctggaatgtaa

SEQ ID NO: 71142 - DNA, 25 bp, Artificial
  Probe
ttctgatcttaagccactgagcatt

SEQ ID NO: 71143 - DNA, 25 bp, Artificial
  Probe
atagcaaatcctggaatgtaagcgt

SEQ ID NO: 71144 - DNA, 25 bp, Artificial
  Probe
gatatagcaaatcctggaatgtaag

SEQ ID NO: 71145 - DNA, 25 bp, Artificial
  Probe
agcaaatcctggaatgtaagcgtaa

SEQ ID NO: 71146 - DNA, 25 bp, Artificial
  Probe
gttatacctgatatagcaaatcctg

SEQ ID NO: 71147 - DNA, 25 bp, Artificial
  Probe
gttctgatcttaagccactgagcat

SEQ ID NO: 71148 - DNA, 25 bp, Artificial
  Probe
agttatacctgatatagcaaatcct

SEQ ID NO: 71149 - DNA, 25 bp, Artificial
  Probe
aatctgacactgaatctgcttatcc

SEQ ID NO: 71150 - DNA, 25 bp, Artificial
  Probe
taatctgacactgaatctgcttatc

SEQ ID NO: 71151 - DNA, 25 bp, Artificial
  Probe
attgtggatctctgccttatgttaa

SEQ ID NO: 71152 - DNA, 25 bp, Artificial
  Probe
gattgtggatctctgccttatgtta

SEQ ID NO: 71153 - DNA, 25 bp, Artificial
  Probe
tccaagaagttctgataacaaggtt

SEQ ID NO: 71154 - DNA, 25 bp, Artificial
  Probe
atccaagaagttctgataacaaggt

SEQ ID NO: 71155 - DNA, 25 bp, Artificial
  Probe
aatccaagaagttctgataacaagg

SEQ ID NO: 71156 - DNA, 25 bp, Artificial
  Probe
ttaataatatcacagagaggatgcc

SEQ ID NO: 71157 - DNA, 25 bp, Artificial
  Probe
aataatatcacagagaggatgcctg

SEQ ID NO: 71158 - DNA, 25 bp, Artificial
  Probe
taataatatcacagagaggatgcct

SEQ ID NO: 71159 - DNA, 25 bp, Artificial
  Probe
atctgcttatcccattagtgtgaat

SEQ ID NO: 71160 - DNA, 25 bp, Artificial
  Probe
aatctgcttatcccattagtgtgaa

SEQ ID NO: 71161 - DNA, 25 bp, Artificial
  Probe
agggttgatatagtatggtgtatgc

SEQ ID NO: 71162 - DNA, 25 bp, Artificial
  Probe
gaatctgcttatcccattagtgtga

SEQ ID NO: 71163 - DNA, 25 bp, Artificial
  Probe
ctgaatctgcttatcccattagtgt

SEQ ID NO: 71164 - DNA, 25 bp, Artificial
  Probe
acactgaatctgcttatcccattag

SEQ ID NO: 71165 - DNA, 25 bp, Artificial
  Probe
gacactgaatctgcttatcccatta

SEQ ID NO: 71166 - DNA, 25 bp, Artificial
  Probe
tgaatctgcttatcccattagtgtg

SEQ ID NO: 71167 - DNA, 25 bp, Artificial
  Probe
tctgcttatcccattagtgtgaata

SEQ ID NO: 71168 - DNA, 25 bp, Artificial
  Probe
aaagtcatttgcctctggatgtatt

SEQ ID NO: 71169 - DNA, 25 bp, Artificial
  Probe
ctgcttatcccattagtgtgaatat

SEQ ID NO: 71170 - DNA, 25 bp, Artificial
  Probe
actgaatctgcttatcccattagtg

SEQ ID NO: 71171 - DNA, 25 bp, Artificial
  Probe
cactgaatctgcttatcccattagt

SEQ ID NO: 71172 - DNA, 25 bp, Artificial
  Probe
tgtggatctctgccttatgttaaat

SEQ ID NO: 71173 - DNA, 25 bp, Artificial
  Probe
ttgtggatctctgccttatgttaaa

SEQ ID NO: 71174 - DNA, 25 bp, Artificial
  Probe
ccaagaagttctgataacaaggttt

SEQ ID NO: 71175 - DNA, 25 bp, Artificial
  Probe
tgacactgaatctgcttatcccatt

SEQ ID NO: 71176 - DNA, 25 bp, Artificial
  Probe
atctgacactgaatctgcttatccc

SEQ ID NO: 71177 - DNA, 25 bp, Artificial
  Probe
agattgtggatctctgccttatgtt

SEQ ID NO: 71178 - DNA, 25 bp, Artificial
  Probe
aagattgtggatctctgccttatgt

SEQ ID NO: 71179 - DNA, 25 bp, Artificial
  Probe
gtggatctctgccttatgttaaata

SEQ ID NO: 71180 - DNA, 25 bp, Artificial
  Probe
ctgacactgaatctgcttatcccat

SEQ ID NO: 71181 - DNA, 25 bp, Artificial
  Probe
gggttgatatagtatggtgtatgca

SEQ ID NO: 71182 - DNA, 25 bp, Artificial
  Probe
ggtctgcattcctttatctgtaatt

SEQ ID NO: 71183 - DNA, 25 bp, Artificial
  Probe
tgcttatcccattagtgtgaatatt

SEQ ID NO: 71184 - DNA, 25 bp, Artificial
  Probe
tggatctctgccttatgttaaataa

SEQ ID NO: 71185 - DNA, 25 bp, Artificial
  Probe
aaatccaagaagttctgataacaag

SEQ ID NO: 71186 - DNA, 25 bp, Artificial
  Probe
tctgacactgaatctgcttatccca

SEQ ID NO: 71187 - DNA, 25 bp, Artificial
  Probe
aaagattgtggatctctgccttatg

SEQ ID NO: 71188 - DNA, 25 bp, Artificial
  Probe
agggtttcagataaaagattgtgga

SEQ ID NO: 71189 - DNA, 25 bp, Artificial
  Probe
gggtttcagataaaagattgtggat

SEQ ID NO: 71190 - DNA, 25 bp, Artificial
  Probe
aggtctgcattcctttatctgtaat

SEQ ID NO: 71191 - DNA, 25 bp, Artificial
  Probe
aaaagtcatttgcctctggatgtat

SEQ ID NO: 71192 - DNA, 25 bp, Artificial
  Probe
tagggtttcagataaaagattgtgg

SEQ ID NO: 71193 - DNA, 25 bp, Artificial
  Probe
tttaataatatcacagagaggatgc

SEQ ID NO: 71194 - DNA, 25 bp, Artificial
  Probe
gtggtacttgttgtagtggtaactg

SEQ ID NO: 71195 - DNA, 25 bp, Artificial
  Probe
agtggtacttgttgtagtggtaact

SEQ ID NO: 71196 - DNA, 25 bp, Artificial
  Probe
tggtacttgttgtagtggtaactgg

SEQ ID NO: 71197 - DNA, 25 bp, Artificial
  Probe
gttctaaagtcttcccagtgtccta

SEQ ID NO: 71198 - DNA, 25 bp, Artificial
  Probe
tacttgttgtagtggtaactgggta

SEQ ID NO: 71199 - DNA, 25 bp, Artificial
  Probe
ttctaaagtcttcccagtgtcctag

SEQ ID NO: 71200 - DNA, 25 bp, Artificial
  Probe
gaagaaacagtaacggacaaccatc

SEQ ID NO: 71201 - DNA, 25 bp, Artificial
  Probe
ctaagtggtacttgttgtagtggta

SEQ ID NO: 71202 - DNA, 25 bp, Artificial
  Probe
aagtggtacttgttgtagtggtaac

SEQ ID NO: 71203 - DNA, 25 bp, Artificial
  Probe
agaagaaacagtaacggacaaccat

SEQ ID NO: 71204 - DNA, 25 bp, Artificial
  Probe
taagtggtacttgttgtagtggtaa

SEQ ID NO: 71205 - DNA, 25 bp, Artificial
  Probe
cttgttgtagtggtaactgggtagt

SEQ ID NO: 71206 - DNA, 25 bp, Artificial
  Probe
acttgttgtagtggtaactgggtag

SEQ ID NO: 71207 - DNA, 25 bp, Artificial
  Probe
ctgctaagtggtacttgttgtagtg

SEQ ID NO: 71208 - DNA, 25 bp, Artificial
  Probe
aagaaacagtaacggacaaccatct

SEQ ID NO: 71209 - DNA, 25 bp, Artificial
  Probe
ttgttgtagtggtaactgggtagtg

SEQ ID NO: 71210 - DNA, 25 bp, Artificial
  Probe
cttctcatctgagctgtggttagtc

SEQ ID NO: 71211 - DNA, 25 bp, Artificial
  Probe
cagttctaaagtcttcccagtgtcc

SEQ ID NO: 71212 - DNA, 25 bp, Artificial
  Probe
cttagcgtaagattgactgacaccg

SEQ ID NO: 71213 - DNA, 25 bp, Artificial
  Probe
agttctaaagtcttcccagtgtcct

SEQ ID NO: 71214 - DNA, 25 bp, Artificial
  Probe
gagaagaaacagtaacggacaacca

SEQ ID NO: 71215 - DNA, 25 bp, Artificial
  Probe
gtacttgttgtagtggtaactgggt

SEQ ID NO: 71216 - DNA, 25 bp, Artificial
  Probe
ttagtccagttggtccagttgtgtt

SEQ ID NO: 71217 - DNA, 25 bp, Artificial
  Probe
tagtggtaactgggtagtgtgacat

SEQ ID NO: 71218 - DNA, 25 bp, Artificial
  Probe
gttgtagtggtaactgggtagtgtg

SEQ ID NO: 71219 - DNA, 25 bp, Artificial
  Probe
cctgctaagtggtacttgttgtagt

SEQ ID NO: 71220 - DNA, 25 bp, Artificial
  Probe
acctgctaagtggtacttgttgtag

SEQ ID NO: 71221 - DNA, 25 bp, Artificial
  Probe
acttctcatctgagctgtggttagt

SEQ ID NO: 71222 - DNA, 25 bp, Artificial
  Probe
cacttctcatctgagctgtggttag

SEQ ID NO: 71223 - DNA, 25 bp, Artificial
  Probe
ttgtagtggtaactgggtagtgtga

SEQ ID NO: 71224 - DNA, 25 bp, Artificial
  Probe
gcagttctaaagtcttcccagtgtc

SEQ ID NO: 71225 - DNA, 25 bp, Artificial
  Probe
gctaagtggtacttgttgtagtggt

SEQ ID NO: 71226 - DNA, 25 bp, Artificial
  Probe
tgctaagtggtacttgttgtagtgg

SEQ ID NO: 71227 - DNA, 25 bp, Artificial
  Probe
tgttgtagtggtaactgggtagtgt

SEQ ID NO: 71228 - DNA, 25 bp, Artificial
  Probe
gcttagcgtaagattgactgacacc

SEQ ID NO: 71229 - DNA, 25 bp, Artificial
  Probe
ggcttagcgtaagattgactgacac

SEQ ID NO: 71230 - DNA, 25 bp, Artificial
  Probe
gtggtaactgggtagtgtgacattc

SEQ ID NO: 71231 - DNA, 25 bp, Artificial
  Probe
ggtacttgttgtagtggtaactggg

SEQ ID NO: 71232 - DNA, 25 bp, Artificial
  Probe
tctaaagtcttcccagtgtcctagc

SEQ ID NO: 71233 - DNA, 25 bp, Artificial
  Probe
ggagaagaaacagtaacggacaacc

SEQ ID NO: 71234 - DNA, 25 bp, Artificial
  Probe
agaaacagtaacggacaaccatctg

SEQ ID NO: 71235 - DNA, 25 bp, Artificial
  Probe
ctaaagtcttcccagtgtcctagca

SEQ ID NO: 71236 - DNA, 25 bp, Artificial
  Probe
agtggtaactgggtagtgtgacatt

SEQ ID NO: 71237 - DNA, 25 bp, Artificial
  Probe
tgtagtggtaactgggtagtgtgac

SEQ ID NO: 71238 - DNA, 25 bp, Artificial
  Probe
tagtccagttggtccagttgtgttg

SEQ ID NO: 71239 - DNA, 25 bp, Artificial
  Probe
ccgagcaatctaaggttgagaataa

SEQ ID NO: 71240 - DNA, 25 bp, Artificial
  Probe
ggaagaaagaggaagataagaaacg

SEQ ID NO: 71241 - DNA, 25 bp, Artificial
  Probe
tgaagtggaagaaagaggaagataa

SEQ ID NO: 71242 - DNA, 25 bp, Artificial
  Probe
agtggaagaaagaggaagataagaa

SEQ ID NO: 71243 - DNA, 25 bp, Artificial
  Probe
aagtggaagaaagaggaagataaga

SEQ ID NO: 71244 - DNA, 25 bp, Artificial
  Probe
atgaagtggaagaaagaggaagata

SEQ ID NO: 71245 - DNA, 25 bp, Artificial
  Probe
gccgagcaatctaaggttgagaata

SEQ ID NO: 71246 - DNA, 25 bp, Artificial
  Probe
gaagtggaagaaagaggaagataag

SEQ ID NO: 71247 - DNA, 25 bp, Artificial
  Probe
atctaaggttgagaataaagggagc

SEQ ID NO: 71248 - DNA, 25 bp, Artificial
  Probe
gcaatctaaggttgagaataaaggg

SEQ ID NO: 71249 - DNA, 25 bp, Artificial
  Probe
ctttcctgggaccaatttagagaat

SEQ ID NO: 71250 - DNA, 25 bp, Artificial
  Probe
tggaagaaagaggaagataagaaac

SEQ ID NO: 71251 - DNA, 25 bp, Artificial
  Probe
gtggaagaaagaggaagataagaaa

SEQ ID NO: 71252 - DNA, 25 bp, Artificial
  Probe
tttcctgggaccaatttagagaatc

SEQ ID NO: 71253 - DNA, 25 bp, Artificial
  Probe
cgagcaatctaaggttgagaataaa

SEQ ID NO: 71254 - DNA, 25 bp, Artificial
  Probe
agcaatctaaggttgagaataaagg

SEQ ID NO: 71255 - DNA, 25 bp, Artificial
  Probe
catgaagtggaagaaagaggaagat

SEQ ID NO: 71256 - DNA, 25 bp, Artificial
  Probe
ttcctgggaccaatttagagaatca

SEQ ID NO: 71257 - DNA, 25 bp, Artificial
  Probe
tctttcctgggaccaatttagagaa

SEQ ID NO: 71258 - DNA, 25 bp, Artificial
  Probe
cacacacaaggagaacattcttctt

SEQ ID NO: 71259 - DNA, 25 bp, Artificial
  Probe
caatctaaggttgagaataaaggga

SEQ ID NO: 71260 - DNA, 25 bp, Artificial
  Probe
aatctaaggttgagaataaagggag

SEQ ID NO: 71261 - DNA, 25 bp, Artificial
  Probe
aatttagagaatcaggctcccaact

SEQ ID NO: 71262 - DNA, 25 bp, Artificial
  Probe
caatttagagaatcaggctcccaac

SEQ ID NO: 71263 - DNA, 25 bp, Artificial
  Probe
gactctttcctgggaccaatttaga

SEQ ID NO: 71264 - DNA, 25 bp, Artificial
  Probe
gagcaatctaaggttgagaataaag

SEQ ID NO: 71265 - DNA, 25 bp, Artificial
  Probe
ctaaggttgagaataaagggagctg

SEQ ID NO: 71266 - DNA, 25 bp, Artificial
  Probe
ttgagaataaagggagctgtttgag

SEQ ID NO: 71267 - DNA, 25 bp, Artificial
  Probe
caccatgaatagtgaggagcagtac

SEQ ID NO: 71268 - DNA, 25 bp, Artificial
  Probe
gttgagaataaagggagctgtttga

SEQ ID NO: 71269 - DNA, 25 bp, Artificial
  Probe
tcctgggaccaatttagagaatcag

SEQ ID NO: 71270 - DNA, 25 bp, Artificial
  Probe
tctaaggttgagaataaagggagct

SEQ ID NO: 71271 - DNA, 25 bp, Artificial
  Probe
agaggaagataagaaacgtagtagc

SEQ ID NO: 71272 - DNA, 25 bp, Artificial
  Probe
aataaagggagctgtttgaggtttc

SEQ ID NO: 71273 - DNA, 25 bp, Artificial
  Probe
gaataaagggagctgtttgaggttt

SEQ ID NO: 71274 - DNA, 25 bp, Artificial
  Probe
taaggttgagaataaagggagctgt

SEQ ID NO: 71275 - DNA, 25 bp, Artificial
  Probe
tcaacttgactgagagacacatcaa

SEQ ID NO: 71276 - DNA, 25 bp, Artificial
  Probe
gaggaagataagaaacgtagtagcg

SEQ ID NO: 71277 - DNA, 25 bp, Artificial
  Probe
gaagaaagaggaagataagaaacgt

SEQ ID NO: 71278 - DNA, 25 bp, Artificial
  Probe
ccaatttagagaatcaggctcccaa

SEQ ID NO: 71279 - DNA, 25 bp, Artificial
  Probe
atttagagaatcaggctcccaactg

SEQ ID NO: 71280 - DNA, 25 bp, Artificial
  Probe
ggttgagaataaagggagctgtttg

SEQ ID NO: 71281 - DNA, 25 bp, Artificial
  Probe
gaaagaggaagataagaaacgtagt

SEQ ID NO: 71282 - DNA, 25 bp, Artificial
  Probe
agaataaagggagctgtttgaggtt

SEQ ID NO: 71283 - DNA, 25 bp, Artificial
  Probe
aggttgagaataaagggagctgttt

SEQ ID NO: 71284 - DNA, 25 bp, Artificial
  Probe
ggagactatatcaccattagaactg

SEQ ID NO: 71285 - DNA, 25 bp, Artificial
  Probe
gtcttggcatgttatccttcgtatc

SEQ ID NO: 71286 - DNA, 25 bp, Artificial
  Probe
tgtcttggcatgttatccttcgtat

SEQ ID NO: 71287 - DNA, 25 bp, Artificial
  Probe
aatgtataatgaagggtgtggtctg

SEQ ID NO: 71288 - DNA, 25 bp, Artificial
  Probe
taagcaaagactccattaaatcacg

SEQ ID NO: 71289 - DNA, 25 bp, Artificial
  Probe
atgtcttggcatgttatccttcgta

SEQ ID NO: 71290 - DNA, 25 bp, Artificial
  Probe
aaatcacaagacacaacacaaacac

SEQ ID NO: 71291 - DNA, 25 bp, Artificial
  Probe
gggagactatatcaccattagaact

SEQ ID NO: 71292 - DNA, 25 bp, Artificial
  Probe
gagactatatcaccattagaactga

SEQ ID NO: 71293 - DNA, 25 bp, Artificial
  Probe
tcttggcatgttatccttcgtatcg

SEQ ID NO: 71294 - DNA, 25 bp, Artificial
  Probe
aaagagacaaccataaagagaaagt

SEQ ID NO: 71295 - DNA, 25 bp, Artificial
  Probe
cgataagcaaagactccattaaatc

SEQ ID NO: 71296 - DNA, 25 bp, Artificial
  Probe
ataaagagaaagttgctggatggga

SEQ ID NO: 71297 - DNA, 25 bp, Artificial
  Probe
aagagacaaccataaagagaaagtt

SEQ ID NO: 71298 - DNA, 25 bp, Artificial
  Probe
taaagagaaagttgctggatgggaa

SEQ ID NO: 71299 - DNA, 25 bp, Artificial
  Probe
cataaagagaaagttgctggatggg

SEQ ID NO: 71300 - DNA, 25 bp, Artificial
  Probe
ataagcaaagactccattaaatcac

SEQ ID NO: 71301 - DNA, 25 bp, Artificial
  Probe
aatcacaagacacaacacaaacacc

SEQ ID NO: 71302 - DNA, 25 bp, Artificial
  Probe
gatttcgacatttccgtttcatcat

SEQ ID NO: 71303 - DNA, 25 bp, Artificial
  Probe
atgtataatgaagggtgtggtctgc

SEQ ID NO: 71304 - DNA, 25 bp, Artificial
  Probe
aaccataaagagaaagttgctggat

SEQ ID NO: 71305 - DNA, 25 bp, Artificial
  Probe
gataagcaaagactccattaaatca

SEQ ID NO: 71306 - DNA, 25 bp, Artificial
  Probe
atttcgacatttccgtttcatcatg

SEQ ID NO: 71307 - DNA, 25 bp, Artificial
  Probe
aaagagaaagttgctggatgggaaa

SEQ ID NO: 71308 - DNA, 25 bp, Artificial
  Probe
tcgataagcaaagactccattaaat

SEQ ID NO: 71309 - DNA, 25 bp, Artificial
  Probe
accataaagagaaagttgctggatg

SEQ ID NO: 71310 - DNA, 25 bp, Artificial
  Probe
aagcaaagactccattaaatcacgt

SEQ ID NO: 71311 - DNA, 25 bp, Artificial
  Probe
gtaaagagacaaccataaagagaaa

SEQ ID NO: 71312 - DNA, 25 bp, Artificial
  Probe
ggtaaagagacaaccataaagagaa

SEQ ID NO: 71313 - DNA, 25 bp, Artificial
  Probe
gtgatttcgacatttccgtttcatc

SEQ ID NO: 71314 - DNA, 25 bp, Artificial
  Probe
atcatgtcttggcatgttatccttc

SEQ ID NO: 71315 - DNA, 25 bp, Artificial
  Probe
taaagagacaaccataaagagaaag

SEQ ID NO: 71316 - DNA, 25 bp, Artificial
  Probe
gaacaacgaaaagaggataactgag

SEQ ID NO: 71317 - DNA, 25 bp, Artificial
  Probe
catcatgtcttggcatgttatcctt

SEQ ID NO: 71318 - DNA, 25 bp, Artificial
  Probe
ttcatcatgtcttggcatgttatcc

SEQ ID NO: 71319 - DNA, 25 bp, Artificial
  Probe
aaaatcacaagacacaacacaaaca

SEQ ID NO: 71320 - DNA, 25 bp, Artificial
  Probe
atcacaagacacaacacaaacacca

SEQ ID NO: 71321 - DNA, 25 bp, Artificial
  Probe
tgtgatttcgacatttccgtttcat

SEQ ID NO: 71322 - DNA, 25 bp, Artificial
  Probe
cgaacaacgaaaagaggataactga

SEQ ID NO: 71323 - DNA, 25 bp, Artificial
  Probe
tcatcatgtcttggcatgttatcct

SEQ ID NO: 71324 - DNA, 25 bp, Artificial
  Probe
aacaacgaaaagaggataactgagc

SEQ ID NO: 71325 - DNA, 25 bp, Artificial
  Probe
catttccgtttcatcatgtcttggc

SEQ ID NO: 71326 - DNA, 25 bp, Artificial
  Probe
cttggcatgttatccttcgtatcga

SEQ ID NO: 71327 - DNA, 25 bp, Artificial
  Probe
tgacaacagaaaatccaagagcatc

SEQ ID NO: 71328 - DNA, 25 bp, Artificial
  Probe
atttccgtttcatcatgtcttggca

SEQ ID NO: 71329 - DNA, 25 bp, Artificial
  Probe
cattgctcttattcgtggacattac

SEQ ID NO: 71330 - DNA, 25 bp, Artificial
  Probe
attgctcttattcgtggacattaca

SEQ ID NO: 71331 - DNA, 25 bp, Artificial
  Probe
ttgctcttattcgtggacattacag

SEQ ID NO: 71332 - DNA, 25 bp, Artificial
  Probe
attgatacacgcattgctcttattc

SEQ ID NO: 71333 - DNA, 25 bp, Artificial
  Probe
cattgatacacgcattgctcttatt

SEQ ID NO: 71334 - DNA, 25 bp, Artificial
  Probe
tcattgatacacgcattgctcttat

SEQ ID NO: 71335 - DNA, 25 bp, Artificial
  Probe
tataacagatacagtgtctacgctg

SEQ ID NO: 71336 - DNA, 25 bp, Artificial
  Probe
atataacagatacagtgtctacgct

SEQ ID NO: 71337 - DNA, 25 bp, Artificial
  Probe
gatataacagatacagtgtctacgc

SEQ ID NO: 71338 - DNA, 25 bp, Artificial
  Probe
gcattgctcttattcgtggacatta

SEQ ID NO: 71339 - DNA, 25 bp, Artificial
  Probe
gtcattgatacacgcattgctctta

SEQ ID NO: 71340 - DNA, 25 bp, Artificial
  Probe
atacatctatacggacacacgagtc

SEQ ID NO: 71341 - DNA, 25 bp, Artificial
  Probe
ttgatacacgcattgctcttattcg

SEQ ID NO: 71342 - DNA, 25 bp, Artificial
  Probe
gtgctgtgtcattccaaataaatct

SEQ ID NO: 71343 - DNA, 25 bp, Artificial
  Probe
agtgctgtgtcattccaaataaatc

SEQ ID NO: 71344 - DNA, 25 bp, Artificial
  Probe
tgctgtgtcattccaaataaatctt

SEQ ID NO: 71345 - DNA, 25 bp, Artificial
  Probe
tcaggatgatataacagatacagtg

SEQ ID NO: 71346 - DNA, 25 bp, Artificial
  Probe
cagtgctgtgtcattccaaataaat

SEQ ID NO: 71347 - DNA, 25 bp, Artificial
  Probe
caggatgatataacagatacagtgt

SEQ ID NO: 71348 - DNA, 25 bp, Artificial
  Probe
tgatataacagatacagtgtctacg

SEQ ID NO: 71349 - DNA, 25 bp, Artificial
  Probe
ggatgatataacagatacagtgtct

SEQ ID NO: 71350 - DNA, 25 bp, Artificial
  Probe
aggatgatataacagatacagtgtc

SEQ ID NO: 71351 - DNA, 25 bp, Artificial
  Probe
gctgtgtcattccaaataaatcttt

SEQ ID NO: 71352 - DNA, 25 bp, Artificial
  Probe
tcagtgctgtgtcattccaaataaa

SEQ ID NO: 71353 - DNA, 25 bp, Artificial
  Probe
ataacagatacagtgtctacgctgc

SEQ ID NO: 71354 - DNA, 25 bp, Artificial
  Probe
gcaactcatcttcacagatcattct

SEQ ID NO: 71355 - DNA, 25 bp, Artificial
  Probe
ctcagtgctgtgtcattccaaataa

SEQ ID NO: 71356 - DNA, 25 bp, Artificial
  Probe
tacatatacatagctgattccttcc

SEQ ID NO: 71357 - DNA, 25 bp, Artificial
  Probe
caactcatcttcacagatcattcta

SEQ ID NO: 71358 - DNA, 25 bp, Artificial
  Probe
ttcaggatgatataacagatacagt

SEQ ID NO: 71359 - DNA, 25 bp, Artificial
  Probe
tctcagtgctgtgtcattccaaata

SEQ ID NO: 71360 - DNA, 25 bp, Artificial
  Probe
atacatagctgattccttccctttc

SEQ ID NO: 71361 - DNA, 25 bp, Artificial
  Probe
ttgtgttctcagtgctgtgtcattc

SEQ ID NO: 71362 - DNA, 25 bp, Artificial
  Probe
acatatacatagctgattccttccc

SEQ ID NO: 71363 - DNA, 25 bp, Artificial
  Probe
catatacatagctgattccttccct

SEQ ID NO: 71364 - DNA, 25 bp, Artificial
  Probe
ctgattccttccctttccactgtag

SEQ ID NO: 71365 - DNA, 25 bp, Artificial
  Probe
ctcttcgccttcgtcattgatacac

SEQ ID NO: 71366 - DNA, 25 bp, Artificial
  Probe
tatgcaactcatcttcacagatcat

SEQ ID NO: 71367 - DNA, 25 bp, Artificial
  Probe
tatacatagctgattccttcccttt

SEQ ID NO: 71368 - DNA, 25 bp, Artificial
  Probe
ttatgcaactcatcttcacagatca

SEQ ID NO: 71369 - DNA, 25 bp, Artificial
  Probe
tgtgtatgcagatggctacatatac

SEQ ID NO: 71370 - DNA, 25 bp, Artificial
  Probe
aactcatcttcacagatcattctaa

SEQ ID NO: 71371 - DNA, 25 bp, Artificial
  Probe
taacagatacagtgtctacgctgct

SEQ ID NO: 71372 - DNA, 25 bp, Artificial
  Probe
atatacatagctgattccttccctt

SEQ ID NO: 71373 - DNA, 25 bp, Artificial
  Probe
atgcaactcatcttcacagatcatt

SEQ ID NO: 71374 - DNA, 25 bp, Artificial
  Probe
gcttcctgtagttctattcaagtgt

SEQ ID NO: 71375 - DNA, 25 bp, Artificial
  Probe
ggcttcctgtagttctattcaagtg

SEQ ID NO: 71376 - DNA, 25 bp, Artificial
  Probe
cttcctgtagttctattcaagtgtt

SEQ ID NO: 71377 - DNA, 25 bp, Artificial
  Probe
gggcttcctgtagttctattcaagt

SEQ ID NO: 71378 - DNA, 25 bp, Artificial
  Probe
gtgctgttagagtccagtgttctag

SEQ ID NO: 71379 - DNA, 25 bp, Artificial
  Probe
agagccagtgtctaaagcctaattt

SEQ ID NO: 71380 - DNA, 25 bp, Artificial
  Probe
aagagccagtgtctaaagcctaatt

SEQ ID NO: 71381 - DNA, 25 bp, Artificial
  Probe
cctatttgggttcctttgaattggg

SEQ ID NO: 71382 - DNA, 25 bp, Artificial
  Probe
gaagagccagtgtctaaagcctaat

SEQ ID NO: 71383 - DNA, 25 bp, Artificial
  Probe
aagggcttcctgtagttctattcaa

SEQ ID NO: 71384 - DNA, 25 bp, Artificial
  Probe
tatttgggttcctttgaattgggag

SEQ ID NO: 71385 - DNA, 25 bp, Artificial
  Probe
ctatttgggttcctttgaattggga

SEQ ID NO: 71386 - DNA, 25 bp, Artificial
  Probe
cacctatttgggttcctttgaattg

SEQ ID NO: 71387 - DNA, 25 bp, Artificial
  Probe
acacctatttgggttcctttgaatt

SEQ ID NO: 71388 - DNA, 25 bp, Artificial
  Probe
aacacctatttgggttcctttgaat

SEQ ID NO: 71389 - DNA, 25 bp, Artificial
  Probe
tagtcgatacttgtgtatgcttatt

SEQ ID NO: 71390 - DNA, 25 bp, Artificial
  Probe
aatagtcgatacttgtgtatgctta

SEQ ID NO: 71391 - DNA, 25 bp, Artificial
  Probe
taatagtcgatacttgtgtatgctt

SEQ ID NO: 71392 - DNA, 25 bp, Artificial
  Probe
aaacacctatttgggttcctttgaa

SEQ ID NO: 71393 - DNA, 25 bp, Artificial
  Probe
agggcttcctgtagttctattcaag

SEQ ID NO: 71394 - DNA, 25 bp, Artificial
  Probe
atagtcgatacttgtgtatgcttat

SEQ ID NO: 71395 - DNA, 25 bp, Artificial
  Probe
ataatagtcgatacttgtgtatgct

SEQ ID NO: 71396 - DNA, 25 bp, Artificial
  Probe
acctatttgggttcctttgaattgg

SEQ ID NO: 71397 - DNA, 25 bp, Artificial
  Probe
caagggcttcctgtagttctattca

SEQ ID NO: 71398 - DNA, 25 bp, Artificial
  Probe
gataatagtcgatacttgtgtatgc

SEQ ID NO: 71399 - DNA, 25 bp, Artificial
  Probe
tgtagataatagtcgatacttgtgt

SEQ ID NO: 71400 - DNA, 25 bp, Artificial
  Probe
ttgtaacctaacagtgaatcaatat

SEQ ID NO: 71401 - DNA, 25 bp, Artificial
  Probe
agaagagccagtgtctaaagcctaa

SEQ ID NO: 71402 - DNA, 25 bp, Artificial
  Probe
tagaagagccagtgtctaaagccta

SEQ ID NO: 71403 - DNA, 25 bp, Artificial
  Probe
ccaagggcttcctgtagttctattc

SEQ ID NO: 71404 - DNA, 25 bp, Artificial
  Probe
ggtgctgttagagtccagtgttcta

SEQ ID NO: 71405 - DNA, 25 bp, Artificial
  Probe
agtcgatacttgtgtatgcttattt

SEQ ID NO: 71406 - DNA, 25 bp, Artificial
  Probe
gccagtgtctaaagcctaattttac

SEQ ID NO: 71407 - DNA, 25 bp, Artificial
  Probe
agccagtgtctaaagcctaatttta

SEQ ID NO: 71408 - DNA, 25 bp, Artificial
  Probe
gagccagtgtctaaagcctaatttt

SEQ ID NO: 71409 - DNA, 25 bp, Artificial
  Probe
tgtaacctaacagtgaatcaatatt

SEQ ID NO: 71410 - DNA, 25 bp, Artificial
  Probe
ccagtgtctaaagcctaattttact

SEQ ID NO: 71411 - DNA, 25 bp, Artificial
  Probe
tgctgttagagtccagtgttctaga

SEQ ID NO: 71412 - DNA, 25 bp, Artificial
  Probe
ttgtagataatagtcgatacttgtg

SEQ ID NO: 71413 - DNA, 25 bp, Artificial
  Probe
tttgtaacctaacagtgaatcaata

SEQ ID NO: 71414 - DNA, 25 bp, Artificial
  Probe
gatagcttagtgtttcgttttcctg

SEQ ID NO: 71415 - DNA, 25 bp, Artificial
  Probe
agatagcttagtgtttcgttttcct

SEQ ID NO: 71416 - DNA, 25 bp, Artificial
  Probe
tttgaaagttttgttgaagtagtct

SEQ ID NO: 71417 - DNA, 25 bp, Artificial
  Probe
atagcttagtgtttcgttttcctgt

SEQ ID NO: 71418 - DNA, 25 bp, Artificial
  Probe
ccaagatagcttagtgtttcgtttt

SEQ ID NO: 71419 - DNA, 25 bp, Artificial
  Probe
gaatagacaacctcaatgctgaact

SEQ ID NO: 71420 - DNA, 25 bp, Artificial
  Probe
aatagacaacctcaatgctgaactg

SEQ ID NO: 71421 - DNA, 25 bp, Artificial
  Probe
gtagagagaggagaggtggtaatca

SEQ ID NO: 71422 - DNA, 25 bp, Artificial
  Probe
ggaatagacaacctcaatgctgaac

SEQ ID NO: 71423 - DNA, 25 bp, Artificial
  Probe
tagacaacctcaatgctgaactgta

SEQ ID NO: 71424 - DNA, 25 bp, Artificial
  Probe
ggtagagagaggagaggtggtaatc

SEQ ID NO: 71425 - DNA, 25 bp, Artificial
  Probe
gagaggtggtaatcacagtaacact

SEQ ID NO: 71426 - DNA, 25 bp, Artificial
  Probe
atagacaacctcaatgctgaactgt

SEQ ID NO: 71427 - DNA, 25 bp, Artificial
  Probe
tagagagaggagaggtggtaatcac

SEQ ID NO: 71428 - DNA, 25 bp, Artificial
  Probe
gaggagaggtggtaatcacagtaac

SEQ ID NO: 71429 - DNA, 25 bp, Artificial
  Probe
agaggagaggtggtaatcacagtaa

SEQ ID NO: 71430 - DNA, 25 bp, Artificial
  Probe
tggtagagagaggagaggtggtaat

SEQ ID NO: 71431 - DNA, 25 bp, Artificial
  Probe
ctcaatgctgaactgtactggagaa

SEQ ID NO: 71432 - DNA, 25 bp, Artificial
  Probe
ggagaggtggtaatcacagtaacac

SEQ ID NO: 71433 - DNA, 25 bp, Artificial
  Probe
gagaggagaggtggtaatcacagta

SEQ ID NO: 71434 - DNA, 25 bp, Artificial
  Probe
aggagaggtggtaatcacagtaaca

SEQ ID NO: 71435 - DNA, 25 bp, Artificial
  Probe
gacaacctcaatgctgaactgtact

SEQ ID NO: 71436 - DNA, 25 bp, Artificial
  Probe
agacaacctcaatgctgaactgtac

SEQ ID NO: 71437 - DNA, 25 bp, Artificial
  Probe
tttattgccgactgggaatagacaa

SEQ ID NO: 71438 - DNA, 25 bp, Artificial
  Probe
acaacctcaatgctgaactgtactg

SEQ ID NO: 71439 - DNA, 25 bp, Artificial
  Probe
gagagaggagaggtggtaatcacag

SEQ ID NO: 71440 - DNA, 25 bp, Artificial
  Probe
tcaatgctgaactgtactggagaaa

SEQ ID NO: 71441 - DNA, 25 bp, Artificial
  Probe
gggaatagacaacctcaatgctgaa

SEQ ID NO: 71442 - DNA, 25 bp, Artificial
  Probe
ttattgccgactgggaatagacaac

SEQ ID NO: 71443 - DNA, 25 bp, Artificial
  Probe
cgactgggaatagacaacctcaatg

SEQ ID NO: 71444 - DNA, 25 bp, Artificial
  Probe
agagagaggagaggtggtaatcaca

SEQ ID NO: 71445 - DNA, 25 bp, Artificial
  Probe
aacctcaatgctgaactgtactgga

SEQ ID NO: 71446 - DNA, 25 bp, Artificial
  Probe
caacctcaatgctgaactgtactgg

SEQ ID NO: 71447 - DNA, 25 bp, Artificial
  Probe
ctgggaatagacaacctcaatgctg

SEQ ID NO: 71448 - DNA, 25 bp, Artificial
  Probe
gactgggaatagacaacctcaatgc

SEQ ID NO: 71449 - DNA, 25 bp, Artificial
  Probe
agagaggagaggtggtaatcacagt

SEQ ID NO: 71450 - DNA, 25 bp, Artificial
  Probe
cctcaatgctgaactgtactggaga

SEQ ID NO: 71451 - DNA, 25 bp, Artificial
  Probe
actgggaatagacaacctcaatgct

SEQ ID NO: 71452 - DNA, 25 bp, Artificial
  Probe
acctcaatgctgaactgtactggag

SEQ ID NO: 71453 - DNA, 25 bp, Artificial
  Probe
aatgctgaactgtactggagaaaag

SEQ ID NO: 71454 - DNA, 25 bp, Artificial
  Probe
caatgctgaactgtactggagaaaa

SEQ ID NO: 71455 - DNA, 25 bp, Artificial
  Probe
gttttattgccgactgggaatagac

SEQ ID NO: 71456 - DNA, 25 bp, Artificial
  Probe
tgggaatagacaacctcaatgctga

SEQ ID NO: 71457 - DNA, 25 bp, Artificial
  Probe
ccgactgggaatagacaacctcaat

SEQ ID NO: 71458 - DNA, 25 bp, Artificial
  Probe
ttttattgccgactgggaatagaca

SEQ ID NO: 71459 - DNA, 25 bp, Artificial
  Probe
agaggtggtaatcacagtaacactg

SEQ ID NO: 71460 - DNA, 25 bp, Artificial
  Probe
ggttttattgccgactgggaataga

SEQ ID NO: 71461 - DNA, 25 bp, Artificial
  Probe
aggttttattgccgactgggaatag

SEQ ID NO: 71462 - DNA, 25 bp, Artificial
  Probe
tattgccgactgggaatagacaacc

SEQ ID NO: 71463 - DNA, 25 bp, Artificial
  Probe
atgctgaactgtactggagaaaagg

SEQ ID NO: 71464 - DNA, 25 bp, Artificial
  Probe
gctgtgaagttgttgttatgcttaa

SEQ ID NO: 71465 - DNA, 25 bp, Artificial
  Probe
tgctgtgaagttgttgttatgctta

SEQ ID NO: 71466 - DNA, 25 bp, Artificial
  Probe
agttgttgttatgcttaatagtgga

SEQ ID NO: 71467 - DNA, 25 bp, Artificial
  Probe
ctgtgaagttgttgttatgcttaat

SEQ ID NO: 71468 - DNA, 25 bp, Artificial
  Probe
ttgctgtgaagttgttgttatgctt

SEQ ID NO: 71469 - DNA, 25 bp, Artificial
  Probe
gttgttgttatgcttaatagtggat

SEQ ID NO: 71470 - DNA, 25 bp, Artificial
  Probe
aagttgttgttatgcttaatagtgg

SEQ ID NO: 71471 - DNA, 25 bp, Artificial
  Probe
gaaattgtaaccctgagccattaaa

SEQ ID NO: 71472 - DNA, 25 bp, Artificial
  Probe
ctctgggctctacataggaatacat

SEQ ID NO: 71473 - DNA, 25 bp, Artificial
  Probe
tgtgaagttgttgttatgcttaata

SEQ ID NO: 71474 - DNA, 25 bp, Artificial
  Probe
aatttgctgtgaagttgttgttatg

SEQ ID NO: 71475 - DNA, 25 bp, Artificial
  Probe
aaattgtaaccctgagccattaaat

SEQ ID NO: 71476 - DNA, 25 bp, Artificial
  Probe
ttgttgttatgcttaatagtggatt

SEQ ID NO: 71477 - DNA, 25 bp, Artificial
  Probe
atttgctgtgaagttgttgttatgc

SEQ ID NO: 71478 - DNA, 25 bp, Artificial
  Probe
ttctctgggctctacataggaatac

SEQ ID NO: 71479 - DNA, 25 bp, Artificial
  Probe
gttctctgggctctacataggaata

SEQ ID NO: 71480 - DNA, 25 bp, Artificial
  Probe
ggaaattgtaaccctgagccattaa

SEQ ID NO: 71481 - DNA, 25 bp, Artificial
  Probe
tttaatttgctgtgaagttgttgtt

SEQ ID NO: 71482 - DNA, 25 bp, Artificial
  Probe
tgaagttgttgttatgcttaatagt

SEQ ID NO: 71483 - DNA, 25 bp, Artificial
  Probe
aattgtaaccctgagccattaaatg

SEQ ID NO: 71484 - DNA, 25 bp, Artificial
  Probe
attgtaaccctgagccattaaatgt

SEQ ID NO: 71485 - DNA, 25 bp, Artificial
  Probe
tctctgggctctacataggaataca

SEQ ID NO: 71486 - DNA, 25 bp, Artificial
  Probe
gaagttgttgttatgcttaatagtg

SEQ ID NO: 71487 - DNA, 25 bp, Artificial
  Probe
gtgaagttgttgttatgcttaatag

SEQ ID NO: 71488 - DNA, 25 bp, Artificial
  Probe
ttgtaaccctgagccattaaatgtc

SEQ ID NO: 71489 - DNA, 25 bp, Artificial
  Probe
ttaatttgctgtgaagttgttgtta

SEQ ID NO: 71490 - DNA, 25 bp, Artificial
  Probe
gagccattaaatgtcagttaaatcg

SEQ ID NO: 71491 - DNA, 25 bp, Artificial
  Probe
tttgctgtgaagttgttgttatgct

SEQ ID NO: 71492 - DNA, 25 bp, Artificial
  Probe
taatttgctgtgaagttgttgttat

SEQ ID NO: 71493 - DNA, 25 bp, Artificial
  Probe
gaacttagtcatcattccttgcagc

SEQ ID NO: 71494 - DNA, 25 bp, Artificial
  Probe
tgagccattaaatgtcagttaaatc

SEQ ID NO: 71495 - DNA, 25 bp, Artificial
  Probe
tgtaaccctgagccattaaatgtca

SEQ ID NO: 71496 - DNA, 25 bp, Artificial
  Probe
agccattaaatgtcagttaaatcga

SEQ ID NO: 71497 - DNA, 25 bp, Artificial
  Probe
cttagtcatcattccttgcagcctt

SEQ ID NO: 71498 - DNA, 25 bp, Artificial
  Probe
tgttctctgggctctacataggaat

SEQ ID NO: 71499 - DNA, 25 bp, Artificial
  Probe
gccattaaatgtcagttaaatcgaa

SEQ ID NO: 71500 - DNA, 25 bp, Artificial
  Probe
ttaacttaacagcctgcactgatgt

SEQ ID NO: 71501 - DNA, 25 bp, Artificial
  Probe
cgagtgctgctactgaactagattt

SEQ ID NO: 71502 - DNA, 25 bp, Artificial
  Probe
ttagtcatcattccttgcagccttg

SEQ ID NO: 71503 - DNA, 25 bp, Artificial
  Probe
aacttagtcatcattccttgcagcc

SEQ ID NO: 71504 - DNA, 25 bp, Artificial
  Probe
ttgttctctgggctctacataggaa

SEQ ID NO: 71505 - DNA, 25 bp, Artificial
  Probe
tcgagtgctgctactgaactagatt

SEQ ID NO: 71506 - DNA, 25 bp, Artificial
  Probe
ttcgagtgctgctactgaactagat

SEQ ID NO: 71507 - DNA, 25 bp, Artificial
  Probe
tggaaattgtaaccctgagccatta

SEQ ID NO: 71508 - DNA, 25 bp, Artificial
  Probe
gtctccctttctccctagtgtagag

SEQ ID NO: 71509 - DNA, 25 bp, Artificial
  Probe
ctctcctgctatgtgcttattctaa

SEQ ID NO: 71510 - DNA, 25 bp, Artificial
  Probe
ctgcctatcgttactacattgatga

SEQ ID NO: 71511 - DNA, 25 bp, Artificial
  Probe
tgcctatcgttactacattgatgac

SEQ ID NO: 71512 - DNA, 25 bp, Artificial
  Probe
ccactccttagttgtcacattagaa

SEQ ID NO: 71513 - DNA, 25 bp, Artificial
  Probe
gctgcctatcgttactacattgatg

SEQ ID NO: 71514 - DNA, 25 bp, Artificial
  Probe
gtccactccttagttgtcacattag

SEQ ID NO: 71515 - DNA, 25 bp, Artificial
  Probe
tccactccttagttgtcacattaga

SEQ ID NO: 71516 - DNA, 25 bp, Artificial
  Probe
tgctgcctatcgttactacattgat

SEQ ID NO: 71517 - DNA, 25 bp, Artificial
  Probe
gctctcctgctatgtgcttattcta

SEQ ID NO: 71518 - DNA, 25 bp, Artificial
  Probe
cactccttagttgtcacattagaat

SEQ ID NO: 71519 - DNA, 25 bp, Artificial
  Probe
ctctgctgcctatcgttactacatt

SEQ ID NO: 71520 - DNA, 25 bp, Artificial
  Probe
tgtccactccttagttgtcacatta

SEQ ID NO: 71521 - DNA, 25 bp, Artificial
  Probe
ctgctgcctatcgttactacattga

SEQ ID NO: 71522 - DNA, 25 bp, Artificial
  Probe
tctgctgcctatcgttactacattg

SEQ ID NO: 71523 - DNA, 25 bp, Artificial
  Probe
actccttagttgtcacattagaatt

SEQ ID NO: 71524 - DNA, 25 bp, Artificial
  Probe
gagttgtcactgacttactgtctaa

SEQ ID NO: 71525 - DNA, 25 bp, Artificial
  Probe
ctgctatgtgcttattctaaatgcc

SEQ ID NO: 71526 - DNA, 25 bp, Artificial
  Probe
cctgctatgtgcttattctaaatgc

SEQ ID NO: 71527 - DNA, 25 bp, Artificial
  Probe
tctcctgctatgtgcttattctaaa

SEQ ID NO: 71528 - DNA, 25 bp, Artificial
  Probe
tgctatgtgcttattctaaatgcca

SEQ ID NO: 71529 - DNA, 25 bp, Artificial
  Probe
ttgctctcctgctatgtgcttattc

SEQ ID NO: 71530 - DNA, 25 bp, Artificial
  Probe
tcctgctatgtgcttattctaaatg

SEQ ID NO: 71531 - DNA, 25 bp, Artificial
  Probe
ctgtccactccttagttgtcacatt

SEQ ID NO: 71532 - DNA, 25 bp, Artificial
  Probe
ctcctgctatgtgcttattctaaat

SEQ ID NO: 71533 - DNA, 25 bp, Artificial
  Probe
ggagttgtcactgacttactgtcta

SEQ ID NO: 71534 - DNA, 25 bp, Artificial
  Probe
tcgtgtaaattgtttatacccagga

SEQ ID NO: 71535 - DNA, 25 bp, Artificial
  Probe
ttcgtgtaaattgtttatacccagg

SEQ ID NO: 71536 - DNA, 25 bp, Artificial
  Probe
ccttagttgtcacattagaatttgg

SEQ ID NO: 71537 - DNA, 25 bp, Artificial
  Probe
ataactgtgttgtccacgagacttc

SEQ ID NO: 71538 - DNA, 25 bp, Artificial
  Probe
cttcataactgtgttgtccacgaga

SEQ ID NO: 71539 - DNA, 25 bp, Artificial
  Probe
tgctctcctgctatgtgcttattct

SEQ ID NO: 71540 - DNA, 25 bp, Artificial
  Probe
gcacttgactgagtttacaaaggaa

SEQ ID NO: 71541 - DNA, 25 bp, Artificial
  Probe
tatgtgcttattctaaatgccactg

SEQ ID NO: 71542 - DNA, 25 bp, Artificial
  Probe
gctatgtgcttattctaaatgccac

SEQ ID NO: 71543 - DNA, 25 bp, Artificial
  Probe
tagttgtcacattagaatttggttg

SEQ ID NO: 71544 - DNA, 25 bp, Artificial
  Probe
ctatgtgcttattctaaatgccact

SEQ ID NO: 71545 - DNA, 25 bp, Artificial
  Probe
cctctgctgcctatcgttactacat

SEQ ID NO: 71546 - DNA, 25 bp, Artificial
  Probe
cataactgtgttgtccacgagactt

SEQ ID NO: 71547 - DNA, 25 bp, Artificial
  Probe
ttcataactgtgttgtccacgagac

SEQ ID NO: 71548 - DNA, 25 bp, Artificial
  Probe
tttgctctcctgctatgtgcttatt

SEQ ID NO: 71549 - DNA, 25 bp, Artificial
  Probe
actgtccactccttagttgtcacat

SEQ ID NO: 71550 - DNA, 25 bp, Artificial
  Probe
gcctatcgttactacattgatgacg

SEQ ID NO: 71551 - DNA, 25 bp, Artificial
  Probe
cttagttgtcacattagaatttggt

SEQ ID NO: 71552 - DNA, 25 bp, Artificial
  Probe
attcgtgtaaattgtttatacccag

SEQ ID NO: 71553 - DNA, 25 bp, Artificial
  Probe
gttgaaattagtgcggctatggtac

SEQ ID NO: 71554 - DNA, 25 bp, Artificial
  Probe
aatgttctcagataccactggatac

SEQ ID NO: 71555 - DNA, 25 bp, Artificial
  Probe
atgttctcagataccactggatact

SEQ ID NO: 71556 - DNA, 25 bp, Artificial
  Probe
tgttctcagataccactggatactt

SEQ ID NO: 71557 - DNA, 25 bp, Artificial
  Probe
aggaggtattacattgataagtcac

SEQ ID NO: 71558 - DNA, 25 bp, Artificial
  Probe
caggaggtattacattgataagtca

SEQ ID NO: 71559 - DNA, 25 bp, Artificial
  Probe
ggcatagattcaaccttgacaagtt

SEQ ID NO: 71560 - DNA, 25 bp, Artificial
  Probe
tcaggaggtattacattgataagtc

SEQ ID NO: 71561 - DNA, 25 bp, Artificial
  Probe
ggaggtattacattgataagtcacc

SEQ ID NO: 71562 - DNA, 25 bp, Artificial
  Probe
ataattcagagggtttaggtgttgc

SEQ ID NO: 71563 - DNA, 25 bp, Artificial
  Probe
gcaacctctataaatgttctcagat

SEQ ID NO: 71564 - DNA, 25 bp, Artificial
  Probe
gtattacattgataagtcacccgtg

SEQ ID NO: 71565 - DNA, 25 bp, Artificial
  Probe
caggcatagattcaaccttgacaag

SEQ ID NO: 71566 - DNA, 25 bp, Artificial
  Probe
tataattcagagggtttaggtgttg

SEQ ID NO: 71567 - DNA, 25 bp, Artificial
  Probe
tattacattgataagtcacccgtgc

SEQ ID NO: 71568 - DNA, 25 bp, Artificial
  Probe
aggcatagattcaaccttgacaagt

SEQ ID NO: 71569 - DNA, 25 bp, Artificial
  Probe
gttctcagataccactggatacttt

SEQ ID NO: 71570 - DNA, 25 bp, Artificial
  Probe
gcatagattcaaccttgacaagttt

SEQ ID NO: 71571 - DNA, 25 bp, Artificial
  Probe
aaatgttctcagataccactggata

SEQ ID NO: 71572 - DNA, 25 bp, Artificial
  Probe
taaatgttctcagataccactggat

SEQ ID NO: 71573 - DNA, 25 bp, Artificial
  Probe
ataaatgttctcagataccactgga

SEQ ID NO: 71574 - DNA, 25 bp, Artificial
  Probe
ttagtgctgtgtgaagttgcttgtt

SEQ ID NO: 71575 - DNA, 25 bp, Artificial
  Probe
tatagaggatttggttcagtaagac

SEQ ID NO: 71576 - DNA, 25 bp, Artificial
  Probe
atcatgcttagtgctgtgtgaagtt

SEQ ID NO: 71577 - DNA, 25 bp, Artificial
  Probe
atagaggatttggttcagtaagacc

SEQ ID NO: 71578 - DNA, 25 bp, Artificial
  Probe
aggtattacattgataagtcacccg

SEQ ID NO: 71579 - DNA, 25 bp, Artificial
  Probe
ggtattacattgataagtcacccgt

SEQ ID NO: 71580 - DNA, 25 bp, Artificial
  Probe
cagtaagacccagattctgtatgtt

SEQ ID NO: 71581 - DNA, 25 bp, Artificial
  Probe
ttcagtaagacccagattctgtatg

SEQ ID NO: 71582 - DNA, 25 bp, Artificial
  Probe
gttcagtaagacccagattctgtat

SEQ ID NO: 71583 - DNA, 25 bp, Artificial
  Probe
atttggttcagtaagacccagattc

SEQ ID NO: 71584 - DNA, 25 bp, Artificial
  Probe
gatttggttcagtaagacccagatt

SEQ ID NO: 71585 - DNA, 25 bp, Artificial
  Probe
tctcagataccactggatactttaa

SEQ ID NO: 71586 - DNA, 25 bp, Artificial
  Probe
ttctcagataccactggatacttta

SEQ ID NO: 71587 - DNA, 25 bp, Artificial
  Probe
agtaagacccagattctgtatgttt

SEQ ID NO: 71588 - DNA, 25 bp, Artificial
  Probe
tcagtaagacccagattctgtatgt

SEQ ID NO: 71589 - DNA, 25 bp, Artificial
  Probe
ccaggcatagattcaaccttgacaa

SEQ ID NO: 71590 - DNA, 25 bp, Artificial
  Probe
cctctataaatgttctcagatacca

SEQ ID NO: 71591 - DNA, 25 bp, Artificial
  Probe
acctctataaatgttctcagatacc

SEQ ID NO: 71592 - DNA, 25 bp, Artificial
  Probe
cttagtgctgtgtgaagttgcttgt

SEQ ID NO: 71593 - DNA, 25 bp, Artificial
  Probe
gaggtattacattgataagtcaccc

SEQ ID NO: 71594 - DNA, 25 bp, Artificial
  Probe
tgcaacctctataaatgttctcaga

SEQ ID NO: 71595 - DNA, 25 bp, Artificial
  Probe
tagaggatttggttcagtaagaccc

SEQ ID NO: 71596 - DNA, 25 bp, Artificial
  Probe
tttggttcagtaagacccagattct

SEQ ID NO: 71597 - DNA, 25 bp, Artificial
  Probe
tataaatgttctcagataccactgg

SEQ ID NO: 71598 - DNA, 25 bp, Artificial
  Probe
ttatagaggatttggttcagtaaga

SEQ ID NO: 71599 - DNA, 25 bp, Artificial
  Probe
ggaggtgaaggtagtagaatcagac

SEQ ID NO: 71600 - DNA, 25 bp, Artificial
  Probe
taagacgaacagaaacttcagaatg

SEQ ID NO: 71601 - DNA, 25 bp, Artificial
  Probe
cataagacgaacagaaacttcagaa

SEQ ID NO: 71602 - DNA, 25 bp, Artificial
  Probe
ccataagacgaacagaaacttcaga

SEQ ID NO: 71603 - DNA, 25 bp, Artificial
  Probe
gaggtgaaggtagtagaatcagacc

SEQ ID NO: 71604 - DNA, 25 bp, Artificial
  Probe
ataagacgaacagaaacttcagaat

SEQ ID NO: 71605 - DNA, 25 bp, Artificial
  Probe
agaaacttcagaatgctgctttatg

SEQ ID NO: 71606 - DNA, 25 bp, Artificial
  Probe
cagaaacttcagaatgctgctttat

SEQ ID NO: 71607 - DNA, 25 bp, Artificial
  Probe
aagacgaacagaaacttcagaatgc

SEQ ID NO: 71608 - DNA, 25 bp, Artificial
  Probe
gccataagacgaacagaaacttcag

SEQ ID NO: 71609 - DNA, 25 bp, Artificial
  Probe
acagaaacttcagaatgctgcttta

SEQ ID NO: 71610 - DNA, 25 bp, Artificial
  Probe
gaaacttcagaatgctgctttatgc

SEQ ID NO: 71611 - DNA, 25 bp, Artificial
  Probe
gtgccataagacgaacagaaacttc

SEQ ID NO: 71612 - DNA, 25 bp, Artificial
  Probe
aacagaaacttcagaatgctgcttt

SEQ ID NO: 71613 - DNA, 25 bp, Artificial
  Probe
tagtagaatcagacctgcaattgag

SEQ ID NO: 71614 - DNA, 25 bp, Artificial
  Probe
gtagtagaatcagacctgcaattga

SEQ ID NO: 71615 - DNA, 25 bp, Artificial
  Probe
agacgaacagaaacttcagaatgct

SEQ ID NO: 71616 - DNA, 25 bp, Artificial
  Probe
tgccataagacgaacagaaacttca

SEQ ID NO: 71617 - DNA, 25 bp, Artificial
  Probe
gggaggtgaaggtagtagaatcaga

SEQ ID NO: 71618 - DNA, 25 bp, Artificial
  Probe
agggaggtgaaggtagtagaatcag

SEQ ID NO: 71619 - DNA, 25 bp, Artificial
  Probe
gagggaggtgaaggtagtagaatca

SEQ ID NO: 71620 - DNA, 25 bp, Artificial
  Probe
gaacagaaacttcagaatgctgctt

SEQ ID NO: 71621 - DNA, 25 bp, Artificial
  Probe
ttcagaatgctgctttatgcctttc

SEQ ID NO: 71622 - DNA, 25 bp, Artificial
  Probe
cttcagaatgctgctttatgccttt

SEQ ID NO: 71623 - DNA, 25 bp, Artificial
  Probe
ggagggaggtgaaggtagtagaatc

SEQ ID NO: 71624 - DNA, 25 bp, Artificial
  Probe
agtagaatcagacctgcaattgagt

SEQ ID NO: 71625 - DNA, 25 bp, Artificial
  Probe
aaacttcagaatgctgctttatgcc

SEQ ID NO: 71626 - DNA, 25 bp, Artificial
  Probe
gacgaacagaaacttcagaatgctg

SEQ ID NO: 71627 - DNA, 25 bp, Artificial
  Probe
gtagaatcagacctgcaattgagtc

SEQ ID NO: 71628 - DNA, 25 bp, Artificial
  Probe
ggtagtagaatcagacctgcaattg

SEQ ID NO: 71629 - DNA, 25 bp, Artificial
  Probe
cagaatgctgctttatgcctttcag

SEQ ID NO: 71630 - DNA, 25 bp, Artificial
  Probe
ggtgccataagacgaacagaaactt

SEQ ID NO: 71631 - DNA, 25 bp, Artificial
  Probe
tcagaatgctgctttatgcctttca

SEQ ID NO: 71632 - DNA, 25 bp, Artificial
  Probe
acttcagaatgctgctttatgcctt

SEQ ID NO: 71633 - DNA, 25 bp, Artificial
  Probe
aacttcagaatgctgctttatgcct

SEQ ID NO: 71634 - DNA, 25 bp, Artificial
  Probe
tagaatcagacctgcaattgagtcg

SEQ ID NO: 71635 - DNA, 25 bp, Artificial
  Probe
agaatgctgctttatgcctttcagg

SEQ ID NO: 71636 - DNA, 25 bp, Artificial
  Probe
cgaacagaaacttcagaatgctgct

SEQ ID NO: 71637 - DNA, 25 bp, Artificial
  Probe
cggagggaggtgaaggtagtagaat

SEQ ID NO: 71638 - DNA, 25 bp, Artificial
  Probe
cagcctactactcttgagagccaga

SEQ ID NO: 71639 - DNA, 25 bp, Artificial
  Probe
ggtgaaggtagtagaatcagacctg

SEQ ID NO: 71640 - DNA, 25 bp, Artificial
  Probe
aggtgaaggtagtagaatcagacct

SEQ ID NO: 71641 - DNA, 25 bp, Artificial
  Probe
aggtagtagaatcagacctgcaatt

SEQ ID NO: 71642 - DNA, 25 bp, Artificial
  Probe
aaggtagtagaatcagacctgcaat

SEQ ID NO: 71643 - DNA, 25 bp, Artificial
  Probe
acgaacagaaacttcagaatgctgc

SEQ ID NO: 71644 - DNA, 25 bp, Artificial
  Probe
agatgtatacgtgcaagtgaatgag

SEQ ID NO: 71645 - DNA, 25 bp, Artificial
  Probe
gagatgtatacgtgcaagtgaatga

SEQ ID NO: 71646 - DNA, 25 bp, Artificial
  Probe
agagatgtatacgtgcaagtgaatg

SEQ ID NO: 71647 - DNA, 25 bp, Artificial
  Probe
cagagatgtatacgtgcaagtgaat

SEQ ID NO: 71648 - DNA, 25 bp, Artificial
  Probe
gatgtatacgtgcaagtgaatgagg

SEQ ID NO: 71649 - DNA, 25 bp, Artificial
  Probe
gcctcgtcatagcaatatttaacag

SEQ ID NO: 71650 - DNA, 25 bp, Artificial
  Probe
cctcgtcatagcaatatttaacagt

SEQ ID NO: 71651 - DNA, 25 bp, Artificial
  Probe
atgtatacgtgcaagtgaatgaggt

SEQ ID NO: 71652 - DNA, 25 bp, Artificial
  Probe
acagagatgtatacgtgcaagtgaa

SEQ ID NO: 71653 - DNA, 25 bp, Artificial
  Probe
tgtatacgtgcaagtgaatgaggtc

SEQ ID NO: 71654 - DNA, 25 bp, Artificial
  Probe
gtatacgtgcaagtgaatgaggtca

SEQ ID NO: 71655 - DNA, 25 bp, Artificial
  Probe
ctcgtcatagcaatatttaacagtt

SEQ ID NO: 71656 - DNA, 25 bp, Artificial
  Probe
cacagagatgtatacgtgcaagtga

SEQ ID NO: 71657 - DNA, 25 bp, Artificial
  Probe
aatgaggtcacaggtcagatcacag

SEQ ID NO: 71658 - DNA, 25 bp, Artificial
  Probe
gaatgaggtcacaggtcagatcaca

SEQ ID NO: 71659 - DNA, 25 bp, Artificial
  Probe
tgaatgaggtcacaggtcagatcac

SEQ ID NO: 71660 - DNA, 25 bp, Artificial
  Probe
tcgtcatagcaatatttaacagttt

SEQ ID NO: 71661 - DNA, 25 bp, Artificial
  Probe
ggcctcgtcatagcaatatttaaca

SEQ ID NO: 71662 - DNA, 25 bp, Artificial
  Probe
gggcctcgtcatagcaatatttaac

SEQ ID NO: 71663 - DNA, 25 bp, Artificial
  Probe
ggaacaaagttttctacagcaggag

SEQ ID NO: 71664 - DNA, 25 bp, Artificial
  Probe
ggatactcacagggaaccacagaag

SEQ ID NO: 71665 - DNA, 25 bp, Artificial
  Probe
atggctggaacaaagttttctacag

SEQ ID NO: 71666 - DNA, 25 bp, Artificial
  Probe
gaacaaagttttctacagcaggagc

SEQ ID NO: 71667 - DNA, 25 bp, Artificial
  Probe
tggaacaaagttttctacagcagga

SEQ ID NO: 71668 - DNA, 25 bp, Artificial
  Probe
catggctggaacaaagttttctaca

SEQ ID NO: 71669 - DNA, 25 bp, Artificial
  Probe
ctggaacaaagttttctacagcagg

SEQ ID NO: 71670 - DNA, 25 bp, Artificial
  Probe
cgtcatagcaatatttaacagttta

SEQ ID NO: 71671 - DNA, 25 bp, Artificial
  Probe
cgggcctcgtcatagcaatatttaa

SEQ ID NO: 71672 - DNA, 25 bp, Artificial
  Probe
ctacgtcaagtgtaacacatgcagc

SEQ ID NO: 71673 - DNA, 25 bp, Artificial
  Probe
gctacgtcaagtgtaacacatgcag

SEQ ID NO: 71674 - DNA, 25 bp, Artificial
  Probe
ctgctacgtcaagtgtaacacatgc

SEQ ID NO: 71675 - DNA, 25 bp, Artificial
  Probe
gctgctacgtcaagtgtaacacatg

SEQ ID NO: 71676 - DNA, 25 bp, Artificial
  Probe
gatactcacagggaaccacagaagc

SEQ ID NO: 71677 - DNA, 25 bp, Artificial
  Probe
cactgtccttgtcttttctgctgag

SEQ ID NO: 71678 - DNA, 25 bp, Artificial
  Probe
tatacgtgcaagtgaatgaggtcac

SEQ ID NO: 71679 - DNA, 25 bp, Artificial
  Probe
aagtgaatgaggtcacaggtcagat

SEQ ID NO: 71680 - DNA, 25 bp, Artificial
  Probe
tgctgctacgtcaagtgtaacacat

SEQ ID NO: 71681 - DNA, 25 bp, Artificial
  Probe
tcgggcctcgtcatagcaatattta

SEQ ID NO: 71682 - DNA, 25 bp, Artificial
  Probe
agtgaatgaggtcacaggtcagatc

SEQ ID NO: 71683 - DNA, 25 bp, Artificial
  Probe
tggatactcacagggaaccacagaa

SEQ ID NO: 71684 - DNA, 25 bp, Artificial
  Probe
gtgaatgaggtcacaggtcagatca

SEQ ID NO: 71685 - DNA, 25 bp, Artificial
  Probe
agaagcactgtccttgtcttttctg

SEQ ID NO: 71686 - DNA, 25 bp, Artificial
  Probe
cagaagcactgtccttgtcttttct

SEQ ID NO: 71687 - DNA, 25 bp, Artificial
  Probe
caagtgaatgaggtcacaggtcaga

SEQ ID NO: 71688 - DNA, 25 bp, Artificial
  Probe
aacaaagttttctacagcaggagct

SEQ ID NO: 71689 - DNA, 25 bp, Artificial
  Probe
gaagtatatcacagactggcagaat

SEQ ID NO: 71690 - DNA, 25 bp, Artificial
  Probe
aagtatatcacagactggcagaatg

SEQ ID NO: 71691 - DNA, 25 bp, Artificial
  Probe
ccaagtctatgtatgaagaacaggt

SEQ ID NO: 71692 - DNA, 25 bp, Artificial
  Probe
accaagtctatgtatgaagaacagg

SEQ ID NO: 71693 - DNA, 25 bp, Artificial
  Probe
tatgtatgaagaacaggtcgtgtag

SEQ ID NO: 71694 - DNA, 25 bp, Artificial
  Probe
ctatgtatgaagaacaggtcgtgta

SEQ ID NO: 71695 - DNA, 25 bp, Artificial
  Probe
aagtctatgtatgaagaacaggtcg

SEQ ID NO: 71696 - DNA, 25 bp, Artificial
  Probe
ctgaagtctcacacaatagccaatt

SEQ ID NO: 71697 - DNA, 25 bp, Artificial
  Probe
ggaccaagtctatgtatgaagaaca

SEQ ID NO: 71698 - DNA, 25 bp, Artificial
  Probe
aggaccaagtctatgtatgaagaac

SEQ ID NO: 71699 - DNA, 25 bp, Artificial
  Probe
caggaccaagtctatgtatgaagaa

SEQ ID NO: 71700 - DNA, 25 bp, Artificial
  Probe
gtctatgtatgaagaacaggtcgtg

SEQ ID NO: 71701 - DNA, 25 bp, Artificial
  Probe
agtctatgtatgaagaacaggtcgt

SEQ ID NO: 71702 - DNA, 25 bp, Artificial
  Probe
caagtctatgtatgaagaacaggtc

SEQ ID NO: 71703 - DNA, 25 bp, Artificial
  Probe
atccaggaccaagtctatgtatgaa

SEQ ID NO: 71704 - DNA, 25 bp, Artificial
  Probe
attcaggtgtcttacgagcagtatc

SEQ ID NO: 71705 - DNA, 25 bp, Artificial
  Probe
gattcaggtgtcttacgagcagtat

SEQ ID NO: 71706 - DNA, 25 bp, Artificial
  Probe
tctatgtatgaagaacaggtcgtgt

SEQ ID NO: 71707 - DNA, 25 bp, Artificial
  Probe
gaccaagtctatgtatgaagaacag

SEQ ID NO: 71708 - DNA, 25 bp, Artificial
  Probe
gtatatcacagactggcagaatgtc

SEQ ID NO: 71709 - DNA, 25 bp, Artificial
  Probe
agtatatcacagactggcagaatgt

SEQ ID NO: 71710 - DNA, 25 bp, Artificial
  Probe
tgaacttcagcaagcattatccaat

SEQ ID NO: 71711 - DNA, 25 bp, Artificial
  Probe
atgaacttcagcaagcattatccaa

SEQ ID NO: 71712 - DNA, 25 bp, Artificial
  Probe
ccaggaccaagtctatgtatgaaga

SEQ ID NO: 71713 - DNA, 25 bp, Artificial
  Probe
ggaagtatatcacagactggcagaa

SEQ ID NO: 71714 - DNA, 25 bp, Artificial
  Probe
tccaggaccaagtctatgtatgaag

SEQ ID NO: 71715 - DNA, 25 bp, Artificial
  Probe
catccaggaccaagtctatgtatga

SEQ ID NO: 71716 - DNA, 25 bp, Artificial
  Probe
ctagatgcctctaattctgtagtcg

SEQ ID NO: 71717 - DNA, 25 bp, Artificial
  Probe
ttaccactctagttgttgtgtgaac

SEQ ID NO: 71718 - DNA, 25 bp, Artificial
  Probe
gttaccactctagttgttgtgtgaa

SEQ ID NO: 71719 - DNA, 25 bp, Artificial
  Probe
tatgaagaacaggtcgtgtagcata

SEQ ID NO: 71720 - DNA, 25 bp, Artificial
  Probe
ttgttaccactctagttgttgtgtg

SEQ ID NO: 71721 - DNA, 25 bp, Artificial
  Probe
gtgagacctaataatggttcaggat

SEQ ID NO: 71722 - DNA, 25 bp, Artificial
  Probe
actgaagtctcacacaatagccaat

SEQ ID NO: 71723 - DNA, 25 bp, Artificial
  Probe
atgaagaacaggtcgtgtagcataa

SEQ ID NO: 71724 - DNA, 25 bp, Artificial
  Probe
tgagacctaataatggttcaggatt

SEQ ID NO: 71725 - DNA, 25 bp, Artificial
  Probe
ctctaattctgtagtcgagatgctc

SEQ ID NO: 71726 - DNA, 25 bp, Artificial
  Probe
tgttaccactctagttgttgtgtga

SEQ ID NO: 71727 - DNA, 25 bp, Artificial
  Probe
tttgctttaactaaacaggtggaag

SEQ ID NO: 71728 - DNA, 25 bp, Artificial
  Probe
tctaattctgtagtcgagatgctct

SEQ ID NO: 71729 - DNA, 25 bp, Artificial
  Probe
gctttaactaaacaggtggaagaaa

SEQ ID NO: 71730 - DNA, 25 bp, Artificial
  Probe
tgctttaactaaacaggtggaagaa

SEQ ID NO: 71731 - DNA, 25 bp, Artificial
  Probe
ttgctttaactaaacaggtggaaga

SEQ ID NO: 71732 - DNA, 25 bp, Artificial
  Probe
ggtgagacctaataatggttcagga

SEQ ID NO: 71733 - DNA, 25 bp, Artificial
  Probe
ttcaggtgtcttacgagcagtatct

SEQ ID NO: 71734 - DNA, 25 bp, Artificial
  Probe
tttctcttgtttgtgaatagccctt

SEQ ID NO: 71735 - DNA, 25 bp, Artificial
  Probe
ttctcttgtttgtgaatagcccttg

SEQ ID NO: 71736 - DNA, 25 bp, Artificial
  Probe
ccctttggacttgatgtatattgta

SEQ ID NO: 71737 - DNA, 25 bp, Artificial
  Probe
ctttattgtaagacgctgacttccc

SEQ ID NO: 71738 - DNA, 25 bp, Artificial
  Probe
cctttattgtaagacgctgacttcc

SEQ ID NO: 71739 - DNA, 25 bp, Artificial
  Probe
tattgtaagacgctgacttcccttt

SEQ ID NO: 71740 - DNA, 25 bp, Artificial
  Probe
ttattgtaagacgctgacttccctt

SEQ ID NO: 71741 - DNA, 25 bp, Artificial
  Probe
tttattgtaagacgctgacttccct

SEQ ID NO: 71742 - DNA, 25 bp, Artificial
  Probe
ttctccagagataatgtgctatatt

SEQ ID NO: 71743 - DNA, 25 bp, Artificial
  Probe
gcctttattgtaagacgctgacttc

SEQ ID NO: 71744 - DNA, 25 bp, Artificial
  Probe
gacttccctttggacttgatgtata

SEQ ID NO: 71745 - DNA, 25 bp, Artificial
  Probe
tccctttggacttgatgtatattgt

SEQ ID NO: 71746 - DNA, 25 bp, Artificial
  Probe
acttccctttggacttgatgtatat

SEQ ID NO: 71747 - DNA, 25 bp, Artificial
  Probe
ttccctttggacttgatgtatattg

SEQ ID NO: 71748 - DNA, 25 bp, Artificial
  Probe
tttgccttacaggaagcctttattg

SEQ ID NO: 71749 - DNA, 25 bp, Artificial
  Probe
cttccctttggacttgatgtatatt

SEQ ID NO: 71750 - DNA, 25 bp, Artificial
  Probe
actaatatgctgtacattcggaaga

SEQ ID NO: 71751 - DNA, 25 bp, Artificial
  Probe
aatagcccttgcagagtttgtaaat

SEQ ID NO: 71752 - DNA, 25 bp, Artificial
  Probe
tgacttccctttggacttgatgtat

SEQ ID NO: 71753 - DNA, 25 bp, Artificial
  Probe
cctttggacttgatgtatattgtac

SEQ ID NO: 71754 - DNA, 25 bp, Artificial
  Probe
tacaggaagcctttattgtaagacg

SEQ ID NO: 71755 - DNA, 25 bp, Artificial
  Probe
atagcccttgcagagtttgtaaatc

SEQ ID NO: 71756 - DNA, 25 bp, Artificial
  Probe
ctaatatgctgtacattcggaagaa

SEQ ID NO: 71757 - DNA, 25 bp, Artificial
  Probe
gaatagcccttgcagagtttgtaaa

SEQ ID NO: 71758 - DNA, 25 bp, Artificial
  Probe
ctgacttccctttggacttgatgta

SEQ ID NO: 71759 - DNA, 25 bp, Artificial
  Probe
attgtaagacgctgacttccctttg

SEQ ID NO: 71760 - DNA, 25 bp, Artificial
  Probe
tactaatatgctgtacattcggaag

SEQ ID NO: 71761 - DNA, 25 bp, Artificial
  Probe
ttgccttacaggaagcctttattgt

SEQ ID NO: 71762 - DNA, 25 bp, Artificial
  Probe
agttttctcttgtttgtgaatagcc

SEQ ID NO: 71763 - DNA, 25 bp, Artificial
  Probe
tctcttgtttgtgaatagcccttgc

SEQ ID NO: 71764 - DNA, 25 bp, Artificial
  Probe
ttttctcttgtttgtgaatagccct

SEQ ID NO: 71765 - DNA, 25 bp, Artificial
  Probe
gttttctcttgtttgtgaatagccc

SEQ ID NO: 71766 - DNA, 25 bp, Artificial
  Probe
tgccttacaggaagcctttattgta

SEQ ID NO: 71767 - DNA, 25 bp, Artificial
  Probe
tctccagagataatgtgctatattt

SEQ ID NO: 71768 - DNA, 25 bp, Artificial
  Probe
tttctccagagataatgtgctatat

SEQ ID NO: 71769 - DNA, 25 bp, Artificial
  Probe
gcgaagttttctcttgtttgtgaat

SEQ ID NO: 71770 - DNA, 25 bp, Artificial
  Probe
tgaatagcccttgcagagtttgtaa

SEQ ID NO: 71771 - DNA, 25 bp, Artificial
  Probe
aagttttctcttgtttgtgaatagc

SEQ ID NO: 71772 - DNA, 25 bp, Artificial
  Probe
cgaagttttctcttgtttgtgaata

SEQ ID NO: 71773 - DNA, 25 bp, Artificial
  Probe
gaagcctttattgtaagacgctgac

SEQ ID NO: 71774 - DNA, 25 bp, Artificial
  Probe
tgttttctccagagataatgtgcta

SEQ ID NO: 71775 - DNA, 25 bp, Artificial
  Probe
cttgttttctccagagataatgtgc

SEQ ID NO: 71776 - DNA, 25 bp, Artificial
  Probe
ttgttttctccagagataatgtgct

SEQ ID NO: 71777 - DNA, 25 bp, Artificial
  Probe
ccttgttttctccagagataatgtg

SEQ ID NO: 71778 - DNA, 25 bp, Artificial
  Probe
tccttgttttctccagagataatgt

SEQ ID NO: 71779 - DNA, 25 bp, Artificial
  Probe
gatctataagaagcacctggactcc

SEQ ID NO: 71780 - DNA, 25 bp, Artificial
  Probe
tatacaagagactagaagggcttca

SEQ ID NO: 71781 - DNA, 25 bp, Artificial
  Probe
ctaccagagaatcaagtttgaggag

SEQ ID NO: 71782 - DNA, 25 bp, Artificial
  Probe
atacaagagactagaagggcttcag

SEQ ID NO: 71783 - DNA, 25 bp, Artificial
  Probe
taccagagaatcaagtttgaggagt

SEQ ID NO: 71784 - DNA, 25 bp, Artificial
  Probe
actaccagagaatcaagtttgagga

SEQ ID NO: 71785 - DNA, 25 bp, Artificial
  Probe
cactaccagagaatcaagtttgagg

SEQ ID NO: 71786 - DNA, 25 bp, Artificial
  Probe
aaggaggcactaccagagaatcaag

SEQ ID NO: 71787 - DNA, 25 bp, Artificial
  Probe
gcactaccagagaatcaagtttgag

SEQ ID NO: 71788 - DNA, 25 bp, Artificial
  Probe
agatctataagaagcacctggactc

SEQ ID NO: 71789 - DNA, 25 bp, Artificial
  Probe
caaggaggcactaccagagaatcaa

SEQ ID NO: 71790 - DNA, 25 bp, Artificial
  Probe
gaggcactaccagagaatcaagttt

SEQ ID NO: 71791 - DNA, 25 bp, Artificial
  Probe
acccaggtatacaagagactagaag

SEQ ID NO: 71792 - DNA, 25 bp, Artificial
  Probe
gacccaggtatacaagagactagaa

SEQ ID NO: 71793 - DNA, 25 bp, Artificial
  Probe
atgacccaggtatacaagagactag

SEQ ID NO: 71794 - DNA, 25 bp, Artificial
  Probe
atctataagaagcacctggactcca

SEQ ID NO: 71795 - DNA, 25 bp, Artificial
  Probe
catgacccaggtatacaagagacta

SEQ ID NO: 71796 - DNA, 25 bp, Artificial
  Probe
gtatacaagagactagaagggcttc

SEQ ID NO: 71797 - DNA, 25 bp, Artificial
  Probe
aggcactaccagagaatcaagtttg

SEQ ID NO: 71798 - DNA, 25 bp, Artificial
  Probe
ccaggtatacaagagactagaaggg

SEQ ID NO: 71799 - DNA, 25 bp, Artificial
  Probe
cccaggtatacaagagactagaagg

SEQ ID NO: 71800 - DNA, 25 bp, Artificial
  Probe
accagagaatcaagtttgaggagtg

SEQ ID NO: 71801 - DNA, 25 bp, Artificial
  Probe
cagatctataagaagcacctggact

SEQ ID NO: 71802 - DNA, 25 bp, Artificial
  Probe
ggtatacaagagactagaagggctt

SEQ ID NO: 71803 - DNA, 25 bp, Artificial
  Probe
ggaggcactaccagagaatcaagtt

SEQ ID NO: 71804 - DNA, 25 bp, Artificial
  Probe
tgacccaggtatacaagagactaga

SEQ ID NO: 71805 - DNA, 25 bp, Artificial
  Probe
aggtatacaagagactagaagggct

SEQ ID NO: 71806 - DNA, 25 bp, Artificial
  Probe
caggtatacaagagactagaagggc

SEQ ID NO: 71807 - DNA, 25 bp, Artificial
  Probe
ggcactaccagagaatcaagtttga

SEQ ID NO: 71808 - DNA, 25 bp, Artificial
  Probe
atcagagccaccacagatcatcatc

SEQ ID NO: 71809 - DNA, 25 bp, Artificial
  Probe
ccagtggagagtgatgagagtgttc

SEQ ID NO: 71810 - DNA, 25 bp, Artificial
  Probe
cacaaggaggcactaccagagaatc

SEQ ID NO: 71811 - DNA, 25 bp, Artificial
  Probe
tacaagagactagaagggcttcagg

SEQ ID NO: 71812 - DNA, 25 bp, Artificial
  Probe
tacacaaggaggcactaccagagaa

SEQ ID NO: 71813 - DNA, 25 bp, Artificial
  Probe
catcagagccaccacagatcatcat

SEQ ID NO: 71814 - DNA, 25 bp, Artificial
  Probe
agagccaccacagatcatcatcaac

SEQ ID NO: 71815 - DNA, 25 bp, Artificial
  Probe
cagagccaccacagatcatcatcaa

SEQ ID NO: 71816 - DNA, 25 bp, Artificial
  Probe
aggaggcactaccagagaatcaagt

SEQ ID NO: 71817 - DNA, 25 bp, Artificial
  Probe
acaaggaggcactaccagagaatca

SEQ ID NO: 71818 - DNA, 25 bp, Artificial
  Probe
cagagaatcaagtttgaggagtggc

SEQ ID NO: 71819 - DNA, 25 bp, Artificial
  Probe
gtggagagtgatgagagtgttcctg

SEQ ID NO: 71820 - DNA, 25 bp, Artificial
  Probe
agtggagagtgatgagagtgttcct

SEQ ID NO: 71821 - DNA, 25 bp, Artificial
  Probe
cagtggagagtgatgagagtgttcc

SEQ ID NO: 71822 - DNA, 25 bp, Artificial
  Probe
ccagagaatcaagtttgaggagtgg

SEQ ID NO: 71823 - DNA, 25 bp, Artificial
  Probe
ccatgacccaggtatacaagagact

SEQ ID NO: 71824 - DNA, 25 bp, Artificial
  Probe
gagacctcaagagagtaccatacca

SEQ ID NO: 71825 - DNA, 25 bp, Artificial
  Probe
agacctcaagagagtaccataccac

SEQ ID NO: 71826 - DNA, 25 bp, Artificial
  Probe
acgagacctcaagagagtaccatac

SEQ ID NO: 71827 - DNA, 25 bp, Artificial
  Probe
cacgagacctcaagagagtaccata

SEQ ID NO: 71828 - DNA, 25 bp, Artificial
  Probe
acctcaagagagtaccataccacag

SEQ ID NO: 71829 - DNA, 25 bp, Artificial
  Probe
gacctcaagagagtaccataccaca

SEQ ID NO: 71830 - DNA, 25 bp, Artificial
  Probe
cgagacctcaagagagtaccatacc

SEQ ID NO: 71831 - DNA, 25 bp, Artificial
  Probe
cctcaagagagtaccataccacagg

SEQ ID NO: 71832 - DNA, 25 bp, Artificial
  Probe
ctaagaccagacctcaacgaaccag

SEQ ID NO: 71833 - DNA, 25 bp, Artificial
  Probe
ctcaagagagtaccataccacaggc

SEQ ID NO: 71834 - DNA, 25 bp, Artificial
  Probe
ccacgagacctcaagagagtaccat

SEQ ID NO: 71835 - DNA, 25 bp, Artificial
  Probe
gacataccaacacgcgctctatact

SEQ ID NO: 71836 - DNA, 25 bp, Artificial
  Probe
ctgacataccaacacgcgctctata

SEQ ID NO: 71837 - DNA, 25 bp, Artificial
  Probe
acataccaacacgcgctctatactg

SEQ ID NO: 71838 - DNA, 25 bp, Artificial
  Probe
tgacataccaacacgcgctctatac

SEQ ID NO: 71839 - DNA, 25 bp, Artificial
  Probe
agagtaatataagcgaatcaagcga

SEQ ID NO: 71840 - DNA, 25 bp, Artificial
  Probe
agacgcagaagagagtaatataagc

SEQ ID NO: 71841 - DNA, 25 bp, Artificial
  Probe
gagagtaatataagcgaatcaagcg

SEQ ID NO: 71842 - DNA, 25 bp, Artificial
  Probe
agtaatataagcgaatcaagcgaac

SEQ ID NO: 71843 - DNA, 25 bp, Artificial
  Probe
gagtaatataagcgaatcaagcgaa

SEQ ID NO: 71844 - DNA, 25 bp, Artificial
  Probe
gtaatataagcgaatcaagcgaacg

SEQ ID NO: 71845 - DNA, 25 bp, Artificial
  Probe
aagagacaagagcagatgaggatag

SEQ ID NO: 71846 - DNA, 25 bp, Artificial
  Probe
agagagtaatataagcgaatcaagc

SEQ ID NO: 71847 - DNA, 25 bp, Artificial
  Probe
gcagaagagagtaatataagcgaat

SEQ ID NO: 71848 - DNA, 25 bp, Artificial
  Probe
gagacaagagcagatgaggatagac

SEQ ID NO: 71849 - DNA, 25 bp, Artificial
  Probe
agagacaagagcagatgaggataga

SEQ ID NO: 71850 - DNA, 25 bp, Artificial
  Probe
caagagcagatgaggatagacgaag

SEQ ID NO: 71851 - DNA, 25 bp, Artificial
  Probe
tagacgcagaagagagtaatataag

SEQ ID NO: 71852 - DNA, 25 bp, Artificial
  Probe
tataagcgaatcaagcgaacgtata

SEQ ID NO: 71853 - DNA, 25 bp, Artificial
  Probe
ttgtttagacgcagaagagagtaat

SEQ ID NO: 71854 - DNA, 25 bp, Artificial
  Probe
tttgtttagacgcagaagagagtaa

SEQ ID NO: 71855 - DNA, 25 bp, Artificial
  Probe
agaagagagtaatataagcgaatca

SEQ ID NO: 71856 - DNA, 25 bp, Artificial
  Probe
tgtttagacgcagaagagagtaata

SEQ ID NO: 71857 - DNA, 25 bp, Artificial
  Probe
atataagcgaatcaagcgaacgtat

SEQ ID NO: 71858 - DNA, 25 bp, Artificial
  Probe
aatataagcgaatcaagcgaacgta

SEQ ID NO: 71859 - DNA, 25 bp, Artificial
  Probe
taatataagcgaatcaagcgaacgt

SEQ ID NO: 71860 - DNA, 25 bp, Artificial
  Probe
aaagagacaagagcagatgaggata

SEQ ID NO: 71861 - DNA, 25 bp, Artificial
  Probe
acaagagcagatgaggatagacgaa

SEQ ID NO: 71862 - DNA, 25 bp, Artificial
  Probe
cagaagagagtaatataagcgaatc

SEQ ID NO: 71863 - DNA, 25 bp, Artificial
  Probe
ataagcgaatcaagcgaacgtatag

SEQ ID NO: 71864 - DNA, 25 bp, Artificial
  Probe
ttagacgcagaagagagtaatataa

SEQ ID NO: 71865 - DNA, 25 bp, Artificial
  Probe
gaagacgatagcacaaagagacaag

SEQ ID NO: 71866 - DNA, 25 bp, Artificial
  Probe
gaatggaagacgatagcacaaagag

SEQ ID NO: 71867 - DNA, 25 bp, Artificial
  Probe
gtttagacgcagaagagagtaatat

SEQ ID NO: 71868 - DNA, 25 bp, Artificial
  Probe
gacaagagcagatgaggatagacga

SEQ ID NO: 71869 - DNA, 25 bp, Artificial
  Probe
agacaagagcagatgaggatagacg

SEQ ID NO: 71870 - DNA, 25 bp, Artificial
  Probe
gatggtgcggaatagaacgaatgaa

SEQ ID NO: 71871 - DNA, 25 bp, Artificial
  Probe
aagagagtaatataagcgaatcaag

SEQ ID NO: 71872 - DNA, 25 bp, Artificial
  Probe
gaagagagtaatataagcgaatcaa

SEQ ID NO: 71873 - DNA, 25 bp, Artificial
  Probe
atagcacaaagagacaagagcagat

SEQ ID NO: 71874 - DNA, 25 bp, Artificial
  Probe
aagacgatagcacaaagagacaaga

SEQ ID NO: 71875 - DNA, 25 bp, Artificial
  Probe
aatggaagacgatagcacaaagaga

SEQ ID NO: 71876 - DNA, 25 bp, Artificial
  Probe
gacaggaacagaatgagcacaagag

SEQ ID NO: 71877 - DNA, 25 bp, Artificial
  Probe
gagacaggaacagaatgagcacaag

SEQ ID NO: 71878 - DNA, 25 bp, Artificial
  Probe
ccacaagacaacatatgatgacaca

SEQ ID NO: 71879 - DNA, 25 bp, Artificial
  Probe
tgaatggaagacgatagcacaaaga

SEQ ID NO: 71880 - DNA, 25 bp, Artificial
  Probe
gagtgaatggaagacgatagcacaa

SEQ ID NO: 71881 - DNA, 25 bp, Artificial
  Probe
aggacgagtgaatggaagacgatag

SEQ ID NO: 71882 - DNA, 25 bp, Artificial
  Probe
gaggacgagtgaatggaagacgata

SEQ ID NO: 71883 - DNA, 25 bp, Artificial
  Probe
atggtgcggaatagaacgaatgaac

SEQ ID NO: 71884 - DNA, 25 bp, Artificial
  Probe
aacctaatgacagcagacaacttat

SEQ ID NO: 71885 - DNA, 25 bp, Artificial
  Probe
ctaatgacagcagacaacttatcca

SEQ ID NO: 71886 - DNA, 25 bp, Artificial
  Probe
acctaatgacagcagacaacttatc

SEQ ID NO: 71887 - DNA, 25 bp, Artificial
  Probe
taatgacagcagacaacttatccat

SEQ ID NO: 71888 - DNA, 25 bp, Artificial
  Probe
caacctaatgacagcagacaactta

SEQ ID NO: 71889 - DNA, 25 bp, Artificial
  Probe
cctaatgacagcagacaacttatcc

SEQ ID NO: 71890 - DNA, 25 bp, Artificial
  Probe
aatgacagcagacaacttatccatc

SEQ ID NO: 71891 - DNA, 25 bp, Artificial
  Probe
atgacagcagacaacttatccatct

SEQ ID NO: 71892 - DNA, 25 bp, Artificial
  Probe
aatcaacctaatgacagcagacaac

SEQ ID NO: 71893 - DNA, 25 bp, Artificial
  Probe
atcaacctaatgacagcagacaact

SEQ ID NO: 71894 - DNA, 25 bp, Artificial
  Probe
tcaacctaatgacagcagacaactt

SEQ ID NO: 71895 - DNA, 25 bp, Artificial
  Probe
gtgaaactgaaatactgtggatgtc

SEQ ID NO: 71896 - DNA, 25 bp, Artificial
  Probe
aaacatttattcaaacagtgccaga

SEQ ID NO: 71897 - DNA, 25 bp, Artificial
  Probe
ttgtgaaactgaaatactgtggatg

SEQ ID NO: 71898 - DNA, 25 bp, Artificial
  Probe
acatttattcaaacagtgccagatt

SEQ ID NO: 71899 - DNA, 25 bp, Artificial
  Probe
aacatttattcaaacagtgccagat

SEQ ID NO: 71900 - DNA, 25 bp, Artificial
  Probe
actttgatgagacctgactttgaaa

SEQ ID NO: 71901 - DNA, 25 bp, Artificial
  Probe
aactttgatgagacctgactttgaa

SEQ ID NO: 71902 - DNA, 25 bp, Artificial
  Probe
tgtgaaactgaaatactgtggatgt

SEQ ID NO: 71903 - DNA, 25 bp, Artificial
  Probe
tattcaaacagtgccagatttcttt

SEQ ID NO: 71904 - DNA, 25 bp, Artificial
  Probe
ttattcaaacagtgccagatttctt

SEQ ID NO: 71905 - DNA, 25 bp, Artificial
  Probe
tttattcaaacagtgccagatttct

SEQ ID NO: 71906 - DNA, 25 bp, Artificial
  Probe
gaaacatttattcaaacagtgccag

SEQ ID NO: 71907 - DNA, 25 bp, Artificial
  Probe
attgtgaaactgaaatactgtggat

SEQ ID NO: 71908 - DNA, 25 bp, Artificial
  Probe
aattgtgaaactgaaatactgtgga

SEQ ID NO: 71909 - DNA, 25 bp, Artificial
  Probe
catttattcaaacagtgccagattt

SEQ ID NO: 71910 - DNA, 25 bp, Artificial
  Probe
atttattcaaacagtgccagatttc

SEQ ID NO: 71911 - DNA, 25 bp, Artificial
  Probe
tgaaactgaaatactgtggatgtcc

SEQ ID NO: 71912 - DNA, 25 bp, Artificial
  Probe
tgaaagatcctccaataagaaacga

SEQ ID NO: 71913 - DNA, 25 bp, Artificial
  Probe
ctgaaagatcctccaataagaaacg

SEQ ID NO: 71914 - DNA, 25 bp, Artificial
  Probe
aaattgtgaaactgaaatactgtgg

SEQ ID NO: 71915 - DNA, 25 bp, Artificial
  Probe
aaatcaacctaatgacagcagacaa

SEQ ID NO: 71916 - DNA, 25 bp, Artificial
  Probe
caactttgatgagacctgactttga

SEQ ID NO: 71917 - DNA, 25 bp, Artificial
  Probe
tcctccaataagaaacgagttagat

SEQ ID NO: 71918 - DNA, 25 bp, Artificial
  Probe
atcctccaataagaaacgagttaga

SEQ ID NO: 71919 - DNA, 25 bp, Artificial
  Probe
ttcacactatacaccgcacaagaac

SEQ ID NO: 71920 - DNA, 25 bp, Artificial
  Probe
aagaaacgagttagataaggacaat

SEQ ID NO: 71921 - DNA, 25 bp, Artificial
  Probe
aacacatctaaacagggttagtcag

SEQ ID NO: 71922 - DNA, 25 bp, Artificial
  Probe
aagatcctccaataagaaacgagtt

SEQ ID NO: 71923 - DNA, 25 bp, Artificial
  Probe
aaagatcctccaataagaaacgagt

SEQ ID NO: 71924 - DNA, 25 bp, Artificial
  Probe
tggagaaattgtgaaactgaaatac

SEQ ID NO: 71925 - DNA, 25 bp, Artificial
  Probe
gaaagatcctccaataagaaacgag

SEQ ID NO: 71926 - DNA, 25 bp, Artificial
  Probe
catctaaacagggttagtcagcaaa

SEQ ID NO: 71927 - DNA, 25 bp, Artificial
  Probe
agatcctccaataagaaacgagtta

SEQ ID NO: 71928 - DNA, 25 bp, Artificial
  Probe
ggagaaattgtgaaactgaaatact

SEQ ID NO: 71929 - DNA, 25 bp, Artificial
  Probe
cgatggtctgtcagtgtctaagatt

SEQ ID NO: 71930 - DNA, 25 bp, Artificial
  Probe
gtctccattctgttagcgatcttga

SEQ ID NO: 71931 - DNA, 25 bp, Artificial
  Probe
ctgtctccattctgttagcgatctt

SEQ ID NO: 71932 - DNA, 25 bp, Artificial
  Probe
tctctgtctccattctgttagcgat

SEQ ID NO: 71933 - DNA, 25 bp, Artificial
  Probe
atctctgtctccattctgttagcga

SEQ ID NO: 71934 - DNA, 25 bp, Artificial
  Probe
tgtctccattctgttagcgatcttg

SEQ ID NO: 71935 - DNA, 25 bp, Artificial
  Probe
ctctgtctccattctgttagcgatc

SEQ ID NO: 71936 - DNA, 25 bp, Artificial
  Probe
tctgtctccattctgttagcgatct

SEQ ID NO: 71937 - DNA, 25 bp, Artificial
  Probe
tttccaggtttgtatgctgtagttt

SEQ ID NO: 71938 - DNA, 25 bp, Artificial
  Probe
gtttccaggtttgtatgctgtagtt

SEQ ID NO: 71939 - DNA, 25 bp, Artificial
  Probe
acacacaaacgacaacacaaagaaa

SEQ ID NO: 71940 - DNA, 25 bp, Artificial
  Probe
cacaaacacacaaacacacacaaac

SEQ ID NO: 71941 - DNA, 25 bp, Artificial
  Probe
ccgatggtctgtcagtgtctaagat

SEQ ID NO: 71942 - DNA, 25 bp, Artificial
  Probe
ctcctgagagagagtattaggtggc

SEQ ID NO: 71943 - DNA, 25 bp, Artificial
  Probe
cagtttccaggtttgtatgctgtag

SEQ ID NO: 71944 - DNA, 25 bp, Artificial
  Probe
acgggtttcctgaaattctcaattc

SEQ ID NO: 71945 - DNA, 25 bp, Artificial
  Probe
acacaaacacacaaacacacacaaa

SEQ ID NO: 71946 - DNA, 25 bp, Artificial
  Probe
aaacacacacaaacgacaacacaaa

SEQ ID NO: 71947 - DNA, 25 bp, Artificial
  Probe
cacgggtttcctgaaattctcaatt

SEQ ID NO: 71948 - DNA, 25 bp, Artificial
  Probe
agtttccaggtttgtatgctgtagt

SEQ ID NO: 71949 - DNA, 25 bp, Artificial
  Probe
cacacacaaacgacaacacaaagaa

SEQ ID NO: 71950 - DNA, 25 bp, Artificial
  Probe
cctgagagagagtattaggtggcac

SEQ ID NO: 71951 - DNA, 25 bp, Artificial
  Probe
aactcctgagagagagtattaggtg

SEQ ID NO: 71952 - DNA, 25 bp, Artificial
  Probe
caactcctgagagagagtattaggt

SEQ ID NO: 71953 - DNA, 25 bp, Artificial
  Probe
tcctgagagagagtattaggtggca

SEQ ID NO: 71954 - DNA, 25 bp, Artificial
  Probe
aacacacacaaacgacaacacaaag

SEQ ID NO: 71955 - DNA, 25 bp, Artificial
  Probe
ggataaggcaactcctgagagagag

SEQ ID NO: 71956 - DNA, 25 bp, Artificial
  Probe
cacacaaacacacaaacacacacaa

SEQ ID NO: 71957 - DNA, 25 bp, Artificial
  Probe
caaacacacacaaacgacaacacaa

SEQ ID NO: 71958 - DNA, 25 bp, Artificial
  Probe
aaacacacaaacacacacaaacgac

SEQ ID NO: 71959 - DNA, 25 bp, Artificial
  Probe
caaacacacaaacacacacaaacga

SEQ ID NO: 71960 - DNA, 25 bp, Artificial
  Probe
gcaactcctgagagagagtattagg

SEQ ID NO: 71961 - DNA, 25 bp, Artificial
  Probe
ggcaactcctgagagagagtattag

SEQ ID NO: 71962 - DNA, 25 bp, Artificial
  Probe
cacacaaacgacaacacaaagaaaa

SEQ ID NO: 71963 - DNA, 25 bp, Artificial
  Probe
acaaacacacaaacacacacaaacg

SEQ ID NO: 71964 - DNA, 25 bp, Artificial
  Probe
aggcaactcctgagagagagtatta

SEQ ID NO: 71965 - DNA, 25 bp, Artificial
  Probe
taaggcaactcctgagagagagtat

SEQ ID NO: 71966 - DNA, 25 bp, Artificial
  Probe
ataaggcaactcctgagagagagta

SEQ ID NO: 71967 - DNA, 25 bp, Artificial
  Probe
actcctgagagagagtattaggtgg

SEQ ID NO: 71968 - DNA, 25 bp, Artificial
  Probe
acacacacaaacgacaacacaaaga

SEQ ID NO: 71969 - DNA, 25 bp, Artificial
  Probe
ccacgggtttcctgaaattctcaat

SEQ ID NO: 71970 - DNA, 25 bp, Artificial
  Probe
catttgtttcaggtaaaatctgtgc

SEQ ID NO: 71971 - DNA, 25 bp, Artificial
  Probe
gcatttgtttcaggtaaaatctgtg

SEQ ID NO: 71972 - DNA, 25 bp, Artificial
  Probe
ttccaggtttgtatgctgtagtttt

SEQ ID NO: 71973 - DNA, 25 bp, Artificial
  Probe
cacaaacacacacaaacgacaacac

SEQ ID NO: 71974 - DNA, 25 bp, Artificial
  Probe
cctacattaaagacgacaccctatt

SEQ ID NO: 71975 - DNA, 25 bp, Artificial
  Probe
tcttatcttcctgcctttaatgtcc

SEQ ID NO: 71976 - DNA, 25 bp, Artificial
  Probe
gctttgtttctcattctactctgga

SEQ ID NO: 71977 - DNA, 25 bp, Artificial
  Probe
gttcttatcttcctgcctttaatgt

SEQ ID NO: 71978 - DNA, 25 bp, Artificial
  Probe
tgttcttatcttcctgcctttaatg

SEQ ID NO: 71979 - DNA, 25 bp, Artificial
  Probe
ctacattaaagacgacaccctattc

SEQ ID NO: 71980 - DNA, 25 bp, Artificial
  Probe
acctacattaaagacgacaccctat

SEQ ID NO: 71981 - DNA, 25 bp, Artificial
  Probe
ttcttatcttcctgcctttaatgtc

SEQ ID NO: 71982 - DNA, 25 bp, Artificial
  Probe
tacattaaagacgacaccctattct

SEQ ID NO: 71983 - DNA, 25 bp, Artificial
  Probe
tttgttcttatcttcctgcctttaa

SEQ ID NO: 71984 - DNA, 25 bp, Artificial
  Probe
cttatcttcctgcctttaatgtccg

SEQ ID NO: 71985 - DNA, 25 bp, Artificial
  Probe
ctgacttggaggatctgtaaatgtt

SEQ ID NO: 71986 - DNA, 25 bp, Artificial
  Probe
aactgacttggaggatctgtaaatg

SEQ ID NO: 71987 - DNA, 25 bp, Artificial
  Probe
ttgttcttatcttcctgcctttaat

SEQ ID NO: 71988 - DNA, 25 bp, Artificial
  Probe
tgacttggaggatctgtaaatgtta

SEQ ID NO: 71989 - DNA, 25 bp, Artificial
  Probe
gatttaactgacttggaggatctgt

SEQ ID NO: 71990 - DNA, 25 bp, Artificial
  Probe
gaacacctacattaaagacgacacc

SEQ ID NO: 71991 - DNA, 25 bp, Artificial
  Probe
ggaacacctacattaaagacgacac

SEQ ID NO: 71992 - DNA, 25 bp, Artificial
  Probe
ttaactgacttggaggatctgtaaa

SEQ ID NO: 71993 - DNA, 25 bp, Artificial
  Probe
tttaactgacttggaggatctgtaa

SEQ ID NO: 71994 - DNA, 25 bp, Artificial
  Probe
tatcttcctgcctttaatgtccgat

SEQ ID NO: 71995 - DNA, 25 bp, Artificial
  Probe
ttatcttcctgcctttaatgtccga

SEQ ID NO: 71996 - DNA, 25 bp, Artificial
  Probe
taactgacttggaggatctgtaaat

SEQ ID NO: 71997 - DNA, 25 bp, Artificial
  Probe
atttaactgacttggaggatctgta

SEQ ID NO: 71998 - DNA, 25 bp, Artificial
  Probe
ggatttaactgacttggaggatctg

SEQ ID NO: 71999 - DNA, 25 bp, Artificial
  Probe
cacctacattaaagacgacacccta

SEQ ID NO: 72000 - DNA, 25 bp, Artificial
  Probe
ctttgtttctcattctactctggag

SEQ ID NO: 72001 - DNA, 25 bp, Artificial
  Probe
cgctttgtttctcattctactctgg

SEQ ID NO: 72002 - DNA, 25 bp, Artificial
  Probe
ccgctttgtttctcattctactctg

SEQ ID NO: 72003 - DNA, 25 bp, Artificial
  Probe
tggatttaactgacttggaggatct

SEQ ID NO: 72004 - DNA, 25 bp, Artificial
  Probe
gtggatttaactgacttggaggatc

SEQ ID NO: 72005 - DNA, 25 bp, Artificial
  Probe
actgacttggaggatctgtaaatgt

SEQ ID NO: 72006 - DNA, 25 bp, Artificial
  Probe
gacttggaggatctgtaaatgttaa

SEQ ID NO: 72007 - DNA, 25 bp, Artificial
  Probe
cctgtctttgtactttgtggtgatg

SEQ ID NO: 72008 - DNA, 25 bp, Artificial
  Probe
cgtggatttaactgacttggaggat

SEQ ID NO: 72009 - DNA, 25 bp, Artificial
  Probe
caggaacacctacattaaagacgac

SEQ ID NO: 72010 - DNA, 25 bp, Artificial
  Probe
aacacctacattaaagacgacaccc

SEQ ID NO: 72011 - DNA, 25 bp, Artificial
  Probe
aggaacacctacattaaagacgaca

SEQ ID NO: 72012 - DNA, 25 bp, Artificial
  Probe
aatgttaactgatagctccacacag

SEQ ID NO: 72013 - DNA, 25 bp, Artificial
  Probe
cccgctttgtttctcattctactct

SEQ ID NO: 72014 - DNA, 25 bp, Artificial
  Probe
ttccaggaacacctacattaaagac

SEQ ID NO: 72015 - DNA, 25 bp, Artificial
  Probe
atcttcctgcctttaatgtccgatg

SEQ ID NO: 72016 - DNA, 25 bp, Artificial
  Probe
ccaggaacacctacattaaagacga

SEQ ID NO: 72017 - DNA, 25 bp, Artificial
  Probe
acattaaagacgacaccctattctt

SEQ ID NO: 72018 - DNA, 25 bp, Artificial
  Probe
tccaggaacacctacattaaagacg

SEQ ID NO: 72019 - DNA, 25 bp, Artificial
  Probe
ggaaaccacctgagttagaaatcta

SEQ ID NO: 72020 - DNA, 25 bp, Artificial
  Probe
ctttgaagtctgaagtgtggagaag

SEQ ID NO: 72021 - DNA, 25 bp, Artificial
  Probe
tagaaatctaagcacacgaggttag

SEQ ID NO: 72022 - DNA, 25 bp, Artificial
  Probe
gaggaaaccacctgagttagaaatc

SEQ ID NO: 72023 - DNA, 25 bp, Artificial
  Probe
aggaaaccacctgagttagaaatct

SEQ ID NO: 72024 - DNA, 25 bp, Artificial
  Probe
ctactgtgcttcttgaccttccttt

SEQ ID NO: 72025 - DNA, 25 bp, Artificial
  Probe
aaaggagcttacattaaagtgatgg

SEQ ID NO: 72026 - DNA, 25 bp, Artificial
  Probe
ttagaaatctaagcacacgaggtta

SEQ ID NO: 72027 - DNA, 25 bp, Artificial
  Probe
acctgagttagaaatctaagcacac

SEQ ID NO: 72028 - DNA, 25 bp, Artificial
  Probe
cacctgagttagaaatctaagcaca

SEQ ID NO: 72029 - DNA, 25 bp, Artificial
  Probe
aaccacctgagttagaaatctaagc

SEQ ID NO: 72030 - DNA, 25 bp, Artificial
  Probe
tgagttagaaatctaagcacacgag

SEQ ID NO: 72031 - DNA, 25 bp, Artificial
  Probe
ctgagttagaaatctaagcacacga

SEQ ID NO: 72032 - DNA, 25 bp, Artificial
  Probe
gaagtgtggagaagcgaaatacaag

SEQ ID NO: 72033 - DNA, 25 bp, Artificial
  Probe
cctttgaagtctgaagtgtggagaa

SEQ ID NO: 72034 - DNA, 25 bp, Artificial
  Probe
aaggagcttacattaaagtgatggc

SEQ ID NO: 72035 - DNA, 25 bp, Artificial
  Probe
tactgtgcttcttgaccttcctttg

SEQ ID NO: 72036 - DNA, 25 bp, Artificial
  Probe
tttgttactgttggagaaggctgag

SEQ ID NO: 72037 - DNA, 25 bp, Artificial
  Probe
gttagaaatctaagcacacgaggtt

SEQ ID NO: 72038 - DNA, 25 bp, Artificial
  Probe
ccacctgagttagaaatctaagcac

SEQ ID NO: 72039 - DNA, 25 bp, Artificial
  Probe
caatgacatgaagacagagggctat

SEQ ID NO: 72040 - DNA, 25 bp, Artificial
  Probe
gagttagaaatctaagcacacgagg

SEQ ID NO: 72041 - DNA, 25 bp, Artificial
  Probe
ttactgttggagaaggctgagtgtt

SEQ ID NO: 72042 - DNA, 25 bp, Artificial
  Probe
ttgttactgttggagaaggctgagt

SEQ ID NO: 72043 - DNA, 25 bp, Artificial
  Probe
cctactgtgcttcttgaccttcctt

SEQ ID NO: 72044 - DNA, 25 bp, Artificial
  Probe
tctgaagtgtggagaagcgaaatac

SEQ ID NO: 72045 - DNA, 25 bp, Artificial
  Probe
gtctgaagtgtggagaagcgaaata

SEQ ID NO: 72046 - DNA, 25 bp, Artificial
  Probe
accacctgagttagaaatctaagca

SEQ ID NO: 72047 - DNA, 25 bp, Artificial
  Probe
ctttgttactgttggagaaggctga

SEQ ID NO: 72048 - DNA, 25 bp, Artificial
  Probe
aatgacatgaagacagagggctatg

SEQ ID NO: 72049 - DNA, 25 bp, Artificial
  Probe
ggaggaaaccacctgagttagaaat

SEQ ID NO: 72050 - DNA, 25 bp, Artificial
  Probe
cctgagttagaaatctaagcacacg

SEQ ID NO: 72051 - DNA, 25 bp, Artificial
  Probe
aaaccacctgagttagaaatctaag

SEQ ID NO: 72052 - DNA, 25 bp, Artificial
  Probe
gaaaccacctgagttagaaatctaa

SEQ ID NO: 72053 - DNA, 25 bp, Artificial
  Probe
tctttgttactgttggagaaggctg

SEQ ID NO: 72054 - DNA, 25 bp, Artificial
  Probe
gtgtggagaagcgaaatacaagttg

SEQ ID NO: 72055 - DNA, 25 bp, Artificial
  Probe
agtgtggagaagcgaaatacaagtt

SEQ ID NO: 72056 - DNA, 25 bp, Artificial
  Probe
aagtgtggagaagcgaaatacaagt

SEQ ID NO: 72057 - DNA, 25 bp, Artificial
  Probe
agttagaaatctaagcacacgaggt

SEQ ID NO: 72058 - DNA, 25 bp, Artificial
  Probe
tgaagtgtggagaagcgaaatacaa

SEQ ID NO: 72059 - DNA, 25 bp, Artificial
  Probe
tttgaagtctgaagtgtggagaagc

SEQ ID NO: 72060 - DNA, 25 bp, Artificial
  Probe
cagggttctttgttactgttggaga

SEQ ID NO: 72061 - DNA, 25 bp, Artificial
  Probe
ttaagtcagtgtgagaagaacgcca

SEQ ID NO: 72062 - DNA, 25 bp, Artificial
  Probe
tactgttggagaaggctgagtgttc

SEQ ID NO: 72063 - DNA, 25 bp, Artificial
  Probe
cacaggtaaaggagcttacattaaa

SEQ ID NO: 72064 - DNA, 25 bp, Artificial
  Probe
ctcttagcattctgtataaagcagt

SEQ ID NO: 72065 - DNA, 25 bp, Artificial
  Probe
ggaattagaattggatgtactttgg

SEQ ID NO: 72066 - DNA, 25 bp, Artificial
  Probe
gaattagaattggatgtactttggt

SEQ ID NO: 72067 - DNA, 25 bp, Artificial
  Probe
tcttagcattctgtataaagcagta

SEQ ID NO: 72068 - DNA, 25 bp, Artificial
  Probe
gctcttagcattctgtataaagcag

SEQ ID NO: 72069 - DNA, 25 bp, Artificial
  Probe
aggaattagaattggatgtactttg

SEQ ID NO: 72070 - DNA, 25 bp, Artificial
  Probe
cttagcattctgtataaagcagtac

SEQ ID NO: 72071 - DNA, 25 bp, Artificial
  Probe
aagtctacccagaagccagaaagaa

SEQ ID NO: 72072 - DNA, 25 bp, Artificial
  Probe
aataggggattatttggacatagcc

SEQ ID NO: 72073 - DNA, 25 bp, Artificial
  Probe
gcagtcacagaagttccaaataggg

SEQ ID NO: 72074 - DNA, 25 bp, Artificial
  Probe
ttaggaattagaattggatgtactt

SEQ ID NO: 72075 - DNA, 25 bp, Artificial
  Probe
tgagaccgtactgaattttattgac

SEQ ID NO: 72076 - DNA, 25 bp, Artificial
  Probe
gagaccgtactgaattttattgact

SEQ ID NO: 72077 - DNA, 25 bp, Artificial
  Probe
agtctacccagaagccagaaagaag

SEQ ID NO: 72078 - DNA, 25 bp, Artificial
  Probe
agaccgtactgaattttattgactt

SEQ ID NO: 72079 - DNA, 25 bp, Artificial
  Probe
tgcagtcacagaagttccaaatagg

SEQ ID NO: 72080 - DNA, 25 bp, Artificial
  Probe
cacagaagttccaaataggggatta

SEQ ID NO: 72081 - DNA, 25 bp, Artificial
  Probe
aattagaattggatgtactttggta

SEQ ID NO: 72082 - DNA, 25 bp, Artificial
  Probe
acagaagttccaaataggggattat

SEQ ID NO: 72083 - DNA, 25 bp, Artificial
  Probe
gaccgtactgaattttattgacttt

SEQ ID NO: 72084 - DNA, 25 bp, Artificial
  Probe
accgtactgaattttattgactttc

SEQ ID NO: 72085 - DNA, 25 bp, Artificial
  Probe
taggggattatttggacatagccat

SEQ ID NO: 72086 - DNA, 25 bp, Artificial
  Probe
ataggggattatttggacatagcca

SEQ ID NO: 72087 - DNA, 25 bp, Artificial
  Probe
cagaagttccaaataggggattatt

SEQ ID NO: 72088 - DNA, 25 bp, Artificial
  Probe
agaattggatgtactttggtatatt

SEQ ID NO: 72089 - DNA, 25 bp, Artificial
  Probe
attagaattggatgtactttggtat

SEQ ID NO: 72090 - DNA, 25 bp, Artificial
  Probe
tcacagaagttccaaataggggatt

SEQ ID NO: 72091 - DNA, 25 bp, Artificial
  Probe
ccgtactgaattttattgactttct

SEQ ID NO: 72092 - DNA, 25 bp, Artificial
  Probe
cagtcacagaagttccaaatagggg

SEQ ID NO: 72093 - DNA, 25 bp, Artificial
  Probe
ttagcattctgtataaagcagtact

SEQ ID NO: 72094 - DNA, 25 bp, Artificial
  Probe
taggaattagaattggatgtacttt

SEQ ID NO: 72095 - DNA, 25 bp, Artificial
  Probe
tttaggaattagaattggatgtact

SEQ ID NO: 72096 - DNA, 25 bp, Artificial
  Probe
gtctacccagaagccagaaagaagg

SEQ ID NO: 72097 - DNA, 25 bp, Artificial
  Probe
gtcacagaagttccaaataggggat

SEQ ID NO: 72098 - DNA, 25 bp, Artificial
  Probe
aaataggggattatttggacatagc

SEQ ID NO: 72099 - DNA, 25 bp, Artificial
  Probe
ttagaattggatgtactttggtata

SEQ ID NO: 72100 - DNA, 25 bp, Artificial
  Probe
tagaattggatgtactttggtatat

SEQ ID NO: 72101 - DNA, 25 bp, Artificial
  Probe
agaagttccaaataggggattattt

SEQ ID NO: 72102 - DNA, 25 bp, Artificial
  Probe
agtcacagaagttccaaatagggga

SEQ ID NO: 72103 - DNA, 25 bp, Artificial
  Probe
cgtactgaattttattgactttctt

SEQ ID NO: 72104 - DNA, 25 bp, Artificial
  Probe
tggatgtactttggtatattaaaga

SEQ ID NO: 72105 - DNA, 25 bp, Artificial
  Probe
actgaattttattgactttcttgaa

SEQ ID NO: 72106 - DNA, 25 bp, Artificial
  Probe
ctttggtatattaaagaaagtccat

SEQ ID NO: 72107 - DNA, 25 bp, Artificial
  Probe
ctgaattttattgactttcttgaag

SEQ ID NO: 72108 - DNA, 25 bp, Artificial
  Probe
gaaagaagggcacgcacttcaattt

SEQ ID NO: 72109 - DNA, 25 bp, Artificial
  Probe
tactacctggttgcagctacagata

SEQ ID NO: 72110 - DNA, 25 bp, Artificial
  Probe
gaagagaaggacgaaaagaagaaag

SEQ ID NO: 72111 - DNA, 25 bp, Artificial
  Probe
aagagaaggacgaaaagaagaaagg

SEQ ID NO: 72112 - DNA, 25 bp, Artificial
  Probe
ggaagagaaggacgaaaagaagaaa

SEQ ID NO: 72113 - DNA, 25 bp, Artificial
  Probe
gatagaggatgggaataattttggc

SEQ ID NO: 72114 - DNA, 25 bp, Artificial
  Probe
atagaggatgggaataattttggcg

SEQ ID NO: 72115 - DNA, 25 bp, Artificial
  Probe
ggatagaggatgggaataattttgg

SEQ ID NO: 72116 - DNA, 25 bp, Artificial
  Probe
gaaggaagagaaggacgaaaagaag

SEQ ID NO: 72117 - DNA, 25 bp, Artificial
  Probe
ttactacctggttgcagctacagat

SEQ ID NO: 72118 - DNA, 25 bp, Artificial
  Probe
aggaagagaaggacgaaaagaagaa

SEQ ID NO: 72119 - DNA, 25 bp, Artificial
  Probe
aaggaagagaaggacgaaaagaaga

SEQ ID NO: 72120 - DNA, 25 bp, Artificial
  Probe
agaaggaagagaaggacgaaaagaa

SEQ ID NO: 72121 - DNA, 25 bp, Artificial
  Probe
cttccaaacgcagatctctaagtac

SEQ ID NO: 72122 - DNA, 25 bp, Artificial
  Probe
gagaaggaagagaaggacgaaaaga

SEQ ID NO: 72123 - DNA, 25 bp, Artificial
  Probe
ttccaaacgcagatctctaagtact

SEQ ID NO: 72124 - DNA, 25 bp, Artificial
  Probe
tagaggatgggaataattttggcgt

SEQ ID NO: 72125 - DNA, 25 bp, Artificial
  Probe
agatccgtaacgcttatgctgtgtt

SEQ ID NO: 72126 - DNA, 25 bp, Artificial
  Probe
agagaaggacgaaaagaagaaaggg

SEQ ID NO: 72127 - DNA, 25 bp, Artificial
  Probe
atggagatccgtaacgcttatgctg

SEQ ID NO: 72128 - DNA, 25 bp, Artificial
  Probe
actacctggttgcagctacagatac

SEQ ID NO: 72129 - DNA, 25 bp, Artificial
  Probe
catggagatccgtaacgcttatgct

SEQ ID NO: 72130 - DNA, 25 bp, Artificial
  Probe
tcatggagatccgtaacgcttatgc

SEQ ID NO: 72131 - DNA, 25 bp, Artificial
  Probe
gagatccgtaacgcttatgctgtgt

SEQ ID NO: 72132 - DNA, 25 bp, Artificial
  Probe
gttactacctggttgcagctacaga

SEQ ID NO: 72133 - DNA, 25 bp, Artificial
  Probe
gaaagagaaggaggagcggaagaag

SEQ ID NO: 72134 - DNA, 25 bp, Artificial
  Probe
gcttccaaacgcagatctctaagta

SEQ ID NO: 72135 - DNA, 25 bp, Artificial
  Probe
cttcttaaaggagccagctctcaac

SEQ ID NO: 72136 - DNA, 25 bp, Artificial
  Probe
gagaaggacgaaaagaagaaagggg

SEQ ID NO: 72137 - DNA, 25 bp, Artificial
  Probe
agaggatgggaataattttggcgtg

SEQ ID NO: 72138 - DNA, 25 bp, Artificial
  Probe
gaaggacgaaaagaagaaaggggac

SEQ ID NO: 72139 - DNA, 25 bp, Artificial
  Probe
agaaggacgaaaagaagaaagggga

SEQ ID NO: 72140 - DNA, 25 bp, Artificial
  Probe
agaaagagaaggaggagcggaagaa

SEQ ID NO: 72141 - DNA, 25 bp, Artificial
  Probe
ctacctggttgcagctacagatacc

SEQ ID NO: 72142 - DNA, 25 bp, Artificial
  Probe
attttcccaagaagatctcagagtt

SEQ ID NO: 72143 - DNA, 25 bp, Artificial
  Probe
gctattttcccaagaagatctcaga

SEQ ID NO: 72144 - DNA, 25 bp, Artificial
  Probe
agctattttcccaagaagatctcag

SEQ ID NO: 72145 - DNA, 25 bp, Artificial
  Probe
gaaaagaagaaaggggacgaagacg

SEQ ID NO: 72146 - DNA, 25 bp, Artificial
  Probe
cgaaaagaagaaaggggacgaagac

SEQ ID NO: 72147 - DNA, 25 bp, Artificial
  Probe
gacgaaaagaagaaaggggacgaag

SEQ ID NO: 72148 - DNA, 25 bp, Artificial
  Probe
ttttcccaagaagatctcagagttg

SEQ ID NO: 72149 - DNA, 25 bp, Artificial
  Probe
tattttcccaagaagatctcagagt

SEQ ID NO: 72150 - DNA, 25 bp, Artificial
  Probe
gagctattttcccaagaagatctca

SEQ ID NO: 72151 - DNA, 25 bp, Artificial
  Probe
ctattttcccaagaagatctcagag

SEQ ID NO: 72152 - DNA, 25 bp, Artificial
  Probe
tacctggttgcagctacagatacct

SEQ ID NO: 72153 - DNA, 25 bp, Artificial
  Probe
aaaagaagaaaggggacgaagacga

SEQ ID NO: 72154 - DNA, 25 bp, Artificial
  Probe
attcctcctttattatagttcgccc

SEQ ID NO: 72155 - DNA, 25 bp, Artificial
  Probe
cccacccatttattcctcctttatt

SEQ ID NO: 72156 - DNA, 25 bp, Artificial
  Probe
agtcctatgagaagctctatgagaa

SEQ ID NO: 72157 - DNA, 25 bp, Artificial
  Probe
atgagtcctatgagaagctctatga

SEQ ID NO: 72158 - DNA, 25 bp, Artificial
  Probe
gtcctatgagaagctctatgagaag

SEQ ID NO: 72159 - DNA, 25 bp, Artificial
  Probe
cctatgagtcctatgagaagctcta

SEQ ID NO: 72160 - DNA, 25 bp, Artificial
  Probe
gagtcctatgagaagctctatgaga

SEQ ID NO: 72161 - DNA, 25 bp, Artificial
  Probe
tgagtcctatgagaagctctatgag

SEQ ID NO: 72162 - DNA, 25 bp, Artificial
  Probe
tcccacccatttattcctcctttat

SEQ ID NO: 72163 - DNA, 25 bp, Artificial
  Probe
ttcctcctttattatagttcgccca

SEQ ID NO: 72164 - DNA, 25 bp, Artificial
  Probe
tatgagtcctatgagaagctctatg

SEQ ID NO: 72165 - DNA, 25 bp, Artificial
  Probe
ctatgagtcctatgagaagctctat

SEQ ID NO: 72166 - DNA, 25 bp, Artificial
  Probe
ctttattatagttcgcccactcctc

SEQ ID NO: 72167 - DNA, 25 bp, Artificial
  Probe
ctcctttattatagttcgcccactc

SEQ ID NO: 72168 - DNA, 25 bp, Artificial
  Probe
ctcccacccatttattcctccttta

SEQ ID NO: 72169 - DNA, 25 bp, Artificial
  Probe
ccacccatttattcctcctttatta

SEQ ID NO: 72170 - DNA, 25 bp, Artificial
  Probe
tcctcctttattatagttcgcccac

SEQ ID NO: 72171 - DNA, 25 bp, Artificial
  Probe
tattcctcctttattatagttcgcc

SEQ ID NO: 72172 - DNA, 25 bp, Artificial
  Probe
tttattatagttcgcccactcctcc

SEQ ID NO: 72173 - DNA, 25 bp, Artificial
  Probe
cctttattatagttcgcccactcct

SEQ ID NO: 72174 - DNA, 25 bp, Artificial
  Probe
tcctttattatagttcgcccactcc

SEQ ID NO: 72175 - DNA, 25 bp, Artificial
  Probe
cctcctttattatagttcgcccact

SEQ ID NO: 72176 - DNA, 25 bp, Artificial
  Probe
cacctgctttaatcggattgacatc

SEQ ID NO: 72177 - DNA, 25 bp, Artificial
  Probe
tcctatgagaagctctatgagaagc

SEQ ID NO: 72178 - DNA, 25 bp, Artificial
  Probe
acacctgctttaatcggattgacat

SEQ ID NO: 72179 - DNA, 25 bp, Artificial
  Probe
tattatagttcgcccactcctccat

SEQ ID NO: 72180 - DNA, 25 bp, Artificial
  Probe
cccaccctatgagtcctatgagaag

SEQ ID NO: 72181 - DNA, 25 bp, Artificial
  Probe
ttattatagttcgcccactcctcca

SEQ ID NO: 72182 - DNA, 25 bp, Artificial
  Probe
actcctccatcacccatccaataaa

SEQ ID NO: 72183 - DNA, 25 bp, Artificial
  Probe
atcccaccctatgagtcctatgaga

SEQ ID NO: 72184 - DNA, 25 bp, Artificial
  Probe
catcccaccctatgagtcctatgag

SEQ ID NO: 72185 - DNA, 25 bp, Artificial
  Probe
cacccatttattcctcctttattat

SEQ ID NO: 72186 - DNA, 25 bp, Artificial
  Probe
tcccaccctatgagtcctatgagaa

SEQ ID NO: 72187 - DNA, 25 bp, Artificial
  Probe
ttattcctcctttattatagttcgc

SEQ ID NO: 72188 - DNA, 25 bp, Artificial
  Probe
catagtcttgctcacaaccaccaga

SEQ ID NO: 72189 - DNA, 25 bp, Artificial
  Probe
caccctatgagtcctatgagaagct

SEQ ID NO: 72190 - DNA, 25 bp, Artificial
  Probe
ccaccctatgagtcctatgagaagc

SEQ ID NO: 72191 - DNA, 25 bp, Artificial
  Probe
cacacctgctttaatcggattgaca

SEQ ID NO: 72192 - DNA, 25 bp, Artificial
  Probe
ccctatgagtcctatgagaagctct

SEQ ID NO: 72193 - DNA, 25 bp, Artificial
  Probe
cactcctccatcacccatccaataa

SEQ ID NO: 72194 - DNA, 25 bp, Artificial
  Probe
acatcccaccctatgagtcctatga

SEQ ID NO: 72195 - DNA, 25 bp, Artificial
  Probe
accctatgagtcctatgagaagctc

SEQ ID NO: 72196 - DNA, 25 bp, Artificial
  Probe
ctcctccatcacccatccaataaaa

SEQ ID NO: 72197 - DNA, 25 bp, Artificial
  Probe
gacatcccaccctatgagtcctatg

SEQ ID NO: 72198 - DNA, 25 bp, Artificial
  Probe
attatagttcgcccactcctccatc

SEQ ID NO: 72199 - DNA, 25 bp, Artificial
  Probe
ctgaactgatacctgacacaatctt

SEQ ID NO: 72200 - DNA, 25 bp, Artificial
  Probe
tgaactgatacctgacacaatcttg

SEQ ID NO: 72201 - DNA, 25 bp, Artificial
  Probe
ctcctgaactgatacctgacacaat

SEQ ID NO: 72202 - DNA, 25 bp, Artificial
  Probe
gaactgatacctgacacaatcttgc

SEQ ID NO: 72203 - DNA, 25 bp, Artificial
  Probe
cctgaactgatacctgacacaatct

SEQ ID NO: 72204 - DNA, 25 bp, Artificial
  Probe
tcctgaactgatacctgacacaatc

SEQ ID NO: 72205 - DNA, 25 bp, Artificial
  Probe
atacctgacacaatcttgctgacat

SEQ ID NO: 72206 - DNA, 25 bp, Artificial
  Probe
aactgatacctgacacaatcttgct

SEQ ID NO: 72207 - DNA, 25 bp, Artificial
  Probe
ctgatacctgacacaatcttgctga

SEQ ID NO: 72208 - DNA, 25 bp, Artificial
  Probe
gaccctgatgaataaatgatgtgga

SEQ ID NO: 72209 - DNA, 25 bp, Artificial
  Probe
accctgatgaataaatgatgtggac

SEQ ID NO: 72210 - DNA, 25 bp, Artificial
  Probe
tgaccctgatgaataaatgatgtgg

SEQ ID NO: 72211 - DNA, 25 bp, Artificial
  Probe
atgaccctgatgaataaatgatgtg

SEQ ID NO: 72212 - DNA, 25 bp, Artificial
  Probe
gatacctgacacaatcttgctgaca

SEQ ID NO: 72213 - DNA, 25 bp, Artificial
  Probe
tgatacctgacacaatcttgctgac

SEQ ID NO: 72214 - DNA, 25 bp, Artificial
  Probe
actgatacctgacacaatcttgctg

SEQ ID NO: 72215 - DNA, 25 bp, Artificial
  Probe
ccctgatgaataaatgatgtggaca

SEQ ID NO: 72216 - DNA, 25 bp, Artificial
  Probe
gcatgaccctgatgaataaatgatg

SEQ ID NO: 72217 - DNA, 25 bp, Artificial
  Probe
agcatgaccctgatgaataaatgat

SEQ ID NO: 72218 - DNA, 25 bp, Artificial
  Probe
tacctgacacaatcttgctgacatg

SEQ ID NO: 72219 - DNA, 25 bp, Artificial
  Probe
catgaccctgatgaataaatgatgt

SEQ ID NO: 72220 - DNA, 25 bp, Artificial
  Probe
ccttcctgctattcctgtctttcat

SEQ ID NO: 72221 - DNA, 25 bp, Artificial
  Probe
cttcctgctattcctgtctttcatg

SEQ ID NO: 72222 - DNA, 25 bp, Artificial
  Probe
cctcctgaactgatacctgacacaa

SEQ ID NO: 72223 - DNA, 25 bp, Artificial
  Probe
tacaacactctgagcatgaattcct

SEQ ID NO: 72224 - DNA, 25 bp, Artificial
  Probe
gtacaacactctgagcatgaattcc

SEQ ID NO: 72225 - DNA, 25 bp, Artificial
  Probe
cagcatgaccctgatgaataaatga

SEQ ID NO: 72226 - DNA, 25 bp, Artificial
  Probe
caatcagctttccatgtcaaatgtc

SEQ ID NO: 72227 - DNA, 25 bp, Artificial
  Probe
ctatggagatgctgtggaggagatg

SEQ ID NO: 72228 - DNA, 25 bp, Artificial
  Probe
gaattcctgttccactactgcaatg

SEQ ID NO: 72229 - DNA, 25 bp, Artificial
  Probe
tgaattcctgttccactactgcaat

SEQ ID NO: 72230 - DNA, 25 bp, Artificial
  Probe
atgaattcctgttccactactgcaa

SEQ ID NO: 72231 - DNA, 25 bp, Artificial
  Probe
gtatgaacatgtgtatgctgagtac

SEQ ID NO: 72232 - DNA, 25 bp, Artificial
  Probe
cacctcctgaactgatacctgacac

SEQ ID NO: 72233 - DNA, 25 bp, Artificial
  Probe
gagcatgaattcctgttccactact

SEQ ID NO: 72234 - DNA, 25 bp, Artificial
  Probe
ctgagcatgaattcctgttccacta

SEQ ID NO: 72235 - DNA, 25 bp, Artificial
  Probe
atgtacaacactctgagcatgaatt

SEQ ID NO: 72236 - DNA, 25 bp, Artificial
  Probe
ccaatcagctttccatgtcaaatgt

SEQ ID NO: 72237 - DNA, 25 bp, Artificial
  Probe
aatcagctttccatgtcaaatgtcg

SEQ ID NO: 72238 - DNA, 25 bp, Artificial
  Probe
tgtacaacactctgagcatgaattc

SEQ ID NO: 72239 - DNA, 25 bp, Artificial
  Probe
tgtatgaacatgtgtatgctgagta

SEQ ID NO: 72240 - DNA, 25 bp, Artificial
  Probe
agcatgaattcctgttccactactg

SEQ ID NO: 72241 - DNA, 25 bp, Artificial
  Probe
tgagcatgaattcctgttccactac

SEQ ID NO: 72242 - DNA, 25 bp, Artificial
  Probe
ttcctgctattcctgtctttcatgc

SEQ ID NO: 72243 - DNA, 25 bp, Artificial
  Probe
tcacctcctgaactgatacctgaca

SEQ ID NO: 72244 - DNA, 25 bp, Artificial
  Probe
caggtcatagtgaaagtcaacaatg

SEQ ID NO: 72245 - DNA, 25 bp, Artificial
  Probe
acaggtcatagtgaaagtcaacaat

SEQ ID NO: 72246 - DNA, 25 bp, Artificial
  Probe
atgagtctttcaacattgggctaaa

SEQ ID NO: 72247 - DNA, 25 bp, Artificial
  Probe
aggtcatagtgaaagtcaacaatgg

SEQ ID NO: 72248 - DNA, 25 bp, Artificial
  Probe
caataaatctgagactggctgcttc

SEQ ID NO: 72249 - DNA, 25 bp, Artificial
  Probe
atttcaataaatctgagactggctg

SEQ ID NO: 72250 - DNA, 25 bp, Artificial
  Probe
gatgagtctttcaacattgggctaa

SEQ ID NO: 72251 - DNA, 25 bp, Artificial
  Probe
tttcaataaatctgagactggctgc

SEQ ID NO: 72252 - DNA, 25 bp, Artificial
  Probe
gacaggtcatagtgaaagtcaacaa

SEQ ID NO: 72253 - DNA, 25 bp, Artificial
  Probe
agatgagtctttcaacattgggcta

SEQ ID NO: 72254 - DNA, 25 bp, Artificial
  Probe
tagatgagtctttcaacattgggct

SEQ ID NO: 72255 - DNA, 25 bp, Artificial
  Probe
ctagatgagtctttcaacattgggc

SEQ ID NO: 72256 - DNA, 25 bp, Artificial
  Probe
gttattagagactccaacgtggttc

SEQ ID NO: 72257 - DNA, 25 bp, Artificial
  Probe
tcaataaatctgagactggctgctt

SEQ ID NO: 72258 - DNA, 25 bp, Artificial
  Probe
ttcaataaatctgagactggctgct

SEQ ID NO: 72259 - DNA, 25 bp, Artificial
  Probe
ttattagagactccaacgtggttca

SEQ ID NO: 72260 - DNA, 25 bp, Artificial
  Probe
agttattagagactccaacgtggtt

SEQ ID NO: 72261 - DNA, 25 bp, Artificial
  Probe
ggctatgtggttctagatgagtctt

SEQ ID NO: 72262 - DNA, 25 bp, Artificial
  Probe
ggtcatagtgaaagtcaacaatggc

SEQ ID NO: 72263 - DNA, 25 bp, Artificial
  Probe
gaggctatgtggttctagatgagtc

SEQ ID NO: 72264 - DNA, 25 bp, Artificial
  Probe
aataaatctgagactggctgcttcc

SEQ ID NO: 72265 - DNA, 25 bp, Artificial
  Probe
tattagagactccaacgtggttcag

SEQ ID NO: 72266 - DNA, 25 bp, Artificial
  Probe
ggaatacctgaacgtacacatgaaa

SEQ ID NO: 72267 - DNA, 25 bp, Artificial
  Probe
cagttattagagactccaacgtggt

SEQ ID NO: 72268 - DNA, 25 bp, Artificial
  Probe
acagttattagagactccaacgtgg

SEQ ID NO: 72269 - DNA, 25 bp, Artificial
  Probe
gaaggaggctatgtggttctagatg

SEQ ID NO: 72270 - DNA, 25 bp, Artificial
  Probe
catagtgaaagtcaacaatggcgtc

SEQ ID NO: 72271 - DNA, 25 bp, Artificial
  Probe
gtcatagtgaaagtcaacaatggcg

SEQ ID NO: 72272 - DNA, 25 bp, Artificial
  Probe
aggctatgtggttctagatgagtct

SEQ ID NO: 72273 - DNA, 25 bp, Artificial
  Probe
ggacaggtcatagtgaaagtcaaca

SEQ ID NO: 72274 - DNA, 25 bp, Artificial
  Probe
aaggaggctatgtggttctagatga

SEQ ID NO: 72275 - DNA, 25 bp, Artificial
  Probe
atagtgaaagtcaacaatggcgtca

SEQ ID NO: 72276 - DNA, 25 bp, Artificial
  Probe
tcatagtgaaagtcaacaatggcgt

SEQ ID NO: 72277 - DNA, 25 bp, Artificial
  Probe
gagtctttcaacattgggctaaagt

SEQ ID NO: 72278 - DNA, 25 bp, Artificial
  Probe
tgagtctttcaacattgggctaaag

SEQ ID NO: 72279 - DNA, 25 bp, Artificial
  Probe
aggaggctatgtggttctagatgag

SEQ ID NO: 72280 - DNA, 25 bp, Artificial
  Probe
ataaatctgagactggctgcttcct

SEQ ID NO: 72281 - DNA, 25 bp, Artificial
  Probe
gctatgtggttctagatgagtcttt

SEQ ID NO: 72282 - DNA, 25 bp, Artificial
  Probe
acagaaggaggctatgtggttctag

SEQ ID NO: 72283 - DNA, 25 bp, Artificial
  Probe
ggaggctatgtggttctagatgagt

SEQ ID NO: 72284 - DNA, 25 bp, Artificial
  Probe
tctagatgagtctttcaacattggg

SEQ ID NO: 72285 - DNA, 25 bp, Artificial
  Probe
tggttctagatgagtctttcaacat

SEQ ID NO: 72286 - DNA, 25 bp, Artificial
  Probe
gtggttctagatgagtctttcaaca

SEQ ID NO: 72287 - DNA, 25 bp, Artificial
  Probe
tgtggttctagatgagtctttcaac

SEQ ID NO: 72288 - DNA, 25 bp, Artificial
  Probe
atgtggttctagatgagtctttcaa

SEQ ID NO: 72289 - DNA, 25 bp, Artificial
  Probe
gtgtcttcagtaatcaaggaggtct

SEQ ID NO: 72290 - DNA, 25 bp, Artificial
  Probe
tgtgtcttcagtaatcaaggaggtc

SEQ ID NO: 72291 - DNA, 25 bp, Artificial
  Probe
tgtcttcagtaatcaaggaggtctg

SEQ ID NO: 72292 - DNA, 25 bp, Artificial
  Probe
ctgtgtcttcagtaatcaaggaggt

SEQ ID NO: 72293 - DNA, 25 bp, Artificial
  Probe
gtcttcagtaatcaaggaggtctgg

SEQ ID NO: 72294 - DNA, 25 bp, Artificial
  Probe
cttcagtaatcaaggaggtctggtg

SEQ ID NO: 72295 - DNA, 25 bp, Artificial
  Probe
tgttagttggaagctactgtgtctt

SEQ ID NO: 72296 - DNA, 25 bp, Artificial
  Probe
tcttcagtaatcaaggaggtctggt

SEQ ID NO: 72297 - DNA, 25 bp, Artificial
  Probe
gtgttagttggaagctactgtgtct

SEQ ID NO: 72298 - DNA, 25 bp, Artificial
  Probe
ggtgttagttggaagctactgtgtc

SEQ ID NO: 72299 - DNA, 25 bp, Artificial
  Probe
gttagttggaagctactgtgtcttc

SEQ ID NO: 72300 - DNA, 25 bp, Artificial
  Probe
caggtgttagttggaagctactgtg

SEQ ID NO: 72301 - DNA, 25 bp, Artificial
  Probe
ttagttggaagctactgtgtcttca

SEQ ID NO: 72302 - DNA, 25 bp, Artificial
  Probe
aggtgttagttggaagctactgtgt

SEQ ID NO: 72303 - DNA, 25 bp, Artificial
  Probe
tagttggaagctactgtgtcttcag

SEQ ID NO: 72304 - DNA, 25 bp, Artificial
  Probe
ttcagtaatcaaggaggtctggtgc

SEQ ID NO: 72305 - DNA, 25 bp, Artificial
  Probe
ggagagtgtcttcaagctgaatgaa

SEQ ID NO: 72306 - DNA, 25 bp, Artificial
  Probe
gtcagtggtggagagtgtcttcaag

SEQ ID NO: 72307 - DNA, 25 bp, Artificial
  Probe
actgtgtcttcagtaatcaaggagg

SEQ ID NO: 72308 - DNA, 25 bp, Artificial
  Probe
gaccaggtgttagttggaagctact

SEQ ID NO: 72309 - DNA, 25 bp, Artificial
  Probe
ctgaccaggtgttagttggaagcta

SEQ ID NO: 72310 - DNA, 25 bp, Artificial
  Probe
ccaggtgttagttggaagctactgt

SEQ ID NO: 72311 - DNA, 25 bp, Artificial
  Probe
accaggtgttagttggaagctactg

SEQ ID NO: 72312 - DNA, 25 bp, Artificial
  Probe
tgaccaggtgttagttggaagctac

SEQ ID NO: 72313 - DNA, 25 bp, Artificial
  Probe
gtggagagtgtcttcaagctgaatg

SEQ ID NO: 72314 - DNA, 25 bp, Artificial
  Probe
tggagagtgtcttcaagctgaatga

SEQ ID NO: 72315 - DNA, 25 bp, Artificial
  Probe
ttgctgaccaggtgttagttggaag

SEQ ID NO: 72316 - DNA, 25 bp, Artificial
  Probe
ggtggagagtgtcttcaagctgaat

SEQ ID NO: 72317 - DNA, 25 bp, Artificial
  Probe
agttggaagctactgtgtcttcagt

SEQ ID NO: 72318 - DNA, 25 bp, Artificial
  Probe
tcattgacagcctcacatgagtcac

SEQ ID NO: 72319 - DNA, 25 bp, Artificial
  Probe
tggtaacaatataacagaggactcc

SEQ ID NO: 72320 - DNA, 25 bp, Artificial
  Probe
gttggtaacaatataacagaggact

SEQ ID NO: 72321 - DNA, 25 bp, Artificial
  Probe
ttggtaacaatataacagaggactc

SEQ ID NO: 72322 - DNA, 25 bp, Artificial
  Probe
tatacccatttcaacaatccgaagt

SEQ ID NO: 72323 - DNA, 25 bp, Artificial
  Probe
ggtaacaatataacagaggactcct

SEQ ID NO: 72324 - DNA, 25 bp, Artificial
  Probe
ttatacccatttcaacaatccgaag

SEQ ID NO: 72325 - DNA, 25 bp, Artificial
  Probe
aacaatataacagaggactccttct

SEQ ID NO: 72326 - DNA, 25 bp, Artificial
  Probe
tttatacccatttcaacaatccgaa

SEQ ID NO: 72327 - DNA, 25 bp, Artificial
  Probe
tcaaagaaggaagcagaggaaacta

SEQ ID NO: 72328 - DNA, 25 bp, Artificial
  Probe
aggaaactagagactgttctttacc

SEQ ID NO: 72329 - DNA, 25 bp, Artificial
  Probe
aaagaaggaagcagaggaaactaga

SEQ ID NO: 72330 - DNA, 25 bp, Artificial
  Probe
caaagaaggaagcagaggaaactag

SEQ ID NO: 72331 - DNA, 25 bp, Artificial
  Probe
atacccatttcaacaatccgaagtg

SEQ ID NO: 72332 - DNA, 25 bp, Artificial
  Probe
acaatataacagaggactccttcta

SEQ ID NO: 72333 - DNA, 25 bp, Artificial
  Probe
aagaaggaagcagaggaaactagag

SEQ ID NO: 72334 - DNA, 25 bp, Artificial
  Probe
gaggaaactagagactgttctttac

SEQ ID NO: 72335 - DNA, 25 bp, Artificial
  Probe
agaggaaactagagactgttcttta

SEQ ID NO: 72336 - DNA, 25 bp, Artificial
  Probe
cagaggaaactagagactgttcttt

SEQ ID NO: 72337 - DNA, 25 bp, Artificial
  Probe
gtaacaatataacagaggactcctt

SEQ ID NO: 72338 - DNA, 25 bp, Artificial
  Probe
ttcaaagaaggaagcagaggaaact

SEQ ID NO: 72339 - DNA, 25 bp, Artificial
  Probe
taacaatataacagaggactccttc

SEQ ID NO: 72340 - DNA, 25 bp, Artificial
  Probe
tctgctgaatgataaatcaactctt

SEQ ID NO: 72341 - DNA, 25 bp, Artificial
  Probe
ttctgctgaatgataaatcaactct

SEQ ID NO: 72342 - DNA, 25 bp, Artificial
  Probe
cccgtattctgctgaatgataaatc

SEQ ID NO: 72343 - DNA, 25 bp, Artificial
  Probe
taccctgacattcccaaagacaaag

SEQ ID NO: 72344 - DNA, 25 bp, Artificial
  Probe
ctaccctgacattcccaaagacaaa

SEQ ID NO: 72345 - DNA, 25 bp, Artificial
  Probe
gaaggaagcagaggaaactagagac

SEQ ID NO: 72346 - DNA, 25 bp, Artificial
  Probe
ctgctgaatgataaatcaactcttc

SEQ ID NO: 72347 - DNA, 25 bp, Artificial
  Probe
agaaggaagcagaggaaactagaga

SEQ ID NO: 72348 - DNA, 25 bp, Artificial
  Probe
catttcaacaatccgaagtgattcc

SEQ ID NO: 72349 - DNA, 25 bp, Artificial
  Probe
ccatttcaacaatccgaagtgattc

SEQ ID NO: 72350 - DNA, 25 bp, Artificial
  Probe
caatataacagaggactccttctaa

SEQ ID NO: 72351 - DNA, 25 bp, Artificial
  Probe
tacccatttcaacaatccgaagtga

SEQ ID NO: 72352 - DNA, 25 bp, Artificial
  Probe
ccgtattctgctgaatgataaatca

SEQ ID NO: 72353 - DNA, 25 bp, Artificial
  Probe
atttcaacaatccgaagtgattcca

SEQ ID NO: 72354 - DNA, 25 bp, Artificial
  Probe
aaggaagcagaggaaactagagact

SEQ ID NO: 72355 - DNA, 25 bp, Artificial
  Probe
ccagtgttggtaacaatataacaga

SEQ ID NO: 72356 - DNA, 25 bp, Artificial
  Probe
gcagaggaaactagagactgttctt

SEQ ID NO: 72357 - DNA, 25 bp, Artificial
  Probe
aagcagaggaaactagagactgttc

SEQ ID NO: 72358 - DNA, 25 bp, Artificial
  Probe
gaagcagaggaaactagagactgtt

SEQ ID NO: 72359 - DNA, 25 bp, Artificial
  Probe
aagacagctttaagaaaccagtgtt

SEQ ID NO: 72360 - DNA, 25 bp, Artificial
  Probe
tgttggtaacaatataacagaggac

SEQ ID NO: 72361 - DNA, 25 bp, Artificial
  Probe
gtgttggtaacaatataacagagga

SEQ ID NO: 72362 - DNA, 25 bp, Artificial
  Probe
agtgttggtaacaatataacagagg

SEQ ID NO: 72363 - DNA, 25 bp, Artificial
  Probe
acccatttcaacaatccgaagtgat

SEQ ID NO: 72364 - DNA, 25 bp, Artificial
  Probe
cttcctggtgctcatcttgttagtc

SEQ ID NO: 72365 - DNA, 25 bp, Artificial
  Probe
ttcctggtgctcatcttgttagtct

SEQ ID NO: 72366 - DNA, 25 bp, Artificial
  Probe
acctcttgtgtatccttcactttac

SEQ ID NO: 72367 - DNA, 25 bp, Artificial
  Probe
ttccttcctggtgctcatcttgtta

SEQ ID NO: 72368 - DNA, 25 bp, Artificial
  Probe
atacctcttgtgtatccttcacttt

SEQ ID NO: 72369 - DNA, 25 bp, Artificial
  Probe
ctcttgtgtatccttcactttaccc

SEQ ID NO: 72370 - DNA, 25 bp, Artificial
  Probe
cctcttgtgtatccttcactttacc

SEQ ID NO: 72371 - DNA, 25 bp, Artificial
  Probe
tcctggtgctcatcttgttagtctc

SEQ ID NO: 72372 - DNA, 25 bp, Artificial
  Probe
ctcatcttgttagtctccctcctct

SEQ ID NO: 72373 - DNA, 25 bp, Artificial
  Probe
tacctcttgtgtatccttcacttta

SEQ ID NO: 72374 - DNA, 25 bp, Artificial
  Probe
tcatcttgttagtctccctcctctg

SEQ ID NO: 72375 - DNA, 25 bp, Artificial
  Probe
tccttcctggtgctcatcttgttag

SEQ ID NO: 72376 - DNA, 25 bp, Artificial
  Probe
ccttcctggtgctcatcttgttagt

SEQ ID NO: 72377 - DNA, 25 bp, Artificial
  Probe
cttcggatttggtggcggtatttat

SEQ ID NO: 72378 - DNA, 25 bp, Artificial
  Probe
cctggtgctcatcttgttagtctcc

SEQ ID NO: 72379 - DNA, 25 bp, Artificial
  Probe
ttcggatttggtggcggtatttatg

SEQ ID NO: 72380 - DNA, 25 bp, Artificial
  Probe
cttccttcctggtgctcatcttgtt

SEQ ID NO: 72381 - DNA, 25 bp, Artificial
  Probe
gctcatcttgttagtctccctcctc

SEQ ID NO: 72382 - DNA, 25 bp, Artificial
  Probe
ttcagccctgatacctcttgtgtat

SEQ ID NO: 72383 - DNA, 25 bp, Artificial
  Probe
catcttgttagtctccctcctctgc

SEQ ID NO: 72384 - DNA, 25 bp, Artificial
  Probe
gtcttccttcctggtgctcatcttg

SEQ ID NO: 72385 - DNA, 25 bp, Artificial
  Probe
gatacctcttgtgtatccttcactt

SEQ ID NO: 72386 - DNA, 25 bp, Artificial
  Probe
ctgatacctcttgtgtatccttcac

SEQ ID NO: 72387 - DNA, 25 bp, Artificial
  Probe
cttcagccctgatacctcttgtgta

SEQ ID NO: 72388 - DNA, 25 bp, Artificial
  Probe
tgatacctcttgtgtatccttcact

SEQ ID NO: 72389 - DNA, 25 bp, Artificial
  Probe
gtgctcatcttgttagtctccctcc

SEQ ID NO: 72390 - DNA, 25 bp, Artificial
  Probe
ggtgctcatcttgttagtctccctc

SEQ ID NO: 72391 - DNA, 25 bp, Artificial
  Probe
cctgatacctcttgtgtatccttca

SEQ ID NO: 72392 - DNA, 25 bp, Artificial
  Probe
tgctcatcttgttagtctccctcct

SEQ ID NO: 72393 - DNA, 25 bp, Artificial
  Probe
gatttggtggcggtatttatggcag

SEQ ID NO: 72394 - DNA, 25 bp, Artificial
  Probe
tcttgtgtatccttcactttacccc

SEQ ID NO: 72395 - DNA, 25 bp, Artificial
  Probe
ctggtgctcatcttgttagtctccc

SEQ ID NO: 72396 - DNA, 25 bp, Artificial
  Probe
tggtgctcatcttgttagtctccct

SEQ ID NO: 72397 - DNA, 25 bp, Artificial
  Probe
gagcctcgtagcttcttctcaactt

SEQ ID NO: 72398 - DNA, 25 bp, Artificial
  Probe
aagagatccccacgatagacaagac

SEQ ID NO: 72399 - DNA, 25 bp, Artificial
  Probe
caagagatccccacgatagacaaga

SEQ ID NO: 72400 - DNA, 25 bp, Artificial
  Probe
atcttgttagtctccctcctctgcc

SEQ ID NO: 72401 - DNA, 25 bp, Artificial
  Probe
agcctcgtagcttcttctcaacttg

SEQ ID NO: 72402 - DNA, 25 bp, Artificial
  Probe
cctcgtagcttcttctcaacttggg

SEQ ID NO: 72403 - DNA, 25 bp, Artificial
  Probe
ccctgatacctcttgtgtatccttc

SEQ ID NO: 72404 - DNA, 25 bp, Artificial
  Probe
gagatccccacgatagacaagacag

SEQ ID NO: 72405 - DNA, 25 bp, Artificial
  Probe
ccaagagatccccacgatagacaag

SEQ ID NO: 72406 - DNA, 25 bp, Artificial
  Probe
agagatccccacgatagacaagaca

SEQ ID NO: 72407 - DNA, 25 bp, Artificial
  Probe
catcaccaagagatccccacgatag

SEQ ID NO: 72408 - DNA, 25 bp, Artificial
  Probe
atcaccaagagatccccacgataga

SEQ ID NO: 72409 - DNA, 25 bp, Artificial
  Probe
attgtgggtatggaattaaagtgac

SEQ ID NO: 72410 - DNA, 25 bp, Artificial
  Probe
ttacactgcggaacagacatattta

SEQ ID NO: 72411 - DNA, 25 bp, Artificial
  Probe
tttacactgcggaacagacatattt

SEQ ID NO: 72412 - DNA, 25 bp, Artificial
  Probe
aattgtgggtatggaattaaagtga

SEQ ID NO: 72413 - DNA, 25 bp, Artificial
  Probe
gtttacactgcggaacagacatatt

SEQ ID NO: 72414 - DNA, 25 bp, Artificial
  Probe
aaattgtgggtatggaattaaagtg

SEQ ID NO: 72415 - DNA, 25 bp, Artificial
  Probe
ggtttacactgcggaacagacatat

SEQ ID NO: 72416 - DNA, 25 bp, Artificial
  Probe
atctgtaaaattgtgggtatggaat

SEQ ID NO: 72417 - DNA, 25 bp, Artificial
  Probe
gatctgtaaaattgtgggtatggaa

SEQ ID NO: 72418 - DNA, 25 bp, Artificial
  Probe
tctgtaaaattgtgggtatggaatt

SEQ ID NO: 72419 - DNA, 25 bp, Artificial
  Probe
tggtttacactgcggaacagacata

SEQ ID NO: 72420 - DNA, 25 bp, Artificial
  Probe
aaaattgtgggtatggaattaaagt

SEQ ID NO: 72421 - DNA, 25 bp, Artificial
  Probe
ctgtaaaattgtgggtatggaatta

SEQ ID NO: 72422 - DNA, 25 bp, Artificial
  Probe
agatctgtaaaattgtgggtatgga

SEQ ID NO: 72423 - DNA, 25 bp, Artificial
  Probe
tgtaaaattgtgggtatggaattaa

SEQ ID NO: 72424 - DNA, 25 bp, Artificial
  Probe
gagatctgtaaaattgtgggtatgg

SEQ ID NO: 72425 - DNA, 25 bp, Artificial
  Probe
tgagatctgtaaaattgtgggtatg

SEQ ID NO: 72426 - DNA, 25 bp, Artificial
  Probe
gtaaaattgtgggtatggaattaaa

SEQ ID NO: 72427 - DNA, 25 bp, Artificial
  Probe
taaaattgtgggtatggaattaaag

SEQ ID NO: 72428 - DNA, 25 bp, Artificial
  Probe
attgaggttcccagacctagtgttt

SEQ ID NO: 72429 - DNA, 25 bp, Artificial
  Probe
cattgaggttcccagacctagtgtt

SEQ ID NO: 72430 - DNA, 25 bp, Artificial
  Probe
ttgaggttcccagacctagtgtttg

SEQ ID NO: 72431 - DNA, 25 bp, Artificial
  Probe
gatggtttaagtaatcgggactcta

SEQ ID NO: 72432 - DNA, 25 bp, Artificial
  Probe
tagatggtttaagtaatcgggactc

SEQ ID NO: 72433 - DNA, 25 bp, Artificial
  Probe
cttctgaggactccttgcttactta

SEQ ID NO: 72434 - DNA, 25 bp, Artificial
  Probe
agatggtttaagtaatcgggactct

SEQ ID NO: 72435 - DNA, 25 bp, Artificial
  Probe
atggtttaagtaatcgggactctag

SEQ ID NO: 72436 - DNA, 25 bp, Artificial
  Probe
gtttaagtaatcgggactctagcac

SEQ ID NO: 72437 - DNA, 25 bp, Artificial
  Probe
ttaagtaatcgggactctagcacat

SEQ ID NO: 72438 - DNA, 25 bp, Artificial
  Probe
tttaagtaatcgggactctagcaca

SEQ ID NO: 72439 - DNA, 25 bp, Artificial
  Probe
taagtaatcgggactctagcacatc

SEQ ID NO: 72440 - DNA, 25 bp, Artificial
  Probe
ggtttaagtaatcgggactctagca

SEQ ID NO: 72441 - DNA, 25 bp, Artificial
  Probe
tggtttaagtaatcgggactctagc

SEQ ID NO: 72442 - DNA, 25 bp, Artificial
  Probe
gtaatcgggactctagcacatcttg

SEQ ID NO: 72443 - DNA, 25 bp, Artificial
  Probe
taatcgggactctagcacatcttga

SEQ ID NO: 72444 - DNA, 25 bp, Artificial
  Probe
acttctgaggactccttgcttactt

SEQ ID NO: 72445 - DNA, 25 bp, Artificial
  Probe
agtaatcgggactctagcacatctt

SEQ ID NO: 72446 - DNA, 25 bp, Artificial
  Probe
aagtaatcgggactctagcacatct

SEQ ID NO: 72447 - DNA, 25 bp, Artificial
  Probe
gctggtttgttgttttgttttgttt

SEQ ID NO: 72448 - DNA, 25 bp, Artificial
  Probe
ctgtgtttcatcccagaatttgctg

SEQ ID NO: 72449 - DNA, 25 bp, Artificial
  Probe
ctggtttgttgttttgttttgtttt

SEQ ID NO: 72450 - DNA, 25 bp, Artificial
  Probe
cacttctgaggactccttgcttact

SEQ ID NO: 72451 - DNA, 25 bp, Artificial
  Probe
gacacttctgaggactccttgctta

SEQ ID NO: 72452 - DNA, 25 bp, Artificial
  Probe
acacttctgaggactccttgcttac

SEQ ID NO: 72453 - DNA, 25 bp, Artificial
  Probe
cgctggtttgttgttttgttttgtt

SEQ ID NO: 72454 - DNA, 25 bp, Artificial
  Probe
cctgtgtttcatcccagaatttgct

SEQ ID NO: 72455 - DNA, 25 bp, Artificial
  Probe
aatcgggactctagcacatcttgac

SEQ ID NO: 72456 - DNA, 25 bp, Artificial
  Probe
tgtgtttcatcccagaatttgctgc

SEQ ID NO: 72457 - DNA, 25 bp, Artificial
  Probe
ccctgtgtttcatcccagaatttgc

SEQ ID NO: 72458 - DNA, 25 bp, Artificial
  Probe
gccctgtgtttcatcccagaatttg

SEQ ID NO: 72459 - DNA, 25 bp, Artificial
  Probe
ttcatcccagaatttgctgccagat

SEQ ID NO: 72460 - DNA, 25 bp, Artificial
  Probe
gtttcatcccagaatttgctgccag

SEQ ID NO: 72461 - DNA, 25 bp, Artificial
  Probe
tttcatcccagaatttgctgccaga

SEQ ID NO: 72462 - DNA, 25 bp, Artificial
  Probe
gtgtttcatcccagaatttgctgcc

SEQ ID NO: 72463 - DNA, 25 bp, Artificial
  Probe
aaaccagatgaagaaattaccttct

SEQ ID NO: 72464 - DNA, 25 bp, Artificial
  Probe
ttcttttaaacgggtggtgagataa

SEQ ID NO: 72465 - DNA, 25 bp, Artificial
  Probe
tttcttttaaacgggtggtgagata

SEQ ID NO: 72466 - DNA, 25 bp, Artificial
  Probe
tcttttaaacgggtggtgagataaa

SEQ ID NO: 72467 - DNA, 25 bp, Artificial
  Probe
ttttcttttaaacgggtggtgagat

SEQ ID NO: 72468 - DNA, 25 bp, Artificial
  Probe
taaaccagatgaagaaattaccttc

SEQ ID NO: 72469 - DNA, 25 bp, Artificial
  Probe
gagaggaacatcctgtgaggagtag

SEQ ID NO: 72470 - DNA, 25 bp, Artificial
  Probe
cttttaaacgggtggtgagataaaa

SEQ ID NO: 72471 - DNA, 25 bp, Artificial
  Probe
gaggaacatcctgtgaggagtagtg

SEQ ID NO: 72472 - DNA, 25 bp, Artificial
  Probe
agaggaacatcctgtgaggagtagt

SEQ ID NO: 72473 - DNA, 25 bp, Artificial
  Probe
accagatgaagaaattaccttcttt

SEQ ID NO: 72474 - DNA, 25 bp, Artificial
  Probe
aaccagatgaagaaattaccttctt

SEQ ID NO: 72475 - DNA, 25 bp, Artificial
  Probe
cagtgtcctccccagaatacctttg

SEQ ID NO: 72476 - DNA, 25 bp, Artificial
  Probe
ggagaggaacatcctgtgaggagta

SEQ ID NO: 72477 - DNA, 25 bp, Artificial
  Probe
gaacatcctgtgaggagtagtgcag

SEQ ID NO: 72478 - DNA, 25 bp, Artificial
  Probe
ccagatgaagaaattaccttctttt

SEQ ID NO: 72479 - DNA, 25 bp, Artificial
  Probe
aagtagtggttacaggttatcatct

SEQ ID NO: 72480 - DNA, 25 bp, Artificial
  Probe
tctaagtagtggttacaggttatca

SEQ ID NO: 72481 - DNA, 25 bp, Artificial
  Probe
gtggttacaggttatcatctggata

SEQ ID NO: 72482 - DNA, 25 bp, Artificial
  Probe
tagtggttacaggttatcatctgga

SEQ ID NO: 72483 - DNA, 25 bp, Artificial
  Probe
gtagtggttacaggttatcatctgg

SEQ ID NO: 72484 - DNA, 25 bp, Artificial
  Probe
agtagtggttacaggttatcatctg

SEQ ID NO: 72485 - DNA, 25 bp, Artificial
  Probe
gacttctaagtagtggttacaggtt

SEQ ID NO: 72486 - DNA, 25 bp, Artificial
  Probe
agtggttacaggttatcatctggat

SEQ ID NO: 72487 - DNA, 25 bp, Artificial
  Probe
ggacttctaagtagtggttacaggt

SEQ ID NO: 72488 - DNA, 25 bp, Artificial
  Probe
taagtagtggttacaggttatcatc

SEQ ID NO: 72489 - DNA, 25 bp, Artificial
  Probe
ctaagtagtggttacaggttatcat

SEQ ID NO: 72490 - DNA, 25 bp, Artificial
  Probe
gactctgtcacaagcaagaatgtta

SEQ ID NO: 72491 - DNA, 25 bp, Artificial
  Probe
acttctaagtagtggttacaggtta

SEQ ID NO: 72492 - DNA, 25 bp, Artificial
  Probe
ttctaagtagtggttacaggttatc

SEQ ID NO: 72493 - DNA, 25 bp, Artificial
  Probe
cttctaagtagtggttacaggttat

SEQ ID NO: 72494 - DNA, 25 bp, Artificial
  Probe
tatcatctggataagcacagttcgt

SEQ ID NO: 72495 - DNA, 25 bp, Artificial
  Probe
atttacctatctgacggcttagttt

SEQ ID NO: 72496 - DNA, 25 bp, Artificial
  Probe
catttacctatctgacggcttagtt

SEQ ID NO: 72497 - DNA, 25 bp, Artificial
  Probe
aaacaacacatttacctatctgacg

SEQ ID NO: 72498 - DNA, 25 bp, Artificial
  Probe
tggaaacaacacatttacctatctg

SEQ ID NO: 72499 - DNA, 25 bp, Artificial
  Probe
cacatttacctatctgacggcttag

SEQ ID NO: 72500 - DNA, 25 bp, Artificial
  Probe
ggaaacaacacatttacctatctga

SEQ ID NO: 72501 - DNA, 25 bp, Artificial
  Probe
aacaacacatttacctatctgacgg

SEQ ID NO: 72502 - DNA, 25 bp, Artificial
  Probe
acatttacctatctgacggcttagt

SEQ ID NO: 72503 - DNA, 25 bp, Artificial
  Probe
atcatctggataagcacagttcgtt

SEQ ID NO: 72504 - DNA, 25 bp, Artificial
  Probe
tcatttggaaacaacacatttacct

SEQ ID NO: 72505 - DNA, 25 bp, Artificial
  Probe
acacatttacctatctgacggctta

SEQ ID NO: 72506 - DNA, 25 bp, Artificial
  Probe
ttcatttggaaacaacacatttacc

SEQ ID NO: 72507 - DNA, 25 bp, Artificial
  Probe
gaaacaacacatttacctatctgac

SEQ ID NO: 72508 - DNA, 25 bp, Artificial
  Probe
ttggaaacaacacatttacctatct

SEQ ID NO: 72509 - DNA, 25 bp, Artificial
  Probe
aacacatttacctatctgacggctt

SEQ ID NO: 72510 - DNA, 25 bp, Artificial
  Probe
catttggaaacaacacatttaccta

SEQ ID NO: 72511 - DNA, 25 bp, Artificial
  Probe
agggacttctaagtagtggttacag

SEQ ID NO: 72512 - DNA, 25 bp, Artificial
  Probe
gttcatttggaaacaacacatttac

SEQ ID NO: 72513 - DNA, 25 bp, Artificial
  Probe
tttggaaacaacacatttacctatc

SEQ ID NO: 72514 - DNA, 25 bp, Artificial
  Probe
cagggacttctaagtagtggttaca

SEQ ID NO: 72515 - DNA, 25 bp, Artificial
  Probe
tcatctggataagcacagttcgttg

SEQ ID NO: 72516 - DNA, 25 bp, Artificial
  Probe
catctggataagcacagttcgttgt

SEQ ID NO: 72517 - DNA, 25 bp, Artificial
  Probe
tacaggttatcatctggataagcac

SEQ ID NO: 72518 - DNA, 25 bp, Artificial
  Probe
gggacttctaagtagtggttacagg

SEQ ID NO: 72519 - DNA, 25 bp, Artificial
  Probe
gttatcatctggataagcacagttc

SEQ ID NO: 72520 - DNA, 25 bp, Artificial
  Probe
gggtctggagaaatacctatgagaa

SEQ ID NO: 72521 - DNA, 25 bp, Artificial
  Probe
caacacatttacctatctgacggct

SEQ ID NO: 72522 - DNA, 25 bp, Artificial
  Probe
ggttatcatctggataagcacagtt

SEQ ID NO: 72523 - DNA, 25 bp, Artificial
  Probe
ttatcatctggataagcacagttcg

SEQ ID NO: 72524 - DNA, 25 bp, Artificial
  Probe
agaacaggctctaatgactgaacag

SEQ ID NO: 72525 - DNA, 25 bp, Artificial
  Probe
ccctaatctccatccagaagtttaa

SEQ ID NO: 72526 - DNA, 25 bp, Artificial
  Probe
taatgactgaacagggaaggaagaa

SEQ ID NO: 72527 - DNA, 25 bp, Artificial
  Probe
cagaacaggctctaatgactgaaca

SEQ ID NO: 72528 - DNA, 25 bp, Artificial
  Probe
ctggaatactcagagtggaagtctc

SEQ ID NO: 72529 - DNA, 25 bp, Artificial
  Probe
gaatactcagagtggaagtctcgtc

SEQ ID NO: 72530 - DNA, 25 bp, Artificial
  Probe
ctaatgactgaacagggaaggaaga

SEQ ID NO: 72531 - DNA, 25 bp, Artificial
  Probe
tctaatgactgaacagggaaggaag

SEQ ID NO: 72532 - DNA, 25 bp, Artificial
  Probe
ctctaatgactgaacagggaaggaa

SEQ ID NO: 72533 - DNA, 25 bp, Artificial
  Probe
ttccatccagaacaggctctaatga

SEQ ID NO: 72534 - DNA, 25 bp, Artificial
  Probe
ttctaatggagcagcagtgaatgtg

SEQ ID NO: 72535 - DNA, 25 bp, Artificial
  Probe
catccagaacaggctctaatgactg

SEQ ID NO: 72536 - DNA, 25 bp, Artificial
  Probe
attctaatggagcagcagtgaatgt

SEQ ID NO: 72537 - DNA, 25 bp, Artificial
  Probe
atccagaacaggctctaatgactga

SEQ ID NO: 72538 - DNA, 25 bp, Artificial
  Probe
gaacaggctctaatgactgaacagg

SEQ ID NO: 72539 - DNA, 25 bp, Artificial
  Probe
ccagaacaggctctaatgactgaac

SEQ ID NO: 72540 - DNA, 25 bp, Artificial
  Probe
tccagaacaggctctaatgactgaa

SEQ ID NO: 72541 - DNA, 25 bp, Artificial
  Probe
ccaaactgtgtgaacttgacttgtt

SEQ ID NO: 72542 - DNA, 25 bp, Artificial
  Probe
tgtatcacaggaatatggtttctac

SEQ ID NO: 72543 - DNA, 25 bp, Artificial
  Probe
ctccaaactgtgtgaacttgacttg

SEQ ID NO: 72544 - DNA, 25 bp, Artificial
  Probe
tttccatccagaacaggctctaatg

SEQ ID NO: 72545 - DNA, 25 bp, Artificial
  Probe
gtttccatccagaacaggctctaat

SEQ ID NO: 72546 - DNA, 25 bp, Artificial
  Probe
cacaggaatatggtttctacctaga

SEQ ID NO: 72547 - DNA, 25 bp, Artificial
  Probe
tcacaggaatatggtttctacctag

SEQ ID NO: 72548 - DNA, 25 bp, Artificial
  Probe
aatgactgaacagggaaggaagaac

SEQ ID NO: 72549 - DNA, 25 bp, Artificial
  Probe
cttgttcgagtctacttggaaatca

SEQ ID NO: 72550 - DNA, 25 bp, Artificial
  Probe
ccatccagaacaggctctaatgact

SEQ ID NO: 72551 - DNA, 25 bp, Artificial
  Probe
tccatccagaacaggctctaatgac

SEQ ID NO: 72552 - DNA, 25 bp, Artificial
  Probe
ttgttcgagtctacttggaaatcac

SEQ ID NO: 72553 - DNA, 25 bp, Artificial
  Probe
atcacaggaatatggtttctaccta

SEQ ID NO: 72554 - DNA, 25 bp, Artificial
  Probe
tatcacaggaatatggtttctacct

SEQ ID NO: 72555 - DNA, 25 bp, Artificial
  Probe
gtatcacaggaatatggtttctacc

SEQ ID NO: 72556 - DNA, 25 bp, Artificial
  Probe
acttgttcgagtctacttggaaatc

SEQ ID NO: 72557 - DNA, 25 bp, Artificial
  Probe
cgagtctacttggaaatcacctgtc

SEQ ID NO: 72558 - DNA, 25 bp, Artificial
  Probe
tgaacagggaaggaagaacacaaag

SEQ ID NO: 72559 - DNA, 25 bp, Artificial
  Probe
ctaatggagcagcagtgaatgtgtg

SEQ ID NO: 72560 - DNA, 25 bp, Artificial
  Probe
ggaatactcagagtggaagtctcgt

SEQ ID NO: 72561 - DNA, 25 bp, Artificial
  Probe
tggaatactcagagtggaagtctcg

SEQ ID NO: 72562 - DNA, 25 bp, Artificial
  Probe
ctgaacagggaaggaagaacacaaa

SEQ ID NO: 72563 - DNA, 25 bp, Artificial
  Probe
tctaatggagcagcagtgaatgtgt

SEQ ID NO: 72564 - DNA, 25 bp, Artificial
  Probe
cctaatctccatccagaagtttaaa

SEQ ID NO: 72565 - DNA, 25 bp, Artificial
  Probe
tccaaactgtgtgaacttgacttgt

SEQ ID NO: 72566 - DNA, 25 bp, Artificial
  Probe
ttgtatcacaggaatatggtttcta

SEQ ID NO: 72567 - DNA, 25 bp, Artificial
  Probe
tatctggaatactcagagtggaagt

SEQ ID NO: 72568 - DNA, 25 bp, Artificial
  Probe
catatctggaatactcagagtggaa

SEQ ID NO: 72569 - DNA, 25 bp, Artificial
  Probe
tatatgaccactgccttccaatatg

SEQ ID NO: 72570 - DNA, 25 bp, Artificial
  Probe
ctatatgaccactgccttccaatat

SEQ ID NO: 72571 - DNA, 25 bp, Artificial
  Probe
atagacaacagattctcaacagcag

SEQ ID NO: 72572 - DNA, 25 bp, Artificial
  Probe
agcatagacaacagattctcaacag

SEQ ID NO: 72573 - DNA, 25 bp, Artificial
  Probe
gttccttcagtaatgacactctcta

SEQ ID NO: 72574 - DNA, 25 bp, Artificial
  Probe
catagacaacagattctcaacagca

SEQ ID NO: 72575 - DNA, 25 bp, Artificial
  Probe
aagagcatagacaacagattctcaa

SEQ ID NO: 72576 - DNA, 25 bp, Artificial
  Probe
agagcatagacaacagattctcaac

SEQ ID NO: 72577 - DNA, 25 bp, Artificial
  Probe
gagcatagacaacagattctcaaca

SEQ ID NO: 72578 - DNA, 25 bp, Artificial
  Probe
atatgaccactgccttccaatatgt

SEQ ID NO: 72579 - DNA, 25 bp, Artificial
  Probe
ttccttcagtaatgacactctctat

SEQ ID NO: 72580 - DNA, 25 bp, Artificial
  Probe
gctatatgaccactgccttccaata

SEQ ID NO: 72581 - DNA, 25 bp, Artificial
  Probe
gaagaagtggttcagaagatgactg

SEQ ID NO: 72582 - DNA, 25 bp, Artificial
  Probe
gcatagacaacagattctcaacagc

SEQ ID NO: 72583 - DNA, 25 bp, Artificial
  Probe
cttcagtaatgacactctctatacc

SEQ ID NO: 72584 - DNA, 25 bp, Artificial
  Probe
ccttcagtaatgacactctctatac

SEQ ID NO: 72585 - DNA, 25 bp, Artificial
  Probe
tccttcagtaatgacactctctata

SEQ ID NO: 72586 - DNA, 25 bp, Artificial
  Probe
cgttccttcagtaatgacactctct

SEQ ID NO: 72587 - DNA, 25 bp, Artificial
  Probe
tagacaacagattctcaacagcagg

SEQ ID NO: 72588 - DNA, 25 bp, Artificial
  Probe
gggcaggatgaaagttgtatgtata

SEQ ID NO: 72589 - DNA, 25 bp, Artificial
  Probe
cgaagaagtggttcagaagatgact

SEQ ID NO: 72590 - DNA, 25 bp, Artificial
  Probe
aaagaaaggctatgttactccagtc

SEQ ID NO: 72591 - DNA, 25 bp, Artificial
  Probe
gaaagaaaggctatgttactccagt

SEQ ID NO: 72592 - DNA, 25 bp, Artificial
  Probe
ggcaggatgaaagttgtatgtataa

SEQ ID NO: 72593 - DNA, 25 bp, Artificial
  Probe
ggatgaaagttgtatgtataacgcc

SEQ ID NO: 72594 - DNA, 25 bp, Artificial
  Probe
atgaaagttgtatgtataacgccac

SEQ ID NO: 72595 - DNA, 25 bp, Artificial
  Probe
gacaacagattctcaacagcaggat

SEQ ID NO: 72596 - DNA, 25 bp, Artificial
  Probe
gatgaaagttgtatgtataacgcca

SEQ ID NO: 72597 - DNA, 25 bp, Artificial
  Probe
gttcagaagatgactggactcagag

SEQ ID NO: 72598 - DNA, 25 bp, Artificial
  Probe
aggatgaaagttgtatgtataacgc

SEQ ID NO: 72599 - DNA, 25 bp, Artificial
  Probe
cgaaagaaaggctatgttactccag

SEQ ID NO: 72600 - DNA, 25 bp, Artificial
  Probe
aagaagtggttcagaagatgactgg

SEQ ID NO: 72601 - DNA, 25 bp, Artificial
  Probe
acaacagattctcaacagcaggatg

SEQ ID NO: 72602 - DNA, 25 bp, Artificial
  Probe
aaagagcatagacaacagattctca

SEQ ID NO: 72603 - DNA, 25 bp, Artificial
  Probe
ttcagtaatgacactctctataccc

SEQ ID NO: 72604 - DNA, 25 bp, Artificial
  Probe
gatgaaatctctcggcgtttaattt

SEQ ID NO: 72605 - DNA, 25 bp, Artificial
  Probe
atgaaatctctcggcgtttaatttg

SEQ ID NO: 72606 - DNA, 25 bp, Artificial
  Probe
ggatgaaatctctcggcgtttaatt

SEQ ID NO: 72607 - DNA, 25 bp, Artificial
  Probe
tatgaccactgccttccaatatgtg

SEQ ID NO: 72608 - DNA, 25 bp, Artificial
  Probe
tgaaagttgtatgtataacgccacg

SEQ ID NO: 72609 - DNA, 25 bp, Artificial
  Probe
gcaggatgaaagttgtatgtataac

SEQ ID NO: 72610 - DNA, 25 bp, Artificial
  Probe
ttacagcagaggtgtgtactatgac

SEQ ID NO: 72611 - DNA, 25 bp, Artificial
  Probe
gaagtggttcagaagatgactggac

SEQ ID NO: 72612 - DNA, 25 bp, Artificial
  Probe
caggatgaaagttgtatgtataacg

SEQ ID NO: 72613 - DNA, 25 bp, Artificial
  Probe
aacagattctcaacagcaggatgtg

SEQ ID NO: 72614 - DNA, 25 bp, Artificial
  Probe
gatagatgccaggaagacagatgag

SEQ ID NO: 72615 - DNA, 25 bp, Artificial
  Probe
agatagatgccaggaagacagatga

SEQ ID NO: 72616 - DNA, 25 bp, Artificial
  Probe
cagatagatgccaggaagacagatg

SEQ ID NO: 72617 - DNA, 25 bp, Artificial
  Probe
atagatgccaggaagacagatgagt

SEQ ID NO: 72618 - DNA, 25 bp, Artificial
  Probe
tagatgccaggaagacagatgagtt

SEQ ID NO: 72619 - DNA, 25 bp, Artificial
  Probe
aagataacccgtgaatgtattcctg

SEQ ID NO: 72620 - DNA, 25 bp, Artificial
  Probe
caagataacccgtgaatgtattcct

SEQ ID NO: 72621 - DNA, 25 bp, Artificial
  Probe
aacaagataacccgtgaatgtattc

SEQ ID NO: 72622 - DNA, 25 bp, Artificial
  Probe
gagacaactaacccatacatgaacc

SEQ ID NO: 72623 - DNA, 25 bp, Artificial
  Probe
ggagacaactaacccatacatgaac

SEQ ID NO: 72624 - DNA, 25 bp, Artificial
  Probe
acaagataacccgtgaatgtattcc

SEQ ID NO: 72625 - DNA, 25 bp, Artificial
  Probe
caacggagacaactaacccatacat

SEQ ID NO: 72626 - DNA, 25 bp, Artificial
  Probe
taacaagataacccgtgaatgtatt

SEQ ID NO: 72627 - DNA, 25 bp, Artificial
  Probe
ttaacaagataacccgtgaatgtat

SEQ ID NO: 72628 - DNA, 25 bp, Artificial
  Probe
attaacaagataacccgtgaatgta

SEQ ID NO: 72629 - DNA, 25 bp, Artificial
  Probe
tattaacaagataacccgtgaatgt

SEQ ID NO: 72630 - DNA, 25 bp, Artificial
  Probe
cgtgaatgtattcctggaagagtgg

SEQ ID NO: 72631 - DNA, 25 bp, Artificial
  Probe
ccgtgaatgtattcctggaagagtg

SEQ ID NO: 72632 - DNA, 25 bp, Artificial
  Probe
gataacccgtgaatgtattcctgga

SEQ ID NO: 72633 - DNA, 25 bp, Artificial
  Probe
agataacccgtgaatgtattcctgg

SEQ ID NO: 72634 - DNA, 25 bp, Artificial
  Probe
ccaagctcaattcaggatctaacct

SEQ ID NO: 72635 - DNA, 25 bp, Artificial
  Probe
ataacccgtgaatgtattcctggaa

SEQ ID NO: 72636 - DNA, 25 bp, Artificial
  Probe
gtgaatgtattcctggaagagtggc

SEQ ID NO: 72637 - DNA, 25 bp, Artificial
  Probe
cggagacaactaacccatacatgaa

SEQ ID NO: 72638 - DNA, 25 bp, Artificial
  Probe
aacggagacaactaacccatacatg

SEQ ID NO: 72639 - DNA, 25 bp, Artificial
  Probe
agatgccaggaagacagatgagttg

SEQ ID NO: 72640 - DNA, 25 bp, Artificial
  Probe
taacccgtgaatgtattcctggaag

SEQ ID NO: 72641 - DNA, 25 bp, Artificial
  Probe
acggagacaactaacccatacatga

SEQ ID NO: 72642 - DNA, 25 bp, Artificial
  Probe
cccaagctcaattcaggatctaacc

SEQ ID NO: 72643 - DNA, 25 bp, Artificial
  Probe
gatgccaggaagacagatgagttgt

SEQ ID NO: 72644 - DNA, 25 bp, Artificial
  Probe
ccaacggagacaactaacccataca

SEQ ID NO: 72645 - DNA, 25 bp, Artificial
  Probe
atgccaggaagacagatgagttgtg

SEQ ID NO: 72646 - DNA, 25 bp, Artificial
  Probe
aacccgtgaatgtattcctggaaga

SEQ ID NO: 72647 - DNA, 25 bp, Artificial
  Probe
gcccaagctcaattcaggatctaac

SEQ ID NO: 72648 - DNA, 25 bp, Artificial
  Probe
gcagatagatgccaggaagacagat

SEQ ID NO: 72649 - DNA, 25 bp, Artificial
  Probe
cccgtgaatgtattcctggaagagt

SEQ ID NO: 72650 - DNA, 25 bp, Artificial
  Probe
acccgtgaatgtattcctggaagag

SEQ ID NO: 72651 - DNA, 25 bp, Artificial
  Probe
atcgaggagaaagctgtgaacagat

SEQ ID NO: 72652 - DNA, 25 bp, Artificial
  Probe
caagctcaattcaggatctaacctg

SEQ ID NO: 72653 - DNA, 25 bp, Artificial
  Probe
tgaatgtattcctggaagagtggcc

SEQ ID NO: 72654 - DNA, 25 bp, Artificial
  Probe
tcgaggagaaagctgtgaacagatt

SEQ ID NO: 72655 - DNA, 25 bp, Artificial
  Probe
ctcaattcaggatctaacctggagg

SEQ ID NO: 72656 - DNA, 25 bp, Artificial
  Probe
aagctcaattcaggatctaacctgg

SEQ ID NO: 72657 - DNA, 25 bp, Artificial
  Probe
gctcaattcaggatctaacctggag

SEQ ID NO: 72658 - DNA, 25 bp, Artificial
  Probe
catcgaggagaaagctgtgaacaga

SEQ ID NO: 72659 - DNA, 25 bp, Artificial
  Probe
gtttgccttaactttacagtcttcc

SEQ ID NO: 72660 - DNA, 25 bp, Artificial
  Probe
tttgccttaactttacagtcttccc

SEQ ID NO: 72661 - DNA, 25 bp, Artificial
  Probe
tgtttgccttaactttacagtcttc

SEQ ID NO: 72662 - DNA, 25 bp, Artificial
  Probe
agggtaaagggatgaggaaagtttg

SEQ ID NO: 72663 - DNA, 25 bp, Artificial
  Probe
cagggtaaagggatgaggaaagttt

SEQ ID NO: 72664 - DNA, 25 bp, Artificial
  Probe
ccttagctgtttgccttaactttac

SEQ ID NO: 72665 - DNA, 25 bp, Artificial
  Probe
accttagctgtttgccttaacttta

SEQ ID NO: 72666 - DNA, 25 bp, Artificial
  Probe
cttagctgtttgccttaactttaca

SEQ ID NO: 72667 - DNA, 25 bp, Artificial
  Probe
caccttagctgtttgccttaacttt

SEQ ID NO: 72668 - DNA, 25 bp, Artificial
  Probe
acagggtaaagggatgaggaaagtt

SEQ ID NO: 72669 - DNA, 25 bp, Artificial
  Probe
gtaaagggatgaggaaagtttgcag

SEQ ID NO: 72670 - DNA, 25 bp, Artificial
  Probe
taaagggatgaggaaagtttgcaga

SEQ ID NO: 72671 - DNA, 25 bp, Artificial
  Probe
gacagggtaaagggatgaggaaagt

SEQ ID NO: 72672 - DNA, 25 bp, Artificial
  Probe
tcaccttagctgtttgccttaactt

SEQ ID NO: 72673 - DNA, 25 bp, Artificial
  Probe
ttcaccttagctgtttgccttaact

SEQ ID NO: 72674 - DNA, 25 bp, Artificial
  Probe
tgacagggtaaagggatgaggaaag

SEQ ID NO: 72675 - DNA, 25 bp, Artificial
  Probe
gggtaaagggatgaggaaagtttgc

SEQ ID NO: 72676 - DNA, 25 bp, Artificial
  Probe
cttaactttacagtcttccccacag

SEQ ID NO: 72677 - DNA, 25 bp, Artificial
  Probe
ctgacagggtaaagggatgaggaaa

SEQ ID NO: 72678 - DNA, 25 bp, Artificial
  Probe
ggtaaagggatgaggaaagtttgca

SEQ ID NO: 72679 - DNA, 25 bp, Artificial
  Probe
ttaactttacagtcttccccacagg

SEQ ID NO: 72680 - DNA, 25 bp, Artificial
  Probe
ccttaactttacagtcttccccaca

SEQ ID NO: 72681 - DNA, 25 bp, Artificial
  Probe
aaagggatgaggaaagtttgcagac

SEQ ID NO: 72682 - DNA, 25 bp, Artificial
  Probe
ttgccttaactttacagtcttcccc

SEQ ID NO: 72683 - DNA, 25 bp, Artificial
  Probe
ctgtttgccttaactttacagtctt

SEQ ID NO: 72684 - DNA, 25 bp, Artificial
  Probe
ttagctgtttgccttaactttacag

SEQ ID NO: 72685 - DNA, 25 bp, Artificial
  Probe
gccttaactttacagtcttccccac

SEQ ID NO: 72686 - DNA, 25 bp, Artificial
  Probe
tagctgtttgccttaactttacagt

SEQ ID NO: 72687 - DNA, 25 bp, Artificial
  Probe
tgaaagttatttacaagatgatacc

SEQ ID NO: 72688 - DNA, 25 bp, Artificial
  Probe
gctgtttgccttaactttacagtct

SEQ ID NO: 72689 - DNA, 25 bp, Artificial
  Probe
tgccttaactttacagtcttcccca

SEQ ID NO: 72690 - DNA, 25 bp, Artificial
  Probe
agctgtttgccttaactttacagtc

SEQ ID NO: 72691 - DNA, 25 bp, Artificial
  Probe
gatgaggaaagtttgcagacggaac

SEQ ID NO: 72692 - DNA, 25 bp, Artificial
  Probe
gaggttaataaagcgcaacacttgg

SEQ ID NO: 72693 - DNA, 25 bp, Artificial
  Probe
ggaggttaataaagcgcaacacttg

SEQ ID NO: 72694 - DNA, 25 bp, Artificial
  Probe
atgggtcagttttgtaagggagcat

SEQ ID NO: 72695 - DNA, 25 bp, Artificial
  Probe
caagctgacagggtaaagggatgag

SEQ ID NO: 72696 - DNA, 25 bp, Artificial
  Probe
ggtcagttttgtaagggagcatgtg

SEQ ID NO: 72697 - DNA, 25 bp, Artificial
  Probe
gggaggttaataaagcgcaacactt

SEQ ID NO: 72698 - DNA, 25 bp, Artificial
  Probe
agatgaccacaaactctcagcttgg

SEQ ID NO: 72699 - DNA, 25 bp, Artificial
  Probe
gtcagttttgtaagggagcatgtgc

SEQ ID NO: 72700 - DNA, 25 bp, Artificial
  Probe
taactttacagtcttccccacaggg

SEQ ID NO: 72701 - DNA, 25 bp, Artificial
  Probe
cagggaggttaataaagcgcaacac

SEQ ID NO: 72702 - DNA, 25 bp, Artificial
  Probe
cacagggaggttaataaagcgcaac

SEQ ID NO: 72703 - DNA, 25 bp, Artificial
  Probe
gggtcagttttgtaagggagcatgt

SEQ ID NO: 72704 - DNA, 25 bp, Artificial
  Probe
ggtgcctgataataatgtcttgatt

SEQ ID NO: 72705 - DNA, 25 bp, Artificial
  Probe
aagatacagagtaagtggaggagtg

SEQ ID NO: 72706 - DNA, 25 bp, Artificial
  Probe
ttcttgtgattgtagtgatggcttc

SEQ ID NO: 72707 - DNA, 25 bp, Artificial
  Probe
gttcttgtgattgtagtgatggctt

SEQ ID NO: 72708 - DNA, 25 bp, Artificial
  Probe
ttgttcttgtgattgtagtgatggc

SEQ ID NO: 72709 - DNA, 25 bp, Artificial
  Probe
cttgtgattgtagtgatggcttcaa

SEQ ID NO: 72710 - DNA, 25 bp, Artificial
  Probe
tgttcttgtgattgtagtgatggct

SEQ ID NO: 72711 - DNA, 25 bp, Artificial
  Probe
agatacagagtaagtggaggagtgg

SEQ ID NO: 72712 - DNA, 25 bp, Artificial
  Probe
tcttgtgattgtagtgatggcttca

SEQ ID NO: 72713 - DNA, 25 bp, Artificial
  Probe
tttgttcttgtgattgtagtgatgg

SEQ ID NO: 72714 - DNA, 25 bp, Artificial
  Probe
caaagatacagagtaagtggaggag

SEQ ID NO: 72715 - DNA, 25 bp, Artificial
  Probe
ttcaaagatacagagtaagtggagg

SEQ ID NO: 72716 - DNA, 25 bp, Artificial
  Probe
gggtgcctgataataatgtcttgat

SEQ ID NO: 72717 - DNA, 25 bp, Artificial
  Probe
aaagatacagagtaagtggaggagt

SEQ ID NO: 72718 - DNA, 25 bp, Artificial
  Probe
tcaaagatacagagtaagtggagga

SEQ ID NO: 72719 - DNA, 25 bp, Artificial
  Probe
ttgtttgttcttgtgattgtagtga

SEQ ID NO: 72720 - DNA, 25 bp, Artificial
  Probe
tgtttgttcttgtgattgtagtgat

SEQ ID NO: 72721 - DNA, 25 bp, Artificial
  Probe
cttgtttgttcttgtgattgtagtg

SEQ ID NO: 72722 - DNA, 25 bp, Artificial
  Probe
gcttcaaagatacagagtaagtgga

SEQ ID NO: 72723 - DNA, 25 bp, Artificial
  Probe
atggcttcaaagatacagagtaagt

SEQ ID NO: 72724 - DNA, 25 bp, Artificial
  Probe
tggcttcaaagatacagagtaagtg

SEQ ID NO: 72725 - DNA, 25 bp, Artificial
  Probe
gtttgttcttgtgattgtagtgatg

SEQ ID NO: 72726 - DNA, 25 bp, Artificial
  Probe
gatggcttcaaagatacagagtaag

SEQ ID NO: 72727 - DNA, 25 bp, Artificial
  Probe
ataaccctaacctcatattgttgct

SEQ ID NO: 72728 - DNA, 25 bp, Artificial
  Probe
cataaccctaacctcatattgttgc

SEQ ID NO: 72729 - DNA, 25 bp, Artificial
  Probe
taaccctaacctcatattgttgctg

SEQ ID NO: 72730 - DNA, 25 bp, Artificial
  Probe
tctttcctttaatgtagatgctcgg

SEQ ID NO: 72731 - DNA, 25 bp, Artificial
  Probe
ttctttcctttaatgtagatgctcg

SEQ ID NO: 72732 - DNA, 25 bp, Artificial
  Probe
ggcttcaaagatacagagtaagtgg

SEQ ID NO: 72733 - DNA, 25 bp, Artificial
  Probe
tagtgatggcttcaaagatacagag

SEQ ID NO: 72734 - DNA, 25 bp, Artificial
  Probe
tgatggcttcaaagatacagagtaa

SEQ ID NO: 72735 - DNA, 25 bp, Artificial
  Probe
gtgatggcttcaaagatacagagta

SEQ ID NO: 72736 - DNA, 25 bp, Artificial
  Probe
gtagtgatggcttcaaagatacaga

SEQ ID NO: 72737 - DNA, 25 bp, Artificial
  Probe
tgattgtagtgatggcttcaaagat

SEQ ID NO: 72738 - DNA, 25 bp, Artificial
  Probe
cttcaaagatacagagtaagtggag

SEQ ID NO: 72739 - DNA, 25 bp, Artificial
  Probe
ctttcctttaatgtagatgctcggg

SEQ ID NO: 72740 - DNA, 25 bp, Artificial
  Probe
acttgtttgttcttgtgattgtagt

SEQ ID NO: 72741 - DNA, 25 bp, Artificial
  Probe
attgtagtgatggcttcaaagatac

SEQ ID NO: 72742 - DNA, 25 bp, Artificial
  Probe
ctttaatgtagatgctcgggtttcc

SEQ ID NO: 72743 - DNA, 25 bp, Artificial
  Probe
cctttaatgtagatgctcgggtttc

SEQ ID NO: 72744 - DNA, 25 bp, Artificial
  Probe
gattgtagtgatggcttcaaagata

SEQ ID NO: 72745 - DNA, 25 bp, Artificial
  Probe
ttgtgattgtagtgatggcttcaaa

SEQ ID NO: 72746 - DNA, 25 bp, Artificial
  Probe
gtgattgtagtgatggcttcaaaga

SEQ ID NO: 72747 - DNA, 25 bp, Artificial
  Probe
tcctttaatgtagatgctcgggttt

SEQ ID NO: 72748 - DNA, 25 bp, Artificial
  Probe
ttcctttaatgtagatgctcgggtt

SEQ ID NO: 72749 - DNA, 25 bp, Artificial
  Probe
cagagatgtggaagatgttgttgtc

SEQ ID NO: 72750 - DNA, 25 bp, Artificial
  Probe
agagatgtggaagatgttgttgtca

SEQ ID NO: 72751 - DNA, 25 bp, Artificial
  Probe
gagatgtggaagatgttgttgtcac

SEQ ID NO: 72752 - DNA, 25 bp, Artificial
  Probe
atgtggaagatgttgttgtcaccat

SEQ ID NO: 72753 - DNA, 25 bp, Artificial
  Probe
agatgtggaagatgttgttgtcacc

SEQ ID NO: 72754 - DNA, 25 bp, Artificial
  Probe
ccagagatgtggaagatgttgttgt

SEQ ID NO: 72755 - DNA, 25 bp, Artificial
  Probe
gatgtggaagatgttgttgtcacca

SEQ ID NO: 72756 - DNA, 25 bp, Artificial
  Probe
tgtggaagatgttgttgtcaccatg

SEQ ID NO: 72757 - DNA, 25 bp, Artificial
  Probe
gataagaagtatgcactgccctacc

SEQ ID NO: 72758 - DNA, 25 bp, Artificial
  Probe
cgataagaagtatgcactgccctac

SEQ ID NO: 72759 - DNA, 25 bp, Artificial
  Probe
tcgataagaagtatgcactgcccta

SEQ ID NO: 72760 - DNA, 25 bp, Artificial
  Probe
cccagagatgtggaagatgttgttg

SEQ ID NO: 72761 - DNA, 25 bp, Artificial
  Probe
gaagatgttgttgtcaccatggaat

SEQ ID NO: 72762 - DNA, 25 bp, Artificial
  Probe
aagatgttgttgtcaccatggaatg

SEQ ID NO: 72763 - DNA, 25 bp, Artificial
  Probe
gatgttgttgtcaccatggaatgag

SEQ ID NO: 72764 - DNA, 25 bp, Artificial
  Probe
ctgctcgataagaagtatgcactgc

SEQ ID NO: 72765 - DNA, 25 bp, Artificial
  Probe
gctgctcgataagaagtatgcactg

SEQ ID NO: 72766 - DNA, 25 bp, Artificial
  Probe
ctgctgctcgataagaagtatgcac

SEQ ID NO: 72767 - DNA, 25 bp, Artificial
  Probe
gttgttgtcaccatggaatgagaac

SEQ ID NO: 72768 - DNA, 25 bp, Artificial
  Probe
atgttgttgtcaccatggaatgaga

SEQ ID NO: 72769 - DNA, 25 bp, Artificial
  Probe
agatgttgttgtcaccatggaatga

SEQ ID NO: 72770 - DNA, 25 bp, Artificial
  Probe
ataagaagtatgcactgccctaccg

SEQ ID NO: 72771 - DNA, 25 bp, Artificial
  Probe
ctcgataagaagtatgcactgccct

SEQ ID NO: 72772 - DNA, 25 bp, Artificial
  Probe
tgctgctcgataagaagtatgcact

SEQ ID NO: 72773 - DNA, 25 bp, Artificial
  Probe
tgttgttgtcaccatggaatgagaa

SEQ ID NO: 72774 - DNA, 25 bp, Artificial
  Probe
ttgtcaccatggaatgagaacagtc

SEQ ID NO: 72775 - DNA, 25 bp, Artificial
  Probe
ggaagatgttgttgtcaccatggaa

SEQ ID NO: 72776 - DNA, 25 bp, Artificial
  Probe
gttgtcaccatggaatgagaacagt

SEQ ID NO: 72777 - DNA, 25 bp, Artificial
  Probe
gtcaccatggaatgagaacagtcac

SEQ ID NO: 72778 - DNA, 25 bp, Artificial
  Probe
cctgctgctcgataagaagtatgca

SEQ ID NO: 72779 - DNA, 25 bp, Artificial
  Probe
tagtcaggacactgaaaggttaccg

SEQ ID NO: 72780 - DNA, 25 bp, Artificial
  Probe
tgctcgataagaagtatgcactgcc

SEQ ID NO: 72781 - DNA, 25 bp, Artificial
  Probe
tgtcaccatggaatgagaacagtca

SEQ ID NO: 72782 - DNA, 25 bp, Artificial
  Probe
aggtactgtgtaagctcactgggtt

SEQ ID NO: 72783 - DNA, 25 bp, Artificial
  Probe
ccccagagatgtggaagatgttgtt

SEQ ID NO: 72784 - DNA, 25 bp, Artificial
  Probe
ttgttgtcaccatggaatgagaaca

SEQ ID NO: 72785 - DNA, 25 bp, Artificial
  Probe
caccatggaatgagaacagtcacct

SEQ ID NO: 72786 - DNA, 25 bp, Artificial
  Probe
tcaccatggaatgagaacagtcacc

SEQ ID NO: 72787 - DNA, 25 bp, Artificial
  Probe
tgttgtcaccatggaatgagaacag

SEQ ID NO: 72788 - DNA, 25 bp, Artificial
  Probe
gtggaagatgttgttgtcaccatgg

SEQ ID NO: 72789 - DNA, 25 bp, Artificial
  Probe
gtccccagagatgtggaagatgttg

SEQ ID NO: 72790 - DNA, 25 bp, Artificial
  Probe
tggaagatgttgttgtcaccatgga

SEQ ID NO: 72791 - DNA, 25 bp, Artificial
  Probe
agtccccagagatgtggaagatgtt

SEQ ID NO: 72792 - DNA, 25 bp, Artificial
  Probe
tctggtcttccattttctggccttc

SEQ ID NO: 72793 - DNA, 25 bp, Artificial
  Probe
ctctggtcttccattttctggcctt

SEQ ID NO: 72794 - DNA, 25 bp, Artificial
  Probe
ctgactgtttatttaaggatgggtg

SEQ ID NO: 72795 - DNA, 25 bp, Artificial
  Probe
tctgactgtttatttaaggatgggt

SEQ ID NO: 72796 - DNA, 25 bp, Artificial
  Probe
tgactgtttatttaaggatgggtgg

SEQ ID NO: 72797 - DNA, 25 bp, Artificial
  Probe
ctctgactgtttatttaaggatggg

SEQ ID NO: 72798 - DNA, 25 bp, Artificial
  Probe
gactgtttatttaaggatgggtggc

SEQ ID NO: 72799 - DNA, 25 bp, Artificial
  Probe
gccctctgactgtttatttaaggat

SEQ ID NO: 72800 - DNA, 25 bp, Artificial
  Probe
ctgtttatttaaggatgggtggcac

SEQ ID NO: 72801 - DNA, 25 bp, Artificial
  Probe
cctctgactgtttatttaaggatgg

SEQ ID NO: 72802 - DNA, 25 bp, Artificial
  Probe
ccctctgactgtttatttaaggatg

SEQ ID NO: 72803 - DNA, 25 bp, Artificial
  Probe
actgtttatttaaggatgggtggca

SEQ ID NO: 72804 - DNA, 25 bp, Artificial
  Probe
gtggccctctgactgtttatttaag

SEQ ID NO: 72805 - DNA, 25 bp, Artificial
  Probe
cccattccctagagagaataaattt

SEQ ID NO: 72806 - DNA, 25 bp, Artificial
  Probe
ccccattccctagagagaataaatt

SEQ ID NO: 72807 - DNA, 25 bp, Artificial
  Probe
ggtggccctctgactgtttatttaa

SEQ ID NO: 72808 - DNA, 25 bp, Artificial
  Probe
ccattccctagagagaataaatttg

SEQ ID NO: 72809 - DNA, 25 bp, Artificial
  Probe
gccccattccctagagagaataaat

SEQ ID NO: 72810 - DNA, 25 bp, Artificial
  Probe
catcaagatcctggagccagaagag

SEQ ID NO: 72811 - DNA, 25 bp, Artificial
  Probe
ggccctctgactgtttatttaagga

SEQ ID NO: 72812 - DNA, 25 bp, Artificial
  Probe
tgtttatttaaggatgggtggcacc

SEQ ID NO: 72813 - DNA, 25 bp, Artificial
  Probe
tggccctctgactgtttatttaagg

SEQ ID NO: 72814 - DNA, 25 bp, Artificial
  Probe
tgccccattccctagagagaataaa

SEQ ID NO: 72815 - DNA, 25 bp, Artificial
  Probe
cattccctagagagaataaatttga

SEQ ID NO: 72816 - DNA, 25 bp, Artificial
  Probe
ttccctagagagaataaatttgatt

SEQ ID NO: 72817 - DNA, 25 bp, Artificial
  Probe
ctgccccattccctagagagaataa

SEQ ID NO: 72818 - DNA, 25 bp, Artificial
  Probe
aggtggccctctgactgtttattta

SEQ ID NO: 72819 - DNA, 25 bp, Artificial
  Probe
gtagacaacctgcgttctcacgtaa

SEQ ID NO: 72820 - DNA, 25 bp, Artificial
  Probe
attccctagagagaataaatttgat

SEQ ID NO: 72821 - DNA, 25 bp, Artificial
  Probe
tagacaacctgcgttctcacgtaaa

SEQ ID NO: 72822 - DNA, 25 bp, Artificial
  Probe
caggtggccctctgactgtttattt

SEQ ID NO: 72823 - DNA, 25 bp, Artificial
  Probe
cctgccccattccctagagagaata

SEQ ID NO: 72824 - DNA, 25 bp, Artificial
  Probe
gaaactgagatggtcctttgagaat

SEQ ID NO: 72825 - DNA, 25 bp, Artificial
  Probe
aaactgagatggtcctttgagaatg

SEQ ID NO: 72826 - DNA, 25 bp, Artificial
  Probe
agaaactgagatggtcctttgagaa

SEQ ID NO: 72827 - DNA, 25 bp, Artificial
  Probe
aagaaactgagatggtcctttgaga

SEQ ID NO: 72828 - DNA, 25 bp, Artificial
  Probe
caagaaactgagatggtcctttgag

SEQ ID NO: 72829 - DNA, 25 bp, Artificial
  Probe
acaagaaactgagatggtcctttga

SEQ ID NO: 72830 - DNA, 25 bp, Artificial
  Probe
cacaagaaactgagatggtcctttg

SEQ ID NO: 72831 - DNA, 25 bp, Artificial
  Probe
aactgagatggtcctttgagaatgg

SEQ ID NO: 72832 - DNA, 25 bp, Artificial
  Probe
tactcatgggacactgtgttaatac

SEQ ID NO: 72833 - DNA, 25 bp, Artificial
  Probe
gtactcatgggacactgtgttaata

SEQ ID NO: 72834 - DNA, 25 bp, Artificial
  Probe
atgggacactgtgttaatactgttt

SEQ ID NO: 72835 - DNA, 25 bp, Artificial
  Probe
catgggacactgtgttaatactgtt

SEQ ID NO: 72836 - DNA, 25 bp, Artificial
  Probe
ctcatgggacactgtgttaatactg

SEQ ID NO: 72837 - DNA, 25 bp, Artificial
  Probe
actcatgggacactgtgttaatact

SEQ ID NO: 72838 - DNA, 25 bp, Artificial
  Probe
tcatgggacactgtgttaatactgt

SEQ ID NO: 72839 - DNA, 25 bp, Artificial
  Probe
tgtactcatgggacactgtgttaat

SEQ ID NO: 72840 - DNA, 25 bp, Artificial
  Probe
caatctgggtttgtttactccacag

SEQ ID NO: 72841 - DNA, 25 bp, Artificial
  Probe
ctgtactcatgggacactgtgttaa

SEQ ID NO: 72842 - DNA, 25 bp, Artificial
  Probe
tttgtttactccacagcctgtactc

SEQ ID NO: 72843 - DNA, 25 bp, Artificial
  Probe
actgagatggtcctttgagaatggg

SEQ ID NO: 72844 - DNA, 25 bp, Artificial
  Probe
gtagacaggcagaggatgacacaac

SEQ ID NO: 72845 - DNA, 25 bp, Artificial
  Probe
ccacaagaaactgagatggtccttt

SEQ ID NO: 72846 - DNA, 25 bp, Artificial
  Probe
gtttgtttactccacagcctgtact

SEQ ID NO: 72847 - DNA, 25 bp, Artificial
  Probe
gtttactccacagcctgtactcatg

SEQ ID NO: 72848 - DNA, 25 bp, Artificial
  Probe
gggacactgtgttaatactgttttc

SEQ ID NO: 72849 - DNA, 25 bp, Artificial
  Probe
aatctgggtttgtttactccacagc

SEQ ID NO: 72850 - DNA, 25 bp, Artificial
  Probe
caaggtagactcccaactccacttc

SEQ ID NO: 72851 - DNA, 25 bp, Artificial
  Probe
tgggacactgtgttaatactgtttt

SEQ ID NO: 72852 - DNA, 25 bp, Artificial
  Probe
tgtttactccacagcctgtactcat

SEQ ID NO: 72853 - DNA, 25 bp, Artificial
  Probe
ggacactgtgttaatactgttttct

SEQ ID NO: 72854 - DNA, 25 bp, Artificial
  Probe
ttgtttactccacagcctgtactca

SEQ ID NO: 72855 - DNA, 25 bp, Artificial
  Probe
ctgagatggtcctttgagaatggga

SEQ ID NO: 72856 - DNA, 25 bp, Artificial
  Probe
gcaatctgggtttgtttactccaca

SEQ ID NO: 72857 - DNA, 25 bp, Artificial
  Probe
ggtttgtttactccacagcctgtac

SEQ ID NO: 72858 - DNA, 25 bp, Artificial
  Probe
cctgtactcatgggacactgtgtta

SEQ ID NO: 72859 - DNA, 25 bp, Artificial
  Probe
tcaaggtagactcccaactccactt

SEQ ID NO: 72860 - DNA, 25 bp, Artificial
  Probe
ctcaaggtagactcccaactccact

SEQ ID NO: 72861 - DNA, 25 bp, Artificial
  Probe
acactgtgttaatactgttttctac

SEQ ID NO: 72862 - DNA, 25 bp, Artificial
  Probe
tttactccacagcctgtactcatgg

SEQ ID NO: 72863 - DNA, 25 bp, Artificial
  Probe
tgcaatctgggtttgtttactccac

SEQ ID NO: 72864 - DNA, 25 bp, Artificial
  Probe
caactccacttccctcctagttacc

SEQ ID NO: 72865 - DNA, 25 bp, Artificial
  Probe
ccaactccacttccctcctagttac

SEQ ID NO: 72866 - DNA, 25 bp, Artificial
  Probe
tttgcaatctgggtttgtttactcc

SEQ ID NO: 72867 - DNA, 25 bp, Artificial
  Probe
gacactgtgttaatactgttttcta

SEQ ID NO: 72868 - DNA, 25 bp, Artificial
  Probe
gggtttgtttactccacagcctgta

SEQ ID NO: 72869 - DNA, 25 bp, Artificial
  Probe
ctgaactcgcctgctatttgatata

SEQ ID NO: 72870 - DNA, 25 bp, Artificial
  Probe
gaggtgctttcagaagatagtaact

SEQ ID NO: 72871 - DNA, 25 bp, Artificial
  Probe
ggaggtgctttcagaagatagtaac

SEQ ID NO: 72872 - DNA, 25 bp, Artificial
  Probe
tggaggtgctttcagaagatagtaa

SEQ ID NO: 72873 - DNA, 25 bp, Artificial
  Probe
ttggaggtgctttcagaagatagta

SEQ ID NO: 72874 - DNA, 25 bp, Artificial
  Probe
tgaactcgcctgctatttgatatat

SEQ ID NO: 72875 - DNA, 25 bp, Artificial
  Probe
aggtgctttcagaagatagtaacta

SEQ ID NO: 72876 - DNA, 25 bp, Artificial
  Probe
gaactcgcctgctatttgatatatt

SEQ ID NO: 72877 - DNA, 25 bp, Artificial
  Probe
aactcgcctgctatttgatatatta

SEQ ID NO: 72878 - DNA, 25 bp, Artificial
  Probe
actcgcctgctatttgatatattat

SEQ ID NO: 72879 - DNA, 25 bp, Artificial
  Probe
cagagaaatgtaccttgctgaacaa

SEQ ID NO: 72880 - DNA, 25 bp, Artificial
  Probe
ccttaaagaactcacacagcaagtg

SEQ ID NO: 72881 - DNA, 25 bp, Artificial
  Probe
attaggaaataaagctgaacctggg

SEQ ID NO: 72882 - DNA, 25 bp, Artificial
  Probe
ggtgctttcagaagatagtaactat

SEQ ID NO: 72883 - DNA, 25 bp, Artificial
  Probe
gctgaactcgcctgctatttgatat

SEQ ID NO: 72884 - DNA, 25 bp, Artificial
  Probe
acagagaaatgtaccttgctgaaca

SEQ ID NO: 72885 - DNA, 25 bp, Artificial
  Probe
tggacttgtattaggaaataaagct

SEQ ID NO: 72886 - DNA, 25 bp, Artificial
  Probe
tattaggaaataaagctgaacctgg

SEQ ID NO: 72887 - DNA, 25 bp, Artificial
  Probe
ggacttgtattaggaaataaagctg

SEQ ID NO: 72888 - DNA, 25 bp, Artificial
  Probe
ttaggaaataaagctgaacctggga

SEQ ID NO: 72889 - DNA, 25 bp, Artificial
  Probe
gatgttgtaagcatacacggagtcc

SEQ ID NO: 72890 - DNA, 25 bp, Artificial
  Probe
ttgtattaggaaataaagctgaacc

SEQ ID NO: 72891 - DNA, 25 bp, Artificial
  Probe
tgtattaggaaataaagctgaacct

SEQ ID NO: 72892 - DNA, 25 bp, Artificial
  Probe
cgatgttgtaagcatacacggagtc

SEQ ID NO: 72893 - DNA, 25 bp, Artificial
  Probe
gtattaggaaataaagctgaacctg

SEQ ID NO: 72894 - DNA, 25 bp, Artificial
  Probe
gacttgtattaggaaataaagctga

SEQ ID NO: 72895 - DNA, 25 bp, Artificial
  Probe
gtgctttcagaagatagtaactatt

SEQ ID NO: 72896 - DNA, 25 bp, Artificial
  Probe
agagaaatgtaccttgctgaacaag

SEQ ID NO: 72897 - DNA, 25 bp, Artificial
  Probe
gagaaatgtaccttgctgaacaagt

SEQ ID NO: 72898 - DNA, 25 bp, Artificial
  Probe
agaaatgtaccttgctgaacaagtg

SEQ ID NO: 72899 - DNA, 25 bp, Artificial
  Probe
acttgtattaggaaataaagctgaa

SEQ ID NO: 72900 - DNA, 25 bp, Artificial
  Probe
gacagaagagtgcgaagaccctaag

SEQ ID NO: 72901 - DNA, 25 bp, Artificial
  Probe
cttgtattaggaaataaagctgaac

SEQ ID NO: 72902 - DNA, 25 bp, Artificial
  Probe
acagttccttttaatgttccaaaga

SEQ ID NO: 72903 - DNA, 25 bp, Artificial
  Probe
tgctttcagaagatagtaactattt

SEQ ID NO: 72904 - DNA, 25 bp, Artificial
  Probe
gctttcagaagatagtaactatttg

SEQ ID NO: 72905 - DNA, 25 bp, Artificial
  Probe
cttaaagaactcacacagcaagtga

SEQ ID NO: 72906 - DNA, 25 bp, Artificial
  Probe
atttgacagaagagtgcgaagaccc

SEQ ID NO: 72907 - DNA, 25 bp, Artificial
  Probe
ttaaagaactcacacagcaagtgac

SEQ ID NO: 72908 - DNA, 25 bp, Artificial
  Probe
taaagaactcacacagcaagtgact

SEQ ID NO: 72909 - DNA, 25 bp, Artificial
  Probe
aacagttccttttaatgttccaaag

SEQ ID NO: 72910 - DNA, 25 bp, Artificial
  Probe
agctgaactcgcctgctatttgata

SEQ ID NO: 72911 - DNA, 25 bp, Artificial
  Probe
cagaggaagcttgatgaaacgacaa

SEQ ID NO: 72912 - DNA, 25 bp, Artificial
  Probe
gaagcttgatgaaacgacaagattg

SEQ ID NO: 72913 - DNA, 25 bp, Artificial
  Probe
aaagaactcacacagcaagtgactc

SEQ ID NO: 72914 - DNA, 25 bp, Artificial
  Probe
cccaaggaaacttcaaagtgtaatt

SEQ ID NO: 72915 - DNA, 25 bp, Artificial
  Probe
ccaaggaaacttcaaagtgtaattc

SEQ ID NO: 72916 - DNA, 25 bp, Artificial
  Probe
aaggaaacttcaaagtgtaattctg

SEQ ID NO: 72917 - DNA, 25 bp, Artificial
  Probe
caaggaaacttcaaagtgtaattct

SEQ ID NO: 72918 - DNA, 25 bp, Artificial
  Probe
aaagaaaaggggacatcagagttta

SEQ ID NO: 72919 - DNA, 25 bp, Artificial
  Probe
taaagaaaaggggacatcagagttt

SEQ ID NO: 72920 - DNA, 25 bp, Artificial
  Probe
aagaaaaggggacatcagagtttaa

SEQ ID NO: 72921 - DNA, 25 bp, Artificial
  Probe
gtaaagaaaaggggacatcagagtt

SEQ ID NO: 72922 - DNA, 25 bp, Artificial
  Probe
caacacaattctggagtcactgtcc

SEQ ID NO: 72923 - DNA, 25 bp, Artificial
  Probe
gcaacacaattctggagtcactgtc

SEQ ID NO: 72924 - DNA, 25 bp, Artificial
  Probe
tcatactagtgaccttcctcaggac

SEQ ID NO: 72925 - DNA, 25 bp, Artificial
  Probe
ctgtaaagaaaaggggacatcagag

SEQ ID NO: 72926 - DNA, 25 bp, Artificial
  Probe
tgtaaagaaaaggggacatcagagt

SEQ ID NO: 72927 - DNA, 25 bp, Artificial
  Probe
agaaaaggggacatcagagtttaaa

SEQ ID NO: 72928 - DNA, 25 bp, Artificial
  Probe
ccccaaggaaacttcaaagtgtaat

SEQ ID NO: 72929 - DNA, 25 bp, Artificial
  Probe
gaaaaggggacatcagagtttaaaa

SEQ ID NO: 72930 - DNA, 25 bp, Artificial
  Probe
tccctgtttgtaaatattctgtaaa

SEQ ID NO: 72931 - DNA, 25 bp, Artificial
  Probe
ccctgtttgtaaatattctgtaaag

SEQ ID NO: 72932 - DNA, 25 bp, Artificial
  Probe
attctgtaaagaaaaggggacatca

SEQ ID NO: 72933 - DNA, 25 bp, Artificial
  Probe
accccaaggaaacttcaaagtgtaa

SEQ ID NO: 72934 - DNA, 25 bp, Artificial
  Probe
ttctgtaaagaaaaggggacatcag

SEQ ID NO: 72935 - DNA, 25 bp, Artificial
  Probe
catactagtgaccttcctcaggacg

SEQ ID NO: 72936 - DNA, 25 bp, Artificial
  Probe
gaccccaaggaaacttcaaagtgta

SEQ ID NO: 72937 - DNA, 25 bp, Artificial
  Probe
tattctgtaaagaaaaggggacatc

SEQ ID NO: 72938 - DNA, 25 bp, Artificial
  Probe
atactagtgaccttcctcaggacgt

SEQ ID NO: 72939 - DNA, 25 bp, Artificial
  Probe
atattctgtaaagaaaaggggacat

SEQ ID NO: 72940 - DNA, 25 bp, Artificial
  Probe
tgcaacacaattctggagtcactgt

SEQ ID NO: 72941 - DNA, 25 bp, Artificial
  Probe
aacacaattctggagtcactgtccc

SEQ ID NO: 72942 - DNA, 25 bp, Artificial
  Probe
aatattctgtaaagaaaaggggaca

SEQ ID NO: 72943 - DNA, 25 bp, Artificial
  Probe
cttgcaacacaattctggagtcact

SEQ ID NO: 72944 - DNA, 25 bp, Artificial
  Probe
cctgtttgtaaatattctgtaaaga

SEQ ID NO: 72945 - DNA, 25 bp, Artificial
  Probe
gagaccccaaggaaacttcaaagtg

SEQ ID NO: 72946 - DNA, 25 bp, Artificial
  Probe
gtcatactagtgaccttcctcagga

SEQ ID NO: 72947 - DNA, 25 bp, Artificial
  Probe
ttgcaacacaattctggagtcactg

SEQ ID NO: 72948 - DNA, 25 bp, Artificial
  Probe
acttgcaacacaattctggagtcac

SEQ ID NO: 72949 - DNA, 25 bp, Artificial
  Probe
cacttgcaacacaattctggagtca

SEQ ID NO: 72950 - DNA, 25 bp, Artificial
  Probe
tctgtaaagaaaaggggacatcaga

SEQ ID NO: 72951 - DNA, 25 bp, Artificial
  Probe
aaatattctgtaaagaaaaggggac

SEQ ID NO: 72952 - DNA, 25 bp, Artificial
  Probe
agaccccaaggaaacttcaaagtgt

SEQ ID NO: 72953 - DNA, 25 bp, Artificial
  Probe
ggagaccccaaggaaacttcaaagt

SEQ ID NO: 72954 - DNA, 25 bp, Artificial
  Probe
tggagaccccaaggaaacttcaaag

SEQ ID NO: 72955 - DNA, 25 bp, Artificial
  Probe
ccacttgcaacacaattctggagtc

SEQ ID NO: 72956 - DNA, 25 bp, Artificial
  Probe
cagaaaaggtctctcacctagagtc

SEQ ID NO: 72957 - DNA, 25 bp, Artificial
  Probe
gtcagaaaaggtctctcacctagag

SEQ ID NO: 72958 - DNA, 25 bp, Artificial
  Probe
gtaaatattctgtaaagaaaagggg

SEQ ID NO: 72959 - DNA, 25 bp, Artificial
  Probe
tgtaagcagtttgagtaatcatcgg

SEQ ID NO: 72960 - DNA, 25 bp, Artificial
  Probe
ctgtaagcagtttgagtaatcatcg

SEQ ID NO: 72961 - DNA, 25 bp, Artificial
  Probe
gctttaggatgacaaatgaataaca

SEQ ID NO: 72962 - DNA, 25 bp, Artificial
  Probe
tgctttaggatgacaaatgaataac

SEQ ID NO: 72963 - DNA, 25 bp, Artificial
  Probe
tttaggatgacaaatgaataacacc

SEQ ID NO: 72964 - DNA, 25 bp, Artificial
  Probe
aggatgacaaatgaataacacctag

SEQ ID NO: 72965 - DNA, 25 bp, Artificial
  Probe
gtaagcagtttgagtaatcatcggc

SEQ ID NO: 72966 - DNA, 25 bp, Artificial
  Probe
ttaggatgacaaatgaataacacct

SEQ ID NO: 72967 - DNA, 25 bp, Artificial
  Probe
gctgtaagcagtttgagtaatcatc

SEQ ID NO: 72968 - DNA, 25 bp, Artificial
  Probe
ctttaggatgacaaatgaataacac

SEQ ID NO: 72969 - DNA, 25 bp, Artificial
  Probe
agctgtaagcagtttgagtaatcat

SEQ ID NO: 72970 - DNA, 25 bp, Artificial
  Probe
aagctgtaagcagtttgagtaatca

SEQ ID NO: 72971 - DNA, 25 bp, Artificial
  Probe
gtggaatgcaactgagaggttcttc

SEQ ID NO: 72972 - DNA, 25 bp, Artificial
  Probe
taagcagtttgagtaatcatcggct

SEQ ID NO: 72973 - DNA, 25 bp, Artificial
  Probe
caagtggaatgcaactgagaggttc

SEQ ID NO: 72974 - DNA, 25 bp, Artificial
  Probe
agtggaatgcaactgagaggttctt

SEQ ID NO: 72975 - DNA, 25 bp, Artificial
  Probe
aagtggaatgcaactgagaggttct

SEQ ID NO: 72976 - DNA, 25 bp, Artificial
  Probe
taggatgacaaatgaataacaccta

SEQ ID NO: 72977 - DNA, 25 bp, Artificial
  Probe
gatgacaaatgaataacacctaggc

SEQ ID NO: 72978 - DNA, 25 bp, Artificial
  Probe
atgacaaatgaataacacctaggca

SEQ ID NO: 72979 - DNA, 25 bp, Artificial
  Probe
ggatgacaaatgaataacacctagg

SEQ ID NO: 72980 - DNA, 25 bp, Artificial
  Probe
tgacaaatgaataacacctaggcat

SEQ ID NO: 72981 - DNA, 25 bp, Artificial
  Probe
acaaatgaataacacctaggcatag

SEQ ID NO: 72982 - DNA, 25 bp, Artificial
  Probe
gacaaatgaataacacctaggcata

SEQ ID NO: 72983 - DNA, 25 bp, Artificial
  Probe
caaatgaataacacctaggcataga

SEQ ID NO: 72984 - DNA, 25 bp, Artificial
  Probe
gaatgtctctgcggtacaaagatgc

SEQ ID NO: 72985 - DNA, 25 bp, Artificial
  Probe
ctaacccaagtggaatgcaactgag

SEQ ID NO: 72986 - DNA, 25 bp, Artificial
  Probe
ctctaacccaagtggaatgcaactg

SEQ ID NO: 72987 - DNA, 25 bp, Artificial
  Probe
aaatgaataacacctaggcatagaa

SEQ ID NO: 72988 - DNA, 25 bp, Artificial
  Probe
gtacaaagatgcacttttcctcatg

SEQ ID NO: 72989 - DNA, 25 bp, Artificial
  Probe
taacccaagtggaatgcaactgaga

SEQ ID NO: 72990 - DNA, 25 bp, Artificial
  Probe
tctaacccaagtggaatgcaactga

SEQ ID NO: 72991 - DNA, 25 bp, Artificial
  Probe
tacaaagatgcacttttcctcatgg

SEQ ID NO: 72992 - DNA, 25 bp, Artificial
  Probe
ggtacaaagatgcacttttcctcat

SEQ ID NO: 72993 - DNA, 25 bp, Artificial
  Probe
tggaatgcaactgagaggttcttcc

SEQ ID NO: 72994 - DNA, 25 bp, Artificial
  Probe
cggtacaaagatgcacttttcctca

SEQ ID NO: 72995 - DNA, 25 bp, Artificial
  Probe
acaaagatgcacttttcctcatggg

SEQ ID NO: 72996 - DNA, 25 bp, Artificial
  Probe
tctctgcggtacaaagatgcacttt

SEQ ID NO: 72997 - DNA, 25 bp, Artificial
  Probe
aatgtctctgcggtacaaagatgca

SEQ ID NO: 72998 - DNA, 25 bp, Artificial
  Probe
caaagatgcacttttcctcatgggg

SEQ ID NO: 72999 - DNA, 25 bp, Artificial
  Probe
tctgcggtacaaagatgcacttttc

SEQ ID NO: 73000 - DNA, 25 bp, Artificial
  Probe
ctctgcggtacaaagatgcactttt

SEQ ID NO: 73001 - DNA, 25 bp, Artificial
  Probe
gcggtacaaagatgcacttttcctc

SEQ ID NO: 73002 - DNA, 25 bp, Artificial
  Probe
ctgcggtacaaagatgcacttttcc

SEQ ID NO: 73003 - DNA, 25 bp, Artificial
  Probe
ctctagcctttgaaatgaacagtta

SEQ ID NO: 73004 - DNA, 25 bp, Artificial
  Probe
actctagcctttgaaatgaacagtt

SEQ ID NO: 73005 - DNA, 25 bp, Artificial
  Probe
tctagcctttgaaatgaacagttat

SEQ ID NO: 73006 - DNA, 25 bp, Artificial
  Probe
ggactctagcctttgaaatgaacag

SEQ ID NO: 73007 - DNA, 25 bp, Artificial
  Probe
gactctagcctttgaaatgaacagt

SEQ ID NO: 73008 - DNA, 25 bp, Artificial
  Probe
ttgggactctagcctttgaaatgaa

SEQ ID NO: 73009 - DNA, 25 bp, Artificial
  Probe
tctacatgatgtgaaactggaagat

SEQ ID NO: 73010 - DNA, 25 bp, Artificial
  Probe
atctacatgatgtgaaactggaaga

SEQ ID NO: 73011 - DNA, 25 bp, Artificial
  Probe
ctacatgatgtgaaactggaagatc

SEQ ID NO: 73012 - DNA, 25 bp, Artificial
  Probe
agatatgcaaactggaactatagct

SEQ ID NO: 73013 - DNA, 25 bp, Artificial
  Probe
cttgggactctagcctttgaaatga

SEQ ID NO: 73014 - DNA, 25 bp, Artificial
  Probe
tacatgatgtgaaactggaagatcc

SEQ ID NO: 73015 - DNA, 25 bp, Artificial
  Probe
aagatatgcaaactggaactatagc

SEQ ID NO: 73016 - DNA, 25 bp, Artificial
  Probe
gggactctagcctttgaaatgaaca

SEQ ID NO: 73017 - DNA, 25 bp, Artificial
  Probe
tgggactctagcctttgaaatgaac

SEQ ID NO: 73018 - DNA, 25 bp, Artificial
  Probe
ctagcctttgaaatgaacagttata

SEQ ID NO: 73019 - DNA, 25 bp, Artificial
  Probe
ccttgggactctagcctttgaaatg

SEQ ID NO: 73020 - DNA, 25 bp, Artificial
  Probe
tagcctttgaaatgaacagttatat

SEQ ID NO: 73021 - DNA, 25 bp, Artificial
  Probe
caagatatgcaaactggaactatag

SEQ ID NO: 73022 - DNA, 25 bp, Artificial
  Probe
aaagatacaggccaagatatgcaaa

SEQ ID NO: 73023 - DNA, 25 bp, Artificial
  Probe
agcctttgaaatgaacagttatata

SEQ ID NO: 73024 - DNA, 25 bp, Artificial
  Probe
catctacatgatgtgaaactggaag

SEQ ID NO: 73025 - DNA, 25 bp, Artificial
  Probe
aagatacaggccaagatatgcaaac

SEQ ID NO: 73026 - DNA, 25 bp, Artificial
  Probe
ccaagatatgcaaactggaactata

SEQ ID NO: 73027 - DNA, 25 bp, Artificial
  Probe
gccaagatatgcaaactggaactat

SEQ ID NO: 73028 - DNA, 25 bp, Artificial
  Probe
acatgatgtgaaactggaagatccc

SEQ ID NO: 73029 - DNA, 25 bp, Artificial
  Probe
gatatgcaaactggaactatagcta

SEQ ID NO: 73030 - DNA, 25 bp, Artificial
  Probe
atatgcaaactggaactatagctag

SEQ ID NO: 73031 - DNA, 25 bp, Artificial
  Probe
catgatgtgaaactggaagatccca

SEQ ID NO: 73032 - DNA, 25 bp, Artificial
  Probe
gcatctacatgatgtgaaactggaa

SEQ ID NO: 73033 - DNA, 25 bp, Artificial
  Probe
agatacaggccaagatatgcaaact

SEQ ID NO: 73034 - DNA, 25 bp, Artificial
  Probe
acactctctacccttgggactctag

SEQ ID NO: 73035 - DNA, 25 bp, Artificial
  Probe
cccttgggactctagcctttgaaat

SEQ ID NO: 73036 - DNA, 25 bp, Artificial
  Probe
cacactctctacccttgggactcta

SEQ ID NO: 73037 - DNA, 25 bp, Artificial
  Probe
gatacaggccaagatatgcaaactg

SEQ ID NO: 73038 - DNA, 25 bp, Artificial
  Probe
agtgcatctacatgatgtgaaactg

SEQ ID NO: 73039 - DNA, 25 bp, Artificial
  Probe
cagtgcatctacatgatgtgaaact

SEQ ID NO: 73040 - DNA, 25 bp, Artificial
  Probe
acagtgcatctacatgatgtgaaac

SEQ ID NO: 73041 - DNA, 25 bp, Artificial
  Probe
tgcatctacatgatgtgaaactgga

SEQ ID NO: 73042 - DNA, 25 bp, Artificial
  Probe
gtgcatctacatgatgtgaaactgg

SEQ ID NO: 73043 - DNA, 25 bp, Artificial
  Probe
tacccttgggactctagcctttgaa

SEQ ID NO: 73044 - DNA, 25 bp, Artificial
  Probe
aaaagatacaggccaagatatgcaa

SEQ ID NO: 73045 - DNA, 25 bp, Artificial
  Probe
ctctacccttgggactctagccttt

SEQ ID NO: 73046 - DNA, 25 bp, Artificial
  Probe
ctacccttgggactctagcctttga

SEQ ID NO: 73047 - DNA, 25 bp, Artificial
  Probe
tctacccttgggactctagcctttg

SEQ ID NO: 73048 - DNA, 25 bp, Artificial
  Probe
acatcactgtagtagacaaggtcag

SEQ ID NO: 73049 - DNA, 25 bp, Artificial
  Probe
gacatcactgtagtagacaaggtca

SEQ ID NO: 73050 - DNA, 25 bp, Artificial
  Probe
ctgacctccgtaagtgtctattctt

SEQ ID NO: 73051 - DNA, 25 bp, Artificial
  Probe
tgacctccgtaagtgtctattcttg

SEQ ID NO: 73052 - DNA, 25 bp, Artificial
  Probe
caataaagatgtggtcgcaactaaa

SEQ ID NO: 73053 - DNA, 25 bp, Artificial
  Probe
tatctaaagtaatccgttcaccctg

SEQ ID NO: 73054 - DNA, 25 bp, Artificial
  Probe
tcatctcatctcacctctaaacttg

SEQ ID NO: 73055 - DNA, 25 bp, Artificial
  Probe
ttatctaaagtaatccgttcaccct

SEQ ID NO: 73056 - DNA, 25 bp, Artificial
  Probe
ttcatctcatctcacctctaaactt

SEQ ID NO: 73057 - DNA, 25 bp, Artificial
  Probe
tttcatctcatctcacctctaaact

SEQ ID NO: 73058 - DNA, 25 bp, Artificial
  Probe
ggacatcactgtagtagacaaggtc

SEQ ID NO: 73059 - DNA, 25 bp, Artificial
  Probe
atctcatctcacctctaaacttgct

SEQ ID NO: 73060 - DNA, 25 bp, Artificial
  Probe
catctcatctcacctctaaacttgc

SEQ ID NO: 73061 - DNA, 25 bp, Artificial
  Probe
gacctccgtaagtgtctattcttgg

SEQ ID NO: 73062 - DNA, 25 bp, Artificial
  Probe
tttatctaaagtaatccgttcaccc

SEQ ID NO: 73063 - DNA, 25 bp, Artificial
  Probe
atctaaagtaatccgttcaccctga

SEQ ID NO: 73064 - DNA, 25 bp, Artificial
  Probe
tctcatctcacctctaaacttgctg

SEQ ID NO: 73065 - DNA, 25 bp, Artificial
  Probe
gcaataaagatgtggtcgcaactaa

SEQ ID NO: 73066 - DNA, 25 bp, Artificial
  Probe
cctgacctccgtaagtgtctattct

SEQ ID NO: 73067 - DNA, 25 bp, Artificial
  Probe
tctaaagtaatccgttcaccctgac

SEQ ID NO: 73068 - DNA, 25 bp, Artificial
  Probe
cggacatcactgtagtagacaaggt

SEQ ID NO: 73069 - DNA, 25 bp, Artificial
  Probe
acctccgtaagtgtctattcttggc

SEQ ID NO: 73070 - DNA, 25 bp, Artificial
  Probe
ctaaagtaatccgttcaccctgacc

SEQ ID NO: 73071 - DNA, 25 bp, Artificial
  Probe
accgctgctctttatctaaagtaat

SEQ ID NO: 73072 - DNA, 25 bp, Artificial
  Probe
gctgctctttatctaaagtaatccg

SEQ ID NO: 73073 - DNA, 25 bp, Artificial
  Probe
cgctgctctttatctaaagtaatcc

SEQ ID NO: 73074 - DNA, 25 bp, Artificial
  Probe
ccgctgctctttatctaaagtaatc

SEQ ID NO: 73075 - DNA, 25 bp, Artificial
  Probe
aaccgctgctctttatctaaagtaa

SEQ ID NO: 73076 - DNA, 25 bp, Artificial
  Probe
aataaagatgtggtcgcaactaaaa

SEQ ID NO: 73077 - DNA, 25 bp, Artificial
  Probe
caaccgctgctctttatctaaagta

SEQ ID NO: 73078 - DNA, 25 bp, Artificial
  Probe
gccatattttcatctcatctcacct

SEQ ID NO: 73079 - DNA, 25 bp, Artificial
  Probe
ctccgtaagtgtctattcttggcgt

SEQ ID NO: 73080 - DNA, 25 bp, Artificial
  Probe
ctcatctcacctctaaacttgctgc

SEQ ID NO: 73081 - DNA, 25 bp, Artificial
  Probe
taaagtaatccgttcaccctgacct

SEQ ID NO: 73082 - DNA, 25 bp, Artificial
  Probe
ccatattttcatctcatctcacctc

SEQ ID NO: 73083 - DNA, 25 bp, Artificial
  Probe
ctgctctttatctaaagtaatccgt

SEQ ID NO: 73084 - DNA, 25 bp, Artificial
  Probe
ttttcatctcatctcacctctaaac

SEQ ID NO: 73085 - DNA, 25 bp, Artificial
  Probe
taagtgtctattcttggcgtgggat

SEQ ID NO: 73086 - DNA, 25 bp, Artificial
  Probe
tccgtaagtgtctattcttggcgtg

SEQ ID NO: 73087 - DNA, 25 bp, Artificial
  Probe
tgctctttatctaaagtaatccgtt

SEQ ID NO: 73088 - DNA, 25 bp, Artificial
  Probe
catattttcatctcatctcacctct

SEQ ID NO: 73089 - DNA, 25 bp, Artificial
  Probe
atcactgtagtagacaaggtcagtt

SEQ ID NO: 73090 - DNA, 25 bp, Artificial
  Probe
gctctttatctaaagtaatccgttc

SEQ ID NO: 73091 - DNA, 25 bp, Artificial
  Probe
catcactgtagtagacaaggtcagt

SEQ ID NO: 73092 - DNA, 25 bp, Artificial
  Probe
ctttatctaaagtaatccgttcacc

SEQ ID NO: 73093 - DNA, 25 bp, Artificial
  Probe
gtagaagaatgtattcaatggttcc

SEQ ID NO: 73094 - DNA, 25 bp, Artificial
  Probe
ggtagaagaatgtattcaatggttc

SEQ ID NO: 73095 - DNA, 25 bp, Artificial
  Probe
agaagaatgtattcaatggttccct

SEQ ID NO: 73096 - DNA, 25 bp, Artificial
  Probe
gaagaatgtattcaatggttccctc

SEQ ID NO: 73097 - DNA, 25 bp, Artificial
  Probe
aatgtattcaatggttccctcctca

SEQ ID NO: 73098 - DNA, 25 bp, Artificial
  Probe
aagaatgtattcaatggttccctcc

SEQ ID NO: 73099 - DNA, 25 bp, Artificial
  Probe
atgtattcaatggttccctcctcat

SEQ ID NO: 73100 - DNA, 25 bp, Artificial
  Probe
gaatgtattcaatggttccctcctc

SEQ ID NO: 73101 - DNA, 25 bp, Artificial
  Probe
tttattcaagacagtgggatctacc

SEQ ID NO: 73102 - DNA, 25 bp, Artificial
  Probe
cctttattcaagacagtgggatcta

SEQ ID NO: 73103 - DNA, 25 bp, Artificial
  Probe
gggtagaagaatgtattcaatggtt

SEQ ID NO: 73104 - DNA, 25 bp, Artificial
  Probe
ttattcaagacagtgggatctacct

SEQ ID NO: 73105 - DNA, 25 bp, Artificial
  Probe
agaatgtattcaatggttccctcct

SEQ ID NO: 73106 - DNA, 25 bp, Artificial
  Probe
tagaagaatgtattcaatggttccc

SEQ ID NO: 73107 - DNA, 25 bp, Artificial
  Probe
ctttattcaagacagtgggatctac

SEQ ID NO: 73108 - DNA, 25 bp, Artificial
  Probe
tgtattcaatggttccctcctcatc

SEQ ID NO: 73109 - DNA, 25 bp, Artificial
  Probe
ggcatccatctctttcccatagttt

SEQ ID NO: 73110 - DNA, 25 bp, Artificial
  Probe
gggctggaaatgtccttaataaaca

SEQ ID NO: 73111 - DNA, 25 bp, Artificial
  Probe
tgggctggaaatgtccttaataaac

SEQ ID NO: 73112 - DNA, 25 bp, Artificial
  Probe
gtgggctggaaatgtccttaataaa

SEQ ID NO: 73113 - DNA, 25 bp, Artificial
  Probe
tattcaagacagtgggatctacctg

SEQ ID NO: 73114 - DNA, 25 bp, Artificial
  Probe
gtattcaatggttccctcctcatcc

SEQ ID NO: 73115 - DNA, 25 bp, Artificial
  Probe
tgtgggctggaaatgtccttaataa

SEQ ID NO: 73116 - DNA, 25 bp, Artificial
  Probe
catccatctctttcccatagttttg

SEQ ID NO: 73117 - DNA, 25 bp, Artificial
  Probe
ctgtgggctggaaatgtccttaata

SEQ ID NO: 73118 - DNA, 25 bp, Artificial
  Probe
gcatccatctctttcccatagtttt

SEQ ID NO: 73119 - DNA, 25 bp, Artificial
  Probe
ggctggaaatgtccttaataaacat

SEQ ID NO: 73120 - DNA, 25 bp, Artificial
  Probe
ggggtagaagaatgtattcaatggt

SEQ ID NO: 73121 - DNA, 25 bp, Artificial
  Probe
aggggtagaagaatgtattcaatgg

SEQ ID NO: 73122 - DNA, 25 bp, Artificial
  Probe
ggaaggggtagaagaatgtattcaa

SEQ ID NO: 73123 - DNA, 25 bp, Artificial
  Probe
tattcaatggttccctcctcatccc

SEQ ID NO: 73124 - DNA, 25 bp, Artificial
  Probe
cagggaaggggtagaagaatgtatt

SEQ ID NO: 73125 - DNA, 25 bp, Artificial
  Probe
agggaaggggtagaagaatgtattc

SEQ ID NO: 73126 - DNA, 25 bp, Artificial
  Probe
gctggaaatgtccttaataaacatc

SEQ ID NO: 73127 - DNA, 25 bp, Artificial
  Probe
aaggggtagaagaatgtattcaatg

SEQ ID NO: 73128 - DNA, 25 bp, Artificial
  Probe
gggaaggggtagaagaatgtattca

SEQ ID NO: 73129 - DNA, 25 bp, Artificial
  Probe
gaaggggtagaagaatgtattcaat

SEQ ID NO: 73130 - DNA, 25 bp, Artificial
  Probe
tggaaatgtccttaataaacatcct

SEQ ID NO: 73131 - DNA, 25 bp, Artificial
  Probe
ccctttattcaagacagtgggatct

SEQ ID NO: 73132 - DNA, 25 bp, Artificial
  Probe
ctggaaatgtccttaataaacatcc

SEQ ID NO: 73133 - DNA, 25 bp, Artificial
  Probe
cctccctagtgtcattcacattgaa

SEQ ID NO: 73134 - DNA, 25 bp, Artificial
  Probe
atccatctctttcccatagttttgg

SEQ ID NO: 73135 - DNA, 25 bp, Artificial
  Probe
ggaaatgtccttaataaacatcctt

SEQ ID NO: 73136 - DNA, 25 bp, Artificial
  Probe
ccagggaaggggtagaagaatgtat

SEQ ID NO: 73137 - DNA, 25 bp, Artificial
  Probe
tacctctgacctatgaacctgggag

SEQ ID NO: 73138 - DNA, 25 bp, Artificial
  Probe
atagatgagatgcctatgaatgtgg

SEQ ID NO: 73139 - DNA, 25 bp, Artificial
  Probe
gatagatgagatgcctatgaatgtg

SEQ ID NO: 73140 - DNA, 25 bp, Artificial
  Probe
aaatgagagaagccaatttcacagt

SEQ ID NO: 73141 - DNA, 25 bp, Artificial
  Probe
aatgagagaagccaatttcacagtg

SEQ ID NO: 73142 - DNA, 25 bp, Artificial
  Probe
ttgtgaagaatgatgacatccgcat

SEQ ID NO: 73143 - DNA, 25 bp, Artificial
  Probe
atgagagaagccaatttcacagtgt

SEQ ID NO: 73144 - DNA, 25 bp, Artificial
  Probe
tacattcacagaatcgggagatcag

SEQ ID NO: 73145 - DNA, 25 bp, Artificial
  Probe
ctatgaatgtggctgacctcatctg

SEQ ID NO: 73146 - DNA, 25 bp, Artificial
  Probe
gacagagaaaatgagagaagccaat

SEQ ID NO: 73147 - DNA, 25 bp, Artificial
  Probe
acagagaaaatgagagaagccaatt

SEQ ID NO: 73148 - DNA, 25 bp, Artificial
  Probe
gtacattcacagaatcgggagatca

SEQ ID NO: 73149 - DNA, 25 bp, Artificial
  Probe
tgagagaagccaatttcacagtgtc

SEQ ID NO: 73150 - DNA, 25 bp, Artificial
  Probe
tatgaatgtggctgacctcatctga

SEQ ID NO: 73151 - DNA, 25 bp, Artificial
  Probe
aaaatgagagaagccaatttcacag

SEQ ID NO: 73152 - DNA, 25 bp, Artificial
  Probe
cagagaaaatgagagaagccaattt

SEQ ID NO: 73153 - DNA, 25 bp, Artificial
  Probe
tgaatgtggctgacctcatctgaag

SEQ ID NO: 73154 - DNA, 25 bp, Artificial
  Probe
tgacagagaaaatgagagaagccaa

SEQ ID NO: 73155 - DNA, 25 bp, Artificial
  Probe
tttgtgaagaatgatgacatccgca

SEQ ID NO: 73156 - DNA, 25 bp, Artificial
  Probe
attttgtgaagaatgatgacatccg

SEQ ID NO: 73157 - DNA, 25 bp, Artificial
  Probe
tagatgagatgcctatgaatgtggc

SEQ ID NO: 73158 - DNA, 25 bp, Artificial
  Probe
tgtgaagaatgatgacatccgcatc

SEQ ID NO: 73159 - DNA, 25 bp, Artificial
  Probe
gagagaagccaatttcacagtgtcg

SEQ ID NO: 73160 - DNA, 25 bp, Artificial
  Probe
taatggggtttatatgaactgtctt

SEQ ID NO: 73161 - DNA, 25 bp, Artificial
  Probe
cctatgaatgtggctgacctcatct

SEQ ID NO: 73162 - DNA, 25 bp, Artificial
  Probe
ttaatggggtttatatgaactgtct

SEQ ID NO: 73163 - DNA, 25 bp, Artificial
  Probe
ctgacagagaaaatgagagaagcca

SEQ ID NO: 73164 - DNA, 25 bp, Artificial
  Probe
tggctgacagagaaaatgagagaag

SEQ ID NO: 73165 - DNA, 25 bp, Artificial
  Probe
cgtgtaaataatccaatgcgctaaa

SEQ ID NO: 73166 - DNA, 25 bp, Artificial
  Probe
atgaatgtggctgacctcatctgaa

SEQ ID NO: 73167 - DNA, 25 bp, Artificial
  Probe
aattttgtgaagaatgatgacatcc

SEQ ID NO: 73168 - DNA, 25 bp, Artificial
  Probe
tcaattttgtgaagaatgatgacat

SEQ ID NO: 73169 - DNA, 25 bp, Artificial
  Probe
gaaaatgagagaagccaatttcaca

SEQ ID NO: 73170 - DNA, 25 bp, Artificial
  Probe
agaaaatgagagaagccaatttcac

SEQ ID NO: 73171 - DNA, 25 bp, Artificial
  Probe
gagaaaatgagagaagccaatttca

SEQ ID NO: 73172 - DNA, 25 bp, Artificial
  Probe
gtgtaaataatccaatgcgctaaat

SEQ ID NO: 73173 - DNA, 25 bp, Artificial
  Probe
acgtgtaaataatccaatgcgctaa

SEQ ID NO: 73174 - DNA, 25 bp, Artificial
  Probe
agagaaaatgagagaagccaatttc

SEQ ID NO: 73175 - DNA, 25 bp, Artificial
  Probe
gagaagccaatttcacagtgtcgtc

SEQ ID NO: 73176 - DNA, 25 bp, Artificial
  Probe
tgtaaataatccaatgcgctaaatc

SEQ ID NO: 73177 - DNA, 25 bp, Artificial
  Probe
tttaatggggtttatatgaactgtc

SEQ ID NO: 73178 - DNA, 25 bp, Artificial
  Probe
ctggctgacagagaaaatgagagaa

SEQ ID NO: 73179 - DNA, 25 bp, Artificial
  Probe
aaataatccaatgcgctaaatcttt

SEQ ID NO: 73180 - DNA, 25 bp, Artificial
  Probe
gtaaataatccaatgcgctaaatct

SEQ ID NO: 73181 - DNA, 25 bp, Artificial
  Probe
ttttgtgaagaatgatgacatccgc

SEQ ID NO: 73182 - DNA, 25 bp, Artificial
  Probe
gtgaagaatgatgacatccgcatcc

SEQ ID NO: 73183 - DNA, 25 bp, Artificial
  Probe
cccttccttatacccagttttgtta

SEQ ID NO: 73184 - DNA, 25 bp, Artificial
  Probe
ttgtatctatgacatccttggcctc

SEQ ID NO: 73185 - DNA, 25 bp, Artificial
  Probe
gtatctatgacatccttggcctcag

SEQ ID NO: 73186 - DNA, 25 bp, Artificial
  Probe
tatctatgacatccttggcctcaga

SEQ ID NO: 73187 - DNA, 25 bp, Artificial
  Probe
catcccttccttatacccagttttg

SEQ ID NO: 73188 - DNA, 25 bp, Artificial
  Probe
cccatcccttccttatacccagttt

SEQ ID NO: 73189 - DNA, 25 bp, Artificial
  Probe
atcccttccttatacccagttttgt

SEQ ID NO: 73190 - DNA, 25 bp, Artificial
  Probe
ccttccttatacccagttttgttat

SEQ ID NO: 73191 - DNA, 25 bp, Artificial
  Probe
tcccttccttatacccagttttgtt

SEQ ID NO: 73192 - DNA, 25 bp, Artificial
  Probe
gttttgtatctatgacatccttggc

SEQ ID NO: 73193 - DNA, 25 bp, Artificial
  Probe
cgttttgtatctatgacatccttgg

SEQ ID NO: 73194 - DNA, 25 bp, Artificial
  Probe
ccatcccttccttatacccagtttt

SEQ ID NO: 73195 - DNA, 25 bp, Artificial
  Probe
tcgttttgtatctatgacatccttg

SEQ ID NO: 73196 - DNA, 25 bp, Artificial
  Probe
tgtatctatgacatccttggcctca

SEQ ID NO: 73197 - DNA, 25 bp, Artificial
  Probe
ttccttatacccagttttgttatct

SEQ ID NO: 73198 - DNA, 25 bp, Artificial
  Probe
taatttgatagagaggtgatctccc

SEQ ID NO: 73199 - DNA, 25 bp, Artificial
  Probe
cttccttatacccagttttgttatc

SEQ ID NO: 73200 - DNA, 25 bp, Artificial
  Probe
tttgtatctatgacatccttggcct

SEQ ID NO: 73201 - DNA, 25 bp, Artificial
  Probe
atctatgacatccttggcctcagac

SEQ ID NO: 73202 - DNA, 25 bp, Artificial
  Probe
ccttatacccagttttgttatctac

SEQ ID NO: 73203 - DNA, 25 bp, Artificial
  Probe
tccttatacccagttttgttatcta

SEQ ID NO: 73204 - DNA, 25 bp, Artificial
  Probe
ttaatttgatagagaggtgatctcc

SEQ ID NO: 73205 - DNA, 25 bp, Artificial
  Probe
aaatagcttggcttcccttctaaaa

SEQ ID NO: 73206 - DNA, 25 bp, Artificial
  Probe
aaaatagcttggcttcccttctaaa

SEQ ID NO: 73207 - DNA, 25 bp, Artificial
  Probe
ttttgtatctatgacatccttggcc

SEQ ID NO: 73208 - DNA, 25 bp, Artificial
  Probe
cttatacccagttttgttatctaca

SEQ ID NO: 73209 - DNA, 25 bp, Artificial
  Probe
aatttgatagagaggtgatctcccc

SEQ ID NO: 73210 - DNA, 25 bp, Artificial
  Probe
tatgacatccttggcctcagacctt

SEQ ID NO: 73211 - DNA, 25 bp, Artificial
  Probe
tgaattaatttgatagagaggtgat

SEQ ID NO: 73212 - DNA, 25 bp, Artificial
  Probe
atgaattaatttgatagagaggtga

SEQ ID NO: 73213 - DNA, 25 bp, Artificial
  Probe
tgatgaattaatttgatagagaggt

SEQ ID NO: 73214 - DNA, 25 bp, Artificial
  Probe
attaatttgatagagaggtgatctc

SEQ ID NO: 73215 - DNA, 25 bp, Artificial
  Probe
gatgaattaatttgatagagaggtg

SEQ ID NO: 73216 - DNA, 25 bp, Artificial
  Probe
atttgatagagaggtgatctccccg

SEQ ID NO: 73217 - DNA, 25 bp, Artificial
  Probe
aattaatttgatagagaggtgatct

SEQ ID NO: 73218 - DNA, 25 bp, Artificial
  Probe
gaattaatttgatagagaggtgatc

SEQ ID NO: 73219 - DNA, 25 bp, Artificial
  Probe
ttatacccagttttgttatctacaa

SEQ ID NO: 73220 - DNA, 25 bp, Artificial
  Probe
aagatgacagactatgccaagaagc

SEQ ID NO: 73221 - DNA, 25 bp, Artificial
  Probe
aaagatgacagactatgccaagaag

SEQ ID NO: 73222 - DNA, 25 bp, Artificial
  Probe
gtggagataagaatttgggagtttg

SEQ ID NO: 73223 - DNA, 25 bp, Artificial
  Probe
tggagataagaatttgggagtttgg

SEQ ID NO: 73224 - DNA, 25 bp, Artificial
  Probe
ggtggagataagaatttgggagttt

SEQ ID NO: 73225 - DNA, 25 bp, Artificial
  Probe
gatggtggagataagaatttgggag

SEQ ID NO: 73226 - DNA, 25 bp, Artificial
  Probe
ggagataagaatttgggagtttggg

SEQ ID NO: 73227 - DNA, 25 bp, Artificial
  Probe
atggtggagataagaatttgggagt

SEQ ID NO: 73228 - DNA, 25 bp, Artificial
  Probe
gtgggatggtggagataagaatttg

SEQ ID NO: 73229 - DNA, 25 bp, Artificial
  Probe
agtgggatggtggagataagaattt

SEQ ID NO: 73230 - DNA, 25 bp, Artificial
  Probe
tggtggagataagaatttgggagtt

SEQ ID NO: 73231 - DNA, 25 bp, Artificial
  Probe
ggatggtggagataagaatttggga

SEQ ID NO: 73232 - DNA, 25 bp, Artificial
  Probe
cagtgggatggtggagataagaatt

SEQ ID NO: 73233 - DNA, 25 bp, Artificial
  Probe
tgggatggtggagataagaatttgg

SEQ ID NO: 73234 - DNA, 25 bp, Artificial
  Probe
ccctcaataaaggcagattaacctc

SEQ ID NO: 73235 - DNA, 25 bp, Artificial
  Probe
gggatggtggagataagaatttggg

SEQ ID NO: 73236 - DNA, 25 bp, Artificial
  Probe
ctaacaactactacagctttgccag

SEQ ID NO: 73237 - DNA, 25 bp, Artificial
  Probe
aaaagatgacagactatgccaagaa

SEQ ID NO: 73238 - DNA, 25 bp, Artificial
  Probe
gagataagaatttgggagtttgggg

SEQ ID NO: 73239 - DNA, 25 bp, Artificial
  Probe
atgacagactatgccaagaagcgag

SEQ ID NO: 73240 - DNA, 25 bp, Artificial
  Probe
gatgacagactatgccaagaagcga

SEQ ID NO: 73241 - DNA, 25 bp, Artificial
  Probe
agatgacagactatgccaagaagcg

SEQ ID NO: 73242 - DNA, 25 bp, Artificial
  Probe
cctaacaactactacagctttgcca

SEQ ID NO: 73243 - DNA, 25 bp, Artificial
  Probe
ccctaacaactactacagctttgcc

SEQ ID NO: 73244 - DNA, 25 bp, Artificial
  Probe
gccctaacaactactacagctttgc

SEQ ID NO: 73245 - DNA, 25 bp, Artificial
  Probe
taacaactactacagctttgccagc

SEQ ID NO: 73246 - DNA, 25 bp, Artificial
  Probe
ggccctaacaactactacagctttg

SEQ ID NO: 73247 - DNA, 25 bp, Artificial
  Probe
gattgttttccagtgaagcaccatg

SEQ ID NO: 73248 - DNA, 25 bp, Artificial
  Probe
agtgaagcaccatgtgtctcagttt

SEQ ID NO: 73249 - DNA, 25 bp, Artificial
  Probe
gccctcaataaaggcagattaacct

SEQ ID NO: 73250 - DNA, 25 bp, Artificial
  Probe
attgttttccagtgaagcaccatgt

SEQ ID NO: 73251 - DNA, 25 bp, Artificial
  Probe
ggattgttttccagtgaagcaccat

SEQ ID NO: 73252 - DNA, 25 bp, Artificial
  Probe
gtgaagcaccatgtgtctcagtttt

SEQ ID NO: 73253 - DNA, 25 bp, Artificial
  Probe
caaggggattgttttccagtgaagc

SEQ ID NO: 73254 - DNA, 25 bp, Artificial
  Probe
gcaaggggattgttttccagtgaag

SEQ ID NO: 73255 - DNA, 25 bp, Artificial
  Probe
ttgttttccagtgaagcaccatgtg

SEQ ID NO: 73256 - DNA, 25 bp, Artificial
  Probe
ctggccctcaataaaggcagattaa

SEQ ID NO: 73257 - DNA, 25 bp, Artificial
  Probe
tggccctcaataaaggcagattaac

SEQ ID NO: 73258 - DNA, 25 bp, Artificial
  Probe
aaggggattgttttccagtgaagca

SEQ ID NO: 73259 - DNA, 25 bp, Artificial
  Probe
gttttccagtgaagcaccatgtgtc

SEQ ID NO: 73260 - DNA, 25 bp, Artificial
  Probe
ttttccagtgaagcaccatgtgtct

SEQ ID NO: 73261 - DNA, 25 bp, Artificial
  Probe
ggccctcaataaaggcagattaacc

SEQ ID NO: 73262 - DNA, 25 bp, Artificial
  Probe
gctggccctcaataaaggcagatta

SEQ ID NO: 73263 - DNA, 25 bp, Artificial
  Probe
ctgccttgcctctatgatctaatta

SEQ ID NO: 73264 - DNA, 25 bp, Artificial
  Probe
gctgccttgcctctatgatctaatt

SEQ ID NO: 73265 - DNA, 25 bp, Artificial
  Probe
taattagtccggctattgtgcttaa

SEQ ID NO: 73266 - DNA, 25 bp, Artificial
  Probe
attgttggagggattcttctggttt

SEQ ID NO: 73267 - DNA, 25 bp, Artificial
  Probe
ctacttgttacagtatcgctgcctt

SEQ ID NO: 73268 - DNA, 25 bp, Artificial
  Probe
aattagtccggctattgtgcttaag

SEQ ID NO: 73269 - DNA, 25 bp, Artificial
  Probe
tacttgttacagtatcgctgccttg

SEQ ID NO: 73270 - DNA, 25 bp, Artificial
  Probe
ctcttgggctacttgttacagtatc

SEQ ID NO: 73271 - DNA, 25 bp, Artificial
  Probe
attagtccggctattgtgcttaaga

SEQ ID NO: 73272 - DNA, 25 bp, Artificial
  Probe
ttagtccggctattgtgcttaagaa

SEQ ID NO: 73273 - DNA, 25 bp, Artificial
  Probe
cattgttggagggattcttctggtt

SEQ ID NO: 73274 - DNA, 25 bp, Artificial
  Probe
cctcttgggctacttgttacagtat

SEQ ID NO: 73275 - DNA, 25 bp, Artificial
  Probe
aatccagtctagtggcaaagagaaa

SEQ ID NO: 73276 - DNA, 25 bp, Artificial
  Probe
gaagcgaaagcatatcctaaaacat

SEQ ID NO: 73277 - DNA, 25 bp, Artificial
  Probe
tcttgggctacttgttacagtatcg

SEQ ID NO: 73278 - DNA, 25 bp, Artificial
  Probe
agcgaaagcatatcctaaaacattt

SEQ ID NO: 73279 - DNA, 25 bp, Artificial
  Probe
aagcgaaagcatatcctaaaacatt

SEQ ID NO: 73280 - DNA, 25 bp, Artificial
  Probe
aaagagaaaaggaggggaaaagttt

SEQ ID NO: 73281 - DNA, 25 bp, Artificial
  Probe
tacttaaaggaggaaagaaaagggg

SEQ ID NO: 73282 - DNA, 25 bp, Artificial
  Probe
gccttgcctctatgatctaattagt

SEQ ID NO: 73283 - DNA, 25 bp, Artificial
  Probe
tgccttgcctctatgatctaattag

SEQ ID NO: 73284 - DNA, 25 bp, Artificial
  Probe
tgatctaattagtccggctattgtg

SEQ ID NO: 73285 - DNA, 25 bp, Artificial
  Probe
ttgcctctatgatctaattagtccg

SEQ ID NO: 73286 - DNA, 25 bp, Artificial
  Probe
caaagagaaaaggaggggaaaagtt

SEQ ID NO: 73287 - DNA, 25 bp, Artificial
  Probe
ctaattagtccggctattgtgctta

SEQ ID NO: 73288 - DNA, 25 bp, Artificial
  Probe
atgatctaattagtccggctattgt

SEQ ID NO: 73289 - DNA, 25 bp, Artificial
  Probe
aaatggctggggcaattatagaaaa

SEQ ID NO: 73290 - DNA, 25 bp, Artificial
  Probe
caatccagtctagtggcaaagagaa

SEQ ID NO: 73291 - DNA, 25 bp, Artificial
  Probe
acatttacttaaaggaggaaagaaa

SEQ ID NO: 73292 - DNA, 25 bp, Artificial
  Probe
aacatttacttaaaggaggaaagaa

SEQ ID NO: 73293 - DNA, 25 bp, Artificial
  Probe
aaacatttacttaaaggaggaaaga

SEQ ID NO: 73294 - DNA, 25 bp, Artificial
  Probe
cctctatgatctaattagtccggct

SEQ ID NO: 73295 - DNA, 25 bp, Artificial
  Probe
cttaaaggaggaaagaaaaggggtc

SEQ ID NO: 73296 - DNA, 25 bp, Artificial
  Probe
ctctatgatctaattagtccggcta

SEQ ID NO: 73297 - DNA, 25 bp, Artificial
  Probe
tgcctctatgatctaattagtccgg

SEQ ID NO: 73298 - DNA, 25 bp, Artificial
  Probe
ttacttaaaggaggaaagaaaaggg

SEQ ID NO: 73299 - DNA, 25 bp, Artificial
  Probe
gaaatggctggggcaattatagaaa

SEQ ID NO: 73300 - DNA, 25 bp, Artificial
  Probe
gcaattatagaaaacatgagcacca

SEQ ID NO: 73301 - DNA, 25 bp, Artificial
  Probe
ctggggcaattatagaaaacatgag

SEQ ID NO: 73302 - DNA, 25 bp, Artificial
  Probe
gatctaattagtccggctattgtgc

SEQ ID NO: 73303 - DNA, 25 bp, Artificial
  Probe
aatggctggggcaattatagaaaac

SEQ ID NO: 73304 - DNA, 25 bp, Artificial
  Probe
acttaaaggaggaaagaaaaggggt

SEQ ID NO: 73305 - DNA, 25 bp, Artificial
  Probe
cgctgccttgcctctatgatctaat

SEQ ID NO: 73306 - DNA, 25 bp, Artificial
  Probe
ggcaattatagaaaacatgagcacc

SEQ ID NO: 73307 - DNA, 25 bp, Artificial
  Probe
gggcaattatagaaaacatgagcac

SEQ ID NO: 73308 - DNA, 25 bp, Artificial
  Probe
ccagaagtaacaattatgacaccac

SEQ ID NO: 73309 - DNA, 25 bp, Artificial
  Probe
atgccagaagtaacaattatgacac

SEQ ID NO: 73310 - DNA, 25 bp, Artificial
  Probe
agaagtaacaattatgacaccacac

SEQ ID NO: 73311 - DNA, 25 bp, Artificial
  Probe
cagaagtaacaattatgacaccaca

SEQ ID NO: 73312 - DNA, 25 bp, Artificial
  Probe
gccagaagtaacaattatgacacca

SEQ ID NO: 73313 - DNA, 25 bp, Artificial
  Probe
tgccagaagtaacaattatgacacc

SEQ ID NO: 73314 - DNA, 25 bp, Artificial
  Probe
gaagtaacaattatgacaccacact

SEQ ID NO: 73315 - DNA, 25 bp, Artificial
  Probe
gctacatgccagaagtaacaattat

SEQ ID NO: 73316 - DNA, 25 bp, Artificial
  Probe
catgccagaagtaacaattatgaca

SEQ ID NO: 73317 - DNA, 25 bp, Artificial
  Probe
acatgccagaagtaacaattatgac

SEQ ID NO: 73318 - DNA, 25 bp, Artificial
  Probe
agctacatgccagaagtaacaatta

SEQ ID NO: 73319 - DNA, 25 bp, Artificial
  Probe
tacatgccagaagtaacaattatga

SEQ ID NO: 73320 - DNA, 25 bp, Artificial
  Probe
ctacatgccagaagtaacaattatg

SEQ ID NO: 73321 - DNA, 25 bp, Artificial
  Probe
cagctacatgccagaagtaacaatt

SEQ ID NO: 73322 - DNA, 25 bp, Artificial
  Probe
atttcagttatcatggtacggacac

SEQ ID NO: 73323 - DNA, 25 bp, Artificial
  Probe
acagctacatgccagaagtaacaat

SEQ ID NO: 73324 - DNA, 25 bp, Artificial
  Probe
gacatttcagttatcatggtacgga

SEQ ID NO: 73325 - DNA, 25 bp, Artificial
  Probe
catttcagttatcatggtacggaca

SEQ ID NO: 73326 - DNA, 25 bp, Artificial
  Probe
acatttcagttatcatggtacggac

SEQ ID NO: 73327 - DNA, 25 bp, Artificial
  Probe
cgacatttcagttatcatggtacgg

SEQ ID NO: 73328 - DNA, 25 bp, Artificial
  Probe
ggcgacatttcagttatcatggtac

SEQ ID NO: 73329 - DNA, 25 bp, Artificial
  Probe
cacagctacatgccagaagtaacaa

SEQ ID NO: 73330 - DNA, 25 bp, Artificial
  Probe
gcgacatttcagttatcatggtacg

SEQ ID NO: 73331 - DNA, 25 bp, Artificial
  Probe
tcactgtctaaaagcacttgtatgt

SEQ ID NO: 73332 - DNA, 25 bp, Artificial
  Probe
ttcactgtctaaaagcacttgtatg

SEQ ID NO: 73333 - DNA, 25 bp, Artificial
  Probe
ggttttaagcacttttcactgtcta

SEQ ID NO: 73334 - DNA, 25 bp, Artificial
  Probe
tttcactgtctaaaagcacttgtat

SEQ ID NO: 73335 - DNA, 25 bp, Artificial
  Probe
cattctccagtcacagaagtggttc

SEQ ID NO: 73336 - DNA, 25 bp, Artificial
  Probe
attctccagtcacagaagtggttct

SEQ ID NO: 73337 - DNA, 25 bp, Artificial
  Probe
cggcgacatttcagttatcatggta

SEQ ID NO: 73338 - DNA, 25 bp, Artificial
  Probe
gttttaagcacttttcactgtctaa

SEQ ID NO: 73339 - DNA, 25 bp, Artificial
  Probe
ttctccagtcacagaagtggttctt

SEQ ID NO: 73340 - DNA, 25 bp, Artificial
  Probe
gggttttaagcacttttcactgtct

SEQ ID NO: 73341 - DNA, 25 bp, Artificial
  Probe
tttcagttatcatggtacggacacc

SEQ ID NO: 73342 - DNA, 25 bp, Artificial
  Probe
tgggttttaagcacttttcactgtc

SEQ ID NO: 73343 - DNA, 25 bp, Artificial
  Probe
actgtctaaaagcacttgtatgtga

SEQ ID NO: 73344 - DNA, 25 bp, Artificial
  Probe
cactgtctaaaagcacttgtatgtg

SEQ ID NO: 73345 - DNA, 25 bp, Artificial
  Probe
ttttcactgtctaaaagcacttgta

SEQ ID NO: 73346 - DNA, 25 bp, Artificial
  Probe
attctgcactaggaaatggcataaa

SEQ ID NO: 73347 - DNA, 25 bp, Artificial
  Probe
ttttaagcacttttcactgtctaaa

SEQ ID NO: 73348 - DNA, 25 bp, Artificial
  Probe
tccacagctacatgccagaagtaac

SEQ ID NO: 73349 - DNA, 25 bp, Artificial
  Probe
gtccacagctacatgccagaagtaa

SEQ ID NO: 73350 - DNA, 25 bp, Artificial
  Probe
tctccagtcacagaagtggttcttg

SEQ ID NO: 73351 - DNA, 25 bp, Artificial
  Probe
cattctgcactaggaaatggcataa

SEQ ID NO: 73352 - DNA, 25 bp, Artificial
  Probe
ccacagctacatgccagaagtaaca

SEQ ID NO: 73353 - DNA, 25 bp, Artificial
  Probe
atctaagaagcagaagaagcaacat

SEQ ID NO: 73354 - DNA, 25 bp, Artificial
  Probe
tattgaccaggagccatctaagaag

SEQ ID NO: 73355 - DNA, 25 bp, Artificial
  Probe
ctattgaccaggagccatctaagaa

SEQ ID NO: 73356 - DNA, 25 bp, Artificial
  Probe
catctaagaagcagaagaagcaaca

SEQ ID NO: 73357 - DNA, 25 bp, Artificial
  Probe
taagaagcagaagaagcaacatgaa

SEQ ID NO: 73358 - DNA, 25 bp, Artificial
  Probe
ccatctaagaagcagaagaagcaac

SEQ ID NO: 73359 - DNA, 25 bp, Artificial
  Probe
ctaagaagcagaagaagcaacatga

SEQ ID NO: 73360 - DNA, 25 bp, Artificial
  Probe
tctaagaagcagaagaagcaacatg

SEQ ID NO: 73361 - DNA, 25 bp, Artificial
  Probe
aagaagcagaagaagcaacatgaag

SEQ ID NO: 73362 - DNA, 25 bp, Artificial
  Probe
ggagccatctaagaagcagaagaag

SEQ ID NO: 73363 - DNA, 25 bp, Artificial
  Probe
caagaagatgatggacaaggtggag

SEQ ID NO: 73364 - DNA, 25 bp, Artificial
  Probe
aggagccatctaagaagcagaagaa

SEQ ID NO: 73365 - DNA, 25 bp, Artificial
  Probe
agaagatgatggacaaggtggagtt

SEQ ID NO: 73366 - DNA, 25 bp, Artificial
  Probe
aagaagatgatggacaaggtggagt

SEQ ID NO: 73367 - DNA, 25 bp, Artificial
  Probe
gccatctaagaagcagaagaagcaa

SEQ ID NO: 73368 - DNA, 25 bp, Artificial
  Probe
gagccatctaagaagcagaagaagc

SEQ ID NO: 73369 - DNA, 25 bp, Artificial
  Probe
gtccatatgcttaatgccacaatgt

SEQ ID NO: 73370 - DNA, 25 bp, Artificial
  Probe
cctattgaccaggagccatctaaga

SEQ ID NO: 73371 - DNA, 25 bp, Artificial
  Probe
gaagatgatggacaaggtggagttt

SEQ ID NO: 73372 - DNA, 25 bp, Artificial
  Probe
agaagcagaagaagcaacatgaagg

SEQ ID NO: 73373 - DNA, 25 bp, Artificial
  Probe
caggagccatctaagaagcagaaga

SEQ ID NO: 73374 - DNA, 25 bp, Artificial
  Probe
acctattgaccaggagccatctaag

SEQ ID NO: 73375 - DNA, 25 bp, Artificial
  Probe
tgtccatatgcttaatgccacaatg

SEQ ID NO: 73376 - DNA, 25 bp, Artificial
  Probe
cagaccaagaagatgatggacaagg

SEQ ID NO: 73377 - DNA, 25 bp, Artificial
  Probe
agccatctaagaagcagaagaagca

SEQ ID NO: 73378 - DNA, 25 bp, Artificial
  Probe
cacctattgaccaggagccatctaa

SEQ ID NO: 73379 - DNA, 25 bp, Artificial
  Probe
tccatatgcttaatgccacaatgtg

SEQ ID NO: 73380 - DNA, 25 bp, Artificial
  Probe
gaccaagaagatgatggacaaggtg

SEQ ID NO: 73381 - DNA, 25 bp, Artificial
  Probe
aagatgatggacaaggtggagtttg

SEQ ID NO: 73382 - DNA, 25 bp, Artificial
  Probe
caagaactgatcccatttgtgaagc

SEQ ID NO: 73383 - DNA, 25 bp, Artificial
  Probe
ccatatgcttaatgccacaatgtgt

SEQ ID NO: 73384 - DNA, 25 bp, Artificial
  Probe
agaccaagaagatgatggacaaggt

SEQ ID NO: 73385 - DNA, 25 bp, Artificial
  Probe
attgaccaggagccatctaagaagc

SEQ ID NO: 73386 - DNA, 25 bp, Artificial
  Probe
gcagaccaagaagatgatggacaag

SEQ ID NO: 73387 - DNA, 25 bp, Artificial
  Probe
ttcctgttctaactgcacggattac

SEQ ID NO: 73388 - DNA, 25 bp, Artificial
  Probe
gagtttgtccatatgcttaatgcca

SEQ ID NO: 73389 - DNA, 25 bp, Artificial
  Probe
agtttgtccatatgcttaatgccac

SEQ ID NO: 73390 - DNA, 25 bp, Artificial
  Probe
aagaactgatcccatttgtgaagcc

SEQ ID NO: 73391 - DNA, 25 bp, Artificial
  Probe
tccgtgagttggtttcctgttctaa

SEQ ID NO: 73392 - DNA, 25 bp, Artificial
  Probe
ttccgtgagttggtttcctgttcta

SEQ ID NO: 73393 - DNA, 25 bp, Artificial
  Probe
ccaggagccatctaagaagcagaag

SEQ ID NO: 73394 - DNA, 25 bp, Artificial
  Probe
ctgttctaactgcacggattaccag

SEQ ID NO: 73395 - DNA, 25 bp, Artificial
  Probe
ccgtgagttggtttcctgttctaac

SEQ ID NO: 73396 - DNA, 25 bp, Artificial
  Probe
gtgagttggtttcctgttctaactg

SEQ ID NO: 73397 - DNA, 25 bp, Artificial
  Probe
ttgtccatatgcttaatgccacaat

SEQ ID NO: 73398 - DNA, 25 bp, Artificial
  Probe
aagagggagtggataagtaagacag

SEQ ID NO: 73399 - DNA, 25 bp, Artificial
  Probe
agagggagtggataagtaagacagg

SEQ ID NO: 73400 - DNA, 25 bp, Artificial
  Probe
gagtggataagtaagacagggcttc

SEQ ID NO: 73401 - DNA, 25 bp, Artificial
  Probe
tggataagtaagacagggcttctct

SEQ ID NO: 73402 - DNA, 25 bp, Artificial
  Probe
gtggataagtaagacagggcttctc

SEQ ID NO: 73403 - DNA, 25 bp, Artificial
  Probe
agtggataagtaagacagggcttct

SEQ ID NO: 73404 - DNA, 25 bp, Artificial
  Probe
cccttctccagccttgatttgattt

SEQ ID NO: 73405 - DNA, 25 bp, Artificial
  Probe
gagggagtggataagtaagacaggg

SEQ ID NO: 73406 - DNA, 25 bp, Artificial
  Probe
gatttgattttattttgacccaccg

SEQ ID NO: 73407 - DNA, 25 bp, Artificial
  Probe
cttctccagccttgatttgatttta

SEQ ID NO: 73408 - DNA, 25 bp, Artificial
  Probe
atttgattttattttgacccaccgc

SEQ ID NO: 73409 - DNA, 25 bp, Artificial
  Probe
tctccagccttgatttgattttatt

SEQ ID NO: 73410 - DNA, 25 bp, Artificial
  Probe
ttctccagccttgatttgattttat

SEQ ID NO: 73411 - DNA, 25 bp, Artificial
  Probe
ggataagtaagacagggcttctctt

SEQ ID NO: 73412 - DNA, 25 bp, Artificial
  Probe
ggagtggataagtaagacagggctt

SEQ ID NO: 73413 - DNA, 25 bp, Artificial
  Probe
tgatttgattttattttgacccacc

SEQ ID NO: 73414 - DNA, 25 bp, Artificial
  Probe
tggccctaatcttcattgtaatgta

SEQ ID NO: 73415 - DNA, 25 bp, Artificial
  Probe
ggccctaatcttcattgtaatgtac

SEQ ID NO: 73416 - DNA, 25 bp, Artificial
  Probe
ctccagccttgatttgattttattt

SEQ ID NO: 73417 - DNA, 25 bp, Artificial
  Probe
ccttctccagccttgatttgatttt

SEQ ID NO: 73418 - DNA, 25 bp, Artificial
  Probe
ttgattttattttgacccaccgctt

SEQ ID NO: 73419 - DNA, 25 bp, Artificial
  Probe
tttgattttattttgacccaccgct

SEQ ID NO: 73420 - DNA, 25 bp, Artificial
  Probe
gtggccctaatcttcattgtaatgt

SEQ ID NO: 73421 - DNA, 25 bp, Artificial
  Probe
gccttgatttgattttattttgacc

SEQ ID NO: 73422 - DNA, 25 bp, Artificial
  Probe
ccagccttgatttgattttattttg

SEQ ID NO: 73423 - DNA, 25 bp, Artificial
  Probe
tccagccttgatttgattttatttt

SEQ ID NO: 73424 - DNA, 25 bp, Artificial
  Probe
tgattttattttgacccaccgcttc

SEQ ID NO: 73425 - DNA, 25 bp, Artificial
  Probe
ggtggccctaatcttcattgtaatg

SEQ ID NO: 73426 - DNA, 25 bp, Artificial
  Probe
ccttgatttgattttattttgaccc

SEQ ID NO: 73427 - DNA, 25 bp, Artificial
  Probe
gattttattttgacccaccgcttcc

SEQ ID NO: 73428 - DNA, 25 bp, Artificial
  Probe
agccttgatttgattttattttgac

SEQ ID NO: 73429 - DNA, 25 bp, Artificial
  Probe
cagccttgatttgattttattttga

SEQ ID NO: 73430 - DNA, 25 bp, Artificial
  Probe
ttgatttgattttattttgacccac

SEQ ID NO: 73431 - DNA, 25 bp, Artificial
  Probe
ataagtaagacagggcttctcttag

SEQ ID NO: 73432 - DNA, 25 bp, Artificial
  Probe
gataagtaagacagggcttctctta

SEQ ID NO: 73433 - DNA, 25 bp, Artificial
  Probe
taagtaagacagggcttctcttagg

SEQ ID NO: 73434 - DNA, 25 bp, Artificial
  Probe
cttgatttgattttattttgaccca

SEQ ID NO: 73435 - DNA, 25 bp, Artificial
  Probe
cggtggccctaatcttcattgtaat

SEQ ID NO: 73436 - DNA, 25 bp, Artificial
  Probe
gtcaggaggtaggagacttggactc

SEQ ID NO: 73437 - DNA, 25 bp, Artificial
  Probe
accccaaccaataaacagaaagtgt

SEQ ID NO: 73438 - DNA, 25 bp, Artificial
  Probe
caccccaaccaataaacagaaagtg

SEQ ID NO: 73439 - DNA, 25 bp, Artificial
  Probe
ttttattttgacccaccgcttccat

SEQ ID NO: 73440 - DNA, 25 bp, Artificial
  Probe
attttattttgacccaccgcttcca

SEQ ID NO: 73441 - DNA, 25 bp, Artificial
  Probe
gccctaatcttcattgtaatgtaca

SEQ ID NO: 73442 - DNA, 25 bp, Artificial
  Probe
gggagtggataagtaagacagggct

SEQ ID NO: 73443 - DNA, 25 bp, Artificial
  Probe
acctctaattcttgaactgttagca

SEQ ID NO: 73444 - DNA, 25 bp, Artificial
  Probe
cctctaattcttgaactgttagcaa

SEQ ID NO: 73445 - DNA, 25 bp, Artificial
  Probe
aacctctaattcttgaactgttagc

SEQ ID NO: 73446 - DNA, 25 bp, Artificial
  Probe
taataccactacaaacttcacccaa

SEQ ID NO: 73447 - DNA, 25 bp, Artificial
  Probe
gtaataccactacaaacttcaccca

SEQ ID NO: 73448 - DNA, 25 bp, Artificial
  Probe
cttcagcataaattcaacccttcat

SEQ ID NO: 73449 - DNA, 25 bp, Artificial
  Probe
ttcttcagcataaattcaacccttc

SEQ ID NO: 73450 - DNA, 25 bp, Artificial
  Probe
cttcttcagcataaattcaaccctt

SEQ ID NO: 73451 - DNA, 25 bp, Artificial
  Probe
cagcataaattcaacccttcataca

SEQ ID NO: 73452 - DNA, 25 bp, Artificial
  Probe
gacttcttcagcataaattcaaccc

SEQ ID NO: 73453 - DNA, 25 bp, Artificial
  Probe
tgagtcttgaggtaataccactaca

SEQ ID NO: 73454 - DNA, 25 bp, Artificial
  Probe
gagtcttgaggtaataccactacaa

SEQ ID NO: 73455 - DNA, 25 bp, Artificial
  Probe
taggcatggagacaattacctgtta

SEQ ID NO: 73456 - DNA, 25 bp, Artificial
  Probe
tcagcataaattcaacccttcatac

SEQ ID NO: 73457 - DNA, 25 bp, Artificial
  Probe
tcttcagcataaattcaacccttca

SEQ ID NO: 73458 - DNA, 25 bp, Artificial
  Probe
acttcttcagcataaattcaaccct

SEQ ID NO: 73459 - DNA, 25 bp, Artificial
  Probe
cgacttcttcagcataaattcaacc

SEQ ID NO: 73460 - DNA, 25 bp, Artificial
  Probe
atgagtcttgaggtaataccactac

SEQ ID NO: 73461 - DNA, 25 bp, Artificial
  Probe
gatgagtcttgaggtaataccacta

SEQ ID NO: 73462 - DNA, 25 bp, Artificial
  Probe
aataccactacaaacttcacccaag

SEQ ID NO: 73463 - DNA, 25 bp, Artificial
  Probe
attcaacccttcatacatcctagag

SEQ ID NO: 73464 - DNA, 25 bp, Artificial
  Probe
aattcaacccttcatacatcctaga

SEQ ID NO: 73465 - DNA, 25 bp, Artificial
  Probe
agcataaattcaacccttcatacat

SEQ ID NO: 73466 - DNA, 25 bp, Artificial
  Probe
ttcagcataaattcaacccttcata

SEQ ID NO: 73467 - DNA, 25 bp, Artificial
  Probe
ggatgagtcttgaggtaataccact

SEQ ID NO: 73468 - DNA, 25 bp, Artificial
  Probe
ctggatgagtcttgaggtaatacca

SEQ ID NO: 73469 - DNA, 25 bp, Artificial
  Probe
gcataaattcaacccttcatacatc

SEQ ID NO: 73470 - DNA, 25 bp, Artificial
  Probe
tggatgagtcttgaggtaataccac

SEQ ID NO: 73471 - DNA, 25 bp, Artificial
  Probe
aggcatggagacaattacctgttaa

SEQ ID NO: 73472 - DNA, 25 bp, Artificial
  Probe
ttaggcatggagacaattacctgtt

SEQ ID NO: 73473 - DNA, 25 bp, Artificial
  Probe
ctgactttaggcatggagacaatta

SEQ ID NO: 73474 - DNA, 25 bp, Artificial
  Probe
aaattcaacccttcatacatcctag

SEQ ID NO: 73475 - DNA, 25 bp, Artificial
  Probe
tgactttaggcatggagacaattac

SEQ ID NO: 73476 - DNA, 25 bp, Artificial
  Probe
cctggatgagtcttgaggtaatacc

SEQ ID NO: 73477 - DNA, 25 bp, Artificial
  Probe
cataaattcaacccttcatacatcc

SEQ ID NO: 73478 - DNA, 25 bp, Artificial
  Probe
gaggctaccctgtaagaacaaatat

SEQ ID NO: 73479 - DNA, 25 bp, Artificial
  Probe
ataaattcaacccttcatacatcct

SEQ ID NO: 73480 - DNA, 25 bp, Artificial
  Probe
gactttaggcatggagacaattacc

SEQ ID NO: 73481 - DNA, 25 bp, Artificial
  Probe
tactgactttaggcatggagacaat

SEQ ID NO: 73482 - DNA, 25 bp, Artificial
  Probe
aagtttagaggctaccctgtaagaa

SEQ ID NO: 73483 - DNA, 25 bp, Artificial
  Probe
aaagtttagaggctaccctgtaaga

SEQ ID NO: 73484 - DNA, 25 bp, Artificial
  Probe
agaggctaccctgtaagaacaaata

SEQ ID NO: 73485 - DNA, 25 bp, Artificial
  Probe
tagaggctaccctgtaagaacaaat

SEQ ID NO: 73486 - DNA, 25 bp, Artificial
  Probe
ttactgactttaggcatggagacaa

SEQ ID NO: 73487 - DNA, 25 bp, Artificial
  Probe
tttactgactttaggcatggagaca

SEQ ID NO: 73488 - DNA, 25 bp, Artificial
  Probe
aacaccaagtgctacgaactatcta

SEQ ID NO: 73489 - DNA, 25 bp, Artificial
  Probe
acaccaagtgctacgaactatctag

SEQ ID NO: 73490 - DNA, 25 bp, Artificial
  Probe
gaacaccaagtgctacgaactatct

SEQ ID NO: 73491 - DNA, 25 bp, Artificial
  Probe
catttacagagtcccttgttacttt

SEQ ID NO: 73492 - DNA, 25 bp, Artificial
  Probe
agaggacacacataccacataccac

SEQ ID NO: 73493 - DNA, 25 bp, Artificial
  Probe
cagaggacacacataccacatacca

SEQ ID NO: 73494 - DNA, 25 bp, Artificial
  Probe
accaagtgctacgaactatctagaa

SEQ ID NO: 73495 - DNA, 25 bp, Artificial
  Probe
ggaacaccaagtgctacgaactatc

SEQ ID NO: 73496 - DNA, 25 bp, Artificial
  Probe
caccaagtgctacgaactatctaga

SEQ ID NO: 73497 - DNA, 25 bp, Artificial
  Probe
gaactatctagaaaccacgatcctc

SEQ ID NO: 73498 - DNA, 25 bp, Artificial
  Probe
tacgaactatctagaaaccacgatc

SEQ ID NO: 73499 - DNA, 25 bp, Artificial
  Probe
ctacgaactatctagaaaccacgat

SEQ ID NO: 73500 - DNA, 25 bp, Artificial
  Probe
aactatctagaaaccacgatcctct

SEQ ID NO: 73501 - DNA, 25 bp, Artificial
  Probe
tatctagaaaccacgatcctctcag

SEQ ID NO: 73502 - DNA, 25 bp, Artificial
  Probe
ctatctagaaaccacgatcctctca

SEQ ID NO: 73503 - DNA, 25 bp, Artificial
  Probe
actatctagaaaccacgatcctctc

SEQ ID NO: 73504 - DNA, 25 bp, Artificial
  Probe
aagtgctacgaactatctagaaacc

SEQ ID NO: 73505 - DNA, 25 bp, Artificial
  Probe
ccaagtgctacgaactatctagaaa

SEQ ID NO: 73506 - DNA, 25 bp, Artificial
  Probe
caagtgctacgaactatctagaaac

SEQ ID NO: 73507 - DNA, 25 bp, Artificial
  Probe
tggaacaccaagtgctacgaactat

SEQ ID NO: 73508 - DNA, 25 bp, Artificial
  Probe
agtgctacgaactatctagaaacca

SEQ ID NO: 73509 - DNA, 25 bp, Artificial
  Probe
cgaactatctagaaaccacgatcct

SEQ ID NO: 73510 - DNA, 25 bp, Artificial
  Probe
gcagaggacacacataccacatacc

SEQ ID NO: 73511 - DNA, 25 bp, Artificial
  Probe
acgaactatctagaaaccacgatcc

SEQ ID NO: 73512 - DNA, 25 bp, Artificial
  Probe
gctacgaactatctagaaaccacga

SEQ ID NO: 73513 - DNA, 25 bp, Artificial
  Probe
tgctacgaactatctagaaaccacg

SEQ ID NO: 73514 - DNA, 25 bp, Artificial
  Probe
gtgctacgaactatctagaaaccac

SEQ ID NO: 73515 - DNA, 25 bp, Artificial
  Probe
atttacagagtcccttgttactttt

SEQ ID NO: 73516 - DNA, 25 bp, Artificial
  Probe
atctagaaaccacgatcctctcagt

SEQ ID NO: 73517 - DNA, 25 bp, Artificial
  Probe
gatttagccgcagaggacacacata

SEQ ID NO: 73518 - DNA, 25 bp, Artificial
  Probe
atttagccgcagaggacacacatac

SEQ ID NO: 73519 - DNA, 25 bp, Artificial
  Probe
tctagaaaccacgatcctctcagtg

SEQ ID NO: 73520 - DNA, 25 bp, Artificial
  Probe
gtgactccaatcagttcagatatgt

SEQ ID NO: 73521 - DNA, 25 bp, Artificial
  Probe
tgtgactccaatcagttcagatatg

SEQ ID NO: 73522 - DNA, 25 bp, Artificial
  Probe
tgactccaatcagttcagatatgta

SEQ ID NO: 73523 - DNA, 25 bp, Artificial
  Probe
actccaatcagttcagatatgtaac

SEQ ID NO: 73524 - DNA, 25 bp, Artificial
  Probe
gactccaatcagttcagatatgtaa

SEQ ID NO: 73525 - DNA, 25 bp, Artificial
  Probe
gcatcacatctgtaaagcaatcaat

SEQ ID NO: 73526 - DNA, 25 bp, Artificial
  Probe
aggagttgcattatagccaatagta

SEQ ID NO: 73527 - DNA, 25 bp, Artificial
  Probe
caggagttgcattatagccaatagt

SEQ ID NO: 73528 - DNA, 25 bp, Artificial
  Probe
ggagttgcattatagccaatagtaa

SEQ ID NO: 73529 - DNA, 25 bp, Artificial
  Probe
ccaggagttgcattatagccaatag

SEQ ID NO: 73530 - DNA, 25 bp, Artificial
  Probe
catcacatctgtaaagcaatcaatt

SEQ ID NO: 73531 - DNA, 25 bp, Artificial
  Probe
tccaggagttgcattatagccaata

SEQ ID NO: 73532 - DNA, 25 bp, Artificial
  Probe
tttgtgatgtgtaccatactgtgtg

SEQ ID NO: 73533 - DNA, 25 bp, Artificial
  Probe
ggcatcacatctgtaaagcaatcaa

SEQ ID NO: 73534 - DNA, 25 bp, Artificial
  Probe
attattatgcctttcaggaggatgg

SEQ ID NO: 73535 - DNA, 25 bp, Artificial
  Probe
tattatgcctttcaggaggatggta

SEQ ID NO: 73536 - DNA, 25 bp, Artificial
  Probe
atccaggagttgcattatagccaat

SEQ ID NO: 73537 - DNA, 25 bp, Artificial
  Probe
ttgtgatgtgtaccatactgtgtgc

SEQ ID NO: 73538 - DNA, 25 bp, Artificial
  Probe
caaattattatgcctttcaggagga

SEQ ID NO: 73539 - DNA, 25 bp, Artificial
  Probe
tcaaattattatgcctttcaggagg

SEQ ID NO: 73540 - DNA, 25 bp, Artificial
  Probe
actgcttacaatgatccaggagttg

SEQ ID NO: 73541 - DNA, 25 bp, Artificial
  Probe
ttaaactgcttacaatgatccagga

SEQ ID NO: 73542 - DNA, 25 bp, Artificial
  Probe
aattattatgcctttcaggaggatg

SEQ ID NO: 73543 - DNA, 25 bp, Artificial
  Probe
atgatccaggagttgcattatagcc

SEQ ID NO: 73544 - DNA, 25 bp, Artificial
  Probe
taaactgcttacaatgatccaggag

SEQ ID NO: 73545 - DNA, 25 bp, Artificial
  Probe
ctccttgtagtgactcttcgtgttt

SEQ ID NO: 73546 - DNA, 25 bp, Artificial
  Probe
gtcagattgttgtatttattccact

SEQ ID NO: 73547 - DNA, 25 bp, Artificial
  Probe
agtcagattgttgtatttattccac

SEQ ID NO: 73548 - DNA, 25 bp, Artificial
  Probe
acaatgatccaggagttgcattata

SEQ ID NO: 73549 - DNA, 25 bp, Artificial
  Probe
tacaatgatccaggagttgcattat

SEQ ID NO: 73550 - DNA, 25 bp, Artificial
  Probe
ttacaatgatccaggagttgcatta

SEQ ID NO: 73551 - DNA, 25 bp, Artificial
  Probe
gtgatgtgtaccatactgtgtgctc

SEQ ID NO: 73552 - DNA, 25 bp, Artificial
  Probe
caatgatccaggagttgcattatag

SEQ ID NO: 73553 - DNA, 25 bp, Artificial
  Probe
ttattatgcctttcaggaggatggt

SEQ ID NO: 73554 - DNA, 25 bp, Artificial
  Probe
actcaaattattatgcctttcagga

SEQ ID NO: 73555 - DNA, 25 bp, Artificial
  Probe
ccaatcagttcagatatgtaactca

SEQ ID NO: 73556 - DNA, 25 bp, Artificial
  Probe
gatccaggagttgcattatagccaa

SEQ ID NO: 73557 - DNA, 25 bp, Artificial
  Probe
aatgatccaggagttgcattatagc

SEQ ID NO: 73558 - DNA, 25 bp, Artificial
  Probe
attatgcctttcaggaggatggtag

SEQ ID NO: 73559 - DNA, 25 bp, Artificial
  Probe
aaattattatgcctttcaggaggat

SEQ ID NO: 73560 - DNA, 25 bp, Artificial
  Probe
tccaatcagttcagatatgtaactc

SEQ ID NO: 73561 - DNA, 25 bp, Artificial
  Probe
ctccaatcagttcagatatgtaact

SEQ ID NO: 73562 - DNA, 25 bp, Artificial
  Probe
cttacaatgatccaggagttgcatt

SEQ ID NO: 73563 - DNA, 25 bp, Artificial
  Probe
ttatttaagcatctctgtttacctg

SEQ ID NO: 73564 - DNA, 25 bp, Artificial
  Probe
cctttcaggaggatggtagaacaat

SEQ ID NO: 73565 - DNA, 25 bp, Artificial
  Probe
tgttgtgtaatctcatccaagtcat

SEQ ID NO: 73566 - DNA, 25 bp, Artificial
  Probe
gttgtgtaatctcatccaagtcatt

SEQ ID NO: 73567 - DNA, 25 bp, Artificial
  Probe
ctgttgtgtaatctcatccaagtca

SEQ ID NO: 73568 - DNA, 25 bp, Artificial
  Probe
actgttgtgtaatctcatccaagtc

SEQ ID NO: 73569 - DNA, 25 bp, Artificial
  Probe
atgaatatgtattacaggaccgcat

SEQ ID NO: 73570 - DNA, 25 bp, Artificial
  Probe
tatgaatatgtattacaggaccgca

SEQ ID NO: 73571 - DNA, 25 bp, Artificial
  Probe
acattacttagacattagacatgcc

SEQ ID NO: 73572 - DNA, 25 bp, Artificial
  Probe
cactgttgtgtaatctcatccaagt

SEQ ID NO: 73573 - DNA, 25 bp, Artificial
  Probe
tgaatatgtattacaggaccgcata

SEQ ID NO: 73574 - DNA, 25 bp, Artificial
  Probe
gaatatgtattacaggaccgcatac

SEQ ID NO: 73575 - DNA, 25 bp, Artificial
  Probe
ttatgaatatgtattacaggaccgc

SEQ ID NO: 73576 - DNA, 25 bp, Artificial
  Probe
gactcaactcataactactcttact

SEQ ID NO: 73577 - DNA, 25 bp, Artificial
  Probe
tgtaatctcatccaagtcatttcca

SEQ ID NO: 73578 - DNA, 25 bp, Artificial
  Probe
gtgtaatctcatccaagtcatttcc

SEQ ID NO: 73579 - DNA, 25 bp, Artificial
  Probe
gtcatttccagaacattccatcatt

SEQ ID NO: 73580 - DNA, 25 bp, Artificial
  Probe
gtaatctcatccaagtcatttccag

SEQ ID NO: 73581 - DNA, 25 bp, Artificial
  Probe
agtcatttccagaacattccatcat

SEQ ID NO: 73582 - DNA, 25 bp, Artificial
  Probe
caagtcatttccagaacattccatc

SEQ ID NO: 73583 - DNA, 25 bp, Artificial
  Probe
catccaagtcatttccagaacattc

SEQ ID NO: 73584 - DNA, 25 bp, Artificial
  Probe
aagtcatttccagaacattccatca

SEQ ID NO: 73585 - DNA, 25 bp, Artificial
  Probe
tcatccaagtcatttccagaacatt

SEQ ID NO: 73586 - DNA, 25 bp, Artificial
  Probe
agactcaactcataactactcttac

SEQ ID NO: 73587 - DNA, 25 bp, Artificial
  Probe
ccatcattccaaatagagactcaac

SEQ ID NO: 73588 - DNA, 25 bp, Artificial
  Probe
tgtgtaatctcatccaagtcatttc

SEQ ID NO: 73589 - DNA, 25 bp, Artificial
  Probe
tagtgatgttgtttaggaagtctct

SEQ ID NO: 73590 - DNA, 25 bp, Artificial
  Probe
tccatcattccaaatagagactcaa

SEQ ID NO: 73591 - DNA, 25 bp, Artificial
  Probe
ttccatcattccaaatagagactca

SEQ ID NO: 73592 - DNA, 25 bp, Artificial
  Probe
agtgatgttgtttaggaagtctctt

SEQ ID NO: 73593 - DNA, 25 bp, Artificial
  Probe
catttccagaacattccatcattcc

SEQ ID NO: 73594 - DNA, 25 bp, Artificial
  Probe
tcatttccagaacattccatcattc

SEQ ID NO: 73595 - DNA, 25 bp, Artificial
  Probe
acattccatcattccaaatagagac

SEQ ID NO: 73596 - DNA, 25 bp, Artificial
  Probe
ctcatccaagtcatttccagaacat

SEQ ID NO: 73597 - DNA, 25 bp, Artificial
  Probe
aatctcatccaagtcatttccagaa

SEQ ID NO: 73598 - DNA, 25 bp, Artificial
  Probe
ccagaacattccatcattccaaata

SEQ ID NO: 73599 - DNA, 25 bp, Artificial
  Probe
tccagaacattccatcattccaaat

SEQ ID NO: 73600 - DNA, 25 bp, Artificial
  Probe
atttccagaacattccatcattcca

SEQ ID NO: 73601 - DNA, 25 bp, Artificial
  Probe
tttccgttgagagacagaactttaa

SEQ ID NO: 73602 - DNA, 25 bp, Artificial
  Probe
ctggaaatagtgatgttgtttagga

SEQ ID NO: 73603 - DNA, 25 bp, Artificial
  Probe
taatctcatccaagtcatttccaga

SEQ ID NO: 73604 - DNA, 25 bp, Artificial
  Probe
ttccagaacattccatcattccaaa

SEQ ID NO: 73605 - DNA, 25 bp, Artificial
  Probe
tttccagaacattccatcattccaa

SEQ ID NO: 73606 - DNA, 25 bp, Artificial
  Probe
atccaagtcatttccagaacattcc

SEQ ID NO: 73607 - DNA, 25 bp, Artificial
  Probe
actcaactcataactactcttactt

SEQ ID NO: 73608 - DNA, 25 bp, Artificial
  Probe
atctcatccaagtcatttccagaac

SEQ ID NO: 73609 - DNA, 25 bp, Artificial
  Probe
cattccatcattccaaatagagact

SEQ ID NO: 73610 - DNA, 25 bp, Artificial
  Probe
taggatgacacttgggctatttaac

SEQ ID NO: 73611 - DNA, 25 bp, Artificial
  Probe
tatggaagggtggatgaataatgga

SEQ ID NO: 73612 - DNA, 25 bp, Artificial
  Probe
ttatggaagggtggatgaataatgg

SEQ ID NO: 73613 - DNA, 25 bp, Artificial
  Probe
acttatggaagggtggatgaataat

SEQ ID NO: 73614 - DNA, 25 bp, Artificial
  Probe
ctaggatgacacttgggctatttaa

SEQ ID NO: 73615 - DNA, 25 bp, Artificial
  Probe
cttatggaagggtggatgaataatg

SEQ ID NO: 73616 - DNA, 25 bp, Artificial
  Probe
tctaggatgacacttgggctattta

SEQ ID NO: 73617 - DNA, 25 bp, Artificial
  Probe
atggaagggtggatgaataatggat

SEQ ID NO: 73618 - DNA, 25 bp, Artificial
  Probe
ctttatgctctaggatgacacttgg

SEQ ID NO: 73619 - DNA, 25 bp, Artificial
  Probe
tggaagggtggatgaataatggatt

SEQ ID NO: 73620 - DNA, 25 bp, Artificial
  Probe
ctctaggatgacacttgggctattt

SEQ ID NO: 73621 - DNA, 25 bp, Artificial
  Probe
gaatatttagcacagcctcaacatg

SEQ ID NO: 73622 - DNA, 25 bp, Artificial
  Probe
cacttatggaagggtggatgaataa

SEQ ID NO: 73623 - DNA, 25 bp, Artificial
  Probe
tttatgctctaggatgacacttggg

SEQ ID NO: 73624 - DNA, 25 bp, Artificial
  Probe
acacttatggaagggtggatgaata

SEQ ID NO: 73625 - DNA, 25 bp, Artificial
  Probe
cctttatgctctaggatgacacttg

SEQ ID NO: 73626 - DNA, 25 bp, Artificial
  Probe
aatgaatatttagcacagcctcaac

SEQ ID NO: 73627 - DNA, 25 bp, Artificial
  Probe
aggatgacacttgggctatttaacc

SEQ ID NO: 73628 - DNA, 25 bp, Artificial
  Probe
cacactaggtctcctttatgctcta

SEQ ID NO: 73629 - DNA, 25 bp, Artificial
  Probe
tgaatatttagcacagcctcaacat

SEQ ID NO: 73630 - DNA, 25 bp, Artificial
  Probe
atgaatatttagcacagcctcaaca

SEQ ID NO: 73631 - DNA, 25 bp, Artificial
  Probe
aatatttagcacagcctcaacatgg

SEQ ID NO: 73632 - DNA, 25 bp, Artificial
  Probe
taatgaatatttagcacagcctcaa

SEQ ID NO: 73633 - DNA, 25 bp, Artificial
  Probe
acactaggtctcctttatgctctag

SEQ ID NO: 73634 - DNA, 25 bp, Artificial
  Probe
atatttagcacagcctcaacatgga

SEQ ID NO: 73635 - DNA, 25 bp, Artificial
  Probe
cactaggtctcctttatgctctagg

SEQ ID NO: 73636 - DNA, 25 bp, Artificial
  Probe
cttgaatgggacacttatggaaggg

SEQ ID NO: 73637 - DNA, 25 bp, Artificial
  Probe
gacacttatggaagggtggatgaat

SEQ ID NO: 73638 - DNA, 25 bp, Artificial
  Probe
taccacactaggtctcctttatgct

SEQ ID NO: 73639 - DNA, 25 bp, Artificial
  Probe
tatttagcacagcctcaacatggac

SEQ ID NO: 73640 - DNA, 25 bp, Artificial
  Probe
gtaccacactaggtctcctttatgc

SEQ ID NO: 73641 - DNA, 25 bp, Artificial
  Probe
ttgaatgggacacttatggaagggt

SEQ ID NO: 73642 - DNA, 25 bp, Artificial
  Probe
gcttgaatgggacacttatggaagg

SEQ ID NO: 73643 - DNA, 25 bp, Artificial
  Probe
ggcttgaatgggacacttatggaag

SEQ ID NO: 73644 - DNA, 25 bp, Artificial
  Probe
gctctaggatgacacttgggctatt

SEQ ID NO: 73645 - DNA, 25 bp, Artificial
  Probe
ccacactaggtctcctttatgctct

SEQ ID NO: 73646 - DNA, 25 bp, Artificial
  Probe
tggcttgaatgggacacttatggaa

SEQ ID NO: 73647 - DNA, 25 bp, Artificial
  Probe
ttatgctctaggatgacacttgggc

SEQ ID NO: 73648 - DNA, 25 bp, Artificial
  Probe
accacactaggtctcctttatgctc

SEQ ID NO: 73649 - DNA, 25 bp, Artificial
  Probe
tagcacagcctcaacatggactcta

SEQ ID NO: 73650 - DNA, 25 bp, Artificial
  Probe
ggacacttatggaagggtggatgaa

SEQ ID NO: 73651 - DNA, 25 bp, Artificial
  Probe
ctaggtctcctttatgctctaggat

SEQ ID NO: 73652 - DNA, 25 bp, Artificial
  Probe
taggtctcctttatgctctaggatg

SEQ ID NO: 73653 - DNA, 25 bp, Artificial
  Probe
tgaatgggacacttatggaagggtg

SEQ ID NO: 73654 - DNA, 25 bp, Artificial
  Probe
atttagcacagcctcaacatggact

SEQ ID NO: 73655 - DNA, 25 bp, Artificial
  Probe
ccaattctcctcatcgtctcaattc

SEQ ID NO: 73656 - DNA, 25 bp, Artificial
  Probe
caccaagaactaaggctgctagatg

SEQ ID NO: 73657 - DNA, 25 bp, Artificial
  Probe
caagaactaaggctgctagatgctg

SEQ ID NO: 73658 - DNA, 25 bp, Artificial
  Probe
tttcatctgcccaattctcctcatc

SEQ ID NO: 73659 - DNA, 25 bp, Artificial
  Probe
ctttcatctgcccaattctcctcat

SEQ ID NO: 73660 - DNA, 25 bp, Artificial
  Probe
cccaattctcctcatcgtctcaatt

SEQ ID NO: 73661 - DNA, 25 bp, Artificial
  Probe
ccaagaactaaggctgctagatgct

SEQ ID NO: 73662 - DNA, 25 bp, Artificial
  Probe
ctcacctttcatctgcccaattctc

SEQ ID NO: 73663 - DNA, 25 bp, Artificial
  Probe
accaagaactaaggctgctagatgc

SEQ ID NO: 73664 - DNA, 25 bp, Artificial
  Probe
aagaactaaggctgctagatgctgc

SEQ ID NO: 73665 - DNA, 25 bp, Artificial
  Probe
tcaatcatccagagatgtgacctcc

SEQ ID NO: 73666 - DNA, 25 bp, Artificial
  Probe
gtacaagatcctgctggatgtgaag

SEQ ID NO: 73667 - DNA, 25 bp, Artificial
  Probe
tacaagatcctgctggatgtgaaga

SEQ ID NO: 73668 - DNA, 25 bp, Artificial
  Probe
aatcatccagagatgtgacctccac

SEQ ID NO: 73669 - DNA, 25 bp, Artificial
  Probe
caatcatccagagatgtgacctcca

SEQ ID NO: 73670 - DNA, 25 bp, Artificial
  Probe
agtacaagatcctgctggatgtgaa

SEQ ID NO: 73671 - DNA, 25 bp, Artificial
  Probe
cctttcatctgcccaattctcctca

SEQ ID NO: 73672 - DNA, 25 bp, Artificial
  Probe
acctttcatctgcccaattctcctc

SEQ ID NO: 73673 - DNA, 25 bp, Artificial
  Probe
gcccaattctcctcatcgtctcaat

SEQ ID NO: 73674 - DNA, 25 bp, Artificial
  Probe
ttcatctgcccaattctcctcatcg

SEQ ID NO: 73675 - DNA, 25 bp, Artificial
  Probe
cacctttcatctgcccaattctcct

SEQ ID NO: 73676 - DNA, 25 bp, Artificial
  Probe
tcacctttcatctgcccaattctcc

SEQ ID NO: 73677 - DNA, 25 bp, Artificial
  Probe
gagtacaagatcctgctggatgtga

SEQ ID NO: 73678 - DNA, 25 bp, Artificial
  Probe
gcaccaagaactaaggctgctagat

SEQ ID NO: 73679 - DNA, 25 bp, Artificial
  Probe
aagatcctgctggatgtgaagactc

SEQ ID NO: 73680 - DNA, 25 bp, Artificial
  Probe
atgctcacctttcatctgcccaatt

SEQ ID NO: 73681 - DNA, 25 bp, Artificial
  Probe
caagatcctgctggatgtgaagact

SEQ ID NO: 73682 - DNA, 25 bp, Artificial
  Probe
acaagatcctgctggatgtgaagac

SEQ ID NO: 73683 - DNA, 25 bp, Artificial
  Probe
ggagtacaagatcctgctggatgtg

SEQ ID NO: 73684 - DNA, 25 bp, Artificial
  Probe
aggagtacaagatcctgctggatgt

SEQ ID NO: 73685 - DNA, 25 bp, Artificial
  Probe
ccatgaattctgtctctaagagctt

SEQ ID NO: 73686 - DNA, 25 bp, Artificial
  Probe
aggccatgaattctgtctctaagag

SEQ ID NO: 73687 - DNA, 25 bp, Artificial
  Probe
ctgtgaaagggtgtctctgtcattt

SEQ ID NO: 73688 - DNA, 25 bp, Artificial
  Probe
gccatgaattctgtctctaagagct

SEQ ID NO: 73689 - DNA, 25 bp, Artificial
  Probe
caggccatgaattctgtctctaaga

SEQ ID NO: 73690 - DNA, 25 bp, Artificial
  Probe
tgaaagggtgtctctgtcattttaa

SEQ ID NO: 73691 - DNA, 25 bp, Artificial
  Probe
gtgaaagggtgtctctgtcatttta

SEQ ID NO: 73692 - DNA, 25 bp, Artificial
  Probe
catgaattctgtctctaagagcttt

SEQ ID NO: 73693 - DNA, 25 bp, Artificial
  Probe
tgaattctgtctctaagagctttac

SEQ ID NO: 73694 - DNA, 25 bp, Artificial
  Probe
ggccatgaattctgtctctaagagc

SEQ ID NO: 73695 - DNA, 25 bp, Artificial
  Probe
ctcttccaccatcaagtacaccacc

SEQ ID NO: 73696 - DNA, 25 bp, Artificial
  Probe
tgtgaaagggtgtctctgtcatttt

SEQ ID NO: 73697 - DNA, 25 bp, Artificial
  Probe
gaagagctacaggccatgaattctg

SEQ ID NO: 73698 - DNA, 25 bp, Artificial
  Probe
atgaattctgtctctaagagcttta

SEQ ID NO: 73699 - DNA, 25 bp, Artificial
  Probe
cagctcttccaccatcaagtacacc

SEQ ID NO: 73700 - DNA, 25 bp, Artificial
  Probe
tacaggccatgaattctgtctctaa

SEQ ID NO: 73701 - DNA, 25 bp, Artificial
  Probe
aggaagagctacaggccatgaattc

SEQ ID NO: 73702 - DNA, 25 bp, Artificial
  Probe
cctgtgaaagggtgtctctgtcatt

SEQ ID NO: 73703 - DNA, 25 bp, Artificial
  Probe
ggaagagctacaggccatgaattct

SEQ ID NO: 73704 - DNA, 25 bp, Artificial
  Probe
ctacaggccatgaattctgtctcta

SEQ ID NO: 73705 - DNA, 25 bp, Artificial
  Probe
caggaagagctacaggccatgaatt

SEQ ID NO: 73706 - DNA, 25 bp, Artificial
  Probe
acaggccatgaattctgtctctaag

SEQ ID NO: 73707 - DNA, 25 bp, Artificial
  Probe
aagagctacaggccatgaattctgt

SEQ ID NO: 73708 - DNA, 25 bp, Artificial
  Probe
gctacaggccatgaattctgtctct

SEQ ID NO: 73709 - DNA, 25 bp, Artificial
  Probe
agctacaggccatgaattctgtctc

SEQ ID NO: 73710 - DNA, 25 bp, Artificial
  Probe
gagctacaggccatgaattctgtct

SEQ ID NO: 73711 - DNA, 25 bp, Artificial
  Probe
agagctacaggccatgaattctgtc

SEQ ID NO: 73712 - DNA, 25 bp, Artificial
  Probe
tagaccattgccttcctactacata

SEQ ID NO: 73713 - DNA, 25 bp, Artificial
  Probe
gaccattgccttcctactacatatc

SEQ ID NO: 73714 - DNA, 25 bp, Artificial
  Probe
agaccattgccttcctactacatat

SEQ ID NO: 73715 - DNA, 25 bp, Artificial
  Probe
accattgccttcctactacatatcc

SEQ ID NO: 73716 - DNA, 25 bp, Artificial
  Probe
ctagaccattgccttcctactacat

SEQ ID NO: 73717 - DNA, 25 bp, Artificial
  Probe
ttatacatttgggacatagttgcct

SEQ ID NO: 73718 - DNA, 25 bp, Artificial
  Probe
tatacatttgggacatagttgcctc

SEQ ID NO: 73719 - DNA, 25 bp, Artificial
  Probe
attatacatttgggacatagttgcc

SEQ ID NO: 73720 - DNA, 25 bp, Artificial
  Probe
taatttcagcgggacatcaagttta

SEQ ID NO: 73721 - DNA, 25 bp, Artificial
  Probe
cattatacatttgggacatagttgc

SEQ ID NO: 73722 - DNA, 25 bp, Artificial
  Probe
gggacatcaagtttagggagaattg

SEQ ID NO: 73723 - DNA, 25 bp, Artificial
  Probe
ggacatcaagtttagggagaattgt

SEQ ID NO: 73724 - DNA, 25 bp, Artificial
  Probe
aatttcagcgggacatcaagtttag

SEQ ID NO: 73725 - DNA, 25 bp, Artificial
  Probe
ctaatttcagcgggacatcaagttt

SEQ ID NO: 73726 - DNA, 25 bp, Artificial
  Probe
atacatttgggacatagttgcctca

SEQ ID NO: 73727 - DNA, 25 bp, Artificial
  Probe
ccattgccttcctactacatatccc

SEQ ID NO: 73728 - DNA, 25 bp, Artificial
  Probe
tacatttgggacatagttgcctcaa

SEQ ID NO: 73729 - DNA, 25 bp, Artificial
  Probe
atcaagtttagggagaattgtccac

SEQ ID NO: 73730 - DNA, 25 bp, Artificial
  Probe
catcaagtttagggagaattgtcca

SEQ ID NO: 73731 - DNA, 25 bp, Artificial
  Probe
acatcaagtttagggagaattgtcc

SEQ ID NO: 73732 - DNA, 25 bp, Artificial
  Probe
gctagaccattgccttcctactaca

SEQ ID NO: 73733 - DNA, 25 bp, Artificial
  Probe
cgggacatcaagtttagggagaatt

SEQ ID NO: 73734 - DNA, 25 bp, Artificial
  Probe
agtgtgcagaagacataaggaagag

SEQ ID NO: 73735 - DNA, 25 bp, Artificial
  Probe
gagtgtgcagaagacataaggaaga

SEQ ID NO: 73736 - DNA, 25 bp, Artificial
  Probe
caagtttagggagaattgtccacag

SEQ ID NO: 73737 - DNA, 25 bp, Artificial
  Probe
tttctcttagggtaaaccaaccatg

SEQ ID NO: 73738 - DNA, 25 bp, Artificial
  Probe
tcaagtttagggagaattgtccaca

SEQ ID NO: 73739 - DNA, 25 bp, Artificial
  Probe
gtttagggagaattgtccacaggat

SEQ ID NO: 73740 - DNA, 25 bp, Artificial
  Probe
tgactaaggattaccacagaccgtg

SEQ ID NO: 73741 - DNA, 25 bp, Artificial
  Probe
gtgactaaggattaccacagaccgt

SEQ ID NO: 73742 - DNA, 25 bp, Artificial
  Probe
atttcagcgggacatcaagtttagg

SEQ ID NO: 73743 - DNA, 25 bp, Artificial
  Probe
tttagggagaattgtccacaggatc

SEQ ID NO: 73744 - DNA, 25 bp, Artificial
  Probe
aagtttagggagaattgtccacagg

SEQ ID NO: 73745 - DNA, 25 bp, Artificial
  Probe
cctaatttcagcgggacatcaagtt

SEQ ID NO: 73746 - DNA, 25 bp, Artificial
  Probe
ccattatacatttgggacatagttg

SEQ ID NO: 73747 - DNA, 25 bp, Artificial
  Probe
tgtgcagaagacataaggaagagga

SEQ ID NO: 73748 - DNA, 25 bp, Artificial
  Probe
gtgtgcagaagacataaggaagagg

SEQ ID NO: 73749 - DNA, 25 bp, Artificial
  Probe
ggagtgtgcagaagacataaggaag

SEQ ID NO: 73750 - DNA, 25 bp, Artificial
  Probe
gactgacgattaaagtgcatctgag

SEQ ID NO: 73751 - DNA, 25 bp, Artificial
  Probe
ctgactgacgattaaagtgcatctg

SEQ ID NO: 73752 - DNA, 25 bp, Artificial
  Probe
accccttatgatacccattatacat

SEQ ID NO: 73753 - DNA, 25 bp, Artificial
  Probe
aggagtgtgcagaagacataaggaa

SEQ ID NO: 73754 - DNA, 25 bp, Artificial
  Probe
aacagcctgactgacgattaaagtg

SEQ ID NO: 73755 - DNA, 25 bp, Artificial
  Probe
caacagcctgactgacgattaaagt

SEQ ID NO: 73756 - DNA, 25 bp, Artificial
  Probe
tgactgacgattaaagtgcatctga

SEQ ID NO: 73757 - DNA, 25 bp, Artificial
  Probe
tatggtacagaattgtggaatgtgt

SEQ ID NO: 73758 - DNA, 25 bp, Artificial
  Probe
ccttatggtacagaattgtggaatg

SEQ ID NO: 73759 - DNA, 25 bp, Artificial
  Probe
ttatggtacagaattgtggaatgtg

SEQ ID NO: 73760 - DNA, 25 bp, Artificial
  Probe
cttatggtacagaattgtggaatgt

SEQ ID NO: 73761 - DNA, 25 bp, Artificial
  Probe
gagtggataccataggaatacacag

SEQ ID NO: 73762 - DNA, 25 bp, Artificial
  Probe
agagtggataccataggaatacaca

SEQ ID NO: 73763 - DNA, 25 bp, Artificial
  Probe
gagagtggataccataggaatacac

SEQ ID NO: 73764 - DNA, 25 bp, Artificial
  Probe
agagagtggataccataggaataca

SEQ ID NO: 73765 - DNA, 25 bp, Artificial
  Probe
tgaagagagtggataccataggaat

SEQ ID NO: 73766 - DNA, 25 bp, Artificial
  Probe
agaattgtggaatgtgtgtatcctg

SEQ ID NO: 73767 - DNA, 25 bp, Artificial
  Probe
cagaattgtggaatgtgtgtatcct

SEQ ID NO: 73768 - DNA, 25 bp, Artificial
  Probe
ctgaagagagtggataccataggaa

SEQ ID NO: 73769 - DNA, 25 bp, Artificial
  Probe
acagaattgtggaatgtgtgtatcc

SEQ ID NO: 73770 - DNA, 25 bp, Artificial
  Probe
atggtacagaattgtggaatgtgtg

SEQ ID NO: 73771 - DNA, 25 bp, Artificial
  Probe
aagagagtggataccataggaatac

SEQ ID NO: 73772 - DNA, 25 bp, Artificial
  Probe
gaagagagtggataccataggaata

SEQ ID NO: 73773 - DNA, 25 bp, Artificial
  Probe
agtggataccataggaatacacagc

SEQ ID NO: 73774 - DNA, 25 bp, Artificial
  Probe
tacagaattgtggaatgtgtgtatc

SEQ ID NO: 73775 - DNA, 25 bp, Artificial
  Probe
gtacagaattgtggaatgtgtgtat

SEQ ID NO: 73776 - DNA, 25 bp, Artificial
  Probe
ggtacagaattgtggaatgtgtgta

SEQ ID NO: 73777 - DNA, 25 bp, Artificial
  Probe
agtatggatcaatggctttaacctc

SEQ ID NO: 73778 - DNA, 25 bp, Artificial
  Probe
aagtatggatcaatggctttaacct

SEQ ID NO: 73779 - DNA, 25 bp, Artificial
  Probe
caagtatggatcaatggctttaacc

SEQ ID NO: 73780 - DNA, 25 bp, Artificial
  Probe
tggtacagaattgtggaatgtgtgt

SEQ ID NO: 73781 - DNA, 25 bp, Artificial
  Probe
aaggctgaagagagtggataccata

SEQ ID NO: 73782 - DNA, 25 bp, Artificial
  Probe
cccttatggtacagaattgtggaat

SEQ ID NO: 73783 - DNA, 25 bp, Artificial
  Probe
gtatggatcaatggctttaacctcg

SEQ ID NO: 73784 - DNA, 25 bp, Artificial
  Probe
gtggataccataggaatacacagct

SEQ ID NO: 73785 - DNA, 25 bp, Artificial
  Probe
caaacaacatcacagtgctagaact

SEQ ID NO: 73786 - DNA, 25 bp, Artificial
  Probe
gctgaagagagtggataccatagga

SEQ ID NO: 73787 - DNA, 25 bp, Artificial
  Probe
aggctgaagagagtggataccatag

SEQ ID NO: 73788 - DNA, 25 bp, Artificial
  Probe
ttacgttcttcaaatttcacactcc

SEQ ID NO: 73789 - DNA, 25 bp, Artificial
  Probe
ccttacgttcttcaaatttcacact

SEQ ID NO: 73790 - DNA, 25 bp, Artificial
  Probe
accttacgttcttcaaatttcacac

SEQ ID NO: 73791 - DNA, 25 bp, Artificial
  Probe
gaccttacgttcttcaaatttcaca

SEQ ID NO: 73792 - DNA, 25 bp, Artificial
  Probe
ccaaacaacatcacagtgctagaac

SEQ ID NO: 73793 - DNA, 25 bp, Artificial
  Probe
ctcgaccttacgttcttcaaatttc

SEQ ID NO: 73794 - DNA, 25 bp, Artificial
  Probe
ccaagtatggatcaatggctttaac

SEQ ID NO: 73795 - DNA, 25 bp, Artificial
  Probe
cgaccttacgttcttcaaatttcac

SEQ ID NO: 73796 - DNA, 25 bp, Artificial
  Probe
cttacgttcttcaaatttcacactc

SEQ ID NO: 73797 - DNA, 25 bp, Artificial
  Probe
tcgaccttacgttcttcaaatttca

SEQ ID NO: 73798 - DNA, 25 bp, Artificial
  Probe
actcgaccttacgttcttcaaattt

SEQ ID NO: 73799 - DNA, 25 bp, Artificial
  Probe
tatggatcaatggctttaacctcgg

SEQ ID NO: 73800 - DNA, 25 bp, Artificial
  Probe
tacgttcttcaaatttcacactccc

SEQ ID NO: 73801 - DNA, 25 bp, Artificial
  Probe
cactcgaccttacgttcttcaaatt

SEQ ID NO: 73802 - DNA, 25 bp, Artificial
  Probe
catcacaaccttaaccttgctcttc

SEQ ID NO: 73803 - DNA, 25 bp, Artificial
  Probe
atcacaaccttaaccttgctcttca

SEQ ID NO: 73804 - DNA, 25 bp, Artificial
  Probe
acatcacaaccttaaccttgctctt

SEQ ID NO: 73805 - DNA, 25 bp, Artificial
  Probe
tatcaaccctcaagactacaccaaa

SEQ ID NO: 73806 - DNA, 25 bp, Artificial
  Probe
cacaaccttaaccttgctcttcaga

SEQ ID NO: 73807 - DNA, 25 bp, Artificial
  Probe
tcacaaccttaaccttgctcttcag

SEQ ID NO: 73808 - DNA, 25 bp, Artificial
  Probe
cttaaccttgctcttcagagacaca

SEQ ID NO: 73809 - DNA, 25 bp, Artificial
  Probe
aaccttaaccttgctcttcagagac

SEQ ID NO: 73810 - DNA, 25 bp, Artificial
  Probe
caaccttaaccttgctcttcagaga

SEQ ID NO: 73811 - DNA, 25 bp, Artificial
  Probe
ctgactgtatcaaccctcaagacta

SEQ ID NO: 73812 - DNA, 25 bp, Artificial
  Probe
ctcttcagagacacacagccaataa

SEQ ID NO: 73813 - DNA, 25 bp, Artificial
  Probe
gtatcaaccctcaagactacaccaa

SEQ ID NO: 73814 - DNA, 25 bp, Artificial
  Probe
cttcagagacacacagccaataaag

SEQ ID NO: 73815 - DNA, 25 bp, Artificial
  Probe
cacatcacaaccttaaccttgctct

SEQ ID NO: 73816 - DNA, 25 bp, Artificial
  Probe
acaaccttaaccttgctcttcagag

SEQ ID NO: 73817 - DNA, 25 bp, Artificial
  Probe
tgactgtatcaaccctcaagactac

SEQ ID NO: 73818 - DNA, 25 bp, Artificial
  Probe
ttaaccttgctcttcagagacacac

SEQ ID NO: 73819 - DNA, 25 bp, Artificial
  Probe
tcttcagagacacacagccaataaa

SEQ ID NO: 73820 - DNA, 25 bp, Artificial
  Probe
ccttaaccttgctcttcagagacac

SEQ ID NO: 73821 - DNA, 25 bp, Artificial
  Probe
ttctgagaacacatgaatgccttcc

SEQ ID NO: 73822 - DNA, 25 bp, Artificial
  Probe
atcaaccctcaagactacaccaaac

SEQ ID NO: 73823 - DNA, 25 bp, Artificial
  Probe
accttaaccttgctcttcagagaca

SEQ ID NO: 73824 - DNA, 25 bp, Artificial
  Probe
ccacatcacaaccttaaccttgctc

SEQ ID NO: 73825 - DNA, 25 bp, Artificial
  Probe
actgactgtatcaaccctcaagact

SEQ ID NO: 73826 - DNA, 25 bp, Artificial
  Probe
cactgactgtatcaaccctcaagac

SEQ ID NO: 73827 - DNA, 25 bp, Artificial
  Probe
taaccttgctcttcagagacacaca

SEQ ID NO: 73828 - DNA, 25 bp, Artificial
  Probe
gactgtatcaaccctcaagactaca

SEQ ID NO: 73829 - DNA, 25 bp, Artificial
  Probe
cagccacatcacaaccttaaccttg

SEQ ID NO: 73830 - DNA, 25 bp, Artificial
  Probe
actgtatcaaccctcaagactacac

SEQ ID NO: 73831 - DNA, 25 bp, Artificial
  Probe
ttcagagacacacagccaataaagc

SEQ ID NO: 73832 - DNA, 25 bp, Artificial
  Probe
ggtttaagagtaaagatgccgtccc

SEQ ID NO: 73833 - DNA, 25 bp, Artificial
  Probe
gggtttaagagtaaagatgccgtcc

SEQ ID NO: 73834 - DNA, 25 bp, Artificial
  Probe
ctgtatcaaccctcaagactacacc

SEQ ID NO: 73835 - DNA, 25 bp, Artificial
  Probe
ccactgactgtatcaaccctcaaga

SEQ ID NO: 73836 - DNA, 25 bp, Artificial
  Probe
cgctgattactcatgttttaccttt

SEQ ID NO: 73837 - DNA, 25 bp, Artificial
  Probe
ttcatggctaagaagtttccgttgg

SEQ ID NO: 73838 - DNA, 25 bp, Artificial
  Probe
tgtatcaaccctcaagactacacca

SEQ ID NO: 73839 - DNA, 25 bp, Artificial
  Probe
tcaagactacaccaaacccatccag

SEQ ID NO: 73840 - DNA, 25 bp, Artificial
  Probe
ctcaagactacaccaaacccatcca

SEQ ID NO: 73841 - DNA, 25 bp, Artificial
  Probe
ccgctgattactcatgttttacctt

SEQ ID NO: 73842 - DNA, 25 bp, Artificial
  Probe
ttgtcgctgacttcatggctaagaa

SEQ ID NO: 73843 - DNA, 25 bp, Artificial
  Probe
cagagacacacagccaataaagcac

SEQ ID NO: 73844 - DNA, 25 bp, Artificial
  Probe
tcaaccctcaagactacaccaaacc

SEQ ID NO: 73845 - DNA, 25 bp, Artificial
  Probe
aaccttgctcttcagagacacacag

SEQ ID NO: 73846 - DNA, 25 bp, Artificial
  Probe
tcagagacacacagccaataaagca

SEQ ID NO: 73847 - DNA, 25 bp, Artificial
  Probe
caagtgagaattgctgagaatgtaa

SEQ ID NO: 73848 - DNA, 25 bp, Artificial
  Probe
aactcagatagaggctaaggagact

SEQ ID NO: 73849 - DNA, 25 bp, Artificial
  Probe
tagaggacagttacagtctacagtt

SEQ ID NO: 73850 - DNA, 25 bp, Artificial
  Probe
gttacagtctacagttggcagagaa

SEQ ID NO: 73851 - DNA, 25 bp, Artificial
  Probe
agaggacagttacagtctacagttg

SEQ ID NO: 73852 - DNA, 25 bp, Artificial
  Probe
ctagaggacagttacagtctacagt

SEQ ID NO: 73853 - DNA, 25 bp, Artificial
  Probe
catttctatctctaccctgttagca

SEQ ID NO: 73854 - DNA, 25 bp, Artificial
  Probe
gcatttctatctctaccctgttagc

SEQ ID NO: 73855 - DNA, 25 bp, Artificial
  Probe
tttctatctctaccctgttagcaaa

SEQ ID NO: 73856 - DNA, 25 bp, Artificial
  Probe
tggcagagaaagacaaagaaataaa

SEQ ID NO: 73857 - DNA, 25 bp, Artificial
  Probe
atttctatctctaccctgttagcaa

SEQ ID NO: 73858 - DNA, 25 bp, Artificial
  Probe
gctagaggacagttacagtctacag

SEQ ID NO: 73859 - DNA, 25 bp, Artificial
  Probe
cagttacagtctacagttggcagag

SEQ ID NO: 73860 - DNA, 25 bp, Artificial
  Probe
actcagatagaggctaaggagactg

SEQ ID NO: 73861 - DNA, 25 bp, Artificial
  Probe
gaggacagttacagtctacagttgg

SEQ ID NO: 73862 - DNA, 25 bp, Artificial
  Probe
gttggcagagaaagacaaagaaata

SEQ ID NO: 73863 - DNA, 25 bp, Artificial
  Probe
agttacagtctacagttggcagaga

SEQ ID NO: 73864 - DNA, 25 bp, Artificial
  Probe
caagggagaaggaacttacaaagag

SEQ ID NO: 73865 - DNA, 25 bp, Artificial
  Probe
aagtgagaattgctgagaatgtaaa

SEQ ID NO: 73866 - DNA, 25 bp, Artificial
  Probe
ctgatgccctgattgagaactttag

SEQ ID NO: 73867 - DNA, 25 bp, Artificial
  Probe
tcaagggagaaggaacttacaaaga

SEQ ID NO: 73868 - DNA, 25 bp, Artificial
  Probe
ttggcagagaaagacaaagaaataa

SEQ ID NO: 73869 - DNA, 25 bp, Artificial
  Probe
agttggcagagaaagacaaagaaat

SEQ ID NO: 73870 - DNA, 25 bp, Artificial
  Probe
gaagtggaaagagcaagtgagaatt

SEQ ID NO: 73871 - DNA, 25 bp, Artificial
  Probe
ctcaacaagtctcacggtgtcttaa

SEQ ID NO: 73872 - DNA, 25 bp, Artificial
  Probe
agatttacaagttcctgttcacctt

SEQ ID NO: 73873 - DNA, 25 bp, Artificial
  Probe
ggcagagaaagacaaagaaataaat

SEQ ID NO: 73874 - DNA, 25 bp, Artificial
  Probe
aagggagaaggaacttacaaagagt

SEQ ID NO: 73875 - DNA, 25 bp, Artificial
  Probe
ctcaagggagaaggaacttacaaag

SEQ ID NO: 73876 - DNA, 25 bp, Artificial
  Probe
aaagacaaagaaataaattgcctgg

SEQ ID NO: 73877 - DNA, 25 bp, Artificial
  Probe
ttacagtctacagttggcagagaaa

SEQ ID NO: 73878 - DNA, 25 bp, Artificial
  Probe
aaactcagatagaggctaaggagac

SEQ ID NO: 73879 - DNA, 25 bp, Artificial
  Probe
acagttacagtctacagttggcaga

SEQ ID NO: 73880 - DNA, 25 bp, Artificial
  Probe
tcaacaagtctcacggtgtcttaac

SEQ ID NO: 73881 - DNA, 25 bp, Artificial
  Probe
atcagatttacaagttcctgttcac

SEQ ID NO: 73882 - DNA, 25 bp, Artificial
  Probe
aagaaataaattgcctggcttcatt

SEQ ID NO: 73883 - DNA, 25 bp, Artificial
  Probe
aaagaaataaattgcctggcttcat

SEQ ID NO: 73884 - DNA, 25 bp, Artificial
  Probe
gagctagaggacagttacagtctac

SEQ ID NO: 73885 - DNA, 25 bp, Artificial
  Probe
ctacagttggcagagaaagacaaag

SEQ ID NO: 73886 - DNA, 25 bp, Artificial
  Probe
cagatttacaagttcctgttcacct

SEQ ID NO: 73887 - DNA, 25 bp, Artificial
  Probe
tcagatttacaagttcctgttcacc

SEQ ID NO: 73888 - DNA, 25 bp, Artificial
  Probe
cacaatcagatttacaagttcctgt

SEQ ID NO: 73889 - DNA, 25 bp, Artificial
  Probe
aagtggaaagagcaagtgagaattg

SEQ ID NO: 73890 - DNA, 25 bp, Artificial
  Probe
tacagtctacagttggcagagaaag

SEQ ID NO: 73891 - DNA, 25 bp, Artificial
  Probe
tgaagtggaaagagcaagtgagaat

SEQ ID NO: 73892 - DNA, 25 bp, Artificial
  Probe
taggatgagaggactgaaggatgtg

SEQ ID NO: 73893 - DNA, 25 bp, Artificial
  Probe
gatgctaagatgactggcttcaaca

SEQ ID NO: 73894 - DNA, 25 bp, Artificial
  Probe
ggatgagaggactgaaggatgtgaa

SEQ ID NO: 73895 - DNA, 25 bp, Artificial
  Probe
ctaagatgactggcttcaacactgg

SEQ ID NO: 73896 - DNA, 25 bp, Artificial
  Probe
atgctaagatgactggcttcaacac

SEQ ID NO: 73897 - DNA, 25 bp, Artificial
  Probe
taagatgactggcttcaacactgga

SEQ ID NO: 73898 - DNA, 25 bp, Artificial
  Probe
ggatgctaagatgactggcttcaac

SEQ ID NO: 73899 - DNA, 25 bp, Artificial
  Probe
gaccagcaagacagatatcacagag

SEQ ID NO: 73900 - DNA, 25 bp, Artificial
  Probe
gagaccagcaagacagatatcacag

SEQ ID NO: 73901 - DNA, 25 bp, Artificial
  Probe
aggatgctaagatgactggcttcaa

SEQ ID NO: 73902 - DNA, 25 bp, Artificial
  Probe
gctaagatgactggcttcaacactg

SEQ ID NO: 73903 - DNA, 25 bp, Artificial
  Probe
aggaatacaagatgctgctggacat

SEQ ID NO: 73904 - DNA, 25 bp, Artificial
  Probe
agaccagcaagacagatatcacaga

SEQ ID NO: 73905 - DNA, 25 bp, Artificial
  Probe
aggatgagaggactgaaggatgtga

SEQ ID NO: 73906 - DNA, 25 bp, Artificial
  Probe
tgctaagatgactggcttcaacact

SEQ ID NO: 73907 - DNA, 25 bp, Artificial
  Probe
gaggagaccagcaagacagatatca

SEQ ID NO: 73908 - DNA, 25 bp, Artificial
  Probe
aatacaagatgctgctggacatcaa

SEQ ID NO: 73909 - DNA, 25 bp, Artificial
  Probe
aggagaccagcaagacagatatcac

SEQ ID NO: 73910 - DNA, 25 bp, Artificial
  Probe
caggatgctaagatgactggcttca

SEQ ID NO: 73911 - DNA, 25 bp, Artificial
  Probe
ggagaccagcaagacagatatcaca

SEQ ID NO: 73912 - DNA, 25 bp, Artificial
  Probe
acgaggagaccagcaagacagatat

SEQ ID NO: 73913 - DNA, 25 bp, Artificial
  Probe
gaatacaagatgctgctggacatca

SEQ ID NO: 73914 - DNA, 25 bp, Artificial
  Probe
cgaggagaccagcaagacagatatc

SEQ ID NO: 73915 - DNA, 25 bp, Artificial
  Probe
accagcaagacagatatcacagagc

SEQ ID NO: 73916 - DNA, 25 bp, Artificial
  Probe
ggaatacaagatgctgctggacatc

SEQ ID NO: 73917 - DNA, 25 bp, Artificial
  Probe
atacaagatgctgctggacatcaaa

SEQ ID NO: 73918 - DNA, 25 bp, Artificial
  Probe
ccagcaagacagatatcacagagct

SEQ ID NO: 73919 - DNA, 25 bp, Artificial
  Probe
tacaagatgctgctggacatcaaaa

SEQ ID NO: 73920 - DNA, 25 bp, Artificial
  Probe
cagcaagacagatatcacagagctc

SEQ ID NO: 73921 - DNA, 25 bp, Artificial
  Probe
caagacagatatcacagagctccgg

SEQ ID NO: 73922 - DNA, 25 bp, Artificial
  Probe
agcaagacagatatcacagagctcc

SEQ ID NO: 73923 - DNA, 25 bp, Artificial
  Probe
gcaagacagatatcacagagctccg

SEQ ID NO: 73924 - DNA, 25 bp, Artificial
  Probe
aagatgctgctggacatcaaaacac

SEQ ID NO: 73925 - DNA, 25 bp, Artificial
  Probe
caagatgctgctggacatcaaaaca

SEQ ID NO: 73926 - DNA, 25 bp, Artificial
  Probe
acaagatgctgctggacatcaaaac

SEQ ID NO: 73927 - DNA, 25 bp, Artificial
  Probe
ccaggatgctaagatgactggcttc

SEQ ID NO: 73928 - DNA, 25 bp, Artificial
  Probe
aggaggatgtctcattgattatgtg

SEQ ID NO: 73929 - DNA, 25 bp, Artificial
  Probe
gaggaggatgtctcattgattatgt

SEQ ID NO: 73930 - DNA, 25 bp, Artificial
  Probe
gatgtctcattgattatgtgcctca

SEQ ID NO: 73931 - DNA, 25 bp, Artificial
  Probe
ggaggaggatgtctcattgattatg

SEQ ID NO: 73932 - DNA, 25 bp, Artificial
  Probe
aggaggaggatgtctcattgattat

SEQ ID NO: 73933 - DNA, 25 bp, Artificial
  Probe
ggatgtctcattgattatgtgcctc

SEQ ID NO: 73934 - DNA, 25 bp, Artificial
  Probe
caggaggaggatgtctcattgatta

SEQ ID NO: 73935 - DNA, 25 bp, Artificial
  Probe
gaggatgtctcattgattatgtgcc

SEQ ID NO: 73936 - DNA, 25 bp, Artificial
  Probe
ggaggatgtctcattgattatgtgc

SEQ ID NO: 73937 - DNA, 25 bp, Artificial
  Probe
aggatgtctcattgattatgtgcct

SEQ ID NO: 73938 - DNA, 25 bp, Artificial
  Probe
ttaccagtagatttcagcaacattc

SEQ ID NO: 73939 - DNA, 25 bp, Artificial
  Probe
taccagtagatttcagcaacattcc

SEQ ID NO: 73940 - DNA, 25 bp, Artificial
  Probe
agttaccagtagatttcagcaacat

SEQ ID NO: 73941 - DNA, 25 bp, Artificial
  Probe
gaagttaccagtagatttcagcaac

SEQ ID NO: 73942 - DNA, 25 bp, Artificial
  Probe
gttaccagtagatttcagcaacatt

SEQ ID NO: 73943 - DNA, 25 bp, Artificial
  Probe
aagttaccagtagatttcagcaaca

SEQ ID NO: 73944 - DNA, 25 bp, Artificial
  Probe
aagagcctcagtatggagagaacat

SEQ ID NO: 73945 - DNA, 25 bp, Artificial
  Probe
gtgcagtatgtgattcaaggctatc

SEQ ID NO: 73946 - DNA, 25 bp, Artificial
  Probe
gaatatgatgcagaaggcttcacaa

SEQ ID NO: 73947 - DNA, 25 bp, Artificial
  Probe
tcagtatggagagaacatggaaatt

SEQ ID NO: 73948 - DNA, 25 bp, Artificial
  Probe
cagtagatttcagcaacattcccac

SEQ ID NO: 73949 - DNA, 25 bp, Artificial
  Probe
atgtctcattgattatgtgcctcaa

SEQ ID NO: 73950 - DNA, 25 bp, Artificial
  Probe
aacaaggtgcagtatgtgattcaag

SEQ ID NO: 73951 - DNA, 25 bp, Artificial
  Probe
ctcagtatggagagaacatggaaat

SEQ ID NO: 73952 - DNA, 25 bp, Artificial
  Probe
gaagagcctcagtatggagagaaca

SEQ ID NO: 73953 - DNA, 25 bp, Artificial
  Probe
tctcattgattatgtgcctcaagtg

SEQ ID NO: 73954 - DNA, 25 bp, Artificial
  Probe
gtctcattgattatgtgcctcaagt

SEQ ID NO: 73955 - DNA, 25 bp, Artificial
  Probe
tgtctcattgattatgtgcctcaag

SEQ ID NO: 73956 - DNA, 25 bp, Artificial
  Probe
ctcattgattatgtgcctcaagtgt

SEQ ID NO: 73957 - DNA, 25 bp, Artificial
  Probe
tctgttgaagttaccagtagatttc

SEQ ID NO: 73958 - DNA, 25 bp, Artificial
  Probe
caacaaggtgcagtatgtgattcaa

SEQ ID NO: 73959 - DNA, 25 bp, Artificial
  Probe
cctcctccttccttaggtttcttag

SEQ ID NO: 73960 - DNA, 25 bp, Artificial
  Probe
ccaggaggaggatgtctcattgatt

SEQ ID NO: 73961 - DNA, 25 bp, Artificial
  Probe
tcattgattatgtgcctcaagtgtg

SEQ ID NO: 73962 - DNA, 25 bp, Artificial
  Probe
ttctgttgaagttaccagtagattt

SEQ ID NO: 73963 - DNA, 25 bp, Artificial
  Probe
tttctgttgaagttaccagtagatt

SEQ ID NO: 73964 - DNA, 25 bp, Artificial
  Probe
catggaaatttatgctgggaagaaa

SEQ ID NO: 73965 - DNA, 25 bp, Artificial
  Probe
gagagaacatggaaatttatgctgg

SEQ ID NO: 73966 - DNA, 25 bp, Artificial
  Probe
ggagagaacatggaaatttatgctg

SEQ ID NO: 73967 - DNA, 25 bp, Artificial
  Probe
tggagagaacatggaaatttatgct

SEQ ID NO: 73968 - DNA, 25 bp, Artificial
  Probe
atggagagaacatggaaatttatgc

SEQ ID NO: 73969 - DNA, 25 bp, Artificial
  Probe
ggtgcagtatgtgattcaaggctat

SEQ ID NO: 73970 - DNA, 25 bp, Artificial
  Probe
tcctcctccttccttaggtttctta

SEQ ID NO: 73971 - DNA, 25 bp, Artificial
  Probe
gaacatggaaatttatgctgggaag

SEQ ID NO: 73972 - DNA, 25 bp, Artificial
  Probe
cctcagtatggagagaacatggaaa

SEQ ID NO: 73973 - DNA, 25 bp, Artificial
  Probe
ctaaccacctggaagagttgaataa

SEQ ID NO: 73974 - DNA, 25 bp, Artificial
  Probe
gctaaccacctggaagagttgaata

SEQ ID NO: 73975 - DNA, 25 bp, Artificial
  Probe
aatggttgccgagtcatgttaattg

SEQ ID NO: 73976 - DNA, 25 bp, Artificial
  Probe
ccacctggaagagttgaataaagag

SEQ ID NO: 73977 - DNA, 25 bp, Artificial
  Probe
taaccacctggaagagttgaataaa

SEQ ID NO: 73978 - DNA, 25 bp, Artificial
  Probe
gacttggaggtatctgtggagaaga

SEQ ID NO: 73979 - DNA, 25 bp, Artificial
  Probe
cacctggaagagttgaataaagagc

SEQ ID NO: 73980 - DNA, 25 bp, Artificial
  Probe
aaccacctggaagagttgaataaag

SEQ ID NO: 73981 - DNA, 25 bp, Artificial
  Probe
gttcctagcagagtgtgatacagtg

SEQ ID NO: 73982 - DNA, 25 bp, Artificial
  Probe
gtgttcctagcagagtgtgatacag

SEQ ID NO: 73983 - DNA, 25 bp, Artificial
  Probe
accacctggaagagttgaataaaga

SEQ ID NO: 73984 - DNA, 25 bp, Artificial
  Probe
acttggaggtatctgtggagaagac

SEQ ID NO: 73985 - DNA, 25 bp, Artificial
  Probe
gatcttggaggagattgacacaatg

SEQ ID NO: 73986 - DNA, 25 bp, Artificial
  Probe
tgttcctagcagagtgtgatacagt

SEQ ID NO: 73987 - DNA, 25 bp, Artificial
  Probe
cttggaggtatctgtggagaagaca

SEQ ID NO: 73988 - DNA, 25 bp, Artificial
  Probe
gaaggacttggaggtatctgtggag

SEQ ID NO: 73989 - DNA, 25 bp, Artificial
  Probe
tgaataaagagctttctgacatcca

SEQ ID NO: 73990 - DNA, 25 bp, Artificial
  Probe
aaatggttgccgagtcatgttaatt

SEQ ID NO: 73991 - DNA, 25 bp, Artificial
  Probe
tggaagagttgaataaagagctttc

SEQ ID NO: 73992 - DNA, 25 bp, Artificial
  Probe
ctggaagagttgaataaagagcttt

SEQ ID NO: 73993 - DNA, 25 bp, Artificial
  Probe
cctggaagagttgaataaagagctt

SEQ ID NO: 73994 - DNA, 25 bp, Artificial
  Probe
aatgtaaatttcccttccctactcc

SEQ ID NO: 73995 - DNA, 25 bp, Artificial
  Probe
atcttggaggagattgacacaatgg

SEQ ID NO: 73996 - DNA, 25 bp, Artificial
  Probe
ttgaataaagagctttctgacatcc

SEQ ID NO: 73997 - DNA, 25 bp, Artificial
  Probe
gagttgaataaagagctttctgaca

SEQ ID NO: 73998 - DNA, 25 bp, Artificial
  Probe
caatccagaagaagaggctgagttg

SEQ ID NO: 73999 - DNA, 25 bp, Artificial
  Probe
ttgccgagtcatgttaattggtgaa

SEQ ID NO: 74000 - DNA, 25 bp, Artificial
  Probe
agtgtgatacagtggagcagtacat

SEQ ID NO: 74001 - DNA, 25 bp, Artificial
  Probe
atgtaaatttcccttccctactcct

SEQ ID NO: 74002 - DNA, 25 bp, Artificial
  Probe
cagagtgtgatacagtggagcagta

SEQ ID NO: 74003 - DNA, 25 bp, Artificial
  Probe
agagttgaataaagagctttctgac

SEQ ID NO: 74004 - DNA, 25 bp, Artificial
  Probe
ggaagagttgaataaagagctttct

SEQ ID NO: 74005 - DNA, 25 bp, Artificial
  Probe
ggacttggaggtatctgtggagaag

SEQ ID NO: 74006 - DNA, 25 bp, Artificial
  Probe
atccagaagaagaggctgagttgaa

SEQ ID NO: 74007 - DNA, 25 bp, Artificial
  Probe
aatccagaagaagaggctgagttga

SEQ ID NO: 74008 - DNA, 25 bp, Artificial
  Probe
acctggaagagttgaataaagagct

SEQ ID NO: 74009 - DNA, 25 bp, Artificial
  Probe
ctgaaggacttggaggtatctgtgg

SEQ ID NO: 74010 - DNA, 25 bp, Artificial
  Probe
agttgaataaagagctttctgacat

SEQ ID NO: 74011 - DNA, 25 bp, Artificial
  Probe
ttcctagcagagtgtgatacagtgg

SEQ ID NO: 74012 - DNA, 25 bp, Artificial
  Probe
gttgaataaagagctttctgacatc

SEQ ID NO: 74013 - DNA, 25 bp, Artificial
  Probe
tgtaaatttcccttccctactcctc

SEQ ID NO: 74014 - DNA, 25 bp, Artificial
  Probe
gaataaagagctttctgacatccag

SEQ ID NO: 74015 - DNA, 25 bp, Artificial
  Probe
aagagttgaataaagagctttctga

SEQ ID NO: 74016 - DNA, 25 bp, Artificial
  Probe
agagtgtgatacagtggagcagtac

SEQ ID NO: 74017 - DNA, 25 bp, Artificial
  Probe
ccaaatgtaaatttcccttccctac

SEQ ID NO: 74018 - DNA, 25 bp, Artificial
  Probe
gtcaaggtctactcctactacaatc

SEQ ID NO: 74019 - DNA, 25 bp, Artificial
  Probe
tcaaggtctactcctactacaatct

SEQ ID NO: 74020 - DNA, 25 bp, Artificial
  Probe
ggtcaaggtctactcctactacaat

SEQ ID NO: 74021 - DNA, 25 bp, Artificial
  Probe
gagatcagaagagaccaagcagaat

SEQ ID NO: 74022 - DNA, 25 bp, Artificial
  Probe
atcagaagagaccaagcagaatgag

SEQ ID NO: 74023 - DNA, 25 bp, Artificial
  Probe
agatcagaagagaccaagcagaatg

SEQ ID NO: 74024 - DNA, 25 bp, Artificial
  Probe
caaggtctactcctactacaatcta

SEQ ID NO: 74025 - DNA, 25 bp, Artificial
  Probe
aaggtctactcctactacaatctag

SEQ ID NO: 74026 - DNA, 25 bp, Artificial
  Probe
gatcagaagagaccaagcagaatga

SEQ ID NO: 74027 - DNA, 25 bp, Artificial
  Probe
aacaccctcatcatctacctagaaa

SEQ ID NO: 74028 - DNA, 25 bp, Artificial
  Probe
caagaacaccctcatcatctaccta

SEQ ID NO: 74029 - DNA, 25 bp, Artificial
  Probe
caacaagaacaccctcatcatctac

SEQ ID NO: 74030 - DNA, 25 bp, Artificial
  Probe
gaacaccctcatcatctacctagaa

SEQ ID NO: 74031 - DNA, 25 bp, Artificial
  Probe
aagaacaccctcatcatctacctag

SEQ ID NO: 74032 - DNA, 25 bp, Artificial
  Probe
tgagatcagaagagaccaagcagaa

SEQ ID NO: 74033 - DNA, 25 bp, Artificial
  Probe
cggtcaaggtctactcctactacaa

SEQ ID NO: 74034 - DNA, 25 bp, Artificial
  Probe
gaaagatactacggaggtggctatg

SEQ ID NO: 74035 - DNA, 25 bp, Artificial
  Probe
agaacaccctcatcatctacctaga

SEQ ID NO: 74036 - DNA, 25 bp, Artificial
  Probe
tactacaatctagaggagtcatgca

SEQ ID NO: 74037 - DNA, 25 bp, Artificial
  Probe
ctactacaatctagaggagtcatgc

SEQ ID NO: 74038 - DNA, 25 bp, Artificial
  Probe
gagtagacagatacatttccaagta

SEQ ID NO: 74039 - DNA, 25 bp, Artificial
  Probe
ggagtagacagatacatttccaagt

SEQ ID NO: 74040 - DNA, 25 bp, Artificial
  Probe
aacaagaacaccctcatcatctacc

SEQ ID NO: 74041 - DNA, 25 bp, Artificial
  Probe
ccaacaagaacaccctcatcatcta

SEQ ID NO: 74042 - DNA, 25 bp, Artificial
  Probe
gtcggtcaaggtctactcctactac

SEQ ID NO: 74043 - DNA, 25 bp, Artificial
  Probe
tcaggatcagaagaaccagaaacag

SEQ ID NO: 74044 - DNA, 25 bp, Artificial
  Probe
actacaatctagaggagtcatgcac

SEQ ID NO: 74045 - DNA, 25 bp, Artificial
  Probe
aggatcagaagaaccagaaacagtg

SEQ ID NO: 74046 - DNA, 25 bp, Artificial
  Probe
caggatcagaagaaccagaaacagt

SEQ ID NO: 74047 - DNA, 25 bp, Artificial
  Probe
gtcaggatcagaagaaccagaaaca

SEQ ID NO: 74048 - DNA, 25 bp, Artificial
  Probe
cctactacaatctagaggagtcatg

SEQ ID NO: 74049 - DNA, 25 bp, Artificial
  Probe
gacagatacatttccaagtatgaga

SEQ ID NO: 74050 - DNA, 25 bp, Artificial
  Probe
agacagatacatttccaagtatgag

SEQ ID NO: 74051 - DNA, 25 bp, Artificial
  Probe
ctttattccagacacaaacgacctg

SEQ ID NO: 74052 - DNA, 25 bp, Artificial
  Probe
ctacaatctagaggagtcatgcacc

SEQ ID NO: 74053 - DNA, 25 bp, Artificial
  Probe
tcggtcaaggtctactcctactaca

SEQ ID NO: 74054 - DNA, 25 bp, Artificial
  Probe
cttcaaagtccaccagttctttaac

SEQ ID NO: 74055 - DNA, 25 bp, Artificial
  Probe
acaaggacttgaacatggatgtgtc

SEQ ID NO: 74056 - DNA, 25 bp, Artificial
  Probe
atctccatgatgactggctttattc

SEQ ID NO: 74057 - DNA, 25 bp, Artificial
  Probe
acaagaacaccctcatcatctacct

SEQ ID NO: 74058 - DNA, 25 bp, Artificial
  Probe
ccttcaaagtccaccagttctttaa

SEQ ID NO: 74059 - DNA, 25 bp, Artificial
  Probe
ctggctcaacgacgaaagatactac

SEQ ID NO: 74060 - DNA, 25 bp, Artificial
  Probe
aggtctactcctactacaatctaga

SEQ ID NO: 74061 - DNA, 25 bp, Artificial
  Probe
tcagaagagaccaagcagaatgagg

SEQ ID NO: 74062 - DNA, 25 bp, Artificial
  Probe
ctcaacgacgaaagatactacggag

SEQ ID NO: 74063 - DNA, 25 bp, Artificial
  Probe
agtgtgagtcccatttgtgagttaa

SEQ ID NO: 74064 - DNA, 25 bp, Artificial
  Probe
cagtgtgagtcccatttgtgagtta

SEQ ID NO: 74065 - DNA, 25 bp, Artificial
  Probe
catggcagtggaaatcatagtcttc

SEQ ID NO: 74066 - DNA, 25 bp, Artificial
  Probe
atggcagtggaaatcatagtcttcg

SEQ ID NO: 74067 - DNA, 25 bp, Artificial
  Probe
attcagtgtgagtcccatttgtgag

SEQ ID NO: 74068 - DNA, 25 bp, Artificial
  Probe
ttttcctctaactcttccccttttc

SEQ ID NO: 74069 - DNA, 25 bp, Artificial
  Probe
tttcctctaactcttccccttttca

SEQ ID NO: 74070 - DNA, 25 bp, Artificial
  Probe
cattcagtgtgagtcccatttgtga

SEQ ID NO: 74071 - DNA, 25 bp, Artificial
  Probe
gttttcctctaactcttcccctttt

SEQ ID NO: 74072 - DNA, 25 bp, Artificial
  Probe
tgtactttctataactaggtgcaaa

SEQ ID NO: 74073 - DNA, 25 bp, Artificial
  Probe
taactcttccccttttcagtgattc

SEQ ID NO: 74074 - DNA, 25 bp, Artificial
  Probe
ctaactcttccccttttcagtgatt

SEQ ID NO: 74075 - DNA, 25 bp, Artificial
  Probe
ttcctctaactcttccccttttcag

SEQ ID NO: 74076 - DNA, 25 bp, Artificial
  Probe
atgtactttctataactaggtgcaa

SEQ ID NO: 74077 - DNA, 25 bp, Artificial
  Probe
aatgtactttctataactaggtgca

SEQ ID NO: 74078 - DNA, 25 bp, Artificial
  Probe
aattcccaagcattcagtgtgagtc

SEQ ID NO: 74079 - DNA, 25 bp, Artificial
  Probe
tctaactcttccccttttcagtgat

SEQ ID NO: 74080 - DNA, 25 bp, Artificial
  Probe
ctctaactcttccccttttcagtga

SEQ ID NO: 74081 - DNA, 25 bp, Artificial
  Probe
cagtggaaatcatagtcttcggctg

SEQ ID NO: 74082 - DNA, 25 bp, Artificial
  Probe
aagcattcagtgtgagtcccatttg

SEQ ID NO: 74083 - DNA, 25 bp, Artificial
  Probe
caagcattcagtgtgagtcccattt

SEQ ID NO: 74084 - DNA, 25 bp, Artificial
  Probe
aactcttccccttttcagtgattct

SEQ ID NO: 74085 - DNA, 25 bp, Artificial
  Probe
ggttttcctctaactcttccccttt

SEQ ID NO: 74086 - DNA, 25 bp, Artificial
  Probe
tcagtgtgagtcccatttgtgagtt

SEQ ID NO: 74087 - DNA, 25 bp, Artificial
  Probe
ttcagtgtgagtcccatttgtgagt

SEQ ID NO: 74088 - DNA, 25 bp, Artificial
  Probe
ctataactaggtgcaaaagatcagc

SEQ ID NO: 74089 - DNA, 25 bp, Artificial
  Probe
tataactaggtgcaaaagatcagcc

SEQ ID NO: 74090 - DNA, 25 bp, Artificial
  Probe
taatgtactttctataactaggtgc

SEQ ID NO: 74091 - DNA, 25 bp, Artificial
  Probe
cctctaactcttccccttttcagtg

SEQ ID NO: 74092 - DNA, 25 bp, Artificial
  Probe
tcctctaactcttccccttttcagt

SEQ ID NO: 74093 - DNA, 25 bp, Artificial
  Probe
agtggaaatcatagtcttcggctgg

SEQ ID NO: 74094 - DNA, 25 bp, Artificial
  Probe
tggcagtggaaatcatagtcttcgg

SEQ ID NO: 74095 - DNA, 25 bp, Artificial
  Probe
gcattcagtgtgagtcccatttgtg

SEQ ID NO: 74096 - DNA, 25 bp, Artificial
  Probe
tctataactaggtgcaaaagatcag

SEQ ID NO: 74097 - DNA, 25 bp, Artificial
  Probe
aggttttcctctaactcttcccctt

SEQ ID NO: 74098 - DNA, 25 bp, Artificial
  Probe
agcattcagtgtgagtcccatttgt

SEQ ID NO: 74099 - DNA, 25 bp, Artificial
  Probe
taactaggtgcaaaagatcagccat

SEQ ID NO: 74100 - DNA, 25 bp, Artificial
  Probe
ataactaggtgcaaaagatcagcca

SEQ ID NO: 74101 - DNA, 25 bp, Artificial
  Probe
actgcactttaatgtactttctata

SEQ ID NO: 74102 - DNA, 25 bp, Artificial
  Probe
tactgcactttaatgtactttctat

SEQ ID NO: 74103 - DNA, 25 bp, Artificial
  Probe
atactgcactttaatgtactttcta

SEQ ID NO: 74104 - DNA, 25 bp, Artificial
  Probe
tatactgcactttaatgtactttct

SEQ ID NO: 74105 - DNA, 25 bp, Artificial
  Probe
gcagtggaaatcatagtcttcggct

SEQ ID NO: 74106 - DNA, 25 bp, Artificial
  Probe
atgacatgattgaaaggggcagatc

SEQ ID NO: 74107 - DNA, 25 bp, Artificial
  Probe
ttctataactaggtgcaaaagatca

SEQ ID NO: 74108 - DNA, 25 bp, Artificial
  Probe
caagaacatacagattaaggagtgc

SEQ ID NO: 74109 - DNA, 25 bp, Artificial
  Probe
aagaacatacagattaaggagtgcg

SEQ ID NO: 74110 - DNA, 25 bp, Artificial
  Probe
cttgtcttcctatgtgctgagatta

SEQ ID NO: 74111 - DNA, 25 bp, Artificial
  Probe
ttgtcttcctatgtgctgagattac

SEQ ID NO: 74112 - DNA, 25 bp, Artificial
  Probe
gaacatacagattaaggagtgcgag

SEQ ID NO: 74113 - DNA, 25 bp, Artificial
  Probe
catacagattaaggagtgcgagttg

SEQ ID NO: 74114 - DNA, 25 bp, Artificial
  Probe
agaacatacagattaaggagtgcga

SEQ ID NO: 74115 - DNA, 25 bp, Artificial
  Probe
acatacagattaaggagtgcgagtt

SEQ ID NO: 74116 - DNA, 25 bp, Artificial
  Probe
aacatacagattaaggagtgcgagt

SEQ ID NO: 74117 - DNA, 25 bp, Artificial
  Probe
acttgtcttcctatgtgctgagatt

SEQ ID NO: 74118 - DNA, 25 bp, Artificial
  Probe
gtcttcctatgtgctgagattacag

SEQ ID NO: 74119 - DNA, 25 bp, Artificial
  Probe
tgtcttcctatgtgctgagattaca

SEQ ID NO: 74120 - DNA, 25 bp, Artificial
  Probe
tcttcctatgtgctgagattacagg

SEQ ID NO: 74121 - DNA, 25 bp, Artificial
  Probe
ttctgtaactgaggacaaccttgat

SEQ ID NO: 74122 - DNA, 25 bp, Artificial
  Probe
ttgatctcattacacaggaaggctc

SEQ ID NO: 74123 - DNA, 25 bp, Artificial
  Probe
cttcctatgtgctgagattacaggt

SEQ ID NO: 74124 - DNA, 25 bp, Artificial
  Probe
atacagattaaggagtgcgagttgc

SEQ ID NO: 74125 - DNA, 25 bp, Artificial
  Probe
ttcctatgtgctgagattacaggtg

SEQ ID NO: 74126 - DNA, 25 bp, Artificial
  Probe
ctatgtgctgagattacaggtgtgt

SEQ ID NO: 74127 - DNA, 25 bp, Artificial
  Probe
ctctctccagttctttactctttga

SEQ ID NO: 74128 - DNA, 25 bp, Artificial
  Probe
tctgtaactgaggacaaccttgatc

SEQ ID NO: 74129 - DNA, 25 bp, Artificial
  Probe
cacttgtcttcctatgtgctgagat

SEQ ID NO: 74130 - DNA, 25 bp, Artificial
  Probe
tatgtgctgagattacaggtgtgtg

SEQ ID NO: 74131 - DNA, 25 bp, Artificial
  Probe
actctttgatctcattacacaggaa

SEQ ID NO: 74132 - DNA, 25 bp, Artificial
  Probe
gttctgtaactgaggacaaccttga

SEQ ID NO: 74133 - DNA, 25 bp, Artificial
  Probe
ctgttctgtaactgaggacaacctt

SEQ ID NO: 74134 - DNA, 25 bp, Artificial
  Probe
tctctccagttctttactctttgat

SEQ ID NO: 74135 - DNA, 25 bp, Artificial
  Probe
tctttgatctcattacacaggaagg

SEQ ID NO: 74136 - DNA, 25 bp, Artificial
  Probe
gctctctccagttctttactctttg

SEQ ID NO: 74137 - DNA, 25 bp, Artificial
  Probe
tgatctcattacacaggaaggctct

SEQ ID NO: 74138 - DNA, 25 bp, Artificial
  Probe
tactctttgatctcattacacagga

SEQ ID NO: 74139 - DNA, 25 bp, Artificial
  Probe
ctctttgatctcattacacaggaag

SEQ ID NO: 74140 - DNA, 25 bp, Artificial
  Probe
tgttctgtaactgaggacaaccttg

SEQ ID NO: 74141 - DNA, 25 bp, Artificial
  Probe
aacctgttctgtaactgaggacaac

SEQ ID NO: 74142 - DNA, 25 bp, Artificial
  Probe
tccagttctttactctttgatctca

SEQ ID NO: 74143 - DNA, 25 bp, Artificial
  Probe
tctccagttctttactctttgatct

SEQ ID NO: 74144 - DNA, 25 bp, Artificial
  Probe
tacattaagccagcaccctacaaat

SEQ ID NO: 74145 - DNA, 25 bp, Artificial
  Probe
gatctcattacacaggaaggctctg

SEQ ID NO: 74146 - DNA, 25 bp, Artificial
  Probe
ttactctttgatctcattacacagg

SEQ ID NO: 74147 - DNA, 25 bp, Artificial
  Probe
ctccagttctttactctttgatctc

SEQ ID NO: 74148 - DNA, 25 bp, Artificial
  Probe
ctctccagttctttactctttgatc

SEQ ID NO: 74149 - DNA, 25 bp, Artificial
  Probe
cctatgtgctgagattacaggtgtg

SEQ ID NO: 74150 - DNA, 25 bp, Artificial
  Probe
ctttgatctcattacacaggaaggc

SEQ ID NO: 74151 - DNA, 25 bp, Artificial
  Probe
tttgatctcattacacaggaaggct

SEQ ID NO: 74152 - DNA, 25 bp, Artificial
  Probe
tcctatgtgctgagattacaggtgt

SEQ ID NO: 74153 - DNA, 25 bp, Artificial
  Probe
cctaacctattcctaaccacaagag

SEQ ID NO: 74154 - DNA, 25 bp, Artificial
  Probe
ctaacctattcctaaccacaagagc

SEQ ID NO: 74155 - DNA, 25 bp, Artificial
  Probe
taacctattcctaaccacaagagcc

SEQ ID NO: 74156 - DNA, 25 bp, Artificial
  Probe
gacctttccctaacctattcctaac

SEQ ID NO: 74157 - DNA, 25 bp, Artificial
  Probe
ctttccctaacctattcctaaccac

SEQ ID NO: 74158 - DNA, 25 bp, Artificial
  Probe
tgacctttccctaacctattcctaa

SEQ ID NO: 74159 - DNA, 25 bp, Artificial
  Probe
ttccctaacctattcctaaccacaa

SEQ ID NO: 74160 - DNA, 25 bp, Artificial
  Probe
tttccctaacctattcctaaccaca

SEQ ID NO: 74161 - DNA, 25 bp, Artificial
  Probe
gtgacctttccctaacctattccta

SEQ ID NO: 74162 - DNA, 25 bp, Artificial
  Probe
ccctaacctattcctaaccacaaga

SEQ ID NO: 74163 - DNA, 25 bp, Artificial
  Probe
tccctaacctattcctaaccacaag

SEQ ID NO: 74164 - DNA, 25 bp, Artificial
  Probe
cctttccctaacctattcctaacca

SEQ ID NO: 74165 - DNA, 25 bp, Artificial
  Probe
acctttccctaacctattcctaacc

SEQ ID NO: 74166 - DNA, 25 bp, Artificial
  Probe
aacctattcctaaccacaagagcct

SEQ ID NO: 74167 - DNA, 25 bp, Artificial
  Probe
acctattcctaaccacaagagcctt

SEQ ID NO: 74168 - DNA, 25 bp, Artificial
  Probe
gagtgacctttccctaacctattcc

SEQ ID NO: 74169 - DNA, 25 bp, Artificial
  Probe
gatattgggaacagttctcagagtc

SEQ ID NO: 74170 - DNA, 25 bp, Artificial
  Probe
atgtgactctcttgtctttcaatgg

SEQ ID NO: 74171 - DNA, 25 bp, Artificial
  Probe
agtgacctttccctaacctattcct

SEQ ID NO: 74172 - DNA, 25 bp, Artificial
  Probe
tgatattgggaacagttctcagagt

SEQ ID NO: 74173 - DNA, 25 bp, Artificial
  Probe
cttctgatattgggaacagttctca

SEQ ID NO: 74174 - DNA, 25 bp, Artificial
  Probe
gagtcaagaaatctccacagacaga

SEQ ID NO: 74175 - DNA, 25 bp, Artificial
  Probe
ctgaaagaaggagaactcaagaggg

SEQ ID NO: 74176 - DNA, 25 bp, Artificial
  Probe
cgttaggataccaagtccatgatgg

SEQ ID NO: 74177 - DNA, 25 bp, Artificial
  Probe
tcaagaaatctccacagacagactg

SEQ ID NO: 74178 - DNA, 25 bp, Artificial
  Probe
gtcaagaaatctccacagacagact

SEQ ID NO: 74179 - DNA, 25 bp, Artificial
  Probe
agtcaagaaatctccacagacagac

SEQ ID NO: 74180 - DNA, 25 bp, Artificial
  Probe
ggagtgacctttccctaacctattc

SEQ ID NO: 74181 - DNA, 25 bp, Artificial
  Probe
tgaaagaaggagaactcaagaggga

SEQ ID NO: 74182 - DNA, 25 bp, Artificial
  Probe
aaatcaggagtgacctttccctaac

SEQ ID NO: 74183 - DNA, 25 bp, Artificial
  Probe
gcgttaggataccaagtccatgatg

SEQ ID NO: 74184 - DNA, 25 bp, Artificial
  Probe
atattgggaacagttctcagagtcc

SEQ ID NO: 74185 - DNA, 25 bp, Artificial
  Probe
agcgttaggataccaagtccatgat

SEQ ID NO: 74186 - DNA, 25 bp, Artificial
  Probe
aggagtgacctttccctaacctatt

SEQ ID NO: 74187 - DNA, 25 bp, Artificial
  Probe
gctgaaagaaggagaactcaagagg

SEQ ID NO: 74188 - DNA, 25 bp, Artificial
  Probe
agctgaaagaaggagaactcaagag

SEQ ID NO: 74189 - DNA, 25 bp, Artificial
  Probe
gaaatcaggagtgacctttccctaa

SEQ ID NO: 74190 - DNA, 25 bp, Artificial
  Probe
gagctgaaagaaggagaactcaaga

SEQ ID NO: 74191 - DNA, 25 bp, Artificial
  Probe
agagctgaaagaaggagaactcaag

SEQ ID NO: 74192 - DNA, 25 bp, Artificial
  Probe
gagagctgaaagaaggagaactcaa

SEQ ID NO: 74193 - DNA, 25 bp, Artificial
  Probe
caggagtgacctttccctaacctat

SEQ ID NO: 74194 - DNA, 25 bp, Artificial
  Probe
tgtgactctcttgtctttcaatggc

SEQ ID NO: 74195 - DNA, 25 bp, Artificial
  Probe
caagaaatctccacagacagactgg

SEQ ID NO: 74196 - DNA, 25 bp, Artificial
  Probe
cctattcctaaccacaagagccttg

SEQ ID NO: 74197 - DNA, 25 bp, Artificial
  Probe
gtctcccatatcccctcctaagtag

SEQ ID NO: 74198 - DNA, 25 bp, Artificial
  Probe
ttactcaaaggacttcgtcatagac

SEQ ID NO: 74199 - DNA, 25 bp, Artificial
  Probe
tcaaaggacttcgtcatagacatta

SEQ ID NO: 74200 - DNA, 25 bp, Artificial
  Probe
ctcaaaggacttcgtcatagacatt

SEQ ID NO: 74201 - DNA, 25 bp, Artificial
  Probe
attactcaaaggacttcgtcataga

SEQ ID NO: 74202 - DNA, 25 bp, Artificial
  Probe
cattactcaaaggacttcgtcatag

SEQ ID NO: 74203 - DNA, 25 bp, Artificial
  Probe
gcattactcaaaggacttcgtcata

SEQ ID NO: 74204 - DNA, 25 bp, Artificial
  Probe
tactcaaaggacttcgtcatagaca

SEQ ID NO: 74205 - DNA, 25 bp, Artificial
  Probe
caaaggacttcgtcatagacattaa

SEQ ID NO: 74206 - DNA, 25 bp, Artificial
  Probe
aaggacttcgtcatagacattaaag

SEQ ID NO: 74207 - DNA, 25 bp, Artificial
  Probe
actcaaaggacttcgtcatagacat

SEQ ID NO: 74208 - DNA, 25 bp, Artificial
  Probe
aaaggacttcgtcatagacattaaa

SEQ ID NO: 74209 - DNA, 25 bp, Artificial
  Probe
cacttctttggaaatgagaccagtc

SEQ ID NO: 74210 - DNA, 25 bp, Artificial
  Probe
gttttggggacagaataggttttac

SEQ ID NO: 74211 - DNA, 25 bp, Artificial
  Probe
ggttttggggacagaataggtttta

SEQ ID NO: 74212 - DNA, 25 bp, Artificial
  Probe
cttctttggaaatgagaccagtcct

SEQ ID NO: 74213 - DNA, 25 bp, Artificial
  Probe
aggacttcgtcatagacattaaagt

SEQ ID NO: 74214 - DNA, 25 bp, Artificial
  Probe
ttctttggaaatgagaccagtcctg

SEQ ID NO: 74215 - DNA, 25 bp, Artificial
  Probe
acttctttggaaatgagaccagtcc

SEQ ID NO: 74216 - DNA, 25 bp, Artificial
  Probe
ggacttcgtcatagacattaaagtt

SEQ ID NO: 74217 - DNA, 25 bp, Artificial
  Probe
ggcattactcaaaggacttcgtcat

SEQ ID NO: 74218 - DNA, 25 bp, Artificial
  Probe
ccacttctttggaaatgagaccagt

SEQ ID NO: 74219 - DNA, 25 bp, Artificial
  Probe
gacttcgtcatagacattaaagttc

SEQ ID NO: 74220 - DNA, 25 bp, Artificial
  Probe
tggttttggggacagaataggtttt

SEQ ID NO: 74221 - DNA, 25 bp, Artificial
  Probe
ttttggggacagaataggttttacc

SEQ ID NO: 74222 - DNA, 25 bp, Artificial
  Probe
tttggggacagaataggttttacca

SEQ ID NO: 74223 - DNA, 25 bp, Artificial
  Probe
gacagaataggttttaccacagggt

SEQ ID NO: 74224 - DNA, 25 bp, Artificial
  Probe
ctggttttggggacagaataggttt

SEQ ID NO: 74225 - DNA, 25 bp, Artificial
  Probe
acagaataggttttaccacagggtg

SEQ ID NO: 74226 - DNA, 25 bp, Artificial
  Probe
ttggggacagaataggttttaccac

SEQ ID NO: 74227 - DNA, 25 bp, Artificial
  Probe
ggacagaataggttttaccacaggg

SEQ ID NO: 74228 - DNA, 25 bp, Artificial
  Probe
gggacagaataggttttaccacagg

SEQ ID NO: 74229 - DNA, 25 bp, Artificial
  Probe
ggggacagaataggttttaccacag

SEQ ID NO: 74230 - DNA, 25 bp, Artificial
  Probe
gggcattactcaaaggacttcgtca

SEQ ID NO: 74231 - DNA, 25 bp, Artificial
  Probe
tctttggaaatgagaccagtcctgg

SEQ ID NO: 74232 - DNA, 25 bp, Artificial
  Probe
tggggacagaataggttttaccaca

SEQ ID NO: 74233 - DNA, 25 bp, Artificial
  Probe
atccacttctttggaaatgagacca

SEQ ID NO: 74234 - DNA, 25 bp, Artificial
  Probe
aaggaaggggcattactcaaaggac

SEQ ID NO: 74235 - DNA, 25 bp, Artificial
  Probe
caaggaaggggcattactcaaagga

SEQ ID NO: 74236 - DNA, 25 bp, Artificial
  Probe
ggaaggggcattactcaaaggactt

SEQ ID NO: 74237 - DNA, 25 bp, Artificial
  Probe
tccacttctttggaaatgagaccag

SEQ ID NO: 74238 - DNA, 25 bp, Artificial
  Probe
aaggggcattactcaaaggacttcg

SEQ ID NO: 74239 - DNA, 25 bp, Artificial
  Probe
gaaggggcattactcaaaggacttc

SEQ ID NO: 74240 - DNA, 25 bp, Artificial
  Probe
ggacagtctggatgaagacagcttc

SEQ ID NO: 74241 - DNA, 25 bp, Artificial
  Probe
cacagactgataaggggtggattgg

SEQ ID NO: 74242 - DNA, 25 bp, Artificial
  Probe
gataaggggtggattggcaaggaag

SEQ ID NO: 74243 - DNA, 25 bp, Artificial
  Probe
gtaatgctcaagttcacaggttcac

SEQ ID NO: 74244 - DNA, 25 bp, Artificial
  Probe
taatgctcaagttcacaggttcaca

SEQ ID NO: 74245 - DNA, 25 bp, Artificial
  Probe
aagttcacaggttcacagatccatt

SEQ ID NO: 74246 - DNA, 25 bp, Artificial
  Probe
ttacatttagattcccacagcaaac

SEQ ID NO: 74247 - DNA, 25 bp, Artificial
  Probe
tacatttagattcccacagcaaaca

SEQ ID NO: 74248 - DNA, 25 bp, Artificial
  Probe
tttacatttagattcccacagcaaa

SEQ ID NO: 74249 - DNA, 25 bp, Artificial
  Probe
atttagattcccacagcaaacagaa

SEQ ID NO: 74250 - DNA, 25 bp, Artificial
  Probe
catttagattcccacagcaaacaga

SEQ ID NO: 74251 - DNA, 25 bp, Artificial
  Probe
tgtaatgctcaagttcacaggttca

SEQ ID NO: 74252 - DNA, 25 bp, Artificial
  Probe
gtgtaatgctcaagttcacaggttc

SEQ ID NO: 74253 - DNA, 25 bp, Artificial
  Probe
tttagattcccacagcaaacagaag

SEQ ID NO: 74254 - DNA, 25 bp, Artificial
  Probe
acatttagattcccacagcaaacag

SEQ ID NO: 74255 - DNA, 25 bp, Artificial
  Probe
agttcacaggttcacagatccattg

SEQ ID NO: 74256 - DNA, 25 bp, Artificial
  Probe
caagttcacaggttcacagatccat

SEQ ID NO: 74257 - DNA, 25 bp, Artificial
  Probe
gattcccacagcaaacagaagatag

SEQ ID NO: 74258 - DNA, 25 bp, Artificial
  Probe
agattcccacagcaaacagaagata

SEQ ID NO: 74259 - DNA, 25 bp, Artificial
  Probe
tagattcccacagcaaacagaagat

SEQ ID NO: 74260 - DNA, 25 bp, Artificial
  Probe
ctcaagttcacaggttcacagatcc

SEQ ID NO: 74261 - DNA, 25 bp, Artificial
  Probe
aatgctcaagttcacaggttcacag

SEQ ID NO: 74262 - DNA, 25 bp, Artificial
  Probe
ttagattcccacagcaaacagaaga

SEQ ID NO: 74263 - DNA, 25 bp, Artificial
  Probe
tccattgtgtggtttaacagactat

SEQ ID NO: 74264 - DNA, 25 bp, Artificial
  Probe
atccattgtgtggtttaacagacta

SEQ ID NO: 74265 - DNA, 25 bp, Artificial
  Probe
ccattgtgtggtttaacagactatt

SEQ ID NO: 74266 - DNA, 25 bp, Artificial
  Probe
gttcacaggttcacagatccattgt

SEQ ID NO: 74267 - DNA, 25 bp, Artificial
  Probe
cttgtcttccagtgtccaacatcag

SEQ ID NO: 74268 - DNA, 25 bp, Artificial
  Probe
acagaagatagcttatcatacttgt

SEQ ID NO: 74269 - DNA, 25 bp, Artificial
  Probe
aaatatgtgtaatgctcaagttcac

SEQ ID NO: 74270 - DNA, 25 bp, Artificial
  Probe
tcaagttcacaggttcacagatcca

SEQ ID NO: 74271 - DNA, 25 bp, Artificial
  Probe
gctcaagttcacaggttcacagatc

SEQ ID NO: 74272 - DNA, 25 bp, Artificial
  Probe
gatccattgtgtggtttaacagact

SEQ ID NO: 74273 - DNA, 25 bp, Artificial
  Probe
agatccattgtgtggtttaacagac

SEQ ID NO: 74274 - DNA, 25 bp, Artificial
  Probe
cagatccattgtgtggtttaacaga

SEQ ID NO: 74275 - DNA, 25 bp, Artificial
  Probe
acagatccattgtgtggtttaacag

SEQ ID NO: 74276 - DNA, 25 bp, Artificial
  Probe
tgctcaagttcacaggttcacagat

SEQ ID NO: 74277 - DNA, 25 bp, Artificial
  Probe
atgctcaagttcacaggttcacaga

SEQ ID NO: 74278 - DNA, 25 bp, Artificial
  Probe
attcccacagcaaacagaagatagc

SEQ ID NO: 74279 - DNA, 25 bp, Artificial
  Probe
ttttacatttagattcccacagcaa

SEQ ID NO: 74280 - DNA, 25 bp, Artificial
  Probe
attttacatttagattcccacagca

SEQ ID NO: 74281 - DNA, 25 bp, Artificial
  Probe
ttaattaactgaagaactgatgctg

SEQ ID NO: 74282 - DNA, 25 bp, Artificial
  Probe
gaagatagcttatcatacttgttca

SEQ ID NO: 74283 - DNA, 25 bp, Artificial
  Probe
cagaagatagcttatcatacttgtt

SEQ ID NO: 74284 - DNA, 25 bp, Artificial
  Probe
aacagaagatagcttatcatacttg

SEQ ID NO: 74285 - DNA, 25 bp, Artificial
  Probe
gcaaacagaagatagcttatcatac

SEQ ID NO: 74286 - DNA, 25 bp, Artificial
  Probe
cacagcaaacagaagatagcttatc

SEQ ID NO: 74287 - DNA, 25 bp, Artificial
  Probe
acagcaaacagaagatagcttatca

SEQ ID NO: 74288 - DNA, 25 bp, Artificial
  Probe
gataatacacaagcacagactggaa

SEQ ID NO: 74289 - DNA, 25 bp, Artificial
  Probe
cgataatacacaagcacagactgga

SEQ ID NO: 74290 - DNA, 25 bp, Artificial
  Probe
ataatacacaagcacagactggaaa

SEQ ID NO: 74291 - DNA, 25 bp, Artificial
  Probe
taatacacaagcacagactggaaac

SEQ ID NO: 74292 - DNA, 25 bp, Artificial
  Probe
ccgataatacacaagcacagactgg

SEQ ID NO: 74293 - DNA, 25 bp, Artificial
  Probe
gttccgaaccatgtttgaaatgaag

SEQ ID NO: 74294 - DNA, 25 bp, Artificial
  Probe
gccgataatacacaagcacagactg

SEQ ID NO: 74295 - DNA, 25 bp, Artificial
  Probe
gatacacatccaggccgataataca

SEQ ID NO: 74296 - DNA, 25 bp, Artificial
  Probe
atacacatccaggccgataatacac

SEQ ID NO: 74297 - DNA, 25 bp, Artificial
  Probe
ttccgaaccatgtttgaaatgaagc

SEQ ID NO: 74298 - DNA, 25 bp, Artificial
  Probe
ctacagacagcgatacacatccagg

SEQ ID NO: 74299 - DNA, 25 bp, Artificial
  Probe
cctacagacagcgatacacatccag

SEQ ID NO: 74300 - DNA, 25 bp, Artificial
  Probe
cgttccgaaccatgtttgaaatgaa

SEQ ID NO: 74301 - DNA, 25 bp, Artificial
  Probe
aatacacaagcacagactggaaacc

SEQ ID NO: 74302 - DNA, 25 bp, Artificial
  Probe
cgatacacatccaggccgataatac

SEQ ID NO: 74303 - DNA, 25 bp, Artificial
  Probe
acacaaagacgacacaacacacaaa

SEQ ID NO: 74304 - DNA, 25 bp, Artificial
  Probe
tacacatccaggccgataatacaca

SEQ ID NO: 74305 - DNA, 25 bp, Artificial
  Probe
cacatccaggccgataatacacaag

SEQ ID NO: 74306 - DNA, 25 bp, Artificial
  Probe
aaccgttccgaaccatgtttgaaat

SEQ ID NO: 74307 - DNA, 25 bp, Artificial
  Probe
cacaaagacgacacaacacacaaaa

SEQ ID NO: 74308 - DNA, 25 bp, Artificial
  Probe
acacatccaggccgataatacacaa

SEQ ID NO: 74309 - DNA, 25 bp, Artificial
  Probe
tccgaaccatgtttgaaatgaagcc

SEQ ID NO: 74310 - DNA, 25 bp, Artificial
  Probe
ccgttccgaaccatgtttgaaatga

SEQ ID NO: 74311 - DNA, 25 bp, Artificial
  Probe
accgttccgaaccatgtttgaaatg

SEQ ID NO: 74312 - DNA, 25 bp, Artificial
  Probe
gaaccgttccgaaccatgtttgaaa

SEQ ID NO: 74313 - DNA, 25 bp, Artificial
  Probe
gcgatacacatccaggccgataata

SEQ ID NO: 74314 - DNA, 25 bp, Artificial
  Probe
atacacaagcacagactggaaaccc

SEQ ID NO: 74315 - DNA, 25 bp, Artificial
  Probe
gaagaaccgttccgaaccatgtttg

SEQ ID NO: 74316 - DNA, 25 bp, Artificial
  Probe
ggccgataatacacaagcacagact

SEQ ID NO: 74317 - DNA, 25 bp, Artificial
  Probe
aggccgataatacacaagcacagac

SEQ ID NO: 74318 - DNA, 25 bp, Artificial
  Probe
caggccgataatacacaagcacaga

SEQ ID NO: 74319 - DNA, 25 bp, Artificial
  Probe
ccgaaccatgtttgaaatgaagccc

SEQ ID NO: 74320 - DNA, 25 bp, Artificial
  Probe
atccaggccgataatacacaagcac

SEQ ID NO: 74321 - DNA, 25 bp, Artificial
  Probe
catccaggccgataatacacaagca

SEQ ID NO: 74322 - DNA, 25 bp, Artificial
  Probe
acatccaggccgataatacacaagc

SEQ ID NO: 74323 - DNA, 25 bp, Artificial
  Probe
aaccatgtttgaaatgaagccccag

SEQ ID NO: 74324 - DNA, 25 bp, Artificial
  Probe
gaaccatgtttgaaatgaagcccca

SEQ ID NO: 74325 - DNA, 25 bp, Artificial
  Probe
ctatacaccccaacagcaggacaac

SEQ ID NO: 74326 - DNA, 25 bp, Artificial
  Probe
cgaaccatgtttgaaatgaagcccc

SEQ ID NO: 74327 - DNA, 25 bp, Artificial
  Probe
ggctgtatattgtggtggtgattag

SEQ ID NO: 74328 - DNA, 25 bp, Artificial
  Probe
tggctgtatattgtggtggtgatta

SEQ ID NO: 74329 - DNA, 25 bp, Artificial
  Probe
acagaagtagtggtatgttacagat

SEQ ID NO: 74330 - DNA, 25 bp, Artificial
  Probe
tgtatattgtggtggtgattagctt

SEQ ID NO: 74331 - DNA, 25 bp, Artificial
  Probe
ttggctgtatattgtggtggtgatt

SEQ ID NO: 74332 - DNA, 25 bp, Artificial
  Probe
tacagaagtagtggtatgttacaga

SEQ ID NO: 74333 - DNA, 25 bp, Artificial
  Probe
tatattgtggtggtgattagcttcc

SEQ ID NO: 74334 - DNA, 25 bp, Artificial
  Probe
ctgtatattgtggtggtgattagct

SEQ ID NO: 74335 - DNA, 25 bp, Artificial
  Probe
gtatattgtggtggtgattagcttc

SEQ ID NO: 74336 - DNA, 25 bp, Artificial
  Probe
cttgtcagagctggaagaatagtaa

SEQ ID NO: 74337 - DNA, 25 bp, Artificial
  Probe
ttacagaagtagtggtatgttacag

SEQ ID NO: 74338 - DNA, 25 bp, Artificial
  Probe
cttaactcctagcactgtctccatg

SEQ ID NO: 74339 - DNA, 25 bp, Artificial
  Probe
ttaactcctagcactgtctccatgt

SEQ ID NO: 74340 - DNA, 25 bp, Artificial
  Probe
gctgtatattgtggtggtgattagc

SEQ ID NO: 74341 - DNA, 25 bp, Artificial
  Probe
tttggctgtatattgtggtggtgat

SEQ ID NO: 74342 - DNA, 25 bp, Artificial
  Probe
ttgtcagagctggaagaatagtaaa

SEQ ID NO: 74343 - DNA, 25 bp, Artificial
  Probe
taactcctagcactgtctccatgtc

SEQ ID NO: 74344 - DNA, 25 bp, Artificial
  Probe
tcttgtcagagctggaagaatagta

SEQ ID NO: 74345 - DNA, 25 bp, Artificial
  Probe
tactccagtttggctgtatattgtg

SEQ ID NO: 74346 - DNA, 25 bp, Artificial
  Probe
ttgtactccagtttggctgtatatt

SEQ ID NO: 74347 - DNA, 25 bp, Artificial
  Probe
cttgtactccagtttggctgtatat

SEQ ID NO: 74348 - DNA, 25 bp, Artificial
  Probe
gtactccagtttggctgtatattgt

SEQ ID NO: 74349 - DNA, 25 bp, Artificial
  Probe
tgtactccagtttggctgtatattg

SEQ ID NO: 74350 - DNA, 25 bp, Artificial
  Probe
tttacagaagtagtggtatgttaca

SEQ ID NO: 74351 - DNA, 25 bp, Artificial
  Probe
gtttggctgtatattgtggtggtga

SEQ ID NO: 74352 - DNA, 25 bp, Artificial
  Probe
agtttggctgtatattgtggtggtg

SEQ ID NO: 74353 - DNA, 25 bp, Artificial
  Probe
ccttgtactccagtttggctgtata

SEQ ID NO: 74354 - DNA, 25 bp, Artificial
  Probe
tctcttgtcagagctggaagaatag

SEQ ID NO: 74355 - DNA, 25 bp, Artificial
  Probe
ctctcttgtcagagctggaagaata

SEQ ID NO: 74356 - DNA, 25 bp, Artificial
  Probe
atattgtggtggtgattagcttccc

SEQ ID NO: 74357 - DNA, 25 bp, Artificial
  Probe
ctcttgtcagagctggaagaatagt

SEQ ID NO: 74358 - DNA, 25 bp, Artificial
  Probe
ctccagtttggctgtatattgtggt

SEQ ID NO: 74359 - DNA, 25 bp, Artificial
  Probe
actccagtttggctgtatattgtgg

SEQ ID NO: 74360 - DNA, 25 bp, Artificial
  Probe
cagtttggctgtatattgtggtggt

SEQ ID NO: 74361 - DNA, 25 bp, Artificial
  Probe
ctactgctaagtgctgtgtgacttc

SEQ ID NO: 74362 - DNA, 25 bp, Artificial
  Probe
tccagtttggctgtatattgtggtg

SEQ ID NO: 74363 - DNA, 25 bp, Artificial
  Probe
ctgtgtgacttcaggcaaatctctc

SEQ ID NO: 74364 - DNA, 25 bp, Artificial
  Probe
gcttaactcctagcactgtctccat

SEQ ID NO: 74365 - DNA, 25 bp, Artificial
  Probe
tgtcagagctggaagaatagtaaaa

SEQ ID NO: 74366 - DNA, 25 bp, Artificial
  Probe
tccctcaggtcatgattaaacattt

SEQ ID NO: 74367 - DNA, 25 bp, Artificial
  Probe
ctcactcattcctggttgccttctc

SEQ ID NO: 74368 - DNA, 25 bp, Artificial
  Probe
caaatctctcgcctctcttgtcaga

SEQ ID NO: 74369 - DNA, 25 bp, Artificial
  Probe
gtccctcaggtcatgattaaacatt

SEQ ID NO: 74370 - DNA, 25 bp, Artificial
  Probe
gaacacttgggcaagaagagctaaa

SEQ ID NO: 74371 - DNA, 25 bp, Artificial
  Probe
cctttgagtcttgcttaactcctag

SEQ ID NO: 74372 - DNA, 25 bp, Artificial
  Probe
cactattacccgaatctcctacaaa

SEQ ID NO: 74373 - DNA, 25 bp, Artificial
  Probe
acactattacccgaatctcctacaa

SEQ ID NO: 74374 - DNA, 25 bp, Artificial
  Probe
gacactattacccgaatctcctaca

SEQ ID NO: 74375 - DNA, 25 bp, Artificial
  Probe
gaatcctttggcttcatcacctatc

SEQ ID NO: 74376 - DNA, 25 bp, Artificial
  Probe
aatcctttggcttcatcacctatca

SEQ ID NO: 74377 - DNA, 25 bp, Artificial
  Probe
atcctttggcttcatcacctatcag

SEQ ID NO: 74378 - DNA, 25 bp, Artificial
  Probe
caaagctattaaagggactgaatgt

SEQ ID NO: 74379 - DNA, 25 bp, Artificial
  Probe
acaaagctattaaagggactgaatg

SEQ ID NO: 74380 - DNA, 25 bp, Artificial
  Probe
aaacaaagctattaaagggactgaa

SEQ ID NO: 74381 - DNA, 25 bp, Artificial
  Probe
aagctattaaagggactgaatgttt

SEQ ID NO: 74382 - DNA, 25 bp, Artificial
  Probe
aaagctattaaagggactgaatgtt

SEQ ID NO: 74383 - DNA, 25 bp, Artificial
  Probe
aacaaagctattaaagggactgaat

SEQ ID NO: 74384 - DNA, 25 bp, Artificial
  Probe
ggaatcctttggcttcatcacctat

SEQ ID NO: 74385 - DNA, 25 bp, Artificial
  Probe
cttcatcacctatcagggatctctc

SEQ ID NO: 74386 - DNA, 25 bp, Artificial
  Probe
ggacactattacccgaatctcctac

SEQ ID NO: 74387 - DNA, 25 bp, Artificial
  Probe
ttcatcacctatcagggatctctca

SEQ ID NO: 74388 - DNA, 25 bp, Artificial
  Probe
actattacccgaatctcctacaaaa

SEQ ID NO: 74389 - DNA, 25 bp, Artificial
  Probe
tcatcacctatcagggatctctcag

SEQ ID NO: 74390 - DNA, 25 bp, Artificial
  Probe
gcttcatcacctatcagggatctct

SEQ ID NO: 74391 - DNA, 25 bp, Artificial
  Probe
tcaccccaaaacaaagctattaaag

SEQ ID NO: 74392 - DNA, 25 bp, Artificial
  Probe
ccaaaacaaagctattaaagggact

SEQ ID NO: 74393 - DNA, 25 bp, Artificial
  Probe
ttcaccccaaaacaaagctattaaa

SEQ ID NO: 74394 - DNA, 25 bp, Artificial
  Probe
attcaccccaaaacaaagctattaa

SEQ ID NO: 74395 - DNA, 25 bp, Artificial
  Probe
aattcaccccaaaacaaagctatta

SEQ ID NO: 74396 - DNA, 25 bp, Artificial
  Probe
tttggcttcatcacctatcagggat

SEQ ID NO: 74397 - DNA, 25 bp, Artificial
  Probe
caccccaaaacaaagctattaaagg

SEQ ID NO: 74398 - DNA, 25 bp, Artificial
  Probe
caaaacaaagctattaaagggactg

SEQ ID NO: 74399 - DNA, 25 bp, Artificial
  Probe
aaaacaaagctattaaagggactga

SEQ ID NO: 74400 - DNA, 25 bp, Artificial
  Probe
gggacactattacccgaatctccta

SEQ ID NO: 74401 - DNA, 25 bp, Artificial
  Probe
catcacctatcagggatctctcagc

SEQ ID NO: 74402 - DNA, 25 bp, Artificial
  Probe
ttggcttcatcacctatcagggatc

SEQ ID NO: 74403 - DNA, 25 bp, Artificial
  Probe
ctttggcttcatcacctatcaggga

SEQ ID NO: 74404 - DNA, 25 bp, Artificial
  Probe
tcctttggcttcatcacctatcagg

SEQ ID NO: 74405 - DNA, 25 bp, Artificial
  Probe
cggaatcctttggcttcatcaccta

SEQ ID NO: 74406 - DNA, 25 bp, Artificial
  Probe
atcacctatcagggatctctcagca

SEQ ID NO: 74407 - DNA, 25 bp, Artificial
  Probe
ggcttcatcacctatcagggatctc

SEQ ID NO: 74408 - DNA, 25 bp, Artificial
  Probe
gaattcaccccaaaacaaagctatt

SEQ ID NO: 74409 - DNA, 25 bp, Artificial
  Probe
agctgcgattgagaaatatctagat

SEQ ID NO: 74410 - DNA, 25 bp, Artificial
  Probe
ggaattcaccccaaaacaaagctat

SEQ ID NO: 74411 - DNA, 25 bp, Artificial
  Probe
tatcagggatctctcagcactcctc

SEQ ID NO: 74412 - DNA, 25 bp, Artificial
  Probe
ctatcagggatctctcagcactcct

SEQ ID NO: 74413 - DNA, 25 bp, Artificial
  Probe
tggcttcatcacctatcagggatct

SEQ ID NO: 74414 - DNA, 25 bp, Artificial
  Probe
cccaaaacaaagctattaaagggac

SEQ ID NO: 74415 - DNA, 25 bp, Artificial
  Probe
acctatcagggatctctcagcactc

SEQ ID NO: 74416 - DNA, 25 bp, Artificial
  Probe
cctttggcttcatcacctatcaggg

SEQ ID NO: 74417 - DNA, 25 bp, Artificial
  Probe
ctctctctctatgtattcagcagtg

SEQ ID NO: 74418 - DNA, 25 bp, Artificial
  Probe
tctctctctctatgtattcagcagt

SEQ ID NO: 74419 - DNA, 25 bp, Artificial
  Probe
actctctctctctatgtattcagca

SEQ ID NO: 74420 - DNA, 25 bp, Artificial
  Probe
ctctctctctctatgtattcagcag

SEQ ID NO: 74421 - DNA, 25 bp, Artificial
  Probe
tattctacctgagtgactacatcct

SEQ ID NO: 74422 - DNA, 25 bp, Artificial
  Probe
ctctctatgtattcagcagtggaag

SEQ ID NO: 74423 - DNA, 25 bp, Artificial
  Probe
ctctctctatgtattcagcagtgga

SEQ ID NO: 74424 - DNA, 25 bp, Artificial
  Probe
tctctctctatgtattcagcagtgg

SEQ ID NO: 74425 - DNA, 25 bp, Artificial
  Probe
tctctctatgtattcagcagtggaa

SEQ ID NO: 74426 - DNA, 25 bp, Artificial
  Probe
atattctacctgagtgactacatcc

SEQ ID NO: 74427 - DNA, 25 bp, Artificial
  Probe
ctctatgtattcagcagtggaagtg

SEQ ID NO: 74428 - DNA, 25 bp, Artificial
  Probe
tctctatgtattcagcagtggaagt

SEQ ID NO: 74429 - DNA, 25 bp, Artificial
  Probe
tactctctctctctatgtattcagc

SEQ ID NO: 74430 - DNA, 25 bp, Artificial
  Probe
gctactctctctctctatgtattca

SEQ ID NO: 74431 - DNA, 25 bp, Artificial
  Probe
attctacctgagtgactacatcctc

SEQ ID NO: 74432 - DNA, 25 bp, Artificial
  Probe
cacagctactctctctctctatgta

SEQ ID NO: 74433 - DNA, 25 bp, Artificial
  Probe
acagctactctctctctctatgtat

SEQ ID NO: 74434 - DNA, 25 bp, Artificial
  Probe
tcacagctactctctctctctatgt

SEQ ID NO: 74435 - DNA, 25 bp, Artificial
  Probe
ttcacagctactctctctctctatg

SEQ ID NO: 74436 - DNA, 25 bp, Artificial
  Probe
cagctactctctctctctatgtatt

SEQ ID NO: 74437 - DNA, 25 bp, Artificial
  Probe
agctactctctctctctatgtattc

SEQ ID NO: 74438 - DNA, 25 bp, Artificial
  Probe
actaggaataaagatttgtgccact

SEQ ID NO: 74439 - DNA, 25 bp, Artificial
  Probe
ctactctctctctctatgtattcag

SEQ ID NO: 74440 - DNA, 25 bp, Artificial
  Probe
aggaataaagatttgtgccactaaa

SEQ ID NO: 74441 - DNA, 25 bp, Artificial
  Probe
tactaggaataaagatttgtgccac

SEQ ID NO: 74442 - DNA, 25 bp, Artificial
  Probe
gcctctttatattctacctgagtga

SEQ ID NO: 74443 - DNA, 25 bp, Artificial
  Probe
ctaggaataaagatttgtgccacta

SEQ ID NO: 74444 - DNA, 25 bp, Artificial
  Probe
tatattctacctgagtgactacatc

SEQ ID NO: 74445 - DNA, 25 bp, Artificial
  Probe
gtactaggaataaagatttgtgcca

SEQ ID NO: 74446 - DNA, 25 bp, Artificial
  Probe
taggaataaagatttgtgccactaa

SEQ ID NO: 74447 - DNA, 25 bp, Artificial
  Probe
tttcacagctactctctctctctat

SEQ ID NO: 74448 - DNA, 25 bp, Artificial
  Probe
ttatattctacctgagtgactacat

SEQ ID NO: 74449 - DNA, 25 bp, Artificial
  Probe
gtttcacagctactctctctctcta

SEQ ID NO: 74450 - DNA, 25 bp, Artificial
  Probe
ctctgtacgaacaaatctacctgtg

SEQ ID NO: 74451 - DNA, 25 bp, Artificial
  Probe
cctctttatattctacctgagtgac

SEQ ID NO: 74452 - DNA, 25 bp, Artificial
  Probe
gtggtgattaaggattaccctacat

SEQ ID NO: 74453 - DNA, 25 bp, Artificial
  Probe
atgtggtgattaaggattaccctac

SEQ ID NO: 74454 - DNA, 25 bp, Artificial
  Probe
ctgtacgaacaaatctacctgtgtc

SEQ ID NO: 74455 - DNA, 25 bp, Artificial
  Probe
cttctggtagcctcctctactatgt

SEQ ID NO: 74456 - DNA, 25 bp, Artificial
  Probe
tgtggtgattaaggattaccctaca

SEQ ID NO: 74457 - DNA, 25 bp, Artificial
  Probe
ctaagtttcacagctactctctctc

SEQ ID NO: 74458 - DNA, 25 bp, Artificial
  Probe
taagtttcacagctactctctctct

SEQ ID NO: 74459 - DNA, 25 bp, Artificial
  Probe
tctgtacgaacaaatctacctgtgt

SEQ ID NO: 74460 - DNA, 25 bp, Artificial
  Probe
catgtggtgattaaggattacccta

SEQ ID NO: 74461 - DNA, 25 bp, Artificial
  Probe
ttctggtagcctcctctactatgtg

SEQ ID NO: 74462 - DNA, 25 bp, Artificial
  Probe
tattaagacattctgctactgtgct

SEQ ID NO: 74463 - DNA, 25 bp, Artificial
  Probe
atattaagacattctgctactgtgc

SEQ ID NO: 74464 - DNA, 25 bp, Artificial
  Probe
attaagacattctgctactgtgctg

SEQ ID NO: 74465 - DNA, 25 bp, Artificial
  Probe
tgatgtcccaccactctttgtatag

SEQ ID NO: 74466 - DNA, 25 bp, Artificial
  Probe
ctgatgtcccaccactctttgtata

SEQ ID NO: 74467 - DNA, 25 bp, Artificial
  Probe
gatgtcccaccactctttgtataga

SEQ ID NO: 74468 - DNA, 25 bp, Artificial
  Probe
accactctttgtatagacacctact

SEQ ID NO: 74469 - DNA, 25 bp, Artificial
  Probe
caccactctttgtatagacacctac

SEQ ID NO: 74470 - DNA, 25 bp, Artificial
  Probe
actctagaataggaattggtgttgg

SEQ ID NO: 74471 - DNA, 25 bp, Artificial
  Probe
tttaagtttacactaggcaagcagg

SEQ ID NO: 74472 - DNA, 25 bp, Artificial
  Probe
ccaccactctttgtatagacaccta

SEQ ID NO: 74473 - DNA, 25 bp, Artificial
  Probe
ttaagacattctgctactgtgctgc

SEQ ID NO: 74474 - DNA, 25 bp, Artificial
  Probe
ttaagtttacactaggcaagcagga

SEQ ID NO: 74475 - DNA, 25 bp, Artificial
  Probe
aactctagaataggaattggtgttg

SEQ ID NO: 74476 - DNA, 25 bp, Artificial
  Probe
atgtcccaccactctttgtatagac

SEQ ID NO: 74477 - DNA, 25 bp, Artificial
  Probe
taagtttacactaggcaagcaggag

SEQ ID NO: 74478 - DNA, 25 bp, Artificial
  Probe
tatattaagacattctgctactgtg

SEQ ID NO: 74479 - DNA, 25 bp, Artificial
  Probe
gtcccaccactctttgtatagacac

SEQ ID NO: 74480 - DNA, 25 bp, Artificial
  Probe
ctctagaataggaattggtgttggg

SEQ ID NO: 74481 - DNA, 25 bp, Artificial
  Probe
tccaatgaagtatattatcaagtgt

SEQ ID NO: 74482 - DNA, 25 bp, Artificial
  Probe
ttaactctagaataggaattggtgt

SEQ ID NO: 74483 - DNA, 25 bp, Artificial
  Probe
taactctagaataggaattggtgtt

SEQ ID NO: 74484 - DNA, 25 bp, Artificial
  Probe
ttttaagtttacactaggcaagcag

SEQ ID NO: 74485 - DNA, 25 bp, Artificial
  Probe
cttttaagtttacactaggcaagca

SEQ ID NO: 74486 - DNA, 25 bp, Artificial
  Probe
cccaccactctttgtatagacacct

SEQ ID NO: 74487 - DNA, 25 bp, Artificial
  Probe
tcccaccactctttgtatagacacc

SEQ ID NO: 74488 - DNA, 25 bp, Artificial
  Probe
cctgatgtcccaccactctttgtat

SEQ ID NO: 74489 - DNA, 25 bp, Artificial
  Probe
ccttttaagtttacactaggcaagc

SEQ ID NO: 74490 - DNA, 25 bp, Artificial
  Probe
acaagccttttaagtttacactagg

SEQ ID NO: 74491 - DNA, 25 bp, Artificial
  Probe
ccaatgaagtatattatcaagtgtt

SEQ ID NO: 74492 - DNA, 25 bp, Artificial
  Probe
atgggaagaaatttgactcctctcg

SEQ ID NO: 74493 - DNA, 25 bp, Artificial
  Probe
ctccagtgagggaagtcctgttaaa

SEQ ID NO: 74494 - DNA, 25 bp, Artificial
  Probe
atatattaagacattctgctactgt

SEQ ID NO: 74495 - DNA, 25 bp, Artificial
  Probe
attaactctagaataggaattggtg

SEQ ID NO: 74496 - DNA, 25 bp, Artificial
  Probe
aacaagccttttaagtttacactag

SEQ ID NO: 74497 - DNA, 25 bp, Artificial
  Probe
tccagtgagggaagtcctgttaaac

SEQ ID NO: 74498 - DNA, 25 bp, Artificial
  Probe
tgagatctaagtttccaatgaagta

SEQ ID NO: 74499 - DNA, 25 bp, Artificial
  Probe
tttcctgatgtcccaccactctttg

SEQ ID NO: 74500 - DNA, 25 bp, Artificial
  Probe
gaagaaatttgactcctctcgggac

SEQ ID NO: 74501 - DNA, 25 bp, Artificial
  Probe
aagtttacactaggcaagcaggagg

SEQ ID NO: 74502 - DNA, 25 bp, Artificial
  Probe
tcctgatgtcccaccactctttgta

SEQ ID NO: 74503 - DNA, 25 bp, Artificial
  Probe
tctccagtgagggaagtcctgttaa

SEQ ID NO: 74504 - DNA, 25 bp, Artificial
  Probe
ttctccagtgagggaagtcctgtta

SEQ ID NO: 74505 - DNA, 25 bp, Artificial
  Probe
aagaaatttgactcctctcgggaca

SEQ ID NO: 74506 - DNA, 25 bp, Artificial
  Probe
gcaaagccatagcagattcgagatg

SEQ ID NO: 74507 - DNA, 25 bp, Artificial
  Probe
aaactctgggaaatgtatctttggg

SEQ ID NO: 74508 - DNA, 25 bp, Artificial
  Probe
taaactctgggaaatgtatctttgg

SEQ ID NO: 74509 - DNA, 25 bp, Artificial
  Probe
gtgtgtgaataaatggtttctagca

SEQ ID NO: 74510 - DNA, 25 bp, Artificial
  Probe
tgtgtgtgaataaatggtttctagc

SEQ ID NO: 74511 - DNA, 25 bp, Artificial
  Probe
ttccagaatcgcagaatgaaagaaa

SEQ ID NO: 74512 - DNA, 25 bp, Artificial
  Probe
tgtgtgaataaatggtttctagcaa

SEQ ID NO: 74513 - DNA, 25 bp, Artificial
  Probe
gttccagaatcgcagaatgaaagaa

SEQ ID NO: 74514 - DNA, 25 bp, Artificial
  Probe
cttcaccattccttctcgcattcaa

SEQ ID NO: 74515 - DNA, 25 bp, Artificial
  Probe
aacttcaccattccttctcgcattc

SEQ ID NO: 74516 - DNA, 25 bp, Artificial
  Probe
cccttcagtgaacacagattattta

SEQ ID NO: 74517 - DNA, 25 bp, Artificial
  Probe
tcttctctgtggaacttcaccattc

SEQ ID NO: 74518 - DNA, 25 bp, Artificial
  Probe
ctcttctctgtggaacttcaccatt

SEQ ID NO: 74519 - DNA, 25 bp, Artificial
  Probe
gtgtgaataaatggtttctagcaaa

SEQ ID NO: 74520 - DNA, 25 bp, Artificial
  Probe
gaacttcaccattccttctcgcatt

SEQ ID NO: 74521 - DNA, 25 bp, Artificial
  Probe
gaaatgtatctttgggcatgagtca

SEQ ID NO: 74522 - DNA, 25 bp, Artificial
  Probe
ttcaccattccttctcgcattcaac

SEQ ID NO: 74523 - DNA, 25 bp, Artificial
  Probe
aaatgtatctttgggcatgagtcac

SEQ ID NO: 74524 - DNA, 25 bp, Artificial
  Probe
ttgtgtgtgaataaatggtttctag

SEQ ID NO: 74525 - DNA, 25 bp, Artificial
  Probe
tttgtgtgtgaataaatggtttcta

SEQ ID NO: 74526 - DNA, 25 bp, Artificial
  Probe
ggaaatgtatctttgggcatgagtc

SEQ ID NO: 74527 - DNA, 25 bp, Artificial
  Probe
ttaaactctgggaaatgtatctttg

SEQ ID NO: 74528 - DNA, 25 bp, Artificial
  Probe
ctctgggaaatgtatctttgggcat

SEQ ID NO: 74529 - DNA, 25 bp, Artificial
  Probe
aatgtatctttgggcatgagtcact

SEQ ID NO: 74530 - DNA, 25 bp, Artificial
  Probe
aactctgggaaatgtatctttgggc

SEQ ID NO: 74531 - DNA, 25 bp, Artificial
  Probe
caccattccttctcgcattcaactc

SEQ ID NO: 74532 - DNA, 25 bp, Artificial
  Probe
tatctttgggcatgagtcactgttt

SEQ ID NO: 74533 - DNA, 25 bp, Artificial
  Probe
caatgtgctgttgttcctcttctcc

SEQ ID NO: 74534 - DNA, 25 bp, Artificial
  Probe
ccaatgtgctgttgttcctcttctc

SEQ ID NO: 74535 - DNA, 25 bp, Artificial
  Probe
ccttcagtgaacacagattatttaa

SEQ ID NO: 74536 - DNA, 25 bp, Artificial
  Probe
cataagcaaggacaaggacacaacg

SEQ ID NO: 74537 - DNA, 25 bp, Artificial
  Probe
atcgcagaatgaaagaaaagaaact

SEQ ID NO: 74538 - DNA, 25 bp, Artificial
  Probe
cagaatcgcagaatgaaagaaaaga

SEQ ID NO: 74539 - DNA, 25 bp, Artificial
  Probe
agaatcgcagaatgaaagaaaagaa

SEQ ID NO: 74540 - DNA, 25 bp, Artificial
  Probe
aaaggagtcggtgttttgttttaag

SEQ ID NO: 74541 - DNA, 25 bp, Artificial
  Probe
ggagtcggtgttttgttttaagttt

SEQ ID NO: 74542 - DNA, 25 bp, Artificial
  Probe
tcaccattccttctcgcattcaact

SEQ ID NO: 74543 - DNA, 25 bp, Artificial
  Probe
acttcaccattccttctcgcattca

SEQ ID NO: 74544 - DNA, 25 bp, Artificial
  Probe
atgaaagaaaagaaactgaacaggg

SEQ ID NO: 74545 - DNA, 25 bp, Artificial
  Probe
aatcgcagaatgaaagaaaagaaac

SEQ ID NO: 74546 - DNA, 25 bp, Artificial
  Probe
ggttccagaatcgcagaatgaaaga

SEQ ID NO: 74547 - DNA, 25 bp, Artificial
  Probe
atgtatctttgggcatgagtcactg

SEQ ID NO: 74548 - DNA, 25 bp, Artificial
  Probe
ccagaatcgcagaatgaaagaaaag

SEQ ID NO: 74549 - DNA, 25 bp, Artificial
  Probe
gaaagaaaagaaactgaacagggac

SEQ ID NO: 74550 - DNA, 25 bp, Artificial
  Probe
gaatcgcagaatgaaagaaaagaaa

SEQ ID NO: 74551 - DNA, 25 bp, Artificial
  Probe
tgaaagaaaagaaactgaacaggga

SEQ ID NO: 74552 - DNA, 25 bp, Artificial
  Probe
atagtgctggattctgtgaagttag

SEQ ID NO: 74553 - DNA, 25 bp, Artificial
  Probe
catagtgctggattctgtgaagtta

SEQ ID NO: 74554 - DNA, 25 bp, Artificial
  Probe
tagtgctggattctgtgaagttaga

SEQ ID NO: 74555 - DNA, 25 bp, Artificial
  Probe
gaaggctgaagatggtgagaactat

SEQ ID NO: 74556 - DNA, 25 bp, Artificial
  Probe
agtgctggattctgtgaagttagag

SEQ ID NO: 74557 - DNA, 25 bp, Artificial
  Probe
aatgaaggctgaagatggtgagaac

SEQ ID NO: 74558 - DNA, 25 bp, Artificial
  Probe
tgaaggctgaagatggtgagaacta

SEQ ID NO: 74559 - DNA, 25 bp, Artificial
  Probe
gtgctggattctgtgaagttagagg

SEQ ID NO: 74560 - DNA, 25 bp, Artificial
  Probe
gccactgctgtgtttaataatatga

SEQ ID NO: 74561 - DNA, 25 bp, Artificial
  Probe
aaatgaaggctgaagatggtgagaa

SEQ ID NO: 74562 - DNA, 25 bp, Artificial
  Probe
atgaaggctgaagatggtgagaact

SEQ ID NO: 74563 - DNA, 25 bp, Artificial
  Probe
gaagaagctgaggagtacaaagaag

SEQ ID NO: 74564 - DNA, 25 bp, Artificial
  Probe
ccactgctgtgtttaataatatgaa

SEQ ID NO: 74565 - DNA, 25 bp, Artificial
  Probe
ggaagaagctgaggagtacaaagaa

SEQ ID NO: 74566 - DNA, 25 bp, Artificial
  Probe
acttggaagaagctgaggagtacaa

SEQ ID NO: 74567 - DNA, 25 bp, Artificial
  Probe
attgagaaaatgaaggctgaagatg

SEQ ID NO: 74568 - DNA, 25 bp, Artificial
  Probe
aagattgagaaaatgaaggctgaag

SEQ ID NO: 74569 - DNA, 25 bp, Artificial
  Probe
gattgagaaaatgaaggctgaagat

SEQ ID NO: 74570 - DNA, 25 bp, Artificial
  Probe
agattgagaaaatgaaggctgaaga

SEQ ID NO: 74571 - DNA, 25 bp, Artificial
  Probe
aaagattgagaaaatgaaggctgaa

SEQ ID NO: 74572 - DNA, 25 bp, Artificial
  Probe
aaaagattgagaaaatgaaggctga

SEQ ID NO: 74573 - DNA, 25 bp, Artificial
  Probe
gaaaagattgagaaaatgaaggctg

SEQ ID NO: 74574 - DNA, 25 bp, Artificial
  Probe
agaaaagattgagaaaatgaaggct

SEQ ID NO: 74575 - DNA, 25 bp, Artificial
  Probe
ttggaagaagctgaggagtacaaag

SEQ ID NO: 74576 - DNA, 25 bp, Artificial
  Probe
cttggaagaagctgaggagtacaaa

SEQ ID NO: 74577 - DNA, 25 bp, Artificial
  Probe
atgtgtcaaataaatgagttcatct

SEQ ID NO: 74578 - DNA, 25 bp, Artificial
  Probe
ttgagaaaatgaaggctgaagatgg

SEQ ID NO: 74579 - DNA, 25 bp, Artificial
  Probe
aagaaaagattgagaaaatgaaggc

SEQ ID NO: 74580 - DNA, 25 bp, Artificial
  Probe
cattctacaattcgtcattttcggc

SEQ ID NO: 74581 - DNA, 25 bp, Artificial
  Probe
gacttggaagaagctgaggagtaca

SEQ ID NO: 74582 - DNA, 25 bp, Artificial
  Probe
tttctttgcataacttaatgtgtca

SEQ ID NO: 74583 - DNA, 25 bp, Artificial
  Probe
tgctggattctgtgaagttagaggc

SEQ ID NO: 74584 - DNA, 25 bp, Artificial
  Probe
ttctttgcataacttaatgtgtcaa

SEQ ID NO: 74585 - DNA, 25 bp, Artificial
  Probe
gaaaatgaaggctgaagatggtgag

SEQ ID NO: 74586 - DNA, 25 bp, Artificial
  Probe
gagaaaatgaaggctgaagatggtg

SEQ ID NO: 74587 - DNA, 25 bp, Artificial
  Probe
tggaagaagctgaggagtacaaaga

SEQ ID NO: 74588 - DNA, 25 bp, Artificial
  Probe
gcatagtgctggattctgtgaagtt

SEQ ID NO: 74589 - DNA, 25 bp, Artificial
  Probe
aaaatgaaggctgaagatggtgaga

SEQ ID NO: 74590 - DNA, 25 bp, Artificial
  Probe
agaaaatgaaggctgaagatggtga

SEQ ID NO: 74591 - DNA, 25 bp, Artificial
  Probe
tgagaaaatgaaggctgaagatggt

SEQ ID NO: 74592 - DNA, 25 bp, Artificial
  Probe
ttacactgatctccggcagatacta

SEQ ID NO: 74593 - DNA, 25 bp, Artificial
  Probe
aatgtgtcaaataaatgagttcatc

SEQ ID NO: 74594 - DNA, 25 bp, Artificial
  Probe
ggccactgctgtgtttaataatatg

SEQ ID NO: 74595 - DNA, 25 bp, Artificial
  Probe
gcaagaagaaaagattgagaaaatg

SEQ ID NO: 74596 - DNA, 25 bp, Artificial
  Probe
ggacttggaagaagctgaggagtac

SEQ ID NO: 74597 - DNA, 25 bp, Artificial
  Probe
ctaaagccaatcaccatcacacaga

SEQ ID NO: 74598 - DNA, 25 bp, Artificial
  Probe
taaagccaatcaccatcacacagac

SEQ ID NO: 74599 - DNA, 25 bp, Artificial
  Probe
cttcatcaaagctattgtggacctg

SEQ ID NO: 74600 - DNA, 25 bp, Artificial
  Probe
cttctcttgctgtattttctgtctg

SEQ ID NO: 74601 - DNA, 25 bp, Artificial
  Probe
tcttctcttgctgtattttctgtct

SEQ ID NO: 74602 - DNA, 25 bp, Artificial
  Probe
atcttctcttgctgtattttctgtc

SEQ ID NO: 74603 - DNA, 25 bp, Artificial
  Probe
ttctcttgctgtattttctgtctgg

SEQ ID NO: 74604 - DNA, 25 bp, Artificial
  Probe
ttcatcaaagctattgtggacctga

SEQ ID NO: 74605 - DNA, 25 bp, Artificial
  Probe
ggatcttctcttgctgtattttctg

SEQ ID NO: 74606 - DNA, 25 bp, Artificial
  Probe
gggatcttctcttgctgtattttct

SEQ ID NO: 74607 - DNA, 25 bp, Artificial
  Probe
gatcttctcttgctgtattttctgt

SEQ ID NO: 74608 - DNA, 25 bp, Artificial
  Probe
cctaaagccaatcaccatcacacag

SEQ ID NO: 74609 - DNA, 25 bp, Artificial
  Probe
ggggatcttctcttgctgtattttc

SEQ ID NO: 74610 - DNA, 25 bp, Artificial
  Probe
tcatcaaagctattgtggacctgac

SEQ ID NO: 74611 - DNA, 25 bp, Artificial
  Probe
atcaaagctattgtggacctgacag

SEQ ID NO: 74612 - DNA, 25 bp, Artificial
  Probe
tggggatcttctcttgctgtatttt

SEQ ID NO: 74613 - DNA, 25 bp, Artificial
  Probe
tctcttgctgtattttctgtctggg

SEQ ID NO: 74614 - DNA, 25 bp, Artificial
  Probe
catcaaagctattgtggacctgaca

SEQ ID NO: 74615 - DNA, 25 bp, Artificial
  Probe
ctggggatcttctcttgctgtattt

SEQ ID NO: 74616 - DNA, 25 bp, Artificial
  Probe
ttgctgtattttctgtctggggaag

SEQ ID NO: 74617 - DNA, 25 bp, Artificial
  Probe
cttgctgtattttctgtctggggaa

SEQ ID NO: 74618 - DNA, 25 bp, Artificial
  Probe
ctcttgctgtattttctgtctgggg

SEQ ID NO: 74619 - DNA, 25 bp, Artificial
  Probe
aaagccaatcaccatcacacagaca

SEQ ID NO: 74620 - DNA, 25 bp, Artificial
  Probe
ctcagcctaaagccaatcaccatca

SEQ ID NO: 74621 - DNA, 25 bp, Artificial
  Probe
gtattttctgtctggggaagggaga

SEQ ID NO: 74622 - DNA, 25 bp, Artificial
  Probe
tcttgctgtattttctgtctgggga

SEQ ID NO: 74623 - DNA, 25 bp, Artificial
  Probe
tcagcctaaagccaatcaccatcac

SEQ ID NO: 74624 - DNA, 25 bp, Artificial
  Probe
tgtattttctgtctggggaagggag

SEQ ID NO: 74625 - DNA, 25 bp, Artificial
  Probe
ctgtattttctgtctggggaaggga

SEQ ID NO: 74626 - DNA, 25 bp, Artificial
  Probe
aaagctattgtggacctgacaggac

SEQ ID NO: 74627 - DNA, 25 bp, Artificial
  Probe
caaagctattgtggacctgacagga

SEQ ID NO: 74628 - DNA, 25 bp, Artificial
  Probe
tcaaagctattgtggacctgacagg

SEQ ID NO: 74629 - DNA, 25 bp, Artificial
  Probe
gtactcagaaagggcctctcaagag

SEQ ID NO: 74630 - DNA, 25 bp, Artificial
  Probe
tgctgtattttctgtctggggaagg

SEQ ID NO: 74631 - DNA, 25 bp, Artificial
  Probe
tactcagaaagggcctctcaagaga

SEQ ID NO: 74632 - DNA, 25 bp, Artificial
  Probe
gctggggatcttctcttgctgtatt

SEQ ID NO: 74633 - DNA, 25 bp, Artificial
  Probe
gctgtattttctgtctggggaaggg

SEQ ID NO: 74634 - DNA, 25 bp, Artificial
  Probe
tattttctgtctggggaagggagac

SEQ ID NO: 74635 - DNA, 25 bp, Artificial
  Probe
agctggggatcttctcttgctgtat

SEQ ID NO: 74636 - DNA, 25 bp, Artificial
  Probe
ctcagaaagggcctctcaagagaga

SEQ ID NO: 74637 - DNA, 25 bp, Artificial
  Probe
acatacggttctgttatatctcata

SEQ ID NO: 74638 - DNA, 25 bp, Artificial
  Probe
catacggttctgttatatctcatat

SEQ ID NO: 74639 - DNA, 25 bp, Artificial
  Probe
tataccacaaaacctaaacatgctc

SEQ ID NO: 74640 - DNA, 25 bp, Artificial
  Probe
aaacctaaacatgctccaatgaccc

SEQ ID NO: 74641 - DNA, 25 bp, Artificial
  Probe
caaaacctaaacatgctccaatgac

SEQ ID NO: 74642 - DNA, 25 bp, Artificial
  Probe
ataccacaaaacctaaacatgctcc

SEQ ID NO: 74643 - DNA, 25 bp, Artificial
  Probe
acaaaacctaaacatgctccaatga

SEQ ID NO: 74644 - DNA, 25 bp, Artificial
  Probe
cacaaaacctaaacatgctccaatg

SEQ ID NO: 74645 - DNA, 25 bp, Artificial
  Probe
aaaacctaaacatgctccaatgacc

SEQ ID NO: 74646 - DNA, 25 bp, Artificial
  Probe
ccacaaaacctaaacatgctccaat

SEQ ID NO: 74647 - DNA, 25 bp, Artificial
  Probe
gtataccacaaaacctaaacatgct

SEQ ID NO: 74648 - DNA, 25 bp, Artificial
  Probe
taccacaaaacctaaacatgctcca

SEQ ID NO: 74649 - DNA, 25 bp, Artificial
  Probe
tgtataccacaaaacctaaacatgc

SEQ ID NO: 74650 - DNA, 25 bp, Artificial
  Probe
gccatgtataccacaaaacctaaac

SEQ ID NO: 74651 - DNA, 25 bp, Artificial
  Probe
aacctaaacatgctccaatgaccca

SEQ ID NO: 74652 - DNA, 25 bp, Artificial
  Probe
tgccatgtataccacaaaacctaaa

SEQ ID NO: 74653 - DNA, 25 bp, Artificial
  Probe
ccatgtataccacaaaacctaaaca

SEQ ID NO: 74654 - DNA, 25 bp, Artificial
  Probe
accacaaaacctaaacatgctccaa

SEQ ID NO: 74655 - DNA, 25 bp, Artificial
  Probe
acctaaacatgctccaatgacccag

SEQ ID NO: 74656 - DNA, 25 bp, Artificial
  Probe
agaaatggagcagtaatgcagcatc

SEQ ID NO: 74657 - DNA, 25 bp, Artificial
  Probe
gagaaatggagcagtaatgcagcat

SEQ ID NO: 74658 - DNA, 25 bp, Artificial
  Probe
acggttctgttatatctcatatatg

SEQ ID NO: 74659 - DNA, 25 bp, Artificial
  Probe
ctgtccacagcttttcttgataggc

SEQ ID NO: 74660 - DNA, 25 bp, Artificial
  Probe
atgtataccacaaaacctaaacatg

SEQ ID NO: 74661 - DNA, 25 bp, Artificial
  Probe
catgtataccacaaaacctaaacat

SEQ ID NO: 74662 - DNA, 25 bp, Artificial
  Probe
tgagaaatggagcagtaatgcagca

SEQ ID NO: 74663 - DNA, 25 bp, Artificial
  Probe
catatatgaccccttcatgtcgtaa

SEQ ID NO: 74664 - DNA, 25 bp, Artificial
  Probe
tgtccacagcttttcttgataggcc

SEQ ID NO: 74665 - DNA, 25 bp, Artificial
  Probe
cttgtattgcttatctgccgtgatt

SEQ ID NO: 74666 - DNA, 25 bp, Artificial
  Probe
tctatgatgcccttgtattgcttat

SEQ ID NO: 74667 - DNA, 25 bp, Artificial
  Probe
tatgatgcccttgtattgcttatct

SEQ ID NO: 74668 - DNA, 25 bp, Artificial
  Probe
ctatgatgcccttgtattgcttatc

SEQ ID NO: 74669 - DNA, 25 bp, Artificial
  Probe
gtctatgatgcccttgtattgctta

SEQ ID NO: 74670 - DNA, 25 bp, Artificial
  Probe
tctgcttgtatttatctttgaaggc

SEQ ID NO: 74671 - DNA, 25 bp, Artificial
  Probe
atgatgcccttgtattgcttatctg

SEQ ID NO: 74672 - DNA, 25 bp, Artificial
  Probe
ttgtattgcttatctgccgtgattt

SEQ ID NO: 74673 - DNA, 25 bp, Artificial
  Probe
ccttgtattgcttatctgccgtgat

SEQ ID NO: 74674 - DNA, 25 bp, Artificial
  Probe
gatacgaaccacgcagtctatgatg

SEQ ID NO: 74675 - DNA, 25 bp, Artificial
  Probe
tgtattgcttatctgccgtgatttg

SEQ ID NO: 74676 - DNA, 25 bp, Artificial
  Probe
agtctatgatgcccttgtattgctt

SEQ ID NO: 74677 - DNA, 25 bp, Artificial
  Probe
cagtctatgatgcccttgtattgct

SEQ ID NO: 74678 - DNA, 25 bp, Artificial
  Probe
cccttaatcccatcagatttgtaga

SEQ ID NO: 74679 - DNA, 25 bp, Artificial
  Probe
atctgcttgtatttatctttgaagg

SEQ ID NO: 74680 - DNA, 25 bp, Artificial
  Probe
gcccttaatcccatcagatttgtag

SEQ ID NO: 74681 - DNA, 25 bp, Artificial
  Probe
gtattgcttatctgccgtgatttgc

SEQ ID NO: 74682 - DNA, 25 bp, Artificial
  Probe
ggatacgaaccacgcagtctatgat

SEQ ID NO: 74683 - DNA, 25 bp, Artificial
  Probe
tattgcttatctgccgtgatttgct

SEQ ID NO: 74684 - DNA, 25 bp, Artificial
  Probe
aatcaagagggtacacaaagcacaa

SEQ ID NO: 74685 - DNA, 25 bp, Artificial
  Probe
aaatcaagagggtacacaaagcaca

SEQ ID NO: 74686 - DNA, 25 bp, Artificial
  Probe
ccttaatcccatcagatttgtagat

SEQ ID NO: 74687 - DNA, 25 bp, Artificial
  Probe
tgatgcccttgtattgcttatctgc

SEQ ID NO: 74688 - DNA, 25 bp, Artificial
  Probe
atcaagagggtacacaaagcacaag

SEQ ID NO: 74689 - DNA, 25 bp, Artificial
  Probe
attgcttatctgccgtgatttgctt

SEQ ID NO: 74690 - DNA, 25 bp, Artificial
  Probe
gatctgcttgtatttatctttgaag

SEQ ID NO: 74691 - DNA, 25 bp, Artificial
  Probe
gatgcccttgtattgcttatctgcc

SEQ ID NO: 74692 - DNA, 25 bp, Artificial
  Probe
cttaatcccatcagatttgtagatc

SEQ ID NO: 74693 - DNA, 25 bp, Artificial
  Probe
aaaatcaagagggtacacaaagcac

SEQ ID NO: 74694 - DNA, 25 bp, Artificial
  Probe
caaaatcaagagggtacacaaagca

SEQ ID NO: 74695 - DNA, 25 bp, Artificial
  Probe
aagagggtacacaaagcacaaggat

SEQ ID NO: 74696 - DNA, 25 bp, Artificial
  Probe
gtggggaagtatctgatgacattgg

SEQ ID NO: 74697 - DNA, 25 bp, Artificial
  Probe
ggtggggaagtatctgatgacattg

SEQ ID NO: 74698 - DNA, 25 bp, Artificial
  Probe
ggcaaaatcaagagggtacacaaag

SEQ ID NO: 74699 - DNA, 25 bp, Artificial
  Probe
tcagatttgtagatcttaaccaggc

SEQ ID NO: 74700 - DNA, 25 bp, Artificial
  Probe
cagatttgtagatcttaaccaggca

SEQ ID NO: 74701 - DNA, 25 bp, Artificial
  Probe
ttgcttatctgccgtgatttgcttg

SEQ ID NO: 74702 - DNA, 25 bp, Artificial
  Probe
cccatcagatttgtagatcttaacc

SEQ ID NO: 74703 - DNA, 25 bp, Artificial
  Probe
gcaaaatcaagagggtacacaaagc

SEQ ID NO: 74704 - DNA, 25 bp, Artificial
  Probe
ccatcagatttgtagatcttaacca

SEQ ID NO: 74705 - DNA, 25 bp, Artificial
  Probe
cccttgtattgcttatctgccgtga

SEQ ID NO: 74706 - DNA, 25 bp, Artificial
  Probe
atcagatttgtagatcttaaccagg

SEQ ID NO: 74707 - DNA, 25 bp, Artificial
  Probe
tcccatcagatttgtagatcttaac

SEQ ID NO: 74708 - DNA, 25 bp, Artificial
  Probe
ggcccttaatcccatcagatttgta

SEQ ID NO: 74709 - DNA, 25 bp, Artificial
  Probe
agagggtacacaaagcacaaggatg

SEQ ID NO: 74710 - DNA, 25 bp, Artificial
  Probe
gacagaccaataccttgaactgaat

SEQ ID NO: 74711 - DNA, 25 bp, Artificial
  Probe
acagaccaataccttgaactgaatg

SEQ ID NO: 74712 - DNA, 25 bp, Artificial
  Probe
tgacagaccaataccttgaactgaa

SEQ ID NO: 74713 - DNA, 25 bp, Artificial
  Probe
gaactgaatgcactacaagaagaac

SEQ ID NO: 74714 - DNA, 25 bp, Artificial
  Probe
aataccttgaactgaatgcactaca

SEQ ID NO: 74715 - DNA, 25 bp, Artificial
  Probe
aactgaatgcactacaagaagaact

SEQ ID NO: 74716 - DNA, 25 bp, Artificial
  Probe
tgaactgaatgcactacaagaagaa

SEQ ID NO: 74717 - DNA, 25 bp, Artificial
  Probe
actgaatgcactacaagaagaactt

SEQ ID NO: 74718 - DNA, 25 bp, Artificial
  Probe
cagaccaataccttgaactgaatgc

SEQ ID NO: 74719 - DNA, 25 bp, Artificial
  Probe
caataccttgaactgaatgcactac

SEQ ID NO: 74720 - DNA, 25 bp, Artificial
  Probe
ataccttgaactgaatgcactacaa

SEQ ID NO: 74721 - DNA, 25 bp, Artificial
  Probe
ctgacagaccaataccttgaactga

SEQ ID NO: 74722 - DNA, 25 bp, Artificial
  Probe
ttgaactgaatgcactacaagaaga

SEQ ID NO: 74723 - DNA, 25 bp, Artificial
  Probe
ccaataccttgaactgaatgcacta

SEQ ID NO: 74724 - DNA, 25 bp, Artificial
  Probe
tctgacagaccaataccttgaactg

SEQ ID NO: 74725 - DNA, 25 bp, Artificial
  Probe
tctacactttcctgaagaactcctg

SEQ ID NO: 74726 - DNA, 25 bp, Artificial
  Probe
gaccaataccttgaactgaatgcac

SEQ ID NO: 74727 - DNA, 25 bp, Artificial
  Probe
agaccaataccttgaactgaatgca

SEQ ID NO: 74728 - DNA, 25 bp, Artificial
  Probe
accaataccttgaactgaatgcact

SEQ ID NO: 74729 - DNA, 25 bp, Artificial
  Probe
gtatgctggcaaatacatcctcttt

SEQ ID NO: 74730 - DNA, 25 bp, Artificial
  Probe
ctttgtgcctaatttccagctcttt

SEQ ID NO: 74731 - DNA, 25 bp, Artificial
  Probe
ctacactttcctgaagaactcctgc

SEQ ID NO: 74732 - DNA, 25 bp, Artificial
  Probe
agtatgctggcaaatacatcctctt

SEQ ID NO: 74733 - DNA, 25 bp, Artificial
  Probe
tttgtgcctaatttccagctctttg

SEQ ID NO: 74734 - DNA, 25 bp, Artificial
  Probe
ttctacactttcctgaagaactcct

SEQ ID NO: 74735 - DNA, 25 bp, Artificial
  Probe
aaatacatcctctttgtcaacgtag

SEQ ID NO: 74736 - DNA, 25 bp, Artificial
  Probe
aatacatcctctttgtcaacgtagc

SEQ ID NO: 74737 - DNA, 25 bp, Artificial
  Probe
agaaagagcagaagttctacacttt

SEQ ID NO: 74738 - DNA, 25 bp, Artificial
  Probe
cagaagttctacactttcctgaaga

SEQ ID NO: 74739 - DNA, 25 bp, Artificial
  Probe
atcctgcctagtctcaagtacgttc

SEQ ID NO: 74740 - DNA, 25 bp, Artificial
  Probe
gatcctgcctagtctcaagtacgtt

SEQ ID NO: 74741 - DNA, 25 bp, Artificial
  Probe
agaagttctacactttcctgaagaa

SEQ ID NO: 74742 - DNA, 25 bp, Artificial
  Probe
gagaaagagcagaagttctacactt

SEQ ID NO: 74743 - DNA, 25 bp, Artificial
  Probe
taatttccagctctttgagaaagga

SEQ ID NO: 74744 - DNA, 25 bp, Artificial
  Probe
ctaatttccagctctttgagaaagg

SEQ ID NO: 74745 - DNA, 25 bp, Artificial
  Probe
cctaatttccagctctttgagaaag

SEQ ID NO: 74746 - DNA, 25 bp, Artificial
  Probe
cagtatgctggcaaatacatcctct

SEQ ID NO: 74747 - DNA, 25 bp, Artificial
  Probe
aaagagcagaagttctacactttcc

SEQ ID NO: 74748 - DNA, 25 bp, Artificial
  Probe
ctgaatgcactacaagaagaacttg

SEQ ID NO: 74749 - DNA, 25 bp, Artificial
  Probe
cttgaactgaatgcactacaagaag

SEQ ID NO: 74750 - DNA, 25 bp, Artificial
  Probe
ctggcaaatacatcctctttgtcaa

SEQ ID NO: 74751 - DNA, 25 bp, Artificial
  Probe
tatgctggcaaatacatcctctttg

SEQ ID NO: 74752 - DNA, 25 bp, Artificial
  Probe
tgcctaatttccagctctttgagaa

SEQ ID NO: 74753 - DNA, 25 bp, Artificial
  Probe
ggagaaagagcagaagttctacact

SEQ ID NO: 74754 - DNA, 25 bp, Artificial
  Probe
taccttgaactgaatgcactacaag

SEQ ID NO: 74755 - DNA, 25 bp, Artificial
  Probe
aataggttcgctccttgaaattaag

SEQ ID NO: 74756 - DNA, 25 bp, Artificial
  Probe
gaaataggttcgctccttgaaatta

SEQ ID NO: 74757 - DNA, 25 bp, Artificial
  Probe
aaataggttcgctccttgaaattaa

SEQ ID NO: 74758 - DNA, 25 bp, Artificial
  Probe
tttgtggtttctgtatttcttcttt

SEQ ID NO: 74759 - DNA, 25 bp, Artificial
  Probe
tcaataaactttctcactcatgcaa

SEQ ID NO: 74760 - DNA, 25 bp, Artificial
  Probe
ggaaataggttcgctccttgaaatt

SEQ ID NO: 74761 - DNA, 25 bp, Artificial
  Probe
tatggaaataggttcgctccttgaa

SEQ ID NO: 74762 - DNA, 25 bp, Artificial
  Probe
ggtgttttgtggtttctgtatttct

SEQ ID NO: 74763 - DNA, 25 bp, Artificial
  Probe
aggtgttttgtggtttctgtatttc

SEQ ID NO: 74764 - DNA, 25 bp, Artificial
  Probe
aaggtgttttgtggtttctgtattt

SEQ ID NO: 74765 - DNA, 25 bp, Artificial
  Probe
aaaggtgttttgtggtttctgtatt

SEQ ID NO: 74766 - DNA, 25 bp, Artificial
  Probe
tggaaataggttcgctccttgaaat

SEQ ID NO: 74767 - DNA, 25 bp, Artificial
  Probe
atggaaataggttcgctccttgaaa

SEQ ID NO: 74768 - DNA, 25 bp, Artificial
  Probe
gtgttttgtggtttctgtatttctt

SEQ ID NO: 74769 - DNA, 25 bp, Artificial
  Probe
tgttttgtggtttctgtatttcttc

SEQ ID NO: 74770 - DNA, 25 bp, Artificial
  Probe
tgaaattaagggtctaaaaggtgtt

SEQ ID NO: 74771 - DNA, 25 bp, Artificial
  Probe
ttgaaattaagggtctaaaaggtgt

SEQ ID NO: 74772 - DNA, 25 bp, Artificial
  Probe
gttttgtggtttctgtatttcttct

SEQ ID NO: 74773 - DNA, 25 bp, Artificial
  Probe
gtggtttctgtatttcttcttttca

SEQ ID NO: 74774 - DNA, 25 bp, Artificial
  Probe
tgtggtttctgtatttcttcttttc

SEQ ID NO: 74775 - DNA, 25 bp, Artificial
  Probe
aaacaaaatgtccaggaaaacactt

SEQ ID NO: 74776 - DNA, 25 bp, Artificial
  Probe
aaaacaaaatgtccaggaaaacact

SEQ ID NO: 74777 - DNA, 25 bp, Artificial
  Probe
gaaaacaaaatgtccaggaaaacac

SEQ ID NO: 74778 - DNA, 25 bp, Artificial
  Probe
tctaaaaggtgttttgtggtttctg

SEQ ID NO: 74779 - DNA, 25 bp, Artificial
  Probe
gtctaaaaggtgttttgtggtttct

SEQ ID NO: 74780 - DNA, 25 bp, Artificial
  Probe
cttgaaattaagggtctaaaaggtg

SEQ ID NO: 74781 - DNA, 25 bp, Artificial
  Probe
aaaaggtgttttgtggtttctgtat

SEQ ID NO: 74782 - DNA, 25 bp, Artificial
  Probe
ctaaaaggtgttttgtggtttctgt

SEQ ID NO: 74783 - DNA, 25 bp, Artificial
  Probe
ttaagggtctaaaaggtgttttgtg

SEQ ID NO: 74784 - DNA, 25 bp, Artificial
  Probe
taaaaggtgttttgtggtttctgta

SEQ ID NO: 74785 - DNA, 25 bp, Artificial
  Probe
ggtctaaaaggtgttttgtggtttc

SEQ ID NO: 74786 - DNA, 25 bp, Artificial
  Probe
ttgtggtttctgtatttcttctttt

SEQ ID NO: 74787 - DNA, 25 bp, Artificial
  Probe
ttttgtggtttctgtatttcttctt

SEQ ID NO: 74788 - DNA, 25 bp, Artificial
  Probe
taagggtctaaaaggtgttttgtgg

SEQ ID NO: 74789 - DNA, 25 bp, Artificial
  Probe
gaaattaagggtctaaaaggtgttt

SEQ ID NO: 74790 - DNA, 25 bp, Artificial
  Probe
ggaaaacaaaatgtccaggaaaaca

SEQ ID NO: 74791 - DNA, 25 bp, Artificial
  Probe
attaagggtctaaaaggtgttttgt

SEQ ID NO: 74792 - DNA, 25 bp, Artificial
  Probe
tggtttctgtatttcttcttttcat

SEQ ID NO: 74793 - DNA, 25 bp, Artificial
  Probe
gggtctaaaaggtgttttgtggttt

SEQ ID NO: 74794 - DNA, 25 bp, Artificial
  Probe
aattaagggtctaaaaggtgttttg

SEQ ID NO: 74795 - DNA, 25 bp, Artificial
  Probe
ataggttcgctccttgaaattaagg

SEQ ID NO: 74796 - DNA, 25 bp, Artificial
  Probe
cagaaagtgttcttttgtggagaaa

SEQ ID NO: 74797 - DNA, 25 bp, Artificial
  Probe
cgctccttgaaattaagggtctaaa

SEQ ID NO: 74798 - DNA, 25 bp, Artificial
  Probe
agaaagtgttcttttgtggagaaaa

SEQ ID NO: 74799 - DNA, 25 bp, Artificial
  Probe
atcagaaagtgttcttttgtggaga

SEQ ID NO: 74800 - DNA, 25 bp, Artificial
  Probe
cctatatgactactacagccctgat

SEQ ID NO: 74801 - DNA, 25 bp, Artificial
  Probe
ctatatgactactacagccctgatc

SEQ ID NO: 74802 - DNA, 25 bp, Artificial
  Probe
cggatgaagttcgcctgctattatc

SEQ ID NO: 74803 - DNA, 25 bp, Artificial
  Probe
gtgctactatactttgactcggtcc

SEQ ID NO: 74804 - DNA, 25 bp, Artificial
  Probe
gatgaagttcgcctgctattatccc

SEQ ID NO: 74805 - DNA, 25 bp, Artificial
  Probe
cgtgctactatactttgactcggtc

SEQ ID NO: 74806 - DNA, 25 bp, Artificial
  Probe
tgctactatactttgactcggtccc

SEQ ID NO: 74807 - DNA, 25 bp, Artificial
  Probe
tatatgactactacagccctgatca

SEQ ID NO: 74808 - DNA, 25 bp, Artificial
  Probe
acgtgctactatactttgactcggt

SEQ ID NO: 74809 - DNA, 25 bp, Artificial
  Probe
ggatgaagttcgcctgctattatcc

SEQ ID NO: 74810 - DNA, 25 bp, Artificial
  Probe
ctgcttaacagggtaaataaataaa

SEQ ID NO: 74811 - DNA, 25 bp, Artificial
  Probe
gctactatactttgactcggtcccg

SEQ ID NO: 74812 - DNA, 25 bp, Artificial
  Probe
ctactatactttgactcggtcccga

SEQ ID NO: 74813 - DNA, 25 bp, Artificial
  Probe
ctgctattatccccgagtggagtat

SEQ ID NO: 74814 - DNA, 25 bp, Artificial
  Probe
ccggatgaagttcgcctgctattat

SEQ ID NO: 74815 - DNA, 25 bp, Artificial
  Probe
tactatactttgactcggtcccgac

SEQ ID NO: 74816 - DNA, 25 bp, Artificial
  Probe
tgctattatccccgagtggagtatg

SEQ ID NO: 74817 - DNA, 25 bp, Artificial
  Probe
gcctgcttaacagggtaaataaata

SEQ ID NO: 74818 - DNA, 25 bp, Artificial
  Probe
atgaagttcgcctgctattatcccc

SEQ ID NO: 74819 - DNA, 25 bp, Artificial
  Probe
agtggagtatggcttccaggttaag

SEQ ID NO: 74820 - DNA, 25 bp, Artificial
  Probe
gagtggagtatggcttccaggttaa

SEQ ID NO: 74821 - DNA, 25 bp, Artificial
  Probe
ctattatccccgagtggagtatggc

SEQ ID NO: 74822 - DNA, 25 bp, Artificial
  Probe
gctattatccccgagtggagtatgg

SEQ ID NO: 74823 - DNA, 25 bp, Artificial
  Probe
tattatccccgagtggagtatggct

SEQ ID NO: 74824 - DNA, 25 bp, Artificial
  Probe
tgcttaacagggtaaataaataaaa

SEQ ID NO: 74825 - DNA, 25 bp, Artificial
  Probe
gcttaacagggtaaataaataaaac

SEQ ID NO: 74826 - DNA, 25 bp, Artificial
  Probe
cctgcttaacagggtaaataaataa

SEQ ID NO: 74827 - DNA, 25 bp, Artificial
  Probe
ggcctgcttaacagggtaaataaat

SEQ ID NO: 74828 - DNA, 25 bp, Artificial
  Probe
cctgctattatccccgagtggagta

SEQ ID NO: 74829 - DNA, 25 bp, Artificial
  Probe
attatccccgagtggagtatggctt

SEQ ID NO: 74830 - DNA, 25 bp, Artificial
  Probe
gggcctgcttaacagggtaaataaa

SEQ ID NO: 74831 - DNA, 25 bp, Artificial
  Probe
agggcctgcttaacagggtaaataa

SEQ ID NO: 74832 - DNA, 25 bp, Artificial
  Probe
cagggcctgcttaacagggtaaata

SEQ ID NO: 74833 - DNA, 25 bp, Artificial
  Probe
ctgcatttcacaaaggatgccaagg

SEQ ID NO: 74834 - DNA, 25 bp, Artificial
  Probe
cctgcatttcacaaaggatgccaag

SEQ ID NO: 74835 - DNA, 25 bp, Artificial
  Probe
gagaatagagaatgcggtaatggat

SEQ ID NO: 74836 - DNA, 25 bp, Artificial
  Probe
tgagagaatagagaatgcggtaatg

SEQ ID NO: 74837 - DNA, 25 bp, Artificial
  Probe
gagagaatagagaatgcggtaatgg

SEQ ID NO: 74838 - DNA, 25 bp, Artificial
  Probe
agagaatagagaatgcggtaatgga

SEQ ID NO: 74839 - DNA, 25 bp, Artificial
  Probe
agaatagagaatgcggtaatggatc

SEQ ID NO: 74840 - DNA, 25 bp, Artificial
  Probe
gaatagagaatgcggtaatggatca

SEQ ID NO: 74841 - DNA, 25 bp, Artificial
  Probe
aatagagaatgcggtaatggatcac

SEQ ID NO: 74842 - DNA, 25 bp, Artificial
  Probe
ccgaggacattagacactactacac

SEQ ID NO: 74843 - DNA, 25 bp, Artificial
  Probe
atagagaatgcggtaatggatcacc

SEQ ID NO: 74844 - DNA, 25 bp, Artificial
  Probe
tcaagtggtttgtgtttcaggattc

SEQ ID NO: 74845 - DNA, 25 bp, Artificial
  Probe
gtcaagtggtttgtgtttcaggatt

SEQ ID NO: 74846 - DNA, 25 bp, Artificial
  Probe
cccgaggacattagacactactaca

SEQ ID NO: 74847 - DNA, 25 bp, Artificial
  Probe
cggatgaagtctctaagaaccactt

SEQ ID NO: 74848 - DNA, 25 bp, Artificial
  Probe
tttacatgcacgagaagatttcaca

SEQ ID NO: 74849 - DNA, 25 bp, Artificial
  Probe
caagtggtttgtgtttcaggattcc

SEQ ID NO: 74850 - DNA, 25 bp, Artificial
  Probe
tagagaatgcggtaatggatcacca

SEQ ID NO: 74851 - DNA, 25 bp, Artificial
  Probe
ttacatgcacgagaagatttcacac

SEQ ID NO: 74852 - DNA, 25 bp, Artificial
  Probe
ggatgaagtctctaagaaccacttt

SEQ ID NO: 74853 - DNA, 25 bp, Artificial
  Probe
gcccgaggacattagacactactac

SEQ ID NO: 74854 - DNA, 25 bp, Artificial
  Probe
gtctctaagaaccacttttacatgc

SEQ ID NO: 74855 - DNA, 25 bp, Artificial
  Probe
cacgagaagatttcacacggtttga

SEQ ID NO: 74856 - DNA, 25 bp, Artificial
  Probe
aagtggtttgtgtttcaggattccg

SEQ ID NO: 74857 - DNA, 25 bp, Artificial
  Probe
cgtcaagtggtttgtgtttcaggat

SEQ ID NO: 74858 - DNA, 25 bp, Artificial
  Probe
gagaacgtcaagtggtttgtgtttc

SEQ ID NO: 74859 - DNA, 25 bp, Artificial
  Probe
tgcccgaggacattagacactacta

SEQ ID NO: 74860 - DNA, 25 bp, Artificial
  Probe
agtctctaagaaccacttttacatg

SEQ ID NO: 74861 - DNA, 25 bp, Artificial
  Probe
ccggatgaagtctctaagaaccact

SEQ ID NO: 74862 - DNA, 25 bp, Artificial
  Probe
cttttacatgcacgagaagatttca

SEQ ID NO: 74863 - DNA, 25 bp, Artificial
  Probe
acttttacatgcacgagaagatttc

SEQ ID NO: 74864 - DNA, 25 bp, Artificial
  Probe
ctctaagaaccacttttacatgcac

SEQ ID NO: 74865 - DNA, 25 bp, Artificial
  Probe
gaacgtcaagtggtttgtgtttcag

SEQ ID NO: 74866 - DNA, 25 bp, Artificial
  Probe
ttttacatgcacgagaagatttcac

SEQ ID NO: 74867 - DNA, 25 bp, Artificial
  Probe
cacttttacatgcacgagaagattt

SEQ ID NO: 74868 - DNA, 25 bp, Artificial
  Probe
tctctaagaaccacttttacatgca

SEQ ID NO: 74869 - DNA, 25 bp, Artificial
  Probe
gtaatggatcaccacaaccagacca

SEQ ID NO: 74870 - DNA, 25 bp, Artificial
  Probe
gaatgcggtaatggatcaccacaac

SEQ ID NO: 74871 - DNA, 25 bp, Artificial
  Probe
agaatgcggtaatggatcaccacaa

SEQ ID NO: 74872 - DNA, 25 bp, Artificial
  Probe
tacatgcacgagaagatttcacacg

SEQ ID NO: 74873 - DNA, 25 bp, Artificial
  Probe
agaacgtcaagtggtttgtgtttca

SEQ ID NO: 74874 - DNA, 25 bp, Artificial
  Probe
agagaatgcggtaatggatcaccac

SEQ ID NO: 74875 - DNA, 25 bp, Artificial
  Probe
taagaaccacttttacatgcacgag

SEQ ID NO: 74876 - DNA, 25 bp, Artificial
  Probe
ctaagaaccacttttacatgcacga

SEQ ID NO: 74877 - DNA, 25 bp, Artificial
  Probe
tctaagaaccacttttacatgcacg

SEQ ID NO: 74878 - DNA, 25 bp, Artificial
  Probe
acgagaagatttcacacggtttgaa

SEQ ID NO: 74879 - DNA, 25 bp, Artificial
  Probe
ccacttttacatgcacgagaagatt

SEQ ID NO: 74880 - DNA, 25 bp, Artificial
  Probe
taaagaaagaggggtcagggttcaa

SEQ ID NO: 74881 - DNA, 25 bp, Artificial
  Probe
gtaaagaaagaggggtcagggttca

SEQ ID NO: 74882 - DNA, 25 bp, Artificial
  Probe
aaaatgtgctatctactgtgagccc

SEQ ID NO: 74883 - DNA, 25 bp, Artificial
  Probe
ggtaaagaaagaggggtcagggttc

SEQ ID NO: 74884 - DNA, 25 bp, Artificial
  Probe
tatctactgtgagcccctttcccaa

SEQ ID NO: 74885 - DNA, 25 bp, Artificial
  Probe
ctatctactgtgagcccctttccca

SEQ ID NO: 74886 - DNA, 25 bp, Artificial
  Probe
aaatgtgctatctactgtgagcccc

SEQ ID NO: 74887 - DNA, 25 bp, Artificial
  Probe
gtgctatctactgtgagcccctttc

SEQ ID NO: 74888 - DNA, 25 bp, Artificial
  Probe
gtattgcacctgtagcaggaggtag

SEQ ID NO: 74889 - DNA, 25 bp, Artificial
  Probe
agtattgcacctgtagcaggaggta

SEQ ID NO: 74890 - DNA, 25 bp, Artificial
  Probe
atgtgctatctactgtgagcccctt

SEQ ID NO: 74891 - DNA, 25 bp, Artificial
  Probe
aatgtgctatctactgtgagcccct

SEQ ID NO: 74892 - DNA, 25 bp, Artificial
  Probe
ttccttgcacctatgatatatacct

SEQ ID NO: 74893 - DNA, 25 bp, Artificial
  Probe
gaagaatcgaggaacctctaagtct

SEQ ID NO: 74894 - DNA, 25 bp, Artificial
  Probe
aagaatcgaggaacctctaagtctg

SEQ ID NO: 74895 - DNA, 25 bp, Artificial
  Probe
gcacctatgatatatacctaactga

SEQ ID NO: 74896 - DNA, 25 bp, Artificial
  Probe
tccttgcacctatgatatataccta

SEQ ID NO: 74897 - DNA, 25 bp, Artificial
  Probe
ctagggagtcagaagaaagagtgtc

SEQ ID NO: 74898 - DNA, 25 bp, Artificial
  Probe
ctctaagtctgggaagaaaggaagg

SEQ ID NO: 74899 - DNA, 25 bp, Artificial
  Probe
ggaagaatcgaggaacctctaagtc

SEQ ID NO: 74900 - DNA, 25 bp, Artificial
  Probe
tagggagtcagaagaaagagtgtct

SEQ ID NO: 74901 - DNA, 25 bp, Artificial
  Probe
cttgtctgcttcaaccatcacatct

SEQ ID NO: 74902 - DNA, 25 bp, Artificial
  Probe
ggaacctctaagtctgggaagaaag

SEQ ID NO: 74903 - DNA, 25 bp, Artificial
  Probe
caggaagaatcgaggaacctctaag

SEQ ID NO: 74904 - DNA, 25 bp, Artificial
  Probe
tgcacctatgatatatacctaactg

SEQ ID NO: 74905 - DNA, 25 bp, Artificial
  Probe
ccttgcacctatgatatatacctaa

SEQ ID NO: 74906 - DNA, 25 bp, Artificial
  Probe
ttgtctgcttcaaccatcacatctg

SEQ ID NO: 74907 - DNA, 25 bp, Artificial
  Probe
aggaagaatcgaggaacctctaagt

SEQ ID NO: 74908 - DNA, 25 bp, Artificial
  Probe
aggaacctctaagtctgggaagaaa

SEQ ID NO: 74909 - DNA, 25 bp, Artificial
  Probe
cctctaagtctgggaagaaaggaag

SEQ ID NO: 74910 - DNA, 25 bp, Artificial
  Probe
agaatcgaggaacctctaagtctgg

SEQ ID NO: 74911 - DNA, 25 bp, Artificial
  Probe
gaacctctaagtctgggaagaaagg

SEQ ID NO: 74912 - DNA, 25 bp, Artificial
  Probe
tctaagtctgggaagaaaggaaggg

SEQ ID NO: 74913 - DNA, 25 bp, Artificial
  Probe
ttgcacctatgatatatacctaact

SEQ ID NO: 74914 - DNA, 25 bp, Artificial
  Probe
acctctaagtctgggaagaaaggaa

SEQ ID NO: 74915 - DNA, 25 bp, Artificial
  Probe
aacctctaagtctgggaagaaagga

SEQ ID NO: 74916 - DNA, 25 bp, Artificial
  Probe
tttccttgcacctatgatatatacc

SEQ ID NO: 74917 - DNA, 25 bp, Artificial
  Probe
ccttgtctgcttcaaccatcacatc

SEQ ID NO: 74918 - DNA, 25 bp, Artificial
  Probe
agggagtcagaagaaagagtgtctc

SEQ ID NO: 74919 - DNA, 25 bp, Artificial
  Probe
gaacttcaacctgagtgcttcacag

SEQ ID NO: 74920 - DNA, 25 bp, Artificial
  Probe
cttgcacctatgatatatacctaac

SEQ ID NO: 74921 - DNA, 25 bp, Artificial
  Probe
agtcagaagaaagagtgtctcccag

SEQ ID NO: 74922 - DNA, 25 bp, Artificial
  Probe
gagtcagaagaaagagtgtctccca

SEQ ID NO: 74923 - DNA, 25 bp, Artificial
  Probe
gaggaacctctaagtctgggaagaa

SEQ ID NO: 74924 - DNA, 25 bp, Artificial
  Probe
gcaggaagaatcgaggaacctctaa

SEQ ID NO: 74925 - DNA, 25 bp, Artificial
  Probe
aacttcaacctgagtgcttcacagt

SEQ ID NO: 74926 - DNA, 25 bp, Artificial
  Probe
cacctatgatatatacctaactgaa

SEQ ID NO: 74927 - DNA, 25 bp, Artificial
  Probe
acttcaacctgagtgcttcacagtc

SEQ ID NO: 74928 - DNA, 25 bp, Artificial
  Probe
gtcagaagaaagagtgtctcccagg

SEQ ID NO: 74929 - DNA, 25 bp, Artificial
  Probe
atagacctagggagtcagaagaaag

SEQ ID NO: 74930 - DNA, 25 bp, Artificial
  Probe
gatagacctagggagtcagaagaaa

SEQ ID NO: 74931 - DNA, 25 bp, Artificial
  Probe
gaatcgaggaacctctaagtctggg

SEQ ID NO: 74932 - DNA, 25 bp, Artificial
  Probe
tagacctagggagtcagaagaaaga

SEQ ID NO: 74933 - DNA, 25 bp, Artificial
  Probe
tgaacttcaacctgagtgcttcaca

SEQ ID NO: 74934 - DNA, 25 bp, Artificial
  Probe
tgcaggaagaatcgaggaacctcta

SEQ ID NO: 74935 - DNA, 25 bp, Artificial
  Probe
atcgaggaacctctaagtctgggaa

SEQ ID NO: 74936 - DNA, 25 bp, Artificial
  Probe
aatcgaggaacctctaagtctggga

SEQ ID NO: 74937 - DNA, 25 bp, Artificial
  Probe
aatgtcatctcaagtcaagtcactg

SEQ ID NO: 74938 - DNA, 25 bp, Artificial
  Probe
aagttctctaccacaggttctagta

SEQ ID NO: 74939 - DNA, 25 bp, Artificial
  Probe
aatgttgtgctgtttgagtttagag

SEQ ID NO: 74940 - DNA, 25 bp, Artificial
  Probe
gaatgttgtgctgtttgagtttaga

SEQ ID NO: 74941 - DNA, 25 bp, Artificial
  Probe
agaatgttgtgctgtttgagtttag

SEQ ID NO: 74942 - DNA, 25 bp, Artificial
  Probe
aagaatgttgtgctgtttgagttta

SEQ ID NO: 74943 - DNA, 25 bp, Artificial
  Probe
agtagtgtgtaaagtgtcagtttct

SEQ ID NO: 74944 - DNA, 25 bp, Artificial
  Probe
gtgctgtttgagtttagagttgttt

SEQ ID NO: 74945 - DNA, 25 bp, Artificial
  Probe
acccgagttacctttctttgtattt

SEQ ID NO: 74946 - DNA, 25 bp, Artificial
  Probe
atgtcatctcaagtcaagtcactgg

SEQ ID NO: 74947 - DNA, 25 bp, Artificial
  Probe
tgctgtttgagtttagagttgttta

SEQ ID NO: 74948 - DNA, 25 bp, Artificial
  Probe
gttgtgctgtttgagtttagagttg

SEQ ID NO: 74949 - DNA, 25 bp, Artificial
  Probe
atgttgtgctgtttgagtttagagt

SEQ ID NO: 74950 - DNA, 25 bp, Artificial
  Probe
aacccgagttacctttctttgtatt

SEQ ID NO: 74951 - DNA, 25 bp, Artificial
  Probe
tagtgtgtaaagtgtcagtttcttg

SEQ ID NO: 74952 - DNA, 25 bp, Artificial
  Probe
gtagtgtgtaaagtgtcagtttctt

SEQ ID NO: 74953 - DNA, 25 bp, Artificial
  Probe
ggttctagtagtgtgtaaagtgtca

SEQ ID NO: 74954 - DNA, 25 bp, Artificial
  Probe
caggttctagtagtgtgtaaagtgt

SEQ ID NO: 74955 - DNA, 25 bp, Artificial
  Probe
tgtgctgtttgagtttagagttgtt

SEQ ID NO: 74956 - DNA, 25 bp, Artificial
  Probe
ttgtgctgtttgagtttagagttgt

SEQ ID NO: 74957 - DNA, 25 bp, Artificial
  Probe
tgttgtgctgtttgagtttagagtt

SEQ ID NO: 74958 - DNA, 25 bp, Artificial
  Probe
aggttctagtagtgtgtaaagtgtc

SEQ ID NO: 74959 - DNA, 25 bp, Artificial
  Probe
aaatggtcttacaaatgatgccttg

SEQ ID NO: 74960 - DNA, 25 bp, Artificial
  Probe
gtgtaaagtgtcagtttcttgcttg

SEQ ID NO: 74961 - DNA, 25 bp, Artificial
  Probe
tagtagtgtgtaaagtgtcagtttc

SEQ ID NO: 74962 - DNA, 25 bp, Artificial
  Probe
aaatgtcatctcaagtcaagtcact

SEQ ID NO: 74963 - DNA, 25 bp, Artificial
  Probe
tctagtagtgtgtaaagtgtcagtt

SEQ ID NO: 74964 - DNA, 25 bp, Artificial
  Probe
ttctagtagtgtgtaaagtgtcagt

SEQ ID NO: 74965 - DNA, 25 bp, Artificial
  Probe
agttctctaccacaggttctagtag

SEQ ID NO: 74966 - DNA, 25 bp, Artificial
  Probe
tgtgtaaagtgtcagtttcttgctt

SEQ ID NO: 74967 - DNA, 25 bp, Artificial
  Probe
caacccgagttacctttctttgtat

SEQ ID NO: 74968 - DNA, 25 bp, Artificial
  Probe
ttctctaccacaggttctagtagtg

SEQ ID NO: 74969 - DNA, 25 bp, Artificial
  Probe
gttctctaccacaggttctagtagt

SEQ ID NO: 74970 - DNA, 25 bp, Artificial
  Probe
gttctagtagtgtgtaaagtgtcag

SEQ ID NO: 74971 - DNA, 25 bp, Artificial
  Probe
caagaatgttgtgctgtttgagttt

SEQ ID NO: 74972 - DNA, 25 bp, Artificial
  Probe
catctcaagtcaagtcactggtctg

SEQ ID NO: 74973 - DNA, 25 bp, Artificial
  Probe
gtcatctcaagtcaagtcactggtc

SEQ ID NO: 74974 - DNA, 25 bp, Artificial
  Probe
tgacagtgtttgtagacctttgtta

SEQ ID NO: 74975 - DNA, 25 bp, Artificial
  Probe
atcttgacagtgtttgtagaccttt

SEQ ID NO: 74976 - DNA, 25 bp, Artificial
  Probe
gctgtttgagtttagagttgtttaa

SEQ ID NO: 74977 - DNA, 25 bp, Artificial
  Probe
tatcttgacagtgtttgtagacctt

SEQ ID NO: 74978 - DNA, 25 bp, Artificial
  Probe
ttcattctggtcctacttctgcttt

SEQ ID NO: 74979 - DNA, 25 bp, Artificial
  Probe
tttcattctggtcctacttctgctt

SEQ ID NO: 74980 - DNA, 25 bp, Artificial
  Probe
taagattatacatgacaacccgagt

SEQ ID NO: 74981 - DNA, 25 bp, Artificial
  Probe
atatcttgacagtgtttgtagacct

SEQ ID NO: 74982 - DNA, 25 bp, Artificial
  Probe
ctaacctcaggtagagtgctacaga

SEQ ID NO: 74983 - DNA, 25 bp, Artificial
  Probe
ctcacttaagggagttagttgatga

SEQ ID NO: 74984 - DNA, 25 bp, Artificial
  Probe
gctcacttaagggagttagttgatg

SEQ ID NO: 74985 - DNA, 25 bp, Artificial
  Probe
cctaacctcaggtagagtgctacag

SEQ ID NO: 74986 - DNA, 25 bp, Artificial
  Probe
tggagttttatggatttcagctaga

SEQ ID NO: 74987 - DNA, 25 bp, Artificial
  Probe
ggagttttatggatttcagctagat

SEQ ID NO: 74988 - DNA, 25 bp, Artificial
  Probe
ggaagtaggggaccaaattaagctg

SEQ ID NO: 74989 - DNA, 25 bp, Artificial
  Probe
tgacagcctaacctcaggtagagtg

SEQ ID NO: 74990 - DNA, 25 bp, Artificial
  Probe
agcctaacctcaggtagagtgctac

SEQ ID NO: 74991 - DNA, 25 bp, Artificial
  Probe
cagcctaacctcaggtagagtgcta

SEQ ID NO: 74992 - DNA, 25 bp, Artificial
  Probe
gcctaacctcaggtagagtgctaca

SEQ ID NO: 74993 - DNA, 25 bp, Artificial
  Probe
catagctggtgctcaagatttgtgg

SEQ ID NO: 74994 - DNA, 25 bp, Artificial
  Probe
ctgacagcctaacctcaggtagagt

SEQ ID NO: 74995 - DNA, 25 bp, Artificial
  Probe
gcatagctggtgctcaagatttgtg

SEQ ID NO: 74996 - DNA, 25 bp, Artificial
  Probe
atagctggtgctcaagatttgtggg

SEQ ID NO: 74997 - DNA, 25 bp, Artificial
  Probe
gtattgagaacactctgtaccatgt

SEQ ID NO: 74998 - DNA, 25 bp, Artificial
  Probe
tgtattgagaacactctgtaccatg

SEQ ID NO: 74999 - DNA, 25 bp, Artificial
  Probe
tattgagaacactctgtaccatgtg

SEQ ID NO: 75000 - DNA, 25 bp, Artificial
  Probe
atgtttaatctctactcgctctcag

SEQ ID NO: 75001 - DNA, 25 bp, Artificial
  Probe
aatgtttaatctctactcgctctca

SEQ ID NO: 75002 - DNA, 25 bp, Artificial
  Probe
aaatgtttaatctctactcgctctc

SEQ ID NO: 75003 - DNA, 25 bp, Artificial
  Probe
gtttaatctctactcgctctcagtg

SEQ ID NO: 75004 - DNA, 25 bp, Artificial
  Probe
tgtttaatctctactcgctctcagt

SEQ ID NO: 75005 - DNA, 25 bp, Artificial
  Probe
tttaatctctactcgctctcagtgc

SEQ ID NO: 75006 - DNA, 25 bp, Artificial
  Probe
attgagaacactctgtaccatgtgc

SEQ ID NO: 75007 - DNA, 25 bp, Artificial
  Probe
tctcatctctgacttcttcgccaag

SEQ ID NO: 75008 - DNA, 25 bp, Artificial
  Probe
ctctcatctctgacttcttcgccaa

SEQ ID NO: 75009 - DNA, 25 bp, Artificial
  Probe
taatctctactcgctctcagtgcaa

SEQ ID NO: 75010 - DNA, 25 bp, Artificial
  Probe
ttaatctctactcgctctcagtgca

SEQ ID NO: 75011 - DNA, 25 bp, Artificial
  Probe
aagtgcgttttattgaatccattgt

SEQ ID NO: 75012 - DNA, 25 bp, Artificial
  Probe
agtgcgttttattgaatccattgtg

SEQ ID NO: 75013 - DNA, 25 bp, Artificial
  Probe
caagtgcgttttattgaatccattg

SEQ ID NO: 75014 - DNA, 25 bp, Artificial
  Probe
gatggctatcaagtgcgttttattg

SEQ ID NO: 75015 - DNA, 25 bp, Artificial
  Probe
aaaatgtttaatctctactcgctct

SEQ ID NO: 75016 - DNA, 25 bp, Artificial
  Probe
gagaacactctgtaccatgtgcaag

SEQ ID NO: 75017 - DNA, 25 bp, Artificial
  Probe
ttttgtggaaatctgaaaactgtgc

SEQ ID NO: 75018 - DNA, 25 bp, Artificial
  Probe
tgtaaaatgtttaatctctactcgc

SEQ ID NO: 75019 - DNA, 25 bp, Artificial
  Probe
gtaaaatgtttaatctctactcgct

SEQ ID NO: 75020 - DNA, 25 bp, Artificial
  Probe
tgagaacactctgtaccatgtgcaa

SEQ ID NO: 75021 - DNA, 25 bp, Artificial
  Probe
ttgagaacactctgtaccatgtgca

SEQ ID NO: 75022 - DNA, 25 bp, Artificial
  Probe
gtgcgttttattgaatccattgtgg

SEQ ID NO: 75023 - DNA, 25 bp, Artificial
  Probe
taaaatgtttaatctctactcgctc

SEQ ID NO: 75024 - DNA, 25 bp, Artificial
  Probe
tgtggaaatctgaaaactgtgcaat

SEQ ID NO: 75025 - DNA, 25 bp, Artificial
  Probe
tttgtggaaatctgaaaactgtgca

SEQ ID NO: 75026 - DNA, 25 bp, Artificial
  Probe
aatctctactcgctctcagtgcaaa

SEQ ID NO: 75027 - DNA, 25 bp, Artificial
  Probe
tcaagtgcgttttattgaatccatt

SEQ ID NO: 75028 - DNA, 25 bp, Artificial
  Probe
atcaagtgcgttttattgaatccat

SEQ ID NO: 75029 - DNA, 25 bp, Artificial
  Probe
ggctatcaagtgcgttttattgaat

SEQ ID NO: 75030 - DNA, 25 bp, Artificial
  Probe
ttgtggaaatctgaaaactgtgcaa

SEQ ID NO: 75031 - DNA, 25 bp, Artificial
  Probe
gctatcaagtgcgttttattgaatc

SEQ ID NO: 75032 - DNA, 25 bp, Artificial
  Probe
tgatggctatcaagtgcgttttatt

SEQ ID NO: 75033 - DNA, 25 bp, Artificial
  Probe
tatcaagtgcgttttattgaatcca

SEQ ID NO: 75034 - DNA, 25 bp, Artificial
  Probe
ctatcaagtgcgttttattgaatcc

SEQ ID NO: 75035 - DNA, 25 bp, Artificial
  Probe
atggctatcaagtgcgttttattga

SEQ ID NO: 75036 - DNA, 25 bp, Artificial
  Probe
tggctatcaagtgcgttttattgaa

SEQ ID NO: 75037 - DNA, 25 bp, Artificial
  Probe
aacactctgtaccatgtgcaaggag

SEQ ID NO: 75038 - DNA, 25 bp, Artificial
  Probe
gaacactctgtaccatgtgcaagga

SEQ ID NO: 75039 - DNA, 25 bp, Artificial
  Probe
agaacactctgtaccatgtgcaagg

SEQ ID NO: 75040 - DNA, 25 bp, Artificial
  Probe
actctgtaccatgtgcaaggagtac

SEQ ID NO: 75041 - DNA, 25 bp, Artificial
  Probe
cactctgtaccatgtgcaaggagta

SEQ ID NO: 75042 - DNA, 25 bp, Artificial
  Probe
agtatggagagaagtattgtggcta

SEQ ID NO: 75043 - DNA, 25 bp, Artificial
  Probe
tatggagagaagtattgtggctaga

SEQ ID NO: 75044 - DNA, 25 bp, Artificial
  Probe
gtatggagagaagtattgtggctag

SEQ ID NO: 75045 - DNA, 25 bp, Artificial
  Probe
tattgtggctagagtggaagatgat

SEQ ID NO: 75046 - DNA, 25 bp, Artificial
  Probe
gagtatggagagaagtattgtggct

SEQ ID NO: 75047 - DNA, 25 bp, Artificial
  Probe
acgagtatggagagaagtattgtgg

SEQ ID NO: 75048 - DNA, 25 bp, Artificial
  Probe
aagtattgtggctagagtggaagat

SEQ ID NO: 75049 - DNA, 25 bp, Artificial
  Probe
atggagagaagtattgtggctagag

SEQ ID NO: 75050 - DNA, 25 bp, Artificial
  Probe
gtattgtggctagagtggaagatga

SEQ ID NO: 75051 - DNA, 25 bp, Artificial
  Probe
agtattgtggctagagtggaagatg

SEQ ID NO: 75052 - DNA, 25 bp, Artificial
  Probe
gaagtattgtggctagagtggaaga

SEQ ID NO: 75053 - DNA, 25 bp, Artificial
  Probe
agaagtattgtggctagagtggaag

SEQ ID NO: 75054 - DNA, 25 bp, Artificial
  Probe
gagaagtattgtggctagagtggaa

SEQ ID NO: 75055 - DNA, 25 bp, Artificial
  Probe
gcacgagtatggagagaagtattgt

SEQ ID NO: 75056 - DNA, 25 bp, Artificial
  Probe
cacgagtatggagagaagtattgtg

SEQ ID NO: 75057 - DNA, 25 bp, Artificial
  Probe
gagagaagtattgtggctagagtgg

SEQ ID NO: 75058 - DNA, 25 bp, Artificial
  Probe
ggagagaagtattgtggctagagtg

SEQ ID NO: 75059 - DNA, 25 bp, Artificial
  Probe
attgtggctagagtggaagatgatg

SEQ ID NO: 75060 - DNA, 25 bp, Artificial
  Probe
agagaagtattgtggctagagtgga

SEQ ID NO: 75061 - DNA, 25 bp, Artificial
  Probe
tggagagaagtattgtggctagagt

SEQ ID NO: 75062 - DNA, 25 bp, Artificial
  Probe
cgagtatggagagaagtattgtggc

SEQ ID NO: 75063 - DNA, 25 bp, Artificial
  Probe
ggcacgagtatggagagaagtattg

SEQ ID NO: 75064 - DNA, 25 bp, Artificial
  Probe
gcatttgttgggaattgtattgaaa

SEQ ID NO: 75065 - DNA, 25 bp, Artificial
  Probe
tggcacgagtatggagagaagtatt

SEQ ID NO: 75066 - DNA, 25 bp, Artificial
  Probe
ggcatttgttgggaattgtattgaa

SEQ ID NO: 75067 - DNA, 25 bp, Artificial
  Probe
ttggcatttgttgggaattgtattg

SEQ ID NO: 75068 - DNA, 25 bp, Artificial
  Probe
gttggcatttgttgggaattgtatt

SEQ ID NO: 75069 - DNA, 25 bp, Artificial
  Probe
tggcatttgttgggaattgtattga

SEQ ID NO: 75070 - DNA, 25 bp, Artificial
  Probe
agttggcatttgttgggaattgtat

SEQ ID NO: 75071 - DNA, 25 bp, Artificial
  Probe
ctggcacgagtatggagagaagtat

SEQ ID NO: 75072 - DNA, 25 bp, Artificial
  Probe
aaattgatgatgtggtaaatactcg

SEQ ID NO: 75073 - DNA, 25 bp, Artificial
  Probe
catttgttgggaattgtattgaaac

SEQ ID NO: 75074 - DNA, 25 bp, Artificial
  Probe
cagttggcatttgttgggaattgta

SEQ ID NO: 75075 - DNA, 25 bp, Artificial
  Probe
aattgatgatgtggtaaatactcga

SEQ ID NO: 75076 - DNA, 25 bp, Artificial
  Probe
attgatgatgtggtaaatactcgat

SEQ ID NO: 75077 - DNA, 25 bp, Artificial
  Probe
ttgtggctagagtggaagatgatgg

SEQ ID NO: 75078 - DNA, 25 bp, Artificial
  Probe
agtcattccatctacactggctgaa

SEQ ID NO: 75079 - DNA, 25 bp, Artificial
  Probe
aagtcattccatctacactggctga

SEQ ID NO: 75080 - DNA, 25 bp, Artificial
  Probe
tgatgatgtggtaaatactcgataa

SEQ ID NO: 75081 - DNA, 25 bp, Artificial
  Probe
ttgatgatgtggtaaatactcgata

SEQ ID NO: 75082 - DNA, 25 bp, Artificial
  Probe
ggagcattctgaaaattgatgatgt

SEQ ID NO: 75083 - DNA, 25 bp, Artificial
  Probe
agcattctgaaaattgatgatgtgg

SEQ ID NO: 75084 - DNA, 25 bp, Artificial
  Probe
gcattctgaaaattgatgatgtggt

SEQ ID NO: 75085 - DNA, 25 bp, Artificial
  Probe
gagcattctgaaaattgatgatgtg

SEQ ID NO: 75086 - DNA, 25 bp, Artificial
  Probe
cggagcattctgaaaattgatgatg

SEQ ID NO: 75087 - DNA, 25 bp, Artificial
  Probe
tccttgtgattcctagagaactttc

SEQ ID NO: 75088 - DNA, 25 bp, Artificial
  Probe
ctttccttgtgattcctagagaact

SEQ ID NO: 75089 - DNA, 25 bp, Artificial
  Probe
ttccttgtgattcctagagaacttt

SEQ ID NO: 75090 - DNA, 25 bp, Artificial
  Probe
tttccttgtgattcctagagaactt

SEQ ID NO: 75091 - DNA, 25 bp, Artificial
  Probe
cttgtgattcctagagaactttccc

SEQ ID NO: 75092 - DNA, 25 bp, Artificial
  Probe
ccttgtgattcctagagaactttcc

SEQ ID NO: 75093 - DNA, 25 bp, Artificial
  Probe
cctttccttgtgattcctagagaac

SEQ ID NO: 75094 - DNA, 25 bp, Artificial
  Probe
cctcatttccatatttgtcattagc

SEQ ID NO: 75095 - DNA, 25 bp, Artificial
  Probe
ttgtgattcctagagaactttccct

SEQ ID NO: 75096 - DNA, 25 bp, Artificial
  Probe
cacacctcatttccatatttgtcat

SEQ ID NO: 75097 - DNA, 25 bp, Artificial
  Probe
acacctcatttccatatttgtcatt

SEQ ID NO: 75098 - DNA, 25 bp, Artificial
  Probe
ccacacctcatttccatatttgtca

SEQ ID NO: 75099 - DNA, 25 bp, Artificial
  Probe
tgtgattcctagagaactttccctg

SEQ ID NO: 75100 - DNA, 25 bp, Artificial
  Probe
ccctttccttgtgattcctagagaa

SEQ ID NO: 75101 - DNA, 25 bp, Artificial
  Probe
ggtgaagtccttgtagcataaccat

SEQ ID NO: 75102 - DNA, 25 bp, Artificial
  Probe
cccacacctcatttccatatttgtc

SEQ ID NO: 75103 - DNA, 25 bp, Artificial
  Probe
agagtccctttccttgtgattccta

SEQ ID NO: 75104 - DNA, 25 bp, Artificial
  Probe
cacctcatttccatatttgtcatta

SEQ ID NO: 75105 - DNA, 25 bp, Artificial
  Probe
tccctttccttgtgattcctagaga

SEQ ID NO: 75106 - DNA, 25 bp, Artificial
  Probe
gtccctttccttgtgattcctagag

SEQ ID NO: 75107 - DNA, 25 bp, Artificial
  Probe
gagtccctttccttgtgattcctag

SEQ ID NO: 75108 - DNA, 25 bp, Artificial
  Probe
atgcccacacctcatttccatattt

SEQ ID NO: 75109 - DNA, 25 bp, Artificial
  Probe
agtccctttccttgtgattcctaga

SEQ ID NO: 75110 - DNA, 25 bp, Artificial
  Probe
acctcatttccatatttgtcattag

SEQ ID NO: 75111 - DNA, 25 bp, Artificial
  Probe
gtgattcctagagaactttccctgc

SEQ ID NO: 75112 - DNA, 25 bp, Artificial
  Probe
catttccatatttgtcattagctgt

SEQ ID NO: 75113 - DNA, 25 bp, Artificial
  Probe
gatgcccacacctcatttccatatt

SEQ ID NO: 75114 - DNA, 25 bp, Artificial
  Probe
aggtgaagtccttgtagcataacca

SEQ ID NO: 75115 - DNA, 25 bp, Artificial
  Probe
tcatttccatatttgtcattagctg

SEQ ID NO: 75116 - DNA, 25 bp, Artificial
  Probe
tagatgcccacacctcatttccata

SEQ ID NO: 75117 - DNA, 25 bp, Artificial
  Probe
tgcccacacctcatttccatatttg

SEQ ID NO: 75118 - DNA, 25 bp, Artificial
  Probe
ctcatttccatatttgtcattagct

SEQ ID NO: 75119 - DNA, 25 bp, Artificial
  Probe
cagagtccctttccttgtgattcct

SEQ ID NO: 75120 - DNA, 25 bp, Artificial
  Probe
agatgcccacacctcatttccatat

SEQ ID NO: 75121 - DNA, 25 bp, Artificial
  Probe
gcccacacctcatttccatatttgt

SEQ ID NO: 75122 - DNA, 25 bp, Artificial
  Probe
aaggtgaagtccttgtagcataacc

SEQ ID NO: 75123 - DNA, 25 bp, Artificial
  Probe
caatgggcacaggagaagacagaat

SEQ ID NO: 75124 - DNA, 25 bp, Artificial
  Probe
tgcagagtccctttccttgtgattc

SEQ ID NO: 75125 - DNA, 25 bp, Artificial
  Probe
gtgcagagtccctttccttgtgatt

SEQ ID NO: 75126 - DNA, 25 bp, Artificial
  Probe
aaatggtgggaaacccgtctaacag

SEQ ID NO: 75127 - DNA, 25 bp, Artificial
  Probe
tccatacctgctcataagacttgta

SEQ ID NO: 75128 - DNA, 25 bp, Artificial
  Probe
ctccatacctgctcataagacttgt

SEQ ID NO: 75129 - DNA, 25 bp, Artificial
  Probe
actccatacctgctcataagacttg

SEQ ID NO: 75130 - DNA, 25 bp, Artificial
  Probe
cactccatacctgctcataagactt

SEQ ID NO: 75131 - DNA, 25 bp, Artificial
  Probe
ccatacctgctcataagacttgtat

SEQ ID NO: 75132 - DNA, 25 bp, Artificial
  Probe
ttccactccatacctgctcataaga

SEQ ID NO: 75133 - DNA, 25 bp, Artificial
  Probe
tacctgctcataagacttgtatagc

SEQ ID NO: 75134 - DNA, 25 bp, Artificial
  Probe
catacctgctcataagacttgtata

SEQ ID NO: 75135 - DNA, 25 bp, Artificial
  Probe
ccactccatacctgctcataagact

SEQ ID NO: 75136 - DNA, 25 bp, Artificial
  Probe
tccactccatacctgctcataagac

SEQ ID NO: 75137 - DNA, 25 bp, Artificial
  Probe
atacctgctcataagacttgtatag

SEQ ID NO: 75138 - DNA, 25 bp, Artificial
  Probe
tttccactccatacctgctcataag

SEQ ID NO: 75139 - DNA, 25 bp, Artificial
  Probe
taacgctgtgtgtatgactgtgtga

SEQ ID NO: 75140 - DNA, 25 bp, Artificial
  Probe
ttttccactccatacctgctcataa

SEQ ID NO: 75141 - DNA, 25 bp, Artificial
  Probe
gttttccactccatacctgctcata

SEQ ID NO: 75142 - DNA, 25 bp, Artificial
  Probe
taggaaggtctccatagcagacttg

SEQ ID NO: 75143 - DNA, 25 bp, Artificial
  Probe
gtgtgtatgactgtgtgactgggag

SEQ ID NO: 75144 - DNA, 25 bp, Artificial
  Probe
ctgtgtgtatgactgtgtgactggg

SEQ ID NO: 75145 - DNA, 25 bp, Artificial
  Probe
gttttgtagcaaacagccacttagt

SEQ ID NO: 75146 - DNA, 25 bp, Artificial
  Probe
gaagcctttggttttccactccata

SEQ ID NO: 75147 - DNA, 25 bp, Artificial
  Probe
catctccaggtgttttgtagcaaac

SEQ ID NO: 75148 - DNA, 25 bp, Artificial
  Probe
ttttgtagcaaacagccacttagtg

SEQ ID NO: 75149 - DNA, 25 bp, Artificial
  Probe
cctttggttttccactccatacctg

SEQ ID NO: 75150 - DNA, 25 bp, Artificial
  Probe
aagcctttggttttccactccatac

SEQ ID NO: 75151 - DNA, 25 bp, Artificial
  Probe
tttgtagcaaacagccacttagtgc

SEQ ID NO: 75152 - DNA, 25 bp, Artificial
  Probe
gtcctgctggttgacaaacaacata

SEQ ID NO: 75153 - DNA, 25 bp, Artificial
  Probe
ctttggttttccactccatacctgc

SEQ ID NO: 75154 - DNA, 25 bp, Artificial
  Probe
cacttagtgctttgtcctggactcc

SEQ ID NO: 75155 - DNA, 25 bp, Artificial
  Probe
aaacagccacttagtgctttgtcct

SEQ ID NO: 75156 - DNA, 25 bp, Artificial
  Probe
caaacagccacttagtgctttgtcc

SEQ ID NO: 75157 - DNA, 25 bp, Artificial
  Probe
cttagtgctttgtcctggactccac

SEQ ID NO: 75158 - DNA, 25 bp, Artificial
  Probe
ccacttagtgctttgtcctggactc

SEQ ID NO: 75159 - DNA, 25 bp, Artificial
  Probe
tttggttttccactccatacctgct

SEQ ID NO: 75160 - DNA, 25 bp, Artificial
  Probe
gaaggtctccatagcagacttgcag

SEQ ID NO: 75161 - DNA, 25 bp, Artificial
  Probe
gcatctccaggtgttttgtagcaaa

SEQ ID NO: 75162 - DNA, 25 bp, Artificial
  Probe
ggttttccactccatacctgctcat

SEQ ID NO: 75163 - DNA, 25 bp, Artificial
  Probe
ttggttttccactccatacctgctc

SEQ ID NO: 75164 - DNA, 25 bp, Artificial
  Probe
gcctttggttttccactccatacct

SEQ ID NO: 75165 - DNA, 25 bp, Artificial
  Probe
agcctttggttttccactccatacc

SEQ ID NO: 75166 - DNA, 25 bp, Artificial
  Probe
tctggcatctccaggtgttttgtag

SEQ ID NO: 75167 - DNA, 25 bp, Artificial
  Probe
ctctggcatctccaggtgttttgta

SEQ ID NO: 75168 - DNA, 25 bp, Artificial
  Probe
cttcatctgtagtgtcaggattgtt

SEQ ID NO: 75169 - DNA, 25 bp, Artificial
  Probe
catctgtagtgtcaggattgttgat

SEQ ID NO: 75170 - DNA, 25 bp, Artificial
  Probe
ttcatctgtagtgtcaggattgttg

SEQ ID NO: 75171 - DNA, 25 bp, Artificial
  Probe
tcatctgtagtgtcaggattgttga

SEQ ID NO: 75172 - DNA, 25 bp, Artificial
  Probe
ccttcatctgtagtgtcaggattgt

SEQ ID NO: 75173 - DNA, 25 bp, Artificial
  Probe
attccttcatctgtagtgtcaggat

SEQ ID NO: 75174 - DNA, 25 bp, Artificial
  Probe
ttccttcatctgtagtgtcaggatt

SEQ ID NO: 75175 - DNA, 25 bp, Artificial
  Probe
aattccttcatctgtagtgtcagga

SEQ ID NO: 75176 - DNA, 25 bp, Artificial
  Probe
tccttcatctgtagtgtcaggattg

SEQ ID NO: 75177 - DNA, 25 bp, Artificial
  Probe
ccaataaacacagtaatctggaaaa

SEQ ID NO: 75178 - DNA, 25 bp, Artificial
  Probe
tccaataaacacagtaatctggaaa

SEQ ID NO: 75179 - DNA, 25 bp, Artificial
  Probe
ttcaatgagttaattcagtcgcttc

SEQ ID NO: 75180 - DNA, 25 bp, Artificial
  Probe
cttcaatgagttaattcagtcgctt

SEQ ID NO: 75181 - DNA, 25 bp, Artificial
  Probe
caatgagttaattcagtcgcttcac

SEQ ID NO: 75182 - DNA, 25 bp, Artificial
  Probe
tcaatgagttaattcagtcgcttca

SEQ ID NO: 75183 - DNA, 25 bp, Artificial
  Probe
aatgagttaattcagtcgcttcaca

SEQ ID NO: 75184 - DNA, 25 bp, Artificial
  Probe
taccttcaatgagttaattcagtcg

SEQ ID NO: 75185 - DNA, 25 bp, Artificial
  Probe
gagttaattcagtcgcttcacacaa

SEQ ID NO: 75186 - DNA, 25 bp, Artificial
  Probe
ccttcaatgagttaattcagtcgct

SEQ ID NO: 75187 - DNA, 25 bp, Artificial
  Probe
agttaattcagtcgcttcacacaag

SEQ ID NO: 75188 - DNA, 25 bp, Artificial
  Probe
atgagttaattcagtcgcttcacac

SEQ ID NO: 75189 - DNA, 25 bp, Artificial
  Probe
accttcaatgagttaattcagtcgc

SEQ ID NO: 75190 - DNA, 25 bp, Artificial
  Probe
gttaattcagtcgcttcacacaagg

SEQ ID NO: 75191 - DNA, 25 bp, Artificial
  Probe
taattcagtcgcttcacacaaggaa

SEQ ID NO: 75192 - DNA, 25 bp, Artificial
  Probe
ttaattcagtcgcttcacacaagga

SEQ ID NO: 75193 - DNA, 25 bp, Artificial
  Probe
tgagttaattcagtcgcttcacaca

SEQ ID NO: 75194 - DNA, 25 bp, Artificial
  Probe
aattcagtcgcttcacacaaggaag

SEQ ID NO: 75195 - DNA, 25 bp, Artificial
  Probe
ttctgtcatttacacatgttgttcc

SEQ ID NO: 75196 - DNA, 25 bp, Artificial
  Probe
ctgtcatttacacatgttgttccaa

SEQ ID NO: 75197 - DNA, 25 bp, Artificial
  Probe
tgtcatttacacatgttgttccaat

SEQ ID NO: 75198 - DNA, 25 bp, Artificial
  Probe
gcattctgtcatttacacatgttgt

SEQ ID NO: 75199 - DNA, 25 bp, Artificial
  Probe
tctgtcatttacacatgttgttcca

SEQ ID NO: 75200 - DNA, 25 bp, Artificial
  Probe
gtcatttacacatgttgttccaatt

SEQ ID NO: 75201 - DNA, 25 bp, Artificial
  Probe
ggcattctgtcatttacacatgttg

SEQ ID NO: 75202 - DNA, 25 bp, Artificial
  Probe
cattctgtcatttacacatgttgtt

SEQ ID NO: 75203 - DNA, 25 bp, Artificial
  Probe
ggcagaatggacttgatgcgtattc

SEQ ID NO: 75204 - DNA, 25 bp, Artificial
  Probe
attctgtcatttacacatgttgttc

SEQ ID NO: 75205 - DNA, 25 bp, Artificial
  Probe
cggcattctgtcatttacacatgtt

SEQ ID NO: 75206 - DNA, 25 bp, Artificial
  Probe
tcatttacacatgttgttccaatta

SEQ ID NO: 75207 - DNA, 25 bp, Artificial
  Probe
cttccttgggcagaatggacttgat

SEQ ID NO: 75208 - DNA, 25 bp, Artificial
  Probe
gcagaatggacttgatgcgtattct

SEQ ID NO: 75209 - DNA, 25 bp, Artificial
  Probe
ttccttgggcagaatggacttgatg

SEQ ID NO: 75210 - DNA, 25 bp, Artificial
  Probe
ggcggcattctgtcatttacacatg

SEQ ID NO: 75211 - DNA, 25 bp, Artificial
  Probe
catttacacatgttgttccaattaa

SEQ ID NO: 75212 - DNA, 25 bp, Artificial
  Probe
gacagacagacgttcccagcttatc

SEQ ID NO: 75213 - DNA, 25 bp, Artificial
  Probe
atttacacatgttgttccaattaaa

SEQ ID NO: 75214 - DNA, 25 bp, Artificial
  Probe
gcggcattctgtcatttacacatgt

SEQ ID NO: 75215 - DNA, 25 bp, Artificial
  Probe
tttacacatgttgttccaattaaaa

SEQ ID NO: 75216 - DNA, 25 bp, Artificial
  Probe
ttacgccatcctaatagcaagaatt

SEQ ID NO: 75217 - DNA, 25 bp, Artificial
  Probe
gattcttacgccatcctaatagcaa

SEQ ID NO: 75218 - DNA, 25 bp, Artificial
  Probe
cttacgccatcctaatagcaagaat

SEQ ID NO: 75219 - DNA, 25 bp, Artificial
  Probe
attcttacgccatcctaatagcaag

SEQ ID NO: 75220 - DNA, 25 bp, Artificial
  Probe
tacgccatcctaatagcaagaatta

SEQ ID NO: 75221 - DNA, 25 bp, Artificial
  Probe
agattcttacgccatcctaatagca

SEQ ID NO: 75222 - DNA, 25 bp, Artificial
  Probe
aagattcttacgccatcctaatagc

SEQ ID NO: 75223 - DNA, 25 bp, Artificial
  Probe
gaagattcttacgccatcctaatag

SEQ ID NO: 75224 - DNA, 25 bp, Artificial
  Probe
ggaagattcttacgccatcctaata

SEQ ID NO: 75225 - DNA, 25 bp, Artificial
  Probe
ctgtaggtggaggaagattcttacg

SEQ ID NO: 75226 - DNA, 25 bp, Artificial
  Probe
tcattgggctttcagaatcataaac

SEQ ID NO: 75227 - DNA, 25 bp, Artificial
  Probe
gctgtaggtggaggaagattcttac

SEQ ID NO: 75228 - DNA, 25 bp, Artificial
  Probe
cattgggctttcagaatcataaacg

SEQ ID NO: 75229 - DNA, 25 bp, Artificial
  Probe
ttcattgggctttcagaatcataaa

SEQ ID NO: 75230 - DNA, 25 bp, Artificial
  Probe
ttaggctgtaggtggaggaagattc

SEQ ID NO: 75231 - DNA, 25 bp, Artificial
  Probe
gaacatgacagaactctccctaata

SEQ ID NO: 75232 - DNA, 25 bp, Artificial
  Probe
aattgttaggctgtaggtggaggaa

SEQ ID NO: 75233 - DNA, 25 bp, Artificial
  Probe
gttaggctgtaggtggaggaagatt

SEQ ID NO: 75234 - DNA, 25 bp, Artificial
  Probe
aacatgacagaactctccctaatat

SEQ ID NO: 75235 - DNA, 25 bp, Artificial
  Probe
catggatttctagcagtcgtcttag

SEQ ID NO: 75236 - DNA, 25 bp, Artificial
  Probe
tcttacgccatcctaatagcaagaa

SEQ ID NO: 75237 - DNA, 25 bp, Artificial
  Probe
ttcttacgccatcctaatagcaaga

SEQ ID NO: 75238 - DNA, 25 bp, Artificial
  Probe
agaacatgacagaactctccctaat

SEQ ID NO: 75239 - DNA, 25 bp, Artificial
  Probe
ggctgtaggtggaggaagattctta

SEQ ID NO: 75240 - DNA, 25 bp, Artificial
  Probe
aagaacatgacagaactctccctaa

SEQ ID NO: 75241 - DNA, 25 bp, Artificial
  Probe
acatgacagaactctccctaatatt

SEQ ID NO: 75242 - DNA, 25 bp, Artificial
  Probe
attgttaggctgtaggtggaggaag

SEQ ID NO: 75243 - DNA, 25 bp, Artificial
  Probe
cctaatattcattgggctttcagaa

SEQ ID NO: 75244 - DNA, 25 bp, Artificial
  Probe
gaagaacatgacagaactctcccta

SEQ ID NO: 75245 - DNA, 25 bp, Artificial
  Probe
cctgaagaacatgacagaactctcc

SEQ ID NO: 75246 - DNA, 25 bp, Artificial
  Probe
cagaactctccctaatattcattgg

SEQ ID NO: 75247 - DNA, 25 bp, Artificial
  Probe
tcgtcttagctgataagcatcatta

SEQ ID NO: 75248 - DNA, 25 bp, Artificial
  Probe
ttctagcagtcgtcttagctgataa

SEQ ID NO: 75249 - DNA, 25 bp, Artificial
  Probe
aagcctgaagaacatgacagaactc

SEQ ID NO: 75250 - DNA, 25 bp, Artificial
  Probe
atggatttctagcagtcgtcttagc

SEQ ID NO: 75251 - DNA, 25 bp, Artificial
  Probe
catgacagaactctccctaatattc

SEQ ID NO: 75252 - DNA, 25 bp, Artificial
  Probe
taggctgtaggtggaggaagattct

SEQ ID NO: 75253 - DNA, 25 bp, Artificial
  Probe
attcattgggctttcagaatcataa

SEQ ID NO: 75254 - DNA, 25 bp, Artificial
  Probe
cgccatcctaatagcaagaattaga

SEQ ID NO: 75255 - DNA, 25 bp, Artificial
  Probe
gtcgtcttagctgataagcatcatt

SEQ ID NO: 75256 - DNA, 25 bp, Artificial
  Probe
tgacagaactctccctaatattcat

SEQ ID NO: 75257 - DNA, 25 bp, Artificial
  Probe
atgacagaactctccctaatattca

SEQ ID NO: 75258 - DNA, 25 bp, Artificial
  Probe
acgccatcctaatagcaagaattag

SEQ ID NO: 75259 - DNA, 25 bp, Artificial
  Probe
atattcattgggctttcagaatcat

SEQ ID NO: 75260 - DNA, 25 bp, Artificial
  Probe
cgtcttagctgataagcatcattat

SEQ ID NO: 75261 - DNA, 25 bp, Artificial
  Probe
atgttgaagtaaagccagatggata

SEQ ID NO: 75262 - DNA, 25 bp, Artificial
  Probe
tgttgaagtaaagccagatggataa

SEQ ID NO: 75263 - DNA, 25 bp, Artificial
  Probe
gttgaagacttgatagtgtttgtgg

SEQ ID NO: 75264 - DNA, 25 bp, Artificial
  Probe
tgttgaagacttgatagtgtttgtg

SEQ ID NO: 75265 - DNA, 25 bp, Artificial
  Probe
gttgaagtaaagccagatggataac

SEQ ID NO: 75266 - DNA, 25 bp, Artificial
  Probe
ctgttgaagacttgatagtgtttgt

SEQ ID NO: 75267 - DNA, 25 bp, Artificial
  Probe
aagacttgatagtgtttgtgggttt

SEQ ID NO: 75268 - DNA, 25 bp, Artificial
  Probe
tctgttgaagacttgatagtgtttg

SEQ ID NO: 75269 - DNA, 25 bp, Artificial
  Probe
gaagacttgatagtgtttgtgggtt

SEQ ID NO: 75270 - DNA, 25 bp, Artificial
  Probe
ttgaagacttgatagtgtttgtggg

SEQ ID NO: 75271 - DNA, 25 bp, Artificial
  Probe
agacttgatagtgtttgtgggtttg

SEQ ID NO: 75272 - DNA, 25 bp, Artificial
  Probe
ttctgttgaagacttgatagtgttt

SEQ ID NO: 75273 - DNA, 25 bp, Artificial
  Probe
tttctgttgaagacttgatagtgtt

SEQ ID NO: 75274 - DNA, 25 bp, Artificial
  Probe
tgaagacttgatagtgtttgtgggt

SEQ ID NO: 75275 - DNA, 25 bp, Artificial
  Probe
gaggagaacagtctgtgaagtcaag

SEQ ID NO: 75276 - DNA, 25 bp, Artificial
  Probe
cttgaggagaacagtctgtgaagtc

SEQ ID NO: 75277 - DNA, 25 bp, Artificial
  Probe
gacttgatagtgtttgtgggtttgc

SEQ ID NO: 75278 - DNA, 25 bp, Artificial
  Probe
tgaggagaacagtctgtgaagtcaa

SEQ ID NO: 75279 - DNA, 25 bp, Artificial
  Probe
ttgaggagaacagtctgtgaagtca

SEQ ID NO: 75280 - DNA, 25 bp, Artificial
  Probe
tgatagtgtttgtgggtttgcattt

SEQ ID NO: 75281 - DNA, 25 bp, Artificial
  Probe
ttgatagtgtttgtgggtttgcatt

SEQ ID NO: 75282 - DNA, 25 bp, Artificial
  Probe
cttgatagtgtttgtgggtttgcat

SEQ ID NO: 75283 - DNA, 25 bp, Artificial
  Probe
tggagttttctgttgaagacttgat

SEQ ID NO: 75284 - DNA, 25 bp, Artificial
  Probe
ccttgaggagaacagtctgtgaagt

SEQ ID NO: 75285 - DNA, 25 bp, Artificial
  Probe
ggagttttctgttgaagacttgata

SEQ ID NO: 75286 - DNA, 25 bp, Artificial
  Probe
gtggagttttctgttgaagacttga

SEQ ID NO: 75287 - DNA, 25 bp, Artificial
  Probe
ttttctgttgaagacttgatagtgt

SEQ ID NO: 75288 - DNA, 25 bp, Artificial
  Probe
gttttctgttgaagacttgatagtg

SEQ ID NO: 75289 - DNA, 25 bp, Artificial
  Probe
tgtggagttttctgttgaagacttg

SEQ ID NO: 75290 - DNA, 25 bp, Artificial
  Probe
gtgtggagttttctgttgaagactt

SEQ ID NO: 75291 - DNA, 25 bp, Artificial
  Probe
agttttctgttgaagacttgatagt

SEQ ID NO: 75292 - DNA, 25 bp, Artificial
  Probe
gagttttctgttgaagacttgatag

SEQ ID NO: 75293 - DNA, 25 bp, Artificial
  Probe
aggagaacagtctgtgaagtcaagc

SEQ ID NO: 75294 - DNA, 25 bp, Artificial
  Probe
gatagtgtttgtgggtttgcatttt

SEQ ID NO: 75295 - DNA, 25 bp, Artificial
  Probe
atagtgtttgtgggtttgcattttg

SEQ ID NO: 75296 - DNA, 25 bp, Artificial
  Probe
acttgatagtgtttgtgggtttgca

SEQ ID NO: 75297 - DNA, 25 bp, Artificial
  Probe
cagacactaacgaccccatttatgt

SEQ ID NO: 75298 - DNA, 25 bp, Artificial
  Probe
ggtgtggagttttctgttgaagact

SEQ ID NO: 75299 - DNA, 25 bp, Artificial
  Probe
agacactaacgaccccatttatgtg

SEQ ID NO: 75300 - DNA, 25 bp, Artificial
  Probe
aaaattaaaatgtcacagcaggctg

SEQ ID NO: 75301 - DNA, 25 bp, Artificial
  Probe
agaacagtctgtgaagtcaagcgtc

SEQ ID NO: 75302 - DNA, 25 bp, Artificial
  Probe
gagaacagtctgtgaagtcaagcgt

SEQ ID NO: 75303 - DNA, 25 bp, Artificial
  Probe
gccttgaggagaacagtctgtgaag

SEQ ID NO: 75304 - DNA, 25 bp, Artificial
  Probe
gcagacactaacgaccccatttatg

SEQ ID NO: 75305 - DNA, 25 bp, Artificial
  Probe
tagtgtttgtgggtttgcattttgg

SEQ ID NO: 75306 - DNA, 25 bp, Artificial
  Probe
aacacatctccattgactgtagtcc

SEQ ID NO: 75307 - DNA, 25 bp, Artificial
  Probe
gaaacacatctccattgactgtagt

SEQ ID NO: 75308 - DNA, 25 bp, Artificial
  Probe
tgaaacacatctccattgactgtag

SEQ ID NO: 75309 - DNA, 25 bp, Artificial
  Probe
ctgaaacacatctccattgactgta

SEQ ID NO: 75310 - DNA, 25 bp, Artificial
  Probe
ctcctgaaacacatctccattgact

SEQ ID NO: 75311 - DNA, 25 bp, Artificial
  Probe
tcctgaaacacatctccattgactg

SEQ ID NO: 75312 - DNA, 25 bp, Artificial
  Probe
aaacacatctccattgactgtagtc

SEQ ID NO: 75313 - DNA, 25 bp, Artificial
  Probe
cctcctgaaacacatctccattgac

SEQ ID NO: 75314 - DNA, 25 bp, Artificial
  Probe
tagcctcctgaaacacatctccatt

SEQ ID NO: 75315 - DNA, 25 bp, Artificial
  Probe
ttagcctcctgaaacacatctccat

SEQ ID NO: 75316 - DNA, 25 bp, Artificial
  Probe
cctgaaacacatctccattgactgt

SEQ ID NO: 75317 - DNA, 25 bp, Artificial
  Probe
gttagcctcctgaaacacatctcca

SEQ ID NO: 75318 - DNA, 25 bp, Artificial
  Probe
acacatctccattgactgtagtccc

SEQ ID NO: 75319 - DNA, 25 bp, Artificial
  Probe
gcctcctgaaacacatctccattga

SEQ ID NO: 75320 - DNA, 25 bp, Artificial
  Probe
agcctcctgaaacacatctccattg

SEQ ID NO: 75321 - DNA, 25 bp, Artificial
  Probe
agtcattctcgatgccagcaatctc

SEQ ID NO: 75322 - DNA, 25 bp, Artificial
  Probe
gagtcattctcgatgccagcaatct

SEQ ID NO: 75323 - DNA, 25 bp, Artificial
  Probe
atctccattgactgtagtccccatg

SEQ ID NO: 75324 - DNA, 25 bp, Artificial
  Probe
catctccattgactgtagtccccat

SEQ ID NO: 75325 - DNA, 25 bp, Artificial
  Probe
cattgactgtagtccccatgtcctc

SEQ ID NO: 75326 - DNA, 25 bp, Artificial
  Probe
ctccattgactgtagtccccatgtc

SEQ ID NO: 75327 - DNA, 25 bp, Artificial
  Probe
cacatctccattgactgtagtcccc

SEQ ID NO: 75328 - DNA, 25 bp, Artificial
  Probe
tctccattgactgtagtccccatgt

SEQ ID NO: 75329 - DNA, 25 bp, Artificial
  Probe
acatctccattgactgtagtcccca

SEQ ID NO: 75330 - DNA, 25 bp, Artificial
  Probe
cttctgtatctgctctcttggatta

SEQ ID NO: 75331 - DNA, 25 bp, Artificial
  Probe
gatggattcttctgtatctgctctc

SEQ ID NO: 75332 - DNA, 25 bp, Artificial
  Probe
gattcttctgtatctgctctcttgg

SEQ ID NO: 75333 - DNA, 25 bp, Artificial
  Probe
ggattcttctgtatctgctctcttg

SEQ ID NO: 75334 - DNA, 25 bp, Artificial
  Probe
atgtgatggattcttctgtatctgc

SEQ ID NO: 75335 - DNA, 25 bp, Artificial
  Probe
atggattcttctgtatctgctctct

SEQ ID NO: 75336 - DNA, 25 bp, Artificial
  Probe
attcttctgtatctgctctcttgga

SEQ ID NO: 75337 - DNA, 25 bp, Artificial
  Probe
ttctgtatctgctctcttggattaa

SEQ ID NO: 75338 - DNA, 25 bp, Artificial
  Probe
tcttctgtatctgctctcttggatt

SEQ ID NO: 75339 - DNA, 25 bp, Artificial
  Probe
ttcttctgtatctgctctcttggat

SEQ ID NO: 75340 - DNA, 25 bp, Artificial
  Probe
tggattcttctgtatctgctctctt

SEQ ID NO: 75341 - DNA, 25 bp, Artificial
  Probe
tgatggattcttctgtatctgctct

SEQ ID NO: 75342 - DNA, 25 bp, Artificial
  Probe
gtgatggattcttctgtatctgctc

SEQ ID NO: 75343 - DNA, 25 bp, Artificial
  Probe
tgtgatggattcttctgtatctgct

SEQ ID NO: 75344 - DNA, 25 bp, Artificial
  Probe
taagaagtgagtgtggacatcaaga

SEQ ID NO: 75345 - DNA, 25 bp, Artificial
  Probe
gtaagaagtgagtgtggacatcaag

SEQ ID NO: 75346 - DNA, 25 bp, Artificial
  Probe
catgtgatggattcttctgtatctg

SEQ ID NO: 75347 - DNA, 25 bp, Artificial
  Probe
tcatgtgatggattcttctgtatct

SEQ ID NO: 75348 - DNA, 25 bp, Artificial
  Probe
atcatgtgatggattcttctgtatc

SEQ ID NO: 75349 - DNA, 25 bp, Artificial
  Probe
aagaagtgagtgtggacatcaagaa

SEQ ID NO: 75350 - DNA, 25 bp, Artificial
  Probe
ggtaagaagtgagtgtggacatcaa

SEQ ID NO: 75351 - DNA, 25 bp, Artificial
  Probe
attaagggtaagaagtgagtgtgga

SEQ ID NO: 75352 - DNA, 25 bp, Artificial
  Probe
cattaagggtaagaagtgagtgtgg

SEQ ID NO: 75353 - DNA, 25 bp, Artificial
  Probe
agaagtgagtgtggacatcaagaac

SEQ ID NO: 75354 - DNA, 25 bp, Artificial
  Probe
tcattaagggtaagaagtgagtgtg

SEQ ID NO: 75355 - DNA, 25 bp, Artificial
  Probe
gacagtgtgatttctcagtgatttc

SEQ ID NO: 75356 - DNA, 25 bp, Artificial
  Probe
agacagtgtgatttctcagtgattt

SEQ ID NO: 75357 - DNA, 25 bp, Artificial
  Probe
cagtgtgatttctcagtgatttcct

SEQ ID NO: 75358 - DNA, 25 bp, Artificial
  Probe
acagtgtgatttctcagtgatttcc

SEQ ID NO: 75359 - DNA, 25 bp, Artificial
  Probe
ttaagggtaagaagtgagtgtggac

SEQ ID NO: 75360 - DNA, 25 bp, Artificial
  Probe
tttctcagtgatttcctgtagtgtt

SEQ ID NO: 75361 - DNA, 25 bp, Artificial
  Probe
atttctcagtgatttcctgtagtgt

SEQ ID NO: 75362 - DNA, 25 bp, Artificial
  Probe
tgtgatttctcagtgatttcctgta

SEQ ID NO: 75363 - DNA, 25 bp, Artificial
  Probe
tgatttctcagtgatttcctgtagt

SEQ ID NO: 75364 - DNA, 25 bp, Artificial
  Probe
gatttctcagtgatttcctgtagtg

SEQ ID NO: 75365 - DNA, 25 bp, Artificial
  Probe
gtgatttctcagtgatttcctgtag

SEQ ID NO: 75366 - DNA, 25 bp, Artificial
  Probe
ttctcagtgatttcctgtagtgttg

SEQ ID NO: 75367 - DNA, 25 bp, Artificial
  Probe
agtgtgatttctcagtgatttcctg

SEQ ID NO: 75368 - DNA, 25 bp, Artificial
  Probe
gtgtgatttctcagtgatttcctgt

SEQ ID NO: 75369 - DNA, 25 bp, Artificial
  Probe
ctcagtgatttcctgtagtgttgtc

SEQ ID NO: 75370 - DNA, 25 bp, Artificial
  Probe
gatttcctgtagtgttgtccctctc

SEQ ID NO: 75371 - DNA, 25 bp, Artificial
  Probe
tctcagtgatttcctgtagtgttgt

SEQ ID NO: 75372 - DNA, 25 bp, Artificial
  Probe
gaagtgagtgtggacatcaagaacc

SEQ ID NO: 75373 - DNA, 25 bp, Artificial
  Probe
aagcaggaacaacgacagaagattg

SEQ ID NO: 75374 - DNA, 25 bp, Artificial
  Probe
taagggtaagaagtgagtgtggaca

SEQ ID NO: 75375 - DNA, 25 bp, Artificial
  Probe
taggttcatttcatcaaagactcca

SEQ ID NO: 75376 - DNA, 25 bp, Artificial
  Probe
aggttcatttcatcaaagactccat

SEQ ID NO: 75377 - DNA, 25 bp, Artificial
  Probe
actaacttccaagagacatttcctg

SEQ ID NO: 75378 - DNA, 25 bp, Artificial
  Probe
ggttcatttcatcaaagactccata

SEQ ID NO: 75379 - DNA, 25 bp, Artificial
  Probe
tactaacttccaagagacatttcct

SEQ ID NO: 75380 - DNA, 25 bp, Artificial
  Probe
aatgttgcagaagccgagatatatg

SEQ ID NO: 75381 - DNA, 25 bp, Artificial
  Probe
cgactaggttcatttcatcaaagac

SEQ ID NO: 75382 - DNA, 25 bp, Artificial
  Probe
atagcgactaggttcatttcatcaa

SEQ ID NO: 75383 - DNA, 25 bp, Artificial
  Probe
tagcgactaggttcatttcatcaaa

SEQ ID NO: 75384 - DNA, 25 bp, Artificial
  Probe
gactcagatgacaaccagaacaagt

SEQ ID NO: 75385 - DNA, 25 bp, Artificial
  Probe
ctaggttcatttcatcaaagactcc

SEQ ID NO: 75386 - DNA, 25 bp, Artificial
  Probe
gatagcgactaggttcatttcatca

SEQ ID NO: 75387 - DNA, 25 bp, Artificial
  Probe
ctcagatgacaaccagaacaagtct

SEQ ID NO: 75388 - DNA, 25 bp, Artificial
  Probe
ttactaacttccaagagacatttcc

SEQ ID NO: 75389 - DNA, 25 bp, Artificial
  Probe
actaggttcatttcatcaaagactc

SEQ ID NO: 75390 - DNA, 25 bp, Artificial
  Probe
gactaggttcatttcatcaaagact

SEQ ID NO: 75391 - DNA, 25 bp, Artificial
  Probe
gcgactaggttcatttcatcaaaga

SEQ ID NO: 75392 - DNA, 25 bp, Artificial
  Probe
agcgactaggttcatttcatcaaag

SEQ ID NO: 75393 - DNA, 25 bp, Artificial
  Probe
ctaacttccaagagacatttcctgt

SEQ ID NO: 75394 - DNA, 25 bp, Artificial
  Probe
tgatagcgactaggttcatttcatc

SEQ ID NO: 75395 - DNA, 25 bp, Artificial
  Probe
actcagatgacaaccagaacaagtc

SEQ ID NO: 75396 - DNA, 25 bp, Artificial
  Probe
taacttccaagagacatttcctgtg

SEQ ID NO: 75397 - DNA, 25 bp, Artificial
  Probe
atcagatgatagcgactaggttcat

SEQ ID NO: 75398 - DNA, 25 bp, Artificial
  Probe
tcagatgatagcgactaggttcatt

SEQ ID NO: 75399 - DNA, 25 bp, Artificial
  Probe
cgactcagatgacaaccagaacaag

SEQ ID NO: 75400 - DNA, 25 bp, Artificial
  Probe
atgtccctgtactgaactctgaaag

SEQ ID NO: 75401 - DNA, 25 bp, Artificial
  Probe
tttctgttgttagagtgggaagagc

SEQ ID NO: 75402 - DNA, 25 bp, Artificial
  Probe
aaatgttgcagaagccgagatatat

SEQ ID NO: 75403 - DNA, 25 bp, Artificial
  Probe
catgtccctgtactgaactctgaaa

SEQ ID NO: 75404 - DNA, 25 bp, Artificial
  Probe
tttactaacttccaagagacatttc

SEQ ID NO: 75405 - DNA, 25 bp, Artificial
  Probe
aaacttgtaccaaatgttgcagaag

SEQ ID NO: 75406 - DNA, 25 bp, Artificial
  Probe
caaacttgtaccaaatgttgcagaa

SEQ ID NO: 75407 - DNA, 25 bp, Artificial
  Probe
caaatgttgcagaagccgagatata

SEQ ID NO: 75408 - DNA, 25 bp, Artificial
  Probe
atgatagcgactaggttcatttcat

SEQ ID NO: 75409 - DNA, 25 bp, Artificial
  Probe
agatgatagcgactaggttcatttc

SEQ ID NO: 75410 - DNA, 25 bp, Artificial
  Probe
gatgatagcgactaggttcatttca

SEQ ID NO: 75411 - DNA, 25 bp, Artificial
  Probe
cagatgatagcgactaggttcattt

SEQ ID NO: 75412 - DNA, 25 bp, Artificial
  Probe
ttttctgttgttagagtgggaagag

SEQ ID NO: 75413 - DNA, 25 bp, Artificial
  Probe
ctgaactctgaaaggcaggtgttta

SEQ ID NO: 75414 - DNA, 25 bp, Artificial
  Probe
atttactaacttccaagagacattt

SEQ ID NO: 75415 - DNA, 25 bp, Artificial
  Probe
aactctgaaaggcaggtgtttacag

SEQ ID NO: 75416 - DNA, 25 bp, Artificial
  Probe
gaactctgaaaggcaggtgtttaca

SEQ ID NO: 75417 - DNA, 25 bp, Artificial
  Probe
tgaactctgaaaggcaggtgtttac

SEQ ID NO: 75418 - DNA, 25 bp, Artificial
  Probe
gttcccttttgagttgagactgaaa

SEQ ID NO: 75419 - DNA, 25 bp, Artificial
  Probe
aacttccaagagacatttcctgtgc

SEQ ID NO: 75420 - DNA, 25 bp, Artificial
  Probe
ctgtcttgttcctctgacttcttaa

SEQ ID NO: 75421 - DNA, 25 bp, Artificial
  Probe
tctgtcttgttcctctgacttctta

SEQ ID NO: 75422 - DNA, 25 bp, Artificial
  Probe
ttctgtcttgttcctctgacttctt

SEQ ID NO: 75423 - DNA, 25 bp, Artificial
  Probe
tagccttggtaggtaatccatattg

SEQ ID NO: 75424 - DNA, 25 bp, Artificial
  Probe
catagccttggtaggtaatccatat

SEQ ID NO: 75425 - DNA, 25 bp, Artificial
  Probe
tattaatgcagagtaggttggacag

SEQ ID NO: 75426 - DNA, 25 bp, Artificial
  Probe
ttattaatgcagagtaggttggaca

SEQ ID NO: 75427 - DNA, 25 bp, Artificial
  Probe
ccatagccttggtaggtaatccata

SEQ ID NO: 75428 - DNA, 25 bp, Artificial
  Probe
atagccttggtaggtaatccatatt

SEQ ID NO: 75429 - DNA, 25 bp, Artificial
  Probe
tcttgttcctctgacttcttaaagc

SEQ ID NO: 75430 - DNA, 25 bp, Artificial
  Probe
tgttcctctgacttcttaaagcaag

SEQ ID NO: 75431 - DNA, 25 bp, Artificial
  Probe
cttgttcctctgacttcttaaagca

SEQ ID NO: 75432 - DNA, 25 bp, Artificial
  Probe
ttgttcctctgacttcttaaagcaa

SEQ ID NO: 75433 - DNA, 25 bp, Artificial
  Probe
agccttggtaggtaatccatattgg

SEQ ID NO: 75434 - DNA, 25 bp, Artificial
  Probe
ttagaaagcactgttggaaccatag

SEQ ID NO: 75435 - DNA, 25 bp, Artificial
  Probe
attaatgcagagtaggttggacagt

SEQ ID NO: 75436 - DNA, 25 bp, Artificial
  Probe
cttagaaagcactgttggaaccata

SEQ ID NO: 75437 - DNA, 25 bp, Artificial
  Probe
tgtcttgttcctctgacttcttaaa

SEQ ID NO: 75438 - DNA, 25 bp, Artificial
  Probe
gtcttgttcctctgacttcttaaag

SEQ ID NO: 75439 - DNA, 25 bp, Artificial
  Probe
gttcctctgacttcttaaagcaagc

SEQ ID NO: 75440 - DNA, 25 bp, Artificial
  Probe
ttaatgcagagtaggttggacagtg

SEQ ID NO: 75441 - DNA, 25 bp, Artificial
  Probe
tttctgtcttgttcctctgacttct

SEQ ID NO: 75442 - DNA, 25 bp, Artificial
  Probe
acttagaaagcactgttggaaccat

SEQ ID NO: 75443 - DNA, 25 bp, Artificial
  Probe
tttattaatgcagagtaggttggac

SEQ ID NO: 75444 - DNA, 25 bp, Artificial
  Probe
ctttattaatgcagagtaggttgga

SEQ ID NO: 75445 - DNA, 25 bp, Artificial
  Probe
tagaaagcactgttggaaccatagc

SEQ ID NO: 75446 - DNA, 25 bp, Artificial
  Probe
tctttattaatgcagagtaggttgg

SEQ ID NO: 75447 - DNA, 25 bp, Artificial
  Probe
ttcctctgacttcttaaagcaagct

SEQ ID NO: 75448 - DNA, 25 bp, Artificial
  Probe
aaagtgagttttctgtcttgttcct

SEQ ID NO: 75449 - DNA, 25 bp, Artificial
  Probe
cacttagaaagcactgttggaacca

SEQ ID NO: 75450 - DNA, 25 bp, Artificial
  Probe
aagtgagttttctgtcttgttcctc

SEQ ID NO: 75451 - DNA, 25 bp, Artificial
  Probe
gaactacagccaggcacttagaaag

SEQ ID NO: 75452 - DNA, 25 bp, Artificial
  Probe
taatgcagagtaggttggacagtgg

SEQ ID NO: 75453 - DNA, 25 bp, Artificial
  Probe
ttttctgtcttgttcctctgacttc

SEQ ID NO: 75454 - DNA, 25 bp, Artificial
  Probe
aaaagtgagttttctgtcttgttcc

SEQ ID NO: 75455 - DNA, 25 bp, Artificial
  Probe
acaattttctttcccagtttgatac

SEQ ID NO: 75456 - DNA, 25 bp, Artificial
  Probe
gttttctgtcttgttcctctgactt

SEQ ID NO: 75457 - DNA, 25 bp, Artificial
  Probe
gtgagttttctgtcttgttcctctg

SEQ ID NO: 75458 - DNA, 25 bp, Artificial
  Probe
agtgagttttctgtcttgttcctct

SEQ ID NO: 75459 - DNA, 25 bp, Artificial
  Probe
tgagttttctgtcttgttcctctga

SEQ ID NO: 75460 - DNA, 25 bp, Artificial
  Probe
ctgaactacagccaggcacttagaa

SEQ ID NO: 75461 - DNA, 25 bp, Artificial
  Probe
ttaactgaaggaattgtgtcctcca

SEQ ID NO: 75462 - DNA, 25 bp, Artificial
  Probe
gagttttctgtcttgttcctctgac

SEQ ID NO: 75463 - DNA, 25 bp, Artificial
  Probe
caattttctttcccagtttgatact

SEQ ID NO: 75464 - DNA, 25 bp, Artificial
  Probe
tttcataacaattttctttcccagt

SEQ ID NO: 75465 - DNA, 25 bp, Artificial
  Probe
cactttctttaattgttcctcctga

SEQ ID NO: 75466 - DNA, 25 bp, Artificial
  Probe
tcactttctttaattgttcctcctg

SEQ ID NO: 75467 - DNA, 25 bp, Artificial
  Probe
atcactttctttaattgttcctcct

SEQ ID NO: 75468 - DNA, 25 bp, Artificial
  Probe
gttgtagacagtttgtgtatgtgtg

SEQ ID NO: 75469 - DNA, 25 bp, Artificial
  Probe
ttgtagacagtttgtgtatgtgtgt

SEQ ID NO: 75470 - DNA, 25 bp, Artificial
  Probe
tcttgacaggatcactgagactctt

SEQ ID NO: 75471 - DNA, 25 bp, Artificial
  Probe
tagacagtttgtgtatgtgtgtgtg

SEQ ID NO: 75472 - DNA, 25 bp, Artificial
  Probe
gtagacagtttgtgtatgtgtgtgt

SEQ ID NO: 75473 - DNA, 25 bp, Artificial
  Probe
tgtagacagtttgtgtatgtgtgtg

SEQ ID NO: 75474 - DNA, 25 bp, Artificial
  Probe
ctttgactctctgactagggcttag

SEQ ID NO: 75475 - DNA, 25 bp, Artificial
  Probe
cgttgtagacagtttgtgtatgtgt

SEQ ID NO: 75476 - DNA, 25 bp, Artificial
  Probe
aatcactttctttaattgttcctcc

SEQ ID NO: 75477 - DNA, 25 bp, Artificial
  Probe
cagatgtcttgacaggatcactgag

SEQ ID NO: 75478 - DNA, 25 bp, Artificial
  Probe
acacacatggtcattcatttcagtc

SEQ ID NO: 75479 - DNA, 25 bp, Artificial
  Probe
tttgactctctgactagggcttaga

SEQ ID NO: 75480 - DNA, 25 bp, Artificial
  Probe
agatgtcttgacaggatcactgaga

SEQ ID NO: 75481 - DNA, 25 bp, Artificial
  Probe
actttgactctctgactagggctta

SEQ ID NO: 75482 - DNA, 25 bp, Artificial
  Probe
ccgttgtagacagtttgtgtatgtg

SEQ ID NO: 75483 - DNA, 25 bp, Artificial
  Probe
ttgtgtatgtgtgtgtgtgtgtgtg

SEQ ID NO: 75484 - DNA, 25 bp, Artificial
  Probe
cagtttgtgtatgtgtgtgtgtgtg

SEQ ID NO: 75485 - DNA, 25 bp, Artificial
  Probe
agacacacatggtcattcatttcag

SEQ ID NO: 75486 - DNA, 25 bp, Artificial
  Probe
cacacatggtcattcatttcagtcc

SEQ ID NO: 75487 - DNA, 25 bp, Artificial
  Probe
gacacacatggtcattcatttcagt

SEQ ID NO: 75488 - DNA, 25 bp, Artificial
  Probe
cagacacacatggtcattcatttca

SEQ ID NO: 75489 - DNA, 25 bp, Artificial
  Probe
cttgacaggatcactgagactcttt

SEQ ID NO: 75490 - DNA, 25 bp, Artificial
  Probe
ttgactctctgactagggcttagac

SEQ ID NO: 75491 - DNA, 25 bp, Artificial
  Probe
gtttgtgtatgtgtgtgtgtgtgtg

SEQ ID NO: 75492 - DNA, 25 bp, Artificial
  Probe
agtttgtgtatgtgtgtgtgtgtgt

SEQ ID NO: 75493 - DNA, 25 bp, Artificial
  Probe
gacagtttgtgtatgtgtgtgtgtg

SEQ ID NO: 75494 - DNA, 25 bp, Artificial
  Probe
agacagtttgtgtatgtgtgtgtgt

SEQ ID NO: 75495 - DNA, 25 bp, Artificial
  Probe
tgaccactttgactctctgactagg

SEQ ID NO: 75496 - DNA, 25 bp, Artificial
  Probe
tttgtgtatgtgtgtgtgtgtgtgt

SEQ ID NO: 75497 - DNA, 25 bp, Artificial
  Probe
cccgttgtagacagtttgtgtatgt

SEQ ID NO: 75498 - DNA, 25 bp, Artificial
  Probe
ctctctgactagggcttagaccttt

SEQ ID NO: 75499 - DNA, 25 bp, Artificial
  Probe
ccagatgtcttgacaggatcactga

SEQ ID NO: 75500 - DNA, 25 bp, Artificial
  Probe
acagtttgtgtatgtgtgtgtgtgt

SEQ ID NO: 75501 - DNA, 25 bp, Artificial
  Probe
catggtcattcatttcagtccacac

SEQ ID NO: 75502 - DNA, 25 bp, Artificial
  Probe
cacatggtcattcatttcagtccac

SEQ ID NO: 75503 - DNA, 25 bp, Artificial
  Probe
aaatcactttctttaattgttcctc

SEQ ID NO: 75504 - DNA, 25 bp, Artificial
  Probe
gcagacacacatggtcattcatttc

SEQ ID NO: 75505 - DNA, 25 bp, Artificial
  Probe
cactttgactctctgactagggctt

SEQ ID NO: 75506 - DNA, 25 bp, Artificial
  Probe
gaccactttgactctctgactaggg

SEQ ID NO: 75507 - DNA, 25 bp, Artificial
  Probe
acatggtcattcatttcagtccaca

SEQ ID NO: 75508 - DNA, 25 bp, Artificial
  Probe
acacatggtcattcatttcagtcca

SEQ ID NO: 75509 - DNA, 25 bp, Artificial
  Probe
atggtcattcatttcagtccacacc

SEQ ID NO: 75510 - DNA, 25 bp, Artificial
  Probe
gtcataactcacattcttcattcct

SEQ ID NO: 75511 - DNA, 25 bp, Artificial
  Probe
agtcataactcacattcttcattcc

SEQ ID NO: 75512 - DNA, 25 bp, Artificial
  Probe
tcataactcacattcttcattccta

SEQ ID NO: 75513 - DNA, 25 bp, Artificial
  Probe
cataactcacattcttcattcctaa

SEQ ID NO: 75514 - DNA, 25 bp, Artificial
  Probe
ttcattcctaagaatctggagctag

SEQ ID NO: 75515 - DNA, 25 bp, Artificial
  Probe
cttcattcctaagaatctggagcta

SEQ ID NO: 75516 - DNA, 25 bp, Artificial
  Probe
ctcatttccctctctaccttccaag

SEQ ID NO: 75517 - DNA, 25 bp, Artificial
  Probe
ataactcacattcttcattcctaag

SEQ ID NO: 75518 - DNA, 25 bp, Artificial
  Probe
tctcatttccctctctaccttccaa

SEQ ID NO: 75519 - DNA, 25 bp, Artificial
  Probe
tcttcattcctaagaatctggagct

SEQ ID NO: 75520 - DNA, 25 bp, Artificial
  Probe
ctgtctggtctcatttccctctcta

SEQ ID NO: 75521 - DNA, 25 bp, Artificial
  Probe
taactcacattcttcattcctaaga

SEQ ID NO: 75522 - DNA, 25 bp, Artificial
  Probe
gtctcatttccctctctaccttcca

SEQ ID NO: 75523 - DNA, 25 bp, Artificial
  Probe
tgtctggtctcatttccctctctac

SEQ ID NO: 75524 - DNA, 25 bp, Artificial
  Probe
ttggagtcataactcacattcttca

SEQ ID NO: 75525 - DNA, 25 bp, Artificial
  Probe
tggagtcataactcacattcttcat

SEQ ID NO: 75526 - DNA, 25 bp, Artificial
  Probe
gttggagtcataactcacattcttc

SEQ ID NO: 75527 - DNA, 25 bp, Artificial
  Probe
ggttggagtcataactcacattctt

SEQ ID NO: 75528 - DNA, 25 bp, Artificial
  Probe
ggagtcataactcacattcttcatt

SEQ ID NO: 75529 - DNA, 25 bp, Artificial
  Probe
agctctaagggttggagtcataact

SEQ ID NO: 75530 - DNA, 25 bp, Artificial
  Probe
cagctctaagggttggagtcataac

SEQ ID NO: 75531 - DNA, 25 bp, Artificial
  Probe
ctggtctcatttccctctctacctt

SEQ ID NO: 75532 - DNA, 25 bp, Artificial
  Probe
gagtcataactcacattcttcattc

SEQ ID NO: 75533 - DNA, 25 bp, Artificial
  Probe
tcagctctaagggttggagtcataa

SEQ ID NO: 75534 - DNA, 25 bp, Artificial
  Probe
tggtctcatttccctctctaccttc

SEQ ID NO: 75535 - DNA, 25 bp, Artificial
  Probe
ctcagctctaagggttggagtcata

SEQ ID NO: 75536 - DNA, 25 bp, Artificial
  Probe
taccctttctcctgctaacccttct

SEQ ID NO: 75537 - DNA, 25 bp, Artificial
  Probe
actgtctggtctcatttccctctct

SEQ ID NO: 75538 - DNA, 25 bp, Artificial
  Probe
ggtctcatttccctctctaccttcc

SEQ ID NO: 75539 - DNA, 25 bp, Artificial
  Probe
ttcttcattcctaagaatctggagc

SEQ ID NO: 75540 - DNA, 25 bp, Artificial
  Probe
taagggttggagtcataactcacat

SEQ ID NO: 75541 - DNA, 25 bp, Artificial
  Probe
ctctaagggttggagtcataactca

SEQ ID NO: 75542 - DNA, 25 bp, Artificial
  Probe
tctggtctcatttccctctctacct

SEQ ID NO: 75543 - DNA, 25 bp, Artificial
  Probe
gtctggtctcatttccctctctacc

SEQ ID NO: 75544 - DNA, 25 bp, Artificial
  Probe
gactgtctggtctcatttccctctc

SEQ ID NO: 75545 - DNA, 25 bp, Artificial
  Probe
tctaagggttggagtcataactcac

SEQ ID NO: 75546 - DNA, 25 bp, Artificial
  Probe
ctaagggttggagtcataactcaca

SEQ ID NO: 75547 - DNA, 25 bp, Artificial
  Probe
aagggttggagtcataactcacatt

SEQ ID NO: 75548 - DNA, 25 bp, Artificial
  Probe
cctttctcctgctaacccttctcag

SEQ ID NO: 75549 - DNA, 25 bp, Artificial
  Probe
ggtagaaaggaggcttggctgtatc

SEQ ID NO: 75550 - DNA, 25 bp, Artificial
  Probe
aactcacattcttcattcctaagaa

SEQ ID NO: 75551 - DNA, 25 bp, Artificial
  Probe
gggttggagtcataactcacattct

SEQ ID NO: 75552 - DNA, 25 bp, Artificial
  Probe
agggttggagtcataactcacattc

SEQ ID NO: 75553 - DNA, 25 bp, Artificial
  Probe
tattgaacatttggggtttcagttg

SEQ ID NO: 75554 - DNA, 25 bp, Artificial
  Probe
gctctaagggttggagtcataactc

SEQ ID NO: 75555 - DNA, 25 bp, Artificial
  Probe
ttcctggattagtcacatggatatg

SEQ ID NO: 75556 - DNA, 25 bp, Artificial
  Probe
ttcaacaagaagagtaccagcaaca

SEQ ID NO: 75557 - DNA, 25 bp, Artificial
  Probe
tttagggtttggtttgggtttatat

SEQ ID NO: 75558 - DNA, 25 bp, Artificial
  Probe
tcaacaagaagagtaccagcaacag

SEQ ID NO: 75559 - DNA, 25 bp, Artificial
  Probe
tcctggattagtcacatggatatgc

SEQ ID NO: 75560 - DNA, 25 bp, Artificial
  Probe
cctggattagtcacatggatatgcc

SEQ ID NO: 75561 - DNA, 25 bp, Artificial
  Probe
ctggattagtcacatggatatgccg

SEQ ID NO: 75562 - DNA, 25 bp, Artificial
  Probe
tggattagtcacatggatatgccga

SEQ ID NO: 75563 - DNA, 25 bp, Artificial
  Probe
ctttcctggattagtcacatggata

SEQ ID NO: 75564 - DNA, 25 bp, Artificial
  Probe
ggattagtcacatggatatgccgac

SEQ ID NO: 75565 - DNA, 25 bp, Artificial
  Probe
tttcctggattagtcacatggatat

SEQ ID NO: 75566 - DNA, 25 bp, Artificial
  Probe
cttcaacaagaagagtaccagcaac

SEQ ID NO: 75567 - DNA, 25 bp, Artificial
  Probe
caacttcaacaagaagagtaccagc

SEQ ID NO: 75568 - DNA, 25 bp, Artificial
  Probe
gcaacttcaacaagaagagtaccag

SEQ ID NO: 75569 - DNA, 25 bp, Artificial
  Probe
cagcaacttcaacaagaagagtacc

SEQ ID NO: 75570 - DNA, 25 bp, Artificial
  Probe
ccagcaacttcaacaagaagagtac

SEQ ID NO: 75571 - DNA, 25 bp, Artificial
  Probe
caagaagagtaccagcaacagcaag

SEQ ID NO: 75572 - DNA, 25 bp, Artificial
  Probe
gttttagggtttggtttgggtttat

SEQ ID NO: 75573 - DNA, 25 bp, Artificial
  Probe
ctgtctttgttttagggtttggttt

SEQ ID NO: 75574 - DNA, 25 bp, Artificial
  Probe
tgtctttgttttagggtttggtttg

SEQ ID NO: 75575 - DNA, 25 bp, Artificial
  Probe
acttcaacaagaagagtaccagcaa

SEQ ID NO: 75576 - DNA, 25 bp, Artificial
  Probe
aacttcaacaagaagagtaccagca

SEQ ID NO: 75577 - DNA, 25 bp, Artificial
  Probe
agcaacttcaacaagaagagtacca

SEQ ID NO: 75578 - DNA, 25 bp, Artificial
  Probe
tgttttagggtttggtttgggttta

SEQ ID NO: 75579 - DNA, 25 bp, Artificial
  Probe
gtctttgttttagggtttggtttgg

SEQ ID NO: 75580 - DNA, 25 bp, Artificial
  Probe
cctttcctggattagtcacatggat

SEQ ID NO: 75581 - DNA, 25 bp, Artificial
  Probe
caacaagaagagtaccagcaacagc

SEQ ID NO: 75582 - DNA, 25 bp, Artificial
  Probe
ttttagggtttggtttgggtttata

SEQ ID NO: 75583 - DNA, 25 bp, Artificial
  Probe
ttgttttagggtttggtttgggttt

SEQ ID NO: 75584 - DNA, 25 bp, Artificial
  Probe
tttgttttagggtttggtttgggtt

SEQ ID NO: 75585 - DNA, 25 bp, Artificial
  Probe
tctttgttttagggtttggtttggg

SEQ ID NO: 75586 - DNA, 25 bp, Artificial
  Probe
acaagaagagtaccagcaacagcaa

SEQ ID NO: 75587 - DNA, 25 bp, Artificial
  Probe
aacaagaagagtaccagcaacagca

SEQ ID NO: 75588 - DNA, 25 bp, Artificial
  Probe
ctttgttttagggtttggtttgggt

SEQ ID NO: 75589 - DNA, 25 bp, Artificial
  Probe
cctgtctttgttttagggtttggtt

SEQ ID NO: 75590 - DNA, 25 bp, Artificial
  Probe
ccctttcctggattagtcacatgga

SEQ ID NO: 75591 - DNA, 25 bp, Artificial
  Probe
cccagcaacttcaacaagaagagta

SEQ ID NO: 75592 - DNA, 25 bp, Artificial
  Probe
gcctgtctttgttttagggtttggt

SEQ ID NO: 75593 - DNA, 25 bp, Artificial
  Probe
gtcccctttcctggattagtcacat

SEQ ID NO: 75594 - DNA, 25 bp, Artificial
  Probe
tcccctttcctggattagtcacatg

SEQ ID NO: 75595 - DNA, 25 bp, Artificial
  Probe
cagtcccctttcctggattagtcac

SEQ ID NO: 75596 - DNA, 25 bp, Artificial
  Probe
cccctttcctggattagtcacatgg

SEQ ID NO: 75597 - DNA, 25 bp, Artificial
  Probe
agtcccctttcctggattagtcaca

SEQ ID NO: 75598 - DNA, 25 bp, Artificial
  Probe
ggcctgtctttgttttagggtttgg

SEQ ID NO: 75599 - DNA, 25 bp, Artificial
  Probe
ggctagttacctcacgatcttagtt

SEQ ID NO: 75600 - DNA, 25 bp, Artificial
  Probe
ctgactcctcattgaataatccagg

SEQ ID NO: 75601 - DNA, 25 bp, Artificial
  Probe
gctgactcctcattgaataatccag

SEQ ID NO: 75602 - DNA, 25 bp, Artificial
  Probe
attgatactaccttctagttgagcc

SEQ ID NO: 75603 - DNA, 25 bp, Artificial
  Probe
tttacattcctttctaccttccctg

SEQ ID NO: 75604 - DNA, 25 bp, Artificial
  Probe
gtcatcacaaacatctccacaatag

SEQ ID NO: 75605 - DNA, 25 bp, Artificial
  Probe
agtcatcacaaacatctccacaata

SEQ ID NO: 75606 - DNA, 25 bp, Artificial
  Probe
atttacattcctttctaccttccct

SEQ ID NO: 75607 - DNA, 25 bp, Artificial
  Probe
aaggctagttacctcacgatcttag

SEQ ID NO: 75608 - DNA, 25 bp, Artificial
  Probe
ttctaataattgtgcctgtttcctg

SEQ ID NO: 75609 - DNA, 25 bp, Artificial
  Probe
gattgatactaccttctagttgagc

SEQ ID NO: 75610 - DNA, 25 bp, Artificial
  Probe
gagctgactcctcattgaataatcc

SEQ ID NO: 75611 - DNA, 25 bp, Artificial
  Probe
tcatcacaaacatctccacaataga

SEQ ID NO: 75612 - DNA, 25 bp, Artificial
  Probe
tctaataattgtgcctgtttcctgg

SEQ ID NO: 75613 - DNA, 25 bp, Artificial
  Probe
tttctaataattgtgcctgtttcct

SEQ ID NO: 75614 - DNA, 25 bp, Artificial
  Probe
agctgactcctcattgaataatcca

SEQ ID NO: 75615 - DNA, 25 bp, Artificial
  Probe
tcgctaaagattgatactaccttct

SEQ ID NO: 75616 - DNA, 25 bp, Artificial
  Probe
ctaataattgtgcctgtttcctgga

SEQ ID NO: 75617 - DNA, 25 bp, Artificial
  Probe
ctggaggcttaaatggaaataggtg

SEQ ID NO: 75618 - DNA, 25 bp, Artificial
  Probe
aatttacattcctttctaccttccc

SEQ ID NO: 75619 - DNA, 25 bp, Artificial
  Probe
gtccaatttacattcctttctacct

SEQ ID NO: 75620 - DNA, 25 bp, Artificial
  Probe
tggtccaatttacattcctttctac

SEQ ID NO: 75621 - DNA, 25 bp, Artificial
  Probe
gtggtccaatttacattcctttcta

SEQ ID NO: 75622 - DNA, 25 bp, Artificial
  Probe
tgactcctcattgaataatccaggc

SEQ ID NO: 75623 - DNA, 25 bp, Artificial
  Probe
ttacctcacgatcttagtttgtctc

SEQ ID NO: 75624 - DNA, 25 bp, Artificial
  Probe
gctagttacctcacgatcttagttt

SEQ ID NO: 75625 - DNA, 25 bp, Artificial
  Probe
gttacctcacgatcttagtttgtct

SEQ ID NO: 75626 - DNA, 25 bp, Artificial
  Probe
agttacctcacgatcttagtttgtc

SEQ ID NO: 75627 - DNA, 25 bp, Artificial
  Probe
ggtggtccaatttacattcctttct

SEQ ID NO: 75628 - DNA, 25 bp, Artificial
  Probe
taataattgtgcctgtttcctggac

SEQ ID NO: 75629 - DNA, 25 bp, Artificial
  Probe
catcacaaacatctccacaatagag

SEQ ID NO: 75630 - DNA, 25 bp, Artificial
  Probe
tagttacctcacgatcttagtttgt

SEQ ID NO: 75631 - DNA, 25 bp, Artificial
  Probe
ttcgctaaagattgatactaccttc

SEQ ID NO: 75632 - DNA, 25 bp, Artificial
  Probe
aaacatctccacaatagagcatctg

SEQ ID NO: 75633 - DNA, 25 bp, Artificial
  Probe
caaacatctccacaatagagcatct

SEQ ID NO: 75634 - DNA, 25 bp, Artificial
  Probe
attcctttctaccttccctgctaag

SEQ ID NO: 75635 - DNA, 25 bp, Artificial
  Probe
ctatctgttaagaggctcagcttct

SEQ ID NO: 75636 - DNA, 25 bp, Artificial
  Probe
tctatctgttaagaggctcagcttc

SEQ ID NO: 75637 - DNA, 25 bp, Artificial
  Probe
ctagttacctcacgatcttagtttg

SEQ ID NO: 75638 - DNA, 25 bp, Artificial
  Probe
aggctagttacctcacgatcttagt

SEQ ID NO: 75639 - DNA, 25 bp, Artificial
  Probe
cattcctttctaccttccctgctaa

SEQ ID NO: 75640 - DNA, 25 bp, Artificial
  Probe
acaaacatctccacaatagagcatc

SEQ ID NO: 75641 - DNA, 25 bp, Artificial
  Probe
atcacaaacatctccacaatagagc

SEQ ID NO: 75642 - DNA, 25 bp, Artificial
  Probe
tccaatttacattcctttctacctt

SEQ ID NO: 75643 - DNA, 25 bp, Artificial
  Probe
tttcgctaaagattgatactacctt

SEQ ID NO: 75644 - DNA, 25 bp, Artificial
  Probe
tattcatctctgacataggacacaa

SEQ ID NO: 75645 - DNA, 25 bp, Artificial
  Probe
ctattcatctctgacataggacaca

SEQ ID NO: 75646 - DNA, 25 bp, Artificial
  Probe
gctattcatctctgacataggacac

SEQ ID NO: 75647 - DNA, 25 bp, Artificial
  Probe
aacgctattcatctctgacatagga

SEQ ID NO: 75648 - DNA, 25 bp, Artificial
  Probe
gcaccaattcaatatactgtgagac

SEQ ID NO: 75649 - DNA, 25 bp, Artificial
  Probe
cgctattcatctctgacataggaca

SEQ ID NO: 75650 - DNA, 25 bp, Artificial
  Probe
acgctattcatctctgacataggac

SEQ ID NO: 75651 - DNA, 25 bp, Artificial
  Probe
accaattcaatatactgtgagactt

SEQ ID NO: 75652 - DNA, 25 bp, Artificial
  Probe
caccaattcaatatactgtgagact

SEQ ID NO: 75653 - DNA, 25 bp, Artificial
  Probe
ttcatgcaccaattcaatatactgt

SEQ ID NO: 75654 - DNA, 25 bp, Artificial
  Probe
aagctacttagttacctaacactgc

SEQ ID NO: 75655 - DNA, 25 bp, Artificial
  Probe
catctctgacataggacacaaacac

SEQ ID NO: 75656 - DNA, 25 bp, Artificial
  Probe
ttcaatatactgtgagacttaggtt

SEQ ID NO: 75657 - DNA, 25 bp, Artificial
  Probe
attcatctctgacataggacacaaa

SEQ ID NO: 75658 - DNA, 25 bp, Artificial
  Probe
ttagaaacgctattcatctctgaca

SEQ ID NO: 75659 - DNA, 25 bp, Artificial
  Probe
agaaacgctattcatctctgacata

SEQ ID NO: 75660 - DNA, 25 bp, Artificial
  Probe
tagaaacgctattcatctctgacat

SEQ ID NO: 75661 - DNA, 25 bp, Artificial
  Probe
ttcatctctgacataggacacaaac

SEQ ID NO: 75662 - DNA, 25 bp, Artificial
  Probe
tactgtgagacttaggtttctttca

SEQ ID NO: 75663 - DNA, 25 bp, Artificial
  Probe
gcaaattagaaacgctattcatctc

SEQ ID NO: 75664 - DNA, 25 bp, Artificial
  Probe
tacttagttacctaacactgcactc

SEQ ID NO: 75665 - DNA, 25 bp, Artificial
  Probe
ctacttagttacctaacactgcact

SEQ ID NO: 75666 - DNA, 25 bp, Artificial
  Probe
attcaatatactgtgagacttaggt

SEQ ID NO: 75667 - DNA, 25 bp, Artificial
  Probe
aaacgctattcatctctgacatagg

SEQ ID NO: 75668 - DNA, 25 bp, Artificial
  Probe
attagaaacgctattcatctctgac

SEQ ID NO: 75669 - DNA, 25 bp, Artificial
  Probe
ctggcttcctccttaaagtaaactt

SEQ ID NO: 75670 - DNA, 25 bp, Artificial
  Probe
tgcaccaattcaatatactgtgaga

SEQ ID NO: 75671 - DNA, 25 bp, Artificial
  Probe
catgcaccaattcaatatactgtga

SEQ ID NO: 75672 - DNA, 25 bp, Artificial
  Probe
tcatgcaccaattcaatatactgtg

SEQ ID NO: 75673 - DNA, 25 bp, Artificial
  Probe
gaaacgctattcatctctgacatag

SEQ ID NO: 75674 - DNA, 25 bp, Artificial
  Probe
ccaatagcagcataggatgtcaaag

SEQ ID NO: 75675 - DNA, 25 bp, Artificial
  Probe
atactgtgagacttaggtttctttc

SEQ ID NO: 75676 - DNA, 25 bp, Artificial
  Probe
atgcaccaattcaatatactgtgag

SEQ ID NO: 75677 - DNA, 25 bp, Artificial
  Probe
tgagacttaggtttctttcacattt

SEQ ID NO: 75678 - DNA, 25 bp, Artificial
  Probe
tcatctctgacataggacacaaaca

SEQ ID NO: 75679 - DNA, 25 bp, Artificial
  Probe
cttagttacctaacactgcactcac

SEQ ID NO: 75680 - DNA, 25 bp, Artificial
  Probe
tagttacctaacactgcactcactc

SEQ ID NO: 75681 - DNA, 25 bp, Artificial
  Probe
agtgttcatctgtttgacaaggaaa

SEQ ID NO: 75682 - DNA, 25 bp, Artificial
  Probe
gctacttagttacctaacactgcac

SEQ ID NO: 75683 - DNA, 25 bp, Artificial
  Probe
agctacttagttacctaacactgca

SEQ ID NO: 75684 - DNA, 25 bp, Artificial
  Probe
atctctgacataggacacaaacacc

SEQ ID NO: 75685 - DNA, 25 bp, Artificial
  Probe
ttagttacctaacactgcactcact

SEQ ID NO: 75686 - DNA, 25 bp, Artificial
  Probe
acttagttacctaacactgcactca

SEQ ID NO: 75687 - DNA, 25 bp, Artificial
  Probe
gtgtctgctactgtgctttaagaac

SEQ ID NO: 75688 - DNA, 25 bp, Artificial
  Probe
tactgtgctttaagaacgggtagtt

SEQ ID NO: 75689 - DNA, 25 bp, Artificial
  Probe
actctgtgaacactttatttaagga

SEQ ID NO: 75690 - DNA, 25 bp, Artificial
  Probe
ctctgtgaacactttatttaaggac

SEQ ID NO: 75691 - DNA, 25 bp, Artificial
  Probe
tctgtgaacactttatttaaggaca

SEQ ID NO: 75692 - DNA, 25 bp, Artificial
  Probe
ctgtgaacactttatttaaggacat

SEQ ID NO: 75693 - DNA, 25 bp, Artificial
  Probe
tactctgtgaacactttatttaagg

SEQ ID NO: 75694 - DNA, 25 bp, Artificial
  Probe
tgtgaacactttatttaaggacatt

SEQ ID NO: 75695 - DNA, 25 bp, Artificial
  Probe
tgaacactttatttaaggacattct

SEQ ID NO: 75696 - DNA, 25 bp, Artificial
  Probe
gtgaacactttatttaaggacattc

SEQ ID NO: 75697 - DNA, 25 bp, Artificial
  Probe
ttactccttgggctcatcgactatc

SEQ ID NO: 75698 - DNA, 25 bp, Artificial
  Probe
cttactccttgggctcatcgactat

SEQ ID NO: 75699 - DNA, 25 bp, Artificial
  Probe
gaacactttatttaaggacattctt

SEQ ID NO: 75700 - DNA, 25 bp, Artificial
  Probe
aacactttatttaaggacattcttt

SEQ ID NO: 75701 - DNA, 25 bp, Artificial
  Probe
ttactctgtgaacactttatttaag

SEQ ID NO: 75702 - DNA, 25 bp, Artificial
  Probe
gatggtacagggtgtgacaacatga

SEQ ID NO: 75703 - DNA, 25 bp, Artificial
  Probe
atggtacagggtgtgacaacatgac

SEQ ID NO: 75704 - DNA, 25 bp, Artificial
  Probe
ttgtacactttcaagcaacactttt

SEQ ID NO: 75705 - DNA, 25 bp, Artificial
  Probe
gttgtacactttcaagcaacacttt

SEQ ID NO: 75706 - DNA, 25 bp, Artificial
  Probe
gtgtgacaacatgacgtgcatcatc

SEQ ID NO: 75707 - DNA, 25 bp, Artificial
  Probe
acccgagactgagttttgtcctttt

SEQ ID NO: 75708 - DNA, 25 bp, Artificial
  Probe
acactttatttaaggacattctttt

SEQ ID NO: 75709 - DNA, 25 bp, Artificial
  Probe
gacccgagactgagttttgtccttt

SEQ ID NO: 75710 - DNA, 25 bp, Artificial
  Probe
attgtgctcatatctggagaatgtg

SEQ ID NO: 75711 - DNA, 25 bp, Artificial
  Probe
ctcatatctggagaatgtggaggac

SEQ ID NO: 75712 - DNA, 25 bp, Artificial
  Probe
catacatacggttctccagtcacac

SEQ ID NO: 75713 - DNA, 25 bp, Artificial
  Probe
ttgtgctcatatctggagaatgtgg

SEQ ID NO: 75714 - DNA, 25 bp, Artificial
  Probe
tcatatctggagaatgtggaggaca

SEQ ID NO: 75715 - DNA, 25 bp, Artificial
  Probe
cattgtgctcatatctggagaatgt

SEQ ID NO: 75716 - DNA, 25 bp, Artificial
  Probe
gtgctcatatctggagaatgtggag

SEQ ID NO: 75717 - DNA, 25 bp, Artificial
  Probe
catatctggagaatgtggaggacac

SEQ ID NO: 75718 - DNA, 25 bp, Artificial
  Probe
ccattgtgctcatatctggagaatg

SEQ ID NO: 75719 - DNA, 25 bp, Artificial
  Probe
atacatacggttctccagtcacact

SEQ ID NO: 75720 - DNA, 25 bp, Artificial
  Probe
catcaaagcatctctgtgttacaac

SEQ ID NO: 75721 - DNA, 25 bp, Artificial
  Probe
tgtgctcatatctggagaatgtgga

SEQ ID NO: 75722 - DNA, 25 bp, Artificial
  Probe
atcaaagcatctctgtgttacaacc

SEQ ID NO: 75723 - DNA, 25 bp, Artificial
  Probe
ccatcaaagcatctctgtgttacaa

SEQ ID NO: 75724 - DNA, 25 bp, Artificial
  Probe
ccatacatacggttctccagtcaca

SEQ ID NO: 75725 - DNA, 25 bp, Artificial
  Probe
gctcatatctggagaatgtggagga

SEQ ID NO: 75726 - DNA, 25 bp, Artificial
  Probe
ccagtaaggaatcagcaggttctct

SEQ ID NO: 75727 - DNA, 25 bp, Artificial
  Probe
tgctcatatctggagaatgtggagg

SEQ ID NO: 75728 - DNA, 25 bp, Artificial
  Probe
gtagcactctggtggaaagaaattc

SEQ ID NO: 75729 - DNA, 25 bp, Artificial
  Probe
aagcatctctgtgttacaacccatt

SEQ ID NO: 75730 - DNA, 25 bp, Artificial
  Probe
aaagcatctctgtgttacaacccat

SEQ ID NO: 75731 - DNA, 25 bp, Artificial
  Probe
tcaccatacatacggttctccagtc

SEQ ID NO: 75732 - DNA, 25 bp, Artificial
  Probe
ctcaccatacatacggttctccagt

SEQ ID NO: 75733 - DNA, 25 bp, Artificial
  Probe
cccattgtgctcatatctggagaat

SEQ ID NO: 75734 - DNA, 25 bp, Artificial
  Probe
cacaggaaaccctcaccatacatac

SEQ ID NO: 75735 - DNA, 25 bp, Artificial
  Probe
ggtagcactctggtggaaagaaatt

SEQ ID NO: 75736 - DNA, 25 bp, Artificial
  Probe
accatacatacggttctccagtcac

SEQ ID NO: 75737 - DNA, 25 bp, Artificial
  Probe
caccatacatacggttctccagtca

SEQ ID NO: 75738 - DNA, 25 bp, Artificial
  Probe
agcatctctgtgttacaacccattg

SEQ ID NO: 75739 - DNA, 25 bp, Artificial
  Probe
tcaaagcatctctgtgttacaaccc

SEQ ID NO: 75740 - DNA, 25 bp, Artificial
  Probe
caagagtgtgggtttccttcagaac

SEQ ID NO: 75741 - DNA, 25 bp, Artificial
  Probe
acacaggaaaccctcaccatacata

SEQ ID NO: 75742 - DNA, 25 bp, Artificial
  Probe
caaagcatctctgtgttacaaccca

SEQ ID NO: 75743 - DNA, 25 bp, Artificial
  Probe
cctcaccatacatacggttctccag

SEQ ID NO: 75744 - DNA, 25 bp, Artificial
  Probe
ttacaacccattgtgctcatatctg

SEQ ID NO: 75745 - DNA, 25 bp, Artificial
  Probe
gttacaacccattgtgctcatatct

SEQ ID NO: 75746 - DNA, 25 bp, Artificial
  Probe
tgttacaacccattgtgctcatatc

SEQ ID NO: 75747 - DNA, 25 bp, Artificial
  Probe
gtgttacaacccattgtgctcatat

SEQ ID NO: 75748 - DNA, 25 bp, Artificial
  Probe
caacccattgtgctcatatctggag

SEQ ID NO: 75749 - DNA, 25 bp, Artificial
  Probe
acccattgtgctcatatctggagaa

SEQ ID NO: 75750 - DNA, 25 bp, Artificial
  Probe
aacccattgtgctcatatctggaga

SEQ ID NO: 75751 - DNA, 25 bp, Artificial
  Probe
catctctgtgttacaacccattgtg

SEQ ID NO: 75752 - DNA, 25 bp, Artificial
  Probe
cacagatttcagtctggaagaaagg

SEQ ID NO: 75753 - DNA, 25 bp, Artificial
  Probe
acaggaaaccctcaccatacatacg

SEQ ID NO: 75754 - DNA, 25 bp, Artificial
  Probe
gaattcagggcacagatttcagtct

SEQ ID NO: 75755 - DNA, 25 bp, Artificial
  Probe
aatcatcaagaccaagagaagacaa

SEQ ID NO: 75756 - DNA, 25 bp, Artificial
  Probe
ttagcaatcatcaagaccaagagaa

SEQ ID NO: 75757 - DNA, 25 bp, Artificial
  Probe
atcatcaagaccaagagaagacaag

SEQ ID NO: 75758 - DNA, 25 bp, Artificial
  Probe
tagcaatcatcaagaccaagagaag

SEQ ID NO: 75759 - DNA, 25 bp, Artificial
  Probe
caatcatcaagaccaagagaagaca

SEQ ID NO: 75760 - DNA, 25 bp, Artificial
  Probe
ttggtagtctagtattcctgatgct

SEQ ID NO: 75761 - DNA, 25 bp, Artificial
  Probe
tggtagtctagtattcctgatgctc

SEQ ID NO: 75762 - DNA, 25 bp, Artificial
  Probe
gcaatcatcaagaccaagagaagac

SEQ ID NO: 75763 - DNA, 25 bp, Artificial
  Probe
agcaatcatcaagaccaagagaaga

SEQ ID NO: 75764 - DNA, 25 bp, Artificial
  Probe
ggtagtctagtattcctgatgctca

SEQ ID NO: 75765 - DNA, 25 bp, Artificial
  Probe
tcatcaagaccaagagaagacaagg

SEQ ID NO: 75766 - DNA, 25 bp, Artificial
  Probe
ccttctcactgttcctgtcacttag

SEQ ID NO: 75767 - DNA, 25 bp, Artificial
  Probe
tttagcaatcatcaagaccaagaga

SEQ ID NO: 75768 - DNA, 25 bp, Artificial
  Probe
cctccctctacataccactgataat

SEQ ID NO: 75769 - DNA, 25 bp, Artificial
  Probe
ctttagcaatcatcaagaccaagag

SEQ ID NO: 75770 - DNA, 25 bp, Artificial
  Probe
accttctcactgttcctgtcactta

SEQ ID NO: 75771 - DNA, 25 bp, Artificial
  Probe
ctccctctacataccactgataatt

SEQ ID NO: 75772 - DNA, 25 bp, Artificial
  Probe
tttggtagtctagtattcctgatgc

SEQ ID NO: 75773 - DNA, 25 bp, Artificial
  Probe
ccctttggtagtctagtattcctga

SEQ ID NO: 75774 - DNA, 25 bp, Artificial
  Probe
tccctctacataccactgataattt

SEQ ID NO: 75775 - DNA, 25 bp, Artificial
  Probe
cctttggtagtctagtattcctgat

SEQ ID NO: 75776 - DNA, 25 bp, Artificial
  Probe
ccctctacataccactgataatttc

SEQ ID NO: 75777 - DNA, 25 bp, Artificial
  Probe
cttctcactgttcctgtcacttagg

SEQ ID NO: 75778 - DNA, 25 bp, Artificial
  Probe
tgctatcaagagattgccagaaatg

SEQ ID NO: 75779 - DNA, 25 bp, Artificial
  Probe
atcaagaccaagagaagacaaggtg

SEQ ID NO: 75780 - DNA, 25 bp, Artificial
  Probe
catcaagaccaagagaagacaaggt

SEQ ID NO: 75781 - DNA, 25 bp, Artificial
  Probe
ctttggtagtctagtattcctgatg

SEQ ID NO: 75782 - DNA, 25 bp, Artificial
  Probe
ccctccctctacataccactgataa

SEQ ID NO: 75783 - DNA, 25 bp, Artificial
  Probe
gctttagcaatcatcaagaccaaga

SEQ ID NO: 75784 - DNA, 25 bp, Artificial
  Probe
ctgctatcaagagattgccagaaat

SEQ ID NO: 75785 - DNA, 25 bp, Artificial
  Probe
ctcagaaggaagaatagcaggtggt

SEQ ID NO: 75786 - DNA, 25 bp, Artificial
  Probe
gccctttggtagtctagtattcctg

SEQ ID NO: 75787 - DNA, 25 bp, Artificial
  Probe
aagagaagacaaggtgcatcatgta

SEQ ID NO: 75788 - DNA, 25 bp, Artificial
  Probe
ctttaccctccctctacataccact

SEQ ID NO: 75789 - DNA, 25 bp, Artificial
  Probe
cctctacataccactgataatttct

SEQ ID NO: 75790 - DNA, 25 bp, Artificial
  Probe
aaccttctcactgttcctgtcactt

SEQ ID NO: 75791 - DNA, 25 bp, Artificial
  Probe
tttaccctccctctacataccactg

SEQ ID NO: 75792 - DNA, 25 bp, Artificial
  Probe
agaagacaaggtgcatcatgtactt

SEQ ID NO: 75793 - DNA, 25 bp, Artificial
  Probe
agaaggaagaatagcaggtggtgtc

SEQ ID NO: 75794 - DNA, 25 bp, Artificial
  Probe
tcagaaggaagaatagcaggtggtg

SEQ ID NO: 75795 - DNA, 25 bp, Artificial
  Probe
acataccactgataatttctgattg

SEQ ID NO: 75796 - DNA, 25 bp, Artificial
  Probe
gagaagacaaggtgcatcatgtact

SEQ ID NO: 75797 - DNA, 25 bp, Artificial
  Probe
agagaagacaaggtgcatcatgtac

SEQ ID NO: 75798 - DNA, 25 bp, Artificial
  Probe
gaaaggagcttctctgagtgtattc

SEQ ID NO: 75799 - DNA, 25 bp, Artificial
  Probe
agctttagcaatcatcaagaccaag

SEQ ID NO: 75800 - DNA, 25 bp, Artificial
  Probe
ctcagttcagtatgttgtctcagat

SEQ ID NO: 75801 - DNA, 25 bp, Artificial
  Probe
tcagttcagtatgttgtctcagatg

SEQ ID NO: 75802 - DNA, 25 bp, Artificial
  Probe
ccaggaatagtgatagacaagaaga

SEQ ID NO: 75803 - DNA, 25 bp, Artificial
  Probe
cagttcagtatgttgtctcagatgg

SEQ ID NO: 75804 - DNA, 25 bp, Artificial
  Probe
aaggattgaactaacttgtggacat

SEQ ID NO: 75805 - DNA, 25 bp, Artificial
  Probe
ttcctcagttcagtatgttgtctca

SEQ ID NO: 75806 - DNA, 25 bp, Artificial
  Probe
gaaggattgaactaacttgtggaca

SEQ ID NO: 75807 - DNA, 25 bp, Artificial
  Probe
caggaatagtgatagacaagaagac

SEQ ID NO: 75808 - DNA, 25 bp, Artificial
  Probe
gtgatagacaagaagactaggaaga

SEQ ID NO: 75809 - DNA, 25 bp, Artificial
  Probe
tcctcagttcagtatgttgtctcag

SEQ ID NO: 75810 - DNA, 25 bp, Artificial
  Probe
cctcagttcagtatgttgtctcaga

SEQ ID NO: 75811 - DNA, 25 bp, Artificial
  Probe
ggaaggattgaactaacttgtggac

SEQ ID NO: 75812 - DNA, 25 bp, Artificial
  Probe
tgatagacaagaagactaggaagaa

SEQ ID NO: 75813 - DNA, 25 bp, Artificial
  Probe
agtgatagacaagaagactaggaag

SEQ ID NO: 75814 - DNA, 25 bp, Artificial
  Probe
aggattgaactaacttgtggacatg

SEQ ID NO: 75815 - DNA, 25 bp, Artificial
  Probe
aggaatagtgatagacaagaagact

SEQ ID NO: 75816 - DNA, 25 bp, Artificial
  Probe
ttcagtatgttgtctcagatggctc

SEQ ID NO: 75817 - DNA, 25 bp, Artificial
  Probe
gttcagtatgttgtctcagatggct

SEQ ID NO: 75818 - DNA, 25 bp, Artificial
  Probe
agttcagtatgttgtctcagatggc

SEQ ID NO: 75819 - DNA, 25 bp, Artificial
  Probe
cttgatattaccgtagcttatgagg

SEQ ID NO: 75820 - DNA, 25 bp, Artificial
  Probe
cacaagaaatcacacaagcatcata

SEQ ID NO: 75821 - DNA, 25 bp, Artificial
  Probe
cccaggaatagtgatagacaagaag

SEQ ID NO: 75822 - DNA, 25 bp, Artificial
  Probe
ctaccttctccctgcttgatattac

SEQ ID NO: 75823 - DNA, 25 bp, Artificial
  Probe
aagaaatcacacaagcatcataagc

SEQ ID NO: 75824 - DNA, 25 bp, Artificial
  Probe
acaagaaatcacacaagcatcataa

SEQ ID NO: 75825 - DNA, 25 bp, Artificial
  Probe
atcttgggaaggattgaactaactt

SEQ ID NO: 75826 - DNA, 25 bp, Artificial
  Probe
caagaaatcacacaagcatcataag

SEQ ID NO: 75827 - DNA, 25 bp, Artificial
  Probe
tcttgggaaggattgaactaacttg

SEQ ID NO: 75828 - DNA, 25 bp, Artificial
  Probe
gaaatcacacaagcatcataagcac

SEQ ID NO: 75829 - DNA, 25 bp, Artificial
  Probe
agaaatcacacaagcatcataagca

SEQ ID NO: 75830 - DNA, 25 bp, Artificial
  Probe
cttgggaaggattgaactaacttgt

SEQ ID NO: 75831 - DNA, 25 bp, Artificial
  Probe
taccttctccctgcttgatattacc

SEQ ID NO: 75832 - DNA, 25 bp, Artificial
  Probe
tcacaagaaatcacacaagcatcat

SEQ ID NO: 75833 - DNA, 25 bp, Artificial
  Probe
ttgggaaggattgaactaacttgtg

SEQ ID NO: 75834 - DNA, 25 bp, Artificial
  Probe
tcagtatgttgtctcagatggctct

SEQ ID NO: 75835 - DNA, 25 bp, Artificial
  Probe
gctaccttctccctgcttgatatta

SEQ ID NO: 75836 - DNA, 25 bp, Artificial
  Probe
caatttgtgatgagaaacctgtact

SEQ ID NO: 75837 - DNA, 25 bp, Artificial
  Probe
ttctccctgcttgatattaccgtag

SEQ ID NO: 75838 - DNA, 25 bp, Artificial
  Probe
cttctccctgcttgatattaccgta

SEQ ID NO: 75839 - DNA, 25 bp, Artificial
  Probe
gatcttgggaaggattgaactaact

SEQ ID NO: 75840 - DNA, 25 bp, Artificial
  Probe
tgatattaccgtagcttatgaggtg

SEQ ID NO: 75841 - DNA, 25 bp, Artificial
  Probe
gatattaccgtagcttatgaggtgg

SEQ ID NO: 75842 - DNA, 25 bp, Artificial
  Probe
tagtgatagacaagaagactaggaa

SEQ ID NO: 75843 - DNA, 25 bp, Artificial
  Probe
atttgtgatgagaaacctgtacttt

SEQ ID NO: 75844 - DNA, 25 bp, Artificial
  Probe
aatttgtgatgagaaacctgtactt

SEQ ID NO: 75845 - DNA, 25 bp, Artificial
  Probe
ggaatattggctagttcagacctaa

SEQ ID NO: 75846 - DNA, 25 bp, Artificial
  Probe
tcagacctaacttcacctagtgtat

SEQ ID NO: 75847 - DNA, 25 bp, Artificial
  Probe
ttcagacctaacttcacctagtgta

SEQ ID NO: 75848 - DNA, 25 bp, Artificial
  Probe
tggaatattggctagttcagaccta

SEQ ID NO: 75849 - DNA, 25 bp, Artificial
  Probe
gaatattggctagttcagacctaac

SEQ ID NO: 75850 - DNA, 25 bp, Artificial
  Probe
ctaagaatgagtgagcttggagaac

SEQ ID NO: 75851 - DNA, 25 bp, Artificial
  Probe
gttcagacctaacttcacctagtgt

SEQ ID NO: 75852 - DNA, 25 bp, Artificial
  Probe
cctaagaatgagtgagcttggagaa

SEQ ID NO: 75853 - DNA, 25 bp, Artificial
  Probe
ctggaatattggctagttcagacct

SEQ ID NO: 75854 - DNA, 25 bp, Artificial
  Probe
acactaaattcacatcgtttgttga

SEQ ID NO: 75855 - DNA, 25 bp, Artificial
  Probe
taagaatgagtgagcttggagaacc

SEQ ID NO: 75856 - DNA, 25 bp, Artificial
  Probe
actaaattcacatcgtttgttgagt

SEQ ID NO: 75857 - DNA, 25 bp, Artificial
  Probe
catatacaagtgtccgtagccagac

SEQ ID NO: 75858 - DNA, 25 bp, Artificial
  Probe
cactaaattcacatcgtttgttgag

SEQ ID NO: 75859 - DNA, 25 bp, Artificial
  Probe
actggaatattggctagttcagacc

SEQ ID NO: 75860 - DNA, 25 bp, Artificial
  Probe
taaattcacatcgtttgttgagttg

SEQ ID NO: 75861 - DNA, 25 bp, Artificial
  Probe
tagttcagacctaacttcacctagt

SEQ ID NO: 75862 - DNA, 25 bp, Artificial
  Probe
tattggctagttcagacctaacttc

SEQ ID NO: 75863 - DNA, 25 bp, Artificial
  Probe
ctagttcagacctaacttcacctag

SEQ ID NO: 75864 - DNA, 25 bp, Artificial
  Probe
gcaaatagtcacctaagaatgagtg

SEQ ID NO: 75865 - DNA, 25 bp, Artificial
  Probe
atattggctagttcagacctaactt

SEQ ID NO: 75866 - DNA, 25 bp, Artificial
  Probe
ctaaattcacatcgtttgttgagtt

SEQ ID NO: 75867 - DNA, 25 bp, Artificial
  Probe
aaattcacatcgtttgttgagttgc

SEQ ID NO: 75868 - DNA, 25 bp, Artificial
  Probe
tcatgttaactggaatattggctag

SEQ ID NO: 75869 - DNA, 25 bp, Artificial
  Probe
gctagttcagacctaacttcaccta

SEQ ID NO: 75870 - DNA, 25 bp, Artificial
  Probe
agttcagacctaacttcacctagtg

SEQ ID NO: 75871 - DNA, 25 bp, Artificial
  Probe
attggctagttcagacctaacttca

SEQ ID NO: 75872 - DNA, 25 bp, Artificial
  Probe
catgttaactggaatattggctagt

SEQ ID NO: 75873 - DNA, 25 bp, Artificial
  Probe
acctaagaatgagtgagcttggaga

SEQ ID NO: 75874 - DNA, 25 bp, Artificial
  Probe
aactggaatattggctagttcagac

SEQ ID NO: 75875 - DNA, 25 bp, Artificial
  Probe
aatattggctagttcagacctaact

SEQ ID NO: 75876 - DNA, 25 bp, Artificial
  Probe
taactggaatattggctagttcaga

SEQ ID NO: 75877 - DNA, 25 bp, Artificial
  Probe
ttcatgttaactggaatattggcta

SEQ ID NO: 75878 - DNA, 25 bp, Artificial
  Probe
aattcacatcgtttgttgagttgct

SEQ ID NO: 75879 - DNA, 25 bp, Artificial
  Probe
ttaactggaatattggctagttcag

SEQ ID NO: 75880 - DNA, 25 bp, Artificial
  Probe
tgcaaatagtcacctaagaatgagt

SEQ ID NO: 75881 - DNA, 25 bp, Artificial
  Probe
ttggctagttcagacctaacttcac

SEQ ID NO: 75882 - DNA, 25 bp, Artificial
  Probe
attcacatcgtttgttgagttgctc

SEQ ID NO: 75883 - DNA, 25 bp, Artificial
  Probe
gcatatacaagtgtccgtagccaga

SEQ ID NO: 75884 - DNA, 25 bp, Artificial
  Probe
cacctaagaatgagtgagcttggag

SEQ ID NO: 75885 - DNA, 25 bp, Artificial
  Probe
atgcaaatagtcacctaagaatgag

SEQ ID NO: 75886 - DNA, 25 bp, Artificial
  Probe
cgtttgttgagttgctctgaagaag

SEQ ID NO: 75887 - DNA, 25 bp, Artificial
  Probe
catcgtttgttgagttgctctgaag

SEQ ID NO: 75888 - DNA, 25 bp, Artificial
  Probe
atcgtttgttgagttgctctgaaga

SEQ ID NO: 75889 - DNA, 25 bp, Artificial
  Probe
agtttcaaagtttcaaaatgccaaa

SEQ ID NO: 75890 - DNA, 25 bp, Artificial
  Probe
ttatagtgtgactgcaaactccaag

SEQ ID NO: 75891 - DNA, 25 bp, Artificial
  Probe
atgtcatagaagataagctaaaggg

SEQ ID NO: 75892 - DNA, 25 bp, Artificial
  Probe
gatgtcatagaagataagctaaagg

SEQ ID NO: 75893 - DNA, 25 bp, Artificial
  Probe
tatagtgtgactgcaaactccaagc

SEQ ID NO: 75894 - DNA, 25 bp, Artificial
  Probe
tgatgtcatagaagataagctaaag

SEQ ID NO: 75895 - DNA, 25 bp, Artificial
  Probe
ttgatgtcatagaagataagctaaa

SEQ ID NO: 75896 - DNA, 25 bp, Artificial
  Probe
tgcaaactccaagctggtcattatc

SEQ ID NO: 75897 - DNA, 25 bp, Artificial
  Probe
ctgcaaactccaagctggtcattat

SEQ ID NO: 75898 - DNA, 25 bp, Artificial
  Probe
cagccttttccttaagacaccaaaa

SEQ ID NO: 75899 - DNA, 25 bp, Artificial
  Probe
atagtgtgactgcaaactccaagct

SEQ ID NO: 75900 - DNA, 25 bp, Artificial
  Probe
actgcaaactccaagctggtcatta

SEQ ID NO: 75901 - DNA, 25 bp, Artificial
  Probe
gcagccttttccttaagacaccaaa

SEQ ID NO: 75902 - DNA, 25 bp, Artificial
  Probe
catggcagccttttccttaagacac

SEQ ID NO: 75903 - DNA, 25 bp, Artificial
  Probe
atgcaggctttgattaccctgtgag

SEQ ID NO: 75904 - DNA, 25 bp, Artificial
  Probe
ttatacctgtccaatcacattctcc

SEQ ID NO: 75905 - DNA, 25 bp, Artificial
  Probe
tatacctgtccaatcacattctcct

SEQ ID NO: 75906 - DNA, 25 bp, Artificial
  Probe
gttgttctcagatggtaactcacag

SEQ ID NO: 75907 - DNA, 25 bp, Artificial
  Probe
ctgttgttctcagatggtaactcac

SEQ ID NO: 75908 - DNA, 25 bp, Artificial
  Probe
attatacctgtccaatcacattctc

SEQ ID NO: 75909 - DNA, 25 bp, Artificial
  Probe
tgttgttctcagatggtaactcaca

SEQ ID NO: 75910 - DNA, 25 bp, Artificial
  Probe
atacctgtccaatcacattctcctc

SEQ ID NO: 75911 - DNA, 25 bp, Artificial
  Probe
ccagattatacctgtccaatcacat

SEQ ID NO: 75912 - DNA, 25 bp, Artificial
  Probe
gaataggaaatgtgacccaaatgtt

SEQ ID NO: 75913 - DNA, 25 bp, Artificial
  Probe
ttgttctcagatggtaactcacagg

SEQ ID NO: 75914 - DNA, 25 bp, Artificial
  Probe
aataggaaatgtgacccaaatgttc

SEQ ID NO: 75915 - DNA, 25 bp, Artificial
  Probe
cagattatacctgtccaatcacatt

SEQ ID NO: 75916 - DNA, 25 bp, Artificial
  Probe
aggaataggaaatgtgacccaaatg

SEQ ID NO: 75917 - DNA, 25 bp, Artificial
  Probe
caggaataggaaatgtgacccaaat

SEQ ID NO: 75918 - DNA, 25 bp, Artificial
  Probe
ggaataggaaatgtgacccaaatgt

SEQ ID NO: 75919 - DNA, 25 bp, Artificial
  Probe
gattatacctgtccaatcacattct

SEQ ID NO: 75920 - DNA, 25 bp, Artificial
  Probe
agattatacctgtccaatcacattc

SEQ ID NO: 75921 - DNA, 25 bp, Artificial
  Probe
gctgttgttctcagatggtaactca

SEQ ID NO: 75922 - DNA, 25 bp, Artificial
  Probe
tgctgttgttctcagatggtaactc

SEQ ID NO: 75923 - DNA, 25 bp, Artificial
  Probe
gagtgctgttgttctcagatggtaa

SEQ ID NO: 75924 - DNA, 25 bp, Artificial
  Probe
gccagattatacctgtccaatcaca

SEQ ID NO: 75925 - DNA, 25 bp, Artificial
  Probe
gaccaaacaggaataggaaatgtga

SEQ ID NO: 75926 - DNA, 25 bp, Artificial
  Probe
gtgctgttgttctcagatggtaact

SEQ ID NO: 75927 - DNA, 25 bp, Artificial
  Probe
agtgctgttgttctcagatggtaac

SEQ ID NO: 75928 - DNA, 25 bp, Artificial
  Probe
accaaacaggaataggaaatgtgac

SEQ ID NO: 75929 - DNA, 25 bp, Artificial
  Probe
tgaccaaacaggaataggaaatgtg

SEQ ID NO: 75930 - DNA, 25 bp, Artificial
  Probe
ctgaccaaacaggaataggaaatgt

SEQ ID NO: 75931 - DNA, 25 bp, Artificial
  Probe
actgaccaaacaggaataggaaatg

SEQ ID NO: 75932 - DNA, 25 bp, Artificial
  Probe
cactgaccaaacaggaataggaaat

SEQ ID NO: 75933 - DNA, 25 bp, Artificial
  Probe
caaacaggaataggaaatgtgaccc

SEQ ID NO: 75934 - DNA, 25 bp, Artificial
  Probe
ccaaacaggaataggaaatgtgacc

SEQ ID NO: 75935 - DNA, 25 bp, Artificial
  Probe
gaaatgtgacccaaatgttcctgac

SEQ ID NO: 75936 - DNA, 25 bp, Artificial
  Probe
acaggaataggaaatgtgacccaaa

SEQ ID NO: 75937 - DNA, 25 bp, Artificial
  Probe
aacaggaataggaaatgtgacccaa

SEQ ID NO: 75938 - DNA, 25 bp, Artificial
  Probe
aaacaggaataggaaatgtgaccca

SEQ ID NO: 75939 - DNA, 25 bp, Artificial
  Probe
tacctgtccaatcacattctcctcc

SEQ ID NO: 75940 - DNA, 25 bp, Artificial
  Probe
agagtgctgttgttctcagatggta

SEQ ID NO: 75941 - DNA, 25 bp, Artificial
  Probe
tctgagctatgtaactcgtttctac

SEQ ID NO: 75942 - DNA, 25 bp, Artificial
  Probe
ctctgagctatgtaactcgtttcta

SEQ ID NO: 75943 - DNA, 25 bp, Artificial
  Probe
ctgagctatgtaactcgtttctacc

SEQ ID NO: 75944 - DNA, 25 bp, Artificial
  Probe
caactcgactgtcttaaagggaaag

SEQ ID NO: 75945 - DNA, 25 bp, Artificial
  Probe
tcaactcgactgtcttaaagggaaa

SEQ ID NO: 75946 - DNA, 25 bp, Artificial
  Probe
ccactgaccaaacaggaataggaaa

SEQ ID NO: 75947 - DNA, 25 bp, Artificial
  Probe
caccaagaagagagtgctgttgttc

SEQ ID NO: 75948 - DNA, 25 bp, Artificial
  Probe
gttggtcaactcgactgtcttaaag

SEQ ID NO: 75949 - DNA, 25 bp, Artificial
  Probe
acagataaagtggaccgattaaagc

SEQ ID NO: 75950 - DNA, 25 bp, Artificial
  Probe
tgtttatatccacgaccatgagaat

SEQ ID NO: 75951 - DNA, 25 bp, Artificial
  Probe
gtttatatccacgaccatgagaatg

SEQ ID NO: 75952 - DNA, 25 bp, Artificial
  Probe
tcacagataaagtggaccgattaaa

SEQ ID NO: 75953 - DNA, 25 bp, Artificial
  Probe
ttcacagataaagtggaccgattaa

SEQ ID NO: 75954 - DNA, 25 bp, Artificial
  Probe
cacagataaagtggaccgattaaag

SEQ ID NO: 75955 - DNA, 25 bp, Artificial
  Probe
attcacagataaagtggaccgatta

SEQ ID NO: 75956 - DNA, 25 bp, Artificial
  Probe
gattcacagataaagtggaccgatt

SEQ ID NO: 75957 - DNA, 25 bp, Artificial
  Probe
ggaatggtcgtggattcacagataa

SEQ ID NO: 75958 - DNA, 25 bp, Artificial
  Probe
aatggtcgtggattcacagataaag

SEQ ID NO: 75959 - DNA, 25 bp, Artificial
  Probe
agataaagtggaccgattaaagctg

SEQ ID NO: 75960 - DNA, 25 bp, Artificial
  Probe
cagataaagtggaccgattaaagct

SEQ ID NO: 75961 - DNA, 25 bp, Artificial
  Probe
caagccaaaggatggtgtttatatc

SEQ ID NO: 75962 - DNA, 25 bp, Artificial
  Probe
gtgtttatatccacgaccatgagaa

SEQ ID NO: 75963 - DNA, 25 bp, Artificial
  Probe
gaatggtcgtggattcacagataaa

SEQ ID NO: 75964 - DNA, 25 bp, Artificial
  Probe
ctgatgatggataaggcagtggttg

SEQ ID NO: 75965 - DNA, 25 bp, Artificial
  Probe
ccaagccaaaggatggtgtttatat

SEQ ID NO: 75966 - DNA, 25 bp, Artificial
  Probe
gataaagtggaccgattaaagctgg

SEQ ID NO: 75967 - DNA, 25 bp, Artificial
  Probe
atggtcgtggattcacagataaagt

SEQ ID NO: 75968 - DNA, 25 bp, Artificial
  Probe
ggattcacagataaagtggaccgat

SEQ ID NO: 75969 - DNA, 25 bp, Artificial
  Probe
tccaagccaaaggatggtgtttata

SEQ ID NO: 75970 - DNA, 25 bp, Artificial
  Probe
tcgtggattcacagataaagtggac

SEQ ID NO: 75971 - DNA, 25 bp, Artificial
  Probe
gtcgtggattcacagataaagtgga

SEQ ID NO: 75972 - DNA, 25 bp, Artificial
  Probe
tggaatggtcgtggattcacagata

SEQ ID NO: 75973 - DNA, 25 bp, Artificial
  Probe
tggtcgtggattcacagataaagtg

SEQ ID NO: 75974 - DNA, 25 bp, Artificial
  Probe
ggtgtttatatccacgaccatgaga

SEQ ID NO: 75975 - DNA, 25 bp, Artificial
  Probe
gaagctcaatgaggtaatgcaggag

SEQ ID NO: 75976 - DNA, 25 bp, Artificial
  Probe
gagaagctcaatgaggtaatgcagg

SEQ ID NO: 75977 - DNA, 25 bp, Artificial
  Probe
agaagctcaatgaggtaatgcagga

SEQ ID NO: 75978 - DNA, 25 bp, Artificial
  Probe
tggattcacagataaagtggaccga

SEQ ID NO: 75979 - DNA, 25 bp, Artificial
  Probe
gtggattcacagataaagtggaccg

SEQ ID NO: 75980 - DNA, 25 bp, Artificial
  Probe
cgtggattcacagataaagtggacc

SEQ ID NO: 75981 - DNA, 25 bp, Artificial
  Probe
ggtcgtggattcacagataaagtgg

SEQ ID NO: 75982 - DNA, 25 bp, Artificial
  Probe
ataaagtggaccgattaaagctggc

SEQ ID NO: 75983 - DNA, 25 bp, Artificial
  Probe
ctccaagccaaaggatggtgtttat

SEQ ID NO: 75984 - DNA, 25 bp, Artificial
  Probe
attaaagctggcagaggttgtgaag

SEQ ID NO: 75985 - DNA, 25 bp, Artificial
  Probe
aaaggatggtgtttatatccacgac

SEQ ID NO: 75986 - DNA, 25 bp, Artificial
  Probe
caaaggatggtgtttatatccacga

SEQ ID NO: 75987 - DNA, 25 bp, Artificial
  Probe
aagccaaaggatggtgtttatatcc

SEQ ID NO: 75988 - DNA, 25 bp, Artificial
  Probe
gattaaagctggcagaggttgtgaa

SEQ ID NO: 75989 - DNA, 25 bp, Artificial
  Probe
ttatatccacgaccatgagaatgga

SEQ ID NO: 75990 - DNA, 25 bp, Artificial
  Probe
ctggaatggtcgtggattcacagat

SEQ ID NO: 75991 - DNA, 25 bp, Artificial
  Probe
gctgatgatggataaggcagtggtt

SEQ ID NO: 75992 - DNA, 25 bp, Artificial
  Probe
ccaaaggatggtgtttatatccacg

SEQ ID NO: 75993 - DNA, 25 bp, Artificial
  Probe
tatatccacgaccatgagaatggag

SEQ ID NO: 75994 - DNA, 25 bp, Artificial
  Probe
gaatgttccgtagatgagtgtactt

SEQ ID NO: 75995 - DNA, 25 bp, Artificial
  Probe
aatgttccgtagatgagtgtacttg

SEQ ID NO: 75996 - DNA, 25 bp, Artificial
  Probe
agaatgttccgtagatgagtgtact

SEQ ID NO: 75997 - DNA, 25 bp, Artificial
  Probe
cagaatgttccgtagatgagtgtac

SEQ ID NO: 75998 - DNA, 25 bp, Artificial
  Probe
ccagaatgttccgtagatgagtgta

SEQ ID NO: 75999 - DNA, 25 bp, Artificial
  Probe
ttccagaatgttccgtagatgagtg

SEQ ID NO: 76000 - DNA, 25 bp, Artificial
  Probe
atgttccgtagatgagtgtacttgg

SEQ ID NO: 76001 - DNA, 25 bp, Artificial
  Probe
ttaaggcttcactgactgttcctaa

SEQ ID NO: 76002 - DNA, 25 bp, Artificial
  Probe
aatcagcaggtaatttgggtagaaa

SEQ ID NO: 76003 - DNA, 25 bp, Artificial
  Probe
gatactctggaaccttgcatctcta

SEQ ID NO: 76004 - DNA, 25 bp, Artificial
  Probe
cctcctgttcctgtcattaagaaag

SEQ ID NO: 76005 - DNA, 25 bp, Artificial
  Probe
gtttccagaatgttccgtagatgag

SEQ ID NO: 76006 - DNA, 25 bp, Artificial
  Probe
atactctggaaccttgcatctctac

SEQ ID NO: 76007 - DNA, 25 bp, Artificial
  Probe
tccagaatgttccgtagatgagtgt

SEQ ID NO: 76008 - DNA, 25 bp, Artificial
  Probe
tttccagaatgttccgtagatgagt

SEQ ID NO: 76009 - DNA, 25 bp, Artificial
  Probe
aaatcagcaggtaatttgggtagaa

SEQ ID NO: 76010 - DNA, 25 bp, Artificial
  Probe
agcctcctgttcctgtcattaagaa

SEQ ID NO: 76011 - DNA, 25 bp, Artificial
  Probe
gttccgtagatgagtgtacttggag

SEQ ID NO: 76012 - DNA, 25 bp, Artificial
  Probe
ctactcactgactcacccatatcac

SEQ ID NO: 76013 - DNA, 25 bp, Artificial
  Probe
ctcctgttcctgtcattaagaaagg

SEQ ID NO: 76014 - DNA, 25 bp, Artificial
  Probe
actgactcacccatatcacttcaag

SEQ ID NO: 76015 - DNA, 25 bp, Artificial
  Probe
gagcctcctgttcctgtcattaaga

SEQ ID NO: 76016 - DNA, 25 bp, Artificial
  Probe
ggtttccagaatgttccgtagatga

SEQ ID NO: 76017 - DNA, 25 bp, Artificial
  Probe
cactgactcacccatatcacttcaa

SEQ ID NO: 76018 - DNA, 25 bp, Artificial
  Probe
tactcactgactcacccatatcact

SEQ ID NO: 76019 - DNA, 25 bp, Artificial
  Probe
taaggcttcactgactgttcctaaa

SEQ ID NO: 76020 - DNA, 25 bp, Artificial
  Probe
tttaaggcttcactgactgttccta

SEQ ID NO: 76021 - DNA, 25 bp, Artificial
  Probe
tgttccgtagatgagtgtacttgga

SEQ ID NO: 76022 - DNA, 25 bp, Artificial
  Probe
ctcactgactcacccatatcacttc

SEQ ID NO: 76023 - DNA, 25 bp, Artificial
  Probe
gcctcctgttcctgtcattaagaaa

SEQ ID NO: 76024 - DNA, 25 bp, Artificial
  Probe
gactcacccatatcacttcaaggag

SEQ ID NO: 76025 - DNA, 25 bp, Artificial
  Probe
tcacagaatggtttccagaatgttc

SEQ ID NO: 76026 - DNA, 25 bp, Artificial
  Probe
ctcacagaatggtttccagaatgtt

SEQ ID NO: 76027 - DNA, 25 bp, Artificial
  Probe
ctgactcacccatatcacttcaagg

SEQ ID NO: 76028 - DNA, 25 bp, Artificial
  Probe
gactcacagaatggtttccagaatg

SEQ ID NO: 76029 - DNA, 25 bp, Artificial
  Probe
gaatggtttccagaatgttccgtag

SEQ ID NO: 76030 - DNA, 25 bp, Artificial
  Probe
tgactcacccatatcacttcaagga

SEQ ID NO: 76031 - DNA, 25 bp, Artificial
  Probe
tcactgactcacccatatcacttca

SEQ ID NO: 76032 - DNA, 25 bp, Artificial
  Probe
actcactgactcacccatatcactt

SEQ ID NO: 76033 - DNA, 25 bp, Artificial
  Probe
tactctggaaccttgcatctctacc

SEQ ID NO: 76034 - DNA, 25 bp, Artificial
  Probe
atggtttccagaatgttccgtagat

SEQ ID NO: 76035 - DNA, 25 bp, Artificial
  Probe
aatggtttccagaatgttccgtaga

SEQ ID NO: 76036 - DNA, 25 bp, Artificial
  Probe
agaatggtttccagaatgttccgta

SEQ ID NO: 76037 - DNA, 25 bp, Artificial
  Probe
atcagcaggtaatttgggtagaaaa

SEQ ID NO: 76038 - DNA, 25 bp, Artificial
  Probe
ctttaaggcttcactgactgttcct

SEQ ID NO: 76039 - DNA, 25 bp, Artificial
  Probe
gattgagagacgttcagaactgtag

SEQ ID NO: 76040 - DNA, 25 bp, Artificial
  Probe
agattgagagacgttcagaactgta

SEQ ID NO: 76041 - DNA, 25 bp, Artificial
  Probe
caagattgagagacgttcagaactg

SEQ ID NO: 76042 - DNA, 25 bp, Artificial
  Probe
tcaagattgagagacgttcagaact

SEQ ID NO: 76043 - DNA, 25 bp, Artificial
  Probe
aagattgagagacgttcagaactgt

SEQ ID NO: 76044 - DNA, 25 bp, Artificial
  Probe
attgagagacgttcagaactgtagc

SEQ ID NO: 76045 - DNA, 25 bp, Artificial
  Probe
cattacacgggaaagctagaagatg

SEQ ID NO: 76046 - DNA, 25 bp, Artificial
  Probe
attacacgggaaagctagaagatgg

SEQ ID NO: 76047 - DNA, 25 bp, Artificial
  Probe
tagaaagggagatgtcttacacatg

SEQ ID NO: 76048 - DNA, 25 bp, Artificial
  Probe
gcattacacgggaaagctagaagat

SEQ ID NO: 76049 - DNA, 25 bp, Artificial
  Probe
ttgagagacgttcagaactgtagca

SEQ ID NO: 76050 - DNA, 25 bp, Artificial
  Probe
ctcaagattgagagacgttcagaac

SEQ ID NO: 76051 - DNA, 25 bp, Artificial
  Probe
tgagagacgttcagaactgtagcag

SEQ ID NO: 76052 - DNA, 25 bp, Artificial
  Probe
agaaagggagatgtcttacacatgc

SEQ ID NO: 76053 - DNA, 25 bp, Artificial
  Probe
gagatgtcttacacatgcattacac

SEQ ID NO: 76054 - DNA, 25 bp, Artificial
  Probe
ggagatgtcttacacatgcattaca

SEQ ID NO: 76055 - DNA, 25 bp, Artificial
  Probe
ttacacgggaaagctagaagatggg

SEQ ID NO: 76056 - DNA, 25 bp, Artificial
  Probe
gctcaagattgagagacgttcagaa

SEQ ID NO: 76057 - DNA, 25 bp, Artificial
  Probe
agatgtcttacacatgcattacacg

SEQ ID NO: 76058 - DNA, 25 bp, Artificial
  Probe
gagagacgttcagaactgtagcagg

SEQ ID NO: 76059 - DNA, 25 bp, Artificial
  Probe
tgcattacacgggaaagctagaaga

SEQ ID NO: 76060 - DNA, 25 bp, Artificial
  Probe
cagattggagtgaagaaacgtgtgg

SEQ ID NO: 76061 - DNA, 25 bp, Artificial
  Probe
aactgctcaagattgagagacgttc

SEQ ID NO: 76062 - DNA, 25 bp, Artificial
  Probe
gaactgctcaagattgagagacgtt

SEQ ID NO: 76063 - DNA, 25 bp, Artificial
  Probe
cttacacatgcattacacgggaaag

SEQ ID NO: 76064 - DNA, 25 bp, Artificial
  Probe
gaaagggagatgtcttacacatgca

SEQ ID NO: 76065 - DNA, 25 bp, Artificial
  Probe
tcttacacatgcattacacgggaaa

SEQ ID NO: 76066 - DNA, 25 bp, Artificial
  Probe
gatgtcttacacatgcattacacgg

SEQ ID NO: 76067 - DNA, 25 bp, Artificial
  Probe
ctgctcaagattgagagacgttcag

SEQ ID NO: 76068 - DNA, 25 bp, Artificial
  Probe
gcagattggagtgaagaaacgtgtg

SEQ ID NO: 76069 - DNA, 25 bp, Artificial
  Probe
atgcattacacgggaaagctagaag

SEQ ID NO: 76070 - DNA, 25 bp, Artificial
  Probe
tgctcaagattgagagacgttcaga

SEQ ID NO: 76071 - DNA, 25 bp, Artificial
  Probe
gtcttacacatgcattacacgggaa

SEQ ID NO: 76072 - DNA, 25 bp, Artificial
  Probe
actgctcaagattgagagacgttca

SEQ ID NO: 76073 - DNA, 25 bp, Artificial
  Probe
catgcattacacgggaaagctagaa

SEQ ID NO: 76074 - DNA, 25 bp, Artificial
  Probe
tgcagattggagtgaagaaacgtgt

SEQ ID NO: 76075 - DNA, 25 bp, Artificial
  Probe
gggagatgtcttacacatgcattac

SEQ ID NO: 76076 - DNA, 25 bp, Artificial
  Probe
agggagatgtcttacacatgcatta

SEQ ID NO: 76077 - DNA, 25 bp, Artificial
  Probe
aagggagatgtcttacacatgcatt

SEQ ID NO: 76078 - DNA, 25 bp, Artificial
  Probe
aaagggagatgtcttacacatgcat

SEQ ID NO: 76079 - DNA, 25 bp, Artificial
  Probe
ttacacatgcattacacgggaaagc

SEQ ID NO: 76080 - DNA, 25 bp, Artificial
  Probe
acatgcattacacgggaaagctaga

SEQ ID NO: 76081 - DNA, 25 bp, Artificial
  Probe
cacatgcattacacgggaaagctag

SEQ ID NO: 76082 - DNA, 25 bp, Artificial
  Probe
tgtcttacacatgcattacacggga

SEQ ID NO: 76083 - DNA, 25 bp, Artificial
  Probe
atgtcttacacatgcattacacggg

SEQ ID NO: 76084 - DNA, 25 bp, Artificial
  Probe
ttcttattcctcatcaagcacaatg

SEQ ID NO: 76085 - DNA, 25 bp, Artificial
  Probe
ttaacatcagcacagataaccgaag

SEQ ID NO: 76086 - DNA, 25 bp, Artificial
  Probe
taacatcagcacagataaccgaaga

SEQ ID NO: 76087 - DNA, 25 bp, Artificial
  Probe
gcacagataaccgaagacttcaatt

SEQ ID NO: 76088 - DNA, 25 bp, Artificial
  Probe
ctactgtaacatgaatctgtgacct

SEQ ID NO: 76089 - DNA, 25 bp, Artificial
  Probe
tctactgtaacatgaatctgtgacc

SEQ ID NO: 76090 - DNA, 25 bp, Artificial
  Probe
tactgtaacatgaatctgtgacctg

SEQ ID NO: 76091 - DNA, 25 bp, Artificial
  Probe
ttatctctatcccttcttgctttcc

SEQ ID NO: 76092 - DNA, 25 bp, Artificial
  Probe
atcaccctttcttattcctcatcaa

SEQ ID NO: 76093 - DNA, 25 bp, Artificial
  Probe
ttctactgtaacatgaatctgtgac

SEQ ID NO: 76094 - DNA, 25 bp, Artificial
  Probe
tatctctatcccttcttgctttcct

SEQ ID NO: 76095 - DNA, 25 bp, Artificial
  Probe
gtagaagtcagtttaacatcagcac

SEQ ID NO: 76096 - DNA, 25 bp, Artificial
  Probe
tagaagtcagtttaacatcagcaca

SEQ ID NO: 76097 - DNA, 25 bp, Artificial
  Probe
ctatcccttcttgctttccttcttt

SEQ ID NO: 76098 - DNA, 25 bp, Artificial
  Probe
agcacagataaccgaagacttcaat

SEQ ID NO: 76099 - DNA, 25 bp, Artificial
  Probe
catcagcacagataaccgaagactt

SEQ ID NO: 76100 - DNA, 25 bp, Artificial
  Probe
agtcagtttaacatcagcacagata

SEQ ID NO: 76101 - DNA, 25 bp, Artificial
  Probe
cttctactgtaacatgaatctgtga

SEQ ID NO: 76102 - DNA, 25 bp, Artificial
  Probe
tcttctactgtaacatgaatctgtg

SEQ ID NO: 76103 - DNA, 25 bp, Artificial
  Probe
tcaccctttcttattcctcatcaag

SEQ ID NO: 76104 - DNA, 25 bp, Artificial
  Probe
gtcagtttaacatcagcacagataa

SEQ ID NO: 76105 - DNA, 25 bp, Artificial
  Probe
ggtagaagtcagtttaacatcagca

SEQ ID NO: 76106 - DNA, 25 bp, Artificial
  Probe
ctttcttattcctcatcaagcacaa

SEQ ID NO: 76107 - DNA, 25 bp, Artificial
  Probe
aagtcagtttaacatcagcacagat

SEQ ID NO: 76108 - DNA, 25 bp, Artificial
  Probe
tttaacatcagcacagataaccgaa

SEQ ID NO: 76109 - DNA, 25 bp, Artificial
  Probe
atctctatcccttcttgctttcctt

SEQ ID NO: 76110 - DNA, 25 bp, Artificial
  Probe
cagtttaacatcagcacagataacc

SEQ ID NO: 76111 - DNA, 25 bp, Artificial
  Probe
tcagtttaacatcagcacagataac

SEQ ID NO: 76112 - DNA, 25 bp, Artificial
  Probe
agaagtcagtttaacatcagcacag

SEQ ID NO: 76113 - DNA, 25 bp, Artificial
  Probe
tttcttattcctcatcaagcacaat

SEQ ID NO: 76114 - DNA, 25 bp, Artificial
  Probe
cctttcttattcctcatcaagcaca

SEQ ID NO: 76115 - DNA, 25 bp, Artificial
  Probe
tctatcccttcttgctttccttctt

SEQ ID NO: 76116 - DNA, 25 bp, Artificial
  Probe
gaagtcagtttaacatcagcacaga

SEQ ID NO: 76117 - DNA, 25 bp, Artificial
  Probe
aacatcagcacagataaccgaagac

SEQ ID NO: 76118 - DNA, 25 bp, Artificial
  Probe
atcagcacagataaccgaagacttc

SEQ ID NO: 76119 - DNA, 25 bp, Artificial
  Probe
gatcaccctttcttattcctcatca

SEQ ID NO: 76120 - DNA, 25 bp, Artificial
  Probe
ctctatcccttcttgctttccttct

SEQ ID NO: 76121 - DNA, 25 bp, Artificial
  Probe
tctctatcccttcttgctttccttc

SEQ ID NO: 76122 - DNA, 25 bp, Artificial
  Probe
gtttaacatcagcacagataaccga

SEQ ID NO: 76123 - DNA, 25 bp, Artificial
  Probe
agtttaacatcagcacagataaccg

SEQ ID NO: 76124 - DNA, 25 bp, Artificial
  Probe
atgaatctgtgacctgcgttaagtg

SEQ ID NO: 76125 - DNA, 25 bp, Artificial
  Probe
ccctttcttattcctcatcaagcac

SEQ ID NO: 76126 - DNA, 25 bp, Artificial
  Probe
caccctttcttattcctcatcaagc

SEQ ID NO: 76127 - DNA, 25 bp, Artificial
  Probe
atctcagagtccctactaagaatgc

SEQ ID NO: 76128 - DNA, 25 bp, Artificial
  Probe
tctatctcagagtccctactaagaa

SEQ ID NO: 76129 - DNA, 25 bp, Artificial
  Probe
taactacatggcagtggaatacaat

SEQ ID NO: 76130 - DNA, 25 bp, Artificial
  Probe
ttaactacatggcagtggaatacaa

SEQ ID NO: 76131 - DNA, 25 bp, Artificial
  Probe
cttaactacatggcagtggaataca

SEQ ID NO: 76132 - DNA, 25 bp, Artificial
  Probe
ccttaactacatggcagtggaatac

SEQ ID NO: 76133 - DNA, 25 bp, Artificial
  Probe
aactacatggcagtggaatacaatg

SEQ ID NO: 76134 - DNA, 25 bp, Artificial
  Probe
accttaactacatggcagtggaata

SEQ ID NO: 76135 - DNA, 25 bp, Artificial
  Probe
taccttaactacatggcagtggaat

SEQ ID NO: 76136 - DNA, 25 bp, Artificial
  Probe
agtctaccttaactacatggcagtg

SEQ ID NO: 76137 - DNA, 25 bp, Artificial
  Probe
cagtctaccttaactacatggcagt

SEQ ID NO: 76138 - DNA, 25 bp, Artificial
  Probe
acagtctaccttaactacatggcag

SEQ ID NO: 76139 - DNA, 25 bp, Artificial
  Probe
catagttctttctccagcaattcac

SEQ ID NO: 76140 - DNA, 25 bp, Artificial
  Probe
ctaccttaactacatggcagtggaa

SEQ ID NO: 76141 - DNA, 25 bp, Artificial
  Probe
atacaagcatagttctttctccagc

SEQ ID NO: 76142 - DNA, 25 bp, Artificial
  Probe
atagttctttctccagcaattcacc

SEQ ID NO: 76143 - DNA, 25 bp, Artificial
  Probe
aagcatagttctttctccagcaatt

SEQ ID NO: 76144 - DNA, 25 bp, Artificial
  Probe
agttatctcccttctctgtctttaa

SEQ ID NO: 76145 - DNA, 25 bp, Artificial
  Probe
aatacaagcatagttctttctccag

SEQ ID NO: 76146 - DNA, 25 bp, Artificial
  Probe
agcatagttctttctccagcaattc

SEQ ID NO: 76147 - DNA, 25 bp, Artificial
  Probe
gcatagttctttctccagcaattca

SEQ ID NO: 76148 - DNA, 25 bp, Artificial
  Probe
caagcatagttctttctccagcaat

SEQ ID NO: 76149 - DNA, 25 bp, Artificial
  Probe
aaatacaagcatagttctttctcca

SEQ ID NO: 76150 - DNA, 25 bp, Artificial
  Probe
gttatctcccttctctgtctttaag

SEQ ID NO: 76151 - DNA, 25 bp, Artificial
  Probe
gagttatctcccttctctgtcttta

SEQ ID NO: 76152 - DNA, 25 bp, Artificial
  Probe
gtctaccttaactacatggcagtgg

SEQ ID NO: 76153 - DNA, 25 bp, Artificial
  Probe
tagttctttctccagcaattcacct

SEQ ID NO: 76154 - DNA, 25 bp, Artificial
  Probe
atctctcttgctgcctctcatcatt

SEQ ID NO: 76155 - DNA, 25 bp, Artificial
  Probe
aatctctcttgctgcctctcatcat

SEQ ID NO: 76156 - DNA, 25 bp, Artificial
  Probe
tacaagcatagttctttctccagca

SEQ ID NO: 76157 - DNA, 25 bp, Artificial
  Probe
tctaccttaactacatggcagtgga

SEQ ID NO: 76158 - DNA, 25 bp, Artificial
  Probe
ttatctcccttctctgtctttaaga

SEQ ID NO: 76159 - DNA, 25 bp, Artificial
  Probe
acaagcatagttctttctccagcaa

SEQ ID NO: 76160 - DNA, 25 bp, Artificial
  Probe
cggaaatacaagcatagttctttct

SEQ ID NO: 76161 - DNA, 25 bp, Artificial
  Probe
ctacatggcagtggaatacaatgtg

SEQ ID NO: 76162 - DNA, 25 bp, Artificial
  Probe
gcggaaatacaagcatagttctttc

SEQ ID NO: 76163 - DNA, 25 bp, Artificial
  Probe
tcccttctctgtctttaagaacaaa

SEQ ID NO: 76164 - DNA, 25 bp, Artificial
  Probe
ctcccttctctgtctttaagaacaa

SEQ ID NO: 76165 - DNA, 25 bp, Artificial
  Probe
atctcccttctctgtctttaagaac

SEQ ID NO: 76166 - DNA, 25 bp, Artificial
  Probe
actacatggcagtggaatacaatgt

SEQ ID NO: 76167 - DNA, 25 bp, Artificial
  Probe
tctcccttctctgtctttaagaaca

SEQ ID NO: 76168 - DNA, 25 bp, Artificial
  Probe
tctctcttgctgcctctcatcattg

SEQ ID NO: 76169 - DNA, 25 bp, Artificial
  Probe
tacatggcagtggaatacaatgtgt

SEQ ID NO: 76170 - DNA, 25 bp, Artificial
  Probe
gattcaaacaggaccgacatcagag

SEQ ID NO: 76171 - DNA, 25 bp, Artificial
  Probe
caatctctcttgctgcctctcatca

SEQ ID NO: 76172 - DNA, 25 bp, Artificial
  Probe
ggcagtggaatacaatgtgtccttc

SEQ ID NO: 76173 - DNA, 25 bp, Artificial
  Probe
tatctcccttctctgtctttaagaa

SEQ ID NO: 76174 - DNA, 25 bp, Artificial
  Probe
ttggagagttacctgagacatcttg

SEQ ID NO: 76175 - DNA, 25 bp, Artificial
  Probe
gttggagagttacctgagacatctt

SEQ ID NO: 76176 - DNA, 25 bp, Artificial
  Probe
ggagagttacctgagacatcttgag

SEQ ID NO: 76177 - DNA, 25 bp, Artificial
  Probe
tggagagttacctgagacatcttga

SEQ ID NO: 76178 - DNA, 25 bp, Artificial
  Probe
ggaaacggctaaagaattacaacat

SEQ ID NO: 76179 - DNA, 25 bp, Artificial
  Probe
gagttacctgagacatcttgaggag

SEQ ID NO: 76180 - DNA, 25 bp, Artificial
  Probe
gagagttacctgagacatcttgagg

SEQ ID NO: 76181 - DNA, 25 bp, Artificial
  Probe
aagatgggaaacggctaaagaatta

SEQ ID NO: 76182 - DNA, 25 bp, Artificial
  Probe
atgggaaacggctaaagaattacaa

SEQ ID NO: 76183 - DNA, 25 bp, Artificial
  Probe
agttacctgagacatcttgaggaga

SEQ ID NO: 76184 - DNA, 25 bp, Artificial
  Probe
agagttacctgagacatcttgagga

SEQ ID NO: 76185 - DNA, 25 bp, Artificial
  Probe
agatgggaaacggctaaagaattac

SEQ ID NO: 76186 - DNA, 25 bp, Artificial
  Probe
aaagatgggaaacggctaaagaatt

SEQ ID NO: 76187 - DNA, 25 bp, Artificial
  Probe
gatgggaaacggctaaagaattaca

SEQ ID NO: 76188 - DNA, 25 bp, Artificial
  Probe
gttacctgagacatcttgaggagat

SEQ ID NO: 76189 - DNA, 25 bp, Artificial
  Probe
caaagatgggaaacggctaaagaat

SEQ ID NO: 76190 - DNA, 25 bp, Artificial
  Probe
gggaaacggctaaagaattacaaca

SEQ ID NO: 76191 - DNA, 25 bp, Artificial
  Probe
tgggaaacggctaaagaattacaac

SEQ ID NO: 76192 - DNA, 25 bp, Artificial
  Probe
aatctacacagaacctgaagtcttt

SEQ ID NO: 76193 - DNA, 25 bp, Artificial
  Probe
aaatctacacagaacctgaagtctt

SEQ ID NO: 76194 - DNA, 25 bp, Artificial
  Probe
gaaatctacacagaacctgaagtct

SEQ ID NO: 76195 - DNA, 25 bp, Artificial
  Probe
agaaatctacacagaacctgaagtc

SEQ ID NO: 76196 - DNA, 25 bp, Artificial
  Probe
cagaaatctacacagaacctgaagt

SEQ ID NO: 76197 - DNA, 25 bp, Artificial
  Probe
tctacacagaacctgaagtctttaa

SEQ ID NO: 76198 - DNA, 25 bp, Artificial
  Probe
gaaggacccagaaatctacacagaa

SEQ ID NO: 76199 - DNA, 25 bp, Artificial
  Probe
atctacacagaacctgaagtcttta

SEQ ID NO: 76200 - DNA, 25 bp, Artificial
  Probe
ccagaaatctacacagaacctgaag

SEQ ID NO: 76201 - DNA, 25 bp, Artificial
  Probe
aacctgaagtctttaaatacaaccg

SEQ ID NO: 76202 - DNA, 25 bp, Artificial
  Probe
aaggacccagaaatctacacagaac

SEQ ID NO: 76203 - DNA, 25 bp, Artificial
  Probe
cagaaggacccagaaatctacacag

SEQ ID NO: 76204 - DNA, 25 bp, Artificial
  Probe
agaaggacccagaaatctacacaga

SEQ ID NO: 76205 - DNA, 25 bp, Artificial
  Probe
cccagaaatctacacagaacctgaa

SEQ ID NO: 76206 - DNA, 25 bp, Artificial
  Probe
ggttggagagttacctgagacatct

SEQ ID NO: 76207 - DNA, 25 bp, Artificial
  Probe
gaacctgaagtctttaaatacaacc

SEQ ID NO: 76208 - DNA, 25 bp, Artificial
  Probe
tggttggagagttacctgagacatc

SEQ ID NO: 76209 - DNA, 25 bp, Artificial
  Probe
ctggttggagagttacctgagacat

SEQ ID NO: 76210 - DNA, 25 bp, Artificial
  Probe
ctacacagaacctgaagtctttaaa

SEQ ID NO: 76211 - DNA, 25 bp, Artificial
  Probe
aaggtctgcttgagttctcctacag

SEQ ID NO: 76212 - DNA, 25 bp, Artificial
  Probe
gacccagaaatctacacagaacctg

SEQ ID NO: 76213 - DNA, 25 bp, Artificial
  Probe
acagaacctgaagtctttaaataca

SEQ ID NO: 76214 - DNA, 25 bp, Artificial
  Probe
acacagaacctgaagtctttaaata

SEQ ID NO: 76215 - DNA, 25 bp, Artificial
  Probe
tacacagaacctgaagtctttaaat

SEQ ID NO: 76216 - DNA, 25 bp, Artificial
  Probe
gaaaggtctgcttgagttctcctac

SEQ ID NO: 76217 - DNA, 25 bp, Artificial
  Probe
acctgaagtctttaaatacaaccgg

SEQ ID NO: 76218 - DNA, 25 bp, Artificial
  Probe
cacagaacctgaagtctttaaatac

SEQ ID NO: 76219 - DNA, 25 bp, Artificial
  Probe
aattctgttgtcaagatatggcagg

SEQ ID NO: 76220 - DNA, 25 bp, Artificial
  Probe
ggtggtgacttcctttgtaattcta

SEQ ID NO: 76221 - DNA, 25 bp, Artificial
  Probe
gtttatcacttgtggactttggaaa

SEQ ID NO: 76222 - DNA, 25 bp, Artificial
  Probe
attctgttgtcaagatatggcaggt

SEQ ID NO: 76223 - DNA, 25 bp, Artificial
  Probe
gtggtgacttcctttgtaattctaa

SEQ ID NO: 76224 - DNA, 25 bp, Artificial
  Probe
gaaattctgttgtcaagatatggca

SEQ ID NO: 76225 - DNA, 25 bp, Artificial
  Probe
tcctctataacgaacatgaaggctt

SEQ ID NO: 76226 - DNA, 25 bp, Artificial
  Probe
ttcctctataacgaacatgaaggct

SEQ ID NO: 76227 - DNA, 25 bp, Artificial
  Probe
cgaaattctgttgtcaagatatggc

SEQ ID NO: 76228 - DNA, 25 bp, Artificial
  Probe
tttatcacttgtggactttggaaag

SEQ ID NO: 76229 - DNA, 25 bp, Artificial
  Probe
agtttatcacttgtggactttggaa

SEQ ID NO: 76230 - DNA, 25 bp, Artificial
  Probe
gagtttatcacttgtggactttgga

SEQ ID NO: 76231 - DNA, 25 bp, Artificial
  Probe
ctggagtttatcacttgtggacttt

SEQ ID NO: 76232 - DNA, 25 bp, Artificial
  Probe
tggtgacttcctttgtaattctaaa

SEQ ID NO: 76233 - DNA, 25 bp, Artificial
  Probe
tggagtttatcacttgtggactttg

SEQ ID NO: 76234 - DNA, 25 bp, Artificial
  Probe
aaattctgttgtcaagatatggcag

SEQ ID NO: 76235 - DNA, 25 bp, Artificial
  Probe
ctctataacgaacatgaaggcttta

SEQ ID NO: 76236 - DNA, 25 bp, Artificial
  Probe
ttatcacttgtggactttggaaagc

SEQ ID NO: 76237 - DNA, 25 bp, Artificial
  Probe
ttctgttgtcaagatatggcaggtg

SEQ ID NO: 76238 - DNA, 25 bp, Artificial
  Probe
catttcttatggcacaggaacagac

SEQ ID NO: 76239 - DNA, 25 bp, Artificial
  Probe
ggagtttatcacttgtggactttgg

SEQ ID NO: 76240 - DNA, 25 bp, Artificial
  Probe
actggagtttatcacttgtggactt

SEQ ID NO: 76241 - DNA, 25 bp, Artificial
  Probe
tctataacgaacatgaaggctttaa

SEQ ID NO: 76242 - DNA, 25 bp, Artificial
  Probe
atttcttatggcacaggaacagaca

SEQ ID NO: 76243 - DNA, 25 bp, Artificial
  Probe
aactggagtttatcacttgtggact

SEQ ID NO: 76244 - DNA, 25 bp, Artificial
  Probe
caactggagtttatcacttgtggac

SEQ ID NO: 76245 - DNA, 25 bp, Artificial
  Probe
cctctataacgaacatgaaggcttt

SEQ ID NO: 76246 - DNA, 25 bp, Artificial
  Probe
aggtggtgacttcctttgtaattct

SEQ ID NO: 76247 - DNA, 25 bp, Artificial
  Probe
caggtggtgacttcctttgtaattc

SEQ ID NO: 76248 - DNA, 25 bp, Artificial
  Probe
tcgttgtactttgcatttcttatgg

SEQ ID NO: 76249 - DNA, 25 bp, Artificial
  Probe
agttcctctataacgaacatgaagg

SEQ ID NO: 76250 - DNA, 25 bp, Artificial
  Probe
tttcttatggcacaggaacagacag

SEQ ID NO: 76251 - DNA, 25 bp, Artificial
  Probe
cgttgtactttgcatttcttatggc

SEQ ID NO: 76252 - DNA, 25 bp, Artificial
  Probe
caccttgaccttgttttctgtaatc

SEQ ID NO: 76253 - DNA, 25 bp, Artificial
  Probe
ctataacgaacatgaaggctttaaa

SEQ ID NO: 76254 - DNA, 25 bp, Artificial
  Probe
gttcctctataacgaacatgaaggc

SEQ ID NO: 76255 - DNA, 25 bp, Artificial
  Probe
gagtttgaatgttggggttgtaatc

SEQ ID NO: 76256 - DNA, 25 bp, Artificial
  Probe
gaatgttggggttgtaatcagaatt

SEQ ID NO: 76257 - DNA, 25 bp, Artificial
  Probe
tatcacttgtggactttggaaagct

SEQ ID NO: 76258 - DNA, 25 bp, Artificial
  Probe
cttgaccttgttttctgtaatccct

SEQ ID NO: 76259 - DNA, 25 bp, Artificial
  Probe
tgagtttgaatgttggggttgtaat

SEQ ID NO: 76260 - DNA, 25 bp, Artificial
  Probe
tcaagatatggcaggtggtgacttc

SEQ ID NO: 76261 - DNA, 25 bp, Artificial
  Probe
caacgcaactggagtttatcacttg

SEQ ID NO: 76262 - DNA, 25 bp, Artificial
  Probe
ttgaccttgttttctgtaatccctg

SEQ ID NO: 76263 - DNA, 25 bp, Artificial
  Probe
accttgaccttgttttctgtaatcc

SEQ ID NO: 76264 - DNA, 25 bp, Artificial
  Probe
tgctaatagatagtaactcaatccg

SEQ ID NO: 76265 - DNA, 25 bp, Artificial
  Probe
agatgtgtgggtttgtttatgatac

SEQ ID NO: 76266 - DNA, 25 bp, Artificial
  Probe
cagatgtgtgggtttgtttatgata

SEQ ID NO: 76267 - DNA, 25 bp, Artificial
  Probe
ttcacaagtaacagaaccaagaaac

SEQ ID NO: 76268 - DNA, 25 bp, Artificial
  Probe
aaagtttccgtgatttaacagtctg

SEQ ID NO: 76269 - DNA, 25 bp, Artificial
  Probe
tgcgtgtgtactaacagtcattgta

SEQ ID NO: 76270 - DNA, 25 bp, Artificial
  Probe
tcacaagtaacagaaccaagaaact

SEQ ID NO: 76271 - DNA, 25 bp, Artificial
  Probe
taaagtttccgtgatttaacagtct

SEQ ID NO: 76272 - DNA, 25 bp, Artificial
  Probe
ttcccagtgtttagatgatctcaaa

SEQ ID NO: 76273 - DNA, 25 bp, Artificial
  Probe
tttcccagtgtttagatgatctcaa

SEQ ID NO: 76274 - DNA, 25 bp, Artificial
  Probe
caggttatttgttggtttatggaca

SEQ ID NO: 76275 - DNA, 25 bp, Artificial
  Probe
tcccagtgtttagatgatctcaaat

SEQ ID NO: 76276 - DNA, 25 bp, Artificial
  Probe
tacagatgtgtgggtttgtttatga

SEQ ID NO: 76277 - DNA, 25 bp, Artificial
  Probe
gcctttgctaatagatagtaactca

SEQ ID NO: 76278 - DNA, 25 bp, Artificial
  Probe
gatgtgtgggtttgtttatgataca

SEQ ID NO: 76279 - DNA, 25 bp, Artificial
  Probe
atttgttggtttatggacatactgc

SEQ ID NO: 76280 - DNA, 25 bp, Artificial
  Probe
aaattaccatgcctgctttatgttt

SEQ ID NO: 76281 - DNA, 25 bp, Artificial
  Probe
acagatgtgtgggtttgtttatgat

SEQ ID NO: 76282 - DNA, 25 bp, Artificial
  Probe
tttatgagcacagactttcaagaaa

SEQ ID NO: 76283 - DNA, 25 bp, Artificial
  Probe
cccagtgtttagatgatctcaaatt

SEQ ID NO: 76284 - DNA, 25 bp, Artificial
  Probe
aattaccatgcctgctttatgttta

SEQ ID NO: 76285 - DNA, 25 bp, Artificial
  Probe
accatgcctgctttatgtttatatt

SEQ ID NO: 76286 - DNA, 25 bp, Artificial
  Probe
attaccatgcctgctttatgtttat

SEQ ID NO: 76287 - DNA, 25 bp, Artificial
  Probe
aggttatttgttggtttatggacat

SEQ ID NO: 76288 - DNA, 25 bp, Artificial
  Probe
taaattaccatgcctgctttatgtt

SEQ ID NO: 76289 - DNA, 25 bp, Artificial
  Probe
gtacagatgtgtgggtttgtttatg

SEQ ID NO: 76290 - DNA, 25 bp, Artificial
  Probe
aatagatagtaactcaatccggtgt

SEQ ID NO: 76291 - DNA, 25 bp, Artificial
  Probe
tagatagtaactcaatccggtgttg

SEQ ID NO: 76292 - DNA, 25 bp, Artificial
  Probe
atagatagtaactcaatccggtgtt

SEQ ID NO: 76293 - DNA, 25 bp, Artificial
  Probe
ttaccatgcctgctttatgtttata

SEQ ID NO: 76294 - DNA, 25 bp, Artificial
  Probe
tttgttggtttatggacatactgcc

SEQ ID NO: 76295 - DNA, 25 bp, Artificial
  Probe
ttggtttatggacatactgcccttt

SEQ ID NO: 76296 - DNA, 25 bp, Artificial
  Probe
ccaggttatttgttggtttatggac

SEQ ID NO: 76297 - DNA, 25 bp, Artificial
  Probe
taccatgcctgctttatgtttatat

SEQ ID NO: 76298 - DNA, 25 bp, Artificial
  Probe
gctaatagatagtaactcaatccgg

SEQ ID NO: 76299 - DNA, 25 bp, Artificial
  Probe
ccatgcctgctttatgtttatattt

SEQ ID NO: 76300 - DNA, 25 bp, Artificial
  Probe
cagccaggttatttgttggtttatg

SEQ ID NO: 76301 - DNA, 25 bp, Artificial
  Probe
aagtttccgtgatttaacagtctgt

SEQ ID NO: 76302 - DNA, 25 bp, Artificial
  Probe
tgtgggtttgtttatgatacactgc

SEQ ID NO: 76303 - DNA, 25 bp, Artificial
  Probe
gcgtgtgtactaacagtcattgtac

SEQ ID NO: 76304 - DNA, 25 bp, Artificial
  Probe
tttcacaagtaacagaaccaagaaa

SEQ ID NO: 76305 - DNA, 25 bp, Artificial
  Probe
gccaggttatttgttggtttatgga

SEQ ID NO: 76306 - DNA, 25 bp, Artificial
  Probe
agccaggttatttgttggtttatgg

SEQ ID NO: 76307 - DNA, 25 bp, Artificial
  Probe
gtgcgtgtgtactaacagtcattgt

SEQ ID NO: 76308 - DNA, 25 bp, Artificial
  Probe
tgtgcgtgtgtactaacagtcattg

SEQ ID NO: 76309 - DNA, 25 bp, Artificial
  Probe
cagaacatcaacttggagaacaacc

SEQ ID NO: 76310 - DNA, 25 bp, Artificial
  Probe
gaacatcaacttggagaacaacctc

SEQ ID NO: 76311 - DNA, 25 bp, Artificial
  Probe
agaacatcaacttggagaacaacct

SEQ ID NO: 76312 - DNA, 25 bp, Artificial
  Probe
gattgaagagagtaccacggtagtc

SEQ ID NO: 76313 - DNA, 25 bp, Artificial
  Probe
cagattgaagagagtaccacggtag

SEQ ID NO: 76314 - DNA, 25 bp, Artificial
  Probe
agattgaagagagtaccacggtagt

SEQ ID NO: 76315 - DNA, 25 bp, Artificial
  Probe
agaccaatgataccagagttctgag

SEQ ID NO: 76316 - DNA, 25 bp, Artificial
  Probe
gagaccaatgataccagagttctga

SEQ ID NO: 76317 - DNA, 25 bp, Artificial
  Probe
gataccagagttctgaggcactaag

SEQ ID NO: 76318 - DNA, 25 bp, Artificial
  Probe
ctcagcagattgaagagagtaccac

SEQ ID NO: 76319 - DNA, 25 bp, Artificial
  Probe
ccagaacatcaacttggagaacaac

SEQ ID NO: 76320 - DNA, 25 bp, Artificial
  Probe
attgaagagagtaccacggtagtca

SEQ ID NO: 76321 - DNA, 25 bp, Artificial
  Probe
gtactggtctcagcagattgaagag

SEQ ID NO: 76322 - DNA, 25 bp, Artificial
  Probe
gaccaatgataccagagttctgagg

SEQ ID NO: 76323 - DNA, 25 bp, Artificial
  Probe
tccgagaccaatgataccagagttc

SEQ ID NO: 76324 - DNA, 25 bp, Artificial
  Probe
accagaacatcaacttggagaacaa

SEQ ID NO: 76325 - DNA, 25 bp, Artificial
  Probe
aaccagaacatcaacttggagaaca

SEQ ID NO: 76326 - DNA, 25 bp, Artificial
  Probe
atgataccagagttctgaggcacta

SEQ ID NO: 76327 - DNA, 25 bp, Artificial
  Probe
ccgagaccaatgataccagagttct

SEQ ID NO: 76328 - DNA, 25 bp, Artificial
  Probe
tgataccagagttctgaggcactaa

SEQ ID NO: 76329 - DNA, 25 bp, Artificial
  Probe
cgagaccaatgataccagagttctg

SEQ ID NO: 76330 - DNA, 25 bp, Artificial
  Probe
aacatcaacttggagaacaacctcg

SEQ ID NO: 76331 - DNA, 25 bp, Artificial
  Probe
caatgataccagagttctgaggcac

SEQ ID NO: 76332 - DNA, 25 bp, Artificial
  Probe
ttgaagagagtaccacggtagtcac

SEQ ID NO: 76333 - DNA, 25 bp, Artificial
  Probe
aaaccagaacatcaacttggagaac

SEQ ID NO: 76334 - DNA, 25 bp, Artificial
  Probe
aatgataccagagttctgaggcact

SEQ ID NO: 76335 - DNA, 25 bp, Artificial
  Probe
gcagattgaagagagtaccacggta

SEQ ID NO: 76336 - DNA, 25 bp, Artificial
  Probe
ataccagagttctgaggcactaagg

SEQ ID NO: 76337 - DNA, 25 bp, Artificial
  Probe
gtccgagaccaatgataccagagtt

SEQ ID NO: 76338 - DNA, 25 bp, Artificial
  Probe
tcagcagattgaagagagtaccacg

SEQ ID NO: 76339 - DNA, 25 bp, Artificial
  Probe
aagtactggtctcagcagattgaag

SEQ ID NO: 76340 - DNA, 25 bp, Artificial
  Probe
caagtactggtctcagcagattgaa

SEQ ID NO: 76341 - DNA, 25 bp, Artificial
  Probe
gtctcagcagattgaagagagtacc

SEQ ID NO: 76342 - DNA, 25 bp, Artificial
  Probe
ggtctcagcagattgaagagagtac

SEQ ID NO: 76343 - DNA, 25 bp, Artificial
  Probe
ccaatgataccagagttctgaggca

SEQ ID NO: 76344 - DNA, 25 bp, Artificial
  Probe
accaatgataccagagttctgaggc

SEQ ID NO: 76345 - DNA, 25 bp, Artificial
  Probe
gtgtccgagaccaatgataccagag

SEQ ID NO: 76346 - DNA, 25 bp, Artificial
  Probe
tctcagcagattgaagagagtacca

SEQ ID NO: 76347 - DNA, 25 bp, Artificial
  Probe
tggtctcagcagattgaagagagta

SEQ ID NO: 76348 - DNA, 25 bp, Artificial
  Probe
tactggtctcagcagattgaagaga

SEQ ID NO: 76349 - DNA, 25 bp, Artificial
  Probe
agtactggtctcagcagattgaaga

SEQ ID NO: 76350 - DNA, 25 bp, Artificial
  Probe
cagcagattgaagagagtaccacgg

SEQ ID NO: 76351 - DNA, 25 bp, Artificial
  Probe
tgtccgagaccaatgataccagagt

SEQ ID NO: 76352 - DNA, 25 bp, Artificial
  Probe
aaaaccagaacatcaacttggagaa

SEQ ID NO: 76353 - DNA, 25 bp, Artificial
  Probe
acatcaacttggagaacaacctcgg

SEQ ID NO: 76354 - DNA, 25 bp, Artificial
  Probe
tgttcttcctagtgtagcttccttt

SEQ ID NO: 76355 - DNA, 25 bp, Artificial
  Probe
ttcttcctagtgtagcttccttttg

SEQ ID NO: 76356 - DNA, 25 bp, Artificial
  Probe
gttcttcctagtgtagcttcctttt

SEQ ID NO: 76357 - DNA, 25 bp, Artificial
  Probe
cttcctagtgtagcttccttttgag

SEQ ID NO: 76358 - DNA, 25 bp, Artificial
  Probe
tcttcctagtgtagcttccttttga

SEQ ID NO: 76359 - DNA, 25 bp, Artificial
  Probe
ctagtgtagcttccttttgagtgtg

SEQ ID NO: 76360 - DNA, 25 bp, Artificial
  Probe
ttcctagtgtagcttccttttgagt

SEQ ID NO: 76361 - DNA, 25 bp, Artificial
  Probe
tcctagtgtagcttccttttgagtg

SEQ ID NO: 76362 - DNA, 25 bp, Artificial
  Probe
cctagtgtagcttccttttgagtgt

SEQ ID NO: 76363 - DNA, 25 bp, Artificial
  Probe
tagtgtagcttccttttgagtgtgg

SEQ ID NO: 76364 - DNA, 25 bp, Artificial
  Probe
gtgtagcttccttttgagtgtggtg

SEQ ID NO: 76365 - DNA, 25 bp, Artificial
  Probe
agagaaagctaagaatccggtgcag

SEQ ID NO: 76366 - DNA, 25 bp, Artificial
  Probe
gagagaaagctaagaatccggtgca

SEQ ID NO: 76367 - DNA, 25 bp, Artificial
  Probe
agtgtagcttccttttgagtgtggt

SEQ ID NO: 76368 - DNA, 25 bp, Artificial
  Probe
gtgcaggaaacaacagaccttgtag

SEQ ID NO: 76369 - DNA, 25 bp, Artificial
  Probe
caggaaacaacagaccttgtaggtg

SEQ ID NO: 76370 - DNA, 25 bp, Artificial
  Probe
ctaagaatccggtgcaggagaaaag

SEQ ID NO: 76371 - DNA, 25 bp, Artificial
  Probe
tagcttccttttgagtgtggtggtg

SEQ ID NO: 76372 - DNA, 25 bp, Artificial
  Probe
gtagcttccttttgagtgtggtggt

SEQ ID NO: 76373 - DNA, 25 bp, Artificial
  Probe
tgtagcttccttttgagtgtggtgg

SEQ ID NO: 76374 - DNA, 25 bp, Artificial
  Probe
taagaatccggtgcaggagaaaaga

SEQ ID NO: 76375 - DNA, 25 bp, Artificial
  Probe
tgcaggaaacaacagaccttgtagg

SEQ ID NO: 76376 - DNA, 25 bp, Artificial
  Probe
aggaaacaacagaccttgtaggtgg

SEQ ID NO: 76377 - DNA, 25 bp, Artificial
  Probe
aagaatccggtgcaggagaaaagaa

SEQ ID NO: 76378 - DNA, 25 bp, Artificial
  Probe
gaaacaacagaccttgtaggtggct

SEQ ID NO: 76379 - DNA, 25 bp, Artificial
  Probe
gcaggaaacaacagaccttgtaggt

SEQ ID NO: 76380 - DNA, 25 bp, Artificial
  Probe
agaatccggtgcaggagaaaagaac

SEQ ID NO: 76381 - DNA, 25 bp, Artificial
  Probe
gctaagaatccggtgcaggagaaaa

SEQ ID NO: 76382 - DNA, 25 bp, Artificial
  Probe
gactcagtacaagccaaaagaacct

SEQ ID NO: 76383 - DNA, 25 bp, Artificial
  Probe
ctgactcagtacaagccaaaagaac

SEQ ID NO: 76384 - DNA, 25 bp, Artificial
  Probe
tgactcagtacaagccaaaagaacc

SEQ ID NO: 76385 - DNA, 25 bp, Artificial
  Probe
cctgactcagtacaagccaaaagaa

SEQ ID NO: 76386 - DNA, 25 bp, Artificial
  Probe
ctcagtacaagccaaaagaacctgt

SEQ ID NO: 76387 - DNA, 25 bp, Artificial
  Probe
actcagtacaagccaaaagaacctg

SEQ ID NO: 76388 - DNA, 25 bp, Artificial
  Probe
agtacaagccaaaagaacctgtgac

SEQ ID NO: 76389 - DNA, 25 bp, Artificial
  Probe
cagtacaagccaaaagaacctgtga

SEQ ID NO: 76390 - DNA, 25 bp, Artificial
  Probe
tcagtacaagccaaaagaacctgtg

SEQ ID NO: 76391 - DNA, 25 bp, Artificial
  Probe
cacctgactcagtacaagccaaaag

SEQ ID NO: 76392 - DNA, 25 bp, Artificial
  Probe
acctgactcagtacaagccaaaaga

SEQ ID NO: 76393 - DNA, 25 bp, Artificial
  Probe
gtacaagccaaaagaacctgtgacc

SEQ ID NO: 76394 - DNA, 25 bp, Artificial
  Probe
tacaagccaaaagaacctgtgacca

SEQ ID NO: 76395 - DNA, 25 bp, Artificial
  Probe
ccacctgactcagtacaagccaaaa

SEQ ID NO: 76396 - DNA, 25 bp, Artificial
  Probe
atgttcagaggcaatcagttgtata

SEQ ID NO: 76397 - DNA, 25 bp, Artificial
  Probe
tatgttcagaggcaatcagttgtat

SEQ ID NO: 76398 - DNA, 25 bp, Artificial
  Probe
gtatgttcagaggcaatcagttgta

SEQ ID NO: 76399 - DNA, 25 bp, Artificial
  Probe
aacttggatgatagaacctaatgtt

SEQ ID NO: 76400 - DNA, 25 bp, Artificial
  Probe
atgtactgtatgttcagaggcaatc

SEQ ID NO: 76401 - DNA, 25 bp, Artificial
  Probe
gtactgtatgttcagaggcaatcag

SEQ ID NO: 76402 - DNA, 25 bp, Artificial
  Probe
tgtatgttcagaggcaatcagttgt

SEQ ID NO: 76403 - DNA, 25 bp, Artificial
  Probe
catgtactgtatgttcagaggcaat

SEQ ID NO: 76404 - DNA, 25 bp, Artificial
  Probe
ctgtatgttcagaggcaatcagttg

SEQ ID NO: 76405 - DNA, 25 bp, Artificial
  Probe
tgtactgtatgttcagaggcaatca

SEQ ID NO: 76406 - DNA, 25 bp, Artificial
  Probe
agagccatttcaaagtcttcctaaa

SEQ ID NO: 76407 - DNA, 25 bp, Artificial
  Probe
aggaaatctgtagggaaagtagtta

SEQ ID NO: 76408 - DNA, 25 bp, Artificial
  Probe
tgttcagaggcaatcagttgtatac

SEQ ID NO: 76409 - DNA, 25 bp, Artificial
  Probe
gttcagaggcaatcagttgtatact

SEQ ID NO: 76410 - DNA, 25 bp, Artificial
  Probe
agaggcaatcagttgtatactcaat

SEQ ID NO: 76411 - DNA, 25 bp, Artificial
  Probe
ttcagaggcaatcagttgtatactc

SEQ ID NO: 76412 - DNA, 25 bp, Artificial
  Probe
cagaggcaatcagttgtatactcaa

SEQ ID NO: 76413 - DNA, 25 bp, Artificial
  Probe
ttgttgcatgtactgtatgttcaga

SEQ ID NO: 76414 - DNA, 25 bp, Artificial
  Probe
caggaaatctgtagggaaagtagtt

SEQ ID NO: 76415 - DNA, 25 bp, Artificial
  Probe
aattcaggaaatctgtagggaaagt

SEQ ID NO: 76416 - DNA, 25 bp, Artificial
  Probe
tgttgcatgtactgtatgttcagag

SEQ ID NO: 76417 - DNA, 25 bp, Artificial
  Probe
ttcaggaaatctgtagggaaagtag

SEQ ID NO: 76418 - DNA, 25 bp, Artificial
  Probe
tcagaggcaatcagttgtatactca

SEQ ID NO: 76419 - DNA, 25 bp, Artificial
  Probe
aaacttggatgatagaacctaatgt

SEQ ID NO: 76420 - DNA, 25 bp, Artificial
  Probe
tcaggaaatctgtagggaaagtagt

SEQ ID NO: 76421 - DNA, 25 bp, Artificial
  Probe
ggaaatctgtagggaaagtagttat

SEQ ID NO: 76422 - DNA, 25 bp, Artificial
  Probe
attcaggaaatctgtagggaaagta

SEQ ID NO: 76423 - DNA, 25 bp, Artificial
  Probe
tgtgtttaattacccaaccaaagag

SEQ ID NO: 76424 - DNA, 25 bp, Artificial
  Probe
ctgtgtttaattacccaaccaaaga

SEQ ID NO: 76425 - DNA, 25 bp, Artificial
  Probe
tctgtgtttaattacccaaccaaag

SEQ ID NO: 76426 - DNA, 25 bp, Artificial
  Probe
gtgtttaattacccaaccaaagaga

SEQ ID NO: 76427 - DNA, 25 bp, Artificial
  Probe
gaggcaatcagttgtatactcaata

SEQ ID NO: 76428 - DNA, 25 bp, Artificial
  Probe
ttctgtgtttaattacccaaccaaa

SEQ ID NO: 76429 - DNA, 25 bp, Artificial
  Probe
tttctgtgtttaattacccaaccaa

SEQ ID NO: 76430 - DNA, 25 bp, Artificial
  Probe
acttggatgatagaacctaatgttt

SEQ ID NO: 76431 - DNA, 25 bp, Artificial
  Probe
ttcaatttcattagatgttaccacg

SEQ ID NO: 76432 - DNA, 25 bp, Artificial
  Probe
atttctgtgtttaattacccaacca

SEQ ID NO: 76433 - DNA, 25 bp, Artificial
  Probe
gttgcatgtactgtatgttcagagg

SEQ ID NO: 76434 - DNA, 25 bp, Artificial
  Probe
tgtgccttacatgaagagaaactat

SEQ ID NO: 76435 - DNA, 25 bp, Artificial
  Probe
ttactgtgccttacatgaagagaaa

SEQ ID NO: 76436 - DNA, 25 bp, Artificial
  Probe
tttactgtgccttacatgaagagaa

SEQ ID NO: 76437 - DNA, 25 bp, Artificial
  Probe
catttctgtgtttaattacccaacc

SEQ ID NO: 76438 - DNA, 25 bp, Artificial
  Probe
ctgtgccttacatgaagagaaacta

SEQ ID NO: 76439 - DNA, 25 bp, Artificial
  Probe
gccttacatgaagagaaactataca

SEQ ID NO: 76440 - DNA, 25 bp, Artificial
  Probe
tgccttacatgaagagaaactatac

SEQ ID NO: 76441 - DNA, 25 bp, Artificial
  Probe
gaatcctgagaagcatcttagagta

SEQ ID NO: 76442 - DNA, 25 bp, Artificial
  Probe
gtgaatcctgagaagcatcttagag

SEQ ID NO: 76443 - DNA, 25 bp, Artificial
  Probe
aatcctgagaagcatcttagagtaa

SEQ ID NO: 76444 - DNA, 25 bp, Artificial
  Probe
tgaatcctgagaagcatcttagagt

SEQ ID NO: 76445 - DNA, 25 bp, Artificial
  Probe
ctgtgaatcctgagaagcatcttag

SEQ ID NO: 76446 - DNA, 25 bp, Artificial
  Probe
tgtgaatcctgagaagcatcttaga

SEQ ID NO: 76447 - DNA, 25 bp, Artificial
  Probe
aactactgtgaatcctgagaagcat

SEQ ID NO: 76448 - DNA, 25 bp, Artificial
  Probe
actgtgaatcctgagaagcatctta

SEQ ID NO: 76449 - DNA, 25 bp, Artificial
  Probe
tactgtgaatcctgagaagcatctt

SEQ ID NO: 76450 - DNA, 25 bp, Artificial
  Probe
aacattgtcaccaagaagatcattc

SEQ ID NO: 76451 - DNA, 25 bp, Artificial
  Probe
caacattgtcaccaagaagatcatt

SEQ ID NO: 76452 - DNA, 25 bp, Artificial
  Probe
agaactactgtgaatcctgagaagc

SEQ ID NO: 76453 - DNA, 25 bp, Artificial
  Probe
actactgtgaatcctgagaagcatc

SEQ ID NO: 76454 - DNA, 25 bp, Artificial
  Probe
ctactgtgaatcctgagaagcatct

SEQ ID NO: 76455 - DNA, 25 bp, Artificial
  Probe
cagaactactgtgaatcctgagaag

SEQ ID NO: 76456 - DNA, 25 bp, Artificial
  Probe
gaactactgtgaatcctgagaagca

SEQ ID NO: 76457 - DNA, 25 bp, Artificial
  Probe
acattgtcaccaagaagatcattcg

SEQ ID NO: 76458 - DNA, 25 bp, Artificial
  Probe
ccagaactactgtgaatcctgagaa

SEQ ID NO: 76459 - DNA, 25 bp, Artificial
  Probe
gcaacattgtcaccaagaagatcat

SEQ ID NO: 76460 - DNA, 25 bp, Artificial
  Probe
gaccagaactactgtgaatcctgag

SEQ ID NO: 76461 - DNA, 25 bp, Artificial
  Probe
cattgtcaccaagaagatcattcga

SEQ ID NO: 76462 - DNA, 25 bp, Artificial
  Probe
atcctgagaagcatcttagagtaaa

SEQ ID NO: 76463 - DNA, 25 bp, Artificial
  Probe
cctcaaggaaagatggaaacattaa

SEQ ID NO: 76464 - DNA, 25 bp, Artificial
  Probe
agaggaacaattcacagacgaacag

SEQ ID NO: 76465 - DNA, 25 bp, Artificial
  Probe
gacagaggaacaattcacagacgaa

SEQ ID NO: 76466 - DNA, 25 bp, Artificial
  Probe
accagaactactgtgaatcctgaga

SEQ ID NO: 76467 - DNA, 25 bp, Artificial
  Probe
cagaggaacaattcacagacgaaca

SEQ ID NO: 76468 - DNA, 25 bp, Artificial
  Probe
acagaggaacaattcacagacgaac

SEQ ID NO: 76469 - DNA, 25 bp, Artificial
  Probe
ctcaaggaaagatggaaacattaaa

SEQ ID NO: 76470 - DNA, 25 bp, Artificial
  Probe
aactagccttggaatccagattcaa

SEQ ID NO: 76471 - DNA, 25 bp, Artificial
  Probe
ttggaatccagattcaagactcctc

SEQ ID NO: 76472 - DNA, 25 bp, Artificial
  Probe
gaggaacaattcacagacgaacagg

SEQ ID NO: 76473 - DNA, 25 bp, Artificial
  Probe
caaacagtgacctctcctcaagtag

SEQ ID NO: 76474 - DNA, 25 bp, Artificial
  Probe
tcctcaaggaaagatggaaacatta

SEQ ID NO: 76475 - DNA, 25 bp, Artificial
  Probe
atactcctcaaggaaagatggaaac

SEQ ID NO: 76476 - DNA, 25 bp, Artificial
  Probe
catactcctcaaggaaagatggaaa

SEQ ID NO: 76477 - DNA, 25 bp, Artificial
  Probe
cttcatactcctcaaggaaagatgg

SEQ ID NO: 76478 - DNA, 25 bp, Artificial
  Probe
ggaccagaactactgtgaatcctga

SEQ ID NO: 76479 - DNA, 25 bp, Artificial
  Probe
ggcaacattgtcaccaagaagatca

SEQ ID NO: 76480 - DNA, 25 bp, Artificial
  Probe
ctcctcaaggaaagatggaaacatt

SEQ ID NO: 76481 - DNA, 25 bp, Artificial
  Probe
tcatactcctcaaggaaagatggaa

SEQ ID NO: 76482 - DNA, 25 bp, Artificial
  Probe
ttcatactcctcaaggaaagatgga

SEQ ID NO: 76483 - DNA, 25 bp, Artificial
  Probe
ttcgtggaccagaactactgtgaat

SEQ ID NO: 76484 - DNA, 25 bp, Artificial
  Probe
tgacagaggaacaattcacagacga

SEQ ID NO: 76485 - DNA, 25 bp, Artificial
  Probe
gcttcatactcctcaaggaaagatg

SEQ ID NO: 76486 - DNA, 25 bp, Artificial
  Probe
tgaggtgtcttgtatgattgtggtt

SEQ ID NO: 76487 - DNA, 25 bp, Artificial
  Probe
catccaagattcttactctctaacg

SEQ ID NO: 76488 - DNA, 25 bp, Artificial
  Probe
cagtagtaacaaggacattacctga

SEQ ID NO: 76489 - DNA, 25 bp, Artificial
  Probe
gtagtaacaaggacattacctgagg

SEQ ID NO: 76490 - DNA, 25 bp, Artificial
  Probe
agtagtaacaaggacattacctgag

SEQ ID NO: 76491 - DNA, 25 bp, Artificial
  Probe
ctgaggtgtcttgtatgattgtggt

SEQ ID NO: 76492 - DNA, 25 bp, Artificial
  Probe
gcagtagtaacaaggacattacctg

SEQ ID NO: 76493 - DNA, 25 bp, Artificial
  Probe
ggtgtcttgtatgattgtggtttag

SEQ ID NO: 76494 - DNA, 25 bp, Artificial
  Probe
aggtgtcttgtatgattgtggttta

SEQ ID NO: 76495 - DNA, 25 bp, Artificial
  Probe
tttggtcacatttatttgcctcttc

SEQ ID NO: 76496 - DNA, 25 bp, Artificial
  Probe
gatttggtcacatttatttgcctct

SEQ ID NO: 76497 - DNA, 25 bp, Artificial
  Probe
gtgtcttgtatgattgtggtttagc

SEQ ID NO: 76498 - DNA, 25 bp, Artificial
  Probe
atttggtcacatttatttgcctctt

SEQ ID NO: 76499 - DNA, 25 bp, Artificial
  Probe
gtcacatttatttgcctcttcgttt

SEQ ID NO: 76500 - DNA, 25 bp, Artificial
  Probe
tcatccaagattcttactctctaac

SEQ ID NO: 76501 - DNA, 25 bp, Artificial
  Probe
cgttcttggtcctattgaaacattt

SEQ ID NO: 76502 - DNA, 25 bp, Artificial
  Probe
gaggtgtcttgtatgattgtggttt

SEQ ID NO: 76503 - DNA, 25 bp, Artificial
  Probe
tgtcttgtatgattgtggtttagcc

SEQ ID NO: 76504 - DNA, 25 bp, Artificial
  Probe
atccaagattcttactctctaacgt

SEQ ID NO: 76505 - DNA, 25 bp, Artificial
  Probe
tgatttggtcacatttatttgcctc

SEQ ID NO: 76506 - DNA, 25 bp, Artificial
  Probe
atgatttggtcacatttatttgcct

SEQ ID NO: 76507 - DNA, 25 bp, Artificial
  Probe
cattacctgaggtgtcttgtatgat

SEQ ID NO: 76508 - DNA, 25 bp, Artificial
  Probe
cctgaggtgtcttgtatgattgtgg

SEQ ID NO: 76509 - DNA, 25 bp, Artificial
  Probe
ttacctgaggtgtcttgtatgattg

SEQ ID NO: 76510 - DNA, 25 bp, Artificial
  Probe
attacctgaggtgtcttgtatgatt

SEQ ID NO: 76511 - DNA, 25 bp, Artificial
  Probe
tagtaacaaggacattacctgaggt

SEQ ID NO: 76512 - DNA, 25 bp, Artificial
  Probe
tacctgaggtgtcttgtatgattgt

SEQ ID NO: 76513 - DNA, 25 bp, Artificial
  Probe
acattacctgaggtgtcttgtatga

SEQ ID NO: 76514 - DNA, 25 bp, Artificial
  Probe
ggtcacatttatttgcctcttcgtt

SEQ ID NO: 76515 - DNA, 25 bp, Artificial
  Probe
ttggtcacatttatttgcctcttcg

SEQ ID NO: 76516 - DNA, 25 bp, Artificial
  Probe
gttcttggtcctattgaaacatttc

SEQ ID NO: 76517 - DNA, 25 bp, Artificial
  Probe
ttcatccaagattcttactctctaa

SEQ ID NO: 76518 - DNA, 25 bp, Artificial
  Probe
tgtgcagtagtaacaaggacattac

SEQ ID NO: 76519 - DNA, 25 bp, Artificial
  Probe
gagataactttcctccctcctaacc

SEQ ID NO: 76520 - DNA, 25 bp, Artificial
  Probe
ggacacagcttaaatcacaaactaa

SEQ ID NO: 76521 - DNA, 25 bp, Artificial
  Probe
tggacacagcttaaatcacaaacta

SEQ ID NO: 76522 - DNA, 25 bp, Artificial
  Probe
agtaacaaggacattacctgaggtg

SEQ ID NO: 76523 - DNA, 25 bp, Artificial
  Probe
cgagataactttcctccctcctaac

SEQ ID NO: 76524 - DNA, 25 bp, Artificial
  Probe
tgcagtagtaacaaggacattacct

SEQ ID NO: 76525 - DNA, 25 bp, Artificial
  Probe
gtgcagtagtaacaaggacattacc

SEQ ID NO: 76526 - DNA, 25 bp, Artificial
  Probe
gtaacaaggacattacctgaggtgt

SEQ ID NO: 76527 - DNA, 25 bp, Artificial
  Probe
actgcaatgttaatacccaagagaa

SEQ ID NO: 76528 - DNA, 25 bp, Artificial
  Probe
tactgcaatgttaatacccaagaga

SEQ ID NO: 76529 - DNA, 25 bp, Artificial
  Probe
ctgcaatgttaatacccaagagaaa

SEQ ID NO: 76530 - DNA, 25 bp, Artificial
  Probe
tcttgtatgattgtggtttagccag

SEQ ID NO: 76531 - DNA, 25 bp, Artificial
  Probe
tgttaatcttctcctcacagcctac

SEQ ID NO: 76532 - DNA, 25 bp, Artificial
  Probe
ttaatcttctcctcacagcctacga

SEQ ID NO: 76533 - DNA, 25 bp, Artificial
  Probe
gttaatcttctcctcacagcctacg

SEQ ID NO: 76534 - DNA, 25 bp, Artificial
  Probe
gaattgtggtctgtcttgaggttct

SEQ ID NO: 76535 - DNA, 25 bp, Artificial
  Probe
agaattgtggtctgtcttgaggttc

SEQ ID NO: 76536 - DNA, 25 bp, Artificial
  Probe
aattgtggtctgtcttgaggttctg

SEQ ID NO: 76537 - DNA, 25 bp, Artificial
  Probe
ttgaggataactgtcactttagcat

SEQ ID NO: 76538 - DNA, 25 bp, Artificial
  Probe
tttgaggataactgtcactttagca

SEQ ID NO: 76539 - DNA, 25 bp, Artificial
  Probe
ctttgaggataactgtcactttagc

SEQ ID NO: 76540 - DNA, 25 bp, Artificial
  Probe
aggataactgtcactttagcatgta

SEQ ID NO: 76541 - DNA, 25 bp, Artificial
  Probe
gaggataactgtcactttagcatgt

SEQ ID NO: 76542 - DNA, 25 bp, Artificial
  Probe
ggataactgtcactttagcatgtag

SEQ ID NO: 76543 - DNA, 25 bp, Artificial
  Probe
taatcttctcctcacagcctacgag

SEQ ID NO: 76544 - DNA, 25 bp, Artificial
  Probe
aactgtcactttagcatgtagagta

SEQ ID NO: 76545 - DNA, 25 bp, Artificial
  Probe
taactgtcactttagcatgtagagt

SEQ ID NO: 76546 - DNA, 25 bp, Artificial
  Probe
tgaggataactgtcactttagcatg

SEQ ID NO: 76547 - DNA, 25 bp, Artificial
  Probe
cctttgaggataactgtcactttag

SEQ ID NO: 76548 - DNA, 25 bp, Artificial
  Probe
ataactgtcactttagcatgtagag

SEQ ID NO: 76549 - DNA, 25 bp, Artificial
  Probe
gataactgtcactttagcatgtaga

SEQ ID NO: 76550 - DNA, 25 bp, Artificial
  Probe
attgtggtctgtcttgaggttctgt

SEQ ID NO: 76551 - DNA, 25 bp, Artificial
  Probe
ttgtggtctgtcttgaggttctgtt

SEQ ID NO: 76552 - DNA, 25 bp, Artificial
  Probe
gacacttcctataactgggtagctg

SEQ ID NO: 76553 - DNA, 25 bp, Artificial
  Probe
atgtccctttgattttcttctgttc

SEQ ID NO: 76554 - DNA, 25 bp, Artificial
  Probe
gatgtccctttgattttcttctgtt

SEQ ID NO: 76555 - DNA, 25 bp, Artificial
  Probe
atgatgtccctttgattttcttctg

SEQ ID NO: 76556 - DNA, 25 bp, Artificial
  Probe
tgatgtccctttgattttcttctgt

SEQ ID NO: 76557 - DNA, 25 bp, Artificial
  Probe
gatgatgtccctttgattttcttct

SEQ ID NO: 76558 - DNA, 25 bp, Artificial
  Probe
tggtctgtcttgaggttctgttgtg

SEQ ID NO: 76559 - DNA, 25 bp, Artificial
  Probe
gtggtctgtcttgaggttctgttgt

SEQ ID NO: 76560 - DNA, 25 bp, Artificial
  Probe
tgtggtctgtcttgaggttctgttg

SEQ ID NO: 76561 - DNA, 25 bp, Artificial
  Probe
tccctttgattttcttctgttccac

SEQ ID NO: 76562 - DNA, 25 bp, Artificial
  Probe
gtccctttgattttcttctgttcca

SEQ ID NO: 76563 - DNA, 25 bp, Artificial
  Probe
tgtccctttgattttcttctgttcc

SEQ ID NO: 76564 - DNA, 25 bp, Artificial
  Probe
aagagagatatatcacgctgctgac

SEQ ID NO: 76565 - DNA, 25 bp, Artificial
  Probe
ctgttaatcttctcctcacagccta

SEQ ID NO: 76566 - DNA, 25 bp, Artificial
  Probe
gtctacacacattctggcgttcctt

SEQ ID NO: 76567 - DNA, 25 bp, Artificial
  Probe
gagatatatcacgctgctgacgatc

SEQ ID NO: 76568 - DNA, 25 bp, Artificial
  Probe
tggacacttcctataactgggtagc

SEQ ID NO: 76569 - DNA, 25 bp, Artificial
  Probe
ggatgatgtccctttgattttcttc

SEQ ID NO: 76570 - DNA, 25 bp, Artificial
  Probe
ccctttgattttcttctgttccaca

SEQ ID NO: 76571 - DNA, 25 bp, Artificial
  Probe
agagatatatcacgctgctgacgat

SEQ ID NO: 76572 - DNA, 25 bp, Artificial
  Probe
ctacacacattctggcgttcctttg

SEQ ID NO: 76573 - DNA, 25 bp, Artificial
  Probe
cagaattgtggtctgtcttgaggtt

SEQ ID NO: 76574 - DNA, 25 bp, Artificial
  Probe
tctacacacattctggcgttccttt

SEQ ID NO: 76575 - DNA, 25 bp, Artificial
  Probe
atatatcacgctgctgacgatcagt

SEQ ID NO: 76576 - DNA, 25 bp, Artificial
  Probe
gttgcttgtggatttagtagttgag

SEQ ID NO: 76577 - DNA, 25 bp, Artificial
  Probe
ttgcttgtggatttagtagttgagt

SEQ ID NO: 76578 - DNA, 25 bp, Artificial
  Probe
tgcttgtggatttagtagttgagtc

SEQ ID NO: 76579 - DNA, 25 bp, Artificial
  Probe
ccaatatgatgtcagggatttcttc

SEQ ID NO: 76580 - DNA, 25 bp, Artificial
  Probe
gcttgtggatttagtagttgagtca

SEQ ID NO: 76581 - DNA, 25 bp, Artificial
  Probe
gccaatatgatgtcagggatttctt

SEQ ID NO: 76582 - DNA, 25 bp, Artificial
  Probe
cgttgcttgtggatttagtagttga

SEQ ID NO: 76583 - DNA, 25 bp, Artificial
  Probe
tatgatgtcagggatttcttcagtg

SEQ ID NO: 76584 - DNA, 25 bp, Artificial
  Probe
cttgtggatttagtagttgagtcat

SEQ ID NO: 76585 - DNA, 25 bp, Artificial
  Probe
atatgatgtcagggatttcttcagt

SEQ ID NO: 76586 - DNA, 25 bp, Artificial
  Probe
caatatgatgtcagggatttcttca

SEQ ID NO: 76587 - DNA, 25 bp, Artificial
  Probe
aatatgatgtcagggatttcttcag

SEQ ID NO: 76588 - DNA, 25 bp, Artificial
  Probe
gaaccgttgcttgtggatttagtag

SEQ ID NO: 76589 - DNA, 25 bp, Artificial
  Probe
ccgttgcttgtggatttagtagttg

SEQ ID NO: 76590 - DNA, 25 bp, Artificial
  Probe
accgttgcttgtggatttagtagtt

SEQ ID NO: 76591 - DNA, 25 bp, Artificial
  Probe
aaccgttgcttgtggatttagtagt

SEQ ID NO: 76592 - DNA, 25 bp, Artificial
  Probe
tgaaccgttgcttgtggatttagta

SEQ ID NO: 76593 - DNA, 25 bp, Artificial
  Probe
tgtggatttagtagttgagtcataa

SEQ ID NO: 76594 - DNA, 25 bp, Artificial
  Probe
ttgtggatttagtagttgagtcata

SEQ ID NO: 76595 - DNA, 25 bp, Artificial
  Probe
cgccaatatgatgtcagggatttct

SEQ ID NO: 76596 - DNA, 25 bp, Artificial
  Probe
cttacttctacactgtcgtgaagga

SEQ ID NO: 76597 - DNA, 25 bp, Artificial
  Probe
ttacttctacactgtcgtgaaggac

SEQ ID NO: 76598 - DNA, 25 bp, Artificial
  Probe
atgatgtcagggatttcttcagtgc

SEQ ID NO: 76599 - DNA, 25 bp, Artificial
  Probe
gtggatttagtagttgagtcataaa

SEQ ID NO: 76600 - DNA, 25 bp, Artificial
  Probe
atggagcacccttacttctacactg

SEQ ID NO: 76601 - DNA, 25 bp, Artificial
  Probe
acccttacttctacactgtcgtgaa

SEQ ID NO: 76602 - DNA, 25 bp, Artificial
  Probe
catggagcacccttacttctacact

SEQ ID NO: 76603 - DNA, 25 bp, Artificial
  Probe
gtaatgaccccatctgtcttctgat

SEQ ID NO: 76604 - DNA, 25 bp, Artificial
  Probe
tacttctacactgtcgtgaaggacc

SEQ ID NO: 76605 - DNA, 25 bp, Artificial
  Probe
cacccttacttctacactgtcgtga

SEQ ID NO: 76606 - DNA, 25 bp, Artificial
  Probe
ccttacttctacactgtcgtgaagg

SEQ ID NO: 76607 - DNA, 25 bp, Artificial
  Probe
ggagcacccttacttctacactgtc

SEQ ID NO: 76608 - DNA, 25 bp, Artificial
  Probe
atgtcagggatttcttcagtgccaa

SEQ ID NO: 76609 - DNA, 25 bp, Artificial
  Probe
cccttacttctacactgtcgtgaag

SEQ ID NO: 76610 - DNA, 25 bp, Artificial
  Probe
tttcaacgatatcttgggcagacac

SEQ ID NO: 76611 - DNA, 25 bp, Artificial
  Probe
gtttcaacgatatcttgggcagaca

SEQ ID NO: 76612 - DNA, 25 bp, Artificial
  Probe
gagcacccttacttctacactgtcg

SEQ ID NO: 76613 - DNA, 25 bp, Artificial
  Probe
agtaatgaccccatctgtcttctga

SEQ ID NO: 76614 - DNA, 25 bp, Artificial
  Probe
cagtaatgaccccatctgtcttctg

SEQ ID NO: 76615 - DNA, 25 bp, Artificial
  Probe
gatgtcagggatttcttcagtgcca

SEQ ID NO: 76616 - DNA, 25 bp, Artificial
  Probe
tggagcacccttacttctacactgt

SEQ ID NO: 76617 - DNA, 25 bp, Artificial
  Probe
tgatgtcagggatttcttcagtgcc

SEQ ID NO: 76618 - DNA, 25 bp, Artificial
  Probe
gtcagtagcgccaatatgatgtcag

SEQ ID NO: 76619 - DNA, 25 bp, Artificial
  Probe
ctgtcagtagcgccaatatgatgtc

SEQ ID NO: 76620 - DNA, 25 bp, Artificial
  Probe
ttcaacgatatcttgggcagacact

SEQ ID NO: 76621 - DNA, 25 bp, Artificial
  Probe
ataggcaggttcattcaggtataga

SEQ ID NO: 76622 - DNA, 25 bp, Artificial
  Probe
cataggcaggttcattcaggtatag

SEQ ID NO: 76623 - DNA, 25 bp, Artificial
  Probe
taccacctctctatacacgaatacc

SEQ ID NO: 76624 - DNA, 25 bp, Artificial
  Probe
tcataggcaggttcattcaggtata

SEQ ID NO: 76625 - DNA, 25 bp, Artificial
  Probe
caggttcattcaggtatagagagat

SEQ ID NO: 76626 - DNA, 25 bp, Artificial
  Probe
ataccacctctctatacacgaatac

SEQ ID NO: 76627 - DNA, 25 bp, Artificial
  Probe
taggcaggttcattcaggtatagag

SEQ ID NO: 76628 - DNA, 25 bp, Artificial
  Probe
agataccacctctctatacacgaat

SEQ ID NO: 76629 - DNA, 25 bp, Artificial
  Probe
gataccacctctctatacacgaata

SEQ ID NO: 76630 - DNA, 25 bp, Artificial
  Probe
gcaggttcattcaggtatagagaga

SEQ ID NO: 76631 - DNA, 25 bp, Artificial
  Probe
ccacctctctatacacgaataccag

SEQ ID NO: 76632 - DNA, 25 bp, Artificial
  Probe
gtcataggcaggttcattcaggtat

SEQ ID NO: 76633 - DNA, 25 bp, Artificial
  Probe
ggcaggttcattcaggtatagagag

SEQ ID NO: 76634 - DNA, 25 bp, Artificial
  Probe
accacctctctatacacgaatacca

SEQ ID NO: 76635 - DNA, 25 bp, Artificial
  Probe
aggttcattcaggtatagagagata

SEQ ID NO: 76636 - DNA, 25 bp, Artificial
  Probe
aggcaggttcattcaggtatagaga

SEQ ID NO: 76637 - DNA, 25 bp, Artificial
  Probe
agatatggatgccttcctctcatac

SEQ ID NO: 76638 - DNA, 25 bp, Artificial
  Probe
cagatatggatgccttcctctcata

SEQ ID NO: 76639 - DNA, 25 bp, Artificial
  Probe
agtcataggcaggttcattcaggta

SEQ ID NO: 76640 - DNA, 25 bp, Artificial
  Probe
ggttcattcaggtatagagagatac

SEQ ID NO: 76641 - DNA, 25 bp, Artificial
  Probe
gatatggatgccttcctctcatacc

SEQ ID NO: 76642 - DNA, 25 bp, Artificial
  Probe
atatggatgccttcctctcatacct

SEQ ID NO: 76643 - DNA, 25 bp, Artificial
  Probe
ctaccagtcataggcaggttcattc

SEQ ID NO: 76644 - DNA, 25 bp, Artificial
  Probe
tatggatgccttcctctcatacctg

SEQ ID NO: 76645 - DNA, 25 bp, Artificial
  Probe
ctcccacatatacaccttgtagttt

SEQ ID NO: 76646 - DNA, 25 bp, Artificial
  Probe
taccagtcataggcaggttcattca

SEQ ID NO: 76647 - DNA, 25 bp, Artificial
  Probe
actaccagtcataggcaggttcatt

SEQ ID NO: 76648 - DNA, 25 bp, Artificial
  Probe
gagataccacctctctatacacgaa

SEQ ID NO: 76649 - DNA, 25 bp, Artificial
  Probe
cagtcataggcaggttcattcaggt

SEQ ID NO: 76650 - DNA, 25 bp, Artificial
  Probe
gatgccttcctctcatacctgtcag

SEQ ID NO: 76651 - DNA, 25 bp, Artificial
  Probe
cctcccacatatacaccttgtagtt

SEQ ID NO: 76652 - DNA, 25 bp, Artificial
  Probe
aaagggctgctaatagggttttaat

SEQ ID NO: 76653 - DNA, 25 bp, Artificial
  Probe
aagggctgctaatagggttttaatt

SEQ ID NO: 76654 - DNA, 25 bp, Artificial
  Probe
ttccctcccacatatacaccttgta

SEQ ID NO: 76655 - DNA, 25 bp, Artificial
  Probe
ccagtcataggcaggttcattcagg

SEQ ID NO: 76656 - DNA, 25 bp, Artificial
  Probe
agggctgctaatagggttttaatta

SEQ ID NO: 76657 - DNA, 25 bp, Artificial
  Probe
aaaagggctgctaatagggttttaa

SEQ ID NO: 76658 - DNA, 25 bp, Artificial
  Probe
accagtcataggcaggttcattcag

SEQ ID NO: 76659 - DNA, 25 bp, Artificial
  Probe
tccctcccacatatacaccttgtag

SEQ ID NO: 76660 - DNA, 25 bp, Artificial
  Probe
gggctgctaatagggttttaattat

SEQ ID NO: 76661 - DNA, 25 bp, Artificial
  Probe
gttccctcccacatatacaccttgt

SEQ ID NO: 76662 - DNA, 25 bp, Artificial
  Probe
tgttccctcccacatatacaccttg

SEQ ID NO: 76663 - DNA, 25 bp, Artificial
  Probe
ccctcccacatatacaccttgtagt

SEQ ID NO: 76664 - DNA, 25 bp, Artificial
  Probe
ctgtcatgttccctcccacatatac

SEQ ID NO: 76665 - DNA, 25 bp, Artificial
  Probe
gcagatatggatgccttcctctcat

SEQ ID NO: 76666 - DNA, 25 bp, Artificial
  Probe
atcacaccactgctactcaactatt

SEQ ID NO: 76667 - DNA, 25 bp, Artificial
  Probe
gatcacaccactgctactcaactat

SEQ ID NO: 76668 - DNA, 25 bp, Artificial
  Probe
tcacaccactgctactcaactattg

SEQ ID NO: 76669 - DNA, 25 bp, Artificial
  Probe
cttgtgcttctgtgtatataaaggc

SEQ ID NO: 76670 - DNA, 25 bp, Artificial
  Probe
agatcacaccactgctactcaacta

SEQ ID NO: 76671 - DNA, 25 bp, Artificial
  Probe
cacaccactgctactcaactattgc

SEQ ID NO: 76672 - DNA, 25 bp, Artificial
  Probe
cagatcacaccactgctactcaact

SEQ ID NO: 76673 - DNA, 25 bp, Artificial
  Probe
caccactgctactcaactattgcca

SEQ ID NO: 76674 - DNA, 25 bp, Artificial
  Probe
acaccactgctactcaactattgcc

SEQ ID NO: 76675 - DNA, 25 bp, Artificial
  Probe
accactgctactcaactattgccag

SEQ ID NO: 76676 - DNA, 25 bp, Artificial
  Probe
ccttgtgcttctgtgtatataaagg

SEQ ID NO: 76677 - DNA, 25 bp, Artificial
  Probe
catcttttcccactaacaggacctc

SEQ ID NO: 76678 - DNA, 25 bp, Artificial
  Probe
atcttttcccactaacaggacctca

SEQ ID NO: 76679 - DNA, 25 bp, Artificial
  Probe
atccagttggacttgcagatcacac

SEQ ID NO: 76680 - DNA, 25 bp, Artificial
  Probe
ttttcccactaacaggacctcagtt

SEQ ID NO: 76681 - DNA, 25 bp, Artificial
  Probe
tcttttcccactaacaggacctcag

SEQ ID NO: 76682 - DNA, 25 bp, Artificial
  Probe
cttttcccactaacaggacctcagt

SEQ ID NO: 76683 - DNA, 25 bp, Artificial
  Probe
gatccagttggacttgcagatcaca

SEQ ID NO: 76684 - DNA, 25 bp, Artificial
  Probe
ccactgctactcaactattgccagt

SEQ ID NO: 76685 - DNA, 25 bp, Artificial
  Probe
ctgctactcaactattgccagtgca

SEQ ID NO: 76686 - DNA, 25 bp, Artificial
  Probe
gcatcttttcccactaacaggacct

SEQ ID NO: 76687 - DNA, 25 bp, Artificial
  Probe
actgctactcaactattgccagtgc

SEQ ID NO: 76688 - DNA, 25 bp, Artificial
  Probe
gctactcaactattgccagtgcaag

SEQ ID NO: 76689 - DNA, 25 bp, Artificial
  Probe
tgctactcaactattgccagtgcaa

SEQ ID NO: 76690 - DNA, 25 bp, Artificial
  Probe
cctgattgttgttcattcacagtaa

SEQ ID NO: 76691 - DNA, 25 bp, Artificial
  Probe
acctgattgttgttcattcacagta

SEQ ID NO: 76692 - DNA, 25 bp, Artificial
  Probe
gacctgattgttgttcattcacagt

SEQ ID NO: 76693 - DNA, 25 bp, Artificial
  Probe
ctgattgttgttcattcacagtaat

SEQ ID NO: 76694 - DNA, 25 bp, Artificial
  Probe
tgattgttgttcattcacagtaatt

SEQ ID NO: 76695 - DNA, 25 bp, Artificial
  Probe
ggacctgattgttgttcattcacag

SEQ ID NO: 76696 - DNA, 25 bp, Artificial
  Probe
ctctggtacttggtttattcccttc

SEQ ID NO: 76697 - DNA, 25 bp, Artificial
  Probe
agaaggaggagtaaagacttggttt

SEQ ID NO: 76698 - DNA, 25 bp, Artificial
  Probe
aagaaggaggagtaaagacttggtt

SEQ ID NO: 76699 - DNA, 25 bp, Artificial
  Probe
cttatacttgacccatgcttactgc

SEQ ID NO: 76700 - DNA, 25 bp, Artificial
  Probe
gcttatacttgacccatgcttactg

SEQ ID NO: 76701 - DNA, 25 bp, Artificial
  Probe
tctggtacttggtttattcccttcc

SEQ ID NO: 76702 - DNA, 25 bp, Artificial
  Probe
cctctggtacttggtttattccctt

SEQ ID NO: 76703 - DNA, 25 bp, Artificial
  Probe
tgtccctctggtacttggtttattc

SEQ ID NO: 76704 - DNA, 25 bp, Artificial
  Probe
ctgtccctctggtacttggtttatt

SEQ ID NO: 76705 - DNA, 25 bp, Artificial
  Probe
tatacttgacccatgcttactgctt

SEQ ID NO: 76706 - DNA, 25 bp, Artificial
  Probe
ttatacttgacccatgcttactgct

SEQ ID NO: 76707 - DNA, 25 bp, Artificial
  Probe
acttggtttattcccttccatttcc

SEQ ID NO: 76708 - DNA, 25 bp, Artificial
  Probe
tacttggtttattcccttccatttc

SEQ ID NO: 76709 - DNA, 25 bp, Artificial
  Probe
ggtacttggtttattcccttccatt

SEQ ID NO: 76710 - DNA, 25 bp, Artificial
  Probe
gtacttggtttattcccttccattt

SEQ ID NO: 76711 - DNA, 25 bp, Artificial
  Probe
ggcttatacttgacccatgcttact

SEQ ID NO: 76712 - DNA, 25 bp, Artificial
  Probe
gtccctctggtacttggtttattcc

SEQ ID NO: 76713 - DNA, 25 bp, Artificial
  Probe
aggtacttgttattaacaggagtgg

SEQ ID NO: 76714 - DNA, 25 bp, Artificial
  Probe
cttggtttattcccttccatttccc

SEQ ID NO: 76715 - DNA, 25 bp, Artificial
  Probe
tggtacttggtttattcccttccat

SEQ ID NO: 76716 - DNA, 25 bp, Artificial
  Probe
atacttgacccatgcttactgcttc

SEQ ID NO: 76717 - DNA, 25 bp, Artificial
  Probe
tgcttgcctaggtacttgttattaa

SEQ ID NO: 76718 - DNA, 25 bp, Artificial
  Probe
ttgcttgcctaggtacttgttatta

SEQ ID NO: 76719 - DNA, 25 bp, Artificial
  Probe
ctggtacttggtttattcccttcca

SEQ ID NO: 76720 - DNA, 25 bp, Artificial
  Probe
cttgcttgcctaggtacttgttatt

SEQ ID NO: 76721 - DNA, 25 bp, Artificial
  Probe
gcttgcctaggtacttgttattaac

SEQ ID NO: 76722 - DNA, 25 bp, Artificial
  Probe
ctgaggggaataaatgttgttatgt

SEQ ID NO: 76723 - DNA, 25 bp, Artificial
  Probe
cctgaggggaataaatgttgttatg

SEQ ID NO: 76724 - DNA, 25 bp, Artificial
  Probe
gaaggaggagtaaagacttggtttt

SEQ ID NO: 76725 - DNA, 25 bp, Artificial
  Probe
gttcattcacagtaattttgccact

SEQ ID NO: 76726 - DNA, 25 bp, Artificial
  Probe
gattgttgttcattcacagtaattt

SEQ ID NO: 76727 - DNA, 25 bp, Artificial
  Probe
ccctctggtacttggtttattccct

SEQ ID NO: 76728 - DNA, 25 bp, Artificial
  Probe
tccctctggtacttggtttattccc

SEQ ID NO: 76729 - DNA, 25 bp, Artificial
  Probe
cctgtccctctggtacttggtttat

SEQ ID NO: 76730 - DNA, 25 bp, Artificial
  Probe
ctggcttatacttgacccatgctta

SEQ ID NO: 76731 - DNA, 25 bp, Artificial
  Probe
tgaggggaataaatgttgttatgtt

SEQ ID NO: 76732 - DNA, 25 bp, Artificial
  Probe
taggtacttgttattaacaggagtg

SEQ ID NO: 76733 - DNA, 25 bp, Artificial
  Probe
ttgttcattcacagtaattttgcca

SEQ ID NO: 76734 - DNA, 25 bp, Artificial
  Probe
gttgttcattcacagtaattttgcc

SEQ ID NO: 76735 - DNA, 25 bp, Artificial
  Probe
tagtcatattaacctgaagttgccg

SEQ ID NO: 76736 - DNA, 25 bp, Artificial
  Probe
ttagtcatattaacctgaagttgcc

SEQ ID NO: 76737 - DNA, 25 bp, Artificial
  Probe
gtcatattaacctgaagttgccgtt

SEQ ID NO: 76738 - DNA, 25 bp, Artificial
  Probe
ttaattcctctggagtgatactgtg

SEQ ID NO: 76739 - DNA, 25 bp, Artificial
  Probe
ccttaattcctctggagtgatactg

SEQ ID NO: 76740 - DNA, 25 bp, Artificial
  Probe
tccttaattcctctggagtgatact

SEQ ID NO: 76741 - DNA, 25 bp, Artificial
  Probe
cttaattcctctggagtgatactgt

SEQ ID NO: 76742 - DNA, 25 bp, Artificial
  Probe
ttccttaattcctctggagtgatac

SEQ ID NO: 76743 - DNA, 25 bp, Artificial
  Probe
tcttccttaattcctctggagtgat

SEQ ID NO: 76744 - DNA, 25 bp, Artificial
  Probe
cttccttaattcctctggagtgata

SEQ ID NO: 76745 - DNA, 25 bp, Artificial
  Probe
agtcatattaacctgaagttgccgt

SEQ ID NO: 76746 - DNA, 25 bp, Artificial
  Probe
ctcttccttaattcctctggagtga

SEQ ID NO: 76747 - DNA, 25 bp, Artificial
  Probe
taattcctctggagtgatactgtgc

SEQ ID NO: 76748 - DNA, 25 bp, Artificial
  Probe
tattaacctgaagttgccgtttaga

SEQ ID NO: 76749 - DNA, 25 bp, Artificial
  Probe
catattaacctgaagttgccgttta

SEQ ID NO: 76750 - DNA, 25 bp, Artificial
  Probe
atattaacctgaagttgccgtttag

SEQ ID NO: 76751 - DNA, 25 bp, Artificial
  Probe
gtctttgcttctaggaatgaaacat

SEQ ID NO: 76752 - DNA, 25 bp, Artificial
  Probe
tctttgcttctaggaatgaaacatc

SEQ ID NO: 76753 - DNA, 25 bp, Artificial
  Probe
tcatattaacctgaagttgccgttt

SEQ ID NO: 76754 - DNA, 25 bp, Artificial
  Probe
ctggtctttgcttctaggaatgaaa

SEQ ID NO: 76755 - DNA, 25 bp, Artificial
  Probe
ctttgcttctaggaatgaaacatca

SEQ ID NO: 76756 - DNA, 25 bp, Artificial
  Probe
attaacctgaagttgccgtttagac

SEQ ID NO: 76757 - DNA, 25 bp, Artificial
  Probe
ggtctttgcttctaggaatgaaaca

SEQ ID NO: 76758 - DNA, 25 bp, Artificial
  Probe
tggtctttgcttctaggaatgaaac

SEQ ID NO: 76759 - DNA, 25 bp, Artificial
  Probe
ttgcttctaggaatgaaacatcaaa

SEQ ID NO: 76760 - DNA, 25 bp, Artificial
  Probe
tttgcttctaggaatgaaacatcaa

SEQ ID NO: 76761 - DNA, 25 bp, Artificial
  Probe
tgcttctaggaatgaaacatcaaat

SEQ ID NO: 76762 - DNA, 25 bp, Artificial
  Probe
gctcttccttaattcctctggagtg

SEQ ID NO: 76763 - DNA, 25 bp, Artificial
  Probe
tgctttagtcatattaacctgaagt

SEQ ID NO: 76764 - DNA, 25 bp, Artificial
  Probe
gcttctaggaatgaaacatcaaatt

SEQ ID NO: 76765 - DNA, 25 bp, Artificial
  Probe
ttaacctgaagttgccgtttagaca

SEQ ID NO: 76766 - DNA, 25 bp, Artificial
  Probe
aggctcttccttaattcctctggag

SEQ ID NO: 76767 - DNA, 25 bp, Artificial
  Probe
ctgctttagtcatattaacctgaag

SEQ ID NO: 76768 - DNA, 25 bp, Artificial
  Probe
tttagtcatattaacctgaagttgc

SEQ ID NO: 76769 - DNA, 25 bp, Artificial
  Probe
ctaaagcattctgaggtagggaggt

SEQ ID NO: 76770 - DNA, 25 bp, Artificial
  Probe
ggctcttccttaattcctctggagt

SEQ ID NO: 76771 - DNA, 25 bp, Artificial
  Probe
gctttagtcatattaacctgaagtt

SEQ ID NO: 76772 - DNA, 25 bp, Artificial
  Probe
gctggtctttgcttctaggaatgaa

SEQ ID NO: 76773 - DNA, 25 bp, Artificial
  Probe
atgctggtctttgcttctaggaatg

SEQ ID NO: 76774 - DNA, 25 bp, Artificial
  Probe
taacctgaagttgccgtttagacac

SEQ ID NO: 76775 - DNA, 25 bp, Artificial
  Probe
tcttcctaagaattaaagttgccaa

SEQ ID NO: 76776 - DNA, 25 bp, Artificial
  Probe
taaagcattctgaggtagggaggtg

SEQ ID NO: 76777 - DNA, 25 bp, Artificial
  Probe
atcttcctaagaattaaagttgcca

SEQ ID NO: 76778 - DNA, 25 bp, Artificial
  Probe
catgctggtctttgcttctaggaat

SEQ ID NO: 76779 - DNA, 25 bp, Artificial
  Probe
ctcagatggtggctacactatttgg

SEQ ID NO: 76780 - DNA, 25 bp, Artificial
  Probe
gtgctcattgcctacattctctata

SEQ ID NO: 76781 - DNA, 25 bp, Artificial
  Probe
tgctcattgcctacattctctataa

SEQ ID NO: 76782 - DNA, 25 bp, Artificial
  Probe
aagagcatctcatccagaacatagt

SEQ ID NO: 76783 - DNA, 25 bp, Artificial
  Probe
agagcatctcatccagaacatagtc

SEQ ID NO: 76784 - DNA, 25 bp, Artificial
  Probe
ggtgctcattgcctacattctctat

SEQ ID NO: 76785 - DNA, 25 bp, Artificial
  Probe
gctcattgcctacattctctataaa

SEQ ID NO: 76786 - DNA, 25 bp, Artificial
  Probe
ggtttcgtggtgacagactataaag

SEQ ID NO: 76787 - DNA, 25 bp, Artificial
  Probe
atggtttcgtggtgacagactataa

SEQ ID NO: 76788 - DNA, 25 bp, Artificial
  Probe
gagcatctcatccagaacatagtcg

SEQ ID NO: 76789 - DNA, 25 bp, Artificial
  Probe
aaagagcatctcatccagaacatag

SEQ ID NO: 76790 - DNA, 25 bp, Artificial
  Probe
taaagagcatctcatccagaacata

SEQ ID NO: 76791 - DNA, 25 bp, Artificial
  Probe
gtttcgtggtgacagactataaagc

SEQ ID NO: 76792 - DNA, 25 bp, Artificial
  Probe
tggtttcgtggtgacagactataaa

SEQ ID NO: 76793 - DNA, 25 bp, Artificial
  Probe
ttacatatttgacttgttgctctcc

SEQ ID NO: 76794 - DNA, 25 bp, Artificial
  Probe
tacatatttgacttgttgctctccg

SEQ ID NO: 76795 - DNA, 25 bp, Artificial
  Probe
tttacatatttgacttgttgctctc

SEQ ID NO: 76796 - DNA, 25 bp, Artificial
  Probe
catggtttcgtggtgacagactata

SEQ ID NO: 76797 - DNA, 25 bp, Artificial
  Probe
tttcgtggtgacagactataaagct

SEQ ID NO: 76798 - DNA, 25 bp, Artificial
  Probe
atctcatccagaacatagtcgccac

SEQ ID NO: 76799 - DNA, 25 bp, Artificial
  Probe
catctcatccagaacatagtcgcca

SEQ ID NO: 76800 - DNA, 25 bp, Artificial
  Probe
atttacatatttgacttgttgctct

SEQ ID NO: 76801 - DNA, 25 bp, Artificial
  Probe
atgcttgactcagtggtagaacctt

SEQ ID NO: 76802 - DNA, 25 bp, Artificial
  Probe
agcatctcatccagaacatagtcgc

SEQ ID NO: 76803 - DNA, 25 bp, Artificial
  Probe
gggtgctcattgcctacattctcta

SEQ ID NO: 76804 - DNA, 25 bp, Artificial
  Probe
catgcttgactcagtggtagaacct

SEQ ID NO: 76805 - DNA, 25 bp, Artificial
  Probe
atatttgacttgttgctctccggtt

SEQ ID NO: 76806 - DNA, 25 bp, Artificial
  Probe
tatttacatatttgacttgttgctc

SEQ ID NO: 76807 - DNA, 25 bp, Artificial
  Probe
tgaaattcattgctggaggaagcta

SEQ ID NO: 76808 - DNA, 25 bp, Artificial
  Probe
tatttgacttgttgctctccggttt

SEQ ID NO: 76809 - DNA, 25 bp, Artificial
  Probe
cggtttctccattttgtatgaaatt

SEQ ID NO: 76810 - DNA, 25 bp, Artificial
  Probe
ctcattgcctacattctctataaaa

SEQ ID NO: 76811 - DNA, 25 bp, Artificial
  Probe
ttcgtggtgacagactataaagctt

SEQ ID NO: 76812 - DNA, 25 bp, Artificial
  Probe
catatttgacttgttgctctccggt

SEQ ID NO: 76813 - DNA, 25 bp, Artificial
  Probe
catatttacatatttgacttgttgc

SEQ ID NO: 76814 - DNA, 25 bp, Artificial
  Probe
tagatatcaggaaggtgcctgtata

SEQ ID NO: 76815 - DNA, 25 bp, Artificial
  Probe
gatatcaggaaggtgcctgtatatt

SEQ ID NO: 76816 - DNA, 25 bp, Artificial
  Probe
agatatcaggaaggtgcctgtatat

SEQ ID NO: 76817 - DNA, 25 bp, Artificial
  Probe
ttagatatcaggaaggtgcctgtat

SEQ ID NO: 76818 - DNA, 25 bp, Artificial
  Probe
cttagatatcaggaaggtgcctgta

SEQ ID NO: 76819 - DNA, 25 bp, Artificial
  Probe
cgctgaaattcattgctggaggaag

SEQ ID NO: 76820 - DNA, 25 bp, Artificial
  Probe
ctccggtttctccattttgtatgaa

SEQ ID NO: 76821 - DNA, 25 bp, Artificial
  Probe
atatttacatatttgacttgttgct

SEQ ID NO: 76822 - DNA, 25 bp, Artificial
  Probe
ccatgcttgactcagtggtagaacc

SEQ ID NO: 76823 - DNA, 25 bp, Artificial
  Probe
acatatttgacttgttgctctccgg

SEQ ID NO: 76824 - DNA, 25 bp, Artificial
  Probe
ggtgggcttagatatcaggaaggtg

SEQ ID NO: 76825 - DNA, 25 bp, Artificial
  Probe
acgatgtaaattattaggtttgggt

SEQ ID NO: 76826 - DNA, 25 bp, Artificial
  Probe
cacgatgtaaattattaggtttggg

SEQ ID NO: 76827 - DNA, 25 bp, Artificial
  Probe
tattaggtttgggtcagatttcttt

SEQ ID NO: 76828 - DNA, 25 bp, Artificial
  Probe
ttattaggtttgggtcagatttctt

SEQ ID NO: 76829 - DNA, 25 bp, Artificial
  Probe
cgatgtaaattattaggtttgggtc

SEQ ID NO: 76830 - DNA, 25 bp, Artificial
  Probe
attattaggtttgggtcagatttct

SEQ ID NO: 76831 - DNA, 25 bp, Artificial
  Probe
tgtaaattattaggtttgggtcaga

SEQ ID NO: 76832 - DNA, 25 bp, Artificial
  Probe
gatattcgattctttgagtggagga

SEQ ID NO: 76833 - DNA, 25 bp, Artificial
  Probe
atattcgattctttgagtggaggaa

SEQ ID NO: 76834 - DNA, 25 bp, Artificial
  Probe
aactacttccttcctgcaacatctg

SEQ ID NO: 76835 - DNA, 25 bp, Artificial
  Probe
tattcgattctttgagtggaggaac

SEQ ID NO: 76836 - DNA, 25 bp, Artificial
  Probe
agatattcgattctttgagtggagg

SEQ ID NO: 76837 - DNA, 25 bp, Artificial
  Probe
tcacgatgtaaattattaggtttgg

SEQ ID NO: 76838 - DNA, 25 bp, Artificial
  Probe
aattattaggtttgggtcagatttc

SEQ ID NO: 76839 - DNA, 25 bp, Artificial
  Probe
gatgtaaattattaggtttgggtca

SEQ ID NO: 76840 - DNA, 25 bp, Artificial
  Probe
atgtaaattattaggtttgggtcag

SEQ ID NO: 76841 - DNA, 25 bp, Artificial
  Probe
gtaaattattaggtttgggtcagat

SEQ ID NO: 76842 - DNA, 25 bp, Artificial
  Probe
tactactgagcacagatactcccag

SEQ ID NO: 76843 - DNA, 25 bp, Artificial
  Probe
ggtttgggtcagatttcttttgtaa

SEQ ID NO: 76844 - DNA, 25 bp, Artificial
  Probe
tagatattcgattctttgagtggag

SEQ ID NO: 76845 - DNA, 25 bp, Artificial
  Probe
ctagatattcgattctttgagtgga

SEQ ID NO: 76846 - DNA, 25 bp, Artificial
  Probe
actagatattcgattctttgagtgg

SEQ ID NO: 76847 - DNA, 25 bp, Artificial
  Probe
ccactagatattcgattctttgagt

SEQ ID NO: 76848 - DNA, 25 bp, Artificial
  Probe
tccactagatattcgattctttgag

SEQ ID NO: 76849 - DNA, 25 bp, Artificial
  Probe
aggtttgggtcagatttcttttgta

SEQ ID NO: 76850 - DNA, 25 bp, Artificial
  Probe
taggtttgggtcagatttcttttgt

SEQ ID NO: 76851 - DNA, 25 bp, Artificial
  Probe
ttaggtttgggtcagatttcttttg

SEQ ID NO: 76852 - DNA, 25 bp, Artificial
  Probe
aaactacttccttcctgcaacatct

SEQ ID NO: 76853 - DNA, 25 bp, Artificial
  Probe
attaggtttgggtcagatttctttt

SEQ ID NO: 76854 - DNA, 25 bp, Artificial
  Probe
aaattattaggtttgggtcagattt

SEQ ID NO: 76855 - DNA, 25 bp, Artificial
  Probe
atccactagatattcgattctttga

SEQ ID NO: 76856 - DNA, 25 bp, Artificial
  Probe
gtttgggtcagatttcttttgtaat

SEQ ID NO: 76857 - DNA, 25 bp, Artificial
  Probe
attcgattctttgagtggaggaacc

SEQ ID NO: 76858 - DNA, 25 bp, Artificial
  Probe
atgactccccaaaactacttccttc

SEQ ID NO: 76859 - DNA, 25 bp, Artificial
  Probe
taaattattaggtttgggtcagatt

SEQ ID NO: 76860 - DNA, 25 bp, Artificial
  Probe
ttctggaaactgtgaggaccttgtt

SEQ ID NO: 76861 - DNA, 25 bp, Artificial
  Probe
ctcttctggaaactgtgaggacctt

SEQ ID NO: 76862 - DNA, 25 bp, Artificial
  Probe
tcttctggaaactgtgaggaccttg

SEQ ID NO: 76863 - DNA, 25 bp, Artificial
  Probe
atcacgatgtaaattattaggtttg

SEQ ID NO: 76864 - DNA, 25 bp, Artificial
  Probe
cttctggaaactgtgaggaccttgt

SEQ ID NO: 76865 - DNA, 25 bp, Artificial
  Probe
catgactccccaaaactacttcctt

SEQ ID NO: 76866 - DNA, 25 bp, Artificial
  Probe
aaaactacttccttcctgcaacatc

SEQ ID NO: 76867 - DNA, 25 bp, Artificial
  Probe
agaccactcttctggaaactgtgag

SEQ ID NO: 76868 - DNA, 25 bp, Artificial
  Probe
gagaccactcttctggaaactgtga

SEQ ID NO: 76869 - DNA, 25 bp, Artificial
  Probe
tgggtcagatttcttttgtaataaa

SEQ ID NO: 76870 - DNA, 25 bp, Artificial
  Probe
ctcttaattatggacgctactcctc

SEQ ID NO: 76871 - DNA, 25 bp, Artificial
  Probe
cttaattatggacgctactcctcag

SEQ ID NO: 76872 - DNA, 25 bp, Artificial
  Probe
taattatggacgctactcctcagaa

SEQ ID NO: 76873 - DNA, 25 bp, Artificial
  Probe
ttaattatggacgctactcctcaga

SEQ ID NO: 76874 - DNA, 25 bp, Artificial
  Probe
tcttaattatggacgctactcctca

SEQ ID NO: 76875 - DNA, 25 bp, Artificial
  Probe
cacaaattcatctcttggacagaaa

SEQ ID NO: 76876 - DNA, 25 bp, Artificial
  Probe
gctcttaattatggacgctactcct

SEQ ID NO: 76877 - DNA, 25 bp, Artificial
  Probe
gcacaaattcatctcttggacagaa

SEQ ID NO: 76878 - DNA, 25 bp, Artificial
  Probe
aagctcttaattatggacgctactc

SEQ ID NO: 76879 - DNA, 25 bp, Artificial
  Probe
gaagctcttaattatggacgctact

SEQ ID NO: 76880 - DNA, 25 bp, Artificial
  Probe
ctgaagctcttaattatggacgcta

SEQ ID NO: 76881 - DNA, 25 bp, Artificial
  Probe
tgaagctcttaattatggacgctac

SEQ ID NO: 76882 - DNA, 25 bp, Artificial
  Probe
aattatggacgctactcctcagaaa

SEQ ID NO: 76883 - DNA, 25 bp, Artificial
  Probe
ttcttcctgcacaaattcatctctt

SEQ ID NO: 76884 - DNA, 25 bp, Artificial
  Probe
cttcttcctgcacaaattcatctct

SEQ ID NO: 76885 - DNA, 25 bp, Artificial
  Probe
attatggacgctactcctcagaaag

SEQ ID NO: 76886 - DNA, 25 bp, Artificial
  Probe
atccttcttcctgcacaaattcatc

SEQ ID NO: 76887 - DNA, 25 bp, Artificial
  Probe
agctcttaattatggacgctactcc

SEQ ID NO: 76888 - DNA, 25 bp, Artificial
  Probe
agaatgttctgaagatcagtgactt

SEQ ID NO: 76889 - DNA, 25 bp, Artificial
  Probe
aagaatgttctgaagatcagtgact

SEQ ID NO: 76890 - DNA, 25 bp, Artificial
  Probe
gaatgttctgaagatcagtgacttc

SEQ ID NO: 76891 - DNA, 25 bp, Artificial
  Probe
gaagaatgttctgaagatcagtgac

SEQ ID NO: 76892 - DNA, 25 bp, Artificial
  Probe
catccttcttcctgcacaaattcat

SEQ ID NO: 76893 - DNA, 25 bp, Artificial
  Probe
tcttcctgcacaaattcatctcttg

SEQ ID NO: 76894 - DNA, 25 bp, Artificial
  Probe
aatgttctgaagatcagtgacttcg

SEQ ID NO: 76895 - DNA, 25 bp, Artificial
  Probe
ccttcttcctgcacaaattcatctc

SEQ ID NO: 76896 - DNA, 25 bp, Artificial
  Probe
tccttcttcctgcacaaattcatct

SEQ ID NO: 76897 - DNA, 25 bp, Artificial
  Probe
cctgaagctcttaattatggacgct

SEQ ID NO: 76898 - DNA, 25 bp, Artificial
  Probe
acaaattcatctcttggacagaaaa

SEQ ID NO: 76899 - DNA, 25 bp, Artificial
  Probe
cttcctgcacaaattcatctcttgg

SEQ ID NO: 76900 - DNA, 25 bp, Artificial
  Probe
ttatggacgctactcctcagaaagt

SEQ ID NO: 76901 - DNA, 25 bp, Artificial
  Probe
accttatcccaacctcaccaatcag

SEQ ID NO: 76902 - DNA, 25 bp, Artificial
  Probe
tcaccttatcccaacctcaccaatc

SEQ ID NO: 76903 - DNA, 25 bp, Artificial
  Probe
ctcaccttatcccaacctcaccaat

SEQ ID NO: 76904 - DNA, 25 bp, Artificial
  Probe
tgcacaaattcatctcttggacaga

SEQ ID NO: 76905 - DNA, 25 bp, Artificial
  Probe
ctgcacaaattcatctcttggacag

SEQ ID NO: 76906 - DNA, 25 bp, Artificial
  Probe
atgttctgaagatcagtgacttcgg

SEQ ID NO: 76907 - DNA, 25 bp, Artificial
  Probe
caccttatcccaacctcaccaatca

SEQ ID NO: 76908 - DNA, 25 bp, Artificial
  Probe
ccctgaagctcttaattatggacgc

SEQ ID NO: 76909 - DNA, 25 bp, Artificial
  Probe
tatggacgctactcctcagaaagtg

SEQ ID NO: 76910 - DNA, 25 bp, Artificial
  Probe
ctcagacaagtccctgttaagtgga

SEQ ID NO: 76911 - DNA, 25 bp, Artificial
  Probe
ttcctgcacaaattcatctcttgga

SEQ ID NO: 76912 - DNA, 25 bp, Artificial
  Probe
ccatccttcttcctgcacaaattca

SEQ ID NO: 76913 - DNA, 25 bp, Artificial
  Probe
accatccttcttcctgcacaaattc

SEQ ID NO: 76914 - DNA, 25 bp, Artificial
  Probe
ttatcccaacctcaccaatcagcag

SEQ ID NO: 76915 - DNA, 25 bp, Artificial
  Probe
tgctcttcttcgataatagtgacaa

SEQ ID NO: 76916 - DNA, 25 bp, Artificial
  Probe
gctcttcttcgataatagtgacaac

SEQ ID NO: 76917 - DNA, 25 bp, Artificial
  Probe
gtgctcttcttcgataatagtgaca

SEQ ID NO: 76918 - DNA, 25 bp, Artificial
  Probe
ctcttcttcgataatagtgacaacg

SEQ ID NO: 76919 - DNA, 25 bp, Artificial
  Probe
cttcttcgataatagtgacaacgtg

SEQ ID NO: 76920 - DNA, 25 bp, Artificial
  Probe
tcttcttcgataatagtgacaacgt

SEQ ID NO: 76921 - DNA, 25 bp, Artificial
  Probe
atctccgtgctcttcttcgataata

SEQ ID NO: 76922 - DNA, 25 bp, Artificial
  Probe
cgtgctcttcttcgataatagtgac

SEQ ID NO: 76923 - DNA, 25 bp, Artificial
  Probe
ttcttcgataatagtgacaacgtgg

SEQ ID NO: 76924 - DNA, 25 bp, Artificial
  Probe
tctccgtgctcttcttcgataatag

SEQ ID NO: 76925 - DNA, 25 bp, Artificial
  Probe
ctccgtgctcttcttcgataatagt

SEQ ID NO: 76926 - DNA, 25 bp, Artificial
  Probe
tatctccgtgctcttcttcgataat

SEQ ID NO: 76927 - DNA, 25 bp, Artificial
  Probe
cttcgataatagtgacaacgtggtg

SEQ ID NO: 76928 - DNA, 25 bp, Artificial
  Probe
tcttcgataatagtgacaacgtggt

SEQ ID NO: 76929 - DNA, 25 bp, Artificial
  Probe
ccgtgctcttcttcgataatagtga

SEQ ID NO: 76930 - DNA, 25 bp, Artificial
  Probe
tccgtgctcttcttcgataatagtg

SEQ ID NO: 76931 - DNA, 25 bp, Artificial
  Probe
ctatctccgtgctcttcttcgataa

SEQ ID NO: 76932 - DNA, 25 bp, Artificial
  Probe
ttcgataatagtgacaacgtggtgc

SEQ ID NO: 76933 - DNA, 25 bp, Artificial
  Probe
cctatctccgtgctcttcttcgata

SEQ ID NO: 76934 - DNA, 25 bp, Artificial
  Probe
cgataatagtgacaacgtggtgctg

SEQ ID NO: 76935 - DNA, 25 bp, Artificial
  Probe
tcgataatagtgacaacgtggtgct

SEQ ID NO: 76936 - DNA, 25 bp, Artificial
  Probe
ggaccgtttgttcatgttttattgg

SEQ ID NO: 76937 - DNA, 25 bp, Artificial
  Probe
gggaccgtttgttcatgttttattg

SEQ ID NO: 76938 - DNA, 25 bp, Artificial
  Probe
cgtttgttcatgttttattggtgac

SEQ ID NO: 76939 - DNA, 25 bp, Artificial
  Probe
agggaccgtttgttcatgttttatt

SEQ ID NO: 76940 - DNA, 25 bp, Artificial
  Probe
ccgtttgttcatgttttattggtga

SEQ ID NO: 76941 - DNA, 25 bp, Artificial
  Probe
gataatagtgacaacgtggtgctgc

SEQ ID NO: 76942 - DNA, 25 bp, Artificial
  Probe
gtttgttcatgttttattggtgaca

SEQ ID NO: 76943 - DNA, 25 bp, Artificial
  Probe
cagggaccgtttgttcatgttttat

SEQ ID NO: 76944 - DNA, 25 bp, Artificial
  Probe
gaccgtttgttcatgttttattggt

SEQ ID NO: 76945 - DNA, 25 bp, Artificial
  Probe
accgtttgttcatgttttattggtg

SEQ ID NO: 76946 - DNA, 25 bp, Artificial
  Probe
tgttcatgttttattggtgacaaaa

SEQ ID NO: 76947 - DNA, 25 bp, Artificial
  Probe
ttgttcatgttttattggtgacaaa

SEQ ID NO: 76948 - DNA, 25 bp, Artificial
  Probe
tttgttcatgttttattggtgacaa

SEQ ID NO: 76949 - DNA, 25 bp, Artificial
  Probe
gcagggaccgtttgttcatgtttta

SEQ ID NO: 76950 - DNA, 25 bp, Artificial
  Probe
gaaaagcagggaccgtttgttcatg

SEQ ID NO: 76951 - DNA, 25 bp, Artificial
  Probe
tgtgaagcaatgaagactaatacct

SEQ ID NO: 76952 - DNA, 25 bp, Artificial
  Probe
gtgtgaagcaatgaagactaatacc

SEQ ID NO: 76953 - DNA, 25 bp, Artificial
  Probe
atgagcaacaagcaatactatgatg

SEQ ID NO: 76954 - DNA, 25 bp, Artificial
  Probe
ctgatgagcaacaagcaatactatg

SEQ ID NO: 76955 - DNA, 25 bp, Artificial
  Probe
gatgagcaacaagcaatactatgat

SEQ ID NO: 76956 - DNA, 25 bp, Artificial
  Probe
tgtgtgaagcaatgaagactaatac

SEQ ID NO: 76957 - DNA, 25 bp, Artificial
  Probe
tgatgagcaacaagcaatactatga

SEQ ID NO: 76958 - DNA, 25 bp, Artificial
  Probe
actgatgagcaacaagcaatactat

SEQ ID NO: 76959 - DNA, 25 bp, Artificial
  Probe
cttgtgtgaagcaatgaagactaat

SEQ ID NO: 76960 - DNA, 25 bp, Artificial
  Probe
cactgatgagcaacaagcaatacta

SEQ ID NO: 76961 - DNA, 25 bp, Artificial
  Probe
acttgtgtgaagcaatgaagactaa

SEQ ID NO: 76962 - DNA, 25 bp, Artificial
  Probe
gtgaagcaatgaagactaataccta

SEQ ID NO: 76963 - DNA, 25 bp, Artificial
  Probe
aagtataagccagtaccagatgaac

SEQ ID NO: 76964 - DNA, 25 bp, Artificial
  Probe
caagtataagccagtaccagatgaa

SEQ ID NO: 76965 - DNA, 25 bp, Artificial
  Probe
gacaagtataagccagtaccagatg

SEQ ID NO: 76966 - DNA, 25 bp, Artificial
  Probe
ttgtgtgaagcaatgaagactaata

SEQ ID NO: 76967 - DNA, 25 bp, Artificial
  Probe
gacttgtgtgaagcaatgaagacta

SEQ ID NO: 76968 - DNA, 25 bp, Artificial
  Probe
acaagtataagccagtaccagatga

SEQ ID NO: 76969 - DNA, 25 bp, Artificial
  Probe
tgacaagtataagccagtaccagat

SEQ ID NO: 76970 - DNA, 25 bp, Artificial
  Probe
aagcaatgaagactaatacctatgt

SEQ ID NO: 76971 - DNA, 25 bp, Artificial
  Probe
gcaatgaagactaatacctatgtcc

SEQ ID NO: 76972 - DNA, 25 bp, Artificial
  Probe
agtataagccagtaccagatgaacc

SEQ ID NO: 76973 - DNA, 25 bp, Artificial
  Probe
caatgaagactaatacctatgtccg

SEQ ID NO: 76974 - DNA, 25 bp, Artificial
  Probe
tgaagcaatgaagactaatacctat

SEQ ID NO: 76975 - DNA, 25 bp, Artificial
  Probe
gaacctcaataacatccaggacatc

SEQ ID NO: 76976 - DNA, 25 bp, Artificial
  Probe
gaagcaatgaagactaatacctatg

SEQ ID NO: 76977 - DNA, 25 bp, Artificial
  Probe
agcaatgaagactaatacctatgtc

SEQ ID NO: 76978 - DNA, 25 bp, Artificial
  Probe
tgaacctcaataacatccaggacat

SEQ ID NO: 76979 - DNA, 25 bp, Artificial
  Probe
ctgacaagtataagccagtaccaga

SEQ ID NO: 76980 - DNA, 25 bp, Artificial
  Probe
acactgatgagcaacaagcaatact

SEQ ID NO: 76981 - DNA, 25 bp, Artificial
  Probe
cacactgatgagcaacaagcaatac

SEQ ID NO: 76982 - DNA, 25 bp, Artificial
  Probe
ccctttattcagcctaagagagaaa

SEQ ID NO: 76983 - DNA, 25 bp, Artificial
  Probe
aaaccctttattcagcctaagagag

SEQ ID NO: 76984 - DNA, 25 bp, Artificial
  Probe
attcagcctaagagagaaattccag

SEQ ID NO: 76985 - DNA, 25 bp, Artificial
  Probe
accctttattcagcctaagagagaa

SEQ ID NO: 76986 - DNA, 25 bp, Artificial
  Probe
aaccctttattcagcctaagagaga

SEQ ID NO: 76987 - DNA, 25 bp, Artificial
  Probe
tattcagcctaagagagaaattcca

SEQ ID NO: 76988 - DNA, 25 bp, Artificial
  Probe
acacactgatgagcaacaagcaata

SEQ ID NO: 76989 - DNA, 25 bp, Artificial
  Probe
tacacactgatgagcaacaagcaat

SEQ ID NO: 76990 - DNA, 25 bp, Artificial
  Probe
aacctcaataacatccaggacatcc

SEQ ID NO: 76991 - DNA, 25 bp, Artificial
  Probe
gtgaacctcaataacatccaggaca

SEQ ID NO: 76992 - DNA, 25 bp, Artificial
  Probe
cctgacaagtataagccagtaccag

SEQ ID NO: 76993 - DNA, 25 bp, Artificial
  Probe
cctttattcagcctaagagagaaat

SEQ ID NO: 76994 - DNA, 25 bp, Artificial
  Probe
ttattcagcctaagagagaaattcc

SEQ ID NO: 76995 - DNA, 25 bp, Artificial
  Probe
accaacattgaggagatgctaaaga

SEQ ID NO: 76996 - DNA, 25 bp, Artificial
  Probe
ccgcatcgtttagttctgtaaataa

SEQ ID NO: 76997 - DNA, 25 bp, Artificial
  Probe
cccgcatcgtttagttctgtaaata

SEQ ID NO: 76998 - DNA, 25 bp, Artificial
  Probe
cttctgtgggaaatggtactgtaac

SEQ ID NO: 76999 - DNA, 25 bp, Artificial
  Probe
cgcatcgtttagttctgtaaataat

SEQ ID NO: 77000 - DNA, 25 bp, Artificial
  Probe
tcgtttagttctgtaaataatgtgc

SEQ ID NO: 77001 - DNA, 25 bp, Artificial
  Probe
ctctctgcaagtggtggattcttag

SEQ ID NO: 77002 - DNA, 25 bp, Artificial
  Probe
ttctgtgggaaatggtactgtaaca

SEQ ID NO: 77003 - DNA, 25 bp, Artificial
  Probe
tctctgcaagtggtggattcttaga

SEQ ID NO: 77004 - DNA, 25 bp, Artificial
  Probe
gcttctgtgggaaatggtactgtaa

SEQ ID NO: 77005 - DNA, 25 bp, Artificial
  Probe
gcatcgtttagttctgtaaataatg

SEQ ID NO: 77006 - DNA, 25 bp, Artificial
  Probe
cttcctctcttcatcctggagtcag

SEQ ID NO: 77007 - DNA, 25 bp, Artificial
  Probe
cgtttagttctgtaaataatgtgca

SEQ ID NO: 77008 - DNA, 25 bp, Artificial
  Probe
ggattcttagagcctggcactagag

SEQ ID NO: 77009 - DNA, 25 bp, Artificial
  Probe
gattcttagagcctggcactagagg

SEQ ID NO: 77010 - DNA, 25 bp, Artificial
  Probe
caagtggtggattcttagagcctgg

SEQ ID NO: 77011 - DNA, 25 bp, Artificial
  Probe
cctctctgcaagtggtggattctta

SEQ ID NO: 77012 - DNA, 25 bp, Artificial
  Probe
tggattcttagagcctggcactaga

SEQ ID NO: 77013 - DNA, 25 bp, Artificial
  Probe
atcgtttagttctgtaaataatgtg

SEQ ID NO: 77014 - DNA, 25 bp, Artificial
  Probe
catcgtttagttctgtaaataatgt

SEQ ID NO: 77015 - DNA, 25 bp, Artificial
  Probe
gtggattcttagagcctggcactag

SEQ ID NO: 77016 - DNA, 25 bp, Artificial
  Probe
ctctgcaagtggtggattcttagag

SEQ ID NO: 77017 - DNA, 25 bp, Artificial
  Probe
ccttcctctcttcatcctggagtca

SEQ ID NO: 77018 - DNA, 25 bp, Artificial
  Probe
attcttagagcctggcactagaggt

SEQ ID NO: 77019 - DNA, 25 bp, Artificial
  Probe
ggcttctgtgggaaatggtactgta

SEQ ID NO: 77020 - DNA, 25 bp, Artificial
  Probe
tctgcaagtggtggattcttagagc

SEQ ID NO: 77021 - DNA, 25 bp, Artificial
  Probe
cttcctcccttccagattcctgttc

SEQ ID NO: 77022 - DNA, 25 bp, Artificial
  Probe
tgtgggaaatggtactgtaacagct

SEQ ID NO: 77023 - DNA, 25 bp, Artificial
  Probe
ccccgcatcgtttagttctgtaaat

SEQ ID NO: 77024 - DNA, 25 bp, Artificial
  Probe
cttccagattcctgttcccacacaa

SEQ ID NO: 77025 - DNA, 25 bp, Artificial
  Probe
tctgtgggaaatggtactgtaacag

SEQ ID NO: 77026 - DNA, 25 bp, Artificial
  Probe
ttccagattcctgttcccacacaac

SEQ ID NO: 77027 - DNA, 25 bp, Artificial
  Probe
acttcctcccttccagattcctgtt

SEQ ID NO: 77028 - DNA, 25 bp, Artificial
  Probe
gaggcttctgtgggaaatggtactg

SEQ ID NO: 77029 - DNA, 25 bp, Artificial
  Probe
accagactatggacttcctcccttc

SEQ ID NO: 77030 - DNA, 25 bp, Artificial
  Probe
gaccagactatggacttcctccctt

SEQ ID NO: 77031 - DNA, 25 bp, Artificial
  Probe
agacacacatactagggtaccagag

SEQ ID NO: 77032 - DNA, 25 bp, Artificial
  Probe
cagacacacatactagggtaccaga

SEQ ID NO: 77033 - DNA, 25 bp, Artificial
  Probe
tccccgcatcgtttagttctgtaaa

SEQ ID NO: 77034 - DNA, 25 bp, Artificial
  Probe
ctccccgcatcgtttagttctgtaa

SEQ ID NO: 77035 - DNA, 25 bp, Artificial
  Probe
gacacacatactagggtaccagagg

SEQ ID NO: 77036 - DNA, 25 bp, Artificial
  Probe
ctgtgggaaatggtactgtaacagc

SEQ ID NO: 77037 - DNA, 25 bp, Artificial
  Probe
tatggacttcctcccttccagattc

SEQ ID NO: 77038 - DNA, 25 bp, Artificial
  Probe
ctatggacttcctcccttccagatt

SEQ ID NO: 77039 - DNA, 25 bp, Artificial
  Probe
gacatggggcagacacacatactag

SEQ ID NO: 77040 - DNA, 25 bp, Artificial
  Probe
cacacatactagggtaccagaggtc

SEQ ID NO: 77041 - DNA, 25 bp, Artificial
  Probe
gacctacagataactcatcctcatt

SEQ ID NO: 77042 - DNA, 25 bp, Artificial
  Probe
cgacctacagataactcatcctcat

SEQ ID NO: 77043 - DNA, 25 bp, Artificial
  Probe
taaggacataagtgagaaagttgcc

SEQ ID NO: 77044 - DNA, 25 bp, Artificial
  Probe
cataagtgagaaagttgccgtttac

SEQ ID NO: 77045 - DNA, 25 bp, Artificial
  Probe
aaggtagagagtttaattgcccaaa

SEQ ID NO: 77046 - DNA, 25 bp, Artificial
  Probe
ataagtgagaaagttgccgtttaca

SEQ ID NO: 77047 - DNA, 25 bp, Artificial
  Probe
acataagtgagaaagttgccgttta

SEQ ID NO: 77048 - DNA, 25 bp, Artificial
  Probe
ttaaggacataagtgagaaagttgc

SEQ ID NO: 77049 - DNA, 25 bp, Artificial
  Probe
ctcgacctacagataactcatcctc

SEQ ID NO: 77050 - DNA, 25 bp, Artificial
  Probe
aagaaggtagagagtttaattgccc

SEQ ID NO: 77051 - DNA, 25 bp, Artificial
  Probe
gaaggtagagagtttaattgcccaa

SEQ ID NO: 77052 - DNA, 25 bp, Artificial
  Probe
acctacagataactcatcctcattt

SEQ ID NO: 77053 - DNA, 25 bp, Artificial
  Probe
gctgttagaagacttagaaaggaag

SEQ ID NO: 77054 - DNA, 25 bp, Artificial
  Probe
taagtgagaaagttgccgtttacag

SEQ ID NO: 77055 - DNA, 25 bp, Artificial
  Probe
agaaaggaagtatgaggacaatcaa

SEQ ID NO: 77056 - DNA, 25 bp, Artificial
  Probe
agaaggtagagagtttaattgccca

SEQ ID NO: 77057 - DNA, 25 bp, Artificial
  Probe
tcgacctacagataactcatcctca

SEQ ID NO: 77058 - DNA, 25 bp, Artificial
  Probe
gaaaggaagtatgaggacaatcaaa

SEQ ID NO: 77059 - DNA, 25 bp, Artificial
  Probe
tagaaaggaagtatgaggacaatca

SEQ ID NO: 77060 - DNA, 25 bp, Artificial
  Probe
taagaaggtagagagtttaattgcc

SEQ ID NO: 77061 - DNA, 25 bp, Artificial
  Probe
gacataagtgagaaagttgccgttt

SEQ ID NO: 77062 - DNA, 25 bp, Artificial
  Probe
ttagaaaggaagtatgaggacaatc

SEQ ID NO: 77063 - DNA, 25 bp, Artificial
  Probe
cctcatttaatgtctttaaccacct

SEQ ID NO: 77064 - DNA, 25 bp, Artificial
  Probe
tcctcatttaatgtctttaaccacc

SEQ ID NO: 77065 - DNA, 25 bp, Artificial
  Probe
cttagaaaggaagtatgaggacaat

SEQ ID NO: 77066 - DNA, 25 bp, Artificial
  Probe
cctcgacctacagataactcatcct

SEQ ID NO: 77067 - DNA, 25 bp, Artificial
  Probe
cctacagataactcatcctcattta

SEQ ID NO: 77068 - DNA, 25 bp, Artificial
  Probe
agctgttagaagacttagaaaggaa

SEQ ID NO: 77069 - DNA, 25 bp, Artificial
  Probe
catttaatgtctttaaccaccttct

SEQ ID NO: 77070 - DNA, 25 bp, Artificial
  Probe
tcatttaatgtctttaaccaccttc

SEQ ID NO: 77071 - DNA, 25 bp, Artificial
  Probe
ctcatttaatgtctttaaccacctt

SEQ ID NO: 77072 - DNA, 25 bp, Artificial
  Probe
ctgctaacatcgattgaatctgaga

SEQ ID NO: 77073 - DNA, 25 bp, Artificial
  Probe
gctaacatcgattgaatctgagaca

SEQ ID NO: 77074 - DNA, 25 bp, Artificial
  Probe
tgctaacatcgattgaatctgagac

SEQ ID NO: 77075 - DNA, 25 bp, Artificial
  Probe
aaggacataagtgagaaagttgccg

SEQ ID NO: 77076 - DNA, 25 bp, Artificial
  Probe
tgcctcgacctacagataactcatc

SEQ ID NO: 77077 - DNA, 25 bp, Artificial
  Probe
atcctcatttaatgtctttaaccac

SEQ ID NO: 77078 - DNA, 25 bp, Artificial
  Probe
catcctcatttaatgtctttaacca

SEQ ID NO: 77079 - DNA, 25 bp, Artificial
  Probe
gaacctgctaacatcgattgaatct

SEQ ID NO: 77080 - DNA, 25 bp, Artificial
  Probe
agaacctgctaacatcgattgaatc

SEQ ID NO: 77081 - DNA, 25 bp, Artificial
  Probe
tttaatgtctttaaccaccttcttt

SEQ ID NO: 77082 - DNA, 25 bp, Artificial
  Probe
aacctgctaacatcgattgaatctg

SEQ ID NO: 77083 - DNA, 25 bp, Artificial
  Probe
tcatcctcatttaatgtctttaacc

SEQ ID NO: 77084 - DNA, 25 bp, Artificial
  Probe
cctgctaacatcgattgaatctgag

SEQ ID NO: 77085 - DNA, 25 bp, Artificial
  Probe
aggtagagagtttaattgcccaaaa

SEQ ID NO: 77086 - DNA, 25 bp, Artificial
  Probe
gctgcttgtagacctgttaatatag

SEQ ID NO: 77087 - DNA, 25 bp, Artificial
  Probe
ctagtcatggagattcagtaagtgc

SEQ ID NO: 77088 - DNA, 25 bp, Artificial
  Probe
cgtctagtcatggagattcagtaag

SEQ ID NO: 77089 - DNA, 25 bp, Artificial
  Probe
tcgtctagtcatggagattcagtaa

SEQ ID NO: 77090 - DNA, 25 bp, Artificial
  Probe
ttcgtctagtcatggagattcagta

SEQ ID NO: 77091 - DNA, 25 bp, Artificial
  Probe
ctgcttgtagacctgttaatatagt

SEQ ID NO: 77092 - DNA, 25 bp, Artificial
  Probe
tctagtcatggagattcagtaagtg

SEQ ID NO: 77093 - DNA, 25 bp, Artificial
  Probe
gtctagtcatggagattcagtaagt

SEQ ID NO: 77094 - DNA, 25 bp, Artificial
  Probe
agctgcttgtagacctgttaatata

SEQ ID NO: 77095 - DNA, 25 bp, Artificial
  Probe
aagctgcttgtagacctgttaatat

SEQ ID NO: 77096 - DNA, 25 bp, Artificial
  Probe
tagtcatggagattcagtaagtgcc

SEQ ID NO: 77097 - DNA, 25 bp, Artificial
  Probe
gattcagtaagtgccttggaacaac

SEQ ID NO: 77098 - DNA, 25 bp, Artificial
  Probe
agattcagtaagtgccttggaacaa

SEQ ID NO: 77099 - DNA, 25 bp, Artificial
  Probe
gagattcagtaagtgccttggaaca

SEQ ID NO: 77100 - DNA, 25 bp, Artificial
  Probe
ggatatttgttgacctgccattaaa

SEQ ID NO: 77101 - DNA, 25 bp, Artificial
  Probe
actgtctaattgttcaccctaatgg

SEQ ID NO: 77102 - DNA, 25 bp, Artificial
  Probe
gtaagtgccttggaacaacattgac

SEQ ID NO: 77103 - DNA, 25 bp, Artificial
  Probe
cagtaagtgccttggaacaacattg

SEQ ID NO: 77104 - DNA, 25 bp, Artificial
  Probe
agtaagtgccttggaacaacattga

SEQ ID NO: 77105 - DNA, 25 bp, Artificial
  Probe
tcagtaagtgccttggaacaacatt

SEQ ID NO: 77106 - DNA, 25 bp, Artificial
  Probe
ttcagtaagtgccttggaacaacat

SEQ ID NO: 77107 - DNA, 25 bp, Artificial
  Probe
attcagtaagtgccttggaacaaca

SEQ ID NO: 77108 - DNA, 25 bp, Artificial
  Probe
taagtgccttggaacaacattgact

SEQ ID NO: 77109 - DNA, 25 bp, Artificial
  Probe
tcatggagattcagtaagtgccttg

SEQ ID NO: 77110 - DNA, 25 bp, Artificial
  Probe
gtcatggagattcagtaagtgcctt

SEQ ID NO: 77111 - DNA, 25 bp, Artificial
  Probe
caggttatcagagatcaaagagtgt

SEQ ID NO: 77112 - DNA, 25 bp, Artificial
  Probe
tgcttgtagacctgttaatatagta

SEQ ID NO: 77113 - DNA, 25 bp, Artificial
  Probe
gcatggtttaagtctttgtgtatct

SEQ ID NO: 77114 - DNA, 25 bp, Artificial
  Probe
tactgtctaattgttcaccctaatg

SEQ ID NO: 77115 - DNA, 25 bp, Artificial
  Probe
ggagattcagtaagtgccttggaac

SEQ ID NO: 77116 - DNA, 25 bp, Artificial
  Probe
gcaggttatcagagatcaaagagtg

SEQ ID NO: 77117 - DNA, 25 bp, Artificial
  Probe
atggagattcagtaagtgccttgga

SEQ ID NO: 77118 - DNA, 25 bp, Artificial
  Probe
aggatatttgttgacctgccattaa

SEQ ID NO: 77119 - DNA, 25 bp, Artificial
  Probe
gtatgtttcaggatatttgttgacc

SEQ ID NO: 77120 - DNA, 25 bp, Artificial
  Probe
agtcatggagattcagtaagtgcct

SEQ ID NO: 77121 - DNA, 25 bp, Artificial
  Probe
tttcgtctagtcatggagattcagt

SEQ ID NO: 77122 - DNA, 25 bp, Artificial
  Probe
tggagattcagtaagtgccttggaa

SEQ ID NO: 77123 - DNA, 25 bp, Artificial
  Probe
acagggcaagtaggtatataatttg

SEQ ID NO: 77124 - DNA, 25 bp, Artificial
  Probe
agcattgcaggttatcagagatcaa

SEQ ID NO: 77125 - DNA, 25 bp, Artificial
  Probe
tgtctaattgttcaccctaatggtt

SEQ ID NO: 77126 - DNA, 25 bp, Artificial
  Probe
tctaattgttcaccctaatggttct

SEQ ID NO: 77127 - DNA, 25 bp, Artificial
  Probe
gtctaattgttcaccctaatggttc

SEQ ID NO: 77128 - DNA, 25 bp, Artificial
  Probe
cttacttgtaaattatttgccctga

SEQ ID NO: 77129 - DNA, 25 bp, Artificial
  Probe
tcttacttgtaaattatttgccctg

SEQ ID NO: 77130 - DNA, 25 bp, Artificial
  Probe
ctgtctaattgttcaccctaatggt

SEQ ID NO: 77131 - DNA, 25 bp, Artificial
  Probe
ctgtcggtaaccatcctaatcaatt

SEQ ID NO: 77132 - DNA, 25 bp, Artificial
  Probe
aggaataagtgattgctcaagtctt

SEQ ID NO: 77133 - DNA, 25 bp, Artificial
  Probe
tattcctactgccattctctaagtg

SEQ ID NO: 77134 - DNA, 25 bp, Artificial
  Probe
caggaataagtgattgctcaagtct

SEQ ID NO: 77135 - DNA, 25 bp, Artificial
  Probe
attcctactgccattctctaagtga

SEQ ID NO: 77136 - DNA, 25 bp, Artificial
  Probe
ttcctactgccattctctaagtgaa

SEQ ID NO: 77137 - DNA, 25 bp, Artificial
  Probe
ggagaccattacaatctgtgactat

SEQ ID NO: 77138 - DNA, 25 bp, Artificial
  Probe
actgtcggtaaccatcctaatcaat

SEQ ID NO: 77139 - DNA, 25 bp, Artificial
  Probe
atattcctactgccattctctaagt

SEQ ID NO: 77140 - DNA, 25 bp, Artificial
  Probe
taagtgattgctcaagtcttaccaa

SEQ ID NO: 77141 - DNA, 25 bp, Artificial
  Probe
ataagtgattgctcaagtcttacca

SEQ ID NO: 77142 - DNA, 25 bp, Artificial
  Probe
atagagattgcggagaccattacaa

SEQ ID NO: 77143 - DNA, 25 bp, Artificial
  Probe
aagtgattgctcaagtcttaccaac

SEQ ID NO: 77144 - DNA, 25 bp, Artificial
  Probe
ccaggaataagtgattgctcaagtc

SEQ ID NO: 77145 - DNA, 25 bp, Artificial
  Probe
catagagattgcggagaccattaca

SEQ ID NO: 77146 - DNA, 25 bp, Artificial
  Probe
aataagtgattgctcaagtcttacc

SEQ ID NO: 77147 - DNA, 25 bp, Artificial
  Probe
ggaataagtgattgctcaagtctta

SEQ ID NO: 77148 - DNA, 25 bp, Artificial
  Probe
gactgtcggtaaccatcctaatcaa

SEQ ID NO: 77149 - DNA, 25 bp, Artificial
  Probe
tccaggaataagtgattgctcaagt

SEQ ID NO: 77150 - DNA, 25 bp, Artificial
  Probe
tgccattctctaagtgaatacacat

SEQ ID NO: 77151 - DNA, 25 bp, Artificial
  Probe
cctactgccattctctaagtgaata

SEQ ID NO: 77152 - DNA, 25 bp, Artificial
  Probe
cggagaccattacaatctgtgacta

SEQ ID NO: 77153 - DNA, 25 bp, Artificial
  Probe
ctgccattctctaagtgaatacaca

SEQ ID NO: 77154 - DNA, 25 bp, Artificial
  Probe
actgccattctctaagtgaatacac

SEQ ID NO: 77155 - DNA, 25 bp, Artificial
  Probe
tactgccattctctaagtgaataca

SEQ ID NO: 77156 - DNA, 25 bp, Artificial
  Probe
aatctgtgactatagcgttgacttc

SEQ ID NO: 77157 - DNA, 25 bp, Artificial
  Probe
tcctactgccattctctaagtgaat

SEQ ID NO: 77158 - DNA, 25 bp, Artificial
  Probe
gaataagtgattgctcaagtcttac

SEQ ID NO: 77159 - DNA, 25 bp, Artificial
  Probe
ggaatgtgttcaaccatgatgagtt

SEQ ID NO: 77160 - DNA, 25 bp, Artificial
  Probe
ccttaaagcaataaaccatcagcaa

SEQ ID NO: 77161 - DNA, 25 bp, Artificial
  Probe
ctactgccattctctaagtgaatac

SEQ ID NO: 77162 - DNA, 25 bp, Artificial
  Probe
ctagagtcaccagtcaattcacagg

SEQ ID NO: 77163 - DNA, 25 bp, Artificial
  Probe
ctccttaaagcaataaaccatcagc

SEQ ID NO: 77164 - DNA, 25 bp, Artificial
  Probe
tagagtcaccagtcaattcacagga

SEQ ID NO: 77165 - DNA, 25 bp, Artificial
  Probe
gagaccattacaatctgtgactata

SEQ ID NO: 77166 - DNA, 25 bp, Artificial
  Probe
gccattctctaagtgaatacacatg

SEQ ID NO: 77167 - DNA, 25 bp, Artificial
  Probe
atctgtgactatagcgttgacttct

SEQ ID NO: 77168 - DNA, 25 bp, Artificial
  Probe
tccttaaagcaataaaccatcagca

SEQ ID NO: 77169 - DNA, 25 bp, Artificial
  Probe
tctccttaaagcaataaaccatcag

SEQ ID NO: 77170 - DNA, 25 bp, Artificial
  Probe
aatattcctactgccattctctaag

SEQ ID NO: 77171 - DNA, 25 bp, Artificial
  Probe
tgtcggtaaccatcctaatcaattt

SEQ ID NO: 77172 - DNA, 25 bp, Artificial
  Probe
caatctgtgactatagcgttgactt

SEQ ID NO: 77173 - DNA, 25 bp, Artificial
  Probe
aacaataggactgtcggtaaccatc

SEQ ID NO: 77174 - DNA, 25 bp, Artificial
  Probe
cttaaagcaataaaccatcagcaaa

SEQ ID NO: 77175 - DNA, 25 bp, Artificial
  Probe
ttacaatctgtgactatagcgttga

SEQ ID NO: 77176 - DNA, 25 bp, Artificial
  Probe
tacaatgactggacatctggagtat

SEQ ID NO: 77177 - DNA, 25 bp, Artificial
  Probe
gtacaatgactggacatctggagta

SEQ ID NO: 77178 - DNA, 25 bp, Artificial
  Probe
acaatgactggacatctggagtatg

SEQ ID NO: 77179 - DNA, 25 bp, Artificial
  Probe
gccaaagaagaaagtgacatttaac

SEQ ID NO: 77180 - DNA, 25 bp, Artificial
  Probe
attactttaactcaatgggtgcttt

SEQ ID NO: 77181 - DNA, 25 bp, Artificial
  Probe
caaattactttaactcaatgggtgc

SEQ ID NO: 77182 - DNA, 25 bp, Artificial
  Probe
cggagcaagacaaattactttaact

SEQ ID NO: 77183 - DNA, 25 bp, Artificial
  Probe
acggagcaagacaaattactttaac

SEQ ID NO: 77184 - DNA, 25 bp, Artificial
  Probe
gacggagcaagacaaattactttaa

SEQ ID NO: 77185 - DNA, 25 bp, Artificial
  Probe
aattactttaactcaatgggtgctt

SEQ ID NO: 77186 - DNA, 25 bp, Artificial
  Probe
aaattactttaactcaatgggtgct

SEQ ID NO: 77187 - DNA, 25 bp, Artificial
  Probe
tgacggagcaagacaaattacttta

SEQ ID NO: 77188 - DNA, 25 bp, Artificial
  Probe
atatttgaacgactgtatttgccaa

SEQ ID NO: 77189 - DNA, 25 bp, Artificial
  Probe
tgccaggatttaatatttgaacgac

SEQ ID NO: 77190 - DNA, 25 bp, Artificial
  Probe
acaaattactttaactcaatgggtg

SEQ ID NO: 77191 - DNA, 25 bp, Artificial
  Probe
gccaggatttaatatttgaacgact

SEQ ID NO: 77192 - DNA, 25 bp, Artificial
  Probe
catctggagtatgttgcagtattgg

SEQ ID NO: 77193 - DNA, 25 bp, Artificial
  Probe
gtgacggagcaagacaaattacttt

SEQ ID NO: 77194 - DNA, 25 bp, Artificial
  Probe
atgccaggatttaatatttgaacga

SEQ ID NO: 77195 - DNA, 25 bp, Artificial
  Probe
ggagcaagacaaattactttaactc

SEQ ID NO: 77196 - DNA, 25 bp, Artificial
  Probe
aatatttgaacgactgtatttgcca

SEQ ID NO: 77197 - DNA, 25 bp, Artificial
  Probe
gacaaattactttaactcaatgggt

SEQ ID NO: 77198 - DNA, 25 bp, Artificial
  Probe
gaagtgacggagcaagacaaattac

SEQ ID NO: 77199 - DNA, 25 bp, Artificial
  Probe
agaagtgacggagcaagacaaatta

SEQ ID NO: 77200 - DNA, 25 bp, Artificial
  Probe
ccaaagaagaaagtgacatttaact

SEQ ID NO: 77201 - DNA, 25 bp, Artificial
  Probe
aatgactggacatctggagtatgtt

SEQ ID NO: 77202 - DNA, 25 bp, Artificial
  Probe
agacaaattactttaactcaatggg

SEQ ID NO: 77203 - DNA, 25 bp, Artificial
  Probe
tgaccaattcaatctactgagataa

SEQ ID NO: 77204 - DNA, 25 bp, Artificial
  Probe
gagcaagacaaattactttaactca

SEQ ID NO: 77205 - DNA, 25 bp, Artificial
  Probe
gtatgttgcagtattgggtcctatt

SEQ ID NO: 77206 - DNA, 25 bp, Artificial
  Probe
agcaagacaaattactttaactcaa

SEQ ID NO: 77207 - DNA, 25 bp, Artificial
  Probe
agtatgttgcagtattgggtcctat

SEQ ID NO: 77208 - DNA, 25 bp, Artificial
  Probe
atgactggacatctggagtatgttg

SEQ ID NO: 77209 - DNA, 25 bp, Artificial
  Probe
caatgactggacatctggagtatgt

SEQ ID NO: 77210 - DNA, 25 bp, Artificial
  Probe
agtgacggagcaagacaaattactt

SEQ ID NO: 77211 - DNA, 25 bp, Artificial
  Probe
aagtgacggagcaagacaaattact

SEQ ID NO: 77212 - DNA, 25 bp, Artificial
  Probe
tatgccaggatttaatatttgaacg

SEQ ID NO: 77213 - DNA, 25 bp, Artificial
  Probe
taatatttgaacgactgtatttgcc

SEQ ID NO: 77214 - DNA, 25 bp, Artificial
  Probe
gacatctggagtatgttgcagtatt

SEQ ID NO: 77215 - DNA, 25 bp, Artificial
  Probe
aagaagtgacggagcaagacaaatt

SEQ ID NO: 77216 - DNA, 25 bp, Artificial
  Probe
acatctggagtatgttgcagtattg

SEQ ID NO: 77217 - DNA, 25 bp, Artificial
  Probe
tggtataacagtgacagaatctctg

SEQ ID NO: 77218 - DNA, 25 bp, Artificial
  Probe
gagtatgttgcagtattgggtccta

SEQ ID NO: 77219 - DNA, 25 bp, Artificial
  Probe
ttgaccaattcaatctactgagata

SEQ ID NO: 77220 - DNA, 25 bp, Artificial
  Probe
ccaggatttaatatttgaacgactg

SEQ ID NO: 77221 - DNA, 25 bp, Artificial
  Probe
ttaactgattgtgctcatggacatg

SEQ ID NO: 77222 - DNA, 25 bp, Artificial
  Probe
atggacatggacacagacctactat

SEQ ID NO: 77223 - DNA, 25 bp, Artificial
  Probe
ccctagcctgtatttctcaattctg

SEQ ID NO: 77224 - DNA, 25 bp, Artificial
  Probe
cctagcctgtatttctcaattctga

SEQ ID NO: 77225 - DNA, 25 bp, Artificial
  Probe
ttggtgctatctgttaactgattgt

SEQ ID NO: 77226 - DNA, 25 bp, Artificial
  Probe
gttggtgctatctgttaactgattg

SEQ ID NO: 77227 - DNA, 25 bp, Artificial
  Probe
tgctatctgttaactgattgtgctc

SEQ ID NO: 77228 - DNA, 25 bp, Artificial
  Probe
tggtgctatctgttaactgattgtg

SEQ ID NO: 77229 - DNA, 25 bp, Artificial
  Probe
ctagcctgtatttctcaattctgat

SEQ ID NO: 77230 - DNA, 25 bp, Artificial
  Probe
gtgctatctgttaactgattgtgct

SEQ ID NO: 77231 - DNA, 25 bp, Artificial
  Probe
tatctgttaactgattgtgctcatg

SEQ ID NO: 77232 - DNA, 25 bp, Artificial
  Probe
ctatctgttaactgattgtgctcat

SEQ ID NO: 77233 - DNA, 25 bp, Artificial
  Probe
gctatctgttaactgattgtgctca

SEQ ID NO: 77234 - DNA, 25 bp, Artificial
  Probe
tagcctgtatttctcaattctgatc

SEQ ID NO: 77235 - DNA, 25 bp, Artificial
  Probe
tggacatggacacagacctactatg

SEQ ID NO: 77236 - DNA, 25 bp, Artificial
  Probe
catggacatggacacagacctacta

SEQ ID NO: 77237 - DNA, 25 bp, Artificial
  Probe
taactgattgtgctcatggacatgg

SEQ ID NO: 77238 - DNA, 25 bp, Artificial
  Probe
atctgttaactgattgtgctcatgg

SEQ ID NO: 77239 - DNA, 25 bp, Artificial
  Probe
catggacacagacctactatgctct

SEQ ID NO: 77240 - DNA, 25 bp, Artificial
  Probe
ggtgctatctgttaactgattgtgc

SEQ ID NO: 77241 - DNA, 25 bp, Artificial
  Probe
acatggacacagacctactatgctc

SEQ ID NO: 77242 - DNA, 25 bp, Artificial
  Probe
gacatggacacagacctactatgct

SEQ ID NO: 77243 - DNA, 25 bp, Artificial
  Probe
gttaactgattgtgctcatggacat

SEQ ID NO: 77244 - DNA, 25 bp, Artificial
  Probe
cagacctcaccctgatgatttactc

SEQ ID NO: 77245 - DNA, 25 bp, Artificial
  Probe
ctgttaactgattgtgctcatggac

SEQ ID NO: 77246 - DNA, 25 bp, Artificial
  Probe
tctgttaactgattgtgctcatgga

SEQ ID NO: 77247 - DNA, 25 bp, Artificial
  Probe
catcccagttggtgctatctgttaa

SEQ ID NO: 77248 - DNA, 25 bp, Artificial
  Probe
cagagtagccaccaaggaatgagac

SEQ ID NO: 77249 - DNA, 25 bp, Artificial
  Probe
agacctcaccctgatgatttactcc

SEQ ID NO: 77250 - DNA, 25 bp, Artificial
  Probe
gtagccaccaaggaatgagactctg

SEQ ID NO: 77251 - DNA, 25 bp, Artificial
  Probe
tgttaactgattgtgctcatggaca

SEQ ID NO: 77252 - DNA, 25 bp, Artificial
  Probe
agttggtgctatctgttaactgatt

SEQ ID NO: 77253 - DNA, 25 bp, Artificial
  Probe
ttcccctagcctgtatttctcaatt

SEQ ID NO: 77254 - DNA, 25 bp, Artificial
  Probe
ctcatggacatggacacagacctac

SEQ ID NO: 77255 - DNA, 25 bp, Artificial
  Probe
cgtgcaaagggaattcttgaaatta

SEQ ID NO: 77256 - DNA, 25 bp, Artificial
  Probe
ggacatggacacagacctactatgc

SEQ ID NO: 77257 - DNA, 25 bp, Artificial
  Probe
agagtagccaccaaggaatgagact

SEQ ID NO: 77258 - DNA, 25 bp, Artificial
  Probe
agtagccaccaaggaatgagactct

SEQ ID NO: 77259 - DNA, 25 bp, Artificial
  Probe
cccctagcctgtatttctcaattct

SEQ ID NO: 77260 - DNA, 25 bp, Artificial
  Probe
tcccctagcctgtatttctcaattc

SEQ ID NO: 77261 - DNA, 25 bp, Artificial
  Probe
gtgcaaagggaattcttgaaattaa

SEQ ID NO: 77262 - DNA, 25 bp, Artificial
  Probe
gttcccctagcctgtatttctcaat

SEQ ID NO: 77263 - DNA, 25 bp, Artificial
  Probe
agcctgtatttctcaattctgatca

SEQ ID NO: 77264 - DNA, 25 bp, Artificial
  Probe
tcatggacatggacacagacctact

SEQ ID NO: 77265 - DNA, 25 bp, Artificial
  Probe
aactgattgtgctcatggacatgga

SEQ ID NO: 77266 - DNA, 25 bp, Artificial
  Probe
cttcattgaggttctggtatagtct

SEQ ID NO: 77267 - DNA, 25 bp, Artificial
  Probe
tcattgaggttctggtatagtctaa

SEQ ID NO: 77268 - DNA, 25 bp, Artificial
  Probe
ttcattgaggttctggtatagtcta

SEQ ID NO: 77269 - DNA, 25 bp, Artificial
  Probe
ccttcattgaggttctggtatagtc

SEQ ID NO: 77270 - DNA, 25 bp, Artificial
  Probe
cattgaggttctggtatagtctaat

SEQ ID NO: 77271 - DNA, 25 bp, Artificial
  Probe
ttgccttcattgaggttctggtata

SEQ ID NO: 77272 - DNA, 25 bp, Artificial
  Probe
cagggaaaggaaatgagacaatatg

SEQ ID NO: 77273 - DNA, 25 bp, Artificial
  Probe
gccttcattgaggttctggtatagt

SEQ ID NO: 77274 - DNA, 25 bp, Artificial
  Probe
tgccttcattgaggttctggtatag

SEQ ID NO: 77275 - DNA, 25 bp, Artificial
  Probe
gcagggaaaggaaatgagacaatat

SEQ ID NO: 77276 - DNA, 25 bp, Artificial
  Probe
ccacccagaactgaagaacataatt

SEQ ID NO: 77277 - DNA, 25 bp, Artificial
  Probe
attgaggttctggtatagtctaatt

SEQ ID NO: 77278 - DNA, 25 bp, Artificial
  Probe
aattgcattggaattagtgtcagaa

SEQ ID NO: 77279 - DNA, 25 bp, Artificial
  Probe
gtttccatctgctgtttcatcttca

SEQ ID NO: 77280 - DNA, 25 bp, Artificial
  Probe
agggaaaggaaatgagacaatatgt

SEQ ID NO: 77281 - DNA, 25 bp, Artificial
  Probe
gcattggaattagtgtcagaaatag

SEQ ID NO: 77282 - DNA, 25 bp, Artificial
  Probe
ttaaatgaaattcctgattgaggcg

SEQ ID NO: 77283 - DNA, 25 bp, Artificial
  Probe
ccagaactgaagaacataattaact

SEQ ID NO: 77284 - DNA, 25 bp, Artificial
  Probe
ggtttccatctgctgtttcatcttc

SEQ ID NO: 77285 - DNA, 25 bp, Artificial
  Probe
cacccagaactgaagaacataatta

SEQ ID NO: 77286 - DNA, 25 bp, Artificial
  Probe
atatgtctttgccttcattgaggtt

SEQ ID NO: 77287 - DNA, 25 bp, Artificial
  Probe
aatatgtctttgccttcattgaggt

SEQ ID NO: 77288 - DNA, 25 bp, Artificial
  Probe
tttccatctgctgtttcatcttcag

SEQ ID NO: 77289 - DNA, 25 bp, Artificial
  Probe
tatgtctttgccttcattgaggttc

SEQ ID NO: 77290 - DNA, 25 bp, Artificial
  Probe
ggcagggaaaggaaatgagacaata

SEQ ID NO: 77291 - DNA, 25 bp, Artificial
  Probe
taaatgaaattcctgattgaggcgg

SEQ ID NO: 77292 - DNA, 25 bp, Artificial
  Probe
acccagaactgaagaacataattaa

SEQ ID NO: 77293 - DNA, 25 bp, Artificial
  Probe
ttgcattggaattagtgtcagaaat

SEQ ID NO: 77294 - DNA, 25 bp, Artificial
  Probe
attgcattggaattagtgtcagaaa

SEQ ID NO: 77295 - DNA, 25 bp, Artificial
  Probe
cccagaactgaagaacataattaac

SEQ ID NO: 77296 - DNA, 25 bp, Artificial
  Probe
tggaattagtgtcagaaatagatga

SEQ ID NO: 77297 - DNA, 25 bp, Artificial
  Probe
acaatatgtctttgccttcattgag

SEQ ID NO: 77298 - DNA, 25 bp, Artificial
  Probe
caatatgtctttgccttcattgagg

SEQ ID NO: 77299 - DNA, 25 bp, Artificial
  Probe
ttgaggttctggtatagtctaattt

SEQ ID NO: 77300 - DNA, 25 bp, Artificial
  Probe
tgcattggaattagtgtcagaaata

SEQ ID NO: 77301 - DNA, 25 bp, Artificial
  Probe
ttggaattagtgtcagaaatagatg

SEQ ID NO: 77302 - DNA, 25 bp, Artificial
  Probe
cattggaattagtgtcagaaataga

SEQ ID NO: 77303 - DNA, 25 bp, Artificial
  Probe
aaattgcattggaattagtgtcaga

SEQ ID NO: 77304 - DNA, 25 bp, Artificial
  Probe
tttgccttcattgaggttctggtat

SEQ ID NO: 77305 - DNA, 25 bp, Artificial
  Probe
ggaattagtgtcagaaatagatgag

SEQ ID NO: 77306 - DNA, 25 bp, Artificial
  Probe
gggtttccatctgctgtttcatctt

SEQ ID NO: 77307 - DNA, 25 bp, Artificial
  Probe
atgtctttgccttcattgaggttct

SEQ ID NO: 77308 - DNA, 25 bp, Artificial
  Probe
gccccttaaataaaagcgatgaata

SEQ ID NO: 77309 - DNA, 25 bp, Artificial
  Probe
tttaaatgaaattcctgattgaggc

SEQ ID NO: 77310 - DNA, 25 bp, Artificial
  Probe
cgttcaaatgggtaaaactggaaaa

SEQ ID NO: 77311 - DNA, 25 bp, Artificial
  Probe
cagatttctcaaggcagttatgttc

SEQ ID NO: 77312 - DNA, 25 bp, Artificial
  Probe
ttctcagatttctcaaggcagttat

SEQ ID NO: 77313 - DNA, 25 bp, Artificial
  Probe
attctcagatttctcaaggcagtta

SEQ ID NO: 77314 - DNA, 25 bp, Artificial
  Probe
tcagatttctcaaggcagttatgtt

SEQ ID NO: 77315 - DNA, 25 bp, Artificial
  Probe
tctcagatttctcaaggcagttatg

SEQ ID NO: 77316 - DNA, 25 bp, Artificial
  Probe
taattctcagatttctcaaggcagt

SEQ ID NO: 77317 - DNA, 25 bp, Artificial
  Probe
gtaattctcagatttctcaaggcag

SEQ ID NO: 77318 - DNA, 25 bp, Artificial
  Probe
tctcaataagttcctctacccttct

SEQ ID NO: 77319 - DNA, 25 bp, Artificial
  Probe
ctcagatttctcaaggcagttatgt

SEQ ID NO: 77320 - DNA, 25 bp, Artificial
  Probe
aggtaattctcagatttctcaaggc

SEQ ID NO: 77321 - DNA, 25 bp, Artificial
  Probe
aattctcagatttctcaaggcagtt

SEQ ID NO: 77322 - DNA, 25 bp, Artificial
  Probe
ctcaataagttcctctacccttctt

SEQ ID NO: 77323 - DNA, 25 bp, Artificial
  Probe
ttctcaataagttcctctacccttc

SEQ ID NO: 77324 - DNA, 25 bp, Artificial
  Probe
agatttctcaaggcagttatgttcc

SEQ ID NO: 77325 - DNA, 25 bp, Artificial
  Probe
ggtaattctcagatttctcaaggca

SEQ ID NO: 77326 - DNA, 25 bp, Artificial
  Probe
taagttcctctacccttctttatgg

SEQ ID NO: 77327 - DNA, 25 bp, Artificial
  Probe
cggttaggtaattctcagatttctc

SEQ ID NO: 77328 - DNA, 25 bp, Artificial
  Probe
tcaataagttcctctacccttcttt

SEQ ID NO: 77329 - DNA, 25 bp, Artificial
  Probe
attctcaataagttcctctaccctt

SEQ ID NO: 77330 - DNA, 25 bp, Artificial
  Probe
agttatgttcctacgttctgaccaa

SEQ ID NO: 77331 - DNA, 25 bp, Artificial
  Probe
ctgcggagagtcactgaaataaatt

SEQ ID NO: 77332 - DNA, 25 bp, Artificial
  Probe
cggagagtcactgaaataaattgat

SEQ ID NO: 77333 - DNA, 25 bp, Artificial
  Probe
tgcggagagtcactgaaataaattg

SEQ ID NO: 77334 - DNA, 25 bp, Artificial
  Probe
ttctcaaggcagttatgttcctacg

SEQ ID NO: 77335 - DNA, 25 bp, Artificial
  Probe
gcggagagtcactgaaataaattga

SEQ ID NO: 77336 - DNA, 25 bp, Artificial
  Probe
ggttaggtaattctcagatttctca

SEQ ID NO: 77337 - DNA, 25 bp, Artificial
  Probe
tattctcaataagttcctctaccct

SEQ ID NO: 77338 - DNA, 25 bp, Artificial
  Probe
atttctcaaggcagttatgttccta

SEQ ID NO: 77339 - DNA, 25 bp, Artificial
  Probe
actccggttaggtaattctcagatt

SEQ ID NO: 77340 - DNA, 25 bp, Artificial
  Probe
tttctcaaggcagttatgttcctac

SEQ ID NO: 77341 - DNA, 25 bp, Artificial
  Probe
taggtaattctcagatttctcaagg

SEQ ID NO: 77342 - DNA, 25 bp, Artificial
  Probe
catattctcaataagttcctctacc

SEQ ID NO: 77343 - DNA, 25 bp, Artificial
  Probe
gatttctcaaggcagttatgttcct

SEQ ID NO: 77344 - DNA, 25 bp, Artificial
  Probe
caataagttcctctacccttcttta

SEQ ID NO: 77345 - DNA, 25 bp, Artificial
  Probe
gttcatattctcaataagttcctct

SEQ ID NO: 77346 - DNA, 25 bp, Artificial
  Probe
agttcatattctcaataagttcctc

SEQ ID NO: 77347 - DNA, 25 bp, Artificial
  Probe
gttcctctacccttctttatggttt

SEQ ID NO: 77348 - DNA, 25 bp, Artificial
  Probe
cactccggttaggtaattctcagat

SEQ ID NO: 77349 - DNA, 25 bp, Artificial
  Probe
actgcggagagtcactgaaataaat

SEQ ID NO: 77350 - DNA, 25 bp, Artificial
  Probe
agttcctctacccttctttatggtt

SEQ ID NO: 77351 - DNA, 25 bp, Artificial
  Probe
aagttcctctacccttctttatggt

SEQ ID NO: 77352 - DNA, 25 bp, Artificial
  Probe
ccagaatccctcaagtcttaccaag

SEQ ID NO: 77353 - DNA, 25 bp, Artificial
  Probe
ataagttcctctacccttctttatg

SEQ ID NO: 77354 - DNA, 25 bp, Artificial
  Probe
cagttatgttcctacgttctgacca

SEQ ID NO: 77355 - DNA, 25 bp, Artificial
  Probe
atattctcaataagttcctctaccc

SEQ ID NO: 77356 - DNA, 25 bp, Artificial
  Probe
tttgttggtgttgatttcttgagtg

SEQ ID NO: 77357 - DNA, 25 bp, Artificial
  Probe
gtttgttggtgttgatttcttgagt

SEQ ID NO: 77358 - DNA, 25 bp, Artificial
  Probe
ggtttgttggtgttgatttcttgag

SEQ ID NO: 77359 - DNA, 25 bp, Artificial
  Probe
tttgtggtttgttggtgttgatttc

SEQ ID NO: 77360 - DNA, 25 bp, Artificial
  Probe
ttgttggtgttgatttcttgagtgt

SEQ ID NO: 77361 - DNA, 25 bp, Artificial
  Probe
gtttgtggtttgttggtgttgattt

SEQ ID NO: 77362 - DNA, 25 bp, Artificial
  Probe
tggtttgttggtgttgatttcttga

SEQ ID NO: 77363 - DNA, 25 bp, Artificial
  Probe
gtggtttgttggtgttgatttcttg

SEQ ID NO: 77364 - DNA, 25 bp, Artificial
  Probe
tgtggtttgttggtgttgatttctt

SEQ ID NO: 77365 - DNA, 25 bp, Artificial
  Probe
ttgtggtttgttggtgttgatttct

SEQ ID NO: 77366 - DNA, 25 bp, Artificial
  Probe
tgttggtgttgatttcttgagtgtg

SEQ ID NO: 77367 - DNA, 25 bp, Artificial
  Probe
agtttgtggtttgttggtgttgatt

SEQ ID NO: 77368 - DNA, 25 bp, Artificial
  Probe
cagtttgtggtttgttggtgttgat

SEQ ID NO: 77369 - DNA, 25 bp, Artificial
  Probe
ctttctcttttcactcctgtccatt

SEQ ID NO: 77370 - DNA, 25 bp, Artificial
  Probe
tttctcttttcactcctgtccattg

SEQ ID NO: 77371 - DNA, 25 bp, Artificial
  Probe
aaactttctcttttcactcctgtcc

SEQ ID NO: 77372 - DNA, 25 bp, Artificial
  Probe
actttctcttttcactcctgtccat

SEQ ID NO: 77373 - DNA, 25 bp, Artificial
  Probe
aactttctcttttcactcctgtcca

SEQ ID NO: 77374 - DNA, 25 bp, Artificial
  Probe
ttctcttttcactcctgtccattga

SEQ ID NO: 77375 - DNA, 25 bp, Artificial
  Probe
ggaggggaaacatttaaaatcagtt

SEQ ID NO: 77376 - DNA, 25 bp, Artificial
  Probe
gggaggggaaacatttaaaatcagt

SEQ ID NO: 77377 - DNA, 25 bp, Artificial
  Probe
ccttgctgggttacttgtcaacaaa

SEQ ID NO: 77378 - DNA, 25 bp, Artificial
  Probe
gaaactttctcttttcactcctgtc

SEQ ID NO: 77379 - DNA, 25 bp, Artificial
  Probe
ggggaggggaaacatttaaaatcag

SEQ ID NO: 77380 - DNA, 25 bp, Artificial
  Probe
agtgtgagccatctactttggtcat

SEQ ID NO: 77381 - DNA, 25 bp, Artificial
  Probe
gtgtgagccatctactttggtcatg

SEQ ID NO: 77382 - DNA, 25 bp, Artificial
  Probe
gagcagtttgtggtttgttggtgtt

SEQ ID NO: 77383 - DNA, 25 bp, Artificial
  Probe
cacctaaacggttcagtttcctctg

SEQ ID NO: 77384 - DNA, 25 bp, Artificial
  Probe
gaagtgtgagccatctactttggtc

SEQ ID NO: 77385 - DNA, 25 bp, Artificial
  Probe
ctgaagtgtgagccatctactttgg

SEQ ID NO: 77386 - DNA, 25 bp, Artificial
  Probe
cctgaagtgtgagccatctactttg

SEQ ID NO: 77387 - DNA, 25 bp, Artificial
  Probe
gcttaaagctctagcctcaagtgag

SEQ ID NO: 77388 - DNA, 25 bp, Artificial
  Probe
gcagtttgtggtttgttggtgttga

SEQ ID NO: 77389 - DNA, 25 bp, Artificial
  Probe
agcagtttgtggtttgttggtgttg

SEQ ID NO: 77390 - DNA, 25 bp, Artificial
  Probe
gaggggaaacatttaaaatcagtta

SEQ ID NO: 77391 - DNA, 25 bp, Artificial
  Probe
agaaactttctcttttcactcctgt

SEQ ID NO: 77392 - DNA, 25 bp, Artificial
  Probe
cttttcactcctgtccattgaagaa

SEQ ID NO: 77393 - DNA, 25 bp, Artificial
  Probe
aagaaactttctcttttcactcctg

SEQ ID NO: 77394 - DNA, 25 bp, Artificial
  Probe
ctcttttcactcctgtccattgaag

SEQ ID NO: 77395 - DNA, 25 bp, Artificial
  Probe
tcttttcactcctgtccattgaaga

SEQ ID NO: 77396 - DNA, 25 bp, Artificial
  Probe
tctcttttcactcctgtccattgaa

SEQ ID NO: 77397 - DNA, 25 bp, Artificial
  Probe
aagtgtgagccatctactttggtca

SEQ ID NO: 77398 - DNA, 25 bp, Artificial
  Probe
tgaagtgtgagccatctactttggt

SEQ ID NO: 77399 - DNA, 25 bp, Artificial
  Probe
aggggaaacatttaaaatcagttaa

SEQ ID NO: 77400 - DNA, 25 bp, Artificial
  Probe
tccagttttgttgtacagtttgaaa

SEQ ID NO: 77401 - DNA, 25 bp, Artificial
  Probe
cgaatccacattactcactacaaag

SEQ ID NO: 77402 - DNA, 25 bp, Artificial
  Probe
gccgaatccacattactcactacaa

SEQ ID NO: 77403 - DNA, 25 bp, Artificial
  Probe
ttgccgaatccacattactcactac

SEQ ID NO: 77404 - DNA, 25 bp, Artificial
  Probe
ccgaatccacattactcactacaaa

SEQ ID NO: 77405 - DNA, 25 bp, Artificial
  Probe
cgtttccatccctataccagatatg

SEQ ID NO: 77406 - DNA, 25 bp, Artificial
  Probe
gtttccatccctataccagatatga

SEQ ID NO: 77407 - DNA, 25 bp, Artificial
  Probe
gaatccacattactcactacaaaga

SEQ ID NO: 77408 - DNA, 25 bp, Artificial
  Probe
ttccatccctataccagatatgaaa

SEQ ID NO: 77409 - DNA, 25 bp, Artificial
  Probe
tttccatccctataccagatatgaa

SEQ ID NO: 77410 - DNA, 25 bp, Artificial
  Probe
atccacattactcactacaaagaaa

SEQ ID NO: 77411 - DNA, 25 bp, Artificial
  Probe
aatccacattactcactacaaagaa

SEQ ID NO: 77412 - DNA, 25 bp, Artificial
  Probe
tttgccgaatccacattactcacta

SEQ ID NO: 77413 - DNA, 25 bp, Artificial
  Probe
tgccgaatccacattactcactaca

SEQ ID NO: 77414 - DNA, 25 bp, Artificial
  Probe
atttgccgaatccacattactcact

SEQ ID NO: 77415 - DNA, 25 bp, Artificial
  Probe
catttgccgaatccacattactcac

SEQ ID NO: 77416 - DNA, 25 bp, Artificial
  Probe
acgtttccatccctataccagatat

SEQ ID NO: 77417 - DNA, 25 bp, Artificial
  Probe
cagtcattattattgagatgctaga

SEQ ID NO: 77418 - DNA, 25 bp, Artificial
  Probe
gacgtttccatccctataccagata

SEQ ID NO: 77419 - DNA, 25 bp, Artificial
  Probe
tgctagaaataaaatcaattcgcct

SEQ ID NO: 77420 - DNA, 25 bp, Artificial
  Probe
tccacattactcactacaaagaaaa

SEQ ID NO: 77421 - DNA, 25 bp, Artificial
  Probe
ctcctgagtgaaagagaacagttcc

SEQ ID NO: 77422 - DNA, 25 bp, Artificial
  Probe
tccatccctataccagatatgaaaa

SEQ ID NO: 77423 - DNA, 25 bp, Artificial
  Probe
agtcattattattgagatgctagaa

SEQ ID NO: 77424 - DNA, 25 bp, Artificial
  Probe
atgctagaaataaaatcaattcgcc

SEQ ID NO: 77425 - DNA, 25 bp, Artificial
  Probe
gctagaaataaaatcaattcgcctt

SEQ ID NO: 77426 - DNA, 25 bp, Artificial
  Probe
gagtgaaagagaacagttccgtcag

SEQ ID NO: 77427 - DNA, 25 bp, Artificial
  Probe
ccatccctataccagatatgaaaat

SEQ ID NO: 77428 - DNA, 25 bp, Artificial
  Probe
ctgagtgaaagagaacagttccgtc

SEQ ID NO: 77429 - DNA, 25 bp, Artificial
  Probe
atctcctgagtgaaagagaacagtt

SEQ ID NO: 77430 - DNA, 25 bp, Artificial
  Probe
gatgctagaaataaaatcaattcgc

SEQ ID NO: 77431 - DNA, 25 bp, Artificial
  Probe
gcatttgccgaatccacattactca

SEQ ID NO: 77432 - DNA, 25 bp, Artificial
  Probe
tgagtgaaagagaacagttccgtca

SEQ ID NO: 77433 - DNA, 25 bp, Artificial
  Probe
gatctcctgagtgaaagagaacagt

SEQ ID NO: 77434 - DNA, 25 bp, Artificial
  Probe
tctcctgagtgaaagagaacagttc

SEQ ID NO: 77435 - DNA, 25 bp, Artificial
  Probe
ggatctcctgagtgaaagagaacag

SEQ ID NO: 77436 - DNA, 25 bp, Artificial
  Probe
tcctgagtgaaagagaacagttccg

SEQ ID NO: 77437 - DNA, 25 bp, Artificial
  Probe
ggacgtttccatccctataccagat

SEQ ID NO: 77438 - DNA, 25 bp, Artificial
  Probe
tgcatttgccgaatccacattactc

SEQ ID NO: 77439 - DNA, 25 bp, Artificial
  Probe
agtgaaagagaacagttccgtcagg

SEQ ID NO: 77440 - DNA, 25 bp, Artificial
  Probe
aggatctcctgagtgaaagagaaca

SEQ ID NO: 77441 - DNA, 25 bp, Artificial
  Probe
aaagagaacagttccgtcaggaaat

SEQ ID NO: 77442 - DNA, 25 bp, Artificial
  Probe
ctagaaataaaatcaattcgccttt

SEQ ID NO: 77443 - DNA, 25 bp, Artificial
  Probe
gaaaaggttctgcggattttggatc

SEQ ID NO: 77444 - DNA, 25 bp, Artificial
  Probe
cctgagtgaaagagaacagttccgt

SEQ ID NO: 77445 - DNA, 25 bp, Artificial
  Probe
gtgaaagagaacagttccgtcagga

SEQ ID NO: 77446 - DNA, 25 bp, Artificial
  Probe
tgactctcttatgatggctgcttag

SEQ ID NO: 77447 - DNA, 25 bp, Artificial
  Probe
ctgactctcttatgatggctgctta

SEQ ID NO: 77448 - DNA, 25 bp, Artificial
  Probe
cataactcttgtacttagacaggca

SEQ ID NO: 77449 - DNA, 25 bp, Artificial
  Probe
acataactcttgtacttagacaggc

SEQ ID NO: 77450 - DNA, 25 bp, Artificial
  Probe
ccacaaggtattaagaacttattgc

SEQ ID NO: 77451 - DNA, 25 bp, Artificial
  Probe
ataactcttgtacttagacaggcaa

SEQ ID NO: 77452 - DNA, 25 bp, Artificial
  Probe
cacataactcttgtacttagacagg

SEQ ID NO: 77453 - DNA, 25 bp, Artificial
  Probe
gaaataaagtcacctgtttagagcg

SEQ ID NO: 77454 - DNA, 25 bp, Artificial
  Probe
agtgtccactgactctcttatgatg

SEQ ID NO: 77455 - DNA, 25 bp, Artificial
  Probe
tcacataactcttgtacttagacag

SEQ ID NO: 77456 - DNA, 25 bp, Artificial
  Probe
ctcacataactcttgtacttagaca

SEQ ID NO: 77457 - DNA, 25 bp, Artificial
  Probe
agaaataaagtcacctgtttagagc

SEQ ID NO: 77458 - DNA, 25 bp, Artificial
  Probe
tctcacataactcttgtacttagac

SEQ ID NO: 77459 - DNA, 25 bp, Artificial
  Probe
aaggctttctcacataactcttgta

SEQ ID NO: 77460 - DNA, 25 bp, Artificial
  Probe
actgactctcttatgatggctgctt

SEQ ID NO: 77461 - DNA, 25 bp, Artificial
  Probe
gtgtccactgactctcttatgatgg

SEQ ID NO: 77462 - DNA, 25 bp, Artificial
  Probe
aaaggctttctcacataactcttgt

SEQ ID NO: 77463 - DNA, 25 bp, Artificial
  Probe
ggctttctcacataactcttgtact

SEQ ID NO: 77464 - DNA, 25 bp, Artificial
  Probe
aggctttctcacataactcttgtac

SEQ ID NO: 77465 - DNA, 25 bp, Artificial
  Probe
gctttctcacataactcttgtactt

SEQ ID NO: 77466 - DNA, 25 bp, Artificial
  Probe
cacaaggtattaagaacttattgca

SEQ ID NO: 77467 - DNA, 25 bp, Artificial
  Probe
ttctcacataactcttgtacttaga

SEQ ID NO: 77468 - DNA, 25 bp, Artificial
  Probe
cttagacaggcaagttcccagatac

SEQ ID NO: 77469 - DNA, 25 bp, Artificial
  Probe
accacaaggtattaagaacttattg

SEQ ID NO: 77470 - DNA, 25 bp, Artificial
  Probe
ggtattaagaacttattgcatctgt

SEQ ID NO: 77471 - DNA, 25 bp, Artificial
  Probe
taactcttgtacttagacaggcaag

SEQ ID NO: 77472 - DNA, 25 bp, Artificial
  Probe
cactgactctcttatgatggctgct

SEQ ID NO: 77473 - DNA, 25 bp, Artificial
  Probe
acaatttgtgaataaacaggttgaa

SEQ ID NO: 77474 - DNA, 25 bp, Artificial
  Probe
attaagaacttattgcatctgtgcc

SEQ ID NO: 77475 - DNA, 25 bp, Artificial
  Probe
ctcttgtacttagacaggcaagttc

SEQ ID NO: 77476 - DNA, 25 bp, Artificial
  Probe
aggtattaagaacttattgcatctg

SEQ ID NO: 77477 - DNA, 25 bp, Artificial
  Probe
ttagacaggcaagttcccagatact

SEQ ID NO: 77478 - DNA, 25 bp, Artificial
  Probe
ttaagaacttattgcatctgtgcca

SEQ ID NO: 77479 - DNA, 25 bp, Artificial
  Probe
gctaacgaagaaaacctcattacat

SEQ ID NO: 77480 - DNA, 25 bp, Artificial
  Probe
ttgctaacgaagaaaacctcattac

SEQ ID NO: 77481 - DNA, 25 bp, Artificial
  Probe
gactctcttatgatggctgcttagc

SEQ ID NO: 77482 - DNA, 25 bp, Artificial
  Probe
caatttgtgaataaacaggttgaaa

SEQ ID NO: 77483 - DNA, 25 bp, Artificial
  Probe
tgctaacgaagaaaacctcattaca

SEQ ID NO: 77484 - DNA, 25 bp, Artificial
  Probe
actcttgtacttagacaggcaagtt

SEQ ID NO: 77485 - DNA, 25 bp, Artificial
  Probe
aactcttgtacttagacaggcaagt

SEQ ID NO: 77486 - DNA, 25 bp, Artificial
  Probe
tccactgactctcttatgatggctg

SEQ ID NO: 77487 - DNA, 25 bp, Artificial
  Probe
gtccactgactctcttatgatggct

SEQ ID NO: 77488 - DNA, 25 bp, Artificial
  Probe
acaaggtattaagaacttattgcat

SEQ ID NO: 77489 - DNA, 25 bp, Artificial
  Probe
cttgctaacgaagaaaacctcatta

SEQ ID NO: 77490 - DNA, 25 bp, Artificial
  Probe
tacaatttgtgaataaacaggttga

SEQ ID NO: 77491 - DNA, 25 bp, Artificial
  Probe
cgttctatggagcatatcattctct

SEQ ID NO: 77492 - DNA, 25 bp, Artificial
  Probe
tcgttctatggagcatatcattctc

SEQ ID NO: 77493 - DNA, 25 bp, Artificial
  Probe
ctcgttctatggagcatatcattct

SEQ ID NO: 77494 - DNA, 25 bp, Artificial
  Probe
tctcgttctatggagcatatcattc

SEQ ID NO: 77495 - DNA, 25 bp, Artificial
  Probe
tctatggagcatatcattctctgag

SEQ ID NO: 77496 - DNA, 25 bp, Artificial
  Probe
ttctatggagcatatcattctctga

SEQ ID NO: 77497 - DNA, 25 bp, Artificial
  Probe
gttctatggagcatatcattctctg

SEQ ID NO: 77498 - DNA, 25 bp, Artificial
  Probe
tatggagcatatcattctctgagag

SEQ ID NO: 77499 - DNA, 25 bp, Artificial
  Probe
ctatggagcatatcattctctgaga

SEQ ID NO: 77500 - DNA, 25 bp, Artificial
  Probe
ccctcctatctacccaaatctcttt

SEQ ID NO: 77501 - DNA, 25 bp, Artificial
  Probe
atcacaatgacttcaaatccatacc

SEQ ID NO: 77502 - DNA, 25 bp, Artificial
  Probe
tcacaatgacttcaaatccataccc

SEQ ID NO: 77503 - DNA, 25 bp, Artificial
  Probe
ttctggatcacaatgacttcaaatc

SEQ ID NO: 77504 - DNA, 25 bp, Artificial
  Probe
cttcaagtttctctttgccatttat

SEQ ID NO: 77505 - DNA, 25 bp, Artificial
  Probe
acttcaagtttctctttgccattta

SEQ ID NO: 77506 - DNA, 25 bp, Artificial
  Probe
tttctggatcacaatgacttcaaat

SEQ ID NO: 77507 - DNA, 25 bp, Artificial
  Probe
atttctggatcacaatgacttcaaa

SEQ ID NO: 77508 - DNA, 25 bp, Artificial
  Probe
tactcaagtgttgttcttaaaccac

SEQ ID NO: 77509 - DNA, 25 bp, Artificial
  Probe
ctatttctggatcacaatgacttca

SEQ ID NO: 77510 - DNA, 25 bp, Artificial
  Probe
actatttctggatcacaatgacttc

SEQ ID NO: 77511 - DNA, 25 bp, Artificial
  Probe
gaactatttctggatcacaatgact

SEQ ID NO: 77512 - DNA, 25 bp, Artificial
  Probe
actcaagtgttgttcttaaaccaca

SEQ ID NO: 77513 - DNA, 25 bp, Artificial
  Probe
gaacatccttcctgaacaaatctgc

SEQ ID NO: 77514 - DNA, 25 bp, Artificial
  Probe
cctggaatacaaggaatgaaagcat

SEQ ID NO: 77515 - DNA, 25 bp, Artificial
  Probe
tatttctggatcacaatgacttcaa

SEQ ID NO: 77516 - DNA, 25 bp, Artificial
  Probe
aactatttctggatcacaatgactt

SEQ ID NO: 77517 - DNA, 25 bp, Artificial
  Probe
gatcacaatgacttcaaatccatac

SEQ ID NO: 77518 - DNA, 25 bp, Artificial
  Probe
tggaatacaaggaatgaaagcattg

SEQ ID NO: 77519 - DNA, 25 bp, Artificial
  Probe
ctggaatacaaggaatgaaagcatt

SEQ ID NO: 77520 - DNA, 25 bp, Artificial
  Probe
ttcaagtttctctttgccatttata

SEQ ID NO: 77521 - DNA, 25 bp, Artificial
  Probe
ctgagagaactatttctggatcaca

SEQ ID NO: 77522 - DNA, 25 bp, Artificial
  Probe
tctgagagaactatttctggatcac

SEQ ID NO: 77523 - DNA, 25 bp, Artificial
  Probe
atccttcctgaacaaatctgcaatg

SEQ ID NO: 77524 - DNA, 25 bp, Artificial
  Probe
catccttcctgaacaaatctgcaat

SEQ ID NO: 77525 - DNA, 25 bp, Artificial
  Probe
tgagagaactatttctggatcacaa

SEQ ID NO: 77526 - DNA, 25 bp, Artificial
  Probe
ggaatacaaggaatgaaagcattgc

SEQ ID NO: 77527 - DNA, 25 bp, Artificial
  Probe
cctcctatctacccaaatctctttt

SEQ ID NO: 77528 - DNA, 25 bp, Artificial
  Probe
ctctgagagaactatttctggatca

SEQ ID NO: 77529 - DNA, 25 bp, Artificial
  Probe
agaactatttctggatcacaatgac

SEQ ID NO: 77530 - DNA, 25 bp, Artificial
  Probe
gagaactatttctggatcacaatga

SEQ ID NO: 77531 - DNA, 25 bp, Artificial
  Probe
agagaactatttctggatcacaatg

SEQ ID NO: 77532 - DNA, 25 bp, Artificial
  Probe
ctggagtacttgtacctgtcattta

SEQ ID NO: 77533 - DNA, 25 bp, Artificial
  Probe
gagagaactatttctggatcacaat

SEQ ID NO: 77534 - DNA, 25 bp, Artificial
  Probe
tcaagtttctctttgccatttataa

SEQ ID NO: 77535 - DNA, 25 bp, Artificial
  Probe
agctcttgaacaccttcatcttgaa

SEQ ID NO: 77536 - DNA, 25 bp, Artificial
  Probe
tttcatgttatgccttaagtccaaa

SEQ ID NO: 77537 - DNA, 25 bp, Artificial
  Probe
atttcatgttatgccttaagtccaa

SEQ ID NO: 77538 - DNA, 25 bp, Artificial
  Probe
aatttcatgttatgccttaagtcca

SEQ ID NO: 77539 - DNA, 25 bp, Artificial
  Probe
caatttcatgttatgccttaagtcc

SEQ ID NO: 77540 - DNA, 25 bp, Artificial
  Probe
tcgaaagactctagccttagacaaa

SEQ ID NO: 77541 - DNA, 25 bp, Artificial
  Probe
aatgagcaatttcatgttatgcctt

SEQ ID NO: 77542 - DNA, 25 bp, Artificial
  Probe
tgagcaatttcatgttatgccttaa

SEQ ID NO: 77543 - DNA, 25 bp, Artificial
  Probe
atgagcaatttcatgttatgcctta

SEQ ID NO: 77544 - DNA, 25 bp, Artificial
  Probe
taatgagcaatttcatgttatgcct

SEQ ID NO: 77545 - DNA, 25 bp, Artificial
  Probe
aaggtaaactttgaagattgtttgt

SEQ ID NO: 77546 - DNA, 25 bp, Artificial
  Probe
tagccttagacaaaactgagcaaga

SEQ ID NO: 77547 - DNA, 25 bp, Artificial
  Probe
ataatgagcaatttcatgttatgcc

SEQ ID NO: 77548 - DNA, 25 bp, Artificial
  Probe
ctagccttagacaaaactgagcaag

SEQ ID NO: 77549 - DNA, 25 bp, Artificial
  Probe
ataattgaaacactgtacacgcaaa

SEQ ID NO: 77550 - DNA, 25 bp, Artificial
  Probe
tataattgaaacactgtacacgcaa

SEQ ID NO: 77551 - DNA, 25 bp, Artificial
  Probe
aagactctagccttagacaaaactg

SEQ ID NO: 77552 - DNA, 25 bp, Artificial
  Probe
cagtctttcgatgatattgcatata

SEQ ID NO: 77553 - DNA, 25 bp, Artificial
  Probe
taattgaaacactgtacacgcaaac

SEQ ID NO: 77554 - DNA, 25 bp, Artificial
  Probe
aaagactctagccttagacaaaact

SEQ ID NO: 77555 - DNA, 25 bp, Artificial
  Probe
gactctagccttagacaaaactgag

SEQ ID NO: 77556 - DNA, 25 bp, Artificial
  Probe
gaaagactctagccttagacaaaac

SEQ ID NO: 77557 - DNA, 25 bp, Artificial
  Probe
cgaaagactctagccttagacaaaa

SEQ ID NO: 77558 - DNA, 25 bp, Artificial
  Probe
gcagtctttcgatgatattgcatat

SEQ ID NO: 77559 - DNA, 25 bp, Artificial
  Probe
agactctagccttagacaaaactga

SEQ ID NO: 77560 - DNA, 25 bp, Artificial
  Probe
gcatatattcgaaagactctagcct

SEQ ID NO: 77561 - DNA, 25 bp, Artificial
  Probe
tgcatatattcgaaagactctagcc

SEQ ID NO: 77562 - DNA, 25 bp, Artificial
  Probe
aaaggtaaactttgaagattgtttg

SEQ ID NO: 77563 - DNA, 25 bp, Artificial
  Probe
ttgcatatattcgaaagactctagc

SEQ ID NO: 77564 - DNA, 25 bp, Artificial
  Probe
agccttagacaaaactgagcaagag

SEQ ID NO: 77565 - DNA, 25 bp, Artificial
  Probe
agcaatttcatgttatgccttaagt

SEQ ID NO: 77566 - DNA, 25 bp, Artificial
  Probe
gcaatttcatgttatgccttaagtc

SEQ ID NO: 77567 - DNA, 25 bp, Artificial
  Probe
gagcaatttcatgttatgccttaag

SEQ ID NO: 77568 - DNA, 25 bp, Artificial
  Probe
tctagccttagacaaaactgagcaa

SEQ ID NO: 77569 - DNA, 25 bp, Artificial
  Probe
aataatgagcaatttcatgttatgc

SEQ ID NO: 77570 - DNA, 25 bp, Artificial
  Probe
actctagccttagacaaaactgagc

SEQ ID NO: 77571 - DNA, 25 bp, Artificial
  Probe
ttcatgttatgccttaagtccaaaa

SEQ ID NO: 77572 - DNA, 25 bp, Artificial
  Probe
ctctagccttagacaaaactgagca

SEQ ID NO: 77573 - DNA, 25 bp, Artificial
  Probe
catatattcgaaagactctagcctt

SEQ ID NO: 77574 - DNA, 25 bp, Artificial
  Probe
aattgaaacactgtacacgcaaaca

SEQ ID NO: 77575 - DNA, 25 bp, Artificial
  Probe
agtctttcgatgatattgcatatat

SEQ ID NO: 77576 - DNA, 25 bp, Artificial
  Probe
tattcgaaagactctagccttagac

SEQ ID NO: 77577 - DNA, 25 bp, Artificial
  Probe
aaaatccccaaaatacatacaaatg

SEQ ID NO: 77578 - DNA, 25 bp, Artificial
  Probe
attcgaaagactctagccttagaca

SEQ ID NO: 77579 - DNA, 25 bp, Artificial
  Probe
ttcgaaagactctagccttagacaa

SEQ ID NO: 77580 - DNA, 25 bp, Artificial
  Probe
atattcgaaagactctagccttaga

SEQ ID NO: 77581 - DNA, 25 bp, Artificial
  Probe
tataactgatggtctgactcctaag

SEQ ID NO: 77582 - DNA, 25 bp, Artificial
  Probe
ataactgatggtctgactcctaagt

SEQ ID NO: 77583 - DNA, 25 bp, Artificial
  Probe
gtaatataactgatggtctgactcc

SEQ ID NO: 77584 - DNA, 25 bp, Artificial
  Probe
taactgatggtctgactcctaagtg

SEQ ID NO: 77585 - DNA, 25 bp, Artificial
  Probe
atataactgatggtctgactcctaa

SEQ ID NO: 77586 - DNA, 25 bp, Artificial
  Probe
aatataactgatggtctgactccta

SEQ ID NO: 77587 - DNA, 25 bp, Artificial
  Probe
taatataactgatggtctgactcct

SEQ ID NO: 77588 - DNA, 25 bp, Artificial
  Probe
ccttgtaatataactgatggtctga

SEQ ID NO: 77589 - DNA, 25 bp, Artificial
  Probe
ctgatggtctgactcctaagtgtag

SEQ ID NO: 77590 - DNA, 25 bp, Artificial
  Probe
tgtaatataactgatggtctgactc

SEQ ID NO: 77591 - DNA, 25 bp, Artificial
  Probe
actgatggtctgactcctaagtgta

SEQ ID NO: 77592 - DNA, 25 bp, Artificial
  Probe
atgttggtattggttcccttgtaat

SEQ ID NO: 77593 - DNA, 25 bp, Artificial
  Probe
ccctttccatcctaaacatatccat

SEQ ID NO: 77594 - DNA, 25 bp, Artificial
  Probe
atgaaatggaaagacacagatgaag

SEQ ID NO: 77595 - DNA, 25 bp, Artificial
  Probe
gtccctttccatcctaaacatatcc

SEQ ID NO: 77596 - DNA, 25 bp, Artificial
  Probe
gatgacttcagtttcttggttgtta

SEQ ID NO: 77597 - DNA, 25 bp, Artificial
  Probe
gatgttggtattggttcccttgtaa

SEQ ID NO: 77598 - DNA, 25 bp, Artificial
  Probe
aatgaaatggaaagacacagatgaa

SEQ ID NO: 77599 - DNA, 25 bp, Artificial
  Probe
ttgtaatataactgatggtctgact

SEQ ID NO: 77600 - DNA, 25 bp, Artificial
  Probe
tccctttccatcctaaacatatcca

SEQ ID NO: 77601 - DNA, 25 bp, Artificial
  Probe
cgtccctttccatcctaaacatatc

SEQ ID NO: 77602 - DNA, 25 bp, Artificial
  Probe
ttcccatagtgttctctttcatcct

SEQ ID NO: 77603 - DNA, 25 bp, Artificial
  Probe
gttcccatagtgttctctttcatcc

SEQ ID NO: 77604 - DNA, 25 bp, Artificial
  Probe
ggttcccatagtgttctctttcatc

SEQ ID NO: 77605 - DNA, 25 bp, Artificial
  Probe
tgttggtattggttcccttgtaata

SEQ ID NO: 77606 - DNA, 25 bp, Artificial
  Probe
tgacttcagtttcttggttgttaat

SEQ ID NO: 77607 - DNA, 25 bp, Artificial
  Probe
atgacttcagtttcttggttgttaa

SEQ ID NO: 77608 - DNA, 25 bp, Artificial
  Probe
cttgtaatataactgatggtctgac

SEQ ID NO: 77609 - DNA, 25 bp, Artificial
  Probe
cccttgtaatataactgatggtctg

SEQ ID NO: 77610 - DNA, 25 bp, Artificial
  Probe
tcccttgtaatataactgatggtct

SEQ ID NO: 77611 - DNA, 25 bp, Artificial
  Probe
aagtcaggcattacatccttcacat

SEQ ID NO: 77612 - DNA, 25 bp, Artificial
  Probe
ccatagtgttctctttcatcctgat

SEQ ID NO: 77613 - DNA, 25 bp, Artificial
  Probe
ggttcccttgtaatataactgatgg

SEQ ID NO: 77614 - DNA, 25 bp, Artificial
  Probe
agatgttggtattggttcccttgta

SEQ ID NO: 77615 - DNA, 25 bp, Artificial
  Probe
taatgaaatggaaagacacagatga

SEQ ID NO: 77616 - DNA, 25 bp, Artificial
  Probe
taatgacgatgacttcagtttcttg

SEQ ID NO: 77617 - DNA, 25 bp, Artificial
  Probe
aactgatggtctgactcctaagtgt

SEQ ID NO: 77618 - DNA, 25 bp, Artificial
  Probe
gttggtattggttcccttgtaatat

SEQ ID NO: 77619 - DNA, 25 bp, Artificial
  Probe
tcccatagtgttctctttcatcctg

SEQ ID NO: 77620 - DNA, 25 bp, Artificial
  Probe
tgaaatggaaagacacagatgaagc

SEQ ID NO: 77621 - DNA, 25 bp, Artificial
  Probe
ttcccttgtaatataactgatggtc

SEQ ID NO: 77622 - DNA, 25 bp, Artificial
  Probe
gacttcagtttcttggttgttaatt

SEQ ID NO: 77623 - DNA, 25 bp, Artificial
  Probe
cgatgacttcagtttcttggttgtt

SEQ ID NO: 77624 - DNA, 25 bp, Artificial
  Probe
gttcccttgtaatataactgatggt

SEQ ID NO: 77625 - DNA, 25 bp, Artificial
  Probe
tggttcccttgtaatataactgatg

SEQ ID NO: 77626 - DNA, 25 bp, Artificial
  Probe
ccctgcttctaataaatgaattatc

SEQ ID NO: 77627 - DNA, 25 bp, Artificial
  Probe
cccctgcttctaataaatgaattat

SEQ ID NO: 77628 - DNA, 25 bp, Artificial
  Probe
cctgcttctaataaatgaattatct

SEQ ID NO: 77629 - DNA, 25 bp, Artificial
  Probe
aagatcctctaagtggcctgctact

SEQ ID NO: 77630 - DNA, 25 bp, Artificial
  Probe
aaagatcctctaagtggcctgctac

SEQ ID NO: 77631 - DNA, 25 bp, Artificial
  Probe
caaagatcctctaagtggcctgcta

SEQ ID NO: 77632 - DNA, 25 bp, Artificial
  Probe
gagaaggatttgacagaccccatca

SEQ ID NO: 77633 - DNA, 25 bp, Artificial
  Probe
agaaggatttgacagaccccatcac

SEQ ID NO: 77634 - DNA, 25 bp, Artificial
  Probe
ccaaacatgggaagctctgttatcc

SEQ ID NO: 77635 - DNA, 25 bp, Artificial
  Probe
gatcctctaagtggcctgctacttc

SEQ ID NO: 77636 - DNA, 25 bp, Artificial
  Probe
cgagaaggatttgacagaccccatc

SEQ ID NO: 77637 - DNA, 25 bp, Artificial
  Probe
tacgagaaggatttgacagacccca

SEQ ID NO: 77638 - DNA, 25 bp, Artificial
  Probe
atcctctaagtggcctgctacttct

SEQ ID NO: 77639 - DNA, 25 bp, Artificial
  Probe
agatcctctaagtggcctgctactt

SEQ ID NO: 77640 - DNA, 25 bp, Artificial
  Probe
gaaggatttgacagaccccatcacc

SEQ ID NO: 77641 - DNA, 25 bp, Artificial
  Probe
tcctctaagtggcctgctacttctc

SEQ ID NO: 77642 - DNA, 25 bp, Artificial
  Probe
gacgctgatggacttaggtgtataa

SEQ ID NO: 77643 - DNA, 25 bp, Artificial
  Probe
gacattgggatagtaacaagcattg

SEQ ID NO: 77644 - DNA, 25 bp, Artificial
  Probe
cattgggatagtaacaagcattgaa

SEQ ID NO: 77645 - DNA, 25 bp, Artificial
  Probe
acattgggatagtaacaagcattga

SEQ ID NO: 77646 - DNA, 25 bp, Artificial
  Probe
tgacattgggatagtaacaagcatt

SEQ ID NO: 77647 - DNA, 25 bp, Artificial
  Probe
acgctgatggacttaggtgtataaa

SEQ ID NO: 77648 - DNA, 25 bp, Artificial
  Probe
aacaagcattgaaataaaccacaag

SEQ ID NO: 77649 - DNA, 25 bp, Artificial
  Probe
ttgggatagtaacaagcattgaaat

SEQ ID NO: 77650 - DNA, 25 bp, Artificial
  Probe
attgggatagtaacaagcattgaaa

SEQ ID NO: 77651 - DNA, 25 bp, Artificial
  Probe
gtaacaagcattgaaataaaccaca

SEQ ID NO: 77652 - DNA, 25 bp, Artificial
  Probe
caagcattgaaataaaccacaagca

SEQ ID NO: 77653 - DNA, 25 bp, Artificial
  Probe
acaagcattgaaataaaccacaagc

SEQ ID NO: 77654 - DNA, 25 bp, Artificial
  Probe
atgagaaaccaagcaacttacactg

SEQ ID NO: 77655 - DNA, 25 bp, Artificial
  Probe
ggacgctgatggacttaggtgtata

SEQ ID NO: 77656 - DNA, 25 bp, Artificial
  Probe
agtaacaagcattgaaataaaccac

SEQ ID NO: 77657 - DNA, 25 bp, Artificial
  Probe
tgggatagtaacaagcattgaaata

SEQ ID NO: 77658 - DNA, 25 bp, Artificial
  Probe
taacaagcattgaaataaaccacaa

SEQ ID NO: 77659 - DNA, 25 bp, Artificial
  Probe
attgtggagctgaagaaagtatttg

SEQ ID NO: 77660 - DNA, 25 bp, Artificial
  Probe
gtggagctgaagaaagtatttgaaa

SEQ ID NO: 77661 - DNA, 25 bp, Artificial
  Probe
tgtggagctgaagaaagtatttgaa

SEQ ID NO: 77662 - DNA, 25 bp, Artificial
  Probe
ttgtggagctgaagaaagtatttga

SEQ ID NO: 77663 - DNA, 25 bp, Artificial
  Probe
catgagaaaccaagcaacttacact

SEQ ID NO: 77664 - DNA, 25 bp, Artificial
  Probe
ttccatgagaaaccaagcaacttac

SEQ ID NO: 77665 - DNA, 25 bp, Artificial
  Probe
tggagctgaagaaagtatttgaaat

SEQ ID NO: 77666 - DNA, 25 bp, Artificial
  Probe
cttattgtggagctgaagaaagtat

SEQ ID NO: 77667 - DNA, 25 bp, Artificial
  Probe
ggagctgaagaaagtatttgaaatc

SEQ ID NO: 77668 - DNA, 25 bp, Artificial
  Probe
ttattgtggagctgaagaaagtatt

SEQ ID NO: 77669 - DNA, 25 bp, Artificial
  Probe
tattgtggagctgaagaaagtattt

SEQ ID NO: 77670 - DNA, 25 bp, Artificial
  Probe
gggatagtaacaagcattgaaataa

SEQ ID NO: 77671 - DNA, 25 bp, Artificial
  Probe
caaagactggttcagagacgaaatg

SEQ ID NO: 77672 - DNA, 25 bp, Artificial
  Probe
tcaaagactggttcagagacgaaat

SEQ ID NO: 77673 - DNA, 25 bp, Artificial
  Probe
tagtaacaagcattgaaataaacca

SEQ ID NO: 77674 - DNA, 25 bp, Artificial
  Probe
ccatgagaaaccaagcaacttacac

SEQ ID NO: 77675 - DNA, 25 bp, Artificial
  Probe
tccatgagaaaccaagcaacttaca

SEQ ID NO: 77676 - DNA, 25 bp, Artificial
  Probe
gctgaagaaagtatttgaaatcatc

SEQ ID NO: 77677 - DNA, 25 bp, Artificial
  Probe
cgctgatggacttaggtgtataaaa

SEQ ID NO: 77678 - DNA, 25 bp, Artificial
  Probe
caagcaacttacactggtttgacag

SEQ ID NO: 77679 - DNA, 25 bp, Artificial
  Probe
ctcaaagactggttcagagacgaaa

SEQ ID NO: 77680 - DNA, 25 bp, Artificial
  Probe
tttccatgagaaaccaagcaactta

SEQ ID NO: 77681 - DNA, 25 bp, Artificial
  Probe
gagctgaagaaagtatttgaaatca

SEQ ID NO: 77682 - DNA, 25 bp, Artificial
  Probe
gctgatggacttaggtgtataaaat

SEQ ID NO: 77683 - DNA, 25 bp, Artificial
  Probe
gaagagtgactggcagcttattgtg

SEQ ID NO: 77684 - DNA, 25 bp, Artificial
  Probe
atttgaaatcatctaactttcccac

SEQ ID NO: 77685 - DNA, 25 bp, Artificial
  Probe
gacatttggacgctgatggacttag

SEQ ID NO: 77686 - DNA, 25 bp, Artificial
  Probe
agaagagtgactggcagcttattgt

SEQ ID NO: 77687 - DNA, 25 bp, Artificial
  Probe
ctagatgctggtgtctcactcattt

SEQ ID NO: 77688 - DNA, 25 bp, Artificial
  Probe
tcacatcaaagcacgttcctaagat

SEQ ID NO: 77689 - DNA, 25 bp, Artificial
  Probe
aaaataggcttctacataccccagg

SEQ ID NO: 77690 - DNA, 25 bp, Artificial
  Probe
caggtttgagtgttgtcaggatgag

SEQ ID NO: 77691 - DNA, 25 bp, Artificial
  Probe
gaccctaagagtctttgtcacgtag

SEQ ID NO: 77692 - DNA, 25 bp, Artificial
  Probe
ctcacatcaaagcacgttcctaaga

SEQ ID NO: 77693 - DNA, 25 bp, Artificial
  Probe
tctagatgctggtgtctcactcatt

SEQ ID NO: 77694 - DNA, 25 bp, Artificial
  Probe
atcaaagcacgttcctaagatgtcc

SEQ ID NO: 77695 - DNA, 25 bp, Artificial
  Probe
gatgctggtgtctcactcattttaa

SEQ ID NO: 77696 - DNA, 25 bp, Artificial
  Probe
agatgctggtgtctcactcatttta

SEQ ID NO: 77697 - DNA, 25 bp, Artificial
  Probe
tagatgctggtgtctcactcatttt

SEQ ID NO: 77698 - DNA, 25 bp, Artificial
  Probe
gtctagatgctggtgtctcactcat

SEQ ID NO: 77699 - DNA, 25 bp, Artificial
  Probe
atgctggtgtctcactcattttaaa

SEQ ID NO: 77700 - DNA, 25 bp, Artificial
  Probe
cctcacatcaaagcacgttcctaag

SEQ ID NO: 77701 - DNA, 25 bp, Artificial
  Probe
tttctacccttctccctctcccaag

SEQ ID NO: 77702 - DNA, 25 bp, Artificial
  Probe
ccaggtttgagtgttgtcaggatga

SEQ ID NO: 77703 - DNA, 25 bp, Artificial
  Probe
catcaaagcacgttcctaagatgtc

SEQ ID NO: 77704 - DNA, 25 bp, Artificial
  Probe
gtttctacccttctccctctcccaa

SEQ ID NO: 77705 - DNA, 25 bp, Artificial
  Probe
accctaagagtctttgtcacgtagc

SEQ ID NO: 77706 - DNA, 25 bp, Artificial
  Probe
cacatcaaagcacgttcctaagatg

SEQ ID NO: 77707 - DNA, 25 bp, Artificial
  Probe
ctgtctagatgctggtgtctcactc

SEQ ID NO: 77708 - DNA, 25 bp, Artificial
  Probe
aaataggcttctacataccccaggc

SEQ ID NO: 77709 - DNA, 25 bp, Artificial
  Probe
aaagcacgttcctaagatgtcccat

SEQ ID NO: 77710 - DNA, 25 bp, Artificial
  Probe
aggtttgagtgttgtcaggatgagc

SEQ ID NO: 77711 - DNA, 25 bp, Artificial
  Probe
gttcctaagatgtcccatgctgtcc

SEQ ID NO: 77712 - DNA, 25 bp, Artificial
  Probe
tgtctagatgctggtgtctcactca

SEQ ID NO: 77713 - DNA, 25 bp, Artificial
  Probe
agaccctaagagtctttgtcacgta

SEQ ID NO: 77714 - DNA, 25 bp, Artificial
  Probe
tcaaagcacgttcctaagatgtccc

SEQ ID NO: 77715 - DNA, 25 bp, Artificial
  Probe
tgtctcactcattttaaaacccaaa

SEQ ID NO: 77716 - DNA, 25 bp, Artificial
  Probe
gtctcactcattttaaaacccaaac

SEQ ID NO: 77717 - DNA, 25 bp, Artificial
  Probe
tcactcattttaaaacccaaactct

SEQ ID NO: 77718 - DNA, 25 bp, Artificial
  Probe
tctcactcattttaaaacccaaact

SEQ ID NO: 77719 - DNA, 25 bp, Artificial
  Probe
ctcactcattttaaaacccaaactc

SEQ ID NO: 77720 - DNA, 25 bp, Artificial
  Probe
ccctaagagtctttgtcacgtagcg

SEQ ID NO: 77721 - DNA, 25 bp, Artificial
  Probe
aagcacgttcctaagatgtcccatg

SEQ ID NO: 77722 - DNA, 25 bp, Artificial
  Probe
caaagcacgttcctaagatgtccca

SEQ ID NO: 77723 - DNA, 25 bp, Artificial
  Probe
ccctcacatcaaagcacgttcctaa

SEQ ID NO: 77724 - DNA, 25 bp, Artificial
  Probe
cactcattttaaaacccaaactctt

SEQ ID NO: 77725 - DNA, 25 bp, Artificial
  Probe
ttctgtcattgggcacgagatgaaa

SEQ ID NO: 77726 - DNA, 25 bp, Artificial
  Probe
tttctgtcattgggcacgagatgaa

SEQ ID NO: 77727 - DNA, 25 bp, Artificial
  Probe
gtgtctcactcattttaaaacccaa

SEQ ID NO: 77728 - DNA, 25 bp, Artificial
  Probe
tgtcattgggcacgagatgaaaatt

SEQ ID NO: 77729 - DNA, 25 bp, Artificial
  Probe
gctggtgtctcactcattttaaaac

SEQ ID NO: 77730 - DNA, 25 bp, Artificial
  Probe
tgctggtgtctcactcattttaaaa

SEQ ID NO: 77731 - DNA, 25 bp, Artificial
  Probe
ctggtgtctcactcattttaaaacc

SEQ ID NO: 77732 - DNA, 25 bp, Artificial
  Probe
tcaagtcttaatagtctgacacagt

SEQ ID NO: 77733 - DNA, 25 bp, Artificial
  Probe
caagtcttaatagtctgacacagtc

SEQ ID NO: 77734 - DNA, 25 bp, Artificial
  Probe
tctcaagtcttaatagtctgacaca

SEQ ID NO: 77735 - DNA, 25 bp, Artificial
  Probe
ctcaagtcttaatagtctgacacag

SEQ ID NO: 77736 - DNA, 25 bp, Artificial
  Probe
ccttctcaagtcttaatagtctgac

SEQ ID NO: 77737 - DNA, 25 bp, Artificial
  Probe
ttctcaagtcttaatagtctgacac

SEQ ID NO: 77738 - DNA, 25 bp, Artificial
  Probe
tgtatctggtttgtatggtttcttg

SEQ ID NO: 77739 - DNA, 25 bp, Artificial
  Probe
gtgtatctggtttgtatggtttctt

SEQ ID NO: 77740 - DNA, 25 bp, Artificial
  Probe
gtatctggtttgtatggtttcttga

SEQ ID NO: 77741 - DNA, 25 bp, Artificial
  Probe
cgtgtatctggtttgtatggtttct

SEQ ID NO: 77742 - DNA, 25 bp, Artificial
  Probe
cttctcaagtcttaatagtctgaca

SEQ ID NO: 77743 - DNA, 25 bp, Artificial
  Probe
acccttctcaagtcttaatagtctg

SEQ ID NO: 77744 - DNA, 25 bp, Artificial
  Probe
tggtttgtatggtttcttgaaagtc

SEQ ID NO: 77745 - DNA, 25 bp, Artificial
  Probe
ctggtttgtatggtttcttgaaagt

SEQ ID NO: 77746 - DNA, 25 bp, Artificial
  Probe
ggtttgtatggtttcttgaaagtct

SEQ ID NO: 77747 - DNA, 25 bp, Artificial
  Probe
tctggtttgtatggtttcttgaaag

SEQ ID NO: 77748 - DNA, 25 bp, Artificial
  Probe
aacccttctcaagtcttaatagtct

SEQ ID NO: 77749 - DNA, 25 bp, Artificial
  Probe
atctggtttgtatggtttcttgaaa

SEQ ID NO: 77750 - DNA, 25 bp, Artificial
  Probe
cccttctcaagtcttaatagtctga

SEQ ID NO: 77751 - DNA, 25 bp, Artificial
  Probe
tatctggtttgtatggtttcttgaa

SEQ ID NO: 77752 - DNA, 25 bp, Artificial
  Probe
ccgtgtatctggtttgtatggtttc

SEQ ID NO: 77753 - DNA, 25 bp, Artificial
  Probe
ttgtatggtttcttgaaagtcttct

SEQ ID NO: 77754 - DNA, 25 bp, Artificial
  Probe
atggtttcttgaaagtcttctaaca

SEQ ID NO: 77755 - DNA, 25 bp, Artificial
  Probe
tggtttcttgaaagtcttctaacaa

SEQ ID NO: 77756 - DNA, 25 bp, Artificial
  Probe
gtttgtatggtttcttgaaagtctt

SEQ ID NO: 77757 - DNA, 25 bp, Artificial
  Probe
tttgtatggtttcttgaaagtcttc

SEQ ID NO: 77758 - DNA, 25 bp, Artificial
  Probe
taacccttctcaagtcttaatagtc

SEQ ID NO: 77759 - DNA, 25 bp, Artificial
  Probe
tgtatggtttcttgaaagtcttcta

SEQ ID NO: 77760 - DNA, 25 bp, Artificial
  Probe
tttcccaatggcaactatcattagt

SEQ ID NO: 77761 - DNA, 25 bp, Artificial
  Probe
catttcccaatggcaactatcatta

SEQ ID NO: 77762 - DNA, 25 bp, Artificial
  Probe
atttcccaatggcaactatcattag

SEQ ID NO: 77763 - DNA, 25 bp, Artificial
  Probe
tcatttcccaatggcaactatcatt

SEQ ID NO: 77764 - DNA, 25 bp, Artificial
  Probe
ataacccttctcaagtcttaatagt

SEQ ID NO: 77765 - DNA, 25 bp, Artificial
  Probe
cccttgattttatttgccttgtgta

SEQ ID NO: 77766 - DNA, 25 bp, Artificial
  Probe
ttaccccttgattttatttgccttg

SEQ ID NO: 77767 - DNA, 25 bp, Artificial
  Probe
gtttaccccttgattttatttgcct

SEQ ID NO: 77768 - DNA, 25 bp, Artificial
  Probe
agtttaccccttgattttatttgcc

SEQ ID NO: 77769 - DNA, 25 bp, Artificial
  Probe
tttaccccttgattttatttgcctt

SEQ ID NO: 77770 - DNA, 25 bp, Artificial
  Probe
gtcatttcccaatggcaactatcat

SEQ ID NO: 77771 - DNA, 25 bp, Artificial
  Probe
atgtcatttcccaatggcaactatc

SEQ ID NO: 77772 - DNA, 25 bp, Artificial
  Probe
gatgtcatttcccaatggcaactat

SEQ ID NO: 77773 - DNA, 25 bp, Artificial
  Probe
gtatggtttcttgaaagtcttctaa

SEQ ID NO: 77774 - DNA, 25 bp, Artificial
  Probe
taccccttgattttatttgccttgt

SEQ ID NO: 77775 - DNA, 25 bp, Artificial
  Probe
tatggtttcttgaaagtcttctaac

SEQ ID NO: 77776 - DNA, 25 bp, Artificial
  Probe
tccttctcatcccgtatgtgttcat

SEQ ID NO: 77777 - DNA, 25 bp, Artificial
  Probe
gagtgtgaataaccatcttctgctt

SEQ ID NO: 77778 - DNA, 25 bp, Artificial
  Probe
agtgtgaataaccatcttctgcttg

SEQ ID NO: 77779 - DNA, 25 bp, Artificial
  Probe
agagtgtgaataaccatcttctgct

SEQ ID NO: 77780 - DNA, 25 bp, Artificial
  Probe
tacatattcgtgccaaccttctgaa

SEQ ID NO: 77781 - DNA, 25 bp, Artificial
  Probe
atataactccacaatgtcttctgtt

SEQ ID NO: 77782 - DNA, 25 bp, Artificial
  Probe
aatgtcttctgtttagtgtatggga

SEQ ID NO: 77783 - DNA, 25 bp, Artificial
  Probe
caatgtcttctgtttagtgtatggg

SEQ ID NO: 77784 - DNA, 25 bp, Artificial
  Probe
atttctctctttgccttaaacctct

SEQ ID NO: 77785 - DNA, 25 bp, Artificial
  Probe
gatttctctctttgccttaaacctc

SEQ ID NO: 77786 - DNA, 25 bp, Artificial
  Probe
ttctctctttgccttaaacctcttt

SEQ ID NO: 77787 - DNA, 25 bp, Artificial
  Probe
tttctctctttgccttaaacctctt

SEQ ID NO: 77788 - DNA, 25 bp, Artificial
  Probe
gtggatttctctctttgccttaaac

SEQ ID NO: 77789 - DNA, 25 bp, Artificial
  Probe
tgtcttctgtttagtgtatgggaaa

SEQ ID NO: 77790 - DNA, 25 bp, Artificial
  Probe
atgtcttctgtttagtgtatgggaa

SEQ ID NO: 77791 - DNA, 25 bp, Artificial
  Probe
ggatttctctctttgccttaaacct

SEQ ID NO: 77792 - DNA, 25 bp, Artificial
  Probe
ccctacttacaactgtggttatcaa

SEQ ID NO: 77793 - DNA, 25 bp, Artificial
  Probe
ttccctacttacaactgtggttatc

SEQ ID NO: 77794 - DNA, 25 bp, Artificial
  Probe
gttccctacttacaactgtggttat

SEQ ID NO: 77795 - DNA, 25 bp, Artificial
  Probe
tggatttctctctttgccttaaacc

SEQ ID NO: 77796 - DNA, 25 bp, Artificial
  Probe
ggtggatttctctctttgccttaaa

SEQ ID NO: 77797 - DNA, 25 bp, Artificial
  Probe
tctctctttgccttaaacctcttta

SEQ ID NO: 77798 - DNA, 25 bp, Artificial
  Probe
tgccttaaacctctttatttcactg

SEQ ID NO: 77799 - DNA, 25 bp, Artificial
  Probe
gccttaaacctctttatttcactgc

SEQ ID NO: 77800 - DNA, 25 bp, Artificial
  Probe
tccctacttacaactgtggttatca

SEQ ID NO: 77801 - DNA, 25 bp, Artificial
  Probe
gtacatattcgtgccaaccttctga

SEQ ID NO: 77802 - DNA, 25 bp, Artificial
  Probe
ttgccttaaacctctttatttcact

SEQ ID NO: 77803 - DNA, 25 bp, Artificial
  Probe
ctctctttgccttaaacctctttat

SEQ ID NO: 77804 - DNA, 25 bp, Artificial
  Probe
aagagtgtgaataaccatcttctgc

SEQ ID NO: 77805 - DNA, 25 bp, Artificial
  Probe
cctacttacaactgtggttatcaaa

SEQ ID NO: 77806 - DNA, 25 bp, Artificial
  Probe
atgaatgttccctacttacaactgt

SEQ ID NO: 77807 - DNA, 25 bp, Artificial
  Probe
gtgtgaataaccatcttctgcttgg

SEQ ID NO: 77808 - DNA, 25 bp, Artificial
  Probe
aactccacaatgtcttctgtttagt

SEQ ID NO: 77809 - DNA, 25 bp, Artificial
  Probe
gatgaatgttccctacttacaactg

SEQ ID NO: 77810 - DNA, 25 bp, Artificial
  Probe
tgaatgttccctacttacaactgtg

SEQ ID NO: 77811 - DNA, 25 bp, Artificial
  Probe
acaatgtcttctgtttagtgtatgg

SEQ ID NO: 77812 - DNA, 25 bp, Artificial
  Probe
tctctttgccttaaacctctttatt

SEQ ID NO: 77813 - DNA, 25 bp, Artificial
  Probe
tggtggatttctctctttgccttaa

SEQ ID NO: 77814 - DNA, 25 bp, Artificial
  Probe
tttgccttaaacctctttatttcac

SEQ ID NO: 77815 - DNA, 25 bp, Artificial
  Probe
taagagtgtgaataaccatcttctg

SEQ ID NO: 77816 - DNA, 25 bp, Artificial
  Probe
tccacaatgtcttctgtttagtgta

SEQ ID NO: 77817 - DNA, 25 bp, Artificial
  Probe
tatataactccacaatgtcttctgt

SEQ ID NO: 77818 - DNA, 25 bp, Artificial
  Probe
tgttccctacttacaactgtggtta

SEQ ID NO: 77819 - DNA, 25 bp, Artificial
  Probe
gaatgttccctacttacaactgtgg

SEQ ID NO: 77820 - DNA, 25 bp, Artificial
  Probe
taactccacaatgtcttctgtttag

SEQ ID NO: 77821 - DNA, 25 bp, Artificial
  Probe
ctttgccttaaacctctttatttca

SEQ ID NO: 77822 - DNA, 25 bp, Artificial
  Probe
aactctccatgactaactgtgtaag

SEQ ID NO: 77823 - DNA, 25 bp, Artificial
  Probe
gcctattaactctccatgactaact

SEQ ID NO: 77824 - DNA, 25 bp, Artificial
  Probe
attaactctccatgactaactgtgt

SEQ ID NO: 77825 - DNA, 25 bp, Artificial
  Probe
taactctccatgactaactgtgtaa

SEQ ID NO: 77826 - DNA, 25 bp, Artificial
  Probe
ttaactctccatgactaactgtgta

SEQ ID NO: 77827 - DNA, 25 bp, Artificial
  Probe
ccatgactaactgtgtaagtgctta

SEQ ID NO: 77828 - DNA, 25 bp, Artificial
  Probe
ctctccatgactaactgtgtaagtg

SEQ ID NO: 77829 - DNA, 25 bp, Artificial
  Probe
ctgtgtaagtgcttataacggaata

SEQ ID NO: 77830 - DNA, 25 bp, Artificial
  Probe
taactgtgtaagtgcttataacgga

SEQ ID NO: 77831 - DNA, 25 bp, Artificial
  Probe
actgtgtaagtgcttataacggaat

SEQ ID NO: 77832 - DNA, 25 bp, Artificial
  Probe
actctccatgactaactgtgtaagt

SEQ ID NO: 77833 - DNA, 25 bp, Artificial
  Probe
aactgtgtaagtgcttataacggaa

SEQ ID NO: 77834 - DNA, 25 bp, Artificial
  Probe
ctaactgtgtaagtgcttataacgg

SEQ ID NO: 77835 - DNA, 25 bp, Artificial
  Probe
catgactaactgtgtaagtgcttat

SEQ ID NO: 77836 - DNA, 25 bp, Artificial
  Probe
cctattaactctccatgactaactg

SEQ ID NO: 77837 - DNA, 25 bp, Artificial
  Probe
actaactgtgtaagtgcttataacg

SEQ ID NO: 77838 - DNA, 25 bp, Artificial
  Probe
tattaactctccatgactaactgtg

SEQ ID NO: 77839 - DNA, 25 bp, Artificial
  Probe
tgtgtaagtgcttataacggaataa

SEQ ID NO: 77840 - DNA, 25 bp, Artificial
  Probe
tccatgactaactgtgtaagtgctt

SEQ ID NO: 77841 - DNA, 25 bp, Artificial
  Probe
atgactaactgtgtaagtgcttata

SEQ ID NO: 77842 - DNA, 25 bp, Artificial
  Probe
gaagcctgagatggatttaacattg

SEQ ID NO: 77843 - DNA, 25 bp, Artificial
  Probe
tgaagcctgagatggatttaacatt

SEQ ID NO: 77844 - DNA, 25 bp, Artificial
  Probe
ctattaactctccatgactaactgt

SEQ ID NO: 77845 - DNA, 25 bp, Artificial
  Probe
tgagatggatttaacattggtttgg

SEQ ID NO: 77846 - DNA, 25 bp, Artificial
  Probe
gagatggatttaacattggtttggg

SEQ ID NO: 77847 - DNA, 25 bp, Artificial
  Probe
cctgagatggatttaacattggttt

SEQ ID NO: 77848 - DNA, 25 bp, Artificial
  Probe
ctgaagcctgagatggatttaacat

SEQ ID NO: 77849 - DNA, 25 bp, Artificial
  Probe
ttgagaaagagtggattgctagttt

SEQ ID NO: 77850 - DNA, 25 bp, Artificial
  Probe
gatggatttaacattggtttgggac

SEQ ID NO: 77851 - DNA, 25 bp, Artificial
  Probe
agatggatttaacattggtttggga

SEQ ID NO: 77852 - DNA, 25 bp, Artificial
  Probe
gatttaacattggtttgggacacag

SEQ ID NO: 77853 - DNA, 25 bp, Artificial
  Probe
atgttgagaaagagtggattgctag

SEQ ID NO: 77854 - DNA, 25 bp, Artificial
  Probe
atttaacattggtttgggacacaga

SEQ ID NO: 77855 - DNA, 25 bp, Artificial
  Probe
gttgagaaagagtggattgctagtt

SEQ ID NO: 77856 - DNA, 25 bp, Artificial
  Probe
atggatttaacattggtttgggaca

SEQ ID NO: 77857 - DNA, 25 bp, Artificial
  Probe
ctccatgactaactgtgtaagtgct

SEQ ID NO: 77858 - DNA, 25 bp, Artificial
  Probe
tctccatgactaactgtgtaagtgc

SEQ ID NO: 77859 - DNA, 25 bp, Artificial
  Probe
tgagaaagagtggattgctagtttg

SEQ ID NO: 77860 - DNA, 25 bp, Artificial
  Probe
aagcctgagatggatttaacattgg

SEQ ID NO: 77861 - DNA, 25 bp, Artificial
  Probe
ctgagatggatttaacattggtttg

SEQ ID NO: 77862 - DNA, 25 bp, Artificial
  Probe
tgactaactgtgtaagtgcttataa

SEQ ID NO: 77863 - DNA, 25 bp, Artificial
  Probe
gcctgagatggatttaacattggtt

SEQ ID NO: 77864 - DNA, 25 bp, Artificial
  Probe
gactaactgtgtaagtgcttataac

SEQ ID NO: 77865 - DNA, 25 bp, Artificial
  Probe
tctgaagcctgagatggatttaaca

SEQ ID NO: 77866 - DNA, 25 bp, Artificial
  Probe
ctctgaagcctgagatggatttaac

SEQ ID NO: 77867 - DNA, 25 bp, Artificial
  Probe
tatatcgcctctgatgtctggtctt

SEQ ID NO: 77868 - DNA, 25 bp, Artificial
  Probe
ttatatcgcctctgatgtctggtct

SEQ ID NO: 77869 - DNA, 25 bp, Artificial
  Probe
aattccaaccatctaatcggacaac

SEQ ID NO: 77870 - DNA, 25 bp, Artificial
  Probe
tgtatatgtcacatggtcactcagt

SEQ ID NO: 77871 - DNA, 25 bp, Artificial
  Probe
gtgaatactctgaaagaaggaaagc

SEQ ID NO: 77872 - DNA, 25 bp, Artificial
  Probe
gtatatgtcacatggtcactcagtg

SEQ ID NO: 77873 - DNA, 25 bp, Artificial
  Probe
atctaatcggacaacctttcagaac

SEQ ID NO: 77874 - DNA, 25 bp, Artificial
  Probe
catctaatcggacaacctttcagaa

SEQ ID NO: 77875 - DNA, 25 bp, Artificial
  Probe
gcttgtgaatactctgaaagaagga

SEQ ID NO: 77876 - DNA, 25 bp, Artificial
  Probe
tatatgtcacatggtcactcagtgt

SEQ ID NO: 77877 - DNA, 25 bp, Artificial
  Probe
taacacggcttgtgaatactctgaa

SEQ ID NO: 77878 - DNA, 25 bp, Artificial
  Probe
tgaatactctgaaagaaggaaagcg

SEQ ID NO: 77879 - DNA, 25 bp, Artificial
  Probe
tgtgaatactctgaaagaaggaaag

SEQ ID NO: 77880 - DNA, 25 bp, Artificial
  Probe
cttgtgaatactctgaaagaaggaa

SEQ ID NO: 77881 - DNA, 25 bp, Artificial
  Probe
ggacaacctttcagaaccttattga

SEQ ID NO: 77882 - DNA, 25 bp, Artificial
  Probe
atgacagtaacacggcttgtgaata

SEQ ID NO: 77883 - DNA, 25 bp, Artificial
  Probe
caaccatctaatcggacaacctttc

SEQ ID NO: 77884 - DNA, 25 bp, Artificial
  Probe
cttattgaaggatttgaagcacttt

SEQ ID NO: 77885 - DNA, 25 bp, Artificial
  Probe
atcggacaacctttcagaaccttat

SEQ ID NO: 77886 - DNA, 25 bp, Artificial
  Probe
ggcttgtgaatactctgaaagaagg

SEQ ID NO: 77887 - DNA, 25 bp, Artificial
  Probe
actcagtgtgtgaaactttctcttt

SEQ ID NO: 77888 - DNA, 25 bp, Artificial
  Probe
ttgtgaatactctgaaagaaggaaa

SEQ ID NO: 77889 - DNA, 25 bp, Artificial
  Probe
ctcagtgtgtgaaactttctcttta

SEQ ID NO: 77890 - DNA, 25 bp, Artificial
  Probe
tttatatcgcctctgatgtctggtc

SEQ ID NO: 77891 - DNA, 25 bp, Artificial
  Probe
tcggacaacctttcagaaccttatt

SEQ ID NO: 77892 - DNA, 25 bp, Artificial
  Probe
aatcggacaacctttcagaacctta

SEQ ID NO: 77893 - DNA, 25 bp, Artificial
  Probe
taatcggacaacctttcagaacctt

SEQ ID NO: 77894 - DNA, 25 bp, Artificial
  Probe
aaccatctaatcggacaacctttca

SEQ ID NO: 77895 - DNA, 25 bp, Artificial
  Probe
cggcttgtgaatactctgaaagaag

SEQ ID NO: 77896 - DNA, 25 bp, Artificial
  Probe
tcagtgtgtgaaactttctctttaa

SEQ ID NO: 77897 - DNA, 25 bp, Artificial
  Probe
gtaacacggcttgtgaatactctga

SEQ ID NO: 77898 - DNA, 25 bp, Artificial
  Probe
atttagtgatgaataacgaccacca

SEQ ID NO: 77899 - DNA, 25 bp, Artificial
  Probe
aatttagtgatgaataacgaccacc

SEQ ID NO: 77900 - DNA, 25 bp, Artificial
  Probe
atgtatatgtcacatggtcactcag

SEQ ID NO: 77901 - DNA, 25 bp, Artificial
  Probe
attccaaccatctaatcggacaacc

SEQ ID NO: 77902 - DNA, 25 bp, Artificial
  Probe
cggagtgtttaatccagtgtaaatt

SEQ ID NO: 77903 - DNA, 25 bp, Artificial
  Probe
cggacaacctttcagaaccttattg

SEQ ID NO: 77904 - DNA, 25 bp, Artificial
  Probe
accatctaatcggacaacctttcag

SEQ ID NO: 77905 - DNA, 25 bp, Artificial
  Probe
ttgagaccgataaggagtactacac

SEQ ID NO: 77906 - DNA, 25 bp, Artificial
  Probe
ctaatcggacaacctttcagaacct

SEQ ID NO: 77907 - DNA, 25 bp, Artificial
  Probe
ccatctaatcggacaacctttcaga

SEQ ID NO: 77908 - DNA, 25 bp, Artificial
  Probe
agtaacacggcttgtgaatactctg

SEQ ID NO: 77909 - DNA, 25 bp, Artificial
  Probe
cagtaacacggcttgtgaatactct

SEQ ID NO: 77910 - DNA, 25 bp, Artificial
  Probe
acggcttgtgaatactctgaaagaa

SEQ ID NO: 77911 - DNA, 25 bp, Artificial
  Probe
gagaccgataaggagtactacacag

SEQ ID NO: 77912 - DNA, 25 bp, Artificial
  Probe
cgtatgtccttagagacttacttcc

SEQ ID NO: 77913 - DNA, 25 bp, Artificial
  Probe
gtatgtccttagagacttacttcca

SEQ ID NO: 77914 - DNA, 25 bp, Artificial
  Probe
tatgtccttagagacttacttccaa

SEQ ID NO: 77915 - DNA, 25 bp, Artificial
  Probe
agagacttacttccaaagacaaact

SEQ ID NO: 77916 - DNA, 25 bp, Artificial
  Probe
ccttagagacttacttccaaagaca

SEQ ID NO: 77917 - DNA, 25 bp, Artificial
  Probe
tccttagagacttacttccaaagac

SEQ ID NO: 77918 - DNA, 25 bp, Artificial
  Probe
acttacttccaaagacaaactactg

SEQ ID NO: 77919 - DNA, 25 bp, Artificial
  Probe
caaatgaataatgtcactgggaact

SEQ ID NO: 77920 - DNA, 25 bp, Artificial
  Probe
gacttacttccaaagacaaactact

SEQ ID NO: 77921 - DNA, 25 bp, Artificial
  Probe
agacttacttccaaagacaaactac

SEQ ID NO: 77922 - DNA, 25 bp, Artificial
  Probe
aatgaataatgtcactgggaacttc

SEQ ID NO: 77923 - DNA, 25 bp, Artificial
  Probe
gagacttacttccaaagacaaacta

SEQ ID NO: 77924 - DNA, 25 bp, Artificial
  Probe
tagagacttacttccaaagacaaac

SEQ ID NO: 77925 - DNA, 25 bp, Artificial
  Probe
tcacgtatgtccttagagacttact

SEQ ID NO: 77926 - DNA, 25 bp, Artificial
  Probe
cacgtatgtccttagagacttactt

SEQ ID NO: 77927 - DNA, 25 bp, Artificial
  Probe
ttcacgtatgtccttagagacttac

SEQ ID NO: 77928 - DNA, 25 bp, Artificial
  Probe
tacttccaaagacaaactactgtgt

SEQ ID NO: 77929 - DNA, 25 bp, Artificial
  Probe
acgtatgtccttagagacttacttc

SEQ ID NO: 77930 - DNA, 25 bp, Artificial
  Probe
cttcacgtatgtccttagagactta

SEQ ID NO: 77931 - DNA, 25 bp, Artificial
  Probe
aaatgaataatgtcactgggaactt

SEQ ID NO: 77932 - DNA, 25 bp, Artificial
  Probe
gaacttcacgtatgtccttagagac

SEQ ID NO: 77933 - DNA, 25 bp, Artificial
  Probe
ttacttccaaagacaaactactgtg

SEQ ID NO: 77934 - DNA, 25 bp, Artificial
  Probe
cttagagacttacttccaaagacaa

SEQ ID NO: 77935 - DNA, 25 bp, Artificial
  Probe
acttcacgtatgtccttagagactt

SEQ ID NO: 77936 - DNA, 25 bp, Artificial
  Probe
aacttcacgtatgtccttagagact

SEQ ID NO: 77937 - DNA, 25 bp, Artificial
  Probe
tgtccttagagacttacttccaaag

SEQ ID NO: 77938 - DNA, 25 bp, Artificial
  Probe
gaataatgtcactgggaacttcacg

SEQ ID NO: 77939 - DNA, 25 bp, Artificial
  Probe
gtccttagagacttacttccaaaga

SEQ ID NO: 77940 - DNA, 25 bp, Artificial
  Probe
cttacttccaaagacaaactactgt

SEQ ID NO: 77941 - DNA, 25 bp, Artificial
  Probe
atgtccttagagacttacttccaaa

SEQ ID NO: 77942 - DNA, 25 bp, Artificial
  Probe
cttccaaagacaaactactgtgtgt

SEQ ID NO: 77943 - DNA, 25 bp, Artificial
  Probe
acttccaaagacaaactactgtgtg

SEQ ID NO: 77944 - DNA, 25 bp, Artificial
  Probe
caggaatcaggtatggttaggcttt

SEQ ID NO: 77945 - DNA, 25 bp, Artificial
  Probe
ttagagacttacttccaaagacaaa

SEQ ID NO: 77946 - DNA, 25 bp, Artificial
  Probe
ccaaatgaataatgtcactgggaac

SEQ ID NO: 77947 - DNA, 25 bp, Artificial
  Probe
ggaacttcacgtatgtccttagaga

SEQ ID NO: 77948 - DNA, 25 bp, Artificial
  Probe
ttcttccaataaatgcacatcactg

SEQ ID NO: 77949 - DNA, 25 bp, Artificial
  Probe
cttcttccaataaatgcacatcact

SEQ ID NO: 77950 - DNA, 25 bp, Artificial
  Probe
acttcttccaataaatgcacatcac

SEQ ID NO: 77951 - DNA, 25 bp, Artificial
  Probe
acataaatgtgatgatggagtttcc

SEQ ID NO: 77952 - DNA, 25 bp, Artificial
  Probe
cttccaataaatgcacatcactgag

SEQ ID NO: 77953 - DNA, 25 bp, Artificial
  Probe
tcttccaataaatgcacatcactga

SEQ ID NO: 77954 - DNA, 25 bp, Artificial
  Probe
actggagtctacatccttcgtcatc

SEQ ID NO: 77955 - DNA, 25 bp, Artificial
  Probe
tacttcttccaataaatgcacatca

SEQ ID NO: 77956 - DNA, 25 bp, Artificial
  Probe
gtacttcttccaataaatgcacatc

SEQ ID NO: 77957 - DNA, 25 bp, Artificial
  Probe
ttaactagccattgttcaacgacag

SEQ ID NO: 77958 - DNA, 25 bp, Artificial
  Probe
tgtttgtgttgatttgtttctggtg

SEQ ID NO: 77959 - DNA, 25 bp, Artificial
  Probe
gtgtttgtgttgatttgtttctggt

SEQ ID NO: 77960 - DNA, 25 bp, Artificial
  Probe
ttgtgttgatttgtttctggtggta

SEQ ID NO: 77961 - DNA, 25 bp, Artificial
  Probe
cctattcatttcctttggcagaact

SEQ ID NO: 77962 - DNA, 25 bp, Artificial
  Probe
tgtgttgatttgtttctggtggtag

SEQ ID NO: 77963 - DNA, 25 bp, Artificial
  Probe
ctttacccacagcctattcatttcc

SEQ ID NO: 77964 - DNA, 25 bp, Artificial
  Probe
gttgatttgtttctggtggtagagt

SEQ ID NO: 77965 - DNA, 25 bp, Artificial
  Probe
tgttgatttgtttctggtggtagag

SEQ ID NO: 77966 - DNA, 25 bp, Artificial
  Probe
gtttgtgttgatttgtttctggtgg

SEQ ID NO: 77967 - DNA, 25 bp, Artificial
  Probe
gtgttgatttgtttctggtggtaga

SEQ ID NO: 77968 - DNA, 25 bp, Artificial
  Probe
tttgtgttgatttgtttctggtggt

SEQ ID NO: 77969 - DNA, 25 bp, Artificial
  Probe
tgttacccactactgagattgttcc

SEQ ID NO: 77970 - DNA, 25 bp, Artificial
  Probe
tacccacagcctattcatttccttt

SEQ ID NO: 77971 - DNA, 25 bp, Artificial
  Probe
ttacccacagcctattcatttcctt

SEQ ID NO: 77972 - DNA, 25 bp, Artificial
  Probe
tttacccacagcctattcatttcct

SEQ ID NO: 77973 - DNA, 25 bp, Artificial
  Probe
cgtgtttgtgttgatttgtttctgg

SEQ ID NO: 77974 - DNA, 25 bp, Artificial
  Probe
aatgtgttacccactactgagattg

SEQ ID NO: 77975 - DNA, 25 bp, Artificial
  Probe
caatgtgttacccactactgagatt

SEQ ID NO: 77976 - DNA, 25 bp, Artificial
  Probe
gtgttacccactactgagattgttc

SEQ ID NO: 77977 - DNA, 25 bp, Artificial
  Probe
gtttgctgctgagggttgtaaatac

SEQ ID NO: 77978 - DNA, 25 bp, Artificial
  Probe
agtttgctgctgagggttgtaaata

SEQ ID NO: 77979 - DNA, 25 bp, Artificial
  Probe
atgtgttacccactactgagattgt

SEQ ID NO: 77980 - DNA, 25 bp, Artificial
  Probe
acaatgtgttacccactactgagat

SEQ ID NO: 77981 - DNA, 25 bp, Artificial
  Probe
aatagttcattccttaattctccct

SEQ ID NO: 77982 - DNA, 25 bp, Artificial
  Probe
tgtgttacccactactgagattgtt

SEQ ID NO: 77983 - DNA, 25 bp, Artificial
  Probe
gttacccactactgagattgttccg

SEQ ID NO: 77984 - DNA, 25 bp, Artificial
  Probe
taagtttgctgctgagggttgtaaa

SEQ ID NO: 77985 - DNA, 25 bp, Artificial
  Probe
ttaagtttgctgctgagggttgtaa

SEQ ID NO: 77986 - DNA, 25 bp, Artificial
  Probe
taactagccattgttcaacgacagc

SEQ ID NO: 77987 - DNA, 25 bp, Artificial
  Probe
atttaacacgttctcttctctgctc

SEQ ID NO: 77988 - DNA, 25 bp, Artificial
  Probe
tacatttaacacgttctcttctctg

SEQ ID NO: 77989 - DNA, 25 bp, Artificial
  Probe
gacgtgtttgtgttgatttgtttct

SEQ ID NO: 77990 - DNA, 25 bp, Artificial
  Probe
catttaacacgttctcttctctgct

SEQ ID NO: 77991 - DNA, 25 bp, Artificial
  Probe
acgtgtttgtgttgatttgtttctg

SEQ ID NO: 77992 - DNA, 25 bp, Artificial
  Probe
tgacgtgtttgtgttgatttgtttc

SEQ ID NO: 77993 - DNA, 25 bp, Artificial
  Probe
ctgacgtgtttgtgttgatttgttt

SEQ ID NO: 77994 - DNA, 25 bp, Artificial
  Probe
gttaactagccattgttcaacgaca

SEQ ID NO: 77995 - DNA, 25 bp, Artificial
  Probe
ctccctttgacctctgactccttaa

SEQ ID NO: 77996 - DNA, 25 bp, Artificial
  Probe
acatttaacacgttctcttctctgc

SEQ ID NO: 77997 - DNA, 25 bp, Artificial
  Probe
acccacagcctattcatttcctttg

SEQ ID NO: 77998 - DNA, 25 bp, Artificial
  Probe
ttacatttaacacgttctcttctct

SEQ ID NO: 77999 - DNA, 25 bp, Artificial
  Probe
aaatagttcattccttaattctccc

SEQ ID NO: 78000 - DNA, 25 bp, Artificial
  Probe
aagtttgctgctgagggttgtaaat

SEQ ID NO: 78001 - DNA, 25 bp, Artificial
  Probe
ctttgacctctgactccttaagttt

SEQ ID NO: 78002 - DNA, 25 bp, Artificial
  Probe
tgtggatatggctgtgtaattgatt

SEQ ID NO: 78003 - DNA, 25 bp, Artificial
  Probe
ttgtggatatggctgtgtaattgat

SEQ ID NO: 78004 - DNA, 25 bp, Artificial
  Probe
attgtggatatggctgtgtaattga

SEQ ID NO: 78005 - DNA, 25 bp, Artificial
  Probe
gctattgtggatatggctgtgtaat

SEQ ID NO: 78006 - DNA, 25 bp, Artificial
  Probe
tattgtggatatggctgtgtaattg

SEQ ID NO: 78007 - DNA, 25 bp, Artificial
  Probe
ctattgtggatatggctgtgtaatt

SEQ ID NO: 78008 - DNA, 25 bp, Artificial
  Probe
gtatgtgaatgacttggagttgaac

SEQ ID NO: 78009 - DNA, 25 bp, Artificial
  Probe
agtatgtgaatgacttggagttgaa

SEQ ID NO: 78010 - DNA, 25 bp, Artificial
  Probe
atgagtatgtgaatgacttggagtt

SEQ ID NO: 78011 - DNA, 25 bp, Artificial
  Probe
aatgagtatgtgaatgacttggagt

SEQ ID NO: 78012 - DNA, 25 bp, Artificial
  Probe
tcaatgagtatgtgaatgacttgga

SEQ ID NO: 78013 - DNA, 25 bp, Artificial
  Probe
caatgagtatgtgaatgacttggag

SEQ ID NO: 78014 - DNA, 25 bp, Artificial
  Probe
gtgcttctctgctattgtggatatg

SEQ ID NO: 78015 - DNA, 25 bp, Artificial
  Probe
gagtatgtgaatgacttggagttga

SEQ ID NO: 78016 - DNA, 25 bp, Artificial
  Probe
tgagtatgtgaatgacttggagttg

SEQ ID NO: 78017 - DNA, 25 bp, Artificial
  Probe
gtaccttgctccttacattcagatt

SEQ ID NO: 78018 - DNA, 25 bp, Artificial
  Probe
tgtgcttctctgctattgtggatat

SEQ ID NO: 78019 - DNA, 25 bp, Artificial
  Probe
ttgtgcttctctgctattgtggata

SEQ ID NO: 78020 - DNA, 25 bp, Artificial
  Probe
agtaccttgctccttacattcagat

SEQ ID NO: 78021 - DNA, 25 bp, Artificial
  Probe
tgctattgtggatatggctgtgtaa

SEQ ID NO: 78022 - DNA, 25 bp, Artificial
  Probe
tatgtgaatgacttggagttgaact

SEQ ID NO: 78023 - DNA, 25 bp, Artificial
  Probe
gaagtaccttgctccttacattcag

SEQ ID NO: 78024 - DNA, 25 bp, Artificial
  Probe
cttctctgctattgtggatatggct

SEQ ID NO: 78025 - DNA, 25 bp, Artificial
  Probe
aagtaccttgctccttacattcaga

SEQ ID NO: 78026 - DNA, 25 bp, Artificial
  Probe
agaagtaccttgctccttacattca

SEQ ID NO: 78027 - DNA, 25 bp, Artificial
  Probe
gagaagtaccttgctccttacattc

SEQ ID NO: 78028 - DNA, 25 bp, Artificial
  Probe
ctgctattgtggatatggctgtgta

SEQ ID NO: 78029 - DNA, 25 bp, Artificial
  Probe
ttctctgctattgtggatatggctg

SEQ ID NO: 78030 - DNA, 25 bp, Artificial
  Probe
tgcttctctgctattgtggatatgg

SEQ ID NO: 78031 - DNA, 25 bp, Artificial
  Probe
cattgagaagtaccttgctccttac

SEQ ID NO: 78032 - DNA, 25 bp, Artificial
  Probe
tcattgagaagtaccttgctcctta

SEQ ID NO: 78033 - DNA, 25 bp, Artificial
  Probe
attgtgcttctctgctattgtggat

SEQ ID NO: 78034 - DNA, 25 bp, Artificial
  Probe
atgtgaatgacttggagttgaactg

SEQ ID NO: 78035 - DNA, 25 bp, Artificial
  Probe
tgagaagtaccttgctccttacatt

SEQ ID NO: 78036 - DNA, 25 bp, Artificial
  Probe
ttgagaagtaccttgctccttacat

SEQ ID NO: 78037 - DNA, 25 bp, Artificial
  Probe
attgagaagtaccttgctccttaca

SEQ ID NO: 78038 - DNA, 25 bp, Artificial
  Probe
ttgtgatggattactatgagaccag

SEQ ID NO: 78039 - DNA, 25 bp, Artificial
  Probe
gtgaatgacttggagttgaactgag

SEQ ID NO: 78040 - DNA, 25 bp, Artificial
  Probe
taccttgctccttacattcagattt

SEQ ID NO: 78041 - DNA, 25 bp, Artificial
  Probe
cggaactttgtgatggattactatg

SEQ ID NO: 78042 - DNA, 25 bp, Artificial
  Probe
tcggaactttgtgatggattactat

SEQ ID NO: 78043 - DNA, 25 bp, Artificial
  Probe
atcggaactttgtgatggattacta

SEQ ID NO: 78044 - DNA, 25 bp, Artificial
  Probe
cttgctccttacattcagatttcct

SEQ ID NO: 78045 - DNA, 25 bp, Artificial
  Probe
gtggatatggctgtgtaattgattt

SEQ ID NO: 78046 - DNA, 25 bp, Artificial
  Probe
ggatatggctgtgtaattgatttca

SEQ ID NO: 78047 - DNA, 25 bp, Artificial
  Probe
ccttcactgtaatgtttatgctgtt

SEQ ID NO: 78048 - DNA, 25 bp, Artificial
  Probe
tccttcactgtaatgtttatgctgt

SEQ ID NO: 78049 - DNA, 25 bp, Artificial
  Probe
ttccttcactgtaatgtttatgctg

SEQ ID NO: 78050 - DNA, 25 bp, Artificial
  Probe
gttccttcactgtaatgtttatgct

SEQ ID NO: 78051 - DNA, 25 bp, Artificial
  Probe
atgtccgtgccatgttgagtatatt

SEQ ID NO: 78052 - DNA, 25 bp, Artificial
  Probe
aatgtccgtgccatgttgagtatat

SEQ ID NO: 78053 - DNA, 25 bp, Artificial
  Probe
agttccttcactgtaatgtttatgc

SEQ ID NO: 78054 - DNA, 25 bp, Artificial
  Probe
cttcactgtaatgtttatgctgttt

SEQ ID NO: 78055 - DNA, 25 bp, Artificial
  Probe
tgtccgtgccatgttgagtatattc

SEQ ID NO: 78056 - DNA, 25 bp, Artificial
  Probe
caatgtccgtgccatgttgagtata

SEQ ID NO: 78057 - DNA, 25 bp, Artificial
  Probe
taccaagtttcagtggaaccaaatt

SEQ ID NO: 78058 - DNA, 25 bp, Artificial
  Probe
gtccgtgccatgttgagtatattcg

SEQ ID NO: 78059 - DNA, 25 bp, Artificial
  Probe
gtaccaagtttcagtggaaccaaat

SEQ ID NO: 78060 - DNA, 25 bp, Artificial
  Probe
tttgagtaaaatcctggttcccttt

SEQ ID NO: 78061 - DNA, 25 bp, Artificial
  Probe
cactgtaatgtttatgctgttttga

SEQ ID NO: 78062 - DNA, 25 bp, Artificial
  Probe
tcactgtaatgtttatgctgttttg

SEQ ID NO: 78063 - DNA, 25 bp, Artificial
  Probe
agtaccaagtttcagtggaaccaaa

SEQ ID NO: 78064 - DNA, 25 bp, Artificial
  Probe
taaacgcatttgagtaaaatcctgg

SEQ ID NO: 78065 - DNA, 25 bp, Artificial
  Probe
atttgagtaaaatcctggttccctt

SEQ ID NO: 78066 - DNA, 25 bp, Artificial
  Probe
tagcagtaccaagtttcagtggaac

SEQ ID NO: 78067 - DNA, 25 bp, Artificial
  Probe
gtagcagtaccaagtttcagtggaa

SEQ ID NO: 78068 - DNA, 25 bp, Artificial
  Probe
catttgagtaaaatcctggttccct

SEQ ID NO: 78069 - DNA, 25 bp, Artificial
  Probe
actgtaatgtttatgctgttttgaa

SEQ ID NO: 78070 - DNA, 25 bp, Artificial
  Probe
ttcactgtaatgtttatgctgtttt

SEQ ID NO: 78071 - DNA, 25 bp, Artificial
  Probe
accaagtttcagtggaaccaaattt

SEQ ID NO: 78072 - DNA, 25 bp, Artificial
  Probe
tttaccttcttcctgggaaaagtag

SEQ ID NO: 78073 - DNA, 25 bp, Artificial
  Probe
gtttaccttcttcctgggaaaagta

SEQ ID NO: 78074 - DNA, 25 bp, Artificial
  Probe
ttgagtaaaatcctggttccctttt

SEQ ID NO: 78075 - DNA, 25 bp, Artificial
  Probe
ttaccttcttcctgggaaaagtagt

SEQ ID NO: 78076 - DNA, 25 bp, Artificial
  Probe
cagtaccaagtttcagtggaaccaa

SEQ ID NO: 78077 - DNA, 25 bp, Artificial
  Probe
ctgtaatgtttatgctgttttgaac

SEQ ID NO: 78078 - DNA, 25 bp, Artificial
  Probe
aacgcatttgagtaaaatcctggtt

SEQ ID NO: 78079 - DNA, 25 bp, Artificial
  Probe
aaacgcatttgagtaaaatcctggt

SEQ ID NO: 78080 - DNA, 25 bp, Artificial
  Probe
taccttcttcctgggaaaagtagtc

SEQ ID NO: 78081 - DNA, 25 bp, Artificial
  Probe
acgcatttgagtaaaatcctggttc

SEQ ID NO: 78082 - DNA, 25 bp, Artificial
  Probe
gtgtttaccttcttcctgggaaaag

SEQ ID NO: 78083 - DNA, 25 bp, Artificial
  Probe
tgtttaccttcttcctgggaaaagt

SEQ ID NO: 78084 - DNA, 25 bp, Artificial
  Probe
gcatttgagtaaaatcctggttccc

SEQ ID NO: 78085 - DNA, 25 bp, Artificial
  Probe
acaatgtccgtgccatgttgagtat

SEQ ID NO: 78086 - DNA, 25 bp, Artificial
  Probe
tgaacatatactctcattaaagtgt

SEQ ID NO: 78087 - DNA, 25 bp, Artificial
  Probe
cgcatttgagtaaaatcctggttcc

SEQ ID NO: 78088 - DNA, 25 bp, Artificial
  Probe
cagttccttcactgtaatgtttatg

SEQ ID NO: 78089 - DNA, 25 bp, Artificial
  Probe
ggtgtttaccttcttcctgggaaaa

SEQ ID NO: 78090 - DNA, 25 bp, Artificial
  Probe
tgctgttttgaacatatactctcat

SEQ ID NO: 78091 - DNA, 25 bp, Artificial
  Probe
atgctgttttgaacatatactctca

SEQ ID NO: 78092 - DNA, 25 bp, Artificial
  Probe
tgtaactataacgagtaactgacca

SEQ ID NO: 78093 - DNA, 25 bp, Artificial
  Probe
gtaactataacgagtaactgaccaa

SEQ ID NO: 78094 - DNA, 25 bp, Artificial
  Probe
ttgtaactataacgagtaactgacc

SEQ ID NO: 78095 - DNA, 25 bp, Artificial
  Probe
cacaatcttgtatcggagagtctac

SEQ ID NO: 78096 - DNA, 25 bp, Artificial
  Probe
cttgtatcggagagtctacgttatt

SEQ ID NO: 78097 - DNA, 25 bp, Artificial
  Probe
tgtatcggagagtctacgttattac

SEQ ID NO: 78098 - DNA, 25 bp, Artificial
  Probe
ctataacgagtaactgaccaaacct

SEQ ID NO: 78099 - DNA, 25 bp, Artificial
  Probe
tataacgagtaactgaccaaacctg

SEQ ID NO: 78100 - DNA, 25 bp, Artificial
  Probe
tcttgtatcggagagtctacgttat

SEQ ID NO: 78101 - DNA, 25 bp, Artificial
  Probe
atcttgtatcggagagtctacgtta

SEQ ID NO: 78102 - DNA, 25 bp, Artificial
  Probe
acaatcttgtatcggagagtctacg

SEQ ID NO: 78103 - DNA, 25 bp, Artificial
  Probe
ttgtatcggagagtctacgttatta

SEQ ID NO: 78104 - DNA, 25 bp, Artificial
  Probe
gcacaatcttgtatcggagagtcta

SEQ ID NO: 78105 - DNA, 25 bp, Artificial
  Probe
atggactggagctgttagtacataa

SEQ ID NO: 78106 - DNA, 25 bp, Artificial
  Probe
aatggactggagctgttagtacata

SEQ ID NO: 78107 - DNA, 25 bp, Artificial
  Probe
taactttggataatggcaagatgtg

SEQ ID NO: 78108 - DNA, 25 bp, Artificial
  Probe
aatcttgtatcggagagtctacgtt

SEQ ID NO: 78109 - DNA, 25 bp, Artificial
  Probe
ctttggataatggcaagatgtgatg

SEQ ID NO: 78110 - DNA, 25 bp, Artificial
  Probe
actttggataatggcaagatgtgat

SEQ ID NO: 78111 - DNA, 25 bp, Artificial
  Probe
actataacgagtaactgaccaaacc

SEQ ID NO: 78112 - DNA, 25 bp, Artificial
  Probe
gtatcggagagtctacgttattact

SEQ ID NO: 78113 - DNA, 25 bp, Artificial
  Probe
aactttggataatggcaagatgtga

SEQ ID NO: 78114 - DNA, 25 bp, Artificial
  Probe
ttaactttggataatggcaagatgt

SEQ ID NO: 78115 - DNA, 25 bp, Artificial
  Probe
ctgttgatgagctaattgattgtaa

SEQ ID NO: 78116 - DNA, 25 bp, Artificial
  Probe
aactataacgagtaactgaccaaac

SEQ ID NO: 78117 - DNA, 25 bp, Artificial
  Probe
tgttgatgagctaattgattgtaac

SEQ ID NO: 78118 - DNA, 25 bp, Artificial
  Probe
caatcttgtatcggagagtctacgt

SEQ ID NO: 78119 - DNA, 25 bp, Artificial
  Probe
atgagcacaatcttgtatcggagag

SEQ ID NO: 78120 - DNA, 25 bp, Artificial
  Probe
gttgatgagctaattgattgtaact

SEQ ID NO: 78121 - DNA, 25 bp, Artificial
  Probe
tttcctaacctaaatgtaagccagg

SEQ ID NO: 78122 - DNA, 25 bp, Artificial
  Probe
gctgttagtacataaagtgtgatgg

SEQ ID NO: 78123 - DNA, 25 bp, Artificial
  Probe
catgagcacaatcttgtatcggaga

SEQ ID NO: 78124 - DNA, 25 bp, Artificial
  Probe
gctgttgatgagctaattgattgta

SEQ ID NO: 78125 - DNA, 25 bp, Artificial
  Probe
ttgctgttgatgagctaattgattg

SEQ ID NO: 78126 - DNA, 25 bp, Artificial
  Probe
gttgctgttgatgagctaattgatt

SEQ ID NO: 78127 - DNA, 25 bp, Artificial
  Probe
attgtaactataacgagtaactgac

SEQ ID NO: 78128 - DNA, 25 bp, Artificial
  Probe
tgattgtaactataacgagtaactg

SEQ ID NO: 78129 - DNA, 25 bp, Artificial
  Probe
acatgagcacaatcttgtatcggag

SEQ ID NO: 78130 - DNA, 25 bp, Artificial
  Probe
gagcacaatcttgtatcggagagtc

SEQ ID NO: 78131 - DNA, 25 bp, Artificial
  Probe
tgttagtacataaagtgtgatggac

SEQ ID NO: 78132 - DNA, 25 bp, Artificial
  Probe
ttaaatggactggagctgttagtac

SEQ ID NO: 78133 - DNA, 25 bp, Artificial
  Probe
tgctgttgatgagctaattgattgt

SEQ ID NO: 78134 - DNA, 25 bp, Artificial
  Probe
tttaaatggactggagctgttagta

SEQ ID NO: 78135 - DNA, 25 bp, Artificial
  Probe
gattgtaactataacgagtaactga

SEQ ID NO: 78136 - DNA, 25 bp, Artificial
  Probe
gctaattgattgtaactataacgag

SEQ ID NO: 78137 - DNA, 25 bp, Artificial
  Probe
gactccagacactaactcattaact

SEQ ID NO: 78138 - DNA, 25 bp, Artificial
  Probe
ggactccagacactaactcattaac

SEQ ID NO: 78139 - DNA, 25 bp, Artificial
  Probe
gtagactaggctaacttgaactcac

SEQ ID NO: 78140 - DNA, 25 bp, Artificial
  Probe
atgtagactaggctaacttgaactc

SEQ ID NO: 78141 - DNA, 25 bp, Artificial
  Probe
tagactaggctaacttgaactcaca

SEQ ID NO: 78142 - DNA, 25 bp, Artificial
  Probe
tgtagactaggctaacttgaactca

SEQ ID NO: 78143 - DNA, 25 bp, Artificial
  Probe
actaggctaacttgaactcacagaa

SEQ ID NO: 78144 - DNA, 25 bp, Artificial
  Probe
tatgtagactaggctaacttgaact

SEQ ID NO: 78145 - DNA, 25 bp, Artificial
  Probe
actccagacactaactcattaactg

SEQ ID NO: 78146 - DNA, 25 bp, Artificial
  Probe
cggactccagacactaactcattaa

SEQ ID NO: 78147 - DNA, 25 bp, Artificial
  Probe
gactaggctaacttgaactcacaga

SEQ ID NO: 78148 - DNA, 25 bp, Artificial
  Probe
agactaggctaacttgaactcacag

SEQ ID NO: 78149 - DNA, 25 bp, Artificial
  Probe
ttatgtagactaggctaacttgaac

SEQ ID NO: 78150 - DNA, 25 bp, Artificial
  Probe
tcggactccagacactaactcatta

SEQ ID NO: 78151 - DNA, 25 bp, Artificial
  Probe
actgtgtagttatgtagactaggct

SEQ ID NO: 78152 - DNA, 25 bp, Artificial
  Probe
ctgtgtagttatgtagactaggcta

SEQ ID NO: 78153 - DNA, 25 bp, Artificial
  Probe
ttatcggctatcctgaaactgtgta

SEQ ID NO: 78154 - DNA, 25 bp, Artificial
  Probe
ctatggttatcggctatcctgaaac

SEQ ID NO: 78155 - DNA, 25 bp, Artificial
  Probe
tgtgtagttatgtagactaggctaa

SEQ ID NO: 78156 - DNA, 25 bp, Artificial
  Probe
tatggttatcggctatcctgaaact

SEQ ID NO: 78157 - DNA, 25 bp, Artificial
  Probe
gtgtagttatgtagactaggctaac

SEQ ID NO: 78158 - DNA, 25 bp, Artificial
  Probe
gttatgtagactaggctaacttgaa

SEQ ID NO: 78159 - DNA, 25 bp, Artificial
  Probe
tatcggctatcctgaaactgtgtag

SEQ ID NO: 78160 - DNA, 25 bp, Artificial
  Probe
gctgtttcaagtgtgacatctattt

SEQ ID NO: 78161 - DNA, 25 bp, Artificial
  Probe
gctatggttatcggctatcctgaaa

SEQ ID NO: 78162 - DNA, 25 bp, Artificial
  Probe
aactgtgtagttatgtagactaggc

SEQ ID NO: 78163 - DNA, 25 bp, Artificial
  Probe
ctcggactccagacactaactcatt

SEQ ID NO: 78164 - DNA, 25 bp, Artificial
  Probe
ggctgtttcaagtgtgacatctatt

SEQ ID NO: 78165 - DNA, 25 bp, Artificial
  Probe
ggctatggttatcggctatcctgaa

SEQ ID NO: 78166 - DNA, 25 bp, Artificial
  Probe
atatggctgtttcaagtgtgacatc

SEQ ID NO: 78167 - DNA, 25 bp, Artificial
  Probe
caagtctacttcttcaagggcaaag

SEQ ID NO: 78168 - DNA, 25 bp, Artificial
  Probe
atggttatcggctatcctgaaactg

SEQ ID NO: 78169 - DNA, 25 bp, Artificial
  Probe
gttatcggctatcctgaaactgtgt

SEQ ID NO: 78170 - DNA, 25 bp, Artificial
  Probe
tggctgtttcaagtgtgacatctat

SEQ ID NO: 78171 - DNA, 25 bp, Artificial
  Probe
atggctgtttcaagtgtgacatcta

SEQ ID NO: 78172 - DNA, 25 bp, Artificial
  Probe
tatggctgtttcaagtgtgacatct

SEQ ID NO: 78173 - DNA, 25 bp, Artificial
  Probe
tttcttcttgtcatatggctgtttc

SEQ ID NO: 78174 - DNA, 25 bp, Artificial
  Probe
ttcttcttgtcatatggctgtttca

SEQ ID NO: 78175 - DNA, 25 bp, Artificial
  Probe
ctggctatggttatcggctatcctg

SEQ ID NO: 78176 - DNA, 25 bp, Artificial
  Probe
atttcttcttgtcatatggctgttt

SEQ ID NO: 78177 - DNA, 25 bp, Artificial
  Probe
catttcttcttgtcatatggctgtt

SEQ ID NO: 78178 - DNA, 25 bp, Artificial
  Probe
cagtccccatttcttcttgtcatat

SEQ ID NO: 78179 - DNA, 25 bp, Artificial
  Probe
tctacttcttcaagggcaaagagta

SEQ ID NO: 78180 - DNA, 25 bp, Artificial
  Probe
ggttatcggctatcctgaaactgtg

SEQ ID NO: 78181 - DNA, 25 bp, Artificial
  Probe
ttctggtggagggaaattgttgatc

SEQ ID NO: 78182 - DNA, 25 bp, Artificial
  Probe
gttggtcctactctctcagtgttac

SEQ ID NO: 78183 - DNA, 25 bp, Artificial
  Probe
agttggtcctactctctcagtgtta

SEQ ID NO: 78184 - DNA, 25 bp, Artificial
  Probe
gaacatctctgctcttacctggaag

SEQ ID NO: 78185 - DNA, 25 bp, Artificial
  Probe
cctcaactcccaataaagaaatgtc

SEQ ID NO: 78186 - DNA, 25 bp, Artificial
  Probe
tcctcaactcccaataaagaaatgt

SEQ ID NO: 78187 - DNA, 25 bp, Artificial
  Probe
ctcctcaactcccaataaagaaatg

SEQ ID NO: 78188 - DNA, 25 bp, Artificial
  Probe
cctcctcaactcccaataaagaaat

SEQ ID NO: 78189 - DNA, 25 bp, Artificial
  Probe
ctcaactcccaataaagaaatgtca

SEQ ID NO: 78190 - DNA, 25 bp, Artificial
  Probe
agaacatctctgctcttacctggaa

SEQ ID NO: 78191 - DNA, 25 bp, Artificial
  Probe
tcaactcccaataaagaaatgtcat

SEQ ID NO: 78192 - DNA, 25 bp, Artificial
  Probe
caactcccaataaagaaatgtcatc

SEQ ID NO: 78193 - DNA, 25 bp, Artificial
  Probe
aactcccaataaagaaatgtcatct

SEQ ID NO: 78194 - DNA, 25 bp, Artificial
  Probe
gcctcctcaactcccaataaagaaa

SEQ ID NO: 78195 - DNA, 25 bp, Artificial
  Probe
ttggtcctactctctcagtgttacc

SEQ ID NO: 78196 - DNA, 25 bp, Artificial
  Probe
gaagaacatctctgctcttacctgg

SEQ ID NO: 78197 - DNA, 25 bp, Artificial
  Probe
ggaagaacatctctgctcttacctg

SEQ ID NO: 78198 - DNA, 25 bp, Artificial
  Probe
aagaacatctctgctcttacctgga

SEQ ID NO: 78199 - DNA, 25 bp, Artificial
  Probe
atcgtgtgtaccttccaggagtatg

SEQ ID NO: 78200 - DNA, 25 bp, Artificial
  Probe
catcgtgtgtaccttccaggagtat

SEQ ID NO: 78201 - DNA, 25 bp, Artificial
  Probe
actcccaataaagaaatgtcatctt

SEQ ID NO: 78202 - DNA, 25 bp, Artificial
  Probe
ctcccaataaagaaatgtcatcttg

SEQ ID NO: 78203 - DNA, 25 bp, Artificial
  Probe
gaagggaagaacatctctgctctta

SEQ ID NO: 78204 - DNA, 25 bp, Artificial
  Probe
aagggaagaacatctctgctcttac

SEQ ID NO: 78205 - DNA, 25 bp, Artificial
  Probe
ctactctctcagtgttacccctttc

SEQ ID NO: 78206 - DNA, 25 bp, Artificial
  Probe
ttggaagggaagaacatctctgctc

SEQ ID NO: 78207 - DNA, 25 bp, Artificial
  Probe
cttggaagggaagaacatctctgct

SEQ ID NO: 78208 - DNA, 25 bp, Artificial
  Probe
gtgacaaatacaagatctgccagtc

SEQ ID NO: 78209 - DNA, 25 bp, Artificial
  Probe
aacatctctgctcttacctggaagc

SEQ ID NO: 78210 - DNA, 25 bp, Artificial
  Probe
ctgtggtgacaaatacaagatctgc

SEQ ID NO: 78211 - DNA, 25 bp, Artificial
  Probe
gctgtggtgacaaatacaagatctg

SEQ ID NO: 78212 - DNA, 25 bp, Artificial
  Probe
gagttggtcctactctctcagtgtt

SEQ ID NO: 78213 - DNA, 25 bp, Artificial
  Probe
gttccgggagtgtgactacaataaa

SEQ ID NO: 78214 - DNA, 25 bp, Artificial
  Probe
cctactctctcagtgttaccccttt

SEQ ID NO: 78215 - DNA, 25 bp, Artificial
  Probe
ggtgacaaatacaagatctgccagt

SEQ ID NO: 78216 - DNA, 25 bp, Artificial
  Probe
gggaagaacatctctgctcttacct

SEQ ID NO: 78217 - DNA, 25 bp, Artificial
  Probe
agggaagaacatctctgctcttacc

SEQ ID NO: 78218 - DNA, 25 bp, Artificial
  Probe
tttatccctgagttggtcctactct

SEQ ID NO: 78219 - DNA, 25 bp, Artificial
  Probe
tactctctcagtgttacccctttcg

SEQ ID NO: 78220 - DNA, 25 bp, Artificial
  Probe
gtgtgtaccttccaggagtatgcag

SEQ ID NO: 78221 - DNA, 25 bp, Artificial
  Probe
caaatacaagatctgccagtcggag

SEQ ID NO: 78222 - DNA, 25 bp, Artificial
  Probe
ttatccctgagttggtcctactctc

SEQ ID NO: 78223 - DNA, 25 bp, Artificial
  Probe
agttccgggagtgtgactacaataa

SEQ ID NO: 78224 - DNA, 25 bp, Artificial
  Probe
tggaagggaagaacatctctgctct

SEQ ID NO: 78225 - DNA, 25 bp, Artificial
  Probe
catctctgctcttacctggaagctc

SEQ ID NO: 78226 - DNA, 25 bp, Artificial
  Probe
tgacaaatacaagatctgccagtcg

SEQ ID NO: 78227 - DNA, 25 bp, Artificial
  Probe
cactccttgtactgtatcttactgg

SEQ ID NO: 78228 - DNA, 25 bp, Artificial
  Probe
ccactccttgtactgtatcttactg

SEQ ID NO: 78229 - DNA, 25 bp, Artificial
  Probe
tccactccttgtactgtatcttact

SEQ ID NO: 78230 - DNA, 25 bp, Artificial
  Probe
gtccactccttgtactgtatcttac

SEQ ID NO: 78231 - DNA, 25 bp, Artificial
  Probe
cgtccactccttgtactgtatctta

SEQ ID NO: 78232 - DNA, 25 bp, Artificial
  Probe
ctccttgtactgtatcttactggac

SEQ ID NO: 78233 - DNA, 25 bp, Artificial
  Probe
actccttgtactgtatcttactgga

SEQ ID NO: 78234 - DNA, 25 bp, Artificial
  Probe
tccttgtactgtatcttactggaca

SEQ ID NO: 78235 - DNA, 25 bp, Artificial
  Probe
ccgtccactccttgtactgtatctt

SEQ ID NO: 78236 - DNA, 25 bp, Artificial
  Probe
cttgtactgtatcttactggacagg

SEQ ID NO: 78237 - DNA, 25 bp, Artificial
  Probe
ccttgtactgtatcttactggacag

SEQ ID NO: 78238 - DNA, 25 bp, Artificial
  Probe
tgtcactggagtcagacagtaataa

SEQ ID NO: 78239 - DNA, 25 bp, Artificial
  Probe
tcgaacttggagaactgtacacatg

SEQ ID NO: 78240 - DNA, 25 bp, Artificial
  Probe
gatgggtagcaccagatgtagtttc

SEQ ID NO: 78241 - DNA, 25 bp, Artificial
  Probe
agtcagacagtaataaattaaacca

SEQ ID NO: 78242 - DNA, 25 bp, Artificial
  Probe
ttcgaacttggagaactgtacacat

SEQ ID NO: 78243 - DNA, 25 bp, Artificial
  Probe
gtgtcactggagtcagacagtaata

SEQ ID NO: 78244 - DNA, 25 bp, Artificial
  Probe
aacttggagaactgtacacatgcaa

SEQ ID NO: 78245 - DNA, 25 bp, Artificial
  Probe
tggagtcagacagtaataaattaaa

SEQ ID NO: 78246 - DNA, 25 bp, Artificial
  Probe
gaacttggagaactgtacacatgca

SEQ ID NO: 78247 - DNA, 25 bp, Artificial
  Probe
ctggagtcagacagtaataaattaa

SEQ ID NO: 78248 - DNA, 25 bp, Artificial
  Probe
tgatgggtagcaccagatgtagttt

SEQ ID NO: 78249 - DNA, 25 bp, Artificial
  Probe
gagtcagacagtaataaattaaacc

SEQ ID NO: 78250 - DNA, 25 bp, Artificial
  Probe
ggagtcagacagtaataaattaaac

SEQ ID NO: 78251 - DNA, 25 bp, Artificial
  Probe
gtcagacagtaataaattaaaccaa

SEQ ID NO: 78252 - DNA, 25 bp, Artificial
  Probe
acttggagaactgtacacatgcaac

SEQ ID NO: 78253 - DNA, 25 bp, Artificial
  Probe
gtcactggagtcagacagtaataaa

SEQ ID NO: 78254 - DNA, 25 bp, Artificial
  Probe
agtgtcactggagtcagacagtaat

SEQ ID NO: 78255 - DNA, 25 bp, Artificial
  Probe
tcactggagtcagacagtaataaat

SEQ ID NO: 78256 - DNA, 25 bp, Artificial
  Probe
gagaactgtacacatgcaaccttcc

SEQ ID NO: 78257 - DNA, 25 bp, Artificial
  Probe
ggagaactgtacacatgcaaccttc

SEQ ID NO: 78258 - DNA, 25 bp, Artificial
  Probe
gtgatgggtagcaccagatgtagtt

SEQ ID NO: 78259 - DNA, 25 bp, Artificial
  Probe
acagtaataaattaaaccaatgaca

SEQ ID NO: 78260 - DNA, 25 bp, Artificial
  Probe
cactggagtcagacagtaataaatt

SEQ ID NO: 78261 - DNA, 25 bp, Artificial
  Probe
gtttcgaacttggagaactgtacac

SEQ ID NO: 78262 - DNA, 25 bp, Artificial
  Probe
ctgtacacatgcaaccttccacatt

SEQ ID NO: 78263 - DNA, 25 bp, Artificial
  Probe
cgaacttggagaactgtacacatgc

SEQ ID NO: 78264 - DNA, 25 bp, Artificial
  Probe
tttcgaacttggagaactgtacaca

SEQ ID NO: 78265 - DNA, 25 bp, Artificial
  Probe
cttggagaactgtacacatgcaacc

SEQ ID NO: 78266 - DNA, 25 bp, Artificial
  Probe
gtacacatgcaaccttccacatttt

SEQ ID NO: 78267 - DNA, 25 bp, Artificial
  Probe
atgggtagcaccagatgtagtttcg

SEQ ID NO: 78268 - DNA, 25 bp, Artificial
  Probe
gaactgtacacatgcaaccttccac

SEQ ID NO: 78269 - DNA, 25 bp, Artificial
  Probe
tggagaactgtacacatgcaacctt

SEQ ID NO: 78270 - DNA, 25 bp, Artificial
  Probe
cagtgatgggtagcaccagatgtag

SEQ ID NO: 78271 - DNA, 25 bp, Artificial
  Probe
agaactgtacacatgcaaccttcca

SEQ ID NO: 78272 - DNA, 25 bp, Artificial
  Probe
acctcgcttcattgtgtatagttat

SEQ ID NO: 78273 - DNA, 25 bp, Artificial
  Probe
aacctcgcttcattgtgtatagtta

SEQ ID NO: 78274 - DNA, 25 bp, Artificial
  Probe
cctcgcttcattgtgtatagttata

SEQ ID NO: 78275 - DNA, 25 bp, Artificial
  Probe
caacctcgcttcattgtgtatagtt

SEQ ID NO: 78276 - DNA, 25 bp, Artificial
  Probe
ttccactaatgtgaacttctgtgtt

SEQ ID NO: 78277 - DNA, 25 bp, Artificial
  Probe
ttgtgatgttgctgaagatttagtg

SEQ ID NO: 78278 - DNA, 25 bp, Artificial
  Probe
gatgttgctgaagatttagtggaaa

SEQ ID NO: 78279 - DNA, 25 bp, Artificial
  Probe
ggtttgtgatgttgctgaagattta

SEQ ID NO: 78280 - DNA, 25 bp, Artificial
  Probe
tttgtgatgttgctgaagatttagt

SEQ ID NO: 78281 - DNA, 25 bp, Artificial
  Probe
tgatgttgctgaagatttagtggaa

SEQ ID NO: 78282 - DNA, 25 bp, Artificial
  Probe
acttaaagatgaactacctgaacgg

SEQ ID NO: 78283 - DNA, 25 bp, Artificial
  Probe
gtttgtgatgttgctgaagatttag

SEQ ID NO: 78284 - DNA, 25 bp, Artificial
  Probe
atgaagattgacaaggataaacgct

SEQ ID NO: 78285 - DNA, 25 bp, Artificial
  Probe
aagaaacccacaatgctgctattat

SEQ ID NO: 78286 - DNA, 25 bp, Artificial
  Probe
aacttaaagatgaactacctgaacg

SEQ ID NO: 78287 - DNA, 25 bp, Artificial
  Probe
gtgtctctccagatgaacttaaaga

SEQ ID NO: 78288 - DNA, 25 bp, Artificial
  Probe
aaagaaacccacaatgctgctatta

SEQ ID NO: 78289 - DNA, 25 bp, Artificial
  Probe
gtgatgttgctgaagatttagtgga

SEQ ID NO: 78290 - DNA, 25 bp, Artificial
  Probe
tgtctctccagatgaacttaaagat

SEQ ID NO: 78291 - DNA, 25 bp, Artificial
  Probe
ggtgtctctccagatgaacttaaag

SEQ ID NO: 78292 - DNA, 25 bp, Artificial
  Probe
tgaagattgacaaggataaacgctt

SEQ ID NO: 78293 - DNA, 25 bp, Artificial
  Probe
tgtgatgttgctgaagatttagtgg

SEQ ID NO: 78294 - DNA, 25 bp, Artificial
  Probe
gtctctccagatgaacttaaagatg

SEQ ID NO: 78295 - DNA, 25 bp, Artificial
  Probe
tctctccagatgaacttaaagatga

SEQ ID NO: 78296 - DNA, 25 bp, Artificial
  Probe
ctccagatgaacttaaagatgaact

SEQ ID NO: 78297 - DNA, 25 bp, Artificial
  Probe
cttaaagatgaactacctgaacggc

SEQ ID NO: 78298 - DNA, 25 bp, Artificial
  Probe
tctccagatgaacttaaagatgaac

SEQ ID NO: 78299 - DNA, 25 bp, Artificial
  Probe
tggtttgtgatgttgctgaagattt

SEQ ID NO: 78300 - DNA, 25 bp, Artificial
  Probe
tagttataaataccagcacgacgat

SEQ ID NO: 78301 - DNA, 25 bp, Artificial
  Probe
atagttataaataccagcacgacga

SEQ ID NO: 78302 - DNA, 25 bp, Artificial
  Probe
ctctccagatgaacttaaagatgaa

SEQ ID NO: 78303 - DNA, 25 bp, Artificial
  Probe
taaagatgaactacctgaacggcaa

SEQ ID NO: 78304 - DNA, 25 bp, Artificial
  Probe
agttataaataccagcacgacgatg

SEQ ID NO: 78305 - DNA, 25 bp, Artificial
  Probe
gggtgtctctccagatgaacttaaa

SEQ ID NO: 78306 - DNA, 25 bp, Artificial
  Probe
ccactaatgtgaacttctgtgtttc

SEQ ID NO: 78307 - DNA, 25 bp, Artificial
  Probe
ttaaagatgaactacctgaacggca

SEQ ID NO: 78308 - DNA, 25 bp, Artificial
  Probe
tgaacttaaagatgaactacctgaa

SEQ ID NO: 78309 - DNA, 25 bp, Artificial
  Probe
cactaatgtgaacttctgtgtttct

SEQ ID NO: 78310 - DNA, 25 bp, Artificial
  Probe
tccactaatgtgaacttctgtgttt

SEQ ID NO: 78311 - DNA, 25 bp, Artificial
  Probe
tttccactaatgtgaacttctgtgt

SEQ ID NO: 78312 - DNA, 25 bp, Artificial
  Probe
gcaacctcgcttcattgtgtatagt

SEQ ID NO: 78313 - DNA, 25 bp, Artificial
  Probe
gaacttaaagatgaactacctgaac

SEQ ID NO: 78314 - DNA, 25 bp, Artificial
  Probe
ctcgcttcattgtgtatagttataa

SEQ ID NO: 78315 - DNA, 25 bp, Artificial
  Probe
gtggtttgtgatgttgctgaagatt

SEQ ID NO: 78316 - DNA, 25 bp, Artificial
  Probe
atgaacttaaagatgaactacctga

SEQ ID NO: 78317 - DNA, 25 bp, Artificial
  Probe
gtcaggataacatcatatagcatct

SEQ ID NO: 78318 - DNA, 25 bp, Artificial
  Probe
tgtcaggataacatcatatagcatc

SEQ ID NO: 78319 - DNA, 25 bp, Artificial
  Probe
acatatctatctacctgtaaccgta

SEQ ID NO: 78320 - DNA, 25 bp, Artificial
  Probe
tcaggataacatcatatagcatctt

SEQ ID NO: 78321 - DNA, 25 bp, Artificial
  Probe
ttgtcaggataacatcatatagcat

SEQ ID NO: 78322 - DNA, 25 bp, Artificial
  Probe
aatgaagctcgaagttctctaggaa

SEQ ID NO: 78323 - DNA, 25 bp, Artificial
  Probe
gaaactcttgtgtgttaaatgaagc

SEQ ID NO: 78324 - DNA, 25 bp, Artificial
  Probe
ctcccttgctcatttgccatattta

SEQ ID NO: 78325 - DNA, 25 bp, Artificial
  Probe
atgaagctcgaagttctctaggaag

SEQ ID NO: 78326 - DNA, 25 bp, Artificial
  Probe
atcattatcgggtctctgccttaaa

SEQ ID NO: 78327 - DNA, 25 bp, Artificial
  Probe
ctgacagaaactcttgtgtgttaaa

SEQ ID NO: 78328 - DNA, 25 bp, Artificial
  Probe
actgacagaaactcttgtgtgttaa

SEQ ID NO: 78329 - DNA, 25 bp, Artificial
  Probe
acagaaactcttgtgtgttaaatga

SEQ ID NO: 78330 - DNA, 25 bp, Artificial
  Probe
tgacagaaactcttgtgtgttaaat

SEQ ID NO: 78331 - DNA, 25 bp, Artificial
  Probe
gactgacagaaactcttgtgtgtta

SEQ ID NO: 78332 - DNA, 25 bp, Artificial
  Probe
atactcccttgctcatttgccatat

SEQ ID NO: 78333 - DNA, 25 bp, Artificial
  Probe
cagaaactcttgtgtgttaaatgaa

SEQ ID NO: 78334 - DNA, 25 bp, Artificial
  Probe
gacagaaactcttgtgtgttaaatg

SEQ ID NO: 78335 - DNA, 25 bp, Artificial
  Probe
attacttgaacgatacactcaatgc

SEQ ID NO: 78336 - DNA, 25 bp, Artificial
  Probe
tactcccttgctcatttgccatatt

SEQ ID NO: 78337 - DNA, 25 bp, Artificial
  Probe
catcattatcgggtctctgccttaa

SEQ ID NO: 78338 - DNA, 25 bp, Artificial
  Probe
agaaactcttgtgtgttaaatgaag

SEQ ID NO: 78339 - DNA, 25 bp, Artificial
  Probe
tacatatctatctacctgtaaccgt

SEQ ID NO: 78340 - DNA, 25 bp, Artificial
  Probe
gagtcctcagaatggcatgtattgg

SEQ ID NO: 78341 - DNA, 25 bp, Artificial
  Probe
ggagtcctcagaatggcatgtattg

SEQ ID NO: 78342 - DNA, 25 bp, Artificial
  Probe
ttacttgaacgatacactcaatgcc

SEQ ID NO: 78343 - DNA, 25 bp, Artificial
  Probe
gatactcccttgctcatttgccata

SEQ ID NO: 78344 - DNA, 25 bp, Artificial
  Probe
aactcttgtgtgttaaatgaagctc

SEQ ID NO: 78345 - DNA, 25 bp, Artificial
  Probe
taaatgaagctcgaagttctctagg

SEQ ID NO: 78346 - DNA, 25 bp, Artificial
  Probe
aaactcttgtgtgttaaatgaagct

SEQ ID NO: 78347 - DNA, 25 bp, Artificial
  Probe
gtcttgactgacagaaactcttgtg

SEQ ID NO: 78348 - DNA, 25 bp, Artificial
  Probe
gtacatatctatctacctgtaaccg

SEQ ID NO: 78349 - DNA, 25 bp, Artificial
  Probe
tgttaaatgaagctcgaagttctct

SEQ ID NO: 78350 - DNA, 25 bp, Artificial
  Probe
gtgttaaatgaagctcgaagttctc

SEQ ID NO: 78351 - DNA, 25 bp, Artificial
  Probe
cttgactgacagaaactcttgtgtg

SEQ ID NO: 78352 - DNA, 25 bp, Artificial
  Probe
tcttgactgacagaaactcttgtgt

SEQ ID NO: 78353 - DNA, 25 bp, Artificial
  Probe
tgtgttaaatgaagctcgaagttct

SEQ ID NO: 78354 - DNA, 25 bp, Artificial
  Probe
gtgtgttaaatgaagctcgaagttc

SEQ ID NO: 78355 - DNA, 25 bp, Artificial
  Probe
cttgtgtgttaaatgaagctcgaag

SEQ ID NO: 78356 - DNA, 25 bp, Artificial
  Probe
gcatcttatttgttcttcctaatct

SEQ ID NO: 78357 - DNA, 25 bp, Artificial
  Probe
agcatcttatttgttcttcctaatc

SEQ ID NO: 78358 - DNA, 25 bp, Artificial
  Probe
gattacttgaacgatacactcaatg

SEQ ID NO: 78359 - DNA, 25 bp, Artificial
  Probe
gttaaatgaagctcgaagttctcta

SEQ ID NO: 78360 - DNA, 25 bp, Artificial
  Probe
tgtgtgttaaatgaagctcgaagtt

SEQ ID NO: 78361 - DNA, 25 bp, Artificial
  Probe
ttgtgtgttaaatgaagctcgaagt

SEQ ID NO: 78362 - DNA, 25 bp, Artificial
  Probe
acataaaagtccttaccctgttagg

SEQ ID NO: 78363 - DNA, 25 bp, Artificial
  Probe
gaggtgttcttactagtggagggag

SEQ ID NO: 78364 - DNA, 25 bp, Artificial
  Probe
tgaggtgttcttactagtggaggga

SEQ ID NO: 78365 - DNA, 25 bp, Artificial
  Probe
gttcttactagtggagggaggcttg

SEQ ID NO: 78366 - DNA, 25 bp, Artificial
  Probe
ttcttactagtggagggaggcttga

SEQ ID NO: 78367 - DNA, 25 bp, Artificial
  Probe
tgttcttactagtggagggaggctt

SEQ ID NO: 78368 - DNA, 25 bp, Artificial
  Probe
aggtgttcttactagtggagggagg

SEQ ID NO: 78369 - DNA, 25 bp, Artificial
  Probe
tcttactagtggagggaggcttgag

SEQ ID NO: 78370 - DNA, 25 bp, Artificial
  Probe
gtgttcttactagtggagggaggct

SEQ ID NO: 78371 - DNA, 25 bp, Artificial
  Probe
aacttaatggcttggctatcatcaa

SEQ ID NO: 78372 - DNA, 25 bp, Artificial
  Probe
gattctccctttcagtctccttatg

SEQ ID NO: 78373 - DNA, 25 bp, Artificial
  Probe
aacaatcaacttaccttgcatctct

SEQ ID NO: 78374 - DNA, 25 bp, Artificial
  Probe
aaacttaatggcttggctatcatca

SEQ ID NO: 78375 - DNA, 25 bp, Artificial
  Probe
tggctatcatcaaacaatcaactta

SEQ ID NO: 78376 - DNA, 25 bp, Artificial
  Probe
cttggctatcatcaaacaatcaact

SEQ ID NO: 78377 - DNA, 25 bp, Artificial
  Probe
tcatcaaacaatcaacttaccttgc

SEQ ID NO: 78378 - DNA, 25 bp, Artificial
  Probe
cttaatggcttggctatcatcaaac

SEQ ID NO: 78379 - DNA, 25 bp, Artificial
  Probe
ttggctatcatcaaacaatcaactt

SEQ ID NO: 78380 - DNA, 25 bp, Artificial
  Probe
gctatcatcaaacaatcaacttacc

SEQ ID NO: 78381 - DNA, 25 bp, Artificial
  Probe
ggctatcatcaaacaatcaacttac

SEQ ID NO: 78382 - DNA, 25 bp, Artificial
  Probe
acttaatggcttggctatcatcaaa

SEQ ID NO: 78383 - DNA, 25 bp, Artificial
  Probe
attctccctttcagtctccttatga

SEQ ID NO: 78384 - DNA, 25 bp, Artificial
  Probe
tgattctccctttcagtctccttat

SEQ ID NO: 78385 - DNA, 25 bp, Artificial
  Probe
taatggcttggctatcatcaaacaa

SEQ ID NO: 78386 - DNA, 25 bp, Artificial
  Probe
ttaatggcttggctatcatcaaaca

SEQ ID NO: 78387 - DNA, 25 bp, Artificial
  Probe
aatcaacttaccttgcatctctgtg

SEQ ID NO: 78388 - DNA, 25 bp, Artificial
  Probe
caatcaacttaccttgcatctctgt

SEQ ID NO: 78389 - DNA, 25 bp, Artificial
  Probe
acaatcaacttaccttgcatctctg

SEQ ID NO: 78390 - DNA, 25 bp, Artificial
  Probe
ttgattctccctttcagtctcctta

SEQ ID NO: 78391 - DNA, 25 bp, Artificial
  Probe
gcttggctatcatcaaacaatcaac

SEQ ID NO: 78392 - DNA, 25 bp, Artificial
  Probe
aatggcttggctatcatcaaacaat

SEQ ID NO: 78393 - DNA, 25 bp, Artificial
  Probe
tttgattctccctttcagtctcctt

SEQ ID NO: 78394 - DNA, 25 bp, Artificial
  Probe
atcatcaaacaatcaacttaccttg

SEQ ID NO: 78395 - DNA, 25 bp, Artificial
  Probe
atggcttggctatcatcaaacaatc

SEQ ID NO: 78396 - DNA, 25 bp, Artificial
  Probe
ggcttggctatcatcaaacaatcaa

SEQ ID NO: 78397 - DNA, 25 bp, Artificial
  Probe
ctatcatcaaacaatcaacttacct

SEQ ID NO: 78398 - DNA, 25 bp, Artificial
  Probe
atcaacttaccttgcatctctgtgg

SEQ ID NO: 78399 - DNA, 25 bp, Artificial
  Probe
aaacaatcaacttaccttgcatctc

SEQ ID NO: 78400 - DNA, 25 bp, Artificial
  Probe
caaacaatcaacttaccttgcatct

SEQ ID NO: 78401 - DNA, 25 bp, Artificial
  Probe
tcaaacaatcaacttaccttgcatc

SEQ ID NO: 78402 - DNA, 25 bp, Artificial
  Probe
atcaaacaatcaacttaccttgcat

SEQ ID NO: 78403 - DNA, 25 bp, Artificial
  Probe
catcaaacaatcaacttaccttgca

SEQ ID NO: 78404 - DNA, 25 bp, Artificial
  Probe
tggcttggctatcatcaaacaatca

SEQ ID NO: 78405 - DNA, 25 bp, Artificial
  Probe
tatcatcaaacaatcaacttacctt

SEQ ID NO: 78406 - DNA, 25 bp, Artificial
  Probe
aaaacttaatggcttggctatcatc

SEQ ID NO: 78407 - DNA, 25 bp, Artificial
  Probe
gcagagaagcacattcaaaacttaa

SEQ ID NO: 78408 - DNA, 25 bp, Artificial
  Probe
caaaacttaatggcttggctatcat

SEQ ID NO: 78409 - DNA, 25 bp, Artificial
  Probe
ttcaaaacttaatggcttggctatc

SEQ ID NO: 78410 - DNA, 25 bp, Artificial
  Probe
attcaaaacttaatggcttggctat

SEQ ID NO: 78411 - DNA, 25 bp, Artificial
  Probe
ttctccctttcagtctccttatgaa

SEQ ID NO: 78412 - DNA, 25 bp, Artificial
  Probe
tcaaaacttaatggcttggctatca

SEQ ID NO: 78413 - DNA, 25 bp, Artificial
  Probe
cagagaagcacattcaaaacttaat

SEQ ID NO: 78414 - DNA, 25 bp, Artificial
  Probe
ttttgattctccctttcagtctcct

SEQ ID NO: 78415 - DNA, 25 bp, Artificial
  Probe
ggcagagaagcacattcaaaactta

SEQ ID NO: 78416 - DNA, 25 bp, Artificial
  Probe
acaccacaattctccctacttaatg

SEQ ID NO: 78417 - DNA, 25 bp, Artificial
  Probe
cacaccacaattctccctacttaat

SEQ ID NO: 78418 - DNA, 25 bp, Artificial
  Probe
taccctggctgttgataaataatgc

SEQ ID NO: 78419 - DNA, 25 bp, Artificial
  Probe
ataccctggctgttgataaataatg

SEQ ID NO: 78420 - DNA, 25 bp, Artificial
  Probe
cataccctggctgttgataaataat

SEQ ID NO: 78421 - DNA, 25 bp, Artificial
  Probe
tggaattagtggagtttcgtcatta

SEQ ID NO: 78422 - DNA, 25 bp, Artificial
  Probe
ggaattagtggagtttcgtcattaa

SEQ ID NO: 78423 - DNA, 25 bp, Artificial
  Probe
gtggaattagtggagtttcgtcatt

SEQ ID NO: 78424 - DNA, 25 bp, Artificial
  Probe
tgtggaattagtggagtttcgtcat

SEQ ID NO: 78425 - DNA, 25 bp, Artificial
  Probe
atgtggaattagtggagtttcgtca

SEQ ID NO: 78426 - DNA, 25 bp, Artificial
  Probe
gaattagtggagtttcgtcattaaa

SEQ ID NO: 78427 - DNA, 25 bp, Artificial
  Probe
tatggaagcgtggacattcaggtta

SEQ ID NO: 78428 - DNA, 25 bp, Artificial
  Probe
ccataccctggctgttgataaataa

SEQ ID NO: 78429 - DNA, 25 bp, Artificial
  Probe
catgtggaattagtggagtttcgtc

SEQ ID NO: 78430 - DNA, 25 bp, Artificial
  Probe
accacaattctccctacttaatgga

SEQ ID NO: 78431 - DNA, 25 bp, Artificial
  Probe
caccacaattctccctacttaatgg

SEQ ID NO: 78432 - DNA, 25 bp, Artificial
  Probe
gcacaccacaattctccctacttaa

SEQ ID NO: 78433 - DNA, 25 bp, Artificial
  Probe
tccataccctggctgttgataaata

SEQ ID NO: 78434 - DNA, 25 bp, Artificial
  Probe
ttccataccctggctgttgataaat

SEQ ID NO: 78435 - DNA, 25 bp, Artificial
  Probe
atttccataccctggctgttgataa

SEQ ID NO: 78436 - DNA, 25 bp, Artificial
  Probe
aatttccataccctggctgttgata

SEQ ID NO: 78437 - DNA, 25 bp, Artificial
  Probe
tttccataccctggctgttgataaa

SEQ ID NO: 78438 - DNA, 25 bp, Artificial
  Probe
agagtatggaagcgtggacattcag

SEQ ID NO: 78439 - DNA, 25 bp, Artificial
  Probe
agcacaccacaattctccctactta

SEQ ID NO: 78440 - DNA, 25 bp, Artificial
  Probe
ccttctttcacctttgaatttccat

SEQ ID NO: 78441 - DNA, 25 bp, Artificial
  Probe
ctttcacctttgaatttccataccc

SEQ ID NO: 78442 - DNA, 25 bp, Artificial
  Probe
atccttctttcacctttgaatttcc

SEQ ID NO: 78443 - DNA, 25 bp, Artificial
  Probe
ttcctgatgaaacttcccagacaac

SEQ ID NO: 78444 - DNA, 25 bp, Artificial
  Probe
tttcacctttgaatttccataccct

SEQ ID NO: 78445 - DNA, 25 bp, Artificial
  Probe
tctttcacctttgaatttccatacc

SEQ ID NO: 78446 - DNA, 25 bp, Artificial
  Probe
tccttctttcacctttgaatttcca

SEQ ID NO: 78447 - DNA, 25 bp, Artificial
  Probe
cagagtatggaagcgtggacattca

SEQ ID NO: 78448 - DNA, 25 bp, Artificial
  Probe
ttcacctttgaatttccataccctg

SEQ ID NO: 78449 - DNA, 25 bp, Artificial
  Probe
tcacctttgaatttccataccctgg

SEQ ID NO: 78450 - DNA, 25 bp, Artificial
  Probe
tttcctgatgaaacttcccagacaa

SEQ ID NO: 78451 - DNA, 25 bp, Artificial
  Probe
tttgaatttccataccctggctgtt

SEQ ID NO: 78452 - DNA, 25 bp, Artificial
  Probe
ttatacatgtggaattagtggagtt

SEQ ID NO: 78453 - DNA, 25 bp, Artificial
  Probe
accctggctgttgataaataatgca

SEQ ID NO: 78454 - DNA, 25 bp, Artificial
  Probe
tcgcccaactttaagtgaaaattaa

SEQ ID NO: 78455 - DNA, 25 bp, Artificial
  Probe
atcgcccaactttaagtgaaaatta

SEQ ID NO: 78456 - DNA, 25 bp, Artificial
  Probe
gatcgcccaactttaagtgaaaatt

SEQ ID NO: 78457 - DNA, 25 bp, Artificial
  Probe
ccctggctgttgataaataatgcag

SEQ ID NO: 78458 - DNA, 25 bp, Artificial
  Probe
gaatttccataccctggctgttgat

SEQ ID NO: 78459 - DNA, 25 bp, Artificial
  Probe
aatccttctttcacctttgaatttc

SEQ ID NO: 78460 - DNA, 25 bp, Artificial
  Probe
atggaagcgtggacattcaggttag

SEQ ID NO: 78461 - DNA, 25 bp, Artificial
  Probe
ctatgaggagatgatgcagattgag

SEQ ID NO: 78462 - DNA, 25 bp, Artificial
  Probe
gactatgaggagatgatgcagattg

SEQ ID NO: 78463 - DNA, 25 bp, Artificial
  Probe
tatgaggagatgatgcagattgagt

SEQ ID NO: 78464 - DNA, 25 bp, Artificial
  Probe
actatgaggagatgatgcagattga

SEQ ID NO: 78465 - DNA, 25 bp, Artificial
  Probe
gagatgatgcagattgagtgtgaag

SEQ ID NO: 78466 - DNA, 25 bp, Artificial
  Probe
ggactatgaggagatgatgcagatt

SEQ ID NO: 78467 - DNA, 25 bp, Artificial
  Probe
gatgatgcagattgagtgtgaagtc

SEQ ID NO: 78468 - DNA, 25 bp, Artificial
  Probe
agatgatgcagattgagtgtgaagt

SEQ ID NO: 78469 - DNA, 25 bp, Artificial
  Probe
atgaggagatgatgcagattgagtg

SEQ ID NO: 78470 - DNA, 25 bp, Artificial
  Probe
cagattgagtgtgaagtcatggaca

SEQ ID NO: 78471 - DNA, 25 bp, Artificial
  Probe
gatgcagattgagtgtgaagtcatg

SEQ ID NO: 78472 - DNA, 25 bp, Artificial
  Probe
ggagatgatgcagattgagtgtgaa

SEQ ID NO: 78473 - DNA, 25 bp, Artificial
  Probe
tgatgcagattgagtgtgaagtcat

SEQ ID NO: 78474 - DNA, 25 bp, Artificial
  Probe
atgatgcagattgagtgtgaagtca

SEQ ID NO: 78475 - DNA, 25 bp, Artificial
  Probe
gaggagatgatgcagattgagtgtg

SEQ ID NO: 78476 - DNA, 25 bp, Artificial
  Probe
aggagatgatgcagattgagtgtga

SEQ ID NO: 78477 - DNA, 25 bp, Artificial
  Probe
tgaggagatgatgcagattgagtgt

SEQ ID NO: 78478 - DNA, 25 bp, Artificial
  Probe
atgcagattgagtgtgaagtcatgg

SEQ ID NO: 78479 - DNA, 25 bp, Artificial
  Probe
gcagattgagtgtgaagtcatggac

SEQ ID NO: 78480 - DNA, 25 bp, Artificial
  Probe
gggactatgaggagatgatgcagat

SEQ ID NO: 78481 - DNA, 25 bp, Artificial
  Probe
tgcagattgagtgtgaagtcatgga

SEQ ID NO: 78482 - DNA, 25 bp, Artificial
  Probe
agattgagtgtgaagtcatggacac

SEQ ID NO: 78483 - DNA, 25 bp, Artificial
  Probe
gattgagtgtgaagtcatggacacc

SEQ ID NO: 78484 - DNA, 25 bp, Artificial
  Probe
attgagtgtgaagtcatggacacca

SEQ ID NO: 78485 - DNA, 25 bp, Artificial
  Probe
gacaccaggggattcacatcaagac

SEQ ID NO: 78486 - DNA, 25 bp, Artificial
  Probe
ttgagtgtgaagtcatggacaccag

SEQ ID NO: 78487 - DNA, 25 bp, Artificial
  Probe
ggggactatgaggagatgatgcaga

SEQ ID NO: 78488 - DNA, 25 bp, Artificial
  Probe
tgtgtattgtgttctatgtccactt

SEQ ID NO: 78489 - DNA, 25 bp, Artificial
  Probe
ttgtgtattgtgttctatgtccact

SEQ ID NO: 78490 - DNA, 25 bp, Artificial
  Probe
tagaagtgaagctgtagacaagatc

SEQ ID NO: 78491 - DNA, 25 bp, Artificial
  Probe
atagaagtgaagctgtagacaagat

SEQ ID NO: 78492 - DNA, 25 bp, Artificial
  Probe
tatagaagtgaagctgtagacaaga

SEQ ID NO: 78493 - DNA, 25 bp, Artificial
  Probe
tgtccactttctgtcctattcttac

SEQ ID NO: 78494 - DNA, 25 bp, Artificial
  Probe
gttctatgtccactttctgtcctat

SEQ ID NO: 78495 - DNA, 25 bp, Artificial
  Probe
tctatgtccactttctgtcctattc

SEQ ID NO: 78496 - DNA, 25 bp, Artificial
  Probe
ctatgtccactttctgtcctattct

SEQ ID NO: 78497 - DNA, 25 bp, Artificial
  Probe
atgtccactttctgtcctattctta

SEQ ID NO: 78498 - DNA, 25 bp, Artificial
  Probe
tatgtccactttctgtcctattctt

SEQ ID NO: 78499 - DNA, 25 bp, Artificial
  Probe
ttctatgtccactttctgtcctatt

SEQ ID NO: 78500 - DNA, 25 bp, Artificial
  Probe
tgttctatgtccactttctgtccta

SEQ ID NO: 78501 - DNA, 25 bp, Artificial
  Probe
caagagactatagaagtgaagctgt

SEQ ID NO: 78502 - DNA, 25 bp, Artificial
  Probe
acaagagactatagaagtgaagctg

SEQ ID NO: 78503 - DNA, 25 bp, Artificial
  Probe
gactatagaagtgaagctgtagaca

SEQ ID NO: 78504 - DNA, 25 bp, Artificial
  Probe
cgaagagggttgtttcataaaggta

SEQ ID NO: 78505 - DNA, 25 bp, Artificial
  Probe
ctatagaagtgaagctgtagacaag

SEQ ID NO: 78506 - DNA, 25 bp, Artificial
  Probe
atttgtgtattgtgttctatgtcca

SEQ ID NO: 78507 - DNA, 25 bp, Artificial
  Probe
aagtgaagctgtagacaagatccaa

SEQ ID NO: 78508 - DNA, 25 bp, Artificial
  Probe
caactccacaagagactatagaagt

SEQ ID NO: 78509 - DNA, 25 bp, Artificial
  Probe
acaactccacaagagactatagaag

SEQ ID NO: 78510 - DNA, 25 bp, Artificial
  Probe
agagggttgtttcataaaggtaatg

SEQ ID NO: 78511 - DNA, 25 bp, Artificial
  Probe
agactatagaagtgaagctgtagac

SEQ ID NO: 78512 - DNA, 25 bp, Artificial
  Probe
gaagagggttgtttcataaaggtaa

SEQ ID NO: 78513 - DNA, 25 bp, Artificial
  Probe
agaagtgaagctgtagacaagatcc

SEQ ID NO: 78514 - DNA, 25 bp, Artificial
  Probe
actatagaagtgaagctgtagacaa

SEQ ID NO: 78515 - DNA, 25 bp, Artificial
  Probe
gagactatagaagtgaagctgtaga

SEQ ID NO: 78516 - DNA, 25 bp, Artificial
  Probe
agagactatagaagtgaagctgtag

SEQ ID NO: 78517 - DNA, 25 bp, Artificial
  Probe
gtacaactccacaagagactataga

SEQ ID NO: 78518 - DNA, 25 bp, Artificial
  Probe
agtacaactccacaagagactatag

SEQ ID NO: 78519 - DNA, 25 bp, Artificial
  Probe
aagagggttgtttcataaaggtaat

SEQ ID NO: 78520 - DNA, 25 bp, Artificial
  Probe
aacgaagagggttgtttcataaagg

SEQ ID NO: 78521 - DNA, 25 bp, Artificial
  Probe
tgttatccacagagagatgcagata

SEQ ID NO: 78522 - DNA, 25 bp, Artificial
  Probe
gaagtgaagctgtagacaagatcca

SEQ ID NO: 78523 - DNA, 25 bp, Artificial
  Probe
aagagactatagaagtgaagctgta

SEQ ID NO: 78524 - DNA, 25 bp, Artificial
  Probe
cacaagagactatagaagtgaagct

SEQ ID NO: 78525 - DNA, 25 bp, Artificial
  Probe
actccacaagagactatagaagtga

SEQ ID NO: 78526 - DNA, 25 bp, Artificial
  Probe
tccactttctgtcctattcttacac

SEQ ID NO: 78527 - DNA, 25 bp, Artificial
  Probe
gtccactttctgtcctattcttaca

SEQ ID NO: 78528 - DNA, 25 bp, Artificial
  Probe
aactccacaagagactatagaagtg

SEQ ID NO: 78529 - DNA, 25 bp, Artificial
  Probe
ccacaagagactatagaagtgaagc

SEQ ID NO: 78530 - DNA, 25 bp, Artificial
  Probe
tccacaagagactatagaagtgaag

SEQ ID NO: 78531 - DNA, 25 bp, Artificial
  Probe
ctccacaagagactatagaagtgaa

SEQ ID NO: 78532 - DNA, 25 bp, Artificial
  Probe
agggattggaaaggtacaaactatt

SEQ ID NO: 78533 - DNA, 25 bp, Artificial
  Probe
ggatatgaggaggttatgtagacaa

SEQ ID NO: 78534 - DNA, 25 bp, Artificial
  Probe
actggtatgatagggaagaaagaac

SEQ ID NO: 78535 - DNA, 25 bp, Artificial
  Probe
cactggtatgatagggaagaaagaa

SEQ ID NO: 78536 - DNA, 25 bp, Artificial
  Probe
gacactggtatgatagggaagaaag

SEQ ID NO: 78537 - DNA, 25 bp, Artificial
  Probe
aagggatatgaggaggttatgtaga

SEQ ID NO: 78538 - DNA, 25 bp, Artificial
  Probe
agggatatgaggaggttatgtagac

SEQ ID NO: 78539 - DNA, 25 bp, Artificial
  Probe
acactggtatgatagggaagaaaga

SEQ ID NO: 78540 - DNA, 25 bp, Artificial
  Probe
gaagggatatgaggaggttatgtag

SEQ ID NO: 78541 - DNA, 25 bp, Artificial
  Probe
gaagaatgtgaggaagggatatgag

SEQ ID NO: 78542 - DNA, 25 bp, Artificial
  Probe
ggaagggatatgaggaggttatgta

SEQ ID NO: 78543 - DNA, 25 bp, Artificial
  Probe
tacgaagaatgtgaggaagggatat

SEQ ID NO: 78544 - DNA, 25 bp, Artificial
  Probe
agggaagaaagaaccatagaaatgt

SEQ ID NO: 78545 - DNA, 25 bp, Artificial
  Probe
aatgtatccaggtgtgtccaacttg

SEQ ID NO: 78546 - DNA, 25 bp, Artificial
  Probe
gggaagaaagaaccatagaaatgtc

SEQ ID NO: 78547 - DNA, 25 bp, Artificial
  Probe
gggatatgaggaggttatgtagaca

SEQ ID NO: 78548 - DNA, 25 bp, Artificial
  Probe
tgatagggaagaaagaaccatagaa

SEQ ID NO: 78549 - DNA, 25 bp, Artificial
  Probe
ggaagaaagaaccatagaaatgtca

SEQ ID NO: 78550 - DNA, 25 bp, Artificial
  Probe
ctacgaagaatgtgaggaagggata

SEQ ID NO: 78551 - DNA, 25 bp, Artificial
  Probe
gagaagtgggtgtttatctgtgaaa

SEQ ID NO: 78552 - DNA, 25 bp, Artificial
  Probe
gaggaagggatatgaggaggttatg

SEQ ID NO: 78553 - DNA, 25 bp, Artificial
  Probe
ggacactggtatgatagggaagaaa

SEQ ID NO: 78554 - DNA, 25 bp, Artificial
  Probe
agaaagaaccatagaaatgtcacag

SEQ ID NO: 78555 - DNA, 25 bp, Artificial
  Probe
aagaatgtgaggaagggatatgagg

SEQ ID NO: 78556 - DNA, 25 bp, Artificial
  Probe
atgatagggaagaaagaaccataga

SEQ ID NO: 78557 - DNA, 25 bp, Artificial
  Probe
tgaggaagggatatgaggaggttat

SEQ ID NO: 78558 - DNA, 25 bp, Artificial
  Probe
aagaaagaaccatagaaatgtcaca

SEQ ID NO: 78559 - DNA, 25 bp, Artificial
  Probe
gaatgtgaggaagggatatgaggag

SEQ ID NO: 78560 - DNA, 25 bp, Artificial
  Probe
cgaagaatgtgaggaagggatatga

SEQ ID NO: 78561 - DNA, 25 bp, Artificial
  Probe
gatagggaagaaagaaccatagaaa

SEQ ID NO: 78562 - DNA, 25 bp, Artificial
  Probe
gaagaaagaaccatagaaatgtcac

SEQ ID NO: 78563 - DNA, 25 bp, Artificial
  Probe
tagggaagaaagaaccatagaaatg

SEQ ID NO: 78564 - DNA, 25 bp, Artificial
  Probe
aggaagggatatgaggaggttatgt

SEQ ID NO: 78565 - DNA, 25 bp, Artificial
  Probe
tgagaagtgggtgtttatctgtgaa

SEQ ID NO: 78566 - DNA, 25 bp, Artificial
  Probe
acgaagaatgtgaggaagggatatg

SEQ ID NO: 78567 - DNA, 25 bp, Artificial
  Probe
agaatgtgaggaagggatatgagga

SEQ ID NO: 78568 - DNA, 25 bp, Artificial
  Probe
ctgagaagtgggtgtttatctgtga

SEQ ID NO: 78569 - DNA, 25 bp, Artificial
  Probe
tctgagaagtgggtgtttatctgtg

SEQ ID NO: 78570 - DNA, 25 bp, Artificial
  Probe
gtctgagaagtgggtgtttatctgt

SEQ ID NO: 78571 - DNA, 25 bp, Artificial
  Probe
gtgaggaagggatatgaggaggtta

SEQ ID NO: 78572 - DNA, 25 bp, Artificial
  Probe
gatatgaggaggttatgtagacaaa

SEQ ID NO: 78573 - DNA, 25 bp, Artificial
  Probe
atagggaagaaagaaccatagaaat

SEQ ID NO: 78574 - DNA, 25 bp, Artificial
  Probe
ggtatgatagggaagaaagaaccat

SEQ ID NO: 78575 - DNA, 25 bp, Artificial
  Probe
ctggtatgatagggaagaaagaacc

SEQ ID NO: 78576 - DNA, 25 bp, Artificial
  Probe
ctggtctgagaagtgggtgtttatc

SEQ ID NO: 78577 - DNA, 25 bp, Artificial
  Probe
gggacactggtatgatagggaagaa

SEQ ID NO: 78578 - DNA, 25 bp, Artificial
  Probe
atacacacattctctctctctctct

SEQ ID NO: 78579 - DNA, 25 bp, Artificial
  Probe
catacacacattctctctctctctc

SEQ ID NO: 78580 - DNA, 25 bp, Artificial
  Probe
taacacacacatacacacattctct

SEQ ID NO: 78581 - DNA, 25 bp, Artificial
  Probe
acatacacacattctctctctctct

SEQ ID NO: 78582 - DNA, 25 bp, Artificial
  Probe
cacatacacacattctctctctctc

SEQ ID NO: 78583 - DNA, 25 bp, Artificial
  Probe
tacacacattctctctctctctctc

SEQ ID NO: 78584 - DNA, 25 bp, Artificial
  Probe
ttaacacacacatacacacattctc

SEQ ID NO: 78585 - DNA, 25 bp, Artificial
  Probe
gcattaacacacacatacacacatt

SEQ ID NO: 78586 - DNA, 25 bp, Artificial
  Probe
atagacgcattaacacacacataca

SEQ ID NO: 78587 - DNA, 25 bp, Artificial
  Probe
cacattctctctctctctctctctc

SEQ ID NO: 78588 - DNA, 25 bp, Artificial
  Probe
acacatacacacattctctctctct

SEQ ID NO: 78589 - DNA, 25 bp, Artificial
  Probe
cacacatacacacattctctctctc

SEQ ID NO: 78590 - DNA, 25 bp, Artificial
  Probe
acattctctctctctctctctctct

SEQ ID NO: 78591 - DNA, 25 bp, Artificial
  Probe
tatagacgcattaacacacacatac

SEQ ID NO: 78592 - DNA, 25 bp, Artificial
  Probe
cattaacacacacatacacacattc

SEQ ID NO: 78593 - DNA, 25 bp, Artificial
  Probe
attaacacacacatacacacattct

SEQ ID NO: 78594 - DNA, 25 bp, Artificial
  Probe
aatatagacgcattaacacacacat

SEQ ID NO: 78595 - DNA, 25 bp, Artificial
  Probe
aacacacacatacacacattctctc

SEQ ID NO: 78596 - DNA, 25 bp, Artificial
  Probe
acacattctctctctctctctctct

SEQ ID NO: 78597 - DNA, 25 bp, Artificial
  Probe
cacacattctctctctctctctctc

SEQ ID NO: 78598 - DNA, 25 bp, Artificial
  Probe
acacacatacacacattctctctct

SEQ ID NO: 78599 - DNA, 25 bp, Artificial
  Probe
cacacacatacacacattctctctc

SEQ ID NO: 78600 - DNA, 25 bp, Artificial
  Probe
tagacgcattaacacacacatacac

SEQ ID NO: 78601 - DNA, 25 bp, Artificial
  Probe
aagcaccaataatatagacgcatta

SEQ ID NO: 78602 - DNA, 25 bp, Artificial
  Probe
atatagacgcattaacacacacata

SEQ ID NO: 78603 - DNA, 25 bp, Artificial
  Probe
gcaccaataatatagacgcattaac

SEQ ID NO: 78604 - DNA, 25 bp, Artificial
  Probe
agcaccaataatatagacgcattaa

SEQ ID NO: 78605 - DNA, 25 bp, Artificial
  Probe
acacacattctctctctctctctct

SEQ ID NO: 78606 - DNA, 25 bp, Artificial
  Probe
acacacacatacacacattctctct

SEQ ID NO: 78607 - DNA, 25 bp, Artificial
  Probe
taatatagacgcattaacacacaca

SEQ ID NO: 78608 - DNA, 25 bp, Artificial
  Probe
cgcattaacacacacatacacacat

SEQ ID NO: 78609 - DNA, 25 bp, Artificial
  Probe
gagaaagcaccaataatatagacgc

SEQ ID NO: 78610 - DNA, 25 bp, Artificial
  Probe
ataatatagacgcattaacacacac

SEQ ID NO: 78611 - DNA, 25 bp, Artificial
  Probe
ccaataatatagacgcattaacaca

SEQ ID NO: 78612 - DNA, 25 bp, Artificial
  Probe
accaataatatagacgcattaacac

SEQ ID NO: 78613 - DNA, 25 bp, Artificial
  Probe
caccaataatatagacgcattaaca

SEQ ID NO: 78614 - DNA, 25 bp, Artificial
  Probe
gaaagcaccaataatatagacgcat

SEQ ID NO: 78615 - DNA, 25 bp, Artificial
  Probe
agaaagcaccaataatatagacgca

SEQ ID NO: 78616 - DNA, 25 bp, Artificial
  Probe
agagaaagaaagaaggaaggaaaga

SEQ ID NO: 78617 - DNA, 25 bp, Artificial
  Probe
agagagaaagaaagaaggaaggaaa

SEQ ID NO: 78618 - DNA, 25 bp, Artificial
  Probe
aagagagaaagaaagaaggaaggaa

SEQ ID NO: 78619 - DNA, 25 bp, Artificial
  Probe
aaagagagaaagaaagaaggaagga

SEQ ID NO: 78620 - DNA, 25 bp, Artificial
  Probe
ggaaggaaagaaagaaagaaactgc

SEQ ID NO: 78621 - DNA, 25 bp, Artificial
  Probe
aggaaggaaagaaagaaagaaactg

SEQ ID NO: 78622 - DNA, 25 bp, Artificial
  Probe
gagagaaagaaagaaggaaggaaag

SEQ ID NO: 78623 - DNA, 25 bp, Artificial
  Probe
acacattgccataaagtttcagtta

SEQ ID NO: 78624 - DNA, 25 bp, Artificial
  Probe
aacacattgccataaagtttcagtt

SEQ ID NO: 78625 - DNA, 25 bp, Artificial
  Probe
caacaacacattgccataaagtttc

SEQ ID NO: 78626 - DNA, 25 bp, Artificial
  Probe
aacaacacattgccataaagtttca

SEQ ID NO: 78627 - DNA, 25 bp, Artificial
  Probe
aaagacaacaacacattgccataaa

SEQ ID NO: 78628 - DNA, 25 bp, Artificial
  Probe
acaacaacacattgccataaagttt

SEQ ID NO: 78629 - DNA, 25 bp, Artificial
  Probe
caacacattgccataaagtttcagt

SEQ ID NO: 78630 - DNA, 25 bp, Artificial
  Probe
acaacacattgccataaagtttcag

SEQ ID NO: 78631 - DNA, 25 bp, Artificial
  Probe
aagacaacaacacattgccataaag

SEQ ID NO: 78632 - DNA, 25 bp, Artificial
  Probe
gaaagacaacaacacattgccataa

SEQ ID NO: 78633 - DNA, 25 bp, Artificial
  Probe
gacaacaacacattgccataaagtt

SEQ ID NO: 78634 - DNA, 25 bp, Artificial
  Probe
cacattgccataaagtttcagttat

SEQ ID NO: 78635 - DNA, 25 bp, Artificial
  Probe
agacaacaacacattgccataaagt

SEQ ID NO: 78636 - DNA, 25 bp, Artificial
  Probe
ctaatctccagtaccgatgcaatga

SEQ ID NO: 78637 - DNA, 25 bp, Artificial
  Probe
tctaatctccagtaccgatgcaatg

SEQ ID NO: 78638 - DNA, 25 bp, Artificial
  Probe
gtctaatctccagtaccgatgcaat

SEQ ID NO: 78639 - DNA, 25 bp, Artificial
  Probe
taatctccagtaccgatgcaatgac

SEQ ID NO: 78640 - DNA, 25 bp, Artificial
  Probe
tggcgagacaagacatcctatagat

SEQ ID NO: 78641 - DNA, 25 bp, Artificial
  Probe
acattgccataaagtttcagttatt

SEQ ID NO: 78642 - DNA, 25 bp, Artificial
  Probe
ggaaagacaacaacacattgccata

SEQ ID NO: 78643 - DNA, 25 bp, Artificial
  Probe
aacatcatttggtctaatctccagt

SEQ ID NO: 78644 - DNA, 25 bp, Artificial
  Probe
acatcatttggtctaatctccagta

SEQ ID NO: 78645 - DNA, 25 bp, Artificial
  Probe
aaacatcatttggtctaatctccag

SEQ ID NO: 78646 - DNA, 25 bp, Artificial
  Probe
atcatttggtctaatctccagtacc

SEQ ID NO: 78647 - DNA, 25 bp, Artificial
  Probe
gttggcgagacaagacatcctatag

SEQ ID NO: 78648 - DNA, 25 bp, Artificial
  Probe
ggttggcgagacaagacatcctata

SEQ ID NO: 78649 - DNA, 25 bp, Artificial
  Probe
ttggcgagacaagacatcctataga

SEQ ID NO: 78650 - DNA, 25 bp, Artificial
  Probe
atttggtctaatctccagtaccgat

SEQ ID NO: 78651 - DNA, 25 bp, Artificial
  Probe
catcatttggtctaatctccagtac

SEQ ID NO: 78652 - DNA, 25 bp, Artificial
  Probe
cattgccataaagtttcagttattt

SEQ ID NO: 78653 - DNA, 25 bp, Artificial
  Probe
caaggggtattactactcaggtttt

SEQ ID NO: 78654 - DNA, 25 bp, Artificial
  Probe
ctttcaaggggtattactactcagg

SEQ ID NO: 78655 - DNA, 25 bp, Artificial
  Probe
tttggtctaatctccagtaccgatg

SEQ ID NO: 78656 - DNA, 25 bp, Artificial
  Probe
catttggtctaatctccagtaccga

SEQ ID NO: 78657 - DNA, 25 bp, Artificial
  Probe
tcatttggtctaatctccagtaccg

SEQ ID NO: 78658 - DNA, 25 bp, Artificial
  Probe
tcaaggggtattactactcaggttt

SEQ ID NO: 78659 - DNA, 25 bp, Artificial
  Probe
ttcaaggggtattactactcaggtt

SEQ ID NO: 78660 - DNA, 25 bp, Artificial
  Probe
tttcaaggggtattactactcaggt

SEQ ID NO: 78661 - DNA, 25 bp, Artificial
  Probe
aaggggtattactactcaggtttta

SEQ ID NO: 78662 - DNA, 25 bp, Artificial
  Probe
ggggtattactactcaggttttaac

SEQ ID NO: 78663 - DNA, 25 bp, Artificial
  Probe
aggggtattactactcaggttttaa

SEQ ID NO: 78664 - DNA, 25 bp, Artificial
  Probe
gaaaacatcatttggtctaatctcc

SEQ ID NO: 78665 - DNA, 25 bp, Artificial
  Probe
ctacattcgggtgaagctctatgag

SEQ ID NO: 78666 - DNA, 25 bp, Artificial
  Probe
ttttaaccccaggaaagacaacaac

SEQ ID NO: 78667 - DNA, 25 bp, Artificial
  Probe
aggaaagacaacaacacattgccat

SEQ ID NO: 78668 - DNA, 25 bp, Artificial
  Probe
tcagtattctcagatggactcagat

SEQ ID NO: 78669 - DNA, 25 bp, Artificial
  Probe
cagtattctcagatggactcagatc

SEQ ID NO: 78670 - DNA, 25 bp, Artificial
  Probe
tctctcctgtcagtattctcagatg

SEQ ID NO: 78671 - DNA, 25 bp, Artificial
  Probe
gtctctcctgtcagtattctcagat

SEQ ID NO: 78672 - DNA, 25 bp, Artificial
  Probe
aagtctctcctgtcagtattctcag

SEQ ID NO: 78673 - DNA, 25 bp, Artificial
  Probe
gtcagtattctcagatggactcaga

SEQ ID NO: 78674 - DNA, 25 bp, Artificial
  Probe
tgtcagtattctcagatggactcag

SEQ ID NO: 78675 - DNA, 25 bp, Artificial
  Probe
ctgtcagtattctcagatggactca

SEQ ID NO: 78676 - DNA, 25 bp, Artificial
  Probe
ctctcctgtcagtattctcagatgg

SEQ ID NO: 78677 - DNA, 25 bp, Artificial
  Probe
agtctctcctgtcagtattctcaga

SEQ ID NO: 78678 - DNA, 25 bp, Artificial
  Probe
cctgtcagtattctcagatggactc

SEQ ID NO: 78679 - DNA, 25 bp, Artificial
  Probe
agtattctcagatggactcagatcc

SEQ ID NO: 78680 - DNA, 25 bp, Artificial
  Probe
tcctgtctcctttctccttattctc

SEQ ID NO: 78681 - DNA, 25 bp, Artificial
  Probe
aaagtctctcctgtcagtattctca

SEQ ID NO: 78682 - DNA, 25 bp, Artificial
  Probe
gtcctgtctcctttctccttattct

SEQ ID NO: 78683 - DNA, 25 bp, Artificial
  Probe
agtcctgtctcctttctccttattc

SEQ ID NO: 78684 - DNA, 25 bp, Artificial
  Probe
ctcctgtcagtattctcagatggac

SEQ ID NO: 78685 - DNA, 25 bp, Artificial
  Probe
tctcctgtcagtattctcagatgga

SEQ ID NO: 78686 - DNA, 25 bp, Artificial
  Probe
taaagtctctcctgtcagtattctc

SEQ ID NO: 78687 - DNA, 25 bp, Artificial
  Probe
tatgcttcctttgaacccagttaaa

SEQ ID NO: 78688 - DNA, 25 bp, Artificial
  Probe
agttaaagtctctcctgtcagtatt

SEQ ID NO: 78689 - DNA, 25 bp, Artificial
  Probe
gttaaagtctctcctgtcagtattc

SEQ ID NO: 78690 - DNA, 25 bp, Artificial
  Probe
ttaaagtctctcctgtcagtattct

SEQ ID NO: 78691 - DNA, 25 bp, Artificial
  Probe
tcctgtcagtattctcagatggact

SEQ ID NO: 78692 - DNA, 25 bp, Artificial
  Probe
acacaatcaatgtactatgcaagtt

SEQ ID NO: 78693 - DNA, 25 bp, Artificial
  Probe
cctgtctcctttctccttattctcc

SEQ ID NO: 78694 - DNA, 25 bp, Artificial
  Probe
tttgaacccagttaaagtctctcct

SEQ ID NO: 78695 - DNA, 25 bp, Artificial
  Probe
tcactgaggagaagggattgtttac

SEQ ID NO: 78696 - DNA, 25 bp, Artificial
  Probe
gtcactgaggagaagggattgttta

SEQ ID NO: 78697 - DNA, 25 bp, Artificial
  Probe
gagtcctgtctcctttctccttatt

SEQ ID NO: 78698 - DNA, 25 bp, Artificial
  Probe
cagttaaagtctctcctgtcagtat

SEQ ID NO: 78699 - DNA, 25 bp, Artificial
  Probe
aattgtggcaggtgtcattcatctc

SEQ ID NO: 78700 - DNA, 25 bp, Artificial
  Probe
actgaggagaagggattgtttacac

SEQ ID NO: 78701 - DNA, 25 bp, Artificial
  Probe
cactgaggagaagggattgtttaca

SEQ ID NO: 78702 - DNA, 25 bp, Artificial
  Probe
ccagttaaagtctctcctgtcagta

SEQ ID NO: 78703 - DNA, 25 bp, Artificial
  Probe
tctcttcagagtaactgtgaacctt

SEQ ID NO: 78704 - DNA, 25 bp, Artificial
  Probe
tgagtcctgtctcctttctccttat

SEQ ID NO: 78705 - DNA, 25 bp, Artificial
  Probe
atgagtcctgtctcctttctcctta

SEQ ID NO: 78706 - DNA, 25 bp, Artificial
  Probe
ctgaggagaagggattgtttacaca

SEQ ID NO: 78707 - DNA, 25 bp, Artificial
  Probe
ttgaacccagttaaagtctctcctg

SEQ ID NO: 78708 - DNA, 25 bp, Artificial
  Probe
tacacaatcaatgtactatgcaagt

SEQ ID NO: 78709 - DNA, 25 bp, Artificial
  Probe
tgaggagaagggattgtttacacac

SEQ ID NO: 78710 - DNA, 25 bp, Artificial
  Probe
ttcctttgaacccagttaaagtctc

SEQ ID NO: 78711 - DNA, 25 bp, Artificial
  Probe
cttcctttgaacccagttaaagtct

SEQ ID NO: 78712 - DNA, 25 bp, Artificial
  Probe
ctctcttcagagtaactgtgaacct

SEQ ID NO: 78713 - DNA, 25 bp, Artificial
  Probe
tttcttagatgtctgtcctttctcc

SEQ ID NO: 78714 - DNA, 25 bp, Artificial
  Probe
aattaagtctgcttgaacccataca

SEQ ID NO: 78715 - DNA, 25 bp, Artificial
  Probe
aaattaagtctgcttgaacccatac

SEQ ID NO: 78716 - DNA, 25 bp, Artificial
  Probe
ttaagtctgcttgaacccatacaat

SEQ ID NO: 78717 - DNA, 25 bp, Artificial
  Probe
attaagtctgcttgaacccatacaa

SEQ ID NO: 78718 - DNA, 25 bp, Artificial
  Probe
ttaaattaagtctgcttgaacccat

SEQ ID NO: 78719 - DNA, 25 bp, Artificial
  Probe
taagtctgcttgaacccatacaatg

SEQ ID NO: 78720 - DNA, 25 bp, Artificial
  Probe
ttcttagatgtctgtcctttctccg

SEQ ID NO: 78721 - DNA, 25 bp, Artificial
  Probe
taaattaagtctgcttgaacccata

SEQ ID NO: 78722 - DNA, 25 bp, Artificial
  Probe
agtctgcttgaacccatacaatgta

SEQ ID NO: 78723 - DNA, 25 bp, Artificial
  Probe
tttaaattaagtctgcttgaaccca

SEQ ID NO: 78724 - DNA, 25 bp, Artificial
  Probe
cttagatgtctgtcctttctccgtg

SEQ ID NO: 78725 - DNA, 25 bp, Artificial
  Probe
tcttagatgtctgtcctttctccgt

SEQ ID NO: 78726 - DNA, 25 bp, Artificial
  Probe
tctgcttgaacccatacaatgtata

SEQ ID NO: 78727 - DNA, 25 bp, Artificial
  Probe
aagtctgcttgaacccatacaatgt

SEQ ID NO: 78728 - DNA, 25 bp, Artificial
  Probe
ctgcttgaacccatacaatgtatat

SEQ ID NO: 78729 - DNA, 25 bp, Artificial
  Probe
gtctgcttgaacccatacaatgtat

SEQ ID NO: 78730 - DNA, 25 bp, Artificial
  Probe
tgcttgaacccatacaatgtatatt

SEQ ID NO: 78731 - DNA, 25 bp, Artificial
  Probe
ttttcttagatgtctgtcctttctc

SEQ ID NO: 78732 - DNA, 25 bp, Artificial
  Probe
cttttcttagatgtctgtcctttct

SEQ ID NO: 78733 - DNA, 25 bp, Artificial
  Probe
tcttttcttagatgtctgtcctttc

SEQ ID NO: 78734 - DNA, 25 bp, Artificial
  Probe
ttagatgtctgtcctttctccgtgg

SEQ ID NO: 78735 - DNA, 25 bp, Artificial
  Probe
ttaaataaatgcacgttgattgttt

SEQ ID NO: 78736 - DNA, 25 bp, Artificial
  Probe
attaaataaatgcacgttgattgtt

SEQ ID NO: 78737 - DNA, 25 bp, Artificial
  Probe
gcttgaacccatacaatgtatatta

SEQ ID NO: 78738 - DNA, 25 bp, Artificial
  Probe
ttttaaattaagtctgcttgaaccc

SEQ ID NO: 78739 - DNA, 25 bp, Artificial
  Probe
tattaaataaatgcacgttgattgt

SEQ ID NO: 78740 - DNA, 25 bp, Artificial
  Probe
tagatgtctgtcctttctccgtggt

SEQ ID NO: 78741 - DNA, 25 bp, Artificial
  Probe
taaataaatgcacgttgattgtttt

SEQ ID NO: 78742 - DNA, 25 bp, Artificial
  Probe
tgtatattaaataaatgcacgttga

SEQ ID NO: 78743 - DNA, 25 bp, Artificial
  Probe
atattaaataaatgcacgttgattg

SEQ ID NO: 78744 - DNA, 25 bp, Artificial
  Probe
tctacagttcatcagagaagaaacg

SEQ ID NO: 78745 - DNA, 25 bp, Artificial
  Probe
tctaaagacagcctgattgaagaaa

SEQ ID NO: 78746 - DNA, 25 bp, Artificial
  Probe
atcagagaagaaacgggtctaaaga

SEQ ID NO: 78747 - DNA, 25 bp, Artificial
  Probe
catcagagaagaaacgggtctaaag

SEQ ID NO: 78748 - DNA, 25 bp, Artificial
  Probe
ctacagttcatcagagaagaaacgg

SEQ ID NO: 78749 - DNA, 25 bp, Artificial
  Probe
tcatcagagaagaaacgggtctaaa

SEQ ID NO: 78750 - DNA, 25 bp, Artificial
  Probe
ttcatcagagaagaaacgggtctaa

SEQ ID NO: 78751 - DNA, 25 bp, Artificial
  Probe
gttcatcagagaagaaacgggtcta

SEQ ID NO: 78752 - DNA, 25 bp, Artificial
  Probe
tacagttcatcagagaagaaacggg

SEQ ID NO: 78753 - DNA, 25 bp, Artificial
  Probe
gtctaaagacagcctgattgaagaa

SEQ ID NO: 78754 - DNA, 25 bp, Artificial
  Probe
tgtgacatttaagtcccaatggtta

SEQ ID NO: 78755 - DNA, 25 bp, Artificial
  Probe
gtgacatttaagtcccaatggttat

SEQ ID NO: 78756 - DNA, 25 bp, Artificial
  Probe
actgtgaattagataattacccacg

SEQ ID NO: 78757 - DNA, 25 bp, Artificial
  Probe
ttgtgacatttaagtcccaatggtt

SEQ ID NO: 78758 - DNA, 25 bp, Artificial
  Probe
tttgtgacatttaagtcccaatggt

SEQ ID NO: 78759 - DNA, 25 bp, Artificial
  Probe
ggctctacagttcatcagagaagaa

SEQ ID NO: 78760 - DNA, 25 bp, Artificial
  Probe
tgacatttaagtcccaatggttatt

SEQ ID NO: 78761 - DNA, 25 bp, Artificial
  Probe
agagaagaaacgggtctaaagacag

SEQ ID NO: 78762 - DNA, 25 bp, Artificial
  Probe
tcagagaagaaacgggtctaaagac

SEQ ID NO: 78763 - DNA, 25 bp, Artificial
  Probe
ttaagtcccaatggttatttacaaa

SEQ ID NO: 78764 - DNA, 25 bp, Artificial
  Probe
tttaagtcccaatggttatttacaa

SEQ ID NO: 78765 - DNA, 25 bp, Artificial
  Probe
ggtctaaagacagcctgattgaaga

SEQ ID NO: 78766 - DNA, 25 bp, Artificial
  Probe
cagagaagaaacgggtctaaagaca

SEQ ID NO: 78767 - DNA, 25 bp, Artificial
  Probe
ctaaagacagcctgattgaagaaaa

SEQ ID NO: 78768 - DNA, 25 bp, Artificial
  Probe
cagttcatcagagaagaaacgggtc

SEQ ID NO: 78769 - DNA, 25 bp, Artificial
  Probe
gaggctctacagttcatcagagaag

SEQ ID NO: 78770 - DNA, 25 bp, Artificial
  Probe
agttcatcagagaagaaacgggtct

SEQ ID NO: 78771 - DNA, 25 bp, Artificial
  Probe
taagtcccaatggttatttacaaat

SEQ ID NO: 78772 - DNA, 25 bp, Artificial
  Probe
atttaagtcccaatggttatttaca

SEQ ID NO: 78773 - DNA, 25 bp, Artificial
  Probe
ataattacccacgtatcttggactc

SEQ ID NO: 78774 - DNA, 25 bp, Artificial
  Probe
gataattacccacgtatcttggact

SEQ ID NO: 78775 - DNA, 25 bp, Artificial
  Probe
ctgtgaattagataattacccacgt

SEQ ID NO: 78776 - DNA, 25 bp, Artificial
  Probe
aggctctacagttcatcagagaaga

SEQ ID NO: 78777 - DNA, 25 bp, Artificial
  Probe
tcagactgtagtgacttttattccc

SEQ ID NO: 78778 - DNA, 25 bp, Artificial
  Probe
gacatttaagtcccaatggttattt

SEQ ID NO: 78779 - DNA, 25 bp, Artificial
  Probe
gccatcagactgtagtgacttttat

SEQ ID NO: 78780 - DNA, 25 bp, Artificial
  Probe
aagtcccaatggttatttacaaata

SEQ ID NO: 78781 - DNA, 25 bp, Artificial
  Probe
gctctacagttcatcagagaagaaa

SEQ ID NO: 78782 - DNA, 25 bp, Artificial
  Probe
ccatcagactgtagtgacttttatt

SEQ ID NO: 78783 - DNA, 25 bp, Artificial
  Probe
acagttcatcagagaagaaacgggt

SEQ ID NO: 78784 - DNA, 25 bp, Artificial
  Probe
gtgtcactggtacttttcaaactgt

SEQ ID NO: 78785 - DNA, 25 bp, Artificial
  Probe
tgtgtcactggtacttttcaaactg

SEQ ID NO: 78786 - DNA, 25 bp, Artificial
  Probe
tgccatcagactgtagtgactttta

SEQ ID NO: 78787 - DNA, 25 bp, Artificial
  Probe
atcagactgtagtgacttttattcc

SEQ ID NO: 78788 - DNA, 25 bp, Artificial
  Probe
ctctacagttcatcagagaagaaac

SEQ ID NO: 78789 - DNA, 25 bp, Artificial
  Probe
cagtggagagacattagaggagaat

SEQ ID NO: 78790 - DNA, 25 bp, Artificial
  Probe
caagcatgagttactacagccattc

SEQ ID NO: 78791 - DNA, 25 bp, Artificial
  Probe
ccagtggagagacattagaggagaa

SEQ ID NO: 78792 - DNA, 25 bp, Artificial
  Probe
catgagttactacagccattcaacg

SEQ ID NO: 78793 - DNA, 25 bp, Artificial
  Probe
agtggagagacattagaggagaatg

SEQ ID NO: 78794 - DNA, 25 bp, Artificial
  Probe
gcatgagttactacagccattcaac

SEQ ID NO: 78795 - DNA, 25 bp, Artificial
  Probe
agcatgagttactacagccattcaa

SEQ ID NO: 78796 - DNA, 25 bp, Artificial
  Probe
aagcatgagttactacagccattca

SEQ ID NO: 78797 - DNA, 25 bp, Artificial
  Probe
ggagagacattagaggagaatggag

SEQ ID NO: 78798 - DNA, 25 bp, Artificial
  Probe
tggagagacattagaggagaatgga

SEQ ID NO: 78799 - DNA, 25 bp, Artificial
  Probe
gtggagagacattagaggagaatgg

SEQ ID NO: 78800 - DNA, 25 bp, Artificial
  Probe
tatgagaaggagggtgagtttgttg

SEQ ID NO: 78801 - DNA, 25 bp, Artificial
  Probe
gagagacattagaggagaatggagc

SEQ ID NO: 78802 - DNA, 25 bp, Artificial
  Probe
ccaagcatgagttactacagccatt

SEQ ID NO: 78803 - DNA, 25 bp, Artificial
  Probe
atgagttactacagccattcaacgt

SEQ ID NO: 78804 - DNA, 25 bp, Artificial
  Probe
accagtggagagacattagaggaga

SEQ ID NO: 78805 - DNA, 25 bp, Artificial
  Probe
caccagtggagagacattagaggag

SEQ ID NO: 78806 - DNA, 25 bp, Artificial
  Probe
gtgagtttgttgcccagtttaaatt

SEQ ID NO: 78807 - DNA, 25 bp, Artificial
  Probe
tgagtttgttgcccagtttaaattt

SEQ ID NO: 78808 - DNA, 25 bp, Artificial
  Probe
gagacattagaggagaatggagctg

SEQ ID NO: 78809 - DNA, 25 bp, Artificial
  Probe
agagacattagaggagaatggagct

SEQ ID NO: 78810 - DNA, 25 bp, Artificial
  Probe
ggtgagtttgttgcccagtttaaat

SEQ ID NO: 78811 - DNA, 25 bp, Artificial
  Probe
ctgtacaagtctgagatggaggttc

SEQ ID NO: 78812 - DNA, 25 bp, Artificial
  Probe
agtttgttgcccagtttaaatttac

SEQ ID NO: 78813 - DNA, 25 bp, Artificial
  Probe
agacattagaggagaatggagctgg

SEQ ID NO: 78814 - DNA, 25 bp, Artificial
  Probe
gagtttgttgcccagtttaaattta

SEQ ID NO: 78815 - DNA, 25 bp, Artificial
  Probe
tgttgcccagtttaaatttacagtt

SEQ ID NO: 78816 - DNA, 25 bp, Artificial
  Probe
ttgttgcccagtttaaatttacagt

SEQ ID NO: 78817 - DNA, 25 bp, Artificial
  Probe
gagttactacagccattcaacgttc

SEQ ID NO: 78818 - DNA, 25 bp, Artificial
  Probe
gtttgttgcccagtttaaatttaca

SEQ ID NO: 78819 - DNA, 25 bp, Artificial
  Probe
tttgttgcccagtttaaatttacag

SEQ ID NO: 78820 - DNA, 25 bp, Artificial
  Probe
agttactacagccattcaacgttct

SEQ ID NO: 78821 - DNA, 25 bp, Artificial
  Probe
tgagttactacagccattcaacgtt

SEQ ID NO: 78822 - DNA, 25 bp, Artificial
  Probe
cctgtacaagtctgagatggaggtt

SEQ ID NO: 78823 - DNA, 25 bp, Artificial
  Probe
atgagaaggagggtgagtttgttgc

SEQ ID NO: 78824 - DNA, 25 bp, Artificial
  Probe
gacctgtacaagtctgagatggagg

SEQ ID NO: 78825 - DNA, 25 bp, Artificial
  Probe
ccaccagtggagagacattagagga

SEQ ID NO: 78826 - DNA, 25 bp, Artificial
  Probe
cgacctgtacaagtctgagatggag

SEQ ID NO: 78827 - DNA, 25 bp, Artificial
  Probe
gggtgagtttgttgcccagtttaaa

SEQ ID NO: 78828 - DNA, 25 bp, Artificial
  Probe
agggtgagtttgttgcccagtttaa

SEQ ID NO: 78829 - DNA, 25 bp, Artificial
  Probe
acctgtacaagtctgagatggaggt

SEQ ID NO: 78830 - DNA, 25 bp, Artificial
  Probe
attcaagtctgtggattatgggcat

SEQ ID NO: 78831 - DNA, 25 bp, Artificial
  Probe
tggattatgggcatcaagaaggaag

SEQ ID NO: 78832 - DNA, 25 bp, Artificial
  Probe
tctgtggattatgggcatcaagaag

SEQ ID NO: 78833 - DNA, 25 bp, Artificial
  Probe
ccctctaataaatcatgtggaacta

SEQ ID NO: 78834 - DNA, 25 bp, Artificial
  Probe
gtggattatgggcatcaagaaggaa

SEQ ID NO: 78835 - DNA, 25 bp, Artificial
  Probe
aagtctgtggattatgggcatcaag

SEQ ID NO: 78836 - DNA, 25 bp, Artificial
  Probe
ttcaagtctgtggattatgggcatc

SEQ ID NO: 78837 - DNA, 25 bp, Artificial
  Probe
tccctctaataaatcatgtggaact

SEQ ID NO: 78838 - DNA, 25 bp, Artificial
  Probe
gtccctctaataaatcatgtggaac

SEQ ID NO: 78839 - DNA, 25 bp, Artificial
  Probe
agtccctctaataaatcatgtggaa

SEQ ID NO: 78840 - DNA, 25 bp, Artificial
  Probe
gtctgtggattatgggcatcaagaa

SEQ ID NO: 78841 - DNA, 25 bp, Artificial
  Probe
caagtctgtggattatgggcatcaa

SEQ ID NO: 78842 - DNA, 25 bp, Artificial
  Probe
cattcaagtctgtggattatgggca

SEQ ID NO: 78843 - DNA, 25 bp, Artificial
  Probe
gattatgggcatcaagaaggaaggg

SEQ ID NO: 78844 - DNA, 25 bp, Artificial
  Probe
ggattatgggcatcaagaaggaagg

SEQ ID NO: 78845 - DNA, 25 bp, Artificial
  Probe
tagtccctctaataaatcatgtgga

SEQ ID NO: 78846 - DNA, 25 bp, Artificial
  Probe
ctgtggattatgggcatcaagaagg

SEQ ID NO: 78847 - DNA, 25 bp, Artificial
  Probe
agtctgtggattatgggcatcaaga

SEQ ID NO: 78848 - DNA, 25 bp, Artificial
  Probe
tgtggattatgggcatcaagaagga

SEQ ID NO: 78849 - DNA, 25 bp, Artificial
  Probe
tcaagtctgtggattatgggcatca

SEQ ID NO: 78850 - DNA, 25 bp, Artificial
  Probe
cctctaataaatcatgtggaactaa

SEQ ID NO: 78851 - DNA, 25 bp, Artificial
  Probe
atcccattcaagtctgtggattatg

SEQ ID NO: 78852 - DNA, 25 bp, Artificial
  Probe
catcccattcaagtctgtggattat

SEQ ID NO: 78853 - DNA, 25 bp, Artificial
  Probe
attatgggcatcaagaaggaagggc

SEQ ID NO: 78854 - DNA, 25 bp, Artificial
  Probe
ctgaacatgatggagtcctcgaagg

SEQ ID NO: 78855 - DNA, 25 bp, Artificial
  Probe
gcatcccattcaagtctgtggatta

SEQ ID NO: 78856 - DNA, 25 bp, Artificial
  Probe
tcccattcaagtctgtggattatgg

SEQ ID NO: 78857 - DNA, 25 bp, Artificial
  Probe
catgatggagtcctcgaaggagatc

SEQ ID NO: 78858 - DNA, 25 bp, Artificial
  Probe
ccattcaagtctgtggattatgggc

SEQ ID NO: 78859 - DNA, 25 bp, Artificial
  Probe
gaacatgatggagtcctcgaaggag

SEQ ID NO: 78860 - DNA, 25 bp, Artificial
  Probe
acatgatggagtcctcgaaggagat

SEQ ID NO: 78861 - DNA, 25 bp, Artificial
  Probe
aacatgatggagtcctcgaaggaga

SEQ ID NO: 78862 - DNA, 25 bp, Artificial
  Probe
tgaacatgatggagtcctcgaagga

SEQ ID NO: 78863 - DNA, 25 bp, Artificial
  Probe
acagtaatcagccttgtgtatatga

SEQ ID NO: 78864 - DNA, 25 bp, Artificial
  Probe
cagtaatcagccttgtgtatatgaa

SEQ ID NO: 78865 - DNA, 25 bp, Artificial
  Probe
tgttacagtaatcagccttgtgtat

SEQ ID NO: 78866 - DNA, 25 bp, Artificial
  Probe
gaagccgtatggataaactggattt

SEQ ID NO: 78867 - DNA, 25 bp, Artificial
  Probe
gtctgtgttcaaagtgtaaactgtt

SEQ ID NO: 78868 - DNA, 25 bp, Artificial
  Probe
agtctgtgttcaaagtgtaaactgt

SEQ ID NO: 78869 - DNA, 25 bp, Artificial
  Probe
tagtctgtgttcaaagtgtaaactg

SEQ ID NO: 78870 - DNA, 25 bp, Artificial
  Probe
gttacagtaatcagccttgtgtata

SEQ ID NO: 78871 - DNA, 25 bp, Artificial
  Probe
tctgtgttcaaagtgtaaactgtta

SEQ ID NO: 78872 - DNA, 25 bp, Artificial
  Probe
ctgttacagtaatcagccttgtgta

SEQ ID NO: 78873 - DNA, 25 bp, Artificial
  Probe
tgaagccgtatggataaactggatt

SEQ ID NO: 78874 - DNA, 25 bp, Artificial
  Probe
tacagtaatcagccttgtgtatatg

SEQ ID NO: 78875 - DNA, 25 bp, Artificial
  Probe
atagtctgtgttcaaagtgtaaact

SEQ ID NO: 78876 - DNA, 25 bp, Artificial
  Probe
ctgaagccgtatggataaactggat

SEQ ID NO: 78877 - DNA, 25 bp, Artificial
  Probe
aatagtctgtgttcaaagtgtaaac

SEQ ID NO: 78878 - DNA, 25 bp, Artificial
  Probe
agtaatcagccttgtgtatatgaaa

SEQ ID NO: 78879 - DNA, 25 bp, Artificial
  Probe
gtgacctctgaagccgtatggataa

SEQ ID NO: 78880 - DNA, 25 bp, Artificial
  Probe
gaaatttaagaactgaggcaaggag

SEQ ID NO: 78881 - DNA, 25 bp, Artificial
  Probe
agaaatttaagaactgaggcaagga

SEQ ID NO: 78882 - DNA, 25 bp, Artificial
  Probe
ttacagtaatcagccttgtgtatat

SEQ ID NO: 78883 - DNA, 25 bp, Artificial
  Probe
ctgtgttcaaagtgtaaactgttac

SEQ ID NO: 78884 - DNA, 25 bp, Artificial
  Probe
tagaaatttaagaactgaggcaagg

SEQ ID NO: 78885 - DNA, 25 bp, Artificial
  Probe
ttactgtgacctctgaagccgtatg

SEQ ID NO: 78886 - DNA, 25 bp, Artificial
  Probe
ctctgaagccgtatggataaactgg

SEQ ID NO: 78887 - DNA, 25 bp, Artificial
  Probe
cctctgaagccgtatggataaactg

SEQ ID NO: 78888 - DNA, 25 bp, Artificial
  Probe
gacctctgaagccgtatggataaac

SEQ ID NO: 78889 - DNA, 25 bp, Artificial
  Probe
aaatttaagaactgaggcaaggagc

SEQ ID NO: 78890 - DNA, 25 bp, Artificial
  Probe
tgttagaaatttaagaactgaggca

SEQ ID NO: 78891 - DNA, 25 bp, Artificial
  Probe
acctctgaagccgtatggataaact

SEQ ID NO: 78892 - DNA, 25 bp, Artificial
  Probe
gtgttagaaatttaagaactgaggc

SEQ ID NO: 78893 - DNA, 25 bp, Artificial
  Probe
gggttccttgtgttagaaatttaag

SEQ ID NO: 78894 - DNA, 25 bp, Artificial
  Probe
tctgaagccgtatggataaactgga

SEQ ID NO: 78895 - DNA, 25 bp, Artificial
  Probe
tgacctctgaagccgtatggataaa

SEQ ID NO: 78896 - DNA, 25 bp, Artificial
  Probe
actgattttactgtgacctctgaag

SEQ ID NO: 78897 - DNA, 25 bp, Artificial
  Probe
tttactgtgacctctgaagccgtat

SEQ ID NO: 78898 - DNA, 25 bp, Artificial
  Probe
ctataatagtctgtgttcaaagtgt

SEQ ID NO: 78899 - DNA, 25 bp, Artificial
  Probe
taatagtctgtgttcaaagtgtaaa

SEQ ID NO: 78900 - DNA, 25 bp, Artificial
  Probe
gttagaaatttaagaactgaggcaa

SEQ ID NO: 78901 - DNA, 25 bp, Artificial
  Probe
ttagaaatttaagaactgaggcaag

SEQ ID NO: 78902 - DNA, 25 bp, Artificial
  Probe
ctgattttactgtgacctctgaagc

SEQ ID NO: 78903 - DNA, 25 bp, Artificial
  Probe
tctataatagtctgtgttcaaagtg

SEQ ID NO: 78904 - DNA, 25 bp, Artificial
  Probe
ctcttcccagaatgacatgacacag

SEQ ID NO: 78905 - DNA, 25 bp, Artificial
  Probe
ggttccttgtgttagaaatttaaga

SEQ ID NO: 78906 - DNA, 25 bp, Artificial
  Probe
ataatagtctgtgttcaaagtgtaa

SEQ ID NO: 78907 - DNA, 25 bp, Artificial
  Probe
gtacttctataatagtctgtgttca

SEQ ID NO: 78908 - DNA, 25 bp, Artificial
  Probe
gctattccttctacacattcagtct

SEQ ID NO: 78909 - DNA, 25 bp, Artificial
  Probe
tattccttctacacattcagtctcc

SEQ ID NO: 78910 - DNA, 25 bp, Artificial
  Probe
attccttctacacattcagtctcct

SEQ ID NO: 78911 - DNA, 25 bp, Artificial
  Probe
ctcgctattccttctacacattcag

SEQ ID NO: 78912 - DNA, 25 bp, Artificial
  Probe
cgctattccttctacacattcagtc

SEQ ID NO: 78913 - DNA, 25 bp, Artificial
  Probe
cactcgctattccttctacacattc

SEQ ID NO: 78914 - DNA, 25 bp, Artificial
  Probe
atcactcgctattccttctacacat

SEQ ID NO: 78915 - DNA, 25 bp, Artificial
  Probe
ttccttctacacattcagtctcctc

SEQ ID NO: 78916 - DNA, 25 bp, Artificial
  Probe
ctattccttctacacattcagtctc

SEQ ID NO: 78917 - DNA, 25 bp, Artificial
  Probe
tcgctattccttctacacattcagt

SEQ ID NO: 78918 - DNA, 25 bp, Artificial
  Probe
actcgctattccttctacacattca

SEQ ID NO: 78919 - DNA, 25 bp, Artificial
  Probe
tcactcgctattccttctacacatt

SEQ ID NO: 78920 - DNA, 25 bp, Artificial
  Probe
gatcactcgctattccttctacaca

SEQ ID NO: 78921 - DNA, 25 bp, Artificial
  Probe
agatcactcgctattccttctacac

SEQ ID NO: 78922 - DNA, 25 bp, Artificial
  Probe
gagatcactcgctattccttctaca

SEQ ID NO: 78923 - DNA, 25 bp, Artificial
  Probe
cgattaaatggtccctacaaacaag

SEQ ID NO: 78924 - DNA, 25 bp, Artificial
  Probe
acgattaaatggtccctacaaacaa

SEQ ID NO: 78925 - DNA, 25 bp, Artificial
  Probe
tccttctacacattcagtctcctcg

SEQ ID NO: 78926 - DNA, 25 bp, Artificial
  Probe
ccaagtgagttcacgaatcttcatg

SEQ ID NO: 78927 - DNA, 25 bp, Artificial
  Probe
attaaatggtccctacaaacaaggt

SEQ ID NO: 78928 - DNA, 25 bp, Artificial
  Probe
gattaaatggtccctacaaacaagg

SEQ ID NO: 78929 - DNA, 25 bp, Artificial
  Probe
tccaagtgagttcacgaatcttcat

SEQ ID NO: 78930 - DNA, 25 bp, Artificial
  Probe
gacgattaaatggtccctacaaaca

SEQ ID NO: 78931 - DNA, 25 bp, Artificial
  Probe
atcatcttatatcccgttggagttg

SEQ ID NO: 78932 - DNA, 25 bp, Artificial
  Probe
ttaaatggtccctacaaacaaggtg

SEQ ID NO: 78933 - DNA, 25 bp, Artificial
  Probe
tatcatcttatatcccgttggagtt

SEQ ID NO: 78934 - DNA, 25 bp, Artificial
  Probe
ttatcatcttatatcccgttggagt

SEQ ID NO: 78935 - DNA, 25 bp, Artificial
  Probe
cttctacacattcagtctcctcgac

SEQ ID NO: 78936 - DNA, 25 bp, Artificial
  Probe
ccttctacacattcagtctcctcga

SEQ ID NO: 78937 - DNA, 25 bp, Artificial
  Probe
gtccaagtgagttcacgaatcttca

SEQ ID NO: 78938 - DNA, 25 bp, Artificial
  Probe
tttatcatcttatatcccgttggag

SEQ ID NO: 78939 - DNA, 25 bp, Artificial
  Probe
atcttatatcccgttggagttgctg

SEQ ID NO: 78940 - DNA, 25 bp, Artificial
  Probe
catcttatatcccgttggagttgct

SEQ ID NO: 78941 - DNA, 25 bp, Artificial
  Probe
tcatcttatatcccgttggagttgc

SEQ ID NO: 78942 - DNA, 25 bp, Artificial
  Probe
acgtctctttcgactactactattt

SEQ ID NO: 78943 - DNA, 25 bp, Artificial
  Probe
ggtccaagtgagttcacgaatcttc

SEQ ID NO: 78944 - DNA, 25 bp, Artificial
  Probe
aaatcagggatgttttcagtaaggc

SEQ ID NO: 78945 - DNA, 25 bp, Artificial
  Probe
acttcattaaatgggccagatacaa

SEQ ID NO: 78946 - DNA, 25 bp, Artificial
  Probe
cttcattaaatgggccagatacaat

SEQ ID NO: 78947 - DNA, 25 bp, Artificial
  Probe
ttctacacattcagtctcctcgacc

SEQ ID NO: 78948 - DNA, 25 bp, Artificial
  Probe
ttcattaaatgggccagatacaatt

SEQ ID NO: 78949 - DNA, 25 bp, Artificial
  Probe
cacttcattaaatgggccagataca

SEQ ID NO: 78950 - DNA, 25 bp, Artificial
  Probe
taaatggtccctacaaacaaggtgc

SEQ ID NO: 78951 - DNA, 25 bp, Artificial
  Probe
aatcagggatgttttcagtaaggct

SEQ ID NO: 78952 - DNA, 25 bp, Artificial
  Probe
atcagggatgttttcagtaaggctt

SEQ ID NO: 78953 - DNA, 25 bp, Artificial
  Probe
gtcaattcaatacacacattccgat

SEQ ID NO: 78954 - DNA, 25 bp, Artificial
  Probe
caatacacacattccgatatactcc

SEQ ID NO: 78955 - DNA, 25 bp, Artificial
  Probe
gaggtcaattcaatacacacattcc

SEQ ID NO: 78956 - DNA, 25 bp, Artificial
  Probe
ggaggtcaattcaatacacacattc

SEQ ID NO: 78957 - DNA, 25 bp, Artificial
  Probe
atacacacattccgatatactcctt

SEQ ID NO: 78958 - DNA, 25 bp, Artificial
  Probe
aatacacacattccgatatactcct

SEQ ID NO: 78959 - DNA, 25 bp, Artificial
  Probe
tggaggtcaattcaatacacacatt

SEQ ID NO: 78960 - DNA, 25 bp, Artificial
  Probe
atggaggtcaattcaatacacacat

SEQ ID NO: 78961 - DNA, 25 bp, Artificial
  Probe
gatggaggtcaattcaatacacaca

SEQ ID NO: 78962 - DNA, 25 bp, Artificial
  Probe
tcaattcaatacacacattccgata

SEQ ID NO: 78963 - DNA, 25 bp, Artificial
  Probe
tcaatacacacattccgatatactc

SEQ ID NO: 78964 - DNA, 25 bp, Artificial
  Probe
ggtcaattcaatacacacattccga

SEQ ID NO: 78965 - DNA, 25 bp, Artificial
  Probe
aggtcaattcaatacacacattccg

SEQ ID NO: 78966 - DNA, 25 bp, Artificial
  Probe
tgatggaggtcaattcaatacacac

SEQ ID NO: 78967 - DNA, 25 bp, Artificial
  Probe
ctggtgatggaggtcaattcaatac

SEQ ID NO: 78968 - DNA, 25 bp, Artificial
  Probe
tctggtgatggaggtcaattcaata

SEQ ID NO: 78969 - DNA, 25 bp, Artificial
  Probe
ttcaatacacacattccgatatact

SEQ ID NO: 78970 - DNA, 25 bp, Artificial
  Probe
ttatgtgaagagttgacactgaagt

SEQ ID NO: 78971 - DNA, 25 bp, Artificial
  Probe
caattcaatacacacattccgatat

SEQ ID NO: 78972 - DNA, 25 bp, Artificial
  Probe
gtgatggaggtcaattcaatacaca

SEQ ID NO: 78973 - DNA, 25 bp, Artificial
  Probe
tggtgatggaggtcaattcaataca

SEQ ID NO: 78974 - DNA, 25 bp, Artificial
  Probe
ttctggtgatggaggtcaattcaat

SEQ ID NO: 78975 - DNA, 25 bp, Artificial
  Probe
ggtgatggaggtcaattcaatacac

SEQ ID NO: 78976 - DNA, 25 bp, Artificial
  Probe
attccgatatactcctttgatggtc

SEQ ID NO: 78977 - DNA, 25 bp, Artificial
  Probe
ggcagagagattcagtcttccaatt

SEQ ID NO: 78978 - DNA, 25 bp, Artificial
  Probe
acacattccgatatactcctttgat

SEQ ID NO: 78979 - DNA, 25 bp, Artificial
  Probe
cacacattccgatatactcctttga

SEQ ID NO: 78980 - DNA, 25 bp, Artificial
  Probe
acacacattccgatatactcctttg

SEQ ID NO: 78981 - DNA, 25 bp, Artificial
  Probe
tacacacattccgatatactccttt

SEQ ID NO: 78982 - DNA, 25 bp, Artificial
  Probe
attcaatacacacattccgatatac

SEQ ID NO: 78983 - DNA, 25 bp, Artificial
  Probe
cattccgatatactcctttgatggt

SEQ ID NO: 78984 - DNA, 25 bp, Artificial
  Probe
acattccgatatactcctttgatgg

SEQ ID NO: 78985 - DNA, 25 bp, Artificial
  Probe
cacattccgatatactcctttgatg

SEQ ID NO: 78986 - DNA, 25 bp, Artificial
  Probe
atgacagacgcaaggaagtgataac

SEQ ID NO: 78987 - DNA, 25 bp, Artificial
  Probe
aggcagagagattcagtcttccaat

SEQ ID NO: 78988 - DNA, 25 bp, Artificial
  Probe
aaggcagagagattcagtcttccaa

SEQ ID NO: 78989 - DNA, 25 bp, Artificial
  Probe
catgacagacgcaaggaagtgataa

SEQ ID NO: 78990 - DNA, 25 bp, Artificial
  Probe
aattcaatacacacattccgatata

SEQ ID NO: 78991 - DNA, 25 bp, Artificial
  Probe
agagagattcagtcttccaattgtg

SEQ ID NO: 78992 - DNA, 25 bp, Artificial
  Probe
cagagagattcagtcttccaattgt

SEQ ID NO: 78993 - DNA, 25 bp, Artificial
  Probe
gagagattcagtcttccaattgtga

SEQ ID NO: 78994 - DNA, 25 bp, Artificial
  Probe
tttctggtgatggaggtcaattcaa

SEQ ID NO: 78995 - DNA, 25 bp, Artificial
  Probe
gcagagagattcagtcttccaattg

SEQ ID NO: 78996 - DNA, 25 bp, Artificial
  Probe
gatatactcctttgatggtcgggac

SEQ ID NO: 78997 - DNA, 25 bp, Artificial
  Probe
cagtcttccaattgtgaacctcaag

SEQ ID NO: 78998 - DNA, 25 bp, Artificial
  Probe
ctaaggagtcatctgctgaggatag

SEQ ID NO: 78999 - DNA, 25 bp, Artificial
  Probe
acaagacaaagaggaaagtatggaa

SEQ ID NO: 79000 - DNA, 25 bp, Artificial
  Probe
cacacaagacaaagaggaaagtatg

SEQ ID NO: 79001 - DNA, 25 bp, Artificial
  Probe
acacacaagacaaagaggaaagtat

SEQ ID NO: 79002 - DNA, 25 bp, Artificial
  Probe
cacaagacaaagaggaaagtatgga

SEQ ID NO: 79003 - DNA, 25 bp, Artificial
  Probe
acacaagacaaagaggaaagtatgg

SEQ ID NO: 79004 - DNA, 25 bp, Artificial
  Probe
gacacacaagacaaagaggaaagta

SEQ ID NO: 79005 - DNA, 25 bp, Artificial
  Probe
caagacaaagaggaaagtatggaat

SEQ ID NO: 79006 - DNA, 25 bp, Artificial
  Probe
aagtgacagaggatgatgctaagga

SEQ ID NO: 79007 - DNA, 25 bp, Artificial
  Probe
aagacaaagaggaaagtatggaatc

SEQ ID NO: 79008 - DNA, 25 bp, Artificial
  Probe
agtgacagaggatgatgctaaggag

SEQ ID NO: 79009 - DNA, 25 bp, Artificial
  Probe
gatcaggcagaagaaggcttagatg

SEQ ID NO: 79010 - DNA, 25 bp, Artificial
  Probe
gattgtgctcacgtacttcaactag

SEQ ID NO: 79011 - DNA, 25 bp, Artificial
  Probe
gctaaggagtcatctgctgaggata

SEQ ID NO: 79012 - DNA, 25 bp, Artificial
  Probe
gacgcagacctttacacttctaatg

SEQ ID NO: 79013 - DNA, 25 bp, Artificial
  Probe
agacgcagacctttacacttctaat

SEQ ID NO: 79014 - DNA, 25 bp, Artificial
  Probe
agatcaggcagaagaaggcttagat

SEQ ID NO: 79015 - DNA, 25 bp, Artificial
  Probe
attgtgctcacgtacttcaactaga

SEQ ID NO: 79016 - DNA, 25 bp, Artificial
  Probe
gtgacagaggatgatgctaaggagt

SEQ ID NO: 79017 - DNA, 25 bp, Artificial
  Probe
cttccagtagcattgtttacagcag

SEQ ID NO: 79018 - DNA, 25 bp, Artificial
  Probe
aaagtgacagaggatgatgctaagg

SEQ ID NO: 79019 - DNA, 25 bp, Artificial
  Probe
atcaggcagaagaaggcttagatgt

SEQ ID NO: 79020 - DNA, 25 bp, Artificial
  Probe
agacaaagaggaaagtatggaatcc

SEQ ID NO: 79021 - DNA, 25 bp, Artificial
  Probe
aatgattgtgctcacgtacttcaac

SEQ ID NO: 79022 - DNA, 25 bp, Artificial
  Probe
cgacttccagtagcattgtttacag

SEQ ID NO: 79023 - DNA, 25 bp, Artificial
  Probe
aagagttgaaggaggacacacaaga

SEQ ID NO: 79024 - DNA, 25 bp, Artificial
  Probe
tgattgtgctcacgtacttcaacta

SEQ ID NO: 79025 - DNA, 25 bp, Artificial
  Probe
gcaaagaagctaaagaagaggaata

SEQ ID NO: 79026 - DNA, 25 bp, Artificial
  Probe
tatggaatccagcttctctctgaac

SEQ ID NO: 79027 - DNA, 25 bp, Artificial
  Probe
gtatggaatccagcttctctctgaa

SEQ ID NO: 79028 - DNA, 25 bp, Artificial
  Probe
aagtatggaatccagcttctctctg

SEQ ID NO: 79029 - DNA, 25 bp, Artificial
  Probe
gacttccagtagcattgtttacagc

SEQ ID NO: 79030 - DNA, 25 bp, Artificial
  Probe
gacagaggatgatgctaaggagtca

SEQ ID NO: 79031 - DNA, 25 bp, Artificial
  Probe
tgacagaggatgatgctaaggagtc

SEQ ID NO: 79032 - DNA, 25 bp, Artificial
  Probe
cagacgcagacctttacacttctaa

SEQ ID NO: 79033 - DNA, 25 bp, Artificial
  Probe
attgtttacagcagccaagaaagtg

SEQ ID NO: 79034 - DNA, 25 bp, Artificial
  Probe
cattgtttacagcagccaagaaagt

SEQ ID NO: 79035 - DNA, 25 bp, Artificial
  Probe
tgcaaagaagctaaagaagaggaat

SEQ ID NO: 79036 - DNA, 25 bp, Artificial
  Probe
aggacacacaagacaaagaggaaag

SEQ ID NO: 79037 - DNA, 25 bp, Artificial
  Probe
gaggacacacaagacaaagaggaaa

SEQ ID NO: 79038 - DNA, 25 bp, Artificial
  Probe
acgcagacctttacacttctaatgt

SEQ ID NO: 79039 - DNA, 25 bp, Artificial
  Probe
ttgtgctcacgtacttcaactagac

SEQ ID NO: 79040 - DNA, 25 bp, Artificial
  Probe
atgattgtgctcacgtacttcaact

SEQ ID NO: 79041 - DNA, 25 bp, Artificial
  Probe
ggacacacaagacaaagaggaaagt

SEQ ID NO: 79042 - DNA, 25 bp, Artificial
  Probe
aagaaagtggcaaagagttgaagga

SEQ ID NO: 79043 - DNA, 25 bp, Artificial
  Probe
caggaagaatgtgaagaaggagaag

SEQ ID NO: 79044 - DNA, 25 bp, Artificial
  Probe
ctaactagaccacaagaaggctatc

SEQ ID NO: 79045 - DNA, 25 bp, Artificial
  Probe
taactagaccacaagaaggctatct

SEQ ID NO: 79046 - DNA, 25 bp, Artificial
  Probe
aggaagaatgtgaagaaggagaagg

SEQ ID NO: 79047 - DNA, 25 bp, Artificial
  Probe
tagaccacaagaaggctatctgatg

SEQ ID NO: 79048 - DNA, 25 bp, Artificial
  Probe
ctagaccacaagaaggctatctgat

SEQ ID NO: 79049 - DNA, 25 bp, Artificial
  Probe
aactagaccacaagaaggctatctg

SEQ ID NO: 79050 - DNA, 25 bp, Artificial
  Probe
cctaactagaccacaagaaggctat

SEQ ID NO: 79051 - DNA, 25 bp, Artificial
  Probe
gcaggaagaatgtgaagaaggagaa

SEQ ID NO: 79052 - DNA, 25 bp, Artificial
  Probe
atatgcaacctaactagaccacaag

SEQ ID NO: 79053 - DNA, 25 bp, Artificial
  Probe
gatatgcaacctaactagaccacaa

SEQ ID NO: 79054 - DNA, 25 bp, Artificial
  Probe
cacaagaaggctatctgatggtaca

SEQ ID NO: 79055 - DNA, 25 bp, Artificial
  Probe
actagaccacaagaaggctatctga

SEQ ID NO: 79056 - DNA, 25 bp, Artificial
  Probe
tatgcaacctaactagaccacaaga

SEQ ID NO: 79057 - DNA, 25 bp, Artificial
  Probe
acaagaaggctatctgatggtacag

SEQ ID NO: 79058 - DNA, 25 bp, Artificial
  Probe
aatggcaggaagaatgtgaagaagg

SEQ ID NO: 79059 - DNA, 25 bp, Artificial
  Probe
aaatggcaggaagaatgtgaagaag

SEQ ID NO: 79060 - DNA, 25 bp, Artificial
  Probe
ggatatgcaacctaactagaccaca

SEQ ID NO: 79061 - DNA, 25 bp, Artificial
  Probe
ggaagaatgtgaagaaggagaaggc

SEQ ID NO: 79062 - DNA, 25 bp, Artificial
  Probe
atgcaacctaactagaccacaagaa

SEQ ID NO: 79063 - DNA, 25 bp, Artificial
  Probe
acctaactagaccacaagaaggcta

SEQ ID NO: 79064 - DNA, 25 bp, Artificial
  Probe
tgcaacctaactagaccacaagaag

SEQ ID NO: 79065 - DNA, 25 bp, Artificial
  Probe
ctatctgatggtacagcagttccag

SEQ ID NO: 79066 - DNA, 25 bp, Artificial
  Probe
aggatatgcaacctaactagaccac

SEQ ID NO: 79067 - DNA, 25 bp, Artificial
  Probe
caacctaactagaccacaagaaggc

SEQ ID NO: 79068 - DNA, 25 bp, Artificial
  Probe
gcaacctaactagaccacaagaagg

SEQ ID NO: 79069 - DNA, 25 bp, Artificial
  Probe
aacctaactagaccacaagaaggct

SEQ ID NO: 79070 - DNA, 25 bp, Artificial
  Probe
atggcaggaagaatgtgaagaagga

SEQ ID NO: 79071 - DNA, 25 bp, Artificial
  Probe
ccacaagaaggctatctgatggtac

SEQ ID NO: 79072 - DNA, 25 bp, Artificial
  Probe
atctgatggtacagcagttccagta

SEQ ID NO: 79073 - DNA, 25 bp, Artificial
  Probe
tatctgatggtacagcagttccagt

SEQ ID NO: 79074 - DNA, 25 bp, Artificial
  Probe
ggcaggaagaatgtgaagaaggaga

SEQ ID NO: 79075 - DNA, 25 bp, Artificial
  Probe
taggatatgcaacctaactagacca

SEQ ID NO: 79076 - DNA, 25 bp, Artificial
  Probe
ttacattggagaggcaaacgtattt

SEQ ID NO: 79077 - DNA, 25 bp, Artificial
  Probe
tttacattggagaggcaaacgtatt

SEQ ID NO: 79078 - DNA, 25 bp, Artificial
  Probe
tggcaggaagaatgtgaagaaggag

SEQ ID NO: 79079 - DNA, 25 bp, Artificial
  Probe
caagaaggctatctgatggtacagc

SEQ ID NO: 79080 - DNA, 25 bp, Artificial
  Probe
aaaatggcaggaagaatgtgaagaa

SEQ ID NO: 79081 - DNA, 25 bp, Artificial
  Probe
aagaaggctatctgatggtacagca

SEQ ID NO: 79082 - DNA, 25 bp, Artificial
  Probe
agaccacaagaaggctatctgatgg

SEQ ID NO: 79083 - DNA, 25 bp, Artificial
  Probe
aaggctatctgatggtacagcagtt

SEQ ID NO: 79084 - DNA, 25 bp, Artificial
  Probe
agaaggctatctgatggtacagcag

SEQ ID NO: 79085 - DNA, 25 bp, Artificial
  Probe
gaagaatgtgaagaaggagaaggcc

SEQ ID NO: 79086 - DNA, 25 bp, Artificial
  Probe
aataggcattgtcgtggagatggtg

SEQ ID NO: 79087 - DNA, 25 bp, Artificial
  Probe
aggctatctgatggtacagcagttc

SEQ ID NO: 79088 - DNA, 25 bp, Artificial
  Probe
aaacaggcttcatttcaagtattaa

SEQ ID NO: 79089 - DNA, 25 bp, Artificial
  Probe
ttaaacaggcttcatttcaagtatt

SEQ ID NO: 79090 - DNA, 25 bp, Artificial
  Probe
ggtgacttaagagtaatggtctaga

SEQ ID NO: 79091 - DNA, 25 bp, Artificial
  Probe
gtttagtatgtgtcagtgagggtgg

SEQ ID NO: 79092 - DNA, 25 bp, Artificial
  Probe
gtgttctctacggctctctctacag

SEQ ID NO: 79093 - DNA, 25 bp, Artificial
  Probe
cgtttagtatgtgtcagtgagggtg

SEQ ID NO: 79094 - DNA, 25 bp, Artificial
  Probe
taaacaggcttcatttcaagtatta

SEQ ID NO: 79095 - DNA, 25 bp, Artificial
  Probe
gctaagacctggtaagacagagtgg

SEQ ID NO: 79096 - DNA, 25 bp, Artificial
  Probe
ggctaagacctggtaagacagagtg

SEQ ID NO: 79097 - DNA, 25 bp, Artificial
  Probe
gtgacttaagagtaatggtctagaa

SEQ ID NO: 79098 - DNA, 25 bp, Artificial
  Probe
aacaggcttcatttcaagtattaat

SEQ ID NO: 79099 - DNA, 25 bp, Artificial
  Probe
tttaaacaggcttcatttcaagtat

SEQ ID NO: 79100 - DNA, 25 bp, Artificial
  Probe
gggtgacttaagagtaatggtctag

SEQ ID NO: 79101 - DNA, 25 bp, Artificial
  Probe
aaagcacgtttagtatgtgtcagtg

SEQ ID NO: 79102 - DNA, 25 bp, Artificial
  Probe
caaagcacgtttagtatgtgtcagt

SEQ ID NO: 79103 - DNA, 25 bp, Artificial
  Probe
tcaggttagtcagtgagccatcaaa

SEQ ID NO: 79104 - DNA, 25 bp, Artificial
  Probe
aatagcatcagcccatgtttggtaa

SEQ ID NO: 79105 - DNA, 25 bp, Artificial
  Probe
cttttacttcatcgtgtgtttcccc

SEQ ID NO: 79106 - DNA, 25 bp, Artificial
  Probe
ccttttacttcatcgtgtgtttccc

SEQ ID NO: 79107 - DNA, 25 bp, Artificial
  Probe
gcccatgtttggtaagcactttatg

SEQ ID NO: 79108 - DNA, 25 bp, Artificial
  Probe
ctaagacctggtaagacagagtggg

SEQ ID NO: 79109 - DNA, 25 bp, Artificial
  Probe
agcccatgtttggtaagcactttat

SEQ ID NO: 79110 - DNA, 25 bp, Artificial
  Probe
aagcacgtttagtatgtgtcagtga

SEQ ID NO: 79111 - DNA, 25 bp, Artificial
  Probe
ccaaagcacgtttagtatgtgtcag

SEQ ID NO: 79112 - DNA, 25 bp, Artificial
  Probe
tttacttcatcgtgtgtttcccctt

SEQ ID NO: 79113 - DNA, 25 bp, Artificial
  Probe
ttttacttcatcgtgtgtttcccct

SEQ ID NO: 79114 - DNA, 25 bp, Artificial
  Probe
tttagtatgtgtcagtgagggtggc

SEQ ID NO: 79115 - DNA, 25 bp, Artificial
  Probe
atagcatcagcccatgtttggtaag

SEQ ID NO: 79116 - DNA, 25 bp, Artificial
  Probe
gaatagcatcagcccatgtttggta

SEQ ID NO: 79117 - DNA, 25 bp, Artificial
  Probe
ggtgttctctacggctctctctaca

SEQ ID NO: 79118 - DNA, 25 bp, Artificial
  Probe
gccttttacttcatcgtgtgtttcc

SEQ ID NO: 79119 - DNA, 25 bp, Artificial
  Probe
acgtttagtatgtgtcagtgagggt

SEQ ID NO: 79120 - DNA, 25 bp, Artificial
  Probe
ttacttcatcgtgtgtttccccttc

SEQ ID NO: 79121 - DNA, 25 bp, Artificial
  Probe
taatatacagacaagacacttttgc

SEQ ID NO: 79122 - DNA, 25 bp, Artificial
  Probe
agcacgtttagtatgtgtcagtgag

SEQ ID NO: 79123 - DNA, 25 bp, Artificial
  Probe
tacagacaagacacttttgcattac

SEQ ID NO: 79124 - DNA, 25 bp, Artificial
  Probe
cgccttttacttcatcgtgtgtttc

SEQ ID NO: 79125 - DNA, 25 bp, Artificial
  Probe
agacaagacacttttgcattacctt

SEQ ID NO: 79126 - DNA, 25 bp, Artificial
  Probe
atacagacaagacacttttgcatta

SEQ ID NO: 79127 - DNA, 25 bp, Artificial
  Probe
tatacagacaagacacttttgcatt

SEQ ID NO: 79128 - DNA, 25 bp, Artificial
  Probe
aatatacagacaagacacttttgca

SEQ ID NO: 79129 - DNA, 25 bp, Artificial
  Probe
cccatgtttggtaagcactttatgc

SEQ ID NO: 79130 - DNA, 25 bp, Artificial
  Probe
cacgtttagtatgtgtcagtgaggg

SEQ ID NO: 79131 - DNA, 25 bp, Artificial
  Probe
atatacagacaagacacttttgcat

SEQ ID NO: 79132 - DNA, 25 bp, Artificial
  Probe
caggttagtcagtgagccatcaaaa

SEQ ID NO: 79133 - DNA, 25 bp, Artificial
  Probe
acatggtaacaagacaacttccaag

SEQ ID NO: 79134 - DNA, 25 bp, Artificial
  Probe
cacatggtaacaagacaacttccaa

SEQ ID NO: 79135 - DNA, 25 bp, Artificial
  Probe
catggtaacaagacaacttccaagg

SEQ ID NO: 79136 - DNA, 25 bp, Artificial
  Probe
ctgttctcaggattatggtccaaat

SEQ ID NO: 79137 - DNA, 25 bp, Artificial
  Probe
tgttctcaggattatggtccaaata

SEQ ID NO: 79138 - DNA, 25 bp, Artificial
  Probe
caggattatggtccaaataaacagt

SEQ ID NO: 79139 - DNA, 25 bp, Artificial
  Probe
atggtccaaataaacagtatggtcc

SEQ ID NO: 79140 - DNA, 25 bp, Artificial
  Probe
tcaggattatggtccaaataaacag

SEQ ID NO: 79141 - DNA, 25 bp, Artificial
  Probe
ctcaggattatggtccaaataaaca

SEQ ID NO: 79142 - DNA, 25 bp, Artificial
  Probe
tctcaggattatggtccaaataaac

SEQ ID NO: 79143 - DNA, 25 bp, Artificial
  Probe
gttctcaggattatggtccaaataa

SEQ ID NO: 79144 - DNA, 25 bp, Artificial
  Probe
tatggtccaaataaacagtatggtc

SEQ ID NO: 79145 - DNA, 25 bp, Artificial
  Probe
ggtccaaataaacagtatggtccac

SEQ ID NO: 79146 - DNA, 25 bp, Artificial
  Probe
tggtccaaataaacagtatggtcca

SEQ ID NO: 79147 - DNA, 25 bp, Artificial
  Probe
gtccaaataaacagtatggtccacg

SEQ ID NO: 79148 - DNA, 25 bp, Artificial
  Probe
ttatggtccaaataaacagtatggt

SEQ ID NO: 79149 - DNA, 25 bp, Artificial
  Probe
ttctcaggattatggtccaaataaa

SEQ ID NO: 79150 - DNA, 25 bp, Artificial
  Probe
ccacatggtaacaagacaacttcca

SEQ ID NO: 79151 - DNA, 25 bp, Artificial
  Probe
tgacggtgctaagaatacggttgtt

SEQ ID NO: 79152 - DNA, 25 bp, Artificial
  Probe
aggattatggtccaaataaacagta

SEQ ID NO: 79153 - DNA, 25 bp, Artificial
  Probe
tgctgttctcaggattatggtccaa

SEQ ID NO: 79154 - DNA, 25 bp, Artificial
  Probe
gctgttctcaggattatggtccaaa

SEQ ID NO: 79155 - DNA, 25 bp, Artificial
  Probe
tccaaataaacagtatggtccacgg

SEQ ID NO: 79156 - DNA, 25 bp, Artificial
  Probe
atggtaacaagacaacttccaaggg

SEQ ID NO: 79157 - DNA, 25 bp, Artificial
  Probe
ctgacggtgctaagaatacggttgt

SEQ ID NO: 79158 - DNA, 25 bp, Artificial
  Probe
attatggtccaaataaacagtatgg

SEQ ID NO: 79159 - DNA, 25 bp, Artificial
  Probe
ggattatggtccaaataaacagtat

SEQ ID NO: 79160 - DNA, 25 bp, Artificial
  Probe
ggtaacaagacaacttccaagggtc

SEQ ID NO: 79161 - DNA, 25 bp, Artificial
  Probe
gattatggtccaaataaacagtatg

SEQ ID NO: 79162 - DNA, 25 bp, Artificial
  Probe
cccacatggtaacaagacaacttcc

SEQ ID NO: 79163 - DNA, 25 bp, Artificial
  Probe
ttgtcagaactagtgtgtcctccag

SEQ ID NO: 79164 - DNA, 25 bp, Artificial
  Probe
caaataaacagtatggtccacgggc

SEQ ID NO: 79165 - DNA, 25 bp, Artificial
  Probe
ccaaataaacagtatggtccacggg

SEQ ID NO: 79166 - DNA, 25 bp, Artificial
  Probe
gttgtcagaactagtgtgtcctcca

SEQ ID NO: 79167 - DNA, 25 bp, Artificial
  Probe
gaagcccacatggtaacaagacaac

SEQ ID NO: 79168 - DNA, 25 bp, Artificial
  Probe
agaaagaccgaatgaaaagcctgag

SEQ ID NO: 79169 - DNA, 25 bp, Artificial
  Probe
gagttgtcagaactagtgtgtcctc

SEQ ID NO: 79170 - DNA, 25 bp, Artificial
  Probe
gcccacatggtaacaagacaacttc

SEQ ID NO: 79171 - DNA, 25 bp, Artificial
  Probe
tggtaacaagacaacttccaagggt

SEQ ID NO: 79172 - DNA, 25 bp, Artificial
  Probe
gtcagaactagtgtgtcctccagtc

SEQ ID NO: 79173 - DNA, 25 bp, Artificial
  Probe
aagcccacatggtaacaagacaact

SEQ ID NO: 79174 - DNA, 25 bp, Artificial
  Probe
taacaagacaacttccaagggtctc

SEQ ID NO: 79175 - DNA, 25 bp, Artificial
  Probe
agcccacatggtaacaagacaactt

SEQ ID NO: 79176 - DNA, 25 bp, Artificial
  Probe
gtaacaagacaacttccaagggtct

SEQ ID NO: 79177 - DNA, 25 bp, Artificial
  Probe
agctaatgcttgttgagtacttgcc

SEQ ID NO: 79178 - DNA, 25 bp, Artificial
  Probe
cttccgtctataaggcttcattgtg

SEQ ID NO: 79179 - DNA, 25 bp, Artificial
  Probe
cagtaagttgatccatccagatgag

SEQ ID NO: 79180 - DNA, 25 bp, Artificial
  Probe
ccgttactgatcttacttcaagtct

SEQ ID NO: 79181 - DNA, 25 bp, Artificial
  Probe
cgtctataaggcttcattgtgactt

SEQ ID NO: 79182 - DNA, 25 bp, Artificial
  Probe
ttccgtctataaggcttcattgtga

SEQ ID NO: 79183 - DNA, 25 bp, Artificial
  Probe
aaccagtaagttgatccatccagat

SEQ ID NO: 79184 - DNA, 25 bp, Artificial
  Probe
agtaagttgatccatccagatgagg

SEQ ID NO: 79185 - DNA, 25 bp, Artificial
  Probe
gccgttactgatcttacttcaagtc

SEQ ID NO: 79186 - DNA, 25 bp, Artificial
  Probe
ccagtaagttgatccatccagatga

SEQ ID NO: 79187 - DNA, 25 bp, Artificial
  Probe
cacataccaggaactattggacatt

SEQ ID NO: 79188 - DNA, 25 bp, Artificial
  Probe
accagtaagttgatccatccagatg

SEQ ID NO: 79189 - DNA, 25 bp, Artificial
  Probe
acaaacataatcttcccacatacca

SEQ ID NO: 79190 - DNA, 25 bp, Artificial
  Probe
caaacataatcttcccacataccag

SEQ ID NO: 79191 - DNA, 25 bp, Artificial
  Probe
catcaaggaatgcctggttatcttc

SEQ ID NO: 79192 - DNA, 25 bp, Artificial
  Probe
aaacataatcttcccacataccagg

SEQ ID NO: 79193 - DNA, 25 bp, Artificial
  Probe
aacaaacataatcttcccacatacc

SEQ ID NO: 79194 - DNA, 25 bp, Artificial
  Probe
cacagttacctaaatatcagcgaaa

SEQ ID NO: 79195 - DNA, 25 bp, Artificial
  Probe
cgttactgatcttacttcaagtcta

SEQ ID NO: 79196 - DNA, 25 bp, Artificial
  Probe
acctaaatatcagcgaaatcttcct

SEQ ID NO: 79197 - DNA, 25 bp, Artificial
  Probe
cctaaatatcagcgaaatcttcctc

SEQ ID NO: 79198 - DNA, 25 bp, Artificial
  Probe
ctcaacttgtgctgtttatgtagac

SEQ ID NO: 79199 - DNA, 25 bp, Artificial
  Probe
tctcaacttgtgctgtttatgtaga

SEQ ID NO: 79200 - DNA, 25 bp, Artificial
  Probe
gcttccgtctataaggcttcattgt

SEQ ID NO: 79201 - DNA, 25 bp, Artificial
  Probe
ttctcaacttgtgctgtttatgtag

SEQ ID NO: 79202 - DNA, 25 bp, Artificial
  Probe
gcacagttacctaaatatcagcgaa

SEQ ID NO: 79203 - DNA, 25 bp, Artificial
  Probe
tatatcactggaagaaagaagggca

SEQ ID NO: 79204 - DNA, 25 bp, Artificial
  Probe
ccgtctataaggcttcattgtgact

SEQ ID NO: 79205 - DNA, 25 bp, Artificial
  Probe
tccgtctataaggcttcattgtgac

SEQ ID NO: 79206 - DNA, 25 bp, Artificial
  Probe
tttctcaacttgtgctgtttatgta

SEQ ID NO: 79207 - DNA, 25 bp, Artificial
  Probe
gtaagttgatccatccagatgagga

SEQ ID NO: 79208 - DNA, 25 bp, Artificial
  Probe
acagttacctaaatatcagcgaaat

SEQ ID NO: 79209 - DNA, 25 bp, Artificial
  Probe
atatatcactggaagaaagaagggc

SEQ ID NO: 79210 - DNA, 25 bp, Artificial
  Probe
ccacataccaggaactattggacat

SEQ ID NO: 79211 - DNA, 25 bp, Artificial
  Probe
tacctaaatatcagcgaaatcttcc

SEQ ID NO: 79212 - DNA, 25 bp, Artificial
  Probe
tcaacttgtgctgtttatgtagaca

SEQ ID NO: 79213 - DNA, 25 bp, Artificial
  Probe
tggacatttatttgacatgggagaa

SEQ ID NO: 79214 - DNA, 25 bp, Artificial
  Probe
ttggacatttatttgacatgggaga

SEQ ID NO: 79215 - DNA, 25 bp, Artificial
  Probe
attggacatttatttgacatgggag

SEQ ID NO: 79216 - DNA, 25 bp, Artificial
  Probe
ggacatttatttgacatgggagaaa

SEQ ID NO: 79217 - DNA, 25 bp, Artificial
  Probe
agttacctaaatatcagcgaaatct

SEQ ID NO: 79218 - DNA, 25 bp, Artificial
  Probe
cagttacctaaatatcagcgaaatc

SEQ ID NO: 79219 - DNA, 25 bp, Artificial
  Probe
ttgacatgggagaaattatttggaa

SEQ ID NO: 79220 - DNA, 25 bp, Artificial
  Probe
tttgacatgggagaaattatttgga

SEQ ID NO: 79221 - DNA, 25 bp, Artificial
  Probe
ataaggcttcattgtgactttaaca

SEQ ID NO: 79222 - DNA, 25 bp, Artificial
  Probe
gtctataaggcttcattgtgacttt

SEQ ID NO: 79223 - DNA, 25 bp, Artificial
  Probe
gatgaatgatccagcactgagacac

SEQ ID NO: 79224 - DNA, 25 bp, Artificial
  Probe
agatgaatgatccagcactgagaca

SEQ ID NO: 79225 - DNA, 25 bp, Artificial
  Probe
attcttcaggtcgtagcatttggag

SEQ ID NO: 79226 - DNA, 25 bp, Artificial
  Probe
cagatgaatgatccagcactgagac

SEQ ID NO: 79227 - DNA, 25 bp, Artificial
  Probe
gcagctactgactgaataaccactt

SEQ ID NO: 79228 - DNA, 25 bp, Artificial
  Probe
cattcttcaggtcgtagcatttgga

SEQ ID NO: 79229 - DNA, 25 bp, Artificial
  Probe
cagctactgactgaataaccacttt

SEQ ID NO: 79230 - DNA, 25 bp, Artificial
  Probe
atgaatgatccagcactgagacaca

SEQ ID NO: 79231 - DNA, 25 bp, Artificial
  Probe
gctactgactgaataaccactttta

SEQ ID NO: 79232 - DNA, 25 bp, Artificial
  Probe
agcagctactgactgaataaccact

SEQ ID NO: 79233 - DNA, 25 bp, Artificial
  Probe
cagcagctactgactgaataaccac

SEQ ID NO: 79234 - DNA, 25 bp, Artificial
  Probe
agctactgactgaataaccactttt

SEQ ID NO: 79235 - DNA, 25 bp, Artificial
  Probe
gaatgatccagcactgagacacaca

SEQ ID NO: 79236 - DNA, 25 bp, Artificial
  Probe
tgaatgatccagcactgagacacac

SEQ ID NO: 79237 - DNA, 25 bp, Artificial
  Probe
ctctcatccactgaccttctcaaaa

SEQ ID NO: 79238 - DNA, 25 bp, Artificial
  Probe
tctcatccactgaccttctcaaaac

SEQ ID NO: 79239 - DNA, 25 bp, Artificial
  Probe
gcagatgaatgatccagcactgaga

SEQ ID NO: 79240 - DNA, 25 bp, Artificial
  Probe
gccattcttcaggtcgtagcatttg

SEQ ID NO: 79241 - DNA, 25 bp, Artificial
  Probe
gctctcatccactgaccttctcaaa

SEQ ID NO: 79242 - DNA, 25 bp, Artificial
  Probe
ataatagacatgcagagttatacaa

SEQ ID NO: 79243 - DNA, 25 bp, Artificial
  Probe
aataatagacatgcagagttataca

SEQ ID NO: 79244 - DNA, 25 bp, Artificial
  Probe
aatgatccagcactgagacacacag

SEQ ID NO: 79245 - DNA, 25 bp, Artificial
  Probe
agccattcttcaggtcgtagcattt

SEQ ID NO: 79246 - DNA, 25 bp, Artificial
  Probe
tgactgaataaccacttttaaagga

SEQ ID NO: 79247 - DNA, 25 bp, Artificial
  Probe
ctgactgaataaccacttttaaagg

SEQ ID NO: 79248 - DNA, 25 bp, Artificial
  Probe
aatagacatgcagagttatacaaat

SEQ ID NO: 79249 - DNA, 25 bp, Artificial
  Probe
ctactgactgaataaccacttttaa

SEQ ID NO: 79250 - DNA, 25 bp, Artificial
  Probe
ttctcaaaaccgaagcagatggaaa

SEQ ID NO: 79251 - DNA, 25 bp, Artificial
  Probe
ccattcttcaggtcgtagcatttgg

SEQ ID NO: 79252 - DNA, 25 bp, Artificial
  Probe
ctcatccactgaccttctcaaaacc

SEQ ID NO: 79253 - DNA, 25 bp, Artificial
  Probe
gactgaataaccacttttaaaggaa

SEQ ID NO: 79254 - DNA, 25 bp, Artificial
  Probe
actgactgaataaccacttttaaag

SEQ ID NO: 79255 - DNA, 25 bp, Artificial
  Probe
agctctcatccactgaccttctcaa

SEQ ID NO: 79256 - DNA, 25 bp, Artificial
  Probe
tcagcagctactgactgaataacca

SEQ ID NO: 79257 - DNA, 25 bp, Artificial
  Probe
ttcttcaggtcgtagcatttggagc

SEQ ID NO: 79258 - DNA, 25 bp, Artificial
  Probe
taatagacatgcagagttatacaaa

SEQ ID NO: 79259 - DNA, 25 bp, Artificial
  Probe
accacttttaaaggaatgtgaaatt

SEQ ID NO: 79260 - DNA, 25 bp, Artificial
  Probe
aaccacttttaaaggaatgtgaaat

SEQ ID NO: 79261 - DNA, 25 bp, Artificial
  Probe
tgaataaccacttttaaaggaatgt

SEQ ID NO: 79262 - DNA, 25 bp, Artificial
  Probe
tctcaaaaccgaagcagatggaaac

SEQ ID NO: 79263 - DNA, 25 bp, Artificial
  Probe
agacatgcagagttatacaaatata

SEQ ID NO: 79264 - DNA, 25 bp, Artificial
  Probe
tagacatgcagagttatacaaatat

SEQ ID NO: 79265 - DNA, 25 bp, Artificial
  Probe
atagacatgcagagttatacaaata

SEQ ID NO: 79266 - DNA, 25 bp, Artificial
  Probe
actgaataaccacttttaaaggaat

SEQ ID NO: 79267 - DNA, 25 bp, Artificial
  Probe
taaccacttttaaaggaatgtgaaa

SEQ ID NO: 79268 - DNA, 25 bp, Artificial
  Probe
ttataacttcaatcgccttggctag

SEQ ID NO: 79269 - DNA, 25 bp, Artificial
  Probe
ttaatcatcagagctgagtgacaac

SEQ ID NO: 79270 - DNA, 25 bp, Artificial
  Probe
taggtttccaagtcactgatttctg

SEQ ID NO: 79271 - DNA, 25 bp, Artificial
  Probe
ctaggtttccaagtcactgatttct

SEQ ID NO: 79272 - DNA, 25 bp, Artificial
  Probe
agtcactgatttctgctgaagattt

SEQ ID NO: 79273 - DNA, 25 bp, Artificial
  Probe
aagtcactgatttctgctgaagatt

SEQ ID NO: 79274 - DNA, 25 bp, Artificial
  Probe
caagtcactgatttctgctgaagat

SEQ ID NO: 79275 - DNA, 25 bp, Artificial
  Probe
gctaggtttccaagtcactgatttc

SEQ ID NO: 79276 - DNA, 25 bp, Artificial
  Probe
taaagacaccgccatcacctattta

SEQ ID NO: 79277 - DNA, 25 bp, Artificial
  Probe
taatcatcagagctgagtgacaacc

SEQ ID NO: 79278 - DNA, 25 bp, Artificial
  Probe
aaataaagacaccgccatcacctat

SEQ ID NO: 79279 - DNA, 25 bp, Artificial
  Probe
ataaagacaccgccatcacctattt

SEQ ID NO: 79280 - DNA, 25 bp, Artificial
  Probe
tatttataacttcaatcgccttggc

SEQ ID NO: 79281 - DNA, 25 bp, Artificial
  Probe
tttataacttcaatcgccttggcta

SEQ ID NO: 79282 - DNA, 25 bp, Artificial
  Probe
tataacttcaatcgccttggctagg

SEQ ID NO: 79283 - DNA, 25 bp, Artificial
  Probe
aagaatggtactggtttcatgtgtg

SEQ ID NO: 79284 - DNA, 25 bp, Artificial
  Probe
caagaatggtactggtttcatgtgt

SEQ ID NO: 79285 - DNA, 25 bp, Artificial
  Probe
aataaagacaccgccatcacctatt

SEQ ID NO: 79286 - DNA, 25 bp, Artificial
  Probe
gcaataaagatagcttaacaccgtc

SEQ ID NO: 79287 - DNA, 25 bp, Artificial
  Probe
aaagacaccgccatcacctatttaa

SEQ ID NO: 79288 - DNA, 25 bp, Artificial
  Probe
atttataacttcaatcgccttggct

SEQ ID NO: 79289 - DNA, 25 bp, Artificial
  Probe
gtttccaagtcactgatttctgctg

SEQ ID NO: 79290 - DNA, 25 bp, Artificial
  Probe
gcctgttctgctcttatttaaagtg

SEQ ID NO: 79291 - DNA, 25 bp, Artificial
  Probe
gaatggtactggtttcatgtgtgat

SEQ ID NO: 79292 - DNA, 25 bp, Artificial
  Probe
caataaagatagcttaacaccgtca

SEQ ID NO: 79293 - DNA, 25 bp, Artificial
  Probe
aatggtactggtttcatgtgtgatg

SEQ ID NO: 79294 - DNA, 25 bp, Artificial
  Probe
cctgttctgctcttatttaaagtga

SEQ ID NO: 79295 - DNA, 25 bp, Artificial
  Probe
atttaatcatcagagctgagtgaca

SEQ ID NO: 79296 - DNA, 25 bp, Artificial
  Probe
tttaatcatcagagctgagtgacaa

SEQ ID NO: 79297 - DNA, 25 bp, Artificial
  Probe
aatttaatcatcagagctgagtgac

SEQ ID NO: 79298 - DNA, 25 bp, Artificial
  Probe
ataaagatagcttaacaccgtcaaa

SEQ ID NO: 79299 - DNA, 25 bp, Artificial
  Probe
aataaagatagcttaacaccgtcaa

SEQ ID NO: 79300 - DNA, 25 bp, Artificial
  Probe
tgcaataaagatagcttaacaccgt

SEQ ID NO: 79301 - DNA, 25 bp, Artificial
  Probe
ttccaagtcactgatttctgctgaa

SEQ ID NO: 79302 - DNA, 25 bp, Artificial
  Probe
tttccaagtcactgatttctgctga

SEQ ID NO: 79303 - DNA, 25 bp, Artificial
  Probe
agaatggtactggtttcatgtgtga

SEQ ID NO: 79304 - DNA, 25 bp, Artificial
  Probe
ggctaggtttccaagtcactgattt

SEQ ID NO: 79305 - DNA, 25 bp, Artificial
  Probe
tgagtgcaataaagatagcttaaca

SEQ ID NO: 79306 - DNA, 25 bp, Artificial
  Probe
ccaagtcactgatttctgctgaaga

SEQ ID NO: 79307 - DNA, 25 bp, Artificial
  Probe
tccaagtcactgatttctgctgaag

SEQ ID NO: 79308 - DNA, 25 bp, Artificial
  Probe
ttatttataacttcaatcgccttgg

SEQ ID NO: 79309 - DNA, 25 bp, Artificial
  Probe
aaatttaatcatcagagctgagtga

SEQ ID NO: 79310 - DNA, 25 bp, Artificial
  Probe
aggttatttataacttcaatcgcct

SEQ ID NO: 79311 - DNA, 25 bp, Artificial
  Probe
gtgcaataaagatagcttaacaccg

SEQ ID NO: 79312 - DNA, 25 bp, Artificial
  Probe
agtgcaataaagatagcttaacacc

SEQ ID NO: 79313 - DNA, 25 bp, Artificial
  Probe
attgacatcgaggatcttcaggaac

SEQ ID NO: 79314 - DNA, 25 bp, Artificial
  Probe
cattgacatcgaggatcttcaggaa

SEQ ID NO: 79315 - DNA, 25 bp, Artificial
  Probe
taagtcggaagaggaagtggacatt

SEQ ID NO: 79316 - DNA, 25 bp, Artificial
  Probe
tactccattgacatcgaggatcttc

SEQ ID NO: 79317 - DNA, 25 bp, Artificial
  Probe
gtactccattgacatcgaggatctt

SEQ ID NO: 79318 - DNA, 25 bp, Artificial
  Probe
gtaagtcggaagaggaagtggacat

SEQ ID NO: 79319 - DNA, 25 bp, Artificial
  Probe
ctccattgacatcgaggatcttcag

SEQ ID NO: 79320 - DNA, 25 bp, Artificial
  Probe
gtgtactccattgacatcgaggatc

SEQ ID NO: 79321 - DNA, 25 bp, Artificial
  Probe
tgtactccattgacatcgaggatct

SEQ ID NO: 79322 - DNA, 25 bp, Artificial
  Probe
gacattcactattgccagggaaagt

SEQ ID NO: 79323 - DNA, 25 bp, Artificial
  Probe
ttgacatcgaggatcttcaggaaca

SEQ ID NO: 79324 - DNA, 25 bp, Artificial
  Probe
gacatcgaggatcttcaggaacagt

SEQ ID NO: 79325 - DNA, 25 bp, Artificial
  Probe
ggacattcactattgccagggaaag

SEQ ID NO: 79326 - DNA, 25 bp, Artificial
  Probe
actccattgacatcgaggatcttca

SEQ ID NO: 79327 - DNA, 25 bp, Artificial
  Probe
tgtgtactccattgacatcgaggat

SEQ ID NO: 79328 - DNA, 25 bp, Artificial
  Probe
gaagaggaagtggacattcactatt

SEQ ID NO: 79329 - DNA, 25 bp, Artificial
  Probe
aagtcggaagaggaagtggacattc

SEQ ID NO: 79330 - DNA, 25 bp, Artificial
  Probe
gagtacatttgggagaagagggtca

SEQ ID NO: 79331 - DNA, 25 bp, Artificial
  Probe
aagaggaagtggacattcactattg

SEQ ID NO: 79332 - DNA, 25 bp, Artificial
  Probe
gaaggaggcaaaatcgtgaaaattc

SEQ ID NO: 79333 - DNA, 25 bp, Artificial
  Probe
tgacatcgaggatcttcaggaacag

SEQ ID NO: 79334 - DNA, 25 bp, Artificial
  Probe
ccattgacatcgaggatcttcagga

SEQ ID NO: 79335 - DNA, 25 bp, Artificial
  Probe
acatcgaggatcttcaggaacagtg

SEQ ID NO: 79336 - DNA, 25 bp, Artificial
  Probe
tgaaggaggcaaaatcgtgaaaatt

SEQ ID NO: 79337 - DNA, 25 bp, Artificial
  Probe
catcacagccaaggtgcagtatatc

SEQ ID NO: 79338 - DNA, 25 bp, Artificial
  Probe
ctgaaggaggcaaaatcgtgaaaat

SEQ ID NO: 79339 - DNA, 25 bp, Artificial
  Probe
agtacatttgggagaagagggtcac

SEQ ID NO: 79340 - DNA, 25 bp, Artificial
  Probe
agccaaggtgcagtatatcaaagtg

SEQ ID NO: 79341 - DNA, 25 bp, Artificial
  Probe
cagccaaggtgcagtatatcaaagt

SEQ ID NO: 79342 - DNA, 25 bp, Artificial
  Probe
acagccaaggtgcagtatatcaaag

SEQ ID NO: 79343 - DNA, 25 bp, Artificial
  Probe
ggaagaggaagtggacattcactat

SEQ ID NO: 79344 - DNA, 25 bp, Artificial
  Probe
ataaaggccaagttctcctcttaaa

SEQ ID NO: 79345 - DNA, 25 bp, Artificial
  Probe
aataaaggccaagttctcctcttaa

SEQ ID NO: 79346 - DNA, 25 bp, Artificial
  Probe
caataaaggccaagttctcctctta

SEQ ID NO: 79347 - DNA, 25 bp, Artificial
  Probe
tccattgacatcgaggatcttcagg

SEQ ID NO: 79348 - DNA, 25 bp, Artificial
  Probe
ctgtgtactccattgacatcgagga

SEQ ID NO: 79349 - DNA, 25 bp, Artificial
  Probe
atcacagccaaggtgcagtatatca

SEQ ID NO: 79350 - DNA, 25 bp, Artificial
  Probe
ggagtacatttgggagaagagggtc

SEQ ID NO: 79351 - DNA, 25 bp, Artificial
  Probe
tcacagccaaggtgcagtatatcaa

SEQ ID NO: 79352 - DNA, 25 bp, Artificial
  Probe
acatcacagccaaggtgcagtatat

SEQ ID NO: 79353 - DNA, 25 bp, Artificial
  Probe
agaggaagtggacattcactattgc

SEQ ID NO: 79354 - DNA, 25 bp, Artificial
  Probe
acaataaaggccaagttctcctctt

SEQ ID NO: 79355 - DNA, 25 bp, Artificial
  Probe
gaggcaaaatcgtgaaaattccagg

SEQ ID NO: 79356 - DNA, 25 bp, Artificial
  Probe
gtcggaagaggaagtggacattcac

SEQ ID NO: 79357 - DNA, 25 bp, Artificial
  Probe
cacagccaaggtgcagtatatcaaa

SEQ ID NO: 79358 - DNA, 25 bp, Artificial
  Probe
cgacatagcgttattaatcaggaat

SEQ ID NO: 79359 - DNA, 25 bp, Artificial
  Probe
ccgacatagcgttattaatcaggaa

SEQ ID NO: 79360 - DNA, 25 bp, Artificial
  Probe
aagccgacatagcgttattaatcag

SEQ ID NO: 79361 - DNA, 25 bp, Artificial
  Probe
tagcgttattaatcaggaatactgc

SEQ ID NO: 79362 - DNA, 25 bp, Artificial
  Probe
agcgttattaatcaggaatactgca

SEQ ID NO: 79363 - DNA, 25 bp, Artificial
  Probe
gccgacatagcgttattaatcagga

SEQ ID NO: 79364 - DNA, 25 bp, Artificial
  Probe
agccgacatagcgttattaatcagg

SEQ ID NO: 79365 - DNA, 25 bp, Artificial
  Probe
aaagccgacatagcgttattaatca

SEQ ID NO: 79366 - DNA, 25 bp, Artificial
  Probe
acatagcgttattaatcaggaatac

SEQ ID NO: 79367 - DNA, 25 bp, Artificial
  Probe
catagcgttattaatcaggaatact

SEQ ID NO: 79368 - DNA, 25 bp, Artificial
  Probe
gacatagcgttattaatcaggaata

SEQ ID NO: 79369 - DNA, 25 bp, Artificial
  Probe
atagcgttattaatcaggaatactg

SEQ ID NO: 79370 - DNA, 25 bp, Artificial
  Probe
ttgaaaagccgacatagcgttatta

SEQ ID NO: 79371 - DNA, 25 bp, Artificial
  Probe
tgaaaagccgacatagcgttattaa

SEQ ID NO: 79372 - DNA, 25 bp, Artificial
  Probe
tttgaaaagccgacatagcgttatt

SEQ ID NO: 79373 - DNA, 25 bp, Artificial
  Probe
aaaagccgacatagcgttattaatc

SEQ ID NO: 79374 - DNA, 25 bp, Artificial
  Probe
gaaaagccgacatagcgttattaat

SEQ ID NO: 79375 - DNA, 25 bp, Artificial
  Probe
ggaatttgtggtttgcagtgagatg

SEQ ID NO: 79376 - DNA, 25 bp, Artificial
  Probe
ttagggaatttgtggtttgcagtga

SEQ ID NO: 79377 - DNA, 25 bp, Artificial
  Probe
gttagggaatttgtggtttgcagtg

SEQ ID NO: 79378 - DNA, 25 bp, Artificial
  Probe
aaggaactttgaaaagccgacatag

SEQ ID NO: 79379 - DNA, 25 bp, Artificial
  Probe
caaggaactttgaaaagccgacata

SEQ ID NO: 79380 - DNA, 25 bp, Artificial
  Probe
ctttgaaaagccgacatagcgttat

SEQ ID NO: 79381 - DNA, 25 bp, Artificial
  Probe
gagggttagggaatttgtggtttgc

SEQ ID NO: 79382 - DNA, 25 bp, Artificial
  Probe
tagggaatttgtggtttgcagtgag

SEQ ID NO: 79383 - DNA, 25 bp, Artificial
  Probe
tcaaatacagtttgctgcaaagttc

SEQ ID NO: 79384 - DNA, 25 bp, Artificial
  Probe
ctcaaatacagtttgctgcaaagtt

SEQ ID NO: 79385 - DNA, 25 bp, Artificial
  Probe
ggttagggaatttgtggtttgcagt

SEQ ID NO: 79386 - DNA, 25 bp, Artificial
  Probe
gggaatttgtggtttgcagtgagat

SEQ ID NO: 79387 - DNA, 25 bp, Artificial
  Probe
aactcaaatacagtttgctgcaaag

SEQ ID NO: 79388 - DNA, 25 bp, Artificial
  Probe
actttgaaaagccgacatagcgtta

SEQ ID NO: 79389 - DNA, 25 bp, Artificial
  Probe
gcagtgagatgcttttctttctttt

SEQ ID NO: 79390 - DNA, 25 bp, Artificial
  Probe
caaatacagtttgctgcaaagttcc

SEQ ID NO: 79391 - DNA, 25 bp, Artificial
  Probe
actcaaatacagtttgctgcaaagt

SEQ ID NO: 79392 - DNA, 25 bp, Artificial
  Probe
gggttagggaatttgtggtttgcag

SEQ ID NO: 79393 - DNA, 25 bp, Artificial
  Probe
aggaactttgaaaagccgacatagc

SEQ ID NO: 79394 - DNA, 25 bp, Artificial
  Probe
aaatacagtttgctgcaaagttccc

SEQ ID NO: 79395 - DNA, 25 bp, Artificial
  Probe
aactttgaaaagccgacatagcgtt

SEQ ID NO: 79396 - DNA, 25 bp, Artificial
  Probe
gaatttgtggtttgcagtgagatgc

SEQ ID NO: 79397 - DNA, 25 bp, Artificial
  Probe
agggaatttgtggtttgcagtgaga

SEQ ID NO: 79398 - DNA, 25 bp, Artificial
  Probe
agggttagggaatttgtggtttgca

SEQ ID NO: 79399 - DNA, 25 bp, Artificial
  Probe
ccaaggaactttgaaaagccgacat

SEQ ID NO: 79400 - DNA, 25 bp, Artificial
  Probe
tgcagtgagatgcttttctttcttt

SEQ ID NO: 79401 - DNA, 25 bp, Artificial
  Probe
ttgcagtgagatgcttttctttctt

SEQ ID NO: 79402 - DNA, 25 bp, Artificial
  Probe
tttgcagtgagatgcttttctttct

SEQ ID NO: 79403 - DNA, 25 bp, Artificial
  Probe
aagtattcagcaagattccaggatt

SEQ ID NO: 79404 - DNA, 25 bp, Artificial
  Probe
gaagtattcagcaagattccaggat

SEQ ID NO: 79405 - DNA, 25 bp, Artificial
  Probe
agtattcagcaagattccaggattg

SEQ ID NO: 79406 - DNA, 25 bp, Artificial
  Probe
gtattcagcaagattccaggattga

SEQ ID NO: 79407 - DNA, 25 bp, Artificial
  Probe
cacgaagtattcagcaagattccag

SEQ ID NO: 79408 - DNA, 25 bp, Artificial
  Probe
gtcacgaagtattcagcaagattcc

SEQ ID NO: 79409 - DNA, 25 bp, Artificial
  Probe
ggtcacgaagtattcagcaagattc

SEQ ID NO: 79410 - DNA, 25 bp, Artificial
  Probe
tcacgaagtattcagcaagattcca

SEQ ID NO: 79411 - DNA, 25 bp, Artificial
  Probe
tggtcacgaagtattcagcaagatt

SEQ ID NO: 79412 - DNA, 25 bp, Artificial
  Probe
gattgagcaggtaatctccatcatc

SEQ ID NO: 79413 - DNA, 25 bp, Artificial
  Probe
tatggataaagggattgagcaggta

SEQ ID NO: 79414 - DNA, 25 bp, Artificial
  Probe
cgaagtattcagcaagattccagga

SEQ ID NO: 79415 - DNA, 25 bp, Artificial
  Probe
acgaagtattcagcaagattccagg

SEQ ID NO: 79416 - DNA, 25 bp, Artificial
  Probe
attgagcaggtaatctccatcatcg

SEQ ID NO: 79417 - DNA, 25 bp, Artificial
  Probe
ctcctccactcagaaattcatacac

SEQ ID NO: 79418 - DNA, 25 bp, Artificial
  Probe
ttacagtttaagtgaggagagggag

SEQ ID NO: 79419 - DNA, 25 bp, Artificial
  Probe
cctccactcagaaattcatacacag

SEQ ID NO: 79420 - DNA, 25 bp, Artificial
  Probe
tggataaagggattgagcaggtaat

SEQ ID NO: 79421 - DNA, 25 bp, Artificial
  Probe
atggataaagggattgagcaggtaa

SEQ ID NO: 79422 - DNA, 25 bp, Artificial
  Probe
gtctcctccactcagaaattcatac

SEQ ID NO: 79423 - DNA, 25 bp, Artificial
  Probe
ttatggataaagggattgagcaggt

SEQ ID NO: 79424 - DNA, 25 bp, Artificial
  Probe
tctcctccactcagaaattcataca

SEQ ID NO: 79425 - DNA, 25 bp, Artificial
  Probe
tgtctcctccactcagaaattcata

SEQ ID NO: 79426 - DNA, 25 bp, Artificial
  Probe
tcctccactcagaaattcatacaca

SEQ ID NO: 79427 - DNA, 25 bp, Artificial
  Probe
tttatggataaagggattgagcagg

SEQ ID NO: 79428 - DNA, 25 bp, Artificial
  Probe
ggattgagcaggtaatctccatcat

SEQ ID NO: 79429 - DNA, 25 bp, Artificial
  Probe
ctggtcacgaagtattcagcaagat

SEQ ID NO: 79430 - DNA, 25 bp, Artificial
  Probe
atttatggataaagggattgagcag

SEQ ID NO: 79431 - DNA, 25 bp, Artificial
  Probe
tattcagcaagattccaggattgaa

SEQ ID NO: 79432 - DNA, 25 bp, Artificial
  Probe
cttacagtttaagtgaggagaggga

SEQ ID NO: 79433 - DNA, 25 bp, Artificial
  Probe
aacccttacagtttaagtgaggaga

SEQ ID NO: 79434 - DNA, 25 bp, Artificial
  Probe
aactggtcacgaagtattcagcaag

SEQ ID NO: 79435 - DNA, 25 bp, Artificial
  Probe
ataaagggattgagcaggtaatctc

SEQ ID NO: 79436 - DNA, 25 bp, Artificial
  Probe
gataaagggattgagcaggtaatct

SEQ ID NO: 79437 - DNA, 25 bp, Artificial
  Probe
acccttacagtttaagtgaggagag

SEQ ID NO: 79438 - DNA, 25 bp, Artificial
  Probe
attcagcaagattccaggattgaac

SEQ ID NO: 79439 - DNA, 25 bp, Artificial
  Probe
tacagtttaagtgaggagagggagg

SEQ ID NO: 79440 - DNA, 25 bp, Artificial
  Probe
ggataaagggattgagcaggtaatc

SEQ ID NO: 79441 - DNA, 25 bp, Artificial
  Probe
ctgtctcctccactcagaaattcat

SEQ ID NO: 79442 - DNA, 25 bp, Artificial
  Probe
ccttacagtttaagtgaggagaggg

SEQ ID NO: 79443 - DNA, 25 bp, Artificial
  Probe
cccttacagtttaagtgaggagagg

SEQ ID NO: 79444 - DNA, 25 bp, Artificial
  Probe
cctgtgttgtttctaggaaatgatt

SEQ ID NO: 79445 - DNA, 25 bp, Artificial
  Probe
ccctgtgttgtttctaggaaatgat

SEQ ID NO: 79446 - DNA, 25 bp, Artificial
  Probe
atccctgtgttgtttctaggaaatg

SEQ ID NO: 79447 - DNA, 25 bp, Artificial
  Probe
catccctgtgttgtttctaggaaat

SEQ ID NO: 79448 - DNA, 25 bp, Artificial
  Probe
tagtgaatgagaagtggtgaggata

SEQ ID NO: 79449 - DNA, 25 bp, Artificial
  Probe
tatagtgaatgagaagtggtgagga

SEQ ID NO: 79450 - DNA, 25 bp, Artificial
  Probe
atatagtgaatgagaagtggtgagg

SEQ ID NO: 79451 - DNA, 25 bp, Artificial
  Probe
atagtgaatgagaagtggtgaggat

SEQ ID NO: 79452 - DNA, 25 bp, Artificial
  Probe
agtgaatgagaagtggtgaggatag

SEQ ID NO: 79453 - DNA, 25 bp, Artificial
  Probe
catatagtgaatgagaagtggtgag

SEQ ID NO: 79454 - DNA, 25 bp, Artificial
  Probe
gtagttgccatgccttagaatcatt

SEQ ID NO: 79455 - DNA, 25 bp, Artificial
  Probe
ccatatagtgaatgagaagtggtga

SEQ ID NO: 79456 - DNA, 25 bp, Artificial
  Probe
tccatatagtgaatgagaagtggtg

SEQ ID NO: 79457 - DNA, 25 bp, Artificial
  Probe
gaagtagttgccatgccttagaatc

SEQ ID NO: 79458 - DNA, 25 bp, Artificial
  Probe
ttccatatagtgaatgagaagtggt

SEQ ID NO: 79459 - DNA, 25 bp, Artificial
  Probe
tgtttggtttggtattactctgact

SEQ ID NO: 79460 - DNA, 25 bp, Artificial
  Probe
agtagttgccatgccttagaatcat

SEQ ID NO: 79461 - DNA, 25 bp, Artificial
  Probe
agaagtagttgccatgccttagaat

SEQ ID NO: 79462 - DNA, 25 bp, Artificial
  Probe
ttgtttggtttggtattactctgac

SEQ ID NO: 79463 - DNA, 25 bp, Artificial
  Probe
acttgtttggtttggtattactctg

SEQ ID NO: 79464 - DNA, 25 bp, Artificial
  Probe
cacttgtttggtttggtattactct

SEQ ID NO: 79465 - DNA, 25 bp, Artificial
  Probe
cttgtttggtttggtattactctga

SEQ ID NO: 79466 - DNA, 25 bp, Artificial
  Probe
gtgaatgagaagtggtgaggatagc

SEQ ID NO: 79467 - DNA, 25 bp, Artificial
  Probe
acacttgtttggtttggtattactc

SEQ ID NO: 79468 - DNA, 25 bp, Artificial
  Probe
gtgtctttatgaagtttgctgttct

SEQ ID NO: 79469 - DNA, 25 bp, Artificial
  Probe
aagtagttgccatgccttagaatca

SEQ ID NO: 79470 - DNA, 25 bp, Artificial
  Probe
ggtgtctttatgaagtttgctgttc

SEQ ID NO: 79471 - DNA, 25 bp, Artificial
  Probe
cggacatagattgaatcacccatat

SEQ ID NO: 79472 - DNA, 25 bp, Artificial
  Probe
aggtgtctttatgaagtttgctgtt

SEQ ID NO: 79473 - DNA, 25 bp, Artificial
  Probe
aaggtgtctttatgaagtttgctgt

SEQ ID NO: 79474 - DNA, 25 bp, Artificial
  Probe
gtttggtttggtattactctgacta

SEQ ID NO: 79475 - DNA, 25 bp, Artificial
  Probe
tgaatgagaagtggtgaggatagca

SEQ ID NO: 79476 - DNA, 25 bp, Artificial
  Probe
tggacttccatatagtgaatgagaa

SEQ ID NO: 79477 - DNA, 25 bp, Artificial
  Probe
cagaagtagttgccatgccttagaa

SEQ ID NO: 79478 - DNA, 25 bp, Artificial
  Probe
gccatgccttagaatcatttgtatg

SEQ ID NO: 79479 - DNA, 25 bp, Artificial
  Probe
tagttgccatgccttagaatcattt

SEQ ID NO: 79480 - DNA, 25 bp, Artificial
  Probe
tgccatgccttagaatcatttgtat

SEQ ID NO: 79481 - DNA, 25 bp, Artificial
  Probe
ttgccatgccttagaatcatttgta

SEQ ID NO: 79482 - DNA, 25 bp, Artificial
  Probe
gaatgagaagtggtgaggatagcac

SEQ ID NO: 79483 - DNA, 25 bp, Artificial
  Probe
ggacatagattgaatcacccatata

SEQ ID NO: 79484 - DNA, 25 bp, Artificial
  Probe
cttccatatagtgaatgagaagtgg

SEQ ID NO: 79485 - DNA, 25 bp, Artificial
  Probe
tagtaaaggttcgcttagctctgta

SEQ ID NO: 79486 - DNA, 25 bp, Artificial
  Probe
gatagtaaaggttcgcttagctctg

SEQ ID NO: 79487 - DNA, 25 bp, Artificial
  Probe
ggacttccatatagtgaatgagaag

SEQ ID NO: 79488 - DNA, 25 bp, Artificial
  Probe
agttgccatgccttagaatcatttg

SEQ ID NO: 79489 - DNA, 25 bp, Artificial
  Probe
aatgagaagtggtgaggatagcaca

SEQ ID NO: 79490 - DNA, 25 bp, Artificial
  Probe
atagtaaaggttcgcttagctctgt

SEQ ID NO: 79491 - DNA, 25 bp, Artificial
  Probe
aaaggtgtctttatgaagtttgctg

SEQ ID NO: 79492 - DNA, 25 bp, Artificial
  Probe
gttgccatgccttagaatcatttgt

SEQ ID NO: 79493 - DNA, 25 bp, Artificial
  Probe
tagcagaattgactgacttagttcc

SEQ ID NO: 79494 - DNA, 25 bp, Artificial
  Probe
ccttagcagaattgactgacttagt

SEQ ID NO: 79495 - DNA, 25 bp, Artificial
  Probe
ttagcagaattgactgacttagttc

SEQ ID NO: 79496 - DNA, 25 bp, Artificial
  Probe
cttagcagaattgactgacttagtt

SEQ ID NO: 79497 - DNA, 25 bp, Artificial
  Probe
gccttagcagaattgactgacttag

SEQ ID NO: 79498 - DNA, 25 bp, Artificial
  Probe
agcagaattgactgacttagttcct

SEQ ID NO: 79499 - DNA, 25 bp, Artificial
  Probe
tagtcgtctttctttgaatgctttg

SEQ ID NO: 79500 - DNA, 25 bp, Artificial
  Probe
tgctttagtcgtctttctttgaatg

SEQ ID NO: 79501 - DNA, 25 bp, Artificial
  Probe
ctttagtcgtctttctttgaatgct

SEQ ID NO: 79502 - DNA, 25 bp, Artificial
  Probe
ctgctttagtcgtctttctttgaat

SEQ ID NO: 79503 - DNA, 25 bp, Artificial
  Probe
tcgtctttctttgaatgctttgttt

SEQ ID NO: 79504 - DNA, 25 bp, Artificial
  Probe
ttagtcgtctttctttgaatgcttt

SEQ ID NO: 79505 - DNA, 25 bp, Artificial
  Probe
tttagtcgtctttctttgaatgctt

SEQ ID NO: 79506 - DNA, 25 bp, Artificial
  Probe
cttgccttctgtggtaatacatgac

SEQ ID NO: 79507 - DNA, 25 bp, Artificial
  Probe
cgtctttctttgaatgctttgttta

SEQ ID NO: 79508 - DNA, 25 bp, Artificial
  Probe
gtcgtctttctttgaatgctttgtt

SEQ ID NO: 79509 - DNA, 25 bp, Artificial
  Probe
gctttagtcgtctttctttgaatgc

SEQ ID NO: 79510 - DNA, 25 bp, Artificial
  Probe
tggctctttaagaattggatttgac

SEQ ID NO: 79511 - DNA, 25 bp, Artificial
  Probe
aatgtgatggctctttaagaattgg

SEQ ID NO: 79512 - DNA, 25 bp, Artificial
  Probe
ttgccttctgtggtaatacatgaca

SEQ ID NO: 79513 - DNA, 25 bp, Artificial
  Probe
ggctctttaagaattggatttgacc

SEQ ID NO: 79514 - DNA, 25 bp, Artificial
  Probe
gtgatggctctttaagaattggatt

SEQ ID NO: 79515 - DNA, 25 bp, Artificial
  Probe
tgtgatggctctttaagaattggat

SEQ ID NO: 79516 - DNA, 25 bp, Artificial
  Probe
atgtgatggctctttaagaattgga

SEQ ID NO: 79517 - DNA, 25 bp, Artificial
  Probe
aacaaatgtgatggctctttaagaa

SEQ ID NO: 79518 - DNA, 25 bp, Artificial
  Probe
aaacaaatgtgatggctctttaaga

SEQ ID NO: 79519 - DNA, 25 bp, Artificial
  Probe
gacagtgtttcttgatatgtatgcc

SEQ ID NO: 79520 - DNA, 25 bp, Artificial
  Probe
agtcgtctttctttgaatgctttgt

SEQ ID NO: 79521 - DNA, 25 bp, Artificial
  Probe
acaaatgtgatggctctttaagaat

SEQ ID NO: 79522 - DNA, 25 bp, Artificial
  Probe
tgtttcttgatatgtatgccacagt

SEQ ID NO: 79523 - DNA, 25 bp, Artificial
  Probe
acagtgtttcttgatatgtatgcca

SEQ ID NO: 79524 - DNA, 25 bp, Artificial
  Probe
gtttcttgatatgtatgccacagtg

SEQ ID NO: 79525 - DNA, 25 bp, Artificial
  Probe
tgacagtgtttcttgatatgtatgc

SEQ ID NO: 79526 - DNA, 25 bp, Artificial
  Probe
cgtgacagtgtttcttgatatgtat

SEQ ID NO: 79527 - DNA, 25 bp, Artificial
  Probe
atggctctttaagaattggatttga

SEQ ID NO: 79528 - DNA, 25 bp, Artificial
  Probe
tgatggctctttaagaattggattt

SEQ ID NO: 79529 - DNA, 25 bp, Artificial
  Probe
gatggctctttaagaattggatttg

SEQ ID NO: 79530 - DNA, 25 bp, Artificial
  Probe
gctgctttagtcgtctttctttgaa

SEQ ID NO: 79531 - DNA, 25 bp, Artificial
  Probe
gtgtttcttgatatgtatgccacag

SEQ ID NO: 79532 - DNA, 25 bp, Artificial
  Probe
cagtgtttcttgatatgtatgccac

SEQ ID NO: 79533 - DNA, 25 bp, Artificial
  Probe
agtgtttcttgatatgtatgccaca

SEQ ID NO: 79534 - DNA, 25 bp, Artificial
  Probe
cttgatatgtatgccacagtgcctt

SEQ ID NO: 79535 - DNA, 25 bp, Artificial
  Probe
ttcttgatatgtatgccacagtgcc

SEQ ID NO: 79536 - DNA, 25 bp, Artificial
  Probe
tctttgaatgctttgtttagatgtt

SEQ ID NO: 79537 - DNA, 25 bp, Artificial
  Probe
ttctttgaatgctttgtttagatgt

SEQ ID NO: 79538 - DNA, 25 bp, Artificial
  Probe
gcaaataaagacaagatggagatcc

SEQ ID NO: 79539 - DNA, 25 bp, Artificial
  Probe
cgggagaaagagtacaagtgtattt

SEQ ID NO: 79540 - DNA, 25 bp, Artificial
  Probe
acgggagaaagagtacaagtgtatt

SEQ ID NO: 79541 - DNA, 25 bp, Artificial
  Probe
aacgggagaaagagtacaagtgtat

SEQ ID NO: 79542 - DNA, 25 bp, Artificial
  Probe
gggagaaagagtacaagtgtattta

SEQ ID NO: 79543 - DNA, 25 bp, Artificial
  Probe
gaacgggagaaagagtacaagtgta

SEQ ID NO: 79544 - DNA, 25 bp, Artificial
  Probe
aaccacatgcaaataaagacaagat

SEQ ID NO: 79545 - DNA, 25 bp, Artificial
  Probe
tgcaaataaagacaagatggagatc

SEQ ID NO: 79546 - DNA, 25 bp, Artificial
  Probe
taaccacatgcaaataaagacaaga

SEQ ID NO: 79547 - DNA, 25 bp, Artificial
  Probe
gtaaccacatgcaaataaagacaag

SEQ ID NO: 79548 - DNA, 25 bp, Artificial
  Probe
acatgcaaataaagacaagatggag

SEQ ID NO: 79549 - DNA, 25 bp, Artificial
  Probe
cacatgcaaataaagacaagatgga

SEQ ID NO: 79550 - DNA, 25 bp, Artificial
  Probe
accacatgcaaataaagacaagatg

SEQ ID NO: 79551 - DNA, 25 bp, Artificial
  Probe
catgcaaataaagacaagatggaga

SEQ ID NO: 79552 - DNA, 25 bp, Artificial
  Probe
atgcaaataaagacaagatggagat

SEQ ID NO: 79553 - DNA, 25 bp, Artificial
  Probe
tgtaaccacatgcaaataaagacaa

SEQ ID NO: 79554 - DNA, 25 bp, Artificial
  Probe
ttgtaaccacatgcaaataaagaca

SEQ ID NO: 79555 - DNA, 25 bp, Artificial
  Probe
attgtaaccacatgcaaataaagac

SEQ ID NO: 79556 - DNA, 25 bp, Artificial
  Probe
tgaattgtaaccacatgcaaataaa

SEQ ID NO: 79557 - DNA, 25 bp, Artificial
  Probe
tttatgaattgtaaccacatgcaaa

SEQ ID NO: 79558 - DNA, 25 bp, Artificial
  Probe
ccacatgcaaataaagacaagatgg

SEQ ID NO: 79559 - DNA, 25 bp, Artificial
  Probe
agacacctcttcagagagacactag

SEQ ID NO: 79560 - DNA, 25 bp, Artificial
  Probe
atgaattgtaaccacatgcaaataa

SEQ ID NO: 79561 - DNA, 25 bp, Artificial
  Probe
ttatgaattgtaaccacatgcaaat

SEQ ID NO: 79562 - DNA, 25 bp, Artificial
  Probe
atttatgaattgtaaccacatgcaa

SEQ ID NO: 79563 - DNA, 25 bp, Artificial
  Probe
gtatttatgaattgtaaccacatgc

SEQ ID NO: 79564 - DNA, 25 bp, Artificial
  Probe
ttgtactgcgtggaccaagatagac

SEQ ID NO: 79565 - DNA, 25 bp, Artificial
  Probe
aattgtaaccacatgcaaataaaga

SEQ ID NO: 79566 - DNA, 25 bp, Artificial
  Probe
cagacacctcttcagagagacacta

SEQ ID NO: 79567 - DNA, 25 bp, Artificial
  Probe
gaattgtaaccacatgcaaataaag

SEQ ID NO: 79568 - DNA, 25 bp, Artificial
  Probe
agtgtatttatgaattgtaaccaca

SEQ ID NO: 79569 - DNA, 25 bp, Artificial
  Probe
ggagaaagagtacaagtgtatttat

SEQ ID NO: 79570 - DNA, 25 bp, Artificial
  Probe
tatgaattgtaaccacatgcaaata

SEQ ID NO: 79571 - DNA, 25 bp, Artificial
  Probe
tatttatgaattgtaaccacatgca

SEQ ID NO: 79572 - DNA, 25 bp, Artificial
  Probe
cagtttgggaacgggagaaagagta

SEQ ID NO: 79573 - DNA, 25 bp, Artificial
  Probe
tttgggaacgggagaaagagtacaa

SEQ ID NO: 79574 - DNA, 25 bp, Artificial
  Probe
caagtgtatttatgaattgtaacca

SEQ ID NO: 79575 - DNA, 25 bp, Artificial
  Probe
ggaacgggagaaagagtacaagtgt

SEQ ID NO: 79576 - DNA, 25 bp, Artificial
  Probe
agtttgggaacgggagaaagagtac

SEQ ID NO: 79577 - DNA, 25 bp, Artificial
  Probe
ttgggaacgggagaaagagtacaag

SEQ ID NO: 79578 - DNA, 25 bp, Artificial
  Probe
agaaagagtacaagtgtatttatga

SEQ ID NO: 79579 - DNA, 25 bp, Artificial
  Probe
ctcagacacctcttcagagagacac

SEQ ID NO: 79580 - DNA, 25 bp, Artificial
  Probe
aagatagaccctgggtgaacatgat

SEQ ID NO: 79581 - DNA, 25 bp, Artificial
  Probe
gtgtatttatgaattgtaaccacat

SEQ ID NO: 79582 - DNA, 25 bp, Artificial
  Probe
aagtgtatttatgaattgtaaccac

SEQ ID NO: 79583 - DNA, 25 bp, Artificial
  Probe
agtccacagtgaacttacaatgaag

SEQ ID NO: 79584 - DNA, 25 bp, Artificial
  Probe
gtccacagtgaacttacaatgaagg

SEQ ID NO: 79585 - DNA, 25 bp, Artificial
  Probe
gtacaattatgtctcttgagcatca

SEQ ID NO: 79586 - DNA, 25 bp, Artificial
  Probe
caatcttgttactgctgattcttgt

SEQ ID NO: 79587 - DNA, 25 bp, Artificial
  Probe
tcaatcttgttactgctgattcttg

SEQ ID NO: 79588 - DNA, 25 bp, Artificial
  Probe
agggaaatcgtctatgtgttatgaa

SEQ ID NO: 79589 - DNA, 25 bp, Artificial
  Probe
aagggaaatcgtctatgtgttatga

SEQ ID NO: 79590 - DNA, 25 bp, Artificial
  Probe
tgaagggaaatcgtctatgtgttat

SEQ ID NO: 79591 - DNA, 25 bp, Artificial
  Probe
atgaagggaaatcgtctatgtgtta

SEQ ID NO: 79592 - DNA, 25 bp, Artificial
  Probe
gaagggaaatcgtctatgtgttatg

SEQ ID NO: 79593 - DNA, 25 bp, Artificial
  Probe
aatgaagggaaatcgtctatgtgtt

SEQ ID NO: 79594 - DNA, 25 bp, Artificial
  Probe
atcttgttactgctgattcttgtaa

SEQ ID NO: 79595 - DNA, 25 bp, Artificial
  Probe
gccttaaactatggacactctatct

SEQ ID NO: 79596 - DNA, 25 bp, Artificial
  Probe
cgccttaaactatggacactctatc

SEQ ID NO: 79597 - DNA, 25 bp, Artificial
  Probe
acttacaatgaagggaaatcgtcta

SEQ ID NO: 79598 - DNA, 25 bp, Artificial
  Probe
gaacttacaatgaagggaaatcgtc

SEQ ID NO: 79599 - DNA, 25 bp, Artificial
  Probe
aacttacaatgaagggaaatcgtct

SEQ ID NO: 79600 - DNA, 25 bp, Artificial
  Probe
gtgaacttacaatgaagggaaatcg

SEQ ID NO: 79601 - DNA, 25 bp, Artificial
  Probe
taatttcgccttaaactatggacac

SEQ ID NO: 79602 - DNA, 25 bp, Artificial
  Probe
gtaatttcgccttaaactatggaca

SEQ ID NO: 79603 - DNA, 25 bp, Artificial
  Probe
tgtaatttcgccttaaactatggac

SEQ ID NO: 79604 - DNA, 25 bp, Artificial
  Probe
gctgtaatttcgccttaaactatgg

SEQ ID NO: 79605 - DNA, 25 bp, Artificial
  Probe
aatttcgccttaaactatggacact

SEQ ID NO: 79606 - DNA, 25 bp, Artificial
  Probe
caatgaagggaaatcgtctatgtgt

SEQ ID NO: 79607 - DNA, 25 bp, Artificial
  Probe
ttacaatgaagggaaatcgtctatg

SEQ ID NO: 79608 - DNA, 25 bp, Artificial
  Probe
aatcttgttactgctgattcttgta

SEQ ID NO: 79609 - DNA, 25 bp, Artificial
  Probe
gggaaatcgtctatgtgttatgaac

SEQ ID NO: 79610 - DNA, 25 bp, Artificial
  Probe
ctgtaatttcgccttaaactatgga

SEQ ID NO: 79611 - DNA, 25 bp, Artificial
  Probe
tgaacttacaatgaagggaaatcgt

SEQ ID NO: 79612 - DNA, 25 bp, Artificial
  Probe
cagtgaacttacaatgaagggaaat

SEQ ID NO: 79613 - DNA, 25 bp, Artificial
  Probe
acagtgaacttacaatgaagggaaa

SEQ ID NO: 79614 - DNA, 25 bp, Artificial
  Probe
tcgccttaaactatggacactctat

SEQ ID NO: 79615 - DNA, 25 bp, Artificial
  Probe
atttcgccttaaactatggacactc

SEQ ID NO: 79616 - DNA, 25 bp, Artificial
  Probe
ttcgccttaaactatggacactcta

SEQ ID NO: 79617 - DNA, 25 bp, Artificial
  Probe
agtgaacttacaatgaagggaaatc

SEQ ID NO: 79618 - DNA, 25 bp, Artificial
  Probe
cttacaatgaagggaaatcgtctat

SEQ ID NO: 79619 - DNA, 25 bp, Artificial
  Probe
tttgcttctactttcatcctaaact

SEQ ID NO: 79620 - DNA, 25 bp, Artificial
  Probe
cacagtgaacttacaatgaagggaa

SEQ ID NO: 79621 - DNA, 25 bp, Artificial
  Probe
tacaatgaagggaaatcgtctatgt

SEQ ID NO: 79622 - DNA, 25 bp, Artificial
  Probe
ccttaaactatggacactctatctg

SEQ ID NO: 79623 - DNA, 25 bp, Artificial
  Probe
catcaatcttgttactgctgattct

SEQ ID NO: 79624 - DNA, 25 bp, Artificial
  Probe
tttcgccttaaactatggacactct

SEQ ID NO: 79625 - DNA, 25 bp, Artificial
  Probe
gccagatataactgtcttgtttcag

SEQ ID NO: 79626 - DNA, 25 bp, Artificial
  Probe
ctcttgagcatcaatcttgttactg

SEQ ID NO: 79627 - DNA, 25 bp, Artificial
  Probe
tctcttgagcatcaatcttgttact

SEQ ID NO: 79628 - DNA, 25 bp, Artificial
  Probe
tagcccctcatcccttttaatataa

SEQ ID NO: 79629 - DNA, 25 bp, Artificial
  Probe
agcccctcatcccttttaatataaa

SEQ ID NO: 79630 - DNA, 25 bp, Artificial
  Probe
ctagcccctcatcccttttaatata

SEQ ID NO: 79631 - DNA, 25 bp, Artificial
  Probe
cctagcccctcatcccttttaatat

SEQ ID NO: 79632 - DNA, 25 bp, Artificial
  Probe
gcccctcatcccttttaatataaaa

SEQ ID NO: 79633 - DNA, 25 bp, Artificial
  Probe
gcctagcccctcatcccttttaata

SEQ ID NO: 79634 - DNA, 25 bp, Artificial
  Probe
agcctagcccctcatcccttttaat

SEQ ID NO: 79635 - DNA, 25 bp, Artificial
  Probe
cttcctcagcctcactttcaataaa

SEQ ID NO: 79636 - DNA, 25 bp, Artificial
  Probe
gatacatcatggtgtccttcgttga

SEQ ID NO: 79637 - DNA, 25 bp, Artificial
  Probe
atacatcatggtgtccttcgttgac

SEQ ID NO: 79638 - DNA, 25 bp, Artificial
  Probe
aatcacaagggtgtagattatgagg

SEQ ID NO: 79639 - DNA, 25 bp, Artificial
  Probe
cctcaatcacaagggtgtagattat

SEQ ID NO: 79640 - DNA, 25 bp, Artificial
  Probe
aactcgatacatcatggtgtccttc

SEQ ID NO: 79641 - DNA, 25 bp, Artificial
  Probe
gaactcgatacatcatggtgtcctt

SEQ ID NO: 79642 - DNA, 25 bp, Artificial
  Probe
tcaatcacaagggtgtagattatga

SEQ ID NO: 79643 - DNA, 25 bp, Artificial
  Probe
caatcacaagggtgtagattatgag

SEQ ID NO: 79644 - DNA, 25 bp, Artificial
  Probe
ctcaatcacaagggtgtagattatg

SEQ ID NO: 79645 - DNA, 25 bp, Artificial
  Probe
atcacaagggtgtagattatgaggg

SEQ ID NO: 79646 - DNA, 25 bp, Artificial
  Probe
aggaggtccctagagtcttctattt

SEQ ID NO: 79647 - DNA, 25 bp, Artificial
  Probe
tcatctcctgagtgtgtctatgtgc

SEQ ID NO: 79648 - DNA, 25 bp, Artificial
  Probe
aagggtgtagattatgagggaggtg

SEQ ID NO: 79649 - DNA, 25 bp, Artificial
  Probe
caagggtgtagattatgagggaggt

SEQ ID NO: 79650 - DNA, 25 bp, Artificial
  Probe
cacaagggtgtagattatgagggag

SEQ ID NO: 79651 - DNA, 25 bp, Artificial
  Probe
caggaggtccctagagtcttctatt

SEQ ID NO: 79652 - DNA, 25 bp, Artificial
  Probe
attctcatctcctgagtgtgtctat

SEQ ID NO: 79653 - DNA, 25 bp, Artificial
  Probe
tcacaagggtgtagattatgaggga

SEQ ID NO: 79654 - DNA, 25 bp, Artificial
  Probe
cttctattttcccattgacccttct

SEQ ID NO: 79655 - DNA, 25 bp, Artificial
  Probe
tcttctattttcccattgacccttc

SEQ ID NO: 79656 - DNA, 25 bp, Artificial
  Probe
ttcctcagcctcactttcaataaaa

SEQ ID NO: 79657 - DNA, 25 bp, Artificial
  Probe
ttctattttcccattgacccttctg

SEQ ID NO: 79658 - DNA, 25 bp, Artificial
  Probe
ggtcccctgcctgataaattattaa

SEQ ID NO: 79659 - DNA, 25 bp, Artificial
  Probe
tcccctgcctgataaattattaagc

SEQ ID NO: 79660 - DNA, 25 bp, Artificial
  Probe
ctattttcccattgacccttctgag

SEQ ID NO: 79661 - DNA, 25 bp, Artificial
  Probe
ttctcatctcctgagtgtgtctatg

SEQ ID NO: 79662 - DNA, 25 bp, Artificial
  Probe
cattctcatctcctgagtgtgtcta

SEQ ID NO: 79663 - DNA, 25 bp, Artificial
  Probe
gtcccctgcctgataaattattaag

SEQ ID NO: 79664 - DNA, 25 bp, Artificial
  Probe
acaagggtgtagattatgagggagg

SEQ ID NO: 79665 - DNA, 25 bp, Artificial
  Probe
tctattttcccattgacccttctga

SEQ ID NO: 79666 - DNA, 25 bp, Artificial
  Probe
ctcaatcagtctgccaaaccttctc

SEQ ID NO: 79667 - DNA, 25 bp, Artificial
  Probe
ctggtggaggaaatggaacactatg

SEQ ID NO: 79668 - DNA, 25 bp, Artificial
  Probe
catctcctgagtgtgtctatgtgcc

SEQ ID NO: 79669 - DNA, 25 bp, Artificial
  Probe
atctcctgagtgtgtctatgtgcct

SEQ ID NO: 79670 - DNA, 25 bp, Artificial
  Probe
agagtcttctattttcccattgacc

SEQ ID NO: 79671 - DNA, 25 bp, Artificial
  Probe
tcaatcagtctgccaaaccttctct

SEQ ID NO: 79672 - DNA, 25 bp, Artificial
  Probe
ctcatctcctgagtgtgtctatgtg

SEQ ID NO: 79673 - DNA, 25 bp, Artificial
  Probe
tctcatctcctgagtgtgtctatgt

SEQ ID NO: 79674 - DNA, 25 bp, Artificial
  Probe
ttgtcattctcatctcctgagtgtg

SEQ ID NO: 79675 - DNA, 25 bp, Artificial
  Probe
gttgtcattctcatctcctgagtgt

SEQ ID NO: 79676 - DNA, 25 bp, Artificial
  Probe
gtcttctattttcccattgaccctt

SEQ ID NO: 79677 - DNA, 25 bp, Artificial
  Probe
ctgggttgtcattctcatctcctga

SEQ ID NO: 79678 - DNA, 25 bp, Artificial
  Probe
gagtcttctattttcccattgaccc

SEQ ID NO: 79679 - DNA, 25 bp, Artificial
  Probe
gggtcccctgcctgataaattatta

SEQ ID NO: 79680 - DNA, 25 bp, Artificial
  Probe
gattcaaggacaacacaaccatttc

SEQ ID NO: 79681 - DNA, 25 bp, Artificial
  Probe
attcaaggacaacacaaccatttct

SEQ ID NO: 79682 - DNA, 25 bp, Artificial
  Probe
ctactcgattcaaggacaacacaac

SEQ ID NO: 79683 - DNA, 25 bp, Artificial
  Probe
ttcaaggacaacacaaccatttctc

SEQ ID NO: 79684 - DNA, 25 bp, Artificial
  Probe
cgattcaaggacaacacaaccattt

SEQ ID NO: 79685 - DNA, 25 bp, Artificial
  Probe
tactcgattcaaggacaacacaacc

SEQ ID NO: 79686 - DNA, 25 bp, Artificial
  Probe
tcgattcaaggacaacacaaccatt

SEQ ID NO: 79687 - DNA, 25 bp, Artificial
  Probe
cctactcgattcaaggacaacacaa

SEQ ID NO: 79688 - DNA, 25 bp, Artificial
  Probe
ctcgattcaaggacaacacaaccat

SEQ ID NO: 79689 - DNA, 25 bp, Artificial
  Probe
gaaaggctattgggcaagtttggat

SEQ ID NO: 79690 - DNA, 25 bp, Artificial
  Probe
aaaggctattgggcaagtttggatg

SEQ ID NO: 79691 - DNA, 25 bp, Artificial
  Probe
tcaaggacaacacaaccatttctcc

SEQ ID NO: 79692 - DNA, 25 bp, Artificial
  Probe
actcgattcaaggacaacacaacca

SEQ ID NO: 79693 - DNA, 25 bp, Artificial
  Probe
acaacagtctcactttgccatgatg

SEQ ID NO: 79694 - DNA, 25 bp, Artificial
  Probe
gacaacagtctcactttgccatgat

SEQ ID NO: 79695 - DNA, 25 bp, Artificial
  Probe
cctctagacgcctactcgattcaag

SEQ ID NO: 79696 - DNA, 25 bp, Artificial
  Probe
ctagacgcctactcgattcaaggac

SEQ ID NO: 79697 - DNA, 25 bp, Artificial
  Probe
gtgaaaggctattgggcaagtttgg

SEQ ID NO: 79698 - DNA, 25 bp, Artificial
  Probe
ggtgaaaggctattgggcaagtttg

SEQ ID NO: 79699 - DNA, 25 bp, Artificial
  Probe
tgaaaggctattgggcaagtttgga

SEQ ID NO: 79700 - DNA, 25 bp, Artificial
  Probe
aggtgaaaggctattgggcaagttt

SEQ ID NO: 79701 - DNA, 25 bp, Artificial
  Probe
ctctagacgcctactcgattcaagg

SEQ ID NO: 79702 - DNA, 25 bp, Artificial
  Probe
acctctagacgcctactcgattcaa

SEQ ID NO: 79703 - DNA, 25 bp, Artificial
  Probe
gcctactcgattcaaggacaacaca

SEQ ID NO: 79704 - DNA, 25 bp, Artificial
  Probe
caaggacaacacaaccatttctccg

SEQ ID NO: 79705 - DNA, 25 bp, Artificial
  Probe
tagacgcctactcgattcaaggaca

SEQ ID NO: 79706 - DNA, 25 bp, Artificial
  Probe
tctagacgcctactcgattcaagga

SEQ ID NO: 79707 - DNA, 25 bp, Artificial
  Probe
ctctccagaggtgaaaggctattgg

SEQ ID NO: 79708 - DNA, 25 bp, Artificial
  Probe
caacagtctcactttgccatgatgc

SEQ ID NO: 79709 - DNA, 25 bp, Artificial
  Probe
gctctccagaggtgaaaggctattg

SEQ ID NO: 79710 - DNA, 25 bp, Artificial
  Probe
gtcaccgagtgtgttaagcagatct

SEQ ID NO: 79711 - DNA, 25 bp, Artificial
  Probe
aagacaacagtctcactttgccatg

SEQ ID NO: 79712 - DNA, 25 bp, Artificial
  Probe
caagacaacagtctcactttgccat

SEQ ID NO: 79713 - DNA, 25 bp, Artificial
  Probe
agacaacagtctcactttgccatga

SEQ ID NO: 79714 - DNA, 25 bp, Artificial
  Probe
gtggcaagacaacagtctcactttg

SEQ ID NO: 79715 - DNA, 25 bp, Artificial
  Probe
agctctccagaggtgaaaggctatt

SEQ ID NO: 79716 - DNA, 25 bp, Artificial
  Probe
gactattgcctaccctcatctcaag

SEQ ID NO: 79717 - DNA, 25 bp, Artificial
  Probe
ctattgcctaccctcatctcaagtg

SEQ ID NO: 79718 - DNA, 25 bp, Artificial
  Probe
actattgcctaccctcatctcaagt

SEQ ID NO: 79719 - DNA, 25 bp, Artificial
  Probe
aatcctcaacttctgaagtgaatgt

SEQ ID NO: 79720 - DNA, 25 bp, Artificial
  Probe
gaatcctcaacttctgaagtgaatg

SEQ ID NO: 79721 - DNA, 25 bp, Artificial
  Probe
ggaatcctcaacttctgaagtgaat

SEQ ID NO: 79722 - DNA, 25 bp, Artificial
  Probe
atcctcaacttctgaagtgaatgtc

SEQ ID NO: 79723 - DNA, 25 bp, Artificial
  Probe
catctcaagtggctcatgatacaag

SEQ ID NO: 79724 - DNA, 25 bp, Artificial
  Probe
ggactattgcctaccctcatctcaa

SEQ ID NO: 79725 - DNA, 25 bp, Artificial
  Probe
tcctcaacttctgaagtgaatgtca

SEQ ID NO: 79726 - DNA, 25 bp, Artificial
  Probe
tggaatcctcaacttctgaagtgaa

SEQ ID NO: 79727 - DNA, 25 bp, Artificial
  Probe
ttggaatcctcaacttctgaagtga

SEQ ID NO: 79728 - DNA, 25 bp, Artificial
  Probe
cttgtcttgtgggactattgcctac

SEQ ID NO: 79729 - DNA, 25 bp, Artificial
  Probe
tcttgtcttgtgggactattgccta

SEQ ID NO: 79730 - DNA, 25 bp, Artificial
  Probe
tattgcctaccctcatctcaagtgg

SEQ ID NO: 79731 - DNA, 25 bp, Artificial
  Probe
atctcaagtggctcatgatacaagg

SEQ ID NO: 79732 - DNA, 25 bp, Artificial
  Probe
ccttttggaatcctcaacttctgaa

SEQ ID NO: 79733 - DNA, 25 bp, Artificial
  Probe
cttttggaatcctcaacttctgaag

SEQ ID NO: 79734 - DNA, 25 bp, Artificial
  Probe
atcttgtcttgtgggactattgcct

SEQ ID NO: 79735 - DNA, 25 bp, Artificial
  Probe
catcttgtcttgtgggactattgcc

SEQ ID NO: 79736 - DNA, 25 bp, Artificial
  Probe
tactctccttttggaatcctcaact

SEQ ID NO: 79737 - DNA, 25 bp, Artificial
  Probe
ctctccttttggaatcctcaacttc

SEQ ID NO: 79738 - DNA, 25 bp, Artificial
  Probe
ctccttttggaatcctcaacttctg

SEQ ID NO: 79739 - DNA, 25 bp, Artificial
  Probe
tctccttttggaatcctcaacttct

SEQ ID NO: 79740 - DNA, 25 bp, Artificial
  Probe
tttggaatcctcaacttctgaagtg

SEQ ID NO: 79741 - DNA, 25 bp, Artificial
  Probe
tcatctcaagtggctcatgatacaa

SEQ ID NO: 79742 - DNA, 25 bp, Artificial
  Probe
ccatcttgtcttgtgggactattgc

SEQ ID NO: 79743 - DNA, 25 bp, Artificial
  Probe
gccatcttgtcttgtgggactattg

SEQ ID NO: 79744 - DNA, 25 bp, Artificial
  Probe
tccttttggaatcctcaacttctga

SEQ ID NO: 79745 - DNA, 25 bp, Artificial
  Probe
actctccttttggaatcctcaactt

SEQ ID NO: 79746 - DNA, 25 bp, Artificial
  Probe
cctcaacttctgaagtgaatgtcac

SEQ ID NO: 79747 - DNA, 25 bp, Artificial
  Probe
ctcatctcaagtggctcatgataca

SEQ ID NO: 79748 - DNA, 25 bp, Artificial
  Probe
ttgtcttgtgggactattgcctacc

SEQ ID NO: 79749 - DNA, 25 bp, Artificial
  Probe
tgccatcttgtcttgtgggactatt

SEQ ID NO: 79750 - DNA, 25 bp, Artificial
  Probe
ctaccctcatctcaagtggctcatg

SEQ ID NO: 79751 - DNA, 25 bp, Artificial
  Probe
cctcatctcaagtggctcatgatac

SEQ ID NO: 79752 - DNA, 25 bp, Artificial
  Probe
ctgccatcttgtcttgtgggactat

SEQ ID NO: 79753 - DNA, 25 bp, Artificial
  Probe
ttttggaatcctcaacttctgaagt

SEQ ID NO: 79754 - DNA, 25 bp, Artificial
  Probe
tctcaagtggctcatgatacaaggg

SEQ ID NO: 79755 - DNA, 25 bp, Artificial
  Probe
ctcaagtggctcatgatacaagggt

SEQ ID NO: 79756 - DNA, 25 bp, Artificial
  Probe
gggactattgcctaccctcatctca

SEQ ID NO: 79757 - DNA, 25 bp, Artificial
  Probe
tgggactattgcctaccctcatctc

SEQ ID NO: 79758 - DNA, 25 bp, Artificial
  Probe
ttgtgggactattgcctaccctcat

SEQ ID NO: 79759 - DNA, 25 bp, Artificial
  Probe
tcaagtggctcatgatacaagggtg

SEQ ID NO: 79760 - DNA, 25 bp, Artificial
  Probe
ccctcatctcaagtggctcatgata

SEQ ID NO: 79761 - DNA, 25 bp, Artificial
  Probe
gatcatcatttgctgtgtgattctg

SEQ ID NO: 79762 - DNA, 25 bp, Artificial
  Probe
ttctcatccacaggcaaggagtatg

SEQ ID NO: 79763 - DNA, 25 bp, Artificial
  Probe
ctagtgatcctttgctaagaagctc

SEQ ID NO: 79764 - DNA, 25 bp, Artificial
  Probe
atcatcatttgctgtgtgattctgg

SEQ ID NO: 79765 - DNA, 25 bp, Artificial
  Probe
agcctagtgatcctttgctaagaag

SEQ ID NO: 79766 - DNA, 25 bp, Artificial
  Probe
gagcctagtgatcctttgctaagaa

SEQ ID NO: 79767 - DNA, 25 bp, Artificial
  Probe
tagtgatcctttgctaagaagctca

SEQ ID NO: 79768 - DNA, 25 bp, Artificial
  Probe
tttctcatccacaggcaaggagtat

SEQ ID NO: 79769 - DNA, 25 bp, Artificial
  Probe
cagtctctaacgggcatgttaagtc

SEQ ID NO: 79770 - DNA, 25 bp, Artificial
  Probe
ctgagcctagtgatcctttgctaag

SEQ ID NO: 79771 - DNA, 25 bp, Artificial
  Probe
cctagtgatcctttgctaagaagct

SEQ ID NO: 79772 - DNA, 25 bp, Artificial
  Probe
atagtcctctgcccacagtctctaa

SEQ ID NO: 79773 - DNA, 25 bp, Artificial
  Probe
tgtagaataaacatttgtatctgga

SEQ ID NO: 79774 - DNA, 25 bp, Artificial
  Probe
tgagcctagtgatcctttgctaaga

SEQ ID NO: 79775 - DNA, 25 bp, Artificial
  Probe
cacagtctctaacgggcatgttaag

SEQ ID NO: 79776 - DNA, 25 bp, Artificial
  Probe
gatcttgtgacagtgtgtgtctgta

SEQ ID NO: 79777 - DNA, 25 bp, Artificial
  Probe
agtgatcctttgctaagaagctcag

SEQ ID NO: 79778 - DNA, 25 bp, Artificial
  Probe
atcttgtgacagtgtgtgtctgtac

SEQ ID NO: 79779 - DNA, 25 bp, Artificial
  Probe
tgatcctttgctaagaagctcagtg

SEQ ID NO: 79780 - DNA, 25 bp, Artificial
  Probe
gtgatcctttgctaagaagctcagt

SEQ ID NO: 79781 - DNA, 25 bp, Artificial
  Probe
acagtctctaacgggcatgttaagt

SEQ ID NO: 79782 - DNA, 25 bp, Artificial
  Probe
ctttctcatccacaggcaaggagta

SEQ ID NO: 79783 - DNA, 25 bp, Artificial
  Probe
ctaagaagctcagtggtgccatctc

SEQ ID NO: 79784 - DNA, 25 bp, Artificial
  Probe
gcctagtgatcctttgctaagaagc

SEQ ID NO: 79785 - DNA, 25 bp, Artificial
  Probe
gtgcatgatcttgtgacagtgtgtg

SEQ ID NO: 79786 - DNA, 25 bp, Artificial
  Probe
gtgtgcatgatcttgtgacagtgtg

SEQ ID NO: 79787 - DNA, 25 bp, Artificial
  Probe
atgatcttgtgacagtgtgtgtctg

SEQ ID NO: 79788 - DNA, 25 bp, Artificial
  Probe
catgatcttgtgacagtgtgtgtct

SEQ ID NO: 79789 - DNA, 25 bp, Artificial
  Probe
tcatcatttgctgtgtgattctggg

SEQ ID NO: 79790 - DNA, 25 bp, Artificial
  Probe
catagtcctctgcccacagtctcta

SEQ ID NO: 79791 - DNA, 25 bp, Artificial
  Probe
cctgagcctagtgatcctttgctaa

SEQ ID NO: 79792 - DNA, 25 bp, Artificial
  Probe
ctgtgtgattctgggcatcatcatc

SEQ ID NO: 79793 - DNA, 25 bp, Artificial
  Probe
tgatcatcatttgctgtgtgattct

SEQ ID NO: 79794 - DNA, 25 bp, Artificial
  Probe
gatcctttgctaagaagctcagtgg

SEQ ID NO: 79795 - DNA, 25 bp, Artificial
  Probe
tgcatgatcttgtgacagtgtgtgt

SEQ ID NO: 79796 - DNA, 25 bp, Artificial
  Probe
tgtgcatgatcttgtgacagtgtgt

SEQ ID NO: 79797 - DNA, 25 bp, Artificial
  Probe
tagtcctctgcccacagtctctaac

SEQ ID NO: 79798 - DNA, 25 bp, Artificial
  Probe
agtctctaacgggcatgttaagtcg

SEQ ID NO: 79799 - DNA, 25 bp, Artificial
  Probe
ccacagtctctaacgggcatgttaa

SEQ ID NO: 79800 - DNA, 25 bp, Artificial
  Probe
atcctttgctaagaagctcagtggt

SEQ ID NO: 79801 - DNA, 25 bp, Artificial
  Probe
tgatcttgtgacagtgtgtgtctgt

SEQ ID NO: 79802 - DNA, 25 bp, Artificial
  Probe
aacttggggcttctcagagtcaaaa

SEQ ID NO: 79803 - DNA, 25 bp, Artificial
  Probe
gcatgatcttgtgacagtgtgtgtc

SEQ ID NO: 79804 - DNA, 25 bp, Artificial
  Probe
tctctaacgggcatgttaagtcgtg

SEQ ID NO: 79805 - DNA, 25 bp, Artificial
  Probe
gtctctaacgggcatgttaagtcgt

SEQ ID NO: 79806 - DNA, 25 bp, Artificial
  Probe
aagtcaactgaagtctgtgattaac

SEQ ID NO: 79807 - DNA, 25 bp, Artificial
  Probe
caagtcaactgaagtctgtgattaa

SEQ ID NO: 79808 - DNA, 25 bp, Artificial
  Probe
tgtctgagtcacttgttaatgttaa

SEQ ID NO: 79809 - DNA, 25 bp, Artificial
  Probe
agtcaactgaagtctgtgattaaca

SEQ ID NO: 79810 - DNA, 25 bp, Artificial
  Probe
gcaagtcaactgaagtctgtgatta

SEQ ID NO: 79811 - DNA, 25 bp, Artificial
  Probe
cttggtgagagaatgtgagaactga

SEQ ID NO: 79812 - DNA, 25 bp, Artificial
  Probe
gtcaactgaagtctgtgattaacac

SEQ ID NO: 79813 - DNA, 25 bp, Artificial
  Probe
ttggtgagagaatgtgagaactgac

SEQ ID NO: 79814 - DNA, 25 bp, Artificial
  Probe
tgttgtagatacagtgtctgagtca

SEQ ID NO: 79815 - DNA, 25 bp, Artificial
  Probe
gtgtctgagtcacttgttaatgtta

SEQ ID NO: 79816 - DNA, 25 bp, Artificial
  Probe
gttgtagatacagtgtctgagtcac

SEQ ID NO: 79817 - DNA, 25 bp, Artificial
  Probe
gagagaatgtgagaactgacctgac

SEQ ID NO: 79818 - DNA, 25 bp, Artificial
  Probe
tgagagaatgtgagaactgacctga

SEQ ID NO: 79819 - DNA, 25 bp, Artificial
  Probe
gtgagagaatgtgagaactgacctg

SEQ ID NO: 79820 - DNA, 25 bp, Artificial
  Probe
gtgtcaatgtgtcttagggagtatt

SEQ ID NO: 79821 - DNA, 25 bp, Artificial
  Probe
tgagagaaatggaactaatgatggg

SEQ ID NO: 79822 - DNA, 25 bp, Artificial
  Probe
tgtcaatgtgtcttagggagtattt

SEQ ID NO: 79823 - DNA, 25 bp, Artificial
  Probe
ctggagaggacaattacctgaactt

SEQ ID NO: 79824 - DNA, 25 bp, Artificial
  Probe
tgtgtcaatgtgtcttagggagtat

SEQ ID NO: 79825 - DNA, 25 bp, Artificial
  Probe
tcaccaacataccctacatcatcat

SEQ ID NO: 79826 - DNA, 25 bp, Artificial
  Probe
atgagagaaatggaactaatgatgg

SEQ ID NO: 79827 - DNA, 25 bp, Artificial
  Probe
ctgaaactgtgtcaatgtgtcttag

SEQ ID NO: 79828 - DNA, 25 bp, Artificial
  Probe
tctgaaactgtgtcaatgtgtctta

SEQ ID NO: 79829 - DNA, 25 bp, Artificial
  Probe
ctgtgtcaatgtgtcttagggagta

SEQ ID NO: 79830 - DNA, 25 bp, Artificial
  Probe
gcaggtccgtctatataactttcag

SEQ ID NO: 79831 - DNA, 25 bp, Artificial
  Probe
gaaatactagccaattcctccgaaa

SEQ ID NO: 79832 - DNA, 25 bp, Artificial
  Probe
gaaactgtgtcaatgtgtcttaggg

SEQ ID NO: 79833 - DNA, 25 bp, Artificial
  Probe
gactggagaggacaattacctgaac

SEQ ID NO: 79834 - DNA, 25 bp, Artificial
  Probe
gtcaatgtgtcttagggagtattta

SEQ ID NO: 79835 - DNA, 25 bp, Artificial
  Probe
tgaaactgtgtcaatgtgtcttagg

SEQ ID NO: 79836 - DNA, 25 bp, Artificial
  Probe
ctttgattgtcaccaacatacccta

SEQ ID NO: 79837 - DNA, 25 bp, Artificial
  Probe
ttctgactggagaggacaattacct

SEQ ID NO: 79838 - DNA, 25 bp, Artificial
  Probe
aaactgtgtcaatgtgtcttaggga

SEQ ID NO: 79839 - DNA, 25 bp, Artificial
  Probe
caaacaaggaagaacatgagtcatt

SEQ ID NO: 79840 - DNA, 25 bp, Artificial
  Probe
caactttgattgtcaccaacatacc

SEQ ID NO: 79841 - DNA, 25 bp, Artificial
  Probe
caggtccgtctatataactttcagt

SEQ ID NO: 79842 - DNA, 25 bp, Artificial
  Probe
ctctgaaactgtgtcaatgtgtctt

SEQ ID NO: 79843 - DNA, 25 bp, Artificial
  Probe
gtcaccaacataccctacatcatca

SEQ ID NO: 79844 - DNA, 25 bp, Artificial
  Probe
atgtctctgaaactgtgtcaatgtg

SEQ ID NO: 79845 - DNA, 25 bp, Artificial
  Probe
gcttggtgagagaatgtgagaactg

SEQ ID NO: 79846 - DNA, 25 bp, Artificial
  Probe
tttgattgtcaccaacataccctac

SEQ ID NO: 79847 - DNA, 25 bp, Artificial
  Probe
agaaatactagccaattcctccgaa

SEQ ID NO: 79848 - DNA, 25 bp, Artificial
  Probe
aaacaaggaagaacatgagtcattt

SEQ ID NO: 79849 - DNA, 25 bp, Artificial
  Probe
aacaaggaagaacatgagtcatttg

SEQ ID NO: 79850 - DNA, 25 bp, Artificial
  Probe
ctcatacggacctaatgggacttac

SEQ ID NO: 79851 - DNA, 25 bp, Artificial
  Probe
cttacctgcttggaactatgtctgg

SEQ ID NO: 79852 - DNA, 25 bp, Artificial
  Probe
ccttacctgcttggaactatgtctg

SEQ ID NO: 79853 - DNA, 25 bp, Artificial
  Probe
cagggagttacattgctaccataag

SEQ ID NO: 79854 - DNA, 25 bp, Artificial
  Probe
ttaacccttacctgcttggaactat

SEQ ID NO: 79855 - DNA, 25 bp, Artificial
  Probe
attaacccttacctgcttggaacta

SEQ ID NO: 79856 - DNA, 25 bp, Artificial
  Probe
ccaaggaatgcaggctatactatct

SEQ ID NO: 79857 - DNA, 25 bp, Artificial
  Probe
agggagttacattgctaccataagg

SEQ ID NO: 79858 - DNA, 25 bp, Artificial
  Probe
tatggagacatctttgtttaccctc

SEQ ID NO: 79859 - DNA, 25 bp, Artificial
  Probe
caaggaatgcaggctatactatctg

SEQ ID NO: 79860 - DNA, 25 bp, Artificial
  Probe
taacccttacctgcttggaactatg

SEQ ID NO: 79861 - DNA, 25 bp, Artificial
  Probe
taagtagtcatggcgttactggatc

SEQ ID NO: 79862 - DNA, 25 bp, Artificial
  Probe
ctaagtagtcatggcgttactggat

SEQ ID NO: 79863 - DNA, 25 bp, Artificial
  Probe
gagattaacccttacctgcttggaa

SEQ ID NO: 79864 - DNA, 25 bp, Artificial
  Probe
atggagacatctttgtttaccctct

SEQ ID NO: 79865 - DNA, 25 bp, Artificial
  Probe
gattaacccttacctgcttggaact

SEQ ID NO: 79866 - DNA, 25 bp, Artificial
  Probe
agattaacccttacctgcttggaac

SEQ ID NO: 79867 - DNA, 25 bp, Artificial
  Probe
gggagttacattgctaccataaggg

SEQ ID NO: 79868 - DNA, 25 bp, Artificial
  Probe
ttacattgctaccataagggtgaac

SEQ ID NO: 79869 - DNA, 25 bp, Artificial
  Probe
gttacattgctaccataagggtgaa

SEQ ID NO: 79870 - DNA, 25 bp, Artificial
  Probe
ctgcttggaactatgtctggttgtg

SEQ ID NO: 79871 - DNA, 25 bp, Artificial
  Probe
gagttacattgctaccataagggtg

SEQ ID NO: 79872 - DNA, 25 bp, Artificial
  Probe
agttacattgctaccataagggtga

SEQ ID NO: 79873 - DNA, 25 bp, Artificial
  Probe
tacattgctaccataagggtgaaca

SEQ ID NO: 79874 - DNA, 25 bp, Artificial
  Probe
cattgctaccataagggtgaacaag

SEQ ID NO: 79875 - DNA, 25 bp, Artificial
  Probe
tacctgcttggaactatgtctggtt

SEQ ID NO: 79876 - DNA, 25 bp, Artificial
  Probe
ttacctgcttggaactatgtctggt

SEQ ID NO: 79877 - DNA, 25 bp, Artificial
  Probe
ctaccataagggtgaacaaggtgat

SEQ ID NO: 79878 - DNA, 25 bp, Artificial
  Probe
ggagttacattgctaccataagggt

SEQ ID NO: 79879 - DNA, 25 bp, Artificial
  Probe
aagtagtcatggcgttactggatct

SEQ ID NO: 79880 - DNA, 25 bp, Artificial
  Probe
acattgctaccataagggtgaacaa

SEQ ID NO: 79881 - DNA, 25 bp, Artificial
  Probe
gaaaggaaggttcagattgaaatgg

SEQ ID NO: 79882 - DNA, 25 bp, Artificial
  Probe
ggaaaggaaggttcagattgaaatg

SEQ ID NO: 79883 - DNA, 25 bp, Artificial
  Probe
aggaaaggaaggttcagattgaaat

SEQ ID NO: 79884 - DNA, 25 bp, Artificial
  Probe
aacccttacctgcttggaactatgt

SEQ ID NO: 79885 - DNA, 25 bp, Artificial
  Probe
cccttacctgcttggaactatgtct

SEQ ID NO: 79886 - DNA, 25 bp, Artificial
  Probe
caggaaaggaaggttcagattgaaa

SEQ ID NO: 79887 - DNA, 25 bp, Artificial
  Probe
aattcctgaggtcctttggtgatga

SEQ ID NO: 79888 - DNA, 25 bp, Artificial
  Probe
attgctaccataagggtgaacaagg

SEQ ID NO: 79889 - DNA, 25 bp, Artificial
  Probe
tagtcatggcgttactggatctgtg

SEQ ID NO: 79890 - DNA, 25 bp, Artificial
  Probe
gtagtcatggcgttactggatctgt

SEQ ID NO: 79891 - DNA, 25 bp, Artificial
  Probe
cctgcttggaactatgtctggttgt

SEQ ID NO: 79892 - DNA, 25 bp, Artificial
  Probe
acccttacctgcttggaactatgtc

SEQ ID NO: 79893 - DNA, 25 bp, Artificial
  Probe
aaaggaaggttcagattgaaatggc

SEQ ID NO: 79894 - DNA, 25 bp, Artificial
  Probe
ctatactatctgcggaatggggaac

SEQ ID NO: 79895 - DNA, 25 bp, Artificial
  Probe
agtagtcatggcgttactggatctg

SEQ ID NO: 79896 - DNA, 25 bp, Artificial
  Probe
ccagccaattcagatttatgagaag

SEQ ID NO: 79897 - DNA, 25 bp, Artificial
  Probe
accagccaattcagatttatgagaa

SEQ ID NO: 79898 - DNA, 25 bp, Artificial
  Probe
gaccagccaattcagatttatgaga

SEQ ID NO: 79899 - DNA, 25 bp, Artificial
  Probe
cagccaattcagatttatgagaaga

SEQ ID NO: 79900 - DNA, 25 bp, Artificial
  Probe
tgaccagccaattcagatttatgag

SEQ ID NO: 79901 - DNA, 25 bp, Artificial
  Probe
agccaattcagatttatgagaagat

SEQ ID NO: 79902 - DNA, 25 bp, Artificial
  Probe
catcctcagcaagggttacaataag

SEQ ID NO: 79903 - DNA, 25 bp, Artificial
  Probe
atcatcctcagcaagggttacaata

SEQ ID NO: 79904 - DNA, 25 bp, Artificial
  Probe
gccaattcagatttatgagaagatt

SEQ ID NO: 79905 - DNA, 25 bp, Artificial
  Probe
tcatcctcagcaagggttacaataa

SEQ ID NO: 79906 - DNA, 25 bp, Artificial
  Probe
cttaattgaccaccagggttacatc

SEQ ID NO: 79907 - DNA, 25 bp, Artificial
  Probe
tcttaattgaccaccagggttacat

SEQ ID NO: 79908 - DNA, 25 bp, Artificial
  Probe
acttcgatgactatgaagaagaaga

SEQ ID NO: 79909 - DNA, 25 bp, Artificial
  Probe
atcctcagcaagggttacaataagg

SEQ ID NO: 79910 - DNA, 25 bp, Artificial
  Probe
caacttcgatgactatgaagaagaa

SEQ ID NO: 79911 - DNA, 25 bp, Artificial
  Probe
aacttcgatgactatgaagaagaag

SEQ ID NO: 79912 - DNA, 25 bp, Artificial
  Probe
agggttacatccaggtcacagattt

SEQ ID NO: 79913 - DNA, 25 bp, Artificial
  Probe
ctcttaattgaccaccagggttaca

SEQ ID NO: 79914 - DNA, 25 bp, Artificial
  Probe
gttacaataaggcagtggactggtg

SEQ ID NO: 79915 - DNA, 25 bp, Artificial
  Probe
caagggttacaataaggcagtggac

SEQ ID NO: 79916 - DNA, 25 bp, Artificial
  Probe
attgggtgtactgatctacgagatg

SEQ ID NO: 79917 - DNA, 25 bp, Artificial
  Probe
cattgggtgtactgatctacgagat

SEQ ID NO: 79918 - DNA, 25 bp, Artificial
  Probe
ttaattgaccaccagggttacatcc

SEQ ID NO: 79919 - DNA, 25 bp, Artificial
  Probe
ctcagcaagggttacaataaggcag

SEQ ID NO: 79920 - DNA, 25 bp, Artificial
  Probe
gatcatcctcagcaagggttacaat

SEQ ID NO: 79921 - DNA, 25 bp, Artificial
  Probe
aagggttacaataaggcagtggact

SEQ ID NO: 79922 - DNA, 25 bp, Artificial
  Probe
ggttacatccaggtcacagattttg

SEQ ID NO: 79923 - DNA, 25 bp, Artificial
  Probe
ggaaaacctcttaattgaccaccag

SEQ ID NO: 79924 - DNA, 25 bp, Artificial
  Probe
cctcttaattgaccaccagggttac

SEQ ID NO: 79925 - DNA, 25 bp, Artificial
  Probe
cagggttacatccaggtcacagatt

SEQ ID NO: 79926 - DNA, 25 bp, Artificial
  Probe
acctcttaattgaccaccagggtta

SEQ ID NO: 79927 - DNA, 25 bp, Artificial
  Probe
cagcaagggttacaataaggcagtg

SEQ ID NO: 79928 - DNA, 25 bp, Artificial
  Probe
tcagcaagggttacaataaggcagt

SEQ ID NO: 79929 - DNA, 25 bp, Artificial
  Probe
ttcagttccgatctcaaggaccttc

SEQ ID NO: 79930 - DNA, 25 bp, Artificial
  Probe
cttcagttccgatctcaaggacctt

SEQ ID NO: 79931 - DNA, 25 bp, Artificial
  Probe
taattgaccaccagggttacatcca

SEQ ID NO: 79932 - DNA, 25 bp, Artificial
  Probe
agatcatcctcagcaagggttacaa

SEQ ID NO: 79933 - DNA, 25 bp, Artificial
  Probe
gggttacatccaggtcacagatttt

SEQ ID NO: 79934 - DNA, 25 bp, Artificial
  Probe
gcattgggtgtactgatctacgaga

SEQ ID NO: 79935 - DNA, 25 bp, Artificial
  Probe
agagatcatcctcagcaagggttac

SEQ ID NO: 79936 - DNA, 25 bp, Artificial
  Probe
cagagatcatcctcagcaagggtta

SEQ ID NO: 79937 - DNA, 25 bp, Artificial
  Probe
gaaaacctcttaattgaccaccagg

SEQ ID NO: 79938 - DNA, 25 bp, Artificial
  Probe
ttacaataaggcagtggactggtgg

SEQ ID NO: 79939 - DNA, 25 bp, Artificial
  Probe
ggttacaataaggcagtggactggt

SEQ ID NO: 79940 - DNA, 25 bp, Artificial
  Probe
ggtgtactgatctacgagatggctg

SEQ ID NO: 79941 - DNA, 25 bp, Artificial
  Probe
aacactgacatgaagtacaagaacc

SEQ ID NO: 79942 - DNA, 25 bp, Artificial
  Probe
ctgctgagtccttgtactgatgtag

SEQ ID NO: 79943 - DNA, 25 bp, Artificial
  Probe
tctgctgagtccttgtactgatgta

SEQ ID NO: 79944 - DNA, 25 bp, Artificial
  Probe
ctctaacctgaaagatgccaagaac

SEQ ID NO: 79945 - DNA, 25 bp, Artificial
  Probe
tctctaacctgaaagatgccaagaa

SEQ ID NO: 79946 - DNA, 25 bp, Artificial
  Probe
tgacatgaagtacaagaaccgtgtt

SEQ ID NO: 79947 - DNA, 25 bp, Artificial
  Probe
aaacactgacatgaagtacaagaac

SEQ ID NO: 79948 - DNA, 25 bp, Artificial
  Probe
gaaacactgacatgaagtacaagaa

SEQ ID NO: 79949 - DNA, 25 bp, Artificial
  Probe
gaagttctgctgagtccttgtactg

SEQ ID NO: 79950 - DNA, 25 bp, Artificial
  Probe
ggaaacactgacatgaagtacaaga

SEQ ID NO: 79951 - DNA, 25 bp, Artificial
  Probe
gttctgctgagtccttgtactgatg

SEQ ID NO: 79952 - DNA, 25 bp, Artificial
  Probe
agttctgctgagtccttgtactgat

SEQ ID NO: 79953 - DNA, 25 bp, Artificial
  Probe
actgacatgaagtacaagaaccgtg

SEQ ID NO: 79954 - DNA, 25 bp, Artificial
  Probe
cactgacatgaagtacaagaaccgt

SEQ ID NO: 79955 - DNA, 25 bp, Artificial
  Probe
acactgacatgaagtacaagaaccg

SEQ ID NO: 79956 - DNA, 25 bp, Artificial
  Probe
aagttctgctgagtccttgtactga

SEQ ID NO: 79957 - DNA, 25 bp, Artificial
  Probe
ctgacatgaagtacaagaaccgtgt

SEQ ID NO: 79958 - DNA, 25 bp, Artificial
  Probe
ttctgctgagtccttgtactgatgt

SEQ ID NO: 79959 - DNA, 25 bp, Artificial
  Probe
gggaaacactgacatgaagtacaag

SEQ ID NO: 79960 - DNA, 25 bp, Artificial
  Probe
tctaacctgaaagatgccaagaacc

SEQ ID NO: 79961 - DNA, 25 bp, Artificial
  Probe
aatctctaacctgaaagatgccaag

SEQ ID NO: 79962 - DNA, 25 bp, Artificial
  Probe
gaatctctaacctgaaagatgccaa

SEQ ID NO: 79963 - DNA, 25 bp, Artificial
  Probe
atggaagttctgctgagtccttgta

SEQ ID NO: 79964 - DNA, 25 bp, Artificial
  Probe
tgggaaacactgacatgaagtacaa

SEQ ID NO: 79965 - DNA, 25 bp, Artificial
  Probe
atctctaacctgaaagatgccaaga

SEQ ID NO: 79966 - DNA, 25 bp, Artificial
  Probe
acctatgttgtctgcaatgagtgtg

SEQ ID NO: 79967 - DNA, 25 bp, Artificial
  Probe
ctaacctgaaagatgccaagaaccc

SEQ ID NO: 79968 - DNA, 25 bp, Artificial
  Probe
gagccgaatctctaacctgaaagat

SEQ ID NO: 79969 - DNA, 25 bp, Artificial
  Probe
gcccctcatcattaaatgtttcttt

SEQ ID NO: 79970 - DNA, 25 bp, Artificial
  Probe
tttgcccctcatcattaaatgtttc

SEQ ID NO: 79971 - DNA, 25 bp, Artificial
  Probe
ctttgcccctcatcattaaatgttt

SEQ ID NO: 79972 - DNA, 25 bp, Artificial
  Probe
gacatgaagtacaagaaccgtgttc

SEQ ID NO: 79973 - DNA, 25 bp, Artificial
  Probe
cacctatgttgtctgcaatgagtgt

SEQ ID NO: 79974 - DNA, 25 bp, Artificial
  Probe
atgaccacctatgttgtctgcaatg

SEQ ID NO: 79975 - DNA, 25 bp, Artificial
  Probe
catgaccacctatgttgtctgcaat

SEQ ID NO: 79976 - DNA, 25 bp, Artificial
  Probe
gcagatagctgtgatgacatcagag

SEQ ID NO: 79977 - DNA, 25 bp, Artificial
  Probe
tgcccctcatcattaaatgtttctt

SEQ ID NO: 79978 - DNA, 25 bp, Artificial
  Probe
ttgcccctcatcattaaatgtttct

SEQ ID NO: 79979 - DNA, 25 bp, Artificial
  Probe
taacctgaaagatgccaagaaccct

SEQ ID NO: 79980 - DNA, 25 bp, Artificial
  Probe
ggaagttctgctgagtccttgtact

SEQ ID NO: 79981 - DNA, 25 bp, Artificial
  Probe
agccgaatctctaacctgaaagatg

SEQ ID NO: 79982 - DNA, 25 bp, Artificial
  Probe
gatagctgtgatgacatcagaggag

SEQ ID NO: 79983 - DNA, 25 bp, Artificial
  Probe
cctatgttgtctgcaatgagtgtgg

SEQ ID NO: 79984 - DNA, 25 bp, Artificial
  Probe
cgaatctctaacctgaaagatgcca

SEQ ID NO: 79985 - DNA, 25 bp, Artificial
  Probe
gtgggaaacactgacatgaagtaca

SEQ ID NO: 79986 - DNA, 25 bp, Artificial
  Probe
gatactgaacctggaggtcaagact

SEQ ID NO: 79987 - DNA, 25 bp, Artificial
  Probe
agatactgaacctggaggtcaagac

SEQ ID NO: 79988 - DNA, 25 bp, Artificial
  Probe
cagatactgaacctggaggtcaaga

SEQ ID NO: 79989 - DNA, 25 bp, Artificial
  Probe
atactgaacctggaggtcaagactg

SEQ ID NO: 79990 - DNA, 25 bp, Artificial
  Probe
tatgtctgcaaagagcaagattcag

SEQ ID NO: 79991 - DNA, 25 bp, Artificial
  Probe
tactgaacctggaggtcaagactga

SEQ ID NO: 79992 - DNA, 25 bp, Artificial
  Probe
ttgtctttggagcacaataaaatgc

SEQ ID NO: 79993 - DNA, 25 bp, Artificial
  Probe
gtctgcaaagagcaagattcagaag

SEQ ID NO: 79994 - DNA, 25 bp, Artificial
  Probe
atgtctgcaaagagcaagattcaga

SEQ ID NO: 79995 - DNA, 25 bp, Artificial
  Probe
tgtctgcaaagagcaagattcagaa

SEQ ID NO: 79996 - DNA, 25 bp, Artificial
  Probe
ctgcaaagagcaagattcagaagct

SEQ ID NO: 79997 - DNA, 25 bp, Artificial
  Probe
tctgcaaagagcaagattcagaagc

SEQ ID NO: 79998 - DNA, 25 bp, Artificial
  Probe
ccagatactgaacctggaggtcaag

SEQ ID NO: 79999 - DNA, 25 bp, Artificial
  Probe
ggattatctattcacaaccagtagc

SEQ ID NO: 80000 - DNA, 25 bp, Artificial
  Probe
ttatctattcacaaccagtagctcc

SEQ ID NO: 80001 - DNA, 25 bp, Artificial
  Probe
tatctattcacaaccagtagctcct

SEQ ID NO: 80002 - DNA, 25 bp, Artificial
  Probe
catgaagttctggatgctgattctg

SEQ ID NO: 80003 - DNA, 25 bp, Artificial
  Probe
atgaagttctggatgctgattctgg

SEQ ID NO: 80004 - DNA, 25 bp, Artificial
  Probe
cttctgggattatctattcacaacc

SEQ ID NO: 80005 - DNA, 25 bp, Artificial
  Probe
ccttctgggattatctattcacaac

SEQ ID NO: 80006 - DNA, 25 bp, Artificial
  Probe
attatctattcacaaccagtagctc

SEQ ID NO: 80007 - DNA, 25 bp, Artificial
  Probe
gattatctattcacaaccagtagct

SEQ ID NO: 80008 - DNA, 25 bp, Artificial
  Probe
gggattatctattcacaaccagtag

SEQ ID NO: 80009 - DNA, 25 bp, Artificial
  Probe
tacagaagtgtctcaatatcccttg

SEQ ID NO: 80010 - DNA, 25 bp, Artificial
  Probe
tctacagaagtgtctcaatatccct

SEQ ID NO: 80011 - DNA, 25 bp, Artificial
  Probe
ctacagaagtgtctcaatatccctt

SEQ ID NO: 80012 - DNA, 25 bp, Artificial
  Probe
ggtatttcatgcccatattcatcat

SEQ ID NO: 80013 - DNA, 25 bp, Artificial
  Probe
atctattcacaaccagtagctcctg

SEQ ID NO: 80014 - DNA, 25 bp, Artificial
  Probe
agaagtgtctcaatatcccttggtg

SEQ ID NO: 80015 - DNA, 25 bp, Artificial
  Probe
cagaagtgtctcaatatcccttggt

SEQ ID NO: 80016 - DNA, 25 bp, Artificial
  Probe
aagttctggatgctgattctggcta

SEQ ID NO: 80017 - DNA, 25 bp, Artificial
  Probe
atattcatcattggagctgccattg

SEQ ID NO: 80018 - DNA, 25 bp, Artificial
  Probe
catattcatcattggagctgccatt

SEQ ID NO: 80019 - DNA, 25 bp, Artificial
  Probe
ctattcacaaccagtagctcctgag

SEQ ID NO: 80020 - DNA, 25 bp, Artificial
  Probe
ttctgggattatctattcacaacca

SEQ ID NO: 80021 - DNA, 25 bp, Artificial
  Probe
acagaagtgtctcaatatcccttgg

SEQ ID NO: 80022 - DNA, 25 bp, Artificial
  Probe
tgggattatctattcacaaccagta

SEQ ID NO: 80023 - DNA, 25 bp, Artificial
  Probe
tattcacaaccagtagctcctgaga

SEQ ID NO: 80024 - DNA, 25 bp, Artificial
  Probe
tctattcacaaccagtagctcctga

SEQ ID NO: 80025 - DNA, 25 bp, Artificial
  Probe
atttcatgcccatattcatcattgg

SEQ ID NO: 80026 - DNA, 25 bp, Artificial
  Probe
tatttcatgcccatattcatcattg

SEQ ID NO: 80027 - DNA, 25 bp, Artificial
  Probe
gtatttcatgcccatattcatcatt

SEQ ID NO: 80028 - DNA, 25 bp, Artificial
  Probe
tttcatgcccatattcatcattgga

SEQ ID NO: 80029 - DNA, 25 bp, Artificial
  Probe
gaagtgtctcaatatcccttggtgg

SEQ ID NO: 80030 - DNA, 25 bp, Artificial
  Probe
ttcatgcccatattcatcattggag

SEQ ID NO: 80031 - DNA, 25 bp, Artificial
  Probe
agttctggatgctgattctggctac

SEQ ID NO: 80032 - DNA, 25 bp, Artificial
  Probe
cacaacatctctctggtctggaagg

SEQ ID NO: 80033 - DNA, 25 bp, Artificial
  Probe
cccttctgggattatctattcacaa

SEQ ID NO: 80034 - DNA, 25 bp, Artificial
  Probe
attcacaaccagtagctcctgagaa

SEQ ID NO: 80035 - DNA, 25 bp, Artificial
  Probe
gtcatgaagttctggatgctgattc

SEQ ID NO: 80036 - DNA, 25 bp, Artificial
  Probe
tcatgaagttctggatgctgattct

SEQ ID NO: 80037 - DNA, 25 bp, Artificial
  Probe
ccatattcatcattggagctgccat

SEQ ID NO: 80038 - DNA, 25 bp, Artificial
  Probe
gggtatttcatgcccatattcatca

SEQ ID NO: 80039 - DNA, 25 bp, Artificial
  Probe
tattcatcattggagctgccattgg

SEQ ID NO: 80040 - DNA, 25 bp, Artificial
  Probe
aagtgtctcaatatcccttggtgga

SEQ ID NO: 80041 - DNA, 25 bp, Artificial
  Probe
gaagttctggatgctgattctggct

SEQ ID NO: 80042 - DNA, 25 bp, Artificial
  Probe
tgaagaaagccatttccaccttgat

SEQ ID NO: 80043 - DNA, 25 bp, Artificial
  Probe
caatgccatctctcaaaactgtcag

SEQ ID NO: 80044 - DNA, 25 bp, Artificial
  Probe
taagagttgttgttgttgttgttgt

SEQ ID NO: 80045 - DNA, 25 bp, Artificial
  Probe
gttgttgttgttgttgttgttgtta

SEQ ID NO: 80046 - DNA, 25 bp, Artificial
  Probe
aagagttgttgttgttgttgttgtt

SEQ ID NO: 80047 - DNA, 25 bp, Artificial
  Probe
tgttgttgttgttgttgttgttatt

SEQ ID NO: 80048 - DNA, 25 bp, Artificial
  Probe
ttgttgttgttgttgttgttgttat

SEQ ID NO: 80049 - DNA, 25 bp, Artificial
  Probe
ttaagagttgttgttgttgttgttg

SEQ ID NO: 80050 - DNA, 25 bp, Artificial
  Probe
agttgttgttgttgttgttgttgtt

SEQ ID NO: 80051 - DNA, 25 bp, Artificial
  Probe
tccatagattactccaacttgaaga

SEQ ID NO: 80052 - DNA, 25 bp, Artificial
  Probe
agagttgttgttgttgttgttgttg

SEQ ID NO: 80053 - DNA, 25 bp, Artificial
  Probe
tggctgtcctagaacttactatgta

SEQ ID NO: 80054 - DNA, 25 bp, Artificial
  Probe
ggctgtcctagaacttactatgtag

SEQ ID NO: 80055 - DNA, 25 bp, Artificial
  Probe
gagttgttgttgttgttgttgttgt

SEQ ID NO: 80056 - DNA, 25 bp, Artificial
  Probe
agaacttactatgtagaccaggttg

SEQ ID NO: 80057 - DNA, 25 bp, Artificial
  Probe
gctgtcctagaacttactatgtaga

SEQ ID NO: 80058 - DNA, 25 bp, Artificial
  Probe
ctctggctgtcctagaacttactat

SEQ ID NO: 80059 - DNA, 25 bp, Artificial
  Probe
ctggctgtcctagaacttactatgt

SEQ ID NO: 80060 - DNA, 25 bp, Artificial
  Probe
ccatagattactccaacttgaagaa

SEQ ID NO: 80061 - DNA, 25 bp, Artificial
  Probe
tctggctgtcctagaacttactatg

SEQ ID NO: 80062 - DNA, 25 bp, Artificial
  Probe
ctatgtaactctggctgtcctagaa

SEQ ID NO: 80063 - DNA, 25 bp, Artificial
  Probe
atcttgatccaacactacaacctag

SEQ ID NO: 80064 - DNA, 25 bp, Artificial
  Probe
ctagaacttactatgtagaccaggt

SEQ ID NO: 80065 - DNA, 25 bp, Artificial
  Probe
ttccatagattactccaacttgaag

SEQ ID NO: 80066 - DNA, 25 bp, Artificial
  Probe
taactctggctgtcctagaacttac

SEQ ID NO: 80067 - DNA, 25 bp, Artificial
  Probe
gtaactctggctgtcctagaactta

SEQ ID NO: 80068 - DNA, 25 bp, Artificial
  Probe
ttatcttgatccaacactacaacct

SEQ ID NO: 80069 - DNA, 25 bp, Artificial
  Probe
tatgtaactctggctgtcctagaac

SEQ ID NO: 80070 - DNA, 25 bp, Artificial
  Probe
tcctagaacttactatgtagaccag

SEQ ID NO: 80071 - DNA, 25 bp, Artificial
  Probe
tcactatgtaactctggctgtccta

SEQ ID NO: 80072 - DNA, 25 bp, Artificial
  Probe
tatcttgatccaacactacaaccta

SEQ ID NO: 80073 - DNA, 25 bp, Artificial
  Probe
cactatgtaactctggctgtcctag

SEQ ID NO: 80074 - DNA, 25 bp, Artificial
  Probe
gtctcactatgtaactctggctgtc

SEQ ID NO: 80075 - DNA, 25 bp, Artificial
  Probe
tagaacttactatgtagaccaggtt

SEQ ID NO: 80076 - DNA, 25 bp, Artificial
  Probe
actctggctgtcctagaacttacta

SEQ ID NO: 80077 - DNA, 25 bp, Artificial
  Probe
cctagaacttactatgtagaccagg

SEQ ID NO: 80078 - DNA, 25 bp, Artificial
  Probe
gttgttgttgttgttgttgttatta

SEQ ID NO: 80079 - DNA, 25 bp, Artificial
  Probe
actatgtaactctggctgtcctaga

SEQ ID NO: 80080 - DNA, 25 bp, Artificial
  Probe
cagagtgtccatgaattgtcttgtt

SEQ ID NO: 80081 - DNA, 25 bp, Artificial
  Probe
gtcctagaacttactatgtagacca

SEQ ID NO: 80082 - DNA, 25 bp, Artificial
  Probe
tgtcctagaacttactatgtagacc

SEQ ID NO: 80083 - DNA, 25 bp, Artificial
  Probe
gaacttactatgtagaccaggttgg

SEQ ID NO: 80084 - DNA, 25 bp, Artificial
  Probe
atcaccacaataggaaacttagagg

SEQ ID NO: 80085 - DNA, 25 bp, Artificial
  Probe
gcaatcaccacaataggaaacttag

SEQ ID NO: 80086 - DNA, 25 bp, Artificial
  Probe
agtgggtaagagatggtaaggtata

SEQ ID NO: 80087 - DNA, 25 bp, Artificial
  Probe
gtgggtaagagatggtaaggtatag

SEQ ID NO: 80088 - DNA, 25 bp, Artificial
  Probe
cacaataggaaacttagaggtctga

SEQ ID NO: 80089 - DNA, 25 bp, Artificial
  Probe
aaggttgtattgacttactagctgt

SEQ ID NO: 80090 - DNA, 25 bp, Artificial
  Probe
aggttgtattgacttactagctgta

SEQ ID NO: 80091 - DNA, 25 bp, Artificial
  Probe
tattgaaatgctgggaaacctgaaa

SEQ ID NO: 80092 - DNA, 25 bp, Artificial
  Probe
ggttgtattgacttactagctgtat

SEQ ID NO: 80093 - DNA, 25 bp, Artificial
  Probe
tgggtatagacttcaggataaatgt

SEQ ID NO: 80094 - DNA, 25 bp, Artificial
  Probe
gtattgaaatgctgggaaacctgaa

SEQ ID NO: 80095 - DNA, 25 bp, Artificial
  Probe
ttctcatgggtatagacttcaggat

SEQ ID NO: 80096 - DNA, 25 bp, Artificial
  Probe
attctcatgggtatagacttcagga

SEQ ID NO: 80097 - DNA, 25 bp, Artificial
  Probe
gccagtaagattcttaattctcatg

SEQ ID NO: 80098 - DNA, 25 bp, Artificial
  Probe
gaaatgctgggaaacctgaaagaaa

SEQ ID NO: 80099 - DNA, 25 bp, Artificial
  Probe
ctcatgggtatagacttcaggataa

SEQ ID NO: 80100 - DNA, 25 bp, Artificial
  Probe
aattctcatgggtatagacttcagg

SEQ ID NO: 80101 - DNA, 25 bp, Artificial
  Probe
tctcatgggtatagacttcaggata

SEQ ID NO: 80102 - DNA, 25 bp, Artificial
  Probe
gggtatagacttcaggataaatgtt

SEQ ID NO: 80103 - DNA, 25 bp, Artificial
  Probe
attgaaatgctgggaaacctgaaag

SEQ ID NO: 80104 - DNA, 25 bp, Artificial
  Probe
ctgtattgaaatgctgggaaacctg

SEQ ID NO: 80105 - DNA, 25 bp, Artificial
  Probe
tgtattgacttactagctgtattga

SEQ ID NO: 80106 - DNA, 25 bp, Artificial
  Probe
atgggtatagacttcaggataaatg

SEQ ID NO: 80107 - DNA, 25 bp, Artificial
  Probe
tcatgggtatagacttcaggataaa

SEQ ID NO: 80108 - DNA, 25 bp, Artificial
  Probe
tgacttactagctgtattgaaatgc

SEQ ID NO: 80109 - DNA, 25 bp, Artificial
  Probe
tgtattgaaatgctgggaaacctga

SEQ ID NO: 80110 - DNA, 25 bp, Artificial
  Probe
aaaggttgtattgacttactagctg

SEQ ID NO: 80111 - DNA, 25 bp, Artificial
  Probe
aggccagtaagattcttaattctca

SEQ ID NO: 80112 - DNA, 25 bp, Artificial
  Probe
ccagtaagattcttaattctcatgg

SEQ ID NO: 80113 - DNA, 25 bp, Artificial
  Probe
tcagactcaaaggaagaagtataaa

SEQ ID NO: 80114 - DNA, 25 bp, Artificial
  Probe
ttcagactcaaaggaagaagtataa

SEQ ID NO: 80115 - DNA, 25 bp, Artificial
  Probe
tgaaatgctgggaaacctgaaagaa

SEQ ID NO: 80116 - DNA, 25 bp, Artificial
  Probe
ttgaaatgctgggaaacctgaaaga

SEQ ID NO: 80117 - DNA, 25 bp, Artificial
  Probe
ttgtattgacttactagctgtattg

SEQ ID NO: 80118 - DNA, 25 bp, Artificial
  Probe
gttgtattgacttactagctgtatt

SEQ ID NO: 80119 - DNA, 25 bp, Artificial
  Probe
catgggtatagacttcaggataaat

SEQ ID NO: 80120 - DNA, 25 bp, Artificial
  Probe
gtaagctaacagatgtacagaaggc

SEQ ID NO: 80121 - DNA, 25 bp, Artificial
  Probe
taagctaacagatgtacagaaggca

SEQ ID NO: 80122 - DNA, 25 bp, Artificial
  Probe
ggccagtaagattcttaattctcat

SEQ ID NO: 80123 - DNA, 25 bp, Artificial
  Probe
gtattgacttactagctgtattgaa

SEQ ID NO: 80124 - DNA, 25 bp, Artificial
  Probe
taattctcatgggtatagacttcag

SEQ ID NO: 80125 - DNA, 25 bp, Artificial
  Probe
gctaacagatgtacagaaggcattc

SEQ ID NO: 80126 - DNA, 25 bp, Artificial
  Probe
actcattttcttcagactcaaagga

SEQ ID NO: 80127 - DNA, 25 bp, Artificial
  Probe
tgttacatttgtgagacttcataaa

SEQ ID NO: 80128 - DNA, 25 bp, Artificial
  Probe
aactcattttcttcagactcaaagg

SEQ ID NO: 80129 - DNA, 25 bp, Artificial
  Probe
agctaacagatgtacagaaggcatt

SEQ ID NO: 80130 - DNA, 25 bp, Artificial
  Probe
aagctaacagatgtacagaaggcat

SEQ ID NO: 80131 - DNA, 25 bp, Artificial
  Probe
tatagcataccttgacaatgtaaag

SEQ ID NO: 80132 - DNA, 25 bp, Artificial
  Probe
ctcattttcttcagactcaaaggaa

SEQ ID NO: 80133 - DNA, 25 bp, Artificial
  Probe
gtaaaggttgtattgacttactagc

SEQ ID NO: 80134 - DNA, 25 bp, Artificial
  Probe
tatagagaagtgtgtcaagtggatg

SEQ ID NO: 80135 - DNA, 25 bp, Artificial
  Probe
gatggaggtgtgtgaagtctataag

SEQ ID NO: 80136 - DNA, 25 bp, Artificial
  Probe
gatatagagaagtgtgtcaagtgga

SEQ ID NO: 80137 - DNA, 25 bp, Artificial
  Probe
gtggtgtgatatagagaagtgtgtc

SEQ ID NO: 80138 - DNA, 25 bp, Artificial
  Probe
cagtggtgtgatatagagaagtgtg

SEQ ID NO: 80139 - DNA, 25 bp, Artificial
  Probe
tgatggaggtgtgtgaagtctataa

SEQ ID NO: 80140 - DNA, 25 bp, Artificial
  Probe
agtggtgtgatatagagaagtgtgt

SEQ ID NO: 80141 - DNA, 25 bp, Artificial
  Probe
atatagagaagtgtgtcaagtggat

SEQ ID NO: 80142 - DNA, 25 bp, Artificial
  Probe
ctgatggaggtgtgtgaagtctata

SEQ ID NO: 80143 - DNA, 25 bp, Artificial
  Probe
tgatatagagaagtgtgtcaagtgg

SEQ ID NO: 80144 - DNA, 25 bp, Artificial
  Probe
ggtgtgatatagagaagtgtgtcaa

SEQ ID NO: 80145 - DNA, 25 bp, Artificial
  Probe
tcagtggtgtgatatagagaagtgt

SEQ ID NO: 80146 - DNA, 25 bp, Artificial
  Probe
atggcatcacaacagaatatcataa

SEQ ID NO: 80147 - DNA, 25 bp, Artificial
  Probe
tgtgatatagagaagtgtgtcaagt

SEQ ID NO: 80148 - DNA, 25 bp, Artificial
  Probe
tggtgtgatatagagaagtgtgtca

SEQ ID NO: 80149 - DNA, 25 bp, Artificial
  Probe
gtgatatagagaagtgtgtcaagtg

SEQ ID NO: 80150 - DNA, 25 bp, Artificial
  Probe
gtgtgatatagagaagtgtgtcaag

SEQ ID NO: 80151 - DNA, 25 bp, Artificial
  Probe
tacatggcatcacaacagaatatca

SEQ ID NO: 80152 - DNA, 25 bp, Artificial
  Probe
ttacatggcatcacaacagaatatc

SEQ ID NO: 80153 - DNA, 25 bp, Artificial
  Probe
atagagaagtgtgtcaagtggatgg

SEQ ID NO: 80154 - DNA, 25 bp, Artificial
  Probe
atggaggtgtgtgaagtctataagc

SEQ ID NO: 80155 - DNA, 25 bp, Artificial
  Probe
gttacatggcatcacaacagaatat

SEQ ID NO: 80156 - DNA, 25 bp, Artificial
  Probe
catggcatcacaacagaatatcata

SEQ ID NO: 80157 - DNA, 25 bp, Artificial
  Probe
acatggcatcacaacagaatatcat

SEQ ID NO: 80158 - DNA, 25 bp, Artificial
  Probe
cgttacatggcatcacaacagaata

SEQ ID NO: 80159 - DNA, 25 bp, Artificial
  Probe
cattctacttggcacaggacttctt

SEQ ID NO: 80160 - DNA, 25 bp, Artificial
  Probe
ttgggatttcagccttatttattgc

SEQ ID NO: 80161 - DNA, 25 bp, Artificial
  Probe
ctataagctccacagagagacattc

SEQ ID NO: 80162 - DNA, 25 bp, Artificial
  Probe
ataagctccacagagagacattcta

SEQ ID NO: 80163 - DNA, 25 bp, Artificial
  Probe
tataagctccacagagagacattct

SEQ ID NO: 80164 - DNA, 25 bp, Artificial
  Probe
tctataagctccacagagagacatt

SEQ ID NO: 80165 - DNA, 25 bp, Artificial
  Probe
ttagaatttccttatggtgtcctcg

SEQ ID NO: 80166 - DNA, 25 bp, Artificial
  Probe
ctgcttagaatttccttatggtgtc

SEQ ID NO: 80167 - DNA, 25 bp, Artificial
  Probe
gcttagaatttccttatggtgtcct

SEQ ID NO: 80168 - DNA, 25 bp, Artificial
  Probe
gttggctgcttagaatttccttatg

SEQ ID NO: 80169 - DNA, 25 bp, Artificial
  Probe
gaagtctataagctccacagagaga

SEQ ID NO: 80170 - DNA, 25 bp, Artificial
  Probe
tgttggctgcttagaatttccttat

SEQ ID NO: 80171 - DNA, 25 bp, Artificial
  Probe
atgttggctgcttagaatttcctta

SEQ ID NO: 80172 - DNA, 25 bp, Artificial
  Probe
gcttctaaacttgaggaaatctacc

SEQ ID NO: 80173 - DNA, 25 bp, Artificial
  Probe
cagagagacattctacttggcacag

SEQ ID NO: 80174 - DNA, 25 bp, Artificial
  Probe
tgcttagaatttccttatggtgtcc

SEQ ID NO: 80175 - DNA, 25 bp, Artificial
  Probe
tgaagtctataagctccacagagag

SEQ ID NO: 80176 - DNA, 25 bp, Artificial
  Probe
tggcatcacaacagaatatcataaa

SEQ ID NO: 80177 - DNA, 25 bp, Artificial
  Probe
gctccacagagagacattctacttg

SEQ ID NO: 80178 - DNA, 25 bp, Artificial
  Probe
tagagaagtgtgtcaagtggatggt

SEQ ID NO: 80179 - DNA, 25 bp, Artificial
  Probe
gttcttattgattagcagtgccgtc

SEQ ID NO: 80180 - DNA, 25 bp, Artificial
  Probe
aggatattctaagccaaagttgaca

SEQ ID NO: 80181 - DNA, 25 bp, Artificial
  Probe
ttgatttattgtgaaagcagggaga

SEQ ID NO: 80182 - DNA, 25 bp, Artificial
  Probe
cggaaggagatactatgttgcatta

SEQ ID NO: 80183 - DNA, 25 bp, Artificial
  Probe
atttattgtgaaagcagggagagag

SEQ ID NO: 80184 - DNA, 25 bp, Artificial
  Probe
gatttattgtgaaagcagggagaga

SEQ ID NO: 80185 - DNA, 25 bp, Artificial
  Probe
ggatattctaagccaaagttgacaa

SEQ ID NO: 80186 - DNA, 25 bp, Artificial
  Probe
tgatttattgtgaaagcagggagag

SEQ ID NO: 80187 - DNA, 25 bp, Artificial
  Probe
cttgatttattgtgaaagcagggag

SEQ ID NO: 80188 - DNA, 25 bp, Artificial
  Probe
aaggatattctaagccaaagttgac

SEQ ID NO: 80189 - DNA, 25 bp, Artificial
  Probe
attctaagccaaagttgacaaagac

SEQ ID NO: 80190 - DNA, 25 bp, Artificial
  Probe
gtacaacacctactcttccaacctg

SEQ ID NO: 80191 - DNA, 25 bp, Artificial
  Probe
ttctaagccaaagttgacaaagaca

SEQ ID NO: 80192 - DNA, 25 bp, Artificial
  Probe
ggtgggttcttattgattagcagtg

SEQ ID NO: 80193 - DNA, 25 bp, Artificial
  Probe
ttcttattgattagcagtgccgtca

SEQ ID NO: 80194 - DNA, 25 bp, Artificial
  Probe
ctaagccaaagttgacaaagacagt

SEQ ID NO: 80195 - DNA, 25 bp, Artificial
  Probe
ggaaggagatactatgttgcattaa

SEQ ID NO: 80196 - DNA, 25 bp, Artificial
  Probe
tctaagccaaagttgacaaagacag

SEQ ID NO: 80197 - DNA, 25 bp, Artificial
  Probe
tattctaagccaaagttgacaaaga

SEQ ID NO: 80198 - DNA, 25 bp, Artificial
  Probe
taagccaaagttgacaaagacagtg

SEQ ID NO: 80199 - DNA, 25 bp, Artificial
  Probe
ataaccactataaatgcttcatgcg

SEQ ID NO: 80200 - DNA, 25 bp, Artificial
  Probe
ccctgacaaagtacctgaactatat

SEQ ID NO: 80201 - DNA, 25 bp, Artificial
  Probe
accctgacaaagtacctgaactata

SEQ ID NO: 80202 - DNA, 25 bp, Artificial
  Probe
acaacacctactcttccaacctgta

SEQ ID NO: 80203 - DNA, 25 bp, Artificial
  Probe
tacaacacctactcttccaacctgt

SEQ ID NO: 80204 - DNA, 25 bp, Artificial
  Probe
caacacctactcttccaacctgtac

SEQ ID NO: 80205 - DNA, 25 bp, Artificial
  Probe
atattctaagccaaagttgacaaag

SEQ ID NO: 80206 - DNA, 25 bp, Artificial
  Probe
gatattctaagccaaagttgacaaa

SEQ ID NO: 80207 - DNA, 25 bp, Artificial
  Probe
ccacttgcttgatttattgtgaaag

SEQ ID NO: 80208 - DNA, 25 bp, Artificial
  Probe
ggttcttattgattagcagtgccgt

SEQ ID NO: 80209 - DNA, 25 bp, Artificial
  Probe
taaggatattctaagccaaagttga

SEQ ID NO: 80210 - DNA, 25 bp, Artificial
  Probe
cataaccactataaatgcttcatgc

SEQ ID NO: 80211 - DNA, 25 bp, Artificial
  Probe
gccacttgcttgatttattgtgaaa

SEQ ID NO: 80212 - DNA, 25 bp, Artificial
  Probe
tttattgtgaaagcagggagagagg

SEQ ID NO: 80213 - DNA, 25 bp, Artificial
  Probe
taaccactataaatgcttcatgcgg

SEQ ID NO: 80214 - DNA, 25 bp, Artificial
  Probe
gatatgtatgatgggagcttggatg

SEQ ID NO: 80215 - DNA, 25 bp, Artificial
  Probe
ttaaataaggatgggactccaagag

SEQ ID NO: 80216 - DNA, 25 bp, Artificial
  Probe
taaataaggatgggactccaagaga

SEQ ID NO: 80217 - DNA, 25 bp, Artificial
  Probe
atatgtatgatgggagcttggatga

SEQ ID NO: 80218 - DNA, 25 bp, Artificial
  Probe
gaccctgacaaagtacctgaactat

SEQ ID NO: 80219 - DNA, 25 bp, Artificial
  Probe
gtgggttcttattgattagcagtgc

SEQ ID NO: 80220 - DNA, 25 bp, Artificial
  Probe
catgcggtgggttcttattgattag

SEQ ID NO: 80221 - DNA, 25 bp, Artificial
  Probe
cattaaataaggatgggactccaag

SEQ ID NO: 80222 - DNA, 25 bp, Artificial
  Probe
gcattaaataaggatgggactccaa

SEQ ID NO: 80223 - DNA, 25 bp, Artificial
  Probe
ctggtacaacacctactcttccaac

SEQ ID NO: 80224 - DNA, 25 bp, Artificial
  Probe
ctacaacatccagaaagagtcaacc

SEQ ID NO: 80225 - DNA, 25 bp, Artificial
  Probe
actacaacatccagaaagagtcaac

SEQ ID NO: 80226 - DNA, 25 bp, Artificial
  Probe
tttgttccttcatcgcattcgttaa

SEQ ID NO: 80227 - DNA, 25 bp, Artificial
  Probe
gtttgttccttcatcgcattcgtta

SEQ ID NO: 80228 - DNA, 25 bp, Artificial
  Probe
ttgttccttcatcgcattcgttaac

SEQ ID NO: 80229 - DNA, 25 bp, Artificial
  Probe
gttccttcatcgcattcgttaacag

SEQ ID NO: 80230 - DNA, 25 bp, Artificial
  Probe
ttcatcgcattcgttaacaggtcaa

SEQ ID NO: 80231 - DNA, 25 bp, Artificial
  Probe
cttcatcgcattcgttaacaggtca

SEQ ID NO: 80232 - DNA, 25 bp, Artificial
  Probe
gactacaacatccagaaagagtcaa

SEQ ID NO: 80233 - DNA, 25 bp, Artificial
  Probe
ggtttgttccttcatcgcattcgtt

SEQ ID NO: 80234 - DNA, 25 bp, Artificial
  Probe
ttccttcatcgcattcgttaacagg

SEQ ID NO: 80235 - DNA, 25 bp, Artificial
  Probe
tcatcgcattcgttaacaggtcaaa

SEQ ID NO: 80236 - DNA, 25 bp, Artificial
  Probe
ttcgttaacaggtcaaaatgcaaat

SEQ ID NO: 80237 - DNA, 25 bp, Artificial
  Probe
attcgttaacaggtcaaaatgcaaa

SEQ ID NO: 80238 - DNA, 25 bp, Artificial
  Probe
ccttcatcgcattcgttaacaggtc

SEQ ID NO: 80239 - DNA, 25 bp, Artificial
  Probe
atcgcattcgttaacaggtcaaaat

SEQ ID NO: 80240 - DNA, 25 bp, Artificial
  Probe
tgttccttcatcgcattcgttaaca

SEQ ID NO: 80241 - DNA, 25 bp, Artificial
  Probe
tccttcatcgcattcgttaacaggt

SEQ ID NO: 80242 - DNA, 25 bp, Artificial
  Probe
catcgcattcgttaacaggtcaaaa

SEQ ID NO: 80243 - DNA, 25 bp, Artificial
  Probe
cattcgttaacaggtcaaaatgcaa

SEQ ID NO: 80244 - DNA, 25 bp, Artificial
  Probe
tcgcattcgttaacaggtcaaaatg

SEQ ID NO: 80245 - DNA, 25 bp, Artificial
  Probe
caggacaatatgacagtagatgaca

SEQ ID NO: 80246 - DNA, 25 bp, Artificial
  Probe
acaggacaatatgacagtagatgac

SEQ ID NO: 80247 - DNA, 25 bp, Artificial
  Probe
cacaggacaatatgacagtagatga

SEQ ID NO: 80248 - DNA, 25 bp, Artificial
  Probe
acacaggacaatatgacagtagatg

SEQ ID NO: 80249 - DNA, 25 bp, Artificial
  Probe
gacacaggacaatatgacagtagat

SEQ ID NO: 80250 - DNA, 25 bp, Artificial
  Probe
aatgttcaactgagtcctgtagatg

SEQ ID NO: 80251 - DNA, 25 bp, Artificial
  Probe
tgacacaggacaatatgacagtaga

SEQ ID NO: 80252 - DNA, 25 bp, Artificial
  Probe
taatgttcaactgagtcctgtagat

SEQ ID NO: 80253 - DNA, 25 bp, Artificial
  Probe
ataatgttcaactgagtcctgtaga

SEQ ID NO: 80254 - DNA, 25 bp, Artificial
  Probe
ttgacacaggacaatatgacagtag

SEQ ID NO: 80255 - DNA, 25 bp, Artificial
  Probe
caataatgttcaactgagtcctgta

SEQ ID NO: 80256 - DNA, 25 bp, Artificial
  Probe
aggacaatatgacagtagatgacat

SEQ ID NO: 80257 - DNA, 25 bp, Artificial
  Probe
tcaataatgttcaactgagtcctgt

SEQ ID NO: 80258 - DNA, 25 bp, Artificial
  Probe
aataatgttcaactgagtcctgtag

SEQ ID NO: 80259 - DNA, 25 bp, Artificial
  Probe
gcttcaataatgttcaactgagtcc

SEQ ID NO: 80260 - DNA, 25 bp, Artificial
  Probe
ttcaataatgttcaactgagtcctg

SEQ ID NO: 80261 - DNA, 25 bp, Artificial
  Probe
cgcttcaataatgttcaactgagtc

SEQ ID NO: 80262 - DNA, 25 bp, Artificial
  Probe
cttcaataatgttcaactgagtcct

SEQ ID NO: 80263 - DNA, 25 bp, Artificial
  Probe
atgttcaactgagtcctgtagatga

SEQ ID NO: 80264 - DNA, 25 bp, Artificial
  Probe
tgttcaactgagtcctgtagatgag

SEQ ID NO: 80265 - DNA, 25 bp, Artificial
  Probe
ccgcttcaataatgttcaactgagt

SEQ ID NO: 80266 - DNA, 25 bp, Artificial
  Probe
gtagatgaggagagagaggagacag

SEQ ID NO: 80267 - DNA, 25 bp, Artificial
  Probe
ctgtagatgaggagagagaggagac

SEQ ID NO: 80268 - DNA, 25 bp, Artificial
  Probe
tagatgaggagagagaggagacaga

SEQ ID NO: 80269 - DNA, 25 bp, Artificial
  Probe
gagagaggagacagaagaggaagtt

SEQ ID NO: 80270 - DNA, 25 bp, Artificial
  Probe
gagagagaggagacagaagaggaag

SEQ ID NO: 80271 - DNA, 25 bp, Artificial
  Probe
agagaggagacagaagaggaagttc

SEQ ID NO: 80272 - DNA, 25 bp, Artificial
  Probe
gatgaggagagagaggagacagaag

SEQ ID NO: 80273 - DNA, 25 bp, Artificial
  Probe
aagaggaagttcgtttgttgaatag

SEQ ID NO: 80274 - DNA, 25 bp, Artificial
  Probe
gaagaggaagttcgtttgttgaata

SEQ ID NO: 80275 - DNA, 25 bp, Artificial
  Probe
agaagaggaagttcgtttgttgaat

SEQ ID NO: 80276 - DNA, 25 bp, Artificial
  Probe
tttgacacaggacaatatgacagta

SEQ ID NO: 80277 - DNA, 25 bp, Artificial
  Probe
atgaggagagagaggagacagaaga

SEQ ID NO: 80278 - DNA, 25 bp, Artificial
  Probe
agatgaggagagagaggagacagaa

SEQ ID NO: 80279 - DNA, 25 bp, Artificial
  Probe
gttcaactgagtcctgtagatgagg

SEQ ID NO: 80280 - DNA, 25 bp, Artificial
  Probe
ggacaatatgacagtagatgacata

SEQ ID NO: 80281 - DNA, 25 bp, Artificial
  Probe
agaggaagttcgtttgttgaatagc

SEQ ID NO: 80282 - DNA, 25 bp, Artificial
  Probe
agagagaggagacagaagaggaagt

SEQ ID NO: 80283 - DNA, 25 bp, Artificial
  Probe
cagaagaggaagttcgtttgttgaa

SEQ ID NO: 80284 - DNA, 25 bp, Artificial
  Probe
gattaatgagaccagctataatggc

SEQ ID NO: 80285 - DNA, 25 bp, Artificial
  Probe
tgtagatgaggagagagaggagaca

SEQ ID NO: 80286 - DNA, 25 bp, Artificial
  Probe
gaggaagttcgtttgttgaatagca

SEQ ID NO: 80287 - DNA, 25 bp, Artificial
  Probe
aactgagaagcatccttgacatgag

SEQ ID NO: 80288 - DNA, 25 bp, Artificial
  Probe
acatgattaatgagaccagctataa

SEQ ID NO: 80289 - DNA, 25 bp, Artificial
  Probe
aacatgattaatgagaccagctata

SEQ ID NO: 80290 - DNA, 25 bp, Artificial
  Probe
aatctggtctaataacactggcttc

SEQ ID NO: 80291 - DNA, 25 bp, Artificial
  Probe
ggtctaataacactggcttcttcaa

SEQ ID NO: 80292 - DNA, 25 bp, Artificial
  Probe
caatctggtctaataacactggctt

SEQ ID NO: 80293 - DNA, 25 bp, Artificial
  Probe
ctggtctaataacactggcttcttc

SEQ ID NO: 80294 - DNA, 25 bp, Artificial
  Probe
atctggtctaataacactggcttct

SEQ ID NO: 80295 - DNA, 25 bp, Artificial
  Probe
tctggtctaataacactggcttctt

SEQ ID NO: 80296 - DNA, 25 bp, Artificial
  Probe
tggtctaataacactggcttcttca

SEQ ID NO: 80297 - DNA, 25 bp, Artificial
  Probe
ctaaccacatctcaacagttcactc

SEQ ID NO: 80298 - DNA, 25 bp, Artificial
  Probe
gtctaaccacatctcaacagttcac

SEQ ID NO: 80299 - DNA, 25 bp, Artificial
  Probe
taaccacatctcaacagttcactct

SEQ ID NO: 80300 - DNA, 25 bp, Artificial
  Probe
tctaaccacatctcaacagttcact

SEQ ID NO: 80301 - DNA, 25 bp, Artificial
  Probe
tcatacaagtgtctaaccacatctc

SEQ ID NO: 80302 - DNA, 25 bp, Artificial
  Probe
ctcatacaagtgtctaaccacatct

SEQ ID NO: 80303 - DNA, 25 bp, Artificial
  Probe
atacaagtgtctaaccacatctcaa

SEQ ID NO: 80304 - DNA, 25 bp, Artificial
  Probe
catacaagtgtctaaccacatctca

SEQ ID NO: 80305 - DNA, 25 bp, Artificial
  Probe
tacaagtgtctaaccacatctcaac

SEQ ID NO: 80306 - DNA, 25 bp, Artificial
  Probe
cctcatacaagtgtctaaccacatc

SEQ ID NO: 80307 - DNA, 25 bp, Artificial
  Probe
tgtctaaccacatctcaacagttca

SEQ ID NO: 80308 - DNA, 25 bp, Artificial
  Probe
taagccaatctggtctaataacact

SEQ ID NO: 80309 - DNA, 25 bp, Artificial
  Probe
aagccaatctggtctaataacactg

SEQ ID NO: 80310 - DNA, 25 bp, Artificial
  Probe
gtgtctaaccacatctcaacagttc

SEQ ID NO: 80311 - DNA, 25 bp, Artificial
  Probe
caagtgtctaaccacatctcaacag

SEQ ID NO: 80312 - DNA, 25 bp, Artificial
  Probe
gaagactattgataatactccaggt

SEQ ID NO: 80313 - DNA, 25 bp, Artificial
  Probe
tgaagactattgataatactccagg

SEQ ID NO: 80314 - DNA, 25 bp, Artificial
  Probe
gctttctttccacatcttatccttt

SEQ ID NO: 80315 - DNA, 25 bp, Artificial
  Probe
aggttgatagttatctcgatgacaa

SEQ ID NO: 80316 - DNA, 25 bp, Artificial
  Probe
tctttccacatcttatcctttctga

SEQ ID NO: 80317 - DNA, 25 bp, Artificial
  Probe
agttcaagttagaattagtgacaga

SEQ ID NO: 80318 - DNA, 25 bp, Artificial
  Probe
ttaagccaatctggtctaataacac

SEQ ID NO: 80319 - DNA, 25 bp, Artificial
  Probe
agtgtctaaccacatctcaacagtt

SEQ ID NO: 80320 - DNA, 25 bp, Artificial
  Probe
aagtgtctaaccacatctcaacagt

SEQ ID NO: 80321 - DNA, 25 bp, Artificial
  Probe
gtctaataacactggcttcttcaaa

SEQ ID NO: 80322 - DNA, 25 bp, Artificial
  Probe
cttcaaagccacagcatttctaatc

SEQ ID NO: 80323 - DNA, 25 bp, Artificial
  Probe
atttcatacctcagaccctctaaga

SEQ ID NO: 80324 - DNA, 25 bp, Artificial
  Probe
gatttcatacctcagaccctctaag

SEQ ID NO: 80325 - DNA, 25 bp, Artificial
  Probe
agatttcatacctcagaccctctaa

SEQ ID NO: 80326 - DNA, 25 bp, Artificial
  Probe
tttcatacctcagaccctctaagaa

SEQ ID NO: 80327 - DNA, 25 bp, Artificial
  Probe
ctttctgatgaccctcggatttatg

SEQ ID NO: 80328 - DNA, 25 bp, Artificial
  Probe
ttctttccacatcttatcctttctg

SEQ ID NO: 80329 - DNA, 25 bp, Artificial
  Probe
tcggtttaactatgttctgtaagca

SEQ ID NO: 80330 - DNA, 25 bp, Artificial
  Probe
acaagtgtctaaccacatctcaaca

SEQ ID NO: 80331 - DNA, 25 bp, Artificial
  Probe
tcttcaaagccacagcatttctaat

SEQ ID NO: 80332 - DNA, 25 bp, Artificial
  Probe
ttcggtttaactatgttctgtaagc

SEQ ID NO: 80333 - DNA, 25 bp, Artificial
  Probe
tctaataacactggcttcttcaaag

SEQ ID NO: 80334 - DNA, 25 bp, Artificial
  Probe
cagatttcatacctcagaccctcta

SEQ ID NO: 80335 - DNA, 25 bp, Artificial
  Probe
agtaggtctaatcatataagcgtcc

SEQ ID NO: 80336 - DNA, 25 bp, Artificial
  Probe
ggatatgcgtgtgtcaaggaatata

SEQ ID NO: 80337 - DNA, 25 bp, Artificial
  Probe
aatactcgtaatgctgaatccttcc

SEQ ID NO: 80338 - DNA, 25 bp, Artificial
  Probe
gatatgcgtgtgtcaaggaatataa

SEQ ID NO: 80339 - DNA, 25 bp, Artificial
  Probe
ggtctaatcatataagcgtccttga

SEQ ID NO: 80340 - DNA, 25 bp, Artificial
  Probe
aatcatataagcgtccttgagagaa

SEQ ID NO: 80341 - DNA, 25 bp, Artificial
  Probe
atcatataagcgtccttgagagaat

SEQ ID NO: 80342 - DNA, 25 bp, Artificial
  Probe
tcatataagcgtccttgagagaatt

SEQ ID NO: 80343 - DNA, 25 bp, Artificial
  Probe
taatcatataagcgtccttgagaga

SEQ ID NO: 80344 - DNA, 25 bp, Artificial
  Probe
tctaatcatataagcgtccttgaga

SEQ ID NO: 80345 - DNA, 25 bp, Artificial
  Probe
gtctaatcatataagcgtccttgag

SEQ ID NO: 80346 - DNA, 25 bp, Artificial
  Probe
tactcgtaatgctgaatccttccat

SEQ ID NO: 80347 - DNA, 25 bp, Artificial
  Probe
atactcgtaatgctgaatccttcca

SEQ ID NO: 80348 - DNA, 25 bp, Artificial
  Probe
ctaatcatataagcgtccttgagag

SEQ ID NO: 80349 - DNA, 25 bp, Artificial
  Probe
taatgctgaatccttccatgttcta

SEQ ID NO: 80350 - DNA, 25 bp, Artificial
  Probe
aggatatgcgtgtgtcaaggaatat

SEQ ID NO: 80351 - DNA, 25 bp, Artificial
  Probe
aatgctgaatccttccatgttctaa

SEQ ID NO: 80352 - DNA, 25 bp, Artificial
  Probe
gctgaatccttccatgttctaagat

SEQ ID NO: 80353 - DNA, 25 bp, Artificial
  Probe
aaggatatgcgtgtgtcaaggaata

SEQ ID NO: 80354 - DNA, 25 bp, Artificial
  Probe
taaggatatgcgtgtgtcaaggaat

SEQ ID NO: 80355 - DNA, 25 bp, Artificial
  Probe
ctgaatccttccatgttctaagatg

SEQ ID NO: 80356 - DNA, 25 bp, Artificial
  Probe
atgctgaatccttccatgttctaag

SEQ ID NO: 80357 - DNA, 25 bp, Artificial
  Probe
aagtaggtctaatcatataagcgtc

SEQ ID NO: 80358 - DNA, 25 bp, Artificial
  Probe
gaagtaggtctaatcatataagcgt

SEQ ID NO: 80359 - DNA, 25 bp, Artificial
  Probe
aggtctaatcatataagcgtccttg

SEQ ID NO: 80360 - DNA, 25 bp, Artificial
  Probe
gtaatgctgaatccttccatgttct

SEQ ID NO: 80361 - DNA, 25 bp, Artificial
  Probe
tactatacctgagtgtagcagtgtg

SEQ ID NO: 80362 - DNA, 25 bp, Artificial
  Probe
gtaggtctaatcatataagcgtcct

SEQ ID NO: 80363 - DNA, 25 bp, Artificial
  Probe
tatacctgagtgtagcagtgtgaag

SEQ ID NO: 80364 - DNA, 25 bp, Artificial
  Probe
ctatacctgagtgtagcagtgtgaa

SEQ ID NO: 80365 - DNA, 25 bp, Artificial
  Probe
taggtctaatcatataagcgtcctt

SEQ ID NO: 80366 - DNA, 25 bp, Artificial
  Probe
tgctgaatccttccatgttctaaga

SEQ ID NO: 80367 - DNA, 25 bp, Artificial
  Probe
agaagtaggtctaatcatataagcg

SEQ ID NO: 80368 - DNA, 25 bp, Artificial
  Probe
acaaatactcgtaatgctgaatcct

SEQ ID NO: 80369 - DNA, 25 bp, Artificial
  Probe
aacaaatactcgtaatgctgaatcc

SEQ ID NO: 80370 - DNA, 25 bp, Artificial
  Probe
gtaaggatatgcgtgtgtcaaggaa

SEQ ID NO: 80371 - DNA, 25 bp, Artificial
  Probe
ggtcccttcattctttcaactatca

SEQ ID NO: 80372 - DNA, 25 bp, Artificial
  Probe
caaatactcgtaatgctgaatcctt

SEQ ID NO: 80373 - DNA, 25 bp, Artificial
  Probe
gtcccttcattctttcaactatcag

SEQ ID NO: 80374 - DNA, 25 bp, Artificial
  Probe
tctggcatcaacaaatactcgtaat

SEQ ID NO: 80375 - DNA, 25 bp, Artificial
  Probe
ttctggcatcaacaaatactcgtaa

SEQ ID NO: 80376 - DNA, 25 bp, Artificial
  Probe
tatgcgtgtgtcaaggaatataaag

SEQ ID NO: 80377 - DNA, 25 bp, Artificial
  Probe
tttctggcatcaacaaatactcgta

SEQ ID NO: 80378 - DNA, 25 bp, Artificial
  Probe
atgcgtgtgtcaaggaatataaagt

SEQ ID NO: 80379 - DNA, 25 bp, Artificial
  Probe
tcaaggagataattaactgtgaagg

SEQ ID NO: 80380 - DNA, 25 bp, Artificial
  Probe
cagccatctacttcctaatgattca

SEQ ID NO: 80381 - DNA, 25 bp, Artificial
  Probe
gcagccatctacttcctaatgattc

SEQ ID NO: 80382 - DNA, 25 bp, Artificial
  Probe
agccatctacttcctaatgattcat

SEQ ID NO: 80383 - DNA, 25 bp, Artificial
  Probe
ttatctgtagtgtcaggattgttga

SEQ ID NO: 80384 - DNA, 25 bp, Artificial
  Probe
gccatctacttcctaatgattcatg

SEQ ID NO: 80385 - DNA, 25 bp, Artificial
  Probe
tatctgtagtgtcaggattgttgat

SEQ ID NO: 80386 - DNA, 25 bp, Artificial
  Probe
cttatctgtagtgtcaggattgttg

SEQ ID NO: 80387 - DNA, 25 bp, Artificial
  Probe
ccttatctgtagtgtcaggattgtt

SEQ ID NO: 80388 - DNA, 25 bp, Artificial
  Probe
ccatctacttcctaatgattcatgt

SEQ ID NO: 80389 - DNA, 25 bp, Artificial
  Probe
cgcagccatctacttcctaatgatt

SEQ ID NO: 80390 - DNA, 25 bp, Artificial
  Probe
cgggtcacctataaacttgttactt

SEQ ID NO: 80391 - DNA, 25 bp, Artificial
  Probe
gggtcacctataaacttgttacttg

SEQ ID NO: 80392 - DNA, 25 bp, Artificial
  Probe
acgggtcacctataaacttgttact

SEQ ID NO: 80393 - DNA, 25 bp, Artificial
  Probe
cacgggtcacctataaacttgttac

SEQ ID NO: 80394 - DNA, 25 bp, Artificial
  Probe
tcacgggtcacctataaacttgtta

SEQ ID NO: 80395 - DNA, 25 bp, Artificial
  Probe
tcgcagccatctacttcctaatgat

SEQ ID NO: 80396 - DNA, 25 bp, Artificial
  Probe
ggtcacctataaacttgttacttga

SEQ ID NO: 80397 - DNA, 25 bp, Artificial
  Probe
ttcacgggtcacctataaacttgtt

SEQ ID NO: 80398 - DNA, 25 bp, Artificial
  Probe
tttcacgggtcacctataaacttgt

SEQ ID NO: 80399 - DNA, 25 bp, Artificial
  Probe
catctacttcctaatgattcatgtt

SEQ ID NO: 80400 - DNA, 25 bp, Artificial
  Probe
ctcgcagccatctacttcctaatga

SEQ ID NO: 80401 - DNA, 25 bp, Artificial
  Probe
caataaacacagtaatctggaatcc

SEQ ID NO: 80402 - DNA, 25 bp, Artificial
  Probe
ccaataaacacagtaatctggaatc

SEQ ID NO: 80403 - DNA, 25 bp, Artificial
  Probe
ctgtgtttcacgggtcacctataaa

SEQ ID NO: 80404 - DNA, 25 bp, Artificial
  Probe
gtttcacgggtcacctataaacttg

SEQ ID NO: 80405 - DNA, 25 bp, Artificial
  Probe
ttccttatctgtagtgtcaggattg

SEQ ID NO: 80406 - DNA, 25 bp, Artificial
  Probe
tccttatctgtagtgtcaggattgt

SEQ ID NO: 80407 - DNA, 25 bp, Artificial
  Probe
tgtttcacgggtcacctataaactt

SEQ ID NO: 80408 - DNA, 25 bp, Artificial
  Probe
gattcatgttttactggttctgtgt

SEQ ID NO: 80409 - DNA, 25 bp, Artificial
  Probe
tgattcatgttttactggttctgtg

SEQ ID NO: 80410 - DNA, 25 bp, Artificial
  Probe
ttcatgttttactggttctgtgttt

SEQ ID NO: 80411 - DNA, 25 bp, Artificial
  Probe
attcatgttttactggttctgtgtt

SEQ ID NO: 80412 - DNA, 25 bp, Artificial
  Probe
attccttatctgtagtgtcaggatt

SEQ ID NO: 80413 - DNA, 25 bp, Artificial
  Probe
aattccttatctgtagtgtcaggat

SEQ ID NO: 80414 - DNA, 25 bp, Artificial
  Probe
atgattcatgttttactggttctgt

SEQ ID NO: 80415 - DNA, 25 bp, Artificial
  Probe
tctgtgtttcacgggtcacctataa

SEQ ID NO: 80416 - DNA, 25 bp, Artificial
  Probe
ttctgtgtttcacgggtcacctata

SEQ ID NO: 80417 - DNA, 25 bp, Artificial
  Probe
gtgtttcacgggtcacctataaact

SEQ ID NO: 80418 - DNA, 25 bp, Artificial
  Probe
tcctaatgattcatgttttactggt

SEQ ID NO: 80419 - DNA, 25 bp, Artificial
  Probe
tgtgtttcacgggtcacctataaac

SEQ ID NO: 80420 - DNA, 25 bp, Artificial
  Probe
aatgattcatgttttactggttctg

SEQ ID NO: 80421 - DNA, 25 bp, Artificial
  Probe
atctacttcctaatgattcatgttt

SEQ ID NO: 80422 - DNA, 25 bp, Artificial
  Probe
cctaatgattcatgttttactggtt

SEQ ID NO: 80423 - DNA, 25 bp, Artificial
  Probe
ttcctaatgattcatgttttactgg

SEQ ID NO: 80424 - DNA, 25 bp, Artificial
  Probe
tttactggttctgtgtttcacgggt

SEQ ID NO: 80425 - DNA, 25 bp, Artificial
  Probe
tgactgctctgacatcaataatcat

SEQ ID NO: 80426 - DNA, 25 bp, Artificial
  Probe
ctgactgctctgacatcaataatca

SEQ ID NO: 80427 - DNA, 25 bp, Artificial
  Probe
actgactgctctgacatcaataatc

SEQ ID NO: 80428 - DNA, 25 bp, Artificial
  Probe
gactgactgctctgacatcaataat

SEQ ID NO: 80429 - DNA, 25 bp, Artificial
  Probe
catcaataatcatggctgtgttctg

SEQ ID NO: 80430 - DNA, 25 bp, Artificial
  Probe
atgactgactgctctgacatcaata

SEQ ID NO: 80431 - DNA, 25 bp, Artificial
  Probe
gactgctctgacatcaataatcatg

SEQ ID NO: 80432 - DNA, 25 bp, Artificial
  Probe
tgactgactgctctgacatcaataa

SEQ ID NO: 80433 - DNA, 25 bp, Artificial
  Probe
atcaataatcatggctgtgttctgg

SEQ ID NO: 80434 - DNA, 25 bp, Artificial
  Probe
actgctctgacatcaataatcatgg

SEQ ID NO: 80435 - DNA, 25 bp, Artificial
  Probe
taatcatggctgtgttctggactta

SEQ ID NO: 80436 - DNA, 25 bp, Artificial
  Probe
gacatcaataatcatggctgtgttc

SEQ ID NO: 80437 - DNA, 25 bp, Artificial
  Probe
acatcaataatcatggctgtgttct

SEQ ID NO: 80438 - DNA, 25 bp, Artificial
  Probe
ctctgacatcaataatcatggctgt

SEQ ID NO: 80439 - DNA, 25 bp, Artificial
  Probe
aatgactgactgctctgacatcaat

SEQ ID NO: 80440 - DNA, 25 bp, Artificial
  Probe
tgacatcaataatcatggctgtgtt

SEQ ID NO: 80441 - DNA, 25 bp, Artificial
  Probe
tctgacatcaataatcatggctgtg

SEQ ID NO: 80442 - DNA, 25 bp, Artificial
  Probe
ctgacatcaataatcatggctgtgt

SEQ ID NO: 80443 - DNA, 25 bp, Artificial
  Probe
tacactcaaatatcacttacaggct

SEQ ID NO: 80444 - DNA, 25 bp, Artificial
  Probe
ataatcatggctgtgttctggactt

SEQ ID NO: 80445 - DNA, 25 bp, Artificial
  Probe
aataatcatggctgtgttctggact

SEQ ID NO: 80446 - DNA, 25 bp, Artificial
  Probe
caataatcatggctgtgttctggac

SEQ ID NO: 80447 - DNA, 25 bp, Artificial
  Probe
tcaataatcatggctgtgttctgga

SEQ ID NO: 80448 - DNA, 25 bp, Artificial
  Probe
cttcgtacttgaggatgtgagtctt

SEQ ID NO: 80449 - DNA, 25 bp, Artificial
  Probe
acattgttaatttctgcgtagtgat

SEQ ID NO: 80450 - DNA, 25 bp, Artificial
  Probe
aatcatggctgtgttctggacttaa

SEQ ID NO: 80451 - DNA, 25 bp, Artificial
  Probe
acactcaaatatcacttacaggctg

SEQ ID NO: 80452 - DNA, 25 bp, Artificial
  Probe
gctctgacatcaataatcatggctg

SEQ ID NO: 80453 - DNA, 25 bp, Artificial
  Probe
ctgctctgacatcaataatcatggc

SEQ ID NO: 80454 - DNA, 25 bp, Artificial
  Probe
atacactcaaatatcacttacaggc

SEQ ID NO: 80455 - DNA, 25 bp, Artificial
  Probe
caaagttaccttggcttagtgattg

SEQ ID NO: 80456 - DNA, 25 bp, Artificial
  Probe
gaatgactgactgctctgacatcaa

SEQ ID NO: 80457 - DNA, 25 bp, Artificial
  Probe
tgctctgacatcaataatcatggct

SEQ ID NO: 80458 - DNA, 25 bp, Artificial
  Probe
ctcagtagtaaattaccttcaagca

SEQ ID NO: 80459 - DNA, 25 bp, Artificial
  Probe
aattatttcccatgctctcttctga

SEQ ID NO: 80460 - DNA, 25 bp, Artificial
  Probe
attgttaatttctgcgtagtgatct

SEQ ID NO: 80461 - DNA, 25 bp, Artificial
  Probe
cattgttaatttctgcgtagtgatc

SEQ ID NO: 80462 - DNA, 25 bp, Artificial
  Probe
aaagttaccttggcttagtgattgc

SEQ ID NO: 80463 - DNA, 25 bp, Artificial
  Probe
gcagggatacactcaaatatcactt

SEQ ID NO: 80464 - DNA, 25 bp, Artificial
  Probe
ttatttcccatgctctcttctgaat

SEQ ID NO: 80465 - DNA, 25 bp, Artificial
  Probe
attatttcccatgctctcttctgaa

SEQ ID NO: 80466 - DNA, 25 bp, Artificial
  Probe
tatttcccatgctctcttctgaatg

SEQ ID NO: 80467 - DNA, 25 bp, Artificial
  Probe
ctgggaggtaactcagtagtaaatt

SEQ ID NO: 80468 - DNA, 25 bp, Artificial
  Probe
gagcagggatacactcaaatatcac

SEQ ID NO: 80469 - DNA, 25 bp, Artificial
  Probe
tcagtagtaaattaccttcaagcaa

SEQ ID NO: 80470 - DNA, 25 bp, Artificial
  Probe
aggagaaagtcaagaccctcaaaag

SEQ ID NO: 80471 - DNA, 25 bp, Artificial
  Probe
gaaagtcaagaccctcaaaagccag

SEQ ID NO: 80472 - DNA, 25 bp, Artificial
  Probe
gagaaagtcaagaccctcaaaagcc

SEQ ID NO: 80473 - DNA, 25 bp, Artificial
  Probe
ggagaaagtcaagaccctcaaaagc

SEQ ID NO: 80474 - DNA, 25 bp, Artificial
  Probe
aagtcaagaccctcaaaagccagaa

SEQ ID NO: 80475 - DNA, 25 bp, Artificial
  Probe
aaagtcaagaccctcaaaagccaga

SEQ ID NO: 80476 - DNA, 25 bp, Artificial
  Probe
agaaagtcaagaccctcaaaagcca

SEQ ID NO: 80477 - DNA, 25 bp, Artificial
  Probe
agtcaagaccctcaaaagccagaac

SEQ ID NO: 80478 - DNA, 25 bp, Artificial
  Probe
ggaggagaaagtcaagaccctcaaa

SEQ ID NO: 80479 - DNA, 25 bp, Artificial
  Probe
gaggagaaagtcaagaccctcaaaa

SEQ ID NO: 80480 - DNA, 25 bp, Artificial
  Probe
tggaggagaaagtcaagaccctcaa

SEQ ID NO: 80481 - DNA, 25 bp, Artificial
  Probe
cctcaagacatacctgcatacatat

SEQ ID NO: 80482 - DNA, 25 bp, Artificial
  Probe
actttgacagacatatttatgcctt

SEQ ID NO: 80483 - DNA, 25 bp, Artificial
  Probe
aactttgacagacatatttatgcct

SEQ ID NO: 80484 - DNA, 25 bp, Artificial
  Probe
gaaattctgaccctcaagacatacc

SEQ ID NO: 80485 - DNA, 25 bp, Artificial
  Probe
ggaaattctgaccctcaagacatac

SEQ ID NO: 80486 - DNA, 25 bp, Artificial
  Probe
ctattcggaaattctgaccctcaag

SEQ ID NO: 80487 - DNA, 25 bp, Artificial
  Probe
aaattctgaccctcaagacatacct

SEQ ID NO: 80488 - DNA, 25 bp, Artificial
  Probe
tattcggaaattctgaccctcaaga

SEQ ID NO: 80489 - DNA, 25 bp, Artificial
  Probe
ttcttgatttagacagagttgtgtt

SEQ ID NO: 80490 - DNA, 25 bp, Artificial
  Probe
ctgaggctcacaatccaagtagaag

SEQ ID NO: 80491 - DNA, 25 bp, Artificial
  Probe
attcttgatttagacagagttgtgt

SEQ ID NO: 80492 - DNA, 25 bp, Artificial
  Probe
aatctgacatattaagctgaatgac

SEQ ID NO: 80493 - DNA, 25 bp, Artificial
  Probe
ttgaaccaggacacaaacaaacaaa

SEQ ID NO: 80494 - DNA, 25 bp, Artificial
  Probe
atacctgcatacatatgagagcgag

SEQ ID NO: 80495 - DNA, 25 bp, Artificial
  Probe
agacatacctgcatacatatgagag

SEQ ID NO: 80496 - DNA, 25 bp, Artificial
  Probe
aattctgaccctcaagacatacctg

SEQ ID NO: 80497 - DNA, 25 bp, Artificial
  Probe
tcaagacatacctgcatacatatga

SEQ ID NO: 80498 - DNA, 25 bp, Artificial
  Probe
gacatacctgcatacatatgagagc

SEQ ID NO: 80499 - DNA, 25 bp, Artificial
  Probe
aagacatacctgcatacatatgaga

SEQ ID NO: 80500 - DNA, 25 bp, Artificial
  Probe
caagacatacctgcatacatatgag

SEQ ID NO: 80501 - DNA, 25 bp, Artificial
  Probe
ctcaagacatacctgcatacatatg

SEQ ID NO: 80502 - DNA, 25 bp, Artificial
  Probe
gagtttatagtgaacactgaggctc

SEQ ID NO: 80503 - DNA, 25 bp, Artificial
  Probe
agagtttatagtgaacactgaggct

SEQ ID NO: 80504 - DNA, 25 bp, Artificial
  Probe
agcagagtttatagtgaacactgag

SEQ ID NO: 80505 - DNA, 25 bp, Artificial
  Probe
gagcagagtttatagtgaacactga

SEQ ID NO: 80506 - DNA, 25 bp, Artificial
  Probe
cggaaattctgaccctcaagacata

SEQ ID NO: 80507 - DNA, 25 bp, Artificial
  Probe
agtttatagtgaacactgaggctca

SEQ ID NO: 80508 - DNA, 25 bp, Artificial
  Probe
tgagcagagtttatagtgaacactg

SEQ ID NO: 80509 - DNA, 25 bp, Artificial
  Probe
accaaatctgacatattaagctgaa

SEQ ID NO: 80510 - DNA, 25 bp, Artificial
  Probe
cctgcatacatatgagagcgagatt

SEQ ID NO: 80511 - DNA, 25 bp, Artificial
  Probe
taactttgacagacatatttatgcc

SEQ ID NO: 80512 - DNA, 25 bp, Artificial
  Probe
tttaatcctgtaccaaatctgacat

SEQ ID NO: 80513 - DNA, 25 bp, Artificial
  Probe
cagagtttatagtgaacactgaggc

SEQ ID NO: 80514 - DNA, 25 bp, Artificial
  Probe
gcagagtttatagtgaacactgagg

SEQ ID NO: 80515 - DNA, 25 bp, Artificial
  Probe
actgaggctcacaatccaagtagaa

SEQ ID NO: 80516 - DNA, 25 bp, Artificial
  Probe
aattcttgatttagacagagttgtg

SEQ ID NO: 80517 - DNA, 25 bp, Artificial
  Probe
aatcctgtaccaaatctgacatatt

SEQ ID NO: 80518 - DNA, 25 bp, Artificial
  Probe
ctttgacagacatatttatgcctta

SEQ ID NO: 80519 - DNA, 25 bp, Artificial
  Probe
ctgtaccaaatctgacatattaagc

SEQ ID NO: 80520 - DNA, 25 bp, Artificial
  Probe
ccctcaagacatacctgcatacata

SEQ ID NO: 80521 - DNA, 25 bp, Artificial
  Probe
tacctgcatacatatgagagcgaga

SEQ ID NO: 80522 - DNA, 25 bp, Artificial
  Probe
attcggaaattctgaccctcaagac

SEQ ID NO: 80523 - DNA, 25 bp, Artificial
  Probe
gctattcggaaattctgaccctcaa

SEQ ID NO: 80524 - DNA, 25 bp, Artificial
  Probe
catacctgcatacatatgagagcga

SEQ ID NO: 80525 - DNA, 25 bp, Artificial
  Probe
tagaagctacgtggatctacaaggt

SEQ ID NO: 80526 - DNA, 25 bp, Artificial
  Probe
actgagaaggattagtattgaagca

SEQ ID NO: 80527 - DNA, 25 bp, Artificial
  Probe
cactgagaaggattagtattgaagc

SEQ ID NO: 80528 - DNA, 25 bp, Artificial
  Probe
ctgagaaggattagtattgaagcaa

SEQ ID NO: 80529 - DNA, 25 bp, Artificial
  Probe
tctatgcctgattataagccaagtt

SEQ ID NO: 80530 - DNA, 25 bp, Artificial
  Probe
ttctatgcctgattataagccaagt

SEQ ID NO: 80531 - DNA, 25 bp, Artificial
  Probe
agtcatcactgagaaggattagtat

SEQ ID NO: 80532 - DNA, 25 bp, Artificial
  Probe
acttctatgcctgattataagccaa

SEQ ID NO: 80533 - DNA, 25 bp, Artificial
  Probe
cttctatgcctgattataagccaag

SEQ ID NO: 80534 - DNA, 25 bp, Artificial
  Probe
tacttctatgcctgattataagcca

SEQ ID NO: 80535 - DNA, 25 bp, Artificial
  Probe
agactctgagattgaccaactcttc

SEQ ID NO: 80536 - DNA, 25 bp, Artificial
  Probe
aggagttacttctatgcctgattat

SEQ ID NO: 80537 - DNA, 25 bp, Artificial
  Probe
catcactgagaaggattagtattga

SEQ ID NO: 80538 - DNA, 25 bp, Artificial
  Probe
tcatcactgagaaggattagtattg

SEQ ID NO: 80539 - DNA, 25 bp, Artificial
  Probe
gtcatcactgagaaggattagtatt

SEQ ID NO: 80540 - DNA, 25 bp, Artificial
  Probe
tcactgagaaggattagtattgaag

SEQ ID NO: 80541 - DNA, 25 bp, Artificial
  Probe
ggagttacttctatgcctgattata

SEQ ID NO: 80542 - DNA, 25 bp, Artificial
  Probe
ttacttctatgcctgattataagcc

SEQ ID NO: 80543 - DNA, 25 bp, Artificial
  Probe
ctagctgctatagtacggtaggatg

SEQ ID NO: 80544 - DNA, 25 bp, Artificial
  Probe
gactctgagattgaccaactcttcc

SEQ ID NO: 80545 - DNA, 25 bp, Artificial
  Probe
atcactgagaaggattagtattgaa

SEQ ID NO: 80546 - DNA, 25 bp, Artificial
  Probe
ctatagtacggtaggatgcagtctg

SEQ ID NO: 80547 - DNA, 25 bp, Artificial
  Probe
ctttcttccaggatgtgactaaacc

SEQ ID NO: 80548 - DNA, 25 bp, Artificial
  Probe
gttacttctatgcctgattataagc

SEQ ID NO: 80549 - DNA, 25 bp, Artificial
  Probe
attcagaggtgcagagaaggattag

SEQ ID NO: 80550 - DNA, 25 bp, Artificial
  Probe
gattcagaggtgcagagaaggatta

SEQ ID NO: 80551 - DNA, 25 bp, Artificial
  Probe
tatagtacggtaggatgcagtctgt

SEQ ID NO: 80552 - DNA, 25 bp, Artificial
  Probe
tttcttccaggatgtgactaaacca

SEQ ID NO: 80553 - DNA, 25 bp, Artificial
  Probe
tatgcctgattataagccaagtttc

SEQ ID NO: 80554 - DNA, 25 bp, Artificial
  Probe
ctatgcctgattataagccaagttt

SEQ ID NO: 80555 - DNA, 25 bp, Artificial
  Probe
tgagaaggattagtattgaagcaaa

SEQ ID NO: 80556 - DNA, 25 bp, Artificial
  Probe
atcactagctgctatagtacggtag

SEQ ID NO: 80557 - DNA, 25 bp, Artificial
  Probe
gaaggattagtattgaagcaaactg

SEQ ID NO: 80558 - DNA, 25 bp, Artificial
  Probe
agaaggattagtattgaagcaaact

SEQ ID NO: 80559 - DNA, 25 bp, Artificial
  Probe
gagaaggattagtattgaagcaaac

SEQ ID NO: 80560 - DNA, 25 bp, Artificial
  Probe
catcactagctgctatagtacggta

SEQ ID NO: 80561 - DNA, 25 bp, Artificial
  Probe
atgcctgattataagccaagtttcc

SEQ ID NO: 80562 - DNA, 25 bp, Artificial
  Probe
ttcttccaggatgtgactaaaccag

SEQ ID NO: 80563 - DNA, 25 bp, Artificial
  Probe
cctttcttccaggatgtgactaaac

SEQ ID NO: 80564 - DNA, 25 bp, Artificial
  Probe
actagctgctatagtacggtaggat

SEQ ID NO: 80565 - DNA, 25 bp, Artificial
  Probe
gctatagtacggtaggatgcagtct

SEQ ID NO: 80566 - DNA, 25 bp, Artificial
  Probe
tagctgctatagtacggtaggatgc

SEQ ID NO: 80567 - DNA, 25 bp, Artificial
  Probe
ttgttatctcaaatgctgcactatg

SEQ ID NO: 80568 - DNA, 25 bp, Artificial
  Probe
cttgttatctcaaatgctgcactat

SEQ ID NO: 80569 - DNA, 25 bp, Artificial
  Probe
gttatctcaaatgctgcactatgac

SEQ ID NO: 80570 - DNA, 25 bp, Artificial
  Probe
ccctttcttccaggatgtgactaaa

SEQ ID NO: 80571 - DNA, 25 bp, Artificial
  Probe
ggatgaagtttaccacctgattctg

SEQ ID NO: 80572 - DNA, 25 bp, Artificial
  Probe
gatgaagtttaccacctgattctgc

SEQ ID NO: 80573 - DNA, 25 bp, Artificial
  Probe
ctcaagttctggttgtgttgtctgt

SEQ ID NO: 80574 - DNA, 25 bp, Artificial
  Probe
atgaagtttaccacctgattctgct

SEQ ID NO: 80575 - DNA, 25 bp, Artificial
  Probe
aagttctggttgtgttgtctgtgtg

SEQ ID NO: 80576 - DNA, 25 bp, Artificial
  Probe
tcaagttctggttgtgttgtctgtg

SEQ ID NO: 80577 - DNA, 25 bp, Artificial
  Probe
gaggatgaagtttaccacctgattc

SEQ ID NO: 80578 - DNA, 25 bp, Artificial
  Probe
aggatgaagtttaccacctgattct

SEQ ID NO: 80579 - DNA, 25 bp, Artificial
  Probe
agaggatgaagtttaccacctgatt

SEQ ID NO: 80580 - DNA, 25 bp, Artificial
  Probe
caagttctggttgtgttgtctgtgt

SEQ ID NO: 80581 - DNA, 25 bp, Artificial
  Probe
gagaggatgaagtttaccacctgat

SEQ ID NO: 80582 - DNA, 25 bp, Artificial
  Probe
cctcaagttctggttgtgttgtctg

SEQ ID NO: 80583 - DNA, 25 bp, Artificial
  Probe
tgaagtttaccacctgattctgctg

SEQ ID NO: 80584 - DNA, 25 bp, Artificial
  Probe
cgagaggatgaagtttaccacctga

SEQ ID NO: 80585 - DNA, 25 bp, Artificial
  Probe
gaagtttaccacctgattctgctgg

SEQ ID NO: 80586 - DNA, 25 bp, Artificial
  Probe
acgagaggatgaagtttaccacctg

SEQ ID NO: 80587 - DNA, 25 bp, Artificial
  Probe
cacgagaggatgaagtttaccacct

SEQ ID NO: 80588 - DNA, 25 bp, Artificial
  Probe
ttttaatgccttcaaccccatcctg

SEQ ID NO: 80589 - DNA, 25 bp, Artificial
  Probe
gttttaatgccttcaaccccatcct

SEQ ID NO: 80590 - DNA, 25 bp, Artificial
  Probe
attctctccaggctaaggaagggaa

SEQ ID NO: 80591 - DNA, 25 bp, Artificial
  Probe
gattctctccaggctaaggaaggga

SEQ ID NO: 80592 - DNA, 25 bp, Artificial
  Probe
ctctgctgatacctaagctggtcct

SEQ ID NO: 80593 - DNA, 25 bp, Artificial
  Probe
ctgggtcttcatccttttccgaaag

SEQ ID NO: 80594 - DNA, 25 bp, Artificial
  Probe
cgttttaatgccttcaaccccatcc

SEQ ID NO: 80595 - DNA, 25 bp, Artificial
  Probe
ccgttttaatgccttcaaccccatc

SEQ ID NO: 80596 - DNA, 25 bp, Artificial
  Probe
cttccgttttaatgccttcaacccc

SEQ ID NO: 80597 - DNA, 25 bp, Artificial
  Probe
ccttccgttttaatgccttcaaccc

SEQ ID NO: 80598 - DNA, 25 bp, Artificial
  Probe
cactctcagcctctgtcacatgtac

SEQ ID NO: 80599 - DNA, 25 bp, Artificial
  Probe
tcactctcagcctctgtcacatgta

SEQ ID NO: 80600 - DNA, 25 bp, Artificial
  Probe
cctgggtcttcatccttttccgaaa

SEQ ID NO: 80601 - DNA, 25 bp, Artificial
  Probe
tccgttttaatgccttcaaccccat

SEQ ID NO: 80602 - DNA, 25 bp, Artificial
  Probe
ttccgttttaatgccttcaacccca

SEQ ID NO: 80603 - DNA, 25 bp, Artificial
  Probe
gccttccgttttaatgccttcaacc

SEQ ID NO: 80604 - DNA, 25 bp, Artificial
  Probe
cttttccgaaaggctgtcttccaac

SEQ ID NO: 80605 - DNA, 25 bp, Artificial
  Probe
gttctgtgggaatgccatccaaaac

SEQ ID NO: 80606 - DNA, 25 bp, Artificial
  Probe
ctgatacctaagctggtcctgcttg

SEQ ID NO: 80607 - DNA, 25 bp, Artificial
  Probe
tttaatgccttcaaccccatcctgg

SEQ ID NO: 80608 - DNA, 25 bp, Artificial
  Probe
ttctgtgggaatgccatccaaaaca

SEQ ID NO: 80609 - DNA, 25 bp, Artificial
  Probe
tgttctgtgggaatgccatccaaaa

SEQ ID NO: 80610 - DNA, 25 bp, Artificial
  Probe
gtggcaagatgtgtatgagaagaag

SEQ ID NO: 80611 - DNA, 25 bp, Artificial
  Probe
tgtggcaagatgtgtatgagaagaa

SEQ ID NO: 80612 - DNA, 25 bp, Artificial
  Probe
aagatgtgtatgagaagaagctgag

SEQ ID NO: 80613 - DNA, 25 bp, Artificial
  Probe
caagatgtgtatgagaagaagctga

SEQ ID NO: 80614 - DNA, 25 bp, Artificial
  Probe
gtgtggcaagatgtgtatgagaaga

SEQ ID NO: 80615 - DNA, 25 bp, Artificial
  Probe
tggcaagatgtgtatgagaagaagc

SEQ ID NO: 80616 - DNA, 25 bp, Artificial
  Probe
gcaagatgtgtatgagaagaagctg

SEQ ID NO: 80617 - DNA, 25 bp, Artificial
  Probe
agatgtgtatgagaagaagctgagc

SEQ ID NO: 80618 - DNA, 25 bp, Artificial
  Probe
ggcaagatgtgtatgagaagaagct

SEQ ID NO: 80619 - DNA, 25 bp, Artificial
  Probe
cgtgtggcaagatgtgtatgagaag

SEQ ID NO: 80620 - DNA, 25 bp, Artificial
  Probe
gatgtgtatgagaagaagctgagcc

SEQ ID NO: 80621 - DNA, 25 bp, Artificial
  Probe
atcgtgtggcaagatgtgtatgaga

SEQ ID NO: 80622 - DNA, 25 bp, Artificial
  Probe
tcgtgtggcaagatgtgtatgagaa

SEQ ID NO: 80623 - DNA, 25 bp, Artificial
  Probe
aggtattttgatgaggagttcacag

SEQ ID NO: 80624 - DNA, 25 bp, Artificial
  Probe
caggtattttgatgaggagttcaca

SEQ ID NO: 80625 - DNA, 25 bp, Artificial
  Probe
caccaggtattttgatgaggagttc

SEQ ID NO: 80626 - DNA, 25 bp, Artificial
  Probe
ccaggtattttgatgaggagttcac

SEQ ID NO: 80627 - DNA, 25 bp, Artificial
  Probe
acaccaggtattttgatgaggagtt

SEQ ID NO: 80628 - DNA, 25 bp, Artificial
  Probe
accaggtattttgatgaggagttca

SEQ ID NO: 80629 - DNA, 25 bp, Artificial
  Probe
ggtattttgatgaggagttcacagc

SEQ ID NO: 80630 - DNA, 25 bp, Artificial
  Probe
gacaccaggtattttgatgaggagt

SEQ ID NO: 80631 - DNA, 25 bp, Artificial
  Probe
ccttctacaaccaggaccatgagaa

SEQ ID NO: 80632 - DNA, 25 bp, Artificial
  Probe
gtattttgatgaggagttcacagct

SEQ ID NO: 80633 - DNA, 25 bp, Artificial
  Probe
tattttgatgaggagttcacagctc

SEQ ID NO: 80634 - DNA, 25 bp, Artificial
  Probe
ttctacaaccaggaccatgagaagc

SEQ ID NO: 80635 - DNA, 25 bp, Artificial
  Probe
catcgtgtggcaagatgtgtatgag

SEQ ID NO: 80636 - DNA, 25 bp, Artificial
  Probe
cgacaccaggtattttgatgaggag

SEQ ID NO: 80637 - DNA, 25 bp, Artificial
  Probe
tacctgatggttttgtttctcggat

SEQ ID NO: 80638 - DNA, 25 bp, Artificial
  Probe
atgaggagttcacagctcagatgat

SEQ ID NO: 80639 - DNA, 25 bp, Artificial
  Probe
tctacaaccaggaccatgagaagct

SEQ ID NO: 80640 - DNA, 25 bp, Artificial
  Probe
cctgatggttttgtttctcggatgt

SEQ ID NO: 80641 - DNA, 25 bp, Artificial
  Probe
ttgatgaggagttcacagctcagat

SEQ ID NO: 80642 - DNA, 25 bp, Artificial
  Probe
atgtgtatgagaagaagctgagccc

SEQ ID NO: 80643 - DNA, 25 bp, Artificial
  Probe
ctacaaccaggaccatgagaagctg

SEQ ID NO: 80644 - DNA, 25 bp, Artificial
  Probe
gatgaggagttcacagctcagatga

SEQ ID NO: 80645 - DNA, 25 bp, Artificial
  Probe
gtacctgatggttttgtttctcgga

SEQ ID NO: 80646 - DNA, 25 bp, Artificial
  Probe
tgatgaggagttcacagctcagatg

SEQ ID NO: 80647 - DNA, 25 bp, Artificial
  Probe
cactttccccagttctcctactcag

SEQ ID NO: 80648 - DNA, 25 bp, Artificial
  Probe
gaccgacaccaggtattttgatgag

SEQ ID NO: 80649 - DNA, 25 bp, Artificial
  Probe
gagaccgacaccaggtattttgatg

SEQ ID NO: 80650 - DNA, 25 bp, Artificial
  Probe
acctgatggttttgtttctcggatg

SEQ ID NO: 80651 - DNA, 25 bp, Artificial
  Probe
ccgacaccaggtattttgatgagga

SEQ ID NO: 80652 - DNA, 25 bp, Artificial
  Probe
agaccgacaccaggtattttgatga

SEQ ID NO: 80653 - DNA, 25 bp, Artificial
  Probe
tgagaccgacaccaggtattttgat

SEQ ID NO: 80654 - DNA, 25 bp, Artificial
  Probe
catcctaatggaggagatccgcttc

SEQ ID NO: 80655 - DNA, 25 bp, Artificial
  Probe
ttcattaagttcatctggaccttca

SEQ ID NO: 80656 - DNA, 25 bp, Artificial
  Probe
tcattaagttcatctggaccttcac

SEQ ID NO: 80657 - DNA, 25 bp, Artificial
  Probe
cattaagttcatctggaccttcacc

SEQ ID NO: 80658 - DNA, 25 bp, Artificial
  Probe
attaagttcatctggaccttcacct

SEQ ID NO: 80659 - DNA, 25 bp, Artificial
  Probe
ttaagttcatctggaccttcacctc

SEQ ID NO: 80660 - DNA, 25 bp, Artificial
  Probe
aaaccaagatttccttcatagccat

SEQ ID NO: 80661 - DNA, 25 bp, Artificial
  Probe
tttcattaagttcatctggaccttc

SEQ ID NO: 80662 - DNA, 25 bp, Artificial
  Probe
agcaccatagagaaactagatgaac

SEQ ID NO: 80663 - DNA, 25 bp, Artificial
  Probe
caccatagagaaactagatgaacct

SEQ ID NO: 80664 - DNA, 25 bp, Artificial
  Probe
aagcaccatagagaaactagatgaa

SEQ ID NO: 80665 - DNA, 25 bp, Artificial
  Probe
aaagcaccatagagaaactagatga

SEQ ID NO: 80666 - DNA, 25 bp, Artificial
  Probe
gcaccatagagaaactagatgaacc

SEQ ID NO: 80667 - DNA, 25 bp, Artificial
  Probe
ttccagtgtgtaagagcagacattg

SEQ ID NO: 80668 - DNA, 25 bp, Artificial
  Probe
gttccagtgtgtaagagcagacatt

SEQ ID NO: 80669 - DNA, 25 bp, Artificial
  Probe
ccatagagaaactagatgaacctca

SEQ ID NO: 80670 - DNA, 25 bp, Artificial
  Probe
accatagagaaactagatgaacctc

SEQ ID NO: 80671 - DNA, 25 bp, Artificial
  Probe
atttgttccagtgtgtaagagcaga

SEQ ID NO: 80672 - DNA, 25 bp, Artificial
  Probe
catttgttccagtgtgtaagagcag

SEQ ID NO: 80673 - DNA, 25 bp, Artificial
  Probe
aaccaagatttccttcatagccatg

SEQ ID NO: 80674 - DNA, 25 bp, Artificial
  Probe
taagttcatctggaccttcacctcg

SEQ ID NO: 80675 - DNA, 25 bp, Artificial
  Probe
caacattgagcttccagagaattcc

SEQ ID NO: 80676 - DNA, 25 bp, Artificial
  Probe
ccaacattgagcttccagagaattc

SEQ ID NO: 80677 - DNA, 25 bp, Artificial
  Probe
tttgttccagtgtgtaagagcagac

SEQ ID NO: 80678 - DNA, 25 bp, Artificial
  Probe
tgttccagtgtgtaagagcagacat

SEQ ID NO: 80679 - DNA, 25 bp, Artificial
  Probe
aacattgagcttccagagaattcca

SEQ ID NO: 80680 - DNA, 25 bp, Artificial
  Probe
ccatttgttccagtgtgtaagagca

SEQ ID NO: 80681 - DNA, 25 bp, Artificial
  Probe
ttgttccagtgtgtaagagcagaca

SEQ ID NO: 80682 - DNA, 25 bp, Artificial
  Probe
acattgagcttccagagaattccag

SEQ ID NO: 80683 - DNA, 25 bp, Artificial
  Probe
gccaacattgagcttccagagaatt

SEQ ID NO: 80684 - DNA, 25 bp, Artificial
  Probe
aaaaccaagatttccttcatagcca

SEQ ID NO: 80685 - DNA, 25 bp, Artificial
  Probe
cttttcattaagttcatctggacct

SEQ ID NO: 80686 - DNA, 25 bp, Artificial
  Probe
ctcctgtgtcactcactaccatcag

SEQ ID NO: 80687 - DNA, 25 bp, Artificial
  Probe
catgtctctgcaacttcctttcaac

SEQ ID NO: 80688 - DNA, 25 bp, Artificial
  Probe
gacggagaactggaaaatactctta

SEQ ID NO: 80689 - DNA, 25 bp, Artificial
  Probe
gcaaaatacggaagcaaggaaaatc

SEQ ID NO: 80690 - DNA, 25 bp, Artificial
  Probe
ttttcattaagttcatctggacctt

SEQ ID NO: 80691 - DNA, 25 bp, Artificial
  Probe
acggagaactggaaaatactcttat

SEQ ID NO: 80692 - DNA, 25 bp, Artificial
  Probe
caactgacggagaactggaaaatac

SEQ ID NO: 80693 - DNA, 25 bp, Artificial
  Probe
aatccatgtctctgcaacttccttt

SEQ ID NO: 80694 - DNA, 25 bp, Artificial
  Probe
aaatccatgtctctgcaacttcctt

SEQ ID NO: 80695 - DNA, 25 bp, Artificial
  Probe
aactgacggagaactggaaaatact

SEQ ID NO: 80696 - DNA, 25 bp, Artificial
  Probe
tgagaaatacaggaagaaaagatcg

SEQ ID NO: 80697 - DNA, 25 bp, Artificial
  Probe
aaaagcaccatagagaaactagatg

SEQ ID NO: 80698 - DNA, 25 bp, Artificial
  Probe
cggagaactggaaaatactcttatc

SEQ ID NO: 80699 - DNA, 25 bp, Artificial
  Probe
atccaaatccatgtctctgcaactt

SEQ ID NO: 80700 - DNA, 25 bp, Artificial
  Probe
gtgcttattaacattacggcgatta

SEQ ID NO: 80701 - DNA, 25 bp, Artificial
  Probe
tgcttattaacattacggcgattaa

SEQ ID NO: 80702 - DNA, 25 bp, Artificial
  Probe
tgtgcttattaacattacggcgatt

SEQ ID NO: 80703 - DNA, 25 bp, Artificial
  Probe
ctgtgcttattaacattacggcgat

SEQ ID NO: 80704 - DNA, 25 bp, Artificial
  Probe
tttacctgtgatttagccatttgac

SEQ ID NO: 80705 - DNA, 25 bp, Artificial
  Probe
tacctgtgatttagccatttgacta

SEQ ID NO: 80706 - DNA, 25 bp, Artificial
  Probe
ttacctgtgatttagccatttgact

SEQ ID NO: 80707 - DNA, 25 bp, Artificial
  Probe
cccagtttctcttcaatactttgtg

SEQ ID NO: 80708 - DNA, 25 bp, Artificial
  Probe
ccagtttctcttcaatactttgtgt

SEQ ID NO: 80709 - DNA, 25 bp, Artificial
  Probe
ttgcccagtttctcttcaatacttt

SEQ ID NO: 80710 - DNA, 25 bp, Artificial
  Probe
tttgcccagtttctcttcaatactt

SEQ ID NO: 80711 - DNA, 25 bp, Artificial
  Probe
cctgtgatttagccatttgactaac

SEQ ID NO: 80712 - DNA, 25 bp, Artificial
  Probe
gcccagtttctcttcaatactttgt

SEQ ID NO: 80713 - DNA, 25 bp, Artificial
  Probe
tgcccagtttctcttcaatactttg

SEQ ID NO: 80714 - DNA, 25 bp, Artificial
  Probe
gcttattaacattacggcgattaaa

SEQ ID NO: 80715 - DNA, 25 bp, Artificial
  Probe
gatttagccatttgactaacagtgt

SEQ ID NO: 80716 - DNA, 25 bp, Artificial
  Probe
tgatttagccatttgactaacagtg

SEQ ID NO: 80717 - DNA, 25 bp, Artificial
  Probe
gtgatttagccatttgactaacagt

SEQ ID NO: 80718 - DNA, 25 bp, Artificial
  Probe
tgtgatttagccatttgactaacag

SEQ ID NO: 80719 - DNA, 25 bp, Artificial
  Probe
ctgtgatttagccatttgactaaca

SEQ ID NO: 80720 - DNA, 25 bp, Artificial
  Probe
acctgtgatttagccatttgactaa

SEQ ID NO: 80721 - DNA, 25 bp, Artificial
  Probe
catttgactaacagtgtttggctag

SEQ ID NO: 80722 - DNA, 25 bp, Artificial
  Probe
ctaacagtgtttggctagtagatgt

SEQ ID NO: 80723 - DNA, 25 bp, Artificial
  Probe
ttagccatttgactaacagtgtttg

SEQ ID NO: 80724 - DNA, 25 bp, Artificial
  Probe
tttagccatttgactaacagtgttt

SEQ ID NO: 80725 - DNA, 25 bp, Artificial
  Probe
cctgtgcttattaacattacggcga

SEQ ID NO: 80726 - DNA, 25 bp, Artificial
  Probe
atttagccatttgactaacagtgtt

SEQ ID NO: 80727 - DNA, 25 bp, Artificial
  Probe
attaactttgcggaaacacccattg

SEQ ID NO: 80728 - DNA, 25 bp, Artificial
  Probe
cattaactttgcggaaacacccatt

SEQ ID NO: 80729 - DNA, 25 bp, Artificial
  Probe
tatgtgaaatatgtagctgctcttc

SEQ ID NO: 80730 - DNA, 25 bp, Artificial
  Probe
gactaacagtgtttggctagtagat

SEQ ID NO: 80731 - DNA, 25 bp, Artificial
  Probe
tttgactaacagtgtttggctagta

SEQ ID NO: 80732 - DNA, 25 bp, Artificial
  Probe
actaacagtgtttggctagtagatg

SEQ ID NO: 80733 - DNA, 25 bp, Artificial
  Probe
ttgactaacagtgtttggctagtag

SEQ ID NO: 80734 - DNA, 25 bp, Artificial
  Probe
ttatgtgaaatatgtagctgctctt

SEQ ID NO: 80735 - DNA, 25 bp, Artificial
  Probe
atttgactaacagtgtttggctagt

SEQ ID NO: 80736 - DNA, 25 bp, Artificial
  Probe
agaatgacttctgactattcaagtt

SEQ ID NO: 80737 - DNA, 25 bp, Artificial
  Probe
attatgtgaaatatgtagctgctct

SEQ ID NO: 80738 - DNA, 25 bp, Artificial
  Probe
cagtttctcttcaatactttgtgta

SEQ ID NO: 80739 - DNA, 25 bp, Artificial
  Probe
tgactaacagtgtttggctagtaga

SEQ ID NO: 80740 - DNA, 25 bp, Artificial
  Probe
ccatttgactaacagtgtttggcta

SEQ ID NO: 80741 - DNA, 25 bp, Artificial
  Probe
tagccatttgactaacagtgtttgg

SEQ ID NO: 80742 - DNA, 25 bp, Artificial
  Probe
caattatgtgaaatatgtagctgct

SEQ ID NO: 80743 - DNA, 25 bp, Artificial
  Probe
taaatgttttgcccagtttctcttc

SEQ ID NO: 80744 - DNA, 25 bp, Artificial
  Probe
tttctttggactttgaagctagtgc

SEQ ID NO: 80745 - DNA, 25 bp, Artificial
  Probe
attcggagtatagtgttgcttgtaa

SEQ ID NO: 80746 - DNA, 25 bp, Artificial
  Probe
aattcggagtatagtgttgcttgta

SEQ ID NO: 80747 - DNA, 25 bp, Artificial
  Probe
taattcggagtatagtgttgcttgt

SEQ ID NO: 80748 - DNA, 25 bp, Artificial
  Probe
ataattcggagtatagtgttgcttg

SEQ ID NO: 80749 - DNA, 25 bp, Artificial
  Probe
ttcggagtatagtgttgcttgtaac

SEQ ID NO: 80750 - DNA, 25 bp, Artificial
  Probe
cttgaacaactgactcgctgtatag

SEQ ID NO: 80751 - DNA, 25 bp, Artificial
  Probe
tcttgaacaactgactcgctgtata

SEQ ID NO: 80752 - DNA, 25 bp, Artificial
  Probe
tataattcggagtatagtgttgctt

SEQ ID NO: 80753 - DNA, 25 bp, Artificial
  Probe
taggtctaatagttgggataaggga

SEQ ID NO: 80754 - DNA, 25 bp, Artificial
  Probe
gaacgctttctcatttccaatactg

SEQ ID NO: 80755 - DNA, 25 bp, Artificial
  Probe
taacataaactcaaagatacccagc

SEQ ID NO: 80756 - DNA, 25 bp, Artificial
  Probe
gttataattcggagtatagtgttgc

SEQ ID NO: 80757 - DNA, 25 bp, Artificial
  Probe
cctgttataattcggagtatagtgt

SEQ ID NO: 80758 - DNA, 25 bp, Artificial
  Probe
acctgttataattcggagtatagtg

SEQ ID NO: 80759 - DNA, 25 bp, Artificial
  Probe
gctcaagttatctaggtctaatagt

SEQ ID NO: 80760 - DNA, 25 bp, Artificial
  Probe
ccacgactaggaatttaaccataga

SEQ ID NO: 80761 - DNA, 25 bp, Artificial
  Probe
aacataaactcaaagatacccagcg

SEQ ID NO: 80762 - DNA, 25 bp, Artificial
  Probe
ttataattcggagtatagtgttgct

SEQ ID NO: 80763 - DNA, 25 bp, Artificial
  Probe
tgtatagctcaagttatctaggtct

SEQ ID NO: 80764 - DNA, 25 bp, Artificial
  Probe
cccacgactaggaatttaaccatag

SEQ ID NO: 80765 - DNA, 25 bp, Artificial
  Probe
tctaatagttgggataagggactca

SEQ ID NO: 80766 - DNA, 25 bp, Artificial
  Probe
ctaggtctaatagttgggataaggg

SEQ ID NO: 80767 - DNA, 25 bp, Artificial
  Probe
gacacagccataagcaaagtaagaa

SEQ ID NO: 80768 - DNA, 25 bp, Artificial
  Probe
ctaatagttgggataagggactcag

SEQ ID NO: 80769 - DNA, 25 bp, Artificial
  Probe
ctgtatagctcaagttatctaggtc

SEQ ID NO: 80770 - DNA, 25 bp, Artificial
  Probe
acgactaggaatttaaccatagact

SEQ ID NO: 80771 - DNA, 25 bp, Artificial
  Probe
cacgactaggaatttaaccatagac

SEQ ID NO: 80772 - DNA, 25 bp, Artificial
  Probe
acacagccataagcaaagtaagaac

SEQ ID NO: 80773 - DNA, 25 bp, Artificial
  Probe
taatagttgggataagggactcagc

SEQ ID NO: 80774 - DNA, 25 bp, Artificial
  Probe
ataaactcaaagatacccagcggaa

SEQ ID NO: 80775 - DNA, 25 bp, Artificial
  Probe
gtctaatagttgggataagggactc

SEQ ID NO: 80776 - DNA, 25 bp, Artificial
  Probe
cagacacagccataagcaaagtaag

SEQ ID NO: 80777 - DNA, 25 bp, Artificial
  Probe
tctaggtctaatagttgggataagg

SEQ ID NO: 80778 - DNA, 25 bp, Artificial
  Probe
ggtctaatagttgggataagggact

SEQ ID NO: 80779 - DNA, 25 bp, Artificial
  Probe
aggtctaatagttgggataagggac

SEQ ID NO: 80780 - DNA, 25 bp, Artificial
  Probe
agacacagccataagcaaagtaaga

SEQ ID NO: 80781 - DNA, 25 bp, Artificial
  Probe
gttgcttgtaacataaactcaaaga

SEQ ID NO: 80782 - DNA, 25 bp, Artificial
  Probe
agactagttcaggaataagcatcag

SEQ ID NO: 80783 - DNA, 25 bp, Artificial
  Probe
ccatagactagttcaggaataagca

SEQ ID NO: 80784 - DNA, 25 bp, Artificial
  Probe
accatagactagttcaggaataagc

SEQ ID NO: 80785 - DNA, 25 bp, Artificial
  Probe
tgtaacataaactcaaagataccca

SEQ ID NO: 80786 - DNA, 25 bp, Artificial
  Probe
gtcttgaacaactgactcgctgtat

SEQ ID NO: 80787 - DNA, 25 bp, Artificial
  Probe
cgctgtatagctcaagttatctagg

SEQ ID NO: 80788 - DNA, 25 bp, Artificial
  Probe
tcgctgtatagctcaagttatctag

SEQ ID NO: 80789 - DNA, 25 bp, Artificial
  Probe
ctcgctgtatagctcaagttatcta

SEQ ID NO: 80790 - DNA, 25 bp, Artificial
  Probe
agctattatctgccagttgttaagg

SEQ ID NO: 80791 - DNA, 25 bp, Artificial
  Probe
ctgtactcttgctgtccatctgtta

SEQ ID NO: 80792 - DNA, 25 bp, Artificial
  Probe
ccaggtctaactgtaatgattggtt

SEQ ID NO: 80793 - DNA, 25 bp, Artificial
  Probe
tgtactcttgctgtccatctgttac

SEQ ID NO: 80794 - DNA, 25 bp, Artificial
  Probe
gcctgtatccactaatctctgcttg

SEQ ID NO: 80795 - DNA, 25 bp, Artificial
  Probe
gctattatctgccagttgttaaggg

SEQ ID NO: 80796 - DNA, 25 bp, Artificial
  Probe
gcaagtaatgtggtgaatttgtaat

SEQ ID NO: 80797 - DNA, 25 bp, Artificial
  Probe
gaccaggtctaactgtaatgattgg

SEQ ID NO: 80798 - DNA, 25 bp, Artificial
  Probe
gtactcttgctgtccatctgttacg

SEQ ID NO: 80799 - DNA, 25 bp, Artificial
  Probe
caggtctaactgtaatgattggttt

SEQ ID NO: 80800 - DNA, 25 bp, Artificial
  Probe
tgtttagtcagtattacacacggga

SEQ ID NO: 80801 - DNA, 25 bp, Artificial
  Probe
gtttagtcagtattacacacgggac

SEQ ID NO: 80802 - DNA, 25 bp, Artificial
  Probe
aggtctaactgtaatgattggttta

SEQ ID NO: 80803 - DNA, 25 bp, Artificial
  Probe
gttgttatctctaagcctaactaac

SEQ ID NO: 80804 - DNA, 25 bp, Artificial
  Probe
tgccgatatttaaagtttgactcac

SEQ ID NO: 80805 - DNA, 25 bp, Artificial
  Probe
tagctattatctgccagttgttaag

SEQ ID NO: 80806 - DNA, 25 bp, Artificial
  Probe
tgttatctctaagcctaactaactt

SEQ ID NO: 80807 - DNA, 25 bp, Artificial
  Probe
ttgttatctctaagcctaactaact

SEQ ID NO: 80808 - DNA, 25 bp, Artificial
  Probe
gccgatatttaaagtttgactcact

SEQ ID NO: 80809 - DNA, 25 bp, Artificial
  Probe
aagaagaaaggagaagcaacacgaa

SEQ ID NO: 80810 - DNA, 25 bp, Artificial
  Probe
tgaatgccgatatttaaagtttgac

SEQ ID NO: 80811 - DNA, 25 bp, Artificial
  Probe
tttagtcagtattacacacgggacc

SEQ ID NO: 80812 - DNA, 25 bp, Artificial
  Probe
atgccgatatttaaagtttgactca

SEQ ID NO: 80813 - DNA, 25 bp, Artificial
  Probe
ttagctattatctgccagttgttaa

SEQ ID NO: 80814 - DNA, 25 bp, Artificial
  Probe
tgcaagtaatgtggtgaatttgtaa

SEQ ID NO: 80815 - DNA, 25 bp, Artificial
  Probe
atgcaagtaatgtggtgaatttgta

SEQ ID NO: 80816 - DNA, 25 bp, Artificial
  Probe
catgcaagtaatgtggtgaatttgt

SEQ ID NO: 80817 - DNA, 25 bp, Artificial
  Probe
gaagaagaaaggagaagcaacacga

SEQ ID NO: 80818 - DNA, 25 bp, Artificial
  Probe
aagaaaggagaagcaacacgaacaa

SEQ ID NO: 80819 - DNA, 25 bp, Artificial
  Probe
aatgccgatatttaaagtttgactc

SEQ ID NO: 80820 - DNA, 25 bp, Artificial
  Probe
gaatgccgatatttaaagtttgact

SEQ ID NO: 80821 - DNA, 25 bp, Artificial
  Probe
ttcttgtaatatgaatgccgatatt

SEQ ID NO: 80822 - DNA, 25 bp, Artificial
  Probe
ttatttcttgtaatatgaatgccga

SEQ ID NO: 80823 - DNA, 25 bp, Artificial
  Probe
aaagagagggaaagagagaacaaaa

SEQ ID NO: 80824 - DNA, 25 bp, Artificial
  Probe
aaaagagagggaaagagagaacaaa

SEQ ID NO: 80825 - DNA, 25 bp, Artificial
  Probe
agcctgtatccactaatctctgctt

SEQ ID NO: 80826 - DNA, 25 bp, Artificial
  Probe
tgggtttcttttgtgtttcttagtt

SEQ ID NO: 80827 - DNA, 25 bp, Artificial
  Probe
ttgggtttcttttgtgtttcttagt

SEQ ID NO: 80828 - DNA, 25 bp, Artificial
  Probe
acttgggtttcttttgtgtttctta

SEQ ID NO: 80829 - DNA, 25 bp, Artificial
  Probe
tactcttgctgtccatctgttacgt

SEQ ID NO: 80830 - DNA, 25 bp, Artificial
  Probe
ggtctaactgtaatgattggtttat

SEQ ID NO: 80831 - DNA, 25 bp, Artificial
  Probe
cttatttcttgtaatatgaatgccg

SEQ ID NO: 80832 - DNA, 25 bp, Artificial
  Probe
tagtcagtattacacacgggacctt

SEQ ID NO: 80833 - DNA, 25 bp, Artificial
  Probe
ttagtcagtattacacacgggacct

SEQ ID NO: 80834 - DNA, 25 bp, Artificial
  Probe
agaagaaaggagaagcaacacgaac

SEQ ID NO: 80835 - DNA, 25 bp, Artificial
  Probe
ggttcagaggttcagtccattatta

SEQ ID NO: 80836 - DNA, 25 bp, Artificial
  Probe
tcagaggttcagtccattattatca

SEQ ID NO: 80837 - DNA, 25 bp, Artificial
  Probe
aggttcagaggttcagtccattatt

SEQ ID NO: 80838 - DNA, 25 bp, Artificial
  Probe
cagaggttcagtccattattatcaa

SEQ ID NO: 80839 - DNA, 25 bp, Artificial
  Probe
gttcagaggttcagtccattattat

SEQ ID NO: 80840 - DNA, 25 bp, Artificial
  Probe
cttcttggaactgaactgaactctg

SEQ ID NO: 80841 - DNA, 25 bp, Artificial
  Probe
ttcagaggttcagtccattattatc

SEQ ID NO: 80842 - DNA, 25 bp, Artificial
  Probe
acttcttggaactgaactgaactct

SEQ ID NO: 80843 - DNA, 25 bp, Artificial
  Probe
cacttcttggaactgaactgaactc

SEQ ID NO: 80844 - DNA, 25 bp, Artificial
  Probe
ttcttggaactgaactgaactctgt

SEQ ID NO: 80845 - DNA, 25 bp, Artificial
  Probe
acacttcttggaactgaactgaact

SEQ ID NO: 80846 - DNA, 25 bp, Artificial
  Probe
cacacttcttggaactgaactgaac

SEQ ID NO: 80847 - DNA, 25 bp, Artificial
  Probe
agaggttcagtccattattatcaat

SEQ ID NO: 80848 - DNA, 25 bp, Artificial
  Probe
tcttggaactgaactgaactctgtg

SEQ ID NO: 80849 - DNA, 25 bp, Artificial
  Probe
gagctgagagttctacatcttcatt

SEQ ID NO: 80850 - DNA, 25 bp, Artificial
  Probe
tcaggttcagaggttcagtccatta

SEQ ID NO: 80851 - DNA, 25 bp, Artificial
  Probe
agagctgagagttctacatcttcat

SEQ ID NO: 80852 - DNA, 25 bp, Artificial
  Probe
attattatcaatgcaggaacatggc

SEQ ID NO: 80853 - DNA, 25 bp, Artificial
  Probe
tattggcttctaggcaactaggtta

SEQ ID NO: 80854 - DNA, 25 bp, Artificial
  Probe
agatacatacaccgttctttactgg

SEQ ID NO: 80855 - DNA, 25 bp, Artificial
  Probe
ggagagatacatacaccgttcttta

SEQ ID NO: 80856 - DNA, 25 bp, Artificial
  Probe
acaccattaccaaggcaaatcttat

SEQ ID NO: 80857 - DNA, 25 bp, Artificial
  Probe
caccattaccaaggcaaatcttata

SEQ ID NO: 80858 - DNA, 25 bp, Artificial
  Probe
aggttcagtccattattatcaatgc

SEQ ID NO: 80859 - DNA, 25 bp, Artificial
  Probe
gagatacatacaccgttctttactg

SEQ ID NO: 80860 - DNA, 25 bp, Artificial
  Probe
agagatacatacaccgttctttact

SEQ ID NO: 80861 - DNA, 25 bp, Artificial
  Probe
atattggcttctaggcaactaggtt

SEQ ID NO: 80862 - DNA, 25 bp, Artificial
  Probe
gctgagagttctacatcttcatttg

SEQ ID NO: 80863 - DNA, 25 bp, Artificial
  Probe
cagagctgagagttctacatcttca

SEQ ID NO: 80864 - DNA, 25 bp, Artificial
  Probe
gacaccattaccaaggcaaatctta

SEQ ID NO: 80865 - DNA, 25 bp, Artificial
  Probe
gagagatacatacaccgttctttac

SEQ ID NO: 80866 - DNA, 25 bp, Artificial
  Probe
attggcttctaggcaactaggttaa

SEQ ID NO: 80867 - DNA, 25 bp, Artificial
  Probe
cttggaactgaactgaactctgtgg

SEQ ID NO: 80868 - DNA, 25 bp, Artificial
  Probe
gaatattggcttctaggcaactagg

SEQ ID NO: 80869 - DNA, 25 bp, Artificial
  Probe
gggagagatacatacaccgttcttt

SEQ ID NO: 80870 - DNA, 25 bp, Artificial
  Probe
ttcaggttcagaggttcagtccatt

SEQ ID NO: 80871 - DNA, 25 bp, Artificial
  Probe
ttggcttctaggcaactaggttaag

SEQ ID NO: 80872 - DNA, 25 bp, Artificial
  Probe
agaatattggcttctaggcaactag

SEQ ID NO: 80873 - DNA, 25 bp, Artificial
  Probe
ttactgctgtgaacagacaccatta

SEQ ID NO: 80874 - DNA, 25 bp, Artificial
  Probe
gctcttgcttaatatctagacatgc

SEQ ID NO: 80875 - DNA, 25 bp, Artificial
  Probe
cagaatattggcttctaggcaacta

SEQ ID NO: 80876 - DNA, 25 bp, Artificial
  Probe
ctgagagttctacatcttcatttga

SEQ ID NO: 80877 - DNA, 25 bp, Artificial
  Probe
aatattggcttctaggcaactaggt

SEQ ID NO: 80878 - DNA, 25 bp, Artificial
  Probe
tgcttaatatctagacatgctctca

SEQ ID NO: 80879 - DNA, 25 bp, Artificial
  Probe
cccaaagtttaccaaagaatagctc

SEQ ID NO: 80880 - DNA, 25 bp, Artificial
  Probe
aaggacacagctactactacatctc

SEQ ID NO: 80881 - DNA, 25 bp, Artificial
  Probe
gaaggacacagctactactacatct

SEQ ID NO: 80882 - DNA, 25 bp, Artificial
  Probe
gacacagctactactacatctccaa

SEQ ID NO: 80883 - DNA, 25 bp, Artificial
  Probe
catctccaaacctatctaccatcag

SEQ ID NO: 80884 - DNA, 25 bp, Artificial
  Probe
actacatctccaaacctatctacca

SEQ ID NO: 80885 - DNA, 25 bp, Artificial
  Probe
acatctccaaacctatctaccatca

SEQ ID NO: 80886 - DNA, 25 bp, Artificial
  Probe
tacatctccaaacctatctaccatc

SEQ ID NO: 80887 - DNA, 25 bp, Artificial
  Probe
ctacatctccaaacctatctaccat

SEQ ID NO: 80888 - DNA, 25 bp, Artificial
  Probe
gctactactacatctccaaacctat

SEQ ID NO: 80889 - DNA, 25 bp, Artificial
  Probe
ggaaggacacagctactactacatc

SEQ ID NO: 80890 - DNA, 25 bp, Artificial
  Probe
tactacatctccaaacctatctacc

SEQ ID NO: 80891 - DNA, 25 bp, Artificial
  Probe
caaggaaggacacagctactactac

SEQ ID NO: 80892 - DNA, 25 bp, Artificial
  Probe
tcaaggaaggacacagctactacta

SEQ ID NO: 80893 - DNA, 25 bp, Artificial
  Probe
aggaaggacacagctactactacat

SEQ ID NO: 80894 - DNA, 25 bp, Artificial
  Probe
aaggaaggacacagctactactaca

SEQ ID NO: 80895 - DNA, 25 bp, Artificial
  Probe
ctatctaccatcaggaaacccagtg

SEQ ID NO: 80896 - DNA, 25 bp, Artificial
  Probe
actactacatctccaaacctatcta

SEQ ID NO: 80897 - DNA, 25 bp, Artificial
  Probe
tactactacatctccaaacctatct

SEQ ID NO: 80898 - DNA, 25 bp, Artificial
  Probe
caaacctatctaccatcaggaaacc

SEQ ID NO: 80899 - DNA, 25 bp, Artificial
  Probe
ccaaacctatctaccatcaggaaac

SEQ ID NO: 80900 - DNA, 25 bp, Artificial
  Probe
agctactactacatctccaaaccta

SEQ ID NO: 80901 - DNA, 25 bp, Artificial
  Probe
atctccaaacctatctaccatcagg

SEQ ID NO: 80902 - DNA, 25 bp, Artificial
  Probe
ctactacatctccaaacctatctac

SEQ ID NO: 80903 - DNA, 25 bp, Artificial
  Probe
ctactactacatctccaaacctatc

SEQ ID NO: 80904 - DNA, 25 bp, Artificial
  Probe
cacagctactactacatctccaaac

SEQ ID NO: 80905 - DNA, 25 bp, Artificial
  Probe
ttcaaggaaggacacagctactact

SEQ ID NO: 80906 - DNA, 25 bp, Artificial
  Probe
gttcaaggaaggacacagctactac

SEQ ID NO: 80907 - DNA, 25 bp, Artificial
  Probe
tccaaacctatctaccatcaggaaa

SEQ ID NO: 80908 - DNA, 25 bp, Artificial
  Probe
acacagctactactacatctccaaa

SEQ ID NO: 80909 - DNA, 25 bp, Artificial
  Probe
cagctactactacatctccaaacct

SEQ ID NO: 80910 - DNA, 25 bp, Artificial
  Probe
ctccaaacctatctaccatcaggaa

SEQ ID NO: 80911 - DNA, 25 bp, Artificial
  Probe
agttcaaggaaggacacagctacta

SEQ ID NO: 80912 - DNA, 25 bp, Artificial
  Probe
aaacctatctaccatcaggaaaccc

SEQ ID NO: 80913 - DNA, 25 bp, Artificial
  Probe
acagctactactacatctccaaacc

SEQ ID NO: 80914 - DNA, 25 bp, Artificial
  Probe
tctccaaacctatctaccatcagga

SEQ ID NO: 80915 - DNA, 25 bp, Artificial
  Probe
aggacacagctactactacatctcc

SEQ ID NO: 80916 - DNA, 25 bp, Artificial
  Probe
ctgaagttgaaggtgactgtcaatg

SEQ ID NO: 80917 - DNA, 25 bp, Artificial
  Probe
ggacacagctactactacatctcca

SEQ ID NO: 80918 - DNA, 25 bp, Artificial
  Probe
aacctatctaccatcaggaaaccca

SEQ ID NO: 80919 - DNA, 25 bp, Artificial
  Probe
cctatctaccatcaggaaacccagt

SEQ ID NO: 80920 - DNA, 25 bp, Artificial
  Probe
acctatctaccatcaggaaacccag

SEQ ID NO: 80921 - DNA, 25 bp, Artificial
  Probe
tatctaccatcaggaaacccagtgc

SEQ ID NO: 80922 - DNA, 25 bp, Artificial
  Probe
cctgaagttgaaggtgactgtcaat

SEQ ID NO: 80923 - DNA, 25 bp, Artificial
  Probe
gagttcaaggaaggacacagctact

SEQ ID NO: 80924 - DNA, 25 bp, Artificial
  Probe
tgaagttgaaggtgactgtcaatgg

SEQ ID NO: 80925 - DNA, 25 bp, Artificial
  Probe
taagtctgcttcatcttctgtagtt

SEQ ID NO: 80926 - DNA, 25 bp, Artificial
  Probe
ttaagtctgcttcatcttctgtagt

SEQ ID NO: 80927 - DNA, 25 bp, Artificial
  Probe
aagtctgcttcatcttctgtagttg

SEQ ID NO: 80928 - DNA, 25 bp, Artificial
  Probe
caggagttaagttcaggtgatctaa

SEQ ID NO: 80929 - DNA, 25 bp, Artificial
  Probe
acaggagttaagttcaggtgatcta

SEQ ID NO: 80930 - DNA, 25 bp, Artificial
  Probe
attaagtctgcttcatcttctgtag

SEQ ID NO: 80931 - DNA, 25 bp, Artificial
  Probe
tctaagccacaggagttaagttcag

SEQ ID NO: 80932 - DNA, 25 bp, Artificial
  Probe
agtctgcttcatcttctgtagttga

SEQ ID NO: 80933 - DNA, 25 bp, Artificial
  Probe
ctgcttcatcttctgtagttgacaa

SEQ ID NO: 80934 - DNA, 25 bp, Artificial
  Probe
ctatgataagtcagcggacctaatg

SEQ ID NO: 80935 - DNA, 25 bp, Artificial
  Probe
actatgataagtcagcggacctaat

SEQ ID NO: 80936 - DNA, 25 bp, Artificial
  Probe
aattaagtctgcttcatcttctgta

SEQ ID NO: 80937 - DNA, 25 bp, Artificial
  Probe
aactatgataagtcagcggacctaa

SEQ ID NO: 80938 - DNA, 25 bp, Artificial
  Probe
gtctgcttcatcttctgtagttgac

SEQ ID NO: 80939 - DNA, 25 bp, Artificial
  Probe
tctgcttcatcttctgtagttgaca

SEQ ID NO: 80940 - DNA, 25 bp, Artificial
  Probe
ctctaagccacaggagttaagttca

SEQ ID NO: 80941 - DNA, 25 bp, Artificial
  Probe
tatgataagtcagcggacctaatgg

SEQ ID NO: 80942 - DNA, 25 bp, Artificial
  Probe
tttgatgggaacacactcttgaata

SEQ ID NO: 80943 - DNA, 25 bp, Artificial
  Probe
ctaagccacaggagttaagttcagg

SEQ ID NO: 80944 - DNA, 25 bp, Artificial
  Probe
ttgatgggaacacactcttgaatag

SEQ ID NO: 80945 - DNA, 25 bp, Artificial
  Probe
attaagaaagtccctctccaagaag

SEQ ID NO: 80946 - DNA, 25 bp, Artificial
  Probe
gattaagaaagtccctctccaagaa

SEQ ID NO: 80947 - DNA, 25 bp, Artificial
  Probe
agattaagaaagtccctctccaaga

SEQ ID NO: 80948 - DNA, 25 bp, Artificial
  Probe
ggtaatgaaattagcactggaaaca

SEQ ID NO: 80949 - DNA, 25 bp, Artificial
  Probe
tggtaatgaaattagcactggaaac

SEQ ID NO: 80950 - DNA, 25 bp, Artificial
  Probe
tgatggtaatgaaattagcactgga

SEQ ID NO: 80951 - DNA, 25 bp, Artificial
  Probe
ctgatggtaatgaaattagcactgg

SEQ ID NO: 80952 - DNA, 25 bp, Artificial
  Probe
gatggtaatgaaattagcactggaa

SEQ ID NO: 80953 - DNA, 25 bp, Artificial
  Probe
actgatggtaatgaaattagcactg

SEQ ID NO: 80954 - DNA, 25 bp, Artificial
  Probe
cactgatggtaatgaaattagcact

SEQ ID NO: 80955 - DNA, 25 bp, Artificial
  Probe
caacagaaactatgataagtcagcg

SEQ ID NO: 80956 - DNA, 25 bp, Artificial
  Probe
cacaggagttaagttcaggtgatct

SEQ ID NO: 80957 - DNA, 25 bp, Artificial
  Probe
cggacctcaacagaaactatgataa

SEQ ID NO: 80958 - DNA, 25 bp, Artificial
  Probe
atggtaatgaaattagcactggaaa

SEQ ID NO: 80959 - DNA, 25 bp, Artificial
  Probe
tcactgatggtaatgaaattagcac

SEQ ID NO: 80960 - DNA, 25 bp, Artificial
  Probe
agttaagttcaggtgatctaaaggt

SEQ ID NO: 80961 - DNA, 25 bp, Artificial
  Probe
aacagaaactatgataagtcagcgg

SEQ ID NO: 80962 - DNA, 25 bp, Artificial
  Probe
aaattaagtctgcttcatcttctgt

SEQ ID NO: 80963 - DNA, 25 bp, Artificial
  Probe
aggagttaagttcaggtgatctaaa

SEQ ID NO: 80964 - DNA, 25 bp, Artificial
  Probe
ctacaactgtatgaaatccacggag

SEQ ID NO: 80965 - DNA, 25 bp, Artificial
  Probe
taagccacaggagttaagttcaggt

SEQ ID NO: 80966 - DNA, 25 bp, Artificial
  Probe
tcaacagaaactatgataagtcagc

SEQ ID NO: 80967 - DNA, 25 bp, Artificial
  Probe
ggacctcaacagaaactatgataag

SEQ ID NO: 80968 - DNA, 25 bp, Artificial
  Probe
gagttaagttcaggtgatctaaagg

SEQ ID NO: 80969 - DNA, 25 bp, Artificial
  Probe
ggagttaagttcaggtgatctaaag

SEQ ID NO: 80970 - DNA, 25 bp, Artificial
  Probe
gagatgttctgctcagatgtgaatt

SEQ ID NO: 80971 - DNA, 25 bp, Artificial
  Probe
agatgttctgctcagatgtgaattt

SEQ ID NO: 80972 - DNA, 25 bp, Artificial
  Probe
acattacaggtatatgtacgcatat

SEQ ID NO: 80973 - DNA, 25 bp, Artificial
  Probe
tgagatgttctgctcagatgtgaat

SEQ ID NO: 80974 - DNA, 25 bp, Artificial
  Probe
atgagatgttctgctcagatgtgaa

SEQ ID NO: 80975 - DNA, 25 bp, Artificial
  Probe
gctcctgttttacaactctaactac

SEQ ID NO: 80976 - DNA, 25 bp, Artificial
  Probe
tctgctcagatgtgaattttcaatg

SEQ ID NO: 80977 - DNA, 25 bp, Artificial
  Probe
atgttctgctcagatgtgaattttc

SEQ ID NO: 80978 - DNA, 25 bp, Artificial
  Probe
gatgttctgctcagatgtgaatttt

SEQ ID NO: 80979 - DNA, 25 bp, Artificial
  Probe
gttctgctcagatgtgaattttcaa

SEQ ID NO: 80980 - DNA, 25 bp, Artificial
  Probe
ttctgctcagatgtgaattttcaat

SEQ ID NO: 80981 - DNA, 25 bp, Artificial
  Probe
catgagatgttctgctcagatgtga

SEQ ID NO: 80982 - DNA, 25 bp, Artificial
  Probe
ctgctcagatgtgaattttcaatgc

SEQ ID NO: 80983 - DNA, 25 bp, Artificial
  Probe
tgttctgctcagatgtgaattttca

SEQ ID NO: 80984 - DNA, 25 bp, Artificial
  Probe
acatgagatgttctgctcagatgtg

SEQ ID NO: 80985 - DNA, 25 bp, Artificial
  Probe
ctcctgttttacaactctaactact

SEQ ID NO: 80986 - DNA, 25 bp, Artificial
  Probe
ggtagctcctgttttacaactctaa

SEQ ID NO: 80987 - DNA, 25 bp, Artificial
  Probe
agctcctgttttacaactctaacta

SEQ ID NO: 80988 - DNA, 25 bp, Artificial
  Probe
tagctcctgttttacaactctaact

SEQ ID NO: 80989 - DNA, 25 bp, Artificial
  Probe
gtagctcctgttttacaactctaac

SEQ ID NO: 80990 - DNA, 25 bp, Artificial
  Probe
aggcagtaactattttatatggaga

SEQ ID NO: 80991 - DNA, 25 bp, Artificial
  Probe
atagaggtagctcctgttttacaac

SEQ ID NO: 80992 - DNA, 25 bp, Artificial
  Probe
catagaggtagctcctgttttacaa

SEQ ID NO: 80993 - DNA, 25 bp, Artificial
  Probe
aggtagctcctgttttacaactcta

SEQ ID NO: 80994 - DNA, 25 bp, Artificial
  Probe
tagaggtagctcctgttttacaact

SEQ ID NO: 80995 - DNA, 25 bp, Artificial
  Probe
ctcagatgtgaattttcaatgcagc

SEQ ID NO: 80996 - DNA, 25 bp, Artificial
  Probe
gctcagatgtgaattttcaatgcag

SEQ ID NO: 80997 - DNA, 25 bp, Artificial
  Probe
gaggtagctcctgttttacaactct

SEQ ID NO: 80998 - DNA, 25 bp, Artificial
  Probe
agaggtagctcctgttttacaactc

SEQ ID NO: 80999 - DNA, 25 bp, Artificial
  Probe
aaggcagtaactattttatatggag

SEQ ID NO: 81000 - DNA, 25 bp, Artificial
  Probe
tcctgttttacaactctaactacta

SEQ ID NO: 81001 - DNA, 25 bp, Artificial
  Probe
tacattacaggtatatgtacgcata

SEQ ID NO: 81002 - DNA, 25 bp, Artificial
  Probe
gcatagaggtagctcctgttttaca

SEQ ID NO: 81003 - DNA, 25 bp, Artificial
  Probe
actactatatttctacattgtgact

SEQ ID NO: 81004 - DNA, 25 bp, Artificial
  Probe
ggcagtaactattttatatggagat

SEQ ID NO: 81005 - DNA, 25 bp, Artificial
  Probe
aagcatagaggtagctcctgtttta

SEQ ID NO: 81006 - DNA, 25 bp, Artificial
  Probe
caaaggcagtaactattttatatgg

SEQ ID NO: 81007 - DNA, 25 bp, Artificial
  Probe
aaaggcagtaactattttatatgga

SEQ ID NO: 81008 - DNA, 25 bp, Artificial
  Probe
agcatagaggtagctcctgttttac

SEQ ID NO: 81009 - DNA, 25 bp, Artificial
  Probe
aacatgagatgttctgctcagatgt

SEQ ID NO: 81010 - DNA, 25 bp, Artificial
  Probe
cctgttttacaactctaactactat

SEQ ID NO: 81011 - DNA, 25 bp, Artificial
  Probe
tgctcagatgtgaattttcaatgca

SEQ ID NO: 81012 - DNA, 25 bp, Artificial
  Probe
aaacatgagatgttctgctcagatg

SEQ ID NO: 81013 - DNA, 25 bp, Artificial
  Probe
caaacatgagatgttctgctcagat

SEQ ID NO: 81014 - DNA, 25 bp, Artificial
  Probe
tcaaaggcagtaactattttatatg

SEQ ID NO: 81015 - DNA, 25 bp, Artificial
  Probe
cctgacctgtatgtgtgacttaata

SEQ ID NO: 81016 - DNA, 25 bp, Artificial
  Probe
tcctgacctgtatgtgtgacttaat

SEQ ID NO: 81017 - DNA, 25 bp, Artificial
  Probe
gaatcctatgtaccagagaagaacc

SEQ ID NO: 81018 - DNA, 25 bp, Artificial
  Probe
tcagagaatcctatgtaccagagaa

SEQ ID NO: 81019 - DNA, 25 bp, Artificial
  Probe
agagaatcctatgtaccagagaaga

SEQ ID NO: 81020 - DNA, 25 bp, Artificial
  Probe
cagagaatcctatgtaccagagaag

SEQ ID NO: 81021 - DNA, 25 bp, Artificial
  Probe
aatcctatgtaccagagaagaacct

SEQ ID NO: 81022 - DNA, 25 bp, Artificial
  Probe
agaatcctatgtaccagagaagaac

SEQ ID NO: 81023 - DNA, 25 bp, Artificial
  Probe
ctgacctgtatgtgtgacttaataa

SEQ ID NO: 81024 - DNA, 25 bp, Artificial
  Probe
gagaatcctatgtaccagagaagaa

SEQ ID NO: 81025 - DNA, 25 bp, Artificial
  Probe
cactccatcctctacttccaatgaa

SEQ ID NO: 81026 - DNA, 25 bp, Artificial
  Probe
ctcagagaatcctatgtaccagaga

SEQ ID NO: 81027 - DNA, 25 bp, Artificial
  Probe
gactgatgtaccagacctaattcaa

SEQ ID NO: 81028 - DNA, 25 bp, Artificial
  Probe
cctcagagaatcctatgtaccagag

SEQ ID NO: 81029 - DNA, 25 bp, Artificial
  Probe
tagcactccatcctctacttccaat

SEQ ID NO: 81030 - DNA, 25 bp, Artificial
  Probe
tatgtaccagagaagaacctgtgaa

SEQ ID NO: 81031 - DNA, 25 bp, Artificial
  Probe
atcctatgtaccagagaagaacctg

SEQ ID NO: 81032 - DNA, 25 bp, Artificial
  Probe
ctatgtaccagagaagaacctgtga

SEQ ID NO: 81033 - DNA, 25 bp, Artificial
  Probe
ttagcactccatcctctacttccaa

SEQ ID NO: 81034 - DNA, 25 bp, Artificial
  Probe
tattcctacgagcaaacttctacat

SEQ ID NO: 81035 - DNA, 25 bp, Artificial
  Probe
ctcttcgtcctgatgctgtgttaat

SEQ ID NO: 81036 - DNA, 25 bp, Artificial
  Probe
gtattcctacgagcaaacttctaca

SEQ ID NO: 81037 - DNA, 25 bp, Artificial
  Probe
ggactgatgtaccagacctaattca

SEQ ID NO: 81038 - DNA, 25 bp, Artificial
  Probe
gtcctgacctgtatgtgtgacttaa

SEQ ID NO: 81039 - DNA, 25 bp, Artificial
  Probe
attcctacgagcaaacttctacatc

SEQ ID NO: 81040 - DNA, 25 bp, Artificial
  Probe
tatcagcaacaagaagggaagattt

SEQ ID NO: 81041 - DNA, 25 bp, Artificial
  Probe
ttatcagcaacaagaagggaagatt

SEQ ID NO: 81042 - DNA, 25 bp, Artificial
  Probe
tttatcagcaacaagaagggaagat

SEQ ID NO: 81043 - DNA, 25 bp, Artificial
  Probe
gatttagcactccatcctctacttc

SEQ ID NO: 81044 - DNA, 25 bp, Artificial
  Probe
gagcagagcaggagaaataatgatt

SEQ ID NO: 81045 - DNA, 25 bp, Artificial
  Probe
tattagtttgacatacaggacacgc

SEQ ID NO: 81046 - DNA, 25 bp, Artificial
  Probe
caatgaagttcaggtatgagccatg

SEQ ID NO: 81047 - DNA, 25 bp, Artificial
  Probe
gacttaataaattctcaacagcgga

SEQ ID NO: 81048 - DNA, 25 bp, Artificial
  Probe
ggtattcctacgagcaaacttctac

SEQ ID NO: 81049 - DNA, 25 bp, Artificial
  Probe
ttattagtttgacatacaggacacg

SEQ ID NO: 81050 - DNA, 25 bp, Artificial
  Probe
tgatttagcactccatcctctactt

SEQ ID NO: 81051 - DNA, 25 bp, Artificial
  Probe
agcagagcaggagaaataatgattg

SEQ ID NO: 81052 - DNA, 25 bp, Artificial
  Probe
ctgatttagcactccatcctctact

SEQ ID NO: 81053 - DNA, 25 bp, Artificial
  Probe
tcaaagccttcttaattgttacagc

SEQ ID NO: 81054 - DNA, 25 bp, Artificial
  Probe
tcttcgtcctgatgctgtgttaatg

SEQ ID NO: 81055 - DNA, 25 bp, Artificial
  Probe
ttcctacgagcaaacttctacatct

SEQ ID NO: 81056 - DNA, 25 bp, Artificial
  Probe
cctatgtaccagagaagaacctgtg

SEQ ID NO: 81057 - DNA, 25 bp, Artificial
  Probe
tcctatgtaccagagaagaacctgt

SEQ ID NO: 81058 - DNA, 25 bp, Artificial
  Probe
tgacttaataaattctcaacagcgg

SEQ ID NO: 81059 - DNA, 25 bp, Artificial
  Probe
atttagcactccatcctctacttcc

SEQ ID NO: 81060 - DNA, 25 bp, Artificial
  Probe
tatgtggtatgtgtaagagtaaggc

SEQ ID NO: 81061 - DNA, 25 bp, Artificial
  Probe
aggttgaattgttgattgtatgtgg

SEQ ID NO: 81062 - DNA, 25 bp, Artificial
  Probe
ggttgaattgttgattgtatgtggt

SEQ ID NO: 81063 - DNA, 25 bp, Artificial
  Probe
attgttgattgtatgtggtatgtgt

SEQ ID NO: 81064 - DNA, 25 bp, Artificial
  Probe
ttacagtgttcagttcaatgccata

SEQ ID NO: 81065 - DNA, 25 bp, Artificial
  Probe
gaggttgaattgttgattgtatgtg

SEQ ID NO: 81066 - DNA, 25 bp, Artificial
  Probe
agaggttgaattgttgattgtatgt

SEQ ID NO: 81067 - DNA, 25 bp, Artificial
  Probe
tacagtgttcagttcaatgccatag

SEQ ID NO: 81068 - DNA, 25 bp, Artificial
  Probe
caagttacagtgttcagttcaatgc

SEQ ID NO: 81069 - DNA, 25 bp, Artificial
  Probe
gcaagttacagtgttcagttcaatg

SEQ ID NO: 81070 - DNA, 25 bp, Artificial
  Probe
gtatgtggtatgtgtaagagtaagg

SEQ ID NO: 81071 - DNA, 25 bp, Artificial
  Probe
tgttgattgtatgtggtatgtgtaa

SEQ ID NO: 81072 - DNA, 25 bp, Artificial
  Probe
ttgttgattgtatgtggtatgtgta

SEQ ID NO: 81073 - DNA, 25 bp, Artificial
  Probe
gattgtatgtggtatgtgtaagagt

SEQ ID NO: 81074 - DNA, 25 bp, Artificial
  Probe
tgattgtatgtggtatgtgtaagag

SEQ ID NO: 81075 - DNA, 25 bp, Artificial
  Probe
ttgattgtatgtggtatgtgtaaga

SEQ ID NO: 81076 - DNA, 25 bp, Artificial
  Probe
gttgattgtatgtggtatgtgtaag

SEQ ID NO: 81077 - DNA, 25 bp, Artificial
  Probe
aattgttgattgtatgtggtatgtg

SEQ ID NO: 81078 - DNA, 25 bp, Artificial
  Probe
gttgaattgttgattgtatgtggta

SEQ ID NO: 81079 - DNA, 25 bp, Artificial
  Probe
aagttacagtgttcagttcaatgcc

SEQ ID NO: 81080 - DNA, 25 bp, Artificial
  Probe
ggcaagttacagtgttcagttcaat

SEQ ID NO: 81081 - DNA, 25 bp, Artificial
  Probe
tgtatgtggtatgtgtaagagtaag

SEQ ID NO: 81082 - DNA, 25 bp, Artificial
  Probe
gttacagtgttcagttcaatgccat

SEQ ID NO: 81083 - DNA, 25 bp, Artificial
  Probe
gaattgttgattgtatgtggtatgt

SEQ ID NO: 81084 - DNA, 25 bp, Artificial
  Probe
tgaattgttgattgtatgtggtatg

SEQ ID NO: 81085 - DNA, 25 bp, Artificial
  Probe
ttgtatgtggtatgtgtaagagtaa

SEQ ID NO: 81086 - DNA, 25 bp, Artificial
  Probe
tagaggttgaattgttgattgtatg

SEQ ID NO: 81087 - DNA, 25 bp, Artificial
  Probe
attgtatgtggtatgtgtaagagta

SEQ ID NO: 81088 - DNA, 25 bp, Artificial
  Probe
ttgaattgttgattgtatgtggtat

SEQ ID NO: 81089 - DNA, 25 bp, Artificial
  Probe
agttacagtgttcagttcaatgcca

SEQ ID NO: 81090 - DNA, 25 bp, Artificial
  Probe
ttaattcaatgggcaagttacagtg

SEQ ID NO: 81091 - DNA, 25 bp, Artificial
  Probe
tgactgtaattccttctaatccctg

SEQ ID NO: 81092 - DNA, 25 bp, Artificial
  Probe
tttaattcaatgggcaagttacagt

SEQ ID NO: 81093 - DNA, 25 bp, Artificial
  Probe
ccatacacaggtgctttacatttaa

SEQ ID NO: 81094 - DNA, 25 bp, Artificial
  Probe
ttagactctaacaagctcttcaacc

SEQ ID NO: 81095 - DNA, 25 bp, Artificial
  Probe
taattcaatgggcaagttacagtgt

SEQ ID NO: 81096 - DNA, 25 bp, Artificial
  Probe
gactgtaattccttctaatccctgc

SEQ ID NO: 81097 - DNA, 25 bp, Artificial
  Probe
atgactgtaattccttctaatccct

SEQ ID NO: 81098 - DNA, 25 bp, Artificial
  Probe
gctttcttgtcttctattcggaatt

SEQ ID NO: 81099 - DNA, 25 bp, Artificial
  Probe
cacaggtgctttacatttaatgaca

SEQ ID NO: 81100 - DNA, 25 bp, Artificial
  Probe
acacaggtgctttacatttaatgac

SEQ ID NO: 81101 - DNA, 25 bp, Artificial
  Probe
cccttggctttcttgtcttctattc

SEQ ID NO: 81102 - DNA, 25 bp, Artificial
  Probe
gatgactgtaattccttctaatccc

SEQ ID NO: 81103 - DNA, 25 bp, Artificial
  Probe
acaggtgctttacatttaatgacaa

SEQ ID NO: 81104 - DNA, 25 bp, Artificial
  Probe
cttcaaccgatttcccaacacatta

SEQ ID NO: 81105 - DNA, 25 bp, Artificial
  Probe
tagtcactcagcgaaagtttggtag

SEQ ID NO: 81106 - DNA, 25 bp, Artificial
  Probe
ctagtcactcagcgaaagtttggta

SEQ ID NO: 81107 - DNA, 25 bp, Artificial
  Probe
ttaagttagggacgtgttcatggtg

SEQ ID NO: 81108 - DNA, 25 bp, Artificial
  Probe
ctccagtgaccatctctctcttttc

SEQ ID NO: 81109 - DNA, 25 bp, Artificial
  Probe
cttaagttagggacgtgttcatggt

SEQ ID NO: 81110 - DNA, 25 bp, Artificial
  Probe
gacctagtcactcagcgaaagtttg

SEQ ID NO: 81111 - DNA, 25 bp, Artificial
  Probe
atctctctcttttcccctcttccag

SEQ ID NO: 81112 - DNA, 25 bp, Artificial
  Probe
catctctctcttttcccctcttcca

SEQ ID NO: 81113 - DNA, 25 bp, Artificial
  Probe
accatctctctcttttcccctcttc

SEQ ID NO: 81114 - DNA, 25 bp, Artificial
  Probe
gaccatctctctcttttcccctctt

SEQ ID NO: 81115 - DNA, 25 bp, Artificial
  Probe
tccagtgaccatctctctcttttcc

SEQ ID NO: 81116 - DNA, 25 bp, Artificial
  Probe
taccttctggtgagtgaccatagta

SEQ ID NO: 81117 - DNA, 25 bp, Artificial
  Probe
ggacctagtcactcagcgaaagttt

SEQ ID NO: 81118 - DNA, 25 bp, Artificial
  Probe
gaaagtttggtagctaagggtgtgg

SEQ ID NO: 81119 - DNA, 25 bp, Artificial
  Probe
taagttagggacgtgttcatggtgg

SEQ ID NO: 81120 - DNA, 25 bp, Artificial
  Probe
ccatctctctcttttcccctcttcc

SEQ ID NO: 81121 - DNA, 25 bp, Artificial
  Probe
cctagtcactcagcgaaagtttggt

SEQ ID NO: 81122 - DNA, 25 bp, Artificial
  Probe
acctagtcactcagcgaaagtttgg

SEQ ID NO: 81123 - DNA, 25 bp, Artificial
  Probe
gtgaccatctctctcttttcccctc

SEQ ID NO: 81124 - DNA, 25 bp, Artificial
  Probe
gctccagtgaccatctctctctttt

SEQ ID NO: 81125 - DNA, 25 bp, Artificial
  Probe
agctccagtgaccatctctctcttt

SEQ ID NO: 81126 - DNA, 25 bp, Artificial
  Probe
cgaaagtttggtagctaagggtgtg

SEQ ID NO: 81127 - DNA, 25 bp, Artificial
  Probe
tgaccatctctctcttttcccctct

SEQ ID NO: 81128 - DNA, 25 bp, Artificial
  Probe
ctaccttctggtgagtgaccatagt

SEQ ID NO: 81129 - DNA, 25 bp, Artificial
  Probe
cagtgaccatctctctcttttcccc

SEQ ID NO: 81130 - DNA, 25 bp, Artificial
  Probe
ccagtgaccatctctctcttttccc

SEQ ID NO: 81131 - DNA, 25 bp, Artificial
  Probe
agtgaccatctctctcttttcccct

SEQ ID NO: 81132 - DNA, 25 bp, Artificial
  Probe
accttctggtgagtgaccatagtac

SEQ ID NO: 81133 - DNA, 25 bp, Artificial
  Probe
actcagcgaaagtttggtagctaag

SEQ ID NO: 81134 - DNA, 25 bp, Artificial
  Probe
cactcagcgaaagtttggtagctaa

SEQ ID NO: 81135 - DNA, 25 bp, Artificial
  Probe
cctaccttctggtgagtgaccatag

SEQ ID NO: 81136 - DNA, 25 bp, Artificial
  Probe
ccttctggtgagtgaccatagtacc

SEQ ID NO: 81137 - DNA, 25 bp, Artificial
  Probe
ctcagcgaaagtttggtagctaagg

SEQ ID NO: 81138 - DNA, 25 bp, Artificial
  Probe
cctgtttgaggacctagtcactcag

SEQ ID NO: 81139 - DNA, 25 bp, Artificial
  Probe
ctaggctttcctttctccagcacag

SEQ ID NO: 81140 - DNA, 25 bp, Artificial
  Probe
tcactcagcgaaagtttggtagcta

SEQ ID NO: 81141 - DNA, 25 bp, Artificial
  Probe
cttctggtgagtgaccatagtaccg

SEQ ID NO: 81142 - DNA, 25 bp, Artificial
  Probe
ctgtttgaggacctagtcactcagc

SEQ ID NO: 81143 - DNA, 25 bp, Artificial
  Probe
tcagcgaaagtttggtagctaaggg

SEQ ID NO: 81144 - DNA, 25 bp, Artificial
  Probe
gagctccagtgaccatctctctctt

SEQ ID NO: 81145 - DNA, 25 bp, Artificial
  Probe
agcgaaagtttggtagctaagggtg

SEQ ID NO: 81146 - DNA, 25 bp, Artificial
  Probe
cagcgaaagtttggtagctaagggt

SEQ ID NO: 81147 - DNA, 25 bp, Artificial
  Probe
ccctaccttctggtgagtgaccata

SEQ ID NO: 81148 - DNA, 25 bp, Artificial
  Probe
ctacctctatcctgccttctctaac

SEQ ID NO: 81149 - DNA, 25 bp, Artificial
  Probe
tacctctatcctgccttctctaacc

SEQ ID NO: 81150 - DNA, 25 bp, Artificial
  Probe
gctacctctatcctgccttctctaa

SEQ ID NO: 81151 - DNA, 25 bp, Artificial
  Probe
taaccgcaccatcaagtctgagtat

SEQ ID NO: 81152 - DNA, 25 bp, Artificial
  Probe
ctaaccgcaccatcaagtctgagta

SEQ ID NO: 81153 - DNA, 25 bp, Artificial
  Probe
cttctctaaccgcaccatcaagtct

SEQ ID NO: 81154 - DNA, 25 bp, Artificial
  Probe
ttctctaaccgcaccatcaagtctg

SEQ ID NO: 81155 - DNA, 25 bp, Artificial
  Probe
gaccagacctttatctccattgtcg

SEQ ID NO: 81156 - DNA, 25 bp, Artificial
  Probe
ggaccagacctttatctccattgtc

SEQ ID NO: 81157 - DNA, 25 bp, Artificial
  Probe
catggtatttaaggagctggaggtg

SEQ ID NO: 81158 - DNA, 25 bp, Artificial
  Probe
aaccgcaccatcaagtctgagtatc

SEQ ID NO: 81159 - DNA, 25 bp, Artificial
  Probe
caccatcaagtctgagtatccagag

SEQ ID NO: 81160 - DNA, 25 bp, Artificial
  Probe
acctctatcctgccttctctaaccg

SEQ ID NO: 81161 - DNA, 25 bp, Artificial
  Probe
gaaggtgcatggtatttaaggagct

SEQ ID NO: 81162 - DNA, 25 bp, Artificial
  Probe
acgaaggtgcatggtatttaaggag

SEQ ID NO: 81163 - DNA, 25 bp, Artificial
  Probe
tatttaaggagctggaggtgggtac

SEQ ID NO: 81164 - DNA, 25 bp, Artificial
  Probe
gtatttaaggagctggaggtgggta

SEQ ID NO: 81165 - DNA, 25 bp, Artificial
  Probe
aaggtgcatggtatttaaggagctg

SEQ ID NO: 81166 - DNA, 25 bp, Artificial
  Probe
ctctaaccgcaccatcaagtctgag

SEQ ID NO: 81167 - DNA, 25 bp, Artificial
  Probe
gtgcatggtatttaaggagctggag

SEQ ID NO: 81168 - DNA, 25 bp, Artificial
  Probe
accagacctttatctccattgtcga

SEQ ID NO: 81169 - DNA, 25 bp, Artificial
  Probe
atggtatttaaggagctggaggtgg

SEQ ID NO: 81170 - DNA, 25 bp, Artificial
  Probe
cgcaccatcaagtctgagtatccag

SEQ ID NO: 81171 - DNA, 25 bp, Artificial
  Probe
cacgaaggtgcatggtatttaagga

SEQ ID NO: 81172 - DNA, 25 bp, Artificial
  Probe
cggaccagacctttatctccattgt

SEQ ID NO: 81173 - DNA, 25 bp, Artificial
  Probe
cctggctctagctactaatcttggc

SEQ ID NO: 81174 - DNA, 25 bp, Artificial
  Probe
cgaaggtgcatggtatttaaggagc

SEQ ID NO: 81175 - DNA, 25 bp, Artificial
  Probe
accatcaagtctgagtatccagagc

SEQ ID NO: 81176 - DNA, 25 bp, Artificial
  Probe
gcatggtatttaaggagctggaggt

SEQ ID NO: 81177 - DNA, 25 bp, Artificial
  Probe
ctctagctactaatcttggctgcct

SEQ ID NO: 81178 - DNA, 25 bp, Artificial
  Probe
ctggctctagctactaatcttggct

SEQ ID NO: 81179 - DNA, 25 bp, Artificial
  Probe
gcaccatcaagtctgagtatccaga

SEQ ID NO: 81180 - DNA, 25 bp, Artificial
  Probe
tctagctactaatcttggctgcctg

SEQ ID NO: 81181 - DNA, 25 bp, Artificial
  Probe
tggctctagctactaatcttggctg

SEQ ID NO: 81182 - DNA, 25 bp, Artificial
  Probe
tgcatggtatttaaggagctggagg

SEQ ID NO: 81183 - DNA, 25 bp, Artificial
  Probe
ccctggctctagctactaatcttgg

SEQ ID NO: 81184 - DNA, 25 bp, Artificial
  Probe
ccatcaagtctgagtatccagagcc

SEQ ID NO: 81185 - DNA, 25 bp, Artificial
  Probe
caatgtaccagagctcatattgcag

SEQ ID NO: 81186 - DNA, 25 bp, Artificial
  Probe
ggtgcatggtatttaaggagctgga

SEQ ID NO: 81187 - DNA, 25 bp, Artificial
  Probe
aggtgcatggtatttaaggagctgg

SEQ ID NO: 81188 - DNA, 25 bp, Artificial
  Probe
ggctacctctatcctgccttctcta

SEQ ID NO: 81189 - DNA, 25 bp, Artificial
  Probe
caagtctgagtatccagagccctac

SEQ ID NO: 81190 - DNA, 25 bp, Artificial
  Probe
tcaagtctgagtatccagagcccta

SEQ ID NO: 81191 - DNA, 25 bp, Artificial
  Probe
ctagctactaatcttggctgcctgg

SEQ ID NO: 81192 - DNA, 25 bp, Artificial
  Probe
ccaatgtaccagagctcatattgca

SEQ ID NO: 81193 - DNA, 25 bp, Artificial
  Probe
atctggtcatcttcatgtatcttgc

SEQ ID NO: 81194 - DNA, 25 bp, Artificial
  Probe
catctggtcatcttcatgtatcttg

SEQ ID NO: 81195 - DNA, 25 bp, Artificial
  Probe
tcatctggtcatcttcatgtatctt

SEQ ID NO: 81196 - DNA, 25 bp, Artificial
  Probe
atcatctggtcatcttcatgtatct

SEQ ID NO: 81197 - DNA, 25 bp, Artificial
  Probe
gatcatctggtcatcttcatgtatc

SEQ ID NO: 81198 - DNA, 25 bp, Artificial
  Probe
catcttcatgtatcttgcctcactc

SEQ ID NO: 81199 - DNA, 25 bp, Artificial
  Probe
tcatcttcatgtatcttgcctcact

SEQ ID NO: 81200 - DNA, 25 bp, Artificial
  Probe
gtcatcttcatgtatcttgcctcac

SEQ ID NO: 81201 - DNA, 25 bp, Artificial
  Probe
atcttcatgtatcttgcctcactcc

SEQ ID NO: 81202 - DNA, 25 bp, Artificial
  Probe
atctttatatgacgacagtgctgag

SEQ ID NO: 81203 - DNA, 25 bp, Artificial
  Probe
ttggaaagtgtgtgagagagaaatg

SEQ ID NO: 81204 - DNA, 25 bp, Artificial
  Probe
ggtcatcttcatgtatcttgcctca

SEQ ID NO: 81205 - DNA, 25 bp, Artificial
  Probe
tggtcatcttcatgtatcttgcctc

SEQ ID NO: 81206 - DNA, 25 bp, Artificial
  Probe
ctggtcatcttcatgtatcttgcct

SEQ ID NO: 81207 - DNA, 25 bp, Artificial
  Probe
tctggtcatcttcatgtatcttgcc

SEQ ID NO: 81208 - DNA, 25 bp, Artificial
  Probe
cttggaaagtgtgtgagagagaaat

SEQ ID NO: 81209 - DNA, 25 bp, Artificial
  Probe
tagaggacaccatgagatcggatag

SEQ ID NO: 81210 - DNA, 25 bp, Artificial
  Probe
ctagaggacaccatgagatcggata

SEQ ID NO: 81211 - DNA, 25 bp, Artificial
  Probe
gaaggtctgtaggcatcaatgaagg

SEQ ID NO: 81212 - DNA, 25 bp, Artificial
  Probe
ggaaggtctgtaggcatcaatgaag

SEQ ID NO: 81213 - DNA, 25 bp, Artificial
  Probe
gatctttatatgacgacagtgctga

SEQ ID NO: 81214 - DNA, 25 bp, Artificial
  Probe
ctgagtttgctaaattgggtctcta

SEQ ID NO: 81215 - DNA, 25 bp, Artificial
  Probe
tttacctagacagtccttggaaagt

SEQ ID NO: 81216 - DNA, 25 bp, Artificial
  Probe
aggagaactcacggatctttatatg

SEQ ID NO: 81217 - DNA, 25 bp, Artificial
  Probe
gctttcgtgtcagatttacagttac

SEQ ID NO: 81218 - DNA, 25 bp, Artificial
  Probe
ttatatgacgacagtgctgaggact

SEQ ID NO: 81219 - DNA, 25 bp, Artificial
  Probe
tgctttcgtgtcagatttacagtta

SEQ ID NO: 81220 - DNA, 25 bp, Artificial
  Probe
cttcatgtatcttgcctcactcctg

SEQ ID NO: 81221 - DNA, 25 bp, Artificial
  Probe
ttctcctgacatctccttcctgatc

SEQ ID NO: 81222 - DNA, 25 bp, Artificial
  Probe
tgagtttgctaaattgggtctctag

SEQ ID NO: 81223 - DNA, 25 bp, Artificial
  Probe
ggatctttatatgacgacagtgctg

SEQ ID NO: 81224 - DNA, 25 bp, Artificial
  Probe
aggaaggtctgtaggcatcaatgaa

SEQ ID NO: 81225 - DNA, 25 bp, Artificial
  Probe
gaactcacggatctttatatgacga

SEQ ID NO: 81226 - DNA, 25 bp, Artificial
  Probe
agaactcacggatctttatatgacg

SEQ ID NO: 81227 - DNA, 25 bp, Artificial
  Probe
ggagaactcacggatctttatatga

SEQ ID NO: 81228 - DNA, 25 bp, Artificial
  Probe
aactcacggatctttatatgacgac

SEQ ID NO: 81229 - DNA, 25 bp, Artificial
  Probe
tcttcatgtatcttgcctcactcct

SEQ ID NO: 81230 - DNA, 25 bp, Artificial
  Probe
ctaggagaactcacggatctttata

SEQ ID NO: 81231 - DNA, 25 bp, Artificial
  Probe
ttacctagacagtccttggaaagtg

SEQ ID NO: 81232 - DNA, 25 bp, Artificial
  Probe
ctcacggatctttatatgacgacag

SEQ ID NO: 81233 - DNA, 25 bp, Artificial
  Probe
gagaactcacggatctttatatgac

SEQ ID NO: 81234 - DNA, 25 bp, Artificial
  Probe
ctttatatgacgacagtgctgagga

SEQ ID NO: 81235 - DNA, 25 bp, Artificial
  Probe
tctttatatgacgacagtgctgagg

SEQ ID NO: 81236 - DNA, 25 bp, Artificial
  Probe
gtgtcagatttacagttacgctagg

SEQ ID NO: 81237 - DNA, 25 bp, Artificial
  Probe
tcacggatctttatatgacgacagt

SEQ ID NO: 81238 - DNA, 25 bp, Artificial
  Probe
aatctatgagcttcgcaacaaggaa

SEQ ID NO: 81239 - DNA, 25 bp, Artificial
  Probe
tccagtgacaatgtagctgacttac

SEQ ID NO: 81240 - DNA, 25 bp, Artificial
  Probe
cttcaagtttcagcatggagtcatt

SEQ ID NO: 81241 - DNA, 25 bp, Artificial
  Probe
gaatctatgagcttcgcaacaagga

SEQ ID NO: 81242 - DNA, 25 bp, Artificial
  Probe
ttcaagtttcagcatggagtcattg

SEQ ID NO: 81243 - DNA, 25 bp, Artificial
  Probe
aagtttcagcatggagtcattgttg

SEQ ID NO: 81244 - DNA, 25 bp, Artificial
  Probe
caagtttcagcatggagtcattgtt

SEQ ID NO: 81245 - DNA, 25 bp, Artificial
  Probe
atctatgagcttcgcaacaaggaac

SEQ ID NO: 81246 - DNA, 25 bp, Artificial
  Probe
ccagtgacaatgtagctgacttaca

SEQ ID NO: 81247 - DNA, 25 bp, Artificial
  Probe
tcaagtttcagcatggagtcattgt

SEQ ID NO: 81248 - DNA, 25 bp, Artificial
  Probe
ccttcaagtttcagcatggagtcat

SEQ ID NO: 81249 - DNA, 25 bp, Artificial
  Probe
gaatcgaaatgcttcatggaaccac

SEQ ID NO: 81250 - DNA, 25 bp, Artificial
  Probe
aggtggagtgccctggttataataa

SEQ ID NO: 81251 - DNA, 25 bp, Artificial
  Probe
aaggtggagtgccctggttataata

SEQ ID NO: 81252 - DNA, 25 bp, Artificial
  Probe
cacgaatcgaaatgcttcatggaac

SEQ ID NO: 81253 - DNA, 25 bp, Artificial
  Probe
gacaatgtagctgacttacatgaca

SEQ ID NO: 81254 - DNA, 25 bp, Artificial
  Probe
tgacaatgtagctgacttacatgac

SEQ ID NO: 81255 - DNA, 25 bp, Artificial
  Probe
gtgacaatgtagctgacttacatga

SEQ ID NO: 81256 - DNA, 25 bp, Artificial
  Probe
agtgacaatgtagctgacttacatg

SEQ ID NO: 81257 - DNA, 25 bp, Artificial
  Probe
cagtgacaatgtagctgacttacat

SEQ ID NO: 81258 - DNA, 25 bp, Artificial
  Probe
aatcgaaatgcttcatggaaccacc

SEQ ID NO: 81259 - DNA, 25 bp, Artificial
  Probe
cgaatcgaaatgcttcatggaacca

SEQ ID NO: 81260 - DNA, 25 bp, Artificial
  Probe
acgaatcgaaatgcttcatggaacc

SEQ ID NO: 81261 - DNA, 25 bp, Artificial
  Probe
gaaggtggagtgccctggttataat

SEQ ID NO: 81262 - DNA, 25 bp, Artificial
  Probe
ccacgaatcgaaatgcttcatggaa

SEQ ID NO: 81263 - DNA, 25 bp, Artificial
  Probe
tatgtagacagtgaggggaacagga

SEQ ID NO: 81264 - DNA, 25 bp, Artificial
  Probe
gacagtgtcgaatctatgagcttcg

SEQ ID NO: 81265 - DNA, 25 bp, Artificial
  Probe
agtttcagcatggagtcattgttgc

SEQ ID NO: 81266 - DNA, 25 bp, Artificial
  Probe
tcgaatctatgagcttcgcaacaag

SEQ ID NO: 81267 - DNA, 25 bp, Artificial
  Probe
atgtagacagtgaggggaacaggat

SEQ ID NO: 81268 - DNA, 25 bp, Artificial
  Probe
gtcgaatctatgagcttcgcaacaa

SEQ ID NO: 81269 - DNA, 25 bp, Artificial
  Probe
atcgaaatgcttcatggaaccacca

SEQ ID NO: 81270 - DNA, 25 bp, Artificial
  Probe
tagacagtgaggggaacaggatctc

SEQ ID NO: 81271 - DNA, 25 bp, Artificial
  Probe
gtagacagtgaggggaacaggatct

SEQ ID NO: 81272 - DNA, 25 bp, Artificial
  Probe
gtttcagcatggagtcattgttgca

SEQ ID NO: 81273 - DNA, 25 bp, Artificial
  Probe
cgaatctatgagcttcgcaacaagg

SEQ ID NO: 81274 - DNA, 25 bp, Artificial
  Probe
gtgtcgaatctatgagcttcgcaac

SEQ ID NO: 81275 - DNA, 25 bp, Artificial
  Probe
gagccacgaatcgaaatgcttcatg

SEQ ID NO: 81276 - DNA, 25 bp, Artificial
  Probe
agtgtcgaatctatgagcttcgcaa

SEQ ID NO: 81277 - DNA, 25 bp, Artificial
  Probe
tgtagacagtgaggggaacaggatc

SEQ ID NO: 81278 - DNA, 25 bp, Artificial
  Probe
tgtcgaatctatgagcttcgcaaca

SEQ ID NO: 81279 - DNA, 25 bp, Artificial
  Probe
cagtgtcgaatctatgagcttcgca

SEQ ID NO: 81280 - DNA, 25 bp, Artificial
  Probe
acagtgtcgaatctatgagcttcgc

SEQ ID NO: 81281 - DNA, 25 bp, Artificial
  Probe
aaggactgatgtacttcaacttgtg

SEQ ID NO: 81282 - DNA, 25 bp, Artificial
  Probe
ggactgatgtacttcaacttgtgag

SEQ ID NO: 81283 - DNA, 25 bp, Artificial
  Probe
aggactgatgtacttcaacttgtga

SEQ ID NO: 81284 - DNA, 25 bp, Artificial
  Probe
gactgatgtacttcaacttgtgagc

SEQ ID NO: 81285 - DNA, 25 bp, Artificial
  Probe
accaaatcagtctcctttaatccaa

SEQ ID NO: 81286 - DNA, 25 bp, Artificial
  Probe
aaccaaatcagtctcctttaatcca

SEQ ID NO: 81287 - DNA, 25 bp, Artificial
  Probe
aaaccaaatcagtctcctttaatcc

SEQ ID NO: 81288 - DNA, 25 bp, Artificial
  Probe
ccaaatcagtctcctttaatccaag

SEQ ID NO: 81289 - DNA, 25 bp, Artificial
  Probe
tcagaaaccaaatcagtctccttta

SEQ ID NO: 81290 - DNA, 25 bp, Artificial
  Probe
ttcagaaaccaaatcagtctccttt

SEQ ID NO: 81291 - DNA, 25 bp, Artificial
  Probe
cagaaaccaaatcagtctcctttaa

SEQ ID NO: 81292 - DNA, 25 bp, Artificial
  Probe
cttcagaaaccaaatcagtctcctt

SEQ ID NO: 81293 - DNA, 25 bp, Artificial
  Probe
tacttcagaaaccaaatcagtctcc

SEQ ID NO: 81294 - DNA, 25 bp, Artificial
  Probe
ttacttcagaaaccaaatcagtctc

SEQ ID NO: 81295 - DNA, 25 bp, Artificial
  Probe
gaaaccaaatcagtctcctttaatc

SEQ ID NO: 81296 - DNA, 25 bp, Artificial
  Probe
tgaacctagacaaagcaatactcag

SEQ ID NO: 81297 - DNA, 25 bp, Artificial
  Probe
ctgaacctagacaaagcaatactca

SEQ ID NO: 81298 - DNA, 25 bp, Artificial
  Probe
agaaaccaaatcagtctcctttaat

SEQ ID NO: 81299 - DNA, 25 bp, Artificial
  Probe
tttacttcagaaaccaaatcagtct

SEQ ID NO: 81300 - DNA, 25 bp, Artificial
  Probe
cttgaattctactacctgaagagca

SEQ ID NO: 81301 - DNA, 25 bp, Artificial
  Probe
actgatgtacttcaacttgtgagcc

SEQ ID NO: 81302 - DNA, 25 bp, Artificial
  Probe
aattctactacctgaagagcaaagg

SEQ ID NO: 81303 - DNA, 25 bp, Artificial
  Probe
ttgaattctactacctgaagagcaa

SEQ ID NO: 81304 - DNA, 25 bp, Artificial
  Probe
acttcagaaaccaaatcagtctcct

SEQ ID NO: 81305 - DNA, 25 bp, Artificial
  Probe
gaaggactgatgtacttcaacttgt

SEQ ID NO: 81306 - DNA, 25 bp, Artificial
  Probe
gaacctagacaaagcaatactcagg

SEQ ID NO: 81307 - DNA, 25 bp, Artificial
  Probe
ggaaggactgatgtacttcaacttg

SEQ ID NO: 81308 - DNA, 25 bp, Artificial
  Probe
aggaaggactgatgtacttcaactt

SEQ ID NO: 81309 - DNA, 25 bp, Artificial
  Probe
caggaaggactgatgtacttcaact

SEQ ID NO: 81310 - DNA, 25 bp, Artificial
  Probe
aaagaaggaatcagggtcttgaatt

SEQ ID NO: 81311 - DNA, 25 bp, Artificial
  Probe
attctactacctgaagagcaaaggc

SEQ ID NO: 81312 - DNA, 25 bp, Artificial
  Probe
gttctttgagtggaaacagctacag

SEQ ID NO: 81313 - DNA, 25 bp, Artificial
  Probe
gtaggtttcctgttctttgagtgga

SEQ ID NO: 81314 - DNA, 25 bp, Artificial
  Probe
tcttgaattctactacctgaagagc

SEQ ID NO: 81315 - DNA, 25 bp, Artificial
  Probe
ggtcttgaattctactacctgaaga

SEQ ID NO: 81316 - DNA, 25 bp, Artificial
  Probe
tgaattctactacctgaagagcaaa

SEQ ID NO: 81317 - DNA, 25 bp, Artificial
  Probe
gctgaacctagacaaagcaatactc

SEQ ID NO: 81318 - DNA, 25 bp, Artificial
  Probe
gaattctactacctgaagagcaaag

SEQ ID NO: 81319 - DNA, 25 bp, Artificial
  Probe
aacctagacaaagcaatactcaggc

SEQ ID NO: 81320 - DNA, 25 bp, Artificial
  Probe
gtcttgaattctactacctgaagag

SEQ ID NO: 81321 - DNA, 25 bp, Artificial
  Probe
tttattaaactcttctccccgaaaa

SEQ ID NO: 81322 - DNA, 25 bp, Artificial
  Probe
ctttaatccaaggctgaagggagtc

SEQ ID NO: 81323 - DNA, 25 bp, Artificial
  Probe
atttattaaactcttctccccgaaa

SEQ ID NO: 81324 - DNA, 25 bp, Artificial
  Probe
ggtaggtttcctgttctttgagtgg

SEQ ID NO: 81325 - DNA, 25 bp, Artificial
  Probe
gacggtaggtttcctgttctttgag

SEQ ID NO: 81326 - DNA, 25 bp, Artificial
  Probe
gctatgtggagaacaatggtattaa

SEQ ID NO: 81327 - DNA, 25 bp, Artificial
  Probe
caagaagacctggatatggatgagc

SEQ ID NO: 81328 - DNA, 25 bp, Artificial
  Probe
gcaagaagacctggatatggatgag

SEQ ID NO: 81329 - DNA, 25 bp, Artificial
  Probe
gtggtaaaggattatagcaggacat

SEQ ID NO: 81330 - DNA, 25 bp, Artificial
  Probe
ttgtggtaaaggattatagcaggac

SEQ ID NO: 81331 - DNA, 25 bp, Artificial
  Probe
tttgtggtaaaggattatagcagga

SEQ ID NO: 81332 - DNA, 25 bp, Artificial
  Probe
tggtaaaggattatagcaggacatc

SEQ ID NO: 81333 - DNA, 25 bp, Artificial
  Probe
gacatcccgaaataactttataggc

SEQ ID NO: 81334 - DNA, 25 bp, Artificial
  Probe
agctatgtggagaacaatggtatta

SEQ ID NO: 81335 - DNA, 25 bp, Artificial
  Probe
gattatagcaggacatcccgaaata

SEQ ID NO: 81336 - DNA, 25 bp, Artificial
  Probe
cagctatgtggagaacaatggtatt

SEQ ID NO: 81337 - DNA, 25 bp, Artificial
  Probe
ggacatcccgaaataactttatagg

SEQ ID NO: 81338 - DNA, 25 bp, Artificial
  Probe
tatagcaggacatcccgaaataact

SEQ ID NO: 81339 - DNA, 25 bp, Artificial
  Probe
attatagcaggacatcccgaaataa

SEQ ID NO: 81340 - DNA, 25 bp, Artificial
  Probe
ttatagcaggacatcccgaaataac

SEQ ID NO: 81341 - DNA, 25 bp, Artificial
  Probe
gcaggacatcccgaaataactttat

SEQ ID NO: 81342 - DNA, 25 bp, Artificial
  Probe
atgtggagaacaatggtattaatcc

SEQ ID NO: 81343 - DNA, 25 bp, Artificial
  Probe
caggacatcccgaaataactttata

SEQ ID NO: 81344 - DNA, 25 bp, Artificial
  Probe
gagacattctatttccagatccagg

SEQ ID NO: 81345 - DNA, 25 bp, Artificial
  Probe
gacattctatttccagatccaggtg

SEQ ID NO: 81346 - DNA, 25 bp, Artificial
  Probe
agacattctatttccagatccaggt

SEQ ID NO: 81347 - DNA, 25 bp, Artificial
  Probe
atagcaggacatcccgaaataactt

SEQ ID NO: 81348 - DNA, 25 bp, Artificial
  Probe
aggacatcccgaaataactttatag

SEQ ID NO: 81349 - DNA, 25 bp, Artificial
  Probe
tgtggtaaaggattatagcaggaca

SEQ ID NO: 81350 - DNA, 25 bp, Artificial
  Probe
agcaggacatcccgaaataacttta

SEQ ID NO: 81351 - DNA, 25 bp, Artificial
  Probe
tagcaggacatcccgaaataacttt

SEQ ID NO: 81352 - DNA, 25 bp, Artificial
  Probe
aagaagacctggatatggatgagcc

SEQ ID NO: 81353 - DNA, 25 bp, Artificial
  Probe
atgcaagaagacctggatatggatg

SEQ ID NO: 81354 - DNA, 25 bp, Artificial
  Probe
catgcaagaagacctggatatggat

SEQ ID NO: 81355 - DNA, 25 bp, Artificial
  Probe
gaagaatcctgacccagaactatga

SEQ ID NO: 81356 - DNA, 25 bp, Artificial
  Probe
ttccaacctacaacttcctcagcat

SEQ ID NO: 81357 - DNA, 25 bp, Artificial
  Probe
aagaatcctgacccagaactatgac

SEQ ID NO: 81358 - DNA, 25 bp, Artificial
  Probe
ggagacattctatttccagatccag

SEQ ID NO: 81359 - DNA, 25 bp, Artificial
  Probe
gatatggatgagccctgagaaacac

SEQ ID NO: 81360 - DNA, 25 bp, Artificial
  Probe
ccagctatgtggagaacaatggtat

SEQ ID NO: 81361 - DNA, 25 bp, Artificial
  Probe
aacctacaacttcctcagcatccag

SEQ ID NO: 81362 - DNA, 25 bp, Artificial
  Probe
tccaacctacaacttcctcagcatc

SEQ ID NO: 81363 - DNA, 25 bp, Artificial
  Probe
gggagacattctatttccagatcca

SEQ ID NO: 81364 - DNA, 25 bp, Artificial
  Probe
agaatcctgacccagaactatgact

SEQ ID NO: 81365 - DNA, 25 bp, Artificial
  Probe
tgcaagaagacctggatatggatga

SEQ ID NO: 81366 - DNA, 25 bp, Artificial
  Probe
acattctatttccagatccaggtgc

SEQ ID NO: 81367 - DNA, 25 bp, Artificial
  Probe
tatgtggagaacaatggtattaatc

SEQ ID NO: 81368 - DNA, 25 bp, Artificial
  Probe
cgttttgtggtaaaggattatagca

SEQ ID NO: 81369 - DNA, 25 bp, Artificial
  Probe
tgcgttttgtggtaaaggattatag

SEQ ID NO: 81370 - DNA, 25 bp, Artificial
  Probe
ctgcgttttgtggtaaaggattata

SEQ ID NO: 81371 - DNA, 25 bp, Artificial
  Probe
ttaacaatatcgtcaggaccatctc

SEQ ID NO: 81372 - DNA, 25 bp, Artificial
  Probe
attaacaatatcgtcaggaccatct

SEQ ID NO: 81373 - DNA, 25 bp, Artificial
  Probe
ccagattacagattcaacttcctct

SEQ ID NO: 81374 - DNA, 25 bp, Artificial
  Probe
taacaatatcgtcaggaccatctct

SEQ ID NO: 81375 - DNA, 25 bp, Artificial
  Probe
aatgctggctattaacaatatcgtc

SEQ ID NO: 81376 - DNA, 25 bp, Artificial
  Probe
atgctggctattaacaatatcgtca

SEQ ID NO: 81377 - DNA, 25 bp, Artificial
  Probe
gccagattacagattcaacttcctc

SEQ ID NO: 81378 - DNA, 25 bp, Artificial
  Probe
gctattaacaatatcgtcaggacca

SEQ ID NO: 81379 - DNA, 25 bp, Artificial
  Probe
tggctattaacaatatcgtcaggac

SEQ ID NO: 81380 - DNA, 25 bp, Artificial
  Probe
ggctattaacaatatcgtcaggacc

SEQ ID NO: 81381 - DNA, 25 bp, Artificial
  Probe
cagattacagattcaacttcctctt

SEQ ID NO: 81382 - DNA, 25 bp, Artificial
  Probe
tcttggcatattcctcttcatgtaa

SEQ ID NO: 81383 - DNA, 25 bp, Artificial
  Probe
ttcttggcatattcctcttcatgta

SEQ ID NO: 81384 - DNA, 25 bp, Artificial
  Probe
ctggctattaacaatatcgtcagga

SEQ ID NO: 81385 - DNA, 25 bp, Artificial
  Probe
tattaacaatatcgtcaggaccatc

SEQ ID NO: 81386 - DNA, 25 bp, Artificial
  Probe
ctattaacaatatcgtcaggaccat

SEQ ID NO: 81387 - DNA, 25 bp, Artificial
  Probe
tgctggctattaacaatatcgtcag

SEQ ID NO: 81388 - DNA, 25 bp, Artificial
  Probe
gttcttggcatattcctcttcatgt

SEQ ID NO: 81389 - DNA, 25 bp, Artificial
  Probe
gaagaacacagcagtacagatgatg

SEQ ID NO: 81390 - DNA, 25 bp, Artificial
  Probe
gagctataatgtcctgtgtcaagaa

SEQ ID NO: 81391 - DNA, 25 bp, Artificial
  Probe
aggacaatcacacagagctataatg

SEQ ID NO: 81392 - DNA, 25 bp, Artificial
  Probe
caggacaatcacacagagctataat

SEQ ID NO: 81393 - DNA, 25 bp, Artificial
  Probe
tgaagaacacagcagtacagatgat

SEQ ID NO: 81394 - DNA, 25 bp, Artificial
  Probe
gctggctattaacaatatcgtcagg

SEQ ID NO: 81395 - DNA, 25 bp, Artificial
  Probe
agagctataatgtcctgtgtcaaga

SEQ ID NO: 81396 - DNA, 25 bp, Artificial
  Probe
ggttcttggcatattcctcttcatg

SEQ ID NO: 81397 - DNA, 25 bp, Artificial
  Probe
tcaatagtgatgaatatggttggat

SEQ ID NO: 81398 - DNA, 25 bp, Artificial
  Probe
tcaggacaatcacacagagctataa

SEQ ID NO: 81399 - DNA, 25 bp, Artificial
  Probe
cctctcctttacccaatcttatctg

SEQ ID NO: 81400 - DNA, 25 bp, Artificial
  Probe
tcctctcctttacccaatcttatct

SEQ ID NO: 81401 - DNA, 25 bp, Artificial
  Probe
gtttcctctcctttacccaatctta

SEQ ID NO: 81402 - DNA, 25 bp, Artificial
  Probe
gtgattggatacttattctgggaca

SEQ ID NO: 81403 - DNA, 25 bp, Artificial
  Probe
tgtgattggatacttattctgggac

SEQ ID NO: 81404 - DNA, 25 bp, Artificial
  Probe
aggttcttggcatattcctcttcat

SEQ ID NO: 81405 - DNA, 25 bp, Artificial
  Probe
tgaaggaaataaacagagagaccat

SEQ ID NO: 81406 - DNA, 25 bp, Artificial
  Probe
atgaaggaaataaacagagagacca

SEQ ID NO: 81407 - DNA, 25 bp, Artificial
  Probe
ttaggtactgttatgaccaatcagc

SEQ ID NO: 81408 - DNA, 25 bp, Artificial
  Probe
ttcctctcctttacccaatcttatc

SEQ ID NO: 81409 - DNA, 25 bp, Artificial
  Probe
tttctgaagcctctaaagtctacac

SEQ ID NO: 81410 - DNA, 25 bp, Artificial
  Probe
gtttctgaagcctctaaagtctaca

SEQ ID NO: 81411 - DNA, 25 bp, Artificial
  Probe
gtagtgatttgttgacggaagagta

SEQ ID NO: 81412 - DNA, 25 bp, Artificial
  Probe
tacgagagaagagtgaagaggaaat

SEQ ID NO: 81413 - DNA, 25 bp, Artificial
  Probe
agaggaaatgctggctattaacaat

SEQ ID NO: 81414 - DNA, 25 bp, Artificial
  Probe
tgattggatacttattctgggacat

SEQ ID NO: 81415 - DNA, 25 bp, Artificial
  Probe
atgtgattggatacttattctggga

SEQ ID NO: 81416 - DNA, 25 bp, Artificial
  Probe
ttagtagtgtgtagtgagtatcagc

SEQ ID NO: 81417 - DNA, 25 bp, Artificial
  Probe
tagtagtgtgtagtgagtatcagct

SEQ ID NO: 81418 - DNA, 25 bp, Artificial
  Probe
ctggtgtgaagtaaattcttgttct

SEQ ID NO: 81419 - DNA, 25 bp, Artificial
  Probe
tggtgtgaagtaaattcttgttctt

SEQ ID NO: 81420 - DNA, 25 bp, Artificial
  Probe
actggtgtgaagtaaattcttgttc

SEQ ID NO: 81421 - DNA, 25 bp, Artificial
  Probe
gactggtgtgaagtaaattcttgtt

SEQ ID NO: 81422 - DNA, 25 bp, Artificial
  Probe
ttgactggtgtgaagtaaattcttg

SEQ ID NO: 81423 - DNA, 25 bp, Artificial
  Probe
gtttgactggtgtgaagtaaattct

SEQ ID NO: 81424 - DNA, 25 bp, Artificial
  Probe
tgactggtgtgaagtaaattcttgt

SEQ ID NO: 81425 - DNA, 25 bp, Artificial
  Probe
actattcaagtgatggttagtcatg

SEQ ID NO: 81426 - DNA, 25 bp, Artificial
  Probe
cgtttgactggtgtgaagtaaattc

SEQ ID NO: 81427 - DNA, 25 bp, Artificial
  Probe
tttgactggtgtgaagtaaattctt

SEQ ID NO: 81428 - DNA, 25 bp, Artificial
  Probe
caatgttgaatttacagagggcttt

SEQ ID NO: 81429 - DNA, 25 bp, Artificial
  Probe
acaatgttgaatttacagagggctt

SEQ ID NO: 81430 - DNA, 25 bp, Artificial
  Probe
aaacaatgttgaatttacagagggc

SEQ ID NO: 81431 - DNA, 25 bp, Artificial
  Probe
acagaagtggatttagctcagatta

SEQ ID NO: 81432 - DNA, 25 bp, Artificial
  Probe
ttcgagctaataactttaccttggg

SEQ ID NO: 81433 - DNA, 25 bp, Artificial
  Probe
aacaatgttgaatttacagagggct

SEQ ID NO: 81434 - DNA, 25 bp, Artificial
  Probe
attcgagctaataactttaccttgg

SEQ ID NO: 81435 - DNA, 25 bp, Artificial
  Probe
ggtgtgaagtaaattcttgttctta

SEQ ID NO: 81436 - DNA, 25 bp, Artificial
  Probe
agaagtggatttagctcagattaac

SEQ ID NO: 81437 - DNA, 25 bp, Artificial
  Probe
cagaagtggatttagctcagattaa

SEQ ID NO: 81438 - DNA, 25 bp, Artificial
  Probe
ctgattcgagctaataactttacct

SEQ ID NO: 81439 - DNA, 25 bp, Artificial
  Probe
tttataacatgcactttctgggttt

SEQ ID NO: 81440 - DNA, 25 bp, Artificial
  Probe
tttagtagtgtgtagtgagtatcag

SEQ ID NO: 81441 - DNA, 25 bp, Artificial
  Probe
atttataacatgcactttctgggtt

SEQ ID NO: 81442 - DNA, 25 bp, Artificial
  Probe
attcaagtgatggttagtcatgagt

SEQ ID NO: 81443 - DNA, 25 bp, Artificial
  Probe
ttcaagtgatggttagtcatgagtc

SEQ ID NO: 81444 - DNA, 25 bp, Artificial
  Probe
gaagtggatttagctcagattaact

SEQ ID NO: 81445 - DNA, 25 bp, Artificial
  Probe
tatttataacatgcactttctgggt

SEQ ID NO: 81446 - DNA, 25 bp, Artificial
  Probe
tgattcgagctaataactttacctt

SEQ ID NO: 81447 - DNA, 25 bp, Artificial
  Probe
cacagaagtggatttagctcagatt

SEQ ID NO: 81448 - DNA, 25 bp, Artificial
  Probe
gattcgagctaataactttaccttg

SEQ ID NO: 81449 - DNA, 25 bp, Artificial
  Probe
atatctgtctgcctctgcctcctaa

SEQ ID NO: 81450 - DNA, 25 bp, Artificial
  Probe
acgtttgactggtgtgaagtaaatt

SEQ ID NO: 81451 - DNA, 25 bp, Artificial
  Probe
ttttgtttgtttgttttcctggtct

SEQ ID NO: 81452 - DNA, 25 bp, Artificial
  Probe
aaagactattcaagtgatggttagt

SEQ ID NO: 81453 - DNA, 25 bp, Artificial
  Probe
tttgtttgtttgttttcctggtctc

SEQ ID NO: 81454 - DNA, 25 bp, Artificial
  Probe
tattcaagtgatggttagtcatgag

SEQ ID NO: 81455 - DNA, 25 bp, Artificial
  Probe
ctattcaagtgatggttagtcatga

SEQ ID NO: 81456 - DNA, 25 bp, Artificial
  Probe
gacgtttgactggtgtgaagtaaat

SEQ ID NO: 81457 - DNA, 25 bp, Artificial
  Probe
gccatttctaacatttctgcacaga

SEQ ID NO: 81458 - DNA, 25 bp, Artificial
  Probe
tttgtttgttttcctggtctccttt

SEQ ID NO: 81459 - DNA, 25 bp, Artificial
  Probe
ttatttataacatgcactttctggg

SEQ ID NO: 81460 - DNA, 25 bp, Artificial
  Probe
taacactgggccatttctaacattt

SEQ ID NO: 81461 - DNA, 25 bp, Artificial
  Probe
ataaccacgtcattgatacctactc

SEQ ID NO: 81462 - DNA, 25 bp, Artificial
  Probe
aataaccacgtcattgatacctact

SEQ ID NO: 81463 - DNA, 25 bp, Artificial
  Probe
gttggagtcagatggtgttatttac

SEQ ID NO: 81464 - DNA, 25 bp, Artificial
  Probe
aaccacgtcattgatacctactcta

SEQ ID NO: 81465 - DNA, 25 bp, Artificial
  Probe
taaccacgtcattgatacctactct

SEQ ID NO: 81466 - DNA, 25 bp, Artificial
  Probe
cgttggagtcagatggtgttattta

SEQ ID NO: 81467 - DNA, 25 bp, Artificial
  Probe
aggatgttgcatgtgctagataatt

SEQ ID NO: 81468 - DNA, 25 bp, Artificial
  Probe
gacttccttctttctacactctgaa

SEQ ID NO: 81469 - DNA, 25 bp, Artificial
  Probe
tttattgaaatgttcggagtcttgg

SEQ ID NO: 81470 - DNA, 25 bp, Artificial
  Probe
ggatgttgcatgtgctagataatta

SEQ ID NO: 81471 - DNA, 25 bp, Artificial
  Probe
accacgtcattgatacctactctag

SEQ ID NO: 81472 - DNA, 25 bp, Artificial
  Probe
atttacctcctggatataagttggg

SEQ ID NO: 81473 - DNA, 25 bp, Artificial
  Probe
agacttccttctttctacactctga

SEQ ID NO: 81474 - DNA, 25 bp, Artificial
  Probe
caggatgttgcatgtgctagataat

SEQ ID NO: 81475 - DNA, 25 bp, Artificial
  Probe
aatgttggtagaatcatcctggaaa

SEQ ID NO: 81476 - DNA, 25 bp, Artificial
  Probe
aaatgttggtagaatcatcctggaa

SEQ ID NO: 81477 - DNA, 25 bp, Artificial
  Probe
ttctacactctgaagaggactccat

SEQ ID NO: 81478 - DNA, 25 bp, Artificial
  Probe
gggaggaaatgttggtagaatcatc

SEQ ID NO: 81479 - DNA, 25 bp, Artificial
  Probe
gaaatgttggtagaatcatcctgga

SEQ ID NO: 81480 - DNA, 25 bp, Artificial
  Probe
ttattgaaatgttcggagtcttggg

SEQ ID NO: 81481 - DNA, 25 bp, Artificial
  Probe
gcctcaagaagatgtaaagatgatt

SEQ ID NO: 81482 - DNA, 25 bp, Artificial
  Probe
ccagacttccttctttctacactct

SEQ ID NO: 81483 - DNA, 25 bp, Artificial
  Probe
tgggaggaaatgttggtagaatcat

SEQ ID NO: 81484 - DNA, 25 bp, Artificial
  Probe
gggtatatatgtgtgaagaggactt

SEQ ID NO: 81485 - DNA, 25 bp, Artificial
  Probe
cacgtcattgatacctactctagaa

SEQ ID NO: 81486 - DNA, 25 bp, Artificial
  Probe
accagacttccttctttctacactc

SEQ ID NO: 81487 - DNA, 25 bp, Artificial
  Probe
gaccagacttccttctttctacact

SEQ ID NO: 81488 - DNA, 25 bp, Artificial
  Probe
ctggatataagttgggcagttaaac

SEQ ID NO: 81489 - DNA, 25 bp, Artificial
  Probe
tttacctcctggatataagttgggc

SEQ ID NO: 81490 - DNA, 25 bp, Artificial
  Probe
cctggatataagttgggcagttaaa

SEQ ID NO: 81491 - DNA, 25 bp, Artificial
  Probe
tcaggatgttgcatgtgctagataa

SEQ ID NO: 81492 - DNA, 25 bp, Artificial
  Probe
ccacgtcattgatacctactctaga

SEQ ID NO: 81493 - DNA, 25 bp, Artificial
  Probe
ctgggaggaaatgttggtagaatca

SEQ ID NO: 81494 - DNA, 25 bp, Artificial
  Probe
tacactctgaagaggactccatgag

SEQ ID NO: 81495 - DNA, 25 bp, Artificial
  Probe
ctacactctgaagaggactccatga

SEQ ID NO: 81496 - DNA, 25 bp, Artificial
  Probe
tctacactctgaagaggactccatg

SEQ ID NO: 81497 - DNA, 25 bp, Artificial
  Probe
tctgaagaggactccatgagaacaa

SEQ ID NO: 81498 - DNA, 25 bp, Artificial
  Probe
acgtcattgatacctactctagaat

SEQ ID NO: 81499 - DNA, 25 bp, Artificial
  Probe
ctataaacttccgttggagtcagat

SEQ ID NO: 81500 - DNA, 25 bp, Artificial
  Probe
tttctataaacttccgttggagtca

SEQ ID NO: 81501 - DNA, 25 bp, Artificial
  Probe
tcctggatataagttgggcagttaa

SEQ ID NO: 81502 - DNA, 25 bp, Artificial
  Probe
ttctataaacttccgttggagtcag

SEQ ID NO: 81503 - DNA, 25 bp, Artificial
  Probe
tataaacttccgttggagtcagatg

SEQ ID NO: 81504 - DNA, 25 bp, Artificial
  Probe
ctcaggatgttgcatgtgctagata

SEQ ID NO: 81505 - DNA, 25 bp, Artificial
  Probe
atttattgaaatgttcggagtcttg

SEQ ID NO: 81506 - DNA, 25 bp, Artificial
  Probe
tcagagcttattcagaagtacctag

SEQ ID NO: 81507 - DNA, 25 bp, Artificial
  Probe
ctcagagcttattcagaagtaccta

SEQ ID NO: 81508 - DNA, 25 bp, Artificial
  Probe
agatatgattcaaactctggaggtg

SEQ ID NO: 81509 - DNA, 25 bp, Artificial
  Probe
ggaacagatgaaaccactagaagaa

SEQ ID NO: 81510 - DNA, 25 bp, Artificial
  Probe
aagatatgattcaaactctggaggt

SEQ ID NO: 81511 - DNA, 25 bp, Artificial
  Probe
aaatcaggaacagatgaaaccacta

SEQ ID NO: 81512 - DNA, 25 bp, Artificial
  Probe
tagaaatcaggaacagatgaaacca

SEQ ID NO: 81513 - DNA, 25 bp, Artificial
  Probe
gatatgattcaaactctggaggtga

SEQ ID NO: 81514 - DNA, 25 bp, Artificial
  Probe
gaacagatgaaaccactagaagaaa

SEQ ID NO: 81515 - DNA, 25 bp, Artificial
  Probe
aggaacagatgaaaccactagaaga

SEQ ID NO: 81516 - DNA, 25 bp, Artificial
  Probe
caggaacagatgaaaccactagaag

SEQ ID NO: 81517 - DNA, 25 bp, Artificial
  Probe
atatgattcaaactctggaggtgag

SEQ ID NO: 81518 - DNA, 25 bp, Artificial
  Probe
ttagaaatcaggaacagatgaaacc

SEQ ID NO: 81519 - DNA, 25 bp, Artificial
  Probe
aaagatatgattcaaactctggagg

SEQ ID NO: 81520 - DNA, 25 bp, Artificial
  Probe
aatcaggaacagatgaaaccactag

SEQ ID NO: 81521 - DNA, 25 bp, Artificial
  Probe
gaaatcaggaacagatgaaaccact

SEQ ID NO: 81522 - DNA, 25 bp, Artificial
  Probe
agaaatcaggaacagatgaaaccac

SEQ ID NO: 81523 - DNA, 25 bp, Artificial
  Probe
aaagcaagaggaggaaagatcaaag

SEQ ID NO: 81524 - DNA, 25 bp, Artificial
  Probe
atcaggaacagatgaaaccactaga

SEQ ID NO: 81525 - DNA, 25 bp, Artificial
  Probe
tcaggaacagatgaaaccactagaa

SEQ ID NO: 81526 - DNA, 25 bp, Artificial
  Probe
cctgaaattactaaagctggagaga

SEQ ID NO: 81527 - DNA, 25 bp, Artificial
  Probe
gacaatgttggaactgttgaaccag

SEQ ID NO: 81528 - DNA, 25 bp, Artificial
  Probe
tctcatggaggaagaattcattaga

SEQ ID NO: 81529 - DNA, 25 bp, Artificial
  Probe
ctgaaattactaaagctggagagaa

SEQ ID NO: 81530 - DNA, 25 bp, Artificial
  Probe
gcctgaaattactaaagctggagag

SEQ ID NO: 81531 - DNA, 25 bp, Artificial
  Probe
ttgaaccagttggatggatttgatt

SEQ ID NO: 81532 - DNA, 25 bp, Artificial
  Probe
tatgattcaaactctggaggtgagc

SEQ ID NO: 81533 - DNA, 25 bp, Artificial
  Probe
atttgtagacaaggatctgctggaa

SEQ ID NO: 81534 - DNA, 25 bp, Artificial
  Probe
tgaaccagttggatggatttgattc

SEQ ID NO: 81535 - DNA, 25 bp, Artificial
  Probe
ctcatggaggaagaattcattagaa

SEQ ID NO: 81536 - DNA, 25 bp, Artificial
  Probe
gtcatttgtagacaaggatctgctg

SEQ ID NO: 81537 - DNA, 25 bp, Artificial
  Probe
attcattagaaatcaggaacagatg

SEQ ID NO: 81538 - DNA, 25 bp, Artificial
  Probe
attagaaatcaggaacagatgaaac

SEQ ID NO: 81539 - DNA, 25 bp, Artificial
  Probe
cattagaaatcaggaacagatgaaa

SEQ ID NO: 81540 - DNA, 25 bp, Artificial
  Probe
gttgaaccagttggatggatttgat

SEQ ID NO: 81541 - DNA, 25 bp, Artificial
  Probe
aagcaagaggaggaaagatcaaagg

SEQ ID NO: 81542 - DNA, 25 bp, Artificial
  Probe
gatgataatcacgccattgtgtcca

SEQ ID NO: 81543 - DNA, 25 bp, Artificial
  Probe
tgaaattactaaagctggagagaat

SEQ ID NO: 81544 - DNA, 25 bp, Artificial
  Probe
gaggaggaaagatcaaaggtggatg

SEQ ID NO: 81545 - DNA, 25 bp, Artificial
  Probe
catttgtagacaaggatctgctgga

SEQ ID NO: 81546 - DNA, 25 bp, Artificial
  Probe
tcatttgtagacaaggatctgctgg

SEQ ID NO: 81547 - DNA, 25 bp, Artificial
  Probe
gctcagagcttattcagaagtacct

SEQ ID NO: 81548 - DNA, 25 bp, Artificial
  Probe
tagaagaaaagcaagaggaggaaag

SEQ ID NO: 81549 - DNA, 25 bp, Artificial
  Probe
agaggaggaaagatcaaaggtggat

SEQ ID NO: 81550 - DNA, 25 bp, Artificial
  Probe
cacaaaccgaatagaaactttggat

SEQ ID NO: 81551 - DNA, 25 bp, Artificial
  Probe
ctgatggtgttgttgatctgaactg

SEQ ID NO: 81552 - DNA, 25 bp, Artificial
  Probe
tgatggtgttgttgatctgaactgg

SEQ ID NO: 81553 - DNA, 25 bp, Artificial
  Probe
gctgatggtgttgttgatctgaact

SEQ ID NO: 81554 - DNA, 25 bp, Artificial
  Probe
cgacgcatctatgacatcaccaatg

SEQ ID NO: 81555 - DNA, 25 bp, Artificial
  Probe
agctgatggtgttgttgatctgaac

SEQ ID NO: 81556 - DNA, 25 bp, Artificial
  Probe
agaaacgacgcatctatgacatcac

SEQ ID NO: 81557 - DNA, 25 bp, Artificial
  Probe
cagaaacgacgcatctatgacatca

SEQ ID NO: 81558 - DNA, 25 bp, Artificial
  Probe
acgacgcatctatgacatcaccaat

SEQ ID NO: 81559 - DNA, 25 bp, Artificial
  Probe
aacgacgcatctatgacatcaccaa

SEQ ID NO: 81560 - DNA, 25 bp, Artificial
  Probe
gacgcatctatgacatcaccaatgt

SEQ ID NO: 81561 - DNA, 25 bp, Artificial
  Probe
gaaacgacgcatctatgacatcacc

SEQ ID NO: 81562 - DNA, 25 bp, Artificial
  Probe
gatggtgttgttgatctgaactggg

SEQ ID NO: 81563 - DNA, 25 bp, Artificial
  Probe
gcagaaacgacgcatctatgacatc

SEQ ID NO: 81564 - DNA, 25 bp, Artificial
  Probe
aaacgacgcatctatgacatcacca

SEQ ID NO: 81565 - DNA, 25 bp, Artificial
  Probe
tgcagaaacgacgcatctatgacat

SEQ ID NO: 81566 - DNA, 25 bp, Artificial
  Probe
tatcctcttctacttcacacaacag

SEQ ID NO: 81567 - DNA, 25 bp, Artificial
  Probe
ctatcctcttctacttcacacaaca

SEQ ID NO: 81568 - DNA, 25 bp, Artificial
  Probe
cctatcctcttctacttcacacaac

SEQ ID NO: 81569 - DNA, 25 bp, Artificial
  Probe
atcctcttctacttcacacaacaga

SEQ ID NO: 81570 - DNA, 25 bp, Artificial
  Probe
tacttatctataactacgccagagg

SEQ ID NO: 81571 - DNA, 25 bp, Artificial
  Probe
cctacttatctataactacgccaga

SEQ ID NO: 81572 - DNA, 25 bp, Artificial
  Probe
gtcagttcatgcttgttataccaga

SEQ ID NO: 81573 - DNA, 25 bp, Artificial
  Probe
tcagttcatgcttgttataccagaa

SEQ ID NO: 81574 - DNA, 25 bp, Artificial
  Probe
cagttcatgcttgttataccagaat

SEQ ID NO: 81575 - DNA, 25 bp, Artificial
  Probe
agttcatgcttgttataccagaatt

SEQ ID NO: 81576 - DNA, 25 bp, Artificial
  Probe
ctacttatctataactacgccagag

SEQ ID NO: 81577 - DNA, 25 bp, Artificial
  Probe
gactggtcagttcatgcttgttata

SEQ ID NO: 81578 - DNA, 25 bp, Artificial
  Probe
cttcctcttctatgccaacctacac

SEQ ID NO: 81579 - DNA, 25 bp, Artificial
  Probe
actggtcagttcatgcttgttatac

SEQ ID NO: 81580 - DNA, 25 bp, Artificial
  Probe
ccctacttatctataactacgccag

SEQ ID NO: 81581 - DNA, 25 bp, Artificial
  Probe
ccctatcctcttctacttcacacaa

SEQ ID NO: 81582 - DNA, 25 bp, Artificial
  Probe
acttatctataactacgccagaggg

SEQ ID NO: 81583 - DNA, 25 bp, Artificial
  Probe
gaccctatcctcttctacttcacac

SEQ ID NO: 81584 - DNA, 25 bp, Artificial
  Probe
gcttgttataccagaattcaggatg

SEQ ID NO: 81585 - DNA, 25 bp, Artificial
  Probe
tgcttgttataccagaattcaggat

SEQ ID NO: 81586 - DNA, 25 bp, Artificial
  Probe
atgcttgttataccagaattcagga

SEQ ID NO: 81587 - DNA, 25 bp, Artificial
  Probe
catgcttgttataccagaattcagg

SEQ ID NO: 81588 - DNA, 25 bp, Artificial
  Probe
ggtcagttcatgcttgttataccag

SEQ ID NO: 81589 - DNA, 25 bp, Artificial
  Probe
ctggtcagttcatgcttgttatacc

SEQ ID NO: 81590 - DNA, 25 bp, Artificial
  Probe
tcctcttctacttcacacaacagaa

SEQ ID NO: 81591 - DNA, 25 bp, Artificial
  Probe
tgttataccagaattcaggatgtca

SEQ ID NO: 81592 - DNA, 25 bp, Artificial
  Probe
accctatcctcttctacttcacaca

SEQ ID NO: 81593 - DNA, 25 bp, Artificial
  Probe
tcatgcttgttataccagaattcag

SEQ ID NO: 81594 - DNA, 25 bp, Artificial
  Probe
acaggagagagaaataaatgtgttc

SEQ ID NO: 81595 - DNA, 25 bp, Artificial
  Probe
ttgttataccagaattcaggatgtc

SEQ ID NO: 81596 - DNA, 25 bp, Artificial
  Probe
cttgttataccagaattcaggatgt

SEQ ID NO: 81597 - DNA, 25 bp, Artificial
  Probe
ttcatgcttgttataccagaattca

SEQ ID NO: 81598 - DNA, 25 bp, Artificial
  Probe
ttataccagaattcaggatgtcatg

SEQ ID NO: 81599 - DNA, 25 bp, Artificial
  Probe
gttataccagaattcaggatgtcat

SEQ ID NO: 81600 - DNA, 25 bp, Artificial
  Probe
gttcatgcttgttataccagaattc

SEQ ID NO: 81601 - DNA, 25 bp, Artificial
  Probe
ggactggtcagttcatgcttgttat

SEQ ID NO: 81602 - DNA, 25 bp, Artificial
  Probe
caaattctaacaaaggtcttcccgc

SEQ ID NO: 81603 - DNA, 25 bp, Artificial
  Probe
gcaaattctaacaaaggtcttcccg

SEQ ID NO: 81604 - DNA, 25 bp, Artificial
  Probe
tcatgacaggataacaagctctaag

SEQ ID NO: 81605 - DNA, 25 bp, Artificial
  Probe
actgcaaattctaacaaaggtcttc

SEQ ID NO: 81606 - DNA, 25 bp, Artificial
  Probe
cactgcaaattctaacaaaggtctt

SEQ ID NO: 81607 - DNA, 25 bp, Artificial
  Probe
atagcactgcaaattctaacaaagg

SEQ ID NO: 81608 - DNA, 25 bp, Artificial
  Probe
tttgcacaggagagagaaataaatg

SEQ ID NO: 81609 - DNA, 25 bp, Artificial
  Probe
ctgcaaattctaacaaaggtcttcc

SEQ ID NO: 81610 - DNA, 25 bp, Artificial
  Probe
gaaataaatgtgttcttgtgtttgt

SEQ ID NO: 81611 - DNA, 25 bp, Artificial
  Probe
aaggaccaagtatgataatgagacg

SEQ ID NO: 81612 - DNA, 25 bp, Artificial
  Probe
taaggaccaagtatgataatgagac

SEQ ID NO: 81613 - DNA, 25 bp, Artificial
  Probe
gaagaagaatcacgaggaggagatg

SEQ ID NO: 81614 - DNA, 25 bp, Artificial
  Probe
aggaccaagtatgataatgagacgt

SEQ ID NO: 81615 - DNA, 25 bp, Artificial
  Probe
ttaaggaccaagtatgataatgaga

SEQ ID NO: 81616 - DNA, 25 bp, Artificial
  Probe
tgaagaagaatcacgaggaggagat

SEQ ID NO: 81617 - DNA, 25 bp, Artificial
  Probe
agttagtggaaagtgacatcaacaa

SEQ ID NO: 81618 - DNA, 25 bp, Artificial
  Probe
gttagtggaaagtgacatcaacaac

SEQ ID NO: 81619 - DNA, 25 bp, Artificial
  Probe
ctacctgaagaagaatcacgaggag

SEQ ID NO: 81620 - DNA, 25 bp, Artificial
  Probe
ttagtggaaagtgacatcaacaacc

SEQ ID NO: 81621 - DNA, 25 bp, Artificial
  Probe
gtatgagcagatggcagagaagaac

SEQ ID NO: 81622 - DNA, 25 bp, Artificial
  Probe
cagttagtggaaagtgacatcaaca

SEQ ID NO: 81623 - DNA, 25 bp, Artificial
  Probe
tcagttagtggaaagtgacatcaac

SEQ ID NO: 81624 - DNA, 25 bp, Artificial
  Probe
agtatgagcagatggcagagaagaa

SEQ ID NO: 81625 - DNA, 25 bp, Artificial
  Probe
ctgtgtgctggatgaactgactatg

SEQ ID NO: 81626 - DNA, 25 bp, Artificial
  Probe
tagtggaaagtgacatcaacaacct

SEQ ID NO: 81627 - DNA, 25 bp, Artificial
  Probe
ctgaagaagaatcacgaggaggaga

SEQ ID NO: 81628 - DNA, 25 bp, Artificial
  Probe
cagtatgagcagatggcagagaaga

SEQ ID NO: 81629 - DNA, 25 bp, Artificial
  Probe
tgtgtgctggatgaactgactatgt

SEQ ID NO: 81630 - DNA, 25 bp, Artificial
  Probe
gtggaaagtgacatcaacaaccttc

SEQ ID NO: 81631 - DNA, 25 bp, Artificial
  Probe
gtgtgctggatgaactgactatgtc

SEQ ID NO: 81632 - DNA, 25 bp, Artificial
  Probe
tacctgaagaagaatcacgaggagg

SEQ ID NO: 81633 - DNA, 25 bp, Artificial
  Probe
cctacctgaagaagaatcacgagga

SEQ ID NO: 81634 - DNA, 25 bp, Artificial
  Probe
agtggaaagtgacatcaacaacctt

SEQ ID NO: 81635 - DNA, 25 bp, Artificial
  Probe
tatgagcagatggcagagaagaacc

SEQ ID NO: 81636 - DNA, 25 bp, Artificial
  Probe
aagaagaatcacgaggaggagatgc

SEQ ID NO: 81637 - DNA, 25 bp, Artificial
  Probe
gaagaatcacgaggaggagatgctt

SEQ ID NO: 81638 - DNA, 25 bp, Artificial
  Probe
aaagatgtggaggcatggttagaag

SEQ ID NO: 81639 - DNA, 25 bp, Artificial
  Probe
aagaatcacgaggaggagatgcttg

SEQ ID NO: 81640 - DNA, 25 bp, Artificial
  Probe
cagctaatgacttaaggaccaagta

SEQ ID NO: 81641 - DNA, 25 bp, Artificial
  Probe
gctaatgacttaaggaccaagtatg

SEQ ID NO: 81642 - DNA, 25 bp, Artificial
  Probe
agctaatgacttaaggaccaagtat

SEQ ID NO: 81643 - DNA, 25 bp, Artificial
  Probe
caaagatgtggaggcatggttagaa

SEQ ID NO: 81644 - DNA, 25 bp, Artificial
  Probe
cttaaggaccaagtatgataatgag

SEQ ID NO: 81645 - DNA, 25 bp, Artificial
  Probe
ggcagctaatgacttaaggaccaag

SEQ ID NO: 81646 - DNA, 25 bp, Artificial
  Probe
cctgaagaagaatcacgaggaggag

SEQ ID NO: 81647 - DNA, 25 bp, Artificial
  Probe
tggaaagtgacatcaacaaccttcg

SEQ ID NO: 81648 - DNA, 25 bp, Artificial
  Probe
gaacgagatgagggaccagtatgag

SEQ ID NO: 81649 - DNA, 25 bp, Artificial
  Probe
gctgtgtgctggatgaactgactat

SEQ ID NO: 81650 - DNA, 25 bp, Artificial
  Probe
ctacttcaagaccatcgaggacctg

SEQ ID NO: 81651 - DNA, 25 bp, Artificial
  Probe
agaagaatcacgaggaggagatgct

SEQ ID NO: 81652 - DNA, 25 bp, Artificial
  Probe
gaaagtgacatcaacaaccttcgct

SEQ ID NO: 81653 - DNA, 25 bp, Artificial
  Probe
tgtgctggatgaactgactatgtcc

SEQ ID NO: 81654 - DNA, 25 bp, Artificial
  Probe
ctaatgacttaaggaccaagtatga

SEQ ID NO: 81655 - DNA, 25 bp, Artificial
  Probe
gatgagggaccagtatgagcagatg

SEQ ID NO: 81656 - DNA, 25 bp, Artificial
  Probe
aacaagtcagttcctaccatagaca

SEQ ID NO: 81657 - DNA, 25 bp, Artificial
  Probe
aagtcagttcctaccatagacagtg

SEQ ID NO: 81658 - DNA, 25 bp, Artificial
  Probe
caagtcagttcctaccatagacagt

SEQ ID NO: 81659 - DNA, 25 bp, Artificial
  Probe
acaagtcagttcctaccatagacag

SEQ ID NO: 81660 - DNA, 25 bp, Artificial
  Probe
aaagttgcgaaaggtgaaagagaaa

SEQ ID NO: 81661 - DNA, 25 bp, Artificial
  Probe
ttgcgaaaggtgaaagagaaagaag

SEQ ID NO: 81662 - DNA, 25 bp, Artificial
  Probe
cgaaaggtgaaagagaaagaagagc

SEQ ID NO: 81663 - DNA, 25 bp, Artificial
  Probe
gcgaaaggtgaaagagaaagaagag

SEQ ID NO: 81664 - DNA, 25 bp, Artificial
  Probe
gttgcgaaaggtgaaagagaaagaa

SEQ ID NO: 81665 - DNA, 25 bp, Artificial
  Probe
aagttgcgaaaggtgaaagagaaag

SEQ ID NO: 81666 - DNA, 25 bp, Artificial
  Probe
gtgaaagagaaagaagagctagaga

SEQ ID NO: 81667 - DNA, 25 bp, Artificial
  Probe
aaggtgaaagagaaagaagagctag

SEQ ID NO: 81668 - DNA, 25 bp, Artificial
  Probe
aaaggtgaaagagaaagaagagcta

SEQ ID NO: 81669 - DNA, 25 bp, Artificial
  Probe
aaagagaaagaagagctagagaagg

SEQ ID NO: 81670 - DNA, 25 bp, Artificial
  Probe
aagtggtggtgagtctgatgaattt

SEQ ID NO: 81671 - DNA, 25 bp, Artificial
  Probe
aaagtggtggtgagtctgatgaatt

SEQ ID NO: 81672 - DNA, 25 bp, Artificial
  Probe
caaagttgcgaaaggtgaaagagaa

SEQ ID NO: 81673 - DNA, 25 bp, Artificial
  Probe
ggtgaaagagaaagaagagctagag

SEQ ID NO: 81674 - DNA, 25 bp, Artificial
  Probe
tgaaagagaaagaagagctagagaa

SEQ ID NO: 81675 - DNA, 25 bp, Artificial
  Probe
aggtgaaagagaaagaagagctaga

SEQ ID NO: 81676 - DNA, 25 bp, Artificial
  Probe
gaaaggtgaaagagaaagaagagct

SEQ ID NO: 81677 - DNA, 25 bp, Artificial
  Probe
tgcgaaaggtgaaagagaaagaaga

SEQ ID NO: 81678 - DNA, 25 bp, Artificial
  Probe
aagagaaagaagagctagagaaggg

SEQ ID NO: 81679 - DNA, 25 bp, Artificial
  Probe
gaaagtggtggtgagtctgatgaat

SEQ ID NO: 81680 - DNA, 25 bp, Artificial
  Probe
gaaagagaaagaagagctagagaag

SEQ ID NO: 81681 - DNA, 25 bp, Artificial
  Probe
agttgcgaaaggtgaaagagaaaga

SEQ ID NO: 81682 - DNA, 25 bp, Artificial
  Probe
agtcagttcctaccatagacagtgg

SEQ ID NO: 81683 - DNA, 25 bp, Artificial
  Probe
gcaaatccactgttaaagctatcca

SEQ ID NO: 81684 - DNA, 25 bp, Artificial
  Probe
gagagtaaactcctcaggtgaaagt

SEQ ID NO: 81685 - DNA, 25 bp, Artificial
  Probe
aagaacaagtcagttcctaccatag

SEQ ID NO: 81686 - DNA, 25 bp, Artificial
  Probe
gaagaacaagtcagttcctaccata

SEQ ID NO: 81687 - DNA, 25 bp, Artificial
  Probe
atcagaagaacaagtcagttcctac

SEQ ID NO: 81688 - DNA, 25 bp, Artificial
  Probe
aatcagaagaacaagtcagttccta

SEQ ID NO: 81689 - DNA, 25 bp, Artificial
  Probe
caaatccactgttaaagctatccag

SEQ ID NO: 81690 - DNA, 25 bp, Artificial
  Probe
gaacaagtcagttcctaccatagac

SEQ ID NO: 81691 - DNA, 25 bp, Artificial
  Probe
agaacaagtcagttcctaccataga

SEQ ID NO: 81692 - DNA, 25 bp, Artificial
  Probe
agagtaaactcctcaggtgaaagtg

SEQ ID NO: 81693 - DNA, 25 bp, Artificial
  Probe
aaatccactgttaaagctatccagg

SEQ ID NO: 81694 - DNA, 25 bp, Artificial
  Probe
agaagaacaagtcagttcctaccat

SEQ ID NO: 81695 - DNA, 25 bp, Artificial
  Probe
atccactgttaaagctatccaggaa

SEQ ID NO: 81696 - DNA, 25 bp, Artificial
  Probe
aatccactgttaaagctatccagga

SEQ ID NO: 81697 - DNA, 25 bp, Artificial
  Probe
tcagaagaacaagtcagttcctacc

SEQ ID NO: 81698 - DNA, 25 bp, Artificial
  Probe
cgagagtaaactcctcaggtgaaag

SEQ ID NO: 81699 - DNA, 25 bp, Artificial
  Probe
atagacagtgggaatgaggacgatg

SEQ ID NO: 81700 - DNA, 25 bp, Artificial
  Probe
gtaaactcctcaggtgaaagtggtg

SEQ ID NO: 81701 - DNA, 25 bp, Artificial
  Probe
ccgaggacatcagtagtaatagttc

SEQ ID NO: 81702 - DNA, 25 bp, Artificial
  Probe
accgaggacatcagtagtaatagtt

SEQ ID NO: 81703 - DNA, 25 bp, Artificial
  Probe
aaccgaggacatcagtagtaatagt

SEQ ID NO: 81704 - DNA, 25 bp, Artificial
  Probe
cgaggacatcagtagtaatagttct

SEQ ID NO: 81705 - DNA, 25 bp, Artificial
  Probe
acatcagtagtaatagttctcagca

SEQ ID NO: 81706 - DNA, 25 bp, Artificial
  Probe
gacatcagtagtaatagttctcagc

SEQ ID NO: 81707 - DNA, 25 bp, Artificial
  Probe
gtagtaatagttctcagcaagacac

SEQ ID NO: 81708 - DNA, 25 bp, Artificial
  Probe
agtagtaatagttctcagcaagaca

SEQ ID NO: 81709 - DNA, 25 bp, Artificial
  Probe
cagtagtaatagttctcagcaagac

SEQ ID NO: 81710 - DNA, 25 bp, Artificial
  Probe
tcagtagtaatagttctcagcaaga

SEQ ID NO: 81711 - DNA, 25 bp, Artificial
  Probe
tagtaatagttctcagcaagacact

SEQ ID NO: 81712 - DNA, 25 bp, Artificial
  Probe
catcagtagtaatagttctcagcaa

SEQ ID NO: 81713 - DNA, 25 bp, Artificial
  Probe
aggacatcagtagtaatagttctca

SEQ ID NO: 81714 - DNA, 25 bp, Artificial
  Probe
ggacatcagtagtaatagttctcag

SEQ ID NO: 81715 - DNA, 25 bp, Artificial
  Probe
agtaatagttctcagcaagacactg

SEQ ID NO: 81716 - DNA, 25 bp, Artificial
  Probe
atcagtagtaatagttctcagcaag

SEQ ID NO: 81717 - DNA, 25 bp, Artificial
  Probe
gaggacatcagtagtaatagttctc

SEQ ID NO: 81718 - DNA, 25 bp, Artificial
  Probe
aaaccgaggacatcagtagtaatag

SEQ ID NO: 81719 - DNA, 25 bp, Artificial
  Probe
aagcctaaagcacagtaataaagac

SEQ ID NO: 81720 - DNA, 25 bp, Artificial
  Probe
cagaagcctaaagcacagtaataaa

SEQ ID NO: 81721 - DNA, 25 bp, Artificial
  Probe
gaagcctaaagcacagtaataaaga

SEQ ID NO: 81722 - DNA, 25 bp, Artificial
  Probe
agaagcctaaagcacagtaataaag

SEQ ID NO: 81723 - DNA, 25 bp, Artificial
  Probe
gttaagaacttctatggtcgattca

SEQ ID NO: 81724 - DNA, 25 bp, Artificial
  Probe
agcctaaagcacagtaataaagacg

SEQ ID NO: 81725 - DNA, 25 bp, Artificial
  Probe
gataaagactcaacctcctccaaac

SEQ ID NO: 81726 - DNA, 25 bp, Artificial
  Probe
gcagaagcctaaagcacagtaataa

SEQ ID NO: 81727 - DNA, 25 bp, Artificial
  Probe
ataaagactcaacctcctccaaact

SEQ ID NO: 81728 - DNA, 25 bp, Artificial
  Probe
gctaacaataacgagcaattctgaa

SEQ ID NO: 81729 - DNA, 25 bp, Artificial
  Probe
acaagaatggtaaagaggttgacag

SEQ ID NO: 81730 - DNA, 25 bp, Artificial
  Probe
gacaagaatggtaaagaggttgaca

SEQ ID NO: 81731 - DNA, 25 bp, Artificial
  Probe
taaagactcaacctcctccaaactt

SEQ ID NO: 81732 - DNA, 25 bp, Artificial
  Probe
ttaagaacttctatggtcgattcaa

SEQ ID NO: 81733 - DNA, 25 bp, Artificial
  Probe
agacgacaagaatggtaaagaggtt

SEQ ID NO: 81734 - DNA, 25 bp, Artificial
  Probe
ctaacaataacgagcaattctgaaa

SEQ ID NO: 81735 - DNA, 25 bp, Artificial
  Probe
agcagaagcctaaagcacagtaata

SEQ ID NO: 81736 - DNA, 25 bp, Artificial
  Probe
cgacaagaatggtaaagaggttgac

SEQ ID NO: 81737 - DNA, 25 bp, Artificial
  Probe
gacgacaagaatggtaaagaggttg

SEQ ID NO: 81738 - DNA, 25 bp, Artificial
  Probe
caaggaggataagttagcagcgaac

SEQ ID NO: 81739 - DNA, 25 bp, Artificial
  Probe
ggctaacaataacgagcaattctga

SEQ ID NO: 81740 - DNA, 25 bp, Artificial
  Probe
aagaatggtaaagaggttgacagca

SEQ ID NO: 81741 - DNA, 25 bp, Artificial
  Probe
gatgagttaagaacttctatggtcg

SEQ ID NO: 81742 - DNA, 25 bp, Artificial
  Probe
aggatgagttaagaacttctatggt

SEQ ID NO: 81743 - DNA, 25 bp, Artificial
  Probe
caagaatggtaaagaggttgacagc

SEQ ID NO: 81744 - DNA, 25 bp, Artificial
  Probe
acgacaagaatggtaaagaggttga

SEQ ID NO: 81745 - DNA, 25 bp, Artificial
  Probe
cagacgacaagaatggtaaagaggt

SEQ ID NO: 81746 - DNA, 25 bp, Artificial
  Probe
aggtacattcatagcactcagtaac

SEQ ID NO: 81747 - DNA, 25 bp, Artificial
  Probe
caggtacattcatagcactcagtaa

SEQ ID NO: 81748 - DNA, 25 bp, Artificial
  Probe
ggtacattcatagcactcagtaaca

SEQ ID NO: 81749 - DNA, 25 bp, Artificial
  Probe
acaggtacattcatagcactcagta

SEQ ID NO: 81750 - DNA, 25 bp, Artificial
  Probe
tacattcatagcactcagtaacatt

SEQ ID NO: 81751 - DNA, 25 bp, Artificial
  Probe
gtacattcatagcactcagtaacat

SEQ ID NO: 81752 - DNA, 25 bp, Artificial
  Probe
aggctacctgctgtaagattattaa

SEQ ID NO: 81753 - DNA, 25 bp, Artificial
  Probe
aaggctacctgctgtaagattatta

SEQ ID NO: 81754 - DNA, 25 bp, Artificial
  Probe
gacaggtacattcatagcactcagt

SEQ ID NO: 81755 - DNA, 25 bp, Artificial
  Probe
tatccgtcctgattcctttggtata

SEQ ID NO: 81756 - DNA, 25 bp, Artificial
  Probe
ttaatatccgtcctgattcctttgg

SEQ ID NO: 81757 - DNA, 25 bp, Artificial
  Probe
atacgagactttctggttactttca

SEQ ID NO: 81758 - DNA, 25 bp, Artificial
  Probe
catacgagactttctggttactttc

SEQ ID NO: 81759 - DNA, 25 bp, Artificial
  Probe
atccgtcctgattcctttggtatat

SEQ ID NO: 81760 - DNA, 25 bp, Artificial
  Probe
atatccgtcctgattcctttggtat

SEQ ID NO: 81761 - DNA, 25 bp, Artificial
  Probe
aatatccgtcctgattcctttggta

SEQ ID NO: 81762 - DNA, 25 bp, Artificial
  Probe
taatatccgtcctgattcctttggt

SEQ ID NO: 81763 - DNA, 25 bp, Artificial
  Probe
acattcatagcactcagtaacattt

SEQ ID NO: 81764 - DNA, 25 bp, Artificial
  Probe
ggacaggtacattcatagcactcag

SEQ ID NO: 81765 - DNA, 25 bp, Artificial
  Probe
ggctacctgctgtaagattattaaa

SEQ ID NO: 81766 - DNA, 25 bp, Artificial
  Probe
gcatacgagactttctggttacttt

SEQ ID NO: 81767 - DNA, 25 bp, Artificial
  Probe
tccgtcctgattcctttggtatata

SEQ ID NO: 81768 - DNA, 25 bp, Artificial
  Probe
ccgtcctgattcctttggtatatat

SEQ ID NO: 81769 - DNA, 25 bp, Artificial
  Probe
ctaatttcaaatgaagatccctgcc

SEQ ID NO: 81770 - DNA, 25 bp, Artificial
  Probe
atttcaaatgaagatccctgcctta

SEQ ID NO: 81771 - DNA, 25 bp, Artificial
  Probe
taatttcaaatgaagatccctgcct

SEQ ID NO: 81772 - DNA, 25 bp, Artificial
  Probe
tgctaatttcaaatgaagatccctg

SEQ ID NO: 81773 - DNA, 25 bp, Artificial
  Probe
cttaagacttcagagaccacacatg

SEQ ID NO: 81774 - DNA, 25 bp, Artificial
  Probe
ttcaaatgaagatccctgccttaaa

SEQ ID NO: 81775 - DNA, 25 bp, Artificial
  Probe
tttcaaatgaagatccctgccttaa

SEQ ID NO: 81776 - DNA, 25 bp, Artificial
  Probe
attctgctacaaagtggtacaagat

SEQ ID NO: 81777 - DNA, 25 bp, Artificial
  Probe
gctaatttcaaatgaagatccctgc

SEQ ID NO: 81778 - DNA, 25 bp, Artificial
  Probe
tctgctacaaagtggtacaagattt

SEQ ID NO: 81779 - DNA, 25 bp, Artificial
  Probe
ttctgctacaaagtggtacaagatt

SEQ ID NO: 81780 - DNA, 25 bp, Artificial
  Probe
aattctgctacaaagtggtacaaga

SEQ ID NO: 81781 - DNA, 25 bp, Artificial
  Probe
agcatacgagactttctggttactt

SEQ ID NO: 81782 - DNA, 25 bp, Artificial
  Probe
aatttcaaatgaagatccctgcctt

SEQ ID NO: 81783 - DNA, 25 bp, Artificial
  Probe
atgctaatttcaaatgaagatccct

SEQ ID NO: 81784 - DNA, 25 bp, Artificial
  Probe
aaaggctacctgctgtaagattatt

SEQ ID NO: 81785 - DNA, 25 bp, Artificial
  Probe
ctaaaggctacctgctgtaagatta

SEQ ID NO: 81786 - DNA, 25 bp, Artificial
  Probe
taaaggctacctgctgtaagattat

SEQ ID NO: 81787 - DNA, 25 bp, Artificial
  Probe
ttaagacttcagagaccacacatgg

SEQ ID NO: 81788 - DNA, 25 bp, Artificial
  Probe
tatgttctaaaggctacctgctgta

SEQ ID NO: 81789 - DNA, 25 bp, Artificial
  Probe
ttgttatgttctaaaggctacctgc

SEQ ID NO: 81790 - DNA, 25 bp, Artificial
  Probe
tttgttatgttctaaaggctacctg

SEQ ID NO: 81791 - DNA, 25 bp, Artificial
  Probe
catcacatgcaatctatctcattcg

SEQ ID NO: 81792 - DNA, 25 bp, Artificial
  Probe
ccatcacatgcaatctatctcattc

SEQ ID NO: 81793 - DNA, 25 bp, Artificial
  Probe
accatcacatgcaatctatctcatt

SEQ ID NO: 81794 - DNA, 25 bp, Artificial
  Probe
aaccatcacatgcaatctatctcat

SEQ ID NO: 81795 - DNA, 25 bp, Artificial
  Probe
caaccatcacatgcaatctatctca

SEQ ID NO: 81796 - DNA, 25 bp, Artificial
  Probe
atcacatgcaatctatctcattcgc

SEQ ID NO: 81797 - DNA, 25 bp, Artificial
  Probe
ccaaccatcacatgcaatctatctc

SEQ ID NO: 81798 - DNA, 25 bp, Artificial
  Probe
aacagatcattgccaaccatcacat

SEQ ID NO: 81799 - DNA, 25 bp, Artificial
  Probe
gagtaacctgaagtttgctggaatg

SEQ ID NO: 81800 - DNA, 25 bp, Artificial
  Probe
ggagtaacctgaagtttgctggaat

SEQ ID NO: 81801 - DNA, 25 bp, Artificial
  Probe
tatgttgccaaagaccctgtgaatc

SEQ ID NO: 81802 - DNA, 25 bp, Artificial
  Probe
ctatgttgccaaagaccctgtgaat

SEQ ID NO: 81803 - DNA, 25 bp, Artificial
  Probe
acagatcattgccaaccatcacatg

SEQ ID NO: 81804 - DNA, 25 bp, Artificial
  Probe
gccaaccatcacatgcaatctatct

SEQ ID NO: 81805 - DNA, 25 bp, Artificial
  Probe
caaacagatcattgccaaccatcac

SEQ ID NO: 81806 - DNA, 25 bp, Artificial
  Probe
ctgggaaggagtaacctgaagtttg

SEQ ID NO: 81807 - DNA, 25 bp, Artificial
  Probe
aaacagatcattgccaaccatcaca

SEQ ID NO: 81808 - DNA, 25 bp, Artificial
  Probe
gtttcctacttggttcggtacatgg

SEQ ID NO: 81809 - DNA, 25 bp, Artificial
  Probe
ggtttcctacttggttcggtacatg

SEQ ID NO: 81810 - DNA, 25 bp, Artificial
  Probe
gaggctatcagtttggtgtgtgaag

SEQ ID NO: 81811 - DNA, 25 bp, Artificial
  Probe
agtaacctgaagtttgctggaatgc

SEQ ID NO: 81812 - DNA, 25 bp, Artificial
  Probe
cgatcactctcactgtgtctaccag

SEQ ID NO: 81813 - DNA, 25 bp, Artificial
  Probe
gatcactctcactgtgtctaccagc

SEQ ID NO: 81814 - DNA, 25 bp, Artificial
  Probe
gaaggagtaacctgaagtttgctgg

SEQ ID NO: 81815 - DNA, 25 bp, Artificial
  Probe
ggaaggagtaacctgaagtttgctg

SEQ ID NO: 81816 - DNA, 25 bp, Artificial
  Probe
ttgcgtggaggtcttacagtcaatg

SEQ ID NO: 81817 - DNA, 25 bp, Artificial
  Probe
gttgcgtggaggtcttacagtcaat

SEQ ID NO: 81818 - DNA, 25 bp, Artificial
  Probe
gtctaccagcagccttaacctcatg

SEQ ID NO: 81819 - DNA, 25 bp, Artificial
  Probe
aggagtaacctgaagtttgctggaa

SEQ ID NO: 81820 - DNA, 25 bp, Artificial
  Probe
aaggagtaacctgaagtttgctgga

SEQ ID NO: 81821 - DNA, 25 bp, Artificial
  Probe
cctgggaaggagtaacctgaagttt

SEQ ID NO: 81822 - DNA, 25 bp, Artificial
  Probe
ctatcagtttggtgtgtgaagctgt

SEQ ID NO: 81823 - DNA, 25 bp, Artificial
  Probe
cagatcattgccaaccatcacatgc

SEQ ID NO: 81824 - DNA, 25 bp, Artificial
  Probe
gggtttcctacttggttcggtacat

SEQ ID NO: 81825 - DNA, 25 bp, Artificial
  Probe
tatcagtttggtgtgtgaagctgtg

SEQ ID NO: 81826 - DNA, 25 bp, Artificial
  Probe
tttcctacttggttcggtacatggg

SEQ ID NO: 81827 - DNA, 25 bp, Artificial
  Probe
atcactctcactgtgtctaccagca

SEQ ID NO: 81828 - DNA, 25 bp, Artificial
  Probe
gtaacctgaagtttgctggaatgcc

SEQ ID NO: 81829 - DNA, 25 bp, Artificial
  Probe
atgcaatctatctcattcgcgtctg

SEQ ID NO: 81830 - DNA, 25 bp, Artificial
  Probe
catgcaatctatctcattcgcgtct

SEQ ID NO: 81831 - DNA, 25 bp, Artificial
  Probe
tgccaaccatcacatgcaatctatc

SEQ ID NO: 81832 - DNA, 25 bp, Artificial
  Probe
caatctatctcattcgcgtctggtg

SEQ ID NO: 81833 - DNA, 25 bp, Artificial
  Probe
acatgcaatctatctcattcgcgtc

SEQ ID NO: 81834 - DNA, 25 bp, Artificial
  Probe
tcacatgcaatctatctcattcgcg

SEQ ID NO: 81835 - DNA, 25 bp, Artificial
  Probe
caatgcgagcccttgacttcaatac

SEQ ID NO: 81836 - DNA, 25 bp, Artificial
  Probe
cttagtcttgctttgatttggtcct

SEQ ID NO: 81837 - DNA, 25 bp, Artificial
  Probe
ttagtcttgctttgatttggtcctg

SEQ ID NO: 81838 - DNA, 25 bp, Artificial
  Probe
tagtcttgctttgatttggtcctga

SEQ ID NO: 81839 - DNA, 25 bp, Artificial
  Probe
catgatccagtactaccagaatgat

SEQ ID NO: 81840 - DNA, 25 bp, Artificial
  Probe
gacatgatccagtactaccagaatg

SEQ ID NO: 81841 - DNA, 25 bp, Artificial
  Probe
acatgatccagtactaccagaatga

SEQ ID NO: 81842 - DNA, 25 bp, Artificial
  Probe
atccagtactaccagaatgatatcc

SEQ ID NO: 81843 - DNA, 25 bp, Artificial
  Probe
cttccaactcacacctagcttagtc

SEQ ID NO: 81844 - DNA, 25 bp, Artificial
  Probe
gcttagtcttgctttgatttggtcc

SEQ ID NO: 81845 - DNA, 25 bp, Artificial
  Probe
ccaactcacacctagcttagtcttg

SEQ ID NO: 81846 - DNA, 25 bp, Artificial
  Probe
tccaactcacacctagcttagtctt

SEQ ID NO: 81847 - DNA, 25 bp, Artificial
  Probe
ttccaactcacacctagcttagtct

SEQ ID NO: 81848 - DNA, 25 bp, Artificial
  Probe
cctactgaggagactgtacctgaag

SEQ ID NO: 81849 - DNA, 25 bp, Artificial
  Probe
cgacatgatccagtactaccagaat

SEQ ID NO: 81850 - DNA, 25 bp, Artificial
  Probe
tgatccagtactaccagaatgatat

SEQ ID NO: 81851 - DNA, 25 bp, Artificial
  Probe
atgatccagtactaccagaatgata

SEQ ID NO: 81852 - DNA, 25 bp, Artificial
  Probe
ctacgacatgatccagtactaccag

SEQ ID NO: 81853 - DNA, 25 bp, Artificial
  Probe
gacctacgacatgatccagtactac

SEQ ID NO: 81854 - DNA, 25 bp, Artificial
  Probe
tacgacatgatccagtactaccaga

SEQ ID NO: 81855 - DNA, 25 bp, Artificial
  Probe
tccttccaactcacacctagcttag

SEQ ID NO: 81856 - DNA, 25 bp, Artificial
  Probe
gatccagtactaccagaatgatatc

SEQ ID NO: 81857 - DNA, 25 bp, Artificial
  Probe
agtcttgctttgatttggtcctgag

SEQ ID NO: 81858 - DNA, 25 bp, Artificial
  Probe
caactcacacctagcttagtcttgc

SEQ ID NO: 81859 - DNA, 25 bp, Artificial
  Probe
ctggttacactcatgttggacacag

SEQ ID NO: 81860 - DNA, 25 bp, Artificial
  Probe
gtccttccaactcacacctagctta

SEQ ID NO: 81861 - DNA, 25 bp, Artificial
  Probe
ctactgaggagactgtacctgaagc

SEQ ID NO: 81862 - DNA, 25 bp, Artificial
  Probe
acgacatgatccagtactaccagaa

SEQ ID NO: 81863 - DNA, 25 bp, Artificial
  Probe
tccagtactaccagaatgatatccc

SEQ ID NO: 81864 - DNA, 25 bp, Artificial
  Probe
ccttccaactcacacctagcttagt

SEQ ID NO: 81865 - DNA, 25 bp, Artificial
  Probe
cctacgacatgatccagtactacca

SEQ ID NO: 81866 - DNA, 25 bp, Artificial
  Probe
acctacgacatgatccagtactacc

SEQ ID NO: 81867 - DNA, 25 bp, Artificial
  Probe
ctagcttagtcttgctttgatttgg

SEQ ID NO: 81868 - DNA, 25 bp, Artificial
  Probe
cctagcttagtcttgctttgatttg

SEQ ID NO: 81869 - DNA, 25 bp, Artificial
  Probe
aagatcatccaaaactgtttcctca

SEQ ID NO: 81870 - DNA, 25 bp, Artificial
  Probe
acctagcttagtcttgctttgattt

SEQ ID NO: 81871 - DNA, 25 bp, Artificial
  Probe
gaagatcatccaaaactgtttcctc

SEQ ID NO: 81872 - DNA, 25 bp, Artificial
  Probe
tagcttagtcttgctttgatttggt

SEQ ID NO: 81873 - DNA, 25 bp, Artificial
  Probe
cacctagcttagtcttgctttgatt

SEQ ID NO: 81874 - DNA, 25 bp, Artificial
  Probe
tgaagatcatccaaaactgtttcct

SEQ ID NO: 81875 - DNA, 25 bp, Artificial
  Probe
ggacctacgacatgatccagtacta

SEQ ID NO: 81876 - DNA, 25 bp, Artificial
  Probe
gagactgtacctgaagccttgagtg

SEQ ID NO: 81877 - DNA, 25 bp, Artificial
  Probe
agcttagtcttgctttgatttggtc

SEQ ID NO: 81878 - DNA, 25 bp, Artificial
  Probe
gtcttgctttgatttggtcctgagg

SEQ ID NO: 81879 - DNA, 25 bp, Artificial
  Probe
tggtacatgaagtattttcctgtgt

SEQ ID NO: 81880 - DNA, 25 bp, Artificial
  Probe
acacctagcttagtcttgctttgat

SEQ ID NO: 81881 - DNA, 25 bp, Artificial
  Probe
atctagtgaacgctacgcttacatt

SEQ ID NO: 81882 - DNA, 25 bp, Artificial
  Probe
aatctagtgaacgctacgcttacat

SEQ ID NO: 81883 - DNA, 25 bp, Artificial
  Probe
gtgaacgctacgcttacatttattt

SEQ ID NO: 81884 - DNA, 25 bp, Artificial
  Probe
tagtgaacgctacgcttacatttat

SEQ ID NO: 81885 - DNA, 25 bp, Artificial
  Probe
cttgtgtggaatctagtgaacgcta

SEQ ID NO: 81886 - DNA, 25 bp, Artificial
  Probe
gaatctagtgaacgctacgcttaca

SEQ ID NO: 81887 - DNA, 25 bp, Artificial
  Probe
agtgaacgctacgcttacatttatt

SEQ ID NO: 81888 - DNA, 25 bp, Artificial
  Probe
ttgtgtggaatctagtgaacgctac

SEQ ID NO: 81889 - DNA, 25 bp, Artificial
  Probe
ctagtgaacgctacgcttacattta

SEQ ID NO: 81890 - DNA, 25 bp, Artificial
  Probe
gaggctggtgatgaggatatctaag

SEQ ID NO: 81891 - DNA, 25 bp, Artificial
  Probe
ggaatctagtgaacgctacgcttac

SEQ ID NO: 81892 - DNA, 25 bp, Artificial
  Probe
gagttcgctcttgtgtggaatctag

SEQ ID NO: 81893 - DNA, 25 bp, Artificial
  Probe
tggaatctagtgaacgctacgctta

SEQ ID NO: 81894 - DNA, 25 bp, Artificial
  Probe
ctcttgtgtggaatctagtgaacgc

SEQ ID NO: 81895 - DNA, 25 bp, Artificial
  Probe
gctcttgtgtggaatctagtgaacg

SEQ ID NO: 81896 - DNA, 25 bp, Artificial
  Probe
cgctcttgtgtggaatctagtgaac

SEQ ID NO: 81897 - DNA, 25 bp, Artificial
  Probe
tctagtgaacgctacgcttacattt

SEQ ID NO: 81898 - DNA, 25 bp, Artificial
  Probe
tctatgcttctttgtggtggagttc

SEQ ID NO: 81899 - DNA, 25 bp, Artificial
  Probe
tcgctcttgtgtggaatctagtgaa

SEQ ID NO: 81900 - DNA, 25 bp, Artificial
  Probe
gttcgctcttgtgtggaatctagtg

SEQ ID NO: 81901 - DNA, 25 bp, Artificial
  Probe
ttcgctcttgtgtggaatctagtga

SEQ ID NO: 81902 - DNA, 25 bp, Artificial
  Probe
agttcgctcttgtgtggaatctagt

SEQ ID NO: 81903 - DNA, 25 bp, Artificial
  Probe
tcttgtgtggaatctagtgaacgct

SEQ ID NO: 81904 - DNA, 25 bp, Artificial
  Probe
gatgaggatatctaagcagcgtgtc

SEQ ID NO: 81905 - DNA, 25 bp, Artificial
  Probe
ggaggctggtgatgaggatatctaa

SEQ ID NO: 81906 - DNA, 25 bp, Artificial
  Probe
ctctatgcttctttgtggtggagtt

SEQ ID NO: 81907 - DNA, 25 bp, Artificial
  Probe
ctggtgatgaggatatctaagcagc

SEQ ID NO: 81908 - DNA, 25 bp, Artificial
  Probe
gtgatgaggatatctaagcagcgtg

SEQ ID NO: 81909 - DNA, 25 bp, Artificial
  Probe
acgctacgcttacatttattttctc

SEQ ID NO: 81910 - DNA, 25 bp, Artificial
  Probe
aacgctacgcttacatttattttct

SEQ ID NO: 81911 - DNA, 25 bp, Artificial
  Probe
tgaacgctacgcttacatttatttt

SEQ ID NO: 81912 - DNA, 25 bp, Artificial
  Probe
atttattttctcgtgttgctgtgtg

SEQ ID NO: 81913 - DNA, 25 bp, Artificial
  Probe
catttattttctcgtgttgctgtgt

SEQ ID NO: 81914 - DNA, 25 bp, Artificial
  Probe
cgctacgcttacatttattttctcg

SEQ ID NO: 81915 - DNA, 25 bp, Artificial
  Probe
gaacgctacgcttacatttattttc

SEQ ID NO: 81916 - DNA, 25 bp, Artificial
  Probe
tgatgaggatatctaagcagcgtgt

SEQ ID NO: 81917 - DNA, 25 bp, Artificial
  Probe
ggagttcgctcttgtgtggaatcta

SEQ ID NO: 81918 - DNA, 25 bp, Artificial
  Probe
catcctgaaggtgtccatgaaagag

SEQ ID NO: 81919 - DNA, 25 bp, Artificial
  Probe
tttattttctcgtgttgctgtgtga

SEQ ID NO: 81920 - DNA, 25 bp, Artificial
  Probe
aggaggctggtgatgaggatatcta

SEQ ID NO: 81921 - DNA, 25 bp, Artificial
  Probe
tgtgtggaatctagtgaacgctacg

SEQ ID NO: 81922 - DNA, 25 bp, Artificial
  Probe
gcttacatttattttctcgtgttgc

SEQ ID NO: 81923 - DNA, 25 bp, Artificial
  Probe
ctatgcttctttgtggtggagttcg

SEQ ID NO: 81924 - DNA, 25 bp, Artificial
  Probe
tacatttattttctcgtgttgctgt

SEQ ID NO: 81925 - DNA, 25 bp, Artificial
  Probe
cgcttacatttattttctcgtgttg

SEQ ID NO: 81926 - DNA, 25 bp, Artificial
  Probe
tctcaactatgtccacaatgtatca

SEQ ID NO: 81927 - DNA, 25 bp, Artificial
  Probe
ctatgtccacaatgtatcatcacct

SEQ ID NO: 81928 - DNA, 25 bp, Artificial
  Probe
tatgtccacaatgtatcatcacctc

SEQ ID NO: 81929 - DNA, 25 bp, Artificial
  Probe
actatgtccacaatgtatcatcacc

SEQ ID NO: 81930 - DNA, 25 bp, Artificial
  Probe
tccacaatgtatcatcacctccata

SEQ ID NO: 81931 - DNA, 25 bp, Artificial
  Probe
aactatgtccacaatgtatcatcac

SEQ ID NO: 81932 - DNA, 25 bp, Artificial
  Probe
caactatgtccacaatgtatcatca

SEQ ID NO: 81933 - DNA, 25 bp, Artificial
  Probe
ttctcaactatgtccacaatgtatc

SEQ ID NO: 81934 - DNA, 25 bp, Artificial
  Probe
gttctcaactatgtccacaatgtat

SEQ ID NO: 81935 - DNA, 25 bp, Artificial
  Probe
tcaactatgtccacaatgtatcatc

SEQ ID NO: 81936 - DNA, 25 bp, Artificial
  Probe
ctcaactatgtccacaatgtatcat

SEQ ID NO: 81937 - DNA, 25 bp, Artificial
  Probe
tgttctcaactatgtccacaatgta

SEQ ID NO: 81938 - DNA, 25 bp, Artificial
  Probe
ctgttctcaactatgtccacaatgt

SEQ ID NO: 81939 - DNA, 25 bp, Artificial
  Probe
gtatcatcacctccatactcatagc

SEQ ID NO: 81940 - DNA, 25 bp, Artificial
  Probe
caatgtatcatcacctccatactca

SEQ ID NO: 81941 - DNA, 25 bp, Artificial
  Probe
acaatgtatcatcacctccatactc

SEQ ID NO: 81942 - DNA, 25 bp, Artificial
  Probe
cacaatgtatcatcacctccatact

SEQ ID NO: 81943 - DNA, 25 bp, Artificial
  Probe
aatgtatcatcacctccatactcat

SEQ ID NO: 81944 - DNA, 25 bp, Artificial
  Probe
tatcatcacctccatactcatagct

SEQ ID NO: 81945 - DNA, 25 bp, Artificial
  Probe
tgtatcatcacctccatactcatag

SEQ ID NO: 81946 - DNA, 25 bp, Artificial
  Probe
ccacaatgtatcatcacctccatac

SEQ ID NO: 81947 - DNA, 25 bp, Artificial
  Probe
gtccacaatgtatcatcacctccat

SEQ ID NO: 81948 - DNA, 25 bp, Artificial
  Probe
atgtccacaatgtatcatcacctcc

SEQ ID NO: 81949 - DNA, 25 bp, Artificial
  Probe
catcacctccatactcatagctgta

SEQ ID NO: 81950 - DNA, 25 bp, Artificial
  Probe
agaactatcagaccagcttacagag

SEQ ID NO: 81951 - DNA, 25 bp, Artificial
  Probe
gagaactatcagaccagcttacaga

SEQ ID NO: 81952 - DNA, 25 bp, Artificial
  Probe
gaagcattgtgtctctgaagtaaag

SEQ ID NO: 81953 - DNA, 25 bp, Artificial
  Probe
atgtatcatcacctccatactcata

SEQ ID NO: 81954 - DNA, 25 bp, Artificial
  Probe
gctgttctcaactatgtccacaatg

SEQ ID NO: 81955 - DNA, 25 bp, Artificial
  Probe
atcatcacctccatactcatagctg

SEQ ID NO: 81956 - DNA, 25 bp, Artificial
  Probe
ttgagaactatcagaccagcttaca

SEQ ID NO: 81957 - DNA, 25 bp, Artificial
  Probe
tgtgtctctgaagtaaagaaagtga

SEQ ID NO: 81958 - DNA, 25 bp, Artificial
  Probe
gcattgtgtctctgaagtaaagaaa

SEQ ID NO: 81959 - DNA, 25 bp, Artificial
  Probe
tctctgaagtaaagaaagtgatggt

SEQ ID NO: 81960 - DNA, 25 bp, Artificial
  Probe
agcattgtgtctctgaagtaaagaa

SEQ ID NO: 81961 - DNA, 25 bp, Artificial
  Probe
aagcattgtgtctctgaagtaaaga

SEQ ID NO: 81962 - DNA, 25 bp, Artificial
  Probe
agaagcattgtgtctctgaagtaaa

SEQ ID NO: 81963 - DNA, 25 bp, Artificial
  Probe
ctctgaagtaaagaaagtgatggtc

SEQ ID NO: 81964 - DNA, 25 bp, Artificial
  Probe
gtctctgaagtaaagaaagtgatgg

SEQ ID NO: 81965 - DNA, 25 bp, Artificial
  Probe
ttgtgtctctgaagtaaagaaagtg

SEQ ID NO: 81966 - DNA, 25 bp, Artificial
  Probe
gaactatcagaccagcttacagagt

SEQ ID NO: 81967 - DNA, 25 bp, Artificial
  Probe
cctccatactcatagctgtattcaa

SEQ ID NO: 81968 - DNA, 25 bp, Artificial
  Probe
cacctccatactcatagctgtattc

SEQ ID NO: 81969 - DNA, 25 bp, Artificial
  Probe
agttcagacttgtaaagcatacctt

SEQ ID NO: 81970 - DNA, 25 bp, Artificial
  Probe
tgtaaccctttgagaactatcagac

SEQ ID NO: 81971 - DNA, 25 bp, Artificial
  Probe
cattggtgtcatcacatacatactg

SEQ ID NO: 81972 - DNA, 25 bp, Artificial
  Probe
ccattggtgtcatcacatacatact

SEQ ID NO: 81973 - DNA, 25 bp, Artificial
  Probe
tccattggtgtcatcacatacatac

SEQ ID NO: 81974 - DNA, 25 bp, Artificial
  Probe
gtccattggtgtcatcacatacata

SEQ ID NO: 81975 - DNA, 25 bp, Artificial
  Probe
attggtgtcatcacatacatactgc

SEQ ID NO: 81976 - DNA, 25 bp, Artificial
  Probe
ttggtgtcatcacatacatactgct

SEQ ID NO: 81977 - DNA, 25 bp, Artificial
  Probe
ctttatttgccatctgcttgagaag

SEQ ID NO: 81978 - DNA, 25 bp, Artificial
  Probe
agattcagaagaactttgccaagag

SEQ ID NO: 81979 - DNA, 25 bp, Artificial
  Probe
tgaggagaactccaagataatgatc

SEQ ID NO: 81980 - DNA, 25 bp, Artificial
  Probe
ctgaggagaactccaagataatgat

SEQ ID NO: 81981 - DNA, 25 bp, Artificial
  Probe
actttatttgccatctgcttgagaa

SEQ ID NO: 81982 - DNA, 25 bp, Artificial
  Probe
gaagatcaaagagggttactacgag

SEQ ID NO: 81983 - DNA, 25 bp, Artificial
  Probe
gagaagatcaaagagggttactacg

SEQ ID NO: 81984 - DNA, 25 bp, Artificial
  Probe
ttactacgagtttgagtctccattc

SEQ ID NO: 81985 - DNA, 25 bp, Artificial
  Probe
gttactacgagtttgagtctccatt

SEQ ID NO: 81986 - DNA, 25 bp, Artificial
  Probe
agaagatcaaagagggttactacga

SEQ ID NO: 81987 - DNA, 25 bp, Artificial
  Probe
cagattcagaagaactttgccaaga

SEQ ID NO: 81988 - DNA, 25 bp, Artificial
  Probe
tactacgagtttgagtctccattct

SEQ ID NO: 81989 - DNA, 25 bp, Artificial
  Probe
gactttatttgccatctgcttgaga

SEQ ID NO: 81990 - DNA, 25 bp, Artificial
  Probe
aaagagggttactacgagtttgagt

SEQ ID NO: 81991 - DNA, 25 bp, Artificial
  Probe
ggtgtcatcacatacatactgctgt

SEQ ID NO: 81992 - DNA, 25 bp, Artificial
  Probe
tggtgtcatcacatacatactgctg

SEQ ID NO: 81993 - DNA, 25 bp, Artificial
  Probe
cctgaggagaactccaagataatga

SEQ ID NO: 81994 - DNA, 25 bp, Artificial
  Probe
gatcaaagagggttactacgagttt

SEQ ID NO: 81995 - DNA, 25 bp, Artificial
  Probe
tttatttgccatctgcttgagaagg

SEQ ID NO: 81996 - DNA, 25 bp, Artificial
  Probe
tgagaagatcaaagagggttactac

SEQ ID NO: 81997 - DNA, 25 bp, Artificial
  Probe
tcagcctccagattcagaagaactt

SEQ ID NO: 81998 - DNA, 25 bp, Artificial
  Probe
aaggactttatttgccatctgcttg

SEQ ID NO: 81999 - DNA, 25 bp, Artificial
  Probe
aagagggttactacgagtttgagtc

SEQ ID NO: 82000 - DNA, 25 bp, Artificial
  Probe
agatcaaagagggttactacgagtt

SEQ ID NO: 82001 - DNA, 25 bp, Artificial
  Probe
aagatcaaagagggttactacgagt

SEQ ID NO: 82002 - DNA, 25 bp, Artificial
  Probe
ttgagaaggacccaaatgaacgata

SEQ ID NO: 82003 - DNA, 25 bp, Artificial
  Probe
ggtccattggtgtcatcacatacat

SEQ ID NO: 82004 - DNA, 25 bp, Artificial
  Probe
caaggactttatttgccatctgctt

SEQ ID NO: 82005 - DNA, 25 bp, Artificial
  Probe
ggactttatttgccatctgcttgag

SEQ ID NO: 82006 - DNA, 25 bp, Artificial
  Probe
ggttactacgagtttgagtctccat

SEQ ID NO: 82007 - DNA, 25 bp, Artificial
  Probe
cattctgggatgacatttctgagtc

SEQ ID NO: 82008 - DNA, 25 bp, Artificial
  Probe
gagaaggacccaaatgaacgataca

SEQ ID NO: 82009 - DNA, 25 bp, Artificial
  Probe
tgagaaggacccaaatgaacgatac

SEQ ID NO: 82010 - DNA, 25 bp, Artificial
  Probe
ccagattcagaagaactttgccaag

SEQ ID NO: 82011 - DNA, 25 bp, Artificial
  Probe
actacgagtttgagtctccattctg

SEQ ID NO: 82012 - DNA, 25 bp, Artificial
  Probe
ttatttgccatctgcttgagaagga

SEQ ID NO: 82013 - DNA, 25 bp, Artificial
  Probe
gagggttactacgagtttgagtctc

SEQ ID NO: 82014 - DNA, 25 bp, Artificial
  Probe
aggactttatttgccatctgcttga

SEQ ID NO: 82015 - DNA, 25 bp, Artificial
  Probe
gagaatggcatcgttcacagagatc

SEQ ID NO: 82016 - DNA, 25 bp, Artificial
  Probe
ggctaattaagtgtggtgtttgtac

SEQ ID NO: 82017 - DNA, 25 bp, Artificial
  Probe
cagtgatctgtgatcctgtagtatg

SEQ ID NO: 82018 - DNA, 25 bp, Artificial
  Probe
gagaaacaacggagtagagaccttt

SEQ ID NO: 82019 - DNA, 25 bp, Artificial
  Probe
ttcagagaaacaacggagtagagac

SEQ ID NO: 82020 - DNA, 25 bp, Artificial
  Probe
gttcagagaaacaacggagtagaga

SEQ ID NO: 82021 - DNA, 25 bp, Artificial
  Probe
gggctaattaagtgtggtgtttgta

SEQ ID NO: 82022 - DNA, 25 bp, Artificial
  Probe
tttgggctaattaagtgtggtgttt

SEQ ID NO: 82023 - DNA, 25 bp, Artificial
  Probe
gctaattaagtgtggtgtttgtact

SEQ ID NO: 82024 - DNA, 25 bp, Artificial
  Probe
ttgggctaattaagtgtggtgtttg

SEQ ID NO: 82025 - DNA, 25 bp, Artificial
  Probe
ctttgggctaattaagtgtggtgtt

SEQ ID NO: 82026 - DNA, 25 bp, Artificial
  Probe
agtgatctgtgatcctgtagtatgc

SEQ ID NO: 82027 - DNA, 25 bp, Artificial
  Probe
tagagacctttccagcctaccaaat

SEQ ID NO: 82028 - DNA, 25 bp, Artificial
  Probe
agagaaacaacggagtagagacctt

SEQ ID NO: 82029 - DNA, 25 bp, Artificial
  Probe
gtgatctgtgatcctgtagtatgcc

SEQ ID NO: 82030 - DNA, 25 bp, Artificial
  Probe
tgggctaattaagtgtggtgtttgt

SEQ ID NO: 82031 - DNA, 25 bp, Artificial
  Probe
agtgtggtgtttgtacttgtaaggg

SEQ ID NO: 82032 - DNA, 25 bp, Artificial
  Probe
cagagaaacaacggagtagagacct

SEQ ID NO: 82033 - DNA, 25 bp, Artificial
  Probe
tcagagaaacaacggagtagagacc

SEQ ID NO: 82034 - DNA, 25 bp, Artificial
  Probe
aattaagtgtggtgtttgtacttgt

SEQ ID NO: 82035 - DNA, 25 bp, Artificial
  Probe
taagtgtggtgtttgtacttgtaag

SEQ ID NO: 82036 - DNA, 25 bp, Artificial
  Probe
agaaacaacggagtagagacctttc

SEQ ID NO: 82037 - DNA, 25 bp, Artificial
  Probe
ttaagtgtggtgtttgtacttgtaa

SEQ ID NO: 82038 - DNA, 25 bp, Artificial
  Probe
aagtgtggtgtttgtacttgtaagg

SEQ ID NO: 82039 - DNA, 25 bp, Artificial
  Probe
acagtgatctgtgatcctgtagtat

SEQ ID NO: 82040 - DNA, 25 bp, Artificial
  Probe
cctttgggctaattaagtgtggtgt

SEQ ID NO: 82041 - DNA, 25 bp, Artificial
  Probe
attaagtgtggtgtttgtacttgta

SEQ ID NO: 82042 - DNA, 25 bp, Artificial
  Probe
gacagtgatctgtgatcctgtagta

SEQ ID NO: 82043 - DNA, 25 bp, Artificial
  Probe
agagacctttccagcctaccaaatc

SEQ ID NO: 82044 - DNA, 25 bp, Artificial
  Probe
gagacctttccagcctaccaaatct

SEQ ID NO: 82045 - DNA, 25 bp, Artificial
  Probe
gaaacaacggagtagagacctttcc

SEQ ID NO: 82046 - DNA, 25 bp, Artificial
  Probe
aaacaacggagtagagacctttcca

SEQ ID NO: 82047 - DNA, 25 bp, Artificial
  Probe
agatcctaacacatgtttcttcgag

SEQ ID NO: 82048 - DNA, 25 bp, Artificial
  Probe
gagatcctaacacatgtttcttcga

SEQ ID NO: 82049 - DNA, 25 bp, Artificial
  Probe
taattaagtgtggtgtttgtacttg

SEQ ID NO: 82050 - DNA, 25 bp, Artificial
  Probe
atctgtgatcctgtagtatgcccac

SEQ ID NO: 82051 - DNA, 25 bp, Artificial
  Probe
tgttcagagaaacaacggagtagag

SEQ ID NO: 82052 - DNA, 25 bp, Artificial
  Probe
ctaattaagtgtggtgtttgtactt

SEQ ID NO: 82053 - DNA, 25 bp, Artificial
  Probe
ccgagatcctaacacatgtttcttc

SEQ ID NO: 82054 - DNA, 25 bp, Artificial
  Probe
aacaacggagtagagacctttccag

SEQ ID NO: 82055 - DNA, 25 bp, Artificial
  Probe
gtgttcagagaaacaacggagtaga

SEQ ID NO: 82056 - DNA, 25 bp, Artificial
  Probe
agacctttccagcctaccaaatctg

SEQ ID NO: 82057 - DNA, 25 bp, Artificial
  Probe
tgtgttcagagaaacaacggagtag

SEQ ID NO: 82058 - DNA, 25 bp, Artificial
  Probe
gatcctaacacatgtttcttcgagg

SEQ ID NO: 82059 - DNA, 25 bp, Artificial
  Probe
gtagagacctttccagcctaccaaa

SEQ ID NO: 82060 - DNA, 25 bp, Artificial
  Probe
gtgtgttcagagaaacaacggagta

SEQ ID NO: 82061 - DNA, 25 bp, Artificial
  Probe
gaatgctgtctaccgaatcataagt

SEQ ID NO: 82062 - DNA, 25 bp, Artificial
  Probe
aatgctgtctaccgaatcataagtg

SEQ ID NO: 82063 - DNA, 25 bp, Artificial
  Probe
ggaatgctgtctaccgaatcataag

SEQ ID NO: 82064 - DNA, 25 bp, Artificial
  Probe
ctgtctaccgaatcataagtggaga

SEQ ID NO: 82065 - DNA, 25 bp, Artificial
  Probe
tggaatgctgtctaccgaatcataa

SEQ ID NO: 82066 - DNA, 25 bp, Artificial
  Probe
ctggaatgctgtctaccgaatcata

SEQ ID NO: 82067 - DNA, 25 bp, Artificial
  Probe
atgctgtctaccgaatcataagtgg

SEQ ID NO: 82068 - DNA, 25 bp, Artificial
  Probe
gctgtctaccgaatcataagtggag

SEQ ID NO: 82069 - DNA, 25 bp, Artificial
  Probe
cttaattatggtctctcgaacacgg

SEQ ID NO: 82070 - DNA, 25 bp, Artificial
  Probe
ccttaattatggtctctcgaacacg

SEQ ID NO: 82071 - DNA, 25 bp, Artificial
  Probe
tgctgtctaccgaatcataagtgga

SEQ ID NO: 82072 - DNA, 25 bp, Artificial
  Probe
aaccttaattatggtctctcgaaca

SEQ ID NO: 82073 - DNA, 25 bp, Artificial
  Probe
accttaattatggtctctcgaacac

SEQ ID NO: 82074 - DNA, 25 bp, Artificial
  Probe
caactggaatgctgtctaccgaatc

SEQ ID NO: 82075 - DNA, 25 bp, Artificial
  Probe
gagttcatcaaccaggtctacaacg

SEQ ID NO: 82076 - DNA, 25 bp, Artificial
  Probe
cgagttcatcaaccaggtctacaac

SEQ ID NO: 82077 - DNA, 25 bp, Artificial
  Probe
ttaattatggtctctcgaacacggc

SEQ ID NO: 82078 - DNA, 25 bp, Artificial
  Probe
actggaatgctgtctaccgaatcat

SEQ ID NO: 82079 - DNA, 25 bp, Artificial
  Probe
aactggaatgctgtctaccgaatca

SEQ ID NO: 82080 - DNA, 25 bp, Artificial
  Probe
aggaaaccttaattatggtctctcg

SEQ ID NO: 82081 - DNA, 25 bp, Artificial
  Probe
tctaccgaatcataagtggagaccc

SEQ ID NO: 82082 - DNA, 25 bp, Artificial
  Probe
gaaaaccgtatagagacagtagtgg

SEQ ID NO: 82083 - DNA, 25 bp, Artificial
  Probe
cgaaaaccgtatagagacagtagtg

SEQ ID NO: 82084 - DNA, 25 bp, Artificial
  Probe
ggaaaccttaattatggtctctcga

SEQ ID NO: 82085 - DNA, 25 bp, Artificial
  Probe
ccgagttcatcaaccaggtctacaa

SEQ ID NO: 82086 - DNA, 25 bp, Artificial
  Probe
aaaccttaattatggtctctcgaac

SEQ ID NO: 82087 - DNA, 25 bp, Artificial
  Probe
tgtctaccgaatcataagtggagac

SEQ ID NO: 82088 - DNA, 25 bp, Artificial
  Probe
acgtaaatgacaaccctccagaatt

SEQ ID NO: 82089 - DNA, 25 bp, Artificial
  Probe
ccgaaaaccgtatagagacagtagt

SEQ ID NO: 82090 - DNA, 25 bp, Artificial
  Probe
gaaaccttaattatggtctctcgaa

SEQ ID NO: 82091 - DNA, 25 bp, Artificial
  Probe
agttcatcaaccaggtctacaacgg

SEQ ID NO: 82092 - DNA, 25 bp, Artificial
  Probe
taaatgacaaccctccagaattcac

SEQ ID NO: 82093 - DNA, 25 bp, Artificial
  Probe
gtaaatgacaaccctccagaattca

SEQ ID NO: 82094 - DNA, 25 bp, Artificial
  Probe
cgtaaatgacaaccctccagaattc

SEQ ID NO: 82095 - DNA, 25 bp, Artificial
  Probe
gtctaccgaatcataagtggagacc

SEQ ID NO: 82096 - DNA, 25 bp, Artificial
  Probe
aaaaccgtatagagacagtagtggc

SEQ ID NO: 82097 - DNA, 25 bp, Artificial
  Probe
gacgtaaatgacaaccctccagaat

SEQ ID NO: 82098 - DNA, 25 bp, Artificial
  Probe
cccgaaaaccgtatagagacagtag

SEQ ID NO: 82099 - DNA, 25 bp, Artificial
  Probe
ccaactggaatgctgtctaccgaat

SEQ ID NO: 82100 - DNA, 25 bp, Artificial
  Probe
ctccaagccaggtacatacgtaatg

SEQ ID NO: 82101 - DNA, 25 bp, Artificial
  Probe
ccaagccaggtacatacgtaatgac

SEQ ID NO: 82102 - DNA, 25 bp, Artificial
  Probe
tccaagccaggtacatacgtaatga

SEQ ID NO: 82103 - DNA, 25 bp, Artificial
  Probe
gtgacagacgtaaatgacaaccctc

SEQ ID NO: 82104 - DNA, 25 bp, Artificial
  Probe
tggaaggaaaccttaattatggtct

SEQ ID NO: 82105 - DNA, 25 bp, Artificial
  Probe
actgacatggaaggaaaccttaatt

SEQ ID NO: 82106 - DNA, 25 bp, Artificial
  Probe
actaacttggaatcaatggacacta

SEQ ID NO: 82107 - DNA, 25 bp, Artificial
  Probe
cactaacttggaatcaatggacact

SEQ ID NO: 82108 - DNA, 25 bp, Artificial
  Probe
ctaacttggaatcaatggacactag

SEQ ID NO: 82109 - DNA, 25 bp, Artificial
  Probe
tgtatttccataatccagaggttgt

SEQ ID NO: 82110 - DNA, 25 bp, Artificial
  Probe
tatgctatatttcggagagattggc

SEQ ID NO: 82111 - DNA, 25 bp, Artificial
  Probe
ccttgtataacctcttctttcagtg

SEQ ID NO: 82112 - DNA, 25 bp, Artificial
  Probe
tccttgtataacctcttctttcagt

SEQ ID NO: 82113 - DNA, 25 bp, Artificial
  Probe
ctatatttcggagagattggcatcg

SEQ ID NO: 82114 - DNA, 25 bp, Artificial
  Probe
atttccataatccagaggttgtaag

SEQ ID NO: 82115 - DNA, 25 bp, Artificial
  Probe
gctatatttcggagagattggcatc

SEQ ID NO: 82116 - DNA, 25 bp, Artificial
  Probe
agattggcatcgtcacaaagataat

SEQ ID NO: 82117 - DNA, 25 bp, Artificial
  Probe
ttgtataacctcttctttcagtgac

SEQ ID NO: 82118 - DNA, 25 bp, Artificial
  Probe
tatatttcggagagattggcatcgt

SEQ ID NO: 82119 - DNA, 25 bp, Artificial
  Probe
gtataacctcttctttcagtgacat

SEQ ID NO: 82120 - DNA, 25 bp, Artificial
  Probe
cttgtataacctcttctttcagtga

SEQ ID NO: 82121 - DNA, 25 bp, Artificial
  Probe
gtatttccataatccagaggttgta

SEQ ID NO: 82122 - DNA, 25 bp, Artificial
  Probe
gagattggcatcgtcacaaagataa

SEQ ID NO: 82123 - DNA, 25 bp, Artificial
  Probe
tgtataacctcttctttcagtgaca

SEQ ID NO: 82124 - DNA, 25 bp, Artificial
  Probe
tttcattcatgggaagtttgttcag

SEQ ID NO: 82125 - DNA, 25 bp, Artificial
  Probe
atatgctatatttcggagagattgg

SEQ ID NO: 82126 - DNA, 25 bp, Artificial
  Probe
tgttccacatgaggaccattacatt

SEQ ID NO: 82127 - DNA, 25 bp, Artificial
  Probe
ctgtatttccataatccagaggttg

SEQ ID NO: 82128 - DNA, 25 bp, Artificial
  Probe
tggaatcaatggacactagttagac

SEQ ID NO: 82129 - DNA, 25 bp, Artificial
  Probe
gaatcaatggacactagttagacgt

SEQ ID NO: 82130 - DNA, 25 bp, Artificial
  Probe
taacctcttctttcagtgacataaa

SEQ ID NO: 82131 - DNA, 25 bp, Artificial
  Probe
ggaatcaatggacactagttagacg

SEQ ID NO: 82132 - DNA, 25 bp, Artificial
  Probe
agagattggcatcgtcacaaagata

SEQ ID NO: 82133 - DNA, 25 bp, Artificial
  Probe
ataacctcttctttcagtgacataa

SEQ ID NO: 82134 - DNA, 25 bp, Artificial
  Probe
tatttccataatccagaggttgtaa

SEQ ID NO: 82135 - DNA, 25 bp, Artificial
  Probe
ttggaatcaatggacactagttaga

SEQ ID NO: 82136 - DNA, 25 bp, Artificial
  Probe
acttggaatcaatggacactagtta

SEQ ID NO: 82137 - DNA, 25 bp, Artificial
  Probe
taacttggaatcaatggacactagt

SEQ ID NO: 82138 - DNA, 25 bp, Artificial
  Probe
cttggaatcaatggacactagttag

SEQ ID NO: 82139 - DNA, 25 bp, Artificial
  Probe
gtgttccacatgaggaccattacat

SEQ ID NO: 82140 - DNA, 25 bp, Artificial
  Probe
cacatgaggaccattacatttgacc

SEQ ID NO: 82141 - DNA, 25 bp, Artificial
  Probe
ccacatgaggaccattacatttgac

SEQ ID NO: 82142 - DNA, 25 bp, Artificial
  Probe
atatttcggagagattggcatcgtc

SEQ ID NO: 82143 - DNA, 25 bp, Artificial
  Probe
gatatgctatatttcggagagattg

SEQ ID NO: 82144 - DNA, 25 bp, Artificial
  Probe
ttcattcatgggaagtttgttcagc

SEQ ID NO: 82145 - DNA, 25 bp, Artificial
  Probe
attcatgggaagtttgttcagcttt

SEQ ID NO: 82146 - DNA, 25 bp, Artificial
  Probe
aatcaatggacactagttagacgtg

SEQ ID NO: 82147 - DNA, 25 bp, Artificial
  Probe
agatatgctatatttcggagagatt

SEQ ID NO: 82148 - DNA, 25 bp, Artificial
  Probe
aagatatgctatatttcggagagat

SEQ ID NO: 82149 - DNA, 25 bp, Artificial
  Probe
ttccacatgaggaccattacatttg

SEQ ID NO: 82150 - DNA, 25 bp, Artificial
  Probe
gttccacatgaggaccattacattt

SEQ ID NO: 82151 - DNA, 25 bp, Artificial
  Probe
gactctgtgactggtagtgaatcta

SEQ ID NO: 82152 - DNA, 25 bp, Artificial
  Probe
gtcacagatggagaagagttacact

SEQ ID NO: 82153 - DNA, 25 bp, Artificial
  Probe
tcacagatggagaagagttacactg

SEQ ID NO: 82154 - DNA, 25 bp, Artificial
  Probe
ttcaagtgatgctccagaatgtctt

SEQ ID NO: 82155 - DNA, 25 bp, Artificial
  Probe
ctgactctgtgactggtagtgaatc

SEQ ID NO: 82156 - DNA, 25 bp, Artificial
  Probe
aagacaagaagtacaacagctatgc

SEQ ID NO: 82157 - DNA, 25 bp, Artificial
  Probe
ggtggaatgagactattgttgaaag

SEQ ID NO: 82158 - DNA, 25 bp, Artificial
  Probe
cgtcacagatggagaagagttacac

SEQ ID NO: 82159 - DNA, 25 bp, Artificial
  Probe
gggtggaatgagactattgttgaaa

SEQ ID NO: 82160 - DNA, 25 bp, Artificial
  Probe
tgactctgtgactggtagtgaatct

SEQ ID NO: 82161 - DNA, 25 bp, Artificial
  Probe
tctgactctgtgactggtagtgaat

SEQ ID NO: 82162 - DNA, 25 bp, Artificial
  Probe
attgttgaaagtctcttggatgaac

SEQ ID NO: 82163 - DNA, 25 bp, Artificial
  Probe
ttgaaagtctcttggatgaactaca

SEQ ID NO: 82164 - DNA, 25 bp, Artificial
  Probe
tgttgaaagtctcttggatgaacta

SEQ ID NO: 82165 - DNA, 25 bp, Artificial
  Probe
ctattgttgaaagtctcttggatga

SEQ ID NO: 82166 - DNA, 25 bp, Artificial
  Probe
tgaaagtctcttggatgaactacat

SEQ ID NO: 82167 - DNA, 25 bp, Artificial
  Probe
gttgaaagtctcttggatgaactac

SEQ ID NO: 82168 - DNA, 25 bp, Artificial
  Probe
ttgttgaaagtctcttggatgaact

SEQ ID NO: 82169 - DNA, 25 bp, Artificial
  Probe
gtggaatgagactattgttgaaagt

SEQ ID NO: 82170 - DNA, 25 bp, Artificial
  Probe
ctctgtgactggtagtgaatctact

SEQ ID NO: 82171 - DNA, 25 bp, Artificial
  Probe
ccttaaagacaagaagtacaacagc

SEQ ID NO: 82172 - DNA, 25 bp, Artificial
  Probe
actattgttgaaagtctcttggatg

SEQ ID NO: 82173 - DNA, 25 bp, Artificial
  Probe
tgggtggaatgagactattgttgaa

SEQ ID NO: 82174 - DNA, 25 bp, Artificial
  Probe
tattgttgaaagtctcttggatgaa

SEQ ID NO: 82175 - DNA, 25 bp, Artificial
  Probe
attcaagtgatgctccagaatgtct

SEQ ID NO: 82176 - DNA, 25 bp, Artificial
  Probe
tctgtgactggtagtgaatctactg

SEQ ID NO: 82177 - DNA, 25 bp, Artificial
  Probe
actctgtgactggtagtgaatctac

SEQ ID NO: 82178 - DNA, 25 bp, Artificial
  Probe
agatggagaagagttacactgcctt

SEQ ID NO: 82179 - DNA, 25 bp, Artificial
  Probe
gctattactggagggtacaaaggta

SEQ ID NO: 82180 - DNA, 25 bp, Artificial
  Probe
accttaaagacaagaagtacaacag

SEQ ID NO: 82181 - DNA, 25 bp, Artificial
  Probe
ctgggtggaatgagactattgttga

SEQ ID NO: 82182 - DNA, 25 bp, Artificial
  Probe
gcttctggagataatactaaaggaa

SEQ ID NO: 82183 - DNA, 25 bp, Artificial
  Probe
caagtgatgctccagaatgtctttc

SEQ ID NO: 82184 - DNA, 25 bp, Artificial
  Probe
gacaagaagtacaacagctatgcct

SEQ ID NO: 82185 - DNA, 25 bp, Artificial
  Probe
agacaagaagtacaacagctatgcc

SEQ ID NO: 82186 - DNA, 25 bp, Artificial
  Probe
ccgtcacagatggagaagagttaca

SEQ ID NO: 82187 - DNA, 25 bp, Artificial
  Probe
cacagatggagaagagttacactgc

SEQ ID NO: 82188 - DNA, 25 bp, Artificial
  Probe
aagtctcttggatgaactacatcag

SEQ ID NO: 82189 - DNA, 25 bp, Artificial
  Probe
atccacgactactttaggcttgaag

SEQ ID NO: 82190 - DNA, 25 bp, Artificial
  Probe
catccacgactactttaggcttgaa

SEQ ID NO: 82191 - DNA, 25 bp, Artificial
  Probe
actgggtggaatgagactattgttg

SEQ ID NO: 82192 - DNA, 25 bp, Artificial
  Probe
aaagacaagaagtacaacagctatg

SEQ ID NO: 82193 - DNA, 25 bp, Artificial
  Probe
acttaatagaaacttccagaactga

SEQ ID NO: 82194 - DNA, 25 bp, Artificial
  Probe
aagagctattactggagggtacaaa

SEQ ID NO: 82195 - DNA, 25 bp, Artificial
  Probe
cttgaagagctattactggagggta

SEQ ID NO: 82196 - DNA, 25 bp, Artificial
  Probe
agaagttactgaagagtgacaagtc

SEQ ID NO: 82197 - DNA, 25 bp, Artificial
  Probe
gaagttactgaagagtgacaagtcc

SEQ ID NO: 82198 - DNA, 25 bp, Artificial
  Probe
atcatccagaagttactgaagagtg

SEQ ID NO: 82199 - DNA, 25 bp, Artificial
  Probe
cagaagttactgaagagtgacaagt

SEQ ID NO: 82200 - DNA, 25 bp, Artificial
  Probe
aatcatccagaagttactgaagagt

SEQ ID NO: 82201 - DNA, 25 bp, Artificial
  Probe
aagttactgaagagtgacaagtcca

SEQ ID NO: 82202 - DNA, 25 bp, Artificial
  Probe
catccagaagttactgaagagtgac

SEQ ID NO: 82203 - DNA, 25 bp, Artificial
  Probe
tcatccagaagttactgaagagtga

SEQ ID NO: 82204 - DNA, 25 bp, Artificial
  Probe
ccagaagttactgaagagtgacaag

SEQ ID NO: 82205 - DNA, 25 bp, Artificial
  Probe
atccagaagttactgaagagtgaca

SEQ ID NO: 82206 - DNA, 25 bp, Artificial
  Probe
tccagaagttactgaagagtgacaa

SEQ ID NO: 82207 - DNA, 25 bp, Artificial
  Probe
agttactgaagagtgacaagtccag

SEQ ID NO: 82208 - DNA, 25 bp, Artificial
  Probe
gaagtcatagccactctcaaggatg

SEQ ID NO: 82209 - DNA, 25 bp, Artificial
  Probe
agaagtcatagccactctcaaggat

SEQ ID NO: 82210 - DNA, 25 bp, Artificial
  Probe
gacagaagtcatagccactctcaag

SEQ ID NO: 82211 - DNA, 25 bp, Artificial
  Probe
agacagaagtcatagccactctcaa

SEQ ID NO: 82212 - DNA, 25 bp, Artificial
  Probe
cagaagtcatagccactctcaagga

SEQ ID NO: 82213 - DNA, 25 bp, Artificial
  Probe
gttactgaagagtgacaagtccagc

SEQ ID NO: 82214 - DNA, 25 bp, Artificial
  Probe
acagaagtcatagccactctcaagg

SEQ ID NO: 82215 - DNA, 25 bp, Artificial
  Probe
cagacagaagtcatagccactctca

SEQ ID NO: 82216 - DNA, 25 bp, Artificial
  Probe
ttactgaagagtgacaagtccagct

SEQ ID NO: 82217 - DNA, 25 bp, Artificial
  Probe
ccagacagaagtcatagccactctc

SEQ ID NO: 82218 - DNA, 25 bp, Artificial
  Probe
atagccactctcaaggatggtcaag

SEQ ID NO: 82219 - DNA, 25 bp, Artificial
  Probe
aagtcatagccactctcaaggatgg

SEQ ID NO: 82220 - DNA, 25 bp, Artificial
  Probe
catagccactctcaaggatggtcaa

SEQ ID NO: 82221 - DNA, 25 bp, Artificial
  Probe
gtcatagccactctcaaggatggtc

SEQ ID NO: 82222 - DNA, 25 bp, Artificial
  Probe
tagccactctcaaggatggtcaaga

SEQ ID NO: 82223 - DNA, 25 bp, Artificial
  Probe
tcatagccactctcaaggatggtca

SEQ ID NO: 82224 - DNA, 25 bp, Artificial
  Probe
agtcatagccactctcaaggatggt

SEQ ID NO: 82225 - DNA, 25 bp, Artificial
  Probe
cactgcacccagacagaagtcatag

SEQ ID NO: 82226 - DNA, 25 bp, Artificial
  Probe
gttggttattcagttgctattgcta

SEQ ID NO: 82227 - DNA, 25 bp, Artificial
  Probe
ttggttattcagttgctattgctaa

SEQ ID NO: 82228 - DNA, 25 bp, Artificial
  Probe
cgtgttggttattcagttgctattg

SEQ ID NO: 82229 - DNA, 25 bp, Artificial
  Probe
tgttggttattcagttgctattgct

SEQ ID NO: 82230 - DNA, 25 bp, Artificial
  Probe
gtgttggttattcagttgctattgc

SEQ ID NO: 82231 - DNA, 25 bp, Artificial
  Probe
ccgtgttggttattcagttgctatt

SEQ ID NO: 82232 - DNA, 25 bp, Artificial
  Probe
ggttattcagttgctattgctaaca

SEQ ID NO: 82233 - DNA, 25 bp, Artificial
  Probe
tggttattcagttgctattgctaac

SEQ ID NO: 82234 - DNA, 25 bp, Artificial
  Probe
gttattcagttgctattgctaacaa

SEQ ID NO: 82235 - DNA, 25 bp, Artificial
  Probe
tcctttgtgagttgtttcaatatgt

SEQ ID NO: 82236 - DNA, 25 bp, Artificial
  Probe
gctttcctttgtgagttgtttcaat

SEQ ID NO: 82237 - DNA, 25 bp, Artificial
  Probe
cctttgtgagttgtttcaatatgtt

SEQ ID NO: 82238 - DNA, 25 bp, Artificial
  Probe
ttcctttgtgagttgtttcaatatg

SEQ ID NO: 82239 - DNA, 25 bp, Artificial
  Probe
ctttcctttgtgagttgtttcaata

SEQ ID NO: 82240 - DNA, 25 bp, Artificial
  Probe
ttagctttcctttgtgagttgtttc

SEQ ID NO: 82241 - DNA, 25 bp, Artificial
  Probe
cttagctttcctttgtgagttgttt

SEQ ID NO: 82242 - DNA, 25 bp, Artificial
  Probe
gccgtgttggttattcagttgctat

SEQ ID NO: 82243 - DNA, 25 bp, Artificial
  Probe
taccttagctttcctttgtgagttg

SEQ ID NO: 82244 - DNA, 25 bp, Artificial
  Probe
tttcctttgtgagttgtttcaatat

SEQ ID NO: 82245 - DNA, 25 bp, Artificial
  Probe
ccttagctttcctttgtgagttgtt

SEQ ID NO: 82246 - DNA, 25 bp, Artificial
  Probe
cttgaaatccttattgcttacagta

SEQ ID NO: 82247 - DNA, 25 bp, Artificial
  Probe
tagctttcctttgtgagttgtttca

SEQ ID NO: 82248 - DNA, 25 bp, Artificial
  Probe
aaggagagggaaatttgagggtatt

SEQ ID NO: 82249 - DNA, 25 bp, Artificial
  Probe
agctttcctttgtgagttgtttcaa

SEQ ID NO: 82250 - DNA, 25 bp, Artificial
  Probe
ttgctattgctaacaacatgcggaa

SEQ ID NO: 82251 - DNA, 25 bp, Artificial
  Probe
ttcagttgctattgctaacaacatg

SEQ ID NO: 82252 - DNA, 25 bp, Artificial
  Probe
attcagttgctattgctaacaacat

SEQ ID NO: 82253 - DNA, 25 bp, Artificial
  Probe
tattcagttgctattgctaacaaca

SEQ ID NO: 82254 - DNA, 25 bp, Artificial
  Probe
accttagctttcctttgtgagttgt

SEQ ID NO: 82255 - DNA, 25 bp, Artificial
  Probe
tgaaatccttattgcttacagtaaa

SEQ ID NO: 82256 - DNA, 25 bp, Artificial
  Probe
ttgaaatccttattgcttacagtaa

SEQ ID NO: 82257 - DNA, 25 bp, Artificial
  Probe
tgctattgctaacaacatgcggaag

SEQ ID NO: 82258 - DNA, 25 bp, Artificial
  Probe
ttattcagttgctattgctaacaac

SEQ ID NO: 82259 - DNA, 25 bp, Artificial
  Probe
gatcactgagccgtgttggttattc

SEQ ID NO: 82260 - DNA, 25 bp, Artificial
  Probe
tttctaagtgagatttacccaatag

SEQ ID NO: 82261 - DNA, 25 bp, Artificial
  Probe
gaaatccttattgcttacagtaaag

SEQ ID NO: 82262 - DNA, 25 bp, Artificial
  Probe
tcagttgctattgctaacaacatgc

SEQ ID NO: 82263 - DNA, 25 bp, Artificial
  Probe
atcactgagccgtgttggttattca

SEQ ID NO: 82264 - DNA, 25 bp, Artificial
  Probe
cagttgctattgctaacaacatgcg

SEQ ID NO: 82265 - DNA, 25 bp, Artificial
  Probe
gaaacactatgcagtcagggaacac

SEQ ID NO: 82266 - DNA, 25 bp, Artificial
  Probe
agccgtgttggttattcagttgcta

SEQ ID NO: 82267 - DNA, 25 bp, Artificial
  Probe
tttcttataatcctcctttgtatca

SEQ ID NO: 82268 - DNA, 25 bp, Artificial
  Probe
ctaacaacatgcggaagcctttctg

SEQ ID NO: 82269 - DNA, 25 bp, Artificial
  Probe
ctattgctaacaacatgcggaagcc

SEQ ID NO: 82270 - DNA, 25 bp, Artificial
  Probe
tgaaacactatgcagtcagggaaca

SEQ ID NO: 82271 - DNA, 25 bp, Artificial
  Probe
acaaatctatttattcccaagcctg

SEQ ID NO: 82272 - DNA, 25 bp, Artificial
  Probe
gccaccactgacatacaaatctatt

SEQ ID NO: 82273 - DNA, 25 bp, Artificial
  Probe
ccaccactgacatacaaatctattt

SEQ ID NO: 82274 - DNA, 25 bp, Artificial
  Probe
tacaaatctatttattcccaagcct

SEQ ID NO: 82275 - DNA, 25 bp, Artificial
  Probe
aaatctatttattcccaagcctgga

SEQ ID NO: 82276 - DNA, 25 bp, Artificial
  Probe
caaatctatttattcccaagcctgg

SEQ ID NO: 82277 - DNA, 25 bp, Artificial
  Probe
aatctatttattcccaagcctggat

SEQ ID NO: 82278 - DNA, 25 bp, Artificial
  Probe
atctatttattcccaagcctggatg

SEQ ID NO: 82279 - DNA, 25 bp, Artificial
  Probe
atacaaatctatttattcccaagcc

SEQ ID NO: 82280 - DNA, 25 bp, Artificial
  Probe
caccactgacatacaaatctattta

SEQ ID NO: 82281 - DNA, 25 bp, Artificial
  Probe
ccaagactttagaaacacgaaaaca

SEQ ID NO: 82282 - DNA, 25 bp, Artificial
  Probe
tctatttattcccaagcctggatgg

SEQ ID NO: 82283 - DNA, 25 bp, Artificial
  Probe
gactttagaaacacgaaaacagaac

SEQ ID NO: 82284 - DNA, 25 bp, Artificial
  Probe
agactttagaaacacgaaaacagaa

SEQ ID NO: 82285 - DNA, 25 bp, Artificial
  Probe
cccaagactttagaaacacgaaaac

SEQ ID NO: 82286 - DNA, 25 bp, Artificial
  Probe
cagagattgaaaattcgtcgttacc

SEQ ID NO: 82287 - DNA, 25 bp, Artificial
  Probe
aagactttagaaacacgaaaacaga

SEQ ID NO: 82288 - DNA, 25 bp, Artificial
  Probe
caagactttagaaacacgaaaacag

SEQ ID NO: 82289 - DNA, 25 bp, Artificial
  Probe
gcaataaaaccccaagactttagaa

SEQ ID NO: 82290 - DNA, 25 bp, Artificial
  Probe
agcaataaaaccccaagactttaga

SEQ ID NO: 82291 - DNA, 25 bp, Artificial
  Probe
cagcaataaaaccccaagactttag

SEQ ID NO: 82292 - DNA, 25 bp, Artificial
  Probe
taaaaccccaagactttagaaacac

SEQ ID NO: 82293 - DNA, 25 bp, Artificial
  Probe
aaaacagcaataaaaccccaagact

SEQ ID NO: 82294 - DNA, 25 bp, Artificial
  Probe
caaaacagcaataaaaccccaagac

SEQ ID NO: 82295 - DNA, 25 bp, Artificial
  Probe
acagcaataaaaccccaagacttta

SEQ ID NO: 82296 - DNA, 25 bp, Artificial
  Probe
aacagcaataaaaccccaagacttt

SEQ ID NO: 82297 - DNA, 25 bp, Artificial
  Probe
aaacagcaataaaaccccaagactt

SEQ ID NO: 82298 - DNA, 25 bp, Artificial
  Probe
tcagagattgaaaattcgtcgttac

SEQ ID NO: 82299 - DNA, 25 bp, Artificial
  Probe
agagattgaaaattcgtcgttaccc

SEQ ID NO: 82300 - DNA, 25 bp, Artificial
  Probe
ccccaagactttagaaacacgaaaa

SEQ ID NO: 82301 - DNA, 25 bp, Artificial
  Probe
catacaaatctatttattcccaagc

SEQ ID NO: 82302 - DNA, 25 bp, Artificial
  Probe
acaaaacagcaataaaaccccaaga

SEQ ID NO: 82303 - DNA, 25 bp, Artificial
  Probe
cacaaaacagcaataaaaccccaag

SEQ ID NO: 82304 - DNA, 25 bp, Artificial
  Probe
aatgtcacaaaacagcaataaaacc

SEQ ID NO: 82305 - DNA, 25 bp, Artificial
  Probe
aaaaccccaagactttagaaacacg

SEQ ID NO: 82306 - DNA, 25 bp, Artificial
  Probe
ataaaaccccaagactttagaaaca

SEQ ID NO: 82307 - DNA, 25 bp, Artificial
  Probe
tcacaaaacagcaataaaaccccaa

SEQ ID NO: 82308 - DNA, 25 bp, Artificial
  Probe
atgtcacaaaacagcaataaaaccc

SEQ ID NO: 82309 - DNA, 25 bp, Artificial
  Probe
cttcctcagggcacttactaaaaga

SEQ ID NO: 82310 - DNA, 25 bp, Artificial
  Probe
gagattgaaaattcgtcgttacccc

SEQ ID NO: 82311 - DNA, 25 bp, Artificial
  Probe
ctccttcctcagggcacttactaaa

SEQ ID NO: 82312 - DNA, 25 bp, Artificial
  Probe
tgacatacaaatctatttattccca

SEQ ID NO: 82313 - DNA, 25 bp, Artificial
  Probe
accactgacatacaaatctatttat

SEQ ID NO: 82314 - DNA, 25 bp, Artificial
  Probe
accccaagactttagaaacacgaaa

SEQ ID NO: 82315 - DNA, 25 bp, Artificial
  Probe
aaccccaagactttagaaacacgaa

SEQ ID NO: 82316 - DNA, 25 bp, Artificial
  Probe
agaattaggaaggcatcatagaagg

SEQ ID NO: 82317 - DNA, 25 bp, Artificial
  Probe
ggagaattaggaaggcatcatagaa

SEQ ID NO: 82318 - DNA, 25 bp, Artificial
  Probe
taaggagaatggagaattaggaagg

SEQ ID NO: 82319 - DNA, 25 bp, Artificial
  Probe
tggagaattaggaaggcatcataga

SEQ ID NO: 82320 - DNA, 25 bp, Artificial
  Probe
atggagaattaggaaggcatcatag

SEQ ID NO: 82321 - DNA, 25 bp, Artificial
  Probe
aatggagaattaggaaggcatcata

SEQ ID NO: 82322 - DNA, 25 bp, Artificial
  Probe
gaatggagaattaggaaggcatcat

SEQ ID NO: 82323 - DNA, 25 bp, Artificial
  Probe
gagaattaggaaggcatcatagaag

SEQ ID NO: 82324 - DNA, 25 bp, Artificial
  Probe
gaattaggaaggcatcatagaaggc

SEQ ID NO: 82325 - DNA, 25 bp, Artificial
  Probe
gagaatggagaattaggaaggcatc

SEQ ID NO: 82326 - DNA, 25 bp, Artificial
  Probe
tgtgtgcgtgatacatatcttcata

SEQ ID NO: 82327 - DNA, 25 bp, Artificial
  Probe
agaatggagaattaggaaggcatca

SEQ ID NO: 82328 - DNA, 25 bp, Artificial
  Probe
gtgcgtgatacatatcttcataact

SEQ ID NO: 82329 - DNA, 25 bp, Artificial
  Probe
aattaggaaggcatcatagaaggca

SEQ ID NO: 82330 - DNA, 25 bp, Artificial
  Probe
tgtgcgtgatacatatcttcataac

SEQ ID NO: 82331 - DNA, 25 bp, Artificial
  Probe
gtgtgcgtgatacatatcttcataa

SEQ ID NO: 82332 - DNA, 25 bp, Artificial
  Probe
aaggagaatggagaattaggaaggc

SEQ ID NO: 82333 - DNA, 25 bp, Artificial
  Probe
attaggaaggcatcatagaaggcag

SEQ ID NO: 82334 - DNA, 25 bp, Artificial
  Probe
gtgtgtgcgtgatacatatcttcat

SEQ ID NO: 82335 - DNA, 25 bp, Artificial
  Probe
tgcgtgatacatatcttcataactt

SEQ ID NO: 82336 - DNA, 25 bp, Artificial
  Probe
ggagaatggagaattaggaaggcat

SEQ ID NO: 82337 - DNA, 25 bp, Artificial
  Probe
ataaggagaatggagaattaggaag

SEQ ID NO: 82338 - DNA, 25 bp, Artificial
  Probe
gtgagaatgtgaccagaaggtatta

SEQ ID NO: 82339 - DNA, 25 bp, Artificial
  Probe
gaatgtgaccagaaggtattaggtt

SEQ ID NO: 82340 - DNA, 25 bp, Artificial
  Probe
tgagaatgtgaccagaaggtattag

SEQ ID NO: 82341 - DNA, 25 bp, Artificial
  Probe
gagaatgtgaccagaaggtattagg

SEQ ID NO: 82342 - DNA, 25 bp, Artificial
  Probe
ctaattctgtgtgtgtgtgtgtgtg

SEQ ID NO: 82343 - DNA, 25 bp, Artificial
  Probe
aatgtgaccagaaggtattaggttg

SEQ ID NO: 82344 - DNA, 25 bp, Artificial
  Probe
ttaggcttaacaacttgagttcgat

SEQ ID NO: 82345 - DNA, 25 bp, Artificial
  Probe
agaatgtgaccagaaggtattaggt

SEQ ID NO: 82346 - DNA, 25 bp, Artificial
  Probe
gtgtgtgtgcgtgatacatatcttc

SEQ ID NO: 82347 - DNA, 25 bp, Artificial
  Probe
taggcttaacaacttgagttcgatc

SEQ ID NO: 82348 - DNA, 25 bp, Artificial
  Probe
gtgtgtgtgtgcgtgatacatatct

SEQ ID NO: 82349 - DNA, 25 bp, Artificial
  Probe
gttctaacttctttcttctgcttgc

SEQ ID NO: 82350 - DNA, 25 bp, Artificial
  Probe
tgtgtgtgcgtgatacatatcttca

SEQ ID NO: 82351 - DNA, 25 bp, Artificial
  Probe
tagagaatcacagaggacctttact

SEQ ID NO: 82352 - DNA, 25 bp, Artificial
  Probe
aggagaatggagaattaggaaggca

SEQ ID NO: 82353 - DNA, 25 bp, Artificial
  Probe
aataaggagaatggagaattaggaa

SEQ ID NO: 82354 - DNA, 25 bp, Artificial
  Probe
ctagagaatcacagaggacctttac

SEQ ID NO: 82355 - DNA, 25 bp, Artificial
  Probe
gagaatcacagaggacctttacttg

SEQ ID NO: 82356 - DNA, 25 bp, Artificial
  Probe
agagaatcacagaggacctttactt

SEQ ID NO: 82357 - DNA, 25 bp, Artificial
  Probe
tgtgtgtgtgcgtgatacatatctt

SEQ ID NO: 82358 - DNA, 25 bp, Artificial
  Probe
taattctgtgtgtgtgtgtgtgtgt

SEQ ID NO: 82359 - DNA, 25 bp, Artificial
  Probe
ttaggaaggcatcatagaaggcagt

SEQ ID NO: 82360 - DNA, 25 bp, Artificial
  Probe
tgtgtgtgtgtgcgtgatacatatc

SEQ ID NO: 82361 - DNA, 25 bp, Artificial
  Probe
attcaagttggcaggaacatcattc

SEQ ID NO: 82362 - DNA, 25 bp, Artificial
  Probe
cattcaagttggcaggaacatcatt

SEQ ID NO: 82363 - DNA, 25 bp, Artificial
  Probe
ttcagagataggaaagattcgggta

SEQ ID NO: 82364 - DNA, 25 bp, Artificial
  Probe
ttcaagttggcaggaacatcattca

SEQ ID NO: 82365 - DNA, 25 bp, Artificial
  Probe
tcagagataggaaagattcgggtac

SEQ ID NO: 82366 - DNA, 25 bp, Artificial
  Probe
tcaagttggcaggaacatcattcac

SEQ ID NO: 82367 - DNA, 25 bp, Artificial
  Probe
tttggatgaggaagacataagagct

SEQ ID NO: 82368 - DNA, 25 bp, Artificial
  Probe
aagaattcaggactaggtctctcac

SEQ ID NO: 82369 - DNA, 25 bp, Artificial
  Probe
gtagtgttggctgaagacagacttg

SEQ ID NO: 82370 - DNA, 25 bp, Artificial
  Probe
agtagtgttggctgaagacagactt

SEQ ID NO: 82371 - DNA, 25 bp, Artificial
  Probe
ttctgagtagtgttggctgaagaca

SEQ ID NO: 82372 - DNA, 25 bp, Artificial
  Probe
atttcagagataggaaagattcggg

SEQ ID NO: 82373 - DNA, 25 bp, Artificial
  Probe
gcatttcagagataggaaagattcg

SEQ ID NO: 82374 - DNA, 25 bp, Artificial
  Probe
catttcagagataggaaagattcgg

SEQ ID NO: 82375 - DNA, 25 bp, Artificial
  Probe
tttcagagataggaaagattcgggt

SEQ ID NO: 82376 - DNA, 25 bp, Artificial
  Probe
taccttcattgccatcaagccagat

SEQ ID NO: 82377 - DNA, 25 bp, Artificial
  Probe
aattcaggactaggtctctcacgtt

SEQ ID NO: 82378 - DNA, 25 bp, Artificial
  Probe
gagtagtgttggctgaagacagact

SEQ ID NO: 82379 - DNA, 25 bp, Artificial
  Probe
ctgagtagtgttggctgaagacaga

SEQ ID NO: 82380 - DNA, 25 bp, Artificial
  Probe
tctgagtagtgttggctgaagacag

SEQ ID NO: 82381 - DNA, 25 bp, Artificial
  Probe
gcattcaagttggcaggaacatcat

SEQ ID NO: 82382 - DNA, 25 bp, Artificial
  Probe
ttttggatgaggaagacataagagc

SEQ ID NO: 82383 - DNA, 25 bp, Artificial
  Probe
cattttggatgaggaagacataaga

SEQ ID NO: 82384 - DNA, 25 bp, Artificial
  Probe
tgagtagtgttggctgaagacagac

SEQ ID NO: 82385 - DNA, 25 bp, Artificial
  Probe
attttggatgaggaagacataagag

SEQ ID NO: 82386 - DNA, 25 bp, Artificial
  Probe
tgaatgcagatgacttctggaataa

SEQ ID NO: 82387 - DNA, 25 bp, Artificial
  Probe
cttctgagtagtgttggctgaagac

SEQ ID NO: 82388 - DNA, 25 bp, Artificial
  Probe
gtgaatgcagatgacttctggaata

SEQ ID NO: 82389 - DNA, 25 bp, Artificial
  Probe
attcaggactaggtctctcacgttg

SEQ ID NO: 82390 - DNA, 25 bp, Artificial
  Probe
aaagaattcaggactaggtctctca

SEQ ID NO: 82391 - DNA, 25 bp, Artificial
  Probe
gctgcatttcagagataggaaagat

SEQ ID NO: 82392 - DNA, 25 bp, Artificial
  Probe
tagtgttggctgaagacagacttgg

SEQ ID NO: 82393 - DNA, 25 bp, Artificial
  Probe
gatcatcaagcgattcgagcagaag

SEQ ID NO: 82394 - DNA, 25 bp, Artificial
  Probe
tgcatttcagagataggaaagattc

SEQ ID NO: 82395 - DNA, 25 bp, Artificial
  Probe
ctgcatttcagagataggaaagatt

SEQ ID NO: 82396 - DNA, 25 bp, Artificial
  Probe
taaagaattcaggactaggtctctc

SEQ ID NO: 82397 - DNA, 25 bp, Artificial
  Probe
agaattcaggactaggtctctcacg

SEQ ID NO: 82398 - DNA, 25 bp, Artificial
  Probe
caagttggcaggaacatcattcacg

SEQ ID NO: 82399 - DNA, 25 bp, Artificial
  Probe
ataaagaattcaggactaggtctct

SEQ ID NO: 82400 - DNA, 25 bp, Artificial
  Probe
ggaaaggtgaatgcagatgacttct

SEQ ID NO: 82401 - DNA, 25 bp, Artificial
  Probe
tggaataaagaattcaggactaggt

SEQ ID NO: 82402 - DNA, 25 bp, Artificial
  Probe
gaattcaggactaggtctctcacgt

SEQ ID NO: 82403 - DNA, 25 bp, Artificial
  Probe
agatcatcaagcgattcgagcagaa

SEQ ID NO: 82404 - DNA, 25 bp, Artificial
  Probe
ggaataaagaattcaggactaggtc

SEQ ID NO: 82405 - DNA, 25 bp, Artificial
  Probe
ctggaataaagaattcaggactagg

SEQ ID NO: 82406 - DNA, 25 bp, Artificial
  Probe
aatccagtgctcttcgtgtattacc

SEQ ID NO: 82407 - DNA, 25 bp, Artificial
  Probe
caaatccagtgctcttcgtgtatta

SEQ ID NO: 82408 - DNA, 25 bp, Artificial
  Probe
aaatccagtgctcttcgtgtattac

SEQ ID NO: 82409 - DNA, 25 bp, Artificial
  Probe
atccagtgctcttcgtgtattacct

SEQ ID NO: 82410 - DNA, 25 bp, Artificial
  Probe
tccagtgctcttcgtgtattacctt

SEQ ID NO: 82411 - DNA, 25 bp, Artificial
  Probe
ctcaaagcattctcaccaaatccag

SEQ ID NO: 82412 - DNA, 25 bp, Artificial
  Probe
attatgtcctcatttcctggatctg

SEQ ID NO: 82413 - DNA, 25 bp, Artificial
  Probe
cattatgtcctcatttcctggatct

SEQ ID NO: 82414 - DNA, 25 bp, Artificial
  Probe
ccagtgctcttcgtgtattaccttt

SEQ ID NO: 82415 - DNA, 25 bp, Artificial
  Probe
tcaaagcattctcaccaaatccagt

SEQ ID NO: 82416 - DNA, 25 bp, Artificial
  Probe
accattatgtcctcatttcctggat

SEQ ID NO: 82417 - DNA, 25 bp, Artificial
  Probe
ccattatgtcctcatttcctggatc

SEQ ID NO: 82418 - DNA, 25 bp, Artificial
  Probe
agaagtgcaacttgtagagtatgag

SEQ ID NO: 82419 - DNA, 25 bp, Artificial
  Probe
cagaagtgcaacttgtagagtatga

SEQ ID NO: 82420 - DNA, 25 bp, Artificial
  Probe
ccaaatccagtgctcttcgtgtatt

SEQ ID NO: 82421 - DNA, 25 bp, Artificial
  Probe
agtgctcttcgtgtattacctttta

SEQ ID NO: 82422 - DNA, 25 bp, Artificial
  Probe
gaagtgcaacttgtagagtatgagg

SEQ ID NO: 82423 - DNA, 25 bp, Artificial
  Probe
tcgtgtattaccttttatagccaga

SEQ ID NO: 82424 - DNA, 25 bp, Artificial
  Probe
gtgctcttcgtgtattaccttttat

SEQ ID NO: 82425 - DNA, 25 bp, Artificial
  Probe
ttatgtcctcatttcctggatctgc

SEQ ID NO: 82426 - DNA, 25 bp, Artificial
  Probe
cgtgtattaccttttatagccagaa

SEQ ID NO: 82427 - DNA, 25 bp, Artificial
  Probe
ttcgtgtattaccttttatagccag

SEQ ID NO: 82428 - DNA, 25 bp, Artificial
  Probe
cttcgtgtattaccttttatagcca

SEQ ID NO: 82429 - DNA, 25 bp, Artificial
  Probe
cagtgctcttcgtgtattacctttt

SEQ ID NO: 82430 - DNA, 25 bp, Artificial
  Probe
caaagcattctcaccaaatccagtg

SEQ ID NO: 82431 - DNA, 25 bp, Artificial
  Probe
tcttcgtgtattaccttttatagcc

SEQ ID NO: 82432 - DNA, 25 bp, Artificial
  Probe
attctcaccaaatccagtgctcttc

SEQ ID NO: 82433 - DNA, 25 bp, Artificial
  Probe
cattctcaccaaatccagtgctctt

SEQ ID NO: 82434 - DNA, 25 bp, Artificial
  Probe
tgctcttcgtgtattaccttttata

SEQ ID NO: 82435 - DNA, 25 bp, Artificial
  Probe
accaaatccagtgctcttcgtgtat

SEQ ID NO: 82436 - DNA, 25 bp, Artificial
  Probe
ggtctcatccgatccttctgtgaac

SEQ ID NO: 82437 - DNA, 25 bp, Artificial
  Probe
aagtgcaacttgtagagtatgaggc

SEQ ID NO: 82438 - DNA, 25 bp, Artificial
  Probe
ctcttcgtgtattaccttttatagc

SEQ ID NO: 82439 - DNA, 25 bp, Artificial
  Probe
gctcttcgtgtattaccttttatag

SEQ ID NO: 82440 - DNA, 25 bp, Artificial
  Probe
gtctcatccgatccttctgtgaacg

SEQ ID NO: 82441 - DNA, 25 bp, Artificial
  Probe
tggtctcatccgatccttctgtgaa

SEQ ID NO: 82442 - DNA, 25 bp, Artificial
  Probe
gtgtattaccttttatagccagaaa

SEQ ID NO: 82443 - DNA, 25 bp, Artificial
  Probe
tatgtcctcatttcctggatctgca

SEQ ID NO: 82444 - DNA, 25 bp, Artificial
  Probe
agtgcaacttgtagagtatgaggcc

SEQ ID NO: 82445 - DNA, 25 bp, Artificial
  Probe
gctcaaagcattctcaccaaatcca

SEQ ID NO: 82446 - DNA, 25 bp, Artificial
  Probe
gtctgtggccctgaattgtgtttag

SEQ ID NO: 82447 - DNA, 25 bp, Artificial
  Probe
caccaaatccagtgctcttcgtgta

SEQ ID NO: 82448 - DNA, 25 bp, Artificial
  Probe
ttctcaccaaatccagtgctcttcg

SEQ ID NO: 82449 - DNA, 25 bp, Artificial
  Probe
aaagcattctcaccaaatccagtgc

SEQ ID NO: 82450 - DNA, 25 bp, Artificial
  Probe
ggctcaaagcattctcaccaaatcc

SEQ ID NO: 82451 - DNA, 25 bp, Artificial
  Probe
gcaatgatactgttctgtggtgaat

SEQ ID NO: 82452 - DNA, 25 bp, Artificial
  Probe
aagcaatgatactgttctgtggtga

SEQ ID NO: 82453 - DNA, 25 bp, Artificial
  Probe
caagcaatgatactgttctgtggtg

SEQ ID NO: 82454 - DNA, 25 bp, Artificial
  Probe
agcaatgatactgttctgtggtgaa

SEQ ID NO: 82455 - DNA, 25 bp, Artificial
  Probe
tatacacctccacaaacaatctcat

SEQ ID NO: 82456 - DNA, 25 bp, Artificial
  Probe
atatacacctccacaaacaatctca

SEQ ID NO: 82457 - DNA, 25 bp, Artificial
  Probe
tatggtaggaagtgggcatttaatc

SEQ ID NO: 82458 - DNA, 25 bp, Artificial
  Probe
ctatggtaggaagtgggcatttaat

SEQ ID NO: 82459 - DNA, 25 bp, Artificial
  Probe
catctaaacatcaagagcaagaagg

SEQ ID NO: 82460 - DNA, 25 bp, Artificial
  Probe
ccatctaaacatcaagagcaagaag

SEQ ID NO: 82461 - DNA, 25 bp, Artificial
  Probe
aacagctagactatggtaggaagtg

SEQ ID NO: 82462 - DNA, 25 bp, Artificial
  Probe
aatatacacctccacaaacaatctc

SEQ ID NO: 82463 - DNA, 25 bp, Artificial
  Probe
atctaaacatcaagagcaagaaggg

SEQ ID NO: 82464 - DNA, 25 bp, Artificial
  Probe
ctaaacatcaagagcaagaagggtt

SEQ ID NO: 82465 - DNA, 25 bp, Artificial
  Probe
aaatatacacctccacaaacaatct

SEQ ID NO: 82466 - DNA, 25 bp, Artificial
  Probe
agaaatatacacctccacaaacaat

SEQ ID NO: 82467 - DNA, 25 bp, Artificial
  Probe
cttcttgaagagagctaagcatata

SEQ ID NO: 82468 - DNA, 25 bp, Artificial
  Probe
gaaatatacacctccacaaacaatc

SEQ ID NO: 82469 - DNA, 25 bp, Artificial
  Probe
gccatctaaacatcaagagcaagaa

SEQ ID NO: 82470 - DNA, 25 bp, Artificial
  Probe
gagaaatatacacctccacaaacaa

SEQ ID NO: 82471 - DNA, 25 bp, Artificial
  Probe
actatggtaggaagtgggcatttaa

SEQ ID NO: 82472 - DNA, 25 bp, Artificial
  Probe
atacacctccacaaacaatctcatg

SEQ ID NO: 82473 - DNA, 25 bp, Artificial
  Probe
tctaaacatcaagagcaagaagggt

SEQ ID NO: 82474 - DNA, 25 bp, Artificial
  Probe
taacaggaccaagagaacacatcgt

SEQ ID NO: 82475 - DNA, 25 bp, Artificial
  Probe
ttattcacataaagcctaccacagg

SEQ ID NO: 82476 - DNA, 25 bp, Artificial
  Probe
gactatggtaggaagtgggcattta

SEQ ID NO: 82477 - DNA, 25 bp, Artificial
  Probe
tcttgaagagagctaagcatatatt

SEQ ID NO: 82478 - DNA, 25 bp, Artificial
  Probe
ttcttgaagagagctaagcatatat

SEQ ID NO: 82479 - DNA, 25 bp, Artificial
  Probe
tgggcatttaatccataagagtcaa

SEQ ID NO: 82480 - DNA, 25 bp, Artificial
  Probe
aagtgggcatttaatccataagagt

SEQ ID NO: 82481 - DNA, 25 bp, Artificial
  Probe
gaagtgggcatttaatccataagag

SEQ ID NO: 82482 - DNA, 25 bp, Artificial
  Probe
taggaagtgggcatttaatccataa

SEQ ID NO: 82483 - DNA, 25 bp, Artificial
  Probe
gtaggaagtgggcatttaatccata

SEQ ID NO: 82484 - DNA, 25 bp, Artificial
  Probe
agtgggcatttaatccataagagtc

SEQ ID NO: 82485 - DNA, 25 bp, Artificial
  Probe
gtgggcatttaatccataagagtca

SEQ ID NO: 82486 - DNA, 25 bp, Artificial
  Probe
ggaagtgggcatttaatccataaga

SEQ ID NO: 82487 - DNA, 25 bp, Artificial
  Probe
aggaagtgggcatttaatccataag

SEQ ID NO: 82488 - DNA, 25 bp, Artificial
  Probe
acagctagactatggtaggaagtgg

SEQ ID NO: 82489 - DNA, 25 bp, Artificial
  Probe
attcttcttgaagagagctaagcat

SEQ ID NO: 82490 - DNA, 25 bp, Artificial
  Probe
ttcttcttgaagagagctaagcata

SEQ ID NO: 82491 - DNA, 25 bp, Artificial
  Probe
aaacagctagactatggtaggaagt

SEQ ID NO: 82492 - DNA, 25 bp, Artificial
  Probe
tcttcttgaagagagctaagcatat

SEQ ID NO: 82493 - DNA, 25 bp, Artificial
  Probe
tagactatggtaggaagtgggcatt

SEQ ID NO: 82494 - DNA, 25 bp, Artificial
  Probe
tgtgtgtaaattagacattagtcca

SEQ ID NO: 82495 - DNA, 25 bp, Artificial
  Probe
aaatcagccaaagaatatcattaca

SEQ ID NO: 82496 - DNA, 25 bp, Artificial
  Probe
tcagaagtatctaggcagttggtat

SEQ ID NO: 82497 - DNA, 25 bp, Artificial
  Probe
ttcagaagtatctaggcagttggta

SEQ ID NO: 82498 - DNA, 25 bp, Artificial
  Probe
cagaagtatctaggcagttggtata

SEQ ID NO: 82499 - DNA, 25 bp, Artificial
  Probe
gtcttcagaagtatctaggcagttg

SEQ ID NO: 82500 - DNA, 25 bp, Artificial
  Probe
atgtcttcagaagtatctaggcagt

SEQ ID NO: 82501 - DNA, 25 bp, Artificial
  Probe
tgtcttcagaagtatctaggcagtt

SEQ ID NO: 82502 - DNA, 25 bp, Artificial
  Probe
catgtcttcagaagtatctaggcag

SEQ ID NO: 82503 - DNA, 25 bp, Artificial
  Probe
cagcatgtcttcagaagtatctagg

SEQ ID NO: 82504 - DNA, 25 bp, Artificial
  Probe
tcttcagaagtatctaggcagttgg

SEQ ID NO: 82505 - DNA, 25 bp, Artificial
  Probe
acagcatgtcttcagaagtatctag

SEQ ID NO: 82506 - DNA, 25 bp, Artificial
  Probe
cacagcatgtcttcagaagtatcta

SEQ ID NO: 82507 - DNA, 25 bp, Artificial
  Probe
gtgtgacagtgtgtgtatcttgaag

SEQ ID NO: 82508 - DNA, 25 bp, Artificial
  Probe
cttcagaagtatctaggcagttggt

SEQ ID NO: 82509 - DNA, 25 bp, Artificial
  Probe
agcatgtcttcagaagtatctaggc

SEQ ID NO: 82510 - DNA, 25 bp, Artificial
  Probe
gctttcagtgttggctatttctatg

SEQ ID NO: 82511 - DNA, 25 bp, Artificial
  Probe
ctttcagtgttggctatttctatgt

SEQ ID NO: 82512 - DNA, 25 bp, Artificial
  Probe
tgctttcagtgttggctatttctat

SEQ ID NO: 82513 - DNA, 25 bp, Artificial
  Probe
tgaagagtacagtacactggaagaa

SEQ ID NO: 82514 - DNA, 25 bp, Artificial
  Probe
ttgctttcagtgttggctatttcta

SEQ ID NO: 82515 - DNA, 25 bp, Artificial
  Probe
tgtgtgacagtgtgtgtatcttgaa

SEQ ID NO: 82516 - DNA, 25 bp, Artificial
  Probe
gcatgtcttcagaagtatctaggca

SEQ ID NO: 82517 - DNA, 25 bp, Artificial
  Probe
ttcagtgttggctatttctatgttt

SEQ ID NO: 82518 - DNA, 25 bp, Artificial
  Probe
tttcagtgttggctatttctatgtt

SEQ ID NO: 82519 - DNA, 25 bp, Artificial
  Probe
ctgaagagtacagtacactggaaga

SEQ ID NO: 82520 - DNA, 25 bp, Artificial
  Probe
tctgaagagtacagtacactggaag

SEQ ID NO: 82521 - DNA, 25 bp, Artificial
  Probe
ctctgaagagtacagtacactggaa

SEQ ID NO: 82522 - DNA, 25 bp, Artificial
  Probe
ttaactgcacaggaagtcgataatt

SEQ ID NO: 82523 - DNA, 25 bp, Artificial
  Probe
tgaagatggtgttccgaagaatgac

SEQ ID NO: 82524 - DNA, 25 bp, Artificial
  Probe
gtgaagatggtgttccgaagaatga

SEQ ID NO: 82525 - DNA, 25 bp, Artificial
  Probe
agtgaagatggtgttccgaagaatg

SEQ ID NO: 82526 - DNA, 25 bp, Artificial
  Probe
cagtgaagatggtgttccgaagaat

SEQ ID NO: 82527 - DNA, 25 bp, Artificial
  Probe
tttgctttcagtgttggctatttct

SEQ ID NO: 82528 - DNA, 25 bp, Artificial
  Probe
gtttgctttcagtgttggctatttc

SEQ ID NO: 82529 - DNA, 25 bp, Artificial
  Probe
tatacatttgaagccactgttgttg

SEQ ID NO: 82530 - DNA, 25 bp, Artificial
  Probe
aagttaatttgggaaatgaacagca

SEQ ID NO: 82531 - DNA, 25 bp, Artificial
  Probe
atgtttgctttcagtgttggctatt

SEQ ID NO: 82532 - DNA, 25 bp, Artificial
  Probe
aatgtttgctttcagtgttggctat

SEQ ID NO: 82533 - DNA, 25 bp, Artificial
  Probe
agttaatttgggaaatgaacagcat

SEQ ID NO: 82534 - DNA, 25 bp, Artificial
  Probe
ttatacatttgaagccactgttgtt

SEQ ID NO: 82535 - DNA, 25 bp, Artificial
  Probe
tttatacatttgaagccactgttgt

SEQ ID NO: 82536 - DNA, 25 bp, Artificial
  Probe
gtttatacatttgaagccactgttg

SEQ ID NO: 82537 - DNA, 25 bp, Artificial
  Probe
tgtttgctttcagtgttggctattt

SEQ ID NO: 82538 - DNA, 25 bp, Artificial
  Probe
gttatgagaaaccctgccttagact

SEQ ID NO: 82539 - DNA, 25 bp, Artificial
  Probe
gtgacagtgtgtgtatcttgaagca

SEQ ID NO: 82540 - DNA, 25 bp, Artificial
  Probe
tgtgacagtgtgtgtatcttgaagc

SEQ ID NO: 82541 - DNA, 25 bp, Artificial
  Probe
gtaactaaatgaaagaagccaacca

SEQ ID NO: 82542 - DNA, 25 bp, Artificial
  Probe
tgtaactaaatgaaagaagccaacc

SEQ ID NO: 82543 - DNA, 25 bp, Artificial
  Probe
attatatacatgagacacacactcc

SEQ ID NO: 82544 - DNA, 25 bp, Artificial
  Probe
taactaaatgaaagaagccaaccat

SEQ ID NO: 82545 - DNA, 25 bp, Artificial
  Probe
aaagaagccaaccattgtaatgttt

SEQ ID NO: 82546 - DNA, 25 bp, Artificial
  Probe
atgaaagaagccaaccattgtaatg

SEQ ID NO: 82547 - DNA, 25 bp, Artificial
  Probe
gaaagaagccaaccattgtaatgtt

SEQ ID NO: 82548 - DNA, 25 bp, Artificial
  Probe
atgtaactaaatgaaagaagccaac

SEQ ID NO: 82549 - DNA, 25 bp, Artificial
  Probe
cattgctgtttgtaaattcacatca

SEQ ID NO: 82550 - DNA, 25 bp, Artificial
  Probe
acattgctgtttgtaaattcacatc

SEQ ID NO: 82551 - DNA, 25 bp, Artificial
  Probe
tgaaagaagccaaccattgtaatgt

SEQ ID NO: 82552 - DNA, 25 bp, Artificial
  Probe
ttatatacatgagacacacactccc

SEQ ID NO: 82553 - DNA, 25 bp, Artificial
  Probe
tatatacatgagacacacactccca

SEQ ID NO: 82554 - DNA, 25 bp, Artificial
  Probe
attgctgtttgtaaattcacatcat

SEQ ID NO: 82555 - DNA, 25 bp, Artificial
  Probe
ttgctgtttgtaaattcacatcatg

SEQ ID NO: 82556 - DNA, 25 bp, Artificial
  Probe
tgctgtttgtaaattcacatcatgc

SEQ ID NO: 82557 - DNA, 25 bp, Artificial
  Probe
atatacatgagacacacactcccac

SEQ ID NO: 82558 - DNA, 25 bp, Artificial
  Probe
aaatgaaagaagccaaccattgtaa

SEQ ID NO: 82559 - DNA, 25 bp, Artificial
  Probe
ctaaatgaaagaagccaaccattgt

SEQ ID NO: 82560 - DNA, 25 bp, Artificial
  Probe
actaaatgaaagaagccaaccattg

SEQ ID NO: 82561 - DNA, 25 bp, Artificial
  Probe
aatgaaagaagccaaccattgtaat

SEQ ID NO: 82562 - DNA, 25 bp, Artificial
  Probe
aactaaatgaaagaagccaaccatt

SEQ ID NO: 82563 - DNA, 25 bp, Artificial
  Probe
taaatgaaagaagccaaccattgta

SEQ ID NO: 82564 - DNA, 25 bp, Artificial
  Probe
tatgtaactaaatgaaagaagccaa

SEQ ID NO: 82565 - DNA, 25 bp, Artificial
  Probe
ttatgtaactaaatgaaagaagcca

SEQ ID NO: 82566 - DNA, 25 bp, Artificial
  Probe
gggatgattttattgtttggggttt

SEQ ID NO: 82567 - DNA, 25 bp, Artificial
  Probe
tttattattatttggggaggggagg

SEQ ID NO: 82568 - DNA, 25 bp, Artificial
  Probe
gctgtttgtaaattcacatcatgca

SEQ ID NO: 82569 - DNA, 25 bp, Artificial
  Probe
ttattattatttggggaggggaggg

SEQ ID NO: 82570 - DNA, 25 bp, Artificial
  Probe
ggatgattttattgtttggggtttt

SEQ ID NO: 82571 - DNA, 25 bp, Artificial
  Probe
tgttttattattatttggggagggg

SEQ ID NO: 82572 - DNA, 25 bp, Artificial
  Probe
gttttattattatttggggagggga

SEQ ID NO: 82573 - DNA, 25 bp, Artificial
  Probe
ggggatgattttattgtttggggtt

SEQ ID NO: 82574 - DNA, 25 bp, Artificial
  Probe
tatacatgagacacacactcccaca

SEQ ID NO: 82575 - DNA, 25 bp, Artificial
  Probe
aagaagccaaccattgtaatgtttt

SEQ ID NO: 82576 - DNA, 25 bp, Artificial
  Probe
gaggggatgattttattgtttgggg

SEQ ID NO: 82577 - DNA, 25 bp, Artificial
  Probe
ggaggggatgattttattgtttggg

SEQ ID NO: 82578 - DNA, 25 bp, Artificial
  Probe
gggaggggatgattttattgtttgg

SEQ ID NO: 82579 - DNA, 25 bp, Artificial
  Probe
ggggaggggatgattttattgtttg

SEQ ID NO: 82580 - DNA, 25 bp, Artificial
  Probe
aggggaggggatgattttattgttt

SEQ ID NO: 82581 - DNA, 25 bp, Artificial
  Probe
ttttattattatttggggaggggag

SEQ ID NO: 82582 - DNA, 25 bp, Artificial
  Probe
gctgttttattattatttggggagg

SEQ ID NO: 82583 - DNA, 25 bp, Artificial
  Probe
ctcctggtactggcaatacacaaca

SEQ ID NO: 82584 - DNA, 25 bp, Artificial
  Probe
tattatatacatgagacacacactc

SEQ ID NO: 82585 - DNA, 25 bp, Artificial
  Probe
gaggggaggggatgattttattgtt

SEQ ID NO: 82586 - DNA, 25 bp, Artificial
  Probe
tattattacaccaaggaggagcaag

SEQ ID NO: 82587 - DNA, 25 bp, Artificial
  Probe
atattattacaccaaggaggagcaa

SEQ ID NO: 82588 - DNA, 25 bp, Artificial
  Probe
attattacaccaaggaggagcaagt

SEQ ID NO: 82589 - DNA, 25 bp, Artificial
  Probe
ttattacaccaaggaggagcaagtt

SEQ ID NO: 82590 - DNA, 25 bp, Artificial
  Probe
aatattattacaccaaggaggagca

SEQ ID NO: 82591 - DNA, 25 bp, Artificial
  Probe
gaatattattacaccaaggaggagc

SEQ ID NO: 82592 - DNA, 25 bp, Artificial
  Probe
tcatcctcaacatctcagaccattg

SEQ ID NO: 82593 - DNA, 25 bp, Artificial
  Probe
gtcatcctcaacatctcagaccatt

SEQ ID NO: 82594 - DNA, 25 bp, Artificial
  Probe
agaatattattacaccaaggaggag

SEQ ID NO: 82595 - DNA, 25 bp, Artificial
  Probe
attacaccaaggaggagcaagttta

SEQ ID NO: 82596 - DNA, 25 bp, Artificial
  Probe
tattacaccaaggaggagcaagttt

SEQ ID NO: 82597 - DNA, 25 bp, Artificial
  Probe
cttgtcatcctcaacatctcagacc

SEQ ID NO: 82598 - DNA, 25 bp, Artificial
  Probe
ccttgtcatcctcaacatctcagac

SEQ ID NO: 82599 - DNA, 25 bp, Artificial
  Probe
ttacaccaaggaggagcaagtttaa

SEQ ID NO: 82600 - DNA, 25 bp, Artificial
  Probe
cctcaacatctcagaccattggatc

SEQ ID NO: 82601 - DNA, 25 bp, Artificial
  Probe
catcctcaacatctcagaccattgg

SEQ ID NO: 82602 - DNA, 25 bp, Artificial
  Probe
aagaatattattacaccaaggagga

SEQ ID NO: 82603 - DNA, 25 bp, Artificial
  Probe
tgtcatcctcaacatctcagaccat

SEQ ID NO: 82604 - DNA, 25 bp, Artificial
  Probe
ttgtcatcctcaacatctcagacca

SEQ ID NO: 82605 - DNA, 25 bp, Artificial
  Probe
atatcgaagtgatgaactcctttga

SEQ ID NO: 82606 - DNA, 25 bp, Artificial
  Probe
tcctcaacatctcagaccattggat

SEQ ID NO: 82607 - DNA, 25 bp, Artificial
  Probe
atcctcaacatctcagaccattgga

SEQ ID NO: 82608 - DNA, 25 bp, Artificial
  Probe
tatcgaagtgatgaactcctttgag

SEQ ID NO: 82609 - DNA, 25 bp, Artificial
  Probe
aatatcgaagtgatgaactcctttg

SEQ ID NO: 82610 - DNA, 25 bp, Artificial
  Probe
gaaatatcgaagtgatgaactcctt

SEQ ID NO: 82611 - DNA, 25 bp, Artificial
  Probe
tacaccaaggaggagcaagtttaaa

SEQ ID NO: 82612 - DNA, 25 bp, Artificial
  Probe
aaatatcgaagtgatgaactccttt

SEQ ID NO: 82613 - DNA, 25 bp, Artificial
  Probe
ccgtgggaaaagaagattatcattt

SEQ ID NO: 82614 - DNA, 25 bp, Artificial
  Probe
accgtgggaaaagaagattatcatt

SEQ ID NO: 82615 - DNA, 25 bp, Artificial
  Probe
cgtgggaaaagaagattatcatttg

SEQ ID NO: 82616 - DNA, 25 bp, Artificial
  Probe
caccgtgggaaaagaagattatcat

SEQ ID NO: 82617 - DNA, 25 bp, Artificial
  Probe
cgaaatatcgaagtgatgaactcct

SEQ ID NO: 82618 - DNA, 25 bp, Artificial
  Probe
acaccgtgggaaaagaagattatca

SEQ ID NO: 82619 - DNA, 25 bp, Artificial
  Probe
aaagaatattattacaccaaggagg

SEQ ID NO: 82620 - DNA, 25 bp, Artificial
  Probe
gggaaaagaagattatcatttgaca

SEQ ID NO: 82621 - DNA, 25 bp, Artificial
  Probe
tgggaaaagaagattatcatttgac

SEQ ID NO: 82622 - DNA, 25 bp, Artificial
  Probe
gtgggaaaagaagattatcatttga

SEQ ID NO: 82623 - DNA, 25 bp, Artificial
  Probe
cccttgtcatcctcaacatctcaga

SEQ ID NO: 82624 - DNA, 25 bp, Artificial
  Probe
atcgaagtgatgaactcctttgagc

SEQ ID NO: 82625 - DNA, 25 bp, Artificial
  Probe
gcgaaatatcgaagtgatgaactcc

SEQ ID NO: 82626 - DNA, 25 bp, Artificial
  Probe
ggcgaaatatcgaagtgatgaactc

SEQ ID NO: 82627 - DNA, 25 bp, Artificial
  Probe
acaaagaatattattacaccaagga

SEQ ID NO: 82628 - DNA, 25 bp, Artificial
  Probe
cacaccgtgggaaaagaagattatc

SEQ ID NO: 82629 - DNA, 25 bp, Artificial
  Probe
gacaaagaatattattacaccaagg

SEQ ID NO: 82630 - DNA, 25 bp, Artificial
  Probe
tcacaccgtgggaaaagaagattat

SEQ ID NO: 82631 - DNA, 25 bp, Artificial
  Probe
ctgtagccgctgtaattgtgaatat

SEQ ID NO: 82632 - DNA, 25 bp, Artificial
  Probe
tgtagccgctgtaattgtgaatatt

SEQ ID NO: 82633 - DNA, 25 bp, Artificial
  Probe
gccgctgtaattgtgaatattaact

SEQ ID NO: 82634 - DNA, 25 bp, Artificial
  Probe
agccgctgtaattgtgaatattaac

SEQ ID NO: 82635 - DNA, 25 bp, Artificial
  Probe
gtagccgctgtaattgtgaatatta

SEQ ID NO: 82636 - DNA, 25 bp, Artificial
  Probe
tagccgctgtaattgtgaatattaa

SEQ ID NO: 82637 - DNA, 25 bp, Artificial
  Probe
ccgctgtaattgtgaatattaactg

SEQ ID NO: 82638 - DNA, 25 bp, Artificial
  Probe
cttactttccgtataaactggctct

SEQ ID NO: 82639 - DNA, 25 bp, Artificial
  Probe
ttactttccgtataaactggctctg

SEQ ID NO: 82640 - DNA, 25 bp, Artificial
  Probe
acttactttccgtataaactggctc

SEQ ID NO: 82641 - DNA, 25 bp, Artificial
  Probe
gacttactttccgtataaactggct

SEQ ID NO: 82642 - DNA, 25 bp, Artificial
  Probe
cgctgtaattgtgaatattaactga

SEQ ID NO: 82643 - DNA, 25 bp, Artificial
  Probe
tactttccgtataaactggctctgg

SEQ ID NO: 82644 - DNA, 25 bp, Artificial
  Probe
aagataatctagtagtcgctatgtt

SEQ ID NO: 82645 - DNA, 25 bp, Artificial
  Probe
gaagattggagcaacatttgtttct

SEQ ID NO: 82646 - DNA, 25 bp, Artificial
  Probe
agaagattggagcaacatttgtttc

SEQ ID NO: 82647 - DNA, 25 bp, Artificial
  Probe
tgttcagttgtaagacggtaactaa

SEQ ID NO: 82648 - DNA, 25 bp, Artificial
  Probe
atgttcagttgtaagacggtaacta

SEQ ID NO: 82649 - DNA, 25 bp, Artificial
  Probe
cagaagattggagcaacatttgttt

SEQ ID NO: 82650 - DNA, 25 bp, Artificial
  Probe
tgttatttctagcacagtaagcagg

SEQ ID NO: 82651 - DNA, 25 bp, Artificial
  Probe
attaactgaggtagtgaaacatggt

SEQ ID NO: 82652 - DNA, 25 bp, Artificial
  Probe
catttatctaagcaacacacataca

SEQ ID NO: 82653 - DNA, 25 bp, Artificial
  Probe
acatttatctaagcaacacacatac

SEQ ID NO: 82654 - DNA, 25 bp, Artificial
  Probe
tgtgaatattaactgaggtagtgaa

SEQ ID NO: 82655 - DNA, 25 bp, Artificial
  Probe
ttgtgaatattaactgaggtagtga

SEQ ID NO: 82656 - DNA, 25 bp, Artificial
  Probe
agtcttcactttagatgctgttatt

SEQ ID NO: 82657 - DNA, 25 bp, Artificial
  Probe
ttaactgaggtagtgaaacatggtg

SEQ ID NO: 82658 - DNA, 25 bp, Artificial
  Probe
aagattggagcaacatttgtttctc

SEQ ID NO: 82659 - DNA, 25 bp, Artificial
  Probe
gttatttctagcacagtaagcaggc

SEQ ID NO: 82660 - DNA, 25 bp, Artificial
  Probe
gctgtagccgctgtaattgtgaata

SEQ ID NO: 82661 - DNA, 25 bp, Artificial
  Probe
aggacttactttccgtataaactgg

SEQ ID NO: 82662 - DNA, 25 bp, Artificial
  Probe
gtcctaaagataatctagtagtcgc

SEQ ID NO: 82663 - DNA, 25 bp, Artificial
  Probe
cagagcagaagattggagcaacatt

SEQ ID NO: 82664 - DNA, 25 bp, Artificial
  Probe
ttatttctagcacagtaagcaggca

SEQ ID NO: 82665 - DNA, 25 bp, Artificial
  Probe
tcctaaagataatctagtagtcgct

SEQ ID NO: 82666 - DNA, 25 bp, Artificial
  Probe
gaacactggaatctttggttgctac

SEQ ID NO: 82667 - DNA, 25 bp, Artificial
  Probe
catgttcagttgtaagacggtaact

SEQ ID NO: 82668 - DNA, 25 bp, Artificial
  Probe
gtaagcaggcagagtctttcaaatg

SEQ ID NO: 82669 - DNA, 25 bp, Artificial
  Probe
agtaagcaggcagagtctttcaaat

SEQ ID NO: 82670 - DNA, 25 bp, Artificial
  Probe
gtcttcactttagatgctgttattt

SEQ ID NO: 82671 - DNA, 25 bp, Artificial
  Probe
gacggtaactaaatttctgtgacaa

SEQ ID NO: 82672 - DNA, 25 bp, Artificial
  Probe
ggacttactttccgtataaactggc

SEQ ID NO: 82673 - DNA, 25 bp, Artificial
  Probe
aaggacttactttccgtataaactg

SEQ ID NO: 82674 - DNA, 25 bp, Artificial
  Probe
cttcactttagatgctgttatttct

SEQ ID NO: 82675 - DNA, 25 bp, Artificial
  Probe
tcttcactttagatgctgttatttc

SEQ ID NO: 82676 - DNA, 25 bp, Artificial
  Probe
caatgtcaaggtcatccgagatttc

SEQ ID NO: 82677 - DNA, 25 bp, Artificial
  Probe
aatgtcaaggtcatccgagatttca

SEQ ID NO: 82678 - DNA, 25 bp, Artificial
  Probe
atgtcaaggtcatccgagatttcac

SEQ ID NO: 82679 - DNA, 25 bp, Artificial
  Probe
ccaatgtcaaggtcatccgagattt

SEQ ID NO: 82680 - DNA, 25 bp, Artificial
  Probe
accaatgtcaaggtcatccgagatt

SEQ ID NO: 82681 - DNA, 25 bp, Artificial
  Probe
caccaatgtcaaggtcatccgagat

SEQ ID NO: 82682 - DNA, 25 bp, Artificial
  Probe
caaacaacccaagtcagaagacagg

SEQ ID NO: 82683 - DNA, 25 bp, Artificial
  Probe
atccgagatttcaccacccaacaaa

SEQ ID NO: 82684 - DNA, 25 bp, Artificial
  Probe
gcaaacaacccaagtcagaagacag

SEQ ID NO: 82685 - DNA, 25 bp, Artificial
  Probe
cgagatttcaccacccaacaaagtg

SEQ ID NO: 82686 - DNA, 25 bp, Artificial
  Probe
gagatttcaccacccaacaaagtgc

SEQ ID NO: 82687 - DNA, 25 bp, Artificial
  Probe
tcaaggtcatccgagatttcaccac

SEQ ID NO: 82688 - DNA, 25 bp, Artificial
  Probe
gtcaaggtcatccgagatttcacca

SEQ ID NO: 82689 - DNA, 25 bp, Artificial
  Probe
tgtcaaggtcatccgagatttcacc

SEQ ID NO: 82690 - DNA, 25 bp, Artificial
  Probe
gtttcgtcaaccatgacccaattac

SEQ ID NO: 82691 - DNA, 25 bp, Artificial
  Probe
atttcaccacccaacaaagtgcaaa

SEQ ID NO: 82692 - DNA, 25 bp, Artificial
  Probe
gatttcaccacccaacaaagtgcaa

SEQ ID NO: 82693 - DNA, 25 bp, Artificial
  Probe
ggacaatttgctcaacatggcctac

SEQ ID NO: 82694 - DNA, 25 bp, Artificial
  Probe
tttcaccacccaacaaagtgcaaag

SEQ ID NO: 82695 - DNA, 25 bp, Artificial
  Probe
ggtttcgtcaaccatgacccaatta

SEQ ID NO: 82696 - DNA, 25 bp, Artificial
  Probe
tgcaaacaacccaagtcagaagaca

SEQ ID NO: 82697 - DNA, 25 bp, Artificial
  Probe
aaacaacccaagtcagaagacaggg

SEQ ID NO: 82698 - DNA, 25 bp, Artificial
  Probe
gacaatttgctcaacatggcctacg

SEQ ID NO: 82699 - DNA, 25 bp, Artificial
  Probe
tttcgtcaaccatgacccaattacg

SEQ ID NO: 82700 - DNA, 25 bp, Artificial
  Probe
tggacaatttgctcaacatggccta

SEQ ID NO: 82701 - DNA, 25 bp, Artificial
  Probe
ttgcaaacaacccaagtcagaagac

SEQ ID NO: 82702 - DNA, 25 bp, Artificial
  Probe
aaccatgacccaattacggttgagg

SEQ ID NO: 82703 - DNA, 25 bp, Artificial
  Probe
caagcacttacaaggagacctatcg

SEQ ID NO: 82704 - DNA, 25 bp, Artificial
  Probe
gcaagcacttacaaggagacctatc

SEQ ID NO: 82705 - DNA, 25 bp, Artificial
  Probe
cagagcagacttggaggtaacatct

SEQ ID NO: 82706 - DNA, 25 bp, Artificial
  Probe
cacttacaaggagacctatcggagg

SEQ ID NO: 82707 - DNA, 25 bp, Artificial
  Probe
agacttggaggtaacatctgtgctg

SEQ ID NO: 82708 - DNA, 25 bp, Artificial
  Probe
aagcacttacaaggagacctatcgg

SEQ ID NO: 82709 - DNA, 25 bp, Artificial
  Probe
gcacttacaaggagacctatcggag

SEQ ID NO: 82710 - DNA, 25 bp, Artificial
  Probe
acttggaggtaacatctgtgctgtc

SEQ ID NO: 82711 - DNA, 25 bp, Artificial
  Probe
gacttggaggtaacatctgtgctgt

SEQ ID NO: 82712 - DNA, 25 bp, Artificial
  Probe
agcacttacaaggagacctatcgga

SEQ ID NO: 82713 - DNA, 25 bp, Artificial
  Probe
cgcaagcacttacaaggagacctat

SEQ ID NO: 82714 - DNA, 25 bp, Artificial
  Probe
gaaacttctggacgcaagcacttac

SEQ ID NO: 82715 - DNA, 25 bp, Artificial
  Probe
cttggaggtaacatctgtgctgtcc

SEQ ID NO: 82716 - DNA, 25 bp, Artificial
  Probe
cttacaaggagacctatcggaggga

SEQ ID NO: 82717 - DNA, 25 bp, Artificial
  Probe
agaaacttctggacgcaagcactta

SEQ ID NO: 82718 - DNA, 25 bp, Artificial
  Probe
agagcagacttggaggtaacatctg

SEQ ID NO: 82719 - DNA, 25 bp, Artificial
  Probe
ttacaaggagacctatcggagggac

SEQ ID NO: 82720 - DNA, 25 bp, Artificial
  Probe
acttacaaggagacctatcggaggg

SEQ ID NO: 82721 - DNA, 25 bp, Artificial
  Probe
catggcttggacttccagaaacttc

SEQ ID NO: 82722 - DNA, 25 bp, Artificial
  Probe
gagcagacttggaggtaacatctgt

SEQ ID NO: 82723 - DNA, 25 bp, Artificial
  Probe
gagacctatcggagggacatgatct

SEQ ID NO: 82724 - DNA, 25 bp, Artificial
  Probe
atggcttggacttccagaaacttct

SEQ ID NO: 82725 - DNA, 25 bp, Artificial
  Probe
cagacttggaggtaacatctgtgct

SEQ ID NO: 82726 - DNA, 25 bp, Artificial
  Probe
agcagacttggaggtaacatctgtg

SEQ ID NO: 82727 - DNA, 25 bp, Artificial
  Probe
ttgctgtttagcgggaagagaaaat

SEQ ID NO: 82728 - DNA, 25 bp, Artificial
  Probe
tgttgctgtttagcgggaagagaaa

SEQ ID NO: 82729 - DNA, 25 bp, Artificial
  Probe
tgctgtttagcgggaagagaaaatc

SEQ ID NO: 82730 - DNA, 25 bp, Artificial
  Probe
gttgctgtttagcgggaagagaaaa

SEQ ID NO: 82731 - DNA, 25 bp, Artificial
  Probe
gctgtttagcgggaagagaaaatcc

SEQ ID NO: 82732 - DNA, 25 bp, Artificial
  Probe
gaagagaaaatccgggaaggacttc

SEQ ID NO: 82733 - DNA, 25 bp, Artificial
  Probe
ctgtttagcgggaagagaaaatccg

SEQ ID NO: 82734 - DNA, 25 bp, Artificial
  Probe
ggaagagaaaatccgggaaggactt

SEQ ID NO: 82735 - DNA, 25 bp, Artificial
  Probe
tggcttggacttccagaaacttctg

SEQ ID NO: 82736 - DNA, 25 bp, Artificial
  Probe
aagagaaaatccgggaaggacttcg

SEQ ID NO: 82737 - DNA, 25 bp, Artificial
  Probe
tgtttagcgggaagagaaaatccgg

SEQ ID NO: 82738 - DNA, 25 bp, Artificial
  Probe
cttcaagaacgccatcatcaagaac

SEQ ID NO: 82739 - DNA, 25 bp, Artificial
  Probe
ttcaagaacgccatcatcaagaacg

SEQ ID NO: 82740 - DNA, 25 bp, Artificial
  Probe
tcttcaagaacgccatcatcaagaa

SEQ ID NO: 82741 - DNA, 25 bp, Artificial
  Probe
ctcttcaagaacgccatcatcaaga

SEQ ID NO: 82742 - DNA, 25 bp, Artificial
  Probe
gctcttcaagaacgccatcatcaag

SEQ ID NO: 82743 - DNA, 25 bp, Artificial
  Probe
agagttacctgtagttaggaaataa

SEQ ID NO: 82744 - DNA, 25 bp, Artificial
  Probe
gatgaacagcccttgactgaaaatc

SEQ ID NO: 82745 - DNA, 25 bp, Artificial
  Probe
ctagagttcaagagggagctggaag

SEQ ID NO: 82746 - DNA, 25 bp, Artificial
  Probe
gagttacctgtagttaggaaataaa

SEQ ID NO: 82747 - DNA, 25 bp, Artificial
  Probe
agatgaacagcccttgactgaaaat

SEQ ID NO: 82748 - DNA, 25 bp, Artificial
  Probe
gaggcataaactggcaccactagag

SEQ ID NO: 82749 - DNA, 25 bp, Artificial
  Probe
gagatgaacagcccttgactgaaaa

SEQ ID NO: 82750 - DNA, 25 bp, Artificial
  Probe
ggagatgaacagcccttgactgaaa

SEQ ID NO: 82751 - DNA, 25 bp, Artificial
  Probe
atgaacagcccttgactgaaaatcc

SEQ ID NO: 82752 - DNA, 25 bp, Artificial
  Probe
tagagttcaagagggagctggaagg

SEQ ID NO: 82753 - DNA, 25 bp, Artificial
  Probe
cctagagttcaagagggagctggaa

SEQ ID NO: 82754 - DNA, 25 bp, Artificial
  Probe
gttacctgtagttaggaaataaaac

SEQ ID NO: 82755 - DNA, 25 bp, Artificial
  Probe
agttacctgtagttaggaaataaaa

SEQ ID NO: 82756 - DNA, 25 bp, Artificial
  Probe
cttgactgaaaatccccggaagtac

SEQ ID NO: 82757 - DNA, 25 bp, Artificial
  Probe
ccttgactgaaaatccccggaagta

SEQ ID NO: 82758 - DNA, 25 bp, Artificial
  Probe
ctgaaaatccccggaagtacgtcat

SEQ ID NO: 82759 - DNA, 25 bp, Artificial
  Probe
ttgactgaaaatccccggaagtacg

SEQ ID NO: 82760 - DNA, 25 bp, Artificial
  Probe
tgaaaatccccggaagtacgtcatg

SEQ ID NO: 82761 - DNA, 25 bp, Artificial
  Probe
tctgctttgatgctgagttattaca

SEQ ID NO: 82762 - DNA, 25 bp, Artificial
  Probe
acctgtgtcctctgctataatttaa

SEQ ID NO: 82763 - DNA, 25 bp, Artificial
  Probe
cacctgtgtcctctgctataattta

SEQ ID NO: 82764 - DNA, 25 bp, Artificial
  Probe
ctgctttgatgctgagttattacaa

SEQ ID NO: 82765 - DNA, 25 bp, Artificial
  Probe
tgctttgatgctgagttattacaat

SEQ ID NO: 82766 - DNA, 25 bp, Artificial
  Probe
ctctgctttgatgctgagttattac

SEQ ID NO: 82767 - DNA, 25 bp, Artificial
  Probe
tctctgctttgatgctgagttatta

SEQ ID NO: 82768 - DNA, 25 bp, Artificial
  Probe
ataatggagtttctcagtttcttgc

SEQ ID NO: 82769 - DNA, 25 bp, Artificial
  Probe
ttctctgctttgatgctgagttatt

SEQ ID NO: 82770 - DNA, 25 bp, Artificial
  Probe
gcactataatggagtttctcagttt

SEQ ID NO: 82771 - DNA, 25 bp, Artificial
  Probe
cgcactataatggagtttctcagtt

SEQ ID NO: 82772 - DNA, 25 bp, Artificial
  Probe
gctttgatgctgagttattacaatt

SEQ ID NO: 82773 - DNA, 25 bp, Artificial
  Probe
gttctctgctttgatgctgagttat

SEQ ID NO: 82774 - DNA, 25 bp, Artificial
  Probe
tgatgctgagttattacaattaaga

SEQ ID NO: 82775 - DNA, 25 bp, Artificial
  Probe
atgccattgacaaccacagatcatt

SEQ ID NO: 82776 - DNA, 25 bp, Artificial
  Probe
gccattgacaaccacagatcattta

SEQ ID NO: 82777 - DNA, 25 bp, Artificial
  Probe
gtttctcagtttcttgcaccttaaa

SEQ ID NO: 82778 - DNA, 25 bp, Artificial
  Probe
cctgtgtcctctgctataatttaaa

SEQ ID NO: 82779 - DNA, 25 bp, Artificial
  Probe
tgctgagttattacaattaagatgt

SEQ ID NO: 82780 - DNA, 25 bp, Artificial
  Probe
agtttctcagtttcttgcaccttaa

SEQ ID NO: 82781 - DNA, 25 bp, Artificial
  Probe
tttctcagtttcttgcaccttaaag

SEQ ID NO: 82782 - DNA, 25 bp, Artificial
  Probe
tgttctctgctttgatgctgagtta

SEQ ID NO: 82783 - DNA, 25 bp, Artificial
  Probe
ccgcactataatggagtttctcagt

SEQ ID NO: 82784 - DNA, 25 bp, Artificial
  Probe
cactttgttctctgctttgatgctg

SEQ ID NO: 82785 - DNA, 25 bp, Artificial
  Probe
cactataatggagtttctcagtttc

SEQ ID NO: 82786 - DNA, 25 bp, Artificial
  Probe
ctttgttctctgctttgatgctgag

SEQ ID NO: 82787 - DNA, 25 bp, Artificial
  Probe
actttgttctctgctttgatgctga

SEQ ID NO: 82788 - DNA, 25 bp, Artificial
  Probe
actataatggagtttctcagtttct

SEQ ID NO: 82789 - DNA, 25 bp, Artificial
  Probe
tgtgtcctctgctataatttaaagt

SEQ ID NO: 82790 - DNA, 25 bp, Artificial
  Probe
taatggagtttctcagtttcttgca

SEQ ID NO: 82791 - DNA, 25 bp, Artificial
  Probe
tgtcctctgctataatttaaagtca

SEQ ID NO: 82792 - DNA, 25 bp, Artificial
  Probe
gagtttctcagtttcttgcacctta

SEQ ID NO: 82793 - DNA, 25 bp, Artificial
  Probe
gtgtcctctgctataatttaaagtc

SEQ ID NO: 82794 - DNA, 25 bp, Artificial
  Probe
catgccattgacaaccacagatcat

SEQ ID NO: 82795 - DNA, 25 bp, Artificial
  Probe
ctgtgtcctctgctataatttaaag

SEQ ID NO: 82796 - DNA, 25 bp, Artificial
  Probe
ttgttctctgctttgatgctgagtt

SEQ ID NO: 82797 - DNA, 25 bp, Artificial
  Probe
tttgttctctgctttgatgctgagt

SEQ ID NO: 82798 - DNA, 25 bp, Artificial
  Probe
ttgatgctgagttattacaattaag

SEQ ID NO: 82799 - DNA, 25 bp, Artificial
  Probe
tataatggagtttctcagtttcttg

SEQ ID NO: 82800 - DNA, 25 bp, Artificial
  Probe
atgctgagttattacaattaagatg

SEQ ID NO: 82801 - DNA, 25 bp, Artificial
  Probe
aatggagtttctcagtttcttgcac

SEQ ID NO: 82802 - DNA, 25 bp, Artificial
  Probe
gctgagttattacaattaagatgtt

SEQ ID NO: 82803 - DNA, 25 bp, Artificial
  Probe
acactttgttctctgctttgatgct

SEQ ID NO: 82804 - DNA, 25 bp, Artificial
  Probe
ctataatggagtttctcagtttctt

SEQ ID NO: 82805 - DNA, 25 bp, Artificial
  Probe
gatgctgagttattacaattaagat

SEQ ID NO: 82806 - DNA, 25 bp, Artificial
  Probe
agaaactggaagaagaagaagaaga

SEQ ID NO: 82807 - DNA, 25 bp, Artificial
  Probe
gtcattcccttctaatcttgtccag

SEQ ID NO: 82808 - DNA, 25 bp, Artificial
  Probe
aagtcattcccttctaatcttgtcc

SEQ ID NO: 82809 - DNA, 25 bp, Artificial
  Probe
gaaactggaagaagaagaagaagaa

SEQ ID NO: 82810 - DNA, 25 bp, Artificial
  Probe
agtcattcccttctaatcttgtcca

SEQ ID NO: 82811 - DNA, 25 bp, Artificial
  Probe
aacaagaacggtaggcattcagaat

SEQ ID NO: 82812 - DNA, 25 bp, Artificial
  Probe
tcattcccttctaatcttgtccaga

SEQ ID NO: 82813 - DNA, 25 bp, Artificial
  Probe
aaactggaagaagaagaagaagaaa

SEQ ID NO: 82814 - DNA, 25 bp, Artificial
  Probe
aaagtcattcccttctaatcttgtc

SEQ ID NO: 82815 - DNA, 25 bp, Artificial
  Probe
attcccttctaatcttgtccagact

SEQ ID NO: 82816 - DNA, 25 bp, Artificial
  Probe
cattcccttctaatcttgtccagac

SEQ ID NO: 82817 - DNA, 25 bp, Artificial
  Probe
caaagtcattcccttctaatcttgt

SEQ ID NO: 82818 - DNA, 25 bp, Artificial
  Probe
tcccttctaatcttgtccagacttt

SEQ ID NO: 82819 - DNA, 25 bp, Artificial
  Probe
ttcccttctaatcttgtccagactt

SEQ ID NO: 82820 - DNA, 25 bp, Artificial
  Probe
tcaaagtcattcccttctaatcttg

SEQ ID NO: 82821 - DNA, 25 bp, Artificial
  Probe
gaacaagaacggtaggcattcagaa

SEQ ID NO: 82822 - DNA, 25 bp, Artificial
  Probe
cagaaactggaagaagaagaagaag

SEQ ID NO: 82823 - DNA, 25 bp, Artificial
  Probe
ttcaaagtcattcccttctaatctt

SEQ ID NO: 82824 - DNA, 25 bp, Artificial
  Probe
tttcaaagtcattcccttctaatct

SEQ ID NO: 82825 - DNA, 25 bp, Artificial
  Probe
gcactcactgacaaatggtattcat

SEQ ID NO: 82826 - DNA, 25 bp, Artificial
  Probe
cactcactgacaaatggtattcatg

SEQ ID NO: 82827 - DNA, 25 bp, Artificial
  Probe
gaaggaacaagaacggtaggcattc

SEQ ID NO: 82828 - DNA, 25 bp, Artificial
  Probe
ttatgcactagattgtgagggattt

SEQ ID NO: 82829 - DNA, 25 bp, Artificial
  Probe
tttatgcactagattgtgagggatt

SEQ ID NO: 82830 - DNA, 25 bp, Artificial
  Probe
tatgcactagattgtgagggatttg

SEQ ID NO: 82831 - DNA, 25 bp, Artificial
  Probe
aaggaacaagaacggtaggcattca

SEQ ID NO: 82832 - DNA, 25 bp, Artificial
  Probe
ggcactcactgacaaatggtattca

SEQ ID NO: 82833 - DNA, 25 bp, Artificial
  Probe
aactggaagaagaagaagaagaaaa

SEQ ID NO: 82834 - DNA, 25 bp, Artificial
  Probe
gggcactcactgacaaatggtattc

SEQ ID NO: 82835 - DNA, 25 bp, Artificial
  Probe
ggaacaagaacggtaggcattcaga

SEQ ID NO: 82836 - DNA, 25 bp, Artificial
  Probe
aggaacaagaacggtaggcattcag

SEQ ID NO: 82837 - DNA, 25 bp, Artificial
  Probe
aaatgtgcagaacttccagaaactg

SEQ ID NO: 82838 - DNA, 25 bp, Artificial
  Probe
cactagattgtgagggatttgctcc

SEQ ID NO: 82839 - DNA, 25 bp, Artificial
  Probe
ggaaggaacaagaacggtaggcatt

SEQ ID NO: 82840 - DNA, 25 bp, Artificial
  Probe
acaagaacggtaggcattcagaatg

SEQ ID NO: 82841 - DNA, 25 bp, Artificial
  Probe
actcactgacaaatggtattcatga

SEQ ID NO: 82842 - DNA, 25 bp, Artificial
  Probe
ttttcaaagtcattcccttctaatc

SEQ ID NO: 82843 - DNA, 25 bp, Artificial
  Probe
taaaatgtgcagaacttccagaaac

SEQ ID NO: 82844 - DNA, 25 bp, Artificial
  Probe
ttaaaatgtgcagaacttccagaaa

SEQ ID NO: 82845 - DNA, 25 bp, Artificial
  Probe
gtgacaagaacctttacacctgctc

SEQ ID NO: 82846 - DNA, 25 bp, Artificial
  Probe
gttaaaatgtgcagaacttccagaa

SEQ ID NO: 82847 - DNA, 25 bp, Artificial
  Probe
aaaatgtgcagaacttccagaaact

SEQ ID NO: 82848 - DNA, 25 bp, Artificial
  Probe
cttcgagaaactcattttatgcact

SEQ ID NO: 82849 - DNA, 25 bp, Artificial
  Probe
caagaacggtaggcattcagaatgg

SEQ ID NO: 82850 - DNA, 25 bp, Artificial
  Probe
ccttcgagaaactcattttatgcac

SEQ ID NO: 82851 - DNA, 25 bp, Artificial
  Probe
atgtcataccgtgtctaagagaatg

SEQ ID NO: 82852 - DNA, 25 bp, Artificial
  Probe
tctaagagaatgacatccatccatc

SEQ ID NO: 82853 - DNA, 25 bp, Artificial
  Probe
ctaagagaatgacatccatccatct

SEQ ID NO: 82854 - DNA, 25 bp, Artificial
  Probe
aatgtcataccgtgtctaagagaat

SEQ ID NO: 82855 - DNA, 25 bp, Artificial
  Probe
gtctaagagaatgacatccatccat

SEQ ID NO: 82856 - DNA, 25 bp, Artificial
  Probe
tcagacatggttcttctaagcagtt

SEQ ID NO: 82857 - DNA, 25 bp, Artificial
  Probe
ttcagacatggttcttctaagcagt

SEQ ID NO: 82858 - DNA, 25 bp, Artificial
  Probe
agtcttagaaatgtcataccgtgtc

SEQ ID NO: 82859 - DNA, 25 bp, Artificial
  Probe
tcagtcttagaaatgtcataccgtg

SEQ ID NO: 82860 - DNA, 25 bp, Artificial
  Probe
atggttcttctaagcagtttatccc

SEQ ID NO: 82861 - DNA, 25 bp, Artificial
  Probe
cagtcttagaaatgtcataccgtgt

SEQ ID NO: 82862 - DNA, 25 bp, Artificial
  Probe
ttcagtcttagaaatgtcataccgt

SEQ ID NO: 82863 - DNA, 25 bp, Artificial
  Probe
tgacatccatccatctttatttctg

SEQ ID NO: 82864 - DNA, 25 bp, Artificial
  Probe
gaaatgtcataccgtgtctaagaga

SEQ ID NO: 82865 - DNA, 25 bp, Artificial
  Probe
agaaatgtcataccgtgtctaagag

SEQ ID NO: 82866 - DNA, 25 bp, Artificial
  Probe
aaatgtcataccgtgtctaagagaa

SEQ ID NO: 82867 - DNA, 25 bp, Artificial
  Probe
gtcttagaaatgtcataccgtgtct

SEQ ID NO: 82868 - DNA, 25 bp, Artificial
  Probe
cttcagtcttagaaatgtcataccg

SEQ ID NO: 82869 - DNA, 25 bp, Artificial
  Probe
agagaatgacatccatccatcttta

SEQ ID NO: 82870 - DNA, 25 bp, Artificial
  Probe
tggttcttctaagcagtttatccct

SEQ ID NO: 82871 - DNA, 25 bp, Artificial
  Probe
taagagaatgacatccatccatctt

SEQ ID NO: 82872 - DNA, 25 bp, Artificial
  Probe
catggttcttctaagcagtttatcc

SEQ ID NO: 82873 - DNA, 25 bp, Artificial
  Probe
gagaatgacatccatccatctttat

SEQ ID NO: 82874 - DNA, 25 bp, Artificial
  Probe
cttctaagcagtttatccctgagat

SEQ ID NO: 82875 - DNA, 25 bp, Artificial
  Probe
ttcttctaagcagtttatccctgag

SEQ ID NO: 82876 - DNA, 25 bp, Artificial
  Probe
acatggttcttctaagcagtttatc

SEQ ID NO: 82877 - DNA, 25 bp, Artificial
  Probe
gacatggttcttctaagcagtttat

SEQ ID NO: 82878 - DNA, 25 bp, Artificial
  Probe
gttcttctaagcagtttatccctga

SEQ ID NO: 82879 - DNA, 25 bp, Artificial
  Probe
agacatggttcttctaagcagttta

SEQ ID NO: 82880 - DNA, 25 bp, Artificial
  Probe
tgtcataccgtgtctaagagaatga

SEQ ID NO: 82881 - DNA, 25 bp, Artificial
  Probe
tctaagcagtttatccctgagattt

SEQ ID NO: 82882 - DNA, 25 bp, Artificial
  Probe
ttctaagcagtttatccctgagatt

SEQ ID NO: 82883 - DNA, 25 bp, Artificial
  Probe
atttcagacatggttcttctaagca

SEQ ID NO: 82884 - DNA, 25 bp, Artificial
  Probe
gagtgtctatcagattgactttgct

SEQ ID NO: 82885 - DNA, 25 bp, Artificial
  Probe
gacatccatccatctttatttctgt

SEQ ID NO: 82886 - DNA, 25 bp, Artificial
  Probe
tcttctaagcagtttatccctgaga

SEQ ID NO: 82887 - DNA, 25 bp, Artificial
  Probe
agtgtctatcagattgactttgctg

SEQ ID NO: 82888 - DNA, 25 bp, Artificial
  Probe
atgacatccatccatctttatttct

SEQ ID NO: 82889 - DNA, 25 bp, Artificial
  Probe
tcttcagtcttagaaatgtcatacc

SEQ ID NO: 82890 - DNA, 25 bp, Artificial
  Probe
gggagtgtctatcagattgactttg

SEQ ID NO: 82891 - DNA, 25 bp, Artificial
  Probe
agggagtgtctatcagattgacttt

SEQ ID NO: 82892 - DNA, 25 bp, Artificial
  Probe
agaatgacatccatccatctttatt

SEQ ID NO: 82893 - DNA, 25 bp, Artificial
  Probe
tttcagacatggttcttctaagcag

SEQ ID NO: 82894 - DNA, 25 bp, Artificial
  Probe
ggttcttctaagcagtttatccctg

SEQ ID NO: 82895 - DNA, 25 bp, Artificial
  Probe
tatttcagacatggttcttctaagc

SEQ ID NO: 82896 - DNA, 25 bp, Artificial
  Probe
attgtgtgaatgtccagagttactt

SEQ ID NO: 82897 - DNA, 25 bp, Artificial
  Probe
gaattgtgtgaatgtccagagttac

SEQ ID NO: 82898 - DNA, 25 bp, Artificial
  Probe
aattgtgtgaatgtccagagttact

SEQ ID NO: 82899 - DNA, 25 bp, Artificial
  Probe
tgaattgtgtgaatgtccagagtta

SEQ ID NO: 82900 - DNA, 25 bp, Artificial
  Probe
taagaagagagcatctggagaacta

SEQ ID NO: 82901 - DNA, 25 bp, Artificial
  Probe
attaagaagagagcatctggagaac

SEQ ID NO: 82902 - DNA, 25 bp, Artificial
  Probe
atgaattgtgtgaatgtccagagtt

SEQ ID NO: 82903 - DNA, 25 bp, Artificial
  Probe
aatgaattgtgtgaatgtccagagt

SEQ ID NO: 82904 - DNA, 25 bp, Artificial
  Probe
gaagagagcatctggagaactaatg

SEQ ID NO: 82905 - DNA, 25 bp, Artificial
  Probe
agaagagagcatctggagaactaat

SEQ ID NO: 82906 - DNA, 25 bp, Artificial
  Probe
ttgtgtgaatgtccagagttacttg

SEQ ID NO: 82907 - DNA, 25 bp, Artificial
  Probe
aattaagaagagagcatctggagaa

SEQ ID NO: 82908 - DNA, 25 bp, Artificial
  Probe
aagaagagagcatctggagaactaa

SEQ ID NO: 82909 - DNA, 25 bp, Artificial
  Probe
ttaagaagagagcatctggagaact

SEQ ID NO: 82910 - DNA, 25 bp, Artificial
  Probe
aagagagcatctggagaactaatga

SEQ ID NO: 82911 - DNA, 25 bp, Artificial
  Probe
gagagcatctggagaactaatgact

SEQ ID NO: 82912 - DNA, 25 bp, Artificial
  Probe
agagagcatctggagaactaatgac

SEQ ID NO: 82913 - DNA, 25 bp, Artificial
  Probe
catctggagaactaatgactgttgc

SEQ ID NO: 82914 - DNA, 25 bp, Artificial
  Probe
gcatctggagaactaatgactgttg

SEQ ID NO: 82915 - DNA, 25 bp, Artificial
  Probe
agcatctggagaactaatgactgtt

SEQ ID NO: 82916 - DNA, 25 bp, Artificial
  Probe
agagcatctggagaactaatgactg

SEQ ID NO: 82917 - DNA, 25 bp, Artificial
  Probe
gagcatctggagaactaatgactgt

SEQ ID NO: 82918 - DNA, 25 bp, Artificial
  Probe
taattaagaagagagcatctggaga

SEQ ID NO: 82919 - DNA, 25 bp, Artificial
  Probe
ctaattaagaagagagcatctggag

SEQ ID NO: 82920 - DNA, 25 bp, Artificial
  Probe
atctggagaactaatgactgttgcc

SEQ ID NO: 82921 - DNA, 25 bp, Artificial
  Probe
aaatgaattgtgtgaatgtccagag

SEQ ID NO: 82922 - DNA, 25 bp, Artificial
  Probe
agtattctgaactacctgaagctaa

SEQ ID NO: 82923 - DNA, 25 bp, Artificial
  Probe
tgactacaagcaagacagtgtaata

SEQ ID NO: 82924 - DNA, 25 bp, Artificial
  Probe
cagtattctgaactacctgaagcta

SEQ ID NO: 82925 - DNA, 25 bp, Artificial
  Probe
ctgaactacctgaagctaattaaga

SEQ ID NO: 82926 - DNA, 25 bp, Artificial
  Probe
tctgaactacctgaagctaattaag

SEQ ID NO: 82927 - DNA, 25 bp, Artificial
  Probe
ctgactacaagcaagacagtgtaat

SEQ ID NO: 82928 - DNA, 25 bp, Artificial
  Probe
actacaagcaagacagtgtaataac

SEQ ID NO: 82929 - DNA, 25 bp, Artificial
  Probe
caaatgaattgtgtgaatgtccaga

SEQ ID NO: 82930 - DNA, 25 bp, Artificial
  Probe
gtattctgaactacctgaagctaat

SEQ ID NO: 82931 - DNA, 25 bp, Artificial
  Probe
agttacttggatcaggctttagaaa

SEQ ID NO: 82932 - DNA, 25 bp, Artificial
  Probe
ctacaagcaagacagtgtaataact

SEQ ID NO: 82933 - DNA, 25 bp, Artificial
  Probe
gactacaagcaagacagtgtaataa

SEQ ID NO: 82934 - DNA, 25 bp, Artificial
  Probe
gagttacttggatcaggctttagaa

SEQ ID NO: 82935 - DNA, 25 bp, Artificial
  Probe
actacctgaagctaattaagaagag

SEQ ID NO: 82936 - DNA, 25 bp, Artificial
  Probe
atgcagtattctgaactacctgaag

SEQ ID NO: 82937 - DNA, 25 bp, Artificial
  Probe
agagttacttggatcaggctttaga

SEQ ID NO: 82938 - DNA, 25 bp, Artificial
  Probe
cagagttacttggatcaggctttag

SEQ ID NO: 82939 - DNA, 25 bp, Artificial
  Probe
tgaactacctgaagctaattaagaa

SEQ ID NO: 82940 - DNA, 25 bp, Artificial
  Probe
gatgcagtattctgaactacctgaa

SEQ ID NO: 82941 - DNA, 25 bp, Artificial
  Probe
aatcaccataactctgtaactcctg

SEQ ID NO: 82942 - DNA, 25 bp, Artificial
  Probe
caatcaccataactctgtaactcct

SEQ ID NO: 82943 - DNA, 25 bp, Artificial
  Probe
gcaatcaccataactctgtaactcc

SEQ ID NO: 82944 - DNA, 25 bp, Artificial
  Probe
atcaccataactctgtaactcctga

SEQ ID NO: 82945 - DNA, 25 bp, Artificial
  Probe
cattagtgcctcgtatcctagtgat

SEQ ID NO: 82946 - DNA, 25 bp, Artificial
  Probe
tcaccataactctgtaactcctgag

SEQ ID NO: 82947 - DNA, 25 bp, Artificial
  Probe
attagtgcctcgtatcctagtgata

SEQ ID NO: 82948 - DNA, 25 bp, Artificial
  Probe
tgtaattatcctatggtgatgctgt

SEQ ID NO: 82949 - DNA, 25 bp, Artificial
  Probe
ttagtgcctcgtatcctagtgataa

SEQ ID NO: 82950 - DNA, 25 bp, Artificial
  Probe
ccttgtaattatcctatggtgatgc

SEQ ID NO: 82951 - DNA, 25 bp, Artificial
  Probe
ctagtgataactccaggtctgtgaa

SEQ ID NO: 82952 - DNA, 25 bp, Artificial
  Probe
tagtgataactccaggtctgtgaac

SEQ ID NO: 82953 - DNA, 25 bp, Artificial
  Probe
tagtgcctcgtatcctagtgataac

SEQ ID NO: 82954 - DNA, 25 bp, Artificial
  Probe
tatcctagtgataactccaggtctg

SEQ ID NO: 82955 - DNA, 25 bp, Artificial
  Probe
gtatcctagtgataactccaggtct

SEQ ID NO: 82956 - DNA, 25 bp, Artificial
  Probe
gtaattatcctatggtgatgctgtt

SEQ ID NO: 82957 - DNA, 25 bp, Artificial
  Probe
ttgtaattatcctatggtgatgctg

SEQ ID NO: 82958 - DNA, 25 bp, Artificial
  Probe
cctcgtatcctagtgataactccag

SEQ ID NO: 82959 - DNA, 25 bp, Artificial
  Probe
tattgtaattagctctgttggcatg

SEQ ID NO: 82960 - DNA, 25 bp, Artificial
  Probe
gtattgtaattagctctgttggcat

SEQ ID NO: 82961 - DNA, 25 bp, Artificial
  Probe
acacatatacatccatataaggcaa

SEQ ID NO: 82962 - DNA, 25 bp, Artificial
  Probe
ttcgtattgtaattagctctgttgg

SEQ ID NO: 82963 - DNA, 25 bp, Artificial
  Probe
cttgtaattatcctatggtgatgct

SEQ ID NO: 82964 - DNA, 25 bp, Artificial
  Probe
ctcgtatcctagtgataactccagg

SEQ ID NO: 82965 - DNA, 25 bp, Artificial
  Probe
tcgtattgtaattagctctgttggc

SEQ ID NO: 82966 - DNA, 25 bp, Artificial
  Probe
atgatgcagtaggtgagaagttatt

SEQ ID NO: 82967 - DNA, 25 bp, Artificial
  Probe
catgatgcagtaggtgagaagttat

SEQ ID NO: 82968 - DNA, 25 bp, Artificial
  Probe
cgtattgtaattagctctgttggca

SEQ ID NO: 82969 - DNA, 25 bp, Artificial
  Probe
cgtatcctagtgataactccaggtc

SEQ ID NO: 82970 - DNA, 25 bp, Artificial
  Probe
agaggtttggactttcgtattgtaa

SEQ ID NO: 82971 - DNA, 25 bp, Artificial
  Probe
attatcctatggtgatgctgtttct

SEQ ID NO: 82972 - DNA, 25 bp, Artificial
  Probe
tgatgcagtaggtgagaagttatta

SEQ ID NO: 82973 - DNA, 25 bp, Artificial
  Probe
tgcaatcaccataactctgtaactc

SEQ ID NO: 82974 - DNA, 25 bp, Artificial
  Probe
ttatcctatggtgatgctgtttctc

SEQ ID NO: 82975 - DNA, 25 bp, Artificial
  Probe
atgcaatcaccataactctgtaact

SEQ ID NO: 82976 - DNA, 25 bp, Artificial
  Probe
gaggtttggactttcgtattgtaat

SEQ ID NO: 82977 - DNA, 25 bp, Artificial
  Probe
taaaggaccagatgacagaacaaag

SEQ ID NO: 82978 - DNA, 25 bp, Artificial
  Probe
ctaaaggaccagatgacagaacaaa

SEQ ID NO: 82979 - DNA, 25 bp, Artificial
  Probe
attgtaattagctctgttggcatgg

SEQ ID NO: 82980 - DNA, 25 bp, Artificial
  Probe
cagaggtttggactttcgtattgta

SEQ ID NO: 82981 - DNA, 25 bp, Artificial
  Probe
gtgcctcgtatcctagtgataactc

SEQ ID NO: 82982 - DNA, 25 bp, Artificial
  Probe
tcgtatcctagtgataactccaggt

SEQ ID NO: 82983 - DNA, 25 bp, Artificial
  Probe
gaactaaaggaccagatgacagaac

SEQ ID NO: 82984 - DNA, 25 bp, Artificial
  Probe
agaactaaaggaccagatgacagaa

SEQ ID NO: 82985 - DNA, 25 bp, Artificial
  Probe
atcctagtgataactccaggtctgt

SEQ ID NO: 82986 - DNA, 25 bp, Artificial
  Probe
ccacatttctttcaggaacaacatt

SEQ ID NO: 82987 - DNA, 25 bp, Artificial
  Probe
cacatttctttcaggaacaacattg

SEQ ID NO: 82988 - DNA, 25 bp, Artificial
  Probe
attcaacacaactcccacatttctt

SEQ ID NO: 82989 - DNA, 25 bp, Artificial
  Probe
acatttctttcaggaacaacattgc

SEQ ID NO: 82990 - DNA, 25 bp, Artificial
  Probe
ttcaacacaactcccacatttcttt

SEQ ID NO: 82991 - DNA, 25 bp, Artificial
  Probe
ttcattcaacacaactcccacattt

SEQ ID NO: 82992 - DNA, 25 bp, Artificial
  Probe
aacacaactcccacatttctttcag

SEQ ID NO: 82993 - DNA, 25 bp, Artificial
  Probe
catttctttcaggaacaacattgcc

SEQ ID NO: 82994 - DNA, 25 bp, Artificial
  Probe
tcaacacaactcccacatttctttc

SEQ ID NO: 82995 - DNA, 25 bp, Artificial
  Probe
cattcaacacaactcccacatttct

SEQ ID NO: 82996 - DNA, 25 bp, Artificial
  Probe
tcattcaacacaactcccacatttc

SEQ ID NO: 82997 - DNA, 25 bp, Artificial
  Probe
cttcattcaacacaactcccacatt

SEQ ID NO: 82998 - DNA, 25 bp, Artificial
  Probe
atttctttcaggaacaacattgcca

SEQ ID NO: 82999 - DNA, 25 bp, Artificial
  Probe
caacacaactcccacatttctttca

SEQ ID NO: 83000 - DNA, 25 bp, Artificial
  Probe
cccacatttctttcaggaacaacat

SEQ ID NO: 83001 - DNA, 25 bp, Artificial
  Probe
ttctttcaggaacaacattgccaaa

SEQ ID NO: 83002 - DNA, 25 bp, Artificial
  Probe
tttctttcaggaacaacattgccaa

SEQ ID NO: 83003 - DNA, 25 bp, Artificial
  Probe
tctttcaggaacaacattgccaaac

SEQ ID NO: 83004 - DNA, 25 bp, Artificial
  Probe
gaacttcattcaacacaactcccac

SEQ ID NO: 83005 - DNA, 25 bp, Artificial
  Probe
acttcattcaacacaactcccacat

SEQ ID NO: 83006 - DNA, 25 bp, Artificial
  Probe
agatgaacttcattcaacacaactc

SEQ ID NO: 83007 - DNA, 25 bp, Artificial
  Probe
gagatgaacttcattcaacacaact

SEQ ID NO: 83008 - DNA, 25 bp, Artificial
  Probe
aagtctctggtttaatatctgatga

SEQ ID NO: 83009 - DNA, 25 bp, Artificial
  Probe
gatgaacttcattcaacacaactcc

SEQ ID NO: 83010 - DNA, 25 bp, Artificial
  Probe
aacttcattcaacacaactcccaca

SEQ ID NO: 83011 - DNA, 25 bp, Artificial
  Probe
agtctctggtttaatatctgatgat

SEQ ID NO: 83012 - DNA, 25 bp, Artificial
  Probe
ctcccacatttctttcaggaacaac

SEQ ID NO: 83013 - DNA, 25 bp, Artificial
  Probe
caactcccacatttctttcaggaac

SEQ ID NO: 83014 - DNA, 25 bp, Artificial
  Probe
acacaactcccacatttctttcagg

SEQ ID NO: 83015 - DNA, 25 bp, Artificial
  Probe
agtaagtctctggtttaatatctga

SEQ ID NO: 83016 - DNA, 25 bp, Artificial
  Probe
actcccacatttctttcaggaacaa

SEQ ID NO: 83017 - DNA, 25 bp, Artificial
  Probe
aactcccacatttctttcaggaaca

SEQ ID NO: 83018 - DNA, 25 bp, Artificial
  Probe
acaactcccacatttctttcaggaa

SEQ ID NO: 83019 - DNA, 25 bp, Artificial
  Probe
tcccacatttctttcaggaacaaca

SEQ ID NO: 83020 - DNA, 25 bp, Artificial
  Probe
gtctctggtttaatatctgatgatt

SEQ ID NO: 83021 - DNA, 25 bp, Artificial
  Probe
ctttcaggaacaacattgccaaacg

SEQ ID NO: 83022 - DNA, 25 bp, Artificial
  Probe
gagtaagtctctggtttaatatctg

SEQ ID NO: 83023 - DNA, 25 bp, Artificial
  Probe
agactatcctatggaaagctatact

SEQ ID NO: 83024 - DNA, 25 bp, Artificial
  Probe
cacaactcccacatttctttcagga

SEQ ID NO: 83025 - DNA, 25 bp, Artificial
  Probe
gcgagagtaagtctctggtttaata

SEQ ID NO: 83026 - DNA, 25 bp, Artificial
  Probe
taagtctctggtttaatatctgatg

SEQ ID NO: 83027 - DNA, 25 bp, Artificial
  Probe
gtaagtctctggtttaatatctgat

SEQ ID NO: 83028 - DNA, 25 bp, Artificial
  Probe
aagactatcctatggaaagctatac

SEQ ID NO: 83029 - DNA, 25 bp, Artificial
  Probe
tcctagatgagaaattacaaagaaa

SEQ ID NO: 83030 - DNA, 25 bp, Artificial
  Probe
atgaacttcattcaacacaactccc

SEQ ID NO: 83031 - DNA, 25 bp, Artificial
  Probe
gattcaaaccaagatcactgacaag

SEQ ID NO: 83032 - DNA, 25 bp, Artificial
  Probe
agataaacgaagacaaacgccattc

SEQ ID NO: 83033 - DNA, 25 bp, Artificial
  Probe
cagataaacgaagacaaacgccatt

SEQ ID NO: 83034 - DNA, 25 bp, Artificial
  Probe
gataaacgaagacaaacgccattca

SEQ ID NO: 83035 - DNA, 25 bp, Artificial
  Probe
attcaccagtgactacagcaaatac

SEQ ID NO: 83036 - DNA, 25 bp, Artificial
  Probe
cattcaccagtgactacagcaaata

SEQ ID NO: 83037 - DNA, 25 bp, Artificial
  Probe
gatgaacacgattctcgataacctt

SEQ ID NO: 83038 - DNA, 25 bp, Artificial
  Probe
ataaacgaagacaaacgccattcac

SEQ ID NO: 83039 - DNA, 25 bp, Artificial
  Probe
atgaacacgattctcgataaccttg

SEQ ID NO: 83040 - DNA, 25 bp, Artificial
  Probe
agatgaacacgattctcgataacct

SEQ ID NO: 83041 - DNA, 25 bp, Artificial
  Probe
tcagataaacgaagacaaacgccat

SEQ ID NO: 83042 - DNA, 25 bp, Artificial
  Probe
atcagataaacgaagacaaacgcca

SEQ ID NO: 83043 - DNA, 25 bp, Artificial
  Probe
catcgtggctggattgtttgtaatg

SEQ ID NO: 83044 - DNA, 25 bp, Artificial
  Probe
gctggattgtttgtaatgctggtac

SEQ ID NO: 83045 - DNA, 25 bp, Artificial
  Probe
ttctctgatgagatgaacacgattc

SEQ ID NO: 83046 - DNA, 25 bp, Artificial
  Probe
cttctctgatgagatgaacacgatt

SEQ ID NO: 83047 - DNA, 25 bp, Artificial
  Probe
gatccttctctgatgagatgaacac

SEQ ID NO: 83048 - DNA, 25 bp, Artificial
  Probe
ctctgatgagatgaacacgattctc

SEQ ID NO: 83049 - DNA, 25 bp, Artificial
  Probe
tctctgatgagatgaacacgattct

SEQ ID NO: 83050 - DNA, 25 bp, Artificial
  Probe
atgagatgaacacgattctcgataa

SEQ ID NO: 83051 - DNA, 25 bp, Artificial
  Probe
ctggattgtttgtaatgctggtaca

SEQ ID NO: 83052 - DNA, 25 bp, Artificial
  Probe
gatgagatgaacacgattctcgata

SEQ ID NO: 83053 - DNA, 25 bp, Artificial
  Probe
tgattcaaaccaagatcactgacaa

SEQ ID NO: 83054 - DNA, 25 bp, Artificial
  Probe
ggctggattgtttgtaatgctggta

SEQ ID NO: 83055 - DNA, 25 bp, Artificial
  Probe
tgagatgaacacgattctcgataac

SEQ ID NO: 83056 - DNA, 25 bp, Artificial
  Probe
ctgattcaaaccaagatcactgaca

SEQ ID NO: 83057 - DNA, 25 bp, Artificial
  Probe
acattcaccagtgactacagcaaat

SEQ ID NO: 83058 - DNA, 25 bp, Artificial
  Probe
gtttacatcgtggctggattgtttg

SEQ ID NO: 83059 - DNA, 25 bp, Artificial
  Probe
ccttctctgatgagatgaacacgat

SEQ ID NO: 83060 - DNA, 25 bp, Artificial
  Probe
atccttctctgatgagatgaacacg

SEQ ID NO: 83061 - DNA, 25 bp, Artificial
  Probe
ttcaccagtgactacagcaaatacc

SEQ ID NO: 83062 - DNA, 25 bp, Artificial
  Probe
acatcgtggctggattgtttgtaat

SEQ ID NO: 83063 - DNA, 25 bp, Artificial
  Probe
gagatgaacacgattctcgataacc

SEQ ID NO: 83064 - DNA, 25 bp, Artificial
  Probe
taaacgaagacaaacgccattcaca

SEQ ID NO: 83065 - DNA, 25 bp, Artificial
  Probe
tcaactggctgattcaaaccaagat

SEQ ID NO: 83066 - DNA, 25 bp, Artificial
  Probe
caactggctgattcaaaccaagatc

SEQ ID NO: 83067 - DNA, 25 bp, Artificial
  Probe
tttacatcgtggctggattgtttgt

SEQ ID NO: 83068 - DNA, 25 bp, Artificial
  Probe
acttcatcaactggctgattcaaac

SEQ ID NO: 83069 - DNA, 25 bp, Artificial
  Probe
tctgatgagatgaacacgattctcg

SEQ ID NO: 83070 - DNA, 25 bp, Artificial
  Probe
tgatgagatgaacacgattctcgat

SEQ ID NO: 83071 - DNA, 25 bp, Artificial
  Probe
tacatcgtggctggattgtttgtaa

SEQ ID NO: 83072 - DNA, 25 bp, Artificial
  Probe
ttacatcgtggctggattgtttgta

SEQ ID NO: 83073 - DNA, 25 bp, Artificial
  Probe
aaaatgaagaccgtttacatcgtgg

SEQ ID NO: 83074 - DNA, 25 bp, Artificial
  Probe
aaatgaagaccgtttacatcgtggc

SEQ ID NO: 83075 - DNA, 25 bp, Artificial
  Probe
gctgattcaaaccaagatcactgac

SEQ ID NO: 83076 - DNA, 25 bp, Artificial
  Probe
gacttcctgacttggataaagaacc

SEQ ID NO: 83077 - DNA, 25 bp, Artificial
  Probe
gtttcctttggtctctgttgctttc

SEQ ID NO: 83078 - DNA, 25 bp, Artificial
  Probe
gttgagtttcctttggtctctgttg

SEQ ID NO: 83079 - DNA, 25 bp, Artificial
  Probe
cgacttcctgacttggataaagaac

SEQ ID NO: 83080 - DNA, 25 bp, Artificial
  Probe
acgacttcctgacttggataaagaa

SEQ ID NO: 83081 - DNA, 25 bp, Artificial
  Probe
tttcctttggtctctgttgctttca

SEQ ID NO: 83082 - DNA, 25 bp, Artificial
  Probe
agtttcctttggtctctgttgcttt

SEQ ID NO: 83083 - DNA, 25 bp, Artificial
  Probe
acttcctgacttggataaagaaccc

SEQ ID NO: 83084 - DNA, 25 bp, Artificial
  Probe
cacgacttcctgacttggataaaga

SEQ ID NO: 83085 - DNA, 25 bp, Artificial
  Probe
gagtttcctttggtctctgttgctt

SEQ ID NO: 83086 - DNA, 25 bp, Artificial
  Probe
cgttgagtttcctttggtctctgtt

SEQ ID NO: 83087 - DNA, 25 bp, Artificial
  Probe
ctgttgctttcagggaagatgagag

SEQ ID NO: 83088 - DNA, 25 bp, Artificial
  Probe
ctctgttgctttcagggaagatgag

SEQ ID NO: 83089 - DNA, 25 bp, Artificial
  Probe
ttcctttggtctctgttgctttcag

SEQ ID NO: 83090 - DNA, 25 bp, Artificial
  Probe
cttcctgacttggataaagaacccg

SEQ ID NO: 83091 - DNA, 25 bp, Artificial
  Probe
ttgagtttcctttggtctctgttgc

SEQ ID NO: 83092 - DNA, 25 bp, Artificial
  Probe
gtctctgttgctttcagggaagatg

SEQ ID NO: 83093 - DNA, 25 bp, Artificial
  Probe
tctgttgctttcagggaagatgaga

SEQ ID NO: 83094 - DNA, 25 bp, Artificial
  Probe
tctctgttgctttcagggaagatga

SEQ ID NO: 83095 - DNA, 25 bp, Artificial
  Probe
cagcacgacttcctgacttggataa

SEQ ID NO: 83096 - DNA, 25 bp, Artificial
  Probe
gcacgacttcctgacttggataaag

SEQ ID NO: 83097 - DNA, 25 bp, Artificial
  Probe
tgagtttcctttggtctctgttgct

SEQ ID NO: 83098 - DNA, 25 bp, Artificial
  Probe
agcacgacttcctgacttggataaa

SEQ ID NO: 83099 - DNA, 25 bp, Artificial
  Probe
tgttgctttcagggaagatgagagg

SEQ ID NO: 83100 - DNA, 25 bp, Artificial
  Probe
ggtctctgttgctttcagggaagat

SEQ ID NO: 83101 - DNA, 25 bp, Artificial
  Probe
tttggtctctgttgctttcagggaa

SEQ ID NO: 83102 - DNA, 25 bp, Artificial
  Probe
ccgttgagtttcctttggtctctgt

SEQ ID NO: 83103 - DNA, 25 bp, Artificial
  Probe
ttggtctctgttgctttcagggaag

SEQ ID NO: 83104 - DNA, 25 bp, Artificial
  Probe
ctttggtctctgttgctttcaggga

SEQ ID NO: 83105 - DNA, 25 bp, Artificial
  Probe
ctttcagggaagatgagaggcttct

SEQ ID NO: 83106 - DNA, 25 bp, Artificial
  Probe
ttcctgacttggataaagaacccgc

SEQ ID NO: 83107 - DNA, 25 bp, Artificial
  Probe
tcctttggtctctgttgctttcagg

SEQ ID NO: 83108 - DNA, 25 bp, Artificial
  Probe
tttcagggaagatgagaggcttctc

SEQ ID NO: 83109 - DNA, 25 bp, Artificial
  Probe
tacgggtcattgagagaaataaagt

SEQ ID NO: 83110 - DNA, 25 bp, Artificial
  Probe
cctacgggtcattgagagaaataaa

SEQ ID NO: 83111 - DNA, 25 bp, Artificial
  Probe
acgggtcattgagagaaataaagtt

SEQ ID NO: 83112 - DNA, 25 bp, Artificial
  Probe
attgagagaaataaagttcgcttgg

SEQ ID NO: 83113 - DNA, 25 bp, Artificial
  Probe
gagagaaataaagttcgcttggaaa

SEQ ID NO: 83114 - DNA, 25 bp, Artificial
  Probe
ctacgggtcattgagagaaataaag

SEQ ID NO: 83115 - DNA, 25 bp, Artificial
  Probe
gggtcattgagagaaataaagttcg

SEQ ID NO: 83116 - DNA, 25 bp, Artificial
  Probe
cgggtcattgagagaaataaagttc

SEQ ID NO: 83117 - DNA, 25 bp, Artificial
  Probe
gtcattgagagaaataaagttcgct

SEQ ID NO: 83118 - DNA, 25 bp, Artificial
  Probe
tgagagaaataaagttcgcttggaa

SEQ ID NO: 83119 - DNA, 25 bp, Artificial
  Probe
ttgagagaaataaagttcgcttgga

SEQ ID NO: 83120 - DNA, 25 bp, Artificial
  Probe
ggtcattgagagaaataaagttcgc

SEQ ID NO: 83121 - DNA, 25 bp, Artificial
  Probe
cattgagagaaataaagttcgcttg

SEQ ID NO: 83122 - DNA, 25 bp, Artificial
  Probe
tcattgagagaaataaagttcgctt

SEQ ID NO: 83123 - DNA, 25 bp, Artificial
  Probe
acaggagcctaagcctaattacctt

SEQ ID NO: 83124 - DNA, 25 bp, Artificial
  Probe
aacaggagcctaagcctaattacct

SEQ ID NO: 83125 - DNA, 25 bp, Artificial
  Probe
gaaacaggagcctaagcctaattac

SEQ ID NO: 83126 - DNA, 25 bp, Artificial
  Probe
aggagcctaagcctaattacctttg

SEQ ID NO: 83127 - DNA, 25 bp, Artificial
  Probe
caggagcctaagcctaattaccttt

SEQ ID NO: 83128 - DNA, 25 bp, Artificial
  Probe
ggaaacaggagcctaagcctaatta

SEQ ID NO: 83129 - DNA, 25 bp, Artificial
  Probe
agaaataaagttcgcttggaaaaga

SEQ ID NO: 83130 - DNA, 25 bp, Artificial
  Probe
agagaaataaagttcgcttggaaaa

SEQ ID NO: 83131 - DNA, 25 bp, Artificial
  Probe
gagaaataaagttcgcttggaaaag

SEQ ID NO: 83132 - DNA, 25 bp, Artificial
  Probe
atgaatgtatttatttggaaggccg

SEQ ID NO: 83133 - DNA, 25 bp, Artificial
  Probe
aaacaggagcctaagcctaattacc

SEQ ID NO: 83134 - DNA, 25 bp, Artificial
  Probe
gaaataaagttcgcttggaaaagaa

SEQ ID NO: 83135 - DNA, 25 bp, Artificial
  Probe
ccccttttcttttgcttatgtttaa

SEQ ID NO: 83136 - DNA, 25 bp, Artificial
  Probe
aaataaagttcgcttggaaaagaaa

SEQ ID NO: 83137 - DNA, 25 bp, Artificial
  Probe
tgaatgtatttatttggaaggccgg

SEQ ID NO: 83138 - DNA, 25 bp, Artificial
  Probe
ccctacgggtcattgagagaaataa

SEQ ID NO: 83139 - DNA, 25 bp, Artificial
  Probe
gagcctaagcctaattacctttgcc

SEQ ID NO: 83140 - DNA, 25 bp, Artificial
  Probe
ggagcctaagcctaattacctttgc

SEQ ID NO: 83141 - DNA, 25 bp, Artificial
  Probe
ttatgaatgtatttatttggaaggc

SEQ ID NO: 83142 - DNA, 25 bp, Artificial
  Probe
gaatgtatttatttggaaggccggg

SEQ ID NO: 83143 - DNA, 25 bp, Artificial
  Probe
ctgtcgctacatcactgaacctctg

SEQ ID NO: 83144 - DNA, 25 bp, Artificial
  Probe
ttctgtgaaaacggagctaaactac

SEQ ID NO: 83145 - DNA, 25 bp, Artificial
  Probe
tatgaatgtatttatttggaaggcc

SEQ ID NO: 83146 - DNA, 25 bp, Artificial
  Probe
caagatatttatctaacccagttgt

SEQ ID NO: 83147 - DNA, 25 bp, Artificial
  Probe
acaagatatttatctaacccagttg

SEQ ID NO: 83148 - DNA, 25 bp, Artificial
  Probe
tgcttatgaatgtatttatttggaa

SEQ ID NO: 83149 - DNA, 25 bp, Artificial
  Probe
ttgcttatgaatgtatttatttgga

SEQ ID NO: 83150 - DNA, 25 bp, Artificial
  Probe
ctaaactaccagctatccccatctg

SEQ ID NO: 83151 - DNA, 25 bp, Artificial
  Probe
tctgtgaaaacggagctaaactacc

SEQ ID NO: 83152 - DNA, 25 bp, Artificial
  Probe
aagatatttatctaacccagttgtc

SEQ ID NO: 83153 - DNA, 25 bp, Artificial
  Probe
tttctgtgaaaacggagctaaacta

SEQ ID NO: 83154 - DNA, 25 bp, Artificial
  Probe
cacccctatttctctgacttctgtc

SEQ ID NO: 83155 - DNA, 25 bp, Artificial
  Probe
agcacccctatttctctgacttctg

SEQ ID NO: 83156 - DNA, 25 bp, Artificial
  Probe
acccctatttctctgacttctgtcc

SEQ ID NO: 83157 - DNA, 25 bp, Artificial
  Probe
gcacccctatttctctgacttctgt

SEQ ID NO: 83158 - DNA, 25 bp, Artificial
  Probe
cagcacccctatttctctgacttct

SEQ ID NO: 83159 - DNA, 25 bp, Artificial
  Probe
ccctatttctctgacttctgtcccc

SEQ ID NO: 83160 - DNA, 25 bp, Artificial
  Probe
cccctatttctctgacttctgtccc

SEQ ID NO: 83161 - DNA, 25 bp, Artificial
  Probe
ccattatgaacctgcttatctgata

SEQ ID NO: 83162 - DNA, 25 bp, Artificial
  Probe
tgtgtaccagttcattaattctcct

SEQ ID NO: 83163 - DNA, 25 bp, Artificial
  Probe
aattgacaagctaacatctgacact

SEQ ID NO: 83164 - DNA, 25 bp, Artificial
  Probe
atgaacctgcttatctgataatgag

SEQ ID NO: 83165 - DNA, 25 bp, Artificial
  Probe
ttcttaatcagttatcctatctcgg

SEQ ID NO: 83166 - DNA, 25 bp, Artificial
  Probe
tgaacctgcttatctgataatgagg

SEQ ID NO: 83167 - DNA, 25 bp, Artificial
  Probe
attgacaagctaacatctgacactg

SEQ ID NO: 83168 - DNA, 25 bp, Artificial
  Probe
ctgtatgctttactggtttcttgtt

SEQ ID NO: 83169 - DNA, 25 bp, Artificial
  Probe
ttcctgtatgctttactggtttctt

SEQ ID NO: 83170 - DNA, 25 bp, Artificial
  Probe
tttcctgtatgctttactggtttct

SEQ ID NO: 83171 - DNA, 25 bp, Artificial
  Probe
cccattatgaacctgcttatctgat

SEQ ID NO: 83172 - DNA, 25 bp, Artificial
  Probe
atgctttactggtttcttgtttgtg

SEQ ID NO: 83173 - DNA, 25 bp, Artificial
  Probe
tatgctttactggtttcttgtttgt

SEQ ID NO: 83174 - DNA, 25 bp, Artificial
  Probe
tgtatgctttactggtttcttgttt

SEQ ID NO: 83175 - DNA, 25 bp, Artificial
  Probe
tgtaccagttcattaattctcctga

SEQ ID NO: 83176 - DNA, 25 bp, Artificial
  Probe
gtgtaccagttcattaattctcctg

SEQ ID NO: 83177 - DNA, 25 bp, Artificial
  Probe
ctgtgtaccagttcattaattctcc

SEQ ID NO: 83178 - DNA, 25 bp, Artificial
  Probe
aacccattatgaacctgcttatctg

SEQ ID NO: 83179 - DNA, 25 bp, Artificial
  Probe
caacccattatgaacctgcttatct

SEQ ID NO: 83180 - DNA, 25 bp, Artificial
  Probe
gtatgctttactggtttcttgtttg

SEQ ID NO: 83181 - DNA, 25 bp, Artificial
  Probe
gaacctgcttatctgataatgaggc

SEQ ID NO: 83182 - DNA, 25 bp, Artificial
  Probe
tcctgtatgctttactggtttcttg

SEQ ID NO: 83183 - DNA, 25 bp, Artificial
  Probe
aacctgcttatctgataatgaggct

SEQ ID NO: 83184 - DNA, 25 bp, Artificial
  Probe
cctgtatgctttactggtttcttgt

SEQ ID NO: 83185 - DNA, 25 bp, Artificial
  Probe
tcttaatcagttatcctatctcgga

SEQ ID NO: 83186 - DNA, 25 bp, Artificial
  Probe
gctgtattcattgggctctttaata

SEQ ID NO: 83187 - DNA, 25 bp, Artificial
  Probe
acccattatgaacctgcttatctga

SEQ ID NO: 83188 - DNA, 25 bp, Artificial
  Probe
gtaccagttcattaattctcctgat

SEQ ID NO: 83189 - DNA, 25 bp, Artificial
  Probe
tgaagtcaatttccgaaacaagtat

SEQ ID NO: 83190 - DNA, 25 bp, Artificial
  Probe
actttgttagaagacagaagagcat

SEQ ID NO: 83191 - DNA, 25 bp, Artificial
  Probe
tatgaacctgcttatctgataatga

SEQ ID NO: 83192 - DNA, 25 bp, Artificial
  Probe
tactttgttagaagacagaagagca

SEQ ID NO: 83193 - DNA, 25 bp, Artificial
  Probe
taccagttcattaattctcctgatc

SEQ ID NO: 83194 - DNA, 25 bp, Artificial
  Probe
tttgaagtcaatttccgaaacaagt

SEQ ID NO: 83195 - DNA, 25 bp, Artificial
  Probe
ctaatgctttgaagtcaatttccga

SEQ ID NO: 83196 - DNA, 25 bp, Artificial
  Probe
ctttgttagaagacagaagagcatt

SEQ ID NO: 83197 - DNA, 25 bp, Artificial
  Probe
taatgctttgaagtcaatttccgaa

SEQ ID NO: 83198 - DNA, 25 bp, Artificial
  Probe
ctttgaagtcaatttccgaaacaag

SEQ ID NO: 83199 - DNA, 25 bp, Artificial
  Probe
aatgctttgaagtcaatttccgaaa

SEQ ID NO: 83200 - DNA, 25 bp, Artificial
  Probe
acctgcttatctgataatgaggctg

SEQ ID NO: 83201 - DNA, 25 bp, Artificial
  Probe
ttgaagtcaatttccgaaacaagta

SEQ ID NO: 83202 - DNA, 25 bp, Artificial
  Probe
actaatgctttgaagtcaatttccg

SEQ ID NO: 83203 - DNA, 25 bp, Artificial
  Probe
tttgttagaagacagaagagcattt

SEQ ID NO: 83204 - DNA, 25 bp, Artificial
  Probe
atgctttgaagtcaatttccgaaac

SEQ ID NO: 83205 - DNA, 25 bp, Artificial
  Probe
gctttgaagtcaatttccgaaacaa

SEQ ID NO: 83206 - DNA, 25 bp, Artificial
  Probe
ttactgacgctgttgatggactatg

SEQ ID NO: 83207 - DNA, 25 bp, Artificial
  Probe
ggttatatccaacagactcactgag

SEQ ID NO: 83208 - DNA, 25 bp, Artificial
  Probe
gttatatccaacagactcactgagc

SEQ ID NO: 83209 - DNA, 25 bp, Artificial
  Probe
cctctcagccctttcataatgttat

SEQ ID NO: 83210 - DNA, 25 bp, Artificial
  Probe
gaccagtgttctgtctgtcaatatt

SEQ ID NO: 83211 - DNA, 25 bp, Artificial
  Probe
ctctcagccctttcataatgttatt

SEQ ID NO: 83212 - DNA, 25 bp, Artificial
  Probe
ttatatccaacagactcactgagcc

SEQ ID NO: 83213 - DNA, 25 bp, Artificial
  Probe
tttactgacgctgttgatggactat

SEQ ID NO: 83214 - DNA, 25 bp, Artificial
  Probe
ccctctcagccctttcataatgtta

SEQ ID NO: 83215 - DNA, 25 bp, Artificial
  Probe
gagggttatatccaacagactcact

SEQ ID NO: 83216 - DNA, 25 bp, Artificial
  Probe
tcactttggtcacattgataggtac

SEQ ID NO: 83217 - DNA, 25 bp, Artificial
  Probe
tttgacatcacgattcttgtatggg

SEQ ID NO: 83218 - DNA, 25 bp, Artificial
  Probe
atttgtgtgaattgctttgagatat

SEQ ID NO: 83219 - DNA, 25 bp, Artificial
  Probe
ttatttccaagtaagttctttcagc

SEQ ID NO: 83220 - DNA, 25 bp, Artificial
  Probe
gctttattatacaggcatgtggaaa

SEQ ID NO: 83221 - DNA, 25 bp, Artificial
  Probe
gggttatatccaacagactcactga

SEQ ID NO: 83222 - DNA, 25 bp, Artificial
  Probe
agggttatatccaacagactcactg

SEQ ID NO: 83223 - DNA, 25 bp, Artificial
  Probe
tctcagccctttcataatgttatta

SEQ ID NO: 83224 - DNA, 25 bp, Artificial
  Probe
tccaagtaagttctttcagctaaca

SEQ ID NO: 83225 - DNA, 25 bp, Artificial
  Probe
ccaagtaagttctttcagctaacaa

SEQ ID NO: 83226 - DNA, 25 bp, Artificial
  Probe
aatttgtgtgaattgctttgagata

SEQ ID NO: 83227 - DNA, 25 bp, Artificial
  Probe
taatttgtgtgaattgctttgagat

SEQ ID NO: 83228 - DNA, 25 bp, Artificial
  Probe
ataatttgtgtgaattgctttgaga

SEQ ID NO: 83229 - DNA, 25 bp, Artificial
  Probe
ttccaagtaagttctttcagctaac

SEQ ID NO: 83230 - DNA, 25 bp, Artificial
  Probe
ttgtgtgaattgctttgagatataa

SEQ ID NO: 83231 - DNA, 25 bp, Artificial
  Probe
tttgtgtgaattgctttgagatata

SEQ ID NO: 83232 - DNA, 25 bp, Artificial
  Probe
tttccaagtaagttctttcagctaa

SEQ ID NO: 83233 - DNA, 25 bp, Artificial
  Probe
caagtaagttctttcagctaacaac

SEQ ID NO: 83234 - DNA, 25 bp, Artificial
  Probe
agataatgcaaagaactggaaacat

SEQ ID NO: 83235 - DNA, 25 bp, Artificial
  Probe
tgtgtgaattgctttgagatataat

SEQ ID NO: 83236 - DNA, 25 bp, Artificial
  Probe
gttctttcagctaacaacttcattt

SEQ ID NO: 83237 - DNA, 25 bp, Artificial
  Probe
atttccaagtaagttctttcagcta

SEQ ID NO: 83238 - DNA, 25 bp, Artificial
  Probe
tatttccaagtaagttctttcagct

SEQ ID NO: 83239 - DNA, 25 bp, Artificial
  Probe
attatacaggcatgtggaaatatcc

SEQ ID NO: 83240 - DNA, 25 bp, Artificial
  Probe
acattgtgttctgtggatcactttg

SEQ ID NO: 83241 - DNA, 25 bp, Artificial
  Probe
aataatttgtgtgaattgctttgag

SEQ ID NO: 83242 - DNA, 25 bp, Artificial
  Probe
cagataatgcaaagaactggaaaca

SEQ ID NO: 83243 - DNA, 25 bp, Artificial
  Probe
attatcacccaaccacacttttact

SEQ ID NO: 83244 - DNA, 25 bp, Artificial
  Probe
tcagataatgcaaagaactggaaac

SEQ ID NO: 83245 - DNA, 25 bp, Artificial
  Probe
gtcagataatgcaaagaactggaaa

SEQ ID NO: 83246 - DNA, 25 bp, Artificial
  Probe
aaagtcagataatgcaaagaactgg

SEQ ID NO: 83247 - DNA, 25 bp, Artificial
  Probe
agaaagtcagataatgcaaagaact

SEQ ID NO: 83248 - DNA, 25 bp, Artificial
  Probe
agtcagataatgcaaagaactggaa

SEQ ID NO: 83249 - DNA, 25 bp, Artificial
  Probe
aagtcagataatgcaaagaactgga

SEQ ID NO: 83250 - DNA, 25 bp, Artificial
  Probe
aagaaagtcagataatgcaaagaac

SEQ ID NO: 83251 - DNA, 25 bp, Artificial
  Probe
aagattctcctagttctgttctacc

SEQ ID NO: 83252 - DNA, 25 bp, Artificial
  Probe
ccaagattctcctagttctgttcta

SEQ ID NO: 83253 - DNA, 25 bp, Artificial
  Probe
agacaattatgactccttctgaaga

SEQ ID NO: 83254 - DNA, 25 bp, Artificial
  Probe
caagattctcctagttctgttctac

SEQ ID NO: 83255 - DNA, 25 bp, Artificial
  Probe
caattatgactccttctgaagagca

SEQ ID NO: 83256 - DNA, 25 bp, Artificial
  Probe
acaattatgactccttctgaagagc

SEQ ID NO: 83257 - DNA, 25 bp, Artificial
  Probe
gacaattatgactccttctgaagag

SEQ ID NO: 83258 - DNA, 25 bp, Artificial
  Probe
aagacaattatgactccttctgaag

SEQ ID NO: 83259 - DNA, 25 bp, Artificial
  Probe
aattatgactccttctgaagagcag

SEQ ID NO: 83260 - DNA, 25 bp, Artificial
  Probe
gccaagattctcctagttctgttct

SEQ ID NO: 83261 - DNA, 25 bp, Artificial
  Probe
tgcttgtccctcttaatcattcatc

SEQ ID NO: 83262 - DNA, 25 bp, Artificial
  Probe
cttgtccctcttaatcattcatccc

SEQ ID NO: 83263 - DNA, 25 bp, Artificial
  Probe
cctcttaatcattcatcccagaact

SEQ ID NO: 83264 - DNA, 25 bp, Artificial
  Probe
gtgcttgtccctcttaatcattcat

SEQ ID NO: 83265 - DNA, 25 bp, Artificial
  Probe
cccatttcattctttgccatttctg

SEQ ID NO: 83266 - DNA, 25 bp, Artificial
  Probe
accttgaaagacaattatgactcct

SEQ ID NO: 83267 - DNA, 25 bp, Artificial
  Probe
caccttgaaagacaattatgactcc

SEQ ID NO: 83268 - DNA, 25 bp, Artificial
  Probe
ccctcttaatcattcatcccagaac

SEQ ID NO: 83269 - DNA, 25 bp, Artificial
  Probe
tccctcttaatcattcatcccagaa

SEQ ID NO: 83270 - DNA, 25 bp, Artificial
  Probe
attatgactccttctgaagagcagg

SEQ ID NO: 83271 - DNA, 25 bp, Artificial
  Probe
ttgtccctcttaatcattcatccca

SEQ ID NO: 83272 - DNA, 25 bp, Artificial
  Probe
cctcaccttgaaagacaattatgac

SEQ ID NO: 83273 - DNA, 25 bp, Artificial
  Probe
tcctcaccttgaaagacaattatga

SEQ ID NO: 83274 - DNA, 25 bp, Artificial
  Probe
gcttgtccctcttaatcattcatcc

SEQ ID NO: 83275 - DNA, 25 bp, Artificial
  Probe
acactcatcttcacagactttctct

SEQ ID NO: 83276 - DNA, 25 bp, Artificial
  Probe
cacactcatcttcacagactttctc

SEQ ID NO: 83277 - DNA, 25 bp, Artificial
  Probe
ccttgaaagacaattatgactcctt

SEQ ID NO: 83278 - DNA, 25 bp, Artificial
  Probe
agattctcctagttctgttctaccc

SEQ ID NO: 83279 - DNA, 25 bp, Artificial
  Probe
tgaaagacaattatgactccttctg

SEQ ID NO: 83280 - DNA, 25 bp, Artificial
  Probe
catcaattcttgtgccaatcctttc

SEQ ID NO: 83281 - DNA, 25 bp, Artificial
  Probe
tcaccttgaaagacaattatgactc

SEQ ID NO: 83282 - DNA, 25 bp, Artificial
  Probe
ctcaccttgaaagacaattatgact

SEQ ID NO: 83283 - DNA, 25 bp, Artificial
  Probe
atcctcaccttgaaagacaattatg

SEQ ID NO: 83284 - DNA, 25 bp, Artificial
  Probe
gaaagacaattatgactccttctga

SEQ ID NO: 83285 - DNA, 25 bp, Artificial
  Probe
tgtccctcttaatcattcatcccag

SEQ ID NO: 83286 - DNA, 25 bp, Artificial
  Probe
atttcattctttgccatttctgcct

SEQ ID NO: 83287 - DNA, 25 bp, Artificial
  Probe
catttcattctttgccatttctgcc

SEQ ID NO: 83288 - DNA, 25 bp, Artificial
  Probe
ccatttcattctttgccatttctgc

SEQ ID NO: 83289 - DNA, 25 bp, Artificial
  Probe
gtccctcttaatcattcatcccaga

SEQ ID NO: 83290 - DNA, 25 bp, Artificial
  Probe
agatttacaggacagaaacctcatc

SEQ ID NO: 83291 - DNA, 25 bp, Artificial
  Probe
cagatttacaggacagaaacctcat

SEQ ID NO: 83292 - DNA, 25 bp, Artificial
  Probe
aaagacaattatgactccttctgaa

SEQ ID NO: 83293 - DNA, 25 bp, Artificial
  Probe
attcttgtgccaatcctttcctcta

SEQ ID NO: 83294 - DNA, 25 bp, Artificial
  Probe
ttgaaagacaattatgactccttct

SEQ ID NO: 83295 - DNA, 25 bp, Artificial
  Probe
gatcctcaccttgaaagacaattat

SEQ ID NO: 83296 - DNA, 25 bp, Artificial
  Probe
ggactagactccttagcagcagatg

SEQ ID NO: 83297 - DNA, 25 bp, Artificial
  Probe
caacagagctactgaagcgagaatc

SEQ ID NO: 83298 - DNA, 25 bp, Artificial
  Probe
ctctggttcgaggaggactagactc

SEQ ID NO: 83299 - DNA, 25 bp, Artificial
  Probe
gactagactccttagcagcagatgc

SEQ ID NO: 83300 - DNA, 25 bp, Artificial
  Probe
aacagagctactgaagcgagaatcc

SEQ ID NO: 83301 - DNA, 25 bp, Artificial
  Probe
gatgctaacttcgtcatggcaacag

SEQ ID NO: 83302 - DNA, 25 bp, Artificial
  Probe
cagatgctaacttcgtcatggcaac

SEQ ID NO: 83303 - DNA, 25 bp, Artificial
  Probe
agatgctaacttcgtcatggcaaca

SEQ ID NO: 83304 - DNA, 25 bp, Artificial
  Probe
aaagacccttattgctccaggtgtg

SEQ ID NO: 83305 - DNA, 25 bp, Artificial
  Probe
aggactagactccttagcagcagat

SEQ ID NO: 83306 - DNA, 25 bp, Artificial
  Probe
ctactgaagcgagaatccccaaagg

SEQ ID NO: 83307 - DNA, 25 bp, Artificial
  Probe
gaggactagactccttagcagcaga

SEQ ID NO: 83308 - DNA, 25 bp, Artificial
  Probe
aaaagacccttattgctccaggtgt

SEQ ID NO: 83309 - DNA, 25 bp, Artificial
  Probe
tgttggatgttgcttgattctattg

SEQ ID NO: 83310 - DNA, 25 bp, Artificial
  Probe
gtgttggatgttgcttgattctatt

SEQ ID NO: 83311 - DNA, 25 bp, Artificial
  Probe
agtgttggatgttgcttgattctat

SEQ ID NO: 83312 - DNA, 25 bp, Artificial
  Probe
gttggatgttgcttgattctattgc

SEQ ID NO: 83313 - DNA, 25 bp, Artificial
  Probe
gagtgttggatgttgcttgattcta

SEQ ID NO: 83314 - DNA, 25 bp, Artificial
  Probe
aattagtgaagcacacagtgaactt

SEQ ID NO: 83315 - DNA, 25 bp, Artificial
  Probe
aacattattacctcaatacacaagc

SEQ ID NO: 83316 - DNA, 25 bp, Artificial
  Probe
taagtgatcctgttacattggttaa

SEQ ID NO: 83317 - DNA, 25 bp, Artificial
  Probe
ttaagtgatcctgttacattggtta

SEQ ID NO: 83318 - DNA, 25 bp, Artificial
  Probe
gaattagtgaagcacacagtgaact

SEQ ID NO: 83319 - DNA, 25 bp, Artificial
  Probe
agaattagtgaagcacacagtgaac

SEQ ID NO: 83320 - DNA, 25 bp, Artificial
  Probe
cagaattagtgaagcacacagtgaa

SEQ ID NO: 83321 - DNA, 25 bp, Artificial
  Probe
gagacagaattagtgaagcacacag

SEQ ID NO: 83322 - DNA, 25 bp, Artificial
  Probe
cagagacagaattagtgaagcacac

SEQ ID NO: 83323 - DNA, 25 bp, Artificial
  Probe
cacagagacagaattagtgaagcac

SEQ ID NO: 83324 - DNA, 25 bp, Artificial
  Probe
attagtgaagcacacagtgaacttg

SEQ ID NO: 83325 - DNA, 25 bp, Artificial
  Probe
agagacagaattagtgaagcacaca

SEQ ID NO: 83326 - DNA, 25 bp, Artificial
  Probe
acagagacagaattagtgaagcaca

SEQ ID NO: 83327 - DNA, 25 bp, Artificial
  Probe
gtatgaatcctggactgagaaatgt

SEQ ID NO: 83328 - DNA, 25 bp, Artificial
  Probe
gacagaattagtgaagcacacagtg

SEQ ID NO: 83329 - DNA, 25 bp, Artificial
  Probe
agacagaattagtgaagcacacagt

SEQ ID NO: 83330 - DNA, 25 bp, Artificial
  Probe
cagcagtcacagagacagaattagt

SEQ ID NO: 83331 - DNA, 25 bp, Artificial
  Probe
acagcagtcacagagacagaattag

SEQ ID NO: 83332 - DNA, 25 bp, Artificial
  Probe
gacagcagtcacagagacagaatta

SEQ ID NO: 83333 - DNA, 25 bp, Artificial
  Probe
tattacctcaatacacaagctgttg

SEQ ID NO: 83334 - DNA, 25 bp, Artificial
  Probe
atcaccgaacttctcagtctccata

SEQ ID NO: 83335 - DNA, 25 bp, Artificial
  Probe
tatgaatcctggactgagaaatgta

SEQ ID NO: 83336 - DNA, 25 bp, Artificial
  Probe
acattattacctcaatacacaagct

SEQ ID NO: 83337 - DNA, 25 bp, Artificial
  Probe
agcagtcacagagacagaattagtg

SEQ ID NO: 83338 - DNA, 25 bp, Artificial
  Probe
atgaatcctggactgagaaatgtac

SEQ ID NO: 83339 - DNA, 25 bp, Artificial
  Probe
cattattacctcaatacacaagctg

SEQ ID NO: 83340 - DNA, 25 bp, Artificial
  Probe
tcaccgaacttctcagtctccataa

SEQ ID NO: 83341 - DNA, 25 bp, Artificial
  Probe
cgtatgaatcctggactgagaaatg

SEQ ID NO: 83342 - DNA, 25 bp, Artificial
  Probe
ccgaacttctcagtctccataaatt

SEQ ID NO: 83343 - DNA, 25 bp, Artificial
  Probe
acagaattagtgaagcacacagtga

SEQ ID NO: 83344 - DNA, 25 bp, Artificial
  Probe
ttattacctcaatacacaagctgtt

SEQ ID NO: 83345 - DNA, 25 bp, Artificial
  Probe
ggagtgttggatgttgcttgattct

SEQ ID NO: 83346 - DNA, 25 bp, Artificial
  Probe
acttcgagatgccttactcttgatt

SEQ ID NO: 83347 - DNA, 25 bp, Artificial
  Probe
aacttcgagatgccttactcttgat

SEQ ID NO: 83348 - DNA, 25 bp, Artificial
  Probe
attattacctcaatacacaagctgt

SEQ ID NO: 83349 - DNA, 25 bp, Artificial
  Probe
aagtgatcctgttacattggttaaa

SEQ ID NO: 83350 - DNA, 25 bp, Artificial
  Probe
tttaagtgatcctgttacattggtt

SEQ ID NO: 83351 - DNA, 25 bp, Artificial
  Probe
accgaacttctcagtctccataaat

SEQ ID NO: 83352 - DNA, 25 bp, Artificial
  Probe
agtgatcctgttacattggttaaat

SEQ ID NO: 83353 - DNA, 25 bp, Artificial
  Probe
atttaagtgatcctgttacattggt

SEQ ID NO: 83354 - DNA, 25 bp, Artificial
  Probe
ctatcgtaactcccagaatcttgta

SEQ ID NO: 83355 - DNA, 25 bp, Artificial
  Probe
tatcgtaactcccagaatcttgtac

SEQ ID NO: 83356 - DNA, 25 bp, Artificial
  Probe
atcgtaactcccagaatcttgtacc

SEQ ID NO: 83357 - DNA, 25 bp, Artificial
  Probe
taactcccagaatcttgtacctgtg

SEQ ID NO: 83358 - DNA, 25 bp, Artificial
  Probe
gtaactcccagaatcttgtacctgt

SEQ ID NO: 83359 - DNA, 25 bp, Artificial
  Probe
tcgtaactcccagaatcttgtacct

SEQ ID NO: 83360 - DNA, 25 bp, Artificial
  Probe
cgtaactcccagaatcttgtacctg

SEQ ID NO: 83361 - DNA, 25 bp, Artificial
  Probe
ctcccagaatcttgtacctgtgttg

SEQ ID NO: 83362 - DNA, 25 bp, Artificial
  Probe
ctttctttggtactcttcccactcc

SEQ ID NO: 83363 - DNA, 25 bp, Artificial
  Probe
actcccagaatcttgtacctgtgtt

SEQ ID NO: 83364 - DNA, 25 bp, Artificial
  Probe
aactcccagaatcttgtacctgtgt

SEQ ID NO: 83365 - DNA, 25 bp, Artificial
  Probe
gctttctttggtactcttcccactc

SEQ ID NO: 83366 - DNA, 25 bp, Artificial
  Probe
gtggctgctttctttggtactcttc

SEQ ID NO: 83367 - DNA, 25 bp, Artificial
  Probe
ctgctttctttggtactcttcccac

SEQ ID NO: 83368 - DNA, 25 bp, Artificial
  Probe
tttctttggtactcttcccactccc

SEQ ID NO: 83369 - DNA, 25 bp, Artificial
  Probe
tgctttctttggtactcttcccact

SEQ ID NO: 83370 - DNA, 25 bp, Artificial
  Probe
tcccagaatcttgtacctgtgttgg

SEQ ID NO: 83371 - DNA, 25 bp, Artificial
  Probe
gtccatcccctaacccttctcaaaa

SEQ ID NO: 83372 - DNA, 25 bp, Artificial
  Probe
tggctgctttctttggtactcttcc

SEQ ID NO: 83373 - DNA, 25 bp, Artificial
  Probe
ttctttggtactcttcccactccca

SEQ ID NO: 83374 - DNA, 25 bp, Artificial
  Probe
gctgctttctttggtactcttccca

SEQ ID NO: 83375 - DNA, 25 bp, Artificial
  Probe
cagaacagcctctgtaggtagagct

SEQ ID NO: 83376 - DNA, 25 bp, Artificial
  Probe
cgtagctgtgacgtgttgtagtttt

SEQ ID NO: 83377 - DNA, 25 bp, Artificial
  Probe
cacacaggcagtgtatcagaggaaa

SEQ ID NO: 83378 - DNA, 25 bp, Artificial
  Probe
ccagaatcttgtacctgtgttgggg

SEQ ID NO: 83379 - DNA, 25 bp, Artificial
  Probe
gacctctgacaaggatgagagtgag

SEQ ID NO: 83380 - DNA, 25 bp, Artificial
  Probe
cagacctctgacaaggatgagagtg

SEQ ID NO: 83381 - DNA, 25 bp, Artificial
  Probe
agacctctgacaaggatgagagtga

SEQ ID NO: 83382 - DNA, 25 bp, Artificial
  Probe
gaaatcgaagccatccaagaaagcc

SEQ ID NO: 83383 - DNA, 25 bp, Artificial
  Probe
gtctggttctctaagctctctggga

SEQ ID NO: 83384 - DNA, 25 bp, Artificial
  Probe
tctggttctctaagctctctgggag

SEQ ID NO: 83385 - DNA, 25 bp, Artificial
  Probe
aaatcgaagccatccaagaaagcct

SEQ ID NO: 83386 - DNA, 25 bp, Artificial
  Probe
cggaaatcgaagccatccaagaaag

SEQ ID NO: 83387 - DNA, 25 bp, Artificial
  Probe
ggaaatcgaagccatccaagaaagc

SEQ ID NO: 83388 - DNA, 25 bp, Artificial
  Probe
tcggaaatcgaagccatccaagaaa

SEQ ID NO: 83389 - DNA, 25 bp, Artificial
  Probe
ttagtcgtattctgttgttcagtcc

SEQ ID NO: 83390 - DNA, 25 bp, Artificial
  Probe
tagtcgtattctgttgttcagtcct

SEQ ID NO: 83391 - DNA, 25 bp, Artificial
  Probe
cgctgctatttggaatctttaactt

SEQ ID NO: 83392 - DNA, 25 bp, Artificial
  Probe
agtaaactatttcaccaagagaggg

SEQ ID NO: 83393 - DNA, 25 bp, Artificial
  Probe
cagtaaactatttcaccaagagagg

SEQ ID NO: 83394 - DNA, 25 bp, Artificial
  Probe
tcgtattctgttgttcagtcctctg

SEQ ID NO: 83395 - DNA, 25 bp, Artificial
  Probe
gtcgtattctgttgttcagtcctct

SEQ ID NO: 83396 - DNA, 25 bp, Artificial
  Probe
agtcgtattctgttgttcagtcctc

SEQ ID NO: 83397 - DNA, 25 bp, Artificial
  Probe
ccgctgctatttggaatctttaact

SEQ ID NO: 83398 - DNA, 25 bp, Artificial
  Probe
tttagtcgtattctgttgttcagtc

SEQ ID NO: 83399 - DNA, 25 bp, Artificial
  Probe
gctgctatttggaatctttaactta

SEQ ID NO: 83400 - DNA, 25 bp, Artificial
  Probe
gaccatagaaccgaaagaagtcaag

SEQ ID NO: 83401 - DNA, 25 bp, Artificial
  Probe
gaatctttaacttagtctattgggc

SEQ ID NO: 83402 - DNA, 25 bp, Artificial
  Probe
aactatttcaccaagagagggtatg

SEQ ID NO: 83403 - DNA, 25 bp, Artificial
  Probe
gtaaactatttcaccaagagagggt

SEQ ID NO: 83404 - DNA, 25 bp, Artificial
  Probe
aaactatttcaccaagagagggtat

SEQ ID NO: 83405 - DNA, 25 bp, Artificial
  Probe
atagaaccgaaagaagtcaagcctg

SEQ ID NO: 83406 - DNA, 25 bp, Artificial
  Probe
catagaaccgaaagaagtcaagcct

SEQ ID NO: 83407 - DNA, 25 bp, Artificial
  Probe
taaactatttcaccaagagagggta

SEQ ID NO: 83408 - DNA, 25 bp, Artificial
  Probe
tccgctgctatttggaatctttaac

SEQ ID NO: 83409 - DNA, 25 bp, Artificial
  Probe
gtctgccttactgcctctgtcttaa

SEQ ID NO: 83410 - DNA, 25 bp, Artificial
  Probe
accatagaaccgaaagaagtcaagc

SEQ ID NO: 83411 - DNA, 25 bp, Artificial
  Probe
atatttcatatcgaacaagagaccc

SEQ ID NO: 83412 - DNA, 25 bp, Artificial
  Probe
cgtattctgttgttcagtcctctgc

SEQ ID NO: 83413 - DNA, 25 bp, Artificial
  Probe
ggaatctttaacttagtctattggg

SEQ ID NO: 83414 - DNA, 25 bp, Artificial
  Probe
tattctgttgttcagtcctctgcac

SEQ ID NO: 83415 - DNA, 25 bp, Artificial
  Probe
gtattctgttgttcagtcctctgca

SEQ ID NO: 83416 - DNA, 25 bp, Artificial
  Probe
actatttcaccaagagagggtatgc

SEQ ID NO: 83417 - DNA, 25 bp, Artificial
  Probe
ctttctgttctcaacgcagtgattc

SEQ ID NO: 83418 - DNA, 25 bp, Artificial
  Probe
cccatcaataggttcttttagtcgt

SEQ ID NO: 83419 - DNA, 25 bp, Artificial
  Probe
tattgctaaaagtgcgaccatagaa

SEQ ID NO: 83420 - DNA, 25 bp, Artificial
  Probe
ggttcttttagtcgtattctgttgt

SEQ ID NO: 83421 - DNA, 25 bp, Artificial
  Probe
aggttcttttagtcgtattctgttg

SEQ ID NO: 83422 - DNA, 25 bp, Artificial
  Probe
tctgccttactgcctctgtcttaaa

SEQ ID NO: 83423 - DNA, 25 bp, Artificial
  Probe
agaaaagccaaagaaagtgaaggat

SEQ ID NO: 83424 - DNA, 25 bp, Artificial
  Probe
cgaccatagaaccgaaagaagtcaa

SEQ ID NO: 83425 - DNA, 25 bp, Artificial
  Probe
cacgtatttaaacagagagcctcag

SEQ ID NO: 83426 - DNA, 25 bp, Artificial
  Probe
cagaacccaagaaaacctttaacag

SEQ ID NO: 83427 - DNA, 25 bp, Artificial
  Probe
catatttcatatcgaacaagagacc

SEQ ID NO: 83428 - DNA, 25 bp, Artificial
  Probe
ccatatttcatatcgaacaagagac

SEQ ID NO: 83429 - DNA, 25 bp, Artificial
  Probe
ccccatcaataggttcttttagtcg

SEQ ID NO: 83430 - DNA, 25 bp, Artificial
  Probe
tccatatttcatatcgaacaagaga

SEQ ID NO: 83431 - DNA, 25 bp, Artificial
  Probe
tagtctattgggccacgtatttaaa

SEQ ID NO: 83432 - DNA, 25 bp, Artificial
  Probe
ttagtctattgggccacgtatttaa

SEQ ID NO: 83433 - DNA, 25 bp, Artificial
  Probe
cttagtctattgggccacgtattta

SEQ ID NO: 83434 - DNA, 25 bp, Artificial
  Probe
ttgccttgatgtttctaatgtgtaa

SEQ ID NO: 83435 - DNA, 25 bp, Artificial
  Probe
tgccttgatgtttctaatgtgtaaa

SEQ ID NO: 83436 - DNA, 25 bp, Artificial
  Probe
attgccttgatgtttctaatgtgta

SEQ ID NO: 83437 - DNA, 25 bp, Artificial
  Probe
tattgccttgatgtttctaatgtgt

SEQ ID NO: 83438 - DNA, 25 bp, Artificial
  Probe
atattgccttgatgtttctaatgtg

SEQ ID NO: 83439 - DNA, 25 bp, Artificial
  Probe
ttaactgttctgagtatatgacgtt

SEQ ID NO: 83440 - DNA, 25 bp, Artificial
  Probe
gatgatctctgctgagtgtccaatg

SEQ ID NO: 83441 - DNA, 25 bp, Artificial
  Probe
tgtctttcaggaaatttgcatgttt

SEQ ID NO: 83442 - DNA, 25 bp, Artificial
  Probe
gaagagcaaactgtgggcatttaag

SEQ ID NO: 83443 - DNA, 25 bp, Artificial
  Probe
ctgtcatcttatcccaggtgtcttt

SEQ ID NO: 83444 - DNA, 25 bp, Artificial
  Probe
gtctttcaggaaatttgcatgttta

SEQ ID NO: 83445 - DNA, 25 bp, Artificial
  Probe
tgatgatctctgctgagtgtccaat

SEQ ID NO: 83446 - DNA, 25 bp, Artificial
  Probe
aaacttcaatgtttcaaggatgtcc

SEQ ID NO: 83447 - DNA, 25 bp, Artificial
  Probe
atgaagagcaaactgtgggcattta

SEQ ID NO: 83448 - DNA, 25 bp, Artificial
  Probe
tgtgtaaacttcaatgtttcaagga

SEQ ID NO: 83449 - DNA, 25 bp, Artificial
  Probe
gccttgatgtttctaatgtgtaaac

SEQ ID NO: 83450 - DNA, 25 bp, Artificial
  Probe
tctttcaggaaatttgcatgtttaa

SEQ ID NO: 83451 - DNA, 25 bp, Artificial
  Probe
tgaagagcaaactgtgggcatttaa

SEQ ID NO: 83452 - DNA, 25 bp, Artificial
  Probe
ctgtctttcaggaaatttgcatgtt

SEQ ID NO: 83453 - DNA, 25 bp, Artificial
  Probe
tccccttaataaaaccaagcaaatg

SEQ ID NO: 83454 - DNA, 25 bp, Artificial
  Probe
gtccccttaataaaaccaagcaaat

SEQ ID NO: 83455 - DNA, 25 bp, Artificial
  Probe
aatattgccttgatgtttctaatgt

SEQ ID NO: 83456 - DNA, 25 bp, Artificial
  Probe
atgtgtaaacttcaatgtttcaagg

SEQ ID NO: 83457 - DNA, 25 bp, Artificial
  Probe
atgtccccttaataaaaccaagcaa

SEQ ID NO: 83458 - DNA, 25 bp, Artificial
  Probe
actgtcatcttatcccaggtgtctt

SEQ ID NO: 83459 - DNA, 25 bp, Artificial
  Probe
tgtccccttaataaaaccaagcaaa

SEQ ID NO: 83460 - DNA, 25 bp, Artificial
  Probe
tgtaaacttcaatgtttcaaggatg

SEQ ID NO: 83461 - DNA, 25 bp, Artificial
  Probe
ctgatgatctctgctgagtgtccaa

SEQ ID NO: 83462 - DNA, 25 bp, Artificial
  Probe
aagagcaaactgtgggcatttaagt

SEQ ID NO: 83463 - DNA, 25 bp, Artificial
  Probe
gtaaacttcaatgtttcaaggatgt

SEQ ID NO: 83464 - DNA, 25 bp, Artificial
  Probe
gtgtaaacttcaatgtttcaaggat

SEQ ID NO: 83465 - DNA, 25 bp, Artificial
  Probe
gatgtccccttaataaaaccaagca

SEQ ID NO: 83466 - DNA, 25 bp, Artificial
  Probe
tgtcatcttatcccaggtgtctttt

SEQ ID NO: 83467 - DNA, 25 bp, Artificial
  Probe
taaacttcaatgtttcaaggatgtc

SEQ ID NO: 83468 - DNA, 25 bp, Artificial
  Probe
taactgttctgagtatatgacgttt

SEQ ID NO: 83469 - DNA, 25 bp, Artificial
  Probe
tttaactgttctgagtatatgacgt

SEQ ID NO: 83470 - DNA, 25 bp, Artificial
  Probe
ctttcaggaaatttgcatgtttaat

SEQ ID NO: 83471 - DNA, 25 bp, Artificial
  Probe
gactgtcatcttatcccaggtgtct

SEQ ID NO: 83472 - DNA, 25 bp, Artificial
  Probe
agagcaaactgtgggcatttaagtc

SEQ ID NO: 83473 - DNA, 25 bp, Artificial
  Probe
ggatgtccccttaataaaaccaagc

SEQ ID NO: 83474 - DNA, 25 bp, Artificial
  Probe
aggatgtccccttaataaaaccaag

SEQ ID NO: 83475 - DNA, 25 bp, Artificial
  Probe
ccttgatgtttctaatgtgtaaact

SEQ ID NO: 83476 - DNA, 25 bp, Artificial
  Probe
gtgggcatttaagtccagtacgaat

SEQ ID NO: 83477 - DNA, 25 bp, Artificial
  Probe
gctgtctttcaggaaatttgcatgt

SEQ ID NO: 83478 - DNA, 25 bp, Artificial
  Probe
cctgcatcatgactgtcatcttatc

SEQ ID NO: 83479 - DNA, 25 bp, Artificial
  Probe
ggatgaagaatatggctatgagtgt

SEQ ID NO: 83480 - DNA, 25 bp, Artificial
  Probe
caaggcaagttaagttagaacaaga

SEQ ID NO: 83481 - DNA, 25 bp, Artificial
  Probe
ttctccgtctcacctagtaatacat

SEQ ID NO: 83482 - DNA, 25 bp, Artificial
  Probe
tctccgtctcacctagtaatacata

SEQ ID NO: 83483 - DNA, 25 bp, Artificial
  Probe
gatgaagaatatggctatgagtgtt

SEQ ID NO: 83484 - DNA, 25 bp, Artificial
  Probe
ctccgtctcacctagtaatacatag

SEQ ID NO: 83485 - DNA, 25 bp, Artificial
  Probe
aaggcaagttaagttagaacaagag

SEQ ID NO: 83486 - DNA, 25 bp, Artificial
  Probe
gcaaggcaagttaagttagaacaag

SEQ ID NO: 83487 - DNA, 25 bp, Artificial
  Probe
aggcaagttaagttagaacaagagc

SEQ ID NO: 83488 - DNA, 25 bp, Artificial
  Probe
agtaatacataggtcctacgatccg

SEQ ID NO: 83489 - DNA, 25 bp, Artificial
  Probe
tagtaatacataggtcctacgatcc

SEQ ID NO: 83490 - DNA, 25 bp, Artificial
  Probe
gcaagttaagttagaacaagagctg

SEQ ID NO: 83491 - DNA, 25 bp, Artificial
  Probe
tatctttatctgtgaggaggtttgg

SEQ ID NO: 83492 - DNA, 25 bp, Artificial
  Probe
cttgtttactgggtctcctatcttt

SEQ ID NO: 83493 - DNA, 25 bp, Artificial
  Probe
aatcttgtttactgggtctcctatc

SEQ ID NO: 83494 - DNA, 25 bp, Artificial
  Probe
tactgggtctcctatctttatctgt

SEQ ID NO: 83495 - DNA, 25 bp, Artificial
  Probe
aagaatatggctatgagtgtttgga

SEQ ID NO: 83496 - DNA, 25 bp, Artificial
  Probe
atcttgtttactgggtctcctatct

SEQ ID NO: 83497 - DNA, 25 bp, Artificial
  Probe
gaatatggctatgagtgtttggatg

SEQ ID NO: 83498 - DNA, 25 bp, Artificial
  Probe
agaatatggctatgagtgtttggat

SEQ ID NO: 83499 - DNA, 25 bp, Artificial
  Probe
gaagaatatggctatgagtgtttgg

SEQ ID NO: 83500 - DNA, 25 bp, Artificial
  Probe
tcttgtttactgggtctcctatctt

SEQ ID NO: 83501 - DNA, 25 bp, Artificial
  Probe
caatcttgtttactgggtctcctat

SEQ ID NO: 83502 - DNA, 25 bp, Artificial
  Probe
tctgcttgttcaatcttgtttactg

SEQ ID NO: 83503 - DNA, 25 bp, Artificial
  Probe
ccttctgcttgttcaatcttgttta

SEQ ID NO: 83504 - DNA, 25 bp, Artificial
  Probe
cttgttcaatcttgtttactgggtc

SEQ ID NO: 83505 - DNA, 25 bp, Artificial
  Probe
ggcaagttaagttagaacaagagct

SEQ ID NO: 83506 - DNA, 25 bp, Artificial
  Probe
ttgttcaatcttgtttactgggtct

SEQ ID NO: 83507 - DNA, 25 bp, Artificial
  Probe
ctgggtctcctatctttatctgtga

SEQ ID NO: 83508 - DNA, 25 bp, Artificial
  Probe
ttctgcttgttcaatcttgtttact

SEQ ID NO: 83509 - DNA, 25 bp, Artificial
  Probe
gggatgaagaatatggctatgagtg

SEQ ID NO: 83510 - DNA, 25 bp, Artificial
  Probe
agggatgaagaatatggctatgagt

SEQ ID NO: 83511 - DNA, 25 bp, Artificial
  Probe
ctgttagactgagcaagataccttt

SEQ ID NO: 83512 - DNA, 25 bp, Artificial
  Probe
tcaatcttgtttactgggtctccta

SEQ ID NO: 83513 - DNA, 25 bp, Artificial
  Probe
ctgcttgttcaatcttgtttactgg

SEQ ID NO: 83514 - DNA, 25 bp, Artificial
  Probe
cttctgcttgttcaatcttgtttac

SEQ ID NO: 83515 - DNA, 25 bp, Artificial
  Probe
aatatggctatgagtgtttggatgg

SEQ ID NO: 83516 - DNA, 25 bp, Artificial
  Probe
tgaagaatatggctatgagtgtttg

SEQ ID NO: 83517 - DNA, 25 bp, Artificial
  Probe
aaatgtcctttctaagtccaacgat

SEQ ID NO: 83518 - DNA, 25 bp, Artificial
  Probe
actgggtctcctatctttatctgtg

SEQ ID NO: 83519 - DNA, 25 bp, Artificial
  Probe
tgttcaatcttgtttactgggtctc

SEQ ID NO: 83520 - DNA, 25 bp, Artificial
  Probe
caagttaagttagaacaagagctgt

SEQ ID NO: 83521 - DNA, 25 bp, Artificial
  Probe
ttactgggtctcctatctttatctg

SEQ ID NO: 83522 - DNA, 25 bp, Artificial
  Probe
ttgtttactgggtctcctatcttta

SEQ ID NO: 83523 - DNA, 25 bp, Artificial
  Probe
gtttctccgtctcacctagtaatac

SEQ ID NO: 83524 - DNA, 25 bp, Artificial
  Probe
aacacttcttctgtgtgtagtcgtg

SEQ ID NO: 83525 - DNA, 25 bp, Artificial
  Probe
tgaaacacttcttctgtgtgtagtc

SEQ ID NO: 83526 - DNA, 25 bp, Artificial
  Probe
gtgaaacacttcttctgtgtgtagt

SEQ ID NO: 83527 - DNA, 25 bp, Artificial
  Probe
tgtgaaacacttcttctgtgtgtag

SEQ ID NO: 83528 - DNA, 25 bp, Artificial
  Probe
gtgtgaaacacttcttctgtgtgta

SEQ ID NO: 83529 - DNA, 25 bp, Artificial
  Probe
gaaacacttcttctgtgtgtagtcg

SEQ ID NO: 83530 - DNA, 25 bp, Artificial
  Probe
ttgtgtgaaacacttcttctgtgtg

SEQ ID NO: 83531 - DNA, 25 bp, Artificial
  Probe
aaacacttcttctgtgtgtagtcgt

SEQ ID NO: 83532 - DNA, 25 bp, Artificial
  Probe
tgtgtgaaacacttcttctgtgtgt

SEQ ID NO: 83533 - DNA, 25 bp, Artificial
  Probe
acacttcttctgtgtgtagtcgtgc

SEQ ID NO: 83534 - DNA, 25 bp, Artificial
  Probe
cacttcttctgtgtacttgtataaa

SEQ ID NO: 83535 - DNA, 25 bp, Artificial
  Probe
taatacaagcatgttgaaaaggcaa

SEQ ID NO: 83536 - DNA, 25 bp, Artificial
  Probe
ttaatacaagcatgttgaaaaggca

SEQ ID NO: 83537 - DNA, 25 bp, Artificial
  Probe
atacaagcatgttgaaaaggcaaaa

SEQ ID NO: 83538 - DNA, 25 bp, Artificial
  Probe
aatacaagcatgttgaaaaggcaaa

SEQ ID NO: 83539 - DNA, 25 bp, Artificial
  Probe
acttcttctgtgtacttgtataaat

SEQ ID NO: 83540 - DNA, 25 bp, Artificial
  Probe
attaatacaagcatgttgaaaaggc

SEQ ID NO: 83541 - DNA, 25 bp, Artificial
  Probe
acacttcttctgtgtacttgtataa

SEQ ID NO: 83542 - DNA, 25 bp, Artificial
  Probe
aacacttcttctgtgtacttgtata

SEQ ID NO: 83543 - DNA, 25 bp, Artificial
  Probe
gtgaaacacttcttctgtgtacttg

SEQ ID NO: 83544 - DNA, 25 bp, Artificial
  Probe
tgaaacacttcttctgtgtacttgt

SEQ ID NO: 83545 - DNA, 25 bp, Artificial
  Probe
tgtgaaacacttcttctgtgtactt

SEQ ID NO: 83546 - DNA, 25 bp, Artificial
  Probe
ttgtgtgaaacacttcttctgtgta

SEQ ID NO: 83547 - DNA, 25 bp, Artificial
  Probe
gaaacacttcttctgtgtacttgta

SEQ ID NO: 83548 - DNA, 25 bp, Artificial
  Probe
gtgtgaaacacttcttctgtgtact

SEQ ID NO: 83549 - DNA, 25 bp, Artificial
  Probe
tgtgtgaaacacttcttctgtgtac

SEQ ID NO: 83550 - DNA, 25 bp, Artificial
  Probe
aaacacttcttctgtgtacttgtat

SEQ ID NO: 83551 - DNA, 25 bp, Artificial
  Probe
cttcttctgtgtacttgtataaatt

SEQ ID NO: 83552 - DNA, 25 bp, Artificial
  Probe
aattaatacaagcatgttgaaaagg

SEQ ID NO: 83553 - DNA, 25 bp, Artificial
  Probe
aaattaatacaagcatgttgaaaag

SEQ ID NO: 83554 - DNA, 25 bp, Artificial
  Probe
tgtcactcaatgattgcttcaagaa

SEQ ID NO: 83555 - DNA, 25 bp, Artificial
  Probe
gtcactcaatgattgcttcaagaag

SEQ ID NO: 83556 - DNA, 25 bp, Artificial
  Probe
ctgtcactcaatgattgcttcaaga

SEQ ID NO: 83557 - DNA, 25 bp, Artificial
  Probe
tcactcaatgattgcttcaagaagg

SEQ ID NO: 83558 - DNA, 25 bp, Artificial
  Probe
actcaatgattgcttcaagaaggtg

SEQ ID NO: 83559 - DNA, 25 bp, Artificial
  Probe
cactcaatgattgcttcaagaaggt

SEQ ID NO: 83560 - DNA, 25 bp, Artificial
  Probe
ttcagaaggaagaggagaaggagag

SEQ ID NO: 83561 - DNA, 25 bp, Artificial
  Probe
cctgtcactcaatgattgcttcaag

SEQ ID NO: 83562 - DNA, 25 bp, Artificial
  Probe
caacctgtcactcaatgattgcttc

SEQ ID NO: 83563 - DNA, 25 bp, Artificial
  Probe
aactgtgagaagatgttcgacaatg

SEQ ID NO: 83564 - DNA, 25 bp, Artificial
  Probe
acctgtcactcaatgattgcttcaa

SEQ ID NO: 83565 - DNA, 25 bp, Artificial
  Probe
aacctgtcactcaatgattgcttca

SEQ ID NO: 83566 - DNA, 25 bp, Artificial
  Probe
ctcaatgattgcttcaagaaggtgc

SEQ ID NO: 83567 - DNA, 25 bp, Artificial
  Probe
acaacctgtcactcaatgattgctt

SEQ ID NO: 83568 - DNA, 25 bp, Artificial
  Probe
tcagaaggaagaggagaaggagagg

SEQ ID NO: 83569 - DNA, 25 bp, Artificial
  Probe
aaactgtgagaagatgttcgacaat

SEQ ID NO: 83570 - DNA, 25 bp, Artificial
  Probe
actgtgagaagatgttcgacaatgg

SEQ ID NO: 83571 - DNA, 25 bp, Artificial
  Probe
cacaacctgtcactcaatgattgct

SEQ ID NO: 83572 - DNA, 25 bp, Artificial
  Probe
gaacttcagaaggaagaggagaagg

SEQ ID NO: 83573 - DNA, 25 bp, Artificial
  Probe
ggaacttcagaaggaagaggagaag

SEQ ID NO: 83574 - DNA, 25 bp, Artificial
  Probe
caaactgtgagaagatgttcgacaa

SEQ ID NO: 83575 - DNA, 25 bp, Artificial
  Probe
aacttcagaaggaagaggagaagga

SEQ ID NO: 83576 - DNA, 25 bp, Artificial
  Probe
tcaatgattgcttcaagaaggtgcc

SEQ ID NO: 83577 - DNA, 25 bp, Artificial
  Probe
cttcagaaggaagaggagaaggaga

SEQ ID NO: 83578 - DNA, 25 bp, Artificial
  Probe
ggacccaaactgtgagaagatgttc

SEQ ID NO: 83579 - DNA, 25 bp, Artificial
  Probe
acttcagaaggaagaggagaaggag

SEQ ID NO: 83580 - DNA, 25 bp, Artificial
  Probe
gacccaaactgtgagaagatgttcg

SEQ ID NO: 83581 - DNA, 25 bp, Artificial
  Probe
ccacaacctgtcactcaatgattgc

SEQ ID NO: 83582 - DNA, 25 bp, Artificial
  Probe
gccacaacctgtcactcaatgattg

SEQ ID NO: 83583 - DNA, 25 bp, Artificial
  Probe
gtgagaagatgttcgacaatgggaa

SEQ ID NO: 83584 - DNA, 25 bp, Artificial
  Probe
tggacccaaactgtgagaagatgtt

SEQ ID NO: 83585 - DNA, 25 bp, Artificial
  Probe
ccaaactgtgagaagatgttcgaca

SEQ ID NO: 83586 - DNA, 25 bp, Artificial
  Probe
acaatgggaacttcagaaggaagag

SEQ ID NO: 83587 - DNA, 25 bp, Artificial
  Probe
gacaatgggaacttcagaaggaaga

SEQ ID NO: 83588 - DNA, 25 bp, Artificial
  Probe
ctggacccaaactgtgagaagatgt

SEQ ID NO: 83589 - DNA, 25 bp, Artificial
  Probe
aacgacccaggaaaaggcaattatt

SEQ ID NO: 83590 - DNA, 25 bp, Artificial
  Probe
tcgacaatgggaacttcagaaggaa

SEQ ID NO: 83591 - DNA, 25 bp, Artificial
  Probe
ttcgacaatgggaacttcagaagga

SEQ ID NO: 83592 - DNA, 25 bp, Artificial
  Probe
cccaaactgtgagaagatgttcgac

SEQ ID NO: 83593 - DNA, 25 bp, Artificial
  Probe
ctgtgagaagatgttcgacaatggg

SEQ ID NO: 83594 - DNA, 25 bp, Artificial
  Probe
aatgggaacttcagaaggaagagga

SEQ ID NO: 83595 - DNA, 25 bp, Artificial
  Probe
caatgggaacttcagaaggaagagg

SEQ ID NO: 83596 - DNA, 25 bp, Artificial
  Probe
gaacgacccaggaaaaggcaattat

SEQ ID NO: 83597 - DNA, 25 bp, Artificial
  Probe
cccaggaaaaggcaattattggatg

SEQ ID NO: 83598 - DNA, 25 bp, Artificial
  Probe
gaagatgttcgacaatgggaacttc

SEQ ID NO: 83599 - DNA, 25 bp, Artificial
  Probe
actattatgacagcctcaagtatgg

SEQ ID NO: 83600 - DNA, 25 bp, Artificial
  Probe
ccactattatgacagcctcaagtat

SEQ ID NO: 83601 - DNA, 25 bp, Artificial
  Probe
cactattatgacagcctcaagtatg

SEQ ID NO: 83602 - DNA, 25 bp, Artificial
  Probe
accactattatgacagcctcaagta

SEQ ID NO: 83603 - DNA, 25 bp, Artificial
  Probe
taccactattatgacagcctcaagt

SEQ ID NO: 83604 - DNA, 25 bp, Artificial
  Probe
gtaccactattatgacagcctcaag

SEQ ID NO: 83605 - DNA, 25 bp, Artificial
  Probe
caagtaccactattatgacagcctc

SEQ ID NO: 83606 - DNA, 25 bp, Artificial
  Probe
agtaccactattatgacagcctcaa

SEQ ID NO: 83607 - DNA, 25 bp, Artificial
  Probe
aagtaccactattatgacagcctca

SEQ ID NO: 83608 - DNA, 25 bp, Artificial
  Probe
tcaagtaccactattatgacagcct

SEQ ID NO: 83609 - DNA, 25 bp, Artificial
  Probe
catactgtggatacctgccttcatg

SEQ ID NO: 83610 - DNA, 25 bp, Artificial
  Probe
caagactgacctagtgaccatgaac

SEQ ID NO: 83611 - DNA, 25 bp, Artificial
  Probe
tcaagactgacctagtgaccatgaa

SEQ ID NO: 83612 - DNA, 25 bp, Artificial
  Probe
ctcaagactgacctagtgaccatga

SEQ ID NO: 83613 - DNA, 25 bp, Artificial
  Probe
cttcccattggatcagaatcagaac

SEQ ID NO: 83614 - DNA, 25 bp, Artificial
  Probe
atactgtggatacctgccttcatgg

SEQ ID NO: 83615 - DNA, 25 bp, Artificial
  Probe
ctcaatgggagcatactgtggatac

SEQ ID NO: 83616 - DNA, 25 bp, Artificial
  Probe
aagactgacctagtgaccatgaacc

SEQ ID NO: 83617 - DNA, 25 bp, Artificial
  Probe
ccttcccattggatcagaatcagaa

SEQ ID NO: 83618 - DNA, 25 bp, Artificial
  Probe
ctattatgacagcctcaagtatggc

SEQ ID NO: 83619 - DNA, 25 bp, Artificial
  Probe
caatcagatctacctttatggcttc

SEQ ID NO: 83620 - DNA, 25 bp, Artificial
  Probe
cctcaagactgacctagtgaccatg

SEQ ID NO: 83621 - DNA, 25 bp, Artificial
  Probe
ttcccattggatcagaatcagaacc

SEQ ID NO: 83622 - DNA, 25 bp, Artificial
  Probe
gcaatcagatctacctttatggctt

SEQ ID NO: 83623 - DNA, 25 bp, Artificial
  Probe
ccgtcaagtaccactattatgacag

SEQ ID NO: 83624 - DNA, 25 bp, Artificial
  Probe
aatcagatctacctttatggcttct

SEQ ID NO: 83625 - DNA, 25 bp, Artificial
  Probe
gtcaagtaccactattatgacagcc

SEQ ID NO: 83626 - DNA, 25 bp, Artificial
  Probe
aatgggagcatactgtggatacctg

SEQ ID NO: 83627 - DNA, 25 bp, Artificial
  Probe
caatgggagcatactgtggatacct

SEQ ID NO: 83628 - DNA, 25 bp, Artificial
  Probe
tcaatgggagcatactgtggatacc

SEQ ID NO: 83629 - DNA, 25 bp, Artificial
  Probe
cgtcaagtaccactattatgacagc

SEQ ID NO: 83630 - DNA, 25 bp, Artificial
  Probe
cctcaatgggagcatactgtggata

SEQ ID NO: 83631 - DNA, 25 bp, Artificial
  Probe
tgcaatcagatctacctttatggct

SEQ ID NO: 83632 - DNA, 25 bp, Artificial
  Probe
aacaaagtccacatcaaaagaccaa

SEQ ID NO: 83633 - DNA, 25 bp, Artificial
  Probe
ctctcatcctgaagcaccatgtcaa

SEQ ID NO: 83634 - DNA, 25 bp, Artificial
  Probe
gaaccccgtcaagtaccactattat

SEQ ID NO: 83635 - DNA, 25 bp, Artificial
  Probe
ctgcaatcagatctacctttatggc

SEQ ID NO: 83636 - DNA, 25 bp, Artificial
  Probe
gaccaacaaagtccacatcaaaaga

SEQ ID NO: 83637 - DNA, 25 bp, Artificial
  Probe
tctcatcctgaagcaccatgtcaac

SEQ ID NO: 83638 - DNA, 25 bp, Artificial
  Probe
acaaagtccacatcaaaagaccaac

SEQ ID NO: 83639 - DNA, 25 bp, Artificial
  Probe
caacaaagtccacatcaaaagacca

SEQ ID NO: 83640 - DNA, 25 bp, Artificial
  Probe
accaacaaagtccacatcaaaagac

SEQ ID NO: 83641 - DNA, 25 bp, Artificial
  Probe
tgaccaacaaagtccacatcaaaag

SEQ ID NO: 83642 - DNA, 25 bp, Artificial
  Probe
ctgaccaacaaagtccacatcaaaa

SEQ ID NO: 83643 - DNA, 25 bp, Artificial
  Probe
aaccccgtcaagtaccactattatg

SEQ ID NO: 83644 - DNA, 25 bp, Artificial
  Probe
ctgttctcctctgctgttctgatat

SEQ ID NO: 83645 - DNA, 25 bp, Artificial
  Probe
aatagccaagataccaactatcacg

SEQ ID NO: 83646 - DNA, 25 bp, Artificial
  Probe
tctcatccagacatagtgaatacac

SEQ ID NO: 83647 - DNA, 25 bp, Artificial
  Probe
atagccaagataccaactatcacgg

SEQ ID NO: 83648 - DNA, 25 bp, Artificial
  Probe
tctgttctcctctgctgttctgata

SEQ ID NO: 83649 - DNA, 25 bp, Artificial
  Probe
taatagccaagataccaactatcac

SEQ ID NO: 83650 - DNA, 25 bp, Artificial
  Probe
tacaggtatttaagcagtctcatcc

SEQ ID NO: 83651 - DNA, 25 bp, Artificial
  Probe
gcaaagttaatagccaagataccaa

SEQ ID NO: 83652 - DNA, 25 bp, Artificial
  Probe
caggtatttaagcagtctcatccag

SEQ ID NO: 83653 - DNA, 25 bp, Artificial
  Probe
ctacaggtatttaagcagtctcatc

SEQ ID NO: 83654 - DNA, 25 bp, Artificial
  Probe
gatgagaccctggcaaagttaatag

SEQ ID NO: 83655 - DNA, 25 bp, Artificial
  Probe
acaggtatttaagcagtctcatcca

SEQ ID NO: 83656 - DNA, 25 bp, Artificial
  Probe
aggtatttaagcagtctcatccaga

SEQ ID NO: 83657 - DNA, 25 bp, Artificial
  Probe
ttaatagccaagataccaactatca

SEQ ID NO: 83658 - DNA, 25 bp, Artificial
  Probe
tgatgagaccctggcaaagttaata

SEQ ID NO: 83659 - DNA, 25 bp, Artificial
  Probe
attcagaagaatcacctggatgatg

SEQ ID NO: 83660 - DNA, 25 bp, Artificial
  Probe
tgttctcctctgctgttctgatatc

SEQ ID NO: 83661 - DNA, 25 bp, Artificial
  Probe
gttaatagccaagataccaactatc

SEQ ID NO: 83662 - DNA, 25 bp, Artificial
  Probe
caaagttaatagccaagataccaac

SEQ ID NO: 83663 - DNA, 25 bp, Artificial
  Probe
atgatgagaccctggcaaagttaat

SEQ ID NO: 83664 - DNA, 25 bp, Artificial
  Probe
ttcagaagaatcacctggatgatga

SEQ ID NO: 83665 - DNA, 25 bp, Artificial
  Probe
caagataccaactatcacggcagtc

SEQ ID NO: 83666 - DNA, 25 bp, Artificial
  Probe
ctctgttctcctctgctgttctgat

SEQ ID NO: 83667 - DNA, 25 bp, Artificial
  Probe
gtgaatacactgtttcctccattgt

SEQ ID NO: 83668 - DNA, 25 bp, Artificial
  Probe
gttctcctctgctgttctgatatcc

SEQ ID NO: 83669 - DNA, 25 bp, Artificial
  Probe
aagataccaactatcacggcagtct

SEQ ID NO: 83670 - DNA, 25 bp, Artificial
  Probe
agaagaatcacctggatgatgagac

SEQ ID NO: 83671 - DNA, 25 bp, Artificial
  Probe
cagaagaatcacctggatgatgaga

SEQ ID NO: 83672 - DNA, 25 bp, Artificial
  Probe
tcagaagaatcacctggatgatgag

SEQ ID NO: 83673 - DNA, 25 bp, Artificial
  Probe
gatgatgagaccctggcaaagttaa

SEQ ID NO: 83674 - DNA, 25 bp, Artificial
  Probe
tgtcactactgcaacattaggaatg

SEQ ID NO: 83675 - DNA, 25 bp, Artificial
  Probe
atgagaccctggcaaagttaatagc

SEQ ID NO: 83676 - DNA, 25 bp, Artificial
  Probe
tgaatacactgtttcctccattgta

SEQ ID NO: 83677 - DNA, 25 bp, Artificial
  Probe
gaatacactgtttcctccattgtac

SEQ ID NO: 83678 - DNA, 25 bp, Artificial
  Probe
atgtcactactgcaacattaggaat

SEQ ID NO: 83679 - DNA, 25 bp, Artificial
  Probe
gctacaggtatttaagcagtctcat

SEQ ID NO: 83680 - DNA, 25 bp, Artificial
  Probe
gaagaatcacctggatgatgagacc

SEQ ID NO: 83681 - DNA, 25 bp, Artificial
  Probe
gtctcatccagacatagtgaataca

SEQ ID NO: 83682 - DNA, 25 bp, Artificial
  Probe
agtctcatccagacatagtgaatac

SEQ ID NO: 83683 - DNA, 25 bp, Artificial
  Probe
cagtctcatccagacatagtgaata

SEQ ID NO: 83684 - DNA, 25 bp, Artificial
  Probe
agataccaactatcacggcagtctg

SEQ ID NO: 83685 - DNA, 25 bp, Artificial
  Probe
gttagaaccaagaaaagtccagaag

SEQ ID NO: 83686 - DNA, 25 bp, Artificial
  Probe
tgttagaaccaagaaaagtccagaa

SEQ ID NO: 83687 - DNA, 25 bp, Artificial
  Probe
aagttaatagccaagataccaacta

SEQ ID NO: 83688 - DNA, 25 bp, Artificial
  Probe
ttaagcagtctcatccagacatagt

SEQ ID NO: 83689 - DNA, 25 bp, Artificial
  Probe
atggtgtatctctctgtaatggtga

SEQ ID NO: 83690 - DNA, 25 bp, Artificial
  Probe
gatggtgtatctctctgtaatggtg

SEQ ID NO: 83691 - DNA, 25 bp, Artificial
  Probe
tacgatggtgtatctctctgtaatg

SEQ ID NO: 83692 - DNA, 25 bp, Artificial
  Probe
ttaacttgttggatatgttcggtga

SEQ ID NO: 83693 - DNA, 25 bp, Artificial
  Probe
taacttgttggatatgttcggtgag

SEQ ID NO: 83694 - DNA, 25 bp, Artificial
  Probe
cgatggtgtatctctctgtaatggt

SEQ ID NO: 83695 - DNA, 25 bp, Artificial
  Probe
acgatggtgtatctctctgtaatgg

SEQ ID NO: 83696 - DNA, 25 bp, Artificial
  Probe
aacaaggacaaggagtattatgtgt

SEQ ID NO: 83697 - DNA, 25 bp, Artificial
  Probe
acaaggacaaggagtattatgtgta

SEQ ID NO: 83698 - DNA, 25 bp, Artificial
  Probe
tggtgtatctctctgtaatggtgag

SEQ ID NO: 83699 - DNA, 25 bp, Artificial
  Probe
cttgttggatatgttcggtgagttg

SEQ ID NO: 83700 - DNA, 25 bp, Artificial
  Probe
acatacgatggtgtatctctctgta

SEQ ID NO: 83701 - DNA, 25 bp, Artificial
  Probe
catacgatggtgtatctctctgtaa

SEQ ID NO: 83702 - DNA, 25 bp, Artificial
  Probe
caaggacaaggagtattatgtgtaa

SEQ ID NO: 83703 - DNA, 25 bp, Artificial
  Probe
atacgatggtgtatctctctgtaat

SEQ ID NO: 83704 - DNA, 25 bp, Artificial
  Probe
cacatacgatggtgtatctctctgt

SEQ ID NO: 83705 - DNA, 25 bp, Artificial
  Probe
acttgttggatatgttcggtgagtt

SEQ ID NO: 83706 - DNA, 25 bp, Artificial
  Probe
aacttgttggatatgttcggtgagt

SEQ ID NO: 83707 - DNA, 25 bp, Artificial
  Probe
gtgtatctctctgtaatggtgagcc

SEQ ID NO: 83708 - DNA, 25 bp, Artificial
  Probe
ggtgtatctctctgtaatggtgagc

SEQ ID NO: 83709 - DNA, 25 bp, Artificial
  Probe
tttaacttgttggatatgttcggtg

SEQ ID NO: 83710 - DNA, 25 bp, Artificial
  Probe
atttaacttgttggatatgttcggt

SEQ ID NO: 83711 - DNA, 25 bp, Artificial
  Probe
ttgttggatatgttcggtgagttgg

SEQ ID NO: 83712 - DNA, 25 bp, Artificial
  Probe
gatttaacttgttggatatgttcgg

SEQ ID NO: 83713 - DNA, 25 bp, Artificial
  Probe
aaacaaggacaaggagtattatgtg

SEQ ID NO: 83714 - DNA, 25 bp, Artificial
  Probe
ctgtatcataaagcacacacttagt

SEQ ID NO: 83715 - DNA, 25 bp, Artificial
  Probe
ggacaaggagtattatgtgtaaaca

SEQ ID NO: 83716 - DNA, 25 bp, Artificial
  Probe
tgtatctctctgtaatggtgagcca

SEQ ID NO: 83717 - DNA, 25 bp, Artificial
  Probe
aggacaaggagtattatgtgtaaac

SEQ ID NO: 83718 - DNA, 25 bp, Artificial
  Probe
agatttaacttgttggatatgttcg

SEQ ID NO: 83719 - DNA, 25 bp, Artificial
  Probe
gtaaacatcacaccaccagtcgtat

SEQ ID NO: 83720 - DNA, 25 bp, Artificial
  Probe
taaacatcacaccaccagtcgtatg

SEQ ID NO: 83721 - DNA, 25 bp, Artificial
  Probe
tgtatcataaagcacacacttagtg

SEQ ID NO: 83722 - DNA, 25 bp, Artificial
  Probe
aaggacaaggagtattatgtgtaaa

SEQ ID NO: 83723 - DNA, 25 bp, Artificial
  Probe
gctgtatcataaagcacacacttag

SEQ ID NO: 83724 - DNA, 25 bp, Artificial
  Probe
tgagatttaacttgttggatatgtt

SEQ ID NO: 83725 - DNA, 25 bp, Artificial
  Probe
atgagatttaacttgttggatatgt

SEQ ID NO: 83726 - DNA, 25 bp, Artificial
  Probe
gatatgttcggtgagttggggtata

SEQ ID NO: 83727 - DNA, 25 bp, Artificial
  Probe
tatctctctgtaatggtgagccatg

SEQ ID NO: 83728 - DNA, 25 bp, Artificial
  Probe
gtatctctctgtaatggtgagccat

SEQ ID NO: 83729 - DNA, 25 bp, Artificial
  Probe
gagatttaacttgttggatatgttc

SEQ ID NO: 83730 - DNA, 25 bp, Artificial
  Probe
cgtatgcgaattgaaaacagaatta

SEQ ID NO: 83731 - DNA, 25 bp, Artificial
  Probe
tgacaatgagatttaacttgttgga

SEQ ID NO: 83732 - DNA, 25 bp, Artificial
  Probe
aaaacaaggacaaggagtattatgt

SEQ ID NO: 83733 - DNA, 25 bp, Artificial
  Probe
gacacatacgatggtgtatctctct

SEQ ID NO: 83734 - DNA, 25 bp, Artificial
  Probe
cacctctctctttcttgctatcttt

SEQ ID NO: 83735 - DNA, 25 bp, Artificial
  Probe
tccctgttcctgtagacttatagat

SEQ ID NO: 83736 - DNA, 25 bp, Artificial
  Probe
atccctgttcctgtagacttataga

SEQ ID NO: 83737 - DNA, 25 bp, Artificial
  Probe
catccctgttcctgtagacttatag

SEQ ID NO: 83738 - DNA, 25 bp, Artificial
  Probe
ctctctctctatctcaagtttgtgc

SEQ ID NO: 83739 - DNA, 25 bp, Artificial
  Probe
tctctctctctatctcaagtttgtg

SEQ ID NO: 83740 - DNA, 25 bp, Artificial
  Probe
ccctgttcctgtagacttatagatt

SEQ ID NO: 83741 - DNA, 25 bp, Artificial
  Probe
ttctctctctctatctcaagtttgt

SEQ ID NO: 83742 - DNA, 25 bp, Artificial
  Probe
ggctatctattagacttgggaatgt

SEQ ID NO: 83743 - DNA, 25 bp, Artificial
  Probe
tggctatctattagacttgggaatg

SEQ ID NO: 83744 - DNA, 25 bp, Artificial
  Probe
gtggctatctattagacttgggaat

SEQ ID NO: 83745 - DNA, 25 bp, Artificial
  Probe
cctgttcctgtagacttatagatta

SEQ ID NO: 83746 - DNA, 25 bp, Artificial
  Probe
aaaccacctctctctttcttgctat

SEQ ID NO: 83747 - DNA, 25 bp, Artificial
  Probe
caagtcctgcaagagatgtgataac

SEQ ID NO: 83748 - DNA, 25 bp, Artificial
  Probe
gctactacttggaccactctttaga

SEQ ID NO: 83749 - DNA, 25 bp, Artificial
  Probe
agtggctatctattagacttgggaa

SEQ ID NO: 83750 - DNA, 25 bp, Artificial
  Probe
ccacctctctctttcttgctatctt

SEQ ID NO: 83751 - DNA, 25 bp, Artificial
  Probe
acatccctgttcctgtagacttata

SEQ ID NO: 83752 - DNA, 25 bp, Artificial
  Probe
gctatctattagacttgggaatgtg

SEQ ID NO: 83753 - DNA, 25 bp, Artificial
  Probe
tacaagtcctgcaagagatgtgata

SEQ ID NO: 83754 - DNA, 25 bp, Artificial
  Probe
aaccacctctctctttcttgctatc

SEQ ID NO: 83755 - DNA, 25 bp, Artificial
  Probe
cagtggctatctattagacttggga

SEQ ID NO: 83756 - DNA, 25 bp, Artificial
  Probe
ctattagacttgggaatgtgtcaga

SEQ ID NO: 83757 - DNA, 25 bp, Artificial
  Probe
attagacttgggaatgtgtcagatg

SEQ ID NO: 83758 - DNA, 25 bp, Artificial
  Probe
tctattagacttgggaatgtgtcag

SEQ ID NO: 83759 - DNA, 25 bp, Artificial
  Probe
tattagacttgggaatgtgtcagat

SEQ ID NO: 83760 - DNA, 25 bp, Artificial
  Probe
tttctctctctctatctcaagtttg

SEQ ID NO: 83761 - DNA, 25 bp, Artificial
  Probe
atctattagacttgggaatgtgtca

SEQ ID NO: 83762 - DNA, 25 bp, Artificial
  Probe
atacaagtcctgcaagagatgtgat

SEQ ID NO: 83763 - DNA, 25 bp, Artificial
  Probe
ctactacttggaccactctttagag

SEQ ID NO: 83764 - DNA, 25 bp, Artificial
  Probe
tactacttggaccactctttagagg

SEQ ID NO: 83765 - DNA, 25 bp, Artificial
  Probe
aagtcctgcaagagatgtgataaca

SEQ ID NO: 83766 - DNA, 25 bp, Artificial
  Probe
acaagtcctgcaagagatgtgataa

SEQ ID NO: 83767 - DNA, 25 bp, Artificial
  Probe
actctttagagggtggatacaagtc

SEQ ID NO: 83768 - DNA, 25 bp, Artificial
  Probe
accacctctctctttcttgctatct

SEQ ID NO: 83769 - DNA, 25 bp, Artificial
  Probe
agctactacttggaccactctttag

SEQ ID NO: 83770 - DNA, 25 bp, Artificial
  Probe
caaaccacctctctctttcttgcta

SEQ ID NO: 83771 - DNA, 25 bp, Artificial
  Probe
gatacaagtcctgcaagagatgtga

SEQ ID NO: 83772 - DNA, 25 bp, Artificial
  Probe
ctatctattagacttgggaatgtgt

SEQ ID NO: 83773 - DNA, 25 bp, Artificial
  Probe
tcctgtagacttatagattattcca

SEQ ID NO: 83774 - DNA, 25 bp, Artificial
  Probe
ctctctctatctcaagtttgtgcag

SEQ ID NO: 83775 - DNA, 25 bp, Artificial
  Probe
agtcctgcaagagatgtgataacag

SEQ ID NO: 83776 - DNA, 25 bp, Artificial
  Probe
tacatccctgttcctgtagacttat

SEQ ID NO: 83777 - DNA, 25 bp, Artificial
  Probe
tctctctctatctcaagtttgtgca

SEQ ID NO: 83778 - DNA, 25 bp, Artificial
  Probe
ttacatccctgttcctgtagactta

SEQ ID NO: 83779 - DNA, 25 bp, Artificial
  Probe
catcaacaggttccagtgaatacta

SEQ ID NO: 83780 - DNA, 25 bp, Artificial
  Probe
aatgctatggagtacaagaagacag

SEQ ID NO: 83781 - DNA, 25 bp, Artificial
  Probe
caatgctatggagtacaagaagaca

SEQ ID NO: 83782 - DNA, 25 bp, Artificial
  Probe
ctatggagtacaagaagacagatgc

SEQ ID NO: 83783 - DNA, 25 bp, Artificial
  Probe
gctatggagtacaagaagacagatg

SEQ ID NO: 83784 - DNA, 25 bp, Artificial
  Probe
atcaacaggttccagtgaatactag

SEQ ID NO: 83785 - DNA, 25 bp, Artificial
  Probe
tatggagtacaagaagacagatgct

SEQ ID NO: 83786 - DNA, 25 bp, Artificial
  Probe
tgctatggagtacaagaagacagat

SEQ ID NO: 83787 - DNA, 25 bp, Artificial
  Probe
atgctatggagtacaagaagacaga

SEQ ID NO: 83788 - DNA, 25 bp, Artificial
  Probe
gttccagtgaatactagcctgtaat

SEQ ID NO: 83789 - DNA, 25 bp, Artificial
  Probe
ttccagtgaatactagcctgtaatt

SEQ ID NO: 83790 - DNA, 25 bp, Artificial
  Probe
ggttccagtgaatactagcctgtaa

SEQ ID NO: 83791 - DNA, 25 bp, Artificial
  Probe
tcaacaggttccagtgaatactagc

SEQ ID NO: 83792 - DNA, 25 bp, Artificial
  Probe
ccatcaacaggttccagtgaatact

SEQ ID NO: 83793 - DNA, 25 bp, Artificial
  Probe
atggagtacaagaagacagatgctc

SEQ ID NO: 83794 - DNA, 25 bp, Artificial
  Probe
ccaatgctatggagtacaagaagac

SEQ ID NO: 83795 - DNA, 25 bp, Artificial
  Probe
aggttccagtgaatactagcctgta

SEQ ID NO: 83796 - DNA, 25 bp, Artificial
  Probe
aagaacttgatctgtgatttcctct

SEQ ID NO: 83797 - DNA, 25 bp, Artificial
  Probe
agaacttgatctgtgatttcctctc

SEQ ID NO: 83798 - DNA, 25 bp, Artificial
  Probe
gaacttgatctgtgatttcctctcc

SEQ ID NO: 83799 - DNA, 25 bp, Artificial
  Probe
caacaggttccagtgaatactagcc

SEQ ID NO: 83800 - DNA, 25 bp, Artificial
  Probe
tccagtgaatactagcctgtaattt

SEQ ID NO: 83801 - DNA, 25 bp, Artificial
  Probe
taagaacttgatctgtgatttcctc

SEQ ID NO: 83802 - DNA, 25 bp, Artificial
  Probe
accatcaacaggttccagtgaatac

SEQ ID NO: 83803 - DNA, 25 bp, Artificial
  Probe
caccatcaacaggttccagtgaata

SEQ ID NO: 83804 - DNA, 25 bp, Artificial
  Probe
cagtgttccttgtgatcctcttctg

SEQ ID NO: 83805 - DNA, 25 bp, Artificial
  Probe
ttaagaacttgatctgtgatttcct

SEQ ID NO: 83806 - DNA, 25 bp, Artificial
  Probe
aacaggttccagtgaatactagcct

SEQ ID NO: 83807 - DNA, 25 bp, Artificial
  Probe
aacttgatctgtgatttcctctccc

SEQ ID NO: 83808 - DNA, 25 bp, Artificial
  Probe
cttgatctgtgatttcctctccctc

SEQ ID NO: 83809 - DNA, 25 bp, Artificial
  Probe
ccagtgttccttgtgatcctcttct

SEQ ID NO: 83810 - DNA, 25 bp, Artificial
  Probe
acttgatctgtgatttcctctccct

SEQ ID NO: 83811 - DNA, 25 bp, Artificial
  Probe
ggaaagaaacagtccaatgctatgg

SEQ ID NO: 83812 - DNA, 25 bp, Artificial
  Probe
ctttgggtggtctacattctgactg

SEQ ID NO: 83813 - DNA, 25 bp, Artificial
  Probe
tgttccttgtgatcctcttctgctg

SEQ ID NO: 83814 - DNA, 25 bp, Artificial
  Probe
gtgttccttgtgatcctcttctgct

SEQ ID NO: 83815 - DNA, 25 bp, Artificial
  Probe
agtgttccttgtgatcctcttctgc

SEQ ID NO: 83816 - DNA, 25 bp, Artificial
  Probe
tcaagatgtcaccatcaacaggttc

SEQ ID NO: 83817 - DNA, 25 bp, Artificial
  Probe
ctcaagatgtcaccatcaacaggtt

SEQ ID NO: 83818 - DNA, 25 bp, Artificial
  Probe
aacctcaagatgtcaccatcaacag

SEQ ID NO: 83819 - DNA, 25 bp, Artificial
  Probe
ttgatctgtgatttcctctccctcc

SEQ ID NO: 83820 - DNA, 25 bp, Artificial
  Probe
cttaagaacttgatctgtgatttcc

SEQ ID NO: 83821 - DNA, 25 bp, Artificial
  Probe
tcagaaaacctcaagatgtcaccat

SEQ ID NO: 83822 - DNA, 25 bp, Artificial
  Probe
tttgggtggtctacattctgactgt

SEQ ID NO: 83823 - DNA, 25 bp, Artificial
  Probe
ttgggtggtctacattctgactgta

SEQ ID NO: 83824 - DNA, 25 bp, Artificial
  Probe
gtatgatgctgatgggaaagttgat

SEQ ID NO: 83825 - DNA, 25 bp, Artificial
  Probe
cttactaaatgaccttggttctggg

SEQ ID NO: 83826 - DNA, 25 bp, Artificial
  Probe
tatgatgctgatgggaaagttgatc

SEQ ID NO: 83827 - DNA, 25 bp, Artificial
  Probe
gcttactaaatgaccttggttctgg

SEQ ID NO: 83828 - DNA, 25 bp, Artificial
  Probe
taacatctgcccaaccaagtctaaa

SEQ ID NO: 83829 - DNA, 25 bp, Artificial
  Probe
tagcttactaaatgaccttggttct

SEQ ID NO: 83830 - DNA, 25 bp, Artificial
  Probe
agcttactaaatgaccttggttctg

SEQ ID NO: 83831 - DNA, 25 bp, Artificial
  Probe
ggaatagcttactaaatgaccttgg

SEQ ID NO: 83832 - DNA, 25 bp, Artificial
  Probe
gggaatagcttactaaatgaccttg

SEQ ID NO: 83833 - DNA, 25 bp, Artificial
  Probe
accaagtctaaagggaatagcttac

SEQ ID NO: 83834 - DNA, 25 bp, Artificial
  Probe
aaccaagtctaaagggaatagctta

SEQ ID NO: 83835 - DNA, 25 bp, Artificial
  Probe
caaccaagtctaaagggaatagctt

SEQ ID NO: 83836 - DNA, 25 bp, Artificial
  Probe
gtaacatctgcccaaccaagtctaa

SEQ ID NO: 83837 - DNA, 25 bp, Artificial
  Probe
ccaagtctaaagggaatagcttact

SEQ ID NO: 83838 - DNA, 25 bp, Artificial
  Probe
atagcttactaaatgaccttggttc

SEQ ID NO: 83839 - DNA, 25 bp, Artificial
  Probe
gaatagcttactaaatgaccttggt

SEQ ID NO: 83840 - DNA, 25 bp, Artificial
  Probe
atggtgaataaggacttgccaaatt

SEQ ID NO: 83841 - DNA, 25 bp, Artificial
  Probe
aatggtgaataaggacttgccaaat

SEQ ID NO: 83842 - DNA, 25 bp, Artificial
  Probe
atgatgctgatgggaaagttgatct

SEQ ID NO: 83843 - DNA, 25 bp, Artificial
  Probe
aaagggaatagcttactaaatgacc

SEQ ID NO: 83844 - DNA, 25 bp, Artificial
  Probe
aaatggtgaataaggacttgccaaa

SEQ ID NO: 83845 - DNA, 25 bp, Artificial
  Probe
tgatgctgatgggaaagttgatctt

SEQ ID NO: 83846 - DNA, 25 bp, Artificial
  Probe
aatagcttactaaatgaccttggtt

SEQ ID NO: 83847 - DNA, 25 bp, Artificial
  Probe
aacatctgcccaaccaagtctaaag

SEQ ID NO: 83848 - DNA, 25 bp, Artificial
  Probe
agggaatagcttactaaatgacctt

SEQ ID NO: 83849 - DNA, 25 bp, Artificial
  Probe
aagggaatagcttactaaatgacct

SEQ ID NO: 83850 - DNA, 25 bp, Artificial
  Probe
ccaaccaagtctaaagggaatagct

SEQ ID NO: 83851 - DNA, 25 bp, Artificial
  Probe
gatgctgatgggaaagttgatcttt

SEQ ID NO: 83852 - DNA, 25 bp, Artificial
  Probe
atgctgatgggaaagttgatctttg

SEQ ID NO: 83853 - DNA, 25 bp, Artificial
  Probe
caagtctaaagggaatagcttacta

SEQ ID NO: 83854 - DNA, 25 bp, Artificial
  Probe
tgtaacatctgcccaaccaagtcta

SEQ ID NO: 83855 - DNA, 25 bp, Artificial
  Probe
tggtgaataaggacttgccaaattt

SEQ ID NO: 83856 - DNA, 25 bp, Artificial
  Probe
ggcaaaggctgtgggaagtaattaa

SEQ ID NO: 83857 - DNA, 25 bp, Artificial
  Probe
ttactaaatgaccttggttctgggg

SEQ ID NO: 83858 - DNA, 25 bp, Artificial
  Probe
agtctaaagggaatagcttactaaa

SEQ ID NO: 83859 - DNA, 25 bp, Artificial
  Probe
aagtctaaagggaatagcttactaa

SEQ ID NO: 83860 - DNA, 25 bp, Artificial
  Probe
ggaaagttgatctttgcctgtcatg

SEQ ID NO: 83861 - DNA, 25 bp, Artificial
  Probe
ggtgaataaggacttgccaaatttt

SEQ ID NO: 83862 - DNA, 25 bp, Artificial
  Probe
ataaggacttgccaaattttctgaa

SEQ ID NO: 83863 - DNA, 25 bp, Artificial
  Probe
aataaggacttgccaaattttctga

SEQ ID NO: 83864 - DNA, 25 bp, Artificial
  Probe
taaggacttgccaaattttctgaag

SEQ ID NO: 83865 - DNA, 25 bp, Artificial
  Probe
tgaataaggacttgccaaattttct

SEQ ID NO: 83866 - DNA, 25 bp, Artificial
  Probe
gtgaataaggacttgccaaattttc

SEQ ID NO: 83867 - DNA, 25 bp, Artificial
  Probe
gaataaggacttgccaaattttctg

SEQ ID NO: 83868 - DNA, 25 bp, Artificial
  Probe
taaagggaatagcttactaaatgac

SEQ ID NO: 83869 - DNA, 25 bp, Artificial
  Probe
acttagtagtgaggaaactttgtgt

SEQ ID NO: 83870 - DNA, 25 bp, Artificial
  Probe
aaacttgtgtcacttccaaagaatc

SEQ ID NO: 83871 - DNA, 25 bp, Artificial
  Probe
cttagtagtgaggaaactttgtgtg

SEQ ID NO: 83872 - DNA, 25 bp, Artificial
  Probe
ttagtagtgaggaaactttgtgtgg

SEQ ID NO: 83873 - DNA, 25 bp, Artificial
  Probe
ttacagagttatggaatccaaggtc

SEQ ID NO: 83874 - DNA, 25 bp, Artificial
  Probe
acttgtgtcacttccaaagaatcat

SEQ ID NO: 83875 - DNA, 25 bp, Artificial
  Probe
tacagagttatggaatccaaggtct

SEQ ID NO: 83876 - DNA, 25 bp, Artificial
  Probe
gagttatggaatccaaggtctgatc

SEQ ID NO: 83877 - DNA, 25 bp, Artificial
  Probe
aacttgtgtcacttccaaagaatca

SEQ ID NO: 83878 - DNA, 25 bp, Artificial
  Probe
agagttatggaatccaaggtctgat

SEQ ID NO: 83879 - DNA, 25 bp, Artificial
  Probe
aatgtgaccagttcaaattatgtcc

SEQ ID NO: 83880 - DNA, 25 bp, Artificial
  Probe
ctccctaacacccttacttagtagt

SEQ ID NO: 83881 - DNA, 25 bp, Artificial
  Probe
cttgtgtcacttccaaagaatcatg

SEQ ID NO: 83882 - DNA, 25 bp, Artificial
  Probe
acccttacttagtagtgaggaaact

SEQ ID NO: 83883 - DNA, 25 bp, Artificial
  Probe
cacccttacttagtagtgaggaaac

SEQ ID NO: 83884 - DNA, 25 bp, Artificial
  Probe
taacacccttacttagtagtgagga

SEQ ID NO: 83885 - DNA, 25 bp, Artificial
  Probe
ctaacacccttacttagtagtgagg

SEQ ID NO: 83886 - DNA, 25 bp, Artificial
  Probe
cctaacacccttacttagtagtgag

SEQ ID NO: 83887 - DNA, 25 bp, Artificial
  Probe
acacccttacttagtagtgaggaaa

SEQ ID NO: 83888 - DNA, 25 bp, Artificial
  Probe
aacacccttacttagtagtgaggaa

SEQ ID NO: 83889 - DNA, 25 bp, Artificial
  Probe
cccttacttagtagtgaggaaactt

SEQ ID NO: 83890 - DNA, 25 bp, Artificial
  Probe
ccctaacacccttacttagtagtga

SEQ ID NO: 83891 - DNA, 25 bp, Artificial
  Probe
tccctaacacccttacttagtagtg

SEQ ID NO: 83892 - DNA, 25 bp, Artificial
  Probe
agttatggaatccaaggtctgatcc

SEQ ID NO: 83893 - DNA, 25 bp, Artificial
  Probe
cctccctaacacccttacttagtag

SEQ ID NO: 83894 - DNA, 25 bp, Artificial
  Probe
tacttagtagtgaggaaactttgtg

SEQ ID NO: 83895 - DNA, 25 bp, Artificial
  Probe
tagtagtgaggaaactttgtgtggg

SEQ ID NO: 83896 - DNA, 25 bp, Artificial
  Probe
tttctgactggatcatctcaccttt

SEQ ID NO: 83897 - DNA, 25 bp, Artificial
  Probe
aaatgtgaccagttcaaattatgtc

SEQ ID NO: 83898 - DNA, 25 bp, Artificial
  Probe
ttacttagtagtgaggaaactttgt

SEQ ID NO: 83899 - DNA, 25 bp, Artificial
  Probe
ccttacttagtagtgaggaaacttt

SEQ ID NO: 83900 - DNA, 25 bp, Artificial
  Probe
tttacagagttatggaatccaaggt

SEQ ID NO: 83901 - DNA, 25 bp, Artificial
  Probe
cttacttagtagtgaggaaactttg

SEQ ID NO: 83902 - DNA, 25 bp, Artificial
  Probe
ttgtgtcacttccaaagaatcatgg

SEQ ID NO: 83903 - DNA, 25 bp, Artificial
  Probe
cccattttccagaagtgaacatttc

SEQ ID NO: 83904 - DNA, 25 bp, Artificial
  Probe
tcccattttccagaagtgaacattt

SEQ ID NO: 83905 - DNA, 25 bp, Artificial
  Probe
ctcccattttccagaagtgaacatt

SEQ ID NO: 83906 - DNA, 25 bp, Artificial
  Probe
ttggttctggtgacactgacatgaa

SEQ ID NO: 83907 - DNA, 25 bp, Artificial
  Probe
cagagttatggaatccaaggtctga

SEQ ID NO: 83908 - DNA, 25 bp, Artificial
  Probe
acagagttatggaatccaaggtctg

SEQ ID NO: 83909 - DNA, 25 bp, Artificial
  Probe
gttatggaatccaaggtctgatccc

SEQ ID NO: 83910 - DNA, 25 bp, Artificial
  Probe
ttatggaatccaaggtctgatccct

SEQ ID NO: 83911 - DNA, 25 bp, Artificial
  Probe
aaaatgtgaccagttcaaattatgt

SEQ ID NO: 83912 - DNA, 25 bp, Artificial
  Probe
ttctgactggatcatctcacctttt

SEQ ID NO: 83913 - DNA, 25 bp, Artificial
  Probe
ttttctgactggatcatctcacctt

SEQ ID NO: 83914 - DNA, 25 bp, Artificial
  Probe
tggagacagatagatagaacagtga

SEQ ID NO: 83915 - DNA, 25 bp, Artificial
  Probe
ttggagacagatagatagaacagtg

SEQ ID NO: 83916 - DNA, 25 bp, Artificial
  Probe
ggagacagatagatagaacagtgat

SEQ ID NO: 83917 - DNA, 25 bp, Artificial
  Probe
acattggagacagatagatagaaca

SEQ ID NO: 83918 - DNA, 25 bp, Artificial
  Probe
cacattggagacagatagatagaac

SEQ ID NO: 83919 - DNA, 25 bp, Artificial
  Probe
attggagacagatagatagaacagt

SEQ ID NO: 83920 - DNA, 25 bp, Artificial
  Probe
cattggagacagatagatagaacag

SEQ ID NO: 83921 - DNA, 25 bp, Artificial
  Probe
caggacagatagatggtacaactct

SEQ ID NO: 83922 - DNA, 25 bp, Artificial
  Probe
gagacagatagatagaacagtgatc

SEQ ID NO: 83923 - DNA, 25 bp, Artificial
  Probe
ccacattggagacagatagatagaa

SEQ ID NO: 83924 - DNA, 25 bp, Artificial
  Probe
gatagatagaacagtgatcttcgga

SEQ ID NO: 83925 - DNA, 25 bp, Artificial
  Probe
agatagatagaacagtgatcttcgg

SEQ ID NO: 83926 - DNA, 25 bp, Artificial
  Probe
atagatagaacagtgatcttcggaa

SEQ ID NO: 83927 - DNA, 25 bp, Artificial
  Probe
ccaggacagatagatggtacaactc

SEQ ID NO: 83928 - DNA, 25 bp, Artificial
  Probe
cagatagatagaacagtgatcttcg

SEQ ID NO: 83929 - DNA, 25 bp, Artificial
  Probe
agacagatagatagaacagtgatct

SEQ ID NO: 83930 - DNA, 25 bp, Artificial
  Probe
gatagatggtacaactctggctgga

SEQ ID NO: 83931 - DNA, 25 bp, Artificial
  Probe
agatagatggtacaactctggctgg

SEQ ID NO: 83932 - DNA, 25 bp, Artificial
  Probe
atagatggtacaactctggctggag

SEQ ID NO: 83933 - DNA, 25 bp, Artificial
  Probe
acagatagatagaacagtgatcttc

SEQ ID NO: 83934 - DNA, 25 bp, Artificial
  Probe
gacagatagatagaacagtgatctt

SEQ ID NO: 83935 - DNA, 25 bp, Artificial
  Probe
ctgtgacatctagaagcgaccatag

SEQ ID NO: 83936 - DNA, 25 bp, Artificial
  Probe
tagatagaacagtgatcttcggaaa

SEQ ID NO: 83937 - DNA, 25 bp, Artificial
  Probe
gagacgtagactaccacctctatcc

SEQ ID NO: 83938 - DNA, 25 bp, Artificial
  Probe
ggagacgtagactaccacctctatc

SEQ ID NO: 83939 - DNA, 25 bp, Artificial
  Probe
aggacagatagatggtacaactctg

SEQ ID NO: 83940 - DNA, 25 bp, Artificial
  Probe
gcaacaaatgatctttgaggaacat

SEQ ID NO: 83941 - DNA, 25 bp, Artificial
  Probe
actgtgacatctagaagcgaccata

SEQ ID NO: 83942 - DNA, 25 bp, Artificial
  Probe
caacaaatgatctttgaggaacatg

SEQ ID NO: 83943 - DNA, 25 bp, Artificial
  Probe
agacgtagactaccacctctatcct

SEQ ID NO: 83944 - DNA, 25 bp, Artificial
  Probe
tgcttgactcagtagagaaaatgaa

SEQ ID NO: 83945 - DNA, 25 bp, Artificial
  Probe
ttgcttgactcagtagagaaaatga

SEQ ID NO: 83946 - DNA, 25 bp, Artificial
  Probe
cttgcttgactcagtagagaaaatg

SEQ ID NO: 83947 - DNA, 25 bp, Artificial
  Probe
gcttgactcagtagagaaaatgaaa

SEQ ID NO: 83948 - DNA, 25 bp, Artificial
  Probe
ggacagatagatggtacaactctgg

SEQ ID NO: 83949 - DNA, 25 bp, Artificial
  Probe
gagcttgcttgactcagtagagaaa

SEQ ID NO: 83950 - DNA, 25 bp, Artificial
  Probe
gcttgcttgactcagtagagaaaat

SEQ ID NO: 83951 - DNA, 25 bp, Artificial
  Probe
ttctcatggtgactcagacagcatc

SEQ ID NO: 83952 - DNA, 25 bp, Artificial
  Probe
ctcccaggacagatagatggtacaa

SEQ ID NO: 83953 - DNA, 25 bp, Artificial
  Probe
cagatagatggtacaactctggctg

SEQ ID NO: 83954 - DNA, 25 bp, Artificial
  Probe
gacagatagatggtacaactctggc

SEQ ID NO: 83955 - DNA, 25 bp, Artificial
  Probe
ggcaacaaatgatctttgaggaaca

SEQ ID NO: 83956 - DNA, 25 bp, Artificial
  Probe
cccaggacagatagatggtacaact

SEQ ID NO: 83957 - DNA, 25 bp, Artificial
  Probe
tcccaggacagatagatggtacaac

SEQ ID NO: 83958 - DNA, 25 bp, Artificial
  Probe
tccacattggagacagatagataga

SEQ ID NO: 83959 - DNA, 25 bp, Artificial
  Probe
atctatattaaggctctgtcaacgg

SEQ ID NO: 83960 - DNA, 25 bp, Artificial
  Probe
gctgtcatctatattaaggctctgt

SEQ ID NO: 83961 - DNA, 25 bp, Artificial
  Probe
tgctgtcatctatattaaggctctg

SEQ ID NO: 83962 - DNA, 25 bp, Artificial
  Probe
tctatattaaggctctgtcaacgga

SEQ ID NO: 83963 - DNA, 25 bp, Artificial
  Probe
catctatattaaggctctgtcaacg

SEQ ID NO: 83964 - DNA, 25 bp, Artificial
  Probe
tgtcatctatattaaggctctgtca

SEQ ID NO: 83965 - DNA, 25 bp, Artificial
  Probe
atgctgtcatctatattaaggctct

SEQ ID NO: 83966 - DNA, 25 bp, Artificial
  Probe
ctgtcatctatattaaggctctgtc

SEQ ID NO: 83967 - DNA, 25 bp, Artificial
  Probe
ctatattaaggctctgtcaacggag

SEQ ID NO: 83968 - DNA, 25 bp, Artificial
  Probe
tatattaaggctctgtcaacggagt

SEQ ID NO: 83969 - DNA, 25 bp, Artificial
  Probe
tcatctatattaaggctctgtcaac

SEQ ID NO: 83970 - DNA, 25 bp, Artificial
  Probe
gtcatctatattaaggctctgtcaa

SEQ ID NO: 83971 - DNA, 25 bp, Artificial
  Probe
atattaaggctctgtcaacggagtc

SEQ ID NO: 83972 - DNA, 25 bp, Artificial
  Probe
gatcgacagactcttcaactacatg

SEQ ID NO: 83973 - DNA, 25 bp, Artificial
  Probe
agatcgacagactcttcaactacat

SEQ ID NO: 83974 - DNA, 25 bp, Artificial
  Probe
aaagactccctgtgtataataaagc

SEQ ID NO: 83975 - DNA, 25 bp, Artificial
  Probe
cgaaagactccctgtgtataataaa

SEQ ID NO: 83976 - DNA, 25 bp, Artificial
  Probe
aggaggatttgactgtgaagatgag

SEQ ID NO: 83977 - DNA, 25 bp, Artificial
  Probe
gaggaggatttgactgtgaagatga

SEQ ID NO: 83978 - DNA, 25 bp, Artificial
  Probe
gaggatttgactgtgaagatgagtg

SEQ ID NO: 83979 - DNA, 25 bp, Artificial
  Probe
gatttgactgtgaagatgagtgacc

SEQ ID NO: 83980 - DNA, 25 bp, Artificial
  Probe
ggatttgactgtgaagatgagtgac

SEQ ID NO: 83981 - DNA, 25 bp, Artificial
  Probe
aggatttgactgtgaagatgagtga

SEQ ID NO: 83982 - DNA, 25 bp, Artificial
  Probe
agactccctgtgtataataaagctg

SEQ ID NO: 83983 - DNA, 25 bp, Artificial
  Probe
ggatgctgtcatctatattaaggct

SEQ ID NO: 83984 - DNA, 25 bp, Artificial
  Probe
acggatgctgtcatctatattaagg

SEQ ID NO: 83985 - DNA, 25 bp, Artificial
  Probe
ggacggatgctgtcatctatattaa

SEQ ID NO: 83986 - DNA, 25 bp, Artificial
  Probe
catcgaaagactccctgtgtataat

SEQ ID NO: 83987 - DNA, 25 bp, Artificial
  Probe
aagactccctgtgtataataaagct

SEQ ID NO: 83988 - DNA, 25 bp, Artificial
  Probe
tgtgtataataaagctgcctggaag

SEQ ID NO: 83989 - DNA, 25 bp, Artificial
  Probe
ctgtgtataataaagctgcctggaa

SEQ ID NO: 83990 - DNA, 25 bp, Artificial
  Probe
gatgctgtcatctatattaaggctc

SEQ ID NO: 83991 - DNA, 25 bp, Artificial
  Probe
gacggatgctgtcatctatattaag

SEQ ID NO: 83992 - DNA, 25 bp, Artificial
  Probe
ggaggatttgactgtgaagatgagt

SEQ ID NO: 83993 - DNA, 25 bp, Artificial
  Probe
tcgaaagactccctgtgtataataa

SEQ ID NO: 83994 - DNA, 25 bp, Artificial
  Probe
gactccctgtgtataataaagctgc

SEQ ID NO: 83995 - DNA, 25 bp, Artificial
  Probe
cggatgctgtcatctatattaaggc

SEQ ID NO: 83996 - DNA, 25 bp, Artificial
  Probe
atcgaaagactccctgtgtataata

SEQ ID NO: 83997 - DNA, 25 bp, Artificial
  Probe
aagatcgacagactcttcaactaca

SEQ ID NO: 83998 - DNA, 25 bp, Artificial
  Probe
ggaggaggatttgactgtgaagatg

SEQ ID NO: 83999 - DNA, 25 bp, Artificial
  Probe
gaagcattacagaaccaaccacgag

SEQ ID NO: 84000 - DNA, 25 bp, Artificial
  Probe
gaaagactccctgtgtataataaag

SEQ ID NO: 84001 - DNA, 25 bp, Artificial
  Probe
ccatcgaaagactccctgtgtataa

SEQ ID NO: 84002 - DNA, 25 bp, Artificial
  Probe
tattaaggctctgtcaacggagtcc

SEQ ID NO: 84003 - DNA, 25 bp, Artificial
  Probe
ctccctgtgtataataaagctgcct

SEQ ID NO: 84004 - DNA, 25 bp, Artificial
  Probe
aagctctctcaagtcagacagttaa

SEQ ID NO: 84005 - DNA, 25 bp, Artificial
  Probe
caagctctctcaagtcagacagtta

SEQ ID NO: 84006 - DNA, 25 bp, Artificial
  Probe
agctctctcaagtcagacagttaac

SEQ ID NO: 84007 - DNA, 25 bp, Artificial
  Probe
attgtcttaaggtgaaatggctgta

SEQ ID NO: 84008 - DNA, 25 bp, Artificial
  Probe
tgtcttaaggtgaaatggctgtaaa

SEQ ID NO: 84009 - DNA, 25 bp, Artificial
  Probe
ttgtcttaaggtgaaatggctgtaa

SEQ ID NO: 84010 - DNA, 25 bp, Artificial
  Probe
ccgttaacattgtcttaaggtgaaa

SEQ ID NO: 84011 - DNA, 25 bp, Artificial
  Probe
cccgttaacattgtcttaaggtgaa

SEQ ID NO: 84012 - DNA, 25 bp, Artificial
  Probe
ttctccagcacagatcctttgtcta

SEQ ID NO: 84013 - DNA, 25 bp, Artificial
  Probe
gactttctccagcacagatcctttg

SEQ ID NO: 84014 - DNA, 25 bp, Artificial
  Probe
ccaagctctctcaagtcagacagtt

SEQ ID NO: 84015 - DNA, 25 bp, Artificial
  Probe
cgttaacattgtcttaaggtgaaat

SEQ ID NO: 84016 - DNA, 25 bp, Artificial
  Probe
taacattgtcttaaggtgaaatggc

SEQ ID NO: 84017 - DNA, 25 bp, Artificial
  Probe
tctccagcacagatcctttgtctag

SEQ ID NO: 84018 - DNA, 25 bp, Artificial
  Probe
ctttctccagcacagatcctttgtc

SEQ ID NO: 84019 - DNA, 25 bp, Artificial
  Probe
aacattgtcttaaggtgaaatggct

SEQ ID NO: 84020 - DNA, 25 bp, Artificial
  Probe
aacccgttaacattgtcttaaggtg

SEQ ID NO: 84021 - DNA, 25 bp, Artificial
  Probe
caacccgttaacattgtcttaaggt

SEQ ID NO: 84022 - DNA, 25 bp, Artificial
  Probe
tttctccagcacagatcctttgtct

SEQ ID NO: 84023 - DNA, 25 bp, Artificial
  Probe
cattgtcttaaggtgaaatggctgt

SEQ ID NO: 84024 - DNA, 25 bp, Artificial
  Probe
acattgtcttaaggtgaaatggctg

SEQ ID NO: 84025 - DNA, 25 bp, Artificial
  Probe
ccagcacagatcctttgtctagaaa

SEQ ID NO: 84026 - DNA, 25 bp, Artificial
  Probe
gtcttaaggtgaaatggctgtaaaa

SEQ ID NO: 84027 - DNA, 25 bp, Artificial
  Probe
acccgttaacattgtcttaaggtga

SEQ ID NO: 84028 - DNA, 25 bp, Artificial
  Probe
tcttaaggtgaaatggctgtaaaat

SEQ ID NO: 84029 - DNA, 25 bp, Artificial
  Probe
actttctccagcacagatcctttgt

SEQ ID NO: 84030 - DNA, 25 bp, Artificial
  Probe
ttaacattgtcttaaggtgaaatgg

SEQ ID NO: 84031 - DNA, 25 bp, Artificial
  Probe
cttaaggtgaaatggctgtaaaatc

SEQ ID NO: 84032 - DNA, 25 bp, Artificial
  Probe
cagatcctttgtctagaaaatacgg

SEQ ID NO: 84033 - DNA, 25 bp, Artificial
  Probe
tccagcacagatcctttgtctagaa

SEQ ID NO: 84034 - DNA, 25 bp, Artificial
  Probe
cacaacccgttaacattgtcttaag

SEQ ID NO: 84035 - DNA, 25 bp, Artificial
  Probe
agcacagatcctttgtctagaaaat

SEQ ID NO: 84036 - DNA, 25 bp, Artificial
  Probe
acaacccgttaacattgtcttaagg

SEQ ID NO: 84037 - DNA, 25 bp, Artificial
  Probe
cctttgtctagaaaatacggactgt

SEQ ID NO: 84038 - DNA, 25 bp, Artificial
  Probe
cagcacagatcctttgtctagaaaa

SEQ ID NO: 84039 - DNA, 25 bp, Artificial
  Probe
ttgtctagaaaatacggactgtttg

SEQ ID NO: 84040 - DNA, 25 bp, Artificial
  Probe
gcacagatcctttgtctagaaaata

SEQ ID NO: 84041 - DNA, 25 bp, Artificial
  Probe
ggactttctccagcacagatccttt

SEQ ID NO: 84042 - DNA, 25 bp, Artificial
  Probe
ctttgtctagaaaatacggactgtt

SEQ ID NO: 84043 - DNA, 25 bp, Artificial
  Probe
ctccagcacagatcctttgtctaga

SEQ ID NO: 84044 - DNA, 25 bp, Artificial
  Probe
ccacaacccgttaacattgtcttaa

SEQ ID NO: 84045 - DNA, 25 bp, Artificial
  Probe
acagatcctttgtctagaaaatacg

SEQ ID NO: 84046 - DNA, 25 bp, Artificial
  Probe
tcctttgtctagaaaatacggactg

SEQ ID NO: 84047 - DNA, 25 bp, Artificial
  Probe
atcctttgtctagaaaatacggact

SEQ ID NO: 84048 - DNA, 25 bp, Artificial
  Probe
gtctagaaaatacggactgtttgca

SEQ ID NO: 84049 - DNA, 25 bp, Artificial
  Probe
tcccttcctctctataaatggctaa

SEQ ID NO: 84050 - DNA, 25 bp, Artificial
  Probe
gtcccttcctctctataaatggcta

SEQ ID NO: 84051 - DNA, 25 bp, Artificial
  Probe
atctttaatgtgtaatttcccagcg

SEQ ID NO: 84052 - DNA, 25 bp, Artificial
  Probe
cccttcctctctataaatggctaag

SEQ ID NO: 84053 - DNA, 25 bp, Artificial
  Probe
cctacaaagtcccttcctctctata

SEQ ID NO: 84054 - DNA, 25 bp, Artificial
  Probe
aaagtcccttcctctctataaatgg

SEQ ID NO: 84055 - DNA, 25 bp, Artificial
  Probe
tctttaatgtgtaatttcccagcga

SEQ ID NO: 84056 - DNA, 25 bp, Artificial
  Probe
ctttaatgtgtaatttcccagcgaa

SEQ ID NO: 84057 - DNA, 25 bp, Artificial
  Probe
ctgaaatctcgtgtctctaccaaag

SEQ ID NO: 84058 - DNA, 25 bp, Artificial
  Probe
acaaagtcccttcctctctataaat

SEQ ID NO: 84059 - DNA, 25 bp, Artificial
  Probe
ctacaaagtcccttcctctctataa

SEQ ID NO: 84060 - DNA, 25 bp, Artificial
  Probe
caaagtcccttcctctctataaatg

SEQ ID NO: 84061 - DNA, 25 bp, Artificial
  Probe
actgaaatctcgtgtctctaccaaa

SEQ ID NO: 84062 - DNA, 25 bp, Artificial
  Probe
ccttcctctctataaatggctaagc

SEQ ID NO: 84063 - DNA, 25 bp, Artificial
  Probe
catctttaatgtgtaatttcccagc

SEQ ID NO: 84064 - DNA, 25 bp, Artificial
  Probe
gtctatccttaggtcctacaaagtc

SEQ ID NO: 84065 - DNA, 25 bp, Artificial
  Probe
acaatcctgaactgatccaaattct

SEQ ID NO: 84066 - DNA, 25 bp, Artificial
  Probe
cacaatcctgaactgatccaaattc

SEQ ID NO: 84067 - DNA, 25 bp, Artificial
  Probe
aagtcccttcctctctataaatggc

SEQ ID NO: 84068 - DNA, 25 bp, Artificial
  Probe
tcctacaaagtcccttcctctctat

SEQ ID NO: 84069 - DNA, 25 bp, Artificial
  Probe
tctatccttaggtcctacaaagtcc

SEQ ID NO: 84070 - DNA, 25 bp, Artificial
  Probe
tcctgaactgatccaaattctatga

SEQ ID NO: 84071 - DNA, 25 bp, Artificial
  Probe
tgaccgttcatctttaatgtgtaat

SEQ ID NO: 84072 - DNA, 25 bp, Artificial
  Probe
tacaaagtcccttcctctctataaa

SEQ ID NO: 84073 - DNA, 25 bp, Artificial
  Probe
tcgtgtctctaccaaagccttattt

SEQ ID NO: 84074 - DNA, 25 bp, Artificial
  Probe
cctgaactgatccaaattctatgag

SEQ ID NO: 84075 - DNA, 25 bp, Artificial
  Probe
caatcctgaactgatccaaattcta

SEQ ID NO: 84076 - DNA, 25 bp, Artificial
  Probe
agtcccttcctctctataaatggct

SEQ ID NO: 84077 - DNA, 25 bp, Artificial
  Probe
ctatccttaggtcctacaaagtccc

SEQ ID NO: 84078 - DNA, 25 bp, Artificial
  Probe
ccacaatcctgaactgatccaaatt

SEQ ID NO: 84079 - DNA, 25 bp, Artificial
  Probe
atcctgaactgatccaaattctatg

SEQ ID NO: 84080 - DNA, 25 bp, Artificial
  Probe
tgtctatccttaggtcctacaaagt

SEQ ID NO: 84081 - DNA, 25 bp, Artificial
  Probe
ctgtctatccttaggtcctacaaag

SEQ ID NO: 84082 - DNA, 25 bp, Artificial
  Probe
ctcgtgtctctaccaaagccttatt

SEQ ID NO: 84083 - DNA, 25 bp, Artificial
  Probe
gaccgttcatctttaatgtgtaatt

SEQ ID NO: 84084 - DNA, 25 bp, Artificial
  Probe
ttcctctctataaatggctaagctc

SEQ ID NO: 84085 - DNA, 25 bp, Artificial
  Probe
ctgaactgatccaaattctatgaga

SEQ ID NO: 84086 - DNA, 25 bp, Artificial
  Probe
cttcctctctataaatggctaagct

SEQ ID NO: 84087 - DNA, 25 bp, Artificial
  Probe
gtcctacaaagtcccttcctctcta

SEQ ID NO: 84088 - DNA, 25 bp, Artificial
  Probe
cctgtctatccttaggtcctacaaa

SEQ ID NO: 84089 - DNA, 25 bp, Artificial
  Probe
tcctctctataaatggctaagctcc

SEQ ID NO: 84090 - DNA, 25 bp, Artificial
  Probe
accgttcatctttaatgtgtaattt

SEQ ID NO: 84091 - DNA, 25 bp, Artificial
  Probe
aatcctgaactgatccaaattctat

SEQ ID NO: 84092 - DNA, 25 bp, Artificial
  Probe
tgaaatctcgtgtctctaccaaagc

SEQ ID NO: 84093 - DNA, 25 bp, Artificial
  Probe
cagcgaaatgtttaactcaggtgtg

SEQ ID NO: 84094 - DNA, 25 bp, Artificial
  Probe
taagaggaaatcacacaataactgc

SEQ ID NO: 84095 - DNA, 25 bp, Artificial
  Probe
gggagaatgaagtggtgatatttac

SEQ ID NO: 84096 - DNA, 25 bp, Artificial
  Probe
atgtgaaagaattgccttgaagaat

SEQ ID NO: 84097 - DNA, 25 bp, Artificial
  Probe
ggagaatgaagtggtgatatttaca

SEQ ID NO: 84098 - DNA, 25 bp, Artificial
  Probe
tgtgaaagaattgccttgaagaatt

SEQ ID NO: 84099 - DNA, 25 bp, Artificial
  Probe
catgtgaaagaattgccttgaagaa

SEQ ID NO: 84100 - DNA, 25 bp, Artificial
  Probe
gtgaaagaattgccttgaagaattt

SEQ ID NO: 84101 - DNA, 25 bp, Artificial
  Probe
gccactctaaataagactccatgtt

SEQ ID NO: 84102 - DNA, 25 bp, Artificial
  Probe
gtaaaccattaagctacacacaagg

SEQ ID NO: 84103 - DNA, 25 bp, Artificial
  Probe
ccactctaaataagactccatgttt

SEQ ID NO: 84104 - DNA, 25 bp, Artificial
  Probe
tacgaaagtaatctgacatgagtcc

SEQ ID NO: 84105 - DNA, 25 bp, Artificial
  Probe
taaaccattaagctacacacaaggg

SEQ ID NO: 84106 - DNA, 25 bp, Artificial
  Probe
gaaagtaatctgacatgagtcccag

SEQ ID NO: 84107 - DNA, 25 bp, Artificial
  Probe
ttaagaggaaatcacacaataactg

SEQ ID NO: 84108 - DNA, 25 bp, Artificial
  Probe
ccatgtgaaagaattgccttgaaga

SEQ ID NO: 84109 - DNA, 25 bp, Artificial
  Probe
aagaggaaatcacacaataactgca

SEQ ID NO: 84110 - DNA, 25 bp, Artificial
  Probe
gagaatgaagtggtgatatttacaa

SEQ ID NO: 84111 - DNA, 25 bp, Artificial
  Probe
attgtccctcccatgtgaaagaatt

SEQ ID NO: 84112 - DNA, 25 bp, Artificial
  Probe
cttaactctgcaaccatttgtcttt

SEQ ID NO: 84113 - DNA, 25 bp, Artificial
  Probe
gattgtccctcccatgtgaaagaat

SEQ ID NO: 84114 - DNA, 25 bp, Artificial
  Probe
agaatgaagtggtgatatttacaaa

SEQ ID NO: 84115 - DNA, 25 bp, Artificial
  Probe
ggggagaatgaagtggtgatattta

SEQ ID NO: 84116 - DNA, 25 bp, Artificial
  Probe
taaggggagaatgaagtggtgatat

SEQ ID NO: 84117 - DNA, 25 bp, Artificial
  Probe
tttaagaggaaatcacacaataact

SEQ ID NO: 84118 - DNA, 25 bp, Artificial
  Probe
cccatgtgaaagaattgccttgaag

SEQ ID NO: 84119 - DNA, 25 bp, Artificial
  Probe
cgaaagtaatctgacatgagtccca

SEQ ID NO: 84120 - DNA, 25 bp, Artificial
  Probe
acgaaagtaatctgacatgagtccc

SEQ ID NO: 84121 - DNA, 25 bp, Artificial
  Probe
ttgtccctcccatgtgaaagaattg

SEQ ID NO: 84122 - DNA, 25 bp, Artificial
  Probe
aggggagaatgaagtggtgatattt

SEQ ID NO: 84123 - DNA, 25 bp, Artificial
  Probe
aaggggagaatgaagtggtgatatt

SEQ ID NO: 84124 - DNA, 25 bp, Artificial
  Probe
gtaaggggagaatgaagtggtgata

SEQ ID NO: 84125 - DNA, 25 bp, Artificial
  Probe
ctatgtaaggggagaatgaagtggt

SEQ ID NO: 84126 - DNA, 25 bp, Artificial
  Probe
tgtaaaccattaagctacacacaag

SEQ ID NO: 84127 - DNA, 25 bp, Artificial
  Probe
tcccatgtgaaagaattgccttgaa

SEQ ID NO: 84128 - DNA, 25 bp, Artificial
  Probe
tttgtaaaccattaagctacacaca

SEQ ID NO: 84129 - DNA, 25 bp, Artificial
  Probe
gcttaactctgcaaccatttgtctt

SEQ ID NO: 84130 - DNA, 25 bp, Artificial
  Probe
tatgtaaggggagaatgaagtggtg

SEQ ID NO: 84131 - DNA, 25 bp, Artificial
  Probe
aaccatttgtcttttgtaaaccatt

SEQ ID NO: 84132 - DNA, 25 bp, Artificial
  Probe
caaccatttgtcttttgtaaaccat

SEQ ID NO: 84133 - DNA, 25 bp, Artificial
  Probe
gcaaccatttgtcttttgtaaacca

SEQ ID NO: 84134 - DNA, 25 bp, Artificial
  Probe
caaatactgagattggaaaggggac

SEQ ID NO: 84135 - DNA, 25 bp, Artificial
  Probe
tacacacaagggccactctaaataa

SEQ ID NO: 84136 - DNA, 25 bp, Artificial
  Probe
ctcccatgtgaaagaattgccttga

SEQ ID NO: 84137 - DNA, 25 bp, Artificial
  Probe
aaatactgagattggaaaggggacc

SEQ ID NO: 84138 - DNA, 25 bp, Artificial
  Probe
accatttgtcttttgtaaaccatta

SEQ ID NO: 84139 - DNA, 25 bp, Artificial
  Probe
aactactgcttggtgctaaggaata

SEQ ID NO: 84140 - DNA, 25 bp, Artificial
  Probe
atgaacaagttcctgacatactacc

SEQ ID NO: 84141 - DNA, 25 bp, Artificial
  Probe
tactgcttggtgctaaggaatactc

SEQ ID NO: 84142 - DNA, 25 bp, Artificial
  Probe
ctactgcttggtgctaaggaatact

SEQ ID NO: 84143 - DNA, 25 bp, Artificial
  Probe
catgaacaagttcctgacatactac

SEQ ID NO: 84144 - DNA, 25 bp, Artificial
  Probe
actactgcttggtgctaaggaatac

SEQ ID NO: 84145 - DNA, 25 bp, Artificial
  Probe
gaactactgcttggtgctaaggaat

SEQ ID NO: 84146 - DNA, 25 bp, Artificial
  Probe
gctttgttatcagatcaagggtttg

SEQ ID NO: 84147 - DNA, 25 bp, Artificial
  Probe
aacaagttcctgacatactaccctg

SEQ ID NO: 84148 - DNA, 25 bp, Artificial
  Probe
agaactactgcttggtgctaaggaa

SEQ ID NO: 84149 - DNA, 25 bp, Artificial
  Probe
ggctttgttatcagatcaagggttt

SEQ ID NO: 84150 - DNA, 25 bp, Artificial
  Probe
caaacacgaatatttccgagagact

SEQ ID NO: 84151 - DNA, 25 bp, Artificial
  Probe
tcaaacacgaatatttccgagagac

SEQ ID NO: 84152 - DNA, 25 bp, Artificial
  Probe
cttggtgctaaggaatactccacag

SEQ ID NO: 84153 - DNA, 25 bp, Artificial
  Probe
aaacacgaatatttccgagagactc

SEQ ID NO: 84154 - DNA, 25 bp, Artificial
  Probe
ctcaaacacgaatatttccgagaga

SEQ ID NO: 84155 - DNA, 25 bp, Artificial
  Probe
atatttggagaactgctgacacaga

SEQ ID NO: 84156 - DNA, 25 bp, Artificial
  Probe
catatttggagaactgctgacacag

SEQ ID NO: 84157 - DNA, 25 bp, Artificial
  Probe
gaacaagttcctgacatactaccct

SEQ ID NO: 84158 - DNA, 25 bp, Artificial
  Probe
tatttggagaactgctgacacagaa

SEQ ID NO: 84159 - DNA, 25 bp, Artificial
  Probe
tgaacaagttcctgacatactaccc

SEQ ID NO: 84160 - DNA, 25 bp, Artificial
  Probe
atctcatgaacaagttcctgacata

SEQ ID NO: 84161 - DNA, 25 bp, Artificial
  Probe
ctcatgaacaagttcctgacatact

SEQ ID NO: 84162 - DNA, 25 bp, Artificial
  Probe
tctcatgaacaagttcctgacatac

SEQ ID NO: 84163 - DNA, 25 bp, Artificial
  Probe
tcatgaacaagttcctgacatacta

SEQ ID NO: 84164 - DNA, 25 bp, Artificial
  Probe
cctcaaacacgaatatttccgagag

SEQ ID NO: 84165 - DNA, 25 bp, Artificial
  Probe
gatctcatgaacaagttcctgacat

SEQ ID NO: 84166 - DNA, 25 bp, Artificial
  Probe
ttgatctcatgaacaagttcctgac

SEQ ID NO: 84167 - DNA, 25 bp, Artificial
  Probe
ctataacaacctccgcaaaagattt

SEQ ID NO: 84168 - DNA, 25 bp, Artificial
  Probe
taaacaagattttcaaggacatcgg

SEQ ID NO: 84169 - DNA, 25 bp, Artificial
  Probe
aacaagattttcaaggacatcggta

SEQ ID NO: 84170 - DNA, 25 bp, Artificial
  Probe
atttggagaactgctgacacagaaa

SEQ ID NO: 84171 - DNA, 25 bp, Artificial
  Probe
aagatttggggctttgttatcagat

SEQ ID NO: 84172 - DNA, 25 bp, Artificial
  Probe
cctataacaacctccgcaaaagatt

SEQ ID NO: 84173 - DNA, 25 bp, Artificial
  Probe
aacacgaatatttccgagagactcc

SEQ ID NO: 84174 - DNA, 25 bp, Artificial
  Probe
gggctttgttatcagatcaagggtt

SEQ ID NO: 84175 - DNA, 25 bp, Artificial
  Probe
tgatctcatgaacaagttcctgaca

SEQ ID NO: 84176 - DNA, 25 bp, Artificial
  Probe
ctttgttatcagatcaagggtttga

SEQ ID NO: 84177 - DNA, 25 bp, Artificial
  Probe
aaacaagattttcaaggacatcggt

SEQ ID NO: 84178 - DNA, 25 bp, Artificial
  Probe
catggtgtagcctcttgttctgaga

SEQ ID NO: 84179 - DNA, 25 bp, Artificial
  Probe
acaagttcctgacatactaccctgg

SEQ ID NO: 84180 - DNA, 25 bp, Artificial
  Probe
cagaactactgcttggtgctaagga

SEQ ID NO: 84181 - DNA, 25 bp, Artificial
  Probe
aagatggcctcaaacacgaatattt

SEQ ID NO: 84182 - DNA, 25 bp, Artificial
  Probe
aagattttcaaggacatcggtactc

SEQ ID NO: 84183 - DNA, 25 bp, Artificial
  Probe
ataaacaagattttcaaggacatcg

SEQ ID NO: 84184 - DNA, 25 bp, Artificial
  Probe
gcaatgttaggactggattatggaa

SEQ ID NO: 84185 - DNA, 25 bp, Artificial
  Probe
ctggcaatgttaggactggattatg

SEQ ID NO: 84186 - DNA, 25 bp, Artificial
  Probe
actggcaatgttaggactggattat

SEQ ID NO: 84187 - DNA, 25 bp, Artificial
  Probe
ggcaatgttaggactggattatgga

SEQ ID NO: 84188 - DNA, 25 bp, Artificial
  Probe
cactggcaatgttaggactggatta

SEQ ID NO: 84189 - DNA, 25 bp, Artificial
  Probe
tggcaatgttaggactggattatgg

SEQ ID NO: 84190 - DNA, 25 bp, Artificial
  Probe
atactcacattccttgaagctatga

SEQ ID NO: 84191 - DNA, 25 bp, Artificial
  Probe
tgatactcacattccttgaagctat

SEQ ID NO: 84192 - DNA, 25 bp, Artificial
  Probe
ggattatggaaacacgaaactactg

SEQ ID NO: 84193 - DNA, 25 bp, Artificial
  Probe
tggattatggaaacacgaaactact

SEQ ID NO: 84194 - DNA, 25 bp, Artificial
  Probe
ctggattatggaaacacgaaactac

SEQ ID NO: 84195 - DNA, 25 bp, Artificial
  Probe
actggattatggaaacacgaaacta

SEQ ID NO: 84196 - DNA, 25 bp, Artificial
  Probe
gatactcacattccttgaagctatg

SEQ ID NO: 84197 - DNA, 25 bp, Artificial
  Probe
caatgttaggactggattatggaaa

SEQ ID NO: 84198 - DNA, 25 bp, Artificial
  Probe
gactggattatggaaacacgaaact

SEQ ID NO: 84199 - DNA, 25 bp, Artificial
  Probe
tatttacagccagcatagggattca

SEQ ID NO: 84200 - DNA, 25 bp, Artificial
  Probe
taggactggattatggaaacacgaa

SEQ ID NO: 84201 - DNA, 25 bp, Artificial
  Probe
ttaggactggattatggaaacacga

SEQ ID NO: 84202 - DNA, 25 bp, Artificial
  Probe
aatgttaggactggattatggaaac

SEQ ID NO: 84203 - DNA, 25 bp, Artificial
  Probe
gttaggactggattatggaaacacg

SEQ ID NO: 84204 - DNA, 25 bp, Artificial
  Probe
gatagcactggcaatgttaggactg

SEQ ID NO: 84205 - DNA, 25 bp, Artificial
  Probe
gattatggaaacacgaaactactgt

SEQ ID NO: 84206 - DNA, 25 bp, Artificial
  Probe
ggactggattatggaaacacgaaac

SEQ ID NO: 84207 - DNA, 25 bp, Artificial
  Probe
ctatttacagccagcatagggattc

SEQ ID NO: 84208 - DNA, 25 bp, Artificial
  Probe
atttacagccagcatagggattcaa

SEQ ID NO: 84209 - DNA, 25 bp, Artificial
  Probe
aggactggattatggaaacacgaaa

SEQ ID NO: 84210 - DNA, 25 bp, Artificial
  Probe
attatggaaacacgaaactactgtg

SEQ ID NO: 84211 - DNA, 25 bp, Artificial
  Probe
actatttacagccagcatagggatt

SEQ ID NO: 84212 - DNA, 25 bp, Artificial
  Probe
aactatttacagccagcatagggat

SEQ ID NO: 84213 - DNA, 25 bp, Artificial
  Probe
tttacagccagcatagggattcaaa

SEQ ID NO: 84214 - DNA, 25 bp, Artificial
  Probe
aaactatttacagccagcataggga

SEQ ID NO: 84215 - DNA, 25 bp, Artificial
  Probe
acgaaactactgtgtaacattgctg

SEQ ID NO: 84216 - DNA, 25 bp, Artificial
  Probe
gtaccgatagcactggcaatgttag

SEQ ID NO: 84217 - DNA, 25 bp, Artificial
  Probe
gaaactactgtgtaacattgctggg

SEQ ID NO: 84218 - DNA, 25 bp, Artificial
  Probe
cacgaaactactgtgtaacattgct

SEQ ID NO: 84219 - DNA, 25 bp, Artificial
  Probe
cacattccttgaagctatgagcatt

SEQ ID NO: 84220 - DNA, 25 bp, Artificial
  Probe
cgaaactactgtgtaacattgctgg

SEQ ID NO: 84221 - DNA, 25 bp, Artificial
  Probe
tcacattccttgaagctatgagcat

SEQ ID NO: 84222 - DNA, 25 bp, Artificial
  Probe
taccgatagcactggcaatgttagg

SEQ ID NO: 84223 - DNA, 25 bp, Artificial
  Probe
cagcatagggattcaaaaggattta

SEQ ID NO: 84224 - DNA, 25 bp, Artificial
  Probe
gcatagggattcaaaaggatttaga

SEQ ID NO: 84225 - DNA, 25 bp, Artificial
  Probe
agcatagggattcaaaaggatttag

SEQ ID NO: 84226 - DNA, 25 bp, Artificial
  Probe
ggcttcctaggcagaattcatataa

SEQ ID NO: 84227 - DNA, 25 bp, Artificial
  Probe
atagcactggcaatgttaggactgg

SEQ ID NO: 84228 - DNA, 25 bp, Artificial
  Probe
ttcagaatggaccaattaaaagcaa

SEQ ID NO: 84229 - DNA, 25 bp, Artificial
  Probe
ttatcttcctggagttcctaacctc

SEQ ID NO: 84230 - DNA, 25 bp, Artificial
  Probe
gatggtagcaatgtttatcttcctg

SEQ ID NO: 84231 - DNA, 25 bp, Artificial
  Probe
atggtagcaatgtttatcttcctgg

SEQ ID NO: 84232 - DNA, 25 bp, Artificial
  Probe
tagcaatgtttatcttcctggagtt

SEQ ID NO: 84233 - DNA, 25 bp, Artificial
  Probe
caatgtttatcttcctggagttcct

SEQ ID NO: 84234 - DNA, 25 bp, Artificial
  Probe
gtagcaatgtttatcttcctggagt

SEQ ID NO: 84235 - DNA, 25 bp, Artificial
  Probe
atgtttatcttcctggagttcctaa

SEQ ID NO: 84236 - DNA, 25 bp, Artificial
  Probe
aatgtttatcttcctggagttccta

SEQ ID NO: 84237 - DNA, 25 bp, Artificial
  Probe
tgtttatcttcctggagttcctaac

SEQ ID NO: 84238 - DNA, 25 bp, Artificial
  Probe
agcaatgtttatcttcctggagttc

SEQ ID NO: 84239 - DNA, 25 bp, Artificial
  Probe
tttatcttcctggagttcctaacct

SEQ ID NO: 84240 - DNA, 25 bp, Artificial
  Probe
gtttatcttcctggagttcctaacc

SEQ ID NO: 84241 - DNA, 25 bp, Artificial
  Probe
ggtagcaatgtttatcttcctggag

SEQ ID NO: 84242 - DNA, 25 bp, Artificial
  Probe
tggtagcaatgtttatcttcctgga

SEQ ID NO: 84243 - DNA, 25 bp, Artificial
  Probe
gcaatgtttatcttcctggagttcc

SEQ ID NO: 84244 - DNA, 25 bp, Artificial
  Probe
agatggtagcaatgtttatcttcct

SEQ ID NO: 84245 - DNA, 25 bp, Artificial
  Probe
gagatggtagcaatgtttatcttcc

SEQ ID NO: 84246 - DNA, 25 bp, Artificial
  Probe
ggagatggtagcaatgtttatcttc

SEQ ID NO: 84247 - DNA, 25 bp, Artificial
  Probe
cggagatggtagcaatgtttatctt

SEQ ID NO: 84248 - DNA, 25 bp, Artificial
  Probe
ccggagatggtagcaatgtttatct

SEQ ID NO: 84249 - DNA, 25 bp, Artificial
  Probe
tatcttcctggagttcctaacctcc

SEQ ID NO: 84250 - DNA, 25 bp, Artificial
  Probe
gtcaaccaacttaccccaacttcac

SEQ ID NO: 84251 - DNA, 25 bp, Artificial
  Probe
actataactcgaaatcctcccggag

SEQ ID NO: 84252 - DNA, 25 bp, Artificial
  Probe
gactataactcgaaatcctcccgga

SEQ ID NO: 84253 - DNA, 25 bp, Artificial
  Probe
caagatctgggtcaaccaacttacc

SEQ ID NO: 84254 - DNA, 25 bp, Artificial
  Probe
ccaagatctgggtcaaccaacttac

SEQ ID NO: 84255 - DNA, 25 bp, Artificial
  Probe
tcaaccaacttaccccaacttcacc

SEQ ID NO: 84256 - DNA, 25 bp, Artificial
  Probe
gtcagaagctttgcctagaggactt

SEQ ID NO: 84257 - DNA, 25 bp, Artificial
  Probe
agagtcagaagctttgcctagagga

SEQ ID NO: 84258 - DNA, 25 bp, Artificial
  Probe
ggtcaaccaacttaccccaacttca

SEQ ID NO: 84259 - DNA, 25 bp, Artificial
  Probe
gagtcagaagctttgcctagaggac

SEQ ID NO: 84260 - DNA, 25 bp, Artificial
  Probe
tcagaagctttgcctagaggacttc

SEQ ID NO: 84261 - DNA, 25 bp, Artificial
  Probe
gaagctttgcctagaggacttctag

SEQ ID NO: 84262 - DNA, 25 bp, Artificial
  Probe
aagctttgcctagaggacttctaga

SEQ ID NO: 84263 - DNA, 25 bp, Artificial
  Probe
atcttcctggagttcctaacctccc

SEQ ID NO: 84264 - DNA, 25 bp, Artificial
  Probe
ctataactcgaaatcctcccggagg

SEQ ID NO: 84265 - DNA, 25 bp, Artificial
  Probe
cttcctggagttcctaacctccctt

SEQ ID NO: 84266 - DNA, 25 bp, Artificial
  Probe
agtcagaagctttgcctagaggact

SEQ ID NO: 84267 - DNA, 25 bp, Artificial
  Probe
tataactcgaaatcctcccggaggg

SEQ ID NO: 84268 - DNA, 25 bp, Artificial
  Probe
agtgaacaggaagtgataagcatta

SEQ ID NO: 84269 - DNA, 25 bp, Artificial
  Probe
tctacgagttattctgttctggttc

SEQ ID NO: 84270 - DNA, 25 bp, Artificial
  Probe
tgaacaggaagtgataagcattaga

SEQ ID NO: 84271 - DNA, 25 bp, Artificial
  Probe
gtgaacaggaagtgataagcattag

SEQ ID NO: 84272 - DNA, 25 bp, Artificial
  Probe
ctacgagttattctgttctggttca

SEQ ID NO: 84273 - DNA, 25 bp, Artificial
  Probe
gtctacgagttattctgttctggtt

SEQ ID NO: 84274 - DNA, 25 bp, Artificial
  Probe
aaggtgtctacgagttattctgttc

SEQ ID NO: 84275 - DNA, 25 bp, Artificial
  Probe
tacgagttattctgttctggttcac

SEQ ID NO: 84276 - DNA, 25 bp, Artificial
  Probe
gaataagtgacagcaagagagagag

SEQ ID NO: 84277 - DNA, 25 bp, Artificial
  Probe
aataagtgacagcaagagagagaga

SEQ ID NO: 84278 - DNA, 25 bp, Artificial
  Probe
aatgtccgttattcttagttcagtg

SEQ ID NO: 84279 - DNA, 25 bp, Artificial
  Probe
gcctctgaagtattcttgaacattg

SEQ ID NO: 84280 - DNA, 25 bp, Artificial
  Probe
gtgtctacgagttattctgttctgg

SEQ ID NO: 84281 - DNA, 25 bp, Artificial
  Probe
ggtgtctacgagttattctgttctg

SEQ ID NO: 84282 - DNA, 25 bp, Artificial
  Probe
aggtgtctacgagttattctgttct

SEQ ID NO: 84283 - DNA, 25 bp, Artificial
  Probe
gaacaggaagtgataagcattagaa

SEQ ID NO: 84284 - DNA, 25 bp, Artificial
  Probe
atgtccgttattcttagttcagtgc

SEQ ID NO: 84285 - DNA, 25 bp, Artificial
  Probe
tccagcataatgtccgttattctta

SEQ ID NO: 84286 - DNA, 25 bp, Artificial
  Probe
ccagcataatgtccgttattcttag

SEQ ID NO: 84287 - DNA, 25 bp, Artificial
  Probe
tgtctacgagttattctgttctggt

SEQ ID NO: 84288 - DNA, 25 bp, Artificial
  Probe
caagagagagagagagagagagaga

SEQ ID NO: 84289 - DNA, 25 bp, Artificial
  Probe
ataagtgacagcaagagagagagag

SEQ ID NO: 84290 - DNA, 25 bp, Artificial
  Probe
cagtgaacaggaagtgataagcatt

SEQ ID NO: 84291 - DNA, 25 bp, Artificial
  Probe
gagagagagagattgagactgtgag

SEQ ID NO: 84292 - DNA, 25 bp, Artificial
  Probe
ccaacagtgaacaggaagtgataag

SEQ ID NO: 84293 - DNA, 25 bp, Artificial
  Probe
cagcataatgtccgttattcttagt

SEQ ID NO: 84294 - DNA, 25 bp, Artificial
  Probe
cctctgaagtattcttgaacattgt

SEQ ID NO: 84295 - DNA, 25 bp, Artificial
  Probe
gtccagcataatgtccgttattctt

SEQ ID NO: 84296 - DNA, 25 bp, Artificial
  Probe
ggaataagtgacagcaagagagaga

SEQ ID NO: 84297 - DNA, 25 bp, Artificial
  Probe
aggaataagtgacagcaagagagag

SEQ ID NO: 84298 - DNA, 25 bp, Artificial
  Probe
gaggaataagtgacagcaagagaga

SEQ ID NO: 84299 - DNA, 25 bp, Artificial
  Probe
agaggaataagtgacagcaagagag

SEQ ID NO: 84300 - DNA, 25 bp, Artificial
  Probe
gagaggaataagtgacagcaagaga

SEQ ID NO: 84301 - DNA, 25 bp, Artificial
  Probe
agagaggaataagtgacagcaagag

SEQ ID NO: 84302 - DNA, 25 bp, Artificial
  Probe
gagagaggaataagtgacagcaaga

SEQ ID NO: 84303 - DNA, 25 bp, Artificial
  Probe
aacaggaagtgataagcattagaat

SEQ ID NO: 84304 - DNA, 25 bp, Artificial
  Probe
attctgttctggttcacaagttcta

SEQ ID NO: 84305 - DNA, 25 bp, Artificial
  Probe
tattctgttctggttcacaagttct

SEQ ID NO: 84306 - DNA, 25 bp, Artificial
  Probe
gagttattctgttctggttcacaag

SEQ ID NO: 84307 - DNA, 25 bp, Artificial
  Probe
gttattctgttctggttcacaagtt

SEQ ID NO: 84308 - DNA, 25 bp, Artificial
  Probe
agttattctgttctggttcacaagt

SEQ ID NO: 84309 - DNA, 25 bp, Artificial
  Probe
acaggaagtgataagcattagaatg

SEQ ID NO: 84310 - DNA, 25 bp, Artificial
  Probe
ttattctgttctggttcacaagttc

SEQ ID NO: 84311 - DNA, 25 bp, Artificial
  Probe
agcataatgtccgttattcttagtt

SEQ ID NO: 84312 - DNA, 25 bp, Artificial
  Probe
gagtccagcataatgtccgttattc

SEQ ID NO: 84313 - DNA, 25 bp, Artificial
  Probe
tacctcagaggagatcctgctgatt

SEQ ID NO: 84314 - DNA, 25 bp, Artificial
  Probe
gtcatatacagatggtgtctagcaa

SEQ ID NO: 84315 - DNA, 25 bp, Artificial
  Probe
ttgtcatatacagatggtgtctagc

SEQ ID NO: 84316 - DNA, 25 bp, Artificial
  Probe
agttgtcatatacagatggtgtcta

SEQ ID NO: 84317 - DNA, 25 bp, Artificial
  Probe
tagttgtcatatacagatggtgtct

SEQ ID NO: 84318 - DNA, 25 bp, Artificial
  Probe
tgtcatatacagatggtgtctagca

SEQ ID NO: 84319 - DNA, 25 bp, Artificial
  Probe
atatacagatggtgtctagcaatca

SEQ ID NO: 84320 - DNA, 25 bp, Artificial
  Probe
tcatatacagatggtgtctagcaat

SEQ ID NO: 84321 - DNA, 25 bp, Artificial
  Probe
tatacagatggtgtctagcaatcac

SEQ ID NO: 84322 - DNA, 25 bp, Artificial
  Probe
catatacagatggtgtctagcaatc

SEQ ID NO: 84323 - DNA, 25 bp, Artificial
  Probe
gttgtcatatacagatggtgtctag

SEQ ID NO: 84324 - DNA, 25 bp, Artificial
  Probe
ttagttgtcatatacagatggtgtc

SEQ ID NO: 84325 - DNA, 25 bp, Artificial
  Probe
atacagatggtgtctagcaatcacg

SEQ ID NO: 84326 - DNA, 25 bp, Artificial
  Probe
tttagttgtcatatacagatggtgt

SEQ ID NO: 84327 - DNA, 25 bp, Artificial
  Probe
cttccgaatttggcttcctttcttg

SEQ ID NO: 84328 - DNA, 25 bp, Artificial
  Probe
cagtacagtcatgcactcaaattaa

SEQ ID NO: 84329 - DNA, 25 bp, Artificial
  Probe
acagtacagtcatgcactcaaatta

SEQ ID NO: 84330 - DNA, 25 bp, Artificial
  Probe
tacagtacagtcatgcactcaaatt

SEQ ID NO: 84331 - DNA, 25 bp, Artificial
  Probe
agtacagtcatgcactcaaattaag

SEQ ID NO: 84332 - DNA, 25 bp, Artificial
  Probe
cttcctttcttggctctgaaatgaa

SEQ ID NO: 84333 - DNA, 25 bp, Artificial
  Probe
tacagatggtgtctagcaatcacgg

SEQ ID NO: 84334 - DNA, 25 bp, Artificial
  Probe
agggtcaatcttgatgtcattcgag

SEQ ID NO: 84335 - DNA, 25 bp, Artificial
  Probe
gaatttggcttcctttcttggctct

SEQ ID NO: 84336 - DNA, 25 bp, Artificial
  Probe
ccttccgaatttggcttcctttctt

SEQ ID NO: 84337 - DNA, 25 bp, Artificial
  Probe
ggtcaatcttgatgtcattcgaggc

SEQ ID NO: 84338 - DNA, 25 bp, Artificial
  Probe
aatttggcttcctttcttggctctg

SEQ ID NO: 84339 - DNA, 25 bp, Artificial
  Probe
cagggtcaatcttgatgtcattcga

SEQ ID NO: 84340 - DNA, 25 bp, Artificial
  Probe
ttccgaatttggcttcctttcttgg

SEQ ID NO: 84341 - DNA, 25 bp, Artificial
  Probe
aaacctgctacaatcagtgctgaaa

SEQ ID NO: 84342 - DNA, 25 bp, Artificial
  Probe
tgctacaatcagtgctgaaaatagt

SEQ ID NO: 84343 - DNA, 25 bp, Artificial
  Probe
gctacaatcagtgctgaaaatagta

SEQ ID NO: 84344 - DNA, 25 bp, Artificial
  Probe
ctgctacaatcagtgctgaaaatag

SEQ ID NO: 84345 - DNA, 25 bp, Artificial
  Probe
ttaaaacctgctacaatcagtgctg

SEQ ID NO: 84346 - DNA, 25 bp, Artificial
  Probe
ccccttttctgcattttactattgt

SEQ ID NO: 84347 - DNA, 25 bp, Artificial
  Probe
cctgctacaatcagtgctgaaaata

SEQ ID NO: 84348 - DNA, 25 bp, Artificial
  Probe
gggtcaatcttgatgtcattcgagg

SEQ ID NO: 84349 - DNA, 25 bp, Artificial
  Probe
atttaaaacctgctacaatcagtgc

SEQ ID NO: 84350 - DNA, 25 bp, Artificial
  Probe
tgcagggtcaatcttgatgtcattc

SEQ ID NO: 84351 - DNA, 25 bp, Artificial
  Probe
gcttcctttcttggctctgaaatga

SEQ ID NO: 84352 - DNA, 25 bp, Artificial
  Probe
atttggcttcctttcttggctctga

SEQ ID NO: 84353 - DNA, 25 bp, Artificial
  Probe
tttaaaacctgctacaatcagtgct

SEQ ID NO: 84354 - DNA, 25 bp, Artificial
  Probe
gcagggtcaatcttgatgtcattcg

SEQ ID NO: 84355 - DNA, 25 bp, Artificial
  Probe
gtcaatcttgatgtcattcgaggcc

SEQ ID NO: 84356 - DNA, 25 bp, Artificial
  Probe
taaaacctgctacaatcagtgctga

SEQ ID NO: 84357 - DNA, 25 bp, Artificial
  Probe
tttggcttcctttcttggctctgaa

SEQ ID NO: 84358 - DNA, 25 bp, Artificial
  Probe
cccttttctgcattttactattgta

SEQ ID NO: 84359 - DNA, 25 bp, Artificial
  Probe
aacatcacacaagaccagaagactt

SEQ ID NO: 84360 - DNA, 25 bp, Artificial
  Probe
caacatcacacaagaccagaagact

SEQ ID NO: 84361 - DNA, 25 bp, Artificial
  Probe
acatcacacaagaccagaagacttc

SEQ ID NO: 84362 - DNA, 25 bp, Artificial
  Probe
catcacacaagaccagaagacttcc

SEQ ID NO: 84363 - DNA, 25 bp, Artificial
  Probe
tcgaagtagcccagtttatatcaaa

SEQ ID NO: 84364 - DNA, 25 bp, Artificial
  Probe
atcgaagtagcccagtttatatcaa

SEQ ID NO: 84365 - DNA, 25 bp, Artificial
  Probe
aatcgaagtagcccagtttatatca

SEQ ID NO: 84366 - DNA, 25 bp, Artificial
  Probe
cacaggacccagaggatattgaatg

SEQ ID NO: 84367 - DNA, 25 bp, Artificial
  Probe
aaatcgaagtagcccagtttatatc

SEQ ID NO: 84368 - DNA, 25 bp, Artificial
  Probe
gagcaacatcacacaagaccagaag

SEQ ID NO: 84369 - DNA, 25 bp, Artificial
  Probe
gcaacatcacacaagaccagaagac

SEQ ID NO: 84370 - DNA, 25 bp, Artificial
  Probe
agcaacatcacacaagaccagaaga

SEQ ID NO: 84371 - DNA, 25 bp, Artificial
  Probe
gatattgaatggcctctgtaaccaa

SEQ ID NO: 84372 - DNA, 25 bp, Artificial
  Probe
atcaaaactgctcaattactccaag

SEQ ID NO: 84373 - DNA, 25 bp, Artificial
  Probe
cgaagtagcccagtttatatcaaaa

SEQ ID NO: 84374 - DNA, 25 bp, Artificial
  Probe
ccacaggacccagaggatattgaat

SEQ ID NO: 84375 - DNA, 25 bp, Artificial
  Probe
ctcaattactccaagcaacttttcc

SEQ ID NO: 84376 - DNA, 25 bp, Artificial
  Probe
tatcaaaactgctcaattactccaa

SEQ ID NO: 84377 - DNA, 25 bp, Artificial
  Probe
aggatattgaatggcctctgtaacc

SEQ ID NO: 84378 - DNA, 25 bp, Artificial
  Probe
atatcaaaactgctcaattactcca

SEQ ID NO: 84379 - DNA, 25 bp, Artificial
  Probe
tgagcaacatcacacaagaccagaa

SEQ ID NO: 84380 - DNA, 25 bp, Artificial
  Probe
ggatattgaatggcctctgtaacca

SEQ ID NO: 84381 - DNA, 25 bp, Artificial
  Probe
tcaattactccaagcaacttttccg

SEQ ID NO: 84382 - DNA, 25 bp, Artificial
  Probe
caaaatcgaagtagcccagtttata

SEQ ID NO: 84383 - DNA, 25 bp, Artificial
  Probe
atattgaatggcctctgtaaccaaa

SEQ ID NO: 84384 - DNA, 25 bp, Artificial
  Probe
ccaaaatcgaagtagcccagtttat

SEQ ID NO: 84385 - DNA, 25 bp, Artificial
  Probe
acaggacccagaggatattgaatgg

SEQ ID NO: 84386 - DNA, 25 bp, Artificial
  Probe
cttatcgaggagctgagcaacatca

SEQ ID NO: 84387 - DNA, 25 bp, Artificial
  Probe
aaaatcgaagtagcccagtttatat

SEQ ID NO: 84388 - DNA, 25 bp, Artificial
  Probe
atcacacaagaccagaagacttccc

SEQ ID NO: 84389 - DNA, 25 bp, Artificial
  Probe
ctgagcaacatcacacaagaccaga

SEQ ID NO: 84390 - DNA, 25 bp, Artificial
  Probe
tatatcaaaactgctcaattactcc

SEQ ID NO: 84391 - DNA, 25 bp, Artificial
  Probe
ttatcgaggagctgagcaacatcac

SEQ ID NO: 84392 - DNA, 25 bp, Artificial
  Probe
gaatccctgaccaacatctccagtt

SEQ ID NO: 84393 - DNA, 25 bp, Artificial
  Probe
gctcaattactccaagcaacttttc

SEQ ID NO: 84394 - DNA, 25 bp, Artificial
  Probe
ataccaaaatcgaagtagcccagtt

SEQ ID NO: 84395 - DNA, 25 bp, Artificial
  Probe
accaaaatcgaagtagcccagttta

SEQ ID NO: 84396 - DNA, 25 bp, Artificial
  Probe
taccaaaatcgaagtagcccagttt

SEQ ID NO: 84397 - DNA, 25 bp, Artificial
  Probe
caattactccaagcaacttttccgc

SEQ ID NO: 84398 - DNA, 25 bp, Artificial
  Probe
agataccaaaatcgaagtagcccag

SEQ ID NO: 84399 - DNA, 25 bp, Artificial
  Probe
gataccaaaatcgaagtagcccagt

SEQ ID NO: 84400 - DNA, 25 bp, Artificial
  Probe
cagataccaaaatcgaagtagccca

SEQ ID NO: 84401 - DNA, 25 bp, Artificial
  Probe
tcaaaactgctcaattactccaagc

SEQ ID NO: 84402 - DNA, 25 bp, Artificial
  Probe
gaagtagcccagtttatatcaaaac

SEQ ID NO: 84403 - DNA, 25 bp, Artificial
  Probe
tccacaggacccagaggatattgaa

SEQ ID NO: 84404 - DNA, 25 bp, Artificial
  Probe
ctccatcaactacatcatgttcgta

SEQ ID NO: 84405 - DNA, 25 bp, Artificial
  Probe
ctggtatccttggagactaagtcat

SEQ ID NO: 84406 - DNA, 25 bp, Artificial
  Probe
tgtatggatacttgtctgacaggtt

SEQ ID NO: 84407 - DNA, 25 bp, Artificial
  Probe
tggtatccttggagactaagtcatg

SEQ ID NO: 84408 - DNA, 25 bp, Artificial
  Probe
gggcttctataaataaagacggttg

SEQ ID NO: 84409 - DNA, 25 bp, Artificial
  Probe
ggcttctataaataaagacggttgc

SEQ ID NO: 84410 - DNA, 25 bp, Artificial
  Probe
gcttctataaataaagacggttgct

SEQ ID NO: 84411 - DNA, 25 bp, Artificial
  Probe
cttggagactaagtcatggatcact

SEQ ID NO: 84412 - DNA, 25 bp, Artificial
  Probe
aaagaccctcatacttagacctgtt

SEQ ID NO: 84413 - DNA, 25 bp, Artificial
  Probe
gtatccttggagactaagtcatgga

SEQ ID NO: 84414 - DNA, 25 bp, Artificial
  Probe
cgtggtgtatggatacttgtctgac

SEQ ID NO: 84415 - DNA, 25 bp, Artificial
  Probe
cctcatacttagacctgttccgaac

SEQ ID NO: 84416 - DNA, 25 bp, Artificial
  Probe
aagaccctcatacttagacctgttc

SEQ ID NO: 84417 - DNA, 25 bp, Artificial
  Probe
aaattatggtctacttccttgtgcg

SEQ ID NO: 84418 - DNA, 25 bp, Artificial
  Probe
ttggagactaagtcatggatcactg

SEQ ID NO: 84419 - DNA, 25 bp, Artificial
  Probe
gtgtatggatacttgtctgacaggt

SEQ ID NO: 84420 - DNA, 25 bp, Artificial
  Probe
tggtgtatggatacttgtctgacag

SEQ ID NO: 84421 - DNA, 25 bp, Artificial
  Probe
ggtatccttggagactaagtcatgg

SEQ ID NO: 84422 - DNA, 25 bp, Artificial
  Probe
caaagaccctcatacttagacctgt

SEQ ID NO: 84423 - DNA, 25 bp, Artificial
  Probe
gtggtgtatggatacttgtctgaca

SEQ ID NO: 84424 - DNA, 25 bp, Artificial
  Probe
tccatcaactacatcatgttcgtag

SEQ ID NO: 84425 - DNA, 25 bp, Artificial
  Probe
tataaataaagacggttgctcatgg

SEQ ID NO: 84426 - DNA, 25 bp, Artificial
  Probe
ttctataaataaagacggttgctca

SEQ ID NO: 84427 - DNA, 25 bp, Artificial
  Probe
gaacatctcagctccgacatatctc

SEQ ID NO: 84428 - DNA, 25 bp, Artificial
  Probe
tctataaataaagacggttgctcat

SEQ ID NO: 84429 - DNA, 25 bp, Artificial
  Probe
gagactaagtcatggatcactgctc

SEQ ID NO: 84430 - DNA, 25 bp, Artificial
  Probe
ccttggagactaagtcatggatcac

SEQ ID NO: 84431 - DNA, 25 bp, Artificial
  Probe
ctgctggtatccttggagactaagt

SEQ ID NO: 84432 - DNA, 25 bp, Artificial
  Probe
cctccatcaactacatcatgttcgt

SEQ ID NO: 84433 - DNA, 25 bp, Artificial
  Probe
agcctccatcaactacatcatgttc

SEQ ID NO: 84434 - DNA, 25 bp, Artificial
  Probe
ggtgtatggatacttgtctgacagg

SEQ ID NO: 84435 - DNA, 25 bp, Artificial
  Probe
cttctataaataaagacggttgctc

SEQ ID NO: 84436 - DNA, 25 bp, Artificial
  Probe
cagcctccatcaactacatcatgtt

SEQ ID NO: 84437 - DNA, 25 bp, Artificial
  Probe
gacatatctcactgtgctgcatgat

SEQ ID NO: 84438 - DNA, 25 bp, Artificial
  Probe
tccttggagactaagtcatggatca

SEQ ID NO: 84439 - DNA, 25 bp, Artificial
  Probe
gactaagtcatggatcactgctctg

SEQ ID NO: 84440 - DNA, 25 bp, Artificial
  Probe
agactaagtcatggatcactgctct

SEQ ID NO: 84441 - DNA, 25 bp, Artificial
  Probe
ctataaataaagacggttgctcatg

SEQ ID NO: 84442 - DNA, 25 bp, Artificial
  Probe
tatggatacttgtctgacaggtttg

SEQ ID NO: 84443 - DNA, 25 bp, Artificial
  Probe
gtatggatacttgtctgacaggttt

SEQ ID NO: 84444 - DNA, 25 bp, Artificial
  Probe
agaccctcatacttagacctgttcc

SEQ ID NO: 84445 - DNA, 25 bp, Artificial
  Probe
aacatctcagctccgacatatctca

SEQ ID NO: 84446 - DNA, 25 bp, Artificial
  Probe
gcaaagaccctcatacttagacctg

SEQ ID NO: 84447 - DNA, 25 bp, Artificial
  Probe
ccgtggtgtatggatacttgtctga

SEQ ID NO: 84448 - DNA, 25 bp, Artificial
  Probe
acatatctcactgtgctgcatgatg

SEQ ID NO: 84449 - DNA, 25 bp, Artificial
  Probe
attcagactcagaggaagacacatc

SEQ ID NO: 84450 - DNA, 25 bp, Artificial
  Probe
cattcagactcagaggaagacacat

SEQ ID NO: 84451 - DNA, 25 bp, Artificial
  Probe
ttcagactcagaggaagacacatca

SEQ ID NO: 84452 - DNA, 25 bp, Artificial
  Probe
agactcagaggaagacacatcacag

SEQ ID NO: 84453 - DNA, 25 bp, Artificial
  Probe
tcagactcagaggaagacacatcac

SEQ ID NO: 84454 - DNA, 25 bp, Artificial
  Probe
gacatcaactggaaacaaagtggat

SEQ ID NO: 84455 - DNA, 25 bp, Artificial
  Probe
atgacatcaactggaaacaaagtgg

SEQ ID NO: 84456 - DNA, 25 bp, Artificial
  Probe
catgacatcaactggaaacaaagtg

SEQ ID NO: 84457 - DNA, 25 bp, Artificial
  Probe
cagactcagaggaagacacatcaca

SEQ ID NO: 84458 - DNA, 25 bp, Artificial
  Probe
ccattcagactcagaggaagacaca

SEQ ID NO: 84459 - DNA, 25 bp, Artificial
  Probe
accattcagactcagaggaagacac

SEQ ID NO: 84460 - DNA, 25 bp, Artificial
  Probe
caccattcagactcagaggaagaca

SEQ ID NO: 84461 - DNA, 25 bp, Artificial
  Probe
acaccattcagactcagaggaagac

SEQ ID NO: 84462 - DNA, 25 bp, Artificial
  Probe
cacaccattcagactcagaggaaga

SEQ ID NO: 84463 - DNA, 25 bp, Artificial
  Probe
acatcaactggaaacaaagtggatc

SEQ ID NO: 84464 - DNA, 25 bp, Artificial
  Probe
tgacatcaactggaaacaaagtgga

SEQ ID NO: 84465 - DNA, 25 bp, Artificial
  Probe
agtatctgcaagggatgttgtttag

SEQ ID NO: 84466 - DNA, 25 bp, Artificial
  Probe
gatccatttatagatgcgtcccagg

SEQ ID NO: 84467 - DNA, 25 bp, Artificial
  Probe
gactcagaggaagacacatcacagg

SEQ ID NO: 84468 - DNA, 25 bp, Artificial
  Probe
tgtagcaactagcaggtgacttcag

SEQ ID NO: 84469 - DNA, 25 bp, Artificial
  Probe
gtatctgcaagggatgttgtttagg

SEQ ID NO: 84470 - DNA, 25 bp, Artificial
  Probe
cagtatctgcaagggatgttgttta

SEQ ID NO: 84471 - DNA, 25 bp, Artificial
  Probe
ccatgacatcaactggaaacaaagt

SEQ ID NO: 84472 - DNA, 25 bp, Artificial
  Probe
gtagcaactagcaggtgacttcagt

SEQ ID NO: 84473 - DNA, 25 bp, Artificial
  Probe
gtgtagcaactagcaggtgacttca

SEQ ID NO: 84474 - DNA, 25 bp, Artificial
  Probe
ccacaccattcagactcagaggaag

SEQ ID NO: 84475 - DNA, 25 bp, Artificial
  Probe
cccatgacatcaactggaaacaaag

SEQ ID NO: 84476 - DNA, 25 bp, Artificial
  Probe
tatctgcaagggatgttgtttaggg

SEQ ID NO: 84477 - DNA, 25 bp, Artificial
  Probe
tagcaactagcaggtgacttcagtc

SEQ ID NO: 84478 - DNA, 25 bp, Artificial
  Probe
actcagaggaagacacatcacaggt

SEQ ID NO: 84479 - DNA, 25 bp, Artificial
  Probe
ctcttttcactagatacaagcccct

SEQ ID NO: 84480 - DNA, 25 bp, Artificial
  Probe
tcttttcactagatacaagcccctg

SEQ ID NO: 84481 - DNA, 25 bp, Artificial
  Probe
ctcagaggaagacacatcacaggtg

SEQ ID NO: 84482 - DNA, 25 bp, Artificial
  Probe
accacaccattcagactcagaggaa

SEQ ID NO: 84483 - DNA, 25 bp, Artificial
  Probe
ggtgtagcaactagcaggtgacttc

SEQ ID NO: 84484 - DNA, 25 bp, Artificial
  Probe
cccctggcatgtatttatttatttt

SEQ ID NO: 84485 - DNA, 25 bp, Artificial
  Probe
ctcaggctctagcatcagcagtatc

SEQ ID NO: 84486 - DNA, 25 bp, Artificial
  Probe
cttttcactagatacaagcccctgg

SEQ ID NO: 84487 - DNA, 25 bp, Artificial
  Probe
atccatttatagatgcgtcccaggc

SEQ ID NO: 84488 - DNA, 25 bp, Artificial
  Probe
caggctctagcatcagcagtatctg

SEQ ID NO: 84489 - DNA, 25 bp, Artificial
  Probe
ctagcacaggtgtagcaactagcag

SEQ ID NO: 84490 - DNA, 25 bp, Artificial
  Probe
tcaggctctagcatcagcagtatct

SEQ ID NO: 84491 - DNA, 25 bp, Artificial
  Probe
atctgcaagggatgttgtttaggga

SEQ ID NO: 84492 - DNA, 25 bp, Artificial
  Probe
gatgttgtttagggagcaggctgat

SEQ ID NO: 84493 - DNA, 25 bp, Artificial
  Probe
actcaggctctagcatcagcagtat

SEQ ID NO: 84494 - DNA, 25 bp, Artificial
  Probe
aatggtaaggatgactatgtgaagg

SEQ ID NO: 84495 - DNA, 25 bp, Artificial
  Probe
caggagaatggtaaggatgactatg

SEQ ID NO: 84496 - DNA, 25 bp, Artificial
  Probe
atcttcctgcttagtatatgctgac

SEQ ID NO: 84497 - DNA, 25 bp, Artificial
  Probe
gagaatggtaaggatgactatgtga

SEQ ID NO: 84498 - DNA, 25 bp, Artificial
  Probe
ggagaatggtaaggatgactatgtg

SEQ ID NO: 84499 - DNA, 25 bp, Artificial
  Probe
aggagaatggtaaggatgactatgt

SEQ ID NO: 84500 - DNA, 25 bp, Artificial
  Probe
gaacttaacactgatggtaacacac

SEQ ID NO: 84501 - DNA, 25 bp, Artificial
  Probe
agaacttaacactgatggtaacaca

SEQ ID NO: 84502 - DNA, 25 bp, Artificial
  Probe
gagaacttaacactgatggtaacac

SEQ ID NO: 84503 - DNA, 25 bp, Artificial
  Probe
agagaacttaacactgatggtaaca

SEQ ID NO: 84504 - DNA, 25 bp, Artificial
  Probe
agaatggtaaggatgactatgtgaa

SEQ ID NO: 84505 - DNA, 25 bp, Artificial
  Probe
catcttcctgcttagtatatgctga

SEQ ID NO: 84506 - DNA, 25 bp, Artificial
  Probe
acatcttcctgcttagtatatgctg

SEQ ID NO: 84507 - DNA, 25 bp, Artificial
  Probe
gacatcttcctgcttagtatatgct

SEQ ID NO: 84508 - DNA, 25 bp, Artificial
  Probe
gaatggtaaggatgactatgtgaag

SEQ ID NO: 84509 - DNA, 25 bp, Artificial
  Probe
aagaatgagcagtgaagtgaatgag

SEQ ID NO: 84510 - DNA, 25 bp, Artificial
  Probe
ttcctgcttagtatatgctgacctt

SEQ ID NO: 84511 - DNA, 25 bp, Artificial
  Probe
gcaggagaatggtaaggatgactat

SEQ ID NO: 84512 - DNA, 25 bp, Artificial
  Probe
aacttaacactgatggtaacacacg

SEQ ID NO: 84513 - DNA, 25 bp, Artificial
  Probe
cttcctgcttagtatatgctgacct

SEQ ID NO: 84514 - DNA, 25 bp, Artificial
  Probe
tcttcctgcttagtatatgctgacc

SEQ ID NO: 84515 - DNA, 25 bp, Artificial
  Probe
gaatgagcagtgaagtgaatgagac

SEQ ID NO: 84516 - DNA, 25 bp, Artificial
  Probe
agaatgagcagtgaagtgaatgaga

SEQ ID NO: 84517 - DNA, 25 bp, Artificial
  Probe
ctacataggagcagaacatgaagag

SEQ ID NO: 84518 - DNA, 25 bp, Artificial
  Probe
atggtaaggatgactatgtgaaggc

SEQ ID NO: 84519 - DNA, 25 bp, Artificial
  Probe
cagagaacttaacactgatggtaac

SEQ ID NO: 84520 - DNA, 25 bp, Artificial
  Probe
tacataggagcagaacatgaagaga

SEQ ID NO: 84521 - DNA, 25 bp, Artificial
  Probe
tctacataggagcagaacatgaaga

SEQ ID NO: 84522 - DNA, 25 bp, Artificial
  Probe
ctagagtagagaaggagatcatggc

SEQ ID NO: 84523 - DNA, 25 bp, Artificial
  Probe
ctctacataggagcagaacatgaag

SEQ ID NO: 84524 - DNA, 25 bp, Artificial
  Probe
tctctacataggagcagaacatgaa

SEQ ID NO: 84525 - DNA, 25 bp, Artificial
  Probe
ggacatcttcctgcttagtatatgc

SEQ ID NO: 84526 - DNA, 25 bp, Artificial
  Probe
tagagtagagaaggagatcatggca

SEQ ID NO: 84527 - DNA, 25 bp, Artificial
  Probe
ataggagcagaacatgaagagacag

SEQ ID NO: 84528 - DNA, 25 bp, Artificial
  Probe
ccagagaacttaacactgatggtaa

SEQ ID NO: 84529 - DNA, 25 bp, Artificial
  Probe
aatgagcagtgaagtgaatgagact

SEQ ID NO: 84530 - DNA, 25 bp, Artificial
  Probe
gtctctacataggagcagaacatga

SEQ ID NO: 84531 - DNA, 25 bp, Artificial
  Probe
cctagagtagagaaggagatcatgg

SEQ ID NO: 84532 - DNA, 25 bp, Artificial
  Probe
agcctagagtagagaaggagatcat

SEQ ID NO: 84533 - DNA, 25 bp, Artificial
  Probe
gaaagaatgagcagtgaagtgaatg

SEQ ID NO: 84534 - DNA, 25 bp, Artificial
  Probe
cataggagcagaacatgaagagaca

SEQ ID NO: 84535 - DNA, 25 bp, Artificial
  Probe
acataggagcagaacatgaagagac

SEQ ID NO: 84536 - DNA, 25 bp, Artificial
  Probe
aaagaatgagcagtgaagtgaatga

SEQ ID NO: 84537 - DNA, 25 bp, Artificial
  Probe
gcctagagtagagaaggagatcatg

SEQ ID NO: 84538 - DNA, 25 bp, Artificial
  Probe
ataaaccagcatctaatgaagaggg

SEQ ID NO: 84539 - DNA, 25 bp, Artificial
  Probe
cacttcgctgctgacttctgtattg

SEQ ID NO: 84540 - DNA, 25 bp, Artificial
  Probe
aggcagtgtgaatgtgagcatagac

SEQ ID NO: 84541 - DNA, 25 bp, Artificial
  Probe
caggcagtgtgaatgtgagcataga

SEQ ID NO: 84542 - DNA, 25 bp, Artificial
  Probe
acttcgctgctgacttctgtattgg

SEQ ID NO: 84543 - DNA, 25 bp, Artificial
  Probe
tcaggcagtgtgaatgtgagcatag

SEQ ID NO: 84544 - DNA, 25 bp, Artificial
  Probe
agtgtgaatgtgagcatagacccag

SEQ ID NO: 84545 - DNA, 25 bp, Artificial
  Probe
cttctgtattggctcaccagagatg

SEQ ID NO: 84546 - DNA, 25 bp, Artificial
  Probe
ttctgtattggctcaccagagatga

SEQ ID NO: 84547 - DNA, 25 bp, Artificial
  Probe
acttctgtattggctcaccagagat

SEQ ID NO: 84548 - DNA, 25 bp, Artificial
  Probe
cagtgtgaatgtgagcatagaccca

SEQ ID NO: 84549 - DNA, 25 bp, Artificial
  Probe
tctgtattggctcaccagagatgag

SEQ ID NO: 84550 - DNA, 25 bp, Artificial
  Probe
atagacccagcagaggaacctacag

SEQ ID NO: 84551 - DNA, 25 bp, Artificial
  Probe
gacttctgtattggctcaccagaga

SEQ ID NO: 84552 - DNA, 25 bp, Artificial
  Probe
gaatgtgagcatagacccagcagag

SEQ ID NO: 84553 - DNA, 25 bp, Artificial
  Probe
catagacccagcagaggaacctaca

SEQ ID NO: 84554 - DNA, 25 bp, Artificial
  Probe
tgacttctgtattggctcaccagag

SEQ ID NO: 84555 - DNA, 25 bp, Artificial
  Probe
ctgacttctgtattggctcaccaga

SEQ ID NO: 84556 - DNA, 25 bp, Artificial
  Probe
ctcaggcagtgtgaatgtgagcata

SEQ ID NO: 84557 - DNA, 25 bp, Artificial
  Probe
cactctacgatcccaattcaacctc

SEQ ID NO: 84558 - DNA, 25 bp, Artificial
  Probe
atgatccatgctgagtaaacacctg

SEQ ID NO: 84559 - DNA, 25 bp, Artificial
  Probe
gaatcagtcagaggaagcggaaatg

SEQ ID NO: 84560 - DNA, 25 bp, Artificial
  Probe
gatccatgctgagtaaacacctgac

SEQ ID NO: 84561 - DNA, 25 bp, Artificial
  Probe
tgatccatgctgagtaaacacctga

SEQ ID NO: 84562 - DNA, 25 bp, Artificial
  Probe
tgaatcagtcagaggaagcggaaat

SEQ ID NO: 84563 - DNA, 25 bp, Artificial
  Probe
ccactctacgatcccaattcaacct

SEQ ID NO: 84564 - DNA, 25 bp, Artificial
  Probe
atccatgctgagtaaacacctgaca

SEQ ID NO: 84565 - DNA, 25 bp, Artificial
  Probe
cacatgatccatgctgagtaaacac

SEQ ID NO: 84566 - DNA, 25 bp, Artificial
  Probe
catgatccatgctgagtaaacacct

SEQ ID NO: 84567 - DNA, 25 bp, Artificial
  Probe
tccatgctgagtaaacacctgacac

SEQ ID NO: 84568 - DNA, 25 bp, Artificial
  Probe
cccactctacgatcccaattcaacc

SEQ ID NO: 84569 - DNA, 25 bp, Artificial
  Probe
acatgatccatgctgagtaaacacc

SEQ ID NO: 84570 - DNA, 25 bp, Artificial
  Probe
ccacatgatccatgctgagtaaaca

SEQ ID NO: 84571 - DNA, 25 bp, Artificial
  Probe
gagccactttcttctccaaccagag

SEQ ID NO: 84572 - DNA, 25 bp, Artificial
  Probe
actctacgatcccaattcaacctcg

SEQ ID NO: 84573 - DNA, 25 bp, Artificial
  Probe
ctctacgatcccaattcaacctcga

SEQ ID NO: 84574 - DNA, 25 bp, Artificial
  Probe
cccacatgatccatgctgagtaaac

SEQ ID NO: 84575 - DNA, 25 bp, Artificial
  Probe
ctcaaatccactggataaaagatgg

SEQ ID NO: 84576 - DNA, 25 bp, Artificial
  Probe
cctcaaatccactggataaaagatg

SEQ ID NO: 84577 - DNA, 25 bp, Artificial
  Probe
ccctcaaatccactggataaaagat

SEQ ID NO: 84578 - DNA, 25 bp, Artificial
  Probe
tcaaatccactggataaaagatggc

SEQ ID NO: 84579 - DNA, 25 bp, Artificial
  Probe
aaatccactggataaaagatggcac

SEQ ID NO: 84580 - DNA, 25 bp, Artificial
  Probe
caaatccactggataaaagatggca

SEQ ID NO: 84581 - DNA, 25 bp, Artificial
  Probe
cagagctgaatcagtcagaggaagc

SEQ ID NO: 84582 - DNA, 25 bp, Artificial
  Probe
gcagagctgaatcagtcagaggaag

SEQ ID NO: 84583 - DNA, 25 bp, Artificial
  Probe
ccccactctacgatcccaattcaac

SEQ ID NO: 84584 - DNA, 25 bp, Artificial
  Probe
aattcaacctcgagccactttcttc

SEQ ID NO: 84585 - DNA, 25 bp, Artificial
  Probe
cccctcaaatccactggataaaaga

SEQ ID NO: 84586 - DNA, 25 bp, Artificial
  Probe
ctgaatcagtcagaggaagcggaaa

SEQ ID NO: 84587 - DNA, 25 bp, Artificial
  Probe
caattcaacctcgagccactttctt

SEQ ID NO: 84588 - DNA, 25 bp, Artificial
  Probe
aatccactggataaaagatggcaca

SEQ ID NO: 84589 - DNA, 25 bp, Artificial
  Probe
attcaacctcgagccactttcttct

SEQ ID NO: 84590 - DNA, 25 bp, Artificial
  Probe
atccactggataaaagatggcacac

SEQ ID NO: 84591 - DNA, 25 bp, Artificial
  Probe
tccactggataaaagatggcacacc

SEQ ID NO: 84592 - DNA, 25 bp, Artificial
  Probe
tctacgatcccaattcaacctcgag

SEQ ID NO: 84593 - DNA, 25 bp, Artificial
  Probe
ttcaacctcgagccactttcttctc

SEQ ID NO: 84594 - DNA, 25 bp, Artificial
  Probe
tatctaactaggaaccaatggacac

SEQ ID NO: 84595 - DNA, 25 bp, Artificial
  Probe
ttatctaactaggaaccaatggaca

SEQ ID NO: 84596 - DNA, 25 bp, Artificial
  Probe
caagtatggcattgacgaatatcta

SEQ ID NO: 84597 - DNA, 25 bp, Artificial
  Probe
aagtatggcattgacgaatatctag

SEQ ID NO: 84598 - DNA, 25 bp, Artificial
  Probe
cttatctaactaggaaccaatggac

SEQ ID NO: 84599 - DNA, 25 bp, Artificial
  Probe
caatgaacaagtaggttatcagagt

SEQ ID NO: 84600 - DNA, 25 bp, Artificial
  Probe
acaatgaacaagtaggttatcagag

SEQ ID NO: 84601 - DNA, 25 bp, Artificial
  Probe
atctaactaggaaccaatggacacc

SEQ ID NO: 84602 - DNA, 25 bp, Artificial
  Probe
ccttatctaactaggaaccaatgga

SEQ ID NO: 84603 - DNA, 25 bp, Artificial
  Probe
aatgaacaagtaggttatcagagtt

SEQ ID NO: 84604 - DNA, 25 bp, Artificial
  Probe
ccctaacccttcccttatctaacta

SEQ ID NO: 84605 - DNA, 25 bp, Artificial
  Probe
ccaagtatggcattgacgaatatct

SEQ ID NO: 84606 - DNA, 25 bp, Artificial
  Probe
tccaagtatggcattgacgaatatc

SEQ ID NO: 84607 - DNA, 25 bp, Artificial
  Probe
gtccaagtatggcattgacgaatat

SEQ ID NO: 84608 - DNA, 25 bp, Artificial
  Probe
gcttgtagggttctcacttctttaa

SEQ ID NO: 84609 - DNA, 25 bp, Artificial
  Probe
tacaatgaacaagtaggttatcaga

SEQ ID NO: 84610 - DNA, 25 bp, Artificial
  Probe
tacaccctaacccttcccttatcta

SEQ ID NO: 84611 - DNA, 25 bp, Artificial
  Probe
acaagtaggttatcagagttatgaa

SEQ ID NO: 84612 - DNA, 25 bp, Artificial
  Probe
aacaagtaggttatcagagttatga

SEQ ID NO: 84613 - DNA, 25 bp, Artificial
  Probe
tgaacaagtaggttatcagagttat

SEQ ID NO: 84614 - DNA, 25 bp, Artificial
  Probe
atgaacaagtaggttatcagagtta

SEQ ID NO: 84615 - DNA, 25 bp, Artificial
  Probe
cctaacccttcccttatctaactag

SEQ ID NO: 84616 - DNA, 25 bp, Artificial
  Probe
gaacaagtaggttatcagagttatg

SEQ ID NO: 84617 - DNA, 25 bp, Artificial
  Probe
cttgtagggttctcacttctttaat

SEQ ID NO: 84618 - DNA, 25 bp, Artificial
  Probe
accctaacccttcccttatctaact

SEQ ID NO: 84619 - DNA, 25 bp, Artificial
  Probe
caccctaacccttcccttatctaac

SEQ ID NO: 84620 - DNA, 25 bp, Artificial
  Probe
tatggcattgacgaatatctagagg

SEQ ID NO: 84621 - DNA, 25 bp, Artificial
  Probe
acaccctaacccttcccttatctaa

SEQ ID NO: 84622 - DNA, 25 bp, Artificial
  Probe
agtatggcattgacgaatatctaga

SEQ ID NO: 84623 - DNA, 25 bp, Artificial
  Probe
ttacaatgaacaagtaggttatcag

SEQ ID NO: 84624 - DNA, 25 bp, Artificial
  Probe
ggcttgtagggttctcacttcttta

SEQ ID NO: 84625 - DNA, 25 bp, Artificial
  Probe
gtatggcattgacgaatatctagag

SEQ ID NO: 84626 - DNA, 25 bp, Artificial
  Probe
atacaaagtacagtgtgagtgttca

SEQ ID NO: 84627 - DNA, 25 bp, Artificial
  Probe
catacaaagtacagtgtgagtgttc

SEQ ID NO: 84628 - DNA, 25 bp, Artificial
  Probe
cccttatctaactaggaaccaatgg

SEQ ID NO: 84629 - DNA, 25 bp, Artificial
  Probe
atggcattgacgaatatctagaggt

SEQ ID NO: 84630 - DNA, 25 bp, Artificial
  Probe
ccatacaaagtacagtgtgagtgtt

SEQ ID NO: 84631 - DNA, 25 bp, Artificial
  Probe
ctaacccttcccttatctaactagg

SEQ ID NO: 84632 - DNA, 25 bp, Artificial
  Probe
ctccatacaaagtacagtgtgagtg

SEQ ID NO: 84633 - DNA, 25 bp, Artificial
  Probe
ctgatgttggattggcaggttactt

SEQ ID NO: 84634 - DNA, 25 bp, Artificial
  Probe
cagtcatcaagttcgataaagagga

SEQ ID NO: 84635 - DNA, 25 bp, Artificial
  Probe
tcccttatctaactaggaaccaatg

SEQ ID NO: 84636 - DNA, 25 bp, Artificial
  Probe
taacccttcccttatctaactagga

SEQ ID NO: 84637 - DNA, 25 bp, Artificial
  Probe
tctaactaggaaccaatggacacca

SEQ ID NO: 84638 - DNA, 25 bp, Artificial
  Probe
agtcatcaagttcgataaagaggaa

SEQ ID NO: 84639 - DNA, 25 bp, Artificial
  Probe
ggaggagaaggaggattcattattg

SEQ ID NO: 84640 - DNA, 25 bp, Artificial
  Probe
gaggagaaggaggattcattattgc

SEQ ID NO: 84641 - DNA, 25 bp, Artificial
  Probe
gagaaggaggattcattattgcagg

SEQ ID NO: 84642 - DNA, 25 bp, Artificial
  Probe
ggagaaggaggattcattattgcag

SEQ ID NO: 84643 - DNA, 25 bp, Artificial
  Probe
gggaggagaaggaggattcattatt

SEQ ID NO: 84644 - DNA, 25 bp, Artificial
  Probe
aggagaaggaggattcattattgca

SEQ ID NO: 84645 - DNA, 25 bp, Artificial
  Probe
attcattattgcagggattggactc

SEQ ID NO: 84646 - DNA, 25 bp, Artificial
  Probe
gattcattattgcagggattggact

SEQ ID NO: 84647 - DNA, 25 bp, Artificial
  Probe
gaggattcattattgcagggattgg

SEQ ID NO: 84648 - DNA, 25 bp, Artificial
  Probe
ggaggattcattattgcagggattg

SEQ ID NO: 84649 - DNA, 25 bp, Artificial
  Probe
aggaggattcattattgcagggatt

SEQ ID NO: 84650 - DNA, 25 bp, Artificial
  Probe
aaggaggattcattattgcagggat

SEQ ID NO: 84651 - DNA, 25 bp, Artificial
  Probe
ggattcattattgcagggattggac

SEQ ID NO: 84652 - DNA, 25 bp, Artificial
  Probe
aggattcattattgcagggattgga

SEQ ID NO: 84653 - DNA, 25 bp, Artificial
  Probe
ttcattattgcagggattggactca

SEQ ID NO: 84654 - DNA, 25 bp, Artificial
  Probe
attattgcagggattggactcagag

SEQ ID NO: 84655 - DNA, 25 bp, Artificial
  Probe
gaaggaggattcattattgcaggga

SEQ ID NO: 84656 - DNA, 25 bp, Artificial
  Probe
agaaggaggattcattattgcaggg

SEQ ID NO: 84657 - DNA, 25 bp, Artificial
  Probe
agggattggactcagagaaacagac

SEQ ID NO: 84658 - DNA, 25 bp, Artificial
  Probe
cagggattggactcagagaaacaga

SEQ ID NO: 84659 - DNA, 25 bp, Artificial
  Probe
cattattgcagggattggactcaga

SEQ ID NO: 84660 - DNA, 25 bp, Artificial
  Probe
tcattattgcagggattggactcag

SEQ ID NO: 84661 - DNA, 25 bp, Artificial
  Probe
tattgcagggattggactcagagaa

SEQ ID NO: 84662 - DNA, 25 bp, Artificial
  Probe
ttattgcagggattggactcagaga

SEQ ID NO: 84663 - DNA, 25 bp, Artificial
  Probe
ggggaggagaaggaggattcattat

SEQ ID NO: 84664 - DNA, 25 bp, Artificial
  Probe
ggattggactcagagaaacagaccc

SEQ ID NO: 84665 - DNA, 25 bp, Artificial
  Probe
gggattggactcagagaaacagacc

SEQ ID NO: 84666 - DNA, 25 bp, Artificial
  Probe
attggactcagagaaacagacccag

SEQ ID NO: 84667 - DNA, 25 bp, Artificial
  Probe
gattggactcagagaaacagaccca

SEQ ID NO: 84668 - DNA, 25 bp, Artificial
  Probe
attgcagggattggactcagagaaa

SEQ ID NO: 84669 - DNA, 25 bp, Artificial
  Probe
gcagggattggactcagagaaacag

SEQ ID NO: 84670 - DNA, 25 bp, Artificial
  Probe
ttgcagggattggactcagagaaac

SEQ ID NO: 84671 - DNA, 25 bp, Artificial
  Probe
agtgaatgattgttcttctgaggtt

SEQ ID NO: 84672 - DNA, 25 bp, Artificial
  Probe
gtgaatgattgttcttctgaggttg

SEQ ID NO: 84673 - DNA, 25 bp, Artificial
  Probe
tagtgaatgattgttcttctgaggt

SEQ ID NO: 84674 - DNA, 25 bp, Artificial
  Probe
agtctcagcacagtaacaattcttc

SEQ ID NO: 84675 - DNA, 25 bp, Artificial
  Probe
cagtctcagcacagtaacaattctt

SEQ ID NO: 84676 - DNA, 25 bp, Artificial
  Probe
ttagtgaatgattgttcttctgagg

SEQ ID NO: 84677 - DNA, 25 bp, Artificial
  Probe
tctgagtgaaggctatgaagtagag

SEQ ID NO: 84678 - DNA, 25 bp, Artificial
  Probe
ctctgagtgaaggctatgaagtaga

SEQ ID NO: 84679 - DNA, 25 bp, Artificial
  Probe
ttaccatgcctagatattgcttgtt

SEQ ID NO: 84680 - DNA, 25 bp, Artificial
  Probe
tgaatgattgttcttctgaggttgc

SEQ ID NO: 84681 - DNA, 25 bp, Artificial
  Probe
cttaccatgcctagatattgcttgt

SEQ ID NO: 84682 - DNA, 25 bp, Artificial
  Probe
tcagtctcagcacagtaacaattct

SEQ ID NO: 84683 - DNA, 25 bp, Artificial
  Probe
gtcagtctcagcacagtaacaattc

SEQ ID NO: 84684 - DNA, 25 bp, Artificial
  Probe
ccttaccatgcctagatattgcttg

SEQ ID NO: 84685 - DNA, 25 bp, Artificial
  Probe
aaggatattcttcttcttgagcaag

SEQ ID NO: 84686 - DNA, 25 bp, Artificial
  Probe
gtctcagcacagtaacaattcttcg

SEQ ID NO: 84687 - DNA, 25 bp, Artificial
  Probe
cagtaacaattcttcggactctgag

SEQ ID NO: 84688 - DNA, 25 bp, Artificial
  Probe
gattgttcttctgaggttgcctaat

SEQ ID NO: 84689 - DNA, 25 bp, Artificial
  Probe
gaatgattgttcttctgaggttgcc

SEQ ID NO: 84690 - DNA, 25 bp, Artificial
  Probe
attgttcttctgaggttgcctaatg

SEQ ID NO: 84691 - DNA, 25 bp, Artificial
  Probe
gctcattacagatcaaggatattct

SEQ ID NO: 84692 - DNA, 25 bp, Artificial
  Probe
cacagtaacaattcttcggactctg

SEQ ID NO: 84693 - DNA, 25 bp, Artificial
  Probe
acagtaacaattcttcggactctga

SEQ ID NO: 84694 - DNA, 25 bp, Artificial
  Probe
actctgagtgaaggctatgaagtag

SEQ ID NO: 84695 - DNA, 25 bp, Artificial
  Probe
gactctgagtgaaggctatgaagta

SEQ ID NO: 84696 - DNA, 25 bp, Artificial
  Probe
aatacagcttctcgaatggaatcaa

SEQ ID NO: 84697 - DNA, 25 bp, Artificial
  Probe
taacaattcttcggactctgagtga

SEQ ID NO: 84698 - DNA, 25 bp, Artificial
  Probe
gtaacaattcttcggactctgagtg

SEQ ID NO: 84699 - DNA, 25 bp, Artificial
  Probe
agtaacaattcttcggactctgagt

SEQ ID NO: 84700 - DNA, 25 bp, Artificial
  Probe
gaatacagcttctcgaatggaatca

SEQ ID NO: 84701 - DNA, 25 bp, Artificial
  Probe
tgaatacagcttctcgaatggaatc

SEQ ID NO: 84702 - DNA, 25 bp, Artificial
  Probe
atattgcttgtttggtgatactgtg

SEQ ID NO: 84703 - DNA, 25 bp, Artificial
  Probe
gcttgtttggtgatactgtgaatac

SEQ ID NO: 84704 - DNA, 25 bp, Artificial
  Probe
gatattgcttgtttggtgatactgt

SEQ ID NO: 84705 - DNA, 25 bp, Artificial
  Probe
tgaagctcattacagatcaaggata

SEQ ID NO: 84706 - DNA, 25 bp, Artificial
  Probe
atgtcagtctcagcacagtaacaat

SEQ ID NO: 84707 - DNA, 25 bp, Artificial
  Probe
tgcttgtttggtgatactgtgaata

SEQ ID NO: 84708 - DNA, 25 bp, Artificial
  Probe
tattgcttgtttggtgatactgtga

SEQ ID NO: 84709 - DNA, 25 bp, Artificial
  Probe
agatattgcttgtttggtgatactg

SEQ ID NO: 84710 - DNA, 25 bp, Artificial
  Probe
atacagcttctcgaatggaatcaac

SEQ ID NO: 84711 - DNA, 25 bp, Artificial
  Probe
gtgaatacagcttctcgaatggaat

SEQ ID NO: 84712 - DNA, 25 bp, Artificial
  Probe
atgattgttcttctgaggttgccta

SEQ ID NO: 84713 - DNA, 25 bp, Artificial
  Probe
gagcaagatattagtgaatgattgt

SEQ ID NO: 84714 - DNA, 25 bp, Artificial
  Probe
tgagcaagatattagtgaatgattg

SEQ ID NO: 84715 - DNA, 25 bp, Artificial
  Probe
gaaagaactccagcatttgaatctc

SEQ ID NO: 84716 - DNA, 25 bp, Artificial
  Probe
ttgtgatcttcagatggtgtcattc

SEQ ID NO: 84717 - DNA, 25 bp, Artificial
  Probe
tgtgatcttcagatggtgtcattcc

SEQ ID NO: 84718 - DNA, 25 bp, Artificial
  Probe
gagagattaatatagcgactgtagt

SEQ ID NO: 84719 - DNA, 25 bp, Artificial
  Probe
gagagagattaatatagcgactgta

SEQ ID NO: 84720 - DNA, 25 bp, Artificial
  Probe
tttgtgatcttcagatggtgtcatt

SEQ ID NO: 84721 - DNA, 25 bp, Artificial
  Probe
agagagattaatatagcgactgtag

SEQ ID NO: 84722 - DNA, 25 bp, Artificial
  Probe
agagattaatatagcgactgtagtt

SEQ ID NO: 84723 - DNA, 25 bp, Artificial
  Probe
gcgactgtagttatagctaagactt

SEQ ID NO: 84724 - DNA, 25 bp, Artificial
  Probe
ttaatatagcgactgtagttatagc

SEQ ID NO: 84725 - DNA, 25 bp, Artificial
  Probe
agcgactgtagttatagctaagact

SEQ ID NO: 84726 - DNA, 25 bp, Artificial
  Probe
gtgatcttcagatggtgtcattccc

SEQ ID NO: 84727 - DNA, 25 bp, Artificial
  Probe
aatgtggggttgtttcttttgtgat

SEQ ID NO: 84728 - DNA, 25 bp, Artificial
  Probe
cgactgtagttatagctaagactta

SEQ ID NO: 84729 - DNA, 25 bp, Artificial
  Probe
attggaatgtggggttgtttctttt

SEQ ID NO: 84730 - DNA, 25 bp, Artificial
  Probe
tttcttttgtgatcttcagatggtg

SEQ ID NO: 84731 - DNA, 25 bp, Artificial
  Probe
gtttcttttgtgatcttcagatggt

SEQ ID NO: 84732 - DNA, 25 bp, Artificial
  Probe
tgtttcttttgtgatcttcagatgg

SEQ ID NO: 84733 - DNA, 25 bp, Artificial
  Probe
ggttgtttcttttgtgatcttcaga

SEQ ID NO: 84734 - DNA, 25 bp, Artificial
  Probe
gagattaatatagcgactgtagtta

SEQ ID NO: 84735 - DNA, 25 bp, Artificial
  Probe
ttcttttgtgatcttcagatggtgt

SEQ ID NO: 84736 - DNA, 25 bp, Artificial
  Probe
ttttgtgatcttcagatggtgtcat

SEQ ID NO: 84737 - DNA, 25 bp, Artificial
  Probe
gggttgtttcttttgtgatcttcag

SEQ ID NO: 84738 - DNA, 25 bp, Artificial
  Probe
tcttttgtgatcttcagatggtgtc

SEQ ID NO: 84739 - DNA, 25 bp, Artificial
  Probe
cttttgtgatcttcagatggtgtca

SEQ ID NO: 84740 - DNA, 25 bp, Artificial
  Probe
tggggttgtttcttttgtgatcttc

SEQ ID NO: 84741 - DNA, 25 bp, Artificial
  Probe
gaatgtggggttgtttcttttgtga

SEQ ID NO: 84742 - DNA, 25 bp, Artificial
  Probe
gtggggttgtttcttttgtgatctt

SEQ ID NO: 84743 - DNA, 25 bp, Artificial
  Probe
atgtggggttgtttcttttgtgatc

SEQ ID NO: 84744 - DNA, 25 bp, Artificial
  Probe
ttggaatgtggggttgtttcttttg

SEQ ID NO: 84745 - DNA, 25 bp, Artificial
  Probe
ttgtttcttttgtgatcttcagatg

SEQ ID NO: 84746 - DNA, 25 bp, Artificial
  Probe
gttgtttcttttgtgatcttcagat

SEQ ID NO: 84747 - DNA, 25 bp, Artificial
  Probe
taatatagcgactgtagttatagct

SEQ ID NO: 84748 - DNA, 25 bp, Artificial
  Probe
tttgagtctgacttgagggtgagag

SEQ ID NO: 84749 - DNA, 25 bp, Artificial
  Probe
ggggttgtttcttttgtgatcttca

SEQ ID NO: 84750 - DNA, 25 bp, Artificial
  Probe
cattggaatgtggggttgtttcttt

SEQ ID NO: 84751 - DNA, 25 bp, Artificial
  Probe
ggaatgtggggttgtttcttttgtg

SEQ ID NO: 84752 - DNA, 25 bp, Artificial
  Probe
tagcgactgtagttatagctaagac

SEQ ID NO: 84753 - DNA, 25 bp, Artificial
  Probe
agattaatatagcgactgtagttat

SEQ ID NO: 84754 - DNA, 25 bp, Artificial
  Probe
tgtggggttgtttcttttgtgatct

SEQ ID NO: 84755 - DNA, 25 bp, Artificial
  Probe
atagcgactgtagttatagctaaga

SEQ ID NO: 84756 - DNA, 25 bp, Artificial
  Probe
tggaatgtggggttgtttcttttgt

SEQ ID NO: 84757 - DNA, 25 bp, Artificial
  Probe
tatagctaagacttaactggggaag

SEQ ID NO: 84758 - DNA, 25 bp, Artificial
  Probe
cttttgagtctgacttgagggtgag

SEQ ID NO: 84759 - DNA, 25 bp, Artificial
  Probe
ttatagctaagacttaactggggaa

SEQ ID NO: 84760 - DNA, 25 bp, Artificial
  Probe
atagctaagacttaactggggaagg

SEQ ID NO: 84761 - DNA, 25 bp, Artificial
  Probe
catccaacacacctcttaccttatt

SEQ ID NO: 84762 - DNA, 25 bp, Artificial
  Probe
atccaacacacctcttaccttattg

SEQ ID NO: 84763 - DNA, 25 bp, Artificial
  Probe
ccaacacacctcttaccttattgaa

SEQ ID NO: 84764 - DNA, 25 bp, Artificial
  Probe
tccaacacacctcttaccttattga

SEQ ID NO: 84765 - DNA, 25 bp, Artificial
  Probe
gcatccaacacacctcttaccttat

SEQ ID NO: 84766 - DNA, 25 bp, Artificial
  Probe
gggcgtgaagacagatactatttat

SEQ ID NO: 84767 - DNA, 25 bp, Artificial
  Probe
agggcgtgaagacagatactattta

SEQ ID NO: 84768 - DNA, 25 bp, Artificial
  Probe
ggcgtgaagacagatactatttatt

SEQ ID NO: 84769 - DNA, 25 bp, Artificial
  Probe
ggatagttgaaaccctaaagagcaa

SEQ ID NO: 84770 - DNA, 25 bp, Artificial
  Probe
caacacacctcttaccttattgaaa

SEQ ID NO: 84771 - DNA, 25 bp, Artificial
  Probe
gtcatttctgaagagtctcctgaag

SEQ ID NO: 84772 - DNA, 25 bp, Artificial
  Probe
tcatttctgaagagtctcctgaaga

SEQ ID NO: 84773 - DNA, 25 bp, Artificial
  Probe
tgtcatttctgaagagtctcctgaa

SEQ ID NO: 84774 - DNA, 25 bp, Artificial
  Probe
cctaaagagcaacaagtgtcagttt

SEQ ID NO: 84775 - DNA, 25 bp, Artificial
  Probe
aaggatagttgaaaccctaaagagc

SEQ ID NO: 84776 - DNA, 25 bp, Artificial
  Probe
ttgaaaccctaaagagcaacaagtg

SEQ ID NO: 84777 - DNA, 25 bp, Artificial
  Probe
gaaaccctaaagagcaacaagtgtc

SEQ ID NO: 84778 - DNA, 25 bp, Artificial
  Probe
gcgtgaagacagatactatttattc

SEQ ID NO: 84779 - DNA, 25 bp, Artificial
  Probe
cagggcgtgaagacagatactattt

SEQ ID NO: 84780 - DNA, 25 bp, Artificial
  Probe
gtgtcatttctgaagagtctcctga

SEQ ID NO: 84781 - DNA, 25 bp, Artificial
  Probe
aggatagttgaaaccctaaagagca

SEQ ID NO: 84782 - DNA, 25 bp, Artificial
  Probe
aaaggatagttgaaaccctaaagag

SEQ ID NO: 84783 - DNA, 25 bp, Artificial
  Probe
aaaccctaaagagcaacaagtgtca

SEQ ID NO: 84784 - DNA, 25 bp, Artificial
  Probe
tgaaaccctaaagagcaacaagtgt

SEQ ID NO: 84785 - DNA, 25 bp, Artificial
  Probe
ggcatccaacacacctcttacctta

SEQ ID NO: 84786 - DNA, 25 bp, Artificial
  Probe
aaccctaaagagcaacaagtgtcag

SEQ ID NO: 84787 - DNA, 25 bp, Artificial
  Probe
atcccatctgatgattgtaccacac

SEQ ID NO: 84788 - DNA, 25 bp, Artificial
  Probe
acacctcttaccttattgaaaacct

SEQ ID NO: 84789 - DNA, 25 bp, Artificial
  Probe
cacacctcttaccttattgaaaacc

SEQ ID NO: 84790 - DNA, 25 bp, Artificial
  Probe
cacctcttaccttattgaaaacctg

SEQ ID NO: 84791 - DNA, 25 bp, Artificial
  Probe
acctcttaccttattgaaaacctga

SEQ ID NO: 84792 - DNA, 25 bp, Artificial
  Probe
ccctaaagagcaacaagtgtcagtt

SEQ ID NO: 84793 - DNA, 25 bp, Artificial
  Probe
acacacctcttaccttattgaaaac

SEQ ID NO: 84794 - DNA, 25 bp, Artificial
  Probe
catctgatgattgtaccacaccgtg

SEQ ID NO: 84795 - DNA, 25 bp, Artificial
  Probe
cgtgtcatttctgaagagtctcctg

SEQ ID NO: 84796 - DNA, 25 bp, Artificial
  Probe
cctcttaccttattgaaaacctgaa

SEQ ID NO: 84797 - DNA, 25 bp, Artificial
  Probe
ctaaagagcaacaagtgtcagtttt

SEQ ID NO: 84798 - DNA, 25 bp, Artificial
  Probe
aacacacctcttaccttattgaaaa

SEQ ID NO: 84799 - DNA, 25 bp, Artificial
  Probe
tgaatttacaaaaccttttctccct

SEQ ID NO: 84800 - DNA, 25 bp, Artificial
  Probe
caccgtgtcatttctgaagagtctc

SEQ ID NO: 84801 - DNA, 25 bp, Artificial
  Probe
ttcgggtgaaaaggatagttgaaac

SEQ ID NO: 84802 - DNA, 25 bp, Artificial
  Probe
cctgaagaccttccagaagacagag

SEQ ID NO: 84803 - DNA, 25 bp, Artificial
  Probe
ctcctgaagaccttccagaagacag

SEQ ID NO: 84804 - DNA, 25 bp, Artificial
  Probe
cgtgaagacagatactatttattct

SEQ ID NO: 84805 - DNA, 25 bp, Artificial
  Probe
ctgaagaccttccagaagacagagg

SEQ ID NO: 84806 - DNA, 25 bp, Artificial
  Probe
tactgcgacaactagaggaagagaa

SEQ ID NO: 84807 - DNA, 25 bp, Artificial
  Probe
ctactgcgacaactagaggaagaga

SEQ ID NO: 84808 - DNA, 25 bp, Artificial
  Probe
agtcaatacatcttcctgcacagtt

SEQ ID NO: 84809 - DNA, 25 bp, Artificial
  Probe
gtcaatacatcttcctgcacagttg

SEQ ID NO: 84810 - DNA, 25 bp, Artificial
  Probe
gagtcaatacatcttcctgcacagt

SEQ ID NO: 84811 - DNA, 25 bp, Artificial
  Probe
tgagtcaatacatcttcctgcacag

SEQ ID NO: 84812 - DNA, 25 bp, Artificial
  Probe
ctgagtcaatacatcttcctgcaca

SEQ ID NO: 84813 - DNA, 25 bp, Artificial
  Probe
taacaccctactgaccttccttgat

SEQ ID NO: 84814 - DNA, 25 bp, Artificial
  Probe
cagagtccaggaataaagagacatg

SEQ ID NO: 84815 - DNA, 25 bp, Artificial
  Probe
actgcgacaactagaggaagagaag

SEQ ID NO: 84816 - DNA, 25 bp, Artificial
  Probe
aatgctggtttcttgaaggagtaca

SEQ ID NO: 84817 - DNA, 25 bp, Artificial
  Probe
caatgctggtttcttgaaggagtac

SEQ ID NO: 84818 - DNA, 25 bp, Artificial
  Probe
gcagagtccaggaataaagagacat

SEQ ID NO: 84819 - DNA, 25 bp, Artificial
  Probe
atgctggtttcttgaaggagtacaa

SEQ ID NO: 84820 - DNA, 25 bp, Artificial
  Probe
ccaggaataaagagacatggtcaaa

SEQ ID NO: 84821 - DNA, 25 bp, Artificial
  Probe
cctgagtcaatacatcttcctgcac

SEQ ID NO: 84822 - DNA, 25 bp, Artificial
  Probe
ctaacaccctactgaccttccttga

SEQ ID NO: 84823 - DNA, 25 bp, Artificial
  Probe
cgacaactagaggaagagaaggtgg

SEQ ID NO: 84824 - DNA, 25 bp, Artificial
  Probe
gaccctgagtcaatacatcttcctg

SEQ ID NO: 84825 - DNA, 25 bp, Artificial
  Probe
agaccctgagtcaatacatcttcct

SEQ ID NO: 84826 - DNA, 25 bp, Artificial
  Probe
cagaccctgagtcaatacatcttcc

SEQ ID NO: 84827 - DNA, 25 bp, Artificial
  Probe
ccagaccctgagtcaatacatcttc

SEQ ID NO: 84828 - DNA, 25 bp, Artificial
  Probe
atccagaccctgagtcaatacatct

SEQ ID NO: 84829 - DNA, 25 bp, Artificial
  Probe
gatccagaccctgagtcaatacatc

SEQ ID NO: 84830 - DNA, 25 bp, Artificial
  Probe
tccaggaataaagagacatggtcaa

SEQ ID NO: 84831 - DNA, 25 bp, Artificial
  Probe
tccagaccctgagtcaatacatctt

SEQ ID NO: 84832 - DNA, 25 bp, Artificial
  Probe
agagtccaggaataaagagacatgg

SEQ ID NO: 84833 - DNA, 25 bp, Artificial
  Probe
agtccaggaataaagagacatggtc

SEQ ID NO: 84834 - DNA, 25 bp, Artificial
  Probe
gagtccaggaataaagagacatggt

SEQ ID NO: 84835 - DNA, 25 bp, Artificial
  Probe
gacaactagaggaagagaaggtggc

SEQ ID NO: 84836 - DNA, 25 bp, Artificial
  Probe
ctgcgacaactagaggaagagaagg

SEQ ID NO: 84837 - DNA, 25 bp, Artificial
  Probe
catgatccagaccctgagtcaatac

SEQ ID NO: 84838 - DNA, 25 bp, Artificial
  Probe
gtccaggaataaagagacatggtca

SEQ ID NO: 84839 - DNA, 25 bp, Artificial
  Probe
tgatccagaccctgagtcaatacat

SEQ ID NO: 84840 - DNA, 25 bp, Artificial
  Probe
atgatccagaccctgagtcaataca

SEQ ID NO: 84841 - DNA, 25 bp, Artificial
  Probe
gctactgcgacaactagaggaagag

SEQ ID NO: 84842 - DNA, 25 bp, Artificial
  Probe
gcgacaactagaggaagagaaggtg

SEQ ID NO: 84843 - DNA, 25 bp, Artificial
  Probe
cctgactacaatcagaacagcattg

SEQ ID NO: 84844 - DNA, 25 bp, Artificial
  Probe
tcctgactacaatcagaacagcatt

SEQ ID NO: 84845 - DNA, 25 bp, Artificial
  Probe
aagggcagagtccaggaataaagag

SEQ ID NO: 84846 - DNA, 25 bp, Artificial
  Probe
aacaccctactgaccttccttgatg

SEQ ID NO: 84847 - DNA, 25 bp, Artificial
  Probe
caaaggaactctgggaaatggtgtg

SEQ ID NO: 84848 - DNA, 25 bp, Artificial
  Probe
ctactgaccttccttgatgctgtgg

SEQ ID NO: 84849 - DNA, 25 bp, Artificial
  Probe
cctactgaccttccttgatgctgtg

SEQ ID NO: 84850 - DNA, 25 bp, Artificial
  Probe
ccaatgctggtttcttgaaggagta

SEQ ID NO: 84851 - DNA, 25 bp, Artificial
  Probe
gcaggaccatataaaccaagaaatc

SEQ ID NO: 84852 - DNA, 25 bp, Artificial
  Probe
ggcaggaccatataaaccaagaaat

SEQ ID NO: 84853 - DNA, 25 bp, Artificial
  Probe
aggaccatataaaccaagaaatccg

SEQ ID NO: 84854 - DNA, 25 bp, Artificial
  Probe
caggaccatataaaccaagaaatcc

SEQ ID NO: 84855 - DNA, 25 bp, Artificial
  Probe
tggcaggaccatataaaccaagaaa

SEQ ID NO: 84856 - DNA, 25 bp, Artificial
  Probe
cttgacgaaggctacaaaattgatg

SEQ ID NO: 84857 - DNA, 25 bp, Artificial
  Probe
tacaaaattgatgtcagaggtcaga

SEQ ID NO: 84858 - DNA, 25 bp, Artificial
  Probe
gaaggctacaaaattgatgtcagag

SEQ ID NO: 84859 - DNA, 25 bp, Artificial
  Probe
ctacaaaattgatgtcagaggtcag

SEQ ID NO: 84860 - DNA, 25 bp, Artificial
  Probe
gctacaaaattgatgtcagaggtca

SEQ ID NO: 84861 - DNA, 25 bp, Artificial
  Probe
aaggctacaaaattgatgtcagagg

SEQ ID NO: 84862 - DNA, 25 bp, Artificial
  Probe
ttgacgaaggctacaaaattgatgt

SEQ ID NO: 84863 - DNA, 25 bp, Artificial
  Probe
aatccactggactgccatacagaat

SEQ ID NO: 84864 - DNA, 25 bp, Artificial
  Probe
acaaaattgatgtcagaggtcagac

SEQ ID NO: 84865 - DNA, 25 bp, Artificial
  Probe
cgaaggctacaaaattgatgtcaga

SEQ ID NO: 84866 - DNA, 25 bp, Artificial
  Probe
aattgatgtcagaggtcagaccgaa

SEQ ID NO: 84867 - DNA, 25 bp, Artificial
  Probe
acgaaggctacaaaattgatgtcag

SEQ ID NO: 84868 - DNA, 25 bp, Artificial
  Probe
ggctacaaaattgatgtcagaggtc

SEQ ID NO: 84869 - DNA, 25 bp, Artificial
  Probe
gacgaaggctacaaaattgatgtca

SEQ ID NO: 84870 - DNA, 25 bp, Artificial
  Probe
tgacgaaggctacaaaattgatgtc

SEQ ID NO: 84871 - DNA, 25 bp, Artificial
  Probe
aggctacaaaattgatgtcagaggt

SEQ ID NO: 84872 - DNA, 25 bp, Artificial
  Probe
ggaccatataaaccaagaaatccgg

SEQ ID NO: 84873 - DNA, 25 bp, Artificial
  Probe
atccactggactgccatacagaatc

SEQ ID NO: 84874 - DNA, 25 bp, Artificial
  Probe
gaatccactggactgccatacagaa

SEQ ID NO: 84875 - DNA, 25 bp, Artificial
  Probe
attgatgtcagaggtcagaccgaac

SEQ ID NO: 84876 - DNA, 25 bp, Artificial
  Probe
atggcaggaccatataaaccaagaa

SEQ ID NO: 84877 - DNA, 25 bp, Artificial
  Probe
aaattgatgtcagaggtcagaccga

SEQ ID NO: 84878 - DNA, 25 bp, Artificial
  Probe
caaaattgatgtcagaggtcagacc

SEQ ID NO: 84879 - DNA, 25 bp, Artificial
  Probe
catggcaggaccatataaaccaaga

SEQ ID NO: 84880 - DNA, 25 bp, Artificial
  Probe
aaaattgatgtcagaggtcagaccg

SEQ ID NO: 84881 - DNA, 25 bp, Artificial
  Probe
cagggaagacaggattttgcagatc

SEQ ID NO: 84882 - DNA, 25 bp, Artificial
  Probe
tatgaggagctgctgtcttccctag

SEQ ID NO: 84883 - DNA, 25 bp, Artificial
  Probe
ccttgacgaaggctacaaaattgat

SEQ ID NO: 84884 - DNA, 25 bp, Artificial
  Probe
acagggaagacaggattttgcagat

SEQ ID NO: 84885 - DNA, 25 bp, Artificial
  Probe
gtatgaggagctgctgtcttcccta

SEQ ID NO: 84886 - DNA, 25 bp, Artificial
  Probe
gatggaatccactggactgccatac

SEQ ID NO: 84887 - DNA, 25 bp, Artificial
  Probe
gacagggaagacaggattttgcaga

SEQ ID NO: 84888 - DNA, 25 bp, Artificial
  Probe
gattttgcagatccctccctacacc

SEQ ID NO: 84889 - DNA, 25 bp, Artificial
  Probe
tgacagggaagacaggattttgcag

SEQ ID NO: 84890 - DNA, 25 bp, Artificial
  Probe
gaagacaggattttgcagatccctc

SEQ ID NO: 84891 - DNA, 25 bp, Artificial
  Probe
gcctcctgtcaggaaaacaataaaa

SEQ ID NO: 84892 - DNA, 25 bp, Artificial
  Probe
ctgacagggaagacaggattttgca

SEQ ID NO: 84893 - DNA, 25 bp, Artificial
  Probe
tgcctcctgtcaggaaaacaataaa

SEQ ID NO: 84894 - DNA, 25 bp, Artificial
  Probe
ttgcctcctgtcaggaaaacaataa

SEQ ID NO: 84895 - DNA, 25 bp, Artificial
  Probe
cttgcctcctgtcaggaaaacaata

SEQ ID NO: 84896 - DNA, 25 bp, Artificial
  Probe
aatgcgagagattcatcaccttata

SEQ ID NO: 84897 - DNA, 25 bp, Artificial
  Probe
atctctcatgtctcatctagcgatc

SEQ ID NO: 84898 - DNA, 25 bp, Artificial
  Probe
tagagaatcttaacaactggctgaa

SEQ ID NO: 84899 - DNA, 25 bp, Artificial
  Probe
atagagaatcttaacaactggctga

SEQ ID NO: 84900 - DNA, 25 bp, Artificial
  Probe
catctctcatgtctcatctagcgat

SEQ ID NO: 84901 - DNA, 25 bp, Artificial
  Probe
agagaatcttaacaactggctgaag

SEQ ID NO: 84902 - DNA, 25 bp, Artificial
  Probe
ctctcatgtctcatctagcgatcag

SEQ ID NO: 84903 - DNA, 25 bp, Artificial
  Probe
aatgattcacatcctctcaagttag

SEQ ID NO: 84904 - DNA, 25 bp, Artificial
  Probe
gcgagagattcatcaccttataaca

SEQ ID NO: 84905 - DNA, 25 bp, Artificial
  Probe
tgcgagagattcatcaccttataac

SEQ ID NO: 84906 - DNA, 25 bp, Artificial
  Probe
cgagagattcatcaccttataacac

SEQ ID NO: 84907 - DNA, 25 bp, Artificial
  Probe
atgcgagagattcatcaccttataa

SEQ ID NO: 84908 - DNA, 25 bp, Artificial
  Probe
tatagagaatcttaacaactggctg

SEQ ID NO: 84909 - DNA, 25 bp, Artificial
  Probe
atgattcacatcctctcaagttagg

SEQ ID NO: 84910 - DNA, 25 bp, Artificial
  Probe
tctctcatgtctcatctagcgatca

SEQ ID NO: 84911 - DNA, 25 bp, Artificial
  Probe
gaatgattcacatcctctcaagtta

SEQ ID NO: 84912 - DNA, 25 bp, Artificial
  Probe
agagattcatcaccttataacacct

SEQ ID NO: 84913 - DNA, 25 bp, Artificial
  Probe
gagagattcatcaccttataacacc

SEQ ID NO: 84914 - DNA, 25 bp, Artificial
  Probe
gcaactaagtagtatatgtgttcct

SEQ ID NO: 84915 - DNA, 25 bp, Artificial
  Probe
ggaatgattcacatcctctcaagtt

SEQ ID NO: 84916 - DNA, 25 bp, Artificial
  Probe
gagattcatcaccttataacacctt

SEQ ID NO: 84917 - DNA, 25 bp, Artificial
  Probe
gagaatcttaacaactggctgaagc

SEQ ID NO: 84918 - DNA, 25 bp, Artificial
  Probe
agtagtatatgtgttcctagaatgc

SEQ ID NO: 84919 - DNA, 25 bp, Artificial
  Probe
gtggaatgattcacatcctctcaag

SEQ ID NO: 84920 - DNA, 25 bp, Artificial
  Probe
gtatatgtgttcctagaatgcagct

SEQ ID NO: 84921 - DNA, 25 bp, Artificial
  Probe
agtatatgtgttcctagaatgcagc

SEQ ID NO: 84922 - DNA, 25 bp, Artificial
  Probe
aaatgcgagagattcatcaccttat

SEQ ID NO: 84923 - DNA, 25 bp, Artificial
  Probe
tggaatgattcacatcctctcaagt

SEQ ID NO: 84924 - DNA, 25 bp, Artificial
  Probe
cctatagagaatcttaacaactggc

SEQ ID NO: 84925 - DNA, 25 bp, Artificial
  Probe
caaatgcgagagattcatcacctta

SEQ ID NO: 84926 - DNA, 25 bp, Artificial
  Probe
gaatcttaacaactggctgaagctc

SEQ ID NO: 84927 - DNA, 25 bp, Artificial
  Probe
tgcaactaagtagtatatgtgttcc

SEQ ID NO: 84928 - DNA, 25 bp, Artificial
  Probe
aatcttaacaactggctgaagctct

SEQ ID NO: 84929 - DNA, 25 bp, Artificial
  Probe
agaatcttaacaactggctgaagct

SEQ ID NO: 84930 - DNA, 25 bp, Artificial
  Probe
gtagtatatgtgttcctagaatgca

SEQ ID NO: 84931 - DNA, 25 bp, Artificial
  Probe
ctatagagaatcttaacaactggct

SEQ ID NO: 84932 - DNA, 25 bp, Artificial
  Probe
atctgtagatcgttagtccgacatc

SEQ ID NO: 84933 - DNA, 25 bp, Artificial
  Probe
tctcatgtctcatctagcgatcagc

SEQ ID NO: 84934 - DNA, 25 bp, Artificial
  Probe
tagtatatgtgttcctagaatgcag

SEQ ID NO: 84935 - DNA, 25 bp, Artificial
  Probe
gtagatcgttagtccgacatctctc

SEQ ID NO: 84936 - DNA, 25 bp, Artificial
  Probe
ttcattaagaagctattagggtggg

SEQ ID NO: 84937 - DNA, 25 bp, Artificial
  Probe
atcttaacaactggctgaagctctc

SEQ ID NO: 84938 - DNA, 25 bp, Artificial
  Probe
caaatactaccaaactggcattgag

SEQ ID NO: 84939 - DNA, 25 bp, Artificial
  Probe
tagatcgttagtccgacatctctca

SEQ ID NO: 84940 - DNA, 25 bp, Artificial
  Probe
ctgtagatcgttagtccgacatctc

SEQ ID NO: 84941 - DNA, 25 bp, Artificial
  Probe
tctcatcctcatcctcaagaagttc

SEQ ID NO: 84942 - DNA, 25 bp, Artificial
  Probe
ctctcatcctcatcctcaagaagtt

SEQ ID NO: 84943 - DNA, 25 bp, Artificial
  Probe
ctccagtcttaatcctccatccttg

SEQ ID NO: 84944 - DNA, 25 bp, Artificial
  Probe
gtctctcatcctcatcctcaagaag

SEQ ID NO: 84945 - DNA, 25 bp, Artificial
  Probe
tcatcctcatcctcaagaagttctc

SEQ ID NO: 84946 - DNA, 25 bp, Artificial
  Probe
ctcatcctcatcctcaagaagttct

SEQ ID NO: 84947 - DNA, 25 bp, Artificial
  Probe
tctctcatcctcatcctcaagaagt

SEQ ID NO: 84948 - DNA, 25 bp, Artificial
  Probe
tgtctctcatcctcatcctcaagaa

SEQ ID NO: 84949 - DNA, 25 bp, Artificial
  Probe
ttgtctctcatcctcatcctcaaga

SEQ ID NO: 84950 - DNA, 25 bp, Artificial
  Probe
gttgtctctcatcctcatcctcaag

SEQ ID NO: 84951 - DNA, 25 bp, Artificial
  Probe
agcagaagacaaagcagaagtaata

SEQ ID NO: 84952 - DNA, 25 bp, Artificial
  Probe
gcagaagacaaagcagaagtaatat

SEQ ID NO: 84953 - DNA, 25 bp, Artificial
  Probe
cctccagtcttaatcctccatcctt

SEQ ID NO: 84954 - DNA, 25 bp, Artificial
  Probe
cagcagaagacaaagcagaagtaat

SEQ ID NO: 84955 - DNA, 25 bp, Artificial
  Probe
catcctcatcctcaagaagttctcg

SEQ ID NO: 84956 - DNA, 25 bp, Artificial
  Probe
cactcaacattacccaaagtctcat

SEQ ID NO: 84957 - DNA, 25 bp, Artificial
  Probe
tgacctccagtcttaatcctccatc

SEQ ID NO: 84958 - DNA, 25 bp, Artificial
  Probe
actcaacattacccaaagtctcatg

SEQ ID NO: 84959 - DNA, 25 bp, Artificial
  Probe
gtgacctccagtcttaatcctccat

SEQ ID NO: 84960 - DNA, 25 bp, Artificial
  Probe
atcctcatcctcaagaagttctcga

SEQ ID NO: 84961 - DNA, 25 bp, Artificial
  Probe
tccagtcttaatcctccatccttgc

SEQ ID NO: 84962 - DNA, 25 bp, Artificial
  Probe
acctccagtcttaatcctccatcct

SEQ ID NO: 84963 - DNA, 25 bp, Artificial
  Probe
atcaccataccagcagaagacaaag

SEQ ID NO: 84964 - DNA, 25 bp, Artificial
  Probe
catgctgtgacctccagtcttaatc

SEQ ID NO: 84965 - DNA, 25 bp, Artificial
  Probe
ccactcaacattacccaaagtctca

SEQ ID NO: 84966 - DNA, 25 bp, Artificial
  Probe
ataccagcagaagacaaagcagaag

SEQ ID NO: 84967 - DNA, 25 bp, Artificial
  Probe
catcaccataccagcagaagacaaa

SEQ ID NO: 84968 - DNA, 25 bp, Artificial
  Probe
cagtcttaatcctccatccttgcac

SEQ ID NO: 84969 - DNA, 25 bp, Artificial
  Probe
gacctccagtcttaatcctccatcc

SEQ ID NO: 84970 - DNA, 25 bp, Artificial
  Probe
ccagcagaagacaaagcagaagtaa

SEQ ID NO: 84971 - DNA, 25 bp, Artificial
  Probe
cataccagcagaagacaaagcagaa

SEQ ID NO: 84972 - DNA, 25 bp, Artificial
  Probe
ctgtgacctccagtcttaatcctcc

SEQ ID NO: 84973 - DNA, 25 bp, Artificial
  Probe
gggtggggaataagacaagtatatg

SEQ ID NO: 84974 - DNA, 25 bp, Artificial
  Probe
cagaagacaaagcagaagtaatatt

SEQ ID NO: 84975 - DNA, 25 bp, Artificial
  Probe
atgctgtgacctccagtcttaatcc

SEQ ID NO: 84976 - DNA, 25 bp, Artificial
  Probe
ccatcaccataccagcagaagacaa

SEQ ID NO: 84977 - DNA, 25 bp, Artificial
  Probe
acatgctgtgacctccagtcttaat

SEQ ID NO: 84978 - DNA, 25 bp, Artificial
  Probe
ggggtggggaataagacaagtatat

SEQ ID NO: 84979 - DNA, 25 bp, Artificial
  Probe
agaagacaaagcagaagtaatattg

SEQ ID NO: 84980 - DNA, 25 bp, Artificial
  Probe
ctccatcaccataccagcagaagac

SEQ ID NO: 84981 - DNA, 25 bp, Artificial
  Probe
tgtgacctccagtcttaatcctcca

SEQ ID NO: 84982 - DNA, 25 bp, Artificial
  Probe
gctgtgacctccagtcttaatcctc

SEQ ID NO: 84983 - DNA, 25 bp, Artificial
  Probe
cactccatcaccataccagcagaag

SEQ ID NO: 84984 - DNA, 25 bp, Artificial
  Probe
agtcttaatcctccatccttgcacc

SEQ ID NO: 84985 - DNA, 25 bp, Artificial
  Probe
ccagtcttaatcctccatccttgca

SEQ ID NO: 84986 - DNA, 25 bp, Artificial
  Probe
attcaccacaatgccattcttattc

SEQ ID NO: 84987 - DNA, 25 bp, Artificial
  Probe
gattcaccacaatgccattcttatt

SEQ ID NO: 84988 - DNA, 25 bp, Artificial
  Probe
ttcaccacaatgccattcttattct

SEQ ID NO: 84989 - DNA, 25 bp, Artificial
  Probe
tcaccacaatgccattcttattctg

SEQ ID NO: 84990 - DNA, 25 bp, Artificial
  Probe
acaatgccattcttattctgtaacg

SEQ ID NO: 84991 - DNA, 25 bp, Artificial
  Probe
ccacaatgccattcttattctgtaa

SEQ ID NO: 84992 - DNA, 25 bp, Artificial
  Probe
accacaatgccattcttattctgta

SEQ ID NO: 84993 - DNA, 25 bp, Artificial
  Probe
cgattcaccacaatgccattcttat

SEQ ID NO: 84994 - DNA, 25 bp, Artificial
  Probe
cacaatgccattcttattctgtaac

SEQ ID NO: 84995 - DNA, 25 bp, Artificial
  Probe
caatgccattcttattctgtaacgt

SEQ ID NO: 84996 - DNA, 25 bp, Artificial
  Probe
aatgccattcttattctgtaacgtc

SEQ ID NO: 84997 - DNA, 25 bp, Artificial
  Probe
caccacaatgccattcttattctgt

SEQ ID NO: 84998 - DNA, 25 bp, Artificial
  Probe
caactactactcaaactcttacagc

SEQ ID NO: 84999 - DNA, 25 bp, Artificial
  Probe
gcaactactactcaaactcttacag

SEQ ID NO: 85000 - DNA, 25 bp, Artificial
  Probe
ggcttcactaaatccagaaagaatg

SEQ ID NO: 85001 - DNA, 25 bp, Artificial
  Probe
gcttcactaaatccagaaagaatgt

SEQ ID NO: 85002 - DNA, 25 bp, Artificial
  Probe
gccattcttattctgtaacgtcgat

SEQ ID NO: 85003 - DNA, 25 bp, Artificial
  Probe
ccattcttattctgtaacgtcgata

SEQ ID NO: 85004 - DNA, 25 bp, Artificial
  Probe
atgccattcttattctgtaacgtcg

SEQ ID NO: 85005 - DNA, 25 bp, Artificial
  Probe
tttctttcgttatgtttacaagtgc

SEQ ID NO: 85006 - DNA, 25 bp, Artificial
  Probe
aattccgagccagtccatttataga

SEQ ID NO: 85007 - DNA, 25 bp, Artificial
  Probe
tcactaaatccagaaagaatgttca

SEQ ID NO: 85008 - DNA, 25 bp, Artificial
  Probe
ttccgagccagtccatttatagaat

SEQ ID NO: 85009 - DNA, 25 bp, Artificial
  Probe
attccgagccagtccatttatagaa

SEQ ID NO: 85010 - DNA, 25 bp, Artificial
  Probe
cactaaatccagaaagaatgttcag

SEQ ID NO: 85011 - DNA, 25 bp, Artificial
  Probe
actaaatccagaaagaatgttcaga

SEQ ID NO: 85012 - DNA, 25 bp, Artificial
  Probe
tgccattcttattctgtaacgtcga

SEQ ID NO: 85013 - DNA, 25 bp, Artificial
  Probe
actactactcaaactcttacagctt

SEQ ID NO: 85014 - DNA, 25 bp, Artificial
  Probe
aactactactcaaactcttacagct

SEQ ID NO: 85015 - DNA, 25 bp, Artificial
  Probe
tggcttcactaaatccagaaagaat

SEQ ID NO: 85016 - DNA, 25 bp, Artificial
  Probe
tactactcaaactcttacagcttct

SEQ ID NO: 85017 - DNA, 25 bp, Artificial
  Probe
ttcactaaatccagaaagaatgttc

SEQ ID NO: 85018 - DNA, 25 bp, Artificial
  Probe
cttcactaaatccagaaagaatgtt

SEQ ID NO: 85019 - DNA, 25 bp, Artificial
  Probe
ctactactcaaactcttacagcttc

SEQ ID NO: 85020 - DNA, 25 bp, Artificial
  Probe
aatgattattcatactggctgtcga

SEQ ID NO: 85021 - DNA, 25 bp, Artificial
  Probe
cctgcaactactactcaaactctta

SEQ ID NO: 85022 - DNA, 25 bp, Artificial
  Probe
tgcaactactactcaaactcttaca

SEQ ID NO: 85023 - DNA, 25 bp, Artificial
  Probe
aaacctattccatcgactgtgaaag

SEQ ID NO: 85024 - DNA, 25 bp, Artificial
  Probe
ctaaatccagaaagaatgttcagaa

SEQ ID NO: 85025 - DNA, 25 bp, Artificial
  Probe
ctgcaactactactcaaactcttac

SEQ ID NO: 85026 - DNA, 25 bp, Artificial
  Probe
tctttcgttatgtttacaagtgcag

SEQ ID NO: 85027 - DNA, 25 bp, Artificial
  Probe
ttctttcgttatgtttacaagtgca

SEQ ID NO: 85028 - DNA, 25 bp, Artificial
  Probe
cattcttattctgtaacgtcgataa

SEQ ID NO: 85029 - DNA, 25 bp, Artificial
  Probe
ctttcgttatgtttacaagtgcagg

SEQ ID NO: 85030 - DNA, 25 bp, Artificial
  Probe
attcttattctgtaacgtcgataac

SEQ ID NO: 85031 - DNA, 25 bp, Artificial
  Probe
ataccaatatcaccagcattcctca

SEQ ID NO: 85032 - DNA, 25 bp, Artificial
  Probe
taccaatatcaccagcattcctcaa

SEQ ID NO: 85033 - DNA, 25 bp, Artificial
  Probe
gataccaatatcaccagcattcctc

SEQ ID NO: 85034 - DNA, 25 bp, Artificial
  Probe
ttacggaattacatcttgatggcaa

SEQ ID NO: 85035 - DNA, 25 bp, Artificial
  Probe
cttacggaattacatcttgatggca

SEQ ID NO: 85036 - DNA, 25 bp, Artificial
  Probe
tacggaattacatcttgatggcaac

SEQ ID NO: 85037 - DNA, 25 bp, Artificial
  Probe
gcataagtacatccaggttgtctac

SEQ ID NO: 85038 - DNA, 25 bp, Artificial
  Probe
agcataagtacatccaggttgtcta

SEQ ID NO: 85039 - DNA, 25 bp, Artificial
  Probe
ccttacggaattacatcttgatggc

SEQ ID NO: 85040 - DNA, 25 bp, Artificial
  Probe
accaatatcaccagcattcctcaag

SEQ ID NO: 85041 - DNA, 25 bp, Artificial
  Probe
cataagtacatccaggttgtctacc

SEQ ID NO: 85042 - DNA, 25 bp, Artificial
  Probe
cggaattacatcttgatggcaacaa

SEQ ID NO: 85043 - DNA, 25 bp, Artificial
  Probe
taatttggctaagttgggattgagt

SEQ ID NO: 85044 - DNA, 25 bp, Artificial
  Probe
atttggctaagttgggattgagttt

SEQ ID NO: 85045 - DNA, 25 bp, Artificial
  Probe
ataatttggctaagttgggattgag

SEQ ID NO: 85046 - DNA, 25 bp, Artificial
  Probe
ctgaataatttggctaagttgggat

SEQ ID NO: 85047 - DNA, 25 bp, Artificial
  Probe
ctgaaaggactgaataatttggcta

SEQ ID NO: 85048 - DNA, 25 bp, Artificial
  Probe
gagcataagtacatccaggttgtct

SEQ ID NO: 85049 - DNA, 25 bp, Artificial
  Probe
agagcataagtacatccaggttgtc

SEQ ID NO: 85050 - DNA, 25 bp, Artificial
  Probe
aatttggctaagttgggattgagtt

SEQ ID NO: 85051 - DNA, 25 bp, Artificial
  Probe
aataatttggctaagttgggattga

SEQ ID NO: 85052 - DNA, 25 bp, Artificial
  Probe
tgaataatttggctaagttgggatt

SEQ ID NO: 85053 - DNA, 25 bp, Artificial
  Probe
gaataatttggctaagttgggattg

SEQ ID NO: 85054 - DNA, 25 bp, Artificial
  Probe
gactgaataatttggctaagttggg

SEQ ID NO: 85055 - DNA, 25 bp, Artificial
  Probe
ggactgaataatttggctaagttgg

SEQ ID NO: 85056 - DNA, 25 bp, Artificial
  Probe
actgaataatttggctaagttggga

SEQ ID NO: 85057 - DNA, 25 bp, Artificial
  Probe
tgaaaggactgaataatttggctaa

SEQ ID NO: 85058 - DNA, 25 bp, Artificial
  Probe
cagagcataagtacatccaggttgt

SEQ ID NO: 85059 - DNA, 25 bp, Artificial
  Probe
tttggctaagttgggattgagtttc

SEQ ID NO: 85060 - DNA, 25 bp, Artificial
  Probe
aggactgaataatttggctaagttg

SEQ ID NO: 85061 - DNA, 25 bp, Artificial
  Probe
gaaaggactgaataatttggctaag

SEQ ID NO: 85062 - DNA, 25 bp, Artificial
  Probe
ggaattacatcttgatggcaacaaa

SEQ ID NO: 85063 - DNA, 25 bp, Artificial
  Probe
aaggactgaataatttggctaagtt

SEQ ID NO: 85064 - DNA, 25 bp, Artificial
  Probe
aaaggactgaataatttggctaagt

SEQ ID NO: 85065 - DNA, 25 bp, Artificial
  Probe
ccaatatcaccagcattcctcaagg

SEQ ID NO: 85066 - DNA, 25 bp, Artificial
  Probe
cccttacggaattacatcttgatgg

SEQ ID NO: 85067 - DNA, 25 bp, Artificial
  Probe
acggaattacatcttgatggcaaca

SEQ ID NO: 85068 - DNA, 25 bp, Artificial
  Probe
tagcctgaaaggactgaataatttg

SEQ ID NO: 85069 - DNA, 25 bp, Artificial
  Probe
aatatcaccagcattcctcaaggtc

SEQ ID NO: 85070 - DNA, 25 bp, Artificial
  Probe
gcagagcataagtacatccaggttg

SEQ ID NO: 85071 - DNA, 25 bp, Artificial
  Probe
cctgaaaggactgaataatttggct

SEQ ID NO: 85072 - DNA, 25 bp, Artificial
  Probe
agcctgaaaggactgaataatttgg

SEQ ID NO: 85073 - DNA, 25 bp, Artificial
  Probe
catccgcattgctgataccaatatc

SEQ ID NO: 85074 - DNA, 25 bp, Artificial
  Probe
tacatccgcattgctgataccaata

SEQ ID NO: 85075 - DNA, 25 bp, Artificial
  Probe
caatatcaccagcattcctcaaggt

SEQ ID NO: 85076 - DNA, 25 bp, Artificial
  Probe
cagaaagagacagtcaatggatagc

SEQ ID NO: 85077 - DNA, 25 bp, Artificial
  Probe
gcagaaagagacagtcaatggatag

SEQ ID NO: 85078 - DNA, 25 bp, Artificial
  Probe
gaagcaagaaggcagagagagattc

SEQ ID NO: 85079 - DNA, 25 bp, Artificial
  Probe
agaagcaagaaggcagagagagatt

SEQ ID NO: 85080 - DNA, 25 bp, Artificial
  Probe
aagagacagtcaatggatagcttgg

SEQ ID NO: 85081 - DNA, 25 bp, Artificial
  Probe
ggcagaaagagacagtcaatggata

SEQ ID NO: 85082 - DNA, 25 bp, Artificial
  Probe
gagaagcaagaaggcagagagagat

SEQ ID NO: 85083 - DNA, 25 bp, Artificial
  Probe
gaaagagacagtcaatggatagctt

SEQ ID NO: 85084 - DNA, 25 bp, Artificial
  Probe
agaaagagacagtcaatggatagct

SEQ ID NO: 85085 - DNA, 25 bp, Artificial
  Probe
aagaaggcagagagagattccgaag

SEQ ID NO: 85086 - DNA, 25 bp, Artificial
  Probe
cttaatcctcaggttacaggcaaac

SEQ ID NO: 85087 - DNA, 25 bp, Artificial
  Probe
aaagagacagtcaatggatagcttg

SEQ ID NO: 85088 - DNA, 25 bp, Artificial
  Probe
caagaaggcagagagagattccgaa

SEQ ID NO: 85089 - DNA, 25 bp, Artificial
  Probe
cttagggagcagattgtcaggtaga

SEQ ID NO: 85090 - DNA, 25 bp, Artificial
  Probe
taatcctcaggttacaggcaaacaa

SEQ ID NO: 85091 - DNA, 25 bp, Artificial
  Probe
ttaatcctcaggttacaggcaaaca

SEQ ID NO: 85092 - DNA, 25 bp, Artificial
  Probe
tgaggagacccaaggacaactattt

SEQ ID NO: 85093 - DNA, 25 bp, Artificial
  Probe
aagcaagaaggcagagagagattcc

SEQ ID NO: 85094 - DNA, 25 bp, Artificial
  Probe
ccttaatcctcaggttacaggcaaa

SEQ ID NO: 85095 - DNA, 25 bp, Artificial
  Probe
ctgaggagacccaaggacaactatt

SEQ ID NO: 85096 - DNA, 25 bp, Artificial
  Probe
aatggccttaatcctcaggttacag

SEQ ID NO: 85097 - DNA, 25 bp, Artificial
  Probe
ttagggagcagattgtcaggtagac

SEQ ID NO: 85098 - DNA, 25 bp, Artificial
  Probe
aatcctcaggttacaggcaaacaag

SEQ ID NO: 85099 - DNA, 25 bp, Artificial
  Probe
caatggccttaatcctcaggttaca

SEQ ID NO: 85100 - DNA, 25 bp, Artificial
  Probe
gaggagacccaaggacaactatttt

SEQ ID NO: 85101 - DNA, 25 bp, Artificial
  Probe
ttcgagagagaggaatgaaaccttg

SEQ ID NO: 85102 - DNA, 25 bp, Artificial
  Probe
tttcgagagagaggaatgaaacctt

SEQ ID NO: 85103 - DNA, 25 bp, Artificial
  Probe
aaaatctacaggcacccttttcttc

SEQ ID NO: 85104 - DNA, 25 bp, Artificial
  Probe
ccaatggccttaatcctcaggttac

SEQ ID NO: 85105 - DNA, 25 bp, Artificial
  Probe
caaaatctacaggcacccttttctt

SEQ ID NO: 85106 - DNA, 25 bp, Artificial
  Probe
gatagcttgggtggattgacagttg

SEQ ID NO: 85107 - DNA, 25 bp, Artificial
  Probe
tagggagcagattgtcaggtagact

SEQ ID NO: 85108 - DNA, 25 bp, Artificial
  Probe
agtcaatggatagcttgggtggatt

SEQ ID NO: 85109 - DNA, 25 bp, Artificial
  Probe
aatggatagcttgggtggattgaca

SEQ ID NO: 85110 - DNA, 25 bp, Artificial
  Probe
gggcagaaagagacagtcaatggat

SEQ ID NO: 85111 - DNA, 25 bp, Artificial
  Probe
gagagagaggaatgaaaccttgcag

SEQ ID NO: 85112 - DNA, 25 bp, Artificial
  Probe
agagacagtcaatggatagcttggg

SEQ ID NO: 85113 - DNA, 25 bp, Artificial
  Probe
gagacagtcaatggatagcttgggt

SEQ ID NO: 85114 - DNA, 25 bp, Artificial
  Probe
atggccttaatcctcaggttacagg

SEQ ID NO: 85115 - DNA, 25 bp, Artificial
  Probe
aaatctacaggcacccttttcttcc

SEQ ID NO: 85116 - DNA, 25 bp, Artificial
  Probe
atggatagcttgggtggattgacag

SEQ ID NO: 85117 - DNA, 25 bp, Artificial
  Probe
agacagtcaatggatagcttgggtg

SEQ ID NO: 85118 - DNA, 25 bp, Artificial
  Probe
cagtcaatggatagcttgggtggat

SEQ ID NO: 85119 - DNA, 25 bp, Artificial
  Probe
caatggatagcttgggtggattgac

SEQ ID NO: 85120 - DNA, 25 bp, Artificial
  Probe
gtcaatggatagcttgggtggattg

SEQ ID NO: 85121 - DNA, 25 bp, Artificial
  Probe
catagacttagggctagactagagg

SEQ ID NO: 85122 - DNA, 25 bp, Artificial
  Probe
gccagttgacatctatttcacaatt

SEQ ID NO: 85123 - DNA, 25 bp, Artificial
  Probe
atctttacacttgacttgattgggc

SEQ ID NO: 85124 - DNA, 25 bp, Artificial
  Probe
gcatagacttagggctagactagag

SEQ ID NO: 85125 - DNA, 25 bp, Artificial
  Probe
atagacttagggctagactagaggg

SEQ ID NO: 85126 - DNA, 25 bp, Artificial
  Probe
gggtctgagataatctttacacttg

SEQ ID NO: 85127 - DNA, 25 bp, Artificial
  Probe
agggtctgagataatctttacactt

SEQ ID NO: 85128 - DNA, 25 bp, Artificial
  Probe
acagggtctgagataatctttacac

SEQ ID NO: 85129 - DNA, 25 bp, Artificial
  Probe
cacagggtctgagataatctttaca

SEQ ID NO: 85130 - DNA, 25 bp, Artificial
  Probe
acacagggtctgagataatctttac

SEQ ID NO: 85131 - DNA, 25 bp, Artificial
  Probe
aaacacagggtctgagataatcttt

SEQ ID NO: 85132 - DNA, 25 bp, Artificial
  Probe
ctttacacttgacttgattgggcag

SEQ ID NO: 85133 - DNA, 25 bp, Artificial
  Probe
cagggtctgagataatctttacact

SEQ ID NO: 85134 - DNA, 25 bp, Artificial
  Probe
caaacacagggtctgagataatctt

SEQ ID NO: 85135 - DNA, 25 bp, Artificial
  Probe
aacacagggtctgagataatcttta

SEQ ID NO: 85136 - DNA, 25 bp, Artificial
  Probe
ggcatagacttagggctagactaga

SEQ ID NO: 85137 - DNA, 25 bp, Artificial
  Probe
ggtctgagataatctttacacttga

SEQ ID NO: 85138 - DNA, 25 bp, Artificial
  Probe
tctttacacttgacttgattgggca

SEQ ID NO: 85139 - DNA, 25 bp, Artificial
  Probe
ccacttcaatagctttcgtcaacta

SEQ ID NO: 85140 - DNA, 25 bp, Artificial
  Probe
aatctttacacttgacttgattggg

SEQ ID NO: 85141 - DNA, 25 bp, Artificial
  Probe
tggcatagacttagggctagactag

SEQ ID NO: 85142 - DNA, 25 bp, Artificial
  Probe
gtggcatagacttagggctagacta

SEQ ID NO: 85143 - DNA, 25 bp, Artificial
  Probe
cacttcaatagctttcgtcaactat

SEQ ID NO: 85144 - DNA, 25 bp, Artificial
  Probe
gtcccagttggatacagtatgacat

SEQ ID NO: 85145 - DNA, 25 bp, Artificial
  Probe
taaggacatttccacagagagtcac

SEQ ID NO: 85146 - DNA, 25 bp, Artificial
  Probe
gtaaggacatttccacagagagtca

SEQ ID NO: 85147 - DNA, 25 bp, Artificial
  Probe
tgtaaggacatttccacagagagtc

SEQ ID NO: 85148 - DNA, 25 bp, Artificial
  Probe
cttcacttcagatgtgccattggaa

SEQ ID NO: 85149 - DNA, 25 bp, Artificial
  Probe
tttacacttgacttgattgggcagt

SEQ ID NO: 85150 - DNA, 25 bp, Artificial
  Probe
tctgagataatctttacacttgact

SEQ ID NO: 85151 - DNA, 25 bp, Artificial
  Probe
ttcacttcagatgtgccattggaac

SEQ ID NO: 85152 - DNA, 25 bp, Artificial
  Probe
tcccagttggatacagtatgacatg

SEQ ID NO: 85153 - DNA, 25 bp, Artificial
  Probe
gcaaacacagggtctgagataatct

SEQ ID NO: 85154 - DNA, 25 bp, Artificial
  Probe
acttcagatgtgccattggaactct

SEQ ID NO: 85155 - DNA, 25 bp, Artificial
  Probe
ccccaattaacaaaaggagaaaact

SEQ ID NO: 85156 - DNA, 25 bp, Artificial
  Probe
tgagataatctttacacttgacttg

SEQ ID NO: 85157 - DNA, 25 bp, Artificial
  Probe
gtctgagataatctttacacttgac

SEQ ID NO: 85158 - DNA, 25 bp, Artificial
  Probe
ttcgtcaactattttgtcacagaag

SEQ ID NO: 85159 - DNA, 25 bp, Artificial
  Probe
ctttcgtcaactattttgtcacaga

SEQ ID NO: 85160 - DNA, 25 bp, Artificial
  Probe
tttcgtcaactattttgtcacagaa

SEQ ID NO: 85161 - DNA, 25 bp, Artificial
  Probe
gttggatacagtatgacatgggcag

SEQ ID NO: 85162 - DNA, 25 bp, Artificial
  Probe
cagttggatacagtatgacatgggc

SEQ ID NO: 85163 - DNA, 25 bp, Artificial
  Probe
cacttcagatgtgccattggaactc

SEQ ID NO: 85164 - DNA, 25 bp, Artificial
  Probe
taatctttacacttgacttgattgg

SEQ ID NO: 85165 - DNA, 25 bp, Artificial
  Probe
gagataatctttacacttgacttga

SEQ ID NO: 85166 - DNA, 25 bp, Artificial
  Probe
aacgtgtatcttactgagaagttcc

SEQ ID NO: 85167 - DNA, 25 bp, Artificial
  Probe
caaacgtgtatcttactgagaagtt

SEQ ID NO: 85168 - DNA, 25 bp, Artificial
  Probe
acaaacgtgtatcttactgagaagt

SEQ ID NO: 85169 - DNA, 25 bp, Artificial
  Probe
aaacgtgtatcttactgagaagttc

SEQ ID NO: 85170 - DNA, 25 bp, Artificial
  Probe
aaagcagaccctcaagaaacagttt

SEQ ID NO: 85171 - DNA, 25 bp, Artificial
  Probe
cacaaacgtgtatcttactgagaag

SEQ ID NO: 85172 - DNA, 25 bp, Artificial
  Probe
acattaaaaccatcgtccaaataca

SEQ ID NO: 85173 - DNA, 25 bp, Artificial
  Probe
acgtgtatcttactgagaagttccc

SEQ ID NO: 85174 - DNA, 25 bp, Artificial
  Probe
caaagcagaccctcaagaaacagtt

SEQ ID NO: 85175 - DNA, 25 bp, Artificial
  Probe
gcagaccctcaagaaacagtttgta

SEQ ID NO: 85176 - DNA, 25 bp, Artificial
  Probe
aagcagaccctcaagaaacagtttg

SEQ ID NO: 85177 - DNA, 25 bp, Artificial
  Probe
gacattaaaaccatcgtccaaatac

SEQ ID NO: 85178 - DNA, 25 bp, Artificial
  Probe
tcaaggatgtataaagttggaaaac

SEQ ID NO: 85179 - DNA, 25 bp, Artificial
  Probe
agcagaccctcaagaaacagtttgt

SEQ ID NO: 85180 - DNA, 25 bp, Artificial
  Probe
ccactggatcatcgatacggactac

SEQ ID NO: 85181 - DNA, 25 bp, Artificial
  Probe
acacaaacgtgtatcttactgagaa

SEQ ID NO: 85182 - DNA, 25 bp, Artificial
  Probe
ttcacacaaacgtgtatcttactga

SEQ ID NO: 85183 - DNA, 25 bp, Artificial
  Probe
attcacacaaacgtgtatcttactg

SEQ ID NO: 85184 - DNA, 25 bp, Artificial
  Probe
cattcacacaaacgtgtatcttact

SEQ ID NO: 85185 - DNA, 25 bp, Artificial
  Probe
cacacaaacgtgtatcttactgaga

SEQ ID NO: 85186 - DNA, 25 bp, Artificial
  Probe
tcacacaaacgtgtatcttactgag

SEQ ID NO: 85187 - DNA, 25 bp, Artificial
  Probe
cactggatcatcgatacggactacg

SEQ ID NO: 85188 - DNA, 25 bp, Artificial
  Probe
accactggatcatcgatacggacta

SEQ ID NO: 85189 - DNA, 25 bp, Artificial
  Probe
caaggatgtataaagttggaaaact

SEQ ID NO: 85190 - DNA, 25 bp, Artificial
  Probe
gaggaaacgatgaccactggatcat

SEQ ID NO: 85191 - DNA, 25 bp, Artificial
  Probe
tgcagacagctactcctttgtgttt

SEQ ID NO: 85192 - DNA, 25 bp, Artificial
  Probe
gcagacagctactcctttgtgtttt

SEQ ID NO: 85193 - DNA, 25 bp, Artificial
  Probe
ctggatcatcgatacggactacgac

SEQ ID NO: 85194 - DNA, 25 bp, Artificial
  Probe
gatcatcgatacggactacgacacc

SEQ ID NO: 85195 - DNA, 25 bp, Artificial
  Probe
ggatcatcgatacggactacgacac

SEQ ID NO: 85196 - DNA, 25 bp, Artificial
  Probe
actggatcatcgatacggactacga

SEQ ID NO: 85197 - DNA, 25 bp, Artificial
  Probe
catcgatacggactacgacaccttc

SEQ ID NO: 85198 - DNA, 25 bp, Artificial
  Probe
atcatcgatacggactacgacacct

SEQ ID NO: 85199 - DNA, 25 bp, Artificial
  Probe
tggatcatcgatacggactacgaca

SEQ ID NO: 85200 - DNA, 25 bp, Artificial
  Probe
tcatcgatacggactacgacacctt

SEQ ID NO: 85201 - DNA, 25 bp, Artificial
  Probe
atgaccactggatcatcgatacgga

SEQ ID NO: 85202 - DNA, 25 bp, Artificial
  Probe
ggacattaaaaccatcgtccaaata

SEQ ID NO: 85203 - DNA, 25 bp, Artificial
  Probe
aagatgaagtactggggtgtagcct

SEQ ID NO: 85204 - DNA, 25 bp, Artificial
  Probe
taggtggacattaaaaccatcgtcc

SEQ ID NO: 85205 - DNA, 25 bp, Artificial
  Probe
agatgaagtactggggtgtagcctc

SEQ ID NO: 85206 - DNA, 25 bp, Artificial
  Probe
aaggatgtataaagttggaaaactt

SEQ ID NO: 85207 - DNA, 25 bp, Artificial
  Probe
catagttaccttgataccttgagcc

SEQ ID NO: 85208 - DNA, 25 bp, Artificial
  Probe
ccatagttaccttgataccttgagc

SEQ ID NO: 85209 - DNA, 25 bp, Artificial
  Probe
gccatagttaccttgataccttgag

SEQ ID NO: 85210 - DNA, 25 bp, Artificial
  Probe
atggtgtgttaagccttgaactatg

SEQ ID NO: 85211 - DNA, 25 bp, Artificial
  Probe
tctgccattactcttacagtctgaa

SEQ ID NO: 85212 - DNA, 25 bp, Artificial
  Probe
catggtgtgttaagccttgaactat

SEQ ID NO: 85213 - DNA, 25 bp, Artificial
  Probe
gtctgccattactcttacagtctga

SEQ ID NO: 85214 - DNA, 25 bp, Artificial
  Probe
cccactttcccttctattctctcta

SEQ ID NO: 85215 - DNA, 25 bp, Artificial
  Probe
ccactttcccttctattctctctaa

SEQ ID NO: 85216 - DNA, 25 bp, Artificial
  Probe
gaaaggtcacagaaaggttagcaat

SEQ ID NO: 85217 - DNA, 25 bp, Artificial
  Probe
atagttaccttgataccttgagccc

SEQ ID NO: 85218 - DNA, 25 bp, Artificial
  Probe
ttactcttacagtctgaaagcatca

SEQ ID NO: 85219 - DNA, 25 bp, Artificial
  Probe
aaaggtcacagaaaggttagcaatg

SEQ ID NO: 85220 - DNA, 25 bp, Artificial
  Probe
ccattactcttacagtctgaaagca

SEQ ID NO: 85221 - DNA, 25 bp, Artificial
  Probe
tgccattactcttacagtctgaaag

SEQ ID NO: 85222 - DNA, 25 bp, Artificial
  Probe
aactatcctgtggtctccattgaag

SEQ ID NO: 85223 - DNA, 25 bp, Artificial
  Probe
gaactatcctgtggtctccattgaa

SEQ ID NO: 85224 - DNA, 25 bp, Artificial
  Probe
gtcacagaaaggttagcaatggttt

SEQ ID NO: 85225 - DNA, 25 bp, Artificial
  Probe
cattactcttacagtctgaaagcat

SEQ ID NO: 85226 - DNA, 25 bp, Artificial
  Probe
atgaccaccactattaaagtctgaa

SEQ ID NO: 85227 - DNA, 25 bp, Artificial
  Probe
aatgaccaccactattaaagtctga

SEQ ID NO: 85228 - DNA, 25 bp, Artificial
  Probe
gttaagccttgaactatgcacagag

SEQ ID NO: 85229 - DNA, 25 bp, Artificial
  Probe
ctgccattactcttacagtctgaaa

SEQ ID NO: 85230 - DNA, 25 bp, Artificial
  Probe
ctgtctcctactcttcctcctctct

SEQ ID NO: 85231 - DNA, 25 bp, Artificial
  Probe
attactcttacagtctgaaagcatc

SEQ ID NO: 85232 - DNA, 25 bp, Artificial
  Probe
cgtctgccattactcttacagtctg

SEQ ID NO: 85233 - DNA, 25 bp, Artificial
  Probe
gtcgtctgccattactcttacagtc

SEQ ID NO: 85234 - DNA, 25 bp, Artificial
  Probe
cagtcgtctgccattactcttacag

SEQ ID NO: 85235 - DNA, 25 bp, Artificial
  Probe
gtcagtcgtctgccattactcttac

SEQ ID NO: 85236 - DNA, 25 bp, Artificial
  Probe
tcgtctgccattactcttacagtct

SEQ ID NO: 85237 - DNA, 25 bp, Artificial
  Probe
gccattactcttacagtctgaaagc

SEQ ID NO: 85238 - DNA, 25 bp, Artificial
  Probe
atgggaaaggtcacagaaaggttag

SEQ ID NO: 85239 - DNA, 25 bp, Artificial
  Probe
tggtgtgttaagccttgaactatgc

SEQ ID NO: 85240 - DNA, 25 bp, Artificial
  Probe
actatcctgtggtctccattgaaga

SEQ ID NO: 85241 - DNA, 25 bp, Artificial
  Probe
tgtctcctactcttcctcctctctg

SEQ ID NO: 85242 - DNA, 25 bp, Artificial
  Probe
cactttcccttctattctctctaat

SEQ ID NO: 85243 - DNA, 25 bp, Artificial
  Probe
agtcgtctgccattactcttacagt

SEQ ID NO: 85244 - DNA, 25 bp, Artificial
  Probe
tcagtcgtctgccattactcttaca

SEQ ID NO: 85245 - DNA, 25 bp, Artificial
  Probe
tgtcagtcgtctgccattactctta

SEQ ID NO: 85246 - DNA, 25 bp, Artificial
  Probe
actttcccttctattctctctaatc

SEQ ID NO: 85247 - DNA, 25 bp, Artificial
  Probe
ggaacatcatctcattctcctggag

SEQ ID NO: 85248 - DNA, 25 bp, Artificial
  Probe
tgttaagccttgaactatgcacaga

SEQ ID NO: 85249 - DNA, 25 bp, Artificial
  Probe
gaacatcatctcattctcctggagc

SEQ ID NO: 85250 - DNA, 25 bp, Artificial
  Probe
ctttcccttctattctctctaatct

SEQ ID NO: 85251 - DNA, 25 bp, Artificial
  Probe
gtgttaagccttgaactatgcacag

SEQ ID NO: 85252 - DNA, 25 bp, Artificial
  Probe
ttagtaagttatgtgttagccttgg

SEQ ID NO: 85253 - DNA, 25 bp, Artificial
  Probe
tagtaagttatgtgttagccttggc

SEQ ID NO: 85254 - DNA, 25 bp, Artificial
  Probe
tctggcttagtaagttatgtgttag

SEQ ID NO: 85255 - DNA, 25 bp, Artificial
  Probe
ttctggcttagtaagttatgtgtta

SEQ ID NO: 85256 - DNA, 25 bp, Artificial
  Probe
cttagtaagttatgtgttagccttg

SEQ ID NO: 85257 - DNA, 25 bp, Artificial
  Probe
taaggaacagaggtatcatgtatgt

SEQ ID NO: 85258 - DNA, 25 bp, Artificial
  Probe
aagtctgtgtataagcaaagccata

SEQ ID NO: 85259 - DNA, 25 bp, Artificial
  Probe
tcattatcctttctccatcatcacc

SEQ ID NO: 85260 - DNA, 25 bp, Artificial
  Probe
cgtctttcattatcctttctccatc

SEQ ID NO: 85261 - DNA, 25 bp, Artificial
  Probe
aaagaagtctgtgtataagcaaagc

SEQ ID NO: 85262 - DNA, 25 bp, Artificial
  Probe
tggaaagaagtctgtgtataagcaa

SEQ ID NO: 85263 - DNA, 25 bp, Artificial
  Probe
tggtggaaagaagtctgtgtataag

SEQ ID NO: 85264 - DNA, 25 bp, Artificial
  Probe
taactgcgtctttcattatcctttc

SEQ ID NO: 85265 - DNA, 25 bp, Artificial
  Probe
gtggtggaaagaagtctgtgtataa

SEQ ID NO: 85266 - DNA, 25 bp, Artificial
  Probe
aactgcgtctttcattatcctttct

SEQ ID NO: 85267 - DNA, 25 bp, Artificial
  Probe
ggaaagaagtctgtgtataagcaaa

SEQ ID NO: 85268 - DNA, 25 bp, Artificial
  Probe
ttctaaggaacagaggtatcatgta

SEQ ID NO: 85269 - DNA, 25 bp, Artificial
  Probe
gtggaaagaagtctgtgtataagca

SEQ ID NO: 85270 - DNA, 25 bp, Artificial
  Probe
ttcatctgtgactgtctcgatctta

SEQ ID NO: 85271 - DNA, 25 bp, Artificial
  Probe
ctaaggaacagaggtatcatgtatg

SEQ ID NO: 85272 - DNA, 25 bp, Artificial
  Probe
actgcgtctttcattatcctttctc

SEQ ID NO: 85273 - DNA, 25 bp, Artificial
  Probe
tcataactgcgtctttcattatcct

SEQ ID NO: 85274 - DNA, 25 bp, Artificial
  Probe
ctcataactgcgtctttcattatcc

SEQ ID NO: 85275 - DNA, 25 bp, Artificial
  Probe
ggttctcaaggcaatttcatcttaa

SEQ ID NO: 85276 - DNA, 25 bp, Artificial
  Probe
gcgtctttcattatcctttctccat

SEQ ID NO: 85277 - DNA, 25 bp, Artificial
  Probe
gctcataactgcgtctttcattatc

SEQ ID NO: 85278 - DNA, 25 bp, Artificial
  Probe
cataactgcgtctttcattatcctt

SEQ ID NO: 85279 - DNA, 25 bp, Artificial
  Probe
tctaaggaacagaggtatcatgtat

SEQ ID NO: 85280 - DNA, 25 bp, Artificial
  Probe
cattatcctttctccatcatcaccg

SEQ ID NO: 85281 - DNA, 25 bp, Artificial
  Probe
gttcaaacaagaaacaaatcccaaa

SEQ ID NO: 85282 - DNA, 25 bp, Artificial
  Probe
gaagtctgtgtataagcaaagccat

SEQ ID NO: 85283 - DNA, 25 bp, Artificial
  Probe
tggttctcaaggcaatttcatctta

SEQ ID NO: 85284 - DNA, 25 bp, Artificial
  Probe
aagaagtctgtgtataagcaaagcc

SEQ ID NO: 85285 - DNA, 25 bp, Artificial
  Probe
ttcattatcctttctccatcatcac

SEQ ID NO: 85286 - DNA, 25 bp, Artificial
  Probe
gtctttcattatcctttctccatca

SEQ ID NO: 85287 - DNA, 25 bp, Artificial
  Probe
ggtggaaagaagtctgtgtataagc

SEQ ID NO: 85288 - DNA, 25 bp, Artificial
  Probe
attcatctgtgactgtctcgatctt

SEQ ID NO: 85289 - DNA, 25 bp, Artificial
  Probe
aattcatctgtgactgtctcgatct

SEQ ID NO: 85290 - DNA, 25 bp, Artificial
  Probe
ctggcttagtaagttatgtgttagc

SEQ ID NO: 85291 - DNA, 25 bp, Artificial
  Probe
gttaaattcatctgtgactgtctcg

SEQ ID NO: 85292 - DNA, 25 bp, Artificial
  Probe
ataactgcgtctttcattatccttt

SEQ ID NO: 85293 - DNA, 25 bp, Artificial
  Probe
ctgcgtctttcattatcctttctcc

SEQ ID NO: 85294 - DNA, 25 bp, Artificial
  Probe
atctgtgactgtctcgatcttacaa

SEQ ID NO: 85295 - DNA, 25 bp, Artificial
  Probe
tcatctgtgactgtctcgatcttac

SEQ ID NO: 85296 - DNA, 25 bp, Artificial
  Probe
tgttaaattcatctgtgactgtctc

SEQ ID NO: 85297 - DNA, 25 bp, Artificial
  Probe
ttaatggacatcttagacacagcag

SEQ ID NO: 85298 - DNA, 25 bp, Artificial
  Probe
caggtcaagaagagtatagtgccat

SEQ ID NO: 85299 - DNA, 25 bp, Artificial
  Probe
acagcaggtcaagaagagtatagtg

SEQ ID NO: 85300 - DNA, 25 bp, Artificial
  Probe
cacagcaggtcaagaagagtatagt

SEQ ID NO: 85301 - DNA, 25 bp, Artificial
  Probe
acacagcaggtcaagaagagtatag

SEQ ID NO: 85302 - DNA, 25 bp, Artificial
  Probe
gtagaagcgatgacagaatacaagc

SEQ ID NO: 85303 - DNA, 25 bp, Artificial
  Probe
taatggacatcttagacacagcagg

SEQ ID NO: 85304 - DNA, 25 bp, Artificial
  Probe
aggtcaagaagagtatagtgccatg

SEQ ID NO: 85305 - DNA, 25 bp, Artificial
  Probe
gacacagcaggtcaagaagagtata

SEQ ID NO: 85306 - DNA, 25 bp, Artificial
  Probe
gtttaatggacatcttagacacagc

SEQ ID NO: 85307 - DNA, 25 bp, Artificial
  Probe
tttaatggacatcttagacacagca

SEQ ID NO: 85308 - DNA, 25 bp, Artificial
  Probe
gtatgataccactatagaggactcc

SEQ ID NO: 85309 - DNA, 25 bp, Artificial
  Probe
acgagtatgataccactatagagga

SEQ ID NO: 85310 - DNA, 25 bp, Artificial
  Probe
tgtagaagcgatgacagaatacaag

SEQ ID NO: 85311 - DNA, 25 bp, Artificial
  Probe
cgagtatgataccactatagaggac

SEQ ID NO: 85312 - DNA, 25 bp, Artificial
  Probe
gacgagtatgataccactatagagg

SEQ ID NO: 85313 - DNA, 25 bp, Artificial
  Probe
ggacgagtatgataccactatagag

SEQ ID NO: 85314 - DNA, 25 bp, Artificial
  Probe
tagacacagcaggtcaagaagagta

SEQ ID NO: 85315 - DNA, 25 bp, Artificial
  Probe
gataccactatagaggactcctacc

SEQ ID NO: 85316 - DNA, 25 bp, Artificial
  Probe
tgataccactatagaggactcctac

SEQ ID NO: 85317 - DNA, 25 bp, Artificial
  Probe
cttagacacagcaggtcaagaagag

SEQ ID NO: 85318 - DNA, 25 bp, Artificial
  Probe
atgataccactatagaggactccta

SEQ ID NO: 85319 - DNA, 25 bp, Artificial
  Probe
tatgataccactatagaggactcct

SEQ ID NO: 85320 - DNA, 25 bp, Artificial
  Probe
tgtttaatggacatcttagacacag

SEQ ID NO: 85321 - DNA, 25 bp, Artificial
  Probe
tggacgagtatgataccactataga

SEQ ID NO: 85322 - DNA, 25 bp, Artificial
  Probe
agtatgataccactatagaggactc

SEQ ID NO: 85323 - DNA, 25 bp, Artificial
  Probe
gagtatgataccactatagaggact

SEQ ID NO: 85324 - DNA, 25 bp, Artificial
  Probe
ggtcaagaagagtatagtgccatgc

SEQ ID NO: 85325 - DNA, 25 bp, Artificial
  Probe
agacacagcaggtcaagaagagtat

SEQ ID NO: 85326 - DNA, 25 bp, Artificial
  Probe
gacatcttagacacagcaggtcaag

SEQ ID NO: 85327 - DNA, 25 bp, Artificial
  Probe
aatggacatcttagacacagcaggt

SEQ ID NO: 85328 - DNA, 25 bp, Artificial
  Probe
ataccactatagaggactcctaccg

SEQ ID NO: 85329 - DNA, 25 bp, Artificial
  Probe
atcttagacacagcaggtcaagaag

SEQ ID NO: 85330 - DNA, 25 bp, Artificial
  Probe
ttagacacagcaggtcaagaagagt

SEQ ID NO: 85331 - DNA, 25 bp, Artificial
  Probe
gtcaagaagagtatagtgccatgcg

SEQ ID NO: 85332 - DNA, 25 bp, Artificial
  Probe
catcttagacacagcaggtcaagaa

SEQ ID NO: 85333 - DNA, 25 bp, Artificial
  Probe
tagaagcgatgacagaatacaagct

SEQ ID NO: 85334 - DNA, 25 bp, Artificial
  Probe
acgtgtttaatggacatcttagaca

SEQ ID NO: 85335 - DNA, 25 bp, Artificial
  Probe
gacgtgtttaatggacatcttagac

SEQ ID NO: 85336 - DNA, 25 bp, Artificial
  Probe
agacgtgtttaatggacatcttaga

SEQ ID NO: 85337 - DNA, 25 bp, Artificial
  Probe
gagacgtgtttaatggacatcttag

SEQ ID NO: 85338 - DNA, 25 bp, Artificial
  Probe
ggagacgtgtttaatggacatctta

SEQ ID NO: 85339 - DNA, 25 bp, Artificial
  Probe
tcttagacacagcaggtcaagaaga

SEQ ID NO: 85340 - DNA, 25 bp, Artificial
  Probe
atggacatcttagacacagcaggtc

SEQ ID NO: 85341 - DNA, 25 bp, Artificial
  Probe
cagcaggtcaagaagagtatagtgc

SEQ ID NO: 85342 - DNA, 25 bp, Artificial
  Probe
cgaatgtaattggaatcttcacctc

SEQ ID NO: 85343 - DNA, 25 bp, Artificial
  Probe
aatgtaattggaatcttcacctcag

SEQ ID NO: 85344 - DNA, 25 bp, Artificial
  Probe
gtaattggaatcttcacctcagagt

SEQ ID NO: 85345 - DNA, 25 bp, Artificial
  Probe
tgtaattggaatcttcacctcagag

SEQ ID NO: 85346 - DNA, 25 bp, Artificial
  Probe
atgtaattggaatcttcacctcaga

SEQ ID NO: 85347 - DNA, 25 bp, Artificial
  Probe
atattgatgagattgttctggttgg

SEQ ID NO: 85348 - DNA, 25 bp, Artificial
  Probe
gaatgtaattggaatcttcacctca

SEQ ID NO: 85349 - DNA, 25 bp, Artificial
  Probe
tattgatgagattgttctggttggc

SEQ ID NO: 85350 - DNA, 25 bp, Artificial
  Probe
ctgatattgatgagattgttctggt

SEQ ID NO: 85351 - DNA, 25 bp, Artificial
  Probe
tctgatattgatgagattgttctgg

SEQ ID NO: 85352 - DNA, 25 bp, Artificial
  Probe
tgatattgatgagattgttctggtt

SEQ ID NO: 85353 - DNA, 25 bp, Artificial
  Probe
gatattgatgagattgttctggttg

SEQ ID NO: 85354 - DNA, 25 bp, Artificial
  Probe
taattggaatcttcacctcagagtg

SEQ ID NO: 85355 - DNA, 25 bp, Artificial
  Probe
tcgaatgtaattggaatcttcacct

SEQ ID NO: 85356 - DNA, 25 bp, Artificial
  Probe
ctcgaatgtaattggaatcttcacc

SEQ ID NO: 85357 - DNA, 25 bp, Artificial
  Probe
ttctgcttgatgtgtgtcctcttac

SEQ ID NO: 85358 - DNA, 25 bp, Artificial
  Probe
gttctgcttgatgtgtgtcctctta

SEQ ID NO: 85359 - DNA, 25 bp, Artificial
  Probe
tctcgaatgtaattggaatcttcac

SEQ ID NO: 85360 - DNA, 25 bp, Artificial
  Probe
gtctcgaatgtaattggaatcttca

SEQ ID NO: 85361 - DNA, 25 bp, Artificial
  Probe
agtctcgaatgtaattggaatcttc

SEQ ID NO: 85362 - DNA, 25 bp, Artificial
  Probe
cctcttacacttggtattgaaactg

SEQ ID NO: 85363 - DNA, 25 bp, Artificial
  Probe
tcctcttacacttggtattgaaact

SEQ ID NO: 85364 - DNA, 25 bp, Artificial
  Probe
gtcctcttacacttggtattgaaac

SEQ ID NO: 85365 - DNA, 25 bp, Artificial
  Probe
aagtctcgaatgtaattggaatctt

SEQ ID NO: 85366 - DNA, 25 bp, Artificial
  Probe
agatagatgtgaatggtattcttcg

SEQ ID NO: 85367 - DNA, 25 bp, Artificial
  Probe
ccagattgaagtcacctttgagata

SEQ ID NO: 85368 - DNA, 25 bp, Artificial
  Probe
ttgaagtcacctttgagatagatgt

SEQ ID NO: 85369 - DNA, 25 bp, Artificial
  Probe
agattgaagtcacctttgagataga

SEQ ID NO: 85370 - DNA, 25 bp, Artificial
  Probe
cagattgaagtcacctttgagatag

SEQ ID NO: 85371 - DNA, 25 bp, Artificial
  Probe
aattggaatcttcacctcagagtgg

SEQ ID NO: 85372 - DNA, 25 bp, Artificial
  Probe
taagtctcgaatgtaattggaatct

SEQ ID NO: 85373 - DNA, 25 bp, Artificial
  Probe
tgtcctcttacacttggtattgaaa

SEQ ID NO: 85374 - DNA, 25 bp, Artificial
  Probe
cctttgagatagatgtgaatggtat

SEQ ID NO: 85375 - DNA, 25 bp, Artificial
  Probe
cttctgggtacatttgatctgactg

SEQ ID NO: 85376 - DNA, 25 bp, Artificial
  Probe
attgaagtcacctttgagatagatg

SEQ ID NO: 85377 - DNA, 25 bp, Artificial
  Probe
tacatttgatctgactggaatccct

SEQ ID NO: 85378 - DNA, 25 bp, Artificial
  Probe
gtacatttgatctgactggaatccc

SEQ ID NO: 85379 - DNA, 25 bp, Artificial
  Probe
ggtacatttgatctgactggaatcc

SEQ ID NO: 85380 - DNA, 25 bp, Artificial
  Probe
gggtacatttgatctgactggaatc

SEQ ID NO: 85381 - DNA, 25 bp, Artificial
  Probe
gatgtgaatggtattcttcgagtga

SEQ ID NO: 85382 - DNA, 25 bp, Artificial
  Probe
agatgtgaatggtattcttcgagtg

SEQ ID NO: 85383 - DNA, 25 bp, Artificial
  Probe
tagatgtgaatggtattcttcgagt

SEQ ID NO: 85384 - DNA, 25 bp, Artificial
  Probe
ctcttacacttggtattgaaactgt

SEQ ID NO: 85385 - DNA, 25 bp, Artificial
  Probe
atgtgaatggtattcttcgagtgac

SEQ ID NO: 85386 - DNA, 25 bp, Artificial
  Probe
gattgaagtcacctttgagatagat

SEQ ID NO: 85387 - DNA, 25 bp, Artificial
  Probe
ttctgtctgtgtgttgtgttatcat

SEQ ID NO: 85388 - DNA, 25 bp, Artificial
  Probe
tcttctgtctgtgtgttgtgttatc

SEQ ID NO: 85389 - DNA, 25 bp, Artificial
  Probe
ctcttctgtctgtgtgttgtgttat

SEQ ID NO: 85390 - DNA, 25 bp, Artificial
  Probe
cttctgtctgtgtgttgtgttatca

SEQ ID NO: 85391 - DNA, 25 bp, Artificial
  Probe
gaggtatcttactgctactcagaac

SEQ ID NO: 85392 - DNA, 25 bp, Artificial
  Probe
aggtatcttactgctactcagaact

SEQ ID NO: 85393 - DNA, 25 bp, Artificial
  Probe
tatcttactgctactcagaacttgg

SEQ ID NO: 85394 - DNA, 25 bp, Artificial
  Probe
ggtatcttactgctactcagaactt

SEQ ID NO: 85395 - DNA, 25 bp, Artificial
  Probe
tctgtctgtgtgttgtgttatcatg

SEQ ID NO: 85396 - DNA, 25 bp, Artificial
  Probe
atcttactgctactcagaacttggt

SEQ ID NO: 85397 - DNA, 25 bp, Artificial
  Probe
gtatcttactgctactcagaacttg

SEQ ID NO: 85398 - DNA, 25 bp, Artificial
  Probe
cttattccagctctgtattctccaa

SEQ ID NO: 85399 - DNA, 25 bp, Artificial
  Probe
ttattccagctctgtattctccaac

SEQ ID NO: 85400 - DNA, 25 bp, Artificial
  Probe
cctcttctgtctgtgtgttgtgtta

SEQ ID NO: 85401 - DNA, 25 bp, Artificial
  Probe
cttactgctactcagaacttggtct

SEQ ID NO: 85402 - DNA, 25 bp, Artificial
  Probe
tcttactgctactcagaacttggtc

SEQ ID NO: 85403 - DNA, 25 bp, Artificial
  Probe
ccttattccagctctgtattctcca

SEQ ID NO: 85404 - DNA, 25 bp, Artificial
  Probe
tattccagctctgtattctccaacc

SEQ ID NO: 85405 - DNA, 25 bp, Artificial
  Probe
ctgtctgtgtgttgtgttatcatgc

SEQ ID NO: 85406 - DNA, 25 bp, Artificial
  Probe
aaactgaggtatcttactgctactc

SEQ ID NO: 85407 - DNA, 25 bp, Artificial
  Probe
tcccttattccagctctgtattctc

SEQ ID NO: 85408 - DNA, 25 bp, Artificial
  Probe
gtcccttattccagctctgtattct

SEQ ID NO: 85409 - DNA, 25 bp, Artificial
  Probe
tgtctgtgtgttgtgttatcatgca

SEQ ID NO: 85410 - DNA, 25 bp, Artificial
  Probe
tgaggtatcttactgctactcagaa

SEQ ID NO: 85411 - DNA, 25 bp, Artificial
  Probe
cccttattccagctctgtattctcc

SEQ ID NO: 85412 - DNA, 25 bp, Artificial
  Probe
aactgaggtatcttactgctactca

SEQ ID NO: 85413 - DNA, 25 bp, Artificial
  Probe
ggaaaactgaggtatcttactgcta

SEQ ID NO: 85414 - DNA, 25 bp, Artificial
  Probe
gtctgtgtgttgtgttatcatgcac

SEQ ID NO: 85415 - DNA, 25 bp, Artificial
  Probe
ggtcccttattccagctctgtattc

SEQ ID NO: 85416 - DNA, 25 bp, Artificial
  Probe
aaaactgaggtatcttactgctact

SEQ ID NO: 85417 - DNA, 25 bp, Artificial
  Probe
gaaaactgaggtatcttactgctac

SEQ ID NO: 85418 - DNA, 25 bp, Artificial
  Probe
taaagttatcagactcccctcttct

SEQ ID NO: 85419 - DNA, 25 bp, Artificial
  Probe
ataaagttatcagactcccctcttc

SEQ ID NO: 85420 - DNA, 25 bp, Artificial
  Probe
aataaagttatcagactcccctctt

SEQ ID NO: 85421 - DNA, 25 bp, Artificial
  Probe
aaataaagttatcagactcccctct

SEQ ID NO: 85422 - DNA, 25 bp, Artificial
  Probe
agaaataaagttatcagactcccct

SEQ ID NO: 85423 - DNA, 25 bp, Artificial
  Probe
ttactgctactcagaacttggtctg

SEQ ID NO: 85424 - DNA, 25 bp, Artificial
  Probe
gaaataaagttatcagactcccctc

SEQ ID NO: 85425 - DNA, 25 bp, Artificial
  Probe
gggaaaactgaggtatcttactgct

SEQ ID NO: 85426 - DNA, 25 bp, Artificial
  Probe
ctagaaataaagttatcagactccc

SEQ ID NO: 85427 - DNA, 25 bp, Artificial
  Probe
ctgctactcagaacttggtctgtag

SEQ ID NO: 85428 - DNA, 25 bp, Artificial
  Probe
tttaaagaagaaacagcccagcctc

SEQ ID NO: 85429 - DNA, 25 bp, Artificial
  Probe
gggtcccttattccagctctgtatt

SEQ ID NO: 85430 - DNA, 25 bp, Artificial
  Probe
actgctactcagaacttggtctgta

SEQ ID NO: 85431 - DNA, 25 bp, Artificial
  Probe
tactgctactcagaacttggtctgt

SEQ ID NO: 85432 - DNA, 25 bp, Artificial
  Probe
tgaaatacacaagtaaacattcccg

SEQ ID NO: 85433 - DNA, 25 bp, Artificial
  Probe
atgaaatacacaagtaaacattccc

SEQ ID NO: 85434 - DNA, 25 bp, Artificial
  Probe
aaatacacaagtaaacattcccgga

SEQ ID NO: 85435 - DNA, 25 bp, Artificial
  Probe
gaaatacacaagtaaacattcccgg

SEQ ID NO: 85436 - DNA, 25 bp, Artificial
  Probe
aatacacaagtaaacattcccggaa

SEQ ID NO: 85437 - DNA, 25 bp, Artificial
  Probe
atacacaagtaaacattcccggaat

SEQ ID NO: 85438 - DNA, 25 bp, Artificial
  Probe
tacacaagtaaacattcccggaatt

SEQ ID NO: 85439 - DNA, 25 bp, Artificial
  Probe
acacaagtaaacattcccggaattc

SEQ ID NO: 85440 - DNA, 25 bp, Artificial
  Probe
ctgacatgcccaagactcagaagtc

SEQ ID NO: 85441 - DNA, 25 bp, Artificial
  Probe
gagcagactatgaggatgaagatta

SEQ ID NO: 85442 - DNA, 25 bp, Artificial
  Probe
attattcagatggcagcagagtatg

SEQ ID NO: 85443 - DNA, 25 bp, Artificial
  Probe
gaagagcaatggagcctataacata

SEQ ID NO: 85444 - DNA, 25 bp, Artificial
  Probe
cattgatgtggatgaagtagaggaa

SEQ ID NO: 85445 - DNA, 25 bp, Artificial
  Probe
agagcaatggagcctataacatatt

SEQ ID NO: 85446 - DNA, 25 bp, Artificial
  Probe
aagagcaatggagcctataacatat

SEQ ID NO: 85447 - DNA, 25 bp, Artificial
  Probe
gcagactatgaggatgaagattatg

SEQ ID NO: 85448 - DNA, 25 bp, Artificial
  Probe
tatggaagagcaatggagcctataa

SEQ ID NO: 85449 - DNA, 25 bp, Artificial
  Probe
cattattcagatggcagcagagtat

SEQ ID NO: 85450 - DNA, 25 bp, Artificial
  Probe
agcagactatgaggatgaagattat

SEQ ID NO: 85451 - DNA, 25 bp, Artificial
  Probe
ctatggaagagcaatggagcctata

SEQ ID NO: 85452 - DNA, 25 bp, Artificial
  Probe
ggagcagactatgaggatgaagatt

SEQ ID NO: 85453 - DNA, 25 bp, Artificial
  Probe
gactatgaggatgaagattatgacc

SEQ ID NO: 85454 - DNA, 25 bp, Artificial
  Probe
ttattcagatggcagcagagtatgt

SEQ ID NO: 85455 - DNA, 25 bp, Artificial
  Probe
tcattattcagatggcagcagagta

SEQ ID NO: 85456 - DNA, 25 bp, Artificial
  Probe
cttcattattcagatggcagcagag

SEQ ID NO: 85457 - DNA, 25 bp, Artificial
  Probe
tatcctgatgatggtctacagttct

SEQ ID NO: 85458 - DNA, 25 bp, Artificial
  Probe
ttatcctgatgatggtctacagttc

SEQ ID NO: 85459 - DNA, 25 bp, Artificial
  Probe
tattcagatggcagcagagtatgtc

SEQ ID NO: 85460 - DNA, 25 bp, Artificial
  Probe
atcctgatgatggtctacagttctt

SEQ ID NO: 85461 - DNA, 25 bp, Artificial
  Probe
gatggagcagactatgaggatgaag

SEQ ID NO: 85462 - DNA, 25 bp, Artificial
  Probe
gatgatggagcagactatgaggatg

SEQ ID NO: 85463 - DNA, 25 bp, Artificial
  Probe
gatgatgatggagcagactatgagg

SEQ ID NO: 85464 - DNA, 25 bp, Artificial
  Probe
ggatgatgatggagcagactatgag

SEQ ID NO: 85465 - DNA, 25 bp, Artificial
  Probe
atggaagagcaatggagcctataac

SEQ ID NO: 85466 - DNA, 25 bp, Artificial
  Probe
tgaggatgaagattatgacctacaa

SEQ ID NO: 85467 - DNA, 25 bp, Artificial
  Probe
ttcattattcagatggcagcagagt

SEQ ID NO: 85468 - DNA, 25 bp, Artificial
  Probe
agactatgaggatgaagattatgac

SEQ ID NO: 85469 - DNA, 25 bp, Artificial
  Probe
cagactatgaggatgaagattatga

SEQ ID NO: 85470 - DNA, 25 bp, Artificial
  Probe
tggagcagactatgaggatgaagat

SEQ ID NO: 85471 - DNA, 25 bp, Artificial
  Probe
atggagcagactatgaggatgaaga

SEQ ID NO: 85472 - DNA, 25 bp, Artificial
  Probe
atgaggatgaagattatgacctaca

SEQ ID NO: 85473 - DNA, 25 bp, Artificial
  Probe
ggaagagcaatggagcctataacat

SEQ ID NO: 85474 - DNA, 25 bp, Artificial
  Probe
atgatggagcagactatgaggatga

SEQ ID NO: 85475 - DNA, 25 bp, Artificial
  Probe
tgatgatggagcagactatgaggat

SEQ ID NO: 85476 - DNA, 25 bp, Artificial
  Probe
atgatgatggagcagactatgagga

SEQ ID NO: 85477 - DNA, 25 bp, Artificial
  Probe
actatgaggatgaagattatgacct

SEQ ID NO: 85478 - DNA, 25 bp, Artificial
  Probe
tgatggagcagactatgaggatgaa

SEQ ID NO: 85479 - DNA, 25 bp, Artificial
  Probe
tggatgatgatggagcagactatga

SEQ ID NO: 85480 - DNA, 25 bp, Artificial
  Probe
gtggatgatgatggagcagactatg

SEQ ID NO: 85481 - DNA, 25 bp, Artificial
  Probe
attgatgtggatgaagtagaggaaa

SEQ ID NO: 85482 - DNA, 25 bp, Artificial
  Probe
ttgatgtggatgaagtagaggaaac

SEQ ID NO: 85483 - DNA, 25 bp, Artificial
  Probe
tgatgatggtctacagttctttaca

SEQ ID NO: 85484 - DNA, 25 bp, Artificial
  Probe
ttcctttatcctgatgatggtctac

SEQ ID NO: 85485 - DNA, 25 bp, Artificial
  Probe
tcctttatcctgatgatggtctaca

SEQ ID NO: 85486 - DNA, 25 bp, Artificial
  Probe
ctgagtcaattagtgctggatcata

SEQ ID NO: 85487 - DNA, 25 bp, Artificial
  Probe
tgagtcaattagtgctggatcatat

SEQ ID NO: 85488 - DNA, 25 bp, Artificial
  Probe
actgagtcaattagtgctggatcat

SEQ ID NO: 85489 - DNA, 25 bp, Artificial
  Probe
aatgttctgctctttccactaattg

SEQ ID NO: 85490 - DNA, 25 bp, Artificial
  Probe
gttctgctctttccactaattgttg

SEQ ID NO: 85491 - DNA, 25 bp, Artificial
  Probe
atgttctgctctttccactaattgt

SEQ ID NO: 85492 - DNA, 25 bp, Artificial
  Probe
tgttctgctctttccactaattgtt

SEQ ID NO: 85493 - DNA, 25 bp, Artificial
  Probe
actaattgttgggagcacttcttac

SEQ ID NO: 85494 - DNA, 25 bp, Artificial
  Probe
cactaattgttgggagcacttctta

SEQ ID NO: 85495 - DNA, 25 bp, Artificial
  Probe
aattagtgctggatcatatggtcaa

SEQ ID NO: 85496 - DNA, 25 bp, Artificial
  Probe
tcaattagtgctggatcatatggtc

SEQ ID NO: 85497 - DNA, 25 bp, Artificial
  Probe
agtcaattagtgctggatcatatgg

SEQ ID NO: 85498 - DNA, 25 bp, Artificial
  Probe
gagtcaattagtgctggatcatatg

SEQ ID NO: 85499 - DNA, 25 bp, Artificial
  Probe
caattagtgctggatcatatggtca

SEQ ID NO: 85500 - DNA, 25 bp, Artificial
  Probe
gtcaattagtgctggatcatatggt

SEQ ID NO: 85501 - DNA, 25 bp, Artificial
  Probe
ctaattgttgggagcacttcttacg

SEQ ID NO: 85502 - DNA, 25 bp, Artificial
  Probe
aatcatgctaagctgagacagattc

SEQ ID NO: 85503 - DNA, 25 bp, Artificial
  Probe
gtagggaccttggtgatctatacag

SEQ ID NO: 85504 - DNA, 25 bp, Artificial
  Probe
atcatgctaagctgagacagattcc

SEQ ID NO: 85505 - DNA, 25 bp, Artificial
  Probe
cagaaagactcttgactaggtgagg

SEQ ID NO: 85506 - DNA, 25 bp, Artificial
  Probe
ccagaaagactcttgactaggtgag

SEQ ID NO: 85507 - DNA, 25 bp, Artificial
  Probe
ttctgctctttccactaattgttgg

SEQ ID NO: 85508 - DNA, 25 bp, Artificial
  Probe
attagtgctggatcatatggtcaaa

SEQ ID NO: 85509 - DNA, 25 bp, Artificial
  Probe
gaaatcatgctaagctgagacagat

SEQ ID NO: 85510 - DNA, 25 bp, Artificial
  Probe
gatcatatggtcaaactgtcaagag

SEQ ID NO: 85511 - DNA, 25 bp, Artificial
  Probe
ggatcatatggtcaaactgtcaaga

SEQ ID NO: 85512 - DNA, 25 bp, Artificial
  Probe
tggatcatatggtcaaactgtcaag

SEQ ID NO: 85513 - DNA, 25 bp, Artificial
  Probe
ctggatcatatggtcaaactgtcaa

SEQ ID NO: 85514 - DNA, 25 bp, Artificial
  Probe
ttagtgctggatcatatggtcaaac

SEQ ID NO: 85515 - DNA, 25 bp, Artificial
  Probe
atcatatggtcaaactgtcaagagc

SEQ ID NO: 85516 - DNA, 25 bp, Artificial
  Probe
aaatcatgctaagctgagacagatt

SEQ ID NO: 85517 - DNA, 25 bp, Artificial
  Probe
catgctaagctgagacagattccag

SEQ ID NO: 85518 - DNA, 25 bp, Artificial
  Probe
tagggaccttggtgatctatacagg

SEQ ID NO: 85519 - DNA, 25 bp, Artificial
  Probe
tggaccagaaagactcttgactagg

SEQ ID NO: 85520 - DNA, 25 bp, Artificial
  Probe
gaccagaaagactcttgactaggtg

SEQ ID NO: 85521 - DNA, 25 bp, Artificial
  Probe
ctggaccagaaagactcttgactag

SEQ ID NO: 85522 - DNA, 25 bp, Artificial
  Probe
taattgttgggagcacttcttacgt

SEQ ID NO: 85523 - DNA, 25 bp, Artificial
  Probe
accagaaagactcttgactaggtga

SEQ ID NO: 85524 - DNA, 25 bp, Artificial
  Probe
tcatgctaagctgagacagattcca

SEQ ID NO: 85525 - DNA, 25 bp, Artificial
  Probe
gattccagggcactgagtcaattag

SEQ ID NO: 85526 - DNA, 25 bp, Artificial
  Probe
tagtgctggatcatatggtcaaact

SEQ ID NO: 85527 - DNA, 25 bp, Artificial
  Probe
ggtagggaccttggtgatctataca

SEQ ID NO: 85528 - DNA, 25 bp, Artificial
  Probe
tggtagggaccttggtgatctatac

SEQ ID NO: 85529 - DNA, 25 bp, Artificial
  Probe
gtggtagggaccttggtgatctata

SEQ ID NO: 85530 - DNA, 25 bp, Artificial
  Probe
tttccactaattgttgggagcactt

SEQ ID NO: 85531 - DNA, 25 bp, Artificial
  Probe
tgtttataggtggttgatgaatggt

SEQ ID NO: 85532 - DNA, 25 bp, Artificial
  Probe
ctgtttataggtggttgatgaatgg

SEQ ID NO: 85533 - DNA, 25 bp, Artificial
  Probe
catttagcaactgtttataggtggt

SEQ ID NO: 85534 - DNA, 25 bp, Artificial
  Probe
actgtttataggtggttgatgaatg

SEQ ID NO: 85535 - DNA, 25 bp, Artificial
  Probe
tcatttagcaactgtttataggtgg

SEQ ID NO: 85536 - DNA, 25 bp, Artificial
  Probe
gccgttcatttagcaactgtttata

SEQ ID NO: 85537 - DNA, 25 bp, Artificial
  Probe
atttagcaactgtttataggtggtt

SEQ ID NO: 85538 - DNA, 25 bp, Artificial
  Probe
cgttcatttagcaactgtttatagg

SEQ ID NO: 85539 - DNA, 25 bp, Artificial
  Probe
ccgttcatttagcaactgtttatag

SEQ ID NO: 85540 - DNA, 25 bp, Artificial
  Probe
agccgttcatttagcaactgtttat

SEQ ID NO: 85541 - DNA, 25 bp, Artificial
  Probe
aactgtttataggtggttgatgaat

SEQ ID NO: 85542 - DNA, 25 bp, Artificial
  Probe
aagccgttcatttagcaactgttta

SEQ ID NO: 85543 - DNA, 25 bp, Artificial
  Probe
ttcatttagcaactgtttataggtg

SEQ ID NO: 85544 - DNA, 25 bp, Artificial
  Probe
gttcatttagcaactgtttataggt

SEQ ID NO: 85545 - DNA, 25 bp, Artificial
  Probe
gaagccgttcatttagcaactgttt

SEQ ID NO: 85546 - DNA, 25 bp, Artificial
  Probe
tagcaactgtttataggtggttgat

SEQ ID NO: 85547 - DNA, 25 bp, Artificial
  Probe
ttagcaactgtttataggtggttga

SEQ ID NO: 85548 - DNA, 25 bp, Artificial
  Probe
tttagcaactgtttataggtggttg

SEQ ID NO: 85549 - DNA, 25 bp, Artificial
  Probe
caactgtttataggtggttgatgaa

SEQ ID NO: 85550 - DNA, 25 bp, Artificial
  Probe
gcaactgtttataggtggttgatga

SEQ ID NO: 85551 - DNA, 25 bp, Artificial
  Probe
agcaactgtttataggtggttgatg

SEQ ID NO: 85552 - DNA, 25 bp, Artificial
  Probe
tgaagccgttcatttagcaactgtt

SEQ ID NO: 85553 - DNA, 25 bp, Artificial
  Probe
ctgaagccgttcatttagcaactgt

SEQ ID NO: 85554 - DNA, 25 bp, Artificial
  Probe
aactaaggtattgcccgtggtattt

SEQ ID NO: 85555 - DNA, 25 bp, Artificial
  Probe
cctatagtgagtcgtattcaattca

SEQ ID NO: 85556 - DNA, 25 bp, Artificial
  Probe
gaactaaggtattgcccgtggtatt

SEQ ID NO: 85557 - DNA, 25 bp, Artificial
  Probe
gccctatagtgagtcgtattcaatt

SEQ ID NO: 85558 - DNA, 25 bp, Artificial
  Probe
attcgccctatagtgagtcgtattc

SEQ ID NO: 85559 - DNA, 25 bp, Artificial
  Probe
ccctatagtgagtcgtattcaattc

SEQ ID NO: 85560 - DNA, 25 bp, Artificial
  Probe
tgaactaaggtattgcccgtggtat

SEQ ID NO: 85561 - DNA, 25 bp, Artificial
  Probe
cgccctatagtgagtcgtattcaat

SEQ ID NO: 85562 - DNA, 25 bp, Artificial
  Probe
aaggaatttcgcagagttgaaggtc

SEQ ID NO: 85563 - DNA, 25 bp, Artificial
  Probe
gaaggaatttcgcagagttgaaggt

SEQ ID NO: 85564 - DNA, 25 bp, Artificial
  Probe
actaaggtattgcccgtggtatttt

SEQ ID NO: 85565 - DNA, 25 bp, Artificial
  Probe
tcgccctatagtgagtcgtattcaa

SEQ ID NO: 85566 - DNA, 25 bp, Artificial
  Probe
ttcgccctatagtgagtcgtattca

SEQ ID NO: 85567 - DNA, 25 bp, Artificial
  Probe
gaagaagtttgccctgaagacactg

SEQ ID NO: 85568 - DNA, 25 bp, Artificial
  Probe
gaatttcgcagagttgaaggtcaag

SEQ ID NO: 85569 - DNA, 25 bp, Artificial
  Probe
tattcaattcactggccgtcgttta

SEQ ID NO: 85570 - DNA, 25 bp, Artificial
  Probe
aaataacttcctgtggcccttcaaa

SEQ ID NO: 85571 - DNA, 25 bp, Artificial
  Probe
aggaatttcgcagagttgaaggtca

SEQ ID NO: 85572 - DNA, 25 bp, Artificial
  Probe
ctatagtgagtcgtattcaattcac

SEQ ID NO: 85573 - DNA, 25 bp, Artificial
  Probe
aataacttcctgtggcccttcaaac

SEQ ID NO: 85574 - DNA, 25 bp, Artificial
  Probe
caaataacttcctgtggcccttcaa

SEQ ID NO: 85575 - DNA, 25 bp, Artificial
  Probe
attcaattcactggccgtcgtttaa

SEQ ID NO: 85576 - DNA, 25 bp, Artificial
  Probe
ttcaattcactggccgtcgtttaaa

SEQ ID NO: 85577 - DNA, 25 bp, Artificial
  Probe
ggaatttcgcagagttgaaggtcaa

SEQ ID NO: 85578 - DNA, 25 bp, Artificial
  Probe
gtattcaattcactggccgtcgttt

SEQ ID NO: 85579 - DNA, 25 bp, Artificial
  Probe
ataacttcctgtggcccttcaaact

SEQ ID NO: 85580 - DNA, 25 bp, Artificial
  Probe
ctcactttgtagaaggtggagacgc

SEQ ID NO: 85581 - DNA, 25 bp, Artificial
  Probe
aatttcgcagagttgaaggtcaagc

SEQ ID NO: 85582 - DNA, 25 bp, Artificial
  Probe
taacttcctgtggcccttcaaactg

SEQ ID NO: 85583 - DNA, 25 bp, Artificial
  Probe
aagcaaataacttcctgtggccctt

SEQ ID NO: 85584 - DNA, 25 bp, Artificial
  Probe
tcaattcactggccgtcgtttaaaa

SEQ ID NO: 85585 - DNA, 25 bp, Artificial
  Probe
gtgagtcgtattcaattcactggcc

SEQ ID NO: 85586 - DNA, 25 bp, Artificial
  Probe
caattcactggccgtcgtttaaaac

SEQ ID NO: 85587 - DNA, 25 bp, Artificial
  Probe
cttaacggctggagaaatccccttt

SEQ ID NO: 85588 - DNA, 25 bp, Artificial
  Probe
ttaacggctggagaaatcccctttg

SEQ ID NO: 85589 - DNA, 25 bp, Artificial
  Probe
cgaaggaatttcgcagagttgaagg

SEQ ID NO: 85590 - DNA, 25 bp, Artificial
  Probe
gaaatcccctttgcagtgggtaaac

SEQ ID NO: 85591 - DNA, 25 bp, Artificial
  Probe
agaaatcccctttgcagtgggtaaa

SEQ ID NO: 85592 - DNA, 25 bp, Artificial
  Probe
gagaaatcccctttgcagtgggtaa

SEQ ID NO: 85593 - DNA, 25 bp, Artificial
  Probe
aattcactggccgtcgtttaaaacg

SEQ ID NO: 85594 - DNA, 25 bp, Artificial
  Probe
acatcagtaccaagaccatcaatag

SEQ ID NO: 85595 - DNA, 25 bp, Artificial
  Probe
cacatcagtaccaagaccatcaata

SEQ ID NO: 85596 - DNA, 25 bp, Artificial
  Probe
catcagtaccaagaccatcaatagc

SEQ ID NO: 85597 - DNA, 25 bp, Artificial
  Probe
atggcttatggtacaacttcattga

SEQ ID NO: 85598 - DNA, 25 bp, Artificial
  Probe
tggcttatggtacaacttcattgag

SEQ ID NO: 85599 - DNA, 25 bp, Artificial
  Probe
tcacatcagtaccaagaccatcaat

SEQ ID NO: 85600 - DNA, 25 bp, Artificial
  Probe
ctcacatcagtaccaagaccatcaa

SEQ ID NO: 85601 - DNA, 25 bp, Artificial
  Probe
atcagtaccaagaccatcaatagct

SEQ ID NO: 85602 - DNA, 25 bp, Artificial
  Probe
ttatggtacaacttcattgagctac

SEQ ID NO: 85603 - DNA, 25 bp, Artificial
  Probe
cttatggtacaacttcattgagcta

SEQ ID NO: 85604 - DNA, 25 bp, Artificial
  Probe
cttggcattactgagatgtttgaac

SEQ ID NO: 85605 - DNA, 25 bp, Artificial
  Probe
agtagtgacaactgcaatcctaatt

SEQ ID NO: 85606 - DNA, 25 bp, Artificial
  Probe
aatggcttatggtacaacttcattg

SEQ ID NO: 85607 - DNA, 25 bp, Artificial
  Probe
ccttggcattactgagatgtttgaa

SEQ ID NO: 85608 - DNA, 25 bp, Artificial
  Probe
caaatggcttatggtacaacttcat

SEQ ID NO: 85609 - DNA, 25 bp, Artificial
  Probe
ttggcattactgagatgtttgaacc

SEQ ID NO: 85610 - DNA, 25 bp, Artificial
  Probe
cattactgagatgtttgaaccgtca

SEQ ID NO: 85611 - DNA, 25 bp, Artificial
  Probe
tcagtaccaagaccatcaatagctg

SEQ ID NO: 85612 - DNA, 25 bp, Artificial
  Probe
gcattactgagatgtttgaaccgtc

SEQ ID NO: 85613 - DNA, 25 bp, Artificial
  Probe
aaatcctaccaagtacccatgctag

SEQ ID NO: 85614 - DNA, 25 bp, Artificial
  Probe
gtagtgacaactgcaatcctaattg

SEQ ID NO: 85615 - DNA, 25 bp, Artificial
  Probe
ggcttatggtacaacttcattgagc

SEQ ID NO: 85616 - DNA, 25 bp, Artificial
  Probe
gcttatggtacaacttcattgagct

SEQ ID NO: 85617 - DNA, 25 bp, Artificial
  Probe
gtaccaagaccatcaatagctggat

SEQ ID NO: 85618 - DNA, 25 bp, Artificial
  Probe
gtacaacttcattgagctaccctac

SEQ ID NO: 85619 - DNA, 25 bp, Artificial
  Probe
cctcacatcagtaccaagaccatca

SEQ ID NO: 85620 - DNA, 25 bp, Artificial
  Probe
atcgcctccctggtttatagtagac

SEQ ID NO: 85621 - DNA, 25 bp, Artificial
  Probe
catcgcctccctggtttatagtaga

SEQ ID NO: 85622 - DNA, 25 bp, Artificial
  Probe
tcatcgcctccctggtttatagtag

SEQ ID NO: 85623 - DNA, 25 bp, Artificial
  Probe
atcatccctcacatcagtaccaaga

SEQ ID NO: 85624 - DNA, 25 bp, Artificial
  Probe
catcatccctcacatcagtaccaag

SEQ ID NO: 85625 - DNA, 25 bp, Artificial
  Probe
cccttggcattactgagatgtttga

SEQ ID NO: 85626 - DNA, 25 bp, Artificial
  Probe
ccaaatggcttatggtacaacttca

SEQ ID NO: 85627 - DNA, 25 bp, Artificial
  Probe
aaatggcttatggtacaacttcatt

SEQ ID NO: 85628 - DNA, 25 bp, Artificial
  Probe
tatggtacaacttcattgagctacc

SEQ ID NO: 85629 - DNA, 25 bp, Artificial
  Probe
tacaacttcattgagctaccctacc

SEQ ID NO: 85630 - DNA, 25 bp, Artificial
  Probe
cgacagttaagtgacacaagtgttt

SEQ ID NO: 85631 - DNA, 25 bp, Artificial
  Probe
gtcatcgcctccctggtttatagta

SEQ ID NO: 85632 - DNA, 25 bp, Artificial
  Probe
aacttcattgagctaccctaccatg

SEQ ID NO: 85633 - DNA, 25 bp, Artificial
  Probe
agtaccaagaccatcaatagctgga

SEQ ID NO: 85634 - DNA, 25 bp, Artificial
  Probe
cagtaccaagaccatcaatagctgg

SEQ ID NO: 85635 - DNA, 25 bp, Artificial
  Probe
caagaccatcaatagctggatgaac

SEQ ID NO: 85636 - DNA, 25 bp, Artificial
  Probe
cttccccacatctttcatagttctg

SEQ ID NO: 85637 - DNA, 25 bp, Artificial
  Probe
cccaaatggcttatggtacaacttc

SEQ ID NO: 85638 - DNA, 25 bp, Artificial
  Probe
caacttcattgagctaccctaccat

SEQ ID NO: 85639 - DNA, 25 bp, Artificial
  Probe
ggagattggagagtattcatagcat

SEQ ID NO: 85640 - DNA, 25 bp, Artificial
  Probe
gagattggagagtattcatagcatg

SEQ ID NO: 85641 - DNA, 25 bp, Artificial
  Probe
gtgggagattggagagtattcatag

SEQ ID NO: 85642 - DNA, 25 bp, Artificial
  Probe
tgtgggagattggagagtattcata

SEQ ID NO: 85643 - DNA, 25 bp, Artificial
  Probe
gcatcacttataggaaacaggattg

SEQ ID NO: 85644 - DNA, 25 bp, Artificial
  Probe
agcatcacttataggaaacaggatt

SEQ ID NO: 85645 - DNA, 25 bp, Artificial
  Probe
atcacttataggaaacaggattggt

SEQ ID NO: 85646 - DNA, 25 bp, Artificial
  Probe
catcacttataggaaacaggattgg

SEQ ID NO: 85647 - DNA, 25 bp, Artificial
  Probe
aagcatcacttataggaaacaggat

SEQ ID NO: 85648 - DNA, 25 bp, Artificial
  Probe
gaagcatcacttataggaaacagga

SEQ ID NO: 85649 - DNA, 25 bp, Artificial
  Probe
gggagattggagagtattcatagca

SEQ ID NO: 85650 - DNA, 25 bp, Artificial
  Probe
tgggagattggagagtattcatagc

SEQ ID NO: 85651 - DNA, 25 bp, Artificial
  Probe
ggaaagatagtgaaagacaggtgtg

SEQ ID NO: 85652 - DNA, 25 bp, Artificial
  Probe
ttatctagcactagaagcaagttgg

SEQ ID NO: 85653 - DNA, 25 bp, Artificial
  Probe
ctgtgggagattggagagtattcat

SEQ ID NO: 85654 - DNA, 25 bp, Artificial
  Probe
gccttaacagaagtttatctagcac

SEQ ID NO: 85655 - DNA, 25 bp, Artificial
  Probe
tgaagcatcacttataggaaacagg

SEQ ID NO: 85656 - DNA, 25 bp, Artificial
  Probe
ctaagcagtcctggttctgagttac

SEQ ID NO: 85657 - DNA, 25 bp, Artificial
  Probe
catagcatgagttgactgaggacaa

SEQ ID NO: 85658 - DNA, 25 bp, Artificial
  Probe
tatctagcactagaagcaagttgga

SEQ ID NO: 85659 - DNA, 25 bp, Artificial
  Probe
ttataggaaacaggattggtgtcag

SEQ ID NO: 85660 - DNA, 25 bp, Artificial
  Probe
cttataggaaacaggattggtgtca

SEQ ID NO: 85661 - DNA, 25 bp, Artificial
  Probe
acttataggaaacaggattggtgtc

SEQ ID NO: 85662 - DNA, 25 bp, Artificial
  Probe
aaagatagtgaaagacaggtgtgtt

SEQ ID NO: 85663 - DNA, 25 bp, Artificial
  Probe
tagcactagaagcaagttggaaatt

SEQ ID NO: 85664 - DNA, 25 bp, Artificial
  Probe
aagatagtgaaagacaggtgtgttc

SEQ ID NO: 85665 - DNA, 25 bp, Artificial
  Probe
gaaagatagtgaaagacaggtgtgt

SEQ ID NO: 85666 - DNA, 25 bp, Artificial
  Probe
tttatcactgtgggagattggagag

SEQ ID NO: 85667 - DNA, 25 bp, Artificial
  Probe
ctttatcactgtgggagattggaga

SEQ ID NO: 85668 - DNA, 25 bp, Artificial
  Probe
actaagcagtcctggttctgagtta

SEQ ID NO: 85669 - DNA, 25 bp, Artificial
  Probe
ctagcactagaagcaagttggaaat

SEQ ID NO: 85670 - DNA, 25 bp, Artificial
  Probe
tattcatagcatgagttgactgagg

SEQ ID NO: 85671 - DNA, 25 bp, Artificial
  Probe
ggagagtattcatagcatgagttga

SEQ ID NO: 85672 - DNA, 25 bp, Artificial
  Probe
tggagagtattcatagcatgagttg

SEQ ID NO: 85673 - DNA, 25 bp, Artificial
  Probe
agtattcatagcatgagttgactga

SEQ ID NO: 85674 - DNA, 25 bp, Artificial
  Probe
ttggagagtattcatagcatgagtt

SEQ ID NO: 85675 - DNA, 25 bp, Artificial
  Probe
gtattcatagcatgagttgactgag

SEQ ID NO: 85676 - DNA, 25 bp, Artificial
  Probe
gagtattcatagcatgagttgactg

SEQ ID NO: 85677 - DNA, 25 bp, Artificial
  Probe
agagtattcatagcatgagttgact

SEQ ID NO: 85678 - DNA, 25 bp, Artificial
  Probe
attggagagtattcatagcatgagt

SEQ ID NO: 85679 - DNA, 25 bp, Artificial
  Probe
tcacttataggaaacaggattggtg

SEQ ID NO: 85680 - DNA, 25 bp, Artificial
  Probe
atctagcactagaagcaagttggaa

SEQ ID NO: 85681 - DNA, 25 bp, Artificial
  Probe
cacttataggaaacaggattggtgt

SEQ ID NO: 85682 - DNA, 25 bp, Artificial
  Probe
gagagtattcatagcatgagttgac

SEQ ID NO: 85683 - DNA, 25 bp, Artificial
  Probe
agattggagagtattcatagcatga

SEQ ID NO: 85684 - DNA, 25 bp, Artificial
  Probe
ctagacaatgtaatgctggacaagg

SEQ ID NO: 85685 - DNA, 25 bp, Artificial
  Probe
tagacaatgtaatgctggacaagga

SEQ ID NO: 85686 - DNA, 25 bp, Artificial
  Probe
ggacctcaagctagacaatgtaatg

SEQ ID NO: 85687 - DNA, 25 bp, Artificial
  Probe
gaaactgtaaatcctgtgtgtcatt

SEQ ID NO: 85688 - DNA, 25 bp, Artificial
  Probe
ttccttcagtgacaagaacctcatc

SEQ ID NO: 85689 - DNA, 25 bp, Artificial
  Probe
ttcaagactatcaactggaacctgc

SEQ ID NO: 85690 - DNA, 25 bp, Artificial
  Probe
gacaatgtaatgctggacaaggatg

SEQ ID NO: 85691 - DNA, 25 bp, Artificial
  Probe
agacaatgtaatgctggacaaggat

SEQ ID NO: 85692 - DNA, 25 bp, Artificial
  Probe
gctagacaatgtaatgctggacaag

SEQ ID NO: 85693 - DNA, 25 bp, Artificial
  Probe
gacctcaagctagacaatgtaatgc

SEQ ID NO: 85694 - DNA, 25 bp, Artificial
  Probe
tcctgtgtgtcattacttgaatgta

SEQ ID NO: 85695 - DNA, 25 bp, Artificial
  Probe
cctgtgtgtcattacttgaatgtag

SEQ ID NO: 85696 - DNA, 25 bp, Artificial
  Probe
atcctgtgtgtcattacttgaatgt

SEQ ID NO: 85697 - DNA, 25 bp, Artificial
  Probe
aatcctgtgtgtcattacttgaatg

SEQ ID NO: 85698 - DNA, 25 bp, Artificial
  Probe
tttcaagactatcaactggaacctg

SEQ ID NO: 85699 - DNA, 25 bp, Artificial
  Probe
cctctgtgaactgtttgtgaatttg

SEQ ID NO: 85700 - DNA, 25 bp, Artificial
  Probe
tcctctgtgaactgtttgtgaattt

SEQ ID NO: 85701 - DNA, 25 bp, Artificial
  Probe
ctgtgtgtcattacttgaatgtagt

SEQ ID NO: 85702 - DNA, 25 bp, Artificial
  Probe
aaactgtaaatcctgtgtgtcatta

SEQ ID NO: 85703 - DNA, 25 bp, Artificial
  Probe
ttcctctgtgaactgtttgtgaatt

SEQ ID NO: 85704 - DNA, 25 bp, Artificial
  Probe
tgtgtgtcattacttgaatgtagtt

SEQ ID NO: 85705 - DNA, 25 bp, Artificial
  Probe
cttcctctgtgaactgtttgtgaat

SEQ ID NO: 85706 - DNA, 25 bp, Artificial
  Probe
ctctgtgaactgtttgtgaatttgc

SEQ ID NO: 85707 - DNA, 25 bp, Artificial
  Probe
caagactatcaactggaacctgctg

SEQ ID NO: 85708 - DNA, 25 bp, Artificial
  Probe
gtatagaaagcatgtaggagactgg

SEQ ID NO: 85709 - DNA, 25 bp, Artificial
  Probe
aaatcctgtgtgtcattacttgaat

SEQ ID NO: 85710 - DNA, 25 bp, Artificial
  Probe
tatagaaagcatgtaggagactggt

SEQ ID NO: 85711 - DNA, 25 bp, Artificial
  Probe
tcagtatagaaagcatgtaggagac

SEQ ID NO: 85712 - DNA, 25 bp, Artificial
  Probe
tcaagactatcaactggaacctgct

SEQ ID NO: 85713 - DNA, 25 bp, Artificial
  Probe
tgacaagaacctcatcgactctatg

SEQ ID NO: 85714 - DNA, 25 bp, Artificial
  Probe
gtgacaagaacctcatcgactctat

SEQ ID NO: 85715 - DNA, 25 bp, Artificial
  Probe
tacttcctctgtgaactgtttgtga

SEQ ID NO: 85716 - DNA, 25 bp, Artificial
  Probe
cttctttgtgatggagttcctcaat

SEQ ID NO: 85717 - DNA, 25 bp, Artificial
  Probe
gtgaactgtttgtgaatttgccttc

SEQ ID NO: 85718 - DNA, 25 bp, Artificial
  Probe
taaatcctgtgtgtcattacttgaa

SEQ ID NO: 85719 - DNA, 25 bp, Artificial
  Probe
ttctttgtgatggagttcctcaatg

SEQ ID NO: 85720 - DNA, 25 bp, Artificial
  Probe
ggctgtatatattgctcagtataga

SEQ ID NO: 85721 - DNA, 25 bp, Artificial
  Probe
ttctacatggcaaaggcatcattta

SEQ ID NO: 85722 - DNA, 25 bp, Artificial
  Probe
tatgagcaattcctggaatagtgag

SEQ ID NO: 85723 - DNA, 25 bp, Artificial
  Probe
actgtttgtgaatttgccttccttt

SEQ ID NO: 85724 - DNA, 25 bp, Artificial
  Probe
aactgtttgtgaatttgccttcctt

SEQ ID NO: 85725 - DNA, 25 bp, Artificial
  Probe
atatgagcaattcctggaatagtga

SEQ ID NO: 85726 - DNA, 25 bp, Artificial
  Probe
agtatagaaagcatgtaggagactg

SEQ ID NO: 85727 - DNA, 25 bp, Artificial
  Probe
cagtatagaaagcatgtaggagact

SEQ ID NO: 85728 - DNA, 25 bp, Artificial
  Probe
tgtgaactgtttgtgaatttgcctt

SEQ ID NO: 85729 - DNA, 25 bp, Artificial
  Probe
ctacctaagagaagagaccagagtt

SEQ ID NO: 85730 - DNA, 25 bp, Artificial
  Probe
gctacctaagagaagagaccagagt

SEQ ID NO: 85731 - DNA, 25 bp, Artificial
  Probe
tacctaagagaagagaccagagttt

SEQ ID NO: 85732 - DNA, 25 bp, Artificial
  Probe
ccacatctgctctcttatttattgc

SEQ ID NO: 85733 - DNA, 25 bp, Artificial
  Probe
gtcccacatctgctctcttatttat

SEQ ID NO: 85734 - DNA, 25 bp, Artificial
  Probe
cccacatctgctctcttatttattg

SEQ ID NO: 85735 - DNA, 25 bp, Artificial
  Probe
tcccacatctgctctcttatttatt

SEQ ID NO: 85736 - DNA, 25 bp, Artificial
  Probe
agtcccacatctgctctcttattta

SEQ ID NO: 85737 - DNA, 25 bp, Artificial
  Probe
ggctacctaagagaagagaccagag

SEQ ID NO: 85738 - DNA, 25 bp, Artificial
  Probe
acctaagagaagagaccagagtttc

SEQ ID NO: 85739 - DNA, 25 bp, Artificial
  Probe
tccagactcaccaagatcacagatt

SEQ ID NO: 85740 - DNA, 25 bp, Artificial
  Probe
atcttgactcctcccttctctcatt

SEQ ID NO: 85741 - DNA, 25 bp, Artificial
  Probe
gtccagactcaccaagatcacagat

SEQ ID NO: 85742 - DNA, 25 bp, Artificial
  Probe
cagtcccacatctgctctcttattt

SEQ ID NO: 85743 - DNA, 25 bp, Artificial
  Probe
ctaagagaagagaccagagtttctt

SEQ ID NO: 85744 - DNA, 25 bp, Artificial
  Probe
cctaagagaagagaccagagtttct

SEQ ID NO: 85745 - DNA, 25 bp, Artificial
  Probe
tcttgactcctcccttctctcattc

SEQ ID NO: 85746 - DNA, 25 bp, Artificial
  Probe
cggctacctaagagaagagaccaga

SEQ ID NO: 85747 - DNA, 25 bp, Artificial
  Probe
aagagaccagagtttcttccacaag

SEQ ID NO: 85748 - DNA, 25 bp, Artificial
  Probe
agagaccagagtttcttccacaagg

SEQ ID NO: 85749 - DNA, 25 bp, Artificial
  Probe
cttgactcctcccttctctcattcc

SEQ ID NO: 85750 - DNA, 25 bp, Artificial
  Probe
cacatctgctctcttatttattgca

SEQ ID NO: 85751 - DNA, 25 bp, Artificial
  Probe
tctgctctcttatttattgcatccc

SEQ ID NO: 85752 - DNA, 25 bp, Artificial
  Probe
ctctcttatttattgcatcccctca

SEQ ID NO: 85753 - DNA, 25 bp, Artificial
  Probe
tcttatttattgcatcccctcatcc

SEQ ID NO: 85754 - DNA, 25 bp, Artificial
  Probe
atctgctctcttatttattgcatcc

SEQ ID NO: 85755 - DNA, 25 bp, Artificial
  Probe
ccagtcccacatctgctctcttatt

SEQ ID NO: 85756 - DNA, 25 bp, Artificial
  Probe
tctcttatttattgcatcccctcat

SEQ ID NO: 85757 - DNA, 25 bp, Artificial
  Probe
ctcttatttattgcatcccctcatc

SEQ ID NO: 85758 - DNA, 25 bp, Artificial
  Probe
ttgactcctcccttctctcattcct

SEQ ID NO: 85759 - DNA, 25 bp, Artificial
  Probe
acatctgctctcttatttattgcat

SEQ ID NO: 85760 - DNA, 25 bp, Artificial
  Probe
cttatttattgcatcccctcatccc

SEQ ID NO: 85761 - DNA, 25 bp, Artificial
  Probe
gctctcttatttattgcatcccctc

SEQ ID NO: 85762 - DNA, 25 bp, Artificial
  Probe
catctgctctcttatttattgcatc

SEQ ID NO: 85763 - DNA, 25 bp, Artificial
  Probe
ttatttattgcatcccctcatccca

SEQ ID NO: 85764 - DNA, 25 bp, Artificial
  Probe
tgactcctcccttctctcattcctc

SEQ ID NO: 85765 - DNA, 25 bp, Artificial
  Probe
tatttattgcatcccctcatcccag

SEQ ID NO: 85766 - DNA, 25 bp, Artificial
  Probe
gagaccagagtttcttccacaaggg

SEQ ID NO: 85767 - DNA, 25 bp, Artificial
  Probe
ctcctcccttctctcattcctcctg

SEQ ID NO: 85768 - DNA, 25 bp, Artificial
  Probe
gactcctcccttctctcattcctcc

SEQ ID NO: 85769 - DNA, 25 bp, Artificial
  Probe
ctgctctcttatttattgcatcccc

SEQ ID NO: 85770 - DNA, 25 bp, Artificial
  Probe
tgctctcttatttattgcatcccct

SEQ ID NO: 85771 - DNA, 25 bp, Artificial
  Probe
atttattgcatcccctcatcccagg

SEQ ID NO: 85772 - DNA, 25 bp, Artificial
  Probe
atctctcttttccttcacaacaacg

SEQ ID NO: 85773 - DNA, 25 bp, Artificial
  Probe
gatctctcttttccttcacaacaac

SEQ ID NO: 85774 - DNA, 25 bp, Artificial
  Probe
tctctcttttccttcacaacaacga

SEQ ID NO: 85775 - DNA, 25 bp, Artificial
  Probe
ctctcttttccttcacaacaacgag

SEQ ID NO: 85776 - DNA, 25 bp, Artificial
  Probe
tttccttcacaacaacgaggtgtac

SEQ ID NO: 85777 - DNA, 25 bp, Artificial
  Probe
ggatctctcttttccttcacaacaa

SEQ ID NO: 85778 - DNA, 25 bp, Artificial
  Probe
ttccttcacaacaacgaggtgtacc

SEQ ID NO: 85779 - DNA, 25 bp, Artificial
  Probe
ttttccttcacaacaacgaggtgta

SEQ ID NO: 85780 - DNA, 25 bp, Artificial
  Probe
tctcttttccttcacaacaacgagg

SEQ ID NO: 85781 - DNA, 25 bp, Artificial
  Probe
ctcttttccttcacaacaacgaggt

SEQ ID NO: 85782 - DNA, 25 bp, Artificial
  Probe
tcttttccttcacaacaacgaggtg

SEQ ID NO: 85783 - DNA, 25 bp, Artificial
  Probe
cttttccttcacaacaacgaggtgt

SEQ ID NO: 85784 - DNA, 25 bp, Artificial
  Probe
caggatctctcttttccttcacaac

SEQ ID NO: 85785 - DNA, 25 bp, Artificial
  Probe
aggatctctcttttccttcacaaca

SEQ ID NO: 85786 - DNA, 25 bp, Artificial
  Probe
acaggatctctcttttccttcacaa

SEQ ID NO: 85787 - DNA, 25 bp, Artificial
  Probe
gacaggatctctcttttccttcaca

SEQ ID NO: 85788 - DNA, 25 bp, Artificial
  Probe
ggacaggatctctcttttccttcac

SEQ ID NO: 85789 - DNA, 25 bp, Artificial
  Probe
cggacaggatctctcttttccttca

SEQ ID NO: 85790 - DNA, 25 bp, Artificial
  Probe
ccggacaggatctctcttttccttc

SEQ ID NO: 85791 - DNA, 25 bp, Artificial
  Probe
aactattgtggtcttagagagaagg

SEQ ID NO: 85792 - DNA, 25 bp, Artificial
  Probe
tggactatgtaatgaaggacaatgt

SEQ ID NO: 85793 - DNA, 25 bp, Artificial
  Probe
atggactatgtaatgaaggacaatg

SEQ ID NO: 85794 - DNA, 25 bp, Artificial
  Probe
agataccatagtgactcatataagc

SEQ ID NO: 85795 - DNA, 25 bp, Artificial
  Probe
tgatgcaacttgaggtaatcttaga

SEQ ID NO: 85796 - DNA, 25 bp, Artificial
  Probe
tgctaagaatcagtttatggagtca

SEQ ID NO: 85797 - DNA, 25 bp, Artificial
  Probe
catggactatgtaatgaaggacaat

SEQ ID NO: 85798 - DNA, 25 bp, Artificial
  Probe
tgtggaaactattgtggtcttagag

SEQ ID NO: 85799 - DNA, 25 bp, Artificial
  Probe
atgtggaaactattgtggtcttaga

SEQ ID NO: 85800 - DNA, 25 bp, Artificial
  Probe
ggactatgtaatgaaggacaatgtc

SEQ ID NO: 85801 - DNA, 25 bp, Artificial
  Probe
gatgcaacttgaggtaatcttagaa

SEQ ID NO: 85802 - DNA, 25 bp, Artificial
  Probe
atgatgcaacttgaggtaatcttag

SEQ ID NO: 85803 - DNA, 25 bp, Artificial
  Probe
caatgatgcaacttgaggtaatctt

SEQ ID NO: 85804 - DNA, 25 bp, Artificial
  Probe
gctaagaatcagtttatggagtcaa

SEQ ID NO: 85805 - DNA, 25 bp, Artificial
  Probe
gtggaaactattgtggtcttagaga

SEQ ID NO: 85806 - DNA, 25 bp, Artificial
  Probe
tggaaactattgtggtcttagagag

SEQ ID NO: 85807 - DNA, 25 bp, Artificial
  Probe
acggaaatgctaagaatcagtttat

SEQ ID NO: 85808 - DNA, 25 bp, Artificial
  Probe
atacggaaatgctaagaatcagttt

SEQ ID NO: 85809 - DNA, 25 bp, Artificial
  Probe
ttgctaatttatttatcccagaggc

SEQ ID NO: 85810 - DNA, 25 bp, Artificial
  Probe
ggaaactattgtggtcttagagaga

SEQ ID NO: 85811 - DNA, 25 bp, Artificial
  Probe
catcttcctgagaaacatcccttag

SEQ ID NO: 85812 - DNA, 25 bp, Artificial
  Probe
atgctaagaatcagtttatggagtc

SEQ ID NO: 85813 - DNA, 25 bp, Artificial
  Probe
gctaatttatttatcccagaggcat

SEQ ID NO: 85814 - DNA, 25 bp, Artificial
  Probe
atatctatcggttgttgacctgagg

SEQ ID NO: 85815 - DNA, 25 bp, Artificial
  Probe
cggaaatgctaagaatcagtttatg

SEQ ID NO: 85816 - DNA, 25 bp, Artificial
  Probe
gagaaacatcccttagcctgaaatc

SEQ ID NO: 85817 - DNA, 25 bp, Artificial
  Probe
cagtgacccaaatctcttccataag

SEQ ID NO: 85818 - DNA, 25 bp, Artificial
  Probe
aatgatgcaacttgaggtaatctta

SEQ ID NO: 85819 - DNA, 25 bp, Artificial
  Probe
ctattgtggtcttagagagaagggt

SEQ ID NO: 85820 - DNA, 25 bp, Artificial
  Probe
actattgtggtcttagagagaaggg

SEQ ID NO: 85821 - DNA, 25 bp, Artificial
  Probe
tgcaacttgaggtaatcttagaatt

SEQ ID NO: 85822 - DNA, 25 bp, Artificial
  Probe
gactatgtaatgaaggacaatgtct

SEQ ID NO: 85823 - DNA, 25 bp, Artificial
  Probe
tattgtggtcttagagagaagggtg

SEQ ID NO: 85824 - DNA, 25 bp, Artificial
  Probe
ggaaatgctaagaatcagtttatgg

SEQ ID NO: 85825 - DNA, 25 bp, Artificial
  Probe
tacggaaatgctaagaatcagttta

SEQ ID NO: 85826 - DNA, 25 bp, Artificial
  Probe
atgcaacttgaggtaatcttagaat

SEQ ID NO: 85827 - DNA, 25 bp, Artificial
  Probe
aatgctaagaatcagtttatggagt

SEQ ID NO: 85828 - DNA, 25 bp, Artificial
  Probe
tcatgtggaaactattgtggtctta

SEQ ID NO: 85829 - DNA, 25 bp, Artificial
  Probe
ccatagtgactcatataagctggtt

SEQ ID NO: 85830 - DNA, 25 bp, Artificial
  Probe
catgtggaaactattgtggtcttag

SEQ ID NO: 85831 - DNA, 25 bp, Artificial
  Probe
tatacggaaatgctaagaatcagtt

SEQ ID NO: 85832 - DNA, 25 bp, Artificial
  Probe
ttatacggaaatgctaagaatcagt

SEQ ID NO: 85833 - DNA, 25 bp, Artificial
  Probe
tgagaaacatcccttagcctgaaat

SEQ ID NO: 85834 - DNA, 25 bp, Artificial
  Probe
cttgtgtcatgtggaaactattgtg

SEQ ID NO: 85835 - DNA, 25 bp, Artificial
  Probe
atcggactctaaagacaaagatcac

SEQ ID NO: 85836 - DNA, 25 bp, Artificial
  Probe
tgtatgaatgtatgccagaacttga

SEQ ID NO: 85837 - DNA, 25 bp, Artificial
  Probe
tatgtgtgtatgaatgtatgccaga

SEQ ID NO: 85838 - DNA, 25 bp, Artificial
  Probe
gtgtatgaatgtatgccagaacttg

SEQ ID NO: 85839 - DNA, 25 bp, Artificial
  Probe
tgtgtatgaatgtatgccagaactt

SEQ ID NO: 85840 - DNA, 25 bp, Artificial
  Probe
atgtgtgtatgaatgtatgccagaa

SEQ ID NO: 85841 - DNA, 25 bp, Artificial
  Probe
gtatgaatgtatgccagaacttgat

SEQ ID NO: 85842 - DNA, 25 bp, Artificial
  Probe
atatgtgtgtatgaatgtatgccag

SEQ ID NO: 85843 - DNA, 25 bp, Artificial
  Probe
gtgtgtatgaatgtatgccagaact

SEQ ID NO: 85844 - DNA, 25 bp, Artificial
  Probe
tgtgtgtatgaatgtatgccagaac

SEQ ID NO: 85845 - DNA, 25 bp, Artificial
  Probe
tgaatgtatgccagaacttgattat

SEQ ID NO: 85846 - DNA, 25 bp, Artificial
  Probe
atgaatgtatgccagaacttgatta

SEQ ID NO: 85847 - DNA, 25 bp, Artificial
  Probe
tatgaatgtatgccagaacttgatt

SEQ ID NO: 85848 - DNA, 25 bp, Artificial
  Probe
gcctcctactactactgagaagtta

SEQ ID NO: 85849 - DNA, 25 bp, Artificial
  Probe
tatatgtgtgtatgaatgtatgcca

SEQ ID NO: 85850 - DNA, 25 bp, Artificial
  Probe
gaatgtatgccagaacttgattatt

SEQ ID NO: 85851 - DNA, 25 bp, Artificial
  Probe
cctcctactactactgagaagttaa

SEQ ID NO: 85852 - DNA, 25 bp, Artificial
  Probe
gttatctggatacacatgatgctta

SEQ ID NO: 85853 - DNA, 25 bp, Artificial
  Probe
tgttatctggatacacatgatgctt

SEQ ID NO: 85854 - DNA, 25 bp, Artificial
  Probe
acctgttatctggatacacatgatg

SEQ ID NO: 85855 - DNA, 25 bp, Artificial
  Probe
ctgttatctggatacacatgatgct

SEQ ID NO: 85856 - DNA, 25 bp, Artificial
  Probe
atctggatacacatgatgcttatct

SEQ ID NO: 85857 - DNA, 25 bp, Artificial
  Probe
ttacctgttatctggatacacatga

SEQ ID NO: 85858 - DNA, 25 bp, Artificial
  Probe
tctggatacacatgatgcttatcta

SEQ ID NO: 85859 - DNA, 25 bp, Artificial
  Probe
tacctgttatctggatacacatgat

SEQ ID NO: 85860 - DNA, 25 bp, Artificial
  Probe
ctggatacacatgatgcttatctag

SEQ ID NO: 85861 - DNA, 25 bp, Artificial
  Probe
cctgttatctggatacacatgatgc

SEQ ID NO: 85862 - DNA, 25 bp, Artificial
  Probe
ttctcatcctttacctgttatctgg

SEQ ID NO: 85863 - DNA, 25 bp, Artificial
  Probe
aaatcccttatattctgaaacggca

SEQ ID NO: 85864 - DNA, 25 bp, Artificial
  Probe
ttatatgtgtgtatgaatgtatgcc

SEQ ID NO: 85865 - DNA, 25 bp, Artificial
  Probe
tgtaatgggtcatataagcagtcat

SEQ ID NO: 85866 - DNA, 25 bp, Artificial
  Probe
atgtaatgggtcatataagcagtca

SEQ ID NO: 85867 - DNA, 25 bp, Artificial
  Probe
acaattaacccaaagcagaacaatg

SEQ ID NO: 85868 - DNA, 25 bp, Artificial
  Probe
cacaattaacccaaagcagaacaat

SEQ ID NO: 85869 - DNA, 25 bp, Artificial
  Probe
tgagaaggaagaagtgataaagaga

SEQ ID NO: 85870 - DNA, 25 bp, Artificial
  Probe
ttatctggatacacatgatgcttat

SEQ ID NO: 85871 - DNA, 25 bp, Artificial
  Probe
ctgagaaggaagaagtgataaagag

SEQ ID NO: 85872 - DNA, 25 bp, Artificial
  Probe
tatctggatacacatgatgcttatc

SEQ ID NO: 85873 - DNA, 25 bp, Artificial
  Probe
atgtgattctcatcctttacctgtt

SEQ ID NO: 85874 - DNA, 25 bp, Artificial
  Probe
atggcatttagcactttatgggaaa

SEQ ID NO: 85875 - DNA, 25 bp, Artificial
  Probe
tataaagacccatctggaagacttg

SEQ ID NO: 85876 - DNA, 25 bp, Artificial
  Probe
catataaagacccatctggaagact

SEQ ID NO: 85877 - DNA, 25 bp, Artificial
  Probe
tcatataaagacccatctggaagac

SEQ ID NO: 85878 - DNA, 25 bp, Artificial
  Probe
ctcatctctcagtacaaaggaaagt

SEQ ID NO: 85879 - DNA, 25 bp, Artificial
  Probe
tgtgattctcatcctttacctgtta

SEQ ID NO: 85880 - DNA, 25 bp, Artificial
  Probe
tcatctctcagtacaaaggaaagtt

SEQ ID NO: 85881 - DNA, 25 bp, Artificial
  Probe
tctgatggctatgattctgttgtta

SEQ ID NO: 85882 - DNA, 25 bp, Artificial
  Probe
ttctgatggctatgattctgttgtt

SEQ ID NO: 85883 - DNA, 25 bp, Artificial
  Probe
ctgatggctatgattctgttgttaa

SEQ ID NO: 85884 - DNA, 25 bp, Artificial
  Probe
gttctgatggctatgattctgttgt

SEQ ID NO: 85885 - DNA, 25 bp, Artificial
  Probe
gttgaaggttctgatggctatgatt

SEQ ID NO: 85886 - DNA, 25 bp, Artificial
  Probe
ttgaaggttctgatggctatgattc

SEQ ID NO: 85887 - DNA, 25 bp, Artificial
  Probe
gaaggttctgatggctatgattctg

SEQ ID NO: 85888 - DNA, 25 bp, Artificial
  Probe
ggttctgatggctatgattctgttg

SEQ ID NO: 85889 - DNA, 25 bp, Artificial
  Probe
aggttctgatggctatgattctgtt

SEQ ID NO: 85890 - DNA, 25 bp, Artificial
  Probe
aaggttctgatggctatgattctgt

SEQ ID NO: 85891 - DNA, 25 bp, Artificial
  Probe
tgaaggttctgatggctatgattct

SEQ ID NO: 85892 - DNA, 25 bp, Artificial
  Probe
ggttcactgaagactagacacaatt

SEQ ID NO: 85893 - DNA, 25 bp, Artificial
  Probe
aattggttcactgaagactagacac

SEQ ID NO: 85894 - DNA, 25 bp, Artificial
  Probe
tgttgaaggttctgatggctatgat

SEQ ID NO: 85895 - DNA, 25 bp, Artificial
  Probe
ctctgttgaaggttctgatggctat

SEQ ID NO: 85896 - DNA, 25 bp, Artificial
  Probe
ttggttccttattctccttaattca

SEQ ID NO: 85897 - DNA, 25 bp, Artificial
  Probe
tggttcactgaagactagacacaat

SEQ ID NO: 85898 - DNA, 25 bp, Artificial
  Probe
attggttcactgaagactagacaca

SEQ ID NO: 85899 - DNA, 25 bp, Artificial
  Probe
tggttccttattctccttaattcat

SEQ ID NO: 85900 - DNA, 25 bp, Artificial
  Probe
ctgttgaaggttctgatggctatga

SEQ ID NO: 85901 - DNA, 25 bp, Artificial
  Probe
tctgttgaaggttctgatggctatg

SEQ ID NO: 85902 - DNA, 25 bp, Artificial
  Probe
ttggttcactgaagactagacacaa

SEQ ID NO: 85903 - DNA, 25 bp, Artificial
  Probe
cttcttcactcattctttcccattg

SEQ ID NO: 85904 - DNA, 25 bp, Artificial
  Probe
tcttcttcactcattctttcccatt

SEQ ID NO: 85905 - DNA, 25 bp, Artificial
  Probe
ttcttcttcactcattctttcccat

SEQ ID NO: 85906 - DNA, 25 bp, Artificial
  Probe
ctttcttcttcactcattctttccc

SEQ ID NO: 85907 - DNA, 25 bp, Artificial
  Probe
ttcctatcacagttctttctttcgt

SEQ ID NO: 85908 - DNA, 25 bp, Artificial
  Probe
tttcttcttcactcattctttccca

SEQ ID NO: 85909 - DNA, 25 bp, Artificial
  Probe
cctatcacagttctttctttcgtct

SEQ ID NO: 85910 - DNA, 25 bp, Artificial
  Probe
tcctatcacagttctttctttcgtc

SEQ ID NO: 85911 - DNA, 25 bp, Artificial
  Probe
tttcctatcacagttctttctttcg

SEQ ID NO: 85912 - DNA, 25 bp, Artificial
  Probe
actttcttcttcactcattctttcc

SEQ ID NO: 85913 - DNA, 25 bp, Artificial
  Probe
ctatcacagttctttctttcgtctt

SEQ ID NO: 85914 - DNA, 25 bp, Artificial
  Probe
tcacagttctttctttcgtctttaa

SEQ ID NO: 85915 - DNA, 25 bp, Artificial
  Probe
atcacagttctttctttcgtcttta

SEQ ID NO: 85916 - DNA, 25 bp, Artificial
  Probe
tatcacagttctttctttcgtcttt

SEQ ID NO: 85917 - DNA, 25 bp, Artificial
  Probe
tgatggctatgattctgttgttaaa

SEQ ID NO: 85918 - DNA, 25 bp, Artificial
  Probe
cgaacaagaacgagaacatgaacag

SEQ ID NO: 85919 - DNA, 25 bp, Artificial
  Probe
tcctttgtactttcttcttcactca

SEQ ID NO: 85920 - DNA, 25 bp, Artificial
  Probe
ttcttcactcattctttcccattgg

SEQ ID NO: 85921 - DNA, 25 bp, Artificial
  Probe
aggtgtactactatggtgtagaaga

SEQ ID NO: 85922 - DNA, 25 bp, Artificial
  Probe
caggtgtactactatggtgtagaag

SEQ ID NO: 85923 - DNA, 25 bp, Artificial
  Probe
aaattggttcactgaagactagaca

SEQ ID NO: 85924 - DNA, 25 bp, Artificial
  Probe
gaacaagaacgagaacatgaacagc

SEQ ID NO: 85925 - DNA, 25 bp, Artificial
  Probe
ccaggtgtactactatggtgtagaa

SEQ ID NO: 85926 - DNA, 25 bp, Artificial
  Probe
tcacaacctctaattctcctctact

SEQ ID NO: 85927 - DNA, 25 bp, Artificial
  Probe
cacaacctctaattctcctctactt

SEQ ID NO: 85928 - DNA, 25 bp, Artificial
  Probe
ttcacaacctctaattctcctctac

SEQ ID NO: 85929 - DNA, 25 bp, Artificial
  Probe
caacctctaattctcctctacttca

SEQ ID NO: 85930 - DNA, 25 bp, Artificial
  Probe
acaacctctaattctcctctacttc

SEQ ID NO: 85931 - DNA, 25 bp, Artificial
  Probe
gtctattcacaacctctaattctcc

SEQ ID NO: 85932 - DNA, 25 bp, Artificial
  Probe
attcacaacctctaattctcctcta

SEQ ID NO: 85933 - DNA, 25 bp, Artificial
  Probe
tattcacaacctctaattctcctct

SEQ ID NO: 85934 - DNA, 25 bp, Artificial
  Probe
tctattcacaacctctaattctcct

SEQ ID NO: 85935 - DNA, 25 bp, Artificial
  Probe
ctattcacaacctctaattctcctc

SEQ ID NO: 85936 - DNA, 25 bp, Artificial
  Probe
acctctaattctcctctacttcatt

SEQ ID NO: 85937 - DNA, 25 bp, Artificial
  Probe
aacctctaattctcctctacttcat

SEQ ID NO: 85938 - DNA, 25 bp, Artificial
  Probe
tgtctattcacaacctctaattctc

SEQ ID NO: 85939 - DNA, 25 bp, Artificial
  Probe
cattggagactcatagcaattacag

SEQ ID NO: 85940 - DNA, 25 bp, Artificial
  Probe
atgtctattcacaacctctaattct

SEQ ID NO: 85941 - DNA, 25 bp, Artificial
  Probe
attggagactcatagcaattacagc

SEQ ID NO: 85942 - DNA, 25 bp, Artificial
  Probe
agcattggagactcatagcaattac

SEQ ID NO: 85943 - DNA, 25 bp, Artificial
  Probe
cagcattggagactcatagcaatta

SEQ ID NO: 85944 - DNA, 25 bp, Artificial
  Probe
ctaggcacataggagcagataagga

SEQ ID NO: 85945 - DNA, 25 bp, Artificial
  Probe
gcattggagactcatagcaattaca

SEQ ID NO: 85946 - DNA, 25 bp, Artificial
  Probe
ctttcaaacagacaacagtacatgg

SEQ ID NO: 85947 - DNA, 25 bp, Artificial
  Probe
cctttcaaacagacaacagtacatg

SEQ ID NO: 85948 - DNA, 25 bp, Artificial
  Probe
attcatacaccctcttctgtctaag

SEQ ID NO: 85949 - DNA, 25 bp, Artificial
  Probe
aattcatacaccctcttctgtctaa

SEQ ID NO: 85950 - DNA, 25 bp, Artificial
  Probe
aatgtctattcacaacctctaattc

SEQ ID NO: 85951 - DNA, 25 bp, Artificial
  Probe
gcctttcaaacagacaacagtacat

SEQ ID NO: 85952 - DNA, 25 bp, Artificial
  Probe
ttcatacaccctcttctgtctaagc

SEQ ID NO: 85953 - DNA, 25 bp, Artificial
  Probe
cctctaattctcctctacttcattt

SEQ ID NO: 85954 - DNA, 25 bp, Artificial
  Probe
acagcattggagactcatagcaatt

SEQ ID NO: 85955 - DNA, 25 bp, Artificial
  Probe
tcaaacagacaacagtacatggcta

SEQ ID NO: 85956 - DNA, 25 bp, Artificial
  Probe
caaacagacaacagtacatggctac

SEQ ID NO: 85957 - DNA, 25 bp, Artificial
  Probe
tttcaaacagacaacagtacatggc

SEQ ID NO: 85958 - DNA, 25 bp, Artificial
  Probe
tctaattctcctctacttcatttgt

SEQ ID NO: 85959 - DNA, 25 bp, Artificial
  Probe
cagcctttcaaacagacaacagtac

SEQ ID NO: 85960 - DNA, 25 bp, Artificial
  Probe
ttggagactcatagcaattacagct

SEQ ID NO: 85961 - DNA, 25 bp, Artificial
  Probe
agcctttcaaacagacaacagtaca

SEQ ID NO: 85962 - DNA, 25 bp, Artificial
  Probe
cacagcattggagactcatagcaat

SEQ ID NO: 85963 - DNA, 25 bp, Artificial
  Probe
ctctaattctcctctacttcatttg

SEQ ID NO: 85964 - DNA, 25 bp, Artificial
  Probe
ccagcctttcaaacagacaacagta

SEQ ID NO: 85965 - DNA, 25 bp, Artificial
  Probe
ctcaaggaccctttacacactactg

SEQ ID NO: 85966 - DNA, 25 bp, Artificial
  Probe
ttcaaacagacaacagtacatggct

SEQ ID NO: 85967 - DNA, 25 bp, Artificial
  Probe
aaacagacaacagtacatggctacc

SEQ ID NO: 85968 - DNA, 25 bp, Artificial
  Probe
ctaattctcctctacttcatttgtt

SEQ ID NO: 85969 - DNA, 25 bp, Artificial
  Probe
catacaccctcttctgtctaagctc

SEQ ID NO: 85970 - DNA, 25 bp, Artificial
  Probe
atacaccctcttctgtctaagctca

SEQ ID NO: 85971 - DNA, 25 bp, Artificial
  Probe
acaagaagtaactctgagatgtgag

SEQ ID NO: 85972 - DNA, 25 bp, Artificial
  Probe
gacaagaagtaactctgagatgtga

SEQ ID NO: 85973 - DNA, 25 bp, Artificial
  Probe
caagaagtaactctgagatgtgagc

SEQ ID NO: 85974 - DNA, 25 bp, Artificial
  Probe
ggacaagaagtaactctgagatgtg

SEQ ID NO: 85975 - DNA, 25 bp, Artificial
  Probe
aagtaactctgagatgtgagccaat

SEQ ID NO: 85976 - DNA, 25 bp, Artificial
  Probe
agtaactctgagatgtgagccaatt

SEQ ID NO: 85977 - DNA, 25 bp, Artificial
  Probe
aagaagtaactctgagatgtgagcc

SEQ ID NO: 85978 - DNA, 25 bp, Artificial
  Probe
aaccaagctcctatagatgattcag

SEQ ID NO: 85979 - DNA, 25 bp, Artificial
  Probe
caaccaagctcctatagatgattca

SEQ ID NO: 85980 - DNA, 25 bp, Artificial
  Probe
acaaccaagctcctatagatgattc

SEQ ID NO: 85981 - DNA, 25 bp, Artificial
  Probe
aacaaccaagctcctatagatgatt

SEQ ID NO: 85982 - DNA, 25 bp, Artificial
  Probe
ttaacaaccaagctcctatagatga

SEQ ID NO: 85983 - DNA, 25 bp, Artificial
  Probe
gaagtaactctgagatgtgagccaa

SEQ ID NO: 85984 - DNA, 25 bp, Artificial
  Probe
taacaaccaagctcctatagatgat

SEQ ID NO: 85985 - DNA, 25 bp, Artificial
  Probe
caggtgagtttccagagataaagaa

SEQ ID NO: 85986 - DNA, 25 bp, Artificial
  Probe
tcctgatttactttaacaaccaagc

SEQ ID NO: 85987 - DNA, 25 bp, Artificial
  Probe
aggtgagtttccagagataaagaat

SEQ ID NO: 85988 - DNA, 25 bp, Artificial
  Probe
ggtgagtttccagagataaagaatc

SEQ ID NO: 85989 - DNA, 25 bp, Artificial
  Probe
aagggacaagaagtaactctgagat

SEQ ID NO: 85990 - DNA, 25 bp, Artificial
  Probe
actcctgatttactttaacaaccaa

SEQ ID NO: 85991 - DNA, 25 bp, Artificial
  Probe
aactcctgatttactttaacaacca

SEQ ID NO: 85992 - DNA, 25 bp, Artificial
  Probe
ctggaactcctgatttactttaaca

SEQ ID NO: 85993 - DNA, 25 bp, Artificial
  Probe
actggaactcctgatttactttaac

SEQ ID NO: 85994 - DNA, 25 bp, Artificial
  Probe
gactggaactcctgatttactttaa

SEQ ID NO: 85995 - DNA, 25 bp, Artificial
  Probe
agaagtaactctgagatgtgagcca

SEQ ID NO: 85996 - DNA, 25 bp, Artificial
  Probe
gaagggacaagaagtaactctgaga

SEQ ID NO: 85997 - DNA, 25 bp, Artificial
  Probe
taactctgagatgtgagccaatttc

SEQ ID NO: 85998 - DNA, 25 bp, Artificial
  Probe
agggacaagaagtaactctgagatg

SEQ ID NO: 85999 - DNA, 25 bp, Artificial
  Probe
gaactcctgatttactttaacaacc

SEQ ID NO: 86000 - DNA, 25 bp, Artificial
  Probe
gtaactctgagatgtgagccaattt

SEQ ID NO: 86001 - DNA, 25 bp, Artificial
  Probe
tggaactcctgatttactttaacaa

SEQ ID NO: 86002 - DNA, 25 bp, Artificial
  Probe
ctcctgatttactttaacaaccaag

SEQ ID NO: 86003 - DNA, 25 bp, Artificial
  Probe
ggaactcctgatttactttaacaac

SEQ ID NO: 86004 - DNA, 25 bp, Artificial
  Probe
gcaggtgagtttccagagataaaga

SEQ ID NO: 86005 - DNA, 25 bp, Artificial
  Probe
agcaggtgagtttccagagataaag

SEQ ID NO: 86006 - DNA, 25 bp, Artificial
  Probe
gagcaggtgagtttccagagataaa

SEQ ID NO: 86007 - DNA, 25 bp, Artificial
  Probe
accaagctcctatagatgattcagg

SEQ ID NO: 86008 - DNA, 25 bp, Artificial
  Probe
tacctggtcctttgtttcttgagag

SEQ ID NO: 86009 - DNA, 25 bp, Artificial
  Probe
ctacctggtcctttgtttcttgaga

SEQ ID NO: 86010 - DNA, 25 bp, Artificial
  Probe
ggactggaactcctgatttacttta

SEQ ID NO: 86011 - DNA, 25 bp, Artificial
  Probe
gggacaagaagtaactctgagatgt

SEQ ID NO: 86012 - DNA, 25 bp, Artificial
  Probe
ggaagggacaagaagtaactctgag

SEQ ID NO: 86013 - DNA, 25 bp, Artificial
  Probe
tgatttactttaacaaccaagctcc

SEQ ID NO: 86014 - DNA, 25 bp, Artificial
  Probe
cctgatttactttaacaaccaagct

SEQ ID NO: 86015 - DNA, 25 bp, Artificial
  Probe
gatttactttaacaaccaagctcct

SEQ ID NO: 86016 - DNA, 25 bp, Artificial
  Probe
gagaggatagaggcaatagtcagaa

SEQ ID NO: 86017 - DNA, 25 bp, Artificial
  Probe
aactacgagaggatagaggcaatag

SEQ ID NO: 86018 - DNA, 25 bp, Artificial
  Probe
ctacgagaggatagaggcaatagtc

SEQ ID NO: 86019 - DNA, 25 bp, Artificial
  Probe
tacgagaggatagaggcaatagtca

SEQ ID NO: 86020 - DNA, 25 bp, Artificial
  Probe
aagagattattgatgaactcagagc

SEQ ID NO: 86021 - DNA, 25 bp, Artificial
  Probe
gcatagagatactcctgagaataac

SEQ ID NO: 86022 - DNA, 25 bp, Artificial
  Probe
cgagaggatagaggcaatagtcaga

SEQ ID NO: 86023 - DNA, 25 bp, Artificial
  Probe
agattattgatgaactcagagctgg

SEQ ID NO: 86024 - DNA, 25 bp, Artificial
  Probe
gaggatagaggcaatagtcagaaac

SEQ ID NO: 86025 - DNA, 25 bp, Artificial
  Probe
agaggatagaggcaatagtcagaaa

SEQ ID NO: 86026 - DNA, 25 bp, Artificial
  Probe
aaactacgagaggatagaggcaata

SEQ ID NO: 86027 - DNA, 25 bp, Artificial
  Probe
atactccatttgatttcacaccaga

SEQ ID NO: 86028 - DNA, 25 bp, Artificial
  Probe
gatactccatttgatttcacaccag

SEQ ID NO: 86029 - DNA, 25 bp, Artificial
  Probe
agatactccatttgatttcacacca

SEQ ID NO: 86030 - DNA, 25 bp, Artificial
  Probe
cagatactccatttgatttcacacc

SEQ ID NO: 86031 - DNA, 25 bp, Artificial
  Probe
ccagatactccatttgatttcacac

SEQ ID NO: 86032 - DNA, 25 bp, Artificial
  Probe
aacccagatactccatttgatttca

SEQ ID NO: 86033 - DNA, 25 bp, Artificial
  Probe
acgagaggatagaggcaatagtcag

SEQ ID NO: 86034 - DNA, 25 bp, Artificial
  Probe
agaataacccagatactccatttga

SEQ ID NO: 86035 - DNA, 25 bp, Artificial
  Probe
gagattattgatgaactcagagctg

SEQ ID NO: 86036 - DNA, 25 bp, Artificial
  Probe
agagattattgatgaactcagagct

SEQ ID NO: 86037 - DNA, 25 bp, Artificial
  Probe
catagagatactcctgagaataacc

SEQ ID NO: 86038 - DNA, 25 bp, Artificial
  Probe
cccagatactccatttgatttcaca

SEQ ID NO: 86039 - DNA, 25 bp, Artificial
  Probe
acccagatactccatttgatttcac

SEQ ID NO: 86040 - DNA, 25 bp, Artificial
  Probe
tgaagagattattgatgaactcaga

SEQ ID NO: 86041 - DNA, 25 bp, Artificial
  Probe
tactccatttgatttcacaccagaa

SEQ ID NO: 86042 - DNA, 25 bp, Artificial
  Probe
taacccagatactccatttgatttc

SEQ ID NO: 86043 - DNA, 25 bp, Artificial
  Probe
actacgagaggatagaggcaatagt

SEQ ID NO: 86044 - DNA, 25 bp, Artificial
  Probe
gcctccaatgagagtctatgaagtg

SEQ ID NO: 86045 - DNA, 25 bp, Artificial
  Probe
gtgcctccaatgagagtctatgaag

SEQ ID NO: 86046 - DNA, 25 bp, Artificial
  Probe
tacaagtgcctccaatgagagtcta

SEQ ID NO: 86047 - DNA, 25 bp, Artificial
  Probe
tgtgcatagagatactcctgagaat

SEQ ID NO: 86048 - DNA, 25 bp, Artificial
  Probe
ttgtgcatagagatactcctgagaa

SEQ ID NO: 86049 - DNA, 25 bp, Artificial
  Probe
gaataacccagatactccatttgat

SEQ ID NO: 86050 - DNA, 25 bp, Artificial
  Probe
aggatagaggcaatagtcagaaact

SEQ ID NO: 86051 - DNA, 25 bp, Artificial
  Probe
gtgcatagagatactcctgagaata

SEQ ID NO: 86052 - DNA, 25 bp, Artificial
  Probe
tagagatactcctgagaataaccca

SEQ ID NO: 86053 - DNA, 25 bp, Artificial
  Probe
gaagagattattgatgaactcagag

SEQ ID NO: 86054 - DNA, 25 bp, Artificial
  Probe
cctccaatgagagtctatgaagtgg

SEQ ID NO: 86055 - DNA, 25 bp, Artificial
  Probe
caagtgcctccaatgagagtctatg

SEQ ID NO: 86056 - DNA, 25 bp, Artificial
  Probe
tgagaataacccagatactccattt

SEQ ID NO: 86057 - DNA, 25 bp, Artificial
  Probe
gagaataacccagatactccatttg

SEQ ID NO: 86058 - DNA, 25 bp, Artificial
  Probe
tgcctccaatgagagtctatgaagt

SEQ ID NO: 86059 - DNA, 25 bp, Artificial
  Probe
agtgcctccaatgagagtctatgaa

SEQ ID NO: 86060 - DNA, 25 bp, Artificial
  Probe
aagtgcctccaatgagagtctatga

SEQ ID NO: 86061 - DNA, 25 bp, Artificial
  Probe
caatgactcagtaattatgtgcctc

SEQ ID NO: 86062 - DNA, 25 bp, Artificial
  Probe
tcagcaatatcagagtaactgttgt

SEQ ID NO: 86063 - DNA, 25 bp, Artificial
  Probe
gactcagtaattatgtgcctcctac

SEQ ID NO: 86064 - DNA, 25 bp, Artificial
  Probe
aatgactcagtaattatgtgcctcc

SEQ ID NO: 86065 - DNA, 25 bp, Artificial
  Probe
tgactcagtaattatgtgcctccta

SEQ ID NO: 86066 - DNA, 25 bp, Artificial
  Probe
tcatcagcaatatcagagtaactgt

SEQ ID NO: 86067 - DNA, 25 bp, Artificial
  Probe
atcagcaatatcagagtaactgttg

SEQ ID NO: 86068 - DNA, 25 bp, Artificial
  Probe
catcagcaatatcagagtaactgtt

SEQ ID NO: 86069 - DNA, 25 bp, Artificial
  Probe
atgactcagtaattatgtgcctcct

SEQ ID NO: 86070 - DNA, 25 bp, Artificial
  Probe
cagcaatatcagagtaactgttgta

SEQ ID NO: 86071 - DNA, 25 bp, Artificial
  Probe
ttcatcagcaatatcagagtaactg

SEQ ID NO: 86072 - DNA, 25 bp, Artificial
  Probe
acaatgactcagtaattatgtgcct

SEQ ID NO: 86073 - DNA, 25 bp, Artificial
  Probe
aacaatgactcagtaattatgtgcc

SEQ ID NO: 86074 - DNA, 25 bp, Artificial
  Probe
ctcctacttataacacacaaggctt

SEQ ID NO: 86075 - DNA, 25 bp, Artificial
  Probe
caacaatgactcagtaattatgtgc

SEQ ID NO: 86076 - DNA, 25 bp, Artificial
  Probe
agcaatatcagagtaactgttgtaa

SEQ ID NO: 86077 - DNA, 25 bp, Artificial
  Probe
gtgcctcctacttataacacacaag

SEQ ID NO: 86078 - DNA, 25 bp, Artificial
  Probe
ctcagtaattatgtgcctcctactt

SEQ ID NO: 86079 - DNA, 25 bp, Artificial
  Probe
gtggaatttctgaggagatggatag

SEQ ID NO: 86080 - DNA, 25 bp, Artificial
  Probe
actcagtaattatgtgcctcctact

SEQ ID NO: 86081 - DNA, 25 bp, Artificial
  Probe
tcagtaattatgtgcctcctactta

SEQ ID NO: 86082 - DNA, 25 bp, Artificial
  Probe
cctcctacttataacacacaaggct

SEQ ID NO: 86083 - DNA, 25 bp, Artificial
  Probe
attatgtgcctcctacttataacac

SEQ ID NO: 86084 - DNA, 25 bp, Artificial
  Probe
gatagccatctgtcaaagcatcatc

SEQ ID NO: 86085 - DNA, 25 bp, Artificial
  Probe
tgcctcctacttataacacacaagg

SEQ ID NO: 86086 - DNA, 25 bp, Artificial
  Probe
gcatcatctcaacaatgactcagta

SEQ ID NO: 86087 - DNA, 25 bp, Artificial
  Probe
ggtggaatttctgaggagatggata

SEQ ID NO: 86088 - DNA, 25 bp, Artificial
  Probe
atagccatctgtcaaagcatcatct

SEQ ID NO: 86089 - DNA, 25 bp, Artificial
  Probe
ctgtcaaagcatcatctcaacaatg

SEQ ID NO: 86090 - DNA, 25 bp, Artificial
  Probe
tctgtcaaagcatcatctcaacaat

SEQ ID NO: 86091 - DNA, 25 bp, Artificial
  Probe
atctgtcaaagcatcatctcaacaa

SEQ ID NO: 86092 - DNA, 25 bp, Artificial
  Probe
tttcatcagcaatatcagagtaact

SEQ ID NO: 86093 - DNA, 25 bp, Artificial
  Probe
catcatctcaacaatgactcagtaa

SEQ ID NO: 86094 - DNA, 25 bp, Artificial
  Probe
ccatctgtcaaagcatcatctcaac

SEQ ID NO: 86095 - DNA, 25 bp, Artificial
  Probe
aagcatcatctcaacaatgactcag

SEQ ID NO: 86096 - DNA, 25 bp, Artificial
  Probe
aattatgtgcctcctacttataaca

SEQ ID NO: 86097 - DNA, 25 bp, Artificial
  Probe
tggaatttctgaggagatggatagc

SEQ ID NO: 86098 - DNA, 25 bp, Artificial
  Probe
tcaacaatgactcagtaattatgtg

SEQ ID NO: 86099 - DNA, 25 bp, Artificial
  Probe
cagtaattatgtgcctcctacttat

SEQ ID NO: 86100 - DNA, 25 bp, Artificial
  Probe
catctgtcaaagcatcatctcaaca

SEQ ID NO: 86101 - DNA, 25 bp, Artificial
  Probe
tcatctcaacaatgactcagtaatt

SEQ ID NO: 86102 - DNA, 25 bp, Artificial
  Probe
tagccatctgtcaaagcatcatctc

SEQ ID NO: 86103 - DNA, 25 bp, Artificial
  Probe
ctcaacaatgactcagtaattatgt

SEQ ID NO: 86104 - DNA, 25 bp, Artificial
  Probe
atcatctcaacaatgactcagtaat

SEQ ID NO: 86105 - DNA, 25 bp, Artificial
  Probe
atttcatcagcaatatcagagtaac

SEQ ID NO: 86106 - DNA, 25 bp, Artificial
  Probe
gctggtgagttcctacattgttatt

SEQ ID NO: 86107 - DNA, 25 bp, Artificial
  Probe
actgagttaagtccaagcaatacat

SEQ ID NO: 86108 - DNA, 25 bp, Artificial
  Probe
ctgagttaagtccaagcaatacatg

SEQ ID NO: 86109 - DNA, 25 bp, Artificial
  Probe
ctaggctcactcggtaagtagaatt

SEQ ID NO: 86110 - DNA, 25 bp, Artificial
  Probe
aagttagatacggaggtggaggaat

SEQ ID NO: 86111 - DNA, 25 bp, Artificial
  Probe
ttcataaagttagatacggaggtgg

SEQ ID NO: 86112 - DNA, 25 bp, Artificial
  Probe
cataaagttagatacggaggtggag

SEQ ID NO: 86113 - DNA, 25 bp, Artificial
  Probe
ttgtaggaagtaagctggagagatg

SEQ ID NO: 86114 - DNA, 25 bp, Artificial
  Probe
tcataaagttagatacggaggtgga

SEQ ID NO: 86115 - DNA, 25 bp, Artificial
  Probe
ttaatgagctggtgagttcctacat

SEQ ID NO: 86116 - DNA, 25 bp, Artificial
  Probe
actaggctcactcggtaagtagaat

SEQ ID NO: 86117 - DNA, 25 bp, Artificial
  Probe
agctggtgagttcctacattgttat

SEQ ID NO: 86118 - DNA, 25 bp, Artificial
  Probe
agttaagtccaagcaatacatggta

SEQ ID NO: 86119 - DNA, 25 bp, Artificial
  Probe
gttaagtccaagcaatacatggtag

SEQ ID NO: 86120 - DNA, 25 bp, Artificial
  Probe
ataaagttagatacggaggtggagg

SEQ ID NO: 86121 - DNA, 25 bp, Artificial
  Probe
ccattcataaagttagatacggagg

SEQ ID NO: 86122 - DNA, 25 bp, Artificial
  Probe
taccaagccagatgactttaatgag

SEQ ID NO: 86123 - DNA, 25 bp, Artificial
  Probe
gctactaaggtaaccagacacacac

SEQ ID NO: 86124 - DNA, 25 bp, Artificial
  Probe
tgacacagacacattaaactaaaca

SEQ ID NO: 86125 - DNA, 25 bp, Artificial
  Probe
gtaggaagtaagctggagagatgtc

SEQ ID NO: 86126 - DNA, 25 bp, Artificial
  Probe
ctggtgagttcctacattgttattt

SEQ ID NO: 86127 - DNA, 25 bp, Artificial
  Probe
ttagatacggaggtggaggaatgtc

SEQ ID NO: 86128 - DNA, 25 bp, Artificial
  Probe
agttagatacggaggtggaggaatg

SEQ ID NO: 86129 - DNA, 25 bp, Artificial
  Probe
gagttaagtccaagcaatacatggt

SEQ ID NO: 86130 - DNA, 25 bp, Artificial
  Probe
tgagttaagtccaagcaatacatgg

SEQ ID NO: 86131 - DNA, 25 bp, Artificial
  Probe
ttaagtccaagcaatacatggtagc

SEQ ID NO: 86132 - DNA, 25 bp, Artificial
  Probe
taggaagtaagctggagagatgtct

SEQ ID NO: 86133 - DNA, 25 bp, Artificial
  Probe
tataaatgtaccaagccagatgact

SEQ ID NO: 86134 - DNA, 25 bp, Artificial
  Probe
gagctggtgagttcctacattgtta

SEQ ID NO: 86135 - DNA, 25 bp, Artificial
  Probe
ctataaatgtaccaagccagatgac

SEQ ID NO: 86136 - DNA, 25 bp, Artificial
  Probe
gttagatacggaggtggaggaatgt

SEQ ID NO: 86137 - DNA, 25 bp, Artificial
  Probe
attcataaagttagatacggaggtg

SEQ ID NO: 86138 - DNA, 25 bp, Artificial
  Probe
cattcataaagttagatacggaggt

SEQ ID NO: 86139 - DNA, 25 bp, Artificial
  Probe
atgtaccaagccagatgactttaat

SEQ ID NO: 86140 - DNA, 25 bp, Artificial
  Probe
ataaatgtaccaagccagatgactt

SEQ ID NO: 86141 - DNA, 25 bp, Artificial
  Probe
gactaggctcactcggtaagtagaa

SEQ ID NO: 86142 - DNA, 25 bp, Artificial
  Probe
aatgtaccaagccagatgactttaa

SEQ ID NO: 86143 - DNA, 25 bp, Artificial
  Probe
aaatgtaccaagccagatgacttta

SEQ ID NO: 86144 - DNA, 25 bp, Artificial
  Probe
taaatgtaccaagccagatgacttt

SEQ ID NO: 86145 - DNA, 25 bp, Artificial
  Probe
taaagttagatacggaggtggagga

SEQ ID NO: 86146 - DNA, 25 bp, Artificial
  Probe
tgtaggaagtaagctggagagatgt

SEQ ID NO: 86147 - DNA, 25 bp, Artificial
  Probe
gacaggctactaaggtaaccagaca

SEQ ID NO: 86148 - DNA, 25 bp, Artificial
  Probe
tgacaggctactaaggtaaccagac

SEQ ID NO: 86149 - DNA, 25 bp, Artificial
  Probe
gtgacaggctactaaggtaaccaga

SEQ ID NO: 86150 - DNA, 25 bp, Artificial
  Probe
gtaccaagccagatgactttaatga

SEQ ID NO: 86151 - DNA, 25 bp, Artificial
  Probe
catgtaccatagagatcaagtccag

SEQ ID NO: 86152 - DNA, 25 bp, Artificial
  Probe
tcagcactatctatgaatcagccat

SEQ ID NO: 86153 - DNA, 25 bp, Artificial
  Probe
atcagcactatctatgaatcagcca

SEQ ID NO: 86154 - DNA, 25 bp, Artificial
  Probe
taccatagagatcaagtccagcaag

SEQ ID NO: 86155 - DNA, 25 bp, Artificial
  Probe
gatcagcactatctatgaatcagcc

SEQ ID NO: 86156 - DNA, 25 bp, Artificial
  Probe
gtaccatagagatcaagtccagcaa

SEQ ID NO: 86157 - DNA, 25 bp, Artificial
  Probe
atgtaccatagagatcaagtccagc

SEQ ID NO: 86158 - DNA, 25 bp, Artificial
  Probe
cagcactatctatgaatcagccatg

SEQ ID NO: 86159 - DNA, 25 bp, Artificial
  Probe
atagagatcaagtccagcaagctaa

SEQ ID NO: 86160 - DNA, 25 bp, Artificial
  Probe
catagagatcaagtccagcaagcta

SEQ ID NO: 86161 - DNA, 25 bp, Artificial
  Probe
tgtaccatagagatcaagtccagca

SEQ ID NO: 86162 - DNA, 25 bp, Artificial
  Probe
tagagatcaagtccagcaagctaac

SEQ ID NO: 86163 - DNA, 25 bp, Artificial
  Probe
ttggtttactttcagaatacagaca

SEQ ID NO: 86164 - DNA, 25 bp, Artificial
  Probe
actatctatgaatcagccatgcact

SEQ ID NO: 86165 - DNA, 25 bp, Artificial
  Probe
cactatctatgaatcagccatgcac

SEQ ID NO: 86166 - DNA, 25 bp, Artificial
  Probe
tggtttactttcagaatacagacat

SEQ ID NO: 86167 - DNA, 25 bp, Artificial
  Probe
atcaagtccagcaagctaacagatt

SEQ ID NO: 86168 - DNA, 25 bp, Artificial
  Probe
cctcaaattcttggtttactttcag

SEQ ID NO: 86169 - DNA, 25 bp, Artificial
  Probe
cttggtttactttcagaatacagac

SEQ ID NO: 86170 - DNA, 25 bp, Artificial
  Probe
ctatctatgaatcagccatgcactg

SEQ ID NO: 86171 - DNA, 25 bp, Artificial
  Probe
actttcagaatacagacatcattga

SEQ ID NO: 86172 - DNA, 25 bp, Artificial
  Probe
ggtttactttcagaatacagacatc

SEQ ID NO: 86173 - DNA, 25 bp, Artificial
  Probe
tcttggtttactttcagaatacaga

SEQ ID NO: 86174 - DNA, 25 bp, Artificial
  Probe
gatcaagtccagcaagctaacagat

SEQ ID NO: 86175 - DNA, 25 bp, Artificial
  Probe
aagtccagcaagctaacagattcag

SEQ ID NO: 86176 - DNA, 25 bp, Artificial
  Probe
tcaagtccagcaagctaacagattc

SEQ ID NO: 86177 - DNA, 25 bp, Artificial
  Probe
ctcaaattcttggtttactttcaga

SEQ ID NO: 86178 - DNA, 25 bp, Artificial
  Probe
gtttattggtactacaagaagctgg

SEQ ID NO: 86179 - DNA, 25 bp, Artificial
  Probe
tttattggtactacaagaagctggg

SEQ ID NO: 86180 - DNA, 25 bp, Artificial
  Probe
acctcaaattcttggtttactttca

SEQ ID NO: 86181 - DNA, 25 bp, Artificial
  Probe
caagtccagcaagctaacagattca

SEQ ID NO: 86182 - DNA, 25 bp, Artificial
  Probe
agacctcaaattcttggtttacttt

SEQ ID NO: 86183 - DNA, 25 bp, Artificial
  Probe
ttattggtactacaagaagctggga

SEQ ID NO: 86184 - DNA, 25 bp, Artificial
  Probe
gtttactttcagaatacagacatca

SEQ ID NO: 86185 - DNA, 25 bp, Artificial
  Probe
gacctcaaattcttggtttactttc

SEQ ID NO: 86186 - DNA, 25 bp, Artificial
  Probe
tattggtactacaagaagctgggag

SEQ ID NO: 86187 - DNA, 25 bp, Artificial
  Probe
gagatcaagtccagcaagctaacag

SEQ ID NO: 86188 - DNA, 25 bp, Artificial
  Probe
tgtttattggtactacaagaagctg

SEQ ID NO: 86189 - DNA, 25 bp, Artificial
  Probe
tactttcagaatacagacatcattg

SEQ ID NO: 86190 - DNA, 25 bp, Artificial
  Probe
aacatgtaccatagagatcaagtcc

SEQ ID NO: 86191 - DNA, 25 bp, Artificial
  Probe
acatgtaccatagagatcaagtcca

SEQ ID NO: 86192 - DNA, 25 bp, Artificial
  Probe
gaagacctcaaattcttggtttact

SEQ ID NO: 86193 - DNA, 25 bp, Artificial
  Probe
agaagacctcaaattcttggtttac

SEQ ID NO: 86194 - DNA, 25 bp, Artificial
  Probe
gtactacaagaagctgggagaagac

SEQ ID NO: 86195 - DNA, 25 bp, Artificial
  Probe
gcaaacttttctactgtatgacctt

SEQ ID NO: 86196 - DNA, 25 bp, Artificial
  Probe
actgacacttctgataacttccaat

SEQ ID NO: 86197 - DNA, 25 bp, Artificial
  Probe
gactgacacttctgataacttccaa

SEQ ID NO: 86198 - DNA, 25 bp, Artificial
  Probe
gacacttctgataacttccaatcca

SEQ ID NO: 86199 - DNA, 25 bp, Artificial
  Probe
tgacacttctgataacttccaatcc

SEQ ID NO: 86200 - DNA, 25 bp, Artificial
  Probe
ctgacacttctgataacttccaatc

SEQ ID NO: 86201 - DNA, 25 bp, Artificial
  Probe
gagactgacacttctgataacttcc

SEQ ID NO: 86202 - DNA, 25 bp, Artificial
  Probe
ggagactgacacttctgataacttc

SEQ ID NO: 86203 - DNA, 25 bp, Artificial
  Probe
agactgacacttctgataacttcca

SEQ ID NO: 86204 - DNA, 25 bp, Artificial
  Probe
tactgtgtgatcttctgtcttcttg

SEQ ID NO: 86205 - DNA, 25 bp, Artificial
  Probe
ttactgtgtgatcttctgtcttctt

SEQ ID NO: 86206 - DNA, 25 bp, Artificial
  Probe
ttctgctctcttaacatcacctctg

SEQ ID NO: 86207 - DNA, 25 bp, Artificial
  Probe
acacttctgataacttccaatccag

SEQ ID NO: 86208 - DNA, 25 bp, Artificial
  Probe
cacttctgataacttccaatccagc

SEQ ID NO: 86209 - DNA, 25 bp, Artificial
  Probe
acttctttctgctctcttaacatca

SEQ ID NO: 86210 - DNA, 25 bp, Artificial
  Probe
cttctttctgctctcttaacatcac

SEQ ID NO: 86211 - DNA, 25 bp, Artificial
  Probe
ctctcaaggaccagaagtaggttaa

SEQ ID NO: 86212 - DNA, 25 bp, Artificial
  Probe
ctactatgacagcaatttgaacagg

SEQ ID NO: 86213 - DNA, 25 bp, Artificial
  Probe
ttctttctgctctcttaacatcacc

SEQ ID NO: 86214 - DNA, 25 bp, Artificial
  Probe
actactatgacagcaatttgaacag

SEQ ID NO: 86215 - DNA, 25 bp, Artificial
  Probe
ctttctgctctcttaacatcacctc

SEQ ID NO: 86216 - DNA, 25 bp, Artificial
  Probe
atgctagacttctttactgtgtgat

SEQ ID NO: 86217 - DNA, 25 bp, Artificial
  Probe
gatgctagacttctttactgtgtga

SEQ ID NO: 86218 - DNA, 25 bp, Artificial
  Probe
atggatgctagacttctttactgtg

SEQ ID NO: 86219 - DNA, 25 bp, Artificial
  Probe
tactatgacagcaatttgaacaggg

SEQ ID NO: 86220 - DNA, 25 bp, Artificial
  Probe
tttctgctctcttaacatcacctct

SEQ ID NO: 86221 - DNA, 25 bp, Artificial
  Probe
tctttctgctctcttaacatcacct

SEQ ID NO: 86222 - DNA, 25 bp, Artificial
  Probe
acttctttactgtgtgatcttctgt

SEQ ID NO: 86223 - DNA, 25 bp, Artificial
  Probe
acttctgataacttccaatccagcc

SEQ ID NO: 86224 - DNA, 25 bp, Artificial
  Probe
tgctagacttctttactgtgtgatc

SEQ ID NO: 86225 - DNA, 25 bp, Artificial
  Probe
tttactgtgtgatcttctgtcttct

SEQ ID NO: 86226 - DNA, 25 bp, Artificial
  Probe
tctttactgtgtgatcttctgtctt

SEQ ID NO: 86227 - DNA, 25 bp, Artificial
  Probe
ttctttactgtgtgatcttctgtct

SEQ ID NO: 86228 - DNA, 25 bp, Artificial
  Probe
tacttctttctgctctcttaacatc

SEQ ID NO: 86229 - DNA, 25 bp, Artificial
  Probe
ctttactgtgtgatcttctgtcttc

SEQ ID NO: 86230 - DNA, 25 bp, Artificial
  Probe
cttctttactgtgtgatcttctgtc

SEQ ID NO: 86231 - DNA, 25 bp, Artificial
  Probe
gacttctttactgtgtgatcttctg

SEQ ID NO: 86232 - DNA, 25 bp, Artificial
  Probe
ggatgctagacttctttactgtgtg

SEQ ID NO: 86233 - DNA, 25 bp, Artificial
  Probe
catggatgctagacttctttactgt

SEQ ID NO: 86234 - DNA, 25 bp, Artificial
  Probe
gctagacttctttactgtgtgatct

SEQ ID NO: 86235 - DNA, 25 bp, Artificial
  Probe
tggatgctagacttctttactgtgt

SEQ ID NO: 86236 - DNA, 25 bp, Artificial
  Probe
actgtgtgatcttctgtcttcttgc

SEQ ID NO: 86237 - DNA, 25 bp, Artificial
  Probe
agacttctttactgtgtgatcttct

SEQ ID NO: 86238 - DNA, 25 bp, Artificial
  Probe
tactactatgacagcaatttgaaca

SEQ ID NO: 86239 - DNA, 25 bp, Artificial
  Probe
gggagactgacacttctgataactt

SEQ ID NO: 86240 - DNA, 25 bp, Artificial
  Probe
tgtggatacaatggttatgcagaac

SEQ ID NO: 86241 - DNA, 25 bp, Artificial
  Probe
cagcaagtagagatgaactgtaacc

SEQ ID NO: 86242 - DNA, 25 bp, Artificial
  Probe
aatagacatggtcaaggagagattc

SEQ ID NO: 86243 - DNA, 25 bp, Artificial
  Probe
atagacatggtcaaggagagattct

SEQ ID NO: 86244 - DNA, 25 bp, Artificial
  Probe
gcagcaagtagagatgaactgtaac

SEQ ID NO: 86245 - DNA, 25 bp, Artificial
  Probe
tgaagtagaagactcagcactgtac

SEQ ID NO: 86246 - DNA, 25 bp, Artificial
  Probe
agagcaaagagttaaagttcctgat

SEQ ID NO: 86247 - DNA, 25 bp, Artificial
  Probe
gagcaaagagttaaagttcctgatt

SEQ ID NO: 86248 - DNA, 25 bp, Artificial
  Probe
agcaaagagttaaagttcctgattt

SEQ ID NO: 86249 - DNA, 25 bp, Artificial
  Probe
aaacagagcaaagagttaaagttcc

SEQ ID NO: 86250 - DNA, 25 bp, Artificial
  Probe
aacagagcaaagagttaaagttcct

SEQ ID NO: 86251 - DNA, 25 bp, Artificial
  Probe
gaagtagaagactcagcactgtacc

SEQ ID NO: 86252 - DNA, 25 bp, Artificial
  Probe
ggcagcaagtagagatgaactgtaa

SEQ ID NO: 86253 - DNA, 25 bp, Artificial
  Probe
aagtagaagactcagcactgtacct

SEQ ID NO: 86254 - DNA, 25 bp, Artificial
  Probe
ttattcagacgccaagacatttgat

SEQ ID NO: 86255 - DNA, 25 bp, Artificial
  Probe
cagagcaaagagttaaagttcctga

SEQ ID NO: 86256 - DNA, 25 bp, Artificial
  Probe
gttattcagacgccaagacatttga

SEQ ID NO: 86257 - DNA, 25 bp, Artificial
  Probe
acagagcaaagagttaaagttcctg

SEQ ID NO: 86258 - DNA, 25 bp, Artificial
  Probe
aaatgaaagggcagcaagtagagat

SEQ ID NO: 86259 - DNA, 25 bp, Artificial
  Probe
agcaagtagagatgaactgtaaccc

SEQ ID NO: 86260 - DNA, 25 bp, Artificial
  Probe
tattcagacgccaagacatttgatc

SEQ ID NO: 86261 - DNA, 25 bp, Artificial
  Probe
gcaaagagttaaagttcctgattta

SEQ ID NO: 86262 - DNA, 25 bp, Artificial
  Probe
caaatagacatggtcaaggagagat

SEQ ID NO: 86263 - DNA, 25 bp, Artificial
  Probe
atcaaatagacatggtcaaggagag

SEQ ID NO: 86264 - DNA, 25 bp, Artificial
  Probe
gatcaaatagacatggtcaaggaga

SEQ ID NO: 86265 - DNA, 25 bp, Artificial
  Probe
aaatagacatggtcaaggagagatt

SEQ ID NO: 86266 - DNA, 25 bp, Artificial
  Probe
ctgttattcagacgccaagacattt

SEQ ID NO: 86267 - DNA, 25 bp, Artificial
  Probe
tcaaatagacatggtcaaggagaga

SEQ ID NO: 86268 - DNA, 25 bp, Artificial
  Probe
tgttattcagacgccaagacatttg

SEQ ID NO: 86269 - DNA, 25 bp, Artificial
  Probe
agtagaagactcagcactgtacctg

SEQ ID NO: 86270 - DNA, 25 bp, Artificial
  Probe
cgatcaaatagacatggtcaaggag

SEQ ID NO: 86271 - DNA, 25 bp, Artificial
  Probe
aatgaaagggcagcaagtagagatg

SEQ ID NO: 86272 - DNA, 25 bp, Artificial
  Probe
tagacatggtcaaggagagattctc

SEQ ID NO: 86273 - DNA, 25 bp, Artificial
  Probe
gtagaagactcagcactgtacctgt

SEQ ID NO: 86274 - DNA, 25 bp, Artificial
  Probe
gctgttattcagacgccaagacatt

SEQ ID NO: 86275 - DNA, 25 bp, Artificial
  Probe
tagaagactcagcactgtacctgtg

SEQ ID NO: 86276 - DNA, 25 bp, Artificial
  Probe
aattttcttccaggctcttttgatg

SEQ ID NO: 86277 - DNA, 25 bp, Artificial
  Probe
tcgatcaaatagacatggtcaagga

SEQ ID NO: 86278 - DNA, 25 bp, Artificial
  Probe
gtcgatcaaatagacatggtcaagg

SEQ ID NO: 86279 - DNA, 25 bp, Artificial
  Probe
gaattttcttccaggctcttttgat

SEQ ID NO: 86280 - DNA, 25 bp, Artificial
  Probe
atgctttgtcttgaattttcttcca

SEQ ID NO: 86281 - DNA, 25 bp, Artificial
  Probe
cttgaattttcttccaggctctttt

SEQ ID NO: 86282 - DNA, 25 bp, Artificial
  Probe
ttgaattttcttccaggctcttttg

SEQ ID NO: 86283 - DNA, 25 bp, Artificial
  Probe
tgctttgtcttgaattttcttccag

SEQ ID NO: 86284 - DNA, 25 bp, Artificial
  Probe
ctgaagtagaagactcagcactgta

SEQ ID NO: 86285 - DNA, 25 bp, Artificial
  Probe
tagagatgaactgtaaccccgaaaa

SEQ ID NO: 86286 - DNA, 25 bp, Artificial
  Probe
atatagcaacatacttggtgaggag

SEQ ID NO: 86287 - DNA, 25 bp, Artificial
  Probe
tatagcaacatacttggtgaggaga

SEQ ID NO: 86288 - DNA, 25 bp, Artificial
  Probe
atagcaacatacttggtgaggagaa

SEQ ID NO: 86289 - DNA, 25 bp, Artificial
  Probe
gccttatatagcaacatacttggtg

SEQ ID NO: 86290 - DNA, 25 bp, Artificial
  Probe
agccttatatagcaacatacttggt

SEQ ID NO: 86291 - DNA, 25 bp, Artificial
  Probe
tatatagcaacatacttggtgagga

SEQ ID NO: 86292 - DNA, 25 bp, Artificial
  Probe
aagccttatatagcaacatacttgg

SEQ ID NO: 86293 - DNA, 25 bp, Artificial
  Probe
tagcaacatacttggtgaggagaac

SEQ ID NO: 86294 - DNA, 25 bp, Artificial
  Probe
ttatatagcaacatacttggtgagg

SEQ ID NO: 86295 - DNA, 25 bp, Artificial
  Probe
ccttatatagcaacatacttggtga

SEQ ID NO: 86296 - DNA, 25 bp, Artificial
  Probe
attacattgaaagaagatggcgttc

SEQ ID NO: 86297 - DNA, 25 bp, Artificial
  Probe
taaagaagaaggcttaaatgcgttc

SEQ ID NO: 86298 - DNA, 25 bp, Artificial
  Probe
cattacattgaaagaagatggcgtt

SEQ ID NO: 86299 - DNA, 25 bp, Artificial
  Probe
caagggcatatttaatggtttctcc

SEQ ID NO: 86300 - DNA, 25 bp, Artificial
  Probe
acaagggcatatttaatggtttctc

SEQ ID NO: 86301 - DNA, 25 bp, Artificial
  Probe
ataaagaagaaggcttaaatgcgtt

SEQ ID NO: 86302 - DNA, 25 bp, Artificial
  Probe
ctccatgaagtattatgcactgtgt

SEQ ID NO: 86303 - DNA, 25 bp, Artificial
  Probe
tataaagaagaaggcttaaatgcgt

SEQ ID NO: 86304 - DNA, 25 bp, Artificial
  Probe
gtcttcaaagccttatatagcaaca

SEQ ID NO: 86305 - DNA, 25 bp, Artificial
  Probe
gtataaagaagaaggcttaaatgcg

SEQ ID NO: 86306 - DNA, 25 bp, Artificial
  Probe
agtcttcaaagccttatatagcaac

SEQ ID NO: 86307 - DNA, 25 bp, Artificial
  Probe
tacaagggcatatttaatggtttct

SEQ ID NO: 86308 - DNA, 25 bp, Artificial
  Probe
gaagtacaagggcatatttaatggt

SEQ ID NO: 86309 - DNA, 25 bp, Artificial
  Probe
cttatatagcaacatacttggtgag

SEQ ID NO: 86310 - DNA, 25 bp, Artificial
  Probe
ctcagaagtacaagggcatatttaa

SEQ ID NO: 86311 - DNA, 25 bp, Artificial
  Probe
agaagtacaagggcatatttaatgg

SEQ ID NO: 86312 - DNA, 25 bp, Artificial
  Probe
agtacaagggcatatttaatggttt

SEQ ID NO: 86313 - DNA, 25 bp, Artificial
  Probe
aagtacaagggcatatttaatggtt

SEQ ID NO: 86314 - DNA, 25 bp, Artificial
  Probe
tccatgaagtattatgcactgtgtg

SEQ ID NO: 86315 - DNA, 25 bp, Artificial
  Probe
tcttcaaagccttatatagcaacat

SEQ ID NO: 86316 - DNA, 25 bp, Artificial
  Probe
gaagtcttcaaagccttatatagca

SEQ ID NO: 86317 - DNA, 25 bp, Artificial
  Probe
acatcactgtatctagctgcttctg

SEQ ID NO: 86318 - DNA, 25 bp, Artificial
  Probe
ttacattgaaagaagatggcgttcg

SEQ ID NO: 86319 - DNA, 25 bp, Artificial
  Probe
gtacaagggcatatttaatggtttc

SEQ ID NO: 86320 - DNA, 25 bp, Artificial
  Probe
gatcccatacaccatgatgaagttc

SEQ ID NO: 86321 - DNA, 25 bp, Artificial
  Probe
gctccatgaagtattatgcactgtg

SEQ ID NO: 86322 - DNA, 25 bp, Artificial
  Probe
tacatcactgtatctagctgcttct

SEQ ID NO: 86323 - DNA, 25 bp, Artificial
  Probe
gtacatcactgtatctagctgcttc

SEQ ID NO: 86324 - DNA, 25 bp, Artificial
  Probe
tatctgtggcgtacatcactgtatc

SEQ ID NO: 86325 - DNA, 25 bp, Artificial
  Probe
ctatctgtggcgtacatcactgtat

SEQ ID NO: 86326 - DNA, 25 bp, Artificial
  Probe
aagtcttcaaagccttatatagcaa

SEQ ID NO: 86327 - DNA, 25 bp, Artificial
  Probe
agatcccatacaccatgatgaagtt

SEQ ID NO: 86328 - DNA, 25 bp, Artificial
  Probe
tgtataaagaagaaggcttaaatgc

SEQ ID NO: 86329 - DNA, 25 bp, Artificial
  Probe
gctgttgttcctctggatttagtaa

SEQ ID NO: 86330 - DNA, 25 bp, Artificial
  Probe
tcagaagtacaagggcatatttaat

SEQ ID NO: 86331 - DNA, 25 bp, Artificial
  Probe
aatcagccttatacctgtagttacc

SEQ ID NO: 86332 - DNA, 25 bp, Artificial
  Probe
tgaatcagccttatacctgtagtta

SEQ ID NO: 86333 - DNA, 25 bp, Artificial
  Probe
gaatcagccttatacctgtagttac

SEQ ID NO: 86334 - DNA, 25 bp, Artificial
  Probe
ctctgaatcagccttatacctgtag

SEQ ID NO: 86335 - DNA, 25 bp, Artificial
  Probe
ctgaatcagccttatacctgtagtt

SEQ ID NO: 86336 - DNA, 25 bp, Artificial
  Probe
tctgaatcagccttatacctgtagt

SEQ ID NO: 86337 - DNA, 25 bp, Artificial
  Probe
actctgaatcagccttatacctgta

SEQ ID NO: 86338 - DNA, 25 bp, Artificial
  Probe
ccttatacctgtagttaccctggaa

SEQ ID NO: 86339 - DNA, 25 bp, Artificial
  Probe
gtgtgtgtatatgtaaagcaggact

SEQ ID NO: 86340 - DNA, 25 bp, Artificial
  Probe
cttatacctgtagttaccctggaaa

SEQ ID NO: 86341 - DNA, 25 bp, Artificial
  Probe
atggagcgtgtgtgtatatgtaaag

SEQ ID NO: 86342 - DNA, 25 bp, Artificial
  Probe
tgtgtgtatatgtaaagcaggactg

SEQ ID NO: 86343 - DNA, 25 bp, Artificial
  Probe
ttatacctgtagttaccctggaaac

SEQ ID NO: 86344 - DNA, 25 bp, Artificial
  Probe
gactctgaatcagccttatacctgt

SEQ ID NO: 86345 - DNA, 25 bp, Artificial
  Probe
tatacctgtagttaccctggaaacc

SEQ ID NO: 86346 - DNA, 25 bp, Artificial
  Probe
gtagttaccctggaaacctgtttaa

SEQ ID NO: 86347 - DNA, 25 bp, Artificial
  Probe
cgtgtgtgtatatgtaaagcaggac

SEQ ID NO: 86348 - DNA, 25 bp, Artificial
  Probe
ggactctgaatcagccttatacctg

SEQ ID NO: 86349 - DNA, 25 bp, Artificial
  Probe
ctggactctgaatcagccttatacc

SEQ ID NO: 86350 - DNA, 25 bp, Artificial
  Probe
cctggactctgaatcagccttatac

SEQ ID NO: 86351 - DNA, 25 bp, Artificial
  Probe
cttgtttcatgtgtatggatgtacg

SEQ ID NO: 86352 - DNA, 25 bp, Artificial
  Probe
tctcttgtttcatgtgtatggatgt

SEQ ID NO: 86353 - DNA, 25 bp, Artificial
  Probe
ctctcttgtttcatgtgtatggatg

SEQ ID NO: 86354 - DNA, 25 bp, Artificial
  Probe
cctctcttgtttcatgtgtatggat

SEQ ID NO: 86355 - DNA, 25 bp, Artificial
  Probe
tgtagttaccctggaaacctgttta

SEQ ID NO: 86356 - DNA, 25 bp, Artificial
  Probe
ggtagcagcatatatctggaacagg

SEQ ID NO: 86357 - DNA, 25 bp, Artificial
  Probe
gagcgtgtgtgtatatgtaaagcag

SEQ ID NO: 86358 - DNA, 25 bp, Artificial
  Probe
ttcatgtgtatggatgtacgctgtc

SEQ ID NO: 86359 - DNA, 25 bp, Artificial
  Probe
tcttgtttcatgtgtatggatgtac

SEQ ID NO: 86360 - DNA, 25 bp, Artificial
  Probe
ctcttgtttcatgtgtatggatgta

SEQ ID NO: 86361 - DNA, 25 bp, Artificial
  Probe
atcagccttatacctgtagttaccc

SEQ ID NO: 86362 - DNA, 25 bp, Artificial
  Probe
tggactctgaatcagccttatacct

SEQ ID NO: 86363 - DNA, 25 bp, Artificial
  Probe
catggagcgtgtgtgtatatgtaaa

SEQ ID NO: 86364 - DNA, 25 bp, Artificial
  Probe
atacctgtagttaccctggaaacct

SEQ ID NO: 86365 - DNA, 25 bp, Artificial
  Probe
gcatggagcgtgtgtgtatatgtaa

SEQ ID NO: 86366 - DNA, 25 bp, Artificial
  Probe
cggtagcagcatatatctggaacag

SEQ ID NO: 86367 - DNA, 25 bp, Artificial
  Probe
tagttaccctggaaacctgtttaaa

SEQ ID NO: 86368 - DNA, 25 bp, Artificial
  Probe
ttgtttcatgtgtatggatgtacgc

SEQ ID NO: 86369 - DNA, 25 bp, Artificial
  Probe
cagccttatacctgtagttaccctg

SEQ ID NO: 86370 - DNA, 25 bp, Artificial
  Probe
tcagccttatacctgtagttaccct

SEQ ID NO: 86371 - DNA, 25 bp, Artificial
  Probe
gccttatacctgtagttaccctgga

SEQ ID NO: 86372 - DNA, 25 bp, Artificial
  Probe
agccttatacctgtagttaccctgg

SEQ ID NO: 86373 - DNA, 25 bp, Artificial
  Probe
gtagcagcatatatctggaacaggc

SEQ ID NO: 86374 - DNA, 25 bp, Artificial
  Probe
ctgtagttaccctggaaacctgttt

SEQ ID NO: 86375 - DNA, 25 bp, Artificial
  Probe
ccctctcttgtttcatgtgtatgga

SEQ ID NO: 86376 - DNA, 25 bp, Artificial
  Probe
tgttcctgtctcaaatccaatagtt

SEQ ID NO: 86377 - DNA, 25 bp, Artificial
  Probe
ttctgttcctgtctcaaatccaata

SEQ ID NO: 86378 - DNA, 25 bp, Artificial
  Probe
tctgttcctgtctcaaatccaatag

SEQ ID NO: 86379 - DNA, 25 bp, Artificial
  Probe
gttcctgtctcaaatccaatagttc

SEQ ID NO: 86380 - DNA, 25 bp, Artificial
  Probe
ctgttcctgtctcaaatccaatagt

SEQ ID NO: 86381 - DNA, 25 bp, Artificial
  Probe
gttctgttcctgtctcaaatccaat

SEQ ID NO: 86382 - DNA, 25 bp, Artificial
  Probe
tgttctgttcctgtctcaaatccaa

SEQ ID NO: 86383 - DNA, 25 bp, Artificial
  Probe
ttgttctgttcctgtctcaaatcca

SEQ ID NO: 86384 - DNA, 25 bp, Artificial
  Probe
gtatttaaaccactcttgctctccc

SEQ ID NO: 86385 - DNA, 25 bp, Artificial
  Probe
tatttaaaccactcttgctctccca

SEQ ID NO: 86386 - DNA, 25 bp, Artificial
  Probe
ttcctcccgtatttaaaccactctt

SEQ ID NO: 86387 - DNA, 25 bp, Artificial
  Probe
cgtatttaaaccactcttgctctcc

SEQ ID NO: 86388 - DNA, 25 bp, Artificial
  Probe
ccgtatttaaaccactcttgctctc

SEQ ID NO: 86389 - DNA, 25 bp, Artificial
  Probe
cttcctcccgtatttaaaccactct

SEQ ID NO: 86390 - DNA, 25 bp, Artificial
  Probe
tcctcccgtatttaaaccactcttg

SEQ ID NO: 86391 - DNA, 25 bp, Artificial
  Probe
tttgttctgttcctgtctcaaatcc

SEQ ID NO: 86392 - DNA, 25 bp, Artificial
  Probe
tcgatttgttctgttcctgtctcaa

SEQ ID NO: 86393 - DNA, 25 bp, Artificial
  Probe
cccgtatttaaaccactcttgctct

SEQ ID NO: 86394 - DNA, 25 bp, Artificial
  Probe
tcccgtatttaaaccactcttgctc

SEQ ID NO: 86395 - DNA, 25 bp, Artificial
  Probe
ctcccgtatttaaaccactcttgct

SEQ ID NO: 86396 - DNA, 25 bp, Artificial
  Probe
ccttcctcccgtatttaaaccactc

SEQ ID NO: 86397 - DNA, 25 bp, Artificial
  Probe
cgatttgttctgttcctgtctcaaa

SEQ ID NO: 86398 - DNA, 25 bp, Artificial
  Probe
atttaaaccactcttgctctcccac

SEQ ID NO: 86399 - DNA, 25 bp, Artificial
  Probe
cctcccgtatttaaaccactcttgc

SEQ ID NO: 86400 - DNA, 25 bp, Artificial
  Probe
cttctctctcctttacgagacgaaa

SEQ ID NO: 86401 - DNA, 25 bp, Artificial
  Probe
cccttcctcccgtatttaaaccact

SEQ ID NO: 86402 - DNA, 25 bp, Artificial
  Probe
tcccttcctcccgtatttaaaccac

SEQ ID NO: 86403 - DNA, 25 bp, Artificial
  Probe
acttctctctcctttacgagacgaa

SEQ ID NO: 86404 - DNA, 25 bp, Artificial
  Probe
atttgttctgttcctgtctcaaatc

SEQ ID NO: 86405 - DNA, 25 bp, Artificial
  Probe
gatttgttctgttcctgtctcaaat

SEQ ID NO: 86406 - DNA, 25 bp, Artificial
  Probe
tttaaaccactcttgctctcccacc

SEQ ID NO: 86407 - DNA, 25 bp, Artificial
  Probe
ttctctctcctttacgagacgaaaa

SEQ ID NO: 86408 - DNA, 25 bp, Artificial
  Probe
cctgaacaacatgcattccgagaag

SEQ ID NO: 86409 - DNA, 25 bp, Artificial
  Probe
tctctctcctttacgagacgaaaag

SEQ ID NO: 86410 - DNA, 25 bp, Artificial
  Probe
gaacaacatgcattccgagaagctg

SEQ ID NO: 86411 - DNA, 25 bp, Artificial
  Probe
ctgaacaacatgcattccgagaagc

SEQ ID NO: 86412 - DNA, 25 bp, Artificial
  Probe
tattgatgagaaggaagacacagaa

SEQ ID NO: 86413 - DNA, 25 bp, Artificial
  Probe
attgatgagaaggaagacacagaac

SEQ ID NO: 86414 - DNA, 25 bp, Artificial
  Probe
atattgatgagaaggaagacacaga

SEQ ID NO: 86415 - DNA, 25 bp, Artificial
  Probe
tctgtgttgccaataaggaatatac

SEQ ID NO: 86416 - DNA, 25 bp, Artificial
  Probe
ctatctgtgttgccaataaggaata

SEQ ID NO: 86417 - DNA, 25 bp, Artificial
  Probe
tgatgagaaggaagacacagaacaa

SEQ ID NO: 86418 - DNA, 25 bp, Artificial
  Probe
ttgatgagaaggaagacacagaaca

SEQ ID NO: 86419 - DNA, 25 bp, Artificial
  Probe
attcttcagtaccttagagttccac

SEQ ID NO: 86420 - DNA, 25 bp, Artificial
  Probe
cattcttcagtaccttagagttcca

SEQ ID NO: 86421 - DNA, 25 bp, Artificial
  Probe
ccattcttcagtaccttagagttcc

SEQ ID NO: 86422 - DNA, 25 bp, Artificial
  Probe
tccattcttcagtaccttagagttc

SEQ ID NO: 86423 - DNA, 25 bp, Artificial
  Probe
cttccattcttcagtaccttagagt

SEQ ID NO: 86424 - DNA, 25 bp, Artificial
  Probe
gcttccattcttcagtaccttagag

SEQ ID NO: 86425 - DNA, 25 bp, Artificial
  Probe
aagattcatgtgaaggagatagtgg

SEQ ID NO: 86426 - DNA, 25 bp, Artificial
  Probe
ctgtgttgccaataaggaatataca

SEQ ID NO: 86427 - DNA, 25 bp, Artificial
  Probe
ttccattcttcagtaccttagagtt

SEQ ID NO: 86428 - DNA, 25 bp, Artificial
  Probe
atctgtgttgccaataaggaatata

SEQ ID NO: 86429 - DNA, 25 bp, Artificial
  Probe
tatctgtgttgccaataaggaatat

SEQ ID NO: 86430 - DNA, 25 bp, Artificial
  Probe
ttcttcagtaccttagagttccact

SEQ ID NO: 86431 - DNA, 25 bp, Artificial
  Probe
tgtgttgccaataaggaatatacaa

SEQ ID NO: 86432 - DNA, 25 bp, Artificial
  Probe
cctatctgtgttgccaataaggaat

SEQ ID NO: 86433 - DNA, 25 bp, Artificial
  Probe
tgctggtgaacataatattgatgag

SEQ ID NO: 86434 - DNA, 25 bp, Artificial
  Probe
gctggtgaacataatattgatgaga

SEQ ID NO: 86435 - DNA, 25 bp, Artificial
  Probe
aatattgatgagaaggaagacacag

SEQ ID NO: 86436 - DNA, 25 bp, Artificial
  Probe
ggcttccattcttcagtaccttaga

SEQ ID NO: 86437 - DNA, 25 bp, Artificial
  Probe
ttgctggtgaacataatattgatga

SEQ ID NO: 86438 - DNA, 25 bp, Artificial
  Probe
gttgctggtgaacataatattgatg

SEQ ID NO: 86439 - DNA, 25 bp, Artificial
  Probe
gaagacacagaacaaaggagaaatg

SEQ ID NO: 86440 - DNA, 25 bp, Artificial
  Probe
tgctggaactggataaacctttaat

SEQ ID NO: 86441 - DNA, 25 bp, Artificial
  Probe
ttgctggaactggataaacctttaa

SEQ ID NO: 86442 - DNA, 25 bp, Artificial
  Probe
acctatctgtgttgccaataaggaa

SEQ ID NO: 86443 - DNA, 25 bp, Artificial
  Probe
atgagaaggaagacacagaacaaag

SEQ ID NO: 86444 - DNA, 25 bp, Artificial
  Probe
gatgagaaggaagacacagaacaaa

SEQ ID NO: 86445 - DNA, 25 bp, Artificial
  Probe
ggaagacacagaacaaaggagaaat

SEQ ID NO: 86446 - DNA, 25 bp, Artificial
  Probe
tactaaggtttccaggtatgtcaac

SEQ ID NO: 86447 - DNA, 25 bp, Artificial
  Probe
atatcttcctcaagtttggttctgg

SEQ ID NO: 86448 - DNA, 25 bp, Artificial
  Probe
cttgctggaactggataaaccttta

SEQ ID NO: 86449 - DNA, 25 bp, Artificial
  Probe
aggcttccattcttcagtaccttag

SEQ ID NO: 86450 - DNA, 25 bp, Artificial
  Probe
ttcctcaagtttggttctggttatg

SEQ ID NO: 86451 - DNA, 25 bp, Artificial
  Probe
cttcctcaagtttggttctggttat

SEQ ID NO: 86452 - DNA, 25 bp, Artificial
  Probe
gctggaactggataaacctttaata

SEQ ID NO: 86453 - DNA, 25 bp, Artificial
  Probe
tcatcaccagtacaatgcaactatt

SEQ ID NO: 86454 - DNA, 25 bp, Artificial
  Probe
aagtttggttctggttatgtgagtg

SEQ ID NO: 86455 - DNA, 25 bp, Artificial
  Probe
aatatcttcctcaagtttggttctg

SEQ ID NO: 86456 - DNA, 25 bp, Artificial
  Probe
catcaccagtacaatgcaactatta

SEQ ID NO: 86457 - DNA, 25 bp, Artificial
  Probe
cctgccttatctggaagtcatataa

SEQ ID NO: 86458 - DNA, 25 bp, Artificial
  Probe
aatgcgaacttattggctcttagga

SEQ ID NO: 86459 - DNA, 25 bp, Artificial
  Probe
tatctggaagtcatataagccctct

SEQ ID NO: 86460 - DNA, 25 bp, Artificial
  Probe
ctgccttctgtaaatacctgtatct

SEQ ID NO: 86461 - DNA, 25 bp, Artificial
  Probe
ttcctgccttctgtaaatacctgta

SEQ ID NO: 86462 - DNA, 25 bp, Artificial
  Probe
atggagtctaatggtcaagctctaa

SEQ ID NO: 86463 - DNA, 25 bp, Artificial
  Probe
aatggagtctaatggtcaagctcta

SEQ ID NO: 86464 - DNA, 25 bp, Artificial
  Probe
cctgccttctgtaaatacctgtatc

SEQ ID NO: 86465 - DNA, 25 bp, Artificial
  Probe
ttatctggaagtcatataagccctc

SEQ ID NO: 86466 - DNA, 25 bp, Artificial
  Probe
tcctgccttctgtaaatacctgtat

SEQ ID NO: 86467 - DNA, 25 bp, Artificial
  Probe
atctggaagtcatataagccctctg

SEQ ID NO: 86468 - DNA, 25 bp, Artificial
  Probe
ccctgccttatctggaagtcatata

SEQ ID NO: 86469 - DNA, 25 bp, Artificial
  Probe
atgcgaacttattggctcttaggag

SEQ ID NO: 86470 - DNA, 25 bp, Artificial
  Probe
tgccttctgtaaatacctgtatcta

SEQ ID NO: 86471 - DNA, 25 bp, Artificial
  Probe
ctcttcctgccttctgtaaatacct

SEQ ID NO: 86472 - DNA, 25 bp, Artificial
  Probe
ttctcgaatggagtctaatggtcaa

SEQ ID NO: 86473 - DNA, 25 bp, Artificial
  Probe
tcctcttcctgccttctgtaaatac

SEQ ID NO: 86474 - DNA, 25 bp, Artificial
  Probe
gtcctcttcctgccttctgtaaata

SEQ ID NO: 86475 - DNA, 25 bp, Artificial
  Probe
gtaaatcccaagcagacaatttctt

SEQ ID NO: 86476 - DNA, 25 bp, Artificial
  Probe
aatttcttgctgttggtacttggat

SEQ ID NO: 86477 - DNA, 25 bp, Artificial
  Probe
tctcgaatggagtctaatggtcaag

SEQ ID NO: 86478 - DNA, 25 bp, Artificial
  Probe
cttctcgaatggagtctaatggtca

SEQ ID NO: 86479 - DNA, 25 bp, Artificial
  Probe
tcttcctgccttctgtaaatacctg

SEQ ID NO: 86480 - DNA, 25 bp, Artificial
  Probe
tgtaaatcccaagcagacaatttct

SEQ ID NO: 86481 - DNA, 25 bp, Artificial
  Probe
gccttctgtaaatacctgtatctag

SEQ ID NO: 86482 - DNA, 25 bp, Artificial
  Probe
ctgtaaatcccaagcagacaatttc

SEQ ID NO: 86483 - DNA, 25 bp, Artificial
  Probe
gaatggagtctaatggtcaagctct

SEQ ID NO: 86484 - DNA, 25 bp, Artificial
  Probe
cttcctgccttctgtaaatacctgt

SEQ ID NO: 86485 - DNA, 25 bp, Artificial
  Probe
atttcttgctgttggtacttggatg

SEQ ID NO: 86486 - DNA, 25 bp, Artificial
  Probe
actgcttctcgaatggagtctaatg

SEQ ID NO: 86487 - DNA, 25 bp, Artificial
  Probe
cactgcttctcgaatggagtctaat

SEQ ID NO: 86488 - DNA, 25 bp, Artificial
  Probe
gacaatttcttgctgttggtacttg

SEQ ID NO: 86489 - DNA, 25 bp, Artificial
  Probe
agacaatttcttgctgttggtactt

SEQ ID NO: 86490 - DNA, 25 bp, Artificial
  Probe
cctcttcctgccttctgtaaatacc

SEQ ID NO: 86491 - DNA, 25 bp, Artificial
  Probe
tctaatggtcaagctctaaagatcc

SEQ ID NO: 86492 - DNA, 25 bp, Artificial
  Probe
cctgtaaatcccaagcagacaattt

SEQ ID NO: 86493 - DNA, 25 bp, Artificial
  Probe
tgcgaacttattggctcttaggaga

SEQ ID NO: 86494 - DNA, 25 bp, Artificial
  Probe
tgccttatctggaagtcatataagc

SEQ ID NO: 86495 - DNA, 25 bp, Artificial
  Probe
caatttcttgctgttggtacttgga

SEQ ID NO: 86496 - DNA, 25 bp, Artificial
  Probe
agtctaatggtcaagctctaaagat

SEQ ID NO: 86497 - DNA, 25 bp, Artificial
  Probe
gtcaagctctaaagatccatgtctc

SEQ ID NO: 86498 - DNA, 25 bp, Artificial
  Probe
gtctaatggtcaagctctaaagatc

SEQ ID NO: 86499 - DNA, 25 bp, Artificial
  Probe
gccttatctggaagtcatataagcc

SEQ ID NO: 86500 - DNA, 25 bp, Artificial
  Probe
gagtctaatggtcaagctctaaaga

SEQ ID NO: 86501 - DNA, 25 bp, Artificial
  Probe
ggagtctaatggtcaagctctaaag

SEQ ID NO: 86502 - DNA, 25 bp, Artificial
  Probe
cctagatagaatgtggagtcatcat

SEQ ID NO: 86503 - DNA, 25 bp, Artificial
  Probe
atagaatgtggagtcatcatggatc

SEQ ID NO: 86504 - DNA, 25 bp, Artificial
  Probe
gatagaatgtggagtcatcatggat

SEQ ID NO: 86505 - DNA, 25 bp, Artificial
  Probe
tagatagaatgtggagtcatcatgg

SEQ ID NO: 86506 - DNA, 25 bp, Artificial
  Probe
agatagaatgtggagtcatcatgga

SEQ ID NO: 86507 - DNA, 25 bp, Artificial
  Probe
tcctagatagaatgtggagtcatca

SEQ ID NO: 86508 - DNA, 25 bp, Artificial
  Probe
ctagatagaatgtggagtcatcatg

SEQ ID NO: 86509 - DNA, 25 bp, Artificial
  Probe
gaacttatttcttcactccacaaca

SEQ ID NO: 86510 - DNA, 25 bp, Artificial
  Probe
acttatttcttcactccacaacatt

SEQ ID NO: 86511 - DNA, 25 bp, Artificial
  Probe
aacttatttcttcactccacaacat

SEQ ID NO: 86512 - DNA, 25 bp, Artificial
  Probe
tatttcttcactccacaacatttgc

SEQ ID NO: 86513 - DNA, 25 bp, Artificial
  Probe
tggaaagtaggtcttcagagaacta

SEQ ID NO: 86514 - DNA, 25 bp, Artificial
  Probe
tctcctggaagacattctcttgtaa

SEQ ID NO: 86515 - DNA, 25 bp, Artificial
  Probe
ttctaggtctggaaagtaggtcttc

SEQ ID NO: 86516 - DNA, 25 bp, Artificial
  Probe
cttctaggtctggaaagtaggtctt

SEQ ID NO: 86517 - DNA, 25 bp, Artificial
  Probe
gaaagtaggtcttcagagaactagg

SEQ ID NO: 86518 - DNA, 25 bp, Artificial
  Probe
ggaaagtaggtcttcagagaactag

SEQ ID NO: 86519 - DNA, 25 bp, Artificial
  Probe
cttatttcttcactccacaacattt

SEQ ID NO: 86520 - DNA, 25 bp, Artificial
  Probe
gatgttgccctcctagatagaatgt

SEQ ID NO: 86521 - DNA, 25 bp, Artificial
  Probe
atttcttcactccacaacatttgct

SEQ ID NO: 86522 - DNA, 25 bp, Artificial
  Probe
ttatttcttcactccacaacatttg

SEQ ID NO: 86523 - DNA, 25 bp, Artificial
  Probe
tatttggaatacgatggacatgagg

SEQ ID NO: 86524 - DNA, 25 bp, Artificial
  Probe
atgttgccctcctagatagaatgtg

SEQ ID NO: 86525 - DNA, 25 bp, Artificial
  Probe
tctaggtctggaaagtaggtcttca

SEQ ID NO: 86526 - DNA, 25 bp, Artificial
  Probe
aaagtaggtcttcagagaactaggc

SEQ ID NO: 86527 - DNA, 25 bp, Artificial
  Probe
ctgccttgagaaactccattgattt

SEQ ID NO: 86528 - DNA, 25 bp, Artificial
  Probe
ctggaaagtaggtcttcagagaact

SEQ ID NO: 86529 - DNA, 25 bp, Artificial
  Probe
atttggaatacgatggacatgagga

SEQ ID NO: 86530 - DNA, 25 bp, Artificial
  Probe
ctaggtctggaaagtaggtcttcag

SEQ ID NO: 86531 - DNA, 25 bp, Artificial
  Probe
ttggaatacgatggacatgaggaaa

SEQ ID NO: 86532 - DNA, 25 bp, Artificial
  Probe
tttggaatacgatggacatgaggaa

SEQ ID NO: 86533 - DNA, 25 bp, Artificial
  Probe
tttcttcactccacaacatttgctg

SEQ ID NO: 86534 - DNA, 25 bp, Artificial
  Probe
agaaactccattgatttcacatagc

SEQ ID NO: 86535 - DNA, 25 bp, Artificial
  Probe
cttgagaaactccattgatttcaca

SEQ ID NO: 86536 - DNA, 25 bp, Artificial
  Probe
ccttgagaaactccattgatttcac

SEQ ID NO: 86537 - DNA, 25 bp, Artificial
  Probe
ttgagaaactccattgatttcacat

SEQ ID NO: 86538 - DNA, 25 bp, Artificial
  Probe
ctccagaacttatttcttcactcca

SEQ ID NO: 86539 - DNA, 25 bp, Artificial
  Probe
ctcctggaagacattctcttgtaaa

SEQ ID NO: 86540 - DNA, 25 bp, Artificial
  Probe
tccagaacttatttcttcactccac

SEQ ID NO: 86541 - DNA, 25 bp, Artificial
  Probe
tcctggaagacattctcttgtaaac

SEQ ID NO: 86542 - DNA, 25 bp, Artificial
  Probe
ccagaacttatttcttcactccaca

SEQ ID NO: 86543 - DNA, 25 bp, Artificial
  Probe
cctggaagacattctcttgtaaaca

SEQ ID NO: 86544 - DNA, 25 bp, Artificial
  Probe
agaacttatttcttcactccacaac

SEQ ID NO: 86545 - DNA, 25 bp, Artificial
  Probe
cagaacttatttcttcactccacaa

SEQ ID NO: 86546 - DNA, 25 bp, Artificial
  Probe
ctggaagacattctcttgtaaacat

SEQ ID NO: 86547 - DNA, 25 bp, Artificial
  Probe
gtaatacctgctcatcaactgctac

SEQ ID NO: 86548 - DNA, 25 bp, Artificial
  Probe
gtaagtggtctcagaagatgctaga

SEQ ID NO: 86549 - DNA, 25 bp, Artificial
  Probe
taatacctgctcatcaactgctacc

SEQ ID NO: 86550 - DNA, 25 bp, Artificial
  Probe
taagtggtctcagaagatgctagag

SEQ ID NO: 86551 - DNA, 25 bp, Artificial
  Probe
tgtaagtggtctcagaagatgctag

SEQ ID NO: 86552 - DNA, 25 bp, Artificial
  Probe
aacatctggtacatcgaactctaag

SEQ ID NO: 86553 - DNA, 25 bp, Artificial
  Probe
gtaacatctggtacatcgaactcta

SEQ ID NO: 86554 - DNA, 25 bp, Artificial
  Probe
ctgtaagtggtctcagaagatgcta

SEQ ID NO: 86555 - DNA, 25 bp, Artificial
  Probe
catctggtacatcgaactctaagaa

SEQ ID NO: 86556 - DNA, 25 bp, Artificial
  Probe
taacatctggtacatcgaactctaa

SEQ ID NO: 86557 - DNA, 25 bp, Artificial
  Probe
tctggtacatcgaactctaagaatc

SEQ ID NO: 86558 - DNA, 25 bp, Artificial
  Probe
acatctggtacatcgaactctaaga

SEQ ID NO: 86559 - DNA, 25 bp, Artificial
  Probe
atctggtacatcgaactctaagaat

SEQ ID NO: 86560 - DNA, 25 bp, Artificial
  Probe
taagagttcatttagggagtctgtc

SEQ ID NO: 86561 - DNA, 25 bp, Artificial
  Probe
gaagatgctagaggaaacagaagat

SEQ ID NO: 86562 - DNA, 25 bp, Artificial
  Probe
gatgctagaggaaacagaagatgaa

SEQ ID NO: 86563 - DNA, 25 bp, Artificial
  Probe
aagatgctagaggaaacagaagatg

SEQ ID NO: 86564 - DNA, 25 bp, Artificial
  Probe
atgctagaggaaacagaagatgaac

SEQ ID NO: 86565 - DNA, 25 bp, Artificial
  Probe
ttaagagttcatttagggagtctgt

SEQ ID NO: 86566 - DNA, 25 bp, Artificial
  Probe
ggtaacatctggtacatcgaactct

SEQ ID NO: 86567 - DNA, 25 bp, Artificial
  Probe
agaagatgctagaggaaacagaaga

SEQ ID NO: 86568 - DNA, 25 bp, Artificial
  Probe
cagaagatgctagaggaaacagaag

SEQ ID NO: 86569 - DNA, 25 bp, Artificial
  Probe
aagagttcatttagggagtctgtca

SEQ ID NO: 86570 - DNA, 25 bp, Artificial
  Probe
agatgctagaggaaacagaagatga

SEQ ID NO: 86571 - DNA, 25 bp, Artificial
  Probe
tggtaacatctggtacatcgaactc

SEQ ID NO: 86572 - DNA, 25 bp, Artificial
  Probe
ctggtaacatctggtacatcgaact

SEQ ID NO: 86573 - DNA, 25 bp, Artificial
  Probe
tcagaagatgctagaggaaacagaa

SEQ ID NO: 86574 - DNA, 25 bp, Artificial
  Probe
ggagccctctagtgataaattctga

SEQ ID NO: 86575 - DNA, 25 bp, Artificial
  Probe
tgctagaggaaacagaagatgaact

SEQ ID NO: 86576 - DNA, 25 bp, Artificial
  Probe
gagccctctagtgataaattctgag

SEQ ID NO: 86577 - DNA, 25 bp, Artificial
  Probe
tggagccctctagtgataaattctg

SEQ ID NO: 86578 - DNA, 25 bp, Artificial
  Probe
agagttcatttagggagtctgtcag

SEQ ID NO: 86579 - DNA, 25 bp, Artificial
  Probe
caagcctggtaacatctggtacatc

SEQ ID NO: 86580 - DNA, 25 bp, Artificial
  Probe
aatacctgctcatcaactgctacct

SEQ ID NO: 86581 - DNA, 25 bp, Artificial
  Probe
gtccaataaactctctgttctccca

SEQ ID NO: 86582 - DNA, 25 bp, Artificial
  Probe
agtccaataaactctctgttctccc

SEQ ID NO: 86583 - DNA, 25 bp, Artificial
  Probe
ggtaatacctgctcatcaactgcta

SEQ ID NO: 86584 - DNA, 25 bp, Artificial
  Probe
ttcatttagggagtctgtcaggaac

SEQ ID NO: 86585 - DNA, 25 bp, Artificial
  Probe
gttcatttagggagtctgtcaggaa

SEQ ID NO: 86586 - DNA, 25 bp, Artificial
  Probe
ctagaggaaacagaagatgaactgg

SEQ ID NO: 86587 - DNA, 25 bp, Artificial
  Probe
ctcagaagatgctagaggaaacaga

SEQ ID NO: 86588 - DNA, 25 bp, Artificial
  Probe
tctcagaagatgctagaggaaacag

SEQ ID NO: 86589 - DNA, 25 bp, Artificial
  Probe
gctagaggaaacagaagatgaactg

SEQ ID NO: 86590 - DNA, 25 bp, Artificial
  Probe
gagttcatttagggagtctgtcagg

SEQ ID NO: 86591 - DNA, 25 bp, Artificial
  Probe
atttagggagtctgtcaggaacttg

SEQ ID NO: 86592 - DNA, 25 bp, Artificial
  Probe
ctcaatctgctaccattcacaataa

SEQ ID NO: 86593 - DNA, 25 bp, Artificial
  Probe
gctcaatctgctaccattcacaata

SEQ ID NO: 86594 - DNA, 25 bp, Artificial
  Probe
attctactggaccatcaacaagatt

SEQ ID NO: 86595 - DNA, 25 bp, Artificial
  Probe
gattctactggaccatcaacaagat

SEQ ID NO: 86596 - DNA, 25 bp, Artificial
  Probe
ttctactggaccatcaacaagattc

SEQ ID NO: 86597 - DNA, 25 bp, Artificial
  Probe
cgtaactattctcatgtcactcaac

SEQ ID NO: 86598 - DNA, 25 bp, Artificial
  Probe
aactattctcatgtcactcaactgc

SEQ ID NO: 86599 - DNA, 25 bp, Artificial
  Probe
taactattctcatgtcactcaactg

SEQ ID NO: 86600 - DNA, 25 bp, Artificial
  Probe
gtaactattctcatgtcactcaact

SEQ ID NO: 86601 - DNA, 25 bp, Artificial
  Probe
aatgctaagttggtagactctctgc

SEQ ID NO: 86602 - DNA, 25 bp, Artificial
  Probe
acgtaactattctcatgtcactcaa

SEQ ID NO: 86603 - DNA, 25 bp, Artificial
  Probe
ctattctcatgtcactcaactgcaa

SEQ ID NO: 86604 - DNA, 25 bp, Artificial
  Probe
tattctcatgtcactcaactgcaac

SEQ ID NO: 86605 - DNA, 25 bp, Artificial
  Probe
tcaatctgctaccattcacaataaa

SEQ ID NO: 86606 - DNA, 25 bp, Artificial
  Probe
tctactggaccatcaacaagattcc

SEQ ID NO: 86607 - DNA, 25 bp, Artificial
  Probe
aaatgctaagttggtagactctctg

SEQ ID NO: 86608 - DNA, 25 bp, Artificial
  Probe
caaacattgattctactggaccatc

SEQ ID NO: 86609 - DNA, 25 bp, Artificial
  Probe
ggctcaatctgctaccattcacaat

SEQ ID NO: 86610 - DNA, 25 bp, Artificial
  Probe
actattctcatgtcactcaactgca

SEQ ID NO: 86611 - DNA, 25 bp, Artificial
  Probe
atgctaagttggtagactctctgct

SEQ ID NO: 86612 - DNA, 25 bp, Artificial
  Probe
tctcatgtcactcaactgcaactaa

SEQ ID NO: 86613 - DNA, 25 bp, Artificial
  Probe
ttctcatgtcactcaactgcaacta

SEQ ID NO: 86614 - DNA, 25 bp, Artificial
  Probe
gcaaacattgattctactggaccat

SEQ ID NO: 86615 - DNA, 25 bp, Artificial
  Probe
tgattctactggaccatcaacaaga

SEQ ID NO: 86616 - DNA, 25 bp, Artificial
  Probe
attctcatgtcactcaactgcaact

SEQ ID NO: 86617 - DNA, 25 bp, Artificial
  Probe
tgctaagttggtagactctctgctc

SEQ ID NO: 86618 - DNA, 25 bp, Artificial
  Probe
tacgtaactattctcatgtcactca

SEQ ID NO: 86619 - DNA, 25 bp, Artificial
  Probe
taagttggtagactctctgctccag

SEQ ID NO: 86620 - DNA, 25 bp, Artificial
  Probe
ctaagttggtagactctctgctcca

SEQ ID NO: 86621 - DNA, 25 bp, Artificial
  Probe
cttctgcaaacattgattctactgg

SEQ ID NO: 86622 - DNA, 25 bp, Artificial
  Probe
ccttctgcaaacattgattctactg

SEQ ID NO: 86623 - DNA, 25 bp, Artificial
  Probe
ttctgcaaacattgattctactgga

SEQ ID NO: 86624 - DNA, 25 bp, Artificial
  Probe
atgtcactcaactgcaactaaactc

SEQ ID NO: 86625 - DNA, 25 bp, Artificial
  Probe
ctcatgtcactcaactgcaactaaa

SEQ ID NO: 86626 - DNA, 25 bp, Artificial
  Probe
catgtcactcaactgcaactaaact

SEQ ID NO: 86627 - DNA, 25 bp, Artificial
  Probe
tcatgtcactcaactgcaactaaac

SEQ ID NO: 86628 - DNA, 25 bp, Artificial
  Probe
tctgcaaacattgattctactggac

SEQ ID NO: 86629 - DNA, 25 bp, Artificial
  Probe
caagattccctttgtgcaatttacg

SEQ ID NO: 86630 - DNA, 25 bp, Artificial
  Probe
aagattccctttgtgcaatttacgt

SEQ ID NO: 86631 - DNA, 25 bp, Artificial
  Probe
gctaagttggtagactctctgctcc

SEQ ID NO: 86632 - DNA, 25 bp, Artificial
  Probe
aaacattgattctactggaccatca

SEQ ID NO: 86633 - DNA, 25 bp, Artificial
  Probe
atcttctggtttgaacctgtttctg

SEQ ID NO: 86634 - DNA, 25 bp, Artificial
  Probe
catcttctggtttgaacctgtttct

SEQ ID NO: 86635 - DNA, 25 bp, Artificial
  Probe
gccttctgcaaacattgattctact

SEQ ID NO: 86636 - DNA, 25 bp, Artificial
  Probe
gatgctcaaaatgctaagttggtag

SEQ ID NO: 86637 - DNA, 25 bp, Artificial
  Probe
ggagatgtctatgtcaatgatgctt

SEQ ID NO: 86638 - DNA, 25 bp, Artificial
  Probe
aacttggagatgtctatgtcaatga

SEQ ID NO: 86639 - DNA, 25 bp, Artificial
  Probe
acttggagatgtctatgtcaatgat

SEQ ID NO: 86640 - DNA, 25 bp, Artificial
  Probe
cttggagatgtctatgtcaatgatg

SEQ ID NO: 86641 - DNA, 25 bp, Artificial
  Probe
ttggagatgtctatgtcaatgatgc

SEQ ID NO: 86642 - DNA, 25 bp, Artificial
  Probe
tggagatgtctatgtcaatgatgct

SEQ ID NO: 86643 - DNA, 25 bp, Artificial
  Probe
tgaagattaccttgcctgttgactt

SEQ ID NO: 86644 - DNA, 25 bp, Artificial
  Probe
ttgatgaagaaggagctgaactact

SEQ ID NO: 86645 - DNA, 25 bp, Artificial
  Probe
tgatgaagaaggagctgaactactt

SEQ ID NO: 86646 - DNA, 25 bp, Artificial
  Probe
gagatgtctatgtcaatgatgcttt

SEQ ID NO: 86647 - DNA, 25 bp, Artificial
  Probe
gtgaagattaccttgcctgttgact

SEQ ID NO: 86648 - DNA, 25 bp, Artificial
  Probe
aaacttggagatgtctatgtcaatg

SEQ ID NO: 86649 - DNA, 25 bp, Artificial
  Probe
caaacttggagatgtctatgtcaat

SEQ ID NO: 86650 - DNA, 25 bp, Artificial
  Probe
gaagattaccttgcctgttgacttt

SEQ ID NO: 86651 - DNA, 25 bp, Artificial
  Probe
tgtgaagattaccttgcctgttgac

SEQ ID NO: 86652 - DNA, 25 bp, Artificial
  Probe
gtgtgaagattaccttgcctgttga

SEQ ID NO: 86653 - DNA, 25 bp, Artificial
  Probe
taaggtgctcaacaacatggagatt

SEQ ID NO: 86654 - DNA, 25 bp, Artificial
  Probe
ttaaggtgctcaacaacatggagat

SEQ ID NO: 86655 - DNA, 25 bp, Artificial
  Probe
aagattaccttgcctgttgactttg

SEQ ID NO: 86656 - DNA, 25 bp, Artificial
  Probe
gtatgatgaagagggagccaagatt

SEQ ID NO: 86657 - DNA, 25 bp, Artificial
  Probe
ctttcatgtagaggaagaagggaag

SEQ ID NO: 86658 - DNA, 25 bp, Artificial
  Probe
tatgatgaagagggagccaagattg

SEQ ID NO: 86659 - DNA, 25 bp, Artificial
  Probe
tgctagacaaagtcaatgagatgat

SEQ ID NO: 86660 - DNA, 25 bp, Artificial
  Probe
atgctagacaaagtcaatgagatga

SEQ ID NO: 86661 - DNA, 25 bp, Artificial
  Probe
gatgcttctgggaacaaggttaaag

SEQ ID NO: 86662 - DNA, 25 bp, Artificial
  Probe
gctagacaaagtcaatgagatgatc

SEQ ID NO: 86663 - DNA, 25 bp, Artificial
  Probe
tttgatgaagaaggagctgaactac

SEQ ID NO: 86664 - DNA, 25 bp, Artificial
  Probe
aaagatgcttctgggaacaaggtta

SEQ ID NO: 86665 - DNA, 25 bp, Artificial
  Probe
tatgctagacaaagtcaatgagatg

SEQ ID NO: 86666 - DNA, 25 bp, Artificial
  Probe
agatgcttctgggaacaaggttaaa

SEQ ID NO: 86667 - DNA, 25 bp, Artificial
  Probe
aagatgcttctgggaacaaggttaa

SEQ ID NO: 86668 - DNA, 25 bp, Artificial
  Probe
agattaccttgcctgttgactttgt

SEQ ID NO: 86669 - DNA, 25 bp, Artificial
  Probe
gatgaagaaggagctgaactacttt

SEQ ID NO: 86670 - DNA, 25 bp, Artificial
  Probe
atgtagaggaagaagggaagggaaa

SEQ ID NO: 86671 - DNA, 25 bp, Artificial
  Probe
agtaagaaatatgctgaggctgtgg

SEQ ID NO: 86672 - DNA, 25 bp, Artificial
  Probe
attggcacatctctgtatgatgaag

SEQ ID NO: 86673 - DNA, 25 bp, Artificial
  Probe
gattggcacatctctgtatgatgaa

SEQ ID NO: 86674 - DNA, 25 bp, Artificial
  Probe
tttcatgtagaggaagaagggaagg

SEQ ID NO: 86675 - DNA, 25 bp, Artificial
  Probe
cagtaagaaatatgctgaggctgtg

SEQ ID NO: 86676 - DNA, 25 bp, Artificial
  Probe
atgaagaaggagctgaactactttg

SEQ ID NO: 86677 - DNA, 25 bp, Artificial
  Probe
agattggcacatctctgtatgatga

SEQ ID NO: 86678 - DNA, 25 bp, Artificial
  Probe
aatatgctagacaaagtcaatgaga

SEQ ID NO: 86679 - DNA, 25 bp, Artificial
  Probe
gctttcatgtagaggaagaagggaa

SEQ ID NO: 86680 - DNA, 25 bp, Artificial
  Probe
tgtatgatgaagagggagccaagat

SEQ ID NO: 86681 - DNA, 25 bp, Artificial
  Probe
aatggtgtgaagattaccttgcctg

SEQ ID NO: 86682 - DNA, 25 bp, Artificial
  Probe
actacgatatggattcttgttgcta

SEQ ID NO: 86683 - DNA, 25 bp, Artificial
  Probe
acgatatggattcttgttgctaatg

SEQ ID NO: 86684 - DNA, 25 bp, Artificial
  Probe
cgatatggattcttgttgctaatga

SEQ ID NO: 86685 - DNA, 25 bp, Artificial
  Probe
cactacgatatggattcttgttgct

SEQ ID NO: 86686 - DNA, 25 bp, Artificial
  Probe
ctacgatatggattcttgttgctaa

SEQ ID NO: 86687 - DNA, 25 bp, Artificial
  Probe
atggattcttgttgctaatgaagta

SEQ ID NO: 86688 - DNA, 25 bp, Artificial
  Probe
tatggattcttgttgctaatgaagt

SEQ ID NO: 86689 - DNA, 25 bp, Artificial
  Probe
ggattcttgttgctaatgaagtacc

SEQ ID NO: 86690 - DNA, 25 bp, Artificial
  Probe
tacgatatggattcttgttgctaat

SEQ ID NO: 86691 - DNA, 25 bp, Artificial
  Probe
ccatgagatacagagattgacagat

SEQ ID NO: 86692 - DNA, 25 bp, Artificial
  Probe
cacactacgatatggattcttgttg

SEQ ID NO: 86693 - DNA, 25 bp, Artificial
  Probe
tacagagattgacagatattgtgcc

SEQ ID NO: 86694 - DNA, 25 bp, Artificial
  Probe
tccatgagatacagagattgacaga

SEQ ID NO: 86695 - DNA, 25 bp, Artificial
  Probe
catccatgagatacagagattgaca

SEQ ID NO: 86696 - DNA, 25 bp, Artificial
  Probe
atccatgagatacagagattgacag

SEQ ID NO: 86697 - DNA, 25 bp, Artificial
  Probe
tggattcttgttgctaatgaagtac

SEQ ID NO: 86698 - DNA, 25 bp, Artificial
  Probe
catgaggagattaaccaggtgattg

SEQ ID NO: 86699 - DNA, 25 bp, Artificial
  Probe
atacagagattgacagatattgtgc

SEQ ID NO: 86700 - DNA, 25 bp, Artificial
  Probe
acactacgatatggattcttgttgc

SEQ ID NO: 86701 - DNA, 25 bp, Artificial
  Probe
cagagattgacagatattgtgcctc

SEQ ID NO: 86702 - DNA, 25 bp, Artificial
  Probe
tcatccatgagatacagagattgac

SEQ ID NO: 86703 - DNA, 25 bp, Artificial
  Probe
gtcatccatgagatacagagattga

SEQ ID NO: 86704 - DNA, 25 bp, Artificial
  Probe
cctactcatctaagagaagtcgctc

SEQ ID NO: 86705 - DNA, 25 bp, Artificial
  Probe
cctgatattgaccagaatgtactcc

SEQ ID NO: 86706 - DNA, 25 bp, Artificial
  Probe
tgtcatccatgagatacagagattg

SEQ ID NO: 86707 - DNA, 25 bp, Artificial
  Probe
acagagattgacagatattgtgcct

SEQ ID NO: 86708 - DNA, 25 bp, Artificial
  Probe
ctgatattgaccagaatgtactccg

SEQ ID NO: 86709 - DNA, 25 bp, Artificial
  Probe
gatatggattcttgttgctaatgaa

SEQ ID NO: 86710 - DNA, 25 bp, Artificial
  Probe
ccacactacgatatggattcttgtt

SEQ ID NO: 86711 - DNA, 25 bp, Artificial
  Probe
ccatgaggagattaaccaggtgatt

SEQ ID NO: 86712 - DNA, 25 bp, Artificial
  Probe
atatggattcttgttgctaatgaag

SEQ ID NO: 86713 - DNA, 25 bp, Artificial
  Probe
acataatctattgactttgccctga

SEQ ID NO: 86714 - DNA, 25 bp, Artificial
  Probe
ctattgactttgccctgatattgac

SEQ ID NO: 86715 - DNA, 25 bp, Artificial
  Probe
tctattgactttgccctgatattga

SEQ ID NO: 86716 - DNA, 25 bp, Artificial
  Probe
atattgaccagaatgtactccgcaa

SEQ ID NO: 86717 - DNA, 25 bp, Artificial
  Probe
gatattgaccagaatgtactccgca

SEQ ID NO: 86718 - DNA, 25 bp, Artificial
  Probe
tgatattgaccagaatgtactccgc

SEQ ID NO: 86719 - DNA, 25 bp, Artificial
  Probe
cttcctctacttcacctccatcctt

SEQ ID NO: 86720 - DNA, 25 bp, Artificial
  Probe
tattgactttgccctgatattgacc

SEQ ID NO: 86721 - DNA, 25 bp, Artificial
  Probe
ctctacttcacctccatccttcaga

SEQ ID NO: 86722 - DNA, 25 bp, Artificial
  Probe
ttcctctacttcacctccatccttc

SEQ ID NO: 86723 - DNA, 25 bp, Artificial
  Probe
cataatctattgactttgccctgat

SEQ ID NO: 86724 - DNA, 25 bp, Artificial
  Probe
atctattgactttgccctgatattg

SEQ ID NO: 86725 - DNA, 25 bp, Artificial
  Probe
gagattaaccaggtgattggaacac

SEQ ID NO: 86726 - DNA, 25 bp, Artificial
  Probe
catgagatacagagattgacagata

SEQ ID NO: 86727 - DNA, 25 bp, Artificial
  Probe
tccatttagtggcttaaccctattt

SEQ ID NO: 86728 - DNA, 25 bp, Artificial
  Probe
ctgggcttagcttgtactttctatc

SEQ ID NO: 86729 - DNA, 25 bp, Artificial
  Probe
gtccatttagtggcttaaccctatt

SEQ ID NO: 86730 - DNA, 25 bp, Artificial
  Probe
ggcttagcttgtactttctatccaa

SEQ ID NO: 86731 - DNA, 25 bp, Artificial
  Probe
atcaaggtccatttagtggcttaac

SEQ ID NO: 86732 - DNA, 25 bp, Artificial
  Probe
actgggcttagcttgtactttctat

SEQ ID NO: 86733 - DNA, 25 bp, Artificial
  Probe
gcttagcttgtactttctatccaaa

SEQ ID NO: 86734 - DNA, 25 bp, Artificial
  Probe
aactgggcttagcttgtactttcta

SEQ ID NO: 86735 - DNA, 25 bp, Artificial
  Probe
gatcaaggtccatttagtggcttaa

SEQ ID NO: 86736 - DNA, 25 bp, Artificial
  Probe
gggcttagcttgtactttctatcca

SEQ ID NO: 86737 - DNA, 25 bp, Artificial
  Probe
tgggcttagcttgtactttctatcc

SEQ ID NO: 86738 - DNA, 25 bp, Artificial
  Probe
gcactgctttattatgagtaagaat

SEQ ID NO: 86739 - DNA, 25 bp, Artificial
  Probe
ggtccatttagtggcttaaccctat

SEQ ID NO: 86740 - DNA, 25 bp, Artificial
  Probe
tttacaggcaacaagggtctttcac

SEQ ID NO: 86741 - DNA, 25 bp, Artificial
  Probe
tcaaggtccatttagtggcttaacc

SEQ ID NO: 86742 - DNA, 25 bp, Artificial
  Probe
aatatatgtgattaccccagagacc

SEQ ID NO: 86743 - DNA, 25 bp, Artificial
  Probe
aggtccatttagtggcttaacccta

SEQ ID NO: 86744 - DNA, 25 bp, Artificial
  Probe
agcactgctttattatgagtaagaa

SEQ ID NO: 86745 - DNA, 25 bp, Artificial
  Probe
ctgaatatggaggaaaagtacgtct

SEQ ID NO: 86746 - DNA, 25 bp, Artificial
  Probe
caaggtccatttagtggcttaaccc

SEQ ID NO: 86747 - DNA, 25 bp, Artificial
  Probe
tgaatatggaggaaaagtacgtctt

SEQ ID NO: 86748 - DNA, 25 bp, Artificial
  Probe
gaatatggaggaaaagtacgtcttg

SEQ ID NO: 86749 - DNA, 25 bp, Artificial
  Probe
aatatggaggaaaagtacgtcttgg

SEQ ID NO: 86750 - DNA, 25 bp, Artificial
  Probe
gttttacaggcaacaagggtctttc

SEQ ID NO: 86751 - DNA, 25 bp, Artificial
  Probe
aaggtccatttagtggcttaaccct

SEQ ID NO: 86752 - DNA, 25 bp, Artificial
  Probe
tagcactgctttattatgagtaaga

SEQ ID NO: 86753 - DNA, 25 bp, Artificial
  Probe
ttttacaggcaacaagggtctttca

SEQ ID NO: 86754 - DNA, 25 bp, Artificial
  Probe
gaaatagcactgctttattatgagt

SEQ ID NO: 86755 - DNA, 25 bp, Artificial
  Probe
tgaaatagcactgctttattatgag

SEQ ID NO: 86756 - DNA, 25 bp, Artificial
  Probe
ctgaaatagcactgctttattatga

SEQ ID NO: 86757 - DNA, 25 bp, Artificial
  Probe
tctgaaatagcactgctttattatg

SEQ ID NO: 86758 - DNA, 25 bp, Artificial
  Probe
ttacaggcaacaagggtctttcaca

SEQ ID NO: 86759 - DNA, 25 bp, Artificial
  Probe
cactgctttattatgagtaagaatt

SEQ ID NO: 86760 - DNA, 25 bp, Artificial
  Probe
atatggaggaaaagtacgtcttggg

SEQ ID NO: 86761 - DNA, 25 bp, Artificial
  Probe
tgatcaaggtccatttagtggctta

SEQ ID NO: 86762 - DNA, 25 bp, Artificial
  Probe
atagcactgctttattatgagtaag

SEQ ID NO: 86763 - DNA, 25 bp, Artificial
  Probe
atgatcaaggtccatttagtggctt

SEQ ID NO: 86764 - DNA, 25 bp, Artificial
  Probe
ggttttacaggcaacaagggtcttt

SEQ ID NO: 86765 - DNA, 25 bp, Artificial
  Probe
aatgatcaaggtccatttagtggct

SEQ ID NO: 86766 - DNA, 25 bp, Artificial
  Probe
aacaagggtctttcacacaggacag

SEQ ID NO: 86767 - DNA, 25 bp, Artificial
  Probe
aatagcactgctttattatgagtaa

SEQ ID NO: 86768 - DNA, 25 bp, Artificial
  Probe
aaatagcactgctttattatgagta

SEQ ID NO: 86769 - DNA, 25 bp, Artificial
  Probe
caacaagggtctttcacacaggaca

SEQ ID NO: 86770 - DNA, 25 bp, Artificial
  Probe
aaagtacgtcttgggctgattcctg

SEQ ID NO: 86771 - DNA, 25 bp, Artificial
  Probe
gaaaagtacgtcttgggctgattcc

SEQ ID NO: 86772 - DNA, 25 bp, Artificial
  Probe
cagatgatggtgtagtatggatgaa

SEQ ID NO: 86773 - DNA, 25 bp, Artificial
  Probe
gatggtgtagtatggatgaattgga

SEQ ID NO: 86774 - DNA, 25 bp, Artificial
  Probe
tggtgtagtatggatgaattggaag

SEQ ID NO: 86775 - DNA, 25 bp, Artificial
  Probe
atggtgtagtatggatgaattggaa

SEQ ID NO: 86776 - DNA, 25 bp, Artificial
  Probe
agatgatggtgtagtatggatgaat

SEQ ID NO: 86777 - DNA, 25 bp, Artificial
  Probe
tgatggtgtagtatggatgaattgg

SEQ ID NO: 86778 - DNA, 25 bp, Artificial
  Probe
ggtgtagtatggatgaattggaagg

SEQ ID NO: 86779 - DNA, 25 bp, Artificial
  Probe
atgatggtgtagtatggatgaattg

SEQ ID NO: 86780 - DNA, 25 bp, Artificial
  Probe
gatgatggtgtagtatggatgaatt

SEQ ID NO: 86781 - DNA, 25 bp, Artificial
  Probe
tcaatgaggaagatgagtatgaaga

SEQ ID NO: 86782 - DNA, 25 bp, Artificial
  Probe
caatgaggaagatgagtatgaagat

SEQ ID NO: 86783 - DNA, 25 bp, Artificial
  Probe
acagatgatggtgtagtatggatga

SEQ ID NO: 86784 - DNA, 25 bp, Artificial
  Probe
gaggaagatgagtatgaagatcagg

SEQ ID NO: 86785 - DNA, 25 bp, Artificial
  Probe
tgaggaagatgagtatgaagatcag

SEQ ID NO: 86786 - DNA, 25 bp, Artificial
  Probe
cacagatgatggtgtagtatggatg

SEQ ID NO: 86787 - DNA, 25 bp, Artificial
  Probe
atgaggaagatgagtatgaagatca

SEQ ID NO: 86788 - DNA, 25 bp, Artificial
  Probe
aggaagatgagtatgaagatcaggc

SEQ ID NO: 86789 - DNA, 25 bp, Artificial
  Probe
aatgaggaagatgagtatgaagatc

SEQ ID NO: 86790 - DNA, 25 bp, Artificial
  Probe
gtgtagtatggatgaattggaaggg

SEQ ID NO: 86791 - DNA, 25 bp, Artificial
  Probe
gcacagatgatggtgtagtatggat

SEQ ID NO: 86792 - DNA, 25 bp, Artificial
  Probe
atggcacagatgatggtgtagtatg

SEQ ID NO: 86793 - DNA, 25 bp, Artificial
  Probe
catggcacagatgatggtgtagtat

SEQ ID NO: 86794 - DNA, 25 bp, Artificial
  Probe
ttgctcttctgtatgtgacaacatt

SEQ ID NO: 86795 - DNA, 25 bp, Artificial
  Probe
gtcatggtactcaatgaggaagatg

SEQ ID NO: 86796 - DNA, 25 bp, Artificial
  Probe
tcatggtactcaatgaggaagatga

SEQ ID NO: 86797 - DNA, 25 bp, Artificial
  Probe
ggtcatggtactcaatgaggaagat

SEQ ID NO: 86798 - DNA, 25 bp, Artificial
  Probe
aatagtccccaatagcgtagatttt

SEQ ID NO: 86799 - DNA, 25 bp, Artificial
  Probe
caatagtccccaatagcgtagattt

SEQ ID NO: 86800 - DNA, 25 bp, Artificial
  Probe
catggtactcaatgaggaagatgag

SEQ ID NO: 86801 - DNA, 25 bp, Artificial
  Probe
ggcacagatgatggtgtagtatgga

SEQ ID NO: 86802 - DNA, 25 bp, Artificial
  Probe
ctcaatgaggaagatgagtatgaag

SEQ ID NO: 86803 - DNA, 25 bp, Artificial
  Probe
ggaagatgagtatgaagatcaggcc

SEQ ID NO: 86804 - DNA, 25 bp, Artificial
  Probe
tgctcttctgtatgtgacaacattt

SEQ ID NO: 86805 - DNA, 25 bp, Artificial
  Probe
tttgctcttctgtatgtgacaacat

SEQ ID NO: 86806 - DNA, 25 bp, Artificial
  Probe
tagtatggatgaattggaaggggtc

SEQ ID NO: 86807 - DNA, 25 bp, Artificial
  Probe
tggcacagatgatggtgtagtatgg

SEQ ID NO: 86808 - DNA, 25 bp, Artificial
  Probe
gtagtatggatgaattggaaggggt

SEQ ID NO: 86809 - DNA, 25 bp, Artificial
  Probe
tgtagtatggatgaattggaagggg

SEQ ID NO: 86810 - DNA, 25 bp, Artificial
  Probe
ttttgctcttctgtatgtgacaaca

SEQ ID NO: 86811 - DNA, 25 bp, Artificial
  Probe
ccaatccaaacggcagatactactg

SEQ ID NO: 86812 - DNA, 25 bp, Artificial
  Probe
gcaatagtccccaatagcgtagatt

SEQ ID NO: 86813 - DNA, 25 bp, Artificial
  Probe
caatccaaacggcagatactactgg

SEQ ID NO: 86814 - DNA, 25 bp, Artificial
  Probe
agcaatagtccccaatagcgtagat

SEQ ID NO: 86815 - DNA, 25 bp, Artificial
  Probe
gcatggcacagatgatggtgtagta

SEQ ID NO: 86816 - DNA, 25 bp, Artificial
  Probe
gaagatgagtatgaagatcaggccc

SEQ ID NO: 86817 - DNA, 25 bp, Artificial
  Probe
gaagagtagttaagactggtcagaa

SEQ ID NO: 86818 - DNA, 25 bp, Artificial
  Probe
ggaagagtagttaagactggtcaga

SEQ ID NO: 86819 - DNA, 25 bp, Artificial
  Probe
gataagtagaggcttccaggtcttc

SEQ ID NO: 86820 - DNA, 25 bp, Artificial
  Probe
ataagtagaggcttccaggtcttct

SEQ ID NO: 86821 - DNA, 25 bp, Artificial
  Probe
ttgaggagggaagagtagttaagac

SEQ ID NO: 86822 - DNA, 25 bp, Artificial
  Probe
cttgaggagggaagagtagttaaga

SEQ ID NO: 86823 - DNA, 25 bp, Artificial
  Probe
taagagtacccacaaagtttaggag

SEQ ID NO: 86824 - DNA, 25 bp, Artificial
  Probe
agagtagttaagactggtcagaaag

SEQ ID NO: 86825 - DNA, 25 bp, Artificial
  Probe
acttgaggagggaagagtagttaag

SEQ ID NO: 86826 - DNA, 25 bp, Artificial
  Probe
ataagagtacccacaaagtttagga

SEQ ID NO: 86827 - DNA, 25 bp, Artificial
  Probe
gagtagttaagactggtcagaaagc

SEQ ID NO: 86828 - DNA, 25 bp, Artificial
  Probe
aagagtagttaagactggtcagaaa

SEQ ID NO: 86829 - DNA, 25 bp, Artificial
  Probe
aagagtacccacaaagtttaggaga

SEQ ID NO: 86830 - DNA, 25 bp, Artificial
  Probe
cacttgaggagggaagagtagttaa

SEQ ID NO: 86831 - DNA, 25 bp, Artificial
  Probe
gaggagggaagagtagttaagactg

SEQ ID NO: 86832 - DNA, 25 bp, Artificial
  Probe
agtagttaagactggtcagaaagca

SEQ ID NO: 86833 - DNA, 25 bp, Artificial
  Probe
agagtacccacaaagtttaggagag

SEQ ID NO: 86834 - DNA, 25 bp, Artificial
  Probe
tgaggagggaagagtagttaagact

SEQ ID NO: 86835 - DNA, 25 bp, Artificial
  Probe
gagtacccacaaagtttaggagagt

SEQ ID NO: 86836 - DNA, 25 bp, Artificial
  Probe
aataagagtacccacaaagtttagg

SEQ ID NO: 86837 - DNA, 25 bp, Artificial
  Probe
gagggaagagtagttaagactggtc

SEQ ID NO: 86838 - DNA, 25 bp, Artificial
  Probe
taagtagaggcttccaggtcttctg

SEQ ID NO: 86839 - DNA, 25 bp, Artificial
  Probe
gtagttaagactggtcagaaagcag

SEQ ID NO: 86840 - DNA, 25 bp, Artificial
  Probe
tcacttgaggagggaagagtagtta

SEQ ID NO: 86841 - DNA, 25 bp, Artificial
  Probe
gggaagagtagttaagactggtcag

SEQ ID NO: 86842 - DNA, 25 bp, Artificial
  Probe
ctcaataagagtacccacaaagttt

SEQ ID NO: 86843 - DNA, 25 bp, Artificial
  Probe
ggataagtagaggcttccaggtctt

SEQ ID NO: 86844 - DNA, 25 bp, Artificial
  Probe
agggaagagtagttaagactggtca

SEQ ID NO: 86845 - DNA, 25 bp, Artificial
  Probe
tcaataagagtacccacaaagttta

SEQ ID NO: 86846 - DNA, 25 bp, Artificial
  Probe
aaagtttaggagagtgcagaatgaa

SEQ ID NO: 86847 - DNA, 25 bp, Artificial
  Probe
tagttaagactggtcagaaagcagg

SEQ ID NO: 86848 - DNA, 25 bp, Artificial
  Probe
aggagggaagagtagttaagactgg

SEQ ID NO: 86849 - DNA, 25 bp, Artificial
  Probe
caataagagtacccacaaagtttag

SEQ ID NO: 86850 - DNA, 25 bp, Artificial
  Probe
ttaggagagtgcagaatgaactgtc

SEQ ID NO: 86851 - DNA, 25 bp, Artificial
  Probe
caaagtttaggagagtgcagaatga

SEQ ID NO: 86852 - DNA, 25 bp, Artificial
  Probe
acaaagtttaggagagtgcagaatg

SEQ ID NO: 86853 - DNA, 25 bp, Artificial
  Probe
ggagggaagagtagttaagactggt

SEQ ID NO: 86854 - DNA, 25 bp, Artificial
  Probe
aagtttaggagagtgcagaatgaac

SEQ ID NO: 86855 - DNA, 25 bp, Artificial
  Probe
agtacccacaaagtttaggagagtg

SEQ ID NO: 86856 - DNA, 25 bp, Artificial
  Probe
ttaagactggtcagaaagcaggatg

SEQ ID NO: 86857 - DNA, 25 bp, Artificial
  Probe
gttaagactggtcagaaagcaggat

SEQ ID NO: 86858 - DNA, 25 bp, Artificial
  Probe
aggactgcatgataatttatcgttt

SEQ ID NO: 86859 - DNA, 25 bp, Artificial
  Probe
aaggactgcatgataatttatcgtt

SEQ ID NO: 86860 - DNA, 25 bp, Artificial
  Probe
cacaaagtttaggagagtgcagaat

SEQ ID NO: 86861 - DNA, 25 bp, Artificial
  Probe
gtttaggagagtgcagaatgaactg

SEQ ID NO: 86862 - DNA, 25 bp, Artificial
  Probe
ggtcctggaattagagaaagagttt

SEQ ID NO: 86863 - DNA, 25 bp, Artificial
  Probe
aggtcctggaattagagaaagagtt

SEQ ID NO: 86864 - DNA, 25 bp, Artificial
  Probe
aaagagtttcattacaaccgctacc

SEQ ID NO: 86865 - DNA, 25 bp, Artificial
  Probe
aagagtttcattacaaccgctacct

SEQ ID NO: 86866 - DNA, 25 bp, Artificial
  Probe
agagtttcattacaaccgctacctg

SEQ ID NO: 86867 - DNA, 25 bp, Artificial
  Probe
gaaagagtttcattacaaccgctac

SEQ ID NO: 86868 - DNA, 25 bp, Artificial
  Probe
agaaagagtttcattacaaccgcta

SEQ ID NO: 86869 - DNA, 25 bp, Artificial
  Probe
tcctggaattagagaaagagtttca

SEQ ID NO: 86870 - DNA, 25 bp, Artificial
  Probe
gtcctggaattagagaaagagtttc

SEQ ID NO: 86871 - DNA, 25 bp, Artificial
  Probe
gagtttcattacaaccgctacctga

SEQ ID NO: 86872 - DNA, 25 bp, Artificial
  Probe
tagagaaagagtttcattacaaccg

SEQ ID NO: 86873 - DNA, 25 bp, Artificial
  Probe
agtttcattacaaccgctacctgac

SEQ ID NO: 86874 - DNA, 25 bp, Artificial
  Probe
gagaaagagtttcattacaaccgct

SEQ ID NO: 86875 - DNA, 25 bp, Artificial
  Probe
agagaaagagtttcattacaaccgc

SEQ ID NO: 86876 - DNA, 25 bp, Artificial
  Probe
cctggaattagagaaagagtttcat

SEQ ID NO: 86877 - DNA, 25 bp, Artificial
  Probe
caggtcctggaattagagaaagagt

SEQ ID NO: 86878 - DNA, 25 bp, Artificial
  Probe
gcaggtcctggaattagagaaagag

SEQ ID NO: 86879 - DNA, 25 bp, Artificial
  Probe
gtttcattacaaccgctacctgacc

SEQ ID NO: 86880 - DNA, 25 bp, Artificial
  Probe
cagcaggtcctggaattagagaaag

SEQ ID NO: 86881 - DNA, 25 bp, Artificial
  Probe
agcaggtcctggaattagagaaaga

SEQ ID NO: 86882 - DNA, 25 bp, Artificial
  Probe
ttagagaaagagtttcattacaacc

SEQ ID NO: 86883 - DNA, 25 bp, Artificial
  Probe
ctggaattagagaaagagtttcatt

SEQ ID NO: 86884 - DNA, 25 bp, Artificial
  Probe
atgaaatggaagaaggaccacgact

SEQ ID NO: 86885 - DNA, 25 bp, Artificial
  Probe
aaaccgtcgcatgaaatggaagaag

SEQ ID NO: 86886 - DNA, 25 bp, Artificial
  Probe
catgaaatggaagaaggaccacgac

SEQ ID NO: 86887 - DNA, 25 bp, Artificial
  Probe
tttcattacaaccgctacctgaccc

SEQ ID NO: 86888 - DNA, 25 bp, Artificial
  Probe
tggaattagagaaagagtttcatta

SEQ ID NO: 86889 - DNA, 25 bp, Artificial
  Probe
tgaaatggaagaaggaccacgactc

SEQ ID NO: 86890 - DNA, 25 bp, Artificial
  Probe
ggaattagagaaagagtttcattac

SEQ ID NO: 86891 - DNA, 25 bp, Artificial
  Probe
gcagcaggtcctggaattagagaaa

SEQ ID NO: 86892 - DNA, 25 bp, Artificial
  Probe
attagagaaagagtttcattacaac

SEQ ID NO: 86893 - DNA, 25 bp, Artificial
  Probe
aaaaccgtcgcatgaaatggaagaa

SEQ ID NO: 86894 - DNA, 25 bp, Artificial
  Probe
gaaatggaagaaggaccacgactcc

SEQ ID NO: 86895 - DNA, 25 bp, Artificial
  Probe
gaattagagaaagagtttcattaca

SEQ ID NO: 86896 - DNA, 25 bp, Artificial
  Probe
caaaaccgtcgcatgaaatggaaga

SEQ ID NO: 86897 - DNA, 25 bp, Artificial
  Probe
agatcaaaatctggttccaaaaccg

SEQ ID NO: 86898 - DNA, 25 bp, Artificial
  Probe
gatcaaaatctggttccaaaaccgt

SEQ ID NO: 86899 - DNA, 25 bp, Artificial
  Probe
ctctctgagaggcagatcaaaatct

SEQ ID NO: 86900 - DNA, 25 bp, Artificial
  Probe
cttacccgatgttcctgataatctt

SEQ ID NO: 86901 - DNA, 25 bp, Artificial
  Probe
ttacccgatgttcctgataatcttg

SEQ ID NO: 86902 - DNA, 25 bp, Artificial
  Probe
ccgatgttcctgataatcttgaaag

SEQ ID NO: 86903 - DNA, 25 bp, Artificial
  Probe
tacccgatgttcctgataatcttga

SEQ ID NO: 86904 - DNA, 25 bp, Artificial
  Probe
cccgatgttcctgataatcttgaaa

SEQ ID NO: 86905 - DNA, 25 bp, Artificial
  Probe
tgataatcttgaaaggttcttctgg

SEQ ID NO: 86906 - DNA, 25 bp, Artificial
  Probe
ccttacccgatgttcctgataatct

SEQ ID NO: 86907 - DNA, 25 bp, Artificial
  Probe
gataatcttgaaaggttcttctgga

SEQ ID NO: 86908 - DNA, 25 bp, Artificial
  Probe
acccgatgttcctgataatcttgaa

SEQ ID NO: 86909 - DNA, 25 bp, Artificial
  Probe
ataatcttgaaaggttcttctggaa

SEQ ID NO: 86910 - DNA, 25 bp, Artificial
  Probe
cgatgttcctgataatcttgaaagg

SEQ ID NO: 86911 - DNA, 25 bp, Artificial
  Probe
tgttcctgataatcttgaaaggttc

SEQ ID NO: 86912 - DNA, 25 bp, Artificial
  Probe
ctgataatcttgaaaggttcttctg

SEQ ID NO: 86913 - DNA, 25 bp, Artificial
  Probe
gttcctgataatcttgaaaggttct

SEQ ID NO: 86914 - DNA, 25 bp, Artificial
  Probe
gatgttcctgataatcttgaaaggt

SEQ ID NO: 86915 - DNA, 25 bp, Artificial
  Probe
cccttacccgatgttcctgataatc

SEQ ID NO: 86916 - DNA, 25 bp, Artificial
  Probe
cctgataatcttgaaaggttcttct

SEQ ID NO: 86917 - DNA, 25 bp, Artificial
  Probe
tcctgataatcttgaaaggttcttc

SEQ ID NO: 86918 - DNA, 25 bp, Artificial
  Probe
atgttcctgataatcttgaaaggtt

SEQ ID NO: 86919 - DNA, 25 bp, Artificial
  Probe
ttcctgataatcttgaaaggttctt

SEQ ID NO: 86920 - DNA, 25 bp, Artificial
  Probe
caatatttcctttcacctggttggg

SEQ ID NO: 86921 - DNA, 25 bp, Artificial
  Probe
gtggctattcctactcctcagtgtg

SEQ ID NO: 86922 - DNA, 25 bp, Artificial
  Probe
ctattcctactcctcagtgtgcctg

SEQ ID NO: 86923 - DNA, 25 bp, Artificial
  Probe
gcaatatttcctttcacctggttgg

SEQ ID NO: 86924 - DNA, 25 bp, Artificial
  Probe
tgcaatatttcctttcacctggttg

SEQ ID NO: 86925 - DNA, 25 bp, Artificial
  Probe
aatatttcctttcacctggttggga

SEQ ID NO: 86926 - DNA, 25 bp, Artificial
  Probe
aagtgcaatatttcctttcacctgg

SEQ ID NO: 86927 - DNA, 25 bp, Artificial
  Probe
aaagtgcaatatttcctttcacctg

SEQ ID NO: 86928 - DNA, 25 bp, Artificial
  Probe
gtgcaatatttcctttcacctggtt

SEQ ID NO: 86929 - DNA, 25 bp, Artificial
  Probe
attcctactcctcagtgtgcctgta

SEQ ID NO: 86930 - DNA, 25 bp, Artificial
  Probe
tattcctactcctcagtgtgcctgt

SEQ ID NO: 86931 - DNA, 25 bp, Artificial
  Probe
gcccttacccgatgttcctgataat

SEQ ID NO: 86932 - DNA, 25 bp, Artificial
  Probe
caggtgttgataaagaacaggactg

SEQ ID NO: 86933 - DNA, 25 bp, Artificial
  Probe
taatcttgaaaggttcttctggaac

SEQ ID NO: 86934 - DNA, 25 bp, Artificial
  Probe
agtgcaatatttcctttcacctggt

SEQ ID NO: 86935 - DNA, 25 bp, Artificial
  Probe
ttccaatattgccttgtcttctgag

SEQ ID NO: 86936 - DNA, 25 bp, Artificial
  Probe
aggtgttgataaagaacaggactgt

SEQ ID NO: 86937 - DNA, 25 bp, Artificial
  Probe
atattgccttgtcttctgagctctt

SEQ ID NO: 86938 - DNA, 25 bp, Artificial
  Probe
aatattgccttgtcttctgagctct

SEQ ID NO: 86939 - DNA, 25 bp, Artificial
  Probe
gtgttgataaagaacaggactgttt

SEQ ID NO: 86940 - DNA, 25 bp, Artificial
  Probe
caatattgccttgtcttctgagctc

SEQ ID NO: 86941 - DNA, 25 bp, Artificial
  Probe
ggtgttgataaagaacaggactgtt

SEQ ID NO: 86942 - DNA, 25 bp, Artificial
  Probe
gcaggtgttgataaagaacaggact

SEQ ID NO: 86943 - DNA, 25 bp, Artificial
  Probe
atatttcctttcacctggttgggaa

SEQ ID NO: 86944 - DNA, 25 bp, Artificial
  Probe
tattgccttgtcttctgagctcttg

SEQ ID NO: 86945 - DNA, 25 bp, Artificial
  Probe
tgtcttcctagtgtgaatatgtgtt

SEQ ID NO: 86946 - DNA, 25 bp, Artificial
  Probe
ttgtcttcctagtgtgaatatgtgt

SEQ ID NO: 86947 - DNA, 25 bp, Artificial
  Probe
tgttgtcttcctagtgtgaatatgt

SEQ ID NO: 86948 - DNA, 25 bp, Artificial
  Probe
gtcttcctagtgtgaatatgtgttg

SEQ ID NO: 86949 - DNA, 25 bp, Artificial
  Probe
gttgtcttcctagtgtgaatatgtg

SEQ ID NO: 86950 - DNA, 25 bp, Artificial
  Probe
tcttcctagtgtgaatatgtgttgc

SEQ ID NO: 86951 - DNA, 25 bp, Artificial
  Probe
ctgttgtcttcctagtgtgaatatg

SEQ ID NO: 86952 - DNA, 25 bp, Artificial
  Probe
tctgttgtcttcctagtgtgaatat

SEQ ID NO: 86953 - DNA, 25 bp, Artificial
  Probe
atctgttgtcttcctagtgtgaata

SEQ ID NO: 86954 - DNA, 25 bp, Artificial
  Probe
gatctgttgtcttcctagtgtgaat

SEQ ID NO: 86955 - DNA, 25 bp, Artificial
  Probe
ttacatctctaggaatgaggaggaa

SEQ ID NO: 86956 - DNA, 25 bp, Artificial
  Probe
tacatctctaggaatgaggaggaag

SEQ ID NO: 86957 - DNA, 25 bp, Artificial
  Probe
ttacaagcacatagagtagacatga

SEQ ID NO: 86958 - DNA, 25 bp, Artificial
  Probe
acaagcacatagagtagacatgata

SEQ ID NO: 86959 - DNA, 25 bp, Artificial
  Probe
tacaagcacatagagtagacatgat

SEQ ID NO: 86960 - DNA, 25 bp, Artificial
  Probe
tgatctgttgtcttcctagtgtgaa

SEQ ID NO: 86961 - DNA, 25 bp, Artificial
  Probe
gtgatctgttgtcttcctagtgtga

SEQ ID NO: 86962 - DNA, 25 bp, Artificial
  Probe
agcacatagagtagacatgataact

SEQ ID NO: 86963 - DNA, 25 bp, Artificial
  Probe
acatctctaggaatgaggaggaaga

SEQ ID NO: 86964 - DNA, 25 bp, Artificial
  Probe
aagcacatagagtagacatgataac

SEQ ID NO: 86965 - DNA, 25 bp, Artificial
  Probe
caagcacatagagtagacatgataa

SEQ ID NO: 86966 - DNA, 25 bp, Artificial
  Probe
gataactacattgggaggtcttgag

SEQ ID NO: 86967 - DNA, 25 bp, Artificial
  Probe
aatgtcaaggtcactcatgtcagaa

SEQ ID NO: 86968 - DNA, 25 bp, Artificial
  Probe
ttcctagtgtgaatatgtgttgcat

SEQ ID NO: 86969 - DNA, 25 bp, Artificial
  Probe
tgataactacattgggaggtcttga

SEQ ID NO: 86970 - DNA, 25 bp, Artificial
  Probe
tcatgtcagaacactgtccatagaa

SEQ ID NO: 86971 - DNA, 25 bp, Artificial
  Probe
atgataactacattgggaggtcttg

SEQ ID NO: 86972 - DNA, 25 bp, Artificial
  Probe
aacagagcattgagaagaaagagtc

SEQ ID NO: 86973 - DNA, 25 bp, Artificial
  Probe
atctctaggaatgaggaggaagatg

SEQ ID NO: 86974 - DNA, 25 bp, Artificial
  Probe
catctctaggaatgaggaggaagat

SEQ ID NO: 86975 - DNA, 25 bp, Artificial
  Probe
cttcctagtgtgaatatgtgttgca

SEQ ID NO: 86976 - DNA, 25 bp, Artificial
  Probe
ctcatgtcagaacactgtccataga

SEQ ID NO: 86977 - DNA, 25 bp, Artificial
  Probe
gcggaagcaagatttacacaataaa

SEQ ID NO: 86978 - DNA, 25 bp, Artificial
  Probe
ggtgatctgttgtcttcctagtgtg

SEQ ID NO: 86979 - DNA, 25 bp, Artificial
  Probe
cttcataatcctgacaggtgatctg

SEQ ID NO: 86980 - DNA, 25 bp, Artificial
  Probe
caattatagtaaacactgcggaagc

SEQ ID NO: 86981 - DNA, 25 bp, Artificial
  Probe
actcatgtcagaacactgtccatag

SEQ ID NO: 86982 - DNA, 25 bp, Artificial
  Probe
tgagacagtttggttaaatgataca

SEQ ID NO: 86983 - DNA, 25 bp, Artificial
  Probe
ataactacattgggaggtcttgagt

SEQ ID NO: 86984 - DNA, 25 bp, Artificial
  Probe
tcaattatagtaaacactgcggaag

SEQ ID NO: 86985 - DNA, 25 bp, Artificial
  Probe
ctttacaagcacatagagtagacat

SEQ ID NO: 86986 - DNA, 25 bp, Artificial
  Probe
atgtcaaggtcactcatgtcagaac

SEQ ID NO: 86987 - DNA, 25 bp, Artificial
  Probe
gcacatagagtagacatgataacta

SEQ ID NO: 86988 - DNA, 25 bp, Artificial
  Probe
gtgagacagtttggttaaatgatac

SEQ ID NO: 86989 - DNA, 25 bp, Artificial
  Probe
attgagaagaaagagtcccgctaaa

SEQ ID NO: 86990 - DNA, 25 bp, Artificial
  Probe
gcctatcctgttctatactatctcc

SEQ ID NO: 86991 - DNA, 25 bp, Artificial
  Probe
gtgcctatcctgttctatactatct

SEQ ID NO: 86992 - DNA, 25 bp, Artificial
  Probe
tgcctatcctgttctatactatctc

SEQ ID NO: 86993 - DNA, 25 bp, Artificial
  Probe
gatgttcttaatcctgaccagcatt

SEQ ID NO: 86994 - DNA, 25 bp, Artificial
  Probe
agtgcctatcctgttctatactatc

SEQ ID NO: 86995 - DNA, 25 bp, Artificial
  Probe
gcatgagatccagagatacattgat

SEQ ID NO: 86996 - DNA, 25 bp, Artificial
  Probe
agatgttcttaatcctgaccagcat

SEQ ID NO: 86997 - DNA, 25 bp, Artificial
  Probe
cagtgcctatcctgttctatactat

SEQ ID NO: 86998 - DNA, 25 bp, Artificial
  Probe
gcaacttcaagaagagtgactactt

SEQ ID NO: 86999 - DNA, 25 bp, Artificial
  Probe
ggaagaagagcctgtattggagaag

SEQ ID NO: 87000 - DNA, 25 bp, Artificial
  Probe
gagatgttcttaatcctgaccagca

SEQ ID NO: 87001 - DNA, 25 bp, Artificial
  Probe
catgagatccagagatacattgatt

SEQ ID NO: 87002 - DNA, 25 bp, Artificial
  Probe
gcagtgcctatcctgttctatacta

SEQ ID NO: 87003 - DNA, 25 bp, Artificial
  Probe
aaggcaacttcaagaagagtgacta

SEQ ID NO: 87004 - DNA, 25 bp, Artificial
  Probe
atggagaaatatggaaacaaacacg

SEQ ID NO: 87005 - DNA, 25 bp, Artificial
  Probe
cagcaatggagaaatatggaaacaa

SEQ ID NO: 87006 - DNA, 25 bp, Artificial
  Probe
gggatgggaaagagaactattgaaa

SEQ ID NO: 87007 - DNA, 25 bp, Artificial
  Probe
atggagatgttcttaatcctgacca

SEQ ID NO: 87008 - DNA, 25 bp, Artificial
  Probe
gcaatggagaaatatggaaacaaac

SEQ ID NO: 87009 - DNA, 25 bp, Artificial
  Probe
agcaatggagaaatatggaaacaaa

SEQ ID NO: 87010 - DNA, 25 bp, Artificial
  Probe
tcagcaatggagaaatatggaaaca

SEQ ID NO: 87011 - DNA, 25 bp, Artificial
  Probe
tgactacagtgatgagaaattccaa

SEQ ID NO: 87012 - DNA, 25 bp, Artificial
  Probe
ttgactacagtgatgagaaattcca

SEQ ID NO: 87013 - DNA, 25 bp, Artificial
  Probe
ttcagcaatggagaaatatggaaac

SEQ ID NO: 87014 - DNA, 25 bp, Artificial
  Probe
catggagatgttcttaatcctgacc

SEQ ID NO: 87015 - DNA, 25 bp, Artificial
  Probe
cttcagcaatggagaaatatggaaa

SEQ ID NO: 87016 - DNA, 25 bp, Artificial
  Probe
ctatcctgttctatactatctcccg

SEQ ID NO: 87017 - DNA, 25 bp, Artificial
  Probe
tcttcagcaatggagaaatatggaa

SEQ ID NO: 87018 - DNA, 25 bp, Artificial
  Probe
gactacagtgatgagaaattccaaa

SEQ ID NO: 87019 - DNA, 25 bp, Artificial
  Probe
tttgactacagtgatgagaaattcc

SEQ ID NO: 87020 - DNA, 25 bp, Artificial
  Probe
tggagatgttcttaatcctgaccag

SEQ ID NO: 87021 - DNA, 25 bp, Artificial
  Probe
gtcttcagcaatggagaaatatgga

SEQ ID NO: 87022 - DNA, 25 bp, Artificial
  Probe
ttgtcttcagcaatggagaaatatg

SEQ ID NO: 87023 - DNA, 25 bp, Artificial
  Probe
atgttcttaatcctgaccagcattt

SEQ ID NO: 87024 - DNA, 25 bp, Artificial
  Probe
tgcatgagatccagagatacattga

SEQ ID NO: 87025 - DNA, 25 bp, Artificial
  Probe
cctatcctgttctatactatctccc

SEQ ID NO: 87026 - DNA, 25 bp, Artificial
  Probe
gcatggagatgttcttaatcctgac

SEQ ID NO: 87027 - DNA, 25 bp, Artificial
  Probe
tgtcttcagcaatggagaaatatgg

SEQ ID NO: 87028 - DNA, 25 bp, Artificial
  Probe
ggcaacttcaagaagagtgactact

SEQ ID NO: 87029 - DNA, 25 bp, Artificial
  Probe
aggcaacttcaagaagagtgactac

SEQ ID NO: 87030 - DNA, 25 bp, Artificial
  Probe
gaggaagttgtttatctgctggaag

SEQ ID NO: 87031 - DNA, 25 bp, Artificial
  Probe
atgctacctctgaactgtcctacat

SEQ ID NO: 87032 - DNA, 25 bp, Artificial
  Probe
gtaaccctcaggactttattgacta

SEQ ID NO: 87033 - DNA, 25 bp, Artificial
  Probe
tggagaaatatggaaacaaacacgg

SEQ ID NO: 87034 - DNA, 25 bp, Artificial
  Probe
aatggagaaatatggaaacaaacac

SEQ ID NO: 87035 - DNA, 25 bp, Artificial
  Probe
atatggattggttcaggagagaaga

SEQ ID NO: 87036 - DNA, 25 bp, Artificial
  Probe
tatggattggttcaggagagaagaa

SEQ ID NO: 87037 - DNA, 25 bp, Artificial
  Probe
ggattggttcaggagagaagaaata

SEQ ID NO: 87038 - DNA, 25 bp, Artificial
  Probe
ttggttcaggagagaagaaatatgg

SEQ ID NO: 87039 - DNA, 25 bp, Artificial
  Probe
attggttcaggagagaagaaatatg

SEQ ID NO: 87040 - DNA, 25 bp, Artificial
  Probe
ttcaggagagaagaaatatgggcat

SEQ ID NO: 87041 - DNA, 25 bp, Artificial
  Probe
catatggattggttcaggagagaag

SEQ ID NO: 87042 - DNA, 25 bp, Artificial
  Probe
tggattggttcaggagagaagaaat

SEQ ID NO: 87043 - DNA, 25 bp, Artificial
  Probe
atggattggttcaggagagaagaaa

SEQ ID NO: 87044 - DNA, 25 bp, Artificial
  Probe
tcaggagagaagaaatatgggcatc

SEQ ID NO: 87045 - DNA, 25 bp, Artificial
  Probe
tggttcaggagagaagaaatatggg

SEQ ID NO: 87046 - DNA, 25 bp, Artificial
  Probe
gattggttcaggagagaagaaatat

SEQ ID NO: 87047 - DNA, 25 bp, Artificial
  Probe
caggagagaagaaatatgggcatct

SEQ ID NO: 87048 - DNA, 25 bp, Artificial
  Probe
gttcaggagagaagaaatatgggca

SEQ ID NO: 87049 - DNA, 25 bp, Artificial
  Probe
gcatatggattggttcaggagagaa

SEQ ID NO: 87050 - DNA, 25 bp, Artificial
  Probe
ctgttgaagaaactgttatacttga

SEQ ID NO: 87051 - DNA, 25 bp, Artificial
  Probe
tctgttgaagaaactgttatacttg

SEQ ID NO: 87052 - DNA, 25 bp, Artificial
  Probe
aaacgagaatctggtaactgcattt

SEQ ID NO: 87053 - DNA, 25 bp, Artificial
  Probe
tctgaaacgagaatctggtaactgc

SEQ ID NO: 87054 - DNA, 25 bp, Artificial
  Probe
ggttcaggagagaagaaatatgggc

SEQ ID NO: 87055 - DNA, 25 bp, Artificial
  Probe
gaaacgagaatctggtaactgcatt

SEQ ID NO: 87056 - DNA, 25 bp, Artificial
  Probe
gagagaagaaatatgggcatctttg

SEQ ID NO: 87057 - DNA, 25 bp, Artificial
  Probe
cttctgaaacgagaatctggtaact

SEQ ID NO: 87058 - DNA, 25 bp, Artificial
  Probe
ggagagaagaaatatgggcatcttt

SEQ ID NO: 87059 - DNA, 25 bp, Artificial
  Probe
ttctgaaacgagaatctggtaactg

SEQ ID NO: 87060 - DNA, 25 bp, Artificial
  Probe
gaaagcaagaacaaaccactgtctc

SEQ ID NO: 87061 - DNA, 25 bp, Artificial
  Probe
tgttgaagaaactgttatacttgaa

SEQ ID NO: 87062 - DNA, 25 bp, Artificial
  Probe
ttgctgcatgtaaagtaaatcattt

SEQ ID NO: 87063 - DNA, 25 bp, Artificial
  Probe
tttgctgcatgtaaagtaaatcatt

SEQ ID NO: 87064 - DNA, 25 bp, Artificial
  Probe
gcattgataatgtttctgttgaaga

SEQ ID NO: 87065 - DNA, 25 bp, Artificial
  Probe
aggagagaagaaatatgggcatctt

SEQ ID NO: 87066 - DNA, 25 bp, Artificial
  Probe
aaagcaagaacaaaccactgtctct

SEQ ID NO: 87067 - DNA, 25 bp, Artificial
  Probe
actccaagaagacattttgactttc

SEQ ID NO: 87068 - DNA, 25 bp, Artificial
  Probe
ctccaagaagacattttgactttcg

SEQ ID NO: 87069 - DNA, 25 bp, Artificial
  Probe
aactccaagaagacattttgacttt

SEQ ID NO: 87070 - DNA, 25 bp, Artificial
  Probe
aaactccaagaagacattttgactt

SEQ ID NO: 87071 - DNA, 25 bp, Artificial
  Probe
attcacttcttgtatattttgctgc

SEQ ID NO: 87072 - DNA, 25 bp, Artificial
  Probe
gcttctgaaacgagaatctggtaac

SEQ ID NO: 87073 - DNA, 25 bp, Artificial
  Probe
cttctgcttctgaaacgagaatctg

SEQ ID NO: 87074 - DNA, 25 bp, Artificial
  Probe
tgaaacgagaatctggtaactgcat

SEQ ID NO: 87075 - DNA, 25 bp, Artificial
  Probe
taaaatacgattgtgagttgtgtca

SEQ ID NO: 87076 - DNA, 25 bp, Artificial
  Probe
aagaacaaaccactgtctctgcttc

SEQ ID NO: 87077 - DNA, 25 bp, Artificial
  Probe
ttaaaatacgattgtgagttgtgtc

SEQ ID NO: 87078 - DNA, 25 bp, Artificial
  Probe
agagaagaaatatgggcatctttgc

SEQ ID NO: 87079 - DNA, 25 bp, Artificial
  Probe
tgcttctgaaacgagaatctggtaa

SEQ ID NO: 87080 - DNA, 25 bp, Artificial
  Probe
ttattggaagaggaaggaccgttag

SEQ ID NO: 87081 - DNA, 25 bp, Artificial
  Probe
gttattggaagaggaaggaccgtta

SEQ ID NO: 87082 - DNA, 25 bp, Artificial
  Probe
atggtgaggttattggaagaggaag

SEQ ID NO: 87083 - DNA, 25 bp, Artificial
  Probe
gatggtgaggttattggaagaggaa

SEQ ID NO: 87084 - DNA, 25 bp, Artificial
  Probe
gtgaggttattggaagaggaaggac

SEQ ID NO: 87085 - DNA, 25 bp, Artificial
  Probe
taaataagtggagcctaagtgtcag

SEQ ID NO: 87086 - DNA, 25 bp, Artificial
  Probe
attgacgataaagacagagaaaggt

SEQ ID NO: 87087 - DNA, 25 bp, Artificial
  Probe
gtaaataagtggagcctaagtgtca

SEQ ID NO: 87088 - DNA, 25 bp, Artificial
  Probe
atggtaaataagtggagcctaagtg

SEQ ID NO: 87089 - DNA, 25 bp, Artificial
  Probe
taaagacagagaaaggtgatgctaa

SEQ ID NO: 87090 - DNA, 25 bp, Artificial
  Probe
aaagacagagaaaggtgatgctaaa

SEQ ID NO: 87091 - DNA, 25 bp, Artificial
  Probe
gacgataaagacagagaaaggtgat

SEQ ID NO: 87092 - DNA, 25 bp, Artificial
  Probe
gtcccagagaacagagtgatattta

SEQ ID NO: 87093 - DNA, 25 bp, Artificial
  Probe
ataaagacagagaaaggtgatgcta

SEQ ID NO: 87094 - DNA, 25 bp, Artificial
  Probe
gattgacgataaagacagagaaagg

SEQ ID NO: 87095 - DNA, 25 bp, Artificial
  Probe
gataaagacagagaaaggtgatgct

SEQ ID NO: 87096 - DNA, 25 bp, Artificial
  Probe
acgataaagacagagaaaggtgatg

SEQ ID NO: 87097 - DNA, 25 bp, Artificial
  Probe
agagaaaggtgatgctaaacagaag

SEQ ID NO: 87098 - DNA, 25 bp, Artificial
  Probe
ttgacgataaagacagagaaaggtg

SEQ ID NO: 87099 - DNA, 25 bp, Artificial
  Probe
ggtaaataagtggagcctaagtgtc

SEQ ID NO: 87100 - DNA, 25 bp, Artificial
  Probe
agaagattcttagcagcatccactc

SEQ ID NO: 87101 - DNA, 25 bp, Artificial
  Probe
cagagaaaggtgatgctaaacagaa

SEQ ID NO: 87102 - DNA, 25 bp, Artificial
  Probe
aagacagagaaaggtgatgctaaac

SEQ ID NO: 87103 - DNA, 25 bp, Artificial
  Probe
tgattgacgataaagacagagaaag

SEQ ID NO: 87104 - DNA, 25 bp, Artificial
  Probe
tcccagagaacagagtgatatttaa

SEQ ID NO: 87105 - DNA, 25 bp, Artificial
  Probe
tggtaaataagtggagcctaagtgt

SEQ ID NO: 87106 - DNA, 25 bp, Artificial
  Probe
tgacgataaagacagagaaaggtga

SEQ ID NO: 87107 - DNA, 25 bp, Artificial
  Probe
gacagagaaaggtgatgctaaacag

SEQ ID NO: 87108 - DNA, 25 bp, Artificial
  Probe
cgataaagacagagaaaggtgatgc

SEQ ID NO: 87109 - DNA, 25 bp, Artificial
  Probe
atgattgacgataaagacagagaaa

SEQ ID NO: 87110 - DNA, 25 bp, Artificial
  Probe
aatgattgacgataaagacagagaa

SEQ ID NO: 87111 - DNA, 25 bp, Artificial
  Probe
ggtcccagagaacagagtgatattt

SEQ ID NO: 87112 - DNA, 25 bp, Artificial
  Probe
tcatggtaaataagtggagcctaag

SEQ ID NO: 87113 - DNA, 25 bp, Artificial
  Probe
catcatggtaaataagtggagccta

SEQ ID NO: 87114 - DNA, 25 bp, Artificial
  Probe
catggtaaataagtggagcctaagt

SEQ ID NO: 87115 - DNA, 25 bp, Artificial
  Probe
ctgagataagaaaggtgtcactctg

SEQ ID NO: 87116 - DNA, 25 bp, Artificial
  Probe
atcatggtaaataagtggagcctaa

SEQ ID NO: 87117 - DNA, 25 bp, Artificial
  Probe
acagagaaaggtgatgctaaacaga

SEQ ID NO: 87118 - DNA, 25 bp, Artificial
  Probe
agacagagaaaggtgatgctaaaca

SEQ ID NO: 87119 - DNA, 25 bp, Artificial
  Probe
ggtgaggttattggaagaggaagga

SEQ ID NO: 87120 - DNA, 25 bp, Artificial
  Probe
gtaatgattgacgataaagacagag

SEQ ID NO: 87121 - DNA, 25 bp, Artificial
  Probe
atcagaagaagattcttagcagcat

SEQ ID NO: 87122 - DNA, 25 bp, Artificial
  Probe
taatgattgacgataaagacagaga

SEQ ID NO: 87123 - DNA, 25 bp, Artificial
  Probe
aataagtggagcctaagtgtcagca

SEQ ID NO: 87124 - DNA, 25 bp, Artificial
  Probe
tggtgaggttattggaagaggaagg

SEQ ID NO: 87125 - DNA, 25 bp, Artificial
  Probe
cattgcatacttcttgatggtaata

SEQ ID NO: 87126 - DNA, 25 bp, Artificial
  Probe
attgcatacttcttgatggtaataa

SEQ ID NO: 87127 - DNA, 25 bp, Artificial
  Probe
aagaaataaagattcatcccctggc

SEQ ID NO: 87128 - DNA, 25 bp, Artificial
  Probe
aaagaaataaagattcatcccctgg

SEQ ID NO: 87129 - DNA, 25 bp, Artificial
  Probe
tttatacattaggcggggtagactg

SEQ ID NO: 87130 - DNA, 25 bp, Artificial
  Probe
gtttatacattaggcggggtagact

SEQ ID NO: 87131 - DNA, 25 bp, Artificial
  Probe
cttgtatccatggtactctactcag

SEQ ID NO: 87132 - DNA, 25 bp, Artificial
  Probe
acttgtatccatggtactctactca

SEQ ID NO: 87133 - DNA, 25 bp, Artificial
  Probe
gacttgtatccatggtactctactc

SEQ ID NO: 87134 - DNA, 25 bp, Artificial
  Probe
caagactactggacttgtatccatg

SEQ ID NO: 87135 - DNA, 25 bp, Artificial
  Probe
aaaagaaataaagattcatcccctg

SEQ ID NO: 87136 - DNA, 25 bp, Artificial
  Probe
ttgtatccatggtactctactcagt

SEQ ID NO: 87137 - DNA, 25 bp, Artificial
  Probe
cgtttatacattaggcggggtagac

SEQ ID NO: 87138 - DNA, 25 bp, Artificial
  Probe
ttgcatacttcttgatggtaataaa

SEQ ID NO: 87139 - DNA, 25 bp, Artificial
  Probe
tgtatccatggtactctactcagtc

SEQ ID NO: 87140 - DNA, 25 bp, Artificial
  Probe
gcatacttcttgatggtaataaatt

SEQ ID NO: 87141 - DNA, 25 bp, Artificial
  Probe
tgcatacttcttgatggtaataaat

SEQ ID NO: 87142 - DNA, 25 bp, Artificial
  Probe
tatccatggtactctactcagtcct

SEQ ID NO: 87143 - DNA, 25 bp, Artificial
  Probe
gtatccatggtactctactcagtcc

SEQ ID NO: 87144 - DNA, 25 bp, Artificial
  Probe
gcaagactactggacttgtatccat

SEQ ID NO: 87145 - DNA, 25 bp, Artificial
  Probe
ggacttgtatccatggtactctact

SEQ ID NO: 87146 - DNA, 25 bp, Artificial
  Probe
acgtcctcagatatagctaggctaa

SEQ ID NO: 87147 - DNA, 25 bp, Artificial
  Probe
ttatacattaggcggggtagactgc

SEQ ID NO: 87148 - DNA, 25 bp, Artificial
  Probe
cacgtttatacattaggcggggtag

SEQ ID NO: 87149 - DNA, 25 bp, Artificial
  Probe
acgtttatacattaggcggggtaga

SEQ ID NO: 87150 - DNA, 25 bp, Artificial
  Probe
aaataaagattcatcccctggcctc

SEQ ID NO: 87151 - DNA, 25 bp, Artificial
  Probe
acttcttgatggtaataaatttgaa

SEQ ID NO: 87152 - DNA, 25 bp, Artificial
  Probe
gaaataaagattcatcccctggcct

SEQ ID NO: 87153 - DNA, 25 bp, Artificial
  Probe
agaaataaagattcatcccctggcc

SEQ ID NO: 87154 - DNA, 25 bp, Artificial
  Probe
aataaagattcatcccctggcctct

SEQ ID NO: 87155 - DNA, 25 bp, Artificial
  Probe
ccacgtttatacattaggcggggta

SEQ ID NO: 87156 - DNA, 25 bp, Artificial
  Probe
ataaagattcatcccctggcctctc

SEQ ID NO: 87157 - DNA, 25 bp, Artificial
  Probe
ctggacttgtatccatggtactcta

SEQ ID NO: 87158 - DNA, 25 bp, Artificial
  Probe
ctactggacttgtatccatggtact

SEQ ID NO: 87159 - DNA, 25 bp, Artificial
  Probe
tggacttgtatccatggtactctac

SEQ ID NO: 87160 - DNA, 25 bp, Artificial
  Probe
tactggacttgtatccatggtactc

SEQ ID NO: 87161 - DNA, 25 bp, Artificial
  Probe
gactactggacttgtatccatggta

SEQ ID NO: 87162 - DNA, 25 bp, Artificial
  Probe
actactggacttgtatccatggtac

SEQ ID NO: 87163 - DNA, 25 bp, Artificial
  Probe
aagactactggacttgtatccatgg

SEQ ID NO: 87164 - DNA, 25 bp, Artificial
  Probe
actggacttgtatccatggtactct

SEQ ID NO: 87165 - DNA, 25 bp, Artificial
  Probe
agactactggacttgtatccatggt

SEQ ID NO: 87166 - DNA, 25 bp, Artificial
  Probe
ctgttttagccgaaggactcgatgt

SEQ ID NO: 87167 - DNA, 25 bp, Artificial
  Probe
tgttttagccgaaggactcgatgtg

SEQ ID NO: 87168 - DNA, 25 bp, Artificial
  Probe
tgatagaggacacagagatggagaa

SEQ ID NO: 87169 - DNA, 25 bp, Artificial
  Probe
atagaggacacagagatggagaaat

SEQ ID NO: 87170 - DNA, 25 bp, Artificial
  Probe
aatgtgttacactgtgcttatgttg

SEQ ID NO: 87171 - DNA, 25 bp, Artificial
  Probe
tagaggacacagagatggagaaatt

SEQ ID NO: 87172 - DNA, 25 bp, Artificial
  Probe
gatagaggacacagagatggagaaa

SEQ ID NO: 87173 - DNA, 25 bp, Artificial
  Probe
cacactgatagaggacacagagatg

SEQ ID NO: 87174 - DNA, 25 bp, Artificial
  Probe
ctgatagaggacacagagatggaga

SEQ ID NO: 87175 - DNA, 25 bp, Artificial
  Probe
taatgtgttacactgtgcttatgtt

SEQ ID NO: 87176 - DNA, 25 bp, Artificial
  Probe
atgtgttacactgtgcttatgttgt

SEQ ID NO: 87177 - DNA, 25 bp, Artificial
  Probe
ataatgtgttacactgtgcttatgt

SEQ ID NO: 87178 - DNA, 25 bp, Artificial
  Probe
tgtgttacactgtgcttatgttgtt

SEQ ID NO: 87179 - DNA, 25 bp, Artificial
  Probe
actgatagaggacacagagatggag

SEQ ID NO: 87180 - DNA, 25 bp, Artificial
  Probe
gttacactgtgcttatgttgtttct

SEQ ID NO: 87181 - DNA, 25 bp, Artificial
  Probe
tgttacactgtgcttatgttgtttc

SEQ ID NO: 87182 - DNA, 25 bp, Artificial
  Probe
agaggacacagagatggagaaattc

SEQ ID NO: 87183 - DNA, 25 bp, Artificial
  Probe
cactgatagaggacacagagatgga

SEQ ID NO: 87184 - DNA, 25 bp, Artificial
  Probe
acactgtgcttatgttgtttctaat

SEQ ID NO: 87185 - DNA, 25 bp, Artificial
  Probe
aataatgtgttacactgtgcttatg

SEQ ID NO: 87186 - DNA, 25 bp, Artificial
  Probe
tacactgtgcttatgttgtttctaa

SEQ ID NO: 87187 - DNA, 25 bp, Artificial
  Probe
ttacactgtgcttatgttgtttcta

SEQ ID NO: 87188 - DNA, 25 bp, Artificial
  Probe
acactgatagaggacacagagatgg

SEQ ID NO: 87189 - DNA, 25 bp, Artificial
  Probe
gaggacacagagatggagaaattct

SEQ ID NO: 87190 - DNA, 25 bp, Artificial
  Probe
cactgtgcttatgttgtttctaata

SEQ ID NO: 87191 - DNA, 25 bp, Artificial
  Probe
cacttggtgcttactgatgtgtgaa

SEQ ID NO: 87192 - DNA, 25 bp, Artificial
  Probe
gtgttacactgtgcttatgttgttt

SEQ ID NO: 87193 - DNA, 25 bp, Artificial
  Probe
gcacactgatagaggacacagagat

SEQ ID NO: 87194 - DNA, 25 bp, Artificial
  Probe
ttgtcaagagatggtgtttattaaa

SEQ ID NO: 87195 - DNA, 25 bp, Artificial
  Probe
tttgtcaagagatggtgtttattaa

SEQ ID NO: 87196 - DNA, 25 bp, Artificial
  Probe
actgtgcttatgttgtttctaataa

SEQ ID NO: 87197 - DNA, 25 bp, Artificial
  Probe
ttaataatgtgttacactgtgctta

SEQ ID NO: 87198 - DNA, 25 bp, Artificial
  Probe
agatggtgtttattaaactgggaca

SEQ ID NO: 87199 - DNA, 25 bp, Artificial
  Probe
gagatggtgtttattaaactgggac

SEQ ID NO: 87200 - DNA, 25 bp, Artificial
  Probe
agagatggtgtttattaaactggga

SEQ ID NO: 87201 - DNA, 25 bp, Artificial
  Probe
atggtgtttattaaactgggacaag

SEQ ID NO: 87202 - DNA, 25 bp, Artificial
  Probe
gatggtgtttattaaactgggacaa

SEQ ID NO: 87203 - DNA, 25 bp, Artificial
  Probe
taataatgtgttacactgtgcttat

SEQ ID NO: 87204 - DNA, 25 bp, Artificial
  Probe
gtgtttattaaactgggacaaggaa

SEQ ID NO: 87205 - DNA, 25 bp, Artificial
  Probe
actattttgtcaagagatggtgttt

SEQ ID NO: 87206 - DNA, 25 bp, Artificial
  Probe
ggtgtttattaaactgggacaagga

SEQ ID NO: 87207 - DNA, 25 bp, Artificial
  Probe
aagagatggtgtttattaaactggg

SEQ ID NO: 87208 - DNA, 25 bp, Artificial
  Probe
attcttttctagtgacttgtgtgac

SEQ ID NO: 87209 - DNA, 25 bp, Artificial
  Probe
tggtgtttattaaactgggacaagg

SEQ ID NO: 87210 - DNA, 25 bp, Artificial
  Probe
tgtttattaaactgggacaaggaaa

SEQ ID NO: 87211 - DNA, 25 bp, Artificial
  Probe
gattcttttctagtgacttgtgtga

SEQ ID NO: 87212 - DNA, 25 bp, Artificial
  Probe
gaataaagactgtgcgaactggaca

SEQ ID NO: 87213 - DNA, 25 bp, Artificial
  Probe
ctcaagtatatgtcttcctgacgaa

SEQ ID NO: 87214 - DNA, 25 bp, Artificial
  Probe
actcaagtatatgtcttcctgacga

SEQ ID NO: 87215 - DNA, 25 bp, Artificial
  Probe
cactcaagtatatgtcttcctgacg

SEQ ID NO: 87216 - DNA, 25 bp, Artificial
  Probe
gcactcaagtatatgtcttcctgac

SEQ ID NO: 87217 - DNA, 25 bp, Artificial
  Probe
ggcactcaagtatatgtcttcctga

SEQ ID NO: 87218 - DNA, 25 bp, Artificial
  Probe
gttaatctcagagaggtggaagaat

SEQ ID NO: 87219 - DNA, 25 bp, Artificial
  Probe
ttaatctcagagaggtggaagaatc

SEQ ID NO: 87220 - DNA, 25 bp, Artificial
  Probe
agttaatctcagagaggtggaagaa

SEQ ID NO: 87221 - DNA, 25 bp, Artificial
  Probe
gagttaatctcagagaggtggaaga

SEQ ID NO: 87222 - DNA, 25 bp, Artificial
  Probe
aagttgttccaagaagagtctcctg

SEQ ID NO: 87223 - DNA, 25 bp, Artificial
  Probe
ggtaaactaagaaatggaactgctc

SEQ ID NO: 87224 - DNA, 25 bp, Artificial
  Probe
tggtaaactaagaaatggaactgct

SEQ ID NO: 87225 - DNA, 25 bp, Artificial
  Probe
atggtaaactaagaaatggaactgc

SEQ ID NO: 87226 - DNA, 25 bp, Artificial
  Probe
gtaaactaagaaatggaactgctca

SEQ ID NO: 87227 - DNA, 25 bp, Artificial
  Probe
aaagaaagagaacgggtatccaaag

SEQ ID NO: 87228 - DNA, 25 bp, Artificial
  Probe
ggagttaatctcagagaggtggaag

SEQ ID NO: 87229 - DNA, 25 bp, Artificial
  Probe
taatctcagagaggtggaagaatcc

SEQ ID NO: 87230 - DNA, 25 bp, Artificial
  Probe
gtaacaagttcctgagatttaaccc

SEQ ID NO: 87231 - DNA, 25 bp, Artificial
  Probe
gggtaacaagttcctgagatttaac

SEQ ID NO: 87232 - DNA, 25 bp, Artificial
  Probe
tatccaaagttgttccaagaagagt

SEQ ID NO: 87233 - DNA, 25 bp, Artificial
  Probe
gtatccaaagttgttccaagaagag

SEQ ID NO: 87234 - DNA, 25 bp, Artificial
  Probe
cctgggatgagaaagtctatctgat

SEQ ID NO: 87235 - DNA, 25 bp, Artificial
  Probe
ggtatccaaagttgttccaagaaga

SEQ ID NO: 87236 - DNA, 25 bp, Artificial
  Probe
atccaaagttgttccaagaagagtc

SEQ ID NO: 87237 - DNA, 25 bp, Artificial
  Probe
taaactaagaaatggaactgctcat

SEQ ID NO: 87238 - DNA, 25 bp, Artificial
  Probe
ctgggatgagaaagtctatctgatc

SEQ ID NO: 87239 - DNA, 25 bp, Artificial
  Probe
aagaaagagaacgggtatccaaagt

SEQ ID NO: 87240 - DNA, 25 bp, Artificial
  Probe
ttcctgggatgagaaagtctatctg

SEQ ID NO: 87241 - DNA, 25 bp, Artificial
  Probe
aaactaagaaatggaactgctcatg

SEQ ID NO: 87242 - DNA, 25 bp, Artificial
  Probe
gggtatccaaagttgttccaagaag

SEQ ID NO: 87243 - DNA, 25 bp, Artificial
  Probe
gaaagagaacgggtatccaaagttg

SEQ ID NO: 87244 - DNA, 25 bp, Artificial
  Probe
aaagttgttccaagaagagtctcct

SEQ ID NO: 87245 - DNA, 25 bp, Artificial
  Probe
caaagttgttccaagaagagtctcc

SEQ ID NO: 87246 - DNA, 25 bp, Artificial
  Probe
ccaaagttgttccaagaagagtctc

SEQ ID NO: 87247 - DNA, 25 bp, Artificial
  Probe
agaaagagaacgggtatccaaagtt

SEQ ID NO: 87248 - DNA, 25 bp, Artificial
  Probe
agggtaacaagttcctgagatttaa

SEQ ID NO: 87249 - DNA, 25 bp, Artificial
  Probe
tccaaagttgttccaagaagagtct

SEQ ID NO: 87250 - DNA, 25 bp, Artificial
  Probe
tcctgggatgagaaagtctatctga

SEQ ID NO: 87251 - DNA, 25 bp, Artificial
  Probe
aactaagaaatggaactgctcatgg

SEQ ID NO: 87252 - DNA, 25 bp, Artificial
  Probe
tcaagtatatgtcttcctgacgaag

SEQ ID NO: 87253 - DNA, 25 bp, Artificial
  Probe
aaggtgtcctcttcttccaaggtaa

SEQ ID NO: 87254 - DNA, 25 bp, Artificial
  Probe
caagtatatgtcttcctgacgaagg

SEQ ID NO: 87255 - DNA, 25 bp, Artificial
  Probe
aagagaacgggtatccaaagttgtt

SEQ ID NO: 87256 - DNA, 25 bp, Artificial
  Probe
aaagagaacgggtatccaaagttgt

SEQ ID NO: 87257 - DNA, 25 bp, Artificial
  Probe
gaaatggaactgctcatgggaatag

SEQ ID NO: 87258 - DNA, 25 bp, Artificial
  Probe
taccagattaagtatgaggaattgc

SEQ ID NO: 87259 - DNA, 25 bp, Artificial
  Probe
accatgtaccagattaagtatgagg

SEQ ID NO: 87260 - DNA, 25 bp, Artificial
  Probe
ccatgtaccagattaagtatgagga

SEQ ID NO: 87261 - DNA, 25 bp, Artificial
  Probe
aagtatgaggatgagatcaacaagc

SEQ ID NO: 87262 - DNA, 25 bp, Artificial
  Probe
atgagatcaacaagcgtacagagat

SEQ ID NO: 87263 - DNA, 25 bp, Artificial
  Probe
tatgaggatgagatcaacaagcgta

SEQ ID NO: 87264 - DNA, 25 bp, Artificial
  Probe
accagattaagtatgaggaattgca

SEQ ID NO: 87265 - DNA, 25 bp, Artificial
  Probe
aaccatgtaccagattaagtatgag

SEQ ID NO: 87266 - DNA, 25 bp, Artificial
  Probe
gattaagtatgaggaattgcagacc

SEQ ID NO: 87267 - DNA, 25 bp, Artificial
  Probe
ccagattaagtatgaggaattgcag

SEQ ID NO: 87268 - DNA, 25 bp, Artificial
  Probe
catgtaccagattaagtatgaggaa

SEQ ID NO: 87269 - DNA, 25 bp, Artificial
  Probe
gatgagatcaacaagcgtacagaga

SEQ ID NO: 87270 - DNA, 25 bp, Artificial
  Probe
taagtatgaggatgagatcaacaag

SEQ ID NO: 87271 - DNA, 25 bp, Artificial
  Probe
agattaagtatgaggaattgcagac

SEQ ID NO: 87272 - DNA, 25 bp, Artificial
  Probe
cagattaagtatgaggaattgcaga

SEQ ID NO: 87273 - DNA, 25 bp, Artificial
  Probe
tgagatcaacaagcgtacagagatg

SEQ ID NO: 87274 - DNA, 25 bp, Artificial
  Probe
agtatgaggatgagatcaacaagcg

SEQ ID NO: 87275 - DNA, 25 bp, Artificial
  Probe
aacaagcgtacagagatggagaatg

SEQ ID NO: 87276 - DNA, 25 bp, Artificial
  Probe
caacaagcgtacagagatggagaat

SEQ ID NO: 87277 - DNA, 25 bp, Artificial
  Probe
tgtaccagattaagtatgaggaatt

SEQ ID NO: 87278 - DNA, 25 bp, Artificial
  Probe
tacagagatggagaatgagtttgtc

SEQ ID NO: 87279 - DNA, 25 bp, Artificial
  Probe
ttcaagaataagtatgaggatgaga

SEQ ID NO: 87280 - DNA, 25 bp, Artificial
  Probe
cctggtggaggacttcaagaataag

SEQ ID NO: 87281 - DNA, 25 bp, Artificial
  Probe
ccgaaaccatgtaccagattaagta

SEQ ID NO: 87282 - DNA, 25 bp, Artificial
  Probe
caagcgtacagagatggagaatgag

SEQ ID NO: 87283 - DNA, 25 bp, Artificial
  Probe
gtaccagattaagtatgaggaattg

SEQ ID NO: 87284 - DNA, 25 bp, Artificial
  Probe
atgtaccagattaagtatgaggaat

SEQ ID NO: 87285 - DNA, 25 bp, Artificial
  Probe
atgaggatgagatcaacaagcgtac

SEQ ID NO: 87286 - DNA, 25 bp, Artificial
  Probe
gtatgaggatgagatcaacaagcgt

SEQ ID NO: 87287 - DNA, 25 bp, Artificial
  Probe
ataagtatgaggatgagatcaacaa

SEQ ID NO: 87288 - DNA, 25 bp, Artificial
  Probe
aataagtatgaggatgagatcaaca

SEQ ID NO: 87289 - DNA, 25 bp, Artificial
  Probe
cgtacagagatggagaatgagtttg

SEQ ID NO: 87290 - DNA, 25 bp, Artificial
  Probe
tcaagaataagtatgaggatgagat

SEQ ID NO: 87291 - DNA, 25 bp, Artificial
  Probe
cttcaagaataagtatgaggatgag

SEQ ID NO: 87292 - DNA, 25 bp, Artificial
  Probe
gagagttacatcaacaacctccgtc

SEQ ID NO: 87293 - DNA, 25 bp, Artificial
  Probe
ggtggaggacttcaagaataagtat

SEQ ID NO: 87294 - DNA, 25 bp, Artificial
  Probe
cgaaaccatgtaccagattaagtat

SEQ ID NO: 87295 - DNA, 25 bp, Artificial
  Probe
gatcaacaagcgtacagagatggag

SEQ ID NO: 87296 - DNA, 25 bp, Artificial
  Probe
gagatcaacaagcgtacagagatgg

SEQ ID NO: 87297 - DNA, 25 bp, Artificial
  Probe
ggatgagatcaacaagcgtacagag

SEQ ID NO: 87298 - DNA, 25 bp, Artificial
  Probe
gaggatgagatcaacaagcgtacag

SEQ ID NO: 87299 - DNA, 25 bp, Artificial
  Probe
gtacagagatggagaatgagtttgt

SEQ ID NO: 87300 - DNA, 25 bp, Artificial
  Probe
tggtggaggacttcaagaataagta

SEQ ID NO: 87301 - DNA, 25 bp, Artificial
  Probe
agcgtacagagatggagaatgagtt

SEQ ID NO: 87302 - DNA, 25 bp, Artificial
  Probe
aagcgtacagagatggagaatgagt

SEQ ID NO: 87303 - DNA, 25 bp, Artificial
  Probe
ctctgaagtcaaggagatagaagaa

SEQ ID NO: 87304 - DNA, 25 bp, Artificial
  Probe
gaaccaagagtacaatatcctcctt

SEQ ID NO: 87305 - DNA, 25 bp, Artificial
  Probe
agaaccaagagtacaatatcctcct

SEQ ID NO: 87306 - DNA, 25 bp, Artificial
  Probe
cagaaccaagagtacaatatcctcc

SEQ ID NO: 87307 - DNA, 25 bp, Artificial
  Probe
ccagaaccaagagtacaatatcctc

SEQ ID NO: 87308 - DNA, 25 bp, Artificial
  Probe
cctctgaagtcaaggagatagaaga

SEQ ID NO: 87309 - DNA, 25 bp, Artificial
  Probe
aagagtacaatatcctccttgacat

SEQ ID NO: 87310 - DNA, 25 bp, Artificial
  Probe
gccagaaccaagagtacaatatcct

SEQ ID NO: 87311 - DNA, 25 bp, Artificial
  Probe
aacgccagaaccaagagtacaatat

SEQ ID NO: 87312 - DNA, 25 bp, Artificial
  Probe
agagtacaatatcctccttgacata

SEQ ID NO: 87313 - DNA, 25 bp, Artificial
  Probe
gctgtaaagggcttgtaagattaaa

SEQ ID NO: 87314 - DNA, 25 bp, Artificial
  Probe
gtgcggtgacagtctatttatttac

SEQ ID NO: 87315 - DNA, 25 bp, Artificial
  Probe
aatatcctccttgacataaagaccc

SEQ ID NO: 87316 - DNA, 25 bp, Artificial
  Probe
acgccagaaccaagagtacaatatc

SEQ ID NO: 87317 - DNA, 25 bp, Artificial
  Probe
gaacgccagaaccaagagtacaata

SEQ ID NO: 87318 - DNA, 25 bp, Artificial
  Probe
tctgaagtcaaggagatagaagaaa

SEQ ID NO: 87319 - DNA, 25 bp, Artificial
  Probe
caatatcctccttgacataaagacc

SEQ ID NO: 87320 - DNA, 25 bp, Artificial
  Probe
gagtacaatatcctccttgacataa

SEQ ID NO: 87321 - DNA, 25 bp, Artificial
  Probe
atatcctccttgacataaagacccg

SEQ ID NO: 87322 - DNA, 25 bp, Artificial
  Probe
tgtgcggtgacagtctatttattta

SEQ ID NO: 87323 - DNA, 25 bp, Artificial
  Probe
acaatatcctccttgacataaagac

SEQ ID NO: 87324 - DNA, 25 bp, Artificial
  Probe
cgccagaaccaagagtacaatatcc

SEQ ID NO: 87325 - DNA, 25 bp, Artificial
  Probe
ctgtaaagggcttgtaagattaaag

SEQ ID NO: 87326 - DNA, 25 bp, Artificial
  Probe
tgtaagattaaagccagtgaatcct

SEQ ID NO: 87327 - DNA, 25 bp, Artificial
  Probe
gtaagattaaagccagtgaatcctg

SEQ ID NO: 87328 - DNA, 25 bp, Artificial
  Probe
cgggctctgtaattaaatataaacg

SEQ ID NO: 87329 - DNA, 25 bp, Artificial
  Probe
aactaagcatgaaagagtctctgga

SEQ ID NO: 87330 - DNA, 25 bp, Artificial
  Probe
caactaagcatgaaagagtctctgg

SEQ ID NO: 87331 - DNA, 25 bp, Artificial
  Probe
ccaactaagcatgaaagagtctctg

SEQ ID NO: 87332 - DNA, 25 bp, Artificial
  Probe
ttgtaagattaaagccagtgaatcc

SEQ ID NO: 87333 - DNA, 25 bp, Artificial
  Probe
tgcggtgacagtctatttatttacc

SEQ ID NO: 87334 - DNA, 25 bp, Artificial
  Probe
ctacagagtaccagctaaacacttt

SEQ ID NO: 87335 - DNA, 25 bp, Artificial
  Probe
tacagagtaccagctaaacactttg

SEQ ID NO: 87336 - DNA, 25 bp, Artificial
  Probe
aaactacagagtaccagctaaacac

SEQ ID NO: 87337 - DNA, 25 bp, Artificial
  Probe
actaagcatgaaagagtctctggag

SEQ ID NO: 87338 - DNA, 25 bp, Artificial
  Probe
actacagagtaccagctaaacactt

SEQ ID NO: 87339 - DNA, 25 bp, Artificial
  Probe
aactacagagtaccagctaaacact

SEQ ID NO: 87340 - DNA, 25 bp, Artificial
  Probe
caagagtacaatatcctccttgaca

SEQ ID NO: 87341 - DNA, 25 bp, Artificial
  Probe
aaccaagagtacaatatcctccttg

SEQ ID NO: 87342 - DNA, 25 bp, Artificial
  Probe
ccaagagtacaatatcctccttgac

SEQ ID NO: 87343 - DNA, 25 bp, Artificial
  Probe
accaagagtacaatatcctccttga

SEQ ID NO: 87344 - DNA, 25 bp, Artificial
  Probe
cccaactaagcatgaaagagtctct

SEQ ID NO: 87345 - DNA, 25 bp, Artificial
  Probe
tcccaactaagcatgaaagagtctc

SEQ ID NO: 87346 - DNA, 25 bp, Artificial
  Probe
cttgtaagattaaagccagtgaatc

SEQ ID NO: 87347 - DNA, 25 bp, Artificial
  Probe
aagattaagacggtcgtggaggaag

SEQ ID NO: 87348 - DNA, 25 bp, Artificial
  Probe
aattcttcagtccagagagttctcc

SEQ ID NO: 87349 - DNA, 25 bp, Artificial
  Probe
attcttcagtccagagagttctcct

SEQ ID NO: 87350 - DNA, 25 bp, Artificial
  Probe
acattagggaaggctaagacataag

SEQ ID NO: 87351 - DNA, 25 bp, Artificial
  Probe
cttacattagggaaggctaagacat

SEQ ID NO: 87352 - DNA, 25 bp, Artificial
  Probe
cattagggaaggctaagacataagg

SEQ ID NO: 87353 - DNA, 25 bp, Artificial
  Probe
taagacataaggcaccttaagtcag

SEQ ID NO: 87354 - DNA, 25 bp, Artificial
  Probe
ctaagacataaggcaccttaagtca

SEQ ID NO: 87355 - DNA, 25 bp, Artificial
  Probe
gatcttaaattggtcaggacaaggg

SEQ ID NO: 87356 - DNA, 25 bp, Artificial
  Probe
tacattagggaaggctaagacataa

SEQ ID NO: 87357 - DNA, 25 bp, Artificial
  Probe
ttacattagggaaggctaagacata

SEQ ID NO: 87358 - DNA, 25 bp, Artificial
  Probe
gaattcttcagtccagagagttctc

SEQ ID NO: 87359 - DNA, 25 bp, Artificial
  Probe
cctcctcagagcaagtcttaacaga

SEQ ID NO: 87360 - DNA, 25 bp, Artificial
  Probe
gctaagacataaggcaccttaagtc

SEQ ID NO: 87361 - DNA, 25 bp, Artificial
  Probe
attagggaaggctaagacataaggc

SEQ ID NO: 87362 - DNA, 25 bp, Artificial
  Probe
cttaacagacttgttccagttatgc

SEQ ID NO: 87363 - DNA, 25 bp, Artificial
  Probe
ttagtcagtaactgctttctggttt

SEQ ID NO: 87364 - DNA, 25 bp, Artificial
  Probe
tttagtcagtaactgctttctggtt

SEQ ID NO: 87365 - DNA, 25 bp, Artificial
  Probe
tgttgtttagtcagtaactgctttc

SEQ ID NO: 87366 - DNA, 25 bp, Artificial
  Probe
ctgttgtttagtcagtaactgcttt

SEQ ID NO: 87367 - DNA, 25 bp, Artificial
  Probe
ttgtttagtcagtaactgctttctg

SEQ ID NO: 87368 - DNA, 25 bp, Artificial
  Probe
gttgtttagtcagtaactgctttct

SEQ ID NO: 87369 - DNA, 25 bp, Artificial
  Probe
cttacctaaggagaagctcaaagaa

SEQ ID NO: 87370 - DNA, 25 bp, Artificial
  Probe
aagacataaggcaccttaagtcagt

SEQ ID NO: 87371 - DNA, 25 bp, Artificial
  Probe
ctaaggagaagctcaaagaactcat

SEQ ID NO: 87372 - DNA, 25 bp, Artificial
  Probe
ttacctaaggagaagctcaaagaac

SEQ ID NO: 87373 - DNA, 25 bp, Artificial
  Probe
gacttacctaaggagaagctcaaag

SEQ ID NO: 87374 - DNA, 25 bp, Artificial
  Probe
tagtcagtaactgctttctggtttg

SEQ ID NO: 87375 - DNA, 25 bp, Artificial
  Probe
gtttagtcagtaactgctttctggt

SEQ ID NO: 87376 - DNA, 25 bp, Artificial
  Probe
tgtttagtcagtaactgctttctgg

SEQ ID NO: 87377 - DNA, 25 bp, Artificial
  Probe
ttcttcagtccagagagttctcctg

SEQ ID NO: 87378 - DNA, 25 bp, Artificial
  Probe
acgacttacctaaggagaagctcaa

SEQ ID NO: 87379 - DNA, 25 bp, Artificial
  Probe
tacctaaggagaagctcaaagaact

SEQ ID NO: 87380 - DNA, 25 bp, Artificial
  Probe
acttacctaaggagaagctcaaaga

SEQ ID NO: 87381 - DNA, 25 bp, Artificial
  Probe
ttaacagacttgttccagttatgcc

SEQ ID NO: 87382 - DNA, 25 bp, Artificial
  Probe
cttacccactcttgactcctttgag

SEQ ID NO: 87383 - DNA, 25 bp, Artificial
  Probe
tcttaacagacttgttccagttatg

SEQ ID NO: 87384 - DNA, 25 bp, Artificial
  Probe
ctcaagtgctcactgttgtttagtc

SEQ ID NO: 87385 - DNA, 25 bp, Artificial
  Probe
aggctaagacataaggcaccttaag

SEQ ID NO: 87386 - DNA, 25 bp, Artificial
  Probe
gtcagtaactgctttctggtttgaa

SEQ ID NO: 87387 - DNA, 25 bp, Artificial
  Probe
gttatgcccacccaccttacattag

SEQ ID NO: 87388 - DNA, 25 bp, Artificial
  Probe
ctggacgacttacctaaggagaagc

SEQ ID NO: 87389 - DNA, 25 bp, Artificial
  Probe
gctggacgacttacctaaggagaag

SEQ ID NO: 87390 - DNA, 25 bp, Artificial
  Probe
ggctaagacataaggcaccttaagt

SEQ ID NO: 87391 - DNA, 25 bp, Artificial
  Probe
ataaggcaccttaagtcagtgacag

SEQ ID NO: 87392 - DNA, 25 bp, Artificial
  Probe
gacataaggcaccttaagtcagtga

SEQ ID NO: 87393 - DNA, 25 bp, Artificial
  Probe
taactccagtatgtgtcaatgtcaa

SEQ ID NO: 87394 - DNA, 25 bp, Artificial
  Probe
ctaactccagtatgtgtcaatgtca

SEQ ID NO: 87395 - DNA, 25 bp, Artificial
  Probe
tatgttcctacctgtccacttgtat

SEQ ID NO: 87396 - DNA, 25 bp, Artificial
  Probe
tccagccagactcctaactatattc

SEQ ID NO: 87397 - DNA, 25 bp, Artificial
  Probe
gccagactcctaactatattcttca

SEQ ID NO: 87398 - DNA, 25 bp, Artificial
  Probe
cagccagactcctaactatattctt

SEQ ID NO: 87399 - DNA, 25 bp, Artificial
  Probe
agccagactcctaactatattcttc

SEQ ID NO: 87400 - DNA, 25 bp, Artificial
  Probe
ccagccagactcctaactatattct

SEQ ID NO: 87401 - DNA, 25 bp, Artificial
  Probe
atgttcctacctgtccacttgtatt

SEQ ID NO: 87402 - DNA, 25 bp, Artificial
  Probe
actaactccagtatgtgtcaatgtc

SEQ ID NO: 87403 - DNA, 25 bp, Artificial
  Probe
gtatgttcctacctgtccacttgta

SEQ ID NO: 87404 - DNA, 25 bp, Artificial
  Probe
tgtgttattggatgagaactgtatc

SEQ ID NO: 87405 - DNA, 25 bp, Artificial
  Probe
aatgtgttattggatgagaactgta

SEQ ID NO: 87406 - DNA, 25 bp, Artificial
  Probe
taatgtgttattggatgagaactgt

SEQ ID NO: 87407 - DNA, 25 bp, Artificial
  Probe
tgttcctacctgtccacttgtattg

SEQ ID NO: 87408 - DNA, 25 bp, Artificial
  Probe
atgtgttattggatgagaactgtat

SEQ ID NO: 87409 - DNA, 25 bp, Artificial
  Probe
gtccagccagactcctaactatatt

SEQ ID NO: 87410 - DNA, 25 bp, Artificial
  Probe
gactcctaactatattcttcaacca

SEQ ID NO: 87411 - DNA, 25 bp, Artificial
  Probe
ctgtatgttcctacctgtccacttg

SEQ ID NO: 87412 - DNA, 25 bp, Artificial
  Probe
tgttactaactccagtatgtgtcaa

SEQ ID NO: 87413 - DNA, 25 bp, Artificial
  Probe
tactaactccagtatgtgtcaatgt

SEQ ID NO: 87414 - DNA, 25 bp, Artificial
  Probe
actgtatgttcctacctgtccactt

SEQ ID NO: 87415 - DNA, 25 bp, Artificial
  Probe
ttaatgtgttattggatgagaactg

SEQ ID NO: 87416 - DNA, 25 bp, Artificial
  Probe
tgtccagccagactcctaactatat

SEQ ID NO: 87417 - DNA, 25 bp, Artificial
  Probe
atgtccagccagactcctaactata

SEQ ID NO: 87418 - DNA, 25 bp, Artificial
  Probe
actccagtatgtgtcaatgtcaaat

SEQ ID NO: 87419 - DNA, 25 bp, Artificial
  Probe
agactcctaactatattcttcaacc

SEQ ID NO: 87420 - DNA, 25 bp, Artificial
  Probe
ccagactcctaactatattcttcaa

SEQ ID NO: 87421 - DNA, 25 bp, Artificial
  Probe
aactccagtatgtgtcaatgtcaaa

SEQ ID NO: 87422 - DNA, 25 bp, Artificial
  Probe
gcccttcattaaaccaagtaacatt

SEQ ID NO: 87423 - DNA, 25 bp, Artificial
  Probe
ctccagtatgtgtcaatgtcaaata

SEQ ID NO: 87424 - DNA, 25 bp, Artificial
  Probe
ttactaactccagtatgtgtcaatg

SEQ ID NO: 87425 - DNA, 25 bp, Artificial
  Probe
gttactaactccagtatgtgtcaat

SEQ ID NO: 87426 - DNA, 25 bp, Artificial
  Probe
actcctaactatattcttcaaccat

SEQ ID NO: 87427 - DNA, 25 bp, Artificial
  Probe
tgtatgttcctacctgtccacttgt

SEQ ID NO: 87428 - DNA, 25 bp, Artificial
  Probe
aaatgactgaaactgaagcaactgt

SEQ ID NO: 87429 - DNA, 25 bp, Artificial
  Probe
ttaagtagaccgtagcacctagagc

SEQ ID NO: 87430 - DNA, 25 bp, Artificial
  Probe
cccttcattaaaccaagtaacattg

SEQ ID NO: 87431 - DNA, 25 bp, Artificial
  Probe
cactgtatgttcctacctgtccact

SEQ ID NO: 87432 - DNA, 25 bp, Artificial
  Probe
gccaccttccctactgtaattattt

SEQ ID NO: 87433 - DNA, 25 bp, Artificial
  Probe
cttaagtagaccgtagcacctagag

SEQ ID NO: 87434 - DNA, 25 bp, Artificial
  Probe
ccctgtttgtgtgttattaatgtgt

SEQ ID NO: 87435 - DNA, 25 bp, Artificial
  Probe
ccagtatgtgtcaatgtcaaatacc

SEQ ID NO: 87436 - DNA, 25 bp, Artificial
  Probe
cactgtaacgatggtcatccttgtt

SEQ ID NO: 87437 - DNA, 25 bp, Artificial
  Probe
ctcttaagtagaccgtagcacctag

SEQ ID NO: 87438 - DNA, 25 bp, Artificial
  Probe
ttactatttgttgtgttttcccacg

SEQ ID NO: 87439 - DNA, 25 bp, Artificial
  Probe
tactatttgttgtgttttcccacgg

SEQ ID NO: 87440 - DNA, 25 bp, Artificial
  Probe
attactatttgttgtgttttcccac

SEQ ID NO: 87441 - DNA, 25 bp, Artificial
  Probe
tattactatttgttgtgttttccca

SEQ ID NO: 87442 - DNA, 25 bp, Artificial
  Probe
ttattactatttgttgtgttttccc

SEQ ID NO: 87443 - DNA, 25 bp, Artificial
  Probe
actatttgttgtgttttcccacggg

SEQ ID NO: 87444 - DNA, 25 bp, Artificial
  Probe
ctatttgttgtgttttcccacgggg

SEQ ID NO: 87445 - DNA, 25 bp, Artificial
  Probe
taacactactaaggcttcaccgtaa

SEQ ID NO: 87446 - DNA, 25 bp, Artificial
  Probe
ttaacactactaaggcttcaccgta

SEQ ID NO: 87447 - DNA, 25 bp, Artificial
  Probe
aacactactaaggcttcaccgtaat

SEQ ID NO: 87448 - DNA, 25 bp, Artificial
  Probe
acactactaaggcttcaccgtaatc

SEQ ID NO: 87449 - DNA, 25 bp, Artificial
  Probe
aatggaaggtgtctgtgagtatctc

SEQ ID NO: 87450 - DNA, 25 bp, Artificial
  Probe
gggctatgtattacctccttgaaat

SEQ ID NO: 87451 - DNA, 25 bp, Artificial
  Probe
tgggcatattcatacttgtctcttt

SEQ ID NO: 87452 - DNA, 25 bp, Artificial
  Probe
gtgggcatattcatacttgtctctt

SEQ ID NO: 87453 - DNA, 25 bp, Artificial
  Probe
gaaatggaaggtgtctgtgagtatc

SEQ ID NO: 87454 - DNA, 25 bp, Artificial
  Probe
tactgggctatgtattacctccttg

SEQ ID NO: 87455 - DNA, 25 bp, Artificial
  Probe
tgggctatgtattacctccttgaaa

SEQ ID NO: 87456 - DNA, 25 bp, Artificial
  Probe
cactactaaggcttcaccgtaatcg

SEQ ID NO: 87457 - DNA, 25 bp, Artificial
  Probe
aaatggaaggtgtctgtgagtatct

SEQ ID NO: 87458 - DNA, 25 bp, Artificial
  Probe
tgaaatggaaggtgtctgtgagtat

SEQ ID NO: 87459 - DNA, 25 bp, Artificial
  Probe
ctgggctatgtattacctccttgaa

SEQ ID NO: 87460 - DNA, 25 bp, Artificial
  Probe
ctttggtgtactgggctatgtatta

SEQ ID NO: 87461 - DNA, 25 bp, Artificial
  Probe
tttggtgtactgggctatgtattac

SEQ ID NO: 87462 - DNA, 25 bp, Artificial
  Probe
aactgatctcatatttctccaaggc

SEQ ID NO: 87463 - DNA, 25 bp, Artificial
  Probe
cagtgggcatattcatacttgtctc

SEQ ID NO: 87464 - DNA, 25 bp, Artificial
  Probe
gtactgggctatgtattacctcctt

SEQ ID NO: 87465 - DNA, 25 bp, Artificial
  Probe
agtgggcatattcatacttgtctct

SEQ ID NO: 87466 - DNA, 25 bp, Artificial
  Probe
gaactgatctcatatttctccaagg

SEQ ID NO: 87467 - DNA, 25 bp, Artificial
  Probe
ctacacaccattcagtcagcagatg

SEQ ID NO: 87468 - DNA, 25 bp, Artificial
  Probe
gacgactagacccaggtaatcaatt

SEQ ID NO: 87469 - DNA, 25 bp, Artificial
  Probe
gtatgacgactagacccaggtaatc

SEQ ID NO: 87470 - DNA, 25 bp, Artificial
  Probe
catgtttgtatgagcaagacttgtt

SEQ ID NO: 87471 - DNA, 25 bp, Artificial
  Probe
gatgggctcctctctggtataaatg

SEQ ID NO: 87472 - DNA, 25 bp, Artificial
  Probe
ctgaaatggaaggtgtctgtgagta

SEQ ID NO: 87473 - DNA, 25 bp, Artificial
  Probe
atgtttgtatgagcaagacttgttt

SEQ ID NO: 87474 - DNA, 25 bp, Artificial
  Probe
taagtatgacgactagacccaggta

SEQ ID NO: 87475 - DNA, 25 bp, Artificial
  Probe
ggctatgtattacctccttgaaata

SEQ ID NO: 87476 - DNA, 25 bp, Artificial
  Probe
gagttgtggtttctttgtcctttcc

SEQ ID NO: 87477 - DNA, 25 bp, Artificial
  Probe
actgggctatgtattacctccttga

SEQ ID NO: 87478 - DNA, 25 bp, Artificial
  Probe
agatgggctcctctctggtataaat

SEQ ID NO: 87479 - DNA, 25 bp, Artificial
  Probe
tgtactgggctatgtattacctcct

SEQ ID NO: 87480 - DNA, 25 bp, Artificial
  Probe
gtgtactgggctatgtattacctcc

SEQ ID NO: 87481 - DNA, 25 bp, Artificial
  Probe
gttgtggtttctttgtcctttcctg

SEQ ID NO: 87482 - DNA, 25 bp, Artificial
  Probe
tttgccctaagtatgacgactagac

SEQ ID NO: 87483 - DNA, 25 bp, Artificial
  Probe
tatgacgactagacccaggtaatca

SEQ ID NO: 87484 - DNA, 25 bp, Artificial
  Probe
agtatgacgactagacccaggtaat

SEQ ID NO: 87485 - DNA, 25 bp, Artificial
  Probe
atgggctcctctctggtataaatgt

SEQ ID NO: 87486 - DNA, 25 bp, Artificial
  Probe
agttgtggtttctttgtcctttcct

SEQ ID NO: 87487 - DNA, 25 bp, Artificial
  Probe
actactaaggcttcaccgtaatcga

SEQ ID NO: 87488 - DNA, 25 bp, Artificial
  Probe
ccatgtttgtatgagcaagacttgt

SEQ ID NO: 87489 - DNA, 25 bp, Artificial
  Probe
aagtatgacgactagacccaggtaa

SEQ ID NO: 87490 - DNA, 25 bp, Artificial
  Probe
cctgagaatatcctcctagatgaca

SEQ ID NO: 87491 - DNA, 25 bp, Artificial
  Probe
gaagcctgagaatatcctcctagat

SEQ ID NO: 87492 - DNA, 25 bp, Artificial
  Probe
aagcctgagaatatcctcctagatg

SEQ ID NO: 87493 - DNA, 25 bp, Artificial
  Probe
ctgagaatatcctcctagatgacaa

SEQ ID NO: 87494 - DNA, 25 bp, Artificial
  Probe
tatcacagaggatgaagttaccttg

SEQ ID NO: 87495 - DNA, 25 bp, Artificial
  Probe
ctatcacagaggatgaagttacctt

SEQ ID NO: 87496 - DNA, 25 bp, Artificial
  Probe
tgctatcacagaggatgaagttacc

SEQ ID NO: 87497 - DNA, 25 bp, Artificial
  Probe
gtgctatcacagaggatgaagttac

SEQ ID NO: 87498 - DNA, 25 bp, Artificial
  Probe
agtgctatcacagaggatgaagtta

SEQ ID NO: 87499 - DNA, 25 bp, Artificial
  Probe
gcctgagaatatcctcctagatgac

SEQ ID NO: 87500 - DNA, 25 bp, Artificial
  Probe
ctgaagcctgagaatatcctcctag

SEQ ID NO: 87501 - DNA, 25 bp, Artificial
  Probe
agcctgagaatatcctcctagatga

SEQ ID NO: 87502 - DNA, 25 bp, Artificial
  Probe
ctacgagtcttctagcttcatgttc

SEQ ID NO: 87503 - DNA, 25 bp, Artificial
  Probe
attcctacgagtcttctagcttcat

SEQ ID NO: 87504 - DNA, 25 bp, Artificial
  Probe
tgagaatatcctcctagatgacaat

SEQ ID NO: 87505 - DNA, 25 bp, Artificial
  Probe
aatatcctcctagatgacaatatgc

SEQ ID NO: 87506 - DNA, 25 bp, Artificial
  Probe
tgaagcctgagaatatcctcctaga

SEQ ID NO: 87507 - DNA, 25 bp, Artificial
  Probe
gctatcacagaggatgaagttacct

SEQ ID NO: 87508 - DNA, 25 bp, Artificial
  Probe
gattcctacgagtcttctagcttca

SEQ ID NO: 87509 - DNA, 25 bp, Artificial
  Probe
tcctcctagatgacaatatgcagat

SEQ ID NO: 87510 - DNA, 25 bp, Artificial
  Probe
ctcctagatgacaatatgcagatcc

SEQ ID NO: 87511 - DNA, 25 bp, Artificial
  Probe
cctcctagatgacaatatgcagatc

SEQ ID NO: 87512 - DNA, 25 bp, Artificial
  Probe
atcctcctagatgacaatatgcaga

SEQ ID NO: 87513 - DNA, 25 bp, Artificial
  Probe
ttcctacgagtcttctagcttcatg

SEQ ID NO: 87514 - DNA, 25 bp, Artificial
  Probe
tatcctcctagatgacaatatgcag

SEQ ID NO: 87515 - DNA, 25 bp, Artificial
  Probe
atcacagaggatgaagttaccttgg

SEQ ID NO: 87516 - DNA, 25 bp, Artificial
  Probe
tacgagtcttctagcttcatgttcc

SEQ ID NO: 87517 - DNA, 25 bp, Artificial
  Probe
cctacgagtcttctagcttcatgtt

SEQ ID NO: 87518 - DNA, 25 bp, Artificial
  Probe
ctacctacctactctggacttggag

SEQ ID NO: 87519 - DNA, 25 bp, Artificial
  Probe
cctgaagcctgagaatatcctccta

SEQ ID NO: 87520 - DNA, 25 bp, Artificial
  Probe
gagacctgaagcctgagaatatcct

SEQ ID NO: 87521 - DNA, 25 bp, Artificial
  Probe
acagaggatgaagttaccttggtac

SEQ ID NO: 87522 - DNA, 25 bp, Artificial
  Probe
cacagaggatgaagttaccttggta

SEQ ID NO: 87523 - DNA, 25 bp, Artificial
  Probe
atatcctcctagatgacaatatgca

SEQ ID NO: 87524 - DNA, 25 bp, Artificial
  Probe
cagtgctatcacagaggatgaagtt

SEQ ID NO: 87525 - DNA, 25 bp, Artificial
  Probe
tcctagatgacaatatgcagatccg

SEQ ID NO: 87526 - DNA, 25 bp, Artificial
  Probe
cgattcctacgagtcttctagcttc

SEQ ID NO: 87527 - DNA, 25 bp, Artificial
  Probe
tacctacctactctggacttggaga

SEQ ID NO: 87528 - DNA, 25 bp, Artificial
  Probe
tcctacgagtcttctagcttcatgt

SEQ ID NO: 87529 - DNA, 25 bp, Artificial
  Probe
agacctgaagcctgagaatatcctc

SEQ ID NO: 87530 - DNA, 25 bp, Artificial
  Probe
gagtcttctagcttcatgttcctgg

SEQ ID NO: 87531 - DNA, 25 bp, Artificial
  Probe
gtaatcctgttcacacttctggctg

SEQ ID NO: 87532 - DNA, 25 bp, Artificial
  Probe
cctacctactctggacttggagatc

SEQ ID NO: 87533 - DNA, 25 bp, Artificial
  Probe
cttctagcttcatgttcctggtgtt

SEQ ID NO: 87534 - DNA, 25 bp, Artificial
  Probe
cctacctacctactctggacttgga

SEQ ID NO: 87535 - DNA, 25 bp, Artificial
  Probe
ctagactgttctctgttactgtaga

SEQ ID NO: 87536 - DNA, 25 bp, Artificial
  Probe
ttactgttgtcttaaatgtggctac

SEQ ID NO: 87537 - DNA, 25 bp, Artificial
  Probe
aattactgttgtcttaaatgtggct

SEQ ID NO: 87538 - DNA, 25 bp, Artificial
  Probe
cgtcccaattactgttgtcttaaat

SEQ ID NO: 87539 - DNA, 25 bp, Artificial
  Probe
attacctggtggaacagttacactc

SEQ ID NO: 87540 - DNA, 25 bp, Artificial
  Probe
caattactgttgtcttaaatgtggc

SEQ ID NO: 87541 - DNA, 25 bp, Artificial
  Probe
attactgttgtcttaaatgtggcta

SEQ ID NO: 87542 - DNA, 25 bp, Artificial
  Probe
cattacctggtggaacagttacact

SEQ ID NO: 87543 - DNA, 25 bp, Artificial
  Probe
tactgttgtcttaaatgtggctaca

SEQ ID NO: 87544 - DNA, 25 bp, Artificial
  Probe
cccaattactgttgtcttaaatgtg

SEQ ID NO: 87545 - DNA, 25 bp, Artificial
  Probe
tcccaattactgttgtcttaaatgt

SEQ ID NO: 87546 - DNA, 25 bp, Artificial
  Probe
acattacctggtggaacagttacac

SEQ ID NO: 87547 - DNA, 25 bp, Artificial
  Probe
cacattacctggtggaacagttaca

SEQ ID NO: 87548 - DNA, 25 bp, Artificial
  Probe
gtcccaattactgttgtcttaaatg

SEQ ID NO: 87549 - DNA, 25 bp, Artificial
  Probe
gcgtcccaattactgttgtcttaaa

SEQ ID NO: 87550 - DNA, 25 bp, Artificial
  Probe
tctagactgttctctgttactgtag

SEQ ID NO: 87551 - DNA, 25 bp, Artificial
  Probe
tataataatgatgccttgatgacaa

SEQ ID NO: 87552 - DNA, 25 bp, Artificial
  Probe
ttctagactgttctctgttactgta

SEQ ID NO: 87553 - DNA, 25 bp, Artificial
  Probe
agcgtcccaattactgttgtcttaa

SEQ ID NO: 87554 - DNA, 25 bp, Artificial
  Probe
ttacctggtggaacagttacactca

SEQ ID NO: 87555 - DNA, 25 bp, Artificial
  Probe
gaacagttacactcacttgccactc

SEQ ID NO: 87556 - DNA, 25 bp, Artificial
  Probe
aacgtatttctgttctctctggtac

SEQ ID NO: 87557 - DNA, 25 bp, Artificial
  Probe
caacgtatttctgttctctctggta

SEQ ID NO: 87558 - DNA, 25 bp, Artificial
  Probe
ccaattactgttgtcttaaatgtgg

SEQ ID NO: 87559 - DNA, 25 bp, Artificial
  Probe
ctggtggaacagttacactcacttg

SEQ ID NO: 87560 - DNA, 25 bp, Artificial
  Probe
tagactgttctctgttactgtagag

SEQ ID NO: 87561 - DNA, 25 bp, Artificial
  Probe
ttataataatgatgccttgatgaca

SEQ ID NO: 87562 - DNA, 25 bp, Artificial
  Probe
cagattgaggatgaggcaacgtatt

SEQ ID NO: 87563 - DNA, 25 bp, Artificial
  Probe
acgtatttctgttctctctggtaca

SEQ ID NO: 87564 - DNA, 25 bp, Artificial
  Probe
acagttacactcacttgccactcaa

SEQ ID NO: 87565 - DNA, 25 bp, Artificial
  Probe
aacagttacactcacttgccactca

SEQ ID NO: 87566 - DNA, 25 bp, Artificial
  Probe
tacctggtggaacagttacactcac

SEQ ID NO: 87567 - DNA, 25 bp, Artificial
  Probe
ctgttgtcttaaatgtggctacatc

SEQ ID NO: 87568 - DNA, 25 bp, Artificial
  Probe
gttgtcttaaatgtggctacatctt

SEQ ID NO: 87569 - DNA, 25 bp, Artificial
  Probe
tgttgtcttaaatgtggctacatct

SEQ ID NO: 87570 - DNA, 25 bp, Artificial
  Probe
gaatctgcactcaccacattacctg

SEQ ID NO: 87571 - DNA, 25 bp, Artificial
  Probe
gattgaggatgaggcaacgtatttc

SEQ ID NO: 87572 - DNA, 25 bp, Artificial
  Probe
tgtcttaaatgtggctacatctttc

SEQ ID NO: 87573 - DNA, 25 bp, Artificial
  Probe
actgttgtcttaaatgtggctacat

SEQ ID NO: 87574 - DNA, 25 bp, Artificial
  Probe
cagcgtcccaattactgttgtctta

SEQ ID NO: 87575 - DNA, 25 bp, Artificial
  Probe
gtcttaaatgtggctacatctttct

SEQ ID NO: 87576 - DNA, 25 bp, Artificial
  Probe
tttctagactgttctctgttactgt

SEQ ID NO: 87577 - DNA, 25 bp, Artificial
  Probe
ttgtcttaaatgtggctacatcttt

SEQ ID NO: 87578 - DNA, 25 bp, Artificial
  Probe
gatgaggcaacgtatttctgttctc

SEQ ID NO: 87579 - DNA, 25 bp, Artificial
  Probe
attgaggatgaggcaacgtatttct

SEQ ID NO: 87580 - DNA, 25 bp, Artificial
  Probe
cacctgttcttcttcaagctcattg

SEQ ID NO: 87581 - DNA, 25 bp, Artificial
  Probe
ggcaatcatactgtttaacccagac

SEQ ID NO: 87582 - DNA, 25 bp, Artificial
  Probe
caatcatactgtttaacccagacgc

SEQ ID NO: 87583 - DNA, 25 bp, Artificial
  Probe
gcaatcatactgtttaacccagacg

SEQ ID NO: 87584 - DNA, 25 bp, Artificial
  Probe
acctgttcttcttcaagctcattgg

SEQ ID NO: 87585 - DNA, 25 bp, Artificial
  Probe
gcacctgttcttcttcaagctcatt

SEQ ID NO: 87586 - DNA, 25 bp, Artificial
  Probe
tctggagcacctgttcttcttcaag

SEQ ID NO: 87587 - DNA, 25 bp, Artificial
  Probe
ctactgcaagcagaagtatcctgag

SEQ ID NO: 87588 - DNA, 25 bp, Artificial
  Probe
gagacctactgcaagcagaagtatc

SEQ ID NO: 87589 - DNA, 25 bp, Artificial
  Probe
gtctggagcacctgttcttcttcaa

SEQ ID NO: 87590 - DNA, 25 bp, Artificial
  Probe
aatcatactgtttaacccagacgcc

SEQ ID NO: 87591 - DNA, 25 bp, Artificial
  Probe
cctgttcttcttcaagctcattggc

SEQ ID NO: 87592 - DNA, 25 bp, Artificial
  Probe
catactgtttaacccagacgccaag

SEQ ID NO: 87593 - DNA, 25 bp, Artificial
  Probe
gggcaatcatactgtttaacccaga

SEQ ID NO: 87594 - DNA, 25 bp, Artificial
  Probe
tgtatgcctcactggagacctactg

SEQ ID NO: 87595 - DNA, 25 bp, Artificial
  Probe
cctactgcaagcagaagtatcctga

SEQ ID NO: 87596 - DNA, 25 bp, Artificial
  Probe
gacctactgcaagcagaagtatcct

SEQ ID NO: 87597 - DNA, 25 bp, Artificial
  Probe
agacctactgcaagcagaagtatcc

SEQ ID NO: 87598 - DNA, 25 bp, Artificial
  Probe
ggagacctactgcaagcagaagtat

SEQ ID NO: 87599 - DNA, 25 bp, Artificial
  Probe
atcatactgtttaacccagacgcca

SEQ ID NO: 87600 - DNA, 25 bp, Artificial
  Probe
attgacaccttcctcatggagatgc

SEQ ID NO: 87601 - DNA, 25 bp, Artificial
  Probe
gttcttcttcaagctcattggcgac

SEQ ID NO: 87602 - DNA, 25 bp, Artificial
  Probe
ctgttcttcttcaagctcattggcg

SEQ ID NO: 87603 - DNA, 25 bp, Artificial
  Probe
tcatactgtttaacccagacgccaa

SEQ ID NO: 87604 - DNA, 25 bp, Artificial
  Probe
acctactgcaagcagaagtatcctg

SEQ ID NO: 87605 - DNA, 25 bp, Artificial
  Probe
ctgcgggcaatcatactgtttaacc

SEQ ID NO: 87606 - DNA, 25 bp, Artificial
  Probe
cctgcgggcaatcatactgtttaac

SEQ ID NO: 87607 - DNA, 25 bp, Artificial
  Probe
gtgtatgcctcactggagacctact

SEQ ID NO: 87608 - DNA, 25 bp, Artificial
  Probe
ttcttcttcaagctcattggcgaca

SEQ ID NO: 87609 - DNA, 25 bp, Artificial
  Probe
tgttcttcttcaagctcattggcga

SEQ ID NO: 87610 - DNA, 25 bp, Artificial
  Probe
gtctggcaacacttaacagggtttg

SEQ ID NO: 87611 - DNA, 25 bp, Artificial
  Probe
tactgcaagcagaagtatcctgagc

SEQ ID NO: 87612 - DNA, 25 bp, Artificial
  Probe
atactgtttaacccagacgccaagg

SEQ ID NO: 87613 - DNA, 25 bp, Artificial
  Probe
cgggcaatcatactgtttaacccag

SEQ ID NO: 87614 - DNA, 25 bp, Artificial
  Probe
aaatgcgtgacatgaggatggacaa

SEQ ID NO: 87615 - DNA, 25 bp, Artificial
  Probe
tggagacctactgcaagcagaagta

SEQ ID NO: 87616 - DNA, 25 bp, Artificial
  Probe
caccttcctcatggagatgcttgag

SEQ ID NO: 87617 - DNA, 25 bp, Artificial
  Probe
caaaatgcgtgacatgaggatggac

SEQ ID NO: 87618 - DNA, 25 bp, Artificial
  Probe
aaaatgcgtgacatgaggatggaca

SEQ ID NO: 87619 - DNA, 25 bp, Artificial
  Probe
gtccaaaatgcgtgacatgaggatg

SEQ ID NO: 87620 - DNA, 25 bp, Artificial
  Probe
tagtgtccaaaatgcgtgacatgag

SEQ ID NO: 87621 - DNA, 25 bp, Artificial
  Probe
ctagtgtccaaaatgcgtgacatga

SEQ ID NO: 87622 - DNA, 25 bp, Artificial
  Probe
ctgacagagctagtgtccaaaatgc

SEQ ID NO: 87623 - DNA, 25 bp, Artificial
  Probe
gctgacagagctagtgtccaaaatg

SEQ ID NO: 87624 - DNA, 25 bp, Artificial
  Probe
tgctgacagagctagtgtccaaaat

SEQ ID NO: 87625 - DNA, 25 bp, Artificial
  Probe
tcatctcttcagtctccaatatcac

SEQ ID NO: 87626 - DNA, 25 bp, Artificial
  Probe
atctcttcagtctccaatatcacct

SEQ ID NO: 87627 - DNA, 25 bp, Artificial
  Probe
catctcttcagtctccaatatcacc

SEQ ID NO: 87628 - DNA, 25 bp, Artificial
  Probe
ctcatctcttcagtctccaatatca

SEQ ID NO: 87629 - DNA, 25 bp, Artificial
  Probe
gctcatctcttcagtctccaatatc

SEQ ID NO: 87630 - DNA, 25 bp, Artificial
  Probe
ctgtgtgaagatatgtggatgtgtg

SEQ ID NO: 87631 - DNA, 25 bp, Artificial
  Probe
gtctgtgtgaagatatgtggatgtg

SEQ ID NO: 87632 - DNA, 25 bp, Artificial
  Probe
tctgtgtgaagatatgtggatgtgt

SEQ ID NO: 87633 - DNA, 25 bp, Artificial
  Probe
tctcttcagtctccaatatcacctg

SEQ ID NO: 87634 - DNA, 25 bp, Artificial
  Probe
aatcaacaatcagctcatctcttca

SEQ ID NO: 87635 - DNA, 25 bp, Artificial
  Probe
agctcatctcttcagtctccaatat

SEQ ID NO: 87636 - DNA, 25 bp, Artificial
  Probe
atcaacaatcagctcatctcttcag

SEQ ID NO: 87637 - DNA, 25 bp, Artificial
  Probe
tgtgtgaagatatgtggatgtgtgg

SEQ ID NO: 87638 - DNA, 25 bp, Artificial
  Probe
ctgttccattctttgctttctgata

SEQ ID NO: 87639 - DNA, 25 bp, Artificial
  Probe
tttctgttccattctttgctttctg

SEQ ID NO: 87640 - DNA, 25 bp, Artificial
  Probe
gtttctgttccattctttgctttct

SEQ ID NO: 87641 - DNA, 25 bp, Artificial
  Probe
agtttctgttccattctttgctttc

SEQ ID NO: 87642 - DNA, 25 bp, Artificial
  Probe
gagtttctgttccattctttgcttt

SEQ ID NO: 87643 - DNA, 25 bp, Artificial
  Probe
cgtctgtgtgaagatatgtggatgt

SEQ ID NO: 87644 - DNA, 25 bp, Artificial
  Probe
cagctcatctcttcagtctccaata

SEQ ID NO: 87645 - DNA, 25 bp, Artificial
  Probe
tgttccattctttgctttctgataa

SEQ ID NO: 87646 - DNA, 25 bp, Artificial
  Probe
tctgttccattctttgctttctgat

SEQ ID NO: 87647 - DNA, 25 bp, Artificial
  Probe
aacaatcagctcatctcttcagtct

SEQ ID NO: 87648 - DNA, 25 bp, Artificial
  Probe
caacaatcagctcatctcttcagtc

SEQ ID NO: 87649 - DNA, 25 bp, Artificial
  Probe
ttctgttccattctttgctttctga

SEQ ID NO: 87650 - DNA, 25 bp, Artificial
  Probe
catccataaccctaacaacacagtc

SEQ ID NO: 87651 - DNA, 25 bp, Artificial
  Probe
tcaacaatcagctcatctcttcagt

SEQ ID NO: 87652 - DNA, 25 bp, Artificial
  Probe
gcttgacttcttctctgcacatatt

SEQ ID NO: 87653 - DNA, 25 bp, Artificial
  Probe
tttggagagcactttgaatttgact

SEQ ID NO: 87654 - DNA, 25 bp, Artificial
  Probe
gtttggagagcactttgaatttgac

SEQ ID NO: 87655 - DNA, 25 bp, Artificial
  Probe
cacttcctgcttgacttcttctctg

SEQ ID NO: 87656 - DNA, 25 bp, Artificial
  Probe
acaatcagctcatctcttcagtctc

SEQ ID NO: 87657 - DNA, 25 bp, Artificial
  Probe
gttccattctttgctttctgataat

SEQ ID NO: 87658 - DNA, 25 bp, Artificial
  Probe
ctcttcagtctccaatatcacctgc

SEQ ID NO: 87659 - DNA, 25 bp, Artificial
  Probe
gagtttggagagcactttgaatttg

SEQ ID NO: 87660 - DNA, 25 bp, Artificial
  Probe
agagtttggagagcactttgaattt

SEQ ID NO: 87661 - DNA, 25 bp, Artificial
  Probe
agtttggagagcactttgaatttga

SEQ ID NO: 87662 - DNA, 25 bp, Artificial
  Probe
ttggagagcactttgaatttgactg

SEQ ID NO: 87663 - DNA, 25 bp, Artificial
  Probe
gagagtttggagagcactttgaatt

SEQ ID NO: 87664 - DNA, 25 bp, Artificial
  Probe
atccataaccctaacaacacagtcc

SEQ ID NO: 87665 - DNA, 25 bp, Artificial
  Probe
caatcagctcatctcttcagtctcc

SEQ ID NO: 87666 - DNA, 25 bp, Artificial
  Probe
cataaccctaacaacacagtccctt

SEQ ID NO: 87667 - DNA, 25 bp, Artificial
  Probe
aaatcaacaatcagctcatctcttc

SEQ ID NO: 87668 - DNA, 25 bp, Artificial
  Probe
ccaagaacatctccatgaacttctg

SEQ ID NO: 87669 - DNA, 25 bp, Artificial
  Probe
agagagtttggagagcactttgaat

SEQ ID NO: 87670 - DNA, 25 bp, Artificial
  Probe
agacttaatgctattgaacctgtgt

SEQ ID NO: 87671 - DNA, 25 bp, Artificial
  Probe
aagacttaatgctattgaacctgtg

SEQ ID NO: 87672 - DNA, 25 bp, Artificial
  Probe
gacttaatgctattgaacctgtgtt

SEQ ID NO: 87673 - DNA, 25 bp, Artificial
  Probe
ttcaaggctactaagacttaatgct

SEQ ID NO: 87674 - DNA, 25 bp, Artificial
  Probe
acattagagatggagactacactgg

SEQ ID NO: 87675 - DNA, 25 bp, Artificial
  Probe
tacattagagatggagactacactg

SEQ ID NO: 87676 - DNA, 25 bp, Artificial
  Probe
tcaaggctactaagacttaatgcta

SEQ ID NO: 87677 - DNA, 25 bp, Artificial
  Probe
attcaaggctactaagacttaatgc

SEQ ID NO: 87678 - DNA, 25 bp, Artificial
  Probe
aagaggtacattagagatggagact

SEQ ID NO: 87679 - DNA, 25 bp, Artificial
  Probe
caagaggtacattagagatggagac

SEQ ID NO: 87680 - DNA, 25 bp, Artificial
  Probe
ggtacattagagatggagactacac

SEQ ID NO: 87681 - DNA, 25 bp, Artificial
  Probe
aggtacattagagatggagactaca

SEQ ID NO: 87682 - DNA, 25 bp, Artificial
  Probe
gaggtacattagagatggagactac

SEQ ID NO: 87683 - DNA, 25 bp, Artificial
  Probe
gtcagcaagaggtacattagagatg

SEQ ID NO: 87684 - DNA, 25 bp, Artificial
  Probe
cgattcaaggctactaagacttaat

SEQ ID NO: 87685 - DNA, 25 bp, Artificial
  Probe
agaggtacattagagatggagacta

SEQ ID NO: 87686 - DNA, 25 bp, Artificial
  Probe
ggctactaagacttaatgctattga

SEQ ID NO: 87687 - DNA, 25 bp, Artificial
  Probe
aggctactaagacttaatgctattg

SEQ ID NO: 87688 - DNA, 25 bp, Artificial
  Probe
gtacattagagatggagactacact

SEQ ID NO: 87689 - DNA, 25 bp, Artificial
  Probe
gtgaccacagtgtataggaagtagg

SEQ ID NO: 87690 - DNA, 25 bp, Artificial
  Probe
caaggctactaagacttaatgctat

SEQ ID NO: 87691 - DNA, 25 bp, Artificial
  Probe
agcaagaggtacattagagatggag

SEQ ID NO: 87692 - DNA, 25 bp, Artificial
  Probe
taagacttaatgctattgaacctgt

SEQ ID NO: 87693 - DNA, 25 bp, Artificial
  Probe
tcacacgctcattataaggcattag

SEQ ID NO: 87694 - DNA, 25 bp, Artificial
  Probe
ctcacacgctcattataaggcatta

SEQ ID NO: 87695 - DNA, 25 bp, Artificial
  Probe
gcaagaggtacattagagatggaga

SEQ ID NO: 87696 - DNA, 25 bp, Artificial
  Probe
cagcaagaggtacattagagatgga

SEQ ID NO: 87697 - DNA, 25 bp, Artificial
  Probe
tcagcaagaggtacattagagatgg

SEQ ID NO: 87698 - DNA, 25 bp, Artificial
  Probe
cttctgtcagcaagaggtacattag

SEQ ID NO: 87699 - DNA, 25 bp, Artificial
  Probe
actaagacttaatgctattgaacct

SEQ ID NO: 87700 - DNA, 25 bp, Artificial
  Probe
tgtcagcaagaggtacattagagat

SEQ ID NO: 87701 - DNA, 25 bp, Artificial
  Probe
atctgttcgattcaaggctactaag

SEQ ID NO: 87702 - DNA, 25 bp, Artificial
  Probe
ttctgtcagcaagaggtacattaga

SEQ ID NO: 87703 - DNA, 25 bp, Artificial
  Probe
gaccacagtgtataggaagtaggta

SEQ ID NO: 87704 - DNA, 25 bp, Artificial
  Probe
ctaagacttaatgctattgaacctg

SEQ ID NO: 87705 - DNA, 25 bp, Artificial
  Probe
cacacgctcattataaggcattagg

SEQ ID NO: 87706 - DNA, 25 bp, Artificial
  Probe
gttcgattcaaggctactaagactt

SEQ ID NO: 87707 - DNA, 25 bp, Artificial
  Probe
tcgattcaaggctactaagacttaa

SEQ ID NO: 87708 - DNA, 25 bp, Artificial
  Probe
ttcgattcaaggctactaagactta

SEQ ID NO: 87709 - DNA, 25 bp, Artificial
  Probe
acacgctcattataaggcattagga

SEQ ID NO: 87710 - DNA, 25 bp, Artificial
  Probe
ctgttcgattcaaggctactaagac

SEQ ID NO: 87711 - DNA, 25 bp, Artificial
  Probe
aaggctactaagacttaatgctatt

SEQ ID NO: 87712 - DNA, 25 bp, Artificial
  Probe
ctgtcagcaagaggtacattagaga

SEQ ID NO: 87713 - DNA, 25 bp, Artificial
  Probe
tctgtcagcaagaggtacattagag

SEQ ID NO: 87714 - DNA, 25 bp, Artificial
  Probe
gccactttgtttctgtatctgtaaa

SEQ ID NO: 87715 - DNA, 25 bp, Artificial
  Probe
gatgtaccatgtttacactgaccag

SEQ ID NO: 87716 - DNA, 25 bp, Artificial
  Probe
atgtaccatgtttacactgaccagt

SEQ ID NO: 87717 - DNA, 25 bp, Artificial
  Probe
tttctagcagcatacctgggagatt

SEQ ID NO: 87718 - DNA, 25 bp, Artificial
  Probe
tgtcagcatcaaaatctctcccttt

SEQ ID NO: 87719 - DNA, 25 bp, Artificial
  Probe
ttctagcagcatacctgggagattc

SEQ ID NO: 87720 - DNA, 25 bp, Artificial
  Probe
gtcagcatcaaaatctctccctttt

SEQ ID NO: 87721 - DNA, 25 bp, Artificial
  Probe
ctgtcagcatcaaaatctctccctt

SEQ ID NO: 87722 - DNA, 25 bp, Artificial
  Probe
ttgaaattaaaaccaacgtaccagc

SEQ ID NO: 87723 - DNA, 25 bp, Artificial
  Probe
tgaaattaaaaccaacgtaccagca

SEQ ID NO: 87724 - DNA, 25 bp, Artificial
  Probe
tttgaaattaaaaccaacgtaccag

SEQ ID NO: 87725 - DNA, 25 bp, Artificial
  Probe
tgcactcagaaaatcagattaaagt

SEQ ID NO: 87726 - DNA, 25 bp, Artificial
  Probe
ctagcagcatacctgggagattcag

SEQ ID NO: 87727 - DNA, 25 bp, Artificial
  Probe
gattttctagcagcatacctgggag

SEQ ID NO: 87728 - DNA, 25 bp, Artificial
  Probe
tagcagcatacctgggagattcaga

SEQ ID NO: 87729 - DNA, 25 bp, Artificial
  Probe
tctagcagcatacctgggagattca

SEQ ID NO: 87730 - DNA, 25 bp, Artificial
  Probe
ttttgaaattaaaaccaacgtacca

SEQ ID NO: 87731 - DNA, 25 bp, Artificial
  Probe
cagcatacctgggagattcagaacc

SEQ ID NO: 87732 - DNA, 25 bp, Artificial
  Probe
ttttctagcagcatacctgggagat

SEQ ID NO: 87733 - DNA, 25 bp, Artificial
  Probe
attttctagcagcatacctgggaga

SEQ ID NO: 87734 - DNA, 25 bp, Artificial
  Probe
gatgttccttttctagctaagatga

SEQ ID NO: 87735 - DNA, 25 bp, Artificial
  Probe
tgattttctagcagcatacctggga

SEQ ID NO: 87736 - DNA, 25 bp, Artificial
  Probe
actcagaaaatcagattaaagtgta

SEQ ID NO: 87737 - DNA, 25 bp, Artificial
  Probe
ttttcactctaacccttccccgatg

SEQ ID NO: 87738 - DNA, 25 bp, Artificial
  Probe
aatcggatgttccttttctagctaa

SEQ ID NO: 87739 - DNA, 25 bp, Artificial
  Probe
cggatgttccttttctagctaagat

SEQ ID NO: 87740 - DNA, 25 bp, Artificial
  Probe
atcggatgttccttttctagctaag

SEQ ID NO: 87741 - DNA, 25 bp, Artificial
  Probe
taatcggatgttccttttctagcta

SEQ ID NO: 87742 - DNA, 25 bp, Artificial
  Probe
ggatgttccttttctagctaagatg

SEQ ID NO: 87743 - DNA, 25 bp, Artificial
  Probe
tgttccttttctagctaagatgatt

SEQ ID NO: 87744 - DNA, 25 bp, Artificial
  Probe
tcggatgttccttttctagctaaga

SEQ ID NO: 87745 - DNA, 25 bp, Artificial
  Probe
atgttccttttctagctaagatgat

SEQ ID NO: 87746 - DNA, 25 bp, Artificial
  Probe
agcatacctgggagattcagaacca

SEQ ID NO: 87747 - DNA, 25 bp, Artificial
  Probe
caagctgtcagcatcaaaatctctc

SEQ ID NO: 87748 - DNA, 25 bp, Artificial
  Probe
gttccttttctagctaagatgattt

SEQ ID NO: 87749 - DNA, 25 bp, Artificial
  Probe
gtcaagctgtcagcatcaaaatctc

SEQ ID NO: 87750 - DNA, 25 bp, Artificial
  Probe
gcactcagaaaatcagattaaagtg

SEQ ID NO: 87751 - DNA, 25 bp, Artificial
  Probe
tcaagctgtcagcatcaaaatctct

SEQ ID NO: 87752 - DNA, 25 bp, Artificial
  Probe
ctcagaaaatcagattaaagtgtat

SEQ ID NO: 87753 - DNA, 25 bp, Artificial
  Probe
agtcaagctgtcagcatcaaaatct

SEQ ID NO: 87754 - DNA, 25 bp, Artificial
  Probe
cagtcaagctgtcagcatcaaaatc

SEQ ID NO: 87755 - DNA, 25 bp, Artificial
  Probe
tgtaccatgtttacactgaccagtg

SEQ ID NO: 87756 - DNA, 25 bp, Artificial
  Probe
tcagtcaagctgtcagcatcaaaat

SEQ ID NO: 87757 - DNA, 25 bp, Artificial
  Probe
ttccttttctagctaagatgatttt

SEQ ID NO: 87758 - DNA, 25 bp, Artificial
  Probe
aagctgtcagcatcaaaatctctcc

SEQ ID NO: 87759 - DNA, 25 bp, Artificial
  Probe
cactcagaaaatcagattaaagtgt

SEQ ID NO: 87760 - DNA, 25 bp, Artificial
  Probe
tatccaatagcatcctctctctaca

SEQ ID NO: 87761 - DNA, 25 bp, Artificial
  Probe
attacctcagcctattacagaagtg

SEQ ID NO: 87762 - DNA, 25 bp, Artificial
  Probe
cattacctcagcctattacagaagt

SEQ ID NO: 87763 - DNA, 25 bp, Artificial
  Probe
agttatccaatagcatcctctctct

SEQ ID NO: 87764 - DNA, 25 bp, Artificial
  Probe
atccaatagcatcctctctctacaa

SEQ ID NO: 87765 - DNA, 25 bp, Artificial
  Probe
ttatccaatagcatcctctctctac

SEQ ID NO: 87766 - DNA, 25 bp, Artificial
  Probe
gttatccaatagcatcctctctcta

SEQ ID NO: 87767 - DNA, 25 bp, Artificial
  Probe
gcattacctcagcctattacagaag

SEQ ID NO: 87768 - DNA, 25 bp, Artificial
  Probe
aatagcatcctctctctacaaccag

SEQ ID NO: 87769 - DNA, 25 bp, Artificial
  Probe
agcattacctcagcctattacagaa

SEQ ID NO: 87770 - DNA, 25 bp, Artificial
  Probe
tccaatagcatcctctctctacaac

SEQ ID NO: 87771 - DNA, 25 bp, Artificial
  Probe
gagaagcgagttatccaatagcatc

SEQ ID NO: 87772 - DNA, 25 bp, Artificial
  Probe
caacagcattacctcagcctattac

SEQ ID NO: 87773 - DNA, 25 bp, Artificial
  Probe
tcaacagcattacctcagcctatta

SEQ ID NO: 87774 - DNA, 25 bp, Artificial
  Probe
caatagcatcctctctctacaacca

SEQ ID NO: 87775 - DNA, 25 bp, Artificial
  Probe
gagttatccaatagcatcctctctc

SEQ ID NO: 87776 - DNA, 25 bp, Artificial
  Probe
aacagcattacctcagcctattaca

SEQ ID NO: 87777 - DNA, 25 bp, Artificial
  Probe
tgagaagcgagttatccaatagcat

SEQ ID NO: 87778 - DNA, 25 bp, Artificial
  Probe
cagcattacctcagcctattacaga

SEQ ID NO: 87779 - DNA, 25 bp, Artificial
  Probe
attcaacagcattacctcagcctat

SEQ ID NO: 87780 - DNA, 25 bp, Artificial
  Probe
ttacctcagcctattacagaagtgc

SEQ ID NO: 87781 - DNA, 25 bp, Artificial
  Probe
acagcattacctcagcctattacag

SEQ ID NO: 87782 - DNA, 25 bp, Artificial
  Probe
ccaatagcatcctctctctacaacc

SEQ ID NO: 87783 - DNA, 25 bp, Artificial
  Probe
ttcaacagcattacctcagcctatt

SEQ ID NO: 87784 - DNA, 25 bp, Artificial
  Probe
cgagttatccaatagcatcctctct

SEQ ID NO: 87785 - DNA, 25 bp, Artificial
  Probe
atagcatcctctctctacaaccaga

SEQ ID NO: 87786 - DNA, 25 bp, Artificial
  Probe
ttgagaagcgagttatccaatagca

SEQ ID NO: 87787 - DNA, 25 bp, Artificial
  Probe
gaagcgagttatccaatagcatcct

SEQ ID NO: 87788 - DNA, 25 bp, Artificial
  Probe
agaagcgagttatccaatagcatcc

SEQ ID NO: 87789 - DNA, 25 bp, Artificial
  Probe
atactcgtgtatgacatcaccaaga

SEQ ID NO: 87790 - DNA, 25 bp, Artificial
  Probe
gattcaacagcattacctcagccta

SEQ ID NO: 87791 - DNA, 25 bp, Artificial
  Probe
tactcgtgtatgacatcaccaagaa

SEQ ID NO: 87792 - DNA, 25 bp, Artificial
  Probe
atgctgttgatttgatactttggag

SEQ ID NO: 87793 - DNA, 25 bp, Artificial
  Probe
gatgctgttgatttgatactttgga

SEQ ID NO: 87794 - DNA, 25 bp, Artificial
  Probe
agactgtagaactaagagggaagaa

SEQ ID NO: 87795 - DNA, 25 bp, Artificial
  Probe
aagactgtagaactaagagggaaga

SEQ ID NO: 87796 - DNA, 25 bp, Artificial
  Probe
caagactgtagaactaagagggaag

SEQ ID NO: 87797 - DNA, 25 bp, Artificial
  Probe
atcaagactgtagaactaagaggga

SEQ ID NO: 87798 - DNA, 25 bp, Artificial
  Probe
tcaagactgtagaactaagagggaa

SEQ ID NO: 87799 - DNA, 25 bp, Artificial
  Probe
gctgttgatttgatactttggagat

SEQ ID NO: 87800 - DNA, 25 bp, Artificial
  Probe
aatcaagactgtagaactaagaggg

SEQ ID NO: 87801 - DNA, 25 bp, Artificial
  Probe
gactgtagaactaagagggaagaaa

SEQ ID NO: 87802 - DNA, 25 bp, Artificial
  Probe
ttgatttgatactttggagatggtg

SEQ ID NO: 87803 - DNA, 25 bp, Artificial
  Probe
gttgatttgatactttggagatggt

SEQ ID NO: 87804 - DNA, 25 bp, Artificial
  Probe
tgttgatttgatactttggagatgg

SEQ ID NO: 87805 - DNA, 25 bp, Artificial
  Probe
aagtatctgacaagaagaacagcaa

SEQ ID NO: 87806 - DNA, 25 bp, Artificial
  Probe
tatctgacaagaagaacagcaacaa

SEQ ID NO: 87807 - DNA, 25 bp, Artificial
  Probe
agtatctgacaagaagaacagcaac

SEQ ID NO: 87808 - DNA, 25 bp, Artificial
  Probe
gtatctgacaagaagaacagcaaca

SEQ ID NO: 87809 - DNA, 25 bp, Artificial
  Probe
atctgacaagaagaacagcaacaag

SEQ ID NO: 87810 - DNA, 25 bp, Artificial
  Probe
gacctgaaagtatctgacaagaaga

SEQ ID NO: 87811 - DNA, 25 bp, Artificial
  Probe
tgacctgaaagtatctgacaagaag

SEQ ID NO: 87812 - DNA, 25 bp, Artificial
  Probe
ctgacctgaaagtatctgacaagaa

SEQ ID NO: 87813 - DNA, 25 bp, Artificial
  Probe
acctgaaagtatctgacaagaagaa

SEQ ID NO: 87814 - DNA, 25 bp, Artificial
  Probe
cctgaaagtatctgacaagaagaac

SEQ ID NO: 87815 - DNA, 25 bp, Artificial
  Probe
ctgaaagtatctgacaagaagaaca

SEQ ID NO: 87816 - DNA, 25 bp, Artificial
  Probe
actgacctgaaagtatctgacaaga

SEQ ID NO: 87817 - DNA, 25 bp, Artificial
  Probe
cactgacctgaaagtatctgacaag

SEQ ID NO: 87818 - DNA, 25 bp, Artificial
  Probe
ctgacaagaagaacagcaacaagtg

SEQ ID NO: 87819 - DNA, 25 bp, Artificial
  Probe
tctgacaagaagaacagcaacaagt

SEQ ID NO: 87820 - DNA, 25 bp, Artificial
  Probe
gaaagtatctgacaagaagaacagc

SEQ ID NO: 87821 - DNA, 25 bp, Artificial
  Probe
cagtatgctgatctctccattcctg

SEQ ID NO: 87822 - DNA, 25 bp, Artificial
  Probe
aaagtatctgacaagaagaacagca

SEQ ID NO: 87823 - DNA, 25 bp, Artificial
  Probe
tgaaagtatctgacaagaagaacag

SEQ ID NO: 87824 - DNA, 25 bp, Artificial
  Probe
ctcaagcactgacctgaaagtatct

SEQ ID NO: 87825 - DNA, 25 bp, Artificial
  Probe
aagcactgacctgaaagtatctgac

SEQ ID NO: 87826 - DNA, 25 bp, Artificial
  Probe
caagcactgacctgaaagtatctga

SEQ ID NO: 87827 - DNA, 25 bp, Artificial
  Probe
tcaagcactgacctgaaagtatctg

SEQ ID NO: 87828 - DNA, 25 bp, Artificial
  Probe
tatgctgatctctccattcctggtt

SEQ ID NO: 87829 - DNA, 25 bp, Artificial
  Probe
gcactgacctgaaagtatctgacaa

SEQ ID NO: 87830 - DNA, 25 bp, Artificial
  Probe
ttaatgtcagtatgctgatctctcc

SEQ ID NO: 87831 - DNA, 25 bp, Artificial
  Probe
catttcttgcctcctattcaccctg

SEQ ID NO: 87832 - DNA, 25 bp, Artificial
  Probe
taatgtcagtatgctgatctctcca

SEQ ID NO: 87833 - DNA, 25 bp, Artificial
  Probe
agtatgctgatctctccattcctgg

SEQ ID NO: 87834 - DNA, 25 bp, Artificial
  Probe
cctcaagcactgacctgaaagtatc

SEQ ID NO: 87835 - DNA, 25 bp, Artificial
  Probe
atgtcagtatgctgatctctccatt

SEQ ID NO: 87836 - DNA, 25 bp, Artificial
  Probe
aatgtcagtatgctgatctctccat

SEQ ID NO: 87837 - DNA, 25 bp, Artificial
  Probe
acatttcttgcctcctattcaccct

SEQ ID NO: 87838 - DNA, 25 bp, Artificial
  Probe
gtatgctgatctctccattcctggt

SEQ ID NO: 87839 - DNA, 25 bp, Artificial
  Probe
atttcttgcctcctattcaccctga

SEQ ID NO: 87840 - DNA, 25 bp, Artificial
  Probe
agcactgacctgaaagtatctgaca

SEQ ID NO: 87841 - DNA, 25 bp, Artificial
  Probe
tgtcagtatgctgatctctccattc

SEQ ID NO: 87842 - DNA, 25 bp, Artificial
  Probe
attaatgtcagtatgctgatctctc

SEQ ID NO: 87843 - DNA, 25 bp, Artificial
  Probe
tcagtatgctgatctctccattcct

SEQ ID NO: 87844 - DNA, 25 bp, Artificial
  Probe
gtcagtatgctgatctctccattcc

SEQ ID NO: 87845 - DNA, 25 bp, Artificial
  Probe
aagtgccaaatccagtgtgaatgtg

SEQ ID NO: 87846 - DNA, 25 bp, Artificial
  Probe
caagtgccaaatccagtgtgaatgt

SEQ ID NO: 87847 - DNA, 25 bp, Artificial
  Probe
atgctgatctctccattcctggttc

SEQ ID NO: 87848 - DNA, 25 bp, Artificial
  Probe
gacaagtgccaaatccagtgtgaat

SEQ ID NO: 87849 - DNA, 25 bp, Artificial
  Probe
ccctcaagcactgacctgaaagtat

SEQ ID NO: 87850 - DNA, 25 bp, Artificial
  Probe
attctgtatcagtgtgtcctccttc

SEQ ID NO: 87851 - DNA, 25 bp, Artificial
  Probe
gattctgtatcagtgtgtcctcctt

SEQ ID NO: 87852 - DNA, 25 bp, Artificial
  Probe
tgtatcagtgtgtcctccttcagtc

SEQ ID NO: 87853 - DNA, 25 bp, Artificial
  Probe
ttctgtatcagtgtgtcctccttca

SEQ ID NO: 87854 - DNA, 25 bp, Artificial
  Probe
tctgtatcagtgtgtcctccttcag

SEQ ID NO: 87855 - DNA, 25 bp, Artificial
  Probe
ctgtatcagtgtgtcctccttcagt

SEQ ID NO: 87856 - DNA, 25 bp, Artificial
  Probe
gtatcagtgtgtcctccttcagtcc

SEQ ID NO: 87857 - DNA, 25 bp, Artificial
  Probe
cttcaggtccagatgtgtttctagg

SEQ ID NO: 87858 - DNA, 25 bp, Artificial
  Probe
gtcgctcagagtcagagtcacatac

SEQ ID NO: 87859 - DNA, 25 bp, Artificial
  Probe
tgattctgtatcagtgtgtcctcct

SEQ ID NO: 87860 - DNA, 25 bp, Artificial
  Probe
agtggctgtcttcatacaaagtgag

SEQ ID NO: 87861 - DNA, 25 bp, Artificial
  Probe
gcttcaggtccagatgtgtttctag

SEQ ID NO: 87862 - DNA, 25 bp, Artificial
  Probe
cagtggctgtcttcatacaaagtga

SEQ ID NO: 87863 - DNA, 25 bp, Artificial
  Probe
tgcttcaggtccagatgtgtttcta

SEQ ID NO: 87864 - DNA, 25 bp, Artificial
  Probe
ttggcatcattgtcaccatcagttg

SEQ ID NO: 87865 - DNA, 25 bp, Artificial
  Probe
gttggcatcattgtcaccatcagtt

SEQ ID NO: 87866 - DNA, 25 bp, Artificial
  Probe
gtggctgtcttcatacaaagtgagg

SEQ ID NO: 87867 - DNA, 25 bp, Artificial
  Probe
agtcacatacccctgattctgtatc

SEQ ID NO: 87868 - DNA, 25 bp, Artificial
  Probe
gagtcacatacccctgattctgtat

SEQ ID NO: 87869 - DNA, 25 bp, Artificial
  Probe
atacaaagtgagggcgtctgactac

SEQ ID NO: 87870 - DNA, 25 bp, Artificial
  Probe
catacaaagtgagggcgtctgacta

SEQ ID NO: 87871 - DNA, 25 bp, Artificial
  Probe
ccagtggctgtcttcatacaaagtg

SEQ ID NO: 87872 - DNA, 25 bp, Artificial
  Probe
agagtcacatacccctgattctgta

SEQ ID NO: 87873 - DNA, 25 bp, Artificial
  Probe
ttcaggtccagatgtgtttctaggc

SEQ ID NO: 87874 - DNA, 25 bp, Artificial
  Probe
cttcatacaaagtgagggcgtctga

SEQ ID NO: 87875 - DNA, 25 bp, Artificial
  Probe
tcttcatacaaagtgagggcgtctg

SEQ ID NO: 87876 - DNA, 25 bp, Artificial
  Probe
gtcttcatacaaagtgagggcgtct

SEQ ID NO: 87877 - DNA, 25 bp, Artificial
  Probe
tggctgtcttcatacaaagtgaggg

SEQ ID NO: 87878 - DNA, 25 bp, Artificial
  Probe
tatcagtgtgtcctccttcagtccc

SEQ ID NO: 87879 - DNA, 25 bp, Artificial
  Probe
ttctccacccgaggactcatgtata

SEQ ID NO: 87880 - DNA, 25 bp, Artificial
  Probe
ttcatacaaagtgagggcgtctgac

SEQ ID NO: 87881 - DNA, 25 bp, Artificial
  Probe
gtcacatacccctgattctgtatca

SEQ ID NO: 87882 - DNA, 25 bp, Artificial
  Probe
tgtcttcatacaaagtgagggcgtc

SEQ ID NO: 87883 - DNA, 25 bp, Artificial
  Probe
ctgtcttcatacaaagtgagggcgt

SEQ ID NO: 87884 - DNA, 25 bp, Artificial
  Probe
ctgcttcaggtccagatgtgtttct

SEQ ID NO: 87885 - DNA, 25 bp, Artificial
  Probe
tacaaagtgagggcgtctgactact

SEQ ID NO: 87886 - DNA, 25 bp, Artificial
  Probe
cttctccacccgaggactcatgtat

SEQ ID NO: 87887 - DNA, 25 bp, Artificial
  Probe
ctcagagtcagagtcacatacccct

SEQ ID NO: 87888 - DNA, 25 bp, Artificial
  Probe
tctccacccgaggactcatgtatac

SEQ ID NO: 87889 - DNA, 25 bp, Artificial
  Probe
tcagagtcagagtcacatacccctg

SEQ ID NO: 87890 - DNA, 25 bp, Artificial
  Probe
gtcttttgactcaccgaccaaactc

SEQ ID NO: 87891 - DNA, 25 bp, Artificial
  Probe
tcagagtcacatacccctgattctg

SEQ ID NO: 87892 - DNA, 25 bp, Artificial
  Probe
gtcagagtcacatacccctgattct

SEQ ID NO: 87893 - DNA, 25 bp, Artificial
  Probe
agtcagagtcacatacccctgattc

SEQ ID NO: 87894 - DNA, 25 bp, Artificial
  Probe
gagtcagagtcacatacccctgatt

SEQ ID NO: 87895 - DNA, 25 bp, Artificial
  Probe
ccttagaatatctgccactgtctca

SEQ ID NO: 87896 - DNA, 25 bp, Artificial
  Probe
cttagaatatctgccactgtctcag

SEQ ID NO: 87897 - DNA, 25 bp, Artificial
  Probe
cacacacacactacacacacacata

SEQ ID NO: 87898 - DNA, 25 bp, Artificial
  Probe
cacactacacacacacataacacac

SEQ ID NO: 87899 - DNA, 25 bp, Artificial
  Probe
cacacactacacacacacataacac

SEQ ID NO: 87900 - DNA, 25 bp, Artificial
  Probe
cacacacactacacacacacataac

SEQ ID NO: 87901 - DNA, 25 bp, Artificial
  Probe
acacactacacacacacataacaca

SEQ ID NO: 87902 - DNA, 25 bp, Artificial
  Probe
acacacactacacacacacataaca

SEQ ID NO: 87903 - DNA, 25 bp, Artificial
  Probe
acacacacactacacacacacataa

SEQ ID NO: 87904 - DNA, 25 bp, Artificial
  Probe
ttagaatatctgccactgtctcagc

SEQ ID NO: 87905 - DNA, 25 bp, Artificial
  Probe
acctcctgtattccatttgtataga

SEQ ID NO: 87906 - DNA, 25 bp, Artificial
  Probe
ctacacacacacataacacaccaca

SEQ ID NO: 87907 - DNA, 25 bp, Artificial
  Probe
actacacacacacataacacaccac

SEQ ID NO: 87908 - DNA, 25 bp, Artificial
  Probe
cactacacacacacataacacacca

SEQ ID NO: 87909 - DNA, 25 bp, Artificial
  Probe
acactacacacacacataacacacc

SEQ ID NO: 87910 - DNA, 25 bp, Artificial
  Probe
tacacacacacataacacaccacac

SEQ ID NO: 87911 - DNA, 25 bp, Artificial
  Probe
gtcagagccaacccttagaatatct

SEQ ID NO: 87912 - DNA, 25 bp, Artificial
  Probe
agtacctcctgtattccatttgtat

SEQ ID NO: 87913 - DNA, 25 bp, Artificial
  Probe
ttaagaatagtggaactgcacagag

SEQ ID NO: 87914 - DNA, 25 bp, Artificial
  Probe
cacacacacacacacatacagacac

SEQ ID NO: 87915 - DNA, 25 bp, Artificial
  Probe
taagaatagtggaactgcacagaga

SEQ ID NO: 87916 - DNA, 25 bp, Artificial
  Probe
aacccttagaatatctgccactgtc

SEQ ID NO: 87917 - DNA, 25 bp, Artificial
  Probe
aaattctctgtccctttcacacttg

SEQ ID NO: 87918 - DNA, 25 bp, Artificial
  Probe
caaattctctgtccctttcacactt

SEQ ID NO: 87919 - DNA, 25 bp, Artificial
  Probe
ggacaaagtgctatttcagatgtgt

SEQ ID NO: 87920 - DNA, 25 bp, Artificial
  Probe
tggacaaagtgctatttcagatgtg

SEQ ID NO: 87921 - DNA, 25 bp, Artificial
  Probe
cctcctgtattccatttgtatagat

SEQ ID NO: 87922 - DNA, 25 bp, Artificial
  Probe
caaagtgctatttcagatgtgtcgg

SEQ ID NO: 87923 - DNA, 25 bp, Artificial
  Probe
cagtacctcctgtattccatttgta

SEQ ID NO: 87924 - DNA, 25 bp, Artificial
  Probe
ctggacaaagtgctatttcagatgt

SEQ ID NO: 87925 - DNA, 25 bp, Artificial
  Probe
cccttagaatatctgccactgtctc

SEQ ID NO: 87926 - DNA, 25 bp, Artificial
  Probe
ctcagtacctcctgtattccatttg

SEQ ID NO: 87927 - DNA, 25 bp, Artificial
  Probe
caacccttagaatatctgccactgt

SEQ ID NO: 87928 - DNA, 25 bp, Artificial
  Probe
cttaagaatagtggaactgcacaga

SEQ ID NO: 87929 - DNA, 25 bp, Artificial
  Probe
acaaagtgctatttcagatgtgtcg

SEQ ID NO: 87930 - DNA, 25 bp, Artificial
  Probe
tacctcctgtattccatttgtatag

SEQ ID NO: 87931 - DNA, 25 bp, Artificial
  Probe
tcagtacctcctgtattccatttgt

SEQ ID NO: 87932 - DNA, 25 bp, Artificial
  Probe
cgtcagagccaacccttagaatatc

SEQ ID NO: 87933 - DNA, 25 bp, Artificial
  Probe
cctcagtacctcctgtattccattt

SEQ ID NO: 87934 - DNA, 25 bp, Artificial
  Probe
gtacctcctgtattccatttgtata

SEQ ID NO: 87935 - DNA, 25 bp, Artificial
  Probe
cacaaattctctgtccctttcacac

SEQ ID NO: 87936 - DNA, 25 bp, Artificial
  Probe
acccttagaatatctgccactgtct

SEQ ID NO: 87937 - DNA, 25 bp, Artificial
  Probe
aattctctgtccctttcacacttgt

SEQ ID NO: 87938 - DNA, 25 bp, Artificial
  Probe
acaaattctctgtccctttcacact

SEQ ID NO: 87939 - DNA, 25 bp, Artificial
  Probe
ctttctggacaaagtgctatttcag

SEQ ID NO: 87940 - DNA, 25 bp, Artificial
  Probe
tacgacaaactaacgatacactcaa

SEQ ID NO: 87941 - DNA, 25 bp, Artificial
  Probe
atacgacaaactaacgatacactca

SEQ ID NO: 87942 - DNA, 25 bp, Artificial
  Probe
cgacaaactaacgatacactcaaat

SEQ ID NO: 87943 - DNA, 25 bp, Artificial
  Probe
acgacaaactaacgatacactcaaa

SEQ ID NO: 87944 - DNA, 25 bp, Artificial
  Probe
ttgcccaaacttccttagaataaag

SEQ ID NO: 87945 - DNA, 25 bp, Artificial
  Probe
cccaaacttccttagaataaagcat

SEQ ID NO: 87946 - DNA, 25 bp, Artificial
  Probe
gttgcccaaacttccttagaataaa

SEQ ID NO: 87947 - DNA, 25 bp, Artificial
  Probe
tagtgttggttcaccttggtactaa

SEQ ID NO: 87948 - DNA, 25 bp, Artificial
  Probe
tttgattgttggtgccataaatgtc

SEQ ID NO: 87949 - DNA, 25 bp, Artificial
  Probe
tatacgacaaactaacgatacactc

SEQ ID NO: 87950 - DNA, 25 bp, Artificial
  Probe
tttatttagcacaactccaggcatc

SEQ ID NO: 87951 - DNA, 25 bp, Artificial
  Probe
gattgttggtgccataaatgtccta

SEQ ID NO: 87952 - DNA, 25 bp, Artificial
  Probe
gcccaaacttccttagaataaagca

SEQ ID NO: 87953 - DNA, 25 bp, Artificial
  Probe
tgcccaaacttccttagaataaagc

SEQ ID NO: 87954 - DNA, 25 bp, Artificial
  Probe
attgttggtgccataaatgtcctag

SEQ ID NO: 87955 - DNA, 25 bp, Artificial
  Probe
tactaaactgaatcgtgtccctctg

SEQ ID NO: 87956 - DNA, 25 bp, Artificial
  Probe
gtagtgttggttcaccttggtacta

SEQ ID NO: 87957 - DNA, 25 bp, Artificial
  Probe
actgagttgagtagtgttggttcac

SEQ ID NO: 87958 - DNA, 25 bp, Artificial
  Probe
acacaagagagcctgttcaattaaa

SEQ ID NO: 87959 - DNA, 25 bp, Artificial
  Probe
gagttgagtagtgttggttcacctt

SEQ ID NO: 87960 - DNA, 25 bp, Artificial
  Probe
ttatacgacaaactaacgatacact

SEQ ID NO: 87961 - DNA, 25 bp, Artificial
  Probe
ttagctctgagaactacttgataag

SEQ ID NO: 87962 - DNA, 25 bp, Artificial
  Probe
cttggtactaaactgaatcgtgtcc

SEQ ID NO: 87963 - DNA, 25 bp, Artificial
  Probe
ccttggtactaaactgaatcgtgtc

SEQ ID NO: 87964 - DNA, 25 bp, Artificial
  Probe
tctgagaactacttgataagtctgc

SEQ ID NO: 87965 - DNA, 25 bp, Artificial
  Probe
cttatacgacaaactaacgatacac

SEQ ID NO: 87966 - DNA, 25 bp, Artificial
  Probe
tatttagcacaactccaggcatctt

SEQ ID NO: 87967 - DNA, 25 bp, Artificial
  Probe
ttatttagcacaactccaggcatct

SEQ ID NO: 87968 - DNA, 25 bp, Artificial
  Probe
gctctgagaactacttgataagtct

SEQ ID NO: 87969 - DNA, 25 bp, Artificial
  Probe
gagaactacttgataagtctgccag

SEQ ID NO: 87970 - DNA, 25 bp, Artificial
  Probe
ctgagaactacttgataagtctgcc

SEQ ID NO: 87971 - DNA, 25 bp, Artificial
  Probe
tcttatacgacaaactaacgataca

SEQ ID NO: 87972 - DNA, 25 bp, Artificial
  Probe
agttgagtagtgttggttcaccttg

SEQ ID NO: 87973 - DNA, 25 bp, Artificial
  Probe
ccaaacttccttagaataaagcatt

SEQ ID NO: 87974 - DNA, 25 bp, Artificial
  Probe
gtactaaactgaatcgtgtccctct

SEQ ID NO: 87975 - DNA, 25 bp, Artificial
  Probe
tgagaactacttgataagtctgcca

SEQ ID NO: 87976 - DNA, 25 bp, Artificial
  Probe
accttggtactaaactgaatcgtgt

SEQ ID NO: 87977 - DNA, 25 bp, Artificial
  Probe
ttgattgttggtgccataaatgtcc

SEQ ID NO: 87978 - DNA, 25 bp, Artificial
  Probe
gttggttcaccttggtactaaactg

SEQ ID NO: 87979 - DNA, 25 bp, Artificial
  Probe
aactacttgataagtctgccaggaa

SEQ ID NO: 87980 - DNA, 25 bp, Artificial
  Probe
acacagtgctatgaatacagtactt

SEQ ID NO: 87981 - DNA, 25 bp, Artificial
  Probe
tcaccttggtactaaactgaatcgt

SEQ ID NO: 87982 - DNA, 25 bp, Artificial
  Probe
gaggtaactggatcatatgctggag

SEQ ID NO: 87983 - DNA, 25 bp, Artificial
  Probe
ttggttcaccttggtactaaactga

SEQ ID NO: 87984 - DNA, 25 bp, Artificial
  Probe
aacgatacactcaaataaacagaaa

SEQ ID NO: 87985 - DNA, 25 bp, Artificial
  Probe
gttctctcttccattgacttcagta

SEQ ID NO: 87986 - DNA, 25 bp, Artificial
  Probe
ttctctcttccattgacttcagtat

SEQ ID NO: 87987 - DNA, 25 bp, Artificial
  Probe
tctctcttccattgacttcagtatg

SEQ ID NO: 87988 - DNA, 25 bp, Artificial
  Probe
atgttctctcttccattgacttcag

SEQ ID NO: 87989 - DNA, 25 bp, Artificial
  Probe
ctctcttccattgacttcagtatga

SEQ ID NO: 87990 - DNA, 25 bp, Artificial
  Probe
tctcttccattgacttcagtatgag

SEQ ID NO: 87991 - DNA, 25 bp, Artificial
  Probe
tgttctctcttccattgacttcagt

SEQ ID NO: 87992 - DNA, 25 bp, Artificial
  Probe
ctcttccattgacttcagtatgagg

SEQ ID NO: 87993 - DNA, 25 bp, Artificial
  Probe
attaatgcgttcaatgctctctctt

SEQ ID NO: 87994 - DNA, 25 bp, Artificial
  Probe
aagaacacagagaagaactgaagtt

SEQ ID NO: 87995 - DNA, 25 bp, Artificial
  Probe
cttccattgacttcagtatgaggag

SEQ ID NO: 87996 - DNA, 25 bp, Artificial
  Probe
tcttccattgacttcagtatgagga

SEQ ID NO: 87997 - DNA, 25 bp, Artificial
  Probe
aatgttctctcttccattgacttca

SEQ ID NO: 87998 - DNA, 25 bp, Artificial
  Probe
ttaatgcgttcaatgctctctcttt

SEQ ID NO: 87999 - DNA, 25 bp, Artificial
  Probe
taatgcgttcaatgctctctctttc

SEQ ID NO: 88000 - DNA, 25 bp, Artificial
  Probe
ttccattgacttcagtatgaggagc

SEQ ID NO: 88001 - DNA, 25 bp, Artificial
  Probe
aaagaacacagagaagaactgaagt

SEQ ID NO: 88002 - DNA, 25 bp, Artificial
  Probe
atgataaagaacacagagaagaact

SEQ ID NO: 88003 - DNA, 25 bp, Artificial
  Probe
tgatgataaagaacacagagaagaa

SEQ ID NO: 88004 - DNA, 25 bp, Artificial
  Probe
gatgataaagaacacagagaagaac

SEQ ID NO: 88005 - DNA, 25 bp, Artificial
  Probe
gtcacacaaatgttctctcttccat

SEQ ID NO: 88006 - DNA, 25 bp, Artificial
  Probe
acagtcacacaaatgttctctcttc

SEQ ID NO: 88007 - DNA, 25 bp, Artificial
  Probe
gacagtcacacaaatgttctctctt

SEQ ID NO: 88008 - DNA, 25 bp, Artificial
  Probe
atgatgataaagaacacagagaaga

SEQ ID NO: 88009 - DNA, 25 bp, Artificial
  Probe
agaatgatgataaagaacacagaga

SEQ ID NO: 88010 - DNA, 25 bp, Artificial
  Probe
acagcaaatgtactatacttgggtt

SEQ ID NO: 88011 - DNA, 25 bp, Artificial
  Probe
tgataaagaacacagagaagaactg

SEQ ID NO: 88012 - DNA, 25 bp, Artificial
  Probe
taaagaacacagagaagaactgaag

SEQ ID NO: 88013 - DNA, 25 bp, Artificial
  Probe
cagcaaatgtactatacttgggtta

SEQ ID NO: 88014 - DNA, 25 bp, Artificial
  Probe
ttcaatgctctctctttctctgctc

SEQ ID NO: 88015 - DNA, 25 bp, Artificial
  Probe
gataaagaacacagagaagaactga

SEQ ID NO: 88016 - DNA, 25 bp, Artificial
  Probe
cagtcacacaaatgttctctcttcc

SEQ ID NO: 88017 - DNA, 25 bp, Artificial
  Probe
agtcacacaaatgttctctcttcca

SEQ ID NO: 88018 - DNA, 25 bp, Artificial
  Probe
ataaagaacacagagaagaactgaa

SEQ ID NO: 88019 - DNA, 25 bp, Artificial
  Probe
gttcaatgctctctctttctctgct

SEQ ID NO: 88020 - DNA, 25 bp, Artificial
  Probe
gtttctgatttaatattggacaccc

SEQ ID NO: 88021 - DNA, 25 bp, Artificial
  Probe
aatgatgataaagaacacagagaag

SEQ ID NO: 88022 - DNA, 25 bp, Artificial
  Probe
gaatgatgataaagaacacagagaa

SEQ ID NO: 88023 - DNA, 25 bp, Artificial
  Probe
acaaatgttctctcttccattgact

SEQ ID NO: 88024 - DNA, 25 bp, Artificial
  Probe
cacaaatgttctctcttccattgac

SEQ ID NO: 88025 - DNA, 25 bp, Artificial
  Probe
aatgcgttcaatgctctctctttct

SEQ ID NO: 88026 - DNA, 25 bp, Artificial
  Probe
caaatgttctctcttccattgactt

SEQ ID NO: 88027 - DNA, 25 bp, Artificial
  Probe
agcaaatgtactatacttgggttat

SEQ ID NO: 88028 - DNA, 25 bp, Artificial
  Probe
acacaaatgttctctcttccattga

SEQ ID NO: 88029 - DNA, 25 bp, Artificial
  Probe
cacacaaatgttctctcttccattg

SEQ ID NO: 88030 - DNA, 25 bp, Artificial
  Probe
aattgccaatacctcctatgttgtg

SEQ ID NO: 88031 - DNA, 25 bp, Artificial
  Probe
gattatcgcaagatagcacactgaa

SEQ ID NO: 88032 - DNA, 25 bp, Artificial
  Probe
attatcgcaagatagcacactgaac

SEQ ID NO: 88033 - DNA, 25 bp, Artificial
  Probe
caccagttccagcttctattacatt

SEQ ID NO: 88034 - DNA, 25 bp, Artificial
  Probe
acatggaacacataccttcgatatt

SEQ ID NO: 88035 - DNA, 25 bp, Artificial
  Probe
aacatggaacacataccttcgatat

SEQ ID NO: 88036 - DNA, 25 bp, Artificial
  Probe
catcaccagttccagcttctattac

SEQ ID NO: 88037 - DNA, 25 bp, Artificial
  Probe
tcatcaccagttccagcttctatta

SEQ ID NO: 88038 - DNA, 25 bp, Artificial
  Probe
caatacctcctatgttgtggtcatc

SEQ ID NO: 88039 - DNA, 25 bp, Artificial
  Probe
tcaccagttccagcttctattacat

SEQ ID NO: 88040 - DNA, 25 bp, Artificial
  Probe
atcaccagttccagcttctattaca

SEQ ID NO: 88041 - DNA, 25 bp, Artificial
  Probe
caacatggaacacataccttcgata

SEQ ID NO: 88042 - DNA, 25 bp, Artificial
  Probe
ttctttatttgtgttgtggttgctt

SEQ ID NO: 88043 - DNA, 25 bp, Artificial
  Probe
tctttatttgtgttgtggttgctta

SEQ ID NO: 88044 - DNA, 25 bp, Artificial
  Probe
aatacctcctatgttgtggtcatca

SEQ ID NO: 88045 - DNA, 25 bp, Artificial
  Probe
cttctttatttgtgttgtggttgct

SEQ ID NO: 88046 - DNA, 25 bp, Artificial
  Probe
ctgcttctttatttgtgttgtggtt

SEQ ID NO: 88047 - DNA, 25 bp, Artificial
  Probe
tgcttctttatttgtgttgtggttg

SEQ ID NO: 88048 - DNA, 25 bp, Artificial
  Probe
ctttatttgtgttgtggttgcttaa

SEQ ID NO: 88049 - DNA, 25 bp, Artificial
  Probe
tatcgcaagatagcacactgaacat

SEQ ID NO: 88050 - DNA, 25 bp, Artificial
  Probe
gatgactttctgcctcttaccattt

SEQ ID NO: 88051 - DNA, 25 bp, Artificial
  Probe
ttatcgcaagatagcacactgaaca

SEQ ID NO: 88052 - DNA, 25 bp, Artificial
  Probe
ggaagaggatatatattcaaggcga

SEQ ID NO: 88053 - DNA, 25 bp, Artificial
  Probe
aggaagaggatatatattcaaggcg

SEQ ID NO: 88054 - DNA, 25 bp, Artificial
  Probe
atacctcctatgttgtggtcatcac

SEQ ID NO: 88055 - DNA, 25 bp, Artificial
  Probe
cactgaacatcaccgaagaaattaa

SEQ ID NO: 88056 - DNA, 25 bp, Artificial
  Probe
acactgaacatcaccgaagaaatta

SEQ ID NO: 88057 - DNA, 25 bp, Artificial
  Probe
ccaatacctcctatgttgtggtcat

SEQ ID NO: 88058 - DNA, 25 bp, Artificial
  Probe
aaattgccaatacctcctatgttgt

SEQ ID NO: 88059 - DNA, 25 bp, Artificial
  Probe
tttatttgtgttgtggttgcttaaa

SEQ ID NO: 88060 - DNA, 25 bp, Artificial
  Probe
gtgacaacatggaacacataccttc

SEQ ID NO: 88061 - DNA, 25 bp, Artificial
  Probe
gcttctttatttgtgttgtggttgc

SEQ ID NO: 88062 - DNA, 25 bp, Artificial
  Probe
atcgcaagatagcacactgaacatc

SEQ ID NO: 88063 - DNA, 25 bp, Artificial
  Probe
gtcatcaccagttccagcttctatt

SEQ ID NO: 88064 - DNA, 25 bp, Artificial
  Probe
atgttacattctattcttcatgccc

SEQ ID NO: 88065 - DNA, 25 bp, Artificial
  Probe
aacagattctccaaagatatagcaa

SEQ ID NO: 88066 - DNA, 25 bp, Artificial
  Probe
acaacatggaacacataccttcgat

SEQ ID NO: 88067 - DNA, 25 bp, Artificial
  Probe
accagttccagcttctattacattt

SEQ ID NO: 88068 - DNA, 25 bp, Artificial
  Probe
acagattctccaaagatatagcaat

SEQ ID NO: 88069 - DNA, 25 bp, Artificial
  Probe
gggattcttaacagattctccaaag

SEQ ID NO: 88070 - DNA, 25 bp, Artificial
  Probe
taatggtggaaacaatggcactaaa

SEQ ID NO: 88071 - DNA, 25 bp, Artificial
  Probe
ttaatggtggaaacaatggcactaa

SEQ ID NO: 88072 - DNA, 25 bp, Artificial
  Probe
gaagaggatatatattcaaggcgat

SEQ ID NO: 88073 - DNA, 25 bp, Artificial
  Probe
tgacaacatggaacacataccttcg

SEQ ID NO: 88074 - DNA, 25 bp, Artificial
  Probe
cacactgaacatcaccgaagaaatt

SEQ ID NO: 88075 - DNA, 25 bp, Artificial
  Probe
ggagcgtaaagtaaacaagaagaaa

SEQ ID NO: 88076 - DNA, 25 bp, Artificial
  Probe
cccaacattattccatacacacaaa

SEQ ID NO: 88077 - DNA, 25 bp, Artificial
  Probe
aaacccaacattattccatacacac

SEQ ID NO: 88078 - DNA, 25 bp, Artificial
  Probe
caccaactaaacccaacattattcc

SEQ ID NO: 88079 - DNA, 25 bp, Artificial
  Probe
aggagcgtaaagtaaacaagaagaa

SEQ ID NO: 88080 - DNA, 25 bp, Artificial
  Probe
aaggagcgtaaagtaaacaagaaga

SEQ ID NO: 88081 - DNA, 25 bp, Artificial
  Probe
caaggagcgtaaagtaaacaagaag

SEQ ID NO: 88082 - DNA, 25 bp, Artificial
  Probe
ccaactaaacccaacattattccat

SEQ ID NO: 88083 - DNA, 25 bp, Artificial
  Probe
accaactaaacccaacattattcca

SEQ ID NO: 88084 - DNA, 25 bp, Artificial
  Probe
agcgtaaagtaaacaagaagaaaca

SEQ ID NO: 88085 - DNA, 25 bp, Artificial
  Probe
acccaacattattccatacacacaa

SEQ ID NO: 88086 - DNA, 25 bp, Artificial
  Probe
aacccaacattattccatacacaca

SEQ ID NO: 88087 - DNA, 25 bp, Artificial
  Probe
aaagtaaacaagaagaaacagcagc

SEQ ID NO: 88088 - DNA, 25 bp, Artificial
  Probe
cgtaaagtaaacaagaagaaacagc

SEQ ID NO: 88089 - DNA, 25 bp, Artificial
  Probe
gcgtaaagtaaacaagaagaaacag

SEQ ID NO: 88090 - DNA, 25 bp, Artificial
  Probe
gagcgtaaagtaaacaagaagaaac

SEQ ID NO: 88091 - DNA, 25 bp, Artificial
  Probe
ccaacattattccatacacacaaac

SEQ ID NO: 88092 - DNA, 25 bp, Artificial
  Probe
ttattccatacacacaaacagacat

SEQ ID NO: 88093 - DNA, 25 bp, Artificial
  Probe
attattccatacacacaaacagaca

SEQ ID NO: 88094 - DNA, 25 bp, Artificial
  Probe
acattattccatacacacaaacaga

SEQ ID NO: 88095 - DNA, 25 bp, Artificial
  Probe
ccaaggagcgtaaagtaaacaagaa

SEQ ID NO: 88096 - DNA, 25 bp, Artificial
  Probe
cattattccatacacacaaacagac

SEQ ID NO: 88097 - DNA, 25 bp, Artificial
  Probe
attccatacacacaaacagacatat

SEQ ID NO: 88098 - DNA, 25 bp, Artificial
  Probe
aagtaaacaagaagaaacagcagca

SEQ ID NO: 88099 - DNA, 25 bp, Artificial
  Probe
taaacccaacattattccatacaca

SEQ ID NO: 88100 - DNA, 25 bp, Artificial
  Probe
caacattattccatacacacaaaca

SEQ ID NO: 88101 - DNA, 25 bp, Artificial
  Probe
gtaaagtaaacaagaagaaacagca

SEQ ID NO: 88102 - DNA, 25 bp, Artificial
  Probe
agtaaacaagaagaaacagcagcag

SEQ ID NO: 88103 - DNA, 25 bp, Artificial
  Probe
aacattattccatacacacaaacag

SEQ ID NO: 88104 - DNA, 25 bp, Artificial
  Probe
actaaacccaacattattccataca

SEQ ID NO: 88105 - DNA, 25 bp, Artificial
  Probe
taaagtaaacaagaagaaacagcag

SEQ ID NO: 88106 - DNA, 25 bp, Artificial
  Probe
tattccatacacacaaacagacata

SEQ ID NO: 88107 - DNA, 25 bp, Artificial
  Probe
ctaaacccaacattattccatacac

SEQ ID NO: 88108 - DNA, 25 bp, Artificial
  Probe
caatgctattcaaaccctgtggatg

SEQ ID NO: 88109 - DNA, 25 bp, Artificial
  Probe
tcaatgctattcaaaccctgtggat

SEQ ID NO: 88110 - DNA, 25 bp, Artificial
  Probe
atcaatgctattcaaaccctgtgga

SEQ ID NO: 88111 - DNA, 25 bp, Artificial
  Probe
gatcaatgctattcaaaccctgtgg

SEQ ID NO: 88112 - DNA, 25 bp, Artificial
  Probe
aactaaacccaacattattccatac

SEQ ID NO: 88113 - DNA, 25 bp, Artificial
  Probe
caactaaacccaacattattccata

SEQ ID NO: 88114 - DNA, 25 bp, Artificial
  Probe
gtaaacaagaagaaacagcagcagc

SEQ ID NO: 88115 - DNA, 25 bp, Artificial
  Probe
aatgctattcaaaccctgtggatgg

SEQ ID NO: 88116 - DNA, 25 bp, Artificial
  Probe
gccaaggagcgtaaagtaaacaaga

SEQ ID NO: 88117 - DNA, 25 bp, Artificial
  Probe
cttgtaggagtgttcagagaagggt

SEQ ID NO: 88118 - DNA, 25 bp, Artificial
  Probe
taaacaagaagaaacagcagcagca

SEQ ID NO: 88119 - DNA, 25 bp, Artificial
  Probe
ttgtaggagtgttcagagaagggtg

SEQ ID NO: 88120 - DNA, 25 bp, Artificial
  Probe
ttccttcctatcttctatgtcacct

SEQ ID NO: 88121 - DNA, 25 bp, Artificial
  Probe
tccttcctatcttctatgtcacctc

SEQ ID NO: 88122 - DNA, 25 bp, Artificial
  Probe
ttcctatcttctatgtcacctccag

SEQ ID NO: 88123 - DNA, 25 bp, Artificial
  Probe
cttcctatcttctatgtcacctcca

SEQ ID NO: 88124 - DNA, 25 bp, Artificial
  Probe
ccttcctatcttctatgtcacctcc

SEQ ID NO: 88125 - DNA, 25 bp, Artificial
  Probe
tcctatcttctatgtcacctccagt

SEQ ID NO: 88126 - DNA, 25 bp, Artificial
  Probe
ttgctattgtatgaccttcgtcttc

SEQ ID NO: 88127 - DNA, 25 bp, Artificial
  Probe
tgctattgtatgaccttcgtcttca

SEQ ID NO: 88128 - DNA, 25 bp, Artificial
  Probe
gctttccttcctatcttctatgtca

SEQ ID NO: 88129 - DNA, 25 bp, Artificial
  Probe
tcttcctttgctattgtatgacctt

SEQ ID NO: 88130 - DNA, 25 bp, Artificial
  Probe
cctatcttctatgtcacctccagtg

SEQ ID NO: 88131 - DNA, 25 bp, Artificial
  Probe
cttcctttgctattgtatgaccttc

SEQ ID NO: 88132 - DNA, 25 bp, Artificial
  Probe
tttccttcctatcttctatgtcacc

SEQ ID NO: 88133 - DNA, 25 bp, Artificial
  Probe
ggctttccttcctatcttctatgtc

SEQ ID NO: 88134 - DNA, 25 bp, Artificial
  Probe
ctggctttccttcctatcttctatg

SEQ ID NO: 88135 - DNA, 25 bp, Artificial
  Probe
ggtgtcttcctttgctattgtatga

SEQ ID NO: 88136 - DNA, 25 bp, Artificial
  Probe
tggctttccttcctatcttctatgt

SEQ ID NO: 88137 - DNA, 25 bp, Artificial
  Probe
ttcctttgctattgtatgaccttcg

SEQ ID NO: 88138 - DNA, 25 bp, Artificial
  Probe
cagtagtttgtcccgtggtttattt

SEQ ID NO: 88139 - DNA, 25 bp, Artificial
  Probe
ctttccttcctatcttctatgtcac

SEQ ID NO: 88140 - DNA, 25 bp, Artificial
  Probe
gctggctttccttcctatcttctat

SEQ ID NO: 88141 - DNA, 25 bp, Artificial
  Probe
tatgaccttcgtcttcattgctaag

SEQ ID NO: 88142 - DNA, 25 bp, Artificial
  Probe
gctattgtatgaccttcgtcttcat

SEQ ID NO: 88143 - DNA, 25 bp, Artificial
  Probe
tcctttgctattgtatgaccttcgt

SEQ ID NO: 88144 - DNA, 25 bp, Artificial
  Probe
cggtgtcttcctttgctattgtatg

SEQ ID NO: 88145 - DNA, 25 bp, Artificial
  Probe
gtatgaccttcgtcttcattgctaa

SEQ ID NO: 88146 - DNA, 25 bp, Artificial
  Probe
gtgtcttcctttgctattgtatgac

SEQ ID NO: 88147 - DNA, 25 bp, Artificial
  Probe
tattgtatgaccttcgtcttcattg

SEQ ID NO: 88148 - DNA, 25 bp, Artificial
  Probe
tttgctattgtatgaccttcgtctt

SEQ ID NO: 88149 - DNA, 25 bp, Artificial
  Probe
gtcttcctttgctattgtatgacct

SEQ ID NO: 88150 - DNA, 25 bp, Artificial
  Probe
tgtcttcctttgctattgtatgacc

SEQ ID NO: 88151 - DNA, 25 bp, Artificial
  Probe
ctttgctattgtatgaccttcgtct

SEQ ID NO: 88152 - DNA, 25 bp, Artificial
  Probe
ctattgtatgaccttcgtcttcatt

SEQ ID NO: 88153 - DNA, 25 bp, Artificial
  Probe
ctgggatagagaggatggttactgt

SEQ ID NO: 88154 - DNA, 25 bp, Artificial
  Probe
ttaggtcagaagccagagtccttag

SEQ ID NO: 88155 - DNA, 25 bp, Artificial
  Probe
attgtatgaccttcgtcttcattgc

SEQ ID NO: 88156 - DNA, 25 bp, Artificial
  Probe
tctgggatagagaggatggttactg

SEQ ID NO: 88157 - DNA, 25 bp, Artificial
  Probe
tgtatgaccttcgtcttcattgcta

SEQ ID NO: 88158 - DNA, 25 bp, Artificial
  Probe
cctttgctattgtatgaccttcgtc

SEQ ID NO: 88159 - DNA, 25 bp, Artificial
  Probe
tgggatagagaggatggttactgtg

SEQ ID NO: 88160 - DNA, 25 bp, Artificial
  Probe
ttgtatgaccttcgtcttcattgct

SEQ ID NO: 88161 - DNA, 25 bp, Artificial
  Probe
cttcgtcttcattgctaagccttcc

SEQ ID NO: 88162 - DNA, 25 bp, Artificial
  Probe
ccttcgtcttcattgctaagccttc

SEQ ID NO: 88163 - DNA, 25 bp, Artificial
  Probe
gcggtgtcttcctttgctattgtat

SEQ ID NO: 88164 - DNA, 25 bp, Artificial
  Probe
gtttgtcccgtggtttattttgtat

SEQ ID NO: 88165 - DNA, 25 bp, Artificial
  Probe
cacctcatctctgtgattgtgatac

SEQ ID NO: 88166 - DNA, 25 bp, Artificial
  Probe
gattgtgatacgcagttcagttctc

SEQ ID NO: 88167 - DNA, 25 bp, Artificial
  Probe
acctcatctctgtgattgtgatacg

SEQ ID NO: 88168 - DNA, 25 bp, Artificial
  Probe
gtgattgtgatacgcagttcagttc

SEQ ID NO: 88169 - DNA, 25 bp, Artificial
  Probe
ccacctcatctctgtgattgtgata

SEQ ID NO: 88170 - DNA, 25 bp, Artificial
  Probe
ttgtgatacgcagttcagttctcat

SEQ ID NO: 88171 - DNA, 25 bp, Artificial
  Probe
attgtgatacgcagttcagttctca

SEQ ID NO: 88172 - DNA, 25 bp, Artificial
  Probe
tgattgtgatacgcagttcagttct

SEQ ID NO: 88173 - DNA, 25 bp, Artificial
  Probe
atctctgtgattgtgatacgcagtt

SEQ ID NO: 88174 - DNA, 25 bp, Artificial
  Probe
ctcatctctgtgattgtgatacgca

SEQ ID NO: 88175 - DNA, 25 bp, Artificial
  Probe
gtgctacaactttctaggctgattt

SEQ ID NO: 88176 - DNA, 25 bp, Artificial
  Probe
tgtgattgtgatacgcagttcagtt

SEQ ID NO: 88177 - DNA, 25 bp, Artificial
  Probe
tgatacgcagttcagttctcatgtt

SEQ ID NO: 88178 - DNA, 25 bp, Artificial
  Probe
tcatctctgtgattgtgatacgcag

SEQ ID NO: 88179 - DNA, 25 bp, Artificial
  Probe
tctctgtgattgtgatacgcagttc

SEQ ID NO: 88180 - DNA, 25 bp, Artificial
  Probe
catctctgtgattgtgatacgcagt

SEQ ID NO: 88181 - DNA, 25 bp, Artificial
  Probe
cctcatctctgtgattgtgatacgc

SEQ ID NO: 88182 - DNA, 25 bp, Artificial
  Probe
ttgtaggttcttgttgtaactaatt

SEQ ID NO: 88183 - DNA, 25 bp, Artificial
  Probe
tcttgttgtaactaatttagggtga

SEQ ID NO: 88184 - DNA, 25 bp, Artificial
  Probe
gatacgcagttcagttctcatgttt

SEQ ID NO: 88185 - DNA, 25 bp, Artificial
  Probe
tctgtgattgtgatacgcagttcag

SEQ ID NO: 88186 - DNA, 25 bp, Artificial
  Probe
ctctgtgattgtgatacgcagttca

SEQ ID NO: 88187 - DNA, 25 bp, Artificial
  Probe
ttgttgtaactaatttagggtgagt

SEQ ID NO: 88188 - DNA, 25 bp, Artificial
  Probe
cttgttgtaactaatttagggtgag

SEQ ID NO: 88189 - DNA, 25 bp, Artificial
  Probe
ggttcttgttgtaactaatttaggg

SEQ ID NO: 88190 - DNA, 25 bp, Artificial
  Probe
tggaaataaccattgtttacagagc

SEQ ID NO: 88191 - DNA, 25 bp, Artificial
  Probe
gtgatacgcagttcagttctcatgt

SEQ ID NO: 88192 - DNA, 25 bp, Artificial
  Probe
tgtgatacgcagttcagttctcatg

SEQ ID NO: 88193 - DNA, 25 bp, Artificial
  Probe
ggaaataaccattgtttacagagct

SEQ ID NO: 88194 - DNA, 25 bp, Artificial
  Probe
aataaccattgtttacagagctgag

SEQ ID NO: 88195 - DNA, 25 bp, Artificial
  Probe
ctgtgattgtgatacgcagttcagt

SEQ ID NO: 88196 - DNA, 25 bp, Artificial
  Probe
aatttagggtgagtttctacgttgt

SEQ ID NO: 88197 - DNA, 25 bp, Artificial
  Probe
tttagggtgagtttctacgttgtat

SEQ ID NO: 88198 - DNA, 25 bp, Artificial
  Probe
atttagggtgagtttctacgttgta

SEQ ID NO: 88199 - DNA, 25 bp, Artificial
  Probe
agggtgagtttctacgttgtatatt

SEQ ID NO: 88200 - DNA, 25 bp, Artificial
  Probe
aaataaccattgtttacagagctga

SEQ ID NO: 88201 - DNA, 25 bp, Artificial
  Probe
atgtgctacaactttctaggctgat

SEQ ID NO: 88202 - DNA, 25 bp, Artificial
  Probe
ataaccattgtttacagagctgagc

SEQ ID NO: 88203 - DNA, 25 bp, Artificial
  Probe
gaaataaccattgtttacagagctg

SEQ ID NO: 88204 - DNA, 25 bp, Artificial
  Probe
ttagggtgagtttctacgttgtata

SEQ ID NO: 88205 - DNA, 25 bp, Artificial
  Probe
ttcttgttgtaactaatttagggtg

SEQ ID NO: 88206 - DNA, 25 bp, Artificial
  Probe
tttaggctgttagacaaagtgctca

SEQ ID NO: 88207 - DNA, 25 bp, Artificial
  Probe
accacctcatctctgtgattgtgat

SEQ ID NO: 88208 - DNA, 25 bp, Artificial
  Probe
taatttagggtgagtttctacgttg

SEQ ID NO: 88209 - DNA, 25 bp, Artificial
  Probe
tagggtgagtttctacgttgtatat

SEQ ID NO: 88210 - DNA, 25 bp, Artificial
  Probe
gactgatggacagatagagagattc

SEQ ID NO: 88211 - DNA, 25 bp, Artificial
  Probe
ggactgatggacagatagagagatt

SEQ ID NO: 88212 - DNA, 25 bp, Artificial
  Probe
actgatggacagatagagagattcg

SEQ ID NO: 88213 - DNA, 25 bp, Artificial
  Probe
ctaagtgtgtctgagtttgtaaagc

SEQ ID NO: 88214 - DNA, 25 bp, Artificial
  Probe
aacctgactttatcctctgaatagc

SEQ ID NO: 88215 - DNA, 25 bp, Artificial
  Probe
atgaacctgactttatcctctgaat

SEQ ID NO: 88216 - DNA, 25 bp, Artificial
  Probe
tgaacctgactttatcctctgaata

SEQ ID NO: 88217 - DNA, 25 bp, Artificial
  Probe
gaacctgactttatcctctgaatag

SEQ ID NO: 88218 - DNA, 25 bp, Artificial
  Probe
ctgatggacagatagagagattcga

SEQ ID NO: 88219 - DNA, 25 bp, Artificial
  Probe
gtccctgataaccattgcctttaag

SEQ ID NO: 88220 - DNA, 25 bp, Artificial
  Probe
actaagtgtgtctgagtttgtaaag

SEQ ID NO: 88221 - DNA, 25 bp, Artificial
  Probe
catgaacctgactttatcctctgaa

SEQ ID NO: 88222 - DNA, 25 bp, Artificial
  Probe
ctaccatgaacctgactttatcctc

SEQ ID NO: 88223 - DNA, 25 bp, Artificial
  Probe
taccatgaacctgactttatcctct

SEQ ID NO: 88224 - DNA, 25 bp, Artificial
  Probe
agtccctgataaccattgcctttaa

SEQ ID NO: 88225 - DNA, 25 bp, Artificial
  Probe
actaccatgaacctgactttatcct

SEQ ID NO: 88226 - DNA, 25 bp, Artificial
  Probe
cactaccatgaacctgactttatcc

SEQ ID NO: 88227 - DNA, 25 bp, Artificial
  Probe
aagttacttgccacagactgtaaga

SEQ ID NO: 88228 - DNA, 25 bp, Artificial
  Probe
gcactaccatgaacctgactttatc

SEQ ID NO: 88229 - DNA, 25 bp, Artificial
  Probe
ttacttgccacagactgtaagacaa

SEQ ID NO: 88230 - DNA, 25 bp, Artificial
  Probe
taagtgtgtctgagtttgtaaagct

SEQ ID NO: 88231 - DNA, 25 bp, Artificial
  Probe
ctgactttatcctctgaatagctgg

SEQ ID NO: 88232 - DNA, 25 bp, Artificial
  Probe
cctgactttatcctctgaatagctg

SEQ ID NO: 88233 - DNA, 25 bp, Artificial
  Probe
ccatgaacctgactttatcctctga

SEQ ID NO: 88234 - DNA, 25 bp, Artificial
  Probe
agcactaccatgaacctgactttat

SEQ ID NO: 88235 - DNA, 25 bp, Artificial
  Probe
acctgactttatcctctgaatagct

SEQ ID NO: 88236 - DNA, 25 bp, Artificial
  Probe
agttacttgccacagactgtaagac

SEQ ID NO: 88237 - DNA, 25 bp, Artificial
  Probe
attctccttccaagcactaccatga

SEQ ID NO: 88238 - DNA, 25 bp, Artificial
  Probe
accatgaacctgactttatcctctg

SEQ ID NO: 88239 - DNA, 25 bp, Artificial
  Probe
aagcactaccatgaacctgacttta

SEQ ID NO: 88240 - DNA, 25 bp, Artificial
  Probe
gttacttgccacagactgtaagaca

SEQ ID NO: 88241 - DNA, 25 bp, Artificial
  Probe
ttctccttccaagcactaccatgaa

SEQ ID NO: 88242 - DNA, 25 bp, Artificial
  Probe
gggactgatggacagatagagagat

SEQ ID NO: 88243 - DNA, 25 bp, Artificial
  Probe
cagtccctgataaccattgccttta

SEQ ID NO: 88244 - DNA, 25 bp, Artificial
  Probe
aaagttacttgccacagactgtaag

SEQ ID NO: 88245 - DNA, 25 bp, Artificial
  Probe
agacagcgatggatgaagacatttc

SEQ ID NO: 88246 - DNA, 25 bp, Artificial
  Probe
gagacagcgatggatgaagacattt

SEQ ID NO: 88247 - DNA, 25 bp, Artificial
  Probe
gactttatcctctgaatagctggag

SEQ ID NO: 88248 - DNA, 25 bp, Artificial
  Probe
tgactttatcctctgaatagctgga

SEQ ID NO: 88249 - DNA, 25 bp, Artificial
  Probe
tgatggacagatagagagattcgaa

SEQ ID NO: 88250 - DNA, 25 bp, Artificial
  Probe
gaatggagacagcgatggatgaaga

SEQ ID NO: 88251 - DNA, 25 bp, Artificial
  Probe
aatggagacagcgatggatgaagac

SEQ ID NO: 88252 - DNA, 25 bp, Artificial
  Probe
tctccttccaagcactaccatgaac

SEQ ID NO: 88253 - DNA, 25 bp, Artificial
  Probe
ggagacagcgatggatgaagacatt

SEQ ID NO: 88254 - DNA, 25 bp, Artificial
  Probe
caagcactaccatgaacctgacttt

SEQ ID NO: 88255 - DNA, 25 bp, Artificial
  Probe
cagacagccttggtattcattcctt

SEQ ID NO: 88256 - DNA, 25 bp, Artificial
  Probe
acagccttggtattcattcctttaa

SEQ ID NO: 88257 - DNA, 25 bp, Artificial
  Probe
gacagccttggtattcattccttta

SEQ ID NO: 88258 - DNA, 25 bp, Artificial
  Probe
tgggtggtctgataggtctattaaa

SEQ ID NO: 88259 - DNA, 25 bp, Artificial
  Probe
gggtggtctgataggtctattaaat

SEQ ID NO: 88260 - DNA, 25 bp, Artificial
  Probe
acacagacagccttggtattcattc

SEQ ID NO: 88261 - DNA, 25 bp, Artificial
  Probe
gacacagacagccttggtattcatt

SEQ ID NO: 88262 - DNA, 25 bp, Artificial
  Probe
ctgggtggtctgataggtctattaa

SEQ ID NO: 88263 - DNA, 25 bp, Artificial
  Probe
cgtctttgttcaggtatcaatttgt

SEQ ID NO: 88264 - DNA, 25 bp, Artificial
  Probe
tttaactggaaactgtatggaaaga

SEQ ID NO: 88265 - DNA, 25 bp, Artificial
  Probe
ctttgttcaggtatcaatttgttcc

SEQ ID NO: 88266 - DNA, 25 bp, Artificial
  Probe
gcgtctttgttcaggtatcaatttg

SEQ ID NO: 88267 - DNA, 25 bp, Artificial
  Probe
ttaactggaaactgtatggaaagat

SEQ ID NO: 88268 - DNA, 25 bp, Artificial
  Probe
tgcgtctttgttcaggtatcaattt

SEQ ID NO: 88269 - DNA, 25 bp, Artificial
  Probe
agacagccttggtattcattccttt

SEQ ID NO: 88270 - DNA, 25 bp, Artificial
  Probe
taactggaaactgtatggaaagatc

SEQ ID NO: 88271 - DNA, 25 bp, Artificial
  Probe
acagacagccttggtattcattcct

SEQ ID NO: 88272 - DNA, 25 bp, Artificial
  Probe
cacagacagccttggtattcattcc

SEQ ID NO: 88273 - DNA, 25 bp, Artificial
  Probe
gtctttgttcaggtatcaatttgtt

SEQ ID NO: 88274 - DNA, 25 bp, Artificial
  Probe
tttgttcaggtatcaatttgttcct

SEQ ID NO: 88275 - DNA, 25 bp, Artificial
  Probe
tctttgttcaggtatcaatttgttc

SEQ ID NO: 88276 - DNA, 25 bp, Artificial
  Probe
cagccttggtattcattcctttaaa

SEQ ID NO: 88277 - DNA, 25 bp, Artificial
  Probe
aatttgttcctgggtggtctgatag

SEQ ID NO: 88278 - DNA, 25 bp, Artificial
  Probe
gtgcgtctttgttcaggtatcaatt

SEQ ID NO: 88279 - DNA, 25 bp, Artificial
  Probe
agccttggtattcattcctttaaat

SEQ ID NO: 88280 - DNA, 25 bp, Artificial
  Probe
caatttgttcctgggtggtctgata

SEQ ID NO: 88281 - DNA, 25 bp, Artificial
  Probe
tatcaatttgttcctgggtggtctg

SEQ ID NO: 88282 - DNA, 25 bp, Artificial
  Probe
gtatcaatttgttcctgggtggtct

SEQ ID NO: 88283 - DNA, 25 bp, Artificial
  Probe
tatgtgcctttctttcagctttctc

SEQ ID NO: 88284 - DNA, 25 bp, Artificial
  Probe
gccttggtattcattcctttaaatc

SEQ ID NO: 88285 - DNA, 25 bp, Artificial
  Probe
gtatgtgcctttctttcagctttct

SEQ ID NO: 88286 - DNA, 25 bp, Artificial
  Probe
ggtggtctgataggtctattaaata

SEQ ID NO: 88287 - DNA, 25 bp, Artificial
  Probe
tgtatgtgcctttctttcagctttc

SEQ ID NO: 88288 - DNA, 25 bp, Artificial
  Probe
tggtttaactggaaactgtatggaa

SEQ ID NO: 88289 - DNA, 25 bp, Artificial
  Probe
cctgggtggtctgataggtctatta

SEQ ID NO: 88290 - DNA, 25 bp, Artificial
  Probe
ggtttaactggaaactgtatggaaa

SEQ ID NO: 88291 - DNA, 25 bp, Artificial
  Probe
atgctggtttaactggaaactgtat

SEQ ID NO: 88292 - DNA, 25 bp, Artificial
  Probe
ctggtttaactggaaactgtatgga

SEQ ID NO: 88293 - DNA, 25 bp, Artificial
  Probe
aatgctggtttaactggaaactgta

SEQ ID NO: 88294 - DNA, 25 bp, Artificial
  Probe
ccctgaatgctggtttaactggaaa

SEQ ID NO: 88295 - DNA, 25 bp, Artificial
  Probe
tgctggtttaactggaaactgtatg

SEQ ID NO: 88296 - DNA, 25 bp, Artificial
  Probe
ctaagagagcaaggcagaggtcaag

SEQ ID NO: 88297 - DNA, 25 bp, Artificial
  Probe
ggacacagacagccttggtattcat

SEQ ID NO: 88298 - DNA, 25 bp, Artificial
  Probe
tgatgtttctcttcagagtcgtgtg

SEQ ID NO: 88299 - DNA, 25 bp, Artificial
  Probe
gtgatgtttctcttcagagtcgtgt

SEQ ID NO: 88300 - DNA, 25 bp, Artificial
  Probe
atatggctgatggatgactctattg

SEQ ID NO: 88301 - DNA, 25 bp, Artificial
  Probe
gaatatggctgatggatgactctat

SEQ ID NO: 88302 - DNA, 25 bp, Artificial
  Probe
aatatggctgatggatgactctatt

SEQ ID NO: 88303 - DNA, 25 bp, Artificial
  Probe
ggaatatggctgatggatgactcta

SEQ ID NO: 88304 - DNA, 25 bp, Artificial
  Probe
tatggctgatggatgactctattgg

SEQ ID NO: 88305 - DNA, 25 bp, Artificial
  Probe
ccttggttggtagagtctagtataa

SEQ ID NO: 88306 - DNA, 25 bp, Artificial
  Probe
aacttcctgagaacattgctgattc

SEQ ID NO: 88307 - DNA, 25 bp, Artificial
  Probe
gaacttcctgagaacattgctgatt

SEQ ID NO: 88308 - DNA, 25 bp, Artificial
  Probe
tagaacttcctgagaacattgctga

SEQ ID NO: 88309 - DNA, 25 bp, Artificial
  Probe
ttcctgagaacattgctgattcatc

SEQ ID NO: 88310 - DNA, 25 bp, Artificial
  Probe
cttcctgagaacattgctgattcat

SEQ ID NO: 88311 - DNA, 25 bp, Artificial
  Probe
ctagaacttcctgagaacattgctg

SEQ ID NO: 88312 - DNA, 25 bp, Artificial
  Probe
atggatgactctattggcaacagta

SEQ ID NO: 88313 - DNA, 25 bp, Artificial
  Probe
tggttggtagagtctagtataagtt

SEQ ID NO: 88314 - DNA, 25 bp, Artificial
  Probe
ttggttggtagagtctagtataagt

SEQ ID NO: 88315 - DNA, 25 bp, Artificial
  Probe
ctgagaacattgctgattcatcatg

SEQ ID NO: 88316 - DNA, 25 bp, Artificial
  Probe
agaacttcctgagaacattgctgat

SEQ ID NO: 88317 - DNA, 25 bp, Artificial
  Probe
cctgagaacattgctgattcatcat

SEQ ID NO: 88318 - DNA, 25 bp, Artificial
  Probe
tggatgactctattggcaacagtag

SEQ ID NO: 88319 - DNA, 25 bp, Artificial
  Probe
tgatggatgactctattggcaacag

SEQ ID NO: 88320 - DNA, 25 bp, Artificial
  Probe
ctgatggatgactctattggcaaca

SEQ ID NO: 88321 - DNA, 25 bp, Artificial
  Probe
accttggttggtagagtctagtata

SEQ ID NO: 88322 - DNA, 25 bp, Artificial
  Probe
atattacagcaattcactggactag

SEQ ID NO: 88323 - DNA, 25 bp, Artificial
  Probe
cttggttggtagagtctagtataag

SEQ ID NO: 88324 - DNA, 25 bp, Artificial
  Probe
gagctagaacttcctgagaacattg

SEQ ID NO: 88325 - DNA, 25 bp, Artificial
  Probe
gaggtctctagtgacacaagaatgt

SEQ ID NO: 88326 - DNA, 25 bp, Artificial
  Probe
ctggaatatggctgatggatgactc

SEQ ID NO: 88327 - DNA, 25 bp, Artificial
  Probe
acttcctgagaacattgctgattca

SEQ ID NO: 88328 - DNA, 25 bp, Artificial
  Probe
tgtgtattgtacgtgctatgcttaa

SEQ ID NO: 88329 - DNA, 25 bp, Artificial
  Probe
aatagctctcacaagatagtaacct

SEQ ID NO: 88330 - DNA, 25 bp, Artificial
  Probe
ctgtgtattgtacgtgctatgctta

SEQ ID NO: 88331 - DNA, 25 bp, Artificial
  Probe
tcctgagaacattgctgattcatca

SEQ ID NO: 88332 - DNA, 25 bp, Artificial
  Probe
atatttctctcctggatgttggttt

SEQ ID NO: 88333 - DNA, 25 bp, Artificial
  Probe
gatggatgactctattggcaacagt

SEQ ID NO: 88334 - DNA, 25 bp, Artificial
  Probe
gatatttctctcctggatgttggtt

SEQ ID NO: 88335 - DNA, 25 bp, Artificial
  Probe
tatttctctcctggatgttggtttc

SEQ ID NO: 88336 - DNA, 25 bp, Artificial
  Probe
ggatgactctattggcaacagtagg

SEQ ID NO: 88337 - DNA, 25 bp, Artificial
  Probe
tggaatatggctgatggatgactct

SEQ ID NO: 88338 - DNA, 25 bp, Artificial
  Probe
agtgagagtttctgttatgttccta

SEQ ID NO: 88339 - DNA, 25 bp, Artificial
  Probe
tagtgagagtttctgttatgttcct

SEQ ID NO: 88340 - DNA, 25 bp, Artificial
  Probe
tgagaacattgctgattcatcatgc

SEQ ID NO: 88341 - DNA, 25 bp, Artificial
  Probe
tagctctcacaagatagtaacctaa

SEQ ID NO: 88342 - DNA, 25 bp, Artificial
  Probe
gctagaacttcctgagaacattgct

SEQ ID NO: 88343 - DNA, 25 bp, Artificial
  Probe
ggaggtctctagtgacacaagaatg

SEQ ID NO: 88344 - DNA, 25 bp, Artificial
  Probe
gatgagaaatgtgaccttcaagaaa

SEQ ID NO: 88345 - DNA, 25 bp, Artificial
  Probe
tattgaagtgtgttagtagtctggc

SEQ ID NO: 88346 - DNA, 25 bp, Artificial
  Probe
tggtattgaagtgtgttagtagtct

SEQ ID NO: 88347 - DNA, 25 bp, Artificial
  Probe
aaccttcacactgtatctaccacta

SEQ ID NO: 88348 - DNA, 25 bp, Artificial
  Probe
gtattgaagtgtgttagtagtctgg

SEQ ID NO: 88349 - DNA, 25 bp, Artificial
  Probe
ggtattgaagtgtgttagtagtctg

SEQ ID NO: 88350 - DNA, 25 bp, Artificial
  Probe
tagtggagccaggacataagttatt

SEQ ID NO: 88351 - DNA, 25 bp, Artificial
  Probe
accttcacactgtatctaccactac

SEQ ID NO: 88352 - DNA, 25 bp, Artificial
  Probe
gacttcttagaaccttcacactgta

SEQ ID NO: 88353 - DNA, 25 bp, Artificial
  Probe
atggtattgaagtgtgttagtagtc

SEQ ID NO: 88354 - DNA, 25 bp, Artificial
  Probe
aacagacttcttagaaccttcacac

SEQ ID NO: 88355 - DNA, 25 bp, Artificial
  Probe
acttcttagaaccttcacactgtat

SEQ ID NO: 88356 - DNA, 25 bp, Artificial
  Probe
taacagacttcttagaaccttcaca

SEQ ID NO: 88357 - DNA, 25 bp, Artificial
  Probe
gtaacagacttcttagaaccttcac

SEQ ID NO: 88358 - DNA, 25 bp, Artificial
  Probe
gaaccttcacactgtatctaccact

SEQ ID NO: 88359 - DNA, 25 bp, Artificial
  Probe
ttcttagaaccttcacactgtatct

SEQ ID NO: 88360 - DNA, 25 bp, Artificial
  Probe
cttcttagaaccttcacactgtatc

SEQ ID NO: 88361 - DNA, 25 bp, Artificial
  Probe
gtagtggagccaggacataagttat

SEQ ID NO: 88362 - DNA, 25 bp, Artificial
  Probe
gcagtaacagacttcttagaacctt

SEQ ID NO: 88363 - DNA, 25 bp, Artificial
  Probe
gagccaggacataagttattgttca

SEQ ID NO: 88364 - DNA, 25 bp, Artificial
  Probe
ccaggacataagttattgttcacat

SEQ ID NO: 88365 - DNA, 25 bp, Artificial
  Probe
aatggtattgaagtgtgttagtagt

SEQ ID NO: 88366 - DNA, 25 bp, Artificial
  Probe
agacttcttagaaccttcacactgt

SEQ ID NO: 88367 - DNA, 25 bp, Artificial
  Probe
acagacttcttagaaccttcacact

SEQ ID NO: 88368 - DNA, 25 bp, Artificial
  Probe
agccaggacataagttattgttcac

SEQ ID NO: 88369 - DNA, 25 bp, Artificial
  Probe
agaaccttcacactgtatctaccac

SEQ ID NO: 88370 - DNA, 25 bp, Artificial
  Probe
agtaacagacttcttagaaccttca

SEQ ID NO: 88371 - DNA, 25 bp, Artificial
  Probe
cagtaacagacttcttagaaccttc

SEQ ID NO: 88372 - DNA, 25 bp, Artificial
  Probe
agcagtaacagacttcttagaacct

SEQ ID NO: 88373 - DNA, 25 bp, Artificial
  Probe
cagcagtaacagacttcttagaacc

SEQ ID NO: 88374 - DNA, 25 bp, Artificial
  Probe
gccaggacataagttattgttcaca

SEQ ID NO: 88375 - DNA, 25 bp, Artificial
  Probe
ggagccaggacataagttattgttc

SEQ ID NO: 88376 - DNA, 25 bp, Artificial
  Probe
tagaaccttcacactgtatctacca

SEQ ID NO: 88377 - DNA, 25 bp, Artificial
  Probe
ttagaaccttcacactgtatctacc

SEQ ID NO: 88378 - DNA, 25 bp, Artificial
  Probe
cagacttcttagaaccttcacactg

SEQ ID NO: 88379 - DNA, 25 bp, Artificial
  Probe
gcagcagtaacagacttcttagaac

SEQ ID NO: 88380 - DNA, 25 bp, Artificial
  Probe
agtggagccaggacataagttattg

SEQ ID NO: 88381 - DNA, 25 bp, Artificial
  Probe
agcagcagtaacagacttcttagaa

SEQ ID NO: 88382 - DNA, 25 bp, Artificial
  Probe
agtagtggagccaggacataagtta

SEQ ID NO: 88383 - DNA, 25 bp, Artificial
  Probe
cagcagcagtaacagacttcttaga

SEQ ID NO: 88384 - DNA, 25 bp, Artificial
  Probe
tggagccaggacataagttattgtt

SEQ ID NO: 88385 - DNA, 25 bp, Artificial
  Probe
cttagaaccttcacactgtatctac

SEQ ID NO: 88386 - DNA, 25 bp, Artificial
  Probe
gagtgtaatgatttcctgtatcgtg

SEQ ID NO: 88387 - DNA, 25 bp, Artificial
  Probe
agtgtaatgatttcctgtatcgtgg

SEQ ID NO: 88388 - DNA, 25 bp, Artificial
  Probe
tcttagaaccttcacactgtatcta

SEQ ID NO: 88389 - DNA, 25 bp, Artificial
  Probe
agcgagtgtaatgatttcctgtatc

SEQ ID NO: 88390 - DNA, 25 bp, Artificial
  Probe
ctgacctacaacaagaagtacacat

SEQ ID NO: 88391 - DNA, 25 bp, Artificial
  Probe
tgacctacaacaagaagtacacata

SEQ ID NO: 88392 - DNA, 25 bp, Artificial
  Probe
cctacaacaagaagtacacatatcc

SEQ ID NO: 88393 - DNA, 25 bp, Artificial
  Probe
acaacaagaagtacacatatccatg

SEQ ID NO: 88394 - DNA, 25 bp, Artificial
  Probe
ctacaacaagaagtacacatatcca

SEQ ID NO: 88395 - DNA, 25 bp, Artificial
  Probe
acctacaacaagaagtacacatatc

SEQ ID NO: 88396 - DNA, 25 bp, Artificial
  Probe
gacctacaacaagaagtacacatat

SEQ ID NO: 88397 - DNA, 25 bp, Artificial
  Probe
cactgacctacaacaagaagtacac

SEQ ID NO: 88398 - DNA, 25 bp, Artificial
  Probe
actgacctacaacaagaagtacaca

SEQ ID NO: 88399 - DNA, 25 bp, Artificial
  Probe
tacaacaagaagtacacatatccat

SEQ ID NO: 88400 - DNA, 25 bp, Artificial
  Probe
ccactgacctacaacaagaagtaca

SEQ ID NO: 88401 - DNA, 25 bp, Artificial
  Probe
catctacaagctcaggactctcaag

SEQ ID NO: 88402 - DNA, 25 bp, Artificial
  Probe
gccactgacctacaacaagaagtac

SEQ ID NO: 88403 - DNA, 25 bp, Artificial
  Probe
gaactgggaacctcctatcttgata

SEQ ID NO: 88404 - DNA, 25 bp, Artificial
  Probe
aactgggaacctcctatcttgatac

SEQ ID NO: 88405 - DNA, 25 bp, Artificial
  Probe
atctacaagctcaggactctcaagg

SEQ ID NO: 88406 - DNA, 25 bp, Artificial
  Probe
aatacacgccactgacctacaacaa

SEQ ID NO: 88407 - DNA, 25 bp, Artificial
  Probe
tgaactgggaacctcctatcttgat

SEQ ID NO: 88408 - DNA, 25 bp, Artificial
  Probe
actgggaacctcctatcttgatacc

SEQ ID NO: 88409 - DNA, 25 bp, Artificial
  Probe
cgccactgacctacaacaagaagta

SEQ ID NO: 88410 - DNA, 25 bp, Artificial
  Probe
gcatctacaagctcaggactctcaa

SEQ ID NO: 88411 - DNA, 25 bp, Artificial
  Probe
atacacgccactgacctacaacaag

SEQ ID NO: 88412 - DNA, 25 bp, Artificial
  Probe
aacaagaagtacacatatccatggt

SEQ ID NO: 88413 - DNA, 25 bp, Artificial
  Probe
caacaagaagtacacatatccatgg

SEQ ID NO: 88414 - DNA, 25 bp, Artificial
  Probe
acattgtgacatgcccaaatcaaca

SEQ ID NO: 88415 - DNA, 25 bp, Artificial
  Probe
cacattgtgacatgcccaaatcaac

SEQ ID NO: 88416 - DNA, 25 bp, Artificial
  Probe
acaagaagtacacatatccatggtg

SEQ ID NO: 88417 - DNA, 25 bp, Artificial
  Probe
attgtgacatgcccaaatcaacaac

SEQ ID NO: 88418 - DNA, 25 bp, Artificial
  Probe
cattgtgacatgcccaaatcaacaa

SEQ ID NO: 88419 - DNA, 25 bp, Artificial
  Probe
ctgggaacctcctatcttgataccc

SEQ ID NO: 88420 - DNA, 25 bp, Artificial
  Probe
caagaagtacacatatccatggtgg

SEQ ID NO: 88421 - DNA, 25 bp, Artificial
  Probe
agcatctacaagctcaggactctca

SEQ ID NO: 88422 - DNA, 25 bp, Artificial
  Probe
tgtgacatgcccaaatcaacaacac

SEQ ID NO: 88423 - DNA, 25 bp, Artificial
  Probe
tctacaagctcaggactctcaaggg

SEQ ID NO: 88424 - DNA, 25 bp, Artificial
  Probe
ttgtgacatgcccaaatcaacaaca

SEQ ID NO: 88425 - DNA, 25 bp, Artificial
  Probe
aagaagtacacatatccatggtggg

SEQ ID NO: 88426 - DNA, 25 bp, Artificial
  Probe
gcacattgtgacatgcccaaatcaa

SEQ ID NO: 88427 - DNA, 25 bp, Artificial
  Probe
ccaaatcaacaacacccctttgagg

SEQ ID NO: 88428 - DNA, 25 bp, Artificial
  Probe
cccaaatcaacaacacccctttgag

SEQ ID NO: 88429 - DNA, 25 bp, Artificial
  Probe
caaatcaacaacacccctttgaggc

SEQ ID NO: 88430 - DNA, 25 bp, Artificial
  Probe
gtaatcataggcatctaagtgaaca

SEQ ID NO: 88431 - DNA, 25 bp, Artificial
  Probe
tgtaatcataggcatctaagtgaac

SEQ ID NO: 88432 - DNA, 25 bp, Artificial
  Probe
ttgtaatcataggcatctaagtgaa

SEQ ID NO: 88433 - DNA, 25 bp, Artificial
  Probe
attgtaatcataggcatctaagtga

SEQ ID NO: 88434 - DNA, 25 bp, Artificial
  Probe
ttccatctcagaagattagtgacct

SEQ ID NO: 88435 - DNA, 25 bp, Artificial
  Probe
taataaacatactatggcgtccctg

SEQ ID NO: 88436 - DNA, 25 bp, Artificial
  Probe
gtaataaacatactatggcgtccct

SEQ ID NO: 88437 - DNA, 25 bp, Artificial
  Probe
aattgtaatcataggcatctaagtg

SEQ ID NO: 88438 - DNA, 25 bp, Artificial
  Probe
gaagattagtgacctgaaatgaaga

SEQ ID NO: 88439 - DNA, 25 bp, Artificial
  Probe
agaagattagtgacctgaaatgaag

SEQ ID NO: 88440 - DNA, 25 bp, Artificial
  Probe
ccctgtagtcatttagttactgtca

SEQ ID NO: 88441 - DNA, 25 bp, Artificial
  Probe
gtccctgtagtcatttagttactgt

SEQ ID NO: 88442 - DNA, 25 bp, Artificial
  Probe
tccctgtagtcatttagttactgtc

SEQ ID NO: 88443 - DNA, 25 bp, Artificial
  Probe
cgtccctgtagtcatttagttactg

SEQ ID NO: 88444 - DNA, 25 bp, Artificial
  Probe
tccatctcagaagattagtgacctg

SEQ ID NO: 88445 - DNA, 25 bp, Artificial
  Probe
aagattagtgacctgaaatgaagaa

SEQ ID NO: 88446 - DNA, 25 bp, Artificial
  Probe
gctgtaataaacatactatggcgtc

SEQ ID NO: 88447 - DNA, 25 bp, Artificial
  Probe
tgtaataaacatactatggcgtccc

SEQ ID NO: 88448 - DNA, 25 bp, Artificial
  Probe
tgtgtaacaggtaggagtgaaatat

SEQ ID NO: 88449 - DNA, 25 bp, Artificial
  Probe
ctgtaataaacatactatggcgtcc

SEQ ID NO: 88450 - DNA, 25 bp, Artificial
  Probe
agattagtgacctgaaatgaagaat

SEQ ID NO: 88451 - DNA, 25 bp, Artificial
  Probe
ataaacatactatggcgtccctgta

SEQ ID NO: 88452 - DNA, 25 bp, Artificial
  Probe
cctgtagtcatttagttactgtcaa

SEQ ID NO: 88453 - DNA, 25 bp, Artificial
  Probe
cagaagattagtgacctgaaatgaa

SEQ ID NO: 88454 - DNA, 25 bp, Artificial
  Probe
atattcatgcctgtccaacacttta

SEQ ID NO: 88455 - DNA, 25 bp, Artificial
  Probe
tattcatgcctgtccaacactttaa

SEQ ID NO: 88456 - DNA, 25 bp, Artificial
  Probe
gcgtccctgtagtcatttagttact

SEQ ID NO: 88457 - DNA, 25 bp, Artificial
  Probe
taaacatactatggcgtccctgtag

SEQ ID NO: 88458 - DNA, 25 bp, Artificial
  Probe
aataaacatactatggcgtccctgt

SEQ ID NO: 88459 - DNA, 25 bp, Artificial
  Probe
ctatggcgtccctgtagtcatttag

SEQ ID NO: 88460 - DNA, 25 bp, Artificial
  Probe
gtgtaacaggtaggagtgaaatatt

SEQ ID NO: 88461 - DNA, 25 bp, Artificial
  Probe
gcaacagtgtgtgctagatacaatt

SEQ ID NO: 88462 - DNA, 25 bp, Artificial
  Probe
gattagtgacctgaaatgaagaatt

SEQ ID NO: 88463 - DNA, 25 bp, Artificial
  Probe
ctgtagtcatttagttactgtcaac

SEQ ID NO: 88464 - DNA, 25 bp, Artificial
  Probe
ggcgtccctgtagtcatttagttac

SEQ ID NO: 88465 - DNA, 25 bp, Artificial
  Probe
caacagtgtgtgctagatacaattg

SEQ ID NO: 88466 - DNA, 25 bp, Artificial
  Probe
agctgtaataaacatactatggcgt

SEQ ID NO: 88467 - DNA, 25 bp, Artificial
  Probe
gagctgtaataaacatactatggcg

SEQ ID NO: 88468 - DNA, 25 bp, Artificial
  Probe
tttccatctcagaagattagtgacc

SEQ ID NO: 88469 - DNA, 25 bp, Artificial
  Probe
aatattcatgcctgtccaacacttt

SEQ ID NO: 88470 - DNA, 25 bp, Artificial
  Probe
aaatattcatgcctgtccaacactt

SEQ ID NO: 88471 - DNA, 25 bp, Artificial
  Probe
gctttccatctcagaagattagtga

SEQ ID NO: 88472 - DNA, 25 bp, Artificial
  Probe
tgtaacaggtaggagtgaaatattc

SEQ ID NO: 88473 - DNA, 25 bp, Artificial
  Probe
ctttccatctcagaagattagtgac

SEQ ID NO: 88474 - DNA, 25 bp, Artificial
  Probe
tatggcgtccctgtagtcatttagt

SEQ ID NO: 88475 - DNA, 25 bp, Artificial
  Probe
ggaccagtctactacagattcaata

SEQ ID NO: 88476 - DNA, 25 bp, Artificial
  Probe
gaccagtctactacagattcaataa

SEQ ID NO: 88477 - DNA, 25 bp, Artificial
  Probe
cctcccttcttattgatacctttcc

SEQ ID NO: 88478 - DNA, 25 bp, Artificial
  Probe
ctcccttcttattgatacctttcct

SEQ ID NO: 88479 - DNA, 25 bp, Artificial
  Probe
tcctcccttcttattgatacctttc

SEQ ID NO: 88480 - DNA, 25 bp, Artificial
  Probe
cttcctcccttcttattgatacctt

SEQ ID NO: 88481 - DNA, 25 bp, Artificial
  Probe
gatacctttcctttactcacctgta

SEQ ID NO: 88482 - DNA, 25 bp, Artificial
  Probe
tcccttcttattgatacctttcctt

SEQ ID NO: 88483 - DNA, 25 bp, Artificial
  Probe
ttcctcccttcttattgataccttt

SEQ ID NO: 88484 - DNA, 25 bp, Artificial
  Probe
taccatcaacatcatttatgctcct

SEQ ID NO: 88485 - DNA, 25 bp, Artificial
  Probe
atcaacatcatttatgctcctctct

SEQ ID NO: 88486 - DNA, 25 bp, Artificial
  Probe
catcaacatcatttatgctcctctc

SEQ ID NO: 88487 - DNA, 25 bp, Artificial
  Probe
ccttcctcccttcttattgatacct

SEQ ID NO: 88488 - DNA, 25 bp, Artificial
  Probe
tcaacatcatttatgctcctctctg

SEQ ID NO: 88489 - DNA, 25 bp, Artificial
  Probe
ccatcaacatcatttatgctcctct

SEQ ID NO: 88490 - DNA, 25 bp, Artificial
  Probe
accatcaacatcatttatgctcctc

SEQ ID NO: 88491 - DNA, 25 bp, Artificial
  Probe
ttgatacctttcctttactcacctg

SEQ ID NO: 88492 - DNA, 25 bp, Artificial
  Probe
cccttcttattgatacctttccttt

SEQ ID NO: 88493 - DNA, 25 bp, Artificial
  Probe
ctgccttcctcccttcttattgata

SEQ ID NO: 88494 - DNA, 25 bp, Artificial
  Probe
accagtctactacagattcaataat

SEQ ID NO: 88495 - DNA, 25 bp, Artificial
  Probe
attgatacctttcctttactcacct

SEQ ID NO: 88496 - DNA, 25 bp, Artificial
  Probe
gtaccatcaacatcatttatgctcc

SEQ ID NO: 88497 - DNA, 25 bp, Artificial
  Probe
tgccttcctcccttcttattgatac

SEQ ID NO: 88498 - DNA, 25 bp, Artificial
  Probe
tgatacctttcctttactcacctgt

SEQ ID NO: 88499 - DNA, 25 bp, Artificial
  Probe
gggaccagtctactacagattcaat

SEQ ID NO: 88500 - DNA, 25 bp, Artificial
  Probe
aatttgacttgtgtcctgtgaaatg

SEQ ID NO: 88501 - DNA, 25 bp, Artificial
  Probe
tacagggaccagtctactacagatt

SEQ ID NO: 88502 - DNA, 25 bp, Artificial
  Probe
atctacagggaccagtctactacag

SEQ ID NO: 88503 - DNA, 25 bp, Artificial
  Probe
aacatcatttatgctcctctctgct

SEQ ID NO: 88504 - DNA, 25 bp, Artificial
  Probe
caacatcatttatgctcctctctgc

SEQ ID NO: 88505 - DNA, 25 bp, Artificial
  Probe
attgtttaccttcattaagtgaggc

SEQ ID NO: 88506 - DNA, 25 bp, Artificial
  Probe
gccttcctcccttcttattgatacc

SEQ ID NO: 88507 - DNA, 25 bp, Artificial
  Probe
cagtttagcttctatacatacgggt

SEQ ID NO: 88508 - DNA, 25 bp, Artificial
  Probe
ctacagggaccagtctactacagat

SEQ ID NO: 88509 - DNA, 25 bp, Artificial
  Probe
tccagtttagcttctatacatacgg

SEQ ID NO: 88510 - DNA, 25 bp, Artificial
  Probe
tacctttcctttactcacctgtaag

SEQ ID NO: 88511 - DNA, 25 bp, Artificial
  Probe
catctacagggaccagtctactaca

SEQ ID NO: 88512 - DNA, 25 bp, Artificial
  Probe
acatctacagggaccagtctactac

SEQ ID NO: 88513 - DNA, 25 bp, Artificial
  Probe
cacatctacagggaccagtctacta

SEQ ID NO: 88514 - DNA, 25 bp, Artificial
  Probe
ccagtttagcttctatacatacggg

SEQ ID NO: 88515 - DNA, 25 bp, Artificial
  Probe
tattgatacctttcctttactcacc

SEQ ID NO: 88516 - DNA, 25 bp, Artificial
  Probe
agggaccagtctactacagattcaa

SEQ ID NO: 88517 - DNA, 25 bp, Artificial
  Probe
agtttagcttctatacatacgggtt

SEQ ID NO: 88518 - DNA, 25 bp, Artificial
  Probe
ttcctactttcttcatcgcccaatt

SEQ ID NO: 88519 - DNA, 25 bp, Artificial
  Probe
gttatcgtacaggtcattggctttc

SEQ ID NO: 88520 - DNA, 25 bp, Artificial
  Probe
ggtagaagacactaatactttgggt

SEQ ID NO: 88521 - DNA, 25 bp, Artificial
  Probe
gggtagaagacactaatactttggg

SEQ ID NO: 88522 - DNA, 25 bp, Artificial
  Probe
tgggtagaagacactaatactttgg

SEQ ID NO: 88523 - DNA, 25 bp, Artificial
  Probe
ctctgagtagtagaaaccaatcctt

SEQ ID NO: 88524 - DNA, 25 bp, Artificial
  Probe
tctgagtagtagaaaccaatccttt

SEQ ID NO: 88525 - DNA, 25 bp, Artificial
  Probe
gtagaagacactaatactttgggtt

SEQ ID NO: 88526 - DNA, 25 bp, Artificial
  Probe
ctgagtagtagaaaccaatccttta

SEQ ID NO: 88527 - DNA, 25 bp, Artificial
  Probe
ctgtgggtagaagacactaatactt

SEQ ID NO: 88528 - DNA, 25 bp, Artificial
  Probe
aactctgagtagtagaaaccaatcc

SEQ ID NO: 88529 - DNA, 25 bp, Artificial
  Probe
ggaactctgagtagtagaaaccaat

SEQ ID NO: 88530 - DNA, 25 bp, Artificial
  Probe
actctgagtagtagaaaccaatcct

SEQ ID NO: 88531 - DNA, 25 bp, Artificial
  Probe
tgtgggtagaagacactaatacttt

SEQ ID NO: 88532 - DNA, 25 bp, Artificial
  Probe
gttccctataacattcacctaagat

SEQ ID NO: 88533 - DNA, 25 bp, Artificial
  Probe
gtgggtagaagacactaatactttg

SEQ ID NO: 88534 - DNA, 25 bp, Artificial
  Probe
tagaagacactaatactttgggttt

SEQ ID NO: 88535 - DNA, 25 bp, Artificial
  Probe
gaactctgagtagtagaaaccaatc

SEQ ID NO: 88536 - DNA, 25 bp, Artificial
  Probe
gctgtgggtagaagacactaatact

SEQ ID NO: 88537 - DNA, 25 bp, Artificial
  Probe
tgagtagtagaaaccaatcctttat

SEQ ID NO: 88538 - DNA, 25 bp, Artificial
  Probe
cctggaactctgagtagtagaaacc

SEQ ID NO: 88539 - DNA, 25 bp, Artificial
  Probe
ccctggaactctgagtagtagaaac

SEQ ID NO: 88540 - DNA, 25 bp, Artificial
  Probe
tggaactctgagtagtagaaaccaa

SEQ ID NO: 88541 - DNA, 25 bp, Artificial
  Probe
ctggaactctgagtagtagaaacca

SEQ ID NO: 88542 - DNA, 25 bp, Artificial
  Probe
ggctgtgggtagaagacactaatac

SEQ ID NO: 88543 - DNA, 25 bp, Artificial
  Probe
ttccctataacattcacctaagata

SEQ ID NO: 88544 - DNA, 25 bp, Artificial
  Probe
tccctataacattcacctaagatag

SEQ ID NO: 88545 - DNA, 25 bp, Artificial
  Probe
cttcattttcttgggacctcttcag

SEQ ID NO: 88546 - DNA, 25 bp, Artificial
  Probe
agaagacactaatactttgggtttt

SEQ ID NO: 88547 - DNA, 25 bp, Artificial
  Probe
cattttcttgggacctcttcagttg

SEQ ID NO: 88548 - DNA, 25 bp, Artificial
  Probe
tcattttcttgggacctcttcagtt

SEQ ID NO: 88549 - DNA, 25 bp, Artificial
  Probe
ttcattttcttgggacctcttcagt

SEQ ID NO: 88550 - DNA, 25 bp, Artificial
  Probe
gcttgttccctataacattcaccta

SEQ ID NO: 88551 - DNA, 25 bp, Artificial
  Probe
gccctggaactctgagtagtagaaa

SEQ ID NO: 88552 - DNA, 25 bp, Artificial
  Probe
attttcttgggacctcttcagttgt

SEQ ID NO: 88553 - DNA, 25 bp, Artificial
  Probe
gggctgtgggtagaagacactaata

SEQ ID NO: 88554 - DNA, 25 bp, Artificial
  Probe
tgttccctataacattcacctaaga

SEQ ID NO: 88555 - DNA, 25 bp, Artificial
  Probe
ccttcattttcttgggacctcttca

SEQ ID NO: 88556 - DNA, 25 bp, Artificial
  Probe
tttcttgggacctcttcagttgtca

SEQ ID NO: 88557 - DNA, 25 bp, Artificial
  Probe
ttgttccctataacattcacctaag

SEQ ID NO: 88558 - DNA, 25 bp, Artificial
  Probe
cttgttccctataacattcacctaa

SEQ ID NO: 88559 - DNA, 25 bp, Artificial
  Probe
gagtagtagaaaccaatcctttata

SEQ ID NO: 88560 - DNA, 25 bp, Artificial
  Probe
agccctggaactctgagtagtagaa

SEQ ID NO: 88561 - DNA, 25 bp, Artificial
  Probe
ttcttgggacctcttcagttgtcag

SEQ ID NO: 88562 - DNA, 25 bp, Artificial
  Probe
ggcttgttccctataacattcacct

SEQ ID NO: 88563 - DNA, 25 bp, Artificial
  Probe
ttttcttgggacctcttcagttgtc

SEQ ID NO: 88564 - DNA, 25 bp, Artificial
  Probe
gagccctggaactctgagtagtaga

SEQ ID NO: 88565 - DNA, 25 bp, Artificial
  Probe
acaaggagcatctgttcataggaag

SEQ ID NO: 88566 - DNA, 25 bp, Artificial
  Probe
tttgactctgaaacccgttgaaata

SEQ ID NO: 88567 - DNA, 25 bp, Artificial
  Probe
tatcttagactccctttgactctga

SEQ ID NO: 88568 - DNA, 25 bp, Artificial
  Probe
ctatcttagactccctttgactctg

SEQ ID NO: 88569 - DNA, 25 bp, Artificial
  Probe
aataaaggtatgtcttctgcttggg

SEQ ID NO: 88570 - DNA, 25 bp, Artificial
  Probe
caaggagcatctgttcataggaagg

SEQ ID NO: 88571 - DNA, 25 bp, Artificial
  Probe
atcttagactccctttgactctgaa

SEQ ID NO: 88572 - DNA, 25 bp, Artificial
  Probe
ttgactctgaaacccgttgaaatag

SEQ ID NO: 88573 - DNA, 25 bp, Artificial
  Probe
tgccatagaatcaaggttagaaatg

SEQ ID NO: 88574 - DNA, 25 bp, Artificial
  Probe
caataaaggtatgtcttctgcttgg

SEQ ID NO: 88575 - DNA, 25 bp, Artificial
  Probe
cttagactccctttgactctgaaac

SEQ ID NO: 88576 - DNA, 25 bp, Artificial
  Probe
tcttagactccctttgactctgaaa

SEQ ID NO: 88577 - DNA, 25 bp, Artificial
  Probe
gacactttcctagacaatggctaat

SEQ ID NO: 88578 - DNA, 25 bp, Artificial
  Probe
acactttcctagacaatggctaatg

SEQ ID NO: 88579 - DNA, 25 bp, Artificial
  Probe
ataaaggtatgtcttctgcttggga

SEQ ID NO: 88580 - DNA, 25 bp, Artificial
  Probe
atgccatagaatcaaggttagaaat

SEQ ID NO: 88581 - DNA, 25 bp, Artificial
  Probe
taaaggtatgtcttctgcttgggaa

SEQ ID NO: 88582 - DNA, 25 bp, Artificial
  Probe
gccatagaatcaaggttagaaatga

SEQ ID NO: 88583 - DNA, 25 bp, Artificial
  Probe
cactttcctagacaatggctaatgg

SEQ ID NO: 88584 - DNA, 25 bp, Artificial
  Probe
ctttgactctgaaacccgttgaaat

SEQ ID NO: 88585 - DNA, 25 bp, Artificial
  Probe
gtagttagcattagaaagcatgacg

SEQ ID NO: 88586 - DNA, 25 bp, Artificial
  Probe
cgtagttagcattagaaagcatgac

SEQ ID NO: 88587 - DNA, 25 bp, Artificial
  Probe
catctgttcataggaaggcttctgg

SEQ ID NO: 88588 - DNA, 25 bp, Artificial
  Probe
tgacactttcctagacaatggctaa

SEQ ID NO: 88589 - DNA, 25 bp, Artificial
  Probe
catgccatagaatcaaggttagaaa

SEQ ID NO: 88590 - DNA, 25 bp, Artificial
  Probe
ctgaaacccgttgaaatagcctatg

SEQ ID NO: 88591 - DNA, 25 bp, Artificial
  Probe
tctgaaacccgttgaaatagcctat

SEQ ID NO: 88592 - DNA, 25 bp, Artificial
  Probe
ttagactccctttgactctgaaacc

SEQ ID NO: 88593 - DNA, 25 bp, Artificial
  Probe
gaaacccgttgaaatagcctatgtg

SEQ ID NO: 88594 - DNA, 25 bp, Artificial
  Probe
agtgaggaaactgacttagggaaag

SEQ ID NO: 88595 - DNA, 25 bp, Artificial
  Probe
tctatcttagactccctttgactct

SEQ ID NO: 88596 - DNA, 25 bp, Artificial
  Probe
aaaggtatgtcttctgcttgggaaa

SEQ ID NO: 88597 - DNA, 25 bp, Artificial
  Probe
aaactgacttagggaaaggacagaa

SEQ ID NO: 88598 - DNA, 25 bp, Artificial
  Probe
gtgacactttcctagacaatggcta

SEQ ID NO: 88599 - DNA, 25 bp, Artificial
  Probe
caatgctatgcttgctagactttgt

SEQ ID NO: 88600 - DNA, 25 bp, Artificial
  Probe
ctctgaaacccgttgaaatagccta

SEQ ID NO: 88601 - DNA, 25 bp, Artificial
  Probe
tagaatcaaggttagaaatgacccg

SEQ ID NO: 88602 - DNA, 25 bp, Artificial
  Probe
actttcctagacaatggctaatggg

SEQ ID NO: 88603 - DNA, 25 bp, Artificial
  Probe
tgaaacccgttgaaatagcctatgt

SEQ ID NO: 88604 - DNA, 25 bp, Artificial
  Probe
aatagcctatgtgctctgatgagtg

SEQ ID NO: 88605 - DNA, 25 bp, Artificial
  Probe
gaggaaactgacttagggaaaggac

SEQ ID NO: 88606 - DNA, 25 bp, Artificial
  Probe
gcatctgttcataggaaggcttctg

SEQ ID NO: 88607 - DNA, 25 bp, Artificial
  Probe
aatgctatgcttgctagactttgtc

SEQ ID NO: 88608 - DNA, 25 bp, Artificial
  Probe
atgggaatgcaataaaggtatgtct

SEQ ID NO: 88609 - DNA, 25 bp, Artificial
  Probe
gatgggaatgcaataaaggtatgtc

SEQ ID NO: 88610 - DNA, 25 bp, Artificial
  Probe
ctctgccttcaatcctcttatctac

SEQ ID NO: 88611 - DNA, 25 bp, Artificial
  Probe
cttcaatcctcttatctactgtcgg

SEQ ID NO: 88612 - DNA, 25 bp, Artificial
  Probe
ccttcaatcctcttatctactgtcg

SEQ ID NO: 88613 - DNA, 25 bp, Artificial
  Probe
gccttcaatcctcttatctactgtc

SEQ ID NO: 88614 - DNA, 25 bp, Artificial
  Probe
ctgccttcaatcctcttatctactg

SEQ ID NO: 88615 - DNA, 25 bp, Artificial
  Probe
tctgccttcaatcctcttatctact

SEQ ID NO: 88616 - DNA, 25 bp, Artificial
  Probe
actctgccttcaatcctcttatcta

SEQ ID NO: 88617 - DNA, 25 bp, Artificial
  Probe
tatgctatcgcttcctctatcgtat

SEQ ID NO: 88618 - DNA, 25 bp, Artificial
  Probe
tgccttcaatcctcttatctactgt

SEQ ID NO: 88619 - DNA, 25 bp, Artificial
  Probe
aactctgccttcaatcctcttatct

SEQ ID NO: 88620 - DNA, 25 bp, Artificial
  Probe
caactctgccttcaatcctcttatc

SEQ ID NO: 88621 - DNA, 25 bp, Artificial
  Probe
ctatgctatcgcttcctctatcgta

SEQ ID NO: 88622 - DNA, 25 bp, Artificial
  Probe
tcaactctgccttcaatcctcttat

SEQ ID NO: 88623 - DNA, 25 bp, Artificial
  Probe
gctatcgcttcctctatcgtatctt

SEQ ID NO: 88624 - DNA, 25 bp, Artificial
  Probe
atgctatcgcttcctctatcgtatc

SEQ ID NO: 88625 - DNA, 25 bp, Artificial
  Probe
gactctctctcactccacttattcg

SEQ ID NO: 88626 - DNA, 25 bp, Artificial
  Probe
gtcaactctgccttcaatcctctta

SEQ ID NO: 88627 - DNA, 25 bp, Artificial
  Probe
gagagcagagagagagagagaagaa

SEQ ID NO: 88628 - DNA, 25 bp, Artificial
  Probe
tatgtcaactctgccttcaatcctc

SEQ ID NO: 88629 - DNA, 25 bp, Artificial
  Probe
ctatgtcaactctgccttcaatcct

SEQ ID NO: 88630 - DNA, 25 bp, Artificial
  Probe
cctcactggtcaagtattaaggata

SEQ ID NO: 88631 - DNA, 25 bp, Artificial
  Probe
ttcaatcctcttatctactgtcgga

SEQ ID NO: 88632 - DNA, 25 bp, Artificial
  Probe
gagagagagcagagagagagagaga

SEQ ID NO: 88633 - DNA, 25 bp, Artificial
  Probe
tgctatcgcttcctctatcgtatct

SEQ ID NO: 88634 - DNA, 25 bp, Artificial
  Probe
aatcctcttatctactgtcggagtc

SEQ ID NO: 88635 - DNA, 25 bp, Artificial
  Probe
tcaatcctcttatctactgtcggag

SEQ ID NO: 88636 - DNA, 25 bp, Artificial
  Probe
ctacctcactggtcaagtattaagg

SEQ ID NO: 88637 - DNA, 25 bp, Artificial
  Probe
tgtatctacctcactggtcaagtat

SEQ ID NO: 88638 - DNA, 25 bp, Artificial
  Probe
atgtatctacctcactggtcaagta

SEQ ID NO: 88639 - DNA, 25 bp, Artificial
  Probe
tacctcactggtcaagtattaagga

SEQ ID NO: 88640 - DNA, 25 bp, Artificial
  Probe
ctcactggtcaagtattaaggataa

SEQ ID NO: 88641 - DNA, 25 bp, Artificial
  Probe
caatcctcttatctactgtcggagt

SEQ ID NO: 88642 - DNA, 25 bp, Artificial
  Probe
tctacctcactggtcaagtattaag

SEQ ID NO: 88643 - DNA, 25 bp, Artificial
  Probe
gtatctacctcactggtcaagtatt

SEQ ID NO: 88644 - DNA, 25 bp, Artificial
  Probe
gagagagcagagagagagagagaag

SEQ ID NO: 88645 - DNA, 25 bp, Artificial
  Probe
acctcactggtcaagtattaaggat

SEQ ID NO: 88646 - DNA, 25 bp, Artificial
  Probe
gagagaagaaagagagagagagaga

SEQ ID NO: 88647 - DNA, 25 bp, Artificial
  Probe
agagagaagaaagagagagagagag

SEQ ID NO: 88648 - DNA, 25 bp, Artificial
  Probe
gagagagaagaaagagagagagaga

SEQ ID NO: 88649 - DNA, 25 bp, Artificial
  Probe
agagagagaagaaagagagagagag

SEQ ID NO: 88650 - DNA, 25 bp, Artificial
  Probe
gagagagagaagaaagagagagaga

SEQ ID NO: 88651 - DNA, 25 bp, Artificial
  Probe
agagagagagaagaaagagagagag

SEQ ID NO: 88652 - DNA, 25 bp, Artificial
  Probe
gagagagagagaagaaagagagaga

SEQ ID NO: 88653 - DNA, 25 bp, Artificial
  Probe
agagagagagagaagaaagagagag

SEQ ID NO: 88654 - DNA, 25 bp, Artificial
  Probe
gagagagagagagaagaaagagaga

SEQ ID NO: 88655 - DNA, 25 bp, Artificial
  Probe
gtaatctctaccagaagttaggacc

SEQ ID NO: 88656 - DNA, 25 bp, Artificial
  Probe
tgtaatctctaccagaagttaggac

SEQ ID NO: 88657 - DNA, 25 bp, Artificial
  Probe
ttgtaatctctaccagaagttagga

SEQ ID NO: 88658 - DNA, 25 bp, Artificial
  Probe
gttgtaatctctaccagaagttagg

SEQ ID NO: 88659 - DNA, 25 bp, Artificial
  Probe
aaccttcctgtctcagtcattctaa

SEQ ID NO: 88660 - DNA, 25 bp, Artificial
  Probe
aatattactgagattcggaagctgg

SEQ ID NO: 88661 - DNA, 25 bp, Artificial
  Probe
caaccttcctgtctcagtcattcta

SEQ ID NO: 88662 - DNA, 25 bp, Artificial
  Probe
agttgtaatctctaccagaagttag

SEQ ID NO: 88663 - DNA, 25 bp, Artificial
  Probe
gccaggacaatatggaagaagaatt

SEQ ID NO: 88664 - DNA, 25 bp, Artificial
  Probe
atggcaaaggaattaagagaaggaa

SEQ ID NO: 88665 - DNA, 25 bp, Artificial
  Probe
aatggcaaaggaattaagagaagga

SEQ ID NO: 88666 - DNA, 25 bp, Artificial
  Probe
caatggcaaaggaattaagagaagg

SEQ ID NO: 88667 - DNA, 25 bp, Artificial
  Probe
catcaatggcaaaggaattaagaga

SEQ ID NO: 88668 - DNA, 25 bp, Artificial
  Probe
tcaatggcaaaggaattaagagaag

SEQ ID NO: 88669 - DNA, 25 bp, Artificial
  Probe
caggacaatatggaagaagaattgc

SEQ ID NO: 88670 - DNA, 25 bp, Artificial
  Probe
ccaggacaatatggaagaagaattg

SEQ ID NO: 88671 - DNA, 25 bp, Artificial
  Probe
caaaggaattaagagaaggaagcat

SEQ ID NO: 88672 - DNA, 25 bp, Artificial
  Probe
taatctctaccagaagttaggaccc

SEQ ID NO: 88673 - DNA, 25 bp, Artificial
  Probe
tggcaaaggaattaagagaaggaag

SEQ ID NO: 88674 - DNA, 25 bp, Artificial
  Probe
gcatcaatggcaaaggaattaagag

SEQ ID NO: 88675 - DNA, 25 bp, Artificial
  Probe
gagcatcaatggcaaaggaattaag

SEQ ID NO: 88676 - DNA, 25 bp, Artificial
  Probe
aagttgtaatctctaccagaagtta

SEQ ID NO: 88677 - DNA, 25 bp, Artificial
  Probe
atcaatggcaaaggaattaagagaa

SEQ ID NO: 88678 - DNA, 25 bp, Artificial
  Probe
agcatcaatggcaaaggaattaaga

SEQ ID NO: 88679 - DNA, 25 bp, Artificial
  Probe
agagcatcaatggcaaaggaattaa

SEQ ID NO: 88680 - DNA, 25 bp, Artificial
  Probe
tgccaggacaatatggaagaagaat

SEQ ID NO: 88681 - DNA, 25 bp, Artificial
  Probe
atgccaggacaatatggaagaagaa

SEQ ID NO: 88682 - DNA, 25 bp, Artificial
  Probe
aatgccaggacaatatggaagaaga

SEQ ID NO: 88683 - DNA, 25 bp, Artificial
  Probe
gcaaaggaattaagagaaggaagca

SEQ ID NO: 88684 - DNA, 25 bp, Artificial
  Probe
gagagcatcaatggcaaaggaatta

SEQ ID NO: 88685 - DNA, 25 bp, Artificial
  Probe
caaagttgtaatctctaccagaagt

SEQ ID NO: 88686 - DNA, 25 bp, Artificial
  Probe
aaaggaattaagagaaggaagcatg

SEQ ID NO: 88687 - DNA, 25 bp, Artificial
  Probe
aactgctaagtcataccaggaaatt

SEQ ID NO: 88688 - DNA, 25 bp, Artificial
  Probe
aaactgctaagtcataccaggaaat

SEQ ID NO: 88689 - DNA, 25 bp, Artificial
  Probe
atattactgagattcggaagctggc

SEQ ID NO: 88690 - DNA, 25 bp, Artificial
  Probe
cttccagacaaagagagcatcaatg

SEQ ID NO: 88691 - DNA, 25 bp, Artificial
  Probe
atctctaccagaagttaggacccta

SEQ ID NO: 88692 - DNA, 25 bp, Artificial
  Probe
ctaccagaagttaggaccctactac

SEQ ID NO: 88693 - DNA, 25 bp, Artificial
  Probe
tctaccagaagttaggaccctacta

SEQ ID NO: 88694 - DNA, 25 bp, Artificial
  Probe
gcaaatattactgagattcggaagc

SEQ ID NO: 88695 - DNA, 25 bp, Artificial
  Probe
ggcaaaggaattaagagaaggaagc

SEQ ID NO: 88696 - DNA, 25 bp, Artificial
  Probe
accttcctgtctcagtcattctaaa

SEQ ID NO: 88697 - DNA, 25 bp, Artificial
  Probe
taccagaagttaggaccctactact

SEQ ID NO: 88698 - DNA, 25 bp, Artificial
  Probe
aatctctaccagaagttaggaccct

SEQ ID NO: 88699 - DNA, 25 bp, Artificial
  Probe
agcaaatattactgagattcggaag

SEQ ID NO: 88700 - DNA, 25 bp, Artificial
  Probe
aatcacaactgctgtatagagactt

SEQ ID NO: 88701 - DNA, 25 bp, Artificial
  Probe
taatcacaactgctgtatagagact

SEQ ID NO: 88702 - DNA, 25 bp, Artificial
  Probe
ggtgttaatcacaactgctgtatag

SEQ ID NO: 88703 - DNA, 25 bp, Artificial
  Probe
tggtgttaatcacaactgctgtata

SEQ ID NO: 88704 - DNA, 25 bp, Artificial
  Probe
tgttaatcacaactgctgtatagag

SEQ ID NO: 88705 - DNA, 25 bp, Artificial
  Probe
ttaatcacaactgctgtatagagac

SEQ ID NO: 88706 - DNA, 25 bp, Artificial
  Probe
gttaatcacaactgctgtatagaga

SEQ ID NO: 88707 - DNA, 25 bp, Artificial
  Probe
gtgttaatcacaactgctgtataga

SEQ ID NO: 88708 - DNA, 25 bp, Artificial
  Probe
ctggtgttaatcacaactgctgtat

SEQ ID NO: 88709 - DNA, 25 bp, Artificial
  Probe
gaagactgacagcactgaatctagt

SEQ ID NO: 88710 - DNA, 25 bp, Artificial
  Probe
gctcatcttctattctttctgcttc

SEQ ID NO: 88711 - DNA, 25 bp, Artificial
  Probe
ttaagtagcatccgttccattgtcc

SEQ ID NO: 88712 - DNA, 25 bp, Artificial
  Probe
tgtatttaagtagcatccgttccat

SEQ ID NO: 88713 - DNA, 25 bp, Artificial
  Probe
atttaagtagcatccgttccattgt

SEQ ID NO: 88714 - DNA, 25 bp, Artificial
  Probe
tatttaagtagcatccgttccattg

SEQ ID NO: 88715 - DNA, 25 bp, Artificial
  Probe
gtatttaagtagcatccgttccatt

SEQ ID NO: 88716 - DNA, 25 bp, Artificial
  Probe
atgtatttaagtagcatccgttcca

SEQ ID NO: 88717 - DNA, 25 bp, Artificial
  Probe
ttcacatcacggagaaattggtaat

SEQ ID NO: 88718 - DNA, 25 bp, Artificial
  Probe
attcacatcacggagaaattggtaa

SEQ ID NO: 88719 - DNA, 25 bp, Artificial
  Probe
aaagtaaattcacatcacggagaaa

SEQ ID NO: 88720 - DNA, 25 bp, Artificial
  Probe
aaagggaaatccaagcattaaagat

SEQ ID NO: 88721 - DNA, 25 bp, Artificial
  Probe
tttaagtagcatccgttccattgtc

SEQ ID NO: 88722 - DNA, 25 bp, Artificial
  Probe
aagtaaattcacatcacggagaaat

SEQ ID NO: 88723 - DNA, 25 bp, Artificial
  Probe
ctcatcttctattctttctgcttct

SEQ ID NO: 88724 - DNA, 25 bp, Artificial
  Probe
cgaagactgacagcactgaatctag

SEQ ID NO: 88725 - DNA, 25 bp, Artificial
  Probe
taaattcacatcacggagaaattgg

SEQ ID NO: 88726 - DNA, 25 bp, Artificial
  Probe
atcacaactgctgtatagagacttt

SEQ ID NO: 88727 - DNA, 25 bp, Artificial
  Probe
taaagtaaattcacatcacggagaa

SEQ ID NO: 88728 - DNA, 25 bp, Artificial
  Probe
ataaagtaaattcacatcacggaga

SEQ ID NO: 88729 - DNA, 25 bp, Artificial
  Probe
tcacatcacggagaaattggtaatt

SEQ ID NO: 88730 - DNA, 25 bp, Artificial
  Probe
aattcacatcacggagaaattggta

SEQ ID NO: 88731 - DNA, 25 bp, Artificial
  Probe
catgtatttaagtagcatccgttcc

SEQ ID NO: 88732 - DNA, 25 bp, Artificial
  Probe
atcttctattctttctgcttcttca

SEQ ID NO: 88733 - DNA, 25 bp, Artificial
  Probe
tcatcttctattctttctgcttctt

SEQ ID NO: 88734 - DNA, 25 bp, Artificial
  Probe
tcacaactgctgtatagagacttta

SEQ ID NO: 88735 - DNA, 25 bp, Artificial
  Probe
gtaaattcacatcacggagaaattg

SEQ ID NO: 88736 - DNA, 25 bp, Artificial
  Probe
ggaacagaaaggaactgagactaaa

SEQ ID NO: 88737 - DNA, 25 bp, Artificial
  Probe
agtaaattcacatcacggagaaatt

SEQ ID NO: 88738 - DNA, 25 bp, Artificial
  Probe
taagtagcatccgttccattgtcct

SEQ ID NO: 88739 - DNA, 25 bp, Artificial
  Probe
ccatatttgatagtacacagtcctc

SEQ ID NO: 88740 - DNA, 25 bp, Artificial
  Probe
gaacagaaaggaactgagactaaag

SEQ ID NO: 88741 - DNA, 25 bp, Artificial
  Probe
catcttctattctttctgcttcttc

SEQ ID NO: 88742 - DNA, 25 bp, Artificial
  Probe
aacagaaaggaactgagactaaagc

SEQ ID NO: 88743 - DNA, 25 bp, Artificial
  Probe
tagcatccgttccattgtcctttaa

SEQ ID NO: 88744 - DNA, 25 bp, Artificial
  Probe
aaattcacatcacggagaaattggt

SEQ ID NO: 88745 - DNA, 25 bp, Artificial
  Probe
tcaaatacatccctcaggtaaagac

SEQ ID NO: 88746 - DNA, 25 bp, Artificial
  Probe
ccatcaaatacatccctcaggtaaa

SEQ ID NO: 88747 - DNA, 25 bp, Artificial
  Probe
atcaaatacatccctcaggtaaaga

SEQ ID NO: 88748 - DNA, 25 bp, Artificial
  Probe
catcaaatacatccctcaggtaaag

SEQ ID NO: 88749 - DNA, 25 bp, Artificial
  Probe
cccatcaaatacatccctcaggtaa

SEQ ID NO: 88750 - DNA, 25 bp, Artificial
  Probe
ctgattggtgtatggtggagactgg

SEQ ID NO: 88751 - DNA, 25 bp, Artificial
  Probe
cctgattggtgtatggtggagactg

SEQ ID NO: 88752 - DNA, 25 bp, Artificial
  Probe
cactgacatccctgattggtgtatg

SEQ ID NO: 88753 - DNA, 25 bp, Artificial
  Probe
ctgacatccctgattggtgtatggt

SEQ ID NO: 88754 - DNA, 25 bp, Artificial
  Probe
actgacatccctgattggtgtatgg

SEQ ID NO: 88755 - DNA, 25 bp, Artificial
  Probe
ctcttggtaagctccaggatctgac

SEQ ID NO: 88756 - DNA, 25 bp, Artificial
  Probe
tgacatccctgattggtgtatggtg

SEQ ID NO: 88757 - DNA, 25 bp, Artificial
  Probe
ccactgacatccctgattggtgtat

SEQ ID NO: 88758 - DNA, 25 bp, Artificial
  Probe
gacatccctgattggtgtatggtgg

SEQ ID NO: 88759 - DNA, 25 bp, Artificial
  Probe
catccctgattggtgtatggtggag

SEQ ID NO: 88760 - DNA, 25 bp, Artificial
  Probe
atccctgattggtgtatggtggaga

SEQ ID NO: 88761 - DNA, 25 bp, Artificial
  Probe
tccactgacatccctgattggtgta

SEQ ID NO: 88762 - DNA, 25 bp, Artificial
  Probe
tttgctcttggtaagctccaggatc

SEQ ID NO: 88763 - DNA, 25 bp, Artificial
  Probe
ctttgctcttggtaagctccaggat

SEQ ID NO: 88764 - DNA, 25 bp, Artificial
  Probe
cttgcactttgctcttggtaagctc

SEQ ID NO: 88765 - DNA, 25 bp, Artificial
  Probe
cgtcttgcactttgctcttggtaag

SEQ ID NO: 88766 - DNA, 25 bp, Artificial
  Probe
gtcttgcactttgctcttggtaagc

SEQ ID NO: 88767 - DNA, 25 bp, Artificial
  Probe
tcttgcactttgctcttggtaagct

SEQ ID NO: 88768 - DNA, 25 bp, Artificial
  Probe
tcttcaagtctgtgatgatcttctt

SEQ ID NO: 88769 - DNA, 25 bp, Artificial
  Probe
ttcttcaagtctgtgatgatcttct

SEQ ID NO: 88770 - DNA, 25 bp, Artificial
  Probe
atataactctgcactacttctctgg

SEQ ID NO: 88771 - DNA, 25 bp, Artificial
  Probe
acagtgaagatttggaaaccctaat

SEQ ID NO: 88772 - DNA, 25 bp, Artificial
  Probe
gggaagaaacaaacagagagagtaa

SEQ ID NO: 88773 - DNA, 25 bp, Artificial
  Probe
tgaagatttggaaaccctaataccc

SEQ ID NO: 88774 - DNA, 25 bp, Artificial
  Probe
gtgaagatttggaaaccctaatacc

SEQ ID NO: 88775 - DNA, 25 bp, Artificial
  Probe
caaatgtttactcaccttatgccat

SEQ ID NO: 88776 - DNA, 25 bp, Artificial
  Probe
ccaagcaaatgtttactcaccttat

SEQ ID NO: 88777 - DNA, 25 bp, Artificial
  Probe
ggaagaaacaaacagagagagtaaa

SEQ ID NO: 88778 - DNA, 25 bp, Artificial
  Probe
accaagcaaatgtttactcacctta

SEQ ID NO: 88779 - DNA, 25 bp, Artificial
  Probe
tgggaagaaacaaacagagagagta

SEQ ID NO: 88780 - DNA, 25 bp, Artificial
  Probe
agtgaagatttggaaaccctaatac

SEQ ID NO: 88781 - DNA, 25 bp, Artificial
  Probe
cagtgaagatttggaaaccctaata

SEQ ID NO: 88782 - DNA, 25 bp, Artificial
  Probe
caagcaaatgtttactcaccttatg

SEQ ID NO: 88783 - DNA, 25 bp, Artificial
  Probe
cacagtgaagatttggaaaccctaa

SEQ ID NO: 88784 - DNA, 25 bp, Artificial
  Probe
tataactctgcactacttctctggc

SEQ ID NO: 88785 - DNA, 25 bp, Artificial
  Probe
aaccaagcaaatgtttactcacctt

SEQ ID NO: 88786 - DNA, 25 bp, Artificial
  Probe
ttgttgtatttcttcaagtctgtga

SEQ ID NO: 88787 - DNA, 25 bp, Artificial
  Probe
cttgggaagaaacaaacagagagag

SEQ ID NO: 88788 - DNA, 25 bp, Artificial
  Probe
aaatgtttactcaccttatgccatg

SEQ ID NO: 88789 - DNA, 25 bp, Artificial
  Probe
tgttgtatttcttcaagtctgtgat

SEQ ID NO: 88790 - DNA, 25 bp, Artificial
  Probe
aagtctgtgatgatcttcttgtggc

SEQ ID NO: 88791 - DNA, 25 bp, Artificial
  Probe
gttgtatttcttcaagtctgtgatg

SEQ ID NO: 88792 - DNA, 25 bp, Artificial
  Probe
ttgtatttcttcaagtctgtgatga

SEQ ID NO: 88793 - DNA, 25 bp, Artificial
  Probe
tttgttgtatttcttcaagtctgtg

SEQ ID NO: 88794 - DNA, 25 bp, Artificial
  Probe
acacagtgaagatttggaaacccta

SEQ ID NO: 88795 - DNA, 25 bp, Artificial
  Probe
tctatttccacacacagtgaagatt

SEQ ID NO: 88796 - DNA, 25 bp, Artificial
  Probe
tttcttcaagtctgtgatgatcttc

SEQ ID NO: 88797 - DNA, 25 bp, Artificial
  Probe
tatttccacacacagtgaagatttg

SEQ ID NO: 88798 - DNA, 25 bp, Artificial
  Probe
ctatttccacacacagtgaagattt

SEQ ID NO: 88799 - DNA, 25 bp, Artificial
  Probe
tgtatttcttcaagtctgtgatgat

SEQ ID NO: 88800 - DNA, 25 bp, Artificial
  Probe
catctatttccacacacagtgaaga

SEQ ID NO: 88801 - DNA, 25 bp, Artificial
  Probe
ttgggaagaaacaaacagagagagt

SEQ ID NO: 88802 - DNA, 25 bp, Artificial
  Probe
caaccaagcaaatgtttactcacct

SEQ ID NO: 88803 - DNA, 25 bp, Artificial
  Probe
aaagtcaagcccatctatttccaca

SEQ ID NO: 88804 - DNA, 25 bp, Artificial
  Probe
atggcaagtttagagagctataagt

SEQ ID NO: 88805 - DNA, 25 bp, Artificial
  Probe
catggcaagtttagagagctataag

SEQ ID NO: 88806 - DNA, 25 bp, Artificial
  Probe
tggcaagtttagagagctataagta

SEQ ID NO: 88807 - DNA, 25 bp, Artificial
  Probe
atttcttcaagtctgtgatgatctt

SEQ ID NO: 88808 - DNA, 25 bp, Artificial
  Probe
gaagatttggaaaccctaataccca

SEQ ID NO: 88809 - DNA, 25 bp, Artificial
  Probe
tatataactctgcactacttctctg

SEQ ID NO: 88810 - DNA, 25 bp, Artificial
  Probe
ccatctatttccacacacagtgaag

SEQ ID NO: 88811 - DNA, 25 bp, Artificial
  Probe
agagagctataagtatcttgggaag

SEQ ID NO: 88812 - DNA, 25 bp, Artificial
  Probe
ctttcctgaaatgatggcagagatc

SEQ ID NO: 88813 - DNA, 25 bp, Artificial
  Probe
ttgaattggtgtagtcttcggataa

SEQ ID NO: 88814 - DNA, 25 bp, Artificial
  Probe
tgaattggtgtagtcttcggataac

SEQ ID NO: 88815 - DNA, 25 bp, Artificial
  Probe
gacaagacaagacaagacaagactt

SEQ ID NO: 88816 - DNA, 25 bp, Artificial
  Probe
attggtgtagtcttcggataacatt

SEQ ID NO: 88817 - DNA, 25 bp, Artificial
  Probe
aattggtgtagtcttcggataacat

SEQ ID NO: 88818 - DNA, 25 bp, Artificial
  Probe
gaattggtgtagtcttcggataaca

SEQ ID NO: 88819 - DNA, 25 bp, Artificial
  Probe
ccactaagatacatcatagctccat

SEQ ID NO: 88820 - DNA, 25 bp, Artificial
  Probe
ggacaagacaagacaagacaagact

SEQ ID NO: 88821 - DNA, 25 bp, Artificial
  Probe
aggacaagacaagacaagacaagac

SEQ ID NO: 88822 - DNA, 25 bp, Artificial
  Probe
caggacaagacaagacaagacaaga

SEQ ID NO: 88823 - DNA, 25 bp, Artificial
  Probe
cactaagatacatcatagctccatg

SEQ ID NO: 88824 - DNA, 25 bp, Artificial
  Probe
caagacaagacaagactttcagaac

SEQ ID NO: 88825 - DNA, 25 bp, Artificial
  Probe
caagacaagacaagacaagactttc

SEQ ID NO: 88826 - DNA, 25 bp, Artificial
  Probe
acaagacaagacaagactttcagaa

SEQ ID NO: 88827 - DNA, 25 bp, Artificial
  Probe
aagacaagacaagacaagactttca

SEQ ID NO: 88828 - DNA, 25 bp, Artificial
  Probe
gctctcatacccactaagatacatc

SEQ ID NO: 88829 - DNA, 25 bp, Artificial
  Probe
acaagacaagacaagacaagacttt

SEQ ID NO: 88830 - DNA, 25 bp, Artificial
  Probe
cggtggtttatgttgactctaacta

SEQ ID NO: 88831 - DNA, 25 bp, Artificial
  Probe
tttgaattggtgtagtcttcggata

SEQ ID NO: 88832 - DNA, 25 bp, Artificial
  Probe
ggaacaagagagatacccatttcta

SEQ ID NO: 88833 - DNA, 25 bp, Artificial
  Probe
gacaagacaagacaagactttcaga

SEQ ID NO: 88834 - DNA, 25 bp, Artificial
  Probe
agacaagacaagacaagactttcag

SEQ ID NO: 88835 - DNA, 25 bp, Artificial
  Probe
actttgacattcatttacagacacc

SEQ ID NO: 88836 - DNA, 25 bp, Artificial
  Probe
tcactaagggtaactttgacattca

SEQ ID NO: 88837 - DNA, 25 bp, Artificial
  Probe
ctctcatacccactaagatacatca

SEQ ID NO: 88838 - DNA, 25 bp, Artificial
  Probe
ttagagaggagacaaagacaagcaa

SEQ ID NO: 88839 - DNA, 25 bp, Artificial
  Probe
tttagagaggagacaaagacaagca

SEQ ID NO: 88840 - DNA, 25 bp, Artificial
  Probe
catacccactaagatacatcatagc

SEQ ID NO: 88841 - DNA, 25 bp, Artificial
  Probe
ctttgacattcatttacagacaccg

SEQ ID NO: 88842 - DNA, 25 bp, Artificial
  Probe
ggctctcatacccactaagatacat

SEQ ID NO: 88843 - DNA, 25 bp, Artificial
  Probe
aagacaagacaagactttcagaacg

SEQ ID NO: 88844 - DNA, 25 bp, Artificial
  Probe
cactaagggtaactttgacattcat

SEQ ID NO: 88845 - DNA, 25 bp, Artificial
  Probe
ttggtgtagtcttcggataacattt

SEQ ID NO: 88846 - DNA, 25 bp, Artificial
  Probe
ggtggtttatgttgactctaactaa

SEQ ID NO: 88847 - DNA, 25 bp, Artificial
  Probe
tggtgtagtcttcggataacattta

SEQ ID NO: 88848 - DNA, 25 bp, Artificial
  Probe
atcactaagggtaactttgacattc

SEQ ID NO: 88849 - DNA, 25 bp, Artificial
  Probe
tcggtggtttatgttgactctaact

SEQ ID NO: 88850 - DNA, 25 bp, Artificial
  Probe
tagagaggagacaaagacaagcaag

SEQ ID NO: 88851 - DNA, 25 bp, Artificial
  Probe
tctcatacccactaagatacatcat

SEQ ID NO: 88852 - DNA, 25 bp, Artificial
  Probe
gacaagacaagactttcagaacgac

SEQ ID NO: 88853 - DNA, 25 bp, Artificial
  Probe
aactttgacattcatttacagacac

SEQ ID NO: 88854 - DNA, 25 bp, Artificial
  Probe
actaagggtaactttgacattcatt

SEQ ID NO: 88855 - DNA, 25 bp, Artificial
  Probe
agacaagacaagactttcagaacga

SEQ ID NO: 88856 - DNA, 25 bp, Artificial
  Probe
ggtgtagtcttcggataacatttat

SEQ ID NO: 88857 - DNA, 25 bp, Artificial
  Probe
gaacaagagagatacccatttctat

SEQ ID NO: 88858 - DNA, 25 bp, Artificial
  Probe
agccacaagactccaatgattaatt

SEQ ID NO: 88859 - DNA, 25 bp, Artificial
  Probe
gagccacaagactccaatgattaat

SEQ ID NO: 88860 - DNA, 25 bp, Artificial
  Probe
gatgcctacctggtacagaatatca

SEQ ID NO: 88861 - DNA, 25 bp, Artificial
  Probe
atgcctacctggtacagaatatcac

SEQ ID NO: 88862 - DNA, 25 bp, Artificial
  Probe
ggatgcctacctggtacagaatatc

SEQ ID NO: 88863 - DNA, 25 bp, Artificial
  Probe
gtgttggacagtatatccgtctacc

SEQ ID NO: 88864 - DNA, 25 bp, Artificial
  Probe
ggtgttggacagtatatccgtctac

SEQ ID NO: 88865 - DNA, 25 bp, Artificial
  Probe
cctacctggtacagaatatcacctg

SEQ ID NO: 88866 - DNA, 25 bp, Artificial
  Probe
cgagccacaagactccaatgattaa

SEQ ID NO: 88867 - DNA, 25 bp, Artificial
  Probe
gccacaagactccaatgattaattt

SEQ ID NO: 88868 - DNA, 25 bp, Artificial
  Probe
tggatgcctacctggtacagaatat

SEQ ID NO: 88869 - DNA, 25 bp, Artificial
  Probe
ctggatgcctacctggtacagaata

SEQ ID NO: 88870 - DNA, 25 bp, Artificial
  Probe
attgcaggaggaaagtggatagtta

SEQ ID NO: 88871 - DNA, 25 bp, Artificial
  Probe
tgttggacagtatatccgtctaccg

SEQ ID NO: 88872 - DNA, 25 bp, Artificial
  Probe
aaacttctgagtgtgcatgaatttg

SEQ ID NO: 88873 - DNA, 25 bp, Artificial
  Probe
ttctgagtgtgcatgaatttgaagt

SEQ ID NO: 88874 - DNA, 25 bp, Artificial
  Probe
gcctacctggtacagaatatcacct

SEQ ID NO: 88875 - DNA, 25 bp, Artificial
  Probe
tctgagtgtgcatgaatttgaagtc

SEQ ID NO: 88876 - DNA, 25 bp, Artificial
  Probe
taatttaagaaatggtcttcccgtc

SEQ ID NO: 88877 - DNA, 25 bp, Artificial
  Probe
acttctgagtgtgcatgaatttgaa

SEQ ID NO: 88878 - DNA, 25 bp, Artificial
  Probe
aacttctgagtgtgcatgaatttga

SEQ ID NO: 88879 - DNA, 25 bp, Artificial
  Probe
tgcctacctggtacagaatatcacc

SEQ ID NO: 88880 - DNA, 25 bp, Artificial
  Probe
ttgcaggaggaaagtggatagttag

SEQ ID NO: 88881 - DNA, 25 bp, Artificial
  Probe
aatttaagaaatggtcttcccgtcc

SEQ ID NO: 88882 - DNA, 25 bp, Artificial
  Probe
ttaatttaagaaatggtcttcccgt

SEQ ID NO: 88883 - DNA, 25 bp, Artificial
  Probe
tgagtgtgcatgaatttgaagtcaa

SEQ ID NO: 88884 - DNA, 25 bp, Artificial
  Probe
ccacaagactccaatgattaattta

SEQ ID NO: 88885 - DNA, 25 bp, Artificial
  Probe
ctgagtgtgcatgaatttgaagtca

SEQ ID NO: 88886 - DNA, 25 bp, Artificial
  Probe
agaagacaacgactgccctgatatt

SEQ ID NO: 88887 - DNA, 25 bp, Artificial
  Probe
caggaggaaagtggatagttagcta

SEQ ID NO: 88888 - DNA, 25 bp, Artificial
  Probe
gaagacaacgactgccctgatattg

SEQ ID NO: 88889 - DNA, 25 bp, Artificial
  Probe
cattgcaggaggaaagtggatagtt

SEQ ID NO: 88890 - DNA, 25 bp, Artificial
  Probe
ctacctggtacagaatatcacctgt

SEQ ID NO: 88891 - DNA, 25 bp, Artificial
  Probe
aacagatgctgagtttgtgtgtgaa

SEQ ID NO: 88892 - DNA, 25 bp, Artificial
  Probe
gggtgttggacagtatatccgtcta

SEQ ID NO: 88893 - DNA, 25 bp, Artificial
  Probe
tacctggtacagaatatcacctgtg

SEQ ID NO: 88894 - DNA, 25 bp, Artificial
  Probe
catgaatttgaagtcaaaggagacg

SEQ ID NO: 88895 - DNA, 25 bp, Artificial
  Probe
aagtggatagttagctattcttggg

SEQ ID NO: 88896 - DNA, 25 bp, Artificial
  Probe
aggaggaaagtggatagttagctat

SEQ ID NO: 88897 - DNA, 25 bp, Artificial
  Probe
ggatagttagctattcttgggtgat

SEQ ID NO: 88898 - DNA, 25 bp, Artificial
  Probe
ggaggaaagtggatagttagctatt

SEQ ID NO: 88899 - DNA, 25 bp, Artificial
  Probe
gcatgaatttgaagtcaaaggagac

SEQ ID NO: 88900 - DNA, 25 bp, Artificial
  Probe
tggatagttagctattcttgggtga

SEQ ID NO: 88901 - DNA, 25 bp, Artificial
  Probe
gtggatagttagctattcttgggtg

SEQ ID NO: 88902 - DNA, 25 bp, Artificial
  Probe
agtggatagttagctattcttgggt

SEQ ID NO: 88903 - DNA, 25 bp, Artificial
  Probe
tatcgttcctcagtcacctataagt

SEQ ID NO: 88904 - DNA, 25 bp, Artificial
  Probe
acatatcgttcctcagtcacctata

SEQ ID NO: 88905 - DNA, 25 bp, Artificial
  Probe
attcttcacatatcgttcctcagtc

SEQ ID NO: 88906 - DNA, 25 bp, Artificial
  Probe
catatcgttcctcagtcacctataa

SEQ ID NO: 88907 - DNA, 25 bp, Artificial
  Probe
aattcttcacatatcgttcctcagt

SEQ ID NO: 88908 - DNA, 25 bp, Artificial
  Probe
atatcgttcctcagtcacctataag

SEQ ID NO: 88909 - DNA, 25 bp, Artificial
  Probe
ttcttcacatatcgttcctcagtca

SEQ ID NO: 88910 - DNA, 25 bp, Artificial
  Probe
aagcacaatggtagagaggaagaat

SEQ ID NO: 88911 - DNA, 25 bp, Artificial
  Probe
cacatatcgttcctcagtcacctat

SEQ ID NO: 88912 - DNA, 25 bp, Artificial
  Probe
agcacaatggtagagaggaagaatt

SEQ ID NO: 88913 - DNA, 25 bp, Artificial
  Probe
tgaatgtgaagaaggatacagactg

SEQ ID NO: 88914 - DNA, 25 bp, Artificial
  Probe
atgaatgtgaagaaggatacagact

SEQ ID NO: 88915 - DNA, 25 bp, Artificial
  Probe
gcactgatattccagacattcctaa

SEQ ID NO: 88916 - DNA, 25 bp, Artificial
  Probe
gaatgtgaagaaggatacagactgg

SEQ ID NO: 88917 - DNA, 25 bp, Artificial
  Probe
tcttcacatatcgttcctcagtcac

SEQ ID NO: 88918 - DNA, 25 bp, Artificial
  Probe
gaagcacaatggtagagaggaagaa

SEQ ID NO: 88919 - DNA, 25 bp, Artificial
  Probe
ctgacaacgactgtacttacttctt

SEQ ID NO: 88920 - DNA, 25 bp, Artificial
  Probe
atgtgaagaaggatacagactggtt

SEQ ID NO: 88921 - DNA, 25 bp, Artificial
  Probe
aatgtgaagaaggatacagactggt

SEQ ID NO: 88922 - DNA, 25 bp, Artificial
  Probe
aacaattacagctccagatagacaa

SEQ ID NO: 88923 - DNA, 25 bp, Artificial
  Probe
acaattacagctccagatagacaag

SEQ ID NO: 88924 - DNA, 25 bp, Artificial
  Probe
ttaattctggattcaagcataccta

SEQ ID NO: 88925 - DNA, 25 bp, Artificial
  Probe
gaagaaggatacagactggttggag

SEQ ID NO: 88926 - DNA, 25 bp, Artificial
  Probe
attctggattcaagcatacctataa

SEQ ID NO: 88927 - DNA, 25 bp, Artificial
  Probe
tcacatatcgttcctcagtcaccta

SEQ ID NO: 88928 - DNA, 25 bp, Artificial
  Probe
caattacagctccagatagacaagg

SEQ ID NO: 88929 - DNA, 25 bp, Artificial
  Probe
aattctggattcaagcatacctata

SEQ ID NO: 88930 - DNA, 25 bp, Artificial
  Probe
taattctggattcaagcatacctat

SEQ ID NO: 88931 - DNA, 25 bp, Artificial
  Probe
tatgaatgtgaagaaggatacagac

SEQ ID NO: 88932 - DNA, 25 bp, Artificial
  Probe
atcctgacaacgactgtacttactt

SEQ ID NO: 88933 - DNA, 25 bp, Artificial
  Probe
tctacaagctgactctggagattaa

SEQ ID NO: 88934 - DNA, 25 bp, Artificial
  Probe
atcgttcctcagtcacctataagtg

SEQ ID NO: 88935 - DNA, 25 bp, Artificial
  Probe
aagaaggatacagactggttggaga

SEQ ID NO: 88936 - DNA, 25 bp, Artificial
  Probe
attaattctggattcaagcatacct

SEQ ID NO: 88937 - DNA, 25 bp, Artificial
  Probe
gtgtaaggagatatgctgtccagta

SEQ ID NO: 88938 - DNA, 25 bp, Artificial
  Probe
cactgatattccagacattcctaat

SEQ ID NO: 88939 - DNA, 25 bp, Artificial
  Probe
cccaaagagtgttagagtcattcaa

SEQ ID NO: 88940 - DNA, 25 bp, Artificial
  Probe
tgtgaagaaggatacagactggttg

SEQ ID NO: 88941 - DNA, 25 bp, Artificial
  Probe
cttcacatatcgttcctcagtcacc

SEQ ID NO: 88942 - DNA, 25 bp, Artificial
  Probe
tgaagaaggatacagactggttgga

SEQ ID NO: 88943 - DNA, 25 bp, Artificial
  Probe
gtgaagaaggatacagactggttgg

SEQ ID NO: 88944 - DNA, 25 bp, Artificial
  Probe
ctacgtcagaactcaggttacatat

SEQ ID NO: 88945 - DNA, 25 bp, Artificial
  Probe
tatgtcggaaaccagagataggaaa

SEQ ID NO: 88946 - DNA, 25 bp, Artificial
  Probe
catactacgtcagaactcaggttac

SEQ ID NO: 88947 - DNA, 25 bp, Artificial
  Probe
tcatactacgtcagaactcaggtta

SEQ ID NO: 88948 - DNA, 25 bp, Artificial
  Probe
atacactatacacacacacacacac

SEQ ID NO: 88949 - DNA, 25 bp, Artificial
  Probe
catacactatacacacacacacaca

SEQ ID NO: 88950 - DNA, 25 bp, Artificial
  Probe
acatacactatacacacacacacac

SEQ ID NO: 88951 - DNA, 25 bp, Artificial
  Probe
cacatacactatacacacacacaca

SEQ ID NO: 88952 - DNA, 25 bp, Artificial
  Probe
acacatacactatacacacacacac

SEQ ID NO: 88953 - DNA, 25 bp, Artificial
  Probe
tacactatacacacacacacacaca

SEQ ID NO: 88954 - DNA, 25 bp, Artificial
  Probe
catacacaacacacacatacactac

SEQ ID NO: 88955 - DNA, 25 bp, Artificial
  Probe
atacacaacacacacatacactaca

SEQ ID NO: 88956 - DNA, 25 bp, Artificial
  Probe
acatacacaacacacacatacacta

SEQ ID NO: 88957 - DNA, 25 bp, Artificial
  Probe
ctatacgaaggtgttgaatgaggag

SEQ ID NO: 88958 - DNA, 25 bp, Artificial
  Probe
tacacaacacacacatacactacac

SEQ ID NO: 88959 - DNA, 25 bp, Artificial
  Probe
tctatacgaaggtgttgaatgagga

SEQ ID NO: 88960 - DNA, 25 bp, Artificial
  Probe
ttctatacgaaggtgttgaatgagg

SEQ ID NO: 88961 - DNA, 25 bp, Artificial
  Probe
aacacacatacacaacacacacata

SEQ ID NO: 88962 - DNA, 25 bp, Artificial
  Probe
cacatacacaacacacacatacact

SEQ ID NO: 88963 - DNA, 25 bp, Artificial
  Probe
cacacacatacactacacacacaga

SEQ ID NO: 88964 - DNA, 25 bp, Artificial
  Probe
acacatacacaacacacacatacac

SEQ ID NO: 88965 - DNA, 25 bp, Artificial
  Probe
cacacatacacaacacacacataca

SEQ ID NO: 88966 - DNA, 25 bp, Artificial
  Probe
acacacatacacaacacacacatac

SEQ ID NO: 88967 - DNA, 25 bp, Artificial
  Probe
catacactacacacacagaacacac

SEQ ID NO: 88968 - DNA, 25 bp, Artificial
  Probe
cacatacactacacacacagaacac

SEQ ID NO: 88969 - DNA, 25 bp, Artificial
  Probe
cacacatacactacacacacagaac

SEQ ID NO: 88970 - DNA, 25 bp, Artificial
  Probe
tatacgaaggtgttgaatgaggagg

SEQ ID NO: 88971 - DNA, 25 bp, Artificial
  Probe
acacacacatacactacacacacag

SEQ ID NO: 88972 - DNA, 25 bp, Artificial
  Probe
ggacattctatacgaaggtgttgaa

SEQ ID NO: 88973 - DNA, 25 bp, Artificial
  Probe
atacactacacacacagaacacaca

SEQ ID NO: 88974 - DNA, 25 bp, Artificial
  Probe
acatacactacacacacagaacaca

SEQ ID NO: 88975 - DNA, 25 bp, Artificial
  Probe
acacatacactacacacacagaaca

SEQ ID NO: 88976 - DNA, 25 bp, Artificial
  Probe
acacacatacactacacacacagaa

SEQ ID NO: 88977 - DNA, 25 bp, Artificial
  Probe
ctatacacacacacacacacacaca

SEQ ID NO: 88978 - DNA, 25 bp, Artificial
  Probe
actatacacacacacacacacacac

SEQ ID NO: 88979 - DNA, 25 bp, Artificial
  Probe
cactatacacacacacacacacaca

SEQ ID NO: 88980 - DNA, 25 bp, Artificial
  Probe
acactatacacacacacacacacac

SEQ ID NO: 88981 - DNA, 25 bp, Artificial
  Probe
tacactacacacacagaacacacaa

SEQ ID NO: 88982 - DNA, 25 bp, Artificial
  Probe
caacacacacatacactacacacac

SEQ ID NO: 88983 - DNA, 25 bp, Artificial
  Probe
cacaacacacacatacactacacac

SEQ ID NO: 88984 - DNA, 25 bp, Artificial
  Probe
aacacacacatacactacacacaca

SEQ ID NO: 88985 - DNA, 25 bp, Artificial
  Probe
acaacacacacatacactacacaca

SEQ ID NO: 88986 - DNA, 25 bp, Artificial
  Probe
acacaacacacacatacactacaca

SEQ ID NO: 88987 - DNA, 25 bp, Artificial
  Probe
attcctgtgtagttgattggattcc

SEQ ID NO: 88988 - DNA, 25 bp, Artificial
  Probe
tatacacacacacacacacacacac

SEQ ID NO: 88989 - DNA, 25 bp, Artificial
  Probe
tattcctgtgtagttgattggattc

SEQ ID NO: 88990 - DNA, 25 bp, Artificial
  Probe
acacaacacaaacatacacacatag

SEQ ID NO: 88991 - DNA, 25 bp, Artificial
  Probe
gacattctatacgaaggtgttgaat

SEQ ID NO: 88992 - DNA, 25 bp, Artificial
  Probe
cacacaacacaaacatacacacata

SEQ ID NO: 88993 - DNA, 25 bp, Artificial
  Probe
caccacctactgattgaatcctatc

SEQ ID NO: 88994 - DNA, 25 bp, Artificial
  Probe
gttatcacaatgaagccagaagaag

SEQ ID NO: 88995 - DNA, 25 bp, Artificial
  Probe
acaccacctactgattgaatcctat

SEQ ID NO: 88996 - DNA, 25 bp, Artificial
  Probe
agttatcacaatgaagccagaagaa

SEQ ID NO: 88997 - DNA, 25 bp, Artificial
  Probe
aagttatcacaatgaagccagaaga

SEQ ID NO: 88998 - DNA, 25 bp, Artificial
  Probe
cacctactgattgaatcctatccaa

SEQ ID NO: 88999 - DNA, 25 bp, Artificial
  Probe
ttatcacaatgaagccagaagaagg

SEQ ID NO: 89000 - DNA, 25 bp, Artificial
  Probe
ccacctactgattgaatcctatcca

SEQ ID NO: 89001 - DNA, 25 bp, Artificial
  Probe
accacctactgattgaatcctatcc

SEQ ID NO: 89002 - DNA, 25 bp, Artificial
  Probe
ctgtgagagcaagatactgttaata

SEQ ID NO: 89003 - DNA, 25 bp, Artificial
  Probe
gacaccacctactgattgaatccta

SEQ ID NO: 89004 - DNA, 25 bp, Artificial
  Probe
tatcacaatgaagccagaagaagga

SEQ ID NO: 89005 - DNA, 25 bp, Artificial
  Probe
tgtgagagcaagatactgttaataa

SEQ ID NO: 89006 - DNA, 25 bp, Artificial
  Probe
aagaaatctcccgaagaaatgaaga

SEQ ID NO: 89007 - DNA, 25 bp, Artificial
  Probe
atcacaatgaagccagaagaaggag

SEQ ID NO: 89008 - DNA, 25 bp, Artificial
  Probe
ttgaatcctatccaatcccaaagat

SEQ ID NO: 89009 - DNA, 25 bp, Artificial
  Probe
acctactgattgaatcctatccaat

SEQ ID NO: 89010 - DNA, 25 bp, Artificial
  Probe
gctaagaaatctcccgaagaaatga

SEQ ID NO: 89011 - DNA, 25 bp, Artificial
  Probe
aaagttatcacaatgaagccagaag

SEQ ID NO: 89012 - DNA, 25 bp, Artificial
  Probe
taagaaatctcccgaagaaatgaag

SEQ ID NO: 89013 - DNA, 25 bp, Artificial
  Probe
ctaagaaatctcccgaagaaatgaa

SEQ ID NO: 89014 - DNA, 25 bp, Artificial
  Probe
tgaatcctatccaatcccaaagatc

SEQ ID NO: 89015 - DNA, 25 bp, Artificial
  Probe
gctgtgagagcaagatactgttaat

SEQ ID NO: 89016 - DNA, 25 bp, Artificial
  Probe
agagcaagatactgttaataaagca

SEQ ID NO: 89017 - DNA, 25 bp, Artificial
  Probe
agaaatctcccgaagaaatgaagag

SEQ ID NO: 89018 - DNA, 25 bp, Artificial
  Probe
gagagcaagatactgttaataaagc

SEQ ID NO: 89019 - DNA, 25 bp, Artificial
  Probe
aaggcttcaagtactctagacaatc

SEQ ID NO: 89020 - DNA, 25 bp, Artificial
  Probe
cgctaagaaatctcccgaagaaatg

SEQ ID NO: 89021 - DNA, 25 bp, Artificial
  Probe
gagcaagatactgttaataaagcaa

SEQ ID NO: 89022 - DNA, 25 bp, Artificial
  Probe
tgatggagaagttagctatgaagaa

SEQ ID NO: 89023 - DNA, 25 bp, Artificial
  Probe
gaaggcttcaagtactctagacaat

SEQ ID NO: 89024 - DNA, 25 bp, Artificial
  Probe
ggagaagttagctatgaagaattcg

SEQ ID NO: 89025 - DNA, 25 bp, Artificial
  Probe
gcttcaagtactctagacaatctct

SEQ ID NO: 89026 - DNA, 25 bp, Artificial
  Probe
ggcttcaagtactctagacaatctc

SEQ ID NO: 89027 - DNA, 25 bp, Artificial
  Probe
aggcttcaagtactctagacaatct

SEQ ID NO: 89028 - DNA, 25 bp, Artificial
  Probe
gaaatctcccgaagaaatgaagagc

SEQ ID NO: 89029 - DNA, 25 bp, Artificial
  Probe
tagctgtgagagcaagatactgtta

SEQ ID NO: 89030 - DNA, 25 bp, Artificial
  Probe
agcaagatactgttaataaagcaaa

SEQ ID NO: 89031 - DNA, 25 bp, Artificial
  Probe
gatctagctgtgagagcaagatact

SEQ ID NO: 89032 - DNA, 25 bp, Artificial
  Probe
gagaagttagctatgaagaattcga

SEQ ID NO: 89033 - DNA, 25 bp, Artificial
  Probe
aatctcccgaagaaatgaagagcat

SEQ ID NO: 89034 - DNA, 25 bp, Artificial
  Probe
ctccgacaccacctactgattgaat

SEQ ID NO: 89035 - DNA, 25 bp, Artificial
  Probe
tggagaagttagctatgaagaattc

SEQ ID NO: 89036 - DNA, 25 bp, Artificial
  Probe
gatggagaagttagctatgaagaat

SEQ ID NO: 89037 - DNA, 25 bp, Artificial
  Probe
agctgtgagagcaagatactgttaa

SEQ ID NO: 89038 - DNA, 25 bp, Artificial
  Probe
tattgtattccacttcctgctacct

SEQ ID NO: 89039 - DNA, 25 bp, Artificial
  Probe
gtattgtattccacttcctgctacc

SEQ ID NO: 89040 - DNA, 25 bp, Artificial
  Probe
gtagtcactgtataaccttcaccta

SEQ ID NO: 89041 - DNA, 25 bp, Artificial
  Probe
agtattgtattccacttcctgctac

SEQ ID NO: 89042 - DNA, 25 bp, Artificial
  Probe
tagtcactgtataaccttcacctag

SEQ ID NO: 89043 - DNA, 25 bp, Artificial
  Probe
attgtattccacttcctgctacctg

SEQ ID NO: 89044 - DNA, 25 bp, Artificial
  Probe
cattcttctggctgctgtattgttg

SEQ ID NO: 89045 - DNA, 25 bp, Artificial
  Probe
ctctcattcttctggctgctgtatt

SEQ ID NO: 89046 - DNA, 25 bp, Artificial
  Probe
ctggtagtcactgtataaccttcac

SEQ ID NO: 89047 - DNA, 25 bp, Artificial
  Probe
tctggtagtcactgtataaccttca

SEQ ID NO: 89048 - DNA, 25 bp, Artificial
  Probe
ttctggtagtcactgtataaccttc

SEQ ID NO: 89049 - DNA, 25 bp, Artificial
  Probe
cttctggtagtcactgtataacctt

SEQ ID NO: 89050 - DNA, 25 bp, Artificial
  Probe
tcattcttctggctgctgtattgtt

SEQ ID NO: 89051 - DNA, 25 bp, Artificial
  Probe
tctcattcttctggctgctgtattg

SEQ ID NO: 89052 - DNA, 25 bp, Artificial
  Probe
ccttctggtagtcactgtataacct

SEQ ID NO: 89053 - DNA, 25 bp, Artificial
  Probe
ggtagtcactgtataaccttcacct

SEQ ID NO: 89054 - DNA, 25 bp, Artificial
  Probe
tggtagtcactgtataaccttcacc

SEQ ID NO: 89055 - DNA, 25 bp, Artificial
  Probe
tgctgtattgttgggtttcttcttt

SEQ ID NO: 89056 - DNA, 25 bp, Artificial
  Probe
ctcattcttctggctgctgtattgt

SEQ ID NO: 89057 - DNA, 25 bp, Artificial
  Probe
tctgaagaaagaatggcactagaaa

SEQ ID NO: 89058 - DNA, 25 bp, Artificial
  Probe
ctctgaagaaagaatggcactagaa

SEQ ID NO: 89059 - DNA, 25 bp, Artificial
  Probe
ctgctgtattgttgggtttcttctt

SEQ ID NO: 89060 - DNA, 25 bp, Artificial
  Probe
gctgacggaggaaagtattgtattc

SEQ ID NO: 89061 - DNA, 25 bp, Artificial
  Probe
atcctctgaagaaagaatggcacta

SEQ ID NO: 89062 - DNA, 25 bp, Artificial
  Probe
gaatttcgcatcatcctttgaattg

SEQ ID NO: 89063 - DNA, 25 bp, Artificial
  Probe
acctgaactatttaatgttgtgtca

SEQ ID NO: 89064 - DNA, 25 bp, Artificial
  Probe
gtattcagtgtgaggtggtgtttac

SEQ ID NO: 89065 - DNA, 25 bp, Artificial
  Probe
attcttctggctgctgtattgttgg

SEQ ID NO: 89066 - DNA, 25 bp, Artificial
  Probe
gtgtgtctgtacctgaactatttaa

SEQ ID NO: 89067 - DNA, 25 bp, Artificial
  Probe
gtggtgtgtctgtacctgaactatt

SEQ ID NO: 89068 - DNA, 25 bp, Artificial
  Probe
aagtattgtattccacttcctgcta

SEQ ID NO: 89069 - DNA, 25 bp, Artificial
  Probe
tgtattcagtgtgaggtggtgttta

SEQ ID NO: 89070 - DNA, 25 bp, Artificial
  Probe
ctttccattgtgacaaccgaatttc

SEQ ID NO: 89071 - DNA, 25 bp, Artificial
  Probe
cctctgaagaaagaatggcactaga

SEQ ID NO: 89072 - DNA, 25 bp, Artificial
  Probe
tcctctgaagaaagaatggcactag

SEQ ID NO: 89073 - DNA, 25 bp, Artificial
  Probe
tattcagtgtgaggtggtgtttaca

SEQ ID NO: 89074 - DNA, 25 bp, Artificial
  Probe
tctttccattgtgacaaccgaattt

SEQ ID NO: 89075 - DNA, 25 bp, Artificial
  Probe
ttctttccattgtgacaaccgaatt

SEQ ID NO: 89076 - DNA, 25 bp, Artificial
  Probe
tttctttccattgtgacaaccgaat

SEQ ID NO: 89077 - DNA, 25 bp, Artificial
  Probe
atttctttccattgtgacaaccgaa

SEQ ID NO: 89078 - DNA, 25 bp, Artificial
  Probe
aacccttctggtagtcactgtataa

SEQ ID NO: 89079 - DNA, 25 bp, Artificial
  Probe
tgtctgtacctgaactatttaatgt

SEQ ID NO: 89080 - DNA, 25 bp, Artificial
  Probe
tgtgtctgtacctgaactatttaat

SEQ ID NO: 89081 - DNA, 25 bp, Artificial
  Probe
gaacccttctggtagtcactgtata

SEQ ID NO: 89082 - DNA, 25 bp, Artificial
  Probe
cctgaactatttaatgttgtgtcat

SEQ ID NO: 89083 - DNA, 25 bp, Artificial
  Probe
cattgatgaccacttcctgtttgac

SEQ ID NO: 89084 - DNA, 25 bp, Artificial
  Probe
cttcaaacccacagacaagcataag

SEQ ID NO: 89085 - DNA, 25 bp, Artificial
  Probe
caaatactaccctctgaagagcatg

SEQ ID NO: 89086 - DNA, 25 bp, Artificial
  Probe
aaatactaccctctgaagagcatga

SEQ ID NO: 89087 - DNA, 25 bp, Artificial
  Probe
ttcaaacccacagacaagcataaga

SEQ ID NO: 89088 - DNA, 25 bp, Artificial
  Probe
ctcattgatgaccacttcctgtttg

SEQ ID NO: 89089 - DNA, 25 bp, Artificial
  Probe
aatactaccctctgaagagcatgac

SEQ ID NO: 89090 - DNA, 25 bp, Artificial
  Probe
tcattgatgaccacttcctgtttga

SEQ ID NO: 89091 - DNA, 25 bp, Artificial
  Probe
attgatgaccacttcctgtttgaca

SEQ ID NO: 89092 - DNA, 25 bp, Artificial
  Probe
tcaaacccacagacaagcataagac

SEQ ID NO: 89093 - DNA, 25 bp, Artificial
  Probe
gcaaatactaccctctgaagagcat

SEQ ID NO: 89094 - DNA, 25 bp, Artificial
  Probe
ttgatgaccacttcctgtttgacaa

SEQ ID NO: 89095 - DNA, 25 bp, Artificial
  Probe
atactaccctctgaagagcatgaca

SEQ ID NO: 89096 - DNA, 25 bp, Artificial
  Probe
agacaagcataagaccgacctcaac

SEQ ID NO: 89097 - DNA, 25 bp, Artificial
  Probe
cagacaagcataagaccgacctcaa

SEQ ID NO: 89098 - DNA, 25 bp, Artificial
  Probe
gtacaataagcttcgagacaaggag

SEQ ID NO: 89099 - DNA, 25 bp, Artificial
  Probe
tacaataagcttcgagacaaggaga

SEQ ID NO: 89100 - DNA, 25 bp, Artificial
  Probe
tgatgaccacttcctgtttgacaag

SEQ ID NO: 89101 - DNA, 25 bp, Artificial
  Probe
actcctgacctgtacaataagcttc

SEQ ID NO: 89102 - DNA, 25 bp, Artificial
  Probe
gactcctgacctgtacaataagctt

SEQ ID NO: 89103 - DNA, 25 bp, Artificial
  Probe
ctgactcctgacctgtacaataagc

SEQ ID NO: 89104 - DNA, 25 bp, Artificial
  Probe
gctgactcctgacctgtacaataag

SEQ ID NO: 89105 - DNA, 25 bp, Artificial
  Probe
ctgacctgtacaataagcttcgaga

SEQ ID NO: 89106 - DNA, 25 bp, Artificial
  Probe
gaactacaagtcgcaggaggagtac

SEQ ID NO: 89107 - DNA, 25 bp, Artificial
  Probe
ctgtacaataagcttcgagacaagg

SEQ ID NO: 89108 - DNA, 25 bp, Artificial
  Probe
cctgtacaataagcttcgagacaag

SEQ ID NO: 89109 - DNA, 25 bp, Artificial
  Probe
gctcattgatgaccacttcctgttt

SEQ ID NO: 89110 - DNA, 25 bp, Artificial
  Probe
tgacctgtacaataagcttcgagac

SEQ ID NO: 89111 - DNA, 25 bp, Artificial
  Probe
tgaactacaagtcgcaggaggagta

SEQ ID NO: 89112 - DNA, 25 bp, Artificial
  Probe
tactaccctctgaagagcatgacag

SEQ ID NO: 89113 - DNA, 25 bp, Artificial
  Probe
tgtacaataagcttcgagacaagga

SEQ ID NO: 89114 - DNA, 25 bp, Artificial
  Probe
tgactcctgacctgtacaataagct

SEQ ID NO: 89115 - DNA, 25 bp, Artificial
  Probe
caaacccacagacaagcataagacc

SEQ ID NO: 89116 - DNA, 25 bp, Artificial
  Probe
agctcattgatgaccacttcctgtt

SEQ ID NO: 89117 - DNA, 25 bp, Artificial
  Probe
acctgtacaataagcttcgagacaa

SEQ ID NO: 89118 - DNA, 25 bp, Artificial
  Probe
tgctgactcctgacctgtacaataa

SEQ ID NO: 89119 - DNA, 25 bp, Artificial
  Probe
acaataagcttcgagacaaggagac

SEQ ID NO: 89120 - DNA, 25 bp, Artificial
  Probe
gacctgtacaataagcttcgagaca

SEQ ID NO: 89121 - DNA, 25 bp, Artificial
  Probe
cctgacctgtacaataagcttcgag

SEQ ID NO: 89122 - DNA, 25 bp, Artificial
  Probe
ctcctgacctgtacaataagcttcg

SEQ ID NO: 89123 - DNA, 25 bp, Artificial
  Probe
gattgaggagatcttcaagaaggct

SEQ ID NO: 89124 - DNA, 25 bp, Artificial
  Probe
agattgaggagatcttcaagaaggc

SEQ ID NO: 89125 - DNA, 25 bp, Artificial
  Probe
attgaggagatcttcaagaaggctg

SEQ ID NO: 89126 - DNA, 25 bp, Artificial
  Probe
tcctgacctgtacaataagcttcga

SEQ ID NO: 89127 - DNA, 25 bp, Artificial
  Probe
caataagcttcgagacaaggagacc

SEQ ID NO: 89128 - DNA, 25 bp, Artificial
  Probe
aggaaagatgaagataccaagatgc

SEQ ID NO: 89129 - DNA, 25 bp, Artificial
  Probe
aagatgaagataccaagatgcactt

SEQ ID NO: 89130 - DNA, 25 bp, Artificial
  Probe
ctggctgaaagaaataaattggtga

SEQ ID NO: 89131 - DNA, 25 bp, Artificial
  Probe
agaaggaaagatgaagataccaaga

SEQ ID NO: 89132 - DNA, 25 bp, Artificial
  Probe
tggctgaaagaaataaattggtgat

SEQ ID NO: 89133 - DNA, 25 bp, Artificial
  Probe
tctggctgaaagaaataaattggtg

SEQ ID NO: 89134 - DNA, 25 bp, Artificial
  Probe
gtctggctgaaagaaataaattggt

SEQ ID NO: 89135 - DNA, 25 bp, Artificial
  Probe
aaggaaagatgaagataccaagatg

SEQ ID NO: 89136 - DNA, 25 bp, Artificial
  Probe
aagaaggaaagatgaagataccaag

SEQ ID NO: 89137 - DNA, 25 bp, Artificial
  Probe
gttcatttgtgagggaattggtaat

SEQ ID NO: 89138 - DNA, 25 bp, Artificial
  Probe
gaaggaaagatgaagataccaagat

SEQ ID NO: 89139 - DNA, 25 bp, Artificial
  Probe
gaattggtaatgccgatggacagat

SEQ ID NO: 89140 - DNA, 25 bp, Artificial
  Probe
tgttcatttgtgagggaattggtaa

SEQ ID NO: 89141 - DNA, 25 bp, Artificial
  Probe
aaagaaggaaagatgaagataccaa

SEQ ID NO: 89142 - DNA, 25 bp, Artificial
  Probe
ggctgaaagaaataaattggtgata

SEQ ID NO: 89143 - DNA, 25 bp, Artificial
  Probe
ctgggtaacagaatcgctttacata

SEQ ID NO: 89144 - DNA, 25 bp, Artificial
  Probe
aaagatgaagataccaagatgcact

SEQ ID NO: 89145 - DNA, 25 bp, Artificial
  Probe
gaaagatgaagataccaagatgcac

SEQ ID NO: 89146 - DNA, 25 bp, Artificial
  Probe
ggaaagatgaagataccaagatgca

SEQ ID NO: 89147 - DNA, 25 bp, Artificial
  Probe
agatgaagataccaagatgcacttt

SEQ ID NO: 89148 - DNA, 25 bp, Artificial
  Probe
tgaagataccaagatgcactttgta

SEQ ID NO: 89149 - DNA, 25 bp, Artificial
  Probe
gatgaagataccaagatgcactttg

SEQ ID NO: 89150 - DNA, 25 bp, Artificial
  Probe
ttcatttgtgagggaattggtaatg

SEQ ID NO: 89151 - DNA, 25 bp, Artificial
  Probe
gaagataccaagatgcactttgtaa

SEQ ID NO: 89152 - DNA, 25 bp, Artificial
  Probe
atgaagataccaagatgcactttgt

SEQ ID NO: 89153 - DNA, 25 bp, Artificial
  Probe
aagataccaagatgcactttgtaaa

SEQ ID NO: 89154 - DNA, 25 bp, Artificial
  Probe
cactgttttaccaaatcaagagact

SEQ ID NO: 89155 - DNA, 25 bp, Artificial
  Probe
acactgttttaccaaatcaagagac

SEQ ID NO: 89156 - DNA, 25 bp, Artificial
  Probe
tcatttgtgagggaattggtaatgc

SEQ ID NO: 89157 - DNA, 25 bp, Artificial
  Probe
agaaataaattggtgataagtggaa

SEQ ID NO: 89158 - DNA, 25 bp, Artificial
  Probe
aagaaataaattggtgataagtgga

SEQ ID NO: 89159 - DNA, 25 bp, Artificial
  Probe
cctacactgttttaccaaatcaaga

SEQ ID NO: 89160 - DNA, 25 bp, Artificial
  Probe
tttgctgggtaacagaatcgcttta

SEQ ID NO: 89161 - DNA, 25 bp, Artificial
  Probe
tcggaaaatagagaaagtcaggatc

SEQ ID NO: 89162 - DNA, 25 bp, Artificial
  Probe
gctgaaagaaataaattggtgataa

SEQ ID NO: 89163 - DNA, 25 bp, Artificial
  Probe
ctcggaaaatagagaaagtcaggat

SEQ ID NO: 89164 - DNA, 25 bp, Artificial
  Probe
gttgaaggatgctctcggaaaatag

SEQ ID NO: 89165 - DNA, 25 bp, Artificial
  Probe
aaaagaaggaaagatgaagatacca

SEQ ID NO: 89166 - DNA, 25 bp, Artificial
  Probe
tacactgttttaccaaatcaagaga

SEQ ID NO: 89167 - DNA, 25 bp, Artificial
  Probe
actgttttaccaaatcaagagacta

SEQ ID NO: 89168 - DNA, 25 bp, Artificial
  Probe
agttgaaggatgctctcggaaaata

SEQ ID NO: 89169 - DNA, 25 bp, Artificial
  Probe
gggtatagaaaagaaggaaagatga

SEQ ID NO: 89170 - DNA, 25 bp, Artificial
  Probe
gactgtcctcacaggatcactataa

SEQ ID NO: 89171 - DNA, 25 bp, Artificial
  Probe
atttgtgagggaattggtaatgccg

SEQ ID NO: 89172 - DNA, 25 bp, Artificial
  Probe
gtatttgtttgctgggtaacagaat

SEQ ID NO: 89173 - DNA, 25 bp, Artificial
  Probe
ttcaagatacaattcctccaccatt

SEQ ID NO: 89174 - DNA, 25 bp, Artificial
  Probe
aagtcttcctcttcttagccatcct

SEQ ID NO: 89175 - DNA, 25 bp, Artificial
  Probe
tatgactattcctcctaccctgttt

SEQ ID NO: 89176 - DNA, 25 bp, Artificial
  Probe
ttatgactattcctcctaccctgtt

SEQ ID NO: 89177 - DNA, 25 bp, Artificial
  Probe
tttatgactattcctcctaccctgt

SEQ ID NO: 89178 - DNA, 25 bp, Artificial
  Probe
tcaagatacaattcctccaccattt

SEQ ID NO: 89179 - DNA, 25 bp, Artificial
  Probe
tttcaagatacaattcctccaccat

SEQ ID NO: 89180 - DNA, 25 bp, Artificial
  Probe
atttatgactattcctcctaccctg

SEQ ID NO: 89181 - DNA, 25 bp, Artificial
  Probe
gcaaacccatacccattaagattta

SEQ ID NO: 89182 - DNA, 25 bp, Artificial
  Probe
agtcttcctcttcttagccatcctc

SEQ ID NO: 89183 - DNA, 25 bp, Artificial
  Probe
gatttatgactattcctcctaccct

SEQ ID NO: 89184 - DNA, 25 bp, Artificial
  Probe
agatttatgactattcctcctaccc

SEQ ID NO: 89185 - DNA, 25 bp, Artificial
  Probe
atgactattcctcctaccctgtttc

SEQ ID NO: 89186 - DNA, 25 bp, Artificial
  Probe
caagatacaattcctccaccattta

SEQ ID NO: 89187 - DNA, 25 bp, Artificial
  Probe
tgactcaatagatttgccaactctg

SEQ ID NO: 89188 - DNA, 25 bp, Artificial
  Probe
acaattcctccaccatttaattcag

SEQ ID NO: 89189 - DNA, 25 bp, Artificial
  Probe
tttgactcaatagatttgccaactc

SEQ ID NO: 89190 - DNA, 25 bp, Artificial
  Probe
caattcctccaccatttaattcagc

SEQ ID NO: 89191 - DNA, 25 bp, Artificial
  Probe
ttgactcaatagatttgccaactct

SEQ ID NO: 89192 - DNA, 25 bp, Artificial
  Probe
aagatacaattcctccaccatttaa

SEQ ID NO: 89193 - DNA, 25 bp, Artificial
  Probe
agatacaattcctccaccatttaat

SEQ ID NO: 89194 - DNA, 25 bp, Artificial
  Probe
caccatttaattcagctccaatcaa

SEQ ID NO: 89195 - DNA, 25 bp, Artificial
  Probe
tacaattcctccaccatttaattca

SEQ ID NO: 89196 - DNA, 25 bp, Artificial
  Probe
accatttaattcagctccaatcaat

SEQ ID NO: 89197 - DNA, 25 bp, Artificial
  Probe
cttcctcttcttagccatcctcctg

SEQ ID NO: 89198 - DNA, 25 bp, Artificial
  Probe
gtcttcctcttcttagccatcctcc

SEQ ID NO: 89199 - DNA, 25 bp, Artificial
  Probe
attcctccaccatttaattcagctc

SEQ ID NO: 89200 - DNA, 25 bp, Artificial
  Probe
aagatttatgactattcctcctacc

SEQ ID NO: 89201 - DNA, 25 bp, Artificial
  Probe
tcttcctcttcttagccatcctcct

SEQ ID NO: 89202 - DNA, 25 bp, Artificial
  Probe
tccaccatttaattcagctccaatc

SEQ ID NO: 89203 - DNA, 25 bp, Artificial
  Probe
ctccaccatttaattcagctccaat

SEQ ID NO: 89204 - DNA, 25 bp, Artificial
  Probe
acccatacccattaagatttatgac

SEQ ID NO: 89205 - DNA, 25 bp, Artificial
  Probe
ccaccatttaattcagctccaatca

SEQ ID NO: 89206 - DNA, 25 bp, Artificial
  Probe
tgcaaacccatacccattaagattt

SEQ ID NO: 89207 - DNA, 25 bp, Artificial
  Probe
cccatacccattaagatttatgact

SEQ ID NO: 89208 - DNA, 25 bp, Artificial
  Probe
caaacccatacccattaagatttat

SEQ ID NO: 89209 - DNA, 25 bp, Artificial
  Probe
aattcctccaccatttaattcagct

SEQ ID NO: 89210 - DNA, 25 bp, Artificial
  Probe
ctgcaaacccatacccattaagatt

SEQ ID NO: 89211 - DNA, 25 bp, Artificial
  Probe
gactcaatagatttgccaactctgg

SEQ ID NO: 89212 - DNA, 25 bp, Artificial
  Probe
aacccatacccattaagatttatga

SEQ ID NO: 89213 - DNA, 25 bp, Artificial
  Probe
atacaattcctccaccatttaattc

SEQ ID NO: 89214 - DNA, 25 bp, Artificial
  Probe
gatacaattcctccaccatttaatt

SEQ ID NO: 89215 - DNA, 25 bp, Artificial
  Probe
tgactattcctcctaccctgtttcg

SEQ ID NO: 89216 - DNA, 25 bp, Artificial
  Probe
aatattgtctacactgttccctgca

SEQ ID NO: 89217 - DNA, 25 bp, Artificial
  Probe
ccatttaattcagctccaatcaatt

SEQ ID NO: 89218 - DNA, 25 bp, Artificial
  Probe
tctacaacatccataaccatcacag

SEQ ID NO: 89219 - DNA, 25 bp, Artificial
  Probe
ttcactatggatggttcattctgtt

SEQ ID NO: 89220 - DNA, 25 bp, Artificial
  Probe
attcactatggatggttcattctgt

SEQ ID NO: 89221 - DNA, 25 bp, Artificial
  Probe
gattcactatggatggttcattctg

SEQ ID NO: 89222 - DNA, 25 bp, Artificial
  Probe
cagattcactatggatggttcattc

SEQ ID NO: 89223 - DNA, 25 bp, Artificial
  Probe
tcactatggatggttcattctgttc

SEQ ID NO: 89224 - DNA, 25 bp, Artificial
  Probe
agattcactatggatggttcattct

SEQ ID NO: 89225 - DNA, 25 bp, Artificial
  Probe
gcagattcactatggatggttcatt

SEQ ID NO: 89226 - DNA, 25 bp, Artificial
  Probe
agcctctgccattatgaattacttc

SEQ ID NO: 89227 - DNA, 25 bp, Artificial
  Probe
ctacaacatccataaccatcacagc

SEQ ID NO: 89228 - DNA, 25 bp, Artificial
  Probe
cagcctctgccattatgaattactt

SEQ ID NO: 89229 - DNA, 25 bp, Artificial
  Probe
tgatctctgtgtgaatggatgtctc

SEQ ID NO: 89230 - DNA, 25 bp, Artificial
  Probe
cagaagccatgaagataatcacagg

SEQ ID NO: 89231 - DNA, 25 bp, Artificial
  Probe
ccagaagccatgaagataatcacag

SEQ ID NO: 89232 - DNA, 25 bp, Artificial
  Probe
tcagcctctgccattatgaattact

SEQ ID NO: 89233 - DNA, 25 bp, Artificial
  Probe
gtcagcctctgccattatgaattac

SEQ ID NO: 89234 - DNA, 25 bp, Artificial
  Probe
cactatggatggttcattctgttcc

SEQ ID NO: 89235 - DNA, 25 bp, Artificial
  Probe
gattaccttctcagtctttctccaa

SEQ ID NO: 89236 - DNA, 25 bp, Artificial
  Probe
gtgatctctgtgtgaatggatgtct

SEQ ID NO: 89237 - DNA, 25 bp, Artificial
  Probe
agtgatctctgtgtgaatggatgtc

SEQ ID NO: 89238 - DNA, 25 bp, Artificial
  Probe
tgtcagcctctgccattatgaatta

SEQ ID NO: 89239 - DNA, 25 bp, Artificial
  Probe
gatctctgtgtgaatggatgtctca

SEQ ID NO: 89240 - DNA, 25 bp, Artificial
  Probe
attaccttctcagtctttctccaag

SEQ ID NO: 89241 - DNA, 25 bp, Artificial
  Probe
ttacatgcagattcactatggatgg

SEQ ID NO: 89242 - DNA, 25 bp, Artificial
  Probe
tccacatacgatataaacgaggtac

SEQ ID NO: 89243 - DNA, 25 bp, Artificial
  Probe
atgtcagcctctgccattatgaatt

SEQ ID NO: 89244 - DNA, 25 bp, Artificial
  Probe
ttctccacatacgatataaacgagg

SEQ ID NO: 89245 - DNA, 25 bp, Artificial
  Probe
tgattaccttctcagtctttctcca

SEQ ID NO: 89246 - DNA, 25 bp, Artificial
  Probe
ctccacatacgatataaacgaggta

SEQ ID NO: 89247 - DNA, 25 bp, Artificial
  Probe
tacatgcagattcactatggatggt

SEQ ID NO: 89248 - DNA, 25 bp, Artificial
  Probe
tctccacatacgatataaacgaggt

SEQ ID NO: 89249 - DNA, 25 bp, Artificial
  Probe
catgcagattcactatggatggttc

SEQ ID NO: 89250 - DNA, 25 bp, Artificial
  Probe
atgcagattcactatggatggttca

SEQ ID NO: 89251 - DNA, 25 bp, Artificial
  Probe
cagtgatctctgtgtgaatggatgt

SEQ ID NO: 89252 - DNA, 25 bp, Artificial
  Probe
tgcagattcactatggatggttcat

SEQ ID NO: 89253 - DNA, 25 bp, Artificial
  Probe
tatgaattacttcaagccactgact

SEQ ID NO: 89254 - DNA, 25 bp, Artificial
  Probe
tttctccacatacgatataaacgag

SEQ ID NO: 89255 - DNA, 25 bp, Artificial
  Probe
tctgccattatgaattacttcaagc

SEQ ID NO: 89256 - DNA, 25 bp, Artificial
  Probe
ctgccattatgaattacttcaagcc

SEQ ID NO: 89257 - DNA, 25 bp, Artificial
  Probe
aattacttcaagccactgactgaat

SEQ ID NO: 89258 - DNA, 25 bp, Artificial
  Probe
ttatgaattacttcaagccactgac

SEQ ID NO: 89259 - DNA, 25 bp, Artificial
  Probe
ccattatgaattacttcaagccact

SEQ ID NO: 89260 - DNA, 25 bp, Artificial
  Probe
gccattatgaattacttcaagccac

SEQ ID NO: 89261 - DNA, 25 bp, Artificial
  Probe
cctctgccattatgaattacttcaa

SEQ ID NO: 89262 - DNA, 25 bp, Artificial
  Probe
acatgcagattcactatggatggtt

SEQ ID NO: 89263 - DNA, 25 bp, Artificial
  Probe
gtaagaaccagctcaagaggaatac

SEQ ID NO: 89264 - DNA, 25 bp, Artificial
  Probe
atctatgtaagaaccagctcaagag

SEQ ID NO: 89265 - DNA, 25 bp, Artificial
  Probe
taagaaccagctcaagaggaataca

SEQ ID NO: 89266 - DNA, 25 bp, Artificial
  Probe
tgtaagaaccagctcaagaggaata

SEQ ID NO: 89267 - DNA, 25 bp, Artificial
  Probe
tatgtaagaaccagctcaagaggaa

SEQ ID NO: 89268 - DNA, 25 bp, Artificial
  Probe
aagctactattgtgttctgagtgtt

SEQ ID NO: 89269 - DNA, 25 bp, Artificial
  Probe
tagtttccttgttatcatagcctgg

SEQ ID NO: 89270 - DNA, 25 bp, Artificial
  Probe
gaagctactattgtgttctgagtgt

SEQ ID NO: 89271 - DNA, 25 bp, Artificial
  Probe
ctatgtaagaaccagctcaagagga

SEQ ID NO: 89272 - DNA, 25 bp, Artificial
  Probe
tatctatgtaagaaccagctcaaga

SEQ ID NO: 89273 - DNA, 25 bp, Artificial
  Probe
ttctttctctgtgggtttgaatcta

SEQ ID NO: 89274 - DNA, 25 bp, Artificial
  Probe
atgtaagaaccagctcaagaggaat

SEQ ID NO: 89275 - DNA, 25 bp, Artificial
  Probe
ccctccttgtcatttctcatttcat

SEQ ID NO: 89276 - DNA, 25 bp, Artificial
  Probe
tttctttctctgtgggtttgaatct

SEQ ID NO: 89277 - DNA, 25 bp, Artificial
  Probe
tctatgtaagaaccagctcaagagg

SEQ ID NO: 89278 - DNA, 25 bp, Artificial
  Probe
aagaaccagctcaagaggaatacaa

SEQ ID NO: 89279 - DNA, 25 bp, Artificial
  Probe
gctttctgaaacaaacaaatgactg

SEQ ID NO: 89280 - DNA, 25 bp, Artificial
  Probe
ttccttgttatcatagcctggactg

SEQ ID NO: 89281 - DNA, 25 bp, Artificial
  Probe
ttctctgtgggtttgaatctagttt

SEQ ID NO: 89282 - DNA, 25 bp, Artificial
  Probe
tttctctgtgggtttgaatctagtt

SEQ ID NO: 89283 - DNA, 25 bp, Artificial
  Probe
tctttctctgtgggtttgaatctag

SEQ ID NO: 89284 - DNA, 25 bp, Artificial
  Probe
tctctgtgggtttgaatctagtttc

SEQ ID NO: 89285 - DNA, 25 bp, Artificial
  Probe
ctttctctgtgggtttgaatctagt

SEQ ID NO: 89286 - DNA, 25 bp, Artificial
  Probe
ctagtttccttgttatcatagcctg

SEQ ID NO: 89287 - DNA, 25 bp, Artificial
  Probe
tctagtttccttgttatcatagcct

SEQ ID NO: 89288 - DNA, 25 bp, Artificial
  Probe
tgggtttgaatctagtttccttgtt

SEQ ID NO: 89289 - DNA, 25 bp, Artificial
  Probe
tgtagtgctttaatccgaatttagt

SEQ ID NO: 89290 - DNA, 25 bp, Artificial
  Probe
ctgtgggtttgaatctagtttcctt

SEQ ID NO: 89291 - DNA, 25 bp, Artificial
  Probe
aaccagctcaagaggaatacaactt

SEQ ID NO: 89292 - DNA, 25 bp, Artificial
  Probe
ctcatcgctgcataatacacttctg

SEQ ID NO: 89293 - DNA, 25 bp, Artificial
  Probe
tacctcatcgctgcataatacactt

SEQ ID NO: 89294 - DNA, 25 bp, Artificial
  Probe
atgtttacaaggtgttctttggaag

SEQ ID NO: 89295 - DNA, 25 bp, Artificial
  Probe
gggtttgaatctagtttccttgtta

SEQ ID NO: 89296 - DNA, 25 bp, Artificial
  Probe
gtgggtttgaatctagtttccttgt

SEQ ID NO: 89297 - DNA, 25 bp, Artificial
  Probe
tgtgggtttgaatctagtttccttg

SEQ ID NO: 89298 - DNA, 25 bp, Artificial
  Probe
atatctatgtaagaaccagctcaag

SEQ ID NO: 89299 - DNA, 25 bp, Artificial
  Probe
aatgagttgtaaattcacaggtcac

SEQ ID NO: 89300 - DNA, 25 bp, Artificial
  Probe
aatgtttacaaggtgttctttggaa

SEQ ID NO: 89301 - DNA, 25 bp, Artificial
  Probe
aaatgtttacaaggtgttctttgga

SEQ ID NO: 89302 - DNA, 25 bp, Artificial
  Probe
ttctgaaacaaacaaatgactgtcc

SEQ ID NO: 89303 - DNA, 25 bp, Artificial
  Probe
atgagttgtaaattcacaggtcaca

SEQ ID NO: 89304 - DNA, 25 bp, Artificial
  Probe
gaaatgtttacaaggtgttctttgg

SEQ ID NO: 89305 - DNA, 25 bp, Artificial
  Probe
ctctgtgggtttgaatctagtttcc

SEQ ID NO: 89306 - DNA, 25 bp, Artificial
  Probe
gtgctttaatccgaatttagtatcc

SEQ ID NO: 89307 - DNA, 25 bp, Artificial
  Probe
ccttgtcatttctcatttcatgctt

SEQ ID NO: 89308 - DNA, 25 bp, Artificial
  Probe
catcgtctctcttccatatctcttc

SEQ ID NO: 89309 - DNA, 25 bp, Artificial
  Probe
gtctctcttccatatctcttccttc

SEQ ID NO: 89310 - DNA, 25 bp, Artificial
  Probe
tctctcttccatatctcttccttcc

SEQ ID NO: 89311 - DNA, 25 bp, Artificial
  Probe
acatcgtctctcttccatatctctt

SEQ ID NO: 89312 - DNA, 25 bp, Artificial
  Probe
aacatcgtctctcttccatatctct

SEQ ID NO: 89313 - DNA, 25 bp, Artificial
  Probe
ctccaccacttcttgatataccttg

SEQ ID NO: 89314 - DNA, 25 bp, Artificial
  Probe
taacatcgtctctcttccatatctc

SEQ ID NO: 89315 - DNA, 25 bp, Artificial
  Probe
aactctgtaacatcactatacctgc

SEQ ID NO: 89316 - DNA, 25 bp, Artificial
  Probe
atccactccaccacttcttgatata

SEQ ID NO: 89317 - DNA, 25 bp, Artificial
  Probe
ccaactctgtaacatcactatacct

SEQ ID NO: 89318 - DNA, 25 bp, Artificial
  Probe
tccaactctgtaacatcactatacc

SEQ ID NO: 89319 - DNA, 25 bp, Artificial
  Probe
actccaccacttcttgatatacctt

SEQ ID NO: 89320 - DNA, 25 bp, Artificial
  Probe
atcgtctctcttccatatctcttcc

SEQ ID NO: 89321 - DNA, 25 bp, Artificial
  Probe
catcctgaatatacactgtgattgc

SEQ ID NO: 89322 - DNA, 25 bp, Artificial
  Probe
cgtctctcttccatatctcttcctt

SEQ ID NO: 89323 - DNA, 25 bp, Artificial
  Probe
ttaacatcgtctctcttccatatct

SEQ ID NO: 89324 - DNA, 25 bp, Artificial
  Probe
catcatctacaccaccttcaacatc

SEQ ID NO: 89325 - DNA, 25 bp, Artificial
  Probe
aatccactccaccacttcttgatat

SEQ ID NO: 89326 - DNA, 25 bp, Artificial
  Probe
cactccaccacttcttgatatacct

SEQ ID NO: 89327 - DNA, 25 bp, Artificial
  Probe
tccactccaccacttcttgatatac

SEQ ID NO: 89328 - DNA, 25 bp, Artificial
  Probe
caactctgtaacatcactatacctg

SEQ ID NO: 89329 - DNA, 25 bp, Artificial
  Probe
tcgtctctcttccatatctcttcct

SEQ ID NO: 89330 - DNA, 25 bp, Artificial
  Probe
cacttcttgatataccttggatgta

SEQ ID NO: 89331 - DNA, 25 bp, Artificial
  Probe
atccaactctgtaacatcactatac

SEQ ID NO: 89332 - DNA, 25 bp, Artificial
  Probe
acatcctgaatatacactgtgattg

SEQ ID NO: 89333 - DNA, 25 bp, Artificial
  Probe
cattgttctcggtgtgttcatcatc

SEQ ID NO: 89334 - DNA, 25 bp, Artificial
  Probe
atcacgcacatcctgaatatacact

SEQ ID NO: 89335 - DNA, 25 bp, Artificial
  Probe
catcacgcacatcctgaatatacac

SEQ ID NO: 89336 - DNA, 25 bp, Artificial
  Probe
tcatcacgcacatcctgaatataca

SEQ ID NO: 89337 - DNA, 25 bp, Artificial
  Probe
ccactccaccacttcttgatatacc

SEQ ID NO: 89338 - DNA, 25 bp, Artificial
  Probe
ccatcatctacaccaccttcaacat

SEQ ID NO: 89339 - DNA, 25 bp, Artificial
  Probe
attgttctcggtgtgttcatcatct

SEQ ID NO: 89340 - DNA, 25 bp, Artificial
  Probe
caatccactccaccacttcttgata

SEQ ID NO: 89341 - DNA, 25 bp, Artificial
  Probe
atcatctacaccaccttcaacatcg

SEQ ID NO: 89342 - DNA, 25 bp, Artificial
  Probe
ccacttcttgatataccttggatgt

SEQ ID NO: 89343 - DNA, 25 bp, Artificial
  Probe
accacttcttgatataccttggatg

SEQ ID NO: 89344 - DNA, 25 bp, Artificial
  Probe
caccacttcttgatataccttggat

SEQ ID NO: 89345 - DNA, 25 bp, Artificial
  Probe
ttataggaaccacataggaaagcag

SEQ ID NO: 89346 - DNA, 25 bp, Artificial
  Probe
atcctgaatatacactgtgattgca

SEQ ID NO: 89347 - DNA, 25 bp, Artificial
  Probe
tttataggaaccacataggaaagca

SEQ ID NO: 89348 - DNA, 25 bp, Artificial
  Probe
tgtcctaccttgttatagtatccca

SEQ ID NO: 89349 - DNA, 25 bp, Artificial
  Probe
gatccaactctgtaacatcactata

SEQ ID NO: 89350 - DNA, 25 bp, Artificial
  Probe
ctctgtaacatcactatacctgcac

SEQ ID NO: 89351 - DNA, 25 bp, Artificial
  Probe
actctgtaacatcactatacctgca

SEQ ID NO: 89352 - DNA, 25 bp, Artificial
  Probe
gtcctaccttgttatagtatcccat

SEQ ID NO: 89353 - DNA, 25 bp, Artificial
  Probe
actcaaagcaactgttactactgta

SEQ ID NO: 89354 - DNA, 25 bp, Artificial
  Probe
aaactcaaagcaactgttactactg

SEQ ID NO: 89355 - DNA, 25 bp, Artificial
  Probe
aactcaaagcaactgttactactgt

SEQ ID NO: 89356 - DNA, 25 bp, Artificial
  Probe
ctcaaagcaactgttactactgtac

SEQ ID NO: 89357 - DNA, 25 bp, Artificial
  Probe
aagtgattctcttgcctcttcttgc

SEQ ID NO: 89358 - DNA, 25 bp, Artificial
  Probe
catgaatatgagtctacccaccttt

SEQ ID NO: 89359 - DNA, 25 bp, Artificial
  Probe
cattccaagagaggttgaggtgttc

SEQ ID NO: 89360 - DNA, 25 bp, Artificial
  Probe
gcttctacagtttcttgttcagact

SEQ ID NO: 89361 - DNA, 25 bp, Artificial
  Probe
gattctcttgcctcttcttgctgtc

SEQ ID NO: 89362 - DNA, 25 bp, Artificial
  Probe
gaagccatgacttacatagagcgag

SEQ ID NO: 89363 - DNA, 25 bp, Artificial
  Probe
gttccaaacattccaagagaggttg

SEQ ID NO: 89364 - DNA, 25 bp, Artificial
  Probe
gtgattctcttgcctcttcttgctg

SEQ ID NO: 89365 - DNA, 25 bp, Artificial
  Probe
ggcttctacagtttcttgttcagac

SEQ ID NO: 89366 - DNA, 25 bp, Artificial
  Probe
ttccaaacattccaagagaggttga

SEQ ID NO: 89367 - DNA, 25 bp, Artificial
  Probe
attctcttgcctcttcttgctgtct

SEQ ID NO: 89368 - DNA, 25 bp, Artificial
  Probe
agtgattctcttgcctcttcttgct

SEQ ID NO: 89369 - DNA, 25 bp, Artificial
  Probe
aaacatactcgaaggacaaacactt

SEQ ID NO: 89370 - DNA, 25 bp, Artificial
  Probe
tgtagaaagtccttagggagtgttc

SEQ ID NO: 89371 - DNA, 25 bp, Artificial
  Probe
ctgtagaaagtccttagggagtgtt

SEQ ID NO: 89372 - DNA, 25 bp, Artificial
  Probe
ttggaagccatgacttacatagagc

SEQ ID NO: 89373 - DNA, 25 bp, Artificial
  Probe
ttctgtagaaagtccttagggagtg

SEQ ID NO: 89374 - DNA, 25 bp, Artificial
  Probe
tccaaacattccaagagaggttgag

SEQ ID NO: 89375 - DNA, 25 bp, Artificial
  Probe
tgattctcttgcctcttcttgctgt

SEQ ID NO: 89376 - DNA, 25 bp, Artificial
  Probe
tttggaagccatgacttacatagag

SEQ ID NO: 89377 - DNA, 25 bp, Artificial
  Probe
aacatactcgaaggacaaacacttg

SEQ ID NO: 89378 - DNA, 25 bp, Artificial
  Probe
acattccaagagaggttgaggtgtt

SEQ ID NO: 89379 - DNA, 25 bp, Artificial
  Probe
aacattccaagagaggttgaggtgt

SEQ ID NO: 89380 - DNA, 25 bp, Artificial
  Probe
aaacattccaagagaggttgaggtg

SEQ ID NO: 89381 - DNA, 25 bp, Artificial
  Probe
caaacattccaagagaggttgaggt

SEQ ID NO: 89382 - DNA, 25 bp, Artificial
  Probe
tctgtagaaagtccttagggagtgt

SEQ ID NO: 89383 - DNA, 25 bp, Artificial
  Probe
attccaagagaggttgaggtgttcc

SEQ ID NO: 89384 - DNA, 25 bp, Artificial
  Probe
atgacttacatagagcgagccctat

SEQ ID NO: 89385 - DNA, 25 bp, Artificial
  Probe
gcaactgttactactgtacattagg

SEQ ID NO: 89386 - DNA, 25 bp, Artificial
  Probe
catactcgaaggacaaacacttgag

SEQ ID NO: 89387 - DNA, 25 bp, Artificial
  Probe
gtagaaagtccttagggagtgttcg

SEQ ID NO: 89388 - DNA, 25 bp, Artificial
  Probe
acatactcgaaggacaaacacttga

SEQ ID NO: 89389 - DNA, 25 bp, Artificial
  Probe
caagtgattctcttgcctcttcttg

SEQ ID NO: 89390 - DNA, 25 bp, Artificial
  Probe
gcaaaactcaaagcaactgttacta

SEQ ID NO: 89391 - DNA, 25 bp, Artificial
  Probe
cggcttctacagtttcttgttcaga

SEQ ID NO: 89392 - DNA, 25 bp, Artificial
  Probe
tagaaagtccttagggagtgttcgt

SEQ ID NO: 89393 - DNA, 25 bp, Artificial
  Probe
gtttctgtagaaagtccttagggag

SEQ ID NO: 89394 - DNA, 25 bp, Artificial
  Probe
gagtttctgtagaaagtccttaggg

SEQ ID NO: 89395 - DNA, 25 bp, Artificial
  Probe
ggagtttctgtagaaagtccttagg

SEQ ID NO: 89396 - DNA, 25 bp, Artificial
  Probe
agcaactgttactactgtacattag

SEQ ID NO: 89397 - DNA, 25 bp, Artificial
  Probe
tttctgtagaaagtccttagggagt

SEQ ID NO: 89398 - DNA, 25 bp, Artificial
  Probe
aaccgtctatgatgagatggataag

SEQ ID NO: 89399 - DNA, 25 bp, Artificial
  Probe
accgtctatgatgagatggataaga

SEQ ID NO: 89400 - DNA, 25 bp, Artificial
  Probe
tctatgatgagatggataagaaccg

SEQ ID NO: 89401 - DNA, 25 bp, Artificial
  Probe
ccgtctatgatgagatggataagaa

SEQ ID NO: 89402 - DNA, 25 bp, Artificial
  Probe
atggattacattggcattaacctgg

SEQ ID NO: 89403 - DNA, 25 bp, Artificial
  Probe
cgtctatgatgagatggataagaac

SEQ ID NO: 89404 - DNA, 25 bp, Artificial
  Probe
ctcatggattacattggcattaacc

SEQ ID NO: 89405 - DNA, 25 bp, Artificial
  Probe
gtctatgatgagatggataagaacc

SEQ ID NO: 89406 - DNA, 25 bp, Artificial
  Probe
catggattacattggcattaacctg

SEQ ID NO: 89407 - DNA, 25 bp, Artificial
  Probe
tcatggattacattggcattaacct

SEQ ID NO: 89408 - DNA, 25 bp, Artificial
  Probe
gctcatggattacattggcattaac

SEQ ID NO: 89409 - DNA, 25 bp, Artificial
  Probe
gattacattggcattaacctggcaa

SEQ ID NO: 89410 - DNA, 25 bp, Artificial
  Probe
cttcttgctgctcatggattacatt

SEQ ID NO: 89411 - DNA, 25 bp, Artificial
  Probe
attacattggcattaacctggcaac

SEQ ID NO: 89412 - DNA, 25 bp, Artificial
  Probe
ttcttgctgctcatggattacattg

SEQ ID NO: 89413 - DNA, 25 bp, Artificial
  Probe
aaaccgtctatgatgagatggataa

SEQ ID NO: 89414 - DNA, 25 bp, Artificial
  Probe
cacagcaatcttctataccctcatg

SEQ ID NO: 89415 - DNA, 25 bp, Artificial
  Probe
ctatgatgagatggataagaaccgg

SEQ ID NO: 89416 - DNA, 25 bp, Artificial
  Probe
ggattacattggcattaacctggca

SEQ ID NO: 89417 - DNA, 25 bp, Artificial
  Probe
tggattacattggcattaacctggc

SEQ ID NO: 89418 - DNA, 25 bp, Artificial
  Probe
gcacagcaatcttctataccctcat

SEQ ID NO: 89419 - DNA, 25 bp, Artificial
  Probe
tgctcatggattacattggcattaa

SEQ ID NO: 89420 - DNA, 25 bp, Artificial
  Probe
tcttgctgctcatggattacattgg

SEQ ID NO: 89421 - DNA, 25 bp, Artificial
  Probe
gcataaacccaatagctctgtattt

SEQ ID NO: 89422 - DNA, 25 bp, Artificial
  Probe
ctgctcatggattacattggcatta

SEQ ID NO: 89423 - DNA, 25 bp, Artificial
  Probe
attaacctggcaaccatgaactctt

SEQ ID NO: 89424 - DNA, 25 bp, Artificial
  Probe
gtcttctgcttggttgtcatcttcg

SEQ ID NO: 89425 - DNA, 25 bp, Artificial
  Probe
cgtcttctgcttggttgtcatcttc

SEQ ID NO: 89426 - DNA, 25 bp, Artificial
  Probe
tgcataaacccaatagctctgtatt

SEQ ID NO: 89427 - DNA, 25 bp, Artificial
  Probe
ttgcataaacccaatagctctgtat

SEQ ID NO: 89428 - DNA, 25 bp, Artificial
  Probe
catgaactcttgcataaacccaata

SEQ ID NO: 89429 - DNA, 25 bp, Artificial
  Probe
gcttcttgctgctcatggattacat

SEQ ID NO: 89430 - DNA, 25 bp, Artificial
  Probe
atgaactcttgcataaacccaatag

SEQ ID NO: 89431 - DNA, 25 bp, Artificial
  Probe
cttgcataaacccaatagctctgta

SEQ ID NO: 89432 - DNA, 25 bp, Artificial
  Probe
ttacattggcattaacctggcaacc

SEQ ID NO: 89433 - DNA, 25 bp, Artificial
  Probe
aactcttgcataaacccaatagctc

SEQ ID NO: 89434 - DNA, 25 bp, Artificial
  Probe
gaactcttgcataaacccaatagct

SEQ ID NO: 89435 - DNA, 25 bp, Artificial
  Probe
cattaacctggcaaccatgaactct

SEQ ID NO: 89436 - DNA, 25 bp, Artificial
  Probe
tgaactcttgcataaacccaatagc

SEQ ID NO: 89437 - DNA, 25 bp, Artificial
  Probe
ctcttgcataaacccaatagctctg

SEQ ID NO: 89438 - DNA, 25 bp, Artificial
  Probe
ccatgaactcttgcataaacccaat

SEQ ID NO: 89439 - DNA, 25 bp, Artificial
  Probe
tgaagaaaaccgtctatgatgagat

SEQ ID NO: 89440 - DNA, 25 bp, Artificial
  Probe
ttgaagaaaaccgtctatgatgaga

SEQ ID NO: 89441 - DNA, 25 bp, Artificial
  Probe
gaagaaaaccgtctatgatgagatg

SEQ ID NO: 89442 - DNA, 25 bp, Artificial
  Probe
gaaaaccgtctatgatgagatggat

SEQ ID NO: 89443 - DNA, 25 bp, Artificial
  Probe
gatatgtggtgtgtatccttcagaa

SEQ ID NO: 89444 - DNA, 25 bp, Artificial
  Probe
atatgtggtgtgtatccttcagaaa

SEQ ID NO: 89445 - DNA, 25 bp, Artificial
  Probe
ttggttctccagaatgtaagaagaa

SEQ ID NO: 89446 - DNA, 25 bp, Artificial
  Probe
aatactgctcgactgtaactctcac

SEQ ID NO: 89447 - DNA, 25 bp, Artificial
  Probe
tacttcgtacttgtgtttgcttaaa

SEQ ID NO: 89448 - DNA, 25 bp, Artificial
  Probe
ttacttcgtacttgtgtttgcttaa

SEQ ID NO: 89449 - DNA, 25 bp, Artificial
  Probe
tttacttcgtacttgtgtttgctta

SEQ ID NO: 89450 - DNA, 25 bp, Artificial
  Probe
aaatacggtttgtttggttgggttt

SEQ ID NO: 89451 - DNA, 25 bp, Artificial
  Probe
ttggcttataaacacattgaatgcg

SEQ ID NO: 89452 - DNA, 25 bp, Artificial
  Probe
tttggcttataaacacattgaatgc

SEQ ID NO: 89453 - DNA, 25 bp, Artificial
  Probe
ttgtaaatactgctcgactgtaact

SEQ ID NO: 89454 - DNA, 25 bp, Artificial
  Probe
taaatactgctcgactgtaactctc

SEQ ID NO: 89455 - DNA, 25 bp, Artificial
  Probe
gtaaatactgctcgactgtaactct

SEQ ID NO: 89456 - DNA, 25 bp, Artificial
  Probe
tgtaaatactgctcgactgtaactc

SEQ ID NO: 89457 - DNA, 25 bp, Artificial
  Probe
tttgtaaatactgctcgactgtaac

SEQ ID NO: 89458 - DNA, 25 bp, Artificial
  Probe
aaatgtagatttatccatgttcggg

SEQ ID NO: 89459 - DNA, 25 bp, Artificial
  Probe
atgtagatttatccatgttcgggag

SEQ ID NO: 89460 - DNA, 25 bp, Artificial
  Probe
aatgtagatttatccatgttcggga

SEQ ID NO: 89461 - DNA, 25 bp, Artificial
  Probe
tagatttatccatgttcgggagttg

SEQ ID NO: 89462 - DNA, 25 bp, Artificial
  Probe
gtagatttatccatgttcgggagtt

SEQ ID NO: 89463 - DNA, 25 bp, Artificial
  Probe
aaatactgctcgactgtaactctca

SEQ ID NO: 89464 - DNA, 25 bp, Artificial
  Probe
tgtagatttatccatgttcgggagt

SEQ ID NO: 89465 - DNA, 25 bp, Artificial
  Probe
tggttctccagaatgtaagaagaaa

SEQ ID NO: 89466 - DNA, 25 bp, Artificial
  Probe
tttggttctccagaatgtaagaaga

SEQ ID NO: 89467 - DNA, 25 bp, Artificial
  Probe
ctttggttctccagaatgtaagaag

SEQ ID NO: 89468 - DNA, 25 bp, Artificial
  Probe
tactgctcgactgtaactctcacat

SEQ ID NO: 89469 - DNA, 25 bp, Artificial
  Probe
atactgctcgactgtaactctcaca

SEQ ID NO: 89470 - DNA, 25 bp, Artificial
  Probe
acttcgtacttgtgtttgcttaaac

SEQ ID NO: 89471 - DNA, 25 bp, Artificial
  Probe
tatgtggtgtgtatccttcagaaaa

SEQ ID NO: 89472 - DNA, 25 bp, Artificial
  Probe
gctttggttctccagaatgtaagaa

SEQ ID NO: 89473 - DNA, 25 bp, Artificial
  Probe
ttttacttcgtacttgtgtttgctt

SEQ ID NO: 89474 - DNA, 25 bp, Artificial
  Probe
attttacttcgtacttgtgtttgct

SEQ ID NO: 89475 - DNA, 25 bp, Artificial
  Probe
gagctttggttctccagaatgtaag

SEQ ID NO: 89476 - DNA, 25 bp, Artificial
  Probe
aaagtgacttgtttggcttataaac

SEQ ID NO: 89477 - DNA, 25 bp, Artificial
  Probe
ggtgacttttgtatgctatgaacat

SEQ ID NO: 89478 - DNA, 25 bp, Artificial
  Probe
agctttggttctccagaatgtaaga

SEQ ID NO: 89479 - DNA, 25 bp, Artificial
  Probe
ccgttaattttgtaaatactgctcg

SEQ ID NO: 89480 - DNA, 25 bp, Artificial
  Probe
caaagtgacttgtttggcttataaa

SEQ ID NO: 89481 - DNA, 25 bp, Artificial
  Probe
agatttatccatgttcgggagttgg

SEQ ID NO: 89482 - DNA, 25 bp, Artificial
  Probe
tgagctttggttctccagaatgtaa

SEQ ID NO: 89483 - DNA, 25 bp, Artificial
  Probe
aatacggtttgtttggttgggtttt

SEQ ID NO: 89484 - DNA, 25 bp, Artificial
  Probe
aaaatacggtttgtttggttgggtt

SEQ ID NO: 89485 - DNA, 25 bp, Artificial
  Probe
tattttacttcgtacttgtgtttgc

SEQ ID NO: 89486 - DNA, 25 bp, Artificial
  Probe
acaaagtgacttgtttggcttataa

SEQ ID NO: 89487 - DNA, 25 bp, Artificial
  Probe
gtttggcttataaacacattgaatg

SEQ ID NO: 89488 - DNA, 25 bp, Artificial
  Probe
attgtatcagcaactctaggaccta

SEQ ID NO: 89489 - DNA, 25 bp, Artificial
  Probe
ttgtatcagcaactctaggacctac

SEQ ID NO: 89490 - DNA, 25 bp, Artificial
  Probe
cattgtatcagcaactctaggacct

SEQ ID NO: 89491 - DNA, 25 bp, Artificial
  Probe
ccattgtatcagcaactctaggacc

SEQ ID NO: 89492 - DNA, 25 bp, Artificial
  Probe
tgtatcagcaactctaggacctacc

SEQ ID NO: 89493 - DNA, 25 bp, Artificial
  Probe
aaagaactaagcaaaggcatctctg

SEQ ID NO: 89494 - DNA, 25 bp, Artificial
  Probe
caaagaactaagcaaaggcatctct

SEQ ID NO: 89495 - DNA, 25 bp, Artificial
  Probe
cttatgaggtccagcatgatgtgag

SEQ ID NO: 89496 - DNA, 25 bp, Artificial
  Probe
gaagggacacagtaataaagtgact

SEQ ID NO: 89497 - DNA, 25 bp, Artificial
  Probe
ggaagggacacagtaataaagtgac

SEQ ID NO: 89498 - DNA, 25 bp, Artificial
  Probe
cacggaagggacacagtaataaagt

SEQ ID NO: 89499 - DNA, 25 bp, Artificial
  Probe
aagggacacagtaataaagtgactt

SEQ ID NO: 89500 - DNA, 25 bp, Artificial
  Probe
aagaactaagcaaaggcatctctgt

SEQ ID NO: 89501 - DNA, 25 bp, Artificial
  Probe
agggacacagtaataaagtgactta

SEQ ID NO: 89502 - DNA, 25 bp, Artificial
  Probe
ggacacagtaataaagtgacttacg

SEQ ID NO: 89503 - DNA, 25 bp, Artificial
  Probe
gggacacagtaataaagtgacttac

SEQ ID NO: 89504 - DNA, 25 bp, Artificial
  Probe
gtatcagcaactctaggacctaccg

SEQ ID NO: 89505 - DNA, 25 bp, Artificial
  Probe
acttatgaggtccagcatgatgtga

SEQ ID NO: 89506 - DNA, 25 bp, Artificial
  Probe
gacacagtaataaagtgacttacga

SEQ ID NO: 89507 - DNA, 25 bp, Artificial
  Probe
gaactaagcaaaggcatctctgtga

SEQ ID NO: 89508 - DNA, 25 bp, Artificial
  Probe
gcaaagaactaagcaaaggcatctc

SEQ ID NO: 89509 - DNA, 25 bp, Artificial
  Probe
cggaagggacacagtaataaagtga

SEQ ID NO: 89510 - DNA, 25 bp, Artificial
  Probe
aactaagcaaaggcatctctgtgac

SEQ ID NO: 89511 - DNA, 25 bp, Artificial
  Probe
cccattgtatcagcaactctaggac

SEQ ID NO: 89512 - DNA, 25 bp, Artificial
  Probe
agaactaagcaaaggcatctctgtg

SEQ ID NO: 89513 - DNA, 25 bp, Artificial
  Probe
acacagtaataaagtgacttacgaa

SEQ ID NO: 89514 - DNA, 25 bp, Artificial
  Probe
cacttatgaggtccagcatgatgtg

SEQ ID NO: 89515 - DNA, 25 bp, Artificial
  Probe
acggaagggacacagtaataaagtg

SEQ ID NO: 89516 - DNA, 25 bp, Artificial
  Probe
ccaactacatcgactggatcaactc

SEQ ID NO: 89517 - DNA, 25 bp, Artificial
  Probe
gcacggaagggacacagtaataaag

SEQ ID NO: 89518 - DNA, 25 bp, Artificial
  Probe
ctaagcaaaggcatctctgtgactg

SEQ ID NO: 89519 - DNA, 25 bp, Artificial
  Probe
ccacttatgaggtccagcatgatgt

SEQ ID NO: 89520 - DNA, 25 bp, Artificial
  Probe
cacagtaataaagtgacttacgaat

SEQ ID NO: 89521 - DNA, 25 bp, Artificial
  Probe
actaagcaaaggcatctctgtgact

SEQ ID NO: 89522 - DNA, 25 bp, Artificial
  Probe
gtaccattctgccaaacaactaccc

SEQ ID NO: 89523 - DNA, 25 bp, Artificial
  Probe
caactacatcgactggatcaactcg

SEQ ID NO: 89524 - DNA, 25 bp, Artificial
  Probe
taagcaaaggcatctctgtgactgt

SEQ ID NO: 89525 - DNA, 25 bp, Artificial
  Probe
ttatgaggtccagcatgatgtgagc

SEQ ID NO: 89526 - DNA, 25 bp, Artificial
  Probe
cttcaccagggtctccaactacatc

SEQ ID NO: 89527 - DNA, 25 bp, Artificial
  Probe
acagtaataaagtgacttacgaatt

SEQ ID NO: 89528 - DNA, 25 bp, Artificial
  Probe
gcccattgtatcagcaactctagga

SEQ ID NO: 89529 - DNA, 25 bp, Artificial
  Probe
tcttcaccagggtctccaactacat

SEQ ID NO: 89530 - DNA, 25 bp, Artificial
  Probe
ctgcccattgtatcagcaactctag

SEQ ID NO: 89531 - DNA, 25 bp, Artificial
  Probe
aactacatcgactggatcaactcgg

SEQ ID NO: 89532 - DNA, 25 bp, Artificial
  Probe
aactcggtgattgcaaagaactaag

SEQ ID NO: 89533 - DNA, 25 bp, Artificial
  Probe
ctctgaactccagcgtaatctctag

SEQ ID NO: 89534 - DNA, 25 bp, Artificial
  Probe
ctgaatcattgtttctgtcacctga

SEQ ID NO: 89535 - DNA, 25 bp, Artificial
  Probe
tctgaatcattgtttctgtcacctg

SEQ ID NO: 89536 - DNA, 25 bp, Artificial
  Probe
gtctgaatcattgtttctgtcacct

SEQ ID NO: 89537 - DNA, 25 bp, Artificial
  Probe
agtctgaatcattgtttctgtcacc

SEQ ID NO: 89538 - DNA, 25 bp, Artificial
  Probe
atgtcactgcttccttagatgtcca

SEQ ID NO: 89539 - DNA, 25 bp, Artificial
  Probe
cagtctgaatcattgtttctgtcac

SEQ ID NO: 89540 - DNA, 25 bp, Artificial
  Probe
catgtcactgcttccttagatgtcc

SEQ ID NO: 89541 - DNA, 25 bp, Artificial
  Probe
ccatgtcactgcttccttagatgtc

SEQ ID NO: 89542 - DNA, 25 bp, Artificial
  Probe
cctctgaactccagcgtaatctcta

SEQ ID NO: 89543 - DNA, 25 bp, Artificial
  Probe
tcagtctgaatcattgtttctgtca

SEQ ID NO: 89544 - DNA, 25 bp, Artificial
  Probe
atcagtctgaatcattgtttctgtc

SEQ ID NO: 89545 - DNA, 25 bp, Artificial
  Probe
gatcagtctgaatcattgtttctgt

SEQ ID NO: 89546 - DNA, 25 bp, Artificial
  Probe
atcattgtttctgtcacctgacttt

SEQ ID NO: 89547 - DNA, 25 bp, Artificial
  Probe
aatcattgtttctgtcacctgactt

SEQ ID NO: 89548 - DNA, 25 bp, Artificial
  Probe
gaatcattgtttctgtcacctgact

SEQ ID NO: 89549 - DNA, 25 bp, Artificial
  Probe
tcattgtttctgtcacctgactttc

SEQ ID NO: 89550 - DNA, 25 bp, Artificial
  Probe
tgtcactgcttccttagatgtccac

SEQ ID NO: 89551 - DNA, 25 bp, Artificial
  Probe
tgaatcattgtttctgtcacctgac

SEQ ID NO: 89552 - DNA, 25 bp, Artificial
  Probe
tgtaatcatgtgatcagtctgaatc

SEQ ID NO: 89553 - DNA, 25 bp, Artificial
  Probe
ttgtaatcatgtgatcagtctgaat

SEQ ID NO: 89554 - DNA, 25 bp, Artificial
  Probe
tctgaactccagcgtaatctctaga

SEQ ID NO: 89555 - DNA, 25 bp, Artificial
  Probe
cattgtttctgtcacctgactttcc

SEQ ID NO: 89556 - DNA, 25 bp, Artificial
  Probe
attgtttctgtcacctgactttcca

SEQ ID NO: 89557 - DNA, 25 bp, Artificial
  Probe
gtcactgcttccttagatgtccacc

SEQ ID NO: 89558 - DNA, 25 bp, Artificial
  Probe
gctttgtaatcatgtgatcagtctg

SEQ ID NO: 89559 - DNA, 25 bp, Artificial
  Probe
agctttgtaatcatgtgatcagtct

SEQ ID NO: 89560 - DNA, 25 bp, Artificial
  Probe
cagctttgtaatcatgtgatcagtc

SEQ ID NO: 89561 - DNA, 25 bp, Artificial
  Probe
tcatgtgatcagtctgaatcattgt

SEQ ID NO: 89562 - DNA, 25 bp, Artificial
  Probe
catgtgatcagtctgaatcattgtt

SEQ ID NO: 89563 - DNA, 25 bp, Artificial
  Probe
atcatgtgatcagtctgaatcattg

SEQ ID NO: 89564 - DNA, 25 bp, Artificial
  Probe
ccagctttgtaatcatgtgatcagt

SEQ ID NO: 89565 - DNA, 25 bp, Artificial
  Probe
ttgtttctgtcacctgactttccag

SEQ ID NO: 89566 - DNA, 25 bp, Artificial
  Probe
ctcccatgtcactgcttccttagat

SEQ ID NO: 89567 - DNA, 25 bp, Artificial
  Probe
gtaatcatgtgatcagtctgaatca

SEQ ID NO: 89568 - DNA, 25 bp, Artificial
  Probe
ctttgtaatcatgtgatcagtctga

SEQ ID NO: 89569 - DNA, 25 bp, Artificial
  Probe
aatcatgtgatcagtctgaatcatt

SEQ ID NO: 89570 - DNA, 25 bp, Artificial
  Probe
ctcctgctcaaagtgaaccagattg

SEQ ID NO: 89571 - DNA, 25 bp, Artificial
  Probe
cccagctttgtaatcatgtgatcag

SEQ ID NO: 89572 - DNA, 25 bp, Artificial
  Probe
tttgtaatcatgtgatcagtctgaa

SEQ ID NO: 89573 - DNA, 25 bp, Artificial
  Probe
tcccatgtcactgcttccttagatg

SEQ ID NO: 89574 - DNA, 25 bp, Artificial
  Probe
tttctgtcacctgactttccagcta

SEQ ID NO: 89575 - DNA, 25 bp, Artificial
  Probe
taatcatgtgatcagtctgaatcat

SEQ ID NO: 89576 - DNA, 25 bp, Artificial
  Probe
cccatgtcactgcttccttagatgt

SEQ ID NO: 89577 - DNA, 25 bp, Artificial
  Probe
ttctgtcacctgactttccagctag

SEQ ID NO: 89578 - DNA, 25 bp, Artificial
  Probe
ttagagatgtagccatgtaagtgtc

SEQ ID NO: 89579 - DNA, 25 bp, Artificial
  Probe
tagagatgtagccatgtaagtgtct

SEQ ID NO: 89580 - DNA, 25 bp, Artificial
  Probe
agagatgtagccatgtaagtgtctt

SEQ ID NO: 89581 - DNA, 25 bp, Artificial
  Probe
agaactgaggtagcttagagatgta

SEQ ID NO: 89582 - DNA, 25 bp, Artificial
  Probe
gaactgaggtagcttagagatgtag

SEQ ID NO: 89583 - DNA, 25 bp, Artificial
  Probe
gagatgtagccatgtaagtgtctta

SEQ ID NO: 89584 - DNA, 25 bp, Artificial
  Probe
cttagagatgtagccatgtaagtgt

SEQ ID NO: 89585 - DNA, 25 bp, Artificial
  Probe
agatgtagccatgtaagtgtcttaa

SEQ ID NO: 89586 - DNA, 25 bp, Artificial
  Probe
cagaactgaggtagcttagagatgt

SEQ ID NO: 89587 - DNA, 25 bp, Artificial
  Probe
atcagaactgaggtagcttagagat

SEQ ID NO: 89588 - DNA, 25 bp, Artificial
  Probe
gaatcagaactgaggtagcttagag

SEQ ID NO: 89589 - DNA, 25 bp, Artificial
  Probe
aatcagaactgaggtagcttagaga

SEQ ID NO: 89590 - DNA, 25 bp, Artificial
  Probe
ttcaaggaaccacaagtatatgtat

SEQ ID NO: 89591 - DNA, 25 bp, Artificial
  Probe
tcagaactgaggtagcttagagatg

SEQ ID NO: 89592 - DNA, 25 bp, Artificial
  Probe
agaagtttcaaggaaccacaagtat

SEQ ID NO: 89593 - DNA, 25 bp, Artificial
  Probe
aagaagtttcaaggaaccacaagta

SEQ ID NO: 89594 - DNA, 25 bp, Artificial
  Probe
caaagaagtttcaaggaaccacaag

SEQ ID NO: 89595 - DNA, 25 bp, Artificial
  Probe
agtttcaaggaaccacaagtatatg

SEQ ID NO: 89596 - DNA, 25 bp, Artificial
  Probe
gaagtttcaaggaaccacaagtata

SEQ ID NO: 89597 - DNA, 25 bp, Artificial
  Probe
aaagaagtttcaaggaaccacaagt

SEQ ID NO: 89598 - DNA, 25 bp, Artificial
  Probe
cgtacattccaaagaagtttcaagg

SEQ ID NO: 89599 - DNA, 25 bp, Artificial
  Probe
gtttcaaggaaccacaagtatatgt

SEQ ID NO: 89600 - DNA, 25 bp, Artificial
  Probe
aagtttcaaggaaccacaagtatat

SEQ ID NO: 89601 - DNA, 25 bp, Artificial
  Probe
gcttagagatgtagccatgtaagtg

SEQ ID NO: 89602 - DNA, 25 bp, Artificial
  Probe
tcaaggaaccacaagtatatgtata

SEQ ID NO: 89603 - DNA, 25 bp, Artificial
  Probe
atactgtagcctgatttcatattgt

SEQ ID NO: 89604 - DNA, 25 bp, Artificial
  Probe
ccaaagaagtttcaaggaaccacaa

SEQ ID NO: 89605 - DNA, 25 bp, Artificial
  Probe
gtagcttagagatgtagccatgtaa

SEQ ID NO: 89606 - DNA, 25 bp, Artificial
  Probe
tagcttagagatgtagccatgtaag

SEQ ID NO: 89607 - DNA, 25 bp, Artificial
  Probe
agcttagagatgtagccatgtaagt

SEQ ID NO: 89608 - DNA, 25 bp, Artificial
  Probe
agccatgtaagtgtcttaaatgttt

SEQ ID NO: 89609 - DNA, 25 bp, Artificial
  Probe
gtagccatgtaagtgtcttaaatgt

SEQ ID NO: 89610 - DNA, 25 bp, Artificial
  Probe
tgtagccatgtaagtgtcttaaatg

SEQ ID NO: 89611 - DNA, 25 bp, Artificial
  Probe
ggtagcttagagatgtagccatgta

SEQ ID NO: 89612 - DNA, 25 bp, Artificial
  Probe
gtacattccaaagaagtttcaagga

SEQ ID NO: 89613 - DNA, 25 bp, Artificial
  Probe
tactgtagcctgatttcatattgta

SEQ ID NO: 89614 - DNA, 25 bp, Artificial
  Probe
tttcaaggaaccacaagtatatgta

SEQ ID NO: 89615 - DNA, 25 bp, Artificial
  Probe
gatgtagccatgtaagtgtcttaaa

SEQ ID NO: 89616 - DNA, 25 bp, Artificial
  Probe
aactgaggtagcttagagatgtagc

SEQ ID NO: 89617 - DNA, 25 bp, Artificial
  Probe
acgtacattccaaagaagtttcaag

SEQ ID NO: 89618 - DNA, 25 bp, Artificial
  Probe
tagccatgtaagtgtcttaaatgtt

SEQ ID NO: 89619 - DNA, 25 bp, Artificial
  Probe
tgttgaactcttacgtacattccaa

SEQ ID NO: 89620 - DNA, 25 bp, Artificial
  Probe
atgtagccatgtaagtgtcttaaat

SEQ ID NO: 89621 - DNA, 25 bp, Artificial
  Probe
gaggtagcttagagatgtagccatg

SEQ ID NO: 89622 - DNA, 25 bp, Artificial
  Probe
tgaggtagcttagagatgtagccat

SEQ ID NO: 89623 - DNA, 25 bp, Artificial
  Probe
ctacaagagagtcagcaagagaatt

SEQ ID NO: 89624 - DNA, 25 bp, Artificial
  Probe
tctacaagagagtcagcaagagaat

SEQ ID NO: 89625 - DNA, 25 bp, Artificial
  Probe
gtctacaagagagtcagcaagagaa

SEQ ID NO: 89626 - DNA, 25 bp, Artificial
  Probe
ttcaatggagacacaatcaccaata

SEQ ID NO: 89627 - DNA, 25 bp, Artificial
  Probe
attcaatggagacacaatcaccaat

SEQ ID NO: 89628 - DNA, 25 bp, Artificial
  Probe
tcaatggagacacaatcaccaatac

SEQ ID NO: 89629 - DNA, 25 bp, Artificial
  Probe
gagacacaatcaccaataccatgac

SEQ ID NO: 89630 - DNA, 25 bp, Artificial
  Probe
aattcaatggagacacaatcaccaa

SEQ ID NO: 89631 - DNA, 25 bp, Artificial
  Probe
ggttaagatggagggtgacaataaa

SEQ ID NO: 89632 - DNA, 25 bp, Artificial
  Probe
acaagagagtcagcaagagaattta

SEQ ID NO: 89633 - DNA, 25 bp, Artificial
  Probe
tacaagagagtcagcaagagaattt

SEQ ID NO: 89634 - DNA, 25 bp, Artificial
  Probe
caagagagtcagcaagagaatttag

SEQ ID NO: 89635 - DNA, 25 bp, Artificial
  Probe
aagagagtcagcaagagaatttaga

SEQ ID NO: 89636 - DNA, 25 bp, Artificial
  Probe
cacaatcaccaataccatgacactg

SEQ ID NO: 89637 - DNA, 25 bp, Artificial
  Probe
gacacaatcaccaataccatgacac

SEQ ID NO: 89638 - DNA, 25 bp, Artificial
  Probe
catcgtctacaagagagtcagcaag

SEQ ID NO: 89639 - DNA, 25 bp, Artificial
  Probe
agacacaatcaccaataccatgaca

SEQ ID NO: 89640 - DNA, 25 bp, Artificial
  Probe
tggttaagatggagggtgacaataa

SEQ ID NO: 89641 - DNA, 25 bp, Artificial
  Probe
atcgtctacaagagagtcagcaaga

SEQ ID NO: 89642 - DNA, 25 bp, Artificial
  Probe
caatggagacacaatcaccaatacc

SEQ ID NO: 89643 - DNA, 25 bp, Artificial
  Probe
gaaagtcaaactcaccatcacctat

SEQ ID NO: 89644 - DNA, 25 bp, Artificial
  Probe
acacaatcaccaataccatgacact

SEQ ID NO: 89645 - DNA, 25 bp, Artificial
  Probe
aaagtcaaactcaccatcacctatg

SEQ ID NO: 89646 - DNA, 25 bp, Artificial
  Probe
aatggagacacaatcaccaatacca

SEQ ID NO: 89647 - DNA, 25 bp, Artificial
  Probe
atgaagggaagaaagtcaaactcac

SEQ ID NO: 89648 - DNA, 25 bp, Artificial
  Probe
ggagacacaatcaccaataccatga

SEQ ID NO: 89649 - DNA, 25 bp, Artificial
  Probe
agagtcagcaagagaatttagacaa

SEQ ID NO: 89650 - DNA, 25 bp, Artificial
  Probe
agagagtcagcaagagaatttagac

SEQ ID NO: 89651 - DNA, 25 bp, Artificial
  Probe
gagtcagcaagagaatttagacaag

SEQ ID NO: 89652 - DNA, 25 bp, Artificial
  Probe
gagagtcagcaagagaatttagaca

SEQ ID NO: 89653 - DNA, 25 bp, Artificial
  Probe
gtggttaagatggagggtgacaata

SEQ ID NO: 89654 - DNA, 25 bp, Artificial
  Probe
gcaagagaatttagacaaggctgta

SEQ ID NO: 89655 - DNA, 25 bp, Artificial
  Probe
agtcagcaagagaatttagacaagg

SEQ ID NO: 89656 - DNA, 25 bp, Artificial
  Probe
agaaagtcaaactcaccatcaccta

SEQ ID NO: 89657 - DNA, 25 bp, Artificial
  Probe
caagagaatttagacaaggctgtat

SEQ ID NO: 89658 - DNA, 25 bp, Artificial
  Probe
atggtgacaactttcaaaggcataa

SEQ ID NO: 89659 - DNA, 25 bp, Artificial
  Probe
aatggtgacaactttcaaaggcata

SEQ ID NO: 89660 - DNA, 25 bp, Artificial
  Probe
cgtctacaagagagtcagcaagaga

SEQ ID NO: 89661 - DNA, 25 bp, Artificial
  Probe
tcgtctacaagagagtcagcaagag

SEQ ID NO: 89662 - DNA, 25 bp, Artificial
  Probe
acatcgtctacaagagagtcagcaa

SEQ ID NO: 89663 - DNA, 25 bp, Artificial
  Probe
tggtgacaactttcaaaggcataaa

SEQ ID NO: 89664 - DNA, 25 bp, Artificial
  Probe
agaatttagacaaggctgtatttca

SEQ ID NO: 89665 - DNA, 25 bp, Artificial
  Probe
gaagaaagtcaaactcaccatcacc

SEQ ID NO: 89666 - DNA, 25 bp, Artificial
  Probe
ggaagaaagtcaaactcaccatcac

SEQ ID NO: 89667 - DNA, 25 bp, Artificial
  Probe
catgaagggaagaaagtcaaactca

SEQ ID NO: 89668 - DNA, 25 bp, Artificial
  Probe
aattcttgattgtgatactgtggtc

SEQ ID NO: 89669 - DNA, 25 bp, Artificial
  Probe
attcttgattgtgatactgtggtca

SEQ ID NO: 89670 - DNA, 25 bp, Artificial
  Probe
tgtagtaaaggtgcccaagaaatta

SEQ ID NO: 89671 - DNA, 25 bp, Artificial
  Probe
taagaatttgtagtaaaggtgccca

SEQ ID NO: 89672 - DNA, 25 bp, Artificial
  Probe
ttaagaatttgtagtaaaggtgccc

SEQ ID NO: 89673 - DNA, 25 bp, Artificial
  Probe
gtagtaaaggtgcccaagaaattat

SEQ ID NO: 89674 - DNA, 25 bp, Artificial
  Probe
aaattcttgattgtgatactgtggt

SEQ ID NO: 89675 - DNA, 25 bp, Artificial
  Probe
tttgtagtaaaggtgcccaagaaat

SEQ ID NO: 89676 - DNA, 25 bp, Artificial
  Probe
atttgtagtaaaggtgcccaagaaa

SEQ ID NO: 89677 - DNA, 25 bp, Artificial
  Probe
ttgtagtaaaggtgcccaagaaatt

SEQ ID NO: 89678 - DNA, 25 bp, Artificial
  Probe
aatttgtagtaaaggtgcccaagaa

SEQ ID NO: 89679 - DNA, 25 bp, Artificial
  Probe
aagaatttgtagtaaaggtgcccaa

SEQ ID NO: 89680 - DNA, 25 bp, Artificial
  Probe
gaatttgtagtaaaggtgcccaaga

SEQ ID NO: 89681 - DNA, 25 bp, Artificial
  Probe
agaatttgtagtaaaggtgcccaag

SEQ ID NO: 89682 - DNA, 25 bp, Artificial
  Probe
gccttgaagaacaacctaaattatg

SEQ ID NO: 89683 - DNA, 25 bp, Artificial
  Probe
agtaaaggtgcccaagaaattatat

SEQ ID NO: 89684 - DNA, 25 bp, Artificial
  Probe
tagtaaaggtgcccaagaaattata

SEQ ID NO: 89685 - DNA, 25 bp, Artificial
  Probe
gtaaaggtgcccaagaaattatatt

SEQ ID NO: 89686 - DNA, 25 bp, Artificial
  Probe
tttaagaatttgtagtaaaggtgcc

SEQ ID NO: 89687 - DNA, 25 bp, Artificial
  Probe
taaaggtgcccaagaaattatattg

SEQ ID NO: 89688 - DNA, 25 bp, Artificial
  Probe
aaagattggattctagcaaatgcac

SEQ ID NO: 89689 - DNA, 25 bp, Artificial
  Probe
caaagattggattctagcaaatgca

SEQ ID NO: 89690 - DNA, 25 bp, Artificial
  Probe
ccttgaagaacaacctaaattatga

SEQ ID NO: 89691 - DNA, 25 bp, Artificial
  Probe
gattctagcaaatgcacttggtata

SEQ ID NO: 89692 - DNA, 25 bp, Artificial
  Probe
ttctagcaaatgcacttggtatact

SEQ ID NO: 89693 - DNA, 25 bp, Artificial
  Probe
gattggattctagcaaatgcacttg

SEQ ID NO: 89694 - DNA, 25 bp, Artificial
  Probe
agattggattctagcaaatgcactt

SEQ ID NO: 89695 - DNA, 25 bp, Artificial
  Probe
aagattggattctagcaaatgcact

SEQ ID NO: 89696 - DNA, 25 bp, Artificial
  Probe
tctagcaaatgcacttggtatacta

SEQ ID NO: 89697 - DNA, 25 bp, Artificial
  Probe
attctagcaaatgcacttggtatac

SEQ ID NO: 89698 - DNA, 25 bp, Artificial
  Probe
ggattctagcaaatgcacttggtat

SEQ ID NO: 89699 - DNA, 25 bp, Artificial
  Probe
gaacaacctaaattatgaagagagt

SEQ ID NO: 89700 - DNA, 25 bp, Artificial
  Probe
tagcaaatgcacttggtatactaag

SEQ ID NO: 89701 - DNA, 25 bp, Artificial
  Probe
ctagcaaatgcacttggtatactaa

SEQ ID NO: 89702 - DNA, 25 bp, Artificial
  Probe
tcatatgcccttgtttgtcacttac

SEQ ID NO: 89703 - DNA, 25 bp, Artificial
  Probe
gtcatatgcccttgtttgtcactta

SEQ ID NO: 89704 - DNA, 25 bp, Artificial
  Probe
gccatttattgttttgtccttttct

SEQ ID NO: 89705 - DNA, 25 bp, Artificial
  Probe
agaacaacctaaattatgaagagag

SEQ ID NO: 89706 - DNA, 25 bp, Artificial
  Probe
aaaacaagcaaacaaacaaacaaaa

SEQ ID NO: 89707 - DNA, 25 bp, Artificial
  Probe
attggattctagcaaatgcacttgg

SEQ ID NO: 89708 - DNA, 25 bp, Artificial
  Probe
tgaagaacaacctaaattatgaaga

SEQ ID NO: 89709 - DNA, 25 bp, Artificial
  Probe
cgaaaggacaaaattaaggattgcc

SEQ ID NO: 89710 - DNA, 25 bp, Artificial
  Probe
ccgaaaggacaaaattaaggattgc

SEQ ID NO: 89711 - DNA, 25 bp, Artificial
  Probe
ggccttgaagaacaacctaaattat

SEQ ID NO: 89712 - DNA, 25 bp, Artificial
  Probe
acaacctaaattatgaagagagttt

SEQ ID NO: 89713 - DNA, 25 bp, Artificial
  Probe
tggaagacaatgaagagagaatgag

SEQ ID NO: 89714 - DNA, 25 bp, Artificial
  Probe
ctggaagacaatgaagagagaatga

SEQ ID NO: 89715 - DNA, 25 bp, Artificial
  Probe
tctggaagacaatgaagagagaatg

SEQ ID NO: 89716 - DNA, 25 bp, Artificial
  Probe
gagttctggaagacaatgaagagag

SEQ ID NO: 89717 - DNA, 25 bp, Artificial
  Probe
gaagacaatgaagagagaatgagcc

SEQ ID NO: 89718 - DNA, 25 bp, Artificial
  Probe
ggaagacaatgaagagagaatgagc

SEQ ID NO: 89719 - DNA, 25 bp, Artificial
  Probe
agttctggaagacaatgaagagaga

SEQ ID NO: 89720 - DNA, 25 bp, Artificial
  Probe
ccaagacattgacttcctcattgaa

SEQ ID NO: 89721 - DNA, 25 bp, Artificial
  Probe
ttaggagataaggtcaacttcttcc

SEQ ID NO: 89722 - DNA, 25 bp, Artificial
  Probe
ttctatatcgtggtgtcacagtaga

SEQ ID NO: 89723 - DNA, 25 bp, Artificial
  Probe
caccaagacattgacttcctcattg

SEQ ID NO: 89724 - DNA, 25 bp, Artificial
  Probe
tatatcgtggtgtcacagtagagtc

SEQ ID NO: 89725 - DNA, 25 bp, Artificial
  Probe
ctatatcgtggtgtcacagtagagt

SEQ ID NO: 89726 - DNA, 25 bp, Artificial
  Probe
cgagttctggaagacaatgaagaga

SEQ ID NO: 89727 - DNA, 25 bp, Artificial
  Probe
tctatatcgtggtgtcacagtagag

SEQ ID NO: 89728 - DNA, 25 bp, Artificial
  Probe
accaagacattgacttcctcattga

SEQ ID NO: 89729 - DNA, 25 bp, Artificial
  Probe
tcaccaagacattgacttcctcatt

SEQ ID NO: 89730 - DNA, 25 bp, Artificial
  Probe
cttaggagataaggtcaacttcttc

SEQ ID NO: 89731 - DNA, 25 bp, Artificial
  Probe
gttctctaggtagacagctaagttg

SEQ ID NO: 89732 - DNA, 25 bp, Artificial
  Probe
agttctctaggtagacagctaagtt

SEQ ID NO: 89733 - DNA, 25 bp, Artificial
  Probe
ttcagttctctaggtagacagctaa

SEQ ID NO: 89734 - DNA, 25 bp, Artificial
  Probe
tcagttctctaggtagacagctaag

SEQ ID NO: 89735 - DNA, 25 bp, Artificial
  Probe
cagttctctaggtagacagctaagt

SEQ ID NO: 89736 - DNA, 25 bp, Artificial
  Probe
taggagataaggtcaacttcttccg

SEQ ID NO: 89737 - DNA, 25 bp, Artificial
  Probe
aagacaatgaagagagaatgagccg

SEQ ID NO: 89738 - DNA, 25 bp, Artificial
  Probe
gagataaggtcaacttcttccgcat

SEQ ID NO: 89739 - DNA, 25 bp, Artificial
  Probe
ctcaccaagacattgacttcctcat

SEQ ID NO: 89740 - DNA, 25 bp, Artificial
  Probe
ttctctaggtagacagctaagttgt

SEQ ID NO: 89741 - DNA, 25 bp, Artificial
  Probe
aactcaccaagacattgacttcctc

SEQ ID NO: 89742 - DNA, 25 bp, Artificial
  Probe
ttctggaagacaatgaagagagaat

SEQ ID NO: 89743 - DNA, 25 bp, Artificial
  Probe
gttctggaagacaatgaagagagaa

SEQ ID NO: 89744 - DNA, 25 bp, Artificial
  Probe
atgtatttgtagtttgttccagagt

SEQ ID NO: 89745 - DNA, 25 bp, Artificial
  Probe
caactcaccaagacattgacttcct

SEQ ID NO: 89746 - DNA, 25 bp, Artificial
  Probe
ccgagaaggatatgaaatggtgttc

SEQ ID NO: 89747 - DNA, 25 bp, Artificial
  Probe
tgtatttgtagtttgttccagagta

SEQ ID NO: 89748 - DNA, 25 bp, Artificial
  Probe
agataaggtcaacttcttccgcatg

SEQ ID NO: 89749 - DNA, 25 bp, Artificial
  Probe
ggtgtcacagtagagtccagtttaa

SEQ ID NO: 89750 - DNA, 25 bp, Artificial
  Probe
tttctatatcgtggtgtcacagtag

SEQ ID NO: 89751 - DNA, 25 bp, Artificial
  Probe
ttgtagtttgttccagagtaattct

SEQ ID NO: 89752 - DNA, 25 bp, Artificial
  Probe
atttctatatcgtggtgtcacagta

SEQ ID NO: 89753 - DNA, 25 bp, Artificial
  Probe
tatttctatatcgtggtgtcacagt

SEQ ID NO: 89754 - DNA, 25 bp, Artificial
  Probe
actttcagttctctaggtagacagc

SEQ ID NO: 89755 - DNA, 25 bp, Artificial
  Probe
tctatttctatatcgtggtgtcaca

SEQ ID NO: 89756 - DNA, 25 bp, Artificial
  Probe
gtgtcacagtagagtccagtttaaa

SEQ ID NO: 89757 - DNA, 25 bp, Artificial
  Probe
agcaactcaccaagacattgacttc

SEQ ID NO: 89758 - DNA, 25 bp, Artificial
  Probe
cacatctactcattcactcggatac

SEQ ID NO: 89759 - DNA, 25 bp, Artificial
  Probe
acacatctactcattcactcggata

SEQ ID NO: 89760 - DNA, 25 bp, Artificial
  Probe
acatctactcattcactcggatacc

SEQ ID NO: 89761 - DNA, 25 bp, Artificial
  Probe
cacacatctactcattcactcggat

SEQ ID NO: 89762 - DNA, 25 bp, Artificial
  Probe
caacaccaactgtctaacactactg

SEQ ID NO: 89763 - DNA, 25 bp, Artificial
  Probe
ccttatcatctaggaagaacgcatt

SEQ ID NO: 89764 - DNA, 25 bp, Artificial
  Probe
aacaccaactgtctaacactactgt

SEQ ID NO: 89765 - DNA, 25 bp, Artificial
  Probe
tgtccacacatctactcattcactc

SEQ ID NO: 89766 - DNA, 25 bp, Artificial
  Probe
ctgtccacacatctactcattcact

SEQ ID NO: 89767 - DNA, 25 bp, Artificial
  Probe
cgggtgtaaatgtttctaaatctcc

SEQ ID NO: 89768 - DNA, 25 bp, Artificial
  Probe
gcgggtgtaaatgtttctaaatctc

SEQ ID NO: 89769 - DNA, 25 bp, Artificial
  Probe
gtccacacatctactcattcactcg

SEQ ID NO: 89770 - DNA, 25 bp, Artificial
  Probe
aaatgtttctaaatctcctgagtgc

SEQ ID NO: 89771 - DNA, 25 bp, Artificial
  Probe
accaactgtctaacactactgtgag

SEQ ID NO: 89772 - DNA, 25 bp, Artificial
  Probe
actgtccacacatctactcattcac

SEQ ID NO: 89773 - DNA, 25 bp, Artificial
  Probe
cactgtccacacatctactcattca

SEQ ID NO: 89774 - DNA, 25 bp, Artificial
  Probe
acactgtccacacatctactcattc

SEQ ID NO: 89775 - DNA, 25 bp, Artificial
  Probe
tgcgggtgtaaatgtttctaaatct

SEQ ID NO: 89776 - DNA, 25 bp, Artificial
  Probe
gtgcgggtgtaaatgtttctaaatc

SEQ ID NO: 89777 - DNA, 25 bp, Artificial
  Probe
gcattgtgaactagcataatcatat

SEQ ID NO: 89778 - DNA, 25 bp, Artificial
  Probe
caccaactgtctaacactactgtga

SEQ ID NO: 89779 - DNA, 25 bp, Artificial
  Probe
gggtgtaaatgtttctaaatctcct

SEQ ID NO: 89780 - DNA, 25 bp, Artificial
  Probe
cacactgtccacacatctactcatt

SEQ ID NO: 89781 - DNA, 25 bp, Artificial
  Probe
tgtgcgggtgtaaatgtttctaaat

SEQ ID NO: 89782 - DNA, 25 bp, Artificial
  Probe
caacctcatcactcatagcagaaag

SEQ ID NO: 89783 - DNA, 25 bp, Artificial
  Probe
gtatccctttgaaatcatcagaagc

SEQ ID NO: 89784 - DNA, 25 bp, Artificial
  Probe
tatccctttgaaatcatcagaagca

SEQ ID NO: 89785 - DNA, 25 bp, Artificial
  Probe
tccaacctcatcactcatagcagaa

SEQ ID NO: 89786 - DNA, 25 bp, Artificial
  Probe
ctttgaaatcatcagaagcaccatc

SEQ ID NO: 89787 - DNA, 25 bp, Artificial
  Probe
acaccaactgtctaacactactgtg

SEQ ID NO: 89788 - DNA, 25 bp, Artificial
  Probe
ccaactgtctaacactactgtgagg

SEQ ID NO: 89789 - DNA, 25 bp, Artificial
  Probe
ttatcatctaggaagaacgcatttc

SEQ ID NO: 89790 - DNA, 25 bp, Artificial
  Probe
cttatcatctaggaagaacgcattt

SEQ ID NO: 89791 - DNA, 25 bp, Artificial
  Probe
tttgaaatcatcagaagcaccatca

SEQ ID NO: 89792 - DNA, 25 bp, Artificial
  Probe
ctgtgcgggtgtaaatgtttctaaa

SEQ ID NO: 89793 - DNA, 25 bp, Artificial
  Probe
gcaacaccaactgtctaacactact

SEQ ID NO: 89794 - DNA, 25 bp, Artificial
  Probe
agtatccctttgaaatcatcagaag

SEQ ID NO: 89795 - DNA, 25 bp, Artificial
  Probe
catctactcattcactcggataccc

SEQ ID NO: 89796 - DNA, 25 bp, Artificial
  Probe
ggtgtaaatgtttctaaatctcctg

SEQ ID NO: 89797 - DNA, 25 bp, Artificial
  Probe
atccctttgaaatcatcagaagcac

SEQ ID NO: 89798 - DNA, 25 bp, Artificial
  Probe
ttgaaatcatcagaagcaccatcag

SEQ ID NO: 89799 - DNA, 25 bp, Artificial
  Probe
aatctcctgagtgcattgtgaacta

SEQ ID NO: 89800 - DNA, 25 bp, Artificial
  Probe
ctccaacctcatcactcatagcaga

SEQ ID NO: 89801 - DNA, 25 bp, Artificial
  Probe
gagatgaactcctgtttctaaggtc

SEQ ID NO: 89802 - DNA, 25 bp, Artificial
  Probe
cctttgaaatcatcagaagcaccat

SEQ ID NO: 89803 - DNA, 25 bp, Artificial
  Probe
cttccttgtgtattgcgtaattgat

SEQ ID NO: 89804 - DNA, 25 bp, Artificial
  Probe
tcctaatgttgactgacctgtaatt

SEQ ID NO: 89805 - DNA, 25 bp, Artificial
  Probe
aatgcttaccatctgacaatagtga

SEQ ID NO: 89806 - DNA, 25 bp, Artificial
  Probe
ttccttgtgtattgcgtaattgatt

SEQ ID NO: 89807 - DNA, 25 bp, Artificial
  Probe
atgcttaccatctgacaatagtgac

SEQ ID NO: 89808 - DNA, 25 bp, Artificial
  Probe
gcttaccatctgacaatagtgacta

SEQ ID NO: 89809 - DNA, 25 bp, Artificial
  Probe
taccatctgacaatagtgactacca

SEQ ID NO: 89810 - DNA, 25 bp, Artificial
  Probe
ttaccatctgacaatagtgactacc

SEQ ID NO: 89811 - DNA, 25 bp, Artificial
  Probe
ccatctgacaatagtgactaccata

SEQ ID NO: 89812 - DNA, 25 bp, Artificial
  Probe
ttgtgattggtgtatctcagagtag

SEQ ID NO: 89813 - DNA, 25 bp, Artificial
  Probe
gttgtgattggtgtatctcagagta

SEQ ID NO: 89814 - DNA, 25 bp, Artificial
  Probe
accatctgacaatagtgactaccat

SEQ ID NO: 89815 - DNA, 25 bp, Artificial
  Probe
tgcttaccatctgacaatagtgact

SEQ ID NO: 89816 - DNA, 25 bp, Artificial
  Probe
cttaccatctgacaatagtgactac

SEQ ID NO: 89817 - DNA, 25 bp, Artificial
  Probe
gtcctaatgttgactgacctgtaat

SEQ ID NO: 89818 - DNA, 25 bp, Artificial
  Probe
gtgttgtgattggtgtatctcagag

SEQ ID NO: 89819 - DNA, 25 bp, Artificial
  Probe
tgttgtgattggtgtatctcagagt

SEQ ID NO: 89820 - DNA, 25 bp, Artificial
  Probe
gcttccttgtgtattgcgtaattga

SEQ ID NO: 89821 - DNA, 25 bp, Artificial
  Probe
gtgtgttgtgattggtgtatctcag

SEQ ID NO: 89822 - DNA, 25 bp, Artificial
  Probe
tgtgattggtgtatctcagagtagc

SEQ ID NO: 89823 - DNA, 25 bp, Artificial
  Probe
tgtgttgtgattggtgtatctcaga

SEQ ID NO: 89824 - DNA, 25 bp, Artificial
  Probe
atcacatacaagatcattcggcatg

SEQ ID NO: 89825 - DNA, 25 bp, Artificial
  Probe
catctgacaatagtgactaccatat

SEQ ID NO: 89826 - DNA, 25 bp, Artificial
  Probe
tagttgttgaatagctgttggcatt

SEQ ID NO: 89827 - DNA, 25 bp, Artificial
  Probe
ccaggaaacaacaacaagataaaca

SEQ ID NO: 89828 - DNA, 25 bp, Artificial
  Probe
tcagtttcaataaaggtaagtgtgc

SEQ ID NO: 89829 - DNA, 25 bp, Artificial
  Probe
actttggctatacttatgtgtgact

SEQ ID NO: 89830 - DNA, 25 bp, Artificial
  Probe
tattgctttgacagagaacattgag

SEQ ID NO: 89831 - DNA, 25 bp, Artificial
  Probe
aggaaacaacaacaagataaacaca

SEQ ID NO: 89832 - DNA, 25 bp, Artificial
  Probe
cagtttcaataaaggtaagtgtgcc

SEQ ID NO: 89833 - DNA, 25 bp, Artificial
  Probe
caggaaacaacaacaagataaacac

SEQ ID NO: 89834 - DNA, 25 bp, Artificial
  Probe
tggttctgaaaggttagtttaatgc

SEQ ID NO: 89835 - DNA, 25 bp, Artificial
  Probe
ggctggttatcttatggtttgattt

SEQ ID NO: 89836 - DNA, 25 bp, Artificial
  Probe
ccatccatagtctatagcattgttc

SEQ ID NO: 89837 - DNA, 25 bp, Artificial
  Probe
aaacacaaatgactaagagcagatt

SEQ ID NO: 89838 - DNA, 25 bp, Artificial
  Probe
agtttcaataaaggtaagtgtgcca

SEQ ID NO: 89839 - DNA, 25 bp, Artificial
  Probe
tttaagtgcccaagtgtaatttagc

SEQ ID NO: 89840 - DNA, 25 bp, Artificial
  Probe
tccttgtgtattgcgtaattgattt

SEQ ID NO: 89841 - DNA, 25 bp, Artificial
  Probe
agttctggttctgaaaggttagttt

SEQ ID NO: 89842 - DNA, 25 bp, Artificial
  Probe
aagttctggttctgaaaggttagtt

SEQ ID NO: 89843 - DNA, 25 bp, Artificial
  Probe
atttgacaagttctggttctgaaag

SEQ ID NO: 89844 - DNA, 25 bp, Artificial
  Probe
gatttgacaagttctggttctgaaa

SEQ ID NO: 89845 - DNA, 25 bp, Artificial
  Probe
atattgctttgacagagaacattga

SEQ ID NO: 89846 - DNA, 25 bp, Artificial
  Probe
ctttggctatacttatgtgtgactt

SEQ ID NO: 89847 - DNA, 25 bp, Artificial
  Probe
ggaaacaacaacaagataaacacaa

SEQ ID NO: 89848 - DNA, 25 bp, Artificial
  Probe
gttccacagaagtaccagacattat

SEQ ID NO: 89849 - DNA, 25 bp, Artificial
  Probe
ttccacagaagtaccagacattatt

SEQ ID NO: 89850 - DNA, 25 bp, Artificial
  Probe
tgttccacagaagtaccagacatta

SEQ ID NO: 89851 - DNA, 25 bp, Artificial
  Probe
ttcaaatagagtgtcccagaagaaa

SEQ ID NO: 89852 - DNA, 25 bp, Artificial
  Probe
catacttcaaatagagtgtcccaga

SEQ ID NO: 89853 - DNA, 25 bp, Artificial
  Probe
aaccatacttcaaatagagtgtccc

SEQ ID NO: 89854 - DNA, 25 bp, Artificial
  Probe
ccatacttcaaatagagtgtcccag

SEQ ID NO: 89855 - DNA, 25 bp, Artificial
  Probe
tccacagaagtaccagacattattt

SEQ ID NO: 89856 - DNA, 25 bp, Artificial
  Probe
gaaccatacttcaaatagagtgtcc

SEQ ID NO: 89857 - DNA, 25 bp, Artificial
  Probe
atacttcaaatagagtgtcccagaa

SEQ ID NO: 89858 - DNA, 25 bp, Artificial
  Probe
accatacttcaaatagagtgtccca

SEQ ID NO: 89859 - DNA, 25 bp, Artificial
  Probe
ccacagaagtaccagacattattta

SEQ ID NO: 89860 - DNA, 25 bp, Artificial
  Probe
gtgttccacagaagtaccagacatt

SEQ ID NO: 89861 - DNA, 25 bp, Artificial
  Probe
agtgttccacagaagtaccagacat

SEQ ID NO: 89862 - DNA, 25 bp, Artificial
  Probe
tcaaatagagtgtcccagaagaaaa

SEQ ID NO: 89863 - DNA, 25 bp, Artificial
  Probe
aaatagagtgtcccagaagaaaaga

SEQ ID NO: 89864 - DNA, 25 bp, Artificial
  Probe
caaatagagtgtcccagaagaaaag

SEQ ID NO: 89865 - DNA, 25 bp, Artificial
  Probe
aaacagtataatttagcttatcggc

SEQ ID NO: 89866 - DNA, 25 bp, Artificial
  Probe
gagtgttccacagaagtaccagaca

SEQ ID NO: 89867 - DNA, 25 bp, Artificial
  Probe
gagggacacttgggaacttgttatg

SEQ ID NO: 89868 - DNA, 25 bp, Artificial
  Probe
cttcaaatagagtgtcccagaagaa

SEQ ID NO: 89869 - DNA, 25 bp, Artificial
  Probe
tacttcaaatagagtgtcccagaag

SEQ ID NO: 89870 - DNA, 25 bp, Artificial
  Probe
cacagaagtaccagacattatttat

SEQ ID NO: 89871 - DNA, 25 bp, Artificial
  Probe
tgattaacttggtgataaaagcagt

SEQ ID NO: 89872 - DNA, 25 bp, Artificial
  Probe
tgaaccatacttcaaatagagtgtc

SEQ ID NO: 89873 - DNA, 25 bp, Artificial
  Probe
aacagtataatttagcttatcggcc

SEQ ID NO: 89874 - DNA, 25 bp, Artificial
  Probe
acttcaaatagagtgtcccagaaga

SEQ ID NO: 89875 - DNA, 25 bp, Artificial
  Probe
atgattaacttggtgataaaagcag

SEQ ID NO: 89876 - DNA, 25 bp, Artificial
  Probe
catgattaacttggtgataaaagca

SEQ ID NO: 89877 - DNA, 25 bp, Artificial
  Probe
ggagtgttccacagaagtaccagac

SEQ ID NO: 89878 - DNA, 25 bp, Artificial
  Probe
caggagtgttccacagaagtaccag

SEQ ID NO: 89879 - DNA, 25 bp, Artificial
  Probe
aggagtgttccacagaagtaccaga

SEQ ID NO: 89880 - DNA, 25 bp, Artificial
  Probe
ggagggacacttgggaacttgttat

SEQ ID NO: 89881 - DNA, 25 bp, Artificial
  Probe
acacttgggaacttgttatgcagtc

SEQ ID NO: 89882 - DNA, 25 bp, Artificial
  Probe
gacacttgggaacttgttatgcagt

SEQ ID NO: 89883 - DNA, 25 bp, Artificial
  Probe
acttggtgataaaagcagttattaa

SEQ ID NO: 89884 - DNA, 25 bp, Artificial
  Probe
acaggagtgttccacagaagtacca

SEQ ID NO: 89885 - DNA, 25 bp, Artificial
  Probe
aacaggagtgttccacagaagtacc

SEQ ID NO: 89886 - DNA, 25 bp, Artificial
  Probe
ggacacttgggaacttgttatgcag

SEQ ID NO: 89887 - DNA, 25 bp, Artificial
  Probe
gattaacttggtgataaaagcagtt

SEQ ID NO: 89888 - DNA, 25 bp, Artificial
  Probe
ggtgataaaagcagttattaaaagt

SEQ ID NO: 89889 - DNA, 25 bp, Artificial
  Probe
tggtgataaaagcagttattaaaag

SEQ ID NO: 89890 - DNA, 25 bp, Artificial
  Probe
cttggtgataaaagcagttattaaa

SEQ ID NO: 89891 - DNA, 25 bp, Artificial
  Probe
agggacacttgggaacttgttatgc

SEQ ID NO: 89892 - DNA, 25 bp, Artificial
  Probe
ttggtgataaaagcagttattaaaa

SEQ ID NO: 89893 - DNA, 25 bp, Artificial
  Probe
ttcagtctggtctcactaagttatc

SEQ ID NO: 89894 - DNA, 25 bp, Artificial
  Probe
tcagtctggtctcactaagttatcc

SEQ ID NO: 89895 - DNA, 25 bp, Artificial
  Probe
agtctggtctcactaagttatccaa

SEQ ID NO: 89896 - DNA, 25 bp, Artificial
  Probe
gtcttgaacctgccttatagcctag

SEQ ID NO: 89897 - DNA, 25 bp, Artificial
  Probe
cagtctggtctcactaagttatcca

SEQ ID NO: 89898 - DNA, 25 bp, Artificial
  Probe
aagtcttcaacgcatttgtcatttc

SEQ ID NO: 89899 - DNA, 25 bp, Artificial
  Probe
ccaacagaaaccaatgagaagtctt

SEQ ID NO: 89900 - DNA, 25 bp, Artificial
  Probe
tttcagtctggtctcactaagttat

SEQ ID NO: 89901 - DNA, 25 bp, Artificial
  Probe
aactggtcttgaacctgccttatag

SEQ ID NO: 89902 - DNA, 25 bp, Artificial
  Probe
caacagaaaccaatgagaagtcttc

SEQ ID NO: 89903 - DNA, 25 bp, Artificial
  Probe
cttcaacgcatttgtcatttctgag

SEQ ID NO: 89904 - DNA, 25 bp, Artificial
  Probe
gtcttcaacgcatttgtcatttctg

SEQ ID NO: 89905 - DNA, 25 bp, Artificial
  Probe
agtcttcaacgcatttgtcatttct

SEQ ID NO: 89906 - DNA, 25 bp, Artificial
  Probe
cagaaaccaatgagaagtcttcaac

SEQ ID NO: 89907 - DNA, 25 bp, Artificial
  Probe
acagaaaccaatgagaagtcttcaa

SEQ ID NO: 89908 - DNA, 25 bp, Artificial
  Probe
aacagaaaccaatgagaagtcttca

SEQ ID NO: 89909 - DNA, 25 bp, Artificial
  Probe
caccaacagaaaccaatgagaagtc

SEQ ID NO: 89910 - DNA, 25 bp, Artificial
  Probe
tcttcaacgcatttgtcatttctga

SEQ ID NO: 89911 - DNA, 25 bp, Artificial
  Probe
gaagtcttcaacgcatttgtcattt

SEQ ID NO: 89912 - DNA, 25 bp, Artificial
  Probe
accaacagaaaccaatgagaagtct

SEQ ID NO: 89913 - DNA, 25 bp, Artificial
  Probe
tctggtctcactaagttatccaaac

SEQ ID NO: 89914 - DNA, 25 bp, Artificial
  Probe
gtctggtctcactaagttatccaaa

SEQ ID NO: 89915 - DNA, 25 bp, Artificial
  Probe
agaaaccaatgagaagtcttcaacg

SEQ ID NO: 89916 - DNA, 25 bp, Artificial
  Probe
atcagttcaggattgggaatctaac

SEQ ID NO: 89917 - DNA, 25 bp, Artificial
  Probe
gtatcagttcaggattgggaatcta

SEQ ID NO: 89918 - DNA, 25 bp, Artificial
  Probe
aaccaatgagaagtcttcaacgcat

SEQ ID NO: 89919 - DNA, 25 bp, Artificial
  Probe
agaagtcttcaacgcatttgtcatt

SEQ ID NO: 89920 - DNA, 25 bp, Artificial
  Probe
tatcagttcaggattgggaatctaa

SEQ ID NO: 89921 - DNA, 25 bp, Artificial
  Probe
gagaagtcttcaacgcatttgtcat

SEQ ID NO: 89922 - DNA, 25 bp, Artificial
  Probe
atgagaagtcttcaacgcatttgtc

SEQ ID NO: 89923 - DNA, 25 bp, Artificial
  Probe
agttcaggattgggaatctaacctc

SEQ ID NO: 89924 - DNA, 25 bp, Artificial
  Probe
ggtatcagttcaggattgggaatct

SEQ ID NO: 89925 - DNA, 25 bp, Artificial
  Probe
aaactggtcttgaacctgccttata

SEQ ID NO: 89926 - DNA, 25 bp, Artificial
  Probe
gttatccaaactggtcttgaacctg

SEQ ID NO: 89927 - DNA, 25 bp, Artificial
  Probe
ttcaggattgggaatctaacctcac

SEQ ID NO: 89928 - DNA, 25 bp, Artificial
  Probe
gttcaggattgggaatctaacctca

SEQ ID NO: 89929 - DNA, 25 bp, Artificial
  Probe
cagttcaggattgggaatctaacct

SEQ ID NO: 89930 - DNA, 25 bp, Artificial
  Probe
tcagttcaggattgggaatctaacc

SEQ ID NO: 89931 - DNA, 25 bp, Artificial
  Probe
cacagattttgaagcagtagatacg

SEQ ID NO: 89932 - DNA, 25 bp, Artificial
  Probe
tgggtatcagttcaggattgggaat

SEQ ID NO: 89933 - DNA, 25 bp, Artificial
  Probe
ccacagattttgaagcagtagatac

SEQ ID NO: 89934 - DNA, 25 bp, Artificial
  Probe
ttcaacgcatttgtcatttctgagc

SEQ ID NO: 89935 - DNA, 25 bp, Artificial
  Probe
ggtcttgaacctgccttatagccta

SEQ ID NO: 89936 - DNA, 25 bp, Artificial
  Probe
ttgggtatcagttcaggattgggaa

SEQ ID NO: 89937 - DNA, 25 bp, Artificial
  Probe
acagattttgaagcagtagatacgg

SEQ ID NO: 89938 - DNA, 25 bp, Artificial
  Probe
aacctcctgttcataagagagaaga

SEQ ID NO: 89939 - DNA, 25 bp, Artificial
  Probe
acctcctgttcataagagagaagag

SEQ ID NO: 89940 - DNA, 25 bp, Artificial
  Probe
cctgttcataagagagaagaggctt

SEQ ID NO: 89941 - DNA, 25 bp, Artificial
  Probe
ttcataagagagaagaggctttcac

SEQ ID NO: 89942 - DNA, 25 bp, Artificial
  Probe
gttcataagagagaagaggctttca

SEQ ID NO: 89943 - DNA, 25 bp, Artificial
  Probe
tgttcataagagagaagaggctttc

SEQ ID NO: 89944 - DNA, 25 bp, Artificial
  Probe
ctgttcataagagagaagaggcttt

SEQ ID NO: 89945 - DNA, 25 bp, Artificial
  Probe
ctcctgttcataagagagaagaggc

SEQ ID NO: 89946 - DNA, 25 bp, Artificial
  Probe
cataagagagaagaggctttcactg

SEQ ID NO: 89947 - DNA, 25 bp, Artificial
  Probe
tcataagagagaagaggctttcact

SEQ ID NO: 89948 - DNA, 25 bp, Artificial
  Probe
ataagagagaagaggctttcactga

SEQ ID NO: 89949 - DNA, 25 bp, Artificial
  Probe
gggcaggaagtcattgtgtatatat

SEQ ID NO: 89950 - DNA, 25 bp, Artificial
  Probe
tcctgttcataagagagaagaggct

SEQ ID NO: 89951 - DNA, 25 bp, Artificial
  Probe
agggcaggaagtcattgtgtatata

SEQ ID NO: 89952 - DNA, 25 bp, Artificial
  Probe
ggcaggaagtcattgtgtatatata

SEQ ID NO: 89953 - DNA, 25 bp, Artificial
  Probe
ctggagttctggttccttactgaag

SEQ ID NO: 89954 - DNA, 25 bp, Artificial
  Probe
taagagagaagaggctttcactgaa

SEQ ID NO: 89955 - DNA, 25 bp, Artificial
  Probe
tcctgtttccatgagagaatagaac

SEQ ID NO: 89956 - DNA, 25 bp, Artificial
  Probe
ttcctgtttccatgagagaatagaa

SEQ ID NO: 89957 - DNA, 25 bp, Artificial
  Probe
gagggcaggaagtcattgtgtatat

SEQ ID NO: 89958 - DNA, 25 bp, Artificial
  Probe
agagagaagaggctttcactgaatt

SEQ ID NO: 89959 - DNA, 25 bp, Artificial
  Probe
aagagagaagaggctttcactgaat

SEQ ID NO: 89960 - DNA, 25 bp, Artificial
  Probe
ctgtttccatgagagaatagaacgg

SEQ ID NO: 89961 - DNA, 25 bp, Artificial
  Probe
cctgtttccatgagagaatagaacg

SEQ ID NO: 89962 - DNA, 25 bp, Artificial
  Probe
gaagagagagaggttaaggtgggta

SEQ ID NO: 89963 - DNA, 25 bp, Artificial
  Probe
agtgagggaagagagagaggttaag

SEQ ID NO: 89964 - DNA, 25 bp, Artificial
  Probe
gagtgagggaagagagagaggttaa

SEQ ID NO: 89965 - DNA, 25 bp, Artificial
  Probe
ggaagtcattgtgtatatataagcc

SEQ ID NO: 89966 - DNA, 25 bp, Artificial
  Probe
agagggcaggaagtcattgtgtata

SEQ ID NO: 89967 - DNA, 25 bp, Artificial
  Probe
ccattcctgtttccatgagagaata

SEQ ID NO: 89968 - DNA, 25 bp, Artificial
  Probe
gaacctcctgttcataagagagaag

SEQ ID NO: 89969 - DNA, 25 bp, Artificial
  Probe
attcctgtttccatgagagaataga

SEQ ID NO: 89970 - DNA, 25 bp, Artificial
  Probe
cattcctgtttccatgagagaatag

SEQ ID NO: 89971 - DNA, 25 bp, Artificial
  Probe
tgtttccatgagagaatagaacggg

SEQ ID NO: 89972 - DNA, 25 bp, Artificial
  Probe
atcctggagttctggttccttactg

SEQ ID NO: 89973 - DNA, 25 bp, Artificial
  Probe
gatcctggagttctggttccttact

SEQ ID NO: 89974 - DNA, 25 bp, Artificial
  Probe
aagagagagaggttaaggtgggtac

SEQ ID NO: 89975 - DNA, 25 bp, Artificial
  Probe
tgagtgagggaagagagagaggtta

SEQ ID NO: 89976 - DNA, 25 bp, Artificial
  Probe
cctggagttctggttccttactgaa

SEQ ID NO: 89977 - DNA, 25 bp, Artificial
  Probe
gagggaagagagagaggttaaggtg

SEQ ID NO: 89978 - DNA, 25 bp, Artificial
  Probe
gtgagggaagagagagaggttaagg

SEQ ID NO: 89979 - DNA, 25 bp, Artificial
  Probe
caccattcctgtttccatgagagaa

SEQ ID NO: 89980 - DNA, 25 bp, Artificial
  Probe
gatgtctgagtgagggaagagagag

SEQ ID NO: 89981 - DNA, 25 bp, Artificial
  Probe
tttcctgatgctgctctctttgttc

SEQ ID NO: 89982 - DNA, 25 bp, Artificial
  Probe
ctttcctgatgctgctctctttgtt

SEQ ID NO: 89983 - DNA, 25 bp, Artificial
  Probe
ctggaatcagaagtgtgaggttact

SEQ ID NO: 89984 - DNA, 25 bp, Artificial
  Probe
tggaatcagaagtgtgaggttactg

SEQ ID NO: 89985 - DNA, 25 bp, Artificial
  Probe
ggaatcagaagtgtgaggttactgg

SEQ ID NO: 89986 - DNA, 25 bp, Artificial
  Probe
cctggaatcagaagtgtgaggttac

SEQ ID NO: 89987 - DNA, 25 bp, Artificial
  Probe
gatcttgttcatcacatgacctctt

SEQ ID NO: 89988 - DNA, 25 bp, Artificial
  Probe
atcttgttcatcacatgacctcttg

SEQ ID NO: 89989 - DNA, 25 bp, Artificial
  Probe
ggttgggacacagaaattggaaatc

SEQ ID NO: 89990 - DNA, 25 bp, Artificial
  Probe
gaatcagaagtgtgaggttactggc

SEQ ID NO: 89991 - DNA, 25 bp, Artificial
  Probe
gttgggacacagaaattggaaatcg

SEQ ID NO: 89992 - DNA, 25 bp, Artificial
  Probe
ctgttgtcagctagttcctagttgt

SEQ ID NO: 89993 - DNA, 25 bp, Artificial
  Probe
gacacagaaattggaaatcgaggtt

SEQ ID NO: 89994 - DNA, 25 bp, Artificial
  Probe
ggatcttgttcatcacatgacctct

SEQ ID NO: 89995 - DNA, 25 bp, Artificial
  Probe
tgttgtcagctagttcctagttgtg

SEQ ID NO: 89996 - DNA, 25 bp, Artificial
  Probe
ctagttcctagttgtggttgctgtg

SEQ ID NO: 89997 - DNA, 25 bp, Artificial
  Probe
acacagaaattggaaatcgaggttg

SEQ ID NO: 89998 - DNA, 25 bp, Artificial
  Probe
aatcagaagtgtgaggttactggca

SEQ ID NO: 89999 - DNA, 25 bp, Artificial
  Probe
aataggctggggtttcttttcatag

SEQ ID NO: 90000 - DNA, 25 bp, Artificial
  Probe
caataggctggggtttcttttcata

SEQ ID NO: 90001 - DNA, 25 bp, Artificial
  Probe
cctgttgtcagctagttcctagttg

SEQ ID NO: 90002 - DNA, 25 bp, Artificial
  Probe
tcctgttgtcagctagttcctagtt

SEQ ID NO: 90003 - DNA, 25 bp, Artificial
  Probe
tcataggggcattggaacattaaag

SEQ ID NO: 90004 - DNA, 25 bp, Artificial
  Probe
ttttcataggggcattggaacatta

SEQ ID NO: 90005 - DNA, 25 bp, Artificial
  Probe
ttcataggggcattggaacattaaa

SEQ ID NO: 90006 - DNA, 25 bp, Artificial
  Probe
tttcataggggcattggaacattaa

SEQ ID NO: 90007 - DNA, 25 bp, Artificial
  Probe
ctgtcctgttgtcagctagttccta

SEQ ID NO: 90008 - DNA, 25 bp, Artificial
  Probe
cacagaaattggaaatcgaggttgg

SEQ ID NO: 90009 - DNA, 25 bp, Artificial
  Probe
tagttcctagttgtggttgctgtgg

SEQ ID NO: 90010 - DNA, 25 bp, Artificial
  Probe
gtcagctagttcctagttgtggttg

SEQ ID NO: 90011 - DNA, 25 bp, Artificial
  Probe
gttgtcagctagttcctagttgtgg

SEQ ID NO: 90012 - DNA, 25 bp, Artificial
  Probe
gggttgggacacagaaattggaaat

SEQ ID NO: 90013 - DNA, 25 bp, Artificial
  Probe
atcagaagtgtgaggttactggcag

SEQ ID NO: 90014 - DNA, 25 bp, Artificial
  Probe
ttgggacacagaaattggaaatcga

SEQ ID NO: 90015 - DNA, 25 bp, Artificial
  Probe
tttcttttcataggggcattggaac

SEQ ID NO: 90016 - DNA, 25 bp, Artificial
  Probe
gtttcttttcataggggcattggaa

SEQ ID NO: 90017 - DNA, 25 bp, Artificial
  Probe
tcttgttcatcacatgacctcttgc

SEQ ID NO: 90018 - DNA, 25 bp, Artificial
  Probe
gcctggaatcagaagtgtgaggtta

SEQ ID NO: 90019 - DNA, 25 bp, Artificial
  Probe
cttttcataggggcattggaacatt

SEQ ID NO: 90020 - DNA, 25 bp, Artificial
  Probe
tgtcagctagttcctagttgtggtt

SEQ ID NO: 90021 - DNA, 25 bp, Artificial
  Probe
ttgtcagctagttcctagttgtggt

SEQ ID NO: 90022 - DNA, 25 bp, Artificial
  Probe
ataggctggggtttcttttcatagg

SEQ ID NO: 90023 - DNA, 25 bp, Artificial
  Probe
gtcctgttgtcagctagttcctagt

SEQ ID NO: 90024 - DNA, 25 bp, Artificial
  Probe
tgtcctgttgtcagctagttcctag

SEQ ID NO: 90025 - DNA, 25 bp, Artificial
  Probe
ggacacagaaattggaaatcgaggt

SEQ ID NO: 90026 - DNA, 25 bp, Artificial
  Probe
tgggacacagaaattggaaatcgag

SEQ ID NO: 90027 - DNA, 25 bp, Artificial
  Probe
cataggggcattggaacattaaagc

SEQ ID NO: 90028 - DNA, 25 bp, Artificial
  Probe
gaattggcagtaaatgttagtcagc

SEQ ID NO: 90029 - DNA, 25 bp, Artificial
  Probe
tgaattggcagtaaatgttagtcag

SEQ ID NO: 90030 - DNA, 25 bp, Artificial
  Probe
ctgaattggcagtaaatgttagtca

SEQ ID NO: 90031 - DNA, 25 bp, Artificial
  Probe
atgttagtcagccatttacagcaat

SEQ ID NO: 90032 - DNA, 25 bp, Artificial
  Probe
agcaatgccaaatatggataaacat

SEQ ID NO: 90033 - DNA, 25 bp, Artificial
  Probe
cagcaatgccaaatatggataaaca

SEQ ID NO: 90034 - DNA, 25 bp, Artificial
  Probe
acagcaatgccaaatatggataaac

SEQ ID NO: 90035 - DNA, 25 bp, Artificial
  Probe
atttacagcaatgccaaatatggat

SEQ ID NO: 90036 - DNA, 25 bp, Artificial
  Probe
gcaatgccaaatatggataaacatc

SEQ ID NO: 90037 - DNA, 25 bp, Artificial
  Probe
tcatgctgaataacctgtagtttaa

SEQ ID NO: 90038 - DNA, 25 bp, Artificial
  Probe
tacagcaatgccaaatatggataaa

SEQ ID NO: 90039 - DNA, 25 bp, Artificial
  Probe
ttacagcaatgccaaatatggataa

SEQ ID NO: 90040 - DNA, 25 bp, Artificial
  Probe
tttacagcaatgccaaatatggata

SEQ ID NO: 90041 - DNA, 25 bp, Artificial
  Probe
acatagagatttcagtgtgtcaata

SEQ ID NO: 90042 - DNA, 25 bp, Artificial
  Probe
tacatagagatttcagtgtgtcaat

SEQ ID NO: 90043 - DNA, 25 bp, Artificial
  Probe
agagatttcagtgtgtcaatattct

SEQ ID NO: 90044 - DNA, 25 bp, Artificial
  Probe
catttacagcaatgccaaatatgga

SEQ ID NO: 90045 - DNA, 25 bp, Artificial
  Probe
caatgccaaatatggataaacatca

SEQ ID NO: 90046 - DNA, 25 bp, Artificial
  Probe
aatgttagtcagccatttacagcaa

SEQ ID NO: 90047 - DNA, 25 bp, Artificial
  Probe
catagagatttcagtgtgtcaatat

SEQ ID NO: 90048 - DNA, 25 bp, Artificial
  Probe
tgttagtcagccatttacagcaatg

SEQ ID NO: 90049 - DNA, 25 bp, Artificial
  Probe
catgctgaataacctgtagtttaaa

SEQ ID NO: 90050 - DNA, 25 bp, Artificial
  Probe
gccatttacagcaatgccaaatatg

SEQ ID NO: 90051 - DNA, 25 bp, Artificial
  Probe
agccatttacagcaatgccaaatat

SEQ ID NO: 90052 - DNA, 25 bp, Artificial
  Probe
aatgccaaatatggataaacatcat

SEQ ID NO: 90053 - DNA, 25 bp, Artificial
  Probe
tagagatttcagtgtgtcaatattc

SEQ ID NO: 90054 - DNA, 25 bp, Artificial
  Probe
ctgtctagaatatgcctgaaaggat

SEQ ID NO: 90055 - DNA, 25 bp, Artificial
  Probe
tgtctagaatatgcctgaaaggatt

SEQ ID NO: 90056 - DNA, 25 bp, Artificial
  Probe
tctgtctagaatatgcctgaaagga

SEQ ID NO: 90057 - DNA, 25 bp, Artificial
  Probe
cagccatttacagcaatgccaaata

SEQ ID NO: 90058 - DNA, 25 bp, Artificial
  Probe
ttcatgctgaataacctgtagttta

SEQ ID NO: 90059 - DNA, 25 bp, Artificial
  Probe
gagatttcagtgtgtcaatattcta

SEQ ID NO: 90060 - DNA, 25 bp, Artificial
  Probe
tgccaaatatggataaacatcataa

SEQ ID NO: 90061 - DNA, 25 bp, Artificial
  Probe
gtctagaatatgcctgaaaggattt

SEQ ID NO: 90062 - DNA, 25 bp, Artificial
  Probe
cgcttctgtctagaatatgcctgaa

SEQ ID NO: 90063 - DNA, 25 bp, Artificial
  Probe
gttagtcagccatttacagcaatgc

SEQ ID NO: 90064 - DNA, 25 bp, Artificial
  Probe
atgccaaatatggataaacatcata

SEQ ID NO: 90065 - DNA, 25 bp, Artificial
  Probe
ttctgtctagaatatgcctgaaagg

SEQ ID NO: 90066 - DNA, 25 bp, Artificial
  Probe
gcttctgtctagaatatgcctgaaa

SEQ ID NO: 90067 - DNA, 25 bp, Artificial
  Probe
tgcctgaaaggattttattttctga

SEQ ID NO: 90068 - DNA, 25 bp, Artificial
  Probe
atagagatttcagtgtgtcaatatt

SEQ ID NO: 90069 - DNA, 25 bp, Artificial
  Probe
cttctgtctagaatatgcctgaaag

SEQ ID NO: 90070 - DNA, 25 bp, Artificial
  Probe
ttctgataaatggctgtatgaaaat

SEQ ID NO: 90071 - DNA, 25 bp, Artificial
  Probe
ccatttacagcaatgccaaatatgg

SEQ ID NO: 90072 - DNA, 25 bp, Artificial
  Probe
agatttcagtgtgtcaatattctat

SEQ ID NO: 90073 - DNA, 25 bp, Artificial
  Probe
gaactctgtctcatgtagccttctc

SEQ ID NO: 90074 - DNA, 25 bp, Artificial
  Probe
ctagcctggttcaagatactacctc

SEQ ID NO: 90075 - DNA, 25 bp, Artificial
  Probe
tagcctggttcaagatactacctct

SEQ ID NO: 90076 - DNA, 25 bp, Artificial
  Probe
aactctgtctcatgtagccttctct

SEQ ID NO: 90077 - DNA, 25 bp, Artificial
  Probe
ctctgtctcatgtagccttctctct

SEQ ID NO: 90078 - DNA, 25 bp, Artificial
  Probe
tctgtctcatgtagccttctctctg

SEQ ID NO: 90079 - DNA, 25 bp, Artificial
  Probe
actctgtctcatgtagccttctctc

SEQ ID NO: 90080 - DNA, 25 bp, Artificial
  Probe
tgaactctgtctcatgtagccttct

SEQ ID NO: 90081 - DNA, 25 bp, Artificial
  Probe
gtgaactctgtctcatgtagccttc

SEQ ID NO: 90082 - DNA, 25 bp, Artificial
  Probe
tgtgaactctgtctcatgtagcctt

SEQ ID NO: 90083 - DNA, 25 bp, Artificial
  Probe
agcctggttcaagatactacctctg

SEQ ID NO: 90084 - DNA, 25 bp, Artificial
  Probe
ctgtgaactctgtctcatgtagcct

SEQ ID NO: 90085 - DNA, 25 bp, Artificial
  Probe
aggctgtgaactctgtctcatgtag

SEQ ID NO: 90086 - DNA, 25 bp, Artificial
  Probe
agtgggaatttatgccatgtaaatg

SEQ ID NO: 90087 - DNA, 25 bp, Artificial
  Probe
cagtgggaatttatgccatgtaaat

SEQ ID NO: 90088 - DNA, 25 bp, Artificial
  Probe
gaggctgtgaactctgtctcatgta

SEQ ID NO: 90089 - DNA, 25 bp, Artificial
  Probe
gtgggaatttatgccatgtaaatgc

SEQ ID NO: 90090 - DNA, 25 bp, Artificial
  Probe
ctgtctcatgtagccttctctctgc

SEQ ID NO: 90091 - DNA, 25 bp, Artificial
  Probe
accaagttcaaacagctctatcgtg

SEQ ID NO: 90092 - DNA, 25 bp, Artificial
  Probe
caccaagttcaaacagctctatcgt

SEQ ID NO: 90093 - DNA, 25 bp, Artificial
  Probe
gacagaggaacacaaagaccagagt

SEQ ID NO: 90094 - DNA, 25 bp, Artificial
  Probe
tgacagaggaacacaaagaccagag

SEQ ID NO: 90095 - DNA, 25 bp, Artificial
  Probe
atcttgcctgggttctcttttcttt

SEQ ID NO: 90096 - DNA, 25 bp, Artificial
  Probe
aatcttgcctgggttctcttttctt

SEQ ID NO: 90097 - DNA, 25 bp, Artificial
  Probe
agtccctcacagacagagtttcttc

SEQ ID NO: 90098 - DNA, 25 bp, Artificial
  Probe
gagtccctcacagacagagtttctt

SEQ ID NO: 90099 - DNA, 25 bp, Artificial
  Probe
cctggttcaagatactacctctgca

SEQ ID NO: 90100 - DNA, 25 bp, Artificial
  Probe
atttatgccatgtaaatgcagtgtt

SEQ ID NO: 90101 - DNA, 25 bp, Artificial
  Probe
aatttatgccatgtaaatgcagtgt

SEQ ID NO: 90102 - DNA, 25 bp, Artificial
  Probe
gaatttatgccatgtaaatgcagtg

SEQ ID NO: 90103 - DNA, 25 bp, Artificial
  Probe
ggaatttatgccatgtaaatgcagt

SEQ ID NO: 90104 - DNA, 25 bp, Artificial
  Probe
gcagtgggaatttatgccatgtaaa

SEQ ID NO: 90105 - DNA, 25 bp, Artificial
  Probe
cccaccaagttcaaacagctctatc

SEQ ID NO: 90106 - DNA, 25 bp, Artificial
  Probe
tttatgccatgtaaatgcagtgttg

SEQ ID NO: 90107 - DNA, 25 bp, Artificial
  Probe
gggaatttatgccatgtaaatgcag

SEQ ID NO: 90108 - DNA, 25 bp, Artificial
  Probe
tgggaatttatgccatgtaaatgca

SEQ ID NO: 90109 - DNA, 25 bp, Artificial
  Probe
gcctggttcaagatactacctctgc

SEQ ID NO: 90110 - DNA, 25 bp, Artificial
  Probe
gaatcttgcctgggttctcttttct

SEQ ID NO: 90111 - DNA, 25 bp, Artificial
  Probe
ccaccaagttcaaacagctctatcg

SEQ ID NO: 90112 - DNA, 25 bp, Artificial
  Probe
acagaggaacacaaagaccagagtc

SEQ ID NO: 90113 - DNA, 25 bp, Artificial
  Probe
ctgacagaggaacacaaagaccaga

SEQ ID NO: 90114 - DNA, 25 bp, Artificial
  Probe
tcttgcctgggttctcttttctttg

SEQ ID NO: 90115 - DNA, 25 bp, Artificial
  Probe
cagagtccctcacagacagagtttc

SEQ ID NO: 90116 - DNA, 25 bp, Artificial
  Probe
agagtccctcacagacagagtttct

SEQ ID NO: 90117 - DNA, 25 bp, Artificial
  Probe
ttatgccatgtaaatgcagtgttgg

SEQ ID NO: 90118 - DNA, 25 bp, Artificial
  Probe
cgacctacagcatctgaattactaa

SEQ ID NO: 90119 - DNA, 25 bp, Artificial
  Probe
acctacagcatctgaattactaaga

SEQ ID NO: 90120 - DNA, 25 bp, Artificial
  Probe
gacctacagcatctgaattactaag

SEQ ID NO: 90121 - DNA, 25 bp, Artificial
  Probe
cgttctattctcttctcgatctacc

SEQ ID NO: 90122 - DNA, 25 bp, Artificial
  Probe
acagcatctgaattactaagaacat

SEQ ID NO: 90123 - DNA, 25 bp, Artificial
  Probe
cctacagcatctgaattactaagaa

SEQ ID NO: 90124 - DNA, 25 bp, Artificial
  Probe
tacagcatctgaattactaagaaca

SEQ ID NO: 90125 - DNA, 25 bp, Artificial
  Probe
tgttctcttaaatgttcaggacttt

SEQ ID NO: 90126 - DNA, 25 bp, Artificial
  Probe
aatcgacctacagcatctgaattac

SEQ ID NO: 90127 - DNA, 25 bp, Artificial
  Probe
caatcgacctacagcatctgaatta

SEQ ID NO: 90128 - DNA, 25 bp, Artificial
  Probe
tcgacctacagcatctgaattacta

SEQ ID NO: 90129 - DNA, 25 bp, Artificial
  Probe
ttgaaagccatctcttccaaatgat

SEQ ID NO: 90130 - DNA, 25 bp, Artificial
  Probe
aatgatgttggcgttctaagtgttt

SEQ ID NO: 90131 - DNA, 25 bp, Artificial
  Probe
aaatgatgttggcgttctaagtgtt

SEQ ID NO: 90132 - DNA, 25 bp, Artificial
  Probe
cagcatctgaattactaagaacatt

SEQ ID NO: 90133 - DNA, 25 bp, Artificial
  Probe
ctacagcatctgaattactaagaac

SEQ ID NO: 90134 - DNA, 25 bp, Artificial
  Probe
atcgacctacagcatctgaattact

SEQ ID NO: 90135 - DNA, 25 bp, Artificial
  Probe
ttctcttaaatgttcaggactttct

SEQ ID NO: 90136 - DNA, 25 bp, Artificial
  Probe
gttctcttaaatgttcaggactttc

SEQ ID NO: 90137 - DNA, 25 bp, Artificial
  Probe
gaaagtgaccataagttgtcttgtc

SEQ ID NO: 90138 - DNA, 25 bp, Artificial
  Probe
agaaagtgaccataagttgtcttgt

SEQ ID NO: 90139 - DNA, 25 bp, Artificial
  Probe
ctcttaaatgttcaggactttctgt

SEQ ID NO: 90140 - DNA, 25 bp, Artificial
  Probe
ctgttctcttaaatgttcaggactt

SEQ ID NO: 90141 - DNA, 25 bp, Artificial
  Probe
tctcttaaatgttcaggactttctg

SEQ ID NO: 90142 - DNA, 25 bp, Artificial
  Probe
tcttaaatgttcaggactttctgtt

SEQ ID NO: 90143 - DNA, 25 bp, Artificial
  Probe
gttctattctcttctcgatctaccc

SEQ ID NO: 90144 - DNA, 25 bp, Artificial
  Probe
gcaagaaagtgaccataagttgtct

SEQ ID NO: 90145 - DNA, 25 bp, Artificial
  Probe
caaatgatgttggcgttctaagtgt

SEQ ID NO: 90146 - DNA, 25 bp, Artificial
  Probe
tcgttctattctcttctcgatctac

SEQ ID NO: 90147 - DNA, 25 bp, Artificial
  Probe
acaatcgacctacagcatctgaatt

SEQ ID NO: 90148 - DNA, 25 bp, Artificial
  Probe
tttacacccagtttgaaagccatct

SEQ ID NO: 90149 - DNA, 25 bp, Artificial
  Probe
ttcgttctattctcttctcgatcta

SEQ ID NO: 90150 - DNA, 25 bp, Artificial
  Probe
cttaaatgttcaggactttctgttt

SEQ ID NO: 90151 - DNA, 25 bp, Artificial
  Probe
agcatctgaattactaagaacatta

SEQ ID NO: 90152 - DNA, 25 bp, Artificial
  Probe
cacaatcgacctacagcatctgaat

SEQ ID NO: 90153 - DNA, 25 bp, Artificial
  Probe
tttacagacacactcaccacaatcg

SEQ ID NO: 90154 - DNA, 25 bp, Artificial
  Probe
ttacacccagtttgaaagccatctc

SEQ ID NO: 90155 - DNA, 25 bp, Artificial
  Probe
aagaaagtgaccataagttgtcttg

SEQ ID NO: 90156 - DNA, 25 bp, Artificial
  Probe
caagaaagtgaccataagttgtctt

SEQ ID NO: 90157 - DNA, 25 bp, Artificial
  Probe
ctacccctgttctcttaaatgttca

SEQ ID NO: 90158 - DNA, 25 bp, Artificial
  Probe
tctacccctgttctcttaaatgttc

SEQ ID NO: 90159 - DNA, 25 bp, Artificial
  Probe
ctgcaagaaagtgaccataagttgt

SEQ ID NO: 90160 - DNA, 25 bp, Artificial
  Probe
gatgttggcgttctaagtgttttac

SEQ ID NO: 90161 - DNA, 25 bp, Artificial
  Probe
atctacccctgttctcttaaatgtt

SEQ ID NO: 90162 - DNA, 25 bp, Artificial
  Probe
tgattttcgttctattctcttctcg

SEQ ID NO: 90163 - DNA, 25 bp, Artificial
  Probe
gtatgtgaaggcaactgatctgaag

SEQ ID NO: 90164 - DNA, 25 bp, Artificial
  Probe
tagctgagtatggtgtgtatgtgaa

SEQ ID NO: 90165 - DNA, 25 bp, Artificial
  Probe
tgtatgtgaaggcaactgatctgaa

SEQ ID NO: 90166 - DNA, 25 bp, Artificial
  Probe
gagtatggtgtgtatgtgaaggcaa

SEQ ID NO: 90167 - DNA, 25 bp, Artificial
  Probe
tatgtgaaggcaactgatctgaagg

SEQ ID NO: 90168 - DNA, 25 bp, Artificial
  Probe
tatggtgtgtatgtgaaggcaactg

SEQ ID NO: 90169 - DNA, 25 bp, Artificial
  Probe
gtatggtgtgtatgtgaaggcaact

SEQ ID NO: 90170 - DNA, 25 bp, Artificial
  Probe
agtatggtgtgtatgtgaaggcaac

SEQ ID NO: 90171 - DNA, 25 bp, Artificial
  Probe
gtagctgagtatggtgtgtatgtga

SEQ ID NO: 90172 - DNA, 25 bp, Artificial
  Probe
ctgagtatggtgtgtatgtgaaggc

SEQ ID NO: 90173 - DNA, 25 bp, Artificial
  Probe
gctgagtatggtgtgtatgtgaagg

SEQ ID NO: 90174 - DNA, 25 bp, Artificial
  Probe
gtgtatgtgaaggcaactgatctga

SEQ ID NO: 90175 - DNA, 25 bp, Artificial
  Probe
agctgagtatggtgtgtatgtgaag

SEQ ID NO: 90176 - DNA, 25 bp, Artificial
  Probe
tgtgtatgtgaaggcaactgatctg

SEQ ID NO: 90177 - DNA, 25 bp, Artificial
  Probe
gtgtgtatgtgaaggcaactgatct

SEQ ID NO: 90178 - DNA, 25 bp, Artificial
  Probe
tgagtatggtgtgtatgtgaaggca

SEQ ID NO: 90179 - DNA, 25 bp, Artificial
  Probe
cgtagctgagtatggtgtgtatgtg

SEQ ID NO: 90180 - DNA, 25 bp, Artificial
  Probe
ggtgtgtatgtgaaggcaactgatc

SEQ ID NO: 90181 - DNA, 25 bp, Artificial
  Probe
atgtgaaggcaactgatctgaagga

SEQ ID NO: 90182 - DNA, 25 bp, Artificial
  Probe
tggtgtgtatgtgaaggcaactgat

SEQ ID NO: 90183 - DNA, 25 bp, Artificial
  Probe
atggtgtgtatgtgaaggcaactga

SEQ ID NO: 90184 - DNA, 25 bp, Artificial
  Probe
ccgtagctgagtatggtgtgtatgt

SEQ ID NO: 90185 - DNA, 25 bp, Artificial
  Probe
tgaaggcaactgatctgaaggactg

SEQ ID NO: 90186 - DNA, 25 bp, Artificial
  Probe
gtgaaggcaactgatctgaaggact

SEQ ID NO: 90187 - DNA, 25 bp, Artificial
  Probe
tgtgaaggcaactgatctgaaggac

SEQ ID NO: 90188 - DNA, 25 bp, Artificial
  Probe
cgcggaatgtcaactttagatttac

SEQ ID NO: 90189 - DNA, 25 bp, Artificial
  Probe
gaaggcaactgatctgaaggactgg

SEQ ID NO: 90190 - DNA, 25 bp, Artificial
  Probe
gccgtagctgagtatggtgtgtatg

SEQ ID NO: 90191 - DNA, 25 bp, Artificial
  Probe
gcgcggaatgtcaactttagattta

SEQ ID NO: 90192 - DNA, 25 bp, Artificial
  Probe
ggcgcggaatgtcaactttagattt

SEQ ID NO: 90193 - DNA, 25 bp, Artificial
  Probe
ttcttgttgtccttgttggtagtaa

SEQ ID NO: 90194 - DNA, 25 bp, Artificial
  Probe
ttgttgtccttgttggtagtaagag

SEQ ID NO: 90195 - DNA, 25 bp, Artificial
  Probe
cttgttgtccttgttggtagtaaga

SEQ ID NO: 90196 - DNA, 25 bp, Artificial
  Probe
tcttgttgtccttgttggtagtaag

SEQ ID NO: 90197 - DNA, 25 bp, Artificial
  Probe
tttcttgttgtccttgttggtagta

SEQ ID NO: 90198 - DNA, 25 bp, Artificial
  Probe
ttctatttcttgttgtccttgttgg

SEQ ID NO: 90199 - DNA, 25 bp, Artificial
  Probe
ctcccgtatctcttattacttcctg

SEQ ID NO: 90200 - DNA, 25 bp, Artificial
  Probe
tctatttcttgttgtccttgttggt

SEQ ID NO: 90201 - DNA, 25 bp, Artificial
  Probe
atttcttgttgtccttgttggtagt

SEQ ID NO: 90202 - DNA, 25 bp, Artificial
  Probe
tatttcttgttgtccttgttggtag

SEQ ID NO: 90203 - DNA, 25 bp, Artificial
  Probe
ctatttcttgttgtccttgttggta

SEQ ID NO: 90204 - DNA, 25 bp, Artificial
  Probe
tgttgtccttgttggtagtaagagg

SEQ ID NO: 90205 - DNA, 25 bp, Artificial
  Probe
attctatttcttgttgtccttgttg

SEQ ID NO: 90206 - DNA, 25 bp, Artificial
  Probe
gttgtccttgttggtagtaagaggc

SEQ ID NO: 90207 - DNA, 25 bp, Artificial
  Probe
aattctatttcttgttgtccttgtt

SEQ ID NO: 90208 - DNA, 25 bp, Artificial
  Probe
ttgtccttgttggtagtaagaggct

SEQ ID NO: 90209 - DNA, 25 bp, Artificial
  Probe
taattctatttcttgttgtccttgt

SEQ ID NO: 90210 - DNA, 25 bp, Artificial
  Probe
tgtccttgttggtagtaagaggctg

SEQ ID NO: 90211 - DNA, 25 bp, Artificial
  Probe
gaatccctggatttcttactcctgt

SEQ ID NO: 90212 - DNA, 25 bp, Artificial
  Probe
ggaatccctggatttcttactcctg

SEQ ID NO: 90213 - DNA, 25 bp, Artificial
  Probe
ttaattctatttcttgttgtccttg

SEQ ID NO: 90214 - DNA, 25 bp, Artificial
  Probe
tttaattctatttcttgttgtcctt

SEQ ID NO: 90215 - DNA, 25 bp, Artificial
  Probe
gggaatccctggatttcttactcct

SEQ ID NO: 90216 - DNA, 25 bp, Artificial
  Probe
ttttaattctatttcttgttgtcct

SEQ ID NO: 90217 - DNA, 25 bp, Artificial
  Probe
caggattattactaccaccagtgaa

SEQ ID NO: 90218 - DNA, 25 bp, Artificial
  Probe
ggattattactaccaccagtgaagg

SEQ ID NO: 90219 - DNA, 25 bp, Artificial
  Probe
tcaggattattactaccaccagtga

SEQ ID NO: 90220 - DNA, 25 bp, Artificial
  Probe
gtcaggattattactaccaccagtg

SEQ ID NO: 90221 - DNA, 25 bp, Artificial
  Probe
aggattattactaccaccagtgaag

SEQ ID NO: 90222 - DNA, 25 bp, Artificial
  Probe
gattattactaccaccagtgaaggc

SEQ ID NO: 90223 - DNA, 25 bp, Artificial
  Probe
tatgaggacgaatacagctactaca

SEQ ID NO: 90224 - DNA, 25 bp, Artificial
  Probe
ttatgaggacgaatacagctactac

SEQ ID NO: 90225 - DNA, 25 bp, Artificial
  Probe
cttatgaggacgaatacagctacta

SEQ ID NO: 90226 - DNA, 25 bp, Artificial
  Probe
atgaggacgaatacagctactacaa

SEQ ID NO: 90227 - DNA, 25 bp, Artificial
  Probe
ctcaactcaggaaggtgcaatatat

SEQ ID NO: 90228 - DNA, 25 bp, Artificial
  Probe
gtatgaaacctatgacgagaacaac

SEQ ID NO: 90229 - DNA, 25 bp, Artificial
  Probe
ctacgagggtcaggattattactac

SEQ ID NO: 90230 - DNA, 25 bp, Artificial
  Probe
tcaactcaggaaggtgcaatatata

SEQ ID NO: 90231 - DNA, 25 bp, Artificial
  Probe
ggaagaatacgaacaaataggcaac

SEQ ID NO: 90232 - DNA, 25 bp, Artificial
  Probe
aatacgaacaaataggcaacgagta

SEQ ID NO: 90233 - DNA, 25 bp, Artificial
  Probe
tacgatgtgtgtagttcctttatca

SEQ ID NO: 90234 - DNA, 25 bp, Artificial
  Probe
tgaggacgaatacagctactacaag

SEQ ID NO: 90235 - DNA, 25 bp, Artificial
  Probe
gaagaatacgaacaaataggcaacg

SEQ ID NO: 90236 - DNA, 25 bp, Artificial
  Probe
ggtcaggattattactaccaccagt

SEQ ID NO: 90237 - DNA, 25 bp, Artificial
  Probe
tatgaaacctatgacgagaacaacg

SEQ ID NO: 90238 - DNA, 25 bp, Artificial
  Probe
ctgtatacgatgtgtgtagttcctt

SEQ ID NO: 90239 - DNA, 25 bp, Artificial
  Probe
gctacgagggtcaggattattacta

SEQ ID NO: 90240 - DNA, 25 bp, Artificial
  Probe
aagaatacgaacaaataggcaacga

SEQ ID NO: 90241 - DNA, 25 bp, Artificial
  Probe
cttaccgagcttatgaggacgaata

SEQ ID NO: 90242 - DNA, 25 bp, Artificial
  Probe
tacaacactgcgtatgaaacctatg

SEQ ID NO: 90243 - DNA, 25 bp, Artificial
  Probe
gggaagaatacgaacaaataggcaa

SEQ ID NO: 90244 - DNA, 25 bp, Artificial
  Probe
agaatacgaacaaataggcaacgag

SEQ ID NO: 90245 - DNA, 25 bp, Artificial
  Probe
ttaccgagcttatgaggacgaatac

SEQ ID NO: 90246 - DNA, 25 bp, Artificial
  Probe
gaacgaagaagcagaagtggatgaa

SEQ ID NO: 90247 - DNA, 25 bp, Artificial
  Probe
atacgatgtgtgtagttcctttatc

SEQ ID NO: 90248 - DNA, 25 bp, Artificial
  Probe
gaggacgaatacagctactacaagg

SEQ ID NO: 90249 - DNA, 25 bp, Artificial
  Probe
gaatacgaacaaataggcaacgagt

SEQ ID NO: 90250 - DNA, 25 bp, Artificial
  Probe
gaagaggaagaggaagaggaggaag

SEQ ID NO: 90251 - DNA, 25 bp, Artificial
  Probe
actgtatacgatgtgtgtagttcct

SEQ ID NO: 90252 - DNA, 25 bp, Artificial
  Probe
caactcaggaaggtgcaatatatat

SEQ ID NO: 90253 - DNA, 25 bp, Artificial
  Probe
tttgtctctgtgaaacatttggaac

SEQ ID NO: 90254 - DNA, 25 bp, Artificial
  Probe
atttgtctctgtgaaacatttggaa

SEQ ID NO: 90255 - DNA, 25 bp, Artificial
  Probe
aatttgtctctgtgaaacatttgga

SEQ ID NO: 90256 - DNA, 25 bp, Artificial
  Probe
gtacaacactgcgtatgaaacctat

SEQ ID NO: 90257 - DNA, 25 bp, Artificial
  Probe
atacgaacaaataggcaacgagtac

SEQ ID NO: 90258 - DNA, 25 bp, Artificial
  Probe
ttatagtgtggaatggtgctacggt

SEQ ID NO: 90259 - DNA, 25 bp, Artificial
  Probe
caacactgcgtatgaaacctatgac

SEQ ID NO: 90260 - DNA, 25 bp, Artificial
  Probe
cggaaacactctttattcagtacat

SEQ ID NO: 90261 - DNA, 25 bp, Artificial
  Probe
tgtctctgtgaaacatttggaacaa

SEQ ID NO: 90262 - DNA, 25 bp, Artificial
  Probe
tgtgtgacttaactgtgtaatcttg

SEQ ID NO: 90263 - DNA, 25 bp, Artificial
  Probe
gatgtgtgacttaactgtgtaatct

SEQ ID NO: 90264 - DNA, 25 bp, Artificial
  Probe
agatgtgtgacttaactgtgtaatc

SEQ ID NO: 90265 - DNA, 25 bp, Artificial
  Probe
atgtgtgacttaactgtgtaatctt

SEQ ID NO: 90266 - DNA, 25 bp, Artificial
  Probe
aagatgtgtgacttaactgtgtaat

SEQ ID NO: 90267 - DNA, 25 bp, Artificial
  Probe
tgttccactcacagtcataagataa

SEQ ID NO: 90268 - DNA, 25 bp, Artificial
  Probe
cattccagtagagtgtgtcatgtat

SEQ ID NO: 90269 - DNA, 25 bp, Artificial
  Probe
ctatacatagttctgtcagccagtg

SEQ ID NO: 90270 - DNA, 25 bp, Artificial
  Probe
ttccagtagagtgtgtcatgtataa

SEQ ID NO: 90271 - DNA, 25 bp, Artificial
  Probe
tccagtagagtgtgtcatgtataat

SEQ ID NO: 90272 - DNA, 25 bp, Artificial
  Probe
attccagtagagtgtgtcatgtata

SEQ ID NO: 90273 - DNA, 25 bp, Artificial
  Probe
gttccactcacagtcataagataat

SEQ ID NO: 90274 - DNA, 25 bp, Artificial
  Probe
gttccattccagtagagtgtgtcat

SEQ ID NO: 90275 - DNA, 25 bp, Artificial
  Probe
aataagatgtgtgacttaactgtgt

SEQ ID NO: 90276 - DNA, 25 bp, Artificial
  Probe
ccattccagtagagtgtgtcatgta

SEQ ID NO: 90277 - DNA, 25 bp, Artificial
  Probe
atttcaccacaactttcattctcag

SEQ ID NO: 90278 - DNA, 25 bp, Artificial
  Probe
gatttcaccacaactttcattctca

SEQ ID NO: 90279 - DNA, 25 bp, Artificial
  Probe
taagatgtgtgacttaactgtgtaa

SEQ ID NO: 90280 - DNA, 25 bp, Artificial
  Probe
tatacatagttctgtcagccagtgc

SEQ ID NO: 90281 - DNA, 25 bp, Artificial
  Probe
ttccattccagtagagtgtgtcatg

SEQ ID NO: 90282 - DNA, 25 bp, Artificial
  Probe
ccactcacagtcataagataataga

SEQ ID NO: 90283 - DNA, 25 bp, Artificial
  Probe
tccactcacagtcataagataatag

SEQ ID NO: 90284 - DNA, 25 bp, Artificial
  Probe
gttcagtgacatcagaatcctccag

SEQ ID NO: 90285 - DNA, 25 bp, Artificial
  Probe
ataagatgtgtgacttaactgtgta

SEQ ID NO: 90286 - DNA, 25 bp, Artificial
  Probe
tttatagttgtgggtgggagagaaa

SEQ ID NO: 90287 - DNA, 25 bp, Artificial
  Probe
tgatttcaccacaactttcattctc

SEQ ID NO: 90288 - DNA, 25 bp, Artificial
  Probe
ccagtagagtgtgtcatgtataata

SEQ ID NO: 90289 - DNA, 25 bp, Artificial
  Probe
tttcaccacaactttcattctcagg

SEQ ID NO: 90290 - DNA, 25 bp, Artificial
  Probe
ttatagttgtgggtgggagagaaag

SEQ ID NO: 90291 - DNA, 25 bp, Artificial
  Probe
ataatttgaatttagggacctctgg

SEQ ID NO: 90292 - DNA, 25 bp, Artificial
  Probe
aatctgtgtattatctaggagtctc

SEQ ID NO: 90293 - DNA, 25 bp, Artificial
  Probe
ttccactcacagtcataagataata

SEQ ID NO: 90294 - DNA, 25 bp, Artificial
  Probe
cttccaggttccattccagtagagt

SEQ ID NO: 90295 - DNA, 25 bp, Artificial
  Probe
gagagttgttcacactttgtagaaa

SEQ ID NO: 90296 - DNA, 25 bp, Artificial
  Probe
aacttccaggttccattccagtaga

SEQ ID NO: 90297 - DNA, 25 bp, Artificial
  Probe
ctgttcagtgacatcagaatcctcc

SEQ ID NO: 90298 - DNA, 25 bp, Artificial
  Probe
ggagagttgttcacactttgtagaa

SEQ ID NO: 90299 - DNA, 25 bp, Artificial
  Probe
atctgtgtattatctaggagtctcc

SEQ ID NO: 90300 - DNA, 25 bp, Artificial
  Probe
aggagagttgttcacactttgtaga

SEQ ID NO: 90301 - DNA, 25 bp, Artificial
  Probe
caggagagttgttcacactttgtag

SEQ ID NO: 90302 - DNA, 25 bp, Artificial
  Probe
tccattccagtagagtgtgtcatgt

SEQ ID NO: 90303 - DNA, 25 bp, Artificial
  Probe
aggttccattccagtagagtgtgtc

SEQ ID NO: 90304 - DNA, 25 bp, Artificial
  Probe
ttccaggttccattccagtagagtg

SEQ ID NO: 90305 - DNA, 25 bp, Artificial
  Probe
gctatacatagttctgtcagccagt

SEQ ID NO: 90306 - DNA, 25 bp, Artificial
  Probe
acttccaggttccattccagtagag

SEQ ID NO: 90307 - DNA, 25 bp, Artificial
  Probe
tatctgtaatggttgccttattcgg

SEQ ID NO: 90308 - DNA, 25 bp, Artificial
  Probe
ttatctgtaatggttgccttattcg

SEQ ID NO: 90309 - DNA, 25 bp, Artificial
  Probe
tatggctggaggaatctatgaagtt

SEQ ID NO: 90310 - DNA, 25 bp, Artificial
  Probe
ctatggctggaggaatctatgaagt

SEQ ID NO: 90311 - DNA, 25 bp, Artificial
  Probe
attaccagttcaagatccagttcat

SEQ ID NO: 90312 - DNA, 25 bp, Artificial
  Probe
agttcaagatccagttcatcaatca

SEQ ID NO: 90313 - DNA, 25 bp, Artificial
  Probe
cagttcaagatccagttcatcaatc

SEQ ID NO: 90314 - DNA, 25 bp, Artificial
  Probe
tcattaccagttcaagatccagttc

SEQ ID NO: 90315 - DNA, 25 bp, Artificial
  Probe
atcattaccagttcaagatccagtt

SEQ ID NO: 90316 - DNA, 25 bp, Artificial
  Probe
gttcaagatccagttcatcaatcaa

SEQ ID NO: 90317 - DNA, 25 bp, Artificial
  Probe
ttaccagttcaagatccagttcatc

SEQ ID NO: 90318 - DNA, 25 bp, Artificial
  Probe
cattaccagttcaagatccagttca

SEQ ID NO: 90319 - DNA, 25 bp, Artificial
  Probe
tatcattaccagttcaagatccagt

SEQ ID NO: 90320 - DNA, 25 bp, Artificial
  Probe
ccagttcaagatccagttcatcaat

SEQ ID NO: 90321 - DNA, 25 bp, Artificial
  Probe
atctgtaatggttgccttattcgga

SEQ ID NO: 90322 - DNA, 25 bp, Artificial
  Probe
aacctattccttacttatcacactg

SEQ ID NO: 90323 - DNA, 25 bp, Artificial
  Probe
ctgtaatggttgccttattcggaag

SEQ ID NO: 90324 - DNA, 25 bp, Artificial
  Probe
taccagttcaagatccagttcatca

SEQ ID NO: 90325 - DNA, 25 bp, Artificial
  Probe
tctgtaatggttgccttattcggaa

SEQ ID NO: 90326 - DNA, 25 bp, Artificial
  Probe
ttatcattaccagttcaagatccag

SEQ ID NO: 90327 - DNA, 25 bp, Artificial
  Probe
accagttcaagatccagttcatcaa

SEQ ID NO: 90328 - DNA, 25 bp, Artificial
  Probe
tattcggaagccaaattacacaaag

SEQ ID NO: 90329 - DNA, 25 bp, Artificial
  Probe
ttattcggaagccaaattacacaaa

SEQ ID NO: 90330 - DNA, 25 bp, Artificial
  Probe
tgtggatgctattcatacctttacc

SEQ ID NO: 90331 - DNA, 25 bp, Artificial
  Probe
cctatggctggaggaatctatgaag

SEQ ID NO: 90332 - DNA, 25 bp, Artificial
  Probe
cagttcatcaatcaaatggagaagc

SEQ ID NO: 90333 - DNA, 25 bp, Artificial
  Probe
cttattcggaagccaaattacacaa

SEQ ID NO: 90334 - DNA, 25 bp, Artificial
  Probe
attctttatctgtaatggttgcctt

SEQ ID NO: 90335 - DNA, 25 bp, Artificial
  Probe
ttgtggatgctattcatacctttac

SEQ ID NO: 90336 - DNA, 25 bp, Artificial
  Probe
gaagccaaattacacaaaggatcat

SEQ ID NO: 90337 - DNA, 25 bp, Artificial
  Probe
atggctggaggaatctatgaagttt

SEQ ID NO: 90338 - DNA, 25 bp, Artificial
  Probe
agttcatcaatcaaatggagaagcc

SEQ ID NO: 90339 - DNA, 25 bp, Artificial
  Probe
ttctttatctgtaatggttgcctta

SEQ ID NO: 90340 - DNA, 25 bp, Artificial
  Probe
aagccaaattacacaaaggatcatg

SEQ ID NO: 90341 - DNA, 25 bp, Artificial
  Probe
ccttattcggaagccaaattacaca

SEQ ID NO: 90342 - DNA, 25 bp, Artificial
  Probe
ttcaagatccagttcatcaatcaaa

SEQ ID NO: 90343 - DNA, 25 bp, Artificial
  Probe
cttaaatgccataacccagaccatc

SEQ ID NO: 90344 - DNA, 25 bp, Artificial
  Probe
tctttatctgtaatggttgccttat

SEQ ID NO: 90345 - DNA, 25 bp, Artificial
  Probe
tattctttatctgtaatggttgcct

SEQ ID NO: 90346 - DNA, 25 bp, Artificial
  Probe
gagcaaagttcacttaattgggtac

SEQ ID NO: 90347 - DNA, 25 bp, Artificial
  Probe
ttctcggagcaaagttcacttaatt

SEQ ID NO: 90348 - DNA, 25 bp, Artificial
  Probe
tttctcggagcaaagttcacttaat

SEQ ID NO: 90349 - DNA, 25 bp, Artificial
  Probe
tttgtggatgctattcataccttta

SEQ ID NO: 90350 - DNA, 25 bp, Artificial
  Probe
caaagttcacttaattgggtacagc

SEQ ID NO: 90351 - DNA, 25 bp, Artificial
  Probe
gcaaagttcacttaattgggtacag

SEQ ID NO: 90352 - DNA, 25 bp, Artificial
  Probe
ttcaccaatagaacacattcaatgc

SEQ ID NO: 90353 - DNA, 25 bp, Artificial
  Probe
tatctgaacacctacacacaagcaa

SEQ ID NO: 90354 - DNA, 25 bp, Artificial
  Probe
gtatctgagcctgaccaagaactaa

SEQ ID NO: 90355 - DNA, 25 bp, Artificial
  Probe
tctgatgaacagcacaatggaatag

SEQ ID NO: 90356 - DNA, 25 bp, Artificial
  Probe
ctctgatgaacagcacaatggaata

SEQ ID NO: 90357 - DNA, 25 bp, Artificial
  Probe
tcaccaatagaacacattcaatgcc

SEQ ID NO: 90358 - DNA, 25 bp, Artificial
  Probe
aactatgtacttcaggcttaccttg

SEQ ID NO: 90359 - DNA, 25 bp, Artificial
  Probe
actatgtacttcaggcttaccttga

SEQ ID NO: 90360 - DNA, 25 bp, Artificial
  Probe
gtatctgaacacctacacacaagca

SEQ ID NO: 90361 - DNA, 25 bp, Artificial
  Probe
gcctgaccaagaactaaactatgta

SEQ ID NO: 90362 - DNA, 25 bp, Artificial
  Probe
atgtcattcagaaaggaaagagtca

SEQ ID NO: 90363 - DNA, 25 bp, Artificial
  Probe
gtcattcagaaaggaaagagtcaag

SEQ ID NO: 90364 - DNA, 25 bp, Artificial
  Probe
tgtcattcagaaaggaaagagtcaa

SEQ ID NO: 90365 - DNA, 25 bp, Artificial
  Probe
gagcctgaccaagaactaaactatg

SEQ ID NO: 90366 - DNA, 25 bp, Artificial
  Probe
gaaactgtgaaatgtgtgggtatct

SEQ ID NO: 90367 - DNA, 25 bp, Artificial
  Probe
agaaactgtgaaatgtgtgggtatc

SEQ ID NO: 90368 - DNA, 25 bp, Artificial
  Probe
aatcgttagcatttcgtttgagact

SEQ ID NO: 90369 - DNA, 25 bp, Artificial
  Probe
aaactgtgaaatgtgtgggtatctg

SEQ ID NO: 90370 - DNA, 25 bp, Artificial
  Probe
tgagcctgaccaagaactaaactat

SEQ ID NO: 90371 - DNA, 25 bp, Artificial
  Probe
tgacatatgaattgagctgagagaa

SEQ ID NO: 90372 - DNA, 25 bp, Artificial
  Probe
gtgacatatgaattgagctgagaga

SEQ ID NO: 90373 - DNA, 25 bp, Artificial
  Probe
aatagaacacattcaatgcccaatc

SEQ ID NO: 90374 - DNA, 25 bp, Artificial
  Probe
tatctgagcctgaccaagaactaaa

SEQ ID NO: 90375 - DNA, 25 bp, Artificial
  Probe
tgtcattcaatgtcattcagaaagg

SEQ ID NO: 90376 - DNA, 25 bp, Artificial
  Probe
caatagaacacattcaatgcccaat

SEQ ID NO: 90377 - DNA, 25 bp, Artificial
  Probe
agcctgaccaagaactaaactatgt

SEQ ID NO: 90378 - DNA, 25 bp, Artificial
  Probe
ctgatgaacagcacaatggaatagc

SEQ ID NO: 90379 - DNA, 25 bp, Artificial
  Probe
gtcattcaatgtcattcagaaagga

SEQ ID NO: 90380 - DNA, 25 bp, Artificial
  Probe
caatgtcattcagaaaggaaagagt

SEQ ID NO: 90381 - DNA, 25 bp, Artificial
  Probe
aatgtcattcagaaaggaaagagtc

SEQ ID NO: 90382 - DNA, 25 bp, Artificial
  Probe
tcaatgtcattcagaaaggaaagag

SEQ ID NO: 90383 - DNA, 25 bp, Artificial
  Probe
ctgtgaaatgtgtgggtatctgaac

SEQ ID NO: 90384 - DNA, 25 bp, Artificial
  Probe
tttatggcttaattcctctgtcttt

SEQ ID NO: 90385 - DNA, 25 bp, Artificial
  Probe
caatcgttagcatttcgtttgagac

SEQ ID NO: 90386 - DNA, 25 bp, Artificial
  Probe
caagagtctttgtcattcaatgtca

SEQ ID NO: 90387 - DNA, 25 bp, Artificial
  Probe
atcgttagcatttcgtttgagactc

SEQ ID NO: 90388 - DNA, 25 bp, Artificial
  Probe
ctgagcctgaccaagaactaaacta

SEQ ID NO: 90389 - DNA, 25 bp, Artificial
  Probe
tcattcaatgtcattcagaaaggaa

SEQ ID NO: 90390 - DNA, 25 bp, Artificial
  Probe
cctgaccaagaactaaactatgtac

SEQ ID NO: 90391 - DNA, 25 bp, Artificial
  Probe
gtagatttgtggtgctaactctgtg

SEQ ID NO: 90392 - DNA, 25 bp, Artificial
  Probe
gtgtagatttgtggtgctaactctg

SEQ ID NO: 90393 - DNA, 25 bp, Artificial
  Probe
agtctttgtcattcaatgtcattca

SEQ ID NO: 90394 - DNA, 25 bp, Artificial
  Probe
agaactaaactatgtacttcaggct

SEQ ID NO: 90395 - DNA, 25 bp, Artificial
  Probe
ttcaatgtcattcagaaaggaaaga

SEQ ID NO: 90396 - DNA, 25 bp, Artificial
  Probe
gtctttgtcattcaatgtcattcag

SEQ ID NO: 90397 - DNA, 25 bp, Artificial
  Probe
ttgatgcctccaagattaagattga

SEQ ID NO: 90398 - DNA, 25 bp, Artificial
  Probe
aagattaagattgagttcacgcctg

SEQ ID NO: 90399 - DNA, 25 bp, Artificial
  Probe
ctccaagattaagattgagttcacg

SEQ ID NO: 90400 - DNA, 25 bp, Artificial
  Probe
atgcctccaagattaagattgagtt

SEQ ID NO: 90401 - DNA, 25 bp, Artificial
  Probe
cctccaagattaagattgagttcac

SEQ ID NO: 90402 - DNA, 25 bp, Artificial
  Probe
gatgcctccaagattaagattgagt

SEQ ID NO: 90403 - DNA, 25 bp, Artificial
  Probe
tgatgcctccaagattaagattgag

SEQ ID NO: 90404 - DNA, 25 bp, Artificial
  Probe
gcctccaagattaagattgagttca

SEQ ID NO: 90405 - DNA, 25 bp, Artificial
  Probe
tgcctccaagattaagattgagttc

SEQ ID NO: 90406 - DNA, 25 bp, Artificial
  Probe
caagattaagattgagttcacgcct

SEQ ID NO: 90407 - DNA, 25 bp, Artificial
  Probe
tccaagattaagattgagttcacgc

SEQ ID NO: 90408 - DNA, 25 bp, Artificial
  Probe
agattaagattgagttcacgcctga

SEQ ID NO: 90409 - DNA, 25 bp, Artificial
  Probe
ccaagattaagattgagttcacgcc

SEQ ID NO: 90410 - DNA, 25 bp, Artificial
  Probe
agtttgatgcctccaagattaagat

SEQ ID NO: 90411 - DNA, 25 bp, Artificial
  Probe
tttgatgcctccaagattaagattg

SEQ ID NO: 90412 - DNA, 25 bp, Artificial
  Probe
gtttgatgcctccaagattaagatt

SEQ ID NO: 90413 - DNA, 25 bp, Artificial
  Probe
gagtttgatgcctccaagattaaga

SEQ ID NO: 90414 - DNA, 25 bp, Artificial
  Probe
agagtttgatgcctccaagattaag

SEQ ID NO: 90415 - DNA, 25 bp, Artificial
  Probe
cagagtttgatgcctccaagattaa

SEQ ID NO: 90416 - DNA, 25 bp, Artificial
  Probe
gattaagattgagttcacgcctgaa

SEQ ID NO: 90417 - DNA, 25 bp, Artificial
  Probe
tcacgcctgaacagattgaagagtt

SEQ ID NO: 90418 - DNA, 25 bp, Artificial
  Probe
gacatgccatctcccaaccataatg

SEQ ID NO: 90419 - DNA, 25 bp, Artificial
  Probe
cttcttcccgcctctctgtgattac

SEQ ID NO: 90420 - DNA, 25 bp, Artificial
  Probe
gcagagtttgatgcctccaagatta

SEQ ID NO: 90421 - DNA, 25 bp, Artificial
  Probe
ctaagggcgagatgaagatcacgta

SEQ ID NO: 90422 - DNA, 25 bp, Artificial
  Probe
ctctctgtgattacagctccaatgg

SEQ ID NO: 90423 - DNA, 25 bp, Artificial
  Probe
cctctctgtgattacagctccaatg

SEQ ID NO: 90424 - DNA, 25 bp, Artificial
  Probe
ttcacgcctgaacagattgaagagt

SEQ ID NO: 90425 - DNA, 25 bp, Artificial
  Probe
ctaaggaagcagagtttgatgcctc

SEQ ID NO: 90426 - DNA, 25 bp, Artificial
  Probe
taagggcgagatgaagatcacgtac

SEQ ID NO: 90427 - DNA, 25 bp, Artificial
  Probe
cacacctaagggcgagatgaagatc

SEQ ID NO: 90428 - DNA, 25 bp, Artificial
  Probe
cacgcctgaacagattgaagagttc

SEQ ID NO: 90429 - DNA, 25 bp, Artificial
  Probe
gaacagattgaagagttcaaggagg

SEQ ID NO: 90430 - DNA, 25 bp, Artificial
  Probe
cacctaagggcgagatgaagatcac

SEQ ID NO: 90431 - DNA, 25 bp, Artificial
  Probe
tatgaagcatttgtgaagcacatca

SEQ ID NO: 90432 - DNA, 25 bp, Artificial
  Probe
atgaagcatttgtgaagcacatcat

SEQ ID NO: 90433 - DNA, 25 bp, Artificial
  Probe
acacctaagggcgagatgaagatca

SEQ ID NO: 90434 - DNA, 25 bp, Artificial
  Probe
aacagattgaagagttcaaggaggc

SEQ ID NO: 90435 - DNA, 25 bp, Artificial
  Probe
agcagagtttgatgcctccaagatt

SEQ ID NO: 90436 - DNA, 25 bp, Artificial
  Probe
aagcagagtttgatgcctccaagat

SEQ ID NO: 90437 - DNA, 25 bp, Artificial
  Probe
taaggaagcagagtttgatgcctcc

SEQ ID NO: 90438 - DNA, 25 bp, Artificial
  Probe
cctaaggaagcagagtttgatgcct

SEQ ID NO: 90439 - DNA, 25 bp, Artificial
  Probe
tgaagcatttgtgaagcacatcatg

SEQ ID NO: 90440 - DNA, 25 bp, Artificial
  Probe
gcctctctgtgattacagctccaat

SEQ ID NO: 90441 - DNA, 25 bp, Artificial
  Probe
tctctgtgattacagctccaatggc

SEQ ID NO: 90442 - DNA, 25 bp, Artificial
  Probe
ttatgaagttgaaggaaccacagag

SEQ ID NO: 90443 - DNA, 25 bp, Artificial
  Probe
cttatgaagttgaaggaaccacaga

SEQ ID NO: 90444 - DNA, 25 bp, Artificial
  Probe
tacagagtgaagtggtcgtcttatt

SEQ ID NO: 90445 - DNA, 25 bp, Artificial
  Probe
ttacagagtgaagtggtcgtcttat

SEQ ID NO: 90446 - DNA, 25 bp, Artificial
  Probe
atagcattaagaagatcgtgtgaag

SEQ ID NO: 90447 - DNA, 25 bp, Artificial
  Probe
tagcattaagaagatcgtgtgaagc

SEQ ID NO: 90448 - DNA, 25 bp, Artificial
  Probe
cgtaatagcattaagaagatcgtgt

SEQ ID NO: 90449 - DNA, 25 bp, Artificial
  Probe
cttacagagtgaagtggtcgtctta

SEQ ID NO: 90450 - DNA, 25 bp, Artificial
  Probe
aatagcattaagaagatcgtgtgaa

SEQ ID NO: 90451 - DNA, 25 bp, Artificial
  Probe
tatgaagttgaaggaaccacagagg

SEQ ID NO: 90452 - DNA, 25 bp, Artificial
  Probe
gtaatagcattaagaagatcgtgtg

SEQ ID NO: 90453 - DNA, 25 bp, Artificial
  Probe
tggtcgtcttatttacacacttaca

SEQ ID NO: 90454 - DNA, 25 bp, Artificial
  Probe
tctttctttcactcttcaaaccaac

SEQ ID NO: 90455 - DNA, 25 bp, Artificial
  Probe
ctttcactcttcaaaccaacctaac

SEQ ID NO: 90456 - DNA, 25 bp, Artificial
  Probe
tctttcactcttcaaaccaacctaa

SEQ ID NO: 90457 - DNA, 25 bp, Artificial
  Probe
ttctttcactcttcaaaccaaccta

SEQ ID NO: 90458 - DNA, 25 bp, Artificial
  Probe
taatagcattaagaagatcgtgtga

SEQ ID NO: 90459 - DNA, 25 bp, Artificial
  Probe
ttcactcttcaaaccaacctaacat

SEQ ID NO: 90460 - DNA, 25 bp, Artificial
  Probe
agtttaatgctgcttctctttgatg

SEQ ID NO: 90461 - DNA, 25 bp, Artificial
  Probe
ttaatgctgcttctctttgatgttt

SEQ ID NO: 90462 - DNA, 25 bp, Artificial
  Probe
tttaatgctgcttctctttgatgtt

SEQ ID NO: 90463 - DNA, 25 bp, Artificial
  Probe
gtttaatgctgcttctctttgatgt

SEQ ID NO: 90464 - DNA, 25 bp, Artificial
  Probe
tttcactcttcaaaccaacctaaca

SEQ ID NO: 90465 - DNA, 25 bp, Artificial
  Probe
ctttctttcactcttcaaaccaacc

SEQ ID NO: 90466 - DNA, 25 bp, Artificial
  Probe
gctttctttctttcactcttcaaac

SEQ ID NO: 90467 - DNA, 25 bp, Artificial
  Probe
ttctttctttcactcttcaaaccaa

SEQ ID NO: 90468 - DNA, 25 bp, Artificial
  Probe
tttctttctttcactcttcaaacca

SEQ ID NO: 90469 - DNA, 25 bp, Artificial
  Probe
ggtcgtcttatttacacacttacaa

SEQ ID NO: 90470 - DNA, 25 bp, Artificial
  Probe
tttctttcactcttcaaaccaacct

SEQ ID NO: 90471 - DNA, 25 bp, Artificial
  Probe
cctaagtttaatgctgcttctcttt

SEQ ID NO: 90472 - DNA, 25 bp, Artificial
  Probe
gagtgaagtggtcgtcttatttaca

SEQ ID NO: 90473 - DNA, 25 bp, Artificial
  Probe
aagtttaatgctgcttctctttgat

SEQ ID NO: 90474 - DNA, 25 bp, Artificial
  Probe
agagtgaagtggtcgtcttatttac

SEQ ID NO: 90475 - DNA, 25 bp, Artificial
  Probe
cagagtgaagtggtcgtcttattta

SEQ ID NO: 90476 - DNA, 25 bp, Artificial
  Probe
ctttctttctttcactcttcaaacc

SEQ ID NO: 90477 - DNA, 25 bp, Artificial
  Probe
taagtttaatgctgcttctctttga

SEQ ID NO: 90478 - DNA, 25 bp, Artificial
  Probe
attgcctaagtttaatgctgcttct

SEQ ID NO: 90479 - DNA, 25 bp, Artificial
  Probe
ctaagtttaatgctgcttctctttg

SEQ ID NO: 90480 - DNA, 25 bp, Artificial
  Probe
tcttacagagtgaagtggtcgtctt

SEQ ID NO: 90481 - DNA, 25 bp, Artificial
  Probe
gcctaagtttaatgctgcttctctt

SEQ ID NO: 90482 - DNA, 25 bp, Artificial
  Probe
tcttggagcattgcctaagtttaat

SEQ ID NO: 90483 - DNA, 25 bp, Artificial
  Probe
caacctaacatggcttctcactcat

SEQ ID NO: 90484 - DNA, 25 bp, Artificial
  Probe
ttgcctaagtttaatgctgcttctc

SEQ ID NO: 90485 - DNA, 25 bp, Artificial
  Probe
gtcgtcttatttacacacttacaag

SEQ ID NO: 90486 - DNA, 25 bp, Artificial
  Probe
ttatttacacacttacaagttcggg

SEQ ID NO: 90487 - DNA, 25 bp, Artificial
  Probe
gaagtgggacattctttgtgtattt

SEQ ID NO: 90488 - DNA, 25 bp, Artificial
  Probe
ggaagtgggacattctttgtgtatt

SEQ ID NO: 90489 - DNA, 25 bp, Artificial
  Probe
aagtgggacattctttgtgtattta

SEQ ID NO: 90490 - DNA, 25 bp, Artificial
  Probe
agtgggacattctttgtgtatttat

SEQ ID NO: 90491 - DNA, 25 bp, Artificial
  Probe
gtgggacattctttgtgtatttatt

SEQ ID NO: 90492 - DNA, 25 bp, Artificial
  Probe
gggaagtgggacattctttgtgtat

SEQ ID NO: 90493 - DNA, 25 bp, Artificial
  Probe
tttgtgtatttattttcctccccag

SEQ ID NO: 90494 - DNA, 25 bp, Artificial
  Probe
ctttgtgtatttattttcctcccca

SEQ ID NO: 90495 - DNA, 25 bp, Artificial
  Probe
tgggacattctttgtgtatttattt

SEQ ID NO: 90496 - DNA, 25 bp, Artificial
  Probe
tctttgtgtatttattttcctcccc

SEQ ID NO: 90497 - DNA, 25 bp, Artificial
  Probe
ttctttgtgtatttattttcctccc

SEQ ID NO: 90498 - DNA, 25 bp, Artificial
  Probe
tgggaagtgggacattctttgtgta

SEQ ID NO: 90499 - DNA, 25 bp, Artificial
  Probe
caggtacggtttagcatgtgtttgg

SEQ ID NO: 90500 - DNA, 25 bp, Artificial
  Probe
ggtgaagagaccaggagcattgtac

SEQ ID NO: 90501 - DNA, 25 bp, Artificial
  Probe
gcaggtacggtttagcatgtgtttg

SEQ ID NO: 90502 - DNA, 25 bp, Artificial
  Probe
ctgggaagtgggacattctttgtgt

SEQ ID NO: 90503 - DNA, 25 bp, Artificial
  Probe
gggacattctttgtgtatttatttt

SEQ ID NO: 90504 - DNA, 25 bp, Artificial
  Probe
attctttgtgtatttattttcctcc

SEQ ID NO: 90505 - DNA, 25 bp, Artificial
  Probe
acattctttgtgtatttattttcct

SEQ ID NO: 90506 - DNA, 25 bp, Artificial
  Probe
cattctttgtgtatttattttcctc

SEQ ID NO: 90507 - DNA, 25 bp, Artificial
  Probe
gacattctttgtgtatttattttcc

SEQ ID NO: 90508 - DNA, 25 bp, Artificial
  Probe
ggacattctttgtgtatttattttc

SEQ ID NO: 90509 - DNA, 25 bp, Artificial
  Probe
tattgtggactactgaatctctctc

SEQ ID NO: 90510 - DNA, 25 bp, Artificial
  Probe
ctattgtggactactgaatctctct

SEQ ID NO: 90511 - DNA, 25 bp, Artificial
  Probe
ccttccgtgtataattccttgatga

SEQ ID NO: 90512 - DNA, 25 bp, Artificial
  Probe
tccgtgtataattccttgatgaaga

SEQ ID NO: 90513 - DNA, 25 bp, Artificial
  Probe
ttccgtgtataattccttgatgaag

SEQ ID NO: 90514 - DNA, 25 bp, Artificial
  Probe
cttccgtgtataattccttgatgaa

SEQ ID NO: 90515 - DNA, 25 bp, Artificial
  Probe
ccgtgtataattccttgatgaagat

SEQ ID NO: 90516 - DNA, 25 bp, Artificial
  Probe
attgtggactactgaatctctctcc

SEQ ID NO: 90517 - DNA, 25 bp, Artificial
  Probe
attctctttcctttgcctcatactt

SEQ ID NO: 90518 - DNA, 25 bp, Artificial
  Probe
ttctctttcctttgcctcatacttc

SEQ ID NO: 90519 - DNA, 25 bp, Artificial
  Probe
cattctctttcctttgcctcatact

SEQ ID NO: 90520 - DNA, 25 bp, Artificial
  Probe
acattctctttcctttgcctcatac

SEQ ID NO: 90521 - DNA, 25 bp, Artificial
  Probe
cacattctctttcctttgcctcata

SEQ ID NO: 90522 - DNA, 25 bp, Artificial
  Probe
tggactactgaatctctctcctctc

SEQ ID NO: 90523 - DNA, 25 bp, Artificial
  Probe
cccttccgtgtataattccttgatg

SEQ ID NO: 90524 - DNA, 25 bp, Artificial
  Probe
ttgtggactactgaatctctctcct

SEQ ID NO: 90525 - DNA, 25 bp, Artificial
  Probe
gtggactactgaatctctctcctct

SEQ ID NO: 90526 - DNA, 25 bp, Artificial
  Probe
tgtggactactgaatctctctcctc

SEQ ID NO: 90527 - DNA, 25 bp, Artificial
  Probe
tctttcctttgcctcatacttcctc

SEQ ID NO: 90528 - DNA, 25 bp, Artificial
  Probe
ctctttcctttgcctcatacttcct

SEQ ID NO: 90529 - DNA, 25 bp, Artificial
  Probe
tctctttcctttgcctcatacttcc

SEQ ID NO: 90530 - DNA, 25 bp, Artificial
  Probe
ggactactgaatctctctcctctcc

SEQ ID NO: 90531 - DNA, 25 bp, Artificial
  Probe
cgtgtataattccttgatgaagata

SEQ ID NO: 90532 - DNA, 25 bp, Artificial
  Probe
tttcctttgcctcatacttcctcag

SEQ ID NO: 90533 - DNA, 25 bp, Artificial
  Probe
ctttcctttgcctcatacttcctca

SEQ ID NO: 90534 - DNA, 25 bp, Artificial
  Probe
gactactgaatctctctcctctccc

SEQ ID NO: 90535 - DNA, 25 bp, Artificial
  Probe
gcccttccgtgtataattccttgat

SEQ ID NO: 90536 - DNA, 25 bp, Artificial
  Probe
ttcctttgcctcatacttcctcaga

SEQ ID NO: 90537 - DNA, 25 bp, Artificial
  Probe
ctcctctaccctaccaagtagtatt

SEQ ID NO: 90538 - DNA, 25 bp, Artificial
  Probe
tcctctaccctaccaagtagtattg

SEQ ID NO: 90539 - DNA, 25 bp, Artificial
  Probe
ccacattctctttcctttgcctcat

SEQ ID NO: 90540 - DNA, 25 bp, Artificial
  Probe
cctctaccctaccaagtagtattgt

SEQ ID NO: 90541 - DNA, 25 bp, Artificial
  Probe
aaataaaatgacagtgaggggtttg

SEQ ID NO: 90542 - DNA, 25 bp, Artificial
  Probe
cgttatcatgaggatatcttcggtg

SEQ ID NO: 90543 - DNA, 25 bp, Artificial
  Probe
gttatcatgaggatatcttcggtgc

SEQ ID NO: 90544 - DNA, 25 bp, Artificial
  Probe
acgttatcatgaggatatcttcggt

SEQ ID NO: 90545 - DNA, 25 bp, Artificial
  Probe
ctaaataaaatgacagtgaggggtt

SEQ ID NO: 90546 - DNA, 25 bp, Artificial
  Probe
ttaagaaaacataccttcgtccact

SEQ ID NO: 90547 - DNA, 25 bp, Artificial
  Probe
taagaaaacataccttcgtccactc

SEQ ID NO: 90548 - DNA, 25 bp, Artificial
  Probe
tttaagaaaacataccttcgtccac

SEQ ID NO: 90549 - DNA, 25 bp, Artificial
  Probe
cctcctctaccctaccaagtagtat

SEQ ID NO: 90550 - DNA, 25 bp, Artificial
  Probe
aataaaatgacagtgaggggtttgg

SEQ ID NO: 90551 - DNA, 25 bp, Artificial
  Probe
taaataaaatgacagtgaggggttt

SEQ ID NO: 90552 - DNA, 25 bp, Artificial
  Probe
atttaagaaaacataccttcgtcca

SEQ ID NO: 90553 - DNA, 25 bp, Artificial
  Probe
tcctttgcctcatacttcctcagag

SEQ ID NO: 90554 - DNA, 25 bp, Artificial
  Probe
cagacagagatatggcaagagatcc

SEQ ID NO: 90555 - DNA, 25 bp, Artificial
  Probe
atgatgctaggtaacaaacgaatgg

SEQ ID NO: 90556 - DNA, 25 bp, Artificial
  Probe
atgtggtgatgggaaatgaaacttg

SEQ ID NO: 90557 - DNA, 25 bp, Artificial
  Probe
catgatgctaggtaacaaacgaatg

SEQ ID NO: 90558 - DNA, 25 bp, Artificial
  Probe
gtgatgggaaatgaaacttgctctc

SEQ ID NO: 90559 - DNA, 25 bp, Artificial
  Probe
ccatgatgctaggtaacaaacgaat

SEQ ID NO: 90560 - DNA, 25 bp, Artificial
  Probe
gacagagatatggcaagagatccag

SEQ ID NO: 90561 - DNA, 25 bp, Artificial
  Probe
ccagacagagatatggcaagagatc

SEQ ID NO: 90562 - DNA, 25 bp, Artificial
  Probe
agacagagatatggcaagagatcca

SEQ ID NO: 90563 - DNA, 25 bp, Artificial
  Probe
accagacagagatatggcaagagat

SEQ ID NO: 90564 - DNA, 25 bp, Artificial
  Probe
catcaccagacagagatatggcaag

SEQ ID NO: 90565 - DNA, 25 bp, Artificial
  Probe
catctcatctcatcctgtgaaacca

SEQ ID NO: 90566 - DNA, 25 bp, Artificial
  Probe
catgtggtgatgggaaatgaaactt

SEQ ID NO: 90567 - DNA, 25 bp, Artificial
  Probe
atcaccagacagagatatggcaaga

SEQ ID NO: 90568 - DNA, 25 bp, Artificial
  Probe
atctcatctcatcctgtgaaaccag

SEQ ID NO: 90569 - DNA, 25 bp, Artificial
  Probe
acatctcatctcatcctgtgaaacc

SEQ ID NO: 90570 - DNA, 25 bp, Artificial
  Probe
tcatcaccagacagagatatggcaa

SEQ ID NO: 90571 - DNA, 25 bp, Artificial
  Probe
tgatgctaggtaacaaacgaatggg

SEQ ID NO: 90572 - DNA, 25 bp, Artificial
  Probe
ggtgatgggaaatgaaacttgctct

SEQ ID NO: 90573 - DNA, 25 bp, Artificial
  Probe
ctcatctcatcctgtgaaaccagtc

SEQ ID NO: 90574 - DNA, 25 bp, Artificial
  Probe
caccagacagagatatggcaagaga

SEQ ID NO: 90575 - DNA, 25 bp, Artificial
  Probe
tcaccagacagagatatggcaagag

SEQ ID NO: 90576 - DNA, 25 bp, Artificial
  Probe
ctcatcaccagacagagatatggca

SEQ ID NO: 90577 - DNA, 25 bp, Artificial
  Probe
catcaatctcatcaccagacagaga

SEQ ID NO: 90578 - DNA, 25 bp, Artificial
  Probe
tggtgatgggaaatgaaacttgctc

SEQ ID NO: 90579 - DNA, 25 bp, Artificial
  Probe
catctcatcctgtgaaaccagtctg

SEQ ID NO: 90580 - DNA, 25 bp, Artificial
  Probe
tcatctcatcctgtgaaaccagtct

SEQ ID NO: 90581 - DNA, 25 bp, Artificial
  Probe
tctcatctcatcctgtgaaaccagt

SEQ ID NO: 90582 - DNA, 25 bp, Artificial
  Probe
ggaaatgaaacttgctctcctgact

SEQ ID NO: 90583 - DNA, 25 bp, Artificial
  Probe
gatgggaaatgaaacttgctctcct

SEQ ID NO: 90584 - DNA, 25 bp, Artificial
  Probe
gtggtgatgggaaatgaaacttgct

SEQ ID NO: 90585 - DNA, 25 bp, Artificial
  Probe
acagagatatggcaagagatccagc

SEQ ID NO: 90586 - DNA, 25 bp, Artificial
  Probe
atgggaaatgaaacttgctctcctg

SEQ ID NO: 90587 - DNA, 25 bp, Artificial
  Probe
tgatgggaaatgaaacttgctctcc

SEQ ID NO: 90588 - DNA, 25 bp, Artificial
  Probe
gccatgatgctaggtaacaaacgaa

SEQ ID NO: 90589 - DNA, 25 bp, Artificial
  Probe
tgtggtgatgggaaatgaaacttgc

SEQ ID NO: 90590 - DNA, 25 bp, Artificial
  Probe
gggaaatgaaacttgctctcctgac

SEQ ID NO: 90591 - DNA, 25 bp, Artificial
  Probe
tctcatcaccagacagagatatggc

SEQ ID NO: 90592 - DNA, 25 bp, Artificial
  Probe
acactgatttcagatctcttaatga

SEQ ID NO: 90593 - DNA, 25 bp, Artificial
  Probe
gacactgatttcagatctcttaatg

SEQ ID NO: 90594 - DNA, 25 bp, Artificial
  Probe
agacactgatttcagatctcttaat

SEQ ID NO: 90595 - DNA, 25 bp, Artificial
  Probe
tgggaaatgaaacttgctctcctga

SEQ ID NO: 90596 - DNA, 25 bp, Artificial
  Probe
cactgatttcagatctcttaatgag

SEQ ID NO: 90597 - DNA, 25 bp, Artificial
  Probe
atctcatcctgtgaaaccagtctgc

SEQ ID NO: 90598 - DNA, 25 bp, Artificial
  Probe
cacatctcatctcatcctgtgaaac

SEQ ID NO: 90599 - DNA, 25 bp, Artificial
  Probe
caccattgggacagctagaataggg

SEQ ID NO: 90600 - DNA, 25 bp, Artificial
  Probe
ccaccattgggacagctagaatagg

SEQ ID NO: 90601 - DNA, 25 bp, Artificial
  Probe
gccaccattgggacagctagaatag

SEQ ID NO: 90602 - DNA, 25 bp, Artificial
  Probe
gtaaatgatatgctttgacttgtgc

SEQ ID NO: 90603 - DNA, 25 bp, Artificial
  Probe
ccttaatgttgatgtaacttgtgta

SEQ ID NO: 90604 - DNA, 25 bp, Artificial
  Probe
aagcccttaatgttgatgtaacttg

SEQ ID NO: 90605 - DNA, 25 bp, Artificial
  Probe
cccttaatgttgatgtaacttgtgt

SEQ ID NO: 90606 - DNA, 25 bp, Artificial
  Probe
gcccttaatgttgatgtaacttgtg

SEQ ID NO: 90607 - DNA, 25 bp, Artificial
  Probe
agcccttaatgttgatgtaacttgt

SEQ ID NO: 90608 - DNA, 25 bp, Artificial
  Probe
ctccaagcagaatctcgtaactcac

SEQ ID NO: 90609 - DNA, 25 bp, Artificial
  Probe
aaagcccttaatgttgatgtaactt

SEQ ID NO: 90610 - DNA, 25 bp, Artificial
  Probe
cttgtgtatcatcctaaatgtctgt

SEQ ID NO: 90611 - DNA, 25 bp, Artificial
  Probe
acttgtgtatcatcctaaatgtctg

SEQ ID NO: 90612 - DNA, 25 bp, Artificial
  Probe
tgtaaatgatatgctttgacttgtg

SEQ ID NO: 90613 - DNA, 25 bp, Artificial
  Probe
tgtgtatcatcctaaatgtctgttt

SEQ ID NO: 90614 - DNA, 25 bp, Artificial
  Probe
ttgtgtatcatcctaaatgtctgtt

SEQ ID NO: 90615 - DNA, 25 bp, Artificial
  Probe
gatgacaagaccacaaagaacacag

SEQ ID NO: 90616 - DNA, 25 bp, Artificial
  Probe
tgctatgtaaatgatatgctttgac

SEQ ID NO: 90617 - DNA, 25 bp, Artificial
  Probe
aacttgtgtatcatcctaaatgtct

SEQ ID NO: 90618 - DNA, 25 bp, Artificial
  Probe
cagaaggaagataccgcagaaagat

SEQ ID NO: 90619 - DNA, 25 bp, Artificial
  Probe
gctatgtaaatgatatgctttgact

SEQ ID NO: 90620 - DNA, 25 bp, Artificial
  Probe
atgaaggatgacgatgacaagacca

SEQ ID NO: 90621 - DNA, 25 bp, Artificial
  Probe
atgacgatgacaagaccacaaagaa

SEQ ID NO: 90622 - DNA, 25 bp, Artificial
  Probe
tgttgatgtaacttgtgtatcatcc

SEQ ID NO: 90623 - DNA, 25 bp, Artificial
  Probe
agaaggaagataccgcagaaagatc

SEQ ID NO: 90624 - DNA, 25 bp, Artificial
  Probe
ttcagaaggaagataccgcagaaag

SEQ ID NO: 90625 - DNA, 25 bp, Artificial
  Probe
ctttcagaaggaagataccgcagaa

SEQ ID NO: 90626 - DNA, 25 bp, Artificial
  Probe
gttgatgtaacttgtgtatcatcct

SEQ ID NO: 90627 - DNA, 25 bp, Artificial
  Probe
atgtaaatgatatgctttgacttgt

SEQ ID NO: 90628 - DNA, 25 bp, Artificial
  Probe
catgaaggatgacgatgacaagacc

SEQ ID NO: 90629 - DNA, 25 bp, Artificial
  Probe
gatgacgatgacaagaccacaaaga

SEQ ID NO: 90630 - DNA, 25 bp, Artificial
  Probe
aaggatgacgatgacaagaccacaa

SEQ ID NO: 90631 - DNA, 25 bp, Artificial
  Probe
ggtccacaacatcctttcagaagaa

SEQ ID NO: 90632 - DNA, 25 bp, Artificial
  Probe
atgctatgtaaatgatatgctttga

SEQ ID NO: 90633 - DNA, 25 bp, Artificial
  Probe
tcagaaggaagataccgcagaaaga

SEQ ID NO: 90634 - DNA, 25 bp, Artificial
  Probe
gctttgacttgtgcattaaacttca

SEQ ID NO: 90635 - DNA, 25 bp, Artificial
  Probe
gtaacttgtgtatcatcctaaatgt

SEQ ID NO: 90636 - DNA, 25 bp, Artificial
  Probe
tgtaacttgtgtatcatcctaaatg

SEQ ID NO: 90637 - DNA, 25 bp, Artificial
  Probe
agaatggagttcagaatactgagtc

SEQ ID NO: 90638 - DNA, 25 bp, Artificial
  Probe
gagaatggagttcagaatactgagt

SEQ ID NO: 90639 - DNA, 25 bp, Artificial
  Probe
tgagaatggagttcagaatactgag

SEQ ID NO: 90640 - DNA, 25 bp, Artificial
  Probe
ctgagaatggagttcagaatactga

SEQ ID NO: 90641 - DNA, 25 bp, Artificial
  Probe
cagaatactgagtccacacaggaaa

SEQ ID NO: 90642 - DNA, 25 bp, Artificial
  Probe
gtccacaacatcctttcagaagaaa

SEQ ID NO: 90643 - DNA, 25 bp, Artificial
  Probe
atgacaagaccacaaagaacacagg

SEQ ID NO: 90644 - DNA, 25 bp, Artificial
  Probe
ccataggaaggagagattttgacat

SEQ ID NO: 90645 - DNA, 25 bp, Artificial
  Probe
gaatggagttcagaatactgagtcc

SEQ ID NO: 90646 - DNA, 25 bp, Artificial
  Probe
gagagaaaagcccttaatgttgatg

SEQ ID NO: 90647 - DNA, 25 bp, Artificial
  Probe
ttcatcaggaatgctggtcttagtt

SEQ ID NO: 90648 - DNA, 25 bp, Artificial
  Probe
tgttgctagagtaatttcatcagga

SEQ ID NO: 90649 - DNA, 25 bp, Artificial
  Probe
gctagagtaatttcatcaggaatgc

SEQ ID NO: 90650 - DNA, 25 bp, Artificial
  Probe
ttgttgctagagtaatttcatcagg

SEQ ID NO: 90651 - DNA, 25 bp, Artificial
  Probe
gttgctagagtaatttcatcaggaa

SEQ ID NO: 90652 - DNA, 25 bp, Artificial
  Probe
tgctagagtaatttcatcaggaatg

SEQ ID NO: 90653 - DNA, 25 bp, Artificial
  Probe
aatttcatcaggaatgctggtctta

SEQ ID NO: 90654 - DNA, 25 bp, Artificial
  Probe
taatttcatcaggaatgctggtctt

SEQ ID NO: 90655 - DNA, 25 bp, Artificial
  Probe
atttcatcaggaatgctggtcttag

SEQ ID NO: 90656 - DNA, 25 bp, Artificial
  Probe
agagtaatttcatcaggaatgctgg

SEQ ID NO: 90657 - DNA, 25 bp, Artificial
  Probe
ctagagtaatttcatcaggaatgct

SEQ ID NO: 90658 - DNA, 25 bp, Artificial
  Probe
gtaatttcatcaggaatgctggtct

SEQ ID NO: 90659 - DNA, 25 bp, Artificial
  Probe
agtaatttcatcaggaatgctggtc

SEQ ID NO: 90660 - DNA, 25 bp, Artificial
  Probe
gagtaatttcatcaggaatgctggt

SEQ ID NO: 90661 - DNA, 25 bp, Artificial
  Probe
tagagtaatttcatcaggaatgctg

SEQ ID NO: 90662 - DNA, 25 bp, Artificial
  Probe
ttgctagagtaatttcatcaggaat

SEQ ID NO: 90663 - DNA, 25 bp, Artificial
  Probe
tcatcaggaatgctggtcttagttt

SEQ ID NO: 90664 - DNA, 25 bp, Artificial
  Probe
tttcatcaggaatgctggtcttagt

SEQ ID NO: 90665 - DNA, 25 bp, Artificial
  Probe
attgttgctagagtaatttcatcag

SEQ ID NO: 90666 - DNA, 25 bp, Artificial
  Probe
gtgacaaacttgcttaaaagaaaca

SEQ ID NO: 90667 - DNA, 25 bp, Artificial
  Probe
tgtgacaaacttgcttaaaagaaac

SEQ ID NO: 90668 - DNA, 25 bp, Artificial
  Probe
aattgttgctagagtaatttcatca

SEQ ID NO: 90669 - DNA, 25 bp, Artificial
  Probe
tgacaaacttgcttaaaagaaacat

SEQ ID NO: 90670 - DNA, 25 bp, Artificial
  Probe
catcaggaatgctggtcttagtttt

SEQ ID NO: 90671 - DNA, 25 bp, Artificial
  Probe
ttgtgacaaacttgcttaaaagaaa

SEQ ID NO: 90672 - DNA, 25 bp, Artificial
  Probe
gacaaacttgcttaaaagaaacatg

SEQ ID NO: 90673 - DNA, 25 bp, Artificial
  Probe
tcttagactgtttgtctctaggttt

SEQ ID NO: 90674 - DNA, 25 bp, Artificial
  Probe
ttcttagactgtttgtctctaggtt

SEQ ID NO: 90675 - DNA, 25 bp, Artificial
  Probe
tttcttagactgtttgtctctaggt

SEQ ID NO: 90676 - DNA, 25 bp, Artificial
  Probe
tgtaacaacttaaacatctctatga

SEQ ID NO: 90677 - DNA, 25 bp, Artificial
  Probe
ttttgtgtgtgtacgcaaattgttg

SEQ ID NO: 90678 - DNA, 25 bp, Artificial
  Probe
ttgtaacaacttaaacatctctatg

SEQ ID NO: 90679 - DNA, 25 bp, Artificial
  Probe
caaattgttgctagagtaatttcat

SEQ ID NO: 90680 - DNA, 25 bp, Artificial
  Probe
acataaaatttgtgacaaacttgct

SEQ ID NO: 90681 - DNA, 25 bp, Artificial
  Probe
tttgtgacaaacttgcttaaaagaa

SEQ ID NO: 90682 - DNA, 25 bp, Artificial
  Probe
aaattgttgctagagtaatttcatc

SEQ ID NO: 90683 - DNA, 25 bp, Artificial
  Probe
atttgtgacaaacttgcttaaaaga

SEQ ID NO: 90684 - DNA, 25 bp, Artificial
  Probe
aacataaaatttgtgacaaacttgc

SEQ ID NO: 90685 - DNA, 25 bp, Artificial
  Probe
acgcaaattgttgctagagtaattt

SEQ ID NO: 90686 - DNA, 25 bp, Artificial
  Probe
gtacgcaaattgttgctagagtaat

SEQ ID NO: 90687 - DNA, 25 bp, Artificial
  Probe
cgcaaattgttgctagagtaatttc

SEQ ID NO: 90688 - DNA, 25 bp, Artificial
  Probe
tacgcaaattgttgctagagtaatt

SEQ ID NO: 90689 - DNA, 25 bp, Artificial
  Probe
cttagactgtttgtctctaggtttt

SEQ ID NO: 90690 - DNA, 25 bp, Artificial
  Probe
cataaaatttgtgacaaacttgctt

SEQ ID NO: 90691 - DNA, 25 bp, Artificial
  Probe
tgtacgcaaattgttgctagagtaa

SEQ ID NO: 90692 - DNA, 25 bp, Artificial
  Probe
ccaattattactgtcactgttacca

SEQ ID NO: 90693 - DNA, 25 bp, Artificial
  Probe
tccaattattactgtcactgttacc

SEQ ID NO: 90694 - DNA, 25 bp, Artificial
  Probe
ccaaggctaatccaattattactgt

SEQ ID NO: 90695 - DNA, 25 bp, Artificial
  Probe
ggctaatccaattattactgtcact

SEQ ID NO: 90696 - DNA, 25 bp, Artificial
  Probe
aggctaatccaattattactgtcac

SEQ ID NO: 90697 - DNA, 25 bp, Artificial
  Probe
gccaaggctaatccaattattactg

SEQ ID NO: 90698 - DNA, 25 bp, Artificial
  Probe
tgccaaggctaatccaattattact

SEQ ID NO: 90699 - DNA, 25 bp, Artificial
  Probe
ttgccaaggctaatccaattattac

SEQ ID NO: 90700 - DNA, 25 bp, Artificial
  Probe
aaggctaatccaattattactgtca

SEQ ID NO: 90701 - DNA, 25 bp, Artificial
  Probe
gctaatccaattattactgtcactg

SEQ ID NO: 90702 - DNA, 25 bp, Artificial
  Probe
caaggctaatccaattattactgtc

SEQ ID NO: 90703 - DNA, 25 bp, Artificial
  Probe
caattattactgtcactgttaccat

SEQ ID NO: 90704 - DNA, 25 bp, Artificial
  Probe
atccaattattactgtcactgttac

SEQ ID NO: 90705 - DNA, 25 bp, Artificial
  Probe
ctaatccaattattactgtcactgt

SEQ ID NO: 90706 - DNA, 25 bp, Artificial
  Probe
tttgccaaggctaatccaattatta

SEQ ID NO: 90707 - DNA, 25 bp, Artificial
  Probe
aatccaattattactgtcactgtta

SEQ ID NO: 90708 - DNA, 25 bp, Artificial
  Probe
taatccaattattactgtcactgtt

SEQ ID NO: 90709 - DNA, 25 bp, Artificial
  Probe
aattattactgtcactgttaccata

SEQ ID NO: 90710 - DNA, 25 bp, Artificial
  Probe
ttattactgtcactgttaccataat

SEQ ID NO: 90711 - DNA, 25 bp, Artificial
  Probe
attattactgtcactgttaccataa

SEQ ID NO: 90712 - DNA, 25 bp, Artificial
  Probe
tattactgtcactgttaccataatt

SEQ ID NO: 90713 - DNA, 25 bp, Artificial
  Probe
actgtcactgttaccataatttatt

SEQ ID NO: 90714 - DNA, 25 bp, Artificial
  Probe
aattatctagactgatctccctctg

SEQ ID NO: 90715 - DNA, 25 bp, Artificial
  Probe
attactgtcactgttaccataattt

SEQ ID NO: 90716 - DNA, 25 bp, Artificial
  Probe
cttccaaggacacgttacaggattc

SEQ ID NO: 90717 - DNA, 25 bp, Artificial
  Probe
atcttccaaggacacgttacaggat

SEQ ID NO: 90718 - DNA, 25 bp, Artificial
  Probe
ttttgccaaggctaatccaattatt

SEQ ID NO: 90719 - DNA, 25 bp, Artificial
  Probe
ttccaaggacacgttacaggattct

SEQ ID NO: 90720 - DNA, 25 bp, Artificial
  Probe
tcttccaaggacacgttacaggatt

SEQ ID NO: 90721 - DNA, 25 bp, Artificial
  Probe
ttactgtcactgttaccataattta

SEQ ID NO: 90722 - DNA, 25 bp, Artificial
  Probe
tttgtaacataatgcactttaggta

SEQ ID NO: 90723 - DNA, 25 bp, Artificial
  Probe
tactgtcactgttaccataatttat

SEQ ID NO: 90724 - DNA, 25 bp, Artificial
  Probe
ttgtaacataatgcactttaggtat

SEQ ID NO: 90725 - DNA, 25 bp, Artificial
  Probe
ctgtcactgttaccataatttattt

SEQ ID NO: 90726 - DNA, 25 bp, Artificial
  Probe
tttgtcaactgatgtatttatttgt

SEQ ID NO: 90727 - DNA, 25 bp, Artificial
  Probe
taattatctagactgatctccctct

SEQ ID NO: 90728 - DNA, 25 bp, Artificial
  Probe
gatcttccaaggacacgttacagga

SEQ ID NO: 90729 - DNA, 25 bp, Artificial
  Probe
agatcttccaaggacacgttacagg

SEQ ID NO: 90730 - DNA, 25 bp, Artificial
  Probe
atgcactttaggtatacatatcaag

SEQ ID NO: 90731 - DNA, 25 bp, Artificial
  Probe
tccaaggacacgttacaggattctg

SEQ ID NO: 90732 - DNA, 25 bp, Artificial
  Probe
ttgtggttcattttgatgagttctg

SEQ ID NO: 90733 - DNA, 25 bp, Artificial
  Probe
tttgtggttcattttgatgagttct

SEQ ID NO: 90734 - DNA, 25 bp, Artificial
  Probe
tgtggttcattttgatgagttctga

SEQ ID NO: 90735 - DNA, 25 bp, Artificial
  Probe
aacataatgcactttaggtatacat

SEQ ID NO: 90736 - DNA, 25 bp, Artificial
  Probe
tattgcctgtacatactgtaaatgc

SEQ ID NO: 90737 - DNA, 25 bp, Artificial
  Probe
caatcttcaggaacagacaacagtg

SEQ ID NO: 90738 - DNA, 25 bp, Artificial
  Probe
cgttctctctctctctctctctctc

SEQ ID NO: 90739 - DNA, 25 bp, Artificial
  Probe
ctcgttctctctctctctctctctc

SEQ ID NO: 90740 - DNA, 25 bp, Artificial
  Probe
ctctcgttctctctctctctctctc

SEQ ID NO: 90741 - DNA, 25 bp, Artificial
  Probe
tcgttctctctctctctctctctct

SEQ ID NO: 90742 - DNA, 25 bp, Artificial
  Probe
tctcgttctctctctctctctctct

SEQ ID NO: 90743 - DNA, 25 bp, Artificial
  Probe
tctctctctctctctctctaaatgg

SEQ ID NO: 90744 - DNA, 25 bp, Artificial
  Probe
ttatttattcactttgcccacagac

SEQ ID NO: 90745 - DNA, 25 bp, Artificial
  Probe
gttatttattcactttgcccacaga

SEQ ID NO: 90746 - DNA, 25 bp, Artificial
  Probe
actgttatttattcactttgcccac

SEQ ID NO: 90747 - DNA, 25 bp, Artificial
  Probe
cactgttatttattcactttgccca

SEQ ID NO: 90748 - DNA, 25 bp, Artificial
  Probe
tccactgttatttattcactttgcc

SEQ ID NO: 90749 - DNA, 25 bp, Artificial
  Probe
cgctccactgttatttattcacttt

SEQ ID NO: 90750 - DNA, 25 bp, Artificial
  Probe
tatttattcactttgcccacagaca

SEQ ID NO: 90751 - DNA, 25 bp, Artificial
  Probe
ccactgttatttattcactttgccc

SEQ ID NO: 90752 - DNA, 25 bp, Artificial
  Probe
ctctctctctctctctctctctaaa

SEQ ID NO: 90753 - DNA, 25 bp, Artificial
  Probe
aagcaatcttcaggaacagacaaca

SEQ ID NO: 90754 - DNA, 25 bp, Artificial
  Probe
ctctctctctctctctctaaatggc

SEQ ID NO: 90755 - DNA, 25 bp, Artificial
  Probe
ctctctctctctctctctctaaatg

SEQ ID NO: 90756 - DNA, 25 bp, Artificial
  Probe
cttgaggctgaagagactgatgatg

SEQ ID NO: 90757 - DNA, 25 bp, Artificial
  Probe
tctctctctctctctctctctaaat

SEQ ID NO: 90758 - DNA, 25 bp, Artificial
  Probe
ctccactgttatttattcactttgc

SEQ ID NO: 90759 - DNA, 25 bp, Artificial
  Probe
gctccactgttatttattcactttg

SEQ ID NO: 90760 - DNA, 25 bp, Artificial
  Probe
ccgctccactgttatttattcactt

SEQ ID NO: 90761 - DNA, 25 bp, Artificial
  Probe
aatcttcaggaacagacaacagtgg

SEQ ID NO: 90762 - DNA, 25 bp, Artificial
  Probe
tgttatttattcactttgcccacag

SEQ ID NO: 90763 - DNA, 25 bp, Artificial
  Probe
ctgttatttattcactttgcccaca

SEQ ID NO: 90764 - DNA, 25 bp, Artificial
  Probe
agcaatcttcaggaacagacaacag

SEQ ID NO: 90765 - DNA, 25 bp, Artificial
  Probe
atttattcactttgcccacagacac

SEQ ID NO: 90766 - DNA, 25 bp, Artificial
  Probe
gcaatcttcaggaacagacaacagt

SEQ ID NO: 90767 - DNA, 25 bp, Artificial
  Probe
gtttccaacttgtgtctcactaatg

SEQ ID NO: 90768 - DNA, 25 bp, Artificial
  Probe
cttagaagcaatcttcaggaacaga

SEQ ID NO: 90769 - DNA, 25 bp, Artificial
  Probe
tcttagaagcaatcttcaggaacag

SEQ ID NO: 90770 - DNA, 25 bp, Artificial
  Probe
ttagaagcaatcttcaggaacagac

SEQ ID NO: 90771 - DNA, 25 bp, Artificial
  Probe
gtcttagaagcaatcttcaggaaca

SEQ ID NO: 90772 - DNA, 25 bp, Artificial
  Probe
cgtttccaacttgtgtctcactaat

SEQ ID NO: 90773 - DNA, 25 bp, Artificial
  Probe
atcttcaggaacagacaacagtggt

SEQ ID NO: 90774 - DNA, 25 bp, Artificial
  Probe
ggtcttagaagcaatcttcaggaac

SEQ ID NO: 90775 - DNA, 25 bp, Artificial
  Probe
ttgaggctgaagagactgatgatgg

SEQ ID NO: 90776 - DNA, 25 bp, Artificial
  Probe
tttccaacttgtgtctcactaatgg

SEQ ID NO: 90777 - DNA, 25 bp, Artificial
  Probe
gtgcttgacatgggaaacttagatg

SEQ ID NO: 90778 - DNA, 25 bp, Artificial
  Probe
tagaagcaatcttcaggaacagaca

SEQ ID NO: 90779 - DNA, 25 bp, Artificial
  Probe
gctctcgttctctctctctctctct

SEQ ID NO: 90780 - DNA, 25 bp, Artificial
  Probe
tactgatgacatgtgtaggatgaag

SEQ ID NO: 90781 - DNA, 25 bp, Artificial
  Probe
aacttgtgtctcactaatgggtctg

SEQ ID NO: 90782 - DNA, 25 bp, Artificial
  Probe
acagttatctgatggttcctcaatt

SEQ ID NO: 90783 - DNA, 25 bp, Artificial
  Probe
tacagttatctgatggttcctcaat

SEQ ID NO: 90784 - DNA, 25 bp, Artificial
  Probe
atacagttatctgatggttcctcaa

SEQ ID NO: 90785 - DNA, 25 bp, Artificial
  Probe
aatacagttatctgatggttcctca

SEQ ID NO: 90786 - DNA, 25 bp, Artificial
  Probe
cagttatctgatggttcctcaatta

SEQ ID NO: 90787 - DNA, 25 bp, Artificial
  Probe
tctgatggttcctcaattatgttat

SEQ ID NO: 90788 - DNA, 25 bp, Artificial
  Probe
atctgatggttcctcaattatgtta

SEQ ID NO: 90789 - DNA, 25 bp, Artificial
  Probe
tatctgatggttcctcaattatgtt

SEQ ID NO: 90790 - DNA, 25 bp, Artificial
  Probe
ttatctgatggttcctcaattatgt

SEQ ID NO: 90791 - DNA, 25 bp, Artificial
  Probe
gttatctgatggttcctcaattatg

SEQ ID NO: 90792 - DNA, 25 bp, Artificial
  Probe
gccttaacttcatattgccttcttt

SEQ ID NO: 90793 - DNA, 25 bp, Artificial
  Probe
agttatctgatggttcctcaattat

SEQ ID NO: 90794 - DNA, 25 bp, Artificial
  Probe
gtaagaaagccaggaatacaggttt

SEQ ID NO: 90795 - DNA, 25 bp, Artificial
  Probe
ctgatggttcctcaattatgttatt

SEQ ID NO: 90796 - DNA, 25 bp, Artificial
  Probe
ttgtctgtaagaaagccaggaatac

SEQ ID NO: 90797 - DNA, 25 bp, Artificial
  Probe
tactacagaacttcactttgtggac

SEQ ID NO: 90798 - DNA, 25 bp, Artificial
  Probe
ttggtactacagaacttcactttgt

SEQ ID NO: 90799 - DNA, 25 bp, Artificial
  Probe
gtactacagaacttcactttgtgga

SEQ ID NO: 90800 - DNA, 25 bp, Artificial
  Probe
tggtactacagaacttcactttgtg

SEQ ID NO: 90801 - DNA, 25 bp, Artificial
  Probe
aaatacagttatctgatggttcctc

SEQ ID NO: 90802 - DNA, 25 bp, Artificial
  Probe
ctacagaacttcactttgtggacac

SEQ ID NO: 90803 - DNA, 25 bp, Artificial
  Probe
ggtactacagaacttcactttgtgg

SEQ ID NO: 90804 - DNA, 25 bp, Artificial
  Probe
actacagaacttcactttgtggaca

SEQ ID NO: 90805 - DNA, 25 bp, Artificial
  Probe
taagaaagccaggaatacaggtttt

SEQ ID NO: 90806 - DNA, 25 bp, Artificial
  Probe
tcatattgccttcttttctaccctt

SEQ ID NO: 90807 - DNA, 25 bp, Artificial
  Probe
ttcatattgccttcttttctaccct

SEQ ID NO: 90808 - DNA, 25 bp, Artificial
  Probe
catattgccttcttttctacccttc

SEQ ID NO: 90809 - DNA, 25 bp, Artificial
  Probe
cttcatattgccttcttttctaccc

SEQ ID NO: 90810 - DNA, 25 bp, Artificial
  Probe
atattgccttcttttctacccttcc

SEQ ID NO: 90811 - DNA, 25 bp, Artificial
  Probe
tgtctgtaagaaagccaggaataca

SEQ ID NO: 90812 - DNA, 25 bp, Artificial
  Probe
ccagccctatctctatagtcacatc

SEQ ID NO: 90813 - DNA, 25 bp, Artificial
  Probe
acttcatattgccttcttttctacc

SEQ ID NO: 90814 - DNA, 25 bp, Artificial
  Probe
tgtaagaaagccaggaatacaggtt

SEQ ID NO: 90815 - DNA, 25 bp, Artificial
  Probe
tattgccttcttttctacccttcct

SEQ ID NO: 90816 - DNA, 25 bp, Artificial
  Probe
tgatggttcctcaattatgttattt

SEQ ID NO: 90817 - DNA, 25 bp, Artificial
  Probe
tacagaacttcactttgtggacaca

SEQ ID NO: 90818 - DNA, 25 bp, Artificial
  Probe
cccagccctatctctatagtcacat

SEQ ID NO: 90819 - DNA, 25 bp, Artificial
  Probe
gtggacacaccttcctcttactgag

SEQ ID NO: 90820 - DNA, 25 bp, Artificial
  Probe
ccttaacttcatattgccttctttt

SEQ ID NO: 90821 - DNA, 25 bp, Artificial
  Probe
aacttcatattgccttcttttctac

SEQ ID NO: 90822 - DNA, 25 bp, Artificial
  Probe
tggacacaccttcctcttactgagt

SEQ ID NO: 90823 - DNA, 25 bp, Artificial
  Probe
attgccttcttttctacccttcctg

SEQ ID NO: 90824 - DNA, 25 bp, Artificial
  Probe
ttgtggacacaccttcctcttactg

SEQ ID NO: 90825 - DNA, 25 bp, Artificial
  Probe
aaaatacagttatctgatggttcct

SEQ ID NO: 90826 - DNA, 25 bp, Artificial
  Probe
ctttgtggacacaccttcctcttac

SEQ ID NO: 90827 - DNA, 25 bp, Artificial
  Probe
tttgaaacagggtgtgttaaaggaa

SEQ ID NO: 90828 - DNA, 25 bp, Artificial
  Probe
ttgaaacagggtgtgttaaaggaac

SEQ ID NO: 90829 - DNA, 25 bp, Artificial
  Probe
aaacagggtgtgttaaaggaaccta

SEQ ID NO: 90830 - DNA, 25 bp, Artificial
  Probe
aacagggtgtgttaaaggaacctac

SEQ ID NO: 90831 - DNA, 25 bp, Artificial
  Probe
acagggtgtgttaaaggaacctacc

SEQ ID NO: 90832 - DNA, 25 bp, Artificial
  Probe
gaaacagggtgtgttaaaggaacct

SEQ ID NO: 90833 - DNA, 25 bp, Artificial
  Probe
tgaaacagggtgtgttaaaggaacc

SEQ ID NO: 90834 - DNA, 25 bp, Artificial
  Probe
aatggagagataacagttgtgatgc

SEQ ID NO: 90835 - DNA, 25 bp, Artificial
  Probe
tctgattaaggagagtggtactaca

SEQ ID NO: 90836 - DNA, 25 bp, Artificial
  Probe
ggctactgtgtatctgtgacttcaa

SEQ ID NO: 90837 - DNA, 25 bp, Artificial
  Probe
tgattaaggagagtggtactacagc

SEQ ID NO: 90838 - DNA, 25 bp, Artificial
  Probe
ctgattaaggagagtggtactacag

SEQ ID NO: 90839 - DNA, 25 bp, Artificial
  Probe
atggagagataacagttgtgatgcc

SEQ ID NO: 90840 - DNA, 25 bp, Artificial
  Probe
tcaaactcaggatacaagaaatgga

SEQ ID NO: 90841 - DNA, 25 bp, Artificial
  Probe
tactgtgtatctgtgacttcaaact

SEQ ID NO: 90842 - DNA, 25 bp, Artificial
  Probe
gtggctactgtgtatctgtgacttc

SEQ ID NO: 90843 - DNA, 25 bp, Artificial
  Probe
agaaatggagagataacagttgtga

SEQ ID NO: 90844 - DNA, 25 bp, Artificial
  Probe
actgtgtatctgtgacttcaaactc

SEQ ID NO: 90845 - DNA, 25 bp, Artificial
  Probe
ctactgtgtatctgtgacttcaaac

SEQ ID NO: 90846 - DNA, 25 bp, Artificial
  Probe
tctccattattgtatgtaaccctgc

SEQ ID NO: 90847 - DNA, 25 bp, Artificial
  Probe
gattaaggagagtggtactacagct

SEQ ID NO: 90848 - DNA, 25 bp, Artificial
  Probe
gctactgtgtatctgtgacttcaaa

SEQ ID NO: 90849 - DNA, 25 bp, Artificial
  Probe
ggtatcctaacaattccaatcgtgg

SEQ ID NO: 90850 - DNA, 25 bp, Artificial
  Probe
aaatggagagataacagttgtgatg

SEQ ID NO: 90851 - DNA, 25 bp, Artificial
  Probe
ttcaaactcaggatacaagaaatgg

SEQ ID NO: 90852 - DNA, 25 bp, Artificial
  Probe
aagaaatggagagataacagttgtg

SEQ ID NO: 90853 - DNA, 25 bp, Artificial
  Probe
gacttcaaactcaggatacaagaaa

SEQ ID NO: 90854 - DNA, 25 bp, Artificial
  Probe
gaaatggagagataacagttgtgat

SEQ ID NO: 90855 - DNA, 25 bp, Artificial
  Probe
ataacagttgtgatgcccaattatc

SEQ ID NO: 90856 - DNA, 25 bp, Artificial
  Probe
gataacagttgtgatgcccaattat

SEQ ID NO: 90857 - DNA, 25 bp, Artificial
  Probe
tcaggatacaagaaatggagagata

SEQ ID NO: 90858 - DNA, 25 bp, Artificial
  Probe
agataacagttgtgatgcccaatta

SEQ ID NO: 90859 - DNA, 25 bp, Artificial
  Probe
tgacttcaaactcaggatacaagaa

SEQ ID NO: 90860 - DNA, 25 bp, Artificial
  Probe
tggctactgtgtatctgtgacttca

SEQ ID NO: 90861 - DNA, 25 bp, Artificial
  Probe
gtgacttcaaactcaggatacaaga

SEQ ID NO: 90862 - DNA, 25 bp, Artificial
  Probe
acaagaaatggagagataacagttg

SEQ ID NO: 90863 - DNA, 25 bp, Artificial
  Probe
ctgtgtatctgtgacttcaaactca

SEQ ID NO: 90864 - DNA, 25 bp, Artificial
  Probe
aactcaggatacaagaaatggagag

SEQ ID NO: 90865 - DNA, 25 bp, Artificial
  Probe
ctcaggatacaagaaatggagagat

SEQ ID NO: 90866 - DNA, 25 bp, Artificial
  Probe
aaactcaggatacaagaaatggaga

SEQ ID NO: 90867 - DNA, 25 bp, Artificial
  Probe
caaactcaggatacaagaaatggag

SEQ ID NO: 90868 - DNA, 25 bp, Artificial
  Probe
gggtatcctaacaattccaatcgtg

SEQ ID NO: 90869 - DNA, 25 bp, Artificial
  Probe
caagaaatggagagataacagttgt

SEQ ID NO: 90870 - DNA, 25 bp, Artificial
  Probe
ctaacaattccaatcgtggctactg

SEQ ID NO: 90871 - DNA, 25 bp, Artificial
  Probe
atcctaacaattccaatcgtggcta

SEQ ID NO: 90872 - DNA, 25 bp, Artificial
  Probe
tatcctaacaattccaatcgtggct

SEQ ID NO: 90873 - DNA, 25 bp, Artificial
  Probe
gtatcctaacaattccaatcgtggc

SEQ ID NO: 90874 - DNA, 25 bp, Artificial
  Probe
actcaggatacaagaaatggagaga

SEQ ID NO: 90875 - DNA, 25 bp, Artificial
  Probe
acttcaaactcaggatacaagaaat

SEQ ID NO: 90876 - DNA, 25 bp, Artificial
  Probe
ggatacaagaaatggagagataaca

SEQ ID NO: 90877 - DNA, 25 bp, Artificial
  Probe
caatcgtggctactgtgtatctgtg

SEQ ID NO: 90878 - DNA, 25 bp, Artificial
  Probe
ccctcttcctagacaaacattcttg

SEQ ID NO: 90879 - DNA, 25 bp, Artificial
  Probe
ccttactctgttgtctgttactgat

SEQ ID NO: 90880 - DNA, 25 bp, Artificial
  Probe
cttactctgttgtctgttactgatt

SEQ ID NO: 90881 - DNA, 25 bp, Artificial
  Probe
tttctgtatcccttactctgttgtc

SEQ ID NO: 90882 - DNA, 25 bp, Artificial
  Probe
tatcccttactctgttgtctgttac

SEQ ID NO: 90883 - DNA, 25 bp, Artificial
  Probe
gtatcccttactctgttgtctgtta

SEQ ID NO: 90884 - DNA, 25 bp, Artificial
  Probe
ttctgtatcccttactctgttgtct

SEQ ID NO: 90885 - DNA, 25 bp, Artificial
  Probe
atcccttactctgttgtctgttact

SEQ ID NO: 90886 - DNA, 25 bp, Artificial
  Probe
tgtatcccttactctgttgtctgtt

SEQ ID NO: 90887 - DNA, 25 bp, Artificial
  Probe
tctgtatcccttactctgttgtctg

SEQ ID NO: 90888 - DNA, 25 bp, Artificial
  Probe
ctgtatcccttactctgttgtctgt

SEQ ID NO: 90889 - DNA, 25 bp, Artificial
  Probe
cccttactctgttgtctgttactga

SEQ ID NO: 90890 - DNA, 25 bp, Artificial
  Probe
tcccttactctgttgtctgttactg

SEQ ID NO: 90891 - DNA, 25 bp, Artificial
  Probe
ttactctgttgtctgttactgattt

SEQ ID NO: 90892 - DNA, 25 bp, Artificial
  Probe
gacttaggaggaaggtgatgaggtc

SEQ ID NO: 90893 - DNA, 25 bp, Artificial
  Probe
ccttttctgtatcccttactctgtt

SEQ ID NO: 90894 - DNA, 25 bp, Artificial
  Probe
ctccttttctgtatcccttactctg

SEQ ID NO: 90895 - DNA, 25 bp, Artificial
  Probe
ttttctgtatcccttactctgttgt

SEQ ID NO: 90896 - DNA, 25 bp, Artificial
  Probe
tccttttctgtatcccttactctgt

SEQ ID NO: 90897 - DNA, 25 bp, Artificial
  Probe
ggtttagcaggttacggttcagttt

SEQ ID NO: 90898 - DNA, 25 bp, Artificial
  Probe
cttttctgtatcccttactctgttg

SEQ ID NO: 90899 - DNA, 25 bp, Artificial
  Probe
gctccttttctgtatcccttactct

SEQ ID NO: 90900 - DNA, 25 bp, Artificial
  Probe
ctgctccttttctgtatcccttact

SEQ ID NO: 90901 - DNA, 25 bp, Artificial
  Probe
tgctccttttctgtatcccttactc

SEQ ID NO: 90902 - DNA, 25 bp, Artificial
  Probe
tactctgttgtctgttactgatttt

SEQ ID NO: 90903 - DNA, 25 bp, Artificial
  Probe
tttagcaggttacggttcagttttg

SEQ ID NO: 90904 - DNA, 25 bp, Artificial
  Probe
gtttagcaggttacggttcagtttt

SEQ ID NO: 90905 - DNA, 25 bp, Artificial
  Probe
ggacttaggaggaaggtgatgaggt

SEQ ID NO: 90906 - DNA, 25 bp, Artificial
  Probe
cctgctccttttctgtatcccttac

SEQ ID NO: 90907 - DNA, 25 bp, Artificial
  Probe
tggtttagcaggttacggttcagtt

SEQ ID NO: 90908 - DNA, 25 bp, Artificial
  Probe
gttacggttcagttttgcttgtctc

SEQ ID NO: 90909 - DNA, 25 bp, Artificial
  Probe
acttaggaggaaggtgatgaggtcc

SEQ ID NO: 90910 - DNA, 25 bp, Artificial
  Probe
tttgctttctccaggctctctagat

SEQ ID NO: 90911 - DNA, 25 bp, Artificial
  Probe
gattgaggctggtttagcaggttac

SEQ ID NO: 90912 - DNA, 25 bp, Artificial
  Probe
agattgaggctggtttagcaggtta

SEQ ID NO: 90913 - DNA, 25 bp, Artificial
  Probe
ttacggttcagttttgcttgtctcc

SEQ ID NO: 90914 - DNA, 25 bp, Artificial
  Probe
caagagaaggggacttaggaggaag

SEQ ID NO: 90915 - DNA, 25 bp, Artificial
  Probe
ggtttgctttctccaggctctctag

SEQ ID NO: 90916 - DNA, 25 bp, Artificial
  Probe
cttgtgcctgctccttttctgtatc

SEQ ID NO: 90917 - DNA, 25 bp, Artificial
  Probe
ggttacggttcagttttgcttgtct

SEQ ID NO: 90918 - DNA, 25 bp, Artificial
  Probe
aggttacggttcagttttgcttgtc

SEQ ID NO: 90919 - DNA, 25 bp, Artificial
  Probe
ctggtttagcaggttacggttcagt

SEQ ID NO: 90920 - DNA, 25 bp, Artificial
  Probe
gcctgctccttttctgtatccctta

SEQ ID NO: 90921 - DNA, 25 bp, Artificial
  Probe
ttgctttctccaggctctctagatg

SEQ ID NO: 90922 - DNA, 25 bp, Artificial
  Probe
caggttacggttcagttttgcttgt

SEQ ID NO: 90923 - DNA, 25 bp, Artificial
  Probe
gtttgctttctccaggctctctaga

SEQ ID NO: 90924 - DNA, 25 bp, Artificial
  Probe
cttacctgcatcctgtagagtagac

SEQ ID NO: 90925 - DNA, 25 bp, Artificial
  Probe
tcttacctgcatcctgtagagtaga

SEQ ID NO: 90926 - DNA, 25 bp, Artificial
  Probe
ttacctgcatcctgtagagtagaca

SEQ ID NO: 90927 - DNA, 25 bp, Artificial
  Probe
cactctcttacctgcatcctgtaga

SEQ ID NO: 90928 - DNA, 25 bp, Artificial
  Probe
ctcttacctgcatcctgtagagtag

SEQ ID NO: 90929 - DNA, 25 bp, Artificial
  Probe
tctcttacctgcatcctgtagagta

SEQ ID NO: 90930 - DNA, 25 bp, Artificial
  Probe
ccactctcttacctgcatcctgtag

SEQ ID NO: 90931 - DNA, 25 bp, Artificial
  Probe
tagaccactctcttacctgcatcct

SEQ ID NO: 90932 - DNA, 25 bp, Artificial
  Probe
tagagtagacagcagtggaccctag

SEQ ID NO: 90933 - DNA, 25 bp, Artificial
  Probe
gtagagtagacagcagtggacccta

SEQ ID NO: 90934 - DNA, 25 bp, Artificial
  Probe
accactctcttacctgcatcctgta

SEQ ID NO: 90935 - DNA, 25 bp, Artificial
  Probe
ctctcttacctgcatcctgtagagt

SEQ ID NO: 90936 - DNA, 25 bp, Artificial
  Probe
actctcttacctgcatcctgtagag

SEQ ID NO: 90937 - DNA, 25 bp, Artificial
  Probe
taacaccttcccttaaatggaacct

SEQ ID NO: 90938 - DNA, 25 bp, Artificial
  Probe
tacctgcatcctgtagagtagacag

SEQ ID NO: 90939 - DNA, 25 bp, Artificial
  Probe
aacaccttcccttaaatggaacctc

SEQ ID NO: 90940 - DNA, 25 bp, Artificial
  Probe
atcctgtagagtagacagcagtgga

SEQ ID NO: 90941 - DNA, 25 bp, Artificial
  Probe
catcctgtagagtagacagcagtgg

SEQ ID NO: 90942 - DNA, 25 bp, Artificial
  Probe
caccttcccttaaatggaacctctg

SEQ ID NO: 90943 - DNA, 25 bp, Artificial
  Probe
acaccttcccttaaatggaacctct

SEQ ID NO: 90944 - DNA, 25 bp, Artificial
  Probe
gcatcctgtagagtagacagcagtg

SEQ ID NO: 90945 - DNA, 25 bp, Artificial
  Probe
tcctgtagagtagacagcagtggac

SEQ ID NO: 90946 - DNA, 25 bp, Artificial
  Probe
gtcatgattcaagctcagcagcaag

SEQ ID NO: 90947 - DNA, 25 bp, Artificial
  Probe
tgcatcctgtagagtagacagcagt

SEQ ID NO: 90948 - DNA, 25 bp, Artificial
  Probe
accttcccttaaatggaacctctgc

SEQ ID NO: 90949 - DNA, 25 bp, Artificial
  Probe
cttgtcatgattcaagctcagcagc

SEQ ID NO: 90950 - DNA, 25 bp, Artificial
  Probe
aaatcagcccatagtgtttatagac

SEQ ID NO: 90951 - DNA, 25 bp, Artificial
  Probe
ttgttacctcttcacctttgatgat

SEQ ID NO: 90952 - DNA, 25 bp, Artificial
  Probe
tcagcccatagtgtttatagacttg

SEQ ID NO: 90953 - DNA, 25 bp, Artificial
  Probe
tacctcttcacctttgatgatgtag

SEQ ID NO: 90954 - DNA, 25 bp, Artificial
  Probe
tttgttacctcttcacctttgatga

SEQ ID NO: 90955 - DNA, 25 bp, Artificial
  Probe
atagtgtttatagacttggtggcag

SEQ ID NO: 90956 - DNA, 25 bp, Artificial
  Probe
atttgttacctcttcacctttgatg

SEQ ID NO: 90957 - DNA, 25 bp, Artificial
  Probe
ttacctcttcacctttgatgatgta

SEQ ID NO: 90958 - DNA, 25 bp, Artificial
  Probe
catagtgtttatagacttggtggca

SEQ ID NO: 90959 - DNA, 25 bp, Artificial
  Probe
gttacctcttcacctttgatgatgt

SEQ ID NO: 90960 - DNA, 25 bp, Artificial
  Probe
tgttacctcttcacctttgatgatg

SEQ ID NO: 90961 - DNA, 25 bp, Artificial
  Probe
atcagcccatagtgtttatagactt

SEQ ID NO: 90962 - DNA, 25 bp, Artificial
  Probe
aatcagcccatagtgtttatagact

SEQ ID NO: 90963 - DNA, 25 bp, Artificial
  Probe
tttaggagtatggcagagaggaaac

SEQ ID NO: 90964 - DNA, 25 bp, Artificial
  Probe
tctaggtacagaaagattcacttgc

SEQ ID NO: 90965 - DNA, 25 bp, Artificial
  Probe
aatttgttacctcttcacctttgat

SEQ ID NO: 90966 - DNA, 25 bp, Artificial
  Probe
acctcttcacctttgatgatgtagt

SEQ ID NO: 90967 - DNA, 25 bp, Artificial
  Probe
taatttgttacctcttcacctttga

SEQ ID NO: 90968 - DNA, 25 bp, Artificial
  Probe
gaatgaggaagcactttggagaaac

SEQ ID NO: 90969 - DNA, 25 bp, Artificial
  Probe
atatttaaaccaatgcctctcaagc

SEQ ID NO: 90970 - DNA, 25 bp, Artificial
  Probe
ttaatttgttacctcttcacctttg

SEQ ID NO: 90971 - DNA, 25 bp, Artificial
  Probe
cctcttcacctttgatgatgtagtg

SEQ ID NO: 90972 - DNA, 25 bp, Artificial
  Probe
tatttaaaccaatgcctctcaagct

SEQ ID NO: 90973 - DNA, 25 bp, Artificial
  Probe
ttatacgaaccgctttccagtgtta

SEQ ID NO: 90974 - DNA, 25 bp, Artificial
  Probe
tatacgaaccgctttccagtgttaa

SEQ ID NO: 90975 - DNA, 25 bp, Artificial
  Probe
cccatagtgtttatagacttggtgg

SEQ ID NO: 90976 - DNA, 25 bp, Artificial
  Probe
ttaggagtatggcagagaggaaaca

SEQ ID NO: 90977 - DNA, 25 bp, Artificial
  Probe
cagcccatagtgtttatagacttgg

SEQ ID NO: 90978 - DNA, 25 bp, Artificial
  Probe
tcatatttaaaccaatgcctctcaa

SEQ ID NO: 90979 - DNA, 25 bp, Artificial
  Probe
ttcatatttaaaccaatgcctctca

SEQ ID NO: 90980 - DNA, 25 bp, Artificial
  Probe
ccatagtgtttatagacttggtggc

SEQ ID NO: 90981 - DNA, 25 bp, Artificial
  Probe
gcccatagtgtttatagacttggtg

SEQ ID NO: 90982 - DNA, 25 bp, Artificial
  Probe
agcccatagtgtttatagacttggt

SEQ ID NO: 90983 - DNA, 25 bp, Artificial
  Probe
gtacagaaagattcacttgcacaaa

SEQ ID NO: 90984 - DNA, 25 bp, Artificial
  Probe
tagtgtttatagacttggtggcagc

SEQ ID NO: 90985 - DNA, 25 bp, Artificial
  Probe
ctaggtacagaaagattcacttgca

SEQ ID NO: 90986 - DNA, 25 bp, Artificial
  Probe
catatttaaaccaatgcctctcaag

SEQ ID NO: 90987 - DNA, 25 bp, Artificial
  Probe
taggtacagaaagattcacttgcac

SEQ ID NO: 90988 - DNA, 25 bp, Artificial
  Probe
taggagtatggcagagaggaaacag

SEQ ID NO: 90989 - DNA, 25 bp, Artificial
  Probe
tttaatttgttacctcttcaccttt

SEQ ID NO: 90990 - DNA, 25 bp, Artificial
  Probe
atacgaaccgctttccagtgttaaa

SEQ ID NO: 90991 - DNA, 25 bp, Artificial
  Probe
tttatacgaaccgctttccagtgtt

SEQ ID NO: 90992 - DNA, 25 bp, Artificial
  Probe
atttaaaccaatgcctctcaagctg

SEQ ID NO: 90993 - DNA, 25 bp, Artificial
  Probe
ggtacagaaagattcacttgcacaa

SEQ ID NO: 90994 - DNA, 25 bp, Artificial
  Probe
attcatatttaaaccaatgcctctc

SEQ ID NO: 90995 - DNA, 25 bp, Artificial
  Probe
cctcttgttcttgtcattgttgtac

SEQ ID NO: 90996 - DNA, 25 bp, Artificial
  Probe
acatacagtggctacatttcatagt

SEQ ID NO: 90997 - DNA, 25 bp, Artificial
  Probe
tactgaactttgacctactttgtgg

SEQ ID NO: 90998 - DNA, 25 bp, Artificial
  Probe
ctgatctcagaataatgtgccttaa

SEQ ID NO: 90999 - DNA, 25 bp, Artificial
  Probe
atactgaactttgacctactttgtg

SEQ ID NO: 91000 - DNA, 25 bp, Artificial
  Probe
atacagtggctacatttcatagttg

SEQ ID NO: 91001 - DNA, 25 bp, Artificial
  Probe
catacagtggctacatttcatagtt

SEQ ID NO: 91002 - DNA, 25 bp, Artificial
  Probe
ccctcttgttcttgtcattgttgta

SEQ ID NO: 91003 - DNA, 25 bp, Artificial
  Probe
gatacatacagtggctacatttcat

SEQ ID NO: 91004 - DNA, 25 bp, Artificial
  Probe
acctaaatgatacatacagtggcta

SEQ ID NO: 91005 - DNA, 25 bp, Artificial
  Probe
tacctaaatgatacatacagtggct

SEQ ID NO: 91006 - DNA, 25 bp, Artificial
  Probe
tacagtggctacatttcatagttga

SEQ ID NO: 91007 - DNA, 25 bp, Artificial
  Probe
tgatacatacagtggctacatttca

SEQ ID NO: 91008 - DNA, 25 bp, Artificial
  Probe
cctaaatgatacatacagtggctac

SEQ ID NO: 91009 - DNA, 25 bp, Artificial
  Probe
atgatacatacagtggctacatttc

SEQ ID NO: 91010 - DNA, 25 bp, Artificial
  Probe
cccacttcctgtacctaaatgatac

SEQ ID NO: 91011 - DNA, 25 bp, Artificial
  Probe
aatactgaactttgacctactttgt

SEQ ID NO: 91012 - DNA, 25 bp, Artificial
  Probe
acagtggctacatttcatagttgag

SEQ ID NO: 91013 - DNA, 25 bp, Artificial
  Probe
tacatacagtggctacatttcatag

SEQ ID NO: 91014 - DNA, 25 bp, Artificial
  Probe
gtacctaaatgatacatacagtggc

SEQ ID NO: 91015 - DNA, 25 bp, Artificial
  Probe
ctaaatgatacatacagtggctaca

SEQ ID NO: 91016 - DNA, 25 bp, Artificial
  Probe
gtggctacatttcatagttgaggac

SEQ ID NO: 91017 - DNA, 25 bp, Artificial
  Probe
agtggctacatttcatagttgagga

SEQ ID NO: 91018 - DNA, 25 bp, Artificial
  Probe
cagtggctacatttcatagttgagg

SEQ ID NO: 91019 - DNA, 25 bp, Artificial
  Probe
ttgacaagaaagcctcattcacaaa

SEQ ID NO: 91020 - DNA, 25 bp, Artificial
  Probe
gttgtgaacataatcatagttgaac

SEQ ID NO: 91021 - DNA, 25 bp, Artificial
  Probe
tgatctcagaataatgtgccttaaa

SEQ ID NO: 91022 - DNA, 25 bp, Artificial
  Probe
aatttgtatttccgcttctgtattt

SEQ ID NO: 91023 - DNA, 25 bp, Artificial
  Probe
atacatacagtggctacatttcata

SEQ ID NO: 91024 - DNA, 25 bp, Artificial
  Probe
taaatgatacatacagtggctacat

SEQ ID NO: 91025 - DNA, 25 bp, Artificial
  Probe
gctacatttcatagttgaggaccct

SEQ ID NO: 91026 - DNA, 25 bp, Artificial
  Probe
ctgaactttgacctactttgtggta

SEQ ID NO: 91027 - DNA, 25 bp, Artificial
  Probe
tgtgaacataatcatagttgaactt

SEQ ID NO: 91028 - DNA, 25 bp, Artificial
  Probe
ttgtgaacataatcatagttgaact

SEQ ID NO: 91029 - DNA, 25 bp, Artificial
  Probe
accctcttgttcttgtcattgttgt

SEQ ID NO: 91030 - DNA, 25 bp, Artificial
  Probe
tggctacatttcatagttgaggacc

SEQ ID NO: 91031 - DNA, 25 bp, Artificial
  Probe
ctacatttcatagttgaggaccctc

SEQ ID NO: 91032 - DNA, 25 bp, Artificial
  Probe
atgtcctttgagtgtgtgaactaca

SEQ ID NO: 91033 - DNA, 25 bp, Artificial
  Probe
ctttgacctactttgtggtactaca

SEQ ID NO: 91034 - DNA, 25 bp, Artificial
  Probe
actttgacctactttgtggtactac

SEQ ID NO: 91035 - DNA, 25 bp, Artificial
  Probe
tacatttcatagttgaggaccctct

SEQ ID NO: 91036 - DNA, 25 bp, Artificial
  Probe
aactttgacctactttgtggtacta

SEQ ID NO: 91037 - DNA, 25 bp, Artificial
  Probe
gaactttgacctactttgtggtact

SEQ ID NO: 91038 - DNA, 25 bp, Artificial
  Probe
catgtcctttgagtgtgtgaactac

SEQ ID NO: 91039 - DNA, 25 bp, Artificial
  Probe
tgaactttgacctactttgtggtac

SEQ ID NO: 91040 - DNA, 25 bp, Artificial
  Probe
ttcatgtgtaattggtcatactgtg

SEQ ID NO: 91041 - DNA, 25 bp, Artificial
  Probe
tcatgtgtaattggtcatactgtgg

SEQ ID NO: 91042 - DNA, 25 bp, Artificial
  Probe
attcatgtgtaattggtcatactgt

SEQ ID NO: 91043 - DNA, 25 bp, Artificial
  Probe
cattcatgtgtaattggtcatactg

SEQ ID NO: 91044 - DNA, 25 bp, Artificial
  Probe
gccattcatgtgtaattggtcatac

SEQ ID NO: 91045 - DNA, 25 bp, Artificial
  Probe
cttcagcccttattaccaccaatat

SEQ ID NO: 91046 - DNA, 25 bp, Artificial
  Probe
aacgtacacatacaggagagaagaa

SEQ ID NO: 91047 - DNA, 25 bp, Artificial
  Probe
ttcagcccttattaccaccaatatg

SEQ ID NO: 91048 - DNA, 25 bp, Artificial
  Probe
ccattcatgtgtaattggtcatact

SEQ ID NO: 91049 - DNA, 25 bp, Artificial
  Probe
gtgtaattggtcatactgtgggaag

SEQ ID NO: 91050 - DNA, 25 bp, Artificial
  Probe
cgtacacatacaggagagaagaaat

SEQ ID NO: 91051 - DNA, 25 bp, Artificial
  Probe
cgatcatctgtcaaagcatatcaag

SEQ ID NO: 91052 - DNA, 25 bp, Artificial
  Probe
aagaaacagcacatttgtcatatcc

SEQ ID NO: 91053 - DNA, 25 bp, Artificial
  Probe
aaacagcacatttgtcatatccaag

SEQ ID NO: 91054 - DNA, 25 bp, Artificial
  Probe
gaaacagcacatttgtcatatccaa

SEQ ID NO: 91055 - DNA, 25 bp, Artificial
  Probe
cagtccattaatatcagtggcaatg

SEQ ID NO: 91056 - DNA, 25 bp, Artificial
  Probe
tgtgtaattggtcatactgtgggaa

SEQ ID NO: 91057 - DNA, 25 bp, Artificial
  Probe
gcagtccattaatatcagtggcaat

SEQ ID NO: 91058 - DNA, 25 bp, Artificial
  Probe
atgtgtaattggtcatactgtggga

SEQ ID NO: 91059 - DNA, 25 bp, Artificial
  Probe
ttaatatcagtggcaatggtttctg

SEQ ID NO: 91060 - DNA, 25 bp, Artificial
  Probe
gatcatctgtcaaagcatatcaaga

SEQ ID NO: 91061 - DNA, 25 bp, Artificial
  Probe
agaaacagcacatttgtcatatcca

SEQ ID NO: 91062 - DNA, 25 bp, Artificial
  Probe
atcatctgtcaaagcatatcaagac

SEQ ID NO: 91063 - DNA, 25 bp, Artificial
  Probe
gtggcaatggtttctgagattagac

SEQ ID NO: 91064 - DNA, 25 bp, Artificial
  Probe
agtggcaatggtttctgagattaga

SEQ ID NO: 91065 - DNA, 25 bp, Artificial
  Probe
tcatctgtcaaagcatatcaagacc

SEQ ID NO: 91066 - DNA, 25 bp, Artificial
  Probe
ccttcagcccttattaccaccaata

SEQ ID NO: 91067 - DNA, 25 bp, Artificial
  Probe
aaagaaacagcacatttgtcatatc

SEQ ID NO: 91068 - DNA, 25 bp, Artificial
  Probe
gtacacatacaggagagaagaaatt

SEQ ID NO: 91069 - DNA, 25 bp, Artificial
  Probe
gttcggatgagcttcagagacataa

SEQ ID NO: 91070 - DNA, 25 bp, Artificial
  Probe
gcgatcatctgtcaaagcatatcaa

SEQ ID NO: 91071 - DNA, 25 bp, Artificial
  Probe
attaatatcagtggcaatggtttct

SEQ ID NO: 91072 - DNA, 25 bp, Artificial
  Probe
gagcgatcatctgtcaaagcatatc

SEQ ID NO: 91073 - DNA, 25 bp, Artificial
  Probe
catgtgtaattggtcatactgtggg

SEQ ID NO: 91074 - DNA, 25 bp, Artificial
  Probe
agcacatttgtcatatccaaggatg

SEQ ID NO: 91075 - DNA, 25 bp, Artificial
  Probe
cagcacatttgtcatatccaaggat

SEQ ID NO: 91076 - DNA, 25 bp, Artificial
  Probe
aacagcacatttgtcatatccaagg

SEQ ID NO: 91077 - DNA, 25 bp, Artificial
  Probe
catctgtcaaagcatatcaagaccc

SEQ ID NO: 91078 - DNA, 25 bp, Artificial
  Probe
cacatacaggagagaagaaatttgc

SEQ ID NO: 91079 - DNA, 25 bp, Artificial
  Probe
tatccaaggatgcggcaaagtatat

SEQ ID NO: 91080 - DNA, 25 bp, Artificial
  Probe
atatccaaggatgcggcaaagtata

SEQ ID NO: 91081 - DNA, 25 bp, Artificial
  Probe
taaacgtacacatacaggagagaag

SEQ ID NO: 91082 - DNA, 25 bp, Artificial
  Probe
cataaacgtacacatacaggagaga

SEQ ID NO: 91083 - DNA, 25 bp, Artificial
  Probe
acataaacgtacacatacaggagag

SEQ ID NO: 91084 - DNA, 25 bp, Artificial
  Probe
gacataaacgtacacatacaggaga

SEQ ID NO: 91085 - DNA, 25 bp, Artificial
  Probe
ctgttccattactcttcactcttct

SEQ ID NO: 91086 - DNA, 25 bp, Artificial
  Probe
tctgttccattactcttcactcttc

SEQ ID NO: 91087 - DNA, 25 bp, Artificial
  Probe
gttccattactcttcactcttctgt

SEQ ID NO: 91088 - DNA, 25 bp, Artificial
  Probe
tgttccattactcttcactcttctg

SEQ ID NO: 91089 - DNA, 25 bp, Artificial
  Probe
ttctgttccattactcttcactctt

SEQ ID NO: 91090 - DNA, 25 bp, Artificial
  Probe
ttccattggtcctcttatcacactt

SEQ ID NO: 91091 - DNA, 25 bp, Artificial
  Probe
ctggtcctacttggtcctaagaatc

SEQ ID NO: 91092 - DNA, 25 bp, Artificial
  Probe
ttccattactcttcactcttctgtg

SEQ ID NO: 91093 - DNA, 25 bp, Artificial
  Probe
ccattactcttcactcttctgtgtt

SEQ ID NO: 91094 - DNA, 25 bp, Artificial
  Probe
actggtcctacttggtcctaagaat

SEQ ID NO: 91095 - DNA, 25 bp, Artificial
  Probe
tccattactcttcactcttctgtgt

SEQ ID NO: 91096 - DNA, 25 bp, Artificial
  Probe
taagactggtcctacttggtcctaa

SEQ ID NO: 91097 - DNA, 25 bp, Artificial
  Probe
ttcctttctgttccattactcttca

SEQ ID NO: 91098 - DNA, 25 bp, Artificial
  Probe
ggtttcttcctttctgttccattac

SEQ ID NO: 91099 - DNA, 25 bp, Artificial
  Probe
ctagtcactgccaatatgtgtatgg

SEQ ID NO: 91100 - DNA, 25 bp, Artificial
  Probe
tttctgttccattactcttcactct

SEQ ID NO: 91101 - DNA, 25 bp, Artificial
  Probe
cctttctgttccattactcttcact

SEQ ID NO: 91102 - DNA, 25 bp, Artificial
  Probe
tcctttctgttccattactcttcac

SEQ ID NO: 91103 - DNA, 25 bp, Artificial
  Probe
tcttcctttctgttccattactctt

SEQ ID NO: 91104 - DNA, 25 bp, Artificial
  Probe
ttcttcctttctgttccattactct

SEQ ID NO: 91105 - DNA, 25 bp, Artificial
  Probe
ctttctgttccattactcttcactc

SEQ ID NO: 91106 - DNA, 25 bp, Artificial
  Probe
cttcctttctgttccattactcttc

SEQ ID NO: 91107 - DNA, 25 bp, Artificial
  Probe
gtttcttcctttctgttccattact

SEQ ID NO: 91108 - DNA, 25 bp, Artificial
  Probe
tttcttcctttctgttccattactc

SEQ ID NO: 91109 - DNA, 25 bp, Artificial
  Probe
ctaagactggtcctacttggtccta

SEQ ID NO: 91110 - DNA, 25 bp, Artificial
  Probe
tagtttccattggtcctcttatcac

SEQ ID NO: 91111 - DNA, 25 bp, Artificial
  Probe
cggtttcttcctttctgttccatta

SEQ ID NO: 91112 - DNA, 25 bp, Artificial
  Probe
tggtcctacttggtcctaagaatcc

SEQ ID NO: 91113 - DNA, 25 bp, Artificial
  Probe
ctctagtctagtttgcttcccttac

SEQ ID NO: 91114 - DNA, 25 bp, Artificial
  Probe
ttagtttccattggtcctcttatca

SEQ ID NO: 91115 - DNA, 25 bp, Artificial
  Probe
agttagtttccattggtcctcttat

SEQ ID NO: 91116 - DNA, 25 bp, Artificial
  Probe
gttagtttccattggtcctcttatc

SEQ ID NO: 91117 - DNA, 25 bp, Artificial
  Probe
gttatgatgggaccaataattctgc

SEQ ID NO: 91118 - DNA, 25 bp, Artificial
  Probe
agtgtgttatgatgggaccaataat

SEQ ID NO: 91119 - DNA, 25 bp, Artificial
  Probe
cctctagtctagtttgcttccctta

SEQ ID NO: 91120 - DNA, 25 bp, Artificial
  Probe
gtgtgttatgatgggaccaataatt

SEQ ID NO: 91121 - DNA, 25 bp, Artificial
  Probe
cagtgtgttatgatgggaccaataa

SEQ ID NO: 91122 - DNA, 25 bp, Artificial
  Probe
tctagtctagtttgcttcccttacc

SEQ ID NO: 91123 - DNA, 25 bp, Artificial
  Probe
ttatgatgggaccaataattctgcc

SEQ ID NO: 91124 - DNA, 25 bp, Artificial
  Probe
tgtgttatgatgggaccaataattc

SEQ ID NO: 91125 - DNA, 25 bp, Artificial
  Probe
gagttagtttccattggtcctctta

SEQ ID NO: 91126 - DNA, 25 bp, Artificial
  Probe
tgttatgatgggaccaataattctg

SEQ ID NO: 91127 - DNA, 25 bp, Artificial
  Probe
gtgttatgatgggaccaataattct

SEQ ID NO: 91128 - DNA, 25 bp, Artificial
  Probe
tccattggtcctcttatcacacttt

SEQ ID NO: 91129 - DNA, 25 bp, Artificial
  Probe
tttccattggtcctcttatcacact

SEQ ID NO: 91130 - DNA, 25 bp, Artificial
  Probe
aagagacagctagatcatcagaaga

SEQ ID NO: 91131 - DNA, 25 bp, Artificial
  Probe
caagagacagctagatcatcagaag

SEQ ID NO: 91132 - DNA, 25 bp, Artificial
  Probe
tcaagagacagctagatcatcagaa

SEQ ID NO: 91133 - DNA, 25 bp, Artificial
  Probe
agagacagctagatcatcagaagac

SEQ ID NO: 91134 - DNA, 25 bp, Artificial
  Probe
ctcaagagacagctagatcatcaga

SEQ ID NO: 91135 - DNA, 25 bp, Artificial
  Probe
cagctagatcatcagaagacagagt

SEQ ID NO: 91136 - DNA, 25 bp, Artificial
  Probe
acagctagatcatcagaagacagag

SEQ ID NO: 91137 - DNA, 25 bp, Artificial
  Probe
gacagctagatcatcagaagacaga

SEQ ID NO: 91138 - DNA, 25 bp, Artificial
  Probe
agacagctagatcatcagaagacag

SEQ ID NO: 91139 - DNA, 25 bp, Artificial
  Probe
gagacagctagatcatcagaagaca

SEQ ID NO: 91140 - DNA, 25 bp, Artificial
  Probe
cgaggaagagcaaatatgagaaatt

SEQ ID NO: 91141 - DNA, 25 bp, Artificial
  Probe
ccgaggaagagcaaatatgagaaat

SEQ ID NO: 91142 - DNA, 25 bp, Artificial
  Probe
aagtattgtggtttggattgtgaac

SEQ ID NO: 91143 - DNA, 25 bp, Artificial
  Probe
caagtattgtggtttggattgtgaa

SEQ ID NO: 91144 - DNA, 25 bp, Artificial
  Probe
cctcaagagacagctagatcatcag

SEQ ID NO: 91145 - DNA, 25 bp, Artificial
  Probe
agctagatcatcagaagacagagtc

SEQ ID NO: 91146 - DNA, 25 bp, Artificial
  Probe
agtattgtggtttggattgtgaaca

SEQ ID NO: 91147 - DNA, 25 bp, Artificial
  Probe
gaggaagagcaaatatgagaaattc

SEQ ID NO: 91148 - DNA, 25 bp, Artificial
  Probe
atggttaggagctatgaggtgagtt

SEQ ID NO: 91149 - DNA, 25 bp, Artificial
  Probe
cccgaggaagagcaaatatgagaaa

SEQ ID NO: 91150 - DNA, 25 bp, Artificial
  Probe
catatgaagagatgtgtggtggtct

SEQ ID NO: 91151 - DNA, 25 bp, Artificial
  Probe
catggttaggagctatgaggtgagt

SEQ ID NO: 91152 - DNA, 25 bp, Artificial
  Probe
agaagaggaaacccattctgtaatg

SEQ ID NO: 91153 - DNA, 25 bp, Artificial
  Probe
aagagcaaatatgagaaattcccct

SEQ ID NO: 91154 - DNA, 25 bp, Artificial
  Probe
atatgaagagatgtgtggtggtctc

SEQ ID NO: 91155 - DNA, 25 bp, Artificial
  Probe
gaagagcaaatatgagaaattcccc

SEQ ID NO: 91156 - DNA, 25 bp, Artificial
  Probe
agagcaaatatgagaaattcccctc

SEQ ID NO: 91157 - DNA, 25 bp, Artificial
  Probe
tccctcaagagacagctagatcatc

SEQ ID NO: 91158 - DNA, 25 bp, Artificial
  Probe
tggttaggagctatgaggtgagttt

SEQ ID NO: 91159 - DNA, 25 bp, Artificial
  Probe
gcatatgaagagatgtgtggtggtc

SEQ ID NO: 91160 - DNA, 25 bp, Artificial
  Probe
tattgtggtttggattgtgaacaaa

SEQ ID NO: 91161 - DNA, 25 bp, Artificial
  Probe
ccctcaagagacagctagatcatca

SEQ ID NO: 91162 - DNA, 25 bp, Artificial
  Probe
gtattgtggtttggattgtgaacaa

SEQ ID NO: 91163 - DNA, 25 bp, Artificial
  Probe
gagcaaatatgagaaattcccctcc

SEQ ID NO: 91164 - DNA, 25 bp, Artificial
  Probe
ctccctcaagagacagctagatcat

SEQ ID NO: 91165 - DNA, 25 bp, Artificial
  Probe
gctatgaggtgagttttgctaaaag

SEQ ID NO: 91166 - DNA, 25 bp, Artificial
  Probe
tatgaagagatgtgtggtggtctca

SEQ ID NO: 91167 - DNA, 25 bp, Artificial
  Probe
gttaggagctatgaggtgagttttg

SEQ ID NO: 91168 - DNA, 25 bp, Artificial
  Probe
gactccctcaagagacagctagatc

SEQ ID NO: 91169 - DNA, 25 bp, Artificial
  Probe
ggaagagcaaatatgagaaattccc

SEQ ID NO: 91170 - DNA, 25 bp, Artificial
  Probe
atgtgtggtggtctcagaagaggaa

SEQ ID NO: 91171 - DNA, 25 bp, Artificial
  Probe
agcaaatatgagaaattcccctccc

SEQ ID NO: 91172 - DNA, 25 bp, Artificial
  Probe
aggaagagcaaatatgagaaattcc

SEQ ID NO: 91173 - DNA, 25 bp, Artificial
  Probe
ggttaggagctatgaggtgagtttt

SEQ ID NO: 91174 - DNA, 25 bp, Artificial
  Probe
ttggattgtgaacaaaatgtccctt

SEQ ID NO: 91175 - DNA, 25 bp, Artificial
  Probe
ttatgctaaccacaccatctctatt

SEQ ID NO: 91176 - DNA, 25 bp, Artificial
  Probe
tatgctaaccacaccatctctatta

SEQ ID NO: 91177 - DNA, 25 bp, Artificial
  Probe
atgctaaccacaccatctctattag

SEQ ID NO: 91178 - DNA, 25 bp, Artificial
  Probe
ctaaccacaccatctctattaggat

SEQ ID NO: 91179 - DNA, 25 bp, Artificial
  Probe
gctaaccacaccatctctattagga

SEQ ID NO: 91180 - DNA, 25 bp, Artificial
  Probe
tgctaaccacaccatctctattagg

SEQ ID NO: 91181 - DNA, 25 bp, Artificial
  Probe
ggtaaacacttctatctctctcagg

SEQ ID NO: 91182 - DNA, 25 bp, Artificial
  Probe
gggtaaacacttctatctctctcag

SEQ ID NO: 91183 - DNA, 25 bp, Artificial
  Probe
tgggtaaacacttctatctctctca

SEQ ID NO: 91184 - DNA, 25 bp, Artificial
  Probe
gtaaacacttctatctctctcaggc

SEQ ID NO: 91185 - DNA, 25 bp, Artificial
  Probe
ttgggtaaacacttctatctctctc

SEQ ID NO: 91186 - DNA, 25 bp, Artificial
  Probe
taaacacttctatctctctcaggca

SEQ ID NO: 91187 - DNA, 25 bp, Artificial
  Probe
aacacttctatctctctcaggcaca

SEQ ID NO: 91188 - DNA, 25 bp, Artificial
  Probe
tttgggtaaacacttctatctctct

SEQ ID NO: 91189 - DNA, 25 bp, Artificial
  Probe
tttatgctaaccacaccatctctat

SEQ ID NO: 91190 - DNA, 25 bp, Artificial
  Probe
atttatgctaaccacaccatctcta

SEQ ID NO: 91191 - DNA, 25 bp, Artificial
  Probe
tatttatgctaaccacaccatctct

SEQ ID NO: 91192 - DNA, 25 bp, Artificial
  Probe
atatttatgctaaccacaccatctc

SEQ ID NO: 91193 - DNA, 25 bp, Artificial
  Probe
acacttctatctctctcaggcacag

SEQ ID NO: 91194 - DNA, 25 bp, Artificial
  Probe
aaacacttctatctctctcaggcac

SEQ ID NO: 91195 - DNA, 25 bp, Artificial
  Probe
cacttctatctctctcaggcacagt

SEQ ID NO: 91196 - DNA, 25 bp, Artificial
  Probe
acttctatctctctcaggcacagtg

SEQ ID NO: 91197 - DNA, 25 bp, Artificial
  Probe
accatctctattaggatgagtgtga

SEQ ID NO: 91198 - DNA, 25 bp, Artificial
  Probe
caccatctctattaggatgagtgtg

SEQ ID NO: 91199 - DNA, 25 bp, Artificial
  Probe
cacaccatctctattaggatgagtg

SEQ ID NO: 91200 - DNA, 25 bp, Artificial
  Probe
taaccacaccatctctattaggatg

SEQ ID NO: 91201 - DNA, 25 bp, Artificial
  Probe
aaccacaccatctctattaggatga

SEQ ID NO: 91202 - DNA, 25 bp, Artificial
  Probe
ccatctctattaggatgagtgtgat

SEQ ID NO: 91203 - DNA, 25 bp, Artificial
  Probe
ccacaccatctctattaggatgagt

SEQ ID NO: 91204 - DNA, 25 bp, Artificial
  Probe
accacaccatctctattaggatgag

SEQ ID NO: 91205 - DNA, 25 bp, Artificial
  Probe
aatatttatgctaaccacaccatct

SEQ ID NO: 91206 - DNA, 25 bp, Artificial
  Probe
tattaggatgagtgtgatcaagctg

SEQ ID NO: 91207 - DNA, 25 bp, Artificial
  Probe
ctattaggatgagtgtgatcaagct

SEQ ID NO: 91208 - DNA, 25 bp, Artificial
  Probe
tctattaggatgagtgtgatcaagc

SEQ ID NO: 91209 - DNA, 25 bp, Artificial
  Probe
catctctattaggatgagtgtgatc

SEQ ID NO: 91210 - DNA, 25 bp, Artificial
  Probe
acacacacatacctccacacacatt

SEQ ID NO: 91211 - DNA, 25 bp, Artificial
  Probe
gtttgggtaaacacttctatctctc

SEQ ID NO: 91212 - DNA, 25 bp, Artificial
  Probe
cacacacatacctccacacacattt

SEQ ID NO: 91213 - DNA, 25 bp, Artificial
  Probe
tctctattaggatgagtgtgatcaa

SEQ ID NO: 91214 - DNA, 25 bp, Artificial
  Probe
attaggatgagtgtgatcaagctgt

SEQ ID NO: 91215 - DNA, 25 bp, Artificial
  Probe
ctctattaggatgagtgtgatcaag

SEQ ID NO: 91216 - DNA, 25 bp, Artificial
  Probe
atctctattaggatgagtgtgatca

SEQ ID NO: 91217 - DNA, 25 bp, Artificial
  Probe
ttaggatgagtgtgatcaagctgtt

SEQ ID NO: 91218 - DNA, 25 bp, Artificial
  Probe
taatatttatgctaaccacaccatc

SEQ ID NO: 91219 - DNA, 25 bp, Artificial
  Probe
acaccatctctattaggatgagtgt

SEQ ID NO: 91220 - DNA, 25 bp, Artificial
  Probe
ctgacttctgtatatgatgcactga

SEQ ID NO: 91221 - DNA, 25 bp, Artificial
  Probe
tctgacttctgtatatgatgcactg

SEQ ID NO: 91222 - DNA, 25 bp, Artificial
  Probe
ttctgacttctgtatatgatgcact

SEQ ID NO: 91223 - DNA, 25 bp, Artificial
  Probe
gatactgttgtgtattgtaccttgt

SEQ ID NO: 91224 - DNA, 25 bp, Artificial
  Probe
tgaggaatataagatactgttgtgt

SEQ ID NO: 91225 - DNA, 25 bp, Artificial
  Probe
tctgtatatgatgcactgaaggtta

SEQ ID NO: 91226 - DNA, 25 bp, Artificial
  Probe
ttctgtatatgatgcactgaaggtt

SEQ ID NO: 91227 - DNA, 25 bp, Artificial
  Probe
tgacttctgtatatgatgcactgaa

SEQ ID NO: 91228 - DNA, 25 bp, Artificial
  Probe
ccctctccatagtgtgataagttta

SEQ ID NO: 91229 - DNA, 25 bp, Artificial
  Probe
ttgtttggaaggatgaaggaatgaa

SEQ ID NO: 91230 - DNA, 25 bp, Artificial
  Probe
agatactgttgtgtattgtaccttg

SEQ ID NO: 91231 - DNA, 25 bp, Artificial
  Probe
gtgaggaatataagatactgttgtg

SEQ ID NO: 91232 - DNA, 25 bp, Artificial
  Probe
atactgttgtgtattgtaccttgtt

SEQ ID NO: 91233 - DNA, 25 bp, Artificial
  Probe
ctgtatatgatgcactgaaggttaa

SEQ ID NO: 91234 - DNA, 25 bp, Artificial
  Probe
gtgaatagtaaggttacctctctca

SEQ ID NO: 91235 - DNA, 25 bp, Artificial
  Probe
cttgtttggaaggatgaaggaatga

SEQ ID NO: 91236 - DNA, 25 bp, Artificial
  Probe
tctttctgacttctgtatatgatgc

SEQ ID NO: 91237 - DNA, 25 bp, Artificial
  Probe
gttgtgtattgtaccttgtttggaa

SEQ ID NO: 91238 - DNA, 25 bp, Artificial
  Probe
actgttgtgtattgtaccttgtttg

SEQ ID NO: 91239 - DNA, 25 bp, Artificial
  Probe
tgatgcactgaaggttaatatgtaa

SEQ ID NO: 91240 - DNA, 25 bp, Artificial
  Probe
tggtgaatagtaaggttacctctct

SEQ ID NO: 91241 - DNA, 25 bp, Artificial
  Probe
ggtgaatagtaaggttacctctctc

SEQ ID NO: 91242 - DNA, 25 bp, Artificial
  Probe
ctgttgtgtattgtaccttgtttgg

SEQ ID NO: 91243 - DNA, 25 bp, Artificial
  Probe
catggtgaatagtaaggttacctct

SEQ ID NO: 91244 - DNA, 25 bp, Artificial
  Probe
aagatactgttgtgtattgtacctt

SEQ ID NO: 91245 - DNA, 25 bp, Artificial
  Probe
tgtttggaaggatgaaggaatgaac

SEQ ID NO: 91246 - DNA, 25 bp, Artificial
  Probe
tattccctgaagccattgatctatc

SEQ ID NO: 91247 - DNA, 25 bp, Artificial
  Probe
atggtgaatagtaaggttacctctc

SEQ ID NO: 91248 - DNA, 25 bp, Artificial
  Probe
ttgtgtattgtaccttgtttggaag

SEQ ID NO: 91249 - DNA, 25 bp, Artificial
  Probe
tgttgtgtattgtaccttgtttgga

SEQ ID NO: 91250 - DNA, 25 bp, Artificial
  Probe
gtattccctgaagccattgatctat

SEQ ID NO: 91251 - DNA, 25 bp, Artificial
  Probe
atgatgcactgaaggttaatatgta

SEQ ID NO: 91252 - DNA, 25 bp, Artificial
  Probe
tatgatgcactgaaggttaatatgt

SEQ ID NO: 91253 - DNA, 25 bp, Artificial
  Probe
tgtatatgatgcactgaaggttaat

SEQ ID NO: 91254 - DNA, 25 bp, Artificial
  Probe
agtgaggaatataagatactgttgt

SEQ ID NO: 91255 - DNA, 25 bp, Artificial
  Probe
tgaatagtaaggttacctctctcaa

SEQ ID NO: 91256 - DNA, 25 bp, Artificial
  Probe
tactgttgtgtattgtaccttgttt

SEQ ID NO: 91257 - DNA, 25 bp, Artificial
  Probe
tgtattccctgaagccattgatcta

SEQ ID NO: 91258 - DNA, 25 bp, Artificial
  Probe
attccctgaagccattgatctatct

SEQ ID NO: 91259 - DNA, 25 bp, Artificial
  Probe
gaactcatctttctgacttctgtat

SEQ ID NO: 91260 - DNA, 25 bp, Artificial
  Probe
gtttggaaggatgaaggaatgaacc

SEQ ID NO: 91261 - DNA, 25 bp, Artificial
  Probe
cctctccatagtgtgataagtttat

SEQ ID NO: 91262 - DNA, 25 bp, Artificial
  Probe
atgtattccctgaagccattgatct

SEQ ID NO: 91263 - DNA, 25 bp, Artificial
  Probe
taagatactgttgtgtattgtacct

SEQ ID NO: 91264 - DNA, 25 bp, Artificial
  Probe
ttccctgaagccattgatctatctc

SEQ ID NO: 91265 - DNA, 25 bp, Artificial
  Probe
gtagagagagagagagagagagaga

SEQ ID NO: 91266 - DNA, 25 bp, Artificial
  Probe
aagagagagagagaggtagagagag

SEQ ID NO: 91267 - DNA, 25 bp, Artificial
  Probe
ggtagagagagagagagagagagag

SEQ ID NO: 91268 - DNA, 25 bp, Artificial
  Probe
gaggtagagagagagagagagagag

SEQ ID NO: 91269 - DNA, 25 bp, Artificial
  Probe
gagaggtagagagagagagagagag

SEQ ID NO: 91270 - DNA, 25 bp, Artificial
  Probe
gagagaggtagagagagagagagag

SEQ ID NO: 91271 - DNA, 25 bp, Artificial
  Probe
gagagagaggtagagagagagagag

SEQ ID NO: 91272 - DNA, 25 bp, Artificial
  Probe
gagagagagaggtagagagagagag

SEQ ID NO: 91273 - DNA, 25 bp, Artificial
  Probe
gagagagagagaggtagagagagag

SEQ ID NO: 91274 - DNA, 25 bp, Artificial
  Probe
aggtagagagagagagagagagaga

SEQ ID NO: 91275 - DNA, 25 bp, Artificial
  Probe
agaggtagagagagagagagagaga

SEQ ID NO: 91276 - DNA, 25 bp, Artificial
  Probe
agagaggtagagagagagagagaga

SEQ ID NO: 91277 - DNA, 25 bp, Artificial
  Probe
agagagaggtagagagagagagaga

SEQ ID NO: 91278 - DNA, 25 bp, Artificial
  Probe
agagagagaggtagagagagagaga

SEQ ID NO: 91279 - DNA, 25 bp, Artificial
  Probe
agagagagagaggtagagagagaga

SEQ ID NO: 91280 - DNA, 25 bp, Artificial
  Probe
agagagagagagaggtagagagaga

SEQ ID NO: 91281 - DNA, 25 bp, Artificial
  Probe
ggtcatattcagtattcatgccttg

SEQ ID NO: 91282 - DNA, 25 bp, Artificial
  Probe
tggtcatattcagtattcatgcctt

SEQ ID NO: 91283 - DNA, 25 bp, Artificial
  Probe
gtcatattcagtattcatgccttga

SEQ ID NO: 91284 - DNA, 25 bp, Artificial
  Probe
cttgaactgaactcttgctcctaga

SEQ ID NO: 91285 - DNA, 25 bp, Artificial
  Probe
cacttctggtcatattcagtattca

SEQ ID NO: 91286 - DNA, 25 bp, Artificial
  Probe
ctggtcatattcagtattcatgcct

SEQ ID NO: 91287 - DNA, 25 bp, Artificial
  Probe
tctggtcatattcagtattcatgcc

SEQ ID NO: 91288 - DNA, 25 bp, Artificial
  Probe
ttctggtcatattcagtattcatgc

SEQ ID NO: 91289 - DNA, 25 bp, Artificial
  Probe
gtatctttagtagttctgctccctg

SEQ ID NO: 91290 - DNA, 25 bp, Artificial
  Probe
tgttgttgttgttgttgttgatttg

SEQ ID NO: 91291 - DNA, 25 bp, Artificial
  Probe
aaagagagacagagagagagaaaga

SEQ ID NO: 91292 - DNA, 25 bp, Artificial
  Probe
caaagagagacagagagagagaaag

SEQ ID NO: 91293 - DNA, 25 bp, Artificial
  Probe
ccacttctggtcatattcagtattc

SEQ ID NO: 91294 - DNA, 25 bp, Artificial
  Probe
gttgttgttgttgttgatttggaat

SEQ ID NO: 91295 - DNA, 25 bp, Artificial
  Probe
tgtatctttagtagttctgctccct

SEQ ID NO: 91296 - DNA, 25 bp, Artificial
  Probe
atgtatctttagtagttctgctccc

SEQ ID NO: 91297 - DNA, 25 bp, Artificial
  Probe
gaaagagagagagagaggtagagag

SEQ ID NO: 91298 - DNA, 25 bp, Artificial
  Probe
gagaaagagagagagagaggtagag

SEQ ID NO: 91299 - DNA, 25 bp, Artificial
  Probe
gagagaaagagagagagagaggtag

SEQ ID NO: 91300 - DNA, 25 bp, Artificial
  Probe
gagagagagaaagagagagagagag

SEQ ID NO: 91301 - DNA, 25 bp, Artificial
  Probe
aggatgctataactaacaaaccgag

SEQ ID NO: 91302 - DNA, 25 bp, Artificial
  Probe
gaggatgctataactaacaaaccga

SEQ ID NO: 91303 - DNA, 25 bp, Artificial
  Probe
agaggatgctataactaacaaaccg

SEQ ID NO: 91304 - DNA, 25 bp, Artificial
  Probe
ccatgagaagacaggaatgaggatt

SEQ ID NO: 91305 - DNA, 25 bp, Artificial
  Probe
ttgttgttgttgttgttgttgattt

SEQ ID NO: 91306 - DNA, 25 bp, Artificial
  Probe
tttgttgttgttgttgttgttgatt

SEQ ID NO: 91307 - DNA, 25 bp, Artificial
  Probe
aagagagacagagagagagaaagag

SEQ ID NO: 91308 - DNA, 25 bp, Artificial
  Probe
aaagagagagagagaggtagagaga

SEQ ID NO: 91309 - DNA, 25 bp, Artificial
  Probe
agaaagagagagagagaggtagaga

SEQ ID NO: 91310 - DNA, 25 bp, Artificial
  Probe
gaagattctggcagagaggaggaag

SEQ ID NO: 91311 - DNA, 25 bp, Artificial
  Probe
gtacatccagaaggctcagacagag

SEQ ID NO: 91312 - DNA, 25 bp, Artificial
  Probe
agaagattctggcagagaggaggaa

SEQ ID NO: 91313 - DNA, 25 bp, Artificial
  Probe
acatgatgcattttggagggtacat

SEQ ID NO: 91314 - DNA, 25 bp, Artificial
  Probe
aaggctctgtccaacatgatgcatt

SEQ ID NO: 91315 - DNA, 25 bp, Artificial
  Probe
caacatgatgcattttggagggtac

SEQ ID NO: 91316 - DNA, 25 bp, Artificial
  Probe
aacatgatgcattttggagggtaca

SEQ ID NO: 91317 - DNA, 25 bp, Artificial
  Probe
gctctgtccaacatgatgcattttg

SEQ ID NO: 91318 - DNA, 25 bp, Artificial
  Probe
cattttggagggtacatccagaagg

SEQ ID NO: 91319 - DNA, 25 bp, Artificial
  Probe
aggctctgtccaacatgatgcattt

SEQ ID NO: 91320 - DNA, 25 bp, Artificial
  Probe
catgatgcattttggagggtacatc

SEQ ID NO: 91321 - DNA, 25 bp, Artificial
  Probe
gcattttggagggtacatccagaag

SEQ ID NO: 91322 - DNA, 25 bp, Artificial
  Probe
atgatgcattttggagggtacatcc

SEQ ID NO: 91323 - DNA, 25 bp, Artificial
  Probe
ggctctgtccaacatgatgcatttt

SEQ ID NO: 91324 - DNA, 25 bp, Artificial
  Probe
ctctgtccaacatgatgcattttgg

SEQ ID NO: 91325 - DNA, 25 bp, Artificial
  Probe
tgcattttggagggtacatccagaa

SEQ ID NO: 91326 - DNA, 25 bp, Artificial
  Probe
attttggagggtacatccagaaggc

SEQ ID NO: 91327 - DNA, 25 bp, Artificial
  Probe
ccaacatgatgcattttggagggta

SEQ ID NO: 91328 - DNA, 25 bp, Artificial
  Probe
gatgcattttggagggtacatccag

SEQ ID NO: 91329 - DNA, 25 bp, Artificial
  Probe
atgcattttggagggtacatccaga

SEQ ID NO: 91330 - DNA, 25 bp, Artificial
  Probe
tgatgcattttggagggtacatcca

SEQ ID NO: 91331 - DNA, 25 bp, Artificial
  Probe
agaagtgtatgctggtgtgaagaag

SEQ ID NO: 91332 - DNA, 25 bp, Artificial
  Probe
tcagagagaaagagagaaagagaga

SEQ ID NO: 91333 - DNA, 25 bp, Artificial
  Probe
gtcagagagaaagagagaaagagag

SEQ ID NO: 91334 - DNA, 25 bp, Artificial
  Probe
attggtcagagagaaagagagaaag

SEQ ID NO: 91335 - DNA, 25 bp, Artificial
  Probe
cattggtcagagagaaagagagaaa

SEQ ID NO: 91336 - DNA, 25 bp, Artificial
  Probe
agaaagagagaaagagagagagaga

SEQ ID NO: 91337 - DNA, 25 bp, Artificial
  Probe
agagaaagagagaaagagagagaga

SEQ ID NO: 91338 - DNA, 25 bp, Artificial
  Probe
agagagaaagagagaaagagagaga

SEQ ID NO: 91339 - DNA, 25 bp, Artificial
  Probe
cagagagaaagagagaaagagagag

SEQ ID NO: 91340 - DNA, 25 bp, Artificial
  Probe
gaaagagagaaagagagagagagag

SEQ ID NO: 91341 - DNA, 25 bp, Artificial
  Probe
gagaaagagagaaagagagagagag

SEQ ID NO: 91342 - DNA, 25 bp, Artificial
  Probe
gagagaaagagagaaagagagagag

SEQ ID NO: 91343 - DNA, 25 bp, Artificial
  Probe
ttggtcagagagaaagagagaaaga

SEQ ID NO: 91344 - DNA, 25 bp, Artificial
  Probe
aaagagagaaagagagagagagagc

SEQ ID NO: 91345 - DNA, 25 bp, Artificial
  Probe
ggtcagagagaaagagagaaagaga

SEQ ID NO: 91346 - DNA, 25 bp, Artificial
  Probe
acattggtcagagagaaagagagaa

SEQ ID NO: 91347 - DNA, 25 bp, Artificial
  Probe
tggtcagagagaaagagagaaagag

SEQ ID NO: 91348 - DNA, 25 bp, Artificial
  Probe
cattcgagtgtgaagagattgtgac

SEQ ID NO: 91349 - DNA, 25 bp, Artificial
  Probe
aagagagaaagagagagagagagca

SEQ ID NO: 91350 - DNA, 25 bp, Artificial
  Probe
gacttatcccaagagcctttgattc

SEQ ID NO: 91351 - DNA, 25 bp, Artificial
  Probe
cttgtggagttgtcttgctgatgaa

SEQ ID NO: 91352 - DNA, 25 bp, Artificial
  Probe
cttatcccaagagcctttgattcac

SEQ ID NO: 91353 - DNA, 25 bp, Artificial
  Probe
ttgtggagttgtcttgctgatgaag

SEQ ID NO: 91354 - DNA, 25 bp, Artificial
  Probe
cagaagtgtatgctggtgtgaagaa

SEQ ID NO: 91355 - DNA, 25 bp, Artificial
  Probe
tatcccaagagcctttgattcacat

SEQ ID NO: 91356 - DNA, 25 bp, Artificial
  Probe
acttatcccaagagcctttgattca

SEQ ID NO: 91357 - DNA, 25 bp, Artificial
  Probe
attcgagtgtgaagagattgtgaca

SEQ ID NO: 91358 - DNA, 25 bp, Artificial
  Probe
acattcgagtgtgaagagattgtga

SEQ ID NO: 91359 - DNA, 25 bp, Artificial
  Probe
gagagaaagagagagagagagcact

SEQ ID NO: 91360 - DNA, 25 bp, Artificial
  Probe
agagagaaagagagagagagagcac

SEQ ID NO: 91361 - DNA, 25 bp, Artificial
  Probe
ttatcccaagagcctttgattcaca

SEQ ID NO: 91362 - DNA, 25 bp, Artificial
  Probe
gacattggtcagagagaaagagaga

SEQ ID NO: 91363 - DNA, 25 bp, Artificial
  Probe
ttcgagtgtgaagagattgtgacag

SEQ ID NO: 91364 - DNA, 25 bp, Artificial
  Probe
agagaaagagagagagagagcactc

SEQ ID NO: 91365 - DNA, 25 bp, Artificial
  Probe
atcccaagagcctttgattcacatt

SEQ ID NO: 91366 - DNA, 25 bp, Artificial
  Probe
taagggaaaggagtagacacagcaa

SEQ ID NO: 91367 - DNA, 25 bp, Artificial
  Probe
ctaagggaaaggagtagacacagca

SEQ ID NO: 91368 - DNA, 25 bp, Artificial
  Probe
cttgctgatgaagccagaagtgtat

SEQ ID NO: 91369 - DNA, 25 bp, Artificial
  Probe
tcccaagagcctttgattcacattc

SEQ ID NO: 91370 - DNA, 25 bp, Artificial
  Probe
ggacttatcccaagagcctttgatt

SEQ ID NO: 91371 - DNA, 25 bp, Artificial
  Probe
atgtggctaagggaaaggagtagac

SEQ ID NO: 91372 - DNA, 25 bp, Artificial
  Probe
acttgtggagttgtcttgctgatga

SEQ ID NO: 91373 - DNA, 25 bp, Artificial
  Probe
aagggaaaggagtagacacagcaat

SEQ ID NO: 91374 - DNA, 25 bp, Artificial
  Probe
ttgctgatgaagccagaagtgtatg

SEQ ID NO: 91375 - DNA, 25 bp, Artificial
  Probe
caagagcctttgattcacattcgag

SEQ ID NO: 91376 - DNA, 25 bp, Artificial
  Probe
tacccttacacacatctttggaatt

SEQ ID NO: 91377 - DNA, 25 bp, Artificial
  Probe
cccttacacacatctttggaatttg

SEQ ID NO: 91378 - DNA, 25 bp, Artificial
  Probe
gtaatgtaacttattatgggctgcg

SEQ ID NO: 91379 - DNA, 25 bp, Artificial
  Probe
ggtaatgtaacttattatgggctgc

SEQ ID NO: 91380 - DNA, 25 bp, Artificial
  Probe
acggtaatgtaacttattatgggct

SEQ ID NO: 91381 - DNA, 25 bp, Artificial
  Probe
cacggtaatgtaacttattatgggc

SEQ ID NO: 91382 - DNA, 25 bp, Artificial
  Probe
acccttacacacatctttggaattt

SEQ ID NO: 91383 - DNA, 25 bp, Artificial
  Probe
taatgtaacttattatgggctgcgt

SEQ ID NO: 91384 - DNA, 25 bp, Artificial
  Probe
cggtaatgtaacttattatgggctg

SEQ ID NO: 91385 - DNA, 25 bp, Artificial
  Probe
atcaaattacatcttcctccaaagc

SEQ ID NO: 91386 - DNA, 25 bp, Artificial
  Probe
ccttacacacatctttggaatttgc

SEQ ID NO: 91387 - DNA, 25 bp, Artificial
  Probe
aatgtaacttattatgggctgcgtc

SEQ ID NO: 91388 - DNA, 25 bp, Artificial
  Probe
aacaatgctcattatgtgacaataa

SEQ ID NO: 91389 - DNA, 25 bp, Artificial
  Probe
aaattacatcttcctccaaagcctg

SEQ ID NO: 91390 - DNA, 25 bp, Artificial
  Probe
caaattacatcttcctccaaagcct

SEQ ID NO: 91391 - DNA, 25 bp, Artificial
  Probe
tcaaattacatcttcctccaaagcc

SEQ ID NO: 91392 - DNA, 25 bp, Artificial
  Probe
acacacactacacacacacacaatt

SEQ ID NO: 91393 - DNA, 25 bp, Artificial
  Probe
tcatcaaattacatcttcctccaaa

SEQ ID NO: 91394 - DNA, 25 bp, Artificial
  Probe
ttcatcaaattacatcttcctccaa

SEQ ID NO: 91395 - DNA, 25 bp, Artificial
  Probe
tttcatcaaattacatcttcctcca

SEQ ID NO: 91396 - DNA, 25 bp, Artificial
  Probe
ggctaattaatatggcatgtaacat

SEQ ID NO: 91397 - DNA, 25 bp, Artificial
  Probe
catcaaattacatcttcctccaaag

SEQ ID NO: 91398 - DNA, 25 bp, Artificial
  Probe
aagagggctaattaatatggcatgt

SEQ ID NO: 91399 - DNA, 25 bp, Artificial
  Probe
agagggctaattaatatggcatgta

SEQ ID NO: 91400 - DNA, 25 bp, Artificial
  Probe
atgtaacttattatgggctgcgtca

SEQ ID NO: 91401 - DNA, 25 bp, Artificial
  Probe
gggctaattaatatggcatgtaaca

SEQ ID NO: 91402 - DNA, 25 bp, Artificial
  Probe
aaagagggctaattaatatggcatg

SEQ ID NO: 91403 - DNA, 25 bp, Artificial
  Probe
caaagagggctaattaatatggcat

SEQ ID NO: 91404 - DNA, 25 bp, Artificial
  Probe
agggctaattaatatggcatgtaac

SEQ ID NO: 91405 - DNA, 25 bp, Artificial
  Probe
aaagcgacccttccattgtattact

SEQ ID NO: 91406 - DNA, 25 bp, Artificial
  Probe
gagggctaattaatatggcatgtaa

SEQ ID NO: 91407 - DNA, 25 bp, Artificial
  Probe
cacacacactacacacacacacaat

SEQ ID NO: 91408 - DNA, 25 bp, Artificial
  Probe
ccacggtaatgtaacttattatggg

SEQ ID NO: 91409 - DNA, 25 bp, Artificial
  Probe
cccacggtaatgtaacttattatgg

SEQ ID NO: 91410 - DNA, 25 bp, Artificial
  Probe
cacacaattgcttggactacctata

SEQ ID NO: 91411 - DNA, 25 bp, Artificial
  Probe
cgacccttccattgtattactcctg

SEQ ID NO: 91412 - DNA, 25 bp, Artificial
  Probe
aagcgacccttccattgtattactc

SEQ ID NO: 91413 - DNA, 25 bp, Artificial
  Probe
ttacacacatctttggaatttgcag

SEQ ID NO: 91414 - DNA, 25 bp, Artificial
  Probe
cttacacacatctttggaatttgca

SEQ ID NO: 91415 - DNA, 25 bp, Artificial
  Probe
gacccttccattgtattactcctgc

SEQ ID NO: 91416 - DNA, 25 bp, Artificial
  Probe
catctttggaatttgcagaatgact

SEQ ID NO: 91417 - DNA, 25 bp, Artificial
  Probe
tgctcattatgtgacaataaacttt

SEQ ID NO: 91418 - DNA, 25 bp, Artificial
  Probe
acatctttggaatttgcagaatgac

SEQ ID NO: 91419 - DNA, 25 bp, Artificial
  Probe
cacatctttggaatttgcagaatga

SEQ ID NO: 91420 - DNA, 25 bp, Artificial
  Probe
acacatctttggaatttgcagaatg

SEQ ID NO: 91421 - DNA, 25 bp, Artificial
  Probe
ataagaaccgagatgaactgaatgg

SEQ ID NO: 91422 - DNA, 25 bp, Artificial
  Probe
aataagaaccgagatgaactgaatg

SEQ ID NO: 91423 - DNA, 25 bp, Artificial
  Probe
caataagaaccgagatgaactgaat

SEQ ID NO: 91424 - DNA, 25 bp, Artificial
  Probe
ccaataagaaccgagatgaactgaa

SEQ ID NO: 91425 - DNA, 25 bp, Artificial
  Probe
taagaaccgagatgaactgaatggc

SEQ ID NO: 91426 - DNA, 25 bp, Artificial
  Probe
taagcctttaactgtggatgagatt

SEQ ID NO: 91427 - DNA, 25 bp, Artificial
  Probe
ctaagcctttaactgtggatgagat

SEQ ID NO: 91428 - DNA, 25 bp, Artificial
  Probe
ctcattaggaatgtgattgccttac

SEQ ID NO: 91429 - DNA, 25 bp, Artificial
  Probe
actcattaggaatgtgattgcctta

SEQ ID NO: 91430 - DNA, 25 bp, Artificial
  Probe
aagcctttaactgtggatgagattg

SEQ ID NO: 91431 - DNA, 25 bp, Artificial
  Probe
tcattaggaatgtgattgccttacg

SEQ ID NO: 91432 - DNA, 25 bp, Artificial
  Probe
cactcattaggaatgtgattgcctt

SEQ ID NO: 91433 - DNA, 25 bp, Artificial
  Probe
gatagcagacagtgtcctgatgtta

SEQ ID NO: 91434 - DNA, 25 bp, Artificial
  Probe
atagcagacagtgtcctgatgttac

SEQ ID NO: 91435 - DNA, 25 bp, Artificial
  Probe
aatggagtctacgtcaagattgtgt

SEQ ID NO: 91436 - DNA, 25 bp, Artificial
  Probe
cattaggaatgtgattgccttacgg

SEQ ID NO: 91437 - DNA, 25 bp, Artificial
  Probe
cccaataagaaccgagatgaactga

SEQ ID NO: 91438 - DNA, 25 bp, Artificial
  Probe
ctcaggttccacttcagctagaatc

SEQ ID NO: 91439 - DNA, 25 bp, Artificial
  Probe
acactcattaggaatgtgattgcct

SEQ ID NO: 91440 - DNA, 25 bp, Artificial
  Probe
atggagtctacgtcaagattgtgtc

SEQ ID NO: 91441 - DNA, 25 bp, Artificial
  Probe
ttccacttcagctagaatccaaatc

SEQ ID NO: 91442 - DNA, 25 bp, Artificial
  Probe
tgttgaataaatgtttgtcatgctt

SEQ ID NO: 91443 - DNA, 25 bp, Artificial
  Probe
ctagaatccaaatctgctctatgcc

SEQ ID NO: 91444 - DNA, 25 bp, Artificial
  Probe
gttccacttcagctagaatccaaat

SEQ ID NO: 91445 - DNA, 25 bp, Artificial
  Probe
ctacatccacagctaagcctttaac

SEQ ID NO: 91446 - DNA, 25 bp, Artificial
  Probe
atgttgaataaatgtttgtcatgct

SEQ ID NO: 91447 - DNA, 25 bp, Artificial
  Probe
gctaagcctttaactgtggatgaga

SEQ ID NO: 91448 - DNA, 25 bp, Artificial
  Probe
actcaggttccacttcagctagaat

SEQ ID NO: 91449 - DNA, 25 bp, Artificial
  Probe
tcctgatgttacgtgacagaagatg

SEQ ID NO: 91450 - DNA, 25 bp, Artificial
  Probe
gtcctgatgttacgtgacagaagat

SEQ ID NO: 91451 - DNA, 25 bp, Artificial
  Probe
tacatccacagctaagcctttaact

SEQ ID NO: 91452 - DNA, 25 bp, Artificial
  Probe
gctagaatccaaatctgctctatgc

SEQ ID NO: 91453 - DNA, 25 bp, Artificial
  Probe
tccacttcagctagaatccaaatct

SEQ ID NO: 91454 - DNA, 25 bp, Artificial
  Probe
gttgaataaatgtttgtcatgcttc

SEQ ID NO: 91455 - DNA, 25 bp, Artificial
  Probe
gtgtcatcctacatccacagctaag

SEQ ID NO: 91456 - DNA, 25 bp, Artificial
  Probe
aaacacgctctccttcatcacatac

SEQ ID NO: 91457 - DNA, 25 bp, Artificial
  Probe
caaacacgctctccttcatcacata

SEQ ID NO: 91458 - DNA, 25 bp, Artificial
  Probe
aaatggagtctacgtcaagattgtg

SEQ ID NO: 91459 - DNA, 25 bp, Artificial
  Probe
agaaccgagatgaactgaatggctt

SEQ ID NO: 91460 - DNA, 25 bp, Artificial
  Probe
aagaaccgagatgaactgaatggct

SEQ ID NO: 91461 - DNA, 25 bp, Artificial
  Probe
gaaagaggaagcactttgtaatagt

SEQ ID NO: 91462 - DNA, 25 bp, Artificial
  Probe
cgccatttatgtcacagttctaaat

SEQ ID NO: 91463 - DNA, 25 bp, Artificial
  Probe
aggttccacttcagctagaatccaa

SEQ ID NO: 91464 - DNA, 25 bp, Artificial
  Probe
aatgttgaataaatgtttgtcatgc

SEQ ID NO: 91465 - DNA, 25 bp, Artificial
  Probe
ggagtctacgtcaagattgtgtcac

SEQ ID NO: 91466 - DNA, 25 bp, Artificial
  Probe
tgtcctgtatgactttagcagaatt

SEQ ID NO: 91467 - DNA, 25 bp, Artificial
  Probe
atgtcctgtatgactttagcagaat

SEQ ID NO: 91468 - DNA, 25 bp, Artificial
  Probe
ttacccatgtcctgtatgactttag

SEQ ID NO: 91469 - DNA, 25 bp, Artificial
  Probe
catgtcctgtatgactttagcagaa

SEQ ID NO: 91470 - DNA, 25 bp, Artificial
  Probe
tttacccatgtcctgtatgacttta

SEQ ID NO: 91471 - DNA, 25 bp, Artificial
  Probe
tacccatgtcctgtatgactttagc

SEQ ID NO: 91472 - DNA, 25 bp, Artificial
  Probe
caacgacactttgatccacttgatg

SEQ ID NO: 91473 - DNA, 25 bp, Artificial
  Probe
ccatgtcctgtatgactttagcaga

SEQ ID NO: 91474 - DNA, 25 bp, Artificial
  Probe
cccatgtcctgtatgactttagcag

SEQ ID NO: 91475 - DNA, 25 bp, Artificial
  Probe
gtcctgtatgactttagcagaattc

SEQ ID NO: 91476 - DNA, 25 bp, Artificial
  Probe
ttttacccatgtcctgtatgacttt

SEQ ID NO: 91477 - DNA, 25 bp, Artificial
  Probe
gttttacccatgtcctgtatgactt

SEQ ID NO: 91478 - DNA, 25 bp, Artificial
  Probe
acccatgtcctgtatgactttagca

SEQ ID NO: 91479 - DNA, 25 bp, Artificial
  Probe
tcaacgacactttgatccacttgat

SEQ ID NO: 91480 - DNA, 25 bp, Artificial
  Probe
cctggacaagatcaacgacactttg

SEQ ID NO: 91481 - DNA, 25 bp, Artificial
  Probe
tcctggacaagatcaacgacacttt

SEQ ID NO: 91482 - DNA, 25 bp, Artificial
  Probe
aacgacactttgatccacttgatgg

SEQ ID NO: 91483 - DNA, 25 bp, Artificial
  Probe
ctggacaagatcaacgacactttga

SEQ ID NO: 91484 - DNA, 25 bp, Artificial
  Probe
gtcctggacaagatcaacgacactt

SEQ ID NO: 91485 - DNA, 25 bp, Artificial
  Probe
cgttttacccatgtcctgtatgact

SEQ ID NO: 91486 - DNA, 25 bp, Artificial
  Probe
gagtcctggacaagatcaacgacac

SEQ ID NO: 91487 - DNA, 25 bp, Artificial
  Probe
acgttttacccatgtcctgtatgac

SEQ ID NO: 91488 - DNA, 25 bp, Artificial
  Probe
cttccccaacaccatctgagaactc

SEQ ID NO: 91489 - DNA, 25 bp, Artificial
  Probe
atcaacgacactttgatccacttga

SEQ ID NO: 91490 - DNA, 25 bp, Artificial
  Probe
tggacaagatcaacgacactttgat

SEQ ID NO: 91491 - DNA, 25 bp, Artificial
  Probe
aacgttttacccatgtcctgtatga

SEQ ID NO: 91492 - DNA, 25 bp, Artificial
  Probe
gcacacagaacttatgaacttgtta

SEQ ID NO: 91493 - DNA, 25 bp, Artificial
  Probe
acacagaacttatgaacttgttaca

SEQ ID NO: 91494 - DNA, 25 bp, Artificial
  Probe
acagaacttatgaacttgttacagt

SEQ ID NO: 91495 - DNA, 25 bp, Artificial
  Probe
cacacagaacttatgaacttgttac

SEQ ID NO: 91496 - DNA, 25 bp, Artificial
  Probe
cacagaacttatgaacttgttacag

SEQ ID NO: 91497 - DNA, 25 bp, Artificial
  Probe
ggcacacagaacttatgaacttgtt

SEQ ID NO: 91498 - DNA, 25 bp, Artificial
  Probe
aataattccattgagtgtgagatca

SEQ ID NO: 91499 - DNA, 25 bp, Artificial
  Probe
tatgaaacaagagtaggagacaagg

SEQ ID NO: 91500 - DNA, 25 bp, Artificial
  Probe
agtatgaaacaagagtaggagacaa

SEQ ID NO: 91501 - DNA, 25 bp, Artificial
  Probe
aagtatgaaacaagagtaggagaca

SEQ ID NO: 91502 - DNA, 25 bp, Artificial
  Probe
gtatgaaacaagagtaggagacaag

SEQ ID NO: 91503 - DNA, 25 bp, Artificial
  Probe
ctggcacacagaacttatgaacttg

SEQ ID NO: 91504 - DNA, 25 bp, Artificial
  Probe
aaagtatgaaacaagagtaggagac

SEQ ID NO: 91505 - DNA, 25 bp, Artificial
  Probe
tggcacacagaacttatgaacttgt

SEQ ID NO: 91506 - DNA, 25 bp, Artificial
  Probe
atgaaacaagagtaggagacaaggg

SEQ ID NO: 91507 - DNA, 25 bp, Artificial
  Probe
cagaacttatgaacttgttacagta

SEQ ID NO: 91508 - DNA, 25 bp, Artificial
  Probe
taataattccattgagtgtgagatc

SEQ ID NO: 91509 - DNA, 25 bp, Artificial
  Probe
aataataattccattgagtgtgaga

SEQ ID NO: 91510 - DNA, 25 bp, Artificial
  Probe
ataattccattgagtgtgagatcaa

SEQ ID NO: 91511 - DNA, 25 bp, Artificial
  Probe
ataataattccattgagtgtgagat

SEQ ID NO: 91512 - DNA, 25 bp, Artificial
  Probe
attcaagctggcacacagaacttat

SEQ ID NO: 91513 - DNA, 25 bp, Artificial
  Probe
gctggcacacagaacttatgaactt

SEQ ID NO: 91514 - DNA, 25 bp, Artificial
  Probe
cccaaaagtatgaaacaagagtagg

SEQ ID NO: 91515 - DNA, 25 bp, Artificial
  Probe
ccccaaaagtatgaaacaagagtag

SEQ ID NO: 91516 - DNA, 25 bp, Artificial
  Probe
agaacttatgaacttgttacagtat

SEQ ID NO: 91517 - DNA, 25 bp, Artificial
  Probe
gccccaaaagtatgaaacaagagta

SEQ ID NO: 91518 - DNA, 25 bp, Artificial
  Probe
ccaaaagtatgaaacaagagtagga

SEQ ID NO: 91519 - DNA, 25 bp, Artificial
  Probe
aagctggcacacagaacttatgaac

SEQ ID NO: 91520 - DNA, 25 bp, Artificial
  Probe
caagctggcacacagaacttatgaa

SEQ ID NO: 91521 - DNA, 25 bp, Artificial
  Probe
ttcaagctggcacacagaacttatg

SEQ ID NO: 91522 - DNA, 25 bp, Artificial
  Probe
cattcaagctggcacacagaactta

SEQ ID NO: 91523 - DNA, 25 bp, Artificial
  Probe
caaaagtatgaaacaagagtaggag

SEQ ID NO: 91524 - DNA, 25 bp, Artificial
  Probe
ctgccccaaaagtatgaaacaagag

SEQ ID NO: 91525 - DNA, 25 bp, Artificial
  Probe
aaaagtatgaaacaagagtaggaga

SEQ ID NO: 91526 - DNA, 25 bp, Artificial
  Probe
tgaaataataattccattgagtgtg

SEQ ID NO: 91527 - DNA, 25 bp, Artificial
  Probe
tgccccaaaagtatgaaacaagagt

SEQ ID NO: 91528 - DNA, 25 bp, Artificial
  Probe
aaataataattccattgagtgtgag

SEQ ID NO: 91529 - DNA, 25 bp, Artificial
  Probe
gaaataataattccattgagtgtga

SEQ ID NO: 91530 - DNA, 25 bp, Artificial
  Probe
cactgccccaaaagtatgaaacaag

SEQ ID NO: 91531 - DNA, 25 bp, Artificial
  Probe
ccttgaaataataattccattgagt

SEQ ID NO: 91532 - DNA, 25 bp, Artificial
  Probe
agctggcacacagaacttatgaact

SEQ ID NO: 91533 - DNA, 25 bp, Artificial
  Probe
tcaagctggcacacagaacttatga

SEQ ID NO: 91534 - DNA, 25 bp, Artificial
  Probe
actgccccaaaagtatgaaacaaga

SEQ ID NO: 91535 - DNA, 25 bp, Artificial
  Probe
tccttgaaataataattccattgag

SEQ ID NO: 91536 - DNA, 25 bp, Artificial
  Probe
gaaacaagagtaggagacaagggga

SEQ ID NO: 91537 - DNA, 25 bp, Artificial
  Probe
tgagactattgaagaagcagagaac

SEQ ID NO: 91538 - DNA, 25 bp, Artificial
  Probe
gagactattgaagaagcagagaacc

SEQ ID NO: 91539 - DNA, 25 bp, Artificial
  Probe
agactattgaagaagcagagaacct

SEQ ID NO: 91540 - DNA, 25 bp, Artificial
  Probe
ctgagactattgaagaagcagagaa

SEQ ID NO: 91541 - DNA, 25 bp, Artificial
  Probe
gactattgaagaagcagagaacctg

SEQ ID NO: 91542 - DNA, 25 bp, Artificial
  Probe
cctgagactattgaagaagcagaga

SEQ ID NO: 91543 - DNA, 25 bp, Artificial
  Probe
actcttgtatatatgcaccaggttc

SEQ ID NO: 91544 - DNA, 25 bp, Artificial
  Probe
gactcttgtatatatgcaccaggtt

SEQ ID NO: 91545 - DNA, 25 bp, Artificial
  Probe
ttccagactcttgtatatatgcacc

SEQ ID NO: 91546 - DNA, 25 bp, Artificial
  Probe
cagactcttgtatatatgcaccagg

SEQ ID NO: 91547 - DNA, 25 bp, Artificial
  Probe
ccagactcttgtatatatgcaccag

SEQ ID NO: 91548 - DNA, 25 bp, Artificial
  Probe
tttgcctttccagactcttgtatat

SEQ ID NO: 91549 - DNA, 25 bp, Artificial
  Probe
ctcttgtatatatgcaccaggttcc

SEQ ID NO: 91550 - DNA, 25 bp, Artificial
  Probe
agactcttgtatatatgcaccaggt

SEQ ID NO: 91551 - DNA, 25 bp, Artificial
  Probe
tccagactcttgtatatatgcacca

SEQ ID NO: 91552 - DNA, 25 bp, Artificial
  Probe
ctttgcctttccagactcttgtata

SEQ ID NO: 91553 - DNA, 25 bp, Artificial
  Probe
ccaaatgaactaccaaccttaaaga

SEQ ID NO: 91554 - DNA, 25 bp, Artificial
  Probe
tccaaatgaactaccaaccttaaag

SEQ ID NO: 91555 - DNA, 25 bp, Artificial
  Probe
tcttgtatatatgcaccaggttcca

SEQ ID NO: 91556 - DNA, 25 bp, Artificial
  Probe
actattgaagaagcagagaacctgg

SEQ ID NO: 91557 - DNA, 25 bp, Artificial
  Probe
cttgtatatatgcaccaggttccaa

SEQ ID NO: 91558 - DNA, 25 bp, Artificial
  Probe
ttccaaatgaactaccaaccttaaa

SEQ ID NO: 91559 - DNA, 25 bp, Artificial
  Probe
ttgcctttccagactcttgtatata

SEQ ID NO: 91560 - DNA, 25 bp, Artificial
  Probe
aatgaactaccaaccttaaagactt

SEQ ID NO: 91561 - DNA, 25 bp, Artificial
  Probe
aaatgaactaccaaccttaaagact

SEQ ID NO: 91562 - DNA, 25 bp, Artificial
  Probe
caaatgaactaccaaccttaaagac

SEQ ID NO: 91563 - DNA, 25 bp, Artificial
  Probe
tgcctttccagactcttgtatatat

SEQ ID NO: 91564 - DNA, 25 bp, Artificial
  Probe
cctttccagactcttgtatatatgc

SEQ ID NO: 91565 - DNA, 25 bp, Artificial
  Probe
gcctttccagactcttgtatatatg

SEQ ID NO: 91566 - DNA, 25 bp, Artificial
  Probe
ctttgcctgagactattgaagaagc

SEQ ID NO: 91567 - DNA, 25 bp, Artificial
  Probe
gctttgcctgagactattgaagaag

SEQ ID NO: 91568 - DNA, 25 bp, Artificial
  Probe
atgaactaccaaccttaaagacttt

SEQ ID NO: 91569 - DNA, 25 bp, Artificial
  Probe
gcctgagactattgaagaagcagag

SEQ ID NO: 91570 - DNA, 25 bp, Artificial
  Probe
gaatcttgggatgatggtatgctct

SEQ ID NO: 91571 - DNA, 25 bp, Artificial
  Probe
tcaggaatcttgggatgatggtatg

SEQ ID NO: 91572 - DNA, 25 bp, Artificial
  Probe
aatcttgggatgatggtatgctctg

SEQ ID NO: 91573 - DNA, 25 bp, Artificial
  Probe
cctttgcctttccagactcttgtat

SEQ ID NO: 91574 - DNA, 25 bp, Artificial
  Probe
tatatatgcaccaggttccaaatga

SEQ ID NO: 91575 - DNA, 25 bp, Artificial
  Probe
gtatatatgcaccaggttccaaatg

SEQ ID NO: 91576 - DNA, 25 bp, Artificial
  Probe
tgtatatatgcaccaggttccaaat

SEQ ID NO: 91577 - DNA, 25 bp, Artificial
  Probe
atatatgcaccaggttccaaatgaa

SEQ ID NO: 91578 - DNA, 25 bp, Artificial
  Probe
ttgtatatatgcaccaggttccaaa

SEQ ID NO: 91579 - DNA, 25 bp, Artificial
  Probe
ggaatcttgggatgatggtatgctc

SEQ ID NO: 91580 - DNA, 25 bp, Artificial
  Probe
tttccagactcttgtatatatgcac

SEQ ID NO: 91581 - DNA, 25 bp, Artificial
  Probe
caggaatcttgggatgatggtatgc

SEQ ID NO: 91582 - DNA, 25 bp, Artificial
  Probe
taacatctgtaaggagtgtccaatc

SEQ ID NO: 91583 - DNA, 25 bp, Artificial
  Probe
gtaacatctgtaaggagtgtccaat

SEQ ID NO: 91584 - DNA, 25 bp, Artificial
  Probe
catctgtaaggagtgtccaatcatt

SEQ ID NO: 91585 - DNA, 25 bp, Artificial
  Probe
atctgtaaggagtgtccaatcattg

SEQ ID NO: 91586 - DNA, 25 bp, Artificial
  Probe
tgtaacatctgtaaggagtgtccaa

SEQ ID NO: 91587 - DNA, 25 bp, Artificial
  Probe
acatctgtaaggagtgtccaatcat

SEQ ID NO: 91588 - DNA, 25 bp, Artificial
  Probe
caatcattggattcaggtacagaag

SEQ ID NO: 91589 - DNA, 25 bp, Artificial
  Probe
aataataaacctgagattgaagccg

SEQ ID NO: 91590 - DNA, 25 bp, Artificial
  Probe
aacatctgtaaggagtgtccaatca

SEQ ID NO: 91591 - DNA, 25 bp, Artificial
  Probe
agtgtaacatctgtaaggagtgtcc

SEQ ID NO: 91592 - DNA, 25 bp, Artificial
  Probe
ctttcatttgctatatccttggacc

SEQ ID NO: 91593 - DNA, 25 bp, Artificial
  Probe
aatcattggattcaggtacagaagc

SEQ ID NO: 91594 - DNA, 25 bp, Artificial
  Probe
tttcatttgctatatccttggaccc

SEQ ID NO: 91595 - DNA, 25 bp, Artificial
  Probe
actttcatttgctatatccttggac

SEQ ID NO: 91596 - DNA, 25 bp, Artificial
  Probe
gtgtaacatctgtaaggagtgtcca

SEQ ID NO: 91597 - DNA, 25 bp, Artificial
  Probe
atcattggattcaggtacagaagcc

SEQ ID NO: 91598 - DNA, 25 bp, Artificial
  Probe
ataataaacctgagattgaagccgc

SEQ ID NO: 91599 - DNA, 25 bp, Artificial
  Probe
aactttcatttgctatatccttgga

SEQ ID NO: 91600 - DNA, 25 bp, Artificial
  Probe
aaactttcatttgctatatccttgg

SEQ ID NO: 91601 - DNA, 25 bp, Artificial
  Probe
acactttaattatgacatctgccaa

SEQ ID NO: 91602 - DNA, 25 bp, Artificial
  Probe
aacactttaattatgacatctgcca

SEQ ID NO: 91603 - DNA, 25 bp, Artificial
  Probe
agcctgaaacactttaattatgaca

SEQ ID NO: 91604 - DNA, 25 bp, Artificial
  Probe
tacagaagcctgaaacactttaatt

SEQ ID NO: 91605 - DNA, 25 bp, Artificial
  Probe
ttaattatgacatctgccaaagctg

SEQ ID NO: 91606 - DNA, 25 bp, Artificial
  Probe
gtacagaagcctgaaacactttaat

SEQ ID NO: 91607 - DNA, 25 bp, Artificial
  Probe
tttaattatgacatctgccaaagct

SEQ ID NO: 91608 - DNA, 25 bp, Artificial
  Probe
ggtacagaagcctgaaacactttaa

SEQ ID NO: 91609 - DNA, 25 bp, Artificial
  Probe
taataaacctgagattgaagccgct

SEQ ID NO: 91610 - DNA, 25 bp, Artificial
  Probe
cactttaattatgacatctgccaaa

SEQ ID NO: 91611 - DNA, 25 bp, Artificial
  Probe
aaacactttaattatgacatctgcc

SEQ ID NO: 91612 - DNA, 25 bp, Artificial
  Probe
gcctgaaacactttaattatgacat

SEQ ID NO: 91613 - DNA, 25 bp, Artificial
  Probe
aatgcaaacagtctcctaagctaat

SEQ ID NO: 91614 - DNA, 25 bp, Artificial
  Probe
aaatgcaaacagtctcctaagctaa

SEQ ID NO: 91615 - DNA, 25 bp, Artificial
  Probe
aagcctgaaacactttaattatgac

SEQ ID NO: 91616 - DNA, 25 bp, Artificial
  Probe
tctcaaatgcaaacagtctcctaag

SEQ ID NO: 91617 - DNA, 25 bp, Artificial
  Probe
ctctcaaatgcaaacagtctcctaa

SEQ ID NO: 91618 - DNA, 25 bp, Artificial
  Probe
tctggagaagatgttcgtgactttg

SEQ ID NO: 91619 - DNA, 25 bp, Artificial
  Probe
acagaagcctgaaacactttaatta

SEQ ID NO: 91620 - DNA, 25 bp, Artificial
  Probe
caaatgcaaacagtctcctaagcta

SEQ ID NO: 91621 - DNA, 25 bp, Artificial
  Probe
taattatgacatctgccaaagctgc

SEQ ID NO: 91622 - DNA, 25 bp, Artificial
  Probe
gaagcctgaaacactttaattatga

SEQ ID NO: 91623 - DNA, 25 bp, Artificial
  Probe
agaagcctgaaacactttaattatg

SEQ ID NO: 91624 - DNA, 25 bp, Artificial
  Probe
aggtacagaagcctgaaacacttta

SEQ ID NO: 91625 - DNA, 25 bp, Artificial
  Probe
tcattggattcaggtacagaagcct

SEQ ID NO: 91626 - DNA, 25 bp, Artificial
  Probe
caataataaacctgagattgaagcc

SEQ ID NO: 91627 - DNA, 25 bp, Artificial
  Probe
atgattgtattgcacgtagttaagc

SEQ ID NO: 91628 - DNA, 25 bp, Artificial
  Probe
tattgcacgtagttaagctgaagaa

SEQ ID NO: 91629 - DNA, 25 bp, Artificial
  Probe
ggatgattgtattgcacgtagttaa

SEQ ID NO: 91630 - DNA, 25 bp, Artificial
  Probe
gattgtattgcacgtagttaagctg

SEQ ID NO: 91631 - DNA, 25 bp, Artificial
  Probe
attgtattgcacgtagttaagctga

SEQ ID NO: 91632 - DNA, 25 bp, Artificial
  Probe
tgattgtattgcacgtagttaagct

SEQ ID NO: 91633 - DNA, 25 bp, Artificial
  Probe
ttgtattgcacgtagttaagctgaa

SEQ ID NO: 91634 - DNA, 25 bp, Artificial
  Probe
gtattgcacgtagttaagctgaaga

SEQ ID NO: 91635 - DNA, 25 bp, Artificial
  Probe
tgtattgcacgtagttaagctgaag

SEQ ID NO: 91636 - DNA, 25 bp, Artificial
  Probe
gatgattgtattgcacgtagttaag

SEQ ID NO: 91637 - DNA, 25 bp, Artificial
  Probe
gctttagaaagtgatggtttgatgt

SEQ ID NO: 91638 - DNA, 25 bp, Artificial
  Probe
agaaagtgatggtttgatgtctatc

SEQ ID NO: 91639 - DNA, 25 bp, Artificial
  Probe
tttagaaagtgatggtttgatgtct

SEQ ID NO: 91640 - DNA, 25 bp, Artificial
  Probe
agagattgactaatacctcattctt

SEQ ID NO: 91641 - DNA, 25 bp, Artificial
  Probe
atgtctatcacagaaagattcctct

SEQ ID NO: 91642 - DNA, 25 bp, Artificial
  Probe
gttgactttctaggtcttcgtatga

SEQ ID NO: 91643 - DNA, 25 bp, Artificial
  Probe
gatgtctatcacagaaagattcctc

SEQ ID NO: 91644 - DNA, 25 bp, Artificial
  Probe
tgttgactttctaggtcttcgtatg

SEQ ID NO: 91645 - DNA, 25 bp, Artificial
  Probe
ctttagaaagtgatggtttgatgtc

SEQ ID NO: 91646 - DNA, 25 bp, Artificial
  Probe
ttgactttctaggtcttcgtatgaa

SEQ ID NO: 91647 - DNA, 25 bp, Artificial
  Probe
taaactattgccaagaaattgtgtt

SEQ ID NO: 91648 - DNA, 25 bp, Artificial
  Probe
agctttagaaagtgatggtttgatg

SEQ ID NO: 91649 - DNA, 25 bp, Artificial
  Probe
ataaactattgccaagaaattgtgt

SEQ ID NO: 91650 - DNA, 25 bp, Artificial
  Probe
aatttctgtgcaaccttactatgtg

SEQ ID NO: 91651 - DNA, 25 bp, Artificial
  Probe
cacgtagttaagctgaagaaagttt

SEQ ID NO: 91652 - DNA, 25 bp, Artificial
  Probe
gggatgattgtattgcacgtagtta

SEQ ID NO: 91653 - DNA, 25 bp, Artificial
  Probe
attgcacgtagttaagctgaagaaa

SEQ ID NO: 91654 - DNA, 25 bp, Artificial
  Probe
tagagattgactaatacctcattct

SEQ ID NO: 91655 - DNA, 25 bp, Artificial
  Probe
acgtagttaagctgaagaaagttta

SEQ ID NO: 91656 - DNA, 25 bp, Artificial
  Probe
taatttctgtgcaaccttactatgt

SEQ ID NO: 91657 - DNA, 25 bp, Artificial
  Probe
tcacagaaagattcctcttctacag

SEQ ID NO: 91658 - DNA, 25 bp, Artificial
  Probe
ttagaaagtgatggtttgatgtcta

SEQ ID NO: 91659 - DNA, 25 bp, Artificial
  Probe
atcacagaaagattcctcttctaca

SEQ ID NO: 91660 - DNA, 25 bp, Artificial
  Probe
tgtctatcacagaaagattcctctt

SEQ ID NO: 91661 - DNA, 25 bp, Artificial
  Probe
gcacgtagttaagctgaagaaagtt

SEQ ID NO: 91662 - DNA, 25 bp, Artificial
  Probe
ttgcacgtagttaagctgaagaaag

SEQ ID NO: 91663 - DNA, 25 bp, Artificial
  Probe
ctagagattgactaatacctcattc

SEQ ID NO: 91664 - DNA, 25 bp, Artificial
  Probe
tagaaagtgatggtttgatgtctat

SEQ ID NO: 91665 - DNA, 25 bp, Artificial
  Probe
tggtttgatgtctatcacagaaaga

SEQ ID NO: 91666 - DNA, 25 bp, Artificial
  Probe
tgatggtttgatgtctatcacagaa

SEQ ID NO: 91667 - DNA, 25 bp, Artificial
  Probe
tctatcacagaaagattcctcttct

SEQ ID NO: 91668 - DNA, 25 bp, Artificial
  Probe
gtctatcacagaaagattcctcttc

SEQ ID NO: 91669 - DNA, 25 bp, Artificial
  Probe
tttgtaaaagcagccagtaatttct

SEQ ID NO: 91670 - DNA, 25 bp, Artificial
  Probe
tgatgtctatcacagaaagattcct

SEQ ID NO: 91671 - DNA, 25 bp, Artificial
  Probe
aaactattgccaagaaattgtgttt

SEQ ID NO: 91672 - DNA, 25 bp, Artificial
  Probe
gagaaatagcaactaatccaacagc

SEQ ID NO: 91673 - DNA, 25 bp, Artificial
  Probe
tgttagccctcagagtcttatttct

SEQ ID NO: 91674 - DNA, 25 bp, Artificial
  Probe
agaaatagcaactaatccaacagcg

SEQ ID NO: 91675 - DNA, 25 bp, Artificial
  Probe
gttagccctcagagtcttatttctc

SEQ ID NO: 91676 - DNA, 25 bp, Artificial
  Probe
ctgttagccctcagagtcttatttc

SEQ ID NO: 91677 - DNA, 25 bp, Artificial
  Probe
ggagaaatagcaactaatccaacag

SEQ ID NO: 91678 - DNA, 25 bp, Artificial
  Probe
gtcttatttctctctattggtgacc

SEQ ID NO: 91679 - DNA, 25 bp, Artificial
  Probe
gggagaaatagcaactaatccaaca

SEQ ID NO: 91680 - DNA, 25 bp, Artificial
  Probe
cctgttagccctcagagtcttattt

SEQ ID NO: 91681 - DNA, 25 bp, Artificial
  Probe
gggacgggagaaatagcaactaatc

SEQ ID NO: 91682 - DNA, 25 bp, Artificial
  Probe
gagtcttatttctctctattggtga

SEQ ID NO: 91683 - DNA, 25 bp, Artificial
  Probe
cgggagaaatagcaactaatccaac

SEQ ID NO: 91684 - DNA, 25 bp, Artificial
  Probe
agtcttatttctctctattggtgac

SEQ ID NO: 91685 - DNA, 25 bp, Artificial
  Probe
cattctccctttccttgcctcttac

SEQ ID NO: 91686 - DNA, 25 bp, Artificial
  Probe
acgggagaaatagcaactaatccaa

SEQ ID NO: 91687 - DNA, 25 bp, Artificial
  Probe
tcctgttagccctcagagtcttatt

SEQ ID NO: 91688 - DNA, 25 bp, Artificial
  Probe
attctccctttccttgcctcttaca

SEQ ID NO: 91689 - DNA, 25 bp, Artificial
  Probe
gacgggagaaatagcaactaatcca

SEQ ID NO: 91690 - DNA, 25 bp, Artificial
  Probe
ctcctgttagccctcagagtcttat

SEQ ID NO: 91691 - DNA, 25 bp, Artificial
  Probe
tcttatttctctctattggtgacca

SEQ ID NO: 91692 - DNA, 25 bp, Artificial
  Probe
tgggacgggagaaatagcaactaat

SEQ ID NO: 91693 - DNA, 25 bp, Artificial
  Probe
ctacctacccaacagaggacaagat

SEQ ID NO: 91694 - DNA, 25 bp, Artificial
  Probe
tctccctttccttgcctcttacaaa

SEQ ID NO: 91695 - DNA, 25 bp, Artificial
  Probe
ttctccctttccttgcctcttacaa

SEQ ID NO: 91696 - DNA, 25 bp, Artificial
  Probe
ggacgggagaaatagcaactaatcc

SEQ ID NO: 91697 - DNA, 25 bp, Artificial
  Probe
ccattctccctttccttgcctctta

SEQ ID NO: 91698 - DNA, 25 bp, Artificial
  Probe
tacctacccaacagaggacaagatg

SEQ ID NO: 91699 - DNA, 25 bp, Artificial
  Probe
ttagccctcagagtcttatttctct

SEQ ID NO: 91700 - DNA, 25 bp, Artificial
  Probe
gccctcagagtcttatttctctcta

SEQ ID NO: 91701 - DNA, 25 bp, Artificial
  Probe
tagccctcagagtcttatttctctc

SEQ ID NO: 91702 - DNA, 25 bp, Artificial
  Probe
ccctcagagtcttatttctctctat

SEQ ID NO: 91703 - DNA, 25 bp, Artificial
  Probe
gtgggacgggagaaatagcaactaa

SEQ ID NO: 91704 - DNA, 25 bp, Artificial
  Probe
actcaatgcttccattctccctttc

SEQ ID NO: 91705 - DNA, 25 bp, Artificial
  Probe
gactcaatgcttccattctcccttt

SEQ ID NO: 91706 - DNA, 25 bp, Artificial
  Probe
ctccctttccttgcctcttacaaag

SEQ ID NO: 91707 - DNA, 25 bp, Artificial
  Probe
aatgcttccattctccctttccttg

SEQ ID NO: 91708 - DNA, 25 bp, Artificial
  Probe
caatgcttccattctccctttcctt

SEQ ID NO: 91709 - DNA, 25 bp, Artificial
  Probe
agccctcagagtcttatttctctct

SEQ ID NO: 91710 - DNA, 25 bp, Artificial
  Probe
agagtcttatttctctctattggtg

SEQ ID NO: 91711 - DNA, 25 bp, Artificial
  Probe
cagagtcttatttctctctattggt

SEQ ID NO: 91712 - DNA, 25 bp, Artificial
  Probe
ctcaatgcttccattctccctttcc

SEQ ID NO: 91713 - DNA, 25 bp, Artificial
  Probe
tcagagtcttatttctctctattgg

SEQ ID NO: 91714 - DNA, 25 bp, Artificial
  Probe
gcaaatggataaaatacaggaaatt

SEQ ID NO: 91715 - DNA, 25 bp, Artificial
  Probe
gtgtcatgtgatgtagccatgtttg

SEQ ID NO: 91716 - DNA, 25 bp, Artificial
  Probe
cctcagagtcttatttctctctatt

SEQ ID NO: 91717 - DNA, 25 bp, Artificial
  Probe
ttcaatcagatgtcagtagagcaat

SEQ ID NO: 91718 - DNA, 25 bp, Artificial
  Probe
cttcaatcagatgtcagtagagcaa

SEQ ID NO: 91719 - DNA, 25 bp, Artificial
  Probe
tcaatcagatgtcagtagagcaatg

SEQ ID NO: 91720 - DNA, 25 bp, Artificial
  Probe
tcttcaatcagatgtcagtagagca

SEQ ID NO: 91721 - DNA, 25 bp, Artificial
  Probe
caatcagatgtcagtagagcaatgc

SEQ ID NO: 91722 - DNA, 25 bp, Artificial
  Probe
atcttcaatcagatgtcagtagagc

SEQ ID NO: 91723 - DNA, 25 bp, Artificial
  Probe
ctgcttccctgagtatgagaatttc

SEQ ID NO: 91724 - DNA, 25 bp, Artificial
  Probe
ttccctgagtatgagaatttcttcc

SEQ ID NO: 91725 - DNA, 25 bp, Artificial
  Probe
gcttccctgagtatgagaatttctt

SEQ ID NO: 91726 - DNA, 25 bp, Artificial
  Probe
ctgggtttatctgctgctaagaaag

SEQ ID NO: 91727 - DNA, 25 bp, Artificial
  Probe
gatcttcaatcagatgtcagtagag

SEQ ID NO: 91728 - DNA, 25 bp, Artificial
  Probe
cttccctgagtatgagaatttcttc

SEQ ID NO: 91729 - DNA, 25 bp, Artificial
  Probe
gccgctattgataatgatgctgaaa

SEQ ID NO: 91730 - DNA, 25 bp, Artificial
  Probe
ccagggaaggataactgaatcattt

SEQ ID NO: 91731 - DNA, 25 bp, Artificial
  Probe
tgatcttcaatcagatgtcagtaga

SEQ ID NO: 91732 - DNA, 25 bp, Artificial
  Probe
tgggtttatctgctgctaagaaaga

SEQ ID NO: 91733 - DNA, 25 bp, Artificial
  Probe
tgcttccctgagtatgagaatttct

SEQ ID NO: 91734 - DNA, 25 bp, Artificial
  Probe
atcagatgtcagtagagcaatgcaa

SEQ ID NO: 91735 - DNA, 25 bp, Artificial
  Probe
aatcagatgtcagtagagcaatgca

SEQ ID NO: 91736 - DNA, 25 bp, Artificial
  Probe
tccctgagtatgagaatttcttccc

SEQ ID NO: 91737 - DNA, 25 bp, Artificial
  Probe
cgccgctattgataatgatgctgaa

SEQ ID NO: 91738 - DNA, 25 bp, Artificial
  Probe
cctgcttccctgagtatgagaattt

SEQ ID NO: 91739 - DNA, 25 bp, Artificial
  Probe
atgatcttcaatcagatgtcagtag

SEQ ID NO: 91740 - DNA, 25 bp, Artificial
  Probe
tacctgcttccctgagtatgagaat

SEQ ID NO: 91741 - DNA, 25 bp, Artificial
  Probe
ctggtcgccgctattgataatgatg

SEQ ID NO: 91742 - DNA, 25 bp, Artificial
  Probe
cagatgtcagtagagcaatgcaaga

SEQ ID NO: 91743 - DNA, 25 bp, Artificial
  Probe
tcagatgtcagtagagcaatgcaag

SEQ ID NO: 91744 - DNA, 25 bp, Artificial
  Probe
cctgggtttatctgctgctaagaaa

SEQ ID NO: 91745 - DNA, 25 bp, Artificial
  Probe
aatgatcttcaatcagatgtcagta

SEQ ID NO: 91746 - DNA, 25 bp, Artificial
  Probe
gggtttatctgctgctaagaaagat

SEQ ID NO: 91747 - DNA, 25 bp, Artificial
  Probe
tatctgctgctaagaaagatccttc

SEQ ID NO: 91748 - DNA, 25 bp, Artificial
  Probe
ttatctgctgctaagaaagatcctt

SEQ ID NO: 91749 - DNA, 25 bp, Artificial
  Probe
tttatctgctgctaagaaagatcct

SEQ ID NO: 91750 - DNA, 25 bp, Artificial
  Probe
gtttatctgctgctaagaaagatcc

SEQ ID NO: 91751 - DNA, 25 bp, Artificial
  Probe
ggtttatctgctgctaagaaagatc

SEQ ID NO: 91752 - DNA, 25 bp, Artificial
  Probe
cccagggaaggataactgaatcatt

SEQ ID NO: 91753 - DNA, 25 bp, Artificial
  Probe
caatacctgcttccctgagtatgag

SEQ ID NO: 91754 - DNA, 25 bp, Artificial
  Probe
ctgccagatgatgaacaacctgaag

SEQ ID NO: 91755 - DNA, 25 bp, Artificial
  Probe
agatgtcagtagagcaatgcaagac

SEQ ID NO: 91756 - DNA, 25 bp, Artificial
  Probe
ccgctattgataatgatgctgaaaa

SEQ ID NO: 91757 - DNA, 25 bp, Artificial
  Probe
attttggattgtatcttctttcggc

SEQ ID NO: 91758 - DNA, 25 bp, Artificial
  Probe
atacctgcttccctgagtatgagaa

SEQ ID NO: 91759 - DNA, 25 bp, Artificial
  Probe
aatacctgcttccctgagtatgaga

SEQ ID NO: 91760 - DNA, 25 bp, Artificial
  Probe
gggaaggataactgaatcattttgg

SEQ ID NO: 91761 - DNA, 25 bp, Artificial
  Probe
acctgcttccctgagtatgagaatt

SEQ ID NO: 91762 - DNA, 25 bp, Artificial
  Probe
caatgtctactgagtgaaggtgaag

SEQ ID NO: 91763 - DNA, 25 bp, Artificial
  Probe
aatgtctactgagtgaaggtgaaga

SEQ ID NO: 91764 - DNA, 25 bp, Artificial
  Probe
atgtctactgagtgaaggtgaagag

SEQ ID NO: 91765 - DNA, 25 bp, Artificial
  Probe
tctgactaacatcctggatcttctt

SEQ ID NO: 91766 - DNA, 25 bp, Artificial
  Probe
ttctctgactaacatcctggatctt

SEQ ID NO: 91767 - DNA, 25 bp, Artificial
  Probe
ctctgactaacatcctggatcttct

SEQ ID NO: 91768 - DNA, 25 bp, Artificial
  Probe
cttctctgactaacatcctggatct

SEQ ID NO: 91769 - DNA, 25 bp, Artificial
  Probe
tctctgactaacatcctggatcttc

SEQ ID NO: 91770 - DNA, 25 bp, Artificial
  Probe
ccttctctgactaacatcctggatc

SEQ ID NO: 91771 - DNA, 25 bp, Artificial
  Probe
gcaatgtctactgagtgaaggtgaa

SEQ ID NO: 91772 - DNA, 25 bp, Artificial
  Probe
tctactgagtgaaggtgaagaggtc

SEQ ID NO: 91773 - DNA, 25 bp, Artificial
  Probe
gagtgaaggtgaagaggtcaagatg

SEQ ID NO: 91774 - DNA, 25 bp, Artificial
  Probe
tactgagtgaaggtgaagaggtcaa

SEQ ID NO: 91775 - DNA, 25 bp, Artificial
  Probe
gatgtctcagatcaagaggcttctc

SEQ ID NO: 91776 - DNA, 25 bp, Artificial
  Probe
tgactaacatcctggatcttctttc

SEQ ID NO: 91777 - DNA, 25 bp, Artificial
  Probe
ctgactaacatcctggatcttcttt

SEQ ID NO: 91778 - DNA, 25 bp, Artificial
  Probe
gtctactgagtgaaggtgaagaggt

SEQ ID NO: 91779 - DNA, 25 bp, Artificial
  Probe
tgtctactgagtgaaggtgaagagg

SEQ ID NO: 91780 - DNA, 25 bp, Artificial
  Probe
tgagtgaaggtgaagaggtcaagat

SEQ ID NO: 91781 - DNA, 25 bp, Artificial
  Probe
ctactgagtgaaggtgaagaggtca

SEQ ID NO: 91782 - DNA, 25 bp, Artificial
  Probe
gtgtggcaatgtctactgagtgaag

SEQ ID NO: 91783 - DNA, 25 bp, Artificial
  Probe
atgtctcagatcaagaggcttctca

SEQ ID NO: 91784 - DNA, 25 bp, Artificial
  Probe
ctgagtgaaggtgaagaggtcaaga

SEQ ID NO: 91785 - DNA, 25 bp, Artificial
  Probe
gactaacatcctggatcttctttcc

SEQ ID NO: 91786 - DNA, 25 bp, Artificial
  Probe
actgagtgaaggtgaagaggtcaag

SEQ ID NO: 91787 - DNA, 25 bp, Artificial
  Probe
ctcagatcaagaggcttctcagtga

SEQ ID NO: 91788 - DNA, 25 bp, Artificial
  Probe
tctcagatcaagaggcttctcagtg

SEQ ID NO: 91789 - DNA, 25 bp, Artificial
  Probe
gtctcagatcaagaggcttctcagt

SEQ ID NO: 91790 - DNA, 25 bp, Artificial
  Probe
tgtctcagatcaagaggcttctcag

SEQ ID NO: 91791 - DNA, 25 bp, Artificial
  Probe
gtgaaggtgaagaggtcaagatgga

SEQ ID NO: 91792 - DNA, 25 bp, Artificial
  Probe
agtgaaggtgaagaggtcaagatgg

SEQ ID NO: 91793 - DNA, 25 bp, Artificial
  Probe
ggatgtctcagatcaagaggcttct

SEQ ID NO: 91794 - DNA, 25 bp, Artificial
  Probe
aaggtgaagaggtcaagatggactc

SEQ ID NO: 91795 - DNA, 25 bp, Artificial
  Probe
gaaggtgaagaggtcaagatggact

SEQ ID NO: 91796 - DNA, 25 bp, Artificial
  Probe
ggcaatgtctactgagtgaaggtga

SEQ ID NO: 91797 - DNA, 25 bp, Artificial
  Probe
tcagatcaagaggcttctcagtgag

SEQ ID NO: 91798 - DNA, 25 bp, Artificial
  Probe
aagaggtcaagatggactccaagat

SEQ ID NO: 91799 - DNA, 25 bp, Artificial
  Probe
tgaaggtgaagaggtcaagatggac

SEQ ID NO: 91800 - DNA, 25 bp, Artificial
  Probe
tggcaatgtctactgagtgaaggtg

SEQ ID NO: 91801 - DNA, 25 bp, Artificial
  Probe
gtggcaatgtctactgagtgaaggt

SEQ ID NO: 91802 - DNA, 25 bp, Artificial
  Probe
tgtggcaatgtctactgagtgaagg

SEQ ID NO: 91803 - DNA, 25 bp, Artificial
  Probe
cccttctctgactaacatcctggat

SEQ ID NO: 91804 - DNA, 25 bp, Artificial
  Probe
agaggtcaagatggactccaagatc

SEQ ID NO: 91805 - DNA, 25 bp, Artificial
  Probe
tcagtgagaagaagacttgccagtg

SEQ ID NO: 91806 - DNA, 25 bp, Artificial
  Probe
tatccaaagggttgaaccagacaat

SEQ ID NO: 91807 - DNA, 25 bp, Artificial
  Probe
ctctgtctactactacttcattgcc

SEQ ID NO: 91808 - DNA, 25 bp, Artificial
  Probe
ttgattgttgtctctataccttcca

SEQ ID NO: 91809 - DNA, 25 bp, Artificial
  Probe
tctctgtctactactacttcattgc

SEQ ID NO: 91810 - DNA, 25 bp, Artificial
  Probe
tgtcgatcatctctgtctactacta

SEQ ID NO: 91811 - DNA, 25 bp, Artificial
  Probe
tcgatcatctctgtctactactact

SEQ ID NO: 91812 - DNA, 25 bp, Artificial
  Probe
gtcgatcatctctgtctactactac

SEQ ID NO: 91813 - DNA, 25 bp, Artificial
  Probe
tgattgttgtctctataccttccaa

SEQ ID NO: 91814 - DNA, 25 bp, Artificial
  Probe
ctgtcgatcatctctgtctactact

SEQ ID NO: 91815 - DNA, 25 bp, Artificial
  Probe
actgtcgatcatctctgtctactac

SEQ ID NO: 91816 - DNA, 25 bp, Artificial
  Probe
cactgtcgatcatctctgtctacta

SEQ ID NO: 91817 - DNA, 25 bp, Artificial
  Probe
attgattgttgtctctataccttcc

SEQ ID NO: 91818 - DNA, 25 bp, Artificial
  Probe
cgatcatctctgtctactactactt

SEQ ID NO: 91819 - DNA, 25 bp, Artificial
  Probe
tcatctctgtctactactacttcat

SEQ ID NO: 91820 - DNA, 25 bp, Artificial
  Probe
atcatctctgtctactactacttca

SEQ ID NO: 91821 - DNA, 25 bp, Artificial
  Probe
aatcatgtcatctacctgtaccgtt

SEQ ID NO: 91822 - DNA, 25 bp, Artificial
  Probe
ggaactcctggtactattctacaga

SEQ ID NO: 91823 - DNA, 25 bp, Artificial
  Probe
atcatgtcatctacctgtaccgttc

SEQ ID NO: 91824 - DNA, 25 bp, Artificial
  Probe
gaactcctggtactattctacagat

SEQ ID NO: 91825 - DNA, 25 bp, Artificial
  Probe
atgtcatctacctgtaccgttccta

SEQ ID NO: 91826 - DNA, 25 bp, Artificial
  Probe
caatcatgtcatctacctgtaccgt

SEQ ID NO: 91827 - DNA, 25 bp, Artificial
  Probe
atctctgtctactactacttcattg

SEQ ID NO: 91828 - DNA, 25 bp, Artificial
  Probe
catctctgtctactactacttcatt

SEQ ID NO: 91829 - DNA, 25 bp, Artificial
  Probe
aaggaactcctggtactattctaca

SEQ ID NO: 91830 - DNA, 25 bp, Artificial
  Probe
tccctgaaattgattgttgtctcta

SEQ ID NO: 91831 - DNA, 25 bp, Artificial
  Probe
aggaactcctggtactattctacag

SEQ ID NO: 91832 - DNA, 25 bp, Artificial
  Probe
tactactacttcattgcccgaaatc

SEQ ID NO: 91833 - DNA, 25 bp, Artificial
  Probe
ctactactacttcattgcccgaaat

SEQ ID NO: 91834 - DNA, 25 bp, Artificial
  Probe
atccctgaaattgattgttgtctct

SEQ ID NO: 91835 - DNA, 25 bp, Artificial
  Probe
gatcatctctgtctactactacttc

SEQ ID NO: 91836 - DNA, 25 bp, Artificial
  Probe
attcagagtgcctacaatcttcctg

SEQ ID NO: 91837 - DNA, 25 bp, Artificial
  Probe
tctgtctactactacttcattgccc

SEQ ID NO: 91838 - DNA, 25 bp, Artificial
  Probe
ccctgaaattgattgttgtctctat

SEQ ID NO: 91839 - DNA, 25 bp, Artificial
  Probe
tctctataccttccaaagacccttc

SEQ ID NO: 91840 - DNA, 25 bp, Artificial
  Probe
ttgttgtctctataccttccaaaga

SEQ ID NO: 91841 - DNA, 25 bp, Artificial
  Probe
tctactactacttcattgcccgaaa

SEQ ID NO: 91842 - DNA, 25 bp, Artificial
  Probe
aattgattgttgtctctataccttc

SEQ ID NO: 91843 - DNA, 25 bp, Artificial
  Probe
gatccctgaaattgattgttgtctc

SEQ ID NO: 91844 - DNA, 25 bp, Artificial
  Probe
taaggaactcctggtactattctac

SEQ ID NO: 91845 - DNA, 25 bp, Artificial
  Probe
ctgattcagagtgcctacaatcttc

SEQ ID NO: 91846 - DNA, 25 bp, Artificial
  Probe
ccaatcatgtcatctacctgtaccg

SEQ ID NO: 91847 - DNA, 25 bp, Artificial
  Probe
ctactacttcattgcccgaaatctg

SEQ ID NO: 91848 - DNA, 25 bp, Artificial
  Probe
aactcctggtactattctacagata

SEQ ID NO: 91849 - DNA, 25 bp, Artificial
  Probe
gattcagagtgcctacaatcttcct

SEQ ID NO: 91850 - DNA, 25 bp, Artificial
  Probe
tgtcatctacctgtaccgttcctac

SEQ ID NO: 91851 - DNA, 25 bp, Artificial
  Probe
attgttgtctctataccttccaaag

SEQ ID NO: 91852 - DNA, 25 bp, Artificial
  Probe
acatagtgaagaacatctcctacaa

SEQ ID NO: 91853 - DNA, 25 bp, Artificial
  Probe
aacatagtgaagaacatctcctaca

SEQ ID NO: 91854 - DNA, 25 bp, Artificial
  Probe
atagtgaagaacatctcctacaagt

SEQ ID NO: 91855 - DNA, 25 bp, Artificial
  Probe
catagtgaagaacatctcctacaag

SEQ ID NO: 91856 - DNA, 25 bp, Artificial
  Probe
agtgaagaacatctcctacaagtac

SEQ ID NO: 91857 - DNA, 25 bp, Artificial
  Probe
tagtgaagaacatctcctacaagta

SEQ ID NO: 91858 - DNA, 25 bp, Artificial
  Probe
gtgaagaacatctcctacaagtacc

SEQ ID NO: 91859 - DNA, 25 bp, Artificial
  Probe
tgaagaacatctcctacaagtaccg

SEQ ID NO: 91860 - DNA, 25 bp, Artificial
  Probe
gcaaacatagtgaagaacatctcct

SEQ ID NO: 91861 - DNA, 25 bp, Artificial
  Probe
gaagaacatctcctacaagtaccgc

SEQ ID NO: 91862 - DNA, 25 bp, Artificial
  Probe
aaacatagtgaagaacatctcctac

SEQ ID NO: 91863 - DNA, 25 bp, Artificial
  Probe
caaacatagtgaagaacatctccta

SEQ ID NO: 91864 - DNA, 25 bp, Artificial
  Probe
aggtgaaatgggtatcagagaaacg

SEQ ID NO: 91865 - DNA, 25 bp, Artificial
  Probe
ctgcaaacatagtgaagaacatctc

SEQ ID NO: 91866 - DNA, 25 bp, Artificial
  Probe
tgcaaacatagtgaagaacatctcc

SEQ ID NO: 91867 - DNA, 25 bp, Artificial
  Probe
ctgctgcaaacatagtgaagaacat

SEQ ID NO: 91868 - DNA, 25 bp, Artificial
  Probe
gctgcaaacatagtgaagaacatct

SEQ ID NO: 91869 - DNA, 25 bp, Artificial
  Probe
tgctgcaaacatagtgaagaacatc

SEQ ID NO: 91870 - DNA, 25 bp, Artificial
  Probe
gttatgtggacgcagcttataaacc

SEQ ID NO: 91871 - DNA, 25 bp, Artificial
  Probe
ggttatgtggacgcagcttataaac

SEQ ID NO: 91872 - DNA, 25 bp, Artificial
  Probe
ttatgtggacgcagcttataaacca

SEQ ID NO: 91873 - DNA, 25 bp, Artificial
  Probe
cggttatgtggacgcagcttataaa

SEQ ID NO: 91874 - DNA, 25 bp, Artificial
  Probe
gacttgttagcgcatctcatggtag

SEQ ID NO: 91875 - DNA, 25 bp, Artificial
  Probe
gctgctgcaaacatagtgaagaaca

SEQ ID NO: 91876 - DNA, 25 bp, Artificial
  Probe
aaccatcatggctgtggaatttgac

SEQ ID NO: 91877 - DNA, 25 bp, Artificial
  Probe
caaccatcatggctgtggaatttga

SEQ ID NO: 91878 - DNA, 25 bp, Artificial
  Probe
gacaaccatcatggctgtggaattt

SEQ ID NO: 91879 - DNA, 25 bp, Artificial
  Probe
acaaccatcatggctgtggaatttg

SEQ ID NO: 91880 - DNA, 25 bp, Artificial
  Probe
ggctgctgcaaacatagtgaagaac

SEQ ID NO: 91881 - DNA, 25 bp, Artificial
  Probe
catgggagggatgctaattcgacag

SEQ ID NO: 91882 - DNA, 25 bp, Artificial
  Probe
ggacttgttagcgcatctcatggta

SEQ ID NO: 91883 - DNA, 25 bp, Artificial
  Probe
cttgttagcgcatctcatggtagct

SEQ ID NO: 91884 - DNA, 25 bp, Artificial
  Probe
cttgttctggctgctgcaaacatag

SEQ ID NO: 91885 - DNA, 25 bp, Artificial
  Probe
tatggaaccatgggagggatgctaa

SEQ ID NO: 91886 - DNA, 25 bp, Artificial
  Probe
ggaaccatgggagggatgctaattc

SEQ ID NO: 91887 - DNA, 25 bp, Artificial
  Probe
aagatcaatgtcaaggtatgttcca

SEQ ID NO: 91888 - DNA, 25 bp, Artificial
  Probe
caagatcaatgtcaaggtatgttcc

SEQ ID NO: 91889 - DNA, 25 bp, Artificial
  Probe
ccaagatcaatgtcaaggtatgttc

SEQ ID NO: 91890 - DNA, 25 bp, Artificial
  Probe
tattcagttgtatgtccaatggtga

SEQ ID NO: 91891 - DNA, 25 bp, Artificial
  Probe
agatcaatgtcaaggtatgttccac

SEQ ID NO: 91892 - DNA, 25 bp, Artificial
  Probe
atattcagttgtatgtccaatggtg

SEQ ID NO: 91893 - DNA, 25 bp, Artificial
  Probe
ggagcagacactatattcagttgta

SEQ ID NO: 91894 - DNA, 25 bp, Artificial
  Probe
gcagacactatattcagttgtatgt

SEQ ID NO: 91895 - DNA, 25 bp, Artificial
  Probe
ctggagcagacactatattcagttg

SEQ ID NO: 91896 - DNA, 25 bp, Artificial
  Probe
agcagacactatattcagttgtatg

SEQ ID NO: 91897 - DNA, 25 bp, Artificial
  Probe
tggagcagacactatattcagttgt

SEQ ID NO: 91898 - DNA, 25 bp, Artificial
  Probe
aactgaagaccaagatcaatgtcaa

SEQ ID NO: 91899 - DNA, 25 bp, Artificial
  Probe
attcagttgtatgtccaatggtgac

SEQ ID NO: 91900 - DNA, 25 bp, Artificial
  Probe
ccaccaagtaggaagatattatcca

SEQ ID NO: 91901 - DNA, 25 bp, Artificial
  Probe
tccaccaagtaggaagatattatcc

SEQ ID NO: 91902 - DNA, 25 bp, Artificial
  Probe
gagcagacactatattcagttgtat

SEQ ID NO: 91903 - DNA, 25 bp, Artificial
  Probe
actgaagaccaagatcaatgtcaag

SEQ ID NO: 91904 - DNA, 25 bp, Artificial
  Probe
caactgaagaccaagatcaatgtca

SEQ ID NO: 91905 - DNA, 25 bp, Artificial
  Probe
cctggagcagacactatattcagtt

SEQ ID NO: 91906 - DNA, 25 bp, Artificial
  Probe
tatattcagttgtatgtccaatggt

SEQ ID NO: 91907 - DNA, 25 bp, Artificial
  Probe
aagaccaagatcaatgtcaaggtat

SEQ ID NO: 91908 - DNA, 25 bp, Artificial
  Probe
tattggtataaggtggtattgcagc

SEQ ID NO: 91909 - DNA, 25 bp, Artificial
  Probe
accaagatcaatgtcaaggtatgtt

SEQ ID NO: 91910 - DNA, 25 bp, Artificial
  Probe
gaagaccaagatcaatgtcaaggta

SEQ ID NO: 91911 - DNA, 25 bp, Artificial
  Probe
agaccaagatcaatgtcaaggtatg

SEQ ID NO: 91912 - DNA, 25 bp, Artificial
  Probe
acttgtggtatataggaatcctgga

SEQ ID NO: 91913 - DNA, 25 bp, Artificial
  Probe
ctgaagaccaagatcaatgtcaagg

SEQ ID NO: 91914 - DNA, 25 bp, Artificial
  Probe
aattactacattcagggagcacttt

SEQ ID NO: 91915 - DNA, 25 bp, Artificial
  Probe
gtagagtaaaggcagagtaagcaag

SEQ ID NO: 91916 - DNA, 25 bp, Artificial
  Probe
gaccaagatcaatgtcaaggtatgt

SEQ ID NO: 91917 - DNA, 25 bp, Artificial
  Probe
acactatattcagttgtatgtccaa

SEQ ID NO: 91918 - DNA, 25 bp, Artificial
  Probe
ttgtggtatataggaatcctggatc

SEQ ID NO: 91919 - DNA, 25 bp, Artificial
  Probe
cttgtggtatataggaatcctggat

SEQ ID NO: 91920 - DNA, 25 bp, Artificial
  Probe
atgtcaaggtatgttccaccaagta

SEQ ID NO: 91921 - DNA, 25 bp, Artificial
  Probe
aggcagagtaagcaagctaagttaa

SEQ ID NO: 91922 - DNA, 25 bp, Artificial
  Probe
aaggcagagtaagcaagctaagtta

SEQ ID NO: 91923 - DNA, 25 bp, Artificial
  Probe
cttgtagagtaaaggcagagtaagc

SEQ ID NO: 91924 - DNA, 25 bp, Artificial
  Probe
tgtagagtaaaggcagagtaagcaa

SEQ ID NO: 91925 - DNA, 25 bp, Artificial
  Probe
ttgtagagtaaaggcagagtaagca

SEQ ID NO: 91926 - DNA, 25 bp, Artificial
  Probe
tacttgtggtatataggaatcctgg

SEQ ID NO: 91927 - DNA, 25 bp, Artificial
  Probe
ctatattcagttgtatgtccaatgg

SEQ ID NO: 91928 - DNA, 25 bp, Artificial
  Probe
atattggtataaggtggtattgcag

SEQ ID NO: 91929 - DNA, 25 bp, Artificial
  Probe
atcagtagaagtattgttacacact

SEQ ID NO: 91930 - DNA, 25 bp, Artificial
  Probe
gatcaatgtcaaggtatgttccacc

SEQ ID NO: 91931 - DNA, 25 bp, Artificial
  Probe
caccaagtaggaagatattatccaa

SEQ ID NO: 91932 - DNA, 25 bp, Artificial
  Probe
aggtagtctgccatagatcaatgag

SEQ ID NO: 91933 - DNA, 25 bp, Artificial
  Probe
gaggtagtctgccatagatcaatga

SEQ ID NO: 91934 - DNA, 25 bp, Artificial
  Probe
tgaggtagtctgccatagatcaatg

SEQ ID NO: 91935 - DNA, 25 bp, Artificial
  Probe
gtgaggtagtctgccatagatcaat

SEQ ID NO: 91936 - DNA, 25 bp, Artificial
  Probe
ggtagtctgccatagatcaatgagg

SEQ ID NO: 91937 - DNA, 25 bp, Artificial
  Probe
tgtgaggtagtctgccatagatcaa

SEQ ID NO: 91938 - DNA, 25 bp, Artificial
  Probe
gtgtgtgaggtagtctgccatagat

SEQ ID NO: 91939 - DNA, 25 bp, Artificial
  Probe
tgtgtgaggtagtctgccatagatc

SEQ ID NO: 91940 - DNA, 25 bp, Artificial
  Probe
gtgtgaggtagtctgccatagatca

SEQ ID NO: 91941 - DNA, 25 bp, Artificial
  Probe
gctaggctagaaagggagatgacta

SEQ ID NO: 91942 - DNA, 25 bp, Artificial
  Probe
tagaaagggagatgactagggtgtg

SEQ ID NO: 91943 - DNA, 25 bp, Artificial
  Probe
ctaggctagaaagggagatgactag

SEQ ID NO: 91944 - DNA, 25 bp, Artificial
  Probe
agtggagactctagtaaattaagct

SEQ ID NO: 91945 - DNA, 25 bp, Artificial
  Probe
aaggagagcaatcaaaagtcaaaag

SEQ ID NO: 91946 - DNA, 25 bp, Artificial
  Probe
aaaggagagcaatcaaaagtcaaaa

SEQ ID NO: 91947 - DNA, 25 bp, Artificial
  Probe
aaaaggagagcaatcaaaagtcaaa

SEQ ID NO: 91948 - DNA, 25 bp, Artificial
  Probe
aagacaaaaggagagcaatcaaaag

SEQ ID NO: 91949 - DNA, 25 bp, Artificial
  Probe
caaaaggagagcaatcaaaagtcaa

SEQ ID NO: 91950 - DNA, 25 bp, Artificial
  Probe
caagacaaaaggagagcaatcaaaa

SEQ ID NO: 91951 - DNA, 25 bp, Artificial
  Probe
agacaaaaggagagcaatcaaaagt

SEQ ID NO: 91952 - DNA, 25 bp, Artificial
  Probe
tcaagacaaaaggagagcaatcaaa

SEQ ID NO: 91953 - DNA, 25 bp, Artificial
  Probe
ccctcccctaagataacctttattg

SEQ ID NO: 91954 - DNA, 25 bp, Artificial
  Probe
taggctagaaagggagatgactagg

SEQ ID NO: 91955 - DNA, 25 bp, Artificial
  Probe
accctcccctaagataacctttatt

SEQ ID NO: 91956 - DNA, 25 bp, Artificial
  Probe
taccctcccctaagataacctttat

SEQ ID NO: 91957 - DNA, 25 bp, Artificial
  Probe
gtgtgtgtgaggtagtctgccatag

SEQ ID NO: 91958 - DNA, 25 bp, Artificial
  Probe
caatcaaaagtcaaaaggctctgtg

SEQ ID NO: 91959 - DNA, 25 bp, Artificial
  Probe
acaaaaggagagcaatcaaaagtca

SEQ ID NO: 91960 - DNA, 25 bp, Artificial
  Probe
cctcccctaagataacctttattga

SEQ ID NO: 91961 - DNA, 25 bp, Artificial
  Probe
aggagagcaatcaaaagtcaaaagg

SEQ ID NO: 91962 - DNA, 25 bp, Artificial
  Probe
catggacaccacattgctactgtac

SEQ ID NO: 91963 - DNA, 25 bp, Artificial
  Probe
ctagaaagggagatgactagggtgt

SEQ ID NO: 91964 - DNA, 25 bp, Artificial
  Probe
ctactgtaccctcccctaagataac

SEQ ID NO: 91965 - DNA, 25 bp, Artificial
  Probe
gtaccctcccctaagataaccttta

SEQ ID NO: 91966 - DNA, 25 bp, Artificial
  Probe
tgtgtgtgaggtagtctgccataga

SEQ ID NO: 91967 - DNA, 25 bp, Artificial
  Probe
gtcaagacaaaaggagagcaatcaa

SEQ ID NO: 91968 - DNA, 25 bp, Artificial
  Probe
ccttctggagtggagactctagtaa

SEQ ID NO: 91969 - DNA, 25 bp, Artificial
  Probe
aatcaaaagtcaaaaggctctgtgg

SEQ ID NO: 91970 - DNA, 25 bp, Artificial
  Probe
gacaaaaggagagcaatcaaaagtc

SEQ ID NO: 91971 - DNA, 25 bp, Artificial
  Probe
gatgactagggtgtgtgtgaggtag

SEQ ID NO: 91972 - DNA, 25 bp, Artificial
  Probe
tactgtaccctcccctaagataacc

SEQ ID NO: 91973 - DNA, 25 bp, Artificial
  Probe
gcaatcaaaagtcaaaaggctctgt

SEQ ID NO: 91974 - DNA, 25 bp, Artificial
  Probe
agatgactagggtgtgtgtgaggta

SEQ ID NO: 91975 - DNA, 25 bp, Artificial
  Probe
tctggagtggagactctagtaaatt

SEQ ID NO: 91976 - DNA, 25 bp, Artificial
  Probe
ttctggagtggagactctagtaaat

SEQ ID NO: 91977 - DNA, 25 bp, Artificial
  Probe
agaattacaggctgatactctctcc

SEQ ID NO: 91978 - DNA, 25 bp, Artificial
  Probe
ttaagaagtgaatgtctcagcaagg

SEQ ID NO: 91979 - DNA, 25 bp, Artificial
  Probe
atctccagagtctctaggttatagg

SEQ ID NO: 91980 - DNA, 25 bp, Artificial
  Probe
ctccagagtctctaggttataggtg

SEQ ID NO: 91981 - DNA, 25 bp, Artificial
  Probe
tctccagagtctctaggttataggt

SEQ ID NO: 91982 - DNA, 25 bp, Artificial
  Probe
acatctccagagtctctaggttata

SEQ ID NO: 91983 - DNA, 25 bp, Artificial
  Probe
catctccagagtctctaggttatag

SEQ ID NO: 91984 - DNA, 25 bp, Artificial
  Probe
taagaagtgaatgtctcagcaaggt

SEQ ID NO: 91985 - DNA, 25 bp, Artificial
  Probe
gaattacaggctgatactctctccg

SEQ ID NO: 91986 - DNA, 25 bp, Artificial
  Probe
gacatctccagagtctctaggttat

SEQ ID NO: 91987 - DNA, 25 bp, Artificial
  Probe
aaccgagaattacaggctgatactc

SEQ ID NO: 91988 - DNA, 25 bp, Artificial
  Probe
aagtgaatgtctcagcaaggtgtaa

SEQ ID NO: 91989 - DNA, 25 bp, Artificial
  Probe
aaagcaaaccaataaactgtctcaa

SEQ ID NO: 91990 - DNA, 25 bp, Artificial
  Probe
aaaccaataaactgtctcaatgctg

SEQ ID NO: 91991 - DNA, 25 bp, Artificial
  Probe
caaaccaataaactgtctcaatgct

SEQ ID NO: 91992 - DNA, 25 bp, Artificial
  Probe
agcaaaccaataaactgtctcaatg

SEQ ID NO: 91993 - DNA, 25 bp, Artificial
  Probe
aagcaaaccaataaactgtctcaat

SEQ ID NO: 91994 - DNA, 25 bp, Artificial
  Probe
ctaccagtttacagacaaagacaag

SEQ ID NO: 91995 - DNA, 25 bp, Artificial
  Probe
taccagtttacagacaaagacaagg

SEQ ID NO: 91996 - DNA, 25 bp, Artificial
  Probe
gaatgtctcagcaaggtgtaaggtt

SEQ ID NO: 91997 - DNA, 25 bp, Artificial
  Probe
tctaccagtttacagacaaagacaa

SEQ ID NO: 91998 - DNA, 25 bp, Artificial
  Probe
atctaccagtttacagacaaagaca

SEQ ID NO: 91999 - DNA, 25 bp, Artificial
  Probe
tccagagtctctaggttataggtgc

SEQ ID NO: 92000 - DNA, 25 bp, Artificial
  Probe
agtgaatgtctcagcaaggtgtaag

SEQ ID NO: 92001 - DNA, 25 bp, Artificial
  Probe
gaagtgaatgtctcagcaaggtgta

SEQ ID NO: 92002 - DNA, 25 bp, Artificial
  Probe
taaagcgattatattgtcaccttcc

SEQ ID NO: 92003 - DNA, 25 bp, Artificial
  Probe
ccaataaactgtctcaatgctgaaa

SEQ ID NO: 92004 - DNA, 25 bp, Artificial
  Probe
aaagcgattatattgtcaccttccc

SEQ ID NO: 92005 - DNA, 25 bp, Artificial
  Probe
tttaagaagtgaatgtctcagcaag

SEQ ID NO: 92006 - DNA, 25 bp, Artificial
  Probe
ccagtttacagacaaagacaaggac

SEQ ID NO: 92007 - DNA, 25 bp, Artificial
  Probe
accaataaactgtctcaatgctgaa

SEQ ID NO: 92008 - DNA, 25 bp, Artificial
  Probe
aaccaataaactgtctcaatgctga

SEQ ID NO: 92009 - DNA, 25 bp, Artificial
  Probe
accgagaattacaggctgatactct

SEQ ID NO: 92010 - DNA, 25 bp, Artificial
  Probe
gaaaccgagaattacaggctgatac

SEQ ID NO: 92011 - DNA, 25 bp, Artificial
  Probe
agaaaccgagaattacaggctgata

SEQ ID NO: 92012 - DNA, 25 bp, Artificial
  Probe
acagccaaaggtaactatcatattt

SEQ ID NO: 92013 - DNA, 25 bp, Artificial
  Probe
cagtttacagacaaagacaaggacg

SEQ ID NO: 92014 - DNA, 25 bp, Artificial
  Probe
accagtttacagacaaagacaagga

SEQ ID NO: 92015 - DNA, 25 bp, Artificial
  Probe
aatgtctcagcaaggtgtaaggttg

SEQ ID NO: 92016 - DNA, 25 bp, Artificial
  Probe
aaaccgagaattacaggctgatact

SEQ ID NO: 92017 - DNA, 25 bp, Artificial
  Probe
gatctaccagtttacagacaaagac

SEQ ID NO: 92018 - DNA, 25 bp, Artificial
  Probe
aagaagtgaatgtctcagcaaggtg

SEQ ID NO: 92019 - DNA, 25 bp, Artificial
  Probe
taagtttgttgatgtcaagaggttt

SEQ ID NO: 92020 - DNA, 25 bp, Artificial
  Probe
ttaagtttgttgatgtcaagaggtt

SEQ ID NO: 92021 - DNA, 25 bp, Artificial
  Probe
tttaagtttgttgatgtcaagaggt

SEQ ID NO: 92022 - DNA, 25 bp, Artificial
  Probe
ttaaggaagccagtgtatatcagtg

SEQ ID NO: 92023 - DNA, 25 bp, Artificial
  Probe
cagtgtatatcagtggtcttagaac

SEQ ID NO: 92024 - DNA, 25 bp, Artificial
  Probe
tatcagtggtcttagaacaatgaac

SEQ ID NO: 92025 - DNA, 25 bp, Artificial
  Probe
agtgtatatcagtggtcttagaaca

SEQ ID NO: 92026 - DNA, 25 bp, Artificial
  Probe
atctccatcattatcatctcgacag

SEQ ID NO: 92027 - DNA, 25 bp, Artificial
  Probe
aatctccatcattatcatctcgaca

SEQ ID NO: 92028 - DNA, 25 bp, Artificial
  Probe
gtgtatatcagtggtcttagaacaa

SEQ ID NO: 92029 - DNA, 25 bp, Artificial
  Probe
atcagtggtcttagaacaatgaacc

SEQ ID NO: 92030 - DNA, 25 bp, Artificial
  Probe
ccagtgtatatcagtggtcttagaa

SEQ ID NO: 92031 - DNA, 25 bp, Artificial
  Probe
atatcagtggtcttagaacaatgaa

SEQ ID NO: 92032 - DNA, 25 bp, Artificial
  Probe
aagccagtgtatatcagtggtctta

SEQ ID NO: 92033 - DNA, 25 bp, Artificial
  Probe
tgtttaaggaagccagtgtatatca

SEQ ID NO: 92034 - DNA, 25 bp, Artificial
  Probe
tctccatcattatcatctcgacagg

SEQ ID NO: 92035 - DNA, 25 bp, Artificial
  Probe
tttaaggaagccagtgtatatcagt

SEQ ID NO: 92036 - DNA, 25 bp, Artificial
  Probe
gtatatcagtggtcttagaacaatg

SEQ ID NO: 92037 - DNA, 25 bp, Artificial
  Probe
ggttgtttaaggaagccagtgtata

SEQ ID NO: 92038 - DNA, 25 bp, Artificial
  Probe
gccagtgtatatcagtggtcttaga

SEQ ID NO: 92039 - DNA, 25 bp, Artificial
  Probe
agccagtgtatatcagtggtcttag

SEQ ID NO: 92040 - DNA, 25 bp, Artificial
  Probe
gtttaaggaagccagtgtatatcag

SEQ ID NO: 92041 - DNA, 25 bp, Artificial
  Probe
gttgtttaaggaagccagtgtatat

SEQ ID NO: 92042 - DNA, 25 bp, Artificial
  Probe
cagtggtcttagaacaatgaacctg

SEQ ID NO: 92043 - DNA, 25 bp, Artificial
  Probe
tatcttgcttggttgtttaaggaag

SEQ ID NO: 92044 - DNA, 25 bp, Artificial
  Probe
ccatcattatcatctcgacaggata

SEQ ID NO: 92045 - DNA, 25 bp, Artificial
  Probe
tcagtggtcttagaacaatgaacct

SEQ ID NO: 92046 - DNA, 25 bp, Artificial
  Probe
taaggaagccagtgtatatcagtgg

SEQ ID NO: 92047 - DNA, 25 bp, Artificial
  Probe
ttgtttaaggaagccagtgtatatc

SEQ ID NO: 92048 - DNA, 25 bp, Artificial
  Probe
atatcttgcttggttgtttaaggaa

SEQ ID NO: 92049 - DNA, 25 bp, Artificial
  Probe
tacatttgcttcaagaacacatcca

SEQ ID NO: 92050 - DNA, 25 bp, Artificial
  Probe
tatatcagtggtcttagaacaatga

SEQ ID NO: 92051 - DNA, 25 bp, Artificial
  Probe
gaagccagtgtatatcagtggtctt

SEQ ID NO: 92052 - DNA, 25 bp, Artificial
  Probe
tgtatatcagtggtcttagaacaat

SEQ ID NO: 92053 - DNA, 25 bp, Artificial
  Probe
tccatcattatcatctcgacaggat

SEQ ID NO: 92054 - DNA, 25 bp, Artificial
  Probe
tgaaatctccatcattatcatctcg

SEQ ID NO: 92055 - DNA, 25 bp, Artificial
  Probe
acatttgcttcaagaacacatccat

SEQ ID NO: 92056 - DNA, 25 bp, Artificial
  Probe
ttaaccgataagaagagtgaacttt

SEQ ID NO: 92057 - DNA, 25 bp, Artificial
  Probe
tttaaccgataagaagagtgaactt

SEQ ID NO: 92058 - DNA, 25 bp, Artificial
  Probe
gtacatttgcttcaagaacacatcc

SEQ ID NO: 92059 - DNA, 25 bp, Artificial
  Probe
agtggtcttagaacaatgaacctgg

SEQ ID NO: 92060 - DNA, 25 bp, Artificial
  Probe
ctccatcattatcatctcgacagga

SEQ ID NO: 92061 - DNA, 25 bp, Artificial
  Probe
aaccgataagaagagtgaactttat

SEQ ID NO: 92062 - DNA, 25 bp, Artificial
  Probe
aaatgtagtgctcttaccctgtaat

SEQ ID NO: 92063 - DNA, 25 bp, Artificial
  Probe
tgctcttaccctgtaatagtaactg

SEQ ID NO: 92064 - DNA, 25 bp, Artificial
  Probe
gtgctcttaccctgtaatagtaact

SEQ ID NO: 92065 - DNA, 25 bp, Artificial
  Probe
agtgctcttaccctgtaatagtaac

SEQ ID NO: 92066 - DNA, 25 bp, Artificial
  Probe
tgtagtgctcttaccctgtaatagt

SEQ ID NO: 92067 - DNA, 25 bp, Artificial
  Probe
ggatattggagaagatacagagcag

SEQ ID NO: 92068 - DNA, 25 bp, Artificial
  Probe
acattgactggatattggagaagat

SEQ ID NO: 92069 - DNA, 25 bp, Artificial
  Probe
gatattggagaagatacagagcagc

SEQ ID NO: 92070 - DNA, 25 bp, Artificial
  Probe
tggatattggagaagatacagagca

SEQ ID NO: 92071 - DNA, 25 bp, Artificial
  Probe
ttgactggatattggagaagataca

SEQ ID NO: 92072 - DNA, 25 bp, Artificial
  Probe
tacattgactggatattggagaaga

SEQ ID NO: 92073 - DNA, 25 bp, Artificial
  Probe
atattggagaagatacagagcagca

SEQ ID NO: 92074 - DNA, 25 bp, Artificial
  Probe
gtacattgactggatattggagaag

SEQ ID NO: 92075 - DNA, 25 bp, Artificial
  Probe
tattggagaagatacagagcagcaa

SEQ ID NO: 92076 - DNA, 25 bp, Artificial
  Probe
ctggatattggagaagatacagagc

SEQ ID NO: 92077 - DNA, 25 bp, Artificial
  Probe
tgagtacattgactggatattggag

SEQ ID NO: 92078 - DNA, 25 bp, Artificial
  Probe
ctgagtacattgactggatattgga

SEQ ID NO: 92079 - DNA, 25 bp, Artificial
  Probe
ttgctgagtacattgactggatatt

SEQ ID NO: 92080 - DNA, 25 bp, Artificial
  Probe
gagtacattgactggatattggaga

SEQ ID NO: 92081 - DNA, 25 bp, Artificial
  Probe
tgactggatattggagaagatacag

SEQ ID NO: 92082 - DNA, 25 bp, Artificial
  Probe
attgactggatattggagaagatac

SEQ ID NO: 92083 - DNA, 25 bp, Artificial
  Probe
cattgactggatattggagaagata

SEQ ID NO: 92084 - DNA, 25 bp, Artificial
  Probe
tgctgagtacattgactggatattg

SEQ ID NO: 92085 - DNA, 25 bp, Artificial
  Probe
gttgctgagtacattgactggatat

SEQ ID NO: 92086 - DNA, 25 bp, Artificial
  Probe
agtacattgactggatattggagaa

SEQ ID NO: 92087 - DNA, 25 bp, Artificial
  Probe
actggatattggagaagatacagag

SEQ ID NO: 92088 - DNA, 25 bp, Artificial
  Probe
gactggatattggagaagatacaga

SEQ ID NO: 92089 - DNA, 25 bp, Artificial
  Probe
gctgagtacattgactggatattgg

SEQ ID NO: 92090 - DNA, 25 bp, Artificial
  Probe
agttgctgagtacattgactggata

SEQ ID NO: 92091 - DNA, 25 bp, Artificial
  Probe
tatccaaagattaccaagcctgttt

SEQ ID NO: 92092 - DNA, 25 bp, Artificial
  Probe
gaactatccaaagattaccaagcct

SEQ ID NO: 92093 - DNA, 25 bp, Artificial
  Probe
agaactatccaaagattaccaagcc

SEQ ID NO: 92094 - DNA, 25 bp, Artificial
  Probe
gagaactatccaaagattaccaagc

SEQ ID NO: 92095 - DNA, 25 bp, Artificial
  Probe
attggagaagatacagagcagcaag

SEQ ID NO: 92096 - DNA, 25 bp, Artificial
  Probe
attaggtagttgtccttggaaccat

SEQ ID NO: 92097 - DNA, 25 bp, Artificial
  Probe
aggtagtgaaattaggtagttgtcc

SEQ ID NO: 92098 - DNA, 25 bp, Artificial
  Probe
ctatccaaagattaccaagcctgtt

SEQ ID NO: 92099 - DNA, 25 bp, Artificial
  Probe
aactatccaaagattaccaagcctg

SEQ ID NO: 92100 - DNA, 25 bp, Artificial
  Probe
aattaggtagttgtccttggaacca

SEQ ID NO: 92101 - DNA, 25 bp, Artificial
  Probe
aagttgctgagtacattgactggat

SEQ ID NO: 92102 - DNA, 25 bp, Artificial
  Probe
gccaatgagaactatccaaagatta

SEQ ID NO: 92103 - DNA, 25 bp, Artificial
  Probe
aacaggaacgccaatgagaactatc

SEQ ID NO: 92104 - DNA, 25 bp, Artificial
  Probe
cgccaatgagaactatccaaagatt

SEQ ID NO: 92105 - DNA, 25 bp, Artificial
  Probe
tgtctacctcgcatccttaccatag

SEQ ID NO: 92106 - DNA, 25 bp, Artificial
  Probe
caacaggaacgccaatgagaactat

SEQ ID NO: 92107 - DNA, 25 bp, Artificial
  Probe
actatccaaagattaccaagcctgt

SEQ ID NO: 92108 - DNA, 25 bp, Artificial
  Probe
tgagaactatccaaagattaccaag

SEQ ID NO: 92109 - DNA, 25 bp, Artificial
  Probe
catgtaactgttgactctggacctc

SEQ ID NO: 92110 - DNA, 25 bp, Artificial
  Probe
aatgtagacacagttgctaaagaca

SEQ ID NO: 92111 - DNA, 25 bp, Artificial
  Probe
ccaaatgtagacacagttgctaaag

SEQ ID NO: 92112 - DNA, 25 bp, Artificial
  Probe
gatgctcaatctgttactatctcgt

SEQ ID NO: 92113 - DNA, 25 bp, Artificial
  Probe
atgctcaatctgttactatctcgta

SEQ ID NO: 92114 - DNA, 25 bp, Artificial
  Probe
tgctcaatctgttactatctcgtaa

SEQ ID NO: 92115 - DNA, 25 bp, Artificial
  Probe
atcttcttcttcttcttcttcttct

SEQ ID NO: 92116 - DNA, 25 bp, Artificial
  Probe
tgatcttcttcttcttcttcttctt

SEQ ID NO: 92117 - DNA, 25 bp, Artificial
  Probe
ttgatcttcttcttcttcttcttct

SEQ ID NO: 92118 - DNA, 25 bp, Artificial
  Probe
agatgctcaatctgttactatctcg

SEQ ID NO: 92119 - DNA, 25 bp, Artificial
  Probe
cggaagatgctcaatctgttactat

SEQ ID NO: 92120 - DNA, 25 bp, Artificial
  Probe
ggaagatgctcaatctgttactatc

SEQ ID NO: 92121 - DNA, 25 bp, Artificial
  Probe
gatcttcttcttcttcttcttcttc

SEQ ID NO: 92122 - DNA, 25 bp, Artificial
  Probe
aagatgctcaatctgttactatctc

SEQ ID NO: 92123 - DNA, 25 bp, Artificial
  Probe
gaagatgctcaatctgttactatct

SEQ ID NO: 92124 - DNA, 25 bp, Artificial
  Probe
ggcagcataattgtccacctcttag

SEQ ID NO: 92125 - DNA, 25 bp, Artificial
  Probe
ctagtactgttcctgattctgtgag

SEQ ID NO: 92126 - DNA, 25 bp, Artificial
  Probe
tctagtactgttcctgattctgtga

SEQ ID NO: 92127 - DNA, 25 bp, Artificial
  Probe
gtctagtactgttcctgattctgtg

SEQ ID NO: 92128 - DNA, 25 bp, Artificial
  Probe
tgtatctactttcgactctttgtgg

SEQ ID NO: 92129 - DNA, 25 bp, Artificial
  Probe
actgtatctactttcgactctttgt

SEQ ID NO: 92130 - DNA, 25 bp, Artificial
  Probe
ggtctagtactgttcctgattctgt

SEQ ID NO: 92131 - DNA, 25 bp, Artificial
  Probe
ctgtatctactttcgactctttgtg

SEQ ID NO: 92132 - DNA, 25 bp, Artificial
  Probe
gtatctactttcgactctttgtggg

SEQ ID NO: 92133 - DNA, 25 bp, Artificial
  Probe
gctcaatctgttactatctcgtaaa

SEQ ID NO: 92134 - DNA, 25 bp, Artificial
  Probe
gcagcataattgtccacctcttagg

SEQ ID NO: 92135 - DNA, 25 bp, Artificial
  Probe
gttctgtcattcaacaagtactgta

SEQ ID NO: 92136 - DNA, 25 bp, Artificial
  Probe
ctcttaggtctagtactgttcctga

SEQ ID NO: 92137 - DNA, 25 bp, Artificial
  Probe
taggtctagtactgttcctgattct

SEQ ID NO: 92138 - DNA, 25 bp, Artificial
  Probe
tcttaggtctagtactgttcctgat

SEQ ID NO: 92139 - DNA, 25 bp, Artificial
  Probe
ctgtcattcaacaagtactgtatct

SEQ ID NO: 92140 - DNA, 25 bp, Artificial
  Probe
tctgtcattcaacaagtactgtatc

SEQ ID NO: 92141 - DNA, 25 bp, Artificial
  Probe
aggtctagtactgttcctgattctg

SEQ ID NO: 92142 - DNA, 25 bp, Artificial
  Probe
ttaggtctagtactgttcctgattc

SEQ ID NO: 92143 - DNA, 25 bp, Artificial
  Probe
cttaggtctagtactgttcctgatt

SEQ ID NO: 92144 - DNA, 25 bp, Artificial
  Probe
cctcttaggtctagtactgttcctg

SEQ ID NO: 92145 - DNA, 25 bp, Artificial
  Probe
tagtactgttcctgattctgtgagg

SEQ ID NO: 92146 - DNA, 25 bp, Artificial
  Probe
tactgtatctactttcgactctttg

SEQ ID NO: 92147 - DNA, 25 bp, Artificial
  Probe
gtactgtatctactttcgactcttt

SEQ ID NO: 92148 - DNA, 25 bp, Artificial
  Probe
tatttgcattgctcccaagaagaaa

SEQ ID NO: 92149 - DNA, 25 bp, Artificial
  Probe
ttatttgcattgctcccaagaagaa

SEQ ID NO: 92150 - DNA, 25 bp, Artificial
  Probe
ttctgtcattcaacaagtactgtat

SEQ ID NO: 92151 - DNA, 25 bp, Artificial
  Probe
tttgatcttcttcttcttcttcttc

SEQ ID NO: 92152 - DNA, 25 bp, Artificial
  Probe
gttatttgcattgctcccaagaaga

SEQ ID NO: 92153 - DNA, 25 bp, Artificial
  Probe
ctcaatctgttactatctcgtaaac

SEQ ID NO: 92154 - DNA, 25 bp, Artificial
  Probe
cttcttaaccaagcaccttgttctg

SEQ ID NO: 92155 - DNA, 25 bp, Artificial
  Probe
gtcttcttaaccaagcaccttgttc

SEQ ID NO: 92156 - DNA, 25 bp, Artificial
  Probe
tgtcattcaacaagtactgtatcta

SEQ ID NO: 92157 - DNA, 25 bp, Artificial
  Probe
ctacggcatgtaatggattcctaat

SEQ ID NO: 92158 - DNA, 25 bp, Artificial
  Probe
tacggcatgtaatggattcctaata

SEQ ID NO: 92159 - DNA, 25 bp, Artificial
  Probe
acggcatgtaatggattcctaatac

SEQ ID NO: 92160 - DNA, 25 bp, Artificial
  Probe
cggcatgtaatggattcctaatacc

SEQ ID NO: 92161 - DNA, 25 bp, Artificial
  Probe
tctacggcatgtaatggattcctaa

SEQ ID NO: 92162 - DNA, 25 bp, Artificial
  Probe
ttctacggcatgtaatggattccta

SEQ ID NO: 92163 - DNA, 25 bp, Artificial
  Probe
tatagtgtagagaagctgaagcatt

SEQ ID NO: 92164 - DNA, 25 bp, Artificial
  Probe
ttatagtgtagagaagctgaagcat

SEQ ID NO: 92165 - DNA, 25 bp, Artificial
  Probe
atagtgtagagaagctgaagcattc

SEQ ID NO: 92166 - DNA, 25 bp, Artificial
  Probe
accatataatacccaaagtgctcat

SEQ ID NO: 92167 - DNA, 25 bp, Artificial
  Probe
cttcctttacctgcctttcaaataa

SEQ ID NO: 92168 - DNA, 25 bp, Artificial
  Probe
taatacccaaagtgctcatcataga

SEQ ID NO: 92169 - DNA, 25 bp, Artificial
  Probe
ccatataatacccaaagtgctcatc

SEQ ID NO: 92170 - DNA, 25 bp, Artificial
  Probe
ccttcctttacctgcctttcaaata

SEQ ID NO: 92171 - DNA, 25 bp, Artificial
  Probe
tcatcatagagttctgccagtttac

SEQ ID NO: 92172 - DNA, 25 bp, Artificial
  Probe
catcatagagttctgccagtttaca

SEQ ID NO: 92173 - DNA, 25 bp, Artificial
  Probe
catataatacccaaagtgctcatca

SEQ ID NO: 92174 - DNA, 25 bp, Artificial
  Probe
ataatacccaaagtgctcatcatag

SEQ ID NO: 92175 - DNA, 25 bp, Artificial
  Probe
ttcctttacctgcctttcaaataaa

SEQ ID NO: 92176 - DNA, 25 bp, Artificial
  Probe
aatacccaaagtgctcatcatagag

SEQ ID NO: 92177 - DNA, 25 bp, Artificial
  Probe
ctcatcatagagttctgccagttta

SEQ ID NO: 92178 - DNA, 25 bp, Artificial
  Probe
ccttaagtgtatgcagagaatgtct

SEQ ID NO: 92179 - DNA, 25 bp, Artificial
  Probe
aagtgtatgcagagaatgtctaatt

SEQ ID NO: 92180 - DNA, 25 bp, Artificial
  Probe
acattcccatgactttccaaatact

SEQ ID NO: 92181 - DNA, 25 bp, Artificial
  Probe
cacattcccatgactttccaaatac

SEQ ID NO: 92182 - DNA, 25 bp, Artificial
  Probe
atcatagagttctgccagtttacag

SEQ ID NO: 92183 - DNA, 25 bp, Artificial
  Probe
cattcccatgactttccaaatactt

SEQ ID NO: 92184 - DNA, 25 bp, Artificial
  Probe
acacattcccatgactttccaaata

SEQ ID NO: 92185 - DNA, 25 bp, Artificial
  Probe
atagagttctgccagtttacagttc

SEQ ID NO: 92186 - DNA, 25 bp, Artificial
  Probe
atacccaaagtgctcatcatagagt

SEQ ID NO: 92187 - DNA, 25 bp, Artificial
  Probe
catagagttctgccagtttacagtt

SEQ ID NO: 92188 - DNA, 25 bp, Artificial
  Probe
ccaaagtgctcatcatagagttctg

SEQ ID NO: 92189 - DNA, 25 bp, Artificial
  Probe
tacccaaagtgctcatcatagagtt

SEQ ID NO: 92190 - DNA, 25 bp, Artificial
  Probe
attcccatgactttccaaatacttt

SEQ ID NO: 92191 - DNA, 25 bp, Artificial
  Probe
atataatacccaaagtgctcatcat

SEQ ID NO: 92192 - DNA, 25 bp, Artificial
  Probe
ggcatgtaatggattcctaataccc

SEQ ID NO: 92193 - DNA, 25 bp, Artificial
  Probe
tacaccatataatacccaaagtgct

SEQ ID NO: 92194 - DNA, 25 bp, Artificial
  Probe
caccatataatacccaaagtgctca

SEQ ID NO: 92195 - DNA, 25 bp, Artificial
  Probe
acaccatataatacccaaagtgctc

SEQ ID NO: 92196 - DNA, 25 bp, Artificial
  Probe
ttaagtgtatgcagagaatgtctaa

SEQ ID NO: 92197 - DNA, 25 bp, Artificial
  Probe
tagagttctgccagtttacagttct

SEQ ID NO: 92198 - DNA, 25 bp, Artificial
  Probe
tttatagtgtagagaagctgaagca

SEQ ID NO: 92199 - DNA, 25 bp, Artificial
  Probe
tcatagagttctgccagtttacagt

SEQ ID NO: 92200 - DNA, 25 bp, Artificial
  Probe
tagagaagctgaagcattcttacag

SEQ ID NO: 92201 - DNA, 25 bp, Artificial
  Probe
gtttatagtgtagagaagctgaagc

SEQ ID NO: 92202 - DNA, 25 bp, Artificial
  Probe
ttcattccaacgcactcattatcag

SEQ ID NO: 92203 - DNA, 25 bp, Artificial
  Probe
tttctcttaccttggactttctcac

SEQ ID NO: 92204 - DNA, 25 bp, Artificial
  Probe
gtttctcttaccttggactttctca

SEQ ID NO: 92205 - DNA, 25 bp, Artificial
  Probe
caacgcactcattatcaggattctg

SEQ ID NO: 92206 - DNA, 25 bp, Artificial
  Probe
gtctttgtcagttgatacctttgtg

SEQ ID NO: 92207 - DNA, 25 bp, Artificial
  Probe
ccaacgcactcattatcaggattct

SEQ ID NO: 92208 - DNA, 25 bp, Artificial
  Probe
acgcactcattatcaggattctgtt

SEQ ID NO: 92209 - DNA, 25 bp, Artificial
  Probe
aacgcactcattatcaggattctgt

SEQ ID NO: 92210 - DNA, 25 bp, Artificial
  Probe
tttcattccaacgcactcattatca

SEQ ID NO: 92211 - DNA, 25 bp, Artificial
  Probe
ttctcttaccttggactttctcaca

SEQ ID NO: 92212 - DNA, 25 bp, Artificial
  Probe
tcattccaacgcactcattatcagg

SEQ ID NO: 92213 - DNA, 25 bp, Artificial
  Probe
gtttcattccaacgcactcattatc

SEQ ID NO: 92214 - DNA, 25 bp, Artificial
  Probe
agtttctcttaccttggactttctc

SEQ ID NO: 92215 - DNA, 25 bp, Artificial
  Probe
attccaacgcactcattatcaggat

SEQ ID NO: 92216 - DNA, 25 bp, Artificial
  Probe
tctttgtcagttgatacctttgtgc

SEQ ID NO: 92217 - DNA, 25 bp, Artificial
  Probe
tctcttaccttggactttctcacac

SEQ ID NO: 92218 - DNA, 25 bp, Artificial
  Probe
ttacattcagtgtgctcaggtcaag

SEQ ID NO: 92219 - DNA, 25 bp, Artificial
  Probe
ttccaacgcactcattatcaggatt

SEQ ID NO: 92220 - DNA, 25 bp, Artificial
  Probe
tcttaccttggactttctcacacag

SEQ ID NO: 92221 - DNA, 25 bp, Artificial
  Probe
ctcttaccttggactttctcacaca

SEQ ID NO: 92222 - DNA, 25 bp, Artificial
  Probe
ggtttcattccaacgcactcattat

SEQ ID NO: 92223 - DNA, 25 bp, Artificial
  Probe
gactttctcacacagcaattctcac

SEQ ID NO: 92224 - DNA, 25 bp, Artificial
  Probe
cgcactcattatcaggattctgttt

SEQ ID NO: 92225 - DNA, 25 bp, Artificial
  Probe
gggataccacctgagtttacattca

SEQ ID NO: 92226 - DNA, 25 bp, Artificial
  Probe
tccaacgcactcattatcaggattc

SEQ ID NO: 92227 - DNA, 25 bp, Artificial
  Probe
atggtctttgtcagttgataccttt

SEQ ID NO: 92228 - DNA, 25 bp, Artificial
  Probe
cattccaacgcactcattatcagga

SEQ ID NO: 92229 - DNA, 25 bp, Artificial
  Probe
ggtctttgtcagttgatacctttgt

SEQ ID NO: 92230 - DNA, 25 bp, Artificial
  Probe
tggtctttgtcagttgatacctttg

SEQ ID NO: 92231 - DNA, 25 bp, Artificial
  Probe
cttggactttctcacacagcaattc

SEQ ID NO: 92232 - DNA, 25 bp, Artificial
  Probe
ttgggataccacctgagtttacatt

SEQ ID NO: 92233 - DNA, 25 bp, Artificial
  Probe
catggtctttgtcagttgatacctt

SEQ ID NO: 92234 - DNA, 25 bp, Artificial
  Probe
ttggactttctcacacagcaattct

SEQ ID NO: 92235 - DNA, 25 bp, Artificial
  Probe
tacattcagtgtgctcaggtcaagt

SEQ ID NO: 92236 - DNA, 25 bp, Artificial
  Probe
tttacattcagtgtgctcaggtcaa

SEQ ID NO: 92237 - DNA, 25 bp, Artificial
  Probe
tgggataccacctgagtttacattc

SEQ ID NO: 92238 - DNA, 25 bp, Artificial
  Probe
cttgggataccacctgagtttacat

SEQ ID NO: 92239 - DNA, 25 bp, Artificial
  Probe
ggactttctcacacagcaattctca

SEQ ID NO: 92240 - DNA, 25 bp, Artificial
  Probe
tggactttctcacacagcaattctc

SEQ ID NO: 92241 - DNA, 25 bp, Artificial
  Probe
ctttgtcagttgatacctttgtgca

SEQ ID NO: 92242 - DNA, 25 bp, Artificial
  Probe
attcagtgtgctcaggtcaagtctc

SEQ ID NO: 92243 - DNA, 25 bp, Artificial
  Probe
agtttacattcagtgtgctcaggtc

SEQ ID NO: 92244 - DNA, 25 bp, Artificial
  Probe
gagtttacattcagtgtgctcaggt

SEQ ID NO: 92245 - DNA, 25 bp, Artificial
  Probe
ctcttgggataccacctgagtttac

SEQ ID NO: 92246 - DNA, 25 bp, Artificial
  Probe
tctcttgggataccacctgagttta

SEQ ID NO: 92247 - DNA, 25 bp, Artificial
  Probe
gagatgaacaaggacctggagaatg

SEQ ID NO: 92248 - DNA, 25 bp, Artificial
  Probe
gaaagaaacagattggctgagaaac

SEQ ID NO: 92249 - DNA, 25 bp, Artificial
  Probe
agaaagaaacagattggctgagaaa

SEQ ID NO: 92250 - DNA, 25 bp, Artificial
  Probe
gagactatgtgtcccagtttgaatc

SEQ ID NO: 92251 - DNA, 25 bp, Artificial
  Probe
gagaaagaaacagattggctgagaa

SEQ ID NO: 92252 - DNA, 25 bp, Artificial
  Probe
agagactatgtgtcccagtttgaat

SEQ ID NO: 92253 - DNA, 25 bp, Artificial
  Probe
cctggagaatgtgaaacagaagatg

SEQ ID NO: 92254 - DNA, 25 bp, Artificial
  Probe
gatgaacaaggacctggagaatgtg

SEQ ID NO: 92255 - DNA, 25 bp, Artificial
  Probe
actatgtgtcccagtttgaatcctc

SEQ ID NO: 92256 - DNA, 25 bp, Artificial
  Probe
acctggagaatgtgaaacagaagat

SEQ ID NO: 92257 - DNA, 25 bp, Artificial
  Probe
agatgaacaaggacctggagaatgt

SEQ ID NO: 92258 - DNA, 25 bp, Artificial
  Probe
ctatgtgtcccagtttgaatcctcc

SEQ ID NO: 92259 - DNA, 25 bp, Artificial
  Probe
ctgaacctgaatctcctggacaact

SEQ ID NO: 92260 - DNA, 25 bp, Artificial
  Probe
ctggagaatgtgaaacagaagatgc

SEQ ID NO: 92261 - DNA, 25 bp, Artificial
  Probe
atgaacaaggacctggagaatgtga

SEQ ID NO: 92262 - DNA, 25 bp, Artificial
  Probe
aaagaaacagattggctgagaaacg

SEQ ID NO: 92263 - DNA, 25 bp, Artificial
  Probe
gactatgtgtcccagtttgaatcct

SEQ ID NO: 92264 - DNA, 25 bp, Artificial
  Probe
agactatgtgtcccagtttgaatcc

SEQ ID NO: 92265 - DNA, 25 bp, Artificial
  Probe
cagagactatgtgtcccagtttgaa

SEQ ID NO: 92266 - DNA, 25 bp, Artificial
  Probe
ccctgaattggctttcttacaataa

SEQ ID NO: 92267 - DNA, 25 bp, Artificial
  Probe
cgagatgaacaaggacctggagaat

SEQ ID NO: 92268 - DNA, 25 bp, Artificial
  Probe
agattggctgagaaacgagatgaac

SEQ ID NO: 92269 - DNA, 25 bp, Artificial
  Probe
gacctggagaatgtgaaacagaaga

SEQ ID NO: 92270 - DNA, 25 bp, Artificial
  Probe
attggctgagaaacgagatgaacaa

SEQ ID NO: 92271 - DNA, 25 bp, Artificial
  Probe
tgaacctgaatctcctggacaactg

SEQ ID NO: 92272 - DNA, 25 bp, Artificial
  Probe
tgaacaaggacctggagaatgtgaa

SEQ ID NO: 92273 - DNA, 25 bp, Artificial
  Probe
tgaattggctttcttacaataaacg

SEQ ID NO: 92274 - DNA, 25 bp, Artificial
  Probe
ctgagaaacgagatgaacaaggacc

SEQ ID NO: 92275 - DNA, 25 bp, Artificial
  Probe
gattggctgagaaacgagatgaaca

SEQ ID NO: 92276 - DNA, 25 bp, Artificial
  Probe
aaacagattggctgagaaacgagat

SEQ ID NO: 92277 - DNA, 25 bp, Artificial
  Probe
tatgtgtcccagtttgaatcctcca

SEQ ID NO: 92278 - DNA, 25 bp, Artificial
  Probe
gagaaacgagatgaacaaggacctg

SEQ ID NO: 92279 - DNA, 25 bp, Artificial
  Probe
gaacaaggacctggagaatgtgaaa

SEQ ID NO: 92280 - DNA, 25 bp, Artificial
  Probe
aagaaacagattggctgagaaacga

SEQ ID NO: 92281 - DNA, 25 bp, Artificial
  Probe
cctgaattggctttcttacaataaa

SEQ ID NO: 92282 - DNA, 25 bp, Artificial
  Probe
aacaaggacctggagaatgtgaaac

SEQ ID NO: 92283 - DNA, 25 bp, Artificial
  Probe
cagattggctgagaaacgagatgaa

SEQ ID NO: 92284 - DNA, 25 bp, Artificial
  Probe
tgagaaacgagatgaacaaggacct

SEQ ID NO: 92285 - DNA, 25 bp, Artificial
  Probe
ttggctgagaaacgagatgaacaag

SEQ ID NO: 92286 - DNA, 25 bp, Artificial
  Probe
ggacctggagaatgtgaaacagaag

SEQ ID NO: 92287 - DNA, 25 bp, Artificial
  Probe
gctgagaaacgagatgaacaaggac

SEQ ID NO: 92288 - DNA, 25 bp, Artificial
  Probe
gaaacagattggctgagaaacgaga

SEQ ID NO: 92289 - DNA, 25 bp, Artificial
  Probe
agaaacagattggctgagaaacgag

SEQ ID NO: 92290 - DNA, 25 bp, Artificial
  Probe
ggagaatgtgaaacagaagatgcag

SEQ ID NO: 92291 - DNA, 25 bp, Artificial
  Probe
aacagattggctgagaaacgagatg

SEQ ID NO: 92292 - DNA, 25 bp, Artificial
  Probe
ctcttcaacttcttcttctggttcg

SEQ ID NO: 92293 - DNA, 25 bp, Artificial
  Probe
gctcttcaacttcttcttctggttc

SEQ ID NO: 92294 - DNA, 25 bp, Artificial
  Probe
ctaccagctcttcaacttcttcttc

SEQ ID NO: 92295 - DNA, 25 bp, Artificial
  Probe
taccagctcttcaacttcttcttct

SEQ ID NO: 92296 - DNA, 25 bp, Artificial
  Probe
tcttcaacttcttcttctggttcgg

SEQ ID NO: 92297 - DNA, 25 bp, Artificial
  Probe
cctaccagctcttcaacttcttctt

SEQ ID NO: 92298 - DNA, 25 bp, Artificial
  Probe
agctcttcaacttcttcttctggtt

SEQ ID NO: 92299 - DNA, 25 bp, Artificial
  Probe
ctgaaccctgttatctacaccattt

SEQ ID NO: 92300 - DNA, 25 bp, Artificial
  Probe
caacttcttcttctggttcggctac

SEQ ID NO: 92301 - DNA, 25 bp, Artificial
  Probe
aacttcttcttctggttcggctact

SEQ ID NO: 92302 - DNA, 25 bp, Artificial
  Probe
tcaacttcttcttctggttcggcta

SEQ ID NO: 92303 - DNA, 25 bp, Artificial
  Probe
cagctcttcaacttcttcttctggt

SEQ ID NO: 92304 - DNA, 25 bp, Artificial
  Probe
accagctcttcaacttcttcttctg

SEQ ID NO: 92305 - DNA, 25 bp, Artificial
  Probe
taaagttctggctgagagggacata

SEQ ID NO: 92306 - DNA, 25 bp, Artificial
  Probe
tttgttaccatgtgtaaagttctgg

SEQ ID NO: 92307 - DNA, 25 bp, Artificial
  Probe
cttcaacttcttcttctggttcggc

SEQ ID NO: 92308 - DNA, 25 bp, Artificial
  Probe
gctgaaccctgttatctacaccatt

SEQ ID NO: 92309 - DNA, 25 bp, Artificial
  Probe
acttcttcttctggttcggctactg

SEQ ID NO: 92310 - DNA, 25 bp, Artificial
  Probe
ctggaccttcctgctctgtgtaata

SEQ ID NO: 92311 - DNA, 25 bp, Artificial
  Probe
ttatctacaccattttcaaccacga

SEQ ID NO: 92312 - DNA, 25 bp, Artificial
  Probe
aaagttctggctgagagggacatat

SEQ ID NO: 92313 - DNA, 25 bp, Artificial
  Probe
ttgttaccatgtgtaaagttctggc

SEQ ID NO: 92314 - DNA, 25 bp, Artificial
  Probe
tggaccttcctgctctgtgtaatac

SEQ ID NO: 92315 - DNA, 25 bp, Artificial
  Probe
ttcaacttcttcttctggttcggct

SEQ ID NO: 92316 - DNA, 25 bp, Artificial
  Probe
tatctacaccattttcaaccacgac

SEQ ID NO: 92317 - DNA, 25 bp, Artificial
  Probe
gttatctacaccattttcaaccacg

SEQ ID NO: 92318 - DNA, 25 bp, Artificial
  Probe
ctctgtgtaatacccagtttggagg

SEQ ID NO: 92319 - DNA, 25 bp, Artificial
  Probe
ttaccatgtgtaaagttctggctga

SEQ ID NO: 92320 - DNA, 25 bp, Artificial
  Probe
gttaccatgtgtaaagttctggctg

SEQ ID NO: 92321 - DNA, 25 bp, Artificial
  Probe
tgttaccatgtgtaaagttctggct

SEQ ID NO: 92322 - DNA, 25 bp, Artificial
  Probe
ttttgagaccttttgttaccatgtg

SEQ ID NO: 92323 - DNA, 25 bp, Artificial
  Probe
cttttgagaccttttgttaccatgt

SEQ ID NO: 92324 - DNA, 25 bp, Artificial
  Probe
cctgttatctacaccattttcaacc

SEQ ID NO: 92325 - DNA, 25 bp, Artificial
  Probe
ccctgttatctacaccattttcaac

SEQ ID NO: 92326 - DNA, 25 bp, Artificial
  Probe
accctgttatctacaccattttcaa

SEQ ID NO: 92327 - DNA, 25 bp, Artificial
  Probe
aaccctgttatctacaccattttca

SEQ ID NO: 92328 - DNA, 25 bp, Artificial
  Probe
tgaaccctgttatctacaccatttt

SEQ ID NO: 92329 - DNA, 25 bp, Artificial
  Probe
ttgagaccttttgttaccatgtgta

SEQ ID NO: 92330 - DNA, 25 bp, Artificial
  Probe
ggcttttgagaccttttgttaccat

SEQ ID NO: 92331 - DNA, 25 bp, Artificial
  Probe
tgttatctacaccattttcaaccac

SEQ ID NO: 92332 - DNA, 25 bp, Artificial
  Probe
gaaccctgttatctacaccattttc

SEQ ID NO: 92333 - DNA, 25 bp, Artificial
  Probe
taccatgtgtaaagttctggctgag

SEQ ID NO: 92334 - DNA, 25 bp, Artificial
  Probe
cctgctctgtgtaatacccagtttg

SEQ ID NO: 92335 - DNA, 25 bp, Artificial
  Probe
ctgttatctacaccattttcaacca

SEQ ID NO: 92336 - DNA, 25 bp, Artificial
  Probe
catgtgtaaagttctggctgagagg

SEQ ID NO: 92337 - DNA, 25 bp, Artificial
  Probe
cttctcaaccatgtcttactactgc

SEQ ID NO: 92338 - DNA, 25 bp, Artificial
  Probe
gcttctcaaccatgtcttactactg

SEQ ID NO: 92339 - DNA, 25 bp, Artificial
  Probe
ctgcttctcaaccatgtcttactac

SEQ ID NO: 92340 - DNA, 25 bp, Artificial
  Probe
tgcttctcaaccatgtcttactact

SEQ ID NO: 92341 - DNA, 25 bp, Artificial
  Probe
actgcttctcaaccatgtcttacta

SEQ ID NO: 92342 - DNA, 25 bp, Artificial
  Probe
gaaggaggtatatgtcacgctgaag

SEQ ID NO: 92343 - DNA, 25 bp, Artificial
  Probe
ttctcaaccatgtcttactactgca

SEQ ID NO: 92344 - DNA, 25 bp, Artificial
  Probe
aaaggaaggaaagaatctaaccaaa

SEQ ID NO: 92345 - DNA, 25 bp, Artificial
  Probe
tctcaaccatgtcttactactgcat

SEQ ID NO: 92346 - DNA, 25 bp, Artificial
  Probe
cactgcttctcaaccatgtcttact

SEQ ID NO: 92347 - DNA, 25 bp, Artificial
  Probe
tccatgctctatactaccctgatta

SEQ ID NO: 92348 - DNA, 25 bp, Artificial
  Probe
aacactgcttctcaaccatgtctta

SEQ ID NO: 92349 - DNA, 25 bp, Artificial
  Probe
tgctctatactaccctgattattct

SEQ ID NO: 92350 - DNA, 25 bp, Artificial
  Probe
ctccatgctctatactaccctgatt

SEQ ID NO: 92351 - DNA, 25 bp, Artificial
  Probe
ccatgctctatactaccctgattat

SEQ ID NO: 92352 - DNA, 25 bp, Artificial
  Probe
taaaggaaggaaagaatctaaccaa

SEQ ID NO: 92353 - DNA, 25 bp, Artificial
  Probe
gctctatactaccctgattattctc

SEQ ID NO: 92354 - DNA, 25 bp, Artificial
  Probe
ataaaggaaggaaagaatctaacca

SEQ ID NO: 92355 - DNA, 25 bp, Artificial
  Probe
acactgcttctcaaccatgtcttac

SEQ ID NO: 92356 - DNA, 25 bp, Artificial
  Probe
tctcaataaaggaaggaaagaatct

SEQ ID NO: 92357 - DNA, 25 bp, Artificial
  Probe
tctctcaataaaggaaggaaagaat

SEQ ID NO: 92358 - DNA, 25 bp, Artificial
  Probe
attctctcaataaaggaaggaaaga

SEQ ID NO: 92359 - DNA, 25 bp, Artificial
  Probe
atgctctatactaccctgattattc

SEQ ID NO: 92360 - DNA, 25 bp, Artificial
  Probe
ctctcaataaaggaaggaaagaatc

SEQ ID NO: 92361 - DNA, 25 bp, Artificial
  Probe
aattcgggctatgtaaacagaatgg

SEQ ID NO: 92362 - DNA, 25 bp, Artificial
  Probe
aaggaggtatatgtcacgctgaagg

SEQ ID NO: 92363 - DNA, 25 bp, Artificial
  Probe
ggaaggaggtatatgtcacgctgaa

SEQ ID NO: 92364 - DNA, 25 bp, Artificial
  Probe
cctccatgctctatactaccctgat

SEQ ID NO: 92365 - DNA, 25 bp, Artificial
  Probe
gaatacacagcggaagagattgcta

SEQ ID NO: 92366 - DNA, 25 bp, Artificial
  Probe
catgctctatactaccctgattatt

SEQ ID NO: 92367 - DNA, 25 bp, Artificial
  Probe
gtggaatacacagcggaagagattg

SEQ ID NO: 92368 - DNA, 25 bp, Artificial
  Probe
aatacacagcggaagagattgctac

SEQ ID NO: 92369 - DNA, 25 bp, Artificial
  Probe
aataaaggaaggaaagaatctaacc

SEQ ID NO: 92370 - DNA, 25 bp, Artificial
  Probe
caacactgcttctcaaccatgtctt

SEQ ID NO: 92371 - DNA, 25 bp, Artificial
  Probe
ctggaaggaggtatatgtcacgctg

SEQ ID NO: 92372 - DNA, 25 bp, Artificial
  Probe
ctcaggaactatgcctctcgtatcc

SEQ ID NO: 92373 - DNA, 25 bp, Artificial
  Probe
aaggaaggaaagaatctaaccaaaa

SEQ ID NO: 92374 - DNA, 25 bp, Artificial
  Probe
accctgattattctctcaataaagg

SEQ ID NO: 92375 - DNA, 25 bp, Artificial
  Probe
ctcaataaaggaaggaaagaatcta

SEQ ID NO: 92376 - DNA, 25 bp, Artificial
  Probe
gaagagattgctacctggaaggagg

SEQ ID NO: 92377 - DNA, 25 bp, Artificial
  Probe
ggaagagattgctacctggaaggag

SEQ ID NO: 92378 - DNA, 25 bp, Artificial
  Probe
caggaactatgcctctcgtatccag

SEQ ID NO: 92379 - DNA, 25 bp, Artificial
  Probe
aagatcaaacctaccagcctgtgta

SEQ ID NO: 92380 - DNA, 25 bp, Artificial
  Probe
tctatactaccctgattattctctc

SEQ ID NO: 92381 - DNA, 25 bp, Artificial
  Probe
ctctatactaccctgattattctct

SEQ ID NO: 92382 - DNA, 25 bp, Artificial
  Probe
gagtcacacacacatacagagatat

SEQ ID NO: 92383 - DNA, 25 bp, Artificial
  Probe
agagtcacacacacatacagagata

SEQ ID NO: 92384 - DNA, 25 bp, Artificial
  Probe
cagagtcacacacacatacagagat

SEQ ID NO: 92385 - DNA, 25 bp, Artificial
  Probe
agtcacacacacatacagagatatc

SEQ ID NO: 92386 - DNA, 25 bp, Artificial
  Probe
acagagtcacacacacatacagaga

SEQ ID NO: 92387 - DNA, 25 bp, Artificial
  Probe
tcacagagtcacacacacatacaga

SEQ ID NO: 92388 - DNA, 25 bp, Artificial
  Probe
ctcacagagtcacacacacatacag

SEQ ID NO: 92389 - DNA, 25 bp, Artificial
  Probe
ttagttcttgttcttctttcggtga

SEQ ID NO: 92390 - DNA, 25 bp, Artificial
  Probe
tttagttcttgttcttctttcggtg

SEQ ID NO: 92391 - DNA, 25 bp, Artificial
  Probe
ttgagaccacatcttaataactaca

SEQ ID NO: 92392 - DNA, 25 bp, Artificial
  Probe
gacttcactttagcagaggagattt

SEQ ID NO: 92393 - DNA, 25 bp, Artificial
  Probe
tagttcttgttcttctttcggtgag

SEQ ID NO: 92394 - DNA, 25 bp, Artificial
  Probe
taaccctttgcttgaaattgatgtc

SEQ ID NO: 92395 - DNA, 25 bp, Artificial
  Probe
ctaaccctttgcttgaaattgatgt

SEQ ID NO: 92396 - DNA, 25 bp, Artificial
  Probe
actaaccctttgcttgaaattgatg

SEQ ID NO: 92397 - DNA, 25 bp, Artificial
  Probe
cactaaccctttgcttgaaattgat

SEQ ID NO: 92398 - DNA, 25 bp, Artificial
  Probe
atttagttcttgttcttctttcggt

SEQ ID NO: 92399 - DNA, 25 bp, Artificial
  Probe
taagaaaccctgagttatgatgacc

SEQ ID NO: 92400 - DNA, 25 bp, Artificial
  Probe
tgagaccacatcttaataactacat

SEQ ID NO: 92401 - DNA, 25 bp, Artificial
  Probe
ggttctggaaagcaatttagttctt

SEQ ID NO: 92402 - DNA, 25 bp, Artificial
  Probe
ctagacagcctgatgtgatggaatt

SEQ ID NO: 92403 - DNA, 25 bp, Artificial
  Probe
atgacttcactttagcagaggagat

SEQ ID NO: 92404 - DNA, 25 bp, Artificial
  Probe
tggttctggaaagcaatttagttct

SEQ ID NO: 92405 - DNA, 25 bp, Artificial
  Probe
ttggttctggaaagcaatttagttc

SEQ ID NO: 92406 - DNA, 25 bp, Artificial
  Probe
cttggttctggaaagcaatttagtt

SEQ ID NO: 92407 - DNA, 25 bp, Artificial
  Probe
ataaccgaagactaagaaagtgtgt

SEQ ID NO: 92408 - DNA, 25 bp, Artificial
  Probe
tgacttcactttagcagaggagatt

SEQ ID NO: 92409 - DNA, 25 bp, Artificial
  Probe
tggaaagcaatttagttcttgttct

SEQ ID NO: 92410 - DNA, 25 bp, Artificial
  Probe
tctggaaagcaatttagttcttgtt

SEQ ID NO: 92411 - DNA, 25 bp, Artificial
  Probe
ttctggaaagcaatttagttcttgt

SEQ ID NO: 92412 - DNA, 25 bp, Artificial
  Probe
taaccgaagactaagaaagtgtgtg

SEQ ID NO: 92413 - DNA, 25 bp, Artificial
  Probe
ctggaaagcaatttagttcttgttc

SEQ ID NO: 92414 - DNA, 25 bp, Artificial
  Probe
gttctggaaagcaatttagttcttg

SEQ ID NO: 92415 - DNA, 25 bp, Artificial
  Probe
cctttgcttgaaattgatgtcacaa

SEQ ID NO: 92416 - DNA, 25 bp, Artificial
  Probe
tcactaaccctttgcttgaaattga

SEQ ID NO: 92417 - DNA, 25 bp, Artificial
  Probe
ataagaaaccctgagttatgatgac

SEQ ID NO: 92418 - DNA, 25 bp, Artificial
  Probe
ggaaagcaatttagttcttgttctt

SEQ ID NO: 92419 - DNA, 25 bp, Artificial
  Probe
aatttagttcttgttcttctttcgg

SEQ ID NO: 92420 - DNA, 25 bp, Artificial
  Probe
ctaagaaagtgtgtgagcccagtat

SEQ ID NO: 92421 - DNA, 25 bp, Artificial
  Probe
tataaccgaagactaagaaagtgtg

SEQ ID NO: 92422 - DNA, 25 bp, Artificial
  Probe
ccttggttctggaaagcaatttagt

SEQ ID NO: 92423 - DNA, 25 bp, Artificial
  Probe
aaccctttgcttgaaattgatgtca

SEQ ID NO: 92424 - DNA, 25 bp, Artificial
  Probe
ttatgatgacccagctaaacaagtt

SEQ ID NO: 92425 - DNA, 25 bp, Artificial
  Probe
aagaaaccctgagttatgatgaccc

SEQ ID NO: 92426 - DNA, 25 bp, Artificial
  Probe
taagaaagtgtgtgagcccagtatg

SEQ ID NO: 92427 - DNA, 25 bp, Artificial
  Probe
ctatgtagactactgcttctcaagg

SEQ ID NO: 92428 - DNA, 25 bp, Artificial
  Probe
cactatgtagactactgcttctcaa

SEQ ID NO: 92429 - DNA, 25 bp, Artificial
  Probe
actatgtagactactgcttctcaag

SEQ ID NO: 92430 - DNA, 25 bp, Artificial
  Probe
ccactatgtagactactgcttctca

SEQ ID NO: 92431 - DNA, 25 bp, Artificial
  Probe
tatgtagactactgcttctcaaggc

SEQ ID NO: 92432 - DNA, 25 bp, Artificial
  Probe
ctgcgtgctttatttatggcttata

SEQ ID NO: 92433 - DNA, 25 bp, Artificial
  Probe
atttatggtttctgcgtgctttatt

SEQ ID NO: 92434 - DNA, 25 bp, Artificial
  Probe
ataaatgaccaggagaaaggacaaa

SEQ ID NO: 92435 - DNA, 25 bp, Artificial
  Probe
gtataaatgaccaggagaaaggaca

SEQ ID NO: 92436 - DNA, 25 bp, Artificial
  Probe
tttatggtttctgcgtgctttattt

SEQ ID NO: 92437 - DNA, 25 bp, Artificial
  Probe
ttatggtttctgcgtgctttattta

SEQ ID NO: 92438 - DNA, 25 bp, Artificial
  Probe
tatggtttctgcgtgctttatttat

SEQ ID NO: 92439 - DNA, 25 bp, Artificial
  Probe
tataaatgaccaggagaaaggacaa

SEQ ID NO: 92440 - DNA, 25 bp, Artificial
  Probe
atggtttctgcgtgctttatttatg

SEQ ID NO: 92441 - DNA, 25 bp, Artificial
  Probe
aatttatggtttctgcgtgctttat

SEQ ID NO: 92442 - DNA, 25 bp, Artificial
  Probe
atttaatttatggtttctgcgtgct

SEQ ID NO: 92443 - DNA, 25 bp, Artificial
  Probe
gatttaatttatggtttctgcgtgc

SEQ ID NO: 92444 - DNA, 25 bp, Artificial
  Probe
ttaatttatggtttctgcgtgcttt

SEQ ID NO: 92445 - DNA, 25 bp, Artificial
  Probe
tttaatttatggtttctgcgtgctt

SEQ ID NO: 92446 - DNA, 25 bp, Artificial
  Probe
tctcgggtctgatttaatttatggt

SEQ ID NO: 92447 - DNA, 25 bp, Artificial
  Probe
tctaaatagggaagggaatggaaat

SEQ ID NO: 92448 - DNA, 25 bp, Artificial
  Probe
taatttatggtttctgcgtgcttta

SEQ ID NO: 92449 - DNA, 25 bp, Artificial
  Probe
gtctcgggtctgatttaatttatgg

SEQ ID NO: 92450 - DNA, 25 bp, Artificial
  Probe
ggtctcgggtctgatttaatttatg

SEQ ID NO: 92451 - DNA, 25 bp, Artificial
  Probe
aggtctcgggtctgatttaatttat

SEQ ID NO: 92452 - DNA, 25 bp, Artificial
  Probe
ctgtcattctaaatagggaagggaa

SEQ ID NO: 92453 - DNA, 25 bp, Artificial
  Probe
tctgtcattctaaatagggaaggga

SEQ ID NO: 92454 - DNA, 25 bp, Artificial
  Probe
atctgtcattctaaatagggaaggg

SEQ ID NO: 92455 - DNA, 25 bp, Artificial
  Probe
ttctaaatagggaagggaatggaaa

SEQ ID NO: 92456 - DNA, 25 bp, Artificial
  Probe
tctgcgtgctttatttatggcttat

SEQ ID NO: 92457 - DNA, 25 bp, Artificial
  Probe
ctcgggtctgatttaatttatggtt

SEQ ID NO: 92458 - DNA, 25 bp, Artificial
  Probe
ttctgcgtgctttatttatggctta

SEQ ID NO: 92459 - DNA, 25 bp, Artificial
  Probe
tgatttaatttatggtttctgcgtg

SEQ ID NO: 92460 - DNA, 25 bp, Artificial
  Probe
tcgggtctgatttaatttatggttt

SEQ ID NO: 92461 - DNA, 25 bp, Artificial
  Probe
ctgatttaatttatggtttctgcgt

SEQ ID NO: 92462 - DNA, 25 bp, Artificial
  Probe
cgggtctgatttaatttatggtttc

SEQ ID NO: 92463 - DNA, 25 bp, Artificial
  Probe
ttcccactatgtagactactgcttc

SEQ ID NO: 92464 - DNA, 25 bp, Artificial
  Probe
tctgatttaatttatggtttctgcg

SEQ ID NO: 92465 - DNA, 25 bp, Artificial
  Probe
gcttataaatgtgtgttctggctag

SEQ ID NO: 92466 - DNA, 25 bp, Artificial
  Probe
tttctgcgtgctttatttatggctt

SEQ ID NO: 92467 - DNA, 25 bp, Artificial
  Probe
caggtctcgggtctgatttaattta

SEQ ID NO: 92468 - DNA, 25 bp, Artificial
  Probe
gttcccactatgtagactactgctt

SEQ ID NO: 92469 - DNA, 25 bp, Artificial
  Probe
tatggcttataaatgtgtgttctgg

SEQ ID NO: 92470 - DNA, 25 bp, Artificial
  Probe
ctaaatagggaagggaatggaaata

SEQ ID NO: 92471 - DNA, 25 bp, Artificial
  Probe
ggcttataaatgtgtgttctggcta

SEQ ID NO: 92472 - DNA, 25 bp, Artificial
  Probe
attctgtagcccaaatatagcgttc

SEQ ID NO: 92473 - DNA, 25 bp, Artificial
  Probe
tattctgtagcccaaatatagcgtt

SEQ ID NO: 92474 - DNA, 25 bp, Artificial
  Probe
ttattctgtagcccaaatatagcgt

SEQ ID NO: 92475 - DNA, 25 bp, Artificial
  Probe
tttattctgtagcccaaatatagcg

SEQ ID NO: 92476 - DNA, 25 bp, Artificial
  Probe
gctttgcttgctctcaatgattatt

SEQ ID NO: 92477 - DNA, 25 bp, Artificial
  Probe
ctttgcttgctctcaatgattattt

SEQ ID NO: 92478 - DNA, 25 bp, Artificial
  Probe
gcaaagtatcctgagaaagaactag

SEQ ID NO: 92479 - DNA, 25 bp, Artificial
  Probe
ctgtagcccaaatatagcgttccta

SEQ ID NO: 92480 - DNA, 25 bp, Artificial
  Probe
ttctgtagcccaaatatagcgttcc

SEQ ID NO: 92481 - DNA, 25 bp, Artificial
  Probe
gagacctgaacatcaacatgacctc

SEQ ID NO: 92482 - DNA, 25 bp, Artificial
  Probe
caaagtatcctgagaaagaactagg

SEQ ID NO: 92483 - DNA, 25 bp, Artificial
  Probe
cccaaatatagcgttcctaccaaca

SEQ ID NO: 92484 - DNA, 25 bp, Artificial
  Probe
gaggagacctgaacatcaacatgac

SEQ ID NO: 92485 - DNA, 25 bp, Artificial
  Probe
ttcactacaatggaagcaatcattt

SEQ ID NO: 92486 - DNA, 25 bp, Artificial
  Probe
tttcactacaatggaagcaatcatt

SEQ ID NO: 92487 - DNA, 25 bp, Artificial
  Probe
tgcaaagtatcctgagaaagaacta

SEQ ID NO: 92488 - DNA, 25 bp, Artificial
  Probe
tagcccaaatatagcgttcctacca

SEQ ID NO: 92489 - DNA, 25 bp, Artificial
  Probe
tctgtagcccaaatatagcgttcct

SEQ ID NO: 92490 - DNA, 25 bp, Artificial
  Probe
ttttcactacaatggaagcaatcat

SEQ ID NO: 92491 - DNA, 25 bp, Artificial
  Probe
attttcactacaatggaagcaatca

SEQ ID NO: 92492 - DNA, 25 bp, Artificial
  Probe
tgcttgctctcaatgattattttca

SEQ ID NO: 92493 - DNA, 25 bp, Artificial
  Probe
gcttgctctcaatgattattttcac

SEQ ID NO: 92494 - DNA, 25 bp, Artificial
  Probe
ttgcttgctctcaatgattattttc

SEQ ID NO: 92495 - DNA, 25 bp, Artificial
  Probe
agcccaaatatagcgttcctaccaa

SEQ ID NO: 92496 - DNA, 25 bp, Artificial
  Probe
tgtagcccaaatatagcgttcctac

SEQ ID NO: 92497 - DNA, 25 bp, Artificial
  Probe
gcccaaatatagcgttcctaccaac

SEQ ID NO: 92498 - DNA, 25 bp, Artificial
  Probe
agacctgaacatcaacatgacctcc

SEQ ID NO: 92499 - DNA, 25 bp, Artificial
  Probe
ggagacctgaacatcaacatgacct

SEQ ID NO: 92500 - DNA, 25 bp, Artificial
  Probe
tttgcttgctctcaatgattatttt

SEQ ID NO: 92501 - DNA, 25 bp, Artificial
  Probe
agctttgcttgctctcaatgattat

SEQ ID NO: 92502 - DNA, 25 bp, Artificial
  Probe
tattttcactacaatggaagcaatc

SEQ ID NO: 92503 - DNA, 25 bp, Artificial
  Probe
gattattttcactacaatggaagca

SEQ ID NO: 92504 - DNA, 25 bp, Artificial
  Probe
aggagacctgaacatcaacatgacc

SEQ ID NO: 92505 - DNA, 25 bp, Artificial
  Probe
tgattattttcactacaatggaagc

SEQ ID NO: 92506 - DNA, 25 bp, Artificial
  Probe
cttgctctcaatgattattttcact

SEQ ID NO: 92507 - DNA, 25 bp, Artificial
  Probe
gtagcccaaatatagcgttcctacc

SEQ ID NO: 92508 - DNA, 25 bp, Artificial
  Probe
ttattttcactacaatggaagcaat

SEQ ID NO: 92509 - DNA, 25 bp, Artificial
  Probe
attattttcactacaatggaagcaa

SEQ ID NO: 92510 - DNA, 25 bp, Artificial
  Probe
caattcctgttaccctcacacaagc

SEQ ID NO: 92511 - DNA, 25 bp, Artificial
  Probe
gcaattcctgttaccctcacacaag

SEQ ID NO: 92512 - DNA, 25 bp, Artificial
  Probe
gctctcaatgattattttcactaca

SEQ ID NO: 92513 - DNA, 25 bp, Artificial
  Probe
tgctctcaatgattattttcactac

SEQ ID NO: 92514 - DNA, 25 bp, Artificial
  Probe
ttttattctgtagcccaaatatagc

SEQ ID NO: 92515 - DNA, 25 bp, Artificial
  Probe
tcactacaatggaagcaatcatttt

SEQ ID NO: 92516 - DNA, 25 bp, Artificial
  Probe
gctagatgaagctgtggagagaagt

SEQ ID NO: 92517 - DNA, 25 bp, Artificial
  Probe
ctacagagtatgactgagacactgc

SEQ ID NO: 92518 - DNA, 25 bp, Artificial
  Probe
gctacagagtatgactgagacactg

SEQ ID NO: 92519 - DNA, 25 bp, Artificial
  Probe
ggttaatgtccacatagaagctagg

SEQ ID NO: 92520 - DNA, 25 bp, Artificial
  Probe
ctgcaatggttcaatcaatctgtaa

SEQ ID NO: 92521 - DNA, 25 bp, Artificial
  Probe
tctgcaatggttcaatcaatctgta

SEQ ID NO: 92522 - DNA, 25 bp, Artificial
  Probe
tttctttaacctcctacttctgctg

SEQ ID NO: 92523 - DNA, 25 bp, Artificial
  Probe
gcaatggttcaatcaatctgtaaag

SEQ ID NO: 92524 - DNA, 25 bp, Artificial
  Probe
aacagcatagcctttccatatcaaa

SEQ ID NO: 92525 - DNA, 25 bp, Artificial
  Probe
aaacagcatagcctttccatatcaa

SEQ ID NO: 92526 - DNA, 25 bp, Artificial
  Probe
agctacagagtatgactgagacact

SEQ ID NO: 92527 - DNA, 25 bp, Artificial
  Probe
ttaacctcctacttctgctgtcttt

SEQ ID NO: 92528 - DNA, 25 bp, Artificial
  Probe
tttaacctcctacttctgctgtctt

SEQ ID NO: 92529 - DNA, 25 bp, Artificial
  Probe
ttctttaacctcctacttctgctgt

SEQ ID NO: 92530 - DNA, 25 bp, Artificial
  Probe
aactctgcaatggttcaatcaatct

SEQ ID NO: 92531 - DNA, 25 bp, Artificial
  Probe
aacctggttaatgtccacatagaag

SEQ ID NO: 92532 - DNA, 25 bp, Artificial
  Probe
caacctggttaatgtccacatagaa

SEQ ID NO: 92533 - DNA, 25 bp, Artificial
  Probe
ttcaacctggttaatgtccacatag

SEQ ID NO: 92534 - DNA, 25 bp, Artificial
  Probe
gttaatgtccacatagaagctagga

SEQ ID NO: 92535 - DNA, 25 bp, Artificial
  Probe
ctctgcaatggttcaatcaatctgt

SEQ ID NO: 92536 - DNA, 25 bp, Artificial
  Probe
actctgcaatggttcaatcaatctg

SEQ ID NO: 92537 - DNA, 25 bp, Artificial
  Probe
ctttaacctcctacttctgctgtct

SEQ ID NO: 92538 - DNA, 25 bp, Artificial
  Probe
tctttaacctcctacttctgctgtc

SEQ ID NO: 92539 - DNA, 25 bp, Artificial
  Probe
tggttaatgtccacatagaagctag

SEQ ID NO: 92540 - DNA, 25 bp, Artificial
  Probe
ctggttaatgtccacatagaagcta

SEQ ID NO: 92541 - DNA, 25 bp, Artificial
  Probe
taacctcctacttctgctgtctttg

SEQ ID NO: 92542 - DNA, 25 bp, Artificial
  Probe
tcaacctggttaatgtccacataga

SEQ ID NO: 92543 - DNA, 25 bp, Artificial
  Probe
aagctacagagtatgactgagacac

SEQ ID NO: 92544 - DNA, 25 bp, Artificial
  Probe
atggttcaatcaatctgtaaagaca

SEQ ID NO: 92545 - DNA, 25 bp, Artificial
  Probe
aatggttcaatcaatctgtaaagac

SEQ ID NO: 92546 - DNA, 25 bp, Artificial
  Probe
caatggttcaatcaatctgtaaaga

SEQ ID NO: 92547 - DNA, 25 bp, Artificial
  Probe
acctggttaatgtccacatagaagc

SEQ ID NO: 92548 - DNA, 25 bp, Artificial
  Probe
tacagagtatgactgagacactgcc

SEQ ID NO: 92549 - DNA, 25 bp, Artificial
  Probe
tgcaatggttcaatcaatctgtaaa

SEQ ID NO: 92550 - DNA, 25 bp, Artificial
  Probe
acatagaagctaggactaagcctat

SEQ ID NO: 92551 - DNA, 25 bp, Artificial
  Probe
atgtcaccttagcagcaactcagat

SEQ ID NO: 92552 - DNA, 25 bp, Artificial
  Probe
cctggttaatgtccacatagaagct

SEQ ID NO: 92553 - DNA, 25 bp, Artificial
  Probe
atcactgaactcactgtgtccagat

SEQ ID NO: 92554 - DNA, 25 bp, Artificial
  Probe
aaactctgcaatggttcaatcaatc

SEQ ID NO: 92555 - DNA, 25 bp, Artificial
  Probe
cacatagaagctaggactaagccta

SEQ ID NO: 92556 - DNA, 25 bp, Artificial
  Probe
taaactctgcaatggttcaatcaat

SEQ ID NO: 92557 - DNA, 25 bp, Artificial
  Probe
ataaactctgcaatggttcaatcaa

SEQ ID NO: 92558 - DNA, 25 bp, Artificial
  Probe
gcatagcctttccatatcaaagaaa

SEQ ID NO: 92559 - DNA, 25 bp, Artificial
  Probe
agcatagcctttccatatcaaagaa

SEQ ID NO: 92560 - DNA, 25 bp, Artificial
  Probe
tcactgaactcactgtgtccagatt

SEQ ID NO: 92561 - DNA, 25 bp, Artificial
  Probe
cagcatagcctttccatatcaaaga

SEQ ID NO: 92562 - DNA, 25 bp, Artificial
  Probe
ctgaactcttgccacatagactctg

SEQ ID NO: 92563 - DNA, 25 bp, Artificial
  Probe
ttcactgaactcttgccacatagac

SEQ ID NO: 92564 - DNA, 25 bp, Artificial
  Probe
actgaactcttgccacatagactct

SEQ ID NO: 92565 - DNA, 25 bp, Artificial
  Probe
cactgaactcttgccacatagactc

SEQ ID NO: 92566 - DNA, 25 bp, Artificial
  Probe
ttgtatgtacgatagggagcagaaa

SEQ ID NO: 92567 - DNA, 25 bp, Artificial
  Probe
tttgtatgtacgatagggagcagaa

SEQ ID NO: 92568 - DNA, 25 bp, Artificial
  Probe
ctactatgactcctcccacaaactg

SEQ ID NO: 92569 - DNA, 25 bp, Artificial
  Probe
gagtgagtgctttcctactatgact

SEQ ID NO: 92570 - DNA, 25 bp, Artificial
  Probe
tcactgaactcttgccacatagact

SEQ ID NO: 92571 - DNA, 25 bp, Artificial
  Probe
ttcctactatgactcctcccacaaa

SEQ ID NO: 92572 - DNA, 25 bp, Artificial
  Probe
tttcctactatgactcctcccacaa

SEQ ID NO: 92573 - DNA, 25 bp, Artificial
  Probe
gaatacttctgttccctttaagaga

SEQ ID NO: 92574 - DNA, 25 bp, Artificial
  Probe
tgagtgagtgctttcctactatgac

SEQ ID NO: 92575 - DNA, 25 bp, Artificial
  Probe
gtgagtgagtgctttcctactatga

SEQ ID NO: 92576 - DNA, 25 bp, Artificial
  Probe
ctgtgagtgagtgctttcctactat

SEQ ID NO: 92577 - DNA, 25 bp, Artificial
  Probe
tgtatgtacgatagggagcagaaac

SEQ ID NO: 92578 - DNA, 25 bp, Artificial
  Probe
tgtgagtgagtgctttcctactatg

SEQ ID NO: 92579 - DNA, 25 bp, Artificial
  Probe
ctttcactgaactcttgccacatag

SEQ ID NO: 92580 - DNA, 25 bp, Artificial
  Probe
ctttcctactatgactcctcccaca

SEQ ID NO: 92581 - DNA, 25 bp, Artificial
  Probe
tttcactgaactcttgccacataga

SEQ ID NO: 92582 - DNA, 25 bp, Artificial
  Probe
gtatgtacgatagggagcagaaacc

SEQ ID NO: 92583 - DNA, 25 bp, Artificial
  Probe
cctactatgactcctcccacaaact

SEQ ID NO: 92584 - DNA, 25 bp, Artificial
  Probe
tcctactatgactcctcccacaaac

SEQ ID NO: 92585 - DNA, 25 bp, Artificial
  Probe
agtgctttcctactatgactcctcc

SEQ ID NO: 92586 - DNA, 25 bp, Artificial
  Probe
ctcagctctagaatacttctgttcc

SEQ ID NO: 92587 - DNA, 25 bp, Artificial
  Probe
agactcagctctagaatacttctgt

SEQ ID NO: 92588 - DNA, 25 bp, Artificial
  Probe
gagactcagctctagaatacttctg

SEQ ID NO: 92589 - DNA, 25 bp, Artificial
  Probe
actcagctctagaatacttctgttc

SEQ ID NO: 92590 - DNA, 25 bp, Artificial
  Probe
gactcagctctagaatacttctgtt

SEQ ID NO: 92591 - DNA, 25 bp, Artificial
  Probe
ggtagagcacatcagtctccatttg

SEQ ID NO: 92592 - DNA, 25 bp, Artificial
  Probe
tatgtacgatagggagcagaaacct

SEQ ID NO: 92593 - DNA, 25 bp, Artificial
  Probe
gtagagcacatcagtctccatttgg

SEQ ID NO: 92594 - DNA, 25 bp, Artificial
  Probe
gatttgaaaggctgcctataaacac

SEQ ID NO: 92595 - DNA, 25 bp, Artificial
  Probe
atttgaaaggctgcctataaacact

SEQ ID NO: 92596 - DNA, 25 bp, Artificial
  Probe
gggctggtgtattaaatatgtatat

SEQ ID NO: 92597 - DNA, 25 bp, Artificial
  Probe
agaatacttctgttccctttaagag

SEQ ID NO: 92598 - DNA, 25 bp, Artificial
  Probe
gctttcctactatgactcctcccac

SEQ ID NO: 92599 - DNA, 25 bp, Artificial
  Probe
gtgctttcctactatgactcctccc

SEQ ID NO: 92600 - DNA, 25 bp, Artificial
  Probe
tgaactcttgccacatagactctgg

SEQ ID NO: 92601 - DNA, 25 bp, Artificial
  Probe
ttttgtatgtacgatagggagcaga

SEQ ID NO: 92602 - DNA, 25 bp, Artificial
  Probe
ggatttgaaaggctgcctataaaca

SEQ ID NO: 92603 - DNA, 25 bp, Artificial
  Probe
gctttcactgaactcttgccacata

SEQ ID NO: 92604 - DNA, 25 bp, Artificial
  Probe
ggggctggtgtattaaatatgtata

SEQ ID NO: 92605 - DNA, 25 bp, Artificial
  Probe
aatacttctgttccctttaagagaa

SEQ ID NO: 92606 - DNA, 25 bp, Artificial
  Probe
tttgaaaggctgcctataaacactg

SEQ ID NO: 92607 - DNA, 25 bp, Artificial
  Probe
tagaccacttgattgtaggattgaa

SEQ ID NO: 92608 - DNA, 25 bp, Artificial
  Probe
ctagaccacttgattgtaggattga

SEQ ID NO: 92609 - DNA, 25 bp, Artificial
  Probe
gttacatccttagagcctgcttatt

SEQ ID NO: 92610 - DNA, 25 bp, Artificial
  Probe
ggttacatccttagagcctgcttat

SEQ ID NO: 92611 - DNA, 25 bp, Artificial
  Probe
cttagatgtaccttgttcctcctcc

SEQ ID NO: 92612 - DNA, 25 bp, Artificial
  Probe
agttctaacttgtatagccttgaag

SEQ ID NO: 92613 - DNA, 25 bp, Artificial
  Probe
agaccacttgattgtaggattgaaa

SEQ ID NO: 92614 - DNA, 25 bp, Artificial
  Probe
ataagaaatggactgtaggactgtg

SEQ ID NO: 92615 - DNA, 25 bp, Artificial
  Probe
gctataagaaatggactgtaggact

SEQ ID NO: 92616 - DNA, 25 bp, Artificial
  Probe
gcttagatgtaccttgttcctcctc

SEQ ID NO: 92617 - DNA, 25 bp, Artificial
  Probe
gttctaacttgtatagccttgaagg

SEQ ID NO: 92618 - DNA, 25 bp, Artificial
  Probe
aatatggcatgtgacacagctataa

SEQ ID NO: 92619 - DNA, 25 bp, Artificial
  Probe
ttatttggtctgtctgaatgtggtc

SEQ ID NO: 92620 - DNA, 25 bp, Artificial
  Probe
cttatttggtctgtctgaatgtggt

SEQ ID NO: 92621 - DNA, 25 bp, Artificial
  Probe
taagaaatggactgtaggactgtgt

SEQ ID NO: 92622 - DNA, 25 bp, Artificial
  Probe
atatggcatgtgacacagctataag

SEQ ID NO: 92623 - DNA, 25 bp, Artificial
  Probe
gaatatggcatgtgacacagctata

SEQ ID NO: 92624 - DNA, 25 bp, Artificial
  Probe
ctgcttatttggtctgtctgaatgt

SEQ ID NO: 92625 - DNA, 25 bp, Artificial
  Probe
tataagaaatggactgtaggactgt

SEQ ID NO: 92626 - DNA, 25 bp, Artificial
  Probe
tacatccttagagcctgcttatttg

SEQ ID NO: 92627 - DNA, 25 bp, Artificial
  Probe
ttacatccttagagcctgcttattt

SEQ ID NO: 92628 - DNA, 25 bp, Artificial
  Probe
tgcttatttggtctgtctgaatgtg

SEQ ID NO: 92629 - DNA, 25 bp, Artificial
  Probe
tggaactaaaggtcaaagtctgatt

SEQ ID NO: 92630 - DNA, 25 bp, Artificial
  Probe
ctggaactaaaggtcaaagtctgat

SEQ ID NO: 92631 - DNA, 25 bp, Artificial
  Probe
ttctggaactaaaggtcaaagtctg

SEQ ID NO: 92632 - DNA, 25 bp, Artificial
  Probe
ggaactaaaggtcaaagtctgattt

SEQ ID NO: 92633 - DNA, 25 bp, Artificial
  Probe
ggtgtacttactttctgtctccttg

SEQ ID NO: 92634 - DNA, 25 bp, Artificial
  Probe
acttggaaacatctgaaaggttctg

SEQ ID NO: 92635 - DNA, 25 bp, Artificial
  Probe
cacttggaaacatctgaaaggttct

SEQ ID NO: 92636 - DNA, 25 bp, Artificial
  Probe
ctataagaaatggactgtaggactg

SEQ ID NO: 92637 - DNA, 25 bp, Artificial
  Probe
tatggcatgtgacacagctataaga

SEQ ID NO: 92638 - DNA, 25 bp, Artificial
  Probe
ctatgtcatctttctctctctcccg

SEQ ID NO: 92639 - DNA, 25 bp, Artificial
  Probe
cctgcttatttggtctgtctgaatg

SEQ ID NO: 92640 - DNA, 25 bp, Artificial
  Probe
tctagaccacttgattgtaggattg

SEQ ID NO: 92641 - DNA, 25 bp, Artificial
  Probe
tctggaactaaaggtcaaagtctga

SEQ ID NO: 92642 - DNA, 25 bp, Artificial
  Probe
cttctagaccacttgattgtaggat

SEQ ID NO: 92643 - DNA, 25 bp, Artificial
  Probe
gctatgtcatctttctctctctccc

SEQ ID NO: 92644 - DNA, 25 bp, Artificial
  Probe
gtgtacttactttctgtctccttgc

SEQ ID NO: 92645 - DNA, 25 bp, Artificial
  Probe
tggtcattgtcatgggttaagattt

SEQ ID NO: 92646 - DNA, 25 bp, Artificial
  Probe
gcttatttggtctgtctgaatgtgg

SEQ ID NO: 92647 - DNA, 25 bp, Artificial
  Probe
acatctgaaaggttctggaactaaa

SEQ ID NO: 92648 - DNA, 25 bp, Artificial
  Probe
aacatctgaaaggttctggaactaa

SEQ ID NO: 92649 - DNA, 25 bp, Artificial
  Probe
aaacatctgaaaggttctggaacta

SEQ ID NO: 92650 - DNA, 25 bp, Artificial
  Probe
aaaggttctggaactaaaggtcaaa

SEQ ID NO: 92651 - DNA, 25 bp, Artificial
  Probe
atctgaaaggttctggaactaaagg

SEQ ID NO: 92652 - DNA, 25 bp, Artificial
  Probe
tatggaaggttcacaatcaagtctg

SEQ ID NO: 92653 - DNA, 25 bp, Artificial
  Probe
gtatggaaggttcacaatcaagtct

SEQ ID NO: 92654 - DNA, 25 bp, Artificial
  Probe
aacgcatgaattatatccacagaga

SEQ ID NO: 92655 - DNA, 25 bp, Artificial
  Probe
gaacgcatgaattatatccacagag

SEQ ID NO: 92656 - DNA, 25 bp, Artificial
  Probe
acgcatgaattatatccacagagat

SEQ ID NO: 92657 - DNA, 25 bp, Artificial
  Probe
cgcatgaattatatccacagagatc

SEQ ID NO: 92658 - DNA, 25 bp, Artificial
  Probe
tgtatggaaggttcacaatcaagtc

SEQ ID NO: 92659 - DNA, 25 bp, Artificial
  Probe
ctgtatggaaggttcacaatcaagt

SEQ ID NO: 92660 - DNA, 25 bp, Artificial
  Probe
cgaacgcatgaattatatccacaga

SEQ ID NO: 92661 - DNA, 25 bp, Artificial
  Probe
atggaaggttcacaatcaagtctga

SEQ ID NO: 92662 - DNA, 25 bp, Artificial
  Probe
atcgaacgcatgaattatatccaca

SEQ ID NO: 92663 - DNA, 25 bp, Artificial
  Probe
gcttacatcgaacgcatgaattata

SEQ ID NO: 92664 - DNA, 25 bp, Artificial
  Probe
catcgaacgcatgaattatatccac

SEQ ID NO: 92665 - DNA, 25 bp, Artificial
  Probe
cctgtatggaaggttcacaatcaag

SEQ ID NO: 92666 - DNA, 25 bp, Artificial
  Probe
acatcgaacgcatgaattatatcca

SEQ ID NO: 92667 - DNA, 25 bp, Artificial
  Probe
tacatcgaacgcatgaattatatcc

SEQ ID NO: 92668 - DNA, 25 bp, Artificial
  Probe
tcgaacgcatgaattatatccacag

SEQ ID NO: 92669 - DNA, 25 bp, Artificial
  Probe
ggttgattgaagacaatgagtacac

SEQ ID NO: 92670 - DNA, 25 bp, Artificial
  Probe
gttgattgaagacaatgagtacaca

SEQ ID NO: 92671 - DNA, 25 bp, Artificial
  Probe
ttgattgaagacaatgagtacacag

SEQ ID NO: 92672 - DNA, 25 bp, Artificial
  Probe
tggaaggttcacaatcaagtctgac

SEQ ID NO: 92673 - DNA, 25 bp, Artificial
  Probe
tgattgaagacaatgagtacacagc

SEQ ID NO: 92674 - DNA, 25 bp, Artificial
  Probe
cggttgattgaagacaatgagtaca

SEQ ID NO: 92675 - DNA, 25 bp, Artificial
  Probe
ggcttacatcgaacgcatgaattat

SEQ ID NO: 92676 - DNA, 25 bp, Artificial
  Probe
ttacatcgaacgcatgaattatatc

SEQ ID NO: 92677 - DNA, 25 bp, Artificial
  Probe
cttacatcgaacgcatgaattatat

SEQ ID NO: 92678 - DNA, 25 bp, Artificial
  Probe
ttgaagacaatgagtacacagccag

SEQ ID NO: 92679 - DNA, 25 bp, Artificial
  Probe
gattgaagacaatgagtacacagcc

SEQ ID NO: 92680 - DNA, 25 bp, Artificial
  Probe
gaagacaatgagtacacagccagac

SEQ ID NO: 92681 - DNA, 25 bp, Artificial
  Probe
gtcctttggaatcttactcacagag

SEQ ID NO: 92682 - DNA, 25 bp, Artificial
  Probe
gacaatgagtacacagccagacaag

SEQ ID NO: 92683 - DNA, 25 bp, Artificial
  Probe
attgaagacaatgagtacacagcca

SEQ ID NO: 92684 - DNA, 25 bp, Artificial
  Probe
tgaagacaatgagtacacagccaga

SEQ ID NO: 92685 - DNA, 25 bp, Artificial
  Probe
gcatgaattatatccacagagatct

SEQ ID NO: 92686 - DNA, 25 bp, Artificial
  Probe
tgaattatatccacagagatctgcg

SEQ ID NO: 92687 - DNA, 25 bp, Artificial
  Probe
gaatcttactcacagagctggtcac

SEQ ID NO: 92688 - DNA, 25 bp, Artificial
  Probe
tggcttacatcgaacgcatgaatta

SEQ ID NO: 92689 - DNA, 25 bp, Artificial
  Probe
agacaatgagtacacagccagacaa

SEQ ID NO: 92690 - DNA, 25 bp, Artificial
  Probe
aagacaatgagtacacagccagaca

SEQ ID NO: 92691 - DNA, 25 bp, Artificial
  Probe
ggaaggttcacaatcaagtctgacg

SEQ ID NO: 92692 - DNA, 25 bp, Artificial
  Probe
gaattatatccacagagatctgcgg

SEQ ID NO: 92693 - DNA, 25 bp, Artificial
  Probe
ggtcctttggaatcttactcacaga

SEQ ID NO: 92694 - DNA, 25 bp, Artificial
  Probe
ctttggaatcttactcacagagctg

SEQ ID NO: 92695 - DNA, 25 bp, Artificial
  Probe
aattatatccacagagatctgcggt

SEQ ID NO: 92696 - DNA, 25 bp, Artificial
  Probe
tcctttggaatcttactcacagagc

SEQ ID NO: 92697 - DNA, 25 bp, Artificial
  Probe
gtgttgctacttagtatcttctgga

SEQ ID NO: 92698 - DNA, 25 bp, Artificial
  Probe
tgtgttgctacttagtatcttctgg

SEQ ID NO: 92699 - DNA, 25 bp, Artificial
  Probe
gcttgtgttgctacttagtatcttc

SEQ ID NO: 92700 - DNA, 25 bp, Artificial
  Probe
tgttgctacttagtatcttctggaa

SEQ ID NO: 92701 - DNA, 25 bp, Artificial
  Probe
tcctctacctgttgtattacgagta

SEQ ID NO: 92702 - DNA, 25 bp, Artificial
  Probe
ttgtgttgctacttagtatcttctg

SEQ ID NO: 92703 - DNA, 25 bp, Artificial
  Probe
cttgtgttgctacttagtatcttct

SEQ ID NO: 92704 - DNA, 25 bp, Artificial
  Probe
caggaactatctgaattgtgactca

SEQ ID NO: 92705 - DNA, 25 bp, Artificial
  Probe
tagcaggaactatctgaattgtgac

SEQ ID NO: 92706 - DNA, 25 bp, Artificial
  Probe
gtcctctacctgttgtattacgagt

SEQ ID NO: 92707 - DNA, 25 bp, Artificial
  Probe
cctctacctgttgtattacgagtac

SEQ ID NO: 92708 - DNA, 25 bp, Artificial
  Probe
ctagcaggaactatctgaattgtga

SEQ ID NO: 92709 - DNA, 25 bp, Artificial
  Probe
cattcttctcttagctgtccagtag

SEQ ID NO: 92710 - DNA, 25 bp, Artificial
  Probe
gcaggaactatctgaattgtgactc

SEQ ID NO: 92711 - DNA, 25 bp, Artificial
  Probe
attcttctcttagctgtccagtagt

SEQ ID NO: 92712 - DNA, 25 bp, Artificial
  Probe
tcattcttctcttagctgtccagta

SEQ ID NO: 92713 - DNA, 25 bp, Artificial
  Probe
cctagcaggaactatctgaattgtg

SEQ ID NO: 92714 - DNA, 25 bp, Artificial
  Probe
agcaggaactatctgaattgtgact

SEQ ID NO: 92715 - DNA, 25 bp, Artificial
  Probe
caacactgtatccattgagactgtg

SEQ ID NO: 92716 - DNA, 25 bp, Artificial
  Probe
ttcttctcttagctgtccagtagtg

SEQ ID NO: 92717 - DNA, 25 bp, Artificial
  Probe
ttctcttagctgtccagtagtgttc

SEQ ID NO: 92718 - DNA, 25 bp, Artificial
  Probe
cttctcttagctgtccagtagtgtt

SEQ ID NO: 92719 - DNA, 25 bp, Artificial
  Probe
ctcattcttctcttagctgtccagt

SEQ ID NO: 92720 - DNA, 25 bp, Artificial
  Probe
actcattcttctcttagctgtccag

SEQ ID NO: 92721 - DNA, 25 bp, Artificial
  Probe
gctacttagtatcttctggaaatgc

SEQ ID NO: 92722 - DNA, 25 bp, Artificial
  Probe
ctcttagctgtccagtagtgttcaa

SEQ ID NO: 92723 - DNA, 25 bp, Artificial
  Probe
ggtcctctacctgttgtattacgag

SEQ ID NO: 92724 - DNA, 25 bp, Artificial
  Probe
tcttagctgtccagtagtgttcaac

SEQ ID NO: 92725 - DNA, 25 bp, Artificial
  Probe
tctgataagaaggaagcattctaca

SEQ ID NO: 92726 - DNA, 25 bp, Artificial
  Probe
acttagtatcttctggaaatgcttc

SEQ ID NO: 92727 - DNA, 25 bp, Artificial
  Probe
agactcattcttctcttagctgtcc

SEQ ID NO: 92728 - DNA, 25 bp, Artificial
  Probe
tcttctcttagctgtccagtagtgt

SEQ ID NO: 92729 - DNA, 25 bp, Artificial
  Probe
gttgctacttagtatcttctggaaa

SEQ ID NO: 92730 - DNA, 25 bp, Artificial
  Probe
gactcattcttctcttagctgtcca

SEQ ID NO: 92731 - DNA, 25 bp, Artificial
  Probe
gcaacactgtatccattgagactgt

SEQ ID NO: 92732 - DNA, 25 bp, Artificial
  Probe
tctcttagctgtccagtagtgttca

SEQ ID NO: 92733 - DNA, 25 bp, Artificial
  Probe
ctgataagaaggaagcattctacat

SEQ ID NO: 92734 - DNA, 25 bp, Artificial
  Probe
tgctacttagtatcttctggaaatg

SEQ ID NO: 92735 - DNA, 25 bp, Artificial
  Probe
ctacctgttgtattacgagtactgg

SEQ ID NO: 92736 - DNA, 25 bp, Artificial
  Probe
tgataagaaggaagcattctacatg

SEQ ID NO: 92737 - DNA, 25 bp, Artificial
  Probe
aacactgtatccattgagactgtgg

SEQ ID NO: 92738 - DNA, 25 bp, Artificial
  Probe
atctgataagaaggaagcattctac

SEQ ID NO: 92739 - DNA, 25 bp, Artificial
  Probe
tctacctgttgtattacgagtactg

SEQ ID NO: 92740 - DNA, 25 bp, Artificial
  Probe
ctacttagtatcttctggaaatgct

SEQ ID NO: 92741 - DNA, 25 bp, Artificial
  Probe
aagactcattcttctcttagctgtc

SEQ ID NO: 92742 - DNA, 25 bp, Artificial
  Probe
ttgtggctacttcataactgtaatt

SEQ ID NO: 92743 - DNA, 25 bp, Artificial
  Probe
tactttgtggctacttcataactgt

SEQ ID NO: 92744 - DNA, 25 bp, Artificial
  Probe
actttgtggctacttcataactgta

SEQ ID NO: 92745 - DNA, 25 bp, Artificial
  Probe
ttactttgtggctacttcataactg

SEQ ID NO: 92746 - DNA, 25 bp, Artificial
  Probe
ctttgtggctacttcataactgtaa

SEQ ID NO: 92747 - DNA, 25 bp, Artificial
  Probe
ctctttagaccagtagttctcaacc

SEQ ID NO: 92748 - DNA, 25 bp, Artificial
  Probe
cctctttagaccagtagttctcaac

SEQ ID NO: 92749 - DNA, 25 bp, Artificial
  Probe
ttagaagctatggtgtgtcttggaa

SEQ ID NO: 92750 - DNA, 25 bp, Artificial
  Probe
tgctactgttatgaatcatagtgtg

SEQ ID NO: 92751 - DNA, 25 bp, Artificial
  Probe
gctactgttatgaatcatagtgtga

SEQ ID NO: 92752 - DNA, 25 bp, Artificial
  Probe
tttgtggctacttcataactgtaat

SEQ ID NO: 92753 - DNA, 25 bp, Artificial
  Probe
ccctctttagaccagtagttctcaa

SEQ ID NO: 92754 - DNA, 25 bp, Artificial
  Probe
cttagaagctatggtgtgtcttgga

SEQ ID NO: 92755 - DNA, 25 bp, Artificial
  Probe
tgtggctacttcataactgtaattt

SEQ ID NO: 92756 - DNA, 25 bp, Artificial
  Probe
tgaatcatagtgtgaatatctgttg

SEQ ID NO: 92757 - DNA, 25 bp, Artificial
  Probe
ttgctactgttatgaatcatagtgt

SEQ ID NO: 92758 - DNA, 25 bp, Artificial
  Probe
tagaagctatggtgtgtcttggaac

SEQ ID NO: 92759 - DNA, 25 bp, Artificial
  Probe
acttagaagctatggtgtgtcttgg

SEQ ID NO: 92760 - DNA, 25 bp, Artificial
  Probe
cacttagaagctatggtgtgtcttg

SEQ ID NO: 92761 - DNA, 25 bp, Artificial
  Probe
aatcatcaagttactttgtggctac

SEQ ID NO: 92762 - DNA, 25 bp, Artificial
  Probe
caatcatcaagttactttgtggcta

SEQ ID NO: 92763 - DNA, 25 bp, Artificial
  Probe
ctttagaccagtagttctcaaccga

SEQ ID NO: 92764 - DNA, 25 bp, Artificial
  Probe
tctttagaccagtagttctcaaccg

SEQ ID NO: 92765 - DNA, 25 bp, Artificial
  Probe
tcctggagggtttagattctgaatg

SEQ ID NO: 92766 - DNA, 25 bp, Artificial
  Probe
atcatcaagttactttgtggctact

SEQ ID NO: 92767 - DNA, 25 bp, Artificial
  Probe
gaggaagagacactgtgttggttat

SEQ ID NO: 92768 - DNA, 25 bp, Artificial
  Probe
gtgtgtcttggaactgtgctagtag

SEQ ID NO: 92769 - DNA, 25 bp, Artificial
  Probe
tatggtgtgtcttggaactgtgcta

SEQ ID NO: 92770 - DNA, 25 bp, Artificial
  Probe
ctgaccattcgttatcggatgtgac

SEQ ID NO: 92771 - DNA, 25 bp, Artificial
  Probe
gactgaccattcgttatcggatgtg

SEQ ID NO: 92772 - DNA, 25 bp, Artificial
  Probe
gaatcatagtgtgaatatctgttga

SEQ ID NO: 92773 - DNA, 25 bp, Artificial
  Probe
aagagacactgtgttggttatggag

SEQ ID NO: 92774 - DNA, 25 bp, Artificial
  Probe
gaagagacactgtgttggttatgga

SEQ ID NO: 92775 - DNA, 25 bp, Artificial
  Probe
aggaagagacactgtgttggttatg

SEQ ID NO: 92776 - DNA, 25 bp, Artificial
  Probe
tttagaccagtagttctcaaccgag

SEQ ID NO: 92777 - DNA, 25 bp, Artificial
  Probe
tctagtctgaggaagaagctctctg

SEQ ID NO: 92778 - DNA, 25 bp, Artificial
  Probe
gtctagtctgaggaagaagctctct

SEQ ID NO: 92779 - DNA, 25 bp, Artificial
  Probe
ttgctgtcaagattaattctctccc

SEQ ID NO: 92780 - DNA, 25 bp, Artificial
  Probe
ccattcgttatcggatgtgaccaag

SEQ ID NO: 92781 - DNA, 25 bp, Artificial
  Probe
gttactttgtggctacttcataact

SEQ ID NO: 92782 - DNA, 25 bp, Artificial
  Probe
agttactttgtggctacttcataac

SEQ ID NO: 92783 - DNA, 25 bp, Artificial
  Probe
actgaccattcgttatcggatgtga

SEQ ID NO: 92784 - DNA, 25 bp, Artificial
  Probe
cagaagtcatgtgtggctattgtcc

SEQ ID NO: 92785 - DNA, 25 bp, Artificial
  Probe
gttatcggatgtgaccaagcagaac

SEQ ID NO: 92786 - DNA, 25 bp, Artificial
  Probe
tcttggaactgtgctagtaggtcag

SEQ ID NO: 92787 - DNA, 25 bp, Artificial
  Probe
ttaagtataatgtggaggtcaagca

SEQ ID NO: 92788 - DNA, 25 bp, Artificial
  Probe
aagtataatgtggaggtcaagcata

SEQ ID NO: 92789 - DNA, 25 bp, Artificial
  Probe
taagtataatgtggaggtcaagcat

SEQ ID NO: 92790 - DNA, 25 bp, Artificial
  Probe
actatgtggaggaagactattctga

SEQ ID NO: 92791 - DNA, 25 bp, Artificial
  Probe
agtataatgtggaggtcaagcatat

SEQ ID NO: 92792 - DNA, 25 bp, Artificial
  Probe
aactatgtggaggaagactattctg

SEQ ID NO: 92793 - DNA, 25 bp, Artificial
  Probe
ctaagatggaggtgtgtcaggaata

SEQ ID NO: 92794 - DNA, 25 bp, Artificial
  Probe
ctatgtggaggaagactattctgaa

SEQ ID NO: 92795 - DNA, 25 bp, Artificial
  Probe
aattcgccatcagcattaagtataa

SEQ ID NO: 92796 - DNA, 25 bp, Artificial
  Probe
taagatggaggtgtgtcaggaatac

SEQ ID NO: 92797 - DNA, 25 bp, Artificial
  Probe
gtataatgtggaggtcaagcatatt

SEQ ID NO: 92798 - DNA, 25 bp, Artificial
  Probe
acatcatcaagatcctcaacaagaa

SEQ ID NO: 92799 - DNA, 25 bp, Artificial
  Probe
attcgccatcagcattaagtataat

SEQ ID NO: 92800 - DNA, 25 bp, Artificial
  Probe
catcatcaagatcctcaacaagaag

SEQ ID NO: 92801 - DNA, 25 bp, Artificial
  Probe
gacatcatcaagatcctcaacaaga

SEQ ID NO: 92802 - DNA, 25 bp, Artificial
  Probe
attaagtataatgtggaggtcaagc

SEQ ID NO: 92803 - DNA, 25 bp, Artificial
  Probe
ggaagactattctgaatactgctga

SEQ ID NO: 92804 - DNA, 25 bp, Artificial
  Probe
aggaagactattctgaatactgctg

SEQ ID NO: 92805 - DNA, 25 bp, Artificial
  Probe
tatgtggaggaagactattctgaat

SEQ ID NO: 92806 - DNA, 25 bp, Artificial
  Probe
aagactattctgaatactgctgagc

SEQ ID NO: 92807 - DNA, 25 bp, Artificial
  Probe
gaggaagactattctgaatactgct

SEQ ID NO: 92808 - DNA, 25 bp, Artificial
  Probe
tgtggaggaagactattctgaatac

SEQ ID NO: 92809 - DNA, 25 bp, Artificial
  Probe
ggaggaagactattctgaatactgc

SEQ ID NO: 92810 - DNA, 25 bp, Artificial
  Probe
gatggaggtgtgtcaggaatactac

SEQ ID NO: 92811 - DNA, 25 bp, Artificial
  Probe
taactatgtggaggaagactattct

SEQ ID NO: 92812 - DNA, 25 bp, Artificial
  Probe
tctaactatgtggaggaagactatt

SEQ ID NO: 92813 - DNA, 25 bp, Artificial
  Probe
tggaggaagactattctgaatactg

SEQ ID NO: 92814 - DNA, 25 bp, Artificial
  Probe
gtggaggaagactattctgaatact

SEQ ID NO: 92815 - DNA, 25 bp, Artificial
  Probe
ctctaactatgtggaggaagactat

SEQ ID NO: 92816 - DNA, 25 bp, Artificial
  Probe
ctaactatgtggaggaagactattc

SEQ ID NO: 92817 - DNA, 25 bp, Artificial
  Probe
agatggaggtgtgtcaggaatacta

SEQ ID NO: 92818 - DNA, 25 bp, Artificial
  Probe
tgacatcatcaagatcctcaacaag

SEQ ID NO: 92819 - DNA, 25 bp, Artificial
  Probe
gtgacatcatcaagatcctcaacaa

SEQ ID NO: 92820 - DNA, 25 bp, Artificial
  Probe
ataatgtggaggtcaagcatattaa

SEQ ID NO: 92821 - DNA, 25 bp, Artificial
  Probe
gaagactattctgaatactgctgag

SEQ ID NO: 92822 - DNA, 25 bp, Artificial
  Probe
atgtggaggaagactattctgaata

SEQ ID NO: 92823 - DNA, 25 bp, Artificial
  Probe
atcatcaagatcctcaacaagaagg

SEQ ID NO: 92824 - DNA, 25 bp, Artificial
  Probe
agactattctgaatactgctgagcc

SEQ ID NO: 92825 - DNA, 25 bp, Artificial
  Probe
attctaataaagtgaggacagcagg

SEQ ID NO: 92826 - DNA, 25 bp, Artificial
  Probe
tgattctaataaagtgaggacagca

SEQ ID NO: 92827 - DNA, 25 bp, Artificial
  Probe
ctaataaagtgaggacagcaggaaa

SEQ ID NO: 92828 - DNA, 25 bp, Artificial
  Probe
gattctaataaagtgaggacagcag

SEQ ID NO: 92829 - DNA, 25 bp, Artificial
  Probe
aagatggaggtgtgtcaggaatact

SEQ ID NO: 92830 - DNA, 25 bp, Artificial
  Probe
tataatgtggaggtcaagcatatta

SEQ ID NO: 92831 - DNA, 25 bp, Artificial
  Probe
gaagtggatggaacagtttgaaatg

SEQ ID NO: 92832 - DNA, 25 bp, Artificial
  Probe
cttcattcttatgtacctgtgttgg

SEQ ID NO: 92833 - DNA, 25 bp, Artificial
  Probe
tcatgccaataagaagccaataatc

SEQ ID NO: 92834 - DNA, 25 bp, Artificial
  Probe
gaatcatgccaataagaagccaata

SEQ ID NO: 92835 - DNA, 25 bp, Artificial
  Probe
ttgaagatgatggcattaagaaggc

SEQ ID NO: 92836 - DNA, 25 bp, Artificial
  Probe
catgccaataagaagccaataatcc

SEQ ID NO: 92837 - DNA, 25 bp, Artificial
  Probe
aatcatgccaataagaagccaataa

SEQ ID NO: 92838 - DNA, 25 bp, Artificial
  Probe
agacttcattcttatgtacctgtgt

SEQ ID NO: 92839 - DNA, 25 bp, Artificial
  Probe
ccaaggttatcattattcaggcatg

SEQ ID NO: 92840 - DNA, 25 bp, Artificial
  Probe
atcatgccaataagaagccaataat

SEQ ID NO: 92841 - DNA, 25 bp, Artificial
  Probe
acttcattcttatgtacctgtgttg

SEQ ID NO: 92842 - DNA, 25 bp, Artificial
  Probe
gacttcattcttatgtacctgtgtt

SEQ ID NO: 92843 - DNA, 25 bp, Artificial
  Probe
ggaatcatgccaataagaagccaat

SEQ ID NO: 92844 - DNA, 25 bp, Artificial
  Probe
caagcccaaggttatcattattcag

SEQ ID NO: 92845 - DNA, 25 bp, Artificial
  Probe
gacaagcccaaggttatcattattc

SEQ ID NO: 92846 - DNA, 25 bp, Artificial
  Probe
agacaagcccaaggttatcattatt

SEQ ID NO: 92847 - DNA, 25 bp, Artificial
  Probe
aagacaagcccaaggttatcattat

SEQ ID NO: 92848 - DNA, 25 bp, Artificial
  Probe
acaagcccaaggttatcattattca

SEQ ID NO: 92849 - DNA, 25 bp, Artificial
  Probe
aaagacaagcccaaggttatcatta

SEQ ID NO: 92850 - DNA, 25 bp, Artificial
  Probe
aagcccaaggttatcattattcagg

SEQ ID NO: 92851 - DNA, 25 bp, Artificial
  Probe
ctgctcttcaacaccagataatgtg

SEQ ID NO: 92852 - DNA, 25 bp, Artificial
  Probe
cccaaggttatcattattcaggcat

SEQ ID NO: 92853 - DNA, 25 bp, Artificial
  Probe
tttgaagatgatggcattaagaagg

SEQ ID NO: 92854 - DNA, 25 bp, Artificial
  Probe
atgccaataagaagccaataatccc

SEQ ID NO: 92855 - DNA, 25 bp, Artificial
  Probe
tttattgctttctgctcttcaacac

SEQ ID NO: 92856 - DNA, 25 bp, Artificial
  Probe
gaaagacaagcccaaggttatcatt

SEQ ID NO: 92857 - DNA, 25 bp, Artificial
  Probe
ccaagacttcattcttatgtacctg

SEQ ID NO: 92858 - DNA, 25 bp, Artificial
  Probe
cttatgtacctgtgttgggaatcat

SEQ ID NO: 92859 - DNA, 25 bp, Artificial
  Probe
ttcttatgtacctgtgttgggaatc

SEQ ID NO: 92860 - DNA, 25 bp, Artificial
  Probe
tccaagacttcattcttatgtacct

SEQ ID NO: 92861 - DNA, 25 bp, Artificial
  Probe
cattcttatgtacctgtgttgggaa

SEQ ID NO: 92862 - DNA, 25 bp, Artificial
  Probe
ttcattcttatgtacctgtgttggg

SEQ ID NO: 92863 - DNA, 25 bp, Artificial
  Probe
agaatatgcctggtcttgtgacttg

SEQ ID NO: 92864 - DNA, 25 bp, Artificial
  Probe
tcttatgtacctgtgttgggaatca

SEQ ID NO: 92865 - DNA, 25 bp, Artificial
  Probe
ttatgtacctgtgttgggaatcatg

SEQ ID NO: 92866 - DNA, 25 bp, Artificial
  Probe
aagacttcattcttatgtacctgtg

SEQ ID NO: 92867 - DNA, 25 bp, Artificial
  Probe
caagacttcattcttatgtacctgt

SEQ ID NO: 92868 - DNA, 25 bp, Artificial
  Probe
caaacacatgaaagaatatgcctgg

SEQ ID NO: 92869 - DNA, 25 bp, Artificial
  Probe
tgggatcacatactctaatgaagtt

SEQ ID NO: 92870 - DNA, 25 bp, Artificial
  Probe
tcattcttatgtacctgtgttggga

SEQ ID NO: 92871 - DNA, 25 bp, Artificial
  Probe
tcaaacacatgaaagaatatgcctg

SEQ ID NO: 92872 - DNA, 25 bp, Artificial
  Probe
gggatcacatactctaatgaagttg

SEQ ID NO: 92873 - DNA, 25 bp, Artificial
  Probe
aaacacatgaaagaatatgcctggt

SEQ ID NO: 92874 - DNA, 25 bp, Artificial
  Probe
atccaagacttcattcttatgtacc

SEQ ID NO: 92875 - DNA, 25 bp, Artificial
  Probe
atcaaacacatgaaagaatatgcct

SEQ ID NO: 92876 - DNA, 25 bp, Artificial
  Probe
catcaaacacatgaaagaatatgcc

SEQ ID NO: 92877 - DNA, 25 bp, Artificial
  Probe
gtatcacaagatgaatggtcagaac

SEQ ID NO: 92878 - DNA, 25 bp, Artificial
  Probe
tgtatcacaagatgaatggtcagaa

SEQ ID NO: 92879 - DNA, 25 bp, Artificial
  Probe
tatcacaagatgaatggtcagaacc

SEQ ID NO: 92880 - DNA, 25 bp, Artificial
  Probe
tttggctaaataaatgtcagtgtca

SEQ ID NO: 92881 - DNA, 25 bp, Artificial
  Probe
tgtctccactcagttcttgaaggta

SEQ ID NO: 92882 - DNA, 25 bp, Artificial
  Probe
ttggctaaataaatgtcagtgtcaa

SEQ ID NO: 92883 - DNA, 25 bp, Artificial
  Probe
gtctccactcagttcttgaaggtac

SEQ ID NO: 92884 - DNA, 25 bp, Artificial
  Probe
ccactcagttcttgaaggtacacaa

SEQ ID NO: 92885 - DNA, 25 bp, Artificial
  Probe
ctccactcagttcttgaaggtacac

SEQ ID NO: 92886 - DNA, 25 bp, Artificial
  Probe
tctccactcagttcttgaaggtaca

SEQ ID NO: 92887 - DNA, 25 bp, Artificial
  Probe
cctatgtagtccagactaacctcaa

SEQ ID NO: 92888 - DNA, 25 bp, Artificial
  Probe
caagaagcgaatgattgtcagcaag

SEQ ID NO: 92889 - DNA, 25 bp, Artificial
  Probe
tctacctcctgagattaaaggcata

SEQ ID NO: 92890 - DNA, 25 bp, Artificial
  Probe
ctacctcctgagattaaaggcatat

SEQ ID NO: 92891 - DNA, 25 bp, Artificial
  Probe
cactcagttcttgaaggtacacaaa

SEQ ID NO: 92892 - DNA, 25 bp, Artificial
  Probe
ctctacctcctgagattaaaggcat

SEQ ID NO: 92893 - DNA, 25 bp, Artificial
  Probe
atttggctaaataaatgtcagtgtc

SEQ ID NO: 92894 - DNA, 25 bp, Artificial
  Probe
tccactcagttcttgaaggtacaca

SEQ ID NO: 92895 - DNA, 25 bp, Artificial
  Probe
ttgtatcacaagatgaatggtcaga

SEQ ID NO: 92896 - DNA, 25 bp, Artificial
  Probe
atcacaagatgaatggtcagaaccg

SEQ ID NO: 92897 - DNA, 25 bp, Artificial
  Probe
catcttatgtctttccctggacctc

SEQ ID NO: 92898 - DNA, 25 bp, Artificial
  Probe
atcttatgtctttccctggacctct

SEQ ID NO: 92899 - DNA, 25 bp, Artificial
  Probe
ctgtcagccatcttatgtctttccc

SEQ ID NO: 92900 - DNA, 25 bp, Artificial
  Probe
cctgtcagccatcttatgtctttcc

SEQ ID NO: 92901 - DNA, 25 bp, Artificial
  Probe
aatgcactaactgtcaaacaacaac

SEQ ID NO: 92902 - DNA, 25 bp, Artificial
  Probe
caatgcactaactgtcaaacaacaa

SEQ ID NO: 92903 - DNA, 25 bp, Artificial
  Probe
ctaactgtcaaacaacaaccacgac

SEQ ID NO: 92904 - DNA, 25 bp, Artificial
  Probe
tacattcttggaaaccttgaagacg

SEQ ID NO: 92905 - DNA, 25 bp, Artificial
  Probe
tttgaattccctatgtagtccagac

SEQ ID NO: 92906 - DNA, 25 bp, Artificial
  Probe
ctttgaattccctatgtagtccaga

SEQ ID NO: 92907 - DNA, 25 bp, Artificial
  Probe
tatgtagtccagactaacctcaaac

SEQ ID NO: 92908 - DNA, 25 bp, Artificial
  Probe
cactaactgtcaaacaacaaccacg

SEQ ID NO: 92909 - DNA, 25 bp, Artificial
  Probe
ctatgtagtccagactaacctcaaa

SEQ ID NO: 92910 - DNA, 25 bp, Artificial
  Probe
aattccctatgtagtccagactaac

SEQ ID NO: 92911 - DNA, 25 bp, Artificial
  Probe
tagtccagactaacctcaaacttga

SEQ ID NO: 92912 - DNA, 25 bp, Artificial
  Probe
gtagtccagactaacctcaaacttg

SEQ ID NO: 92913 - DNA, 25 bp, Artificial
  Probe
atgtagtccagactaacctcaaact

SEQ ID NO: 92914 - DNA, 25 bp, Artificial
  Probe
attccctatgtagtccagactaacc

SEQ ID NO: 92915 - DNA, 25 bp, Artificial
  Probe
tgtcagccatcttatgtctttccct

SEQ ID NO: 92916 - DNA, 25 bp, Artificial
  Probe
actaactgtcaaacaacaaccacga

SEQ ID NO: 92917 - DNA, 25 bp, Artificial
  Probe
tgtagtccagactaacctcaaactt

SEQ ID NO: 92918 - DNA, 25 bp, Artificial
  Probe
ccaagaagcgaatgattgtcagcaa

SEQ ID NO: 92919 - DNA, 25 bp, Artificial
  Probe
gctttgaattccctatgtagtccag

SEQ ID NO: 92920 - DNA, 25 bp, Artificial
  Probe
ctggctttgaattccctatgtagtc

SEQ ID NO: 92921 - DNA, 25 bp, Artificial
  Probe
gcactaactgtcaaacaacaaccac

SEQ ID NO: 92922 - DNA, 25 bp, Artificial
  Probe
ggattagtagtgtgtaagcgaagag

SEQ ID NO: 92923 - DNA, 25 bp, Artificial
  Probe
gaggattagtagtgtgtaagcgaag

SEQ ID NO: 92924 - DNA, 25 bp, Artificial
  Probe
aggattagtagtgtgtaagcgaaga

SEQ ID NO: 92925 - DNA, 25 bp, Artificial
  Probe
agaggattagtagtgtgtaagcgaa

SEQ ID NO: 92926 - DNA, 25 bp, Artificial
  Probe
gattagtagtgtgtaagcgaagagc

SEQ ID NO: 92927 - DNA, 25 bp, Artificial
  Probe
gagaggattagtagtgtgtaagcga

SEQ ID NO: 92928 - DNA, 25 bp, Artificial
  Probe
agcgagaggattagtagtgtgtaag

SEQ ID NO: 92929 - DNA, 25 bp, Artificial
  Probe
cagcgagaggattagtagtgtgtaa

SEQ ID NO: 92930 - DNA, 25 bp, Artificial
  Probe
attagtagtgtgtaagcgaagagca

SEQ ID NO: 92931 - DNA, 25 bp, Artificial
  Probe
ttagtagtgtgtaagcgaagagcag

SEQ ID NO: 92932 - DNA, 25 bp, Artificial
  Probe
tcagcgagaggattagtagtgtgta

SEQ ID NO: 92933 - DNA, 25 bp, Artificial
  Probe
cgagaggattagtagtgtgtaagcg

SEQ ID NO: 92934 - DNA, 25 bp, Artificial
  Probe
gcgagaggattagtagtgtgtaagc

SEQ ID NO: 92935 - DNA, 25 bp, Artificial
  Probe
ttggcattgtattctttgtgtttct

SEQ ID NO: 92936 - DNA, 25 bp, Artificial
  Probe
ggcattgtattctttgtgtttctga

SEQ ID NO: 92937 - DNA, 25 bp, Artificial
  Probe
cttggcattgtattctttgtgtttc

SEQ ID NO: 92938 - DNA, 25 bp, Artificial
  Probe
tggcattgtattctttgtgtttctg

SEQ ID NO: 92939 - DNA, 25 bp, Artificial
  Probe
ccttggcattgtattctttgtgttt

SEQ ID NO: 92940 - DNA, 25 bp, Artificial
  Probe
ttaccgaagggctttctctaaatat

SEQ ID NO: 92941 - DNA, 25 bp, Artificial
  Probe
aatgtggtcagcgagaggattagta

SEQ ID NO: 92942 - DNA, 25 bp, Artificial
  Probe
tctaatgtggtcagcgagaggatta

SEQ ID NO: 92943 - DNA, 25 bp, Artificial
  Probe
atagagatgcaggtggagaacttag

SEQ ID NO: 92944 - DNA, 25 bp, Artificial
  Probe
tccttggcattgtattctttgtgtt

SEQ ID NO: 92945 - DNA, 25 bp, Artificial
  Probe
tttaccgaagggctttctctaaata

SEQ ID NO: 92946 - DNA, 25 bp, Artificial
  Probe
gcattgtattctttgtgtttctgat

SEQ ID NO: 92947 - DNA, 25 bp, Artificial
  Probe
aagtccttggcattgtattctttgt

SEQ ID NO: 92948 - DNA, 25 bp, Artificial
  Probe
aatttaccgaagggctttctctaaa

SEQ ID NO: 92949 - DNA, 25 bp, Artificial
  Probe
taatgtggtcagcgagaggattagt

SEQ ID NO: 92950 - DNA, 25 bp, Artificial
  Probe
agtccttggcattgtattctttgtg

SEQ ID NO: 92951 - DNA, 25 bp, Artificial
  Probe
catagagatgcaggtggagaactta

SEQ ID NO: 92952 - DNA, 25 bp, Artificial
  Probe
atgtggtcagcgagaggattagtag

SEQ ID NO: 92953 - DNA, 25 bp, Artificial
  Probe
gtccttggcattgtattctttgtgt

SEQ ID NO: 92954 - DNA, 25 bp, Artificial
  Probe
tagagatgcaggtggagaacttaga

SEQ ID NO: 92955 - DNA, 25 bp, Artificial
  Probe
tatgtgtgttcaggcatcaatcctc

SEQ ID NO: 92956 - DNA, 25 bp, Artificial
  Probe
ctatgtgtgttcaggcatcaatcct

SEQ ID NO: 92957 - DNA, 25 bp, Artificial
  Probe
gtcagcgagaggattagtagtgtgt

SEQ ID NO: 92958 - DNA, 25 bp, Artificial
  Probe
aatgtgtttgtgtggattggctatg

SEQ ID NO: 92959 - DNA, 25 bp, Artificial
  Probe
taccgaagggctttctctaaatatt

SEQ ID NO: 92960 - DNA, 25 bp, Artificial
  Probe
catcaccaatatcctgtcggttctt

SEQ ID NO: 92961 - DNA, 25 bp, Artificial
  Probe
ttcatcaccaatatcctgtcggttc

SEQ ID NO: 92962 - DNA, 25 bp, Artificial
  Probe
ttgtgtggattggctatgtgtgttc

SEQ ID NO: 92963 - DNA, 25 bp, Artificial
  Probe
gcttctcaatgtgtttgtgtggatt

SEQ ID NO: 92964 - DNA, 25 bp, Artificial
  Probe
gtaaatattgctgtgtgacaagaca

SEQ ID NO: 92965 - DNA, 25 bp, Artificial
  Probe
tgtaaatattgctgtgtgacaagac

SEQ ID NO: 92966 - DNA, 25 bp, Artificial
  Probe
aaatttaccgaagggctttctctaa

SEQ ID NO: 92967 - DNA, 25 bp, Artificial
  Probe
ctaggaacaattcatgccatatctg

SEQ ID NO: 92968 - DNA, 25 bp, Artificial
  Probe
cctctaggaacaattcatgccatat

SEQ ID NO: 92969 - DNA, 25 bp, Artificial
  Probe
tctaggaacaattcatgccatatct

SEQ ID NO: 92970 - DNA, 25 bp, Artificial
  Probe
ctctaggaacaattcatgccatatc

SEQ ID NO: 92971 - DNA, 25 bp, Artificial
  Probe
taggaacaattcatgccatatctga

SEQ ID NO: 92972 - DNA, 25 bp, Artificial
  Probe
tcagagagatacaaacaggtagaac

SEQ ID NO: 92973 - DNA, 25 bp, Artificial
  Probe
gtcagagagatacaaacaggtagaa

SEQ ID NO: 92974 - DNA, 25 bp, Artificial
  Probe
atggtcagagagatacaaacaggta

SEQ ID NO: 92975 - DNA, 25 bp, Artificial
  Probe
ggtcagagagatacaaacaggtaga

SEQ ID NO: 92976 - DNA, 25 bp, Artificial
  Probe
tggtcagagagatacaaacaggtag

SEQ ID NO: 92977 - DNA, 25 bp, Artificial
  Probe
atgatggtcagagagatacaaacag

SEQ ID NO: 92978 - DNA, 25 bp, Artificial
  Probe
gatggtcagagagatacaaacaggt

SEQ ID NO: 92979 - DNA, 25 bp, Artificial
  Probe
ccatttctatcatgctgccttaata

SEQ ID NO: 92980 - DNA, 25 bp, Artificial
  Probe
catgatggtcagagagatacaaaca

SEQ ID NO: 92981 - DNA, 25 bp, Artificial
  Probe
tgatggtcagagagatacaaacagg

SEQ ID NO: 92982 - DNA, 25 bp, Artificial
  Probe
cccatttctatcatgctgccttaat

SEQ ID NO: 92983 - DNA, 25 bp, Artificial
  Probe
ggaacaattcatgccatatctgaag

SEQ ID NO: 92984 - DNA, 25 bp, Artificial
  Probe
aggaacaattcatgccatatctgaa

SEQ ID NO: 92985 - DNA, 25 bp, Artificial
  Probe
gaacaattcatgccatatctgaagc

SEQ ID NO: 92986 - DNA, 25 bp, Artificial
  Probe
cagagagatacaaacaggtagaacc

SEQ ID NO: 92987 - DNA, 25 bp, Artificial
  Probe
agagagatacaaacaggtagaaccc

SEQ ID NO: 92988 - DNA, 25 bp, Artificial
  Probe
gagagatacaaacaggtagaaccca

SEQ ID NO: 92989 - DNA, 25 bp, Artificial
  Probe
aacaattcatgccatatctgaagcc

SEQ ID NO: 92990 - DNA, 25 bp, Artificial
  Probe
agagatacaaacaggtagaacccac

SEQ ID NO: 92991 - DNA, 25 bp, Artificial
  Probe
catttctatcatgctgccttaataa

SEQ ID NO: 92992 - DNA, 25 bp, Artificial
  Probe
ccatgatggtcagagagatacaaac

SEQ ID NO: 92993 - DNA, 25 bp, Artificial
  Probe
gagatacaaacaggtagaacccaca

SEQ ID NO: 92994 - DNA, 25 bp, Artificial
  Probe
agatacaaacaggtagaacccacac

SEQ ID NO: 92995 - DNA, 25 bp, Artificial
  Probe
gatacaaacaggtagaacccacaca

SEQ ID NO: 92996 - DNA, 25 bp, Artificial
  Probe
atacaaacaggtagaacccacacac

SEQ ID NO: 92997 - DNA, 25 bp, Artificial
  Probe
atttctatcatgctgccttaataaa

SEQ ID NO: 92998 - DNA, 25 bp, Artificial
  Probe
cacagattacacctttgcgatgtac

SEQ ID NO: 92999 - DNA, 25 bp, Artificial
  Probe
gccatgatggtcagagagatacaaa

SEQ ID NO: 93000 - DNA, 25 bp, Artificial
  Probe
gcccatttctatcatgctgccttaa

SEQ ID NO: 93001 - DNA, 25 bp, Artificial
  Probe
ccacagattacacctttgcgatgta

SEQ ID NO: 93002 - DNA, 25 bp, Artificial
  Probe
atttcttttgagtccctcctctgtc

SEQ ID NO: 93003 - DNA, 25 bp, Artificial
  Probe
acagattacacctttgcgatgtacc

SEQ ID NO: 93004 - DNA, 25 bp, Artificial
  Probe
catttcttttgagtccctcctctgt

SEQ ID NO: 93005 - DNA, 25 bp, Artificial
  Probe
cacacaccagcatttcttttgagtc

SEQ ID NO: 93006 - DNA, 25 bp, Artificial
  Probe
gattacacctttgcgatgtaccctc

SEQ ID NO: 93007 - DNA, 25 bp, Artificial
  Probe
cagattacacctttgcgatgtaccc

SEQ ID NO: 93008 - DNA, 25 bp, Artificial
  Probe
tttcttttgagtccctcctctgtct

SEQ ID NO: 93009 - DNA, 25 bp, Artificial
  Probe
agattacacctttgcgatgtaccct

SEQ ID NO: 93010 - DNA, 25 bp, Artificial
  Probe
cagttcctcttccttcccactcaac

SEQ ID NO: 93011 - DNA, 25 bp, Artificial
  Probe
ggccatgatggtcagagagatacaa

SEQ ID NO: 93012 - DNA, 25 bp, Artificial
  Probe
ctcctctctcaatcccatcatctat

SEQ ID NO: 93013 - DNA, 25 bp, Artificial
  Probe
ctcaatcccatcatctatgccttta

SEQ ID NO: 93014 - DNA, 25 bp, Artificial
  Probe
tcaatcccatcatctatgcctttaa

SEQ ID NO: 93015 - DNA, 25 bp, Artificial
  Probe
ctactgcctatgtccacatgatacc

SEQ ID NO: 93016 - DNA, 25 bp, Artificial
  Probe
tcctctctcaatcccatcatctatg

SEQ ID NO: 93017 - DNA, 25 bp, Artificial
  Probe
atcccatcatctatgcctttaatgc

SEQ ID NO: 93018 - DNA, 25 bp, Artificial
  Probe
aatcccatcatctatgcctttaatg

SEQ ID NO: 93019 - DNA, 25 bp, Artificial
  Probe
caatcccatcatctatgcctttaat

SEQ ID NO: 93020 - DNA, 25 bp, Artificial
  Probe
actcctctctcaatcccatcatcta

SEQ ID NO: 93021 - DNA, 25 bp, Artificial
  Probe
tctcaatcccatcatctatgccttt

SEQ ID NO: 93022 - DNA, 25 bp, Artificial
  Probe
gctactgcctatgtccacatgatac

SEQ ID NO: 93023 - DNA, 25 bp, Artificial
  Probe
gaaacattctcatgggcatatacaa

SEQ ID NO: 93024 - DNA, 25 bp, Artificial
  Probe
ctctcaatcccatcatctatgcctt

SEQ ID NO: 93025 - DNA, 25 bp, Artificial
  Probe
attctcatgggcatatacaatggtg

SEQ ID NO: 93026 - DNA, 25 bp, Artificial
  Probe
cagacggtaaacatcagtaatgagc

SEQ ID NO: 93027 - DNA, 25 bp, Artificial
  Probe
gcagacggtaaacatcagtaatgag

SEQ ID NO: 93028 - DNA, 25 bp, Artificial
  Probe
aaacattctcatgggcatatacaat

SEQ ID NO: 93029 - DNA, 25 bp, Artificial
  Probe
caactcctctctcaatcccatcatc

SEQ ID NO: 93030 - DNA, 25 bp, Artificial
  Probe
ctctctcaatcccatcatctatgcc

SEQ ID NO: 93031 - DNA, 25 bp, Artificial
  Probe
cctctctcaatcccatcatctatgc

SEQ ID NO: 93032 - DNA, 25 bp, Artificial
  Probe
aactcctctctcaatcccatcatct

SEQ ID NO: 93033 - DNA, 25 bp, Artificial
  Probe
cctatgtccacatgataccgaatgc

SEQ ID NO: 93034 - DNA, 25 bp, Artificial
  Probe
gcctatgtccacatgataccgaatg

SEQ ID NO: 93035 - DNA, 25 bp, Artificial
  Probe
tctctcaatcccatcatctatgcct

SEQ ID NO: 93036 - DNA, 25 bp, Artificial
  Probe
tatgtccacatgataccgaatgcag

SEQ ID NO: 93037 - DNA, 25 bp, Artificial
  Probe
ctatgtccacatgataccgaatgca

SEQ ID NO: 93038 - DNA, 25 bp, Artificial
  Probe
gagaaatgacgaggctgttggataa

SEQ ID NO: 93039 - DNA, 25 bp, Artificial
  Probe
tgcctatgtccacatgataccgaat

SEQ ID NO: 93040 - DNA, 25 bp, Artificial
  Probe
tactgcctatgtccacatgataccg

SEQ ID NO: 93041 - DNA, 25 bp, Artificial
  Probe
aacattctcatgggcatatacaatg

SEQ ID NO: 93042 - DNA, 25 bp, Artificial
  Probe
ttctcatgggcatatacaatggtgg

SEQ ID NO: 93043 - DNA, 25 bp, Artificial
  Probe
gaaatgacgaggctgttggataact

SEQ ID NO: 93044 - DNA, 25 bp, Artificial
  Probe
agaaatgacgaggctgttggataac

SEQ ID NO: 93045 - DNA, 25 bp, Artificial
  Probe
agacggtaaacatcagtaatgagct

SEQ ID NO: 93046 - DNA, 25 bp, Artificial
  Probe
gtccacatgataccgaatgcagtat

SEQ ID NO: 93047 - DNA, 25 bp, Artificial
  Probe
cattctcatgggcatatacaatggt

SEQ ID NO: 93048 - DNA, 25 bp, Artificial
  Probe
acattctcatgggcatatacaatgg

SEQ ID NO: 93049 - DNA, 25 bp, Artificial
  Probe
agaaacattctcatgggcatataca

SEQ ID NO: 93050 - DNA, 25 bp, Artificial
  Probe
aaactgcttagaaacattctcatgg

SEQ ID NO: 93051 - DNA, 25 bp, Artificial
  Probe
ctgtagtctgctgcatagaaacaaa

SEQ ID NO: 93052 - DNA, 25 bp, Artificial
  Probe
cgctactgcctatgtccacatgata

SEQ ID NO: 93053 - DNA, 25 bp, Artificial
  Probe
ccaactcctctctcaatcccatcat

SEQ ID NO: 93054 - DNA, 25 bp, Artificial
  Probe
agtgcagacggtaaacatcagtaat

SEQ ID NO: 93055 - DNA, 25 bp, Artificial
  Probe
tgtagtctgctgcatagaaacaaac

SEQ ID NO: 93056 - DNA, 25 bp, Artificial
  Probe
cttagaaacattctcatgggcatat

SEQ ID NO: 93057 - DNA, 25 bp, Artificial
  Probe
ggaaaggaaagatgaccacatactt

SEQ ID NO: 93058 - DNA, 25 bp, Artificial
  Probe
gaatgccaccgaggatgagataatg

SEQ ID NO: 93059 - DNA, 25 bp, Artificial
  Probe
catcagcaacaagtctacaaaggag

SEQ ID NO: 93060 - DNA, 25 bp, Artificial
  Probe
aagatgaccacatactttctgatcc

SEQ ID NO: 93061 - DNA, 25 bp, Artificial
  Probe
aaagggtttgaaattgtcaggagag

SEQ ID NO: 93062 - DNA, 25 bp, Artificial
  Probe
atcagcaacaagtctacaaaggaga

SEQ ID NO: 93063 - DNA, 25 bp, Artificial
  Probe
agatgaccacatactttctgatcca

SEQ ID NO: 93064 - DNA, 25 bp, Artificial
  Probe
tgaatgccaccgaggatgagataat

SEQ ID NO: 93065 - DNA, 25 bp, Artificial
  Probe
gggaaaggaaagatgaccacatact

SEQ ID NO: 93066 - DNA, 25 bp, Artificial
  Probe
atcaccagatgagaccaagacaagt

SEQ ID NO: 93067 - DNA, 25 bp, Artificial
  Probe
agtcaataaccagccatcaccagat

SEQ ID NO: 93068 - DNA, 25 bp, Artificial
  Probe
gatgaccacatactttctgatccag

SEQ ID NO: 93069 - DNA, 25 bp, Artificial
  Probe
ccatcagcaacaagtctacaaagga

SEQ ID NO: 93070 - DNA, 25 bp, Artificial
  Probe
gaccatcagcaacaagtctacaaag

SEQ ID NO: 93071 - DNA, 25 bp, Artificial
  Probe
ctgaatgccaccgaggatgagataa

SEQ ID NO: 93072 - DNA, 25 bp, Artificial
  Probe
cttctaatgaagtcacacttgctgg

SEQ ID NO: 93073 - DNA, 25 bp, Artificial
  Probe
gaaaggaaagatgaccacatacttt

SEQ ID NO: 93074 - DNA, 25 bp, Artificial
  Probe
gctgatgggaaggaagtatgtactc

SEQ ID NO: 93075 - DNA, 25 bp, Artificial
  Probe
accatcagcaacaagtctacaaagg

SEQ ID NO: 93076 - DNA, 25 bp, Artificial
  Probe
aagggtttgaaattgtcaggagagg

SEQ ID NO: 93077 - DNA, 25 bp, Artificial
  Probe
aactccacagatgcagtcaataacc

SEQ ID NO: 93078 - DNA, 25 bp, Artificial
  Probe
ctgatgggaaggaagtatgtactcc

SEQ ID NO: 93079 - DNA, 25 bp, Artificial
  Probe
gacgcttctaatgaagtcacacttg

SEQ ID NO: 93080 - DNA, 25 bp, Artificial
  Probe
agacgcttctaatgaagtcacactt

SEQ ID NO: 93081 - DNA, 25 bp, Artificial
  Probe
gaaactccacagatgcagtcaataa

SEQ ID NO: 93082 - DNA, 25 bp, Artificial
  Probe
aaagatgaccacatactttctgatc

SEQ ID NO: 93083 - DNA, 25 bp, Artificial
  Probe
ctccacagatgcagtcaataaccag

SEQ ID NO: 93084 - DNA, 25 bp, Artificial
  Probe
aaactccacagatgcagtcaataac

SEQ ID NO: 93085 - DNA, 25 bp, Artificial
  Probe
gcttctaatgaagtcacacttgctg

SEQ ID NO: 93086 - DNA, 25 bp, Artificial
  Probe
cagtcaataaccagccatcaccaga

SEQ ID NO: 93087 - DNA, 25 bp, Artificial
  Probe
caaagggtttgaaattgtcaggaga

SEQ ID NO: 93088 - DNA, 25 bp, Artificial
  Probe
cagacgcttctaatgaagtcacact

SEQ ID NO: 93089 - DNA, 25 bp, Artificial
  Probe
tcaccagatgagaccaagacaagtg

SEQ ID NO: 93090 - DNA, 25 bp, Artificial
  Probe
gaacacagaccatcagcaacaagtc

SEQ ID NO: 93091 - DNA, 25 bp, Artificial
  Probe
gatgagaccaagacaagtgtcgttg

SEQ ID NO: 93092 - DNA, 25 bp, Artificial
  Probe
agatgagaccaagacaagtgtcgtt

SEQ ID NO: 93093 - DNA, 25 bp, Artificial
  Probe
catcaccagatgagaccaagacaag

SEQ ID NO: 93094 - DNA, 25 bp, Artificial
  Probe
aaacaaagggtttgaaattgtcagg

SEQ ID NO: 93095 - DNA, 25 bp, Artificial
  Probe
catggcagcaaagggaattaattta

SEQ ID NO: 93096 - DNA, 25 bp, Artificial
  Probe
atggcagcaaagggaattaatttat

SEQ ID NO: 93097 - DNA, 25 bp, Artificial
  Probe
caccagatgagaccaagacaagtgt

SEQ ID NO: 93098 - DNA, 25 bp, Artificial
  Probe
accagatgagaccaagacaagtgtc

SEQ ID NO: 93099 - DNA, 25 bp, Artificial
  Probe
actccacagatgcagtcaataacca

SEQ ID NO: 93100 - DNA, 25 bp, Artificial
  Probe
gaagtgaaggggaaaggaaagatga

SEQ ID NO: 93101 - DNA, 25 bp, Artificial
  Probe
tggcagcaaagggaattaatttata

SEQ ID NO: 93102 - DNA, 25 bp, Artificial
  Probe
acaagtggtgtctaatgataagtca

SEQ ID NO: 93103 - DNA, 25 bp, Artificial
  Probe
aacaagtggtgtctaatgataagtc

SEQ ID NO: 93104 - DNA, 25 bp, Artificial
  Probe
tatattctgtgaagacctatcctca

SEQ ID NO: 93105 - DNA, 25 bp, Artificial
  Probe
tttatcctttccaacatcagacagt

SEQ ID NO: 93106 - DNA, 25 bp, Artificial
  Probe
ttatcctttccaacatcagacagtg

SEQ ID NO: 93107 - DNA, 25 bp, Artificial
  Probe
atctcagtgaaagcagtaatggtaa

SEQ ID NO: 93108 - DNA, 25 bp, Artificial
  Probe
ttgagaggaaagtaagcgtttaagt

SEQ ID NO: 93109 - DNA, 25 bp, Artificial
  Probe
attgagaggaaagtaagcgtttaag

SEQ ID NO: 93110 - DNA, 25 bp, Artificial
  Probe
aattgaattgagaggaaagtaagcg

SEQ ID NO: 93111 - DNA, 25 bp, Artificial
  Probe
atttatcctttccaacatcagacag

SEQ ID NO: 93112 - DNA, 25 bp, Artificial
  Probe
gaattgagaggaaagtaagcgttta

SEQ ID NO: 93113 - DNA, 25 bp, Artificial
  Probe
tctcagtgaaagcagtaatggtaac

SEQ ID NO: 93114 - DNA, 25 bp, Artificial
  Probe
attgaattgagaggaaagtaagcgt

SEQ ID NO: 93115 - DNA, 25 bp, Artificial
  Probe
aaagcagtaatggtaacagcagtag

SEQ ID NO: 93116 - DNA, 25 bp, Artificial
  Probe
gaaagcagtaatggtaacagcagta

SEQ ID NO: 93117 - DNA, 25 bp, Artificial
  Probe
agtcttggtttagaaggagatttgt

SEQ ID NO: 93118 - DNA, 25 bp, Artificial
  Probe
gtgatgttatttgctaatactgcca

SEQ ID NO: 93119 - DNA, 25 bp, Artificial
  Probe
tgagaggaaagtaagcgtttaagtg

SEQ ID NO: 93120 - DNA, 25 bp, Artificial
  Probe
cagtcttggtttagaaggagatttg

SEQ ID NO: 93121 - DNA, 25 bp, Artificial
  Probe
tcagtgaaagcagtaatggtaacag

SEQ ID NO: 93122 - DNA, 25 bp, Artificial
  Probe
ctcagtgaaagcagtaatggtaaca

SEQ ID NO: 93123 - DNA, 25 bp, Artificial
  Probe
ttgaattgagaggaaagtaagcgtt

SEQ ID NO: 93124 - DNA, 25 bp, Artificial
  Probe
catctcagtgaaagcagtaatggta

SEQ ID NO: 93125 - DNA, 25 bp, Artificial
  Probe
ttaagctcgtacatactgcattagt

SEQ ID NO: 93126 - DNA, 25 bp, Artificial
  Probe
tgaattgagaggaaagtaagcgttt

SEQ ID NO: 93127 - DNA, 25 bp, Artificial
  Probe
aattgagaggaaagtaagcgtttaa

SEQ ID NO: 93128 - DNA, 25 bp, Artificial
  Probe
ctcgtacatactgcattagtgactt

SEQ ID NO: 93129 - DNA, 25 bp, Artificial
  Probe
taagctcgtacatactgcattagtg

SEQ ID NO: 93130 - DNA, 25 bp, Artificial
  Probe
catgagatatattctgtgaagacct

SEQ ID NO: 93131 - DNA, 25 bp, Artificial
  Probe
gcgtttaagtgctttctgtcattac

SEQ ID NO: 93132 - DNA, 25 bp, Artificial
  Probe
aagcagtaatggtaacagcagtagc

SEQ ID NO: 93133 - DNA, 25 bp, Artificial
  Probe
tcgtacatactgcattagtgactta

SEQ ID NO: 93134 - DNA, 25 bp, Artificial
  Probe
gcagtcttggtttagaaggagattt

SEQ ID NO: 93135 - DNA, 25 bp, Artificial
  Probe
catcatctcagtgaaagcagtaatg

SEQ ID NO: 93136 - DNA, 25 bp, Artificial
  Probe
agtgatgttatttgctaatactgcc

SEQ ID NO: 93137 - DNA, 25 bp, Artificial
  Probe
ctgtgatgaaatactacgaagtggt

SEQ ID NO: 93138 - DNA, 25 bp, Artificial
  Probe
aatttatcctttccaacatcagaca

SEQ ID NO: 93139 - DNA, 25 bp, Artificial
  Probe
acaatttatcctttccaacatcaga

SEQ ID NO: 93140 - DNA, 25 bp, Artificial
  Probe
tgatgttatttgctaatactgccaa

SEQ ID NO: 93141 - DNA, 25 bp, Artificial
  Probe
acatgagatatattctgtgaagacc

SEQ ID NO: 93142 - DNA, 25 bp, Artificial
  Probe
tgagaacaatttatcctttccaaca

SEQ ID NO: 93143 - DNA, 25 bp, Artificial
  Probe
tggtttagaaggagatttgtatgag

SEQ ID NO: 93144 - DNA, 25 bp, Artificial
  Probe
tgtgatgaaatactacgaagtggtg

SEQ ID NO: 93145 - DNA, 25 bp, Artificial
  Probe
atcatctcagtgaaagcagtaatgg

SEQ ID NO: 93146 - DNA, 25 bp, Artificial
  Probe
ccatcatctcagtgaaagcagtaat

SEQ ID NO: 93147 - DNA, 25 bp, Artificial
  Probe
aacacagggatactacttgaacttt

SEQ ID NO: 93148 - DNA, 25 bp, Artificial
  Probe
acacagggatactacttgaactttc

SEQ ID NO: 93149 - DNA, 25 bp, Artificial
  Probe
caacacagggatactacttgaactt

SEQ ID NO: 93150 - DNA, 25 bp, Artificial
  Probe
tgtaattattgtgatttcctgtggc

SEQ ID NO: 93151 - DNA, 25 bp, Artificial
  Probe
actacttgaactttcctatcatagc

SEQ ID NO: 93152 - DNA, 25 bp, Artificial
  Probe
cagggatactacttgaactttccta

SEQ ID NO: 93153 - DNA, 25 bp, Artificial
  Probe
acagggatactacttgaactttcct

SEQ ID NO: 93154 - DNA, 25 bp, Artificial
  Probe
cacagggatactacttgaactttcc

SEQ ID NO: 93155 - DNA, 25 bp, Artificial
  Probe
gaactttcctatcatagctcccatg

SEQ ID NO: 93156 - DNA, 25 bp, Artificial
  Probe
acttgaactttcctatcatagctcc

SEQ ID NO: 93157 - DNA, 25 bp, Artificial
  Probe
gcaacacagggatactacttgaact

SEQ ID NO: 93158 - DNA, 25 bp, Artificial
  Probe
cttgaactttcctatcatagctccc

SEQ ID NO: 93159 - DNA, 25 bp, Artificial
  Probe
agggatactacttgaactttcctat

SEQ ID NO: 93160 - DNA, 25 bp, Artificial
  Probe
tgaactttcctatcatagctcccat

SEQ ID NO: 93161 - DNA, 25 bp, Artificial
  Probe
ttgtaattattgtgatttcctgtgg

SEQ ID NO: 93162 - DNA, 25 bp, Artificial
  Probe
ttgaactttcctatcatagctccca

SEQ ID NO: 93163 - DNA, 25 bp, Artificial
  Probe
gggatactacttgaactttcctatc

SEQ ID NO: 93164 - DNA, 25 bp, Artificial
  Probe
ggatactacttgaactttcctatca

SEQ ID NO: 93165 - DNA, 25 bp, Artificial
  Probe
tacttgaactttcctatcatagctc

SEQ ID NO: 93166 - DNA, 25 bp, Artificial
  Probe
ctacttgaactttcctatcatagct

SEQ ID NO: 93167 - DNA, 25 bp, Artificial
  Probe
aactttcctatcatagctcccatgc

SEQ ID NO: 93168 - DNA, 25 bp, Artificial
  Probe
gtaattattgtgatttcctgtggcc

SEQ ID NO: 93169 - DNA, 25 bp, Artificial
  Probe
taattattgtgatttcctgtggccc

SEQ ID NO: 93170 - DNA, 25 bp, Artificial
  Probe
gtccttgctcccagtatcttcctac

SEQ ID NO: 93171 - DNA, 25 bp, Artificial
  Probe
tgcaacacagggatactacttgaac

SEQ ID NO: 93172 - DNA, 25 bp, Artificial
  Probe
tttgtaattattgtgatttcctgtg

SEQ ID NO: 93173 - DNA, 25 bp, Artificial
  Probe
aagcggaaaaggttttattttgtaa

SEQ ID NO: 93174 - DNA, 25 bp, Artificial
  Probe
aaagcggaaaaggttttattttgta

SEQ ID NO: 93175 - DNA, 25 bp, Artificial
  Probe
gtgcaacacagggatactacttgaa

SEQ ID NO: 93176 - DNA, 25 bp, Artificial
  Probe
agcggaaaaggttttattttgtaat

SEQ ID NO: 93177 - DNA, 25 bp, Artificial
  Probe
gatactacttgaactttcctatcat

SEQ ID NO: 93178 - DNA, 25 bp, Artificial
  Probe
gcggaaaaggttttattttgtaatt

SEQ ID NO: 93179 - DNA, 25 bp, Artificial
  Probe
ctttcctatcatagctcccatgcca

SEQ ID NO: 93180 - DNA, 25 bp, Artificial
  Probe
actttcctatcatagctcccatgcc

SEQ ID NO: 93181 - DNA, 25 bp, Artificial
  Probe
tccttgctcccagtatcttcctact

SEQ ID NO: 93182 - DNA, 25 bp, Artificial
  Probe
ggtccttgctcccagtatcttccta

SEQ ID NO: 93183 - DNA, 25 bp, Artificial
  Probe
tttcctatcatagctcccatgccac

SEQ ID NO: 93184 - DNA, 25 bp, Artificial
  Probe
tactacttgaactttcctatcatag

SEQ ID NO: 93185 - DNA, 25 bp, Artificial
  Probe
aaggtgcaacacagggatactactt

SEQ ID NO: 93186 - DNA, 25 bp, Artificial
  Probe
acccgccttttataaacctctaatt

SEQ ID NO: 93187 - DNA, 25 bp, Artificial
  Probe
cccgccttttataaacctctaattt

SEQ ID NO: 93188 - DNA, 25 bp, Artificial
  Probe
cacccgccttttataaacctctaat

SEQ ID NO: 93189 - DNA, 25 bp, Artificial
  Probe
ctatcatagctcccatgccacagag

SEQ ID NO: 93190 - DNA, 25 bp, Artificial
  Probe
gaaggtgcaacacagggatactact

SEQ ID NO: 93191 - DNA, 25 bp, Artificial
  Probe
ggtgcaacacagggatactacttga

SEQ ID NO: 93192 - DNA, 25 bp, Artificial
  Probe
cttacttctaatgacatcgacatcg

SEQ ID NO: 93193 - DNA, 25 bp, Artificial
  Probe
ttacttctaatgacatcgacatcgc

SEQ ID NO: 93194 - DNA, 25 bp, Artificial
  Probe
cttacctccctccagaaacaataac

SEQ ID NO: 93195 - DNA, 25 bp, Artificial
  Probe
ctaagtggagcggtttacaattaac

SEQ ID NO: 93196 - DNA, 25 bp, Artificial
  Probe
cctaagtggagcggtttacaattaa

SEQ ID NO: 93197 - DNA, 25 bp, Artificial
  Probe
taagtggagcggtttacaattaact

SEQ ID NO: 93198 - DNA, 25 bp, Artificial
  Probe
ccttacctccctccagaaacaataa

SEQ ID NO: 93199 - DNA, 25 bp, Artificial
  Probe
ttacctccctccagaaacaataacc

SEQ ID NO: 93200 - DNA, 25 bp, Artificial
  Probe
ctcgccagcccaataataaacattt

SEQ ID NO: 93201 - DNA, 25 bp, Artificial
  Probe
tactcgccagcccaataataaacat

SEQ ID NO: 93202 - DNA, 25 bp, Artificial
  Probe
ctccctccagaaacaataacctacc

SEQ ID NO: 93203 - DNA, 25 bp, Artificial
  Probe
cctccctccagaaacaataacctac

SEQ ID NO: 93204 - DNA, 25 bp, Artificial
  Probe
tccttacctccctccagaaacaata

SEQ ID NO: 93205 - DNA, 25 bp, Artificial
  Probe
tacttctaatgacatcgacatcgcc

SEQ ID NO: 93206 - DNA, 25 bp, Artificial
  Probe
aagtggagcggtttacaattaactg

SEQ ID NO: 93207 - DNA, 25 bp, Artificial
  Probe
gttactcgccagcccaataataaac

SEQ ID NO: 93208 - DNA, 25 bp, Artificial
  Probe
ttactcgccagcccaataataaaca

SEQ ID NO: 93209 - DNA, 25 bp, Artificial
  Probe
tgttactcgccagcccaataataaa

SEQ ID NO: 93210 - DNA, 25 bp, Artificial
  Probe
gaaatccttacctccctccagaaac

SEQ ID NO: 93211 - DNA, 25 bp, Artificial
  Probe
tccctccagaaacaataacctacct

SEQ ID NO: 93212 - DNA, 25 bp, Artificial
  Probe
acctccctccagaaacaataaccta

SEQ ID NO: 93213 - DNA, 25 bp, Artificial
  Probe
tacctccctccagaaacaataacct

SEQ ID NO: 93214 - DNA, 25 bp, Artificial
  Probe
agaaatccttacctccctccagaaa

SEQ ID NO: 93215 - DNA, 25 bp, Artificial
  Probe
ccctaagtggagcggtttacaatta

SEQ ID NO: 93216 - DNA, 25 bp, Artificial
  Probe
agtattgctatagaagccaatggag

SEQ ID NO: 93217 - DNA, 25 bp, Artificial
  Probe
aagtattgctatagaagccaatgga

SEQ ID NO: 93218 - DNA, 25 bp, Artificial
  Probe
aagaaatccttacctccctccagaa

SEQ ID NO: 93219 - DNA, 25 bp, Artificial
  Probe
ttgttactcgccagcccaataataa

SEQ ID NO: 93220 - DNA, 25 bp, Artificial
  Probe
gtattgctatagaagccaatggagg

SEQ ID NO: 93221 - DNA, 25 bp, Artificial
  Probe
atccttacctccctccagaaacaat

SEQ ID NO: 93222 - DNA, 25 bp, Artificial
  Probe
actcgccagcccaataataaacatt

SEQ ID NO: 93223 - DNA, 25 bp, Artificial
  Probe
aatccttacctccctccagaaacaa

SEQ ID NO: 93224 - DNA, 25 bp, Artificial
  Probe
aaatccttacctccctccagaaaca

SEQ ID NO: 93225 - DNA, 25 bp, Artificial
  Probe
gaagaaatccttacctccctccaga

SEQ ID NO: 93226 - DNA, 25 bp, Artificial
  Probe
cttctaatgacatcgacatcgccaa

SEQ ID NO: 93227 - DNA, 25 bp, Artificial
  Probe
aaacaatcttttcaaacaccacagg

SEQ ID NO: 93228 - DNA, 25 bp, Artificial
  Probe
gatcctgggaagaaatccttacctc

SEQ ID NO: 93229 - DNA, 25 bp, Artificial
  Probe
cactagagggaaagtattgctatag

SEQ ID NO: 93230 - DNA, 25 bp, Artificial
  Probe
gcactagagggaaagtattgctata

SEQ ID NO: 93231 - DNA, 25 bp, Artificial
  Probe
agtggagcggtttacaattaactgg

SEQ ID NO: 93232 - DNA, 25 bp, Artificial
  Probe
actagagggaaagtattgctataga

SEQ ID NO: 93233 - DNA, 25 bp, Artificial
  Probe
aacaatcttttcaaacaccacagga

SEQ ID NO: 93234 - DNA, 25 bp, Artificial
  Probe
gcccaataataaacattttgctgat

SEQ ID NO: 93235 - DNA, 25 bp, Artificial
  Probe
tcgccagcccaataataaacatttt

SEQ ID NO: 93236 - DNA, 25 bp, Artificial
  Probe
attgttactcgccagcccaataata

SEQ ID NO: 93237 - DNA, 25 bp, Artificial
  Probe
gagcaacacctacaacaatgaagag

SEQ ID NO: 93238 - DNA, 25 bp, Artificial
  Probe
gcaacacctacaacaatgaagagtt

SEQ ID NO: 93239 - DNA, 25 bp, Artificial
  Probe
agagcaacacctacaacaatgaaga

SEQ ID NO: 93240 - DNA, 25 bp, Artificial
  Probe
cagagcaacacctacaacaatgaag

SEQ ID NO: 93241 - DNA, 25 bp, Artificial
  Probe
agcaacacctacaacaatgaagagt

SEQ ID NO: 93242 - DNA, 25 bp, Artificial
  Probe
caacacctacaacaatgaagagttt

SEQ ID NO: 93243 - DNA, 25 bp, Artificial
  Probe
aacacctacaacaatgaagagtttc

SEQ ID NO: 93244 - DNA, 25 bp, Artificial
  Probe
cctacaacaatgaagagtttcctga

SEQ ID NO: 93245 - DNA, 25 bp, Artificial
  Probe
acctacaacaatgaagagtttcctg

SEQ ID NO: 93246 - DNA, 25 bp, Artificial
  Probe
cacctacaacaatgaagagtttcct

SEQ ID NO: 93247 - DNA, 25 bp, Artificial
  Probe
ctacaacaatgaagagtttcctgat

SEQ ID NO: 93248 - DNA, 25 bp, Artificial
  Probe
acacctacaacaatgaagagtttcc

SEQ ID NO: 93249 - DNA, 25 bp, Artificial
  Probe
acaacaatgaagagtttcctgatct

SEQ ID NO: 93250 - DNA, 25 bp, Artificial
  Probe
ccagagcaacacctacaacaatgaa

SEQ ID NO: 93251 - DNA, 25 bp, Artificial
  Probe
gtttcctgatctaactatgtttccc

SEQ ID NO: 93252 - DNA, 25 bp, Artificial
  Probe
tacaacaatgaagagtttcctgatc

SEQ ID NO: 93253 - DNA, 25 bp, Artificial
  Probe
acaatgaagagtttcctgatctaac

SEQ ID NO: 93254 - DNA, 25 bp, Artificial
  Probe
caacaatgaagagtttcctgatcta

SEQ ID NO: 93255 - DNA, 25 bp, Artificial
  Probe
agatttctcgtcactccaaccttac

SEQ ID NO: 93256 - DNA, 25 bp, Artificial
  Probe
cagatttctcgtcactccaacctta

SEQ ID NO: 93257 - DNA, 25 bp, Artificial
  Probe
aatttcaggaatagtggtcttaccc

SEQ ID NO: 93258 - DNA, 25 bp, Artificial
  Probe
aacaatgaagagtttcctgatctaa

SEQ ID NO: 93259 - DNA, 25 bp, Artificial
  Probe
gaccagagcaacacctacaacaatg

SEQ ID NO: 93260 - DNA, 25 bp, Artificial
  Probe
ctgaggtctttcaagaaatgctgtc

SEQ ID NO: 93261 - DNA, 25 bp, Artificial
  Probe
gatttctcgtcactccaaccttacc

SEQ ID NO: 93262 - DNA, 25 bp, Artificial
  Probe
aggtctttcaagaaatgctgtccat

SEQ ID NO: 93263 - DNA, 25 bp, Artificial
  Probe
accagagcaacacctacaacaatga

SEQ ID NO: 93264 - DNA, 25 bp, Artificial
  Probe
ggtctttcaagaaatgctgtccatg

SEQ ID NO: 93265 - DNA, 25 bp, Artificial
  Probe
cggtctagttccaatgagcaacatg

SEQ ID NO: 93266 - DNA, 25 bp, Artificial
  Probe
agactcgttcttcacaatttggtgt

SEQ ID NO: 93267 - DNA, 25 bp, Artificial
  Probe
aatttggtgtgaacaactttcagac

SEQ ID NO: 93268 - DNA, 25 bp, Artificial
  Probe
caatttggtgtgaacaactttcaga

SEQ ID NO: 93269 - DNA, 25 bp, Artificial
  Probe
acaatttggtgtgaacaactttcag

SEQ ID NO: 93270 - DNA, 25 bp, Artificial
  Probe
gaggtctttcaagaaatgctgtcca

SEQ ID NO: 93271 - DNA, 25 bp, Artificial
  Probe
ctttcaagaaatgctgtccatgctg

SEQ ID NO: 93272 - DNA, 25 bp, Artificial
  Probe
aagactcgttcttcacaatttggtg

SEQ ID NO: 93273 - DNA, 25 bp, Artificial
  Probe
caagactcgttcttcacaatttggt

SEQ ID NO: 93274 - DNA, 25 bp, Artificial
  Probe
tctttcaagaaatgctgtccatgct

SEQ ID NO: 93275 - DNA, 25 bp, Artificial
  Probe
gtctttcaagaaatgctgtccatgc

SEQ ID NO: 93276 - DNA, 25 bp, Artificial
  Probe
tgaggtctttcaagaaatgctgtcc

SEQ ID NO: 93277 - DNA, 25 bp, Artificial
  Probe
cctgaggtctttcaagaaatgctgt

SEQ ID NO: 93278 - DNA, 25 bp, Artificial
  Probe
atttggtgtgaacaactttcagact

SEQ ID NO: 93279 - DNA, 25 bp, Artificial
  Probe
aaatttcaggaatagtggtcttacc

SEQ ID NO: 93280 - DNA, 25 bp, Artificial
  Probe
tttcctgatctaactatgtttcccc

SEQ ID NO: 93281 - DNA, 25 bp, Artificial
  Probe
tttggtgtgaacaactttcagactt

SEQ ID NO: 93282 - DNA, 25 bp, Artificial
  Probe
taatcacttatacactctggcatca

SEQ ID NO: 93283 - DNA, 25 bp, Artificial
  Probe
gactatcttgattctcacttccagt

SEQ ID NO: 93284 - DNA, 25 bp, Artificial
  Probe
cagactatcttgattctcacttcca

SEQ ID NO: 93285 - DNA, 25 bp, Artificial
  Probe
accagactatcttgattctcacttc

SEQ ID NO: 93286 - DNA, 25 bp, Artificial
  Probe
agactatcttgattctcacttccag

SEQ ID NO: 93287 - DNA, 25 bp, Artificial
  Probe
ccagactatcttgattctcacttcc

SEQ ID NO: 93288 - DNA, 25 bp, Artificial
  Probe
ttaatcacttatacactctggcatc

SEQ ID NO: 93289 - DNA, 25 bp, Artificial
  Probe
aagcagttcatcatgtctattgtct

SEQ ID NO: 93290 - DNA, 25 bp, Artificial
  Probe
agcagttcatcatgtctattgtcta

SEQ ID NO: 93291 - DNA, 25 bp, Artificial
  Probe
taccagactatcttgattctcactt

SEQ ID NO: 93292 - DNA, 25 bp, Artificial
  Probe
aatcacttatacactctggcatcag

SEQ ID NO: 93293 - DNA, 25 bp, Artificial
  Probe
ttgttgaactggtagcatcattgag

SEQ ID NO: 93294 - DNA, 25 bp, Artificial
  Probe
ataccagactatcttgattctcact

SEQ ID NO: 93295 - DNA, 25 bp, Artificial
  Probe
gcagttcatcatgtctattgtctaa

SEQ ID NO: 93296 - DNA, 25 bp, Artificial
  Probe
cattagtatcattcattaaccagcc

SEQ ID NO: 93297 - DNA, 25 bp, Artificial
  Probe
ttgaactggtagcatcattgagact

SEQ ID NO: 93298 - DNA, 25 bp, Artificial
  Probe
gttgaactggtagcatcattgagac

SEQ ID NO: 93299 - DNA, 25 bp, Artificial
  Probe
ttgttattaagtgtagctccagtca

SEQ ID NO: 93300 - DNA, 25 bp, Artificial
  Probe
tgttattaagtgtagctccagtcat

SEQ ID NO: 93301 - DNA, 25 bp, Artificial
  Probe
gataccagactatcttgattctcac

SEQ ID NO: 93302 - DNA, 25 bp, Artificial
  Probe
ttaatatgaagcaagataccagact

SEQ ID NO: 93303 - DNA, 25 bp, Artificial
  Probe
tgttgaactggtagcatcattgaga

SEQ ID NO: 93304 - DNA, 25 bp, Artificial
  Probe
aatatgaagcaagataccagactat

SEQ ID NO: 93305 - DNA, 25 bp, Artificial
  Probe
gttattaagtgtagctccagtcatt

SEQ ID NO: 93306 - DNA, 25 bp, Artificial
  Probe
attgttattaagtgtagctccagtc

SEQ ID NO: 93307 - DNA, 25 bp, Artificial
  Probe
gattgttattaagtgtagctccagt

SEQ ID NO: 93308 - DNA, 25 bp, Artificial
  Probe
tatccataaacagcaccactaacat

SEQ ID NO: 93309 - DNA, 25 bp, Artificial
  Probe
atcacttatacactctggcatcagg

SEQ ID NO: 93310 - DNA, 25 bp, Artificial
  Probe
acatcatgcacaagattagattcct

SEQ ID NO: 93311 - DNA, 25 bp, Artificial
  Probe
aacatcatgcacaagattagattcc

SEQ ID NO: 93312 - DNA, 25 bp, Artificial
  Probe
atatccataaacagcaccactaaca

SEQ ID NO: 93313 - DNA, 25 bp, Artificial
  Probe
catatccataaacagcaccactaac

SEQ ID NO: 93314 - DNA, 25 bp, Artificial
  Probe
ttctgccattccatatccataaaca

SEQ ID NO: 93315 - DNA, 25 bp, Artificial
  Probe
caactaccagatgagaactaggtct

SEQ ID NO: 93316 - DNA, 25 bp, Artificial
  Probe
accactaacatcatgcacaagatta

SEQ ID NO: 93317 - DNA, 25 bp, Artificial
  Probe
atatgaagcaagataccagactatc

SEQ ID NO: 93318 - DNA, 25 bp, Artificial
  Probe
ccatatccataaacagcaccactaa

SEQ ID NO: 93319 - DNA, 25 bp, Artificial
  Probe
tttctgccattccatatccataaac

SEQ ID NO: 93320 - DNA, 25 bp, Artificial
  Probe
agattgttattaagtgtagctccag

SEQ ID NO: 93321 - DNA, 25 bp, Artificial
  Probe
cgtatttccttgttgtctctgtaaa

SEQ ID NO: 93322 - DNA, 25 bp, Artificial
  Probe
tgaactggtagcatcattgagactg

SEQ ID NO: 93323 - DNA, 25 bp, Artificial
  Probe
atccataaacagcaccactaacatc

SEQ ID NO: 93324 - DNA, 25 bp, Artificial
  Probe
attccatatccataaacagcaccac

SEQ ID NO: 93325 - DNA, 25 bp, Artificial
  Probe
cattccatatccataaacagcacca

SEQ ID NO: 93326 - DNA, 25 bp, Artificial
  Probe
tagatgtttgttgaactggtagcat

SEQ ID NO: 93327 - DNA, 25 bp, Artificial
  Probe
ctccttcagattattagcagttcca

SEQ ID NO: 93328 - DNA, 25 bp, Artificial
  Probe
ttcagattattagcagttccacctc

SEQ ID NO: 93329 - DNA, 25 bp, Artificial
  Probe
cttcagattattagcagttccacct

SEQ ID NO: 93330 - DNA, 25 bp, Artificial
  Probe
tccttcagattattagcagttccac

SEQ ID NO: 93331 - DNA, 25 bp, Artificial
  Probe
aataacaccactgaggcatatagac

SEQ ID NO: 93332 - DNA, 25 bp, Artificial
  Probe
gctaataacaccactgaggcatata

SEQ ID NO: 93333 - DNA, 25 bp, Artificial
  Probe
aatacactctgatacctgacttagc

SEQ ID NO: 93334 - DNA, 25 bp, Artificial
  Probe
ataacaccactgaggcatatagaca

SEQ ID NO: 93335 - DNA, 25 bp, Artificial
  Probe
atacactctgatacctgacttagcc

SEQ ID NO: 93336 - DNA, 25 bp, Artificial
  Probe
tctccttcagattattagcagttcc

SEQ ID NO: 93337 - DNA, 25 bp, Artificial
  Probe
ggcatcatagttctccttcagatta

SEQ ID NO: 93338 - DNA, 25 bp, Artificial
  Probe
agattattagcagttccacctcttg

SEQ ID NO: 93339 - DNA, 25 bp, Artificial
  Probe
cagattattagcagttccacctctt

SEQ ID NO: 93340 - DNA, 25 bp, Artificial
  Probe
ccttcagattattagcagttccacc

SEQ ID NO: 93341 - DNA, 25 bp, Artificial
  Probe
taacaccactgaggcatatagacaa

SEQ ID NO: 93342 - DNA, 25 bp, Artificial
  Probe
taataacaccactgaggcatataga

SEQ ID NO: 93343 - DNA, 25 bp, Artificial
  Probe
agttctccttcagattattagcagt

SEQ ID NO: 93344 - DNA, 25 bp, Artificial
  Probe
ctaataacaccactgaggcatatag

SEQ ID NO: 93345 - DNA, 25 bp, Artificial
  Probe
tcagattattagcagttccacctct

SEQ ID NO: 93346 - DNA, 25 bp, Artificial
  Probe
gttctccttcagattattagcagtt

SEQ ID NO: 93347 - DNA, 25 bp, Artificial
  Probe
ttctccttcagattattagcagttc

SEQ ID NO: 93348 - DNA, 25 bp, Artificial
  Probe
gaatacactctgatacctgacttag

SEQ ID NO: 93349 - DNA, 25 bp, Artificial
  Probe
gcatcatagttctccttcagattat

SEQ ID NO: 93350 - DNA, 25 bp, Artificial
  Probe
agaatacactctgatacctgactta

SEQ ID NO: 93351 - DNA, 25 bp, Artificial
  Probe
tagaatacactctgatacctgactt

SEQ ID NO: 93352 - DNA, 25 bp, Artificial
  Probe
atagaatacactctgatacctgact

SEQ ID NO: 93353 - DNA, 25 bp, Artificial
  Probe
aacaccactgaggcatatagacaag

SEQ ID NO: 93354 - DNA, 25 bp, Artificial
  Probe
ttgttcctggagcctgaattaataa

SEQ ID NO: 93355 - DNA, 25 bp, Artificial
  Probe
gttgttcctggagcctgaattaata

SEQ ID NO: 93356 - DNA, 25 bp, Artificial
  Probe
actgaggcatatagacaagtctctt

SEQ ID NO: 93357 - DNA, 25 bp, Artificial
  Probe
tagttctccttcagattattagcag

SEQ ID NO: 93358 - DNA, 25 bp, Artificial
  Probe
ctgaggcatatagacaagtctctta

SEQ ID NO: 93359 - DNA, 25 bp, Artificial
  Probe
cacaagagctaataacaccactgag

SEQ ID NO: 93360 - DNA, 25 bp, Artificial
  Probe
tgaggcatatagacaagtctcttat

SEQ ID NO: 93361 - DNA, 25 bp, Artificial
  Probe
cactgaggcatatagacaagtctct

SEQ ID NO: 93362 - DNA, 25 bp, Artificial
  Probe
gtttagatattgatgagcctgatgc

SEQ ID NO: 93363 - DNA, 25 bp, Artificial
  Probe
tgggcggagggtaatataatagata

SEQ ID NO: 93364 - DNA, 25 bp, Artificial
  Probe
aatagaatacactctgatacctgac

SEQ ID NO: 93365 - DNA, 25 bp, Artificial
  Probe
aggcatatagacaagtctcttatgg

SEQ ID NO: 93366 - DNA, 25 bp, Artificial
  Probe
gattattagcagttccacctcttgg

SEQ ID NO: 93367 - DNA, 25 bp, Artificial
  Probe
ttgggcggagggtaatataatagat

SEQ ID NO: 93368 - DNA, 25 bp, Artificial
  Probe
agctaataacaccactgaggcatat

SEQ ID NO: 93369 - DNA, 25 bp, Artificial
  Probe
tgagtttagatattgatgagcctga

SEQ ID NO: 93370 - DNA, 25 bp, Artificial
  Probe
tttgggcggagggtaatataataga

SEQ ID NO: 93371 - DNA, 25 bp, Artificial
  Probe
gtttgggcggagggtaatataatag

SEQ ID NO: 93372 - DNA, 25 bp, Artificial
  Probe
attacatgactgaaggacatctgac

SEQ ID NO: 93373 - DNA, 25 bp, Artificial
  Probe
cattacatgactgaaggacatctga

SEQ ID NO: 93374 - DNA, 25 bp, Artificial
  Probe
acattacatgactgaaggacatctg

SEQ ID NO: 93375 - DNA, 25 bp, Artificial
  Probe
cacattacatgactgaaggacatct

SEQ ID NO: 93376 - DNA, 25 bp, Artificial
  Probe
gcttgaatcagaaggagattaacac

SEQ ID NO: 93377 - DNA, 25 bp, Artificial
  Probe
tgcttgaatcagaaggagattaaca

SEQ ID NO: 93378 - DNA, 25 bp, Artificial
  Probe
ctgcttgaatcagaaggagattaac

SEQ ID NO: 93379 - DNA, 25 bp, Artificial
  Probe
gctgcttgaatcagaaggagattaa

SEQ ID NO: 93380 - DNA, 25 bp, Artificial
  Probe
gcacattacatgactgaaggacatc

SEQ ID NO: 93381 - DNA, 25 bp, Artificial
  Probe
cttgaatcagaaggagattaacaca

SEQ ID NO: 93382 - DNA, 25 bp, Artificial
  Probe
ttacatgactgaaggacatctgacg

SEQ ID NO: 93383 - DNA, 25 bp, Artificial
  Probe
ctaatacaggtcctgcacattacat

SEQ ID NO: 93384 - DNA, 25 bp, Artificial
  Probe
taatacaggtcctgcacattacatg

SEQ ID NO: 93385 - DNA, 25 bp, Artificial
  Probe
tacatgactgaaggacatctgacga

SEQ ID NO: 93386 - DNA, 25 bp, Artificial
  Probe
agctgcttgaatcagaaggagatta

SEQ ID NO: 93387 - DNA, 25 bp, Artificial
  Probe
tgcacattacatgactgaaggacat

SEQ ID NO: 93388 - DNA, 25 bp, Artificial
  Probe
atagctggacatccaacataccaat

SEQ ID NO: 93389 - DNA, 25 bp, Artificial
  Probe
aatacaggtcctgcacattacatga

SEQ ID NO: 93390 - DNA, 25 bp, Artificial
  Probe
tagctggacatccaacataccaatt

SEQ ID NO: 93391 - DNA, 25 bp, Artificial
  Probe
acatgactgaaggacatctgacgat

SEQ ID NO: 93392 - DNA, 25 bp, Artificial
  Probe
aagctgcttgaatcagaaggagatt

SEQ ID NO: 93393 - DNA, 25 bp, Artificial
  Probe
ctgcacattacatgactgaaggaca

SEQ ID NO: 93394 - DNA, 25 bp, Artificial
  Probe
atacaggtcctgcacattacatgac

SEQ ID NO: 93395 - DNA, 25 bp, Artificial
  Probe
gctaatacaggtcctgcacattaca

SEQ ID NO: 93396 - DNA, 25 bp, Artificial
  Probe
catagctggacatccaacataccaa

SEQ ID NO: 93397 - DNA, 25 bp, Artificial
  Probe
catccaacataccaattttctgcta

SEQ ID NO: 93398 - DNA, 25 bp, Artificial
  Probe
ggacatccaacataccaattttctg

SEQ ID NO: 93399 - DNA, 25 bp, Artificial
  Probe
gacatccaacataccaattttctgc

SEQ ID NO: 93400 - DNA, 25 bp, Artificial
  Probe
tccaacataccaattttctgctaat

SEQ ID NO: 93401 - DNA, 25 bp, Artificial
  Probe
atccaacataccaattttctgctaa

SEQ ID NO: 93402 - DNA, 25 bp, Artificial
  Probe
acatccaacataccaattttctgct

SEQ ID NO: 93403 - DNA, 25 bp, Artificial
  Probe
tacaggtcctgcacattacatgact

SEQ ID NO: 93404 - DNA, 25 bp, Artificial
  Probe
aaagctgcttgaatcagaaggagat

SEQ ID NO: 93405 - DNA, 25 bp, Artificial
  Probe
ctgctaatacaggtcctgcacatta

SEQ ID NO: 93406 - DNA, 25 bp, Artificial
  Probe
ccaattttctgctaatacaggtcct

SEQ ID NO: 93407 - DNA, 25 bp, Artificial
  Probe
ggtcctgcacattacatgactgaag

SEQ ID NO: 93408 - DNA, 25 bp, Artificial
  Probe
tgctaatacaggtcctgcacattac

SEQ ID NO: 93409 - DNA, 25 bp, Artificial
  Probe
cctgcacattacatgactgaaggac

SEQ ID NO: 93410 - DNA, 25 bp, Artificial
  Probe
gtcctgcacattacatgactgaagg

SEQ ID NO: 93411 - DNA, 25 bp, Artificial
  Probe
atgactgaaggacatctgacgatga

SEQ ID NO: 93412 - DNA, 25 bp, Artificial
  Probe
catgactgaaggacatctgacgatg

SEQ ID NO: 93413 - DNA, 25 bp, Artificial
  Probe
ccaacataccaattttctgctaata

SEQ ID NO: 93414 - DNA, 25 bp, Artificial
  Probe
aggtcctgcacattacatgactgaa

SEQ ID NO: 93415 - DNA, 25 bp, Artificial
  Probe
agctggacatccaacataccaattt

SEQ ID NO: 93416 - DNA, 25 bp, Artificial
  Probe
gatagagaagagtctcccatgacag

SEQ ID NO: 93417 - DNA, 25 bp, Artificial
  Probe
aagaagtcaatgaacggaagaagaa

SEQ ID NO: 93418 - DNA, 25 bp, Artificial
  Probe
aagtcaatgaacggaagaagaacaa

SEQ ID NO: 93419 - DNA, 25 bp, Artificial
  Probe
aatgaacggaagaagaacaagcata

SEQ ID NO: 93420 - DNA, 25 bp, Artificial
  Probe
agaagtcaatgaacggaagaagaac

SEQ ID NO: 93421 - DNA, 25 bp, Artificial
  Probe
agtcaatgaacggaagaagaacaag

SEQ ID NO: 93422 - DNA, 25 bp, Artificial
  Probe
gaagtcaatgaacggaagaagaaca

SEQ ID NO: 93423 - DNA, 25 bp, Artificial
  Probe
atgaacggaagaagaacaagcatag

SEQ ID NO: 93424 - DNA, 25 bp, Artificial
  Probe
aataatgtccagcaattctgttcac

SEQ ID NO: 93425 - DNA, 25 bp, Artificial
  Probe
ataatgtccagcaattctgttcact

SEQ ID NO: 93426 - DNA, 25 bp, Artificial
  Probe
atgtccagcaattctgttcacttaa

SEQ ID NO: 93427 - DNA, 25 bp, Artificial
  Probe
aatgtccagcaattctgttcactta

SEQ ID NO: 93428 - DNA, 25 bp, Artificial
  Probe
taatgtccagcaattctgttcactt

SEQ ID NO: 93429 - DNA, 25 bp, Artificial
  Probe
caatgaacggaagaagaacaagcat

SEQ ID NO: 93430 - DNA, 25 bp, Artificial
  Probe
ggagtataaccttccaacttctcta

SEQ ID NO: 93431 - DNA, 25 bp, Artificial
  Probe
ataacgtacatagatgacctcctga

SEQ ID NO: 93432 - DNA, 25 bp, Artificial
  Probe
tgcaatccgattacataacgtacat

SEQ ID NO: 93433 - DNA, 25 bp, Artificial
  Probe
ccttcctcgatgaatcaatagtgaa

SEQ ID NO: 93434 - DNA, 25 bp, Artificial
  Probe
gcaatccgattacataacgtacata

SEQ ID NO: 93435 - DNA, 25 bp, Artificial
  Probe
gtcaatgaacggaagaagaacaagc

SEQ ID NO: 93436 - DNA, 25 bp, Artificial
  Probe
cataacgtacatagatgacctcctg

SEQ ID NO: 93437 - DNA, 25 bp, Artificial
  Probe
ataaccttccaacttctctaatgta

SEQ ID NO: 93438 - DNA, 25 bp, Artificial
  Probe
tataaccttccaacttctctaatgt

SEQ ID NO: 93439 - DNA, 25 bp, Artificial
  Probe
gaaagaagtcaatgaacggaagaag

SEQ ID NO: 93440 - DNA, 25 bp, Artificial
  Probe
acataacgtacatagatgacctcct

SEQ ID NO: 93441 - DNA, 25 bp, Artificial
  Probe
aaagaagtcaatgaacggaagaaga

SEQ ID NO: 93442 - DNA, 25 bp, Artificial
  Probe
tacataacgtacatagatgacctcc

SEQ ID NO: 93443 - DNA, 25 bp, Artificial
  Probe
gtataaccttccaacttctctaatg

SEQ ID NO: 93444 - DNA, 25 bp, Artificial
  Probe
taacgtacatagatgacctcctgac

SEQ ID NO: 93445 - DNA, 25 bp, Artificial
  Probe
gagtataaccttccaacttctctaa

SEQ ID NO: 93446 - DNA, 25 bp, Artificial
  Probe
tcaatgaacggaagaagaacaagca

SEQ ID NO: 93447 - DNA, 25 bp, Artificial
  Probe
ctttaacaatacaccgaaggaggag

SEQ ID NO: 93448 - DNA, 25 bp, Artificial
  Probe
gatgaaagaagtcaatgaacggaag

SEQ ID NO: 93449 - DNA, 25 bp, Artificial
  Probe
atgaaagaagtcaatgaacggaaga

SEQ ID NO: 93450 - DNA, 25 bp, Artificial
  Probe
atgatgaaagaagtcaatgaacgga

SEQ ID NO: 93451 - DNA, 25 bp, Artificial
  Probe
tgaaagaagtcaatgaacggaagaa

SEQ ID NO: 93452 - DNA, 25 bp, Artificial
  Probe
tgatgaaagaagtcaatgaacggaa

SEQ ID NO: 93453 - DNA, 25 bp, Artificial
  Probe
tctttaacaatacaccgaaggagga

SEQ ID NO: 93454 - DNA, 25 bp, Artificial
  Probe
gtctttaacaatacaccgaaggagg

SEQ ID NO: 93455 - DNA, 25 bp, Artificial
  Probe
ggaagaagaacaagcatagcggatt

SEQ ID NO: 93456 - DNA, 25 bp, Artificial
  Probe
gaagaagaacaagcatagcggattt

SEQ ID NO: 93457 - DNA, 25 bp, Artificial
  Probe
ccgattacataacgtacatagatga

SEQ ID NO: 93458 - DNA, 25 bp, Artificial
  Probe
tccgattacataacgtacatagatg

SEQ ID NO: 93459 - DNA, 25 bp, Artificial
  Probe
cgtctttaacaatacaccgaaggag

SEQ ID NO: 93460 - DNA, 25 bp, Artificial
  Probe
aactctgtcgtctttaacaatacac

SEQ ID NO: 93461 - DNA, 25 bp, Artificial
  Probe
agtataaccttccaacttctctaat

SEQ ID NO: 93462 - DNA, 25 bp, Artificial
  Probe
catgcttctcttgaggtacagtatg

SEQ ID NO: 93463 - DNA, 25 bp, Artificial
  Probe
atgcttctcttgaggtacagtatgc

SEQ ID NO: 93464 - DNA, 25 bp, Artificial
  Probe
tgccctctaatctgtatggaataaa

SEQ ID NO: 93465 - DNA, 25 bp, Artificial
  Probe
ttgccctctaatctgtatggaataa

SEQ ID NO: 93466 - DNA, 25 bp, Artificial
  Probe
attgccctctaatctgtatggaata

SEQ ID NO: 93467 - DNA, 25 bp, Artificial
  Probe
cattgccctctaatctgtatggaat

SEQ ID NO: 93468 - DNA, 25 bp, Artificial
  Probe
aacggaacagaaatagtatggtctt

SEQ ID NO: 93469 - DNA, 25 bp, Artificial
  Probe
gaacggaacagaaatagtatggtct

SEQ ID NO: 93470 - DNA, 25 bp, Artificial
  Probe
ggaacggaacagaaatagtatggtc

SEQ ID NO: 93471 - DNA, 25 bp, Artificial
  Probe
aacagaaatagtatggtcttggctc

SEQ ID NO: 93472 - DNA, 25 bp, Artificial
  Probe
gaacagaaatagtatggtcttggct

SEQ ID NO: 93473 - DNA, 25 bp, Artificial
  Probe
acggaacagaaatagtatggtcttg

SEQ ID NO: 93474 - DNA, 25 bp, Artificial
  Probe
gtggaacggaacagaaatagtatgg

SEQ ID NO: 93475 - DNA, 25 bp, Artificial
  Probe
ggtggaacggaacagaaatagtatg

SEQ ID NO: 93476 - DNA, 25 bp, Artificial
  Probe
aggtggaacggaacagaaatagtat

SEQ ID NO: 93477 - DNA, 25 bp, Artificial
  Probe
ccatcttgatttacctgagttccaa

SEQ ID NO: 93478 - DNA, 25 bp, Artificial
  Probe
ttaaagaaagtgcctgtcctcaaag

SEQ ID NO: 93479 - DNA, 25 bp, Artificial
  Probe
aaggtggaacggaacagaaatagta

SEQ ID NO: 93480 - DNA, 25 bp, Artificial
  Probe
ctgccatcttgatttacctgagttc

SEQ ID NO: 93481 - DNA, 25 bp, Artificial
  Probe
acagaaatagtatggtcttggctct

SEQ ID NO: 93482 - DNA, 25 bp, Artificial
  Probe
cggaacagaaatagtatggtcttgg

SEQ ID NO: 93483 - DNA, 25 bp, Artificial
  Probe
tggaacggaacagaaatagtatggt

SEQ ID NO: 93484 - DNA, 25 bp, Artificial
  Probe
cttaaagaaagtgcctgtcctcaaa

SEQ ID NO: 93485 - DNA, 25 bp, Artificial
  Probe
ggaacagaaatagtatggtcttggc

SEQ ID NO: 93486 - DNA, 25 bp, Artificial
  Probe
gccctctaatctgtatggaataaat

SEQ ID NO: 93487 - DNA, 25 bp, Artificial
  Probe
ttctcttgaggtacagtatgcacaa

SEQ ID NO: 93488 - DNA, 25 bp, Artificial
  Probe
cttctcttgaggtacagtatgcaca

SEQ ID NO: 93489 - DNA, 25 bp, Artificial
  Probe
ttgatttacctgagttccaagtacc

SEQ ID NO: 93490 - DNA, 25 bp, Artificial
  Probe
taaagaaagtgcctgtcctcaaaga

SEQ ID NO: 93491 - DNA, 25 bp, Artificial
  Probe
tgatttacctgagttccaagtacca

SEQ ID NO: 93492 - DNA, 25 bp, Artificial
  Probe
aaaggtggaacggaacagaaatagt

SEQ ID NO: 93493 - DNA, 25 bp, Artificial
  Probe
acattgccctctaatctgtatggaa

SEQ ID NO: 93494 - DNA, 25 bp, Artificial
  Probe
tctcttgaggtacagtatgcacaac

SEQ ID NO: 93495 - DNA, 25 bp, Artificial
  Probe
agaaatagtatggtcttggctctgc

SEQ ID NO: 93496 - DNA, 25 bp, Artificial
  Probe
gatttacctgagttccaagtaccag

SEQ ID NO: 93497 - DNA, 25 bp, Artificial
  Probe
actgccatcttgatttacctgagtt

SEQ ID NO: 93498 - DNA, 25 bp, Artificial
  Probe
gccatcttgatttacctgagttcca

SEQ ID NO: 93499 - DNA, 25 bp, Artificial
  Probe
tgccatcttgatttacctgagttcc

SEQ ID NO: 93500 - DNA, 25 bp, Artificial
  Probe
tttattacattgccctctaatctgt

SEQ ID NO: 93501 - DNA, 25 bp, Artificial
  Probe
gaactgcttaaagaaagtgcctgtc

SEQ ID NO: 93502 - DNA, 25 bp, Artificial
  Probe
ttacattgccctctaatctgtatgg

SEQ ID NO: 93503 - DNA, 25 bp, Artificial
  Probe
aatagtatggtcttggctctgcaac

SEQ ID NO: 93504 - DNA, 25 bp, Artificial
  Probe
ccaggtgaactgcttaaagaaagtg

SEQ ID NO: 93505 - DNA, 25 bp, Artificial
  Probe
gcttctcttgaggtacagtatgcac

SEQ ID NO: 93506 - DNA, 25 bp, Artificial
  Probe
tacattgccctctaatctgtatgga

SEQ ID NO: 93507 - DNA, 25 bp, Artificial
  Probe
atagttatttaggggcgaccaatag

SEQ ID NO: 93508 - DNA, 25 bp, Artificial
  Probe
catagttatttaggggcgaccaata

SEQ ID NO: 93509 - DNA, 25 bp, Artificial
  Probe
tagttatttaggggcgaccaatagg

SEQ ID NO: 93510 - DNA, 25 bp, Artificial
  Probe
tatttaggggcgaccaataggaaaa

SEQ ID NO: 93511 - DNA, 25 bp, Artificial
  Probe
ttatttaggggcgaccaataggaaa

SEQ ID NO: 93512 - DNA, 25 bp, Artificial
  Probe
gttatttaggggcgaccaataggaa

SEQ ID NO: 93513 - DNA, 25 bp, Artificial
  Probe
gcatagttatttaggggcgaccaat

SEQ ID NO: 93514 - DNA, 25 bp, Artificial
  Probe
agttatttaggggcgaccaatagga

SEQ ID NO: 93515 - DNA, 25 bp, Artificial
  Probe
agcatagttatttaggggcgaccaa

SEQ ID NO: 93516 - DNA, 25 bp, Artificial
  Probe
aggagcatagttatttaggggcgac

SEQ ID NO: 93517 - DNA, 25 bp, Artificial
  Probe
gagcatagttatttaggggcgacca

SEQ ID NO: 93518 - DNA, 25 bp, Artificial
  Probe
ggagcatagttatttaggggcgacc

SEQ ID NO: 93519 - DNA, 25 bp, Artificial
  Probe
cagatttctgagaaaatgttttgta

SEQ ID NO: 93520 - DNA, 25 bp, Artificial
  Probe
ttttaaatggtcacatttcgtgctt

SEQ ID NO: 93521 - DNA, 25 bp, Artificial
  Probe
tttctgagaaaatgttttgtattgt

SEQ ID NO: 93522 - DNA, 25 bp, Artificial
  Probe
tcagatttctgagaaaatgttttgt

SEQ ID NO: 93523 - DNA, 25 bp, Artificial
  Probe
agatttctgagaaaatgttttgtat

SEQ ID NO: 93524 - DNA, 25 bp, Artificial
  Probe
atttctgagaaaatgttttgtattg

SEQ ID NO: 93525 - DNA, 25 bp, Artificial
  Probe
gaaccataacattacactaaccagc

SEQ ID NO: 93526 - DNA, 25 bp, Artificial
  Probe
aaccataacattacactaaccagca

SEQ ID NO: 93527 - DNA, 25 bp, Artificial
  Probe
accataacattacactaaccagcag

SEQ ID NO: 93528 - DNA, 25 bp, Artificial
  Probe
tgaaccataacattacactaaccag

SEQ ID NO: 93529 - DNA, 25 bp, Artificial
  Probe
ctgaaccataacattacactaacca

SEQ ID NO: 93530 - DNA, 25 bp, Artificial
  Probe
actgaaccataacattacactaacc

SEQ ID NO: 93531 - DNA, 25 bp, Artificial
  Probe
aactgaaccataacattacactaac

SEQ ID NO: 93532 - DNA, 25 bp, Artificial
  Probe
caagggtttctcaatgtttcagatt

SEQ ID NO: 93533 - DNA, 25 bp, Artificial
  Probe
aagggtttctcaatgtttcagattt

SEQ ID NO: 93534 - DNA, 25 bp, Artificial
  Probe
ggagattgagacctacaaccaaatt

SEQ ID NO: 93535 - DNA, 25 bp, Artificial
  Probe
ccaagggtttctcaatgtttcagat

SEQ ID NO: 93536 - DNA, 25 bp, Artificial
  Probe
gattgagacctacaaccaaattaga

SEQ ID NO: 93537 - DNA, 25 bp, Artificial
  Probe
agattgagacctacaaccaaattag

SEQ ID NO: 93538 - DNA, 25 bp, Artificial
  Probe
gagattgagacctacaaccaaatta

SEQ ID NO: 93539 - DNA, 25 bp, Artificial
  Probe
ttctaccttggttctgaggatggaa

SEQ ID NO: 93540 - DNA, 25 bp, Artificial
  Probe
ttgagacctacaaccaaattagatt

SEQ ID NO: 93541 - DNA, 25 bp, Artificial
  Probe
attgagacctacaaccaaattagat

SEQ ID NO: 93542 - DNA, 25 bp, Artificial
  Probe
gggagattgagacctacaaccaaat

SEQ ID NO: 93543 - DNA, 25 bp, Artificial
  Probe
aaagtgggagattgagacctacaac

SEQ ID NO: 93544 - DNA, 25 bp, Artificial
  Probe
caaagtgggagattgagacctacaa

SEQ ID NO: 93545 - DNA, 25 bp, Artificial
  Probe
aacaaagtgggagattgagacctac

SEQ ID NO: 93546 - DNA, 25 bp, Artificial
  Probe
caacaaagtgggagattgagaccta

SEQ ID NO: 93547 - DNA, 25 bp, Artificial
  Probe
tgagacctacaaccaaattagattt

SEQ ID NO: 93548 - DNA, 25 bp, Artificial
  Probe
acaaagtgggagattgagacctaca

SEQ ID NO: 93549 - DNA, 25 bp, Artificial
  Probe
aaactgaaccataacattacactaa

SEQ ID NO: 93550 - DNA, 25 bp, Artificial
  Probe
agggtttctcaatgtttcagatttt

SEQ ID NO: 93551 - DNA, 25 bp, Artificial
  Probe
ctggggtccgtcttatattttcaac

SEQ ID NO: 93552 - DNA, 25 bp, Artificial
  Probe
tttctaccttggttctgaggatgga

SEQ ID NO: 93553 - DNA, 25 bp, Artificial
  Probe
actggggtccgtcttatattttcaa

SEQ ID NO: 93554 - DNA, 25 bp, Artificial
  Probe
aagtgggagattgagacctacaacc

SEQ ID NO: 93555 - DNA, 25 bp, Artificial
  Probe
tagatttggggagttttctaccttg

SEQ ID NO: 93556 - DNA, 25 bp, Artificial
  Probe
ttagatttggggagttttctacctt

SEQ ID NO: 93557 - DNA, 25 bp, Artificial
  Probe
atttggggagttttctaccttggtt

SEQ ID NO: 93558 - DNA, 25 bp, Artificial
  Probe
attagatttggggagttttctacct

SEQ ID NO: 93559 - DNA, 25 bp, Artificial
  Probe
tgggagattgagacctacaaccaaa

SEQ ID NO: 93560 - DNA, 25 bp, Artificial
  Probe
agatttggggagttttctaccttgg

SEQ ID NO: 93561 - DNA, 25 bp, Artificial
  Probe
gttttctaccttggttctgaggatg

SEQ ID NO: 93562 - DNA, 25 bp, Artificial
  Probe
agttttctaccttggttctgaggat

SEQ ID NO: 93563 - DNA, 25 bp, Artificial
  Probe
aattagatttggggagttttctacc

SEQ ID NO: 93564 - DNA, 25 bp, Artificial
  Probe
gatttggggagttttctaccttggt

SEQ ID NO: 93565 - DNA, 25 bp, Artificial
  Probe
ctgactggggtccgtcttatatttt

SEQ ID NO: 93566 - DNA, 25 bp, Artificial
  Probe
gactggggtccgtcttatattttca

SEQ ID NO: 93567 - DNA, 25 bp, Artificial
  Probe
tgactggggtccgtcttatattttc

SEQ ID NO: 93568 - DNA, 25 bp, Artificial
  Probe
gggagttttctaccttggttctgag

SEQ ID NO: 93569 - DNA, 25 bp, Artificial
  Probe
gagttttctaccttggttctgagga

SEQ ID NO: 93570 - DNA, 25 bp, Artificial
  Probe
tccattattattgagcgaagcagag

SEQ ID NO: 93571 - DNA, 25 bp, Artificial
  Probe
ttccattattattgagcgaagcaga

SEQ ID NO: 93572 - DNA, 25 bp, Artificial
  Probe
ttaccttacaccaccacacatctaa

SEQ ID NO: 93573 - DNA, 25 bp, Artificial
  Probe
tcacatatatctcctgctaacatcg

SEQ ID NO: 93574 - DNA, 25 bp, Artificial
  Probe
cacatatatctcctgctaacatcgg

SEQ ID NO: 93575 - DNA, 25 bp, Artificial
  Probe
acatatatctcctgctaacatcggt

SEQ ID NO: 93576 - DNA, 25 bp, Artificial
  Probe
taccttacaccaccacacatctaac

SEQ ID NO: 93577 - DNA, 25 bp, Artificial
  Probe
catatatctcctgctaacatcggtt

SEQ ID NO: 93578 - DNA, 25 bp, Artificial
  Probe
cttacaccaccacacatctaactca

SEQ ID NO: 93579 - DNA, 25 bp, Artificial
  Probe
ttacaccaccacacatctaactcac

SEQ ID NO: 93580 - DNA, 25 bp, Artificial
  Probe
ccattattattgagcgaagcagagc

SEQ ID NO: 93581 - DNA, 25 bp, Artificial
  Probe
ttcacatatatctcctgctaacatc

SEQ ID NO: 93582 - DNA, 25 bp, Artificial
  Probe
cgtaattcacatatatctcctgcta

SEQ ID NO: 93583 - DNA, 25 bp, Artificial
  Probe
cacatctaactcacacgtaattcac

SEQ ID NO: 93584 - DNA, 25 bp, Artificial
  Probe
cacacatctaactcacacgtaattc

SEQ ID NO: 93585 - DNA, 25 bp, Artificial
  Probe
acatctaactcacacgtaattcaca

SEQ ID NO: 93586 - DNA, 25 bp, Artificial
  Probe
acacatctaactcacacgtaattca

SEQ ID NO: 93587 - DNA, 25 bp, Artificial
  Probe
cacgtaattcacatatatctcctgc

SEQ ID NO: 93588 - DNA, 25 bp, Artificial
  Probe
ccttacaccaccacacatctaactc

SEQ ID NO: 93589 - DNA, 25 bp, Artificial
  Probe
acgtaattcacatatatctcctgct

SEQ ID NO: 93590 - DNA, 25 bp, Artificial
  Probe
aataatcaccacatttacactgctc

SEQ ID NO: 93591 - DNA, 25 bp, Artificial
  Probe
ggacatagcacaaagcaagaaatag

SEQ ID NO: 93592 - DNA, 25 bp, Artificial
  Probe
catctaactcacacgtaattcacat

SEQ ID NO: 93593 - DNA, 25 bp, Artificial
  Probe
agaagtcctatcctgagaggtctac

SEQ ID NO: 93594 - DNA, 25 bp, Artificial
  Probe
cagaagtcctatcctgagaggtcta

SEQ ID NO: 93595 - DNA, 25 bp, Artificial
  Probe
aattcacatatatctcctgctaaca

SEQ ID NO: 93596 - DNA, 25 bp, Artificial
  Probe
tttccattattattgagcgaagcag

SEQ ID NO: 93597 - DNA, 25 bp, Artificial
  Probe
ccacacatctaactcacacgtaatt

SEQ ID NO: 93598 - DNA, 25 bp, Artificial
  Probe
gacatagcacaaagcaagaaatagc

SEQ ID NO: 93599 - DNA, 25 bp, Artificial
  Probe
ataatcaccacatttacactgctcc

SEQ ID NO: 93600 - DNA, 25 bp, Artificial
  Probe
atatctcctgctaacatcggtttac

SEQ ID NO: 93601 - DNA, 25 bp, Artificial
  Probe
catagcacaaagcaagaaatagcac

SEQ ID NO: 93602 - DNA, 25 bp, Artificial
  Probe
tttaccttacaccaccacacatcta

SEQ ID NO: 93603 - DNA, 25 bp, Artificial
  Probe
atagcacaaagcaagaaatagcact

SEQ ID NO: 93604 - DNA, 25 bp, Artificial
  Probe
attcacatatatctcctgctaacat

SEQ ID NO: 93605 - DNA, 25 bp, Artificial
  Probe
gatttaagacattccaacaagcaaa

SEQ ID NO: 93606 - DNA, 25 bp, Artificial
  Probe
ctaacatcggtttacacattccctt

SEQ ID NO: 93607 - DNA, 25 bp, Artificial
  Probe
acatagcacaaagcaagaaatagca

SEQ ID NO: 93608 - DNA, 25 bp, Artificial
  Probe
gatccttctcttggacacatgattg

SEQ ID NO: 93609 - DNA, 25 bp, Artificial
  Probe
cttcagcagtaagaatgacttctct

SEQ ID NO: 93610 - DNA, 25 bp, Artificial
  Probe
tcttcagcagtaagaatgacttctc

SEQ ID NO: 93611 - DNA, 25 bp, Artificial
  Probe
ctcttcagcagtaagaatgacttct

SEQ ID NO: 93612 - DNA, 25 bp, Artificial
  Probe
tatatctcctgctaacatcggttta

SEQ ID NO: 93613 - DNA, 25 bp, Artificial
  Probe
cagcagtaagaatgacttctctgaa

SEQ ID NO: 93614 - DNA, 25 bp, Artificial
  Probe
ttcagcagtaagaatgacttctctg

SEQ ID NO: 93615 - DNA, 25 bp, Artificial
  Probe
gaggtcactcttagaataaggctgg

SEQ ID NO: 93616 - DNA, 25 bp, Artificial
  Probe
ctttattctcaccttcatccgcatc

SEQ ID NO: 93617 - DNA, 25 bp, Artificial
  Probe
tagaataaggctgggctagtgagta

SEQ ID NO: 93618 - DNA, 25 bp, Artificial
  Probe
ctatcaaagcgacaaagtcaaggat

SEQ ID NO: 93619 - DNA, 25 bp, Artificial
  Probe
tatcaaagcgacaaagtcaaggatg

SEQ ID NO: 93620 - DNA, 25 bp, Artificial
  Probe
tttattctcaccttcatccgcatcc

SEQ ID NO: 93621 - DNA, 25 bp, Artificial
  Probe
cctttattctcaccttcatccgcat

SEQ ID NO: 93622 - DNA, 25 bp, Artificial
  Probe
ttagaataaggctgggctagtgagt

SEQ ID NO: 93623 - DNA, 25 bp, Artificial
  Probe
agaggtcactcttagaataaggctg

SEQ ID NO: 93624 - DNA, 25 bp, Artificial
  Probe
cagaggtcactcttagaataaggct

SEQ ID NO: 93625 - DNA, 25 bp, Artificial
  Probe
cttagaataaggctgggctagtgag

SEQ ID NO: 93626 - DNA, 25 bp, Artificial
  Probe
ctcttagaataaggctgggctagtg

SEQ ID NO: 93627 - DNA, 25 bp, Artificial
  Probe
cactcttagaataaggctgggctag

SEQ ID NO: 93628 - DNA, 25 bp, Artificial
  Probe
tcactcttagaataaggctgggcta

SEQ ID NO: 93629 - DNA, 25 bp, Artificial
  Probe
tcttagaataaggctgggctagtga

SEQ ID NO: 93630 - DNA, 25 bp, Artificial
  Probe
actcttagaataaggctgggctagt

SEQ ID NO: 93631 - DNA, 25 bp, Artificial
  Probe
ccagaggtcactcttagaataaggc

SEQ ID NO: 93632 - DNA, 25 bp, Artificial
  Probe
acctcaacaactatggcgtctacac

SEQ ID NO: 93633 - DNA, 25 bp, Artificial
  Probe
cacctcaacaactatggcgtctaca

SEQ ID NO: 93634 - DNA, 25 bp, Artificial
  Probe
cacctttattctcaccttcatccgc

SEQ ID NO: 93635 - DNA, 25 bp, Artificial
  Probe
gcacctttattctcaccttcatccg

SEQ ID NO: 93636 - DNA, 25 bp, Artificial
  Probe
cgcacctttattctcaccttcatcc

SEQ ID NO: 93637 - DNA, 25 bp, Artificial
  Probe
ccgcacctttattctcaccttcatc

SEQ ID NO: 93638 - DNA, 25 bp, Artificial
  Probe
agaataaggctgggctagtgagtac

SEQ ID NO: 93639 - DNA, 25 bp, Artificial
  Probe
ctctctaaaaccatagtgcccatct

SEQ ID NO: 93640 - DNA, 25 bp, Artificial
  Probe
aggtcactcttagaataaggctggg

SEQ ID NO: 93641 - DNA, 25 bp, Artificial
  Probe
tctctaaaaccatagtgcccatctg

SEQ ID NO: 93642 - DNA, 25 bp, Artificial
  Probe
gaaccgcacctttattctcaccttc

SEQ ID NO: 93643 - DNA, 25 bp, Artificial
  Probe
tcaacaactatggcgtctacaccaa

SEQ ID NO: 93644 - DNA, 25 bp, Artificial
  Probe
acctttattctcaccttcatccgca

SEQ ID NO: 93645 - DNA, 25 bp, Artificial
  Probe
caaagtcaaggatggcagaaggaac

SEQ ID NO: 93646 - DNA, 25 bp, Artificial
  Probe
ctaaaaccatagtgcccatctgtct

SEQ ID NO: 93647 - DNA, 25 bp, Artificial
  Probe
tctaaaaccatagtgcccatctgtc

SEQ ID NO: 93648 - DNA, 25 bp, Artificial
  Probe
ctctaaaaccatagtgcccatctgt

SEQ ID NO: 93649 - DNA, 25 bp, Artificial
  Probe
agtaccaagacaggggacattaaag

SEQ ID NO: 93650 - DNA, 25 bp, Artificial
  Probe
gagtaccaagacaggggacattaaa

SEQ ID NO: 93651 - DNA, 25 bp, Artificial
  Probe
aacaactatggcgtctacaccaaag

SEQ ID NO: 93652 - DNA, 25 bp, Artificial
  Probe
taaaaccatagtgcccatctgtctg

SEQ ID NO: 93653 - DNA, 25 bp, Artificial
  Probe
actctctaaaaccatagtgcccatc

SEQ ID NO: 93654 - DNA, 25 bp, Artificial
  Probe
accgcacctttattctcaccttcat

SEQ ID NO: 93655 - DNA, 25 bp, Artificial
  Probe
cccagaggtcactcttagaataagg

SEQ ID NO: 93656 - DNA, 25 bp, Artificial
  Probe
atcaaagcgacaaagtcaaggatgg

SEQ ID NO: 93657 - DNA, 25 bp, Artificial
  Probe
cagccacactctctaaaaccatagt

SEQ ID NO: 93658 - DNA, 25 bp, Artificial
  Probe
acaaagtcaaggatggcagaaggaa

SEQ ID NO: 93659 - DNA, 25 bp, Artificial
  Probe
gtcactcttagaataaggctgggct

SEQ ID NO: 93660 - DNA, 25 bp, Artificial
  Probe
tttaagcctgtttccaaagataccc

SEQ ID NO: 93661 - DNA, 25 bp, Artificial
  Probe
ttaagcctgtttccaaagataccct

SEQ ID NO: 93662 - DNA, 25 bp, Artificial
  Probe
taagcctgtttccaaagataccctg

SEQ ID NO: 93663 - DNA, 25 bp, Artificial
  Probe
caccatcctcgccatcatcattaat

SEQ ID NO: 93664 - DNA, 25 bp, Artificial
  Probe
atcaccatcctcgccatcatcatta

SEQ ID NO: 93665 - DNA, 25 bp, Artificial
  Probe
tcaccatcctcgccatcatcattaa

SEQ ID NO: 93666 - DNA, 25 bp, Artificial
  Probe
ctttaagcctgtttccaaagatacc

SEQ ID NO: 93667 - DNA, 25 bp, Artificial
  Probe
cctttaagcctgtttccaaagatac

SEQ ID NO: 93668 - DNA, 25 bp, Artificial
  Probe
acctttaagcctgtttccaaagata

SEQ ID NO: 93669 - DNA, 25 bp, Artificial
  Probe
ctaacctttaagcctgtttccaaag

SEQ ID NO: 93670 - DNA, 25 bp, Artificial
  Probe
taacctttaagcctgtttccaaaga

SEQ ID NO: 93671 - DNA, 25 bp, Artificial
  Probe
aacctttaagcctgtttccaaagat

SEQ ID NO: 93672 - DNA, 25 bp, Artificial
  Probe
tcctggatcatagctaacctttaag

SEQ ID NO: 93673 - DNA, 25 bp, Artificial
  Probe
ctcctggatcatagctaacctttaa

SEQ ID NO: 93674 - DNA, 25 bp, Artificial
  Probe
gctaacctttaagcctgtttccaaa

SEQ ID NO: 93675 - DNA, 25 bp, Artificial
  Probe
cctcctggatcatagctaaccttta

SEQ ID NO: 93676 - DNA, 25 bp, Artificial
  Probe
aggtcatatcctcctggatcatagc

SEQ ID NO: 93677 - DNA, 25 bp, Artificial
  Probe
catcaccatcctcgccatcatcatt

SEQ ID NO: 93678 - DNA, 25 bp, Artificial
  Probe
gtttccaaagataccctgggctatc

SEQ ID NO: 93679 - DNA, 25 bp, Artificial
  Probe
tttccaaagataccctgggctatca

SEQ ID NO: 93680 - DNA, 25 bp, Artificial
  Probe
catatcctcctggatcatagctaac

SEQ ID NO: 93681 - DNA, 25 bp, Artificial
  Probe
tcatatcctcctggatcatagctaa

SEQ ID NO: 93682 - DNA, 25 bp, Artificial
  Probe
gtcatatcctcctggatcatagcta

SEQ ID NO: 93683 - DNA, 25 bp, Artificial
  Probe
ggtcatatcctcctggatcatagct

SEQ ID NO: 93684 - DNA, 25 bp, Artificial
  Probe
atatcctcctggatcatagctaacc

SEQ ID NO: 93685 - DNA, 25 bp, Artificial
  Probe
tgtttccaaagataccctgggctat

SEQ ID NO: 93686 - DNA, 25 bp, Artificial
  Probe
agctaacctttaagcctgtttccaa

SEQ ID NO: 93687 - DNA, 25 bp, Artificial
  Probe
atcatagctaacctttaagcctgtt

SEQ ID NO: 93688 - DNA, 25 bp, Artificial
  Probe
catagctaacctttaagcctgtttc

SEQ ID NO: 93689 - DNA, 25 bp, Artificial
  Probe
tcatagctaacctttaagcctgttt

SEQ ID NO: 93690 - DNA, 25 bp, Artificial
  Probe
gatcatagctaacctttaagcctgt

SEQ ID NO: 93691 - DNA, 25 bp, Artificial
  Probe
tatcctcctggatcatagctaacct

SEQ ID NO: 93692 - DNA, 25 bp, Artificial
  Probe
atagctaacctttaagcctgtttcc

SEQ ID NO: 93693 - DNA, 25 bp, Artificial
  Probe
ggatcatagctaacctttaagcctg

SEQ ID NO: 93694 - DNA, 25 bp, Artificial
  Probe
ctggatcatagctaacctttaagcc

SEQ ID NO: 93695 - DNA, 25 bp, Artificial
  Probe
cctggatcatagctaacctttaagc

SEQ ID NO: 93696 - DNA, 25 bp, Artificial
  Probe
tggatcatagctaacctttaagcct

SEQ ID NO: 93697 - DNA, 25 bp, Artificial
  Probe
ttccaaagataccctgggctatcac

SEQ ID NO: 93698 - DNA, 25 bp, Artificial
  Probe
caggtcatatcctcctggatcatag

SEQ ID NO: 93699 - DNA, 25 bp, Artificial
  Probe
ctgtttccaaagataccctgggcta

SEQ ID NO: 93700 - DNA, 25 bp, Artificial
  Probe
atcctcctggatcatagctaacctt

SEQ ID NO: 93701 - DNA, 25 bp, Artificial
  Probe
tcctcctggatcatagctaaccttt

SEQ ID NO: 93702 - DNA, 25 bp, Artificial
  Probe
tagctaacctttaagcctgtttcca

SEQ ID NO: 93703 - DNA, 25 bp, Artificial
  Probe
atcctcgccatcatcattaatgctt

SEQ ID NO: 93704 - DNA, 25 bp, Artificial
  Probe
accatcctcgccatcatcattaatg

SEQ ID NO: 93705 - DNA, 25 bp, Artificial
  Probe
ccattcattcccgcactaacctaat

SEQ ID NO: 93706 - DNA, 25 bp, Artificial
  Probe
ctagaagcagccagaccatagaaac

SEQ ID NO: 93707 - DNA, 25 bp, Artificial
  Probe
agaccatagaaacaagctgaacaca

SEQ ID NO: 93708 - DNA, 25 bp, Artificial
  Probe
tagaagcagccagaccatagaaaca

SEQ ID NO: 93709 - DNA, 25 bp, Artificial
  Probe
atccattcattcccgcactaaccta

SEQ ID NO: 93710 - DNA, 25 bp, Artificial
  Probe
gtatctgcctacaagagctgtgtac

SEQ ID NO: 93711 - DNA, 25 bp, Artificial
  Probe
gaagaagcggaggaagaggaagaag

SEQ ID NO: 93712 - DNA, 25 bp, Artificial
  Probe
gaagaagaagcggaggaagaggaag

SEQ ID NO: 93713 - DNA, 25 bp, Artificial
  Probe
cattcattcccgcactaacctaatg

SEQ ID NO: 93714 - DNA, 25 bp, Artificial
  Probe
gaccatagaaacaagctgaacacag

SEQ ID NO: 93715 - DNA, 25 bp, Artificial
  Probe
cagaccatagaaacaagctgaacac

SEQ ID NO: 93716 - DNA, 25 bp, Artificial
  Probe
tccattcattcccgcactaacctaa

SEQ ID NO: 93717 - DNA, 25 bp, Artificial
  Probe
tgtatctgcctacaagagctgtgta

SEQ ID NO: 93718 - DNA, 25 bp, Artificial
  Probe
gaagcagccagaccatagaaacaag

SEQ ID NO: 93719 - DNA, 25 bp, Artificial
  Probe
catgtatctgcctacaagagctgtg

SEQ ID NO: 93720 - DNA, 25 bp, Artificial
  Probe
agaagaagcggaggaagaggaagaa

SEQ ID NO: 93721 - DNA, 25 bp, Artificial
  Probe
aagaagaagcggaggaagaggaaga

SEQ ID NO: 93722 - DNA, 25 bp, Artificial
  Probe
ctgaacacagccactgatagacctc

SEQ ID NO: 93723 - DNA, 25 bp, Artificial
  Probe
ctagtccccatcaagatccatttct

SEQ ID NO: 93724 - DNA, 25 bp, Artificial
  Probe
agaagcagccagaccatagaaacaa

SEQ ID NO: 93725 - DNA, 25 bp, Artificial
  Probe
tagtccccatcaagatccatttctc

SEQ ID NO: 93726 - DNA, 25 bp, Artificial
  Probe
attcattcccgcactaacctaatgg

SEQ ID NO: 93727 - DNA, 25 bp, Artificial
  Probe
atgtatctgcctacaagagctgtgt

SEQ ID NO: 93728 - DNA, 25 bp, Artificial
  Probe
ccagaccatagaaacaagctgaaca

SEQ ID NO: 93729 - DNA, 25 bp, Artificial
  Probe
catcaagatccatttctccctggtg

SEQ ID NO: 93730 - DNA, 25 bp, Artificial
  Probe
cctagtccccatcaagatccatttc

SEQ ID NO: 93731 - DNA, 25 bp, Artificial
  Probe
gaacacagccactgatagacctcac

SEQ ID NO: 93732 - DNA, 25 bp, Artificial
  Probe
tatctgcctacaagagctgtgtacg

SEQ ID NO: 93733 - DNA, 25 bp, Artificial
  Probe
ccatgtatctgcctacaagagctgt

SEQ ID NO: 93734 - DNA, 25 bp, Artificial
  Probe
ttcattcccgcactaacctaatgga

SEQ ID NO: 93735 - DNA, 25 bp, Artificial
  Probe
gccttcctatagctcttcctgagag

SEQ ID NO: 93736 - DNA, 25 bp, Artificial
  Probe
cccagagttagagaagcgtttaggc

SEQ ID NO: 93737 - DNA, 25 bp, Artificial
  Probe
tccccagagttagagaagcgtttag

SEQ ID NO: 93738 - DNA, 25 bp, Artificial
  Probe
atctgacagtctatgggccatgtat

SEQ ID NO: 93739 - DNA, 25 bp, Artificial
  Probe
gatccattcattcccgcactaacct

SEQ ID NO: 93740 - DNA, 25 bp, Artificial
  Probe
ccatcaagatccatttctccctggt

SEQ ID NO: 93741 - DNA, 25 bp, Artificial
  Probe
gccagaccatagaaacaagctgaac

SEQ ID NO: 93742 - DNA, 25 bp, Artificial
  Probe
cgccttcctatagctcttcctgaga

SEQ ID NO: 93743 - DNA, 25 bp, Artificial
  Probe
tcattcccgcactaacctaatggag

SEQ ID NO: 93744 - DNA, 25 bp, Artificial
  Probe
ctccccagagttagagaagcgttta

SEQ ID NO: 93745 - DNA, 25 bp, Artificial
  Probe
ctgacagtctatgggccatgtatct

SEQ ID NO: 93746 - DNA, 25 bp, Artificial
  Probe
tctgacagtctatgggccatgtatc

SEQ ID NO: 93747 - DNA, 25 bp, Artificial
  Probe
ctggggtctcatctgacagtctatg

SEQ ID NO: 93748 - DNA, 25 bp, Artificial
  Probe
atcaagatccatttctccctggtgc

SEQ ID NO: 93749 - DNA, 25 bp, Artificial
  Probe
gctagaagcagccagaccatagaaa

SEQ ID NO: 93750 - DNA, 25 bp, Artificial
  Probe
gaacctatcagccaccattactatg

SEQ ID NO: 93751 - DNA, 25 bp, Artificial
  Probe
ctatcagccaccattactatgacaa

SEQ ID NO: 93752 - DNA, 25 bp, Artificial
  Probe
tatcagccaccattactatgacaac

SEQ ID NO: 93753 - DNA, 25 bp, Artificial
  Probe
ggaacctatcagccaccattactat

SEQ ID NO: 93754 - DNA, 25 bp, Artificial
  Probe
aacctatcagccaccattactatga

SEQ ID NO: 93755 - DNA, 25 bp, Artificial
  Probe
cctatcagccaccattactatgaca

SEQ ID NO: 93756 - DNA, 25 bp, Artificial
  Probe
acctatcagccaccattactatgac

SEQ ID NO: 93757 - DNA, 25 bp, Artificial
  Probe
ttcttcaactctggtatcttcataa

SEQ ID NO: 93758 - DNA, 25 bp, Artificial
  Probe
aaccacagttacatatacatgcctg

SEQ ID NO: 93759 - DNA, 25 bp, Artificial
  Probe
taaccacagttacatatacatgcct

SEQ ID NO: 93760 - DNA, 25 bp, Artificial
  Probe
ataaccacagttacatatacatgcc

SEQ ID NO: 93761 - DNA, 25 bp, Artificial
  Probe
gtttcttcaactctggtatcttcat

SEQ ID NO: 93762 - DNA, 25 bp, Artificial
  Probe
atcagccaccattactatgacaacg

SEQ ID NO: 93763 - DNA, 25 bp, Artificial
  Probe
acagttacatatacatgcctgcctt

SEQ ID NO: 93764 - DNA, 25 bp, Artificial
  Probe
aacattggaaagttctggaagggta

SEQ ID NO: 93765 - DNA, 25 bp, Artificial
  Probe
cacagttacatatacatgcctgcct

SEQ ID NO: 93766 - DNA, 25 bp, Artificial
  Probe
ggacaacatgaagatctataaccac

SEQ ID NO: 93767 - DNA, 25 bp, Artificial
  Probe
gtggacaacatgaagatctataacc

SEQ ID NO: 93768 - DNA, 25 bp, Artificial
  Probe
ccaccattactatgacaacgtcttg

SEQ ID NO: 93769 - DNA, 25 bp, Artificial
  Probe
acattggaaagttctggaagggtag

SEQ ID NO: 93770 - DNA, 25 bp, Artificial
  Probe
gaaacattggaaagttctggaaggg

SEQ ID NO: 93771 - DNA, 25 bp, Artificial
  Probe
aaagaagtttgtggacaacatgaag

SEQ ID NO: 93772 - DNA, 25 bp, Artificial
  Probe
gaaagaagtttgtggacaacatgaa

SEQ ID NO: 93773 - DNA, 25 bp, Artificial
  Probe
gaagtttgtggacaacatgaagatc

SEQ ID NO: 93774 - DNA, 25 bp, Artificial
  Probe
tcttcaactctggtatcttcataaa

SEQ ID NO: 93775 - DNA, 25 bp, Artificial
  Probe
tttcttcaactctggtatcttcata

SEQ ID NO: 93776 - DNA, 25 bp, Artificial
  Probe
agaagtttgtggacaacatgaagat

SEQ ID NO: 93777 - DNA, 25 bp, Artificial
  Probe
caacatgaagatctataaccacagt

SEQ ID NO: 93778 - DNA, 25 bp, Artificial
  Probe
acaacatgaagatctataaccacag

SEQ ID NO: 93779 - DNA, 25 bp, Artificial
  Probe
gacaacatgaagatctataaccaca

SEQ ID NO: 93780 - DNA, 25 bp, Artificial
  Probe
aagaagtttgtggacaacatgaaga

SEQ ID NO: 93781 - DNA, 25 bp, Artificial
  Probe
agaaagaagtttgtggacaacatga

SEQ ID NO: 93782 - DNA, 25 bp, Artificial
  Probe
cagaaagaagtttgtggacaacatg

SEQ ID NO: 93783 - DNA, 25 bp, Artificial
  Probe
accacagttacatatacatgcctgc

SEQ ID NO: 93784 - DNA, 25 bp, Artificial
  Probe
cgaaacattggaaagttctggaagg

SEQ ID NO: 93785 - DNA, 25 bp, Artificial
  Probe
caccattactatgacaacgtcttgc

SEQ ID NO: 93786 - DNA, 25 bp, Artificial
  Probe
cagttacatatacatgcctgccttt

SEQ ID NO: 93787 - DNA, 25 bp, Artificial
  Probe
aaacattggaaagttctggaagggt

SEQ ID NO: 93788 - DNA, 25 bp, Artificial
  Probe
cattggaaagttctggaagggtagg

SEQ ID NO: 93789 - DNA, 25 bp, Artificial
  Probe
tgtggacaacatgaagatctataac

SEQ ID NO: 93790 - DNA, 25 bp, Artificial
  Probe
tcgaaacattggaaagttctggaag

SEQ ID NO: 93791 - DNA, 25 bp, Artificial
  Probe
aacatgaagatctataaccacagtt

SEQ ID NO: 93792 - DNA, 25 bp, Artificial
  Probe
tggacaacatgaagatctataacca

SEQ ID NO: 93793 - DNA, 25 bp, Artificial
  Probe
gggaacctatcagccaccattacta

SEQ ID NO: 93794 - DNA, 25 bp, Artificial
  Probe
ccacagttacatatacatgcctgcc

SEQ ID NO: 93795 - DNA, 25 bp, Artificial
  Probe
attctacttatgcttcctccaactg

SEQ ID NO: 93796 - DNA, 25 bp, Artificial
  Probe
cctactacttctatcgtgatgatgg

SEQ ID NO: 93797 - DNA, 25 bp, Artificial
  Probe
ctacttctatcgtgatgatggactg

SEQ ID NO: 93798 - DNA, 25 bp, Artificial
  Probe
aactgaggtggtaagcatctactat

SEQ ID NO: 93799 - DNA, 25 bp, Artificial
  Probe
actacttctatcgtgatgatggact

SEQ ID NO: 93800 - DNA, 25 bp, Artificial
  Probe
tactacttctatcgtgatgatggac

SEQ ID NO: 93801 - DNA, 25 bp, Artificial
  Probe
catcattctacttatgcttcctcca

SEQ ID NO: 93802 - DNA, 25 bp, Artificial
  Probe
tccatcattctacttatgcttcctc

SEQ ID NO: 93803 - DNA, 25 bp, Artificial
  Probe
gtccatcattctacttatgcttcct

SEQ ID NO: 93804 - DNA, 25 bp, Artificial
  Probe
cattctacttatgcttcctccaact

SEQ ID NO: 93805 - DNA, 25 bp, Artificial
  Probe
tcattctacttatgcttcctccaac

SEQ ID NO: 93806 - DNA, 25 bp, Artificial
  Probe
atcattctacttatgcttcctccaa

SEQ ID NO: 93807 - DNA, 25 bp, Artificial
  Probe
ctactacttctatcgtgatgatgga

SEQ ID NO: 93808 - DNA, 25 bp, Artificial
  Probe
ccatcattctacttatgcttcctcc

SEQ ID NO: 93809 - DNA, 25 bp, Artificial
  Probe
ggtccatcattctacttatgcttcc

SEQ ID NO: 93810 - DNA, 25 bp, Artificial
  Probe
tgaggtggtaagcatctactatgag

SEQ ID NO: 93811 - DNA, 25 bp, Artificial
  Probe
ctgaggtggtaagcatctactatga

SEQ ID NO: 93812 - DNA, 25 bp, Artificial
  Probe
cttagtaacctcttcactcagtagc

SEQ ID NO: 93813 - DNA, 25 bp, Artificial
  Probe
gcttagtaacctcttcactcagtag

SEQ ID NO: 93814 - DNA, 25 bp, Artificial
  Probe
ggtggtaagcatctactatgaggat

SEQ ID NO: 93815 - DNA, 25 bp, Artificial
  Probe
caactgaggtggtaagcatctacta

SEQ ID NO: 93816 - DNA, 25 bp, Artificial
  Probe
agtagcaacagagtaagtgataatg

SEQ ID NO: 93817 - DNA, 25 bp, Artificial
  Probe
cagtagcaacagagtaagtgataat

SEQ ID NO: 93818 - DNA, 25 bp, Artificial
  Probe
tagtaacctcttcactcagtagcaa

SEQ ID NO: 93819 - DNA, 25 bp, Artificial
  Probe
ttagtaacctcttcactcagtagca

SEQ ID NO: 93820 - DNA, 25 bp, Artificial
  Probe
actgaggtggtaagcatctactatg

SEQ ID NO: 93821 - DNA, 25 bp, Artificial
  Probe
tcagtagcaacagagtaagtgataa

SEQ ID NO: 93822 - DNA, 25 bp, Artificial
  Probe
ctcagtagcaacagagtaagtgata

SEQ ID NO: 93823 - DNA, 25 bp, Artificial
  Probe
gaggtggtaagcatctactatgagg

SEQ ID NO: 93824 - DNA, 25 bp, Artificial
  Probe
ttcaagtgacttccatatccatcaa

SEQ ID NO: 93825 - DNA, 25 bp, Artificial
  Probe
tacttctatcgtgatgatggactgc

SEQ ID NO: 93826 - DNA, 25 bp, Artificial
  Probe
taacctcttcactcagtagcaacag

SEQ ID NO: 93827 - DNA, 25 bp, Artificial
  Probe
gttcaagtgacttccatatccatca

SEQ ID NO: 93828 - DNA, 25 bp, Artificial
  Probe
aggtggtaagcatctactatgagga

SEQ ID NO: 93829 - DNA, 25 bp, Artificial
  Probe
gtagcaacagagtaagtgataatgt

SEQ ID NO: 93830 - DNA, 25 bp, Artificial
  Probe
gtaacctcttcactcagtagcaaca

SEQ ID NO: 93831 - DNA, 25 bp, Artificial
  Probe
cgttcaagtgacttccatatccatc

SEQ ID NO: 93832 - DNA, 25 bp, Artificial
  Probe
ttctacttatgcttcctccaactgc

SEQ ID NO: 93833 - DNA, 25 bp, Artificial
  Probe
agtaacctcttcactcagtagcaac

SEQ ID NO: 93834 - DNA, 25 bp, Artificial
  Probe
agcttagtaacctcttcactcagta

SEQ ID NO: 93835 - DNA, 25 bp, Artificial
  Probe
tatccatcaaacaatcacccatctt

SEQ ID NO: 93836 - DNA, 25 bp, Artificial
  Probe
atatccatcaaacaatcacccatct

SEQ ID NO: 93837 - DNA, 25 bp, Artificial
  Probe
catatccatcaaacaatcacccatc

SEQ ID NO: 93838 - DNA, 25 bp, Artificial
  Probe
cttccatatccatcaaacaatcacc

SEQ ID NO: 93839 - DNA, 25 bp, Artificial
  Probe
cttctatcgtgatgatggactgctc

SEQ ID NO: 93840 - DNA, 25 bp, Artificial
  Probe
gtcaactccgttaattctagcatcc

SEQ ID NO: 93841 - DNA, 25 bp, Artificial
  Probe
ggtcaactccgttaattctagcatc

SEQ ID NO: 93842 - DNA, 25 bp, Artificial
  Probe
aggaagaagaataagaactgccgtc

SEQ ID NO: 93843 - DNA, 25 bp, Artificial
  Probe
tggtcaactccgttaattctagcat

SEQ ID NO: 93844 - DNA, 25 bp, Artificial
  Probe
aaacacccaccttgaccttatttat

SEQ ID NO: 93845 - DNA, 25 bp, Artificial
  Probe
cccaccttgaccttatttatgactt

SEQ ID NO: 93846 - DNA, 25 bp, Artificial
  Probe
aacacccaccttgaccttatttatg

SEQ ID NO: 93847 - DNA, 25 bp, Artificial
  Probe
ctaaacacccaccttgaccttattt

SEQ ID NO: 93848 - DNA, 25 bp, Artificial
  Probe
ccaccttgaccttatttatgacttt

SEQ ID NO: 93849 - DNA, 25 bp, Artificial
  Probe
ctggtcaactccgttaattctagca

SEQ ID NO: 93850 - DNA, 25 bp, Artificial
  Probe
tccaggaagaagaataagaactgcc

SEQ ID NO: 93851 - DNA, 25 bp, Artificial
  Probe
acccaccttgaccttatttatgact

SEQ ID NO: 93852 - DNA, 25 bp, Artificial
  Probe
cacccaccttgaccttatttatgac

SEQ ID NO: 93853 - DNA, 25 bp, Artificial
  Probe
taaacacccaccttgaccttattta

SEQ ID NO: 93854 - DNA, 25 bp, Artificial
  Probe
ctccgttaattctagcatccctaag

SEQ ID NO: 93855 - DNA, 25 bp, Artificial
  Probe
acacccaccttgaccttatttatga

SEQ ID NO: 93856 - DNA, 25 bp, Artificial
  Probe
actccgttaattctagcatccctaa

SEQ ID NO: 93857 - DNA, 25 bp, Artificial
  Probe
aactccgttaattctagcatcccta

SEQ ID NO: 93858 - DNA, 25 bp, Artificial
  Probe
tccgttaattctagcatccctaagg

SEQ ID NO: 93859 - DNA, 25 bp, Artificial
  Probe
caggaagaagaataagaactgccgt

SEQ ID NO: 93860 - DNA, 25 bp, Artificial
  Probe
cctggtcaactccgttaattctagc

SEQ ID NO: 93861 - DNA, 25 bp, Artificial
  Probe
catgttgtatctggacgagtacgac

SEQ ID NO: 93862 - DNA, 25 bp, Artificial
  Probe
ccttgaccttatttatgactttacg

SEQ ID NO: 93863 - DNA, 25 bp, Artificial
  Probe
aaattatcaggagatggtggtggag

SEQ ID NO: 93864 - DNA, 25 bp, Artificial
  Probe
aattatcaggagatggtggtggagg

SEQ ID NO: 93865 - DNA, 25 bp, Artificial
  Probe
cctaaacacccaccttgaccttatt

SEQ ID NO: 93866 - DNA, 25 bp, Artificial
  Probe
ggaagaagaataagaactgccgtcg

SEQ ID NO: 93867 - DNA, 25 bp, Artificial
  Probe
gaccttatttatgactttacgtgca

SEQ ID NO: 93868 - DNA, 25 bp, Artificial
  Probe
tgaccttatttatgactttacgtgc

SEQ ID NO: 93869 - DNA, 25 bp, Artificial
  Probe
ccaggaagaagaataagaactgccg

SEQ ID NO: 93870 - DNA, 25 bp, Artificial
  Probe
atgttgtatctggacgagtacgaca

SEQ ID NO: 93871 - DNA, 25 bp, Artificial
  Probe
caactccgttaattctagcatccct

SEQ ID NO: 93872 - DNA, 25 bp, Artificial
  Probe
tcaactccgttaattctagcatccc

SEQ ID NO: 93873 - DNA, 25 bp, Artificial
  Probe
accttatttatgactttacgtgcaa

SEQ ID NO: 93874 - DNA, 25 bp, Artificial
  Probe
cctcaactcaaccaatcatgccatt

SEQ ID NO: 93875 - DNA, 25 bp, Artificial
  Probe
ccctggtcaactccgttaattctag

SEQ ID NO: 93876 - DNA, 25 bp, Artificial
  Probe
tttatgactttacgtgcaaatgttt

SEQ ID NO: 93877 - DNA, 25 bp, Artificial
  Probe
gaagaagaataagaactgccgtcgc

SEQ ID NO: 93878 - DNA, 25 bp, Artificial
  Probe
accttgaccttatttatgactttac

SEQ ID NO: 93879 - DNA, 25 bp, Artificial
  Probe
caccttgaccttatttatgacttta

SEQ ID NO: 93880 - DNA, 25 bp, Artificial
  Probe
ctcaactcaaccaatcatgccattg

SEQ ID NO: 93881 - DNA, 25 bp, Artificial
  Probe
ccgttaattctagcatccctaaggc

SEQ ID NO: 93882 - DNA, 25 bp, Artificial
  Probe
ccttatttatgactttacgtgcaaa

SEQ ID NO: 93883 - DNA, 25 bp, Artificial
  Probe
accctggtcaactccgttaattcta

SEQ ID NO: 93884 - DNA, 25 bp, Artificial
  Probe
atttatgactttacgtgcaaatgtt

SEQ ID NO: 93885 - DNA, 25 bp, Artificial
  Probe
ttagatgagaggaacagacacaatg

SEQ ID NO: 93886 - DNA, 25 bp, Artificial
  Probe
tagatgagaggaacagacacaatga

SEQ ID NO: 93887 - DNA, 25 bp, Artificial
  Probe
gttagatgagaggaacagacacaat

SEQ ID NO: 93888 - DNA, 25 bp, Artificial
  Probe
gatgagaggaacagacacaatgaac

SEQ ID NO: 93889 - DNA, 25 bp, Artificial
  Probe
agatgagaggaacagacacaatgaa

SEQ ID NO: 93890 - DNA, 25 bp, Artificial
  Probe
atgagaggaacagacacaatgaaca

SEQ ID NO: 93891 - DNA, 25 bp, Artificial
  Probe
ggttagatgagaggaacagacacaa

SEQ ID NO: 93892 - DNA, 25 bp, Artificial
  Probe
tgagaggaacagacacaatgaacag

SEQ ID NO: 93893 - DNA, 25 bp, Artificial
  Probe
tgttaagttagggttagatgagagg

SEQ ID NO: 93894 - DNA, 25 bp, Artificial
  Probe
gttaagttagggttagatgagagga

SEQ ID NO: 93895 - DNA, 25 bp, Artificial
  Probe
aagttagggttagatgagaggaaca

SEQ ID NO: 93896 - DNA, 25 bp, Artificial
  Probe
ttagggttagatgagaggaacagac

SEQ ID NO: 93897 - DNA, 25 bp, Artificial
  Probe
gttagggttagatgagaggaacaga

SEQ ID NO: 93898 - DNA, 25 bp, Artificial
  Probe
agttagggttagatgagaggaacag

SEQ ID NO: 93899 - DNA, 25 bp, Artificial
  Probe
taagttagggttagatgagaggaac

SEQ ID NO: 93900 - DNA, 25 bp, Artificial
  Probe
ttaagttagggttagatgagaggaa

SEQ ID NO: 93901 - DNA, 25 bp, Artificial
  Probe
caggttggagttagattggcgttag

SEQ ID NO: 93902 - DNA, 25 bp, Artificial
  Probe
tagggttagatgagaggaacagaca

SEQ ID NO: 93903 - DNA, 25 bp, Artificial
  Probe
gtaggttctcatccaggtactagct

SEQ ID NO: 93904 - DNA, 25 bp, Artificial
  Probe
ccgtaggttctcatccaggtactag

SEQ ID NO: 93905 - DNA, 25 bp, Artificial
  Probe
ttgttaagttagggttagatgagag

SEQ ID NO: 93906 - DNA, 25 bp, Artificial
  Probe
cttgttaagttagggttagatgaga

SEQ ID NO: 93907 - DNA, 25 bp, Artificial
  Probe
gagaggaacagacacaatgaacagc

SEQ ID NO: 93908 - DNA, 25 bp, Artificial
  Probe
taggttctcatccaggtactagctg

SEQ ID NO: 93909 - DNA, 25 bp, Artificial
  Probe
cgtaggttctcatccaggtactagc

SEQ ID NO: 93910 - DNA, 25 bp, Artificial
  Probe
acattagaaatgaagcaatcagagc

SEQ ID NO: 93911 - DNA, 25 bp, Artificial
  Probe
gcacattagaaatgaagcaatcaga

SEQ ID NO: 93912 - DNA, 25 bp, Artificial
  Probe
gtctgtcatttctgttccttccctc

SEQ ID NO: 93913 - DNA, 25 bp, Artificial
  Probe
ccacctcattgtcatctccaataaa

SEQ ID NO: 93914 - DNA, 25 bp, Artificial
  Probe
ttctcatccaggtactagctgtgtt

SEQ ID NO: 93915 - DNA, 25 bp, Artificial
  Probe
aggttggagttagattggcgttagg

SEQ ID NO: 93916 - DNA, 25 bp, Artificial
  Probe
cgcacattagaaatgaagcaatcag

SEQ ID NO: 93917 - DNA, 25 bp, Artificial
  Probe
cacattagaaatgaagcaatcagag

SEQ ID NO: 93918 - DNA, 25 bp, Artificial
  Probe
cttatggctctagcgtttgacctac

SEQ ID NO: 93919 - DNA, 25 bp, Artificial
  Probe
gtactagctgtgttctgcatccttg

SEQ ID NO: 93920 - DNA, 25 bp, Artificial
  Probe
agggttagatgagaggaacagacac

SEQ ID NO: 93921 - DNA, 25 bp, Artificial
  Probe
tagctgaatacctagaggtttactg

SEQ ID NO: 93922 - DNA, 25 bp, Artificial
  Probe
cctagctgaatacctagaggtttac

SEQ ID NO: 93923 - DNA, 25 bp, Artificial
  Probe
ctcatccaggtactagctgtgttct

SEQ ID NO: 93924 - DNA, 25 bp, Artificial
  Probe
tctcatccaggtactagctgtgttc

SEQ ID NO: 93925 - DNA, 25 bp, Artificial
  Probe
gggttagatgagaggaacagacaca

SEQ ID NO: 93926 - DNA, 25 bp, Artificial
  Probe
gccacttgttaagttagggttagat

SEQ ID NO: 93927 - DNA, 25 bp, Artificial
  Probe
tgtcatttctgttccttccctccat

SEQ ID NO: 93928 - DNA, 25 bp, Artificial
  Probe
agctgaatacctagaggtttactgg

SEQ ID NO: 93929 - DNA, 25 bp, Artificial
  Probe
ccacttgttaagttagggttagatg

SEQ ID NO: 93930 - DNA, 25 bp, Artificial
  Probe
aggagtctgagatggaagttgtcaa

SEQ ID NO: 93931 - DNA, 25 bp, Artificial
  Probe
ggagtctgagatggaagttgtcaac

SEQ ID NO: 93932 - DNA, 25 bp, Artificial
  Probe
caggagtctgagatggaagttgtca

SEQ ID NO: 93933 - DNA, 25 bp, Artificial
  Probe
ttgtcaactgtccagagaaaggtct

SEQ ID NO: 93934 - DNA, 25 bp, Artificial
  Probe
gagtctgagatggaagttgtcaact

SEQ ID NO: 93935 - DNA, 25 bp, Artificial
  Probe
gttgtcaactgtccagagaaaggtc

SEQ ID NO: 93936 - DNA, 25 bp, Artificial
  Probe
tctgagatggaagttgtcaactgtc

SEQ ID NO: 93937 - DNA, 25 bp, Artificial
  Probe
agtctgagatggaagttgtcaactg

SEQ ID NO: 93938 - DNA, 25 bp, Artificial
  Probe
ccaggagtctgagatggaagttgtc

SEQ ID NO: 93939 - DNA, 25 bp, Artificial
  Probe
gtctgagatggaagttgtcaactgt

SEQ ID NO: 93940 - DNA, 25 bp, Artificial
  Probe
ctgagatggaagttgtcaactgtcc

SEQ ID NO: 93941 - DNA, 25 bp, Artificial
  Probe
gaagttgtcaactgtccagagaaag

SEQ ID NO: 93942 - DNA, 25 bp, Artificial
  Probe
atgagttaccagtggaccaacctga

SEQ ID NO: 93943 - DNA, 25 bp, Artificial
  Probe
catgagttaccagtggaccaacctg

SEQ ID NO: 93944 - DNA, 25 bp, Artificial
  Probe
aaaggtctgcccctctatctcatag

SEQ ID NO: 93945 - DNA, 25 bp, Artificial
  Probe
gaaaggtctgcccctctatctcata

SEQ ID NO: 93946 - DNA, 25 bp, Artificial
  Probe
aagttgtcaactgtccagagaaagg

SEQ ID NO: 93947 - DNA, 25 bp, Artificial
  Probe
ggaagttgtcaactgtccagagaaa

SEQ ID NO: 93948 - DNA, 25 bp, Artificial
  Probe
aaggtctgcccctctatctcatagt

SEQ ID NO: 93949 - DNA, 25 bp, Artificial
  Probe
gatggaagttgtcaactgtccagag

SEQ ID NO: 93950 - DNA, 25 bp, Artificial
  Probe
gagatggaagttgtcaactgtccag

SEQ ID NO: 93951 - DNA, 25 bp, Artificial
  Probe
agttgtcaactgtccagagaaaggt

SEQ ID NO: 93952 - DNA, 25 bp, Artificial
  Probe
agaaaggtctgcccctctatctcat

SEQ ID NO: 93953 - DNA, 25 bp, Artificial
  Probe
atggaagttgtcaactgtccagaga

SEQ ID NO: 93954 - DNA, 25 bp, Artificial
  Probe
agatggaagttgtcaactgtccaga

SEQ ID NO: 93955 - DNA, 25 bp, Artificial
  Probe
aggtctgcccctctatctcatagtg

SEQ ID NO: 93956 - DNA, 25 bp, Artificial
  Probe
tgtcaactgtccagagaaaggtctg

SEQ ID NO: 93957 - DNA, 25 bp, Artificial
  Probe
tggaagttgtcaactgtccagagaa

SEQ ID NO: 93958 - DNA, 25 bp, Artificial
  Probe
tgagatggaagttgtcaactgtcca

SEQ ID NO: 93959 - DNA, 25 bp, Artificial
  Probe
gtttaagtgcaaggcggtaaacagg

SEQ ID NO: 93960 - DNA, 25 bp, Artificial
  Probe
agagaaaggtctgcccctctatctc

SEQ ID NO: 93961 - DNA, 25 bp, Artificial
  Probe
cgtttaagtgcaaggcggtaaacag

SEQ ID NO: 93962 - DNA, 25 bp, Artificial
  Probe
gagaaaggtctgcccctctatctca

SEQ ID NO: 93963 - DNA, 25 bp, Artificial
  Probe
cagagaaaggtctgcccctctatct

SEQ ID NO: 93964 - DNA, 25 bp, Artificial
  Probe
cagttgagcgaataagtgaatacat

SEQ ID NO: 93965 - DNA, 25 bp, Artificial
  Probe
ttggaatgagaagcagattgacatc

SEQ ID NO: 93966 - DNA, 25 bp, Artificial
  Probe
cttggaatgagaagcagattgacat

SEQ ID NO: 93967 - DNA, 25 bp, Artificial
  Probe
gcagttgagcgaataagtgaataca

SEQ ID NO: 93968 - DNA, 25 bp, Artificial
  Probe
agttgagcgaataagtgaatacata

SEQ ID NO: 93969 - DNA, 25 bp, Artificial
  Probe
ttaacaactatcaagtgcggtatcg

SEQ ID NO: 93970 - DNA, 25 bp, Artificial
  Probe
gaatgagaagcagattgacatcaac

SEQ ID NO: 93971 - DNA, 25 bp, Artificial
  Probe
tgacaagataatggtcctagacaac

SEQ ID NO: 93972 - DNA, 25 bp, Artificial
  Probe
gtgacaagataatggtcctagacaa

SEQ ID NO: 93973 - DNA, 25 bp, Artificial
  Probe
cagtgacaagataatggtcctagac

SEQ ID NO: 93974 - DNA, 25 bp, Artificial
  Probe
gacagtgacaagataatggtcctag

SEQ ID NO: 93975 - DNA, 25 bp, Artificial
  Probe
catcatggacagtgacaagataatg

SEQ ID NO: 93976 - DNA, 25 bp, Artificial
  Probe
ggcagttgagcgaataagtgaatac

SEQ ID NO: 93977 - DNA, 25 bp, Artificial
  Probe
agtgacaagataatggtcctagaca

SEQ ID NO: 93978 - DNA, 25 bp, Artificial
  Probe
acagtgacaagataatggtcctaga

SEQ ID NO: 93979 - DNA, 25 bp, Artificial
  Probe
atcatggacagtgacaagataatgg

SEQ ID NO: 93980 - DNA, 25 bp, Artificial
  Probe
gttgagcgaataagtgaatacataa

SEQ ID NO: 93981 - DNA, 25 bp, Artificial
  Probe
gacaagataatggtcctagacaacg

SEQ ID NO: 93982 - DNA, 25 bp, Artificial
  Probe
ggaatgagaagcagattgacatcaa

SEQ ID NO: 93983 - DNA, 25 bp, Artificial
  Probe
tggcagttgagcgaataagtgaata

SEQ ID NO: 93984 - DNA, 25 bp, Artificial
  Probe
aatgagaagcagattgacatcaacc

SEQ ID NO: 93985 - DNA, 25 bp, Artificial
  Probe
tggaatgagaagcagattgacatca

SEQ ID NO: 93986 - DNA, 25 bp, Artificial
  Probe
ttatttgctttggtttctgtgactg

SEQ ID NO: 93987 - DNA, 25 bp, Artificial
  Probe
attatttgctttggtttctgtgact

SEQ ID NO: 93988 - DNA, 25 bp, Artificial
  Probe
tcatggacagtgacaagataatggt

SEQ ID NO: 93989 - DNA, 25 bp, Artificial
  Probe
ccttgctgctggttatttatagaaa

SEQ ID NO: 93990 - DNA, 25 bp, Artificial
  Probe
catggacagtgacaagataatggtc

SEQ ID NO: 93991 - DNA, 25 bp, Artificial
  Probe
ttgtaacatcaagagcggagagaag

SEQ ID NO: 93992 - DNA, 25 bp, Artificial
  Probe
acaagataatggtcctagacaacgg

SEQ ID NO: 93993 - DNA, 25 bp, Artificial
  Probe
tatttgctttggtttctgtgactgt

SEQ ID NO: 93994 - DNA, 25 bp, Artificial
  Probe
taacaactatcaagtgcggtatcgg

SEQ ID NO: 93995 - DNA, 25 bp, Artificial
  Probe
agaagcagattgacatcaaccagaa

SEQ ID NO: 93996 - DNA, 25 bp, Artificial
  Probe
ccatcatggacagtgacaagataat

SEQ ID NO: 93997 - DNA, 25 bp, Artificial
  Probe
gccttgctgctggttatttatagaa

SEQ ID NO: 93998 - DNA, 25 bp, Artificial
  Probe
atgagaagcagattgacatcaacca

SEQ ID NO: 93999 - DNA, 25 bp, Artificial
  Probe
gtttaacaactatcaagtgcggtat

SEQ ID NO: 94000 - DNA, 25 bp, Artificial
  Probe
tttaacaactatcaagtgcggtatc

SEQ ID NO: 94001 - DNA, 25 bp, Artificial
  Probe
caatatcacacaaaccttgaactgg

SEQ ID NO: 94002 - DNA, 25 bp, Artificial
  Probe
tgtccaacagaggttccttctatct

SEQ ID NO: 94003 - DNA, 25 bp, Artificial
  Probe
atattcagatgaggaggtttggagg

SEQ ID NO: 94004 - DNA, 25 bp, Artificial
  Probe
tattatttgctttggtttctgtgac

SEQ ID NO: 94005 - DNA, 25 bp, Artificial
  Probe
ctattatttgctttggtttctgtga

SEQ ID NO: 94006 - DNA, 25 bp, Artificial
  Probe
tctattatttgctttggtttctgtg

SEQ ID NO: 94007 - DNA, 25 bp, Artificial
  Probe
gagaagcagattgacatcaaccaga

SEQ ID NO: 94008 - DNA, 25 bp, Artificial
  Probe
tgaaagggatcacttgtaacatcaa

SEQ ID NO: 94009 - DNA, 25 bp, Artificial
  Probe
aaggcaaataaagaatgtatgtggg

SEQ ID NO: 94010 - DNA, 25 bp, Artificial
  Probe
ggaggaaaggcaaataaagaatgta

SEQ ID NO: 94011 - DNA, 25 bp, Artificial
  Probe
aagagaatatcatctgggctaacct

SEQ ID NO: 94012 - DNA, 25 bp, Artificial
  Probe
caagagaatatcatctgggctaacc

SEQ ID NO: 94013 - DNA, 25 bp, Artificial
  Probe
gggaggaaaggcaaataaagaatgt

SEQ ID NO: 94014 - DNA, 25 bp, Artificial
  Probe
aaaggcaaataaagaatgtatgtgg

SEQ ID NO: 94015 - DNA, 25 bp, Artificial
  Probe
agagaatatcatctgggctaacctg

SEQ ID NO: 94016 - DNA, 25 bp, Artificial
  Probe
ggaaaggcaaataaagaatgtatgt

SEQ ID NO: 94017 - DNA, 25 bp, Artificial
  Probe
aggaaaggcaaataaagaatgtatg

SEQ ID NO: 94018 - DNA, 25 bp, Artificial
  Probe
gaggaaaggcaaataaagaatgtat

SEQ ID NO: 94019 - DNA, 25 bp, Artificial
  Probe
atgatacaatccctgaggactatga

SEQ ID NO: 94020 - DNA, 25 bp, Artificial
  Probe
aatgatacaatccctgaggactatg

SEQ ID NO: 94021 - DNA, 25 bp, Artificial
  Probe
caatgatacaatccctgaggactat

SEQ ID NO: 94022 - DNA, 25 bp, Artificial
  Probe
tgatacaatccctgaggactatgag

SEQ ID NO: 94023 - DNA, 25 bp, Artificial
  Probe
gaaaggcaaataaagaatgtatgtg

SEQ ID NO: 94024 - DNA, 25 bp, Artificial
  Probe
ccaagagaatatcatctgggctaac

SEQ ID NO: 94025 - DNA, 25 bp, Artificial
  Probe
ctatgtggtcatgtggaaacagatg

SEQ ID NO: 94026 - DNA, 25 bp, Artificial
  Probe
tctatgtggtcatgtggaaacagat

SEQ ID NO: 94027 - DNA, 25 bp, Artificial
  Probe
gagaatatcatctgggctaacctgc

SEQ ID NO: 94028 - DNA, 25 bp, Artificial
  Probe
gcaatgatacaatccctgaggacta

SEQ ID NO: 94029 - DNA, 25 bp, Artificial
  Probe
ttctatgtggtcatgtggaaacaga

SEQ ID NO: 94030 - DNA, 25 bp, Artificial
  Probe
gatacaatccctgaggactatgagc

SEQ ID NO: 94031 - DNA, 25 bp, Artificial
  Probe
ttctatgagggtcctgagctagtag

SEQ ID NO: 94032 - DNA, 25 bp, Artificial
  Probe
gaaatgtgggctggaaggataagac

SEQ ID NO: 94033 - DNA, 25 bp, Artificial
  Probe
gttctatgagggtcctgagctagta

SEQ ID NO: 94034 - DNA, 25 bp, Artificial
  Probe
tttctatgtggtcatgtggaaacag

SEQ ID NO: 94035 - DNA, 25 bp, Artificial
  Probe
aggcaaataaagaatgtatgtgggg

SEQ ID NO: 94036 - DNA, 25 bp, Artificial
  Probe
tatgtggtcatgtggaaacagatgg

SEQ ID NO: 94037 - DNA, 25 bp, Artificial
  Probe
ggggaggaaaggcaaataaagaatg

SEQ ID NO: 94038 - DNA, 25 bp, Artificial
  Probe
tggggaggaaaggcaaataaagaat

SEQ ID NO: 94039 - DNA, 25 bp, Artificial
  Probe
atacaatccctgaggactatgagcg

SEQ ID NO: 94040 - DNA, 25 bp, Artificial
  Probe
gataagacatcctaccgctggttcc

SEQ ID NO: 94041 - DNA, 25 bp, Artificial
  Probe
aaatgtgggctggaaggataagaca

SEQ ID NO: 94042 - DNA, 25 bp, Artificial
  Probe
agaatatcatctgggctaacctgcg

SEQ ID NO: 94043 - DNA, 25 bp, Artificial
  Probe
ctggggaggaaaggcaaataaagaa

SEQ ID NO: 94044 - DNA, 25 bp, Artificial
  Probe
cgaaatgtgggctggaaggataaga

SEQ ID NO: 94045 - DNA, 25 bp, Artificial
  Probe
ctacatcagggtgcggttctatgag

SEQ ID NO: 94046 - DNA, 25 bp, Artificial
  Probe
ataagacatcctaccgctggttcct

SEQ ID NO: 94047 - DNA, 25 bp, Artificial
  Probe
atgtggtcatgtggaaacagatgga

SEQ ID NO: 94048 - DNA, 25 bp, Artificial
  Probe
tgcaatgatacaatccctgaggact

SEQ ID NO: 94049 - DNA, 25 bp, Artificial
  Probe
tacaatccctgaggactatgagcgt

SEQ ID NO: 94050 - DNA, 25 bp, Artificial
  Probe
ggttctatgagggtcctgagctagt

SEQ ID NO: 94051 - DNA, 25 bp, Artificial
  Probe
aatgtgggctggaaggataagacat

SEQ ID NO: 94052 - DNA, 25 bp, Artificial
  Probe
tcgaaatgtgggctggaaggataag

SEQ ID NO: 94053 - DNA, 25 bp, Artificial
  Probe
ctcgaaatgtgggctggaaggataa

SEQ ID NO: 94054 - DNA, 25 bp, Artificial
  Probe
ctaccagcacctcataaatatcagt

SEQ ID NO: 94055 - DNA, 25 bp, Artificial
  Probe
accagcacctcataaatatcagtaa

SEQ ID NO: 94056 - DNA, 25 bp, Artificial
  Probe
cctaccagcacctcataaatatcag

SEQ ID NO: 94057 - DNA, 25 bp, Artificial
  Probe
taccagcacctcataaatatcagta

SEQ ID NO: 94058 - DNA, 25 bp, Artificial
  Probe
ccagcacctcataaatatcagtaaa

SEQ ID NO: 94059 - DNA, 25 bp, Artificial
  Probe
ccctaccagcacctcataaatatca

SEQ ID NO: 94060 - DNA, 25 bp, Artificial
  Probe
cagcacctcataaatatcagtaaag

SEQ ID NO: 94061 - DNA, 25 bp, Artificial
  Probe
agcacctcataaatatcagtaaaga

SEQ ID NO: 94062 - DNA, 25 bp, Artificial
  Probe
gcacctcataaatatcagtaaagaa

SEQ ID NO: 94063 - DNA, 25 bp, Artificial
  Probe
atcttctgactaaggagtctgttct

SEQ ID NO: 94064 - DNA, 25 bp, Artificial
  Probe
gtatcttctgactaaggagtctgtt

SEQ ID NO: 94065 - DNA, 25 bp, Artificial
  Probe
ggtatcttctgactaaggagtctgt

SEQ ID NO: 94066 - DNA, 25 bp, Artificial
  Probe
tatcttctgactaaggagtctgttc

SEQ ID NO: 94067 - DNA, 25 bp, Artificial
  Probe
cctcaagaagaacgggagttgtaag

SEQ ID NO: 94068 - DNA, 25 bp, Artificial
  Probe
tcttctgactaaggagtctgttctg

SEQ ID NO: 94069 - DNA, 25 bp, Artificial
  Probe
cggtatcttctgactaaggagtctg

SEQ ID NO: 94070 - DNA, 25 bp, Artificial
  Probe
cttctgactaaggagtctgttctgg

SEQ ID NO: 94071 - DNA, 25 bp, Artificial
  Probe
gttgaccctaaaatgttcccttgac

SEQ ID NO: 94072 - DNA, 25 bp, Artificial
  Probe
ctcaagaagaacgggagttgtaagc

SEQ ID NO: 94073 - DNA, 25 bp, Artificial
  Probe
cagtctaggtctgggtttggatatc

SEQ ID NO: 94074 - DNA, 25 bp, Artificial
  Probe
cccctaccagcacctcataaatatc

SEQ ID NO: 94075 - DNA, 25 bp, Artificial
  Probe
atgctctttccccttctgagtaatc

SEQ ID NO: 94076 - DNA, 25 bp, Artificial
  Probe
ttggttgaccctaaaatgttccctt

SEQ ID NO: 94077 - DNA, 25 bp, Artificial
  Probe
tttggttgaccctaaaatgttccct

SEQ ID NO: 94078 - DNA, 25 bp, Artificial
  Probe
ttgaccctaaaatgttcccttgacc

SEQ ID NO: 94079 - DNA, 25 bp, Artificial
  Probe
gaccctaaaatgttcccttgaccat

SEQ ID NO: 94080 - DNA, 25 bp, Artificial
  Probe
ttttggttgaccctaaaatgttccc

SEQ ID NO: 94081 - DNA, 25 bp, Artificial
  Probe
ggttgaccctaaaatgttcccttga

SEQ ID NO: 94082 - DNA, 25 bp, Artificial
  Probe
catgctctttccccttctgagtaat

SEQ ID NO: 94083 - DNA, 25 bp, Artificial
  Probe
tggttgaccctaaaatgttcccttg

SEQ ID NO: 94084 - DNA, 25 bp, Artificial
  Probe
cctaaaatgttcccttgaccattgg

SEQ ID NO: 94085 - DNA, 25 bp, Artificial
  Probe
ccctaaaatgttcccttgaccattg

SEQ ID NO: 94086 - DNA, 25 bp, Artificial
  Probe
aagtgggttcttttagtagctgcat

SEQ ID NO: 94087 - DNA, 25 bp, Artificial
  Probe
gcctcaagaagaacgggagttgtaa

SEQ ID NO: 94088 - DNA, 25 bp, Artificial
  Probe
accctaaaatgttcccttgaccatt

SEQ ID NO: 94089 - DNA, 25 bp, Artificial
  Probe
gtagcatctggaggggtctaagaag

SEQ ID NO: 94090 - DNA, 25 bp, Artificial
  Probe
tgaccctaaaatgttcccttgacca

SEQ ID NO: 94091 - DNA, 25 bp, Artificial
  Probe
tcaagaagaacgggagttgtaagcg

SEQ ID NO: 94092 - DNA, 25 bp, Artificial
  Probe
ccggtatcttctgactaaggagtct

SEQ ID NO: 94093 - DNA, 25 bp, Artificial
  Probe
ctaaaatgttcccttgaccattggc

SEQ ID NO: 94094 - DNA, 25 bp, Artificial
  Probe
tagcatctggaggggtctaagaagt

SEQ ID NO: 94095 - DNA, 25 bp, Artificial
  Probe
tgctctttccccttctgagtaatcc

SEQ ID NO: 94096 - DNA, 25 bp, Artificial
  Probe
agtgggttcttttagtagctgcatg

SEQ ID NO: 94097 - DNA, 25 bp, Artificial
  Probe
gaagtgggttcttttagtagctgca

SEQ ID NO: 94098 - DNA, 25 bp, Artificial
  Probe
taaaatgttcccttgaccattggct

SEQ ID NO: 94099 - DNA, 25 bp, Artificial
  Probe
cattacatcatcttcaacttcctgc

SEQ ID NO: 94100 - DNA, 25 bp, Artificial
  Probe
attacatcatcttcaacttcctgcc

SEQ ID NO: 94101 - DNA, 25 bp, Artificial
  Probe
tcattacatcatcttcaacttcctg

SEQ ID NO: 94102 - DNA, 25 bp, Artificial
  Probe
ttcattacatcatcttcaacttcct

SEQ ID NO: 94103 - DNA, 25 bp, Artificial
  Probe
ttacatcatcttcaacttcctgcct

SEQ ID NO: 94104 - DNA, 25 bp, Artificial
  Probe
tacatcatcttcaacttcctgcctg

SEQ ID NO: 94105 - DNA, 25 bp, Artificial
  Probe
attcattacatcatcttcaacttcc

SEQ ID NO: 94106 - DNA, 25 bp, Artificial
  Probe
gtcctctactgcttcctcaatcaag

SEQ ID NO: 94107 - DNA, 25 bp, Artificial
  Probe
cccatctgttctttcttcctatcta

SEQ ID NO: 94108 - DNA, 25 bp, Artificial
  Probe
tcctctactgcttcctcaatcaaga

SEQ ID NO: 94109 - DNA, 25 bp, Artificial
  Probe
tgtcctctactgcttcctcaatcaa

SEQ ID NO: 94110 - DNA, 25 bp, Artificial
  Probe
tctgctttctctaggtccctgtata

SEQ ID NO: 94111 - DNA, 25 bp, Artificial
  Probe
ctgtcctctactgcttcctcaatca

SEQ ID NO: 94112 - DNA, 25 bp, Artificial
  Probe
ccatctgttctttcttcctatctag

SEQ ID NO: 94113 - DNA, 25 bp, Artificial
  Probe
atctgctttctctaggtccctgtat

SEQ ID NO: 94114 - DNA, 25 bp, Artificial
  Probe
tctttcttcctatctaggctattgc

SEQ ID NO: 94115 - DNA, 25 bp, Artificial
  Probe
tctgttctttcttcctatctaggct

SEQ ID NO: 94116 - DNA, 25 bp, Artificial
  Probe
atctgttctttcttcctatctaggc

SEQ ID NO: 94117 - DNA, 25 bp, Artificial
  Probe
cccagggaaaccaataaacttgtac

SEQ ID NO: 94118 - DNA, 25 bp, Artificial
  Probe
ctgttctttcttcctatctaggcta

SEQ ID NO: 94119 - DNA, 25 bp, Artificial
  Probe
catcatcttcaacttcctgcctgac

SEQ ID NO: 94120 - DNA, 25 bp, Artificial
  Probe
tgttctttcttcctatctaggctat

SEQ ID NO: 94121 - DNA, 25 bp, Artificial
  Probe
cattctctgcatctgctttctctag

SEQ ID NO: 94122 - DNA, 25 bp, Artificial
  Probe
tataccaacctccgactttctcagt

SEQ ID NO: 94123 - DNA, 25 bp, Artificial
  Probe
atcatcttcaacttcctgcctgaca

SEQ ID NO: 94124 - DNA, 25 bp, Artificial
  Probe
acatcatcttcaacttcctgcctga

SEQ ID NO: 94125 - DNA, 25 bp, Artificial
  Probe
catctgttctttcttcctatctagg

SEQ ID NO: 94126 - DNA, 25 bp, Artificial
  Probe
aattcattacatcatcttcaacttc

SEQ ID NO: 94127 - DNA, 25 bp, Artificial
  Probe
tcattctctgcatctgctttctcta

SEQ ID NO: 94128 - DNA, 25 bp, Artificial
  Probe
tggaattcattacatcatcttcaac

SEQ ID NO: 94129 - DNA, 25 bp, Artificial
  Probe
catctgctttctctaggtccctgta

SEQ ID NO: 94130 - DNA, 25 bp, Artificial
  Probe
ctccgactttctcagttcctgtatg

SEQ ID NO: 94131 - DNA, 25 bp, Artificial
  Probe
cttccgttctcattctctgcatctg

SEQ ID NO: 94132 - DNA, 25 bp, Artificial
  Probe
ggaattcattacatcatcttcaact

SEQ ID NO: 94133 - DNA, 25 bp, Artificial
  Probe
ctgctttctctaggtccctgtatac

SEQ ID NO: 94134 - DNA, 25 bp, Artificial
  Probe
attctctgcatctgctttctctagg

SEQ ID NO: 94135 - DNA, 25 bp, Artificial
  Probe
ttctttcttcctatctaggctattg

SEQ ID NO: 94136 - DNA, 25 bp, Artificial
  Probe
gttctttcttcctatctaggctatt

SEQ ID NO: 94137 - DNA, 25 bp, Artificial
  Probe
ttctcattctctgcatctgctttct

SEQ ID NO: 94138 - DNA, 25 bp, Artificial
  Probe
gttctcattctctgcatctgctttc

SEQ ID NO: 94139 - DNA, 25 bp, Artificial
  Probe
ttgttgttgctgtcctctactgctt

SEQ ID NO: 94140 - DNA, 25 bp, Artificial
  Probe
cagttgagtcaatgtggctctgaag

SEQ ID NO: 94141 - DNA, 25 bp, Artificial
  Probe
ccccatctgttctttcttcctatct

SEQ ID NO: 94142 - DNA, 25 bp, Artificial
  Probe
cctctactgcttcctcaatcaagag

SEQ ID NO: 94143 - DNA, 25 bp, Artificial
  Probe
gctgtcctctactgcttcctcaatc

SEQ ID NO: 94144 - DNA, 25 bp, Artificial
  Probe
tctctatgccttcttgaataagtct

SEQ ID NO: 94145 - DNA, 25 bp, Artificial
  Probe
ctctatgccttcttgaataagtctt

SEQ ID NO: 94146 - DNA, 25 bp, Artificial
  Probe
ttctctatgccttcttgaataagtc

SEQ ID NO: 94147 - DNA, 25 bp, Artificial
  Probe
ttcctctggcttggctatatcaatt

SEQ ID NO: 94148 - DNA, 25 bp, Artificial
  Probe
ctctggcttggctatatcaattcag

SEQ ID NO: 94149 - DNA, 25 bp, Artificial
  Probe
tcctctggcttggctatatcaattc

SEQ ID NO: 94150 - DNA, 25 bp, Artificial
  Probe
cctctggcttggctatatcaattca

SEQ ID NO: 94151 - DNA, 25 bp, Artificial
  Probe
tattgtggaccctttcatagactac

SEQ ID NO: 94152 - DNA, 25 bp, Artificial
  Probe
atattgtggaccctttcatagacta

SEQ ID NO: 94153 - DNA, 25 bp, Artificial
  Probe
tctggcttggctatatcaattcagg

SEQ ID NO: 94154 - DNA, 25 bp, Artificial
  Probe
attgtggaccctttcatagactaca

SEQ ID NO: 94155 - DNA, 25 bp, Artificial
  Probe
tttcctctggcttggctatatcaat

SEQ ID NO: 94156 - DNA, 25 bp, Artificial
  Probe
aatattgtggaccctttcatagact

SEQ ID NO: 94157 - DNA, 25 bp, Artificial
  Probe
tctatgccttcttgaataagtcttt

SEQ ID NO: 94158 - DNA, 25 bp, Artificial
  Probe
tttctctatgccttcttgaataagt

SEQ ID NO: 94159 - DNA, 25 bp, Artificial
  Probe
ctatgccttcttgaataagtctttc

SEQ ID NO: 94160 - DNA, 25 bp, Artificial
  Probe
cagccaagactttatgtgtcatcat

SEQ ID NO: 94161 - DNA, 25 bp, Artificial
  Probe
gcttggctatatcaattcagggttg

SEQ ID NO: 94162 - DNA, 25 bp, Artificial
  Probe
ggaccctttcatagactacactgtg

SEQ ID NO: 94163 - DNA, 25 bp, Artificial
  Probe
ccttccttatcatcctctgctgtga

SEQ ID NO: 94164 - DNA, 25 bp, Artificial
  Probe
ctttcctctggcttggctatatcaa

SEQ ID NO: 94165 - DNA, 25 bp, Artificial
  Probe
cttccttatcatcctctgctgtgat

SEQ ID NO: 94166 - DNA, 25 bp, Artificial
  Probe
tggaccctttcatagactacactgt

SEQ ID NO: 94167 - DNA, 25 bp, Artificial
  Probe
agccaagactttatgtgtcatcatg

SEQ ID NO: 94168 - DNA, 25 bp, Artificial
  Probe
ttgtggaccctttcatagactacac

SEQ ID NO: 94169 - DNA, 25 bp, Artificial
  Probe
atgtgctaagggatacagtggaatg

SEQ ID NO: 94170 - DNA, 25 bp, Artificial
  Probe
gaccctttcatagactacactgtgc

SEQ ID NO: 94171 - DNA, 25 bp, Artificial
  Probe
ggcttggctatatcaattcagggtt

SEQ ID NO: 94172 - DNA, 25 bp, Artificial
  Probe
ctaagggatacagtggaatgtggtg

SEQ ID NO: 94173 - DNA, 25 bp, Artificial
  Probe
gtggaccctttcatagactacactg

SEQ ID NO: 94174 - DNA, 25 bp, Artificial
  Probe
ttccttatcatcctctgctgtgatg

SEQ ID NO: 94175 - DNA, 25 bp, Artificial
  Probe
catgtgctaagggatacagtggaat

SEQ ID NO: 94176 - DNA, 25 bp, Artificial
  Probe
ccaagactttatgtgtcatcatggg

SEQ ID NO: 94177 - DNA, 25 bp, Artificial
  Probe
aagactttatgtgtcatcatgggct

SEQ ID NO: 94178 - DNA, 25 bp, Artificial
  Probe
caagactttatgtgtcatcatgggc

SEQ ID NO: 94179 - DNA, 25 bp, Artificial
  Probe
tgtggaccctttcatagactacact

SEQ ID NO: 94180 - DNA, 25 bp, Artificial
  Probe
cccttttctctatgccttcttgaat

SEQ ID NO: 94181 - DNA, 25 bp, Artificial
  Probe
tgccttcttgaataagtctttcaga

SEQ ID NO: 94182 - DNA, 25 bp, Artificial
  Probe
ttggctatatcaattcagggttgaa

SEQ ID NO: 94183 - DNA, 25 bp, Artificial
  Probe
aagcagccaagactttatgtgtcat

SEQ ID NO: 94184 - DNA, 25 bp, Artificial
  Probe
cttggctatatcaattcagggttga

SEQ ID NO: 94185 - DNA, 25 bp, Artificial
  Probe
gtgctaagggatacagtggaatgtg

SEQ ID NO: 94186 - DNA, 25 bp, Artificial
  Probe
atgccttcttgaataagtctttcag

SEQ ID NO: 94187 - DNA, 25 bp, Artificial
  Probe
tggctatatcaattcagggttgaac

SEQ ID NO: 94188 - DNA, 25 bp, Artificial
  Probe
gccaagactttatgtgtcatcatgg

SEQ ID NO: 94189 - DNA, 25 bp, Artificial
  Probe
gttgctccttccatgattatccttg

SEQ ID NO: 94190 - DNA, 25 bp, Artificial
  Probe
tgtgaactatttagaaagaagccca

SEQ ID NO: 94191 - DNA, 25 bp, Artificial
  Probe
ctgtgaactatttagaaagaagccc

SEQ ID NO: 94192 - DNA, 25 bp, Artificial
  Probe
gtgaactatttagaaagaagcccaa

SEQ ID NO: 94193 - DNA, 25 bp, Artificial
  Probe
ttcccattctatttattcactgagc

SEQ ID NO: 94194 - DNA, 25 bp, Artificial
  Probe
tgacatcttcatcaactgcatagaa

SEQ ID NO: 94195 - DNA, 25 bp, Artificial
  Probe
ggttgctccttccatgattatcctt

SEQ ID NO: 94196 - DNA, 25 bp, Artificial
  Probe
tgaactatttagaaagaagcccaat

SEQ ID NO: 94197 - DNA, 25 bp, Artificial
  Probe
tctgtgaactatttagaaagaagcc

SEQ ID NO: 94198 - DNA, 25 bp, Artificial
  Probe
cctcagttcccattctatttattca

SEQ ID NO: 94199 - DNA, 25 bp, Artificial
  Probe
acctcagttcccattctatttattc

SEQ ID NO: 94200 - DNA, 25 bp, Artificial
  Probe
tgatacctcagttcccattctattt

SEQ ID NO: 94201 - DNA, 25 bp, Artificial
  Probe
ttgctccttccatgattatccttgc

SEQ ID NO: 94202 - DNA, 25 bp, Artificial
  Probe
tagaagtaaatcaattcctcttggg

SEQ ID NO: 94203 - DNA, 25 bp, Artificial
  Probe
gatacctcagttcccattctattta

SEQ ID NO: 94204 - DNA, 25 bp, Artificial
  Probe
tgtgttgtttaagctgtttccatag

SEQ ID NO: 94205 - DNA, 25 bp, Artificial
  Probe
ctgtgttgtttaagctgtttccata

SEQ ID NO: 94206 - DNA, 25 bp, Artificial
  Probe
aatctgtgttgtttaagctgtttcc

SEQ ID NO: 94207 - DNA, 25 bp, Artificial
  Probe
agaagtaaatcaattcctcttggga

SEQ ID NO: 94208 - DNA, 25 bp, Artificial
  Probe
ctctgtgaactatttagaaagaagc

SEQ ID NO: 94209 - DNA, 25 bp, Artificial
  Probe
tcccattctatttattcactgagct

SEQ ID NO: 94210 - DNA, 25 bp, Artificial
  Probe
tttaataagctccaagacaaaggtg

SEQ ID NO: 94211 - DNA, 25 bp, Artificial
  Probe
gtgttgtttaagctgtttccatagg

SEQ ID NO: 94212 - DNA, 25 bp, Artificial
  Probe
ctcagttcccattctatttattcac

SEQ ID NO: 94213 - DNA, 25 bp, Artificial
  Probe
aggactttaagggttacttgggttg

SEQ ID NO: 94214 - DNA, 25 bp, Artificial
  Probe
caggactttaagggttacttgggtt

SEQ ID NO: 94215 - DNA, 25 bp, Artificial
  Probe
gttcccattctatttattcactgag

SEQ ID NO: 94216 - DNA, 25 bp, Artificial
  Probe
cccattctatttattcactgagctt

SEQ ID NO: 94217 - DNA, 25 bp, Artificial
  Probe
tctgtgttgtttaagctgtttccat

SEQ ID NO: 94218 - DNA, 25 bp, Artificial
  Probe
atctgtgttgtttaagctgtttcca

SEQ ID NO: 94219 - DNA, 25 bp, Artificial
  Probe
agttcccattctatttattcactga

SEQ ID NO: 94220 - DNA, 25 bp, Artificial
  Probe
tcagttcccattctatttattcact

SEQ ID NO: 94221 - DNA, 25 bp, Artificial
  Probe
tgttgtttaagctgtttccataggg

SEQ ID NO: 94222 - DNA, 25 bp, Artificial
  Probe
gaatggcgtattgtttgtctgcttt

SEQ ID NO: 94223 - DNA, 25 bp, Artificial
  Probe
actgagcttctctgtgaactattta

SEQ ID NO: 94224 - DNA, 25 bp, Artificial
  Probe
tacctcagttcccattctatttatt

SEQ ID NO: 94225 - DNA, 25 bp, Artificial
  Probe
aagcaactgaaacttcgatcctaag

SEQ ID NO: 94226 - DNA, 25 bp, Artificial
  Probe
taatctgtgttgtttaagctgtttc

SEQ ID NO: 94227 - DNA, 25 bp, Artificial
  Probe
tgagcttctctgtgaactatttaga

SEQ ID NO: 94228 - DNA, 25 bp, Artificial
  Probe
ttaataagctccaagacaaaggtgt

SEQ ID NO: 94229 - DNA, 25 bp, Artificial
  Probe
ttcatcaactgcatagaagcctacg

SEQ ID NO: 94230 - DNA, 25 bp, Artificial
  Probe
ctgagcttctctgtgaactatttag

SEQ ID NO: 94231 - DNA, 25 bp, Artificial
  Probe
gaaagctgtgaccagtttgttattt

SEQ ID NO: 94232 - DNA, 25 bp, Artificial
  Probe
atacctcagttcccattctatttat

SEQ ID NO: 94233 - DNA, 25 bp, Artificial
  Probe
aaagctgtgaccagtttgttattta

SEQ ID NO: 94234 - DNA, 25 bp, Artificial
  Probe
ctgggagtgtttgttgaatgaataa

SEQ ID NO: 94235 - DNA, 25 bp, Artificial
  Probe
tctgggagtgtttgttgaatgaata

SEQ ID NO: 94236 - DNA, 25 bp, Artificial
  Probe
tgggagtgtttgttgaatgaataaa

SEQ ID NO: 94237 - DNA, 25 bp, Artificial
  Probe
gagattcagatcctcaaggctctac

SEQ ID NO: 94238 - DNA, 25 bp, Artificial
  Probe
gattcagatcctcaaggctctacac

SEQ ID NO: 94239 - DNA, 25 bp, Artificial
  Probe
ttctgggagtgtttgttgaatgaat

SEQ ID NO: 94240 - DNA, 25 bp, Artificial
  Probe
agattcagatcctcaaggctctaca

SEQ ID NO: 94241 - DNA, 25 bp, Artificial
  Probe
gggagtgtttgttgaatgaataaat

SEQ ID NO: 94242 - DNA, 25 bp, Artificial
  Probe
attcagatcctcaaggctctacact

SEQ ID NO: 94243 - DNA, 25 bp, Artificial
  Probe
caaggctctacactgtgacttcatc

SEQ ID NO: 94244 - DNA, 25 bp, Artificial
  Probe
gttctgggagtgtttgttgaatgaa

SEQ ID NO: 94245 - DNA, 25 bp, Artificial
  Probe
attacctctggaaatgctttactag

SEQ ID NO: 94246 - DNA, 25 bp, Artificial
  Probe
agtccctatctgacaacatcttctc

SEQ ID NO: 94247 - DNA, 25 bp, Artificial
  Probe
gagtccctatctgacaacatcttct

SEQ ID NO: 94248 - DNA, 25 bp, Artificial
  Probe
ggagtgtttgttgaatgaataaatg

SEQ ID NO: 94249 - DNA, 25 bp, Artificial
  Probe
tgagtccctatctgacaacatcttc

SEQ ID NO: 94250 - DNA, 25 bp, Artificial
  Probe
ctgagtccctatctgacaacatctt

SEQ ID NO: 94251 - DNA, 25 bp, Artificial
  Probe
tcaaggctctacactgtgacttcat

SEQ ID NO: 94252 - DNA, 25 bp, Artificial
  Probe
gaggagagacaccttaagtacatct

SEQ ID NO: 94253 - DNA, 25 bp, Artificial
  Probe
gtccctatctgacaacatcttctcc

SEQ ID NO: 94254 - DNA, 25 bp, Artificial
  Probe
tcattacctctggaaatgctttact

SEQ ID NO: 94255 - DNA, 25 bp, Artificial
  Probe
gtcattacctctggaaatgctttac

SEQ ID NO: 94256 - DNA, 25 bp, Artificial
  Probe
tgtcattacctctggaaatgcttta

SEQ ID NO: 94257 - DNA, 25 bp, Artificial
  Probe
tccctatctgacaacatcttctccc

SEQ ID NO: 94258 - DNA, 25 bp, Artificial
  Probe
cgaggagagacaccttaagtacatc

SEQ ID NO: 94259 - DNA, 25 bp, Artificial
  Probe
cttcgaggagagacaccttaagtac

SEQ ID NO: 94260 - DNA, 25 bp, Artificial
  Probe
tcttcgaggagagacaccttaagta

SEQ ID NO: 94261 - DNA, 25 bp, Artificial
  Probe
ctcaaggctctacactgtgacttca

SEQ ID NO: 94262 - DNA, 25 bp, Artificial
  Probe
ttcagatcctcaaggctctacactg

SEQ ID NO: 94263 - DNA, 25 bp, Artificial
  Probe
ttacctctggaaatgctttactagc

SEQ ID NO: 94264 - DNA, 25 bp, Artificial
  Probe
gaaagattgggttctgggagtgttt

SEQ ID NO: 94265 - DNA, 25 bp, Artificial
  Probe
cattacctctggaaatgctttacta

SEQ ID NO: 94266 - DNA, 25 bp, Artificial
  Probe
tcgaggagagacaccttaagtacat

SEQ ID NO: 94267 - DNA, 25 bp, Artificial
  Probe
catcttcgaggagagacaccttaag

SEQ ID NO: 94268 - DNA, 25 bp, Artificial
  Probe
gaatggggatgttaaataagtgacc

SEQ ID NO: 94269 - DNA, 25 bp, Artificial
  Probe
agagattcagatcctcaaggctcta

SEQ ID NO: 94270 - DNA, 25 bp, Artificial
  Probe
gagtgtttgttgaatgaataaatga

SEQ ID NO: 94271 - DNA, 25 bp, Artificial
  Probe
ggttctgggagtgtttgttgaatga

SEQ ID NO: 94272 - DNA, 25 bp, Artificial
  Probe
ttcgaggagagacaccttaagtaca

SEQ ID NO: 94273 - DNA, 25 bp, Artificial
  Probe
atcttcgaggagagacaccttaagt

SEQ ID NO: 94274 - DNA, 25 bp, Artificial
  Probe
aaagattgggttctgggagtgtttg

SEQ ID NO: 94275 - DNA, 25 bp, Artificial
  Probe
atggtctcctgaaagattgggttct

SEQ ID NO: 94276 - DNA, 25 bp, Artificial
  Probe
aaggctctacactgtgacttcatcg

SEQ ID NO: 94277 - DNA, 25 bp, Artificial
  Probe
agaatggggatgttaaataagtgac

SEQ ID NO: 94278 - DNA, 25 bp, Artificial
  Probe
cagaatggggatgttaaataagtga

SEQ ID NO: 94279 - DNA, 25 bp, Artificial
  Probe
cattgctaagtatatgccgacagag

SEQ ID NO: 94280 - DNA, 25 bp, Artificial
  Probe
tcattgctaagtatatgccgacaga

SEQ ID NO: 94281 - DNA, 25 bp, Artificial
  Probe
attgctaagtatatgccgacagagg

SEQ ID NO: 94282 - DNA, 25 bp, Artificial
  Probe
aagaactatgctccgaataggattg

SEQ ID NO: 94283 - DNA, 25 bp, Artificial
  Probe
caagaactatgctccgaataggatt

SEQ ID NO: 94284 - DNA, 25 bp, Artificial
  Probe
gtcattgctaagtatatgccgacag

SEQ ID NO: 94285 - DNA, 25 bp, Artificial
  Probe
ctgtcattgctaagtatatgccgac

SEQ ID NO: 94286 - DNA, 25 bp, Artificial
  Probe
cctgtcattgctaagtatatgccga

SEQ ID NO: 94287 - DNA, 25 bp, Artificial
  Probe
gaactatgctccgaataggattgtg

SEQ ID NO: 94288 - DNA, 25 bp, Artificial
  Probe
agaactatgctccgaataggattgt

SEQ ID NO: 94289 - DNA, 25 bp, Artificial
  Probe
tatttcttccagcattctttgacac

SEQ ID NO: 94290 - DNA, 25 bp, Artificial
  Probe
agtctcttatttcttccagcattct

SEQ ID NO: 94291 - DNA, 25 bp, Artificial
  Probe
ttatttcttccagcattctttgaca

SEQ ID NO: 94292 - DNA, 25 bp, Artificial
  Probe
gtctcttatttcttccagcattctt

SEQ ID NO: 94293 - DNA, 25 bp, Artificial
  Probe
gagtctcttatttcttccagcattc

SEQ ID NO: 94294 - DNA, 25 bp, Artificial
  Probe
aaccaagaactatgctccgaatagg

SEQ ID NO: 94295 - DNA, 25 bp, Artificial
  Probe
aaattaacagagcagattccaaact

SEQ ID NO: 94296 - DNA, 25 bp, Artificial
  Probe
ccaagaactatgctccgaataggat

SEQ ID NO: 94297 - DNA, 25 bp, Artificial
  Probe
cttatttcttccagcattctttgac

SEQ ID NO: 94298 - DNA, 25 bp, Artificial
  Probe
tcttatttcttccagcattctttga

SEQ ID NO: 94299 - DNA, 25 bp, Artificial
  Probe
ctcttatttcttccagcattctttg

SEQ ID NO: 94300 - DNA, 25 bp, Artificial
  Probe
gaaattaacagagcagattccaaac

SEQ ID NO: 94301 - DNA, 25 bp, Artificial
  Probe
tctcttatttcttccagcattcttt

SEQ ID NO: 94302 - DNA, 25 bp, Artificial
  Probe
agaaattaacagagcagattccaaa

SEQ ID NO: 94303 - DNA, 25 bp, Artificial
  Probe
ctatgctccgaataggattgtggaa

SEQ ID NO: 94304 - DNA, 25 bp, Artificial
  Probe
cagtgtgaccaagtttcataacaaa

SEQ ID NO: 94305 - DNA, 25 bp, Artificial
  Probe
aactatgctccgaataggattgtgg

SEQ ID NO: 94306 - DNA, 25 bp, Artificial
  Probe
agtgtgaccaagtttcataacaaat

SEQ ID NO: 94307 - DNA, 25 bp, Artificial
  Probe
agagtctcttatttcttccagcatt

SEQ ID NO: 94308 - DNA, 25 bp, Artificial
  Probe
aattaacagagcagattccaaactg

SEQ ID NO: 94309 - DNA, 25 bp, Artificial
  Probe
aaaccaagaactatgctccgaatag

SEQ ID NO: 94310 - DNA, 25 bp, Artificial
  Probe
attaacagagcagattccaaactga

SEQ ID NO: 94311 - DNA, 25 bp, Artificial
  Probe
ttaacagagcagattccaaactgaa

SEQ ID NO: 94312 - DNA, 25 bp, Artificial
  Probe
tagaaattaacagagcagattccaa

SEQ ID NO: 94313 - DNA, 25 bp, Artificial
  Probe
ttagaaattaacagagcagattcca

SEQ ID NO: 94314 - DNA, 25 bp, Artificial
  Probe
gtgtgaccaagtttcataacaaatt

SEQ ID NO: 94315 - DNA, 25 bp, Artificial
  Probe
atttcttccagcattctttgacacg

SEQ ID NO: 94316 - DNA, 25 bp, Artificial
  Probe
ctccagtgtgaccaagtttcataac

SEQ ID NO: 94317 - DNA, 25 bp, Artificial
  Probe
gactgtatgctcactctaaccacca

SEQ ID NO: 94318 - DNA, 25 bp, Artificial
  Probe
ccagtgtgaccaagtttcataacaa

SEQ ID NO: 94319 - DNA, 25 bp, Artificial
  Probe
cattgtactaagacggacgtagctt

SEQ ID NO: 94320 - DNA, 25 bp, Artificial
  Probe
taacagagcagattccaaactgaat

SEQ ID NO: 94321 - DNA, 25 bp, Artificial
  Probe
gcaaagagattcgagcatgaaataa

SEQ ID NO: 94322 - DNA, 25 bp, Artificial
  Probe
accaagaactatgctccgaatagga

SEQ ID NO: 94323 - DNA, 25 bp, Artificial
  Probe
ctccgaataggattgtggaaattca

SEQ ID NO: 94324 - DNA, 25 bp, Artificial
  Probe
ctgattagaggtaggcattccacat

SEQ ID NO: 94325 - DNA, 25 bp, Artificial
  Probe
tgattagaggtaggcattccacatc

SEQ ID NO: 94326 - DNA, 25 bp, Artificial
  Probe
agcatcctcagtaactactctacac

SEQ ID NO: 94327 - DNA, 25 bp, Artificial
  Probe
gagcatcctcagtaactactctaca

SEQ ID NO: 94328 - DNA, 25 bp, Artificial
  Probe
gattagaggtaggcattccacatcc

SEQ ID NO: 94329 - DNA, 25 bp, Artificial
  Probe
gcatcctcagtaactactctacacc

SEQ ID NO: 94330 - DNA, 25 bp, Artificial
  Probe
ggagcatcctcagtaactactctac

SEQ ID NO: 94331 - DNA, 25 bp, Artificial
  Probe
attagaggtaggcattccacatcca

SEQ ID NO: 94332 - DNA, 25 bp, Artificial
  Probe
tttatgaagaagaccctggagagac

SEQ ID NO: 94333 - DNA, 25 bp, Artificial
  Probe
ctttatgaagaagaccctggagaga

SEQ ID NO: 94334 - DNA, 25 bp, Artificial
  Probe
ctcagagcactaatgaaattgtcag

SEQ ID NO: 94335 - DNA, 25 bp, Artificial
  Probe
cctcagagcactaatgaaattgtca

SEQ ID NO: 94336 - DNA, 25 bp, Artificial
  Probe
ttatgaagaagaccctggagagact

SEQ ID NO: 94337 - DNA, 25 bp, Artificial
  Probe
ttagaggtaggcattccacatccag

SEQ ID NO: 94338 - DNA, 25 bp, Artificial
  Probe
cggagcatcctcagtaactactcta

SEQ ID NO: 94339 - DNA, 25 bp, Artificial
  Probe
tcagagcactaatgaaattgtcagc

SEQ ID NO: 94340 - DNA, 25 bp, Artificial
  Probe
ccctcagagcactaatgaaattgtc

SEQ ID NO: 94341 - DNA, 25 bp, Artificial
  Probe
catcctcagtaactactctacaccc

SEQ ID NO: 94342 - DNA, 25 bp, Artificial
  Probe
tatgaagaagaccctggagagactt

SEQ ID NO: 94343 - DNA, 25 bp, Artificial
  Probe
cctttatgaagaagaccctggagag

SEQ ID NO: 94344 - DNA, 25 bp, Artificial
  Probe
taggcattccacatccagtttagac

SEQ ID NO: 94345 - DNA, 25 bp, Artificial
  Probe
gtaggcattccacatccagtttaga

SEQ ID NO: 94346 - DNA, 25 bp, Artificial
  Probe
agacgttccttaaattacctggttt

SEQ ID NO: 94347 - DNA, 25 bp, Artificial
  Probe
gtgaagacgttccttaaattacctg

SEQ ID NO: 94348 - DNA, 25 bp, Artificial
  Probe
aagacgttccttaaattacctggtt

SEQ ID NO: 94349 - DNA, 25 bp, Artificial
  Probe
atgaagaagaccctggagagacttt

SEQ ID NO: 94350 - DNA, 25 bp, Artificial
  Probe
gaagacgttccttaaattacctggt

SEQ ID NO: 94351 - DNA, 25 bp, Artificial
  Probe
tgaagacgttccttaaattacctgg

SEQ ID NO: 94352 - DNA, 25 bp, Artificial
  Probe
cattccacatccagtttagacaggg

SEQ ID NO: 94353 - DNA, 25 bp, Artificial
  Probe
gctgattagaggtaggcattccaca

SEQ ID NO: 94354 - DNA, 25 bp, Artificial
  Probe
ggtaggcattccacatccagtttag

SEQ ID NO: 94355 - DNA, 25 bp, Artificial
  Probe
aggtaggcattccacatccagttta

SEQ ID NO: 94356 - DNA, 25 bp, Artificial
  Probe
ctcggagcatcctcagtaactactc

SEQ ID NO: 94357 - DNA, 25 bp, Artificial
  Probe
tagaggtaggcattccacatccagt

SEQ ID NO: 94358 - DNA, 25 bp, Artificial
  Probe
gcattccacatccagtttagacagg

SEQ ID NO: 94359 - DNA, 25 bp, Artificial
  Probe
ggcattccacatccagtttagacag

SEQ ID NO: 94360 - DNA, 25 bp, Artificial
  Probe
ggtgaagacgttccttaaattacct

SEQ ID NO: 94361 - DNA, 25 bp, Artificial
  Probe
gaagaagaccctggagagactttgt

SEQ ID NO: 94362 - DNA, 25 bp, Artificial
  Probe
tgaagaagaccctggagagactttg

SEQ ID NO: 94363 - DNA, 25 bp, Artificial
  Probe
gcggtgaagacgttccttaaattac

SEQ ID NO: 94364 - DNA, 25 bp, Artificial
  Probe
tcggagcatcctcagtaactactct

SEQ ID NO: 94365 - DNA, 25 bp, Artificial
  Probe
ggctgattagaggtaggcattccac

SEQ ID NO: 94366 - DNA, 25 bp, Artificial
  Probe
gcctttatgaagaagaccctggaga

SEQ ID NO: 94367 - DNA, 25 bp, Artificial
  Probe
ctcagtaactactctacacccctag

SEQ ID NO: 94368 - DNA, 25 bp, Artificial
  Probe
aggcattccacatccagtttagaca

SEQ ID NO: 94369 - DNA, 25 bp, Artificial
  Probe
aaggagatcattcagaagacttcag

SEQ ID NO: 94370 - DNA, 25 bp, Artificial
  Probe
tcaaggagatcattcagaagacttc

SEQ ID NO: 94371 - DNA, 25 bp, Artificial
  Probe
caaggagatcattcagaagacttca

SEQ ID NO: 94372 - DNA, 25 bp, Artificial
  Probe
atcaaggagatcattcagaagactt

SEQ ID NO: 94373 - DNA, 25 bp, Artificial
  Probe
aggagatcattcagaagacttcagt

SEQ ID NO: 94374 - DNA, 25 bp, Artificial
  Probe
tatcaaggagatcattcagaagact

SEQ ID NO: 94375 - DNA, 25 bp, Artificial
  Probe
ctatcaaggagatcattcagaagac

SEQ ID NO: 94376 - DNA, 25 bp, Artificial
  Probe
cctacctatcaaggagatcattcag

SEQ ID NO: 94377 - DNA, 25 bp, Artificial
  Probe
acctatcaaggagatcattcagaag

SEQ ID NO: 94378 - DNA, 25 bp, Artificial
  Probe
cctatcaaggagatcattcagaaga

SEQ ID NO: 94379 - DNA, 25 bp, Artificial
  Probe
ggagatcattcagaagacttcagtc

SEQ ID NO: 94380 - DNA, 25 bp, Artificial
  Probe
ctacctatcaaggagatcattcaga

SEQ ID NO: 94381 - DNA, 25 bp, Artificial
  Probe
cttgcctcggttcttagtagatcaa

SEQ ID NO: 94382 - DNA, 25 bp, Artificial
  Probe
tactacagacttgcctcggttctta

SEQ ID NO: 94383 - DNA, 25 bp, Artificial
  Probe
tacctatcaaggagatcattcagaa

SEQ ID NO: 94384 - DNA, 25 bp, Artificial
  Probe
cattgcaggcatccagaagttatat

SEQ ID NO: 94385 - DNA, 25 bp, Artificial
  Probe
agacttgcctcggttcttagtagat

SEQ ID NO: 94386 - DNA, 25 bp, Artificial
  Probe
tacagacttgcctcggttcttagta

SEQ ID NO: 94387 - DNA, 25 bp, Artificial
  Probe
attgcaggcatccagaagttatatg

SEQ ID NO: 94388 - DNA, 25 bp, Artificial
  Probe
ttgatggaatgagtctgacaaatct

SEQ ID NO: 94389 - DNA, 25 bp, Artificial
  Probe
ttactcctttcttccttgtactgtg

SEQ ID NO: 94390 - DNA, 25 bp, Artificial
  Probe
cttactcctttcttccttgtactgt

SEQ ID NO: 94391 - DNA, 25 bp, Artificial
  Probe
acttactcctttcttccttgtactg

SEQ ID NO: 94392 - DNA, 25 bp, Artificial
  Probe
cacttactcctttcttccttgtact

SEQ ID NO: 94393 - DNA, 25 bp, Artificial
  Probe
gacttgcctcggttcttagtagatc

SEQ ID NO: 94394 - DNA, 25 bp, Artificial
  Probe
gtaacacgacagacaccagcaataa

SEQ ID NO: 94395 - DNA, 25 bp, Artificial
  Probe
agttctgtgatgtaccctacctatc

SEQ ID NO: 94396 - DNA, 25 bp, Artificial
  Probe
tgatggaatgagtctgacaaatctc

SEQ ID NO: 94397 - DNA, 25 bp, Artificial
  Probe
cacacttactcctttcttccttgta

SEQ ID NO: 94398 - DNA, 25 bp, Artificial
  Probe
ctcggttcttagtagatcaaatcgt

SEQ ID NO: 94399 - DNA, 25 bp, Artificial
  Probe
cagttctgtgatgtaccctacctat

SEQ ID NO: 94400 - DNA, 25 bp, Artificial
  Probe
tcggttcttagtagatcaaatcgtg

SEQ ID NO: 94401 - DNA, 25 bp, Artificial
  Probe
cctcggttcttagtagatcaaatcg

SEQ ID NO: 94402 - DNA, 25 bp, Artificial
  Probe
ctcactaatgccaaacagtcctaag

SEQ ID NO: 94403 - DNA, 25 bp, Artificial
  Probe
gcctcggttcttagtagatcaaatc

SEQ ID NO: 94404 - DNA, 25 bp, Artificial
  Probe
cggttcttagtagatcaaatcgtga

SEQ ID NO: 94405 - DNA, 25 bp, Artificial
  Probe
aattctcactaatgccaaacagtcc

SEQ ID NO: 94406 - DNA, 25 bp, Artificial
  Probe
tctcactaatgccaaacagtcctaa

SEQ ID NO: 94407 - DNA, 25 bp, Artificial
  Probe
ttctcactaatgccaaacagtccta

SEQ ID NO: 94408 - DNA, 25 bp, Artificial
  Probe
acattgcaggcatccagaagttata

SEQ ID NO: 94409 - DNA, 25 bp, Artificial
  Probe
tactcctttcttccttgtactgtgg

SEQ ID NO: 94410 - DNA, 25 bp, Artificial
  Probe
cttcagtcttacaaaggacgacatt

SEQ ID NO: 94411 - DNA, 25 bp, Artificial
  Probe
acacttactcctttcttccttgtac

SEQ ID NO: 94412 - DNA, 25 bp, Artificial
  Probe
acttgcctcggttcttagtagatca

SEQ ID NO: 94413 - DNA, 25 bp, Artificial
  Probe
tgcctcggttcttagtagatcaaat

SEQ ID NO: 94414 - DNA, 25 bp, Artificial
  Probe
aatacagaataaccattgagaggcg

SEQ ID NO: 94415 - DNA, 25 bp, Artificial
  Probe
taatcactatctgccttctggtctt

SEQ ID NO: 94416 - DNA, 25 bp, Artificial
  Probe
ttaatcactatctgccttctggtct

SEQ ID NO: 94417 - DNA, 25 bp, Artificial
  Probe
atacagaataaccattgagaggcga

SEQ ID NO: 94418 - DNA, 25 bp, Artificial
  Probe
gtaatcctgttaagtgttctggctg

SEQ ID NO: 94419 - DNA, 25 bp, Artificial
  Probe
tacagaataaccattgagaggcgaa

SEQ ID NO: 94420 - DNA, 25 bp, Artificial
  Probe
taatcctgttaagtgttctggctgt

SEQ ID NO: 94421 - DNA, 25 bp, Artificial
  Probe
attaatcactatctgccttctggtc

SEQ ID NO: 94422 - DNA, 25 bp, Artificial
  Probe
tattaatcactatctgccttctggt

SEQ ID NO: 94423 - DNA, 25 bp, Artificial
  Probe
aatcctgttaagtgttctggctgtt

SEQ ID NO: 94424 - DNA, 25 bp, Artificial
  Probe
aaatcaccaagaagaaagcaacatt

SEQ ID NO: 94425 - DNA, 25 bp, Artificial
  Probe
ttattaatcactatctgccttctgg

SEQ ID NO: 94426 - DNA, 25 bp, Artificial
  Probe
gaaatcaccaagaagaaagcaacat

SEQ ID NO: 94427 - DNA, 25 bp, Artificial
  Probe
cgtaatcctgttaagtgttctggct

SEQ ID NO: 94428 - DNA, 25 bp, Artificial
  Probe
gagtctccatatcttgattgctttg

SEQ ID NO: 94429 - DNA, 25 bp, Artificial
  Probe
aaatacagaataaccattgagaggc

SEQ ID NO: 94430 - DNA, 25 bp, Artificial
  Probe
ttgtctgcttgagattccttaaaga

SEQ ID NO: 94431 - DNA, 25 bp, Artificial
  Probe
gtctgcttgagattccttaaagaga

SEQ ID NO: 94432 - DNA, 25 bp, Artificial
  Probe
agaataaccattgagaggcgaaatc

SEQ ID NO: 94433 - DNA, 25 bp, Artificial
  Probe
tctgcttgagattccttaaagagat

SEQ ID NO: 94434 - DNA, 25 bp, Artificial
  Probe
tgtctgcttgagattccttaaagag

SEQ ID NO: 94435 - DNA, 25 bp, Artificial
  Probe
tttgtctgcttgagattccttaaag

SEQ ID NO: 94436 - DNA, 25 bp, Artificial
  Probe
ctttgtctgcttgagattccttaaa

SEQ ID NO: 94437 - DNA, 25 bp, Artificial
  Probe
aacgtaatcctgttaagtgttctgg

SEQ ID NO: 94438 - DNA, 25 bp, Artificial
  Probe
cagaataaccattgagaggcgaaat

SEQ ID NO: 94439 - DNA, 25 bp, Artificial
  Probe
gaagaaagcaacattgggaaacatc

SEQ ID NO: 94440 - DNA, 25 bp, Artificial
  Probe
aatcaccaagaagaaagcaacattg

SEQ ID NO: 94441 - DNA, 25 bp, Artificial
  Probe
atcctgttaagtgttctggctgttg

SEQ ID NO: 94442 - DNA, 25 bp, Artificial
  Probe
aatcactatctgccttctggtcttt

SEQ ID NO: 94443 - DNA, 25 bp, Artificial
  Probe
agaagaaagcaacattgggaaacat

SEQ ID NO: 94444 - DNA, 25 bp, Artificial
  Probe
tatctgccttctggtctttcatctc

SEQ ID NO: 94445 - DNA, 25 bp, Artificial
  Probe
ctatctgccttctggtctttcatct

SEQ ID NO: 94446 - DNA, 25 bp, Artificial
  Probe
gctttgtctgcttgagattccttaa

SEQ ID NO: 94447 - DNA, 25 bp, Artificial
  Probe
aagaagaaagcaacattgggaaaca

SEQ ID NO: 94448 - DNA, 25 bp, Artificial
  Probe
caagaagaaagcaacattgggaaac

SEQ ID NO: 94449 - DNA, 25 bp, Artificial
  Probe
gaataaccattgagaggcgaaatca

SEQ ID NO: 94450 - DNA, 25 bp, Artificial
  Probe
actatctgccttctggtctttcatc

SEQ ID NO: 94451 - DNA, 25 bp, Artificial
  Probe
atcactatctgccttctggtctttc

SEQ ID NO: 94452 - DNA, 25 bp, Artificial
  Probe
gcttgagattccttaaagagatagt

SEQ ID NO: 94453 - DNA, 25 bp, Artificial
  Probe
tgcttgagattccttaaagagatag

SEQ ID NO: 94454 - DNA, 25 bp, Artificial
  Probe
ctgcttgagattccttaaagagata

SEQ ID NO: 94455 - DNA, 25 bp, Artificial
  Probe
aataaccattgagaggcgaaatcac

SEQ ID NO: 94456 - DNA, 25 bp, Artificial
  Probe
cactatctgccttctggtctttcat

SEQ ID NO: 94457 - DNA, 25 bp, Artificial
  Probe
tcaggaagaaatacagaataaccat

SEQ ID NO: 94458 - DNA, 25 bp, Artificial
  Probe
ttcaggaagaaatacagaataacca

SEQ ID NO: 94459 - DNA, 25 bp, Artificial
  Probe
gatctacatgctcttcacaggtcac

SEQ ID NO: 94460 - DNA, 25 bp, Artificial
  Probe
gatctggcagaatctgagactcaag

SEQ ID NO: 94461 - DNA, 25 bp, Artificial
  Probe
atctggcagaatctgagactcaaga

SEQ ID NO: 94462 - DNA, 25 bp, Artificial
  Probe
ggatctacatgctcttcacaggtca

SEQ ID NO: 94463 - DNA, 25 bp, Artificial
  Probe
tggatctacatgctcttcacaggtc

SEQ ID NO: 94464 - DNA, 25 bp, Artificial
  Probe
gtgtcagcaagaagagcaactcatc

SEQ ID NO: 94465 - DNA, 25 bp, Artificial
  Probe
atctacatgctcttcacaggtcacc

SEQ ID NO: 94466 - DNA, 25 bp, Artificial
  Probe
tcagtagtgtcaagcttatctccaa

SEQ ID NO: 94467 - DNA, 25 bp, Artificial
  Probe
cagtagtgtcaagcttatctccaag

SEQ ID NO: 94468 - DNA, 25 bp, Artificial
  Probe
tctggcagaatctgagactcaagac

SEQ ID NO: 94469 - DNA, 25 bp, Artificial
  Probe
aagaagagcaactcatccacctttg

SEQ ID NO: 94470 - DNA, 25 bp, Artificial
  Probe
caagaagagcaactcatccaccttt

SEQ ID NO: 94471 - DNA, 25 bp, Artificial
  Probe
gtcagtagtgtcaagcttatctcca

SEQ ID NO: 94472 - DNA, 25 bp, Artificial
  Probe
agtagtgtcaagcttatctccaagg

SEQ ID NO: 94473 - DNA, 25 bp, Artificial
  Probe
agtgtcagcaagaagagcaactcat

SEQ ID NO: 94474 - DNA, 25 bp, Artificial
  Probe
cttcatcatcgtactggccttcatc

SEQ ID NO: 94475 - DNA, 25 bp, Artificial
  Probe
gtggatctacatgctcttcacaggt

SEQ ID NO: 94476 - DNA, 25 bp, Artificial
  Probe
ggtcagtagtgtcaagcttatctcc

SEQ ID NO: 94477 - DNA, 25 bp, Artificial
  Probe
cttcaagatctggcagaatctgaga

SEQ ID NO: 94478 - DNA, 25 bp, Artificial
  Probe
atcagcttcaagatctggcagaatc

SEQ ID NO: 94479 - DNA, 25 bp, Artificial
  Probe
gaagagcaactcatccacctttgtc

SEQ ID NO: 94480 - DNA, 25 bp, Artificial
  Probe
ttcaagatctggcagaatctgagac

SEQ ID NO: 94481 - DNA, 25 bp, Artificial
  Probe
catcagcttcaagatctggcagaat

SEQ ID NO: 94482 - DNA, 25 bp, Artificial
  Probe
tcagcaagaagagcaactcatccac

SEQ ID NO: 94483 - DNA, 25 bp, Artificial
  Probe
gtcagcaagaagagcaactcatcca

SEQ ID NO: 94484 - DNA, 25 bp, Artificial
  Probe
tgtcagcaagaagagcaactcatcc

SEQ ID NO: 94485 - DNA, 25 bp, Artificial
  Probe
caagatctggcagaatctgagactc

SEQ ID NO: 94486 - DNA, 25 bp, Artificial
  Probe
agaagagcaactcatccacctttgt

SEQ ID NO: 94487 - DNA, 25 bp, Artificial
  Probe
gtagtgtcaagcttatctccaaggc

SEQ ID NO: 94488 - DNA, 25 bp, Artificial
  Probe
agatctggcagaatctgagactcaa

SEQ ID NO: 94489 - DNA, 25 bp, Artificial
  Probe
aagatctggcagaatctgagactca

SEQ ID NO: 94490 - DNA, 25 bp, Artificial
  Probe
tcaagatctggcagaatctgagact

SEQ ID NO: 94491 - DNA, 25 bp, Artificial
  Probe
ctacatgctcttcacaggtcacctc

SEQ ID NO: 94492 - DNA, 25 bp, Artificial
  Probe
cagaatctgagactcaagacggcag

SEQ ID NO: 94493 - DNA, 25 bp, Artificial
  Probe
ctggcagaatctgagactcaagacg

SEQ ID NO: 94494 - DNA, 25 bp, Artificial
  Probe
ctttcttcttcgtgcagatgtggag

SEQ ID NO: 94495 - DNA, 25 bp, Artificial
  Probe
cgtggatctacatgctcttcacagg

SEQ ID NO: 94496 - DNA, 25 bp, Artificial
  Probe
ccgtggatctacatgctcttcacag

SEQ ID NO: 94497 - DNA, 25 bp, Artificial
  Probe
gcttcaagatctggcagaatctgag

SEQ ID NO: 94498 - DNA, 25 bp, Artificial
  Probe
gggtcagtagtgtcaagcttatctc

SEQ ID NO: 94499 - DNA, 25 bp, Artificial
  Probe
ccttcatcatcgtactggccttcat

SEQ ID NO: 94500 - DNA, 25 bp, Artificial
  Probe
tcatcagcttcaagatctggcagaa

SEQ ID NO: 94501 - DNA, 25 bp, Artificial
  Probe
cagcttcaagatctggcagaatctg

SEQ ID NO: 94502 - DNA, 25 bp, Artificial
  Probe
tacatgctcttcacaggtcacctct

SEQ ID NO: 94503 - DNA, 25 bp, Artificial
  Probe
tctacatgctcttcacaggtcacct

SEQ ID NO: 94504 - DNA, 25 bp, Artificial
  Probe
cgtaaccttcagtggattatcagag

SEQ ID NO: 94505 - DNA, 25 bp, Artificial
  Probe
agcactgagatgaacactgtattaa

SEQ ID NO: 94506 - DNA, 25 bp, Artificial
  Probe
gcactgagatgaacactgtattaag

SEQ ID NO: 94507 - DNA, 25 bp, Artificial
  Probe
atagcactgagatgaacactgtatt

SEQ ID NO: 94508 - DNA, 25 bp, Artificial
  Probe
tagcactgagatgaacactgtatta

SEQ ID NO: 94509 - DNA, 25 bp, Artificial
  Probe
catagcactgagatgaacactgtat

SEQ ID NO: 94510 - DNA, 25 bp, Artificial
  Probe
aacttgatggatggaatcttcactt

SEQ ID NO: 94511 - DNA, 25 bp, Artificial
  Probe
acttgatggatggaatcttcacttc

SEQ ID NO: 94512 - DNA, 25 bp, Artificial
  Probe
cttcagtggattatcagaggaacct

SEQ ID NO: 94513 - DNA, 25 bp, Artificial
  Probe
ccacctgaactacagattaccttaa

SEQ ID NO: 94514 - DNA, 25 bp, Artificial
  Probe
cactgagatgaacactgtattaagt

SEQ ID NO: 94515 - DNA, 25 bp, Artificial
  Probe
accacctgaactacagattacctta

SEQ ID NO: 94516 - DNA, 25 bp, Artificial
  Probe
aggaatcatctggcacgctattatt

SEQ ID NO: 94517 - DNA, 25 bp, Artificial
  Probe
taaccttcagtggattatcagagga

SEQ ID NO: 94518 - DNA, 25 bp, Artificial
  Probe
gtaaccttcagtggattatcagagg

SEQ ID NO: 94519 - DNA, 25 bp, Artificial
  Probe
acatagcactgagatgaacactgta

SEQ ID NO: 94520 - DNA, 25 bp, Artificial
  Probe
gaggaatcatctggcacgctattat

SEQ ID NO: 94521 - DNA, 25 bp, Artificial
  Probe
aaccttcagtggattatcagaggaa

SEQ ID NO: 94522 - DNA, 25 bp, Artificial
  Probe
tataacattcaagaccagcttcagt

SEQ ID NO: 94523 - DNA, 25 bp, Artificial
  Probe
cattcaagaccagcttcagttattc

SEQ ID NO: 94524 - DNA, 25 bp, Artificial
  Probe
attcaagaccagcttcagttattca

SEQ ID NO: 94525 - DNA, 25 bp, Artificial
  Probe
ctataacattcaagaccagcttcag

SEQ ID NO: 94526 - DNA, 25 bp, Artificial
  Probe
taactcttggtcatcaaccttatcc

SEQ ID NO: 94527 - DNA, 25 bp, Artificial
  Probe
actgagatgaacactgtattaagtt

SEQ ID NO: 94528 - DNA, 25 bp, Artificial
  Probe
acattcaagaccagcttcagttatt

SEQ ID NO: 94529 - DNA, 25 bp, Artificial
  Probe
tctataacattcaagaccagcttca

SEQ ID NO: 94530 - DNA, 25 bp, Artificial
  Probe
gaccacctgaactacagattacctt

SEQ ID NO: 94531 - DNA, 25 bp, Artificial
  Probe
aacattcaagaccagcttcagttat

SEQ ID NO: 94532 - DNA, 25 bp, Artificial
  Probe
ataacattcaagaccagcttcagtt

SEQ ID NO: 94533 - DNA, 25 bp, Artificial
  Probe
ttcagtggattatcagaggaacctg

SEQ ID NO: 94534 - DNA, 25 bp, Artificial
  Probe
caagaccagcttcagttattcagaa

SEQ ID NO: 94535 - DNA, 25 bp, Artificial
  Probe
ttcaagaccagcttcagttattcag

SEQ ID NO: 94536 - DNA, 25 bp, Artificial
  Probe
atctggcacgctattattccaataa

SEQ ID NO: 94537 - DNA, 25 bp, Artificial
  Probe
catggagatgtgtctgaataatagt

SEQ ID NO: 94538 - DNA, 25 bp, Artificial
  Probe
cctggtagagctgtgtgtagatatt

SEQ ID NO: 94539 - DNA, 25 bp, Artificial
  Probe
gtttcattcagcattctctttacca

SEQ ID NO: 94540 - DNA, 25 bp, Artificial
  Probe
tgtttcattcagcattctctttacc

SEQ ID NO: 94541 - DNA, 25 bp, Artificial
  Probe
accttcagtggattatcagaggaac

SEQ ID NO: 94542 - DNA, 25 bp, Artificial
  Probe
catctggcacgctattattccaata

SEQ ID NO: 94543 - DNA, 25 bp, Artificial
  Probe
ttcattcagcattctctttaccagt

SEQ ID NO: 94544 - DNA, 25 bp, Artificial
  Probe
tttcattcagcattctctttaccag

SEQ ID NO: 94545 - DNA, 25 bp, Artificial
  Probe
ttctataacattcaagaccagcttc

SEQ ID NO: 94546 - DNA, 25 bp, Artificial
  Probe
aaccaggaaccaagaaggattaaat

SEQ ID NO: 94547 - DNA, 25 bp, Artificial
  Probe
aacatagcactgagatgaacactgt

SEQ ID NO: 94548 - DNA, 25 bp, Artificial
  Probe
aaaccaggaaccaagaaggattaaa

SEQ ID NO: 94549 - DNA, 25 bp, Artificial
  Probe
cttggtgtgcttctcttgaatagga

SEQ ID NO: 94550 - DNA, 25 bp, Artificial
  Probe
ttggtgtgcttctcttgaataggac

SEQ ID NO: 94551 - DNA, 25 bp, Artificial
  Probe
acttggtgtgcttctcttgaatagg

SEQ ID NO: 94552 - DNA, 25 bp, Artificial
  Probe
cacttggtgtgcttctcttgaatag

SEQ ID NO: 94553 - DNA, 25 bp, Artificial
  Probe
catttacaactgctacatcaccaac

SEQ ID NO: 94554 - DNA, 25 bp, Artificial
  Probe
tagaagacgaaggcatttacaactg

SEQ ID NO: 94555 - DNA, 25 bp, Artificial
  Probe
tcacttggtgtgcttctcttgaata

SEQ ID NO: 94556 - DNA, 25 bp, Artificial
  Probe
atttacaactgctacatcaccaacc

SEQ ID NO: 94557 - DNA, 25 bp, Artificial
  Probe
ctagaagacgaaggcatttacaact

SEQ ID NO: 94558 - DNA, 25 bp, Artificial
  Probe
gctagaagacgaaggcatttacaac

SEQ ID NO: 94559 - DNA, 25 bp, Artificial
  Probe
ctcacttggtgtgcttctcttgaat

SEQ ID NO: 94560 - DNA, 25 bp, Artificial
  Probe
gaatgaagatcatcaacctgaagct

SEQ ID NO: 94561 - DNA, 25 bp, Artificial
  Probe
cgaatgaagatcatcaacctgaagc

SEQ ID NO: 94562 - DNA, 25 bp, Artificial
  Probe
aatgaagatcatcaacctgaagctg

SEQ ID NO: 94563 - DNA, 25 bp, Artificial
  Probe
taagtacgacgtgtcagtgactcta

SEQ ID NO: 94564 - DNA, 25 bp, Artificial
  Probe
gaagatcatcaacctgaagctggag

SEQ ID NO: 94565 - DNA, 25 bp, Artificial
  Probe
tttacaactgctacatcaccaaccc

SEQ ID NO: 94566 - DNA, 25 bp, Artificial
  Probe
agctagaagacgaaggcatttacaa

SEQ ID NO: 94567 - DNA, 25 bp, Artificial
  Probe
tctcacttggtgtgcttctcttgaa

SEQ ID NO: 94568 - DNA, 25 bp, Artificial
  Probe
aagtacgacgtgtcagtgactctaa

SEQ ID NO: 94569 - DNA, 25 bp, Artificial
  Probe
tgaagatcatcaacctgaagctgga

SEQ ID NO: 94570 - DNA, 25 bp, Artificial
  Probe
cagctagaagacgaaggcatttaca

SEQ ID NO: 94571 - DNA, 25 bp, Artificial
  Probe
ttacaactgctacatcaccaaccct

SEQ ID NO: 94572 - DNA, 25 bp, Artificial
  Probe
atgaagatcatcaacctgaagctgg

SEQ ID NO: 94573 - DNA, 25 bp, Artificial
  Probe
gaaggcatttacaactgctacatca

SEQ ID NO: 94574 - DNA, 25 bp, Artificial
  Probe
aaggcatttacaactgctacatcac

SEQ ID NO: 94575 - DNA, 25 bp, Artificial
  Probe
tggtgtgcttctcttgaataggacc

SEQ ID NO: 94576 - DNA, 25 bp, Artificial
  Probe
ctctcacttggtgtgcttctcttga

SEQ ID NO: 94577 - DNA, 25 bp, Artificial
  Probe
gcatttacaactgctacatcaccaa

SEQ ID NO: 94578 - DNA, 25 bp, Artificial
  Probe
tacaactgctacatcaccaaccctc

SEQ ID NO: 94579 - DNA, 25 bp, Artificial
  Probe
ctctaaagaacgtgcagctagaaga

SEQ ID NO: 94580 - DNA, 25 bp, Artificial
  Probe
gtaagtacgacgtgtcagtgactct

SEQ ID NO: 94581 - DNA, 25 bp, Artificial
  Probe
agtaagtacgacgtgtcagtgactc

SEQ ID NO: 94582 - DNA, 25 bp, Artificial
  Probe
cgaaggcatttacaactgctacatc

SEQ ID NO: 94583 - DNA, 25 bp, Artificial
  Probe
tctaaagaacgtgcagctagaagac

SEQ ID NO: 94584 - DNA, 25 bp, Artificial
  Probe
actctaaagaacgtgcagctagaag

SEQ ID NO: 94585 - DNA, 25 bp, Artificial
  Probe
gactctaaagaacgtgcagctagaa

SEQ ID NO: 94586 - DNA, 25 bp, Artificial
  Probe
gtgactctaaagaacgtgcagctag

SEQ ID NO: 94587 - DNA, 25 bp, Artificial
  Probe
cagtaagtacgacgtgtcagtgact

SEQ ID NO: 94588 - DNA, 25 bp, Artificial
  Probe
gtacgacgtgtcagtgactctaaag

SEQ ID NO: 94589 - DNA, 25 bp, Artificial
  Probe
aagacgaaggcatttacaactgcta

SEQ ID NO: 94590 - DNA, 25 bp, Artificial
  Probe
tacgacgtgtcagtgactctaaaga

SEQ ID NO: 94591 - DNA, 25 bp, Artificial
  Probe
cttctcttgaataggaccccaggat

SEQ ID NO: 94592 - DNA, 25 bp, Artificial
  Probe
gcagctagaagacgaaggcatttac

SEQ ID NO: 94593 - DNA, 25 bp, Artificial
  Probe
agtacgacgtgtcagtgactctaaa

SEQ ID NO: 94594 - DNA, 25 bp, Artificial
  Probe
ttcttcattgtcaacatcgtcaacc

SEQ ID NO: 94595 - DNA, 25 bp, Artificial
  Probe
ttctttgtggtggtcctatcttatg

SEQ ID NO: 94596 - DNA, 25 bp, Artificial
  Probe
ctatttctttgtggtggtcctatct

SEQ ID NO: 94597 - DNA, 25 bp, Artificial
  Probe
tctatttctttgtggtggtcctatc

SEQ ID NO: 94598 - DNA, 25 bp, Artificial
  Probe
ctctatttctttgtggtggtcctat

SEQ ID NO: 94599 - DNA, 25 bp, Artificial
  Probe
tttctttgtggtggtcctatcttat

SEQ ID NO: 94600 - DNA, 25 bp, Artificial
  Probe
atttctttgtggtggtcctatctta

SEQ ID NO: 94601 - DNA, 25 bp, Artificial
  Probe
tatttctttgtggtggtcctatctt

SEQ ID NO: 94602 - DNA, 25 bp, Artificial
  Probe
cttcattgtcaacatcgtcaacctg

SEQ ID NO: 94603 - DNA, 25 bp, Artificial
  Probe
tcttcattgtcaacatcgtcaacct

SEQ ID NO: 94604 - DNA, 25 bp, Artificial
  Probe
tggtggtcctatcttatgccaatag

SEQ ID NO: 94605 - DNA, 25 bp, Artificial
  Probe
gtcctatcttatgccaatagctgtg

SEQ ID NO: 94606 - DNA, 25 bp, Artificial
  Probe
ctttcttcattgtcaacatcgtcaa

SEQ ID NO: 94607 - DNA, 25 bp, Artificial
  Probe
tttcttcattgtcaacatcgtcaac

SEQ ID NO: 94608 - DNA, 25 bp, Artificial
  Probe
gtggtggtcctatcttatgccaata

SEQ ID NO: 94609 - DNA, 25 bp, Artificial
  Probe
cctctatttctttgtggtggtccta

SEQ ID NO: 94610 - DNA, 25 bp, Artificial
  Probe
tatcttatgccaatagctgtgccaa

SEQ ID NO: 94611 - DNA, 25 bp, Artificial
  Probe
cctttcttcattgtcaacatcgtca

SEQ ID NO: 94612 - DNA, 25 bp, Artificial
  Probe
ggtcctatcttatgccaatagctgt

SEQ ID NO: 94613 - DNA, 25 bp, Artificial
  Probe
tctttgtggtggtcctatcttatgc

SEQ ID NO: 94614 - DNA, 25 bp, Artificial
  Probe
gtagaggatacggtatggaggatgc

SEQ ID NO: 94615 - DNA, 25 bp, Artificial
  Probe
ggtggtcctatcttatgccaatagc

SEQ ID NO: 94616 - DNA, 25 bp, Artificial
  Probe
tcctatcttatgccaatagctgtgc

SEQ ID NO: 94617 - DNA, 25 bp, Artificial
  Probe
tggtcctatcttatgccaatagctg

SEQ ID NO: 94618 - DNA, 25 bp, Artificial
  Probe
gtggtcctatcttatgccaatagct

SEQ ID NO: 94619 - DNA, 25 bp, Artificial
  Probe
ttcattgtcaacatcgtcaacctgg

SEQ ID NO: 94620 - DNA, 25 bp, Artificial
  Probe
ctatcttatgccaatagctgtgcca

SEQ ID NO: 94621 - DNA, 25 bp, Artificial
  Probe
ttgtcttctgggatctgagagtttg

SEQ ID NO: 94622 - DNA, 25 bp, Artificial
  Probe
gttgtcttctgggatctgagagttt

SEQ ID NO: 94623 - DNA, 25 bp, Artificial
  Probe
gcctttcttcattgtcaacatcgtc

SEQ ID NO: 94624 - DNA, 25 bp, Artificial
  Probe
ctgcctttcttcattgtcaacatcg

SEQ ID NO: 94625 - DNA, 25 bp, Artificial
  Probe
ctttgtggtggtcctatcttatgcc

SEQ ID NO: 94626 - DNA, 25 bp, Artificial
  Probe
gctgcctttcttcattgtcaacatc

SEQ ID NO: 94627 - DNA, 25 bp, Artificial
  Probe
atcttatgccaatagctgtgccaac

SEQ ID NO: 94628 - DNA, 25 bp, Artificial
  Probe
tgtggtggtcctatcttatgccaat

SEQ ID NO: 94629 - DNA, 25 bp, Artificial
  Probe
cctatcttatgccaatagctgtgcc

SEQ ID NO: 94630 - DNA, 25 bp, Artificial
  Probe
ttgtggtggtcctatcttatgccaa

SEQ ID NO: 94631 - DNA, 25 bp, Artificial
  Probe
tgcctttcttcattgtcaacatcgt

SEQ ID NO: 94632 - DNA, 25 bp, Artificial
  Probe
tgttgtcttctgggatctgagagtt

SEQ ID NO: 94633 - DNA, 25 bp, Artificial
  Probe
tagaggatacggtatggaggatgcg

SEQ ID NO: 94634 - DNA, 25 bp, Artificial
  Probe
gtgttgtcttctgggatctgagagt

SEQ ID NO: 94635 - DNA, 25 bp, Artificial
  Probe
gcctctatttctttgtggtggtcct

SEQ ID NO: 94636 - DNA, 25 bp, Artificial
  Probe
ttctgggatctgagagtttgctgag

SEQ ID NO: 94637 - DNA, 25 bp, Artificial
  Probe
cttctgggatctgagagtttgctga

SEQ ID NO: 94638 - DNA, 25 bp, Artificial
  Probe
tcttctgggatctgagagtttgctg

SEQ ID NO: 94639 - DNA, 25 bp, Artificial
  Probe
gggcgggtttatgttatgtatttac

SEQ ID NO: 94640 - DNA, 25 bp, Artificial
  Probe
tgggcgggtttatgttatgtattta

SEQ ID NO: 94641 - DNA, 25 bp, Artificial
  Probe
ctgggcgggtttatgttatgtattt

SEQ ID NO: 94642 - DNA, 25 bp, Artificial
  Probe
cataggcagattccaggagtcaatg

SEQ ID NO: 94643 - DNA, 25 bp, Artificial
  Probe
tctgggcgggtttatgttatgtatt

SEQ ID NO: 94644 - DNA, 25 bp, Artificial
  Probe
tatagagagagggaggatgttgagc

SEQ ID NO: 94645 - DNA, 25 bp, Artificial
  Probe
ggcgggtttatgttatgtatttacc

SEQ ID NO: 94646 - DNA, 25 bp, Artificial
  Probe
gcataggcagattccaggagtcaat

SEQ ID NO: 94647 - DNA, 25 bp, Artificial
  Probe
ataggcagattccaggagtcaatgg

SEQ ID NO: 94648 - DNA, 25 bp, Artificial
  Probe
atagagagagggaggatgttgagca

SEQ ID NO: 94649 - DNA, 25 bp, Artificial
  Probe
ggtttatgttatgtatttacccact

SEQ ID NO: 94650 - DNA, 25 bp, Artificial
  Probe
tagagagagggaggatgttgagcag

SEQ ID NO: 94651 - DNA, 25 bp, Artificial
  Probe
cacatggtctgtaaggacaaggcat

SEQ ID NO: 94652 - DNA, 25 bp, Artificial
  Probe
ggtcacatggtctgtaaggacaagg

SEQ ID NO: 94653 - DNA, 25 bp, Artificial
  Probe
catttcaagaagaggccaaagcaag

SEQ ID NO: 94654 - DNA, 25 bp, Artificial
  Probe
tgttatgtatttacccactacaatt

SEQ ID NO: 94655 - DNA, 25 bp, Artificial
  Probe
tcatttcaagaagaggccaaagcaa

SEQ ID NO: 94656 - DNA, 25 bp, Artificial
  Probe
gtctgtaaggacaaggcatggtcag

SEQ ID NO: 94657 - DNA, 25 bp, Artificial
  Probe
atgttatgtatttacccactacaat

SEQ ID NO: 94658 - DNA, 25 bp, Artificial
  Probe
ttctggctggtgagatggacaaatg

SEQ ID NO: 94659 - DNA, 25 bp, Artificial
  Probe
gttctggctggtgagatggacaaat

SEQ ID NO: 94660 - DNA, 25 bp, Artificial
  Probe
ttgctcatttcaagaagaggccaaa

SEQ ID NO: 94661 - DNA, 25 bp, Artificial
  Probe
atttcaagaagaggccaaagcaagg

SEQ ID NO: 94662 - DNA, 25 bp, Artificial
  Probe
ctcatttcaagaagaggccaaagca

SEQ ID NO: 94663 - DNA, 25 bp, Artificial
  Probe
tgctcatttcaagaagaggccaaag

SEQ ID NO: 94664 - DNA, 25 bp, Artificial
  Probe
gggtcacatggtctgtaaggacaag

SEQ ID NO: 94665 - DNA, 25 bp, Artificial
  Probe
tatgttatgtatttacccactacaa

SEQ ID NO: 94666 - DNA, 25 bp, Artificial
  Probe
ttatgttatgtatttacccactaca

SEQ ID NO: 94667 - DNA, 25 bp, Artificial
  Probe
gttatgtatttacccactacaattt

SEQ ID NO: 94668 - DNA, 25 bp, Artificial
  Probe
acatggtctgtaaggacaaggcatg

SEQ ID NO: 94669 - DNA, 25 bp, Artificial
  Probe
tttcaagaagaggccaaagcaagga

SEQ ID NO: 94670 - DNA, 25 bp, Artificial
  Probe
aggacagagttccttagacgaggac

SEQ ID NO: 94671 - DNA, 25 bp, Artificial
  Probe
cttgctcatttcaagaagaggccaa

SEQ ID NO: 94672 - DNA, 25 bp, Artificial
  Probe
caaatgagctccaaccaaggcatag

SEQ ID NO: 94673 - DNA, 25 bp, Artificial
  Probe
gctcatttcaagaagaggccaaagc

SEQ ID NO: 94674 - DNA, 25 bp, Artificial
  Probe
acaaatgagctccaaccaaggcata

SEQ ID NO: 94675 - DNA, 25 bp, Artificial
  Probe
aaatgagctccaaccaaggcatagg

SEQ ID NO: 94676 - DNA, 25 bp, Artificial
  Probe
gtgagatggacaaatgagctccaac

SEQ ID NO: 94677 - DNA, 25 bp, Artificial
  Probe
gatggacaaatgagctccaaccaag

SEQ ID NO: 94678 - DNA, 25 bp, Artificial
  Probe
agatggacaaatgagctccaaccaa

SEQ ID NO: 94679 - DNA, 25 bp, Artificial
  Probe
gagatggacaaatgagctccaacca

SEQ ID NO: 94680 - DNA, 25 bp, Artificial
  Probe
tgagatggacaaatgagctccaacc

SEQ ID NO: 94681 - DNA, 25 bp, Artificial
  Probe
ggtgagatggacaaatgagctccaa

SEQ ID NO: 94682 - DNA, 25 bp, Artificial
  Probe
aactacacacaggatctccatgatg

SEQ ID NO: 94683 - DNA, 25 bp, Artificial
  Probe
taacatctacccatcagtgaactac

SEQ ID NO: 94684 - DNA, 25 bp, Artificial
  Probe
ctctaacatctacccatcagtgaac

SEQ ID NO: 94685 - DNA, 25 bp, Artificial
  Probe
ctaacatctacccatcagtgaacta

SEQ ID NO: 94686 - DNA, 25 bp, Artificial
  Probe
tctaacatctacccatcagtgaact

SEQ ID NO: 94687 - DNA, 25 bp, Artificial
  Probe
aaattggctcactctaacatctacc

SEQ ID NO: 94688 - DNA, 25 bp, Artificial
  Probe
agtgaactactggagtacatgaagc

SEQ ID NO: 94689 - DNA, 25 bp, Artificial
  Probe
gtgaactactggagtacatgaagca

SEQ ID NO: 94690 - DNA, 25 bp, Artificial
  Probe
actctaacatctacccatcagtgaa

SEQ ID NO: 94691 - DNA, 25 bp, Artificial
  Probe
tgaactactggagtacatgaagcag

SEQ ID NO: 94692 - DNA, 25 bp, Artificial
  Probe
aacatctacccatcagtgaactact

SEQ ID NO: 94693 - DNA, 25 bp, Artificial
  Probe
taaattggctcactctaacatctac

SEQ ID NO: 94694 - DNA, 25 bp, Artificial
  Probe
ctcactctaacatctacccatcagt

SEQ ID NO: 94695 - DNA, 25 bp, Artificial
  Probe
aattggctcactctaacatctaccc

SEQ ID NO: 94696 - DNA, 25 bp, Artificial
  Probe
cttataccagaacaaggactcgctg

SEQ ID NO: 94697 - DNA, 25 bp, Artificial
  Probe
gctcactctaacatctacccatcag

SEQ ID NO: 94698 - DNA, 25 bp, Artificial
  Probe
gggtgtaaagttcacaaagaatcaa

SEQ ID NO: 94699 - DNA, 25 bp, Artificial
  Probe
cagggtgtaaagttcacaaagaatc

SEQ ID NO: 94700 - DNA, 25 bp, Artificial
  Probe
agggtgtaaagttcacaaagaatca

SEQ ID NO: 94701 - DNA, 25 bp, Artificial
  Probe
acagggtgtaaagttcacaaagaat

SEQ ID NO: 94702 - DNA, 25 bp, Artificial
  Probe
aaactacacacaggatctccatgat

SEQ ID NO: 94703 - DNA, 25 bp, Artificial
  Probe
gaactactggagtacatgaagcagg

SEQ ID NO: 94704 - DNA, 25 bp, Artificial
  Probe
gctttaaattggctcactctaacat

SEQ ID NO: 94705 - DNA, 25 bp, Artificial
  Probe
ttaaattggctcactctaacatcta

SEQ ID NO: 94706 - DNA, 25 bp, Artificial
  Probe
atgatgcacgacaacaacaggatat

SEQ ID NO: 94707 - DNA, 25 bp, Artificial
  Probe
ggctttaaattggctcactctaaca

SEQ ID NO: 94708 - DNA, 25 bp, Artificial
  Probe
ggtgtaaagttcacaaagaatcaat

SEQ ID NO: 94709 - DNA, 25 bp, Artificial
  Probe
tttaaattggctcactctaacatct

SEQ ID NO: 94710 - DNA, 25 bp, Artificial
  Probe
tacagggtgtaaagttcacaaagaa

SEQ ID NO: 94711 - DNA, 25 bp, Artificial
  Probe
ggtatactggacactacagcatctg

SEQ ID NO: 94712 - DNA, 25 bp, Artificial
  Probe
ctttaaattggctcactctaacatc

SEQ ID NO: 94713 - DNA, 25 bp, Artificial
  Probe
gggctttaaattggctcactctaac

SEQ ID NO: 94714 - DNA, 25 bp, Artificial
  Probe
agggctttaaattggctcactctaa

SEQ ID NO: 94715 - DNA, 25 bp, Artificial
  Probe
gtacagggtgtaaagttcacaaaga

SEQ ID NO: 94716 - DNA, 25 bp, Artificial
  Probe
ggctcactctaacatctacccatca

SEQ ID NO: 94717 - DNA, 25 bp, Artificial
  Probe
gatggatatgaggggaaaagatgag

SEQ ID NO: 94718 - DNA, 25 bp, Artificial
  Probe
gtatactggacactacagcatctgc

SEQ ID NO: 94719 - DNA, 25 bp, Artificial
  Probe
aaagaagtgtggacaaaagggtata

SEQ ID NO: 94720 - DNA, 25 bp, Artificial
  Probe
gcttataccagaacaaggactcgct

SEQ ID NO: 94721 - DNA, 25 bp, Artificial
  Probe
atggatatgaggggaaaagatgagt

SEQ ID NO: 94722 - DNA, 25 bp, Artificial
  Probe
tatactggacactacagcatctgca

SEQ ID NO: 94723 - DNA, 25 bp, Artificial
  Probe
aaaagaagtgtggacaaaagggtat

SEQ ID NO: 94724 - DNA, 25 bp, Artificial
  Probe
ggtacagggtgtaaagttcacaaag

SEQ ID NO: 94725 - DNA, 25 bp, Artificial
  Probe
tgatgcacgacaacaacaggatatc

SEQ ID NO: 94726 - DNA, 25 bp, Artificial
  Probe
actacacacaggatctccatgatgc

SEQ ID NO: 94727 - DNA, 25 bp, Artificial
  Probe
cttggactgactgttgtaacttcat

SEQ ID NO: 94728 - DNA, 25 bp, Artificial
  Probe
tgttgtaacttcatgcttcttagga

SEQ ID NO: 94729 - DNA, 25 bp, Artificial
  Probe
ctgttgtaacttcatgcttcttagg

SEQ ID NO: 94730 - DNA, 25 bp, Artificial
  Probe
actgttgtaacttcatgcttcttag

SEQ ID NO: 94731 - DNA, 25 bp, Artificial
  Probe
gactgttgtaacttcatgcttctta

SEQ ID NO: 94732 - DNA, 25 bp, Artificial
  Probe
gttgtaacttcatgcttcttaggaa

SEQ ID NO: 94733 - DNA, 25 bp, Artificial
  Probe
tgactgttgtaacttcatgcttctt

SEQ ID NO: 94734 - DNA, 25 bp, Artificial
  Probe
ctgactgttgtaacttcatgcttct

SEQ ID NO: 94735 - DNA, 25 bp, Artificial
  Probe
ttggactgactgttgtaacttcatg

SEQ ID NO: 94736 - DNA, 25 bp, Artificial
  Probe
actgactgttgtaacttcatgcttc

SEQ ID NO: 94737 - DNA, 25 bp, Artificial
  Probe
gactgactgttgtaacttcatgctt

SEQ ID NO: 94738 - DNA, 25 bp, Artificial
  Probe
gcttcttaggaaagtttaatgttgg

SEQ ID NO: 94739 - DNA, 25 bp, Artificial
  Probe
cgtgtttcttcatcaggatcttgta

SEQ ID NO: 94740 - DNA, 25 bp, Artificial
  Probe
tcttaggaaagtttaatgttggtgt

SEQ ID NO: 94741 - DNA, 25 bp, Artificial
  Probe
gtgtttcttcatcaggatcttgtat

SEQ ID NO: 94742 - DNA, 25 bp, Artificial
  Probe
tgcttcttaggaaagtttaatgttg

SEQ ID NO: 94743 - DNA, 25 bp, Artificial
  Probe
tgtaacttcatgcttcttaggaaag

SEQ ID NO: 94744 - DNA, 25 bp, Artificial
  Probe
ggttgactttcaggtactactttcc

SEQ ID NO: 94745 - DNA, 25 bp, Artificial
  Probe
gggttgactttcaggtactactttc

SEQ ID NO: 94746 - DNA, 25 bp, Artificial
  Probe
cttaggaaagtttaatgttggtgtt

SEQ ID NO: 94747 - DNA, 25 bp, Artificial
  Probe
ggactgactgttgtaacttcatgct

SEQ ID NO: 94748 - DNA, 25 bp, Artificial
  Probe
ttgtaacttcatgcttcttaggaaa

SEQ ID NO: 94749 - DNA, 25 bp, Artificial
  Probe
ttcttaggaaagtttaatgttggtg

SEQ ID NO: 94750 - DNA, 25 bp, Artificial
  Probe
tcaggatcttgtataatgactaaca

SEQ ID NO: 94751 - DNA, 25 bp, Artificial
  Probe
tgggttgactttcaggtactacttt

SEQ ID NO: 94752 - DNA, 25 bp, Artificial
  Probe
gttgactttcaggtactactttcct

SEQ ID NO: 94753 - DNA, 25 bp, Artificial
  Probe
ggatcttgtataatgactaacatgg

SEQ ID NO: 94754 - DNA, 25 bp, Artificial
  Probe
tggactgactgttgtaacttcatgc

SEQ ID NO: 94755 - DNA, 25 bp, Artificial
  Probe
cttcttaggaaagtttaatgttggt

SEQ ID NO: 94756 - DNA, 25 bp, Artificial
  Probe
tgactttcaggtactactttcctaa

SEQ ID NO: 94757 - DNA, 25 bp, Artificial
  Probe
ttgactttcaggtactactttccta

SEQ ID NO: 94758 - DNA, 25 bp, Artificial
  Probe
ttcttcatcaggatcttgtataatg

SEQ ID NO: 94759 - DNA, 25 bp, Artificial
  Probe
cactccagatgtaggtcagaacaaa

SEQ ID NO: 94760 - DNA, 25 bp, Artificial
  Probe
ggaaagtttaatgttggtgttaatg

SEQ ID NO: 94761 - DNA, 25 bp, Artificial
  Probe
aggtactactttcctaattcatggt

SEQ ID NO: 94762 - DNA, 25 bp, Artificial
  Probe
actacagtaaagtgaaagtttctga

SEQ ID NO: 94763 - DNA, 25 bp, Artificial
  Probe
tgtttcttcatcaggatcttgtata

SEQ ID NO: 94764 - DNA, 25 bp, Artificial
  Probe
tgactaacatggtttaaatgcaact

SEQ ID NO: 94765 - DNA, 25 bp, Artificial
  Probe
catgcttcttaggaaagtttaatgt

SEQ ID NO: 94766 - DNA, 25 bp, Artificial
  Probe
caggtactactttcctaattcatgg

SEQ ID NO: 94767 - DNA, 25 bp, Artificial
  Probe
aggaaagtttaatgttggtgttaat

SEQ ID NO: 94768 - DNA, 25 bp, Artificial
  Probe
ggtactactttcctaattcatggta

SEQ ID NO: 94769 - DNA, 25 bp, Artificial
  Probe
atgcttcttaggaaagtttaatgtt

SEQ ID NO: 94770 - DNA, 25 bp, Artificial
  Probe
ctgggttgactttcaggtactactt

SEQ ID NO: 94771 - DNA, 25 bp, Artificial
  Probe
tcatgcttcttaggaaagtttaatg

SEQ ID NO: 94772 - DNA, 25 bp, Artificial
  Probe
gatcctggactaatgttatgctcac

SEQ ID NO: 94773 - DNA, 25 bp, Artificial
  Probe
atcctggactaatgttatgctcaca

SEQ ID NO: 94774 - DNA, 25 bp, Artificial
  Probe
gactaatgttatgctcacaccacag

SEQ ID NO: 94775 - DNA, 25 bp, Artificial
  Probe
cagacaccatctcattggaagtatg

SEQ ID NO: 94776 - DNA, 25 bp, Artificial
  Probe
tcctggactaatgttatgctcacac

SEQ ID NO: 94777 - DNA, 25 bp, Artificial
  Probe
ccagacaccatctcattggaagtat

SEQ ID NO: 94778 - DNA, 25 bp, Artificial
  Probe
ggactaatgttatgctcacaccaca

SEQ ID NO: 94779 - DNA, 25 bp, Artificial
  Probe
ctggactaatgttatgctcacacca

SEQ ID NO: 94780 - DNA, 25 bp, Artificial
  Probe
cctggactaatgttatgctcacacc

SEQ ID NO: 94781 - DNA, 25 bp, Artificial
  Probe
tggactaatgttatgctcacaccac

SEQ ID NO: 94782 - DNA, 25 bp, Artificial
  Probe
atgaccatccaaattgagagctact

SEQ ID NO: 94783 - DNA, 25 bp, Artificial
  Probe
catgaccatccaaattgagagctac

SEQ ID NO: 94784 - DNA, 25 bp, Artificial
  Probe
gaagttcaatttccacaccatgacc

SEQ ID NO: 94785 - DNA, 25 bp, Artificial
  Probe
gttcaatttccacaccatgaccatc

SEQ ID NO: 94786 - DNA, 25 bp, Artificial
  Probe
acaccatgaccatccaaattgagag

SEQ ID NO: 94787 - DNA, 25 bp, Artificial
  Probe
gtctgaaccaaaagttgaacaagat

SEQ ID NO: 94788 - DNA, 25 bp, Artificial
  Probe
ccatgaccatccaaattgagagcta

SEQ ID NO: 94789 - DNA, 25 bp, Artificial
  Probe
agttcaatttccacaccatgaccat

SEQ ID NO: 94790 - DNA, 25 bp, Artificial
  Probe
tttccacaccatgaccatccaaatt

SEQ ID NO: 94791 - DNA, 25 bp, Artificial
  Probe
aatttccacaccatgaccatccaaa

SEQ ID NO: 94792 - DNA, 25 bp, Artificial
  Probe
actaatgttatgctcacaccacagc

SEQ ID NO: 94793 - DNA, 25 bp, Artificial
  Probe
tgaccatccaaattgagagctactc

SEQ ID NO: 94794 - DNA, 25 bp, Artificial
  Probe
aattgagagctactctgaggacatg

SEQ ID NO: 94795 - DNA, 25 bp, Artificial
  Probe
cacaccatgaccatccaaattgaga

SEQ ID NO: 94796 - DNA, 25 bp, Artificial
  Probe
aagttcaatttccacaccatgacca

SEQ ID NO: 94797 - DNA, 25 bp, Artificial
  Probe
tctctgtctgaaccaaaagttgaac

SEQ ID NO: 94798 - DNA, 25 bp, Artificial
  Probe
gtctctgtctgaaccaaaagttgaa

SEQ ID NO: 94799 - DNA, 25 bp, Artificial
  Probe
atttccacaccatgaccatccaaat

SEQ ID NO: 94800 - DNA, 25 bp, Artificial
  Probe
tctgaaccaaaagttgaacaagatc

SEQ ID NO: 94801 - DNA, 25 bp, Artificial
  Probe
ctgtctgaaccaaaagttgaacaag

SEQ ID NO: 94802 - DNA, 25 bp, Artificial
  Probe
ctgaaccaaaagttgaacaagatcc

SEQ ID NO: 94803 - DNA, 25 bp, Artificial
  Probe
ctaatgttatgctcacaccacagct

SEQ ID NO: 94804 - DNA, 25 bp, Artificial
  Probe
gaaccaaaagttgaacaagatccac

SEQ ID NO: 94805 - DNA, 25 bp, Artificial
  Probe
tgtctgaaccaaaagttgaacaaga

SEQ ID NO: 94806 - DNA, 25 bp, Artificial
  Probe
tctgtctgaaccaaaagttgaacaa

SEQ ID NO: 94807 - DNA, 25 bp, Artificial
  Probe
agacaccatctcattggaagtatgg

SEQ ID NO: 94808 - DNA, 25 bp, Artificial
  Probe
tgaaccaaaagttgaacaagatcca

SEQ ID NO: 94809 - DNA, 25 bp, Artificial
  Probe
gccagacaccatctcattggaagta

SEQ ID NO: 94810 - DNA, 25 bp, Artificial
  Probe
attgagagctactctgaggacatga

SEQ ID NO: 94811 - DNA, 25 bp, Artificial
  Probe
ttcaatttccacaccatgaccatcc

SEQ ID NO: 94812 - DNA, 25 bp, Artificial
  Probe
ctctgtctgaaccaaaagttgaaca

SEQ ID NO: 94813 - DNA, 25 bp, Artificial
  Probe
ttccacaccatgaccatccaaattg

SEQ ID NO: 94814 - DNA, 25 bp, Artificial
  Probe
caatttccacaccatgaccatccaa

SEQ ID NO: 94815 - DNA, 25 bp, Artificial
  Probe
ttgagagctactctgaggacatgaa

SEQ ID NO: 94816 - DNA, 25 bp, Artificial
  Probe
agagctactctgaggacatgaagag

SEQ ID NO: 94817 - DNA, 25 bp, Artificial
  Probe
tttgagtttatttattcgtgcttcg

SEQ ID NO: 94818 - DNA, 25 bp, Artificial
  Probe
ttgtgttgtttgtgaccgttcttag

SEQ ID NO: 94819 - DNA, 25 bp, Artificial
  Probe
cttgtgttgtttgtgaccgttctta

SEQ ID NO: 94820 - DNA, 25 bp, Artificial
  Probe
gtttgatccttgtgttgtttgtgac

SEQ ID NO: 94821 - DNA, 25 bp, Artificial
  Probe
ttgtttgtctatggaagatttgttt

SEQ ID NO: 94822 - DNA, 25 bp, Artificial
  Probe
tttgtttgtctatggaagatttgtt

SEQ ID NO: 94823 - DNA, 25 bp, Artificial
  Probe
tttgatccttgtgttgtttgtgacc

SEQ ID NO: 94824 - DNA, 25 bp, Artificial
  Probe
ctacgtttgatccttgtgttgtttg

SEQ ID NO: 94825 - DNA, 25 bp, Artificial
  Probe
tctacgtttgatccttgtgttgttt

SEQ ID NO: 94826 - DNA, 25 bp, Artificial
  Probe
cgtttgatccttgtgttgtttgtga

SEQ ID NO: 94827 - DNA, 25 bp, Artificial
  Probe
ctctacgtttgatccttgtgttgtt

SEQ ID NO: 94828 - DNA, 25 bp, Artificial
  Probe
cagaactctctacgtttgatccttg

SEQ ID NO: 94829 - DNA, 25 bp, Artificial
  Probe
tacgtttgatccttgtgttgtttgt

SEQ ID NO: 94830 - DNA, 25 bp, Artificial
  Probe
ctctctacgtttgatccttgtgttg

SEQ ID NO: 94831 - DNA, 25 bp, Artificial
  Probe
gaactctctacgtttgatccttgtg

SEQ ID NO: 94832 - DNA, 25 bp, Artificial
  Probe
agaactctctacgtttgatccttgt

SEQ ID NO: 94833 - DNA, 25 bp, Artificial
  Probe
acagaactctctacgtttgatcctt

SEQ ID NO: 94834 - DNA, 25 bp, Artificial
  Probe
tgttttgttttgttttgtttagggc

SEQ ID NO: 94835 - DNA, 25 bp, Artificial
  Probe
atttgttttgttccgctttgtctta

SEQ ID NO: 94836 - DNA, 25 bp, Artificial
  Probe
gctgtagagtctgattttgttttgt

SEQ ID NO: 94837 - DNA, 25 bp, Artificial
  Probe
actctctacgtttgatccttgtgtt

SEQ ID NO: 94838 - DNA, 25 bp, Artificial
  Probe
gttttgttttgttttgtttagggcg

SEQ ID NO: 94839 - DNA, 25 bp, Artificial
  Probe
cttcggttttgatgttctaaggttc

SEQ ID NO: 94840 - DNA, 25 bp, Artificial
  Probe
tctctacgtttgatccttgtgttgt

SEQ ID NO: 94841 - DNA, 25 bp, Artificial
  Probe
tcttcggttttgatgttctaaggtt

SEQ ID NO: 94842 - DNA, 25 bp, Artificial
  Probe
aactctctacgtttgatccttgtgt

SEQ ID NO: 94843 - DNA, 25 bp, Artificial
  Probe
tttgttttgttccgctttgtcttac

SEQ ID NO: 94844 - DNA, 25 bp, Artificial
  Probe
cacagaactctctacgtttgatcct

SEQ ID NO: 94845 - DNA, 25 bp, Artificial
  Probe
gatttgttttgttccgctttgtctt

SEQ ID NO: 94846 - DNA, 25 bp, Artificial
  Probe
gtcttcggttttgatgttctaaggt

SEQ ID NO: 94847 - DNA, 25 bp, Artificial
  Probe
gttcttagccttgtcctccaaactg

SEQ ID NO: 94848 - DNA, 25 bp, Artificial
  Probe
aagatttgttttgttccgctttgtc

SEQ ID NO: 94849 - DNA, 25 bp, Artificial
  Probe
gaagatttgttttgttccgctttgt

SEQ ID NO: 94850 - DNA, 25 bp, Artificial
  Probe
agagtctgattttgttttgttttgt

SEQ ID NO: 94851 - DNA, 25 bp, Artificial
  Probe
ttcggttttgatgttctaaggttcg

SEQ ID NO: 94852 - DNA, 25 bp, Artificial
  Probe
ttttgttttgttttgtttagggcgg

SEQ ID NO: 94853 - DNA, 25 bp, Artificial
  Probe
ttgagtttatttattcgtgcttcga

SEQ ID NO: 94854 - DNA, 25 bp, Artificial
  Probe
tacggtcttcggttttgatgttcta

SEQ ID NO: 94855 - DNA, 25 bp, Artificial
  Probe
ttgttttgttttgttttgtttaggg

SEQ ID NO: 94856 - DNA, 25 bp, Artificial
  Probe
ggtcttcggttttgatgttctaagg

SEQ ID NO: 94857 - DNA, 25 bp, Artificial
  Probe
ctgtagagtctgattttgttttgtt

SEQ ID NO: 94858 - DNA, 25 bp, Artificial
  Probe
ttgtttgtgaccgttcttagccttg

SEQ ID NO: 94859 - DNA, 25 bp, Artificial
  Probe
gttgtttgtgaccgttcttagcctt

SEQ ID NO: 94860 - DNA, 25 bp, Artificial
  Probe
acgtttgatccttgtgttgtttgtg

SEQ ID NO: 94861 - DNA, 25 bp, Artificial
  Probe
tgtctatggaagatttgttttgttc

SEQ ID NO: 94862 - DNA, 25 bp, Artificial
  Probe
gattctcattattaccgtagagggc

SEQ ID NO: 94863 - DNA, 25 bp, Artificial
  Probe
tgattctcattattaccgtagaggg

SEQ ID NO: 94864 - DNA, 25 bp, Artificial
  Probe
attctcattattaccgtagagggct

SEQ ID NO: 94865 - DNA, 25 bp, Artificial
  Probe
taacattatcttctgtctttgccca

SEQ ID NO: 94866 - DNA, 25 bp, Artificial
  Probe
ataacattatcttctgtctttgccc

SEQ ID NO: 94867 - DNA, 25 bp, Artificial
  Probe
ttctcattattaccgtagagggctc

SEQ ID NO: 94868 - DNA, 25 bp, Artificial
  Probe
attatcttctgtctttgcccaccat

SEQ ID NO: 94869 - DNA, 25 bp, Artificial
  Probe
ccaccatgattctcattattaccgt

SEQ ID NO: 94870 - DNA, 25 bp, Artificial
  Probe
aacattatcttctgtctttgcccac

SEQ ID NO: 94871 - DNA, 25 bp, Artificial
  Probe
cattattaccgtagagggctcagtg

SEQ ID NO: 94872 - DNA, 25 bp, Artificial
  Probe
tcattattaccgtagagggctcagt

SEQ ID NO: 94873 - DNA, 25 bp, Artificial
  Probe
ctcattattaccgtagagggctcag

SEQ ID NO: 94874 - DNA, 25 bp, Artificial
  Probe
caccatgattctcattattaccgta

SEQ ID NO: 94875 - DNA, 25 bp, Artificial
  Probe
accatgattctcattattaccgtag

SEQ ID NO: 94876 - DNA, 25 bp, Artificial
  Probe
tgccttgagaaagaataacattatc

SEQ ID NO: 94877 - DNA, 25 bp, Artificial
  Probe
tctcattattaccgtagagggctca

SEQ ID NO: 94878 - DNA, 25 bp, Artificial
  Probe
atgattctcattattaccgtagagg

SEQ ID NO: 94879 - DNA, 25 bp, Artificial
  Probe
ccatgattctcattattaccgtaga

SEQ ID NO: 94880 - DNA, 25 bp, Artificial
  Probe
cattatcttctgtctttgcccacca

SEQ ID NO: 94881 - DNA, 25 bp, Artificial
  Probe
gccttgagaaagaataacattatct

SEQ ID NO: 94882 - DNA, 25 bp, Artificial
  Probe
aataacattatcttctgtctttgcc

SEQ ID NO: 94883 - DNA, 25 bp, Artificial
  Probe
ttgcccaccatgattctcattatta

SEQ ID NO: 94884 - DNA, 25 bp, Artificial
  Probe
ttatcttctgtctttgcccaccatg

SEQ ID NO: 94885 - DNA, 25 bp, Artificial
  Probe
acattatcttctgtctttgcccacc
